United States Patent Application Publication US 2007/0054278 A1 - sequence listing, part 119

SEQ ID NO: 189423 - DNA, 201 bp, Homo sapiens
ttattgattatattctagtccagaagatataacaattattttgaaaaaaagttacattacctgtaatggtccccttttgagtatagtctttttttttttttgagacagagtctcgctctgtcgctcaggctagagcacagtggcgcaatctcagctcactgcaacctccgcctcccgggttcaggcgattctcctgcctca

SEQ ID NO: 189424 - DNA, 201 bp, Homo sapiens
ctgtcacccaggctgcagcacagtggcacgatctcagctcactgcaacctccgcctcctgggttcaagcgattctcctgcctcagcctctcgagtagctgrgattacaggcgtacaccaccatgccccactaatttttgtatttttagtagagatggggtttcaccatgtgggtcaggctggtctccgattcctgacctca

SEQ ID NO: 189425 - DNA, 201 bp, Homo sapiens
ttttttgtttgttttttgggttttttttttttttttttttgagatgaaatctcgtctgtcacccaggctgcagcacagtggcacgatctcagctcactgcwacctccgcctcctgggttcaagcgattctcctgcctcagcctctcgagtagctgggattacaggcgtacaccaccatgccccactaatttttgtattttt

SEQ ID NO: 189426 - DNA, 201 bp, Homo sapiens
agcaattcttctgccttagcctcctgaatagctgggactataggcacccgccaccatgcctggctaattttttgtatttttagtagagacagggtttcacygtgttagccaggatgatctcggtctcctgacctcgtgatccacccgcctctgcctcccaaagtgctgggattacaggcgtgagccaccacgccaggccaa

SEQ ID NO: 189427 - DNA, 201 bp, Homo sapiens
cgtgagccaccacgccaggccaagacattttatttaatatagtaacacattgattccacaaaagaacactgagggatagatgttaatttttccatttacaygtgaggaatttaaactgaaaggtgaaataattggttcagcattatgctcaaaaccaaagcgttgtctgcatttttatttagcagttctacttccgcagtc

SEQ ID NO: 189428 - DNA, 201 bp, Homo sapiens
agagggtattctacaaatgcacttaatattaattttctaattatttgcatatatctttcttttaggatccttcctgagcgtttcctggcagttttaaaacraaaaatcagtgttaagtttgatgcagttattggatataaaatgaaagcgcaataagcacctagttttctgaaaactgatttaccaggtttaggttgatgt

SEQ ID NO: 189429 - DNA, 201 bp, Homo sapiens
aactctctattttcagttcaagcaagtttgctgctgttggatttcataaaactttgacagatgaactggctgccttacaaataactggagtcaaaacaacmtgtctgtgtcctaatttcgtaaacactggcttcatcaaaaatccaagtacaaggtaagttgagaaattgagacaaaaggattggtggttgctatgaatac

SEQ ID NO: 189430 - DNA, 201 bp, Homo sapiens
agattgtgccactgcactccagcctggcaacagagagagacttcgtctcaaaaaataataataataataataatatctaacttatttagaatgctataagrtttaaatcatacaatgtattgcacttagcataaaatctgaaatcctgcaagtgttcaataacaggaggttgcctgttggcattacatttcaattccactt

SEQ ID NO: 189431 - DNA, 201 bp, Homo sapiens
taagatttaaatcatacaatgtattgcacttagcataaaatctgaaatcctgcaagtgttcaataacaggaggttgcctgttggcattacatttcaattcyacttcctgttattcacacaaaacagggagttcccacctctaattttagcttccagaatgctttgccccagtggaattcatcatatatgctctgacgccta

SEQ ID NO: 189432 - DNA, 201 bp, Homo sapiens
tggtgtgaatttaggtaggttgttgtaaagttacacgatttagacttgtggccatatacttaatccttagagtctcttcacaaaggtgtgtactaatgaaagaagatggccagcacccgtatgccttctattgttacctgcataaaaatctgcaggaacaatatatgagttaattcaatcttcacattgaatgagaaccac

SEQ ID NO: 189433 - DNA, 201 bp, Homo sapiens
ataaaatgctatcagacagcatcacatgctacagagaaatttttcatgaaaggaagagtcaatcgaagccacaaacttcattgtcatttttttttttttttgagacggagtctcactctattgcccaggctggagtgcaatggcacaatctccgctcactgcaacctccgcctcctgggttcaagtgattcttctgcctca

SEQ ID NO: 189434 - DNA, 201 bp, Homo sapiens
ccggggtttaagcaattctcctgcctcagcctcctgagtagctggcattatacacgggagccaccacgcctggctaatttttgtatttttagtagagacarggtttcaccatgttggtcaggctagtctcgaactcctgacctcatgatctacccacctcagcctcccaaagtgctgggattacaggcgtgagccactgtg

SEQ ID NO: 189435 - DNA, 201 bp, Homo sapiens
gaaagcaaagcagctcttatgggtataaacaaatcacatgcacacctcgttttattgcacttcatagatattgggggttgcttttttttttttttttttttgacgaagtcttgttctgtcacccaggctggagtgcaatggcacgatcttggctcactgcaacctcccgcctccggggtttaagcaattctcctgcctcag

SEQ ID NO: 189436 - DNA, 201 bp, Homo sapiens
ctcagtcattgagcttatctgttcctttgatttcaactttcacctttatgggaaaactctggaatctctaccgtttaatttatagccccttgtttccagtyctatttcgagtctttttctcccttggagttacctcacattctgttgttgccactacagttcatgaacttccttgactaacttctctgtctgattgtttca

SEQ ID NO: 189437 - DNA, 201 bp, Homo sapiens
tagacgaaaaacttagagtgattccttttactttgcaaattcatcactttcatttcacaaaagttaagacgttaagtccagtgaaatccctctgttctgcrtatttgaggactgattatagcctaatcagatcaccagactttatatagtttaagagagaatagcatatctgaatattataatggactttcagagcagagt

SEQ ID NO: 189438 - DNA, 201 bp, Homo sapiens
ctgggaagcatggcaaaactctgtctctacaaaaaatagaaaaattagccaggtgtggaggcatgctcctgtcgtcccagctactctgcaggccaaggtgwgagaatcacctgattccgggaggtcaaggctgcagcagtgagccaagatcatgctgctgcactccagcttgggtgacagagtgagaccctgtctcaaaaa

SEQ ID NO: 189439 - DNA, 201 bp, Homo sapiens
accaaagaagacttccaaattccaaacgtcaacatcatatgtgtgcatgtgttttaaaatgtttttgttatttttacattgtcaaaatccacgtaatccasgtaactttttattctcacgtgttcaggaagaaattcccttactgttttatttagaagttaaaaaccacttgtcttgtctattggaatgacaggtgagtaa

SEQ ID NO: 189440 - DNA, 201 bp, Homo sapiens
gtatgtctttcctgatttttgattctttttgataccaaatagaattttaaaaggtatttgaagggagaagttactacatgactgtagtgtgtggttggctrgaaaattttgatctgcatcatttgaaaaattaagctgggtgaataggaataccagtgataaaattgagtgtgcctgtaaagaaacatttttctggaatgg

SEQ ID NO: 189441 - DNA, 201 bp, Homo sapiens
atttaaacgtctttggaacttcagtctcccttttggtaaaacgagattcatgctgcccaaggtggttgtgaagagtaagtgaggcattgtgggtaaactgyctgaatagtggttggctgcttaataaatatgcgttccctcatctctctgtttgccatttatctttcttgaagtcagccctgtggacctggatcttgtttc

SEQ ID NO: 189442 - DNA, 201 bp, Homo sapiens
gatctatctcaaaaagaaaagaaaaaaaaatagtctttggctaggcaaggtggctcatgcctgtaatcccagcactttgggaggacgcaggaggatctccygaggccaggtgttcaagatcaacctgggcaacatagtgagacccctgttcctactagaaaattaaaaaattagctggaaatggtagcatgcacctgtgtc

SEQ ID NO: 189443 - DNA, 201 bp, Homo sapiens
gctggacagtggcaagatctcggctcactgcaagctccgcctcccaggtccatgccattctcctgcctcagcctcccgagtagctgggactacaggcgccygccaccacgcccggctaattttttgtatttttagtagagacggggtttcaccgtgttagccaggatggtctcgatctcctgacctcgtgatttgcctgcc

SEQ ID NO: 189444 - DNA, 201 bp, Homo sapiens
gctgcacgcccaataccaagaacaagcgatgtttgcttttaactgagggcaaagtaacttgcccactcgtgcagagagagccaggggtgggaccctaggcyggtctggctctaaagctggtaacttccttgttgtggccgttagtcataaatgtgtgcaggtgagaacagctaaccgcaatcttggtcatactgtgctggg

SEQ ID NO: 189445 - DNA, 201 bp, Homo sapiens
tttagttagtatatataagtattaatatttgtgagtatgatactaatttaaaattttggctccaaggacaaagctgtcgaacattgcttgtttatttatttcctttgcacattttgcataaacctgattatatcagaagaagccttgatgtgtgagacccaagtggtatccttgttttggcagtgctcatccagattgttg

SEQ ID NO: 189446 - DNA, 201 bp, Homo sapiens
tgcatcgctgcaacacagcctgggtgacagagtgagatcctgtctctaaaaaataaaattaataaaataaaatctatctgtaggctcagctatatgttctrtggatgccactgtgttattaaagtacacaatcttaagtttttatgtgttttaattccctattttatgaactactgcttggaatagtggggaacataatgc

SEQ ID NO: 189447 - DNA, 201 bp, Homo sapiens
ttttagttagtatatataagtattaatatttgtgagtatgatactaatttaaaattttggctccaaggacaaagctgtcgaacattgcttgtttatttatttcctttgcacattttgcataaacctgattatatcagaagaagccttgatgtgtgagacccaagtggtatccttgttttggcagtgctcatccagattgtt

SEQ ID NO: 189448 - DNA, 201 bp, Homo sapiens
gatgccactgtgttattaaagtacacaatcttaagtttttatgtgttttaattccctattttatgaactactgcttggaatagtggggaacataatgcaawagaattaattcattaagagaataaaagtttagaagattagatctagaattattgtcagtaccaactgaagttcattaaatgagaatgcaagcaacagtaa

SEQ ID NO: 189449 - DNA, 201 bp, Homo sapiens
cttttagttagtatatataagtattaatatttgtgagtatgatactaatttaaaattttggctccaaggacaaagctgtcgaacattgcttgtttatttatttcctttgcacattttgcataaacctgattatatcagaagaagccttgatgtgtgagacccaagtggtatccttgttttggcagtgctcatccagattgt

SEQ ID NO: 189450 - DNA, 201 bp, Homo sapiens
catattttttgagtcataagacttgggtttcaagtggatcctataaagttgatctctttgtatgctacgtttagggaagtgagtgtttgtttttaaaaatctatttagttcatccatagactaaattgtttaagcaaaacaatatatcactatatattatatattaggtttgctattgagctctaaaaagcattcagaaag

SEQ ID NO: 189451 - DNA, 201 bp, Homo sapiens
acttttagttagtatatataagtattaatatttgtgagtatgatactaatttaaaattttggctccaaggacaaagctgtcgaacattgcttgtttatttatttcctttgcacattttgcataaacctgattatatcagaagaagccttgatgtgtgagacccaagtggtatccttgttttggcagtgctcatccagattg

SEQ ID NO: 189452 - DNA, 201 bp, Homo sapiens
aacctgggaggcagaggttgtggtgagccgagatcgtgctgttgcactccagcctgggcaacaagagtgaaactccgtctcaaaaaaaccccccaaaaaaygaacaaaaaaaacaaaccatggcttagtgcctgtagtcccagttactctggaggctgaggcaggaaaattgcttaaggccaagagttcgagacctgcttg

SEQ ID NO: 189453 - DNA, 201 bp, Homo sapiens
cacatgcctgtaatcccagctactcgggaggccgaggcaggaaaatcgcttgaacctgggaggcagaggttgtggtgagccgagatcgtgctgttgcactycagcctgggcaacaagagtgaaactccgtctcaaaaaaaccccccaaaaaacgaacaaaaaaaacaaaccatggcttagtgcctgtagtcccagttactc

SEQ ID NO: 189454 - DNA, 201 bp, Homo sapiens
gattgcttggaccaaggattttgaggctgcagtgagcaatgattgtgccactgcactccaccctgggcaacagagcaaggccctgtctcaaaaaaaaaaaatcattcactgaaagaatatttattaaatgcctgctaagtagcaagcagtgccctttagcaggaaagcgtttggaagaaattgtcctaagtaggtgtgtgg

SEQ ID NO: 189455 - DNA, 201 bp, Homo sapiens
ggctgaggtgggaggattgcttggaccaaggattttgaggctgcagtgagcaatgattgtgccactgcactccaccctgggcaacagagcaaggccctgtytcaaaaaaaaaaaatcattcactgaaagaatatttattaaatgcctgctaagtagcaagcagtgccctttagcaggaaagcgtttggaagaaattgtcct

SEQ ID NO: 189456 - DNA, 201 bp, Homo sapiens
tgttacaggcttttggtggtttttagtactgttctcagtgagtcataatttgaaattaattataatctgtttgttgcagcttgtatatgaatttttcatamgatttttggaaagccaagaattccaacccagcattgccaaaaaatatatagatcagaaatttgtattacaggtaagcaaattattgtggttgtgtgtatt

SEQ ID NO: 189457 - DNA, 201 bp, Homo sapiens
gacgaacttatactgaaaaattatttgtcgtttatctgaaagtcagatttcaccagtgtcctgagttctatttggcacctctagttattttcatttattgkatattaggtgccagacattctgagatgaatagagtccttgagtgcttcaaaatctaactgggggagacaaaaagaagggatgtgaggaagagagtaccgg

SEQ ID NO: 189458 - DNA, 201 bp, Homo sapiens
tattgtggttgtgtgtatttgtcatccagttaacactttatctcattttctcttcatgtttgttaaaaaagttttgcaatgacagttatatcacccacaawatatatatatatatataaacataagttaatttccattactgcctattaaaagtaataggtacatttaagtttatttatggtagaaatcaattacatttta

SEQ ID NO: 189459 - DNA, 201 bp, Homo sapiens
ctctaagcccattgtatatatacatcctggtgctggtcactttcctaatttgtgtaatacctgtctttggggggttttgtgaggactagcgacaatatttrtaaaagttttagaacagtctctaacatgtggcaagtattcagtaaatactatttttacatttcaatgattttattagatacttgattttacgatcattgg

SEQ ID NO: 189460 - DNA, 201 bp, Homo sapiens
tattttttgagtcataagacttgggtttcaagtggatcctataaagttgatctctttgtatgctacgtttagggaagtgagtgtttgtttttaaaaatctwtttagttcatccatagactaaattgtttaagcaaaacaatatatcactatatattatatattaggtttgctattgagctctaaaaagcattcagaaagaa

SEQ ID NO: 189461 - DNA, 201 bp, Homo sapiens
gtgggcactagccatacagtggccaatcatctggagtcagtagggggagactgcttccatctaagagtcatcttttcgttttccatttcagttcaaagcasgaatatttttatctttcatggcacaaaattatttttccactcaagagccatttctgggagtgtgcaaagaaaatttcaaaactctagtgtttaacaacac

SEQ ID NO: 189462 - DNA, 201 bp, Homo sapiens
tggtggaaagcaaaaggggagcatgtgtgtcacgtggtgagagaggagcaagacagagggggcagaggtgtcaggcttttttttttttttttttttttttwaaacaaccacatctcacggtagctaatagagtgagaactcactcattacttcaaggacagcaccaagccattcatgagggacccacctccatacctccat

SEQ ID NO: 189463 - DNA, 201 bp, Homo sapiens
gggagtgggtgggcctttggggcttgagggattgatgctgatattttaccccattatcccccgtctcactcattcctcctcctctttcccactgtgacttmactgtccttgaattgacaggtccttctaacctctgcactcggtagtcaggtctttttcacacccccgcttgtccttgcatttttctgaactccatcgtct

SEQ ID NO: 189464 - DNA, 201 bp, Homo sapiens
tttgaagaattctgatgttctctaaaatcttactttacatggaatagggcagggtaattctttattatagcagagagcaactgggttgttttgctcgaaaycttttgctcttaatgacttttaaaaatagttttgataatgcctacttttaaaattccaatatgtttatatgatttttaatgaaaaatagcagtctcttgc

SEQ ID NO: 189465 - DNA, 201 bp, Homo sapiens
tggaacccacacaggagggaagaagggtaaactgggggagcacacgttaggtttgattctttggctgtctcacctaaggcccgtttcataaacctagactstgcctattgattggaagagattgttcagactgtggttcttagcgcagaaccagacctctaacggtgtcatttgatggcggactttttccctaagctgtca

SEQ ID NO: 189466 - DNA, 201 bp, Homo sapiens
tttatccactggcgggggcggggaataaagaggggtttggtgtgaggaggattctctagcagcttatcgtctccagggcttggggtgtgggttaggagcaragggagtatgtaagcatccccacagacaaaccccttccctgtctttccctacttccccttaccccctttggattatcctgagccatggaaatgccccatg

SEQ ID NO: 189467 - DNA, 201 bp, Homo sapiens; identical to SEQ ID NO: 32901

SEQ ID NO: 189468 - DNA, 201 bp, Homo sapiens
aacttttgagtaaatagggtatattgaacccatgcatatgtttacttttattccctaaaatctccccacaattactgaaatgaaaaagttattactgaaargaaataaaacccacaagaacaaagcaaaatagagagatctcaaaattaacattttggaagctagaaagcaaatgaacagtggttactaccttggtccatc

SEQ ID NO: 189469 - DNA, 201 bp, Homo sapiens
tttggcattatggaggtcaaggaacaagtatttttttaaaaatgagcatcatcggctgggcgcagtggctcatgcctgtgatcccagcactttgggaggcygaggcgggtggatcatgaggtcaggagtttgcgaccagcctggccaccatggtgaaaccctgtctctattaaaaatacaaaaattagctggacgtggtgg

SEQ ID NO: 189470 - DNA, 201 bp, Homo sapiens
agcatcatcggctgggcgcagtggctcatgcctgtgatcccagcactttgggaggctgaggcgggtggatcatgaggtcaggagtttgcgaccagcctggycaccatggtgaaaccctgtctctattaaaaatacaaaaattagctggacgtggtggcgggcgcctgtaatcccaactactcgggaagctgaggcaggaga

SEQ ID NO: 189471 - DNA, 201 bp, Homo sapiens
tactccagcctgggcaacaagagcgaaactccatctaaaaaacaaaaaaagaaagaaaaaagaaaggagaaaaaaaaaaaaagagcatcaccagaaaggcytaagcgttactcagaagcttagaaaagagaggccatgtctttgtcagcttgggctgccataacaagactggcgacttaaacgacatttattttctcacag

SEQ ID NO: 189472 - DNA, 201 bp, Homo sapiens
ggaatgtccaaagagaccacgggaggatgccagtaaagaaggaggcacctaggattttcctctaaccagttagaatgttcagaacagcctcattcttactyctttttttctccctctccttgcctcctgctttatctgtgtcagttacgtcatttgctttgatgattcccaaacacattgtcctcgtccatgcctctgtcc

SEQ ID NO: 189473 - DNA, 201 bp, Homo sapiens
atgccctctacctggaatgccctttccttcatccttcgaagccgagcttaaatgccacttgcctatgttacatttctttcttcttttttttttttttgagrtggagtcttgctgtgttgcccaggctgcagtgcagtggtacagtcacagttcactgcagcatctgcctcccgggttcaagcgattcttgtgcctcagcct

SEQ ID NO: 189474 - DNA, 201 bp, Homo sapiens
aaatagaaaagtaatggtaccaactctgttggttgtgaggaaatgagatattatatatgtgggacacttagcacagtgcctggcatatagtgaacatgcartaatgattgttttctttgtactctcagggtctggtgcctaatgagtctcagggttttgttttgttttttgaaccaagctgaataatgtaaatggaaaaat

SEQ ID NO: 189475 - DNA, 201 bp, Homo sapiens
cccatctcaaaaaatatatatatattaaaatgtgattaatatttaattttacctctaattgaatgatttacaaatagccttttgaaatacttttgtttggraagatttataattttgttttatctttgtctttttctctctcttaacattttatttttcttttcccaaaggtggcagaaagagcactctattattggaata

SEQ ID NO: 189476 - DNA, 201 bp, Homo sapiens
ctgtgcataaagctattgagttttttccttgctctttgctgaagttgcctaattgtaccccaaatcttaagcagcacaattttgtttacagtcatgcattrcttaacaaccagtatatgttctgagaaatgcatccttaggcaattgtattgtgtgaacatcataagtatacagtaattacacaaacctagatggtgtagc

SEQ ID NO: 189477 - DNA, 201 bp, Homo sapiens
ccttggcctcccaaagtgctgggattacagaggtgtgagccacggcgccgggcctatcgccttcattcccaaaggaaagagacttacttaagtttaaaatrctccccgagggaaataaaaatgtatgcattttttttctatgcacagtagaatcatggaaatatttttaaagtgggaggaacccttgtttggtcattttat

SEQ ID NO: 189478 - DNA, 201 bp, Homo sapiens
gccctacggggtcagttttgcttctcaggggccggtgcagtgtgtgagtgtccctcgttctatgtaatatatataccaagtagagtattttttccaagtaygtagaatttttccaagtaccctatggtgaattctttgtggaacgaacatcttctaacatgggataatgactggttcatgtatgtttggttttatgtgtaa

SEQ ID NO: 189479 - DNA, 201 bp, Homo sapiens
ggggtttctccatgttggccaggctggtctcgaactcctgaccacaggtgcgtccgcctgcctaggcctcccaaagtgctgggattcttggcatgagccaycgcgcccggccgccattgttatttcttgtctcacaattcattatacatttccgaggcattttgcagatagtttgtacattcacttttagatattcttaca

SEQ ID NO: 189480 - DNA, 201 bp, Homo sapiens
gtcattgcagcctcggctgctggggttcaagcaaacatgtccggctaatttttgtatttttagtagaggcagggtttcaccatgttggccaggctggtctkgaactcctgacctcaaatgatccgcctgtctcggcctcccaaagtactgggattacagacatgagccaccacgcccggccggtcttagtaatactttaag

SEQ ID NO: 189481 - DNA, 201 bp, Homo sapiens
caaaaaaagaaagaaaaaagaaaggagaaaaaaaaaaaaagagcatcaccagaaaggcctaagcgttactcagaagcttagaaaagagaggccatgtcttkgtcagcttgggctgccataacaagactggcgacttaaacgacatttattttctcacagccctggaggccagaagtttgagatcaggatgacagcatggtt

SEQ ID NO: 189482 - DNA, 201 bp, Homo sapiens
ggttcaagcaaacatgtccggctaatttttgtatttttagtagaggcagggtttcaccatgttggccaggctggtctggaactcctgacctcaaatgatcygcctgtctcggcctcccaaagtactgggattacagacatgagccaccacgcccggccggtcttagtaatactttaagatttctttcagctctaagatttc

SEQ ID NO: 189483 - DNA, 201 bp, Homo sapiens
agcaaacatgtccggctaatttttgtatttttagtagaggcagggtttcaccatgttggccaggctggtctggaactcctgacctcaaatgatccgcctgyctcggcctcccaaagtactgggattacagacatgagccaccacgcccggccggtcttagtaatactttaagatttctttcagctctaagatttcataact

SEQ ID NO: 189484 - DNA, 201 bp, Homo sapiens
aaggatggagaaagactacctctttgtgggaggagctataaaattatactgcagtggcatgaacacaaggagggaaagaatttgtggccatttctgcaatctgccataaatgtacttgggacttctcaccttggttcaatggatactgtctttattttgaaatatgtctagaatccaaccacttctcactatcttctctgc

SEQ ID NO: 189485 - DNA, 201 bp, Homo sapiens
gtgggaggagctataaaattatactgcagtggcatgaacacaaggagggaaagaatttgtggccatttctgcaatctgccataaatgtacttgggacttcycaccttggttcaatggatactgtctttattttgaaatatgtctagaatccaaccacttctcactatcttctctgcctcctttgctacttcctagtccaaa

SEQ ID NO: 189486 - DNA, 201 bp, Homo sapiens
agttattttgccatgttgttttttgaagggaaaggaaatactgtcatacgtttatgcatctgtatataaaatggttagaaatggtatcatataggtattgyatgtttgtgatcataactgcctgaataaaggttaaaatgtcatgggaaaatgggaaaacttaagcaggaggaaatagagatagtttatttttagcaattt

SEQ ID NO: 189487 - DNA, 201 bp, Homo sapiens
aataatgttgctggataaacggtgaacaccaatacatcccagtgtatgatgcagaataatccacaaagcatgatttatagaagtagtgatatttaacaaaraaaatcttcaacacttaatatgtaaaatgaacagtgcaaattgtttttaagtcttggtcttgaaaaatactgtagatggcttaaccatatgcttggctgg

SEQ ID NO: 189488 - DNA, 201 bp, Homo sapiens
ctgggctggagtgtagtggcgtgatcttggctcattgcaatctccgcctcccaggttcaagcgattcttgtgcctcagcctgtagagacagggttttactrtgttggccaggctggtctctaactgctgacctcaggtgatctgcctgccttggcctcccaaagtgctgggattacaggcatgagccactgtgcctggcca

SEQ ID NO: 189489 - DNA, 201 bp, Homo sapiens
tatgaaaggctgaggcgggaggatcgcttgagcccaggagttgggaccagctcgggcaacatagggaaaccttgtctctacaaaaatcaaagaaactagcygggcaaggtggtacatgcctgttttctcagttacttgggaggctgaggcaggaggatcatttgcacgcaggaggttgaggctgcaatgagccatgattgc

SEQ ID NO: 189490 - DNA, 201 bp, Homo sapiens
tgaatgataatgttcacaaaaacaacattatgtgtatttgaagtaggtatataatgagggaaaccaaggctccaagaaatcactgacagtgcagaattcaktaagtgtgattaaattggaatgtcagtcagaattgttttccaagttatcttcttgacttggtagatgctgaagtttctattctacctcgagttcttactt

SEQ ID NO: 189491 - DNA, 201 bp, Homo sapiens
caaagactctgaagcgaaagcttcaatcagaggagggtatttcagttgtgtatactgtttgacttcaactttattgaagcttgagatagtgtcccgtatarttgtttattttctcccatctgttaacatttttgacatttatttttttcttcttttttcccctctctaagtagttttgcaggtgggcttgcttagggttgt

SEQ ID NO: 189492 - DNA, 201 bp, Homo sapiens
catttatttttttcttcttttttcccctctctaagtagttttgcaggtgggcttgcttagggttgtacggaggtatggccaggtcagaaatacagaagtgrcatgggaagctagggagactgaagataaagacacagagatattgcatgttcagcagggtagagttatgaaaagagggataggtttgggagctaggcagaa

SEQ ID NO: 189493 - DNA, 201 bp, Homo sapiens
gagccaccatgcctggcctttttgtttttgctttttgttttttgagataaggtctggctctattgctcagcctggtgtgcagtggcgtgatcttggctcaytgcagcctccgccccctgggctcaagccatcctcccatctcagcctcccaagtagctaggtaactacaggcacgcaccaccatgcttggctagtttttgt

SEQ ID NO: 189494 - DNA, 201 bp, Homo sapiens
cagtcttgacaataaaacaaactcagtttcctgtcatatctggggcttagactggacagacatttgctggttcacaagaattgctgctggcattaacctgrcactttgcagctctccttgaaatatgccgtagaaaacattgggctggagcccaggacctaaagagcatagtacctttgtgtctgggggatgtgcaagtgg

SEQ ID NO: 189495 - DNA, 201 bp, Homo sapiens
tgcattcagataaaatgttttgttaacagtctggtttactgtatttattagtttcagatgtcggagtcagccagatgtgtttcatgccttctcatattacycccctttcttgcgtaaaccaaaccccaacaactaaataaataaagatttcaccaaaggtcatgttttcagaataccatctaaatagaggctaaaatcacg

SEQ ID NO: 189496 - DNA, 201 bp, Homo sapiens
gatattctagtcctttctcttaccctggcccctcttgccttatagggattcatatcagctcagaggccccagttctggctcatcacaattaatgaaagatragcgctatataagtttctcctctggtcttctgtgtagtttcccttccactcagatggacacccaggctctctttatttttgtttgatgtgtgttcaggaa

SEQ ID NO: 189497 - DNA, 201 bp, Homo sapiens
tcccctgcctcccaagctctacaatctgttcatttgtttttaatatgcaggaagtgaattttaggttctccatgtttttatcccttcattagtgtgtatarttaagaggtaacaggatttgatgtggttttccaaagttttatgtaacatgagaagcacacttagtgagtggttcatatttttgaaagattgtacagtatt

SEQ ID NO: 189498 - DNA, 201 bp, Homo sapiens
atccactcacctcggcctcccaaagtgctgggattacagacgtgagccatcacacccagctgagattcttatcttggtaattttttgcacagagaactcarctctctatcatactacattttaatgagctacacggtgatttatgacttgtgctctttccttttctaatcagctcatcaacaccatacccattctatgtca

SEQ ID NO: 189499 - DNA, 201 bp, Homo sapiens
ccaacaactaaataaataaagatttcaccaaaggtcatgttttcagaataccatctaaatagaggctaaaatcacgcgtgactcatggcaacagttttttkttgttgttgttgttttccaagacggagtcccactctgtcacccaggctggaatgcagtggtgcgatcttggctcactgcaacctctgcctcctgggttca

SEQ ID NO: 189500 - DNA, 201 bp, Homo sapiens
caaaccactccaaaacttggtggcttaaaacaacaggcatttatttagttcaccattttgtggtttggcaatttaagctgggctcagctatgtgatggttstcttctcctctgagctcactcatgaacatcccgtcagatggatagtctcactcacatacatgacggttggcaagggctacagggatgcctgggctttgtg

SEQ ID NO: 189501 - DNA, 201 bp, Homo sapiens
cccgtttgaagtctccagtgggcgggcgccggaggcgggcgctgctggccagaaggttcggttgcgcgtgtgccatggactcagccgcccggtgatattgwcaataggagagagaaaggggcattgactgggacccaccgcgggtagcgaaaggtggctctggcagcggcggctccagctcctgcggctcctcctccttat

SEQ ID NO: 189502 - DNA, 201 bp, Homo sapiens
cccttcctatcctgagttttctgcctcattgttgagttttctttagcttgtctctagctgccccatggttccatttttaaccttctgttcttcgttttccmcttactcagtcattgagcttatctgttcctttgatttcaactttcacctttatgggaaaactctggaatctctaccgtttaatttatagccccttgtttc

SEQ ID NO: 189503 - DNA, 201 bp, Homo sapiens
gccgtagggctttgcatttgtggttttctctaccggatactcagcgtgtctcctttctttacttctttaaggtctctgtttatatgtcaccttctcagagrggctgtcaatgatacactacataaaataacattcttgcttaccagtctctggcttgctgtattttattccttagcacttatcaccacttgacagttgttt

SEQ ID NO: 189504 - DNA, 201 bp, Homo sapiens
cacaaccagacataccaaaaagggaggggagatctatatgtatcaacaatttatattgttcatttttgaaaaaaaagactggcattgtgtttcacacaatrcctagaatatggaaaatattcagtaaacattctgtgtcttaaacgctcgtgctatcactgtgacaaagctactgtttttaggctcattttgtaaaagata

SEQ ID NO: 189505 - DNA, 201 bp, Homo sapiens
accttctcagagaggctgtcaatgatacactacataaaataacattcttgcttaccagtctctggcttgctgtattttattccttagcacttatcaccacytgacagttgtttattttctatccccttcagttagactgcatgctccatgagggcagtgaccttgagtattttgtttgctgtttatccccagtgcctagaa

SEQ ID NO: 189506 - DNA, 201 bp, Homo sapiens
aatattgagagggctcataccttagagttgtaaggattcaatgcagtgatatatggaaaaggcttattgtagatgctcaggaaatgttagctaatatatakagaaggcatattttctgaagaattcaggaaaatgataccagaagggcttaaatgggcacccaggacacagttttatgtgccattgtggtccctatgaaac

SEQ ID NO: 189507 - DNA, 201 bp, Homo sapiens
ggtgccactcaagctggatctctacaaaggggactcatacaaactgaggctccggaagaaaagagttctgtgggtttatgataaatccctagggtcaggcwtctcaaacttatctaatcaagtgcccctaggcataagagaattacccttgctggggccggttgcggtggctcacgcctgtaatcccagcactttgggagg

SEQ ID NO: 189508 - DNA, 201 bp, Homo sapiens
cctgccgccaatccctgatcaggtctcagccgaacatgctgtcaggggagtgaaggcggatactggccaatgaggcctcgcttcccgtttgaagtctccartgggcgggcgccggaggcgggcgctgctggccagaaggttcggttgcgcgtgtgccatggactcagccgcccggtgatattgacaataggagagagaaag

SEQ ID NO: 189509 - DNA, 201 bp, Homo sapiens
ctctcttttgaacacatacaaccttggatggaggagtcattgtgccagtgaccttcacggtattacataaccgcttattgattgctcattatttatggccrtgcttctgtgggatccctttcctgggagcagggatggcctctgctggccagaggttttcactggaagataggtgacggaagcatccactgcctggtctgc

SEQ ID NO: 189510 - DNA, 201 bp, Homo sapiens
caaatatttacatgctcagaaaatatttgtcaaagaatgaatgaaagaaacactaccttttattgaaagccttgcctgactttacacaacgttgtgatttygtctcttggatacctagggtgtatatattttttcatattgattataatactccccacattgctttgtaatttatttgtagtattttctccctcacccagt

SEQ ID NO: 189511 - DNA, 201 bp, Homo sapiens
gctcagaaaatatttgtcaaagaatgaatgaaagaaacactaccttttattgaaagccttgcctgactttacacaacgttgtgattttgtctcttggatayctagggtgtatatattttttcatattgattataatactccccacattgctttgtaatttatttgtagtattttctccctcacccagtgataccttgggag

SEQ ID NO: 189512 - DNA, 201 bp, Homo sapiens
ttcttgattactttagtccttaatgatccccatcttcttaacctaagtcatgcaagacatatttatgtgaacagcatggtatcattcattcattcagcaamcattgcattaggaacttggctagatgctggagtgacaaagatgaccaagacagcattttttttttaacagtgtttactgaacacatattttatgctatgc

SEQ ID NO: 189513 - DNA, 201 bp, Homo sapiens
aactttattatacttattaaggtcaactcttatttctcatatgtggtctggctccttaagtggaagatagagttatataatatgttttctgaaagggaaartcattttcagtacaatctgaagagaaaatgtttgtactaccccatggcatgtttagctaaactctgggttacagtattagacatagaatgctgaattata

SEQ ID NO: 189514 - DNA, 201 bp, Homo sapiens
gagtgattcaaaacttctcatattccctagctcttttaatctatttcatttctgaataatgaagtgatgtattcaaattttgcactcagaggacactggcrtgtgattttgggactgcatgcttaatcagaacttgaaagagtttttgttttgtttgctttgcttttaaaaccagggttctgcccttcttagtaaagcata

SEQ ID NO: 189515 - DNA, 201 bp, Homo sapiens
ttattaaggtcaactcttatttctcatatgtggtctggctccttaagtggaagatagagttatataatatgttttctgaaagggaaagtcattttcagtayaatctgaagagaaaatgtttgtactaccccatggcatgtttagctaaactctgggttacagtattagacatagaatgctgaattatatcaaaattcagaa

SEQ ID NO: 189516 - DNA, 201 bp, Homo sapiens
atataatatgttttctgaaagggaaagtcattttcagtacaatctgaagagaaaatgtttgtactaccccatggcatgtttagctaaactctgggttacartattagacatagaatgctgaattatatcaaaattcagaaaaaggctgtgcttagaattgcactgtaagcatgcatatctttaggtttcagtgactgtctt

SEQ ID NO: 189517 - DNA, 201 bp, Homo sapiens
caaaactctaatttttatttggaaataattttagacaaagtagcaaaaatagagaactcagattgcttcccctaatactggcaactaactgtcttttccaytttttattgctgagtatggttccgttttgaatatatgtcaccaccatattttttaacagctttattgagacataattcacgtactatacagttcactcat

SEQ ID NO: 189518 - DNA, 201 bp, Homo sapiens
atcttgtccaatgcattctactttccaaaagatgtacttggggagattatagaagtctagagagctcttagtagttgcgcctgtggtttggctttgatcayccataagcagatgtcagctttgtatatcataaagctatggaccttagaggacccagagatgtgtgcgagtgttcatacccagggtcttgctgaacctctc

SEQ ID NO: 189519 - DNA, 201 bp, Homo sapiens
cttgaattctgacataccatgatagaaacgttctaaatcttggtgtcatcaggaagcttgttgatacctaaaattaagaattttggtattggctgggcgcrgcagctcatgcctgtaattcctgcattttggaaggccagagggcagattgcttgaacttaggagttcaagaccagcctgggcaatgtggcaaaaccccat

SEQ ID NO: 189520 - DNA, 201 bp, Homo sapiens; identical to SEQ ID NO: 32902

SEQ ID NO: 189521 - DNA, 201 bp, Homo sapiens
acatattaatataagatgttagtggttttctctcacagtacaagaagatgggtaaaaagagaatgtagatttatatggcatttactcttattttcttattrctggtgtgctctttttgagagagttggtattgtttcatttagtagatttttcaggtttctttcagaaagaaacttcatacagatcaagccaaaacaaaac

SEQ ID NO: 189522 - DNA, 201 bp, Homo sapiens
aggggattctcttaaaatcattcacacggctgggtacagtggctcacacctgcaatctcagcactttgggaggccaaagtgggaggattgcttgatctcasgagtttgagactagtctgggcaacatagcaagaccctgtctctacaaaaagaataaaacaaaaattaggtaggcatggtggtgtgcgcctctagtcttag

SEQ ID NO: 189523 - DNA, 201 bp, Homo sapiens
ttttttttttttttctgagatagaatcccagtctctcttccaggctggagtgcagtggtgcgatctcagctcagtacaacctctgcctcccaggtccaagygattctcctgcttcagcctcccgagtagccgtgattacaggcacgcagtgccaccacgcctggctaatttttgcatttttagtagagacgggttttgccg

SEQ ID NO: 189524 - DNA, 201 bp, Homo sapiens
ttgctttgcaaagtgctgaatgaggcaggcctgaagaaaatgtgaggtgatattggatccatgattatgtgccccaaacattagatagggtggaatgatgraagtggactagtagggaagaatgagctacttctgcaaattgtaaacaaccttccctttaaatcatgattagggtgaggggagtgccccccagcaagagct

SEQ ID NO: 189525 - DNA, 201 bp, Homo sapiens
gggcaacatagcaagaccctgtctctacaaaaagaataaaacaaaaattaggtaggcatggtggtgtgcgcctctagtcttagctatttgggaggctgagktgggaggattgcttggaccaaggattttgaggctgcagtgagcaatgattgtgccactgcactccaccctgggcaacagagcaaggccctgtctcaaaaa

SEQ ID NO: 189526 - DNA, 201 bp, Homo sapiens
ctggctaatttttgcatttttagtagagacgggttttgccgtgttggccaggctggtctcgaactcctgacttcaggtgatccacccacctcggcctcccraagtgctgggattacaggtgtgagcccctgcacccagccttatttctcataataacaagatactaccaaatattgattaatttagagaaatctctaaatt

SEQ ID NO: 189527 - DNA, 201 bp, Homo sapiens
ggcgtgaacccaggaggcggagcttgcagtgagccgagattgcaccactgcacttcagcgtgggcaacagagcgagactccgtctaaaaaaaaaaaaaaartacagttgaaatcggtactgtcattacagctagaattctgttgtccgtgcttctagaaaagtattggaagaaaggaataatatggctcagagatccccaa

SEQ ID NO: 189528 - DNA, 201 bp, Homo sapiens
tggcgtgaacccaggaggcggagcttgcagtgagccgagattgcaccactgcacttcagcgtgggcaacagagcgagactccgtctaaaaaaaaaaaaaawatacagttgaaatcggtactgtcattacagctagaattctgttgtccgtgcttctagaaaagtattggaagaaaggaataatatggctcagagatcccca

SEQ ID NO: 189529 - DNA, 201 bp, Homo sapiens
ctgggtgacagagctagactccgtatcaaaaaaaaaaaaaagcgaattcgagttttaaataagttgttaaaataaggcattaccttactggatattaatargggaacatagttcagggaactgaggaactaatgcatttttttttggttaggttctttcagataagctggctcttttcactccttcttatatttatacata

SEQ ID NO: 189530 - DNA, 201 bp, Homo sapiens
tcccagacacgttcgctgtcctttttaaactctctgcattactgttctccaagttttgattttggagtcatatactcaaaactgttcatacacacatacayacatacacatatgtatgtatacacatatgtatacacacatacatacgtaagtacacacttgtaagtttctccgtctttattgttttatgcttgaataatt

SEQ ID NO: 189531 - DNA, 201 bp, Homo sapiens
ggtggagaaacatattctggaaaccaacttaaaattttaagaattcttctagagcagtggaatctgaccttatgggatcttaccaagctgtgataatgggwtcaattattctctcttttgaacacatacaaccttggatggaggagtcattgtgccagtgaccttcacggtattacataaccgcttattgattgctcatta

SEQ ID NO: 189532 - DNA, 201 bp, Homo sapiens
gcagtgagccgagatcgtgccactgcactgcagcctgggtgacagagctagactccgtatcaaaaaaaaaaaaaagcgaattcgagttttaaataagttgwtaaaataaggcattaccttactggatattaataagggaacatagttcagggaactgaggaactaatgcatttttttttggttaggttctttcagataagc

SEQ ID NO: 189533 - DNA, 201 bp, Homo sapiens
tgcactaaaataaaattgaatctccttcccgtagcttacccatctgagctcagtttccatagctaggaaatggggataattgtggctttaactagaatatrgtaagttccatgagggcatgggtttttatctgctttgttcactactgttttcctagtgcctagaacagtgtgtacacgtaataggcacttaataattatt

SEQ ID NO: 189534 - DNA, 201 bp, Homo sapiens
aatataagtatttctgcacagaagatagttttaataagttatgaaataggaaattgattccatacagtatttatagatacttgataaatatttgtcaaacraatgatgacttttttgtggaaagcactttccaccctagaaatgatttttcatttaatctttactcaaccctgtgaagtacattttctttttcttttcttg

SEQ ID NO: 189535 - DNA, 201 bp, Homo sapiens
tccttcccgtagcttacccatctgagctcagtttccatagctaggaaatggggataattgtggctttaactagaatatagtaagttccatgagggcatggrtttttatctgctttgttcactactgttttcctagtgcctagaacagtgtgtacacgtaataggcacttaataattatttactggatgaataaacacattc

SEQ ID NO: 189536 - DNA, 201 bp, Homo sapiens
agattgttgcagtcttcataaattctagcttctctgtcccagatgctctgtttgtcattcattcttccatccaaatgctaactctcttcacccttcaggaktttgacacgttgctgatgcatgtactgatagctgactcatctcacctattgagtcagcatcttacctttcctctaatcaagttacaactttattttgaag

SEQ ID NO: 189537 - DNA, 201 bp, Homo sapiens
cacagtgaggtggctattttatgatttgtatttttacatttctgctgtcatatatatttttctctcttttaggcagctctgacctgtgatatgttcaaaaytgtattaaggttttagttacagatactctggttgggtagtggagctcaaaccaaaaccaaccttctctctttggtggtggaaatggaagctggcacattc

SEQ ID NO: 189538 - DNA, 201 bp, Homo sapiens
atgtatatagggatttgtgactaatgaagaattatttaaggctggatcagtggttcatgcctgtgatcctagcactttgttaagccaaggtgggaggattrcttgagcttggggaagtcgcggctgcagtaagccatgtttgtgccatctcgctccagcctgggtgacagagtgagaccctgtctgggaaaaaaaaaaatt

SEQ ID NO: 189539 - DNA, 201 bp, Homo sapiens
acttcattgcttgccttttaaaaatattgctaatttacttttagaccataaaaatgaaatatacaacaaaaaaacatcaagtctcttaaagaaaaactgtraataaaatctgtgtgggcactgtggctcacccctgtaattacagtgatttgggaggctgagacgggaggatctcttgaggccaggagcttgagaccaacc

SEQ ID NO: 189540 - DNA, 201 bp, Homo sapiens; identical to SEQ ID NO: 32904

SEQ ID NO: 189541 - DNA, 201 bp, Homo sapiens
gcttgccccactgccgggcggaagcggcggctgcaccgcccgagatcgcggctgcatccgggttcctcaagcttcggcccaatcctcgaccttctctcttyccaccctcccgtttctccgccctcctgccgccaatccctgatcaggtctcagccgaacatgctgtcaggggagtgaaggcggatactggccaatgaggcc

SEQ ID NO: 189542 - DNA, 201 bp, Homo sapiens
atcattcactgaaagaatatttattaaatgcctgctaagtagcaagcagtgccctttagcaggaaagcgtttggaagaaattgtcctaagtaggtgtgtgkgtgagatggggtggaaagaagcaaaaacatgagagcgaataatagaaataaaatatttatgtaatacagtataatgtaaaaggtgcttcccagttttgtg

SEQ ID NO: 189543 - DNA, 201 bp, Homo sapiens
aaggttcctgagaccttttcaggggtctgtgaggtcaaaactaattttatagtaatacttaagacattatatgtttttccctctcccatgaccgtgttttscagaatctgcattacctgtactgttgcaggaaattgaagcaaaagtgggttttgagaatccagttgctttctattaagccagatgttaaagagatgtata

SEQ ID NO: 189544 - DNA, 201 bp, Homo sapiens
ttcccatttttaattttaatgtggtaaatattggtagatataatccatatttttaaaaagctctttgagatcctgagtaattgtgaaaccaaaagtttcaytgagacctctgggtttcagtttcaccgttctcaaaaagaggccagatgttaggttgcagaggaccacaagttgtcattcgatgtgtcccaagtcatttga

SEQ ID NO: 189545 - DNA, 201 bp, Homo sapiens
gtctttgatttaagtatttgtaaagtgtgttggaaacaggccaggacttagactgcccctttatatccagacacccccttctaatggatgtcatgtggtaygtgtgttctggtttcacgtgacggattgggtgactccgtgacccaagatcatcccatctataggcaagatataatgtggcccagagcttctacccaacag

SEQ ID NO: 189546 - DNA, 201 bp, Homo sapiens
tttgattttgacgtagaatctttctcttaagtgcagagaacacttatgcttattaataaatatgtctgaagtgtttccaccaaacattttagaccataacygctttcaagtgaccagagaggagagagcactttgccagtcttgctggaaagccttgccagtccacaggccagcttagaagatgagaatctcccctctttg

SEQ ID NO: 189547 - DNA, 201 bp, Homo sapiens
cggtggaaataatctatacctgtgcctgattcttgattgggaagaaaaatttggaagtagtttagagagtgattcaaaacttctcatattccctagctctwttaatctatttcatttctgaataatgaagtgatgtattcaaattttgcactcagaggacactggcgtgtgattttgggactgcatgcttaatcagaactt

SEQ ID NO: 189548 - DNA, 201 bp, Homo sapiens
agtgaccagagaggagagagcactttgccagtcttgctggaaagccttgccagtccacaggccagcttagaagatgagaatctcccctctttgtggcaatygaaagagggctaaaacccacttgatggggtcatttgaataaggctgacattctgtatgtaaaactgagagttgacagatgagtgtattagaaaaggaaca

SEQ ID NO: 189549 - DNA, 201 bp, Homo sapiens
gtccacaggccagcttagaagatgagaatctcccctctttgtggcaatcgaaagagggctaaaacccacttgatggggtcatttgaataaggctgacattytgtatgtaaaactgagagttgacagatgagtgtattagaaaaggaacaattctctgaggtcttaggacttgggcattattttgactagcaaaataacatg

SEQ ID NO: 189550 - DNA, 201 bp, Homo sapiens
gttcactactgttttcctagtgcctagaacagtgtgtacacgtaataggcacttaataattatttactggatgaataaacacattcagattatgtggataycccaaagcctttcttctttcctctttcagagcagtatattatgtagctcagtattttctgcattacataggaaggccagctaaggcttctgatgcaatat

SEQ ID NO: 189551 - DNA, 201 bp, Homo sapiens
acaaagctgtcgaacattgcttgtttatttatttcctttgcacattttgcataaacctgattatatcagaagaagccttgatgtgtgagacccaagtggtrtccttgttttggcagtgctcatccagattgttgcagtcttcataaattctagcttctctgtcccagatgctctgtttgtcattcattcttccatccaaat

SEQ ID NO: 189552 - DNA, 201 bp, Homo sapiens
gccaggccccaatcaggtgtccagttgtctagctttgttgatgttcccttccgagtggcccccttcataatatgaaggttttgctgtcactgtacatagaygctagagcagcctgcccaaatactcattttaaagcatggtataggtggatcttgctgtgtcatcttagaatagacaacagacctttagtttcagccattc

SEQ ID NO: 189553 - DNA, 201 bp, Homo sapiens
acaatctatacataagacatctggttttatcagaaatttgaaacttacgcatttttatgtgtactctccattctcaaagagagcctggtgcgtgtttttgmagatttatgtaatatgagagtttctggaatctagatgaatgtcattcagagtggtctctcttgaacttgccccacttggcttttttcaaagaaatgttgt

SEQ ID NO: 189554 - DNA, 201 bp, Homo sapiens
tgcctattctgcttatttcacataaatggagtcatacattgtatggccttctgtgtctggtttcttttacttacttagcatgatgtttgaaagattcattsatgttgtaacatgtatcagttactttgttcctttttatggctgaataatattccatggcatcccattttgtttatcagttgacggatatttgggttgttt

SEQ ID NO: 189555 - DNA, 201 bp, Homo sapiens
aaagcaattcaacctaactggctttctaattgaccttaggctgtgctggtgataatacaggtttgaactctcagttagactccaaatcatatgcaagttcwacaaatgtcaggtgttcaaaacaaaatgaaacaaccaaacttctgtgtcattacattttcctgaacagtaaattaaatccaaacaaggttgaagtcttga

SEQ ID NO: 189556 - DNA, 201 bp, Homo sapiens
tgtttcttctcattctcttagctggctcttcctcctctactcaacttgtaagtgttgggtttcttcagagctccttctgcttcactttctgcactcttgcygtaggtgagttcatccggcctattggctttaagaccacttatatattaccatttatatgttgttggtgtccacatttcttttcttcctttttttccccca

SEQ ID NO: 189557 - DNA, 201 bp, Homo sapiens
agtcacgttggggattaggacttcaacatatgaattgtggaggggacacaattcaatttgtcgaagaaagaaaaaaggattttaaattatttggcagaagwaaaattgagaacaaagggaagaggctcttatttattaagtgttcattaataaatgtttgctggttcatccacaaacatttattaatgaatttgctggttc

SEQ ID NO: 189558 - DNA, 201 bp, Homo sapiens
ttccctttcttcaattgcctgttaaacttctgatcattttaatatgttctttctgcctcatttcaggaatcatatttaatagaatagttgttatgtcctaraaagccctgctaatacagatttaagtatgacattaaatgtgtaacaataattactaattattcctaaagtatatttgaataattactaattatttctaaa

SEQ ID NO: 189559 - DNA, 201 bp, Homo sapiens
ctgtttcttctcattctcttagctggctcttcctcctctactcaacttgtaagtgttgggtttcttcagagctccttctgcttcactttctgcactcttgscgtaggtgagttcatccggcctattggctttaagaccacttatatattaccatttatatgttgttggtgtccacatttcttttcttcctttttttccccc

SEQ ID NO: 189560 - DNA, 201 bp, Homo sapiens
tgtgactaatgaagaattatttaaggctggatcagtggttcatgcctgtgatcctagcactttgttaagccaaggtgggaggattacttgagcttggggargtcgcggctgcagtaagccatgtttgtgccatctcgctccagcctgggtgacagagtgagaccctgtctgggaaaaaaaaaaattacttaaaagtacttc

SEQ ID NO: 189561 - DNA, 201 bp, Homo sapiens
tagaaaatttggttagaattttagttcttattcttacagttgaatatgtatgtatgcatgtatgtatgtatgtatgcatgtatgtatgtatgtatgtatgyatgcatgtatgtatgtatgtatgtatacatgggttttctccattgtggccactctggtctccaactcctagccacaagtgatcctcccgcctcggcctcc

SEQ ID NO: 189562 - DNA, 201 bp, Homo sapiens
tttttttacgaaatgatgcagatgctgatactctatggctgtaatccaaatatttagtaggtattgtggcctttataagcctactcctgagaacagcccaytaattaaatgggaggtgtggagatttggtccttgtaaatcaccatttagaaatggagatgtattggattcatattttgtgtgtgtgtacgtttgtagtaa

SEQ ID NO: 189563 - DNA, 201 bp, Homo sapiens
ccacaatacccagctttattaatatatccaaacttctattttgtgaatatttattaaatgcttagtatatgctgggaagacaaatgtgttgtatattcctrattagttattagtagggagagacaaatacctaaacagatagttgctgcagcgtgcagtggacactgtaagagagtttatatgcccaggagtacaaaggaa

SEQ ID NO: 189564 - DNA, 201 bp, Homo sapiens
attatttaaggctggatcagtggttcatgcctgtgatcctagcactttgttaagccaaggtgggaggattacttgagcttggggaagtcgcggctgcagtragccatgtttgtgccatctcgctccagcctgggtgacagagtgagaccctgtctgggaaaaaaaaaaattacttaaaagtacttcctgaattcataaaaa

SEQ ID NO: 189565 - DNA, 201 bp, Homo sapiens
gcccctgcagctcaaaggatgggagagatcacatcaggttcagggaatcagccaggaaagtcttcatgaaagaagtgtcatttgagagaaccctctaaggrtggttggagagaaaggctggagtggaaaggggccttcagagttaacagaccaggggttagacatgggattagctgagccacagactgggacttaaagttt

SEQ ID NO: 189566 - DNA, 201 bp, Homo sapiens
atttttagattctttttttcacactacatctttgaagtctcatgtgtattttatatttacagcatatctcaataaggactggtcatactgctttttttttwaaattatagattcagggagtccacgtacaggtttgttacatgaatatatcactctatgctgaggtttggtttcgaattgaacttgttatccaaatagtga

SEQ ID NO: 189567 - DNA, 201 bp, Homo sapiens
tgtctttatttatttattactgtgccactgagtaacaaagcttcctgacactgtcattttgataaagcccgctttctttcctttctttaataatatttcasttctgcctcagggttaagagcccagcatttaactggtattttaggttcacttaaagggaccatcaggtagtttgctctctgggattcactcccactctga

SEQ ID NO: 189568 - DNA, 201 bp, Homo sapiens
tcctgcctcagcctcctaagtagctgggactacaagcacccgccaccacgcctggctaattttttgtatttttactagagacagggtttcactgtgctagycaggatggtctcgatctcctgacctcatgatccacctgcctcggcctcccaaagtgctgggattacaggcgtaagccaccgcgcccagccctaaacaact

SEQ ID NO: 189569 - DNA, 201 bp, Homo sapiens
acagcacggaaagccagcccgctgatccgctagtcgcacacctcccggaattaaagagctcctctcaggcccagcggcttctcacttcagcttgccccacygccgggcggaagcggcggctgcaccgcccgagatcgcggctgcatccgggttcctcaagcttcggcccaatcctcgaccttctctcttcccaccctcccg

SEQ ID NO: 189570 - DNA, 201 bp, Homo sapiens
atggaggaagaggatttactgaaatgttgtagtgttagagttagagtgaagtctaaataattcacatacccgaatggaaaatcggcccctaaatttacaaygtacaaataagatgtggagcttttggctgatgcagtcattttgatattttaaagtgatcttaacatctatagtcattcatagtttgtgattctattttga

SEQ ID NO: 189571 - DNA, 201 bp, Homo sapiens
cattcagattatgtggataccccaaagcctttcttctttcctctttcagagcagtatattatgtagctcagtattttctgcattacataggaaggccagcwaaggcttctgatgcaatatctcctttctttttcccttctcactttttacgcatgttctcctgtccctccctgtcttatgtttgggtcattaggaggatat

SEQ ID NO: 189572 - DNA, 201 bp, Homo sapiens
aggagaattgcttaaacccaggaggtagaggttgtagtgagctgagaatgtgtcactgccctccagcctgggcaacagagtgagactctgtctcataaatraataaataaataaatggcggtacagtcttctaaggtatgaataagtagttacttacttaagaccactttcttattgataacatctggagcatttttattt

SEQ ID NO: 189573 - DNA, 201 bp, Homo sapiens
gctggttgaagggaagtcgtaggttgatagttatctgaaaagtcatttatttcttcataaaaataatttctagtaatcactggaagggacaaaaataaaayaatagaactgtgtgtgctgtcattagcgatagcaaaagcatattctcacatgatcatttttttctgtcatctaggctaacgaataagaaagttggtctac

SEQ ID NO: 189574 - DNA, 201 bp, Homo sapiens
ttgaaaaacatccttttctaaaaccatgtcaagcaaagcatgatgtagacttaaaaagaaaaaaagaaaagaaaagaaatgatgtcaagaggttagtgaartggacagagaggtcaacctgatagtatacatttgtttaaaagcatgcatatattttgtagtttcttttgtaagtagaacttagagaatttaagcaatctt

SEQ ID NO: 189575 - DNA, 201 bp, Homo sapiens
ttaataaagataattttcatctgtattgggatggttgggaaaatggtttctttatgatcccccaaccccttctttagacctaaatgaattagcaatacttygattatttcattgggtggattattgtggcaagagtttagcaacatatttctaaagattactttcaactactctgcaaatctgaaaaacagtcagtggttg

SEQ ID NO: 189576 - DNA, 201 bp, Homo sapiens
tcctgtctctacctatttttgaagaccatcctttagtttgcgtttcctgccatgtttgaggggcctttttttggtccataactcttgtcttttattcaaaktaaaacaccgaacaaaagcacattcgattattgaccatgaggtttttattctgctgtcagtgtcaacctcatgtctaaatcacctgaggtcaaacttaca

SEQ ID NO: 189577 - DNA, 201 bp, Homo sapiens
ctggtgttttcagatgtatatagggatttgtgactaatgaagaattatttaaggctggatcagtggttcatgcctgtgatcctagcactttgttaagccarggtgggaggattacttgagcttggggaagtcgcggctgcagtaagccatgtttgtgccatctcgctccagcctgggtgacagagtgagaccctgtctggg

SEQ ID NO: 189578 - DNA, 201 bp, Homo sapiens
ctgcgcccggcccttattaacattttctatgcagatcctggctctccctcttacaagtgtctgactgtggacttgtcatttaatttgtctctaccttggtytcctgatttgtaaagtgggagataataatagtatgtagatgtagagttgtaagaattaaatgagttaacatgtggaaagcacttggctccaatttgtact

SEQ ID NO: 189579 - DNA, 201 bp, Homo sapiens
cacaaacacacacacaaatttatgttaataataatcagtggtagtagcacctggctgggtgatttatgttctctcctcaccccagcctcctgtgcctcatwtccttgcgttgactttaagcaattctgtaagtttagatttgggtgaacgttttctgaagaatactgcctctttgaagatggaattatagtgaaagtagca

SEQ ID NO: 189580 - DNA, 201 bp, Homo sapiens
atgttaataataatcagtggtagtagcacctggctgggtgatttatgttctctcctcaccccagcctcctgtgcctcatttccttgcgttgactttaagcrattctgtaagtttagatttgggtgaacgttttctgaagaatactgcctctttgaagatggaattatagtgaaagtagcattgttatttcttttgtttgtt

SEQ ID NO: 189581 - DNA, 201 bp, Homo sapiens
tactaataatagagaggaaggccctacggggtcagttttgcttctcaggggccggtgcagtgtgtgagtgtccctcgttctatgtaatatatataccaagyagagtattttttccaagtacgtagaatttttccaagtaccctatggtgaattctttgtggaacgaacatcttctaacatgggataatgactggttcatgt

SEQ ID NO: 189582 - DNA, 201 bp, Homo sapiens
ggtcctcaagagtcctagcttaccactagctgggttgccttggacaaatgcgttaactgctgaaagctttggttttccttgtctgtaaaatgatgatgacrttaatagtcaatagatgtgacagtgccacattcagtaaatactagctgttgttatttaatgggggtttcaaaagttagaatatgaataatatgaaatttt

SEQ ID NO: 189583 - DNA, 201 bp, Homo sapiens
agcagtttttaaatatggtgaatttaatataatagctattctaaacatcttcacctggagagttgcatctactgcattagtatcttgccatgttatttagtgtaatgctttttatttttaatttattcattttttgaatagataatacagccatatggttcaaattccaaaggttacaaaaggaagtgtagtgaaaaatct

SEQ ID NO: 189584 - DNA, 201 bp, Homo sapiens
ggtaacacagttccatgatagctttcatgaaagtctttttgggaatttttaaatttatatttatatttatatttaattaaattaatttatttatttaagakggagtcttgctctgtcgcccagtctggagtacagtggtgcgatcttggctctctgtaacctctgcctcctgggttcaagcaattcccttgcctcagcctt

SEQ ID NO: 189585 - DNA, 201 bp, Homo sapiens
gcctggctaattttgtatttttagcagagacggggttttcccatgttggccaggctggtgtcgatctcctgacctcaggtgatctgcccaccttggcctcycaaagtgttgccattataggcatgagccaccgtgcccagtctgaaattaattttaataatatactttctttaactcagtatatctaaaatattatcattt

SEQ ID NO: 189586 - DNA, 201 bp, Homo sapiens
tgctgggattacaggcatgatccaccatgttggcctctgtgaatgtttcatttcctactgaaaagtttgtcatttttttttggttgtcttttttttttttttaaatggctgtacagccgggcgcggtggctcacgcttgtaatcccagcactttgggaggctaataggggcagatcacctgaagtcaggagttcaagacca

SEQ ID NO: 189587 - DNA, 201 bp, Homo sapiens
tgtgtgtctttgagacagagtctcactctgtcacccaggctggagtgcagtggcgcgttcttggctcactgcaacctcctcctcccgggttcaagtgattstcctgcctcagcctcccaagtagctgggattactggtgcatgcctctgggccagctaatttttgtatttttagtagatacggggtttcaccatgttagcc

SEQ ID NO: 189588 - DNA, 201 bp, Homo sapiens
agctattatggtgagtgcctgacattttgatttgaagtgtgtctctgcctgtgtattttagaaccagaaaaattcttggaaaactacctttttttttttttaaactgtgtacccagataaaatagtttgttattccaaatctagaattgagattttaatttttattaatttttatttctgtcagtctttcaggcatttggc

SEQ ID NO: 189589 - DNA, 201 bp, Homo sapiens
ggattacaggcatgtgccaccatgtccggctaatttttgtgttttttgtagagacgggtttcaccatgttgaccaggctggtctcgaactcctgacctcargtgatccacctctgcctcccaaagtgctagaattacaggggggagccactgcacctggccaggttcatgtgtttttatactcatttagttaccctgtatt

SEQ ID NO: 189590 - DNA, 201 bp, Homo sapiens
gcctcctgaatagctgggattacaggcatgtgccaccatgtccggctaatttttgtgttttttgtagagacgggtttcaccatgttgaccaggctggtctygaactcctgacctcaggtgatccacctctgcctcccaaagtgctagaattacaggggggagccactgcacctggccaggttcatgtgtttttatactcat

SEQ ID NO: 189591 - DNA, 201 bp, Homo sapiens
gacatcttgcattaatcattgatttacctttccactttctgcataaaccttgagcaggttcatgtgttttttgtgtttgtttttttttgtttgtttgtttktttttttgagatggagtctccctctgtcgcccaggctggagcacactggtacagtcttggctcactgcaacctctgcctcccagtttcaagcgattctcc

SEQ ID NO: 189592 - DNA, 201 bp, Homo sapiens
aaaaaccacactgtttgtctttaggaccttaagtctcaagaaaaaaacaaacattttaaaaatccctcaagacttggttgatactacctgaaaaagctctctaaattacaaagaagagatattaagttcatttctgataagatggttagttttgttgactgaattgacatcatgctcaaaataagacataagctgtaggaa

SEQ ID NO: 189593 - DNA, 201 bp, Homo sapiens
caaaggttcatacacacaaaacttgaaaaacatccttttctaaaaccatgtcaagcaaagcatgatgtagacttaaaaagaaaaaaagaaaagaaaagaartgatgtcaagaggttagtgaagtggacagagaggtcaacctgatagtatacatttgtttaaaagcatgcatatattttgtagtttcttttgtaagtagaa

SEQ ID NO: 189594 - DNA, 201 bp, Homo sapiens
ttacatatatctggatagcctttttgatgacgatggtagtctaatttgtgtgttatgtgctcttgaaatgttttgctgtaaagacactagaactgaatttygctttattgcaatgatgatgaatgttaaaaaaaacaactcagtaacattcaaaccaatttccaagtttgttcttcagccagaggaacttgcacactgact

SEQ ID NO: 189595 - DNA, 201 bp, Homo sapiens
gtagtctaatttgtgtgttatgtgctcttgaaatgttttgctgtaaagacactagaactgaattttgctttattgcaatgatgatgaatgttaaaaaaaamaactcagtaacattcaaaccaatttccaagtttgttcttcagccagaggaacttgcacactgactttttgtaaaggtagcagatttattgtgttgtaatt

SEQ ID NO: 189596 - DNA, 201 bp, Homo sapiens
gacacagaggtcgtagtggaaaaggtgataggggactgagtattgagaggagagcagcatactaagggctgggacttgttctacctctagtgctgaccttyatttttctttttggggaggttgtgtacttcttcactggatgaaatcatgacttggaggcgttcatttgaattttgcattcagtattcccagatcctgaac

SEQ ID NO: 189597 - DNA, 201 bp, Homo sapiens
gggagattttcttttaccggaacctcattttccaagttcttcattttgctgggcataatttgataagacttagtctatccttgtcctttttacttgagggmgatgcagtgtgtattttgaatacaccagtgcatgatcctgaggggcctttctttggtgagtgtatcttcagaaacagagataatcagtatccatcttcag

SEQ ID NO: 189598 - DNA, 201 bp, Homo sapiens
cctacggggtcagttttgcttctcaggggccggtgcagtgtgtgagtgtccctcgttctatgtaatatatataccaagtagagtattttttccaagtacgyagaatttttccaagtaccctatggtgaattctttgtggaacgaacatcttctaacatgggataatgactggttcatgtatgtttggttttatgtgtaaat

SEQ ID NO: 189599 - DNA, 201 bp, Homo sapiens
gtgagtgtccctcgttctatgtaatatatataccaagtagagtattttttccaagtacgtagaatttttccaagtaccctatggtgaattctttgtggaaygaacatcttctaacatgggataatgactggttcatgtatgtttggttttatgtgtaaatttttcttaaaataatccaaactctcattaatcctccttgtt

SEQ ID NO: 189600 - DNA, 201 bp, Homo sapiens
tccctgtctttccctacttccccttaccccctttggattatcctgagccatggaaatgccccatgcctgctgattagaggatgataaagcttcgggagccstggcccagggcgaaacctgtttccctgggctttgcacggacccgctgttaccttacgttcagttttgcagtgcttcagggttgcgatccttgacgtttat

SEQ ID NO: 189601 - DNA, 201 bp, Homo sapiens
aagtagagtattttttccaagtacgtagaatttttccaagtaccctatggtgaattctttgtggaacgaacatcttctaacatgggataatgactggttcrtgtatgtttggttttatgtgtaaatttttcttaaaataatccaaactctcattaatcctccttgttcttatggattttttttcatgatgtgcctcacatc

SEQ ID NO: 189602 - DNA, 201 bp, Homo sapiens
aatgactggttcatgtatgtttggttttatgtgtaaatttttcttaaaataatccaaactctcattaatcctccttgttcttatggattttttttcatgawgtgcctcacatcttgtattttgcttgtacttacaggtcatgttccttggggaactggaagaaatattggatgtgattgaaccttcacaatttgttaaaat

SEQ ID NO: 189603 - DNA, 201 bp, Homo sapiens
ttacttgagcttggggaagtcgcggctgcagtaagccatgtttgtgccatctcgctccagcctgggtgacagagtgagaccctgtctgggaaaaaaaaaaattacttaaaagtacttcctgaattcataaaaatgttttgttattgtattttctttagtgatattaatgaagatccaagacacttaaaaacattccaaagg

SEQ ID NO: 189604 - DNA, 201 bp, Homo sapiens
acctcctttgctctggaacagttgttttcagacttcagtgggcataggaatcacctgagaaattggttggagttgttgatttgctatcttttacctgggggatatgcagtccaggtggttcaaatgctttttgagcagactggatattgctttggcagtgtcatagtgcttgtttctaacctctacatagaggcctgttcc

SEQ ID NO: 189605 - DNA, 201 bp, Homo sapiens
tgctggggttcaagcaaacatgtccggctaatttttgtatttttagtagaggcagggtttcaccatgttggccaggctggtctggaactcctgacctcaartgatccgcctgtctcggcctcccaaagtactgggattacagacatgagccaccacgcccggccggtcttagtaatactttaagatttctttcagctctaa

SEQ ID NO: 189606 - DNA, 201 bp, Homo sapiens
ctgctggggttcaagcaaacatgtccggctaatttttgtatttttagtagaggcagggtttcaccatgttggccaggctggtctggaactcctgacctcawatgatccgcctgtctcggcctcccaaagtactgggattacagacatgagccaccacgcccggccggtcttagtaatactttaagatttctttcagctcta

SEQ ID NO: 189607 - DNA, 201 bp, Homo sapiens
ccattctcctgcctcagcctcctgagtagctgggactacaggcgcccgccaccatgcccggctaatttttttgtatttttagtagagacggggtttcagcrtgttagccaggatggtctccatctcctgaccttgtgatccacccgccgcggcctcccaaagtgctaggattacaggcttgagccactgcgcccggccaat

SEQ ID NO: 189608 - DNA, 201 bp, Homo sapiens
ggctgaggcaggagaatggtgtgaacctgggaggcggagcttgcagtgagctgagatcacaccactgcactccagcctgggcgacagaacaagactccgtstcaaaaaaaaaaaaaaaaaaaaaagagaattacccttgctgcagttatttttaagtcttgttttttttttttactttaaaaattcagagatttttgcatt

SEQ ID NO: 189609 - DNA, 201 bp, Homo sapiens
ctggaggcagaagttgcagtgagctgagatcgcgccactgcactccagcctgggtgatagagcaagaccctgtttcaaaaaaaaaaaaaaaaaaaaaaaaaggatattttaaaataaaggtaattctatgatttttaaattatagcgcatgtcatagactaagatacaactggggtatgagtcccaaaagcaactgtaatg

SEQ ID NO: 189610 - DNA, 201 bp, Homo sapiens
cctggaggcagaagttgcagtgagctgagatcgcgccactgcactccagcctgggtgatagagcaagaccctgtttcaaaaaaaaaaaaaaaaaaaaaaaaaggatattttaaaataaaggtaattctatgatttttaaattatagcgcatgtcatagactaagatacaactggggtatgagtcccaaaagcaactgtaat

SEQ ID NO: 189611 - DNA, 201 bp, Homo sapiens
acctggaggcagaagttgcagtgagctgagatcgcgccactgcactccagcctgggtgatagagcaagaccctgtttcaaaaaaaaaaaaaaaaaaaaaaaaaggatattttaaaataaaggtaattctatgatttttaaattatagcgcatgtcatagactaagatacaactggggtatgagtcccaaaagcaactgtaa

SEQ ID NO: 189612 - DNA, 201 bp, Homo sapiens
aaaaaaaaaattacttaaaagtacttcctgaattcataaaaatgttttgttattgtattttctttagtgatattaatgaagatccaagacacttaaaaacmttccaaaggttcatacacacaaaacttgaaaaacatccttttctaaaaccatgtcaagcaaagcatgatgtagacttaaaaagaaaaaaagaaaagaaaa

SEQ ID NO: 189613 - DNA, 201 bp, Homo sapiens
tctcttaacattttatttttcttttcccaaaggtggcagaaagagcactctattattggaataatgaatacatcatgagtttgatagaagaaaactctaaygtcatccttcccatcatgttttccagcctttataggatttcaaaagaacattggaatccgtaggttttcagtttctttcctccgttctcttcctcccttc

SEQ ID NO: 189614 - DNA, 201 bp, Homo sapiens
cactgactggagaaaataaacagatactttaacaaaataccggttaaagtatctgtttactagacaggcttcttgatctgtctatgaaggtagcagatctyttggggaggcactgcagctgagaggagaggtgtgtagatactgacagcatggccatgcttagactgaatctgaaaggaatttggcaggtggatggcatgg

SEQ ID NO: 189615 - DNA, 201 bp, Homo sapiens
ccatttgttataaaagaaaactccattaactcattagctgattagcatgggaattccttgaagggctttattcaccaagaaatcaaattagagtacactamtggaaagttagagaatgttttttatgtttcttattcttgataattagaatgccaaaagaataaaatagtgtcagtgtgatgctttagtgtcccccaaccc

SEQ ID NO: 189616 - DNA, 201 bp, Homo sapiens
aacctggaggcagaagttgcagtgagctgagatcgcgccactgcactccagcctgggtgatagagcaagaccctgtttcaaaaaaaaaaaaaaaaaaaaaaaaaggatattttaaaataaaggtaattctatgatttttaaattatagcgcatgtcatagactaagatacaactggggtatgagtcccaaaagcaactgta

SEQ ID NO: 189617 - DNA, 201 bp, Homo sapiens
gaacctggaggcagaagttgcagtgagctgagatcgcgccactgcactccagcctgggtgatagagcaagaccctgtttcaaaaaaaaaaaaaaaaaaaaaaaaaggatattttaaaataaaggtaattctatgatttttaaattatagcgcatgtcatagactaagatacaactggggtatgagtcccaaaagcaactgt

SEQ ID NO: 189618 - DNA, 201 bp, Homo sapiens
gagggtaaagtacttagtaattttcaaaaatggtgtgtgggacattgaaaagatacattgtattggtgtgaaatcttttattttcagtgttctgagattcytttttttttttttttttttttttttaccgcagagtctcgctctgtcgtccaggctggagtgcagtggcacaatctcagctcactgcaacctctgccttcc

SEQ ID NO: 189619 - DNA, 201 bp, Homo sapiens
gagttcgagaccagcctggccaacatggtgaaaccccatttctactaaaaatacaaaaattagccaggcatggtggcaggcacctgtaatcccagctactygggaggctgaggcaggagaattgtttgaatccgggaggcggaggttgcagtgagccaagatcacaccagtctgggctacagagtgagactctgactcaaa

SEQ ID NO: 189620 - DNA, 201 bp, Homo sapiens
gcagctgcccggacctccccctgcacgtcccggtcccgccgcccgcccccgctgcggccacctcgcccgtctcccgcccctccaagccacagatcatcttyggattcttccccagaagcttcaaggtaacttagtccctccagcaccgcggctcgcccgcttcccttcttcctcccggtcctcctggggaacctatggggc

SEQ ID NO: 189621 - DNA, 201 bp, Homo sapiens
tagctgggactacaggcatgtgccaccacgcctggctaattttgtatttttagtagagacggggtttctccatgttaggctggtctcgaactcccgacctsagatgatctgcctgtcttggcctcccaaagtgttgggattacaggcatgagccactgcgcccggcctcttttattttttttatttttttatttttaattt

SEQ ID NO: 189622 - DNA, 201 bp, Homo sapiens
ttgagacggagtctcgctcttgttgcccagcctggagtgcaatggcacgatcttggctcactgcaacctctgcctcccaggttcaagcgattctcctgccycaccctcccaagtagctgggactacaggcatgtgccaccacgcctggctaattttgtatttttagtagagacggggtttctccatgttaggctggtctcg

SEQ ID NO: 189623 - DNA, 201 bp, Homo sapiens
gtcccgccgcccgcccccgctgcggccacctcgcccgtctcccgcccctccaagccacagatcatctttggattcttccccagaagcttcaaggtaacttmgtccctccagcaccgcggctcgcccgcttcccttcttcctcccggtcctcctggggaacctatggggcaccggccttgggaaggcctggccgggcaggcg

SEQ ID NO: 189624 - DNA, 201 bp, Homo sapiens
cactaaaaatacaaaaaaaaaaaaaaaaaattagctgggcatggtggtgtgtgcctgtaatcgcagctactcggggggagaatcacttgaacccgggaggyagaggttgcattgagcagagatcgtaccactgcactccagcctgggtgacagaacaagactctgtctcaagagaaaaaaaaagagtttgtccttgatccc

SEQ ID NO: 189625 - DNA, 201 bp, Homo sapiens; identical to SEQ ID NO: 32908

SEQ ID NO: 189626 - DNA, 201 bp, Homo sapiens
ggaggccgaggcgggcggatcatgaggtcagaagatcgagaccatcctggctagcacggtgaaaccccatctctactaaaaatgcaaaaaattagccgggygtggtggcgggcgccagtagtcccagctactccagaggctgaggcgggagaatggcgtgaacccgggaggcggagtttgcagtgagctgagattgcgcca

SEQ ID NO: 189627 - DNA, 201 bp, Homo sapiens
gcgattatgctgagagaagaagacagggcaggcaggttgataaggttcttcttggctgggcgcggtggctcacacctgtaatcccagcactttgggaggcygaggcgggcggatcatgaggtcagaagatcgagaccatcctggctagcacggtgaaaccccatctctactaaaaatgcaaaaaattagccgggcgtggtg

SEQ ID NO: 189628 - DNA, 201 bp, Homo sapiens
tatatgtggtctgtgttgaccgaaatgttgttatttggcacatgactgtatttatatattcatttttgcacacttattaactgtgtctttatttatttattactgtgccactgagtaacaaagcttcctgacactgtcattttgataaagcccgctttctttcctttctttaataatatttcacttctgcctcagggttaa

SEQ ID NO: 189629 - DNA, 201 bp, Homo sapiens
gtatatgtggtctgtgttgaccgaaatgttgttatttggcacatgactgtatttatatattcatttttgcacacttattaactgtgtctttatttatttattactgtgccactgagtaacaaagcttcctgacactgtcattttgataaagcccgctttctttcctttctttaataatatttcacttctgcctcagggtta

SEQ ID NO: 189630 - DNA, 201 bp, Homo sapiens
ccagcctgaatttgagatgatagtgagatgtcaaaactgctctatatgtaactggaagtaaagaaattaaggatatccatgtgccctggacacagaggtcrtagtggaaaaggtgataggggactgagtattgagaggagagcagcatactaagggctgggacttgttctacctctagtgctgacctttatttttcttttt

SEQ ID NO: 189631 - DNA, 201 bp, Homo sapiens
tcatgagcaccaaagagacattttgaagtaataaataaaatgacttgttgacaaattgtatatagcagataaaggagaagagttaacaaaaactccaaagrgttaaaaaaatagtgaacttcttgaaagaatggggaggtgggaggagaattctctttgagagataaatggagtccaatgagagtgaaattggttttgacc

SEQ ID NO: 189632 - DNA, 201 bp, Homo sapiens
ctatgccgggtgtggtggctcatgcctgtaatcccagcactttaggaggcggaggtgggcggatcacaaggtcaggagatcgagaccatcctggctaacayggtgaaagcccatctctactaaaaatacaaaaaactagccaggcgtggtggcgggcgcttatagtcccagctacttgggaggctgaggcaggaggatggc

SEQ ID NO: 189633 - DNA, 201 bp, Homo sapiens
gaagtcctcatagcagatgtttagaatttgtgttctcaaaaaagccttatgttggtattgttttatcaacttgtgcactgtggcttttacagaaaacactyaattcagttttagtaaccttctaggacttaggacccacagtccccagatggtgaaatgcagcaaagccttggtatcacatggttagcctgtgtggggcgg

SEQ ID NO: 189634 - DNA, 201 bp, Homo sapiens
aatctcctaacctcgtgatccgcccgcctcggcctctcaaagtgctgggattacaggcgtgagccaccgcgcccggccgaccctttctcttctttttgttwactcctttccaaggtgatccctttggtctggtggctttaagtattatctatatgctgctgagtcttatatgtctctggttctgacctgtccagctcagag

SEQ ID NO: 189635 - DNA, 201 bp, Homo sapiens
tactgggaatgcagcccagcaggtctcagccttattttacccagcccctgttcaagatggagttgctcaggttcaaatgcctctgacagttgtttcagcartaaaataatcagaaggcagtggtgtttaaagcacatttaaaatgtaagcttacagggttggtggtcagttcctgcccctagatccttctcttggtttcct

SEQ ID NO: 189636 - DNA, 201 bp, Homo sapiens
ataataaattggaaagattgccattttcaaaggagttgtgtatccaggtatagtccttgaacagctgcagcctggagtagtggaatgaattggaaagagcwgtggtgtaagtttctacacacaagggaggataatgtagctggacaatatgattacttaatcttttctcctaatatgaagagaaaaagaaggtggagtcac

SEQ ID NO: 189637 - DNA, 201 bp, Homo sapiens
gaggaaggccctacggggtcagttttgcttctcaggggccggtgcagtgtgtgagtgtccctcgttctatgtaatatatataccaagtagagtattttttscaagtacgtagaatttttccaagtaccctatggtgaattctttgtggaacgaacatcttctaacatgggataatgactggttcatgtatgtttggtttta

SEQ ID NO: 189638 - DNA, 201 bp, Homo sapiens
atggggcaccggccttgggaaggcctggccgggcaggcgaggggtgcggtggggtggggtgcgggagcgggagcgcccgtcccacttgtctgatttacctrcaaatgcttctgatgatacctctcattcactctgccccctcccccctttttctccaccttctgggattggaggcgttttcttgcccccctttatccactg

SEQ ID NO: 189639 - DNA, 201 bp, Homo sapiens
ctgaggcaggagaatcaggcagggaggttgcagtgagccgagatggcagcagtacagtccagcttcggctcggtatcagagggagaccgtggggagagggrgagggggagggggagggggagggcagcgtgtaacctttgtaacttcacttcagcctctggttgcacaacctcatcaaattaatttttcaggaagatagcc

SEQ ID NO: 189640 - DNA, 201 bp, Homo sapiens
ctctcctcccagacggggtcgcggacgggtagaggcgctcctcacatcccagacggggcggcggggcagaggcgctccccacatctcagacgatgggcggycgggcagagacgctcctcacttcctagatgggatggcggccgggaagaggcgtttctcacttcctagatgggatggcggccgggcagagacgctcctcac

SEQ ID NO: 189641 - DNA, 201 bp, Homo sapiens
tcacttctcagacggggcggccgggcagagacgctcctctcctcccagacggggtcgcggccgggcagagacgctcctctcctcccagacggggtcgcggmcgggtagaggcgctcctcacatcccagacggggcggcggggcagaggcgctccccacatctcagacgatgggcggccgggcagagacgctcctcacttcc

SEQ ID NO: 189642 - DNA, 201 bp, Homo sapiens
ggtatatgtggtctgtgttgaccgaaatgttgttatttggcacatgactgtatttatatattcatttttgcacacttattaactgtgtctttatttatttattactgtgccactgagtaacaaagcttcctgacactgtcattttgataaagcccgctttctttcctttctttaataatatttcacttctgcctcagggtt

SEQ ID NO: 189643 - DNA, 201 bp, Homo sapiens
ggtgacgctcctcacttctcagacggggcggcttccgggcggaggggctcctcacttctcagacggggcggccgggcagagacgctcctctcctcccagayggggtcgcggccgggcagagacgctcctctcctcccagacggggtcgcggacgggtagaggcgctcctcacatcccagacggggcggcggggcagaggcg

SEQ ID NO: 189644 - DNA, 201 bp, Homo sapiens
gacgtttattctgggcctcgggcataaggggtaaatgatttttttaaaagctacctatatatcgtctgtagagatgagagataaggaataaagaagagacraaaagagtgatggaggaagaggatttactgaaatgttgtagtgttagagttagagtgaagtctaaataattcacatacccgaatggaaaatcggccccta

SEQ ID NO: 189645 - DNA, 201 bp, Homo sapiens
tggtatatgtggtctgtgttgaccgaaatgttgttatttggcacatgactgtatttatatattcatttttgcacacttattaactgtgtctttatttatttattactgtgccactgagtaacaaagcttcctgacactgtcattttgataaagcccgctttctttcctttctttaataatatttcacttctgcctcagggt

SEQ ID NO: 189646 - DNA, 201 bp, Homo sapiens
gcccctcacctcccggacggggcggctggccgggcagggggctgacccccccacctccctcccggacggggcggctggccgggtagagggctgaccccccsacctccctcccggacggggcggctggccgggcggggggctgaccccccccacctccctcctggacggggcggctggcctggcggtgggtgacccccacct

SEQ ID NO: 189647 - DNA, 201 bp, Homo sapiens
cttgctgtgatacattggtatagattcttgaagtacactaagggtttttcaactccagaacccattcataatattaagtatcttgggaaaatgtatcaatrgaagttttccagttacagaatagctccaaaaattacttgaagatgtgaagagctttgcagttagaaaatgggcaggcagcatagatttctttaagcctag

SEQ ID NO: 189648 - DNA, 201 bp, Homo sapiens
cgggcacacctcccagatggggtggtggccgggcagaggggctcctcacctcccagtaggggcggccgggcagaggcgccccccacttcccggaaggggckgctggccgggcggggggctgacccccccacctccctcccggacggggcggctggccgggcagaggggctccttacttcccagtaggggcggccgggcaga

SEQ ID NO: 189649 - DNA, 201 bp, Homo sapiens
gatcgtgccattgcattctagcctgggtgacagagcaagactctgtctcgggggaaaaaaaaaaaagaaagtgcaggttggggctcactgtggcctctatytcctaggctcaagtgatcctccctttcccgagtagccgggatcaacttcccgagtagctgggactacagaagcatgccatcacgcccagctaatttttcc

SEQ ID NO: 189650 - DNA, 201 bp, Homo sapiens
gcttgaacccaagaggcggaggttgcggtgagccaagatggtgccattgcactccagcctgggcaacaagagcgaaactccgttgcaaaaaaaaaaaaaaagaaattagaagggcaaagttagattttttttctagttctaccacccctcagaaaattatcttgccttgaaatctcttgatgtggaaatgaactgtaggtc

SEQ ID NO: 189651 - DNA, 201 bp, Homo sapiens
agctgccgggcacacctcccagatggggtggtggccgggcagaggggctcctcacctcccagtaggggcggccgggcagaggcgccccccacttcccggamggggctgctggccgggcggggggctgacccccccacctccctcccggacggggcggctggccgggcagaggggctccttacttcccagtaggggcggccg

SEQ ID NO: 189652 - DNA, 201 bp, Homo sapiens
cttaatgccctctacctggaatgccctttccttcatccttcgaagccgagcttaaatgccacttgcctatgttacatttctttcttcttttttttttttttgagatggagtcttgctgtgttgcccaggctgcagtgcagtggtacagtcacagttcactgcagcatctgcctcccgggttcaagcgattcttgtgcctca

SEQ ID NO: 189653 - DNA, 201 bp, Homo sapiens
tctcaatgagctgccgggcacacctcccagatggggtggtggccgggcagaggggctcctcacctcccagtaggggcggccgggcagaggcgccccccacytcccggaaggggctgctggccgggcggggggctgacccccccacctccctcccggacggggcggctggccgggcagaggggctccttacttcccagtagg

SEQ ID NO: 189654 - DNA, 201 bp, Homo sapiens
atttgctttgatgattcccaaacacattgtcctcgtccatgcctctgtcctcctttccttaatgccctctacctggaatgccctttccttcatccttcgaagccgagcttaaatgccacttgcctatgttacatttctttcttcttttttttttttttgagatggagtcttgctgtgttgcccaggctgcagtgcagtggt

SEQ ID NO: 189655 - DNA, 201 bp, Homo sapiens
ccgccattgtcatcatggcccgttctcaatgagctgccgggcacacctcccagatggggtggtggccgggcagaggggctcctcacctcccagtaggggcrgccgggcagaggcgccccccacttcccggaaggggctgctggccgggcggggggctgacccccccacctccctcccggacggggcggctggccgggcaga

SEQ ID NO: 189656 - DNA, 201 bp, Homo sapiens
tgcagtgagccgagatggtgccattgcactccagcctgggcaacaagagtgaactctgtctcaaaaacaaaacaaaacaaaacaaaacaaaacaaaacaamgcaaaactgcatcatctcatttaaacctcattgtaactctataaggcagggctgtcagaactcttgttttactagttatgaaactgtagagaggttaaat

SEQ ID NO: 189657 - DNA, 201 bp, Homo sapiens
tttctcactcttttccccacctctcaccactttctactccacaaaaccgccattgtcatcatggcccgttctcaatgagctgccgggcacacctcccagayggggtggtggccgggcagaggggctcctcacctcccagtaggggcggccgggcagaggcgccccccacttcccggaaggggctgctggccgggcgggggg

SEQ ID NO: 189658 - DNA, 201 bp, Homo sapiens
ctaagcatgtataaaaccgcatcatcagggctgggcgcagtggctcatgcctgtaatcccagcactttgggaggccgaggcgggcagatcacctgaggtcrggagttcgagaccagcctgaccaacatggagaaaccctatctctactaaaaatacaaaattagccaggcgtggtggcgcatgcctgtagtcccagctacc

SEQ ID NO: 189659 - DNA, 201 bp, Homo sapiens
taggaggattttgtacaactacttttagaagcaaaataaaaagtttgcaaactcgtttttttgatattgatataaccttcattttgtttttttggtttttkttttttgagacggagtcttgctctgccgcccaggctggagtgcagtgggacagtcttggctcactgcagcctccacctcccgggttcaagcaattcttct

SEQ ID NO: 189660 - DNA, 201 bp, Homo sapiens
ggataatgtagctggacaatatgattacttaatcttttctcctaatatgaagagaaaaagaaggtggagtcacatggctttctctcagtgatttccctaggctgggcagaggtttcaggaatgagaaggaatgatgtctggaaatggaaaaggtcatatttaaggcggaagcaagcaaggcgggccattatttggagaagg

SEQ ID NO: 189661 - DNA, 201 bp, Homo sapiens
cctgatcaggtctcagccgaacatgctgtcaggggagtgaaggcggatactggccaatgaggcctcgcttcccgtttgaagtctccagtgggcgggcgccrgaggcgggcgctgctggccagaaggttcggttgcgcgtgtgccatggactcagccgcccggtgatattgacaataggagagagaaaggggcattgactgg

SEQ ID NO: 189662 - DNA, 201 bp, Homo sapiens
agagtctcttcacaaaggtgtgtactaatgaaagaagatggccagcacccgtatgccttctattgttacctgcataaaaatctgcaggaacaatatatgarttaattcaatcttcacattgaatgagaaccacctgtgacataggtagtatctaatagataccattttgtagataaggtaaaggaagagagaggttaagaa

SEQ ID NO: 189663 - DNA, 201 bp, Homo sapiens
attttttgttttatatggtgtgaatttaggtaggttgttgtaaagttacacgatttagacttgtggccatatacttaatccttagagtctcttcacaaagstgtgtactaatgaaagaagatggccagcacccgtatgccttctattgttacctgcataaaaatctgcaggaacaatatatgagttaattcaatcttcaca

SEQ ID NO: 189664 - DNA, 201 bp, Homo sapiens
gctaataaaaaagacagggcttcactttgccagtgagctcacaatctggtagagggaatactcacgtgaacagtaacaagataatgtcatatatatagtartaaagtctgtacaaggcaaggaaggagtaaagggacgtgaaggtagatagaagggtggttaaggaaggcttgacagaatgattatagcctcagtagggta

SEQ ID NO: 189665 - DNA, 201 bp, Homo sapiens
tttggttttgttgttatgtatccatttgaaagatttcttggaatttctggctttccaaatcaccttgtgtaaatttttatttacctgagcttgaactctgkgtattttatattgtttatatttgcacatcttttttttttctcgaaaatgttttttttggggatacttcaaatatgagatgaaatctcatgggtgaagaca

SEQ ID NO: 189666 - DNA, 201 bp, Homo sapiens
cctgtgatctgcccgcctcagcttcccaaagtgctgggattacaggcgtgagaccaccacacctggcctcattgtcatcttattttaagaacgtgccacarccacctcagccttcagctaccaccgctatgatgagttagcagccatcaacatgaaggcaagaccctccaccagcaaaaaagattacaactcgctaaaggc

SEQ ID NO: 189667 - DNA, 201 bp, Homo sapiens
cggagtctcactctattgcccaggctggagtgcaatggcacaatctccgctcactgcaacctccgcctcctgggttcaagtgattcttctgcctcagcctyccgagtagctgggattacaggcgctcaccaccacgcttagctaatttttgtattttagtagagatggggtttcaccatgttggccaggctggtcttgaac

SEQ ID NO: 189668 - DNA, 201 bp, Homo sapiens
ttttcgatgagttaatgttgaggttcttatgggagacctagatgtggaaagtaggaggtggaaattggtagttatcagaatgggagtagggcaggggaggraaagaacaatgatggaactctagatgataccagtgaatcattgtttcagtgcagtggtacaggtgggagctagtgggttgaagagtagattaaaaaatca

SEQ ID NO: 189669 - DNA, 201 bp, Homo sapiens
tcttgcatcagacaattagacaagttgtgaatttaaaggtaaagttcttgaaggaaattaaaactactactccagtaaacatgtgaatgataagaaagtaraacaaccttattgctgataattgagaaagtttcagtggtctggatagaatatcaaaccagccacaacgttccttatgccaaagcctaacccagagcaagg

SEQ ID NO: 189670 - DNA, 201 bp, Homo sapiens
tattattttaaaaattaggttcaggtggcaccaagagatgctcacctagttctcttgctgtatgtacattgggtctctctcatttgtgcctattagcataytttccagctgactctacaagacacaatttcctgttccccttgttccacaagtatgcattgccatttccactggaatgactgaaagagctgacagttcatt

SEQ ID NO: 189671 - DNA, 201 bp, Homo sapiens
ctgggactacaggcgcccgccaccacgcctggctaattttttgtatttttagtagagacagggtttcaccatgttagccaggatggtctctatctcctgaycttgtgatccacccaccttggcctcccaaagtgctgggattacaggcgtgagccaccgcgcccgacctgaagttactattttaattgctttgggacacca

SEQ ID NO: 189672 - DNA, 201 bp, Homo sapiens
ttttttagaaggaattatagagtctaggggattctcttaaaatcattcacacggctgggtacagtggctcacacctgcaatctcagcactttgggaggccraagtgggaggattgcttgatctcaggagtttgagactagtctgggcaacatagcaagaccctgtctctacaaaaagaataaaacaaaaattaggtaggca

SEQ ID NO: 189673 - DNA, 201 bp, Homo sapiens
catagcttttatagtgtggaaactatcagaatttacctttgaggtggatgtttatgtgctgaatactgaagaatgggagaaaggggatatgaacaacacamtgagctttagtgtggcttggaggaaaccaggcaacctggtttgctagttcattattgcagacttatttctgtaacagtttgtgaaatcagaaggtattat

SEQ ID NO: 189674 - DNA, 201 bp, Homo sapiens
gtgtggaaactatcagaatttacctttgaggtggatgtttatgtgctgaatactgaagaatgggagaaaggggatatgaacaacacaatgagctttagtgkggcttggaggaaaccaggcaacctggtttgctagttcattattgcagacttatttctgtaacagtttgtgaaatcagaaggtattataagaaaaactgga

SEQ ID NO: 189675 - DNA, 201 bp, Homo sapiens
ggtgtgcatctataatcccagctactcaggaggctgaggcaggagaatcacttgaccccgggaggtggaggttgcagtgagctcatattgtgccactataractctgtcttaaaaaaaaaaagaaagtcaagacttggatactttccttacacttacacagcaggacatgaagcaagccttgactgttatctaggtaagtt

SEQ ID NO: 189676 - DNA, 201 bp, Homo sapiens
cttgatgactttagaaaacagtctttcggctgggcacagtggctcacgcctgtaatcccagcactttgggaggctgaggttggtggatcatgaggtcaggrgatcgagaccatcctggctaacacggtgaaaacccgtgtctactaaaaatacaagaaaaaaacaacaaaaaaaaactagccgggcgtggtagcaggtgcc

SEQ ID NO: 189677 - DNA, 201 bp, Homo sapiens
aagagaggccatgtctttgtcagcttgggctgccataacaagactggcgacttaaacgacatttattttctcacagccctggaggccagaagtttgagatsaggatgacagcatggttggtttctggtgagatcctgctttctggcatgcagatggccttcttcttgctgtatgctcacgtggcctttcctggcatgtgca

SEQ ID NO: 189678 - DNA, 201 bp, Homo sapiens
tactcgggaggctgaggcaggagaatcgcttgaatccgggaggcagaggttgcagtgagctgagatcacaccattgcacttgagcctgggcaacaagagcraaactccgtctcaaaaaaaaaaaaaaaaaaaaaacggaaaaatttcttaacttagggttcgtggatttctggttgggacagtgtatatctggatgggctt

SEQ ID NO: 189679 - DNA, 201 bp, Homo sapiens
gatagaagcttgcattcatattcatcccattaagaactaattgcttaatcctggccaggtgttgtgacttatgcctgtaatcctagcactttgggaggccraggcgggcagatcacctgaggtcagaagtttgagaccagcctggccaacattgtgaaacctcgtctctattaaaaatacaaaaattagccaggcatggtg

SEQ ID NO: 189680 - DNA, 201 bp, Homo sapiens
gctgttgttatttaatgggggtttcaaaagttagaatatgaataatatgaaatttttatgacatattttactagtaaaaaggtggaaattggaaatttctmtgaaaattatgaagagcataattttgcagccacaaacgtttttcaaccaaaaatttcaaagaagcagtttttaaatatggtgaatttaatataatagcta

SEQ ID NO: 189681 - DNA, 201 bp, Homo sapiens
ggaggtttcagtaagccgagatagcgccactgcactccagcctagtgacagagcaagactctgtctcaaaaaaaaaaaaaaaaaaaaaaaaaaaaaaaagraagaaatccagacctattagtagccactccccattctactttctgtcactatggatttgcctattctgcttatttcacataaatggagtcatacattgta

SEQ ID NO: 189682 - DNA, 201 bp, Homo sapiens
ttctcactcataggtgggaattgaacaatgagaacacatggacactggaaggggaacatcatataccagggactgttgtggggtcggggggatgggggacrgatagcattaggagatatacctaatgttaaatgacgagttaatgggtgcagcacaccaacatggcacatgtatacatatgttatttttttctttctttct

SEQ ID NO: 189683 - DNA, 201 bp, Homo sapiens
attttaaaaatggggaatcaatagggatttttcagattctcaaagggatatctgacttaaaacgggttaagatctattgatctagtttgtacctttgactratgatgtgtgttcttcaggcatctaagatttgtgtgtgtgtgtgtgttttgagatggaggttcgctcttgttgcccaggctggagtgcagtggccccatc

SEQ ID NO: 189684 - DNA, 201 bp, Homo sapiens
tggatggcattatgtagctaaaaattgtgtcctgtctctacctatttttgaagaccatcctttagtttgcgtttcctgccatgtttgaggggcctttttttggtccataactcttgtcttttattcaaattaaaacaccgaacaaaagcacattcgattattgaccatgaggtttttattctgctgtcagtgtcaacctca

SEQ ID NO: 189685 - DNA, 201 bp, Homo sapiens
agtagcattgttatttcttttgtttgtttgtttttctgagacagagtctcgctctgtcacccaggctggagtgcagtggcgcaatctcggctcactgcaasctctgcctcccaggttcaagtgattctcctgcctcagcctgcggagagtagctgggattacaggtgtctgccaccacatccggctgatttttatattttt

SEQ ID NO: 189686 - DNA, 201 bp, Homo sapiens
atttgtggctttgtaaatatctaaagttaggcactcggcaatgcattttgttgagagcctaatgaaaacatcaaacatttcttgcttaattattgtgtattcattaaactcaagattaacagtatacaaggaaggttgattcaagttttgctaatactacacaccctcaaaccttctcttatgttggttacaagttattca

SEQ ID NO: 189687 - DNA, 201 bp, Homo sapiens
gttttaaataatgaagtcaaagaggtgtccttaaggtctttaatttcaggggagtttgaatacgataattatacaaacagtgattatgtaactcatcttttaatatgtcatttttgaatgctcagatatgcattaataaccactcgttttgtgcatgcattatcagaatgtttattatatgcatcataatctttgatttat

SEQ ID NO: 189688 - DNA, 201 bp, Homo sapiens
gattcttcctaagaaagcatgaatgggatgtaagtgttctgagatcacttgtctgaaaacgtctttattctgcctacatttttttttttttttttttttttgagacagactctcgctttgtcgcccaggctggagtgtagtggcacgatcttggctcactgcaacttccagctgctgggattacaggtgtatgccaccacg

SEQ ID NO: 189689 - DNA, 201 bp, Homo sapiens
ctcgaactcctgacctcaagtgatccacccacctcggcctcccaaagtgctgggattacaggtgtgagccaccgggcccagccctttttttttttttttttaaaggacggaatctcactctgtcactcaggctggatggagtgcaatggcgggatcctggcccactgcaacctccacctcccaggttcaagcgattctttc

SEQ ID NO: 189690 - DNA, 201 bp, Homo sapiens
agttctaccaaattgttgttaattggctggaagggggtgattatgtgtgatgatcttcacttcctattttttagatatctctattttttatataaaaaaaataagcatatatgttgtaatcaataagaataaaaaatttcatctgcaagtacattctcattttattgccttgcatttttcataaacctcagctgattttgt

SEQ ID NO: 189691 - DNA, 201 bp, Homo sapiens
tttttttttgagatggactcttgctctgttgcccaggctggagtgcagtggtgccatcttggctcaccgcaacctccgcctcccaggttcaagcggttctmccttctcagcctcttgagtagctgagattacaggtgcatgccactgcgcctggctaatttttgtatttttagtagacacagggtttcaccatgttggcca

SEQ ID NO: 189692 - DNA, 201 bp, Homo sapiens
aacataaagagaaaaaatactaaaaggaagtatgcaaatactgtaagtggttatctctgagttgagaaaataagaatgttaatttttttgtccccccccccaatttctaagttttgaacaactggtactctgacgtttgtagttagcattaataatttctttcttccttttttcctctcaaaaaatgtacgtagggtgcat

SEQ ID NO: 189693 - DNA, 201 bp, Homo sapiens
tcctgaagagaaaaccgatagtattctatcaacttaaatttagacccaacaattctgtgagaaataatcagatatgtacaaaagatatatatacaaaggttattgaatgcaccattgctaataattattagaaaattggaaaataacttcaaagttccttagtaggaggtaattgtactgtggacattcatatagtgaaat

SEQ ID NO: 189694 - DNA, 201 bp, Homo sapiens
accctgctgagcgtgccataaaacccataagaagatgtaccaaataaacgaatgaataaatatatgaatagatggctatatacacatatacgttaaattggcataattgtcctgaagagaaaaccgatagtattctatcaacttaaatttagacccaacaattctgtgagaaataatcagatatgtacaaaagatatatat

SEQ ID NO: 189695 - DNA, 201 bp, Homo sapiens
tcctgggttcaagcaattctcctgcctcggcctcctgagtagctgggattacaggcactcgccactacggctggctaattttttgtatttttagtagtaayggggtttctccatgttggtcaggctggtcttaaactcccaacctcaggtgatccacctgcctcggcctcccaaagtgctggaattacaggcatgagccac

SEQ ID NO: 189696 - DNA, 201 bp, Homo sapiens
cgaaagaagacattgggaccactcttgccatttgcaagagctttttgaatattctatgtcatgataaccatagacataaatttcccctaaagtacaataaacttttactcattattacagttaatccttcccatacttaatgactctgtaaaatacaggaccaaattaatttctgaaactctttaattctgccacaaaaaa

SEQ ID NO: 189697 - DNA, 201 bp, Homo sapiens
tcgaaagaagacattgggaccactcttgccatttgcaagagctttttgaatattctatgtcatgataaccatagacataaatttcccctaaagtacaataaacttttactcattattacagttaatccttcccatacttaatgactctgtaaaatacaggaccaaattaatttctgaaactctttaattctgccacaaaaa

SEQ ID NO: 189698 - DNA, 201 bp, Homo sapiens
agcaatgattgtgccactgcactccaccctgggcaacagagcaaggccctgtctcaaaaaaaaaaaatcattcactgaaagaatatttattaaatgcctgstaagtagcaagcagtgccctttagcaggaaagcgtttggaagaaattgtcctaagtaggtgtgtgggtgagatggggtggaaagaagcaaaaacatgaga

SEQ ID NO: 189699 - DNA, 201 bp, Homo sapiens
gttaattcagttaggataatgacctccagctgtattcacgttgcaaaggacgtgatttcattcttcttatgctgcatagtattccatggtgtatatgttcyacattttttttttttatccagtccactgttgaaggttgattccatatctttcctattgtgaatagtgctatgatgaacatgagagtgcaggtgtcttttt

SEQ ID NO: 189700 - DNA, 201 bp, Homo sapiens
catatgttatttttttctttctttctttttttgtgatgggagtttcgctcttgttgcccaggctggagcgcaatggcgctatcttggctctctgcaacctycgcctcccgagttcaggaaattctcctgtatttttatttatgaaagattgtacccagttgtaatgaagagataatttcattcacctttaggaaggaatat

SEQ ID NO: 189701 - DNA, 201 bp, Homo sapiens
ggctctctgcaacctccgcctcccgagttcaggaaattctcctgtatttttatttatgaaagattgtacccagttgtaatgaagagataatttcattcacytttaggaaggaatatacattttttaatatatcctaatagtttgcttctgtagcataggtaaaattattgtacagagttttatgtgggccaaaagaaattg

SEQ ID NO: 189702 - DNA, 201 bp, Homo sapiens
cgaatatatgcagttgttttgtgagagtgacagaacaaagagtgacaggcagagggagggggttgccatagcattggggtaaacaagtgagccgcgtggtytagagaggaaagcatttgtgtgcatagtggctccaaagaggtgtgtgaggtgtgcgaggagggaagagcacacacttggtaatgaaggcctgagagctgc

SEQ ID NO: 189703 - DNA, 201 bp, Homo sapiens
caggaaattctcctgtatttttatttatgaaagattgtacccagttgtaatgaagagataatttcattcacctttaggaaggaatatacattttttaatayatcctaatagtttgcttctgtagcataggtaaaattattgtacagagttttatgtgggccaaaagaaattggccaggcgcggtggctcacacctgtaatc

SEQ ID NO: 189704 - DNA, 201 bp, Homo sapiens
cttattcttacagttgaatatgtatgtatgcatgtatgtatgtatgtatgcatgtatgtatgtatgtatgtatgcatgcatgtatgtatgtatgtatgtadacatgggttttctccattgtggccactctggtctccaactcctagccacaagtgatcctcccgcctcggcctcccaaagtgctgggattacaggcgtgag

SEQ ID NO: 189705 - DNA, 201 bp, Homo sapiens
ttagaaaatttggttagaattttagttcttattcttacagttgaatatgtatgtatgcatgtatgtatgtatgtatgcatgtatgtatgtatgtatgtatdcatgcatgtatgtatgtatgtatgtatacatgggttttctccattgtggccactctggtctccaactcctagccacaagtgatcctcccgcctcggcctc

SEQ ID NO: 189706 - DNA, 201 bp, Homo sapiens
catggccaagacttctattaatttaatactgccttttgaatattggctatatttaaaaattctaattgggtattataagttttaagcttttttttttttttgatattccctttcttcaattgcctgttaaacttctgatcattttaatatgttctttctgcctcatttcaggaatcatatttaatagaatagttgttatgt

SEQ ID NO: 189707 - DNA, 201 bp, Homo sapiens
ttgttatttggcacatgactgtatttatatattcatttttgcacacttattaactgtgtctttatttatttattactgtgccactgagtaacaaagcttcstgacactgtcattttgataaagcccgctttctttcctttctttaataatatttcacttctgcctcagggttaagagcccagcatttaactggtattttag

SEQ ID NO: 189708 - DNA, 201 bp, Homo sapiens
tgtaaagtgagagtagttgtgttaccggaaaggggtcctgacccagaccccaagagagggttcttggatctcatgtaagaaagaatttggggtgagtccayagagtaaagtgaaagcaagtttattaagaaagcaaaggaataaaagaagggctagtccataggcataaaaatagtcatccatttttatggttacttcttg

SEQ ID NO: 189709 - DNA, 201 bp, Homo sapiens
aattctattttaactaaaactaaggcttaatttttaaatccacagaggtaccaaggcgccctctaatggtgaactcaaacaatgctctattttgtaatgarctacagtttcagttagaaattgtggtaaattcgttagggaattatgaacagatttttttctttttttgtaaaggctttataatttcttaatgtttggcca

SEQ ID NO: 189710 - DNA, 201 bp, Homo sapiens
gtattctctcttccctgctgcaaaaggagtttactgtagtatacacgtttgaatgaggctgccttggtcagcccacgtcttagctcttcgtcagtatttcyttctagctaggcagaaagagtaaaacttctgtgtaatactagttccctgttccacccaggttttgtattcacttgcttttaggtctaggactggagaatg

SEQ ID NO: 189711 - DNA, 201 bp, Homo sapiens
aagattatgttttctttagtacttttgtgaattacttcttactttgaaatctttgttcatttctagaatttattttggtgggtagaatagtttagagattmatcttttgttcaaatggttagccaactactcagtatcatttattaaataatacaaagttttgaagtactgaattcttacatatatttgtgcccgttgctg

SEQ ID NO: 189712 - DNA, 201 bp, Homo sapiens
ctttcggttacaaattcaccaccttaaggagccgtgtgaaaaagcaagaacaatcaataagaaggaaaaaaaaaaacccttcagctataaatcagccacgyggagctgctgcagcagcagcggtagtcccacttcctggttggcttcctgaaagcctctcgacaaggggctcagggaagtgggtctaagggagaggtgcag

SEQ ID NO: 189713 - DNA, 201 bp, Homo sapiens
catctgagcaatgtcactgtagccaatgtgtagtcttttatccctctcctccctcccagtctttcccgagtccccaaagtccattatatcattcttatgcytttgtgtcctcttagcttagctctcacttatgagtgagagcatatgatgtttggctttccattcctgagttacttcacttacttaccctccagttgcatc

SEQ ID NO: 189714 - DNA, 201 bp, Homo sapiens
atggtgagatctctgcttctctttaatgctgatctacacatggacttttttggatccctttaaatagcctgaacgatccagtttaccaggtatgggttctkcctctactccagcaagcttgtacctgtggctccattcaccctgtgccactttttgtcttgaactatgaatatgtcatacactaaattctgttacagcctt

SEQ ID NO: 189715 - DNA, 201 bp, Homo sapiens
atttttctactgtggtagatgttcttaaactaaaagattactgtcaagattggaaatttttatcacttaaaatatataattatatttgaacatttaagcaraagattgctggaatggggatatacaggcctgcagtttcgttaactgttgctccctgtgtgatggcctcagaggaaattctaagtccagtgttcgtcaaag

SEQ ID NO: 189716 - DNA, 201 bp, Homo sapiens
ttgaaattctctcctactttgccttctgtagtattttatttttaagttttttcttatctctctgacaacatcttggcttctcttcccactcatttgctctrtccgagtactcattccaaaattcagctttgatctcatggctcccatgtaagaggataaagtctgaacctctcagcagttcttaagagaccctctgaggaa

SEQ ID NO: 189717 - DNA, 201 bp, Homo sapiens
tcttggcttctcttcccactcatttgctctatccgagtactcattccaaaattcagctttgatctcatggctcccatgtaagaggataaagtctgaacctstcagcagttcttaagagaccctctgaggaacttgccagtatctcaagtttcatctcctgcccttctgttatagcaaatgatttggcattctctaagcact

SEQ ID NO: 189718 - DNA, 201 bp, Homo sapiens
tgctcttaccactgaaatgatggcataaactttgacaaatgcagttttatcaccttttgaaatatactacaaaacgatgtattaactgtttaatatttatrtgtgatttttttcaagttcagttcaaatcagctaaagagttaatgttaaatattcacaataaaaaatattttttaaaacctgtaatgcatatttatgatt

SEQ ID NO: 189719 - DNA, 201 bp, Homo sapiens
gcagagagtttatagaatgccttgatggaatcaagtagtaacctgtcttccttgtcttccttttgcttccaaacttatgacttggatttttttttttttttaatgctctttccagccctagtagtgacagcattttccaaaatgttactcaaaacctctcaaatagcagaggcagtaccaacacatcctggcatctagcct

SEQ ID NO: 189720 - DNA, 201 bp, Homo sapiens
agtacctggcatatagtagacctgtaataaatattcggataacagaaaggacagttcttttatcttttaatgatgcatataaatagtaacctgaatgacarataacactcatgataaaccagagtatcactgaataagcattccttcttgagaacagacctcttgatagttaaaaagtaaaatgtcaaaaagtttattaca

SEQ ID NO: 189721 - DNA, 201 bp, Homo sapiens
aaataaaagctgacatcattatatagtaaaagtacacatggactctgacatgggttaaaatgctggtgcaatcactgttaatagcgttagtgagtttcgcygagtgatttactttctgagagcttccttttcctcatctgtaaagtagacataaaatcaacttcatagcaatgttcttgtgcttcctttagatacgtttat

SEQ ID NO: 189722 - DNA, 201 bp, Homo sapiens
tactattttctctattttgttaccctttggtttatatcttggcctgatacttaaagaaagggaaaaaaaagataaagaagaatagcaattcctctaagcgrgtctatttctttgagcagataattcttaccagaatatcatactttaagccacacctagagcttatatagaatttttatatttccatagttacctgaaagc

SEQ ID NO: 189723 - DNA, 201 bp, Homo sapiens
tgttacaacattttataatgatatctctatattaatttacttacaacactaacataagtaagtataattttggaaggagccaggagataaattggagaaaygaacactttttccatcatcagaatcaccccttacctctctcttacagtcatgcgtgccttacactttacttagttaattcccaagagaatcttcagttct

SEQ ID NO: 189724 - DNA, 201 bp, Homo sapiens
gcctagtaactgacaagtaggaactcagtagtagtacccagttggtaaatatctgtcgagaatgaatgaacgtgtgaatgaaatcagccagggttcaaacyttgatgccatcactagatgtgagatctttgaccagttacttgtcctctctaaccctcagttacctaaacgttaagacagatctaaccataccaatctctc

SEQ ID NO: 189725 - DNA, 201 bp, Homo sapiens
taaaaatgaggtttatcattaaattatagttcagccctgtgatcctgaaagcaacactgagacaacatgaactgcagtcacctagggcctatgtctttttrgaaagggaagagctaactttcagttgcttaatttgctaagaatcctgaatatttccaaatgagaaatgttctcatttctgcaccattataaattcccttc

SEQ ID NO: 189726 - DNA, 201 bp, Homo sapiens
gggttccagtgggtgctaaaagtaagaatgattattttaaggataaaaaatgtcagttgtatattttattgactgcaggtagctagaaaaagtaaacttgycatgtgggcacacagcgtgttgcctctgaatgatgaggcaagcaggttactcataatacacacacacacacacacacacacacacacacacagcgtgttg

SEQ ID NO: 189727 - DNA, 201 bp, Homo sapiens
tattggtgctcagaaggctaaacttggacaggtaggaagcatttgatatctacaatgtcaacattttgggtttggtaactaaatcatacacatttttaatyattcttcagtttttttaattgaaatgagaatgctggcttaaacagataacttatgtgtcagaattgactataatgctaatttttattagcatctaatttt

SEQ ID NO: 189728 - DNA, 201 bp, Homo sapiens
aaacttgcttcatctgttttctacccaatttaactttgttaaccaccctcttaaaaagaagtttcttgaggatttatctctggttgtcttccagtttgggyggcgggtggtgggtggtgatagttggtaatagggttgaggtaggatggaataaatcagaatctgcaatgaaccacttgctggataattagggtagatgag

SEQ ID NO: 189729 - DNA, 201 bp, Homo sapiens
ggctgaaaattgggttggagaggggtggaatggaagagaggactctagaaagataaatagaatctgagccatgaaagactttgaatggtcagagctgggcyataaggaataatctggaaacagtgcaagctagattttagtgaggagagaattatgtccgaaggatataatgaagcttaaactaaggagaaggacctagaa

SEQ ID NO: 189730 - DNA, 201 bp, Homo sapiens
tctagaaagataaatagaatctgagccatgaaagactttgaatggtcagagctgggctataaggaataatctggaaacagtgcaagctagattttagtgargagagaattatgtccgaaggatataatgaagcttaaactaaggagaaggacctagaaactgaatacagaggaagagattatggaagtataatagaattgc

SEQ ID NO: 189731 - DNA, 201 bp, Homo sapiens
tgttaactgttgtatattacatactcttttccatatttgttttacagtggagagggtcttcaaaaaacgatctagtacatctcttcattttgctatagggmcattactatcaatgtttaagacttctgtaagtaaatattacaacctgtcttgcaaccaatcctgtaatatctaacaattctcttttgagaaattatttac

SEQ ID NO: 189732 - DNA, 201 bp, Homo sapiens
tagagtgcagtgtgcatggcggaacacacgcccctttccctcagtgggtcagcatggtcacctttggtaatttagctcagactattccagaaccattagawacaggctgtctactacaatatatgtttctttgatgcatattggctcctgtgtgtttggtaaatagggaaattatatcaattcagtgtgtaagtttttgtg

SEQ ID NO: 189733 - DNA, 201 bp, Homo sapiens
atctggtccatgtaaaattactgtctacccaatgcacctgtattcttgtttcctgagaaaaataataactaattggtttctattcgtctaatttataatakcgattgatttttcttaacagaacacttaaaagaaaaactggatgaatatattaagctgtggaatggcctagtgaaggtatttcgaaatgaaagaagggaa

SEQ ID NO: 189734 - DNA, 201 bp, Homo sapiens
acaataaaagtttggggatctgaaagctttaaggagctgagctgcagggcaaaggctaagaaccggactcgggaaaagtgcaagttagttacaaggtagcmgggactgtgaagggggctcgcgtggagagcaggggactgcggatctggaagggggcaggtagagaggaaggcagcctggcagagcgaggcacacgggtca

SEQ ID NO: 189735 - DNA, 201 bp, Homo sapiens
ttacatctacattgattagctggccttcttctgtaaaggtgagcatttctttatcaactgtgggtcgactacagtttcttctaaaaagttagggtaatttrtaatccttcccctttaccacgtttcgagtagatctcaccatatcgaatttttcccattattttttcagggctacttttctttctgacacaactaaatttg

SEQ ID NO: 189736 - DNA, 201 bp, Homo sapiens
gcctggtgctgggtggcatggagcctatacctgtagaggctggcctcatgactagggctgcagggccagcttggtagcttgggtgggcatgaagtctgggrctaatggggctgttggggttggcctggtggtggggcaggtccagagacagcctgccaggctagcctagagcctggggctgcaggatcctgcctggtgctg

SEQ ID NO: 189737 - DNA, 201 bp, Homo sapiens
catttcttcaaggaacctcagttctttttagtgaaggatggtatgtataaatcaagctctaagtgttaggcatacctattgtacttgtatctttgcttctwgaccttttcagtggacagtgcaaggaaatatgtgtatttctcttaatcatgagttcatgttagtatttgtaatttaaatttaacattaattttaaaaatt

SEQ ID NO: 189738 - DNA, 201 bp, Homo sapiens
gagtgccaattatataccaggcatggtactagttgttaaggaaatactccttgtccttaatctcatggatcttgtaaaaaccacacagcaatcaaacctcrataaatatataaataaaaattgtgctactgctttcatagtgaaaaccatagggggcaagaaaatggaggaatttggtcataaaagccttacttgaagaaa

SEQ ID NO: 189739 - DNA, 201 bp, Homo sapiens
atcaactcatgcagtatgaccagtgtttgacaaagggagctgatggatcaaaagttatgattacacactgtaatctaaatgaatttaaggaatggcagtayttcaaggtattctgcattttaacttctgaaatattatatgcttttcattttcagtaacatctagcatgtggaatttagataaataaatcttaaaacctgc

SEQ ID NO: 189740 - DNA, 201 bp, Homo sapiens
tacttttgctcacaaaaaggcaagagtattcatgagcgatagtttgaacatctaaaaattcacagtagtacctcagttggaacagtctgcttaacataggwtgaaaagcactttagtccttacttatgggacagactgatttaattctttgtatcaaatttttaaaaatgtttttccctttatttcacaagctgtcagggg

SEQ ID NO: 189741 - DNA, 201 bp, Homo sapiens
ttatgatgaaaatagtttcggccttacagacccaatcctggatagtctgaggaccagactttgagaagctctgagctatattgaagaaacctacagcatayggtgagggccaaaccagggcatctgcagtggcgatgggaaggaatataaaccagagacattgcacatatccatccttagtgactggtatgtgagtgaatg

SEQ ID NO: 189742 - DNA, 201 bp, Homo sapiens; identical to SEQ ID NO: 32919

SEQ ID NO: 189743 - DNA, 201 bp, Homo sapiens; identical to SEQ ID NO: 32920

SEQ ID NO: 189744 - DNA, 201 bp, Homo sapiens
tggagccgctgttatgtgttatatgctgggaatatggtagtgagcaaaatagctgaggctcctgtctttaatgagcttacagtcttgaaaattttgtaggraagatttctatgcaagggcatagaggtatatacaaaaggatgattattgaaacattattatgaaatcaacagaaatgcccatcaataaggaagtaattca

SEQ ID NO: 189745 - DNA, 201 bp, Homo sapiens
ctgttattagggtgattatttgttttagtttacatttgctgcccattagccattattatcctttcactctcagaagtgtcctgggttggatggtaaattayatggatgtcttgcttaaagtgtattttcctagataaataaaatgagtaataaccctttttggccacagtttgtgggccagatgcacaagtaaacaattgt

SEQ ID NO: 189746 - DNA, 201 bp, Homo sapiens
gagtcctagcgatccacctgcctcggcctcccaagcagctgggactacaggctaaatttttttttttgtagacacggggtttcaccacgttgcccaagctrgtctggaactctgggctcaagcgatccgcccacctcggcctcgcagcgtactaggattgcaggggtgagccaccatgcctggcctactttttccttttac

SEQ ID NO: 189747 - DNA, 201 bp, Homo sapiens
gtagattttatatgcatttccatgttcttgataccttttagactcacctcatagattatacttttctgaaactgcttttaaaaatctatatcaaaatagawaccaagggctattataattattttagtatatctctggacatcataaccaaatacaaaagttcttcagcctgtcagttttcaaagtgtcagctctggattt

SEQ ID NO: 189748 - DNA, 201 bp, Homo sapiens
gagatctcatacaaggtaacattttatttcaacagatggaattctccaagtcgttactaacttctgtggctttcagataaagctagttttttgtgggggaraaaagcccacaattatatcatgcatttctccaaattgtatagaatgatttaatgaaaatggatgcctttgaggaaaaaataaggcaaaatgcaagctcca

SEQ ID NO: 189749 - DNA, 201 bp, Homo sapiens
tactagaatttttaaaaagcattttaaaggtccaaaacgtttaaacaggttatttagcagtaatcaggatggttatatgacactcacttgaaagaggcttyagtttagattatctagactaactgtctttttacaaatggaaaattcagagagatccaaagagatgaagggattaactccactcacatagagattcccttc

SEQ ID NO: 189750 - DNA, 201 bp, Homo sapiens
gctgggactacaggcgcccgccaccacgcccagctaattttttgtgtttttagtagagacggagtttcaccgttagccagaatggtctcgatctcctgacyttgtgatcctcccgcctcggcctcccaaagtgccgggattacaggcgtgagccaccgtgcccagccaggtcttgtttttttatccattcaaccactgtgt

SEQ ID NO: 189751 - DNA, 201 bp, Homo sapiens
atatatatatatatattttttttttacagaattatgttagagttgtggaggtttggtgggatgaatataaagactacttctatgctagtcgtcctgaatckcaggcattaccatatggggatatatcggagctgaaaaaatttcgagaagatcacaactgcaaaagttttaagtggttcatggaagaaatagcttatgata

SEQ ID NO: 189752 - DNA, 201 bp, Homo sapiens
caaaaaaaaaaaaaaagtggaaaaattccttttggggaaaagaagctagtataatttagggttttaattactatcatacttgattgagagaaatcccttaytcttaaaataatacaggtactgcatttcttattttataatactgcttaaatgcttcctgtcctaggcagtataatgaattaaaatgtagtagatatttag

SEQ ID NO: 189753 - DNA, 201 bp, Homo sapiens
gctggcaagaaaaaaaaagttgttatttctaagtcaatgtttgtagaacaattgcctggttaggcaatgagacagtagtgtttaatacaattgagctgtgrtgtataatatgagtagtcatacactcttttgtaagagtcttggattgatatttttgttatactttgcaatcaaataaaggaggctgtttgcacatatcct

SEQ ID NO: 189754 - DNA, 201 bp, Homo sapiens
gtgatagatacctcctgcagtgtgagttagcaagatatttgagtaaagtgttcagatccccgtggagaagagaaataaatatagtttgaatgatagtgcarttaggtgaaattgataaatggagtgatatcaacctctcagggaaaacacatagctttaaaacagtatttgacctcatattcctccatataaacagtagat

SEQ ID NO: 189755 - DNA, 201 bp, Homo sapiens
ttgatcacagagtgatctttgtactttggttttcgatttggtaattttgtttgttttgataaagtaaaacattctgtaaaaaaattgacagtgttaaaacrttcacttaaatgatgggaataatagcagtattggttttcacataagcagtcagaatctagaattaatgtctaatataagggattaaaatatattcctgtg

SEQ ID NO: 189756 - DNA, 201 bp, Homo sapiens
aaatccagaaaactgacaatcaagagaaatccaaagtctgaggtgtggttgagaagcttttccatttccttaaactgtctcctcatgaaagtcaagtgatratttctgatgtcagtgatatcaagggtccaaatttgaaacttttttcttactgtgttttccagaacctgcacagatttactcatattccttcaggaaagt

SEQ ID NO: 189757 - DNA, 201 bp, Homo sapiens
cagaggaagagattatggaagtataatagaattgcccagtgggaggaggaatcattcttgatggtaaaggaaaggatgttgatgcctttagaaggaatacmgctgtccaaagcactggctctcaaacttctttaggcttcggagtcacctagagggtgtgagaaaacggattacttggccccatcccccgaatttctgatt

SEQ ID NO: 189758 - DNA, 201 bp, Homo sapiens
ccagatgcattaccatggacaccaggcctggcttgatctagctactacctaatcttcagcctcaccttgccccaggcacgcctcactctgtactccagccrtatctagtccttcttgcttggcataggccttccttctacaggcactttgcacaacacgttctctacctgggatactcttccctcctgtcttcacctaagt

SEQ ID NO: 189759 - DNA, 201 bp, Homo sapiens
aaagttttattagagaactgtaactatcaaagaggaacttaacccatttttggttatatctgggctaccataactttatgtgcctttccacctctccctayccgcaagtctgtgtgtgtgtgtgtgtgtgtgtgtgtgtgtgtgtgtgtgtgtgtgcgcgcacgcgcgtgcgcacagacacctatgtatatatattttagt

SEQ ID NO: 189760 - DNA, 201 bp, Homo sapiens
gggctaccataactttatgtgcctttccacctctccctatccgcaagtctgtgtgtgtgtgtgtgtgtgtgtgtgtgtgtgtgtgtgtgtgtgtgcgcgcacgcgcgtgcgcacagacacctatgtatatatattttagttgtgatcatatataatactatataagatagatattgcaacacatattagtctttttttact

SEQ ID NO: 189761 - DNA, 201 bp, Homo sapiens
cataactttatgtgcctttccacctctccctatccgcaagtctgtgtgtgtgtgtgtgtgtgtgtgtgtgtgtgtgtgtgtgtgtgtgcgcgcacgcgcgtgcgcacagacacctatgtatatatattttagttgtgatcatatataatactatataagatagatattgcaacacatattagtctttttttactcatgtct

SEQ ID NO: 189762 - DNA, 201 bp, Homo sapiens
tttaatatttaaagttggaaaataaattttattctgagaacatgaggcaatttttagtttttagtacattaatttgactgaaggatattaaaaaaacaatrgcaaaactatgctattctcagcgtagagaaaatgtatgctcagcatttcaatactcttagtttttaaaaatgaggtttatcattaaattatagttcagcc

SEQ ID NO: 189763 - DNA, 201 bp, Homo sapiens
ttggccaggcacagtggctcacacctgtaatcccagcactcggggaggccgaggtgggaggatcacgaggtcaggagttcgagaccagcctgaccaacatrgtgaaacccagtctgtactaaaaatacaaaaattagctgggtgtggtggtgggcacctgcaatcccagctactcaagaggctgaggcaggagaatcgctt

SEQ ID NO: 189764 - DNA, 201 bp, Homo sapiens
cttttggcataagacgacagcctttcttttcattagctcaggaggaatactggctttccaagtgagctcctccaatccagtgatatttgcacatctcaccygggcctttcggttacaaattcaccaccttaaggagccgtgtgaaaaagcaagaacaatcaataagaaggaaaaaaaaaaacccttcagctataaatcagc

SEQ ID NO: 189765 - DNA, 201 bp, Homo sapiens
aactttagtgtcctgagagaagagaaagcgctgtggacagatggacctgtcttcaggggaggaatctggctgcctctgctcgctgaattctgccttgaggscttcctttcatgttcatgtgcagcatggtatcatccagctgtgtaaatcttaccatccttcaagatcagttcaggatctacctgttctctgaagattttc

SEQ ID NO: 189766 - DNA, 201 bp, Homo sapiens
cagcatttagagttcaggaatagaaggaaaaaccaacagaggacactcatgctgctctctctgtacttcttgctttaatatactttttccctatactcttwttttacctgtcctattacagcaaattatgtttaactccaactagaccataagcctttcaacacacagatctctctctgagggcccagacaagtatatcca

SEQ ID NO: 189767 - DNA, 201 bp, Homo sapiens
tcccaccaacagagtaaaagtgttcccttttcaccacatccatgccaatatctattattgtttgatttttttgattacggtaattcttgcaggaataaggyggtatcacattgtggttttgatttgcatttccctcataattagtgatatcgagcattttttcattttttttggccatttgtgtatcttcttttgagaatt

SEQ ID NO: 189768 - DNA, 201 bp, Homo sapiens
cagatactaaggcaatacagaagtgcaatgttagaaatattcacacgtacgaaagccgaaagtgcatctgtgtaaacaaaacaaaacaaacaaacaaaacrggacccaggaccatgggaggagggcagagtttcccaggagctggttcctgagtttaaatgtgctggtttgaactattgtgtagttaatggtaagttcaca

SEQ ID NO: 189769 - DNA, 201 bp, Homo sapiens
gccaaaaagtttttgaaataaaatgattattttaatggtttggtattgtgaacatggttatggtaaaattagaatattgcttctttcatctaaaaggtggyaggtagcaagatgaagaaatggaaatagaaagtaagggaaagttaaagttaactatcatatttttaatgttttaatatgagtataatctgtttactatat

SEQ ID NO: 189770 - DNA, 201 bp, Homo sapiens
attattattatactttaagttttagggtacatgtgcacaatgtgcaggttagttacatacgtatacatgtgacatgctggtgcgctgcacccattaactcrtcatctagcattaggtatatcttccagtgctatccctcccccctccccccaccccacaacagtccccagagtgtgatgttccccttcctgtgtccacgtg

SEQ ID NO: 189771 - DNA, 201 bp, Homo sapiens
ttcccttacaaccctagcataaattaaaactatcagtatacttaagtgagtcatgcaagtgtcattttgccaggatatataaaagatatctgagtaatgawatttagaaatggaaaatgtgaaaatagcatcattataggaagattccaaatctgtttagatttataggttatggtcatttatataaacattttaaaaatg

SEQ ID NO: 189772 - DNA, 201 bp, Homo sapiens
cccgggaggcggagcttgcagtgagccgagatcgcgccactgcactccagcctgggcgacagagcgagactccatctcaaaaaaaaaaaaaaaaaaaaaargaaaagaacatatgaattgaatggctgtcctcttgactgttaaagatggagctttgatatttacagatgggtcatggagcctggtccctaatagagggac

SEQ ID NO: 189773 - DNA, 201 bp, Homo sapiens
ttgtcctgttgtattctgcctccatattctctatctctgtcacataaaatagaggaaaattggccaggcacagtggctcacacctgtaatcccagcactcrgggaggccgaggtgggaggatcacgaggtcaggagttcgagaccagcctgaccaacatagtgaaacccagtctgtactaaaaatacaaaaattagctggg

SEQ ID NO: 189774 - DNA, 201 bp, Homo sapiens
tccaccttccgggttcacgccattctcccgcctcagcctcccaagtagctgggactacaggtgcccgccaccatgcctggctaatttttttttttttttttgtatttttagtagagacggagtttcaccgtgttagccaggatagtctcgatctcctgacctcatgatccgcctgcctcggtctcccaaggtgctgggatt

SEQ ID NO: 189775 - DNA, 201 bp, Homo sapiens
ttaaaacatgtaaaccatgcattacactgcatttcaacccctgcaagggtgatgcagctagctttacctgattttacttggattgtttcttttttttttttgagacggagtctcgctctgtcacccaggctggagtgcagtggtgtgatctcggttcactgcaagctccaccttccgggttcacgccattctcccgcctca

SEQ ID NO: 189776 - DNA, 201 bp, Homo sapiens
cccagacacccagaggtacatttgataggtacctgattcagagaaggtgaaaattttagattctctatctctctctctccctttttttttttttttttttttgacaggtaaacagaagtaactatcatttggggttgtcaagatatgggtagtagatacctaattccatgaatgccttctctgtgcaagtgctggaaagta

SEQ ID NO: 189777 - DNA, 201 bp, Homo sapiens
gctcacttcgagcgttgtcattgtcttccataatgaaggatggtcaaccctcatgagaacagtccacagtgtaattaaaaggactccaaggaaatatttascagaaattgtgttaattgacgatttcagtaataaaggtaatggctgtgaaactcacattttgtctataaaataagttaagcatgaataattgcaaaaagg

SEQ ID NO: 189778 - DNA, 201 bp, Homo sapiens
agcatttttatttattaaactgtttgtattaataattctcctttaacttttagttttccttttaatagaaacatcagccaggtgtggtggctcatgcttayaattctagcattttgggagcctgagcctggaggattgcttgaggctagaagcctgggcaatatagcaagaccttgtcgcttataaaacaaacaaaccaaa

SEQ ID NO: 189779 - DNA, 201 bp, Homo sapiens
caaaacaaaagaacagtaaggtacagttgtacattgcaaaaaagaagtccttaagtcatgatgcgtgaagttctctagaagttcttgtcagtacttactgytgtacttcaaattttttattctgtagatatgaagtaaatattttatatactttttattaacatttattatcgcaaaaatagttcccttacaaccctagca

SEQ ID NO: 189780 - DNA, 201 bp, Homo sapiens
tgaatgaggtccccgagggagaaaacacagatagagaagagaagactagacccatccgtcagaaacgccagcatttagagttcaggaatagaaggaaaaascaacagaggacactcatgctgctctctctgtacttcttgctttaatatactttttccctatactcttattttacctgtcctattacagcaaattatgttt

SEQ ID NO: 189781 - DNA, 201 bp, Homo sapiens
ttgctcattggccccctagcctgcaagacatccactcttcactccagctcctggcgcctccatgcctcttactccaactcccttccttaactaatttcaayttatcttactgctctcaacttagagatcaccaatactgaaaagcccttcttactattccccacttcatcaaaaagatgcagttctatgttctttccaggg

SEQ ID NO: 189782 - DNA, 201 bp, Homo sapiens
ggcagagagaggtggaaatatgtaagagggaagtattcttggggaaaagttggggtaaaaactgtctgataggatctaccacctttccactaaacagctayagctgccagaccagctggccaccatgctgtctcctggcagcctttgctcattggccccctagcctgcaagacatccactcttcactccagctcctggcgc

SEQ ID NO: 189783 - DNA, 201 bp, Homo sapiens
ctaccccaagtttggttgtgttctcaagtgaaaaacattgctagctatgccgtgtgtgaactttcagcctagtcattttgtggccataaatattgtttctrtgagcctcttttcagctgtgctagtcatgtgttttctgtttgttccttaaattatgtaaaatgacccctttggcagccaacaaattttatagcttactat

SEQ ID NO: 189784 - DNA, 201 bp, Homo sapiens
agaaaagaggtttaattggctcacagttctgcaggctgtacaggaagcttggcagcttccgcttctaagaaagctcaggaagcttccaattatagtggaaygcaaagggggagcaaggcgtctcacctggtgggagcaggagcaagagagagaagcaggaaggtgctacacacttttcaccaaccagatgtcacaagaact

SEQ ID NO: 189785 - DNA, 201 bp, Homo sapiens
ctggttgaaagtaaaccttgtcctagaagggcaaataatattttcatcctttgattccagctccattcagtgcatcgagtgtgctttagtgttatccctcrtctatttgtttccttgggtggagctagactgatactgtggactgatttaaatgtaggcagtctggcatttgggagaaacctagggttcctcactcaagaa

SEQ ID NO: 189786 - DNA, 201 bp, Homo sapiens
tacatgacactgtctagctggtaaaccaagcataaaccaacacttatatagaaggaatatcccctacctctccatttattgtagaagcagagcatctattytgaaaaatagacgactctcaatagacagcaaggattacatatggccacaatggggagaaacttggcccagtttagagccaggactcaattttgccatagt

SEQ ID NO: 189787 - DNA, 201 bp, Homo sapiens
ggctgtgactcccttagaggcaaggcctttttctataacatggcacttttatatagagtacctggcatatagtagacctgtaataaatattcggataacaraaaggacagttcttttatcttttaatgatgcatataaatagtaacctgaatgacaaataacactcatgataaaccagagtatcactgaataagcattcct

SEQ ID NO: 189788 - DNA, 201 bp, Homo sapiens
ttaattaacttagcatttgatttatagagaactttaatatttcaatagtattatctatcaaatagttaatgaactattttaactttctttgagaaagttaraaggcagatatctccagttttaacattcggctctgactcaaattttggttaagttttgctgtcacatctagactttattacataaacaaagatttaaatt

SEQ ID NO: 189789 - DNA, 201 bp, Homo sapiens
ctgttgaaatgaatttgttatgtgtaggccattttcatgtgtctaatataggctgtttatgatatgacatttgtatttttataacgatatatatatatatwttttttttttacagaattatgttagagttgtggaggtttggtgggatgaatataaagactacttctatgctagtcgtcctgaatcgcaggcattaccata

SEQ ID NO: 189790 - DNA, 201 bp, Homo sapiens
tgtttctttttcttaggtccccagccatggctgggggattatttgccattgaacgagagttcttctttgaattgggtctctatgatccaggtctccagatytggggtggtgaaaactttgagatctcatacaaggtaacattttatttcaacagatggaattctccaagtcgttactaacttctgtggctttcagataaag

SEQ ID NO: 189791 - DNA, 201 bp, Homo sapiens
tcctgttgaaatgaatttgttatgtgtaggccattttcatgtgtctaatataggctgtttatgatatgacatttgtatttttataacgatatatatatatwtattttttttttacagaattatgttagagttgtggaggtttggtgggatgaatataaagactacttctatgctagtcgtcctgaatcgcaggcattacca

SEQ ID NO: 189792 - DNA, 201 bp, Homo sapiens
gccccagccagaaaccttcagttgccctaggacctccttccaatcccatgcaatgtctgggccctttgtgaaaggaaactggattggaatagacaagaaayctcagaaatgaaagtaaaagggtagaggtccgctcttactcacccttctgatgatcccttcttcctgcacctaaatatgttgtagttttgccaatgcacc

SEQ ID NO: 189793 - DNA, 201 bp, Homo sapiens
ttctacttcctcatcttcaagtatttgtgactatttctcatgttgctaaatttagttatttctgaaaaagtaccaaatgacctataaacgcaggaagaacmgtcttccaaagcctgaagggggctctgagtgactgactggctctgggcctaggctactttgaagtgcaattcacgtttgaaacagttctcggagtctaat

SEQ ID NO: 189794 - DNA, 201 bp, Homo sapiens
gaggccgaggcgggcggatcacgaggtcaggagatcgagaccatcctggctaacacggtgaaaccccgtctctactaaaaatacaaaaaattagccaggcstggtagcgggcgcctgtagtcccagctactcgggaggctgaggcaggagaatggcgtgaacccgggaggcggagcttgcagtgagccgagatcgcgccac

SEQ ID NO: 189795 - DNA, 201 bp, Homo sapiens
tgaaatatgttagaggcttaaaacactggatattatgaaataaaattttaccataagtcatttgttttgccaaaacaatgactcaaaaatttgaaaaaaamaacaacaacaaaaaaaaccttttcattagcccttattactacatgaatagagagccaaatttacccttgcattagtctactattaatgttaaccccagtt

SEQ ID NO: 189796 - DNA, 201 bp, Homo sapiens
gcttaccttcctgtaacttcaacaatgaccatagaggaagatctccaataatctcaaatttaaagagacgatagatagattgattgatagattgattgattaaaacttagtgaaaagctctcagtttaactcttagttcattaatatataataaactaaaatttacaaaaatatcaagtgtagcgtttagacatggattat

SEQ ID NO: 189797 - DNA, 201 bp, Homo sapiens; identical to SEQ ID NO: 32913

SEQ ID NO: 189798 - DNA, 201 bp, Homo sapiens
agcttaccttcctgtaacttcaacaatgaccatagaggaagatctccaataatctcaaatttaaagagacgatagatagattgattgatagattgattgattaaaacttagtgaaaagctctcagtttaactcttagttcattaatatataataaactaaaatttacaaaaatatcaagtgtagcgtttagacatggatta

SEQ ID NO: 189799 - DNA, 201 bp, Homo sapiens
agcaaaatgcatgagaaatttgatctgtttcagtttgcttgttatcagtcagaaatcacctttgctttgcccagagaagactcaggttcactgaattctcytcaccactccgtgaaagtgtgtagcagcatggacagcccatgttatgtacagagtaaatggtgcactgggtggcatgtggaatcttgaaaggacagtgtc

SEQ ID NO: 189800 - DNA, 201 bp, Homo sapiens
tagcttaccttcctgtaacttcaacaatgaccatagaggaagatctccaataatctcaaatttaaagagacgatagatagattgattgatagattgattgattaaaacttagtgaaaagctctcagtttaactcttagttcattaatatataataaactaaaatttacaaaaatatcaagtgtagcgtttagacatggatt

SEQ ID NO: 189801 - DNA, 201 bp, Homo sapiens
ctagcttaccttcctgtaacttcaacaatgaccatagaggaagatctccaataatctcaaatttaaagagacgatagatagattgattgatagattgattgattaaaacttagtgaaaagctctcagtttaactcttagttcattaatatataataaactaaaatttacaaaaatatcaagtgtagcgtttagacatggat

SEQ ID NO: 189802 - DNA, 201 bp, Homo sapiens
cgggcgaatcacgaggtcaggagatccagaccatcctggctaacacggtgaaaccccgtctctactaaaaattaaaaaaaaaattagccaggcgtggtggygcgcgcctgtagtcccagctactcgggaggctgaggcaggagaatggtgtgaacccgggaggcggagcttgcagtgagccgaaattgtgccactgcactc

SEQ ID NO: 189803 - DNA, 201 bp, Homo sapiens
aaaaaaatctaacagttggacaatacaaaattacataacaattttctagttcatattttaatacagaagggagttttaagttggaatttttttttttttttgagacagagtctcgctctgtcgcccaggctggagtgcaatggcacaatcttggctcactgcaacctccacctcctaggttcaagtcattctcttgcctca

SEQ ID NO: 189804 - DNA, 201 bp, Homo sapiens
cagcttggggatgtatatccagagaaaacccatgcagacaagggaagggtgtgcaaactctacccagacagtggcatcagtttttttttgtttttttttttctcatcagcattaaaacaaaacaaggttgaatgaggcaatgttattcaaggacctgcactacacttatttaataacttggcttgtcagagcttacagagc

SEQ ID NO: 189805 - DNA, 201 bp, Homo sapiens
ggccaaggcgggcgaatcacgaggtcaggagatccagaccatcctggctaacacggtgaaaccccgtctctactaaaaattaaaaaaaaaattagccaggygtggtggcgcgcgcctgtagtcccagctactcgggaggctgaggcaggagaatggtgtgaacccgggaggcggagcttgcagtgagccgaaattgtgcca

SEQ ID NO: 189806 - DNA, 201 bp, Homo sapiens
ttttttatcagctatgatgactttcttttgctagaatgtaatatcatgttaaggtatagtgatttgcttataataaaatgatttaaaatattttgacacatgtctattggacatatcaatacaacagaacaaagacaatagccccatgacttcagtgcttcagagttccatgtgtgtttccttccgtgtgtctaacatagg

SEQ ID NO: 189807 - DNA, 201 bp, Homo sapiens
tacccaatgcacctgtattcttgtttcctgagaaaaataataactaattggtttctattcgtctaatttataatatcgattgatttttcttaacagaacasttaaaagaaaaactggatgaatatattaagctgtggaatggcctagtgaaggtatttcgaaatgaaagaagggaaggtttaattcaagcacgaagtattg

SEQ ID NO: 189808 - DNA, 201 bp, Homo sapiens
catatatagttttgaattacaataaaattctgaacgaagtttaagatttctttgcaattctttctgtccctggggagtttttaaaaatgcaaatattggcygggcgcggtggctcacgcctgtaatcccagcactttgggaggccaaggcgggcgaatcacgaggtcaggagatccagaccatcctggctaacacggtgaa

SEQ ID NO: 189809 - DNA, 201 bp, Homo sapiens
tgctgtggcagtgctcgggcgctatccgggggaagaggagcagttcctcttccttggctgcggcagggctgcttgggccggaaaactaacttgtgtcggckcccggccgccccgcgccggctgccggctagctcaggccgacgccgaggggagcggcggcgcggagctcgcggcggctccgctgggacgcatttgtctgcc

SEQ ID NO: 189810 - DNA, 201 bp, Homo sapiens
tttttttatcagctatgatgactttcttttgctagaatgtaatatcatgttaaggtatagtgatttgcttataataaaatgatttaaaatattttgacacatgtctattggacatatcaatacaacagaacaaagacaatagccccatgacttcagtgcttcagagttccatgtgtgtttccttccgtgtgtctaacatag

SEQ ID NO: 189811 - DNA, 201 bp, Homo sapiens
atccctactccacgtatgtgagctatatcctgtatcagaaatgtagaggaggcgtggaattggcaaagatttgttaccaaaaatcactatcagaccccatygctgttggcagtcagggaaccatggaaaagattatgggtcatggaaggttataagcaaaagtctgtggatttgcatagcagcattgagaggtaggtctta

SEQ ID NO: 189812 - DNA, 201 bp, Homo sapiens
ccaaagagatgaagggattaactccactcacatagagattcccttccagtgctagtttgccactgtcttctgactcacttcagttggctttttttttttttatcagctatgatgactttcttttgctagaatgtaatatcatgttaaggtatagtgatttgcttataataaaatgatttaaaatattttgacacatgtcta

SEQ ID NO: 189813 - DNA, 201 bp, Homo sapiens
tccaaagagatgaagggattaactccactcacatagagattcccttccagtgctagtttgccactgtcttctgactcacttcagttggctttttttttttttatcagctatgatgactttcttttgctagaatgtaatatcatgttaaggtatagtgatttgcttataataaaatgatttaaaatattttgacacatgtct

SEQ ID NO: 189814 - DNA, 201 bp, Homo sapiens
cactgggtggcatgtggaatcttgaaaggacagtgtctcttagatgcttaacttactactgggagtgaagaagatcaatgaatctcaaaaaaaaaaaaaaagtggaaaaattccttttggggaaaagaagctagtataatttagggttttaattactatcatacttgattgagagaaatcccttactcttaaaataataca

SEQ ID NO: 189815 - DNA, 201 bp, Homo sapiens
gggcggccgggcagaagcgcccccccacctcccagacggggcggcggccgggcggggtctgccccccacctcccggacggggcggctggcctggcagggaytgccccccacctccctgacggcgcggctggccgggcggggactgtcccccacctcccagacggggcggctgccgggcggagacgctcatcacttcccaga

SEQ ID NO: 189816 - DNA, 201 bp, Homo sapiens
ctggggtagaactgatcgctgatcacagtgtccaccacatctccagtaaatttgctataatttcttcaaaacaaattttcttgataaagactttttccctwttggctattcttttcttatttttcccattgaagaatatatatatttagaggcatttgctcttatgtcattcaccataaactcaaagtcttttttaaccca

SEQ ID NO: 189817 - DNA, 201 bp, Homo sapiens
agacggggcggccgggcagaagcgcccccccacctcccagacggggcggcggccgggcggggtctgccccccacctcccggacggggcggctggcctggcrgggactgccccccacctccctgacggcgcggctggccgggcggggactgtcccccacctcccagacggggcggctgccgggcggagacgctcatcacttc

SEQ ID NO: 189818 - DNA, 201 bp, Homo sapiens
ctcttacttatgtgggtatgtttttgctttttcattttttcacattgttggtacttaataaatttgtgttagtgacccatttggtatcttagagactaaakaacttaatgatttcagtgttaataaggatcttcactaacatcaaaataaatataatttgtctgtggacttacagttctaaacaaaattatggaaaaataa

SEQ ID NO: 189819 - DNA, 201 bp, Homo sapiens
cttatgaaaaacacatatttgtaaaagaaattatttgcctagaaaaatttaccatgcaatatatttcatcatattggagttccttttttttttttttttttgagatggagttacactgttgtcatgcaggccggagtgcaatggcacaatctcgactcactgcaacctctgcttcccaggttcaagcaattctcctgcctc

SEQ ID NO: 189820 - DNA, 201 bp, Homo sapiens
ataactttatgtgcctttccacctctccctatccgcaagtctgtgtgtgtgtgtgtgtgtgtgtgtgtgtgtgtgtgtgtgtgtgtgcgcgcacgcgcgtgcgcacagacacctatgtatatatattttagttgtgatcatatataatactatataagatagatattgcaacacatattagtctttttttactcatgtctg

SEQ ID NO: 189821 - DNA, 201 bp, Homo sapiens
atttctggtcttcatttttattggaagacctcgaaatactttaaatatgtttgttctatagtttttaaaaaataaatcatttctgagtatgttgaaactcwgtacccagcaacataattttctttggttaataatttttctaaactggaaatgaaatgccttaaaattatgcatttgtcaaatatgctttaatatgtggtt

SEQ ID NO: 189822 - DNA, 201 bp, Homo sapiens
caagcacagccagaagacaaagacagatgttgagaggggcttatccacctctaattccaggggttccatgaggaaaacagggatttctccaaaatgggatktgtggcaccttaatctatttcccagggagtcccaggccaccagaagtcattctagggtctttcacgtatgcatcaagaatgataagacacagtggaaaaa

SEQ ID NO: 189823 - DNA, 201 bp, Homo sapiens
ctcattttggcaatcccatgtacctaaacatgttaaataatcctgtttacctctcttcagcatgctccagggaccctttgtagcacccaaaagcaaggggycaggaaagacaaccttgagactgaagtttaattttgggaagcctgtgaaatatgttagaggcttaaaacactggatattatgaaataaaattttaccata

SEQ ID NO: 189824 - DNA, 201 bp, Homo sapiens
atgtccagggtggttacagtcaagaacatgattgacaaatttggttatttctgtggcatacaataacccaacataacaaccttaattgtgattgatagcamatattcagacattagaaccttagacatcccatacaattttggacatatgttaatatttttccctaaaacataacctgaagaatattagacctcattttgg

SEQ ID NO: 189825 - DNA, 201 bp, Homo sapiens
cggagaggggagtccgagtggattgccgagttacagctgactccagaagcttttataagaaactcttctcatctctgtagcagtttgagtaacttctcctrtcagtaaagctgtctgtgcaactccccttatcttatgcagctgtgggtatgtctctaggcaagcacaaagcgccacttctcttttctgtataactgtggg

SEQ ID NO: 189826 - DNA, 201 bp, Homo sapiens
agttggacaatacaaaattacataacaattttctagttcatattttaatacagaagggagttttaagttggaatttttttttttttttgagacagagtctygctctgtcgcccaggctggagtgcaatggcacaatcttggctcactgcaacctccacctcctaggttcaagtcattctcttgcctcagcctcccaagtag

SEQ ID NO: 189827 - DNA, 201 bp, Homo sapiens
ctcactgagtgatgaaacatggattgggagagatgactcaataaacattttaaggaatgtttgtaaagtgtgattttcaaatctgtgttgaacttaaattyccaacttgttctctgcacaactgttttttactgacttgcaccttggtacaatgccattggtctccattgaagtctttatggaaaacagcacagtgaaact

SEQ ID NO: 189828 - DNA, 201 bp, Homo sapiens
tgtgacaaccagttctccagatgttgccacatgccccctggggggcaaaatcacccctgattaaaaatcactgctgtaaggggttaattgaggtaatgttrtgggaggagggtgtgacacaatgaaaataacagagatggatttataggattaaggggaagaattggaacagattgatgaaatgggacaaatagataggaa

SEQ ID NO: 189829 - DNA, 201 bp, Homo sapiens
agggctctggtcccaaagttcctaaagtttgtgtggtctggtcattgtccctattttttttttaagtcctattgccctccctctctccctccctccctccyttccttccttcccgtattttttttctgaagtctttctttctttctttgttactttctttgtttctttctttcgcatacccttgcaaaacagagattgcta

SEQ ID NO: 189830 - DNA, 201 bp, Homo sapiens
aaagtgagatgatagatgtaaaagtgctttgaaaattctaagagctatgcacatgttagtaagatcgttaatatctttcttaagcttgtctatgggaaatwttttttaaaaagatattttacatttacactcatgccttatatgccagataattctcctcttacctgagtccaaaataaatattaattcttatactgtaat

SEQ ID NO: 189831 - DNA, 201 bp, Homo sapiens
catagtatattagaagtcttgagataaaaataaaagatataactattagctattccataataggcatcactccattgtcaagagtcccagtgtttcaatcygtaaagtaactttgggacgaactggtttactgtgtagtactcagcctggttaccctgcttaagtttaatatacagtattagagttgctgaccttgatttc

SEQ ID NO: 189832 - DNA, 201 bp, Homo sapiens
tttgggaggccgaggtagcaagattgcttgatcccagtagttcaagaccagcctgggcaacaaagtgagaccccatctctatttaaaaaaaaaaaaaaaaraaagaaagaaaagaaatagttgatatttttctaatgagcatgtagtatttttggtacatttaattttcctgttaagtcaggcaaatcacgaaattatact

SEQ ID NO: 189833 - DNA, 201 bp, Homo sapiens
aagtcttgagataaaaataaaagatataactattagctattccataataggcatcactccattgtcaagagtcccagtgtttcaatctgtaaagtaacttygggacgaactggtttactgtgtagtactcagcctggttaccctgcttaagtttaatatacagtattagagttgctgaccttgatttcttttagtggagca

SEQ ID NO: 189834 - DNA, 201 bp, Homo sapiens
ttttgggaggccgaggtagcaagattgcttgatcccagtagttcaagaccagcctgggcaacaaagtgagaccccatctctatttaaaaaaaaaaaaaaaagaaagaaagaaaagaaatagttgatatttttctaatgagcatgtagtatttttggtacatttaattttcctgttaagtcaggcaaatcacgaaattatac

SEQ ID NO: 189835 - DNA, 201 bp, Homo sapiens
ccttgatttcttttagtggagcattatgatgtcaactctactattttctctattttgttaccctttggtttatatcttggcctgatacttaaagaaagggraaaaaaagataaagaagaatagcaattcctctaagcgggtctatttctttgagcagataattcttaccagaatatcatactttaagccacacctagagct

SEQ ID NO: 189836 - DNA, 201 bp, Homo sapiens
gtggcgcgcgcctgtagtcccagctactcgggaggctgaggcaggagaatggtgtgaacccgggaggcggagcttgcagtgagccgaaattgtgccactgmactctagcctggacgacagagcgagactctgtctcaaaaaataataataataataataataataataataattataattatatctgtgcccacttcccca

SEQ ID NO: 189837 - DNA, 201 bp, Homo sapiens
acttcatccatgtccctacaaaggacgtgaactcatcattttttatggctgcatagtactccatggtgtatatgtgctacattttcttaatccagtctatmattgttggacatttgggttggttccaagtctttgctattgtggatagtgccgcaataaacatacgtgtgcatgtgtctttatagcagcatgatttatagt

SEQ ID NO: 189838 - DNA, 201 bp, Homo sapiens
agcctaattagcacattaatatcagagagctgacaacctcctacatgttattttaggattccatgtgcaagaccatattattctagttatttgaatggcaygtattctccacagcttgctaacagtagttttgtcttttaaaatttatgtgtttccagtgtttagggtctgctaaggagtgggaggtgaatgtgtcatcat

SEQ ID NO: 189839 - DNA, 201 bp, Homo sapiens
ctaaaaagctcttatagtaaatttgagaggatttttaaattatggagaacaagatagtattgcccttacctaaaattctccctcaatattttgtttcctttgctttggaaacagcatccaagcagggccactgagaagggtgtgtgggggtgggtgttttattgacagttgtttgaaggaaattatgcacaggtacctaaa

SEQ ID NO: 189840 - DNA, 201 bp, Homo sapiens
gctaaaaagctcttatagtaaatttgagaggatttttaaattatggagaacaagatagtattgcccttacctaaaattctccctcaatattttgtttcctttgctttggaaacagcatccaagcagggccactgagaagggtgtgtgggggtgggtgttttattgacagttgtttgaaggaaattatgcacaggtacctaa

SEQ ID NO: 189841 - DNA, 201 bp, Homo sapiens
tcttttttctcctgattttctggccttcatttttctgccaaatattttaaaaaatagtgttttactgtatgtttttagataagccacctcatgccattctygatataagttgtggttattaaattaatttaataaattaactaattataaacttggccaaagtcacacaggtaagaaatggtaggtccaaatatataaacc

SEQ ID NO: 189842 - DNA, 201 bp, Homo sapiens
agctaaaaagctcttatagtaaatttgagaggatttttaaattatggagaacaagatagtattgcccttacctaaaattctccctcaatattttgtttcctttgctttggaaacagcatccaagcagggccactgagaagggtgtgtgggggtgggtgttttattgacagttgtttgaaggaaattatgcacaggtaccta

SEQ ID NO: 189843 - DNA, 201 bp, Homo sapiens
ggctaccataactttatgtgcctttccacctctccctatccgcaagtctgtgtgtgtgtgtgtgtgtgtgtgtgtgtgtgtgtgtgtgtgtgtgcgcgcacgcgcgtgcgcacagacacctatgtatatatattttagttgtgatcatatataatactatataagatagatattgcaacacatattagtctttttttactc

SEQ ID NO: 189844 - DNA, 201 bp, Homo sapiens
aagctaaaaagctcttatagtaaatttgagaggatttttaaattatggagaacaagatagtattgcccttacctaaaattctccctcaatattttgtttcctttgctttggaaacagcatccaagcagggccactgagaagggtgtgtgggggtgggtgttttattgacagttgtttgaaggaaattatgcacaggtacct

SEQ ID NO: 189845 - DNA, 201 bp, Homo sapiens
cctggctaattttttttatttttagtagagacggggtttcaccgtgttagccaagatggtctcgatctcctgacctcatgatccacccacttcggcctccsaaagtgttgggattacaggcctgagccaacactcctggcctccttcttttttataaggatgtgtgcctcttcacatagagtgctgtgtaggacttgaact

SEQ ID NO: 189846 - DNA, 201 bp, Homo sapiens
cagattaagtatgtggcctagcaattttgtaaattactgttttttactttgcatttaacatttatgtaattccaagccaatattttgaacctacttttaayagttacataagaccttttagaatgaattttgtatttatcttttttctcctgattttctggccttcatttttctgccaaatattttaaaaaatagtgtttt

SEQ ID NO: 189847 - DNA, 201 bp, Homo sapiens
atatctgggctaccataactttatgtgcctttccacctctccctatccgcaagtctgtgtgtgtgtgtgtgtgtgtgtgtgtgtgtgtgtgtgtgtgtgtgcgcgcacgcgcgtgcgcacagacacctatgtatatatattttagttgtgatcatatataatactatataagatagatattgcaacacatattagtctttt

SEQ ID NO: 189848 - DNA, 201 bp, Homo sapiens
ccttcaagatctgtgagatttatccatcacaaataaatgtgttcagattaagtatgtggcctagcaattttgtaaattactgttttttactttgcatttamcatttatgtaattccaagccaatattttgaacctacttttaacagttacataagaccttttagaatgaattttgtatttatcttttttctcctgattttc

SEQ ID NO: 189849 - DNA, 201 bp, Homo sapiens
ttatatctgggctaccataactttatgtgcctttccacctctccctatccgcaagtctgtgtgtgtgtgtgtgtgtgtgtgtgtgtgtgtgtgtgtgtgtgtgcgcgcacgcgcgtgcgcacagacacctatgtatatatattttagttgtgatcatatataatactatataagatagatattgcaacacatattagtctt

SEQ ID NO: 189850 - DNA, 201 bp, Homo sapiens
aacacctgaagtgggagttcctgctctcacaatctagttgggggtggggagagctattgcttaatccagtagcaatgtaaagaaataatacaagaactgtyacaaggatatgtttcatcagtagtcaaaccagtaggtggagaaggcttaaaatggcctttggggaatgcacagttactagtaaagagagaatgaaaactt

SEQ ID NO: 189851 - DNA, 201 bp, Homo sapiens
aagaattgttgtatttatcacttctgtggaaaagttttccatccagtggtctatgtgaggtcaggcatcagccctgttaccacctgcttgcccctcccccrtccccatcctcccctccctaagacctcatgaagaatactgataacacctgaagtgggagttcctgctctcacaatctagttgggggtggggagagctatt

SEQ ID NO: 189852 - DNA, 201 bp, Homo sapiens
aggtcagcatttattaagattatctgcttggacttgcaaagcacagaaagttcctttaattaaataaattatgtcccagactaacaccatttatcccaggytttagccctgagtgactgtctacagttgacccataagcctctgaaaataaaggtttttaaaggaaatgttgacagatccattaaaacagcagtcccccac

SEQ ID NO: 189853 - DNA, 201 bp, Homo sapiens
caacttgggatggtcctttctcatctgcactatttccttgttttaggtctgtccacctgtggagtcaagacaaaagaaacatgtttcttatttccttcccrtctctgggcctcttgccctttctctgaagtgaatgatgtgaaaaatgaccttacatttccgatcatattctgttgtgtgattttaaatattgatttattt

SEQ ID NO: 189854 - DNA, 201 bp, Homo sapiens
aagtaatttacttgttaatcaatttaattcagcaatgggaaaagatctttctcttctttctgaaatcttacacagtgaagggatgaaaatggttatactaytggtaatcagagatgttcctattttgttttgatgtgtagattccgtagtacctagtgttgttggatattaagaaaaattctaatccctgttcttgtggga

SEQ ID NO: 189855 - DNA, 201 bp, Homo sapiens
agttataaactcacgttgcatttattgtattttcacagacctctacccccaactacgaatttagaaaaagtttcctggagactagtttgaaaaatatttayggtggcaccactagatatcccataacaacccaccccagtgacagacaatttcaggaaaaccttgactctttttttctctccgaataagtcttttgcccat

SEQ ID NO: 189856 - DNA, 201 bp, Homo sapiens
taaattaatttaataaattaactaattataaacttggccaaagtcacacaggtaagaaatggtaggtccaaatatataaacctaaatatgataaatttccragtacttgctgttctctttgcaccttgctgccttatggaatcaaggtaaaaataaagaaaaaaatgtaagtgctttgaaagggttcacagctatttgtat

SEQ ID NO: 189857 - DNA, 201 bp, Homo sapiens
ctgtgtagggcaatctggccctgggatggtctgaaacccggggtggaacctggggtcatagaggctggcctggtgctgggtggcatggagcctatacctgyagaggctggcctcatgactagggctgcagggccagcttggtagcttgggtgggcatgaagtctggggctaatggggctgttggggttggcctggtggtgg

SEQ ID NO: 189858 - DNA, 201 bp, Homo sapiens
tcttacctgagtccaaaataaatattaattcttatactgtaattttatctaaggtgaattgtgtttgtgaggttttcttattctctatccatattaaaggytctctttgatatctaccaagctatttagaatgtattgctataatttataaaatggttgctatttttaaaacattgatttaattggaatgctatagctttc

SEQ ID NO: 189859 - DNA, 201 bp, Homo sapiens
cctcaatccttatctagctgtcaaagtctcgttcaaatcctgcctcctccaggaaatcttatctgctcactacaactcaaactgatttgttgacctggccrtttacagcatttgtttgaccataccacctggcccttaaggctgcctggcgttttctaataaaagctatcatttttctgaatacagactatttgcttgctt

SEQ ID NO: 189860 - DNA, 201 bp, Homo sapiens
ttatttcttagcagctccatgagatacatactatcattgtcccaaatttatattgtctgtctctcccttcacatctattaatatttgctttatgtatttakgtgtgctaatgttaagtgcatatatatttataattattctcttgatgaactgtatcctatactactatataatgaccttctttatctcattttacagtac

SEQ ID NO: 189861 - DNA, 201 bp, Homo sapiens
cttttctgagggggatactagggaagaccctgaaggatgagtagggtgccttcaggaagagggcacttgaacatgtagtagaagacatgagcatgtagtgyggtttacttggatctggaggtatgtggagggaaatacagctgggaagatagtagggcattggaagactacatgccattcacagagtctacattgaatctg

SEQ ID NO: 189862 - DNA, 201 bp, Homo sapiens
tttgggaccagaaggttgtgaatttgagttctggtccatcttcttggcagctgggtcgattagggtggtgaattagctggctgaattacttcacacatcakagcctcactttcctggtttgtaaaatgcagattgtgcccctctcccagggctgccatgagggttagggaggccaggaattaaaacatgtaaaccatgcat

SEQ ID NO: 189863 - DNA, 201 bp, Homo sapiens
aaagctaaaaagctcttatagtaaatttgagaggatttttaaattatggagaacaagatagtattgcccttacctaaaattctccctcaatattttgtttcctttgctttggaaacagcatccaagcagggccactgagaagggtgtgtgggggtgggtgttttattgacagttgtttgaaggaaattatgcacaggtacc

SEQ ID NO: 189864 - DNA, 201 bp, Homo sapiens
acagcttcagcgtgtggtgcacacgaggccacctctttcccgaagtgaggatagacttcagctgttcttgctgcaaaatcttccactgtctgagaggtggygggttgggtcacagagctcttccctgtgagaacagatccttaaaactgacgtcccattttactgggctgcacgagcactcaaggcaaaatttccttagtt

SEQ ID NO: 189865 - DNA, 201 bp, Homo sapiens
aggattttcttttcaaatctagacgttaatgttctccttcctgtgcaaagatgctacccgggcacagcttcagcgtgtggtgcacacgaggccacctcttycccgaagtgaggatagacttcagctgttcttgctgcaaaatcttccactgtctgagaggtggtgggttgggtcacagagctcttccctgtgagaacagat

SEQ ID NO: 189866 - DNA, 201 bp, Homo sapiens
gttgagctgatgattttggagcactcagagcagcaggtcccgagctgctgctgggcccttctctgtggcaaagcagggtcacacttctccttcaggagccracggcatgcgcgtatccttctgttccagggacgtagccatcgacacagtgaagacgggcatggggggcaaggcggggaacaagggcgccgtcggcatccg

SEQ ID NO: 189867 - DNA, 201 bp, Homo sapiens
ttttttaaatgtttcgtctttgatgctaccatccagggcttcttattgtgaccttgtagcctattttgttcctgctgttctctaacatggtgcagttcacrcagactggtttaggtacttcacaactcaccattgtctctctgaccccaagcctagtcccttttacatcaccatcttctcagacttcttgcctattcttaa

SEQ ID NO: 189868 - DNA, 201 bp, Homo sapiens
acgtccataccatgtcccgttcatcaggtaagaacattctgtttacacacatctggggaacaaggggttgttagtctttgtgttttgttctttgacttccycctcctcccccatccccttctgtaacaggaatcgggacttaccattattttagataaatgtagcaaaaccccctaggaaaaactgggctgaatagaatat

SEQ ID NO: 189869 - DNA, 201 bp, Homo sapiens
atcactggtaatttacacttttagttttggccttggctttgttccagaatctcctagagaggagagtgtgcccttttcttcgtttttttttttgttttttktttttttttttttgagactgagtttcactctgtcagctggactggagtgcagtggctcaatcccaggtcactgcaacctccgcctcccaggttcgagcaa

SEQ ID NO: 189870 - DNA, 201 bp, Homo sapiens
gtgatgagtctcggtggaagggctaacctttcacagggcggtgcctcagtctctcctcacaggacagtgaaccccttctccttccccgccccgctctgcgkgcggctgctgtgcacatcagggtgtgctgaactcttggtccctccctgaagatgagaaggatgcttccaaatagaaatctgattcctcagtatcccgaaa

SEQ ID NO: 189871 - DNA, 201 bp, Homo sapiens
ggggggctattgatgaggaggtgaggggttccctcttagaacatgtttcctcacacctgtaatcccagcactttggaaggctgaggtgggcggatcacaargtcaggagttcgagactagcctggccaatgtggtgaaacaccgtctgtactaaaaatacaaaaattagccgggtgtgatggcacgcacctgtagtcccag

SEQ ID NO: 189872 - DNA, 201 bp, Homo sapiens
atccctggtcatttccttagaataaagtccgagaagtgagattactaggtgaaaagagatgaacaattttggaactctatgtaaagtgccaagtaaccctytgaaaagcttgcacccctggcagagtgcagatgtctgcttccccacctccttggtggtactgaggattaccatgtcaaaaatctttgctgatggctggtt

SEQ ID NO: 189873 - DNA, 201 bp, Homo sapiens
ctgcttccccacctccttggtggtactgaggattaccatgtcaaaaatctttgctgatggctggttattttccaagtactgggatacatctttaaggtgcyacactttattttccccctcaaatcatctttagataaaaatgccaaggtgatactaaggttaaggaaagatgaagactaaaacgccagagcagggcagcta

SEQ ID NO: 189874 - DNA, 201 bp, Homo sapiens
ccttcactgagattgagactctgccctcgttggtttttacagccggtttaatggtgaaaaagtcggcttcagatgcgtccatctcctccggcacccatggrcagtattcaattttgcagacggcaagacttctaccaggagcacctcagcaacctgtgagttcttctgcatacatttcaatcccaagggttttgcccccgg

SEQ ID NO: 189875 - DNA, 201 bp, Homo sapiens
tgaaaaaagtcttctttttccagtttcatgtatctgcagcaacatacttctttttttttttttttttttttaacaaaattaatacccattttctctggtcrgttgtcttttatttaatgggttatattttctgtgtcattgaatgttctaaaacatgatttgttaatggctgcaagtatattttaacagtttattcccctg

SEQ ID NO: 189876 - DNA, 201 bp, Homo sapiens
gatgacacctcccatgcatggcgtgatggctgcacaggagtggggtgggctggtgggtggtgatgtttgcgccgctcctggtggcagtgagaacctgggcrgatgcaggcattgccctgtcttcggcttcatggggtgctcaagtgagcacttcccagttggggtgtgggggagatgtccaggcagcggtgggcagcagga

SEQ ID NO: 189877 - DNA, 201 bp, Homo sapiens
ctatgctgcccataatcctcttctctgactttcagaagatgtttaggtccctgtccctctgcttgtgttatttgggcagcttggcagtgtcctaggttagyaggtgaaggttagtaaaggttaaaggcaagggcggggtgagggtgagaggtaaagcatttgagaaagggctcagagctgaggagagccaggtttcccagg

SEQ ID NO: 189878 - DNA, 201 bp, Homo sapiens
cctgtgcctgccaagagcaccacgggtacacccctgcagcacctggagactaagactatgctgcccataatcctcttctctgactttcagaagatgtttakgtccctgtccctctgcttgtgttatttgggcagcttggcagtgtcctaggttagcaggtgaaggttagtaaaggttaaaggcaagggcggggtgagggtg

SEQ ID NO: 189879 - DNA, 201 bp, Homo sapiens
tcaacgaaaaaaccttttttttttttttttgagacagagtcctccaggctggagtgcagtggcacaatcttggctcattgcaacctccacccccagggtayaagtgattttcatgtctcagcctcccaagtagctgggattacaggcgtgcatcaccatgcccggctgatttttgtatttttagtagaaacggttttgcca

SEQ ID NO: 189880 - DNA, 201 bp, Homo sapiens
aatcccagcactttgggaggccgagacaggtggatcgcttgaggtcaggagttcaagaccagcctggccaacatggtgaaaccctgtctctactaaaaatrttttttaaaaattagcagggcatggtggtgcacatgcctgtaatcccagctactcaggcagctgaagcaggagaatcgcttgagctggggaggcagaggc

SEQ ID NO: 189881 - DNA, 201 bp, Homo sapiens
gctcagggtggagcccccagaactgaccacaactgagtcaccacgggcagtgtggttctgggcttgatcgcctgaacccccactgttgtggcgcagcgtgaggtctggagacccacagcaggagtcagatggggtcaacgctcagcgtggctggcacataaggcagagtgagcagcagggtgaagtcatctttctgggctg

SEQ ID NO: 189882 - DNA, 201 bp, Homo sapiens
ccagctacttggaaggctgagacaggagaatcgcttgaacctgggaggcggaggttgcagtgagccgagatcatgccattgcactccagcttgggtgacaraggtgagactctgtctcaaaaaaaaaaaaaaaaaaaaaaaaaaaaccatgtttccttgggagtcaaaagtcagacatgggcctctgtgctatggccactg

SEQ ID NO: 189883 - DNA, 201 bp, Homo sapiens
agaatcacttgaacccaggaggcagaggttgcagtgagccgagatcgcaccattgcactccagcccaggcaacagtgtgagactctgtctccaaaaaaaaraaaaaaaaaaaaaaaagtagccagacatggtggcgcgtgcctctagtcccagctactcaggaggctgaggcaggagaatcgcttgaacctgggaggcaga

SEQ ID NO: 189884 - DNA, 201 bp, Homo sapiens
agtgaaaccccgtctccactaaaaatacaaaaattagccaggcatagtggcaggtgcctgtaatcccagctacttgggaggctgaggcaggagaatcacttgaacccaggaggcagaggttgcagtgagccgagatcgcaccattgcactccagcccaggcaacagtgtgagactctgtctccaaaaaaaaaaaaaaaaaa

SEQ ID NO: 189885 - DNA, 201 bp, Homo sapiens
aggtacgctgtacttggccacactgtggagtggggtctgatcaatccctatttttatgtgggcatgtcttcttcctcctcttgccctgacctgtgcctttwtttttttttttttttttttttttttctgagacaaagtcttgctctgtcattcaggctggagtacagtgatgcaatcacagctcgctgcagccttgaactg

SEQ ID NO: 189886 - DNA, 201 bp, Homo sapiens
cccaagagaatgagggtgtgtttgtcccttggtcttcccatggaagcaaggccaatccaaagttaaacaaagaaaagaaggatgtgcatgggggctcacgwctgtaaggcgggaggattgcctaagcccaggagtttgagaccagcctgggaaacatagggagactttgtctctacaaaaactaaaattagccaggcatga

SEQ ID NO: 189887 - DNA, 201 bp, Homo sapiens; identical to SEQ ID NO: 32923

SEQ ID NO: 189888 - DNA, 201 bp, Homo sapiens
cttcttcctcctcttgccctgacctgtgcctttttttttttttttttttttttttttttctgagacaaagtcttgctctgtcattcaggctggagtacagkgatgcaatcacagctcgctgcagccttgaactgccaggcttaagcaatcctcccatctcagcctctcaagtagctgggaccgcaggcacgtgccaccaca

SEQ ID NO: 189889 - DNA, 201 bp, Homo sapiens
ctgcagccttgaactgccaggcttaagcaatcctcccatctcagcctctcaagtagctgggaccgcaggcacgtgccaccacacccagctaattttttttwaattttgtagagagaggatctcactctgtagccccggctggagtgcattgggacagttatggctcactataacctcagcctcctgggctccagtcatcct

SEQ ID NO: 189890 - DNA, 201 bp, Homo sapiens
aaacagtggctgtgaggatatcagggctgtgggtgtaccaatggaactggggtaccgtccctgctggcgcctgggccctgagctgcagggcagggtgcacstgtcctgacaggagctgaaccagtcccactgatggaagactgagcctttccccctcattgttttcacccgaattgtgattcatttccttctcccagggga

SEQ ID NO: 189891 - DNA, 201 bp, Homo sapiens; identical to SEQ ID NO: 32927

SEQ ID NO: 189892 - DNA, 201 bp, Homo sapiens
ttacaacactcaaacagaagcaaaactaaagagtgcatttttaactacttattcttgaaataatttcagacctacagaaaaaatttaagaacaagagggarctcccatatgtccttcacccagattcactaaattttaaccttttgccacacacgttattattttttgaaccgtttgaaagtaggttgcatatatcacatt

SEQ ID NO: 189893 - DNA, 201 bp, Homo sapiens; identical to SEQ ID NO: 32928

SEQ ID NO: 189894 - DNA, 201 bp, Homo sapiens
tttacattattcctaatgattgcgtagggtattatatgaaggtatcataactgtttccccattaagaaacagagcattttggcctggcgcagtggctcacrcctttatcccagcactttgggaggctgaggcaggcggatcacctaaagtcaggagttcaagaccagcctagccaacacagcaaaaccccatctctaccaa

SEQ ID NO: 189895 - DNA, 201 bp, Homo sapiens
taaataagactgactctgtggggctgctatgagaaggtcctgggttgggtttcaggggtcaagggagggctgctgtgatgtgtgaggcatagccaaaaacrcgcagatcctccagtagaagaaggaaagcatgacactaatattggggtgcgggcagcgtgaaatcagttctgcaaacagaataggcttgggctggagcat

SEQ ID NO: 189896 - DNA, 201 bp, Homo sapiens
aggccctgttgctggcctggagaaaagcagtgaacaaaacagatgagaccatgttatcatggaattttctggacaggacaaacagacaataaacaaacatrtgtgctatgaaagaaaaaaagtagtggcaggagtcaggccagagtcgagctattttcaatcaggctgtgtaattttcgtaatataggattttctggaaat

SEQ ID NO: 189897 - DNA, 201 bp, Homo sapiens
ccaggtagggaggggcactctagctgaagacctgggtcatggccctgcctggggtggccctcagccacctcagcttggcccagaccaaggttggtggcccrgcagcctgcccagggcccaatggccatcagtcctgctggatgaagcactggctgtggaatgcatggcactgagccaccaggcactgttgggctcctccag

SEQ ID NO: 189898 - DNA, 201 bp, Homo sapiens
aattgtgattcatttccttctcccaggggatattcttgaagacgatgaagactacttggtggatgaattcaatcagcctggagtctcggacagtgaactcrggggagacgacctctctgatgtccccggccccacagcactggctcctcccagcaagtcacctgctctcaccaaaaagaagcagcatccaacgtacaaagg

SEQ ID NO: 189899 - DNA, 201 bp, Homo sapiens
agcaaattgctccctggtctagctagttcgagaatctatttatgatctgtgtctgtggttgacaacgttgctcccctggtcattgtagaagcttccccccmccatatgctgtatagacacgtgccttgccaaggtgagttcagtctgtcttttgaagtttcctgcaactgaaccaaacggaggaggatgccgagtagagca

SEQ ID NO: 189900 - DNA, 201 bp, Homo sapiens
ttgtgtcctccaaaaggatatgttgaagcctaacccccgggacctcagaaggggatcttatttggagatagggttgttgcagttgtaacgctgagatgagrttatactggagtagggtgggcccttaatccagtgtgactgctgttctaagaagatgtacatgtgacaatggagggacatgtggggagaggatggccacgt

SEQ ID NO: 189901 - DNA, 201 bp, Homo sapiens
cttgtcaggtaactgctcccctggctgatgtgggttccaggggatgtcgatgaggatccgtgagagctgccaggtcgttcttggcattgacttggagtatyatttattccaggatcaaccaagggcagatgctggtaacttttgcagacagtcactcggctctcagtgtcctggacgtggacggtatgaaggtacgctgta

SEQ ID NO: 189902 - DNA, 201 bp, Homo sapiens
gcccaagagaatgagggtgtgtttgtcccttggtcttcccatggaagcaaggccaatccaaagttaaacaaagaaaagaaggatgtgcatgggggctcacractgtaaggcgggaggattgcctaagcccaggagtttgagaccagcctgggaaacatagggagactttgtctctacaaaaactaaaattagccaggcatg

SEQ ID NO: 189903 - DNA, 201 bp, Homo sapiens
tctactaaaaatccaaaaattacctgggtatggtggcaggcgcctgtaatcccagctactcaggagactgaggcaggagaatcgcttgaacctgggaggcrgaagttgcagtgagccgagatcgcaccactgcactccagcttgggcaacgagcaaaactccgtctcaaaaaaaaaaaaagtgtgaggacagggcagataa

SEQ ID NO: 189904 - DNA, 201 bp, Homo sapiens
cttggtgaaaccccatctctactaaaaatccaaaaattacctgggtatggtggcaggcgcctgtaatcccagctactcaggagactgaggcaggagaatcrcttgaacctgggaggcggaagttgcagtgagccgagatcgcaccactgcactccagcttgggcaacgagcaaaactccgtctcaaaaaaaaaaaaagtgt

SEQ ID NO: 189905 - DNA, 201 bp, Homo sapiens
agttccatgagtggatttcactgtttccaacattgtagaaaataggtgggcttgtgaggttacagtacaggagtggctgttcatacacacttcctgtcctyttttttttttttttttttttcctgaggcagagtcttgttcagtcacccaggttggagtgcagtggcactatcttggctcactgcaacctccaccttcctg

SEQ ID NO: 189906 - DNA, 201 bp, Homo sapiens
actttgacatagtaaacttgggatacataataagtaattaaaggatttataatgtagttcttttctaccataaaaatattgagggacctattaacattctrcacttcttttttgtttttgttttttgagacagtctcactctgccacccaggctggagtgcagtgacatgatcttggctcactgcaaactccacctcccag

SEQ ID NO: 189907 - DNA, 201 bp, Homo sapiens
gtcaacgaaaaaaccttttttttttttttttgagacagagtcctccaggctggagtgcagtggcacaatcttggctcattgcaacctccacccccagggtwtaagtgattttcatgtctcagcctcccaagtagctgggattacaggcgtgcatcaccatgcccggctgatttttgtatttttagtagaaacggttttgcc

SEQ ID NO: 189908 - DNA, 201 bp, Homo sapiens
gagactctgtctaaaaaaaaaaaaaaagtgctactttgacatagtaaacttgggatacataataagtaattaaaggatttataatgtagttcttttctacmataaaaatattgagggacctattaacattctacacttcttttttgtttttgttttttgagacagtctcactctgccacccaggctggagtgcagtgacat

SEQ ID NO: 189909 - DNA, 201 bp, Homo sapiens
gaggccgaggtgggtggatcacttgagcccgggagttcaagaccaacgtgggcagcatggcgaaaccccatctctacaaaaaatacaaaaaaaaaaaaaaatagccaggtgttgtagtgtacacttgtagtcccggcaacttgggaggctgaggtgggaggatcatttgaacctgggaggttgaggctgcagtgagccgtg

SEQ ID NO: 189910 - DNA, 201 bp, Homo sapiens
gccataattcctgttggtgttgtttatttcttatgttaaaaaagaaacaaacgagttgggaaattttcaattgtgtgtaatgcagtttaaaaaaaaaaaaaagtctaacccttctcacttaaaaatagctactttggggccaggcacagtggctcacacctgtaatcccagcactttgggaggccgaggcgggcagatcac

SEQ ID NO: 189911 - DNA, 201 bp, Homo sapiens
cagatccttaaaactgacgtcccattttactgggctgcacgagcactcaaggcaaaatttccttagttttcattaagaagtgccataattcctgttggtgktgtttatttcttatgttaaaaaagaaacaaacgagttgggaaattttcaattgtgtgtaatgcagtttaaaaaaaaaaaaaagtctaacccttctcactt

SEQ ID NO: 189912 - DNA, 201 bp, Homo sapiens
gggcagagcctgcacgtgtcagagccaggcctgggatgcaccttctctgggcagaccgacccaaaagaaagcccacaagggctgaagccacacacagcccsccccagggctgcctggagctgcacgtggagacgggagcccgggagggtgctcacccttaacttaggccagggagtcagcaggcaagcctaacttcaaact

SEQ ID NO: 189913 - DNA, 201 bp, Homo sapiens
gggttttagccctggtgacctctcatagggtggctgaggggtacacagacccgctgacttccctcagggtgcaggatggagcaggcctctcggtagtgcgrccatgaaagttttcaaattttctgagatttcctcagccaggtgttgatggccatggggataaaggacagaggtaacacaggcagcaaaaaaataaaaaaa

SEQ ID NO: 189914 - DNA, 201 bp, Homo sapiens
cttactgtgctcccatggggaatgatcctataaacagctgctgctcattgctgaagccaggggagacttcttgtgatgactgacagaccacacagagcagstagcccctctcttgggttttagccctggtgacctctcatagggtggctgaggggtacacagacccgctgacttccctcagggtgcaggatggagcaggcc

SEQ ID NO: 189915 - DNA, 201 bp, Homo sapiens
actcttttaaagggtacagcaggccaggtgcagtggttcacacctgtaatcccagcactttgggaggctgaggcaggtgaatcacctgaggtcaggagttmgagaccagcctggccaacatggtaacaccccatctctaccaaaaatacaaaaaattagccggtataatcccagcaactcgggaggctgaggcaagagaat

SEQ ID NO: 189916 - DNA, 201 bp, Homo sapiens
cagcatattaacttgggggtgcacacattcagtcaatagcaggtacactggttgaccacactcttttaaagggtacagcaggccaggtgcagtggttcacrcctgtaatcccagcactttgggaggctgaggcaggtgaatcacctgaggtcaggagttcgagaccagcctggccaacatggtaacaccccatctctacca

SEQ ID NO: 189917 - DNA, 201 bp, Homo sapiens
ggagacagaggttgcagtgagcccagattgcgccactgcactctagcctgggcgacagagcaagactgtcacctcccagagaccccacctcctaaaaccawcgccttgggtgttcatacttcagcatattaatttgggggtgcacacattcagccaatagcaggtacactggttgaccacactcttaaagaggacagccaa

SEQ ID NO: 189918 - DNA, 201 bp, Homo sapiens
aacctgaaaggcgaaagttgaacccgggagacagaggttgcagtgagcccagattgcgccactgcactctagcctgggcgacagagcaagactgtcacctyccagagaccccacctcctaaaaccatcgccttgggtgttcatacttcagcatattaatttgggggtgcacacattcagccaatagcaggtacactggttg

SEQ ID NO: 189919 - DNA, 201 bp, Homo sapiens
ggtgggcggaccactagaggtcaggagttctagaccagcccagtcaacatggtgaaaccccatctctactaaaaatacaaaaattagctgggcatgggggytcatgcctgtaatcccggctactcaagaggctgaggcagtaaacctgaaaggcgaaagttgaacccgggagacagaggttgcagtgagcccagattgcgc

SEQ ID NO: 189920 - DNA, 201 bp, Homo sapiens
tagcgctaactcagaaggactttgaagaatcgagtgacatttctacaatgaagccctttccattcccatctatttattaatgtgaacaggatcttttagtrtttgcgtctacaaaaatgaaaactagaattagaattggtgcagaacctactttcattccttcaataaatatttattcatctcattaagagatgcctttcc

SEQ ID NO: 189921 - DNA, 201 bp, Homo sapiens
gtgtccaggtccttggcttttttctatcatggagcacctgtgatggaggacagggttcttattcccctctgaggtctccctgcttccatgttagggtagarggtaggcccttctctcttctggaagctcaccgtgtgccgtgctccaggaagtaactccccctaggattccagacaaagggacagttcaaaagcttgtcaa

SEQ ID NO: 189922 - DNA, 201 bp, Homo sapiens
cgtgtaatcccagcactttgggaggctgaggcgggtggatcacctgaggtcaggagttcaagaccagcctgaccaacatggtgaaaccccgtctctactamaaaatacaaaaattagccaggcatggtggcaggcgcctgcaatcccagctactcgggaggctgaagcaggagaatcgcttgaacctgggaggcggaggtt

SEQ ID NO: 189923 - DNA, 201 bp, Homo sapiens
cagcctggtgctaggctcaagccaggacactttccttaaaacccatagtacaggccaggcatggtggctcatacctgtaatcctagcacctcagggggccraggcaggaggatcacttgagcctagaagttcaagaccagcctgggctatgtagcaagactatgtctctacatagtgatggtatctacagcaccatgccag

SEQ ID NO: 189924 - DNA, 201 bp, Homo sapiens
accacactgacggtggcccgggagtcagcgaccccccacagcctggtgctaggctcaagccaggacactttccttaaaacccatagtacaggccaggcatrgtggctcatacctgtaatcctagcacctcagggggccgaggcaggaggatcacttgagcctagaagttcaagaccagcctgggctatgtagcaagactat

SEQ ID NO: 189925 - DNA, 201 bp, Homo sapiens
cgttcttggcattgacttggagtatcatttattccaggatcaaccaagggcagatgctggtaacttttgcagacagtcactcggctctcagtgtcctggaygtggacggtatgaaggtacgctgtacttggccacactgtggagtggggtctgatcaatccctatttttatgtgggcatgtcttcttcctcctcttgccct

SEQ ID NO: 189926 - DNA, 201 bp, Homo sapiens
gaacctgggaggcggaggttgcagtgagccgagatcatgccattgcactccagcttgggtgacagaggtgagactctgtctcaaaaaaaaaaaaaaaaaaaaaaaaaaaaccatgtttccttgggagtcaaaagtcagacatgggcctctgtgctatggccactgcttctttgaaaacaacatataaccgtttacatttct

SEQ ID NO: 189927 - DNA, 201 bp, Homo sapiens
aatcccttataaaattaccagccttacagagccctgggttcacacaggggacattccatgttacaagagttaccacacctaaggaagccccatgcctggcwtcttcaccgagtggttataattcacttatgggtcttccctgtccagaggcaatttgccaatcaaggtcatttttaccatgagcaatgttgtctagtaaca

SEQ ID NO: 189928 - DNA, 201 bp, Homo sapiens
ggaggttgaggctgcagtgagccgtgattgcacctctgcactccagcctgggcaacagagtaagaccctgtctcaaagaaaaaaaaaagaagaagaagaakaagaagaaaagaaaaggaaaccttctccaaggaatctctaaatctattgctgagaaaccagttctctagatgggtgcttttcttgagtctgagatggggc

SEQ ID NO: 189929 - DNA, 201 bp, Homo sapiens
tctagagtgttttggggtgcgcgggaatatgtctgattcttctccgtgtgactcaccctcagtccttggagggagtcttctggttccctcttcttcttcttgtcttctctaaggcctcccaactcctttggccaccttccctcctgtttctaagactctcaatgttctcatctccctcatctaaaaaatgacactcctttt

SEQ ID NO: 189930 - DNA, 201 bp, Homo sapiens
gctcacccgtaatcccagctactcaggaggctgaaatgggagaattgctcgagcctgggaggttgagactgcagtgagccgtgatcatgccgctgcactcmggcctgggtggcagagcgagagcccatcttaaaaaagaaaaaagaaaaaaagctgggactgaatctagctgattactcctgaaatacactgaattagtaa

SEQ ID NO: 189931 - DNA, 201 bp, Homo sapiens
ctctagagtgttttggggtgcgcgggaatatgtctgattcttctccgtgtgactcaccctcagtccttggagggagtcttctggttccctcttcttcttcttgtcttctctaaggcctcccaactcctttggccaccttccctcctgtttctaagactctcaatgttctcatctccctcatctaaaaaatgacactccttt

SEQ ID NO: 189932 - DNA, 201 bp, Homo sapiens
actctagagtgttttggggtgcgcgggaatatgtctgattcttctccgtgtgactcaccctcagtccttggagggagtcttctggttccctcttcttcttcttgtcttctctaaggcctcccaactcctttggccaccttccctcctgtttctaagactctcaatgttctcatctccctcatctaaaaaatgacactcctt

SEQ ID NO: 189933 - DNA, 201 bp, Homo sapiens
caaaaattaggggaatggtcatgatggattcttagaatttgggaaggaccctttggaattcatccattccaccctctgactctcagttcaggggtcctccytttttttttttttttttttttttttgagatggagtctcactctgttgcccaggctggagtgcagtggtgcaatctcggctcactgcaacatctgcccccc

SEQ ID NO: 189934 - DNA, 201 bp, Homo sapiens
gtatgtgtacagtgtgtgcgtggtatgtgcatttatgtgttgtacatgtgtgtatgtgtcatgtgcattgtgcatttgtgtatacatgtgtgtggtgtgtkccttgtgtttgtttttcatgtgtatgtgtgcagtgtgtgcatttatgtgttgtatacacacatgtgtgggttgtgtatgtgttgtgtgtctgcacgcaca

SEQ ID NO: 189935 - DNA, 201 bp, Homo sapiens
attaatcttctttctctgaggcaggctgtgtgtgtgtgtgcatgggttgtatgtgtacagtgtgtgcgtggtatgtgcatttatgtgttgtacatgtgtgkatgtgtcatgtgcattgtgcatttgtgtatacatgtgtgtggtgtgtgccttgtgtttgtttttcatgtgtatgtgtgcagtgtgtgcatttatgtgttg

SEQ ID NO: 189936 - DNA, 201 bp, Homo sapiens
gagaatcacttgaacccaggaggcagaggttgcagtgagccgaaatcgtgccactgcattccagcctgagcagcagagtgagactccacctcaaaaaaaamaaaaacaaaaaaaaaaaaacagatttgcgtctcacagataaaaatctagttccctatggacatcctcacgttcatgagtcccagacacaggtgtgtcttt

SEQ ID NO: 189937 - DNA, 201 bp, Homo sapiens
aacacaatgagaccctctctctacaaaaattttaaaattagctgggcgtggtggttcacaccagtagtcccagctacttgggaggctgaggtaagaagackgcatgagcccaggagttccagcaacatagtgagacctcatctctactaaaaattttaaaaattggctgggcgtggcagtgctcacccgtaatcccagcta

SEQ ID NO: 189938 - DNA, 201 bp, Homo sapiens
actggtccccatccaaactatccacagaccccagatcaccacccctgctaggaaggtgagcatgaaaacctgggactgctgggtgcggtggctcacgcctrtaatcccagcactttgagaggctggggtgggaggactgcttgaatccaggagttcgagacaagtctgggcaacacaatgagaccctctctctacaaaaat

SEQ ID NO: 189939 - DNA, 201 bp, Homo sapiens
cacctgtgctgttgtcaccctgccttgcaggtgtggcagggatgccgcgttccatccatgctgatgcccttttttccacatggtggtatctgggcccccargatgcctcacagtcttggcttccttcagttatagttggcagctgcttttggtccttacatgaatgactcattttgcatccgacagggactgggattcgac

SEQ ID NO: 189940 - DNA, 201 bp, Homo sapiens
aaaaattcaaaaaattagccgggcgtgatggtgggtgactgtagtcccagctactcaggaggctgaggcaggagaatggctgagcccgggaggtggagctygcagtgagccaagattgcaccactgcactccagcctgggtgacagagcaagactccgtctcaaaaaaagaaaaaagaaagaaagaaaaataactaaaact

SEQ ID NO: 189941 - DNA, 201 bp, Homo sapiens
gtggatcacgaggacaggaaatcgagaccatcctggctaacacggtgaaaccccgtctctactaaaaattcaaaaaattagccgggcgtgatggtgggtgmctgtagtcccagctactcaggaggctgaggcaggagaatggctgagcccgggaggtggagctcgcagtgagccaagattgcaccactgcactccagcctg

SEQ ID NO: 189942 - DNA, 201 bp, Homo sapiens
acacggctcccgaggccacctgtgctgttgtcaccctgccttgcaggtgtggcagggatgccgcgttccatccatgctgatgcccttttttccacatggtrgtatctgggcccccaagatgcctcacagtcttggcttccttcagttatagttggcagctgcttttggtccttacatgaatgactcattttgcatccgaca

SEQ ID NO: 189943 - DNA, 201 bp, Homo sapiens
ccccatgaactcgtaatgcgggacttggcggttctgacttctgtcatctcttgccttgctccccagatgacagcagcccagctgacatatttgctgtgggrtttgaagagatggtggaattgagcgcagggaatattgtcaatgccaggtaaggggccaggtgtgcggggccaggcagggacttcctgagtcaggtgcctg

SEQ ID NO: 189944 - DNA, 201 bp, Homo sapiens
aataactaaaactaggccgggcgcggtggctcacgcctgtaatcccagcactttgggaggccgaggcgggtggatcacgaggacaggaaatcgagaccatsctggctaacacggtgaaaccccgtctctactaaaaattcaaaaaattagccgggcgtgatggtgggtgactgtagtcccagctactcaggaggctgaggc

SEQ ID NO: 189945 - DNA, 201 bp, Homo sapiens
agaaacttagttggggtttgaagcgcctccaaacgcttgctttttctgtggaaatgtgcgggctgccgagggttttctgcaggactttccgctctgcagcratcttcctgaagttgcaggaaatccctgtggcccttgccttccatggtgatgaccgtgaggatggtggcctgcacctgcatgggactcacttaggaactt

SEQ ID NO: 189946 - DNA, 201 bp, Homo sapiens
ttacagtaacgggaacaggctcagaagcttcaagtaacttgccttaggtcagaaacttagttggggtttgaagcgcctccaaacgcttgctttttctgtgraaatgtgcgggctgccgagggttttctgcaggactttccgctctgcagcgatcttcctgaagttgcaggaaatccctgtggcccttgccttccatggtga

SEQ ID NO: 189947 - DNA, 201 bp, Homo sapiens
ttattttagaaaaataactaaaactaggccgggcgcggtggctcacgcctgtaatcccagcactttgggaggccgaggcgggtggatcacgaggacaggaratcgagaccatcctggctaacacggtgaaaccccgtctctactaaaaattcaaaaaattagccgggcgtgatggtgggtgactgtagtcccagctactca

SEQ ID NO: 189948 - DNA, 201 bp, Homo sapiens
aaatacacagtacccacatgacaaagtgcatttatgaaatgtctgtttcgtgccaagagctagccgtacattcacttatttaatcctaaaaataggctacygtgataatgcatctttgtccccgtttacagtaacgggaacaggctcagaagcttcaagtaacttgccttaggtcagaaacttagttggggtttgaagcgc

SEQ ID NO: 189949 - DNA, 201 bp, Homo sapiens
ataatatttaagggggcatgagttaaaaggtcgagaactactgttgtagaatgatactgctacaaatgctttctttttttttattttagaaaaataactawaactaggccgggcgcggtggctcacgcctgtaatcccagcactttgggaggccgaggcgggtggatcacgaggacaggaaatcgagaccatcctggctaa

SEQ ID NO: 189950 - DNA, 201 bp, Homo sapiens
tgattctcagtcccacctggctgagatgggaatggctgtatgggttgtctgaattcgggctttccctgagccaagcgcacacctcccttccctgctcacarcagctgttttcagagactgaggatgtttaaagctgccagaaaagcacggttacgttggccattccttttctgggtgttttctgtcatggaatgtttttcc

SEQ ID NO: 189951 - DNA, 201 bp, Homo sapiens
agtgcagtggctcaatcccaggtcactgcaacctccgcctcccaggttcgagcaaatatcctgcctcagccacctgagtagctgggactacaggcgcgcasccccatgatgagccaatttttgtattttcagtagaaatgtgatttcaccttgttggccaggctggtcttgaactcccaacctcaggtgattcatccacct

SEQ ID NO: 189952 - DNA, 201 bp, Homo sapiens
cgccacgttgcccaggctggtctcgaacttctgacctcaggtgatccgcctgccttcgcctcccaaagtgctggggttacaggttacaaagtaagccactrtgcccggccaaaatggaatctttctgaggtcttttgtgactggcttttttcatgtagcataatgttttcaaggttcatctatctttgtattttgttctgt

SEQ ID NO: 189953 - DNA, 201 bp, Homo sapiens
ctttgttccagaatctcctagagaggagagtgtgcccttttcttcgtttttttttttgttttttttttttttttttttgagactgagtttcactctgtcakctggactggagtgcagtggctcaatcccaggtcactgcaacctccgcctcccaggttcgagcaaatatcctgcctcagccacctgagtagctgggactac

SEQ ID NO: 189954 - DNA, 201 bp, Homo sapiens
ctctagaaatgtgcctgttctggacgtttcatagaaatggaatcttgtttttgagacagagtctcactctgtcacccaggctggagtgcagtggcgtaatytcggctcactgcaacctccacctcctgggttcaagccatccccctgcctcagcctcccgagtagctgggattacaggcgtgtgccaccacgcccagctaa

SEQ ID NO: 189955 - DNA, 201 bp, Homo sapiens
tagcatttgttcccattactagttttaaattaaggtggttaatagaccccactggattttgcgatttaatatgctgataaggcacatatattgctatactrtaacattttttaaaaattttgataactagatttcaataagattggtatttgtgatcatatttattttcttgatttttataacagctttattgagatataa

SEQ ID NO: 189956 - DNA, 201 bp, Homo sapiens
tcagatatcttgaagtagcatttgttcccattactagttttaaattaaggtggttaatagaccccactggattttgcgatttaatatgctgataaggcacrtatattgctatactataacattttttaaaaattttgataactagatttcaataagattggtatttgtgatcatatttattttcttgatttttataacagc

SEQ ID NO: 189957 - DNA, 201 bp, Homo sapiens
gccctctgtcccatgtgatgagcatgtttgtatgtgtggacgatgcatgccatgctacctgggaccggaggcatctaaacttaggctacaaacagtggctrtgaggatatcagggctgtgggtgtaccaatggaactggggtaccgtccctgctggcgcctgggccctgagctgcagggcagggtgcacgtgtcctgacag

SEQ ID NO: 189958 - DNA, 201 bp, Homo sapiens
acaggcataagccactgcgcctggcctcctctggtctctttctagagacagtgacctgcaaataggtctgctcctggctgcccctgcatcacagctccccsccacacccccacctcttttttctgggtggggaaagcggggagcatgaggttgcctccctccctgccccccatgctccccctcatgttctttatccagcct

SEQ ID NO: 189959 - DNA, 201 bp, Homo sapiens
gaaaactacggtggcctgatgacttctttttctcccaatagatttttaaggactttcacgaaggagccattaactttggacccacctacaagtatgacgtyggctcagccgcctacgatacaagcgacaaatgccgcacccccgcctggacagacagggtgctgtggtggaggaagaaacatccctttgataaaacaggtg

SEQ ID NO: 189960 - DNA, 201 bp, Homo sapiens
aataattaatcttctttctctgaggcaggctgtgtgtgtgtgtgcatgggttgtatgtgtacagtgtgtgcgtggtatgtgcatttatgtgttgtacatgtgtgtatgtgtcatgtgcattgtgcatttgtgtatacatgtgtgtggtgtgtgccttgtgtttgtttttcatgtgtatgtgtgcagtgtgtgcatttatgt

SEQ ID NO: 189961 - DNA, 201 bp, Homo sapiens
ttgctttggtttaacatgtttcctaggaggaataattaatcttctttctctgaggcaggctgtgtgtgtgtgtgcatgggttgtatgtgtacagtgtgtgygtggtatgtgcatttatgtgttgtacatgtgtgtatgtgtcatgtgcattgtgcatttgtgtatacatgtgtgtggtgtgtgccttgtgtttgtttttca

SEQ ID NO: 189962 - DNA, 201 bp, Homo sapiens
caggactgctgtctcttcgaagtccccctggggagaacccttctgagcccacctgaccgccccggctcttggtggcctctggcaagcatctctccatcatctctgcctccgttttcgtgtggccttctctgcctgtgtctctccaggactccagtcgtactggatcagggacccaccctactccagttgtcctcatctttt

SEQ ID NO: 189963 - DNA, 201 bp, Homo sapiens
gcaggactgctgtctcttcgaagtccccctggggagaacccttctgagcccacctgaccgccccggctcttggtggcctctggcaagcatctctccatcatctctgcctccgttttcgtgtggccttctctgcctgtgtctctccaggactccagtcgtactggatcagggacccaccctactccagttgtcctcatcttt

SEQ ID NO: 189964 - DNA, 201 bp, Homo sapiens
ggcaggactgctgtctcttcgaagtccccctggggagaacccttctgagcccacctgaccgccccggctcttggtggcctctggcaagcatctctccatcatctctgcctccgttttcgtgtggccttctctgcctgtgtctctccaggactccagtcgtactggatcagggacccaccctactccagttgtcctcatctt

SEQ ID NO: 189965 - DNA, 201 bp, Homo sapiens
ggctcagggtggagcccccagaactgaccacaactgagtcaccacgggcagtgtggttctgggcttgatcgcctgaacccccactgttgtggcgcagcgtkaggtctggagacccacagcaggagtcagatggggtcaacgctcagcgtggctggcacataaggcagagtgagcagcagggtgaagtcatctttctgggct

SEQ ID NO: 189966 - DNA, 201 bp, Homo sapiens
ttcccctgctttggaattttttttttttttttttttttttttttttttttttttttttttgagatgggctcattctgtcccccgggctggagtgcagtggygcgatctcacagctcactgaagccttgacctccccggctcaagcaatcctcctacctcagcctgccaagtagctaggactgcaggcgcataccatcaggc

SEQ ID NO: 189967 - DNA, 201 bp, Homo sapiens
tgttgttggtgtattgattttgtattctgagactttgccgaagctgtttatcaggttaaggagattttgggctgagactgtggtgttttctagatatagartcatgttgattgcaaacagggatagtttgattcctctcttcctattgggatgccctttatttctttctcttgcctgattgccctggtcaaaacttctaat

SEQ ID NO: 189968 - DNA, 201 bp, Homo sapiens
aaagcccactaatgttacgtggctggcaggtcgggtagttcatatttcagtgtcagctacattgatgctgttccattcatagccaggcatgcctctagctrtcaatcactgagccccgagttggaggacagctctaaccagcaggtgcaggagcttagccacgcattgggcccattgagctggggctgagagcagagaaca

SEQ ID NO: 189969 - DNA, 201 bp, Homo sapiens
taattcttgtttcctctggatattcaaatggccacggttctgaactggttttatatttgtgattatttcccgcccccaacaaaactcttctgattcagccrggcgcagtggctcacacctgtaatcccagcactttgggaggccgagacaggtggatcgcttgaggtcaggagttcaagaccagcctggccaacatggtga

SEQ ID NO: 189970 - DNA, 201 bp, Homo sapiens
gaagctgctctgggcttcttgccacgcgggcgacacgcctatgatcaattttgacttccatcagtttgccaaaggtgggaagctagagaaattggagaccytcttgaggccacagttaaagctgcactgggaagacttcgatgtgttcacaaagggggagaacgtcagtccacggtgaggctcgctgcgcactgtgccgcg

SEQ ID NO: 189971 - DNA, 201 bp, Homo sapiens
gagtcttgctctgtcacccaggctagagtgcagtggtgcaatctcggctcaccgcagcttccgcctcccgggttcaagcgattctcctgcctcagcctccygagtagctgggactacaggcactcaccaccacgcccagctaatttttgtatttttagtacagatcgggtttcaccgtgttggtcaggctggtctcaaact

SEQ ID NO: 189972 - DNA, 201 bp, Homo sapiens
cctgagaacctaatatcccaggcacttcatattctgtaactctccaccctgctgccagcagagtctgcttagtcctcaagacgaggggcttctgctgctckcagaggttgatgatttcattgattatctttaagttactctgcactctcccttccccagagaaaacccagtcaaattcaagtgagcattggggaaaatatt

SEQ ID NO: 189973 - DNA, 201 bp, Homo sapiens
agatgagagttcaacttttttttttgagatggagtcttgctctgtcacccaggctagagtgcagtggtgcaatctcggctcaccgcagcttccgcctcccrggttcaagcgattctcctgcctcagcctcccgagtagctgggactacaggcactcaccaccacgcccagctaatttttgtatttttagtacagatcgggt

SEQ ID NO: 189974 - DNA, 201 bp, Homo sapiens
cgacggaggaagggactggagtgaggaagtcataagccaaggaacgccaaggacagaacaagcagcaaacacaagacacagggccaggtaaggaggtcccyggctccaggtatcagaggagccctgctgatgcctggatttcagctctctggcctctggacccagaagagaatgaagttctgctgcctggggcctcccagt

SEQ ID NO: 189975 - DNA, 201 bp, Homo sapiens
agcaatcctgctatctcagcctcccaagtagctgggaccacaggttcccaccaccatgcctggttactttttaaaagaatttttgtagggatggagtctcmctgtgttgcccaggctggtcttgaactcctgggctgaagcaatcctcctgccttggcctcccaaagtgctaggattacaggtgcgagccaccatgcctgg

SEQ ID NO: 189976 - DNA, 201 bp, Homo sapiens
tccactaaaaatacaaaaattagccaggcatagtggcaggtgcctgtaatcccagctacttgggaggctgaggcaggagaatcacttgaacccaggaggcrgaggttgcagtgagccgagatcgcaccattgcactccagcccaggcaacagtgtgagactctgtctccaaaaaaaaaaaaaaaaaaaaaaaaagtagcca

SEQ ID NO: 189977 - DNA, 201 bp, Homo sapiens
ttgtggagagcaacatggggtttcaccatgttggccaggctggtcttgaactcctgacctcaggtgatccattccccttggcctcccaaagtgctgggatyacaggcatgagccaccacgtctggccatggttgtgttttttaaaagagctcttatcttttccagagtcttactgaaatatttacagatgaaataatgtga

SEQ ID NO: 189978 - DNA, 201 bp, Homo sapiens
tagtaaaaatacaaaaattagccaggcgctgggtgtggtggcttacgcctgtaatctcagcactttgggaggctgaggcgggcaaatcatgaggtcaggakttcgagaccagcctggccaacatagtgaaaccccgtctccactaaaaatacaaaaattagccaggcatagtggcaggtgcctgtaatcccagctacttgg

SEQ ID NO: 189979 - DNA, 201 bp, Homo sapiens
ctttactgaaactgttcctctctgagctgccaaagtctgactaaagtgacaaattctcagtcctcaaattatagatgcagaagcagcctctgacctgctgrctgctcttgcttccttgaaacgctttcttctcctggccgccaggatgccacgcactgctgggttttcttgtatcttcttggtcacttctcagtccaccct

SEQ ID NO: 189980 - DNA, 201 bp, Homo sapiens
tgtctttatgtatagacgccatatgcgggagggagtttggattcttcactctggttctaaggtgtctcatgtccggctctagctacttgcaaaatagggcrgaagggtgggcgcagtggcttatgcttgtaatcccagcactttgtcaggccaaggtgggtagatcacccaaggtcaggagatcgagaccagcctggccaa

SEQ ID NO: 189981 - DNA, 201 bp, Homo sapiens
tgctgggattagaggcgtgagccaccacgcccggcccccagtgatctttgaccccactgggatggcgacccttagaacccatggccttctcatagcccctygtctgtctcacaccttccctctttgccatgtcagtgaccagccctgccttgcactcaccctccccacccgcccttctcttgctgggtcctccccacctgg

SEQ ID NO: 189982 - DNA, 201 bp, Homo sapiens
gtggagtggggtctgatcaatccctatttttatgtgggcatgtcttcttcctcctcttgccctgacctgtgcctttttttttttttttttttttttttttytctgagacaaagtcttgctctgtcattcaggctggagtacagtgatgcaatcacagctcgctgcagccttgaactgccaggcttaagcaatcctcccatc

SEQ ID NO: 189983 - DNA, 201 bp, Homo sapiens
caacgacgcccggctaattttttgtatttttaatagagatggggtttcaccatgttagccaggatggtctcaatctcctgacctcgtgatccacccacctyggccttccaaagtgctgggattagaggcgtgagccaccacgcccggcccccagtgatctttgaccccactgggatggcgacccttagaacccatggcctt

SEQ ID NO: 189984 - DNA, 201 bp, Homo sapiens
tgtggagtggggtctgatcaatccctatttttatgtgggcatgtcttcttcctcctcttgccctgacctgtgccttttttttttttttttttttttttttyttctgagacaaagtcttgctctgtcattcaggctggagtacagtgatgcaatcacagctcgctgcagccttgaactgccaggcttaagcaatcctcccat

SEQ ID NO: 189985 - DNA, 201 bp, Homo sapiens
aaaacccaccaaaaccaagatggcaatgaaagtgacgtctggccatactcactgctcattatatgctaattataatgtattagcatgctaagagacactcrcaccagcaccatgacagtttacaaatgccatggcaaaatcaggaagttaccctatatcctctaaaaaggggaagaaccctcagttcctgggaattgccta

SEQ ID NO: 189986 - DNA, 201 bp, Homo sapiens
accttgccgaaagggaaccagctcagttaacccttgaccccacacgccattgtcagaggcgtatgaaccagagcgactccatcttgaataggggctgggtmaaatggatctgagacctgctgggctgcattcccaggaggttaggcattcttagccacaggatgagataagaggtcagcacaagatacaggtcataaaggc

SEQ ID NO: 189987 - DNA, 201 bp, Homo sapiens
ctcggctcactgcaacctccacctcccgggttcaagcgatttctcctgcctcagcctcccaagtagctgggactacaggcgcccgccaccacgcccggctmattgtcttgtatttttagtagggacggggtttcatcatgttggccaggctggtctcgatcttctgacctcgtgagccgcccacctcggcctcccaaagtg

SEQ ID NO: 189988 - DNA, 201 bp, Homo sapiens; identical to SEQ ID NO: 32949

SEQ ID NO: 189989 - DNA, 201 bp, Homo sapiens
ttcctggggaagagacagggaaggcaaggaccccaggagctctccggggctgagctggggccgtgggctcctaggactgggcaggatgggaaggaggagckagagagagatggagaagggtcacctgaaaaagctcaggaagttacatgaaggtgcacatcctgagcatttctgctgctcttttgaaacctcattctccta

SEQ ID NO: 189990 - DNA, 201 bp, Homo sapiens
cgagatcacaccattgcactccagcttgggcaacaagagtaaaactctgtctcaaaaaataaataaataaataatacatgcatacatacatacatacgtacatacatacatacatacagggtacagcaaactaatccgattggaaactgccggactttggggctagatggagcatgggcttaaagtgaaacctacattttg

SEQ ID NO: 189991 - DNA, 201 bp, Homo sapiens
atttattttgtagagacagtttcaccatgttgcccaggctggggtttttgaaatattttttccccacaaaatattttaaaaatctggtcctagcaatagtrtttggaaccatttcaaaatcaattggtttttatatcagatctgaatcccccaagatgttaaagtttgcattctagtaatgcttctccagatcatctacat

SEQ ID NO: 189992 - DNA, 201 bp, Homo sapiens
ccgagatcacaccattgcactccagcttgggcaacaagagtaaaactctgtctcaaaaaataaataaataaataatacatgcatacatacatacatacgtacatacatacatacatacagggtacagcaaactaatccgattggaaactgccggactttggggctagatggagcatgggcttaaagtgaaacctacatttt

SEQ ID NO: 189993 - DNA, 201 bp, Homo sapiens
ttgatgctgttccattcatagccaggcatgcctctagctgtcaatcactgagccccgagttggaggacagctctaaccagcaggtgcaggagcttagccaygcattgggcccattgagctggggctgagagcagagaacagggctgaaagtggattaaggtacctctcagggagggtactttgccaggagaggtgcgaaga

SEQ ID NO: 189994 - DNA, 201 bp, Homo sapiens
gccgagatcacaccattgcactccagcttgggcaacaagagtaaaactctgtctcaaaaaataaataaataaataatacatgcatacatacatacatacgtacatacatacatacatacagggtacagcaaactaatccgattggaaactgccggactttggggctagatggagcatgggcttaaagtgaaacctacattt

SEQ ID NO: 189995 - DNA, 201 bp, Homo sapiens
agccgagatcacaccattgcactccagcttgggcaacaagagtaaaactctgtctcaaaaaataaataaataaataatacatgcatacatacatacatacgtacatacatacatacatacagggtacagcaaactaatccgattggaaactgccggactttggggctagatggagcatgggcttaaagtgaaacctacatt

SEQ ID NO: 189996 - DNA, 201 bp, Homo sapiens
tgtgcctcggcagtgcccccaccccagcctcccaccccatcttggtctgcaccccctgccatcactcatccattcattcctcctgttcctcttggccactrccaaatgctggatggtttccatctgtttggttcactgcagtgtctctgtccctggaagggtgccagccacagaaggcacgaagatgtgtccacagagccg

SEQ ID NO: 189997 - DNA, 201 bp, Homo sapiens
cagcactggctcctcccagcaagtcacctgctctcaccaaaaagaagcagcatccaacgtacaaaggtagcctgacccttcttttctcaggagcctcagcsatggagtcagctcaggacagactttcctttttctcttggcgattgggcactgtgtgatatcaagtatgcaggtcccaggagagacctcaaccaggcaggc

SEQ ID NO: 189998 - DNA, 201 bp, Homo sapiens
ctgcaagccacgtatcatgactccaacagccagctttcctggcctgataacaaattgcctaggacctgccactggctcttgcctccctccacctcactctrgcagctccctctgacccatgcatggctttgctttggccagagccctggaaccaaagccctttacctggaggggacattgagactattggcgcatcctcct

SEQ ID NO: 189999 - DNA, 201 bp, Homo sapiens
ccggtaaacggggccttgggtctgcaagccacgtatcatgactccaacagccagctttcctggcctgataacaaattgcctaggacctgccactggctctygcctccctccacctcactctggcagctccctctgacccatgcatggctttgctttggccagagccctggaaccaaagccctttacctggaggggacattg

SEQ ID NO: 190000 - DNA, 201 bp, Homo sapiens
aatcagcctggagtctcggacagtgaactcgggggagacgacctctctgatgtccccggccccacagcactggctcctcccagcaagtcacctgctctcamcaaaaagaagcagcatccaacgtacaaaggtagcctgacccttcttttctcaggagcctcagcgatggagtcagctcaggacagactttcctttttctct

SEQ ID NO: 190001 - DNA, 201 bp, Homo sapiens
gggctgagatcgcgccactgcactccagcctggacaacagagggagactctgactcaaaataaaaaaaaaaaaaaaaacgagcatttcccttttttttttyccctcccatcaacaatgctgtaaatgatcaacctcatgcattaaatctttgtctgaatccctggtcatttccttagaataaagtccgagaagtgagatta

SEQ ID NO: 190002 - DNA, 201 bp, Homo sapiens
agcctcccaagtagctgggattacaggtgcacaccaccatgcctggctaatttttgtgtttttagtagagacggggtttcaccatgttggccaggctggtyccaaactcctgacctcaggtgatccacccaccttggcctctcaaagtgttgggattacaggcgtgagccaccgcacctggccctaggatgcagggctttt

SEQ ID NO: 190003 - DNA, 201 bp, Homo sapiens
agggccaggtgcggtggctcttgcctgtaatcccaacactttgggaggccgaggcgtgcggatcacctgaggtcaggagttcaagaccagcctggccaacwtggtgaaaccccatctctactaaaaatccaaaaattacctgggtatggtggcaggcgcctgtaatcccagctactcaggagactgaggcaggagaatcgc

SEQ ID NO: 190004 - DNA, 201 bp, Homo sapiens
tgtctcacgcctgtaatcccagcactttgggaggccaaggcaggcagatcacttgaggtgaggagtttgagaccagcctggccaacatggtgaaaccctgyctctactaaaaatacaaaaattagccgggcgtgatggtgggtacctgtaatcccagctactcaggaggctgaggcaggagaattgcttgaacctgggagg

SEQ ID NO: 190005 - DNA, 201 bp, Homo sapiens
cctaggggatccttggggtatctgaattgcaccagcacctttgcaagttctcttccctatgccagctctgtggctggaggtgtgaggggcactaacaaagygaggcaaaggggattcacgaggtggaggctgagaggagcttgggaaggaggagccccatggtgtccctttctgaagggagaggaggaagtaactctggag

SEQ ID NO: 190006 - DNA, 201 bp, Homo sapiens
acgatctcggctcactgcaacctccacctcccgggttcaagcgatttctcctgcctcagcctcccaagtagctgggactacaggcgcccgccaccacgccyggctaattgtcttgtatttttagtagggacggggtttcatcatgttggccaggctggtctcgatcttctgacctcgtgagccgcccacctcggcctccca

SEQ ID NO: 190007 - DNA, 201 bp, Homo sapiens
ttgccaccacgcctggctaatttttgtatttttagtagagacggggtttcaccatgttgttcaggttggtcaagaactcctgacctcaggtgatccacccrcctcggcctcccaaagtgctgggattgcaggcgtgagccaccgcgcccggcctagtgagtgtaatttctgtgagctgatggttgggagaatttgctcaaa

SEQ ID NO: 190008 - DNA, 201 bp, Homo sapiens
aaatggttccgagtggctgcagctcttgcacacgcgctttccacttggggcagaagaggccctggcatatttgtggtggtctctgatcaggcttcctcctrtaagtggagaacagcacgtgtaattgggctccacatgaaaatgtgacctctggtttgcatggtgtatcctttctgattcacatctcatgcagggaaaatg

SEQ ID NO: 190009 - DNA, 201 bp, Homo sapiens
ggtgaggtcacagagagcctcacccgcctgctctgttggcctctcacttgccgtcctctctgccccgttccctctcctgcacacctgtccgcggtatccccagctcttagtgactctagccctctcccgccctcctctgcaccctgcatgcacttgtgttgctgaatgtggccggagaaaaacacagccatcttgactgtt

SEQ ID NO: 190010 - DNA, 201 bp, Homo sapiens
atgtttttggagaatgcaagccttcttttccgttaagtcgagggtccctacctttacattttcctagtgtttcattataatcacattcagtgtatggatcmctgaccagaatgctacctacatgatgctgtatccttctcagggtaccagatctggaggcacacggtgtccatctgccactcattagtgatgttaattttg

SEQ ID NO: 190011 - DNA, 201 bp, Homo sapiens
gtggtcctgctatttgggatctctttgaagcacatgaacttcccagatctgtacagcccaagtgcagagtccactggggagcagcatgcattcgctgaccygaaatgctgcaccgtgcgccccccagttcctcagccacactcgctgtccaggcagcatgtattggaggatgtcaagtgactggaattggtgtgggactgt

SEQ ID NO: 190012 - DNA, 201 bp, Homo sapiens
agaggtatttaagtgtaaaaaaacaactttcaaagtattagaaaatataggctatgctttcacagtgttacggcatggaaagatgttctaaggaaagcatyaaactcagaagtcataaaggaaataaacctgacagatatgggaaatatttttattgaagtgtaacatacatagagaaaaatgaacactcgaagcgttgag

SEQ ID NO: 190013 - DNA, 201 bp, Homo sapiens
ggacatggctctgcaggtatgcacgtggctctgcaggtggggacacggctctgcaggtgtcgacatgcctctgctggtatgcacgcagctctgcaggtggrgacatggctctgcaggtatgcctgcggctctgcaggtatgcatgtggctctgcaggtatgcatgcagctctgcaggtggggacatgcctctaccagtatg

SEQ ID NO: 190014 - DNA, 201 bp, Homo sapiens
ggggcattgtgtatctcgttcagtaccttaccttaacactgcctcgtgtggaaatgaggcttggcaaacactgttgaatgacgaagcattggcaaaaaaaatagccaagattttgaaaaggatccacaaaggcagactgatttaccaggtagcacaacatattataaagccctaaccatcgtggaggctgtcagcacaaat

SEQ ID NO: 190015 - DNA, 201 bp, Homo sapiens
tggtgtcaggttcctgtaatcccagttattcaggaggctgaggcaggagaatcacttgaacctgggaggcggagtttgcagtgagccaagattgtgccacyacactctagcctggtcaacagagtgcgactctgtcaaaaaaaaaaaaaaaaaaaaaaaaaaaacacacagtatctagaatctaaaaagtactcaaaatgg

SEQ ID NO: 190016 - DNA, 201 bp, Homo sapiens
atttcttatgttaaaaaagaaacaaacgagttgggaaattttcaattgtgtgtaatgcagtttaaaaaaaaaaaaaagtctaacccttctcacttaaaaakagctactttggggccaggcacagtggctcacacctgtaatcccagcactttgggaggccgaggcgggcagatcacctgaggtcaggagttcgagaccagc

SEQ ID NO: 190017 - DNA, 201 bp, Homo sapiens
ttgttacagcaacccaggcaactaatacaggggcattgtgtatctcgttcagtaccttaccttaacactgcctcgtgtggaaatgaggcttggcaaacackgttgaatgacgaagcattggcaaaaaaaatagccaagattttgaaaaggatccacaaaggcagactgatttaccaggtagcacaacatattataaagccc

SEQ ID NO: 190018 - DNA, 201 bp, Homo sapiens
tgtgtcatctccaatttctttgagcagtgttttgtaattctcattgtagagatctttcacctccctcataaactgtattgctaggtattttattcttctcrcagcagttgtgaatgggattgtgttcctgatttggctctctgcttgactgttgttggtgtattgattttgtattctgagactttgccgaagctgtttatc

SEQ ID NO: 190019 - DNA, 201 bp, Homo sapiens
ccagaaaaatacattgctgtcctaacccgggataccttgcaatcttatttggaaatagggtctttgcagatgcaatgaagatgtaagttaagatgggatcrtactggtatagggtgggcctttaatccaatgtgactggcgtgcttataagaagaaaagggacacaggcagacgcacgcagaggggagaatgtcatgtgaa

SEQ ID NO: 190020 - DNA, 201 bp, Homo sapiens
tcctgggttcaagcaattctcctgcctcagcctcctgaatagctgggactacaggcatgcgccaccatgcccaactaattttttgtatttttagtagagayggggtttttccatgttggtcaggctggtctgaaactccgacctcaggtggtccacctgcctcagcctcccaaagtgctgggattacagccatgagccgcc

SEQ ID NO: 190021 - DNA, 201 bp, Homo sapiens
atccatgttgttgcagataacaggatctcattcttttttatggataaatagtactccactgtgtatatgtaccacattttctttatccattcatctgttgrtggacactgaagttgcttccaaatcttggctattgtgaacagtgctgcaactaacatgggagtgcagacatctgtttgatatactgatttcctttctttt

SEQ ID NO: 190022 - DNA, 201 bp, Homo sapiens
atctcggctcactgcaacctccgccttctgggttcaacctcccaagtagctgggattacaggcacccaccaccacacccagctaatttttgtatttttagyagagacagggtttcaccatgttgtccaggctggtctcgaactcctgacctctggtgatccacccgcctcggcctcccaaagtgctgggattacaggtgtg

SEQ ID NO: 190023 - DNA, 201 bp, Homo sapiens
aatcttaggagatgtgatctggcaaggcaaaatcgaagatggctttgaggtctcagctaaacctagaaatctgatgctctgcattttttatgggatgcttrtgaattaatgaaaatacatgagattatctctccttgagtctaccctttcctacaaccagcaaaaacttataaaaagcaattgaagcttactttgggaatg

SEQ ID NO: 190024 - DNA, 201 bp, Homo sapiens
atcttaatctgaaaacaaatgaatgacaacctagttgcctttcctactctgagattccatgcgtcttaaaagaaaaaagttttaaaactaaacatgtcacygtcaccatcgctacttcacacacctaaagttataaaccactcagaaatgcaaatcttaggagatgtgatctggcaaggcaaaatcgaagatggctttgag

SEQ ID NO: 190025 - DNA, 201 bp, Homo sapiens
  misc_feature (1)...(201): n = A,T,C or G
aaggggccaggtgtgcggggccaggcagggacttcctgagtcaggtgcctggctgggagcagagcctctgaggctctccgggagccagcctgcttctgagncagctaagctgtggccctggctgtgtggggatctctcacctggctccttctctatgctcacacatgcaccaccccgttctttccctgccacttaggaagt

SEQ ID NO: 190026 - DNA, 201 bp, Homo sapiens
ccctcattgttttcacccgaattgtgattcatttccttctcccaggggatattcttgaagacgatgaagactacttggtggatgaattcaatcagcctggrgtctcggacagtgaactcgggggagacgacctctctgatgtccccggccccacagcactggctcctcccagcaagtcacctgctctcaccaaaaagaagc

SEQ ID NO: 190027 - DNA, 201 bp, Homo sapiens
tttcccagatgtttagaagagttagcagatggtgaatctctcttttctctttgcatacagtgatggtgaagtcttaggctttcatcagtagaatcttttcrtcaccagtcggaaggtgtggcttctagggccatgtaactgtgaggttgggagccaagcctgtcttcggtgttttgtttttgttttttgttttgttttgtt

SEQ ID NO: 190028 - DNA, 201 bp, Homo sapiens
gtggtgaccgtggttttaagccttttgtcgtcttcgtaaggagcataccctggtttatctctagaggctcatgaaccatctgtctctgccaggcagcctcwtctgtctttttggaggatgcctgagctttggaactgcaaagaaatgtgcctttttatgcctcctgacagtgactcccaggatcctgaaagctatgactga

SEQ ID NO: 190029 - DNA, 201 bp, Homo sapiens
cttgcagaagtgacggaggacacccgcagggcaagccctctgtcccatgtgatgagcatgtttgtatgtgtggacgatgcatgccatgctacctgggaccsgaggcatctaaacttaggctacaaacagtggctgtgaggatatcagggctgtgggtgtaccaatggaactggggtaccgtccctgctggcgcctgggccc

SEQ ID NO: 190030 - DNA, 201 bp, Homo sapiens
gtcccatggcttctggcttcagttgggggtaggggtatagacggtgagtttccagtcttatgttttcacgcctttattgtagaaatgccataagggaagcmccgtggtgaccgtggttttaagccttttgtcgtcttcgtaaggagcataccctggtttatctctagaggctcatgaaccatctgtctctgccaggcagcc

SEQ ID NO: 190031 - DNA, 201 bp, Homo sapiens
cagttcaacttttttttcaaccagatgtatgagagctatgctgagcctgcgtgaggtctggacccttggtttttcagggccaaatgtgaagattggcctcrttgagggtgtgtgggttttggtgagaagcattgtgtgatcaacaggaggggtcatgatttttatttattcctgggtggccgctctgccctcccaggtgaa

SEQ ID NO: 190032 - DNA, 201 bp, Homo sapiens
ggtaagacacttaaagttatagtgtatatggatgcatacacaatgaaatatggtcagttacagcatgcccttgcttaaattcctatgccttgttcttctayggagtggacagtgaggacacggcttttccctgtcgtgtctgagatccctatggtctgatgtcccatggcttctggcttcagttgggggtaggggtataga

SEQ ID NO: 190033 - DNA, 201 bp, Homo sapiens
agtggcaggagtcaggccagagtcgagctattttcaatcaggctgtgtaattttcgtaatataggattttctggaaatttatagagtaataaccatccctrtgtcagaattactataaggattgcattatttcctgctggactgttttcctgtttacatcattgatttttacattattcctaatgattgcgtagggtatta

SEQ ID NO: 190034 - DNA, 201 bp, Homo sapiens
gctgcactgggaagacttcgatgtgttcacaaagggggagaacgtcagtccacggtgaggctcgctgcgcactgtgccgcgtcttctgctggggggaagcrtcagtccacggtgaggctcgctgcgtgctgtgccttctgctgggtgaggcggcagaggggccgtgcagtctaggacatgtgccctatgaggggcagcttc

SEQ ID NO: 190035 - DNA, 201 bp, Homo sapiens
aacctactccagaaacttcctcagctgcctgggctcttgggcccttagcaggtgatgttggctttgggagcttcccatgaagttggcctccagtttctctyttggcccctgaggaccctgtggaaacagagaaggaggatgctgtcatcccctggggatgagggcaccttctggtctcagcggcaagacatcgtgattcca

SEQ ID NO: 190036 - DNA, 201 bp, Homo sapiens
tccctccctgccccccatgctccccctcatgttctttatccagcctattttgttcagctacactcttacctgcttaaagccctaattccaaattggacacragcaagacacagtaaaaataagttagtttttaaaaatcattagttgtcaagtatgttttgaacaactgttgatgcccagctaggaagtgaagtttattta

SEQ ID NO: 190037 - DNA, 201 bp, Homo sapiens
tttctgggtggggaaagcggggagcatgaggttgcctccctccctgccccccatgctccccctcatgttctttatccagcctattttgttcagctacactyttacctgcttaaagccctaattccaaattggacacgagcaagacacagtaaaaataagttagtttttaaaaatcattagttgtcaagtatgttttgaaca

SEQ ID NO: 190038 - DNA, 201 bp, Homo sapiens
cccacttgagccccttccagtgtgtggagtgctaaagggttgccacatggacgagtgaccataccaacctcctaaagcaggttttcctgtcttcctactaycaacattctcacatcctctcagtgatgcccaagagaatgagggtgtgtttgtcccttggtcttcccatggaagcaaggccaatccaaagttaaacaaaga

SEQ ID NO: 190039 - DNA, 201 bp, Homo sapiens
tgcaggctactgagtgtgtgtcctggggtctgcctgcctttccagaagtgctggggatccactgggatggacactggggtttctggggggctattgatgargaggtgaggggttccctcttagaacatgtttcctcacacctgtaatcccagcactttggaaggctgaggtgggcggatcacaaggtcaggagttcgagac

SEQ ID NO: 190040 - DNA, 201 bp, Homo sapiens
ttatacagtcatgtcatacggtcacatcattgtatcattttagacttcagagggcctgaaaggtcacattgattgaaccacacacccctagattaaataawacaactttttttttttttttgagacagggtctcactgtctcccaggctggagtgcagtgatacaatctcagctcactacaacctccacctcccaggctca

SEQ ID NO: 190041 - DNA, 201 bp, Homo sapiens
ctttgagtaccaggatctcgcatcagcttgggagagaggagacctgaatcctagccctggctccttaggctcttctttccagtggggaagtttagttaatygctccgggccccaatatcttaatctgaaaacaaatgaatgacaacctagttgcctttcctactctgagattccatgcgtcttaaaagaaaaaagttttaa

SEQ ID NO: 190042 - DNA, 201 bp, Homo sapiens
tccacgaccagctttgagtaccaggatctcgcatcagcttgggagagaggagacctgaatcctagccctggctccttaggctcttctttccagtggggaartttagttaatcgctccgggccccaatatcttaatctgaaaacaaatgaatgacaacctagttgcctttcctactctgagattccatgcgtcttaaaagaa

SEQ ID NO: 190043 - DNA, 201 bp, Homo sapiens
gatccacgaccagctttgagtaccaggatctcgcatcagcttgggagagaggagacctgaatcctagccctggctccttaggctcttctttccagtggggragtttagttaatcgctccgggccccaatatcttaatctgaaaacaaatgaatgacaacctagttgcctttcctactctgagattccatgcgtcttaaaag

SEQ ID NO: 190044 - DNA, 201 bp, Homo sapiens
ctctggggtgggccttgagagcctgccgttctaacaagctcccaggtgatgctgatccacgaccagctttgagtaccaggatctcgcatcagcttgggagrgaggagacctgaatcctagccctggctccttaggctcttctttccagtggggaagtttagttaatcgctccgggccccaatatcttaatctgaaaacaaa

SEQ ID NO: 190045 - DNA, 201 bp, Homo sapiens
tcagagagggagcatgtgccacgccaggagaggctttgggtgtatcacagatggagactgcctagcttaactgcgcagtctgaatgattctaaggaggggragagagaacgcctctggagcctggcacacacatttgccggagaaagtggtgagtgcgttgtgaccaggtgagggacgaaccttaaggagattggctgaga

SEQ ID NO: 190046 - DNA, 201 bp, Homo sapiens
acctccaaactcttcacctgtgtcctttcccacctctctgccctgaggacagggaactaagtggctgctcacggtgggtaaaactgaggcttacaagacatccttgggcaatgggacagccagaccccagccctcagcacctgcctctcccatcccaagccccagtctctttttcagctgcaaagtcaatacctttgcttt

SEQ ID NO: 190047 - DNA, 201 bp, Homo sapiens
tccctgagcagaactctgactctaaattctctcctggctctggcgttggtgtgggacttgggttgcgggagggggcaggttgttagcggctgctgctcagrcccagcggaggaccgggctgctccaggctcccggcaagatgtagcaaaatggccaaatttaaggtgagcacgggctcccgtgcagtttctcacccctgct

SEQ ID NO: 190048 - DNA, 201 bp, Homo sapiens
ggtctgagcttcattctaaggcaggtttttgaggacatggggctctcgggcacctggttgtattcctgcatcctgcattcctgcccactctctcatgcctycttctccttctccttggcgtgccccaagccagccttccatctcagatggagttgtatgtttctagtgagcccacacaccccctgaggacagggcctcacc

SEQ ID NO: 190049 - DNA, 201 bp, Homo sapiens
ggcagagctgagcctccacacggatgtccccagcactgggagcagaggctgatgcggccccaaggtgctgaggaaagcgccccccagtgcaaaggatgctwcaaggccccaggcttctcaaggaacatgaggcctggcaaacccagaacgttagactgggtcggctccaagatgcccctgggtttgagctggagaagtgtc

SEQ ID NO: 190050 - DNA, 201 bp, Homo sapiens
tcctgggtcctggaaacccggcagcaacactgtgtctcaagcctacagtgggcatgctggcgaggactgcaggcatggtcatgactgttttgaataattayatgcgaggaatgtttttaaccaaaggccccaaagcatccgaagcctggcttcaaggtggaggagtaaggaggatgagtctgggacgtggggtggttcgtg

SEQ ID NO: 190051 - DNA, 201 bp, Homo sapiens
cccctaggagcgatggttctgtgttcatgtccaattcagtgttcctacaactttatagaacataattgctataaataacaaggaccagctaaacgtaaaaygacccagctgtgcaggctactgagtgtgtgtcctggggtctgcctgcctttccagaagtgctggggatccactgggatggacactggggtttctgggggg

SEQ ID NO: 190052 - DNA, 201 bp, Homo sapiens
aacctaaccctatatttcccctaggagcgatggttctgtgttcatgtccaattcagtgttcctacaactttatagaacataattgctataaataacaaggrccagctaaacgtaaaacgacccagctgtgcaggctactgagtgtgtgtcctggggtctgcctgcctttccagaagtgctggggatccactgggatggaca

SEQ ID NO: 190053 - DNA, 201 bp, Homo sapiens
tggattatgagctctgcagcctgccacagcactgctatctctgagggcctggggcacctgggccacctgaagaacagagcagtccttcctcacctgtgccctccagagagccctgcaggagtatgatctctccaggaagccacacctgctctggcttcttttgctcaagggggaccttctgccctttcgcaggcaagacgc

SEQ ID NO: 190054 - DNA, 201 bp, Homo sapiens
gtgggacccacctgggccacttcagctggagacttggtctcttcagagcataaccaccagaggctggtgcgcggcaggatggggccggttactagggcaayggggagctggattatgagctctgcagcctgccacagcactgctatctctgagggcctggggcacctgggccacctgaagaacagagcagtccttcctcac

SEQ ID NO: 190055 - DNA, 201 bp, Homo sapiens
atcctttgtctgattccaaacaaatgtagaagtctacgctagctagtagtaatggcagctgggaggtgcaggttctctccacccaggctcattttccacgmtttgggtcatgggggacagctggtcctggactgtggcactaagaaagcatgactcctgccccgtcttcccttgaggggcagaacagggcagagtctgcac

SEQ ID NO: 190056 - DNA, 201 bp, Homo sapiens
agaaaagaacttgaatcatataaaattctaccacttttgacatcatgtgtttttttccagtgttttttctatatttaggcataaagattgcaccattaaaygataatttgacatctgctttttgcattgtatcatttccctatgttttgtttaaggcactacatttcaacatgtttaaatttgaaatgtaaggttactttt

SEQ ID NO: 190057 - DNA, 201 bp, Homo sapiens
tggccctgggctttggaaccagttgagaagaaggggcaggaatgagacaggaagagatcagaaatgggccttgtttccgatgagccacattgtgggatgtrgcttggatgtgtggccacggtgggctccctcaccaggggcagagcctgcacgtgtcagagccaggcctgggatgcaccttctctgggcagaccgacccaa

SEQ ID NO: 190058 - DNA, 201 bp, Homo sapiens
cctttaaacaactagctctcctgtgaaccagcaagaactcattcattaccatggggttgtcaccaagctattaatgagggatctgtccatatgatccaaayacctcccaccaggccccacctccaacactggaggtcacgttttaacgtgagatttggaagggacacacatccaaaccatgtcagtgtctctttacttaag

SEQ ID NO: 190059 - DNA, 201 bp, Homo sapiens
ggctatacaggaagcatggtgccagcatctgcttctggggagggtctcaggaagcttacagtcatggtggaagaggaaggggagccagtgtgtcatatgaygagggagggagcaaggagagggaggttgcaggttcctttaaacaactagctctcctgtgaaccagcaagaactcattcattaccatggggttgtcaccaa

SEQ ID NO: 190060 - DNA, 201 bp, Homo sapiens
aaaaatttaagaacaagagggaactcccatatgtccttcacccagattcactaaattttaaccttttgccacacacgttattattttttgaaccgtttgaragtaggttgcatatatcacattggtgttagtccatttgccttgctgtaaaggaatacctgaggctgggtaatttataaaggaaagaggtttatttggctc

SEQ ID NO: 190061 - DNA, 201 bp, Homo sapiens; identical to SEQ ID NO: 32934

SEQ ID NO: 190062 - DNA, 201 bp, Homo sapiens
gtgggtagatcacccaaggtcaggagatcgagaccagcctggccaacatggcgaaatcctgtctctagtaaaaatacaaaaattagccaggcgctgggtgyggtggcttacgcctgtaatctcagcactttgggaggctgaggcgggcaaatcatgaggtcaggagttcgagaccagcctggccaacatagtgaaaccccg

SEQ ID NO: 190063 - DNA, 201 bp, Homo sapiens
gtctctagtaaaaatacaaaaattagccaggcgctgggtgtggtggcttacgcctgtaatctcagcactttgggaggctgaggcgggcaaatcatgaggtmaggagttcgagaccagcctggccaacatagtgaaaccccgtctccactaaaaatacaaaaattagccaggcatagtggcaggtgcctgtaatcccagcta

SEQ ID NO: 190064 - DNA, 201 bp, Homo sapiens
aatctgaatctgtcttttatgtagatcagtgggagcaaaaattccagaggcagaaaagccaaatgtattggcactgatttaaaaggcttttatgaagtctygggaacctgactggagggtagttggccttctcagcacaggtgggaagccccgtagccggtaccagcatccctggccaacaatccacaattagcaaacaga

SEQ ID NO: 190065 - DNA, 201 bp, Homo sapiens
cccttttttttttcccctcccatcaacaatgctgtaaatgatcaacctcatgcattaaatctttgtctgaatccctggtcatttccttagaataaagtccragaagtgagattactaggtgaaaagagatgaacaattttggaactctatgtaaagtgccaagtaaccctctgaaaagcttgcacccctggcagagtgcag

SEQ ID NO: 190066 - DNA, 201 bp, Homo sapiens
cgagaggagatgaggggactgggcctgatgaccacaggcgctgccccttcatagcacattttattcctgaaggatcctaactggaaaagtacctctcgccraaggggctgggtggttccttatcattttcaggcaaggcctggagacaggggcttgaactgggctgtgatttttaggaaaaacggatggtccatgattcgt

SEQ ID NO: 190067 - DNA, 201 bp, Homo sapiens
aaaatgaaactatttttaaaaagcagctgtagcatttggtggctttgctggtccagagaatgtttgtaggagagagccttatgttactagaaagttgtttmaaactttcaacatatcctaaatgcatcactattggataaaatggctctgaacttgaaattcccatctgtgttccaaagtgctagctagctgttttacttt

SEQ ID NO: 190068 - DNA, 201 bp, Homo sapiens
ggtgcagcccggggtcactcgtacttgaggtggtcggcaaatgcagcaggctgctttgtagatgcctctagccttcttttcacatttgtatgcatcgactmccgttcggatgtatgtcttggaaggactatctctcctatttctgattccctaatcatttcattaacatgcatttatccagcttgttctcagtcacttgat

SEQ ID NO: 190069 - DNA, 201 bp, Homo sapiens
cctgagctttggaactgcaaagaaatgtgcctttttatgcctcctgacagtgactcccaggatcctgaaagctatgactgagcgtcagtccgaattcacaratttcaagcggatccggattgctatggggacctggaacgtgaacggaggaaagcagttccggagcaacgtgctcaggacggcggagctgacagactggct

SEQ ID NO: 190070 - DNA, 201 bp, Homo sapiens
attttccccctcaaatcatctttagataaaaatgccaaggtgatactaaggttaaggaaagatgaagactaaaacgccagagcagggcagctagcctgcaratccacctgctggtggccacattcgcaggttgttggtgttgactgtttacaaagagccctgggggacagcagctggggactgggggctggagatgtggac

SEQ ID NO: 190071 - DNA, 201 bp, Homo sapiens
catttgaacctgggaggttgaggctgcagtgagccgtgattgcacctctgcactccagcctgggcaacagagtaagaccctgtctcaaagaaaaaaaaaaraagaagaagaataagaagaaaagaaaaggaaaccttctccaaggaatctctaaatctattgctgagaaaccagttctctagatgggtgcttttcttgagt

SEQ ID NO: 190072 - DNA, 201 bp, Homo sapiens
gaggcagaggttgcagtgagccgaaatcgtgccactgcattccagcctgagcagcagagtgagactccacctcaaaaaaaaaaaaaacaaaaaaaaaaaaacagatttgcgtctcacagataaaaatctagttccctatggacatcctcacgttcatgagtcccagacacaggtgtgtctttggggaaagttttgacaact

SEQ ID NO: 190073 - DNA, 201 bp, Homo sapiens
ttgtagtcccggcaacttgggaggctgaggtgggaggatcatttgaacctgggaggttgaggctgcagtgagccgtgattgcacctctgcactccagcctrggcaacagagtaagaccctgtctcaaagaaaaaaaaaagaagaagaagaataagaagaaaagaaaaggaaaccttctccaaggaatctctaaatctattg

SEQ ID NO: 190074 - DNA, 201 bp, Homo sapiens
aaaaaaaacctggctgggcacaatggctcaagcctgtaatctcagtactttgagaggccgaggtgggtggatcacttgagcccgggagttcaagaccaacstgggcagcatggcgaaaccccatctctacaaaaaatacaaaaaaaaaaaaaaatagccaggtgttgtagtgtacacttgtagtcccggcaacttgggagg

SEQ ID NO: 190075 - DNA, 201 bp, Homo sapiens
tttgaagtgcttctgggtctttccatgggggttctggttaggtgtcatcacccaggccaggggattcagcgtctcccatccctttcccacctttccatgayacccaatggcatgttgactcggagggcgctcagtaactgaggaatggactgctgactgatagtgcagtttatatgttaacgggggagctatagagcctgg

SEQ ID NO: 190076 - DNA, 201 bp, Homo sapiens
tgcacggggtgacggaggaagggtgagctccggagagaacatgaggcccagctcccctccacttttgcccaaggcctcactgtgttgcctttccacctgcytaaaagaagcagcttagggtcatgactcagggagaggcggttagacaagtccaataatacaacttgtttaggggatggagggacccagcctgaggccctg

SEQ ID NO: 190077 - DNA, 201 bp, Homo sapiens
aaattcaaactctggctcccctgctttgtaaccatgtgtgtttgagaggctcttatctgtgccaagccttagtttacttttctgtaaaatggggctaacartatctaccttatagggttctagagaggattaaagagcgtaatataagaatttggctgggcatgggggctcatgcctgtaattccagcaatttgggaggcc

SEQ ID NO: 190078 - DNA, 201 bp, Homo sapiens
actttgtggatacactaaaaaccaatgaatggtacacttagaaagggtgaatttcacggtatgtgaattatgtcacaataaagctgttaaaaaaaaaaaaactctagagatgtagatgttagtagaggtgtgaaatctacctacagtcccggcttaacactttcttggtcatggccccattgagattttgatgtctttgga

SEQ ID NO: 190079 - DNA, 201 bp, Homo sapiens
agcttcatcgcgctcgaggtgcgtccctgccacagccttttcggccatctgtgccaggtcctgtgacttcagctggacaggctgggctgagcacctttagyggcaagatgagggtggcatcaccaagacaaccttctgactatggggaaggtggacagggagacactgggacatccagagaggggttccccaggaggctgc

SEQ ID NO: 190080 - DNA, 201 bp, Homo sapiens
caagggggccaggccagctcagggatgagagaactacgtggtcgttcgcaggtgcacatggaaacgtagggcctcatgaagaaaggctcggcgtgaagagygcgggctccaagctccatgacgccactggctggctctgtggcattagacaagcacttcacttctctgtgcctcagctgctttatctgtgaaagggggtca

SEQ ID NO: 190081 - DNA, 201 bp, Homo sapiens
ccccaaagtacttagaatggggcttagtgcacaggataaatgttggctgtcaccctgtcgttatcatcatggactctagagcctacagcaatccactaggyatggagagggaatacttgaactttcattacattttattttcctcggatctttttaaaatttattttggattgctttgtagcgctctcgtcataatcatct

SEQ ID NO: 190082 - DNA, 201 bp, Homo sapiens
gctgtcaccctgtcgttatcatcatggactctagagcctacagcaatccactaggtatggagagggaatacttgaactttcattacattttattttcctcrgatctttttaaaatttattttggattgctttgtagcgctctcgtcataatcatctcatggtgcatgtgtgtgtatatgtggataatttaaataactgttc

SEQ ID NO: 190083 - DNA, 201 bp, Homo sapiens
taatcacttattgatcatgattgtttaataataaaagatgattaattttttaccaatggggcctgcgatgaaaactgtggggcccacagggctaaccagargcccctttgcgattctccgaaaagtgcacgctggctcactctccagctttgcttccatttagcgacagtgacgacctggtagtggctttgggaaaggact

SEQ ID NO: 190084 - DNA, 201 bp, Homo sapiens
aaatcctgtctctagtaaaaatacaaaaattagccaggcgctgggtgtggtggcttacgcctgtaatctcagcactttgggaggctgaggcgggcaaatcwtgaggtcaggagttcgagaccagcctggccaacatagtgaaaccccgtctccactaaaaatacaaaaattagccaggcatagtggcaggtgcctgtaatc

SEQ ID NO: 190085 - DNA, 201 bp, Homo sapiens
atgattgtttaataataaaagatgattaattttttaccaatggggcctgcgatgaaaactgtggggcccacagggctaaccagaagcccctttgcgattcyccgaaaagtgcacgctggctcactctccagctttgcttccatttagcgacagtgacgacctggtagtggctttgggaaaggactccctggccatcctcct

SEQ ID NO: 190086 - DNA, 201 bp, Homo sapiens
ttgcagaggaaccagagagccggtcagccaaggctacctccagtacttcagtccaccctgggtttaggcccagaggatcttgactatgacttctagattgygtgcaccgtggccagcgtcctgggcctttcccactctcgctaactcccattcccaccctcgtgtcctcatggggagctcaccaagggccagttcttggga

SEQ ID NO: 190087 - DNA, 201 bp, Homo sapiens; identical to SEQ ID NO: 32943

SEQ ID NO: 190088 - DNA, 201 bp, Homo sapiens; identical to SEQ ID NO: 32921

SEQ ID NO: 190089 - DNA, 201 bp, Homo sapiens
aaggaacctgacgcttgttccaagcttccccgcagccaccacagaaagaaccacagtcacagccagtttatgacagtgactcagagcacgagctttgaagygacgcagacctgggctcaaattcaaactctggctcccctgctttgtaaccatgtgtgtttgagaggctcttatctgtgccaagccttagtttacttttct

SEQ ID NO: 190090 - DNA, 201 bp, Homo sapiens
tgacaacgttgctcccctggtcattgtagaagcttcccccccccatatgctgtatagacacgtgccttgccaaggtgagttcagtctgtcttttgaagttycctgcaactgaaccaaacggaggaggatgccgagtagagcagacccctcttgccctgccttcacctctttcctgccagaaaccattcgccaagtttgtgg

SEQ ID NO: 190091 - DNA, 201 bp, Homo sapiens
ttgaccaggctggttttgaacttctgacctcaagtgatctgcccgcttcggcctcccaaagtgctaggattacaggcgtgagccatcgcgcccggcctccmtggtttcttcaaaacaagcttcagaaggctttagtgttccttaatcttattaaggatttgctaacctttgggcctaatacctgtgtttagcctctaaaca

SEQ ID NO: 190092 - DNA, 201 bp, Homo sapiens
atgcctggctaattttttttgtatttttagtagagacagggtttcatcacgttgaccaggctggttttgaacttctgacctcaagtgatctgcccgcttcrgcctcccaaagtgctaggattacaggcgtgagccatcgcgcccggcctccatggtttcttcaaaacaagcttcagaaggctttagtgttccttaatctta

SEQ ID NO: 190093 - DNA, 201 bp, Homo sapiens
tgtgccctagaagtgtgaattcccggagaccctgggaggccccaacccccagcagaccccctcctcagaggctggtcgacagccagcatgcccgcccagtrcctggcgagaggtcagggcgcattgccggatgggggagcagaggacgccggagtccaccgtccgcccttcattctggctggtgtcgggtcacaggtggcc

SEQ ID NO: 190094 - DNA, 201 bp, Homo sapiens; identical to SEQ ID NO: 32926

SEQ ID NO: 190095 - DNA, 201 bp, Homo sapiens
aatggaaatgtatcacttgcatttgatggtcaagttatgcctactgccttgggaacaaagaagacagtcttgatgataggacggggtgcagatgtcacctrcttcccctgtggaggacggggtggagaactttggagctcctttcttcttgctccagtgtgggcagggaggggcatacagagcactgacagccctcagtgt

SEQ ID NO: 190096 - DNA, 201 bp, Homo sapiens
tacctttccctttctgtttccttgtgccgcagatgatttacatggacgatggagtgtcatcttttgtccagatcagaggctccgttccgctgttctgggarcagccagggcttcaggtaggtcatgaaaaaacttaaatgtccccttgtgatgttgtccgccctgcccttcccttcaatagctggggaagatttcttttaa

SEQ ID NO: 190097 - DNA, 201 bp, Homo sapiens
acctgcttcggcctctcagagtgctgggattacaggtgtgagccaccgcacccagcccagttcaacttttttttcaaccagatgtatgagagctatgctgmgcctgcgtgaggtctggacccttggtttttcagggccaaatgtgaagattggcctcgttgagggtgtgtgggttttggtgagaagcattgtgtgatcaac

SEQ ID NO: 190098 - DNA, 201 bp, Homo sapiens
caggagacgctcgctgatgccttctgtgatgtgtttcttccccagctccagaagaaaaggaagtcattaaaggacagtatggcaagctcacggacgcgtayggctgcctgggggagctgaggctgaaatctggtgagtagccgctcgctggaggagcaggcgccaggctccccggtgggcaggagcctctgtgtcggaagg

SEQ ID NO: 190099 - DNA, 201 bp, Homo sapiens
gaggtactttcttcctgcacaccagggcaaaggaaaaaatcaaaaccactggatttttatttgatatgaagtcaactgggcgctccccccaccccctgctraactggcctggctttattttaaggaactttctgaacaaataaataagactgactctgtggggctgctatgagaaggtcctgggttgggtttcaggggtca

SEQ ID NO: 190100 - DNA, 201 bp, Homo sapiens
gcagatcagacagagggacggggattgttttatttaaaaaaaaaaaaaaaaagctttaagtcagggaaactagaggttccaggttgcccattgtggtcaayagagaaggaagtggacagcctgcctggcctctcgctgacagaggccatgtcctcctagctggaccctggggaggtgggcctctcactttctgcagcagct

SEQ ID NO: 190101 - DNA, 201 bp, Homo sapiens
tggtggggactcttggcaggcggatcggcttcttaggaattaattctcaggaagccagaaaagggggaccctgtggcaccctctgcttttgctttggtttmacatgtttcctaggaggaataattaatcttctttctctgaggcaggctgtgtgtgtgtgtgcatgggttgtatgtgtacagtgtgtgcgtggtatgtgca

SEQ ID NO: 190102 - DNA, 201 bp, Homo sapiens
acgtgagcttcgcagtcagaagtctctcctcagctgctgcgcagtcctccctctacttatgaggaatctggtaaacccaggtccccgcctggaggtgaccyggtcacccctctgcgctccgaggcctcctgttccccgggctcagaacaagttcccccttatcctgggtctaggagcattttcttctggttgttcgaacaa

SEQ ID NO: 190103 - DNA, 201 bp, Homo sapiens
tcatcgtctggcaaacaaatgatgggaccggaccaggagcagactggctccctgtggtggggactcttggcaggcggatcggcttcttaggaattaattcycaggaagccagaaaagggggaccctgtggcaccctctgcttttgctttggtttaacatgtttcctaggaggaataattaatcttctttctctgaggcagg

SEQ ID NO: 190104 - DNA, 201 bp, Homo sapiens
  misc_feature (1)...(201): n = A,T,C or G
cggtccccacagggcttcctcctccttgggctccgttttgttgtaaatccaggacacgtttgacgtcagggctggttgtgtttctcatggcaaatgaaacngctcctttccaaagctgctgttcaccctggagctgtgctattgcttcaaactgctctcccttggcagcattagaggatgcagaatgggggccgcagccat

SEQ ID NO: 190105 - DNA, 201 bp, Homo sapiens
agctggtcctgccaggtgctgccgcccttccaggtggtacttccgataggtggtgttcggctggtgacccctgcctggaggtcgaggggaagcacagcagrgccagggcagggagaagcgtgtgctgcgcgcagcccaggaaggaggggcatggagcagaaagaaacacaggtgaactggaagagcagagagggttcatgc

SEQ ID NO: 190106 - DNA, 201 bp, Homo sapiens
ccctccaagtaagactctgcttgctttcagctccctggatgcctgccaggaataaccgcgcgttccctgctactgaaaacacggctccgaatccacttctmcccggccttccggtccccacagggcttcctcctccttgggctccgttttgttgtaaatccaggacacgtttgacgtcagggctggttgtgtttctcatgg

SEQ ID NO: 190107 - DNA, 201 bp, Homo sapiens
gggctctgggctagacagggctgctctccatgaagtccccacccaaccttactcccaggagcagcagtgattgacagacagctgggcaccaccacctgccrctcacccacagatgcagccgctgcggatgctgcccccgccccacctagagagcataacttaacccatggtgacttcgttaacaagagatgcgtagcgggg

SEQ ID NO: 190108 - DNA, 201 bp, Homo sapiens
ctccagatgacgcggacctggtggagctcaagcgggagctggaagccgtcggggagttccgccaccgttctccgagcaggtctctgtcggtccccaaccgrcctcggccacctcaacccccgcagagacccccccctccaagtaagactctgcttgctttcagctccctggatgcctgccaggaataaccgcgcgttccct

SEQ ID NO: 190109 - DNA, 201 bp, Homo sapiens
gtgctcagatccgtgtctgacacgctcacgtgtggaacagaccattgtactcatgccccgccatgtcctccagatgacgcggacctggtggagctcaagcrggagctggaagccgtcggggagttccgccaccgttctccgagcaggtctctgtcggtccccaaccggcctcggccacctcaacccccgcagagacccccc

SEQ ID NO: 190110 - DNA, 201 bp, Homo sapiens
  misc_feature (1)...(201): n = A,T,C or G
agacagaggtgcccgtttctggacagagccttcagctgtcctacagcaggtccccctgccacagtcggcctcctgtgctcagatccgtgtctgacacgctnacgtgtggaacagaccattgtactcatgccccgccatgtcctccagatgacgcggacctggtggagctcaagcgggagctggaagccgtcggggagttcc

SEQ ID NO: 190111 - DNA, 201 bp, Homo sapiens
aactcaaccttctagacagtgatctagatgttgacaccaaagtcagacacacctggtctcctggtgccctgcagtattatggtcgtgcggagctacaagcktctgatcacaggtgaggtcctgacttccatggcgttttctcctgtgctgggcaaggcagcgtctccctctccgcaggaaaatgcatgctgtccccataag

SEQ ID NO: 190112 - DNA, 201 bp, Homo sapiens
ttcagtcttctgcatatggctagccagttatcccagcaccgtttattgaatagagaatccttttcccattgcttgtttttgtcaggttggtcaaagatcasatggttgtaggtgtacggccttatttctgggttgtctattctgtttcattggtctacgtatctgtttttgtaccagtgccatgctgctttggttactata

SEQ ID NO: 190113 - DNA, 201 bp, Homo sapiens
gctacctggtgggcattgagagggtcttcccttgatgctgtggggtgttcagccattcccatttgtaggagaaatcctgcctttccccagttccagtctcyaggacacatggggtggagctgctggatacagggagtggggtgtccgagtcaaagtgaaatggagaggcccatgctttgggggagccctagggctgctgat

SEQ ID NO: 190114 - DNA, 201 bp, Homo sapiens
  misc_feature (1)...(201): n = A,T,C or G
gatgacagcagcccagctgacatatttgctgtggggtttgaagagatggtggaattgagcgcagggaatattgtcaatgccaggtaaggggccaggtgtgnggggccaggcagggacttcctgagtcaggtgcctggctgggagcagagcctctgaggctctccgggagccagcctgcttctgagccagctaagctgtggc

SEQ ID NO: 190115 - DNA, 201 bp, Homo sapiens
acatgtatggtactcctgccagggcaagctgggtgccctgtgtttactgagtgaaggcgtggctgtgcgtcccccctcgctgccgctgctgggagaggaaygccttatgcggactttggccactttaatccagcagaggtttgagcacctacctttactgtgtgggactttctgcctgctccagtgttcagagggtagata

SEQ ID NO: 190116 - DNA, 201 bp, Homo sapiens
gagagctcagccttcctgagccctgaagagaccacagaggtggcctagtgggtgccacatgcagcctggctgggagtaagaaggagaatgggaaaaaccayggcctccttggtttgcagagaaggaagaatcactgttgttacttctctttgctttaggttggctcccatcatctgagactccacagaggcctggaagcca

SEQ ID NO: 190117 - DNA, 201 bp, Homo sapiens
gtatttttaactaaacggaatcaggaatttttgccttggtcgtgaaaggtgggcagtattccaagggcagctgacagatgaacaaatagggtttgaaaatycttttaggacaaaaataagtagatcaatacaatggggggatgaaagaagaaaccattattttttattctaaatcaactgaagcttctcctggaagccagt

SEQ ID NO: 190118 - DNA, 201 bp, Homo sapiens
accagcatgcccagataattttttgcattttttgtagagacggggtctcactatgttgtccaagctggtctcaaactcctgggctcaagtgaccctcctayctgggccttccaaagtgctggaattacaggtgtgagccactgcacctggccagtaactgttctgagtaacttttaaagcccactaatgttacgtggctgg

SEQ ID NO: 190119 - DNA, 201 bp, Homo sapiens
attcttgtttcctctggatattcaaatggccacggttctgaactggttttatatttgtgattatttcccgcccccaacaaaactcttctgattcagccgggcgcagtggctcacacctgtaatcccagcactttgggaggccgagacaggtggatcgcttgaggtcaggagttcaagaccagcctggccaacatggtgaaa

SEQ ID NO: 190120 - DNA, 201 bp, Homo sapiens
actggggtaccgtccctgctggcgcctgggccctgagctgcagggcagggtgcacgtgtcctgacaggagctgaaccagtcccactgatggaagactgagyctttccccctcattgttttcacccgaattgtgattcatttccttctcccaggggatattcttgaagacgatgaagactacttggtggatgaattcaatca

SEQ ID NO: 190121 - DNA, 201 bp, Homo sapiens
gtcatctgcaaggaggtgtaattaggagcaccagctctggggccagacttggcttgagaaacttgcccaggcactgtagctagaaagtggatttggatccsagctccccgctctgtcaccttgggcaggctgcttaacctctctgtgcgtctgtttccctccctgtgagatggggctggtaagggcgccccttgcggtggg

SEQ ID NO: 190122 - DNA, 201 bp, Homo sapiens
caaaccaactctattaatctgctttaagtagtcacaaaataattcatgtgctatttaggaataaaataattccaaatgttgacacctcaccttttatcttrtaagatacactattgaatggccccagaacttaggatctgaagaataaatgattcttgtccagtcatcgttgactcgggccttggtttttttgtttgtttg

SEQ ID NO: 190123 - DNA, 201 bp, Homo sapiens
ccttcagacttccttggggggcttttcctggcgatcctggacagatcctgggcagggtcacagagccatgggagcaagagactccgcccacctggccaggktccatccctgtgcatggatcccaggcctccagcccccgccccctgctccccaggcgcaagacgttccagaatgagccaagggggctcctggttcctttac

SEQ ID NO: 190124 - DNA, 201 bp, Homo sapiens
ggggaaggtggacagggagacactgggacatccagagaggggttccccaggaggctgctttctctgtcgtaggcacactttctcacaccctcttgtgaaaygcatcccagacatggtggcccaaaggctcctcgggaacagcggttgtgtgtaatgattatcgtggatgcaccattggccaaaggcagtgtgaggctggcc

SEQ ID NO: 190125 - DNA, 201 bp, Homo sapiens
gttttcagaaaggcactttgcggatgaactgtcttgactgcctggaccgaaccaacactgtgcagagcttcatcgcgctcgaggtgcgtccctgccacagscttttcggccatctgtgccaggtcctgtgacttcagctggacaggctgggctgagcacctttagcggcaagatgagggtggcatcaccaagacaaccttc

SEQ ID NO: 190126 - DNA, 201 bp, Homo sapiens
gcgctttccacttggggcagaagaggccctggcatatttgtggtggtctctgatcaggcttcctcctataagtggagaacagcacgtgtaattgggctccrcatgaaaatgtgacctctggtttgcatggtgtatcctttctgattcacatctcatgcagggaaaatgctgcttagccgaggtatttttaactaaacggaa

SEQ ID NO: 190127 - DNA, 201 bp, Homo sapiens
gcaagttctcttccctatgccagctctgtggctggaggtgtgaggggcactaacaaagcgaggcaaaggggattcacgaggtggaggctgagaggagcttkggaaggaggagccccatggtgtccctttctgaagggagaggaggaagtaactctggaggtcgccaggctcctcagctgtaacacgccagggcgtggtgtt

SEQ ID NO: 190128 - DNA, 201 bp, Homo sapiens; identical to SEQ ID NO: 32925

SEQ ID NO: 190129 - DNA, 201 bp, Homo sapiens
ctctggggatggcatttctgtgaatcgctggttacattttgcagggcccagcatgtgccccgcgagctgttacatgttcccctaaaggcagccaagcttargcacagaggggctgtgtattatgaggtatctttgtgtggagtccgtgaaactattttaaaccagaactgtcaggggagcagaggtgagagctctcagcgg

SEQ ID NO: 190130 - DNA, 201 bp, Homo sapiens
tttctgccggaagaaggggaccctccccacatccctgtgtccatcccaacgctccccacccccacatcctctttggttctctggtattgtggatatttggrggcagtaatgtgcccagacttcaaaatgcacgtgaatcaaggctgggcatggtagctcacgcctgcaatcccagcactttgggaggccaaggcaggcgga

SEQ ID NO: 190131 - DNA, 201 bp, Homo sapiens
tataaaaacctttataataattatgcggaggctctgttaccccattttacaggtagagagactgaggcacgaatagtcgagggaattttgccaaactccayacacttactaagtggcagagccaggatttgaacccaggctttctgggtccaggtcccaagctggtaatcacagtgctaaaccagtcccatcaatggggaa

SEQ ID NO: 190132 - DNA, 201 bp, Homo sapiens
ccaagttggcccagaaggatgaggaggagttcttctggtgaagtggggagggcagaggcaggatggtccctacggagcatgtggggacgctcgtgttcttycagaggatggaatgctgggcccgaagcctgaagtattgttagggtagagacaggcgggaggtgcgtggagaaggggtcatggaggtcttgttgggcagat

SEQ ID NO: 190133 - DNA, 201 bp, Homo sapiens
accaggcacccccgatacgcagcgtgttgtgaagtgcccttgtgagcagcgggggatagggaacagaaaaccagctgtcagcgacagcgaggtggtgcccsagagagggctgcctcattcgcctggctgcagggtccgaggtcgtcttggtagcatttggcaggaatttatttaggaagcattcagcaaaccgagtgtgtg

SEQ ID NO: 190134 - DNA, 201 bp, Homo sapiens
agctggtgggcttgctctgcagtgctgactcaccacacagaaaaacaagaccaaaaagtcccctcagtctattaaaaaaaaaaaaggatgtaagataaatrtttggctattcaagataaggccactgactcattcagggaggttaggatgactgcgtgtcctcccaggaatgcagacttggagataattggtttgcagaca

SEQ ID NO: 190135 - DNA, 201 bp, Homo sapiens
ggatgagagaactacgtggtcgttcgcaggtgcacatggaaacgtagggcctcatgaagaaaggctcggcgtgaagagcgcgggctccaagctccatgackccactggctggctctgtggcattagacaagcacttcacttctctgtgcctcagctgctttatctgtgaaagggggtcactgatgatacctttcacatagg

SEQ ID NO: 190136 - DNA, 201 bp, Homo sapiens
aaggttagtgaccctgcagggagggacaggcaagccgttcttctagcaacaggcctgagcttttaaggacaccttctaaagcctcccttgcagaagtgacrgaggacacccgcagggcaagccctctgtcccatgtgatgagcatgtttgtatgtgtggacgatgcatgccatgctacctgggaccggaggcatctaaact

SEQ ID NO: 190137 - DNA, 201 bp, Homo sapiens
atgacttctttttctcccaatagatttttaaggactttcacgaaggagccattaactttggacccacctacaagtatgacgttggctcagccgcctacgayacaagcgacaaatgccgcacccccgcctggacagacagggtgctgtggtggaggaagaaacatccctttgataaaacaggtgagggggccgtgcccgttc

SEQ ID NO: 190138 - DNA, 201 bp, Homo sapiens
gggtgggaagagtgtccttgggactagagccctgccagaccccaaaggccggtttctacccgatgatctcttgggccccgtcccgagagtgaggcacggcrccaccaggcacccccgatacgcagcgtgttgtgaagtgcccttgtgagcagcgggggatagggaacagaaaaccagctgtcagcgacagcgaggtggtgc

SEQ ID NO: 190139 - DNA, 201 bp, Homo sapiens
atgggagacactttgagaccatgctggtatcctgccttttactaaactttcccttaagatttatcatcaacagataatttttgctgaacaattatttactrtgacagttgtaaaatgatgatttttaaatgatttcctccaaatttattacttggtattctactatagagccctctcttgttccccattcacccacctaca

SEQ ID NO: 190140 - DNA, 201 bp, Homo sapiens
aggaacgcactttaatgacagccacacgccaccctgccacaagcagcgctcttctccctatgaagtgtggtgaggaaattggggtgagagggtggtggaaytggttgttttgggggtctcttcctggagtgtggagagatcagaaccatctccagaccatggctgtagacagcggcccttgatcattcacagaagatctcg

SEQ ID NO: 190141 - DNA, 201 bp, Homo sapiens
agtctttaatctgcatctgttcctcggctttctgtctttcaaaacattgatgtttttggagaatgcaagccttcttttccgttaagtcgagggtccctacmtttacattttcctagtgtttcattataatcacattcagtgtatggatcactgaccagaatgctacctacatgatgctgtatccttctcagggtaccagat

SEQ ID NO: 190142 - DNA, 201 bp, Homo sapiens
ttctgaaggagcagtacgggcagcaggtggtcgtgaaccttctgggaagcagaggcggagaggaggtgctcaacagagccttcaaggtaaggccaggctgycctctccacagctgggctgggcggcaggtggccatggtggagcgttgagcctggaggtggctcctgcagggactggagctgacagcccagccctccttcg

SEQ ID NO: 190143 - DNA, 201 bp, Homo sapiens
tttcctgaggatgtgtctggggagatgtgatgggatcaaccccctgccctgctggcagccccaccccatggcatagcagcaggcccctgggagccctgagygctcattaaaggaacgcactttaatgacagccacacgccaccctgccacaagcagcgctcttctccctatgaagtgtggtgaggaaattggggtgagagg

SEQ ID NO: 190144 - DNA, 201 bp, Homo sapiens
gtgtgatctgacttgcgaagggagagaacttccaggaagacgtgggcatctctgctcactctgagagactcgggggtgagccggtggtggccggctgtcgygggtggtcacagccaaactcagctgttcctggagctcaggagccctggggctttaggttctaccacctgtttccttccttctctctcaggggcccccttg

SEQ ID NO: 190145 - DNA, 201 bp, Homo sapiens
tcgaaagtctggtctggggcttctgcccagggcattgtccgcagtactctagaagatgtgccaaggcgggtgggtgaagacagggaccagggcagatgccsgggggcacaggggtgggctgggagttgtcagcaggagaaaaaagccaccgatgtgtgactgtcagtcagtgtggggtgggagggagaggaagggacagtg

SEQ ID NO: 190146 - DNA, 201 bp, Homo sapiens
cgagggcctaagtgtttcgaaagtctggtctggggcttctgcccagggcattgtccgcagtactctagaagatgtgccaaggcgggtgggtgaagacaggraccagggcagatgcccgggggcacaggggtgggctgggagttgtcagcaggagaaaaaagccaccgatgtgtgactgtcagtcagtgtggggtgggaggg

SEQ ID NO: 190147 - DNA, 201 bp, Homo sapiens
gggtggcatcaccaagacaaccttctgactatggggaaggtggacagggagacactgggacatccagagaggggttccccaggaggctgctttctctgtcrtaggcacactttctcacaccctcttgtgaaatgcatcccagacatggtggcccaaaggctcctcgggaacagcggttgtgtgtaatgattatcgtggatg

SEQ ID NO: 190148 - DNA, 201 bp, Homo sapiens
cctttttgactgggaacacggttcttgaccaaggagcccagatcctgcctgtcctcgaagctgcaatagcgaaccgcacactgccctctcgtggcggtccrgagggtttcattctgaaactggaggattttcttttcaaatctagacgttaatgttctccttcctgtgcaaagatgctacccgggcacagcttcagcgtgt

SEQ ID NO: 190149 - DNA, 201 bp, Homo sapiens
  misc_feature (1)...(201): n = A,T,C or G
cttttgcagacagtcactcggctctcagtgtcctggacgtggacggtatgaaggtacgctgtacttggccacactgtggagtggggtctgatcaatccctntttttatgtgggcatgtcttcttcctcctcttgccctgacctgtgcctttttttttttttttttttttttttttttctgagacaaagtcttgctctgtca

SEQ ID NO: 190150 - DNA, 201 bp, Homo sapiens
cctgctgagtgggtgccgcgaagtgagcttgggtagcactgcctgaggttagaccctgagttcggtgtactgaggacgtttctgagagccgtgactctcayggagggcttcaggaaggctctgtggctgcgtaggtctggcacccggtgctgcctgttgtggggccacgtgagacttccacagctttcccgtgatttctaa

SEQ ID NO: 190151 - DNA, 201 bp, Homo sapiens
cagtcggcctcctgtgctcagatccgtgtctgacacgctcacgtgtggaacagaccattgtactcatgccccgccatgtcctccagatgacgcggacctgrtggagctcaagcgggagctggaagccgtcggggagttccgccaccgttctccgagcaggtctctgtcggtccccaaccggcctcggccacctcaaccccc

SEQ ID NO: 190152 - DNA, 201 bp, Homo sapiens
ccaagatgcccctgggtttgagctggagaagtgtctgcgggagggtgctggggctcctgcagagcgtgtcttcctgaccctgtgggcttttctggggggggctaggaggctctgccaagttggtggatggaactgtgccttgccctggggggcactgggcaggagccagcctcggagcgtgagtctggtgctgcgccagga

SEQ ID NO: 190153 - DNA, 201 bp, Homo sapiens
tgttgcctggttgtcacctgcctgtgctggggagcagggtggggttcccggcacccccaccctgtgccagagaagctcgtcttcattgcttgccggcgagrgcctaagtgtttcgaaagtctggtctggggcttctgcccagggcattgtccgcagtactctagaagatgtgccaaggcgggtgggtgaagacagggacca

SEQ ID NO: 190154 - DNA, 201 bp, Homo sapiens
ggagctgaggctgaaatctggtgagtagccgctcgctggaggagcaggcgccaggctccccggtgggcaggagcctctgtgtcggaaggggcctcagtgcrggcattctgtttgaccgctcttctctctctcttcttttttttttttttttttttttctccgagatagagttttgctcttgttgcccaggctgcagtgcaa

SEQ ID NO: 190155 - DNA, 201 bp, Homo sapiens
ttgtgggccgagctattgtctttgtgttttctttttggagtgggtgggaagccagcttggcaagccgggtgtgaatgaacaggaatgagcaggagacgctygctgatgccttctgtgatgtgtttcttccccagctccagaagaaaaggaagtcattaaaggacagtatggcaagctcacggacgcgtacggctgcctggg

SEQ ID NO: 190156 - DNA, 201 bp, Homo sapiens; identical to SEQ ID NO: 32944

SEQ ID NO: 190157 - DNA, 201 bp, Homo sapiens
  misc_feature (1)...(201): n = A,T,C or G
gctggagatgtggacatctgtcccaggctaactggggactggaggccgggggtgtggacatctgtcccaggctaactgtcatccctcttttgttcctaacncagacctgtgctggcgatcgtggaggtggaagttcaggaagtcgatgtgggtgctcgggagagggttttccaggaagtgtcctccttccagggccccctg

SEQ ID NO: 190158 - DNA, 201 bp, Homo sapiens
cagcccaaagactggcatctgtagacacatctggatcttccgtttgatctcagtgttctagtaacggaccctcggtaatcccttcctggtcatcacagcaygatgctgcttcccccctagagagtgtgaggggggcttcggcttcactcttgacagcgcttgctttgtatttcctgggttgctcttctgtcccacattggc

SEQ ID NO: 190159 - DNA, 201 bp, Homo sapiens
agcatgcattcgctgacccgaaatgctgcaccgtgcgccccccagttcctcagccacactcgctgtccaggcagcatgtattggaggatgtcaagtgactrgaattggtgtgggactgtgttttgcaggaaccagctgttgcacgtgcccttgaggcagcaccaggtgagctgctgtgactggctgctgaagatcatctgc

SEQ ID NO: 190160 - DNA, 201 bp, Homo sapiens
ccataattcctgttggtgttgtttatttcttatgttaaaaaagaaacaaacgagttgggaaattttcaattgtgtgtaatgcagtttaaaaaaaaaaaaaagtctaacccttctcacttaaaaatagctactttggggccaggcacagtggctcacacctgtaatcccagcactttgggaggccgaggcgggcagatcacc

SEQ ID NO: 190161 - DNA, 201 bp, Homo sapiens
tccacagagccggcggctaaaaatctggcaagaggagtcgaggaagggggctgaggaggtagaagggagggctttcctcaaaaggccagaaattcgtggcmagccaaaggggaagcaaagacattctcgtgtaggaaaacttacaggaaatgcaactaaaagcgtgggagacaggaagtctgtgtatttctgagattatca

SEQ ID NO: 190162 - DNA, 201 bp, Homo sapiens
cttgaagacgatgaagactacttggtggatgaattcaatcagcctggagtctcggacagtgaactcgggggagacgacctctctgatgtccccggccccayagcactggctcctcccagcaagtcacctgctctcaccaaaaagaagcagcatccaacgtacaaaggtagcctgacccttcttttctcaggagcctcagcg

SEQ ID NO: 190163 - DNA, 201 bp, Homo sapiens
tggagcctaggcttttgccttgaagaactagaagaatggcagggcagtaactgagatggataaagtgagagacactgttaaatgcagatgttaagagcttrgactatagagtcacactgatttgctttgccctttactagctatggactttgaccaatttacataacctctctgtgtttaatttcttacctgtggcagaaa

SEQ ID NO: 190164 - DNA, 201 bp, Homo sapiens
cctaggcttttgccttgaagaactagaagaatggcagggcagtaactgagatggataaagtgagagacactgttaaatgcagatgttaagagcttggactrtagagtcacactgatttgctttgccctttactagctatggactttgaccaatttacataacctctctgtgtttaatttcttacctgtggcagaaagttat

SEQ ID NO: 190165 - DNA, 201 bp, Homo sapiens
agcttttaaagtgatagtttaggcattgtcctctttaaagtaattttgtgaaaataaattcacattgaagtctaaagtttagttcacttcctatgccattrtatagtatgctgaaatgtagtcagaaaagttgaaatgtggtttaagcttgataatctcatgaaattttaattacttgctggataacctaagggaggtgct

SEQ ID NO: 190166 - DNA, 201 bp, Homo sapiens
tctgtcatacattcaagacctctaggcctttaattttgctagtagctcaggaatgttttggcttatttttattcttattattttgtaataaccttggctcyaaagagacaagagtagattttacttccctcaacaacccagcctgtcacatgtcttcttcaaccacactaacacagaacttcatcatttacctttgggtag

SEQ ID NO: 190167 - DNA, 201 bp, Homo sapiens
tgtaacattaatatgttaaaagcacattttcaaatttgtaatacttgaactttttatctgcattatgtcaaattggatccacaatccagtgtaccaacttkgaggcaatcgatggaataatcttttactcagttctaggatggttatctggtaccttatgggagtaacagagtttcctatgtaccattgaaactacagcta

SEQ ID NO: 190168 - DNA, 201 bp, Homo sapiens
gagttgtataacctgtttgattttcctcaagttgggggcaagagtgtctattaagagtatgtagatggcatgagcaatccctgagcaagagtaattattgmctttactatgcttacatcaagaatttattattattattattattatttgagacggagtctcgctctgtcgcccaggttggagtgcagtggcgcgatctcc

SEQ ID NO: 190169 - DNA, 201 bp, Homo sapiens
cccagggatgcagaggcctcctctgctatggccgcttgaccttggaaactcatgtacccataccagatccactgatgggaatgtatacagcttacagccaycctgtctgtctggctctccctttcccattctcttctctgcttaagtacacatacctataactgctcacgctgaggaggggaaaagaatgccccccagtct

SEQ ID NO: 190170 - DNA, 201 bp, Homo sapiens
gccaggaaacttaatctggttttgtcgtactttagattctaatcttcttccttagttcttctgctatcatgtatttttcagtcttcaaatagctgctcaaygcattctatacaaggattattgttggatttagtgggagagacaaggtatactatagctaccactttgcacagaaccagaccctcaggttgttatttttaa

SEQ ID NO: 190171 - DNA, 201 bp, Homo sapiens
atgtctcaaaaaaaaagaaaagaaataatactcaagatgatggactccctaaataccctgactggatcattacacgttccatgcatgtaaccaagtatcamgtgtaccctataaaaatatacaaatttatgtatcaataaacaaatttttaaaaagtattgaatatctgctatctatcaaagcctaagcaaagcctaggta

SEQ ID NO: 190172 - DNA, 201 bp, Homo sapiens
aacacatggcgcattcataatcagaacattaaaaacaaaaacatataaaatgcatacttactgagaaaatctaacaatgacataaatatgacttcaaattyttttcttagtcagtagcataaattggtagggctaaagctgaagccaactccaaattctgagacctgctataaaacacaatgtgtgacgaacaatataatt

SEQ ID NO: 190173 - DNA, 201 bp, Homo sapiens
tccactatatctgaatctcattctgatgcttgctttgtgttttccgactatatttcttgccttttaggatgccttgtaattttgttgacaattagacctgmtatatggggtaaaaggaacttagggagatatgcctttaatatgctgggttttgtttatctggctaggagttaagctgtgtttgatgtttgctgtagctgt

SEQ ID NO: 190174 - DNA, 201 bp, Homo sapiens
atttaaatattagtatcatctaaaaactaccttcatggaaacatttagaatgtttgaccaaacatctgggtactatgcctagctaggttgacacatgaaartagccaatacatattcctagaccaatcttgaatcttcttatcttagattgattatgttttccaactctactctgagttgctcagagaagcagcactctta

SEQ ID NO: 190175 - DNA, 201 bp, Homo sapiens
atgttacacacaaattatcttctgtaacacttgaaattggtatctttaaaaacttaacacacaccaatatggaaattcaagatagcacattatatttcagaaaaaaaaatgcttctctgttaggatttcatgagagtgtttaggcttttttgtgtctattgttttacagtaaatttttatagatttgtttatttggtagcc

SEQ ID NO: 190176 - DNA, 201 bp, Homo sapiens
tggataaagattagggggattattaccctgtattcttgtcatggtgttataaggttctttcttctgggaactaggcctcttcttcagtttatgggttctgrgtctaaaaattaactcaggttcggaagctgagcaagagattgtgacttcattggggcagctacactcaactttgtggtcattcatctttggtttcttttg

SEQ ID NO: 190177 - DNA, 201 bp, Homo sapiens
caaacatctgaaatatcattctagctaagatgttcccttcccaacatctcaactcacctctggtgagttttaatagttggactgctaccttggaccgggcrtgtgctccatcttctaccagtggtggggtcctcattaccactgcagcagtgagttaaccagtgccaaagccccatcttattaccagctttctcagactat

SEQ ID NO: 190178 - DNA, 201 bp, Homo sapiens
tggtttgaataatttcatgattttactgaatctgtgactttattaattattgcctcaaacctttttaaatttatttgaatccactagcaatttattttagtttaaatggaaaaaaaagatcacaaactaaaaccataatttgagtctttgttttttaaaaatactttctaaacaccaatccctttgccttcccagctatga

SEQ ID NO: 190179 - DNA, 201 bp, Homo sapiens
agacaagcagagagccaaatcatgaattaactcccattcacaattgctacaaagaataaaatacccgggaatacagctaacaagggatgcgaaggacctcytcaaggagaactacaaaccactgctcgaggagataagagaggacacaaacaaatggaaaaacattccatcctcatggataggaagaatcaatattgtgaa

SEQ ID NO: 190180 - DNA, 201 bp, Homo sapiens
agattttcagtagtagcataaatttgaatttgtgcagaggtgatctagatctgagggaaaatgggcattatttggtttatagagtagaattgaagggatcrttttcttagtacccagcagtagcaacctcccctggaaaattctttggaaaactgcctcatatcagaagaatttgcttgaactgtatttggcagtatacca

SEQ ID NO: 190181 - DNA, 201 bp, Homo sapiens
cattacgatttgaaaattagattattaaagataatcattatgatttcaaaataatctgtataccatgtttcttttctgtatctctctccttttttattctsttaactttaatttagcaagattaagcccagtttcttaaaagcttgtgtttcttattgttttccatctatagtcccacatataataaattagaaaataaga

SEQ ID NO: 190182 - DNA, 201 bp, Homo sapiens
taaaatattgatgtcagtagcctgggaattttaccacgtatgcaagcatgggataagacaaccacaggtttctcttctgtaccagttaacctgttttatgrttatttcaagttgtgaataaaagcttgaaaattggcaggatctgtttgaggattactcaaggatatttattacttgtttcaggaacagcatctgttgcag

SEQ ID NO: 190183 - DNA, 201 bp, Homo sapiens
gtaaaattaggatttttaatatcaattaaatgaaggactttgttttgttcactgttacatctccattgcctagaacattgacatataaatatttgttaaaygaatgaatgaaataacattctgacaattgaagaagagattttaagaatagctgtaacacatcatacataaaaatgttaagcataaatatttgtaatatat

SEQ ID NO: 190184 - DNA, 201 bp, Homo sapiens
cagtttctcagctgtttctaatcactataggatatggtgatcacttttgtcagaggaaagtataataattaaataggatttgtcctatagaaatatcaaattttttttttatttttgagaaggcgttagggagaaaagagatttttatgtggagtagatcgtttaacaagaaatctgggacctgatttgttgtgcagttta

SEQ ID NO: 190185 - DNA, 201 bp, Homo sapiens
taaccttcctggtcattagttattgctaaatcatctctgaggacatttctagatctaaaattttatgactgtaatattcttcagtaaaataatatacaatyctcttttctgctgaatatgtgacccttagtgttcatagaagttgctggcttttagaaataaacagtttgattcaggctaaatggagaaaaagtcacagat

SEQ ID NO: 190186 - DNA, 201 bp, Homo sapiens
tgctaaatcatctctgaggacatttctagatctaaaattttatgactgtaatattcttcagtaaaataatatacaattctcttttctgctgaatatgtgayccttagtgttcatagaagttgctggcttttagaaataaacagtttgattcaggctaaatggagaaaaagtcacagatttagtgattcaaactacagaagt

SEQ ID NO: 190187 - DNA, 201 bp, Homo sapiens
gctgccttcagctcagaggccatgatgttccctctttcacatactcatctccccatgttccacctttgccgtccatcagatggcctgtgcacataattagraagtcttgcttcacattattgttatacttggttgcctattaaaatgtaaaaataacatgtcatttgtctcttttcatgtatgcctccacatacttcatgc

SEQ ID NO: 190188 - DNA, 201 bp, Homo sapiens
gttgcagttgcaggtctccttgcagctcttcgaataaccaagaacaaactgtctgatcaaacaatactattccaaggagctggggaggtatttgccttgtrtaatacttatgttctcctaaactaacatataattagtgttaattgctcattaactcaagatttgacgtattctttcaaatttttagtatattatgactgt

SEQ ID NO: 190189 - DNA, 201 bp, Homo sapiens
tggaagcagtatggagattcctcaaagaaataaaagcagaagtaccatttgacccagcaatcccattagtggatatatacccaaaagaatataaattattktaccacaaagatgcatgcacacattttttttgtttattggagcactactcacaatagcaaagacatggaatcaacctaaatgcccatcagtgatacactg

SEQ ID NO: 190190 - DNA, 201 bp, Homo sapiens
gtgtgttctcacttataagtgggagttaaaatgatgagaacacttgaacacaaagaggggcacaacagacactggggcctagtgtccatgtgttctcatcmccaccccagagggtggaggatcagaagaggaagaggagcagaacaagtaactattgtgtaccaggcttagcatctaggtgataaaataatctgtacaaca

SEQ ID NO: 190191 - DNA, 201 bp, Homo sapiens
atgtaagaaccagaaactctgaccctagattcagaattctagggttcaaatggcaggaggtccaagaagataagcaagctttctggcacactgtgttgaaktccaaatattattattattattattattattattttgagatacagtctcactgtcgcccaagctggagtgcaatggtgcgatctcagctcactgcaacct

SEQ ID NO: 190192 - DNA, 201 bp, Homo sapiens
ataagtgtccatgaaatctttacaatttgtgtttagagattgcagtaaagacaggcataagaaattataaaagtatcaatttggggaactaataaatgtcyataaaatcttcacaatccacgttcttctgtcatggcttcagccggtccctctgtttggggtccctgacttcccgcaacaataatcctttgggtatatacc

SEQ ID NO: 190193 - DNA, 201 bp, Homo sapiens
taggaaatcacaagggtattgattggggaagtgataagtgtccatgaaatctttacaatttgtgtttagagattgcagtaaagacaggcataagaaattayaaaagtatcaatttggggaactaataaatgtctataaaatcttcacaatccacgttcttctgtcatggcttcagccggtccctctgtttggggtccctga

SEQ ID NO: 190194 - DNA, 201 bp, Homo sapiens
atcttatttttgttcttagttttagtttgataatctaagatatagattagaatgtactgtatgaatcctttccccatgttttgttaccttaaataatatgrtattctaactattctgccataatcctgagtctcgtcttccttggcctgtggctgtccatgacacagagccaacatacttgtagtggacattggttttcag

SEQ ID NO: 190195 - DNA, 201 bp, Homo sapiens
cacattcggaaatgaagtttagtgtttaagaggtttgtaagaagtgcccttgagattaaactctgtggaagaaataacaaaggaagcaggaatgggcagarggagaagttgagctgcctgcaggcaccatgacagctttccctgatcccgtggggaactctgaagctacagtggcttttcagagttgttaccagttgggct

SEQ ID NO: 190196 - DNA, 201 bp, Homo sapiens
ataggtcgtggtctgtggtgaaacgactctttgcagctgaggcaacccccaggacaacagtgggggatccgaggggcatatcatgatattcagcataattwttcaattcagaaagtattgattaattagcttggatattaattagcatctctagtggagtagcacaaatccatttcctagtactggcctgttcaacaaatt

SEQ ID NO: 190197 - DNA, 201 bp, Homo sapiens
taggtcgtggtctgtggtgaaacgactctttgcagctgaggcaacccccaggacaacagtgggggatccgaggggcatatcatgatattcagcataattaytcaattcagaaagtattgattaattagcttggatattaattagcatctctagtggagtagcacaaatccatttcctagtactggcctgttcaacaaattt

SEQ ID NO: 190198 - DNA, 201 bp, Homo sapiens
caaaacatgtggaaatatttaataggaaactaaaaccaagcttattagtacaagcatgcctcgtttaatttttgttcatgttattgtgctttgcagataatttttttttgttttttataaattgaaggtttgtggcaatcctccattgggcaagtctatcagtgccattttccaatagcatgtgttcacttgtatctagta

SEQ ID NO: 190199 - DNA, 201 bp, Homo sapiens
aacataccaacgataagaaagtaaagcggccatattgctgatatggagaaagtttgaatggtctggatagaagatcaaaccagccacaacattccctttamgccaaagcctaatccagagcaagccctaactctcttcatttctgggaaggctgagagaagtcaggaagctgcagaagaaaatggtgaagctagtagaggt

SEQ ID NO: 190200 - DNA, 201 bp, Homo sapiens
aacactcacatctaaatagcattctctaccaaaaggaaccagaactgcttagaaaaattgctgactccagggctgtgccagagtaagtaaaagatgagttygggatatgtaccaaaaagtaagaatgtacttgaaaaatgatcagtgtatttagtcagggttctctagagggacagaactaatggaatatatatatatagg

SEQ ID NO: 190201 - DNA, 201 bp, Homo sapiens
agtatccgtggccttctggagaactttgcctcagcgctgcaaagtattgtcacctagttggcattgtaactgtgacttcaaaaggccgtttcaccattctrtcaatccagctgcttcaggatgataggaaacatggtaagaccagtgaattccatgagcatgagcccactgccacacttctttggccataaagtgagtgcc

SEQ ID NO: 190202 - DNA, 201 bp, Homo sapiens
ggccgtttcaccattctatcaatccagctgcttcaggatgataggaaacatggtaagaccagtgaattccatgagcatgagcccactgccacacttctttrgccataaagtgagtgcctttgttagaggcaatgctgtgtgtaataccatgatgatgcataaggcattctgtgagtccacggatggtagtcttggcagaag

SEQ ID NO: 190203 - DNA, 201 bp, Homo sapiens
gcccactgccacacttctttggccataaagtgagtgcctttgttagaggcaatgctgtgtgtaataccatgatgatgcataaggcattctgtgagtccacrgatggtagtcttggcagaagcattgcatgcaggataggcaaactcatatccaaagtaagtgtctattccagtgaggacaaacctctgtcctttacatgat

SEQ ID NO: 190204 - DNA, 201 bp, Homo sapiens
gggaactcctcatgaggccatcggtgcaggctggggaagagaagtcagggtggcaggagtggagaccatggacacgtgagccacttcctcatgtaacttasttgtgccttcaggacctgtttgagcccagtcacctatataccacttccatttgatgatggaatgctgctgtgcatggcccactttatggctacatgggtc

SEQ ID NO: 190205 - DNA, 201 bp, Homo sapiens
tagattaagtaggaacgcagtaggtttcctatcagtttcacttctagctctacataagtcagactattctgattgctgcattgcctctgctctctattacrgtagctccacccaccttgcgtttgaaggttgagtgtggccacttggcccctgccacctcaggatccaattattcccattgtatttaaattttgtagttga

SEQ ID NO: 190206 - DNA, 201 bp, Homo sapiens
gttgctcttggtgttgtggcgtgtggattgaggcagatcacagataatattttcctcactactgctgaggtattgtaaaatcctctaagtttaccaagggyttaaaataccaagtgtgctcagcctaggttgtctaatgttttatttatctagcatctcagcttactctctgaaagaagtaaagtctgaagaacttcccag

SEQ ID NO: 190207 - DNA, 201 bp, Homo sapiens
taaaaatctgcttccttgaaatgtatatctgtatcaacttactatgtcagaagtcagagaaatgaggcacactgacactgtagagcttaggagctacattygcttctcagagaagaatggaagtattgggccgaataattaatttccctctctatcgttctttttttctcctaaaatttaaataattcattagggcttcct

SEQ ID NO: 190208 - DNA, 201 bp, Homo sapiens
cttcagtctggccctcaacccaggaggctaattaaacacaaacctttccatcagtgacatgaattaatgggtatatctatatgaaaaattagaagaaagasaggattgttcattcattgacctctttcacaaacttcctgggtttggacgtgtttattcctaaccaatcagggtttgtcacctccctgtgggatgaaccga

SEQ ID NO: 190209 - DNA, 201 bp, Homo sapiens
attaagcatatttataaatcaagttcatttcttcaccctattcttccacaattacaatttataaaatctttttcataaatattcaatttatgttttttaamagcttactatttcactagtagtaacttcagaaatagagtcagaaattgtgtctcaggatttgtgaaaacttgttaataggtaatttttctttttcttcca

SEQ ID NO: 190210 - DNA, 201 bp, Homo sapiens
cttctttttaaaataacctaattaagcatatttataaatcaagttcatttcttcaccctattcttccacaattacaatttataaaatctttttcataaatrttcaatttatgttttttaacagcttactatttcactagtagtaacttcagaaatagagtcagaaattgtgtctcaggatttgtgaaaacttgttaatagg

SEQ ID NO: 190211 - DNA, 201 bp, Homo sapiens
aagttaacccagtagtatcggattgcttcctccaaaagagcatcacatattgatccactgctatttgacatggaaaatcttccaaagacaaatgtattgartgtgcaaaaatgattttcacctacctcccaaatgtatttgcttttaagacaatttttcaagagctgaataatataggtgaacaggaaattaaataaaata

SEQ ID NO: 190212 - DNA, 201 bp, Homo sapiens
atgcagtactttactaaggacactcttgctcaaaaccaccctgtgtttcttttggttcccagtctgagctcttatttccctatactttacccacttgctcytcttgattgaaaagttatttggtatgtttgaatctttatgtgcacacttgcccttctttttaaaataacctaattaagcatatttataaatcaagttcat

SEQ ID NO: 190213 - DNA, 201 bp, Homo sapiens
gggtaaattggctctatatacagcttgcggagggatgaatcctcaagaatgtctgcctgtcattctggatgtgggaaccgaaaatgaggtaaataatttaygtctataaggcagctatgtacctttaaaaatggcatcaattcttgcattttgaacttattccaggaactcataaaattcattcttttttgtctggttctc

SEQ ID NO: 190214 - DNA, 201 bp, Homo sapiens
ttcgagcatctgaactctgactttgacaggtaacacattgctgaaggtggtttttatatttctcttatgcagttgtctagtttattttttattgggtgagmaaatgaaaacatttaatgatttggaaagggtagccaactttgagaagaattttcctgtaaacacaatgatgtttttaaaaaatttactctctttaggaac

SEQ ID NO: 190215 - DNA, 201 bp, Homo sapiens
tcatgttgttttccctcagtcctttagtgatcagtgtgccactgcttttgcttttaatctgaacctcctttaagttatttgcttacatccttttgtcttcycaatgagactattttcccagtgagcatttccagggcaagatccatgtttcttatttgctgcttaattcattgagcactctcaagcttcaatacattatca

SEQ ID NO: 190216 - DNA, 201 bp, Homo sapiens
tcctgcccagacagaaacgtgtactgagtgccttcagatcacgttagcaatctggaaatccaagtcctctcggtttctggagtgacacggttaagagtctrggaatgcgtggtgggtggcctctgtcttggacactttgcatggcttggtagaagaactctgtcccagacatgggactgtgggtaaagccatttcttttct

SEQ ID NO: 190217 - DNA, 201 bp, Homo sapiens
ggatttcattttaaccacagagaaattctaacaagcgcaaaaccgcagaaccaagtaagtagtagatccgggaatagaattgagaaggctctgattcctcmtcacatactgagaccacagagttctgctccttctgaacataatgacagctcatccaatgcttctagaccaccagtatatgatacattgggagcaaaccat

SEQ ID NO: 190218 - DNA, 201 bp, Homo sapiens
ctgcttgacagtctcagttttgtcaagaagatatacataggttaattagcacagtccagaagaatagttgccctgtttgctgcccttagcagtgaaacaaygtaccattctgctgtctagggatctagtccaaaggttttataaggaatagggaaagcaaagaaaagacaaaaaaggagaaaaaccaggatcaaacttagc

SEQ ID NO: 190219 - DNA, 201 bp, Homo sapiens
attttctttaggatcatattaataagtattcaggaacttacctttaccctgctattgactgttttcacctacatataaatccctttgtgatctggcccatrcacttcaccttcctgtctgccatcctccacccctccgtgtatcctttacaccattgtataaataaatagttttagttggctgcacatgtcattgttctgt

SEQ ID NO: 190220 - DNA, 201 bp, Homo sapiens
taggatcatattaataagtattcaggaacttacctttaccctgctattgactgttttcacctacatataaatccctttgtgatctggcccatgcacttcaycttcctgtctgccatcctccacccctccgtgtatcctttacaccattgtataaataaatagttttagttggctgcacatgtcattgttctgtcacacttc

SEQ ID NO: 190221 - DNA, 201 bp, Homo sapiens
ttggccacataaaccttactgttgaagaatagctttgtctaggatgacagttattttctcttagccctttgagaacattatttacctgcctatggcttctrttgttactattaaataattttttaaaatctgtagatttttaagtggctatagagtactcatgtgccagtcattgcattgagcacttaacatttatcactt

SEQ ID NO: 190222 - DNA, 201 bp, Homo sapiens
taggaacactgtctaaataattaatggcacagtgtactagattagaaaagccatttgcaatatatataacagaaggtactattcttaatgaaataataaaraaaacaactataacaatggaaaaatgaacaagtgaacatagaatctcccagaaaaaattacaaatgacaaatagacatagaaaaagatgctaggctacac

SEQ ID NO: 190223 - DNA, 201 bp, Homo sapiens
atgtaattatatataaattaacataattgaagggaaataacaaacttacagagttttttattgtatcagaagaaaaagagagaaaaatcatctgctttgtratatcagggggtagtggtttgagactgtccttgaattataatgttgacaagaagtgagaaattagtgcaaggtttaacattctctgttctgagaggtttg

SEQ ID NO: 190224 - DNA, 201 bp, Homo sapiens
ggattacaggcataagccaccatgcctgacctatttatgcaattaaaaaaatcagtgtctccattccaactaaattttaagctctgcgaaggcagagaacrtgggtattttgttcatcactgtatcattaacttgtcattaacatagccccaagcccacagaaagtatttaacgttagtggaacaaatcaatgtaatatgt

SEQ ID NO: 190225 - DNA, 201 bp, Homo sapiens
ccacagccaatatcatactgagtgggcgaaagctggaagcactccctttgaaaaccggtacaagacaaggatgccctctctcactactcctattcagcatrgtattggaagttctggctaggtcaatcaggcaagagaaagaaataaagcatattcaaataggaagagaggaagtcaaatagtctgtttgcagatgacatg

SEQ ID NO: 190226 - DNA, 201 bp, Homo sapiens
aaaatggttttcagacaatttgtgtctgtaaattgtcatttaacttactttgtttttaaatttttatccctttcgaattttctggagctttgtgaagttasttactacttaataatcctatctttgaaaagagttagtgctgtatcagcaagtaatctgaggtgggaatagtcccaaattatgggcccattcgtcttgaga

SEQ ID NO: 190227 - DNA, 201 bp, Homo sapiens
catctgccagcagaaaaggtaggggtttgcaaagggagtagcctctggtcattttgttacttaggcgtagaaagttagggttttcctttcaattttgttcyaggaagtcagtgcaaaacggccttagattccccgcctccagaccctattctcctgcctcattcttagtcttaaactctgtattactgttatcttcttata

SEQ ID NO: 190228 - DNA, 201 bp, Homo sapiens
ttaaaaactgaagataggcactagaatctcattgtaataaatccgtttgggtcattttggaagacttaatcctcttccaaattctcattaacctagtctcygaggacaagagcacaaccagaatgcgttagttactaacttctttcccaatctctttttatagctagattcatttaggcctgtaattatttcaaattttat

SEQ ID NO: 190229 - DNA, 201 bp, Homo sapiens
taatattcaacaaagactatatttaaaaattgtgttcttttttattttaaatgacaaaaattaaaagttattgggaagcactaggaatggccacaaacgtrgttattatactacaccctccttcaaccttggctgccatcacaaattgttctgtgatctgtcacataaagtttaagagaaataatcttagtctgaagccat

SEQ ID NO: 190230 - DNA, 201 bp, Homo sapiens
atctattgagataatcatgtggtttttgtctttggctctgtttatatgctggattacatttattgatttgcgtatattgaaccagccttgcatcccagggrtgaagcccacttgatcatggtggataagctttttgatgtgctgctggattcggtttgccagtattttattgaggatttttgcatcaatgttcatcaagga

SEQ ID NO: 190231 - DNA, 201 bp, Homo sapiens
aatatggtgtactttatgatggaaaaggcatataatcaaagcctcccaagaatatttcttaaatgtcacaattaatatcccttaatgttacttgcatatayactttattatatatgtcttgtctatgtattatatacttgcatgtacagtttattatagaaaaaaaacaaacataaatgatagaggaacaagatttagaaa

SEQ ID NO: 190232 - DNA, 201 bp, Homo sapiens
tggttgccaaaagctgggggaagagaggagggagaattagtatgagtatagagtttcagttttgcaagatgaaaaagttctagagatccattgtacgatgytgtgaatacacttaacatttctgaactgtacatttaaaaatgattatgatggaggtcacttccaagatggccgaataggaacgctctggtctacagctcc

SEQ ID NO: 190233 - DNA, 201 bp, Homo sapiens
gcaagcctgggcaatggcgggcgcccctcccccagcctcgttgccgccttgcagtttgatctcagactgctgtgctagcaatcagcgagattccgtgggcrtaggaccctctgagccaggtgtgggatatagtctcgtggtgcgccgtttcttaagccggtctgaaaagcgcaatattcgggtgggagtgacccgattttc

SEQ ID NO: 190234 - DNA, 201 bp, Homo sapiens
aaagatgtataatctcagtctaattatgagcaaacagtatgcaaactcaaatagagggacattctataaaaacactaaattgttcataagtatcaatgtcktgaaagtcaaggaaagactgaggaaatgagattgaccaaagagacctgacaactaaatattgcacagcattttgaactactctttattatgaaggacaat

SEQ ID NO: 190235 - DNA, 201 bp, Homo sapiens
ggttaagattatgtaggagaatatttttatttgtaggaaatgcattacatcatttggtagtgatgcggcatcatgttggctatttaaatcatagttcaggaaaaaaaaacaattttatgtaatgtacttcaaagaagaattcaaagaatttactgcacttaatgatcatattgatctgtgctttcttaacattttttcccc

SEQ ID NO: 190236 - DNA, 201 bp, Homo sapiens
gaatgtcttagtaattcaacaaaagtgccttctttaaaaagttcaaaaatattttaattttataattatttattgagatcctgctgattttataggctcayattggactatgacagggatccaaaagaaatatataccttataaagaacttataatcaattttgagaaacaaaatacattcatatgaaacagcaagaaaac

SEQ ID NO: 190237 - DNA, 201 bp, Homo sapiens
ttgcagagggaaatgaaaataaaatgggaaaattttctatggcaagttcaggattgggaaagacaatatcatagacccagagaatattgagtctcagcttrctgaatattctaggtccagctcttcttatctctaaattactgagtctggagaagataactgactgttctaaggattcatagccatgactaaaactcctat

SEQ ID NO: 190238 - DNA, 201 bp, Homo sapiens
tcacattcataaaagtatatattatcaacgatatgtaaaaatacctctatttgtggtaatgcagtaaataaaactgtctgttaaatacacattagaagtaycaggactttgaaaatttggccttaatttaatttaaaaaacaaagttatagttatctgcagtatttatcttttttaccttaaatcagggctaagttaaccc

SEQ ID NO: 190239 - DNA, 201 bp, Homo sapiens
agtttggactggaatggctaggaaggctaggatgcctggcacagctggacctttctccacatcagttctcattcttcagaaattggtcacattccacatayaaaatatgcttatcaccatcctaggatttcaaaagtttcatcccactaatagcaacaggtccaaagttcaagaaatcgtcatctaaatctgatctagatg

SEQ ID NO: 190240 - DNA, 201 bp, Homo sapiens
atgctcacttaacctttatcaaaggatacattttaataaaaatacattgcttatctggcattttctaataccaatagaagtggcttagaaattatcaaagytggcctctttaaacaattgtcctaaaattgtgtgtatacattgaacattaacatttcctctttaagccaggagaggtggtgtgtacctacagtcctagct

SEQ ID NO: 190241 - DNA, 201 bp, Homo sapiens
agaaattggtcacattccacatacaaaatatgcttatcaccatcctaggatttcaaaagtttcatcccactaatagcaacaggtccaaagttcaagaaatygtcatctaaatctgatctagatgcaaatgaggtttcttgggttttgctccttggtggaactcatttctgtgttcccacatatcaaacatacaacggtgag

SEQ ID NO: 190242 - DNA, 201 bp, Homo sapiens
aaaaatcacaaaaatatgtaatatatcttaaaaatcctgtggagaaatgaggaggaatatataacaacaaaacagacatgcaaaaatgttagaatttggcttttttttttttttttgtaagagataggatgttgcactgccacccaggctgtagtgcagtggcactatcatagcttattgcagccttaaactcctgagccc

SEQ ID NO: 190243 - DNA, 201 bp, Homo sapiens
atgttagggttcagagaacttgaatgctgagtgaagaaacccctctgttttgctttgccaagtgtttccaaaatcagttagtcaggattgctatttttgcraaatcccagttaatgccctccattagcgtgccactactgcatgcagtagtgtgcagttctgagaaacccagtttctcagctgtttctaatcactatagga

SEQ ID NO: 190244 - DNA, 201 bp, Homo sapiens
cacctactatgtacccacaattttttaaaaaaagtaataaaaaataatatgttgcccttagtgtcttacatttttattatgaaattgaatatttttacttraagttataacttgctatgtctttacattccttggtatgtggagaatttggaatgtcccatacttaatattttgatttgccaccaagattgctctgaatct

SEQ ID NO: 190245 - DNA, 201 bp, Homo sapiens
tgtttatttggtagccctgttaaggatatttcatagtcatatctctaggatcctttaatatatcaggtgagttggtttaatgatgtccacattttaaaacrggtacaaaaaatagaatgagtagtatttaacagcaaaacagggtgactatagtcacctgtgcattttgtgcatgaaaacttgaaatgcaaaattgtgcag

SEQ ID NO: 190246 - DNA, 201 bp, Homo sapiens
tatggtgaagccccatctctactagaaatacaaaaattagcccagcatggtggcgcatacccttagtcccagctacttgggaggcccttgaacccgggtgrtggaggtttcagcaagctgagatcatgccatgcattctagcctgggcaacagagtgagactccatctcaaaaaaaaagaaaaaagaaaaaaagtatatat

SEQ ID NO: 190247 - DNA, 201 bp, Homo sapiens
tgggaatgtatacagcttacagccaccctgtctgtctggctctccctttcccattctcttctctgcttaagtacacatacctataactgctcacgctgagkaggggaaaagaatgccccccagtctttccttgaggacaccataagcctttaagaaggagtagcatgcaccaagaagaggggaggaaaaagccactacatt

SEQ ID NO: 190248 - DNA, 201 bp, Homo sapiens
aagtagctgactgcattgcctttccaatcacccgtaaaagaaaaaaagcacagctttcctgaagtatagaaccgtgggaatatttgcaagcataatatgtragtctccctgactttaacctggatatcctttgtttcaacttctctttcatatggtttttaaaaatattatatacctcaattttaaggcctagaatgttgt

SEQ ID NO: 190249 - DNA, 201 bp, Homo sapiens
catttaatatattaggctacatttttgtaaatatagtgaaatcttatactgaatgctttgataattgaaaagatcaaaatcagacatggtagaacagataytcacaaaaggataccatggccagtaaacatatttttggagtttagccttactattaagtttttaaaaatttattaaacagcaagtgagaaactgattttc

SEQ ID NO: 190250 - DNA, 201 bp, Homo sapiens
tgctaaattaactattagatataggcttatctataatatactatttatgtgtttgcataaagagaaattactaccaaaagatcaaatccttcaattttttytaatgttccctggagttgaagagatggagcatttttataagctcctgtacttcactttttccatctatccactgcttaacttcaggcagtatttttatca

SEQ ID NO: 190251 - DNA, 201 bp, Homo sapiens
tttaagacttacaattaatattctgaaacatttttatgtgtagatcctatatttatatgtagatcctgtaagatttctttatattaaaatgcaaaaaaaawttagactatcttattgtattaaaatgtgttttgtcaaatacttatgagaaaaagctcatgaattagaatgtaagaatattttgttgaatatttttattac

SEQ ID NO: 190252 - DNA, 201 bp, Homo sapiens
aggttttctatgccttggcaaattatcatactcctttccaaatgtggataagctgtccacttttgatctgtgcatttttaatgtcatggaatatctgagargtcttttaatgtggaggtctttgctggctggcatcactgctcctgggacattgtcatgctttgcatcacaactactttcctgagtttataaagttttcct

SEQ ID NO: 190253 - DNA, 201 bp, Homo sapiens
gtacagaagagagaaattttaaagctgggcatccgggggagacatcacatgttggtaggatccgtgatgccccaaaagccacaaaaaccagcaagtttttrttagggattttcaaaaggggagggagtatgcaaataggtgtgggtgacagacatcaagtacttaacagggtaatagaatatcacaaggcaagtggagaca

SEQ ID NO: 190254 - DNA, 201 bp, Homo sapiens
ggatatgtaagtacccaggcttgttttgtttggttcacaaaatatattaaaagttttatttaagagaatgtttattgctgttttttcttctaaagaaatgycatcttatacattcatcaattgttaaatatttctttgaggtgggatgcagtttacttcaatacagatggctgtctgtcttaagacaatatgctaaaattc

SEQ ID NO: 190255 - DNA, 201 bp, Homo sapiens
ggcaagtggagacagggtgagatcacaggaccacaggaccgaggcgaaattaaaattgctaatgaagtttcgggcaccattgtcattgataacatcttatyaggagacagggttttgagatcaactggtctgaccaaaatttgttaggcgggaatttcctcttcctaataagcctgagagcgctatgggagactggagtct

SEQ ID NO: 190256 - DNA, 201 bp, Homo sapiens
tttcctcttcctaataagcctgagagcgctatgggagactggagtctatttcatctctgcagactcaaccataagagacaggtgtgccccgggggggccarttcagagacctacccctaggtgcgcattctctttctcagggatattccatgctgagaaaaagaattcagtgatatttctcccattcgcttttgaaagaag

SEQ ID NO: 190257 - DNA, 201 bp, Homo sapiens
tacaataggtcttatttgttccatcaaacttcatactaaactacattaatagcacatatccatgttacatttatgtaatagttacattaacaatgactaawttttttttcattgaagaaaaggagttagaatttactgttaattgtattgcaaagtaattgttttctgggtatataagaatattattttaactatacaaat

SEQ ID NO: 190258 - DNA, 201 bp, Homo sapiens
taaatatctgtggcccagattgtatgtaactatttcttgatactgctatcagaataacacatgacaggaagcacaagctttgtgcaaaagctcaaaattgwacctcctaatttgtttgcatacccccagcctcaaatttctcaaaaccatcacccaccgctattctctgaatttaaaatctttaaacaccatctgctacct

SEQ ID NO: 190259 - DNA, 201 bp, Homo sapiens
gctgtagctgtagtattagaggctaaaagttcttcggtgtcattgtttttgtctaacctcttgtctttggatttttccagcgtctccttaaatagactttsaggctagaatttgttttagctgtaatctgctgttattataccagagccctgttggggcagtgatagggttgggggggaaggggttgtttactatagtcct

SEQ ID NO: 190260 - DNA, 201 bp, Homo sapiens
ccataagagacaggtgtgccccgggggggccaattcagagacctacccctaggtgcgcattctctttctcagggatattccatgctgagaaaaagaattcrgtgatatttctcccattcgcttttgaaagaagagaaatatgcctctgttctgcccagctcaccaatggtcagagtttaaggttatctctcttattccctg

SEQ ID NO: 190261 - DNA, 201 bp, Homo sapiens
tcatggaaacatttagaatgtttgaccaaacatctgggtactatgcctagctaggttgacacatgaaaatagccaatacatattcctagaccaatcttgartcttcttatcttagattgattatgttttccaactctactctgagttgctcagagaagcagcactcttatcatgtagctccttggacctttccctattgat

SEQ ID NO: 190262 - DNA, 201 bp, Homo sapiens
acatgacaggaagcacaagctttgtgcaaaagctcaaaattgtacctcctaatttgtttgcatacccccagcctcaaatttctcaaaaccatcacccaccrctattctctgaatttaaaatctttaaacaccatctgctacctataatatattataattatatatacccatatatacctataggtactattagtatatagt

SEQ ID NO: 190263 - DNA, 201 bp, Homo sapiens
ctgactttttaacaattaccattccaaaaggcatgagatgatatctcattgtggttctgattggcatttctctaatgaccagtgatgatgagctttttttyatgttttttggccacatacatgccttcttttgaaaatgtctgttcatatcctttgcccactttctgatggagtgttttggttttttcttgtaaatttaag

SEQ ID NO: 190264 - DNA, 201 bp, Homo sapiens
aagaatgtaaacactctgcagccttatcctccttatctcagatatttctctccatgttccccatgaattcattggttcagctttttatttccatgaactawatctaatacatttcctttcttcaattatttccttcttaatctgttcagctaactgcagtgatccattccacccactaaaatgttggttcttgccaaggtt

SEQ ID NO: 190265 - DNA, 201 bp, Homo sapiens
tgtcctcttgtctgaggttctgaaactcttacattaatcaatactgtgttcagggagtatgcactctaaatgccttgacctttgcctagataaattcaccyatccccctgctacttctagttcttgtattttacccaatctatttagtagcacatgaggattataattatttgattacatattgatctaccttactaaaat

SEQ ID NO: 190266 - DNA, 201 bp, Homo sapiens
catgcattttatttttgtagtacacattgtgatcctaaagaaaaggcacatatgggactaacaggccttcaacaattattgtttattgtgttcttatttgyggctacctaattatacaagaaagaaactaaaagattgaatagaacaaatttactgattgtgaaatgttgattacctttgatacttgacatacataacgct

SEQ ID NO: 190267 - DNA, 201 bp, Homo sapiens
ggaatgcttgtgatttttgtatattgattttgcatcctgagattttgctgaagttgcctatcagcttaaggagtttttgtgctgagacaatggggttttckaaatatacaatcatgtcgtctgcaaagagagacaatttgacttcttcttttcctattggaataccctttatttctttctcttgcctgattgccctggcca

SEQ ID NO: 190268 - DNA, 201 bp, Homo sapiens
gtttaatctttgtcttaaataaatattatattttcgctctcactaataaacgaaattaatgctgacagaacttcaaaataaaaagtaggatattaacagaycttacgaaggatcgatttcatctaacccagaatgaagccatagactggtttgaatttcgtttttatttttattttattttgttttgttttaaataatttt

SEQ ID NO: 190269 - DNA, 201 bp, Homo sapiens
gaataccctttatttctttctcttgcctgattgccctggccagaccttccaatactatgttgaataggagtggtgagagagggcatccttgtcttgtgccrgttttgaaagggaatgcttccagcttttgtccattcagtatgatattggctgtgggtttagcataaatagctcttattattttgagatatgtttcatcaa

SEQ ID NO: 190270 - DNA, 201 bp, Homo sapiens
gatatgtttcatcaatacctagtttattgagtgtttttagcatgaagggttgttgaattttattgaaggccttttctgcatctattgagataatcatgtgrtttttgttattggttctgtttatgtgatggattacatttattgattcgcatatgttgaaccagccttgcatcccagggatgaagcccacttgatcatggt

SEQ ID NO: 190271 - DNA, 201 bp, Homo sapiens
gtcctcttgtctgaggttctgaaactcttacattaatcaatactgtgttcagggagtatgcactctaaatgccttgacctttgcctagataaattcacccmtccccctgctacttctagttcttgtattttacccaatctatttagtagcacatgaggattataattatttgattacatattgatctaccttactaaaata

SEQ ID NO: 190272 - DNA, 201 bp, Homo sapiens
ttgagataatcatgtggtttttgttattggttctgtttatgtgatggattacatttattgattcgcatatgttgaaccagccttgcatcccagggatgaarcccacttgatcatggtggataagctttttgatgtgctgctggattcggtttgcaagtattttattgaggacttttgtgtcaatgttcgtcagagatattg

SEQ ID NO: 190273 - DNA, 201 bp, Homo sapiens
ttatgttactgatgtgatctaaaggagcataatcttggtggctagcacctggtgtcattctatgagaacagatgcttggaagcaataatgttctcctgtcrttttcttcactgcattaaaaagcatgccagctgatgtcacaggttttctttaactcagaaaatcttgttaaacataaatggatgtctaattactaagaga

SEQ ID NO: 190274 - DNA, 201 bp, Homo sapiens
tgtaagtttgcacatggagtttataaaagcattttctaaatttctgcatcccttatatgaaggcattttaggcataaggaatggtacaaactagaaatagragaatacagtggtatgttgaagcacagataagtcctttagagccaaagcttctctgaggatttgagcctgtacccatgctgccttcagctcagaggccat

SEQ ID NO: 190275 - DNA, 201 bp, Homo sapiens
aacttaacacattttgagttttaagtgatctagcataaccatatgaaattaaggtaccaaataggatattttagaatattttctgtctatctgaccgtaartgtccaattcgatgtaaataaaaataataatacaaatacagtgattgctgatgatacttcaactttgatgcttcaattggttaaatcttatagaaaccct

SEQ ID NO: 190276 - DNA, 201 bp, Homo sapiens
cccaatgagactattttcccagtgagcatttccagggcaagatccatgtttcttatttgctgcttaattcattgagcactctcaagcttcaatacattatmaaaaatgggtaatttggaataagttatccctaaggtactcatcagagctaaagtgcactagatcttgaatgttccatatgtaataaatcctataaaaaca

SEQ ID NO: 190277 - DNA, 201 bp, Homo sapiens
ggcctgccttacaagagcttctgaaggaagcactaaacatggataggaacaactggtaccagccactgcaaaaacaggccaaattgtaaagaccatcaatrctaagaagaaactgcatcaattaacaggtgaaataaccagctagcatcacaatgacaggatcaaattcacacataacaatattaaccttaaatgtaaatg

SEQ ID NO: 190278 - DNA, 201 bp, Homo sapiens
aggaacaactggtaccagccactgcaaaaacaggccaaattgtaaagaccatcaatgctaagaagaaactgcatcaattaacaggtgaaataaccagctarcatcacaatgacaggatcaaattcacacataacaatattaaccttaaatgtaaatgggctaaatgccccaattaaaagacacagactggcaaattggatg

SEQ ID NO: 190279 - DNA, 201 bp, Homo sapiens
aactggtaccagccactgcaaaaacaggccaaattgtaaagaccatcaatgctaagaagaaactgcatcaattaacaggtgaaataaccagctagcatcamaatgacaggatcaaattcacacataacaatattaaccttaaatgtaaatgggctaaatgccccaattaaaagacacagactggcaaattggatgaagagt

SEQ ID NO: 190280 - DNA, 201 bp, Homo sapiens
ttcaaatgtaccattttatcaagtagatagaaatgactgaaacttaaagagaggctagataaaagacctgggcatcttctgcatgtggtaactggtgaatrtctaggagtgggtgaggttgccaagaaagcaagtatagaaaggaaataaaaatgagaatagaatatagtttattattctgtctagaagacagaagaaaga

SEQ ID NO: 190281 - DNA, 201 bp, Homo sapiens
taagctgtgtttgatgtttgctgtagctgtagtattagaggctaaaagttcttcggtgtcattgtttttgtctaacctcttgtctttggatttttccagcrtctccttaaatagactttgaggctagaatttgttttagctgtaatctgctgttattataccagagccctgttggggcagtgatagggttgggggggaagg

SEQ ID NO: 190282 - DNA, 201 bp, Homo sapiens
gagataacagcaacagtcaagctgcacccctctctgcatcatgctctttcattttctcattgaaagggctgggaaccctgcatgaaatgttgaagactggrcagggttaagaacacccacataaggccaggcacagtggctcatgcctgtaatcccagcactttgggaggccgagaaaggtggatcacctgagctcaggag

SEQ ID NO: 190283 - DNA, 201 bp, Homo sapiens
gtgccaggtcagactccatgtgccactcacttactggttgcacacacagtgtggcaattattggaagttgataaggcgagaagtggctcaactggtcctgyccagacagaaacgtgtactgagtgccttcagatcacgttagcaatctggaaatccaagtcctctcggtttctggagtgacacggttaagagtctgggaat

SEQ ID NO: 190284 - DNA, 201 bp, Homo sapiens
gagatatgcctttaatatgctgggttttgtttatctggctaggagttaagctgtgtttgatgtttgctgtagctgtagtattagaggctaaaagttcttcrgtgtcattgtttttgtctaacctcttgtctttggatttttccagcgtctccttaaatagactttgaggctagaatttgttttagctgtaatctgctgtta

SEQ ID NO: 190285 - DNA, 201 bp, Homo sapiens
acaaatatattattatgagtataatcagactcacccacacagttatatcaactaatacctaattatatgttcatggtgagacacaggctataaaattctgacacatttccacctgtttagctactgtagttgttggatcaattcttttaattttatgggcagcattttttgtttatttaccatcttgccaaaacatgggca

SEQ ID NO: 190286 - DNA, 201 bp, Homo sapiens
gtctagatggactccttggggtctgtctagtaaggaataaagaacagaccaatttaagggaagtaacaggatcagtttcacacatagaaagtttaaggtgmttgtggagacctcagacagagatgtcccattggcagttggagatacgggactgatacagaggataagtgtctgggttggagatagggatctgggggtcat

SEQ ID NO: 190287 - DNA, 201 bp, Homo sapiens
cagatacaaatatattattatgagtataatcagactcacccacacagttatatcaactaatacctaattatatgttcatggtgagacacaggctataaaattctgacacatttccacctgtttagctactgtagttgttggatcaattcttttaattttatgggcagcattttttgtttatttaccatcttgccaaaacat

SEQ ID NO: 190288 - DNA, 201 bp, Homo sapiens
aatagtaggagctgtggagaaagctatacaaattgttgtccttagggatataaaatattcaaaagtccaaaaagtggaagtctatgtggttttattttgtkgtctctgatgacatttttacctgaaatctgtgtaaaaatacatagattttagcatcttgaataattttaacacacatttactgagctgagattccagagt

SEQ ID NO: 190289 - DNA, 201 bp, Homo sapiens
gaagttggaggagaccacctggtgctcagagtagcccaggatgcctttgagggggtcctctgacgcctgcttcaccaccttcttggtgtcatcatatttgktaggtttttccagacggcaggtcaggtccaccactgacatgttggcagtggggacacggaaggccatgccagtgagcttcccgtttagctcagggatgac

SEQ ID NO: 190290 - DNA, 201 bp, Homo sapiens
acaaatattgactatttgccatatggcaggttttgttctaggcactgcagatacaaatatattattatgagtataatcagactcacccacacagttatatyaactaatacctaattatatgttcatggtgagacacaggctataaaattctgacacatttccacctgtttagctactgtagttgttggatcaattctttta

SEQ ID NO: 190291 - DNA, 201 bp, Homo sapiens
acttcgtgtcttttacttgccaaaataaagaagttcatatattctgcttgccaagataaaattacattttaaaaggttgttatatatttaatagcttgtayactatttaatataaaagatacatattaagtttcactttttctttcatgcttttaaacagtcaaaatccttatattgacttttgttgcagaactaagcctt

SEQ ID NO: 190292 - DNA, 201 bp, Homo sapiens
ctagtcatcaagttctgaaattccttcttctatatggtctagtctattgatgaaactttcaattctatttagaaattccttaagtgaggttttcaattccrgaagctctgattgattttttttttttaagttgtattatctcttcctgcatttcctggattttcttacaagtttctttgtgctgagtgagaacattcagtg

SEQ ID NO: 190293 - DNA, 201 bp, Homo sapiens
agataatcatgtggtttttgttattggttctgtttatgtgatggattacatttattgattcgcatatgttgaaccagccttgcatcccagggatgaagccsacttgatcatggtggataagctttttgatgtgctgctggattcggtttgcaagtattttattgaggacttttgtgtcaatgttcgtcagagatattggcc

SEQ ID NO: 190294 - DNA, 201 bp, Homo sapiens
atgcatagatacaaagaaaaggacctggaagaatatacatcaaggtgctaatgttgggtagttctgaatgggtagagattattggtattctttggttttarttttacttttcagtgctctcaaacatttctgataaacaaatattgcttttgtgatgagaaaaatacttataatattaagataatatttttaaattctcag

SEQ ID NO: 190295 - DNA, 201 bp, Homo sapiens
aaatattttttccattgtgaagaggaaccccaagaatgtagacaaagattcttatgttactgatgtgatctaaaggagcataatcttggtggctagcaccyggtgtcattctatgagaacagatgcttggaagcaataatgttctcctgtcgttttcttcactgcattaaaaagcatgccagctgatgtcacaggttttct

SEQ ID NO: 190296 - DNA, 201 bp, Homo sapiens
caatcttgggaagttgtgtgtttccaggaatttatccattttctctagattttctagttcatgtgcatagaggtgttcataatagtctctgagaatcttcygtgtttctgtggaattggttgcaacatcacctttgttgtttttgattgtgcgtatttggttcttcttgctttttccttgttaatctagctagcagtctat

SEQ ID NO: 190297 - DNA, 201 bp, Homo sapiens
cctctttctttgtacctctgttagaatacggctgtgaatccatctcgtcctgggctttttttttttttttttttttttttggttggtaggctattaattamtaccacagttttagaacttgttattggtctattcggggattcgacttcttcctagtttagtcttgggaggctgtatgtgtgcaggaatttatccatttct

SEQ ID NO: 190298 - DNA, 201 bp, Homo sapiens
atctggtagaatttgactgtgaatccattttctgggtttttgggggatttttttggttggtagggtttttattactaattcaattttggaagttaatatgktcttattagggttgcaactttttcctgattcaatcttgggaagttgtgtgtttccaggaatttatccattttctctagattttctagttcatgtgcatag

SEQ ID NO: 190299 - DNA, 201 bp, Homo sapiens
aattgatccctttaccattatgtaatagccttctttgtctcttttgatctttatttgtttaaactctgttttatcagagaccagaattgcaacctctgggkgttttttttgttttttgtttgtttgtttgtttttgttttgcttcccatttgctttgtaaatcttcctccatccctttattttgagcctatgtgtgtcttt

SEQ ID NO: 190300 - DNA, 201 bp, Homo sapiens
tttcagagatgccctgcccagagaggaggaatctagagaggcagtttggctatagtggctttgtggtgctgtggtgggcttcacccagtccaaacttcccrgtggctttatttacactgtgaggggaaaactgcctactcgagcctcagtaatgatggacatccctccccacaccaagctcgagtgtcccaggtctgactg

SEQ ID NO: 190301 - DNA, 201 bp, Homo sapiens
gctaggggagggagttccctaaccccctgcgcttcctgggtgcagcgatgccccaccctgcttctccttgccctctgtgggctgtacccactgtctaaccyatcccaatgagatgaaccgggtacctcaattggaaatgcagaaatcacccaccttctgcattggtcttgctgggagctgcagaccggagctgttcctatt

SEQ ID NO: 190302 - DNA, 201 bp, Homo sapiens
tgtgaagcctactttgtgtgaagaagagtttctttgtgtgaagccttctttgtgtgaaggggatcattaatagatttcaaaaccccaagagtaattagacrgaagaatctaatagcacttattactcttttatatcataaagtaaaactactttacagatgaggaaactatctatttgatgtacacaataatttctctaaa

SEQ ID NO: 190303 - DNA, 201 bp, Homo sapiens
agatgaaccgggtacctcaattggaaatgcagaaatcacccaccttctgcattggtcttgctgggagctgcagaccggagctgttcctatttggtcatctyacctgggaatcgataattttttaactttctgatttacttcagaatctctatcttgttcataaatctttgtaatcgactacattgtagtcagacttcttta

SEQ ID NO: 190304 - DNA, 201 bp, Homo sapiens
tttcaggaacagcatctgttgcagttgcaggtctccttgcagctcttcgaataaccaagaacaaactgtctgatcaaacaatactattccaaggagctggrgaggtatttgccttgtgtaatacttatgttctcctaaactaacatataattagtgttaattgctcattaactcaagatttgacgtattctttcaaatttt

SEQ ID NO: 190305 - DNA, 201 bp, Homo sapiens
cagtgtaaaagtgttcctatttctccacatcctctccagcacctgttgtttcctgactttttaatgattgccattctaactggtgtgagatggtatctcaytgtggttttgatttgcatttctctgatggccagtgatgatgagcattttttcatgtgttttttggctgcataaatgtcttcttttgagaagtgtctgttc

SEQ ID NO: 190306 - DNA, 201 bp, Homo sapiens
ggcttttagtatactccagtgttacaaaaacaagtttttaaaatttgactcacaattcagtgtgtatgtatgtaactacatatgtgtttttaagaaaaaayattttgaattagggatttgtagtatattattactgttcacatgcaaaaatcccaaaatattttaaattgttggaaagagactgcaggaaaaccaaattat

SEQ ID NO: 190307 - DNA, 201 bp, Homo sapiens
acccatgagcaagggcaattaggcaggagaaggaaataaagggtattcaattaggaaaagaggaagtcaaattgtccctgtttgcagacgacatgattgtrtatctagaaaaccccattgtctcagcccaaaatctccttaagctgataagcaacttcagcaaagtctcaggatacaaaatcaatgtgcaaaaatcacaag

SEQ ID NO: 190308 - DNA, 201 bp, Homo sapiens
cacacctttaatcccagcactttggaaggccgaggcaagcagatcacttgaggccaggatttggagaccagcctggccagcatggcgaaaccctgtctctrctaaaaaatacaaaaacattagccaggcatggtggcgtatgcctgtaatcccagctactcagaggctgagagacgagaattgcctgaacctgggaggcgg

SEQ ID NO: 190309 - DNA, 201 bp, Homo sapiens
attttttttttgctcttctccctcctcccaacctcctactctaagtaagctgcagtgtctgttgttcccttctttgtgttcacatgttcttattatttagstttcacttataagtgagaacatgtggtaatttgttttctgttcttgcgttagtttgctaaggataatggcctccagctccatccaagttcctacaaagga

SEQ ID NO: 190310 - DNA, 201 bp, Homo sapiens
ttctaaaggcctgcttagaaaccagagaagtagaagagccattacaagcacctcatgattattgactgatatttgtgtttggggtacttagttgctatgaygaagtttgcttctctgctaggttataaaaatgtaataatttgtaaccatagaaatgattttaccagtttttagtaacatttttgtaattattaatacagc

SEQ ID NO: 190311 - DNA, 201 bp, Homo sapiens
tttaccagtttttagtaacatttttgtaattattaatacagctagctaaagtgtttccttggaggataaacggcatcatacataaaaggagtagaaaaagwttacgttcccttcagaattgaccccccatcccattttacttttaaattgttgcttctttttgtctttagtgatttacagagcactgaaatggttgtttta

SEQ ID NO: 190312 - DNA, 201 bp, Homo sapiens
atccaggacttgaactcagctctggaccaagtggacctaatagacatctacagaactctccaccctaaatcaacagaatatacattcttctcagcaccacmatacacttattctaaaattgaccacataattggaagtaaaacactcagcaaatataaacgaacagaaatcacaacaaactgtctctcagaccacagtgca

SEQ ID NO: 190313 - DNA, 201 bp, Homo sapiens
agctgagatcgcaccactgcactccagcctgggcgatgaagtgagactcttcagaagaaaaaaaaaacaaatacatgttactaaaaatgcttggtttggtrgtctgtcaataatttggcctttggacaaagatacaggaaatatgaaacatttgataaaataaattaatatgagggttatttaacaggaataaatgctcga

SEQ ID NO: 190314 - DNA, 201 bp, Homo sapiens
tggtttataatcctttgggtatatacccagtaatgggattgctgggtcaaatgggatttctgattctagatccttgaggaaccgtcacactgttttccacyatggttgaactaattaacactcccattaacagtgtaaaagcgttcctatttctccacatcctttgcagcttctgttgtttcctgactttttaatgatcac

SEQ ID NO: 190315 - DNA, 201 bp, Homo sapiens
ccaccctaaatcaacagaatatacattcttctcagcaccacaatacacttattctaaaattgaccacataattggaagtaaaacactcagcaaatataaamgaacagaaatcacaacaaactgtctctcagaccacagtgcaatcaaattagaactcagggttaagaatcacactcaaaaccacacaactacatggaaact

SEQ ID NO: 190316 - DNA, 201 bp, Homo sapiens
caaaagagaagtttagcagatattgcaagtaagaagttaattcatttaaggagaaacaaatactaaccctaagttcgttttctctccagttttagcctatsaattatatacttgtttttaaaaaatgtttattggttgcctcagagtttatagtatacatttataacaaatccaaatccacttttaaataatagtatgctg

SEQ ID NO: 190317 - DNA, 201 bp, Homo sapiens
agcatggtactggtaccaaaacagatatatagaccaatggaacagaacggaggcctcagaaataacaccacacatctaccaccatctgatctttgacaaamctgacacacacaagcaatagggaaaagattccctatttaataaatagtgttgggaaaactgggtagccatatgcagaaaactgaaactggaccccttcct

SEQ ID NO: 190318 - DNA, 201 bp, Homo sapiens
tttcaaataattttgttattattataacttttatagtgatcttatatctgtaatcagatctttgatgttagtattgtaattattctggggtaccatgaacygctcccatataagactgcaaacttaacccataaatatgtgttttccaactgccccactgacagcagttctcatctcacttttctcgggcctattcccaga

SEQ ID NO: 190319 - DNA, 201 bp, Homo sapiens
aaaggcaattattaagcaaaatataatcaaaatgtgtggtattataggtgccttatttattcattctgaggagaatattatttagagaaggctggaatagwtaagaaaacttttctagcaaagttgaaacttaaatccaacctttgatagttagaaagggaagaatatactattctaagaagggaacaggtgaatgtagat

SEQ ID NO: 190320 - DNA, 201 bp, Homo sapiens
aacccttcagtagaatgtgttcagggcaaattagtatcaattctcttaatgtagatgtaaaatatgcacataaactatgttaataaattgaaaatatgacwcttaaaacaagctcaattttatctctttcagaataataaataataaaaatataaagggtcctctttctgtactctttatatataaataattttctccccc

SEQ ID NO: 190321 - DNA, 201 bp, Homo sapiens
ttaatcagttttgtgatatattatacccccattcacttattttcagtctaatgttaagaaaagacaaaacgggaaaacagatcatcatatgaaaaagatasctgcactgatatgtttatcacagtgctattcacaatggcaaaatcatagactcaatctaagtgtccatcaacagatgattggatttttaaatgtgataaa

SEQ ID NO: 190322 - DNA, 201 bp, Homo sapiens
tacagtggctttctccttcttccttctctacagcatgtatcaccttataacatggtacatagtttacttattcttatttattatctgtcttcagcaagtasaataaaaactctataaaagcagggattttttatgtctattttgtttcctgcaatatccccagagtctgattgcaagtaagcactcactataatttgttaa

SEQ ID NO: 190323 - DNA, 201 bp, Homo sapiens
ctcattataactggtcattagagaaatgcaaatcaaaaccacaatgagataccatctcactccagttagaaaggcaatcattagaaagtcaggaaacaacrgatgctggagaggttgtggaaaaataggaatgcttttacactattgttgggagtgtaaattagttcaaccattgtggaagacagtgtggcgattccttaa

SEQ ID NO: 190324 - DNA, 201 bp, Homo sapiens
tccccatcccacacatttatgcagttgatttcctgggcaaaattcatttctattctattcagttaatttttttttgttctggttaaagctctaggcatggmtgaatcttcagtttcagtaaaacatacctaaataaaattttgcctgtggaaaattgtaatattatttcacacatatgcaatatctaaagtaggcaaaatc

SEQ ID NO: 190325 - DNA, 201 bp, Homo sapiens
tgagcagggggctctgcttgttggggagcaggggatcgagggctcaccaggaggaaagaccattctcctctctgtatggtgactgtgtgtgctgcaagctyggatagaatatttattaggtggtcaacaactggttgctgaatgagggctgaggtaaaatcttagagttggaatgtcagagatggtgtatctgaagactct

SEQ ID NO: 190326 - DNA, 201 bp, Homo sapiens
tgtgggatcagtgttaacatcccctttgttgcgtctaattgtgtttatttggatcttacctcttttcttctttattaatctagatagcagcctatcttatkaattttttcaaagaaccactcctggatttgttaaacttttaaatagtttttcatgtcttatctccttcagttcagctctgattttggttatttcttgtct

SEQ ID NO: 190327 - DNA, 201 bp, Homo sapiens
cttcagtgctaatcagggatattgatctgaagtttttgttgttgttgtgtctctgccagcttttggtatcaggatgatgctggcatcatagaatgaggagragactctcctcaaatttttggaatagttccagtagaaatagtaccagctcttctttgtacatttgatagaatttatctgtgaatctttcagttcctgggc

SEQ ID NO: 190328 - DNA, 201 bp, Homo sapiens
gctgcagtgtctgttgttcccttctttgtgttcacatgttcttattatttagctttcacttataagtgagaacatgtggtaatttgttttctgttcttgcrttagtttgctaaggataatggcctccagctccatccaagttcctacaaaggacataatctcattcttttttatggctgcatagtatttcatggtgcttat

SEQ ID NO: 190329 - DNA, 201 bp, Homo sapiens
ctttttttttattattatactttaagttctagggtacatgtgcacaacgtgcaggtttgttacatgtgtatacatgtaccatgttggtgtgctgcacccaytgactcgtcatttacattaggtatatctcctaatgctatccctccccactccccccatcccatggcaggccctggtgtgtgatgttccccttcctgtgtc

SEQ ID NO: 190330 - DNA, 201 bp, Homo sapiens
gaaaattctttggaaaactgcctcatatcagaagaatttgcttgaactgtatttggcagtataccaagtctgtctgtatggcttatatttttctgttgatwcattttcttttctctgaaaaggaaaaacccggcaacaaggcctgtgaacaaacagcagtttttctgtttaggtttatataggcctattcctacagttttc

SEQ ID NO: 190331 - DNA, 201 bp, Homo sapiens
tgctatccctccccactccccccatcccatggcaggccctggtgtgtgatgttccccttcctgtgtccaagtgttcttattgttcaattcctacctatgaktgagaacacgcagtgtttggttttctgtccttgcgatagtttgatgagaatgatggtttccagcttcatccatgtctctacaaaggacgtgaactcatct

SEQ ID NO: 190332 - DNA, 201 bp, Homo sapiens
ggagttcaagaccagcctggccaacagggtgaaaccctatctctactaaaaatacaaaaaattagctgggcgtggtggcagaagcctataatcccagctamtcaggaggctgaggcaggagaattggttgaacccgggaggtggaggttgcagtgagccaacatcgtgccgctgcactccagcctgggcaacaagagcgat

SEQ ID NO: 190333 - DNA, 201 bp, Homo sapiens
tcctacctatgagtgagaacacgcagtgtttggttttctgtccttgcgatagtttgatgagaatgatggtttccagcttcatccatgtctctacaaaggaygtgaactcatcttttttatcactgcatagtattccatggtgtatatgtaccatattttcttaatccagtctaccattgatggacatttgggttggttcca

SEQ ID NO: 190334 - DNA, 201 bp, Homo sapiens
ttttaagaaaaaatattttgaattagggatttgtagtatattattactgttcacatgcaaaaatcccaaaatattttaaattgttggaaagagactgcagsaaaaccaaattatgctttgttattacttgcttaatttaataatctgaaagaagaaaactagactcctgtaataataattcatccccaaactagaaattaa

SEQ ID NO: 190335 - DNA, 201 bp, Homo sapiens
taaaaaaaaaaaaaaaaaaaaaaaaaaaaaaaaaaaaacagacacatagactaatggaacagcatagagatctcagaaataagaccacacatctccaaccrtctgatcttcaaaaagcctgacaaaaccaagcaatggggaaaggattccctatttaataaatagttctgggaaaactggctagccatatgcagaaaactg

SEQ ID NO: 190336 - DNA, 201 bp, Homo sapiens
taataatctgaaagaagaaaactagactcctgtaataataattcatccccaaactagaaattaaaatgttagttgagtttgagtttcttatgggaaaactrccaaaatctctttagaattatagaatgtaagtaatagagaaatattttgtggctatatatatatatatatatatttttcaagaaactttaaattttcaaa

SEQ ID NO: 190337 - DNA, 201 bp, Homo sapiens
aaactaaaaagcttctgcacagcaaaagaaactatcatcagagtaaacagacagcctacagaatgggagaaaatttttgcaatctatccatctgagaaagrtctaatatccaacatcttcaaggaacttaaacaaatttacaataaaaaaaaacacacagccccatcaaaaagtgggcaaaggacatgaaccaacacttct

SEQ ID NO: 190338 - DNA, 201 bp, Homo sapiens
agtttgagtttcttatgggaaaactgccaaaatctctttagaattatagaatgtaagtaatagagaaatattttgtggctatatatatatatatatatatwtttcaagaaactttaaattttcaaattgaatatgattatgaacaaaacaatatgttacactggtagatcattgtttatgtcatattggttttcattttgc

SEQ ID NO: 190339 - DNA, 201 bp, Homo sapiens
gtgaatacacttaacatttctgaactgtacatttaaaaatgattatgatggaggtcacttccaagatggccgaataggaacgctctggtctacagctcccrgcaagatcgatgcagaagatgggtgatttctgcatttccaactgaggtacctggttcatctcattgggactggttggacagtgggtgcagcccacagagg

SEQ ID NO: 190340 - DNA, 201 bp, Homo sapiens
gatgggtgcagcaaaccaccatggcttgtgtatacctatgtaacaaaactgcatgttctgcacatgtaacccagaacttcaagtataattttaaaaaaagwttatgatgataagattaatgttacatatttttaccataataaaaacgtttttagtatttgtcgatgaaaattttcataaaaacagtttttaaaggattgt

SEQ ID NO: 190341 - DNA, 201 bp, Homo sapiens
tttccagcttcatccatgcccctgcaaaggacatgaactcatcattttttttttttttttttttttttttttttttttttttttttttgagacggagtctygctctgtcgcccaggctggagtgcagtggcgcgatctcggctcactgcaagctccgcctcccgggttcacgccattctcctgcctcagcctcccgagtag

SEQ ID NO: 190342 - DNA, 201 bp, Homo sapiens
ttagtagagacggggtttcaccttgttagccaggatggtctcgatctcctgacctcgtgatccgcccacctcggcctcccaaagtgctgggattacaggcktgagccaccgcgcccggccgaactcatcattttttatggctgcatagtaatccatgttgtatatgtgccacattttctttacccagtctatcattgatgg

SEQ ID NO: 190343 - DNA, 201 bp, Homo sapiens
gccaaattttttcctctttaagctctagttttttaatcctctccagatccatgcagagcccaccccccaatacacatgtcttactatgagaatcttacagrttctgtttcattattggaaggtagggggaagcacaggtagatgagctgaggagaaataccgtaaagaggttttgcaacttgaaatgagattgcaaatggc

SEQ ID NO: 190344 - DNA, 201 bp, Homo sapiens
cttctgcaggttcatcctttcctgtctagctattaaatgacaaaacacttcatttttaaatgacctgctcagtgccagctccttttctttttgttctgctrtatgttcttaggtatatactcaggtccacacattcaattagcaaatttatattgccagcccagacttctttgtattccaggtctatacacccatgtcttt

SEQ ID NO: 190345 - DNA, 201 bp, Homo sapiens
ttcttacctgtggcagaaagttatataacagcttctattttttttctttgaaacaatagatcagaagtttgaggaaaacaaaaaatatatgtaatagcctyaaagaaatatttatttctttgaaataaatgttattttcaaggaaaataacaatcctgttattttctttgaaataacaggattggaagtttgaggaaaata

SEQ ID NO: 190346 - DNA, 201 bp, Homo sapiens
aacttttgatgtcattgattctttgtgcagaattttgggtctcaatttcattcacttttgctctgattttagttatttattttcttctactagctttaggkttagtttgttcttgttcctctagttcctctaggcatgatgttagattgttaatttgagatctttccaaattttgatgtggcaagattagggaaattttct

SEQ ID NO: 190347 - DNA, 201 bp, Homo sapiens
ccatagcttaactcccacttataagtgaaaatatgcagtatttggtcttccattcctaagttatttcatttaggttaatagcctccagtttcatccaagtkgctgcaaaggacattgttttatcctttcttatgactgagtggtatactatgatatatatgtgaaaattttctttatccactcattggttgatgggcactt

SEQ ID NO: 190348 - DNA, 201 bp, Homo sapiens
attatgttgattatatgtctgtttttcttgtatatgactaatattgaggcttgctatttgactaaaaataatttgagtagatgttccttgtgttcccttcmtgcttgtttggacattattatgtcttaaagaaccttttcatacgttatatgggatattcttttttttagggttattgtaacaaagagccatagactaggt

SEQ ID NO: 190349 - DNA, 201 bp, Homo sapiens
atcttaatagattttatcaagaatttatttatctgtttcctgagacactacactagtgccttgggaaagagaatggggtctttctttagtttgattttatrcacactataactagcaggaactccttgaaatttttatgtaaattttagaaatactgattgtatagaacaaaatggaaaatttatttaaatgagacagaaa

SEQ ID NO: 190350 - DNA, 201 bp, Homo sapiens
tatcaaaactgaataatgttgttaaattgctttttgtagatactaatttttttgtcagccaaatctctgagaatgcactaattattcaagccttgattatsttaattaaaattatgaaattaaaaaaactaatttttaacagggacattattatgattggaagaatttttttatatactttaagttctgggatatatgtgc

SEQ ID NO: 190351 - DNA, 201 bp, Homo sapiens
gaggccaaggtgggaggattccttgagtctcggagttcgaggctatagtgagctgtctatgatcatgccactgcactccaggatagacaacagagtgagarcttgtctctaaaaaataattttaaaagaagacataaaaaaagagaacactttaaagtaagtaagaaaatgtgaaatctccactatacaaattgcctaagg

SEQ ID NO: 190352 - DNA, 201 bp, Homo sapiens
ggtgggaggattccttgagtctcggagttcgaggctatagtgagctgtctatgatcatgccactgcactccaggatagacaacagagtgagaacttgtctstaaaaaataattttaaaagaagacataaaaaaagagaacactttaaagtaagtaagaaaatgtgaaatctccactatacaaattgcctaaggacatatgg

SEQ ID NO: 190353 - DNA, 201 bp, Homo sapiens
atatataattttgatttttaccttgtattatactccattcctacaagctcttgtgaaacagatgacaacgttgaaaataatgatgataactacaataaaasaagtacttactccatgacaggaactttactaagtgtttaatattgtttttacaaaatatattctgtcaataatcttattgtttttcatttccattatgct

SEQ ID NO: 190354 - DNA, 201 bp, Homo sapiens
tgaattttattgaaggccttttctgcatctattgagataatcatgtggtttttgttattggttctgtttatgtgatggattacatttattgattcgcataygttgaaccagccttgcatcccagggatgaagcccacttgatcatggtggataagctttttgatgtgctgctggattcggtttgcaagtattttattgagg

SEQ ID NO: 190355 - DNA, 201 bp, Homo sapiens
attaacaacacatggacttttggggacagattgaaaccatagtaggaagtcaggtaatataataatgaataatgttctctaaaaacatgagaatataactrctagagcttttctactaatatacagaccctggatttaaaaacactggtattattttttcaataatcaggtaatggttgagtaagaacatcggcaaaaata

SEQ ID NO: 190356 - DNA, 201 bp, Homo sapiens
tcttacttatttcctgtatgtcatttcccttggttattcaatactgcaagtcaaaggatgaaatctttctattaacttagttaatactaaatctatagttrtattttcatctcttttaaaatagggataaagtctcttcaagtattaaataaaactgtgctatttcagcagtgattttaatgtttgcatgatattagttaa

SEQ ID NO: 190357 - DNA, 201 bp, Homo sapiens
gcaaaaattttctcctattctgtaggttgcctgttcactctgatgatagtttcttttgctgtgcagaagcccttcagtttaattagatctcatttgtcaawtttgctttcattgcaattgcttttggtgctttagtcgtgaattctttgcctatgcctgtgtcctgaatgttattgcctaggttttcttctagagttttta

SEQ ID NO: 190358 - DNA, 201 bp, Homo sapiens
ttgcaattgcttttggtgctttagtcgtgaattctttgcctatgcctgtgtcctgaatgttattgcctaggttttcttctagagtttttatggttttaagktttacatttatcttttttctttatttgtctgccttgattagttcaaaagactagtcatcaagttctgaaattccttcttctatatggtctagtctattga

SEQ ID NO: 190359 - DNA, 201 bp, Homo sapiens
tcagtctagagaacaggattgaattggagcacatttgaaggctgttgctgaaatctatgatggtggcatcttgctctaagaaagtgccagtgaagttagargtagacaggtaattagttgttgatagtgaaggtgagaaaggagccaaggatggagcctaggcttttgccttgaagaactagaagaatggcagggcagtaa

SEQ ID NO: 190360 - DNA, 201 bp, Homo sapiens
caggaggtccaagaagataagcaagctttctggcacactgtgttgaagtccaaatattattattattattattattattattttgagatacagtctcactrtcgcccaagctggagtgcaatggtgcgatctcagctcactgcaacctctacctcccaggttcaagcgattctcctgcctcagcctcccgtgtagctgcga

SEQ ID NO: 190361 - DNA, 201 bp, Homo sapiens
ataataataataataataataataataataacggggcatggtgatgcgcgcctgtggtcccagatacttatggggctaaggctggaggatcgcttgagccygggaggtggagactgcagtgagctgagattgtaccattgcactccagcctgggtgacaaagtgagactctgtctcgaaaaagtttaatctccagtactag

SEQ ID NO: 190362 - DNA, 201 bp, Homo sapiens
aataaagcaagtcacatgaattttttggtttctcagtgaaaagttgtgtttaaggccaggcccggtgactcatacctgtaatcccagcactttgggaggcyaaggcgggtgaatagtttgagctgaggagtttgagactagcctgggcaatgtagtgagcccttgtctctacaaaacattaaaagaaaaattagccaggca

SEQ ID NO: 190363 - DNA, 201 bp, Homo sapiens
ggattatttttgttctttctgaaatataccttttagaagtttctttagtaaaagtcttttgatttttatttatctaaagatgtcttaattttatttatttwttatttatttttttattattatactttaagttctggggtacatgtgctaaatgtgcaggtttgttacataggtatacatgcgccatggtggtttgctgca

SEQ ID NO: 190364 - DNA, 201 bp, Homo sapiens
atagaatgtaagtaatagagaaatattttgtggctatatatatatatatatatatttttcaagaaactttaaattttcaaattgaatatgattatgaacamaacaatatgttacactggtagatcattgtttatgtcatattggttttcattttgcttgtttttagataaaacaaaatatgtgaagttagaattcaaatgc

SEQ ID NO: 190365 - DNA, 201 bp, Homo sapiens
gttcagctcccacttatgagtgagaacatgctgtgtttggttttctcttcttgtgttagtttgctgagaatgatggtttccagcttcatccatgtccttgmaaaggacatgaactcatccttttttatggctgcatagtatttcacggcatatatgtgcctcattttctttatccagtctatcactgatgggcatttggtt

SEQ ID NO: 190366 - DNA, 201 bp, Homo sapiens
atattaccttaaaacatttatttctaatgtcttttttatatattttgaatttttagtaatctgttcctttaaagctagaaaaatatttgttttttaaaatyaatatacataaatatgtttctttaaatgaagaaaaaatatatgcataacttttgtagtaaataagtatatataaagacagaggctttcagtatggatttc

SEQ ID NO: 190367 - DNA, 201 bp, Homo sapiens
cacctgtaatcccagcactttgggaggccaaggcgggcggatcacgaagtcaggagttcgagaccagcctggccaatatggtgaagccccatctctactaraaatacaaaaattagcccagcatggtggcgcatacccttagtcccagctacttgggaggcccttgaacccgggtggtggaggtttcagcaagctgagatc

SEQ ID NO: 190368 - DNA, 201 bp, Homo sapiens
tctaacccagaatgaagccatagactggtttgaatttcgtttttatttttattttattttgttttgttttaaataattttgctgtactgtatttttctgayttatagttaaatgtttagctcctgtagaaagagatggtcaataaaggtatattgtatgttataaaggtagttttgacaatatagttatttcattcctgaa

SEQ ID NO: 190369 - DNA, 201 bp, Homo sapiens
aaatacaaaaattagcccagcatggtggcgcatacccttagtcccagctacttgggaggcccttgaacccgggtggtggaggtttcagcaagctgagatcrtgccatgcattctagcctgggcaacagagtgagactccatctcaaaaaaaaagaaaaaagaaaaaaagtatatatataataatttttaaaattcaccatg

SEQ ID NO: 190370 - DNA, 201 bp, Homo sapiens
tcttcacaaggcagcaggagagagatgagtgaaggaagaacttccaaacacttataaaaccattaggtcttgtgagaactcactcactatcacaagaacakcatgggtaaaaccgcccccatgatccaattacctccctccctcaacacgtgggaactacaggtccctccctcaacatgtggagattacaacttgagatga

SEQ ID NO: 190371 - DNA, 201 bp, Homo sapiens
aatttagaggtcaggctctggggtacatcagaattaaaggcgggggcacaggatatcagaagcaagagccaagcctaggtcaagagcagtgcaagaaggasccctgaggatccacagcagaatatgccccccaagcaggtcaccacaatggaggcattaaataactagtttttcacgactaattcggcctaaaatataatc

SEQ ID NO: 190372 - DNA, 201 bp, Homo sapiens
ggggtacatcagaattaaaggcgggggcacaggatatcagaagcaagagccaagcctaggtcaagagcagtgcaagaaggacccctgaggatccacagcakaatatgccccccaagcaggtcaccacaatggaggcattaaataactagtttttcacgactaattcggcctaaaatataatctgcacatatatagtctttt

SEQ ID NO: 190373 - DNA, 201 bp, Homo sapiens
atggagaaaccccgtctctactagaaatacaaaaaaattagccgggcatgatggtgcatgcctgtaatcctagctatttgggacgctgaggcaggagaatygcttgaacctgggaggcagaggttgcagtgagccgagatcatgccattgcactccagcatgaacaacaagagcgaaaccctgtctcaaaaaaaaaattat

SEQ ID NO: 190374 - DNA, 201 bp, Homo sapiens
tccgacataattcctgacatatcattttctttcttatcttttaatattactgcaaggcaggtctactgacaagaaatgtcttcatttttgtctgagaaagyctttatttctcctacagtatatcagtgtattacatgatgcagaattgtaggttggtggggtttcttttcaaaacttgaaatatttaaccccacactcttc

SEQ ID NO: 190375 - DNA, 201 bp, Homo sapiens
ataaaacatatcattaaaaatatttgtaagtataggcaggccaactggactttacctatgtaaagatcacattcataaaagtatatattatcaacgatatrtaaaaatacctctatttgtggtaatgcagtaaataaaactgtctgttaaatacacattagaagtatcaggactttgaaaatttggccttaatttaattta

SEQ ID NO: 190376 - DNA, 201 bp, Homo sapiens
tttacgtctataaggcagctatgtacctttaaaaatggcatcaattcttgcattttgaacttattccaggaactcataaaattcattcttttttgtctggytctctttctctctccaaatctgccctttactgttgtaagaaaattacttctcctgttctccttttcccatcttaataacgtgattaatcttttatttgct

SEQ ID NO: 190377 - DNA, 201 bp, Homo sapiens
tacaaaaaaattagccgggcatgatggtgcatgcctgtaatcctagctatttgggacgctgaggcaggagaatcgcttgaacctgggaggcagaggttgcrgtgagccgagatcatgccattgcactccagcatgaacaacaagagcgaaaccctgtctcaaaaaaaaaattattttgcctcactaataatgacaccccac

SEQ ID NO: 190378 - DNA, 201 bp, Homo sapiens
aggggtgtgagaccagtctggccaacatggcaaaacgctgtctctactaaaaatacaaaaattagccaggcatggtggtgggtgcctgtaatcctagttayttgggaggttgaggcagaagaatcgcttgaacctgggagatggacgctgcagtgagccaggatcgcgccactgcactccagcatgggtgacagagtaaga

SEQ ID NO: 190379 - DNA, 201 bp, Homo sapiens
tattctttgaaatcagacttatcaaaataagtcagtcatataaatattgttttaagaactgatgtgaattcggctgggcacggtggctcacacctgtaatyccagcacttcgggaggccaaggcaggtggatcacctcaggtcaggagtttgagaccagactggccaacatggcgaaaccccttctcttctaaaaaagtac

SEQ ID NO: 190380 - DNA, 201 bp, Homo sapiens
taaccattacagccttaccatgtaaataaatgtgtttacactggacccttgggtggactcttttctttttttttttaaacacatttgttatttaaagataygatttatgaaaagtatttgattaaaattgtatatacttagaattctactgttagttatctaaaataaccttaaataatatagattttgattcaaaatgta

SEQ ID NO: 190381 - DNA, 201 bp, Homo sapiens
agaaataaaatgataataccctttaaagaaagaaaattgtactatcttcattattaacaatttgcaaagactatgacatactatttgttaagtttttgccyggggtgattctgtgctatattgaaaaggctttgagttctagtacaatctcttgccttgagcaagtcccttaaaacctctgaacatgtttccgcatatgta

SEQ ID NO: 190382 - DNA, 201 bp, Homo sapiens
tgttgtagggacgtgcaatttttgccagtggcagtccttttgatccagtcactcttccaaatggacagaccctatatcctggccaaggcaacaattcctaygtgttccctggagttgctcttggtgttgtggcgtgtggattgaggcagatcacagataatattttcctcactactgctgaggtattgtaaaatcctctaa

SEQ ID NO: 190383 - DNA, 201 bp, Homo sapiens
aagatccaatagcaatttttcattttctttcttgattgacctttgttctttgtcattacttctctctgttttcaggtaagtatatgctcttttacctcttygataattttttctctgtcaatgtgtgttataacaaaaatgtgttataacacatttttctgccctctgttccttaaatgttcatgttcatttaggttctct

SEQ ID NO: 190384 - DNA, 201 bp, Homo sapiens
ctaaactggaagataagtggactttttttgcagtgtaattgtattagttttcttgggctgggataactacataccacggttatgtagtaactgtttttaartattcaagccacagactgtgtggcttaaacaacagaaaactattttcccataattctgggagctagaagtctaagataaagatgtttgcaggtttggttt

SEQ ID NO: 190385 - DNA, 201 bp, Homo sapiens
tcctccaggggatctggcctccctttcattcaagggattgtgggtttgtaaactggctcaagtctggaaattgattgaggggtcatgattctctgtttttmtaattcaaattagccttttgtccattcgacctagaaattttcagattgtgtagattaagtaggaacgcagtaggtttcctatcagtttcacttctagctc

SEQ ID NO: 190386 - DNA, 201 bp, Homo sapiens
tcaggcactgttgtaagcactagggagaaagcagtgaagaaaacaaaattctgtggccccgtggagttttcattctgttgtgggggtgcaaaccaaaagtaaaaaaagtaaatggcaagcaaagacttcaggcgataccacggatgtctcctggtgccagctggaactgctgggtaaaggactgacagattgtaccatctg

SEQ ID NO: 190387 - DNA, 201 bp, Homo sapiens
tgcacagctcagtaaatttacaaaaataatttagttgtacacttaaaatgcttgaattttgtgtgaattatatctcaataaatctgtttaaaaagtaatamtaccatattatgggcactttggaaaacaaatagagaaaaggaaaataaccaatatcctatttttctaatataagtattattttttttcctgtgtttgttt

SEQ ID NO: 190388 - DNA, 201 bp, Homo sapiens; identical to SEQ ID NO: 32951

SEQ ID NO: 190389 - DNA, 201 bp, Homo sapiens
gccaattagtatggactacattttagaaccacatgcttgatttatttattgtaattatttgaactatacttatttatagaaatagttgagaaactctgcaktttgagatcacataatacagttaatttctaatagttttttatacttaaagtgccttatcttgtgaaacgctcatgtaaggttttgaaattatccaacttc

SEQ ID NO: 190390 - DNA, 201 bp, Homo sapiens
acttgttcaaatctgttattgccaatgaggaaaaaggatagaaagttacctgcaagatataactatcaagcaataaaattgattttaaattcaccttgtarttgaaagtagttgagcagttgcagcatcattgcataaatatatggtctgaaagtgtgcacagaaagataaataacattcatattcatttgaatacaggca

SEQ ID NO: 190391 - DNA, 201 bp, Homo sapiens
gttattgataagtgagtgctaattatggaagatggttagtattcagactttgacattattccagatgattgtgccagagaagctagatttgtactttacaytggatttgtgctttcagctatttctaaatgtaccattctgattattcttgaataatatgcatggatttccattactctgtggcctaagaatggatattgg

SEQ ID NO: 190392 - DNA, 201 bp, Homo sapiens
gaggcaggagaatcgcttgaacctgggaggcagaggttgcagtgagccgagatcatgccattgcactccagcatgaacaacaagagcgaaaccctgtctcaaaaaaaaaattattttgcctcactaataatgacaccccactactttgggaaagaagttcatggttaaaagatggcttgttttcctgtaacttcaacctct

SEQ ID NO: 190393 - DNA, 201 bp, Homo sapiens
taagaaacactattaatttggaattataaatagacataactcaggacatgttattgataagtgagtgctaattatggaagatggttagtattcagactttracattattccagatgattgtgccagagaagctagatttgtactttacattggatttgtgctttcagctatttctaaatgtaccattctgattattcttga

SEQ ID NO: 190394 - DNA, 201 bp, Homo sapiens
  misc_feature (1)...(201): n = A,T,C or G
ttctcagtgataccagaataaaattattagtttaaaaataataaattattgagcttccacacatccctatgttagtaaactcagtaaactaccaaaattanccttcctaaaagataaactacctacaatatagctttgttaatcagattatggaaatttgtcaattttgcagagacgaagttgcattcttgaaaatttagg

SEQ ID NO: 190395 - DNA, 201 bp, Homo sapiens
aagaaaaggaatgaaaagtggcaatttagaacatatagaatgtaaaagcagatgtattttctttatagagcatgccaccttttttcagtttcattattcaktataaactctaatggagtatgaaaaaaagaagaatgtgacacttgaattgatcacttaggctgtttaagtgaggagaatgttggacctattggcttttaa

SEQ ID NO: 190396 - DNA, 201 bp, Homo sapiens
gtgacaaagtgagactctgtctcgaaaaagtttaatctccagtactagaaagcagatcagtgactttctggggcccgtgctggactggggattgactgagktgggccacaagagaacttttgggaatgttgtgaatattctataccttacctttataaaggtgagacataagatacatttatcggaacttaccctaattgt

SEQ ID NO: 190397 - DNA, 201 bp, Homo sapiens
tttctcagttatgcttgctccctgcaaatatcatttctaatataagtccttcgtcatgtcaggaattttcttttcatttctgcttgacagtctcagttttstcaagaagatatacataggttaattagcacagtccagaagaatagttgccctgtttgctgcccttagcagtgaaacaacgtaccattctgctgtctaggg

SEQ ID NO: 190398 - DNA, 201 bp, Homo sapiens
gaaaggcttggcagaataagacttaactgaagcagcagagatggtgtcatataacgttcatttcataacacataacatgaagtagattcttgtcagctgayataaaatcttctttctaaaatggtaatgattttacctgatttgtcactgtaaattcaatcatctgaatctattagtataattatatttcaggagtttaaa

SEQ ID NO: 190399 - DNA, 201 bp, Homo sapiens
ctctcaaaagtgtgagctggatacagtggctcatgcctataacccccgcactttgggaggccgaggctggcagattgcttgagctcaggagttcaagaccwgcctgggcaacatagtgaaaccccatctctaccaaaaatacaataataataataataataataataataataataacggggcatggtgatgcgcgcctgt

SEQ ID NO: 190400 - DNA, 201 bp, Homo sapiens
atatttcacaagaagttttagagcaatacagaggttatttttcttgctatggagtaatacagaattttggaatgagacaaagatatttttagaagttaatraagacttttatttttataaacacctacatattccagaagtttacatttggacagcctcctagtttaaaaactgaagataggcactagaatctcattgtaa

SEQ ID NO: 190401 - DNA, 201 bp, Homo sapiens
tagtgtcttgggatgggggaaataaaggtagagcagggtaaagaggagctgagaatgctgaggggagttatggccagtttgcattgttgagttgggtgatragggtaatctccattgagaaggtgagttttgagcaaataatcaaaggtggtggagcagttagccatgaagaaatctgaggaacagcgttttgtagctggc

SEQ ID NO: 190402 - DNA, 201 bp, Homo sapiens
gagaaattcatgcctattgtttatactcccactgtgggtctggcttgccaacaatatagtttggtgtttcggaagccaaggtatgtcaacttttattttawatgcaacttgtgtctttatttatttttgtaagttttttaacgaatttaaaatttattattattattttaaatttgacaataaaattgcatatatttatga

SEQ ID NO: 190403 - DNA, 201 bp, Homo sapiens
tgttattactagatcatttggtagttctattcttaattttttgagaagcttccatactgttttccataatagatttactagtttacattcccactgaacartgaataagagtttcctttcctcaggttcctcgccaatacttattgttcatctttttggtatagccgttctaacaagtgtgaggtgatatctcactgtgct

SEQ ID NO: 190404 - DNA, 201 bp, Homo sapiens
gtttcctttcctcaggttcctcgccaatacttattgttcatctttttggtatagccgttctaacaagtgtgaggtgatatctcactgtgcttttaatttcratttctgtgatgattagtgatgttgagcaatttttcataaacctgtaggtcatttatatgtcctcttttgagaactgtgtattctggtattttgctcatt

SEQ ID NO: 190405 - DNA, 201 bp, Homo sapiens
tttgggagaaaacccgggatgggttttgggtagctggcaagattctgtttaaatgaatattatgtagaaatgtggttgtcttataacaattcattaagctrtatgtggttctctgtatgtgagtcacatttaacaatactagagcaaaacttttaaatgaggataaggcatttacatattttaaattctattattttaatt

SEQ ID NO: 190406 - DNA, 201 bp, Homo sapiens
gttctccctttggttccctctttcttttctgttgaatgcctagcaactttgtggtatcttttagtaccaggatggaataaatcaatgccttttggtggtasaaaggcacttcagctataacttctgaatgtaagtccgttaatgatctttttaaaattattttaatttttttagagacaaagtcccactatgttgctcagt

SEQ ID NO: 190407 - DNA, 201 bp, Homo sapiens
aggtaggaaagaatgactttgcagtaaagaagcctggaggacgccactttaatcaagtgttaaatgtgaacatcatcactaataggaccggtcggcaatgrtgccacctgatagtaaacaatgagaagaagccagcatcacttctgtaatattactgcaaaagatgtataatctcagtctaattatgagcaaacagtatgc

SEQ ID NO: 190408 - DNA, 201 bp, Homo sapiens
gacatgggactgtgggtaaagccatttcttttctttctttcttttgttttgttttgttttgttttgtttttaatttggctttctggaagttaaaaaaaaawtttgtttagagctgctctctttttattaaaggggaattcagtgtacaccctgttcagagactccttttcggatcctggtaacatttcattttccttcact

SEQ ID NO: 190409 - DNA, 201 bp, Homo sapiens
atacagcactttcccttgctttgtttagtagacattttctggactttgacaggaacatgtaggtgagaagcagtaatgatctaatcagtcaggtttgcttgtagccattgccaatttttgacaatctctgtcttttgatttttgtgtttaggccatttacatttaatgtaattgttgatacacagagagataaacagattt

SEQ ID NO: 190410 - DNA, 201 bp, Homo sapiens
tacagcactttcccttgctttgtttagtagacattttctggactttgacaggaacatgtaggtgagaagcagtaatgatctaatcagtcaggtttgcttgtagccattgccaatttttgacaatctctgtcttttgatttttgtgtttaggccatttacatttaatgtaattgttgatacacagagagataaacagatttc

SEQ ID NO: 190411 - DNA, 201 bp, Homo sapiens
acagcactttcccttgctttgtttagtagacattttctggactttgacaggaacatgtaggtgagaagcagtaatgatctaatcagtcaggtttgcttgtagccattgccaatttttgacaatctctgtcttttgatttttgtgtttaggccatttacatttaatgtaattgttgatacacagagagataaacagatttct

SEQ ID NO: 190412 - DNA, 201 bp, Homo sapiens
accccatctagtgtcaaactcctgagctcaaggtgtctgcctacctcagcctcccaaagtgctgggattacagatttgagccactgtgcctggccctaacttttgtttttaactgtcacacatattttaaagagtttaagagggaaaggataatctattagagttatccaggtagatactatttctgttactctgtttcat

SEQ ID NO: 190413 - DNA, 201 bp, Homo sapiens
ccccatctagtgtcaaactcctgagctcaaggtgtctgcctacctcagcctcccaaagtgctgggattacagatttgagccactgtgcctggccctaacttttgtttttaactgtcacacatattttaaagagtttaagagggaaaggataatctattagagttatccaggtagatactatttctgttactctgtttcatt

SEQ ID NO: 190414 - DNA, 201 bp, Homo sapiens; identical to SEQ ID NO: 32950

SEQ ID NO: 190415 - DNA, 201 bp, Homo sapiens
ttaatacggtgagtgataaacatgcgggttggctattgctaaactcacaacatttttatgaaatggaataactagtcaggaaaggtactggggcttcccatacttaggataatgtttgaaacttcttacctggttaactaggacttgcccactcaggttcgtacctttctttctagtgctcatcttttatcatttctcaca

SEQ ID NO: 190416 - DNA, 201 bp, Homo sapiens
agggagctaatgtgggggttctgccagctgctaagtatgtctatgccaattatgcatttctggcaatggggaaatgaccataggatgagtccagggactcrctgtaagttggacctgagctaaaactccattaattacctgacctccataagcccctactttaactggaggaccacaataatgtttggggtcccctggaat

SEQ ID NO: 190417 - DNA, 201 bp, Homo sapiens
aatacggtgagtgataaacatgcgggttggctattgctaaactcacaacatttttatgaaatggaataactagtcaggaaaggtactggggcttcccatayttaggataatgtttgaaacttcttacctggttaactaggacttgcccactcaggttcgtacctttctttctagtgctcatcttttatcatttctcacagt

SEQ ID NO: 190418 - DNA, 201 bp, Homo sapiens
acgtaagacctaaaaccataaaaaccctggaagaaaacctaggcaatacattcaggacataggcatgggcaaagacttcatgactaaaacaccaaaagcartggcaacaaaagccaaaattcacaaatgggatctaattgaaccaaagagcttagagcttctgcacagcaaaagaaactatcatcggagtgaacaggcacc

SEQ ID NO: 190419 - DNA, 201 bp, Homo sapiens
tgctgagctttttagtttattataattccatttgtctatttttgcttttgcctatgccactggggtcatatctaaaaacatcattgcccaaactactatcrtgaggcttttcccctaaattttcttgtagaagttttatagtttcaagtcttacatttttctttacctattgagttgattttttttaatatggtgtgaaat

SEQ ID NO: 190420 - DNA, 201 bp, Homo sapiens
gaacttattagaatttcttttcatgtgatttaatttcaggaaatattaaagctcttaaatatgtgtgtttgtttttgtagttgtactccttatagtatccttttttttttttttacagaatcagttgcccctgaaaattaatagaaatatagagacagcttcagctttactgcctaaaattctctatattagaatttcatt

SEQ ID NO: 190421 - DNA, 201 bp, Homo sapiens
tgggtatggggcaccttactgcagctcagagaaaacagagtaaatcttgcctgtcttctggatctctgtggttcctctcatttttctatggtttgaataayttcatgattttactgaatctgtgactttattaattattgcctcaaacctttttaaatttatttgaatccactagcaatttattttagtttaaatggaaaa

SEQ ID NO: 190422 - DNA, 201 bp, Homo sapiens
caactactaagtagctcatcttaatatggcaaacaactacttccacttacccactccccagcctaacatcccaggctcccaggttttctaacattgtaagrtgcaacatcattcattcagttactaaagcaaacacctcagagataatcaggattttttccccttcctttccctttttgagcattagaaattgtatccctt

SEQ ID NO: 190423 - DNA, 201 bp, Homo sapiens
ttgagtccacatttatttggaaacaatagttgagctgtgatatgtagagattgagtcagtaacatttgctatttgttgatttttaaaacctgctcattttrtaatgtaaaacaatcattcagaggaaagtatcaccagatagtaagtgccagagttggggcttgaacttgttttcttcctcctaatactttgcattagtaa

SEQ ID NO: 190424 - DNA, 201 bp, Homo sapiens
gatcagtgttaccttaggattctttccagtgctttttaccatgaaaagtactttggagtttatcagaacaacagtctatttatacttaattaattgggtgyttgtactagttttaaagtgaataaatgaagaagaggttatataaaattattttctgtacattttgagtccacatttatttggaaacaatagttgagctgt

SEQ ID NO: 190425 - DNA, 201 bp, Homo sapiens
ttacacatagcatatggagaattaagaaaaattgccaagttttatctcaggtggtatttatggcagtctattaatttgggcattatttcctcatctttaaraagagtatttgtttttaaggaagattataaatctcactgttctttactaaaaataaagaatttttaaaaaggaggcatagttcttatatcactttgcatc

SEQ ID NO: 190426 - DNA, 201 bp, Homo sapiens
ttaatgaggaaaaatttggagaatggaaaaaatgtagacatgtttctaacatcagttctttacatcaagatctaagggttgtctaaatttgtgcgtagacrtataaatcttcaaggcagtgaaacttatcttttactgtaaaatgccattaaaaatataaagtaacagttcatcggctctccatattcatctagagatttt

SEQ ID NO: 190427 - DNA, 201 bp, Homo sapiens
gagagggagagtaggggatgagttcacagaggtgggtcaatgagtgggtatatgtcttagggcttcctgtaggctgtttggaagaacattggcttttactsttagctaaatgaaaagccctaaatggtcttacgcagttacatgacatgatctagtatttttaaaaagagcattctggttgctgtgttgagaatagactaa

SEQ ID NO: 190428 - DNA, 201 bp, Homo sapiens
cttccacggtaccaaagttgtcatggatgaccttggccaggggcgttaagcagctggtggtgcaggaggcattgctgataatcttgagctgttgtcatatktctcatggttcacacccatcacgaacatgggggcatcagcagagggtgcagagatgatgaccgttttggctcctccctccaagtgagccccagccttctc

SEQ ID NO: 190429 - DNA, 201 bp, Homo sapiens
gattacaggtgcgcaccaccatacctggctaatttttgtatttttggtagagatggggtttcaccacattggctaggctggtctcaaactgttggcctcawgtgatccacccgcctcagcctcccaaaatgcctcccaaagtacaggcatgagccaccacacccaccctttgtagctattattaatgggattgcttttttg

SEQ ID NO: 190430 - DNA, 201 bp, Homo sapiens
caataaaattgcatatatttatgatgtacagaggatgttctgaaacatgtatacattgtgaaatggtagaatcaagctaattagcatatgcattatttcamattcatatcatttatttgtggtgagtatgctaaaatctacttttagcagttttcacgtatataataaattatccttagcaatagtcactatgtggtacaa

SEQ ID NO: 190431 - DNA, 201 bp, Homo sapiens
tggaggagaccacctggtgctcagagtagcccaggatgcctttgagggggtcctctgacgcctgcttcaccaccttcttggtgtcatcatatttggtaggkttttccagacggcaggtcaggtccaccactgacatgttggcagtggggacacggaaggccatgccagtgagcttcccgtttagctcagggatgaccttcc

SEQ ID NO: 190432 - DNA, 201 bp, Homo sapiens
atatttccatatgtcttattccttacttttgccccagtctttttccttttctcaggcttgtaaattttcataagtcttcagtggcaccacatgcatttagygtaacacctagtgctaaagaagttccacccttttttaagtgcttccttaataccaagtatttattctctaacagtgatctattgagtgtttgctcctgac

SEQ ID NO: 190433 - DNA, 201 bp, Homo sapiens
agctctcttatatttccatatgtcttattccttacttttgccccagtctttttccttttctcaggcttgtaaattttcataagtcttcagtggcaccacaygcatttagcgtaacacctagtgctaaagaagttccacccttttttaagtgcttccttaataccaagtatttattctctaacagtgatctattgagtgttt

SEQ ID NO: 190434 - DNA, 201 bp, Homo sapiens
ggtgggaggattgcttgagcctgggatgttgaggatgcagtgagctgtaattacaccactgcagtctttctagcctgtgggacagagtgagatcctgtccaaaaaaaaaaaaaaaaaaaaaggaaggaaggaaggaaagaaggaagaaaggaaagaaaaagaaaagaaagtttatttttgggacatgctaaattttaaatg

SEQ ID NO: 190435 - DNA, 201 bp, Homo sapiens
tctaaggtccaaatacccgctagaggtttcccattggccaattagtgttcaccccatttaaatgaagtggtggcctgcaatcagtctgattggttgcagaragcaaccaatcagaggctgaagtgaagttacaaaggtcacactcctagcaaacatctgattggttgtggaaagcaaccaatctgaggctaaagtggagtt

SEQ ID NO: 190436 - DNA, 201 bp, Homo sapiens
ctaccattcaacccagcaatcccattattgggtatatacccaaaggaaaataaaccattcgaccaaaaagacacatgcactggtatgttcgttgtagcatwattcacaatagcaaagacatggaatcaacctagatgcccaccagcagtggattggataaagaaaatgtggtgcgtatacacatagaatactacacagcca

SEQ ID NO: 190437 - DNA, 201 bp, Homo sapiens
ttgaataatttcatgattttactgaatctgtgactttattaattattgcctcaaacctttttaaatttatttgaatccactagcaatttattttagtttawatggaaaaaaaagatcacaaactaaaaccataatttgagtctttgttttttaaaaatactttctaaacaccaatccctttgccttcccagctatgaacat

SEQ ID NO: 190438 - DNA, 201 bp, Homo sapiens
atatatacctaaaggaatataaatcattctattataaagatacatgcacacatatgtttattgcagcactatggtcatcaatgacccaacccaaatggtcwtcaatgatagactggataatgaaaatgtggtacatattacaccatggaatagtatgcagccataaaaacgaatgagataatggccttttcagggacatgg

SEQ ID NO: 190439 - DNA, 201 bp, Homo sapiens
agttgactgtcaagttttgaaccgagaaagaatatattccttcctctcaagttgttataaaaaaatcgttttctatggattggatttcatttatttccttccttccttccttccttccttccttccttccttccttccttccttcctctctctgtctctcttttcttttctttttctgacaaggtcactgtctgttgccca

SEQ ID NO: 190440 - DNA, 201 bp, Homo sapiens
gttgactgtcaagttttgaaccgagaaagaatatattccttcctctcaagttgttataaaaaaatcgttttctatggattggatttcatttatttccttccttccttccttccttccttccttccttccttccttccttccttcctctctctgtctctcttttcttttctttttctgacaaggtcactgtctgttgcccag

SEQ ID NO: 190441 - DNA, 201 bp, Homo sapiens
cttccccaaatttctttgtcaccaattttccaatcatgcttcttccaagtccctgaccatccagccaaacctacagcccatgaatccgtgtataatcgcasatctgaccatgtctcctttgatgcaaagtgcacaaccagttgcactgcttgaggttctgcccactgggaagatttcccttcactgctgtccttcagggat

SEQ ID NO: 190442 - DNA, 201 bp, Homo sapiens
taggcattgtgcctttttcttggttgtaggaggggccaaatgcagcaacttatcctttaccttagaaggaatatcttgacagtccccacaccactggaccrctagaaattttactgaggtaggtgatcactgaattttagttggatttatttcccatcctctggcacgcaaatgtctcaccaatacattcggtgtgtttgc

SEQ ID NO: 190443 - DNA, 201 bp, Homo sapiens
ataaattcagcctgatacaactctattttccttccaacattattccacacccttaatatccactcacatgcctgttctccagatttctgctgatataaatrggaaaactcaagcagttcttttcaagcataacgcacctcctcatgggtcacactttcaacctcacttctaggggcctgccgggacttttgtctagttata

SEQ ID NO: 190444 - DNA, 201 bp, Homo sapiens
taaatttgacaataaaattgcatatatttatgatgtacagaggatgttctgaaacatgtatacattgtgaaatggtagaatcaagctaattagcatatgcrttatttcacattcatatcatttatttgtggtgagtatgctaaaatctacttttagcagttttcacgtatataataaattatccttagcaatagtcactat

SEQ ID NO: 190445 - DNA, 201 bp, Homo sapiens
attaacttagttaatactaaatctatagttatattttcatctcttttaaaatagggataaagtctcttcaagtattaaataaaactgtgctatttcagcartgattttaatgtttgcatgatattagttaagtttatggttctttattctttgcaatatttaagagtatttcttgtctgggtgcggtggctcatgcctgta

SEQ ID NO: 190446 - DNA, 201 bp, Homo sapiens
gcataaagtcacaggggtagaaaggagaaattttgctagtgtgacactagggttgttagtgagaggtgccatttccatttccaccccttgattcctagacstatgaatcctggctatgagaaaaacagcaccatttttttggacactgattgagagcacatacagcctcctggagaaccttgcctcagctttgcaaggtat

SEQ ID NO: 190447 - DNA, 201 bp, Homo sapiens
tctagaccagcagagcataaagtcacaggggtagaaaggagaaattttgctagtgtgacactagggttgttagtgagaggtgccatttccatttccacccyttgattcctagacctatgaatcctggctatgagaaaaacagcaccatttttttggacactgattgagagcacatacagcctcctggagaaccttgcctca

SEQ ID NO: 190448 - DNA, 201 bp, Homo sapiens
aactacctttttccatgacccaatccatatcccctttgccctcagcaagtatctcagctgattgtggttctttacctggtgagggtgactcaaaccttcartcctcaatggtctgggccactagtaatcctgcttgaattggattgttgttttcattagctttaatcacagggcatggtaatactaagagctaccctaagg

SEQ ID NO: 190449 - DNA, 201 bp, Homo sapiens
agaattgagataatgtgaatagtaagatcattagtataattaccaatatataccctccttatctcctttttttgagctctcttatatttccatatgtcttrttccttacttttgccccagtctttttccttttctcaggcttgtaaattttcataagtcttcagtggcaccacatgcatttagcgtaacacctagtgctaa

SEQ ID NO: 190450 - DNA, 201 bp, Homo sapiens
aagatgccaaatccttgggtgatgtttactctcgtcgatattccttaacttaaacactatgatgtaatgttagcagtacttaaatactatgatgcagagtsagtatatcttatgttatcagataaggtgataagagaaggaagaaaatgatattttctgaaatttgcatatggattgttgcttttatatgtatacacacat

SEQ ID NO: 190451 - DNA, 201 bp, Homo sapiens
atggattgaatgtttgtgtccccctgcaaattcgtacgttgaaatctaatccccagtgtgatgttatttggaggtgaggactttgggtgatgattaggtcrtaaaaatggcaccctcatgaaatgggattagtactctaaaaagaagaggccagagtaccaacgaaaaaaacccaggatcagatggattcacagctgaatt

SEQ ID NO: 190452 - DNA, 201 bp, Homo sapiens
aggtgagatttgatagtgattactattaacttcaaataaatagatgcttcagttataaattctgaagggtgcagaattgagataatgtgaatagtaagatmattagtataattaccaatatataccctccttatctcctttttttgagctctcttatatttccatatgtcttattccttacttttgccccagtctttttcc

SEQ ID NO: 190453 - DNA, 201 bp, Homo sapiens
gcagttgagtccaaaggcagtgtgctggcaaaatttatttttgctagacaggaggtctgtctgtgctattaaggccttcagccatttggaggaggcccacycatattttggagggtaatctgatttatttaagtccaccaatttagatgttaatctcatccaaaaacacctgtgcagaaacatccagaatagtgtttgacc

SEQ ID NO: 190454 - DNA, 201 bp, Homo sapiens
gaaagaaggagagggagaaggcttgttaaatccaaaatcttcaggtaggttgtcaggctgaagactgaaggaagagttgcagttgagtccaaaggcagtgygctggcaaaatttatttttgctagacaggaggtctgtctgtgctattaaggccttcagccatttggaggaggcccacccatattttggagggtaatctga

SEQ ID NO: 190455 - DNA, 201 bp, Homo sapiens
aaatgtctgatcacctaaggatgtttacttttaatcaggaatctaaagaaaatttaaggaatcaacaagttggccagaagtggtggctcaggcctgtgatmccaacactttgggaggccgaggtgggtgggaggattgcttgagctcaggagtttgagaccagcctgggcaacatagtgagactccatttctagaaaaaat

SEQ ID NO: 190456 - DNA, 201 bp, Homo sapiens
cataacaaaaaatgagaaatggtaacaaagaaaataattttctgtagattataaattgagtttaaaaataaatgctagaatgaggaatagttacatcagtwtagaagataaaggtgtataatgttcttaatatttaaagaatactttcaggtcagtaagagaatattagactaggctcagtgactcacacctgtaatccca

SEQ ID NO: 190457 - DNA, 201 bp, Homo sapiens
ttgatgggcatttaggttgattccatatctttgctattttgaatagtgctggagtgaacaacgtgtgcatgtgcatgtgtctttatggtacattgatttayattcttttgggtacatacacagtaatgggattgctgggttgaatggtagttatgtttttagctctatgaggaatctgcacactgctttccacaaagcatg

SEQ ID NO: 190458 - DNA, 201 bp, Homo sapiens
aactcagggttaagaatcacactcaaaaccacacaactacatggaaactgaacaacctgctcctgaatgactactgggtaaataatgaaatgaaggcagarataaacacgttctttgaaaccaactagaacaaagacacaatgtaccagaatctctgggacacatttaaagcagtgtgtagagggaaatttatagcactaa

SEQ ID NO: 190459 - DNA, 201 bp, Homo sapiens
tggaaagggtagccaactttgagaagaattttcctgtaaacacaatgatgtttttaaaaaatttactctctttaggaacatttgaatgaaataaaattttkctttctaaactgcgtgctcagacagaccatgtttatcatatgatactgcaaaagcaaatgatcaggaaatgccatcctgaacagaataaaacaggttaga

SEQ ID NO: 190460 - DNA, 201 bp, Homo sapiens
ctctgaaatattatagtattctaatttctacagatagggaaactgagatatggagagcttacatggtttactcacagccacatggccatgcttccagtgaygcagacttcggatttttaattgcatatacttgtcagattttatatgtatgctttttgtctattttcctctcaaatactgttgtgtgtgtgtgtgtgtttt

SEQ ID NO: 190461 - DNA, 201 bp, Homo sapiens
ttcttgcgctgaagattctgaaaccattggtcccagcccgctcttgcagttatctcagagagctctatcatggcgtcattcagtggaccaatttgtctctyttcagtctggccctcaacccaggaggctaattaaacacaaacctttccatcagtgacatgaattaatgggtatatctatatgaaaaattagaagaaagag

SEQ ID NO: 190462 - DNA, 201 bp, Homo sapiens
caacgtgagaaactgatttattatttaacatagaatcccacttatgtgaaagtcatatacagccaggtacctctgtatatgtttgttaccttgctgcagtkgaaacaacagtagtagtatagaatatcacaataacaaaatgtgtgctgtaataagaaaggtgagtttgatatggtaactcttgagacaggtgatatggag

SEQ ID NO: 190463 - DNA, 201 bp, Homo sapiens
aggattcaaagacaatcatattagataaagaatattttaggctggatgtgcgagccactgtgcctggcctaaaatattctttgtttaatttgattgtgtartaatcctaggactttgggaggccaaggcaggcagatcgcttgagctcaggagttcaagcctagtctggagcaacatggtgaaacccagtctctaccaaaa

SEQ ID NO: 190464 - DNA, 201 bp, Homo sapiens
tcagagttggaaaccagatagttctcaggcttagttgatcaaatgccaagaacagggtgggaaccttaatgggagatgaagccaaattatctgatgtagcmgaagctgagacaaagtggactttgaaaatgagtccaaggattggagcaaagcaaggattccctaggcggtcactgttcattagagtaaaaaagagaagag

SEQ ID NO: 190465 - DNA, 201 bp, Homo sapiens
ccacacccagctaatttttttctactttttttttgtagagatggggatctcactatgttgcccaggctggtctcgcactcctgagctcaagcgatcctccygccttggcctcccaaactgctgggattagaggcgtgagtcactgtgcctggccaggaactactattatgtctcttgtttatttcatttaaaatggaagga

SEQ ID NO: 190466 - DNA, 201 bp, Homo sapiens; identical to SEQ ID NO: 32954

SEQ ID NO: 190467 - DNA, 201 bp, Homo sapiens
acctctgcctcccaagtagctgggactacaggtgcatgccaccacacccagctaatttttttctactttttttttgtagagatggggatctcactatgttkcccaggctggtctcgcactcctgagctcaagcgatcctcctgccttggcctcccaaactgctgggattagaggcgtgagtcactgtgcctggccaggaac

SEQ ID NO: 190468 - DNA, 201 bp, Homo sapiens
atgtagtaggtattctgtaataatttgttgaatgaatgaatcagggattattcttgaagtaacactgttttaccttgcagatattgctataacctctcagsagttcacatcctaccttgtgggataaatgcacaataacctcttttatatgctgttgaatgtgtgttggagaatctcttttccttaatgggtataaggatg

SEQ ID NO: 190469 - DNA, 201 bp, Homo sapiens
atttgtgcccctttttgtgctgtgaaggagaagagcaagttcgacgttcagaatttctttggggttccctctcttggctttgggccccccctccctgtctscatacagggaagcttctttctttctttccccttcttttgtgcctattaaactgtccactacttaaaaccaaaaaaacaaaaaactaaaaacaaaaaaaca

SEQ ID NO: 190470 - DNA, 201 bp, Homo sapiens
ttcctatacaccaaaaatagacgaatgccaaatcatgaatgaactcccatttgcaactgctataaagagaataaaatatctaggaatacagctagcaaggraagcgaaggacctcttcaggaagaactacaaaccactgctcaaggcagtaagagatgacacaaacaaatggaaaaccttccatgctcatggataggaaga

SEQ ID NO: 190471 - DNA, 201 bp, Homo sapiens
ttctttaggatcatattaataagtattcaggaacttacctttaccctgctattgactgttttcacctacatataaatccctttgtgatctggcccatgcasttcaccttcctgtctgccatcctccacccctccgtgtatcctttacaccattgtataaataaatagttttagttggctgcacatgtcattgttctgtcac

SEQ ID NO: 190472 - DNA, 201 bp, Homo sapiens
cataacccaacttcaccattttatatctttacaccatctcggtaacttctgattttctttaggatcatattaataagtattcaggaacttacctttacccygctattgactgttttcacctacatataaatccctttgtgatctggcccatgcacttcaccttcctgtctgccatcctccacccctccgtgtatcctttac

SEQ ID NO: 190473 - DNA, 201 bp, Homo sapiens
gccaagatgatcacattctggctaactcaattttccatgatttgactgttacttttatttcactaactataaagcaagccagaattaacacagtgtgccaygttttttattttaccaatatgtagtgattaattctcaagagtgtttttctttgtggtatccacagatggtgacccacttttttcatatcctcatgaaaat

SEQ ID NO: 190474 - DNA, 201 bp, Homo sapiens
aataaactagaaaatctagaagaagcagataaattcctggacacatacaacctcccaagactaaaccaggaagaagttgaatctctgaatagaccaataayaggttctgaaattgaggcaataattaatagcctaccaaccaaaaaaagtcgaggaccagatggattcacagccgtattctaccagaggtacaaagaggag

SEQ ID NO: 190475 - DNA, 201 bp, Homo sapiens
ctgatgattgagccctgtttctggacataagctttctctacccagcagctacagaagctgagaacatctttgtatctacaaaggagggcctctggctttcytgttggcaattactttctctgagctttttgtgttttttttcccattgtccttatagttactctacttctctcatatttctcaaacatctgaaatatcatt

SEQ ID NO: 190476 - DNA, 201 bp, Homo sapiens
taaactagaaaatctagaagaagcagataaattcctggacacatacaacctcccaagactaaaccaggaagaagttgaatctctgaatagaccaataacasgttctgaaattgaggcaataattaatagcctaccaaccaaaaaaagtcgaggaccagatggattcacagccgtattctaccagaggtacaaagaggagct

SEQ ID NO: 190477 - DNA, 201 bp, Homo sapiens
cactgaaatttttagtaatgttgatgtcttctcattggcatattccttatggctttgggaaatggtgtgttttctgggccttcctgtggaatatgttcatyttatggattttctggcttttacatgtgtctatataccagactgcccagttctctgagcctcgcaatcccctcttctgtcatttgccacagcattcctggc

SEQ ID NO: 190478 - DNA, 201 bp, Homo sapiens
aggctgaggcagaatggcgtgaacccgggaggcggaggttgcagtgagccgagatcgcgccactgcactccagcctgggcgacagagcaagactccatcamaaaaaaaaaaaaaaaaaaaaaaaaaaggccgggcgccgtggctcacaccggtaatcccagcactttgggaggccgaggcgggcggatcacgaggtcagga

SEQ ID NO: 190479 - DNA, 201 bp, Homo sapiens
aacagggaacataatattttaattagtatttaattttgattagtgttagacaataatactggcatttaattagtattagacaataatactgccataagaaacactattaatttggaattataaatagacataactcaggacatgttattgataagtgagtgctaattatggaagatggttagtattcagactttgacatta

SEQ ID NO: 190480 - DNA, 201 bp, Homo sapiens
acagggaacataatattttaattagtatttaattttgattagtgttagacaataatactggcatttaattagtattagacaataatactgccataagaaacactattaatttggaattataaatagacataactcaggacatgttattgataagtgagtgctaattatggaagatggttagtattcagactttgacattat

SEQ ID NO: 190481 - DNA, 201 bp, Homo sapiens
gaacaggcaaagatttcatgacaaagatggcaaaaacaatcacaacaaaagcaaaaatgtacaaatgggatctaattaaactaaaagcttttccacagcaaaaaaaaaaaaaaaaaaaattaccaacagagtaaacaaagaacctacagaatgggagaaaatatttgcaaactatggatttgacaaagttctagtatccag

SEQ ID NO: 190482 - DNA, 201 bp, Homo sapiens
aagaaataaaagcagaagtaccatttgacccagcaatcccattagtggatatatacccaaaagaatataaattattttaccacaaagatgcatgcacacattttttttgtttattggagcactactcacaatagcaaagacatggaatcaacctaaatgcccatcagtgatacactggataaagaaaatgtggtactgata

SEQ ID NO: 190483 - DNA, 201 bp, Homo sapiens
aaggagtggtaagagaaatgaaaggactgtctaaatgttacaaaataatatggaagtaaagtagtaggagcaaaagccatattgctatgaaagaagttaamacatccatcttcttcgttgttacctacaaagaagaattgaatttgaatggttcttggccagagataatttgtgtcaacttcggattacttattctagcat

SEQ ID NO: 190484 - DNA, 201 bp, Homo sapiens
gtaaatacttaaaaagaaggataaaagatgattaacagtactaaatattaaaattactataaagctgtaggaattaaagcagggaggtatttttttcttgrtagattagtaagactaatcattactgttagactatcattactgagcaataccaatgtggtatacctgtgtgcctgtttcctcatctattggatgagaata

SEQ ID NO: 190485 - DNA, 201 bp, Homo sapiens
cactcaacattttttccctttttactgggtacatagttgctataccaatcaatattaataataaagattattgtgtggaaatggttcatgtaagacaaaarctctatacataatttataaaatgtctgtgttctaaggatttagaaagaagttttgcctttttgatatctacatacttcatttgtgcccctttttgtgctg

SEQ ID NO: 190486 - DNA, 201 bp, Homo sapiens
tttttaaagcaggtttgctggaaactaattgtcttagtttttcttcctctgagaatgtctattttatcttcatttgtgaaggatattttcaatagttatakaataatgagttgacagttctttccctttaagacctaaaaaaaaaaaagccatttctcttcctcccgccctttctttttcctgatgagaaatctgcagtca

SEQ ID NO: 190487 - DNA, 201 bp, Homo sapiens
ttgtagaaacacaatttcatcatgttaccccatctagtgtcaaactcctgagctcaaggtgtctgcctacctcagcctcccaaagtgctgggattacagayttgagccactgtgcctggccctaacttttgtttttaactgtcacacatattttaaagagtttaagagggaaaggataatctattagagttatccaggtag

SEQ ID NO: 190488 - DNA, 201 bp, Homo sapiens
tcaagcaatcctcccaccttagcttcctgagcatctgggactacaggcatgtgctaccactcctggctaattttcatattttttgtagaaacacaatttcrtcatgttaccccatctagtgtcaaactcctgagctcaaggtgtctgcctacctcagcctcccaaagtgctgggattacagatttgagccactgtgcctgg

SEQ ID NO: 190489 - DNA, 201 bp, Homo sapiens
cctacgatcttgagaccagctctatatcctctggtaaaaagaatgattcccttaccttagaattttaggcatctgtcgtggttattgcttctgccatcccygtgggattacctgggagttgggactagagaggtggaaaagaatattggatgttcttccttctctgacctttaagcaccccctttctgattcttggaccag

SEQ ID NO: 190490 - DNA, 201 bp, Homo sapiens
atctagtccaaaggttttataaggaatagggaaagcaaagaaaagacaaaaaaggagaaaaaccaggatcaaacttagcatatatgaggatgtctttagakaattagatgtacaggtggtctggaaacctaatatatctatatagacgtctgatatcttcaactacatgaaagacttggtagaaatcaaatgacagttaga

SEQ ID NO: 190491 - DNA, 201 bp, Homo sapiens
gtcttggatatgtctttattagtagcatgagaacagactaatacagtattcataccaatgttagtaattatgttatgaggctagttgtgatggctcacacmtgtaatgccagatgtgagccacctgggaggccgaggtaggaggatcacttgagcccaggagttcaagaccagactgggaaacatagcaaaatcccatctt

SEQ ID NO: 190492 - DNA, 201 bp, Homo sapiens
gcatctttctttataaatttcccagtcttggatatgtctttattagtagcatgagaacagactaatacagtattcataccaatgttagtaattatgttatsaggctagttgtgatggctcacacctgtaatgccagatgtgagccacctgggaggccgaggtaggaggatcacttgagcccaggagttcaagaccagactg

SEQ ID NO: 190493 - DNA, 201 bp, Homo sapiens
gttgcattggggattaacaacacatggacttttggggacagattgaaaccatagtaggaagtcaggtaatataataatgaataatgttctctaaaaacatgagaatataactactagagcttttctactaatatacagaccctggatttaaaaacactggtattattttttcaataatcaggtaatggttgagtaagaaca

SEQ ID NO: 190494 - DNA, 201 bp, Homo sapiens
gtgaaactcagtctaacttgattttaagttcggagaagaaaaataccaggcaattggttcccaaatgtacactcaacattttttccctttttactgggtayatagttgctataccaatcaatattaataataaagattattgtgtggaaatggttcatgtaagacaaaaactctatacataatttataaaatgtctgtgtt

SEQ ID NO: 190495 - DNA, 201 bp, Homo sapiens
aaattaaaattctacacataataaaataatcatgcctattttttattctcaattagtttatttccctttgcaatggtagaaaacactaattgatagttctrtcataattgtgcttacatggtttctatatcttaagagtaaataataacatgacccataagtaaatctccaaacaacaccactcttccatattttaggcag

SEQ ID NO: 190496 - DNA, 201 bp, Homo sapiens
agcatatgcatgtgagtctctgtcagttttccaaaacattagaataggaaatgagactgattgattgaatagtttgatcagttagttttgggtttagatasactaatctgcaagaatgtagacttccaatgtaaagatcagcaaagggaaagacttctggataaaggctaagtcaaggctgtaggatttactttagtagca

SEQ ID NO: 190497 - DNA, 201 bp, Homo sapiens
cactaatctgcaagaatgtagacttccaatgtaaagatcagcaaagggaaagacttctggataaaggctaagtcaaggctgtaggatttactttagtagcwgtttgaaaggaacttgaaaataaaacttcaactaagaagctattgctcttcaagaatgctgttttatcagagaaacaataataaaattcttagaataaat

SEQ ID NO: 190498 - DNA, 201 bp, Homo sapiens
gttaactatcatagtaaaggtaaagtaaaaccattgtttgataattttgctttcggaagtggaaaattaagaaaggaattgctatctttccattccttaarctaatatttcaaaactaaatgttatttctctgtgtgattacctttgtctgtaaaatctgaattgcacttttctaattaacacaaatgaaatattttattt

SEQ ID NO: 190499 - DNA, 201 bp, Homo sapiens
attttttgcaggttattcccaatttaagtctttttgagtttctttcagcaatattttgtagtttccagtgtgcaggtcttacacatattttcttaaatatstccttatgaattttgcattttgggctggtattataaatggagttgtatattttatttcatttttaactgtccattgcaagtgtatagaggtaaaattgat

SEQ ID NO: 190500 - DNA, 201 bp, Homo sapiens
taaatctttgtaatcgactacattgtagtcagacttctttatggtgtatactttaattattaacatgggaaaggagggagaaaagagaaggggaaacgtarcatttttttctcaattgtgtaatttttctaattcacattttagaagtctaaatatattctagacatggagaaagtattttaattctggcagccattagta

SEQ ID NO: 190501 - DNA, 201 bp, Homo sapiens
tgtttaaactctgttttatcagagaccagaattgcaacctctgggggttttttttgttttttgtttgtttgtttgtttttgttttgcttcccatttgcttkgtaaatcttcctccatccctttattttgagcctatgtgtgtctttgcatgtgagataagtctcctgaatacagcacactgatgggtattgactctttatc

SEQ ID NO: 190502 - DNA, 201 bp, Homo sapiens
tccagaaaatgagcctcaagttttctttcaaacttccagagtgtggggaagttgactatcttctagaaggagagggggatgcagatctgggttttaactgatatatatatatatatatatacacacacacatatagagagagagttatatataattatatatataatttatattatatattatattatataaatataatat

SEQ ID NO: 190503 - DNA, 201 bp, Homo sapiens
attgatccctttaccattatgtaatagccttctttgtctcttttgatctttatttgtttaaactctgttttatcagagaccagaattgcaacctctggggkttttttttgttttttgtttgtttgtttgtttttgttttgcttcccatttgctttgtaaatcttcctccatccctttattttgagcctatgtgtgtctttg

SEQ ID NO: 190504 - DNA, 201 bp, Homo sapiens
ccagaaaatgagcctcaagttttctttcaaacttccagagtgtggggaagttgactatcttctagaaggagagggggatgcagatctgggttttaactgatatatatatatatatatatacacacacacatatagagagagagttatatataattatatatataatttatattatatattatattatataaatataatata

SEQ ID NO: 190505 - DNA, 201 bp, Homo sapiens
acctttttacatttatcgacaatctgtactttctggttgatgataaaatctgatcttcagtcatctttgtagctggtatttgactctcttatggtcaaccmccagccacaaaggaaaagcagaaaaagaggtggggattgagcatgagttggtacagtccacaggggtccagaatggagcaaggacagggcattccatcat

SEQ ID NO: 190506 - DNA, 201 bp, Homo sapiens
gctgctaacaagttaggtgcacttaaacgctgatgaaataaggggagaaggagtttttattattgggaatcaatgaaaagttttgggaaaaaatgagataygaacaaattttgaatattttatatcaatccagaatgaagaaaactgttttttttttaaatgtggaattgaggagttacctaagttctttgtaaggaaaca

SEQ ID NO: 190507 - DNA, 201 bp, Homo sapiens
tgaccctcacatgtttggcagattcttaattttttcttactggctttacttagggacgtgcttccttaacacaagagaaagagaagtttgcccatgaacaygaagaaatgaagaacctagaagccattgttcaagaaataaaaccaactgccctcataggtaagcattttctcctctcccttctcccctaccccttatttt

SEQ ID NO: 190508 - DNA, 201 bp, Homo sapiens
tctttctttccttccttccttcctttccttccttttctttctttctttctttctttttctttcttttcttccttccttcctttccttcctttctttctttytttctttctttctttctttctttctttctttctttctttctttctttctttctttcttttctctctctgtctctctctctctctctgtttttgaggtagg

SEQ ID NO: 190509 - DNA, 201 bp, Homo sapiens
tttgggaaaaaatgagatatgaacaaattttgaatattttatatcaatccagaatgaagaaaactgttttttttttaaatgtggaattgaggagttacctwagttctttgtaaggaaacagggattgacaagtgtaaacaataattttaaatgtagatagcacctatgaatcagggtttgtacttccagagaaaaatgcca

SEQ ID NO: 190510 - DNA, 201 bp, Homo sapiens
tttctttccttccttccttcctttccttccttttctttctttctttctttctttttctttcttttcttccttccttcctttccttcctttctttctttctttctttctttctttctttctttctttctttctttctttctttctttctttctttcttttctctctctgtctctctctctctctctgtttttgaggtagggt

SEQ ID NO: 190511 - DNA, 201 bp, Homo sapiens
tactgtagttgttggatcaattcttttaattttatgggcagcattttttgtttatttaccatcttgccaaaacatgggcagcaaaaggagcagttagtggmgacaaaatgtgaaatataagtagctccaaaagagaagtttagcagatattgcaagtaagaagttaattcatttaaggagaaacaaatactaaccctaagt

SEQ ID NO: 190512 - DNA, 201 bp, Homo sapiens
ttctttccttccttccttcctttccttccttttctttctttctttctttctttttctttcttttcttccttccttcctttccttcctttctttctttctttctttctttctttctttctttctttctttctttctttctttctttctttctttcttttctctctctgtctctctctctctctctgtttttgaggtagggtc

SEQ ID NO: 190513 - DNA, 201 bp, Homo sapiens
ccttgccaattctactcctgccaatgagtttgtttcctatgtgattctccacataactattttattttattttatttatttattattattattatttttatttttttttttttttgagctggaatcttgctttgtcgcccaggctggagtgcagtggtgtgatctaggctcactgcaacctctgcctcctgagttcaagcg

SEQ ID NO: 190514 - DNA, 201 bp, Homo sapiens
ttgtccattatgtgtaccgcccagtggatagtgtgggatctgtgcagtagtctatgctatagtttacttctcaaagcctttggtatgctgtttaaggtcaratctatgcacgtttagctcaaaagtgagtgtagaagttaatatacaactttatgggattgctctcatgagttcccttctttctgtgatctctgatatttt

SEQ ID NO: 190515 - DNA, 201 bp, Homo sapiens
gttgactttgggcctcagtatcctcatcagtaaattgaagggaaaggactaggtggtcctctgggattcttccagagcatacatttaggtaagctttatgrttttatttgtttttaaaaagaggaacacagttttttcatgctttgattccctttacatttagaggtttttttgaatatagttgttatagcattttggaac

SEQ ID NO: 190516 - DNA, 201 bp, Homo sapiens
gtccaaataaaatatattctcatagttaagtgtgttgtggtagtataatgattacatgaaataacctggaccttgctgtttgcaaagtaatttaaatgttyattttctgagttgctacttggaaattaagttgtggagtgatgtttctcattggtccaaggagcaacataaaatcctgatttatcagataatcctatagga

SEQ ID NO: 190517 - DNA, 201 bp, Homo sapiens
taaaagtcacagtgattcaatgcagtcagttattttacatgtgcaaattatgagtggtcttgtatggggacagttttgaataacatatagaaagtactatrtagtactgatatttttctgagcatcaaatatttagagaaaaaaatctgtggtgttttagaatataatataataaacatcaaataatttactagatcaaac

SEQ ID NO: 190518 - DNA, 201 bp, Homo sapiens
aacaaatttaaagtaaatattctgtgataatatttggaagctgagtgatgtctagccttacataactaggacaaatataaatctgtgagttcacggacttyaaaagtatcaactatacatcattttagaatactggttttgtttttctcatattcttagagtttaactcttatactactaattatgacctctagaaggtaa

SEQ ID NO: 190519 - DNA, 201 bp, Homo sapiens
tgcattctgttcttgctgttttataattaccccaaatgttctctgttacttctcctaatgattcttctttttttttcttttttctttttttttttttttttgcatacagcagagaatgcctgtgggtttaaaaattttttaactaatcttgatgaatcaattataatttataaaagtggagcataacagttaagagctcat

SEQ ID NO: 190520 - DNA, 201 bp, Homo sapiens
ttcaaacatgatatgtattgtttaaagcattagcttaaatgaaaaataatattttacattcgtaaagttctgtttatttaattcagtaatgaaattaattyggagttgttggcatactgccttcacaggtttctgtgactcatttgctgagaaagtgtgattcaagagaccagaatcatttttttctcatttgctaaaact

SEQ ID NO: 190521 - DNA, 201 bp, Homo sapiens
acaggaaactaatgtctaatatccttgggaactataaaatattcaatagtaatcaaaacataaaatgattctcttctgtctttccgttattctctacttcmaattacattttgtaaaatgtaaacaattgcacctgcaattgatggaaaaataccatcatgaaatcaaatgtgttttctgacttcatatatgtattgtagt

SEQ ID NO: 190522 - DNA, 201 bp, Homo sapiens
ctaatatgaaacaggaaactaatgtctaatatccttgggaactataaaatattcaatagtaatcaaaacataaaatgattctcttctgtctttccgttatwctctacttcaaattacattttgtaaaatgtaaacaattgcacctgcaattgatggaaaaataccatcatgaaatcaaatgtgttttctgacttcatatat

SEQ ID NO: 190523 - DNA, 201 bp, Homo sapiens
gtcagtttccaataagataatttataatgcttaatttatattaggaagatctcacattgttctcttctgtaaattatgcatgtatttgtaaatctaaaagraactttgatttttctctctgattaaggtgtataattataatcttaaataaaagtgaagttcaaagtagcttcatttaaaatattaatagacaaaacataa

SEQ ID NO: 190524 - DNA, 201 bp, Homo sapiens
tggaggttgcagtgagccaagattgtgccactgcactccagcctgggtgacagagtgagactctctctcttaaaaaaaaaaaaaaaaaagaaaagaaattrgaaaaaaaaattgtactgaacatgtacagactttttttttattgtcattgtttcctaggcaacacagtgtaacaatcatttacatcatattatgtattgt

SEQ ID NO: 190525 - DNA, 201 bp, Homo sapiens
attaggttgggcccatctgggtaatccaggctactattcccatctcaaggtttttaattacacctgcaaagtcccttttgccatgtaaggtaacatattcrtagttcgaaggattaggacatggacattttggggacaattattctgcatatcacaatccctttctcttttccttagtagaccacactagtctggtgactt

SEQ ID NO: 190526 - DNA, 201 bp, Homo sapiens
actaattatttctaagaatttgttaataccattctccaactttgttttaggcagctagattgtatccagggaaacccatttagatcagaaataacatttckttctaacttcaaaaaataagcatccactttaaaaatggaatctgaatttaaataaaaatcctaatttaggattcagttccattctttaactagcggaaag

SEQ ID NO: 190527 - DNA, 201 bp, Homo sapiens
tcagatgtggccgttctctctgattttgcttctgatacacacttagggcctgtgcagtttctctcctttacccttaaggggcagacttgactaaaattcaragatatctgtgttttctattgctgccaaaatacccaaataccgttccaaaatacccaaaacttaaagggtacacccccaacttaaagcaacacagattta

SEQ ID NO: 190528 - DNA, 201 bp, Homo sapiens
acttttttttttgaattcatagaaagtaatagattccatctcaaggctccactttctttgagttcttcaggttgcatacgtaaagagcaactcctcatccrttgaagttttatcatgagattgtagcaattcagtcacatcttcaggctgcacttctagttctcttgctatttctaccacgtctgcagttatgttcttctc

SEQ ID NO: 190529 - DNA, 201 bp, Homo sapiens
tttagaagcacccaacagtgtggcttttattctgattgttttcaaatgtgcttagttggctcaaatcaggcttcccagaacagaatcttagggtggggtttagaattagagcagcatttctccagaaagatttacgctgtcaaccttttataaattaggactctcactgggcttgctctaattctttaaaacatttgtatt

SEQ ID NO: 190530 - DNA, 201 bp, Homo sapiens
gggtgactgaaatgcttgtctcagacaactgagacctgtgcaaggggattgatccatcagcatgtgcccatgtctgcttgatggcgcttatgtgtgtacarctagctttacacctctcatgagagcccacagctctttaataaacaccccagtgccagccgtgagggctgtgccaataaccaccacttgaagctggagagt

SEQ ID NO: 190531 - DNA, 201 bp, Homo sapiens
gaagaacaaagttggaggactcacagttctttttttcaaaacttactgcaaagctgtagttatcaaaacggtgtgacagtggcaaaaagacaaacattgaygaatggaatagaatagagaacccagaaataaacccttgaatatctagtcattaatttttgacaatgatgccaataccattcaacaggggaaaggacagtc

SEQ ID NO: 190532 - DNA, 201 bp, Homo sapiens
aagagtgaaaaccttgtgtttttattcacttgtgtatcagaatttgccgttttttaattaagagttattttttaagagcaattttagattcacagcaaaaytgagagatagacatggagattttccacatacccactgacctcaaacaagcatagccttccccattgccaacatccccatcagagttgtacattttttaca

SEQ ID NO: 190533 - DNA, 201 bp, Homo sapiens
gcctgagtgcatttaaggctttctggcagtgctctccacccctcttcctcatacagcccttacgtatttttggtattttcttacacattttaggcttagtragtgtttaataaatgttagctgtttaggcattgtgctatacggatgctacttttcaggtttgaccgttctgtgtacctgaattttgtctttaatgataat

SEQ ID NO: 190534 - DNA, 201 bp, Homo sapiens
ttctgtgcttttatatttacatacatatgtgaatatatagaatacatttacttccatgtaaacagattttgtgtgtgtaacataaaaatattgtattataracattgttttgtaacttgctttgcaaattattttctatccatttagtcaagtatgtgagtgtataaaatgtacacacacaaataatacaaataagagcat

SEQ ID NO: 190535 - DNA, 201 bp, Homo sapiens
cactttgaactcctttccttaagcctttttctgtgcttttatatttacatacatatgtgaatatatagaatacatttacttccatgtaaacagattttgtrtgtgtaacataaaaatattgtattataaacattgttttgtaacttgctttgcaaattattttctatccatttagtcaagtatgtgagtgtataaaatgta

SEQ ID NO: 190536 - DNA, 201 bp, Homo sapiens
gttgtacacaatattataattaaggcattggtttacaatggcttaccttattttcttaaaaatatttatttttctcattataaaggtaacacatactctgwctgtcagccatcgatgcttaacaggccactcctgaaactcagtggctaagtcaacaatgttctttatatagctcatctgcaggtcagcatttaggccggt

SEQ ID NO: 190537 - DNA, 201 bp, Homo sapiens
cactagaatctggtggatggagacctagaatgctgctaaacatgcacagggcagccccaccaaataactgtccgtaccaaaatgtcaatactgttgaagcyggctgggcatgatggcttacagttgtaatcctagtgctttgggaggccaaggtgggaggattgcttgaggccaagagtttgagaccagcctgggcaacat

SEQ ID NO: 190538 - DNA, 201 bp, Homo sapiens
tcggcctcccaatgctggagtttctaaggaatatgatgaggatgtgctgtaacacacaggtctatatcaataactaggcagtacagaggaaagccagtgcygaacgtattggcacaaccttcactttctgcaagtagtccctaattttctgtatcatagctgtatatttttatgtgtttgggtctaagctataaatccact

SEQ ID NO: 190539 - DNA, 201 bp, Homo sapiens
aaatgccctggttcatctaaacaaaatatgtgactaatagctttttatatgaactatatacatttagtttacctaagtttattaataaatagtatctctgrgcatttttaattttatattttatacttaactatgaaagtatccagaaccagattccagtcactaactacctcttcattaatggatcaatggttttatcag

SEQ ID NO: 190540 - DNA, 201 bp, Homo sapiens
tgcaaatgaagacttggcccatgactagcctgattggttgtgggaggggatcaatcaaaggtacttcgaattttttcatctgccacgcagaaaaggggcargagggttgcaaagggagtggcttctggtccttttgttacttgggcatgggaagttggggttggggttttccttttgatttagttctaggaagtcagcatg

SEQ ID NO: 190541 - DNA, 201 bp, Homo sapiens
ttttgttctttgaacacatgcacatattccttttttaaaacaggcatatgggcaaatacattttttttctatatgcctccatgttgtttctctggatttcygccaggatgggatgtgccaattatgcacggaattgtttgcgtgtccatgggtgcttatataagtcattatctttggtgtatgacaaatacacaaactcct

SEQ ID NO: 190542 - DNA, 201 bp, Homo sapiens
gtatttgatattatcccagtttggcttagacaatagatatatatacaggtataaaatgcatatgcatacatgaaaacacataataaaactgggatcatgckaacatgctgttacctgcttttttcatattacagtatacttaaatatttttaatgtccttagatgcaattgtatttttagtaagtgaaatattttaagttg

SEQ ID NO: 190543 - DNA, 201 bp, Homo sapiens
ttttgttaaattgatttatttttacttaagaattgaatattagatgtatttacatatttttaaaagtatactcagtatttttcctatcaatactatctacsattattgcatagctgctcttttccaggtgttgtgttagacatcagtttataatcctcacagtaaccttgtgaactagacaatattatgctcattttaaag

SEQ ID NO: 190544 - DNA, 201 bp, Homo sapiens
ggagactatataaacagctatttttatttatgattaaataatatctgtgtggttactatttagtctgcgtaactaaatagctgggtttttttgttctttgwacacatgcacatattccttttttaaaacaggcatatgggcaaatacattttttttctatatgcctccatgttgtttctctggatttctgccaggatggga

SEQ ID NO: 190545 - DNA, 201 bp, Homo sapiens
aacagaaaatgagaaggtatatattattgccagtttcatgctgcagagttaactactgtgaacatttgttgcatttttataattctttccatttatattcrtagaacagcgtatttgatattatcccagtttggcttagacaatagatatatatacaggtataaaatgcatatgcatacatgaaaacacataataaaactg

SEQ ID NO: 190546 - DNA, 201 bp, Homo sapiens
aataaattcaaatttgaatattttacttgagtaacattttttttctcctgaaaataattttctacagtgttctactgtggttgaggttttcatgtttaaaycagatctctagcctcatgggactcatagtctctcatggaagacagataattgggcaactacaatggattatgccgagttcggtgctttgggagctcagag

SEQ ID NO: 190547 - DNA, 201 bp, Homo sapiens
aaatatatactaaattatttttaaaacaacttttagattttttcttacaaatttttgcaatgatgttgtgaggatgctttccttttgcaaaaggcttattmcataccttttccttttgcaaaatgtttagttctgtaatcatgacataatcaacatgagacatgttagaggattggatgttcaaaatgctgactttcctgg

SEQ ID NO: 190548 - DNA, 201 bp, Homo sapiens
ccatacttttcttcattctccctgggttgagttgttttcctgatcagtcccagtgcaagtacctggatatttcagtagaaggtgctgtatttactcacccsccttttgttgctctctgtgagtgccacgcactacagctgcttctgttccaccgtcttggcccccgatcccttgttttttttttttaagttatttattttt

SEQ ID NO: 190549 - DNA, 201 bp, Homo sapiens
ccttttgtccctgatccatttgggctgcccaaggtccacaggctggaccagctgagaaacccaaacagcaaaggtggtggcctgctccacccaccatgccygctgtcttagagagaaattagaactcttgtcagctgtagtacacagagggaggtggctggagaccccaagtgggaggacccaccctcgagggggatttgt

SEQ ID NO: 190550 - DNA, 201 bp, Homo sapiens
agtatccagaaccagattccagtcactaactacctcttcattaatggatcaatggttttatcagatttattagaaatttgtctatactgagcatgtaataygtactttgtgaaaataggtataaaactgggctcatcttatcagcataccatttacccaattatgggagtaaaaaaggaggcatgtgtatttttcccctaa

SEQ ID NO: 190551 - DNA, 201 bp, Homo sapiens
tgaatacattacaaattattaagttagcttttcagagttttaatatagaagttactagcactgacacactgattttgaaatgtttcaaaatgagtagataygattagatcctttaccttttaatatctagtttttccaaaaatgatagtaatatcttttgaagaactatgctttttcaaaagcaaaatcaactctgtataa

SEQ ID NO: 190552 - DNA, 201 bp, Homo sapiens
ttgggtagagagttctgtagatacctatcaggtctgcttgagctgtcactcagtcaggagaactgggatcagggtcccacttaaaggagtaatctggctgygttttggtggagcagctgtactttactgaggaccccttttgtccctgatccatttgggctgcccaaggtccacaggctggaccagctgagaaacccaaac

SEQ ID NO: 190553 - DNA, 201 bp, Homo sapiens
gactaactggacagtatggccagaatctagtcactgaaagactggacaataggataaaacaaggtacagagagacaaagtaaaagggagtaccacctggtwctgagactagaagtacagggatatcaagagaatgctactgagccagctcattcccaggcaaaggcttattatgtttcattcttcagcaccagcacaaagg

SEQ ID NO: 190554 - DNA, 201 bp, Homo sapiens
acttaatcccaaattgacaatttaaagccctttaaaattacttgttgcaaacaagaaacaatccacccagtctgtcatctcttttcagcttattagtagtrgaatctcttaggtggctctttaaaccgtgtgtattaaaagtcctaaagttgttcgtggagatttccagttgctagggaataccaacacttatttggtgtt

SEQ ID NO: 190555 - DNA, 201 bp, Homo sapiens
gcatatattctttaaaaaactgatatcctattcgtagtcttctcttatatatccttgaattatcttccatgatttttatattttatatacttataatagcrtattataacaacttaatgctacataatttacagtaatcgtttccaaattaaggaagccctatgtgtaaaatcacaaatttatgtaacataacacaggaac

SEQ ID NO: 190556 - DNA, 201 bp, Homo sapiens
ccactctcaccgctagttgcctggcccagctgccaatactgatggccaaaataagcaatttagtaaaaactggtggtaatggtgggtgtgtgtgtgtgggkggggtaataaaatacaatcttaccatttatcttttatgtaatgttttgagaaaactgtattttgggtaacttactaaaacttcttttagtcagtaaaact

SEQ ID NO: 190557 - DNA, 201 bp, Homo sapiens
gctggtctcaaactcctgacctcaggtgatctgcccacctcagcctcccaaagtgctggaattacaggtgtgagccaccacacctggcctgagccaccgcrcctgacctattttattaattttttcaaaaaaccagatcctagatttgttgatgttttgaagggttttttgtgttgctgcgtttttcagttcatctttgat

SEQ ID NO: 190558 - DNA, 201 bp, Homo sapiens
aggacatgacttcctaaagaaactggaataatgagtatttgccaactgtgtagatacccctcccctgagtgatcttctgttcataaaataatgctgcaatrtgtgattgcctaagccgactgtactttgtcttaaggtttttaaactaacttgtattataataaaagttagtcatatatgtatatataaatatataccata

SEQ ID NO: 190559 - DNA, 201 bp, Homo sapiens
agtaataaaatatacctttcagtaactctttcatgcagatattcaactatgcaatatcctgtattgagcttcctctctatggaaagccttgttccatattrtaagtgaaacctgtatcaaattaccagtgccttgggttgtttaaactgagatcacctaagtttgaggtacaactgctttcaccacttagcatgattcata

SEQ ID NO: 190560 - DNA, 201 bp, Homo sapiens
ttttgtttatccattcatttgttgatggatgtttgggttgcttctgccttttgcctattgtgtcctaagactgctataaatactgatgtgcaaatatttgrtagtgtcactgcttttttaattcagaagaacaaagttggaggactcacagttctttttttcaaaacttactgcaaagctgtagttatcaaaacggtgtga

SEQ ID NO: 190561 - DNA, 201 bp, Homo sapiens
atttatgaaatagtaacagattttattaaaggtgatgttaaattgttagaaatctaaagacaaaactgccatttctctttggtactatgataatttttcarcatattttaagcaataacctgctgttgattttaatagttttacctgccaacacagctggcatcctgctatgatatcattgctatacttttttatttaata

SEQ ID NO: 190562 - DNA, 201 bp, Homo sapiens
aaaactgaaacactataaccatctaacaataactccccattttctctccaacagtccctggcaagaacccattctactttctatctctatgaatttgactrttccttatgtgagtggaatcatttagtatttgtccttttgtgactgccttattcatttataataatgtcctcaaggtttattgatgtttcagcatgtgtc

SEQ ID NO: 190563 - DNA, 201 bp, Homo sapiens
tagcttaggctaatggcctccagctccatccatgttgatgcaaggacatgatctcattcctttttatgactacatgatattgcatggtgtatatatacaayattttctttttttttttttaatttccaacttttaagttcagggtacatgtgcagaatgtgcaggtttgttacataggtaaacatctgtcctggtggtttg

SEQ ID NO: 190564 - DNA, 201 bp, Homo sapiens
ttctaaggacagaaggtgtggaagatgcagcaccctgattgtgtctcaaaagtacaacttggctttgtagtagaccttttcaacagttttctaaaattctrtgacatggaagtcaacagtattaatagccaaatcacatgttacaatttcttttcttcatagaaacagattgagttgagatggagattaggaataagttta

SEQ ID NO: 190565 - DNA, 201 bp, Homo sapiens
cttgccatctttatttaaccatctggtgaaatgtttctcttccatactaaaatggctttattctttaccattttacttgttaaaacttttattttagtatyggggtacatgtgtaggtttgttatataggttgtgtgtcacggggatttggtgtacagattattggccacacaggtaataagcatagtaactgataggtag

SEQ ID NO: 190566 - DNA, 201 bp, Homo sapiens
ttagtagctttaaattgctcttgatattacaaagttcttttgttttccaaaggtgcacatgttggcagaactagatgaacatgtttaatatgccttttttwccccacagtgcttttttcacaaacattaatttatttctaaaaattatggtcaaatatatataacatttactgttttaaccatttttacagttcagtgtta

SEQ ID NO: 190567 - DNA, 201 bp, Homo sapiens
agtgtgtaacttgtctcttttgtttctgtagcagtgaattataggtgctgttaccatgtataagttttctctaagattctggttagctgatttaccgttgmagatttttcaggagaggagtgctgtcatggataagcagtctggcagaggatgtgtgacattgatgatgtcaggaaaatttttccctgtgtctctttcaga

SEQ ID NO: 190568 - DNA, 201 bp, Homo sapiens
gttgagaaaattttctcagtaatatatattttagaacatttattaattttattaataccctttcagcatctctcagtgttgaacttgaatttatgaattckagctaatttatatatctttagcactgaatatagctagggtatgaagtgattaatattggactacaaataatagtttctggctatgtaaataaacttggag

SEQ ID NO: 190569 - DNA, 201 bp, Homo sapiens
gatctttttaactgtggaagcctcactatccggtccccttggggctgtgttggtcatggggctctctatcattctcagagtcctgaagcattttttgcccrttgcccaggaatcaaggtatgttcatttatgtactttatttgatttctatttgatgtttccattttgattcattctatttaatatctatgcttatctaga

SEQ ID NO: 190570 - DNA, 201 bp, Homo sapiens
gtccaaggctacaatgaactgtgatcgcagcactgcactccctgggtgacagaatgagaccctttctcaaaaagaaaagaagagagaaagaaagaaagagygagagagaggggagagggaagaagggagaggggagagaggagaggagagaggaagggaaagacaagaccctgtctcaaaaagaaagaagggaagggaggg

SEQ ID NO: 190571 - DNA, 201 bp, Homo sapiens
tggtcttttcaatattctggcttctcagcttcttatccttttcttctctggtgatcttatcctccatcctacatcagcttttcattcttacagccatactsttgtcattagcaataacagtggtctctgcataatctcagtttgaagcatcctcaactctgattagcattttgaatctcactgtagctcactgcttctagt

SEQ ID NO: 190572 - DNA, 201 bp, Homo sapiens
ccatgccccgtctttctttctgaccctcagattgttaatgaagctgccaagtatcgctatcgctctggggatctttttaactgtggaagcctcactatccsgtccccttggggctgtgttggtcatggggctctctatcattctcagagtcctgaagcattttttgcccattgcccaggaatcaaggtatgttcatttatg

SEQ ID NO: 190573 - DNA, 201 bp, Homo sapiens
ttactactacataaagttgttgaaaggattaaaggagactatataaacagctatttttatttatgattaaataatatctgtgtggttactatttagtctgsgtaactaaatagctgggtttttttgttctttgaacacatgcacatattccttttttaaaacaggcatatgggcaaatacattttttttctatatgcctcc

SEQ ID NO: 190574 - DNA, 201 bp, Homo sapiens
taggaattgaaaatgatgaaatttaatgcaccataaacccagatgtattatatgcatatataattttttaaagagtttttaaaagctgtgctttgcagggrtgactgaaatgcttgtctcagacaactgagacctgtgcaaggggattgatccatcagcatgtgcccatgtctgcttgatggcgcttatgtgtgtacagct

SEQ ID NO: 190575 - DNA, 201 bp, Homo sapiens
ttgtggtaggccagctttccaagttactggttcaagagaacagtcattttataacaggtataaaatcaaagacgtttagtaaaatattttgcccttaattytccatggatagcttgtttatgaagagttcagtattcagggaagatggaaaaacagccctgtgtcagctaaagtaataaaaccgacttaatcccaaattga

SEQ ID NO: 190576 - DNA, 201 bp, Homo sapiens
gggggactaggaattgaaaatgatgaaatttaatgcaccataaacccagatgtattatatgcatatataattttttaaagagtttttaaaagctgtgcttygcaggggtgactgaaatgcttgtctcagacaactgagacctgtgcaaggggattgatccatcagcatgtgcccatgtctgcttgatggcgcttatgtgtg

SEQ ID NO: 190577 - DNA, 201 bp, Homo sapiens
cttgaggagttaggagcattgctatttgaaaaaataaaaatccagtttgatgatgttagtcattatgctgaaaggagtgattttaacaaataccaacagawcttcttgtggtaggccagctttccaagttactggttcaagagaacagtcattttataacaggtataaaatcaaagacgtttagtaaaatattttgccctt

SEQ ID NO: 190578 - DNA, 201 bp, Homo sapiens
tcttctctcacctccttgtcattcccagcctcaaagggtaaccactgtttacagttcaagtgtgtcttcacagcagatgtttttctatgctcgtgcagacrtatagatgtattcctgggaagagtgatgcttgcattcttgaggagttaggagcattgctatttgaaaaaataaaaatccagtttgatgatgttagtcatt

SEQ ID NO: 190579 - DNA, 201 bp, Homo sapiens
ttcagctaataggcaattattctattttgtgatgagaaggccctgacttagtattgagtagcaggaagaatcaaaaggtgttcagtcaactgacagtgcarttgcctttgaatttgtttgtatatcttctgtgactgagttaataaactgaactattcatggaataggacccagtgggattttcttatgctatggtatatt

SEQ ID NO: 190580 - DNA, 201 bp, Homo sapiens
tttacattcatttcaaagaccagagcagcctgacaatttctaagtggtagtatacttgcagtatccataagtaaaaatttaatagattgactttttccccyacatcccttctttttaaatttcttgtgtacatttgggaatagttaaaattgaatggatgaaaacacaaaattgtacatttaaagttttttagaagagttc

SEQ ID NO: 190581 - DNA, 201 bp, Homo sapiens
gtactttttctgtctcatactttctacagtctcatcctttctatagtctcatcattaattttataaaaatatttatctttgaaatatttacttgtgtaatratgactttgttattttaacaaaagagtaagtattcatgtattttggcctgtggttttttttgtttgtttctttgtttgtttgtttgttttactgaatagc

SEQ ID NO: 190582 - DNA, 201 bp, Homo sapiens
aggtagattttcttcttcttcttcttctttttttttttttttgagacggagtctcgctctgtcgcccaggctggagtgcagtggcgtgatcccggctcacygcaagctccgcctcccaggttcacgccattctcctgcctcagcctcccgagtagctgggactacaggcgcccgccaccacgcccggctaatttttttgta

SEQ ID NO: 190583 - DNA, 201 bp, Homo sapiens
ctaattttttatatttttagtagagacggggtttcaccatgttggccaggatggtctcgatctcttgaccttgtgttccacccgtcttggcctcccaaagygctggaattacaggcatgagccaccgcgcctggcctgtatatgtgatttctaaaaaatagatgcatgcatatgttaacattgaatagtcaatcactagat

SEQ ID NO: 190584 - DNA, 201 bp, Homo sapiens
gcaccaacatgcccagctaattttttatatttttagtagagacggggtttcaccatgttggccaggatggtctcgatctcttgaccttgtgttccacccgycttggcctcccaaagcgctggaattacaggcatgagccaccgcgcctggcctgtatatgtgatttctaaaaaatagatgcatgcatatgttaacattgaa

SEQ ID NO: 190585 - DNA, 201 bp, Homo sapiens
atagtctataatttgctgaagataagtctatggtagtaagtgattaattcagaagtagttacatcctgataaaatcaaatactttatgcttgtgaaaattygaacacagtataagaaagtagacatgtgagcaatactgtggtatttttgtacattcttcagttggaagattcttcacttgtagtaggcttttggcagatc

SEQ ID NO: 190586 - DNA, 201 bp, Homo sapiens
acatcacctggcacatagtgctcagcaagtattagctcttcttttcattttgtttacacctttattcttttcatcaaaatgctttcatccttgtgttactmtttgacaatactttgcattaagtttaatttaatgttaaattgtattcaaatagtacataccttaagtgataaagacaataacatatttatttaacatgtg

SEQ ID NO: 190587 - DNA, 201 bp, Homo sapiens
aaaagagaaaatattccatgaagttttgctgagacaaaattttggaataaaatgaaatatgagctatgctgtaaaacaaacattgcaatatgaacatatgkaatgaagcagctttattggaaaactcagatctgtggaggtggcagcactcatgtttgagattcacaaatgttagtgttagcttaagtgggataatgatgc

SEQ ID NO: 190588 - DNA, 201 bp, Homo sapiens
agcttgtttagtaaagttatacttaagtcatgtgaacttgaaaattgcttagacttatttacttaatttatgagcgctcctttaattataagccaatctgrtagacacaacatataacagtaagtgtacatacaaataaacacatctagacatgtatacacaaacacaaatgaagatccaatagctttttaccttggaact

SEQ ID NO: 190589 - DNA, 201 bp, Homo sapiens
atttttgcacattgattttgtatcttgaaactttgcagaatttgcttatcagcttaaggagattttgggctgagacgatggggttttctaaatatacaatmatctcatctgcaaacagggacaattttacttcctcttttcctaattgaaaaccctttatttgtttctcttgcctgattgcggctagaacttccaacacta

SEQ ID NO: 190590 - DNA, 201 bp, Homo sapiens
tttaccaaaatctctaggatgcagccaaagcagtgttaagagaaaagtttatagccctaaaaggctttcattaagaagttagaaaggtttcgaattaacartctaacttttcacctaaaggaactaggaagaaaaaaaaagaacaaccctaaagctagcagaggaaaataaataacaaaaattagagaacttaatgagatt

SEQ ID NO: 190591 - DNA, 201 bp, Homo sapiens
aacaaagattgcaaggcagattaatccaaagagaataccagttaacatcccatagtgccaaacccattcttaactgagaggtactttactgaaagggtcttctaactccctaaattttaggaaggactctaaccttcctaagttgagcctcaaaccaagtttgctcaagcatccttgccttttattaagaggggcctttaa

SEQ ID NO: 190592 - DNA, 201 bp, Homo sapiens
gatttcctggtttgtactaatataatgttcaaattttcttatttggcattatttatctcctaattactggcacaatatggagcaaagctatgaggctcagmggttttctagtgtgtaacttgtctcttttgtttctgtagcagtgaattataggtgctgttaccatgtataagttttctctaagattctggttagctgatt

SEQ ID NO: 190593 - DNA, 201 bp, Homo sapiens
tcctcaggtaataacctgggatttgtacacacatcagtcaggcaaagagctgtggacttggggtgtgagtggccagagacccagcattatctgcaaaagcyagactatgagagagatgagaacacagttaagtaactgatagaagttcagtctggctggggcatggaggaattacaaacatttattatgaaagtaatacat

SEQ ID NO: 190594 - DNA, 201 bp, Homo sapiens
ctattacccaattccaaagtcagttccacattttcacatagcatctcactttactggtgttacaggaagtcagggaccccgaatggagggaccggctggakctgcggcagaggaacataaattgtgaagatttcatggacatttatcggttctcaaataatacttttataatttcttatgcctatctttactttaatctct

SEQ ID NO: 190595 - DNA, 201 bp, Homo sapiens
gaaaatgagggttttttttcccccagagtgaagcttttttaattcatcttgatgaattctatagtaaccaaaatttatattataatctcttttaattagcygtgttttatcagttgtttttgtcttatgactcattagatcgctgagttttattcgttgtgtgtcaactaaaccccaatatatatcttttggaacgcctga

SEQ ID NO: 190596 - DNA, 201 bp, Homo sapiens
ccactttaaaaatggaatctgaatttaaataaaaatcctaatttaggattcagttccattctttaactagcggaaagaaatcttagcaaaaaaaaaaaccmaaaaaaacaaaaaaaaacaaatttaccagattgccagtaatttgcattaaggaggaagagatggatttttttttaagtcagcagacattgaagatagttc

SEQ ID NO: 190597 - DNA, 201 bp, Homo sapiens
tttgtagctgtgagttctattcccactaatttactgtttttgtcaacattactgatcttctagttgtttaaattcagctcttattcctgctatggtatgtkatactggctgctatccctatgaaatcttttcctcttaagtttctgcaatacactgtctcctggttttctttctagctctttaaccgttctttttatctcc

SEQ ID NO: 190598 - DNA, 201 bp, Homo sapiens
tctgtatttagcggaagaagtccctatagaaccatacaacatcccactgtcccaggccgaagtcatacaggaagggagtgatgttactctagttgcctggrgcactcaggtgagtagcattgatcccaactgttaaaacctacgttgtgcttggaagctctcattttaaatcctgatacatgaaaaattgaaaacgatgtt

SEQ ID NO: 190599 - DNA, 201 bp, Homo sapiens
tgaagaagaggtgtctggtttacttagcaacctctgcaaatcagtttcagactgcgttccattttaccttctccaggactgtagtctattagctagtccakctctctcctgcatcttcagttttccatttcttgttgctcttatttaaaaagtatgtttctcttcactatttaaagattcctttctccttaaatacgatta

SEQ ID NO: 190600 - DNA, 201 bp, Homo sapiens
ttaagcatcctgactctgtctgcaggaggaatgtttcttgaacctagaggctcctatatcaagagtatgtggttatgacacaccatttcctcacatttttkaaccattctacatcccagacaaatggaagtgttatgatgcccttcgaaaaatgatcaactattgaccatataggtaggtatgcatcttgagaaagctact

SEQ ID NO: 190601 - DNA, 201 bp, Homo sapiens
ttcataaaaccgtattcattttatagtcataaaatttcttcacatgtaccttcacatgtatcctttccctattatggaacaacgaattgtttctaaattcyggttattttaaaaaatgttgaagaaaacatctctgcttgtatatatatgtgtatgtagaagaagaaaattacgcttgtgttctttattgtaaatattcta

SEQ ID NO: 190602 - DNA, 201 bp, Homo sapiens
tggctgagtaagtaacacatagcattgggaagcttaggggcagggatggaggggtagggagcattaatggttaagtgagcattttgtttaaggggacagarcatatctgtgtgtatataaatagatgtcacattttaaaattctagtaaacacagagctgttttctcaaaacatagatttgctaagccctcattgagggat

SEQ ID NO: 190603 - DNA, 201 bp, Homo sapiens
aatttaagagattagtgataatggagttaggactgtatagcaatttttctaaatcaaatttaggcctcttaatgtctgagaactttaaaaagatcaagaayataaatgctattccttggttcagtgattttttttttttaatgtaatgttgatacaggatttttgctcttttagctcagctaggtccaggttcttgtctcc

SEQ ID NO: 190604 - DNA, 201 bp, Homo sapiens
atgttcacttacatagttttcatgctacttaatgggaatatgtcagccaccatagtatgcaattaaaatttaagagattagtgataatggagttaggactrtatagcaatttttctaaatcaaatttaggcctcttaatgtctgagaactttaaaaagatcaagaacataaatgctattccttggttcagtgatttttttt

SEQ ID NO: 190605 - DNA, 201 bp, Homo sapiens
tatgtcaggccaaagggaggtgaactggtggggagtgagtagattagacccacttgttgttgatccaactgttaaaaacattgttctctttcccaccaagytcctaaattcttatttacttgcctaaacaggaagcttgcatagagtcagagagatcccaagctggtaatggaataatgatgaccatatactttgtcttct

SEQ ID NO: 190606 - DNA, 201 bp, Homo sapiens
tcaattgtaagcatgctcatttgggggggactaggaattgaaaatgatgaaatttaatgcaccataaacccagatgtattatatgcatatataattttttraagagtttttaaaagctgtgctttgcaggggtgactgaaatgcttgtctcagacaactgagacctgtgcaaggggattgatccatcagcatgtgcccatg

SEQ ID NO: 190607 - DNA, 201 bp, Homo sapiens
tgactgctttggagggagaatagacacttctcatcccttttggcatttatgaagtaaccaaagtacctactgctgaagtgattcacttgagcttaattagrtttgctacataattagcatttgaagaaacctaaagaaaatccttgggggttggttatttgttatgtcaattgtaagcatgctcatttgggggggactagg

SEQ ID NO: 190608 - DNA, 201 bp, Homo sapiens
aacataacacaggaacttttattcatataagaaaatcattattcactttactgttttcctttatttcagcatcatttattacaaaattaatactgttttcraaaaaccaaaacaatatattataaagcacaacgtggagtcttctctcacctccttgtcattcccagcctcaaagggtaaccactgtttacagttcaagtg

SEQ ID NO: 190609 - DNA, 201 bp, Homo sapiens
gaagttgactgacaggccacttttctatagtgggaaataggcgccttgtgtgcgcggagggatttccagccccccactccggaaccagcaattagcgtttrggcgtcctgcaccccaccagggggcagcaccggacactgcctttcctagaggcctgagtgcatttaaggctttctggcagtgctctccacccctcttcct

SEQ ID NO: 190610 - DNA, 201 bp, Homo sapiens; identical to SEQ ID NO: 32963

SEQ ID NO: 190611 - DNA, 201 bp, Homo sapiens; identical to SEQ ID NO: 32964

SEQ ID NO: 190612 - DNA, 201 bp, Homo sapiens
gcaagcaaaagagaacatgtgtagggaaactcctctttataaaaccatcagatcgcgtgagacttattcactgtcacgtgaacagcctggggaagacccayccccatgattcagttacctcccaccgggtccctcccatgacgtgggaattatggaacctacaattcaagatgagatttgagtgggggcacagccaaacca

SEQ ID NO: 190613 - DNA, 201 bp, Homo sapiens
agataagacttcttaaaagctgagccctgccatgggtttgtaccctcaaggacctaggagttgggtaaattcctctccttttatggtctgaagataacttrgggctcctgggcctgtcatacagtgacattttgttacttaccacaggtcaggaaccctgtacaggaactgtgtagacaaggtatgaggccagttttccca

SEQ ID NO: 190614 - DNA, 201 bp, Homo sapiens
ggaactctgttccatgaaaggaatcttagataagacttcttaaaagctgagccctgccatgggtttgtaccctcaaggacctaggagttgggtaaattccyctccttttatggtctgaagataacttagggctcctgggcctgtcatacagtgacattttgttacttaccacaggtcaggaaccctgtacaggaactgtgt

SEQ ID NO: 190615 - DNA, 201 bp, Homo sapiens
catttccaaaagattactaaagtcatatgaagtaaatgacattacacattttacttttctgacaaactatttgatttaagcacttactatttttaaactartcaaagttttttcatatataaacatcgcacacacacacaccatgtacaaatacatagagagacagaaggtccagtagttgtaagatttttcatttccagt

SEQ ID NO: 190616 - DNA, 201 bp, Homo sapiens
gacatagtggtaagaccaagttgttttattatacttggcctatttgtataaagtgcagcaagaataattatttttcacataagctgtttttaaattggctytgatggaactctgttccatgaaaggaatcttagataagacttcttaaaagctgagccctgccatgggtttgtaccctcaaggacctaggagttgggtaaa

SEQ ID NO: 190617 - DNA, 201 bp, Homo sapiens
ccatcccttttgtttttttttctgagtagcagccagagatcactggttggttcacaggagtaagcagggttagtctaaattgtaggaaaaacctcaaaaayaactgatgagactagaatttaataacaagtgtaccacagttcttgaaacataatttttttcgtctcttcagttttatatttttactaaagacatagtggt

SEQ ID NO: 190618 - DNA, 201 bp, Homo sapiens
ccaataacttttgtcttgtgacttctgttttctttgcctagaaggaatggaagaaatgagaggaaactgatctcatttgttttactctctcagtggctagytattatttccctgcagcctgaacattggttttgttacagagctttgtggactgccttcttgtttcatgcatagactatgccaaccttggatcgcagtgga

SEQ ID NO: 190619 - DNA, 201 bp, Homo sapiens
agcactaaaaagaaaaaaaaaaagtacaaattcgtacggaacctactgtaactctgattaaagagatcctgtattccccaatgaccgaccccctagctccyccaaaaaggaattaaacggctaagctttttataaatgtttttaaaatccttattggacttgacataaacatgcagataattctactagtctccttttcat

SEQ ID NO: 190620 - DNA, 201 bp, Homo sapiens
aaacaatttctccttagagtaaacccaattttaatttttctttttagaacaaatgtcttattttgaaatgctggttaggctatttgaagagatttgctaartacttaaacattcatttgtatgacttttcttactacttgccttgttactcaaaattgggacaaaatattttgtttattgatgaagacacatttagttaat

SEQ ID NO: 190621 - DNA, 201 bp, Homo sapiens
ggttacttactcagaattgtcatgtgggatgattttaaaaccaatgccacctcaccgcataagatttggtttttctgcaggttagtgtctgtcttctacakgtatggcatattttgattcattgctcttattacagaagtgaaagcagcattgtattggggtattcagattatttaatttttctgtattaatcagtaatga

SEQ ID NO: 190622 - DNA, 201 bp, Homo sapiens
tgatttttgaatagaggtgcagtttcactgagatggggaatatcattgaagaacaggtgtatgcgtgtgtgtgtgtgtgtgtgtgtataaggtaatgagtrcattttagatttgtatctgaaatggggatgaaaatgtgtttctggagctcaggagagaatctaaggtgtaggaaatgggtaaggattcattctcttatac

SEQ ID NO: 190623 - DNA, 201 bp, Homo sapiens
atctacccattccatcctgtaactccttgactttatctcctactactctttcttttactctagaccaggcaatctggactccttgcccttcctctgatatmttaaacattttcttaccccatggtttttgtacttgatggtcgctctgcccagaatatttattctctcagatatatgcatggtacacatcctcatttattt

SEQ ID NO: 190624 - DNA, 201 bp, Homo sapiens
tagcccacacttcccctcttccgcatgcgcacaaggagcagaagccgaccagctcgtcacgtcgccttccccgcccctaaatttccagttccgattggtcygtttcatgggaccgcccctctggcccgaccaatgtggaagcctcctcgggtgctccgccctccccgcaggcggcgtgcggctgcatagcctgagaatccc

SEQ ID NO: 190625 - DNA, 201 bp, Homo sapiens
taactcatgaaggataagtatgaacttggtagtgaaggtaggtgggtatttcaggcagaatgaactatatgaataaggaattaggcaaaggatttgctatkgaaggaattaaagtggttttgtgtgtttaaagactagcatgtgaggctgtagcgtaaggtaagcgttgacaagtaggtaagaattagatcctgaagaatc

SEQ ID NO: 190626 - DNA, 201 bp, Homo sapiens
ggttgtggttcttagtgtatatttggcccacttattggaggaaatttaggtgaggaaaggaatagctgaggacctcctgaattagtctacaggcctaaacmtgtgccttttcatgggacttgatgtttttccattactgtatccattcctttacaccacaggtgtggcctgtcatagcagcttgggaaaactaatataacc

SEQ ID NO: 190627 - DNA, 201 bp, Homo sapiens
ttttagagacacttagagtttattagaagtcgatgataaacaggtagttatagtacatgttagaatggaatattcagagaactataggattataaaatacktgctcatttaacccatatgtggcagctaagttaactcatgaaggataagtatgaacttggtagtgaaggtaggtgggtatttcaggcagaatgaactata

SEQ ID NO: 190628 - DNA, 201 bp, Homo sapiens
ttagaatagtttatggagaaggattttttcttataaacttattactactaaatttccaagcactttgtttaaagatatcaatctgaaaagaggggaaaagrtcctatagggtcttgaatttttaccattctggaaaacatgtttcattaaaattgccgtgctggtaaattgtcatcagagaaaactatcagattagtaatt

SEQ ID NO: 190629 - DNA, 201 bp, Homo sapiens
gccgataacttctccccatgcagctgttgtcactcttgggaggtgcttcctagaatgtgtgctgagaaggatgctataattagtgatgtctgccttgggtrcagaatatcagtagtggttaggagcagtacacattttccatccttaagtatctggatgggaagagatctagagaacagaatatcatatgtctcctgactc

SEQ ID NO: 190630 - DNA, 201 bp, Homo sapiens
ctcttgtgaagtttgctttctgtaagtgtgcttttaaagtttgatctctgtaagttattggtagactgcaatttaatacaacatttttttagattggaatrgaattagaaagataatctaatccagtgtctcttggtcttaaataatatgtggtcttatgttaatggaaaaatgtctctcaggccccaagaatacattagt

SEQ ID NO: 190631 - DNA, 201 bp, Homo sapiens
ggtttgagtggtattcattaaggtgttcataaaattttatgttctaaagtcactatttacctagtagatatggtaacttatttttgtcatggctactggcyatatctgagagtttaacatatgctagctgaaactgctgcatactttttaaattctgaactataattgcctagaatgaatgaaatcttttatttcaataga

SEQ ID NO: 190632 - DNA, 201 bp, Homo sapiens
ccttcactgcattgctcgggagaaactatttttgatattttggaatgaaagtttctggactgtttatacatgttggctcgatgtacatgttgaaaagatamgttgcttggtgtgctcactgctgtggtggttgttttttacaaaatataagattatatcgtcctgcaacttactcattttaccagttaatttgtcatggct

SEQ ID NO: 190633 - DNA, 201 bp, Homo sapiens
ctttcagtgatctaaacatacataaagcaaaaagtaaaagtctctttcctacacttccttcactgcattgctcgggagaaactatttttgatattttggartgaaagtttctggactgtttatacatgttggctcgatgtacatgttgaaaagatacgttgcttggtgtgctcactgctgtggtggttgttttttacaaaa

SEQ ID NO: 190634 - DNA, 201 bp, Homo sapiens
atgagccaatctgcagtcggttgttctgaattctacatcactcacagcgcaggttgatgtgtgaacactgtatttacaggaccaaaactgcacatttgctytgcagctgtgtttaacagttatcagtttggcacacagcatgactgctttggagggagaatagacacttctcatcccttttggcatttatgaagtaaccaa

SEQ ID NO: 190635 - DNA, 201 bp, Homo sapiens
aataccaagaacatccaggatagattctatcctaacctaaacaagcttatattatgaaagtggtgttattttttaacagatcataaattagacaatatagktcatctagggccgataacttctccccatgcagctgttgtcactcttgggaggtgcttcctagaatgtgtgctgagaaggatgctataattagtgatgtct

SEQ ID NO: 190636 - DNA, 201 bp, Homo sapiens
tctcataaaaatgagatattttcttgctatacctctgatatcccctgtcccctgaaaaaatatgaaattagtacagagccagtaaaaaataccaagaacayccaggatagattctatcctaacctaaacaagcttatattatgaaagtggtgttattttttaacagatcataaattagacaatatagttcatctagggccg

SEQ ID NO: 190637 - DNA, 201 bp, Homo sapiens
gagatgactcccctgcactccaatgtgtgtgacagagtgagaccctatctcactaaataaataaatggatgaatgagagaaagacattttaaaccaatatrttaagaatcacactttaggataaccttgatattgtaataatttatgattctctaacctgtgaaaattgtaaattgttaagcaataaagagaaaatacact

SEQ ID NO: 190638 - DNA, 201 bp, Homo sapiens
aaaacagagaaatttgtgctcctaatatttgcatagtcataaaattgcaaaagttatattggttttacaattttaaattgataggcaattatgatttttgyaaatgacattctaataaaaattatcaacatttggttatggtagcgatggtgaagaaacacagtgaaagcaaatattttcttatgtcacttatacatgtac

SEQ ID NO: 190639 - DNA, 201 bp, Homo sapiens
agatagttcagtgaagttaagtaatagagatctcagattttaatttagtcaagattatgattttacatagaagcactgttgaaataggcttgataataatrttttaagtgttatacaaatctggatgaaattatattatttactgtcttactcattggttcaactgtgttttaaaagtgagagaccttatatcaatgagtg

SEQ ID NO: 190640 - DNA, 201 bp, Homo sapiens
attttaaaatttatttcagtttctataggtaatatattgaggttctgacaattttatattaatgtatgattttattctgacacagctgttgaatttgaacyactaattatttctaagaatttgttaataccattctccaactttgttttaggcagctagattgtatccagggaaacccatttagatcagaaataacatttc

SEQ ID NO: 190641 - DNA, 201 bp, Homo sapiens
gcaaaaaaaaaaaccaaaaaaaacaaaaaaaaacaaatttaccagattgccagtaatttgcattaaggaggaagagatggatttttttttaagtcagcagrcattgaagatagttcagtgaagttaagtaatagagatctcagattttaatttagtcaagattatgattttacatagaagcactgttgaaataggcttgat

SEQ ID NO: 190642 - DNA, 201 bp, Homo sapiens
ctggaaggaggctcccccaaggcccaggagcagacctggtgagggggccatgtctctcccccgcccactgcggagcatgcctgggaacatgaggaagaacraaagagcctcatggtggggtattaacttacctaattaatggccattactcctaagcaccatctaatggattgcattgagactacagcaccaaaaatttat

SEQ ID NO: 190643 - DNA, 201 bp, Homo sapiens
gtgttgcagcacaattcataatagccaagatatggaatcaacctaagggctcatcagtgggtgaatgaatgaatgaagacaatgttttatatatatatatwttagactattattcagccatagaaaagaatgaaatcctgtcatttgcagtaacatggccggaaagtcaggccgaggaagacaaatacatgttctcattca

SEQ ID NO: 190644 - DNA, 201 bp, Homo sapiens
aaaaccagttttagaactcaagtggcagctcatgccctgcatgcaggcaaacggctaggaattaatcagaaagttccacccgtgtccatccttcctcttayttgctcatcttcccagcaagcactaaaaagaaaaaaaaaaagtacaaattcgtacggaacctactgtaactctgattaaagagatcctgtattccccaat

SEQ ID NO: 190645 - DNA, 201 bp, Homo sapiens
aattaaatatgattttcatctgtgattcttctagtgggaaatcaagacagactaaaagactaaaatccttgtattgtttgtcttgtttctaggatttctgrataatccaaaaatacgtaaaaataggacataatgatattgaggaacttttttagcagatgtactaattgtgtatgaattcatatattttgaagagacgaa

SEQ ID NO: 190646 - DNA, 201 bp, Homo sapiens
aagatagagtttttaataccccattgtgtgaacaaggaattgttggatttggaatcggaattgcggtcactggagctactgccattgcggaaattcagttygcagattatattttccctgcatttgatcaggtaagtgaatgaacatttctaaggttgttcattcattgaaatattcaagtattgccgctacccttccacc

SEQ ID NO: 190647 - DNA, 201 bp, Homo sapiens
ttggaaaattgtttggcagtatctacctgaaccctataacctagcaattccaatcctgtatgtgtatatgtgaagaaatatacaaaaaaaaaaaaaaaaaaccagaagcgttcataggaacattacttctagtagccccacactgtaaactgccgaagtactcatcaactagagaatggatcaataataagtataatattg

SEQ ID NO: 190648 - DNA, 201 bp, Homo sapiens
tttggaaaattgtttggcagtatctacctgaaccctataacctagcaattccaatcctgtatgtgtatatgtgaagaaatatacaaaaaaaaaaaaaaaaaaccagaagcgttcataggaacattacttctagtagccccacactgtaaactgccgaagtactcatcaactagagaatggatcaataataagtataatatt

SEQ ID NO: 190649 - DNA, 201 bp, Homo sapiens
ttttggaaaattgtttggcagtatctacctgaaccctataacctagcaattccaatcctgtatgtgtatatgtgaagaaatatacaaaaaaaaaaaaaaaaaaccagaagcgttcataggaacattacttctagtagccccacactgtaaactgccgaagtactcatcaactagagaatggatcaataataagtataatat

SEQ ID NO: 190650 - DNA, 201 bp, Homo sapiens
attgttatgcttaggaacatagagaaaataaggaacaaaagaggtaagagggtggagaattaccctagaaagtttgtgtgtgtgtgtgtgtgtgtgtgtgkacatgtatgtatatggatcaagtaaactttgtggagccatcaaaaaaatatatatctgacagtaagaactcaatgaataggcttataacatatcggactc

SEQ ID NO: 190651 - DNA, 201 bp, Homo sapiens
ctcacacctgtaatcctagcagtttgggaggctgaggctaggggatcacttgagcccaggagtttgagaccagcctgggcaacataagaagacctcatttytgaaaaaaaaaaaaaaaaaaaaaaaaaaaaggaagaaaggggaaggaagggaaggaaagggaagaaaaaaacgaaaagaaaaggaacaaaggaaggcgtc

SEQ ID NO: 190652 - DNA, 201 bp, Homo sapiens
tagaaaattcttgagttttgaagtgcttaagagacagagacctaccctgtgccatgggtgtgtgtgtgtgtgtgtgtgtgtgtgtgtgtgtgtgtgtgtgtaggtggattggcttaagagaatcagctgtgtgagttcaaagccctgaaatgagtggcatgttgacaccgatgacctatagctgctttttagttggctaca

SEQ ID NO: 190653 - DNA, 201 bp, Homo sapiens
atagtaattcatattcttaaaattgttataatctctaaattaatacataaattattgatttaatgttaaattttgattttaaaatttatttcagtttctayaggtaatatattgaggttctgacaattttatattaatgtatgattttattctgacacagctgttgaatttgaaccactaattatttctaagaatttgtta

SEQ ID NO: 190654 - DNA, 201 bp, Homo sapiens
tcccccttttcttgtcttttttatgtttagcaagtcctttgcattcttttaaacatacactaaaagaaatttagcatatttaaagagaagggaaaaagcagtaaaataaaactgttttatcaaaagattacaatttgtaaaatagcaaatatttcagtcatcattttttatatgtatatatatatactttttattttgtct

SEQ ID NO: 190655 - DNA, 201 bp, Homo sapiens
ctcccccttttcttgtcttttttatgtttagcaagtcctttgcattcttttaaacatacactaaaagaaatttagcatatttaaagagaagggaaaaagcagtaaaataaaactgttttatcaaaagattacaatttgtaaaatagcaaatatttcagtcatcattttttatatgtatatatatatactttttattttgtc

SEQ ID NO: 190656 - DNA, 201 bp, Homo sapiens
caggattcctttgtttctgaagctagtcctaagatatcacaaaaacattattatgttttttgagaagattataactacaaaataacatgtatttttaaatstttggcactaattcaagggctttccctttatttttatttattttagacttactagaatactttcagtgatctaaacatacataaagcaaaaagtaaaagt

SEQ ID NO: 190657 - DNA, 201 bp, Homo sapiens
gctacttcataattaaatcattctgggatgtgatcaagtatatacttctgaactaccttaaaaatggattgtgctaagaatgcaatagcataaataaattwaaagagaacatgcataataaagttaaacgatttgttttaatggagtttttatctagttaacttttcttgagtgtctacaatgttcagagcactgtgctag

SEQ ID NO: 190658 - DNA, 201 bp, Homo sapiens
gcaggcagaatagttgctgtacttggtgtaggtaaggttcagttgtctgtaagaaaacaatcttgctatagattttgaggaagaaataaaataaaaaatayagatagatgataaatgttttgcttttcaaatgtcgatgttgtactttcaggaatatggaagctttatggtttgcctatctgtatcagttctcctagaata

SEQ ID NO: 190659 - DNA, 201 bp, Homo sapiens
acttttttatttattagaagagcataagcatatttacagtaaggctttagttatgtggtacttccaaatgcctcctgccattgccaactccaaagaaaaakcctggaagagccaggaagggtcttctaaggacagaaggtgtggaagatgcagcaccctgattgtgtctcaaaagtacaacttggctttgtagtagacctt

SEQ ID NO: 190660 - DNA, 201 bp, Homo sapiens
taactggctgacaatcttggttttggttagggtcactttcttcttattcacggtatgctgggagtacaagggatgatgtcagtttctaccctttagaactsttatgatggccagacatagtatttccctctgttgtcaacacttgagaaaaatttgccaagtggggacttacgaattgaaaagcagaggatattagtaatt

SEQ ID NO: 190661 - DNA, 201 bp, Homo sapiens
aacttagatacataattaaaaccctcttatcttggttttaatgaaagcacgtaagttatatattttgtttttctctgtgccatcttagttatatacactamaaaagatatgtgtaatttttgctgaaatatcctttgagttttactccagcacttttttgagtcatacccaaaaacccaaaagattttaagccttgcccat

SEQ ID NO: 190662 - DNA, 201 bp, Homo sapiens
gggcctgcagagattagacagatgaaacaaaattagtgaagcagtatgcaacctatggtagctgtggaagggatttaaaggcagtatttctaaagtgcttygtccttttaagtggaatttgcccatgaccaaatatggtatttgggtatttagtatgatgccctggctctaaaacagtgtttcttaaatttttctgaattt

SEQ ID NO: 190663 - DNA, 201 bp, Homo sapiens
ttatactggtaaatatccacaagatatttgggaaggccggaatggaagtctgcctgattcggtgtataattttgtgggcaaagataacataacagaaagtrcatcttgatatttggaaaaaaaagatcattttgccaaagatgtttccttaaagtataggttgcaaactcttggacagaatctggcctggggagacatgtt

SEQ ID NO: 190664 - DNA, 201 bp, Homo sapiens
attatggtttcagtgtcactgatgcagtcagttgtgttccgatttcagaattacggttggcagtcccagggtaaagtgatacgctttggcatcataaagtwgtaggaccggggagcaataacattgaaagctatgtcaagattccaccctcatggaggtttcctggttacatttgaggctatggtttaaaatacatgaact

SEQ ID NO: 190665 - DNA, 201 bp, Homo sapiens
catacattgaacaaatgtttttaaaattccactatgtacaagggattgttctaggcactggagattattgggtgagaatttttttttttttttttttttttgagatggagttttgctcttgttgccaaggctggaatgcaatggcacgatcttggctcaccgcaacctccgcctcccaggttcaagcagttctcctgcctc

SEQ ID NO: 190666 - DNA, 201 bp, Homo sapiens
caggtatgaaatataacttgaaatgtgtgcttcttttaagaaactccaagagctacgtggaagcatgtgttgttttcttgtcagttttcgttctcatatgmcatttgctcctaaaatacccaattttttttctgcccagacctacacacccaacccactttagctgtaccatccttagattactatgtcacaaattttacc

SEQ ID NO: 190667 - DNA, 201 bp, Homo sapiens
agaaacaactacaggtatgaaatataacttgaaatgtgtgcttcttttaagaaactccaagagctacgtggaagcatgtgttgttttcttgtcagttttcsttctcatatgccatttgctcctaaaatacccaattttttttctgcccagacctacacacccaacccactttagctgtaccatccttagattactatgtca

SEQ ID NO: 190668 - DNA, 201 bp, Homo sapiens
gtcctggcatggggagtggtatcatattgttgtttctaaaagtggtcctgaaacagttcagtattgaaggcagtgtagatatacttaatattaatctcccyacttgattttgttaaaaaacctgacctttgacattttctagattagatattggactctttgatggttgcagcttattgagaatttggagatttgtcttga

SEQ ID NO: 190669 - DNA, 201 bp, Homo sapiens
atctgtgtatgtgatacttggagatgtttttgcatacctaaaatgagacaccacttaagagatttagctgttgatacttgaaccagtgaagacaaagctgkcaaatacctccctaaataggaaggatatgtatttaatttggaaaatgtcaatttatttgttaccctacacagtaagaattagatatctagaaacaactac

SEQ ID NO: 190670 - DNA, 201 bp, Homo sapiens
ttgaaaaaaatctatttttgtgattctcttgtgaacgagattttctgagtgcattaggttgttctggggttggagctacttctgtaaccattgttttcaayttaattgattacacaataaatgttagagctaccaacaggtgttctctttgacattttaagtatcagtcagaatgtaatgaccttaagccagtttttctca

SEQ ID NO: 190671 - DNA, 201 bp, Homo sapiens
taaatgagagggaacaagtttaatttattgatgaagcactctgatgattttttttacccttatagtaaaaaaaaaaaaaaaaaacaccttcaaacttacaycctaccataggttcatcatcaaatctcaagtcagaatcaggttcaaatcagaattcaaaaccagttttagaactcaagtggcagctcatgccctgcatgc

SEQ ID NO: 190672 - DNA, 201 bp, Homo sapiens
tttcttcctgtttacaccgcaatttagagtattaactggcctgtaaaagattctgtaaagaaaaatgctgtatcagttagagccttttaaaaagtgaaaayatctttcggggatcttcctcccatcaggcaagttgttggactagggtcacttctaaggtttcattcctatgctgtgattttaggattccgaaacagtgaa

SEQ ID NO: 190673 - DNA, 201 bp, Homo sapiens
gagagtgtacgtgtccaggaatttatccatttcttctagattttctagtttatttgcgtagaggtgtttgtagtaatctctgacggtagtttgtatttctrtgggatcggtggtgatatcccctttatcatttttaatgcgtctattcgattcttctctcttttcttctttattagtcttgctagcggtctatcaattttg

SEQ ID NO: 190674 - DNA, 201 bp, Homo sapiens
tcctgatcagtcccagtgcaagtacctggatatttcagtagaaggtgctgtatttactcacccgccttttgttgctctctgtgagtgccacgcactacagytgcttctgttccaccgtcttggcccccgatcccttgttttttttttttaagttatttatttttatttatttttagagacaggatcttgccatatctccca

SEQ ID NO: 190675 - DNA, 201 bp, Homo sapiens
taatgccacagaaaaggaaatggctttttcagaatattagcgtttgtagctcttgcttattgatagggaaaagttagttgccatagtgatctaacagcctytggagggaatgcagtcatggccttaagcatccggcaacccacccagttgagagagcccctctgaaaaggatttccttccatggaaattgagtttctaaaa

SEQ ID NO: 190676 - DNA, 201 bp, Homo sapiens
aaaacccagttctaggatttttgtactatatatttttccctcatttataaatgaacagctaatttatgtaaaaacataaaaataaggaattctttttttttattattattatactttaagttttagggtacatatgcacaatgtgcaggttagttacatatgtatacatgtgcaatgctggtacactgcacccactaactc

SEQ ID NO: 190677 - DNA, 201 bp, Homo sapiens
agagcccaggagtttgaggctgcagtgagctgtgatcataccactgcagtctagcctgggtgatagaaggagacccagactctaaaaaaaatagtgcagcraggctgagagactctgatctatttccatgtaatgtggacactgaaattctgagaggtggagttgctcagtggcaagtggtctagggctcacgcttcctaa

SEQ ID NO: 190678 - DNA, 201 bp, Homo sapiens
ttacatgttttatcccagctgatgtctttaattggcatgtgattgatttctgcccattgcttttattaatttcatttgactcagttaaaataatcagaatrcattttggtccatctttgaattcccactcttctgacttgcagtgtaaggaatgtgttttgacctcctattgttagggatacctttgaaatgcttttgaca

SEQ ID NO: 190679 - DNA, 201 bp, Homo sapiens
aggtatgtgggcttatatgaattttttagctctttaatccttagtttttccattagtagtacccaacttgctgaattgtgaggtttgaatgaattattaargttaagcttttagaatgggacctactacccagaaaatatttaacaatattattgtaatgtatcactgtcaccatttattactacaatctctcttgaatta

SEQ ID NO: 190680 - DNA, 201 bp, Homo sapiens
gtagaaaattcttgagttttgaagtgcttaagagacagagacctaccctgtgccatgggtgtgtgtgtgtgtgtgtgtgtgtgtgtgtgtgtgtgtgtgtgtaggtggattggcttaagagaatcagctgtgtgagttcaaagccctgaaatgagtggcatgttgacaccgatgacctatagctgctttttagttggctac

SEQ ID NO: 190681 - DNA, 201 bp, Homo sapiens
agtagaaaattcttgagttttgaagtgcttaagagacagagacctaccctgtgccatgggtgtgtgtgtgtgtgtgtgtgtgtgtgtgtgtgtgtgtgtgkgtaggtggattggcttaagagaatcagctgtgtgagttcaaagccctgaaatgagtggcatgttgacaccgatgacctatagctgctttttagttggcta

SEQ ID NO: 190682 - DNA, 201 bp, Homo sapiens
caggttcaaatcagaattcaaaaccagttttagaactcaagtggcagctcatgccctgcatgcaggcaaacggctaggaattaatcagaaagttccacccrtgtccatccttcctcttatttgctcatcttcccagcaagcactaaaaagaaaaaaaaaaagtacaaattcgtacggaacctactgtaactctgattaaag

SEQ ID NO: 190683 - DNA, 201 bp, Homo sapiens
agtttaatttattgatgaagcactctgatgattttttttacccttatagtaaaaaaaaaaaaaaaaaacaccttcaaacttacatcctaccataggttcaycatcaaatctcaagtcagaatcaggttcaaatcagaattcaaaaccagttttagaactcaagtggcagctcatgccctgcatgcaggcaaacggctagga

SEQ ID NO: 190684 - DNA, 201 bp, Homo sapiens
cctcccccttttcttgtcttttttatgtttagcaagtcctttgcattcttttaaacatacactaaaagaaatttagcatatttaaagagaagggaaaaagcagtaaaataaaactgttttatcaaaagattacaatttgtaaaatagcaaatatttcagtcatcattttttatatgtatatatatatactttttattttgt

SEQ ID NO: 190685 - DNA, 201 bp, Homo sapiens
ctacttcagtgatatgtgtgtgcctctctgtctatttgtccacccgcccgtccattgatctatccatctgttcatccatccatccatccatccatccatchatccatccatccgtctatgcatctatccatgcaatgaatactggggttaagccatcaatgaatgggctagaattaacctctgaaagcattgtttacaatt

SEQ ID NO: 190686 - DNA, 201 bp, Homo sapiens
agccataaataaggaaataaatgagagggaacaagtttaatttattgatgaagcactctgatgattttttttacccttatagtaaaaaaaaaaaaaaaaaacaccttcaaacttacatcctaccataggttcatcatcaaatctcaagtcagaatcaggttcaaatcagaattcaaaaccagttttagaactcaagtggca

SEQ ID NO: 190687 - DNA, 201 bp, Homo sapiens
aattctttcagcatttgtttatctgaaaaagactttatctctcctctatttatgaaggttagttttgcggcatacaaaattcttggctgataattattttrtttaaggaggctaaagataggaccctaatccctcttggcttgtagggtttctgctgagaaatctgctgttaatctgagaggttttcctttataggttacc

SEQ ID NO: 190688 - DNA, 201 bp, Homo sapiens
aataatattaacaatggtggaaaccggttgtgggatatatgggaaaactgtgtactgttttcatagtttttatctaaattttaaaatacctcaaaataaaacgttatttttaaagatgtggggatacatttttcaggaaagagtctccgccataagcttactatagcagagcctgaatgctactgtttgatgaatgaaaga

SEQ ID NO: 190689 - DNA, 201 bp, Homo sapiens
taataatattaacaatggtggaaaccggttgtgggatatatgggaaaactgtgtactgttttcatagtttttatctaaattttaaaatacctcaaaataaaacgttatttttaaagatgtggggatacatttttcaggaaagagtctccgccataagcttactatagcagagcctgaatgctactgtttgatgaatgaaag

SEQ ID NO: 190690 - DNA, 201 bp, Homo sapiens
agtttgtcctcaggtgtaaattttatgtttgggaaaaattcatctagccattttatattttgattgtggaaacaaagaggaaatctgaagtggtagcaacrataaagggactatgtttaaccacatagtaggtgcttagtaaatatggattgaacagaaaagtaaatgagctcattttactaaatagtatatgtttccttt

SEQ ID NO: 190691 - DNA, 201 bp, Homo sapiens
ttaataatattaacaatggtggaaaccggttgtgggatatatgggaaaactgtgtactgttttcatagtttttatctaaattttaaaatacctcaaaataaaacgttatttttaaagatgtggggatacatttttcaggaaagagtctccgccataagcttactatagcagagcctgaatgctactgtttgatgaatgaaa

SEQ ID NO: 190692 - DNA, 201 bp, Homo sapiens
gttaataatattaacaatggtggaaaccggttgtgggatatatgggaaaactgtgtactgttttcatagtttttatctaaattttaaaatacctcaaaataaaacgttatttttaaagatgtggggatacatttttcaggaaagagtctccgccataagcttactatagcagagcctgaatgctactgtttgatgaatgaa

SEQ ID NO: 190693 - DNA, 201 bp, Homo sapiens
tgttaataatattaacaatggtggaaaccggttgtgggatatatgggaaaactgtgtactgttttcatagtttttatctaaattttaaaatacctcaaaataaaacgttatttttaaagatgtggggatacatttttcaggaaagagtctccgccataagcttactatagcagagcctgaatgctactgtttgatgaatga

SEQ ID NO: 190694 - DNA, 201 bp, Homo sapiens
ttttggtagtgaaaggcagaaaagagatgggactgtaacttaaggaattagcaggaaacacaacatacctgagaaagaacattctagcatatatatatatwttagcatatatagtagtgagtctcagctactcccctagggcagtgtatcagcaatttaggaaccagggatgaacatgcatttggcaaaacttcctaattt

SEQ ID NO: 190695 - DNA, 201 bp, Homo sapiens
tccttgaatcataatgattttgtttgcgtatgaaaagtaattccaattctgtatcattatgagacaaaatattcagtgaaactcaaactgcttttttttttatttttcaaagcctttttttccttttgcatcgactttatttcagttcttcataagaatataaaatatactccttttcatcagaacttttcttccacagcc

SEQ ID NO: 190696 - DNA, 201 bp, Homo sapiens
aattaactgtggagaatagctgtaaaatactgagaggagaggttaaattttatattccagtttaagttaaggctgggataaaacttgtaaactatgtttaygtaaaatattttctaatctgtcaaaaagttgtcacattttaatcaaattacttagttacctaaatttgtctagccataaataaggaaataaatgagaggg

SEQ ID NO: 190697 - DNA, 201 bp, Homo sapiens
ttccttgaatcataatgattttgtttgcgtatgaaaagtaattccaattctgtatcattatgagacaaaatattcagtgaaactcaaactgcttttttttttatttttcaaagcctttttttccttttgcatcgactttatttcagttcttcataagaatataaaatatactccttttcatcagaacttttcttccacagc

SEQ ID NO: 190698 - DNA, 201 bp, Homo sapiens
acccaaatctgtttgggttaaaggcaaatctgtagtttgagtgttcagattgccatcagtaggctggtttggcaggcagagaaggttgacatctctcgatygggcaaaggattctatctctcaattggggttaatcgggaaacgactcaggcatagagcatcaggactctatagtcatatctcagccacagactaactgga

SEQ ID NO: 190699 - DNA, 201 bp, Homo sapiens
ctcccctttctgtttagaaggtaccagaggaaatattcaacaaaattttgttattcttccttaaaaagcatcaaccttataaacatcttttcatcactggyctgtagttctgttgaataaaatgttctaaagcagcaaacactgggtctgatgcattgggattaaaggtaaggatcaggggagcagcccaagggggcagga

SEQ ID NO: 190700 - DNA, 201 bp, Homo sapiens
aggtagttcttctttggttcagttgcatagcacttctctctgtgctggtgaaatctagtaactccttattaggctaagctaaatatactctggttgacatyttatgttggcttagctgtttagtcaggaggtataattgttaataatatttagccataataaatgaagttgtctcacagtatgtattttaaaaaatggcaa

SEQ ID NO: 190701 - DNA, 201 bp, Homo sapiens
tttggatcgtcaaagtagttgcaaataataaacttaagtcaataaaatgcagagttagaaagaaaatgatccatgttatttaacttcctctcttaatgtcrcatttatatgtattggcatgtttctttgtatatacacagtaatgcatcacttaacgacaggagtacattctgagaaacatgttgttaggcaattttgttg

SEQ ID NO: 190702 - DNA, 201 bp, Homo sapiens
ctccaggcagactgacagagtaaaatcctgtctcttaaaaaaacacaacacaataaaacaaaaccaaaaactacaagacaaagaaggctaaggaatgccakaaatccccagaaactgagagaatcatagatgatttccctctcagagtctctgataaggaaacaactctgttgacagcttgattttggacttttggcctcc

SEQ ID NO: 190703 - DNA, 201 bp, Homo sapiens
ccactaatttttttcatggcttttgtattttaaataagttattattaaaatagaaattaaaaaaatctacagaacttgaattaagttaattaattaagcarcatttcataataaattctgtgctgaaataattatgatcattactttattacaaaataactatctagaatgttgtatcagtattagtgtttatgttttatc

SEQ ID NO: 190704 - DNA, 201 bp, Homo sapiens
aataagactgtgtcttgaaccaaacatatttataaaagaattagaggaaggtaacttaattctccattcactggtgtcttagttgtaaaaccacattttgwcaaggttattggtcataagttattttaatagcttttccaaacttaattttctgaagttaataaaatgctgagaaaaacttagattatgtttaaaagcatt

SEQ ID NO: 190705 - DNA, 201 bp, Homo sapiens
tataaacaaatggagaatatgagttgacacagaagaaaggctcaattttatgccaaagtaatagctagcactatagcatgcttactgtaggcattacgttragagctttgtgtgcattatttcatttaagcatcccaactttactacttggttgggtgttattacttcatcatttttataggcgaagaagctgtctcagac

SEQ ID NO: 190706 - DNA, 201 bp, Homo sapiens
tgtgggctgggttgcagcctcagagagtagttagtatcctgttttagttggctctccttcttctctgacctctgccggcctccccaacagccactgccacyacctcacagccaatattcttgatattctggttgaggagataactgaagcctaggagtttagatcagggtggtatcacttctcacagatgaatctttactt

SEQ ID NO: 190707 - DNA, 201 bp, Homo sapiens
ctaagtttgtgtaatattgtaagtcctttgttgtcatttcacagtgttcatggcatcttcattagcaatggatttcatctcaaggatccacttttttttttgaattcatagaaagtaatagattccatctcaaggctccactttctttgagttcttcaggttgcatacgtaaagagcaactcctcatccattgaagtttta

SEQ ID NO: 190708 - DNA, 201 bp, Homo sapiens
aaatgcccagccttttcagatattactctgagagttaagggttgattttcattgcctggtctttgttcatgtgtggaatggctgagtaagtaacacatagyattgggaagcttaggggcagggatggaggggtagggagcattaatggttaagtgagcattttgtttaaggggacagaacatatctgtgtgtatataaata

SEQ ID NO: 190709 - DNA, 201 bp, Homo sapiens
agccaaagctttcagctttgctgggtaaagcaacaagattagtaagaataaaaataaatcacataatatttcaaaaatattatcctgttaaatcttattasctagacctgagttatttcacacaagaagaatactcaatcagctacatccttaaggttgtcataacaaatcaggctgatttccacacatatttataaccgg

SEQ ID NO: 190710 - DNA, 201 bp, Homo sapiens
cagctctgatcaaaagcatttaaggataccagtcctcttggagcttatgttccattatggtctttacattctgcctatatgtcacctcattttttcagcartgctgatgacctgcatattcatgattctttacttagtacaatttcaattaaacaactcaatgccagccacagagccctgttttaacaataggcaaccatt

SEQ ID NO: 190711 - DNA, 201 bp, Homo sapiens
actgtactttgtcttaaggtttttaaactaacttgtattataataaaagttagtcatatatgtatatataaatatataccatatatatgtgtatttttttytcttaaatactgtgaaaatgcccagccttttcagatattactctgagagttaagggttgattttcattgcctggtctttgttcatgtgtggaatggctga

SEQ ID NO: 190712 - DNA, 201 bp, Homo sapiens
gccctgcagttcttcatgcttactagctcccttcctgccattgctactacaaaagccctccagacctcctttggtgggaggagacatgagaatgttttttkatctcactgacatcctactgaaatcagggaaagacagggcagtgtaaagctttcagctcattctaacctggcagacttcttcaccattgcagctgtatgc

SEQ ID NO: 190713 - DNA, 201 bp, Homo sapiens
ccctgagtgatcttctgttcataaaataatgctgcaatatgtgattgcctaagccgactgtactttgtcttaaggtttttaaactaacttgtattataatwaaagttagtcatatatgtatatataaatatataccatatatatgtgtatttttttctcttaaatactgtgaaaatgcccagccttttcagatattactct

SEQ ID NO: 190714 - DNA, 201 bp, Homo sapiens
gctgaggctaggggatcacttgagcccaggagtttgagaccagcctgggcaacataagaagacctcatttctgaaaaaaaaaaaaaaaaaaaaaaaaaaarggaagaaaggggaaggaagggaaggaaagggaagaaaaaaacgaaaagaaaaggaacaaaggaaggcgtcggtgatgtgcacaagtggtcacagctactt

SEQ ID NO: 190715 - DNA, 201 bp, Homo sapiens
aaacatgggtcagaggtttgcctgggacccttcccttactttctgcctaaagcaagctggttaactcctttcaatgtcaaagaaaaatttgaggtttcttygccagtagctactgcttcttgttcacttctataatttattcttagttagtgacaaactactcgagaatcattgaatgacttacaatttgttgtgttggaa

SEQ ID NO: 190716 - DNA, 201 bp, Homo sapiens
tctgatccatttgggcttgtaaatctgtgtatgtgatacttggagatgtttttgcatacctaaaatgagacaccacttaagagatttagctgttgatactygaaccagtgaagacaaagctgtcaaatacctccctaaataggaaggatatgtatttaatttggaaaatgtcaatttatttgttaccctacacagtaagaa

SEQ ID NO: 190717 - DNA, 201 bp, Homo sapiens
ggaggctgaggctaggggatcacttgagcccaggagtttgagaccagcctgggcaacataagaagacctcatttctgaaaaaaaaaaaaaaaaaaaaaaaraaaaggaagaaaggggaaggaagggaaggaaagggaagaaaaaaacgaaaagaaaaggaacaaaggaaggcgtcggtgatgtgcacaagtggtcacagct

SEQ ID NO: 190718 - DNA, 201 bp, Homo sapiens
caggttcttgtctcccaaccaggaaaaattaggcgtgcagacaccagagagtgagtggaacagaatttattaagcaaaaggaaagttctcagcaaagagaygggtcctgtaaagcaggttcctggttgttcccttccagttttgaatacaagggcttttatataaaagcttgatggagctggattccctgtttgtataagg

SEQ ID NO: 190719 - DNA, 201 bp, Homo sapiens
cacacattctctcttagacataggcgttttctttctttcttttctttttttttttttttttggtgacggagtcgcactttgttgcccaggctggagtgcartggcacaatctcggctcactgcaacctctacctcccaggttcaagtgattctcctgcctcagcctcccgagtagctgggattacaggcgcgcaccactac

SEQ ID NO: 190720 - DNA, 201 bp, Homo sapiens
agaagagaaaaaatacttgaatagtagccaagaaaggattccaattacttacaaactacagtgactaacttctttcaattctaaaatcccctattttaatktttctaagtttctgagaaatgggcattttagtattactccttaaaaacttttttactgaataaaataattttcatgaaattacaaaaacataggatctgc

SEQ ID NO: 190721 - DNA, 201 bp, Homo sapiens
actttgcagatacagaaactaatgtacaaagaggtaaaataacttccccaggtttcacaactgaaaccaggcctgagacctcatctttctgtgattaaacytgacattgtgattaagtttgaagaaactgattgctaattaatgttgttcattgtattggttttgtgttctctttgaagaaaatagtagtgatatatgtgc

SEQ ID NO: 190722 - DNA, 201 bp, Homo sapiens
actcccaggctcgcaggcgcccgcgaggggcaggggccggcaggctgcaatccttgcatcccagcttattaacttcctgactctctggaacctccttgccycagggtctaactgtggttcacttcttgctctatttttgtgactgttcagccctcgagacgcagtcccccctcccccgcaactttgagatgggtgagaggg

SEQ ID NO: 190723 - DNA, 201 bp, Homo sapiens
tgggatggatgtctgtatatacagttggtcctctgtatgtatccctgtgttcttcatctgtgggttcaaccaaccacagatcaaaaaaattgggggctagrcgtggtggctcatgtctgtaatcctagcactttgggaggccaaggcaagtggatcacctgaggtcaggagttcgagaccagtctgaccaatacggtgaaa

SEQ ID NO: 190724 - DNA, 201 bp, Homo sapiens
aaatctcataaatcggaatctaagggaaaacaaatataccctcctgaacgttgtataattgggtatacagaaaactttctaattttattttgccttcattyttagactaacttgcaattaccccaagttgctaggtagcaaaattattatggtactagctcagaatttgctgtattttaatcagccttagtgactgaaaac

SEQ ID NO: 190725 - DNA, 201 bp, Homo sapiens
ggaacaagtttaatttattgatgaagcactctgatgattttttttacccttatagtaaaaaaaaaaaaaaaaaacaccttcaaacttacatcctaccatakgttcatcatcaaatctcaagtcagaatcaggttcaaatcagaattcaaaaccagttttagaactcaagtggcagctcatgccctgcatgcaggcaaacgg

SEQ ID NO: 190726 - DNA, 201 bp, Homo sapiens
tccaggttcttgtctcccaaccaggaaaaattaggcgtgcagacaccagagagtgagtggaacagaatttattaagcaaaaggaaagttctcagcaaagakacgggtcctgtaaagcaggttcctggttgttcccttccagttttgaatacaagggcttttatataaaagcttgatggagctggattccctgtttgtataa

SEQ ID NO: 190727 - DNA, 201 bp, Homo sapiens
ttaagggtgattttattacatttgcattggtgttcatcagtctttggtcatctgtctatcaagtagagctggcatctatattacaataattttctttcaaraagaaatgttcagaaatatacagtaagtgaccatagtttcagcttctatgtcaggccaaagggaggtgaactggtggggagtgagtagattagacccact

SEQ ID NO: 190728 - DNA, 201 bp, Homo sapiens
atccatctggtcctgggctttttttgtggttaggctatttattactgcctcaatttcagaactcgttattagtctattcagggattcagtttcttcctggytcagtcttgggagggtgtatgtgtccagaaatttatccatttcttctgtattttctagttaacgtgcatagaagtgttcatagtattctctaatggttgt

SEQ ID NO: 190729 - DNA, 201 bp, Homo sapiens
tggaagcacattggatcctcccagtacagctggaatgccaacctaatccacaggctgtcccagtgcccccagggctgcttcatgcagcattttgggagtargtagccaagatctgtggccagcactcaagtcaggtagaagggggcaagatcttcaggttactgggctggggtgggaggggagcagggtatgcctacctcc

SEQ ID NO: 190730 - DNA, 201 bp, Homo sapiens
  misc_feature (1)...(201): n = A,T,C or G
aagtcattgatctgaggactataataccttgggatgtggacacaatttgtaaggtatgaatataatggtgatagaatgtcatttccctgaaacctttggcnaaatatgttgtatatttgcaaataattcttttgaaattgtgagctatgtgagcattttcaattgatttaaaacttttaaatttgcagcatgaaagaaagt

SEQ ID NO: 190731 - DNA, 201 bp, Homo sapiens
gatgagttaatgggtgcagcacaccagcatggcacatgtatacatatgtaacaaacctgcacattgtgcacatgtaccctagaacttaaagtataaaaaaacccaaaaaaacaacaaaaaaactatcttctcaactagtacagagactagattaaaaaaaaatcagttagcatctaacatctgttaattatttttagtaac

SEQ ID NO: 190732 - DNA, 201 bp, Homo sapiens
atctcattgttcatttcccacttatgagtgagaacatgtggtgtttggttttctgtccttgtgatagtttgctgagaatgatggtttccagcttcatccaygtccctgcaaaggacatgaactcatcattttgtatggctgcatagtattccatggtgtatatgtgccacattttcttaatctagtctatcattgatagac

SEQ ID NO: 190733 - DNA, 201 bp, Homo sapiens
caatcactagatgaagatgctctctaccatggtttagattgcaagtgtactttataccattgtttcaacttcaacctttatttttgtatatattttttcarctacttaaactgttcatgaataggcgtactttctgtatttaaaaatggcccctcaagcaccgttaatttacattccagttatttacatgataattcatga

SEQ ID NO: 190734 - DNA, 201 bp, Homo sapiens
cacttaaaggagaggctaacaagcttaaatagtcacttaaatgagagtttaatttaagcttaactggttatgtagtcatattccctgacacccaaacattyaggtcataatcatttgtttcattcatgacagggtgatttccaaagtacagacattttatctcagaatcacattgagcatgcacagaagcaaattttagct

SEQ ID NO: 190735 - DNA, 201 bp, Homo sapiens
atatttaagtatggtctctggacaacaataagcacagtgtacttttttaaaaagtgactttatgtaagattataaattacagaaatgagttgtcacttccytgttgttacttatttctgattttaaaatagcaaaatttataaagctatagttttgagaaaatagtaattcatattcttaaaattgttataatctctaaat

SEQ ID NO: 190736 - DNA, 201 bp, Homo sapiens
cctcccaaagtgctggaattacaggtgtgagccaccacacctggcctgagccaccgcgcctgacctattttattaattttttcaaaaaaccagatcctagrtttgttgatgttttgaagggttttttgtgttgctgcgtttttcagttcatctttgatcttggttattttttgtcttctcctagctttggggtttgttttc

SEQ ID NO: 190737 - DNA, 201 bp, Homo sapiens
atacttcttttgattttctggaaaaacagctttggttgtattcaagcactgtggagtcgttacaggtttattcagaaatatttttgtattcttttttttttaatctgtttattcagcatcagctatgtgtacattaatttgaaaaactacatttttattgtgtattcctccaaactccaactttaatctcttaggttttag

SEQ ID NO: 190738 - DNA, 201 bp, Homo sapiens
ataatagcactaagtacagaattgcccttgtatccaagcaagacttttacgaaaacttaaacctgaagtcttatgcagtgcacctaaaattaaccaggagmcttggtgcatataccagcaaatgttgtatacctgtgtgatagtggtcacctcacttaacctctcccagcttcagtttcttgtctttactactacataaag

SEQ ID NO: 190739 - DNA, 201 bp, Homo sapiens
ttctcctgcctcagcctcccgagtagctgggattacaggcatccgccaccatgcctggctaatttttgtatttttagtagagacgtggtttcaccttgttsgccaggctggtctcaaactcctgacctcaggtgatctgcccacctcagcctcccaaagtgctggaattacaggtgtgagccaccacacctggcctgagcc

SEQ ID NO: 190740 - DNA, 201 bp, Homo sapiens
agggacctagaactagaaataccatttgacccagccatcccattactgggtatatacccaaaggactataaatcatgctgctataaagacacatgcacacrtatgtttattcacacacatgcagcactattcacaatagcaaagacttggaaccaacccaaatgtccaacaatgatagactggattaagaaaatgtggcac

SEQ ID NO: 190741 - DNA, 201 bp, Homo sapiens
atttatctttgaaatatttacttgtgtaataatgactttgttattttaacaaaagagtaagtattcatgtattttggcctgtggttttttttgtttgtttstttgtttgtttgtttgttttactgaatagcttgtggcttgccatctttatttaaccatctggtgaaatgtttctcttccatactaaaatggctttattct

SEQ ID NO: 190742 - DNA, 201 bp, Homo sapiens
tgttgaattttgtcaaaggccttttctgcatctattgagataatcatgtggtttttgtctttggttctgtttatatgctggattacatttattgatttgcrtatattgaaccagccttgcatcccagggatgaagcccacttgatcatggtggataagctttttgatgtgctgctggattcggtttgtcagtatttttttg

SEQ ID NO: 190743 - DNA, 201 bp, Homo sapiens
aaagactatgttcacagatagattcattgcaatataagttgttgcttaatggatctctagagtcagtccaatttctaagaaaaccaagtgggtttttttttgaaaaattatgacttaattaaaaaaaatttaaaaatgttttttaaaagactgtattcatagctagagacatttattgcaatttaagttgttatttaatgg

SEQ ID NO: 190744 - DNA, 201 bp, Homo sapiens
cagtgttaagagaaaagtttatagccctaaaaggctttcattaagaagttagaaaggtttcgaattaacagtctaacttttcacctaaaggaactaggaagaaaaaaaaagaacaaccctaaagctagcagaggaaaataaataacaaaaattagagaacttaatgagattgagatgcaaaaatccatacaaaagatcaat

SEQ ID NO: 190745 - DNA, 201 bp, Homo sapiens
cagcaatttgcataatatctttctttgtaccttgattttagtcaagttgtaattaactgttaagaaactggttgtttttatgtattttacaacacacgaartgattttttttttgattttcacagggcaaactcagaaaatgaatcttttccagtctgtaacaagtgccttggataactcattggccaaagatcctactgc

SEQ ID NO: 190746 - DNA, 201 bp, Homo sapiens
cacaatgcagtgcaaaacagaacagagccttaaattttgagagggatttatccacttccaattcctgggcttttatgagaaaaacagaggatttttttttycccccaaaatagggtctgtgctgcctcctctgtttttttcaaggagtcccaggctgttagagcttgaatatatgcttttaattaagctgatgtttaacta

SEQ ID NO: 190747 - DNA, 201 bp, Homo sapiens
gttccctaaaaattgctgttattctgttgtttttcaaggtgcactgatttcatattgttcaaacacacatgttttacaatcaatttgtacagttaacacarttatcacagtggtcctgaggtgatgtacatcctcagcttacgaagataacagaattaagagattaaagtaaaacaggtgtaagaaattataaaagtatta

SEQ ID NO: 190748 - DNA, 201 bp, Homo sapiens
aaggtaagttgtggcattgttgtaagcacctgcctgtatgtgtgttgctctgaaataatgctattatttattctattatagaatgtagattctgtgagggraagggttttgcccattttcttcacttttctttctccacctcccacacttccttcatgttacagtacacagtggtgtagagtgtgggctgggttgcagcct

SEQ ID NO: 190749 - DNA, 201 bp, Homo sapiens
agcaatttttctaaatcaaatttaggcctcttaatgtctgagaactttaaaaagatcaagaacataaatgctattccttggttcagtgattttttttttttaatgtaatgttgatacaggatttttgctcttttagctcagctaggtccaggttcttgtctcccaaccaggaaaaattaggcgtgcagacaccagagagtg

SEQ ID NO: 190750 - DNA, 201 bp, Homo sapiens
atgtaaaattgtaggaaacaatgacatgtattattttttcttgatatactgctatagtatagggcattttatatttaccacttttaagagctttggcattytcatagcttttacaggctctttcttgggttagttacatgaaaataacctgcagatactactgtaaaagtatagcctaggatgtttttaggtgaagagtgt

SEQ ID NO: 190751 - DNA, 201 bp, Homo sapiens
tcccactgtcccaggccgaagtcatacaggaagggagtgatgttactctagttgcctggggcactcaggtgagtagcattgatcccaactgttaaaacctrcgttgtgcttggaagctctcattttaaatcctgatacatgaaaaattgaaaacgatgttttctttatatctcagattaagtctggtgctactgatgctaa

SEQ ID NO: 190752 - DNA, 201 bp, Homo sapiens
aattggggcatcttgtggttgaagttttaaggtaaaatgaaaccatggttactccttgctgtttcattggctggccctgcagttcttcatgcttactagcycccttcctgccattgctactacaaaagccctccagacctcctttggtgggaggagacatgagaatgttttttgatctcactgacatcctactgaaatcag

SEQ ID NO: 190753 - DNA, 201 bp, Homo sapiens
tagaatttatttttcctcctgtagtttcctttgtttaaaatattacaaaatggggtcctttatgcagtcaccttgggttgaattgtgtgagtcatagagcrtatcaaggatgccgaaggcacctgtgtttttgacttcttattagttatggttcagtaagctaggtttaatttagtcaggtaaattaagtgatttggctga

SEQ ID NO: 190754 - DNA, 201 bp, Homo sapiens
acaaaaaaatacaaaaattagccaaacatggtggtatgtgcctgtggtccagctactcgggaggctgctgtgggaggatcacttgagcctggaagggggargttgcagtaatctgagatgactcccctgcactccaatgtgtgtgacagagtgagaccctatctcactaaataaataaatggatgaatgagagaaagacat

SEQ ID NO: 190755 - DNA, 201 bp, Homo sapiens
  misc_feature (1)...(201): n = A,T,C or G
ttattttcgcagaatatgggcttcaacatatttaaaacaaatttataaattctccatgcagatcagttcctgagactttaaatactgtctctaatagtganatcagcattcaactagtttttgaggctagaacctttgtagtcattctctgcatatttttctctttatttcaggttcatgtgatccgagaggtagcttcca

SEQ ID NO: 190756 - DNA, 201 bp, Homo sapiens
aggaagaatgaaatagaagaattagggaaaggaaagagagcaaggatgttgtgtaggaactatttcatgtctagttgaaatgtgttataaaacttaaatakgttttttaaagttctgttttgggtggcataaatttataaagcaaaattccttcctccctccttcgcttccttccttccaaagagtattgaggagatttta

SEQ ID NO: 190757 - DNA, 201 bp, Homo sapiens
ccaacatggcaaaaccctgtatctactaaaaaataaaaaaactagctgggtgtggtggcgggcacctgtaatcccagctactcaggaggctgagacaggakaattgcatgaacccaggaggtggagattgcagtgagccgggactgtgccactgcactctagcctgggcaacagagcgagactctgtctcaaaaaaaaaaa

SEQ ID NO: 190758 - DNA, 201 bp, Homo sapiens
tctccctgcctggggtactgtttctttaactggtgttaaccaaccctctgtgtccatgaatgtattctgagagttctcacattttctatgagatttaaaayttggggttttactgtcaacgataatcttgagaaggtaatataagctttttctgggtcatctgaatcatttgccatgcaactagatactaccacatggtaa

SEQ ID NO: 190759 - DNA, 201 bp, Homo sapiens
agaaaatatgaaggacataaagatgtcagatgtactatcctagtcactaaagttctttttgaacaactgataagtcaaaaagccagcagtagaaatttgaytactggttcctggtggcctgactgtaccattagcgaagtgatttgtgccctgaggctatttacctttggttatttccccccaaaggctgaaagttctaca

SEQ ID NO: 190760 - DNA, 201 bp, Homo sapiens
aagaaatcaacttatggaagagatatctctgctcccatgtgtgttgcagcacaattcataatagccaagatatggaatcaacctaagggctcatcagtggrtgaatgaatgaatgaagacaatgttttatatatatatatattagactattattcagccatagaaaagaatgaaatcctgtcatttgcagtaacatggccg

SEQ ID NO: 190761 - DNA, 201 bp, Homo sapiens
gatgtgaaaaatatattaaatatatactaatatttcaatgatttaaagtcatctacccaatagaagccactatatttcattgattctaagctaccccttcsccccctcatgttttaatatctctggtattggattgtgacttaaaaacagtagcatgttgcagtcatctcatccagtggccagtagttgctgttatctgct

SEQ ID NO: 190762 - DNA, 201 bp, Homo sapiens
aaccatagtttttacagatcattgaattatcacattgattctatcacattaattcttttgttcttaatttacttaaagaacacgtttttaccccttgtggrattactggtaaatataacattgaatttctttttttccccaatagatgcaatataggaatgtacttatattctccttaatttagaaattcattttaaaata

SEQ ID NO: 190763 - DNA, 201 bp, Homo sapiens
gacaggctgctaggcttaagatggggaacagatgtcagcagatattcatcacttagggctaaggtcagttggttgagctttggggcagagagaccagtctrgtcctgtaacaccagcgtgccatgcagaggtaaatttttgtgtgtgcaaagacctacaaacatctgggaagtaccttagaagaggaggaaacagcagatc

SEQ ID NO: 190764 - DNA, 201 bp, Homo sapiens
ctttgcattttatctactttgcgtgtcaaatgttcaatgaaatggagctctactgtagggactcaatttgttagactgagtactctttcacgatcatctayatacatcaggttttattcagagacttctaaaaggagctatgatttttagtttctgaaattccaaaccccaataagccaaacagaacataaataaaaatag

SEQ ID NO: 190765 - DNA, 201 bp, Homo sapiens
tttcattagagggtgggaggaaggtagaaaggacgccactgaggtttttgaggcacctttggtagtggcagttgaggagacttcgctgtgttgcagtgacsgttgttccacagtgtagatggcagcgatgttggtggcagggcatttaatagggatgggtctgctcagcagcagccaatggtggttccagcactgatagtg

SEQ ID NO: 190766 - DNA, 201 bp, Homo sapiens
gtttcctttccccatacccatttctttaataagtggattatgtaaaaacagcttggcaccttgttaccagtaacatcttagttttacccacaagtttggakattttacactccctttttgagatagaaacatgtataaatttccacagagtaatagtggaacagtgttaacagtgctatcttgatatgcaatttattatta

SEQ ID NO: 190767 - DNA, 201 bp, Homo sapiens
ggatttggaatcggaattgcggtcactggagctactgccattgcggaaattcagtttgcagattatattttccctgcatttgatcaggtaagtgaatgaayatttctaaggttgttcattcattgaaatattcaagtattgccgctacccttccacccacccttacctgcattctaaacattttattatccttttactaat

SEQ ID NO: 190768 - DNA, 201 bp, Homo sapiens
tttttttgtgtcacagaagtagagtatgattacttatatttatctttttatgacatatacaaggcaagcatttaagggtgattttattacatttgcattgktgttcatcagtctttggtcatctgtctatcaagtagagctggcatctatattacaataattttctttcaagaagaaatgttcagaaatatacagtaagtg

SEQ ID NO: 190769 - DNA, 201 bp, Homo sapiens
catgcttaatatgcttgtttttatattttcaggtatgaaagacttttttggacttaatcattgtttccattttggcaccatttttgtccttatctcattarcatagtaagcctaaaatgtcctaattccaggaacggataaaaattccattccattttatattcaaaggtttggatttctaccttaatccatttcttaaag

SEQ ID NO: 190770 - DNA, 201 bp, Homo sapiens
acaaacttacaacccaaaaacaaccccaagcaaaaaagtgggcaaaggacatgaacagacacttttcagaagaaagacaatcatgtagccaacaagcataygagaaaatgctcaacatcacccatcattagagaaatgcaaatcaaaaccacagtgagataccatctcacaccagtcagaatagctattattaaaaagtca

SEQ ID NO: 190771 - DNA, 201 bp, Homo sapiens
tgcagcagtaacattgttctttaatccaggagttgcctttgatcttcagcccttcattctcactcttggggtctcttttttgcagaaggtgagccgtggccaggcttcctgtttatagcctccctctgttcagtggtaaacctcaggatttttggatgaagatctttggatgtgtgcctccttggtgcccattcatggtct

SEQ ID NO: 190772 - DNA, 201 bp, Homo sapiens
gaattattttccttagggacaaactcttagccttaagttaatgtcttctgagagggtagaattccttattatacacatatggataattgctttgagttaayggggaggatagatgggcttctcaggtactggttcattgaaagttttttgcctttcaactatgaaaccagcagtacagcatttttaaattgataagtgttt

SEQ ID NO: 190773 - DNA, 201 bp, Homo sapiens
aaaatttaatagattgactttttcccctacatcccttctttttaaatttcttgtgtacatttgggaatagttaaaattgaatggatgaaaacacaaaattktacatttaaagttttttagaagagttcatattgggactcataatggttcatggatggactaataaatatggatgtagaattattataaatactggctgac

SEQ ID NO: 190774 - DNA, 201 bp, Homo sapiens
agtaagggaatgaggtttgatgtaggcatatctttttttcctcccttggggttgatcaaagatgatactcattaaaaatactatgaaattgcttaataccwttcgaaaagcatttgtaaagtggatcttctgtcagtataagggataagtgtgtctctgtgtgtgtgtgtatatgtgtgtgtgtagtaagagatgttgatt

SEQ ID NO: 190775 - DNA, 201 bp, Homo sapiens
taacagtcccaccaaacactattgcactgagaattaagtttccaacacatgaactccagaggacacattcaaaccaatgcaagcgcagaagcagttgtaartaataaataaatcagtggatgtgactggatctcttcattgccagtggttggccaattcatgatgtagatcttaaaacaaaatagtgctcagaaatagata

SEQ ID NO: 190776 - DNA, 201 bp, Homo sapiens
gtagtttgtgcttatgaaggctttctccatcctagtagactaaaatagaagtatcctgtaatattagatgaaagtaagggaatgaggtttgatgtaggcawatctttttttcctcccttggggttgatcaaagatgatactcattaaaaatactatgaaattgcttaatacctttcgaaaagcatttgtaaagtggatctt

SEQ ID NO: 190777 - DNA, 201 bp, Homo sapiens
tgtgtattcagtttctactgcacatcttcacctcagtgttccacagtcacttcaaactcagcatttccacacctaaggctgctacatgcacccagcaaatrtatgcctcctagtgcatttcctattttggtgaatatatcaccatccatttagttacctaagccagacactggggaaattctaagtgtcttccttctttct

SEQ ID NO: 190778 - DNA, 201 bp, Homo sapiens
tgatagccagcctttggtgcttgtactactctcaaaccatacccgagccacatgtgcaggcatgtgtgtagagacttgaggtgtactgacccaacttgtcrccagcctgggctctcagaaggtttcagaagtttgttcttctctctgctcgatgggagttaaaaagtatagcagtggagagatccagtgtgagggcctgga

SEQ ID NO: 190779 - DNA, 201 bp, Homo sapiens
tgcagcaaaactataatattttttgtcaccatgggtaaactaagcattattttgggtagtttgtgcttatgaaggctttctccatcctagtagactaaaayagaagtatcctgtaatattagatgaaagtaagggaatgaggtttgatgtaggcatatctttttttcctcccttggggttgatcaaagatgatactcatta

SEQ ID NO: 190780 - DNA, 201 bp, Homo sapiens
tgtccaagaacctttggtgttttattgctagctgcctgagccaatttcaattccattgcctccagttggagattctgcctgttgggtctttattagcaaaytttatcttttcgggaagagagagagagagagagggagagggatttagtttttaaggaactggctcatgtgagtttagttttaaggaactggctggcaagt

SEQ ID NO: 190781 - DNA, 201 bp, Homo sapiens
ttacctaataaattaaatgcagtttcaattttaataaaacccgtgtactttataaaaataggacctttactaacctatatctatactgagtcatgggagcmacagtagcatgggtaaatccttctggtagtaagcatggatactcatatctgttcagagaaccacagtatcttttctcctttctgcctgccctcttgctgc

SEQ ID NO: 190782 - DNA, 201 bp, Homo sapiens
agaactctgtgtctcccatggatgtgtgagctggcaggggcatctccctggggagcaggcagagacaggccgttggacagcatggagcccaaaagttttcrtgcactggggagctccagcagagagcagccatagagctgctctgtggggagggctcttcatccctttctgggaggtgtggaccccagctgaccttcaagc

SEQ ID NO: 190783 - DNA, 201 bp, Homo sapiens
ggtgaatgaggaactgagggaaggctcactctcaccgccagcctctgggatcctagatcctagttacagaactctgtgtctcccatggatgtgtgagctgrcaggggcatctccctggggagcaggcagagacaggccgttggacagcatggagcccaaaagttttcatgcactggggagctccagcagagagcagccata

SEQ ID NO: 190784 - DNA, 201 bp, Homo sapiens
ctttgcttgtttagtttccacctccaaccctttccccattcttttttttgagagggagtctcgctctgtcgcccaggctggagtgcagtggcgcaatctcrgctcactgcaacctccgcctgccgggttcaagcaattccctgcctcagcctcctgagtagctgggattacaggcacctgccaccctgcccagctaatgtt

SEQ ID NO: 190785 - DNA, 201 bp, Homo sapiens
tacagtgtaaatgattccaaaataattgtcattaaatgtatattatttattgtgtcattcttctgtccaagaacctttggtgttttattgctagctgcctkagccaatttcaattccattgcctccagttggagattctgcctgttgggtctttattagcaaactttatcttttcgggaagagagagagagagagagggag

SEQ ID NO: 190786 - DNA, 201 bp, Homo sapiens
tgataaaatagtcttctaatatgatggaatgcctaattatgtattctgttatcaatttacctaataaattaaatgcagtttcaattttaataaaacccgtrtactttataaaaataggacctttactaacctatatctatactgagtcatgggagccacagtagcatgggtaaatccttctggtagtaagcatggatactc

SEQ ID NO: 190787 - DNA, 201 bp, Homo sapiens
acttttctgggcatagagttctacctaagtgtacatagctgaacaacttgagtgtattttgtgagtaatattccaacatcgcacaattctaaattttattraaaccagcttttctgtggcagtcccaatacacagttcaagtacattaaaataatgaagtactgcataaatgttgataaaatagtcttctaatatgatgga

SEQ ID NO: 190788 - DNA, 201 bp, Homo sapiens
tggctcttgagaaaggggtgaatgaggaactgagggaaggctcactctcaccgccagcctctgggatcctagatcctagttacagaactctgtgtctcccmtggatgtgtgagctggcaggggcatctccctggggagcaggcagagacaggccgttggacagcatggagcccaaaagttttcatgcactggggagctcca

SEQ ID NO: 190789 - DNA, 201 bp, Homo sapiens
atatctttctttgtaccttgattttagtcaagttgtaattaactgttaagaaactggttgtttttatgtattttacaacacacgaaatgattttttttttkattttcacagggcaaactcagaaaatgaatcttttccagtctgtaacaagtgccttggataactcattggccaaagatcctactgcaggtaaccctgata

SEQ ID NO: 190790 - DNA, 201 bp, Homo sapiens
tctaatttatattagcagttaaaaaaactgaaacttaatcttgccttttcagctcattactgaagaatctcctgcctctgcactctgacacaaaatttatrctttattttttaaccatgaacttttctgggcatagagttctacctaagtgtacatagctgaacaacttgagtgtattttgtgagtaatattccaacatcg

SEQ ID NO: 190791 - DNA, 201 bp, Homo sapiens
ttatgtgttatagcgttaactcttagtgacttttacttttgatgaaaaccttggtaagagattttaattaggtactaggtgtggagtctaggacaatggasagaagtgcagataagggcgactgtttccagcatagcaagggggcatggctttccacatgtcccaggtcttatgtaatacacaatgatccaatgtaggtaa

SEQ ID NO: 190792 - DNA, 201 bp, Homo sapiens
ggaaaactagattttgcaggtaaactttgatttgttgaatgcctgctttgtgccagacattgcatgctacgatatattctattaaaaggattcaggaaggrcatttactcttttagctactggagtttgattttctttattatcatgctgatcagtgtacactggcagtgtggctgattgagtggaaaagggagagctaca

SEQ ID NO: 190793 - DNA, 201 bp, Homo sapiens
cattgtgtcctgtcttttgacaggattagtttgctctcttaattgtaacacattttcatttcttttctggattgatttaaattctgggcttcaaaaagcartagcataaaatagtcaccatgcctgtattattagctgctttcagaaccactcagacaatgttttctctgagatggcttgtatttttaagtgttgcatttt

SEQ ID NO: 190794 - DNA, 201 bp, Homo sapiens
atttattgaatactggaagtgaaaaacagaatggttgtatgagtaaagtacggtttctactgaatacattttgcttttgcaccattgtaaaatcaaaaaawttttaagttgaacatttcttaatttggggactgtattagttcattctcacaatgttataacaacatacctgagactgggtaatttataaaggaaagaggt

SEQ ID NO: 190795 - DNA, 201 bp, Homo sapiens
ccttattatctccctagaattattattcttatttcttaaaggttagctcttcggttgagagtacacagtggttgcttaacactttcttctggatgttaagyagattattcttagagacctgcttttcttttgagtgatcaggataattttcagcattttttttcagtaggctctattagctttagtctatgttttgcttcc

SEQ ID NO: 190796 - DNA, 201 bp, Homo sapiens
tctccctttctgactttccataggtcttattgtctacacgcatttagtcacttggttatattccttcttcctgttttatacttttacaaaaaattgtttartatgggtaaattttgccccattaacaagcttctccaggtctgtattgcttttgtatcttatagtattattgtaaataattcagcaatttgcataatatct

SEQ ID NO: 190797 - DNA, 201 bp, Homo sapiens
ccaaagtgctgggactacatgcatgagccaccgcaactggcctgtttccttcgtctagaaaatgaggctcttagtagttcactggcatggtgtaaggagtraattatggaaaatatgtaaagcacctaccacaatatgtggcatatagtaagcacagaataagtaaccaattccttctcttttcttcctgtttacaccgca

SEQ ID NO: 190798 - DNA, 201 bp, Homo sapiens
actacatgagagccttgtttattacttgactccaatttccagcctttctaccttctcatatatatgccttctttgttatcgtaagattcagattagcaagrtactctttttaacctgtgcctatgttttaaaaaaaaattgtttaagtttgacataagtataagccagcaggaagttgcaaaaacagtacagatgctcccc

SEQ ID NO: 190799 - DNA, 201 bp, Homo sapiens
gaaatgaaaagtaaatgctgctccattaaaatttgtaatttaaaacttagaaaagtatctggtagaatagcaattaatccaaaaccctaaaattttgaatstgtttgaaaaactattcaggagtgaaagtttaggtattcacatggaaataattacctttaaatacccttactggtaaattattttatacaagacgaatag

SEQ ID NO: 190800 - DNA, 201 bp, Homo sapiens
ctattcacagccacaatcatcatgtagtacaaccctgaactctcctgggctcaagtgatcctcctgcctcagcctcttgagtagttgggactatcgtcacrtactactgtgcctggcccatttacattttaatacaaaatgttctgtccctgacatttgggttctccctcagtcttattttatgaagtagatgctggctaa

SEQ ID NO: 190801 - DNA, 201 bp, Homo sapiens
tttccagcttggttcctttctccccgtcactttcaggtacaccaatcagacatagatttggtcttttcacatagtcccatatttcttagaggcttttttcrtttctttttactcttttttctctaaacttctcttctcacttcacttcattcatctgatcttcaatcactgatacccttcttccacttgatcgaatcggcc

SEQ ID NO: 190802 - DNA, 201 bp, Homo sapiens
aaaggaagacattgtgaagatacctcactggtttgtggcacgggaacctgggtggagggtagtgccgtttgctaagatggaaaagattagttttgggagcygacacaagaattcagtttgtgcttgttgaaaagctcaagaaactcaagtggagaactgatgactgttggatataaaagtcaggagttcagaggagaggcc

SEQ ID NO: 190803 - DNA, 201 bp, Homo sapiens
acgtcctgaatagtattgcctaggttttcttctagggtttttatggttttaggtctaacatttaagtctttaattcctcttgaattaatttttgtgtaagrtgtaaggaagggatccagtttcagctttctacatacggctagccagttttcccagcaccatttattaaatagggaatcctttccccatttcttgtttatg

SEQ ID NO: 190804 - DNA, 201 bp, Homo sapiens
ctttgaaactcagatattaatgactaattgccagtaagatcaggcaatgctggtcaaccaggcaacttaacctgtgctccatgtggaaaggctgcttttgyagccttttaagtttggttgtaaaatgtaaaattaatttttcaatctcaagtttattcagaattctattaaaaacaattgttctttagccattttggtatg

SEQ ID NO: 190805 - DNA, 201 bp, Homo sapiens
tggccattttcacaaacagattcttcttatccatgagcatggaatattcttccatttgtttgtgtcctcttttattttgttgagcagtggtttgtagttcyccttgaagaggtccttcacattccttgtaaattggattcctaggtattttattttgtttgtagcaattgtgaatgggagttcactcatgatttggctctc

SEQ ID NO: 190806 - DNA, 201 bp, Homo sapiens
aagtgattcttgtgccttagcctcctgagtagctgggattacaggtgtgcaccaccatactgggctaattttttgtatttttggtagaggatggggtttcrccatgttagccaggctggtctcgaactcctggcctcaagtgatccgcaccccccttggcctcacaaagtgctgggatttcaagtgtgagccatcacgcct

SEQ ID NO: 190807 - DNA, 201 bp, Homo sapiens
atatcatgatatatataaacttgttcttattttaaaaataatacaaacatattaacagataatttggataatggataaaaagtaaaaaaaaaaaaaaaaaatctgccgggcgcagtggctcacgtctgtaatcccagcactttgggaggcggaggcaggcggatcaccaggtcaagagatcgagaccatcctggccaacat

SEQ ID NO: 190808 - DNA, 201 bp, Homo sapiens
tatatcatgatatatataaacttgttcttattttaaaaataatacaaacatattaacagataatttggataatggataaaaagtaaaaaaaaaaaaaaaaaatctgccgggcgcagtggctcacgtctgtaatcccagcactttgggaggcggaggcaggcggatcaccaggtcaagagatcgagaccatcctggccaaca

SEQ ID NO: 190809 - DNA, 201 bp, Homo sapiens
ggaaaccattttttgctcctaggcctctaggcctgtgatggaaggggccaccgtgaaggtctctgacatgccctggagacattttcccattgtcttggtgrttaacattgggctccttattattcaaatttctgcagctggcttgaatttctccccaggaaatgggtttttcttttctattgcattgtcagtctgcaaatt

SEQ ID NO: 190810 - DNA, 201 bp, Homo sapiens
atatatcatgatatatataaacttgttcttattttaaaaataatacaaacatattaacagataatttggataatggataaaaagtaaaaaaaaaaaaaaaaaatctgccgggcgcagtggctcacgtctgtaatcccagcactttgggaggcggaggcaggcggatcaccaggtcaagagatcgagaccatcctggccaac

SEQ ID NO: 190811 - DNA, 201 bp, Homo sapiens
atgtatattatatatattatatataaaatatatatatgtatataaaatcaattcagttactcagtcccttggtttcttcttacatacagaaattgtgtgtrtgtgtgtgtgtgtgtgtgtgtgtgtgtgtatatatccacacacatatatatatgtgtggatatatatacgcgcatatatatgcatatatatgtgcgcata

SEQ ID NO: 190812 - DNA, 201 bp, Homo sapiens
ctccgtccttgctttctcaacccaggccttaggtgttgttccagcctgcccaggactgggccactagcttaggtagaggcatttaaaagatatatatatawgtttatatatatatattttaaatgtatattatatatattatatataaaatatatatatgtatataaaatcaattcagttactcagtcccttggtttcttc

SEQ ID NO: 190813 - DNA, 201 bp, Homo sapiens
tactgaactacattctgcgttgcttggttttgttttactttgcttttctctagtattttttgagcttagggtttatttttatcatttataaattggtttgraaaaagattaattcactcagtgttcaacatttgaatcaagtgacaattatgtgcaaaatacagtggtattgctgggatatggtatgagcccagaatgccc

SEQ ID NO: 190814 - DNA, 201 bp, Homo sapiens
atgttgggggcatgagaactaattagaagaagtattctaactcagtagagagggtaggggtaagggtctgtaaaacattagcaagtggggtcagctgatayttagccagtttcagagttagtctaaaactaccaacagagtaaacaggcaacctatagaaggggagaaaatatttgcaaactatgcatctaacaaaggtct

SEQ ID NO: 190815 - DNA, 201 bp, Homo sapiens
ttaagttgtttttctaccttttctggtacctccttgagtaccttaataatcaaccttctgaattccttatctggcaatcagggatttttttcttcgtttgratctattgttggagagcgagtgtgatcttttgggggtgttacagaaccttgttttgccatattaccataattgcttttctggttccttctcattttggta

SEQ ID NO: 190816 - DNA, 201 bp, Homo sapiens
ctggggattcttgaaaggtggcaatctaaatcacctttattttctgagcttcctctcaggtgcctaaaacagcagcttcagaatttctgtgaggatgaatrtgggtgttgaagtgggagatagctagagaacttgtcttgaaatggcattttgtttttcacagacagtgctttgagatgggttttatgtttatttaggtgg

SEQ ID NO: 190817 - DNA, 201 bp, Homo sapiens
tatcaaggtagagatgttattttctcaagtctggagtagtagtccatatataatctctaaaataaagtaggtaaaggatactaggtaaagggttccttagsaagctaaaggtaggcatcaacaagttaacttgtcaactttaaaaacaatttacctgtagtgtataattttaatctgtatccatatcatttatattactaa

SEQ ID NO: 190818 - DNA, 201 bp, Homo sapiens
aaatgaatgtaagaatttaaaattttgaagtgaataggaaaatatcaatgatatattgtgaatagctttttgatgaaaaggatttctaatactttggatawcctgtggctattatagttataatgccagccagctgttatagccaatcagtaaagaaattttgcagtatttaataaatggcaactgagtaagaaagatttg

SEQ ID NO: 190819 - DNA, 201 bp, Homo sapiens
cttttggaggaaagcaatgtagttatttatgttgtccctgtaagttgtattacagcattagagaacttctggggacactgaagaattgtttagtcacttamacccttaaactccctttagggagtccagttgattcatgtggaccctccaaattatctcgtttcccaaattttaaaattgcattgggattatttcatctct

SEQ ID NO: 190820 - DNA, 201 bp, Homo sapiens
tctatatggttgatttatattttccttgtagaaagaatcttgatttttttggtatttagtttgtcctcaggtgtaaattttatgtttgggaaaaattcatstagccattttatattttgattgtggaaacaaagaggaaatctgaagtggtagcaacaataaagggactatgtttaaccacatagtaggtgcttagtaaat

SEQ ID NO: 190821 - DNA, 201 bp, Homo sapiens
taagttcaggtttattttaataactcttcctatataatatttgtctttaaacaattataatcatttaaaattagacaaagtttgtgatttaagtcaacatkagatagaagttaagagcttgagctttggtatcagtgggaattgggtgagactctttgatcaagcaagtcgtgtgaccttaggcaagctacttgttctctc

SEQ ID NO: 190822 - DNA, 201 bp, Homo sapiens
agacaaagaggatgttatgaataattttacaaataagttttgagtaaagttgacaattttctggaaaaatataagtcattcaacattgatacaagaggaaktagaaaatctgaatagtcatgatctattaaaaaattaaatttaatgttattaactctcatacagagaaaaccccaggcctaaatggctttattggtgaat

SEQ ID NO: 190823 - DNA, 201 bp, Homo sapiens
ttacttgttaaaaagactaagagaagactgttacctagattttttttttctgtttaaagttaggtaatacttgctcaaccaattaattttgaagcatctcstttttataacctgtctttcacaaaagcttaggtcttttgatggtaaaaatattttgagttttttatgtcttaattttttgtattatcttttctgtttctg

SEQ ID NO: 190824 - DNA, 201 bp, Homo sapiens
gtaaatatataaatttaggaaataggaataagaattaaaaaaattaatgatctgaatttccatctccagaaagaaaatcaaacctagagaaagtagaagaratgaagtaattaagagcagaaattactgaaattgaatctgtagagaaatttaataaagtaaaatttagatctttgaagagattaatgtaattgataaact

SEQ ID NO: 190825 - DNA, 201 bp, Homo sapiens
cattgtgctatacggatgctacttttcaggtttgaccgttctgtgtacctgaattttgtctttaatgataatttgttctattatttaaaataccttgtgcktattataaatatgggattcctttaacttgtaaaatctagcaattattgagcactatgacatgtcaggcatgaaaccaggtactttttatatgctactgca

SEQ ID NO: 190826 - DNA, 201 bp, Homo sapiens
ggcttgaactcaggagtcagaggttgcagtgagctgagattgcgccattgcactctagcctgggtgacaagagcaaaactccatctcaaaaaaaaaaaaaattctaacataagaattttttgaatgatctttttattgatttctaacttaattacactatggtcagagaatatatgtaattttcatcttttaaaatttgtt

SEQ ID NO: 190827 - DNA, 201 bp, Homo sapiens
gaacctcaataagatattttgtatagttttttcattattattcaatttaaaataccactttctaattttcattatagtttcttctttgagctgtgagttayttagctatttattaaaaaaaatttctagccaggcccggtagctcatgcctgtaatcccagcaccgtgggaggtcgaggcgggtggatcacctgaggtcag

SEQ ID NO: 190828 - DNA, 201 bp, Homo sapiens
ttaaaaatgaattttattttctgctgagatgatgtagaatgtgaatgtattaatagaaattgattcacgtttccaggatatcagattgagaatgtgtatcragactcttcaaagtgtagatttcctttgattcaagaattctaggaatcctcacttaggagttaaacacaaaaatatgtattcatctcagtgttgttcgtt

SEQ ID NO: 190829 - DNA, 201 bp, Homo sapiens
actggaattaaaggaaaaacatttataataaagacagcatatatttcttcagggatgacattaaataatagatttttgtgttaaccattccataaatgtgytctcagacacacaaaatgacctttatacttttattcttgtgagctatggagcttaaaagcaaaccacttcaaccagatgttgatccaataaatttatcaa

SEQ ID NO: 190830 - DNA, 201 bp, Homo sapiens
tttctaatggttcatacaataatgatgccctttattgaaatatttttttctatctctgtataattctttttgttaggtaatattttttcccttttaaactmtatgtgctgatgtagaatggctttaaaatatcgcccttttattcagtgttcaattttttttttgcgccagttttccaatttaccttgtaaaattgacacc

SEQ ID NO: 190831 - DNA, 201 bp, Homo sapiens
tataagagtgggactgcttaaaaatgaattttattttctgctgagatgatgtagaatgtgaatgtattaatagaaattgattcacgtttccaggatatcakattgagaatgtgtatcaagactcttcaaagtgtagatttcctttgattcaagaattctaggaatcctcacttaggagttaaacacaaaaatatgtattca

SEQ ID NO: 190832 - DNA, 201 bp, Homo sapiens
cagccccgaatggctcttgagaaaggggtgaatgaggaactgagggaaggctcactctcaccgccagcctctgggatcctagatcctagttacagaactcygtgtctcccatggatgtgtgagctggcaggggcatctccctggggagcaggcagagacaggccgttggacagcatggagcccaaaagttttcatgcactg

SEQ ID NO: 190833 - DNA, 201 bp, Homo sapiens
aaacctgacctcttttttccattttcctaataaactctaaatgaacttagaaaaaaaaaagaaaaccactaaatctaaaaggaaaaggtagaaaatagctwatattgggatgggcaagacatttttaatcagaaaattaaaaggcagcagactcaatcatactgttacagagaaatatatttgcataaaatggaaattttt

SEQ ID NO: 190834 - DNA, 201 bp, Homo sapiens
tttattgaaaatgaaaaatgcactccacagggtgggagccggctggagcaagtggctgaagattgcaggttacagaattgtctggggttggtcactttccrcaaccaatcagaagctgaagttacaaatttacaccctatgcaaatgtctaattggtcatagaaagcaaccattcagaggctgaagtgaagttacaaagtt

SEQ ID NO: 190835 - DNA, 201 bp, Homo sapiens
gtaaggaagctggcagccctgtgctgggtacctgaataccagggctagttcccagccccgaatggctcttgagaaaggggtgaatgaggaactgagggaargctcactctcaccgccagcctctgggatcctagatcctagttacagaactctgtgtctcccatggatgtgtgagctggcaggggcatctccctggggagc

SEQ ID NO: 190836 - DNA, 201 bp, Homo sapiens
tgcagttgcctctgtgcttaggcattgtgcgctgaagggcccaagttggaaagggaaaagagaaaaaagcattcccctgtatggagcagagaggaaaacgwgaagaaaaataaatctccaattttgggcttacctcctggctggctttccaaaatacgttactggtggaggatgtccaggttcttggcattttgaacaaag

SEQ ID NO: 190837 - DNA, 201 bp, Homo sapiens
ttaaacagtagcacataacaccatttaatacaaccccaatttgaattccaaaggggtttttaggttgttttttttttttttttttttttttttttgagacrgagtctcactctttcgcccaagctggactgcagtggcgctatcccggctcactgcaagctccgcctcttgggttcatgccattctcctgcctcagcctcc

SEQ ID NO: 190838 - DNA, 201 bp, Homo sapiens
agaggcaatgttaaattgaagggtgaagagtaaggaagctggcagccctgtgctgggtacctgaataccagggctagttcccagccccgaatggctcttgrgaaaggggtgaatgaggaactgagggaaggctcactctcaccgccagcctctgggatcctagatcctagttacagaactctgtgtctcccatggatgtgt

SEQ ID NO: 190839 - DNA, 201 bp, Homo sapiens
ctataattatttaaggcaaaagaatataagtgaagaattttaagcaggagattaatatagatttaaaagttagaaaaactcctaggtagttgtgtagaggrtacactggggaggagtgagagaggaagtgatggagaattgctaaaaagctagtcacagactgcaaaacaacattttggtcaacaatggaccacatagaag

SEQ ID NO: 190840 - DNA, 201 bp, Homo sapiens
tattttaaccataatatctctttttaacagggggcctgggcagcttgatactactagaaattactgttggaagatttgtttctcaatttgacaaatcaaakgaggaataaaggatcttacttgtggctttccttccattcccataatggtcgtggactgggaggaaagttttcctacataagtagtaaggaaagaaactga

SEQ ID NO: 190841 - DNA, 201 bp, Homo sapiens
ctttccacctcctaccacccatccaccctttagaaaatgttctttctccagcaagccccttcattcactctgttattctatcaggggaacctgcccccaayatttcaacatagattctttctattttccataagtgttggctggctgagaaataaagagaaagagtacaaagagaggacttttacagctgggccaccgggg

SEQ ID NO: 190842 - DNA, 201 bp, Homo sapiens
atatcaaataaaggaacatttttataagaagtggtattggcattactatttaaagcttattttagtatacagatcaaatatgaaagaaatgaatataagayggagtcataatttatttacaaaactctagtttatagcagatggctctttcatcgtgcaaggaattcagtgcccacatcttaggtttgtttcattcctgct

SEQ ID NO: 190843 - DNA, 201 bp, Homo sapiens
agacccctcagattcctctctaaggcccaggcaaagcaatgggggctatcctgaaaaccctgagggagaactgtccaagtgtattattgtttttctctggyattaggattttcccattcaaaggcaaaaaggtattgggattctggggccagaggaatggaaaatgaagcatcttctaggtctaggactgagaaccattta

SEQ ID NO: 190844 - DNA, 201 bp, Homo sapiens
atggcccctccctaattccactggctgccttccccaaggacccctgtgagataagtcagggatggctttctctggtttgagccgggaactgggagtgcctmcagggcgcttcccgctccttcttctactttgatatttcacttggctgcctaaatccattttaacttcagatgagattaaattcttctcctgtgatctgga

SEQ ID NO: 190845 - DNA, 201 bp, Homo sapiens
ctatgctgttttattcaaaagtttaagttactacctatattaaaataaaaaatattgaagagaatacagcactatggagagtattcttttaagtttataaytggtatttttagatagaaaaattatgctatataaaattaaatatcaaataaaggaacatttttataagaagtggtattggcattactatttaaagcttat

SEQ ID NO: 190846 - DNA, 201 bp, Homo sapiens
gctttatgctggcatgtttgctccctttattacactgtgttgttctctgagaacagttcatcctggcttctccatgcccctgattcttgggcattgtatgsatgtgagtttgtttattcagtcattctctgcatttttattttctcctggatgccatactctctgctagctgctaaggatgtgatcatggacctgtcggag

SEQ ID NO: 190847 - DNA, 201 bp, Homo sapiens
cttttaaaagagtgccagctgtggtagtagaagggggatacaagtttgttctttgttggccaggatgagtacttgggttcttcaggcaatggatggggctytagagttctcaagggtttatgtattttggctcaggctaccagggtgggtagtgaaaaaccatgaggtgggggcaggcctaggcaggtctgagctcagact

SEQ ID NO: 190848 - DNA, 201 bp, Homo sapiens
tcgtggatgagaatgatgtataaatttgagtacttttgattaaaatatgaagttattgttggttcaacaaatgcaagttttatgtcaaaggaaatgaaaamaatgtttgctccacaggcgatttttgatagaagatatctggtagctttttaaaagctcatggttaatcctacaaaattgcttttaaaatattttaagaga

SEQ ID NO: 190849 - DNA, 201 bp, Homo sapiens
gctgggcgtggcagcgcatgcctgtagtcccagctactcgggaggctgagggaggagaatcgcttgaacctgggaggcagaggttgcagtgagctgatatygtgccactgcactccagcctggtgacagagcaagactctgtctcaaaaaaaccccaaaaaaccaaaaaacaaaaatcaccacccactgcagtaaatattg

SEQ ID NO: 190850 - DNA, 201 bp, Homo sapiens
gcttttaaaagagtgccagctgtggtagtagaagggggatacaagtttgttctttgttggccaggatgagtacttgggttcttcaggcaatggatggggcyttagagttctcaagggtttatgtattttggctcaggctaccagggtgggtagtgaaaaaccatgaggtgggggcaggcctaggcaggtctgagctcagac

SEQ ID NO: 190851 - DNA, 201 bp, Homo sapiens
tttctgtttgttagttaatgatctaattaattttctagaacagatatcttaaaatattgaaagctgaaaaattttttatgggaagaaagtttggaatgagwctactaaattaactttgcttgtatttgctacgttaacagaaagaaaaatctttttaatttgaatctgttcccattccctgtttatatgacttgaggttat

SEQ ID NO: 190852 - DNA, 201 bp, Homo sapiens
acttctgtttaatttgggattaaagtttgggattaaaaacacatgagcaaaaatctcataaccccagttcagtcatgagagaaacaccagacaaatttcarttgagggatattctacagaatatatgtccagtactcctcaaaactgtccaagtcatcaaaaaacaacaaaagtctgagaaactgtcgcagccaagggata

SEQ ID NO: 190853 - DNA, 201 bp, Homo sapiens
cctatcaggaggtaataggctgtcaccttaagtcatgctttttcgttttcttttttttttctcattctgtctcccaggctgcaatgcagtggtgtgatctyggctcactgcagcctctgcctcctgggttcaagcgattctcctgcctcagcctcccaagtagctgggtttacaggcatgcaccaccacacctggcagatt

SEQ ID NO: 190854 - DNA, 201 bp, Homo sapiens
cttttctggttactattttatagaaaaatgtaattgctaggtatgtcatttaagaccctgcaatctatttgtctgaaaaatggaacaaatgctagtaagarttttaaatgactctcaaagcctcctgcaaaatgacattagcagttgaaataaaatagttaacagtctaaaaactgtttaagataaagcccataactatta

SEQ ID NO: 190855 - DNA, 201 bp, Homo sapiens
tagacagccagtactacccactatatatgtaaaagtcacagtgattcaatgcagtcagttattttacatgtgcaaattatgagtggtcttgtatggggacrgttttgaataacatatagaaagtactatgtagtactgatatttttctgagcatcaaatatttagagaaaaaaatctgtggtgttttagaatataatataa

SEQ ID NO: 190856 - DNA, 201 bp, Homo sapiens
agcttcgtgaaattggatttgataatgactttttaaatatggctctaaaggtataggcaacaataaaaatagataaattggactgcatcgaaattaaaaayatgtactttgaaggacactattaacagggaaaaaaggcagttcacagaatgggagaaaatacttgcaaatcatgtatcagataagagattaatatccaga

SEQ ID NO: 190857 - DNA, 201 bp, Homo sapiens
tctctctcccaggttcaagcaattctcctgcctcagcctcccaagtagctgggactacaggtgcccaccaccacacctggctaatttttgtatttttagtrgagacggggtttcatcatgttggctaggctggtctcgaactcctgacctcaggtgatctgcctcccttggcctcccaaagtgctgggattacaggcgtga

SEQ ID NO: 190858 - DNA, 201 bp, Homo sapiens
ggattgacatacttaaaacttgaatggagaaatagggttagatattgagagatcccaaggaaacctgtgaaaaccttaatatatgtgtttttatgtacacrtaatatgtaacatattacattcatcaaaacatgggaataaattgacgtactcttaatttttaaaagccccataaatatattttacttaaaaccgtaatgg

SEQ ID NO: 190859 - DNA, 201 bp, Homo sapiens
attagggattgacatacttaaaacttgaatggagaaatagggttagatattgagagatcccaaggaaacctgtgaaaaccttaatatatgtgtttttatgkacacgtaatatgtaacatattacattcatcaaaacatgggaataaattgacgtactcttaatttttaaaagccccataaatatattttacttaaaaccgt

SEQ ID NO: 190860 - DNA, 201 bp, Homo sapiens
gtgaagttcatggaagaaataacttaaggctctttaatatacttttgttggtgaagagaatttcaagctgtttcagtcagttagcatatattctttaaaaractgatatcctattcgtagtcttctcttatatatccttgaattatcttccatgatttttatattttatatacttataatagcatattataacaacttaat

SEQ ID NO: 190861 - DNA, 201 bp, Homo sapiens
gagctataagagtggtctgattcggaggttgcagtgagccgacatggtgccactgcactccagcctgagcaacagagtgagactccatctcaaaaaaaaaacaaaaaaagaatgatctgattgtcaaatctttttttttttcattgtttattcttaaagtcaggacatcttttagaaaacactttgaaaatacatatgttg

SEQ ID NO: 190862 - DNA, 201 bp, Homo sapiens
tttagtttttcttggtttacactttcctacaatactaaaatatgtgtaaccccctcactaacatctttgccaaaatggagttttcaagacattctctgaakctcaggactgtttttttgttgttgtttagcattggcatttctccagcggaatactagccagtggtccagtcatgtgtggaggaggtcatgctgattaaca

SEQ ID NO: 190863 - DNA, 201 bp, Homo sapiens
gtaaagtgaagttcatggaagaaataacttaaggctctttaatatacttttgttggtgaagagaatttcaagctgtttcagtcagttagcatatattcttwaaaaaactgatatcctattcgtagtcttctcttatatatccttgaattatcttccatgatttttatattttatatacttataatagcatattataacaac

SEQ ID NO: 190864 - DNA, 201 bp, Homo sapiens
ttcttagtgattcctttaacctatcaggaggtaataggctgtcaccttaagtcatgctttttcgttttcttttttttttctcattctgtctcccaggctgsaatgcagtggtgtgatctcggctcactgcagcctctgcctcctgggttcaagcgattctcctgcctcagcctcccaagtagctgggtttacaggcatgca

SEQ ID NO: 190865 - DNA, 201 bp, Homo sapiens
tttataattcttgggctatgtatccattccttggtcaagggaatgtggtactctttgattgactctttgattgataagataacattttatcttactaggaragcataaacttccaaaggaaaaattacgtaaaggagaagacatggatgatagggaaaaaagcaacatatcatgtcatatcactttaccatgcatagaaat

SEQ ID NO: 190866 - DNA, 201 bp, Homo sapiens
atggaagtaaaataacagtgtaagaatgaaataacaatataaaatgataaaaataacgcctggtaacttcgtttcttttatttaggctagaatttaaatgrcagaattaaattgtgcattgagagttttgatagaaaatggcaactgagacttctggaaaaagaagcaattgaacataggcatctacttttgttcctccca

SEQ ID NO: 190867 - DNA, 201 bp, Homo sapiens
ccagattaacttaattcacgctcatttctagctcaccctctttctttcttaaagcatgaagtagaaggtagttcatggctcagcttaaactcccattacaytgaaagatttcagtaaagtaaaatttcagtaaaatttgttcccaattttaccagtctgagtgatcctaagctgcacagtattcattttactaagggagca

SEQ ID NO: 190868 - DNA, 201 bp, Homo sapiens
tatggaattacaaatctcatttttcttttctactgggattacaaaccatattgaaaaaaattttacagttcaaaaatcagatgactgacctgtcgaaagcragttgtaacttattggcatacaattgaattactgatttttacactatttattgaatgtatataatttacttttattactgatttaaaactaccatcatat

SEQ ID NO: 190869 - DNA, 201 bp, Homo sapiens
ttatgttctaaagtcactatttacctagtagatatggtaacttatttttgtcatggctactggccatatctgagagtttaacatatgctagctgaaactgytgcatactttttaaattctgaactataattgcctagaatgaatgaaatcttttatttcaatagatatttttgcttgaaagatttcattttatatttatga

SEQ ID NO: 190870 - DNA, 201 bp, Homo sapiens
acaagaaacaatccacccagtctgtcatctcttttcagcttattagtagtagaatctcttaggtggctctttaaaccgtgtgtattaaaagtcctaaagtygttcgtggagatttccagttgctagggaataccaacacttatttggtgtttgatattgtaaatcatgatagttattggggccaaagggaggtctgtaaat

SEQ ID NO: 190871 - DNA, 201 bp, Homo sapiens
agctcccactgagagagaccaaattttagagtaaaccactgtaatctgggcagatcttcggagagaaaatgctcagattgggttgagaggcaatgttaaawtgaagggtgaagagtaaggaagctggcagccctgtgctgggtacctgaataccagggctagttcccagccccgaatggctcttgagaaaggggtgaatga

SEQ ID NO: 190872 - DNA, 201 bp, Homo sapiens
tcagtcttctaaatttttgcattttcagaattttgacataatacattttaatacttttagacattggcaatgatttttaagaagcaaaaatgaatcataaktgctttccaaattaagtgaagtaattgtaaaatactcagctcagagcctagcacatagcaatttttgtgacaatcattgtttatgattgtgattgttact

SEQ ID NO: 190873 - DNA, 201 bp, Homo sapiens
ataaaatcaaagacgtttagtaaaatattttgcccttaattttccatggatagcttgtttatgaagagttcagtattcagggaagatggaaaaacagcccwgtgtcagctaaagtaataaaaccgacttaatcccaaattgacaatttaaagccctttaaaattacttgttgcaaacaagaaacaatccacccagtctgtc

SEQ ID NO: 190874 - DNA, 201 bp, Homo sapiens
gggctgttctgtgcattgtaggatgtttagcagcattcctgatttctacctactagatgctaataagttcctcccacccaatcctcatccccagttgtggygaccaaaaatgtctttaagcattgctaaatgttccttgggctagataatgccacctgaataagttcttctctgaatttatttacagcattttgggaggag

SEQ ID NO: 190875 - DNA, 201 bp, Homo sapiens
gaacagggatgccttgatatatctgcctttggcaatgccgtgtgtacggagctgggattctgattgctcctattgtgatagtatgccactaatgctctgtyggacggaatgactaactgaagtggtgagaaaactgcgagcctttcaggactgtttttaatgcttttttgacaaatcttttagaacaaatcttttgttcct

SEQ ID NO: 190876 - DNA, 201 bp, Homo sapiens
agatggctgactagatgcagccaggaagtgcagctcccactgagagagaccaaattttagagtaaaccactgtaatctgggcagatcttcggagagaaaaygctcagattgggttgagaggcaatgttaaattgaagggtgaagagtaaggaagctggcagccctgtgctgggtacctgaataccagggctagttcccagc

SEQ ID NO: 190877 - DNA, 201 bp, Homo sapiens
agtgtggtcatcaaccagattttagagcacattaacgaaggaggtttacttttgcagggatttcttactgccaaatttttcctttgctatagctttcacayactgtttttgtgttttccttttccataaaacagtatttcttaaggccattgttatttatgtgcaaacaaatgaataaaaaaaactttcgctctttaacat

SEQ ID NO: 190878 - DNA, 201 bp, Homo sapiens
tgtagatgtctattaggtccacttggtgcagagctgagttcaggtcctggatatccttgttaaccttgtttctcgttgttctgtctaatattgacattggrgtgttaaagtctcccaatattattgtatgggagtctctttgtaggtctctaaggacttgctttatgaatctgggtgctcctgtattgggtgcatatattt

SEQ ID NO: 190879 - DNA, 201 bp, Homo sapiens
tgcattggttaatttatggtcattcataaagacgtttgggtagaaagaaaatgggtaatggggaaaagtcatagagtggccaaacaagaaacaagtttagrgttccagcagaacagggatgccttgatatatctgcctttggcaatgccgtgtgtacggagctgggattctgattgctcctattgtgatagtatgccacta

SEQ ID NO: 190880 - DNA, 201 bp, Homo sapiens
cacagagctgttttctcaaaacatagatttgctaagccctcattgagggattattgaatggccaattcatgtatatctagaacttactcatatatttcctygctttttgtgaggaaagagtagttcttctaattgttctttttatggttctggtaaggcattttagacagtatggttgcatataaaatttcattgcagaat

SEQ ID NO: 190881 - DNA, 201 bp, Homo sapiens
gctttggtatcaggatgatgttagcctcataaaatgagttagggaggattccttctttttctattgattggaatagttccagaaggtgtcgggggaacccrcccccaatattttaacgtaggttctttctgttttccataagtgtcatctggctgagaaataaagagaaagagtacaaagtgaggaattttacagctgggc

SEQ ID NO: 190882 - DNA, 201 bp, Homo sapiens
ctgtgctagacattctgcattggttaatttatggtcattcataaagacgtttgggtagaaagaaaatgggtaatggggaaaagtcatagagtggccaaacmagaaacaagtttagggttccagcagaacagggatgccttgatatatctgcctttggcaatgccgtgtgtacggagctgggattctgattgctcctattgt

SEQ ID NO: 190883 - DNA, 201 bp, Homo sapiens
cccctccaaaccatctagcagtcggtttttaaacatctatcaaacctgacctcttttttccattttcctaataaactctaaatgaacttagaaaaaaaaaagaaaaccactaaatctaaaaggaaaaggtagaaaatagcttatattgggatgggcaagacatttttaatcagaaaattaaaaggcagcagactcaatcat

SEQ ID NO: 190884 - DNA, 201 bp, Homo sapiens
tggataagattttttatgtgctgctggatttggtttgccagtattttactgagaatttttgcattgatgttcatcagggatattagtctaaaattctcttyttttgttgtgtctgtcaggctttggtatcaggatgatgttagcctcataaaatgagttagggaggattccttctttttctattgattggaatagttccag

SEQ ID NO: 190885 - DNA, 201 bp, Homo sapiens
gctacttcaatctttgaaatattgttttggcagaaataattatgttgctacctacaggtggttatgctttgtttgatgtttaagctgacagggaaatgggscaaaaaacttttgaaagcatttatttactatttacccatgtttaactacatctctaataaatgtcctctagtccagtacaatacctttgccgccattgtg

SEQ ID NO: 190886 - DNA, 201 bp, Homo sapiens
tccaaagaaaaagcctggaagagccaggaagggtcttctaaggacagaaggtgtggaagatgcagcaccctgattgtgtctcaaaagtacaacttggcttygtagtagaccttttcaacagttttctaaaattctatgacatggaagtcaacagtattaatagccaaatcacatgttacaatttcttttcttcatagaaac

SEQ ID NO: 190887 - DNA, 201 bp, Homo sapiens
aagggatgatgtcagtttctaccctttagaactcttatgatggccagacatagtatttccctctgttgtcaacacttgagaaaaatttgccaagtggggayttacgaattgaaaagcagaggatattagtaattgttgttttaagaagagaaaaattcatttttcaattttttttagaaaagaacaaaggagttgaaattt

SEQ ID NO: 190888 - DNA, 201 bp, Homo sapiens
ggtttctaggttggatgatttttgaatagaggtgcagtttcactgagatggggaatatcattgaagaacaggtgtatgcgtgtgtgtgtgtgtgtgtgtgkataaggtaatgagtgcattttagatttgtatctgaaatggggatgaaaatgtgtttctggagctcaggagagaatctaaggtgtaggaaatgggtaagga

SEQ ID NO: 190889 - DNA, 201 bp, Homo sapiens
tggttttggttagggtcactttcttcttattcacggtatgctgggagtacaagggatgatgtcagtttctaccctttagaactcttatgatggccagacatagtatttccctctgttgtcaacacttgagaaaaatttgccaagtggggacttacgaattgaaaagcagaggatattagtaattgttgttttaagaagaga

SEQ ID NO: 190890 - DNA, 201 bp, Homo sapiens
gtgaagtcaatcaagaaagtacataggaagatgggaaaggatgctggtagacagccagtactacccactatatatgtaaaagtcacagtgattcaatgcartcagttattttacatgtgcaaattatgagtggtcttgtatggggacagttttgaataacatatagaaagtactatgtagtactgatatttttctgagcat

SEQ ID NO: 190891 - DNA, 201 bp, Homo sapiens
caatgaatttgagcatttctttctttaaaaaagtggatgttcctcaaaactcaaaaggaaactcaaaatcacttcaggaacatcttaattctgtattcaamggcagaaatacagcatattaaatggcataagcccactggatttattcagatctaaattaagcattgataggatggacctgaaaaggaaaacttatcgtgt

SEQ ID NO: 190892 - DNA, 201 bp, Homo sapiens
agatggaaaaacagccctgtgtcagctaaagtaataaaaccgacttaatcccaaattgacaatttaaagccctttaaaattacttgttgcaaacaagaaayaatccacccagtctgtcatctcttttcagcttattagtagtagaatctcttaggtggctctttaaaccgtgtgtattaaaagtcctaaagttgttcgtgg

SEQ ID NO: 190893 - DNA, 201 bp, Homo sapiens
acacacacacacttatattgtgtatgtgtatatatacatatatttttaattaaagatatataattcatatatattccttaaagatacatatatatatatawgaatatatattctaataaataatgtaacagtataagtatcttgtttgggataatacatattatgtgttaggcttcttcagagagacagaatcaaaaggag

SEQ ID NO: 190894 - DNA, 201 bp, Homo sapiens
caccagggggcagcaccggacactgcctttcctagaggcctgagtgcatttaaggctttctggcagtgctctccacccctcttcctcatacagcccttacrtatttttggtattttcttacacattttaggcttagtgagtgtttaataaatgttagctgtttaggcattgtgctatacggatgctacttttcaggtttga

SEQ ID NO: 190895 - DNA, 201 bp, Homo sapiens
ttctgtttcctctacctgttctatacttctccatcccattattagtttactgaatttttaaatgtattatgcatgacattactctcatttgccacattaayctttttttcttttctattttaaggaaaagatagagtttttaataccccattgtgtgaacaaggaattgttggatttggaatcggaattgcggtcactgga

SEQ ID NO: 190896 - DNA, 201 bp, Homo sapiens
ctcttgtctttaatatctgtctgtctttcttcatctttctttttctgtgaatacacacatgctatgtgtgtatatgtatctatatacacacacacacacamttatattgtgtatgtgtatatatacatatatttttaattaaagatatataattcatatatattccttaaagatacatatatatatatatgaatatatatt

SEQ ID NO: 190897 - DNA, 201 bp, Homo sapiens
acagtctgtcctgtcatagggcttctagtctgatattgggctgattcaccacttttggtttaaaatcctagtttctcttgtctttaatatctgtctgtctytcttcatctttctttttctgtgaatacacacatgctatgtgtgtatatgtatctatatacacacacacacacacttatattgtgtatgtgtatatataca

SEQ ID NO: 190898 - DNA, 201 bp, Homo sapiens
tgtgcctcaggtgtcatcaaggatgggcatcgaatcactgtttcccttttcataatcaactcccaaaaggtgaaaatttcccctctggcttcctagtatcytaatatattattaatttatttactttattattttattattatttactttatttctattttatcctgattgtatctcttaaggtacatattcttctttttt

SEQ ID NO: 190899 - DNA, 201 bp, Homo sapiens
tggtagagatgttttctaataagagtaattctgtgactcattttagttcccttgctttttattcctgtgagccatagaaagaacccactgtagggggttaraaatattttttcttatgattgtgggatgaaagagtggttgctttttccaaccaccatatgtggtgattaggcttttcagaatgacattggggtacacact

SEQ ID NO: 190900 - DNA, 201 bp, Homo sapiens
gacagatgaaacaaaattagtgaagcagtatgcaacctatggtagctgtggaagggatttaaaggcagtatttctaaagtgcttcgtccttttaagtggartttgcccatgaccaaatatggtatttgggtatttagtatgatgccctggctctaaaacagtgtttcttaaatttttctgaatttttttgaccgtggtaac

SEQ ID NO: 190901 - DNA, 201 bp, Homo sapiens
tgacagagcatctcaaagttgacttccctcatggtggccatatggctccagcagttctcagcaagagttctgaattcaccctgattagaccattaaggtcrtatttcaactagtaactgaggctgggggaatggaatatgctcatttgtgaagtcaatcaagaaagtacataggaagatgggaaaggatgctggtagacag

SEQ ID NO: 190902 - DNA, 201 bp, Homo sapiens
agaagaactgagtgagggctgatttctgctacatgttgaagcaaaggagccccccacatgtagatgatgtggacatcacttgtctctgtcccttaagagamcccaaaacacacagcactgatgacacctgttctgcctctcacctaccatgggaccagatgaggttgatttaacttgacttgtcctcctaggatgttcctc

SEQ ID NO: 190903 - DNA, 201 bp, Homo sapiens
tttctgctattaatgccttttgaagtattgtgttgtttgtgaacacatagtacaaattgacttttgtttttttaattatcaattttgtttctgtaactgcrcagaaaagtgataaattgtgagcttatattttcttttaatacatagatatcgcctcccaacatacatgaattttaagacactaaaaaccccttaaagatc

SEQ ID NO: 190904 - DNA, 201 bp, Homo sapiens
tgagtaagagcccaaaataaccaagatactccaaagaagaactgagtgagggctgatttctgctacatgttgaagcaaaggagccccccacatgtagatgwtgtggacatcacttgtctctgtcccttaagagaacccaaaacacacagcactgatgacacctgttctgcctctcacctaccatgggaccagatgaggttg

SEQ ID NO: 190905 - DNA, 201 bp, Homo sapiens
gtagttagaatgtaggtcttatgcttcaagttactgtttgctactttatttgcaaatgttttttcctcaatatgaggccattgctgtaagatgtcctggcrtggggagtggtatcatattgttgtttctaaaagtggtcctgaaacagttcagtattgaaggcagtgtagatatacttaatattaatctccccacttgatt

SEQ ID NO: 190906 - DNA, 201 bp, Homo sapiens
tgtatcttgtcttgcttaggttttgacctttgtcttcatgttatcctgcattgctatacaacaattggggcatcttgtggttgaagttttaaggtaaaatraaaccatggttactccttgctgtttcattggctggccctgcagttcttcatgcttactagctcccttcctgccattgctactacaaaagccctccagacc

SEQ ID NO: 190907 - DNA, 201 bp, Homo sapiens
aagcatccattttagcagcactcatgcattctatcactgatgctcaagttaacaacatgaagacataaattatagttttcacctttacactataactcttrgggttataattttcttccagactcccccccagttctttctttcaagctgtagttagaatgtaggtcttatgcttcaagttactgtttgctactttatttg

SEQ ID NO: 190908 - DNA, 201 bp, Homo sapiens
aggcttcttcagagagacagaatcaaaaggagatagatagatgagaggggatttattaaggggttcgttttatgtgcttatcgaggctgagaagtcctgcracaggctgtctgtaagctagagattctgggatgctggtagagaggctcagactaagtctaaaggcctcagaaccggagaagacaatagcgttactctgag

SEQ ID NO: 190909 - DNA, 201 bp, Homo sapiens
gataatacatattatgtgttaggcttcttcagagagacagaatcaaaaggagatagatagatgagaggggatttattaaggggttcgttttatgtgcttakcgaggctgagaagtcctgcgacaggctgtctgtaagctagagattctgggatgctggtagagaggctcagactaagtctaaaggcctcagaaccggagaa

SEQ ID NO: 190910 - DNA, 201 bp, Homo sapiens
ctttctacttgagcttagtactgagcttgtcctgggctatgctgccacttagccaaggaggtgaaggggatgagaggaggaagccataggaagggcatgtrgcaaactcctcatagtatgactgttgcatgatttttaccatttctgcaagtttcatgtaatgtctctcatcagaatatcagatccagtgtctctcttcag

SEQ ID NO: 190911 - DNA, 201 bp, Homo sapiens
taaagcatttatatgtatattacttaacaactaaaaggtatgtacttatgcagaatactgccatcattgctcttttctttactgtaatggtaccattcatsaggtccatggaagccagcttctcacacattctctcttagacataggcgttttctttctttcttttctttttttttttttttttggtgacggagtcgcact

SEQ ID NO: 190912 - DNA, 201 bp, Homo sapiens
tgcaccccaccagggggcagcaccggacactgcctttcctagaggcctgagtgcatttaaggctttctggcagtgctctccacccctcttcctcatacagsccttacgtatttttggtattttcttacacattttaggcttagtgagtgtttaataaatgttagctgtttaggcattgtgctatacggatgctacttttca

SEQ ID NO: 190913 - DNA, 201 bp, Homo sapiens
ggtacttgctccaaggagcattcatttaagaggagggatgctcctatttgggtcttcactgtataaagcatttatatgtatattacttaacaactaaaagstatgtacttatgcagaatactgccatcattgctcttttctttactgtaatggtaccattcatgaggtccatggaagccagcttctcacacattctctctt

SEQ ID NO: 190914 - DNA, 201 bp, Homo sapiens
ctgactttttaatgatcaccattctaactggtgtgagatgatatctcaatgtggttttgatttgcatttctctgatggccagtgatgatgagcatttttttcatgtgtctgttgactgcataaatgtcttcttttgagaagtgtctgttcatatccttcgcccactttttgatggggttgtttgattttttcttgtaaatt

SEQ ID NO: 190915 - DNA, 201 bp, Homo sapiens
gccggctggctactcaggctcagggcggcaggggctgaggggcactggcgtcggcttcctggcgcggggctggcgcggggctttttgcaccccgccgcgaytgtcgaggatgcggcccagaggcggcaggtggctcattttactttccagccagatccggagccccgggagtacggtgagccctgggactgcccactcggt

SEQ ID NO: 190916 - DNA, 201 bp, Homo sapiens
tttccattggatacaaacaataattacaattgctagatgtgttttaatgaatagtttgaactcatcatgctagcaaaaatcatctgcatataaataatagrgcaatttcaagcaattttttcttacttaggtcagatattcctgccagaaacttgtttgctttgttaatttgttcaattattaaactttgagagtacaaag

SEQ ID NO: 190917 - DNA, 201 bp, Homo sapiens
gcaaatattttcttatgtcacttatacatgtacaacaatggccatatttctgaaatgtaaatgaaagtataatgccttcttcgatttttattttgaccacygagtaaattaaaccttcaataatctcataaaaatgagatattttcttgctatacctctgatatcccctgtcccctgaaaaaatatgaaattagtacagag

SEQ ID NO: 190918 - DNA, 201 bp, Homo sapiens
gatacttcattttccaaaaatgaaacaagacaaaaaggtaaatttgttttgttttgttacagaaaatagtcaaatgaagatattttgcctgtgtctgtgaytttaatgatttggaattgttatttcacattgtttgctttcttttctggctataatgtgcatagcaatccagatggctaatatataaacaattggagttat

SEQ ID NO: 190919 - DNA, 201 bp, Homo sapiens
tcggatcaccgctaacagctgattactaaggaacctgctcttaccgaacagcatgcagtgggagaaactaatgtggagaaaataatcagttttccttgttwtagggatcatacaaccagaaggattttaccactgtcttacaacatacagggatgcaagccatggatttgggtccatgtgtttagagaacaatggaaattt

SEQ ID NO: 190920 - DNA, 201 bp, Homo sapiens
caaatggagcaaattacttaattgacattttacaattaggtattaaagcatcctgttcaaggttggaggacagtataaacttatttaaaatgtctagtgarcacagtctgtcacagggatatgggaaaaaggcaaaattgtattaagatattatttgtaagcaagtgctcttcatttccaagcagtctgtccctgaagggg

SEQ ID NO: 190921 - DNA, 201 bp, Homo sapiens
gcagaattgggtttaggatcatccaggcttatacaacatagggggaagatggagtgactatcctgtggtaagaatgaatccatcttatgagagtccatggyacagtggatatacagcatgcttatctaagcttaattactggttccatgtatgtacttcggcaagtcacttaacctctctagtcctaaccccacatctgtg

SEQ ID NO: 190922 - DNA, 201 bp, Homo sapiens
ttatcactgaatgcagaattgggtttaggatcatccaggcttatacaacatagggggaagatggagtgactatcctgtggtaagaatgaatccatcttatragagtccatggtacagtggatatacagcatgcttatctaagcttaattactggttccatgtatgtacttcggcaagtcacttaacctctctagtcctaac

SEQ ID NO: 190923 - DNA, 201 bp, Homo sapiens
acctcacagccaatattcttgatattctggttgaggagataactgaagcctaggagtttagatcagggtggtatcacttctcacagatgaatctttacttctggcatttactcctaactctcaaaaaattgtggtattaaatattttatatgactcctagaattgtggctgtaaagtcccagcctctgtctcaatcttctg

SEQ ID NO: 190924 - DNA, 201 bp, Homo sapiens
tagttagtatcctgttttagttggctctccttcttctctgacctctgccggcctccccaacagccactgccactacctcacagccaatattcttgatattmtggttgaggagataactgaagcctaggagtttagatcagggtggtatcacttctcacagatgaatctttacttctggcatttactcctaactctcaaaaa

SEQ ID NO: 190925 - DNA, 201 bp, Homo sapiens
ccttgtggaagctgacaaaagtcatattataatgatttttggctcaataaagtaatgatagcttggaaaaagtaaaggagtacggcagcagaagaaagatractgtaacaaaacaaattatttgaacaaaagataactgtttctttaattggattctcatggaatattggtttaaaatatgctgaccaaaggcagtatctg

SEQ ID NO: 190926 - DNA, 201 bp, Homo sapiens
gtgatagccagcctttggtgcttgtactactctcaaaccatacccgagccacatgtgcaggcatgtgtgtagagacttgaggtgtactgacccaacttgtygccagcctgggctctcagaaggtttcagaagtttgttcttctctctgctcgatgggagttaaaaagtatagcagtggagagatccagtgtgagggcctgg

SEQ ID NO: 190927 - DNA, 201 bp, Homo sapiens
agaatatcttaaactaatgtctggataaaactatattaaattaagtattgtttgacaacagctaagaattaatgagaaaagtccttaaatatctctctctmtatattttttgagtgagggtatcactctgtcatccagactggagtgcagtggtgtgatctcagtgcactgaagccttgacctccagagctcaagcagtct

SEQ ID NO: 190928 - DNA, 201 bp, Homo sapiens
caatgccaagataatttaagaagcatctattttcatattgatacaaagaaggttaagcactctgtttgtaatagtcttatcaattaagtctagctacatgdaaattatatgtacctagtcttaatagataagtacaatagatatatgtacgattaatagatagatgtacaattacatgtaaaattgtaggaaacaatgaca

SEQ ID NO: 190929 - DNA, 201 bp, Homo sapiens
tggatgaatattcactgttcatttctattacaataatatcttacaactgtacaatattagaacattactactaaataatgaacattgtcattacatcataygaatattcattgttcattgatagtattattactactaagtaataataatttttcttgttattcttatttttctaagtattctagttactaaggaaagtag

SEQ ID NO: 190930 - DNA, 201 bp, Homo sapiens
tctgttgttcatttctattacaataatattacaattttgtacaatattagaacatttctacttagtaaggaacatggtcattatattggatgaatattcaytgttcatttctattacaataatatcttacaactgtacaatattagaacattactactaaataatgaacattgtcattacatcatatgaatattcattgtt

SEQ ID NO: 190931 - DNA, 201 bp, Homo sapiens
gtttctccatataattgtcactactcattgtcttcaatttctctgcttctattctctattctcacttgaagtcactgcaattaagctttttttttttttttctcttctctcctactttgcagaaacggtcatgttaaggtcaccaatgataaaatcctcagtcctcatctcactttttaatagcagtatagacacaagtta

SEQ ID NO: 190932 - DNA, 201 bp, Homo sapiens
gcggtcactggagctactgccattgcggaaattcagtttgcagattatattttccctgcatttgatcaggtaagtgaatgaacatttctaaggttgttcaktcattgaaatattcaagtattgccgctacccttccacccacccttacctgcattctaaacattttattatccttttactaatgtattacaattataattt

SEQ ID NO: 190933 - DNA, 201 bp, Homo sapiens
ggcttttttactctaacttttcggaagttgactgacaggccacttttctatagtgggaaataggcgccttgtgtgcgcggagggatttccagccccccacyccggaaccagcaattagcgtttgggcgtcctgcaccccaccagggggcagcaccggacactgcctttcctagaggcctgagtgcatttaaggctttctgg

SEQ ID NO: 190934 - DNA, 201 bp, Homo sapiens
ttgggcttttttactctaacttttcggaagttgactgacaggccacttttctatagtgggaaataggcgccttgtgtgcgcggagggatttccagcccccsactccggaaccagcaattagcgtttgggcgtcctgcaccccaccagggggcagcaccggacactgcctttcctagaggcctgagtgcatttaaggctttc

SEQ ID NO: 190935 - DNA, 201 bp, Homo sapiens
aaagaatatcttaaactaatgtctggataaaactatattaaattaagtattgtttgacaacagctaagaattaatgagaaaagtccttaaatatctctctmtctatattttttgagtgagggtatcactctgtcatccagactggagtgcagtggtgtgatctcagtgcactgaagccttgacctccagagctcaagcagt

SEQ ID NO: 190936 - DNA, 201 bp, Homo sapiens
aatcatacttgatatatttagggtgatttaaggtaagagctctgttttatttttgaccctacactctgcatcttttaacagtatccactgttcatgtacaygtggatttgttcatgggctgtccattttatgtttctttgtgtctttttagagccttacaatacctctctatcttaacaatatagctttataataaatttg

SEQ ID NO: 190937 - DNA, 201 bp, Homo sapiens
gtgtgtatacgttcattacatccagttgtctattgggcttttttactctaacttttcggaagttgactgacaggccacttttctatagtgggaaataggcrccttgtgtgcgcggagggatttccagccccccactccggaaccagcaattagcgtttgggcgtcctgcaccccaccagggggcagcaccggacactgcct

SEQ ID NO: 190938 - DNA, 201 bp, Homo sapiens
agaggaatgtatagttttctaaggtcaactttcaacgtcaagtaaaataatttaaaaaaattttcatgtagatatactttgagagacatttagatgcagtrgaatgggtttggaaaaggaccaacaaaagaataaggaaatataaatcatgctattgtagaagacattgtaaacatttcattctgagagaattttataagg

SEQ ID NO: 190939 - DNA, 201 bp, Homo sapiens
agattattgggtgagaatttttttttttttttttttttttgagatggagttttgctcttgttgccaaggctggaatgcaatggcacgatcttggctcaccrcaacctccgcctcccaggttcaagcagttctcctgcctcagcctccgaagtagctgggattacaggcatgtgccaccacacctggctaatttttttttgt

SEQ ID NO: 190940 - DNA, 201 bp, Homo sapiens
catattcccagcttaaccaaggactgtttgaaggcagggctgttttatacaattttgtatttaacaggtaatagacttttaggtgatcagtcaatgttgarctaatttgtactgtaaaatgaaagtccactgtttggctctgttgttcataatgtaaatattcatttacttaaatttaactgaacctatagtttagctgga

SEQ ID NO: 190941 - DNA, 201 bp, Homo sapiens
gttatttgattacatgcatattcccagcttaaccaaggactgtttgaaggcagggctgttttatacaattttgtatttaacaggtaatagacttttaggtratcagtcaatgttgaactaatttgtactgtaaaatgaaagtccactgtttggctctgttgttcataatgtaaatattcatttacttaaatttaactgaac

SEQ ID NO: 190942 - DNA, 201 bp, Homo sapiens
gacttgaggtgtactgacccaacttgtcgccagcctgggctctcagaaggtttcagaagtttgttcttctctctgctcgatgggagttaaaaagtatagcrgtggagagatccagtgtgagggcctggacttccaaccttccagggagagctgggcttgggagactaagaactcctcaggtatgcctgaacatgcccagta

SEQ ID NO: 190943 - DNA, 201 bp, Homo sapiens
gacttttttggacttaatcattgtttccattttggcaccatttttgtccttatctcattagcatagtaagcctaaaatgtcctaattccaggaacggatamaaattccattccattttatattcaaaggtttggatttctaccttaatccatttcttaaagtggctaatgatttttattaccctagttgtctctagggcag

SEQ ID NO: 190944 - DNA, 201 bp, Homo sapiens
tggcaaggaccttcttgctgtgccatgatgaaggaaaagagagcacgtgcaagagagagaaggaagggggccaaattcctcctttttcaagaacccactcrtgataaagtcattctgtagtgacatgagggctctgtcatgagagcttcattcatgagggctttgtctaataacctcttaacagtcccaccaaacactatt

SEQ ID NO: 190945 - DNA, 201 bp, Homo sapiens
ttccaaaggggtttttaggttgttttttttttttttttttttttttttttgagacggagtctcactctttcgcccaagctggactgcagtggcgctatccyggctcactgcaagctccgcctcttgggttcatgccattctcctgcctcagcctcccgagtagctgggattacaggcgcccaccaccacgcccggctaatt

SEQ ID NO: 190946 - DNA, 201 bp, Homo sapiens
ctgacacccaaacatttaggtcataatcatttgtttcattcatgacagggtgatttccaaagtacagacattttatctcagaatcacattgagcatgcacrgaagcaaattttagcttacataaagttaagaaacactagtagttgatttattattagttgtaatatatcttctatgggcccatagccttatcaaaactag

SEQ ID NO: 190947 - DNA, 201 bp, Homo sapiens
aaggcctgaggcaggaatatgtttgtcctattggaggaacagcaataagcttggtgtggttgtagtcgggtaagcaaagattgtaagagatgaagtcatgraagtaaccagtggaacaaaatagggatgtccattcttatcattagtaatcaacattatgctggagagtctaaataattagactagaaaattgaagagttg

SEQ ID NO: 190948 - DNA, 201 bp, Homo sapiens
agtaaatatcagtttgcctgaaatgagtttttgtgtttttctcttcaagtgtcacttaaaggagaggctaacaagcttaaatagtcacttaaatgagagtytaatttaagcttaactggttatgtagtcatattccctgacacccaaacatttaggtcataatcatttgtttcattcatgacagggtgatttccaaagtac

SEQ ID NO: 190949 - DNA, 201 bp, Homo sapiens
aagtgatcccccgacttcagccttctgagtagctggtactataggtgcacaccaccacacccagctaattttgtatttttcttttgtagagacgggctttsgccatgttgcctaggctggtcttgaactcctgagctcaagcaatctgcccacctcagcctcccaagttaagtgctgggattacaggagtgagccactgtg

SEQ ID NO: 190950 - DNA, 201 bp, Homo sapiens
tgtgctttctgaatagctaatatttattcaactcactgcgtcaggtactgttctgagtgtattacatgtactgcttcatttattcctcccaaaaaatctargggtttgtgtaggctgttgagtcctctgctgcctgtctgcccaggttctcatccataacactctgcttaccccttctgtctggggcattttatcgatgcc

SEQ ID NO: 190951 - DNA, 201 bp, Homo sapiens
tctatcaagtagagctggcatctatattacaataattttctttcaagaagaaatgttcagaaatatacagtaagtgaccatagtttcagcttctatgtcasgccaaagggaggtgaactggtggggagtgagtagattagacccacttgttgttgatccaactgttaaaaacattgttctctttcccaccaagctcctaaa

SEQ ID NO: 190952 - DNA, 201 bp, Homo sapiens; identical to SEQ ID NO: 32957

SEQ ID NO: 190953 - DNA, 201 bp, Homo sapiens
aggactataataccttgggatgtggacacaatttgtaaggtatgaatataatggtgatagaatgtcatttccctgaaacctttggccaaatatgttgtatwtttgcaaataattcttttgaaattgtgagctatgtgagcattttcaattgatttaaaacttttaaatttgcagcatgaaagaaagttgtataaacagctt

SEQ ID NO: 190954 - DNA, 201 bp, Homo sapiens
ggaaaagatctgtttattgtatgtaaggaaaaattttacctgaaaacaaacaaacaaaccctaaaactcagcaccactaccatttccagaagcttttttarcaagtgaatattttttacataatggataataaatggtatttattcatcatgattttctaagtaatgcttatcagccccttcagtggtgttattctaacaa

SEQ ID NO: 190955 - DNA, 201 bp, Homo sapiens
gcccctcaagcaccgttaatttacattccagttatttacatgataattcatgacattctgaaacttgcctgtatattatctgaaaaatggatttcttgagsaaaagatctgtttattgtatgtaaggaaaaattttacctgaaaacaaacaaacaaaccctaaaactcagcaccactaccatttccagaagcttttttagc

SEQ ID NO: 190956 - DNA, 201 bp, Homo sapiens
ccaggctcaagtgatcccccgacttcagccttctgagtagctggtactataggtgcacaccaccacacccagctaattttgtatttttcttttgtagagaygggctttcgccatgttgcctaggctggtcttgaactcctgagctcaagcaatctgcccacctcagcctcccaagttaagtgctgggattacaggagtgag

SEQ ID NO: 190957 - DNA, 201 bp, Homo sapiens
tggctccgtttagggtgctgttcatgggactctaatgctccttccttcccaatggcccagaaggctcccatgaggtttattcttctatcatgtataataamctgatgaaataaccatatttcatctcatatttatgcattttaatcaggttggttgatgtttaccacagacatatgtctacaagcatttcattatctataa

SEQ ID NO: 190958 - DNA, 201 bp, Homo sapiens
agtacaaaagaatatagttttaaaaatcacagccattcatattcatttaatatagaaacaaggtaaacatctaccttgatagcatagtattataattgatrttccaaattatatctatcattgtgaagagattaatttctgttctatatgctgtgtttgaaatacaatattattgcttaaggtatgagtggggtgaactct

SEQ ID NO: 190959 - DNA, 201 bp, Homo sapiens
aaatgtgatatttataaggcccaatttgaacttattgaattattaagtagaaaattgaaagtatcaacttcattgtatagatttctggcttactgagaaaygtatcagcaattttctgcataattagtgtttttgagtaaaagaatttggcacttacagccaaataccgagtatcttatatgtttctttttccaatagcca

SEQ ID NO: 190960 - DNA, 201 bp, Homo sapiens
taattagatggtatcttcttgccagcgtggacaattctacagattttttttttgattacttggagacagaaacaaatatttttaatagtatcttgatttastctttctaatatagactgttaatctttagatttttcgataatttaaggtgaagggggaggaaaagattgggtacaactgtgtttagggaataatttaaaa

SEQ ID NO: 190961 - DNA, 201 bp, Homo sapiens
ctttcctttttcttttttgaatgtggcagaagagatttaaaaattcaagcaatccattaacatagcactaaaacacacagtacaatggagcttataatgcraagtatcatcttccttccctgcccctactccctaaacacagccacttttaaccatttctgtattttattcttctgaaggccacttccatatctctagcaa

SEQ ID NO: 190962 - DNA, 201 bp, Homo sapiens
attattttctctcttctttttctctaaacctttagttaaaaatgtaatcaaagactattgctaggtaaaattatatgtcttcttgaccgtacaaggatatrtgggtttaaaattattcttgttacatgttgtgtttaattgttgagagtagtttatatttctgagggtagactataataaagtcattttaagtcatatgtt

SEQ ID NO: 190963 - DNA, 201 bp, Homo sapiens
agctccagctggcccctccattcgggttccctgacttcctgcaacatcattctgttaggcactactcaaataccattaaggccttccttgaccagcttatktgatactgaatcctatcaagacttcctttcaccttttccttctttcctcttctctgtagtgattagcatgagctaaaatgttacgtactcttgttattta

SEQ ID NO: 190964 - DNA, 201 bp, Homo sapiens
gctgccgtgttaacaaaacagtggccaggccgaatagctgttgaggtgctgtcaagcttgaaaggaagatttttcttaaataaggagaaattcagagaagstgccttcaaaaataagaacttgattttggcaggagaataaacaaaaggctttgaaagaaactcagattctcaagcatcgttgtcatttaatctagaatca

SEQ ID NO: 190965 - DNA, 201 bp, Homo sapiens
agcgttcataggaacattacttctagtagccccacactgtaaactgccgaagtactcatcaactagagaatggatcaataataagtataatattgttcagygatgagaataaatgaactaaaaatgtaatggaataatgtatattcatctcataaacacaaagaagccagactcaagtaagtacatactgaatgatttatt

SEQ ID NO: 190966 - DNA, 201 bp, Homo sapiens
tatatttatctttttatgacatatacaaggcaagcatttaagggtgattttattacatttgcattggtgttcatcagtctttggtcatctgtctatcaagyagagctggcatctatattacaataattttctttcaagaagaaatgttcagaaatatacagtaagtgaccatagtttcagcttctatgtcaggccaaaggg

SEQ ID NO: 190967 - DNA, 201 bp, Homo sapiens
ctccagttctcatatttgagtgccctataaatctgtatacttgagtaacctgagctgcaatctgaagttaataatacaatctgttcttaggtatgtgaccrtaaaattccttaaagggagtcctgtgtttatgaatctgaaagtgttgagcttgaggtaacagtggggctaacatcttatgtgagggtttaaaaattataa

SEQ ID NO: 190968 - DNA, 201 bp, Homo sapiens
gatgagtagtttactgcaattttataatctcagttaacaaaaaatttaccagtgatacaaaacctttcctaatagcaacagataaaacaatcaggagaagyatacttctgtactaaaagatggagccagagcatcagaaaaacagtttaatgtggagtgtttggatataggatggcattttaaaactgtagtttcttcctg

SEQ ID NO: 190969 - DNA, 201 bp, Homo sapiens
aaatgaataaaaaaaactttcgctctttaacatgaagaaaaatattaacattgaaatatgaaatacagcaattcagtttataacacaaacgtatcttacawtaatgggtatgcatttttaattgcatatatggaattacaaatctcatttttcttttctactgggattacaaaccatattgaaaaaaattttacagttcaa

SEQ ID NO: 190970 - DNA, 201 bp, Homo sapiens
tggaagggaaggactcattgtgccatgccccgtctttctttctgaccctcagattgttaatgaagctgccaagtatcgctatcgctctggggatctttttwactgtggaagcctcactatccggtccccttggggctgtgttggtcatggggctctctatcattctcagagtcctgaagcattttttgcccattgcccagg

SEQ ID NO: 190971 - DNA, 201 bp, Homo sapiens
tatttatttgagttggagtctcactctgtcacccaggctggagtgcagtggcgagatctcagctcactgcaacttccattccccaggttcaagtgattctygtgcctcagcctctgagtagctgggataataggcatacaccactatgcctggctgatttttgtatttttagtagagatggggtttcatcatgttggccag

SEQ ID NO: 190972 - DNA, 201 bp, Homo sapiens
cttgagaaagctactatgtgcccctgacattaacgtactgttaaccaagacacagcaatcatcagtgttttgatggtaacaaactttgatggtaaagttgrtaaaaggcaactttcagaagaaaataatgtgctttagaaaaaaaattcaaatttatagtagtatatttacatttttgttgttgttgttctgagatggagt

SEQ ID NO: 190973 - DNA, 201 bp, Homo sapiens
tcattcccagcctcaaagggtaaccactgtttacagttcaagtgtgtcttcacagcagatgtttttctatgctcgtgcagacgtatagatgtattcctggraagagtgatgcttgcattcttgaggagttaggagcattgctatttgaaaaaataaaaatccagtttgatgatgttagtcattatgctgaaaggagtgatt

SEQ ID NO: 190974 - DNA, 201 bp, Homo sapiens
caaatactatattctaaaatttcacagcgtcttttggaagaaatagctacttttctttaagcacctgtcatatgtgctttcacattgccaacagaatatakgtaggcggtactaaattgttgttttggggttcattttcagtccttcttactggatcctgggtgcaactttagaccccaagtagctagagaaaagtttctc

SEQ ID NO: 190975 - DNA, 201 bp, Homo sapiens
aatggagaaatagggttagatattgagagatcccaaggaaacctgtgaaaaccttaatatatgtgtttttatgtacacgtaatatgtaacatattacattmatcaaaacatgggaataaattgacgtactcttaatttttaaaagccccataaatatattttacttaaaaccgtaatggatcttattcttttaatttgtgc

SEQ ID NO: 190976 - DNA, 201 bp, Homo sapiens
tttaggaaaattaaaggcccataaactgaagcatatagcatgttagtggattgtaaggccaagaagagccagagcaatcttgaagaagaacaaaactggargacttaattatcaaatgttgagatgtgttattagtgctgtagtaattataacattatataggtataaaaatacacaaatagaccaatggaataaaataag

SEQ ID NO: 190977 - DNA, 201 bp, Homo sapiens
gagtcataaaacaatatgaaactgcaataatggggaattgtaatacttctattttgatgttgaataaacagtataaacctcggggaggttaagtcacaatrgaacaaagatcccttcagatagaattccaaattccgtgctgtatcaattatattatgaaaccttgccataaaaaaaaaaaattgttgaggatgagcgaag

SEQ ID NO: 190978 - DNA, 201 bp, Homo sapiens
aaaaagattaaataaacctagtaaaagtctaagatcctcagacttcatgaaaaacaactaccaccaccatgtgtagcttaaaaaaggcatactttaaatayaaggacatcaaaatgttgaaaatgaaaggatggaaaaagaaagctggtgtagatacactaatttcaaataaagcattaaggcaaaaaggactactagaag

SEQ ID NO: 190979 - DNA, 201 bp, Homo sapiens
gactttgaacttttaaagcctcaaacatctttagaggctgactacagcaaataaacagaatgttttgcagagagatttagtgaagaaaatttttttttgcygttgtttctcacagtgctctgcaggtgaaaatggtgaggaaactttgatagttcaagactatgcaggggagaatttgaaagcagaaacaagcttttacag

SEQ ID NO: 190980 - DNA, 201 bp, Homo sapiens
tatagcttagtattgattatccgaaacagtagtcataattttctgtgaaagtttaagtttagtgaagtttaagttaaatatatggaattgaaatgtaagayaataaaaacacaaaagctagggggtcttacatggagttaaaatattctgttgttctaggattattatgaagtgtaatgttctggttaggttataatcaag

SEQ ID NO: 190981 - DNA, 201 bp, Homo sapiens
tgaatgtaaagtgttttaacaaaagcatggtagcccagtacattttaaatgtcaaaacttgcacatagtgtatctcataaagaatttaaattttagacttkgaacttttaaagcctcaaacatctttagaggctgactacagcaaataaacagaatgttttgcagagagatttagtgaagaaaatttttttttgccgttgt

SEQ ID NO: 190982 - DNA, 201 bp, Homo sapiens
ggttgctttagccaggattgatttctgtcttcagaacaccatttggtggtgttagactgctagatgaagaattttgtgggaaaaaaaaaaaaaaaaaagargaagaaaaattgaatgctttgtatgatcatcaaaagccacttttcaggagtattttacatttcttggtgccaagcaaatcagaaatcctaccttacagag

SEQ ID NO: 190983 - DNA, 201 bp, Homo sapiens
ccctagaaagtttgtgtgtgtgtgtgtgtgtgtgtgtgtacatgtatgtatatggatcaagtaaactttgtggagccatcaaaaaaatatatatctgacartaagaactcaatgaataggcttataacatatcggactcagtagatgatagcaataatgaactggaaggctagttaatagaaaatgtccaaattgaagcac

SEQ ID NO: 190984 - DNA, 201 bp, Homo sapiens
tatactttttattttgtctaatttaatcctttcaaaaactgtctggcttctcatactttttagaaagatggtgccagagagggagaaatcactctattctrgtagtttcgttttgtaattagtcttcaaacttaaaaacaggttgcaaaattgggacagtaacaagttttaggagaaatcttaatgtagctctaatctttc

SEQ ID NO: 190985 - DNA, 201 bp, Homo sapiens
aagagggtggagaattaccctagaaagtttgtgtgtgtgtgtgtgtgtgtgtgtgtacatgtatgtatatggatcaagtaaactttgtggagccatcaaaraaatatatatctgacagtaagaactcaatgaataggcttataacatatcggactcagtagatgatagcaataatgaactggaaggctagttaatagaaaa

SEQ ID NO: 190986 - DNA, 201 bp, Homo sapiens
gtaagagggtggagaattaccctagaaagtttgtgtgtgtgtgtgtgtgtgtgtgtgtacatgtatgtatatggatcaagtaaactttgtggagccatcaraaaaatatatatctgacagtaagaactcaatgaataggcttataacatatcggactcagtagatgatagcaataatgaactggaaggctagttaatagaa

SEQ ID NO: 190987 - DNA, 201 bp, Homo sapiens
gagagagaagtcaaattccttaccatggcctacaagaatttacctgatttcatcgctttccacctcctaccacccatccaccctttagaaaatgttctttytccagcaagccccttcattcactctgttattctatcaggggaacctgcccccaatatttcaacatagattctttctattttccataagtgttggctggct

SEQ ID NO: 190988 - DNA, 201 bp, Homo sapiens
accagatgtagaccaggtcatctcaaacccacaatacagcctctacccctttgaattttttattgaattatgtacttttactctatctgcgcagcagagccaaggagtcaatcctctcattatctggaacttctataaaccagcattcaataaaaaactaagtagatgaagagacaggagtatttgatcaataacaaaggg

SEQ ID NO: 190989 - DNA, 201 bp, Homo sapiens
tgctttttagttggctacacttgctatttggtctcaaccaggtgtgtagaatccaggtatatagaactcatattttgtggggctgtagtgacaaaattgawattttgaggggatttaaacacatacttgaccttttatttgccaaattctaaaggtgtgaatggtgaaaggtaagtagaaaatatctggaaagtgaagcta

SEQ ID NO: 190990 - DNA, 201 bp, Homo sapiens
tgcttattagtcctaagattctaatgtaatcagcgtgtggtgaaatagagcggtgtcagttagtcccacttctgtgaaaataggaatctgtaatatgactstgtgtggtgctctttagcttctgaagattcgtgctctaactcctgtcacctgctctcttctagaaagcacatagccgtggggtaggaatgcaacaaagct

SEQ ID NO: 190991 - DNA, 201 bp, Homo sapiens
cctctagaaggtaattgcatttagaagcaaaatatctgctgttttattaatttaataattaaggactaaatggtgttccaatttaggtttaaaagtaagcrcattcacacagcatttaaaactatttcttaatgtttttttcctagagaagaaatgatagctccatgatcgctatatgttctgttcaatactcattatatt

SEQ ID NO: 190992 - DNA, 201 bp, Homo sapiens
aaagcatatcctgctggctttgcctacataatatgtccaaaatctgaccactgcttgatcctgctgcagactactagcatttctctcctgggttttggccwtagccacctaacaactgtcttgcgcttctgacctttccttgccataggcagagttgatacttttaatctgagtcatatcatgttccttctagtttcaaaa

SEQ ID NO: 190993 - DNA, 201 bp, Homo sapiens
acatcattttagaatactggttttgtttttctcatattcttagagtttaactcttatactactaattatgacctctagaaggtaattgcatttagaagcaraatatctgctgttttattaatttaataattaaggactaaatggtgttccaatttaggtttaaaagtaagcgcattcacacagcatttaaaactatttctt

SEQ ID NO: 190994 - DNA, 201 bp, Homo sapiens
agcactatcttctgtttaattcatttcctttacttcacattgtagtgagcccttttatggactcagggagagagagccttggtgtccttagccaggaagaktttccttttatcatgcagctctgtccacacccttcgttcagtttctccctgcaactcagctcagctgtcatgctgatgtgaaacaggagctcataagtag

SEQ ID NO: 190995 - DNA, 201 bp, Homo sapiens
gagcctgagggtggaggggtggtgcccagggaacgcctcccttttctctgtcctccgtccttgctttctcaacccaggccttaggtgttgttccagcctgsccaggactgggccactagcttaggtagaggcatttaaaagatatatatatatgtttatatatatatattttaaatgtatattatatatattatatataaa

SEQ ID NO: 190996 - DNA, 201 bp, Homo sapiens
gtagtcttctcttatatatccttgaattatcttccatgatttttatattttatatacttataatagcatattataacaacttaatgctacataatttacartaatcgtttccaaattaaggaagccctatgtgtaaaatcacaaatttatgtaacataacacaggaacttttattcatataagaaaatcattattcacttt

SEQ ID NO: 190997 - DNA, 201 bp, Homo sapiens
cttggctgtgtatgtagcgatttgatcttgggcaacctcctttatcttggtttcctcacctgtgaaatggagtataatactgacttcatggatttgttaaratggttaaattagataaaatataactcatttagcccatgcctggtttattattaacataatttagaatgaaaattctcctgttgcaaaaaggcatattca

SEQ ID NO: 190998 - DNA, 201 bp, Homo sapiens
tgttcattttctgagttgctacttggaaattaagttgtggagtgatgtttctcattggtccaaggagcaacataaaatcctgatttatcagataatcctayaggaaacgtatgcctgttttgacttatgatatgtttcttagtacaatgtcctgcttttctggctttccattaaatgtttagaaaaattagttaatagttt

SEQ ID NO: 190999 - DNA, 201 bp, Homo sapiens
ctttaaaggctgtgttgctatggcacccaagattaactgttaaaaaaaaaaaagtttaattttagtaaaaacattggtacatctcttttggcattgtgtarataaaaatagattcccccctcccccttttcttgtcttttttatgtttagcaagtcctttgcattcttttaaacatacactaaaagaaatttagcatattt

SEQ ID NO: 191000 - DNA, 201 bp, Homo sapiens
ataaatgtttttaaaatccttattggacttgacataaacatgcagataattctactagtctccttttcataggtacaataatagcactaagtacagaattscccttgtatccaagcaagacttttacgaaaacttaaacctgaagtcttatgcagtgcacctaaaattaaccaggagacttggtgcatataccagcaaatg

SEQ ID NO: 191001 - DNA, 201 bp, Homo sapiens
cttacaatatacattaaaaaaatctatcctgtttgatatttgcatttttacaattttggccttgaaaagatttcttatttttctgagttgttcattttgtyactatttatctgatgctgaagtgtttctctgaggaatgcttattagtcctaagattctaatgtaatcagcgtgtggtgaaatagagcggtgtcagttagt

SEQ ID NO: 191002 - DNA, 201 bp, Homo sapiens
acttgaaatgtgtgcttcttttaagaaactccaagagctacgtggaagcatgtgttgttttcttgtcagttttcgttctcatatgccatttgctcctaaawtacccaattttttttctgcccagacctacacacccaacccactttagctgtaccatccttagattactatgtcacaaattttaccttgttttgaaactga

SEQ ID NO: 191003 - DNA, 201 bp, Homo sapiens
actgggagaaaaaaggaggaggatgggaaatagaatggggccaaggatgagcaaattcacagcatgaatctctaagtgaatgtgtagtatgaatgagtgcktttgcatgtacacggaagtgtatatgtggaaacttacaatatacattaaaaaaatctatcctgtttgatatttgcatttttacaattttggccttgaaaa

SEQ ID NO: 191004 - DNA, 201 bp, Homo sapiens
cacaccctacttcctgtcttgctgacatatatatatatttggcctcatcagtagcaaagctcattaatactccaggatgaaacagaatagaaatacaaackggaattgtttgtttaatctatatttatgcattcacaaatatttactgatccctgctccatgtcagtcattgtacctctgatccatttgggcttgtaaatc

SEQ ID NO: 191005 - DNA, 201 bp, Homo sapiens
ttcttggagatcttctctgtaatcctccaggctgaggcatcacttagatttggcatttgagacctttattgttgacctatgaaattctgttttatgtctgyctctcactttgtttcaccatagtatagtataggttataggagcaagaaaactgatttttctttcaagatccactgtatgccaatcatgtactggatttca

SEQ ID NO: 191006 - DNA, 201 bp, Homo sapiens
atttggattctggatgggatcccagagtggaaaaaggacattagagcaaaaccgaggaaatctaaatacaggttgggctttagttaatgtgtcaatactgkttcattaattgtgacaaatacactatattagtgtaggatgttaataatattaacaatggtggaaaccggttgtgggatatatgggaaaactgtgtactgt

SEQ ID NO: 191007 - DNA, 201 bp, Homo sapiens
atgttgtggcagaatctaggacttctataattacatttctggagattatcaggcaaatgtgtggcttttaccttttctggttactattttatagaaaaatrtaattgctaggtatgtcatttaagaccctgcaatctatttgtctgaaaaatggaacaaatgctagtaagagttttaaatgactctcaaagcctcctgcaa

SEQ ID NO: 191008 - DNA, 201 bp, Homo sapiens
gaaaagtcatcaaatatggtttttaagttatggaacagaagaatatgattaatctgaattgtcatgaaaattcagggcacatggttgctatggttatggcrtcatgtatttataatggagagatactttgtcttcattaatctacaaacttgccagtgggattcggtatttttttctgtgtgtgtgtgtgtgtttgtgtgt

SEQ ID NO: 191009 - DNA, 201 bp, Homo sapiens
aaagaccataaacgaacactccccgtttctagcccatattctgcataatacatgtaagtctctcaacagccctgtaggctatgccattacttaattcccartttatgtggcttactttttctgaatgaaaagtcatcaaatatggtttttaagttatggaacagaagaatatgattaatctgaattgtcatgaaaattcag

SEQ ID NO: 191010 - DNA, 201 bp, Homo sapiens
ccgaccagctcgtcacgtcgccttccccgcccctaaatttccagttccgattggtctgtttcatgggaccgcccctctggcccgaccaatgtggaagcctyctcgggtgctccgccctccccgcaggcggcgtgcggctgcatagcctgagaatcccggtggtgagcggggatggcggttgtagcggcggctgccggctgg

SEQ ID NO: 191011 - DNA, 201 bp, Homo sapiens
caccactctcaccgctagttgcctggcccagctgccaatactgatggccaaaataagcaatttagtaaaaactggtggtaatggtgggtgtgtgtgtgtgkggggggtaataaaatacaatcttaccatttatcttttatgtaatgttttgagaaaactgtattttgggtaacttactaaaacttcttttagtcagtaaaa

SEQ ID NO: 191012 - DNA, 201 bp, Homo sapiens
aaaatgaaaggatggaaaaagaaagctggtgtagatacactaatttcaaataaagcattaaggcaaaaaggactactagaagtgaaaaggagcatttcatwatgccaaagggaccagtccaccttaaatatatcataatcctaagtctatttcatccttaataacatagtttgaaaataaataaagccataaactaaacaa

SEQ ID NO: 191013 - DNA, 201 bp, Homo sapiens
tatgaaaaatggatgggtcaatagataacagatgataagatgatataaacccaaatatagaagtaattaaattaaatacaaaaagattaaataaacctagyaaaagtctaagatcctcagacttcatgaaaaacaactaccaccaccatgtgtagcttaaaaaaggcatactttaaatataaggacatcaaaatgttgaaa

SEQ ID NO: 191014 - DNA, 201 bp, Homo sapiens
gtaagtaaatacctatatgaatagtattctgatagaacttttactaaaagatcttaaaaatacaaaatatgcctactaaattttttgtcatatccccattrtatggatgaattccttttcatttccaacgccacccgcagaatcctttggcctatattttctcaaatgtcttctagtatccctctgatctagttcatatta

SEQ ID NO: 191015 - DNA, 201 bp, Homo sapiens
tagaacacttatgtgctagacgctgggctatcttgtgtagacatggggactatgtcatttaattctcacaaccagcatatcaggtaaattctgtcattatygccattttatagatgaggaacctaaggattagggaaattagacaacttgcccaaagtcacacaaccaggattgggcatgtttggcacagatggtgacttt

SEQ ID NO: 191016 - DNA, 201 bp, Homo sapiens
actgtacctgtaactcagtatacttattttcaaccatgtatttacttatatataatattcaccttcttgtctcccacgatgcccataatagtgccaaacayaaagattggttgaatgaatgaagaatgggaaaccagctaggatatagtgcaaataaaggaaataaaatgatgattcatttaactgatacagtaaatatat

SEQ ID NO: 191017 - DNA, 201 bp, Homo sapiens
gccttattcatttataataatgtcctcaaggtttattgatgtttcagcatgtgtcaaagtttcctccctttttaaggctgcataatattgtgttgtatgcrtatactacattttgtttatccattcatttgttgatggatgtttgggttgcttctgccttttgcctattgtgtcctaagactgctataaatactgatgtgc

SEQ ID NO: 191018 - DNA, 201 bp, Homo sapiens
atttttacagttcagtgttattaagtacattcacgttgtggtgcaattattaccaccatccatcaccagaacttttttcatcttacaaaactgaaacactrtaaccatctaacaataactccccattttctctccaacagtccctggcaagaacccattctactttctatctctatgaatttgactattccttatgtgagt

SEQ ID NO: 191019 - DNA, 201 bp, Homo sapiens
gaaaacgctcccaataacgtaaatgttcctctaatacgatgattcttttacagctacaataacaccaaggctagcgcagattgatgatttctcctaggtcrtggtcctagaaactatgaaagatagaaggaaacttcaagactacctagtcaaccccacttgctttatgggaagaagtaaagggagttgagattagagtag

SEQ ID NO: 191020 - DNA, 201 bp, Homo sapiens; identical to SEQ ID NO: 32970

SEQ ID NO: 191021 - DNA, 201 bp, Homo sapiens
ccccaatactctgcattcctaacacgcgctgtggggcaggcgcagtccaggtaaggacatgggccaggctgctccctgataatacccgtgagcccatcccycgccacgacccgggcgacccgcggggaggaggcttccctgatcctcccacctcacctcgtccttgtccactttcctgaatcccttagaaacctggacttg

SEQ ID NO: 191022 - DNA, 201 bp, Homo sapiens
aatcccttgggaagctgcttaaagtgcatcctaccaatgcagctcctttagggccatggagccccaatactctgcattcctaacacgcgctgtggggcagrcgcagtccaggtaaggacatgggccaggctgctccctgataatacccgtgagcccatcccccgccacgacccgggcgacccgcggggaggaggcttccct

SEQ ID NO: 191023 - DNA, 201 bp, Homo sapiens
ctaacacgcgctgtggggcaggcgcagtccaggtaaggacatgggccaggctgctccctgataatacccgtgagcccatcccccgccacgacccgggcgasccgcggggaggaggcttccctgatcctcccacctcacctcgtccttgtccactttcctgaatcccttagaaacctggacttgaactgagccttgctcccc

SEQ ID NO: 191024 - DNA, 201 bp, Homo sapiens; identical to SEQ ID NO: 32968

SEQ ID NO: 191025 - DNA, 201 bp, Homo sapiens; identical to SEQ ID NO: 32969

SEQ ID NO: 191026 - DNA, 201 bp, Homo sapiens; identical to SEQ ID NO: 32972

SEQ ID NO: 191027 - DNA, 201 bp, Homo sapiens; identical to SEQ ID NO: 32966

SEQ ID NO: 191028 - DNA, 201 bp, Homo sapiens
tgcattcctaacacgcgctgtggggcaggcgcagtccaggtaaggacatgggccaggctgctccctgataatacccgtgagcccatcccccgccacgaccygggcgacccgcggggaggaggcttccctgatcctcccacctcacctcgtccttgtccactttcctgaatcccttagaaacctggacttgaactgagcctt

SEQ ID NO: 191029 - DNA, 201 bp, Homo sapiens
gtgagcccatcccccgccacgacccgggcgacccgcggggaggaggcttccctgatcctcccacctcacctcgtccttgtccactttcctgaatcccttaraaacctggacttgaactgagccttgctcccctcccctagcccaaagactgggaaccttgagaggcccgcggtgctgggtacgaggagggggcgggaaagc

SEQ ID NO: 191030 - DNA, 201 bp, Homo sapiens
cctgataatacccgtgagcccatcccccgccacgacccgggcgacccgcggggaggaggcttccctgatcctcccacctcacctcgtccttgtccactttsctgaatcccttagaaacctggacttgaactgagccttgctcccctcccctagcccaaagactgggaaccttgagaggcccgcggtgctgggtacgaggag

SEQ ID NO: 191031 - DNA, 201 bp, Homo sapiens
gtcaggtcagaggcgtgcggggaagatctgggttgcttttggtggggaaccgccgcccgcgccgggacggatgtaacttttgcaaacgaagcctcagtacrggagcgctgcgccgccttgcagagaggtgcacacttagcgctgaggctgggctgtgattggagggaaggcggcgctcgctgaaacctacaccgcggcgga

SEQ ID NO: 191032 - DNA, 201 bp, Homo sapiens; identical to SEQ ID NO: 32971

SEQ ID NO: 191033 - DNA, 201 bp, Homo sapiens
tatcgccccgagtagaagaatgaataaaactagacccatttcgatctgcaattcattacctaagtcgagggaaaactattgggggcggccccttattaggsagactcctaaaattcactccgttatcctgcacaccctgcagctctgcctccccactttttggtgcatgcgtgccccgtctcctttcccggccctcgcagt

SEQ ID NO: 191034 - DNA, 201 bp, Homo sapiens
tgggccaggctgctccctgataatacccgtgagcccatcccccgccacgacccgggcgacccgcggggaggaggcttccctgatcctcccacctcacctcrtccttgtccactttcctgaatcccttagaaacctggacttgaactgagccttgctcccctcccctagcccaaagactgggaaccttgagaggcccgcggt

SEQ ID NO: 191035 - DNA, 201 bp, Homo sapiens
ccaggatcacctttgttcccacacttctgtgccagccaatgtcatctaactcctaccagtgcttccaaatgctgctgtaacaacaaacacaagcaaccgcrtttccgtgatcctgtgccagccatagccaggttaaaacgttcaaaccaagctaggacctacccgctgccccagagagagtgaggtgacaagcatggtagt

SEQ ID NO: 191036 - DNA, 201 bp, Homo sapiens
tattgaaaaattctttgttcatagtgtttgactattaatttcataattgtccataatgtttaaatgtattaattttgaagtttttagcatgtaaaattttcaaagtttaaggaaaaatgcattctttatccaggaacacaggagatattaaaatgcatttatcctgtttgtttaaagaaccattgccaaagggtaattgtg

SEQ ID NO: 191037 - DNA, 201 bp, Homo sapiens
cttacttgccattgaatcccaacagcatcttgaagcaaatcttagccctgccttaggatgccaagatttgtacaggtagtgaagcccagaaacaataaaaktttttttaaaacattctctcacagctccctaataattattaaaatttttcagtatttcaagggaactttaggattacaacctggagattcagccctcttc

SEQ ID NO: 191038 - DNA, 201 bp, Homo sapiens
aagaattactctcttgagaatatatctgaaagaaataattcaacagaaaaaacaaagttgtatacatgaaaaaatttattttactattacttataagccaraagcatcaaaaacagtttaaacatccaagaatgagctacactgatacatagaaaatgtttagatgctattaaatgataaaagaaaaatcccgactaaaaa

SEQ ID NO: 191039 - DNA, 201 bp, Homo sapiens
agagattttgagtttcatgacatttttcatataaagcatgaatacatctggttagatggaagaacctattactggatcacaaccagagctatgttttgatyaaaagagaaatataaggacacagaagaagttgggtcgtggtacacagttggcactaatacaatatttcttgaattgagggacgagaagagggcatgtggt

SEQ ID NO: 191040 - DNA, 201 bp, Homo sapiens
tctcactctgtttcccaggctggagtgcagtggcatgctctgggttgcactcactgcaacctccacctcccgggttcaagtgatcctcctgcctcagcctsctgagtaactaggattacaggcacgcaccaccactcctggctaatttttgtattttcagtagagacagggtttcaccatgttggccaggctggtctcaaa

SEQ ID NO: 191041 - DNA, 201 bp, Homo sapiens
tctggttttgcttctaccttggaattccattcccacagttgtggcagcctacaacatgtaaaggagcctaggattttataaggagagaatatagactctgrattgatttttaaaacatataatcaatattttaatggtagatacgtgcttttattactcttgagtttttggtaggttttggactaaaaaaatttgtttagt

SEQ ID NO: 191042 - DNA, 201 bp, Homo sapiens
gactacaggcatgcatcaccatacccagctaattttgttgttgtttttaatttttggtagagatgatgtctcactatgtttcccaggctggtctcgaactmctgagcttaaacaatcttactgccttggcctcccaaagtgctgggattttacgtgtgagccactggggcttggctgctgttttttatttcagaagtgaag

SEQ ID NO: 191043 - DNA, 201 bp, Homo sapiens
cacaccttgctaagaagtgtcttacatgttagtgagtcaaccaggtaataagtggagcaatcaaagtgcatctgcccctagtgcctgtgccactaaccacrgagcagccttccatgctgccttaagcgagccactctgtatctgaaggaaaccgcattagagctgtctgcatggttgcttaacaaatgactttttatattc

SEQ ID NO: 191044 - DNA, 201 bp, Homo sapiens
gtagggagatggcggggagactggagaattgacacatcttaatgttaattatgaaaattagttattactttccagggaaagaaatttttatggtttattcrctgtgtttatttgtttatatggtttgcttagtaacgactatttttccttaataatgattactttcctagggaatggatttcagtctttttaaagaggtct

SEQ ID NO: 191045 - DNA, 201 bp, Homo sapiens
atctgaaagagttaagagatttcaatttggatggtgctccttatggttacactcctttctgtgacagccgaagagaaatggacggctacaggttctggaartcagggtactgggccagtcatttagccgggcgaaagtatcatatcaggtactgaaaagaagcactcctaacactgttacggggttttccttaaaattgat

SEQ ID NO: 191046 - DNA, 201 bp, Homo sapiens
tgagggaagcttcataaccactcctgctgcagctcacccgctagggaaggatgggaagcgcagtctctttcctcttactttcaaaggccgtgtgtctgtaygagtgtttcaagtggtcttttttttacccttattgttataggggctttacaggacagaagactgaggaagtgaagcaagataaagatgacataattaata

SEQ ID NO: 191047 - DNA, 201 bp, Homo sapiens
aacatatcaatctatttatggttgttaacgtaatgcactatctctaatagacttgaaactgaaagtttgttttaggtagaggaaaaatacatgtatatatmcacacacacacacacacacacactcctatacataagcacacacacactgaggaaaaagtgtaaatataggcttatatttgagaaagaaactacccagaaa

SEQ ID NO: 191048 - DNA, 201 bp, Homo sapiens
ccactcgattgatccaaaagaggttcatgtctcctagtggggaagttacttctgctccatactttgtgactctcattgcctgtacctgctctttggaaatwtgactgctccctgctcagtttacttcccgttgtgtaagttgcattctggtgcagcctgtgttcagtctcttcctaaaacaacactgtcggagagtgaaca

SEQ ID NO: 191049 - DNA, 201 bp, Homo sapiens
acatatcaatctatttatggttgttaacgtaatgcactatctctaatagacttgaaactgaaagtttgttttaggtagaggaaaaatacatgtatatatacacacacacacacacacacacactcctatacataagcacacacacactgaggaaaaagtgtaaatataggcttatatttgagaaagaaactacccagaaag

SEQ ID NO: 191050 - DNA, 201 bp, Homo sapiens
ctcagttcctgttctcacagcagataacctcccaacttattgactgtctatccttccagattttcttaattcttacagaaacagctgtgaatgtgtattctttttttttttacacaaaatatgctacctatttatacattttgtaacttggcttttttttttttttttttacttaatgtcatatacatcttctcagtgaat

SEQ ID NO: 191051 - DNA, 201 bp, Homo sapiens
gagtgcagtggtgcaatctcggcttaccacaacctccgcctcccaggttcaagcgattctcctgcctcagcctcccaagtagctggtactacagacgtgcrtcaccatgcccagctaagtttttgtatttttagtagagacagggtttcactgtgttggccaggctagtcttgaatgcctgacctcaagtgatctgcccgc

SEQ ID NO: 191052 - DNA, 201 bp, Homo sapiens
ttggtaggttttggactaaaaaaatttgtttagtgaactttcttagccatatagttaatatcgttaaaaaacaatttaaagatattttgagggcataatcygaggtaatggctagtagatgcaacattaacatggtcatgccatgtacactgtgacatagaaagagctaggtggtaatgatggaattcttgctttacttgc

SEQ ID NO: 191053 - DNA, 201 bp, Homo sapiens
tggcacacacctcctaatcttagctattcgggaggctgaggcaggagaattgcttcaacctgggggtggaggttacaggtagctgagatcacgccactgcrctccagtctgggtgacagagcaagactccgtcacaaaaaaaaaaaaaaaaatagagaatgtggggaatagtgccatcttgggcagttgtggtaaaaaata

SEQ ID NO: 191054 - DNA, 201 bp, Homo sapiens
tcctgcctcagcctcccaagtacaggcacccaccaccatgcccggctagttttttgtatttttagtagagacggggtttcactgtgttagccaggatagtsttgatctcctgacctcgtgatccgcccgcctcggcctcccaaagtgctgggattacaggcgtgagccaccacgactggcctatacttatagtttcaaata

SEQ ID NO: 191055 - DNA, 201 bp, Homo sapiens
tgtcccgttaaaaaaaacaaaacaaaacaaaaaactattttctgtaagtcacttgtaattggtttgcaaactcttggcaagtcctatgatgaaaatattcrtaaatcttctatatatggtaatttaaataactagtattattgatttcaggattaaatgtttattttaaaaattgcaggcagttctaagaaacatttattc

SEQ ID NO: 191056 - DNA, 201 bp, Homo sapiens
  misc_feature (1)...(201): n = A,T,C or G
atctagtttcttcagtacataaattatggaaatttctattgtaattgaaaagaaaaagagggacagaggaacctcaagttaagagagacttaagaagaganaaagatgtcttcaccaacttgatatttgatataaaagcaatgctaattttaaaattattttttattataaaataaaacatggaaaaactcctcacaaaaa

SEQ ID NO: 191057 - DNA, 201 bp, Homo sapiens
gtagtcctagctactcaggaagcttaggtggaaggatcgcttgagcccaggagtttaaggttgcagtgagctgtgattaccccactgtaccccagcctggktgatggagtgagaccctgtcccgttaaaaaaaacaaaacaaaacaaaaaactattttctgtaagtcacttgtaattggtttgcaaactcttggcaagtcc

SEQ ID NO: 191058 - DNA, 201 bp, Homo sapiens
atattcttataaatattcttatcttatagaatatttcactggttttatttccctgcttacattaggaaaccaaatcccttagcacttaatgggactgtttkcacaacttacaatctgctgagtcactccttggcttccagtttatctctgtgccttgtaatttttccaaatggactttcacttttcctgccttccattagc

SEQ ID NO: 191059 - DNA, 201 bp, Homo sapiens
tggctctggaggctggagtgcagtggtgtagttcactataatcttgaactcctgagctcaagcagtgttcctgcttcatcttcctcagtagctggtattayaggtgtgtacaaccaggcctggctaatttttaaattttgtaaagatgggtctagctgtgttgcacatgctggtctcaaactcctggcctcaagacatccc

SEQ ID NO: 191060 - DNA, 201 bp, Homo sapiens
gattcttatttagactttctctgtaattgtgtagtttgtcggggctattcttatcttacagaatattcttataaatattcttatcttatagaattagtatmgtttgttgtatagtaagcataagtatatagtttgttggggctattcttatagaatattcttataaatattcttatcttatagaatatttcactggtttta

SEQ ID NO: 191061 - DNA, 201 bp, Homo sapiens
tatatcagaaacggctcaactgaatactccagagatctttgaagtgaataaaacctgaaattaaatcatgggcactctctggaatggttgcattcgaagayattcttaattaccatgaaaagagtgggaagtaaatttggattttgttttctgcttctcattgcattagattaatccacttttaattatatttgacattgt

SEQ ID NO: 191062 - DNA, 201 bp, Homo sapiens
aaacgtggtgtgatgacgcctctaagaaaagggcaaaaaccattgatttggtaagccgtatgtggtgtgcttctgcatgttcatccactggatgtgtgagygaatcacgattaatgatttttatttagattcttaaatttaagaatttcctagattcttatttagactttctctgtaattgtgtagtttgtcggggctatt

SEQ ID NO: 191063 - DNA, 201 bp, Homo sapiens
aagctccgctcgaaggcatttaaatttaataaaaagcatactcccatgggcctcaaaaaacacctctgggactgagacctcaccagctttcaaccctgctytgtaggttctggaacttctttttctctttctccatttcttatggttgggaccatagcactttcagctgtccattcatctggttttgcttctaccttggaa

SEQ ID NO: 191064 - DNA, 201 bp, Homo sapiens
tgggtgacccttaagcagattctctagatcccagttttctcttgtgtaaagtacaggtaatgatacatgtctcttccagtattggggaggaataaataagrtgtgtaaggaaagaattttttcatgtactaaaaaaaaaaaaaaaaaacaaaaaccctcaaaaaaagaacctggcacagtggtttgcccaaaaacgttcag

SEQ ID NO: 191065 - DNA, 201 bp, Homo sapiens
taattcttagaaaatgtgaaaataaagaagaaaataactctttattcaataaatattactgtgtgttccatgattactactgggctaaatgctgtaaacaygtatgccttattctaccttcttggaaaagatcctctgtatactttcaaaccctttagggagatatatgatcaactgctaggttatgtcctactggttagt

SEQ ID NO: 191066 - DNA, 201 bp, Homo sapiens
cacttttttgcctgaaattttctaggatttatgatttttaaaaaaaataataagcaaaattgatgttaagtcttcaacccacagatttaaaaaaataagaraaagaatatatagaaaagagacagcaatattttatttatgcattgcagcctgggagatgtaatcttgttaaaccagtgagccagcatctaattacagcct

SEQ ID NO: 191067 - DNA, 201 bp, Homo sapiens
gaaggatgatggactcagatgctctgagagcatttgctgccttttgagaattgtgccttgtaatattgatctttcttttctcgcaaagccacgatggcacygattctccccctgatgctgatgaggtggttatcgtcctcaacaacttcaaaagcaaaattattaaagtgaaggtgagtttggtaaaagtagtggcattct

SEQ ID NO: 191068 - DNA, 201 bp, Homo sapiens
gcgacacacatgaaacagtggattagtgcctggttcttacccaggaaatagaagaattctgtattataataacaccattgtaaacagtagaagcttttttyccacataacattttcctcagataaggttttacaaaatttgggatgcacttccgaactccttcccttttggatgccctggcccttgccagccctccccttc

SEQ ID NO: 191069 - DNA, 201 bp, Homo sapiens
ccaggctggtcttgaactcctgacctcgggtgatccacccacctgccccttccaaagtgctgggtttacaggcatgagccaccgtgccctgcctatttctrttttttttaaaaagagatgcactatgttaccaaggctgatctcttgagctcctgggctcaagcaatcctcctgcctcggcctcctaaagttttgggatta

SEQ ID NO: 191070 - DNA, 201 bp, Homo sapiens
ctccgtagcgacacacatgaaacagtggattagtgcctggttcttacccaggaaatagaagaattctgtattataataacaccattgtaaacagtagaagstttttttccacataacattttcctcagataaggttttacaaaatttgggatgcacttccgaactccttcccttttggatgccctggcccttgccagccct

SEQ ID NO: 191071 - DNA, 201 bp, Homo sapiens
atttattggtgtgactggcctttattgtactagtttttttttttttttttttgagactcctgcccaggctggagtgcagtggtgtgatctcagctcactgyaacctccgcctcccaggttcaagcaattctcctgccccagcctcctgagtagctgggattacgggcacccaccaccatgcccggctaatttttgtccttt

SEQ ID NO: 191072 - DNA, 201 bp, Homo sapiens
aaacatgctggaatactcagctataactgaattggccccctgaaaatagattgctcatgagctgacagcctttttcttttctttggaagtgcaacacttaytcatgcatcacacgttgattcttccctgaagcacagctaaagagcagatgatttattggtgtgactggcctttattgtactagttttttttttttttttt

SEQ ID NO: 191073 - DNA, 201 bp, Homo sapiens
tgaaagtaaccaaagggttcccagcttccaccattattctcgtataggggaaatgtttacattattagtgttttcaggactagcctgagagcccaatcagyatttaggaattggttttaaagagaaaaatgagtcctccttgaagggaggaaaatgcccaggacctaactgtgaccctgacagccatccatgtgaacgagt

SEQ ID NO: 191074 - DNA, 201 bp, Homo sapiens
tctcgctgcaacctctgcctcccggattcaagtgattttcctgcctcagctgggattacaggtgcatgccacctcccgtggctaatttttatatttttaayagagatggggtttcaccatgttggccaggctggtcttgaactcctgacctcgggtgatccacccacctgccccttccaaagtgctgggtttacaggcatg

SEQ ID NO: 191075 - DNA, 201 bp, Homo sapiens
gcctttgctgtagctggcaagtatatacatatacactgattgtgcctcggaatccccagggaggctttaaatatagatgcctgtgtcctattcctctgtgwttctgagctgatcagtctggcatggattggactttggtttagtgggcctgtgttttttatgacccatccttgtggggatcaggtgtgcgtggtgagatca

SEQ ID NO: 191076 - DNA, 201 bp, Homo sapiens
ttgcctgaaattttctaggatttatgatttttaaaaaaaataataagcaaaattgatgttaagtcttcaacccacagatttaaaaaaataagaaaaagaahatatagaaaagagacagcaatattttatttatgcattgcagcctgggagatgtaatcttgttaaaccagtgagccagcatctaattacagcctgtagttc

SEQ ID NO: 191077 - DNA, 201 bp, Homo sapiens
ccagccctaattgctcaatattttcagtttctttgatcactgtgaagtggacagggtatactgttttcttcaccaacttccttatcacagacatctccccytttcatgatatccctggtcatttgccattttgttttatttttattaatttttttccttggcatgtgaagtaagagctacatttgcccttttggtttacta

SEQ ID NO: 191078 - DNA, 201 bp, Homo sapiens
ctttgttgtttttattcaggtagaattaatgaaaactactttacgattttattttactttgtccttgaggaattgataagtaaataactacaagtatttgytttgggcttcactttgtattatttcactgattttatctaaacatgtacctgtctcaggtctttaagatgttctggcgtatgaggtagcctgaggacgcca

SEQ ID NO: 191079 - DNA, 201 bp, Homo sapiens
atggcttgataattgtttagagccctgaattctgctttatctggcagtttttattaggacattttgtgtgtgtgtgtgtgtgtgtgtgtgagagagagagagagagagagagagagcgaaagagagagaaagtgatcaaatagaaatagtatatgctagactcagttttatatacttcagctttgagatttggccaagtga

SEQ ID NO: 191080 - DNA, 201 bp, Homo sapiens
catggcttgataattgtttagagccctgaattctgctttatctggcagtttttattaggacattttgtgtgtgtgtgtgtgtgtgtgtgtgagagagagagagagagagagagagagcgaaagagagagaaagtgatcaaatagaaatagtatatgctagactcagttttatatacttcagctttgagatttggccaagtg

SEQ ID NO: 191081 - DNA, 201 bp, Homo sapiens
ccacttcatgtagggttttgaatgcttgatgatggcatttttaattttattttgaatgaggaggagaactatctgagactttttttttttttttttttttaatgagacggagtcttactctgtcatccaggctggagtgcagtggtgtgatcttggctcagtgcaacctccacctcccgagttcaagcgattctcctgcca

SEQ ID NO: 191082 - DNA, 201 bp, Homo sapiens
gttacttgatattatgtgtaatttcaatttttggcttttatgtttattttccagtgaattattactctaatagtcataaaaagtaatagttttaaaaggasaagggagaatgtaaataatactgacagcctgtaatgggccagggcctcagctaggtgcattgcagagttgtgcagttttactagagtcatgcagcgtggg

SEQ ID NO: 191083 - DNA, 201 bp, Homo sapiens
ggggtgcatatgttttaagaacttggaaacaactgcacctgttttataatgctatagctgctacatttctttgattttgtatcttacaaaaaatatacacrtctgagaaaggagaaatatatttatcaattataaaaatttaaggtttttcccattcagttttttctaatttattgaataatgtgtttcatattttaaaat

SEQ ID NO: 191084 - DNA, 201 bp, Homo sapiens
gccattgaatcccaacagcatcttgaagcaaatcttagccctgccttaggatgccaagatttgtacaggtagtgaagcccagaaacaataaaatttttttwaaaacattctctcacagctccctaataattattaaaatttttcagtatttcaagggaactttaggattacaacctggagattcagccctcttcatcaatg

SEQ ID NO: 191085 - DNA, 201 bp, Homo sapiens
aaaagtgattaacatcctcatttagagtaaaacatcctggaattaaggtatgctatattttaatttataatatcagagataaaataaatatgttttttcakttttccttttttataactaccatggattttttgtcttggcatgtcttttagacatgtacagtgtgttacaattttaggacatttaaaagacctttgacaa

SEQ ID NO: 191086 - DNA, 201 bp, Homo sapiens
ctttttttccccctgcccttttgtctccatttttaaaactttggttgttttcttattgttgagttttaagagttctttgtaagccaggtgcaatggctcaygcctataatcccaggactttgggaggccaaggtgggaggatcgcttgaggccaggatttgagatcaccatgggcaacatgagaagacctccatctctaca

SEQ ID NO: 191087 - DNA, 201 bp, Homo sapiens
ttggcttttggaacagtgtgaagtagatttattaaaaataactgcctctgggcctggcacggtggctcatgcctgaaatcccagcactttgggaggctgargccggcggatcacttgaggtcaggagttcaagaccagcctggccaacatggtgaaaccccatctctgctaaaaatacaaaaattagccatgcctagtagt

SEQ ID NO: 191088 - DNA, 201 bp, Homo sapiens
ctttttttttttttttttttttaatgagacggagtcttactctgtcatccaggctggagtgcagtggtgtgatcttggctcagtgcaacctccacctcccragttcaagcgattctcctgccacagccttgcgagtagctggaattacaggcgcccaccaccatgcctggctaatcttttgtatttttagtagagacagag

SEQ ID NO: 191089 - DNA, 201 bp, Homo sapiens
gatagctgtgtgagatatgtatgtttccatcaaccttgtgtctttgatgtgtgacttcagtagggataggggccatgttgtgaagttgttcagtaaacatrgaacttaatatacttcactcacgcatttctataaatcttatattatgatcaagtcaggttatcagttgaatattaagaatagattgaactggaactaata

SEQ ID NO: 191090 - DNA, 201 bp, Homo sapiens
tggctgcatggtgatacagtagtgctgtctcttgggggaaacaaaattgatggctttgtaattcttttaaaaaactttaatttgctacaacaataatgcayacctttatgaagaaaagaacaacggtgtctcctctctctgagaggcggtaactgcttttaatggtttggcatatataccttcagacttttttctatggtt

SEQ ID NO: 191091 - DNA, 201 bp, Homo sapiens
gaaaagaacaacggtgtctcctctctctgagaggcggtaactgcttttaatggtttggcatatataccttcagacttttttctatggttttaaatttatayatgtaggtagttttatttttataaaaggtatctttcaatttagtacaagtgggtatacctcgttatttttaacacatgcataacctaggtaagactgtcc

SEQ ID NO: 191092 - DNA, 201 bp, Homo sapiens
tcatggcttgataattgtttagagccctgaattctgctttatctggcagtttttattaggacattttgtgtgtgtgtgtgtgtgtgtgtgtgagagagagagagagagagagagagagcgaaagagagagaaagtgatcaaatagaaatagtatatgctagactcagttttatatacttcagctttgagatttggccaagt

SEQ ID NO: 191093 - DNA, 201 bp, Homo sapiens
aaggtatctttcaatttagtacaagtgggtatacctcgttatttttaacacatgcataacctaggtaagactgtcccgtaattggtaatttacctcttacygatggatttttaagtcatttcctcctgttacaataaggctatatggagcatctgtattcatgtctttactttctgctgagttgtatagtttattataata

SEQ ID NO: 191094 - DNA, 201 bp, Homo sapiens
ctcatggcttgataattgtttagagccctgaattctgctttatctggcagtttttattaggacattttgtgtgtgtgtgtgtgtgtgtgtgtgagagagagagagagagagagagagagcgaaagagagagaaagtgatcaaatagaaatagtatatgctagactcagttttatatacttcagctttgagatttggccaag

SEQ ID NO: 191095 - DNA, 201 bp, Homo sapiens
tgttaagtccattgggggcacaagcctgtagtcccagcactttggcaggctgaggcaggaggatcacttgatcccaggaattccagaccaaccggtgcaayaaagtgagacgcagtttctccaaaaagtagctgggtgtggtggcagtaaccacgcacacgcctttggtcccagctactcgggaggctgtggtgggaggat

SEQ ID NO: 191096 - DNA, 201 bp, Homo sapiens
ttatttccctcatggcttgataattgtttagagccctgaattctgctttatctggcagtttttattaggacattttgtgtgtgtgtgtgtgtgtgtgtgtgagagagagagagagagagagagagagcgaaagagagagaaagtgatcaaatagaaatagtatatgctagactcagttttatatacttcagctttgagatt

SEQ ID NO: 191097 - DNA, 201 bp, Homo sapiens
gttatttccctcatggcttgataattgtttagagccctgaattctgctttatctggcagtttttattaggacattttgtgtgtgtgtgtgtgtgtgtgtgtgagagagagagagagagagagagagagcgaaagagagagaaagtgatcaaatagaaatagtatatgctagactcagttttatatacttcagctttgagat

SEQ ID NO: 191098 - DNA, 201 bp, Homo sapiens
tattctttcttctgtcaactaaaatctgctattgagcctctctagtgaatgcttcatttcagttattataaatccagatttctatttggttctttttgatratttcctttggtttatagatattatttggtgagatgttggtcttaaactttactttggtagacatggtttcttttagttcttgaatatatttgaaatcat

SEQ ID NO: 191099 - DNA, 201 bp, Homo sapiens
ttgtttattatttctgtacatggaacagtttactgtggatactttctgttgtaatactctagggttttgaatttattattttacctacaagttttaaatgmtattttttcatttcttttatgcttattttaaagataaaaaatcaatttgagtagtaaagcagatggaaaataaactactacctcattctattttcttcaa

SEQ ID NO: 191100 - DNA, 201 bp, Homo sapiens
aaagtacaggtaatgatacatgtctcttccagtattggggaggaataaataagatgtgtaaggaaagaattttttcatgtactaaaaaaaaaaaaaaaaaacaaaaaccctcaaaaaaagaacctggcacagtggtttgcccaaaaacgttcagcaagtagtagctattgttgttgatgttataggggatttacaaatagc

SEQ ID NO: 191101 - DNA, 201 bp, Homo sapiens
gtttttatttcagtcttgtgaagatatgactgatttttaacttgcttattaacttttaatggaactgtttaagtctcattttctcttatcctgttgaagaraaagtaccagtagctttttattgtggatgattatgatatcaaaagtatttacttgaaaaatgatgagtagagtggacaaactggggaaaggagtattttt

SEQ ID NO: 191102 - DNA, 201 bp, Homo sapiens
tgtgtgtgtatacaagggctggtcagaaggtgttacatttacaattatttattttttttaattaataacttttttttttttttttttttacaaatgtttaytatatgtacaacaggcttcaggacaacacttcattccagctataggtggcaaaagatgctatggcagggaatacagatgtttaaatatgaatgaaatcaa

SEQ ID NO: 191103 - DNA, 201 bp, Homo sapiens
ttgtttctgcttgaaagtcttaccttcctcgtccatctccttggcctgcttcttgggctgtttcagcagcaccttcacaggcagacatggcgcctgccacrccttccccaggccctgcaaccctacttttaaaatttttatagactttgccaaattcccctccttgaactcgatgggcttctaattggagtcaagtagatt

SEQ ID NO: 191104 - DNA, 201 bp, Homo sapiens
atgtggtgaaaccccatctctacaaaaatacaaaaattagctgggtgtggtggcacatgcctgtagtcccagctatttgggaggttaaggtaggaagatcscttgagccctggaggtcaaggctgcagtgagctgtggttttgattatactactacactccagcctgggtgaaagagcaagaccttgtctcaaaggaaaaa

SEQ ID NO: 191105 - DNA, 201 bp, Homo sapiens
aaaacagggagaggtcattggcctactttttggctaagttttatggctttaaaaaatgcaaaatttgaatttaattgtatgtagtacgtgattctgaaggygcctcagattttaaagataagagtgattaattacgattaatcagggaagaaaggaagtccttttgtaaacagataacactaggtagaagtaatatatata

SEQ ID NO: 191106 - DNA, 201 bp, Homo sapiens
ccagctatttgggaggttaaggtaggaagatcgcttgagccctggaggtcaaggctgcagtgagctgtggttttgattatactactacactccagcctggrtgaaagagcaagaccttgtctcaaaggaaaaaaaaagaaaatgactttaaagtatacttgtgtgttaaatattttaagtttgataaatctgcacatttgc

SEQ ID NO: 191107 - DNA, 201 bp, Homo sapiens
gcagcaattaacagtgtcactcttcttttatctaagatggtgattttttcatttctgtgatctttgcatttttagtttttaatgaaagttcagtatgcacrtaactgaaagcatgaagtggtgctaccgtgttgtttaggaaagcagcacccctaacatgtctcaccccgttcctgaagacattcactttcgacatttagc

SEQ ID NO: 191108 - DNA, 201 bp, Homo sapiens
gttcataaacagaaccgtgatctctccgtggggttggccggccctctcagtactgctaatggcagttaggtggtgtaggtcttctttagtgagattggctscccagcacccatcctctgcccaccaaatggcattagtgcttcttactcagagtgccgaccaaaaaacagcgtgcgttccagccatctccgggtcaaggca

SEQ ID NO: 191109 - DNA, 201 bp, Homo sapiens
agtgagctgtggttttgattatactactacactccagcctgggtgaaagagcaagaccttgtctcaaaggaaaaaaaaagaaaatgactttaaagtatacytgtgtgttaaatattttaagtttgataaatctgcacatttgcacagttgttgacacatggctctgagatcaccttcaagaagtataactatttctgtaat

SEQ ID NO: 191110 - DNA, 201 bp, Homo sapiens
cttttcctagaaatatgtatttatttattttttaaatgttgcacctctgactagtttggccttttaaaagtctcttctttcctattcttttctctttttcaaaaaaaaaaacactttctggtaagagtttttaacctgtgtgtatctttcttcctttagttgtcaaatatttaattttcaggggttttttttgttcttttt

SEQ ID NO: 191111 - DNA, 201 bp, Homo sapiens
acacctgttttgaatgtaatttgcctagcatgactttagaacataagctaataatctccctctttataaaaaaatctagttatttgaatcccttttttgayaaatccagtagtttcattgagtctattatttgcacatatgatgtgctttgcttggctttctgaagaaatataaaacatgctaaaaaagtagctcgataaa

SEQ ID NO: 191112 - DNA, 201 bp, Homo sapiens
ctgaaagccctgtggtgattttctactctgagattggctctgaggaattttccaattttcaccgccagcttatatcaaaaagcaatgcaggcaaaatcaaytatgtattcagacattatatatttgtaagtattgacttattttacacctgttttgaatgtaatttgcctagcatgactttagaacataagctaataatct

SEQ ID NO: 191113 - DNA, 201 bp, Homo sapiens
tttatgtttcttttagagatctgcaccccgacctggagggacagttgaaagaactcagaaagcatcttgtagagagcaccaatgaaatggcacctttaaargtttggcagttgcaaggtaatgaaaacagggagaggtcattggcctactttttggctaagttttatggctttaaaaaatgcaaaatttgaatttaattgt

SEQ ID NO: 191114 - DNA, 201 bp, Homo sapiens
gagcactcctcctcagtgctgtccttgtttgccttttcttgcatctgcagcaaccacaaggaggcatcataaggtcaaagatggttttggaaacacttttsccaatctggaagggtactcctccaaatctaatttgttttaaccagttgttacctgtgtaagggctgtgcactcaagtcctgttgtcacatcgaaaattat

SEQ ID NO: 191115 - DNA, 201 bp, Homo sapiens
gagttgtagctttgtgattgtctatgaagtgatatttatctttaattgaagtaaaacactaaatatgttttctgcagctgtagctacagaaatattatatraggaggtattattaaaatcaaaaccaataatcatttactgagtgctaaattttgtaatgacccaagaatgtagcatgttagaggtataaattaaataggc

SEQ ID NO: 191116 - DNA, 201 bp, Homo sapiens
tgagttttaaactagcttctaattttctattttttttaaagaggaataattatacttcattttttccccctatgtcgtagaaaatttcctagggttgggasaggaaaaccatgaagataaagttggtttacttcttcttatgctccgggaaagaaaaaataatgaaaaggactgatttttatgtttcttttagagatctgc

SEQ ID NO: 191117 - DNA, 201 bp, Homo sapiens; identical to SEQ ID NO: 32981

SEQ ID NO: 191118 - DNA, 201 bp, Homo sapiens
cgtgttgtggctcttcatcctaagtgtttattgttttcatcatttttatttaaatttgaagggttgtctctggaatacacatgaataaggaacataatagyggttttgtttttgaatttccttttccattgagtgttgcagcaatgagctatgaaacagtgctagtccacagtggcaaagtgccacctgtcagctgaacat

SEQ ID NO: 191119 - DNA, 201 bp, Homo sapiens; identical to SEQ ID NO: 32973

SEQ ID NO: 191120 - DNA, 201 bp, Homo sapiens; identical to SEQ ID NO: 32975

SEQ ID NO: 191121 - DNA, 201 bp, Homo sapiens
ttcagaaaagcactggctgttattttaagtcagctatttttaccgcctttttaaatccccgctgtggtctctccccaagagaagttctggtttctcagctrtatgtaaagtacaagcaattactccatttggttctttaaagaaactgtttcttagggtactgggacagcgccatgacaccgacaggactaagcagcagga

SEQ ID NO: 191122 - DNA, 201 bp, Homo sapiens
ctgaggcaggagaatggcgtgaacccgggaggcagagcttgcagtgagcgagatcgcgccactgcactccagcctgggcgatagagtgagactccgtctcaaaaaaaaaaaaattaattttagaagaggcagggacaataaaattctttttaaagtggtttacttcagtgttaattgtaatagtgaaattagaaacaacac

SEQ ID NO: 191123 - DNA, 201 bp, Homo sapiens; identical to SEQ ID NO: 32976

SEQ ID NO: 191124 - DNA, 201 bp, Homo sapiens
gaagcaagataaagatgacataattaatattttctccgttgcatctggtcatctctacgaaagatttcttcggtcagtcttgttgattatttcattatatatgatgaatgaattggtcagtgttcttatttagagaggaaaggttttgtgggattctgctcattatactcctgtgtctttgaagcactctgagcattgtga

SEQ ID NO: 191125 - DNA, 201 bp, Homo sapiens
aagcaagataaagatgacataattaatattttctccgttgcatctggtcatctctacgaaagatttcttcggtcagtcttgttgattatttcattatatatgatgaatgaattggtcagtgttcttatttagagaggaaaggttttgtgggattctgctcattatactcctgtgtctttgaagcactctgagcattgtgac

SEQ ID NO: 191126 - DNA, 201 bp, Homo sapiens
cgaagtggaagagaatcagaaggtattcaccgatagaaaatactgacctgttttgtattctatctttaaagataaggaaatctgagtttaatcagcagcawttaacagtgtcactcttcttttatctaagatggtgattttttcatttctgtgatctttgcatttttagtttttaatgaaagttcagtatgcacgtaactg

SEQ ID NO: 191127 - DNA, 201 bp, Homo sapiens
agcaagataaagatgacataattaatattttctccgttgcatctggtcatctctacgaaagatttcttcggtcagtcttgttgattatttcattatatatgatgaatgaattggtcagtgttcttatttagagaggaaaggttttgtgggattctgctcattatactcctgtgtctttgaagcactctgagcattgtgact

SEQ ID NO: 191128 - DNA, 201 bp, Homo sapiens
cttccagattttcttaattcttacagaaacagctgtgaatgtgtattctttttttttttacacaaaatatgctacctatttatacattttgtaacttggcttttttttttttttttttacttaatgtcatatacatcttctcagtgaatagagagagacctgattccttttcatagctgcatattattccagtgtgtgagt

SEQ ID NO: 191129 - DNA, 201 bp, Homo sapiens
gttgcatcagaaaatgaagtattacttgtgtcttcagtcctctcctcacaggatggcgtcttgttttttcatggtgtgtgtgtgtgtgtgtgtgtgtgtgwgagagagagagagagagagagagatttttatctgccctcaagacatatcagcgtgaaaaatgtcatagatttgatgctggctggggagagagatggaagg

SEQ ID NO: 191130 - DNA, 201 bp, Homo sapiens
ttgcatcagaaaatgaagtattacttgtgtcttcagtcctctcctcacaggatggcgtcttgttttttcatggtgtgtgtgtgtgtgtgtgtgtgtgtgtragagagagagagagagagagagatttttatctgccctcaagacatatcagcgtgaaaaatgtcatagatttgatgctggctggggagagagatggaagga

SEQ ID NO: 191131 - DNA, 201 bp, Homo sapiens
ctctgcccccttcattgctgttaggatggatgttaatgtctgaagggccatcttcagtcaggatgctggtgagcctgtgacatctggtcactccaagctcygctcgaaggcatttaaatttaataaaaagcatactcccatgggcctcaaaaaacacctctgggactgagacctcaccagctttcaaccctgctttgtagg

SEQ ID NO: 191132 - DNA, 201 bp, Homo sapiens
tcagtcattcgtttgatgaactttcccaaaatgaacccatctatattaccagtgtccagacctagaaatagatctgctattcaccagctcagggtcagtcttttttttttttttttttttgagacagtcttgctctgtcgttcaagctggagtgcagtggtgctatctcggctcactgcatgcagcctctacctcctgggt

SEQ ID NO: 191133 - DNA, 201 bp, Homo sapiens
gggccatcttcatgagtggtaataggattccttgaagaggctctcagcggatcccaggagtcagtgatcataatattgaaggcatcctggttctgcttcaygaaatcaaaatcgtcacccatatgcagggtcagcttagagctagagaagccaatggccatacccggcaggaatttcttagagacctgagtgccatccttt

SEQ ID NO: 191134 - DNA, 201 bp, Homo sapiens
ttgaagatcatctgttttcttttctgtggttctccttttccttaggtcctcagaaacgtgaagaattatgatctctggagaaggacaggaaatcaccccawttgaaaaacagtttttataataaatgctagttttttctgatctgtctatacaactgctgataagccggctgggcaggagtgccacaccttttgattctga

SEQ ID NO: 191135 - DNA, 201 bp, Homo sapiens
agagttcttcttagattccttgttttttttttcattaaatctgtcagtgtactagtgaatgaaaaaatttagatcaacacaaatatgtagttgaagaaactttttttttttttttttgagacagagtctcactctgttgcccaggctggagtgcagtggcatgatcttggctcactgcagcctccacctcccaggttcatg

SEQ ID NO: 191136 - DNA, 201 bp, Homo sapiens
aaaaaaccccacaaagtttgtgcagtcatcaccactgtctaatgatacatcattatcatcaccccccaaaaattccccagaattccatgtacctattagtrgtcactctctgttcctcccttcccctatcctctggcaacaactaatctactttctgtgtctatggatttgcctattctagacatttcatataattggaag

SEQ ID NO: 191137 - DNA, 201 bp, Homo sapiens
attgttttttgtcttcgaagaggctggagttgtgccccgagctgcccacggagagttcggtgacttcattccctcctgctttgaggaccagcttcaagggsttctctacatactcctggtagaggtgtttgtccgacttgagcttcttgtgcttgtgcttcttgtccatgtccgaccgggcccctgtgctcaccccccgcg

SEQ ID NO: 191138 - DNA, 201 bp, Homo sapiens
acatgccaccaggcctggctaatttttatattttagtagggatggggtttcaccatgttggtcagactggtctcaaactcctgacctcagatgatccaccrccttggcctcccaaaatgctgggattataggcgtgagccactgtgcctggaccacagcagtccccaacctttttagcaccagggatcggtttcatggaag

SEQ ID NO: 191139 - DNA, 201 bp, Homo sapiens
cattctgctcacagattttctggctcaggaatgcagacagggtgcaactggaatggcttttctctgctgcacgatgtctagttcctcagctgagaagactrttaggggttaggggtaacccaaccagcagctaagggttgaaaccatctgaagcttgcttaccatcatgtctggtggttgatgctggctactagttggaac

SEQ ID NO: 191140 - DNA, 201 bp, Homo sapiens
ggtgctcccagcttctatttatttaatagacttctgtcctgatggcagcagccaactctcatagaaaattcccttgctggatcctagtatgacgcctaaawgagagcaggacctccagggctctgctaaggtcaggctgttaaatggtcctttcctagactttcttatgttttttctgcactcaatgacaaacacatcact

SEQ ID NO: 191141 - DNA, 201 bp, Homo sapiens
tggaagataactggggcaaagaacaaaacttcactggcctgtgagccatctctgaaactgaaaccctttgataaatatagatcaaagaattcactagagcrtatttgatttctcttaaaagacaatccagagtagttgttgccatttggtatggcttttttaaaatcacttgtctacactattcaggtgaaagtcggcctg

SEQ ID NO: 191142 - DNA, 201 bp, Homo sapiens; identical to SEQ ID NO: 32999

SEQ ID NO: 191143 - DNA, 201 bp, Homo sapiens
accttaccttccttcttggagcttctccacttggctttcctcctacttctctgtttttttcccacttgattttctcattattctcagttgttatctaaatrttggagtttattaaggcttggtcttaagccttctttatatctttctctaaatgatctaattcctgtctacaggattactacagataactcgcaaatttat

SEQ ID NO: 191144 - DNA, 201 bp, Homo sapiens
agaaagggttgagaatgtgaaatgatggatatgttaatttgtttcactgtaagaaccattttactatatactaatatcatattttataccttaaatatacrcaataaaatttatttttttaataaaggggtgagaaaaggttatcagaaatgcagaataaaagttctctcctgtaatgacttgaagtgaaaggtagaaatg

SEQ ID NO: 191145 - DNA, 201 bp, Homo sapiens
aggttgtagtgagctgagatcacgccactgcactttgttgcctgggcaataaagagtgaaactccatctcagaaaaaaaaaaaaaaaaagatagctgggcrtggtggcatgcacctgtggtcccagctactcaggaggctaaggaaggagaatcacttgagcccaggatgtcaaggctgcagtgagctgtgttcacgccgc

SEQ ID NO: 191146 - DNA, 201 bp, Homo sapiens
atcattctggaatcagatagtttaaccaggtaaattttctcttatctttcatgatagatttaatgatagttagttctcattcttaggggataaaatacatytttttcctgcccctggaggcagggtctcactctgtcgcccagactggaaagcagtggtgcaatcacagctcactgcagccttgacctcccaggctcaagc

SEQ ID NO: 191147 - DNA, 201 bp, Homo sapiens; identical to SEQ ID NO: 33005

SEQ ID NO: 191148 - DNA, 201 bp, Homo sapiens
tggaatcttgccctgttgctcaggctggaggtcaatggcacgatctcagctcactgtaacctcatcctccggggttcatgcaattctcctgcctcagcctyctgagtagttaggattacaggcaccaccaccacgtctgactaatttttttgtatttttagtaaggacagggtttctccatgttggccaggctggtctaga

SEQ ID NO: 191149 - DNA, 201 bp, Homo sapiens
tacccacggccaagaccctgtgcagtcccaggcagccctggctggagcacacaacaatgttattttaataatgtccctaaattactctaatgcaggtggtycaaggatcaactttgataggagagctacctcaacacctgagcctttgtaccaactgtattctttcagcctgtgccagtatctatgatgttgttattttat

SEQ ID NO: 191150 - DNA, 201 bp, Homo sapiens
cattctgtttttcatttttggtacagtattcaataaattccatgagatattcaacactttattataaaataggctttgtgttagatgatcttgcccacctatatgttactaagtgttctgagcacatatcctggctctaaggcaggaaactcagattctttattactaatgttcatttcatcatcggcaagaatgttaacc

SEQ ID NO: 191151 - DNA, 201 bp, Homo sapiens; identical to SEQ ID NO: 32994

SEQ ID NO: 191152 - DNA, 201 bp, Homo sapiens
gttaaaaccaagtactgtgattgctctcctgattttttattctaatgaaggcgctttcttgtgtgggtagttcagtttggtgttccttcaggggacggcarttgttggaggattccatatggccacatggactaatattttttgatatcatgaaaatgtaatgaatgtgatatataatgaaagctttctgaaaaatattaa

SEQ ID NO: 191153 - DNA, 201 bp, Homo sapiens
aggctggctgcaactcaggttctggactgctgggatgggcagtttccctctggctggggctggtcaaatcctctcctcatgggtgctggctaaattctatwccgtgtcgctctccactgtgacagggacgttgctttccactgtgacagggtagcactgagttccaatgcaaagcaaagtcccatattcactctgttctgt

SEQ ID NO: 191154 - DNA, 201 bp, Homo sapiens
ctttggttattcgggatcttttgtggttccttataaattttaggattttttttttctgtttctgtgaagaatatcattggtattttgatagggattgcatygaatctgtagattgctctgggtaggcatggacattttatcagtattgattcttccaatccatgaacgtggaatatcttttccattttttggtgtactctt

SEQ ID NO: 191155 - DNA, 201 bp, Homo sapiens
ttagaaagtttgctctcacataattattatgttttttatatcctttaattgcagctctttaatattggaaggtgttgaaccacagagtacatgtgaattasaagtggatgctgtagctgctgatatcttaaatcgtctggacattgaaggttcatacacaattattcttaatatatgtttttattttttaaaattaatgac

SEQ ID NO: 191156 - DNA, 201 bp, Homo sapiens; identical to SEQ ID NO: 33007

SEQ ID NO: 191157 - DNA, 201 bp, Homo sapiens
catgttcttcatcagcgttttcccctctttacctttcgagtcttgtcagactggtttgataacaagacagatctatacaggtactgttctataactctgargaaggtaatataaaatcatcattgagatgtaatttatatgtaataaaatgcacacatttaaagtgtattgttcaggccagttgtggtggcttacgcctgt

SEQ ID NO: 191158 - DNA, 201 bp, Homo sapiens
cctatgctgctgatgagaaggcactttttcatgaaattgcaaatataataaagaggtattgttttgtatatctgatttttccagttttattcagagagtcrtttcatgctattgcagataatagtgaagataaaagtaaaggtaggaagaaagcgaatcccttcctatgacccttgaaagcagagttactcttgggaagat

SEQ ID NO: 191159 - DNA, 201 bp, Homo sapiens
tacaaaaacctattggcaagatcagtcttatttaaaaaaaaaaaaaaaaaaaaaaaaaaaaaaaaaaaggactttagactggagtaaacaaagaaaataamccagtatgttttaaaacacattttccgaaacaaattatcgtcaacatacttcaattggtaactcttctcctgaatcaccacctacagatttcaaggaaat

SEQ ID NO: 191160 - DNA, 201 bp, Homo sapiens
ctgaatttttcctcccattctgtagattatctgtttactctgttaatggtttctcttgctgtatagaagctcttaggtcctacttgtcagtttttggtttygttgcaattgtttttgaggacttagccataaattcttcgacagggctgttgtcgagaaaagaatttcctaggttttcttctaggatttttgtagttttag

SEQ ID NO: 191161 - DNA, 201 bp, Homo sapiens
ttacattttaatggggttatttgttttttacttgttgatttaagttccttataaattctggatattaggcctttgtcagatacatagtttctgaatttttyctcccattctgtagattatctgtttactctgttaatggtttctcttgctgtatagaagctcttaggtcctacttgtcagtttttggtttcgttgcaattg

SEQ ID NO: 191162 - DNA, 201 bp, Homo sapiens
ctgctgattatgtttcttaattgtaccatgaattacaaaaacctattggcaagatcagtcttatttaaaaaaaaaaaaaaaaaaaaaaaaaaaaaaaaaarggactttagactggagtaaacaaagaaaataaaccagtatgttttaaaacacattttccgaaacaaattatcgtcaacatacttcaattggtaactcttc

SEQ ID NO: 191163 - DNA, 201 bp, Homo sapiens
tacactgtcctgtgtgtgatgacctaactcagcatggcatctgtagtaaatgtcggagccaacctcagcatgttgcagtcatcctcaaccaagaaatccgsgagttggaacgtcaacaggagcaacttgtaaaggtacagttttgttccatgggcccagaatcacaagcagtctgatcttacaggaagatatagtcactct

SEQ ID NO: 191164 - DNA, 201 bp, Homo sapiens
gtcaaatcacttaaatcaggaacctttaagattcagtttaatcagttttgtatataaagtattagacttactttcaccatttttgcccaaaaacaaacttytgtacttcattaaataacatcaacaaaagtaaaaagctaacatcaacctaggaaaaccattttcaccgtaacagttatgtatattaactatattatatac

SEQ ID NO: 191165 - DNA, 201 bp, Homo sapiens
cttcctcaagcctattatttatggattggcaaataatgtgcctgcatttgaaggcacgttattaataatgtaagttattaacaccagcttgcatgcttccttgcttgctgtgatatttttcaggtttcagttatttatgtaacatcttttttgcatggcttattgaaattcttctagaatgtaggcactattcaaatttct

SEQ ID NO: 191166 - DNA, 201 bp, Homo sapiens
ataattatcataataatagcagcaaaggttattaagtttttgcttttgcctaacaccttacaacagtttcaccttacaacagtgaaaccactgtttcacayatacagaaactgaaaactagagagttaaatgatttgcctagggtcacgtagcagcttgcagtagagccacaatttgaacctacgactatctcactccaaa

SEQ ID NO: 191167 - DNA, 201 bp, Homo sapiens
ttaacttaacattgaaaactatattcagtggtttgtttataagccccggaatctctaaatacatgttttaccacctttaattaggtattatctaggatgayaactgtttttgacaagtaaaatagaggactggaactaaaattgtacagaagggacttagactagacattagaccatttatgtcaaatggattatgttata

SEQ ID NO: 191168 - DNA, 201 bp, Homo sapiens; identical to SEQ ID NO: 33011

SEQ ID NO: 191169 - DNA, 201 bp, Homo sapiens
gctcagcactcctgctcttcccacagaggcaacagacctctgctttgtaccactggcaggtcctgggcccaagtaagcttcctgaccctccccctggggcrgatagcattttcttctactcctttctcagtgatactgttcctttgcctggaatctatgacaggaagttttcttgccccttttccagttgcttgttattta

SEQ ID NO: 191170 - DNA, 201 bp, Homo sapiens
tgattagtatttacatggtatatcatgtcaaaaactgaagtttgccatgaatttcatacatattagcaatagacatgagatttccatctctccattgtatsacttattaataaagagtaactggggagatggttgcagaccagatactgagaagtaggttcaaaggcagctacctcaacagagacccatggagaattgtct

SEQ ID NO: 191171 - DNA, 201 bp, Homo sapiens
tgcttggcgtagatgaagcaacttgcttttttcactcagcattatatttttaagcagcttgaagtttaatttatataacataaaattcagtcattttaagygtataattcaatgatttacaaagttgtgcaaacgtctccacaatccagttttagaatgtttccatcagtccacaggatcccttgtgtccatttacagtta

SEQ ID NO: 191172 - DNA, 201 bp, Homo sapiens
aggattgtcagacttaagttttaaattaggaattaatttaaaacatctcattgtgggtttgtacatttttcatcactagtgagagattgagtttttccatrtgtttatagcctactcgttctataaaatactgagagatgtgttgaagtctccaacttaatagatttgtctatttctctttccagttctatcagttttttt

SEQ ID NO: 191173 - DNA, 201 bp, Homo sapiens
cagttgtataaccgagcaccattgcttatggtaataatgactcatgattactgaattgcataaggaccagaggaggactgtgaatgaattgtaaatactgrtacttataccgttaacagctttggacttccctgagtgtgataactcttgcaactaagcaaatctgttgctgaagctcaggaagctatgcctatgagactg

SEQ ID NO: 191174 - DNA, 201 bp, Homo sapiens
agcatgtgccaccacaccatacctgtctaatttttgtatgtttcatagagatggggtttcgccatgttggccaggctggtcttgaactcctgacttcaggkgatctgcccatctcagcccctcaaagtgctgagattacaggcatgagccacctcgcctggcccaattttaacatttccgagtttgtaatgtgtctcacag

SEQ ID NO: 191175 - DNA, 201 bp, Homo sapiens
gcaacctccatctcctgggttcaagtgattctcgtgcttcagtctcccaagtagctgggattacaagcatgtgccaccacaccatacctgtctaatttttrtatgtttcatagagatggggtttcgccatgttggccaggctggtcttgaactcctgacttcaggtgatctgcccatctcagcccctcaaagtgctgagat

SEQ ID NO: 191176 - DNA, 201 bp, Homo sapiens
ctgtgacctcctatgccacatctgacatgaagtactttgaccttttcccttgacttttgtataaaaaggtattagaaaactgcgaggctggacattttatrtgttttgagtaatttaatataattttaaacattttaaagttgtcgaaccctttcttcttatataattttacccagcagcatcaaaaacaaataggaatcc

SEQ ID NO: 191177 - DNA, 201 bp, Homo sapiens
acctctggagggctgtttttagatgatgagattgtatagtatagatggaaaatactctgtgtaacttagaagaaattgttaataatgttgctttgagtctygttaatttcattgtgtgtgtgtttgtgtgtgtgatgtgtataaaacatgcatagatcatggtagtgcttctagcaatgctctactcttacgtacagtctt

SEQ ID NO: 191178 - DNA, 201 bp, Homo sapiens
gccaccttcacctcctgggttcaggctattctcccacctcagcctcctgagtagctgggattacaggcatgcaccaccccacccagctaattttttgtatwtttagtagagacagggtttcaccattttggccaggctggtttcaaactcctgacctcaaatgattcacccgcctcagccctcccaaagtgctgagattac

SEQ ID NO: 191179 - DNA, 201 bp, Homo sapiens
agattatattttttgaggttattgtttccctcctttctctcaaatgtgctacttcgggaatattcatccttgacatttacaacataattatttcaaattayaaaacttttttatatgagaaaactgtggatcataaacatttttaaatttgatacttcaatgtgtgttaaattgtatgaatgaagaggacaattcacattt

SEQ ID NO: 191180 - DNA, 201 bp, Homo sapiens
tggtatgggaggggtttcctaactgagtggggctaattagggggccattactacaacaatctattatccaactgttgctggctaactcatttttcaggaarcatgcactaactagcgtggcattgctcctttcttgaagtagtgtttatgtaagcaatttattcaacagttcagataaatttagttaattcattgttcttg

SEQ ID NO: 191181 - DNA, 201 bp, Homo sapiens
atttactgtcaccttccagaaaaagttttcagacccccaaattagaggaatggtacatttagtctttgtgtttatcgaaactgaatctacaaaaatacccsaagtaattttactacaaataggctaacaagattttagatgggcaatttagagaccaaatcaagacacctaaattgcagaataaaatgttgaaaaatgaca

SEQ ID NO: 191182 - DNA, 201 bp, Homo sapiens
ttttgtttttgttttttttgagatggagtctcgctctgtctcccaggctggagtgcattggcgcgatcttggctcactgcaacctccgcctcccgggttcrcgccattctcctgcctcagcctcccgagtgtctgggactacaggcacctggctaatttttttgtgtttttagtggagaggggtttcaccatgttggccag

SEQ ID NO: 191183 - DNA, 201 bp, Homo sapiens
tgccattttgttggtttacattttaacatctatggttgtttcttagaattctgccttagactttcatctttactctgtatattttctgttccctctacagrcttatttactcccatgggtttgtttggttttaacttttgtttttgtttatctttatgcttttgacttccaaatgtatatgaatagcctcatttctctcta

SEQ ID NO: 191184 - DNA, 201 bp, Homo sapiens
tctcttggacttgttgtctaacttcagtttgccatgatagtaagagggaaccttcagaggaggggaaggggagttgttgtttaaagagtatgaagtttcarctagacatgatgaataagttctggacatcagttgtactgcatggtgactgtagttgataatgtattatatacttgaaaatcgctaagagattagatttta

SEQ ID NO: 191185 - DNA, 201 bp, Homo sapiens
tgttgattttgtatcctgcaacttcgctgaatttgttttttggtggagtctataggtttttcctaatataagatcataccatcggcagataaggataattygacttcttcctttccaatttggatgcactttatttattcctttcttttgtctgattactctaactaggacttctagtactgtgttgaataacagtggtga

SEQ ID NO: 191186 - DNA, 201 bp, Homo sapiens; identical to SEQ ID NO: 32992

SEQ ID NO: 191187 - DNA, 201 bp, Homo sapiens
ggaaatcaattcaatatatcaaagatagataacctacacccccatgtttattgcagcactgtttataatagccaagatgcggaatcaaccttaagtgcacwtcagtggatgaatggataaagaaaatgtggtatatatacacaatggaattatattctaccatattttttatgaaaatgaaattctgtcatttgcagccac

SEQ ID NO: 191188 - DNA, 201 bp, Homo sapiens
aacaattcaaataataaaagagtgttacctcaaaaatgccttgtgtaatatataacagttcacaagaatactatttttcttccatttattacgattacaargaagtataacaagaattaaaagaaatatattattttgcatatatatttatacttcaaagtaatttatatactaaattaggttttgtttgagatggtgaaa

SEQ ID NO: 191189 - DNA, 201 bp, Homo sapiens
ttctttgggttcagagagcattactactatataaacaattcaaataataaaagagtgttacctcaaaaatgccttgtgtaatatataacagttcacaagawtactatttttcttccatttattacgattacaaagaagtataacaagaattaaaagaaatatattattttgcatatatatttatacttcaaagtaatttat

SEQ ID NO: 191190 - DNA, 201 bp, Homo sapiens
agagtttctaaatgctaagtttcgagctttgttcttgtcttgttgcatagctgtagcaaacagctagttcatagatggcatttgagtagcactgtagagayctttttagcaatataaaaagactaattcatttcttaaaatctttttgtcctgtgtcaaaattattattcctatttcctttcagtttgactatttctgcga

SEQ ID NO: 191191 - DNA, 201 bp, Homo sapiens
ccaggagttcagggctgcagtgaactatgatcacaccatggcattccagcctgggcaacagagagagaccctgtgtctaaaaaaaaaaaaaaaaaaaaaarattatttaacaaatttacaatgagcacatgcaatagtatatataccaaaaatactcaatcaggacaaaaaaatttgcaatgaaaagtaagcttccctcct

SEQ ID NO: 191192 - DNA, 201 bp, Homo sapiens
atgtttaagggaatttgagagtacgaagattcatttgaattgactggctttgttaaactacagatactggagaatataggaagaagctatgaataatatcyagggacatagtatttgaatgataaattcattgtttttattcatatgtggtaataatggaaaatttattttaagattaggagaggaaaggaatctgaaaag

SEQ ID NO: 191193 - DNA, 201 bp, Homo sapiens
agaaaaaataaaaattacatcatttttccatgtagtaacagccaccataatattttgatgtgtattctgttttcttttttaaaaagtatagtttttagttygttttgttttgtgaagtgtgatcttactatagtcacagtattatatccaaatttttcacttaacattatattgtaaacattttccaaatgagtttcttga

SEQ ID NO: 191194 - DNA, 201 bp, Homo sapiens
ttgtttagtacccacatggaactctttatttcactgctggagcatatgaaatctgttctttagacattagtttccatcattttggggactttggtgttatyagtagtgattatggtatatttacttttagttaccaaactttatgtgctagtcattacctttgtgttgttgttattgtccaactttgacacttgtcctgca

SEQ ID NO: 191195 - DNA, 201 bp, Homo sapiens
ttcattttgctcccacgtgttatatcatgaatttgttgggcccaaagtcatatatagaattttttaaataattgatacttgattaaagaaagcacaaagayataaaaataaaacattcttggtggggggaaatggtttttaagaggcattttattaattttaccacaggtatatttgccctgtgttttacaaacaaaaaag

SEQ ID NO: 191196 - DNA, 201 bp, Homo sapiens
atgtccacctcccagccccttttcaacacacagttttgtttagtacccacatggaactctttatttcactgctggagcatatgaaatctgttctttagacrttagtttccatcattttggggactttggtgttatcagtagtgattatggtatatttacttttagttaccaaactttatgtgctagtcattacctttgtgt

SEQ ID NO: 191197 - DNA, 201 bp, Homo sapiens
tctgcatgtagatatccaatgtctcagcaccatttatcgaagaaattgttctttcccccaaggtatgttcttggcaccttcatcaaaaacgagttcactgyagtcatgaatttatttcagggttctctattccattggtctgtgtgcctgtttttatgccagtatcatgccgttttgattactatagctctgtagtataat

SEQ ID NO: 191198 - DNA, 201 bp, Homo sapiens
aaaaatgttaacttcttttccccccatttaaaaaaaaaagttatccttggggttttacatgtcttcagttttaatgtcaagtttaccaatattcctttatrgtttagttttggtatgtgatttatgagaccttccctaccctgatgtaatgaaaattttctcttaagtattcattttaaggcttacgtgtgcttacagttt

SEQ ID NO: 191199 - DNA, 201 bp, Homo sapiens; identical to SEQ ID NO: 32982

SEQ ID NO: 191200 - DNA, 201 bp, Homo sapiens; identical to SEQ ID NO: 32983

SEQ ID NO: 191201 - DNA, 201 bp, Homo sapiens; identical to SEQ ID NO: 32984

SEQ ID NO: 191202 - DNA, 201 bp, Homo sapiens
tattgaagttcaattaaaattattatatcttaggcactaaaaatgttttgataaactttgagtgccttttatacttttaaaaatagaaatatattttatgrggggaaatttttagctttaggatacaatatatttataggtagagaacaatttttctgttttagatttagattataattatagaacttaatcttgaactga

SEQ ID NO: 191203 - DNA, 201 bp, Homo sapiens
aacatttattgctaaatggtgccacattcaaaaagaattcgagggggtttagataataccatggatacaacagttttaaaaataaaggtaaaagagtgaaygacatcattcaaaaggcagatatattatttcaaaatacagcagtaagcctatattgaagttcaattaaaattattatatcttaggcactaaaaatgtttt

SEQ ID NO: 191204 - DNA, 201 bp, Homo sapiens; identical to SEQ ID NO: 32987

SEQ ID NO: 191205 - DNA, 201 bp, Homo sapiens
tttcttaggggccatttccacatttccctaatttcttccctgcctctcggttttaaaagtgtttattaatgtattttagtaataatgcagaaattatactrtttttaaaatatgtaaatactgtaactttagaataaccagaatttggtaggatttttgaactagcagtggaagtttaggaatagggtttcaccagggagt

SEQ ID NO: 191206 - DNA, 201 bp, Homo sapiens
ccttgttaaatataatttaaatttgtgtttttttttccttggaaggacaataatgataaaaggttgagaaacactgctcttgggataataggtaatgcctrgtggagtgaaaaagagttcctggctgggcgcagtggctcatgcctgtaatcccagcactttgggaggccaaggcaggcagatcacctgaggtcaggagtt

SEQ ID NO: 191207 - DNA, 201 bp, Homo sapiens
agcaattcttctgcctcagcctcccaagtagctgggactataggcgcacgctgccatgtccagctagttttttgtattttagtagagatggggtttcaccmtgttgcccaggctggtcttgaactcctgagctcaggaagtccacctgtctaggcctcccaaagtgcaaggattacaggcgtgagcaaccatgcccggccc

SEQ ID NO: 191208 - DNA, 201 bp, Homo sapiens
cctcagcaccaggttaaacagaactatcctttcaaagagcttccctgctgagatgcagagtaggagtaaatagaagagtgtgggatgtccacaaagcaagkaattaaacaaagtaggccagacagactatagagggagctgcttgtctttaagattactctaaggaactctgccacttcctctagcttagtgaatattttg

SEQ ID NO: 191209 - DNA, 201 bp, Homo sapiens
attctattacgtgaggaaatgttccttaaaaaataaagaatattatatactgttgttttcctgaatattttttaaaagacacattaactatttcctatttmatccttcatggacatcccacaatagattaccagcaccttaaaaaaaaaaaaaaaaacaaaaacgaaaaaaccaaagactaaaaacccccattggggtttt

SEQ ID NO: 191210 - DNA, 201 bp, Homo sapiens
agacagcttcttaccagtgagctgtctctttgggccttttgattttcctatttgaaaatccacaacggttccaaacgagtagctctcacaccacttcaaayacgtggcaacctggtaaccactaaaatgcacctgtataacacacaaatgtaaaagaacgatctctacttggatgggttagaaatgtgtcaagggtcctaa

SEQ ID NO: 191211 - DNA, 201 bp, Homo sapiens; identical to SEQ ID NO: 33008

SEQ ID NO: 191212 - DNA, 201 bp, Homo sapiens; identical to SEQ ID NO: 33010

SEQ ID NO: 191213 - DNA, 201 bp, Homo sapiens
gaaactttaatcatactttctattgattttgaaactgtaatcatactttctatatagttggctaagggaggctatagtgatgtttcgtccttcaggatttktttcttttgaaagaattagatacatgatttgcttctcatttctaaaaggatataacatttgttgaccactgaattcaagctttgaaaactttaatgtttg

SEQ ID NO: 191214 - DNA, 201 bp, Homo sapiens
gcagtgagctgtgattgctccatggcattccagcctaggcaacagaacaagattctgcctccaaaaaaaataataaataaataaatatgattttgaaactktaatcatactttctattgattttgaaactgtaatcatactttctatatagttggctaagggaggctatagtgatgtttcgtccttcaggatttttttctt

SEQ ID NO: 191215 - DNA, 201 bp, Homo sapiens
ttctcttataaatacttaggagtgggattgttgggttgaatggtaagtttacttcataagaaacagccagatttttttcccagtgtggctgtaccattttrcattagctccagcaactcatgggaggtccagtttctcctaccctctccaacatttgtttatatttagtcttttaaaattctgtcttttctagtgaaagtg

SEQ ID NO: 191216 - DNA, 201 bp, Homo sapiens
gtagttattgtcaggttgactgaacacctttactacttcctattaccctctctcttcttcagcattttctcttcagccctgacctcaatgccccttcactyatctttttattcttgtttcttccaattcagaatgcaggaattgtggtgtattttagctcacatgaaagggattatgaagtctaattataataactctttg

SEQ ID NO: 191217 - DNA, 201 bp, Homo sapiens
ttgcagatattttctcccaatctatggcttgcattcttatttttctagtggtatcttttgaagagtcaaggttttaaactatgataaagtccaatttatctttttttttttttttcctttcgtgattcatactttttggtgacctaagaaatctttgcctaacctaaaatatcaaatgttttctgttttcttgtagtttat

SEQ ID NO: 191218 - DNA, 201 bp, Homo sapiens
ttactgttatactcaaagacaagtttgtatattgattggttctttcaaattcttcacctcagtttcttcttgagtacttgtagaaagaatgatgatactgrtggctattttgatttcttttttacgttcttttctcgtttcatttctggaaatatttagtaattaaatgtattatatgttaaagtctgttaacttatactg

SEQ ID NO: 191219 - DNA, 201 bp, Homo sapiens
tctgtacagtcctgggttggtggttacatgactattcattcatcaaactctataaccacgtgatgtaccttaaccaagtgatgaggtttaatgtcaccagttattatgtcatgtgggtgtcatgtggcccctcatgtgatgtgataacaaaggtacttcgcctgtgtgatattcttgccaaaaactcgtaaccccagtcta

SEQ ID NO: 191220 - DNA, 201 bp, Homo sapiens
ctgtacagtcctgggttggtggttacatgactattcattcatcaaactctataaccacgtgatgtaccttaaccaagtgatgaggtttaatgtcaccagttattatgtcatgtgggtgtcatgtggcccctcatgtgatgtgataacaaaggtacttcgcctgtgtgatattcttgccaaaaactcgtaaccccagtctac

SEQ ID NO: 191221 - DNA, 201 bp, Homo sapiens
tgtacagtcctgggttggtggttacatgactattcattcatcaaactctataaccacgtgatgtaccttaaccaagtgatgaggtttaatgtcaccagttattatgtcatgtgggtgtcatgtggcccctcatgtgatgtgataacaaaggtacttcgcctgtgtgatattcttgccaaaaactcgtaaccccagtctact

SEQ ID NO: 191222 - DNA, 201 bp, Homo sapiens
ttcagaatatcggaagtgtttacagatttgaaggcatcatgtgaaatttattaggttgttgcaaaagtaattgcagcttttgctgttactttcaatggcaraaatcacaattagttttggtagaaaggaagttaaaaacagggaaattgcagtatgataaaaaaatttacatcttcttttatcatatagttagccctcagg

SEQ ID NO: 191223 - DNA, 201 bp, Homo sapiens
tgcagtatgataaaaaaatttacatcttcttttatcatatagttagccctcaggtttttgtttttgtttagtatgagataaaagattatactgaaatcatgtacaaaatcagtgaataattttttttattttattttatcatgttatctcaggcacattacagtttaacttgacagtaaacttcttgtaagtaaatatatg

SEQ ID NO: 191224 - DNA, 201 bp, Homo sapiens
ctcagcactcagttgtataatcagtggtcaaatgaaatggaaatgatgctaattactgtagttgttaaaatgaagtgtataaagtatgtaaatgggacaattttttttttcttttttctttttttccccccacatgggtaaaagaggaataaatggagcaaatgttttgagcaccacagaagcattttatatttttttaac

SEQ ID NO: 191225 - DNA, 201 bp, Homo sapiens
actcaagcctgggtgacagagtgagaccctgtctcaaaatacaataaaatattgtgttgtacatgttgaatattgtctaatttcaccgtatttttttcacsgaagtcatttttgcacttaaggccagatgaattcagctggccttgttgatttattatagtaagaaaaatttagtctagaaataggaaggagcttctcaaa

SEQ ID NO: 191226 - DNA, 201 bp, Homo sapiens
agtcacataagttatatattattttacttaaagggaacattcctatagtttgctactagagaagtttctctgaacatgtagagtgctgaaaagatgtaacrgttctcaatatgtatgcacccaacaccagagcacccacatatataaagcaaatattattagattgaaagcaaatgttattagatttgattcttagcatct

SEQ ID NO: 191227 - DNA, 201 bp, Homo sapiens
atgatgtactttaagaaactagaaaagcaagaacaaagccaaaattagaagaagaaaagaaataataaagatcagagtagaactaaacaaaatagagactaaaaaaaaaaatacaaaagatcagagaaatgaaaaactggtgctttgaaaagatcaataaatcgctagctagactaaccaagaaaaaagaagacatacata

SEQ ID NO: 191228 - DNA, 201 bp, Homo sapiens
atgtgatacatcacatcaacagaatgaaggacaaaaaccatatgatcatctcagctaacacagaaaagttatttgataaaattcaatgtcccttcatggtaaaaactcttgataagttaatcatagaaggatcatacctcaaataatgaacatcatgtctgaaaaacccacatttaacatcttactgaatggggaaaagct

SEQ ID NO: 191229 - DNA, 201 bp, Homo sapiens
tagaagtggttgcctagaggacaaagatggactaacttttaaagtatactgtttggtaatttttcagtattttaaaatcatgtgcatgtaatactattcaragttaatatttttaagttatgttttgcttacaggaattggtaagaaggaaaaaataagagaccataatagttgttacaaacaaatgattactgcaatact

SEQ ID NO: 191230 - DNA, 201 bp, Homo sapiens
tgctttgattgcctgtgctttggggatatttcccaaaaaatctttgctcagaccaatattctagagagtttccccaatgttttcttttagtattttcatartttgagtcttagatttaagtctttaattcattttgatttaatttctgaatatggtggagagatcagggtctagtttcattcttctgcatgtagatatcca

SEQ ID NO: 191231 - DNA, 201 bp, Homo sapiens
aacatagcacataacttttttattttcttattttttatttttttgagactgagtcttgccctgtagcccaggctggagtgcaatggcatgatcttagcacactgcaacctctgcttcccagcttcaagccattcttttgcctcagcctcccaggtagctgggaccacaggcatgcgccaccacgcccagctaatttttttg

SEQ ID NO: 191232 - DNA, 201 bp, Homo sapiens
atatgtaaaaattttaatatctgcaaaatgcaataaagcaaagcacaatttaatggggtattcctgtatttggagttatgcaaccatcaccacaaattcakaacattttcatcacctccgaaagaaatcctatgacctgtagcagtcacccccaagcttcccatgtttcccactcctgagcaaccttactaatctactttt

SEQ ID NO: 191233 - DNA, 201 bp, Homo sapiens
tatttctttaaagttctttatttatagagccgttgatattatgaacaaaacagaataacatggctatttgaataagtgatttcctctcaaaacaaatttawttttccttttacatttgtagctttctgaggtgaaaagtaggagatcccagattttttactgttggaatggaaagttacagaccagagcagcctagagcat

SEQ ID NO: 191234 - DNA, 201 bp, Homo sapiens
aaattctggggggaattcataggacagcacccacaagtggtacttaagtgtttggaacaacaaaaggttttttaaaaaccagaagcaggtaattttgatayacatgttaaatattaaatttctttctacagaaccaaaaacacagaagttgagtaataagaaaggaagtaatactgacactcttagaagagtactgttaac

SEQ ID NO: 191235 - DNA, 201 bp, Homo sapiens
ggcttacttgagcccaagggtttgaggctgcagtgagctgtgattgctccatggcattccagcctaggcaacagaacaagattctgcctccaaaaaaaatwataaataaataaatatgattttgaaactttaatcatactttctattgattttgaaactgtaatcatactttctatatagttggctaagggaggctatagt

SEQ ID NO: 191236 - DNA, 201 bp, Homo sapiens
ttcttaaaagatttatctaatttgacaactccagttatttacctcctactcatttctcagcccactctaaactgaattctgcccctgtcattctacattattagctcttgtaaagattcccagtaaacttatagctaaaaccaatagatgttcctgagtcttatcatatgtcctctaagcagccattttcttgttgacctt

SEQ ID NO: 191237 - DNA, 201 bp, Homo sapiens
aatactgttgaattacaagctatatatattaaaaaatactatatcagtgtgttgtgaacataacactttggggaaaacagttaatagatttagaaatcagaaaaaaataattttgtaagaaatggaaagattccatttttttctgaatctttgaagattacattgttttatttaattcatctttcagacacatgttatatt

SEQ ID NO: 191238 - DNA, 201 bp, Homo sapiens
ctagtaaacaaaaatcaacctctaagacccttttaacctaaaattgttttcagagtcttcatgtcttttcatatgttcatccctttcttttttttttttgtttttttttgtgtgtgtgtgtgttttttgtttttttttgttttgtttgagacatagtctcactctgtcacccaggctggaatgcaatggcacaatctcagc

SEQ ID NO: 191239 - DNA, 201 bp, Homo sapiens
aagacccttttaacctaaaattgttttcagagtcttcatgtcttttcatatgttcatccctttcttttttttttttgtttttttttgtgtgtgtgtgtgtkttttgtttttttttgttttgtttgagacatagtctcactctgtcacccaggctggaatgcaatggcacaatctcagctcactgcaacctccacctcccag

SEQ ID NO: 191240 - DNA, 201 bp, Homo sapiens
gacccttttaacctaaaattgttttcagagtcttcatgtcttttcatatgttcatccctttcttttttttttttgtttttttttgtgtgtgtgtgtgtttkttgtttttttttgttttgtttgagacatagtctcactctgtcacccaggctggaatgcaatggcacaatctcagctcactgcaacctccacctcccaggt

SEQ ID NO: 191241 - DNA, 201 bp, Homo sapiens
agcttctggtaactaccagtctactctatatcttcatgagatccacttttttagctcccacatatgaatgagaacatgtaataatgtctttctgtacttgrcttttttcacttaacatataatgacttccagtttcacttacgttgctgcaaatgacaggatttcattttttttatatggctgaataacattccattgtgt

SEQ ID NO: 191242 - DNA, 201 bp, Homo sapiens
ttactttcaccatttttgcccaaaaacaaacttttgtacttcattaaataacatcaacaaaagtaaaaagctaacatcaacctaggaaaaccattttcacygtaacagttatgtatattaactatattatatacttttaaattagtaaaaaaaagggtaaaagacatgaacaattatcaaaggaaaaaaatcctgaaatat

SEQ ID NO: 191243 - DNA, 201 bp, Homo sapiens
agtattcatactctatagaaagcagtttgaaaatggttttcaaaaattaaaacacagatttatttcgttctagtaattccattataggattttattctctrgaagattttgcatatatgtcaaataaatatctaagaatatttgtggcagcattatttgttactgcaaaagattggaaacatgctaaacatatcagtaggg

SEQ ID NO: 191244 - DNA, 201 bp, Homo sapiens
ggaagattgcctgagcccaggattttgagaccagtctgggcaacatggcaagaccccgtctctttaaaaaaaaaaaaaaatctaagtgaaaaatgattcamgtctaaataggttgggttaaagtaggttttagaggatgttgtcattggtgctggatatttcaaagaaatagtttgaacttacttataaagtaagaaatgg

SEQ ID NO: 191245 - DNA, 201 bp, Homo sapiens
ccccagtgatttaaagtaatttctagtgatacagcacaggatataagagatacagagattgtggtgtatttggtgtgtatatttcattatatatatatatwtttttttattttatttatttatgagacggagtcttgctctgtcacccagaatggagtgcagtggtgcagtctcggctcaccgcaacctccgcctcctggg

SEQ ID NO: 191246 - DNA, 201 bp, Homo sapiens
aaatcacttgaacccgggagcaggagtcagaggttgcagtgactaagatcacgccactgcgctccactccagtctgggcgacacagcaagactccatctcaaaaaaaaaaaaaaaaaagctgaggagaaattatacaccaataaataaaacttgatatttaacttaacattgaaaactatattcagtggtttgtttataag

SEQ ID NO: 191247 - DNA, 201 bp, Homo sapiens
aatccaggattggtgaagtcctttaatagcatactgggttgctggattttaggacataaaaataaaattctgtacaggggaaaaaatcaaacaaagttaaragagaaacagactagtaaaacttatttgtatacttcacaaagggctaagttcctcttaatacaaagaactagaaaataatccagtagaaaaattagcaaa

SEQ ID NO: 191248 - DNA, 201 bp, Homo sapiens
ataattctgaaatgctatataagtttatgtagatgcttatccaattataaatatattctcattgtttatattttataaaattaaatataagaaactaccagaataacctttttttttttttttggtaaattggagttaaatttgcaataagaataattttgaaaattagcgtgtatcaacaactcaggttcaaaagtttct

SEQ ID NO: 191249 - DNA, 201 bp, Homo sapiens
tatctcttcattctgttaagtagggtcaattatgtggtgtcttctttatcttctcttttggggcactgatgaaaagcaaatgcttttgagtcaaagatccwgactgggaaacaatcctttgtagttctcataaaaattaatgacctggtgatatcattacttttcctagctatgatcccactgttgatcattcatacattt

SEQ ID NO: 191250 - DNA, 201 bp, Homo sapiens
gtccttgcttaatgtccatgacaggttcttggaaattgtgactttaagtgaaatcacatataatgaaaccgtttttttctcattgttataataaaatgaarttgaacaaaatgtcatttggagatctgctacaaagtttttcttaaagtttaggtttccaagaacctatcaacaaagttaagtgaaaatttactgtatgtc

SEQ ID NO: 191251 - DNA, 201 bp, Homo sapiens; identical to SEQ ID NO: 32993

SEQ ID NO: 191252 - DNA, 201 bp, Homo sapiens
aatcacttgaacccgggagcaggagtcagaggttgcagtgactaagatcacgccactgcgctccactccagtctgggcgacacagcaagactccatctcaaaaaaaaaaaaaaaaaagctgaggagaaattatacaccaataaataaaacttgatatttaacttaacattgaaaactatattcagtggtttgtttataagc

SEQ ID NO: 191253 - DNA, 201 bp, Homo sapiens
atcacttgaacccgggagcaggagtcagaggttgcagtgactaagatcacgccactgcgctccactccagtctgggcgacacagcaagactccatctcaaaaaaaaaaaaaaaaaagctgaggagaaattatacaccaataaataaaacttgatatttaacttaacattgaaaactatattcagtggtttgtttataagcc

SEQ ID NO: 191254 - DNA, 201 bp, Homo sapiens
aaattcatatcttgggtgaacagagttcaatactgacatgatagtgttccatgattcataatacaattaaagtaaaatttttaattaaaaaaattttaaastaaggattttgtgtggggaaataacctataaattctaacttaggaagttgagtctcaatactcaatgaacacagtgtttgtatagtagtagagacatttg

SEQ ID NO: 191255 - DNA, 201 bp, Homo sapiens
gatagagaattagattctgaatgaaatggggaaatagtaattaccataattatcataataatagcagcaaaggttattaagtttttgcttttgcctaacaccttacaacagtttcaccttacaacagtgaaaccactgtttcacacatacagaaactgaaaactagagagttaaatgatttgcctagggtcacgtagcagc

SEQ ID NO: 191256 - DNA, 201 bp, Homo sapiens
tagagaattagattctgaatgaaatggggaaatagtaattaccataattatcataataatagcagcaaaggttattaagtttttgcttttgcctaacaccttacaacagtttcaccttacaacagtgaaaccactgtttcacacatacagaaactgaaaactagagagttaaatgatttgcctagggtcacgtagcagctt

SEQ ID NO: 191257 - DNA, 201 bp, Homo sapiens
agagataaggaggttctgtttttagtttcattgttctgcatgtggttattcagttttcccagcaccatttgttgaagagactgtttttttccccattgtakgtttttgatgcctttgttgaaaatgagttagctgttaatgtctggatttatatgtaggttctctgttctgtttcattggtctgtatgtctgtttttatgc

SEQ ID NO: 191258 - DNA, 201 bp, Homo sapiens
gaggtaggagaatcgcttgaacctgggaggcggaggttgcagtgagccgcaatcgtgccatcgtactccagcttgggcaacaagagcgaaacactgtctcaaaaaaaaaaaaagtcatacaatcttattctgaaaagcagattatcctcaaatgattatatattcaaatgaccaatatatttaactgtgtttcttctcttc

SEQ ID NO: 191259 - DNA, 201 bp, Homo sapiens
tttgtagagacagggtttcaccatgttgcccaggcttaccttgaactcctgggctcaggcagtccttcagtctcggcctcccaaagtgctgggatacaggygtgagttaccacattagccagaattgttactttaacaatattggttcttctaatccatgagcatggagtatcttttcatttttctgtgtcctctttaatt

SEQ ID NO: 191260 - DNA, 201 bp, Homo sapiens
cacgtgtctgtgaatcatcatcaaagttaatactgttttgtggttttcattcctactggagttctcataaattctccctagtcttgatgaatacaaatgattttttttttggcatcaacaaattttatcacctcactattcatcccctcttccagattgctaataaatgtaggccggaggggatggcttagtggtctaagc

SEQ ID NO: 191261 - DNA, 201 bp, Homo sapiens
gtggcgggtgcctgtagtcccagctacttgggaggctgaggcaggagaatggcgtgaacccgggaggtagaggttgcagtgagccgagattgcgccactgyactccagcctgggcgacagagtgagactccatctcaaaaaaaaaaaagacttttgagcatccccaatcatggcctaaattgtgaaaccatttcttttcct

SEQ ID NO: 191262 - DNA, 201 bp, Homo sapiens
ttttgagtcaaagatcctgactgggaaacaatcctttgtagttctcataaaaattaatgacctggtgatatcattacttttcctagctatgatcccactgktgatcattcatacattttatcagttctgtagttatgaagaattttaaagtattccctatctcagcagtagttgagggcaggaagaatggtgaatatcgtt

SEQ ID NO: 191263 - DNA, 201 bp, Homo sapiens
tgaggcaggagagtcgcttgaacccgggaggcagaggttgcagtgagccgagatcacgccattgcactccagcctgagcgacagagcaagactccgtctcaaaaaaaaaaaaaaaattaatcttacataaatccactgcatgctggttatttcctagtagaaatttccaacacagaaaattctgtcatagttatttatcaa

SEQ ID NO: 191264 - DNA, 201 bp, Homo sapiens
gcactacccaagcctatcctgagtagcatgtgctttataagtatgtttcccttcctcctttccggatcaaaacttgtatttattaccgttaagtttgacamagcattaggaggatggcataattctttaacaacaatttaaaaaactaacaaaagtcaatcttctcctttaaccataagtaaaggccacaattactctttc

SEQ ID NO: 191265 - DNA, 201 bp, Homo sapiens; identical to SEQ ID NO: 32985

SEQ ID NO: 191266 - DNA, 201 bp, Homo sapiens
agcacagcctttggagtcagccagcactgtgtttctgtcttgaataagttgcttaactctctcagctttgttttcctaatctgtaaaatgggtagataatrcacataaaactcttaaactcaggtctggcacatagtgagtacataaatgttaactgtgtgtaaggggcagtgctaggtactaatataaaaataaatatat

SEQ ID NO: 191267 - DNA, 201 bp, Homo sapiens
tcatatatcctgctattgagagactttaatgaatttttcagttcaccaaatgtatttctcagttttgatttctgtttgttttctttgtattatttcactcytcttgttaaatttctctaataaatttctgtattacttttctgtgttgtcttgtaggttatttagtttccattgtgctattgagagtatctaatgaatttt

SEQ ID NO: 191268 - DNA, 201 bp, Homo sapiens
cttgcctctactagagtacccttatctgtcatgtgtgtagatggtagtgagttacttaaaatactaactgtgaagcagcttttttctgcctaagcaaatgraaccatttacctatttcttctgcttctattttatccacagttttgggttgttttcaccactaatcccatctacccaactttattctttctgtaactttca

SEQ ID NO: 191269 - DNA, 201 bp, Homo sapiens
gagctgtagcagtttataaaaatagacagctttttatctgagacgaagttattttcaatacattattttttttaaaaaaagtgtacgtagccaactccctyagttgccacaacagaacaaatagctgactggaataagtcttgcaataacaagatgttgcataaatgagaaagattcagatgaagaaattagaagaactgt

SEQ ID NO: 191270 - DNA, 201 bp, Homo sapiens
actaaaattaagtgagaaaaggaaagcattctcatttttctttctcagcattaaaactgtttaagggcagtatagattagaagggtagataagtggcaacrcaatgacctagggatctttttcaaaataccatacccacacacaccctcacacttcaccttcccctgcccacattatattctcacttgtaccttcactcat

SEQ ID NO: 191271 - DNA, 201 bp, Homo sapiens
ttctaggtaaacttcatctcctaagaaactagactcacaacgctatttgctatgaggaactcttcatctagttctccatatgcattcaagagaatttcatyctgaatgtgaacatgatgtcaacaaattttcagagaatcgtttaggttaaaaattgaactagttttttttccaagaaattaccagattaactgtggatct

SEQ ID NO: 191272 - DNA, 201 bp, Homo sapiens
tcacaaactcctgacctcaagtggtctgcccacctcggcctcccaaaatgctgggactacaggtgtgagccacagcccaggcctcattatatattttaatstatagtctgatattgcctgagatgagcacatactttaagtgtataaacacaaagtaaattactgaatcctagtttcaggggtcttttcaaccctgtatat

SEQ ID NO: 191273 - DNA, 201 bp, Homo sapiens
tattgtctgagaaaactttcttaacattaacagttctttcttgttagtttattttttggtaatgatcactttacctctttttttttttttttaatcttaayatgattcagggtttaaagccaggtacactggtgcacacttatagtcccagcctgggcaacatagcaagattctgtctctaaaaaaataattaaaataaaa

SEQ ID NO: 191274 - DNA, 201 bp, Homo sapiens
gttgtgttaatttttatgtttttatattgcctatctcttaatgggttgctataagtattactgtttttggtagatttgtcttttggacttcataccaaacagagttacaaatggattgtacactacaaattgcagtaatagagtattctggtttgtttgtgtacttaattttaccagtgggttttatacctttacaagctt

SEQ ID NO: 191275 - DNA, 201 bp, Homo sapiens; identical to SEQ ID NO: 32991

SEQ ID NO: 191276 - DNA, 201 bp, Homo sapiens
acttctttggttggattgattcttagatattttctattctttgtagttattgtaagtggggttgctttcttgatttttttttcagattgtttgctgttggygtatataaatgctactgatttttgtatgttgattttgtatcctacaactttactggattcattgatttttttttttttttttgagacggagtctcgccct

SEQ ID NO: 191277 - DNA, 201 bp, Homo sapiens
cttttttacaaagggatttattgcggcactattcacaatagcaaagacttggaaccaacccaaatgtccatcaatgatagactggattaagaaaatgtggcacatatacaccatggaatactatgcagccataaaaaaggatgagttcatgtcctttgcagggacatggatgaagctggaaaccatcattctcagcaaact

SEQ ID NO: 191278 - DNA, 201 bp, Homo sapiens
ttttttacaaagggatttattgcggcactattcacaatagcaaagacttggaaccaacccaaatgtccatcaatgatagactggattaagaaaatgtggcacatatacaccatggaatactatgcagccataaaaaaggatgagttcatgtcctttgcagggacatggatgaagctggaaaccatcattctcagcaaacta

SEQ ID NO: 191279 - DNA, 201 bp, Homo sapiens
tttacaaagggatttattgcggcactattcacaatagcaaagacttggaaccaacccaaatgtccatcaatgatagactggattaagaaaatgtggcacatatacaccatggaatactatgcagccataaaaaaggatgagttcatgtcctttgcagggacatggatgaagctggaaaccatcattctcagcaaactatca

SEQ ID NO: 191280 - DNA, 201 bp, Homo sapiens; identical to SEQ ID NO: 33006

SEQ ID NO: 191281 - DNA, 201 bp, Homo sapiens
gcagtgggccaagatcgcaccactgcactccagcctggtgatagagcaagactctatctcaaaaaaaaaaaaaaaaaaaaaaaaaaaattaatgaccaaartggaatagaaaaagtaggaaagaaaactttacgaggaaactaagatattatagaaggaggatacaaaatgttatgaagattgcttctatacttctgatga

SEQ ID NO: 191282 - DNA, 201 bp, Homo sapiens
aattttttttaataaacccagatttttgtctcctggaagccccagatttatatgaatgaattatgttcccaacattttattgtttcaagcttagaacacaytttttcataaaataatgtcttgtgattagattcctaagccagcctataaaacttttcctaatctctaatattactaatctatataattcctaataccagc

SEQ ID NO: 191283 - DNA, 201 bp, Homo sapiens
agtggagaggaatacatttagtgtgaaatgaataagcattcatttcacaaaatggtctaccatttttgttagtgaggaaatgagtactttgctgtgatgayagaaatttaacaagacagttactcatttataatgtattatcttgttttcttttcatcatgttttcgtttatttggccaaaatctcaggttctagtgtact

SEQ ID NO: 191284 - DNA, 201 bp, Homo sapiens
atataatttgtatatcatacaatttacccatttaaagtatataattcactggctttcagtatattcagagttgtacaacatcatcacagtaagttttatamtattttaattactctaaatggaaatcctgcatcacctagccaccactcttcaacctttcatcactcctatcaccccctccaccagagtccccccaccctc

SEQ ID NO: 191285 - DNA, 201 bp, Homo sapiens
caacctttcatcactcctatcaccccctccaccagagtccccccaccctctacctcttgccttagacaaccgctgatctattttctgtccccatagatttmtatcttaagtcccctgacagctttttaattctctaattttcccaaataaatttgactgtcctcaacatttcacatgaacagaatcgtgcaatatgtaatc

SEQ ID NO: 191286 - DNA, 201 bp, Homo sapiens
ttactggttttcatgcccttgaaatacctaaaattttctaatgtttaattccttagcatactttgcttaaaggctcatatcattactctttccttaagtarcctcacttttagcatgtagatttttggcaggaaaaaaagtactgttttcaagtgtccaaatttttccctgatgttcataatgtggattcttttttaacag

SEQ ID NO: 191287 - DNA, 201 bp, Homo sapiens
atttccacaacaaaagccacattcaatactttataattctataatcattttgtttctttctttgaaaaactgggataacattttctatcttaagtctcctsacagctttttaattctctaattttcccaaataaatttctccaggattatcaaccaacttcttaaacgaaattgtcaaactatacagctgtctgtcctaca

SEQ ID NO: 191288 - DNA, 201 bp, Homo sapiens
aagatgatcagatgttgagttgaaatttggtatttcagtatagattttacccataaattttaggatagtgccatttaagaaatgtttcttgtaataaattrtgaatatttgaaaaactattttggtaatgaggcaaataaacatattactaagtacatgaattcttgtttagatgtttgaaaatgaatttctaatggagtt

SEQ ID NO: 191289 - DNA, 201 bp, Homo sapiens
cctgcgctctctctaaattattgcttttaaacttatcttcaagcatgtctttgtctttctttttattttctttgctgggactcttgaaggcgtgtgctttrgcatctccagagtcctctctcttctcggccagcagcctctgtcctccccactctgcgaggtgtctgttctgtcttcctgcttttgagttttctgcaagtc

SEQ ID NO: 191290 - DNA, 201 bp, Homo sapiens
tagaatcatgagacagtagagtggttgatggtagagtggaccccaccagccctcaaattcattctggtgtactatatcaaaagtggcatcattctctaccmgtaagagggaatactaaactaaaattagccatgtagatgaagaaaattttaaccaaagagttcatggtatgtttctttttggaaaattttaaaatgtagt

SEQ ID NO: 191291 - DNA, 201 bp, Homo sapiens
aatagtttgaaaggaatcttttttctgagcagtagttctcaaaaatgggcttaaaatattcagtcaaccatgctgcaactgttatactgtcatccatgctwttttgatccacttatagaacacaggcagagtagatttagcataattcttaagggccctaggattttcagaatggcaaatgagcattggcttcaacttcaa

SEQ ID NO: 191292 - DNA, 201 bp, Homo sapiens
gaacaaaatttccctctgaagttgttgtatggtcacttatgcactagttgacatcctcctccctggaggtctctgaactcacatagaagtgctctgttagwtttataaacattgcaggaaccatttaggagaaatcctcttccaagaaataaaatgtgatgattttatattgacggccactaatactatggtcactctgtt

SEQ ID NO: 191293 - DNA, 201 bp, Homo sapiens
ctgggaaaaaattttatggctaagacttcaaaagcacaggcaaccaaagcatatagacaaaagggactgtgtaaaagcttctgcacagcaaaggaaacaaycaacagagtaaagagacagcctacagaatgagagaaaatatttgcaaactattcatgaaatgagactaatctccagaatatgtaaggaactcaacaggaa

SEQ ID NO: 191294 - DNA, 201 bp, Homo sapiens
gtttgcgaccagcccaggcaaaatagtgagactctgtctctacaaaaaattaggccgggcacagtggctcacgcctgtaatcccagcactttgggaggccraggggggcagatcacctgaggtcaggagttcaagaccagcctggccaacatggtgaaaccctgtctctactaaaaatacaaaaattagctggacatggtg

SEQ ID NO: 191295 - DNA, 201 bp, Homo sapiens
tcaaaatgttattttggttgggatcagaggtttgaatttcatttttaaattatgaaattctggggggaattcataggacagcacccacaagtggtacttargtgtttggaacaacaaaaggttttttaaaaaccagaagcaggtaattttgatatacatgttaaatattaaatttctttctacagaaccaaaaacacagaa

SEQ ID NO: 191296 - DNA, 201 bp, Homo sapiens
aaaaatcaacctctaagacccttttaacctaaaattgttttcagagtcttcatgtcttttcatatgttcatccctttcttttttttttttgtttttttttktgtgtgtgtgtgttttttgtttttttttgttttgtttgagacatagtctcactctgtcacccaggctggaatgcaatggcacaatctcagctcactgcaa

SEQ ID NO: 191297 - DNA, 201 bp, Homo sapiens
aagctctcctgctaggaagagtaaagacagaaacaaagtaatacagtttcttcacaagagatatgttattttctttttttttttgagacagagtctcgctytgttgcccaggttggagtgcagtggtgcgatctccgctcactgcaagctctgcctcccggattcacgccattctcctgcctcagcctcccgagtagctgg

SEQ ID NO: 191298 - DNA, 201 bp, Homo sapiens
tttgaacctgggaagcagaggttgcagtgagctaacatcatgccactgcaatccagcctggacaacagagtgagaccccatctcaaaaaaaaaaaagaaasaaagaaacaaagtagcttcaaatcaagtactcttaaccatccatctcttcctgtataaaaactctgtaggtaccactgtatcatcccttctccatctggg

SEQ ID NO: 191299 - DNA, 201 bp, Homo sapiens
aacctgggaagcagaggttgcagtgagctaacatcatgccactgcaatccagcctggacaacagagtgagaccccatctcaaaaaaaaaaaagaaagaaasaaacaaagtagcttcaaatcaagtactcttaaccatccatctcttcctgtataaaaactctgtaggtaccactgtatcatcccttctccatctgggcacc

SEQ ID NO: 191300 - DNA, 201 bp, Homo sapiens
gcctatttattcatcattttctccaagtagactataaagttagtggctttatagtcatgaagttagtggctgtgttataagcagcctatggtttagcaccraacattgggtctccacaaattacttgagtagagaaattatgactacatttatgaataaaggaaccaactataccctgcactgtatatacaaagacacatt

SEQ ID NO: 191301 - DNA, 201 bp, Homo sapiens
gaaatgctatataagtttatgtagatgcttatccaattataaatatattctcattgtttatattttataaaattaaatataagaaactaccagaataacctttttttttttttttggtaaattggagttaaatttgcaataagaataattttgaaaattagcgtgtatcaacaactcaggttcaaaagtttctctaataga

SEQ ID NO: 191302 - DNA, 201 bp, Homo sapiens
ctcgactgaattcctccagcagcctcctaaacagattttcctttctgtagttctgttgctagtgtccccacaatgtgtccacagggaactttataaaatgygaatctgtacaggtcattagtacatgcatgtgcgcacacacacaaaaacacagactttctctcacacacacacacactgtttctctctctctcatactct

SEQ ID NO: 191303 - DNA, 201 bp, Homo sapiens
catgtatgaaacactggatcagaaggacccagtatttgatgcaaaaggaatagaaacagtcagaagagattcctgccctgctgtttctaaggtaaggtttmtctatcttgtcttcatctgtaagaaataagtggctaaagtgtctggtgaaaatgtaactacccttaaacatgcatctaggtgaaggaactatagcctata

SEQ ID NO: 191304 - DNA, 201 bp, Homo sapiens
gcatgtgcagtttgctgccattcgtgtggttaaaatatatatttttatatgctatatatgcctatgtattagaataaaattctttattataataaaatccwtatgtgtgtgtgtgtgtgtgtgtgtgtgtgtgtgtgtatatatataggcagctatagaatgtaatgtgcatgggaggatacgggagagtctgatgacagt

SEQ ID NO: 191305 - DNA, 201 bp, Homo sapiens
aaaatatttagtgcctctcttaaatatcggctcaggattcttgcctaggtcccttctcttgtattgggtattggatattttccctgagaaatcttacccarttgttgctcatactggcaaatctgtcttcttctctagctcagatctctttcttaagctccatatctgtatgtgtttcatttaaatatccatttagaaatt

SEQ ID NO: 191306 - DNA, 201 bp, Homo sapiens
tgtgcagtttgctgccattcgtgtggttaaaatatatatttttatatgctatatatgcctatgtattagaataaaattctttattataataaaatccatakgtgtgtgtgtgtgtgtgtgtgtgtgtgtgtgtgtatatatataggcagctatagaatgtaatgtgcatgggaggatacgggagagtctgatgacagtaat

SEQ ID NO: 191307 - DNA, 201 bp, Homo sapiens
atatttttatatgctatatatgcctatgtattagaataaaattctttattataataaaatccatatgtgtgtgtgtgtgtgtgtgtgtgtgtgtgtgtgtrtatatataggcagctatagaatgtaatgtgcatgggaggatacgggagagtctgatgacagtaattgctccagtgtgtagaagtggttgcctagaggaca

SEQ ID NO: 191308 - DNA, 201 bp, Homo sapiens
atttttatatgctatatatgcctatgtattagaataaaattctttattataataaaatccatatgtgtgtgtgtgtgtgtgtgtgtgtgtgtgtgtgtatrtatataggcagctatagaatgtaatgtgcatgggaggatacgggagagtctgatgacagtaattgctccagtgtgtagaagtggttgcctagaggacaaa

SEQ ID NO: 191309 - DNA, 201 bp, Homo sapiens
ttagcctcccaaagtgctgggattacaggcctgagccaccataccagacctgtttatgcatgtttaataaatatttgcaaagtacctacattacttgatgytctgtggaagttgatgggcagacatggtgagcaaagtgtgcatggttcatgccctcagggaacttacaacaagctggggagatagagaatacacaggtaa

SEQ ID NO: 191310 - DNA, 201 bp, Homo sapiens
ttccaaatcttggctgttgtgaataggactgtgataaacatgggagtgcagatatctcttcaactcgacataccaatttcatttcctttggataaataccragtagagagattgctggattatatggtagttctatctttagtttattaaggaaccttcatactgttctccatagtggctgtactaatttacatttctacc

SEQ ID NO: 191311 - DNA, 201 bp, Homo sapiens
gattattgctcctgtctccatattaggctttcctttaggaacctaattatatattaacattctgttctctgttccccatatcttccctcttctcattttcwtgttttcatcctctttatctgcatgctgagacatttccatattcctaacttgacttttagtagaactatttagtagaactgttctgctatttactgcttt

SEQ ID NO: 191312 - DNA, 201 bp, Homo sapiens
gtcttcaggggtaactgcagagttctgactctttggggtataacttaaatgcgccagagtaagagcattaggcagacatttaagaccactatgtatatgtwcgagtatatacttgtaagtatacatctcagaagtatatttgactttgacactaaaatggcttgcttatgcagctctttttcctcacatatttaaaagttg

SEQ ID NO: 191313 - DNA, 201 bp, Homo sapiens
aggcactatttcacaatattttactaccttacactgtcctgtgtgtgatgacctaactcagcatggcatctgtagtaaatgtcggagccaacctcagcatrttgcagtcatcctcaaccaagaaatccgggagttggaacgtcaacaggagcaacttgtaaaggtacagttttgttccatgggcccagaatcacaagcagt

SEQ ID NO: 191314 - DNA, 201 bp, Homo sapiens
taatgatattgaaagacattatcatcaacacttcaacagaaaaattttgagagatacacgtacatatactcatgcacccacaaagagtgcttttctgcctratgagttgtaagggcacataagaaagttgaataggtcgggcacggtggctcacgcctataatcccagtactttgggaggccaaggtgggtggatcacgaa

SEQ ID NO: 191315 - DNA, 201 bp, Homo sapiens
gactcaggcttacttctgaatggatgtttttatagatccataaagctaccagctcctcgcgaagtgaacctgaagggcggaaaggcactatttcacaataytttactaccttacactgtcctgtgtgtgatgacctaactcagcatggcatctgtagtaaatgtcggagccaacctcagcatgttgcagtcatcctcaacc

SEQ ID NO: 191316 - DNA, 201 bp, Homo sapiens
actccaaaagggactttatctaggatatggagttaaatattttggtaattgctctttgaaacaaaacagttgttctaaaatatgttattatagggagattsgtggacggctcctcatggtagaaactcgacttgcaaatgatctggctgagtttgagggagacttttccttggaaggacttcgtctttggaaaacagcatt

SEQ ID NO: 191317 - DNA, 201 bp, Homo sapiens
agaagtcagcatgattctgattgtagttatattatttaccctttaagatctgtaagaagtcaagctacaaaaaataatagactcacagaatgtcagagccrgaagggattttgatattatttaggccagcagttttcatacttggggagagcttagaatgtgcctcaagtgatgcttattaagaacaaatttccctaggat

SEQ ID NO: 191318 - DNA, 201 bp, Homo sapiens
gggaggatcacttgatcctgagagccagtggcacacacatacagtcccagcttctcaggaggctcaggcgggaagaccttttgaggccaggaattcaaggytgcagtgcactgttttattatgcctcaaaggcaagggttgcagtgaactgagattgcaccaccacactccagcctgggtgacagagctagagcctatctc

SEQ ID NO: 191319 - DNA, 201 bp, Homo sapiens
tgaacccaggagttcaaggctgtagtcaaccatgatcatgccactgcactccagcctggatgacagaatgagaccctgtctcaaaaacaagaaacccaaaygtttagtgacatctgtatgagagcaattcacaacagtgtcaccctggcagaatacaagtaagttcttgaaggaggacacaaaaaagtcagtaccatagtt

SEQ ID NO: 191320 - DNA, 201 bp, Homo sapiens
tgttctataactctgaagaaggtaatataaaatcatcattgagatgtaatttatatgtaataaaatgcacacatttaaagtgtattgttcaggccagttgyggtggcttacgcctgtaatcctagcacattgggaggccgaggcgggcacatcacctgacatcaggagttcgagaccagcctggccaacatggtgaaaccc

SEQ ID NO: 191321 - DNA, 201 bp, Homo sapiens
agcagggactttttccaaagaaaccatccaaaatgggatttaaaaatccagtataaaaacacttcagaaatatgagattggtttatatggctagaaaaaaraatcttaaagtcatgtttcaagatatcatccatttccactatttaatgtcttttcactagaaatataagtgaagatgaactttataatctatcttactta

SEQ ID NO: 191322 - DNA, 201 bp, Homo sapiens
agggaagtgaagtgaagtaacagaaagcacttagcttctatcaaagccttatagaaatagaagctgaggcgaagttggctgagtgcagtggctcacgcctrtaatttcagtgctttggaatgccgaggcgggcggatcacctgaggtcaggagttcgagaccagcctggccaatgtggtgaaaccccatctctattaaaaa

SEQ ID NO: 191323 - DNA, 201 bp, Homo sapiens
ggtcaggttgtagaatatactgaaatagaaaaaaagatgcccaatgcattttatcagttatttttgagtatattttgtattggtattttgagtatattttrtattggtgttttttattcatgtaattcaatattattcattaccaagtaacatgatccattatagcatatgaaaagatttacagatatacacaaagtgttt

SEQ ID NO: 191324 - DNA, 201 bp, Homo sapiens
accagcctggccaatgtggtgaaaccccatctctattaaaaatacaaaaaattagccgggcatggtggtgcacacctgtaatcccagctactcgggaggcygaggcatgaaaatcacttgaacccgggagcaggagtcagaggttgcagtgactaagatcacgccactgcgctccactccagtctgggcgacacagcaaga

SEQ ID NO: 191325 - DNA, 201 bp, Homo sapiens
ctgcctccaagtagctgggactacaggtgcttacctctatgcccagttaagttttctattttttgtagagatggggtttcgccctgctgcccaggctggtmttgaattcctgggctcaagtgattctcctgccttggcagggattacaggtgtgagcgaccatgcttgtcccaaatcctttcttaggggccatttccacat

SEQ ID NO: 191326 - DNA, 201 bp, Homo sapiens
aagagtgcttttctgcctaatgagttgtaagggcacataagaaagttgaataggtcgggcacggtggctcacgcctataatcccagtactttgggaggccraggtgggtggatcacgaaatcaggagttcaagactagcctggccaatatggtgaaaccccatctctactaaaaaatacaaaaattctctgggtgtggtgg

SEQ ID NO: 191327 - DNA, 201 bp, Homo sapiens
gatcacgaaatcaggagttcaagactagcctggccaatatggtgaaaccccatctctactaaaaaatacaaaaattctctgggtgtggtggcgtgcgcctrtagtcccagctactcaggaggctgaggcaggagaatcgcttgaacccaggaggcagaggttgcagtgagccaagattgtgccactgcactctagcctggg

SEQ ID NO: 191328 - DNA, 201 bp, Homo sapiens
aaaaaaaaggccaggtgcagtggctcacacctgtaatccctgcactttgggaggccgaggcaggtggatcactaaaaattaaaaaaattagctgggtgtgrtggtgcatgcctataatcccagctactcaggaggctgaggcaggagaatcacttgaacgcaggaattggaggttgcagtgagccaaaatcgcgccactgc

SEQ ID NO: 191329 - DNA, 201 bp, Homo sapiens
ttcttttttttttttgagacggagtcttgctctgtcacccagactggagtgcaatggcgcaatctcagctcactgtaacctctgcctcctgggttcaagcrattctcccacctcagcctcccaagtaactgggactacaggcacacgccacctcccctggctaatttttgtatttttttagtagagacgggattttgccat

SEQ ID NO: 191330 - DNA, 201 bp, Homo sapiens
ccaggagtttgagatcagcctggacaacatagccagaccccatctctacaaaaattaaaaagttaaccaggcatagtggcacacgcctgtagtcccagctrttccagaggctgaagtaggaggaccacttgagcccaggtattcaaggttacagtgaactgtgattgaccggtgcactccagcctggggaacaaagtaaga

SEQ ID NO: 191331 - DNA, 201 bp, Homo sapiens
agtgtcttctaacacttccagaatttgataatagccattattgagatgtgacagtgaccgtgaatatattcttattcacatttgtgtgtgtgtgtgtgtgkgtgtgtgtgtgtgtgtgtgagagatagtaaaccctggtactcttaacccattttttttttctgaagcaatattaatgtctcctctcaaattcatgctcct

SEQ ID NO: 191332 - DNA, 201 bp, Homo sapiens
ggcctacctgtctgcttcattatgtaaacagaattctataaaagtagaaaacttttaacaattttttgagaatgaccaacagcccacaccaggctaaatattatcttacatgctacatttttaaacatcttacaaggatttcttcaaatgagaaaaactaatacagaggttgttttgatctgtactcccaccagcaatagg

SEQ ID NO: 191333 - DNA, 201 bp, Homo sapiens
ttcttcacacttcaagactgtcctgagacatcatctacactgtgaagcctctcccaactacccttagtcatatcagtcctttgtgccaccattgtactttrtatccctgttaaagcagttatcacattaacttgcaagattgtttgtttttaacatgtctgacttgcctcttagagtgtgcgtttcatgagggcagattca

SEQ ID NO: 191334 - DNA, 201 bp, Homo sapiens
acttatttttctgctttaggtacattcctcacaaagcacgtgctgatactttcagtaaaaccttgagggaaccctctgcagatctactcctgtctgtctctgcagttctcttctcccggtattctactaggcaaattctaacaagcatggccttcaactttgtttcctcaactcagggagattgccagcttccacctgggt

SEQ ID NO: 191335 - DNA, 201 bp, Homo sapiens
atctcagtatcaaatactagattctcctaaggctttacaaaaggagattcccactgaagggaatttgtggaagaaaagtagagtccctgtgatttgggagktgtttgtttgtttgtttgtttgtttgtttgttttgagacagagtctcactccgtcgctcatgctggagtgcagtggcgtggtcttggctcactgcaacct

SEQ ID NO: 191336 - DNA, 201 bp, Homo sapiens
ttgtgttaatttttatgtttttatattgcctatctcttaatgggttgctataagtattactgtttttggtagatttgtcttttggacttcataccaaacagagttacaaatggattgtacactacaaattgcagtaatagagtattctggtttgtttgtgtacttaattttaccagtgggttttatacctttacaagcttt

SEQ ID NO: 191337 - DNA, 201 bp, Homo sapiens
tccctaggctccctgcacttctgccctacctgaggctatccaggagcccccagctaccagtcatctcattggtacacatgtaaacacttaacacttaaaakaatccaaacgttttaggagctgtgtaccaggaagagggacaaagaccaaatatatatttcttcttatatcatagtatcataccccctcttgtaaattttt

SEQ ID NO: 191338 - DNA, 201 bp, Homo sapiens
tccccacaatgtgtccacagggaactttataaaatgcgaatctgtacaggtcattagtacatgcatgtgcgcacacacacaaaaacacagactttctctcwcacacacacacactgtttctctctctctcatactctttttctttctctccttctcatactctttttcttttctctccactgcactccttgtttcatccca

SEQ ID NO: 191339 - DNA, 201 bp, Homo sapiens
gggaactttataaaatgcgaatctgtacaggtcattagtacatgcatgtgcgcacacacacaaaaacacagactttctctcacacacacacacactgtttytctctctctcatactctttttctttctctccttctcatactctttttcttttctctccactgcactccttgtttcatcccacctacacttttcctgttcc

SEQ ID NO: 191340 - DNA, 201 bp, Homo sapiens
gattcatagttcagatatcagctcaaatgtcacttcctctggtaagccttcctagattctcacaagtctgagttagatacttgtggatatagccataggaytttgtgcttctgagcacctgtcataccatactgtaattgcctatttattcatcattttctccaagtagactataaagttagtggctttatagtcatgaag

SEQ ID NO: 191341 - DNA, 201 bp, Homo sapiens
aaaaaaaaaaaaaaaattaatcttacataaatccactgcatgctggttatttcctagtagaaatttccaacacagaaaattctgtcatagttatttatcarcatttttataaaaagtcaaaaaggctgattttgatttgactgcctggtgatctttaaacttctctgtgtttcctgtgactgaatcaggaccctttctata

SEQ ID NO: 191342 - DNA, 201 bp, Homo sapiens
ataaaaaaacaatacatgaaatcgtgtctggtttcttgtacctagaggctttgactattaaaaaaaaaaaacttaacgtgttttatgttgcttatcacatracaaatgttaatttgcatgtcattccacatggttttccttaaactacatgatattctatttttagaaatagcaagctctctaaagtctcaaataactttc

SEQ ID NO: 191343 - DNA, 201 bp, Homo sapiens
tgtaagttccatgaaggcaaggacttcattcatttctgtagctccagtgtctggaacagtgcctggcacatagtagctactcaacatttgttgaatgagtraatgaacgaatgaatgaatgcctgagtaaacctgtaattagcatgaaaatagcagctttgctgtgaagctgactcaggcttacttctgaatggatgtttt

SEQ ID NO: 191344 - DNA, 201 bp, Homo sapiens
aaagtgtgcccttcggttaactggaagataactggggcaaagaacaaaacttcactggcctgtgagccatctctgaaactgaaaccctttgataaatataratcaaagaattcactagagcgtatttgatttctcttaaaagacaatccagagtagttgttgccatttggtatggcttttttaaaatcacttgtctacact

SEQ ID NO: 191345 - DNA, 201 bp, Homo sapiens
tttttttctttttatttatttatttttattttattttatttttgaggtagggtctcactttgtcacccagactgaaatgcagtggcatgattacagctcaytgcagcctcaacctcctgggctcaagtgatcctctcagctcagcctcccatgtagctgggactacaggcatatcccaccatgttttactaattatttttt

SEQ ID NO: 191346 - DNA, 201 bp, Homo sapiens
caacagagtgagactccatttcaaaaataataaattaaaaataaaataataaaaattaaaatttaaaattagccaggcatggtggcgggcacccgcaatcmcagctactaaggaggctgaggcaggagaatcgcttgaacctaggaggcagaggttgcagtgaactgagatcatgccactgcactccagcctgggcaacag

SEQ ID NO: 191347 - DNA, 201 bp, Homo sapiens; identical to SEQ ID NO: 32995

SEQ ID NO: 191348 - DNA, 201 bp, Homo sapiens
aattaaaaataaaataataaaaattaaaatttaaaattagccaggcatggtggcgggcacccgcaatcacagctactaaggaggctgaggcaggagaatcrcttgaacctaggaggcagaggttgcagtgaactgagatcatgccactgcactccagcctgggcaacagaatgagactctctctctcatctcaaaaaaaaa

SEQ ID NO: 191349 - DNA, 201 bp, Homo sapiens; identical to SEQ ID NO: 32996

SEQ ID NO: 191350 - DNA, 201 bp, Homo sapiens; identical to SEQ ID NO: 32997

SEQ ID NO: 191351 - DNA, 201 bp, Homo sapiens; identical to SEQ ID NO: 32998

SEQ ID NO: 191352 - DNA, 201 bp, Homo sapiens; identical to SEQ ID NO: 33000

SEQ ID NO: 191353 - DNA, 201 bp, Homo sapiens
agttttaatgaagtaaattatttaacatatttttatatcctgtttgatattgcaatttccttaccaaaacttcttcagggttaaaacaaaaaaaaaaaaawaaaaaaagggcagcaaaaatgggaaaatttaatttagcactcatccttttagagatttttaagagtgtacttgttagtagatcttcagtgttcattttca

SEQ ID NO: 191354 - DNA, 201 bp, Homo sapiens
agtagtcttggaaatatcagacaacttcattcttaaatttaagtgaatacttaaatttaaatgagtacattcttaactttaagtgaatacaaaaaaataartctgacttacttttttggtaggtatggtaaccccttttgatttccatttgctttctacagtgttttaaggacatacatatatattgtaaatcgacttaga

SEQ ID NO: 191355 - DNA, 201 bp, Homo sapiens
agctgcaggagcactggagagagaggtacgtctgtgttgatagagtgactacagatttggatggcacttcaggtcattcagggtaggaaagtgcaatatgytggggatccttctcaaccccacacacccatgtcctcctctaaccctgatggtagttacattaattgtatcagagtccctcttttttcgtggatgtgtttc

SEQ ID NO: 191356 - DNA, 201 bp, Homo sapiens; identical to SEQ ID NO: 33013

SEQ ID NO: 191357 - DNA, 201 bp, Homo sapiens
tccctttctcgtccacaagttgtgctggagtgggagccatgattaaaagaggcttaagtgttttataaataacctataaacaaattataaatacaatcaatttttttccttgcaaccatagcaaacactaaactgttctcagtaagtttgctttaaattatatagtcagcttatcacaatgccattctaaaattcctgatt

SEQ ID NO: 191358 - DNA, 201 bp, Homo sapiens
gttttcattgatagtgggttaatctggcaccttgtctcaaatcagggtaatgacatcaactactaatcattgtgttttctaccactaagtactcacctttaaaaaaaaaaaaaagccggtttcacattagaatatccattaggacatggtaaaaattattttattgaattttgacccttggttatatatctttgtaacatt

SEQ ID NO: 191359 - DNA, 201 bp, Homo sapiens
aaaacagaataacatggctatttgaataagtgatttcctctcaaaacaaatttatttttccttttacatttgtagctttctgaggtgaaaagtaggagatcccagattttttactgttggaatggaaagttacagaccagagcagcctagagcatcttgaatggtgaatcctttctggaaggttttcaatatattttgccc

SEQ ID NO: 191360 - DNA, 201 bp, Homo sapiens
ccagaatctttatcaaataatgatgctatatgcaatgctctaatgtcatgttatattcactaatagttttatttgttttgtctctccagcatgctagtaattttcttatgtggaacaacttatgcatttaaactttttttcagaagagaatgttttgtggtgacaacttgttaaaattacatttttattttaaatacacaa

SEQ ID NO: 191361 - DNA, 201 bp, Homo sapiens
cagaatctttatcaaataatgatgctatatgcaatgctctaatgtcatgttatattcactaatagttttatttgttttgtctctccagcatgctagtaattttcttatgtggaacaacttatgcatttaaactttttttcagaagagaatgttttgtggtgacaacttgttaaaattacatttttattttaaatacacaaa

SEQ ID NO: 191362 - DNA, 201 bp, Homo sapiens
aatctttatcaaataatgatgctatatgcaatgctctaatgtcatgttatattcactaatagttttatttgttttgtctctccagcatgctagtaattttcttatgtggaacaacttatgcatttaaactttttttcagaagagaatgttttgtggtgacaacttgttaaaattacatttttattttaaatacacaaatat

SEQ ID NO: 191363 - DNA, 201 bp, Homo sapiens
tctttgtgaaggttgtattatttcatgtccaggagataatccttttttaaagtatggagacttccaaaagttgaggtttagggagttcattacccactttygagacttactataaagcaacagttatcaagacagcatggtattggcaaaaagataaacacatataccaatggaacagaatagagtccagaaatagaccta

SEQ ID NO: 191364 - DNA, 201 bp, Homo sapiens
agcgctgacattctttgctggtgggaatgcaaaataatatagtcactttggaagacagatagtttctcagaacactaaacatagacttagagtgcgacccrgtgatggcactcctaggtatgtttacctaagtgatttaggtccacccaaacctgtatgcaaatgtttatagcaactttattcataactgccaaaaatgta

SEQ ID NO: 191365 - DNA, 201 bp, Homo sapiens
tattgattacatgttgaaaggataatattttaaatatattggatcagatcaaagtgtttttaaattaacctatttttatttttttaaatgtgactactagraaactttaagttacatgtgactttcattatatttctattggacaatgctagttttatacagtcactttatgtctttgcttttaaagcagaggattagtaa

SEQ ID NO: 191366 - DNA, 201 bp, Homo sapiens
cagcagcattcattcagtttctgttttatacctaggtctatactagcccctgaagcctagataaattaagtgataaattcagtaatacataccatcaaatrcaaacttgaaattagcaaatttttaaaaacttttttaaaaatatgtattaaagcaaatttgatagaccatagcaaaaagacatgttacatttgattattc

SEQ ID NO: 191367 - DNA, 201 bp, Homo sapiens
aaaaaaataccccctaagcacagtaatgcattttgttattaaggaatagaaatgcaaattttgagtgtgaaaatttgatctagtaaacaaaaatcaacctytaagacccttttaacctaaaattgttttcagagtcttcatgtcttttcatatgttcatccctttcttttttttttttgtttttttttgtgtgtgtgtgtg

SEQ ID NO: 191368 - DNA, 201 bp, Homo sapiens
ttccttaccaaaacttcttcagggttaaaacaaaaaaaaaaaaaaaaaaaaagggcagcaaaaatgggaaaatttaatttagcactcatccttttagagakttttaagagtgtacttgttagtagatcttcagtgttcattttcattttgatataattattaattaaattacagagaaagcaaaaactacattacttctta

SEQ ID NO: 191369 - DNA, 201 bp, Homo sapiens
aaaaaatttgcaatgaaaagtaagcttccctcctactttaggctagcaatttctttcccccaaagcaataagtatgtctgcatttttatgtcacttttcaraaattttctatgcatgtgcttccattttttcatgtatagaagtttactgtgtttactggttccatgtatcagtgtattatagtgatctttttatattagg

SEQ ID NO: 191370 - DNA, 201 bp, Homo sapiens
tggggaattcctgtgctgaagatctaatctaagcaagcatgatgactcttttctaaaatgtttgctgaggtaggggtaggagattgtgtataactttgtcmtagatttattattcttacttggattagtcagaagcagccaggcacagtggtgcctgcttatatatagtcccagctacctgggaggctgggcaacaggatt

SEQ ID NO: 191371 - DNA, 201 bp, Homo sapiens
ttttcctaatctgtaaaatgggtagataatgcacataaaactcttaaactcaggtctggcacatagtgagtacataaatgttaactgtgtgtaaggggcartgctaggtactaatataaaaataaatatatctttatttttccatttttaatattgacttcctcaagtgacaaacacgaaaagtaatataaagtgatatta

SEQ ID NO: 191372 - DNA, 201 bp, Homo sapiens; identical to SEQ ID NO: 33012

SEQ ID NO: 191373 - DNA, 201 bp, Homo sapiens
cgagtcttgtcagactggtttgataacaagacagatctatacaggtactgttctataactctgaagaaggtaatataaaatcatcattgagatgtaatttrtatgtaataaaatgcacacatttaaagtgtattgttcaggccagttgtggtggcttacgcctgtaatcctagcacattgggaggccgaggcgggcacatc

SEQ ID NO: 191374 - DNA, 201 bp, Homo sapiens
caaatgtttttagagaggaaaaatggaatcctttggcttttgaacttgaaaacaggtgttttatcagctttaaaagagtctcttacatcctccagactaarcatcctccgggtcaaaaaataaatatatatgtaatatatctgaaaaaatgcctgaaacaactttacaattcttctaaagggacaaaatctgtgaaataaa

SEQ ID NO: 191375 - DNA, 201 bp, Homo sapiens
tgccattgttgcttattgctttgcttcaatagctgtttattaaattaagccattttctcagaaatgtcaaccctatttgtatagagaaaagcacataaatmatatgtttattatctttttctcctaacaagtttgaaggctgctcagcaagtctgtggtataacaatggatcatgaacagatcaccagatattaaaattta

SEQ ID NO: 191376 - DNA, 201 bp, Homo sapiens
cagtaattaaagaaagtgatattttttacactttttaaaaaagcttcagtatttcatgttaacctgtgctaggtttaactgaaaggtttgggattttttarttgttttttggggggtggataatattaaacgtaagactgaatttggccagctgaatctaattagggcaataagttgcattatttcatctctgaattatga

SEQ ID NO: 191377 - DNA, 201 bp, Homo sapiens
aactgtaagaaagttatgagctgggtaacctgttttttaaaaatttggaactgggtacagtggcacacacatatagtcccagctactcaggagactcaggygggaggacattttgaggccaggaattcaaggctgcagtgcactgttttattatgcctgtgaatagcctgagagataaagcaggaccccatctgttaaaat

SEQ ID NO: 191378 - DNA, 201 bp, Homo sapiens
tgaggtgggaggattgcttgagcccaagagttcaagactagcctaagcaacatagtgagcccttgcctctattaatacacaaaattaaaaactaaaaaaawtttttaagtcagaataaacaacagtcattccatatttactagtataccagtagatataaagcacaaccttttttgcaatgatagtgacagttgaaagaca

SEQ ID NO: 191379 - DNA, 201 bp, Homo sapiens
gatttctttctcttactttactttgaacatagaactcctgcagtttccttatggactttgaattcgtagtgacaagcaaaatacctcttaaatagtaatgyttattagatatttgttgactgcttaaatgacaataaatagctcttccccagacagttatacttagaggccttctggatgtcaagtcaatctaggcttttc

SEQ ID NO: 191380 - DNA, 201 bp, Homo sapiens
cactcaacccccagcgagctgctctttattcagcctcatgtggtttcatcctgttcgttttcgggacagccttgagctatcactcataaggaatccagctrtacttctgaccccccccaactcctgccacttgcacagctccctttctctcctgtgctccgtcccacagactcgagctgtgagctgcctaaatgaactctg

SEQ ID NO: 191381 - DNA, 201 bp, Homo sapiens; identical to SEQ ID NO: 33002

SEQ ID NO: 191382 - DNA, 201 bp, Homo sapiens
aattagctgggcgaggtggcggcgcctgtagtcccagctactcggaaggctgaggcatgagaatggcttgaacccaggaagcggaggttgcagtgagccastgcactccagcctgggcaacagagaaagactctgtctgagaaaaaaaaaaattactagatatataaagaagtaggcaaatgtaatctataaaaaggagaa

SEQ ID NO: 191383 - DNA, 201 bp, Homo sapiens
taccatccagtcaagaaatgtttcgttgttattgggtagaataagagaagaccatacttcaaaacgatttcttttgttttcatgcagctcatgaggcaccyacttatgtagctttttcacttttccaatgtgcttcaaatgttgaatgactgtagaatgctctatgttgagttctttggcaacttttcgtgtagttttaag

SEQ ID NO: 191384 - DNA, 201 bp, Homo sapiens
ctgttaaaaggatgtataacataatcacatttatttaagaatgtattacaatcaaacagcaaattccaacaatgcaaaaaccacagttacttttgcaccarcctaatataagttacctttgaggcagtatagtattatttgaaagtggatttagaatagttgcaaatgtatacttcaaactccagggtaaccactaaaaaa

SEQ ID NO: 191385 - DNA, 201 bp, Homo sapiens
tgtttctttctttgaaaaactgggataacattttctatcttaagtctcctgacagctttttaattctctaattttcccaaataaatttctccaggattatyaaccaacttcttaaacgaaattgtcaaactatacagctgtctgtcctacagttttttattatggtgtagctgtatttaaatacaaagagggccaggtgca

SEQ ID NO: 191386 - DNA, 201 bp, Homo sapiens
tgcagtggctcacacctgtaatcccagcagtttaggaggccaaggcaggggatcacttgaggtcaggagttcaagaccaccttggccaacatgatgaaacyccatctctactaaaaatacaaaaattagctgggcatgatggcacaagcctgttatcccagctacttgggaggctgagacaggagaatcacttgaaccctg

SEQ ID NO: 191387 - DNA, 201 bp, Homo sapiens
aactagacctcctctttatttttcttataaatagtccaggattttaaaaattaaatgttaggttttattaattaatgtaaattaaattttataaactgatrataacattttaaattctcaaaggattagatacttttcttaaattgtaggaaataacggagtcttcctttttattgatttttgcgtatttgagatcatgtg

SEQ ID NO: 191388 - DNA, 201 bp, Homo sapiens
ataccagtagatataaagcacaaccttttttgcaatgatagtgacagttgaaagacatttttcatagaatgacttaatttcatatttactaagttaaggtrtttatttgatacaaatacaatatagtgtgacagggtaatataaataatatactagtgagtgagaaaagaacagagtaacttgttatattgtgatcttttc

SEQ ID NO: 191389 - DNA, 201 bp, Homo sapiens
aaatcagaataaataaataaataaatcccaactcgtttctactactagttttattatttattcctttgttcatgtacttaatatgtcctttgtaatgcaaytttaaatagccttttaaatactattcaatcctatatttagtaattcaaattttacagtaaagggagaaggatgattattgctattgtttgcttcttaaca

SEQ ID NO: 191390 - DNA, 201 bp, Homo sapiens
atcaccaatgagtaaaaccttcctagatatatatctacctatttaatttaaattgaacagttttaatatatttcccatcatataattagatacatttttcyttgtataactagtgacaagattgaagttcagcattaactttaatgatattgaaagacattatcatcaacacttcaacagaaaaattttgagagatacacg

SEQ ID NO: 191391 - DNA, 201 bp, Homo sapiens
tattttaaatgttgcatacggccgggcgcggtggctcatgcctgtaatcccagcactttgggcagatcacctgaggtcgggagttcgagaccagcctgacsaacatggagaaaccccgtctctactaaaaatacaaaattagccgggcgtggtcgtgcatgcctgtaatcccagctactcgggaagctgaggcaggagaat

SEQ ID NO: 191392 - DNA, 201 bp, Homo sapiens; identical to SEQ ID NO: 33009

SEQ ID NO: 191393 - DNA, 201 bp, Homo sapiens
ctttgtctcaattaaaaaattttggttacttaaatttttgcatcattatttgcatatctttgagacaacaaaaatttgcctttttttagttttttttttgdtgttgggatctaaaagattcttatatgtaaatacaaatattacagagaaagtgaatatgatagccaaaatgtggattatgaggatacaaatacattaact

SEQ ID NO: 191394 - DNA, 201 bp, Homo sapiens
acatgttgaaaggataatattttaaatatattggatcagatcaaagtgtttttaaattaacctatttttatttttttaaatgtgactactagaaaactttragttacatgtgactttcattatatttctattggacaatgctagttttatacagtcactttatgtctttgcttttaaagcagaggattagtaaccaccttt

SEQ ID NO: 191395 - DNA, 201 bp, Homo sapiens
ttttagtagagatggggttacaccatgttggccaggctggtctcactcctggcctcaagtgatccatcccccatggcctcccaagtgctgggattacaggygtgagccactgcgcccggccgggaattctctaattagtttttctagttagctttcctagctgtgacaatagtattgtgattatgtaggacaatgttctta

SEQ ID NO: 191396 - DNA, 201 bp, Homo sapiens
aatttttgtttttagtagagatggggttacaccatgttggccaggctggtctcactcctggcctcaagtgatccatcccccatggcctcccaagtgctggrattacaggcgtgagccactgcgcccggccgggaattctctaattagtttttctagttagctttcctagctgtgacaatagtattgtgattatgtaggaca

SEQ ID NO: 191397 - DNA, 201 bp, Homo sapiens
ccaacatggcacatgtatacatatgtaacaaacctgcacgttgtgcacaggtaccctagaacttaaagtataattaaaaaaaaaaaatttttttaagtatraacccaaaacaactgtcttaaaatacagtgactcaaaatacatgccccaatgagtaggtactcccaaatctggctaatcactggaatgacctaagaaccc

SEQ ID NO: 191398 - DNA, 201 bp, Homo sapiens
aaccagggaggcggagcttggagtgagccaagatcgcaccactgcactccagcctgggcaacagagccagactccatctcaaaaaaaaaaaaaaaaaagaaaagaaagaaaagaaagaaatacctgagacgggccaggcacggtggctcacacttgtaattctagcacattgggaggcccaggcagggtgatcacctgagg

SEQ ID NO: 191399 - DNA, 201 bp, Homo sapiens
accagggaggcggagcttggagtgagccaagatcgcaccactgcactccagcctgggcaacagagccagactccatctcaaaaaaaaaaaaaaaaaagaaaagaaagaaaagaaagaaatacctgagacgggccaggcacggtggctcacacttgtaattctagcacattgggaggcccaggcagggtgatcacctgaggt

SEQ ID NO: 191400 - DNA, 201 bp, Homo sapiens
cagggaggcggagcttggagtgagccaagatcgcaccactgcactccagcctgggcaacagagccagactccatctcaaaaaaaaaaaaaaaaaagaaaagaaagaaaagaaagaaatacctgagacgggccaggcacggtggctcacacttgtaattctagcacattgggaggcccaggcagggtgatcacctgaggtca

SEQ ID NO: 191401 - DNA, 201 bp, Homo sapiens
ctcagtttccccatctgtaaaattaggataacagtagtactgtacaagcttgtgtgaagtttaagtaagttaaaaaaaaatgctaagagcactgcctgcawtagatattcgctattatgtcatttgagtttgatacttttacctttctgggataaagtggccaacattgagtcgctggtgtatccattagcagtatttaga

SEQ ID NO: 191402 - DNA, 201 bp, Homo sapiens
gcttgaacccaaaagcggaggttgcagtgaactgagattgcgccactgcattccagcctaggggaaagagtgaaactccatctcaaaaaaaaaaaaaaagaaagaaagaaaagaaatacctgagactgggtaattttgtaaagaaaagaggtttaattggcttatggttcttcaggctttacaggaagcatggtgcttgca

SEQ ID NO: 191403 - DNA, 201 bp, Homo sapiens
tcccaaagtgctgggattacaggcgtgagccactgtgcccggtgaaacattttaaattagcaacttataagcaaaagcaactttttttttttttttttagktttctaaaaaaataaaggcagcatcatgtccatctcttagatccttgctggttccaatattctatggttcaaatgttgtagatgttgtaggaaagagtct

SEQ ID NO: 191404 - DNA, 201 bp, Homo sapiens
gtggtagctcacgcctgtaatcccagcactttgggaggctgaggccagtggatcacctgaggctaggagtttgagaccagcctggacaacatggcaaaacyccatctctactaaaaatgcaaaattagccaggcgtggtagcagacgcctgtaatcccagctacttgggaggctgaggcaggagaattgtttgaacccggg

SEQ ID NO: 191405 - DNA, 201 bp, Homo sapiens
ggaggctgaggccagtggatcacctgaggctaggagtttgagaccagcctggacaacatggcaaaaccccatctctactaaaaatgcaaaattagccaggygtggtagcagacgcctgtaatcccagctacttgggaggctgaggcaggagaattgtttgaacccgggaggtcgaggttggggtgagccaagatcacacca

SEQ ID NO: 191406 - DNA, 201 bp, Homo sapiens
tgaggcaggagaatcacttgaacccgggaggcagaggttgcagtgagccgagatcgtcccactgcattccagtctgggagacagagtgagactctgtctcaaaaaaaaaaaaaaaagaaagaaagaaagaaaaagaaaagaaaattgcttcatagagatgggatctcagtgttttgcccaggctagtctcaaaacttctgg

SEQ ID NO: 191407 - DNA, 201 bp, Homo sapiens
gaggcaggagaatcacttgaacccgggaggcagaggttgcagtgagccgagatcgtcccactgcattccagtctgggagacagagtgagactctgtctcaaaaaaaaaaaaaaaagaaagaaagaaagaaaaagaaaagaaaattgcttcatagagatgggatctcagtgttttgcccaggctagtctcaaaacttctggc

SEQ ID NO: 191408 - DNA, 201 bp, Homo sapiens
cttgaacccgggaggcagaggttgcagtgagccgagatcgtcccactgcattccagtctgggagacagagtgagactctgtctcaaaaaaaaaaaaaaaagaaagaaagaaagaaaaagaaaagaaaattgcttcatagagatgggatctcagtgttttgcccaggctagtctcaaaacttctggcctcaagtgatcctcc

SEQ ID NO: 191409 - DNA, 201 bp, Homo sapiens
ttctccttttagtatgttcagccccagtttggctcagatcaatgtattgtcactactttaattgatgcctctgtttcctaacccttcttgctgtctccttstggctaaatgctatgtgttatcctttttgtgaatgttaacaaggactggggataccttgaatacctttactttcctgctggggaagcccatatgcttctg

SEQ ID NO: 191410 - DNA, 201 bp, Homo sapiens
cccagtgggaaggtaattgaatcatgggggcggttacctccatgctgttctcatgatagtgagtgagttctcacaagatctgatggttttataaatggcarttcccctgtacgtgctgtcttgcctgctgctatgtaagacgtgcctttactccttgttcgctttctgccgtgattgtgagtccttcccagccatgtggaa

SEQ ID NO: 191411 - DNA, 201 bp, Homo sapiens
ctataaagcaggagcctgcacacctctgctggtcgaactctatcaatacaccagacctataagcaagagaagattcaaggaaatgttcaggagaaaaataytttttaaaatgtttcacagtttttacctataaggcacttttaaaactctaattctaatttattgttcctttttacttttcatattttaattctgctgtaa

SEQ ID NO: 191412 - DNA, 201 bp, Homo sapiens
ttcccttggattttcccttagcatattctccaatgaggtctctaatttcttgttaaatgatggtcgtttcactttgaaagacatataccaaaggtatacawttcattttattctcttttcacattttaaataattttttctgcaggaagacaaagagaatgcaatgccctacacagcctgtatcttcagcctctcctttgt

SEQ ID NO: 191413 - DNA, 201 bp, Homo sapiens
tctctaatttcttgttaaatgatggtcgtttcactttgaaagacatataccaaaggtatacatttcattttattctcttttcacattttaaataatttttkctgcaggaagacaaagagaatgcaatgccctacacagcctgtatcttcagcctctcctttgtagttttgtccttgtaagtaagacaaaggataggtagga

SEQ ID NO: 191414 - DNA, 201 bp, Homo sapiens
tcactttgaaagacatataccaaaggtatacatttcattttattctcttttcacattttaaataattttttctgcaggaagacaaagagaatgcaatgccytacacagcctgtatcttcagcctctcctttgtagttttgtccttgtaagtaagacaaaggataggtaggagaaataatagctaagtgttgaaaaaaaaat

SEQ ID NO: 191415 - DNA, 201 bp, Homo sapiens
gtcatgcctcagccacaggcgtgcaccaccacgcctggctaatttttgtatttctgtattttgttggctaggctggtctcaaactcctggcctcaagtgawccgcctgccttggcctcccaaagtgcttggatcacaggcatgagccaccgtacctggccaaagagaggattttgaatgttcactacccaaagaaatgctt

SEQ ID NO: 191416 - DNA, 201 bp, Homo sapiens
acttctttaaatgctggaagggcttcgggagagtgatataatccaggaaattcactatgaaagcaacaatattttattattaaacttggacatttcaagtrtttaactgagggaaataacagacaaagaagccatgtgtctctgctggagaaactttattttccaactgaacaataaaaccttacttaccacagactatca

SEQ ID NO: 191417 - DNA, 201 bp, Homo sapiens
acgctcattagcttagtatgtattgtttaatttaaaaaatgaaaattaattttatttttgtataaaacatgctcctgtcggacaatacagaaatatataamgaaaagttaccctagtcttaattactcagagatacctagtgttaatattttggtgtatagcctgcatggccataaaaataggtttatcacatgtgtatat

SEQ ID NO: 191418 - DNA, 201 bp, Homo sapiens
aatgccagagatgtaaatgccctccgccttcttactgccatcccccagcatggcacatttcaagatattaagggatgggagtcaggaggagctgtaattargctgattggaacctattgtgctgctctggagcacagacaccaagcagccttagggaatgagtgcctcaagatcactgggaaatgatgtcctcttttccag

SEQ ID NO: 191419 - DNA, 201 bp, Homo sapiens
gcatgcaacaatagaattgatatgaaatattacagaaagtttagaaaggtcagtcttaccatctatattagtttcctattgctgctgtaacaaatgatcaygaagctagtggctaaaaacaacacacctttatttttattttgttgtttgtttgtttgttttgagacagagtcttgctgtgttgcccaggttggagtgcag

SEQ ID NO: 191420 - DNA, 201 bp, Homo sapiens
cacctggacacaggaaggggaacatcacacaccagggcctgtcgtggggtgggggaagtggggagggatagcattaggaattatacctaatgtaaatgacragttagtggatgcagcacaccaacatggcacatgtatacatatgtaacaaacctgcacgttgtgcacaggtaccctagaacttaaagtataattaaaaaa

SEQ ID NO: 191421 - DNA, 201 bp, Homo sapiens
ggcttgtcagacagtgggtgcagtgcaccgagcgtgagctgaagcagggtgcggcattgccttacccaggaagtgcaaggggtcagggaattccctttccragccaagcgaagctgtgacagatggcaactggaaaatcaggtcactcccaccctaatcctgcacttttccagtggtcttagcaaacggcacactaggaga

SEQ ID NO: 191422 - DNA, 201 bp, Homo sapiens
cttctctttaatattttaaaagaacttttagaacttttgaactacatagttttcagagacatacagtgattttctcaagagggtcttttatgtaagagcarcatgtatcattcaaaaggtgtttaataaatgttaaataataatgcacttaattttaagtactttgtatcctcttctctctttgttaatatctttaattgg

SEQ ID NO: 191423 - DNA, 201 bp, Homo sapiens
gttgagcttccaagggtaactcacattgaggctctttgaaccttcttttttttttttttcttcccctagtagaaagtgtttgcttgccccatgggcctgaraaacaaaagtcctggaatctttctcaaggttgcacttatctatagcaacaggacttcagctctcagccccaagaggtctggcttttaggcctctggattc

SEQ ID NO: 191424 - DNA, 201 bp, Homo sapiens
agtttgcatttgcatttttttgtacctacatcacagccttggctgataccaagactgtggttattaaagattctcaacatttttcatgagtcactgccaamttgcagcttatacttttacaattaatttttgaaacctaaatatacaactatataattatccctgttagattttactggctactatcagtcttttgttcaa

SEQ ID NO: 191425 - DNA, 201 bp, Homo sapiens
aggagttcgagaccagcctggccaacatggtgaaaccgtgtctctgctaaaaatacaaaaattagctgggcatagtggcgcacacctgtaatcccagctayttgggaggctgaggcaggagaatcgcttgaacctggaaggcggaggttgcagtgagccgaaatcataccactgcactccagcctgggcaacagagcgaga

SEQ ID NO: 191426 - DNA, 201 bp, Homo sapiens
ctcaataaataaataaataaataaataaaagcagtgaaaataacctggggcaatatttggtattgtcactgcatgaaaccacaaataccactactgcagtsagtgcctttggttgataattttaataaaaataagttttggttagttaaggatttaagtaaaaatatactagttttgttttgtgactcagtggcggatgag

SEQ ID NO: 191427 - DNA, 201 bp, Homo sapiens
ctgaggcaggagaatcgctggaacctaggaggtagaggttgcagtgagccgagatggcaccattgcactccagcctgggcaacaaagtgagactccgtctyaaagaaaaaaagaaaaaaaaaaagataaaaatagaatggagaattggagaatatggaaaggaagttggagtgattatctaccaggctttactgtaattgg

SEQ ID NO: 191428 - DNA, 201 bp, Homo sapiens
gttagagctgttgttgaagtagatagctacttcctcttagactgccttggtgaaagaagcggggcggtcaaggagaagtggagggaaattagccagtatakacttcattatgataacctccccacctctttaccgctcaggattccttttgttattctcccacccctgtttaaaaaagcgtctttaccaggcactttatat

SEQ ID NO: 191429 - DNA, 201 bp, Homo sapiens
ccattggttgatatgaccctttttcccattgaattgtcttggcacttttttcaaaaattaattgaccataaatgtaaggatttatttctgtactgaaaacyctgttccattgatctctatgcctatcattataccaatactacactacttcaattactgtagctttatcgtaagttcaggtagtagtacaagtcctctaat

SEQ ID NO: 191430 - DNA, 201 bp, Homo sapiens
atcatgccactgcactccagcctgggcaacagagtgacactctgtctcaaaaaaaaaaaaaaaaaaaaaaaaaaaatatatatatatatatatatatatawaaatatatatatagtgaagcttccttcgtccttcttgggtgtgttcttactctcctggatcacttgctctagggaagccagctgccatggcacgtgagtg

SEQ ID NO: 191431 - DNA, 201 bp, Homo sapiens
tacttcctcttagactgccttggtgaaagaagcggggcggtcaaggagaagtggagggaaattagccagtatagacttcattatgataacctccccacctstttaccgctcaggattccttttgttattctcccacccctgtttaaaaaagcgtctttaccaggcactttatatataaaatcatcattatatgattttcca

SEQ ID NO: 191432 - DNA, 201 bp, Homo sapiens
aaattctgtttacttaacagttaatttgtaagagctttacatcctacatatgatttttctatagacatgttactgtatttttctggaaattatatcccttsttccagtaagcaagcctgacacatatttaggccatgtatttttgctcatgtacaatcatgcttttttaaaggtaaactttgcaggacctggaaacagatt

SEQ ID NO: 191433 - DNA, 201 bp, Homo sapiens
actgcagccttgacctcctggacttaatcaatttgcccacctcagcctcctaagtagctgggattacaggtgcgcgccaccatgcctggctgatttttgckgtgttgttgttgttgttgttgttgttgttgttgttgttattgtttgtagagacaggtttctcaccatgttgcccaagctgatctcaaactcttgtgctca

SEQ ID NO: 191434 - DNA, 201 bp, Homo sapiens
cagaagtggcaggagaaattttattctgaagtctgcaaaacacaaactgacctgccagcaaaaactaaccctggttgttatgttaagattttttttttttygagatggagtcttgctctgtcactcaggctggagtgcagtggcatgatctcagcccactgcagtctccgcctcctgggttcaagcgattttcttgtctcc

SEQ ID NO: 191435 - DNA, 201 bp, Homo sapiens
aggcatctaggaggtgatgcctagagtgtttggaacagctggaggccattgtagttctggtttgtgtttttaaaggtcaccctggcagttgggtgaacaayagactgtaacctttgtcaaagtcaaataaaatgtatagagagccaaatatctaaatttaacagtttacttgagaggaaagaattgcaattcagggtgtac

SEQ ID NO: 191436 - DNA, 201 bp, Homo sapiens
tatagtggccaacactttgggaagccaaggcaggagcacttgagctcaggagttcgagaccagcctgggtaatatggcaaaatcctgtctctaaaaaaaayacaaaaattagccagatatgttggtgcacactcatactcccagctactcaggaggctgaggtgggaggattgcttgagcctgagaggcagaggttgcagt

SEQ ID NO: 191437 - DNA, 201 bp, Homo sapiens
cgcccaggctggagtgcaatgacacaatcttggctcactgcaacctccacctcctgggttcaagcgattgtcatgcctcagccacaggcgtgcaccaccaygcctggctaatttttgtatttctgtattttgttggctaggctggtctcaaactcctggcctcaagtgatccgcctgccttggcctcccaaagtgcttgga

SEQ ID NO: 191438 - DNA, 201 bp, Homo sapiens
ttgaggctgcagtgagttgtgatcacgccactgtacaccagcctgggcaacgggagtgagagtgagaccctgtctcaaaaaaaatgaaaaagaaaagaggwttaattggcttatggttctgcaggtatacgagaagcatagtgctgacatctacttctggttaggcttctggtgagcttagaatcatggcacatggcaaag

SEQ ID NO: 191439 - DNA, 201 bp, Homo sapiens
ctaatcctgtcttggtctttgccatgaccagtccccatcctgaagtcaggagttgccagccatcagtcagctcgttaacatacaaaaaggcatcacttggygagtttctgaagattttaggagttgtatgccagaaaactggactatgaccaaatatatatttcagaatatcctagtgtcatttgaaaagtgctgcacttg

SEQ ID NO: 191440 - DNA, 201 bp, Homo sapiens
tacaaagacactaagtagtttataatagcttgcattatatttatctctagtctttcttcttctcttcttcttctccttctccttctccttcttcttcttcttttttttttttttttttttagatataaggtctcactatgttgtccagtctagagtgcagtggctacagcctcgaactcctgggctcaagagatcctccca

SEQ ID NO: 191441 - DNA, 201 bp, Homo sapiens
aatctcggctcactgcaagctccacctcccaggctcacgccattctcctgcctcagcctcccgagtagctgggactacaggtgcctgccaccacgcccagmtaattttttgtatttttagtagagacagggtttcaccatgttagccaggatggtctcgatttcctgacctcgtgatccacccacctcggcctcccaaagt

SEQ ID NO: 191442 - DNA, 201 bp, Homo sapiens; identical to SEQ ID NO: 33080

SEQ ID NO: 191443 - DNA, 201 bp, Homo sapiens
ttcggtggatcacctgaggtcaggagttcaagaccagtctggtcaacatggtgaaaacctgtctctactaaaaatacaaaaattagccaggtgtggtggtrtatgcctgtaatcccagctacttgggaggctgaggcaggagaattgcttgaacccaggaagcaaaggttgcagtgagccgagattgcaccactgcactcc

SEQ ID NO: 191444 - DNA, 201 bp, Homo sapiens
gagtgcaatggcatgatctcagctcaactgcaacctctgcctcctgggttcaagcgattctcctgcttcagcctcctgagtagctgggactacaggctgcrccaccgtgcccagctaattttttgtatttttagtagagatggggtttcaccatgttggctagactggtctcaaattcctcacctcaagtgatccagctgc

SEQ ID NO: 191445 - DNA, 201 bp, Homo sapiens
ttgggactatctcaaaagagaaaccacaattaggattttgaattcagattgagagaaggagagaagggtatcttgacaagatgcagaaggaagtatttctragcagctagagccttattttggcatccagtttaggcagccacctattttatctggctctctggctgtgcttaagaatgtatgtatacttgcaggggctaa

SEQ ID NO: 191446 - DNA, 201 bp, Homo sapiens
cttcctagtctggtttctgatatttccttgtattggcagtattttctggatctgtgcattctttgtgtgaattattcaagaacctccttctgagagtgtgwttgaactccattttaggaataattactgtacagttatactctgaaatcagtggcattttgacctttaggaagacccttttagaaacaaattaaagccaga

SEQ ID NO: 191447 - DNA, 201 bp, Homo sapiens
agtaatttccctcaaggtaacactgctaataaatggtagagttgctgtctaaatccaggcaatctgactgcaaaatcctcatgctttactaaagtagaaarctgacagaccaacaaagaaccatgatacatttttgccaacaattttgcagttatcaatcctggaatttatggtatcttaaacggttattagtttctaaat

SEQ ID NO: 191448 - DNA, 201 bp, Homo sapiens
atatggtaaaaagcagtatctcatatcagtgggagtaaggatggactctaataatggtattggtacaactttgaagccacctggaaaaagagaacattagrtcctttatgttgtatactcagatacattttacatgggtcagagatttaaatataaaaaaatgaaaccagaggagaatttaattataaccttagaattata

SEQ ID NO: 191449 - DNA, 201 bp, Homo sapiens
atgctcataaaaacattatagaaaaatgggcaaagggctgggcacagtgtttcacacctgtaatcccagcactttgggaggccgaggcaggtggatcaccygaggtcaaaagttcaagaccagcctggccaacatgatgaaacctcgtctctactaaaaatataagaaattagctgggcatggtggcgggtgcctgtactc

SEQ ID NO: 191450 - DNA, 201 bp, Homo sapiens
aaaatcaaagctcagaaaaattgatttgcccaaatctcacaatcaaattattagtagaccttggaatagaatctagattctgtggctgctagtattctgctttttttttttttttttttttaacagttccctaatctgttgagcttccaagggtaactcacattgaggctctttgaaccttcttttttttttttttcttcc

SEQ ID NO: 191451 - DNA, 201 bp, Homo sapiens
tagacattgacagggtgggagtgagacaatagacagtaccttcttcttttacgttctttcaatttaaaaaatgcattaaaatgcccataattctgataatyctcttcccctttttctaacttcagcattttctattgctcttggagacttttaatgtgaatggcttggagacttctaatgtaaatggcaaagccctggatg

SEQ ID NO: 191452 - DNA, 201 bp, Homo sapiens
gtggtgccatctcggctcactgcaagctctgcctcctgggttcacgccattctcctgcctcagcctcctgagtagctgggactacaggcgcccaccaccaygcctggctaatttttttttgtatttttaatagagatggggtttcaccgtgttagccaggatggtctcgatctcctgacctcgtgatccgcctgtctcagc

SEQ ID NO: 191453 - DNA, 201 bp, Homo sapiens
atatgaataactaggaagtattgtttcctgtcattttccttcgtagcttggagtgttcatggagcaaaaagcacagactggcggcttgtaaagtatttagrgttctctgattcattttgctcagcttttagagtttgttgaaaaatctaaatttctagcctcttttgaaaattcagaaggcatggtaacaatgaaaaaata

SEQ ID NO: 191454 - DNA, 201 bp, Homo sapiens
aggtgctggcagactctccagatgaaagagtaaagagctccagaaagatgatttgggaattcatctttgtagactgataggcaaatatttttaggtagacaaaaaaaaaaaaatctagtaagataaaaatagagccaggcgtggtggcttacacctgtaatcccagcactttgggaggcagaggtgggtggatcacctaag

SEQ ID NO: 191455 - DNA, 201 bp, Homo sapiens
catgatttcaccattgggtgaagggtacatgggactctgtagtgtttctgcaactttgtgtttgtctgtaattatttcttttttttcttttttttttagayggagtcttgcttcgttgccaggctggagtgcagtggtgcaatcttgactcactgcaacctccacctcctgggttcaagcaattctcctgcctcagcctcc

SEQ ID NO: 191456 - DNA, 201 bp, Homo sapiens
aaatctaaatttctagcctcttttgaaaattcagaaggcatggtaacaatgaaaaaatagcattcccacatggcatcaattgacagtgcttctgtaggtgyggcagaagcattccaggttgccacagctttcattttttgcttgccagatttgttcctattgcttcattcatttatattccttgtctggctctggcttctt

SEQ ID NO: 191457 - DNA, 201 bp, Homo sapiens
acctgtaatcccagcactttgggaggctaaggtgaaaggattgctgaagctcaggagttcaagacctgcctgggcaacacagtgggatcccatctatatawaaaaaaaattaaaaagtagctgggtgtggtggtgtgtgcctgtggtcccagctacttggaaggctgaagagagaggatcacttgagcctgggagttgaga

SEQ ID NO: 191458 - DNA, 201 bp, Homo sapiens
ctagacctggagttatttgttcatttttggttatttaaatcaaaacaggccgggcatggtggctcacacctgtagtcccagcactttgggaggccgaggcrcgtagattgcttcagatcaagagttcgagaccagcctggccaacatgcgaaactttgtactaaaaatacaaagaaaaaaattaaaattagccggtgtggt

SEQ ID NO: 191459 - DNA, 201 bp, Homo sapiens
taaaacatagatgattctttgagtagtaaggctttatttattttcattgattactcttgacagatttggcttttaggattaaatttttgtttaaatactcyttttgcttttgccttcaaaaaactatgctcttgatttcagatttaaatggataggattaatttagtatgcagctattggagacgaattatgacatttagt

SEQ ID NO: 191460 - DNA, 201 bp, Homo sapiens
tccatgcctccaatatggcgtcctccacataggcagtggctgtggtttctaccccgggtggccgggggcagtgctgagctgggactgttgtttgcccagcmtgggctgcagaaagcagcagttaaagttcgtttctggtcactgctccaggaagccaccttactctgagggtcaagaattgccgcttccttttagttactg

SEQ ID NO: 191461 - DNA, 201 bp, Homo sapiens
agggacttgtaatataattagataagacgtttatagtagaatttaaagaaaaaaaaatccatatcaaaataccataatggtatgggtgcaactatgtaacttttttttttttttttagacagtcttgcttgtcacccaggctggagtgcagtggcatgattatggctcactgcagtattgacctcccgggctcaagtgatc

SEQ ID NO: 191462 - DNA, 201 bp, Homo sapiens
gatggagatgaagtggaaagactggattcaagctacatttgtgaagtgaggttggtaattgcagacttgataattgtgagagtgaaagaacagaagaagartaagctgagcaattgagtatgttgagatactagcagaagtatgttgggtgtagagtgtagggggaaattttgtagacctgttgaacgtgaagtatttgca

SEQ ID NO: 191463 - DNA, 201 bp, Homo sapiens
tcaggaggctgaggcaagagaatcgcctgaacccaggaggcagaggttgcagtgagctgagattgtgccactgcactccagcccaggcaatagagtgagaytctgtctcaaataaataaataaatacataaataaaataaataaattatacacacatgcaatagttagtatcttaaaccagagttgtgccttattattagc

SEQ ID NO: 191464 - DNA, 201 bp, Homo sapiens
accacctccacaaaaaagataacttattgtcatgtctaggacctctgagttgtgttcagtcttctaattttgtgacctaattcttacattcttcaacctgygggctaaatggtaaatttatccactaccatcacacttatatgtagtgcagaggaaataatgaggtagaggaaacaccaaaaaaccgtggacacgctatgg

SEQ ID NO: 191465 - DNA, 201 bp, Homo sapiens
ggcaatagagtgagactctgtctcaaataaataaataaatacataaataaaataaataaattatacacacatgcaatagttagtatcttaaaccagagttktgccttattattagccttggtcttttgcaaaacatttgccctctcgacattattcattcctatcatcaagctagtcttttttctccttaactctttcagt

SEQ ID NO: 191466 - DNA, 201 bp, Homo sapiens
tattcctttgtggatcatgaataaaattattaaatgattttaatgataagcatctttatgacatcatataacatgccaccctctcagttagcccaaataatttttttttttttttttttgagacagagtcttgctctgtcacccaggctggagtgcagtggcacaatcttggttcactgcagcctccacctcctgggttca

SEQ ID NO: 191467 - DNA, 201 bp, Homo sapiens
ctcacaactgtaatttgaatagagaaaaggggtgagagaatgcattttcatgatagtcttcccttatttcaaagaattaccagtgcgatggcacacacctrtaatctcaactgctcaggaggctgaggtgggagaatggctcgaggccaggagttgaagggtgcagtgagctatgagcatgccactgcactcctccagcct

SEQ ID NO: 191468 - DNA, 201 bp, Homo sapiens
ctgcagcctccacctcctgggttcaagcgattctcctgcctcagcctcctgagtagcttggattacaggtgtgcaccaccatgcctggctaatttttgtayttttagtagagatggggtttcaccatgttggccaggctgatctcaaactcctgacctcaggtgatccaccggcctcagcctcccaaagtgctgggattac

SEQ ID NO: 191469 - DNA, 201 bp, Homo sapiens
aattattctttctcctttcttagtacgttgtgctcatctttgacttctaaattggtttgtgaaccatttggtattatcaactatcaggaaggcctctaaarggggaaattggtggcttctactcagatatttcacatttatcttattccttatagccttactatcttcaaagcttacttacaaatacactcatttgtaaag

SEQ ID NO: 191470 - DNA, 201 bp, Homo sapiens
attgtgatgttttttaaagactccctaagtctttataggaaatattatccaagagagggaaagacatacaatctgaatgttaaatagaggaaagatttaakccaggcactgtggcttatgcctgtaatctcagcgtttagaaaggccgaggcaggaggatggtttgacaccaggagtttgaaaccagcctcggcaacatag

SEQ ID NO: 191471 - DNA, 201 bp, Homo sapiens
cttcccagctgctctcgtgtcctttatcccatctcctgtaccttgccatcctgactccctggaacctggatccctgggagcagtagccccctgctgcctgmtgagtgacagagctctgcctcccccacaggggtggctggcctccttcctcaggccccacttagcagaattctcacttcctcagcatcacggcaggctttt

SEQ ID NO: 191472 - DNA, 201 bp, Homo sapiens
tgaggcacaagaatcacttgaacccgagaggcagaggttgcagtgagccaagattgcaacactgcactccagcctgagtgagagtgagaccctgtctcccaaaaaaaaaaaaaaaagaattacattacgtgtttcagcagatacatgtaaagaaaatagaaaaaaaaaaaagaattacttcgtccattttgtctcatttaa

SEQ ID NO: 191473 - DNA, 201 bp, Homo sapiens
ccacattggaaattggtttgggcatgcacaccagcttaggtgggcttaggagttctttctgtcctaaagaattctgaaggaactaaaataaaaaaaaaaawtttttttaacctatgatgtgctctgttaattacttccattggagattcctagcttgaacccggaggtggaggttcaaatatgagtggtaaaattgtgata

SEQ ID NO: 191474 - DNA, 201 bp, Homo sapiens
cactgcactccagcctgagtgagagtgagaccctgtctcccaaaaaaaaaaaaaaaagaattacattacgtgtttcagcagatacatgtaaagaaaatagaaaaaaaaaaaagaattacttcgtccattttgtctcatttaattacattttgagagcaggcatgtctgctcataccctgaaatgcaggtttttttggtttt

SEQ ID NO: 191475 - DNA, 201 bp, Homo sapiens
taagcataatagccatacagttttaaattagaaaacagtaaaattgataaacgtggaggacagggcaagaaaaactatactaaacatgcttttatatttgtgtgtgtgtgtgtgtgtgtgtgtgtgtatgtgtgtgtgtgtgttaagggggaatagaatacattttaaatagtcaatatgatttgggaattcatttttcaa

SEQ ID NO: 191476 - DNA, 201 bp, Homo sapiens
gaagcttggggtcaggcgttcaagaccagcctagccaacatggtgaaaccttgtctctactaaaaatacaaaaattagccgggcatggtggcacacacatytgtaatcccagctacttgagaggctgaggcaggagaatcatttgaacccaggagacagaagttgcagtgagccaagatcatgccactgcactccagcttg

SEQ ID NO: 191477 - DNA, 201 bp, Homo sapiens
tcagaatttctttcctttgtattgctgaataatattgcatcttatggatataccacattttgtttatctgttcatctcttgatggaccaaaaccctaaccwtttgactgcactacactccccaacccccagtcagtggctaaataggagagcagagcaaattcattctggttcattctcctcactgacttcttgttcttcc

SEQ ID NO: 191478 - DNA, 201 bp, Homo sapiens
taaggatataggaaataatgggggaggctggtagactattaaagatgagttgaagtttaagtagagacccaaaagtaatgagaaatctagccatgcaaacktctagagagtgtatctgcagaacagcaagtgcagaggcctcctagaggccaagaggcatctaggaggtgatgcctagagtgtttggaacagctggaggcc

SEQ ID NO: 191479 - DNA, 201 bp, Homo sapiens
gcctcctgagtagctgggactataggtgtgcgccaccttgcctggttaatttttgtatttttagtaaagacagggtttcgccatgttggccaggctgctgktcttagactcctggcctcaagtgatctgcccaccttggcctccaaaagtgctgggattacaggtgtgagccgctgcacccagcctcacaactgtaatttg

SEQ ID NO: 191480 - DNA, 201 bp, Homo sapiens
tttgaacatgatatgtctttatattcattcgagttatctttgttcctgcaatagtattttaacattttcttcattcagttttgcgcattcagttttgcgcrtttctaagcttattcccaggttttgttttttgttttttgttttttttggttttctttgagatggagtctggctctgttgtccaggttagagtgcagtggc

SEQ ID NO: 191481 - DNA, 201 bp, Homo sapiens
gtacatagtgatgttttgatacatataatgtatgatgatcagatcagggtaattagcatgtctgtcatttcaaacattcatcacttctttgtgttgggaaygttcttaccctcctagctatttgaaactatgtaatacattattgttaactatagtcatcctacagtgataaagaacactagaacttactcctcccaactg

SEQ ID NO: 191482 - DNA, 201 bp, Homo sapiens
tacttacacgtgtttttatgatggcaagtatcacctttcgtttccatgtttaggactcctttgagcatttcttatactaccagtctagtggcgatgaattsctacagcatttgcttgtctaggaaagactatttctccttcacttatgaaatttattcctgcagggtacaaaatttgtagttgacagtttttttttttctt

SEQ ID NO: 191483 - DNA, 201 bp, Homo sapiens
tctaagcttattcccaggttttgttttttgttttttgttttttttggttttctttgagatggagtctggctctgttgtccaggttagagtgcagtggcgcratctcagctcactgcaacctctgcctccctggttcgagtgatcctcctgcctcagcctcccaagtagctggtactacaggagtacttcaccatgcccggc

SEQ ID NO: 191484 - DNA, 201 bp, Homo sapiens
attaatcctttgccagatggatagagtttgcaaatattttctcccattctgtgggttgtcttttcactttgttgactgtttccttttctttgcaaaagctktttaatttgatgtgatcccatttgtccatttttgctttggttgcctgtgctttttgggacattattcaagtaatctttgcccaggcaagtgtcctggaga

SEQ ID NO: 191485 - DNA, 201 bp, Homo sapiens
atgaggacatgagatttgggaggagccaggggtggaatgatatggtttggctatgtctctacccaaatctcatcttgaactgtagttcccataatccccamatgtgggagggacctggtggggagataattgaatcatggggacagttaccttcatgctattctcgtgatagtgagtgagttctagttctagtttatagtt

SEQ ID NO: 191486 - DNA, 201 bp, Homo sapiens
aggttcagaatatggcatttcagtatgggaagcacatggccatgagtcataaggtactttgcacaccctttatcttttttcagtacttaaatagctaaaaygacacacaagaaaccttttgccatttaataagcttcttttatatttcaaaaatgcttattgtgtggttcaaatctgtcagtcctggatgattgttatgta

SEQ ID NO: 191487 - DNA, 201 bp, Homo sapiens
ggcacacggtacaagctgtcagtggatctaccgttctggggtctggagaatggtggccctcttctcacagctccactaaacggtgccccagtagggacttyttgtggaggctccaaccctacatttcccttctgcagtgccctaccagaggttctccatgagggctccgcccctgcagcaaacttctgcctaggcatccag

SEQ ID NO: 191488 - DNA, 201 bp, Homo sapiens
tctgcctaggcatccaggcatttccatacatcctctgaaatctaggcagacgttcccaaaccccggttcttgacttctatacactcaaaggctcaacaccrtgtggaagctgccaaaacttggggcttgcaccctctgaagccacagctcaagctttatgttggcccctttcagccatggctggagcagctgggatgcagg

SEQ ID NO: 191489 - DNA, 201 bp, Homo sapiens
tatatacgtatatatatgtgtgtgtgtgtgtgtatatatatattacccagtctctggtatatctttattgtgagaacagactaatacactatgatttatamgtttgattgttttatatagtcccatacttgttgaaggctttgtccattcttttttgttttttttgtttgtttgttggtttgttttttttttgagactgag

SEQ ID NO: 191490 - DNA, 201 bp, Homo sapiens
cttggtgattaacatttggctccttgttacatgtgcaaatttctgcagcttgaatttctccccagaaaatgggattttctttttttttttttttcgagacraagtctcgctctgtcgcccaggctggagtgcagtggcgcaatctcggctcactgcaagctccacctcccaggctcacgccattctcctgcctcagcctcc

SEQ ID NO: 191491 - DNA, 201 bp, Homo sapiens
cgcaatctcggctcactgcaacctctgcctcctgagtttaagcaattcccctgcctcagcctcctgagtagctgggattatgggcacccaccaccacagcyggctaattttttgtatttttagtagagatggggtttcatcatgttgaccagactggtctcgaactcctgacctcaggaagtctgcccacctctgcctccc

SEQ ID NO: 191492 - DNA, 201 bp, Homo sapiens
ttagccaggatggtctcgatttcctgacctcgtgatccacccacctcggcctcccaaagtgctgggattacaggtgtgaggaaaatgggattttcttttcrattgcattgtcaggctgcaaattttccaaacttttatgcccagtttcccttttaaaactgaatccctttaacagcacccaagtcatcccttgaatgcttt

SEQ ID NO: 191493 - DNA, 201 bp, Homo sapiens
gaattacttttgttggagtaggacttttttttcttttgagggtgtgtctatgatgatgtttagtagggttgtctagttttgcttttgggtgcattcactgrtatagacactgtataatttccttggttataaaaagccttaatgcagcagctttctcaaatgccagttgtagtagtaatgtaccagtagggagagtaggct

SEQ ID NO: 191494 - DNA, 201 bp, Homo sapiens
ggaaaggaatgaggtattgatacatgctgcaacatgtatgggcctttaaaacattatattataagcagtgcgcggtggcttatgcctgtaatcccagcacyttgggaagccgaggggggcggatcacgaggtcaggagatcgagaccatcctggccaacatggtgaaaccccatctctactaaaaatacagaaatttgccg

SEQ ID NO: 191495 - DNA, 201 bp, Homo sapiens
attacaggtgtgaggaaaatgggattttcttttcgattgcattgtcaggctgcaaattttccaaacttttatgcccagtttcccttttaaaactgaatccstttaacagcacccaagtcatcccttgaatgctttgctgcttataaatttcttctacaagataccctaaatcatctctctctagttcacagttccacaagt

SEQ ID NO: 191496 - DNA, 201 bp, Homo sapiens
cctattaaagaggaataaaggtatgcttatcaagacatatcagaaactataaaagtcagaagataagagaatgacatctttaaagtgttgagaggaaaaamaaagctgtcaacctagattactatatccattgaaaatatcataaatagaggtgaaatacttttttgacaaatcaaagctgaaagaagtcatcacaaacag

SEQ ID NO: 191497 - DNA, 201 bp, Homo sapiens
ccaagactgggaagaaaaagaggtttaatggacttacagttccacatggctggggaggactcacaatcatggtggaaggcaatgaggagcaaggcacatcrtacatggatggtggcaggcaaagaaagagatcttgtacaaggaaactcccgtttttaaaaccatcagatctcgtgagattcattcactatcacaagaact

SEQ ID NO: 191498 - DNA, 201 bp, Homo sapiens
cccaggagtttgataccagcctgggcaacatagggagatcctatctctataaaaataaaaaattaaagaaattagccggatgtggtaatgctcgcctatgrtcccagttacttgagatgctgtcatgggaggatcacttgggcccaggaggtcaaggctgcagtgagccgtgattgcaccactgcattccagcctgggtga

SEQ ID NO: 191499 - DNA, 201 bp, Homo sapiens
aagcataatagccatacagttttaaattagaaaacagtaaaattgataaacgtggaggacagggcaagaaaaactatactaaacatgcttttatatttgtgtgtgtgtgtgtgtgtgtgtgtgtgtatgtgtgtgtgtgtgttaagggggaatagaatacattttaaatagtcaatatgatttgggaattcatttttcaaa

SEQ ID NO: 191500 - DNA, 201 bp, Homo sapiens
agcataatagccatacagttttaaattagaaaacagtaaaattgataaacgtggaggacagggcaagaaaaactatactaaacatgcttttatatttgtgtgtgtgtgtgtgtgtgtgtgtgtgtatgtgtgtgtgtgtgttaagggggaatagaatacattttaaatagtcaatatgatttgggaattcatttttcaaaa

SEQ ID NO: 191501 - DNA, 201 bp, Homo sapiens
gcataatagccatacagttttaaattagaaaacagtaaaattgataaacgtggaggacagggcaagaaaaactatactaaacatgcttttatatttgtgtgtgtgtgtgtgtgtgtgtgtgtgtatgtgtgtgtgtgtgttaagggggaatagaatacattttaaatagtcaatatgatttgggaattcatttttcaaaaa

SEQ ID NO: 191502 - DNA, 201 bp, Homo sapiens
aagtatctgaagtttctttcacttttgtgttaagctcctgtgttccttcttgtataaaagttcacagtatgaatctctacacactattttgttatttccaratggatgaggtatgctaacaaagcctctaatctgccatttttgagggaaaaaaaaagattgctgatataaaaatttcctaggttagtaaattttcagagc

SEQ ID NO: 191503 - DNA, 201 bp, Homo sapiens
attagaaaacagtaaaattgataaacgtggaggacagggcaagaaaaactatactaaacatgcttttatatttgtgtgtgtgtgtgtgtgtgtgtgtgtgtatgtgtgtgtgtgtgttaagggggaatagaatacattttaaatagtcaatatgatttgggaattcatttttcaaaaatagacatgttttggccgggcgcg

SEQ ID NO: 191504 - DNA, 201 bp, Homo sapiens
agatggatgaggtatgctaacaaagcctctaatctgccatttttgagggaaaaaaaaagattgctgatataaaaatttcctaggttagtaaattttcagarcagctaactttgggaatcattatagtattgttaatgttttagttcactaagaaaaaaatataaaatgaactattatctattatcattttttcataaaagg

SEQ ID NO: 191505 - DNA, 201 bp, Homo sapiens
ttagaaaacagtaaaattgataaacgtggaggacagggcaagaaaaactatactaaacatgcttttatatttgtgtgtgtgtgtgtgtgtgtgtgtgtgtatgtgtgtgtgtgtgttaagggggaatagaatacattttaaatagtcaatatgatttgggaattcatttttcaaaaatagacatgttttggccgggcgcgg

SEQ ID NO: 191506 - DNA, 201 bp, Homo sapiens
ttgattcatgttaagtctccaacagttttaccttccaatgcttttgtactattagtgctagtgtcaacacagaagagcaaataatatcttagtattactayattacagtttttatttcatgcttccccctcgaccaccaaaaaaaaaaaaaaatctcaggacccctggggatccacagaccatactttgagaactactaat

SEQ ID NO: 191507 - DNA, 201 bp, Homo sapiens
ttttcacatttatttttatttttgtagagatgagatctcactattttgcccaggctagtctccaaatcctggccttctccctcagcctcccaaagtgctgrgattatagtaatgagccactaaacctggcctgaaactttcactgttgaatcatttgcttatcagctaaacttcataagttctctttatatttattcattt

SEQ ID NO: 191508 - DNA, 201 bp, Homo sapiens
gtgttaagggggaatagaatacattttaaatagtcaatatgatttgggaattcatttttcaaaaatagacatgttttggccgggcgcgggggctcaacctstaatcccagtactttggaagactgaggccggcagatcacctgaggtcgggagtttgagatcagcctggccaacatggtgaaaccccgtctctactaaaaa

SEQ ID NO: 191509 - DNA, 201 bp, Homo sapiens
ttccaatgcttttgtactattagtgctagtgtcaacacagaagagcaaataatatcttagtattactatattacagtttttatttcatgcttccccctcgmccaccaaaaaaaaaaaaaaatctcaggacccctggggatccacagaccatactttgagaactactaatctagaggaagatgcctacacagacaactgaca

SEQ ID NO: 191510 - DNA, 201 bp, Homo sapiens
ccttacctgtttccttcccactccccctttttttcctttggatatcaactcagtcatcacttcctcaaggaagactgactttcctgcaaagttactttctstattccaagctctcatggcactcttgctctttttcccttgtagcatctattaccagtgtagttttacacgtcctcatgattcgttttttattaccagtct

SEQ ID NO: 191511 - DNA, 201 bp, Homo sapiens
ggtgcctcacacctgtaatcacgggccgaggcttaaggccaggagtttgagcctggactgggcaacaaagtgaaaccctgtctctacaaaaaacatttttwaaaaaaaaattagccaggcttagtggtgtgcacctatagtcccagctactcaggaggctgaggcgggaggattgcttgagcccaggagaagttgagtgac

SEQ ID NO: 191512 - DNA, 201 bp, Homo sapiens
gtaaaatgaaaataatagtagcatctacctcgtagggctgttgtgagggtagaagatagatataggtatagatacagatagagcgagagagagagagatcttttttttttttttttcctgagatggagtctcactctgtcgcccaggctggagtgcaatggcaccatctcagctcactgcaacctccacctcccaggttca

SEQ ID NO: 191513 - DNA, 201 bp, Homo sapiens
tatttcatgcttccccctcgaccaccaaaaaaaaaaaaaaatctcaggacccctggggatccacagaccatactttgagaactactaatctagaggaagawgcctacacagacaactgacagtttcacccttgagatttttgaaaatagaagtgagcagaatctaactaaagcttcattccaatctcatcctagctcagtt

SEQ ID NO: 191514 - DNA, 201 bp, Homo sapiens
aaggaaagaagatagagagaaagcaggctccgttgtcttttatctcccttgtctgcgtggcaaaacacaattaactctgctattttaacatcaacttaaaygcaaaacatttgaagagatttcaagttattataagtaacaatttgggttgtttgtttgtttgtttgtttgttgagacagggtctctgttgcccaggctgg

SEQ ID NO: 191515 - DNA, 201 bp, Homo sapiens
aaaaagaagaggaaaaaaagaaagggcaaatcctctgtggcaaataacatcaaccgtagtctctacagttattttatatatagcatttgacacacaatcaratatgagaaaggactttgcttttagccatgaggaaataacaggatctagaattgccatttctctataaacaactgaataactgggcaatgtacctgaaac

SEQ ID NO: 191516 - DNA, 201 bp, Homo sapiens
tttacatgttcaaatctatcttaccatactgtgacctgtaccccgtttctctgccttattcatgaaggactaaacttcaaaaatccaaagttactctatcttttttttttttttttgagacagagtctcgctctgttgccaggttggagtgcagtggcacaatctcaggtcactgcaacttccgcctcctgggttcaagcg

SEQ ID NO: 191517 - DNA, 201 bp, Homo sapiens
caactacttggcatacagtaaaaaaattactagacatgtcaagaggcagagaaacatagctcaaaaatcaaaattaaaaccaattaatagaaacagacctsaaaacagaaataatggaatcagcagacaaacaagaatgttgaaatagctacaataaatatattcaatatattcaagtaattaaaacaaaaatcaacataa

SEQ ID NO: 191518 - DNA, 201 bp, Homo sapiens
gtgctgggatttcaagcgtgagcccccgtgcccagccactctatcctatttctgaagctaccagccaagtggccacatttaaaaaaaaaaagaagaagaaraaaaaaaagaatgtgtgtgtgtgtgttttattatgacttgcttattgtgacccacttatcctggggctgccaccaccattgcctttttttctagagccca

SEQ ID NO: 191519 - DNA, 201 bp, Homo sapiens
agaattgcttgaacctgggaggtggaggttgcagtgagccgagattgtgccactgcatccagcctgggtgtcagagtgaggctgtctcagaaaaaaaaaaggggaggggggggtggttccaagatggccgaataagaacagctccagtctacagctcccagcgtgagcgatgcagaagacgggtgatttctgcatttccaa

SEQ ID NO: 191520 - DNA, 201 bp, Homo sapiens
gtcctcaacttcataatgtttggaactatattggcaatgtgaagagagtaattacttttttcccattacttttatcaatttttttttttacttttaatgtrgtggaaacaatttttgactttatttaaattaatttgtgtataattcctagtttctccccctttgcttaatccaagaccttatttattttgcatcatcttt

SEQ ID NO: 191521 - DNA, 201 bp, Homo sapiens
cttcttgggatgtttatcacttatgctgtactactgctgtgaaacctgcctttaggatttataaaagttttttttttttgagacggagtctcgctttgtcscccaggcgggagtagctgggactacaggtgcccgccaccgcgtccggctaattttgtttttgtatttttagtagatacggggtttcaccgtgttagccag

SEQ ID NO: 191522 - DNA, 201 bp, Homo sapiens
cgagaccatcctggccaacatggtgaaaccccatctctactaaaaatacagaaatttgccgggtgtggtaataggcacccgtagtcccagctacttgggakgctgaggcaggagaatcacttgaacccgggaggcggaggttgcagtgagcctcgatcatgctactgcactccagcgtggggacagagtgagactctgtct

SEQ ID NO: 191523 - DNA, 201 bp, Homo sapiens
cccttttatttttgtacttgtttgacttgcttgagtcttaaaaaaaaaatgagcatgtatcttttttttcaaaatctatgaagcattcaaaaagtgctggygcataagaaacataaagtaaatatttatttaatacatgaatgaaatggattttgtgggcaaactaagggtaataggttcagttataatatgtattgatac

SEQ ID NO: 191524 - DNA, 201 bp, Homo sapiens
attgggagctctttccctttgacataaccccatccttttgttgaacacttccttactttctggtactacaagatactctggtttatcttgtattttcccarcctaatcatagaaatagccatttctccaaggagctatggttttttttgtttgtttgtttttgtttttaattgaatagtggtatttagaaaccaatatctg

SEQ ID NO: 191525 - DNA, 201 bp, Homo sapiens
ccctttgacataaccccatccttttgttgaacacttccttactttctggtactacaagatactctggtttatcttgtattttcccaacctaatcatagaartagccatttctccaaggagctatggttttttttgtttgtttgtttttgtttttaattgaatagtggtatttagaaaccaatatctgggttgtggatatga

SEQ ID NO: 191526 - DNA, 201 bp, Homo sapiens
ctgaaaatcctagaacactaaaaaacttcaaaaagcagactgaagaccttactctttttatagtagattggttgcagaggccttttgtttcactgaaaatrtttaatcacaattttagagtggtttgtggtggtgccaacaactgtgcatgaacagtgttttataagtttcttactatgaaaataagaaaaacaagggctg

SEQ ID NO: 191527 - DNA, 201 bp, Homo sapiens
cactcctttttttcccccatattctcagagatattatgtcatacatttataatagttaggttctttttcacagtctacattccatcctgggaatgccaacytgttggctgattttttaaactttttatacatgaaagttcatgttttatgttgtaaagttctttgggttttgccaaatacccagtgtcatatattcactac

SEQ ID NO: 191528 - DNA, 201 bp, Homo sapiens
aaagaggagagagcaaatgaggaagcctcaaatgtgagattgtcactttttttttttttttttttttttggaaacagagtctcaatccgtctccccatctsgagtgcagtggcgccatcatggctcactgcagcctcagcacccccccaaccctgggctcaaatcattctccgtcgtcagcctcctgagtagctgagacta

SEQ ID NO: 191529 - DNA, 201 bp, Homo sapiens
agtacagtggtatgatctcggctcactgcagcctccgcctcctgggttcaaatgattctcctgccttggcctccttagtagctgggattacaggcgcacaycaccatgcctggctaatttttttttagtagagatgggggttttaccaggttggccaggctggtcttgaacttctggcctcaaatgatctgcctgcctcgg

SEQ ID NO: 191530 - DNA, 201 bp, Homo sapiens
atagcactagtacttgagtcagcagactttttctgtaaaggccaaactgtgaatatttaacactttgtggccatacagcctctcaggcaactctgcaactytgcaactctgcctttatagcacaaaaggagtcatggataatgctcacatgaatggatgtggttattccccaacaaaactttatttatgagaacacagggt

SEQ ID NO: 191531 - DNA, 201 bp, Homo sapiens
gtcttgtttaaacaacacctaatgaatttaatgcttcaattccttggatacagtaagtaaacataagcagcatcttaagaaaatggaacatagctatgaaygaggtttaaaaaaaatctcatttccaaaatgaccaagaggatgagccagttttctgttgccatgaagaaattctattgttagtgagtatttaatagcatt

SEQ ID NO: 191532 - DNA, 201 bp, Homo sapiens
cgtcaacagagctccagtaaattaagagtagatgacagctgagagagctgtaagacacagaccctatttaagaaggagtttctagggaaacccaaagatarcaggggagacaaaaacagggacactagaggaaactgaagcctctgacacctacagctacaacaaactttaaacacaggccaactcctagacagttaaacg

SEQ ID NO: 191533 - DNA, 201 bp, Homo sapiens
aaggacaggaagcataacttccccgggactccttagtatgggttgagcatagtgacttccttccaagagtatgtgtgtggatggttggggagtaactttayggtgaagaaacttgataaacactacctcagccaacatcagcagagctaaatcatggcgattttatgtaccttcggtatgatatgatgaaagtggcacatt

SEQ ID NO: 191534 - DNA, 201 bp, Homo sapiens
ggcttccatatctgccactcggtcttagatgtgtacttgagcctcatcatatacccaaacgcaggctgtggacttaccctcttgggtctcccacaggcatragagcccagtgcatcttaaactaaactaaacatcttttctgacatctctggcctttctgttgctgttgtttaatgactttattttttacagcagttttag

SEQ ID NO: 191535 - DNA, 201 bp, Homo sapiens
tttccctgttgtcctaagcagtaatctagttttggaaatggagcagagggccatgctagaacctctgttgtacttcatctataatccagagtgagaaaaaktaggagatttgactgattgccagaaccgtagcttctgtgctttaaactatgggctctggcagagagaaagtgggagttaattccaatcaggtccttgtag

SEQ ID NO: 191536 - DNA, 201 bp, Homo sapiens
ctagacatgtcaagaggcagagaaacatagctcaaaaatcaaaattaaaaccaattaatagaaacagacctcaaaacagaaataatggaatcagcagacaracaagaatgttgaaatagctacaataaatatattcaatatattcaagtaattaaaacaaaaatcaacataagtagagaaatggaaaatataaagagccaa

SEQ ID NO: 191537 - DNA, 201 bp, Homo sapiens
gaattgcttgaacctgggaggtggaggttgcagtgagccgagattgtgccactgcatccagcctgggtgtcagagtgaggctgtctcagaaaaaaaaaaggggaggggggggtggttccaagatggccgaataagaacagctccagtctacagctcccagcgtgagcgatgcagaagacgggtgatttctgcatttccaac

SEQ ID NO: 191538 - DNA, 201 bp, Homo sapiens
acaaatagtaagatggtagatttaaacccagtctcatcagtaattaaattaactctaagtggtctaaatcttccagataaaaagcaaagattttcaggctrcatatgaaagcaagaaactcttggctgtctataagaaacttgctttgaatataaaaaccaaagagatagaaaaatatgtatcaaacaaatagcaagaaag

SEQ ID NO: 191539 - DNA, 201 bp, Homo sapiens
tgtctccaggatgtgtcagagaccttcttggcagcccctcccatcatagacctagaggcctatgagagaaaaatggtttcctgggccaggtccagcccccmctgctgtatgcagcttctggacttggtgccctgcatctcagcagcttcagcaatggctaaaaggggccaaggtacagctcaggctgttgcttcagagggt

SEQ ID NO: 191540 - DNA, 201 bp, Homo sapiens
acatacatgtatgtatgtgtacatatgtgtgaatatgtgtttatgcacgtgtgtgtgtgtatacatacactgcaaaccagtgttttttgttttttgttttkcaattgcaagatttgatagagtgaaaacagagctcccatacaacgggaagtgacccaaagggggttacccatccggctcaaatgcctaggtttatatccc

SEQ ID NO: 191541 - DNA, 201 bp, Homo sapiens
aattgcttgaacctgggaggtggaggttgcagtgagccgagattgtgccactgcatccagcctgggtgtcagagtgaggctgtctcagaaaaaaaaaaggggaggggggggtggttccaagatggccgaataagaacagctccagtctacagctcccagcgtgagcgatgcagaagacgggtgatttctgcatttccaact

SEQ ID NO: 191542 - DNA, 201 bp, Homo sapiens
atgaataaaaccaaatactgttttttaaaaaatcagtagacccatcaatatcataaatgatattgagaagaataggtagagttatggacagtccccagttyggtataaaggacactgtattggatatgagacaataagagaggaatcaaaacaggctaagtttcaagaaggggagtgccaagcttgaagtctgggtataac

SEQ ID NO: 191543 - DNA, 201 bp, Homo sapiens
ttgcttgaacctgggaggtggaggttgcagtgagccgagattgtgccactgcatccagcctgggtgtcagagtgaggctgtctcagaaaaaaaaaaggggwggggggggtggttccaagatggccgaataagaacagctccagtctacagctcccagcgtgagcgatgcagaagacgggtgatttctgcatttccaactga

SEQ ID NO: 191544 - DNA, 201 bp, Homo sapiens
ctgtgtcctcctctctttccttcggacctccacacatactgtttctctcttcagaacactttttcgtccctgccccagatcccctggctacttccctctcrctcatcctttagatctcacggaagtctctttgacatcccctgaattgtgttagttgcttcttctacatgctgccacaacccttattcatcccctgaaaca

SEQ ID NO: 191545 - DNA, 201 bp, Homo sapiens
tgcttgaacctgggaggtggaggttgcagtgagccgagattgtgccactgcatccagcctgggtgtcagagtgaggctgtctcagaaaaaaaaaaggggakgggggggtggttccaagatggccgaataagaacagctccagtctacagctcccagcgtgagcgatgcagaagacgggtgatttctgcatttccaactgag

SEQ ID NO: 191546 - DNA, 201 bp, Homo sapiens
tctggtaaatttcttcacacatttgtgtgaaatactttcctttctactttgggcatttaaaattttctgttcatcacttctccctccccttattatgtatygttgtgtctctgtagagacctctgtgccacttagttcaggatctatgatttttaaatctactcaaaatgacaccttgttggccgggcacagtggctcaca

SEQ ID NO: 191547 - DNA, 201 bp, Homo sapiens
ctagaataaccagtgtagagaagtccttaaatgacctgatggagctgaaaaccatggcacaagaactacgtgacgaatgcacaagcttcagtagccgactygatcaagtggaagaaagggtatcaagtgattgaagatcaaatgaatgaaatgaagcgagaagagaagtttagagaaaaaagaggaaaaagaaacaaacaa

SEQ ID NO: 191548 - DNA, 201 bp, Homo sapiens
gtagccgacttgatcaagtggaagaaagggtatcaagtgattgaagatcaaatgaatgaaatgaagcgagaagagaagtttagagaaaaaagaggaaaaakaaacaaacaaagcctccgagaaatatgggactatgtgaaaagaccaaatctacgtctgattggtgtacctgaaagtgacagggaaaatggaaccaagttg

SEQ ID NO: 191549 - DNA, 201 bp, Homo sapiens
catactacctgccacagtggcttacttggagtaattaccaaattaatatttgtcaaaaagtgagtgtggtgtggtcttgcaggttgagactgtttggtggyagcccggttttgttagagttaagttggtataacagaaatggcccacagaggaccaggatttggaaggtcagatcaagattgtccagcccttatgagctgc

SEQ ID NO: 191550 - DNA, 201 bp, Homo sapiens
tgaatgaaatgaagcgagaagagaagtttagagaaaaaagaggaaaaagaaacaaacaaagcctccgagaaatatgggactatgtgaaaagaccaaatctrcgtctgattggtgtacctgaaagtgacagggaaaatggaaccaagttggaaaacactctgcaggatattatccaggagaacttccccaacctagcgaggc

SEQ ID NO: 191551 - DNA, 201 bp, Homo sapiens
aagcattctggaaatttcattaaattgtttgttgtcattcctatggcttaattgtcattgttctgggaccattttcagggtgtaaagtcaggcagaaatckggaaacaccaaaactatattgcaaatcaagtctttggtttttaaaggatagtttccctgtttagaatatcagagtaactgtttactaataacagttttag

SEQ ID NO: 191552 - DNA, 201 bp, Homo sapiens
aggccgaggtgggcggatcacttgaggtcagcagttccagaccagcctgtccaacatggtgaaacccggtctgtactaaaaatacaaaaattagctgggcrtggtggcgcatgcctgtaatcccagctactcgggaggctgagacaggagaatcacttgagcccaggaggcagaggttgcagtgagccaagatcgcaccag

SEQ ID NO: 191553 - DNA, 201 bp, Homo sapiens
gagaacgccacaaagatactcctcgagaagagcaactccaagacgcataattgtcagattcaccaaagttgaaatgaaggaaaaaatgttaagggcagccrgagagaaaggtcgggttacccacaaagggaagcccatcagactaacagcggatctctcggcagaaaccctacaagccaggagagagtggggggcaatatt

SEQ ID NO: 191554 - DNA, 201 bp, Homo sapiens
caacttgatgaagaagtcatgaagcagacattgaaagtttttgagcctgatatgatcaaggtctgagctgcgagggaggtaaatctggctatattatatasgatgaaaggaacaaagagatactaaaagcaaggagatcaattaagaagtttttggaaacccattgataagcacaagagaaaagcccaatcagagtgttgg

SEQ ID NO: 191555 - DNA, 201 bp, Homo sapiens
atccaggaattgaactcagctctgcaccaagcggacctaatagacatctacagaactctccaccccagatcaacagaatatacattcttttcagcaccacrccacaccaatccaaaattgaccacatagttggaagtaaagcactcctcagcaaatataaaagaacagaaattataacaaactgtctctcagaccacagtg

SEQ ID NO: 191556 - DNA, 201 bp, Homo sapiens
aaaaatacttacgaatatgagtatacccggtcaacgtaggaaaaaactggggtggagcttttccatcctggatgatttttactatttcataagatgagttaaaaaaaaatttttttcctggaggacattatgttgtgaaataagtcagaacagaaagatacataccacatgtcccacttatatgtgggagctaaggaaaaa

SEQ ID NO: 191557 - DNA, 201 bp, Homo sapiens
gtattactaaatttacagttatccctagctacaatcaagaaaatgtttacaacttcccattctattagtaatagcatagttttattttgtgtacaaaagayagtttattacaatatataatgcatattaaaaactatagatttttctcatgatatgattattaagtttacagaaattcacgtgaatattttggctgatggt

SEQ ID NO: 191558 - DNA, 201 bp, Homo sapiens
ggtttaacttaggttcttgacatggtgagtttgaagtactccatcaaggttgatggccgttgccttgggaacttgctgctggaggaagcaactaaattctrctattagcctgatttccttaatcatggcctttctgagacctgagtcgattttttttcctggtcacactgtgcaatttaaaatttcatgtttcttccagat

SEQ ID NO: 191559 - DNA, 201 bp, Homo sapiens
aagtaaagcactcctcagcaaatataaaagaacagaaattataacaaactgtctctcagaccacagtgcaatcaaactagagctcaggattaagaaactcrcccaaaactgctcaactacatggaagctgaacaacctgctcctgaatgactactgggtacataacgaaatgaaggcagaaataaatatgttctttgaaac

SEQ ID NO: 191560 - DNA, 201 bp, Homo sapiens; identical to SEQ ID NO: 33082

SEQ ID NO: 191561 - DNA, 201 bp, Homo sapiens
tctgaaaactggctagtgtactgtcttttatcataaatggatgttgaattttgtcaaatgctttttctgtatctgttgagatgattgtatgatttttcttyatacaaatttcttcatacaaatgttaaaccaaccttctgttcttagtataactgtacttggtcatggtgtatcattctttttacatattgctggatataa

SEQ ID NO: 191562 - DNA, 201 bp, Homo sapiens
aaaataccacagcacctttgaattgctctttggataaagagcaaacctcttatggtctgttcatcctgggtggtgtagttcctgtctgccaccagtttcayttcatacagtgctctcagcctggcatatgcccctccttgtgctgcaaatataccccccttacctgtttccttcccactccccctttttttcctttggata

SEQ ID NO: 191563 - DNA, 201 bp, Homo sapiens
caactagatgggaagaataagttctagtgtctgtggcattgtagggtgaatatggttaacagtaatttagtgaatattttcaaaaagctagaagagaggattttttttgtttgtttttgtttttgtttttgagacagtgtctccctcagtcgcccaggctggagtgcaatgacacaatcttggctcactgcaacctccacc

SEQ ID NO: 191564 - DNA, 201 bp, Homo sapiens
cagcttcccatgcaggtggctggccatgtgactgagatctagccaatagagtaggagtagaagtgatatttactatttcctggccataaaaatgttgcatytgtaatactccttaagcagatgatctgggaagtgacccattcaagatgaaagttgcctgtgtccctgaatcactcttgaaggaaagtcacctgcccatca

SEQ ID NO: 191565 - DNA, 201 bp, Homo sapiens
aaggttgatggccgttgccttgggaacttgctgctggaggaagcaactaaattctactattagcctgatttccttaatcatggcctttctgagacctgagycgattttttttcctggtcacactgtgcaatttaaaatttcatgtttcttccagattccaagagagcagcatagcaagaaaaacaggttacaaagaaataa

SEQ ID NO: 191566 - DNA, 201 bp, Homo sapiens; identical to SEQ ID NO: 33084

SEQ ID NO: 191567 - DNA, 201 bp, Homo sapiens
ttaccagtctcttccattagaccataagctctgcaagctccatgcctggttttgctcaccattgcatccatgcctagcacaatgcttgatgtatagaaggygtccagtcttattaattgaatgaatgaatgaacaaatgatgtttttgttcattagctaagaaaacccaattctgtagaactttaatgataaagattataa

SEQ ID NO: 191568 - DNA, 201 bp, Homo sapiens
aactagatgggaagaataagttctagtgtctgtggcattgtagggtgaatatggttaacagtaatttagtgaatattttcaaaaagctagaagagaggattttttttgtttgtttttgtttttgtttttgagacagtgtctccctcagtcgcccaggctggagtgcaatgacacaatcttggctcactgcaacctccacct

SEQ ID NO: 191569 - DNA, 201 bp, Homo sapiens
ggccaacgtggtgaaaccccatctctactaaaataaaaaagaaaagaaaagaaaacagtttcaccaatgagaaaactgagactcaggtgaagtaactttcygaggtcccacattaagtagtcaagtagaggaagaaatatgtatattggttataaattgtctgggttcaaatccttgtttcatcacttactagctgtgtga

SEQ ID NO: 191570 - DNA, 201 bp, Homo sapiens
ggttgatggccgttgccttgggaacttgctgctggaggaagcaactaaattctactattagcctgatttccttaatcatggcctttctgagacctgagtcrattttttttcctggtcacactgtgcaatttaaaatttcatgtttcttccagattccaagagagcagcatagcaagaaaaacaggttacaaagaaataaca

SEQ ID NO: 191571 - DNA, 201 bp, Homo sapiens
ccccgtctctactaaaaatacaaaaattagccaggcacagtggcacatgcctgtaatctcagctactcgggaggctgaggcacaagaatcacttgaacccragaggcagaggttgcagtgagccaagattgcaacactgcactccagcctgagtgagagtgagaccctgtctcccaaaaaaaaaaaaaaaagaattacatt

SEQ ID NO: 191572 - DNA, 201 bp, Homo sapiens
gaattggcctgctatagtttgtgtccattagcatcagtctctaaagtaatacttacggcctggctcagtggttcgcccctgtaatcccagcacttagggakgccaggccagaagatcacttgaggccaagagttcaaaagtagcctggtcaatatagcaagaccctgtctctaaaagaaaaaaaaaattaatacttactag

SEQ ID NO: 191573 - DNA, 201 bp, Homo sapiens
actagatgggaagaataagttctagtgtctgtggcattgtagggtgaatatggttaacagtaatttagtgaatattttcaaaaagctagaagagaggattttttttgtttgtttttgtttttgtttttgagacagtgtctccctcagtcgcccaggctggagtgcaatgacacaatcttggctcactgcaacctccacctc

SEQ ID NO: 191574 - DNA, 201 bp, Homo sapiens
taatcccaatactttgggaggccaagatgggcagatcacttgaggtcaggagtttgagaccagcctggccaacatggcaaaatcccgtctctactaaaatrcaagaaaaaaaaattagccaggcatggtggtacctgcctgtaagtcccagctactcgggaggctgaggcaggaaaatcacttcaacccaggagacggagg

SEQ ID NO: 191575 - DNA, 201 bp, Homo sapiens
cagtgtggcaggaagaggttcaggactgctggctgttgaaatatagattccatttattttatatcagcctattttgggcccctgtgagaaagttattttartaatatcttgctctggctggccgcagtgactcatgcctgtaatcccaacgctttgggaggctgaggtgggcggatcacctgaggacaggagtttgagact

SEQ ID NO: 191576 - DNA, 201 bp, Homo sapiens
tgggaagaataagttctagtgtctgtggcattgtagggtgaatatggttaacagtaatttagtgaatattttcaaaaagctagaagagaggattttttttgtttgtttttgtttttgtttttgagacagtgtctccctcagtcgcccaggctggagtgcaatgacacaatcttggctcactgcaacctccacctcctgggt

SEQ ID NO: 191577 - DNA, 201 bp, Homo sapiens
aactcctggcctcaagtgatccacctgccttggcctcccaaagtgctgggattacatacatgagccaccacacctggcctggcctcaagtttttaagtggrgtaaaacatccttaactcttcaattgcattccctacaggattagatacaaattccttaacacagcaacaggcaattcctaacagccctagagtggatgtg

SEQ ID NO: 191578 - DNA, 201 bp, Homo sapiens
ttccctgttgtcctaagcagtaatctagttttggaaatggagcagagggccatgctagaacctctgttgtacttcatctataatccagagtgagaaaaatyaggagatttgactgattgccagaaccgtagcttctgtgctttaaactatgggctctggcagagagaaagtgggagttaattccaatcaggtccttgtaga

SEQ ID NO: 191579 - DNA, 201 bp, Homo sapiens
gtacctttgaggcacttctcgtctattttatagtaatctgcatatttatcttgtccctctgctagatttgttcctttgctcattcattcattcattcaacwaacatttattgaacacctgctgtgtgcaaagctaactataataaatatagaaatataattattactatagctaacacatatagagttttctataagtctg

SEQ ID NO: 191580 - DNA, 201 bp, Homo sapiens
tgcagccttgacctcctggacttaatcaatttgcccacctcagcctcctaagtagctgggattacaggtgcgcgccaccatgcctggctgatttttgctgtgttgttgttgttgttgttgttgttgttgttgttgttattgtttgtagagacaggtttctcaccatgttgcccaagctgatctcaaactcttgtgctcatg

SEQ ID NO: 191581 - DNA, 201 bp, Homo sapiens
gctgtagaaatggtgaccattactaatttggtgccattttcaaacggtaaaaggtgatctgcatgttattgttataaattatgaatattatattgggagcktttatttttatccatagaataaggagttggagatgtaacccaaagccctgatggtgtccagtgacagaattccactttgttcctaaaactgggaggtcag

SEQ ID NO: 191582 - DNA, 201 bp, Homo sapiens
gaaacacttatacttaccaatttatttaaagaatattacaaagaacacagatgagaagatgcataagttaagacaagtgggaaggggcgtggagttttccrtttcctctccagtgtaccaccatatagaaacctccatgtgttcagctccccagaagttctccaaattctgtgtttttatggaacaaatttttgggttttt

SEQ ID NO: 191583 - DNA, 201 bp, Homo sapiens
tctaaggtgtcctagactcgacaatgctttaagacccagctaggtttttcttggtcttggagctgtctgtctgccttcattcttactaattcttactaatsttatagttgtcaattttatattccaccagagtattttcactctgaagtgacctaattcaacatgccaggaagcatttaacatttactttgaaaaatgaac

SEQ ID NO: 191584 - DNA, 201 bp, Homo sapiens
atttttatccatagaataaggagttggagatgtaacccaaagccctgatggtgtccagtgacagaattccactttgttcctaaaactgggaggtcaggcayggttgtaatctatatgctgtctttgcagaacacatggtcatcaaacctaaaattcagacagctttacattttgagataaaataggctcatcacatacaga

SEQ ID NO: 191585 - DNA, 201 bp, Homo sapiens
tttctggtagaagaaaagcaaaattcaaagccaggaataatactgcaaccatttatacaaagttttatgtgcacaatatgtgcaaagctatagatgtagtrtatgttttgttttttaaaaaagctttggagtctatacattttttgttcattaaatgaaaaatgttggtaggttaaatactgctgaattaaaacactgttg

SEQ ID NO: 191586 - DNA, 201 bp, Homo sapiens
aatggcaaaatactaacaattgttgcgattgttgaatctaggtagagaatctatggtcattcatagcactagtacttgagtcagcagactttttctgtaarggccaaactgtgaatatttaacactttgtggccatacagcctctcaggcaactctgcaactctgcaactctgcctttatagcacaaaaggagtcatggat

SEQ ID NO: 191587 - DNA, 201 bp, Homo sapiens
aagttggttgatagtgttgttaaagtcttctatattgttgctgagtttctgtgtagttgtcctattaattattgaaagcagagtattattgaattctccarctatttttcctgaattgcctgtttcttctttcagttttttcagtttttgtttcatttggggtctctattgttaggtatatatacatttaaaacttttata

SEQ ID NO: 191588 - DNA, 201 bp, Homo sapiens
aattaagtaacatggtatttgcttatttcaaacagtctgcctttgttcctgtccaagccatgctggcagggcattgcttttcttttcccttttgttaataygctgtgttagataatggttctgtaaataatagattccaaggacctttgatccaccgttactgtaaaataaaatgcaacttaattttttcagggcataatg

SEQ ID NO: 191589 - DNA, 201 bp, Homo sapiens
cagctctattgtggtgactgtttgcatggcatatcaccttctgaccttttacttttaacctattaccgtctttttctataaagtgtgccttttggagaaascatgtagttaggtcttgctttttaaatccagttaaaagcagggatagccctgctttttaagtgggttgttttgtccattcatatctgatctaattattga

SEQ ID NO: 191590 - DNA, 201 bp, Homo sapiens
tttcagagctctcttcctctgtagtttgtggcagcacgttgcctgttataatgaaataatcctttgttaaattaaccctgtacctgtgtgaaatgtctgargtatgtacttaaaatgcagggtgctgattttataaatttagaaatttattggcatatatctggtgtttaccttcaatatttagaattcaagaaataccac

SEQ ID NO: 191591 - DNA, 201 bp, Homo sapiens
cagcagcgtgaacacttcatgtcagaactatgacatggtcagtgggatctactcatggtaagaagaatttagtcttttgacattgctctctacatcgtgtkttcttttactggacagaggtcagtggaaatcaccattctttgtcattctctgattcaaagatagattaaaatataaggttaaaaatggatttttattgtt

SEQ ID NO: 191592 - DNA, 201 bp, Homo sapiens
cacctgccagaccatggatacaattcgtaattatcagagcagagaactgaactcccgtaccgcggcagaaagcatgagcactatgggagggcaagtgataraatctgctctccagtggggagggggacagatattttggaaaactttgacacagaatgtgatgtatttgtataaccttttcatgtaaaactgtgctgcagt

SEQ ID NO: 191593 - DNA, 201 bp, Homo sapiens
aactgtctctcagaccacagtgcaatcaaactagagctcaggattaagaaactcgcccaaaactgctcaactacatggaagctgaacaacctgctcctgartgactactgggtacataacgaaatgaaggcagaaataaatatgttctttgaaaccaatgagaacaaagacacaacataccagaatatctgggacacattt

SEQ ID NO: 191594 - DNA, 201 bp, Homo sapiens
catttacttttcgaataaagctacatggtatgttaggggtgaatcatgtctaatagccctaaagtttacgtgaatggtgactttgttagcaaacagcaggaaaaaaaaaaaggaaaccaccataatttgctattcactgatctctttacctaagacatcttgtcaagaaaagggaaaaacagcctagatgtgacatatatt

SEQ ID NO: 191595 - DNA, 201 bp, Homo sapiens
attaaaagcctgtatagatgtaacaatcaacaggtagactttgacatatgaaattaaaaccagcctaacaatatgggtgataaagaaattttcctcacaaraagaagcatttctaggaactttgacttatggctaattgaccttgttgatttactttaaaaataaatctattttttttaaattttatttctagtggtcttg

SEQ ID NO: 191596 - DNA, 201 bp, Homo sapiens
aaagggaatatcaccactgatcccacagaaatacaaactaccatcagagaatactataaacacctctatgcaaataaactagaaaatctagaagaaatgcwtaaattcctggacacatacaccctcccaagactaaaccaggaagaagttgaatcactgaatagaccaataacaggctctgaaattgaggcgataattaat

SEQ ID NO: 191597 - DNA, 201 bp, Homo sapiens
gtgaagggcctgaggaattagggcgatatcctggataaattgtggggagttcaagaggcagcagagtggacttggaatctggaagctgactgcaccacctrctagccgcacctcagtatgtacttcacagaatggttttcagaattaaacgagtgagtagaatactgcatggcatagtaagcattctgtaagtgtttgctc

SEQ ID NO: 191598 - DNA, 201 bp, Homo sapiens
ataccaaagcctggtagagagacaacaaaaaaagagaattttagaccaatatccctgatgaacattgatgcaaaaatcctcaataaaatactggcaaaccraatccagcagcacatcaaaaagcttatccaccatgatcaagtgggcttcttccctgggatgcaaggctggttcaacatatgcaaatcaataaacataatc

SEQ ID NO: 191599 - DNA, 201 bp, Homo sapiens
atgcctttttcttgttagcatttaccaatttttcttccagagcttaagttgtaactaggtgttcagtgggacaaaaggttctgggatcaaataagtgtggrcatgccaggttaaacagagttagagagattccttcatttgagaattcttaggagttaggtacggatttatgtatcatgactctgagatattgtttcccag

SEQ ID NO: 191600 - DNA, 201 bp, Homo sapiens
tcatgctaaaaactctcaataaaggccgggcatggtggctcacgcctataatcccagcactttgggaggccgaggcgggcggatcacgaggtcaggagatygagaccatcctggataacacggtgaaaccccgtctctactaaaaatacaaaaaaatagccaggcgtggtggcaggcgcctgtagtcccagctactcagga

SEQ ID NO: 191601 - DNA, 201 bp, Homo sapiens
agtaattttagcaatgaataaggtattacccttgtcaagagtaaaggggagacatttggggatgacagatctcccaaaatctttctttctgggtttggtgtatatatatatatatatatatatatatatatatatttttttttttttttttttgagactaagttttgctcttgttgcccaggctggagtgcaatggcgcga

SEQ ID NO: 191602 - DNA, 201 bp, Homo sapiens
tgaggcaggagaatggcgtgaacccaggaggcggagtttgcagtgagccgagatcacgccactgcactccagcctgggcgacagagtgagactccatctcaaaaaaaaaaaaaaaaaaaactctcaataaattaggtattgatgggacatatctcaaaataataagagctatttatgacaaacccacagccaatatcatac

SEQ ID NO: 191603 - DNA, 201 bp, Homo sapiens
gtaattttagcaatgaataaggtattacccttgtcaagagtaaaggggagacatttggggatgacagatctcccaaaatctttctttctgggtttggtgtatatatatatatatatatatatatatatatatatttttttttttttttttttgagactaagttttgctcttgttgcccaggctggagtgcaatggcgcgat

SEQ ID NO: 191604 - DNA, 201 bp, Homo sapiens
tcaagagtaaaggggagacatttggggatgacagatctcccaaaatctttctttctgggtttggtgtatatatatatatatatatatatatatatatatatttttttttttttttttttgagactaagttttgctcttgttgcccaggctggagtgcaatggcgcgatcttggctcactgcaacctccgcctcccgatttc

SEQ ID NO: 191605 - DNA, 201 bp, Homo sapiens
gaggcaggagaatggcgtgaacccaggaggcggagtttgcagtgagccgagatcacgccactgcactccagcctgggcgacagagtgagactccatctcaaaaaaaaaaaaaaaaaaaactctcaataaattaggtattgatgggacatatctcaaaataataagagctatttatgacaaacccacagccaatatcatact

SEQ ID NO: 191606 - DNA, 201 bp, Homo sapiens
aaattaggtattgatgggacatatctcaaaataataagagctatttatgacaaacccacagccaatatcatactgaatgggcaaaactggaagcattccckttggaaactggcacaagacagggatgccctctctcaccactcctattcaacatagtgttggaagttctggccagggcaatcaggcaggagaaagaaataa

SEQ ID NO: 191607 - DNA, 201 bp, Homo sapiens
ggcattggtacagtactgccaactaaactacaaaccttatttggctttcactcgtttttacatgcattcgtttgtgtgtgtgtgtgtgtgtgtgtgtgtgttttctgtgaaattttatcacgtatatagatttttgtaactaccatcatcaagatataggactgttccatcgctatgaagaaaattcctggtgttgcactt

SEQ ID NO: 191608 - DNA, 201 bp, Homo sapiens
cggcattactaagagtgaaacagcctgacattttgtgcctcctgaattgatggagtatgtaatatttccacataaagtatttttgccaaaaatgtttaacytaaatcttagcagccttctccagacccaactttcagtttacaagcaaaacagaaacaagttaaatgacgcaatgaagaaagaagaaaaagggattttata

SEQ ID NO: 191609 - DNA, 201 bp, Homo sapiens
aatttatagattcaatgccatccccatcaagctaccaatgactttcttcacagaattggaaaaaactactttaaagttcatatggaaccaaaaaagagccygcattgccaagacaatcctaagccaaaagaacaaagctggaggcatcatgctacctgatttcaaactatactacaaggctaaagtaaccaaaacagcatg

SEQ ID NO: 191610 - DNA, 201 bp, Homo sapiens
cagcgtacctcattccctgatccaagaggataacaggatgttttttgtgttttgtattaactctgctatagaggttttctgtatgaagatttttttttttytttaagagacagggatcttgctatgtttcacaggctggattcaaactcctgggctcaaacagttctcctgcctcagccttctgagtacctgggactatag

SEQ ID NO: 191611 - DNA, 201 bp, Homo sapiens
ttgattaattctggttttggggaaaaaagctataaaagatattcttggaacagttgaagaagtttgaatataggtttgtgttagatgatatggcattattrtgagttcattaattttgattgtggtcatggggtgatgtatgagatgctgtatatgtataagatacatgctgaagcatgtgacattaagagtcgtgacatc

SEQ ID NO: 191612 - DNA, 201 bp, Homo sapiens
acaaaaattaattcaagatggattaaagatttaaatgttagacctaaaaccataaaaaccctagaagaaaacctaggcaatgccattcaggacataggcaygggcaaggacttcatgtctaaaacaccaaaagcaatggcaacaaaagccaaaattgacaaatgggatctaattaaactaaagagcttctgcacagcaaaa

SEQ ID NO: 191613 - DNA, 201 bp, Homo sapiens
taattggtgaaacttgaattggatctgaaaattagatggtagtaatgtattcccgttagtgattttgatggttgtattgtggttattaggggaatgttcttttgtttgtttgtttgtttgtttgtttgtttttgaggctgagtttcactcttgtcacccaggctggagtgcaatggcacgatctcggctcactacaacctc

SEQ ID NO: 191614 - DNA, 201 bp, Homo sapiens
tagaagattatctgcttccttactgccaccacccccagcttcttgtcatagagtatttggagcttccctgaaggattggtgctgttttatcagtataaggkccaacatgtgacaagatgtgtgtgtgtgtgtgtgaatcatctccattggcaaagaattgacaatatgaaaaagctcgttctacatatataacatccataa

SEQ ID NO: 191615 - DNA, 201 bp, Homo sapiens
tggtgctggacctctgagccttttttcttatcctctctcctgtgattagcactgtcatcccaccagtcaaccatgtgagaaacttaccatgtgagaaaccrcttctactccccacctcttgttccatgaccaagtcataccagttttatagcctacattttcttgactccaactcctcctcttggtctctcttccattcct

SEQ ID NO: 191616 - DNA, 201 bp, Homo sapiens
agtggatgcagcacaccaacatggcacatgtatacatatgtaacaaacctgcacgttgtgcacaggtaccctagaacttaaagtataattaaaaaaaaaawatttttttaagtataaacccaaaacaactgtcttaaaatacagtgactcaaaatacatgccccaatgagtaggtactcccaaatctggctaatcactgga

SEQ ID NO: 191617 - DNA, 201 bp, Homo sapiens
aattggtgaaacttgaattggatctgaaaattagatggtagtaatgtattcccgttagtgattttgatggttgtattgtggttattaggggaatgttcttttgtttgtttgtttgtttgtttgtttgtttttgaggctgagtttcactcttgtcacccaggctggagtgcaatggcacgatctcggctcactacaacctcc

SEQ ID NO: 191618 - DNA, 201 bp, Homo sapiens
aattacttaaggattacttaagcctgggagatcaaggctgcagtgagccatgattgcaccactgcactccaccctgagtgacagagcaagaccctgtctcaaaaaaaaaaaaaaaaaaagctggttgtggtggcattttgggagcccaaggcaggtggatcacaaagtcaggagatcaagaccatcctggccaacatgatg

SEQ ID NO: 191619 - DNA, 201 bp, Homo sapiens
tcaaatccttgtttcatcacttactagctgtgtgaccccagacaagttagataacctctctgtgcctcatgtctattaagtggattaaataagttaatacrtcgagaacccttagaacagtgcctcatacatagaatatgcttccaaatgtggtttattattgccattccagaccccagtcatgctgcttcatggccttta

SEQ ID NO: 191620 - DNA, 201 bp, Homo sapiens
cctgtaatcctagctactcgggaggctgaggcaggagaattgcttgaaccccagtggcacaggttgcagtgagccaaggtcatgtctttgcattccagccyggacaacagagcaagactctgtctaaaaaaataaaaagaaaaaaaatatatgtctgggtatagtggccaacactttgggaagccaaggcaggagcacttg

SEQ ID NO: 191621 - DNA, 201 bp, Homo sapiens
attggtgaaacttgaattggatctgaaaattagatggtagtaatgtattcccgttagtgattttgatggttgtattgtggttattaggggaatgttcttttgtttgtttgtttgtttgtttgtttgtttttgaggctgagtttcactcttgtcacccaggctggagtgcaatggcacgatctcggctcactacaacctcct

SEQ ID NO: 191622 - DNA, 201 bp, Homo sapiens
cctatctctactaaaaatacaaaaattagctgggcgtggtggtgtgcacctgttgtctcagctactcaggaggctgaggcaggagaatcacttgaacccargaggcggaggttgcagtgaactgagatcacaacactgtactccaacctgggcaacagaatgagacttcatttcaaaaaaaaaaaaaaaagtttatttttg

SEQ ID NO: 191623 - DNA, 201 bp, Homo sapiens
ttggtgaaacttgaattggatctgaaaattagatggtagtaatgtattcccgttagtgattttgatggttgtattgtggttattaggggaatgttcttttgtttgtttgtttgtttgtttgtttgtttttgaggctgagtttcactcttgtcacccaggctggagtgcaatggcacgatctcggctcactacaacctcctc

SEQ ID NO: 191624 - DNA, 201 bp, Homo sapiens
tacagagtcgtgcaactatcattactatctaattttagaacttttttattacctaaaaaataaaccttaagcccatatagagtcattacctacttgaacttttttttttttttttttttttttgagatagagtctcactgtcacccaggctggagtgcagtggcgtgatctcggctcactgcaacctccacctcccgagtt

SEQ ID NO: 191625 - DNA, 201 bp, Homo sapiens
aaaaatgcatagcatttgttccatggttgtaaatgcatagcatttgctatatgtttataaacatatgttaaaaacatatagcaaaaatctgaaagaaaatrtgctaagctataaaagagataacttctggggaaggaagtagagtggaaggatgatgaacctagtggggacccagaggagacactgtatctctgtccaaag

SEQ ID NO: 191626 - DNA, 201 bp, Homo sapiens
taaaaaatagctaggtatggtggtgcacacctatagtcctggctactcaggagcctgaggtagaggatcacctgaccccaggaagttgaggctgcagtgarttgtgatcacgccactgtacaccagcctgggcaacgggagtgagagtgagaccctgtctcaaaaaaaatgaaaaagaaaagaggtttaattggcttatgg

SEQ ID NO: 191627 - DNA, 201 bp, Homo sapiens
gcgggtcaataggtgcacaaaccaccatggcacatgtatacctgtgtaacaaacctgcacgttctgcacatgtatcccagaacttaaaataataaagagtaaaaaaaaaactatataattatttcagtcatgcactctgtggctttatggcccatcactcaattttgtcggtttcagatggtgaggtagtaggggagagtg

SEQ ID NO: 191628 - DNA, 201 bp, Homo sapiens
ttagaggtgggtgcggtctccttccccagctaggcttaggaattcttagttggcctaggaaatccagcttgtcctgtctctcagtccccctctcaacaggaaaacccaagtgctgttggagaggttggccgacgacctcttaactacttcctgctgaattggggcgtagtaggggtcgtgcagttgagatttcctcaggag

SEQ ID NO: 191629 - DNA, 201 bp, Homo sapiens
actgtacaccagcctgggcaacgggagtgagagtgagaccctgtctcaaaaaaaatgaaaaagaaaagaggtttaattggcttatggttctgcaggtataygagaagcatagtgctgacatctacttctggttaggcttctggtgagcttagaatcatggcacatggcaaagggtattgggcatgtcacctagcaagagag

SEQ ID NO: 191630 - DNA, 201 bp, Homo sapiens
gccgacgacctcttaactacttcctgctgaattggggcgtagtaggggtcgtgcagttgagatttcctcaggaggggtgccttcaatgtcatcaacatcasagcatgaactagcaggctggtccaggggtccacagtagatcttagtcatggactgcatctggggcttcatttgaagaacgatttgtagttttacagcttc

SEQ ID NO: 191631 - DNA, 201 bp, Homo sapiens
gaaaagaggtttaattggcttatggttctgcaggtatacgagaagcatagtgctgacatctacttctggttaggcttctggtgagcttagaatcatggcayatggcaaagggtattgggcatgtcacctagcaagagaggggaggtgccacacacttttaaacaaccagatcatgcatgagctcactgagtgagaactcac

SEQ ID NO: 191632 - DNA, 201 bp, Homo sapiens
tccttggatgctcaagtccctgatataaaatggtatagtctctgatataaaatggttatatttgcatataaccactgtgcatcctcttgtatgcttcataycatcttcagattacttataatacctagtaaaatgtagatgctatgtaaatagttgttatactagattatttagggaataatgaccaggaaaaaagtctgc

SEQ ID NO: 191633 - DNA, 201 bp, Homo sapiens
aaaaatccatatcaaaataccataatggtatgggtgcaactatgtaacttttttttttttttttagacagtcttgcttgtcacccaggctggagtgcagtkgcatgattatggctcactgcagtattgacctcccgggctcaagtgatcctcccacctcagctttgcaagtagcagagactacagttgcatgtcaccacac

SEQ ID NO: 191634 - DNA, 201 bp, Homo sapiens
ctgttgctacatagcaaatcacccatatagtttagtgacttgaaacaacttaccattctgtggattgacgtgagtgttcttctgcttggggtcatgcaacrcctgtgactgtgaaaagcttatcagttgcataggcacttatcaggctttccttgtgtactgtttgttgatgtcctattggccaaagcaagtcacatggcc

SEQ ID NO: 191635 - DNA, 201 bp, Homo sapiens
gagatttaattatattagtgccctaaagtgctatatcagagaaattaaacactgactgttaattcacctttcgtatttattgtgctgtttatgactacagygatcttcaagccataagggcttgaagatttggaaagttctttctatgcatcagcttggactttgcccattcaaaatgtagatgaaggcaggaatggaaat

SEQ ID NO: 191636 - DNA, 201 bp, Homo sapiens
gagtgtaatttggacctttcctagcatctcaagagatggagaaaatgaaatcattgcaacttctaatacagttttctaccaggctcacagttgaagcctcwagggatggtcagtagggctggaaagccaacttagtctatgggtcttcctgcagaataactgtggatatctgttatccttcagacctttatgcttcagtat

SEQ ID NO: 191637 - DNA, 201 bp, Homo sapiens
gtggatgcagcacaccaacatggcacatgtatacatatgtaacaaacctgcacgttgtgcacaggtaccctagaacttaaagtataattaaaaaaaaaaawtttttttaagtataaacccaaaacaactgtcttaaaatacagtgactcaaaatacatgccccaatgagtaggtactcccaaatctggctaatcactggaa

SEQ ID NO: 191638 - DNA, 201 bp, Homo sapiens
aatacgtcgagaacccttagaacagtgcctcatacatagaatatgcttccaaatgtggtttattattgccattccagaccccagtcatgctgcttcatggyctttattagatttcccactccttcagagtaggcacttagctttgtatacctttacaactcaccaatgccttggacatagtattcatttaaatctctatct

SEQ ID NO: 191639 - DNA, 201 bp, Homo sapiens
tgcgccactgcactctagcctgagtggcagagtgagactccatctcaaaaaaaaaaaaaaattagggaattcttgacaaaataaaaagaaaaagtgtaaawttttaaaaattggaaacttgaacaaacaaaaaataaatagggaatgctctctccttttttttttttttttttttttgagatggtctcactcactctgtca

SEQ ID NO: 191640 - DNA, 201 bp, Homo sapiens
ctttggagtccctgggctgacctgaacttttatcctttggcctctttgaccagatcaaatatcctgtgaaaatgcataaactacaaataaaaataataaastataaaaaaaattatttttgttaaaaaaagcaggaatgaagtaaaatgctatctttagattagctttttaaaatttgccatctgttcaaatggacaccat

SEQ ID NO: 191641 - DNA, 201 bp, Homo sapiens
ctttgtgttaagctgtgattattttaaaattatatttctgcaaaagtaccagtagttctaaattacagcactgaatatgggagaatttttgttttaaaggttttttttttttttaattgaagtactacttaaaagatttttgtctttatatttgtttttcttcacttttggaccttgtgttttcatggcatgcaagattct

SEQ ID NO: 191642 - DNA, 201 bp, Homo sapiens
tgcaggcttttgtcccccaagagaactaatttactagcatatcactatcggcggtttactttcaaatggatcagaaaacacacacacagacacacatataratagaacaaaaatggcaaaatactaacaattgttgcgattgttgaatctaggtagagaatctatggtcattcatagcactagtacttgagtcagcagact

SEQ ID NO: 191643 - DNA, 201 bp, Homo sapiens
gcctgtaatcccagcactttgggaggcgaggggcaggaggatcatttgaggccaggagtttaaaaccatcttgagcaatatagtgagaatgtgtctctacaaaaaaaaaaaatttaaattagctgggtgtggtggcaggtccctgtagtcccaggtacttgggggctgagatgggaggattgcttgtgcacaggaggtaga

SEQ ID NO: 191644 - DNA, 201 bp, Homo sapiens
cctgtaatcccagcactttgggaggcgaggggcaggaggatcatttgaggccaggagtttaaaaccatcttgagcaatatagtgagaatgtgtctctacaaaaaaaaaaaatttaaattagctgggtgtggtggcaggtccctgtagtcccaggtacttgggggctgagatgggaggattgcttgtgcacaggaggtagag

SEQ ID NO: 191645 - DNA, 201 bp, Homo sapiens
aaactaagaatgatagtgatgccctatagcctttataaattaatggtggctgggtgcagtggctcacacctctaatcccagcactttaggaggccaaggckggtggatcacctgaggtcagcggttcgagaccagcctggccaacatggcgaaaccccatctctactaaaaatacaaaaattagccaggtattgtggcaca

SEQ ID NO: 191646 - DNA, 201 bp, Homo sapiens
ctgagtgagaactcactcgtcaccaagggcatggcactaagccattcatgagggatcagaccccctgacccaaacacctcccgctaggcccacctccaacratggaggccacttttcaacatgagatttggaggggataaaacatccaaaccaaattgttcacttaatctctttggtcttttcttagtttcctcagtgcag

SEQ ID NO: 191647 - DNA, 201 bp, Homo sapiens
aggagaattgcttgaacctgggaggtggaggtttcagtgagtcgaggttgcaccattgcactccaatctaggcgacaagagtgaatctccatctcaaaggaaaaaaaaaagaaaacagttaaatggtttccataagattataaagctaggataggagtttgaatctggctgcttctgatacccagcaccattttagtgcct

SEQ ID NO: 191648 - DNA, 201 bp, Homo sapiens
ttggcaatactttgtttttgcaataaatccttttggcagcagtaaactgaaaaaactagaagtatgtgtttcatttttttaagtattgattttttttcttaagaaagttaataaggaatgtatattaataacttgaacaaaatgtttgttgacatttaccaaccactgtggaggccatagtggtatctatcactgaccaca

SEQ ID NO: 191649 - DNA, 201 bp, Homo sapiens
ttagtcattttaagaggtttttttttttttttgagatggagtttcactcttgttgcccaggctggagtgcaatggcacaatctcggctcactgcaacctcygcctcctgggttcaagcaatctcctacctcagcctcctgagtagctgggattataggcatgcgccaccacacccagctaatttttgtatttttagtagag

SEQ ID NO: 191650 - DNA, 201 bp, Homo sapiens
gtttgagattagcttgggcaatatagtgagacttcatctctacaaaaagtttttaaaattaaacaaggatagtggtgcatgcctgtcttcccagctacccggtggctgaggtggaaagatcacttgagccggggaactggaagttgcagtgagccaagatcacaccactgcgctccagcctgggtgacagagcaagactct

SEQ ID NO: 191651 - DNA, 201 bp, Homo sapiens
gaggcgggagaatggcgtgaaccagggaggcggagcttggagtgagccaagatcgcaccactgcactccagcctgggcaacagagccagactccatctcaaaaaaaaaaaaaaaaaagaaaagaaagaaaagaaagaaatacctgagacgggccaggcacggtggctcacacttgtaattctagcacattgggaggcccag

SEQ ID NO: 191652 - DNA, 201 bp, Homo sapiens
ggcatgcgccaccacacccagctaatttttgtatttttagtagagatggggtttctccatgttggtcaggctggtctcaaactcccgacctcaggtgatcygcccacctcggcctcccaaagtgttggaattacaggcgtgagccaccacaccgggccttaagagtatattgactgtgtaatacattccatcccaaagttg

SEQ ID NO: 191653 - DNA, 201 bp, Homo sapiens
gctgaggcaggagaatggtgtgaacctggaaggcagagcttgcagtgagctgagatagctgcatcccagcctgggtgacagagcgagactccatctcaggaaaaaaaaaaaaaaaaaaagcattcaggccgggcacagtggcttacgcctgtaatcctagcattttggaaggctgaggcaggcggattgcctgaggtctgg

SEQ ID NO: 191654 - DNA, 201 bp, Homo sapiens
atttgcaattaaattttcatgtaccataaaatgctgttccaattagactttgttaaaggaaatactgcccagtatgtaaattcagatttagcaaattatgkccaaatttctaatgttggagatatcactatacatagagtcaaaacaaaacagtaataacagaacttttcagcctgtaggcatccctttgtgaaaacacag

SEQ ID NO: 191655 - DNA, 201 bp, Homo sapiens
aggcgggagaatggcgtgaaccagggaggcggagcttggagtgagccaagatcgcaccactgcactccagcctgggcaacagagccagactccatctcaaaaaaaaaaaaaaaaaagaaaagaaagaaaagaaagaaatacctgagacgggccaggcacggtggctcacacttgtaattctagcacattgggaggcccagg

SEQ ID NO: 191656 - DNA, 201 bp, Homo sapiens
tttctataaacctttacatttagggaattgcacttggtctcagctgcaaatattgtagttcataatttatcattttaatgtggtactaattagcatctgaygacttctaattatagtaacaataggctgtgactatctatccatcctcaccttcattccacacattagaattcgtctagcacttcaaaatgccaaacaaaa

SEQ ID NO: 191657 - DNA, 201 bp, Homo sapiens
cattaatgcctttatatatgtaattttttgtaatatatatgagaacttgctatgtataaggttttttaatcctgcctattttttcttacataatattatgrtgcgagcatcttcccatggttataactttttctataatatccagtcacttagatataataccacttgtttatcagattcctcattgttggacatttaggt

SEQ ID NO: 191658 - DNA, 201 bp, Homo sapiens
ggcgggagaatggcgtgaaccagggaggcggagcttggagtgagccaagatcgcaccactgcactccagcctgggcaacagagccagactccatctcaaaaaaaaaaaaaaaaaagaaaagaaagaaaagaaagaaatacctgagacgggccaggcacggtggctcacacttgtaattctagcacattgggaggcccaggc

SEQ ID NO: 191659 - DNA, 201 bp, Homo sapiens
aaattcataaggcccctaacgtcaggtaccacgttgtcttttgtggttgccattctttctgtgcctggtatactactacaagtttatagtcaatcagaacrccccagatcatgacctctatttgcgtgggaacgtagcaaaagctggtttttaggtactgtaccttcaatgaaggaagttctgaggaaggcaagtaaaaac

SEQ ID NO: 191660 - DNA, 201 bp, Homo sapiens
tggcgtgaaccagggaggcggagcttggagtgagccaagatcgcaccactgcactccagcctgggcaacagagccagactccatctcaaaaaaaaaaaaaraaaagaaaagaaagaaaagaaagaaatacctgagacgggccaggcacggtggctcacacttgtaattctagcacattgggaggcccaggcagggtgatca

SEQ ID NO: 191661 - DNA, 201 bp, Homo sapiens
aaattatactagaaataagacgaattttaaataatattaaaacctggaactttgcccattttgaagccacaagacaatggaatgtagtagctttttggcayaggaaggttaaatgccatcaggtgaaattgacatttctctgagtatcaaaccagaaacctaacaacaaggaaaaagagcaagagcagcttacatgtttct

SEQ ID NO: 191662 - DNA, 201 bp, Homo sapiens
gaaccagggaggcggagcttggagtgagccaagatcgcaccactgcactccagcctgggcaacagagccagactccatctcaaaaaaaaaaaaaaaaaagaaaagaaagaaaagaaagaaatacctgagacgggccaggcacggtggctcacacttgtaattctagcacattgggaggcccaggcagggtgatcacctgag

SEQ ID NO: 191663 - DNA, 201 bp, Homo sapiens
aaaaaaaaaaagaaaagaaagaaaagaaagaaatacctgagacgggccaggcacggtggctcacacttgtaattctagcacattgggaggcccaggcaggktgatcacctgaggtcaggagttcgagaccagcctggccaacatgccaaaaccccatctctactaaaaatacaaaaaattagccgggcatggtggcgggca

SEQ ID NO: 191664 - DNA, 201 bp, Homo sapiens
cggaggcaggagaattgcttgaacccaaaagcggaggttgcagtgaactgagattgcgccactgcattccagcctaggggaaagagtgaaactccatctcaaaaaaaaaaaaaaagaaagaaagaaaagaaatacctgagactgggtaattttgtaaagaaaagaggtttaattggcttatggttcttcaggctttacagg

SEQ ID NO: 191665 - DNA, 201 bp, Homo sapiens
aatgctcgcctatggtcccagttacttgagatgctgtcatgggaggatcacttgggcccaggaggtcaaggctgcagtgagccgtgattgcaccactgcawtccagcctgggtgacagagtgagaccctgtcccaaaaaaaaaaaaaaaaaaaaaaaatgatgcaagataaaaataatcataattgttagtaattgctaaa

SEQ ID NO: 191666 - DNA, 201 bp, Homo sapiens
ggtagcattacttaaaagataatcatattgactgtttcctctcagcaataaggagaaaagagtggatgggagcctattatttagacggtgtaatctttcgsttagaatacggattctgaaaccagattgtctgggctcacatccctgtctagtgtggtcttagggaacttacgcgactcgactgcaccttagtttcctcat

SEQ ID NO: 191667 - DNA, 201 bp, Homo sapiens
atatctcatcttagctttaatttccttaatgcctaatgatgtcgaacgttttttcatgtgctgatttgccatacttacatcctcattggtaagatgaataytcaagtctttttgcctattttcaaatagattgtttgtttccttactgcggagtttagagaattctttacatattctggatagaagtcctttggatataaa

SEQ ID NO: 191668 - DNA, 201 bp, Homo sapiens
gcctaatgatgtcgaacgttttttcatgtgctgatttgccatacttacatcctcattggtaagatgaatattcaagtctttttgcctattttcaaatagaytgtttgtttccttactgcggagtttagagaattctttacatattctggatagaagtcctttggatataaaatttgcaaatattttcttctagtatgtggc

SEQ ID NO: 191669 - DNA, 201 bp, Homo sapiens
gtcccagctactggggaggctgaggcaggagaattgcttgaacccaggaggcggaggttgcagtgagccgaaatcatgccatcacactccatccagcctgrtgacagagtggaactgcgtctcaaaaaaaaaaatagaaaaaagtgctaaaaattagcaaatttagggatgggtgcatgaaaacaggactttataaaaggg

SEQ ID NO: 191670 - DNA, 201 bp, Homo sapiens
atcagctaaacttcataagttctctttatatttattcatttaagaaaatttacattgtctctacagaaatacatttttatcttctcaatttattttttgakttgtttttattgagctaatgatgccatattggatcaagagaggcaactcattgtaagtacccaccaacgtttttcctgctctggtgtgtgatgaatgaga

SEQ ID NO: 191671 - DNA, 201 bp, Homo sapiens
agctaaccattacaacagacttataggtcatctctgattgtgtcaaagtaaaaaattgaataaaacaatttgttctgttttcatagttgcttcttttttgrgtaaacagagacctgggatcttctggagctcagccctctgggtgggaggatgggtgcctagcactgctctccgctgacctcttctggtctcctgttagag

SEQ ID NO: 191672 - DNA, 201 bp, Homo sapiens
ttctgaggtaacaatagagatatatttaaatttttttatttttatttttcttcttgctttttaggttgtggaacttttagcaagtgctcttatggacttgrtacaaggagtatatcatgaaaattctacttcaaaggtaaaggatttcagagtcataaaatgttatgttataaaccgtcgtggtacaactagaataacgaa

SEQ ID NO: 191673 - DNA, 201 bp, Homo sapiens
ttgtggcagattgtattagacttggagtccattatagggactggcttttaccaaagtaagtgagatagggaccactggagggttttgagcagaagagcaayggacctggtggtttcattttcctgcttgcctcgtttctgctaccgttttaccactccagcctcacatctaaaaagtatctttcatttatcctccatattt

SEQ ID NO: 191674 - DNA, 201 bp, Homo sapiens
atataatggcatttacatttaaaaaaaaaagcaaccttttgtaagtatctgattacacctgagctatactggataccatagcaaaagaattaaaccaatcygtcctctgctgtctaaaagtttattatattttacagatgttttgagagtagacacacatactagacatataagataccagaaaaattaaagtgatgtata

SEQ ID NO: 191675 - DNA, 201 bp, Homo sapiens
tccatcaatccaacttcaagatgttttcttctaattaggaagagcatttttaaaggatttctaaaactgtatattgtgataatctgaggtaaatgatcccrccccagcctcctctcacttgttcgcccaccttcccagtgtatttctcccctacagttctcactgggtagaattctcactttagctgttacttccctgggt

SEQ ID NO: 191676 - DNA, 201 bp, Homo sapiens
tttttcttaagaaagttaataaggaatgtatattaataacttgaacaaaatgtttgttgacatttaccaaccactgtggaggccatagtggtatctatcaytgaccacatgaaaacaagaagagtaaagtctgctgaagaagtgtcaggatctactttatgcagttgcagaaggtatatatgcatacgactctgcaacata

SEQ ID NO: 191677 - DNA, 201 bp, Homo sapiens
agcaacgggaaggaggtgccacacacttttaaactaccagatctcccaagacctcactcactattgtgaagacagcaccaagccataagggatctgccccyatgatccaaacacatcccaccagccccacctcctgcattggggtttacaattcaacatgagatttgggaagggacagaaagagacacagtatacaagcct

SEQ ID NO: 191678 - DNA, 201 bp, Homo sapiens
gacagtcctgcagatatgagactcagggccagatggttgagacttaaatactctcttcatagaaaggaaggtagttggaggtctgtaggcaattttaaagyggtagtaaatgatttttaggggaatgaatgggctcaaagacaagacagtggtttgtaaatgattctctttggacgctgaatgggatggaaggacaaacca

SEQ ID NO: 191679 - DNA, 201 bp, Homo sapiens
cgctacccccttagccagaaagaacttccagctcactagaacagattgccatccctcccacaaataagcaaagccttacacatttggcagtactgaaaagkctcccttcaaaaaactgagttagaagcttcctccagaactcctatgagttggtgtgcttattgcaacagccctttcatcattgtctacattaaacccagt

SEQ ID NO: 191680 - DNA, 201 bp, Homo sapiens
cactgctgctgtgccctgtgttcttcagaagtcgtttctccactgaggctgccagcctggaagctctggctgagcactggggactgaatctacctggaatkagatggtttgcttaaatccaattgtaaatgataaagtgctttacaaatgttagacattattattggtctctatgggagggtgccactctttagtccctct

SEQ ID NO: 191681 - DNA, 201 bp, Homo sapiens
aatgctgctattctcgcagtcaccagaaatgcagaaagttatgtcctgtttaattgctctccagatggctaaactatttaacattgatgctgactgttgtrtaatctaaaacaatatttcaggatgcagcaagtcagtgtttcagaggtccctgattttggttaaaatggtctttgcatgtgttctgggttgggttttgtt

SEQ ID NO: 191682 - DNA, 201 bp, Homo sapiens
tagtaacagtatgtcagcaataattttacttaattctagcaatatgcttggcactgtattaaaagcctgtatagatgtaacaatcaacaggtagactttgrcatatgaaattaaaaccagcctaacaatatgggtgataaagaaattttcctcacaaaaagaagcatttctaggaactttgacttatggctaattgacctt

SEQ ID NO: 191683 - DNA, 201 bp, Homo sapiens
ttacagagtcgtgcaactatcattactatctaattttagaacttttttattacctaaaaaataaaccttaagcccatatagagtcattacctacttgaacttttttttttttttttttttttttgagatagagtctcactgtcacccaggctggagtgcagtggcgtgatctcggctcactgcaacctccacctcccgagt

SEQ ID NO: 191684 - DNA, 201 bp, Homo sapiens
tagtgagacaatataaggcagagtgattcttcctacttttcttctttttcaaacttgttttagaataagcttgtctgtatctatcatagttgtggtagtcrcagcaaaaggctagcacctctccagcttgtctgtgtgggactggttctggctgaggctagaagaaggtgacggtactttattggagtgagcttctgaaca

SEQ ID NO: 191685 - DNA, 201 bp, Homo sapiens
cccagaccatgcctggctaatttttgtaattttagtagagatgaggtttcaccatgttggtcaagctggtctcaaactcttgacctcgtgatctgcctgcstcagcctcaaaaagtgctgggcttacaggtgtgagccaccaaacccagcctggactatttttttaaattttcattttaccttttcaagtgtttggaattt

SEQ ID NO: 191686 - DNA, 201 bp, Homo sapiens
gggactggttctggctgaggctagaagaaggtgacggtactttattggagtgagcttctgaacatccagttgagcagagggtgggaaggagaattttttayggaataggaagtgattcctaaagatataacatcatttaaaattattttcctttagtgctatcagttttaagtataaataatatcaatagagcatttagga

SEQ ID NO: 191687 - DNA, 201 bp, Homo sapiens; identical to SEQ ID NO: 33078

SEQ ID NO: 191688 - DNA, 201 bp, Homo sapiens
aggctgaggtgggagaattacttaaggattacttaagcctgggagatcaaggctgcagtgagccatgattgcaccactgcactccaccctgagtgacagarcaagaccctgtctcaaaaaaaaaaaaaaaaaaagctggttgtggtggcattttgggagcccaaggcaggtggatcacaaagtcaggagatcaagaccatc

SEQ ID NO: 191689 - DNA, 201 bp, Homo sapiens
atttgaccttcttgatatagccagctagatagctgaagggcttagttagctttctggtctcagctgtgtcattcactaactagctgtatgactttaagctstatcactagtctcagttatgaaaggaagagtttggagtagatgatattttgggtttcatctaactcccatattctatcattcaaaacatactttttatca

SEQ ID NO: 191690 - DNA, 201 bp, Homo sapiens
cccttacccaccccttgctttaatttttcgaggcacctgtcattttcttactacaaaagttatcaaatagtaataataaagtgattttattccttggcatygttcccagttatcaggaatgtcaccttatgattagctggaatgttagttttccagagattctagatgatacacactcaaaacacatacacatatgtttaa

SEQ ID NO: 191691 - DNA, 201 bp, Homo sapiens
ctaccaacaatgggatactactatgtaccaattagaatggctaaaataaaaaatataatatgtaattctagtaacgatgcagataaactagatttctcatrcattgctgatgggaatgtaaaatggttcggcccctctggaaaacagcataacaatttcttataaaattaaacatacgactgggcacagtggctcacgcct

SEQ ID NO: 191692 - DNA, 201 bp, Homo sapiens
tttttttttttgagatggagtttcgctcttgtcgcccaaactggagtgcagtggcgctgcgatcttggctcactgcaaactccacctcctgggttcaagcrattctcctgcctcagcctccggagtaattgggattacaggcatgccccaccatgcccagctaatttttgtctttttttttttttttttttttttagtaga

SEQ ID NO: 191693 - DNA, 201 bp, Homo sapiens
aaaatggaataaggtctgtagttaacaatctatcaatatcaattttttggttttagtgttctatagctattacatgatttcaccattgggtgaagggtacmtgggactctgtagtgtttctgcaactttgtgtttgtctgtaattatttcttttttttcttttttttttagacggagtcttgcttcgttgccaggctggag

SEQ ID NO: 191694 - DNA, 201 bp, Homo sapiens
actctaaattgtacagtagttccaaagagaccatttactgttttctgcttgttttacatcctggaacaagttcaaagcttttgatctcacttgatttaacaaaaaaaaaaagtctcagccttgaaaaataatacaggtttgatgaatatgatttcagtattacagttctgtaaaaattttcagtgtttatggtacatttga

SEQ ID NO: 191695 - DNA, 201 bp, Homo sapiens
tgtcctacagaaataccctacatatgcacatggatatatgtatgaagatgttcggtgcagcagtgtttacaataatagagaataggacatgacctaaataktttttagtggggtctggagaatattgtggtacatccatactataaataaataaccatcattaaaaagaattaggtggttccatattttgtgacatagaaa

SEQ ID NO: 191696 - DNA, 201 bp, Homo sapiens
gggtttctccatgttggtcaggctggtcttgacctcctgacctcaggtgatctgcccacctcagcctcccaaagtgctgggattacaggtgtgagccaccrtgcccagcccaggatgggggcatggcagaccacagtggtcttggaaaatgcaacagttaggcacaaaagcaggagtgcctgtcctcacctaggtctgtag

SEQ ID NO: 191697 - DNA, 201 bp, Homo sapiens
agacactgttttcccttgggatatttccagagtgttcaacttagttccatataagatatctatatttcacaattaaatatgttaatttttacatgaaagcrttattgttggttttaaggttcttaatttatctactcttaccatttgtccactataataagctcagttcattaataattgtgtgaccatgttttaagtatt

SEQ ID NO: 191698 - DNA, 201 bp, Homo sapiens
tgtaatcctagcactttgggaggccaaggcaggcggatcacgaggtcgggagatcgagaccatctcatctctactaaaaatataaaaaaattaggcgggcrcagtggcgggcgcctgtggtcccagctactcaggaggctgaggcaggagaatggcgtgaacccaggaggcggagcttgcagtgagccaagatcgcgccac

SEQ ID NO: 191699 - DNA, 201 bp, Homo sapiens
caatttagtacacaaaagaatttttttgtgatttaaaagaagctgcaaaccatttcatctttctaggggtaagaggatacaatagcagtctgttttctatrtggcagcttaatgcagtggtgaagatcctgggtagtaggaaaatagctttctgttaaatagcatatatgtgactaaggtagatgcatagcaaaaaatgca

SEQ ID NO: 191700 - DNA, 201 bp, Homo sapiens
tttctatatggcagcttaatgcagtggtgaagatcctgggtagtaggaaaatagctttctgttaaatagcatatatgtgactaaggtagatgcatagcaamaaatgcaagggaattggaactggatacattagaagtcaccttctccaaaagaagtttgtagagcagccgggtgcggtggcttacgcctgtaatcccagca

SEQ ID NO: 191701 - DNA, 201 bp, Homo sapiens
cccataagaccacatgtaaaattgtaaggaacagactatatatgtaggagaaagtgcagcattaagaattcaaaatgtttcagagggagcttcttggaagrtgtaattttaaagctgagtccttagaagatacagtagaaatgaatcaatagaaactattggacccagcgcagtggctcacatctgtaatcccagcacttt

SEQ ID NO: 191702 - DNA, 201 bp, Homo sapiens
tcttttgctcttttatcacttcatctcttttggggttccacaactcagaagttcaaggctgttgttcatttttcagagttgggaaaactgtttctcatggygaaggtcttttaggtttctttctgtagttttttttttttctttgcgaaacacatcttactctgtcatccaagctggagtgagatacaaaagaaactgcag

SEQ ID NO: 191703 - DNA, 201 bp, Homo sapiens
ggacacaggttcaagtaaatctaactaaggaaaggaatctatcattctgttttagttattactctgttttagttattactctaggactgctcactcaacaratgttgagtacctattacgtgctagcaactgtgctagacaaatcaggtacccgtgtcttgagagctgagatagagacaaaggtacaataggagctggagc

SEQ ID NO: 191704 - DNA, 201 bp, Homo sapiens
ggagattcctagcttgaacccggaggtggaggttcaaatatgagtggtaaaattgtgatataataatatcacctttctaattttctgaactagattacatytaagcctcactcattgagttgagattctatgattatgccccttgagtgccatgccccaattccctgtgattctctaccttcacacagtcccaggtttctg

SEQ ID NO: 191705 - DNA, 201 bp, Homo sapiens
atctaagcctcactcattgagttgagattctatgattatgccccttgagtgccatgccccaattccctgtgattctctaccttcacacagtcccaggtttytggaatttccaatgggacattctccttttagtatgttcagccccagtttggctcagatcaatgtattgtcactactttaattgatgcctctgtttcctaa

SEQ ID NO: 191706 - DNA, 201 bp, Homo sapiens
gactacaggcgcctgccaccacacccagctaattttttgtattttcagtagagatggggtttcaccgtgttagccaggatggtctcgatctcctgacctcrtgatccacttgcctcagcctcctgaagtgctgggattacaggtgtgaaccaccacacccagcctgaatttgctgacacttttatcttggacttctagcct

SEQ ID NO: 191707 - DNA, 201 bp, Homo sapiens
ggtcacttccaactctgattctataaaccctactttttagtttatgtcattccttcccttttgaaactaagaatgatagtgatgccctatagcctttatamattaatggtggctgggtgcagtggctcacacctctaatcccagcactttaggaggccaaggcgggtggatcacctgaggtcagcggttcgagaccagcct

SEQ ID NO: 191708 - DNA, 201 bp, Homo sapiens
gttttattgtcattattgagggagtgggatgttgtaaagggagccaagcccattgtgctttccctctttagtactcactcccttgctcttctgcgatggartgacacagcacaaaggtcctcaccatatgccaacccctcaaccttggatttcccagcatccagaaccatgaactattctttataaattactcagtctgtg

SEQ ID NO: 191709 - DNA, 201 bp, Homo sapiens
tcacggagctaattcatattgctctccttgtacatcgtgggatagtaaatttaaatgagttgcaatcatctgatggtccactgaaagacatgcaatttggmaataaaattgctatcctgagtggagactttcttctagcaaatgcctgcaatggactagctctgctacagaacaccaaggtaaaattgggcagggttttgt

SEQ ID NO: 191710 - DNA, 201 bp, Homo sapiens
cagcatccagaaccatgaactattctttataaattactcagtctgtgatactcaatttagtaacagaaaatggacttagacagaaatataattttaatctsctagtagccacactaaaaatgtaaaaggaaacaaatgaaattgattgtaatatttttaaactaaaatatcattttaacatgtaatcagtgtaaagcactt

SEQ ID NO: 191711 - DNA, 201 bp, Homo sapiens
ttagtgaagccttcctcacataagaatatcaggctgctggccaggtgcggtggctcacacctgtaatcccagcactttgggcagcctaggcaggtggatcrcttgaggtcaggagttcgagaccagcctggccaacatggcaaaacgctgtctctactaaaaaatacaaaaattagatgggtgtggtggcgcatgcctgta

SEQ ID NO: 191712 - DNA, 201 bp, Homo sapiens
ctgatgtctcctgttttattactctcttactgtgtattttgtggaactaagtcaacatctaccatcttttaacctgttctttgcatatcacagtcttttaytttgatgctaagcccctccaaaacagcattttcacatgaaacttattgcattgcacaaaaatatggtttaaaaagtaattgataataattaggagtatag

SEQ ID NO: 191713 - DNA, 201 bp, Homo sapiens
agagggcaaaggtttggtacttggagtttcaggaaagccatgtcagggctgttcatgaagcacctacagtggcttttttttttttttccttcagttttgtygtttgtggtgactgaatttgcaggatcaccacaaagtcattgcaaaatctttactccttgtttttgccagcaccaactttgacctttgcagtctccctga

SEQ ID NO: 191714 - DNA, 201 bp, Homo sapiens
tcaccacaaagtcattgcaaaatctttactccttgtttttgccagcaccaactttgacctttgcagtctccctgactgacttcattctgttcttgctcagyttttttgtttcttcaggtctttttcttctcacacaggctatatctttcaagtccatatctgggttcacatttctttgcataatccagcgagtcgtacatc

SEQ ID NO: 191715 - DNA, 201 bp, Homo sapiens
catcacatagttagctcccaggagatattagattgcattcttttccttgcttttttctgattcccaaatgtggagatttatagacatttttctatacttgrccttttttaaaaaaaataataaggtatgtaaatttttggctgtccagtttctcaaaataattgaaaaggctaattcaaagcaaacatttaacatggtgaa

SEQ ID NO: 191716 - DNA, 201 bp, Homo sapiens
tttaacatggtgaaatgggtcattagagagatctggtgtctcatccaacccaaatttaggttgtatttataaagatagtgacccagaatatgaatctgaartcctaagcatgaaaacaggcgacatttgcatacttttttaaaaagtacttttaacttcacaggcagctagcttctttgtttccacctcttcttttctgat

SEQ ID NO: 191717 - DNA, 201 bp, Homo sapiens
aggtactgatttggatgtggttatcatactagtttcttggcattttacaatttatactaacttttcctttataatagagcatgctctcttagtatatacayggcaagctgatggaaatgagggattttgtttcattagtaaccaaactcataaaaggtaataatgtttagggaataaaatttctgattaacttaggaacag

SEQ ID NO: 191718 - DNA, 201 bp, Homo sapiens
cagttaatttgtggtccaattaacttatggtagtagatttcaggggactataaattaatcgtttcttggttttctgaattttctattttttttccagtgakcgtgtattacttgaataatttaaaatgtagaaatgatgaataataaagtcttaatcacagtaagaaatatgtaataaacaaaactgaatctttgatttta

SEQ ID NO: 191719 - DNA, 201 bp, Homo sapiens
ttccagtgagcgtgtattacttgaataatttaaaatgtagaaatgatgaataataaagtcttaatcacagtaagaaatatgtaataaacaaaactgaatctttgattttagagatctttcaattattctgaaatagaattatctatacattctatatatagatatctgtatctatatagttatatctatatattgatatat

SEQ ID NO: 191720 - DNA, 201 bp, Homo sapiens
cacccatttcaagcctacgattcaatgatttttagtaacttttatcaagtgatacagtcattaccataaatcatttttagaacattttcacacacacccctataaggtccctcatgcccatttacagttcccacccccagccccaggcaatcactaatctacatttcacatcaatggaattatacaaatatgtggtctctt

SEQ ID NO: 191721 - DNA, 201 bp, Homo sapiens
agaggcattaaaagagaatttttttttaattaattttttttttttttgagacagagtttcactcttgtcacccaggctggagtgcaatggcgtgatgtcgkctcactgcaacctctgcctcctgggttcaagtgattctcctgcctcagcctcctgaatagctgggattacaggcacccaccaccaggcccagctaatgtt

SEQ ID NO: 191722 - DNA, 201 bp, Homo sapiens
ccacccaaagtccccactggggcactgcctaatggagctgtgagaagagggtcaccatcctctagacaccagaatggtagatccattgacaacttgaaccrtgtgcctggaaaagctgcagacactcagcgccagccatgaaagcagctgggagggaggctgtcctctgcaaagccacaggggctgagttgcccaagacgg

SEQ ID NO: 191723 - DNA, 201 bp, Homo sapiens
acaaattcatggccatacgcttactacatagcagatttagccaattaaaacaacctcttatcctctggctggattcacagtctgttcaatctgcagcagcycagtagacactgggatgcttctggctagcaggtagcagtgtcacaggcaggcaggctggaggagcagctcgtgctgaggcagctgagcccatcctttccc

SEQ ID NO: 191724 - DNA, 201 bp, Homo sapiens
gacggctatcatattgatatacttttatattattttaatttttttacaggaagagcatactctcatatgacttatatgatattttttaaagtaggccattmaataattgtgatgttttttaaagactccctaagtctttataggaaatattatccaagagagggaaagacatacaatctgaatgttaaatagaggaaagat

SEQ ID NO: 191725 - DNA, 201 bp, Homo sapiens
ttgtgatgttttttaaagactccctaagtctttataggaaatattatccaagagagggaaagacatacaatctgaatgttaaatagaggaaagatttaagycaggcactgtggcttatgcctgtaatctcagcgtttagaaaggccgaggcaggaggatggtttgacaccaggagtttgaaaccagcctcggcaacatagt

SEQ ID NO: 191726 - DNA, 201 bp, Homo sapiens
atgcctatgcccacctcaaattgctgtaaaacacatacatgtatgtatgtgtacatatgtgtgaatatgtgtttatgcacgtgtgtgtgtgtatacatacrctgcaaaccagtgttttttgttttttgttttgcaattgcaagatttgatagagtgaaaacagagctcccatacaacgggaagtgacccaaagggggttac

SEQ ID NO: 191727 - DNA, 201 bp, Homo sapiens
tttagttgtaccagcaccatttactgaaaagttcaacttcttcctaaaatatagcaaatccctatatatagtttggttgctttctggactttctattttgytccctagtctgtctctctatctaaaaagtacatatttttaaaatttctgagattttacagcatgttatagtatctggtaaggcttagacaaaatttgctg

SEQ ID NO: 191728 - DNA, 201 bp, Homo sapiens
ttttagacactgctaccttactgaattatcttctagtttatagtagttttttagttgaatctcttgattttcccagtatgcagttatattgccttcaaacrgtaagagttaaactcatctttcctaatttgtttacatctacctttctcttatctcttctattacattgtaaatatcagtggtgttgtgtgcatctctgtc

SEQ ID NO: 191729 - DNA, 201 bp, Homo sapiens
gcctcagcctcctgagtagctgggattacaggcacatgccaccacgcctggctaatttttgtatttttagtagagacgaggtttcaccatgttggtcaggmtggtctcgaattcctgacctcgtgatctgcccgccttggcctcccaaagtgctgggattacaggtgtgagccaccacgcctggccccttatagctcttta

SEQ ID NO: 191730 - DNA, 201 bp, Homo sapiens
actctgaagcagaataggaaaagaggaccactgggcatttgagaaaagctgcttccacgaaacagcaagtcaaaaacaaactgataaaaagggaacttagmggaaatagagacaatgcaatcaaaggcagatgtttttcaaagcactataatcaatatacttgacaaggaaggatattaaatccatggtataataatagat

SEQ ID NO: 191731 - DNA, 201 bp, Homo sapiens
taactagaaatgcccttcaggctggctctgcgggtggatgctctgcactgtgggatagctggattcaattattgctcccagtttgtggtgtcagaagccamctgtgcaccgggagagcctgtatgtctttatgtcgaagatagagccctctgtccctatagaaaagcctgtttagtccattaaaactgttttaaagtggat

SEQ ID NO: 191732 - DNA, 201 bp, Homo sapiens
gactggccaggcatggtggctcacgcctgtaatcccagcactttgggaggccgaggtgggcggatcacaaggtcaggagatggagaccatcctggctaacmcggtgaaaccctgtctgtactaaaaatacaaaaaattagccgggcatggtggtgggtacctgtagtcccagctactcgggaggctgaggcaggagaatgg

SEQ ID NO: 191733 - DNA, 201 bp, Homo sapiens
actgttgtctttatcatcagcctggtagcagttaagctacagtagcccttggtatgtcctgtcaagacagggcaacatctagaggaaacaactcccacttytacgtgggtctttcctaggagctcagtggtggatttccctcatatctcttaggctagaattggatgatatatcctttcctaaattaatcattagcaggag

SEQ ID NO: 191734 - DNA, 201 bp, Homo sapiens
caggtggatcacctgaggtcaggagttcgagaccagcctgctaacatggtgaaacccccgtttctactaaaaatacaaaaaaattagccgggcgtggtggygtgtgcctgtaatcgcagctactcaggaggctgaggcaggagaatcgcttgaacctgggaggcggaggttgcagtgagccaagatcatgccattgcactg

SEQ ID NO: 191735 - DNA, 201 bp, Homo sapiens
tgccagaattatcggggctgggcacagtggctcatgcctgtaatcccagcactttgggaggccaaggcagatggatctgttgaggtcaagagttcgagacyatcctggccaatctggtgaaaccccaactctactaaaaatacataaattagtcgggtgtggtggcacatgcctgtaatcccagctactcgggaggctgag

SEQ ID NO: 191736 - DNA, 201 bp, Homo sapiens
gaccagcctgctaacatggtgaaacccccgtttctactaaaaatacaaaaaaattagccgggcgtggtggcgtgtgcctgtaatcgcagctactcaggagrctgaggcaggagaatcgcttgaacctgggaggcggaggttgcagtgagccaagatcatgccattgcactgcagcttgggcaacaagagcaaaactctgtc

SEQ ID NO: 191737 - DNA, 201 bp, Homo sapiens
tacaatttaagtgctatttaaatcgttgtaaaactatattgtttagggaataatgacaagaaaaaagtctgtatatacccagtactgacacaaccatctawtttttttctgaatatttttgatctgtggttggttgaatccatggatgcagaacccacaaacatggagggccaattgtatagatggctcttaaacatgtga

SEQ ID NO: 191738 - DNA, 201 bp, Homo sapiens
tataaccatcacctgtaaagtttacattgtacccatttctagtaaggtgaatttttgtcagcagcatatagttggttcaggttgttttatctattccaccrttctgtatcttttttttttttttttttttgagacggagtctcgctctgtcgcccaggctggagtgcagtggcgggatctcggctcactgcaagctccgcc

SEQ ID NO: 191739 - DNA, 201 bp, Homo sapiens
cgctacgcccggctaattttttgtatttttagtagagacggggtttcaccgttttagccgggatggtctcgatctcctgacctcgtgatccgcccgcctcrgcctcccaaagtgctgggattacaggcgtgagccaccgcgcccggcctctgtatcttttaagtggagcatttaatgcatttacattcaaggttaatattg

SEQ ID NO: 191740 - DNA, 201 bp, Homo sapiens
agcattcaagaggaagcagagcataaaagtttgaaaaaattgcagcctgatgatgctgtagaaaagaaaatcccatgttctggggagaaattcaagcccayagcagaaatttggataagtaatgagaagccaaatgctaattgccaaaacaatggggaaaatggctccaggacatatcagagaccttctggagagcccctc

SEQ ID NO: 191741 - DNA, 201 bp, Homo sapiens
aggagtttgaggttgcagtgagctatgattgcaccactgcactccagcctgggtaacagagcaagaccctgtccctgtctcaaaaaaaaaaaaaaaaaaaraaagaaaaaagaagaggaaaaaaagaaagggcaaatcctctgtggcaaataacatcaaccgtagtctctacagttattttatatatagcatttgacacac

SEQ ID NO: 191742 - DNA, 201 bp, Homo sapiens
tttccccattctgtgacactttgtcagtctttctttctttttcatgactttaacagttttgaggagtattggtcaactattttgtggagtgtcccttagtwtgggtttgcttatgtagactggggttatggtttttcagaatgatacagagatgaattgcccttcttttcacataatttcaggactacattttacgttatg

SEQ ID NO: 191743 - DNA, 201 bp, Homo sapiens
cctttgagtcctatatatgggtaaggtgaaattccatggagtgtgcaaaaacaacttcttagaaaaagttattgaggagctgaacaattcccagagaacakacaggaccagaaatcatttgagttcccattagagtgaaaaacactcacagaatacgtgggttctttgggggagatattagaagggtcacacctttgtagt

SEQ ID NO: 191744 - DNA, 201 bp, Homo sapiens
gtcagaagatggagaccatcctggctaacacggtgaaaccccgtctctactaaaaatacaaaaaattagccagccgtggtggcgggcgcctgtagtcccasctactcctgtagtcccaggaggctgaggcaggagaatggcgtgaacccgggaggcggagcttgcagtgagccgagatcgcgccactgcactccagcctgg

SEQ ID NO: 191745 - DNA, 201 bp, Homo sapiens
acttcttagaaaaagttattgaggagctgaacaattcccagagaacatacaggaccagaaatcatttgagttcccattagagtgaaaaacactcacagaawacgtgggttctttgggggagatattagaagggtcacacctttgtagtgggaataaattagttctagaataaagactagtctaagccaccataaatgaaac

SEQ ID NO: 191746 - DNA, 201 bp, Homo sapiens
gtgttaatattaataacaactttatttagatacaatttacataccataaaattcaccctctttaagtatacagtttagtgggttttttttgtttttttgtktttttttttggttttgagacagagtctcacttttgttggctggactggaatgcaatagcgtgatctcgactcactgcaacctctgcctcccgggttccag

SEQ ID NO: 191747 - DNA, 201 bp, Homo sapiens
gcttgaacctgggaggtggaggttgcagtgagccgagattgtgccactgcatccagcctgggtgtcagagtgaggctgtctcagaaaaaaaaaaggggaggggggggtggttccaagatggccgaataagaacagctccagtctacagctcccagcgtgagcgatgcagaagacgggtgatttctgcatttccaactgagg

SEQ ID NO: 191748 - DNA, 201 bp, Homo sapiens
tatccatatcatccttactcctagactaaggctgatggagcagccctccatttggaacattactggtctcatgtcagaaaagagaccaggtgaaccacgamccagctttgcttagaaatgacatttttaactcacttctcattgacaaaagcaattcacatacccttacttgagtttaagagcatggagatgcataatctt

SEQ ID NO: 191749 - DNA, 201 bp, Homo sapiens
ctaagttattgaatgcatgggcataaagttctttgtaatatgcttttattatctttttgaagtatgtggggtctacagcagagtcctatcccttcattgcygatatttctaatttgtgtcttctttctttatttcataatcattttggctagaggtgtatctggtttatatatcttttcaaaagattttctgtttcattgg

SEQ ID NO: 191750 - DNA, 201 bp, Homo sapiens
atgacaagttagtggatgcagcacaccaacatggcacatgtatacatatgtaacaaacctgcacgttgtgcacaggtaccctagaacttaaagtataattwaaaaaaaaaaatttttttaagtataaacccaaaacaactgtcttaaaatacagtgactcaaaatacatgccccaatgagtaggtactcccaaatctggct

SEQ ID NO: 191751 - DNA, 201 bp, Homo sapiens
tgtgttttggctgcataaatgtcttcttttgagaagtgtctgttcatctccttcgcccactttttgatggggttgtttgtttttttcttgtaaatttgttkgagttcattgtagattctgggtattagccctttgtcagatgagtaggttgcgaaaattttctcccattttgtaggttgcctgttcactctgatggtagtt

SEQ ID NO: 191752 - DNA, 201 bp, Homo sapiens
agcaattcccctgcctcagcctcctgagtagctgggattacaggcgcacgccaccatgcctggctaatttttgtatttttagtagaggtggagtttcaccrtgttggccaggctagtctcgaactcctgacctcgtgatctgccaaccttggcctcccaaagtgctaggattacaggcgtgagccactttgcccggcctgt

SEQ ID NO: 191753 - DNA, 201 bp, Homo sapiens
agaccacgagcccaccgggatggaacgaacaactccagacgtgctgccttaagagctgtaacactcaccgcgaaggtctgcagcttcactcctgagccagygagaccacgaacccaccagaaggaagaaattccaaacacatctgaacatcagaagggacagactccagacgcgccaccttaagagctgtaagactcaccg

SEQ ID NO: 191754 - DNA, 201 bp, Homo sapiens
ggctcgatctcaattcactgcaacctctacctcctggattcaagcgattctcctgcctcagccccctgagtagctgagattacaggtacctgccaccacgmctgggtaatttttgtatttttagtagagacggagtttcgccatgttggccgggctggtctcgaacccctgacctcaggtgatgccccaccccccaccccc

SEQ ID NO: 191755 - DNA, 201 bp, Homo sapiens
ctaggagttcaagaccagcctgggcaacatagtgagaccccccccgtctctacttaaaaaaaaaaaaaaactaactaaaaattagctgggtatggtggcgygcacctgtaatcccagctactgaggaggttgaagtggaaggcttccttgagcccaggagtttgaggtcatattgaactacaataacactactgtactcca

SEQ ID NO: 191756 - DNA, 201 bp, Homo sapiens
gtgtttttgccatgttgggcagcctggtcttgaactcctaacctcaggtgatccacctgcctcagcctcccaaggtgctaggattacaggcgtgagccacygcacctggccaagttttcttatctctacatatgcttaatgtcttggtaaagttagattctatttaatgatgttttagttttcttttataagaaagaaaat

SEQ ID NO: 191757 - DNA, 201 bp, Homo sapiens
tttatttgtaagtctggcttcctagttgttgtccttgtgtctgcatagcttagtgatcaaccaaagactggtcagaagttacgctgaaacaccttaagacrgtgagacttccagtctctcctgatggatctgtgtgtgagcttcggagcacattcaaacttcaggctgctctgggttttatttccttttgggacctctcat

SEQ ID NO: 191758 - DNA, 201 bp, Homo sapiens
caagtaagtcacatactaaaacagtattgttaattcaaaaaaaatttttgtgtgtgcattgcatgaagcatgagaaataccagtttaaaacccaactgggwcaggagtggtggctcacacccctaatcccagcactttgggaggccgaggtgggcagatcacttgaggccaggagtttaataccactgaccaatatagcaa

SEQ ID NO: 191759 - DNA, 201 bp, Homo sapiens
gtacccagcaagttaccacagttaaaacagtggaattcagagtacctgtatttctgaaagctgccgctgtgtacatggaatggagtctgatttttaaacarcaattttgccctttgctttatatcctatcatttattgtaaagaaactcttcctgtttcataatttctcatttgttctttaagaaaagatggcaaaggaat

SEQ ID NO: 191760 - DNA, 201 bp, Homo sapiens
ggccgggcgtggtggctcatgcctgtaatctctggcactttgggaggctgaggcaggtggatcacttgaggtcaggagttcgagaccagcctggccgacayggtgaaatcccatctctactaaaaatacaaaagttagctgggtgtggtggctcatgcctgtagtcccagctactcaggaggctgaggcaggagaattgct

SEQ ID NO: 191761 - DNA, 201 bp, Homo sapiens
tctgcagaacagcaagtgcagaggcctcctagaggccaagaggcatctaggaggtgatgcctagagtgtttggaacagctggaggccattgtagttctggyttgtgtttttaaaggtcaccctggcagttgggtgaacaacagactgtaacctttgtcaaagtcaaataaaatgtatagagagccaaatatctaaatttaa

SEQ ID NO: 191762 - DNA, 201 bp, Homo sapiens
tcttcaattaggaacattttcatatctcttcttggcttttatgactagagcactggttctcaactggggcaattttccccccctgaggacatttggcatgkatggagacatttttggttgtcacgaatggaggcacattactggcatttagtggatagaggccagggatgctacccttcaattcccaggacagacccacaa

SEQ ID NO: 191763 - DNA, 201 bp, Homo sapiens
tcattttactggtttctttgcaatgtacaaatatgatagtttattgcatatgaccttatgtgacttcctttttaaaattcatggtttctgagattcatccrtgttgtgtgtttaactgtagttcattaggtttttactgtgtgtgaaattctgttgtgtgaatataccatagtcatcttttgtttgtttatttattttcag

SEQ ID NO: 191764 - DNA, 201 bp, Homo sapiens
tactaacttaacagttatggttaatcttctgttctttttgaaaaacatgacgtattcttgggaaattttcttatgatggtttacttcaatactaaatacayttcttagcaacattttaaaactgtgatattgtaaaattcaggtctctgaatcaataaagttaagtttctgttcatgaagtttctttatcaaaaagtctta

SEQ ID NO: 191765 - DNA, 201 bp, Homo sapiens
tgagagaacttctacaaaataactggcctgtaattttcgaaattgtaaaggccatgaaagtcagggaatagttaagaaacggttccagattaaaggaagcygaagaggcatggcaactaaatgcaatgtatgattctgaactggatccttttgttataaaggacattattggaataattggtgaaacttgaattggatctg

SEQ ID NO: 191766 - DNA, 201 bp, Homo sapiens
agggctataacatgactgtttaaaatgattaaagagataatataaggaacattaaccaaaaataaagaaaaagatactgtgaaaagggtttacgtccagcmccgtcttccctaggaagtgtttcttggactgtttattaaagctgtgcaaatcactatcatggcactgaaaacactgttcatggcattttatgccctagcc

SEQ ID NO: 191767 - DNA, 201 bp, Homo sapiens
aggttcacgccattctcctgcctcagcctcacgagtagctgggactacaggcgcccgccaccacgcccagctaatttttttgtatttttagtagagacggrgtttcaccgtgttagccaggatagtctcgatctcctgacctcgtgatccgcctgccttggcctcccaaagcgctggaattacaggcgtgagccactgcac

SEQ ID NO: 191768 - DNA, 201 bp, Homo sapiens
ctggaaataaaaacatataatgtatataaattatttcttttgattagccattcagtcagctatttctcatgagaaattcacattctgcccaacatcaaggraagaacccatggtgttcagaaaagaacgaagaaaagcgtaagctcctccttccctaaaagatataattttaggaggctaggtgcagtggctcacgcctgt

SEQ ID NO: 191769 - DNA, 201 bp, Homo sapiens
tgaatcgcttgaatcgggagaatcgcttgaacccgggatgtggagagctgagaccgcgccactgcactccagcctaggcaacagagcgagactccgtctcaaaaaaaaaaaaaaaaaaaaaaaagaagatataattttagggaattgtatggaagttgactattttaaaggatcagctgccacagaccaccggaagggcac

SEQ ID NO: 191770 - DNA, 201 bp, Homo sapiens
attcaataagtgccatgtaagtgtaacttttaaaaatcaaattatatttttctatggacataaataatttgagagatgcgactattatagtaatcctcttygctagctctgctggtggccattttaaatatctgtaaggtcttaatgttaattgggtggcacatttgtgattatgagagctaaggtttgaacttaggcagc

SEQ ID NO: 191771 - DNA, 201 bp, Homo sapiens
aatggccctattttccattagtatttttaaatctttagttaccatttcagtggggaaatctttgttgttgtttttccagtggtatatttaattccagggtractagccacatcttgctgcaaacatgattgatcacgacattttatacttctttttaatttcagttatatttcagtatacaactggtggtcagtaaccatt

SEQ ID NO: 191772 - DNA, 201 bp, Homo sapiens
gttttggccgggcgcgggggctcaacctctaatcccagtactttggaagactgaggccggcagatcacctgaggtcgggagtttgagatcagcctggccarcatggtgaaaccccgtctctactaaaaatacaaaaattagctgagtgtggtggcgcttacctataatcccagctactggggaggctgaggcagaagaatc

SEQ ID NO: 191773 - DNA, 201 bp, Homo sapiens
ttctgtaagtgtttgctcttattcttagctattatcaaaaaggtgtttaagcaaaaggggtcatgttactgtatctgtgctatggaacataattagctgaygcttagaaggtgaccctgagaggtgaggtccaagatagagagtcagccagggaattagtgaagtcgtctaggcaaaagctgagagggaaagcagagacat

SEQ ID NO: 191774 - DNA, 201 bp, Homo sapiens
tatttaaagattcattagaaagatataatccaaaaaaaaaagtggggggcaacctatggaatattttattgttgaaaactgaaatcagacattagtgatawaatggtgttcttgatattctaacaaatcttacctttatgttttagtcaaagaagtttggcagagatcacggagctaattcatattgctctccttgtacat

SEQ ID NO: 191775 - DNA, 201 bp, Homo sapiens
ccttgactgcctgctagaatagaagtccataacatcaggaaataataaatggttattactttctccttaattgaatcttttaaaagcctaaaatctctatygtgtaaaatggttacactgagatataaaagaaaaaacaagagtctagtttcttggtttgaattttgccttggttcaactataagtaagttacttaactct

SEQ ID NO: 191776 - DNA, 201 bp, Homo sapiens
cacaagaaaccttttgccatttaataagcttcttttatatttcaaaaatgcttattgtgtggttcaaatctgtcagtcctggatgattgttatgtaatgtmaatagtataattgctaagtattgtgtaattcttacagaaagccacagtttacttgaaccatttttgtgatgtttgtcttttcttcccacctgaaagggtt

SEQ ID NO: 191777 - DNA, 201 bp, Homo sapiens
tatggttatatctgttcagttatgataatttgtacgaaatgagctgttgcgttgtgttcagctctttgtggatggcaggccacagcgtgaactcacaaacrtacttagcagagaggttgagccttgaaataagttctgaagtctcactcccaacaggaggctgcataccatccagactaagcataatagccatacagtttt

SEQ ID NO: 191778 - DNA, 201 bp, Homo sapiens
ggcagatgacataggattgcatctgttccagctttcactgaagccaaaaagcattgactatatggataacaatagtaattctgataatagtaataactagygcatattgagcacatagtttgtgacaaggagtatagttagcgttttataagctaaatgtttatatttaggctttattataatcctatggggcaagtctca

SEQ ID NO: 191779 - DNA, 201 bp, Homo sapiens
accctgaccacctcctgtctctgcaaggcacagcactggacactgaaagacactgaatatttcttatgaataagaaatagtctttgacctcaaatgagtargtaaggaaacaatgtatgcatctagagtcttcctgacacttgctattgatgtaatttcctttctaaaactcttttgctggaacttaactactagagctat

SEQ ID NO: 191780 - DNA, 201 bp, Homo sapiens
tgcccttcaggctggctctgcgggtggatgctctgcactgtgggatagctggattcaattattgctcccagtttgtggtgtcagaagccacctgtgcaccrggagagcctgtatgtctttatgtcgaagatagagccctctgtccctatagaaaagcctgtttagtccattaaaactgttttaaagtggatctgaagggaa

SEQ ID NO: 191781 - DNA, 201 bp, Homo sapiens
ctctctgttgtaaactataattagataaataattaattaaatgtttattgaaacttatgaagtgatataaagaagtctagaccaggtgtggtggttcacasctgcaatcccagaactttgggaggccaaggtaggcagattgcttgagctcaggagtttgagaccaacctgggcaacatggtgaaaccccatctctacaaa

SEQ ID NO: 191782 - DNA, 201 bp, Homo sapiens
gtccagagggccagcgctagattggaggctgcaaaggccccgagctctgggaacccgccctatttattggtgatcaaacaaagaagcaggtggtgaggacrtgagggtaaacaggtgagggcatgaggaggtgagagtagaaaggtagtggtgcattaagtgtagctgtgacggtttagcacttcctttgacccatataga

SEQ ID NO: 191783 - DNA, 201 bp, Homo sapiens
tgactagattatttccaataatgttgccaattccggactagcatggaaattaatattgtatctgaatgtggcaggtaaggaagccgtcgtcagttctcaarcagagaataaaccaggttgaatacaatgtaatagttgaagtctgtaatcctttttccacaatttaaaatctgaaaagctcagaaaacagaatttttttag

SEQ ID NO: 191784 - DNA, 201 bp, Homo sapiens
tatttaattccagggtgactagccacatcttgctgcaaacatgattgatcacgacattttatacttctttttaatttcagttatatttcagtatacaactrgtggtcagtaaccatttctgaaaagttcctggcttgatttagtccctgctcaacaacccctgcaccctacccccattctactttctcttctctcttcctt

SEQ ID NO: 191785 - DNA, 201 bp, Homo sapiens
actagattatttccaataatgttgccaattccggactagcatggaaattaatattgtatctgaatgtggcaggtaaggaagccgtcgtcagttctcaagcrgagaataaaccaggttgaatacaatgtaatagttgaagtctgtaatcctttttccacaatttaaaatctgaaaagctcagaaaacagaatttttttagac

SEQ ID NO: 191786 - DNA, 201 bp, Homo sapiens
ccctaaatataaaatgtgagcaaaaaggtggttctaagtattaaaaagtcttttaatcacaaatcatcttctgcatttcctctccccaccctccccccatyagttcaaggaaccttatttgaagcattattttgtattttatggagctagaaattccaaaaaaggttaaaaaaatagctatgatagaatccagttagattt

SEQ ID NO: 191787 - DNA, 201 bp, Homo sapiens
aaaaattttggattctgaaagacatttggtttggtttcagggactttggatgagggatagtggacttgtccaagctggatggcccaggtatgtgacatagwttggtaggatggaataaactgaaggtaacaacatgcatcaactgtccccttcctctcaatacaacctctacccaatggttttattactgtttccctaact

SEQ ID NO: 191788 - DNA, 201 bp, Homo sapiens
ggtgacctgcctgctttggcctcccaaagtgttgggattacaggtgtgagccaccgcgcctagccaagaaattgattttggattacttaggcaaggaggarctaatcaggccttaggaagaatgagaactggggacgctctagggcagtcagtagcaggaatttacagacagtttctctagactacagcactgctgtcagg

SEQ ID NO: 191789 - DNA, 201 bp, Homo sapiens
cccagtcctgcttattcagccagtctattggacatgccagaaattaccatgtagatactgacctcaggccacatattttcaagtaaagtgaacaatgataygtaccactgtaagtgcttctcacagggaggctttctcctctcagctgattctcaggatcacccctgaatggagttgttatgcaacagtggtacacttgca

SEQ ID NO: 191790 - DNA, 201 bp, Homo sapiens
tattggacatgccagaaattaccatgtagatactgacctcaggccacatattttcaagtaaagtgaacaatgatatgtaccactgtaagtgcttctcacarggaggctttctcctctcagctgattctcaggatcacccctgaatggagttgttatgcaacagtggtacacttgcagctgtaacataatgctcaggtcttt

SEQ ID NO: 191791 - DNA, 201 bp, Homo sapiens
ttcttggccctgctgtccctcgaggatttaatgcaggtgggatgtgtgtgtggccctcgagccatatcaatgactgccacagctcctgtattctaaaggcwggtcacctcaggccctaaagttgtttcaagtctgggacagtttagtcttagaatagatatggcagtaataatacattttgggtcattttttccatggaaa

SEQ ID NO: 191792 - DNA, 201 bp, Homo sapiens
cagctcctgaactggttctgtgttcttccaccttcttgtcactgcttatctatttctttctcctaaaatacccttctttctattcccatgactccattccmgtcccgtctcctacttctgttccctactcagggaaatttgaccatctttcaggctcaatctgaatgctgcctctactgtgagggacacctctagcaacta

SEQ ID NO: 191793 - DNA, 201 bp, Homo sapiens
ctgtaacataatgctcaggtctttctttaaccagggagaggcattttcccctctgcaagcttgctggtcatagggcacttctcatgaagccataggtgtartttgagggagaggtggcatgtagcaggaatatggttgtaaggaatgtaagtgatctgatatgcaatttaattgtgccttcacagctcattttgggcttgc

SEQ ID NO: 191794 - DNA, 201 bp, Homo sapiens
atttctgggagctacattaaagtctgtagttcatactattccctcatcactctggggctctccctggccccctcccattttgtgccctctcagtttatcayacttcatctcttgtcacacctttgtctcatgtttcctccacatctggttgtgctttttttctgttattactgaacatcatctaataatacctaaaccatt

SEQ ID NO: 191795 - DNA, 201 bp, Homo sapiens
ctgaagagatagaaagactgggattcattgttatcagtcaaaatggctacagataatttcacaacctcggctgccacaggtgggcgaggcactgtggtgcwcattacagtcactcagggatccaggccaaggagcatctccagtgtgggctggtagctgtgcaagagggaaagctctctaaggactcacaggacagttaaa

SEQ ID NO: 191796 - DNA, 201 bp, Homo sapiens
ctaactgaggtgagagatgatgatggcctgaactaatgtagtggcaatgggaatgaggagtagaggataaacttgagagctctgaagagatagaaagactrggattcattgttatcagtcaaaatggctacagataatttcacaacctcggctgccacaggtgggcgaggcactgtggtgctcattacagtcactcaggga

SEQ ID NO: 191797 - DNA, 201 bp, Homo sapiens
actccaggtacccagaggaagaggagcaactagctccttagggccatcttcctagctcagtgcattccacccaggtggaatttggggagcttgttggggtsggggagacagccccagggggagatggtagatcaggttacctctgagaactgcagttggttcccctataattaaaggggagaaggtttgggaggctgaggc

SEQ ID NO: 191798 - DNA, 201 bp, Homo sapiens
cactatcaggcactctgtgcagtgttatgtagtccccccagcagtccgacaagggacttatattatccccacttagaactgagaacagttaaggccgggckcagtggctcacgcctgtaatctcagcactttgggaggctaaggtgggcagatcacctgaggtcaggagttcaagaccagcctgaccaatgtggtgaaacc

SEQ ID NO: 191799 - DNA, 201 bp, Homo sapiens
tcagttaaagttgatctctcatttctctcaatagctgtagtcctacatttgtgccctggttttgctgcttttcacagtttacccttaattaactcttgttytttgtgtttttttgtttttgtttttgttttgtttgttttttgagacagagtcgcactgcagcccccaggctggattgcaatggcgcgactttggcccact

SEQ ID NO: 191800 - DNA, 201 bp, Homo sapiens
tgagatgggaggattgcttgtgcacaggaggtagaggctacagtgaaccatcatgatccaccactgcactccagtctgggtgacagaggaaggccttttaraatctctttcagttaaagttgatctctcatttctctcaatagctgtagtcctacatttgtgccctggttttgctgcttttcacagtttacccttaattaa

SEQ ID NO: 191801 - DNA, 201 bp, Homo sapiens
gggctcagaagaagacatgggaaagatgtgggaaagtttggaacttcctagagacttgttgaatggctttgacaaaatgctgatagtgatatggacaatgmaatccaggctgaggtggtcttagatggaaatgagaaacttgttgggaactggagtaaaggtcactcttgctatgctttagcaaagagattggcagctttt

SEQ ID NO: 191802 - DNA, 201 bp, Homo sapiens
tgtctcaaaagaaagaaaaaaaaaacccacactgaggcagtcagcacccatttcatattgggaatagcaatttagtatcagtcaagtaccatcatctgtcrtagtaaattaatgccaatttgaataaattttgttttcaatttgtactttatttttttaattgacaaataataactgtacatattcatggggtacatagtg

SEQ ID NO: 191803 - DNA, 201 bp, Homo sapiens
tttggtcaggatggccttggctatttgggtcttttgtggttccatataaattttagggttttttttttttctgtttctgtgaagaatgttgcattgaatcygtaggttgcttttgggtagtatggatattttaacataactttaaaaatacttacgaatatgagtatacccggtcaacgtaggaaaaaactggggtggagc

SEQ ID NO: 191804 - DNA, 201 bp, Homo sapiens
ctgtttctgtgaagaatgttgcattgaatctgtaggttgcttttgggtagtatggatattttaacataactttaaaaatacttacgaatatgagtataccyggtcaacgtaggaaaaaactggggtggagcttttccatcctggatgatttttactatttcataagatgagttaaaaaaaaatttttttcctggaggacat

SEQ ID NO: 191805 - DNA, 201 bp, Homo sapiens
ctgattatttaaagtaaatgggacccaaagtcccatgaataatcaaaaacttggttaatagagtatgaccagagaataatgcacttggcttctgtggagawattaaagtacatgctgtgaattgctattgaggaaattgcgtgaaaagttacccttaaggtaccatgaggctgaagaaacagcctcaggtgcacaatatat

SEQ ID NO: 191806 - DNA, 201 bp, Homo sapiens
ccttagtcgcttttaagatggaaaaacaaggaatatcttacctagttaaaactgcagaagttgtattagatggaatgtaattaccagaagtgaagtgtgaycaggaagctaacacttttgctccagtgcacaatgctgtggggatcttaattccagtgactgtcctgcagccctaggtgcacatctcagactgttccagct

SEQ ID NO: 191807 - DNA, 201 bp, Homo sapiens
agaagtttaaatatttaccagagttttttcctaaaataaatgatacttttatgtacaagctaaagtgatcaagagtaaaatgatttcatagagctagaacrtttattgtgacaaaatgaaaaggatattcgggtgagccacatatcaatagttgcatgttcagattataatggctgtggtaacggtgttgtcattttatgt

SEQ ID NO: 191808 - DNA, 201 bp, Homo sapiens
taaaatgatttcatagagctagaacatttattgtgacaaaatgaaaaggatattcgggtgagccacatatcaatagttgcatgttcagattataatggctrtggtaacggtgttgtcattttatgtaggcttctactctctcagctttcaaaacattatagagctgatgttgagcagatctagattatatccatggaattt

SEQ ID NO: 191809 - DNA, 201 bp, Homo sapiens
aaccatcttgagcaatatagtgagaatgtgtctctacaaaaaaaaaaaatttaaattagctgggtgtggtggcaggtccctgtagtcccaggtacttgggrgctgagatgggaggattgcttgtgcacaggaggtagaggctacagtgaaccatcatgatccaccactgcactccagtctgggtgacagaggaaggccttt

SEQ ID NO: 191810 - DNA, 201 bp, Homo sapiens; identical to SEQ ID NO: 33090

SEQ ID NO: 191811 - DNA, 201 bp, Homo sapiens
tgttggcacttttacttttatctccacatctcttaactttccttttatattgatttatttatatttttcaactattgtatttatttaaaacaaactgacasgttcaagtacctgtcttcagaaaagccagcagctttttttttttttttttttaacaaccagtgatacctctagttggcttcaatgttagctgcagaaaat

SEQ ID NO: 191812 - DNA, 201 bp, Homo sapiens
gtttgatatcagtctaaccactctttcttcataggtgatcagctctttatggaaattgatacgatattctcattgactttgatatatttactttttacgawaatatattggtttttcctaatctctcttattttacatgttatgggcccatttatctttcatttgggacatttattgctatgatttccaaaatatttctac

SEQ ID NO: 191813 - DNA, 201 bp, Homo sapiens
atgtaaataaggtaaatattggaatgaatggtaagattaaaaggcaactcattctctctattataaaaatatttgtctgaacactatcaagaatccagatktgtgaaaacataatgctggaagtagaaacttctagagataaagacttgactgattagaaatatctaaaatctagaaacacagtgctatgagatttagtcc

SEQ ID NO: 191814 - DNA, 201 bp, Homo sapiens
gaagatttcattgtcttcctttctttcccatgttgaaatcacatttcttgtgaaatttttattgcttgtgacagagtggaaagaataggtaaagatcttargatgcttgagtctcatctcccaacttatgtacattgaagttgcctcaagcagaataactaggataatggggtgaggacacttcaagtctacattcccggt

SEQ ID NO: 191815 - DNA, 201 bp, Homo sapiens
cacacacacatataaatacacacatgtgcaggtcaaaacaaaaacaaaatgtggtcattaataagcacatctaaatcaaccctacagtgacacagaaatamtttttctattccattctttctaaaaatcaaatagaaatgttttaattttctctacttaaaaaaatttgattcctcttcagtcataaacagtttcacttaa

SEQ ID NO: 191816 - DNA, 201 bp, Homo sapiens
gaagggttgtgaattggagcaaacattagctttcactttgtgtcagtgtttaaaaacaacctctcactaaatctgacttttctttgttttgagctgtgtcrttgccaggtgtgaggtattgaaaaagagaatgtagattgcagcaagaccctttaagtcacaaccttttaaaagttgcctatatttaaggtgtacaacatg

SEQ ID NO: 191817 - DNA, 201 bp, Homo sapiens
gaatttgttttttctctattccattactatcattttctctcaattttatgttgtttttaaaagtttacagtgatttacttaggcttagccattatatatartttattcttattccatttttatttttacatttagctttcattttttacttcatatatttgcctttttttcctgaaaaataaaagcccttgttttcttcca

SEQ ID NO: 191818 - DNA, 201 bp, Homo sapiens
agccattatatataatttattcttattccatttttatttttacatttagctttcattttttacttcatatatttgcctttttttcctgaaaaataaaagcycttgttttcttccattttggtctactatatatattttctgaatatttacaactcttgtaactttttctaagaaatagcatgcctgtaatttcattgcaac

SEQ ID NO: 191819 - DNA, 201 bp, Homo sapiens
catatttttaaagagaatttgttttttctctattccattactatcattttctctcaattttatgttgtttttaaaagtttacagtgatttacttaggcttrgccattatatataatttattcttattccatttttatttttacatttagctttcattttttacttcatatatttgcctttttttcctgaaaaataaaagcc

SEQ ID NO: 191820 - DNA, 201 bp, Homo sapiens
ttgtatgatatctctggcaaatttctcattcatatcctgaatcgtttttctggttgctttgtgttgtttttcagtattcccttatatcttatcgaacttcyttaaaattgatattttgagttcttttctgggtttttgtaactttttaaaaatggggatcttttgccgaagaatgattgtgttcctctggaggagtcacat

SEQ ID NO: 191821 - DNA, 201 bp, Homo sapiens
cattcataattttatggtaaaacttgtgaatataaacaaagtataacttcttaaaactattcataaacaatgtgaaaaatagatacaatgtagtcttagcwtataaaaaaatcacagatatatgtgtctattcttttaaggaaaagtagcttttgaggatattttgtcaatataaacactgaataaattttaaaattcaaa

SEQ ID NO: 191822 - DNA, 201 bp, Homo sapiens
agtaggaaatggtaagttgaacatagcaatttagaaaatggggatagatgtttaaattacctcacaaactagaggatcactgggaataagcggagtagacwtttttggttttaattttgtttaatgttgcattattggaaagtaaaactaaataaaaatatcattataataaataaaccaattgtatagactgttagaaga

SEQ ID NO: 191823 - DNA, 201 bp, Homo sapiens
catgatgctatttcatgaaaagtttattgatggtggtctctagttaccattccataagtgtatgttaagtacaaatctttttatatttatattgttttgcycttcccttcttttgagatagtccatctcactaacttgttctaataggtatccacactactagtaatacattctattatatcctttatgcagctattagat

SEQ ID NO: 191824 - DNA, 201 bp, Homo sapiens
gttcaggccaccatgcccaactgttttgtttttgtttttatttgttttaattttttgtggagacgaggtctcactatgttgctcaggctggtcttgaactyctaggctcaagtgattctcccacttcagcctcccaaagtgctatgattacaggcatgagccactgcacctggtaatcttaatttttaaactgttctttct

SEQ ID NO: 191825 - DNA, 201 bp, Homo sapiens
ttttaatccaggagtccgagacaagactgtacaacatggcaaaaccttatctctacaaaaaatacaaaaattagttggatgtggtgatgcatacccgtggwccctgctacttgggaggctgaggtgggaggatcacttgagtccaggaggtcaaggctgcagtgagctatgatcatgccactgtactccagcctgggtgac

SEQ ID NO: 191826 - DNA, 201 bp, Homo sapiens
agacccctcctctacaaaaataattttaaaaattagctaggcataacgatgtatacctgtagtcccagctacttaggaggctgaggcaggaggattgcttragtctgggaggtcaaagctgcagtgagccatgattgcaccactgcactctagcctgggtgacagagtaagtaggactgacaaaaaaaaaaaaaaaaaaaa

SEQ ID NO: 191827 - DNA, 201 bp, Homo sapiens
aacttctaaacattcaactattccaaaaataagattttcctccagtaagttatcattctcacttgataataagataactaagataactccccaaataaacycattcttcatatcttgcaaatctaaaaagcaacgtgcatcccctttcctgatgcctacccctgcactgtgctgacgcttctttcctgtcttgcagctgtg

SEQ ID NO: 191828 - DNA, 201 bp, Homo sapiens
ctggagtgcagtggcaccatctcggctcactgcaacctctgccacctgggtttaagcaattttcctgcctcagcctcctgagtagctgggattacaggcgmatgccaccacaccccctaattgttgtatttttagtagagatggggtttcaccatattggccaggctggtcttgaactcctgacctcaagtgatctgcctg

SEQ ID NO: 191829 - DNA, 201 bp, Homo sapiens
ctatggatgttgggtgataatatgtcaatgtgggttcattgattgtaataaatgtacctctctgattggaatattgatagtggaagagactgtgcatgtgygggggcacagggtatatgggaaatgtgtattttctgctcaattttgctgtgaatctaaaacttttttttaaaaaaaggctattaaaatacatatatgcag

SEQ ID NO: 191830 - DNA, 201 bp, Homo sapiens
cagccttgcgtgggacaccacgagtcccacgtgtttacgtgtttaaggcactggcaagcaggggaatttggtttctgggaatgtgctgtctttgtgaaaaytgtgaaaagtcttccctgctacattgaaataatcataaaataataatagctaatgttgaacacttactatgtatcagacacatgctaagcattcaatatt

SEQ ID NO: 191831 - DNA, 201 bp, Homo sapiens
atagtgttcagaggtaagattaaaaaccacattactgaaatggagtctgcagcattcagcccattcaattggcattaaactggtaactggtgaaataagtrttgtgagttgaactttaattctaatatgcttggcaaagccgaatcacagtgtgcttcatctttgtggatacaaaattggaatgcactctgctatttaaaa

SEQ ID NO: 191832 - DNA, 201 bp, Homo sapiens
actgctttacttaggtcagcactgccttcaaccaccatgttcaacctgacatctaagaagatggcatttggggagagaggagagctgctgctttaaaaaagaagttcgaaaatcttgtgaatagagaatttatagtctattttaaagatcagctgaatggaccccatcatgcctggttaccttctcacagataaacaaata

SEQ ID NO: 191833 - DNA, 201 bp, Homo sapiens; identical to SEQ ID NO: 33093

SEQ ID NO: 191834 - DNA, 201 bp, Homo sapiens
gatgcctacccctgcactgtgctgacgcttctttcctgtcttgcagctgtgtgagccacacgccagccctgcggctctggatatcagccatgaagtgggaycccacagtctgtgctcttctcatggataagagcattttccagggcttcttgaatctctattttcagaacaaccctaatgcctttgactttgggctgtgct

SEQ ID NO: 191835 - DNA, 201 bp, Homo sapiens
attagaagcaacaacttctaaacattcaactattccaaaaataagattttcctccagtaagttatcattctcacttgataataagataactaagataactycccaaataaactcattcttcatatcttgcaaatctaaaaagcaacgtgcatcccctttcctgatgcctacccctgcactgtgctgacgcttctttcctgt

SEQ ID NO: 191836 - DNA, 201 bp, Homo sapiens
cacattgaggagctgctccaggctaagagggagggactggggtactctgtagaggttgttcttccagtttcttcaatcagatgagccacactgtcactctmgtgttgaaaggagggaagggacagaggtggccaggagtgtgaccctaaaagaggcagaggagacctcagagaaagagaagaagcattctcctaaccagag

SEQ ID NO: 191837 - DNA, 201 bp, Homo sapiens
cccagaactaaatatcctggttgagctttgaaagagccctgtcggctccatgacttcaaggtttcatccttgttttattcatttaaaaaatgttttagaarttatttgtctttatttttttatatctcctaaagtaaaatctgagaatgacccaagaatatttgtttcagagggttgtctttttgttggcaagcagtgaag

SEQ ID NO: 191838 - DNA, 201 bp, Homo sapiens
atcacaccactgcactccaacttgggtgacagagtcacactctgtctcaaaaaaaaaaaagaaaaaagaaaatatagtacatatacacaatggagtactayttggccatgaaaagaatgagatcctgtcatttgcagcaacatggatggaactggagatcatgttaagtgaaacaagccaggcacagaaagacaaacatca

SEQ ID NO: 191839 - DNA, 201 bp, Homo sapiens
ctttcgcttttttaaatttgcaggtacttttttggggctgtctttggctgcctgtctgttgagagtttgttttctttacagtccatctgatttacagtccmtccgggttgatttgtctcatttgggaatgagaaattttattttaatgcattaagtaatagtgttgagtggccaacaaatgtgaagtttgaaaagctcaaa

SEQ ID NO: 191840 - DNA, 201 bp, Homo sapiens
aatccataaaaatggaatgatttgttcctttcccctctaaccaaattttattcatacctggctataaatagcttctgttttgagttttcactggtcagacyctgctgttttagtgccatcctgttagcttccttgaacaaggtaatgccacctaacatgttttttcagacttccaggacaatgatcagggggacttctcta

SEQ ID NO: 191841 - DNA, 201 bp, Homo sapiens
cccctctaaccaaattttattcatacctggctataaatagcttctgttttgagttttcactggtcagaccctgctgttttagtgccatcctgttagcttcyttgaacaaggtaatgccacctaacatgttttttcagacttccaggacaatgatcagggggacttctctatgccacactgggaggtgtgaaggtgtaggct

SEQ ID NO: 191842 - DNA, 201 bp, Homo sapiens
tatttcactaaattgcttcccaaaagacttgtgttgtttgcccctcaccagcagtatgtgaaaatgctctttgccctatatccttttcactggtgggagasttcattcaaaaagatatttgtttgttgaataatatttgctgtggagatacactgtagttcctcattgttgacttaatgcatatttctttgatggccaggg

SEQ ID NO: 191843 - DNA, 201 bp, Homo sapiens
ggctggtctcaaactccttggctcaagcaatttaaggaagcttttcattagagtctaaaaatacatatttgaattgaatgacacagggttgacactagtcrgagaattaggaaaatgtgatatgcgtgttagttccagtgcaaaccggagagcccgttaacctccctgggactgggtttcctcctctgcacagcaaggctc

SEQ ID NO: 191844 - DNA, 201 bp, Homo sapiens
gcagcaggaggggcatgttctgctgcaggtcctccctctaaggctccttcccagaggagaaaatggtcttaaatatgccctaggtttgttccacaccctargtttgttttacagggaactgggtcatcacatggttagctcagcctcagctatatcattttagcagggatctgagatttgaaatcttaagaacctccattt

SEQ ID NO: 191845 - DNA, 201 bp, Homo sapiens
gagtgtaagctatttctttggtggcattattttcctagaaggcttaagtcgttaatcacccatgaccgaagatccaaacattttcaaagcagatccgatcrtatttcaggtggctgaaaatggatttggagtaggtttaatatggtctacttacaatttgtttcatgattgagtgggtcagtataataaaggtataaacat

SEQ ID NO: 191846 - DNA, 201 bp, Homo sapiens
ccagtaagttatcattctcacttgataataagataactaagataactccccaaataaactcattcttcatatcttgcaaatctaaaaagcaacgtgcatcscctttcctgatgcctacccctgcactgtgctgacgcttctttcctgtcttgcagctgtgtgagccacacgccagccctgcggctctggatatcagccatg

SEQ ID NO: 191847 - DNA, 201 bp, Homo sapiens
ccaggcactttgggaggccaaggagggaggatcacctgaggccaggagttcaagaccagcctgggcaacacagtgagactatgtttctactaaaaattaaracatgaactggtcatggcagtgcgggtctgtagtcccaccttctctggaggctgaggcgggagcatcttttgaacccaggagtttgagcttgcaatgagc

SEQ ID NO: 191848 - DNA, 201 bp, Homo sapiens
atcttgcaaatctaaaaagcaacgtgcatcccctttcctgatgcctacccctgcactgtgctgacgcttctttcctgtcttgcagctgtgtgagccacackccagccctgcggctctggatatcagccatgaagtgggaccccacagtctgtgctcttctcatggataagagcattttccagggcttcttgaatctctatt

SEQ ID NO: 191849 - DNA, 201 bp, Homo sapiens
aaaaaaattataatcccactacccagaaacaaccactgttattatcttggggacttttttgtttttgttttctgtccttttctgctatgtatattttatgyagttgaaacttggttactattatgatgtaaatattccccacaccccctgccattttattttgagacagggttttactctgttgcccaggctggaatgcag

SEQ ID NO: 191850 - DNA, 201 bp, Homo sapiens
ggtctgtaattaaggaagaagggggaaatgggtgcggtggcaggaatactctttgccagtagatgcttcattaacctggcagtaatggagctacttatccygtacttctagaataatcaggaaggcagttcttttacttcctttatttttgctccagaaactgacaaattcaccttatgggtgggtggttcctctattggc

SEQ ID NO: 191851 - DNA, 201 bp, Homo sapiens
tggatacaaaattggaatgcactctgctatttaaaatgtgttcttactcactagcgtttgtcattaactttgacgtatactgagctcttactatactgacratgccctggactatttgattcgatactcacaattcataaagtaggtattattggtgttctcattttgcaggtgaggaaagtgaaatccaaaaaggttaga

SEQ ID NO: 191852 - DNA, 201 bp, Homo sapiens
ataagggtttattctcacacatacggtggctcacacctgtgatcccagcacttggggaggctgaagcaggaggatcacttgagcctagaagtttaagaccrgcctaggcaacatagcaagacccctcctctacaaaaataattttaaaaattagctaggcataacgatgtatacctgtagtcccagctacttaggaggctg

SEQ ID NO: 191853 - DNA, 201 bp, Homo sapiens
aatatacgttgttatttctcttggatttgctagctgatttagcatgtttactaacatgccattttagttgtaaccaccattctttcacacttgggaactgrttatccctgactcaggatgcctcgttaagtgtattagtgctgttgctagttgggttacttccttcatcatccaattctgacagctgctaatatttgctgt

SEQ ID NO: 191854 - DNA, 201 bp, Homo sapiens
gcttatccaggaaggaagctgtttccatatgacccttatgaacgagctcgccaaaagatgttattggagctattttgtaaggtatattcaatttaaaaagycactcacactgtattttactttgcatgtctttcccaaacctcaacccattttaaagccaaatcattggtgaaactgttttgttttgataccatgtgatcc

SEQ ID NO: 191855 - DNA, 201 bp, Homo sapiens
aactaagataactccccaaataaactcattcttcatatcttgcaaatctaaaaagcaacgtgcatcccctttcctgatgcctacccctgcactgtgctgaygcttctttcctgtcttgcagctgtgtgagccacacgccagccctgcggctctggatatcagccatgaagtgggaccccacagtctgtgctcttctcatgg

SEQ ID NO: 191856 - DNA, 201 bp, Homo sapiens
caaagaggaccccactaacgagggttggagagggaggtttaattagagagattttgaggaactaagatgagatgaaatctgaggaaggagtaggagttatkgaggatggtttccaagtttgtggccggtaaatgtgatgcttttcactaagagtttgagggaagacacattttgtcaaatttgtggtgttgatgggatatt

SEQ ID NO: 191857 - DNA, 201 bp, Homo sapiens
aggcaaagtcaacaaatagcaaagggcgagcttttttttagcgggccctactgaaatgcggagcccttttccgagtcacgcctatgcatgaaacttctagsccagcgcagagtaatgtgaatgatggggctggtgaactggttccctcccagaatgtttaagggcacagccaacactactgaggccttacctgactgctcc

SEQ ID NO: 191858 - DNA, 201 bp, Homo sapiens
agttgctgtatcatgagaatgtttggccttattattttttaaagctgtacttacttaccaaagagtggccagtttagtgatgcaagagattcagaatgggraaaaaaaagtcagctttaccctagtcagttttgattaaactcctttgaaatccatgttggagtttaaatgcccattcttgagggattcttgatgtagagg

SEQ ID NO: 191859 - DNA, 201 bp, Homo sapiens
acttgggagttggagctcccacagccatcttgggatctgggcaagtgagcgagctccttcctcaccgggctgactagcctctcctttccctgtccccctcyatcgctgctctgcaggaagccagcccccagggccagtcccggaggggctgatccgcatctacagcatgaggttctgcccctattctcacaggacccgcct

SEQ ID NO: 191860 - DNA, 201 bp, Homo sapiens
taaggaattatttttttacctgctgaaattcaggatctcagcttatcagcatcagagccaaagccacgtctattatctcacgtaaacagaaaagctgtgcwagtcgcccctatatggctgggctgttggcaatgtatccttggcaactagtaagagtgttctcaaaaatttatgctggggaacgggggaagctcacaaatt

SEQ ID NO: 191861 - DNA, 201 bp, Homo sapiens
ggaggctgaagcaggaggatcacttgagcctagaagtttaagaccagcctaggcaacatagcaagacccctcctctacaaaaataattttaaaaattagcyaggcataacgatgtatacctgtagtcccagctacttaggaggctgaggcaggaggattgcttgagtctgggaggtcaaagctgcagtgagccatgattgc

SEQ ID NO: 191862 - DNA, 201 bp, Homo sapiens
cgtcaggaattcagcaacctggaagaggtacaaaaaggggtccctctcctggtcagctacagtggaggaagctaggcagggtcgctaacctggtcactctracaccagctttcacaggcttattctttctgcctttgataagtcagacttctgatcatctgattgcatgtttgccctcctctaacctggtctagaattatt

SEQ ID NO: 191863 - DNA, 201 bp, Homo sapiens
tttccacagacttctccactgagaacctgtgtcctctgattaggtcccacatttgaccaaggagtgcctggtagcgttgagatgtgggagagaatgcactratctgaaggcagccctgcgtcaggaattcagcaacctggaagaggtacaaaaaggggtccctctcctggtcagctacagtggaggaagctaggcagggtc

SEQ ID NO: 191864 - DNA, 201 bp, Homo sapiens
tcccacgtgtttacgtgtttaaggcactggcaagcaggggaatttggtttctgggaatgtgctgtctttgtgaaaactgtgaaaagtcttccctgctacaytgaaataatcataaaataataatagctaatgttgaacacttactatgtatcagacacatgctaagcattcaatatttctcatccagtttctgaatgaaac

SEQ ID NO: 191865 - DNA, 201 bp, Homo sapiens
agctttgataatgaaagaaaaaagaatggagaaattttaagatggtgtctttgaaaaggaatttttaaaaacctcaatgatattaacagctgacatatatygaacacttatgatgtgccaggcactgtcctagttactttgtaggagctaactcatttaatccaactgccctttgaagtgggtactgctatcgtatccatt

SEQ ID NO: 191866 - DNA, 201 bp, Homo sapiens
attttttttttgagacggagtctcgctctgtcacccaggctggagtgcagtggcaccatctcggctcactgcaacctctgccacctgggtttaagcaattytcctgcctcagcctcctgagtagctgggattacaggcgcatgccaccacaccccctaattgttgtatttttagtagagatggggtttcaccatattggcc

SEQ ID NO: 191867 - DNA, 201 bp, Homo sapiens
tcgctgctctgcaggaagccagcccccagggccagtcccggaggggctgatccgcatctacagcatgaggttctgcccctattctcacaggacccgcctcrtcctcaaggccaaagacatcaggtgagaagcgggaacccagagcccccgagcaaacccagcgcctcacaggagcccgggaatgtttaacatctggggcgc

SEQ ID NO: 191868 - DNA, 201 bp, Homo sapiens
cccccttgagtcttctttcctatgaggtgagcctacttcagggggaattatgaggaacaactgagataaggcatggaaaacatccgacacatcttactgcmggaaggaagatgatgatgttatgtattttatacaaaacttaaaccttaaaacactaattgcaaattttaacttttaaactgattgcttctgctttcaaga

SEQ ID NO: 191869 - DNA, 201 bp, Homo sapiens
cccgggaggttgaggctgcagtgagctgtgatcgatctactggactccagcctgagtgacagagcaagaccctatctaaaaaaaaaaaaaaaaaaaaaaaagaagaagaagaacacaggttggaatttgagggggcctgttaaataggatgctctttcctgccttagttttgaattaattgagaagataaaataataaggc

SEQ ID NO: 191870 - DNA, 201 bp, Homo sapiens
taaaccgcagtgtgtgcttccttgttaaaaacatatgtgcttttccactgctaacttcagacccacactttgcccgcatttctgcagatcagacccctagyccaggagcctcccgcagacttcagagcctgctgtcctcaccagcgcccccacatggccggtctgagagcaagtggagagtcacagtcacagtcacagtgc

SEQ ID NO: 191871 - DNA, 201 bp, Homo sapiens
cttctgggctcaagtgatctgcccacttcggcctcccaaattgctgtgattacaggcatgagccactgcgcctggccaattttttttttttttttttttttgcgacaaggtctttctctagagtgcagtggcatgttcacagcttagtgcagccttgacctcccagcctcaagtgatccttccacctcagcctccttagta

SEQ ID NO: 191872 - DNA, 201 bp, Homo sapiens
ctgaggctcaccttgtcttcaagtaatgggcagtgctggcctgaaggggagcctcctctgtccagggctcagcttatccttggaaggcttagcacattgargagctgctccaggctaagagggagggactggggtactctgtagaggttgttcttccagtttcttcaatcagatgagccacactgtcactctagtgttgaa

SEQ ID NO: 191873 - DNA, 201 bp, Homo sapiens
aattattgaggctgaaccaaagagttgaagactggagctctctcgaatgcctggtttggagatgtctgggattcgcttctcctaatgatcttgcttctctcgcgaaaactgcagatttcttcatcctccggttgaacgttcttggggagccgcggccgacgcgcctcgcactgatggccaccagggggagccccgcgcgct

SEQ ID NO: 191874 - DNA, 201 bp, Homo sapiens
caattattgaggctgaaccaaagagttgaagactggagctctctcgaatgcctggtttggagatgtctgggattcgcttctcctaatgatcttgcttctctcgcgaaaactgcagatttcttcatcctccggttgaacgttcttggggagccgcggccgacgcgcctcgcactgatggccaccagggggagccccgcgcgc

SEQ ID NO: 191875 - DNA, 201 bp, Homo sapiens
tggctgatgctctgggcgccggggctagttggcgggtaggatcacgtgcgaggggcaggccccgtctaggccccgcctccttgctgctgctgccgccgccwatcctggtccggttgcccgagttcccggaggtctctcgcgggacctctctcaccgccaccggtgggtccgttcggcctgcgttgtattggaagggaagag

SEQ ID NO: 191876 - DNA, 201 bp, Homo sapiens
ccacagtaccaagagatgggtgtaattattagccccattttataattaaggacactgagcacagagaggttaggaattcggttaaggtcccaagctagacygtttattctgatgccaaaactcatactcttaattgttaacatttaccatattctgttgtgacctgttaataccagatttgtattttcaagctgtagaatg

SEQ ID NO: 191877 - DNA, 201 bp, Homo sapiens
agcaagggggagcttttctggtgttattttgtcttgttttgttttttgccagctcctactctcgggcttccaaatctggggcgatgtctccccaggttaarttaccctagctcctgctccagatcgcttccccgtgccccgccagagcccagtagttcaaaaattaaatttggggcaaggggtgcgcgccagagcgcagct

SEQ ID NO: 191878 - DNA, 201 bp, Homo sapiens
ccgggaggttgaggctgcagtgagctgtgatcgatctactggactccagcctgagtgacagagcaagaccctatctaaaaaaaaaaaaaaaaaaaaaaaaraagaagaagaacacaggttggaatttgagggggcctgttaaataggatgctctttcctgccttagttttgaattaattgagaagataaaataataaggca

SEQ ID NO: 191879 - DNA, 201 bp, Homo sapiens
ctgaagctgttttctgttttgaaaagtagaaataatatgagttgcctgactgagcaattgtaggaatcaaggtaatctatggaaataatttagtcagtatkagtgagacacagaaaatatttttctttccttcatgatctgttaatcctacaaaatgcatttacaagcaattcccacatcagctcaattctggaaaattta

SEQ ID NO: 191880 - DNA, 201 bp, Homo sapiens
caggttcatgccattctcctgcctcagcctcccaagtagctgggactacaggcacccgccaccacgcccggctaatttctttttgtatttttagtagagayggggtttcactgtgttagccaggatggtctccatctcctgaccttgtgatccatctgcctcggcctcccaaagtgctgggattacaggcgtgagccacct

SEQ ID NO: 191881 - DNA, 201 bp, Homo sapiens
ctatatcttttcctggacttaaaatcctttcctcccaacactattaccagttttaaaggtcaagacaacgagtcaagctttggacttttaaagttcttcarccctactagctggtcactttgggcaaataatttcatttttctgaagctgttttctgttttgaaaagtagaaataatatgagttgcctgactgagcaattg

SEQ ID NO: 191882 - DNA, 201 bp, Homo sapiens
aggctctgtcattttaataaaagatatttagattcaagtattatttgttgagcagccattacgtgctatatcttttcctggacttaaaatcctttcctccyaacactattaccagttttaaaggtcaagacaacgagtcaagctttggacttttaaagttcttcaaccctactagctggtcactttgggcaaataatttca

SEQ ID NO: 191883 - DNA, 201 bp, Homo sapiens
caggccaccatgcccaactgttttgtttttgtttttatttgttttaattttttgtggagacgaggtctcactatgttgctcaggctggtcttgaactcctrggctcaagtgattctcccacttcagcctcccaaagtgctatgattacaggcatgagccactgcacctggtaatcttaatttttaaactgttctttcttct

SEQ ID NO: 191884 - DNA, 201 bp, Homo sapiens
ctattctgaagatttgcaaagattcttattcactagcaaaaaatgttaacactattattaaccaagaagttctggatagactggaattccaaaggccaaayagtacccagttataagctacataattaggctctgtcattttaataaaagatatttagattcaagtattatttgttgagcagccattacgtgctatatctt

SEQ ID NO: 191885 - DNA, 201 bp, Homo sapiens
tggtctagaattattctggaaaatctgatgaggagttggggaggacatgccatgaattgcttcctttcccagagtcaccccatctccctgagtagctctgyatggcttctgtagcttctgccaatgaggtcaaggtctgtaaaggttaggggttgtgtttggctgctgaagtctaactactgtaaattcatgttgtaaggg

SEQ ID NO: 191886 - DNA, 201 bp, Homo sapiens
attttctgtgtttgattttttttttaatgatgggaatgtatttctgtattaaatatgtaagttttaaaagtagaaaaaaacacttttttttttttttttttgggacggagtctcgctctgtcgcccaggctggagtgtagtggtgctatctcggctcactgcgagctccacctcccaggttcatgccattctcctgcctca

SEQ ID NO: 191887 - DNA, 201 bp, Homo sapiens
ccacaaaattcacccttttccagtgtacaattcactggcttttagtatattaagtgagttgtgcaactatcaccagtatttaatttcagagcgttttttttatcatcccccagaaaaactgctcacttgtaagctgtcattttccatttcttctcaatccctgtggctgtacgcagccactgatctgctttctgtctctat

SEQ ID NO: 191888 - DNA, 201 bp, Homo sapiens
tgtcctaaacactttatacatatccccaccacagtaccaagagatgggtgtaattattagccccattttataattaaggacactgagcacagagaggttasgaattcggttaaggtcccaagctagaccgtttattctgatgccaaaactcatactcttaattgttaacatttaccatattctgttgtgacctgttaatac

SEQ ID NO: 191889 - DNA, 201 bp, Homo sapiens
tctgggaggtcaaagctgcagtgagccatgattgcaccactgcactctagcctgggtgacagagtaagtaggactgacaaaaaaaaaaaaaaaaaaaaaaaaagccagaggtaggcagttcaggcctatcttgatggcttcttcatgacattatcaggaactgaagctttttctctttatgggctctgtcatccttagcac

SEQ ID NO: 191890 - DNA, 201 bp, Homo sapiens
ctgccctctctgggacttgggagttggagctcccacagccatcttgggatctgggcaagtgagcgagctccttcctcaccgggctgactagcctctcctttccctgtccccctccatcgctgctctgcaggaagccagcccccagggccagtcccggaggggctgatccgcatctacagcatgaggttctgcccctattct

SEQ ID NO: 191891 - DNA, 201 bp, Homo sapiens; identical to SEQ ID NO: 33112

SEQ ID NO: 191892 - DNA, 201 bp, Homo sapiens; identical to SEQ ID NO: 33114

SEQ ID NO: 191893 - DNA, 201 bp, Homo sapiens; identical to SEQ ID NO: 33115

SEQ ID NO: 191894 - DNA, 201 bp, Homo sapiens; identical to SEQ ID NO: 33116

SEQ ID NO: 191895 - DNA, 201 bp, Homo sapiens
gggcggggacctactgtcctttgggggtgctcttctacgtcccttgttggtgattggcaaggcctggtccttccaggtctctgggaggcagctcaccccarggtggcccacacctgttcctggcagggcgcctgggaatctagaacagtttagaggggaaagagccacagcttgggggatttcaacgtctgagtcgtctgc

SEQ ID NO: 191896 - DNA, 201 bp, Homo sapiens
ttccagcgtccttgccccagctgttccagctcagtctccaccaccttcttctctcccaggtggccataaaagacaagcaggaaggaattgagtaggggccrgagggggctctgctcggcctgtgagccccgttcctacctgtgcctgaccctccgctccaggtaccacaccgaggagagcggccggtcccagccatggccc

SEQ ID NO: 191897 - DNA, 201 bp, Homo sapiens
ggcatgaggctagaccctcacactgtctgtccctggacctcagacaactcctaaaagacccgcaagtgctatttgctggctacaaagtcccccaccccttrgagcacaagatcatcatccgagtgcagaccacgccggactacagcccccaggaagcctttaccaacgccatcaccgacctcatcagtgagctgtccctgc

SEQ ID NO: 191898 - DNA, 201 bp, Homo sapiens
cttctacgtcccttgttggtgattggcaaggcctggtccttccaggtctctgggaggcagctcaccccagggtggcccacacctgttcctggcagggcgcmtgggaatctagaacagtttagaggggaaagagccacagcttgggggatttcaacgtctgagtcgtctgctcaccaggaagcctctggggcctctgactcc

SEQ ID NO: 191899 - DNA, 201 bp, Homo sapiens; identical to SEQ ID NO: 33113

SEQ ID NO: 191900 - DNA, 201 bp, Homo sapiens
gcggggacctactgtcctttgggggtgctcttctacgtcccttgttggtgattggcaaggcctggtccttccaggtctctgggaggcagctcaccccagggtggcccacacctgttcctggcagggcgcctgggaatctagaacagtttagaggggaaagagccacagcttgggggatttcaacgtctgagtcgtctgctc

SEQ ID NO: 191901 - DNA, 201 bp, Homo sapiens
ccgggcggggacctactgtcctttgggggtgctcttctacgtcccttgttggtgattggcaaggcctggtccttccaggtctctgggaggcagctcaccccagggtggcccacacctgttcctggcagggcgcctgggaatctagaacagtttagaggggaaagagccacagcttgggggatttcaacgtctgagtcgtct

SEQ ID NO: 191902 - DNA, 201 bp, Homo sapiens; identical to SEQ ID NO: 33129

SEQ ID NO: 191903 - DNA, 201 bp, Homo sapiens
cgtcagggcgcgcccgcgcgtatgccgggccgtggcggcgtctcattcaaacggtccaatcagcggccgcgtcgccttccccgtcccccttcctctcttcytccccttttcagcccctccgttctttgagaaccctcccgacccccgcgggcccccattggccggcccgctacccagccctctccgccacttccctcgctt

SEQ ID NO: 191904 - DNA, 201 bp, Homo sapiens; identical to SEQ ID NO: 33132

SEQ ID NO: 191905 - DNA, 201 bp, Homo sapiens
gtggtcagttgggctgagacgggggatccaggagggtgcagacgagcttgatagtgacacaggtgggggctgcaagatgggcatcatctctgaggttttgrgggaggtcctgtggccccctaggaacccagccattcttgctcttttttttttctctctctaaacggagtcttgctctgtcgcctaggctggagtgcaata

SEQ ID NO: 191906 - DNA, 201 bp, Homo sapiens
agaattgcttcaacccaggaggcagagactgcagtgagccgagattgcaccaccgcactccagtctgggcaacagagtgagactctgtctcaacacccccrccactcccctcaacacacgcaacaaaatgtataaagagttcctacaaacgaataagaaaaaaacatgaaaaattggcaaaaacacttgaacaagcacttc

SEQ ID NO: 191907 - DNA, 201 bp, Homo sapiens
ccccccaaggggtattatgcattgtcaggagaccagaaagggttgtcacaactcgggggtgccactagcatctagtgggtggaggccaagggtgctgcccraatcctgcagcgtacgagatggctccatgacacagaatgacctggctgcggtgttgctgaggtggaggcatcctggtctaggctggtgctccaggctgct

SEQ ID NO: 191908 - DNA, 201 bp, Homo sapiens; identical to SEQ ID NO: 33133

SEQ ID NO: 191909 - DNA, 201 bp, Homo sapiens
tcccacagaccatcaagtgcctgctgatccaccctaaccccgagtctgcactcaacgaggaggcgggccgcctgctcttggagaactacgaggagtatgcrgctcgggcccgtctgctcacagagatccacgggggcgccggcgggcccagcggcagggccgaagccggtcgggccctggccagtggcactgaagcttcct

SEQ ID NO: 191910 - DNA, 201 bp, Homo sapiens; identical to SEQ ID NO: 33135

SEQ ID NO: 191911 - DNA, 201 bp, Homo sapiens
tcccaagtagctgggattacagacgtgcaccaccatgcccagctaattttttgtatttttagtagagatggggtttcaccatgttggccaggctggtctcraactcctgaccttgtgatccgcccgcctcagcctcccaaagtgctgggattacaggtgtgaggcaccgcgcttggctttttttttttttttttttggaaa

SEQ ID NO: 191912 - DNA, 201 bp, Homo sapiens; identical to SEQ ID NO: 33136

SEQ ID NO: 191913 - DNA, 201 bp, Homo sapiens
gtgaggcaccgcgcttggctttttttttttttttttttggaaacagagtttcgctcttgttgcccaggctggagtgcaatggcgcgatctccgcacactgyaacctccccatcccgggttcaagggattcttctgcctcagccttccgagtagctgggattacaggcatgcaccaccacgcctggctaatattgtattttt

SEQ ID NO: 191914 - DNA, 201 bp, Homo sapiens
tcctccttccaccgtgaccccaacctctcctgtcccctccctccaactctgtctctaagttatttaaattatggctggggtcggggagggtacagggggcmctgggacctggatttgtttttctaaataaagttggaaaagcagcttctgtgtctcacagatgccccaggaccgctgcatggtgccatgtggctctgggag

SEQ ID NO: 191915 - DNA, 201 bp, Homo sapiens
ttatacgggaagggctcagaatgctgctgtattaaatgcctcagtctgctataaaaagataccacaagctggatggcttagaactacagaaatgcatcgtyttacacctgcaggccagagggctgagatgaagggattgtcagggccaggctccctctgaggatgctaggggaaggatctccctcccagcttctgccaact

SEQ ID NO: 191916 - DNA, 201 bp, Homo sapiens
gtttatacgggaagggctcagaatgctgctgtattaaatgcctcagtctgctataaaaagataccacaagctggatggcttagaactacagaaatgcatcrtcttacacctgcaggccagagggctgagatgaagggattgtcagggccaggctccctctgaggatgctaggggaaggatctccctcccagcttctgccaa

SEQ ID NO: 191917 - DNA, 201 bp, Homo sapiens
cacaggaggcaaaccaacttttgatcatttattaaaacaaataagaggttaatctgtgggtaaaaaggccttgtttgtcagcagctcaggggatgccttcmagctgacaggcgctagcgcactttgaagtaggaagcatcaaatgggttctggagataagcaatagataaacaacgggagttaccacaagtgtcaagccag

SEQ ID NO: 191918 - DNA, 201 bp, Homo sapiens
agtttatacgggaagggctcagaatgctgctgtattaaatgcctcagtctgctataaaaagataccacaagctggatggcttagaactacagaaatgcatygtcttacacctgcaggccagagggctgagatgaagggattgtcagggccaggctccctctgaggatgctaggggaaggatctccctcccagcttctgcca

SEQ ID NO: 191919 - DNA, 201 bp, Homo sapiens
tgttttgagatctgatcttgggggccacatggtgactcaaaacaggagcacagttgtgggtccagtcttggtccttccactaataagatgggagacgttgsgtcagatcccttgcctgtgccaagcctgggttttcttagctgtggaatgaggttaaccaggaagtgcctcagtggccaatatgcattcaaggaagaagat

SEQ ID NO: 191920 - DNA, 201 bp, Homo sapiens
gggtggtcgcgtgccaggccagtgcttaccccgccttgtttgcagcccgaggccagctggttgcaggtgcagggctatgcatcaggggtcagggtgcacayacccctgcaggtcttggggctcctgagttgcttctggaaaggcccagatagggcctgactgcagctgccgaggggtggagcttctgggaaaaggatccct

SEQ ID NO: 191921 - DNA, 201 bp, Homo sapiens
agcgagcttggctttgtgaggaaccgagtgtgtccagggatgtggcagctgcagcgggcttggctttgtgaggaaccgagtgtgtccacgttgggggaacrtcatacttgatacacacgtttttatttgcacaaagaaaatgctatttttggagccagaattttcatgtctgatttatggtgattttcttaagaaccagaa

SEQ ID NO: 191922 - DNA, 201 bp, Homo sapiens; identical to SEQ ID NO: 33157

SEQ ID NO: 191923 - DNA, 201 bp, Homo sapiens
acctgcgccctgtggtttgggggctgtgccagggcagagggagtcctcttgtcccctgtgcacaacacagacagaaggctgggcccacccagtgggtggtsgcgtgccaggccagtgcttaccccgccttgtttgcagcccgaggccagctggttgcaggtgcagggctatgcatcaggggtcagggtgcacatacccctg

SEQ ID NO: 191924 - DNA, 201 bp, Homo sapiens
gaagcggtgtgggaagaggcggggtctgggccagctgctggtcctgctctcctccctcctctggcctctaggctcccaggactggtttggaacccgcgccrtgtgctctggaggctgtggcagggcaggtgcggcttggaacccgcgccatgtgctctgggggctgtggcagggcaggggcggcttggaacctgcgccctg

SEQ ID NO: 191925 - DNA, 201 bp, Homo sapiens
ctatcaaataaccgtcttgcgttcttcaagaatgccaataccatgaaagataaagaaaaactgaggatctgttccaggctaaaaggtacctacagagacayaacaactgaaaataatgcatgatctgggatgatcgtttgctccaatgtacatcattgggttaactggcgaaatctgaatgaggtccattagaaaaccgta

SEQ ID NO: 191926 - DNA, 201 bp, Homo sapiens
gtgaagattaaatgaagagtttatacgggaagggctcagaatgctgctgtattaaatgcctcagtctgctataaaaagataccacaagctggatggcttaraactacagaaatgcatcgtcttacacctgcaggccagagggctgagatgaagggattgtcagggccaggctccctctgaggatgctaggggaaggatctc

SEQ ID NO: 191927 - DNA, 201 bp, Homo sapiens
ctgggaggcagaggttgcagtgagctgagatcatgccattgcattccagcctgggtgacagagcgagagtctgtcagaaaaaaaaaaaaaaaaaaaaaaaaattaaatcagaaattccatgtagaattgtttctttttttaaacacagagtttgaacaactgactcttgacggacagaaccttccttctctcgtctgtgtg

SEQ ID NO: 191928 - DNA, 201 bp, Homo sapiens
cctgggaggcagaggttgcagtgagctgagatcatgccattgcattccagcctgggtgacagagcgagagtctgtcagaaaaaaaaaaaaaaaaaaaaaaaaattaaatcagaaattccatgtagaattgtttctttttttaaacacagagtttgaacaactgactcttgacggacagaaccttccttctctcgtctgtgt

SEQ ID NO: 191929 - DNA, 201 bp, Homo sapiens
acttttgttcacgggccaccaggaggcctgaggtcccaggtggacagaaatcaccacgatcccctcttggccccaaccaacatacgcacaggaggcaaacyaacttttgatcatttattaaaacaaataagaggttaatctgtgggtaaaaaggccttgtttgtcagcagctcaggggatgccttccagctgacaggcgct

SEQ ID NO: 191930 - DNA, 201 bp, Homo sapiens
acctgggaggcagaggttgcagtgagctgagatcatgccattgcattccagcctgggtgacagagcgagagtctgtcagaaaaaaaaaaaaaaaaaaaaaaaaattaaatcagaaattccatgtagaattgtttctttttttaaacacagagtttgaacaactgactcttgacggacagaaccttccttctctcgtctgtg

SEQ ID NO: 191931 - DNA, 201 bp, Homo sapiens
ctactgggtggggcagcctggggacagtaggggtggtggaggtgggccgccctgaatccccagttgggtcattgagtgaccaggccctcaggctgaaatgycccctccaggagagtatctcacagaggctggtggcctccctgccagagcagtgcactttctccacctgaccaggggactctggctactgtttatttaaaa

SEQ ID NO: 191932 - DNA, 201 bp, Homo sapiens
atactgatggcagtgaggcagacgaggaacactgctcattgctctgcctgcctcacttttgttcacgggccaccaggaggcctgaggtcccaggtggacaraaatcaccacgatcccctcttggccccaaccaacatacgcacaggaggcaaaccaacttttgatcatttattaaaacaaataagaggttaatctgtgggt

SEQ ID NO: 191933 - DNA, 201 bp, Homo sapiens
cccctgacattcaattcttctcatagaggacgaagacttctctatcttgctggcagctttagaaagtaggtgtgtggctgcggtgaggagctctgggctcrtcggggccactgagctgtgagctgcttgcctggtctgcagcatgttcctgtcctgggctactgggtggggcagcctggggacagtaggggtggtggaggt

SEQ ID NO: 191934 - DNA, 201 bp, Homo sapiens
ctgctcgccactgccctggcctctccccttctcactgcagacctgggaacccactcatccagggattggcaaactaaggctacaggccagtctcctgcttytgtaaatcaagtttcactgggacacaacacactcattaacttctgagttgtctacagccgcctttgagctacaatagcagaatcgcgttttgcaacagag

SEQ ID NO: 191935 - DNA, 201 bp, Homo sapiens
ggcctcccaaactgccaagattacagacgtgagccaccgcacctggcctcttttattattttttaatagagatgggggtcttgctatgttggccaggttgktcttgaaccttggcctcaagtgatcctcctgcctcagcctcccaaagtgctaggattacaggcatgagtcactgtgcctggcgtattttatttataatct

SEQ ID NO: 191936 - DNA, 201 bp, Homo sapiens
tttctttaaagaggcacctctggacctgcagcaccggctcttcatgaagctgggcagcacgcactctccgttcagggcccggtaggcctcccaccctcagytgccttctctcctgctcgccactgccctggcctctccccttctcactgcagacctgggaacccactcatccagggattggcaaactaaggctacaggcca

SEQ ID NO: 191937 - DNA, 201 bp, Homo sapiens
tagatagaatgttctccttcctcttcatcctaatgccaggagcaactttggtggtgcgttccccacacctgccccctttgccaaagctccaggttccagarccttcctttctttcttctcttctgctttaaggcttgcttaccctgagttcaagatccttacagccttgttagataaatggctacataagatgaccggtta

SEQ ID NO: 191938 - DNA, 201 bp, Homo sapiens
actgtgcccaactaatttttttgtatttttagtagagacaggtttcaccatgttggccaggctggtcttgatctcctgacctcaagtgatccactcgcctyggcctcccaaactgccaagattacagacgtgagccaccgcacctggcctcttttattattttttaatagagatgggggtcttgctatgttggccaggttg

SEQ ID NO: 191939 - DNA, 201 bp, Homo sapiens
agcaaggccctgtctctaaaagtaagagaagagaagacagatgaagcaaagtgggccaaaacgtagaaaaaggaaattgctctgttttagatgaaggattrtgaaacaaaattttcaaaagcagcaatgaaagacctgtctaccacagtgtagccctcagcaaaaccacaagtgggcagactctgactctcccacacccct

SEQ ID NO: 191940 - DNA, 201 bp, Homo sapiens; identical to SEQ ID NO: 33140

SEQ ID NO: 191941 - DNA, 201 bp, Homo sapiens; identical to SEQ ID NO: 33142

SEQ ID NO: 191942 - DNA, 201 bp, Homo sapiens
tgctgcagacatcatggataaaaagaagctaaaatgaagacaataacagcagcacttatgggcggggcggtagtggtgaagattaaatgaagagtttataygggaagggctcagaatgctgctgtattaaatgcctcagtctgctataaaaagataccacaagctggatggcttagaactacagaaatgcatcgtcttaca

SEQ ID NO: 191943 - DNA, 201 bp, Homo sapiens; identical to SEQ ID NO: 33146

SEQ ID NO: 191944 - DNA, 201 bp, Homo sapiens
acctctctgtgctgcagacatcatggataaaaagaagctaaaatgaagacaataacagcagcacttatgggcggggcggtagtggtgaagattaaatgaaragtttatacgggaagggctcagaatgctgctgtattaaatgcctcagtctgctataaaaagataccacaagctggatggcttagaactacagaaatgcat

SEQ ID NO: 191945 - DNA, 201 bp, Homo sapiens; identical to SEQ ID NO: 33149

SEQ ID NO: 191946 - DNA, 201 bp, Homo sapiens
caaattactgaacctctctgtgctgcagacatcatggataaaaagaagctaaaatgaagacaataacagcagcacttatgggcggggcggtagtggtgaarattaaatgaagagtttatacgggaagggctcagaatgctgctgtattaaatgcctcagtctgctataaaaagataccacaagctggatggcttagaacta

SEQ ID NO: 191947 - DNA, 201 bp, Homo sapiens; identical to SEQ ID NO: 33150

SEQ ID NO: 191948 - DNA, 201 bp, Homo sapiens
accatgagcaaattactgaacctctctgtgctgcagacatcatggataaaaagaagctaaaatgaagacaataacagcagcacttatgggcggggcggtaktggtgaagattaaatgaagagtttatacgggaagggctcagaatgctgctgtattaaatgcctcagtctgctataaaaagataccacaagctggatggct

SEQ ID NO: 191949 - DNA, 201 bp, Homo sapiens
tcctgataatgtgccaaagacaaccacaggcagacatactgatggcagtgaggcagacgaggaacactgctcattgctctgcctgcctcacttttgttcaygggccaccaggaggcctgaggtcccaggtggacagaaatcaccacgatcccctcttggccccaaccaacatacgcacaggaggcaaaccaacttttgatc

SEQ ID NO: 191950 - DNA, 201 bp, Homo sapiens; identical to SEQ ID NO: 33152

SEQ ID NO: 191951 - DNA, 201 bp, Homo sapiens
agtggggttttattatctcaagtgaccatgagcaaattactgaacctctctgtgctgcagacatcatggataaaaagaagctaaaatgaagacaataacarcagcacttatgggcggggcggtagtggtgaagattaaatgaagagtttatacgggaagggctcagaatgctgctgtattaaatgcctcagtctgctataa

SEQ ID NO: 191952 - DNA, 201 bp, Homo sapiens; identical to SEQ ID NO: 33155

SEQ ID NO: 191953 - DNA, 201 bp, Homo sapiens
aggcatgagaggttccctagagtggggttttattatctcaagtgaccatgagcaaattactgaacctctctgtgctgcagacatcatggataaaaagaagmtaaaatgaagacaataacagcagcacttatgggcggggcggtagtggtgaagattaaatgaagagtttatacgggaagggctcagaatgctgctgtatta

SEQ ID NO: 191954 - DNA, 201 bp, Homo sapiens; identical to SEQ ID NO: 33158

SEQ ID NO: 191955 - DNA, 201 bp, Homo sapiens
cctactaaaaatacaaaaattagctgggctttgtggtgggtgcctgaaatcccagctactccggaggctgaggcaggagaatcacttgaacccgggaggcraggtcgcagtgagctgagattgcaccaaggcgctccagcctgggcgacagagggagaccctgtctcaataaataaagaaagaaataaaaataaattgagg

SEQ ID NO: 191956 - DNA, 201 bp, Homo sapiens; identical to SEQ ID NO: 33160

SEQ ID NO: 191957 - DNA, 201 bp, Homo sapiens
aggtggatcacctgaggtcaggagttcgataccagcccagccaacatggtgaaaccctgtctctacttaaaaatacaaaaattagccaggcttacgggtgygtgactataatcccagctacgcgggaggctgaggtaggagaatcgcttgattcctggaggcagaagtagcagtgagctgagatcacgccactgcactcca

SEQ ID NO: 191958 - DNA, 201 bp, Homo sapiens; identical to SEQ ID NO: 33161

SEQ ID NO: 191959 - DNA, 201 bp, Homo sapiens
gccccaggctccgcacctcatcccaggtgcccccctctgccctgccctagactcacctaaagctgtactgcccagagtcatggcctcaggccacatgtggstactgggcacttgagatgtggccatcttaattgagatatgctgttagtgtaaaatatacactagatttccaagccttcataatcaaaaaaagaaaaaaaa

SEQ ID NO: 191960 - DNA, 201 bp, Homo sapiens
cctgggttttatggaaagaaaatgccctcaccaaagggtgctaaacaaggccccaggctccgcacctcatcccaggtgcccccctctgccctgccctagamtcacctaaagctgtactgcccagagtcatggcctcaggccacatgtggctactgggcacttgagatgtggccatcttaattgagatatgctgttagtgta

SEQ ID NO: 191961 - DNA, 201 bp, Homo sapiens; identical to SEQ ID NO: 33162

SEQ ID NO: 191962 - DNA, 201 bp, Homo sapiens
cccttacatccccagaccccaaaatggagttgtcacaggatggcagtctgaaatccttgtgatgtccagctggcagaagggaatttggatgagtagggctrgccaacttctggtattgctggtgggtcctgtcattgtgtgggtgactccttgcacccctggcccttcataggacgaaattctgggagggttcttgggaaa

SEQ ID NO: 191963 - DNA, 201 bp, Homo sapiens
gcgttccccacacctgccccctttgccaaagctccaggttccagagccttcctttctttcttctcttctgctttaaggcttgcttaccctgagttcaagayccttacagccttgttagataaatggctacataagatgaccggttaaccagagcgagtatggctgatgatggcttctgcaatataatgaaatgaacctgct

SEQ ID NO: 191964 - DNA, 201 bp, Homo sapiens
atgagtgtcatgctgtggcctcactccacccagcatagacgggtgtttggaagggtggagttagaggagattctagaagcagtagccccagcaaaagttgmgcccttggcccctgctcaggagccggcccctggatgggattcagggatgtgagcctctcgtgtgagctgagctgagggaatgtcgggatcaaatctggtg

SEQ ID NO: 191965 - DNA, 201 bp, Homo sapiens
ataattttatttatttatttatttatttattttgagacagaatcctgctctgtcaccctggctggagtgcggtggtgcaatcttggctcactgtcacttcygcctcccgggttcaagcaattgtcctacctcagcctcccgagtagctgggattacaggtgcccaccactgtgcccaactaatttttttgtatttttagta

SEQ ID NO: 191966 - DNA, 201 bp, Homo sapiens
agtgtgtgtgtgtatatatatagagatatatataattttatttatttatttatttatttattttgagacagaatcctgctctgtcaccctggctggagtgyggtggtgcaatcttggctcactgtcacttccgcctcccgggttcaagcaattgtcctacctcagcctcccgagtagctgggattacaggtgcccaccact

SEQ ID NO: 191967 - DNA, 201 bp, Homo sapiens; identical to SEQ ID NO: 33147

SEQ ID NO: 191968 - DNA, 201 bp, Homo sapiens
tatgtctatatctacacacaaaaatacacatatatgtagtgtgtgtgtgtatatatatagagatatatataattttatttatttatttatttatttatttwgagacagaatcctgctctgtcaccctggctggagtgcggtggtgcaatcttggctcactgtcacttccgcctcccgggttcaagcaattgtcctacctca

SEQ ID NO: 191969 - DNA, 201 bp, Homo sapiens; identical to SEQ ID NO: 33148

SEQ ID NO: 191970 - DNA, 201 bp, Homo sapiens; identical to SEQ ID NO: 33151

SEQ ID NO: 191971 - DNA, 201 bp, Homo sapiens; identical to SEQ ID NO: 33153

SEQ ID NO: 191972 - DNA, 201 bp, Homo sapiens; identical to SEQ ID NO: 33156

SEQ ID NO: 191973 - DNA, 201 bp, Homo sapiens
aggattgcttgagcccaggaggtcaaggctgcagtgacctatgatcacatcactgcactcctgcctggtccacagagcaaggccctgtctctaaaagtaaragaagagaagacagatgaagcaaagtgggccaaaacgtagaaaaaggaaattgctctgttttagatgaaggattgtgaaacaaaattttcaaaagcagca

SEQ ID NO: 191974 - DNA, 201 bp, Homo sapiens; identical to SEQ ID NO: 33159

SEQ ID NO: 191975 - DNA, 201 bp, Homo sapiens
caggaggattgcttgagcccaggaggtcaaggctgcagtgacctatgatcacatcactgcactcctgcctggtccacagagcaaggccctgtctctaaaartaagagaagagaagacagatgaagcaaagtgggccaaaacgtagaaaaaggaaattgctctgttttagatgaaggattgtgaaacaaaattttcaaaagc

SEQ ID NO: 191976 - DNA, 201 bp, Homo sapiens
catgaagaaaaccgcctggtctttgaggactcagaggaactggcagctcagctgcaggtagccatgtctgccaccacgccagggtggacagggttctggaractggcaccgagccatgctccctgatccctgtttcacacagccagggtgggaccatgcggggtctggcggaaaagctagggagggagcagaagtcacaga

SEQ ID NO: 191977 - DNA, 201 bp, Homo sapiens
tagtgtcttctccaggaaactctcgggctccttttgttctctctgcagtttacatgagctggtgaaacatgaagaaaaccgcctggtctttgaggactcaraggaactggcagctcagctgcaggtagccatgtctgccaccacgccagggtggacagggttctggagactggcaccgagccatgctccctgatccctgtt

SEQ ID NO: 191978 - DNA, 201 bp, Homo sapiens
tctaagaaccacctcccagaagccacacaccctgttccaacccccagcctggcttgagcgtggggtgggtgggagcccagctgggcaccccaggggtctaktgtcttctccaggaaactctcgggctccttttgttctctctgcagtttacatgagctggtgaaacatgaagaaaaccgcctggtctttgaggactcagag

SEQ ID NO: 191979 - DNA, 201 bp, Homo sapiens
ttatacccttcagatgccaaatctaagaaccacctcccagaagccacacaccctgttccaacccccagcctggcttgagcgtggggtgggtgggagcccasctgggcaccccaggggtctagtgtcttctccaggaaactctcgggctccttttgttctctctgcagtttacatgagctggtgaaacatgaagaaaaccgc

SEQ ID NO: 191980 - DNA, 201 bp, Homo sapiens
cacattttgaggtactgggggtcaggactccaagaagtcttttgtgggagaggggatgcaattcaacccacaacagtgccctgctctgtgaaatgttcacytttatgaataagacgacctccacgagttgttttcttcaaaggtatgaggcagagaccagtgaggggcaacctgagggtggggaacctaaatttgctgtgg

SEQ ID NO: 191981 - DNA, 201 bp, Homo sapiens
ttaaaaatttttttctgaatgggcatggtggctcacacctgtaatcctagaactctgggaggccgaggcaggcagatcacctgaggtcaggagtttgagaycaacctggccaacatggcgaaacctgtctctactaaaaatacaaaaattagctaggtatggtggtgggcgcctgtaatcccagctacttgggaggctgat

SEQ ID NO: 191982 - DNA, 201 bp, Homo sapiens
cctctggctaaccccaaaccccttctagatagaatgttctccttcctcttcatcctaatgccaggagcaactttggtggtgcgttccccacacctgccccytttgccaaagctccaggttccagagccttcctttctttcttctcttctgctttaaggcttgcttaccctgagttcaagatccttacagccttgttagata

SEQ ID NO: 191983 - DNA, 201 bp, Homo sapiens
tcagggccaggctccctctgaggatgctaggggaaggatctccctcccagcttctgccaactccttatcttgtggagcagaagtccagtcttcacgtggtyttctccctgtgtgcatctgtgtccaaaatttcccctttccatatatctatgtctatatctacacacaaaaatacacatatatgtagtgtgtgtgtgtata

SEQ ID NO: 191984 - DNA, 201 bp, Homo sapiens
agggctgagatgaagggattgtcagggccaggctccctctgaggatgctaggggaaggatctccctcccagcttctgccaactccttatcttgtggagcaraagtccagtcttcacgtggtcttctccctgtgtgcatctgtgtccaaaatttcccctttccatatatctatgtctatatctacacacaaaaatacacata

SEQ ID NO: 191985 - DNA, 201 bp, Homo sapiens
gagcatccagcacagaaggtacaaaccttccttaaggctctctcctcaaatcggtttgaccattttgatgtgcaccccccccaggcttttatacccttcaratgccaaatctaagaaccacctcccagaagccacacaccctgttccaacccccagcctggcttgagcgtggggtgggtgggagcccagctgggcacccca

SEQ ID NO: 191986 - DNA, 201 bp, Homo sapiens
aatgtcgggatcaaatctggtgtcctagaaaagtcatcttttatgtgctgaaccagtccccagggggttgcctttacttgttccttggccatggaattaaraaaaacatgcaaaaataattcttcagtccttgaagagcatccagcacagaaggtacaaaccttccttaaggctctctcctcaaatcggtttgaccatttt

SEQ ID NO: 191987 - DNA, 201 bp, Homo sapiens
gtggtgggtttgaatcagttaaatgagtgtcatgctgtggcctcactccacccagcatagacgggtgtttggaagggtggagttagaggagattctagaascagtagccccagcaaaagttgagcccttggcccctgctcaggagccggcccctggatgggattcagggatgtgagcctctcgtgtgagctgagctgaggg

SEQ ID NO: 191988 - DNA, 201 bp, Homo sapiens
cacgtggtgggtttgaatcagttaaatgagtgtcatgctgtggcctcactccacccagcatagacgggtgtttggaagggtggagttagaggagattctasaagcagtagccccagcaaaagttgagcccttggcccctgctcaggagccggcccctggatgggattcagggatgtgagcctctcgtgtgagctgagctga

SEQ ID NO: 191989 - DNA, 201 bp, Homo sapiens
cagtctgctataaaaagataccacaagctggatggcttagaactacagaaatgcatcgtcttacacctgcaggccagagggctgagatgaagggattgtcmgggccaggctccctctgaggatgctaggggaaggatctccctcccagcttctgccaactccttatcttgtggagcagaagtccagtcttcacgtggtctt

SEQ ID NO: 191990 - DNA, 201 bp, Homo sapiens
ccaagctcacgtggtgggtttgaatcagttaaatgagtgtcatgctgtggcctcactccacccagcatagacgggtgtttggaagggtggagttagaggarattctagaagcagtagccccagcaaaagttgagcccttggcccctgctcaggagccggcccctggatgggattcagggatgtgagcctctcgtgtgagct

SEQ ID NO: 191991 - DNA, 201 bp, Homo sapiens
tacttttgcaccaacccagtatgaaaaaaaaaaagcaccttaaataacagaacttcactcggggcttttgctcctagagtagaattggcgggaattgcctrcaggcttacatggttttctttgtttctttctctcccaccatgtcccttttggccaagctcacgtggtgggtttgaatcagttaaatgagtgtcatgctgt

SEQ ID NO: 191992 - DNA, 201 bp, Homo sapiens
cctggacctgcccatgaaggtggtggacatgttcaggtgctgtttgcctgcgtgtgccgtgaacttcaagtggtaggagcagaacccgaattttttctggkgatagcttcacagatccaccgctgagggggaagcagtgcagagtgagctgcccacagtgaggccctgcccctcggtcagtccagcacacactggaggcca

SEQ ID NO: 191993 - DNA, 201 bp, Homo sapiens
aggctcagggaggaggcggggccttatgcagggggaacaggggtgggcggggtgtaccttttctgaaaaggtggctctggaggccacttggggacaggacmtgggctctagctgaactcccgggagaaggctacttcctggtgtgccagcccctccctgccaggtggccccagaggccctttaccaaggggtttgaggaag

SEQ ID NO: 191994 - DNA, 201 bp, Homo sapiens
gggagtattacagccgcctcatccaccagaagcatttccagcacatccaggtctgcatcccctggctggagggccgaggactacccccgcttctaggtgasaggccagcaggaggctcagggaggaggcggggccttatgcagggggaacaggggtgggcggggtgtaccttttctgaaaaggtggctctggaggccactt

SEQ ID NO: 191995 - DNA, 201 bp, Homo sapiens
gggacagagacgggttcatggcagtgtctgctcttctctgtgaaggcaaagggcctctgagggagtattacagccgcctcatccaccagaagcatttccarcacatccaggtctgcatcccctggctggagggccgaggactacccccgcttctaggtgagaggccagcaggaggctcagggaggaggcggggccttatgc

SEQ ID NO: 191996 - DNA, 201 bp, Homo sapiens
tggcccctgctcaggagccggcccctggatgggattcagggatgtgagcctctcgtgtgagctgagctgagggaatgtcgggatcaaatctggtgtcctaraaaagtcatcttttatgtgctgaaccagtccccagggggttgcctttacttgttccttggccatggaattaagaaaaacatgcaaaaataattcttcagt

SEQ ID NO: 191997 - DNA, 201 bp, Homo sapiens
acaggcatgagtcactgtgcctggcgtattttatttataatctttttaatagagataggagtctccctatgtctgccaggttggtcttgaaacttggcctmaagtgatcctcttgcctcagcctcccaaagtgctagggttacaggcatgagccactgcacctggccaatttcccctttccataaggacacgcattatact

SEQ ID NO: 191998 - DNA, 201 bp, Homo sapiens
ggagcccagctgggcaccccaggggtctagtgtcttctccaggaaactctcgggctccttttgttctctctgcagtttacatgagctggtgaaacatgaaraaaaccgcctggtctttgaggactcagaggaactggcagctcagctgcaggtagccatgtctgccaccacgccagggtggacagggttctggagactggc

SEQ ID NO: 191999 - DNA, 201 bp, Homo sapiens
caccagggtttggatccagctcgagtcaacgtccctgtcattggtggccatgctgggaagaccatcatccccctgatctctcaggtacacgcatatgaccytgtgaggggcttcgaggtcaggattccctttaccaggccctgctttgaggtgatcccggtagactggagaaggcctggccacgtgccaggttttggaagg

SEQ ID NO: 192000 - DNA, 201 bp, Homo sapiens
tccccagcttgacctgcagggccttgtgctcatttaacagcagccacctcactgctccttcctggcggagcctgggtcctggtgtctgaggatgaggatcrattggggtgaaggggcagggaccatgatgtcactgagaggcatggatgccagcaggcatgcagagctcgtgctcctggcctctaagggtcctgcgttccc

SEQ ID NO: 192001 - DNA, 201 bp, Homo sapiens
gtgagatactggagcccgagatgacagatctgactcaccaggagggttggagtctttcgcaacgtacgtaaccccttccacctcttgttaggcagctcctygtcctgcctgaggctccagccacaagtttgctgcctggatgaatcttctctgattccccacccctgcagggagttgattgccgcaaccccatctgccctc

SEQ ID NO: 192002 - DNA, 201 bp, Homo sapiens
acttataggtatatgtactaatatatacattacaatataaactcaagtagaaattttaaaacaaaccataacacgttataaagtgttaaaacttataaatraaggcagtgttaacatatgtcggttttcaacacagttgccaagcagtgtgctgttgatagccactctgccacccagcaaaggtcagcgggtctggaagac

SEQ ID NO: 192003 - DNA, 201 bp, Homo sapiens
tttagtagagacagggtttctccatgttggtcaggctggtctcaaactcccgacctcaggtgatgcgcccatctcagcctcccaaagtgctgggattaaaygcgtgagccaccacgcctagctggatcctgtatctttaacagtaaaagcgtaggaagcacatagccccaatgtatttacttataggtatatgtactaata

SEQ ID NO: 192004 - DNA, 201 bp, Homo sapiens
gctggaatgcaatggcgccatcatggctcacggcagcctcaactcctgggctcaagtgatcctcccacctcagccttctgagtagctgggactacaggtgyataccaccatgccagcctgagcacgagagtgaaatgattaagactttgattttgggaaagcatgctttggaggtgttgctgagtacctaagttagataac

SEQ ID NO: 192005 - DNA, 201 bp, Homo sapiens
taggcccttgagccaggggaagcagtaggagggaattgagttgaggtgaggactgaggctgttgccacacaaactgtgctcagtttctgcaggtgagacgrtggcagagatgcctgtttttgccaatgtcagacatttacctacttagtgacacctgattcaggtgactgtgacaatgttttcagtcctttaccaacctgc

SEQ ID NO: 192006 - DNA, 201 bp, Homo sapiens
gttgggagggtggttgagctgccaagttcttcatgtcctgacttgatgtctctgataagaaggaggtggcagaagatggttctagaagtttacatttagtsaacacaagtgccatttgggaccagggatggagggaggggggcaggataaatggacagttgagtttgtggaacccatggaacgcctaacagaactgggaat

SEQ ID NO: 192007 - DNA, 201 bp, Homo sapiens
tcttctagaatggtggttcttaaactctgcagtgtgtcagaatcaccagaaagctaataaaaaacagacgtctgggttcattgaagaagcttaagactgcgggggggggggggtccgcatttttaccaggtgaatctaattaaacctaattttgagaacccaggaggtgctcgcattgccttttaattacgacgcccaaga

SEQ ID NO: 192008 - DNA, 201 bp, Homo sapiens
tattgtagcaaatttccctgaaatctttgaaaacatactttttccttcagatgataggagtaaacgaaatagtaatatttagagtctttcagcacaggacrttttctttcctggccttcagtgccttctgatcaaggagtttgggctggcacagtgggtcactcctgtaatcccagtactttgggaggccaaggtgggtgg

SEQ ID NO: 192009 - DNA, 201 bp, Homo sapiens
actttgggaggccaagtcaggaggattgcttgagtccaggagttcaagaccagcccaggcaacatggcgagacccctatctcaacaaaaagtccaaaaatyagctgggcgtgatagtgcacacctgtggtcccagctacttgggaggctgaggtgggaggattacttgagctcaggaggttgaggctacagtgagccctga

SEQ ID NO: 192010 - DNA, 201 bp, Homo sapiens
gtgtggaggtcgttggagtcacttccccgtcaccagctcctgtgcctgccagtcggtgcccctcccgctccagccatgctctccgccctcgcccggcctgycagcgctgctctccgccgcagcttcagcacctcggcccaggtaggccagacgaggggcggcctgcaggcggaggccccccggcccgggccacgtgcgtcc

SEQ ID NO: 192011 - DNA, 201 bp, Homo sapiens
tgggaggctgaggtgggaggattacttgagctcaggaggttgaggctacagtgagccctgattacaccactgcacttcagcctaggtgagatagtgagacmctgtttccaaaaaaaaaaaaaaaaatttcataaatatgcatatttatatatgctgcttatttaaccttcacaatgtatcaacatttttgcatgtcaccaa

SEQ ID NO: 192012 - DNA, 201 bp, Homo sapiens
gggacgacctgttcaacaccaatgccacgattgtggccaccctgaccgctgcctgtgcccagcactgcccggaagccatgatctgcgtcattgccaatccrgtgagtgtggcagcacccggctcttgcagctatggcaggtgtttaggtgctgacagtgcgtgaaaagctcacggtttgcagcaaaggctgctgatgtgct

SEQ ID NO: 192013 - DNA, 201 bp, Homo sapiens
aggtgatcctcccgcctcactctcccagagtgctgggattacaggcatgagccactgcgcccagccagtttaaaacccatgaattctttatttctgaaatyttccgtgtaataatttcagacctcaactgactgctggtaattaacacagcagaaagtgaaaccatggataaggtgggactatctgcattctactcaggat

SEQ ID NO: 192014 - DNA, 201 bp, Homo sapiens
gaattagtaggtatgaatatttcaaagcttttactataaagttccaaattgctgtccagaaagattctactgatttctttcccctctgacagcgtatgcgwtaccgtgtctgatggtgtttacatgagtcttaagttggtgtgaacagctggggaggctgcctggcaaattttatgttcgtgcaccttccagagttctctg

SEQ ID NO: 192015 - DNA, 201 bp, Homo sapiens
gcgcccgctttgtcttctcccttgtggatgcaatgaatggaaaggaaggtgttgtggaatgttccttcgttaagtcacaggaaacggaatgtacctacttytccacaccgctgctgcttggggtacgtatccaggcgtgggtccttctgactgtggaataagggggcgttccctttgcttaagcctcaggagctctcctgg

SEQ ID NO: 192016 - DNA, 201 bp, Homo sapiens
acttctccacaccgctgctgcttggggtacgtatccaggcgtgggtccttctgactgtggaataagggggcgttccctttgcttaagcctcaggagctctcctggccctttatgcagtaagctcatgtgcctgcctggcgagtgctgttgttttcaagggtggacgcacacccgagaaaaaagagctgggaggatcacaga

SEQ ID NO: 192017 - DNA, 201 bp, Homo sapiens
gagtgctgggattacaggcatgagccactgcgcccagccagtttaaaacccatgaattctttatttctgaaatcttccgtgtaataatttcagacctcaaytgactgctggtaattaacacagcagaaagtgaaaccatggataaggtgggactatctgcattctactcaggatttccattcctggtcccctgttgtcccc

SEQ ID NO: 192018 - DNA, 201 bp, Homo sapiens
ctattaaaaatggatttaatctggttgctttgttgtaggaaaaatgtcaccagctcccctttcctgtggggtaaaggtcacatctctttgttggcctgggrtcaaagtcgtcttgccgttcccctgtgcctctgtgcacggacgcccttccctcttctcagtcccactctaccttgggggttcttaataaacctcgacggt

SEQ ID NO: 192019 - DNA, 201 bp, Homo sapiens
tacccctggctgcctgacattctggaaatttcctggatcatatcaagaatgcatatcaatccttaaacttccgatggctggttcctccctcatcctctcamccaccatattccctttcaacgtggctccaggacctcccaggccaatgccttgttcccgtttgctgcaaagtcgccttgtcccccgtcttagcatgcacca

SEQ ID NO: 192020 - DNA, 201 bp, Homo sapiens
gaccgtgcagtgcccgcacgtgtgtgcttatacaccaccaagctaagcctctcggatctttggctcccggctccatgaagctgatcctacttttcccgtgygtgaggctgatcctccctctcccagaccaggctcattttccaacctaggactgggctcttcagtggccatggccatcggggcaggtggctgttccctcgc

SEQ ID NO: 192021 - DNA, 201 bp, Homo sapiens
aactcatgggtatcctggaatggatttgaattttgttctgtggggcctgaagaaaagggaacttggattgttctgtgtagggaggagtctgggcttgtgcrtggggagtggagccggctctgggaaagaggatgccaggcccggggggggcctccacaggaggcagcatcctcccatgcccatccacagtgggcacaaatg

SEQ ID NO: 192022 - DNA, 201 bp, Homo sapiens
gggcctgaagaaaagggaacttggattgttctgtgtagggaggagtctgggcttgtgcatggggagtggagccggctctgggaaagaggatgccaggcccrgggggggcctccacaggaggcagcatcctcccatgcccatccacagtgggcacaaatgctcactatgaaggaaggacttgcgatggcctcgccagacggc

SEQ ID NO: 192023 - DNA, 201 bp, Homo sapiens
ctggctctgttccaccctgagttctggggggcttttccagtgttggggctgtgggcagctgtgacatgttttacagtgaaagagcttgttaactcatccakcttcatactttggtcaccagggtttggatccagctcgagtcaacgtccctgtcattggtggccatgctgggaagaccatcatccccctgatctctcaggt

SEQ ID NO: 192024 - DNA, 201 bp, Homo sapiens
catgctctccgccctcgcccggcctgccagcgctgctctccgccgcagcttcagcacctcggcccaggtaggccagacgaggggcggcctgcaggcggagkccccccggcccgggccacgtgcgtccccggttcgcgggcagctctgaccctctccaggccagcctggaccgcagggatgcccggcactggctggagactg

SEQ ID NO: 192025 - DNA, 201 bp, Homo sapiens
cattggtggccatgctgggaagaccatcatccccctgatctctcaggtacacgcatatgaccctgtgaggggcttcgaggtcaggattccctttaccaggscctgctttgaggtgatcccggtagactggagaaggcctggccacgtgccaggttttggaagggctcctgttgtaggcagccccgcccctctgctgcaggg

SEQ ID NO: 192026 - DNA, 201 bp, Homo sapiens
ttttgcgctacggtgaagtgggggcccagctgtatacagataagtacattaagtacctgtgcttgccaacaactatgctgggtgctgcaggggataccaarataagtgagaagtgacacttgatatgggacaggaatgagtaaacttaggacaggtggaagcgatgaaggtcttagggaatgagtaaacttaggacaggtg

SEQ ID NO: 192027 - DNA, 201 bp, Homo sapiens
ctaagtcaaaaggcgagtttaactttgtgtattttcaacttgcaatgggttcccacaggcaaccccattgtaagttgaatgtaccaaatgcttttgcgctrcggtgaagtgggggcccagctgtatacagataagtacattaagtacctgtgcttgccaacaactatgctgggtgctgcaggggataccaaaataagtgag

SEQ ID NO: 192028 - DNA, 201 bp, Homo sapiens
tggcctggaggtgcgggggagaaagccggggaaaagggggcgaggtagtcccgctccagggccggtccatttgtcagggttcccccaggtctcccagattkcccagaggacctgctcttggcttgcacgccttcaaggttgggaaaccagggctctgcatctgaaagtaaacttacgtttttttctgcagcgttccattgc

SEQ ID NO: 192029 - DNA, 201 bp, Homo sapiens
aaatggattttatcataaaggatgacatcgttttcttctacaattaatacatgttcattgtataaaacccaaaaagcagctaaaaaataaagcgggaaagraactactggtaatacttgtcctctcttgcatatttcataggttgagagaatgaagcctgctctgcaggttatctgctactgtaacaatcccagccctctc

SEQ ID NO: 192030 - DNA, 201 bp, Homo sapiens; identical to SEQ ID NO: 33168

SEQ ID NO: 192031 - DNA, 201 bp, Homo sapiens; identical to SEQ ID NO: 33182

SEQ ID NO: 192032 - DNA, 201 bp, Homo sapiens
agggctgatggagcgacaggtcggggtttctctaacaagcactttcctggaaacttcattttaacatgttcccatctccctcagaaaaagggcatcgagargaacctgggcatcggcaaagtctcctcttttgaggagaagatgatctcggatgccatccccgagctgaaggcctccatcaagaagggggaagatttcgtg

SEQ ID NO: 192033 - DNA, 201 bp, Homo sapiens
attgttgttggccctggtccctggcactgacttttttgggttgcccgtggtagctcaccctggagagtccaggcctggccaggtgcctgaccctagggccrctggacggagactgagctgctgggtgtggcttgagctcggcttggtttggtgccagtgccgggcctggagtccttagtgctttgcacagcctgctttcga

SEQ ID NO: 192034 - DNA, 201 bp, Homo sapiens
acaaagtgaaagcaaagaaaccagtgaggcagtcttcttcccctccctcccccatgttgtgttcaccttatgtacacatgggacccatccatttaagcacsctagcgagggcacaggtcggtccatttcttggtagagattaattctttgttagataaagatagagacagtctgggcatggtagcttacacctataatccc

SEQ ID NO: 192035 - DNA, 201 bp, Homo sapiens
gatggttctagaagtttacatttagtgaacacaagtgccatttgggaccagggatggagggaggggggcaggataaatggacagttgagtttgtggaaccmatggaacgcctaacagaactgggaatgcagagctgggatttgggagtccctgagactcacacaagatgtgggagtgagagctgaagatccagaagtgggt

SEQ ID NO: 192036 - DNA, 201 bp, Homo sapiens
acctgtttgaattcaaatgttggttgtatatgcttccacagtttaatttcctgagcagaaacccactgggtaagcgtcttgattcggattttggtttgttkggttttggtttctgataaccaaagcctgttattagctggcctcagctactgtagaagactgtgcagtgatgctgtcaggccccagatgaccacacacggt

SEQ ID NO: 192037 - DNA, 201 bp, Homo sapiens
acctttgttgcagagctgaaggtaagggcggcgtgggtgttgctcaggtgacctttctgaacttctcccgccacccgtgctcatttacgggcgtggaagayatgaaggcatgcccaggtcacgtgtcactttggggttttaaatgtttttagagctcgccctcttgatggaagcagcccctgtgtttcctgtgggttccag

SEQ ID NO: 192038 - DNA, 201 bp, Homo sapiens
atcccgcttccaggagcctagtcctgagtgggcttcattagctcagcaggtggctctgatgcacacctaggctggagaaccagtgtgagatactggagccsgagatgacagatctgactcaccaggagggttggagtctttcgcaacgtacgtaaccccttccacctcttgttaggcagctccttgtcctgcctgaggctc

SEQ ID NO: 192039 - DNA, 201 bp, Homo sapiens
ctcatattggatcatttccaggcatgacccgggacgacctgttcaacaccaatgccacgattgtggccaccctgaccgctgcctgtgcccagcactgccckgaagccatgatctgcgtcattgccaatccggtgagtgtggcagcacccggctcttgcagctatggcaggtgtttaggtgctgacagtgcgtgaaaagctc

SEQ ID NO: 192040 - DNA, 201 bp, Homo sapiens
ctatgatatcgcgcacacacccggagtggccgcagatctgagccacatcgagaccaaagccgctgtgaaaggtactgggcgcgctgaccctggagacttgyttcctgtccccagtaggccaggattcgagttttgagtaagattcttagatgaaactaaatgtttagagacgggggtttctctgttttaaatttaaatttt

SEQ ID NO: 192041 - DNA, 201 bp, Homo sapiens
ttcagctgcgtaatgacttgctcttccttccattttaacaagatggtcttaggagtgagagaaaggtaggttaggagttcattgtggttatctaggtgcargtggtaagaaatgattgaattctgggtattcattgatggtaccagaaggatttgctgatgtgtgattagataaggggtcggggatgacaccaaggttttg

SEQ ID NO: 192042 - DNA, 201 bp, Homo sapiens; identical to SEQ ID NO: 33180

SEQ ID NO: 192043 - DNA, 201 bp, Homo sapiens; identical to SEQ ID NO: 33183

SEQ ID NO: 192044 - DNA, 201 bp, Homo sapiens; identical to SEQ ID NO: 33171

SEQ ID NO: 192045 - DNA, 201 bp, Homo sapiens; identical to SEQ ID NO: 33172

SEQ ID NO: 192046 - DNA, 201 bp, Homo sapiens
ttaaagctgtaatttatcatttatgatagctctgctgttgaccattggctgtttcctgtttgcttctgtaaatataaatatattaatgtaagttgcagtaygtatctttatctttacatcttgttgaagtcttagagttctaaacacagaattagtaggtatgaatatttcaaagcttttactataaagttccaaattgct

SEQ ID NO: 192047 - DNA, 201 bp, Homo sapiens; identical to SEQ ID NO: 33173

SEQ ID NO: 192048 - DNA, 201 bp, Homo sapiens
agggttcccccaggtctcccagatttcccagaggacctgctcttggcttgcacgccttcaaggttgggaaaccagggctctgcatctgaaagtaaacttasgtttttttctgcagcgttccattgctttgacgtagctaatctccttgcagcatccgtgtgagttgtgcgtgaataaaagaaatcgtatacttcctaattc

SEQ ID NO: 192049 - DNA, 201 bp, Homo sapiens
atagctctgctgttgaccattggctgtttcctgtttgcttctgtaaatataaatatattaatgtaagttgcagtacgtatctttatctttacatcttgttkaagtcttagagttctaaacacagaattagtaggtatgaatatttcaaagcttttactataaagttccaaattgctgtccagaaagattctactgatttct

SEQ ID NO: 192050 - DNA, 201 bp, Homo sapiens
gttgatttgcagttgcctggtggaaaatccctgtgtgagagggcagctcggcctgctttgtggggttgagagtcatttttgagggtggcagagtcaattcyacaccattcatgtataagtaacaagaaatcggggtgctgactgaaattctccactgtcaggctggaaggtgtgcaggtgtcttggctggcggggccggct

SEQ ID NO: 192051 - DNA, 201 bp, Homo sapiens
tccccatcacagcagaagttttcaagaagcatggagtgtacaaccccaacaaaatcttcggcgtgacgaccctggacatcgtcagagccaacacctttgtkgcagagctgaaggtaagggcggcgtgggtgttgctcaggtgacctttctgaacttctcccgccacccgtgctcatttacgggcgtggaagacatgaaggc

SEQ ID NO: 192052 - DNA, 201 bp, Homo sapiens
agcctggaccgcagggatgcccggcactggctggagactgtggcgcccggggcaggccctgacactggcctggaggtgcgggggagaaagccggggaaaarggggcgaggtagtcccgctccagggccggtccatttgtcagggttcccccaggtctcccagatttcccagaggacctgctcttggcttgcacgccttcaa

SEQ ID NO: 192053 - DNA, 201 bp, Homo sapiens
ggaagcagcccctgtgtttcctgtgggttccaggcactcggcccaacaggcatctactctggccagtgtctgtctcccggctctcgctgtcttccttctcrccaagagcactgtgggttcacaccttctttgggcttctcagtggctggacttggacggggctcccccagtcctcccctttctccttgcccctgaaaactg

SEQ ID NO: 192054 - DNA, 201 bp, Homo sapiens
ttggtgagccgcctgaccctctatgatatcgcgcacacacccggagtggccgcagatctgagccacatcgagaccaaagccgctgtgaaaggtactgggcrcgctgaccctggagacttgcttcctgtccccagtaggccaggattcgagttttgagtaagattcttagatgaaactaaatgtttagagacgggggtttct

SEQ ID NO: 192055 - DNA, 201 bp, Homo sapiens
aagtaacaagaaatcggggtgctgactgaaattctccactgtcaggctggaaggtgtgcaggtgtcttggctggcggggccggctcacctgggcgtcacgkttgtggcaccagccaggctgacctgtctgtgcccccctaggctctgccaccctctccatggcgtatgccggcgcccgctttgtcttctcccttgtggatg

SEQ ID NO: 192056 - DNA, 201 bp, Homo sapiens
aggtacacgcatatgaccctgtgaggggcttcgaggtcaggattccctttaccaggccctgctttgaggtgatcccggtagactggagaaggcctggccaygtgccaggttttggaagggctcctgttgtaggcagccccgcccctctgctgcagggcggtgtcagtcctggagcgaatgtgggtggaagctgctcagggc

SEQ ID NO: 192057 - DNA, 201 bp, Homo sapiens; identical to SEQ ID NO: 33190

SEQ ID NO: 192058 - DNA, 201 bp, Homo sapiens; identical to SEQ ID NO: 33191

SEQ ID NO: 192059 - DNA, 201 bp, Homo sapiens; identical to SEQ ID NO: 33192

SEQ ID NO: 192060 - DNA, 201 bp, Homo sapiens
cctccaactttaacagtgacatcgacccttccactttcgacgttggggctggcattgtcctcagtgatcactctgtcaagctcatattctgatatgacaakgaatttggctacagcaacagggtgatagactttatggtacacatggcctccaaggagtaagagccccctagaccatcagccccagtgagaacacaacaag

SEQ ID NO: 192061 - DNA, 201 bp, Homo sapiens
atcgtggggctacactgagcaccaagttgtctcctccaactttaacagtgacatcgacccttccactttcgacgttggggctggcattgtcctcagtgatmactctgtcaagctcatattctgatatgacaaggaatttggctacagcaacagggtgatagactttatggtacacatggcctccaaggagtaagagccccc

SEQ ID NO: 192062 - DNA, 201 bp, Homo sapiens
gaacatcgtggggctacactgagcaccaagttgtctcctccaactttaacagtgacatcgacccttccactttcgacgttggggctggcattgtcctcagygatcactctgtcaagctcatattctgatatgacaaggaatttggctacagcaacagggtgatagactttatggtacacatggcctccaaggagtaagagc

SEQ ID NO: 192063 - DNA, 201 bp, Homo sapiens; identical to SEQ ID NO: 33196

SEQ ID NO: 192064 - DNA, 201 bp, Homo sapiens; identical to SEQ ID NO: 33197

SEQ ID NO: 192065 - DNA, 201 bp, Homo sapiens
tataggctttctgctcctcccattctatagacagtaacatcttgtgcagtgccagccatgtccctgagacacgaaggttgaagtgaaggccagagtaaacrgatttggccttactgggtgcctgatcactagtacagttttaactctagcaaagtgattattgtcaccatcaatgacctcttcattgacctcaattacatg

SEQ ID NO: 192066 - DNA, 201 bp, Homo sapiens; identical to SEQ ID NO: 33199

SEQ ID NO: 192067 - DNA, 201 bp, Homo sapiens; identical to SEQ ID NO: 33200

SEQ ID NO: 192068 - DNA, 201 bp, Homo sapiens; identical to SEQ ID NO: 33201

SEQ ID NO: 192069 - DNA, 201 bp, Homo sapiens; identical to SEQ ID NO: 33202

SEQ ID NO: 192070 - DNA, 201 bp, Homo sapiens; identical to SEQ ID NO: 33203

SEQ ID NO: 192071 - DNA, 201 bp, Homo sapiens
ccactactcctacgctgcatgcatcactatgcacctgcctgatctgatgatatgcagggtgctagatggatgtggaagggtcgggaggggcaggaatgtgmtggagagttctgagaagatgggcagaacctatgaaagtgtaccctgtacctaggatgggggataatttttggtagtagggattggagaaacagtaggtaa

SEQ ID NO: 192072 - DNA, 201 bp, Homo sapiens
gatacagaatgaccacttaacaattttcagtctgttgagccaactagagtgggcagagcagaaataatgccctggttggaagttaatagctttgcctgccyaattatttactggaaggaaatgcctgttcaatataccatttgatatattcaaagataccaaacaaaacaaacctactgctagggccagccactcagaagg

SEQ ID NO: 192073 - DNA, 201 bp, Homo sapiens
tttgtaaactcacctgcagtggaagcagagctcgtggaagattaatgagaactaactcattgtgagggaagagaaatcccagcactgctcagagggccccscaggcagcccagccctggttttcatgttgagttgagatgatgatgtgttgttagccatagtccttgtgctgtcttcttgtttgtgaccgtaaaagttatc

SEQ ID NO: 192074 - DNA, 201 bp, Homo sapiens
ttggtggagatgagaggactcatcaaaaagcattgccttaaaaaaaaaaaagattcaatagccactcattctgcagagggtgatgaagaacggcaaggatktgagagtaggtccgactcgggttccagtcctgcccctcccctgaccggcatctgcctcagcctttgtaaactcacctgcagtggaagcagagctcgtgga

SEQ ID NO: 192075 - DNA, 201 bp, Homo sapiens
caataacctggaaaaaaaatgatccttgaaaccactcatttatgtaggttacaacatattgaagggtaaaaatcaaagctacaatattagccctgaagacmccaaccaaagtgaacctggactggacctattccatttataacgcttttcccattgtttttgaggagagagtatagagtttaaggatgtcatctaaaagga

SEQ ID NO: 192076 - DNA, 201 bp, Homo sapiens
tctgctgccctctgtgaactcaccggccctgctcgtctgacccttcaccagcttcccgcactgtgccttacctgcctgtaggcatttgagtgcctgaatcygtcctacaatgtgtgatgattattttggttgcttggagatctgtttttgcttaattcctgcatctcgcttgtggccaaagagtttgaggttgccagccag

SEQ ID NO: 192077 - DNA, 201 bp, Homo sapiens; identical to SEQ ID NO: 33210

SEQ ID NO: 192078 - DNA, 201 bp, Homo sapiens
ggacctgagcctgccagttttgtttccctgttctaatttgtgactttgcatctgcttagctataagaacattttatgatcgtgtctaaactaagatttaayaggctaagcctcagagggatttaaaggatgtaagctttgatgcttaaaccaaagaagacaaaactggcatcctgagggccaaatgccatccttaggggta

SEQ ID NO: 192079 - DNA, 201 bp, Homo sapiens
tttcctgctcacctttaagctcccaaggtgtattagtccgttttcacactgctgataaagacatacccaagactgggtaatttataaagaaaaagaagttwaatggactcacagttccacgtgactggggaggcctcacaatcctggcagagggcaaaaggcacatcttacatggtggcaggaaaaacagaatgagagcca

SEQ ID NO: 192080 - DNA, 201 bp, Homo sapiens
atggtctcatcccactgtggacagcaatgttttcatgcaactgtaaagaaattttggtccattctgaagcatgttaatatatttaatcagcctgtattttytccaggggacagtgcatgccacctgcctacattatttttttttttttttgagatggagtttcactcttgtcacccaggctggagtacaagtggcacaatc

SEQ ID NO: 192081 - DNA, 201 bp, Homo sapiens
gagaatcctttaagttctttgaaatgacctcaaatctgaggttgtcaggcttttaaagagagccagtaggtagtcactccacatattgtagataatactgkgtcaacagctcaagttatctgaagctctctttgtgaaatgggacccaacttttgctctctgggaacactatcacatttctctctggcatgcaaacttagg

SEQ ID NO: 192082 - DNA, 201 bp, Homo sapiens; identical to SEQ ID NO: 33226

SEQ ID NO: 192083 - DNA, 201 bp, Homo sapiens
agccatgtagggcagggggtgggctctgcactcagacgcctcccgcggctcctggagttgcctcctctcatcccaggcaagtgactacattccctaccttygggagctcagccacaaagtgagcagagtgggatctgtcaccctgggaaattggcaagatgctacctccttcctgataggtcaccgagcagtctgcccaga

SEQ ID NO: 192084 - DNA, 201 bp, Homo sapiens
attcaagagatctacctgcctgttacaggaaagggatcccgatccagaccccaagagagggttcttggatcttgcaaaagaatgaattcagggtgagtctkcagtgcaaagtgaaagcaagtttattaagaaagtaaaggaataaaagaatggccactccatagacagagcaaccccgagggctgctggttgcccattttt

SEQ ID NO: 192085 - DNA, 201 bp, Homo sapiens
atgtcaaaatctccctgttggagatcccctcagtattacctgtgttaccccaccgtcaactcccattgctgccttccctgaaaggaacccttcagaaaaaytaccatgcctgtaatcctgccataggtccttttcttcatgtcaccctctctgtttgtgccattgccttccatctctccatttaaataatggccttgttta

SEQ ID NO: 192086 - DNA, 201 bp, Homo sapiens
aatcacacctcgcccaagggggctgctgtgcagtgtgaggggggaggtgacagccatgtagggcagggggtgggctctgcactcagacgcctcccgcggcycctggagttgcctcctctcatcccaggcaagtgactacattccctaccttcgggagctcagccacaaagtgagcagagtgggatctgtcaccctgggaaa

SEQ ID NO: 192087 - DNA, 201 bp, Homo sapiens
tttttcctatcttggcgaggggaatgtggtggggctatagggtgaaggtggggagagggtcagcagaaaaacatgtgagtaaaggaatctgtgtcataaayaagtttaaggaaaagtgctgggcctaaatgtacacgtaggctagatttatatttaactttacataaacatctcagtgcagtaaagagtagtattgctgcc

SEQ ID NO: 192088 - DNA, 201 bp, Homo sapiens
gtgatagagcgagatctcatctttaaaaaattaaatgaaaatgaaaaatagaaaagaagcactcaggaggctggtgagaattgggcgtgtgtgactttggyctagcaactttacctccctgaggctttcttgcacatcaaatggagagaaatcacacctcgcccaagggggctgctgtgcagtgtgaggggggaggtgaca

SEQ ID NO: 192089 - DNA, 201 bp, Homo sapiens
ctacacagccctgtgcagaagaaacactgatgcctgaagtagaatcacatggcaaacatatttgcctcacgttatctgaggaaacagtttggtcgtaatcktgagtttcctagataattgaagccttcccttttgtgcacagaatagttaattaaaaaaacaaaaatctattcaaggaggctggaattcaggatccagagg

SEQ ID NO: 192090 - DNA, 201 bp, Homo sapiens
cccacagctttaaatacctactacacagccctgtgcagaagaaacactgatgcctgaagtagaatcacatggcaaacatatttgcctcacgttatctgagraaacagtttggtcgtaatcttgagtttcctagataattgaagccttcccttttgtgcacagaatagttaattaaaaaaacaaaaatctattcaaggaggc

SEQ ID NO: 192091 - DNA, 201 bp, Homo sapiens
cgcacctcaacagcagggttgagttgttgcaacagagacctagtgaatggcccacagctttaaatacctactacacagccctgtgcagaagaaacactgaygcctgaagtagaatcacatggcaaacatatttgcctcacgttatctgaggaaacagtttggtcgtaatcttgagtttcctagataattgaagccttccct

SEQ ID NO: 192092 - DNA, 201 bp, Homo sapiens
catgctcagaacacttacattgttagcctaccgatgggcaaaatcatcttacacaaagcctattttataataaagtggtgtctatgtcatgtgatttcttraatacagtgcactatagagtacagtctcagttgtttaccctcatgatctcatagctgaccgggagctggggtggcctgccactgctagcatcatgagaga

SEQ ID NO: 192093 - DNA, 201 bp, Homo sapiens
gaaataaacagccatgttgctcacacaaagcctgtttggtggtctcttcacacggacgtgcatgaaaacggggtttcaccatgttgtccaggctggtctcraactcctgacctcaggtgatctgcctgccttggcctcccaaagtgctggaattacaggcgtgagccaccacgccctgccacattttcaaatgattgaaaa

SEQ ID NO: 192094 - DNA, 201 bp, Homo sapiens
agggtttcaccatcttggccaggctggtcttgaactcctgacctcgtgatccacctgccttggcctcccaaagtgctgggattacgggcatgagccactgygcctggctatttttttttattttttatttattcatcttttgagacgcagtttcgctcttgtcacccaggctggagtgcagtggcgccacctcggctcact

SEQ ID NO: 192095 - DNA, 201 bp, Homo sapiens
ctttaaaattctgcatgttaaacttctttccccgcctctgagataatttattttttattttttaatttttattatttattattattattaatttatttttwttttttgagatggagtctcgctccgttgcccaggctggagtgcaacggcacgatttcggctcacagcaacgttcgcctccctgattcaagcaattctctg

SEQ ID NO: 192096 - DNA, 201 bp, Homo sapiens
agtgctgggattgtaggcgtgagccaccacacttgtcagaaatgtaaattattaaactcacctggaacctactgaactcttagggcaggggccctgtaacctgtatttctacagctcctccaggtgatgagatgtaaaagtaaagtttgcaaaccactaatcagtactacccttatcctcaagctacagacacacccaatt

SEQ ID NO: 192097 - DNA, 201 bp, Homo sapiens
ggtggggtttcgccatgttagccaggctggtcttgaactccttgccttggcctcccaaagtgctgggattataggcatgagccactgagtccggcctaacwttttttttttcttacaatatattaattatagggaaagtagagatagggtcattgagaaaaaaaaatcgagtaattttgctctagtcccttgactcccaaa

SEQ ID NO: 192098 - DNA, 201 bp, Homo sapiens
acaatctgatctctctttcttttccccacatttacttcatcatatgatatcaacactgactctttcatgtaaaatgtcagtcctaggttccttccaccctygtgtcctgcctgtgcccccaagggtgtaattctttgttccctcttcccatagtcagtgtgtgtgtgtgtgtgtgtgtgtgtgtgtgtgtgtgtgtgtgcg

SEQ ID NO: 192099 - DNA, 201 bp, Homo sapiens; identical to SEQ ID NO: 33211

SEQ ID NO: 192100 - DNA, 201 bp, Homo sapiens
gctcgcacttgacttactctcctggtccaaggacacctacagccccgacgaacatttctgggtgacactcaacaggattcccggtatgtacgtctcttaayttttatttttacgaataaacactgcatggtcaatactaaataagttgctttgaaaagagtggaaaaaatgggacaaacttctttacggttttaaatgtca

SEQ ID NO: 192101 - DNA, 201 bp, Homo sapiens
cctttttttttttttgagacgaagtctcgctgtcacccagactggagtgcaatggcgtgatctcagttcacttgcaacctccacctcctgggttcaagcarttctctgcctcagcctcccaagtagctcggattacaggcgcatgccaccacacccggctaatttttgtatttttaggagagacggggtttcaccacgttg

SEQ ID NO: 192102 - DNA, 201 bp, Homo sapiens; identical to SEQ ID NO: 33204

SEQ ID NO: 192103 - DNA, 201 bp, Homo sapiens
atggtgaaaccctgtctctactaaaaatacaaaaaaattagccaggcgtggtggcaggtgcttgtaatcccagctactcaggaggctgaggcaggataatygcttgaacccagggggcggaggttgcagtgagccaagatctcgccattgtactctagcctgggtgacagggtgagactccgtttaaaagaaaagaaaaga

SEQ ID NO: 192104 - DNA, 201 bp, Homo sapiens
aagccgaggtgggcggatcatgaggtcaggagttcgagaccagcctggccaatatggtgaaaccctgtctctactaaaaatacaaaaaaattagccaggcrtggtggcaggtgcttgtaatcccagctactcaggaggctgaggcaggataatcgcttgaacccagggggcggaggttgcagtgagccaagatctcgccat

SEQ ID NO: 192105 - DNA, 201 bp, Homo sapiens
aattttggtccattctgaagcatgttaatatatttaatcagcctgtattttctccaggggacagtgcatgccacctgcctacattatttttttttttttttgagatggagtttcactcttgtcacccaggctggagtacaagtggcacaatctcggctcactggaacctccgtctcccgggttcaagtgattctcatgcct

SEQ ID NO: 192106 - DNA, 201 bp, Homo sapiens
ttctcatgtgtctcttgatggtctcatcccactgtggacagcaatgttttcatgcaactgtaaagaaattttggtccattctgaagcatgttaatatatthaatcagcctgtattttctccaggggacagtgcatgccacctgcctacattatttttttttttttttgagatggagtttcactcttgtcacccaggctgga

SEQ ID NO: 192107 - DNA, 201 bp, Homo sapiens
ctttccagactctccttctccatcccacagcttcaccggacaagttttactccaaattcttttaaaatgtgtgttaagaacaaaacaaggtagcttcctttagataggcaagcatcaaaataattgtaaagtattaaaatgcaagttaaagaaatagaaatattgcttaatagtgtttttcttgaatacttgaatactttt

SEQ ID NO: 192108 - DNA, 201 bp, Homo sapiens
catgggttccttgttacctccaccagaaaccagtttcggtgggcatcaggacaacatatatgcatgtgcttatatacctaccaacctctttaactctcacygccttgtgaggtagtttctattaccttcattttacagaaaagaaaactgaggctatgagtgtaaattacttgcctacattctctacaaatccaccccttt

SEQ ID NO: 192109 - DNA, 201 bp, Homo sapiens
cagagagaaatgtcttgagatttgtcacgtactaattacatgcaaggcattgttctaaactctttttatatactagcctatttcaatctcttaagaacccyatggggtcagcgttcttaatgtctccattctgtagaagaagaaaggaaacgggggcacgcagaggggctctgcagcctgccataaatggtggcatctgac

SEQ ID NO: 192110 - DNA, 201 bp, Homo sapiens
gtcaaagcccaggctgcaattgggaatgaaaggcagttcccccacactgggctgagactgcccgtgacaatggtggccttgagggcttctgcctatgcttmgggatatttcaggtggcagaagcacccctgcacacacagccatgctgcttcactaaacctaccctgtaaggtggtcagggtgctcaggggcccagatgag

SEQ ID NO: 192111 - DNA, 201 bp, Homo sapiens
tccatttatttgaaagtgttcggaagatataaaggatgggatgttctagatatggatcatctctggcagcagctggattgtcaaatagtgtctcttggaayttctcaacttctttttcctcggatgcgacattcggaatcagagaaaagttgttgtgcagaaagacaaatagttacctacgctgttccttgaaacttaaca

SEQ ID NO: 192112 - DNA, 201 bp, Homo sapiens
tccaagccctctgccctaacaaactgtctaaactcaggcaaatggccggctctgtgggaaaggagctagtataagagtggattgaataaactgaaaatgaktccagaatttaataaggctattaaaattagaagttgcaagaaatcactgcctatctctattttaagacttttgtttccatttatttgaaagtgttcggaa

SEQ ID NO: 192113 - DNA, 201 bp, Homo sapiens
gttattcacagttgccctagaaacaagaggcactgcgcaccacacagcgccacggtgggaagcacccgtgtcagtccagatgcagacaggggagggaaagrcataagccacagtctttttttatttttttgagacagagtctctctctgttgcccaggctggagtgcagtggtgcaatctcagctcactgcaacctccgcc

SEQ ID NO: 192114 - DNA, 201 bp, Homo sapiens
gatgtatcttggaggcaaatttattcctgatttaatttctaggaaagcagaagaaacgtctgctttttgggatctatccaagccctctgccctaacaaackgtctaaactcaggcaaatggccggctctgtgggaaaggagctagtataagagtggattgaataaactgaaaatgagtccagaatttaataaggctattaa

SEQ ID NO: 192115 - DNA, 201 bp, Homo sapiens
tagaaattattatctcttcatgttctcccattattgtttgttactaaaaccttcctatatccactggaaaacatctgtgtagttggtataatttaaatgcrttcttttgggttcactgtaaagccatcccatgaatattaatcacttgtccccatgcctcagtggttcacggaaatgtgaagaaggatcacgcagagattt

SEQ ID NO: 192116 - DNA, 201 bp, Homo sapiens
acaacgttgtactattattggtctttttatttttaatctttaaaaaaatttttaggagacaaggcctggctctgtgacccaggctggagtgcagtgatacmatcatggctcactgaagccttgacctcctaggctcaggcagttctcctgcctctgcctcccgagtagttgggactttaggtgccaccatgcccagctaat

SEQ ID NO: 192117 - DNA, 201 bp, Homo sapiens
ttcctggagattttggctttttcatgtgagcagaggtgcaggaaagatgaaggcaattaatgtttactgaacatgtgcctatgggtttagagtatctcagytgaatctccacaagaatcccatccagtgggtacttaaatccacattttgcaaatatgaagacgggaccagaggggctgagtaatgtgccctgttccaaaa

SEQ ID NO: 192118 - DNA, 201 bp, Homo sapiens
caccaccacacccagctaacttgtttgtatttttagtagagacagggtttcaccatgttgttcaggttggtctcaaactccttacctcaaatgatccaccygcctcggcctcccaaagttctgggattacaggcgtgaaccactgtacctagcccccaatgttaattctatgtttaacattttgaggacctgccaaactgg

SEQ ID NO: 192119 - DNA, 201 bp, Homo sapiens
gtctcgctctgtcgcccaggctgaagttcggtggctccatctcagctcactgcaacctctgcaattctcgtgcctcagcctcccaagtagctgggactacrggagcacaccaccacacccagctaacttgtttgtatttttagtagagacagggtttcaccatgttgttcaggttggtctcaaactccttacctcaaatga

SEQ ID NO: 192120 - DNA, 201 bp, Homo sapiens
agtaatccaccagcctcggcctcccaaagtgctaggattacaggagtgagccaccacgcccggcccttttttttaaattgagacagagtctcgctctgtcrcccaggctgaagttcggtggctccatctcagctcactgcaacctctgcaattctcgtgcctcagcctcccaagtagctgggactacgggagcacaccacc

SEQ ID NO: 192121 - DNA, 201 bp, Homo sapiens
gttttctacatagacacagtaacaatctgatctctctttcttttccccacatttacttcatcatatgatatcaacactgactctttcatgtaaaatgtcastcctaggttccttccacccttgtgtcctgcctgtgcccccaagggtgtaattctttgttccctcttcccatagtcagtgtgtgtgtgtgtgtgtgtgtgt

SEQ ID NO: 192122 - DNA, 201 bp, Homo sapiens
atatttttagtagagacggggtttcaccatgttggctaggctggtctcaaacgcctgacctcaagtaatccaccagcctcggcctcccaaagtgctaggawtacaggagtgagccaccacgcccggcccttttttttaaattgagacagagtctcgctctgtcgcccaggctgaagttcggtggctccatctcagctcact

SEQ ID NO: 192123 - DNA, 201 bp, Homo sapiens
tcagcctcccaagtagctgggattacaggcatgcgccaccacacccggctaatttttatatttttagtagagacggggtttcaccatgttggctaggctgrtctcaaacgcctgacctcaagtaatccaccagcctcggcctcccaaagtgctaggattacaggagtgagccaccacgcccggcccttttttttaaattga

SEQ ID NO: 192124 - DNA, 201 bp, Homo sapiens
ccttgaggtagatacagagtgctgattgctgtatttacaatcccttagctagacataaagtttctccaagacccaaccagagtaactagacacagagtgcmaattggtgcattcacaaaacctgagctagacacagggtgctgattggtgtgtttacaaaccttgagctagagacagagtgctgattggtgtatttacaat

SEQ ID NO: 192125 - DNA, 201 bp, Homo sapiens
atctcgttcctttttatggctgcataatattctatggcgtatatatacgacattttctttatccagtctatcactgatgggcatttaggttgatttcatgyctttgctattgtgaatagtgctgcagtgaacatacgcgtgcatgtatctttatgacagaatgatttatattcctttggatctatgggatcgctgggtcaa

SEQ ID NO: 192126 - DNA, 201 bp, Homo sapiens
acccgcacagatcatcccatcacctacgtattaagcccagcgtctctattagctcttcttcctgatgctttccctctgccaacgccccccaccagccccastatgtgttgttcccttgcatgtgtccataagttctcatcaatcagctcccacgtatgagaacatgcggtgtttgggtattctgtctctgcgttactttgc

SEQ ID NO: 192127 - DNA, 201 bp, Homo sapiens
atcttgcaaaagaatgaattcagggtgagtcttcagtgcaaagtgaaagcaagtttattaagaaagtaaaggaataaaagaatggccactccatagacagagcaaccccgagggctgctggttgcccatttttatggttatttcttgaagatacactaaacaaggagtggattattacccccgtttagaccatagagggca

SEQ ID NO: 192128 - DNA, 201 bp, Homo sapiens
tcgcttaaacccgggaggcggaggttgcagtgagccgagattgtgccactgcactccaacctgggcaagagggagattctgccgcaaaaaaaaaaaaaaamaaaacaaagaaaacgaaagaaaatgcatttaatgtacctaatctaccaaatatcctagcttagcctagcctcccttaaacatgctcagaacacttacatt

SEQ ID NO: 192129 - DNA, 201 bp, Homo sapiens
gatcttgcaaaagaatgaattcagggtgagtcttcagtgcaaagtgaaagcaagtttattaagaaagtaaaggaataaaagaatggccactccatagacagagcaaccccgagggctgctggttgcccatttttatggttatttcttgaagatacactaaacaaggagtggattattacccccgtttagaccatagagggc

SEQ ID NO: 192130 - DNA, 201 bp, Homo sapiens
atcgcttaaacccgggaggcggaggttgcagtgagccgagattgtgccactgcactccaacctgggcaagagggagattctgccgcaaaaaaaaaaaaaaacaaaacaaagaaaacgaaagaaaatgcatttaatgtacctaatctaccaaatatcctagcttagcctagcctcccttaaacatgctcagaacacttacat

SEQ ID NO: 192131 - DNA, 201 bp, Homo sapiens
ggatcttgcaaaagaatgaattcagggtgagtcttcagtgcaaagtgaaagcaagtttattaagaaagtaaaggaataaaagaatggccactccatagacagagcaaccccgagggctgctggttgcccatttttatggttatttcttgaagatacactaaacaaggagtggattattacccccgtttagaccatagaggg

SEQ ID NO: 192132 - DNA, 201 bp, Homo sapiens
taccataaatcaaaaatgcatttaatggccacgtggggtggctaacgcctgtaatcccagcactttgggaggccgaggcaggtggatcactagaggtcagragtttgagaccatcctggccaacatggtgaaaccctgtctctactaaaaatacaaaaattagccgggcgtggtggcgggcacctgtaatcccagctattt

SEQ ID NO: 192133 - DNA, 201 bp, Homo sapiens
tccccgccaactctctagcagctcaccaaattaatatccaaatcaatatccatcgcatccacggcactgttgccattcattcctacagttcactgtaggamgttaaggggtggagtggagcagagagggggcagggaaatggctgcattgtgaatcaaatgttttcctaacaggagcagctgttccaactggcacaagccc

SEQ ID NO: 192134 - DNA, 201 bp, Homo sapiens
tggatcttgcaaaagaatgaattcagggtgagtcttcagtgcaaagtgaaagcaagtttattaagaaagtaaaggaataaaagaatggccactccatagacagagcaaccccgagggctgctggttgcccatttttatggttatttcttgaagatacactaaacaaggagtggattattacccccgtttagaccatagagg

SEQ ID NO: 192135 - DNA, 201 bp, Homo sapiens
gtaaaatgagaaatgaagtgaggagttggaattctggtaagggtggtaagaggcggcagaagaggtctaggatgagaccaagtctgagtttgcttgtttgktggagggtgagtggtggtggggcatctcaagctggcttgaaaaatcagacacagggtcaaccattcaaatagaagggtgacaggatcagtgctgattata

SEQ ID NO: 192136 - DNA, 201 bp, Homo sapiens
tgtgtggacattgttgaaagatgaggcctggaacccagtgttgcaaactacatgtcaacagggccagacaatgtaggtgaatgaaacacgttggggccagkgtggccagagagctcctggatgcctaaaaccccggtgaattgttgtcaagggacaataggaattcagacttccatagaaaatctggtttttccatgttgg

SEQ ID NO: 192137 - DNA, 201 bp, Homo sapiens
tttcccaaaacacccccaagagcaatgtgaccgagaaaatgattagtaccttagaattagatggtttcagaaaacaaagtgaaaatcggttcgaattggcragactgaatagaagggatattcatagaagtagcagtaaatcacagagcttcacactgccttttttttttcttggtgcctttctactgagagtgacttctc

SEQ ID NO: 192138 - DNA, 201 bp, Homo sapiens
ctcaagtagctgggacgcacagtaccacgcctggcttttttttttttttctttgtagagacagaatttcatcatgttgcccaggctggtcttgaactcctkggctcaggcgattcatctgccttggcctcccaaagtgctgggattacaagcgtgagccactgcacctgaccatctaggatattttaaaaaaataccaatg

SEQ ID NO: 192139 - DNA, 201 bp, Homo sapiens
caattattctatgtaggttttgactggcttggccacatcttcccattttgagtgtttggcttcctcagtgttaaaacaaattttgcccatcctctttgcasaggagtaatttttaaactctaatagaaaaacttataaacacacacaacagtgcagagaacagtactgtaatcctcacatgcccatcagccagtttcgaca

SEQ ID NO: 192140 - DNA, 201 bp, Homo sapiens
cccattggccaaaagcaagtcacatggccaaaactagatccaagaggtagagaaacattttccccctcttaatggaaaagctgcaaagtcatactgaacartgactgcatatagcagtgagacagacacatttgtgaccatcttttgcagcctgccacaacaaatcaaaatatatccttgtttagcagaaacatatgataa

SEQ ID NO: 192141 - DNA, 201 bp, Homo sapiens
tgctgggattatagccatgagccaccatgcctagcccagaatgatgttctttatgtgataattcacatgttctagcactactaagtaatacctttccatgstatcacttggtggtccatcaagttctttttcacacatcatcttattacatctttaccacaatagctgttagtccacactggtgttctttctttcctctaa

SEQ ID NO: 192142 - DNA, 201 bp, Homo sapiens; identical to SEQ ID NO: 33205

SEQ ID NO: 192143 - DNA, 201 bp, Homo sapiens
gatggggtttcatcgtgttggccaggatggtctcgatctcctgacctcgtgatctgcccatctcggcctcccaaagtgctgggattacaggcgtgccactstgcccggccggttggttgggttgctttcttttcttaagccgtaccatgttccagaaaggacttaagatgtcataatataatttcttgggaaaggaaatca

SEQ ID NO: 192144 - DNA, 201 bp, Homo sapiens
aaattggcccaaggacagacaaaagagctgggaggaaaatcgactatatttttcaacacacaatgccatttgaagtactggattgagtacggaagtattaygaacattcctaatttggttagtgtctatatttcttaatatagtaatgctattaatgtctgtctcctaagtttgtataaatccaaacccccatgttattgg

SEQ ID NO: 192145 - DNA, 201 bp, Homo sapiens
acctcacctctgtgtaagatgtatagctactgtacatatttcttggatgtattgaacagctaataattgccagagccagggcacaaattgatctcttcttwcttctaatccagtcctctgtctcctgtccacaatgcaatgtatagaatcgatcttttctggaagttgttactgagaaaggcagatagggttaaaagtgct

SEQ ID NO: 192146 - DNA, 201 bp, Homo sapiens
agtagagatggggtttcatcgtgttggccaggatggtctcgatctcctgacctcgtgatctgcccatctcggcctcccaaagtgctgggattacaggcgtrccactctgcccggccggttggttgggttgctttcttttcttaagccgtaccatgttccagaaaggacttaagatgtcataatataatttcttgggaaagg

SEQ ID NO: 192147 - DNA, 201 bp, Homo sapiens
ctatagaaggatgtctatgccatggctcaccaaccatataaaactagatgtagatgtacccaaagatggataggaggaaatgtgtaaagtaaattgacatrttcaggtggataccagttccttttttttttgagataaggtccctgctctgttccccaggctggagtgcagtggtgtgatcacggctcactgtagcctcga

SEQ ID NO: 192148 - DNA, 201 bp, Homo sapiens
tgcagctgagcctctcaacgcgactttaacaaactctctctgagccagtcttctcagtgccatctttgctttcattcaactttacatgtctagtgttgctrctcaaacctgtgtcccctcaagtcctttcccaactaaaggatggtggttaattgacaatagacaaacaagtctcagaacaattatgagggtgtaatgaag

SEQ ID NO: 192149 - DNA, 201 bp, Homo sapiens
acaataatgatggctacttagtaaggctgttttgagaattaaattttaaaaatggggtaaaatgacaggttaggtgtttatccacttattaatgtgaacayttattaagaaaaacctacatgtggtcttgtgttcctacactaatgagatcctcaaggtgttgaataaaagcaatttaaatctcactatagaaggatgtct

SEQ ID NO: 192150 - DNA, 201 bp, Homo sapiens
cttgccaactgtgtgacactggtgttagtttacactgagccttagtttactcatctgtgatgatggagataataaatagtacttagttcccagagaagttrtgagtattaaataagctaatgcatatagtacaggggttcctagacttggccatgcctcagaaccttctgcaggtcctgttaaagcacagatttctgggcc

SEQ ID NO: 192151 - DNA, 201 bp, Homo sapiens
atctcttgaaaatacatatctcttccctatttctctttacacaatacaaaagcatctccttccatcctcctttgtttgagcccacatgctatcaggtaaaygactttggagacagacgtagtgtaagtctgtcctcccaatacttgccaactgtgtgacactggtgttagtttacactgagccttagtttactcatctgtg

SEQ ID NO: 192152 - DNA, 201 bp, Homo sapiens
tctaaattatctcttgaaaatacatatctcttccctatttctctttacacaatacaaaagcatctccttccatcctcctttgtttgagcccacatgctatyaggtaaacgactttggagacagacgtagtgtaagtctgtcctcccaatacttgccaactgtgtgacactggtgttagtttacactgagccttagtttact

SEQ ID NO: 192153 - DNA, 201 bp, Homo sapiens
cagccaatggggagagcgaggtgtggctgtggaaaaagacagggttaagcaatttttttaaagcactacatatttattgatagaatatctctccaggcagyattcacatgctttaaactgaagctcgtagcttggcagtgcagtttaagcaaataaactcaggctgttgaacacaatgattaacaggaagcaggggagggg

SEQ ID NO: 192154 - DNA, 201 bp, Homo sapiens
cacactctatccttactttcttcttcctccttcccagctaagttagactacagatgctcttcgacttacagcggggttacatcccaagaaactcatcgcargtggaaaataccataaatcaaaaatgcatttaatggccacgtggggtggctaacgcctgtaatcccagcactttgggaggccgaggcaggtggatcacta

SEQ ID NO: 192155 - DNA, 201 bp, Homo sapiens
aacctatctctactaaaaatacaaaaattagccgggtgtggtggcacgtgcctgtaatcccagctactcgggaggctgaagcaggagaatcacttcagccygggaggcggaggttgcagtgagccaagatcctgccactgcactcgcgtctgggcgacagagtgagactccatctcagaaataaaaatttaaaaaaaaatt

SEQ ID NO: 192156 - DNA, 201 bp, Homo sapiens
tggccaccctactatacggggagacattgacacagcagttccaaagagagcagccagggaggtaaaaaggccaatccccacttttttttttttttttttttagagaagaccaagacaaagaaaaaggataattgatttggaaaagacttgaagagggatcggtgtctttacctaattaaaagatttgctcaggaaagagaa

SEQ ID NO: 192157 - DNA, 201 bp, Homo sapiens
ggcagtagaatcgcttgaacccaggaggcggaggttgcagtgagccaagatcacgtcatcgcactccagcggagactctgtctcaaaaaaaaaaaaaaaaagatttctagactagtacctccattttatagatgaagaaacttcaatgtgattacatgatgtgctcaaatcccacagctagtaagcaaatgcaccaattat

SEQ ID NO: 192158 - DNA, 201 bp, Homo sapiens
gagatcctatctctttaaaacaaaaaacaaaaaacaggtgttctcaaccttaaccacatattgctttcatgtaggaatttttttttttttttttttttttttgagacagagtctcactctgccacccaggctggagtgcagtggcaaaatcttggctcactgcaacctctgcctcccaggctcaagccatccccctacctc

SEQ ID NO: 192159 - DNA, 201 bp, Homo sapiens
caggcgtggtggcgcatgcctgtaatcccagcttctcagaaggctgaggcagtagaatcgcttgaacccaggaggcggaggttgcagtgagccaagatcaygtcatcgcactccagcggagactctgtctcaaaaaaaaaaaaaaaaagatttctagactagtacctccattttatagatgaagaaacttcaatgtgatta

SEQ ID NO: 192160 - DNA, 201 bp, Homo sapiens
tgagatcctatctctttaaaacaaaaaacaaaaaacaggtgttctcaaccttaaccacatattgctttcatgtaggaatttttttttttttttttttttttttgagacagagtctcactctgccacccaggctggagtgcagtggcaaaatcttggctcactgcaacctctgcctcccaggctcaagccatccccctacct

SEQ ID NO: 192161 - DNA, 201 bp, Homo sapiens
accagcctggccaacatggtgaaaccccgtctctactaaaaataccaaaaattagccaggcgtggtggcgcatgcctgtaatcccagcttctcagaaggcygaggcagtagaatcgcttgaacccaggaggcggaggttgcagtgagccaagatcacgtcatcgcactccagcggagactctgtctcaaaaaaaaaaaaaa

SEQ ID NO: 192162 - DNA, 201 bp, Homo sapiens
tgtttgtttgtttgttttgagatggagtcttgctctatcaccaggctggagtgcagtggtgcaatcttggctcactgcaacctccgccgccccggttcaarcgattctcttgcctcagcctcccatgtagctgggattacaggcgcacgccaccacgcccggctaatttttttgtattttagtagagatgaggtttcacaa

SEQ ID NO: 192163 - DNA, 201 bp, Homo sapiens
ctcacgcctgtaatcccagcgctttggaaggctgaggcaggaggatctcttgaagccaggagtttgagaccagcctgggcaacatagtgagacactgtctstattttttttcaagaagttaaaacaaacaaacaaacaaaaaaaccttattgcaccttaaagatttctaggctgagcgcagtggctcacacctgtaatccc

SEQ ID NO: 192164 - DNA, 201 bp, Homo sapiens
gtttgtttgtttgtttgtttgttttgagatggagtcttgctctatcaccaggctggagtgcagtggtgcaatcttggctcactgcaacctccgccgccccrgttcaaacgattctcttgcctcagcctcccatgtagctgggattacaggcgcacgccaccacgcccggctaatttttttgtattttagtagagatgaggt

SEQ ID NO: 192165 - DNA, 201 bp, Homo sapiens
ccagaacctagcacagtgccgggcataaagtaagtacaccaaaaaatgttgaatgagtcatttggtcatgagatttctgttttcaaaggttttttttttttcaaagaatagcatgtttgtatgttgtttcattacatgatgggcctactgggcacgagggttttccatctgtctctaaatcattagtatccttctgtatct

SEQ ID NO: 192166 - DNA, 201 bp, Homo sapiens
ttgttgtttgtttgtttgtttgtttgttttgagatggagtcttgctctatcaccaggctggagtgcagtggtgcaatcttggctcactgcaacctccgccrccccggttcaaacgattctcttgcctcagcctcccatgtagctgggattacaggcgcacgccaccacgcccggctaatttttttgtattttagtagagat

SEQ ID NO: 192167 - DNA, 201 bp, Homo sapiens
tttgcttgtttgttttttggtttgttgtttgtttgtttgtttgtttgttttgagatggagtcttgctctatcaccaggctggagtgcagtggtgcaatctyggctcactgcaacctccgccgccccggttcaaacgattctcttgcctcagcctcccatgtagctgggattacaggcgcacgccaccacgcccggctaatt

SEQ ID NO: 192168 - DNA, 201 bp, Homo sapiens
tcctggtgtcaagtgatccacctgcctcagcttcccaaagtgctgggattacaggtgtgagccactgtgcctgacagtcttttttttttttttttttttttaataatgctatcttaaggtttttgtttgcttgtttgttttttggtttgttgtttgtttgtttgtttgtttgttttgagatggagtcttgctctatcacca

SEQ ID NO: 192169 - DNA, 201 bp, Homo sapiens
ctcctggtgtcaagtgatccacctgcctcagcttcccaaagtgctgggattacaggtgtgagccactgtgcctgacagtcttttttttttttttttttttttaataatgctatcttaaggtttttgtttgcttgtttgttttttggtttgttgtttgtttgtttgtttgtttgttttgagatggagtcttgctctatcacc

SEQ ID NO: 192170 - DNA, 201 bp, Homo sapiens
actcctggtgtcaagtgatccacctgcctcagcttcccaaagtgctgggattacaggtgtgagccactgtgcctgacagtcttttttttttttttttttttttaataatgctatcttaaggtttttgtttgcttgtttgttttttggtttgttgtttgtttgtttgtttgtttgttttgagatggagtcttgctctatcac

SEQ ID NO: 192171 - DNA, 201 bp, Homo sapiens
aactcctggtgtcaagtgatccacctgcctcagcttcccaaagtgctgggattacaggtgtgagccactgtgcctgacagtcttttttttttttttttttttttaataatgctatcttaaggtttttgtttgcttgtttgttttttggtttgttgtttgtttgtttgtttgtttgttttgagatggagtcttgctctatca

SEQ ID NO: 192172 - DNA, 201 bp, Homo sapiens
gccccgggcggcggggccggccggcttctccgagtgctgggcgcccccagcccacgcccacccggaactcacgctggccggcaagcgctgcgcgcagccckggttcccgccggcgcctctctctccacacctcccagcaagctgagggagctggctctggccttggccagcccagaaaggggctcccacagtgcagccgcg

SEQ ID NO: 192173 - DNA, 201 bp, Homo sapiens
agggtctagttccaagggcagctagaaatgacttgatcttttccccatgtgtaatattttcccgatgtgtgtttttagcttcttaaactgattcctgtaayggcagcctcttttgctgttctttatgcctcactgctgagcttccctgccatgtctgtgcatgctgacttgctgggaatgggttacagatgggctacacgt

SEQ ID NO: 192174 - DNA, 201 bp, Homo sapiens
tacaggcgtgaaccactgtacctagcccccaatgttaattctatgtttaacattttgaggacctgccaaactggtttccaatggattgcaacatcttgcaygcccaccatcagtgtatgagggttccaattttttcatatccttgttattgtctatcttttttagtttagcccttctagtgagtgtgaagtggtatcctct

SEQ ID NO: 192175 - DNA, 201 bp, Homo sapiens
tttatggactttctttgtcaggtactcagtctaaaccaagcctctcaggtacagttttcccataaaaacagcctcctctttattctatgctgaatctaaartaatgacagcgtttagaaccacaagcggccttagagaacatcctctaatcctagttatacaaatttggagattgtgagccagagagatcaagtggctggc

SEQ ID NO: 192176 - DNA, 201 bp, Homo sapiens
cctagacagttgtctttgttttaaatgaagtattgcattttgatggcttctaaaaacaataaaatattagtggtatatcaaagctatatataattgatatrtgtatatatcaatgtccatagtacaatgatcaatatatactcgacgtctaaattatctcttgaaaatacatatctcttccctatttctctttacacaata

SEQ ID NO: 192177 - DNA, 201 bp, Homo sapiens
acctggctcatttttaaattttgtgtagagatgggatctcgatatgttgcccaggctggtctcaaactccagggctcaattgattctctcctcagcctccyacaagtgctgagattacaggtgtgagccattgcacctagacagttgtctttgttttaaatgaagtattgcattttgatggcttctaaaaacaataaaata

SEQ ID NO: 192178 - DNA, 201 bp, Homo sapiens
ccttctgggctcaagtaatcctcctgcctcaggctgccaagtagcaaggactacaggtatgcaccactacacctggctcatttttaaattttgtgtagagwtgggatctcgatatgttgcccaggctggtctcaaactccagggctcaattgattctctcctcagcctcctacaagtgctgagattacaggtgtgagccat

SEQ ID NO: 192179 - DNA, 201 bp, Homo sapiens
tggctctatggatttgccttttctggacatttcatattaaccaaatcatactatatgtgttctttcatgcgtagctccttttacttattgccatgtttttraggttcatccgtgttatcgcgtgaatcagtacttcactttttataggaatggatgctgttccattatatggatacaccacgtttattttttcatccattg

SEQ ID NO: 192180 - DNA, 201 bp, Homo sapiens
ctgtcattccttatcgattgtataagacagttttttctagaagcaggagttgtttttgtctttgttttgttttgagatagggtctccctctgtcacctagrctggagtgcagtggcattaatttagctcactgcagcctcagccttctgggctcaagtaatcctcctgcctcaggctgccaagtagcaaggactacaggta

SEQ ID NO: 192181 - DNA, 201 bp, Homo sapiens
ctttacagttatgcaaccatgatccccggctaatgtagaatcattttattactacacaaagaaacctcatgaccacttcccatttccacacccaacccctrcttttctggctctatggatttgccttttctggacatttcatattaaccaaatcatactatatgtgttctttcatgcgtagctccttttacttattgccat

SEQ ID NO: 192182 - DNA, 201 bp, Homo sapiens
cagtggggttgctagggaagtagagaaaagcagtgtgtccctggaagagcaaggtaagttggggtgggggcaggtagtgtcacagacagagaagccatagmaagcttcttcgatttactttccaccacttggataggctttctactactgccttttaaaaattggaaagctaaggcacagtaatttttagaagctttctca

SEQ ID NO: 192183 - DNA, 201 bp, Homo sapiens
accttctttcattgttccctcctgtttcaagaggacaagtcacccatcctcccaacaaaagccgccagctatggtctcagctatctgtgggccccctctctcagacccttgctcttttgcattctcagcctctccctttctgctgcctcttttccttttctctgaaagcctgtactcattgcccctatcttgaagacatcg

SEQ ID NO: 192184 - DNA, 201 bp, Homo sapiens
aacagatcgacagagttacagctgtttcctgccccagttttaggcaccataaagattttctagaaggcttgccaatcatcatcatcctgtaagttcttacmctgctacgcactaaactaattgcctttccccctcttaaaggtaacaggtttattgaggtataatttacatagggtgaaatttatgacatataatttacat

SEQ ID NO: 192185 - DNA, 201 bp, Homo sapiens
taaagtgaatattgaattaagtataagtacaatcatgattggtaaacatctactaagctgaactgaacatgaatttaattctagcggaaaggatgagcatyctttctactgctttagaaccggcaagatcatttctccaactcattcatcctcctgtcattccttatcgattgtataagacagttttttctagaagcagga

SEQ ID NO: 192186 - DNA, 201 bp, Homo sapiens
atatatgcatgtgcttatatacctaccaacctctttaactctcaccgccttgtgaggtagtttctattaccttcattttacagaaaagaaaactgaggctrtgagtgtaaattacttgcctacattctctacaaatccacccctttgcactgcaacccagatggcacatataaagggggtgtgggtagaaggatgctcaac

SEQ ID NO: 192187 - DNA, 201 bp, Homo sapiens
aacaggtttctaccgtccaagtcactgatagaatctacaacagatcgacagagttacagctgtttcctgccccagttttaggcaccataaagattttctasaaggcttgccaatcatcatcatcctgtaagttcttacactgctacgcactaaactaattgcctttccccctcttaaaggtaacaggtttattgaggtata

SEQ ID NO: 192188 - DNA, 201 bp, Homo sapiens
tatataaagtgaatattgaattaagtataagtacaatcatgattggtaaacatctactaagctgaactgaacatgaatttaattctagcggaaaggatgarcattctttctactgctttagaaccggcaagatcatttctccaactcattcatcctcctgtcattccttatcgattgtataagacagttttttctagaagc

SEQ ID NO: 192189 - DNA, 201 bp, Homo sapiens
caaggtggtctcgatctcttgacctcgtgatccacccacctcagggtcccaaagtgttgggattacaggcgtgagccaccacgcccagccttaattagctsttaattcctaatctctagaacaacattttataaaacaagacaaattggattaaagtatatattagtataaagtatatataaagtgaatattgaattaagt

SEQ ID NO: 192190 - DNA, 201 bp, Homo sapiens
acagaatgatttatattcctttggatctatgggatcgctgggtcaaattcctatacgttttagttcaggtctagaaaagtaaaatcattaattaagggaakttagcagagttattttggccctgagaggctgtgatttaaaatattcagaaaatgtagttgaagtagttgatttggcttcaacttgaattccctatgtaat

SEQ ID NO: 192191 - DNA, 201 bp, Homo sapiens
gtgctgggattacaggcatgaaccactatgtctggcaacttcttctctagtaatgatttatatattataatcttggagtctaactatgattaaatagaccyttcaatctctatgacctatccaaaatttatttcatagacagggttattgaaaaacacttagcacagtgtttctcaaatggggtgattttgctcacccaca

SEQ ID NO: 192192 - DNA, 201 bp, Homo sapiens
gggtttcaccatgttggccaaggtggtctcgatctcttgacctcgtgatccacccacctcagggtcccaaagtgttgggattacaggcgtgagccaccacrcccagccttaattagctgttaattcctaatctctagaacaacattttataaaacaagacaaattggattaaagtatatattagtataaagtatatataaa

SEQ ID NO: 192193 - DNA, 201 bp, Homo sapiens
gagggtgctatcggcatctattgggtagaggccaaggatgctgctaaacatcttacaaaacacaggacagcccccacaacaaagaatcatccagcccaaastgtcaatcgcgctgaagtggagaaaccctggcttagcaagatgccaacctacagcaccccacccctcaaccgaattaggtattagtaaatggatcagaat

SEQ ID NO: 192194 - DNA, 201 bp, Homo sapiens
tgcccaggatggtctcacactcctgggctcaaactatcctactggctccgcctccttttttttttctgaggcggagtctcactctgtcgcccaggctggastgcagtgacgtgatctctgctcactgcaagctccgcctcctgggttcacgccattctcctgcctcagccttccgagtagctgggactacaggcgcccgcc

SEQ ID NO: 192195 - DNA, 201 bp, Homo sapiens
gaactcctggtgtcaagtgatccacctgcctcagcttcccaaagtgctgggattacaggtgtgagccactgtgcctgacagtcttttttttttttttttttttttaataatgctatcttaaggtttttgtttgcttgtttgttttttggtttgttgtttgtttgtttgtttgtttgttttgagatggagtcttgctctatc

SEQ ID NO: 192196 - DNA, 201 bp, Homo sapiens
caacctccgcctcctgggttcaagtgatcgttgtgcctcagcctcctgagtagctgggactgcaggcgcctgccaccacacctagctaatttttgtattttagtagagacggggtttcaccatgttggccaggctggtcttgaactcctggtgtcaagtgatccacctgcctcagcttcccaaagtgctgggattacaggt

SEQ ID NO: 192197 - DNA, 201 bp, Homo sapiens
gcgagactccatctcaaaaaacaaacaaaaaaaaaaaaaaaaaaaaaaacaagtaataaaatgggcatggagctgtataaatgccggtatccttacaccaratgatctcacacagctctgcgtttgtagttgaacttacttcacctactgctgtcggcaggggacctgagcctgccagttttgtttccctgttctaatttg

SEQ ID NO: 192198 - DNA, 201 bp, Homo sapiens
gcctgggccacagagcgagactccatctcaaaaaacaaacaaaaaaaaaaaaaaaaaaaaaaacaagtaataaaatgggcatggagctgtataaatgccgktatccttacaccaaatgatctcacacagctctgcgtttgtagttgaacttacttcacctactgctgtcggcaggggacctgagcctgccagttttgtttc

SEQ ID NO: 192199 - DNA, 201 bp, Homo sapiens
gagcctcagttaattttggttttaggacattaaagaaagtttttaaggtgtttgagaatttattagaaagtaggaattgccttttttttttttttttttttgagacacgatcttactctatcacccaggctggagtgcagtggcatgatctcggctcactgcaacctctgcctcctgggctcaagcaattctcgtgcctca

SEQ ID NO: 192200 - DNA, 201 bp, Homo sapiens
ctttcttttcttaagccgtaccatgttccagaaaggacttaagatgtcataatataatttcttgggaaaggaaatcaacatagccaagatctgaaaaaaaatgagagccttttcacaattattctatgtaggttttgactggcttggccacatcttcccattttgagtgtttggcttcctcagtgttaaaacaaattttgc

SEQ ID NO: 192201 - DNA, 201 bp, Homo sapiens
caaccatataaaactagatgtagatgtacccaaagatggataggaggaaatgtgtaaagtaaattgacatgttcaggtggataccagttccttttttttttgagataaggtccctgctctgttccccaggctggagtgcagtggtgtgatcacggctcactgtagcctcgacttcccaggctcaagcaattctcccacctc

SEQ ID NO: 192202 - DNA, 201 bp, Homo sapiens
atcctgcagcttctcatctgggggccacactttgagaactgctgacacggaccatcttttacagagactggcacatgtatagatttgcagcaaatgccgawtctgttcatttccaaccaccagtaaaaataaaaactagttgatataaggaaaagctttatggtgttgattgcatatggcagacttcatgaaagtggtatg

SEQ ID NO: 192203 - DNA, 201 bp, Homo sapiens
gaaccggcaagatcatttctccaactcattcatcctcctgtcattccttatcgattgtataagacagttttttctagaagcaggagttgtttttgtctttrttttgttttgagatagggtctccctctgtcacctagactggagtgcagtggcattaatttagctcactgcagcctcagccttctgggctcaagtaatcct

SEQ ID NO: 192204 - DNA, 201 bp, Homo sapiens
gctccaagacagctaggatttttgaccagtttgttcactgttgtgtgtccacacctaaaccatgttgtttttggtttgaattgggatttccagaggttcarcatttcaagctttttccttctatgagcttccttctgaggactccccgtctgacccgtgtattgtaagccactacaagatgtcctcaccaacatttttggt

SEQ ID NO: 192205 - DNA, 201 bp, Homo sapiens
gaagagcaaggtaagttggggtgggggcaggtagtgtcacagacagagaagccatagcaagcttcttcgatttactttccaccacttggataggctttctwctactgccttttaaaaattggaaagctaaggcacagtaatttttagaagctttctcagggacccttagcaaacagcagggccaggtttaaatgtggtctt

SEQ ID NO: 192206 - DNA, 201 bp, Homo sapiens
acgttgaatgatggggtagaatcatgtcttaacaaacgtcaccaggacgttcgagtctaaaataacgctacttgggggggctggaggacaatccacactgrcatttgtcttgtcaatatggagataaattctggctgaaggagaaattccacaaaacagatacttccataggttcgtatccattgaacagactcttaaaat

SEQ ID NO: 192207 - DNA, 201 bp, Homo sapiens
gcctgcacccaggtgaaataaacagccatgttgctcacacaaagcctgtttggtggtctcttcacacggacgtgcatgaaaacggggtttcaccatgttgkccaggctggtctcgaactcctgacctcaggtgatctgcctgccttggcctcccaaagtgctggaattacaggcgtgagccaccacgccctgccacatttt

SEQ ID NO: 192208 - DNA, 201 bp, Homo sapiens
aacgtctctccagctctcaacaactgtaaacactgagctatttagaaggtatatgttctctgcaggaaggtcactgggaccttacgtctgggtgtggctgratcagtcccagtctttttcaaagtatgcattgtgttctctctacatcagcccagactttgaattcagtttctaggaccacaaaggattcattcactcatg

SEQ ID NO: 192209 - DNA, 201 bp, Homo sapiens
aagagacaacaatagaaagaaactcaaaacgtctctccagctctcaacaactgtaaacactgagctatttagaaggtatatgttctctgcaggaaggtcaytgggaccttacgtctgggtgtggctgaatcagtcccagtctttttcaaagtatgcattgtgttctctctacatcagcccagactttgaattcagtttcta

SEQ ID NO: 192210 - DNA, 201 bp, Homo sapiens
ctgggattacaggcatgagccaccgcgcccggcctaattttgacctatctttttatggctttttaatgacatcctctcataaagaatgtccttcgtgtttratgcccttcctgtctaactcttcatcctttatgtctaactctgtctaactcttcatcctatatggcccaccttggaagtcacttcctctggatgccatgt

SEQ ID NO: 192211 - DNA, 201 bp, Homo sapiens
tggcgcgatctcagctcactgcaacctccgcctctcaggttcaagcgattctcctgcctcagcctcccgagtacatgggattacaggtgcccaccaccaascccggctaatttttgtatttttagtagagacatggtttcaccatgttgaccaagatggtctcgatctcctgacctcatgatctgcccgcctcggcctccc

SEQ ID NO: 192212 - DNA, 201 bp, Homo sapiens
ctcattgctcaaagttcatggagctgttacaggggtacttactggttttagaatcttggaagctgcttcggatattcacaaatcaccattctggctgaaayatctctggtttaagatctgaacaagtagccaggtctcagctcttcttgtttctacaaatctaacctgatattttagcctggaggagtgggtaacaaagag

SEQ ID NO: 192213 - DNA, 201 bp, Homo sapiens
atgtaaatgaggaggcttcctagaggctggactgggctgggcttagctgagcctttgcaaacagcagggattcaaccctggggaactgcagaccaaagtgmgagagggacgcaccgcatctccaggcacatccaaaaaggatggacgagacaccgaagcagaggatacaggaggattaaaggattcaggaaagcaagcagc

SEQ ID NO: 192214 - DNA, 201 bp, Homo sapiens
aggctggattgcagtgtgtgatcttggctcaccgcagcctcaaactcctgggctcaagctgttctcccacctcagcctcccaagtagctgggattataagmatgagccactgcacctggcccatgttcaatttttctttgacgtttcctaaatgctcctctgttcttgggcaacagcaatgagacagttctcttccactca

SEQ ID NO: 192215 - DNA, 201 bp, Homo sapiens
atatagtgatctaagaaatgctggctgcagtcgccccagcaaaactaactttgattacatagttgctgaattttaactgttgtttgaattaatacttttcrtagtccttgataaacacagctgtaacaaacaaaattgacttttaaaataagcattctagaatttaggagttgaaataggtgatgtttctttcggacggat

SEQ ID NO: 192216 - DNA, 201 bp, Homo sapiens
atctcaaagcagaacaaaatggagtttcttatgtcttctgttttctacatagacacagtaacaatctgatctctctttcttttccccacatttacttcatyatatgatatcaacactgactctttcatgtaaaatgtcagtcctaggttccttccacccttgtgtcctgcctgtgcccccaagggtgtaattctttgttcc

SEQ ID NO: 192217 - DNA, 201 bp, Homo sapiens
gcagctttttcctataacaggtgggctgatgccttcaaggaggtgatgtgagagatccgttaaaatgcatatattcctagcagtgggaacaagttagttamaattaacccaaggatatagggaccagattcactcacaagagaagattttgagtgagaatagttagtaagagactaacctacaaacctgatgaagactgag

SEQ ID NO: 192218 - DNA, 201 bp, Homo sapiens
gttgtctatgaaccttctgctttctccaggccgaaatattctttccttgttcacttccatttctttaagcgtgtgcttaaggcctgtgtttttggttctcrccgcctggtcattctttcacttcctacaattctggcttctttccccaatgacttctactctctattatgcttcttcccagcccactgaattaatcaccat

SEQ ID NO: 192219 - DNA, 201 bp, Homo sapiens
ccctaacatttctgttcgccacccctaaaaaggaaataattgggaaacgctactcttaatgagctcttttatttttatttgtttgtttgtttgtttgtttrtttatttgagacagagtaccactctgtcgccaggatggagtgcagtggtgtggtctcggctcacacaacctctgcctcccaggttcaagcaattctcctg

SEQ ID NO: 192220 - DNA, 201 bp, Homo sapiens
aattcagtttctaggaccacaaaggattcattcactcatgctgattggacccgtgactgagaattaattacaaacgttgaatgatggggtagaatcatgtyttaacaaacgtcaccaggacgttcgagtctaaaataacgctacttgggggggctggaggacaatccacactgacatttgtcttgtcaatatggagataaa

SEQ ID NO: 192221 - DNA, 201 bp, Homo sapiens
tgcttaagcctgaaaaatcaaggctgcagtgagcatgactgcaccactgcactccagcctgggtgacagagtgagactctgtctcaaaaaaaaaaaaaaaatgctaggcttaagctcttcatgtggcatgacttccaggacctggccccccacaccctctgtctctaccctcatttctctttatttgatgcctcatacttt

SEQ ID NO: 192222 - DNA, 201 bp, Homo sapiens; identical to SEQ ID NO: 33215

SEQ ID NO: 192223 - DNA, 201 bp, Homo sapiens; identical to SEQ ID NO: 33216

SEQ ID NO: 192224 - DNA, 201 bp, Homo sapiens
agtcctaggttccttccacccttgtgtcctgcctgtgcccccaagggtgtaattctttgttccctcttcccatagtcagtgtgtgtgtgtgtgtgtgtgtgtgtgtgtgtgtgtgtgtgtgcgcgctatattctgacacatcattagaatctaaattaatctaccttgttatatttttctgccactgataatcttctactt

SEQ ID NO: 192225 - DNA, 201 bp, Homo sapiens
cagtcctaggttccttccacccttgtgtcctgcctgtgcccccaagggtgtaattctttgttccctcttcccatagtcagtgtgtgtgtgtgtgtgtgtgtgtgtgtgtgtgtgtgtgtgtgcgcgctatattctgacacatcattagaatctaaattaatctaccttgttatatttttctgccactgataatcttctact

SEQ ID NO: 192226 - DNA, 201 bp, Homo sapiens
tatgtataacatgtctattaatccatttctatttgtttcactaaatgtttgtattctgcttatattcaaagaaagctaggttggcctgttttcttcacagytttcaagtcctttcatagacattaacttgtttgatctctataagtactagagatattgatctagtaaagtaataaaatggggccaggcatggtagctcat

SEQ ID NO: 192227 - DNA, 201 bp, Homo sapiens
atgagagactgagaaaagaaataagacacagagacaaagtacagaggaagaaaagtgggccctgggggaccggcgcttagtaagtgaggaccaacaccggygctcacttactctgagtctctgagttctctcagtatttattgatcactatttttcctatcttggcgaggggaatgtggtggggctatagggtgaaggtgg

SEQ ID NO: 192228 - DNA, 201 bp, Homo sapiens
aaatgggacccaacttttgctctctgggaacactatcacatttctctctggcatgcaaacttaggtgtgtttgatgaagggagcctgcctctccactcctstgggtatttcttgcaaggtggagatgagagactgagaaaagaaataagacacagagacaaagtacagaggaagaaaagtgggccctgggggaccggcgct

SEQ ID NO: 192229 - DNA, 201 bp, Homo sapiens
tacatcatatattatatatcatgtataatatatatcatatatatttaaatatatataaactatatataaaatatttatatatttatataaatatatatatwttttttcccatgggctaaaggggaggcagtgatggggaagaaaagagtggaatttaacctccgggaataaagcatttgaaaaccttaaggtaaatgcttt

SEQ ID NO: 192230 - DNA, 201 bp, Homo sapiens
ctacaggagtgagatgggagcagggcccactcttaacatgcctcgtgtggctgccacagttgatcctttagttgaccagttaatttctcccttggaagtgyccttaccgtccgcatcaatccccagtgcacttcacattggctgcgagatcgcttgcagcactgcaagcaggtgaactctgagaaccctctgtaatgcgac

SEQ ID NO: 192231 - DNA, 201 bp, Homo sapiens
ttaatgtctccattctgtagaagaagaaaggaaacgggggcacgcagaggggctctgcagcctgccataaatggtggcatctgactgccctggcatatctmggactggccaagagaagcttgtccactcatgggttccttgttacctccaccagaaaccagtttcggtgggcatcaggacaacatatatgcatgtgcttat

SEQ ID NO: 192232 - DNA, 201 bp, Homo sapiens
ttatatactagcctatttcaatctcttaagaaccctatggggtcagcgttcttaatgtctccattctgtagaagaagaaaggaaacgggggcacgcagagkggctctgcagcctgccataaatggtggcatctgactgccctggcatatctaggactggccaagagaagcttgtccactcatgggttccttgttacctcca

SEQ ID NO: 192233 - DNA, 201 bp, Homo sapiens
cacgcccggttaatttttttgtattttagtagagacggggtttcaccatgttgcccaggggtagtctcgaattcctgagctcaggcgatccgcccacctcrgcctcccaaagtgctgggattacaggcatgagccactgcgccgggctgagctcttctattttcaatgtcatgttttaagaggaaaaattcttctgtccgt

SEQ ID NO: 192234 - DNA, 201 bp, Homo sapiens
gtcacatttctagagtgtgtgtgaatatacataataaaatagtaatatatatatatacacacacttatatgtatatataaatatatttatgtgtatatatrtatatatcatatgtattatatgtatatatttaaaaatacacatgtaatatatattttaaatatgcatacaaaaatatatctcttaaagtacatataaaaa

SEQ ID NO: 192235 - DNA, 201 bp, Homo sapiens
ttttttttttttttttttttgagacggagtctcgctgtcgcccaggctggagtgtagtggcatgatctcggctcactgcaagctctgcctcctgggttcaygccattctcctgcctcagcctcccgcgtaggtgggactagaggcacgcgccacctcgcctggccaattttttgtatttttagtagagacggggtttcatc

SEQ ID NO: 192236 - DNA, 201 bp, Homo sapiens
tcgcctcctgggttcaagtgattctcctaccacagcctcccgagtagctgggattacaggcgtctgccaccatgcccagttaatttttgcatttttagtaragacggagtttcaccatgttggccaggctggtcttgaactcctgtcctctggtgatccacctgcctcagcctcccaaagtgctggaattacaggcgtgag

SEQ ID NO: 192237 - DNA, 201 bp, Homo sapiens
tttttattttattttatttttttgagatagaatttcactctttttgcccaggctggagtgcaatggcatgatctcggctccctgaaaccttcgcctcctgsgttcaagtgattctcctaccacagcctcccgagtagctgggattacaggcgtctgccaccatgcccagttaatttttgcatttttagtagagacggagtt

SEQ ID NO: 192238 - DNA, 201 bp, Homo sapiens
ctcccgcggctcctggagttgcctcctctcatcccaggcaagtgactacattccctaccttcgggagctcagccacaaagtgagcagagtgggatctgtcrccctgggaaattggcaagatgctacctccttcctgataggtcaccgagcagtctgcccagagccccaggagcagaagtgctcatgggccaagttaagggg

SEQ ID NO: 192239 - DNA, 201 bp, Homo sapiens
tggcctgattttggctcactgcagccttgacctcccatgctcagatgatccttccacctcagtctcccgaacacctggggccccaggcgcacatcacaacrcccagctaatttttgtattttcatagagatgggatttctgtatgttgcccaggctggtctgaaactcctggattcaagagatctacctgcctgttacagg

SEQ ID NO: 192240 - DNA, 201 bp, Homo sapiens
ctggctcgtcctggctcaaaaagctcccccactgagcaccttgcgacccccactcctgcccgccagagaacaaaccccctttgactgtaattttcctttayctacccaaatcttataaaacggccccacccctatctccctttgctgactctcttttcagactcagcccgcctgcacccaggtgaaataaacagccatgtt

SEQ ID NO: 192241 - DNA, 201 bp, Homo sapiens
ctcagcctcccaagtagctaggattacaggtgcctgccaccacgcccagctaatttttttgtatttttagtggagatgggtgtcaggcctctgagcccaarccaagccatcacatcccctgtgacttgcacgtatatgcccagatggcctgaagtaactgaagaatcacaaaagaagtgaatatgccttgccccaccttaa

SEQ ID NO: 192242 - DNA, 201 bp, Homo sapiens
ctggctctcataaagtgtgctactctgggtggagcaggctggcgcttcagttgaacccaggcacctttctctttgtcttctttctttttctgatcgttttycttcaagcgtttcaggaagctagctcggctcttagagtgcttaatgtgctcaatacacacattaattctcttggcaagaatcttgcccttaacttgtttg

SEQ ID NO: 192243 - DNA, 201 bp, Homo sapiens
tgcaagaaatcactgcctatctctattttaagacttttgtttccatttatttgaaagtgttcggaagatataaaggatgggatgttctagatatggatcatctctggcagcagctggattgtcaaatagtgtctcttggaacttctcaacttctttttcctcggatgcgacattcggaatcagagaaaagttgttgtgcag

SEQ ID NO: 192244 - DNA, 201 bp, Homo sapiens
gtacataccaatctgtgtgaaatgcgaaaggtaataaactgaaagaaagtaagcctgacttagaggcttaattgatgaaattgatgcccttctctcatgaytctcatctctacgcttcttctttatcaacattgcaggtgttcctggctctatgccaaatgcatcctggactggaaacctcagagctataaagtggagtga

SEQ ID NO: 192245 - DNA, 201 bp, Homo sapiens
ttgcaagaaatcactgcctatctctattttaagacttttgtttccatttatttgaaagtgttcggaagatataaaggatgggatgttctagatatggatcatctctggcagcagctggattgtcaaatagtgtctcttggaacttctcaacttctttttcctcggatgcgacattcggaatcagagaaaagttgttgtgca

SEQ ID NO: 192246 - DNA, 201 bp, Homo sapiens
gcggatcacgaagtcaggagatcgagaccatcctggccaacatggtgaaatcccatctctactaaaaatacaaaaaaaattagccggacctagtggcgggygcctgtagtcccagctactcaggaggctgagtcaggagaatggcgtgaacccaggaggcggagcttgcagtgagctgagattgtgccactgcactccagc

SEQ ID NO: 192247 - DNA, 201 bp, Homo sapiens
agtacataccaatctgtgtgaaatgcgaaaggtaataaactgaaagaaagtaagcctgacttagaggcttaattgatgaaattgatgcccttctctcatgwctctcatctctacgcttcttctttatcaacattgcaggtgttcctggctctatgccaaatgcatcctggactggaaacctcagagctataaagtggagtg

SEQ ID NO: 192248 - DNA, 201 bp, Homo sapiens
agatgagccaggtttggcaacagagagaaatgtcttgagatttgtcacgtactaattacatgcaaggcattgttctaaactctttttatatactagcctayttcaatctcttaagaaccctatggggtcagcgttcttaatgtctccattctgtagaagaagaaaggaaacgggggcacgcagaggggctctgcagcctgc

SEQ ID NO: 192249 - DNA, 201 bp, Homo sapiens
actggacctattccatttataacgcttttcccattgtttttgaggagagagtatagagtttaaggatgtcatctaaaaggatagatggcaggccgggcgckgtggctcacgcctgtaatcccagcactttgggaggtcaaggaggccaaggcaggcggatcacgaagtcaggagatcgagaccatcctggccaacatggtg

SEQ ID NO: 192250 - DNA, 201 bp, Homo sapiens
acaacatattgaagggtaaaaatcaaagctacaatattagccctgaagaccccaaccaaagtgaacctggactggacctattccatttataacgcttttcscattgtttttgaggagagagtatagagtttaaggatgtcatctaaaaggatagatggcaggccgggcgctgtggctcacgcctgtaatcccagcactttg

SEQ ID NO: 192251 - DNA, 201 bp, Homo sapiens
gtagttggtataatttaaatgcattcttttgggttcactgtaaagccatcccatgaatattaatcacttgtccccatgcctcagtggttcacggaaatgtraagaaggatcacgcagagattttctgcactatagacttagtgatgatttgcacgcctgccccctccacaccccctgagataatgatttgaatgtttcttt

SEQ ID NO: 192252 - DNA, 201 bp, Homo sapiens
gttgcaagaaatcactgcctatctctattttaagacttttgtttccatttatttgaaagtgttcggaagatataaaggatgggatgttctagatatggatcatctctggcagcagctggattgtcaaatagtgtctcttggaacttctcaacttctttttcctcggatgcgacattcggaatcagagaaaagttgttgtgc

SEQ ID NO: 192253 - DNA, 201 bp, Homo sapiens
acttgagtctggggaggttgaggctgtggtgacctgtgattgcaccactgcagttcagcctgggtgacagagtgagaccttgtctcaaaaaaaagaaaaaraaaaagaaagaaaaatgtattatctttataaaaaagatgttcaataaaagacttctatgaagaacaggtattcctagcccaggcaacatagcaagaccct

SEQ ID NO: 192254 - DNA, 201 bp, Homo sapiens
gcgctgtggctcacgcctgtaatcccagcactttgggaggtcaaggaggccaaggcaggcggatcacgaagtcaggagatcgagaccatcctggccaacayggtgaaatcccatctctactaaaaatacaaaaaaaattagccggacctagtggcgggcgcctgtagtcccagctactcaggaggctgagtcaggagaatg

SEQ ID NO: 192255 - DNA, 201 bp, Homo sapiens
aggatgtcatctaaaaggatagatggcaggccgggcgctgtggctcacgcctgtaatcccagcactttgggaggtcaaggaggccaaggcaggcggatcaygaagtcaggagatcgagaccatcctggccaacatggtgaaatcccatctctactaaaaatacaaaaaaaattagccggacctagtggcgggcgcctgtag

SEQ ID NO: 192256 - DNA, 201 bp, Homo sapiens
tccctaaatcagccctaggcagaggagagggtacgagggcaaaccactgaagaggccaacatttctttgcagtctcattgctttattttacaaagttattwaaatattacatttctgtctactctataacttttgtaaactttttattgcaatataatcctatatacagaaaattgcacataccagaattgaacagatcac

SEQ ID NO: 192257 - DNA, 201 bp, Homo sapiens
gccttccatctctccatttaaataatggccttgtttaatggtatgtcattcaatggtaacacatcatgtcattggtgtgtcatttaggaagctttttctgrtcttattttttcccaattttatacctttataaacctctgttgtaatgcttttatgtcattctagaatctctgcattatcattattaatgtgaatatcgta

SEQ ID NO: 192258 - DNA, 201 bp, Homo sapiens
ttgtgatctcatttacatctgcagtttctcaccaccacctcagtactgaccattcacttccctgtagtgagctcccaggccttctgccacatctccttgtyttttggatatctcttctcgaagcttccacgagtgcctgctgacatctccctactccccacacacccagctttccactcacagtctctgtggtatggccat

SEQ ID NO: 192259 - DNA, 201 bp, Homo sapiens
aggagggagtaagggaagagtaagaagatttcaaaggagaggtaattgtgtcatttattagaagtatgagtgtggggtaagagatacgtgtgtatgcatgygtgtgtgtgaacggacttcttgtttagtaccattttgctgctgctttaccaccccaatctgttcctggacacggcgatggactctgtatatgttatctca

SEQ ID NO: 192260 - DNA, 201 bp, Homo sapiens
tgtcgtatagcatacccagccaatggggagagcgaggtgtggctgtggaaaaagacagggttaagcaatttttttaaagcactacatatttattgatagamtatctctccaggcagtattcacatgctttaaactgaagctcgtagcttggcagtgcagtttaagcaaataaactcaggctgttgaacacaatgattaaca

SEQ ID NO: 192261 - DNA, 201 bp, Homo sapiens
tactttgatttattttgctttttaaactgtgacttttatttatatgtgcacattctttgggagggtgttaggactctttcggttgcaagtgtcagaaactsaactcaaaggagcttaaacaagcaccagaagttaccgggtcacacatctgagatgcccaagggagctcccaatcaagctggatcagcgagtcaaaccgtg

SEQ ID NO: 192262 - DNA, 201 bp, Homo sapiens
ctcagcctcctgagtagctaggattataggcccccaccatcacgcccggttaatttttttgtattttagtagagacggggtttcaccatgttgcccaggggtagtctcgaattcctgagctcaggcgatccgcccacctcggcctcccaaagtgctgggattacaggcatgagccactgcgccgggctgagctcttctatt

SEQ ID NO: 192263 - DNA, 201 bp, Homo sapiens
attctttgtgatttaagatttggcatgtgaatctggttcttatataaccacacagccgttaatcaatatcagctcttctattttttttgagacagagtctyactctgtagcccaggctggagtgcagtggtgcgatctcggcttactgcaacctctgcctcccgggctcaagtgattcttgtgcctcagcctcctgagtag

SEQ ID NO: 192264 - DNA, 201 bp, Homo sapiens
gaaatcccgtctcttctacaaatacaaaaattagctgggcgtggtggcacatgcctgtaatcccagctacttgtgaggctgaggcaggaggattgcttgascccaggaggtcaaggccgcagtgagacatgatggtgccactgcactccagcctgggtgacagagtcagacactgcctcaaaggaaaaaaaccaaacatac

SEQ ID NO: 192265 - DNA, 201 bp, Homo sapiens
aggccaaggtgggcggatcgcttgagcccaagagttcaagaccagcttggccaacgtggcgaaatcccgtctcttctacaaatacaaaaattagctgggcrtggtggcacatgcctgtaatcccagctacttgtgaggctgaggcaggaggattgcttgaccccaggaggtcaaggccgcagtgagacatgatggtgccac

SEQ ID NO: 192266 - DNA, 201 bp, Homo sapiens
tgtcacccaggctggagtgcagtggcgccacctcggctcactgcaacctctgtctcccaggttcaagcgattctcctgcctcagcctcccaagtagctgarattacaggtgcccgccaccatgcccagctaatttttgtatttttagtagagatgggggttccaccatgttggccaggctggtctcaaactcctgacctca

SEQ ID NO: 192267 - DNA, 201 bp, Homo sapiens
tgtgtcctgcctgtgcccccaagggtgtaattctttgttccctcttcccatagtcagtgtgtgtgtgtgtgtgtgtgtgtgtgtgtgtgtgtgtgtgtgcycgctatattctgacacatcattagaatctaaattaatctaccttgttatatttttctgccactgataatcttctacttagtcatgttacaaatgtatttt

SEQ ID NO: 192268 - DNA, 201 bp, Homo sapiens
agcttctgctggcctgcccgttgccttttcgcaatgtatcttcctactttcttgaagaaatctacctttctctacctacaacagtcttggtaaattcttcytggtaaattcttttccccccacaccaccggccaagatagtatcgctcccccgtgacacgttccacttctggcgccgtcgtctacccttcttctttctctt

SEQ ID NO: 192269 - DNA, 201 bp, Homo sapiens
taataatgtcactctattatatttggacaatgcttaatttgcaagggaaatttcttacacattatctcctttaattcttataaaaccccataagaaggggrctgttcccattttacagatgagaaagtttaagatgaaaatatgtgacttagctgggcgtggtggctcacgcctataatcccagtagtttgggaggctgag

SEQ ID NO: 192270 - DNA, 201 bp, Homo sapiens
ccgggtcacacatctgagatgcccaagggagctcccaatcaagctggatcagcgagtcaaaccgtgtgctcaggaccctttcttgctaggtcatctccctrtggggagaccaactgtcccagtttgcccaggtctgaggggcagtcctgggcatgggaccttgatgggtacaaccaggtcgagatggtccccctatctctc

SEQ ID NO: 192271 - DNA, 201 bp, Homo sapiens
gtttcagagtcaggagcccaaggcgccccagcaatttcagaccccctgggacaggaactcctcctccagtaagctcttgttttgaaaaacagtggggtggkgccaaaaaagcattacaatggagctgggatggatgaggctttcttttatttgagatgtcacttgtgtcacgtttcctgaaacagcacgttggaaaacaga

SEQ ID NO: 192272 - DNA, 201 bp, Homo sapiens
cagagataatagttcagtatatgttttttatataaaagcatagttttacatgtctttactggtttttataaccagctctcctcatgtattagtccattccsattgcaataaagaaatacctgagactaggtaatttatttattatttatttttattatttatttttttgagacagagtctcactctgtcacccaggctgga

SEQ ID NO: 192273 - DNA, 201 bp, Homo sapiens
aagtatttctttgtctggaagatgttttatgaaatggtattttcttccctttttttctgccattggaagaaaactttaatgttattcacagttgccctagraacaagaggcactgcgcaccacacagcgccacggtgggaagcacccgtgtcagtccagatgcagacaggggagggaaagacataagccacagtctttttt

SEQ ID NO: 192274 - DNA, 201 bp, Homo sapiens
  misc_feature (1)...(201): n = A,T,C or G
gatctgagccattttccgttgtaagggtccttctggttgatgtgtatatgttgtggtttttgcttttttttttttttttttttggcaggtgtgcgaggganattttgagattgttccaattcattgtcatgattgagggattatgattaggattctgtaaagtaactagtccaggccaggtgtggtggctcacgcctgtaa

SEQ ID NO: 192275 - DNA, 201 bp, Homo sapiens
cactgcactccatgcactccagcctgggcaacagaatgagaccctatctctaaaaaagttaaaaataaataaatgaaagtgaacaccacagttctccttakgtcaaaggatttttctgtgaagcagatctgggcactgacaccaagatattcctgggcctcccagaaagggcaccacaaaaggctgctgcaacaagagcaa

SEQ ID NO: 192276 - DNA, 201 bp, Homo sapiens
attaccgcgactagactataatgtctttgaggtcttttgtatttttggcagtccagcatagtgagcattcagtgggctgacaggaaatatttattgaattsagtcaaatggaaataattttaggatgttggtgcccctcagcactgctgcctagtcaacttcaaatcattaccacttgcatcaccccctgccacccactcc

SEQ ID NO: 192277 - DNA, 201 bp, Homo sapiens
cgcccccagcccacgcccacccggaactcacgctggccggcaagcgctgcgcgcagccctggttcccgccggcgcctctctctccacacctcccagcaagmtgagggagctggctctggccttggccagcccagaaaggggctcccacagtgcagccgcgggctgaagggctcctcaagtggggccagagtgggtgccaag

SEQ ID NO: 192278 - DNA, 201 bp, Homo sapiens
tccaggcccgtctgatcctcacaaaacctaaacggtcctccccatcagcactaaagactgactgagtcaatggggccacccttgcattgggaatggacgckcgttcattcctttaacattggttgagagtctcctggtggccaagtgctatgaagtcaaaggcactgtgagaactggtcctctgctcagtgcagctttttc

SEQ ID NO: 192279 - DNA, 201 bp, Homo sapiens
agatgtccccagagagtcctgccttgggtcatgcagccattgtattaaacaatgaggatccccgttctcattccacaccacctctcaggctgcggctgacstctttgcaggcagctgccctttatgtagccccaagttgtccaatcagctgtgaccagggtggcagggtcatgtggtttaaaaaagcaaagcttgggtaac

SEQ ID NO: 192280 - DNA, 201 bp, Homo sapiens
tatggattgtgcccagatgtggttgctgtgtatcgtaattagagatggtgtttgggagatgacttgtaaccaaggtttctctcatttaaatataagcaccrggtgtttgtgtattcattttctcccactactaccaccaattagttttccatagtaaattttgctctagtggttagattgtccatcatttgagttcatgtt

SEQ ID NO: 192281 - DNA, 201 bp, Homo sapiens
cttttgtaaactttttattgcaatataatcctatatacagaaaattgcacataccagaattgaacagatcactgaagttttacattgctcttacctgtatrcacagctcaagaaaccatgttcctggtactcctaggaccccctaccccacaagggctccttcccagacacgtccaagattaacagtggtcctgactgcat

SEQ ID NO: 192282 - DNA, 201 bp, Homo sapiens
acggggtttcaccacgttggacaggctggtcttgaactcctgacctcgtgatccacacgccttggccttctaaagtgctgggattgcaggagtgtgccacygcgcccagcgtgaagacatttttggttgtcagaggttgagggagggaagcaaaaggtgctactggcattagtgggtagaggccaggggtgcccctcagca

SEQ ID NO: 192283 - DNA, 201 bp, Homo sapiens
cgtgatctcagttcacttgcaacctccacctcctgggttcaagcagttctctgcctcagcctcccaagtagctcggattacaggcgcatgccaccacaccyggctaatttttgtatttttaggagagacggggtttcaccacgttggacaggctggtcttgaactcctgacctcgtgatccacacgccttggccttctaaa

SEQ ID NO: 192284 - DNA, 201 bp, Homo sapiens
atcctgacctgttctccatccctgctgcttgccttttccggaaagtcatatttttatcatagcgtatgtagccattgagggctgagaaagcgctgctgctkcttctttcttttctattaatgaatgccttttgtatgttacaaggtgctcgtgagggtctctcttagatcctcaggcagttttatttttatttatttattt

SEQ ID NO: 192285 - DNA, 201 bp, Homo sapiens
acccctacccccagtgtccccttgccaaatcctgacctgttctccatccctgctgcttgccttttccggaaagtcatatttttatcatagcgtatgtagcmattgagggctgagaaagcgctgctgcttcttctttcttttctattaatgaatgccttttgtatgttacaaggtgctcgtgagggtctctcttagatcctc

SEQ ID NO: 192286 - DNA, 201 bp, Homo sapiens
ataaaatatttaaagatctcagtgagttttcaaccttttattttatttattatattttaaagctgatttttatgaaagcagtatatccttattttaaaaaygtaaacagtacacaaaagattaagaaaaataaaacatgtccatacttcttcatccttctctgtattacatctttttccagagataacattaataatatgt

SEQ ID NO: 192287 - DNA, 201 bp, Homo sapiens
cgcctggccaggatgtgagtgttgatgaccccagaagacactaaggattggaacagtagctcatgaactttgactttttaaacacttcacactgcacagtkaaaaacagtagaatactaagcaaatggaaagtaaggattatgagccatgcgtgaatgtttaattttctttttttaaaaaagtgctttcgagtactgtgta

SEQ ID NO: 192288 - DNA, 201 bp, Homo sapiens
ggtttcatgttcttttgtttttacctcgaaggattcataactgtgtctctttctagtattctccttattaggaataaagcgaacttcaaattcctatgatygttgcaatcctaacctccttcgtgccttgtgaaaaatcataacagttttcatgaagggtaaatcagtcacccttgtagaattttccattcaaatcctgag

SEQ ID NO: 192289 - DNA, 201 bp, Homo sapiens
tgttgttgttgttgttttgctttttttgttagagatggggtctcactctgttgcccaggctggtcttgaactcctgggctcaagcaatcctctcaccttgkcctcccagagtgctgggattataggcgtgagccaccacgcctggccaggatgtgagtgttgatgaccccagaagacactaaggattggaacagtagctca

SEQ ID NO: 192290 - DNA, 201 bp, Homo sapiens
tagtgatttttgctgctttaaatactaccttttgtgttcctgagcttgacaaacttaggacagtttctgacagggtttcatgttcttttgtttttacctcraaggattcataactgtgtctctttctagtattctccttattaggaataaagcgaacttcaaattcctatgatcgttgcaatcctaacctccttcgtgcct

SEQ ID NO: 192291 - DNA, 201 bp, Homo sapiens
ggctatgagggtttttgttgttgttgttgttttgctttttttgttagagatggggtctcactctgttgcccaggctggtcttgaactcctgggctcaagcratcctctcaccttgtcctcccagagtgctgggattataggcgtgagccaccacgcctggccaggatgtgagtgttgatgaccccagaagacactaaggat

SEQ ID NO: 192292 - DNA, 201 bp, Homo sapiens
ttgttggcctttgatatatcttcttagaagaggactaagtgccctttggacgttatttctttgaattaagattgttgcaatcactgaggacactgagatayggagtctgtattacttgcccaaggacgcccagctagtaagtgtcagtgtcaagatgattacatttgaatttaaaatggagtcgattaggagatgaaattg

SEQ ID NO: 192293 - DNA, 201 bp, Homo sapiens
cattactatttaatccacagaccctattccagtgtgcatggttatactcattatgtccttcatgaatctgggatctgatcaagaatcttaagctaaacttyggccatcatatctctttagtcccctccagtttggaacaatttctcagtctgtctttgtcttccaagatctcatttttgaagagtgcagctctgatgattt

SEQ ID NO: 192294 - DNA, 201 bp, Homo sapiens
actgccttttaaaaattggaaagctaaggcacagtaatttttagaagctttctcagggacccttagcaaacagcagggccaggtttaaatgtggtcttcarctgaaaagcagtggtcttcaccaccatgccgcatattgaccccatcgttagctttttgcaggtgcaccagcaggccagctcactggagtaaccaagtcag

SEQ ID NO: 192295 - DNA, 201 bp, Homo sapiens
ctatgctaaatccattagaaaacactcttgggagtgtggtctgcctttgggagttcttagtcatctgattgctagggtcagtatcaattaccctccatccrttttgaggactgaatttgtatattgtttttgttttctttctattttaagttcgggtacgtgtgcaggatgtgcaggtttgttacataggtaaacgtgtgc

SEQ ID NO: 192296 - DNA, 201 bp, Homo sapiens
ctctgacacctcagcctcccaaagtgctgggaccacaggcatgggccactgcacctggccagagtctgcatttcttctttttttttttttttttttttgasacagggtctcactctgttgcccaggctggagtgcagtgctgcaacctcggctcactgcaacctccacctcccaggttcaaacaattcttctgcctcagcc

SEQ ID NO: 192297 - DNA, 201 bp, Homo sapiens
catggcctgctcaggtgaaggtgcccatgaggagaacagtgttacagaaagggggttcacatatggctttaaagatgtccaagaagcctcactagctgttmtgaaattagggcttcctgccctccctttttcctctccccacttccgtcttttacccttaatctggtccacaacaagatggcatgccttttagtttcttgt

SEQ ID NO: 192298 - DNA, 201 bp, Homo sapiens
aggcgtggtggcgcatgcctgtaatcccagcttctcagaaggctgaggcagtagaatcgcttgaacccaggaggcggaggttgcagtgagccaagatcacrtcatcgcactccagcggagactctgtctcaaaaaaaaaaaaaaaaagatttctagactagtacctccattttatagatgaagaaacttcaatgtgattac

SEQ ID NO: 192299 - DNA, 201 bp, Homo sapiens
acttttatttttacgaataaacactgcatggtcaatactaaataagttgctttgaaaagagtggaaaaaatgggacaaacttctttacggttttaaatgtyaaattaaaaaaaaaatttcatctgtaaaatggtaaaatggagatgtgttatatcacccactcttgtgaaccgctctgttcacaggacaaaagaccgaagg

SEQ ID NO: 192300 - DNA, 201 bp, Homo sapiens
ctctctcctaaaattcaagactgagatgctcttctctccttcctctaagcatcagggttctctgtctgcatcctatgcggaccagggcaaaataaacttgraattcactatgttagcctgtatgcaattttgggtgatgatgggctattggtcgttttgttgttttaaaaaaagaagttagcctttattcatccgagtgcc

SEQ ID NO: 192301 - DNA, 201 bp, Homo sapiens
aggaggctggaattcaggatccagaggaagaagcatttgagagtggaatggaaagacttagggggaggtaggaggaatgggttggggagttccaggatgaragagggcttttcaataggacagagacagaaagagatttggggagagagagagacacacacatagaaagaagaaccaggattcagagatcattgcaatcag

SEQ ID NO: 192302 - DNA, 201 bp, Homo sapiens
acttctccatcagggcatgagggttgctgttgctccatatcttcacgaattgaattggtattttctgccttacttcctttctctctcaatctctctctccycttttttttttttttttttttttgagacagggtctcgctctgtcacccaggttggagtgtagtggcacagtctgggctcactgcaacatccgcctctcag

SEQ ID NO: 192303 - DNA, 201 bp, Homo sapiens; identical to SEQ ID NO: 33222

SEQ ID NO: 192304 - DNA, 201 bp, Homo sapiens
gtatttcatttgatatggacagggtctaaagagacgttaaaagtcaactaaaaattagagaaattttagtcatttcagaaaagattgattttgtatgcgtwctgtattgaagaagtgatttgttcaaaagaattctggatagacgcatgaaagatagttaagaaaatagatatttgggttgattaaattctattttggggg

SEQ ID NO: 192305 - DNA, 201 bp, Homo sapiens
aattcactggattgaaagatagccacatttaaaattcttgatacatattgcaaaattgctttccaaaatatattctaattttccatcagtccaccagtgtrtgatcacacgtctgctaacagtggtattctaatgtatttattttatttttgagacagtctctctgtccccctggctggagtgcagtggtgctatctcagc

SEQ ID NO: 192306 - DNA, 201 bp, Homo sapiens
tcttgataaaataagaatgtgtatttcctataggcaagaggtaaatgaaagtacaggacgtggaaacattgtgtttagaaactatctacgatattatgtcrtctttgtgattaagaaaatgagccaggtgcagtggctcacagctgtcatcctaaagctttgggaccctgaggtaggaggatagcttgaggagttcaagac

SEQ ID NO: 192307 - DNA, 201 bp, Homo sapiens
agtgattgtgaagataatacccaaggcacaccaagaagcactatggaaaatgttattgtataatagtaagtgcagaatgcaggatttaagcttgcatcttsctgcgttcttttttttttattagagatggggcctggctgtgttgcctaggcaggtctcaaactcctggcctcgagctcctcccgccttggcctcccaaaa

SEQ ID NO: 192308 - DNA, 201 bp, Homo sapiens
ggaattcaggatccagaggaagaagcatttgagagtggaatggaaagacttagggggaggtaggaggaatgggttggggagttccaggatgaaagagggcytttcaataggacagagacagaaagagatttggggagagagagagacacacacatagaaagaagaaccaggattcagagatcattgcaatcagaaaagagg

SEQ ID NO: 192309 - DNA, 201 bp, Homo sapiens
actgaggctatgagtgtaaattacttgcctacattctctacaaatccacccctttgcactgcaacccagatggcacatataaagggggtgtgggtagaagratgctcaacattattattttccctcatttcacacttcctcatctggaaaaacacagaaattataggtgattgtaaagatcccaaaattgcaaaatttagg

SEQ ID NO: 192310 - DNA, 201 bp, Homo sapiens
ggagttccaggatgaaagagggcttttcaataggacagagacagaaagagatttggggagagagagagacacacacatagaaagaagaaccaggattcagrgatcattgcaatcagaaaagaggaaaaagtgttgtaagcaggagctcagaagcactcaagaagccggatacagtggctcaagcctgtaatcccatcactt

SEQ ID NO: 192311 - DNA, 201 bp, Homo sapiens
cttttcctttgtgttcgtcatcttggcaaattaatttttatgtgatgaattaaatcctctttcttgtcaaccaaattttccgtgatagtgtatctcatacwgtgtctgtttaactggaagatggtagttctggccaaaaggctgggttgacatttttttttttttttttttggagatggagtttcactcttgtcctccagg

SEQ ID NO: 192312 - DNA, 201 bp, Homo sapiens
tgacatttttttttttttttttttggagatggagtttcactcttgtcctccaggctggagtgcaatggcgcgttctcagctcactgcatcctccgactctygggttcaagagattctcctgcctcagcctcccaagtagctaggattacaggtgcctgccaccacgcccagctaatttttttgtatttttagtggagatgg

SEQ ID NO: 192313 - DNA, 201 bp, Homo sapiens
ccaacacatgaattttgggggacacattcaaaccatagcagagggcaagattgtaaaagctcttatgtgttgtggtcagcattttgggatcttcctggccrgaatgtgatctatagaactgaagtgatgggtctggccagggttataattctgaggagctggctggggcagtctgcttggttagtgacagtatgaagcaaa

SEQ ID NO: 192314 - DNA, 201 bp, Homo sapiens
gagaaatgaagtgaggagttggaattctggtaagggtggtaagaggcggcagaagaggtctaggatgagaccaagtctgagtttgcttgtttgttggaggktgagtggtggtggggcatctcaagctggcttgaaaaatcagacacagggtcaaccattcaaatagaagggtgacaggatcagtgctgattataggaagag

SEQ ID NO: 192315 - DNA, 201 bp, Homo sapiens
cccaaggagctgggattacaggtgtgtgccaccacgcccggctaatttttgtatttttagtagagacaggctttcaccatgttggccaggctggtcttgamctcctgacctcaggtaatccactcctctcagcctcccagagtgctgagattacaggcgtgagccaccgcgcccggcctttgtttttgttttaactttaga

SEQ ID NO: 192316 - DNA, 201 bp, Homo sapiens
agatagttctcccaaaatgaggaccaaactgtgtaagaataatgagaacgtcaagtcaatataaataaagcttgcatttcaaagaatcatgtttaacaaaygcagttatttgactaagaaaggctgagccccaagaaaaacattcctggttactctgtaaactttgcctcaaatgctctgtttatataagcctatgaagag

SEQ ID NO: 192317 - DNA, 201 bp, Homo sapiens
cggggcaacaagagcgaaactccgtctcaaaagaaaaaaaaaaaaaaaagaccagctttctcttatagtttcctattactttttttcccagctattttttsttaaacgatcacaacccacttcatttccccctcgtagcctcttcttccccacagctttccatccaggtctggaattagctctgacttctctagaagccct

SEQ ID NO: 192318 - DNA, 201 bp, Homo sapiens; identical to SEQ ID NO: 33208

SEQ ID NO: 192319 - DNA, 201 bp, Homo sapiens
ttttaagcagtccacagggtgggattcctaaatctaaaccccaactcccccatcacttccaccaactttttcaaaggacaaacatcctttgctgccacctrtgctaaatccattagaaaacactcttgggagtgtggtctgcctttgggagttcttagtcatctgattgctagggtcagtatcaattaccctccatccgtt

SEQ ID NO: 192320 - DNA, 201 bp, Homo sapiens
acaaaaacagacaaaaacatggtccatccagcaggtcctctggaggcctctcagaggataagactctctgcatggcctgctcaggtgaaggtgcccatgargagaacagtgttacagaaagggggttcacatatggctttaaagatgtccaagaagcctcactagctgttatgaaattagggcttcctgccctcccttttt

SEQ ID NO: 192321 - DNA, 201 bp, Homo sapiens
tcggagttcagggtgcccctgaatcccaggagggtagcacttgctttcctgcccattgtgaaggcaaggaatccgcgtgttgtcctatcaattccattcayggcagggtagagacttttcaaatggaagaaaatgtgcattaaaggacattctttctgcatggggtggggtagtgaacgtgttggggttgaggcacggagt

SEQ ID NO: 192322 - DNA, 201 bp, Homo sapiens
aagccttccaagaggctgggactacaggcatgtgcccccatgcctggctaactttaacttttgtagagacgaggtcctgctgtgttgccagtgctggtctygaactcctgggcccaagcgatcctcctgcctcagcctcgtgagccaccacatcgggcaagccctgccaactctttcctgacctgaggcagggctgaatgt

SEQ ID NO: 192323 - DNA, 201 bp, Homo sapiens
aggtaaaaaggccaatccccacttttttttttttttttttttagagaagaccaagacaaagaaaaaggataattgatttggaaaagacttgaagagggatyggtgtctttacctaattaaaagatttgctcaggaaagagaaattagaccaactctgtcgttttggaagtagaatctagggccagcgggtgggagatgaga

SEQ ID NO: 192324 - DNA, 201 bp, Homo sapiens
agtggagaaaccctggcttagcaagatgccaacctacagcaccccacccctcaaccgaattaggtattagtaaatggatcagaattgtattagtatattgrtttgtatattgattgaattagatgttatactaattagatgatgagtcaacaactaaaattctggtcaaaagatcaactggaggaaacagaagatgggtag

SEQ ID NO: 192325 - DNA, 201 bp, Homo sapiens
ctcaaccgaattaggtattagtaaatggatcagaattgtattagtatattgatttgtatattgattgaattagatgttatactaattagatgatgagtcarcaactaaaattctggtcaaaagatcaactggaggaaacagaagatgggtagatcagtacataccaatctgtgtgaaatgcgaaaggtaataaactgaaag

SEQ ID NO: 192326 - DNA, 201 bp, Homo sapiens; identical to SEQ ID NO: 33206

SEQ ID NO: 192327 - DNA, 201 bp, Homo sapiens
gtttgatgagaaagaaaaaaataagggttgggcccagctggagtatagtcagatgacatcaattagaatgcatttaagatttaagtggactggtgaatggkttggaaaaatagtctaaagatttgtttactctctattagagttggagagtagctcacactcactggtggggtttagaaacaaacaggcctgagtttaaag

SEQ ID NO: 192328 - DNA, 201 bp, Homo sapiens
ctgaggactgctaatgattttgacttttttttgagtttataaaaagattgtaatttccccagatcagaaattgccccaatatgtagtttaattgatttgtrtgcattttatgtatccatatatattaccatcaaaaatggcttacataataatgataatgtatataaatagttttgctttgccaattataccatcttctgg

SEQ ID NO: 192329 - DNA, 201 bp, Homo sapiens; identical to SEQ ID NO: 33209

SEQ ID NO: 192330 - DNA, 201 bp, Homo sapiens; identical to SEQ ID NO: 33224

SEQ ID NO: 192331 - DNA, 201 bp, Homo sapiens; identical to SEQ ID NO: 33225

SEQ ID NO: 192332 - DNA, 201 bp, Homo sapiens
tagcctttattcatccgagtgccacagtcactttgtgcagtaagttaggtggtgaggtaagcttgctaattaatgggcattttaaaggactttacccagcrgcagacaaaattaagccctggaaagaatttagcccagtagccagtcatatgccatgtcgtatagcatacccagccaatggggagagcgaggtgtggctgt

SEQ ID NO: 192333 - DNA, 201 bp, Homo sapiens
gcctcctttaaagcatttgtaaatctggacataagagcctctctcctaaaattcaagactgagatgctcttctctccttcctctaagcatcagggttctcygtctgcatcctatgcggaccagggcaaaataaacttgaaattcactatgttagcctgtatgcaattttgggtgatgatgggctattggtcgttttgttgt

SEQ ID NO: 192334 - DNA, 201 bp, Homo sapiens
agtgttcgttaccctgcaactaaatccagtgagttgtaaattcgaagagcaggcaaataattcaagatgcttctatgtctgcaatgtctggagggatagarctaggccaagaatgaggtaagagtcaaacaaacacctgatgtaattgtctggataaattaggagaaaatatggtaaaaattacttgactagtttagataa

SEQ ID NO: 192335 - DNA, 201 bp, Homo sapiens
cgtatgaactttgcttgtacttgcagcagagcacaaaatacaagtgttcgttaccctgcaactaaatccagtgagttgtaaattcgaagagcaggcaaatrattcaagatgcttctatgtctgcaatgtctggagggatagaactaggccaagaatgaggtaagagtcaaacaaacacctgatgtaattgtctggataaat

SEQ ID NO: 192336 - DNA, 201 bp, Homo sapiens
gcctcgactccgcctagtaactgagctgctatttaactttgctcagtcttgcattgcctcaaagttatttgactgagcttgaaaagaccagctttcagccwggcgcggtgtggctcatgactgtaatcccagcactttgggaggccgagtcaggcggatcacctgagatcaggagttcgagaccagcctaccagcatggtg

SEQ ID NO: 192337 - DNA, 201 bp, Homo sapiens; identical to SEQ ID NO: 33219

SEQ ID NO: 192338 - DNA, 201 bp, Homo sapiens; identical to SEQ ID NO: 33212

SEQ ID NO: 192339 - DNA, 201 bp, Homo sapiens
acaaaactggcatcctgagggccaaatgccatccttaggggtaagtttgagagtttttctgataaaattcaggtttctcacttctctgaatacactggaaragctggcagccctgggctcatgatcccctgtggcattaattgccaggggtcaggggggtggggagggatgcaggctctctcattcccagcagcccccacc

SEQ ID NO: 192340 - DNA, 201 bp, Homo sapiens
tctaatttgggcacacaggtgatgtcatggtaaaatgaatatgtgaaaagtgctttgggcatcatatggtccatgaataattaaggtgaggatgatgggawtcttgtctgtagaaaggaacccctttttttctgcttctctttctacagtcagttattgagattaaactctaagtgcagtgtcttagtgcaatgaaaatta

SEQ ID NO: 192341 - DNA, 201 bp, Homo sapiens
attttttgttaaacgatcacaacccacttcatttccccctcgtagcctcttcttccccacagctttccatccaggtctggaattagctctgacttctctasaagccctgagctgagcacgttaggtgccctacctccagaatcctcccagcatggcctggagattgctgttgtcttgactctagacttgaaaaaccaaggc

SEQ ID NO: 192342 - DNA, 201 bp, Homo sapiens
gagctgagaattatacaaaaaattatctaatgataattttacttaataactacagtaatatatctatggaaatttgtgtatttattcattctttatttattaaaaatttaagttggtcattaggataagaactgtgcataaaacagataataagaaatcatctcagttctcaagaaacctaaaatatagtaggtgaaacag

SEQ ID NO: 192343 - DNA, 201 bp, Homo sapiens
gcacaatactgttgcagtattctctaaagagtagtacctctagccgaggagcacttgcccagagcaaactccaggaaaaatagtgaagaagcctattcctrttgcctctcttccagcaatagcattctctttctcttgtaaaacaccaacgcaaattctgatcaagtgagtcacatatgttatgtcccaataccatagtca

SEQ ID NO: 192344 - DNA, 201 bp, Homo sapiens
tgagctgagaattatacaaaaaattatctaatgataattttacttaataactacagtaatatatctatggaaatttgtgtatttattcattctttatttattaaaaatttaagttggtcattaggataagaactgtgcataaaacagataataagaaatcatctcagttctcaagaaacctaaaatatagtaggtgaaaca

SEQ ID NO: 192345 - DNA, 201 bp, Homo sapiens
ttgaataataagaatttcatgagaagcatgggttttcatctagaaaagccaatgtttaaaagcatgtaatctttcttattttgtaattctgagtaaataayttaaaactgagagcaacttcagtattattaaaacttcctgttactaggccaggtgtggtggagttctcctgtagtcccggctactcaggaaactgaagtg

SEQ ID NO: 192346 - DNA, 201 bp, Homo sapiens
tttggaggggcttttattcaattaattctgccaccatcaacaaaagaagacttgagatatctcatgagaaaatcacattttaaactttgaagagtaaaatsaagcagattgtcacaaaaatcatttctgttgtattcacctccatgatttagttttgttttctgtatgtacacattttgtgttataatttagaaacaatat

SEQ ID NO: 192347 - DNA, 201 bp, Homo sapiens
gtactcagtcaacattggttgatagataaagtgatttctttgtggtttcaaacagttgctttatctataatagttgaatgattcatttttgtgttttaggrgtcacttattaattagtggtgagctagttagaaaaacataaaaactgatgataggctatcttttgtctgatacaaataagtgttataatggtcacatggt

SEQ ID NO: 192348 - DNA, 201 bp, Homo sapiens
atagaacaacagtattgataaattaatgctctatatatctctgcttacctagtacatgtgatatatatatatatatatatatatatatatatatatatacmtacacatacatatatatatacacacatatatgagataaatatgtatatatggatttaggtacatattagtttgttagtttggcttcagtttatgtgtcca

SEQ ID NO: 192349 - DNA, 201 bp, Homo sapiens
cttttatttttggtacttaagaagcttataattaaatttatactaacattgaactatgatgttggaatataagttgtttatttttatgtgtttatatatamctttatcactattctattcataaatttctcttctgtttctctgcaatggcttaagtccatacttttgaaattattttgggtagtacataaatttgtgagg

SEQ ID NO: 192350 - DNA, 201 bp, Homo sapiens
aaacagttgctttatctataatagttgaatgattcatttttgtgttttaggagtcacttattaattagtggtgagctagttagaaaaacataaaaactgaygataggctatcttttgtctgatacaaataagtgttataatggtcacatggttctgttaaaatatgagtcagatcatggaatttcctactaaaaactcact

SEQ ID NO: 192351 - DNA, 201 bp, Homo sapiens
tatagaacaacagtattgataaattaatgctctatatatctctgcttacctagtacatgtgatatatatatatatatatatatatatatatatatatatayatacacatacatatatatatacacacatatatgagataaatatgtatatatggatttaggtacatattagtttgttagtttggcttcagtttatgtgtcc

SEQ ID NO: 192352 - DNA, 201 bp, Homo sapiens
ttttaacaaaaaaagatatgttggaaatgtccttcattacctgacaaaagttcttctcagttctgtttatcatgatgttatctcttagacttcatgtgtcrttgccatcatgcttttatttttggtacttaagaagcttataattaaatttatactaacattgaactatgatgttggaatataagttgtttatttttatgt

SEQ ID NO: 192353 - DNA, 201 bp, Homo sapiens
atatagaacaacagtattgataaattaatgctctatatatctctgcttacctagtacatgtgatatatatatatatatatatatatatatatatatatatwcatacacatacatatatatatacacacatatatgagataaatatgtatatatggatttaggtacatattagtttgttagtttggcttcagtttatgtgtc

SEQ ID NO: 192354 - DNA, 201 bp, Homo sapiens
attcataggatatgatttggtatgactgctgtaaaactctcttactaatatcagattagctgtttctaatgggaaaaaaatcaacacatacaattttttttaaaaagtactggtcagatgcattttacataaaccttcctggagggcacattttactttccactctcctccccatactcatctttgcaggtgccagaatta

SEQ ID NO: 192355 - DNA, 201 bp, Homo sapiens
atcacattttctttcctgtaaagcttcagaatttctttcttctctctgcaaagtgatccttacaatagatctcatttttcttaaaaaaaaaaaaaaaaaaagacaaaactctaccatatcaatttatctattatccacactccttttgtttatatgccagaagcccttctctttaggtttctgtctagctctcttgcaaat

SEQ ID NO: 192356 - DNA, 201 bp, Homo sapiens
tttagaaaattgttatgtttcattgctttgcttttttggcagttatggacctgaaaaatttagcatgtactttattcccgctgtcatatggctcagctachcacatgaattcaaaatggtttccattattagaaggagacaatcttattccagaatcaagctaagtaacttttagtgttccagataattgctaaattaagc

SEQ ID NO: 192357 - DNA, 201 bp, Homo sapiens
tgatttctctgaatttgatgttagatcgaagactttaacattaaacttggaaattatcattccagaaaataatggctagaatcataaaaaaaaaaaaaaaactggcaaaaggattttagaaaattgttatgtttcattgctttgcttttttggcagttatggacctgaaaaatttagcatgtactttattcccgctgtcat

SEQ ID NO: 192358 - DNA, 201 bp, Homo sapiens
aggggagctgaggttaggggtgactcatgggtgcttaccctaaggtgtgttccccatactcatttatgggcaaatacttaagaagctgactaaagtaagtmcagtttgggaggaatttggcagcctataataaagcataccctaaaacccagtaatacaatgcataataatgtgtccaagagaagtgtgggtatgtttttg

SEQ ID NO: 192359 - DNA, 201 bp, Homo sapiens
aaatatctggggaataaacattatttgctatgtgctgtgggatacaaataccctcttctatcccttttatgaaattctacttcagttttgcactcttctcygataatatgttttatgggagtggactttgagggcagctcaaagaggtggatgaaatagggggcacctgaataacgtgtgtaaaacacttagcaaaatgct

SEQ ID NO: 192360 - DNA, 201 bp, Homo sapiens
atcgccattctaactggcgtgagatgttatctcactgtggtttttgatttgcatttctctaatgaccagtgatgatgagctttttctcatatgtgtgttgrctgcataaatgtcttcttttgagaagtgtctgttcatatcctttgcccactttttgatggggttgtttgtttttttcttgtagatttgtttaagttcctt

SEQ ID NO: 192361 - DNA, 201 bp, Homo sapiens
atgtctcctccattggagttttaattaccttccactgccatggaattgccagaggactgggatggaaatgattaacagaattttttttttttttttttttttgagatagagtctcattctgttacccaggctggagtgcagtggcatgaagttggctcactgcaacctccgcctcccgggttcaagcaattctcgtgcctc

SEQ ID NO: 192362 - DNA, 201 bp, Homo sapiens
aatcctggagtctagcttttcctattcctgaaacatgattaagaacctatttattaacaaatcaatcttcataaaaacacaaacataaacataaaaacataaacataaatcttcataaagacataaacataaatcaatatcttcaatattaattttggaggtagtaaaatatctgaagatattgaagattttaattctgga

SEQ ID NO: 192363 - DNA, 201 bp, Homo sapiens
gcgactccccaccccaccgccccaacccctgtgccttctcgtctctctctagcgccctctatggatagaacaggaatccactggcaatgaagaaatgtctkcagcagtgtttctcactctttgatcacaggactctgtgaactcttaaaaattgaagacctgaaggaacttatgtttatgtggatgatatctattgatatt

SEQ ID NO: 192364 - DNA, 201 bp, Homo sapiens
ttttttttttttttgagatggagtttctctcttgttgcccaggctggagtgcaatggtgtgatctcggctcaccgcaacatccacctcctgggttcaagcrattctcctgcctcagcctcccaagtagctgggattacaggcatgtgccaccacacctggctaattttgtatttttagtagagatggggtttctccatgtt

SEQ ID NO: 192365 - DNA, 201 bp, Homo sapiens
agtaactatgaacgtctaaactcccataattttcgtaccctaaagatgcaaaactttgggtaagctcttttcagacttgacctccccccaaaaaatccatytgagtccaatttatggtcaagcaaacattgatactgaagtaatggcatctgtggaatgttggtcaaagtgagccaaatcatgccatgtctgaaaaatgta

SEQ ID NO: 192366 - DNA, 201 bp, Homo sapiens
taaatgcttccctgagcacaacccctccttccacttctccactcctttttctccaaatagcctaaaagctcagcctcagtgtttcagttttatcaaaacartaacaacattacgttggaattctcagttatatgtccagctccttttagacacaggcttactgaggtcatggaccatgatttggatcatcttggtagcccc

SEQ ID NO: 192367 - DNA, 201 bp, Homo sapiens
tttaaaacactactcagcttctctctcctgaagtttgaaccagtctcactaataaactcttctcattaactttaaaatcgattccagtaatttctacaagaaaaaaaaagtctctcgatttcatattttttctctggataactacttctgtctctctgcttctcacaatcatactctccaagggttgatgagtcagtcttc

SEQ ID NO: 192368 - DNA, 201 bp, Homo sapiens
tctccctccagtcaagaaaacagagatttcactgtattacccaatgtaaaacagtgtaattggttaagctgtttcaaaggattgaaaaagcaaaaagagamgacaggtgatgtagatagactcaaggaaacatgtgctgcccttagatggcagtaatcaccacctagaagccctgaggaaaggattccttggagctaggat

SEQ ID NO: 192369 - DNA, 201 bp, Homo sapiens
gctagaaatctgaaagtcatcctgtacttctctatataccctcaaatccaatttacgtgtccatataatgatatgacctatttctggaatcttttcctttmtttctctccctattaaccactgttttagatttggcccaattcatttctctctcattcctggcaaaaccacatcaatatttccccatctcaatttttgttc

SEQ ID NO: 192370 - DNA, 201 bp, Homo sapiens
cagagggagatgagaattgataaacaatatgcacctggctatataatgtaagaatggtaaattaaattaaacacacacacacaaacacacacacacacacacttctttcagcatatgctaaaatgtaaaaatggtaacaataataacttaataaattaagagttaaacatacacacacatatacttctttcagcatatgtt

SEQ ID NO: 192371 - DNA, 201 bp, Homo sapiens
tagctcgtactaacaacccctctttcagttcagtcatctactacaggggtccccagcccacaggcctcataccagtactggtctgtggcatgttaggaacygggctgcacagcaggaggtgagcagtgggccaggaagtgttaccacctgagctccgcctcctgttagatcagcagccgcattagattctcataggagcac

SEQ ID NO: 192372 - DNA, 201 bp, Homo sapiens
cttgaccttatctaatttaaaacaatcctttaaccctaggcaaaaagttacttggatttccatgccttcttacaatcttttcctgaaaacacattttactsttcttacacaccttgcatgtcaatctattttcagtggtggtctcaattacatgttataatggtaactcttagcaattttaaactttaatgtaaaatctga

SEQ ID NO: 192373 - DNA, 201 bp, Homo sapiens
tatagattaaaaagaaaatcatagctcgtactaacaacccctctttcagttcagtcatctactacaggggtccccagcccacaggcctcataccagtactkgtctgtggcatgttaggaaccgggctgcacagcaggaggtgagcagtgggccaggaagtgttaccacctgagctccgcctcctgttagatcagcagccgc

SEQ ID NO: 192374 - DNA, 201 bp, Homo sapiens
attagttcagtccattcagttaactcatgctctgcttgatattcgtgaatgtttcagctctttcatgagtcctgtacgttttccctttagtccaatgttasagtctccaaagttatcagaaacttgtattggagaacacccatcaaacttttatagctgattattaaccatcttttgaaggggatcaaaagaagacaattg

SEQ ID NO: 192375 - DNA, 201 bp, Homo sapiens
ttttctattagttcagtccattcagttaactcatgctctgcttgatattcgtgaatgtttcagctctttcatgagtcctgtacgttttccctttagtccartgttacagtctccaaagttatcagaaacttgtattggagaacacccatcaaacttttatagctgattattaaccatcttttgaaggggatcaaaagaaga

SEQ ID NO: 192376 - DNA, 201 bp, Homo sapiens
taaacttgataggcatatgtgcttcaaaattcaagtgcactgtagaggtttaggagtatgttaattatgtgtgtgtgtgtgtgtgtatatatatatatatwcacattatctaaattagcatattgtcactaaatactactagtattactagaaaagtagcaatattttaatatagtgtgtcctacatacttcatgttaaag

SEQ ID NO: 192377 - DNA, 201 bp, Homo sapiens
gaatatggcctaatgaggccatatgcaagccactcactcttctatgttctaatttacccctaactcaagacagatgtagtctatgttgttttagcccttckcagtttctcttaaattaaattgggcttcagcaattatgtcatcagcctgcattgaaagggagttttaaaaattaatcatataaaactccctattttaaca

SEQ ID NO: 192378 - DNA, 201 bp, Homo sapiens
tgattttatctgtcattaaacttgataggcatatgtgcttcaaaattcaagtgcactgtagaggtttaggagtatgttaattatgtgtgtgtgtgtgtgtktatatatatatatatacacattatctaaattagcatattgtcactaaatactactagtattactagaaaagtagcaatattttaatatagtgtgtcctac

SEQ ID NO: 192379 - DNA, 201 bp, Homo sapiens
gttttctgaggttgcaattggcatccagtatcttttgaaagtactatcaaaaatctatattacttaaaatttatttaatgtgtgatttagtcaagattttyccatgactgtgtttaggtacttagaatgcttttttttaagaaaaaaaatgttctggtaacaattatagctatagttcatttactgccatattgaagagag

SEQ ID NO: 192380 - DNA, 201 bp, Homo sapiens
tatctgacttttagatctgattttatctgtcattaaacttgataggcatatgtgcttcaaaattcaagtgcactgtagaggtttaggagtatgttaattatgtgtgtgtgtgtgtgtgtatatatatatatatacacattatctaaattagcatattgtcactaaatactactagtattactagaaaagtagcaatatttt

SEQ ID NO: 192381 - DNA, 201 bp, Homo sapiens
ctccttcagtgccagcaacacacacacacacacacacacacacacacacaacacacacagcagggggttgggtggaagagagagagagagagagagagagacagagagagagagatcttccttgctgcttcaattctcttacctctagaccttatttttaaaaattcatctactagatggagttcacccagaataagcttc

SEQ ID NO: 192382 - DNA, 201 bp, Homo sapiens
cttcaggagtttcagttcctgaggtgcgtaagcaaaaacaggttttcacacttaaaattataggtcattatacatcttgtattgctgtaaagaacattttstgctggctcagtgacattcgaataccagcatgttatattttatttttttcatattctgctaattggaagtggtggttttcatattttcagtgatgggata

SEQ ID NO: 192383 - DNA, 201 bp, Homo sapiens
gtggtgtgatcccttccactttgttctttttgctcagtatgtctttggctatttagggtattttgtagttctacagaattttatagttgttttttttttttctatttctctgaagcaggggtccctaacccccaggccacaaacaggcgtatgggtctgtggcctattaggaactgggtcgcgtagcaggaggtgagcagc

SEQ ID NO: 192384 - DNA, 201 bp, Homo sapiens
ttcaaaagctttttagttcaatgaaactccatttgtctctttttgctttcgttgtctgtgcttttgagatcttatttaaaaagtccttgcccaccctaacrtcataaagcattttctctgtgatttcttctagttgtttcatagtttcaaactttacatttaaatctttaattcattttgagttgatttttgtacataaca

SEQ ID NO: 192385 - DNA, 201 bp, Homo sapiens
tattattatcaatatactttcattacctatagtgctatatttgtattctggaaagcagcaatacgctaactatacaatgatatatttctagaactggctcwcgtttttatagggagataaaataggcataacaggaaatattatagattaattttatgaacataaaatttgtatgtatcagtctattatactgagttcttt

SEQ ID NO: 192386 - DNA, 201 bp, Homo sapiens
tggtgatagttgctctggcaaggtagcaaaggatctgctttgagctaccaacagcatctactggaaaccctttccaagtataatctgttttgaatgctctrcagtgtttgacactgagatgcttacctttgatagcctctaacactcatccagtgcatttccactaggttttcttttaccttttaagccacactttgtcaa

SEQ ID NO: 192387 - DNA, 201 bp, Homo sapiens
ttagccaggcatggtggcacaatcctgtggtcccagatactggggaggatgaggtggaaggattgcttgagtctgggagattgaggctgcagtgagctatrattgggccacagtactccaatctgagcaacagagagagaccttctcttaggaaaaaaaaaaaaaaaaaaagaggtttgtgttttcccacattgcaagccc

SEQ ID NO: 192388 - DNA, 201 bp, Homo sapiens
taacatggatatgaaattgttcttgctatccttactaaatcgaattgcactcttttaggtgggttcctaaggagtagagcattaagccaagatttggcttygtgtgatttatggagggagaaaaagttctttagaaaaaaacaaaaacaaaaacaaaacaacctataatgaagggagggaggcagaaaaaggaagaggcaa

SEQ ID NO: 192389 - DNA, 201 bp, Homo sapiens
ataattattttcctttagaggtgttatgttttattggtttgtcatgtttcctgcatccctacactgatatctacatctctgatatagctgtcacttctttsaattttctgaagtagctttcatagggtaacactttttttcctgtagatgtatctatagagtcagttaggtagagtgctttggttttagttctaggtaggt

SEQ ID NO: 192390 - DNA, 201 bp, Homo sapiens
caatggtttaagcatataaatactatgagtacattaaatcataaaaaagaatgggaaactaaacagagctagataaatataagaagcaattatcacattawagataatccattaatggttacctttatcaaaagaaatatatttgtcacttcaagaagtgttctctgaaatcatgagcaattattttgttcctagctagta

SEQ ID NO: 192391 - DNA, 201 bp, Homo sapiens
gtactttttatattttcattgaattcttcagttctatgatttctgttggacatctttgttgaatttctcattcagatcatgaattcttttcttgatatcayggtattgcctatctgtgttctcttgtatttcactgaatttttgaaagataattattttgaattccctttcaagtagtttatagattttcttttatttgtg

SEQ ID NO: 192392 - DNA, 201 bp, Homo sapiens
tatataggctaccaagaagcaagccaattaagagatggagtggaaagaagaggagaatccaaaaggaagaaagtaaaaaggataaatgaaaaaaaaaaaaactagctatttccaggaggctatgaatattcttttgtttatttctaacaactcttggagcactcatataggactgaaaaaacactagctgtgttttcagtg

SEQ ID NO: 192393 - DNA, 201 bp, Homo sapiens
tgattagttaaaaggcatcattcagaaggaaccaatcaagactgagtgggtgagatggagatagaagttctcatgccagttgtggagtctatctggaactsgcagcttggttttcaggctttaaactgtcctttgctggaaggttgggtttcactggagacccatccctgtctgcctaggaatttgtctgtcccctgtcgc

SEQ ID NO: 192394 - DNA, 201 bp, Homo sapiens
atatataggctaccaagaagcaagccaattaagagatggagtggaaagaagaggagaatccaaaaggaagaaagtaaaaaggataaatgaaaaaaaaaaaaactagctatttccaggaggctatgaatattcttttgtttatttctaacaactcttggagcactcatataggactgaaaaaacactagctgtgttttcagt

SEQ ID NO: 192395 - DNA, 201 bp, Homo sapiens
aatatataggctaccaagaagcaagccaattaagagatggagtggaaagaagaggagaatccaaaaggaagaaagtaaaaaggataaatgaaaaaaaaaaaaactagctatttccaggaggctatgaatattcttttgtttatttctaacaactcttggagcactcatataggactgaaaaaacactagctgtgttttcag

SEQ ID NO: 192396 - DNA, 201 bp, Homo sapiens
gtaattagtagaatgtagtagcattatctttcggccatttcctattttttactaaaataatatatttctaattgtctttctactgagtcttcataattctrgtcttaggtaaaggtagagttaatggagtatgtgactctgaagtgctaaaatagttttcatttgccaaaactaatttaaaaattaaaattcaaggttttc

SEQ ID NO: 192397 - DNA, 201 bp, Homo sapiens
tctgcttaaactttttcgaatccattatttgctttttgtaattagtagaatgtagtagcattatctttcggccatttcctattttttactaaaataatatmtttctaattgtctttctactgagtcttcataattctagtcttaggtaaaggtagagttaatggagtatgtgactctgaagtgctaaaatagttttcattt

SEQ ID NO: 192398 - DNA, 201 bp, Homo sapiens
ttaattgcccatttatgtttactattttctcaatttgaaattacatatttacatcactagcagtaaagagctaggtattaaatgttatgagcttaactaarttttaatttatacgtatacaagacccagattatttttaccaattttattgtagactctatagccatataatgtatatatagtacaatgtgaggtaataat

SEQ ID NO: 192399 - DNA, 201 bp, Homo sapiens
aaaatcacaaaacatgagagtaaaatcacaaaacatgagagtaaatatcacaaaacatgagagtaaaatcacaaaacatgagagtaaatatcacaaaacaygagagtaaaatcacaaaacatgagagtaaatatcacaaaacatgagagtaaaatcacaaaacacgagagtaaatatcacaaaacatgagagtaaaatcac

SEQ ID NO: 192400 - DNA, 201 bp, Homo sapiens
gcacaaatataccatggaatactatgcagccataaaaaagaatgagtttggctgggcatggtggctcacgcctgtaataccagcactttgggaggctgagrtgggtgggccacaaggtcaggagattgagaccatcctggccaacatggtgaaaccccgtctctattaaaaatacaaaaattagctgggcatggtggcaca

SEQ ID NO: 192401 - DNA, 201 bp, Homo sapiens
taaagaagaggcaatcacgtccctgatccatttggcaggtcatgacgatggcttggggtacgctgttgagctgttaatattagacaaggatttgtgggttrctatagcatcggtgatttgttagcactatctcatttcactggagcacatgtgtttttctaaaggctctgcggtgatcttggagaaagtcagggatgaaat

SEQ ID NO: 192402 - DNA, 201 bp, Homo sapiens
tttagagggtgaattggttaactataatgctggaaagggactattatatcaattatttgaaacatttaaaaactgggcctattgcaagcgattatgtttasagttaatgaagcactgatacccctaacatagtaaagggaagaaagatcttttgccaataaaatctcatcaggtgatggccttgacagaacatcccactat

SEQ ID NO: 192403 - DNA, 201 bp, Homo sapiens
ggggagatgggactgactttaattattcatttgaagcaaataaatgtttaaacatgagatacaatttaaaaattgatgaatggtgatggttttttaaattkggcgttttttttttttctatcagtagtaatagttactcaggcttatactcatgtcctcaatatataaggactgcttgtttcccactcagcatctagctat

SEQ ID NO: 192404 - DNA, 201 bp, Homo sapiens
gcaatgaacaaagcaactttttgactagaaggacacagcagttctagactctcagagaggtgatctttactatcttaaaaggagtaaagaagaaaagaacycactttccacagtagaacctgagaatatacttacagaatatttctaacaactggactatggaaaaagggaaaggtgcaaatatgcactagtacttctatt

SEQ ID NO: 192405 - DNA, 201 bp, Homo sapiens
taaatactgtaatccaaagaccacccatttattagtgcacctgcatattcaaccagatttctttcattcttttcaatgaatgctcaacattaaaaaaaaaagacagccatagggtgaataaccttttcaatttgccagatagcttaacaaaatgataatataatgataaaataacaataccagagcccccccatgcaaatc

SEQ ID NO: 192406 - DNA, 201 bp, Homo sapiens
ttttctgcctaaactttttcttttcttttcattgcagtttacaaccaaagcagattttttctccttatttcctaaacattaaatttttctttgttaaaaaacattaatttgaaatagcacatggaattttttttctaaatgaatgaaatccccaaaagaagaaagagcgtgccatatccaagaaagttaaaagctaaatgt

SEQ ID NO: 192407 - DNA, 201 bp, Homo sapiens
attttctgcctaaactttttcttttcttttcattgcagtttacaaccaaagcagattttttctccttatttcctaaacattaaatttttctttgttaaaaaacattaatttgaaatagcacatggaattttttttctaaatgaatgaaatccccaaaagaagaaagagcgtgccatatccaagaaagttaaaagctaaatg

SEQ ID NO: 192408 - DNA, 201 bp, Homo sapiens
tttggtgtgacaagacagtgtcacaccagattaaaatagatttcagctgaagaataaaacagttagctatagatccttgattaaaagacatactgaaatcmtagtaaaaatattctgcttaaactttttcgaatccattatttgctttttgtaattagtagaatgtagtagcattatctttcggccatttcctatttttta

SEQ ID NO: 192409 - DNA, 201 bp, Homo sapiens
cattaaattcaaataaaggtagaggaaagtagtgaacaattgttcacaattataaaaagtattactgaaaaaatattacttatagataaaactgaattattctcactttaaaattttaataaataaataggactttagaatacttaggcatctgctttagatacactctggatctctaggagttccttagagactagactg

SEQ ID NO: 192410 - DNA, 201 bp, Homo sapiens
ctttcaagagcaaattattcaatacatgactaaaacagtcaatgtatattctcagtgtatcaagataaaaatagacttctcagttgtcctcaaatgatttktccaccctttcacatctattttcaagccaaaggttcagggaattcagtgtcttaaaaatcacatgtgacagtatgtatttggtcctgctttcttcagaca

SEQ ID NO: 192411 - DNA, 201 bp, Homo sapiens
acattaaattcaaataaaggtagaggaaagtagtgaacaattgttcacaattataaaaagtattactgaaaaaatattacttatagataaaactgaattattctcactttaaaattttaataaataaataggactttagaatacttaggcatctgctttagatacactctggatctctaggagttccttagagactagact

SEQ ID NO: 192412 - DNA, 201 bp, Homo sapiens
attacctctgtgtaaagaaagatgcccaaggattaggagtgatgatgaaaggacaattattgccattttttataaagtacatagtcatgtataatgtttamgtttttaaaagttaattggcaatacttactaattgatcgatttggaaaaggaacaagacagagatgtcaaaaatggtgaattatctagcttaatcagtta

SEQ ID NO: 192413 - DNA, 201 bp, Homo sapiens
tttctttcttttctttctttctttctttctctttctttctttctttttttctttctctctctctttctttctttctttccttccttctatctccctttctstttctctccctctttctttctctctcttccttccttctctctttctctttctttctcccctccctccctcctaccttccttccttccttctctctctccc

SEQ ID NO: 192414 - DNA, 201 bp, Homo sapiens
aacattaaattcaaataaaggtagaggaaagtagtgaacaattgttcacaattataaaaagtattactgaaaaaatattacttatagataaaactgaattattctcactttaaaattttaataaataaataggactttagaatacttaggcatctgctttagatacactctggatctctaggagttccttagagactagac

SEQ ID NO: 192415 - DNA, 201 bp, Homo sapiens
atttttaaattcattttagagaaattaattataaaattaaatggtctaaatttttaagtagtaaataaataattccctttatataataatagcacattttmttatcataaatttgactgactatatttaaagactaaatttaggcctttgtgtggtagacaaagtagaaaatgatactcttaattaatccactaattgtta

SEQ ID NO: 192416 - DNA, 201 bp, Homo sapiens
ttactgtgagtacttctaaatgctattcttaattcattatcaccattcacagcaaattatttttgaacacacacacacacacacacacacacacacacacmgaaaaaaaactgatgctaggtagttgaagctttactcttctttggtgatgacagaactaatgagttttgagacagaaaagaatacattttttgaaagtgt

SEQ ID NO: 192417 - DNA, 201 bp, Homo sapiens
gctttccagacagaggtagtaatgtgtataaagattactctgaatagagaatggttctttatagaaagtgaaatgagcaaagtaaacaaggagaatgaaaagagataagactagtaagaaagatcggttgatctcagaagcttattctaaagtttaaactaaggttttaaagtatgtttgaatctatagagtcataataaa

SEQ ID NO: 192418 - DNA, 201 bp, Homo sapiens
ttgttcgtatttttcaatgaaagataagaccagtttgattacctcattcctgtttcatagtcaccaaaccactgacaactcctgccttatttaaccttttyatgtttatgatccctggaagtagatgtgcacttgaaatgtttaggatttatatgataattccccctccctgttgatggctcatttctgttcttaggccag

SEQ ID NO: 192419 - DNA, 201 bp, Homo sapiens
tttatctaatgtcagaacagtttgcttattatatacaaagattgatctagtcattgattctgaaattttagtgtacctcagaatcaaccggggggcttgtyaaaacatggattgctgcctgcctccccccgaccccacgcagttttagattcagtgtttctgaggtgggggtcaagaatttgcatttctatcagttttcta

SEQ ID NO: 192420 - DNA, 201 bp, Homo sapiens
taacactcaaatatgtttatatatgccagcaacaaaaatattaatattaataaacataatttttaaatgtttaaaataccaacaaaaaccacaaaacaacsaagaataaatctaacaaaatatatgcaagacctgttagtagaaaatttatatctttgttgaaggatattaaagaatatgtaaataaatcgagcaatacta

SEQ ID NO: 192421 - DNA, 201 bp, Homo sapiens
tgtgtctcatgctctcttttgtcatttcagtctgtgtttttccctttctctgtccctctctccttcacttttaacacacataagcataaaagatttgtttsagatttccagaaataatgaaataaatgtttcagttattaatggcccactggaatatgtatatttttcaaatactctaaaacttatttctggttattatgg

SEQ ID NO: 192422 - DNA, 201 bp, Homo sapiens
attcactccaggtattacttcaggattaaaaatatattctctctcttttgttttcctctgttgaaggtgcaatctagtgtttttaagttactgacctcctyatattatctaaagcaagaggctctccagtattattgtattttgcagttcttttggtgcttcattatttcaatgttcctcctacctataaaggtaatctat

SEQ ID NO: 192423 - DNA, 201 bp, Homo sapiens
gcatttcatgaagaagttgacttatttttgtaatataatttgttgtaatataagtgcctcttatcacctatttaaaaatgatgtcactactactgtttccrtatttgacttttgatttttgaagatatcgctaatgcattatctctccagctttttcataccacttctgtgtcattgcaaatgtcaggtctctaatctctc

SEQ ID NO: 192424 - DNA, 201 bp, Homo sapiens
ggaatgtaaattggcacagccattatggaaaaatgtatggaagtttctcacaaaattaaaaacagaactgcctatgatccagcaatctaaatgctgggtayatataagaaaatgagctcaatgtgttgaagaaatatctgtactctcatgttcattgccgcattattcagaatagccaaaatatgaaaccaaccttagtat

SEQ ID NO: 192425 - DNA, 201 bp, Homo sapiens
gagacattggccaaaacaaaggggctacatgcccccacacaactgcaaaatccagtggggcagtaaaatcttaaagccccaaaatgatctccttttgactytatgtctcacatccaggtcaagctgatgcaagaagtaggcttccatgaccttgagcagctctgcccctgtggctttgcagggtatagtcccccatcctgg

SEQ ID NO: 192426 - DNA, 201 bp, Homo sapiens
tccaaatgggagacattggccaaaacaaaggggctacatgcccccacacaactgcaaaatccagtggggcagtaaaatcttaaagccccaaaatgatctcmttttgactctatgtctcacatccaggtcaagctgatgcaagaagtaggcttccatgaccttgagcagctctgcccctgtggctttgcagggtatagtccc

SEQ ID NO: 192427 - DNA, 201 bp, Homo sapiens
ctagatacaatgggagtacagacattgagtaaatacagccattccaaatgggagacattggccaaaacaaaggggctacatgcccccacacaactgcaaartccagtggggcagtaaaatcttaaagccccaaaatgatctccttttgactctatgtctcacatccaggtcaagctgatgcaagaagtaggcttccatgac

SEQ ID NO: 192428 - DNA, 201 bp, Homo sapiens
ttacattcataattcacatacataatacttctcatggtgctatttagagagatgactttaaatacttccttttttgaaaaaaaggatattaataattatttattaccatactaaaataagcaacattaaaaagggcaattataaaggcgtataatgattttagaaaaacatgcaaagcagtgtggaattccttgtgtaaaa

SEQ ID NO: 192429 - DNA, 201 bp, Homo sapiens
tgctcctcgttgagagattcattaaaagagaataattatattatatttcacagattggcagaaagaaaatgtatctttgaacaattccatttccctgagcrgctgttcatttcagagttgaagacaggtctattacgtactttctaccctttttaaacatgtcaaagctaactattaatactgaaattagtaatttggctc

SEQ ID NO: 192430 - DNA, 201 bp, Homo sapiens
aagaaagcatgctgtttaactttctaaactttaagatattcttccaacaaacggaatttgaataaaaacttccagtcctttagactcaagaaaaaaaaaaactaaatatttatgctactagaattttaaactatttattacataatattggtatttaaaatatttatataaattgtcaattagtattcataaacatattta

SEQ ID NO: 192431 - DNA, 201 bp, Homo sapiens
tttcagttcatgaaacacatgtaaaaataaattgacataacagtgaaagtatatgtactgtatagatttcagcacttgattatacacctcaaatatcctgraaatgaatatagctattaatgtgtacaaaacatattataagatagagtagtctatgctttcccacatgtcattctatgaagcattcatatttatattcat

SEQ ID NO: 192432 - DNA, 201 bp, Homo sapiens
gttgctgaattttgccataaaaagatcactagatggtacagaatattttataatctactggctttatgaggctttgtgtgcgtgtgtgtgtgtgtgtgtgkaaatattaagatggtaggataaatgaattaaatttttcttaggttgtgatgaaactataatgaggaatgcaatgggtcatctctatttcattctcatgta

SEQ ID NO: 192433 - DNA, 201 bp, Homo sapiens
agctttccagacagaggtagtaatgtgtataaagattactctgaatagagaatggttctttatagaaagtgaaatgagcaaagtaaacaaggagaatgaaaagagataagactagtaagaaagatcggttgatctcagaagcttattctaaagtttaaactaaggttttaaagtatgtttgaatctatagagtcataataa

SEQ ID NO: 192434 - DNA, 201 bp, Homo sapiens
acagatgatgtaataaaaaacataatttatgaagagatagaaaaactaatatagcagagaaattaagaaaaccaaaacgttaacttctccaaaaaaaaaaatgccaggccaacatttcacagatgattaaagaacaaataattcccatgcattattaactattctgcagcataaagaagaaaaccttctggctctatttat

SEQ ID NO: 192435 - DNA, 201 bp, Homo sapiens
ccagaagttcaaggctgtagtgagctatgattttactccagtctgagcaacacagtgagaccttaccaagagaaagaaagaaaaagaaagaaagaaagaaagaaagaaagaaagaaagaaagaaagaaagaaagaaagaaagaaagggaaagaagaaagaatttttaaccttgcttaatacaattcgtcagccaacaatga

SEQ ID NO: 192436 - DNA, 201 bp, Homo sapiens
tgcaatgtagagaggggtcactggttccaatcgatatcaatcatcaacttggtcacttctgtaaaaaaagttaccaggttccagttattaggatctgatatctttttggggggcaccattgagcccactacagatgatgtaataaaaaacataatttatgaagagatagaaaaactaatatagcagagaaattaagaaaac

SEQ ID NO: 192437 - DNA, 201 bp, Homo sapiens
accatccatttcataccaaaagactatatataaatatatgtacacacacacattcacacacacatatgtgcaattacactcatacatatgcataataataaacatatacacacataaaatatgcataattttataatatggaaattattttcctgcagaaatcttttcatgattttctgatatatctctttcaaatgctaa

SEQ ID NO: 192438 - DNA, 201 bp, Homo sapiens
gtgcaatgtagagaggggtcactggttccaatcgatatcaatcatcaacttggtcacttctgtaaaaaaagttaccaggttccagttattaggatctgatatctttttggggggcaccattgagcccactacagatgatgtaataaaaaacataatttatgaagagatagaaaaactaatatagcagagaaattaagaaaa

SEQ ID NO: 192439 - DNA, 201 bp, Homo sapiens
taccatccatttcataccaaaagactatatataaatatatgtacacacacacattcacacacacatatgtgcaattacactcatacatatgcataataataaacatatacacacataaaatatgcataattttataatatggaaattattttcctgcagaaatcttttcatgattttctgatatatctctttcaaatgcta

SEQ ID NO: 192440 - DNA, 201 bp, Homo sapiens
ttaccatccatttcataccaaaagactatatataaatatatgtacacacacacattcacacacacatatgtgcaattacactcatacatatgcataataataaacatatacacacataaaatatgcataattttataatatggaaattattttcctgcagaaatcttttcatgattttctgatatatctctttcaaatgct

SEQ ID NO: 192441 - DNA, 201 bp, Homo sapiens
atcatcctaagttcaaaacaaataataataataatagtaataataataataataagccaacctttaacccctgaagagattaaattcttttttttttttttcactaacttactctagattttgtgggcaaggaatttcgagcagggcagccttttgcctaaaaagacatatggattctaaaacaccaaaatattgaaggat

SEQ ID NO: 192442 - DNA, 201 bp, Homo sapiens
aaagtccttcttcactgtaacataatcattgttttagatgtttctatccttttttgacctagtaaaaacaacaaataaaaaaattattttttaaaaatgttaagacccaatataaagcacgctaacatccttagtttgtattcatgatatttcaataagcatctaaaaattaattactaggtacacatagatataatacga

SEQ ID NO: 192443 - DNA, 201 bp, Homo sapiens
ttaggtcacttttgtgtatatatatatatgtgtgtgtgtgtgtgtgtgtgtgtgtgtgtgtatatatctatatgtgtgtgtgtgtatatatcttgatgcartttgtcttgttatcccaattaattgtctctgcttctaaaaataatttattgtgagatattttcttatttaatcattaattttcagtcatgttataatgtt

SEQ ID NO: 192444 - DNA, 201 bp, Homo sapiens
tgttgaaatgtataaattaggtcacttttgtgtatatatatatatgtgtgtgtgtgtgtgtgtgtgtgtgtgtgtgtatatatctatatgtgtgtgtgtgkatatatcttgatgcaatttgtcttgttatcccaattaattgtctctgcttctaaaaataatttattgtgagatattttcttatttaatcattaattttca

SEQ ID NO: 192445 - DNA, 201 bp, Homo sapiens
attgacctttcaatataaatgtgttgaaatgtataaattaggtcacttttgtgtatatatatatatgtgtgtgtgtgtgtgtgtgtgtgtgtgtgtgtatatatctatatgtgtgtgtgtgtatatatcttgatgcaatttgtcttgttatcccaattaattgtctctgcttctaaaaataatttattgtgagatattttc

SEQ ID NO: 192446 - DNA, 201 bp, Homo sapiens
agagcaaaattaattcctattagagataagggttattttcaaactgatgtcttatcctccttagtgcctcaaattagatcctgttaagacatgtcataacrttagtacaagtttattttggtgcaaacatttttgaaattcatgcatagtttttcataatatgcttttaaataaacttttaaaagaccccttgtacagatt

SEQ ID NO: 192447 - DNA, 201 bp, Homo sapiens
ctgatctgggcacaacagttttggcaccaatcaagtggaaagtgtgttcaactttaattttttaggcagaattgtgtaagctgaaacaattgaggtgtctrtggtgttggctactgtctttgctgttaattattgatcttcttcaagtagagaatgcaaaagataaatttttccatcaaaaattgatgtgtatggtcctct

SEQ ID NO: 192448 - DNA, 201 bp, Homo sapiens
tatacaatatcaaaaatcatacttgttgatttcaagctaagactagtaaatacaaaaagtttctaaattcctaattttcacttggaacattgaattttatyattgggaacaaatactgtcagttgttttccatcaaactgaaaaactccttccatttttaagaaaatatctgccaactaccccaagatacccaagtctgaa

SEQ ID NO: 192449 - DNA, 201 bp, Homo sapiens
caatgatctttgcttttgagcagttcacttttgctttgactggaccacttccacctcttggtattcattgctttgattatgcttttgtcttcagaattgtrcgggtaaagccatgtttcatctctgattacaatttttcaaagagatgctttagtatctctatcccacttgtttaaaatttccattgaaagctttggtctg

SEQ ID NO: 192450 - DNA, 201 bp, Homo sapiens
cttcagcattccaaagactgttacaatgatctttgcttttgagcagttcacttttgctttgactggaccacttccacctcttggtattcattgctttgatyatgcttttgtcttcagaattgtgcgggtaaagccatgtttcatctctgattacaatttttcaaagagatgctttagtatctctatcccacttgtttaaaa

SEQ ID NO: 192451 - DNA, 201 bp, Homo sapiens
tttcactagttttgtgatatgaagcgagctattaacattttgtccctctgtattccatttgtaaataaaatcaaatgagttaattcatgaaaattgcttayaactatgcatagctgatggtgagtgctaagatgatatcatctaatattactattataagtgttatgctgtaatttgaaaagtgaattttaacattttatc

SEQ ID NO: 192452 - DNA, 201 bp, Homo sapiens
gctgatggtgagtgctaagatgatatcatctaatattactattataagtgttatgctgtaatttgaaaagtgaattttaacattttatcataccataactrtgtaatcatacaaaattttaaaataataaagaaaaagaatttaaacatttaaaaacctgtgatacagttatataagaagaattacaattaatatataaat

SEQ ID NO: 192453 - DNA, 201 bp, Homo sapiens
attgtctcacagttcaagagatgataaatccaaatttaatatccttggactaaaatcgaggtgctcctaggtttatgctccctccagaggtgatggagaasaaaacatttcttgtggctcttggcttctggtggctttcagcattctttaagttgtggctgcaccactccaatgtctgcctttgtagtcgcatcgtctcct

SEQ ID NO: 192454 - DNA, 201 bp, Homo sapiens
gaatttaaacatttaaaaacctgtgatacagttatataagaagaattacaattaatatataaatagaaacactattaaaattaccttcctgatttttaggkttttttttcacctttttaaagttaacctgaatataccatgtggcattatattttaacacttaacttgatatccttaaatttttatgtatttccatatact

SEQ ID NO: 192455 - DNA, 201 bp, Homo sapiens
gctgcagtgagctattgcactgcactgcagccaatgtcaccactgcactccagccttggtgacagggagagattctgtctccaaaaaaaaaaaaaaaaaaaggaattttcttaagaactttgactttttggagtaaaatggaaatctaggcagtaggcataattaaatatttagaaatagttacaatgattaacttaaagt

SEQ ID NO: 192456 - DNA, 201 bp, Homo sapiens
ttaagtaacatgatagtgaacatctttatgaagaatggtttcttctggctgttctctactcagaagtgcaaaggatcattttccccatactgtgttatttygtcctacaaatgagtccgcttttatggttgtttaattctttctgtactataaacccattcctaatgaagaaaataatgattaaatatttcctaaaacaga

SEQ ID NO: 192457 - DNA, 201 bp, Homo sapiens
gtaggacagcttcaagttgttttaaaggactggactcctttttgtcccccttttcaactttcaggaattaaatccacatttctgtgagtaaggtggtggtratgaagggtggaatggacctctgtctagataaccatttctagttacaaaggtacccaggaaaatcagaatgtatttgtttattagctgggcacgtggctg

SEQ ID NO: 192458 - DNA, 201 bp, Homo sapiens
tctcttggcccagtctgattttggccacagctgctgtgggtgcctcgggccaggtcaaactcaaccctggctgacaggccaccaacacaagtgcaagctgrttgtctacctgctttctgcctcagggccttcctctctagaaattaactatggaggcaggagagagtcacttctagtctcttttaccctggattatctgta

SEQ ID NO: 192459 - DNA, 201 bp, Homo sapiens
agggagctgcataatctctagaaagccccttaaactcagatctattctttctaaagggcaaacattagcatctctcctgtttctgcattaaaaaaaaaaaattaccacaattaatcaggtcaaaatgaataatttaccagaaaatcctttggaaatcacacagctctatataaatacaaagttttgtcattttgtctctaa

SEQ ID NO: 192460 - DNA, 201 bp, Homo sapiens
aacaatttaacaagtaaaaaacaaaactatttaacaagcaaaagacatgaacaaacacttctcaaaagaaaccatataagctgccaacaaacatgaaaaawtactcaacatcactaatcatcagagaaatgcaaatcaaaaccacagtgagatactatttcacaccaatcagaatggctataattaaaaagtcaaaaagca

SEQ ID NO: 192461 - DNA, 201 bp, Homo sapiens
atattggatatggcatatgattaacatcacatttcagtttaattgctatgatgtgtacatagatgtgtgtgtgtgtgtgtgtgtgtgtgtgtgtgtgtgtrttgtatgataccatgatagccatggtattttatgatgacttttttatatgtgagaagtttacatgctggataagtccagaaatgtagaatgcttaatatt

SEQ ID NO: 192462 - DNA, 201 bp, Homo sapiens
cgtggagcattttggccatacatgtaattatagattttatattggatatggcatatgattaacatcacatttcagtttaattgctatgatgtgtacatagrtgtgtgtgtgtgtgtgtgtgtgtgtgtgtgtgtgtgtgttgtatgataccatgatagccatggtattttatgatgacttttttatatgtgagaagtttac

SEQ ID NO: 192463 - DNA, 201 bp, Homo sapiens
tattgacctttcaatataaatgtgttgaaatgtataaattaggtcacttttgtgtatatatatatatgtgtgtgtgtgtgtgtgtgtgtgtgtgtgtgtatatatctatatgtgtgtgtgtgtatatatcttgatgcaatttgtcttgttatcccaattaattgtctctgcttctaaaaataatttattgtgagatatttt

SEQ ID NO: 192464 - DNA, 201 bp, Homo sapiens
tctctggcctcagcctcctgagtagctgggattagcatgtgtgccaacacgcccagctaatttttgtatttttagtagagatggggtttcactgtgttggycaggctagtctcaaactcctgatttcagttgatctgccagccttggcctaccaaagtggtaggattacaggtgtaagccactgcagctggccaagtttag

SEQ ID NO: 192465 - DNA, 201 bp, Homo sapiens
aagtaatttatagattcagtgttatctccatcaagctaccgctgactttcttcacagaattagaaaaaaacactttaaatttcatatggaaccaaaaagarcccctatagcccagacaattctaagcaaaaataacaaagctagaggcatcacactacctgacttcaaactatactacaaggctacagtaaccaaaacagc

SEQ ID NO: 192466 - DNA, 201 bp, Homo sapiens
atattgacctttcaatataaatgtgttgaaatgtataaattaggtcacttttgtgtatatatatatatgtgtgtgtgtgtgtgtgtgtgtgtgtgtgtgtatatatctatatgtgtgtgtgtgtatatatcttgatgcaatttgtcttgttatcccaattaattgtctctgcttctaaaaataatttattgtgagatattt

SEQ ID NO: 192467 - DNA, 201 bp, Homo sapiens
agtctgtaatgacaatgagtggggaagtaagtttgaatttattttttctttttctttttttttttttcgagacggagtctcactctgtctcccagactggrctgcagtggcacaatctctgctcactgcaacctctgcctcctgggctcaaccaattctctggcctcagcctcctgagtagctgggattagcatgtgtgcc

SEQ ID NO: 192468 - DNA, 201 bp, Homo sapiens
catattgacctttcaatataaatgtgttgaaatgtataaattaggtcacttttgtgtatatatatatatgtgtgtgtgtgtgtgtgtgtgtgtgtgtgtgtatatatctatatgtgtgtgtgtgtatatatcttgatgcaatttgtcttgttatcccaattaattgtctctgcttctaaaaataatttattgtgagatatt

SEQ ID NO: 192469 - DNA, 201 bp, Homo sapiens
tcacaaggcagcaaagttgtgaaaggtagaagtgagtctgtaatgacaatgagtggggaagtaagtttgaatttattttttctttttctttttttttttttcgagacggagtctcactctgtctcccagactgggctgcagtggcacaatctctgctcactgcaacctctgcctcctgggctcaaccaattctctggcctc

SEQ ID NO: 192470 - DNA, 201 bp, Homo sapiens
tgatttgctccatattgacctttcaatataaatgtgttgaaatgtataaattaggtcacttttgtgtatatatatatatgtgtgtgtgtgtgtgtgtgtgwgtgtgtgtgtatatatctatatgtgtgtgtgtgtatatatcttgatgcaatttgtcttgttatcccaattaattgtctctgcttctaaaaataatttatt

SEQ ID NO: 192471 - DNA, 201 bp, Homo sapiens
ggccattcagagctaactgagagcctgtatgtctctatgtctcgtaagattgttcactgtttcctgctcatgatttctttcaactttcctggaacactatsagttccagtccaacatttttttttttttcaaattaagtgcatttatcttcaatcatttcaacacaactttaaggataatgtggaagctggtaacgatcac

SEQ ID NO: 192472 - DNA, 201 bp, Homo sapiens
ttgatttgctccatattgacctttcaatataaatgtgttgaaatgtataaattaggtcacttttgtgtatatatatatatgtgtgtgtgtgtgtgtgtgtrtgtgtgtgtgtatatatctatatgtgtgtgtgtgtatatatcttgatgcaatttgtcttgttatcccaattaattgtctctgcttctaaaaataatttat

SEQ ID NO: 192473 - DNA, 201 bp, Homo sapiens
taaatataaattaaataaagttgatttgctccatattgacctttcaatataaatgtgttgaaatgtataaattaggtcacttttgtgtatatatatatatrtgtgtgtgtgtgtgtgtgtgtgtgtgtgtgtatatatctatatgtgtgtgtgtgtatatatcttgatgcaatttgtcttgttatcccaattaattgtctc

SEQ ID NO: 192474 - DNA, 201 bp, Homo sapiens
aataaatataaattaaataaagttgatttgctccatattgacctttcaatataaatgtgttgaaatgtataaattaggtcacttttgtgtatatatatatrtgtgtgtgtgtgtgtgtgtgtgtgtgtgtgtgtatatatctatatgtgtgtgtgtgtatatatcttgatgcaatttgtcttgttatcccaattaattgtc

SEQ ID NO: 192475 - DNA, 201 bp, Homo sapiens
gacctcttacctcacagaaagtcacacaggaggtcactttcaggacaatgtaaggacaggtgccctactgcttctttgccctgcagggcctttcggtttgsctgatttatccaacctcgcatacaccctgctccagtaattcaaagagaactcagtctacactggaagatcaagattggtaaccactggagactggtctct

SEQ ID NO: 192476 - DNA, 201 bp, Homo sapiens
atctcctttttatgtcttccctaatcactctgtcagaagccgccttattccccttatgtgataataagcacctggaaggtaaattgatctctctctctctccctctctctctctctctgtctctctctctcagaatctctcataacactgtatttcatagaaggaaaatatcaataagagaaatttagatttagatttaga

SEQ ID NO: 192477 - DNA, 201 bp, Homo sapiens
gatctcctttttatgtcttccctaatcactctgtcagaagccgccttattccccttatgtgataataagcacctggaaggtaaattgatctctctctctctccctctctctctctctctgtctctctctctcagaatctctcataacactgtatttcatagaaggaaaatatcaataagagaaatttagatttagatttag

SEQ ID NO: 192478 - DNA, 201 bp, Homo sapiens
agaaaacccatggcccagttctgaagcgcagagccaaaggatgcagggaacactttatttcaattatctactgtaccgactggactatccacagattctcrgaaaaaaagaaaaaaaacttcagtgactttgtgaaagcccaaatatgaacgtggaataaccatttaatggctaatatcatattaggcattgattttattg

SEQ ID NO: 192479 - DNA, 201 bp, Homo sapiens
catctggttggtctgtggacccagtgattacaccgtgagccaaatgccagccaaaactctacttactatctggctcccatatgccttcattctattaggastatggaatcagtttggatatcaaaggatgaatttcagtatttttgttttgtttcattctgtttggagatagggtcttgctctgttccccaggctggagtg

SEQ ID NO: 192480 - DNA, 201 bp, Homo sapiens
gaagtaaggtgactttaagtaatgacatctgtataaataaaccttgcaatgattacaattttacaaaaaagtaactcttactaaatacttcattttctgtraagaatacagtgccaatctggctgattattgagcaattgattatagtctctgataaaaatgttgaaaccagatggtttttcattttgtttgcctttacag

SEQ ID NO: 192481 - DNA, 201 bp, Homo sapiens
tgctggaatttaagtaatttctggaaatgtggcaggatgtaaagactcacttttgaaagggcaaattgttttcttcatgctagattaaaattctaaatttrtatgacattgttcataaaatactcacttgaagaatgaatgtgatgttcctacatataccttaaactgaaaatgcttatataaatgaaccaattcaattct

SEQ ID NO: 192482 - DNA, 201 bp, Homo sapiens
gcttcaagggagtgttatctccctgagcaacctgtggcatgccgctgagtggttattctctccgggcataaagacatgaaggcaatagggagacttttctyttcagaggccacccatggctccccatgggtgtctcacacaggggagaccaactcaactggcaccccagaaactctctttcccacagtattagctttattg

SEQ ID NO: 192483 - DNA, 201 bp, Homo sapiens
gtctaaactacttaagatctttaacttatcaggactgaaatgggtgggagtgggtttcaggaggagccaagatgtttgattatactccactgcttcaaggkagtgttatctccctgagcaacctgtggcatgccgctgagtggttattctctccgggcataaagacatgaaggcaatagggagacttttcttttcagaggc

SEQ ID NO: 192484 - DNA, 201 bp, Homo sapiens
tgtgtctaaactacttaagatctttaacttatcaggactgaaatgggtgggagtgggtttcaggaggagccaagatgtttgattatactccactgcttcargggagtgttatctccctgagcaacctgtggcatgccgctgagtggttattctctccgggcataaagacatgaaggcaatagggagacttttcttttcaga

SEQ ID NO: 192485 - DNA, 201 bp, Homo sapiens
ttttttttttttctatcagtagtaatagttactcaggcttatactcatgtcctcaatatataaggactgcttgtttcccactcagcatctagctataattrtattctgtttgagacatgtgccctacaggaaaaaagagaaacgatgtatgcaagtatgtcgatattactccagtaatttagtaagtcattgtatagaata

SEQ ID NO: 192486 - DNA, 201 bp, Homo sapiens
aatagttactcaggcttatactcatgtcctcaatatataaggactgcttgtttcccactcagcatctagctataattatattctgtttgagacatgtgccstacaggaaaaaagagaaacgatgtatgcaagtatgtcgatattactccagtaatttagtaagtcattgtatagaatatataggctaccaagaagcaagcc

SEQ ID NO: 192487 - DNA, 201 bp, Homo sapiens
atgaaacacttaataaccaaggtggtaagcacaactctgaccaatctttgggtgaacactaagctatgtgtaacagcaacacactaccacacccttaggaygcaaagcttaaaaataaagaataagaaaaagcaaaagtagaagaggtctgcattgcaggtcatacacagtgaaaaggcagacttcacagatttagtccag

SEQ ID NO: 192488 - DNA, 201 bp, Homo sapiens
actcatataggactgaaaaaacactagctgtgttttcagtgaataaagaatcaagctagatacagaggctacctagtacttctatatttcaaaaccaaagmgagaaggctagaatgcagaaaaatgaagaatggaaccaataaagccggttcctttaactgtcgtaaaattaatgcaactattctcgttttgaattatttt

SEQ ID NO: 192489 - DNA, 201 bp, Homo sapiens
acccgcgcctcccagattcaagcgattcccctgcctcagcctccccagtagctgagattacaggcacatgccaccacgccctgctgtttttctttttttttctttttgtacttttagtagagacggggtttcaccgtgttagccaggatgatcttgatctcctgaccttgtgatccgcccacctcagcctcccaaagtgct

SEQ ID NO: 192490 - DNA, 201 bp, Homo sapiens
gtaaatgttctgtttaggccacatatatatctatcagcaaaaaatgaaacacttaataaccaaggtggtaagcacaactctgaccaatctttgggtgaacrctaagctatgtgtaacagcaacacactaccacacccttaggatgcaaagcttaaaaataaagaataagaaaaagcaaaagtagaagaggtctgcattgca

SEQ ID NO: 192491 - DNA, 201 bp, Homo sapiens
tggtctttgttttcttcaagtttttaaggccttctaatactgcacttccaccagcagtttaaaaacccgaatactagtccccactattcctgttccatccytgaaatattttttcaagctcaagtaaatgttttattttaattgttagcagtactagcaactattaaaggtctgtcttgggccaagcatagcactaaatgt

SEQ ID NO: 192492 - DNA, 201 bp, Homo sapiens
ggaaactctctggaaagggaccagtcaccctcatgagggctctaccctcatgacctaatcaactcccaaaggcaccccttttttttttttttttttttttttgagacagagtctcactctgtcacccaggctggattgcagtggcgtgatctcagctcactgcaacccgcgcctcccagattcaagcgattcccctgcctc

SEQ ID NO: 192493 - DNA, 201 bp, Homo sapiens
cgtgggtgatttcgtctctgtgtttagggattcatgactcagttatagaaaggtcactgcagtctgcatcagggcaaaaactccatgagagaatgggctaktttataaaggtgagagcagctgtcagtgcagtggaaagacctgttagatggaggttgtggtgactggcttttaagatttttgacttggcaaatgaataca

SEQ ID NO: 192494 - DNA, 201 bp, Homo sapiens
tttttcaaagtcacacaattaataacttaaggagcaacaatctggacccagaactcatataaaagcttgcatatttaatcactgtaaaactttactgagamtatcatagagtagagctttacaaacaaacttctatagaagttcatctacaaagttctgtagatgctggttcaaggttcaaatgagaaattgtgctgacaa

SEQ ID NO: 192495 - DNA, 201 bp, Homo sapiens
aattaataacttaaggagcaacaatctggacccagaactcatataaaagcttgcatatttaatcactgtaaaactttactgagaatatcatagagtagagytttacaaacaaacttctatagaagttcatctacaaagttctgtagatgctggttcaaggttcaaatgagaaattgtgctgacaagtcatatataattttg

SEQ ID NO: 192496 - DNA, 201 bp, Homo sapiens
ttaagtcttcttactcataaagactcctattattcacatatctatttaatcttttattactaatagctctactaatttgtgacattcctcactgctcagtrtgtgattagatgccatttataacaatgtgtttgtaaacttcaatgttttttataagatgtaaaactaactgtattaaaacttctttgcaaatttgagtca

SEQ ID NO: 192497 - DNA, 201 bp, Homo sapiens
taataacttaaggagcaacaatctggacccagaactcatataaaagcttgcatatttaatcactgtaaaactttactgagaatatcatagagtagagcttyacaaacaaacttctatagaagttcatctacaaagttctgtagatgctggttcaaggttcaaatgagaaattgtgctgacaagtcatatataattttgggg

SEQ ID NO: 192498 - DNA, 201 bp, Homo sapiens
caaccctctggccaacaatgtataacttctgctcccagaagagatgatatgaggtgtccccaagaaagagaagctttaaaacataagaaaagagataggaragattctgatggtccaagcagagaagatggttactgtgggtgggtctcaagaacaatgtagaaccatagctgctccctggaagagttttgaggaggtgga

SEQ ID NO: 192499 - DNA, 201 bp, Homo sapiens
actttgggaggctaaggcaggcagattgcttgagcccaggaattcaagaccagcctaggcaacatggtgaaaccgcatttctaccaaaaaaaaaaaaaatatatatatatatagccaagtgtggtagcccacacctgtagtcccagctacttgggaggctgaggcaggaggatccattgaatgcaggaggttgaggctgta

SEQ ID NO: 192500 - DNA, 201 bp, Homo sapiens
agcactttgggaggctaaggcaggcagattgcttgagcccaggaattcaagaccagcctaggcaacatggtgaaaccgcatttctaccaaaaaaaaaaaawatatatatatatatagccaagtgtggtagcccacacctgtagtcccagctacttgggaggctgaggcaggaggatccattgaatgcaggaggttgaggct

SEQ ID NO: 192501 - DNA, 201 bp, Homo sapiens
gatgccaaagagttgaagtttgcaagtcaaggtcagttttctaacaattagttgttaaattgcttgttaacctgttttcaaaggcttctttaaaagtaaasagtcttccgttgcactataataatttatatatttttacagttgtatttttcatattatgggatacccatgtgtgattaacttatatcacaatagattcta

SEQ ID NO: 192502 - DNA, 201 bp, Homo sapiens
agtaggtatgcattatattattttttacacgtgaaagtctttagcaagggcattattttaaccttgttatttattcttacttttgcaacaacatacaggtsaccaagtaatctctggatgtgcttcgtgtttcacagtgctctgaaaagatttcaagaattcttattctttttttctttcttcccacttaattaggggcca

SEQ ID NO: 192503 - DNA, 201 bp, Homo sapiens
tagtctgtgccatctaggtttgtatgagtacagttacgacatttacacaaagaggaaatcacctaacaacaggcttctcagaaagtatccccattgttcaytgaagcctgactgtaactcagtttcctaagctggagggtatctgcaatcacccttctttagtatcacccaggcatatttgtgttacacagggattagcat

SEQ ID NO: 192504 - DNA, 201 bp, Homo sapiens
agtttacagaacagtgaaatggaaggtgagaaagtgaagaaaaaagtgcaaataaccatactaaaagcttagctgcacggagaagaggagaaaaaaaaaaagagatgagaagacagtgtaataaagatgaagggcttttttacaaactctggtgaatgaatcaatagagagaattaacattaagttcaggatctaggagta

SEQ ID NO: 192505 - DNA, 201 bp, Homo sapiens
ctggatttctagcccctgccaactctcatatctctttttttatttttatttttatttttttaattattatactttaagttttagggtacatgtgcacaacmtgcaggttagttacatatgtatacatgtgccatgctggtgcgctgcacccactaactcgtcatctagcattaggtatatctcccattgatatctctctcc

SEQ ID NO: 192506 - DNA, 201 bp, Homo sapiens
agaagtgcaaaggatcattttccccatactgtgttatttcgtcctacaaatgagtccgcttttatggttgtttaattctttctgtactataaacccattcstaatgaagaaaataatgattaaatatttcctaaaacagaacatttgtcttagaatagaaaattatttaaaattttaaaatcatttttagatgattattta

SEQ ID NO: 192507 - DNA, 201 bp, Homo sapiens
ctggctgttctctactcagaagtgcaaaggatcattttccccatactgtgttatttcgtcctacaaatgagtccgcttttatggttgtttaattctttctrtactataaacccattcctaatgaagaaaataatgattaaatatttcctaaaacagaacatttgtcttagaatagaaaattatttaaaattttaaaatcat

SEQ ID NO: 192508 - DNA, 201 bp, Homo sapiens
agatcacaccattgcacgccagcctgggtgacagagcaagactccgtctccaaatgaattttaaaaaataaataaaaagcaactcttagttttgttgatcrttttctattctttatttcatttttttctgttctaatcttcagcattttctttcttctgctaactatggctttagcgtgttctttttgtagttacttgagg

SEQ ID NO: 192509 - DNA, 201 bp, Homo sapiens
gttgagtggtttagcatgagagagtgttgaattttatcaaatgcttttccaacatcttttgagattgttttgtggttattctccttcttttgtttgctaakgtcatgtatcccattaattgatttgcatgtgttaaattgtccttgcatcccagagataaatatcacttggtcatggtacaaaattgttttaatatgctgt

SEQ ID NO: 192510 - DNA, 201 bp, Homo sapiens
ctcagccccacatggacatggcatcagaatgcaagcttgtgtcacatgaatacacagtgacagtatgacacactaagatgagaggctattttcacattttmctagctgttatacaatctttagagaggaaataagcctgtaagatatctgagagtagatttactgataggttggagcaatgggaacatgaaggaagaatga

SEQ ID NO: 192511 - DNA, 201 bp, Homo sapiens
attccctcagttttgaggtttttacagttttcttatataatgccaccagcaaacagatattattttatttcttcttatctaatttggatgccttgttgttktttttttcctttcttaattgctcttgctggcacttccaggactatgctgaatagaagtggtgagaatgagcatccttgccttctttcacatcttagagga

SEQ ID NO: 192512 - DNA, 201 bp, Homo sapiens
tctgagagtagatttactgataggttggagcaatgggaacatgaaggaagaatgaagttgattaagaggataaaaacataggatatttcttgaatagctamagttgtggacacatacacacacaatgaaagcttatacaagtgcttaaagtgtttccaaataaaaatacattccctgatatcaaagaattgctagaaaata

SEQ ID NO: 192513 - DNA, 201 bp, Homo sapiens
taattccctcagttttgaggtttttacagttttcttatataatgccaccagcaaacagatattattttatttcttcttatctaatttggatgccttgttgktgtttttttcctttcttaattgctcttgctggcacttccaggactatgctgaatagaagtggtgagaatgagcatccttgccttctttcacatcttagag

SEQ ID NO: 192514 - DNA, 201 bp, Homo sapiens
atagtaatacatttctttttcccctagaattgatctacatgaacgtacgttctcttcccatactcgtggccctgtttttaacatccctttttcaatgtggrgaatatttgctgccctgttgtgacaacacaggtcttggctattttgtaatttccagaaacatgctaaacttccttttagccagttgactaggcacttgaa

SEQ ID NO: 192515 - DNA, 201 bp, Homo sapiens
acactctctcaagtcttataattctctgaccaccttgctggttttatgtcactttcaagagattttctaactttacttttcctttaattgctgatgatcamcaggattgtttttctgttctactctttcctctctgcattgccctgggttatttcactcctcctcattgatttcaaccaccatctgtgcagaagacagcat

SEQ ID NO: 192516 - DNA, 201 bp, Homo sapiens
gggaagctcagttaaaataataaaggaagaaatatcctgcaattaattcgctgggggaggagagaatagggatgagatttgagtagtttttatccatgttwtcagaccagaagctttagattgtctaaatattacagactgtcaattggcatcaaggttttctttgccccacatctgctactgaagtaggtgaaaactgga

SEQ ID NO: 192517 - DNA, 201 bp, Homo sapiens
tcccacctcaacctcccaaagtaccaggattacagatgtaaaccaccgtgcccagctgagttattctcataatttaattagaagagatacatatagaaaaaccaaggagaagcttattggccctggcccttgctcaccctttcctcacttttctctttaatgttattcttgatgctactatttattttgtccattatacct

SEQ ID NO: 192518 - DNA, 201 bp, Homo sapiens
aagtattctaaaaaatacaaagtattaaatagaatattttaaaataactatataggttatttggtgaaagaagaaaacagaaaatatatatcaattttttwaaaaaaaatatttattcctaggtaatttctgggggtaaaacaacttcttttatgttaccacttcaccatttgcagaaccagtgcaaactggtttctcaga

SEQ ID NO: 192519 - DNA, 201 bp, Homo sapiens
ccccgaagtagagattattcgcacatctgttgattttttttcacgttgcacacatttgcacctttttttaaaatgttgactgaatcgcttaattgtagacragcattcattttaatgtaaatcttacagtattacatgagtgaatgtatgaaaatagcttggaacagtttaaattgggcagaattctgctttgatcataat

SEQ ID NO: 192520 - DNA, 201 bp, Homo sapiens
ttcgtgttcaggtaacagaaagcctagaactaatatgagttattctaattttttaaaaaaattagaataaaattctattctagtaacagaataaatttttytattttattctaataaatgacagaataaaaaatctgtcacccaggctagagtccattggcaagatcatagctcactgtaaccttgaattcctgtgttcaa

SEQ ID NO: 192521 - DNA, 201 bp, Homo sapiens
aatttacatgtgaatataaatgcaacaatagcagacaaaaataataggaaataaattcaagtagtatgtctaaggacaaaaatctattgacccaatagggkttatttcaagaaagccaaaacaggtcaatattactacaattatttgttttaaataaaaacaagagttgctgttttttgtgattaaaaactaattgaaaaa

SEQ ID NO: 192522 - DNA, 201 bp, Homo sapiens
gttagtcccaggactagagaaaatgagagaagatgtcccagctcaatcaggcaggcagaaaaaaaagggacaaattcttccatcctacaccttttgttctrttaaagctctgagtagactggatgatgcccactcacattggggagggcaatctattttactaagttcaccaattcaaatgctagtctcatatggaaacat

SEQ ID NO: 192523 - DNA, 201 bp, Homo sapiens
ctcctagtcaacaaatctaaaaagtgtttaatccagactatttactggctcttaactttaaaaagttataatgtacaaacaaaactaatctatattcttcycatccaaaataccttctccaagcatgattacctctattcttaacacacagtcttcttattctggtattcctttaaaaattaaattcaaccatacttgaat

SEQ ID NO: 192524 - DNA, 201 bp, Homo sapiens
atggaagcaaagagaccatcctagaatatcttctagtaaaataagagacagatgagtacactaagagccatggatactgaaaaaaactggaaagacttaasaaatattttgaaaataaaatcgacagtgtccaggggatggaaggaaataaaatatcctgaggttttaagtttaacaactaggtggtctcatttactgaga

SEQ ID NO: 192525 - DNA, 201 bp, Homo sapiens
tgatgcccactcacattggggagggcaatctattttactaagttcaccaattcaaatgctagtctcatatggaaacatcttcacagacacactcagaaacsatgtttaatttgggaaccccatgcccagtcaaattgacacacaaagctaaccatcagatgtccactccttgtcagctgagcacccatgcacaccccttaa

SEQ ID NO: 192526 - DNA, 201 bp, Homo sapiens
tataatatataaatatattatatatataatataattatatatataatatataaatatataatatatataatataattatatatataatatataaatatatwatatatataatatataaatatataattatatataatatatataaatataattgtatattatatatataaacatataattatatatttatataatatatat

SEQ ID NO: 192527 - DNA, 201 bp, Homo sapiens
agaaaaggactacattgctttaaagtgaatactgcaatgatataagatggagaatactccccctacatcaccttttctaagttccatgagattttactgcygccaatagaaaagcatcgaaataaagtaactttctgagggcataaaggttagtaaaaactggatagggtgataaaatattttggaatgattttttgttat

SEQ ID NO: 192528 - DNA, 201 bp, Homo sapiens
ttgcagtgagccgagatggcaccactgcactccagcctgggcaacagagccagactccgtctcaaaaaaaataaataataaaaaaaaaaagaaaaaaaaaataagcacttattacaactcatggttttctgggccagcaattgggctagtcatctttctgctctacgtggcatgacaagatcacttggcatcttagcacag

SEQ ID NO: 192529 - DNA, 201 bp, Homo sapiens
ggaggtggagcttgcagtgagccgagatggcaccactgcactccagcctgggcaacagagccagactccgtctcaaaaaaaataaataataaaaaaaaaaagaaaaaaaaaataagcacttattacaactcatggttttctgggccagcaattgggctagtcatctttctgctctacgtggcatgacaagatcacttggca

SEQ ID NO: 192530 - DNA, 201 bp, Homo sapiens
aatcatatgtagtattatgaaacaatatgtataagaaaataaacattgagataaaatgtaagccaggaaaataaaaattcttgccaaattcctaatcaagragaaacaaaaagagacaattagaaattcataacacctgtgtaaaaatgaggacggcttttgtgggtaatgtggggaatacatgagttgcactaaaatatt

SEQ ID NO: 192531 - DNA, 201 bp, Homo sapiens
tactttcatctaggacaacagagaaggccatttcaaacagaagaaatcacatttataacacgcacacacaaacacacacacacacacacacacacacacamtgctatggactgaagtgcaccccccaaaaaatgcatatttgaccttctaatcctcaatgtgataggatttagaggtgaggccttttagaggtaatgaagt

SEQ ID NO: 192532 - DNA, 201 bp, Homo sapiens
ccccatctttgtggttttatctacttttggtctttgatgatggtgatgtacagatgggtttttgttgtggatgtcctttctgtttgttagttttccttctracagacaggaccctcagctgcaggtctgttggagtaccctgcagtgtgaggtgtcagtgtgcccctgctggagggtgcctcccagttaggctgctcgggg

SEQ ID NO: 192533 - DNA, 201 bp, Homo sapiens
gtcgctctgatttttagagtttccagtttttctgttctgtttttttccccatctttgtggttttatctacttttggtctttgatgatggtgatgtacagaygggtttttgttgtggatgtcctttctgtttgttagttttccttctgacagacaggaccctcagctgcaggtctgttggagtaccctgcagtgtgaggtgt

SEQ ID NO: 192534 - DNA, 201 bp, Homo sapiens
ttctgcatctattgagataatcatgtggtttttgtctttggctctgtttatatgctggattacatttattggtttgcgtatattgaacctgccttgcatcycagggatgaagcccacttgatcatggtggataagctttttgatgtgctgctggattcggtttgccagtattttattgaggatttttgcatcaatgttcat

SEQ ID NO: 192535 - DNA, 201 bp, Homo sapiens
acatcctattaattatatcaaaatccatagaaagccaaattaacttccagattgcttggtaactatggaatttcagcaaaagaacctttggaaggcctggycaatttctttttaaagaaggctctcaatttgcttttattgtatacacacataccatcttgtgtatcttctttatagcacttgatctcaatttatattaaa

SEQ ID NO: 192536 - DNA, 201 bp, Homo sapiens
ctcaggtcagcatttggaattgaagatacagagttcatgaatgttcagtttgctcagagtaccaggcaaagttaatgagagaataagaaagcctattctayagatatttcagtcttttggttgacagggatactgggaaagatggtaaattttaaagccaagaatttccatcccaaagtactgatttattgtaatgattaa

SEQ ID NO: 192537 - DNA, 201 bp, Homo sapiens
ttagaattttaaatatggaaaataaaacaaaaataagatgccatctcataaacattctattactttatgttttaacaaattaccacaaattttgcagcttygaacatccgctatttattatttcagtttctgtagatcaggaatctgagcctggtgtaggtgaattctctgcttaacgtctcacaaggttgaaatcgaagt

SEQ ID NO: 192538 - DNA, 201 bp, Homo sapiens
atataatatataaatatataatatatataatataattatatataatatataaatatattatatatataatataattatatatataatatataaatatataatatatataatataattatatatataatatataaatatataatatatataatatataaatatataattatatataatatatataaatataattgtatatta

SEQ ID NO: 192539 - DNA, 201 bp, Homo sapiens
ataatataattatatatataatatataaatatataatatatataatataattatatataatatataaatatattatatatataatataattatatatataatatataaatatataatatatataatataattatatatataatatataaatatataatatatataatatataaatatataattatatataatatatataaa

SEQ ID NO: 192540 - DNA, 201 bp, Homo sapiens
gaaggtttcagggatgtttttgtcaggatttggaaaatgtgctcaaggagcagagtgataaattgagtgctgcctcagaaaaagtcaggctgtcagggaasatatttatctccatgtttgggaagcagagcaggagaagtacagatattttaaaaagctgtgtgaaaaccttccaaggtaagggacaaggtcaatcttcca

SEQ ID NO: 192541 - DNA, 201 bp, Homo sapiens
tataatataattatatatataatatataaatatataatatatataatataattatatataatatataaatatattatatatataatataattatatatataatatataaatatataatatatataatataattatatatataatatataaatatataatatatataatatataaatatataattatatataatatatataa

SEQ ID NO: 192542 - DNA, 201 bp, Homo sapiens
tatataatatataaatatataatatatataatataattatatatataatatataaatatataatatatataatataattatatataatatataaatatatwatatatataatataattatatatataatatataaatatataatatatataatataattatatatataatatataaatatataatatatataatatataaa

SEQ ID NO: 192543 - DNA, 201 bp, Homo sapiens
tataagcaatctaatctcacatttagataaataaaaattataagcaatatgagggcagaaactttatatatttcaattattgatgaatttctggcaactagaatagtgcttcatgcataacaggtattcattaaatacttgttgaatgaatgaattaatgagcaaaaataataggcattattttctgtggtcttccctttt

SEQ ID NO: 192544 - DNA, 201 bp, Homo sapiens
gaaagtattaaaggagaattgttactaaacaactttaaagaactagattcaggaatgggtgaatcctcgtgctcaatttattaaccagaatgacctctatrcagtggcatgttggcctccagaagttctagacttaaaggccagctctgaacctggagtgaaatctgaacatctccttgtcaattattgtagtaaaggtct

SEQ ID NO: 192545 - DNA, 201 bp, Homo sapiens
atataatataattatatatataatatataaatatataatatatataatataattatatatataatatataaatatataatatatataatataattatatawaatatataaatatattatatatataatataattatatatataatatataaatatataatatatataatataattatatatataatatataaatatataat

SEQ ID NO: 192546 - DNA, 201 bp, Homo sapiens
acgctcaattacttcacttccaatatttttcaagctattctcgtggaaatttttgtctatcaaaagtggaatagccacagaatttataattttattacttrtacataaagtttatttagtgtaggggagaaagagaatgagcaaaaaaattactatgtaactgattggaacaatatatttaatcacaatctaaggtcagta

SEQ ID NO: 192547 - DNA, 201 bp, Homo sapiens
tatatatatatatctttatttataattggataattatatataattatccaatatataattatatataattatatataattataatatataaatatataattatataattatatataatatataaatatatataatatataaatatataattatatataatatataatataattatatatataatatataaatatataatat

SEQ ID NO: 192548 - DNA, 201 bp, Homo sapiens
ttttattacttatacataaagtttatttagtgtaggggagaaagagaatgagcaaaaaaattactatgtaactgattggaacaatatatttaatcacaatstaaggtcagtaccatttctcttttagagatagggtaactgggtcccagaaacattaaatgacttacctgaagttgccctttagctaaatcaaaatttagg

SEQ ID NO: 192549 - DNA, 201 bp, Homo sapiens
tatatatatatatatctttatttataattggataattatatataattatccaatatataattatatataattatatataattataatatataaatatataattatataattatatataatatataaatatatataatatataaatatataattatatataatatataatataattatatatataatatataaatatataat

SEQ ID NO: 192550 - DNA, 201 bp, Homo sapiens
cactagtttacaccatttacatttactgataatacacatggctagtggcagcaatggattgctgtgggaagtctttaaactctttctctatgggttttgtyggtgaaatacttatttatttggttgcgttcctgtggtgtagatgacttttcaagtacactataacacagtgacttgcaggccctgaactcctttggtcgc

SEQ ID NO: 192551 - DNA, 201 bp, Homo sapiens
atatatatatatatatctttatttataattggataattatatataattatccaatatataattatatataattatatataattataatatataaatatataattatataattatatataatatataaatatatataatatataaatatataattatatataatatataatataattatatatataatatataaatatataa

SEQ ID NO: 192552 - DNA, 201 bp, Homo sapiens
agtcagctctaggttacattgtcttctttagttggcttatttcagaagagggaaataaaagcacttaaacagaaatatgaacaaaggtgtcatctaatgakgacctttctggcctataacattttccttatggctcaggaaaaaaaggttcaagtgatgctgcattcattattgtatataatgagagacatttgggaaaaa

SEQ ID NO: 192553 - DNA, 201 bp, Homo sapiens
tatatatatatatatatatctttatttataattggataattatatataattatccaatatataattatatataattatatataattataatatataaatatataattatataattatatataatatataaatatatataatatataaatatataattatatataatatataatataattatatatataatatataaatata

SEQ ID NO: 192554 - DNA, 201 bp, Homo sapiens
agatatatatatatatatatatctttatttataattggataattatatataattatccaatatataattatatataattatatataattataatatataaatatataattatataattatatataatatataaatatatataatatataaatatataattatatataatatataatataattatatatataatatataaat

SEQ ID NO: 192555 - DNA, 201 bp, Homo sapiens
ttcacacccagtgtgtaaaccagaaatgcatgctcatacgtctgttcattcctggagacaccagttcaaattcaccagcaccagcagcaacaatcaggacrtcacagtcagcctgaaatgtggctgtattcacgtttttcgcaaagcatctgtgtcccagactatcaataataatcaagtagtaactgctggtctcaaatt

SEQ ID NO: 192556 - DNA, 201 bp, Homo sapiens
tctttgttgattttttgtcattagcttacccttgttgaaagtgggtgtaatcccctactattttgtattgtgttctatctctccctttagatctaataacrgttgctctatatatttgagtgcttttgtgttggttgcatatatatttacaattgttatatcctcttgttgaattgatccctttctcattatatataataa

SEQ ID NO: 192557 - DNA, 201 bp, Homo sapiens
aagtacttctgccattttgttcattattttttccttatcttgtagattccttatttctttcttcttctcttgctatttacctctgtggtttggtggttttytgtggtgctaagctttattttctcattctcatttgattgtctgcagtacattatttgtttgtgattaccacaggctaacataaagagtcttgtagttaga

SEQ ID NO: 192558 - DNA, 201 bp, Homo sapiens
taaggagatcaagcagctccacagaaaagtcagcatggcaaggagctaaggctttctgccgatagcctctgagggactgaggcctccagccaacagccacrcaaatgagccatcatggaatcagatcagcccaagttaaaccttcagcttcttggtgatggcttacctgaatcatcatgacagactcagtcagagtcacct

SEQ ID NO: 192559 - DNA, 201 bp, Homo sapiens
gtcacctggccctgaatccttgacccacagaaactgtgagctaataaatgtgtgttgttttgagctgctaaacaaaaaggtaacttattattcacaatagrtaaccaatacactgctcttacatattacagagacactatcaaagccaaaattaatgttttgctattcacattatttttaataactcttaatcagaagtga

SEQ ID NO: 192560 - DNA, 201 bp, Homo sapiens
agctgctaaacaaaaaggtaacttattattcacaatagataaccaatacactgctcttacatattacagagacactatcaaagccaaaattaatgttttgmtattcacattatttttaataactcttaatcagaagtgatacataaaatgtccagtatatgttctaaataagttatgctttgtaggagttaaatagattaa

SEQ ID NO: 192561 - DNA, 201 bp, Homo sapiens
ttaaaggaaaggcaaaatttccccgaaactgaatgctaggaatccccaaagaatctacatcttctaacatatttcttttattcatttcttaaattgcactmatctcatttttaaatcttagaaaaaaacaaatgaaagaagaatttctcatgtgcttttacattgttattctgagaactctttgggtacctcttcctgctg

SEQ ID NO: 192562 - DNA, 201 bp, Homo sapiens
ttattcatttcttaaattgcactaatctcatttttaaatcttagaaaaaaacaaatgaaagaagaatttctcatgtgcttttacattgttattctgagaaytctttgggtacctcttcctgctgaattctaaatcaataaccttgcatatgcttgaagtatctccatgtatttatataggtatatctggatactaaaatac

SEQ ID NO: 192563 - DNA, 201 bp, Homo sapiens
tcttgttgtaacctagttagtagaattgttctaaaatagtttgatgaaaaagaatcataaaatggggtgtcacctcagatattcatgccatttaccctatrttctagttatctatatttatataacaaatcccttgaaatttagtgacttaaaacaataggccgggaacggtggctcacgcctgtaatcccagcactttgg

SEQ ID NO: 192564 - DNA, 201 bp, Homo sapiens
agtgtacagcatggtaattatagttaagaacactggattatttacttgaaatttgataagagggtaacatttagtgtccctatcatgtacatacacatacrtacacacagtggtaactatgtctggtgatgaatgtgttaattaatttgattgtggtcatcatttcactatgtgtatgcatatcaaatcatctccttgtat

SEQ ID NO: 192565 - DNA, 201 bp, Homo sapiens
gagggataaataagtagaacaataagcatttttaaggcaataaaactactctataaaatgaagaacatgtcattatacatttgtccaaacccatagaatgygcaagagagatcctaatgtaaactatggactttcggtgattatggtgtctcatggtaagctcatcagttgcaacaaatgtaccactctggtggggaattt

SEQ ID NO: 192566 - DNA, 201 bp, Homo sapiens
taacatgttgatagaaaaaactgctaaataaaaattttaaaatagagaggttggagaagtcaggagagagtgtaataaaaaaatcgtgggttataaaacaktatttaaattgtcttccagatcataaactagatctggtatagcatgagcattagcgagtcatctcttgtttgtttattactgtgtcataacccatcaata

SEQ ID NO: 192567 - DNA, 201 bp, Homo sapiens
aagatatatatatatatatatatctttatttataattggataattatatataattatccaatatataattatatataattatatataattataatatataaatatataattatataattatatataatatataaatatatataatatataaatatataattatatataatatataatataattatatatataatatataaa

SEQ ID NO: 192568 - DNA, 201 bp, Homo sapiens
ataaaaaagatatatatatatatatatatctttatttataattggataattatatataattatccaatatataattatatataattatatataattataatatataaatatataattatataattatatataatatataaatatatataatatataaatatataattatatataatatataatataattatatatataata

SEQ ID NO: 192569 - DNA, 201 bp, Homo sapiens
tctcaataaaaaagatatatatatatatatatatctttatttataattggataattatatataattatccaatatataattatatataattatatataattataatatataaatatataattatataattatatataatatataaatatatataatatataaatatataattatatataatatataatataattatatata

SEQ ID NO: 192570 - DNA, 201 bp, Homo sapiens
taggttgagtacaaaagagtcataaacatattgtgtttttataacatttagcagaggactggcaacataagagaaagtattaaaggagaattgttactaamcaactttaaagaactagattcaggaatgggtgaatcctcgtgctcaatttattaaccagaatgacctctatgcagtggcatgttggcctccagaagttct

SEQ ID NO: 192571 - DNA, 201 bp, Homo sapiens
catctcaataaaaaagatatatatatatatatatatctttatttataattggataattatatataattatccaatatataattatatataattatatataattataatatataaatatataattatataattatatataatatataaatatatataatatataaatatataattatatataatatataatataattatata

SEQ ID NO: 192572 - DNA, 201 bp, Homo sapiens
tctcatttgattgtctgcagtacattatttgtttgtgattaccacaggctaacataaagagtcttgtagttagaattgactattttaagatgatggcaacktaactttggttgcataaaattactctagacagttttccttccccctaaaatttatacttttgttcacttaatttacttctttatctgtggtgtgttcctt

SEQ ID NO: 192573 - DNA, 201 bp, Homo sapiens
actccatctcaataaaaaagatatatatatatatatatatctttatttataattggataattatatataattatccaatatataattatatataattatatataattataatatataaatatataattatataattatatataatatataaatatatataatatataaatatataattatatataatatataatataatta

SEQ ID NO: 192574 - DNA, 201 bp, Homo sapiens
taatttacttctttatctgtggtgtgttcctttgccattaattgtaattcttggttttgaccatttgacattaaacgttcatactagaggattgaaagacrtatcatatcactggaaatattaggaatttgattaattaacttactctacggtgagttttatactttcacttgttttcctgttagtaattatggtcctttt

SEQ ID NO: 192575 - DNA, 201 bp, Homo sapiens
tatagatatgtgtgtgtgtgtgtatatccttctatatatagaaaaagagagagagagaaaattatatgatatgtgctttgtaaaatattgtagtggacttwcctcactataatctcgtaagattttgtagatacaaaaattgggattctcatagattatgttcatctgataatattaatacaaatgaatgaaaactataca

SEQ ID NO: 192576 - DNA, 201 bp, Homo sapiens
ggcagaggttgcagtgagccgagatcgcaccactgcactgcagcctgcacaacggagtgagactccatctcaataaaaaagatatatatatatatatatawctttatttataattggataattatatataattatccaatatataattatatataattatatataattataatatataaatatataattatataattatat

SEQ ID NO: 192577 - DNA, 201 bp, Homo sapiens
aattcttggttttgaccatttgacattaaacgttcatactagaggattgaaagacgtatcatatcactggaaatattaggaatttgattaattaacttacyctacggtgagttttatactttcacttgttttcctgttagtaattatggtccttttgtttccatttgtagcactctcaagtgtttcttgtaacaccaactt

SEQ ID NO: 192578 - DNA, 201 bp, Homo sapiens
aaagcattacattaaatttaatgtatgtcatcccatgctaattttatgtcatgtcacatctcatacacacacacacacacacacacacacacacacacacagagatagattataaaaaggctagtagaatatagaaagcattggttgagtccatgaacttaagaggtaagctacctgggtaaaagtctttaagcaaattat

SEQ ID NO: 192579 - DNA, 201 bp, Homo sapiens
aactggattcttcatgtccttaagtaaatcaatatgcttaatattaagatcaaaagtggcatgtctttaaaaaaccaacaaaaagatctaatgtagagagraaatataaaactaagagaatatttaaatttgactgcaggtattcagagatttataagaatacataactccattaaatggctttataatgattaattacta

SEQ ID NO: 192580 - DNA, 201 bp, Homo sapiens
ttatggtaatgaattcccttagctttttcttatctgcaaaaatttttatttcttcttcatttctggaaaaatatctttgctttatataatattctcaactracagcttttttttctttcagcactttgaatatatcatcccattctctaccagctttaaggtttctgctgagaaatctgctaatagtgtgatgcagattcc

SEQ ID NO: 192581 - DNA, 201 bp, Homo sapiens
taaagcattacattaaatttaatgtatgtcatcccatgctaattttatgtcatgtcacatctcatacacacacacacacacacacacacacacacacacacagagatagattataaaaaggctagtagaatatagaaagcattggttgagtccatgaacttaagaggtaagctacctgggtaaaagtctttaagcaaatta

SEQ ID NO: 192582 - DNA, 201 bp, Homo sapiens
ttctcaactgacagcttttttttctttcagcactttgaatatatcatcccattctctaccagctttaaggtttctgctgagaaatctgctaatagtgtgakgcagattcccttataagagacttgatacttttcttttgtagattttagaattatttcattgtctttgacttttgacggtttgattataatatgcctcaga

SEQ ID NO: 192583 - DNA, 201 bp, Homo sapiens
ataaagcattacattaaatttaatgtatgtcatcccatgctaattttatgtcatgtcacatctcatacacacacacacacacacacacacacacacacacmcagagatagattataaaaaggctagtagaatatagaaagcattggttgagtccatgaacttaagaggtaagctacctgggtaaaagtctttaagcaaatt

SEQ ID NO: 192584 - DNA, 201 bp, Homo sapiens
aagttcataaattctttcttctccttcatcttgtctgttgttgaagctgtcagttatgtatttttttcatttcattcattgaatatttctgctccaattcygcttggttctttttttattttatatacatctttgttgaatttctcattcggatcatgaattgttttcctgattttattgaattgtttctctgtgttctct

SEQ ID NO: 192585 - DNA, 201 bp, Homo sapiens
tccatattattgaaaatgtgaaaatattgcattaaattttatcttactttgagatgcattttataaaatcattataacttactaaaaatctatgaaaagtctacaaaaaatcctgctactattctcaagtgattaataagtcagaaggctgacttttcatttcatttcttttagaatcttacacagagtaaaatattatat

SEQ ID NO: 192586 - DNA, 201 bp, Homo sapiens
ggggtgtcacctcagatattcatgccatttaccctatgttctagttatctatatttatataacaaatcccttgaaatttagtgacttaaaacaataggccrggaacggtggctcacgcctgtaatcccagcactttgggaggccgaggtgggtggatcacgaggtcaggagatcgagaccatcctggctaacacggtaaaa

SEQ ID NO: 192587 - DNA, 201 bp, Homo sapiens
tcactgataacatttatttatttatttatttatttttccataagttattgggatacaggtgatatttggttacatgagtaagttttttagtggttatttgwgacattttggtgcacccatcacctgagcagtatacactcactatatttgtagtcttttatccctcgcccctctccaactcttccccccaagtccccaaag

SEQ ID NO: 192588 - DNA, 201 bp, Homo sapiens
atcgagaccatcctggctaacacggtaaaaccccgtctctgctaaaaaatacaaaaaattagctgggcatggtggcacatgcctgtagtcccagctactcrggaggctgaggcaggagaatgtcatgaacccaggaggtggagcttgcagtgagccgagatggcaccactgcactccagcctgggcaacagagccagactc

SEQ ID NO: 192589 - DNA, 201 bp, Homo sapiens
accgattttgctgagagctttaatcataaagagacgctggatttaatccaatgctttttttgcacctcctgccaggaggtggtgctttccagagaggaacyggcagtgggcgaggccctagaactcccaagattatatgccctttgtcttccactaccagggtgagtagggaaagacaatcaggaggagggcagggttagg

SEQ ID NO: 192590 - DNA, 201 bp, Homo sapiens
ctacgatcctgggcttaacgaacttggagattgcaaagcactatttgctgccacacagttgaactacactgaaaataaatcattagcatctctaaactctmtgctaaaatggagtcattagtgaggagtgagcactttctgtacaaagtggattccctacaaaacacatttgcttgtttttctatgagtccgacctcaaat

SEQ ID NO: 192591 - DNA, 201 bp, Homo sapiens
atcacttggcatcttagcacaggtctgaaaggctgagttcacctaggtccaccttcttcttcatgtagattcagggcctcttcacatgatttttgtagctraatagctagttgaatttcttacacagtttctcagggctccaagaccaagtgttgagataggaggtggaggccgccactctcctaagatctggcccagaaa

SEQ ID NO: 192592 - DNA, 201 bp, Homo sapiens
ttaaaacatacagctgcagcagtaagccacatatattttatttggccttgcaaattttctgttgagttctaggagctgtggatttttgcgatatttggctsaaactcaaaatgaaaaaatcattttaaaaaatagaaatgcatttcattctttaaaaatgctaaaaatatatgatgcaaaatgtcatagtttggctgtaat

SEQ ID NO: 192593 - DNA, 201 bp, Homo sapiens
gccttttatgtagcactaacatgcactcagtagcatttaccgacttagtctggggcaggggcaagaggatgcttcaaaaacaaaataggctaccctctttygccactgttcttactatataacccccttgcagtaaagataagaaacaaactaaaattcacataaacaccccaatttggaaattgttttatatatgtttac

SEQ ID NO: 192594 - DNA, 201 bp, Homo sapiens
gaacccgggaggcggagcttgcagtgagccgagatcgcgccactgccctccagcctgggcgacagagcgagactcctctcaaaaaaaaaaaaaaaaaaaawaaaataagaggagtttctgtcacattgtcataattttttttttggagaccttggacaaaaagtaaggtaatttaatgttctttgttatttaatgagttgg

SEQ ID NO: 192595 - DNA, 201 bp, Homo sapiens
aatatattgataaagaacctcctatgtgccagatactgttgtcaaccatgagggtatattgaaaaacagacacagttcttgccttcaatattctgagaatstaagggaaaggcagatatgaacaggtagttataccatagcttaaaaaaatgtaattattagagcaaggatgagatactatggaatatatgaagaagtcat

SEQ ID NO: 192596 - DNA, 201 bp, Homo sapiens
aaggcagatatgaacaggtagttataccatagcttaaaaaaatgtaattattagagcaaggatgagatactatggaatatatgaagaagtcatctaactcrgtcttagagaagtgggtaaaggttttccaaaagaagtaccagaagggcatgtgggaattagcctggccaaggaagggatgtagaagacacaatagaaaga

SEQ ID NO: 192597 - DNA, 201 bp, Homo sapiens
aaagaagataatatgaaactgtcacaggattagggggaaatgtgctagctggagcaattagcacagtacgggagagtagcagaaaagcatggctagttaaygttaagatgggtaatatctgaatgagactactaagcaaaaaaaaaaaaaaaaaaaagaatgcaagagaaaagacagcagtccaaattgagaaagtgtatg

SEQ ID NO: 192598 - DNA, 201 bp, Homo sapiens
tctagtgaatcaccactttgccctttgcttcacaaagaacttgtagaggttaatgttcctgagaatcccggttctgtcttaaagatcgctgtatttagggyaaagtgccgtataaatcatagaagctttagcaaaaaacttcagagaatacttgtatttcaaacttctaaaggttatttaaaataaaagtatgaaaactaa

SEQ ID NO: 192599 - DNA, 201 bp, Homo sapiens
aattcatatttatttttagatctagtgaatcaccactttgccctttgcttcacaaagaacttgtagaggttaatgttcctgagaatcccggttctgtcttraagatcgctgtatttagggtaaagtgccgtataaatcatagaagctttagcaaaaaacttcagagaatacttgtatttcaaacttctaaaggttatttaa

SEQ ID NO: 192600 - DNA, 201 bp, Homo sapiens
cataaacaatcaaatttagaattttaggaagcaggtcccctttcccagaatccaagagtgaagctacaagagtgtccttgagtaaagaaaccttgaggccrcacagtatctaatgtctgtgaaacaagctttgatttcagaatttttgcaacaacttagtttctttaaacagtgagtataatggtgtcactgtgctttata

SEQ ID NO: 192601 - DNA, 201 bp, Homo sapiens
tatgaaaatgcctatttgtcttttatacatgaacaagtaaaaatgggctaaactaagtgagtatttgaatgcaagaccacagaaagtgtaatagaaagggrtgctagccccattgaccttatgtcaagaaagttattaccagacaagaacttcccaaagataaaaagttattcctgagaagtttaacgaacattcatgaaa

SEQ ID NO: 192602 - DNA, 201 bp, Homo sapiens
atcgtgaatctataattttggaatataagggcaactttgctagaaacagtggactcaaagttaactataaattgttgtgtatgtacatattattgaaaaaygtgcatacatatgtatgtgtatatatatatagtatatgtaaacttctataataagaagttaatggagattaggttggtaatatttatctttattcttttg

SEQ ID NO: 192603 - DNA, 201 bp, Homo sapiens
aggaggttgcagtgagtcgagattgcaccattgcactccatattgggcgacaaaagtgaaactccatctcaaaaaaaaaataaaaataaaaaataaaaagrcaattcaatagaaagaaaggcacatctttgagtgttcttttcataggacaggttacgcatctccaggaaatgtataaaaatatgctgaactcactagtaa

SEQ ID NO: 192604 - DNA, 201 bp, Homo sapiens
cttcctcagcacttgctgtttatacagcttctttccttaagcttcatgaaccaacatctgcttgcatcaaactatttttcagcttcctcacatctctcagcttcatacaattgaatagagttagcggcttgctctggacttggctttagcttaagggaatgttgtggctcctttgatcttctgtctagaccactaaaacat

SEQ ID NO: 192605 - DNA, 201 bp, Homo sapiens
atttctatgtcaaaagtaaaactgacattttaagagagtgtatgtgaattctgagctctgagtaaggaagcttgtcttacagaagactagttaaggtactractacttatcaaagggatgatgaaattgaatattaaaactaggttcttattcattaaaatacacattaatgaaagtaaaagaaaaaactttaaatttgta

SEQ ID NO: 192606 - DNA, 201 bp, Homo sapiens
tcagtgaccagctgctggaggtggtcggcttggaaggagccatggagatggggcaaatatacacaggcctgaaaagtgctggccggcggctggctcagtgytcctgcgtggtcatcaggtagttccctttctgtaactgacaaaggcgtttgatatggcatagcctcaaactaattaaaagtatgcagaactctgatagta

SEQ ID NO: 192607 - DNA, 201 bp, Homo sapiens
tcttattcaacacaatatcagaacttttctacccactgtgataaactgaagaaaagaaataaagacatgcatactggaagtgggggggggacccaattatkcctatttgcaaatgacatgaaggtccacatagaaaatcacatagaaactgaaaaactaaaccaaacaataccttggaacaataagtgaattttgcaaggt

SEQ ID NO: 192608 - DNA, 201 bp, Homo sapiens
tgcaggttagtgacatatgtatacatgtgccatgctggtgcgctgcacccactaacgtgtcatctagcattaggtatatctcccaatgctatccctccccsctcccccgacccgacatttaggttttatatgcaagtgctaccagttttcaaagaacttcaataattatacaaattcttccacaaaaaatcgtaaaatggg

SEQ ID NO: 192609 - DNA, 201 bp, Homo sapiens
ggctgctctgtggaggattgattgtattgagcagcaactgagagattggtctatcctagtactctgggcttgggcaaagatggcagcagggaagtaaaatsaaagtggatgaatgtaagctatattccagaggtagaacaggaaaaatttattaatgagttcctgggggtgcaggaggtggaggagagaaagggctgaatt

SEQ ID NO: 192610 - DNA, 201 bp, Homo sapiens
tacatgtgcacattgtgcaggttagtgacatatgtatacatgtgccatgctggtgcgctgcacccactaacgtgtcatctagcattaggtatatctcccartgctatccctccccgctcccccgacccgacatttaggttttatatgcaagtgctaccagttttcaaagaacttcaataattatacaaattcttccacaaa

SEQ ID NO: 192611 - DNA, 201 bp, Homo sapiens
ggtctttgtttagctaaaggcagtataaacacatcagggaaagatgtattatttaatccttttgggttattttcttccttctgggtcttttcttatatttkctttcttccgtgttccccctctgtttaatttaaccctgattaaccctgattacacaagccctaacaactgggaaaaaatatggccaatatgaaaagtact

SEQ ID NO: 192612 - DNA, 201 bp, Homo sapiens
taagctatattccagaggtagaacaggaaaaatttattaatgagttcctgggggtgcaggaggtggaggagagaaagggctgaattgaagtcaactcttasctaagaatgatagtgtgatttactgagtagttaaaatttggagagaaactgattagagggcaacaggggaaggtcttaatcttgcacaagcattgtgctg

SEQ ID NO: 192613 - DNA, 201 bp, Homo sapiens
taaagtaatttaaacaatgatgtaagacttttctctttaatttttttttttttattatactttaagttttagggtacatgtgcacattgtgcaggttagtkacatatgtatacatgtgccatgctggtgcgctgcacccactaacgtgtcatctagcattaggtatatctcccaatgctatccctccccgctcccccgacc

SEQ ID NO: 192614 - DNA, 201 bp, Homo sapiens
aagatcctgctagttatagtaagggatgaatttgttgagcagggcaagtttaaaatcataccatttgtggataaagttggccttttgtatcaaaatgtatwtctatgtgctagagacttcttgtgcctacttccttacactgcagtgtacacaagtataaaaaaggtactcttcagactgttaataatattaattgtgtga

SEQ ID NO: 192615 - DNA, 201 bp, Homo sapiens
aaccttagttacagatttcaaacagcacagattagcatgtaagaaggaatttttcattttacctttgtaatggttttactctgaaactactggctcaaackttgtgtataacacataaacattacttcatctttgtttctggtgtattcctttagctgcctgaacactaaatctttttcctcccttcaccagtatgtgtac

SEQ ID NO: 192616 - DNA, 201 bp, Homo sapiens
ctttcaaatatagctattggagatacataggaaactctctaggtgaatcaatgctataaaggccaacattggaaactcatcatcattcattttcttcatamatcatttgaatttttaatttcaaaaaaattaataaaatggtgcaaataaattcaggacccaagcatgatttcattgcaaaatgttcatgcttattcattc

SEQ ID NO: 192617 - DNA, 201 bp, Homo sapiens; identical to SEQ ID NO: 33242

SEQ ID NO: 192618 - DNA, 201 bp, Homo sapiens
agttaacacaattattttagccatataactattgcttgtgataataagcatatcaaactaaagacaatattaattctagaagagagtatatattgaaaatygtcttagaagagctgtctttaggccagactccagagtctattttattctttcttcttcctcccccatccttcctcctgagcatgtagaacatatgattct

SEQ ID NO: 192619 - DNA, 201 bp, Homo sapiens
aacctaaggctagaactgcatcacttttgacaattttacttttctgtttctactaccatcttacatgcacattatatataaaactcccttatcgtgaagtrcattcaggaatctctctctttttttttttttttttttttttttttgcaaaaaaagccttataataaacttagtgaatggcacaggaatcaatgaccctca

SEQ ID NO: 192620 - DNA, 201 bp, Homo sapiens
agtgttgtgcagtggatcttagaatttattcatcttgcataactgaaactttatggaatgttatagtggtgattatagagcaaatatgataaaaaaagaartgtctgacagagggctgctaaacccaaataataggcttgctttcaaatatagctattggagatacataggaaactctctaggtgaatcaatgctataaag

SEQ ID NO: 192621 - DNA, 201 bp, Homo sapiens
catctttacaggtgattttccatcccttgaaccaatgcatgttagcacatggctctagcatattgtcacaattccaaccagaaattggcacagatgttacygtgttggcattgtagccaattttcttaagtttcagctttctcaatgattctttgtaccttttctggctatagagtggctaagtggaatccattttgttaa

SEQ ID NO: 192622 - DNA, 201 bp, Homo sapiens
cagtgttgtgcagtggatcttagaatttattcatcttgcataactgaaactttatggaatgttatagtggtgattatagagcaaatatgataaaaaaagamgtgtctgacagagggctgctaaacccaaataataggcttgctttcaaatatagctattggagatacataggaaactctctaggtgaatcaatgctataaa

SEQ ID NO: 192623 - DNA, 201 bp, Homo sapiens
tagtttcctatttgggggctcaaaaacactgctaaaatatgccttttattttgtgacaattgataaagaaacaaataaccaggtttgaattgtagtcaatycgagatgtgaatatgagcagatacagttcagctgacacagaatgggagtattgctgtgacacttttcacagcttgaatacacataaaatactgtgagaaa

SEQ ID NO: 192624 - DNA, 201 bp, Homo sapiens
tagtgaacatgccactgcactccagcctgggcatcagagagtgagaccctatctcaaaaaaaaaaaaatcaacatatcctttttgttttaaagatattatrcattctgaacaatatctgtacagtgaaatttaaggagattattggaatttcttttcatgtgataaatacagaaaatttggcatcatgggctcttttaata

SEQ ID NO: 192625 - DNA, 201 bp, Homo sapiens
gtaagatagaagtagatagaacacctggatcagacatgtagggccagagagcgaggaaagctgcatgagtgtctgttgttcccaccactgctggacccccrcctccccctcagctcccacctatgactcttaggaccaaatgtcagagaaggaaaagctttaatgagagttcttgaatagtttatcttgctttgttagtgt

SEQ ID NO: 192626 - DNA, 201 bp, Homo sapiens
tcttttcatgtgataaatacagaaaatttggcatcatgggctcttttaatatgtggtggtttaattatttttgtcccatacttatatatattcaaattacygagaataatttaaataactttcaattatccatctgcatacagtatagagcctgcacaacctgatatggtagccactagctatccactgctatttaaattt

SEQ ID NO: 192627 - DNA, 201 bp, Homo sapiens
atgtacatgtgctcctcaacttatgatgaggttaagttcaccataaacccaccataaattaaaaatatagttccccccactacgcactcccaagatggcasattagaggtagcttgcctcagccacttggaggtagcaggatagtacataaagatcaactatgtgagctttaattcaagaaggaaaaaaggaatcaaccag

SEQ ID NO: 192628 - DNA, 201 bp, Homo sapiens
taaaagttattttgagttatctttattcattatattctcaaagcaaagaatttgaatgtatcagagaagaaattctttctcaatctcaaaagatttaatcsttctatttcctgtatggtatgattaaacttctttgggccacttccctctggattatcaattatacattgcttttgcacattcaaaaagctgcattctgtt

SEQ ID NO: 192629 - DNA, 201 bp, Homo sapiens
aaattatctattaaatacaacttttgaggttattgtttcaagaaatgaagtgtctagattggagtataatgaaaatcatgtgcttagaaatgtgataatcrtaggcaacattcgatatgactaatgctaactactttttataactaaagctttgaagaaaagaatgtgtatgtgtgtatgtatgtatgtgtatatataatg

SEQ ID NO: 192630 - DNA, 201 bp, Homo sapiens
caggcattcttatttcacaatgttgcaaattggtatatttcagattatagtgtttaattacctatgtggcttaattttttaaaaaagcatggtgactcctraaaagtgaatgattaaagtactcccagattttaagttacaagcaggtagaagcagcagaattttgtttttgaattaaacaaaatagcattcggcagtcaa

SEQ ID NO: 192631 - DNA, 201 bp, Homo sapiens
ttgtggacaggctctatttgtttatgtacatatttcactgataaaatgctgttggcttttttttttttctgttttggggcaatcctaaagtcaccataagwtcgatgaattaaaagtgtctatatttgtccttctataagaattattgtcacaaatagagattctttatttgaacaaatacataaaaattggcactaaaga

SEQ ID NO: 192632 - DNA, 201 bp, Homo sapiens
acgagcttggtatgaggctcctagagacgtcgttagttttgatacttaagcattttgttaaaaagagcataaacttcacaattatagctacgaataattakaagttattatacattattgtatctcagcttccctgctcaaagtcttgaggggcttcttatggcatgaggatgcaatccaaacctcttccatttgtaagtt

SEQ ID NO: 192633 - DNA, 201 bp, Homo sapiens
tcttaataaaaatcaaaagcaaatgacttgttgagagaaaatacttgttgtcataataggcaaagggttaatttccctagtgttcaaggatgtactaaaawtgcttcaaaaatggtgacaggactatggaaataattcaacagaataagagcaatcaatttatagaggtgactctaatggccaaatatgtgaaaagatgct

SEQ ID NO: 192634 - DNA, 201 bp, Homo sapiens
tggaaaagttatcttaataaaaatcaaaagcaaatgacttgttgagagaaaatacttgttgtcataataggcaaagggttaatttccctagtgttcaaggwtgtactaaaaatgcttcaaaaatggtgacaggactatggaaataattcaacagaataagagcaatcaatttatagaggtgactctaatggccaaatatgt

SEQ ID NO: 192635 - DNA, 201 bp, Homo sapiens
tgatctaagaaacacttatgttacaaggcaggtgatgaattagaaagaatgaaataaatttttgtaagaaaatgcttacttctttatagatttgaaatctraaatatttttaagtaagtgatttatgctctgaaatttcacaatttctaaaatggtagatattttaagtttatattatgctgtcctttttagtcaaagaca

SEQ ID NO: 192636 - DNA, 201 bp, Homo sapiens
aaaaatataacttacataaaaaatacaaaataagcttatttcaaatatgttatttggctcattccttagtaaaggaactagtaaaatagcaggactgattmaaaaaaattaagagatgtgagatttatagagttgaacagttaaaggaatgcagaaacaaatttgccaaaagttactagagtggttaatggtgtacaaggc

SEQ ID NO: 192637 - DNA, 201 bp, Homo sapiens
ttaatcttgtttgcctcctatatgtctgtagctttcttagatcttctgctacatggttgtccttgagtgcaggaaatttatttgtgtagtgcccatagttwtacaatatttgagaataagtgattgcagtgttagcaatcccttcagttacatgtagatattctctcctttccttcctacacagactgattttggctctac

SEQ ID NO: 192638 - DNA, 201 bp, Homo sapiens
agaaaaaaaattctgtagatttagcttgctacaattgtttagcacagtgattaagaactacttggtttaaatcctgactttagcacttactagttgtctgrttttcattaaatcatttaatcacaatgttcagtttttcaaatgggattaataatagcaactcatttaaatgattgttttaaggcctaaatccatggaatt

SEQ ID NO: 192639 - DNA, 201 bp, Homo sapiens
aatatttatgactctcacactgatttcctctaagtatcaaaaatattattttatgatttataatatatatactacttagagccatatatttatttattttrtatacttaatctatttctaacccatacagccacattgtatgtaagcgatagtattttttaataataaaatataagattggaataaaaagtaatatttacg

SEQ ID NO: 192640 - DNA, 201 bp, Homo sapiens
gtttgcagcatccagctggtgctaactctgcaggcacagagtgcaaaagctgtgaaggcatgcctacctctgcctagatttcaaaggatggagaggtcctkgagatccccagaccccagacagagaactgctacatggttcaggcccctgcagagagcctccactaggacaatgcctagtggagctatgggggctgggcca

SEQ ID NO: 192641 - DNA, 201 bp, Homo sapiens
tttctctcttgttgcccaggctggagtgcaatggtgtgatctcggctcaccgcaacatccacctcctgggttcaagcgattctcctgcctcagcctcccargtagctgggattacaggcatgtgccaccacacctggctaattttgtatttttagtagagatggggtttctccatgttggtcaggctggtcttgaactccc

SEQ ID NO: 192642 - DNA, 201 bp, Homo sapiens
atatataatgggcctaataatttttccatgtatataacttttcttataggtcactcctgtgcctggtactcacccacttttagtttttgtgaaccccaaaagtggtggaaaacaaggagaacggtatgttttttgattgattttagtgtctatgtcatgtatatgtaaaaaaatagacaaaactatgatgtaaaaatgctt

SEQ ID NO: 192643 - DNA, 201 bp, Homo sapiens
cctcggcctcccaaagtgctgggattacaggcgtgagccactgcacccggcccatggtttgcatttctttcatctagtcttacctatggtttattaatttsatacacataattttccccttttagtcagattgcctgaattaattattctgtcctattgggatatatgtatttttataagttacttcaaaatctttctgga

SEQ ID NO: 192644 - DNA, 201 bp, Homo sapiens
tgaggttggttacaaagtctggttttttttgttgttttttttttgtttgtttttttgagacaaggtctcactctgtctcccaggctggagtacagtggcaygatctcggctcactgcagcctctgcctcacgggttcaagcgattctcctgcttcagccgccaaagtagctgggatcataggcgcacgtgaccacgcccgg

SEQ ID NO: 192645 - DNA, 201 bp, Homo sapiens
attcatatcttgagaaactttttattatattctgaacatttttaatattgtgttataagactctaggtattttcaattctcacaggaaatgttaatttatkgttgttgctgttactattttagcaggtagttgactctgttaggttcaggttacaaaagctgctctatcttctgtgagttgtggttccagtatgtttgttt

SEQ ID NO: 192646 - DNA, 201 bp, Homo sapiens
gtgtcacttttgagtgcactgaatgcttttagtccatctctattctgcacagctgtgagggtgtcaggttttacctatctcagattcagctatttttttcytttttttttttttttttggttcttgctgcctttctaaagttctcctgggtaagggactataataatatctggactatcagatttttcatacccatcttgg

SEQ ID NO: 192647 - DNA, 201 bp, Homo sapiens
cagctaagggataaactcaggtgatcaaatgcaacttcataggatagctttctcaagccacctcctctccatgatctctctgatattttttttttactccyagggctctcatattgtttctctgaccaagaatccaaggcttttgtttcctcactttgtcatatatttctcgaagtagcatctgcctccagggttctgtga

SEQ ID NO: 192648 - DNA, 201 bp, Homo sapiens
ctacactggaagttattgtgttaaattaattcacattattcaagccagtttttcaggcaaaacaagtgtgtgtgtgtgtgtgtgtgtgtgtgtgtgtgtgkatcactttgtagatatagtgatttctaaatatttttcattcttcatcaatattttaaaataattttatttccaaaccacttaaaaaatgaaggcaaggct

SEQ ID NO: 192649 - DNA, 201 bp, Homo sapiens
gagatatccaattgtatatttggaacactttaactactacactggaagttattgtgttaaattaattcacattattcaagccagtttttcaggcaaaacaagtgtgtgtgtgtgtgtgtgtgtgtgtgtgtgtgtgtatcactttgtagatatagtgatttctaaatatttttcattcttcatcaatattttaaaataatt

SEQ ID NO: 192650 - DNA, 201 bp, Homo sapiens
agcagttcgttaagcttgtttgcctaaggataaaaggttcagaaaggaagaaataccatgcttctgaggctttctgaaatgtgcagtgatgaataaaggascacaggtgtaaaacagacagtagtccaatgagactcctttatattttggctttctttagcagttccacacttagcaaacacagcctagggcatctacgtg

SEQ ID NO: 192651 - DNA, 201 bp, Homo sapiens
acataaaatttgtatgtatcagtctattatactgagttctttgaagggggtgattttttcaagttaccaacttccctcagatccctgtcccaaacatacayaaacataatcacatatacatatacacattcataaataggtatctattaatgaattatatgtaaattaagagttctgaagaataatctgaaaaaatagtca

SEQ ID NO: 192652 - DNA, 201 bp, Homo sapiens
aagttaaacccatgttattctacagtgggacagtatttgacatctttgaaattcggccaaagtgttacagaaaatgtagcaacatcattattgtttcctcrttatcatttacagttaaactgatattaaagaaggacattgttttatcataatgtttaactttcataattacataaaaagaaaatcatgttaaaactcatc

SEQ ID NO: 192653 - DNA, 201 bp, Homo sapiens
ttggaaaatatttttaaaatgataatacccagtgttggcaagaatgtgcaaaatttgctattctcattaaacactggtgaaactaaattgccacaaactayggcataaaagctcccaaatatgtgaacttctatgttgatatttctgctttcacctttcaaagaaatttggggttggggcaaggcatatatctagagctaa

SEQ ID NO: 192654 - DNA, 201 bp, Homo sapiens
atcattattcttttcaaggggagtgcaataatatcatgtcttttctgaatctctcctagccttccagcttatgtcccactgattcattgatttaaaaccartggaaaagctcccgtatggcactttgttaaatttaggaagtagctatcctctcatgattaaagccaaagttggtaaggatttaaattattgagcaattta

SEQ ID NO: 192655 - DNA, 201 bp, Homo sapiens
ttaatttaagggtaacatggaagtaaagagaggtttcaacaggaaagtgatgtgagtagatgtgcacggtgacaagatcattctaggtggggaattaattrgcgggagaggtaatgaccatttagaagaattctataattgttcaggccttagaacatggtagtaaaaaggaaaaaaatttcaagatatacaaaaaatatt

SEQ ID NO: 192656 - DNA, 201 bp, Homo sapiens
gttataagaggtaaggaaaagaaggtgtcaaggatgatctgggtttctggatcattttgaacaactgaataaatgatgaaacaataccttgaaacaggagracctgaaaaaacaatcagtttcctctctaatccagtactatttcaactgaattattctccctattcaatgccttaagcacattgttagaaatatcaatta

SEQ ID NO: 192657 - DNA, 201 bp, Homo sapiens
tgtaaatagctcaaaataaaagttttcttgactctgaataacaaaacaaggaccagcaatgtttcaagcaaaaggttttaaaaaaagattacttcagtttyctattagttcagtccattcagttaactcatgctctgcttgatattcgtgaatgtttcagctctttcatgagtcctgtacgttttccctttagtccaatgt

SEQ ID NO: 192658 - DNA, 201 bp, Homo sapiens
aagtggagagaaaacatatataataaccacacaaataaacaggaaatcacaccagaaatcttttaaatatgacactattatctgacctagtcaagagaatytgaaaggctttttgaagaaataattataaattgcgatttgaaggatgagtccgtattaacgagataataaagagaatgcagaaaagcatgtaaaaaggct

SEQ ID NO: 192659 - DNA, 201 bp, Homo sapiens
gtgaggagaataggtgattagccggtgtattttccccagtgctatgtcactttctcggagtctcatttaaaggataatatgcccacagtaacagaaagaaratgtttttctcagacacatcccatatttactatatgaagtgtggagaaatgcttattaaagatttttgtcatgatttccaggttcagttcaggagtgggt

SEQ ID NO: 192660 - DNA, 201 bp, Homo sapiens
gagtctttgaggtcttataggaagtaaacagaagtctaagaggtcacacacgtgaggagaataggtgattagccggtgtattttccccagtgctatgtcaytttctcggagtctcatttaaaggataatatgcccacagtaacagaaagaaaatgtttttctcagacacatcccatatttactatatgaagtgtggagaaa

SEQ ID NO: 192661 - DNA, 201 bp, Homo sapiens
tgggaagtctaagattcatatagagataagaaaactatcccttaggagacagaagtacttacttataccacggtcctgtatcctattcatcctttagtcaytgacgggctactctgtgtcaagcattctgccaggatcggtgaaagaagaggaatggatggaaaagttcctacagtactaaaggttgcactttggtgaaag

SEQ ID NO: 192662 - DNA, 201 bp, Homo sapiens
gggctggagaattctcacttgtcttgccttccctagtgtgtatggagattgtcagtcatactcagctagttctgggaagtctaagattcatatagagatawgaaaactatcccttaggagacagaagtacttacttataccacggtcctgtatcctattcatcctttagtcactgacgggctactctgtgtcaagcattct

SEQ ID NO: 192663 - DNA, 201 bp, Homo sapiens
caattaatcctcagaaattttaactccctttcccttacctaaaatgatgaggaaaggtctttcattctttctcctctgatcttctgaaaacatagtcatarctatcatcctttaatatacaaaaggatattctgttttgctttatattggctactctgctatttgtacctaagcatgttggggaaatatgatctctgatgt

SEQ ID NO: 192664 - DNA, 201 bp, Homo sapiens
aaaaaaaataaataataaaaaaaaaaagaaaaaaaaaataagcacttattacaactcatggttttctgggccagcaattgggctagtcatctttctgctcyacgtggcatgacaagatcacttggcatcttagcacaggtctgaaaggctgagttcacctaggtccaccttcttcttcatgtagattcagggcctcttcac

SEQ ID NO: 192665 - DNA, 201 bp, Homo sapiens
atattagctattatttccaacttacttggaatattgtctcagagaaaaagtatcagtagtaaagaaaatgttctaaatgaaatctaaatctaaaaatattycttagttttatattaataaaatatttattgaggctacaaaatttattaaatattattataaacactttgtaagatttcattacttaccgttgtgccccaa

SEQ ID NO: 192666 - DNA, 201 bp, Homo sapiens
aaatatttatttccatatcacaaaattaaaatttttactgatacctattttctggtttcaggttattaacatagatttagggagggaaaaaaacccaaatrgtagaataagtggttcatcaaagatgttttgctcttgtgggacaatagtgtgaagttgtgaaaaggtgatttttaattgtttcttaaactcttatttccc

SEQ ID NO: 192667 - DNA, 201 bp, Homo sapiens
gttacaaactggtaggaatagagccggggtttgaacccaggcagtctagctctggagaccactcttctaaccaaaaggatctaaatccactattaaccacmactggcttattataaccctccacagttcgcacaatgttgcaccttctttgtctctgcttacatttggctctctgtaatttacttttggacacccaaactc

SEQ ID NO: 192668 - DNA, 201 bp, Homo sapiens
gtgaaaataaagtaaggtaaattctacattacatctattacaaaaaaatcaaacatgaattcagggtttaatttttgcctaggcacagcctttttttttttccaaaatgagaaagataaaatgttaactgccttgagcaatgaaaatttattttaaagaaaatgctaaatcccaaaacttacaaatcaagttaaagataag

SEQ ID NO: 192669 - DNA, 201 bp, Homo sapiens
gatcctggctagctgctttgcttttatttttattgtgccatcaggagtttccatgtcttagaagggcttcatcattttcttgctgaatttgtgttctcccktagatgctccatttgatttgtggttatttatttgctgttgtggcccttctttgtttaagagatgagtgctaggttcctctagtcagccatcttgatggtg

SEQ ID NO: 192670 - DNA, 201 bp, Homo sapiens
gtcagaatgtattctggtgatggttcttccctcaaaataatgccatgatgcatcagctttggtcccaggagtgtagggcacccagtttgattttcctctctggaacaatacagtcatgtgaactccaggaaactctctgcactaggctcggggtctgtgagggcagaggggcttttctctccctaggattccagacatctc

SEQ ID NO: 192671 - DNA, 201 bp, Homo sapiens
ctgacaggtttttttttttcttttagcattttgaatatatcatctcatgctcttctgaccatatggtttcttctgagaagtgtgttgttagtctaatgggractcccttgtatgtgacttgattcttttctcttgttatcattgactgttgactgtttgactataatgtgcctcagatagtgttgtggctttttcgcttcc

SEQ ID NO: 192672 - DNA, 201 bp, Homo sapiens
ttgttcagataacaaaagaaagggaaatgctacttttcataataaagggtttggaaatatttgatgctggaagacagggaagcaagaaagaaatcaccaaygagctgaaccaaatactgtctggaaaactaatcagggaagacccatctctcttccctctgattttagttgggctgaacaaagtctttgaagagaacacaa

SEQ ID NO: 192673 - DNA, 201 bp, Homo sapiens
acctcagatggaaatgcagaaatcacccgtcttctgcgtcgttcatgctgggagctgtagacccgagctgttcctattcggccatcttggctcctcccccrtgaattatctttttgatgtgatgttgaatttgctttgctattatttggtagaggatttttacacccatattcatcagggatattggcctgtagtttgttg

SEQ ID NO: 192674 - DNA, 201 bp, Homo sapiens
aagacccatctctcttccctctgattttagttgggctgaacaaagtctttgaagagaacacaaatatctggggaataaacattatttgctatgtgctgtgrgatacaaataccctcttctatcccttttatgaaattctacttcagttttgcactcttctctgataatatgttttatgggagtggactttgagggcagctc

SEQ ID NO: 192675 - DNA, 201 bp, Homo sapiens
tacctcagatggaaatgcagaaatcacccgtcttctgcgtcgttcatgctgggagctgtagacccgagctgttcctattcggccatcttggctcctcccccatgaattatctttttgatgtgatgttgaatttgctttgctattatttggtagaggatttttacacccatattcatcagggatattggcctgtagtttgtt

SEQ ID NO: 192676 - DNA, 201 bp, Homo sapiens
taatccatcttgaattgatttttgaataaggtgtaaggaagggatccagtttcagctttctacatatggcttgccagttttcccagcaccatttattaaayagggaatcctttccccattgcttgtttttctcaagtttgtcaaagatcggatagttgtagatatgcggcgttatttctgagggctctgttctgttccatt

SEQ ID NO: 192677 - DNA, 201 bp, Homo sapiens
atcagatatgtaatttgcaaatactgtctttgaggctgtagcatatctttttattctcttaacagtatcttttgcacataagttttaaatttaatgtccarattatcatttttcttttcttgtatggatttcacttttggcagtgtatctaaaatctcatcaggaaacacaaagttacctagattttctatgtcatcctct

SEQ ID NO: 192678 - DNA, 201 bp, Homo sapiens
atttgtcaattttggcttttgttgccattgcttttggtgttttagacatgaagtccttgcccatgcctatgtcccgaatggtaaagcctaggttttcttcyagggtttttatggttttaggtctaacgtttaagtctttaatccatcttgaattgatttttgaataaggtgtaaggaagggatccagtttcagctttctac

SEQ ID NO: 192679 - DNA, 201 bp, Homo sapiens
ctgatggtagtttcttttgctgtgcagaagctctttagtttaattagatcccatttgtcaattttggcttttgttgccattgcttttggtgttttagacakgaagtccttgcccatgcctatgtcccgaatggtaaagcctaggttttcttctagggtttttatggttttaggtctaacgtttaagtctttaatccatctt

SEQ ID NO: 192680 - DNA, 201 bp, Homo sapiens
acttatttcttaattgttataaataaactatttcattttgaagtgttttaaaattatttatatcaggtaataaatgtgagtttgatgatttgttggattayacaatgtcaaatataatataaaaatagattgaagaacttgattcaaatgttagaggaatcttactaagtagtacagatacagtggtaaataatattgaga

SEQ ID NO: 192681 - DNA, 201 bp, Homo sapiens
agccctttgtcagatgagtagattgcgaaaattttctcccattttgtaggttgcctgttcactctgatggtagtttcttttgctgtgcagaagctctttastttaattagatcccatttgtcaattttggcttttgttgccattgcttttggtgttttagacatgaagtccttgcccatgcctatgtcccgaatggtaaag

SEQ ID NO: 192682 - DNA, 201 bp, Homo sapiens
actgcccaaccaagtgtgataagtgccacaaaactgttaaatgttaccagggcctgacaggactgcattgtgtttggtgtcagatcacagtgagtaaaaaytggaaaacaaatcccagcattcacccacactgaagacgtgtatatcatactctctgaaagtcctaccctagaagggcttcctgaaactgagtgtaagcat

SEQ ID NO: 192683 - DNA, 201 bp, Homo sapiens
gataatctcctttacatactctttttaaaagtggaaaaacaatgattcaaagacaagtggcggagaaaggccagatgctgactgaagaggtaaaagagtarttggacatatcgctgattcttgcacaatcactttctgaaaatttgccaggaagcaaaagccatctttaactggtgaggataaaaacaaaatggttcattt

SEQ ID NO: 192684 - DNA, 201 bp, Homo sapiens
gtgtgtagggtagagatctttagtcacagataaagtgcagactcaaaacatctctttaaatagctgtaaagtcttattataaaaattagattatgctagtyatcagataatctcctttacatactctttttaaaagtggaaaaacaatgattcaaagacaagtggcggagaaaggccagatgctgactgaagaggtaaaag

SEQ ID NO: 192685 - DNA, 201 bp, Homo sapiens
gtagtaatgggcagttattttgagtgcagcagttgcacatactgtgtcaagagctttacatatgctctctcatttacatatgcccctcacaggagggagayggcattttctcccctttagaaaaaactcaaactcagggggaataaacaaatttctgaaagcaacgtatttagtgaatgctgggttagaatttaccactcg

SEQ ID NO: 192686 - DNA, 201 bp, Homo sapiens
gtcaatatcttgggtatttactatgaagtaggttcaactacttgatagccctggattattttctcatgtgctttgttcgtcacacaacgaatgagtagtartgggcagttattttgagtgcagcagttgcacatactgtgtcaagagctttacatatgctctctcatttacatatgcccctcacaggagggagatggcatt

SEQ ID NO: 192687 - DNA, 201 bp, Homo sapiens
aaatcctggagtctagcttttcctattcctgaaacatgattaagaacctatttattaacaaatcaatcttcataaaaacacaaacataaacataaaaacataaacataaatcttcataaagacataaacataaatcaatatcttcaatattaattttggaggtagtaaaatatctgaagatattgaagattttaattctgg

SEQ ID NO: 192688 - DNA, 201 bp, Homo sapiens
gttggggtacctaaccaggtcctcttgcattgaccagatttttacagtggtggtggggcagtggggggtgggggggggtggaaatccctcaaacagaaagsatatattacacaaaaatgttagacttagttggaggatcattggagaaaacactgtattagtacatttttctccaagaaaaattattgacaaaacagaaat

SEQ ID NO: 192689 - DNA, 201 bp, Homo sapiens
tatgataaacattcaaatactcttcagtgggtgccacatggagggtcccctcagtttcttcctgctgcaataatctcctccacttgctgaacagtctcttkcttgtgattttaaagtggcgatttttacatagatggctctatacttagaaaccaagcagcattgtgttcactggcagaaaatgaaggcttaaaactttta

SEQ ID NO: 192690 - DNA, 201 bp, Homo sapiens
tggatgttaaatactcattaccaattattttaacatcttgtagttcttccagctctacccagaccagatgtttagactccttcttatttataatgaagatmgctaataaattatgtctctcaataatgtttagagtgttagtgctcttcctaaatatgatttaatttcaaaatgggagtaaaggtaaaacaaaaaacaata

SEQ ID NO: 192691 - DNA, 201 bp, Homo sapiens
caaaaggggagtagagagagagctgtgaatttcttagggattaaataggaccctgaaagccccctcaggaaattagattctagataactttattgattgartttgtatagtagaaaattcattttggaggaatcttaaggacaggcattattgtgcagttctgtggagcctgtgagtgatagatatgaaaggacacttaga

SEQ ID NO: 192692 - DNA, 201 bp, Homo sapiens
gggatttagaagtcaaaaggggagtagagagagagctgtgaatttcttagggattaaataggaccctgaaagccccctcaggaaattagattctagataaytttattgattgagtttgtatagtagaaaattcattttggaggaatcttaaggacaggcattattgtgcagttctgtggagcctgtgagtgatagatatga

SEQ ID NO: 192693 - DNA, 201 bp, Homo sapiens
ttgtttgtttttttcttgtgaatttgtttgagttcattgtagattctggatattattagccctttgtcagatgagtagattgcgaaaattttctcccattytgtaggttgcctgttcactctgatggtagtttcttttgctgtgcagaagctctttagtttaattagatcccatttgtcaattttggcttttgttgccatt

SEQ ID NO: 192694 - DNA, 201 bp, Homo sapiens
attgatgtattatatcacatttattgatttgcatatatgaaccatctttgcaaccctgggataactcctacttgatcatggtgaattatctttttttttttaaattatactttaagttttagagtacatgtgcacattgtgcaggttagttacatatgcatacatgtgccatgctggtgcgctgaacccactaactcgtca

SEQ ID NO: 192695 - DNA, 201 bp, Homo sapiens
cacacaggagttcactgtcaagaagattaattaggccatcattcctatattaatttaaaatgtcaattttcttcgctgacctcaaacctagaaaaaaaaaycaaaatttaaatatccaaaaacctattataggtagaaatcttctaaaactttaagttcagatcataggtgtctatataatatctagaaggtacattgaaa

SEQ ID NO: 192696 - DNA, 201 bp, Homo sapiens
acacacaggagttcactgtcaagaagattaattaggccatcattcctatattaatttaaaatgtcaattttcttcgctgacctcaaacctagaaaaaaaaaccaaaatttaaatatccaaaaacctattataggtagaaatcttctaaaactttaagttcagatcataggtgtctatataatatctagaaggtacattgaa

SEQ ID NO: 192697 - DNA, 201 bp, Homo sapiens
gcagtgtcctatggattgactcttgacacacaggagttcactgtcaagaagattaattaggccatcattcctatattaatttaaaatgtcaattttcttcrctgacctcaaacctagaaaaaaaaaccaaaatttaaatatccaaaaacctattataggtagaaatcttctaaaactttaagttcagatcataggtgtcta

SEQ ID NO: 192698 - DNA, 201 bp, Homo sapiens
atgcataaggtagagttgtatacttaaagggattttttaaacagggatatgtatatatataccatatatataggatatgtgtgtgtgtgtgtgtgtgtgtkatatatcctatatatatactgtatatatatcctatatgtataactgtacccagggtaagcaataataatttttttcaaaaatcaaacttgtgccacattt

SEQ ID NO: 192699 - DNA, 201 bp, Homo sapiens
aagcttgttagttcacagaaaggacaacaaaactatttgaaaaatgtatatttaaaaaatattctttagtattaaaattaattaatcctgttttataaacrtaatttttaaatcatatttattaaaattataaatataaaatatgaattttattctgtattgatatataatatttgtacatgtttatggggtacatgtaat

SEQ ID NO: 192700 - DNA, 201 bp, Homo sapiens
ttagaccaatatccttgaggaacattgatgcaaatatcctcaataaaatactggcaaaacaaatccagcagcacatcaaaaagcttatccaccatgatcawgtgggcttcatccctgggatgcaaggctggttcaatacacgcaaatcaataaatgtaatccagcatataaacagagccaaagacaaaaaccacatgatta

SEQ ID NO: 192701 - DNA, 201 bp, Homo sapiens
ataccaaagccaggcagagacacaaccaaaaaagagaattttagaccaatatccttgaggaacattgatgcaaatatcctcaataaaatactggcaaaacraatccagcagcacatcaaaaagcttatccaccatgatcatgtgggcttcatccctgggatgcaaggctggttcaatacacgcaaatcaataaatgtaatc

SEQ ID NO: 192702 - DNA, 201 bp, Homo sapiens
aactggtaccattccttctgaaactattccaatcaatagaaaaagagggaatcctccctaactcatttgatgaggccagcatcatcctgataccaaagccrggcagagacacaaccaaaaaagagaattttagaccaatatccttgaggaacattgatgcaaatatcctcaataaaatactggcaaaacaaatccagcagc

SEQ ID NO: 192703 - DNA, 201 bp, Homo sapiens
gagatatgagagtatcactaggagactgcaatgtgaatagtcaagagacaccaacagagaaagaaaattaggcaaccaggagagaaaactgtagcagagartagaacattaggatttgatgtgatttcaaaatagattattttcagatgatggtaagatccaatatgcagccatgaatctgggtggctcaactgatgtgca

SEQ ID NO: 192704 - DNA, 201 bp, Homo sapiens
tcctaaggaaaatggcctttagctccatccatgctcttgccaagaacacgatcgatcttgaagagcaaggttcttaattctctaacaaaggggttaattasctagcctttttttcatatcaatatcaatattttatattgataaattggaattatgaatgacatagtgttaatatgctgattatttaaagttgaagttgta

SEQ ID NO: 192705 - DNA, 201 bp, Homo sapiens
tgtcaaaatacgctttctagaacgatatgcttgaaatgacgctgactcaggttttatcacttagtcgtgctgctacttaccaggaattgtaaaggcagaasacttcaacattttatatattttatagatctagcttcccagaataatgaagttattcttatgggcaattttgctggagatgcacattatatatctgcaatg

SEQ ID NO: 192706 - DNA, 201 bp, Homo sapiens
gatatctgacaatcagttggggaggattttaaaaaattataagcatgaaagaactattaaaaagacatgaaatcagctacagaaagtatgaaacagaagtyacagttacttatttattgatattaaaaaccattttccttgttcctccagatagagaataataactgagaaaaactacaacctaattgagaataaaacttc

SEQ ID NO: 192707 - DNA, 201 bp, Homo sapiens
gtatggttaaaaaaaaaaaaaaaagaaatctgtgacctaattatctttgccaggtctgtctcataacctatataagtagacataaacatttctgacttttstacctccttgtgtgatttttacagctcaatacattttaaacaatgattaaatagaaatgtaagattgtattatttttctataaaatttaaaatatgcaca

SEQ ID NO: 192708 - DNA, 201 bp, Homo sapiens
tgaaaatgggataataatttctagaatgtataataataactagcattttaaagaagtcaaggcaaatgaataaataaatagtaattttaaaaatacagaakagtcttgtcactgtccacatatgtccagtagtggaaatgaatggaaaattcaaaaaactaagaagtgaccactctgaatataacaaaacattgtttgtta

SEQ ID NO: 192709 - DNA, 201 bp, Homo sapiens
tccctaaacaatgggtatttttttctcacagaagaaaaactccttaccatgtaaaggcccttgtggaattatgtaaaatatctagctgtttaattcttttktacttccccgttacgctagcaaaataaaaaagagtttgggaagggaagatactgtaaagctgttttttcctacttcttttggaaaaccaacttgaatatt

SEQ ID NO: 192710 - DNA, 201 bp, Homo sapiens
tgaagtctatgaagaaaatcaagcctcacacagatatgtagttgggaaaaagagtgatatgttaataatctgttcaaatacttttggatattattctttgrcattatatcaaaattcaacaagtagtagtttcttaaaggttacttgcaatgtgaaatatagaaacatcaatcaattttttgtactcttttgcattaaaat

SEQ ID NO: 192711 - DNA, 201 bp, Homo sapiens
agatagtgatcacagttattaggcattggattcttactatagtccagacacaattaaatgtaaccctcaattatttatccattgtctactaatattattgkgctagtattatatgccaagaaatgtggtagattcaaatagaaataaggtggaaaagaaaattaagttggtaattataataaagtatgataagtgctataa

SEQ ID NO: 192712 - DNA, 201 bp, Homo sapiens
atgacaacctagagatttattttaaagcgtgattcacaatagaatcatctactgtcattacacaagtctttcagacatttggaattgctttaatttggccratcttttgaatttttttaaatcataaaactaaaacttaatctttatttgattgctagaacaaattatatgacttctccaaaattaattcatatgattgga

SEQ ID NO: 192713 - DNA, 201 bp, Homo sapiens
ctgttacagcttcaggcatagtttcatgccctcaggaatttgtcttcatctctcagctttttattttttttttctccaagaacttccttgtctctccttcygacaacaggattactccagcagtgatagatgaatacccaactagtttgcaaacttggcagaataggctatcatgtttttaatttttcagggaaagtcctg

SEQ ID NO: 192714 - DNA, 201 bp, Homo sapiens
gccttctggactctcccactatgggtaagtaggccttaaatgacaaatctaccctaacattacaatatatccctaagcctttgtatttcttctacattgcmataaggcatgccaagtattttcaactttctcatgccggactaccttttggtccatatctcagcagttaaccaaccaacctgttagaatcaaactccacaa

SEQ ID NO: 192715 - DNA, 201 bp, Homo sapiens
gctgtaacaaaagaacatcgagattgttagaaacctacttgtggaactgaaaaaaatgtgtcccattgtttcacttattttacaaaggagacctcattctwtcctggcataatctctaagggctttcttcacttaagcttcccatcaggtttaatagtgcctagtccctctttcaggtcctcaatatagcccacacatttc

SEQ ID NO: 192716 - DNA, 201 bp, Homo sapiens
atcattgtatgtatcaatgtatgagtcatatcattaaccatttaagaaaagtctggttgttccagttgcacagttgattagtacacggtatttatgatgcyaaggctgtaagttcatgcctcacctagagcactccctacaaaaacaaagtcagattgatgagggaaaaaaatgaaataggaaaaatgaggtgcactttgc

SEQ ID NO: 192717 - DNA, 201 bp, Homo sapiens
agttgtctgtgtattcctgttgagggtctaatatcacattaaccacagatactactcttgtatttatagtgacacagtttcattatcagtcatgtagaccrtgcggtagaaataagtaaaagacaactataggaaaataagttcatattaattcaacaaatcttcattgtgcatttaccaaatgccaaccatgataaaaat

SEQ ID NO: 192718 - DNA, 201 bp, Homo sapiens
actgttggtgggaaatgaaaattagtgcagcctttatggaaaaatggtatagagattcctcaaaaaaataaaaatagaactactatatgatccagcaatcytacctcgggtatatatccaaagaaattgaaaactgaaatcaatatgtcaaaaggatatctgcatcctcatgttcattgtagcactatacacagtggttaa

SEQ ID NO: 192719 - DNA, 201 bp, Homo sapiens
gttaagatatggaatcagcctaaatgttcaacagatgaatggataaagaaaatgttgtaaatgtatacaataaaatactattcagccttaaagagggaaaygctgacattagtaacaacatgaatgaagctggaagacattatgataagtgaaataagccagacaaagaaagacaaatactgcattatttcacatgtatgt

SEQ ID NO: 192720 - DNA, 201 bp, Homo sapiens
atattaaaagcccccaaatattccctgtatacgaataggtctatcactatagtatgtgaggctagcaactaaaagcaagaagaggatttcagaaatctgtstttatgttagtaaagagtaatttctttactctatgaattagataagaattaattaaacgctcacctactgtacaaagtcaggactaaatgacagcttatt

SEQ ID NO: 192721 - DNA, 201 bp, Homo sapiens
gaaggcccacctatgttagggaggattatctgctttattcaaaatctactgatttacatgttaatcatatctataaaacatcttcacagcaacatctagastggtatgtggccaaactgggtatcatacccttaccaaattgacacataaaattaatgatcactcttatagtacctacttatggttcaggtcagtgctata

SEQ ID NO: 192722 - DNA, 201 bp, Homo sapiens
atatttaatattttcaatgtttatgtaatcgttacttattgtaccctttactgtatgtattaagtagcgagtaattactttttaaacctgtgtaaggtaaraagtgatgatgagctccagaagaggtatttctagtttctggtggctttcaccttctaatagttaattgaacagatacaccttaagtgtaacgtattcctc

SEQ ID NO: 192723 - DNA, 201 bp, Homo sapiens
tgggactataggcatctgccaccacaccgggctaatttttcctttttttttttttatttttttttcttttgtagaccggccatgttgcttaggctggtctygcctgggctcaagcgatccacctgcctcagcctctcaaaatctgggattacaggcataagccaccatgtctggcctcccttatcattcaagtcacctttt

SEQ ID NO: 192724 - DNA, 201 bp, Homo sapiens
taacatatgtaaacatagatgtgaagattataataaggacatgatctcttataccatagctacaatataaatccatgtggctttcccattattgcatatgrggggctatttttctttaatatattttttatgaaaaatctcatatgaatcaatatatacatctttctcaagaatgtatcagttctataataacatagataa

SEQ ID NO: 192725 - DNA, 201 bp, Homo sapiens
gttacaaagggaaatatttctgatttgacagtagcaacttctatactttgcagtgagaaaccaataattgtttgcagaagattttgtaaatcaggaatttwttctgtatagatgctgttacactgaagtctattttatcaacagaaataaaaatgtaaatattaggagacgagacaacattgtttttatatttctgggcaa

SEQ ID NO: 192726 - DNA, 201 bp, Homo sapiens
tgcttcaaaatcattatttacctttagaatattacatatgcataagcacactgaaacataaaaatacagcttttttatttggttagagttcttttctcaargtatttttttttcccactaggttacgaaggtgagaatctgatgaaaattctaaaagacattgaaaacagcacagaaatcatgttggacaggtggaagttt

SEQ ID NO: 192727 - DNA, 201 bp, Homo sapiens
ggcttgaatttctcccccgaaaatggatttttattttctattgcattgtcaggctgcaaattttccaaacttttatgctctgcttcctcttgaatgctttrccacttagaaatttctttcctcagatatcctaaatcatctctctcaagttcaaagccccacagatctctagggcaggggcaaaatgccaccaatctcttt

SEQ ID NO: 192728 - DNA, 201 bp, Homo sapiens
ggaaccaggctgcacagcaaaagctgagaggcaggtgagccagtgaaatttcctctgtatttacagccactcgccatcgcttgcattaccacctgagcctygcctcctgtcagagtagggtggtattagatgtcacgggagcacaaaccctattgtaaactgcacatgcaagggactaggttgtgtgctccttatgaaaat

SEQ ID NO: 192729 - DNA, 201 bp, Homo sapiens
atctgacttttagatctgattttatctgtcattaaacttgataggcatatgtgcttcaaaattcaagtgcactgtagaggtttaggagtatgttaattatktgtgtgtgtgtgtgtgtatatatatatatatacacattatctaaattagcatattgtcactaaatactactagtattactagaaaagtagcaatatttta

SEQ ID NO: 192730 - DNA, 201 bp, Homo sapiens
tgtatgaaatatggtaactgccttaagatgagaagatatgcacatttaaaaacaaaacaatacaaagcaaaacaaatctataatgtcatgagaataaacayagaacttaagtatattcaaggcaatggtaacataaaaactgtgaattatttctgcccagaggtgacagagagatgcttcagagaaagtgatgtttaatct

SEQ ID NO: 192731 - DNA, 201 bp, Homo sapiens
ttaggcttggaaaacactctagctgtaatagaaataaagcagaggatgagacagcctggcaaaatggagagtggtaatactgtaacagacagggagaaggrcaaacgggcgcagagagtgagaaggaaggaaaaagaggagaaaaaagcaatgctgtgcttgagacagtatggtctgactcatagatatcaagagggaggg

SEQ ID NO: 192732 - DNA, 201 bp, Homo sapiens
cccaagctgcagtgcagtggtacgatcatggctcactacaacctccacctcctgggcttaagcaatcctcccacctcagcctcctgagtagctgggactaygggattgccccaccatgcccagctaattttttgtattttttgtagagttggggtttcaccatattgcccacgctggtttcaaactcctgaactcaagcca

SEQ ID NO: 192733 - DNA, 201 bp, Homo sapiens
ttattgcatatgaggggctatttttctttaatatattttttatgaaaaatctcatatgaatcaatatatacatctttctcaagaatgtatcagttctatartaacatagataaaacttaatttgattattggattaagtgcaaaactagttaaaatattgtcagaaaatttgctccttaatgacttaccacaataaaatat

SEQ ID NO: 192734 - DNA, 201 bp, Homo sapiens
atgtgtcatatgtattgttatatacatatacatatttatgtgcatatatattcaataaaacatatacatacccctttactcttagaatcattatttttttwaaaaaactgctttatatactagattttgaatatttcttatcctcaaaaattatgctcaaatacaatttgcagcagaagctgaaaagttttagaaaaatta

SEQ ID NO: 192735 - DNA, 201 bp, Homo sapiens
gcacagtccctcagggcttcccttggctatgggagggagttctctgaccccttgtgcttcctgggtgaggcaacgccctaccctgcttcggctcaccctcygtgggctgcacccactgtctaaccagtccaaatgagaggagctgggtgcctcagttggaaatgcagaaatcacccaccttctgcattgatttcgctggga

SEQ ID NO: 192736 - DNA, 201 bp, Homo sapiens
ctgataaaagaaaaatttcatttgtaatttgaatattcttttaaacatgtttttataccatttaatagtatctaaatagtagaaatatcctattagaggtrtatgtgttttaatttcataatcattatagaaaacacctattacaaattgctaagtacagaaaacaaattatatacaaatatcttcattgcataaggataa

SEQ ID NO: 192737 - DNA, 201 bp, Homo sapiens
agccaaaaagcatttaataactcccattcaacaggtattgggaaaacaatggtaattaaacacataagaagtttatgtctccattgagttttcagtgtagygacagtgattgatattatctgtgacgtaatttcacaaatatattttgagcagctacttgatgccaggtgctgttctagacatcggaaatgcagttttaaa

SEQ ID NO: 192738 - DNA, 201 bp, Homo sapiens
ttgatattggaagacagtaaagagatgttgaagaaaggcaaggcactaagaccaaatgagtcttgtctgtagaagtaaggtgactttaagtaatgacatcygtataaataaaccttgcaatgattacaattttacaaaaaagtaactcttactaaatacttcattttctgtaaagaatacagtgccaatctggctgattat

SEQ ID NO: 192739 - DNA, 201 bp, Homo sapiens
gagtaaaaattggaaaacaaatcccagcattcacccacactgaagacgtgtatatcatactctctgaaagtcctaccctagaagggcttcctgaaactgastgtaagcataaaaccatggaaacttctcatttcagcttgtttgcaaagagataggctcagggtcagatttgtccccatagagtcctgaattttagagctg

SEQ ID NO: 192740 - DNA, 201 bp, Homo sapiens
  misc_feature (1)...(201): n = A,T,C or G
gtgactaaggtacttttcagggtatttattaatagtggagagttgaagctcctttcattggagataaatttagagcccaactattaccatattgccttccntggtctcatcatcttatatctcacatatagtctgtaatataaagtatttccttgcaatacttacaatgaaatattttcccccaggacgagcaagtctctg

SEQ ID NO: 192741 - DNA, 201 bp, Homo sapiens
tataactttttatggtagaattggtaagactgcaaagccattttaaattgaatataacaggtaagtaatcatttaaacagaaaagtggtattttctaatayataaatgaaatcatcaccattgatcatcaatttgttcattcctgaaaagaaattgaaattaggaaaatgggcaaaatccaaaaaggtacacagggatggc

SEQ ID NO: 192742 - DNA, 201 bp, Homo sapiens
acgtgatattgggttccatagataaccaggagacacttctgatgtcatatgaaaaagacaaaccttcggttctatctgtgtctgaattctacttctgcctyttaccagttctgaagcctagggtaaattatttagaatttagtagcatccatttcatcacctatgagagtagaatagtgattcttagttctcaggattgtt

SEQ ID NO: 192743 - DNA, 201 bp, Homo sapiens
tacttctgcctcttaccagttctgaagcctagggtaaattatttagaatttagtagcatccatttcatcacctatgagagtagaatagtgattcttagttytcaggattgttatactattaaattaaattgaataatacatgtcatgttagctagagtaataccatttcttttgtttttattcccatcagaatttactatc

SEQ ID NO: 192744 - DNA, 201 bp, Homo sapiens
ggtctagattttatatgtaatgtttacatattaaaaaattggtacagactgataaaaatgataccactgtctactcgtggaatgtggagtttgtaaaactrgacataaaaatgtacatttatgaaaatgtgctttataagattcttctcacaatttgtactcttaatttatatgatttaaaaagtatttaacattcaacac

SEQ ID NO: 192745 - DNA, 201 bp, Homo sapiens
gtagggaatcagtaaaatgcaaaggtacacaaacagaaagttaacaccacgtaaaacagaacatgacaaaccatagtcaatgttttccacatttaacactyggctattgctcatcaacaaaaaataataattccctaattaggaaaaattacttactaaaattacttgctgagtttgtatgtaaaaagaacagatcttatc

SEQ ID NO: 192746 - DNA, 201 bp, Homo sapiens
tccctgttgcataacacagcattcagaattcttagccagacattcaaggtctttactaccatctgccttccactttccagtcttatcaaaactacaggcaracattctaatcagtgttcagtgcatgttgtgttttcttgcttgtatcttttaacctgtagttttcctcaaactaggatgctgattatcttcccaacacca

SEQ ID NO: 192747 - DNA, 201 bp, Homo sapiens
ccccaaattacacatgagatcaaccacaactttcagcatccttctttaattccactttctgcataatgctttctttctccaccccattttcctaagtatcyttctcttccaaatgttcccagtactcatagaggaggctgtaacagcattatgtggctcttctattatttttgtaattcataatctctctcccactatatt

SEQ ID NO: 192748 - DNA, 201 bp, Homo sapiens
tgatgcatccgtgcatacctggggttggccatagtgactccaccttggttactaccctaagtgaaacccacagggtttgccaaaactacaatgataatgayattacaattagcagtgggtcaagttaaggaaacatagttaatttattgtgcctgtgcctaagttgggacagtcccttctgagcagacatcctggtataag

SEQ ID NO: 192749 - DNA, 201 bp, Homo sapiens
aaatattaagatggtaggataaatgaattaaatttttcttaggttgtgatgaaactataatgaggaatgcaatgggtcatctctatttcattctcatgtaytataaagaaagatttcaagtaaaacatgaaattaatagttttaagacacactggaagttttcatgacgtatatgaacagcaatcaaccttgatcccaagg

SEQ ID NO: 192750 - DNA, 201 bp, Homo sapiens
tacctggggttggccatagtgactccaccttggttactaccctaagtgaaacccacagggtttgccaaaactacaatgataatgacattacaattagcagygggtcaagttaaggaaacatagttaatttattgtgcctgtgcctaagttgggacagtcccttctgagcagacatcctggtataagaggaagttcttaacc

SEQ ID NO: 192751 - DNA, 201 bp, Homo sapiens
tctgcctagccagcctctaactgcctcctctctcactattggattagagcatggcattaatgaggccaagtttatgaatttgtttttatatgagcctctawgtgtccctggacaaaagtctttttgacagaaccctgtaccaggtactttaaacacttcttttcatacaaattgagcaaatattgagctaagtaagaggaa

SEQ ID NO: 192752 - DNA, 201 bp, Homo sapiens
aggaaatggcatttttgggacatttggtcataaagccaataattaaaggaagaatattgaaagagaaatttcccgaagcttaggcttcttctttgtttttytgactttattaacatctcctggacggggtgtgtgtgtgtgtgtgtgtgtgtgtgtgtgtgtgtgtgtgtgtgtgtgttgggagaggtattggtgtggggt

SEQ ID NO: 192753 - DNA, 201 bp, Homo sapiens
aaataaagaaaggggctattgcaaagtttgggggatagttctatttggattttttcctcaatatcaattgacttttgcttggtaataattacaagtttccycttccacataataaatcaaagcaatgtagcagctcttggattatatatttaaaatatatagtgggaaaagggaaatcaagaaattagaaacttcactctt

SEQ ID NO: 192754 - DNA, 201 bp, Homo sapiens
gactaatcttaagggtcctgaatatttattgtgtttatgattataaagggctagttgtatatctatcaaaaacacagatgagcaataagaaaaatcatacrtaaagatttggcaaatatatgtgcatgtttacacatgcaagcacacatataaatacatgttcacaaacatattatgatggatggcccaagacatgggcca

SEQ ID NO: 192755 - DNA, 201 bp, Homo sapiens
ttaaaagcaccaaaaaattagaaaccattcatagtaatgcaatttaggcatgattgctctaataatttactatatatattccagtaatttttctaacatgyatatgatgtatagtctacaaaaatgtagaatagtgatgtatatataatattgcagaacaaaaattttctcttatgtactctgggtatttcctttatgtca

SEQ ID NO: 192756 - DNA, 201 bp, Homo sapiens
agttatagaataaaaacctagagagagtaaacaaaattagatatttgtttactgaaagacaaatattctaccaatacaggttgaaacaacaaaagtgatcrtgaagaattttaagaatcaatattaagaatatcaagaattaaaatatagaaacccaagtaacaaaaaaagaatattataaagaaatttatttcagtgtac

SEQ ID NO: 192757 - DNA, 201 bp, Homo sapiens
gagagcaaaaaacatataacagtacaaaaaaactttagcaaaccagacacataatgatgaaaattagaaccattcctttgattcaggaatgatccaaaatkctcacaattattatttctgtaaattacacaaaataatttgtactgcattcaagatctaaatgtaataaacaaaattttaacacttttacaaaaatatata

SEQ ID NO: 192758 - DNA, 201 bp, Homo sapiens
aggaggccaatacagggagcttcacttgttatttgtggcatttcatttcatcaaggggtgaagagaacacaggtctttttgtgtattatttctattcatcrttattcaagcaaagactttagatactttagaaatatttctatttgtatttcctttactgtatattgagaatttgcctaaacaaagatttaaaagtatctt

SEQ ID NO: 192759 - DNA, 201 bp, Homo sapiens
aagaaaaaaaaaaggaggcttcccccattataatataattttcccacatataggatttgaaatgttaaaaaaaaaaagtcttagaaatttaaaggttaggkagtatattcaggtcactacattttttccccttattactttgattttaaaacatgaaagtgttaacctttcaaaagatatagggaagataattaggtgata

SEQ ID NO: 192760 - DNA, 201 bp, Homo sapiens
cctattcttgctgccaacacttactaagattgctagaaggacatcttgcttcacaatgtctgggtctaatttgagataaaatattgcatctaactatgctkttatctatagttcctggccactcataaatgtagttcattgaaatctcacccacgctccaacctctgtcactccaggaagcaagattcatagcacttttct

SEQ ID NO: 192761 - DNA, 201 bp, Homo sapiens
gtttatgtgtcttttatctatttgttcttagcacaccagactaacacttagtggctttaatcagcaataagttactgtttctcatatttctgtcaattagyctggcagttttttagcaacagtaatctggtggatgagctggaggcgaagcccagccaggatactgtgtctccctctcctagtggttttccatcctgggct

SEQ ID NO: 192762 - DNA, 201 bp, Homo sapiens
tgttctgggggttgtggtgtggggagacttgcttggaaacttcagaatttctcaaacttcagtatagcagtgtagataataaggctttgtcatttatgtaytataacattattcttgtcattctgtaacgcagcaatgaaagaatttttgtaattttatctatcctatgctaaagaaaaaatattgaactctgagcttcta

SEQ ID NO: 192763 - DNA, 201 bp, Homo sapiens
ttgttctccttttgggattatggttgatggatccactcttagagatcaattcctgtctataaattttaaaaagtagttgcaagccagaaaaccttgtggayacaattcaagccagaggccatgaagactaactgacagtcactatttagagaggggagaactaaatctgaggaagtagaagtaggataataaatgagaaac

SEQ ID NO: 192764 - DNA, 201 bp, Homo sapiens
ttaaaagttacactgcagaatggctgatggttcagcggtcaggtaagtggtcatgatgatccagcttccaaaacaggagatcagggaagaaagtcaatcartcatgcagaaggaaggcttacacacataacaatgaaagagaaaacccggaggcaacacaagggagaagaggcctttttatgttgggaggtcagagactca

SEQ ID NO: 192765 - DNA, 201 bp, Homo sapiens
aaaattaacaatctaacaagcattgttagtctttcaagacaaagaactttgatgaaatatttttaaaagaccatctcatagcatcatctaaaggcgtatawcttggtccaagtctgacttcattttcttttgaatgttgccacgagtgtgtgaaagtgcaaggaagccatcagccacttgctaggacccaaaacgggccac

SEQ ID NO: 192766 - DNA, 201 bp, Homo sapiens
cagcttgttagaaatgcagaatctcagcacggaatgaaccattcagtttgaaggtagagaagacagagaggatgtcaaggttattgacttaggcaaacagrcccacacctccttccctttctacacctactgtaagcctcagaataggtaaaacatcttcaagaaagccttctttgatcccctaataaagtgattagaccg

SEQ ID NO: 192767 - DNA, 201 bp, Homo sapiens
tatgaaattatgacacagaaatgaacagaatcctcaaaaggctaaggaaatgttcatcaaaatttaattgagctctgttgcaaatttcaaaaataaaaaawtttctttactaatataaaagtgaagcactcaactctatccttctcatgattaatcataaaataaaatgcagatgattcggcaagctctcccccaattaaa

SEQ ID NO: 192768 - DNA, 201 bp, Homo sapiens
ctggattgggtcccccaaaattcgtgttcttcttacatacagatacattacattcattccatcccaatagtctcaaagtcttaatttgttttaataccaastcaaaaatctaaaacccagagtctcatctaaatatcttctaaatcagatatggatgagactcaaggtatgatccaccctgagctaaattgctcttctgct

SEQ ID NO: 192769 - DNA, 201 bp, Homo sapiens
taatttgttttaataccaagtcaaaaatctaaaacccagagtctcatctaaatatcttctaaatcagatatggatgagactcaaggtatgatccaccctgrgctaaattgctcttctgctgtacccctgtgatatcaaaacatttctgttgtttataaattaccctttatagacttttagactttacagactaaagtagtt

SEQ ID NO: 192770 - DNA, 201 bp, Homo sapiens
agttttgcttatgttctctttattcttactcctgggcaagtcccttgatggtaaaaaaggatgtcttcttcatggtattggcaaatatttgaaacaaatayatgactttatgaatggatgattacttattatgaatagagaaattatattgtgaaagactgacatttttttctttagtattttgtgaaaaagtccatttta

SEQ ID NO: 192771 - DNA, 201 bp, Homo sapiens
acagcattcatccctctgccatgagtggatgcatcaagaacgtgccatccttgaagcagataataagccttaccagacaacaaatctgttgatgtcttgaycttggacttcccagcctccagaaatgtgagaaataaatacctgtcatttataaattatccagtttcagttattttcatatagcagcacaaatgaactaaa

SEQ ID NO: 192772 - DNA, 201 bp, Homo sapiens
tatatgatgtatagtctacaaaaatgtagaatagtgatgtatatataatattgcagaacaaaaattttctcttatgtactctgggtatttcctttatgtcrgaaatgtttttaaaaatatgatggcaatggcattacagtattttatcatgtagacatactgtaattgatttaattcatattttatcatgtctttattggt

SEQ ID NO: 192773 - DNA, 201 bp, Homo sapiens
tataatattgcagaacaaaaattttctcttatgtactctgggtatttcctttatgtcagaaatgtttttaaaaatatgatggcaatggcattacagtattytatcatgtagacatactgtaattgatttaattcatattttatcatgtctttattggttgagaaaatactttttgaaagaagtacaatagcaagaaatatt

SEQ ID NO: 192774 - DNA, 201 bp, Homo sapiens
ttatggtgaaaacactgaagcttctgttcccttgtgttcagccctgccacctaggttagcatcagcctctccaactgcaacaaaattcaattgtgtgctgsagacagaagagaccctctaaactaattagacaatggacagtctacttttggaaataagcctgtgacgttaaccaatatcaatgatagaattttcttcccc

SEQ ID NO: 192775 - DNA, 201 bp, Homo sapiens
aattgaaaattggcatccaatcaatttcatgagatattctcttaaatgtgtatcttacatatatttttgagtcaggtatgacatagcaaatagaatatagragatatttgtatttattttcctctgaaggcttttaacatgtatctttgtagaatcacatttgtaggaattcatgttttctttcactttaaacttttagga

SEQ ID NO: 192776 - DNA, 201 bp, Homo sapiens
aaagcccacagactagactaatagaacacaaaattgccatttgttatctagagataaaaattccattaaagttctagaatataatgagaagttaaaaatawaatatttcagtagtgacagaaaaatgctatatcaaagccaaatatttttacttaccatataaagtaccattgagaaattatttctgtgaattcaacaaaa

SEQ ID NO: 192777 - DNA, 201 bp, Homo sapiens
ccttatcttgtagattccttatttctttcttcttctcttgctatttacctctgtggtttggtggttttctgtggtgctaagctttattttctcattctcayttgattgtctgcagtacattatttgtttgtgattaccacaggctaacataaagagtcttgtagttagaattgactattttaagatgatggcaacttaact

SEQ ID NO: 192778 - DNA, 201 bp, Homo sapiens
gctttctccgacagggactttgcacttaaagtcacctgtaccagaaatgtgcttccctctaggaatcacaatctctcataaaatatttttacttttctttsttttatttgctaccatagcaatttcacaatatttgtgtgaatacttgaacagttcgtgtcttttctgctatacaatatgatagagactataggcaaagat

SEQ ID NO: 192779 - DNA, 201 bp, Homo sapiens
ggcaatggaactgaggataaataagcaagaactgggattcacagatagagaaatgcaacataatttttattcaactcattttttcttaaccctaacacaastctgttgctcctccagagttccattaatggaattaacatttacatgggtcatcttgatcacattttagttcaccaataggtcatcaattctttacaattt

SEQ ID NO: 192780 - DNA, 201 bp, Homo sapiens
acccagatggcaagggcgcccaggaaatgtagtaggagaaaaggcaatggaactgaggataaataagcaagaactgggattcacagatagagaaatgcaayataatttttattcaactcattttttcttaaccctaacacaagtctgttgctcctccagagttccattaatggaattaacatttacatgggtcatcttgat

SEQ ID NO: 192781 - DNA, 201 bp, Homo sapiens
aatgttgaagctgtcctgggggagcttagtccacagtgggatggccaataaggtgaggagctagaattataaatgagatgcagccaactgccagaaatagmactatccacatgcaggcagggcaagagagaagaaataccttgagtactcctacttgcttcattcctatgagatagtttggtaaacccagatggcaagggc

SEQ ID NO: 192782 - DNA, 201 bp, Homo sapiens
tatgcatataaatacttacatttgtgggtgtatatattttaaacaaagtagtagcatatcacaaatgattcatgtagaaatgtgctaggcaagtgtaacgytggactatggaactttacctgtggtttataaaatgaacctcatttacaagaagagcacaaatttaagcaataacagaaagaagtttatccacattccaaa

SEQ ID NO: 192783 - DNA, 201 bp, Homo sapiens
agaaaaggcaatggaactgaggataaataagcaagaactgggattcacagatagagaaatgcaacataatttttattcaactcattttttcttaaccctawcacaagtctgttgctcctccagagttccattaatggaattaacatttacatgggtcatcttgatcacattttagttcaccaataggtcatcaattcttta

SEQ ID NO: 192784 - DNA, 201 bp, Homo sapiens
agtagcatatcacaaatgattcatgtagaaatgtgctaggcaagtgtaacgttggactatggaactttacctgtggtttataaaatgaacctcatttacargaagagcacaaatttaagcaataacagaaagaagtttatccacattccaaaatgattgctagggttaatatgccagattgatttattgatccactaccac

SEQ ID NO: 192785 - DNA, 201 bp, Homo sapiens
taggagaaaaggcaatggaactgaggataaataagcaagaactgggattcacagatagagaaatgcaacataatttttattcaactcattttttcttaacmctaacacaagtctgttgctcctccagagttccattaatggaattaacatttacatgggtcatcttgatcacattttagttcaccaataggtcatcaattc

SEQ ID NO: 192786 - DNA, 201 bp, Homo sapiens
cagaaagaagtttatccacattccaaaatgattgctagggttaatatgccagattgatttattgatccactaccacattgccaagaaattaagtggaggayaaacatcacattacaacttaggaaagggaaaaagaaaagtcaccacgagaaaaaaaaaagtgcttaatgttaaattctgaaaatgtttaggggtctacac

SEQ ID NO: 192787 - DNA, 201 bp, Homo sapiens
tataaatttagaaatgtgatccatgttattgtttttgactatttcattaagaaatagagaaaatgtcactgtttacattatatgaaatgcaagtgtttgamaatgaaacaaactggaccagaggcactaatttaacagctacccaaaacttatctgctaataattgaacctgaagctggaattaaaattatctattaaata

SEQ ID NO: 192788 - DNA, 201 bp, Homo sapiens
ggtgtgcatacatagcataaagttcaatttcaacatattggttgcgcgtggttgctcacccctgtaatcccagcactttgggaggctgaggtacagagatsacttgaggtcgggagtttgagaccagcctggccaacatggtgaaactccgtctctaccaaaaaatacaaaaattagctggatgtggtggctgacacctgt

SEQ ID NO: 192789 - DNA, 201 bp, Homo sapiens
tgtttcaatgttttggtgtgcatacatagcataaagttcaatttcaacatattggttgcgcgtggttgctcacccctgtaatcccagcactttgggaggcygaggtacagagatcacttgaggtcgggagtttgagaccagcctggccaacatggtgaaactccgtctctaccaaaaaatacaaaaattagctggatgtgg

SEQ ID NO: 192790 - DNA, 201 bp, Homo sapiens
atacaaaaattagctgggtgtggtggcaggtgcctataatcccagctacctgggaggctgaggcaggagaatcgcttgaacctgggaggcagaggttgccrtgagcccagattgcgccactgcactccagtctgggcgacagagtgagactccatctcaaaaataaataaataaataaataaaaataaataaataataaaa

SEQ ID NO: 192791 - DNA, 201 bp, Homo sapiens
ccagttgtgcttctgcagaagaggcgagagaggtagccaaggccaggtggggaagagttttgcctgtcatgctaagttgtgaattttatccagaagaaatyggaaagccattatgagattttaagccagaaaataattacactgctagtgaggtggcagctatcatgaaggagaatgaggctgacggtataaaagggtcca

SEQ ID NO: 192792 - DNA, 201 bp, Homo sapiens
catatatatggaaaattatcatttctaagaatagaaaaatcaaacctgtgtattttttttctattttgctatagagacaaagaaaagcccacagactagastaatagaacacaaaattgccatttgttatctagagataaaaattccattaaagttctagaatataatgagaagttaaaaataaaatatttcagtagtgac

SEQ ID NO: 192793 - DNA, 201 bp, Homo sapiens
aacagcaggaagccactactactttagaattgaagacggtaaagagaagttttaacaataatccaaatgttgaagctgtcctgggggagcttagtccacaktgggatggccaataaggtgaggagctagaattataaatgagatgcagccaactgccagaaatagaactatccacatgcaggcagggcaagagagaagaaa

SEQ ID NO: 192794 - DNA, 201 bp, Homo sapiens
acaacttaggaaagggaaaaagaaaagtcaccacgagaaaaaaaaaagtgcttaatgttaaattctgaaaatgtttaggggtctacacgactgttttcacyacatatttttctatttattttcaattcttgtgagatgtgtgctggtgtgagaattaaaatggctttcatgtgttaagttgttggtttataagctttttca

SEQ ID NO: 192795 - DNA, 201 bp, Homo sapiens
cattattgtttcctcgttatcatttacagttaaactgatattaaagaaggacattgttttatcataatgtttaactttcataattacataaaaagaaaatyatgttaaaactcatctagaatagatgcactgaaaacagtgctctgaaatagtgcgatgaagtttatccgcatagttacataactcttgaatctcccaaga

SEQ ID NO: 192796 - DNA, 201 bp, Homo sapiens
cattcctctcatcatattttctcttaaactcactctgggtttattttttttttcccagctactgaattgaaacagcccttgaaagggacacaaatgatttmcttctggctaaacttaaaagtcttgctaaatctgctcctcatttaacttgatattacatgacactttgcttttgggatacattatttttcctggtattct

SEQ ID NO: 192797 - DNA, 201 bp, Homo sapiens
ttaaacactcatactgtttgtttctgttggactacacaatgtccaaaatgttgcatctgtaatagaaaatgtctggtacttgttgcaggtcagcgtaacartttttgttgttgtttcttcctaattgttttataagaaagaaagagaagattttcctagccccctttaaataataataggcactcaattgataggtgtgcc

SEQ ID NO: 192798 - DNA, 201 bp, Homo sapiens
ctttgcatgagacctcaattaactagtttacctttaccttctagtttctctttaccttctaaaaaatcaagcaactggaagaatgattccatctgccaagrgctacagagtaattaatactggaaaatcaattatcattttatttgtacaatcctatgaaatgaaatctgattaataagcagcctagcatgctcatttaaa

SEQ ID NO: 192799 - DNA, 201 bp, Homo sapiens
cgccccttactacttagcaaagaattatatgagctctttgccatgaagttaatttgttcagacattttctggcatatatatgaatctaaaaaataatatgragaaagtaattaaagaccactttcacacttattaaagattcttcttgttttagctgtgctgttcatgggaaaaatattgaaaagttaagcacttatttct

SEQ ID NO: 192800 - DNA, 201 bp, Homo sapiens
ggctactccaaattgaaatgtcccataaatataaaatgaacatcacatgtcaaagactttgtaagtaggccgggcgccgtgactcacacttgtaatcccascactttgggaggccaaggcaggcagatcacttgagtccaggagttcgaaatcagcctggccaacatggcgaaacagcatctctaccaaaaatacaaatgg

SEQ ID NO: 192801 - DNA, 201 bp, Homo sapiens
cccctcaattaataatatgttttgtcttttccaaagctgctttctagtgaaggcatcttgaaggattttttcttctcctattggctgccataatcatagarttctgtgttaattttcctcttgttaccttatctacagtatgatcaaacaagcatggagttcagaatttaaaaataacaccattaacataaggattgcttc

SEQ ID NO: 192802 - DNA, 201 bp, Homo sapiens
ttttatcagataagaaaaataatgcaactgaaagttttctttatttattttagttaagaaggaaactcagtgcctaattgtgtgcttatctgttatcagtscatcttaaacgcctaaacatgtttactctccagctcttcttacttgctctgtattctgtttaatctcttagataccacctttaaaattatattcagagcc

SEQ ID NO: 192803 - DNA, 201 bp, Homo sapiens
actttttttttttttagcaaaagtcttttaagctacttctttctctgccccaaaggtgtgagaccatgaggcatcaatctgctttctgtactttcccccartagtaccttgcagtgtgttctaaacaggggcaatcatcacaatttcttcctaaaatttgaccatagtttccagaattaacctttttgtaacacattggaa

SEQ ID NO: 192804 - DNA, 201 bp, Homo sapiens
ttgcagtcaattttgatgatggggcacattaactttcagcccaattaagtgaaatgttatcccagaaaaaaagaattctgttcttctcagcagaattatastacaaaaaaattgtactcaattattacattttgaattttgtcaataaaaacttgtagaaattaaaaaaaaaaaaaggcttgaagactctggaggtatctg

SEQ ID NO: 192805 - DNA, 201 bp, Homo sapiens
catttatattctctcctatcaaagtcgtatttcagacctaagctatttgagagagacagtctaataaattattaaaaatcagtaaatatcatgctgtgtcytcataaaataaaatacttggaatctcatctcactgtccaaagctacgtatctaaactgaaataaagtttgtcaatgttaatagtttttatagaataataa

SEQ ID NO: 192806 - DNA, 201 bp, Homo sapiens
ccaacgtgggtggatcacgaggtcaggagttcgagaccagcctgaccaacatggtgaaaccctgtctccactaaaatacaaaaattagctgggcatggtgkcatgcgcctgtaatcccagttatttgggaggctgaggcaggagaatcgctagaacccgggaggcagaggttgcagtgagccgagatcacatcattgcact

SEQ ID NO: 192807 - DNA, 201 bp, Homo sapiens
ataagtaattcatctcatatatttttatgaaaaaatataactctgtcttcctcacatctagtatttaaatgatggtccttaccataacaagaagtatgatytgtacactttgacaattcaataatacatttatattctctcctatcaaagtcgtatttcagacctaagctatttgagagagacagtctaataaattattaa

SEQ ID NO: 192808 - DNA, 201 bp, Homo sapiens
tctggaggccgggcactgtggctcacgcctgtaatcccagcactttgggaggccaacgtgggtggatcacgaggtcaggagttcgagaccagcctgaccamcatggtgaaaccctgtctccactaaaatacaaaaattagctgggcatggtggcatgcgcctgtaatcccagttatttgggaggctgaggcaggagaatcg

SEQ ID NO: 192809 - DNA, 201 bp, Homo sapiens
gaatatatctcactattaagccacaaatgaggagactatgaccgtaatcatccacttgtaaaaacatagaaacataaaagaactttaaagtaaggttaagygattaatattaataatataaatataatgtaataatgtaaatgaacaggaatggaaataatgttcttactattaaattaagatgtatcctgttgctgaata

SEQ ID NO: 192810 - DNA, 201 bp, Homo sapiens
ttctttttactcaagattgatgtggttattcagggtcttttgtgggtccatgagaatttaaagagtgttttttctgtttccaaaatggcattgggattttyataggaattgcactgaatctgtagacatttctgaaaagaagacatacaaatgaccaacaaattcacaaagaacattctcagcattacctatcattaggga

SEQ ID NO: 192811 - DNA, 201 bp, Homo sapiens
gaagacaaagtggaaaagtcaaagaacctgaaagggaagcatgtttggagagttcagggaacagaaagaagtgagccggagcgctttaaactggaggaagmgtggtagatggaagagataccaggtgcaaaatcacagcctgaagctgtaattacttcagcactgttagaatatatctcactattaagccacaaatgagga

SEQ ID NO: 192812 - DNA, 201 bp, Homo sapiens
gaggatgcaggtctatctaactcaaatgtgtaagaatatgattatttgtcctttagattccttagtctataaattaataattaagaggaagctgattgttktagctctaagttaatgaatagtaatatgcaattggcttttaactctgctgtttttactatgtctttagtgagatcacttcaccacatttttaggtaattt

SEQ ID NO: 192813 - DNA, 201 bp, Homo sapiens
ataaaaagaaagaaaataaagcacaccattatcagtaagtcaatcagtcatacaacgaatatttaatgagcaattacaacatggtcatttaattattctaygtatgtatgaaatagactacatccctgtactcaaagagattttattctagggataaaaacagacaatgagcaaatgaaaaaaaaaatcacatataatgct

SEQ ID NO: 192814 - DNA, 201 bp, Homo sapiens
taatcatatgatgttgataagtaatcaaagaataggaattttactaattctaaataataacaaaagtacaataaataaacataaattgctggaatattgaygtttgattctaccttgttttttcatttatcttcattttaaaaagttatatttctattaatagaatatttgtaataacatctgttagttgcctctgtttag

SEQ ID NO: 192815 - DNA, 201 bp, Homo sapiens
taaggaaaataaaatcgccaatatattaactttaaatttgtgaaaatataaccattccctctgagcaaccacgtaaactgttgcttcaggtgtgttggttsagtgaatgtctgaaatccattctctgaagggagggattgtttatttttttcctttcaatcatcacaatattttggtttggtgtggaagtcaattaattgg

SEQ ID NO: 192816 - DNA, 201 bp, Homo sapiens
ctcctgggttcaagcgattcttctgcctcaacctcctgagtagctcagattacaggtacacgccaccatgcccgggtgtttttgtatttttagtagagacrgactttcaccatgttggtcaggctgatctcaaacgcctgatgtcgcgatctgccctcctcggcctcctaaagtgctgggattacaggcatgagccatcac

SEQ ID NO: 192817 - DNA, 201 bp, Homo sapiens
aatcgtgttttgctgcattttctgtggttccttaattatgtgtccagcttaggacttcacacattgtgggtggctcagaaagtttgactgaatatcttctyccctaattaatattacttatcattgctcagaccactttataataccaggtaccttcatcgaagcagaggaagaattgcctttctgatttaaaattgccta

SEQ ID NO: 192818 - DNA, 201 bp, Homo sapiens
aatctgtgtctctgtaagtatgtactataagcttaggatggacaagtgtttggacctgcatttctgggaattttgccatcagtacccacagttgactcacrtgtttttttggctctttcccctcctgccatctgcatgtttggcattgtgcctacttgcaagttggtcagacctgtgccaacatagtggaatttcgataga

SEQ ID NO: 192819 - DNA, 201 bp, Homo sapiens
agagttaaattttaaggacatttaattgaggcttagaatgagcctttctattttacccacacattttattattttaatatccatatttatcttccagccagtcatagactgagaaagttaattgaagaaatgcatccttactttttcaaactaacttcaaggacaaataccacacagatggctgatttacaacagtgaaga

SEQ ID NO: 192820 - DNA, 201 bp, Homo sapiens
caacttattgatgcctgtgactacttgcttcagaacattcattcactttgaaaattataagcagaagagtgcttaaaattttacagtgcattagtaatcaygcatctcaagcagatgaatgacattctgtgaatcacaaagcaaaagctatagggaaaaaatagtcaacaagttcatttctacatgcctcttagttgtaaa

SEQ ID NO: 192821 - DNA, 201 bp, Homo sapiens
agaacattcattcactttgaaaattataagcagaagagtgcttaaaattttacagtgcattagtaatcacgcatctcaagcagatgaatgacattctgtgratcacaaagcaaaagctatagggaaaaaatagtcaacaagttcatttctacatgcctcttagttgtaaacctccagccactatttgtcaatactaaactt

SEQ ID NO: 192822 - DNA, 201 bp, Homo sapiens
caagacattaagataaatagacttcctctttcactggggtatgacatgtgtgaacaagtagggaaaaaaataatggcagctactattgagacaagctacartgtccaccctcttaacccaaaaatatattgcaatcccacatgcaaaatatactcaccatcttccaagaccctcaaaaacctcatcccattatggtatttg

SEQ ID NO: 192823 - DNA, 201 bp, Homo sapiens
atgaagaaattgaggcacagagagcttaaattgtccacagtgacacagcttgtgttggattcaagagttgatccaggtagtctgacttcaaagaccatgcyccttatcatctgttatgttgctaaacaaaatactgattatggaagacctaggaacagaaggaagtgctaccataagtaactttgcttctaaccacaatgc

SEQ ID NO: 192824 - DNA, 201 bp, Homo sapiens
tgtgtagtcaaaaagtatattgattagaattaattcactacaagaagcctccaataatttttaacataagtttttcctctttaacagtagcctgaagcttstctcttttttttgtgtggtcaatttagcaacaaatttccaattaatcatttactgattgcaatgaatgttctgtcaataatacgcaactcacattgctaa

SEQ ID NO: 192825 - DNA, 201 bp, Homo sapiens
attatgttgaacttcactcaacattggcgggattcctgaggaaaaaaaaatcatcagcaaaagaagagctctaaaatcatgggatgatgggatgccttcasaattggatgaatggatattgaatagtaaatatggaagatacagaaaataactgttggaagatagatttggatcatattttgacacacctatggtgccaag

SEQ ID NO: 192826 - DNA, 201 bp, Homo sapiens
agttgatccaggtagtctgacttcaaagaccatgctccttatcatctgttatgttgctaaacaaaatactgattatggaagacctaggaacagaaggaagygctaccataagtaactttgcttctaaccacaatgcttgtgactattttcatcccacagacttcctgcaactttgcaataaaatcaactcctggttcctca

SEQ ID NO: 192827 - DNA, 201 bp, Homo sapiens
tacaagaagcctccaataatttttaacataagtttttcctctttaacagtagcctgaagcttctctcttttttttgtgtggtcaatttagcaacaaatttscaattaatcatttactgattgcaatgaatgttctgtcaataatacgcaactcacattgctaaaagggttatactaagctttattgttttcgttttgtctt

SEQ ID NO: 192828 - DNA, 201 bp, Homo sapiens
gttaatatcatagaaaatatactcttttaaggaatacttccataagacaatatattttgattatgtactttcctgaacaagggggcctttaaaagaatttmatatgcagagcattttcatatattttaaaccttcaaagagcttgaaacattgaagctaatacatcggtgccaaaataacgtggagcattttggccataca

SEQ ID NO: 192829 - DNA, 201 bp, Homo sapiens
agttagttcatgcactaggttctatgaaaaaaaaacaagaaaacaggtcgtgggtattagcttaatggagactgcaatatagcatacagggaatgttttaraactggaaaagccttgagattgctcaatctgtcatctttatttacagataaaataacaataagttccaaggaatgtatttgccccacttgcacaggtctt

SEQ ID NO: 192830 - DNA, 201 bp, Homo sapiens
ctacagtacaagaaaatattttgggagagataaacaccacattcacgtaacttttattacagtatatgtgataattgttctattttattattagttattgktattatttactgtacctaatttctaatttaaactttatcataggtatgtacatatgtaagggaaaaccatatatatacttatatacacggttctgtacta

SEQ ID NO: 192831 - DNA, 201 bp, Homo sapiens
tattgaattgtttctctgtgttctcttatatcttgctcagtttccttaaaatcataattttgaatttatttttcagatattatatgaatgtcctttttggragtctgttactggagacattttgtgggtgccatgttaatttgcttttttatgtttcttgtgtccctacatttatatctgtgaatctaattgtgtagtcaa

SEQ ID NO: 192832 - DNA, 201 bp, Homo sapiens
caagcatgattacctctattcttaacacacagtcttcttattctggtattcctttaaaaattaaattcaaccatacttgaatacatggtatcacaaagtcstactgttctacaaaaatgtgaatgttgaataaaacttatattaatccctttcacagttagaagaaatttttctgttaaatatgtcaacttttactcattt

SEQ ID NO: 192833 - DNA, 201 bp, Homo sapiens
ataatgtacaaacaaaactaatctatattcttctcatccaaaataccttctccaagcatgattacctctattcttaacacacagtcttcttattctggtawtcctttaaaaattaaattcaaccatacttgaatacatggtatcacaaagtcctactgttctacaaaaatgtgaatgttgaataaaacttatattaatccc

SEQ ID NO: 192834 - DNA, 201 bp, Homo sapiens
cctgggctcaagccatcctcagcctcaacctcctgcgtagttgggactataggcatgtgccaccagacccagctaatttttgtatttttttatagagaccrggtttcaccatgtttcccagactggtcttgaactcctcggctcaagcaatttgccagccttggcctcccaaagttctgggattacaggcatgaaccccac

SEQ ID NO: 192835 - DNA, 201 bp, Homo sapiens
ggttcaaggttcaaatgagaaattgtgctgacaagtcatatataattttggggattattcattttacatttttttagttcactttgaagatagagtattgsaatccatttccttcccctcttttgttccacatttatatactcatcctcatggtttgtgtgccctggttcccaagtacaataaaggagtaaaaaaaggttg

SEQ ID NO: 192836 - DNA, 201 bp, Homo sapiens
aagttataatgtacaaacaaaactaatctatattcttctcatccaaaataccttctccaagcatgattacctctattcttaacacacagtcttcttattcyggtattcctttaaaaattaaattcaaccatacttgaatacatggtatcacaaagtcctactgttctacaaaaatgtgaatgttgaataaaacttatatta

SEQ ID NO: 192837 - DNA, 201 bp, Homo sapiens
tatgttcatataaaagcctgtatgagaccataactctgcaaaatttttttttaaattagccagatgtggtaacatgcacctgtaagtcccagctactgggraggctgaggtaggagcatcacttgagccaggaggtcaaggcttcagtgagcgaagattgtgtcttttttaatgagacaggatgagactgtctcataaaaa

SEQ ID NO: 192838 - DNA, 201 bp, Homo sapiens
ctttaaaaagttataatgtacaaacaaaactaatctatattcttctcatccaaaataccttctccaagcatgattacctctattcttaacacacagtcttyttattctggtattcctttaaaaattaaattcaaccatacttgaatacatggtatcacaaagtcctactgttctacaaaaatgtgaatgttgaataaaact

SEQ ID NO: 192839 - DNA, 201 bp, Homo sapiens
agaatagctaaacaaaaattggtaacgacatcaactactggaaagggtgtggagacactgtatcagtcatcctctgctggtgggaattcaaaatggttttycagcactctggaaaacattttggccatttcttaaaaaactaaacatggcactactatataactcagcaaatgcattcctaggcaaatgcactctgggagg

SEQ ID NO: 192840 - DNA, 201 bp, Homo sapiens
agtcaacaaatctaaaaagtgtttaatccagactatttactggctcttaactttaaaaagttataatgtacaaacaaaactaatctatattcttctcatcsaaaataccttctccaagcatgattacctctattcttaacacacagtcttcttattctggtattcctttaaaaattaaattcaaccatacttgaatacatg

SEQ ID NO: 192841 - DNA, 201 bp, Homo sapiens
tagccagtgcaataagacaagtaaagaaaataaaaaaattatatcagaaataaagaaataaaactaccactgtttacagatgacatgattattttgaaaayctccagcaatctccaaaaacagcttcttagaattactgagtttagaaagtttgcaggatagaagataaacatcccaaagccaattgtatttctatatatt

SEQ ID NO: 192842 - DNA, 201 bp, Homo sapiens
gcatctatacaatacccacagcttaacatctacataatggtaaaagaaggcttttctgcaaacattgggaagaagagaaagatgtccattatccctttttyaattcaacatagtgcttgaatttctagccagtgcaataagacaagtaaagaaaataaaaaaattatatcagaaataaagaaataaaactaccactgttta

SEQ ID NO: 192843 - DNA, 201 bp, Homo sapiens
gataaaacagaaaaagaagggaatttcctcaacttgacaaagagcatctatacaatacccacagcttaacatctacataatggtaaaagaaggcttttctscaaacattgggaagaagagaaagatgtccattatccctttttcaattcaacatagtgcttgaatttctagccagtgcaataagacaagtaaagaaaataa

SEQ ID NO: 192844 - DNA, 201 bp, Homo sapiens
ttagtgagataccacatttctctgagcatgtgttaatatttcttctttttcctctttattttttgactataatgtttctgcattatgtttacaattttctrtatgatgtgtgtaatttttctgttaaagcatctctaagataaaacttattaaaaatacagttagaagcggttttccaaaatactcgtaccaatttaatac

SEQ ID NO: 192845 - DNA, 201 bp, Homo sapiens
aacatgcagtgtttggttttctgtccttgcaatagtgtgctgagaatgatggtttccagcttcatccatgtccctatgaaggacatgaattcatccttttwtatggctgcatagtattccatggtgtatatgtgccacattttcttaatccagtctatcatttttactatggtatgcctgtgttcatctctttgcatttat

SEQ ID NO: 192846 - DNA, 201 bp, Homo sapiens
gttctccatttcatcaatttctgctctaatctttaaaatttcctttcttctggctggtgaagctttaatttttctcttcttttttactggagactaagccraaaatttaggttattaatttgagctattacttctttttaacgtaggagtttacagctataaatgtgactttagacattgtattagctgcatttcattggg

SEQ ID NO: 192847 - DNA, 201 bp, Homo sapiens
tgttctccatttcatcaatttctgctctaatctttaaaatttcctttcttctggctggtgaagctttaatttttctcttcttttttactggagactaagcygaaaatttaggttattaatttgagctattacttctttttaacgtaggagtttacagctataaatgtgactttagacattgtattagctgcatttcattgg

SEQ ID NO: 192848 - DNA, 201 bp, Homo sapiens
tctgaaggtgctgaggaagaatctgttccaggtctctctcccggtagttccttaaattgtaccagtataactccattcttcacatagcattcctctttgtwtatgtatgtgtccaaattttccttttttgtaaggataaagtcatactggattaactgcaagcaattgtctgacctcatctacacctataatatccttaaa

SEQ ID NO: 192849 - DNA, 201 bp, Homo sapiens
atagtcttataattttggaggctagaagtctaagattaaggtatcatcagggtcttgctcctctgaaggtgctgaggaagaatctgttccaggtctctctmccggtagttccttaaattgtaccagtataactccattcttcacatagcattcctctttgtatatgtatgtgtccaaattttccttttttgtaaggataaa

SEQ ID NO: 192850 - DNA, 201 bp, Homo sapiens
aatccagccaaacttctgagttcttagatgtcagtgattctgtagatcaatttgggaagcattgctatattagcaatattaagtcattcgatccatgtacrtgcgatgttatatcagtttgctatgactgtcatatcaaagtaccataaattgggtggcttgggcaacagagatttatagtcttataattttggaggctag

SEQ ID NO: 192851 - DNA, 201 bp, Homo sapiens
tggagtgcagtggcatgatctctgctcactgctgcaacctcttcctcccaggttcaagcaatttttgtgtctcagcctcctgagtagctggcattagagasgtgcgccaccatgcctggctaatttttgtatttttagaagagatgggatttcaccatgttgctcaggctgtattttttttttaattttgaggattatttc

SEQ ID NO: 192852 - DNA, 201 bp, Homo sapiens
ttttttaaaatgcaaatcaagtcaaatcactatactgctgaaatcattaatgatttgctttaacttaggataaattagaggccttgcaaggctttgcatgrttttgctttttttctttttaaagtcttatcccatacctctctgacacttaatgtatttctccaagcattttcatcttcagtgctcacctgcctgaaatgc

SEQ ID NO: 192853 - DNA, 201 bp, Homo sapiens
taaatttttcattagatttgttcttgcaaatgatttttgttaaattaaatgtccacatttatctcctaattttattctatttctcagcaatttttttatartgttggtctcaccattattccagaaactttatttgcttgcctttcacaaccctacagtcagctgggagctcttccagactccttagctgattctcttgtc

SEQ ID NO: 192854 - DNA, 201 bp, Homo sapiens
attttattatattattatacttcttcaaaaatgttaggggttatctcagagtttgcaatatgtattggcagctaatctgtgttcatttttcagtatagtatactgtttcaaagatggtacatgcatgtaccgaataacagcatatatcttctttttcgcttttattccatataacattgttgtcatccatcttacttatcc

SEQ ID NO: 192855 - DNA, 201 bp, Homo sapiens
aaagtcacaaaaatgtgctaaaagctacatttaaaatgcttggttatctataagggtcaaggttacaagtcaactccctcttcacctctcccttctaactgaataaaaccaatcgtttcttagtttaggtatgtttttctgttagtaaactttgcatgagacctcaattaactagtttacctttaccttctagtttctctt

SEQ ID NO: 192856 - DNA, 201 bp, Homo sapiens
catctctaaagaaaaaaaaaaaaaagttagtcaggcatgatagctaatgcctgtaatcccagcttactcgaggggtcaaggcaagaggatcacttgagccyaggagttcaaggctgcagtgagctattgcactgcactgcagccaatgtcaccactgcactccagccttggtgacagggagagattctgtctccaaaaaaa

SEQ ID NO: 192857 - DNA, 201 bp, Homo sapiens
gcactttgagaggctgaggagagcagatcacttgaggccaggagttcaagaccagcctggacaacaaggcaaaacccattctgtactgaaaatacaaaaarttgcctgagtttggtggcacaggcctatagtcccagttagtcaggagactgaggcatgagaattgcttgagcctgagagggagaggttgcagtgagccga

SEQ ID NO: 192858 - DNA, 201 bp, Homo sapiens
tgtaatcctagttactcgggaggctgaggcaggagaattgcttgagcctgggaggcagagttgcagtgagctgagatggcgccactgcactccagcctgcrcgacagagcgagactccatctcagagaaaaaaaaaaaaaaggaggctggaaagtgcagcttgaggctgaagatgactgggaatgtgggatcctcatgatt

SEQ ID NO: 192859 - DNA, 201 bp, Homo sapiens
ttgcctctctagatattctctctgcccttgttcgttctgctgtctgcctgagaaatgtcctgtatagaagacagcaaagttcccttgccctctttcttctrgtggagttggccagttgagatccccacagtagatgagaggatataaagcagggttcaggttcttacgttcctggataccttggtgaaaatgtcacctggg

SEQ ID NO: 192860 - DNA, 201 bp, Homo sapiens
acctgtttgtcattcaggagcatgttgtttaatttccatgtatttgtacaatttccaaagttcttcttaatattgattctgattttattttattgtgttcygagaagatgcttgagagaattttgatgttttaaaatgtttgagatttatattgaggcctaagatacagtctatccttgcaaatgtcccatgtcctgagga

SEQ ID NO: 192861 - DNA, 201 bp, Homo sapiens
cccttgccctctttcttctggtggagttggccagttgagatccccacagtagatgagaggatataaagcagggttcaggttcttacgttcctggatacctyggtgaaaatgtcacctggggctggatgtcttttcctcccaaggccattttctctatataactctttccctctgggtctggtaactagctcctcacattgt

SEQ ID NO: 192862 - DNA, 201 bp, Homo sapiens
aactcagcaaatgcattcctaggcaaatgcactctgggaggaatgaaaatatgttcatataaaagcctgtatgagaccataactctgcaaaatttttttttaaattagccagatgtggtaacatgcacctgtaagtcccagctactgggaaggctgaggtaggagcatcacttgagccaggaggtcaaggcttcagtgagc

SEQ ID NO: 192863 - DNA, 201 bp, Homo sapiens
cagtagatgagaggatataaagcagggttcaggttcttacgttcctggataccttggtgaaaatgtcacctggggctggatgtcttttcctcccaaggccrttttctctatataactctttccctctgggtctggtaactagctcctcacattgtccctttggacatacgagtgttttacctaccccagtattctgcatga

SEQ ID NO: 192864 - DNA, 201 bp, Homo sapiens
ctctttccctctgggtctggtaactagctcctcacattgtccctttggacatacgagtgttttacctaccccagtattctgcatgatcctatgtggtttcscacagactttttggtagtcatttaaaaagagtaaactttcctccaattacaatagggcacttcttcagattagaggccaccatctgtttttgatggaaca

SEQ ID NO: 192865 - DNA, 201 bp, Homo sapiens
ttatggtttagtgcagggatatgaggttagttcaatattagaaaatcaatcagtgtgatctttcatattaatgggatgaaaataaaaatttcataattatrttaacaagtacagaaaatgtatctgacaaaatccaacacccatttgtaaaataacaagaaacaaaacttctctgataaaacagaaaaagaagggaatttc

SEQ ID NO: 192866 - DNA, 201 bp, Homo sapiens
gggcccttcctgaatgggagggacaatgggaaaatgctgaagtaaggcaggccttatctcacagataacccaggtatcactgccctctgcaacataatcayaagagtgatatgaccatgtccaactttatggaataattattttttaaaaaaaagaatgaagtggattgtaaagtttgagattaataacttgaactggatt

SEQ ID NO: 192867 - DNA, 201 bp, Homo sapiens
acccaatcaggcaggattggcgggggagcaattcaaccattgtcttttctgaatctaaacaattttacatgacatttctatcttacagaatgcatttctartagtcttctatgagaataatgtcagtatttttcttaagtgtcattataatatttatgtagaattgttattaaacccattaagcattctaagaagtctgtg

SEQ ID NO: 192868 - DNA, 201 bp, Homo sapiens
gaatgtctaagaactagtggagtagttggtgaattcctatctgagggctggagaaaataagatgagctcagtcaggcaggcaggaagcaaaaagaagcaarttctttcttcctgtaccttctgtcttactcaggccctcagtggattgggtaatgctcacttacagtggggtggcaatctactttattgagtccacagatt

SEQ ID NO: 192869 - DNA, 201 bp, Homo sapiens
atttgtccttttctttcaatttctgcccgtactagacaattacaaactcttacatttcactcaactgtattcttaacttgctatatggtcttttcattttyaatccattcttgcttaatacttgtattccatcctcctcactatcaattttcttgtatagggttttgattttcccatgttcttgctcaaaataattcagta

SEQ ID NO: 192870 - DNA, 201 bp, Homo sapiens
tctgaaaatcttcaaaagtattttatacagaggtatctagctctttacttcttgtaagtagttgattaggagtatccaatgcagatattttctatatctcyataaaaattttaggccctagtctatcagtgctccctttactcctgagaatagagttattagtgtcttgaaatattatcaaatacagaatcaattctagaa

SEQ ID NO: 192871 - DNA, 201 bp, Homo sapiens
tattttatttattgttacactattttatcagatggttcacttattatgtagtcataagaatttattaaatttttaatttaaattttaaaagaaatttgggratctaattttattgtgatcctcacataaatattcaggtggttagaatacctgaaatcgaattaaaatttaaatttttaaaaggcttcccatagattccta

SEQ ID NO: 192872 - DNA, 201 bp, Homo sapiens
agtgtcattttattagttagttttctgaaaatcttcaaaagtattttatacagaggtatctagctctttacttcttgtaagtagttgattaggagtatccwatgcagatattttctatatctccataaaaattttaggccctagtctatcagtgctccctttactcctgagaatagagttattagtgtcttgaaatattat

SEQ ID NO: 192873 - DNA, 201 bp, Homo sapiens
aagtgttgatgttctttcttaattgcagcattggaaattaaataaatgcaaaatgtctgaaataatttgctagttggaactgagatcagtctttaaaaaawtcttttttatttataagtaattcagtttagaaataatagctttaatatagcaattaatagcaagaatattattttttaaagtttccaaaatgcaagcaat

SEQ ID NO: 192874 - DNA, 201 bp, Homo sapiens
aactttctcatgccggactaccttttggtccatatctcagcagttaaccaaccaacctgttagaatcaaactccacaagctgcaacatttaatgcagaacytttgcttaatgagtccatgccaaattcagcctgatccaacattaagttccttccaccattatcccacatccttagttatcaatttcgtacatgttctcca

SEQ ID NO: 192875 - DNA, 201 bp, Homo sapiens
ccctcccactcaccaaacaatgggagagaagaaggaaagccactggatgctactcccttcctctcactgaactacaggatagaacaagctccaacattatkatgtagatgaaacctcacagatggcagccctcaggaaaaaaaaaaaataaatagatggtaaatattcctttcagaattttaaaggtttcagactctaagt

SEQ ID NO: 192876 - DNA, 201 bp, Homo sapiens
actctccggtgtccatgtaccttattccacttggtcatgggacaagaacccagaacttgccaagctgcgggcagtgggagtaaaatagctgtaaccctccytcctgctctgtgaaaaacaggagaaggagccactgagcaccactccctcccactcaccaaacaatgggagagaagaaggaaagccactggatgctactcc

SEQ ID NO: 192877 - DNA, 201 bp, Homo sapiens
cactctgccttattcactctccggtgtccatgtaccttattccacttggtcatgggacaagaacccagaacttgccaagctgcgggcagtgggagtaaaakagctgtaaccctccttcctgctctgtgaaaaacaggagaaggagccactgagcaccactccctcccactcaccaaacaatgggagagaagaaggaaagcc

SEQ ID NO: 192878 - DNA, 201 bp, Homo sapiens
accagagtgagaacttccatccccatcgtacccactctctcttgattgctcccttctgaattatggcttttaactaatcgaatgatgctctttccaagacyacccatggaccaatcagcacacattcccccattctaagcccatttaactgtggactcggcctcacagacagcaacctgatttcgggtcccctctccctgc

SEQ ID NO: 192879 - DNA, 201 bp, Homo sapiens
catgacaggtgctactctcattcaggctacacatacctcatgcctacctcttcaatgtcattctagtagttcttacaaggtagttaatctccaatggcctraaatcaaattaggttatgaggatccttcaaatacgctgtctgtttatattatttgtaacaagaattacttacatggtgattacctatatacttatgattc

SEQ ID NO: 192880 - DNA, 201 bp, Homo sapiens
acctcagttatcacattctgctttgtattatagttggctacataagaaactgtctccaatgctagatcacattatttattgtatcactcccattggtaccrcacaataaataactcttcaaatagaccaaagcagcattctaagtctttcttcttggtgtatcactagaaaactccataagtaatgtagtctttttaaaca

SEQ ID NO: 192881 - DNA, 201 bp, Homo sapiens
ttgttaggtgcacaaaagctagcctcaggaaatatattcatatattcctcctgattgtggcacacttctgtagtctttcttcaacttcttagttgaaattwttctctcagcttcttatattatcatgctcttttgtacctcagttatcacattctgctttgtattatagttggctacataagaaactgtctccaatgctag

SEQ ID NO: 192882 - DNA, 201 bp, Homo sapiens
agtgggaatggaaaatttaaagtgggaatgaaaaaaaattaatttaaaaagaaaatgtaatttagtatgggagtcttttcaggcttactcagaaaaatacwtgtaagtttatttatgtctttccttggcttcatagctcatttccctttatcaccaaataatatttcattttagagacgtaccctagtttacttatctttt

SEQ ID NO: 192883 - DNA, 201 bp, Homo sapiens
ctactccctttatttgtctaaaataaaaccattgcgttgtatgcagatttccctcaagggatgagcccttcctcatgagaccattcaggcctctcagaagytttcttcattctatcctggaaaactttgcagctcttagaaaaactaacctgttagatgtgtgagtttcctctatacagtaatatggacactaggattgac

SEQ ID NO: 192884 - DNA, 201 bp, Homo sapiens
atgccacaaacaggctagagttgaaaaggcttgaagcaatgaaaatactggttactttaagaaaaggaaatggcatttttgggacatttggtcataaagcyaataattaaaggaagaatattgaaagagaaatttcccgaagcttaggcttcttctttgtttttctgactttattaacatctcctggacggggtgtgtgtg

SEQ ID NO: 192885 - DNA, 201 bp, Homo sapiens
cccagtttggatgccttttatttcttcctcaccaactctggtgacctttccaccatcagcagccttcctgtccactgctttgatgacacccacagcgactrtctgtctcatagaacaaatagcaaaatgactcagaggatagtcagaaaagctctcaacacaggagcttgccaggaaccatatcgacaatggtagcatcac

SEQ ID NO: 192886 - DNA, 201 bp, Homo sapiens
cataaaccagctataacccattagcaaatgtaactgaaaaaaaactataaagtacctagaaataaacttatcaataaatgtactaattatatgatgaaatktataatatttttttctgaagaatataaaataactgaacaaatggtaaaatattcaatattcctaaatgagaagacacatttttaaagatgtcacgcttta

SEQ ID NO: 192887 - DNA, 201 bp, Homo sapiens
taggtatatagacattttcatatgaagtgggataaaatcttttaggtaaatggatttaaagtgaaggataaatactatagaaaactgcctttttttttttwaatctcagtggtaaaatctaatgttatagagcttttcactcacttctccccacagatatgattgtggaggaaatacattcacctctccagaaatgaaatt

SEQ ID NO: 192888 - DNA, 201 bp, Homo sapiens
agaaaatgttatgttttccctcatgattgaatatcagaatcattttgcttaaggaaaagcatgaataattcttataaataagtatatgtgtacatatttaratatttttaggtatatagacattttcatatgaagtgggataaaatcttttaggtaaatggatttaaagtgaaggataaatactatagaaaactgcctttt

SEQ ID NO: 192889 - DNA, 201 bp, Homo sapiens
catctgggaggaagataagataaatgtattcacagtacaaagtatacagtattcacattgatgtcagaatgggcaaaaagatgatctgtgatgtgacattrgtaataataacacagattgaccttagttggtagcaaataaagtttagggaaacccctcactttcattgtcagtttcactgtttgactggattttctctaa

SEQ ID NO: 192890 - DNA, 201 bp, Homo sapiens
caaatgtctgatgtgggatgtataaatggtccttatatacatgtggaataacattaagtttgttgatgttaaaaactactgggtttttttttttttttttyggtattatttggctcagaatctgtgcttcccattttgttttagaataagctgacagcaaatcattttccacagaacctcaaggtttagttaaactgagag

SEQ ID NO: 192891 - DNA, 201 bp, Homo sapiens
gctatctggggtgtgttaggccattcttgcttgctgtaaagaaacacctgaggctgggtaatttctaagaaaagagatttaattggctcaaggttctgcakactgtacagcaagcatagcaccagcttaagcttctgttgaagcctgaggaagcttacaatcatggcggaaagcaaaggggcaacaggtgcctcacatggc

SEQ ID NO: 192892 - DNA, 201 bp, Homo sapiens
ctgctgtaacaaattaccacaaacctgttgacttataacaacagaaatgtattgtctcacagttcaagagatgataaatccaaatttaatatccttggackaaaatcgaggtgctcctaggtttatgctccctccagaggtgatggagaagaaaacatttcttgtggctcttggcttctggtggctttcagcattctttaa

SEQ ID NO: 192893 - DNA, 201 bp, Homo sapiens
ctgatggagaagctgcagccattcctctgtttcgccttcttctcgggcctccctgttccctgagacacaatattgaaattaggctattaataaccctaccrtggcctctaagtattcaagtgaaaggaagagttgcatatctgtcactttctatcaaaagctaaaaatgattaagctgagtgaggaaggcattttgaaagc

SEQ ID NO: 192894 - DNA, 201 bp, Homo sapiens
tcaggtaaaatatctctccatttgtggacatgttaaagtagaaaacaagttatgtgctttcaaaatacagtggcaaaaaagcatagtatcacagttgtacrcattcctattcccgcaaaaagaaagtgcaatgtagagaggggtcactggttccaatcgatatcaatcatcaacttggtcacttctgtaaaaaaagttacc

SEQ ID NO: 192895 - DNA, 201 bp, Homo sapiens
aaagaaagtgcaatgtagagaggggtcactggttccaatcgatatcaatcatcaacttggtcacttctgtaaaaaaagttaccaggttccagttattaggwtctgatatctttttggggggcaccattgagcccactacagatgatgtaataaaaaacataatttatgaagagatagaaaaactaatatagcagagaaatt

SEQ ID NO: 192896 - DNA, 201 bp, Homo sapiens
aatgccaggccaacatttcacagatgattaaagaacaaataattcccatgcattattaactattctgcagcataaagaagaaaaccttctggctctatttatcaacccagcactacagatatcaatatctgatacagtctgcctgggaaataatcccacttgtggctattattgtaattttctttaaaaatattaacaggt

SEQ ID NO: 192897 - DNA, 201 bp, Homo sapiens
ggcagacagggacaggtccctggtaaaaacccagtcttcaagccaaggacagtttaaatcctgaaaacacaactgacagttccggatagagtccaagaccrgagtgagaacttccatccccatcgtacccactctctcttgattgctcccttctgaattatggcttttaactaatcgaatgatgctctttccaagaccacc

SEQ ID NO: 192898 - DNA, 201 bp, Homo sapiens
ccagcactacagatatcaatatctgatacagtctgcctgggaaataatcccacttgtggctattattgtaattttctttaaaaatattaacaggtgaaaawagtgccttatatacatagtatattcaggtaatgattgtcaggagagcatagtacattcaggtaaacactatcaggagagcaaacattgttttattccaga

SEQ ID NO: 192899 - DNA, 201 bp, Homo sapiens
cctgggattagtgtcaatttagagtcagtgtccagcagtccccaaaagtctgattattttcttttccccagtgtactgtagggaccaagggaaaactcccmctttgctctctaatgattcactgaaaaatcaactgaaaaaagtcagcttaacaggatggaaagtatacaaatttatcaacatgtaaaggaggtttacaaa

SEQ ID NO: 192900 - DNA, 201 bp, Homo sapiens
ttctaaaatccaaataggcccgttagaggtaccgctttcttagttgtagggagagccaaatgcaacaactttttcttcaccttagaagggatatcttgaayttccccacaccactggagctctaaaaatcccattgagacagaatgatcttgaattttagtcagatttactttttaccctctgaaatacaagtgttttact

SEQ ID NO: 192901 - DNA, 201 bp, Homo sapiens
ttcgcaaagcatctgtgtcccagactatcaataataatcaagtagtaactgctggtctcaaatttccacagggtatcaatggtgataccatgttcaggttyggctttcagtttatctaagacccaggcatacttgaagtaactctttcttatctcaacagcctcttcctcaaaattttcgatggttctttggtcaatccca

SEQ ID NO: 192902 - DNA, 201 bp, Homo sapiens
gtaggtcatagtaagccaagatggcgccactgcactctggcctgggcaacagagtgagactctgtcaaaaaaaaaaagaaaagaaaaggagaataattatmtgcaggcccttgcatcaaaatactaaaagtccacactgtgcttcaccaatagaattctaccaaaggctcctcacaccatcccaatctgctggttcatatg

SEQ ID NO: 192903 - DNA, 201 bp, Homo sapiens
gtacccttcaatccaatcaagttgacactcggtagtaaccatcacactggggcctagtagcaggaccatagctgtttttgaaaaggagactagaccgagcscggtggctcacgcctgtaattccagcacttcgggaggccgaggtgggcggatcatgaggtcaagagattgagaccatcctggctaaaatggtgaaacccc

SEQ ID NO: 192904 - DNA, 201 bp, Homo sapiens
tctcctgatagaagcatttctccctctagaaccaaacctctagacaagcatagcatatataaaaaggtgagtttactaagtattaacttatacaatcacarggtcccacaataggctgtctgcaagctgaggagcaaggacagccagcctgagtgccaaatctgaagaacttggagcctgatgtctgagggcagaaagcat

SEQ ID NO: 192905 - DNA, 201 bp, Homo sapiens
ttgaaaaatggtatacacagttttcaaagcccatagtaaatactaagaaaatacagaaagctttatctatcctcagaagccagagaggaaaatcaaatgarcgaggaaagatcttagtagaccaaaacgcatacacaacaggtggcagaaataaattacattaaaaagcaatcataataaattcaaacatacctaactcag

SEQ ID NO: 192906 - DNA, 201 bp, Homo sapiens
gtaaagagtcttccgttgcactataataatttatatatttttacagttgtatttttcatattatgggatacccatgtgtgattaacttatatcacaatagwttctaactcaagtataaattggctacatttttcgttattcttcttcgtatatagctcttcccacagaaaataaaatacatttggggtatttcatggataa

SEQ ID NO: 192907 - DNA, 201 bp, Homo sapiens
tattgctacaagtgaggttagaggtaacatactatttaaaatgcaacttcagataatttttaaaattattatcctgagcactgggatattatttaagtacrtatccctatctcccttaaaaatatttttgaaataatagaaactctgaaattacattttacacttgcggtgtttcagtcactcatgaaatattattaacct

SEQ ID NO: 192908 - DNA, 201 bp, Homo sapiens
ggattgtgtaggaggaactttcagaccacagtttggattttataaaatctaccagcccaacagggaggtctgaaagaaacattgatggttaggagagttcygtgtgaagcaaaaatggcccgacatttgtgtcatagtttgctcaattatctcctgtggccacttcaagaagagtgaccccagctcaaaagctgtgatgaa

SEQ ID NO: 192909 - DNA, 201 bp, Homo sapiens
gatgaaaagcgtctatttataaatatgaacacatactctatacctcagaataaattatttcattccaaatctaaaaatattaatgcaattttgatctttawaaaaggcaacacaatgcttatgttgttgctattactttaatcactacagtaggaaaggtcggatatcttttaaaattctgttgctgaagtaaaaaatgca

SEQ ID NO: 192910 - DNA, 201 bp, Homo sapiens
gtaaatgtcgttgctctggtttagcctttttaattatctgctttggtcatggaaacagtttgtaattgctcttccatcttgcttttctttccattttttttctacatcaatatttatgaacataattctacctctactaaacagcatgttgcataacattaaggaaagacgctctttgtcgaagtcatcattttagcatct

SEQ ID NO: 192911 - DNA, 201 bp, Homo sapiens
gatttaagtattctctgcccttttgtaacactgctcaaggttcacattcctagaaaggcaagttttattggcctggaaacttggaagcctgagaaacaackcagcaggatgacatgggaatgggagagtaatcatttaccaaaggaaagtctaagtctgctgccaaaagaaggcgggggtggaggatgccgagcccgcaaa

SEQ ID NO: 192912 - DNA, 201 bp, Homo sapiens
cttgcctaagctcatttttgttgagtttctgtcacttgcaactggtagaatcctgaatcatataatagcttatacattagtagctgtgacattgtatgttkaatgaaaatattaaaatggaaaaggaaaaattgtatctcacttgaaatcattgtaagaaactttattagccttgccaattttactaacatgttttctggt

SEQ ID NO: 192913 - DNA, 201 bp, Homo sapiens
aggaagagttgcatatctgtcactttctatcaaaagctaaaaatgattaagctgagtgaggaaggcattttgaaagccaagagatactgaaagctaagccrcttgagccaaacagttattcaagttgtgaatgaaaaggaaatgttcttgaaaggaattaaaagggttactcccatgaactatgaagtgaaagtgaaacag

SEQ ID NO: 192914 - DNA, 201 bp, Homo sapiens
aatgtagtatgacaatatttatttttatgaagagccatactactcccctaataagtctgatacacacacacacacacacacacacacacacacacacacamgatggatacacatatatatgtagacatatatacatacatagtcttcatgttatactagagacagtgggagtatagacgtacatggcaccccatccctgga

SEQ ID NO: 192915 - DNA, 201 bp, Homo sapiens
tgtgtatttgtgtatttattttgtccttccaaagctcagggtttccagagcaactatttagttttatataaggttctccttttagtaacccccctcttggmcacagaagagagcatccaccaagcaaaataacaaaacgtttctgctcatgtatttttaaagctggggttatgggataagcatcctttattttggaatgga

SEQ ID NO: 192916 - DNA, 201 bp, Homo sapiens
tatatatacacacaaatatgtgtgtattcccttgaaacttccaccatttctatctaattagaatttttccttgaataaggaaaaggatgggaatccattcygatagtaccagcttgaatcattaaaaattatttagtaagtttttattatgtctttcatgttgtgctatgtgaggtataaaaaagcctcttaagactgggt

SEQ ID NO: 192917 - DNA, 201 bp, Homo sapiens
gcagccaatctctacaaaacttttaatattttttcagcaaatgaaataatgaatgattgaagtcatgtcatataatttattgggattaattaagcccaacscatgttactacacttaatgatctattgatcccataaattttcactttcaaatacagtcacatgccacataatgatgtttcagtcaaggatggactgcatg

SEQ ID NO: 192918 - DNA, 201 bp, Homo sapiens
gctccttcagtgccagcaacacacacacacacacacacacacacacacacaacacacacagcagggggttgggtggaagagagagagagagagagagagagacagagagagagagatcttccttgctgcttcaattctcttacctctagaccttatttttaaaaattcatctactagatggagttcacccagaataagctt

SEQ ID NO: 192919 - DNA, 201 bp, Homo sapiens
ttagtgctctattgactgcatagtgatcacagtaataatatgttgtctatttcaaaattgctgaaagaatagatgtttcaatgttctcatcagaaaaaaggatgagttggtgaagtgatgggtatggtgtttagcttgactcaatgtatcttcaatttacacagagctcaaaacataacactgtatctcataaatatactc

SEQ ID NO: 192920 - DNA, 201 bp, Homo sapiens
tagttccctcttaggaagtgttaagtttcatgagtaaagaaactctatgttgttcaatgctgaattctccagatgtagcaggatgcctggcatgtgatggygatagttcatcatcatcatcgtcattatcatcattggtagcagccaatctctacaaaacttttaatattttttcagcaaatgaaataatgaatgattgaa

SEQ ID NO: 192921 - DNA, 201 bp, Homo sapiens
gttgttgacagaatgtattcccttgaacctgtggaattcatagaagcttgctccttcagtgccagcaacacacacacacacacacacacacacacacacaacacacacagcagggggttgggtggaagagagagagagagagagagagagacagagagagagagatcttccttgctgcttcaattctcttacctctagacc

SEQ ID NO: 192922 - DNA, 201 bp, Homo sapiens
ctagttccctcttaggaagtgttaagtttcatgagtaaagaaactctatgttgttcaatgctgaattctccagatgtagcaggatgcctggcatgtgatgstgatagttcatcatcatcatcgtcattatcatcattggtagcagccaatctctacaaaacttttaatattttttcagcaaatgaaataatgaatgattga

SEQ ID NO: 192923 - DNA, 201 bp, Homo sapiens
ggttgttgacagaatgtattcccttgaacctgtggaattcatagaagcttgctccttcagtgccagcaacacacacacacacacacacacacacacacacmacacacacagcagggggttgggtggaagagagagagagagagagagagagacagagagagagagatcttccttgctgcttcaattctcttacctctagac

SEQ ID NO: 192924 - DNA, 201 bp, Homo sapiens
tgaacattatagctttataaatctttttttttaatttttactttatttgccaaacctgtttctgcctcaaggttttacagtttcacattaccctgttttayttctttatagcacttgtcacttctggaaaccatactatttgtttgctatattgtctagttccctcttaggaagtgttaagtttcatgagtaaagaaactc

SEQ ID NO: 192925 - DNA, 201 bp, Homo sapiens
aggttgttgacagaatgtattcccttgaacctgtggaattcatagaagcttgctccttcagtgccagcaacacacacacacacacacacacacacacacacaacacacacagcagggggttgggtggaagagagagagagagagagagagagacagagagagagagatcttccttgctgcttcaattctcttacctctaga

SEQ ID NO: 192926 - DNA, 201 bp, Homo sapiens
ttaaaaataaagctatataggttaaggaaataataaaaagcaatgtaagtctttaaaaatatatttcaaaaatatgtcatttaaccatatttagcattctyatttaactttaagaaaatactggtttgtatataagatgtatgaaaatatgagctatatagaatactgttccaattgctatagagaatgatattaaatctc

SEQ ID NO: 192927 - DNA, 201 bp, Homo sapiens
ggtccttcaggttgttgacagaatgtattcccttgaacctgtggaattcatagaagcttgctccttcagtgccagcaacacacacacacacacacacacacacacacacaacacacacagcagggggttgggtggaagagagagagagagagagagagagacagagagagagagatcttccttgctgcttcaattctctta

SEQ ID NO: 192928 - DNA, 201 bp, Homo sapiens
agacctgctagtgtttgacactaagttttattttttcccctcttaactaaatgatccattgcccaagtatcttgaagataaataagctaatattagttctrtctttggctatgtagtcctgtgtttctaggagtttacccaattatagtctagtctacttaaatggtcttttgctgtctctcccctctcttctccctcctg

SEQ ID NO: 192929 - DNA, 201 bp, Homo sapiens
ggggtccttcaggttgttgacagaatgtattcccttgaacctgtggaattcatagaagcttgctccttcagtgccagcaacacacacacacacacacacacacacacacacaacacacacagcagggggttgggtggaagagagagagagagagagagagagacagagagagagagatcttccttgctgcttcaattctct

SEQ ID NO: 192930 - DNA, 201 bp, Homo sapiens
ttttactagaataaactaaaagaagttagctagtaagcacttatggccagcgatcacaataatactgtttaaatccacgcagcttatttcaaagtatctgktctctaatttttggaatgaaacaaagataggttctcagccccctggtcagaagtatgtgatttatttctgtactactttctgctttttctttcttgggct

SEQ ID NO: 192931 - DNA, 201 bp, Homo sapiens
ataaaaatcatataattataaaataacaaatacaattggttataaattttccaataatttcaattttccagtgtcaatgttccctttttttttttttttttgacacagagttttgctcccgttgcccagactggagagtgcaatggcatgatcttggctgatcgcaacctctgcctcctgggttcaagtgattctcctgcc

SEQ ID NO: 192932 - DNA, 201 bp, Homo sapiens
atgtgatttatttctgtactactttctgctttttctttcttgggctttagtaactacacagtttgtggaacatactgtgtactcaataggtatttattctktaagttatttactatttcatggtatatttatcttctctatatttttctatatatcttactacctttatagtttatgcttttatagtgcaaaaaatgcaat

SEQ ID NO: 192933 - DNA, 201 bp, Homo sapiens
tgccaatttcacttaattcaccatctgtctttattaacttggatttcctgagaaaatcgaataatttggagaagactgttgcatatgactatatatattcwaaggttgagaaaagaataattgatattcaattatgatccaagttttaaataacattttcaaagcaccagtggtttaagtcatcaatgagataccctcatt

SEQ ID NO: 192934 - DNA, 201 bp, Homo sapiens
caaattgtcttacatcatgatgatatattctgttgatgtattcatatttataattttcttgatcttctgtaagaatctttaatgtacaaatgaaaaaagcsaattgaaaattggcatccaatcaatttcatgagatattctcttaaatgtgtatcttacatatatttttgagtcaggtatgacatagcaaatagaatatag

SEQ ID NO: 192935 - DNA, 201 bp, Homo sapiens
aataaaaatcatataattataaaataacaaatacaattggttataaattttccaataatttcaattttccagtgtcaatgttccctttttttttttttttttgacacagagttttgctcccgttgcccagactggagagtgcaatggcatgatcttggctgatcgcaacctctgcctcctgggttcaagtgattctcctgc

SEQ ID NO: 192936 - DNA, 201 bp, Homo sapiens
ttttaaaataatttactatgctcctcgattcatatatttttatttgtatgttgagacttgcttaaatactttgttggatctgagcaggtagaaatgagaayggttaaatgagtcaggactgtgtgtgttctcatgcagggggtttcaattcacctgaagcttcctgcatcatttcttggcaccattaataaaaccagaaca

SEQ ID NO: 192937 - DNA, 201 bp, Homo sapiens
aatcgcttgaacccaggagatggacattgcagtgagccgagatcctccactgcactccagcctgggtgacagagagagatgccatcttaaaaaaaaaaaaatgaaaaggaaagaaaaaagaaagtctgtgaagtctgactatagaaaaaagtggcaagaggcaagcatagggggcagtgacagaaggggcattttgctttg

SEQ ID NO: 192938 - DNA, 201 bp, Homo sapiens
cagagtaattaatactggaaaatcaattatcattttatttgtacaatcctatgaaatgaaatctgattaataagcagcctagcatgctcatttaaaaatakattgtaatgtggagcgtgtagcacataaaaatgactgttttgcaagttagttcatgcactaggttctatgaaaaaaaaacaagaaaacaggtcgtgggta

SEQ ID NO: 192939 - DNA, 201 bp, Homo sapiens
ttttattctcctgttcattttttatttttgccactgcagtgaagtaacaaaaaatattaataaagtttctgaagcttggataaaatactgcttatctgctrttgatttggttgtttcctttgtctgcaaacatttactaaggagccctgtttatttgatgggcattcagctaaggcctagatttttagaatctaaggtaaa

SEQ ID NO: 192940 - DNA, 201 bp, Homo sapiens
gccacctaggttagcatcagcctctccaactgcaacaaaattcaattgtgtgctgcagacagaagagaccctctaaactaattagacaatggacagtctayttttggaaataagcctgtgacgttaaccaatatcaatgatagaattttcttcccctttgatgttcatagatagccgatagatctgtatttggaattgact

SEQ ID NO: 192941 - DNA, 201 bp, Homo sapiens
aaatgaaatctgattaataagcagcctagcatgctcatttaaaaatagattgtaatgtggagcgtgtagcacataaaaatgactgttttgcaagttagttyatgcactaggttctatgaaaaaaaaacaagaaaacaggtcgtgggtattagcttaatggagactgcaatatagcatacagggaatgttttagaactggaa

SEQ ID NO: 192942 - DNA, 201 bp, Homo sapiens
tctccaactgcaacaaaattcaattgtgtgctgcagacagaagagaccctctaaactaattagacaatggacagtctacttttggaaataagcctgtgacsttaaccaatatcaatgatagaattttcttcccctttgatgttcatagatagccgatagatctgtatttggaattgactagagttcaattgctgttttgtt

SEQ ID NO: 192943 - DNA, 201 bp, Homo sapiens
cttcccctttgatgttcatagatagccgatagatctgtatttggaattgactagagttcaattgctgttttgttagtataaataaaatccgtgccatatartttagttaatttgatatgaaatttaaatacttaatttctaatatatagatgtgttaggattcattctatcaataatataataagaatgctttttgattct

SEQ ID NO: 192944 - DNA, 201 bp, Homo sapiens
gataaggagaaaaatcttaaaaccgactagagaaaaaaaacatgttacctatgttttttaaagatagaagatatcccatgcaataagagacatcagaagasaatggaaaaataatccaaaattgtcaagcaaattaactgtaaaatagaattctataaattgataataaccagtccaggaatagagggaaataaagcatgc

SEQ ID NO: 192945 - DNA, 201 bp, Homo sapiens
tgtaacctcattagatgggaaaaatgcctatattggaaacaatcaaagagattagtggattgaaagagagtagaggattattccccaaaagtagcatagaygaagttaaagtaacaaaggaacagttaacagataccaacaatagtttgaaaataggcaaaataagactgttaggagtgccaagtaaagagaatggaggtt

SEQ ID NO: 192946 - DNA, 201 bp, Homo sapiens
aaaagacacactatatatccataaaggaggtgccacatgagttaagaacatgagtacaatgccttattttaaatattttcacgttaaaatctaaaacaatrtcgatgctattcacatttttacaaaatagagaataattattaattgcccatttatgtttactattttctcaatttgaaattacatatttacatcactagc

SEQ ID NO: 192947 - DNA, 201 bp, Homo sapiens
aaatttatatgttatcaggaaaaggagggcagcttatgaataccaaataggcaaatataacagatattcattgtctagaaaaagaagatgtgactgttacraggtactacagaaaaatataaaagacacactatatatccataaaggaggtgccacatgagttaagaacatgagtacaatgccttattttaaatattttca

SEQ ID NO: 192948 - DNA, 201 bp, Homo sapiens
atttggactcttcgtagttatagtgaaggatgatgaacatttaggaagcattaatgtgtgatttttgaatagtttgggatattttctacaactacctcaaygtgcaagtttgtttacccttttcatatttctaagtatttattagttttgtataggattttctactgtaaaaacttatttgcttcataatgctattttctg

SEQ ID NO: 192949 - DNA, 201 bp, Homo sapiens
aatcgactaacatttattgaacattatagctttataaatctttttttttaatttttactttatttgccaaacctgtttctgcctcaaggttttacagtttyacattaccctgttttacttctttatagcacttgtcacttctggaaaccatactatttgtttgctatattgtctagttccctcttaggaagtgttaagttt

SEQ ID NO: 192950 - DNA, 201 bp, Homo sapiens
gtattcaatcgactaacatttattgaacattatagctttataaatctttttttttaatttttactttatttgccaaacctgtttctgcctcaaggttttayagtttcacattaccctgttttacttctttatagcacttgtcacttctggaaaccatactatttgtttgctatattgtctagttccctcttaggaagtgtt

SEQ ID NO: 192951 - DNA, 201 bp, Homo sapiens
acctgaggtcaggagttcaaggccagtctggccaacgtggtgaaaccccatctctactaaaagtacaagaaattagccgggtaatcacagctacacaggaygctgagtcaggagaatcacttgaaccccggaggctgaggctgcagtgagccgagattgtgccactgcaattcagcctgggcaacaagagtgaaactccac

SEQ ID NO: 192952 - DNA, 201 bp, Homo sapiens
ggttttataaccctgaagcagaaagtcattacaaggagatatttaatcatttacaccatgggagaaacaaagacggggcagggaccaccctgatataaatkaaagcctagtcccctccaagtgtcaccactgcaatgatttaagtattctctgcccttttgtaacactgctcaaggttcacattcctagaaaggcaagttt

SEQ ID NO: 192953 - DNA, 201 bp, Homo sapiens
tcaaatagcttttagagtacatgaggaattctaaaatttagaaatatattaaatctaaaatggagatttttactagtatttatgttatagtatgatgatayattaagctttagtttatttgcaatacatggtgaaaatggcacttgtgaataaaatagacattccagactctaatttttttcacaactagaacctaatgta

SEQ ID NO: 192954 - DNA, 201 bp, Homo sapiens
tgtgtttagagtggaaagataagtatctgcatattcttctctgtaatccaaatgatatatttcgctataactacattttaatctctctgttaaaaattttkaaagaggcaaacaaacttagaatccaatttcctaagaatgattttttatttgaagatttaagcaacagcagattttgtcttttttttttttttcaacaat

SEQ ID NO: 192955 - DNA, 201 bp, Homo sapiens
cgttaacccactttctgcaagctcccacctatatgtatgtatacacacatacgcaaacacacattcacatgctttgtgtttagagtggaaagataagtatstgcatattcttctctgtaatccaaatgatatatttcgctataactacattttaatctctctgttaaaaattttgaaagaggcaaacaaacttagaatcca

SEQ ID NO: 192956 - DNA, 201 bp, Homo sapiens
ctatttttatcatataatacaagcattagttggatttcctagaccatatataacgttaacccactttctgcaagctcccacctatatgtatgtatacacasatacgcaaacacacattcacatgctttgtgtttagagtggaaagataagtatctgcatattcttctctgtaatccaaatgatatatttcgctataactac

SEQ ID NO: 192957 - DNA, 201 bp, Homo sapiens
tacatttaatttcaattaaaaatgttttgaatattccttaatagtattttaaataaaaattaaatagaggtaagcatagagataagtagagaagaaatatrttcagaagtctattggatatgtagaaacttcaagacgggaggatttcagacttgtatttttagtgaaaaaacttcaaaattgattgccttgtaagagatt

SEQ ID NO: 192958 - DNA, 201 bp, Homo sapiens
actaacacaaaaacaaaaaagaaaaaaaaaagaaaaaaaaaacaaaaaaacaaaaaacaaacaaaacaaaacaaaaaaacaaaacaacaacaacaaaaagmaatagtatgattaacttaattttcaatccatatgttattgtatcaatttctgttttagagtccagatatacatattttgattatattaattttaactaaa

SEQ ID NO: 192959 - DNA, 201 bp, Homo sapiens
ttttggttggcattctaatcattgacgcctgttattaagccttggcgaaactcttgtaattcaatcaaaactcaaagagttcatcttgctgttgctataartgtttttctccttgataaatagctcagtgtgacacacctacctcttttacaataaatgctctcttttttgttagttattccctttaaaaacagccacaat

SEQ ID NO: 192960 - DNA, 201 bp, Homo sapiens
taaataaaatccgtgccatataatttagttaatttgatatgaaatttaaatacttaatttctaatatatagatgtgttaggattcattctatcaataatayaataagaatgctttttgattcttctggaatagaatcaattgattcttggtggcaattatcccagggaacaattgtgaggaccctcgttgtaacacttctt

SEQ ID NO: 192961 - DNA, 201 bp, Homo sapiens
ttgctgtctcaggggtagcagaggcagaagaaaattgcatatgagtggacctgcaaagtttaaacctgtgttgttcaagggccagctgtatattagagcasggaagagggagaaaccacaaaaacagtagggaaaagaaaagtcaagaaacacatacatatttctcattgtgtttcagatgctaagattacttcctttaat

SEQ ID NO: 192962 - DNA, 201 bp, Homo sapiens
tatttattttgagacgagtcttgctctgtcgccaggctgcagtgcagtggcgcgatctcagctcactgcaacctccgcctcccaggttcaagcgattctaytgcctcagcctcctaagtagctgggactacagatgtgcaccaccatgcccagctaatttttgtggtttttttttttggtttattcattcaacaaagattt

SEQ ID NO: 192963 - DNA, 201 bp, Homo sapiens
tgcacatgcaaacgtctacttccaactcatgcaaatccgatggataatgcatcacagaaagtctcaataattgtgtacaccagcagctaggagtaaggctyacactacatatatcacatgtgagcaagtgtgacctatgggccatacttcactatgaagaattaagacaacgctaataagcaggggatgttattgcggagt

SEQ ID NO: 192964 - DNA, 201 bp, Homo sapiens
tgaatgaatggggagttggttcttatggatgagccaaaaaaagtggtttcttgggatggaatgcactcctagtaaagatactgtgaacattgttgaaatgmcaacaaaggatgtagactattacgaaaacttagttggtaaagcagcagcaagatttaagaagactgaccccagttttgaaagatctcctgtggataaaat

SEQ ID NO: 192965 - DNA, 201 bp, Homo sapiens
atttatgaatataaaattcatttatgttcaaattcaattactttaattattttggctgttttacatttcaacctggatgctttagcctgttttctactcamctaatgataaaaattattttcaaatataactaaagtaatttaaagtatcatatgacatacagaaaagaacacaaagttacaaaaaaattctattgctttt

SEQ ID NO: 192966 - DNA, 201 bp, Homo sapiens
cttggttaccatgaaaacttaagctaatatcactaatcgttagtcccaatcttatttttattctcagttattatagcctaataaacagttgtaaacctaaygtgtaagttgtgtgtccttgtggcaatagactacaataaaactcatcatttatatttcttaaaggctggggtatgttccagatactctactaaatgattt

SEQ ID NO: 192967 - DNA, 201 bp, Homo sapiens
gctggccaaatgacacctatgaattaaaagcaaacattctattctcatcagtttccacctgggttactgtaacagcctgtgttttaattctttttttgcartctcttctgctgcattcattttttacccaattattatttccatcaagtctttatcttgtgcaaaacttcttcactaaagacagattcaagttcagtgtcc

SEQ ID NO: 192968 - DNA, 201 bp, Homo sapiens
tgtgggttttgtccttggttctgtttatgtgatggattacagttactgatttgcatatgttgaaccagccttgcatcccagggatgaggtcaaggtgatcrttgcagataagctttttgacgtcctgctggatttgctttgccagtattttactgaggattttttcatcagtgttcatcagggatattggcctgaaatttt

SEQ ID NO: 192969 - DNA, 201 bp, Homo sapiens
gacctacttcttgagttacacaaggtcacacagctgattacagatctaagataaggacttggagtacctataccctagtgtgttcattccactgtttcatsaagagcctcttggcgtctgctggccaaatgacacctatgaattaaaagcaaacattctattctcatcagtttccacctgggttactgtaacagcctgtgt

SEQ ID NO: 192970 - DNA, 201 bp, Homo sapiens
ctgtttatgtgatggattacagttactgatttgcatatgttgaaccagccttgcatcccagggatgaggtcaaggtgatcattgcagataagctttttgaygtcctgctggatttgctttgccagtattttactgaggattttttcatcagtgttcatcagggatattggcctgaaattttctttttttgttgtgtctctg

SEQ ID NO: 192971 - DNA, 201 bp, Homo sapiens
gtttgaagctgcagtgagctataatcacaccactgcactccagcctaggtgacgtagcaagactacatctctaaaataaataaacagataattttttacarggattatgctcataaatattgagaaatctggcgtatttcagcgagatctattctgagcttccagaatgccactttttagttataccatcaaaatcaaaga

SEQ ID NO: 192972 - DNA, 201 bp, Homo sapiens
ttaataccaagaatagttcacgtgtgggagctaagagaagaattaatagagtgaagagggttgaaagattgaagcctgggatatttgacaagataaattcygacagaaaatgtgacactgggataatttatctgggaccctgggagctgtagcttagaatattctagagacatttttaatttttggaattcagtatgctga

SEQ ID NO: 192973 - DNA, 201 bp, Homo sapiens
cagctcagtgttatcattttaaaaatcccatttttttccatcactttattttgctgttcttggtactggtttgacctcactctggtaataaagtggttgtratggtcgtagccaatgtccagagaaagaaaagagccaacttttcttgtggttatatcttaagagagaagacactttttctggaagctctctgaaggatat

SEQ ID NO: 192974 - DNA, 201 bp, Homo sapiens
gtaattaaaatgccagaataaaagagcaaaaggaatagatcacaaatattaattagttatgtattagaataaaacttttctgagctgaagaagagcataaytctgttgatcaaaagggttaaatgaataaagttacctagagtatgttcataacattttagaatttgaaggataaagaaaacatttacaagcaccttaagc

SEQ ID NO: 192975 - DNA, 201 bp, Homo sapiens
aaaataatcatgtggaatgaatagctgcaaaaagagagggcagaaatggggcaacctgtatctcatcttttggcatggcaaggatgtgtgagttccccatrggttaaatggatttgccaaaagatatccagacttgagatattttgtgtgtgccataatcaacagggagacctgctgtaaggggacctgggagcaaggact

SEQ ID NO: 192976 - DNA, 201 bp, Homo sapiens
tttttgtttgttgttttcaaactaaaaccaaattttgagcctagacacttgccaatcaattcttattctggtgtaactatacatgtattatgattgacaarttaaaactttacaacattcctcagacaatgggatgcactctcagtggaagaagtaactaaaatatctcaataacatctagtcagatatatgcatgtgtta

SEQ ID NO: 192977 - DNA, 201 bp, Homo sapiens
agtgaggttagaggtaacatactatttaaaatgcaacttcagataatttttaaaattattatcctgagcactgggatattatttaagtacatatccctatmtcccttaaaaatatttttgaaataatagaaactctgaaattacattttacacttgcggtgtttcagtcactcatgaaatattattaaccttaacagagag

SEQ ID NO: 192978 - DNA, 201 bp, Homo sapiens
atattagtcatcacaaacaccactcgtttacaaatgcacagctgccagtatttttgggttatttatgctcaattttgtacttgttttagtttgtacagtakagtgtcagtattctgacatttggtgtttaaagaactgtattaccacatgatatgacatggaacagttgacaaatggcaattttcccagtaatgtttgcct

SEQ ID NO: 192979 - DNA, 201 bp, Homo sapiens
tttgccatgtgacgtgtctgtaccccctttaccttccgccatgattttaagcttcctgaggcctcccccaaagccaggcagatgttggcaccatacttcckgtaaagcctgcagaaccatgagccaattaagcctcttttatttatagattacccagtcaggtatttctttatagcaatgcaataatggcctagcacaatg

SEQ ID NO: 192980 - DNA, 201 bp, Homo sapiens
aactgaacaaaaatgtttttttaaattttaaatagtaaacatttgattttctctggtgcgctattggttattttactaaagaggcagcatcttcaatgctstagttcatttctattcttgatgaggaccctggtgtttaggattttgctgatttgggatataggttatctttaaaacaatagtcagccttcagcatcttat

SEQ ID NO: 192981 - DNA, 201 bp, Homo sapiens
gctgtcagcatcatgccataatttgtgtgcttctatatgcacatgtacatttgctttaatatgtttcaataggaagcatttaaaaatagacttcactttgygctatatcattattgtcaatatctgtggcagggatatggaaatagacactaagtagacaattggttttgacaatataatctaaacattgtgtcatttgtg

SEQ ID NO: 192982 - DNA, 201 bp, Homo sapiens
cacccgcctctgcctcccaaagtgctgggattacagtcgtgagccaccacacccagccagcaattattatcattactcactattgttatatacttggaaarttatttatttatccagaaagaacacatatatcttaaatgcagggaccctatgtcccaattatccagcagggttatacacactaggtactctgtatgtatt

SEQ ID NO: 192983 - DNA, 201 bp, Homo sapiens
tgaaagaacaaggtaagtagaaatagattgtcataatcagaagttcaagtctttaatttgcaattttgtgtttgttagaacaattgtggaagaaactaacwctttgatctgttatttcgtagttaatatttaaccttctatcaactcactagctctaaagttgattgatttcaaggatttcctctattctgtagacccaca

SEQ ID NO: 192984 - DNA, 201 bp, Homo sapiens
cagtagaaattagcaaaaaaaatctgaaattctctatgtcttagtgatttttaccttgaataatatgttacaataactgtgttttctctccaaaggctaayttctaacagagcaaaaacattctatgtttagttttaccacagagatcaaatttttaaattgagaaaatatttttaatctgctggttttagaaataaaaag

SEQ ID NO: 192985 - DNA, 201 bp, Homo sapiens
agtcaattaaacctctttcttttataaatgatccagtctcaggtatgtttttattagcaccgtgagaacagatgaatacatagagctaaaagaaaagtcartggtgatacaggtcatgttaatatagattagtaggcaagggcaactgatgaaattacattttatttttaaaagctatatgaattccttttaggtaacctg

SEQ ID NO: 192986 - DNA, 201 bp, Homo sapiens
tcttgaattgtagctgccgtagttaccatgtgtcctgggagggacctggtgtgaggtaattgaatcatggggggtgggtctttcctgtgctctttcccatratagtgaataagtctcatgagatctgatggttttataaaggggagttcccctacacaagctcgcttgcctgctgccatgtaagacttgactttgaccctc

SEQ ID NO: 192987 - DNA, 201 bp, Homo sapiens
cttacacgttctatgtccttacccaattctaaagccagacagaacaaaacaagtattctaaaaggcaaaaacaaaattattatatttttaacgtgaaaacktaatttatcaattactgtttagagagaaaaaaaatgaggagaacaaggttatgcagcgatatggtttgtctgtgtctccacccaaatctcatcttgaatt

SEQ ID NO: 192988 - DNA, 201 bp, Homo sapiens
aaatatctaaatttgatctatctcccactctctcttttgcttagtctgtcttctcacttatttctatttctctcctactttttctcccttacacgttctakgtccttacccaattctaaagccagacagaacaaaacaagtattctaaaaggcaaaaacaaaattattatatttttaacgtgaaaacttaatttatcaatt

SEQ ID NO: 192989 - DNA, 201 bp, Homo sapiens
tttactctttgaccagcatctcccctttcccatcacattttgtcaacccccaccagcctctgataataggaggaatgagttctggtgacctattgcacagratggtgactatagttaataaaaatgtattatgtattttgaaattgctaaaagaatggattttaagtgttctcaatacaaagaaatgatacatatatgcgg

SEQ ID NO: 192990 - DNA, 201 bp, Homo sapiens
tttactctttgaccagcatctcccctttcccatcacattttgtcaacccccaccagcctctgataataggaggaatgagttctggtgacctattgcacagwatggtgactatagttaataaaaatgtattatgtattttgaaattgctaaaagaatggattttaagtgttctcaatacaaagaaatgatacatatatgcgg

SEQ ID NO: 192991 - DNA, 201 bp, Homo sapiens
gagccagatacacaaattgaatgaggatatggtgggaattgccacccttataccttgcaagttcttgatgatggcactaatttctgtaatccctcagggaygcagtattgcttttgatttactattttcctagatattgacggtagtattgtcttccacttggcctttgccacaatagtagccctcattccataggtcagg

SEQ ID NO: 192992 - DNA, 201 bp, Homo sapiens
caggttttcacctcacaaattgaataccaggccaccacacatgagctgaagaggtcaggctcctcccctgcataaagcacaaatttttggtggctctgccyaatcattccagtgcacatgtgggcccttagtctgagccactacacattgatttatttccctactgagcatgtgttaagggacagaatttttctctgtgac

SEQ ID NO: 192993 - DNA, 201 bp, Homo sapiens
ctgatgtgtcagtgtcaccccaagtgcatgcacatctggccaggttgtgacacaggctcagccacaactttgctcggaaatcacagtgggtgccaggagcraggagaagccaggcagtgagagcaggtacttctgagcacagtgtccgcagctgtgcctgggagtgcagggctcctggcccaccaactcttaaggggacag

SEQ ID NO: 192994 - DNA, 201 bp, Homo sapiens
gaatgtttgtgtctgcccaaaattcatatattgaaattctaacccctaggtgatgttactaggagtgagacctttgggagttgattaagttatgagggtgstgccatcataattgggattaatgcctgtataaaaagggaccacacaaggatccctcaagccttccatcctgtaaggttacagtgaaaagacagctatcta

SEQ ID NO: 192995 - DNA, 201 bp, Homo sapiens
ttgtcgtattctgctccctttttctgaatatatttttatttttatttttcccaagcttccttttcacctttcagttttcggctgaaatgccagcccctctrtgagacctctcttggccacttgaagttcctcctctctgatattatctacatcaataccctgttcattttcttcaacacagttaatgtgattggatttgtg

SEQ ID NO: 192996 - DNA, 201 bp, Homo sapiens
taaacctgacctctaaatcttggctggttcctggattatgttcccttttaaaacttaactttcatttcctctgtgatcatctgttccaaagctttaaataycacatgtgtgacaatgacttccaaatgtatatttctaacccaaacctctcctctcaatttcaggtttgaataagcagctgtctaattgacatcttcaatt

SEQ ID NO: 192997 - DNA, 201 bp, Homo sapiens
atcttgagacagctttttctaataaacatagatctggctctaaattaggtgctactggaagttgtcataaactctgaaattatttccaagtgtttaattcmcttccaggaaaagctggtttctattatatgattttcctacatatggcactgaatcccttaacatgaatgggaatttctggatgtatatttaaaaatgagc

SEQ ID NO: 192998 - DNA, 201 bp, Homo sapiens
ggtaagctcttttcagacttgacctccccccaaaaaatccatttgagtccaatttatggtcaagcaaacattgatactgaagtaatggcatctgtggaatrttggtcaaagtgagccaaatcatgccatgtctgaaaaatgtacgaagtcttagtgggctaacacaacagaagttcattttttgctcatattacatttcca

SEQ ID NO: 192999 - DNA, 201 bp, Homo sapiens
cacttattttccatttttcctccttttgacttctcagatcccattttcttctctgaccagcgcagccactcttcctaactccatccatagaactatatgcyggcacacatgcacacagacatccacacactttctttttctttctatcttgagacagctttttctaataaacatagatctggctctaaattaggtgctact

SEQ ID NO: 193000 - DNA, 201 bp, Homo sapiens
caaaacccagtttccagcccatctccaagtgattcctctctcttgaccttccttaccaaatataatctatttcccttatgtgagcaattggtaaacttacygcaagtaaataaactatattgctgtataaggtaattggtaattttgacattgttattctgttggaattaatatttactcattgcaaaatacaaattagtt

SEQ ID NO: 193001 - DNA, 201 bp, Homo sapiens
aaagtaactatgaacgtctaaactcccataattttcgtaccctaaagatgcaaaactttgggtaagctcttttcagacttgacctccccccaaaaaatccrtttgagtccaatttatggtcaagcaaacattgatactgaagtaatggcatctgtggaatgttggtcaaagtgagccaaatcatgccatgtctgaaaaatg

SEQ ID NO: 193002 - DNA, 201 bp, Homo sapiens
tgtatttacttttagaaatacatattttaacttttaaacctgtactctggtgagactctataggagggtttttttttattttttgtttgtttgtttcaacrtagatcacatcagaaagtcttgaaatgactaggtgctttcttcagagtatttaaattttatgtagttgttaaaaattatgttcacaacagataaaatttt

SEQ ID NO: 193003 - DNA, 201 bp, Homo sapiens
gctcagaaaatatgttgtgacgtgctgtgacaaagcaaatctttaccaatatttctttaagtctaggctaatgaaaacatttttgaggatcttgattattytttcaactatattatataatgtagctttctgaatgctgattaggaataaaaataacttggtaatttcatttcacaaaatatctaaatttgatctatctcc

SEQ ID NO: 193004 - DNA, 201 bp, Homo sapiens
ctcaccttggatcacagctcagaaaatatgttgtgacgtgctgtgacaaagcaaatctttaccaatatttctttaagtctaggctaatgaaaacatttttsaggatcttgattattctttcaactatattatataatgtagctttctgaatgctgattaggaataaaaataacttggtaatttcatttcacaaaatatcta

SEQ ID NO: 193005 - DNA, 201 bp, Homo sapiens
caagaaaggataattttgaaagtgtttcctttaagagaggtttaagatagttctgattgacggggaatatggactcattttgaaagcatcgagagtcccayggaataattagaagttataggcagaagcttccacgaagaaaaggatctatttctcccaggccgaatccatttccaggtgttagtaagaagaaggatgatg

SEQ ID NO: 193006 - DNA, 201 bp, Homo sapiens
ctctctctctctctccctgtctttctgccccgcaaatgctctaggcctctctattattcagtttaaatgccacagaagaggcttctgaaactttcagtggmatacttggattcaggtgtgaccattccacaggtcaaaaattctgggtaatgccttatctagttgttctcatgctatttattagttcacacaatgttttaa

SEQ ID NO: 193007 - DNA, 201 bp, Homo sapiens
agtattgcaagataggagctctagtagtatgttactgccagaacccaagcaaatccaataccatgacattttgtccaactctaggaagtaattccttagargtataatttactagtatgtactaaatactctctcagatagtactggtagcaggaggtggggtgtcgttttgaggggaattcatgagcttgcccatgttgt

SEQ ID NO: 193008 - DNA, 201 bp, Homo sapiens
taagatgtcagacactttcttccataagtggtaatgaataatgggtcaataccaaaaagtagttagaatttgcagacagcactggtagcagaaggtggggygcctttttgaggagaatggcatgagcttgcccatgatgcacccctacccatgaaggtaaagattggaaattctcattccaaccatctaacacttccaccc

SEQ ID NO: 193009 - DNA, 201 bp, Homo sapiens
gcatggagttcagaatttaaaaataacaccattaacataaggattgcttcacgcaatccctcaaagaatccatcttggagaaacagacattcctaaagtgytcactgataaaactccaggtgtcctagaattgcatattgctccactgttcctgagtctacatttcgcaaaacatgagagagcttttcctcctcccttcta

SEQ ID NO: 193010 - DNA, 201 bp, Homo sapiens
tgtagacagatctcatttttactgcttttaaaaagagtccaaagtttggaatgagatgatttgtcttcacctttttgctccgttgactgactggtatatgwtcacgaacagtttacttactgactttccactttctcatctttaaaacagaattgtagggtcaaataagaccactgtacaaaagtattgtttgcacacaac

SEQ ID NO: 193011 - DNA, 201 bp, Homo sapiens
gaaaatgcataacagatttcacagatttcattatcttcttaatttaaaatatcattttatataaccaaatttctaccatattttatttaaggaaaatcagmgcttatgaccttttacatatgcctcttgttatgaaattatgacacagaaatgaacagaatcctcaaaaggctaaggaaatgttcatcaaaatttaattga

SEQ ID NO: 193012 - DNA, 201 bp, Homo sapiens
attaatcataaaataaaatgcagatgattcggcaagctctcccccaattaaatgtgtaagcataattctgattctgccttggtcactggagtgatggagtrtgaaaattgattcatgcttctaaaattaaagatctatggattaataaaagtaacaaaaatatgttaccacaatgaataaggtcacataattgcttgcctt

SEQ ID NO: 193013 - DNA, 201 bp, Homo sapiens
gctttgggcactaattttaagcattaattttggagacacatgaaagttcaaaccatagcattctggattgggtcccccaaaattcgtgttcttcttacatrcagatacattacattcattccatcccaatagtctcaaagtcttaatttgttttaataccaagtcaaaaatctaaaacccagagtctcatctaaatatctt

SEQ ID NO: 193014 - DNA, 201 bp, Homo sapiens
agtcttaatttgttttaataccaagtcaaaaatctaaaacccagagtctcatctaaatatcttctaaatcagatatggatgagactcaaggtatgatccaycctgagctaaattgctcttctgctgtacccctgtgatatcaaaacatttctgttgtttataaattaccctttatagacttttagactttacagactaaag

SEQ ID NO: 193015 - DNA, 201 bp, Homo sapiens
ttaagaggtggagcaatgagcaaatgattaggttatgagggctctaccctcatgagttggatcaatgcccttataaaatggctcaagggaactagctctcrcctttccccttctactgccatgtgaagatacagcattcatccctctgccatgagtggatgcatcaagaacgtgccatccttgaagcagataataagcctt

SEQ ID NO: 193016 - DNA, 201 bp, Homo sapiens
ttctataggagttaagtttttaataaataacatattttacttaaatatcctcccatttactgttatgtaagtgtacatagtaaaattactggctcaaattyacctccagccccaggcagttaactgatgataacttaccaataagtaaaaataagaaaacccatagcagatgaattggttcaaaacatttattcaatggct

SEQ ID NO: 193017 - DNA, 201 bp, Homo sapiens
agagtcttggcgttatcagcagggtgtgtctgaagagaaaatggaggaatatggaaataaaatcaatgttttgttcaaaaaactttattatgtggaaaaamataaaagctaagcttcatgcacacaagtcttcaaaacaaatacaataaaatgcaaatattttcaaaatatgttaaaaattcaggaaaaagcagaaataga

SEQ ID NO: 193018 - DNA, 201 bp, Homo sapiens
ttctaataattacttataaatctacacttaatgtgactcacagatgatgcgtccaacccaatagattgactcatctagatattgccgaatggcgtcttcaygagtaggttgatttctcgcctaattatagggattgtgctttagcccaggtacaatggcccaaagagctttcttcaactcttccaacgtagttatttcctg

SEQ ID NO: 193019 - DNA, 201 bp, Homo sapiens
tattttacttaaatatcctcccatttactgttatgtaagtgtacatagtaaaattactggctcaaatttacctccagccccaggcagttaactgatgatarcttaccaataagtaaaaataagaaaacccatagcagatgaattggttcaaaacatttattcaatggctaccagatgccaggaacaatctcatcactgcca

SEQ ID NO: 193020 - DNA, 201 bp, Homo sapiens
gccattctcctgcctcagcctcccgagtagctgggactacaggtgcccaccaccacgctctgttaatttttttgtatttttagtagagacggggtttcacygtgttagccaggatggtctcgatctcctgacctcgtgatccgcccgcctcggcctcccaaagtcctgggattacaggcatgagccaccgcgcccggccca

SEQ ID NO: 193021 - DNA, 201 bp, Homo sapiens
ttattcaatggctaccagatgccaggaacaatctcatcactgccaatccactctgaacaaaacggataataactcttgccctcacagccttatattttagygatggaaaacatatattaaactaataaacaggtgaaatatacatatattagcagggaatgtaaacaaggagtgtgcattgttggtgagggtttcgtggtt

SEQ ID NO: 193022 - DNA, 201 bp, Homo sapiens
gtaagacaatacaatgaaaaaggtgatgacaatcgtagtaatactacctgctgttgtagggttgcaaactcacagtttactcgggcacatagaaaacggtytatgttatcaataattaatctagttgaatttacctccatttgctgagtagtggggaagaaaaacaagatatagtcctacctactttaaaacatgtttatt

SEQ ID NO: 193023 - DNA, 201 bp, Homo sapiens
gacaagatgggtattagtccatttccatgctgcaaataaagacatacctgagactgggtaatttataaagaaaaagagatttaatggattcacagttccaygtgcctgggaagatctcacaatcatgacagaaggtaaaaggcacatcttacatggcagcagacaagagagagaatatgagagccaagtgaaaggagtttc

SEQ ID NO: 193024 - DNA, 201 bp, Homo sapiens
aacccagaggcaaaagagaaaatggcatacttcaggaatagcaatctaaaagttggctggaaaatgagttgtgggttggggcaaaattgcaatagatgagyttagggagataaataggttttaaaaagcaaaggttcatctcatcattatgtatccaccaaaatattttaaagagagctatagctatagtgtattagaaat

SEQ ID NO: 193025 - DNA, 201 bp, Homo sapiens
tcagcaaaaacacttagggtttccagaaactaaaacagagttaaatatctaatttactgtgaaatgaacagttttaaatatattacattgacttgatttcycaattcaaaatctcaatcaaatgattatagtaaatatcttagctatataagtttatatacctgtcattgttttctaattgggaaagaggaatggaaacta

SEQ ID NO: 193026 - DNA, 201 bp, Homo sapiens
ctaaggatttctatgccttggcttgaaaaaaatacaaagataactgaacaaaaatgtttttttaaattttaaatagtaaacatttgattttctctggtgcrctattggttattttactaaagaggcagcatcttcaatgctctagttcatttctattcttgatgaggaccctggtgtttaggattttgctgatttgggata

SEQ ID NO: 193027 - DNA, 201 bp, Homo sapiens
cttagggaagtagattaattctatgttaagacacagatgatttgtttcttcagtgacatgttggattacacttttaattcagttgctgattgtatgctctktacaattttcttcattttagatttctagacctaatttttgttgtttagatttctagaaaataatttttgttgttgttgttgttgttgggttttttttgtt

SEQ ID NO: 193028 - DNA, 201 bp, Homo sapiens
caaatttttctttagaaaagtagcttatttctcttcttattttcctctaaattcctatgaacacttattttccatttttcctccttttgacttctcagatyccattttcttctctgaccagcgcagccactcttcctaactccatccatagaactatatgccggcacacatgcacacagacatccacacactttctttttc

SEQ ID NO: 193029 - DNA, 201 bp, Homo sapiens
attcacctcagttctcttttctgtcttgattactaacatccttaatatcccactgcttatacctgttcatttcttctgaaactgtgttttcttgaccttcrttgtataacatgttgtgaatcattgcttgtcaaggtaagctctcactggtcaggcaggactcaccaggatgggaagttgagggattttatttaggcttga

SEQ ID NO: 193030 - DNA, 201 bp, Homo sapiens
aaaggcaccaactagtaccaccaactgaaaaatgctttaaacaaagaagctatatatgaaaaacccctatatataaaaaagaaaaaggaaagcatcccaawagaaacatggaaaaatgatataaataggcagtttattgaacagaatatttgatgtttcaaaaagcacataaaaatatgtttagtgttttagaattttaaa

SEQ ID NO: 193031 - DNA, 201 bp, Homo sapiens
gttcttgacaaagtactgagtgtagaaaagtcttcagtaagatcactttaatctctgatatgctattcttacagtagaatattaaatttcaaacatatgtmctatttaagttttgttttataatatcatcctgtaatactcaaatctccatcagatatgcaagtaaacttaaacaaatacttaagaatcaattttcacacc

SEQ ID NO: 193032 - DNA, 201 bp, Homo sapiens
tctgaatagtttctgtacttacattccacatccaaaggaaaaactcaaatgctctccattggtttcacaccatagtctaacatcgtttgcactgttaactrtggcccgctcctgttgcttgtccatgtcacacattttttcctaatcacctgaagttcttgacaaagtactgagtgtagaaaagtcttcagtaagatcact

SEQ ID NO: 193033 - DNA, 201 bp, Homo sapiens
agtaatgggatatggcactgccagtgctggcttcagaaaggcctatctgaaattcgggttccgtgaagaatatattgtagagagaaacagaaagaatgatrcttggctttctttcagggtttgtccaaaagccattacttccttttatatatgacttttggaaatgatttgactgttgcaactcagaccaaccagattctt

SEQ ID NO: 193034 - DNA, 201 bp, Homo sapiens
aaattgatctgctcttgactgatgagtatctactactactgcttgcctttaaacaactgaatgtactttcttttgctcttacactttccagaaagtactayggacataacaaagagctagcagaagttatgggagtaatgggatatggcactgccagtgctggcttcagaaaggcctatctgaaattcgggttccgtgaag

SEQ ID NO: 193035 - DNA, 201 bp, Homo sapiens
gactaggttctcagatacatcttatttgtgccctactttttcaaagtaggagatttactcacttttctatatttatccaggaagaatgaaggggaattcaygtaattgctgtgtttaatagaacctagccatgaaaaatagtcttaattcttccatttcattttaaaaaactaagtctcttaacacacagatattcacaca

SEQ ID NO: 193036 - DNA, 201 bp, Homo sapiens
gaatagctgaatgtgattttgtttgtcattatggcaaagcacaacataaacagcaaatgtcttaaatccccacgttcaaaattattaataaataaatcaaytaatcaatctcaaagctctatttaggaaacaaggctaaccagggatctctggtggagttaaggcagagtcagaaagaaaaaaaaaggctgccctcttact

SEQ ID NO: 193037 - DNA, 201 bp, Homo sapiens
ttttcttcttttacctcttggaacgtaaataagcgtagtttatcttcaaatccgttaggagcaatgattattttctgatactcaaaaaggcattttacaasaaagaccattgcccagactgtggaaggtctgaaatatttctgtaataactgtgtaataagatagcctgctgcagatcctcggatgctaggagaagacatg

SEQ ID NO: 193038 - DNA, 201 bp, Homo sapiens
ccattgaatagctgaatgtgattttgtttgtcattatggcaaagcacaacataaacagcaaatgtcttaaatccccacgttcaaaattattaataaataartcaactaatcaatctcaaagctctatttaggaaacaaggctaaccagggatctctggtggagttaaggcagagtcagaaagaaaaaaaaaggctgccctc

SEQ ID NO: 193039 - DNA, 201 bp, Homo sapiens
tcagtttgcttgagtctatatcaattgtttatttccttaacttgttagttttggccgtcagcaacttatgtaaccttttctaaactttaattttctcaackgtgtaattaagaaaataaaaaagactatttcaaaggtcgttataagacccaaataaaataatgtgtggaaatgcattgtaaactgcaaaccaccatatgt

SEQ ID NO: 193040 - DNA, 201 bp, Homo sapiens
acattttattcttacactaaataccattgaatagctgaatgtgattttgtttgtcattatggcaaagcacaacataaacagcaaatgtcttaaatccccamgttcaaaattattaataaataaatcaactaatcaatctcaaagctctatttaggaaacaaggctaaccagggatctctggtggagttaaggcagagtcag

SEQ ID NO: 193041 - DNA, 201 bp, Homo sapiens
gtcagatcatggaatttcctactaaaaactcactccacattaaagctataactctcttttgatgatctaatatcctgtatgctctgcccagtccacacatygccacagcttgagtctttgaccttgtattctactactctggtcctccctcactcctgctccaatttcctgctcctcctcactggctccagtggaaatttc

SEQ ID NO: 193042 - DNA, 201 bp, Homo sapiens
gatgatctaatatcctgtatgctctgcccagtccacacattgccacagcttgagtctttgaccttgtattctactactctggtcctccctcactcctgctscaatttcctgctcctcctcactggctccagtggaaatttctctagcacaggggcatcattatacctcagggccattgtactagctgtcttctctgcctga

SEQ ID NO: 193043 - DNA, 201 bp, Homo sapiens
tatcagagcatgtggagaagcaggaatgactgttacatatcagggaagaacttgatgtgtgtgttggtgtatagacatatttgtgtatgagcatgcatgtmatgcatgtgtgtacatgggcatgagtctaagcactgaaggtaaggctgaagaatttagcaatagtcacaaaaagtgggtctttagatgccattgataaaa

SEQ ID NO: 193044 - DNA, 201 bp, Homo sapiens
gtggaatggggttttaatttgaatagaaagtattgagtagaggtgggggaagaaaagaaactccaagcagttatcagagcatgtggagaagcaggaatgastgttacatatcagggaagaacttgatgtgtgtgttggtgtatagacatatttgtgtatgagcatgcatgtcatgcatgtgtgtacatgggcatgagtcta

SEQ ID NO: 193045 - DNA, 201 bp, Homo sapiens
ttatgtttttcatgaagattgatatgttaataaacaggttcttagtcatgtttccaaaataggaaaagctagaatccaggattcagataatacgatatctyggtcctgaaaggggagagagagagagacttgacctcctcacaggtgtgtagtcaatttatttttaggcaaatttagatcacacgctagccctcttgcccg

SEQ ID NO: 193046 - DNA, 201 bp, Homo sapiens
gagaagacaaattaacagattagctgtgacttttaaagaaatagtgccaattccatgattattacgctatttttaaataacaaagacaacatgaaaagtgstagatttcctgctccaaggactttcctgaataattaggaagcaaagaatatcatgattagaacctattcttgtgtaataaattgccagtgccaaaatata

SEQ ID NO: 193047 - DNA, 201 bp, Homo sapiens
agggaagtcttcgtacaagagggaggatttgaaacaaatatttaaaaattaggtttaaggtaaatgacaaaggaaatgatatggataaaaaggaaaatttrgcataaatttgaggaagggaggtgaggcacatttagcccatcacaattgaagggagtgagtgaagtctgtaagaatgcaagcatatcaaaatatgccgta

SEQ ID NO: 193048 - DNA, 201 bp, Homo sapiens
tctatgtctagccagaatattgtatgtgatacaagcagactttaaggttatatggggttttacaattccattggagataggaacggaaagggaagtcttcrtacaagagggaggatttgaaacaaatatttaaaaattaggtttaaggtaaatgacaaaggaaatgatatggataaaaaggaaaatttggcataaatttga

SEQ ID NO: 193049 - DNA, 201 bp, Homo sapiens
ttctgagcttcttggggacaaaggtaattgcatttatatttgtgtctatagtacttaacagagagagtgttctcattaaacttttgttgaatgaatgaatsaatcctggaaggtctggagaaaagaataacacaaaaatgttattagaaagttgctgaatatagaaagactattccaatagtcataaaatattcattaaga

SEQ ID NO: 193050 - DNA, 201 bp, Homo sapiens
acaaaaaaggcaccaactagtaccaccaactgaaaaatgctttaaacaaagaagctatatatgaaaaacccctatatataaaaaagaaaaaggaaagcatyccaatagaaacatggaaaaatgatataaataggcagtttattgaacagaatatttgatgtttcaaaaagcacataaaaatatgtttagtgttttagaatt

SEQ ID NO: 193051 - DNA, 201 bp, Homo sapiens
gatctaatatcctgtatgctctgcccagtccacacattgccacagcttgagtctttgaccttgtattctactactctggtcctccctcactcctgctccartttcctgctcctcctcactggctccagtggaaatttctctagcacaggggcatcattatacctcagggccattgtactagctgtcttctctgcctgaaat

SEQ ID NO: 193052 - DNA, 201 bp, Homo sapiens
ccctgtctctatggaaaaaaaaaaaattagcccagcaggctggcatgcacatgtagtcccagctacttggcaggctgaggtgagaggattgctggagcccrggaggctgaggctgcagtgagccattgtgccactgcactctaccatggctgacagccagaccctgtcaaaaaaaaaaaaaaaaaaagaagaagaagagta

SEQ ID NO: 193053 - DNA, 201 bp, Homo sapiens
tgaccttgtattctactactctggtcctccctcactcctgctccaatttcctgctcctcctcactggctccagtggaaatttctctagcacaggggcatcmttatacctcagggccattgtactagctgtcttctctgcctgaaatgtgctttctccaaatatgtgcaaatatgtgcctcatcacctttaaatctttactc

SEQ ID NO: 193054 - DNA, 201 bp, Homo sapiens
cagcagttcatgactagactgggcaaaacagtgagaccctgtctctatggaaaaaaaaaaaattagcccagcaggctggcatgcacatgtagtcccagctrcttggcaggctgaggtgagaggattgctggagcccaggaggctgaggctgcagtgagccattgtgccactgcactctaccatggctgacagccagaccct

SEQ ID NO: 193055 - DNA, 201 bp, Homo sapiens
actcaaagaatagcttctcatttcctgataattggatttaaaaaactgcaagcacattcccccaagaaatctttttcttctttattttttttctatagcayttaataccattagacattgtagattgagcacattaatgttgttcttattcctttcattagaagataagctccctcatggaaggaattttgtgtgttctag

SEQ ID NO: 193056 - DNA, 201 bp, Homo sapiens
agagatgtgtatcaggaattagttggatgatattataaagtagaagcagagaaaagggttaaacacatatagggacttagaacatgaagatagatgtgatrgtaatagcgaatactatcactcacattaattatagagtacatattatgagccaggaacactaataaatgcttcatgtatattatctgaaaagaccagttt

SEQ ID NO: 193057 - DNA, 201 bp, Homo sapiens
ttggcagcgacatctgagcagctccctcagtcagtcttctttacaaattctctgttatctccctaaatagtctgtggctgttccttaaggaaaaaaatgaraaagcagtttttaaaattttgaacatttgtgtgtgtgtgtgtgtgtgtgtgcgtgcgcgtggatgtgtttgagcccacagcaattcaatttttgaatagt

SEQ ID NO: 193058 - DNA, 201 bp, Homo sapiens
ggcactaagaccaaatgagtcttgtctgtagaagtaaggtgactttaagtaatgacatctgtataaataaaccttgcaatgattacaattttacaaaaaaktaactcttactaaatacttcattttctgtaaagaatacagtgccaatctggctgattattgagcaattgattatagtctctgataaaaatgttgaaacca

SEQ ID NO: 193059 - DNA, 201 bp, Homo sapiens
cacaagcttctggaagtgacaagatagctggagagtcaggtttagacaggaatgagtatccaattatttctgttatgatttaggtacagctgttttcaccytgtcattgaatcactccactcaacatttaaagccctgggagacagggtgtaatgtgccaatgtgacagaatcatctgtctccctttggttagaggaggac

SEQ ID NO: 193060 - DNA, 201 bp, Homo sapiens
gaaagggcacttgccagcaactatttcctctaatagaacttttctatatgcttcaccaacatctacttacatctcattggccacttcttcatgtaagaaayctagggaatgcagtcatttaaacagatttattttcactatctttcttgttaccaagtaagcaaaagagaatggatactgggtgggcttggagcagtctgt

SEQ ID NO: 193061 - DNA, 201 bp, Homo sapiens
ttgctgtgtgctccaatcacctatatttacaaaaacaggtggtggaccaaatttgttccctgattagttatttgcttacccctgtctagtttatgtgggcytcctatccctaacacatagcctccatattaaagttgtctatttagtacaagaaacttctgggtttgcagccaacatgtcaccatttcaggtggtaaggtg

SEQ ID NO: 193062 - DNA, 201 bp, Homo sapiens
tcagacaggcctcaggaatcatcctagttcatgaccatccaaggacaccaagggggtttgggaaatggccatgttaagaaagggagagagctcagggagcragttaagaagctatcacaacaatgcaagtgagagagaaaggaactcaatgaagatactgacatttcagaaatgtaagagtgatcaggtttctgggttttt

SEQ ID NO: 193063 - DNA, 201 bp, Homo sapiens
accaaaaaatgatactactctcagtgtaaccttttagcacttttatctcatcatgattggtaaatataattaagtattagaattgatggtcatggaatggraaaaaacccttcataacaggatcagatcataacctttgaaaggaacataattacagaggtgaaggatttgggttcaacgtggactttctgttattactat

SEQ ID NO: 193064 - DNA, 201 bp, Homo sapiens
tctgtttgtctgtggttggtgtataggaatgcttgtgatttttgcacattgattttgtatgctgagactttgctgaagttgcttatcagcttaaggagatwttgggctgagacaatgggtttttctagatatataatcatgtcatctgcaaacagggacaatttaacttcctcttttcctaattgaataccccttatttcc

SEQ ID NO: 193065 - DNA, 201 bp, Homo sapiens
gttcactcatgatttggctctctgtttgtctgtggttggtgtataggaatgcttgtgatttttgcacattgattttgtatgctgagactttgctgaagttkcttatcagcttaaggagatattgggctgagacaatgggtttttctagatatataatcatgtcatctgcaaacagggacaatttaacttcctcttttccta

SEQ ID NO: 193066 - DNA, 201 bp, Homo sapiens
tccatacattctctgaaattcaggcagaggtttccaaatctcaattcttgacttctgtgtacccacaggaccaacaccacatggaagctaacaaggcttcrggcttgcaccctctgaagccaaggcccgagtcataccttggccccttttagccatagctggagcagctggaatgcaaggccccaagtccctaggctgcac

SEQ ID NO: 193067 - DNA, 201 bp, Homo sapiens
tgtatcctcttttagttccttgagcagtggtttgtagttctccttgaagaggtccttcacatcccttgtaagttggattcctaggtattttattctctttraagcaattgtgaatgggagttcactcatgatttggctctctgtttgtctgtggttggtgtataggaatgcttgtgatttttgcacattgattttgtatgc

SEQ ID NO: 193068 - DNA, 201 bp, Homo sapiens
aatggtcccgctctgccagaatataaggttgcattctgagaagatatatttgattcttgtaagactcagaggtggagtcagggaaatagtgaattcagatwaatgtaagaatatagccttcaaaatatatactaaccgtggctcatagcagcaaaatgttcactagttacactgtcacctctaattcagaaccaaacagac

SEQ ID NO: 193069 - DNA, 201 bp, Homo sapiens
ttagttacatacatatacatgtgccatgctggtgtgcttcacccactaactcgtcatctagcattaggtatatctcccaatgctatccctcccccctcccmccaccccaaaacagtccccagagtgtgatgttccccttcctgtgtccatgcaatctcattgttcaattcccacctatgagtgagattatgcagtgtttgg

SEQ ID NO: 193070 - DNA, 201 bp, Homo sapiens
tccattgaaactctgaagttgcttggaatgaggcacacagcttttcctccagagcctggttgggctttgaggtcaggttcctgcagtttgtctgtgaacayagacaagaagttggttgcaaccctttaaactggtggttgcatgttgcccatgttgtatgacaaatctgtagacttgctacatatattttgggttggaata

SEQ ID NO: 193071 - DNA, 201 bp, Homo sapiens
tgtgcaggttagttacatacatatacatgtgccatgctggtgtgcttcacccactaactcgtcatctagcattaggtatatctcccaatgctatccctccsccctccccccaccccaaaacagtccccagagtgtgatgttccccttcctgtgtccatgcaatctcattgttcaattcccacctatgagtgagattatgca

SEQ ID NO: 193072 - DNA, 201 bp, Homo sapiens
ttgtcatttcagtctgtgtttttccctttctctgtccctctctccttcacttttaacacacataagcataaaagatttgtttgagatttccagaaataatsaaataaatgtttcagttattaatggcccactggaatatgtatatttttcaaatactctaaaacttatttctggttattatggtaacataattatttacac

SEQ ID NO: 193073 - DNA, 201 bp, Homo sapiens
taaggatgcagagtgagaaaatatcactcactaagtaaggtttagcagtataattttccaatacatttctttttttattatttttttatttttttattatyatactttaagttttagggtacatgtgcacattgtgcaggttagttacatacatatacatgtgccatgctggtgtgcttcacccactaactcgtcatctag

SEQ ID NO: 193074 - DNA, 201 bp, Homo sapiens
acacagaaatgacactaaaatttatttaaaaataaacactgtgatccttctctcccaggttgcagcagtatagagctatatcagtaaaaaaaaaaaaaaaactcagggtagtttgtttctttttttttttttttcttttaacaaaaaaaaaaaattaaaaaaaaaaaaacagattatcaagaattctagaaaccctgaaat

SEQ ID NO: 193075 - DNA, 201 bp, Homo sapiens
ttaaccacctgaagtaacaagcatgaaaggcagaaatatgctactgttttttcctcttactaatgatgatatttgatttgcaaagttccgtttgcctttaycaaggtgtttgtttagaataggctaaggacatgtttctcaaaccacatttacccccatagaattgctttcattagggttttgtgtttttttttttttttt

SEQ ID NO: 193076 - DNA, 201 bp, Homo sapiens
ctttgaggtcaggttcctgcagtttgtctgtgaacacagacaagaagttggttgcaaccctttaaactggtggttgcatgttgcccatgttgtatgacaaatctgtagacttgctacatatattttgggttggaatatagcatttgattttgcctacatcttgagtgtcaagtaatgagtttgtagttcaggttaaccacc

SEQ ID NO: 193077 - DNA, 201 bp, Homo sapiens
taatgttcctttgacattaagctgcttaaagtattcattctttcagtgctgcttttccgctttacttgcactcctattgtgtctctggttctttgtttttytccagtggtttgaacattgcctggcataaaacaggtacctaaaaagcactgaataagtaggtgaactctgataatgcccctttcttgattagggatgatg

SEQ ID NO: 193078 - DNA, 201 bp, Homo sapiens
ccaaatgcccatcaatgatagattggataaagataatgtggcacaaatataccatggaatactatgcagccataaaaaagaatgagtttggctgggcatgktggctcacgcctgtaataccagcactttgggaggctgagatgggtgggccacaaggtcaggagattgagaccatcctggccaacatggtgaaaccccgtc

SEQ ID NO: 193079 - DNA, 201 bp, Homo sapiens
tgtacaaatactctacctctgagaatcagcatgatgtagacaaagattttttttttagagcacatatttaaagtgaggtctttttattttattcatttcayctttctattttctgtgaatggtctttttggcttttcttctctgtttatgatgatgattattcttttggaattctaatacaatatattccccagttaagat

SEQ ID NO: 193080 - DNA, 201 bp, Homo sapiens
tacagttaattttatgcaagtccgatttgctactggatctttatgtttgtttacatttctctcagctgcaaatggtgccatgtattgtttgcagctgttcrtgtgtgtatgtttcaatacattttcacttttaataataaatgtatgtatactttatggtagtaaatgataaactaaactagcatctacatatcttttatg

SEQ ID NO: 193081 - DNA, 201 bp, Homo sapiens
attgaatgaaacattggttaagtagctgctttttaaaacacagtaagtttgtctggctcttgggtctactatcgcccggattttctcttaagtcttttagrggacaaattgacttcaaagggaattgccttcatgaagtacctaatacattgactaaacaagagattgcaagaagtatttggagaaagttttagttgggat

SEQ ID NO: 193082 - DNA, 201 bp, Homo sapiens
tctcctttgaggataaaaatgtctgactgatatcaaaggcttagtgtaattttcaataaacatcagatgttatttatattgttactattttatattttagyatttaatgctaccaatttactatccaaatattctagattaggaaactgaagtttagagaaatcaaataagttacaaaacttgtaactgttggagaccgca

SEQ ID NO: 193083 - DNA, 201 bp, Homo sapiens
aaaaaagttagaaataatatgtggtaaaatattacatattaaaactcttacaacagaattattatagaaatttacaggaaatttatatctgcaaacaattyattttgtgggaggaagaccaaaaaattaatgaccaaattatcaactttaaagccaggatgaactccaaaaatttgaggagagttaaacacatttgtaaga

SEQ ID NO: 193084 - DNA, 201 bp, Homo sapiens
ataacaaaagaaatgaaaaccttaaaagaaaaaacccatgaaggaaattcagtcagtaattaagaatcagttcaccccttcattcattgatattttcaaargcaattttagcaaatattctgaagcatacttacaaatttaaatttgttacaaagtaaagaagttacaaagaaaggaactgtttcccactcattttatgac

SEQ ID NO: 193085 - DNA, 201 bp, Homo sapiens
ttatctccctaaatagtctgtggctgttccttaaggaaaaaaatgagaaagcagtttttaaaattttgaacatttgtgtgtgtgtgtgtgtgtgtgtgcgygcgcgtggatgtgtttgagcccacagcaattcaatttttgaatagtcattcagttaagtctgacccaatttgtatcattaatggcttcattgatatgcat

SEQ ID NO: 193086 - DNA, 201 bp, Homo sapiens
aacccaatagattgactcatctagatattgccgaatggcgtcttcacgagtaggttgatttctcgcctaattatagggattgtgctttagcccaggtacartggcccaaagagctttcttcaactcttccaacgtagttatttcctgctacaaactaagcaaagtggcacatccactgactagaagagaaagccagaatta

SEQ ID NO: 193087 - DNA, 201 bp, Homo sapiens
tttgtgtgtgtgtgtgtgtgtgtgtgcgtgcgcgtggatgtgtttgagcccacagcaattcaatttttgaatagtcattcagttaagtctgacccaatttktatcattaatggcttcattgatatgcatataaatgatctcattctatttaaaggtcacagtcttcaaaaagcaattctaatgctgttacatgacagcaat

SEQ ID NO: 193088 - DNA, 201 bp, Homo sapiens
ttgatctttattgccattccctaaagccaccagctctcacacaatattggaacagcctcttaattggtcttcccccttccattcttgtcctattcatatcyactgattaaagtggacttcttaaaatataaatcagtcatgttaatctcctgcacaaaaatatttcaatggtttcataatttacttatgacaaattgtact

SEQ ID NO: 193089 - DNA, 201 bp, Homo sapiens
tatttaaaggtcacagtcttcaaaaagcaattctaatgctgttacatgacagcaatagaaactctgatgcctaaatttggaaattttcttgtaagtcatgmtctaaggaaaatgtacagatgaagatatcatccatttatcagaaatgtctaataatgtggacaacatagaattttaggagatatttgaaaagattttact

SEQ ID NO: 193090 - DNA, 201 bp, Homo sapiens
cagattgtaatacaaaactgatgcttttgaaaagagaaggggatatgcagggttggtcagaaatagcctcagaccacagtgcagacctgataaattctcawccagcccattggggagctctggaacaaatatggaccatttaaggggtctccattgtacagaaatatcatggtcctaatacatccatcatctttttgttat

SEQ ID NO: 193091 - DNA, 201 bp, Homo sapiens
ctctaatgtttatgttttagagacctatacatacataaagaaagcataaattcatggacatgatgaatgccagactgaagaaagtggttatctatgaggasagaggatgggagaggaagtaaggaggccaatacagggagcttcacttgttatttgtggcatttcatttcatcaaggggtgaagagaacacaggtcttttt

SEQ ID NO: 193092 - DNA, 201 bp, Homo sapiens
tattaaatcagttaaataaagccgacatgtgcaatcacatttggtaagtaaataatttttaattagaaactttaaaaaatatatttagcatacttttaagrgtggagcatattttccgcacagtcagtactgctcctcaatttgtgtttaactttatttttctaatccagaaaccaatgagctggtaagtgtgtagaaaac

SEQ ID NO: 193093 - DNA, 201 bp, Homo sapiens
tcagagctttgttctgtgtctctttcttccactacactcttgccccatatgtgatggatagtgtctatttttcccctttagatcctccctttatccttgtyttgaggctctgtgcctcttgagattgtttgaaattggtgagactgatcagtggtggtctgtgtcctctggcttatggtgaggtttggtcagtgtgaggca

SEQ ID NO: 193094 - DNA, 201 bp, Homo sapiens
ataaaaaatcaaagcaatttacttacatctaatagcatttaaatatctaattactgaatttaggttaaaaacaaaatgctgcattttggaaagaagggtgktgatctgctttttctagggaaagaggccagagagtggtcacaactatagcaacttgtccccaagtggacagcataccaaaataaatgtccagggggtcag

SEQ ID NO: 193095 - DNA, 201 bp, Homo sapiens
ttaggggatgggttgaggtaggataaagtgggggaggctttttccacctctaatctctaaatataagaactcgtctcctcagagctttgttctgtgtctcyttcttccactacactcttgccccatatgtgatggatagtgtctatttttcccctttagatcctccctttatccttgtcttgaggctctgtgcctcttgag

SEQ ID NO: 193096 - DNA, 201 bp, Homo sapiens
ccacaaaactacttgcatctgtatccatccttaagattaattttggccctcacagactttctgggacttatctctccctcttttctaaggagtttaaaacwctactcagcttctctctcctgaagtttgaaccagtctcactaataaactcttctcattaactttaaaatcgattccagtaatttctacaagaaaaaaaaa

SEQ ID NO: 193097 - DNA, 201 bp, Homo sapiens
tcaacagcctcttcctcaaaattttcgatggttctttggtcaatcccaccacatctgtagatcaaatggccagtagtggtggacttgcctgaatcaatgtrtccaattttgacaatgttgatgggagtctttttcttttctttcccatttgactttagggatggttttcatgacactggtgttctagctgcaaacgtattg

SEQ ID NO: 193098 - DNA, 201 bp, Homo sapiens
ccagtttcagttttctgcgtatggttagccagttttcccaacatcatatattaaataggaaatcctttccccattgcttgtttttgtcaggtttgtcaaasatcagatggttatagatatgtggtgttatttctgaggcctctgttctgttccattggtctatatatctgttttggtaccagtaccatgctgttttggtta

SEQ ID NO: 193099 - DNA, 201 bp, Homo sapiens
tgatagatttggaatagagttatgaggattggttactattatataaaataacattaaagtattggaacaaatttacactcccaccaacagtgtaaaggcaktcctatttctcgacatcctcttcagcatctgttgttttctgactttttaatgacaccattctaactggtatgagatggtatctcattgtggtttttgagt

SEQ ID NO: 193100 - DNA, 201 bp, Homo sapiens
cacattgtatgcatatgtgaaaatatcatatgtacctcataaatgtgaacaactattatttattaattttttaaatggtggcaatctcaaatggtgtctttatgagatatgtatgtactttgagtgaatgaaagtcatagataatacagtaataatctgtgtaaactccaaagctaaaactgcttctgtcgaaatggtttt

SEQ ID NO: 193101 - DNA, 201 bp, Homo sapiens
acacattgtatgcatatgtgaaaatatcatatgtacctcataaatgtgaacaactattatttattaattttttaaatggtggcaatctcaaatggtgtctttatgagatatgtatgtactttgagtgaatgaaagtcatagataatacagtaataatctgtgtaaactccaaagctaaaactgcttctgtcgaaatggttt

SEQ ID NO: 193102 - DNA, 201 bp, Homo sapiens
tacacattgtatgcatatgtgaaaatatcatatgtacctcataaatgtgaacaactattatttattaattttttaaatggtggcaatctcaaatggtgtctttatgagatatgtatgtactttgagtgaatgaaagtcatagataatacagtaataatctgtgtaaactccaaagctaaaactgcttctgtcgaaatggtt

SEQ ID NO: 193103 - DNA, 201 bp, Homo sapiens
aagtgatcctcccaccttaacctcctaagtagctggaactgcaggcgcacaccaccacatctggctaatttttgtatttttgtggagacgaggtctcactstgttccccaggctagtctcaaactcttggtctcaaagcatcctcccaccttccccaaagtgctgggattacaggcgtcagccaccatacctggcctaatt

SEQ ID NO: 193104 - DNA, 201 bp, Homo sapiens
gctggagtgcagtggcgtgaccttggctcattgtagcctcaacctcctgggcttaagtgatcctcccaccttaacctcctaagtagctggaactgcaggcrcacaccaccacatctggctaatttttgtatttttgtggagacgaggtctcactctgttccccaggctagtctcaaactcttggtctcaaagcatcctccc

SEQ ID NO: 193105 - DNA, 201 bp, Homo sapiens
gtatcacagtttgttatgcagcacaattgctttatgcatattccccatttcaccacaaacaatactaaaaaattgtactcaagagtaaatatttaataaaatttttactgcttcatcaaggacattttaaagctttgtttaaaaactgtaattcatagcaacgaacaaggcattaataacaagtatagttaggtgctactt

SEQ ID NO: 193106 - DNA, 201 bp, Homo sapiens
aggagtttaaaaagattttgatggttgctccatggagaatggattggagaaatgcaagaatgaatgccagatatcaaaagggatgaatacaatgtttcaakgaggaaataatgatggtttgaactacaatacagaaaaggaaaaggagaatatatttgagattatgaatttcaaataattttagataatttgtcttctaac

SEQ ID NO: 193107 - DNA, 201 bp, Homo sapiens
tttgaatggatttcttaactatgagtgatttttaataccatgaattaatcatttgaaaataatatcagttctgttatgcaggctttcaaatattgacacarattattatacaatatcaaaaatcatacttgttgatttcaagctaagactagtaaatacaaaaagtttctaaattcctaattttcacttggaacattgaat

SEQ ID NO: 193108 - DNA, 201 bp, Homo sapiens
atcaaagataacatggcattgaatataatgttgggagctttttcaggacaatatttattaatgtcaatggttcttgtagtaaaaataataacatttatttraagtttattatctgttatcttgctagagtactttatgatcatttactatactcacataactctgttgggtcagtatagcccatctttcataggggataaa

SEQ ID NO: 193109 - DNA, 201 bp, Homo sapiens
ggtcgctagacacggcctactggttgataacttttccatgagttatgaaaagtgtactcattttatatttctgctgtaataaatcaattaaaatttagtarcttaaaacaacatacacatttgttaaatgtattatcttatggttctataggtcagatattcaacacaggtctcactgaacaagaatcaaagtgtccaatg

SEQ ID NO: 193110 - DNA, 201 bp, Homo sapiens
ttgagacgtggacatagttgggacagagaaggactttctgcctaacacaaagggtttaataggttcaagtcaaaataaagataactcagcagtggcaaacwgtttgcttgtccatcttaatttgtcttcatcccattaaagtaactgaaaaatctctttgattctaagataactatcttatactccaaaaatgaaagagat

SEQ ID NO: 193111 - DNA, 201 bp, Homo sapiens
gatttaatctttcacttatgtagtggtttttttcagggaattatgttgtacaacttcaaggatgtcaccaccgtagaatacttccgctttcttattacccrtttttgcctatagagaaaataaaccccaaagtaacacagctagcaagtaaaagtgcagttgaattcaaacccagatctctctgacccccaaagcctatta

SEQ ID NO: 193112 - DNA, 201 bp, Homo sapiens
agtcttcaaaaagcaattctaatgctgttacatgacagcaatagaaactctgatgcctaaatttggaaattttcttgtaagtcatgatctaaggaaaatgyacagatgaagatatcatccatttatcagaaatgtctaataatgtggacaacatagaattttaggagatatttgaaaagattttactaacaagagaagaaa

SEQ ID NO: 193113 - DNA, 201 bp, Homo sapiens
agtttgagctggaattaatttaggagtatatcctgaaagaataaagacatgtggaaaagtgctacagacatggatggtgtttacagcctattgttttgcayggagggagtgatgatggggcttgagtacatagctcttagaagggttatgtctactcctcatttttgcctgttttgcaaattgctcaattcttactcaagg

SEQ ID NO: 193114 - DNA, 201 bp, Homo sapiens
ttaaccaggaaacacattgaagaaacatttctcaatgaattgaaaactctgagttagaaaattaaaaaaaaaaactattagccaggcatggtggcacaatmctgtggtcccagatactggggaggatgaggtggaaggattgcttgagtctgggagattgaggctgcagtgagctatgattgggccacagtactccaatct

SEQ ID NO: 193115 - DNA, 201 bp, Homo sapiens
cagagaaacactatgtactttaataacaacaagtcaaacatatttcctgtgaaagaatgtaactaaaaagtctagaaagagcaaacaatcagtaaaaagcratcatttcccaagtgaagccacaccaatacttgctaagactagtatgcttgcaggaatttccccgaaatacattttgccttttttttgggggggggacag

SEQ ID NO: 193116 - DNA, 201 bp, Homo sapiens
agaggtttgtgttttcccacattgcaagccctatctaatgccagaaaatgtgagataaattaattttgctccaaagaacacagtgaagaagtttgagaaasaagcttacattgtcagtaacacttcagcaataaataatgtgatgtcatcttgtagaaataatttaagaattgaggaaatttttactccattcttatatct

SEQ ID NO: 193117 - DNA, 201 bp, Homo sapiens
ctctgtttctttattcgcagagtttttgactgtacacaatgtttgcaacagaaaaatctcaacaataacaacaaaaaagttaacttcagaaaaataaacamgtatttactccattaaaagttattaccccttccttggctttttagaggccagcaggcaaattctgaagtacagcgatactttgttgacaccagattaatc

SEQ ID NO: 193118 - DNA, 201 bp, Homo sapiens
cacaaaaggcaacagaaacatagatttattaaggtgaaaataccctctacagaattggagcgggctcaagcaagcagctcaggagccctggttacaaaatrttctggggtttaagtaccctttaaagatttcccattgcttatacgctatgtaataaaggatggaagtggaggtttgactctggccaatcagaggctgaaa

SEQ ID NO: 193119 - DNA, 201 bp, Homo sapiens
aaaacaattttaacaaatgttcatgattccacaccaatgaaatgcattttaattccattcagaatgttccaagctctctagcagataaccagtaataaaaytcatattgaagttatgtctgtgatttttaacttcactgctcaaatggtataagcaagttttcctggttgtcataaagaaatacagagaattctaaacaga

SEQ ID NO: 193120 - DNA, 201 bp, Homo sapiens
aagatatacatacttcccactgataagtaataagacagatcaggggtcagcaaactatggcccatatgccagttctggccctctgcttactttataaaagraatgttttgtggaacacaaccaagctcacttgtttttctgctatctatggctgcatttgaactacaagggcagagctgagttgtgacagagaccatatga

SEQ ID NO: 193121 - DNA, 201 bp, Homo sapiens
agtaataagacagatcaggggtcagcaaactatggcccatatgccagttctggccctctgcttactttataaaagaaatgttttgtggaacacaaccaagstcacttgtttttctgctatctatggctgcatttgaactacaagggcagagctgagttgtgacagagaccatatgatccatatagcctaaattatttacta

SEQ ID NO: 193122 - DNA, 201 bp, Homo sapiens
cagcaaactatggcccatatgccagttctggccctctgcttactttataaaagaaatgttttgtggaacacaaccaagctcacttgtttttctgctatctwtggctgcatttgaactacaagggcagagctgagttgtgacagagaccatatgatccatatagcctaaattatttactatctgggcctttacaaagaaagt

SEQ ID NO: 193123 - DNA, 201 bp, Homo sapiens
cttttgtataaattattttatttgctcttgagatatttaagcccacatatgtatgtcatgcatgttcttttctattgggcaggaaatattgcaagcatatygatagtgataattaatattttctaaacagtcaaaaacaggtgtacctttccaaataaatctaaataaaattcaaaacaaacttgttgaatgacttcagaa

SEQ ID NO: 193124 - DNA, 201 bp, Homo sapiens
agattaggaatatgttagcaataacaactttaatacaagcagtaaaatattaaacaatcataagtctgactgtgcaaaagagtgagtttcattaatttctwtaattgatcccattttgtttttgagtggccactcttactggtgaagtaagagtttggggcatctcactgattaagtaaatagctgatcttgttcattaaa

SEQ ID NO: 193125 - DNA, 201 bp, Homo sapiens
tattctcatctgaaagtttgactagagaaagatccactttgggggtccttcaggttgttgacagaatgtattcccttgaacctgtggaattcatagaagcytgctccttcagtgccagcaacacacacacacacacacacacacacacacacaacacacacagcagggggttgggtggaagagagagagagagagagagag

SEQ ID NO: 193126 - DNA, 201 bp, Homo sapiens
ctgactgatatcaaaggcttagtgtaattttcaataaacatcagatgttatttatattgttactattttatattttagcatttaatgctaccaatttactrtccaaatattctagattaggaaactgaagtttagagaaatcaaataagttacaaaacttgtaactgttggagaccgcatatgaattcttattcatccacc

SEQ ID NO: 193127 - DNA, 201 bp, Homo sapiens
aaggcctacagttaaattgtagtcattcttgaacttagatatctgctgtagacaatttggttgtggcaagaacataaatacgttgaaatactggctgtttmcagcgaagcagcattgtattgtggcaatttaaagcaaaagagaagccctaaaattggttccagggtatgtttttaaactgctgattgttaatattggaaa

SEQ ID NO: 193128 - DNA, 201 bp, Homo sapiens
ttctttgatgtgtattactatttattttcaaaggcctacagttaaattgtagtcattcttgaacttagatatctgctgtagacaatttggttgtggcaagmacataaatacgttgaaatactggctgtttccagcgaagcagcattgtattgtggcaatttaaagcaaaagagaagccctaaaattggttccagggtatgt

SEQ ID NO: 193129 - DNA, 201 bp, Homo sapiens
atttccaacatccacccacaccccatactctctgcctcgatcatttcttgattactgatcatgacatttctgctgcctggaatttgccttctctcctgttstctcttttgctcctggtgaacaacacataatcccaggtcagactttgattccacttcctctttcttggtttctctactgactccagttagaatcacactt

SEQ ID NO: 193130 - DNA, 201 bp, Homo sapiens
ttagtcagggaaggaggtacggggagataggaaaatatttattaaacaacaggtaagtttcataattaaagttccgaagtaaatgttgcatcaagataatrtagttactttcagagggttggatagagaatggaaaagaaaatttgtgaattccaacaacaaggaaaacgaaaaccctgaaaatgtgtattttctcccatt

SEQ ID NO: 193131 - DNA, 201 bp, Homo sapiens
aattttgtttttgtatttttagtagaggggtatttcaccgtgttagccaggatggtctctatctcctgaccgcatcattcaccatcctcggcctcccaaastgctgagattacaggtgtgagccactgcccccggcctctcactgattgattgtgttgagagtgttagcaattagaacttctaaaatggatttgcacaaat

SEQ ID NO: 193132 - DNA, 201 bp, Homo sapiens
gtcaaagacagtattgaacaaggaaaatacttggcatattgttgttagagtgtatcatgtaagtatgaaaatacagagctgctttttccattatttcagtrcttaaagaaactgttttctttttgtcgttttgttttcaacagtgaaaaataagtaagtaggtatcatcaaattgcttcttatttcttaagaagaaaactt

SEQ ID NO: 193133 - DNA, 201 bp, Homo sapiens
gaaaaccccattcatttttaaggtagctgaataaattcagtgataataaactcttaaagagatgaagcagggagaaaatttttggctagatacagggtgartatttaataggaaaaaatgctacctgctgaggtatgtttgaagaaccataatattattaagcccactctggtgcaaagcaatgagaattaattaaaaaga

SEQ ID NO: 193134 - DNA, 201 bp, Homo sapiens
agtcctggatacatttcaaaaatagaactgcactccctctacaaacttcaaaccacagaggctctccctattacaaaaatcttgatatttccgcaaaagayttttttctaaatgccaggactctgctcatacagaagccttgctatacattaagaataaataatcagcattacttggagacttaactctcatgtttcagtg

SEQ ID NO: 193135 - DNA, 201 bp, Homo sapiens
ggaggcagagttgcagtgagctgagatggcgccactgcactccagcctgcgcgacagagcgagactccatctcagagaaaaaaaaaaaaaaggaggctggraagtgcagcttgaggctgaagatgactgggaatgtgggatcctcatgattcacttaaactaagataggagttcaaaaaggtcatttctgttcatcccaga

SEQ ID NO: 193136 - DNA, 201 bp, Homo sapiens
tacactaatccactcacaggtttattcccactttcactattgaatggtgtcccctaaggcagcagcctgcaatgtgtagatggcatattgcacaattctcwgggctatcactcactttggagtccaatgaaatgggtccattggagttgtgtagtgatagcgctatgctgcactcctggaaatagcaattcactaacataa

SEQ ID NO: 193137 - DNA, 201 bp, Homo sapiens
ctccttaggacttcatctagtccaagaaaccacccttggtaaattcagtgtgattgaaatctcttagaatctctgctttgaattttactttttttttttttagcaaaagtcttttaagctacttctttctctgccccaaaggtgtgagaccatgaggcatcaatctgctttctgtactttcccccaatagtaccttgcagt

SEQ ID NO: 193138 - DNA, 201 bp, Homo sapiens
cattttgtaatgtaaatttataaaagaaaagatctcaactactttctgagtaaaatatgaggaactgtaatcttaatatcctagaatatatataaatattmgtgaaattattacttgaaaatttttagaaaaagaatcaaagttagaataatctgaaaccatttgaactggtctaggatattttctaaaatattattataa

SEQ ID NO: 193139 - DNA, 201 bp, Homo sapiens
cctgatataaatgttaacattttggtgagcagcaacatttactaaaaataaaatgttactattatcccacggtattaagtagctctacttaagccaaaagkgttgctaaaattaactaaaagtgccttgttgcctgaactttaataagctgaggtctcacccctaattataccgatagaaagttcctaacctaactgatgt

SEQ ID NO: 193140 - DNA, 201 bp, Homo sapiens
tatttttcagtgaacaagatgcaatcctagcttcagtatgatgaggcgaatgtggaaaaagagagggcttttttttgttttgttttgtttgtttttcatcrttttcatggaacactgtgtcttctgagttcaaaaatcatgactgccatgagaaatgatgaagttagtgtcaataattttttctgtactaagacatggcaa

SEQ ID NO: 193141 - DNA, 201 bp, Homo sapiens
aagctagagtcataacaagaatagaaactaagcttctctgcaaacctacgacgcgggaagcaaagaattttatgccattttgtaatgtaaatttataaaaraaaagatctcaactactttctgagtaaaatatgaggaactgtaatcttaatatcctagaatatatataaatattcgtgaaattattacttgaaaattttt

SEQ ID NO: 193142 - DNA, 201 bp, Homo sapiens
ctgatataaatgttaacattttggtgagcagcaacatttactaaaaataaaatgttactattatcccacggtattaagtagctctacttaagccaaaaggsttgctaaaattaactaaaagtgccttgttgcctgaactttaataagctgaggtctcacccctaattataccgatagaaagttcctaacctaactgatgta

SEQ ID NO: 193143 - DNA, 201 bp, Homo sapiens
acatgaccagaattctttagtaaaaagaaatcatcttaatttagtaccagaaaaggaggaaaaaagcactgctttctggaaaaaaaaaaaaaaaaaaaaaagcatcatccagatcttggtttcgccctcattgaaacaaattaaatgaaaacttggcactttctctagaatttgtttctacccctgccaagtagtctcaag

SEQ ID NO: 193144 - DNA, 201 bp, Homo sapiens
tatcccacggtattaagtagctctacttaagccaaaagggttgctaaaattaactaaaagtgccttgttgcctgaactttaataagctgaggtctcacccstaattataccgatagaaagttcctaacctaactgatgtaataggaagtgaaagctaaagaaactgccttattttattagttgcaataatgcctattattt

SEQ ID NO: 193145 - DNA, 201 bp, Homo sapiens
tacacatgacaaaactctgaagagtgaaaacatgaataatagcatacactcatgtttttcaattgtcacatgtaactcagctggttcaattcttttttttwaaaaaaaaagaagcctctttgcaacatgctctccttttctgcagatgaacaaaggaatcctccttcactaattctgaaagtaacttgtcacagtggggtt

SEQ ID NO: 193146 - DNA, 201 bp, Homo sapiens
cttataaaatgatgatcatcatgagaacaacagccttattgaggtctgagtttattggcatgtgctgctggatgatcagcagcagggtttgatttcaaacwtgctaacacaagatagtaactggaaagtaatttgtttcactttttcttagtaaaattatgatggaaaactcttcacctgggaaaatccaaattcatacca

SEQ ID NO: 193147 - DNA, 201 bp, Homo sapiens
ttacatttatagaaagtggaaatgccaagaaagagagcaaagatagcaagaaaagacacattttaaaaagacttggagcaaataggtctgtaaaaaaaaaagacactgtaggactcaaaattttggagaaatattataaaagaaaatgacttcgttatattgagagatttttaggggttaaagaaaaaagaaaagttatat

SEQ ID NO: 193148 - DNA, 201 bp, Homo sapiens
tatgtatttgactttttttgattctgcatataagtgagatcatgcaagatttgtctttctgttctggcttccttcacttagcataaggtccaacaataccyctttgaggtattgatttcatttctttggggtatatatacagaagagagattgctggatcacatggttgttctattttttaattttttgaggaaacttagt

SEQ ID NO: 193149 - DNA, 201 bp, Homo sapiens
acagctggatgacactcaggttccttcaaagtctgagatttggttattaggtaaattactcaaggcaaaaaaggaaccccaggaaagtgaatgggaaaagrcagttgggatttttatatttccaatcatcaaagaacttattaaattgtttttcacaaagagccctcttgaaatcttacaattttgattccgtctatattt

SEQ ID NO: 193150 - DNA, 201 bp, Homo sapiens
gcaggacttaaatcaggctttaagagtcaaaattttcctgttttgaaaaaaagtgccccccaataataattcaaaagctgcagattttcctaggaagaatyacatgtttttgagggataggcacagttgaagcaacacacgtaccctagggctatggattcttttttattcctttatatgattactattccatttataaca

SEQ ID NO: 193151 - DNA, 201 bp, Homo sapiens
tgagataaattaattttgctccaaagaacacagtgaagaagtttgagaaacaagcttacattgtcagtaacacttcagcaataaataatgtgatgtcatcytgtagaaataatttaagaattgaggaaatttttactccattcttatatctgtaataggcttttatttttcaaaggaagattttttttttagaattattgc

SEQ ID NO: 193152 - DNA, 201 bp, Homo sapiens
ggcttttatttttcaaaggaagattttttttttagaattattgccttataaaagttgttatttgtctctgttatctgacacagaaatgttatagcaaagtrtttgagacacacaaaacctgaagtttttattcagaaagatgcaatgaattttacagttttctgtaccaataaaaaggcaaattggctgggcatggtggct

SEQ ID NO: 193153 - DNA, 201 bp, Homo sapiens
agttcatgaccagcctggcccacatggtgaaaccctgtctctactaaaaatacaaaaattagctgggcgtggttgtgagcacctatgatcccaactattcrggaggctgaggcagtagaattgcttgaacccaggaggcggaagttgcagtgagccaagatcacgccattgcactccagcatggggtggggaagagcaaga

SEQ ID NO: 193154 - DNA, 201 bp, Homo sapiens
ttctctggaaatagactaatcagccatttaagatttagataagagacaaaatagcataaactcatgggcttttattcccatacccgccagctgctctcatrcctatactttgtaaaatatagatctcttccttctagcaaatgacaccaagccatttggcagtcatcaatttgtctttaatatttttgtcatctgggaatt

SEQ ID NO: 193155 - DNA, 201 bp, Homo sapiens
gcctggcatgtatgatgaaatctcttctctggaaatagactaatcagccatttaagatttagataagagacaaaatagcataaactcatgggcttttattyccatacccgccagctgctctcatgcctatactttgtaaaatatagatctcttccttctagcaaatgacaccaagccatttggcagtcatcaatttgtctt

SEQ ID NO: 193156 - DNA, 201 bp, Homo sapiens
tcactaccacaggagtaacgttaatgcccaagcacttaaaagatgctcagaaattattaggtgaatgtgttccaagaaatatgacaacttggacaacctgraaagttatggcaaataatgttttcaatagaataccaataaatgttaatctgtttgatataatttgatgattagactacaaacagtacatgttaatggaga

SEQ ID NO: 193157 - DNA, 201 bp, Homo sapiens
ttattattaatattttattatcaagagaaacaagatgatctgaatatatttatattgcctcactaccacaggagtaacgttaatgcccaagcacttaaaasatgctcagaaattattaggtgaatgtgttccaagaaatatgacaacttggacaacctggaaagttatggcaaataatgttttcaatagaataccaataaa

SEQ ID NO: 193158 - DNA, 201 bp, Homo sapiens
aaacatgaagaaattcaagagacccaccaagaattatcgcccaggaagcatttcattaatgtttcatgttgtgaggcaaatttgacatttctggttctaawgtaagaattagttactgtagattttctctagtattacaaatctggtggtttatcccttgactgggaataggaaaggtagttaggagcattattattaata

SEQ ID NO: 193159 - DNA, 201 bp, Homo sapiens
ctattttatattttagcatttaatgctaccaatttactatccaaatattctagattaggaaactgaagtttagagaaatcaaataagttacaaaacttgtractgttggagaccgcatatgaattcttattcatccacctgaaaagtctgtacacttgtcaactattatataatgtttctaatgaacacatagtttatcat

SEQ ID NO: 193160 - DNA, 201 bp, Homo sapiens
gctgccagaggacatgagactcctgagtcagagacaatagactttgttattcacaacaaagagagcaacaggagcttcacgtttgagttcaccttgcctcmaaaatctcatgggaacgacagagtgggacccaattaatgattgtgcacagcatcacgttttggaaaccctgacttaagaaaactaaatgaattataatgt

SEQ ID NO: 193161 - DNA, 201 bp, Homo sapiens
caacaacaacaaacactcaaacaagccaacaaaattttcaaatttgtcttagtaaagctacaaagtggagagaaaaagagagaatgagagaacctttaaakttccagagggaaaggacaaattatcttccaaggaacacaactaaagtgacaactgattattcaacatcgacaatagaagtcagagtacaggagaataata

SEQ ID NO: 193162 - DNA, 201 bp, Homo sapiens
gtgaagttataaaaattatcacaggtaatagagtccacaaatctatatgatttaactcaaagtattttaaaccaatataatacctcattagtttctagtgyagtattatttcaattgtaaggcaattctatgcatttaatgtgcactctattaactgtacataatttactttttaatagtatttgtaaacttattttttat

SEQ ID NO: 193163 - DNA, 201 bp, Homo sapiens
acttacatctaatagcatttaaatatctaattactgaatttaggttaaaaacaaaatgctgcattttggaaagaagggtggtgatctgctttttctagggwaagaggccagagagtggtcacaactatagcaacttgtccccaagtggacagcataccaaaataaatgtccagggggtcagaaatgcttacgaagagagag

SEQ ID NO: 193164 - DNA, 201 bp, Homo sapiens
tacattttcatgtgcatccactataaagtggaaagggcgcagagtgaagaggagatcagactcttcagatatatcttccatgtgactaccagaactaaagrcacctaaaagtgatcatgaatgtcttagctcagagtgctgtattaaatttccataggttgagtggcttaaacaacaaacatttattactcacagttctgg

SEQ ID NO: 193165 - DNA, 201 bp, Homo sapiens
cctctcagtagtgtcttgaagattatgaaatagcagatataatacatttagcagaatgcctagaatataagggatggttattattaatataaaaaagcttycagagagtgatagacctaactcttttatatagggtggtcagagaaggctttttgctaaatggtatttgagcacagacttaaaaaaaaaagatgaagaaaa

SEQ ID NO: 193166 - DNA, 201 bp, Homo sapiens
gcttctgctcttaacaatctctaaaactattaaggctaaggttctaatggtcaatagttttaacttcattacctgagctcttcaaattatttgacttagtraccaatcatttctcccccaaatcctcaactgtctcgcttctagatccataatttcttctttcctaccctatatctgattatccttttcattctccttttt

SEQ ID NO: 193167 - DNA, 201 bp, Homo sapiens
aggtgacaaaaacagaatggagcatatatctttgggaaattacagtaaaataccatttttaaaatcctcttttccttacctacttatcttgggttttgtcygcccttcatgaaataatttcctgaatattaatttgttaggcatcgagcacacatacaaaagaaataaacaatggaagacgtgaatgtatgcaattgtcat

SEQ ID NO: 193168 - DNA, 201 bp, Homo sapiens
agcacagacttaaaaaaaaaagatgaagaaaatgggacaggtggaaatctggaggaagaatattttgaacagggaggaaaatagtcacgaagcatcaaggmcagatccacattaggtgtactcaaggaaagaccaatgtagcaagagctgagtgattgaaacaaataaataaacaaacaaaactgggcagggagaatgagg

SEQ ID NO: 193169 - DNA, 201 bp, Homo sapiens
ttatgaaggacatacattgtgtcttctttaattctcagaaaaatctattatcttaatatttataattgtattttcctaagaaaatgtcacaaaatctatamattttctaggtatgcatccatatttatacagttttgcacataaaatcaggttgttcaaagaccccctgaaaatatacatgaacaacttaatgccctaggg

SEQ ID NO: 193170 - DNA, 201 bp, Homo sapiens
gctttattgaccacatatgtaacctcgtaacttttatatacaacccagacctctcctctgagatccaggctcattttcccaactaccacattggcatctcytcttgaatattttgaaaataatttaaatttttacatgtaaaactgaatttatgactgtccccctcaaaattaatagtgttccctatctcccatctccatg

SEQ ID NO: 193171 - DNA, 201 bp, Homo sapiens
aaaatcatataattataaaataacaaatacaattggttataaattttccaataatttcaattttccagtgtcaatgttccctttttttttttttttttgamacagagttttgctcccgttgcccagactggagagtgcaatggcatgatcttggctgatcgcaacctctgcctcctgggttcaagtgattctcctgcctca

SEQ ID NO: 193172 - DNA, 201 bp, Homo sapiens
tttaaatcagggtcaggcaggatttttctttatatacctaaaatatgacattttaaaattcatcctctttccctgcatagtgggattattttcccaaagtmttaaagtagttgacccttaatgaatttaagggtctactgttctgagccaacttgctctcaggtcaatttcttaccctttgctctttctactgggtgtgtt

SEQ ID NO: 193173 - DNA, 201 bp, Homo sapiens
aggaaacttgagactataagtagaattttaaggatgtataaagtcagtttaattatctcattattttcccagttttacatggtatcttttgtcctatatgyggctgaaataggtaaatgtatttacagattgctttcacaaactttgcttttaaaatatctcatccaatttaatattcattttacattgtatagttatagt

SEQ ID NO: 193174 - DNA, 201 bp, Homo sapiens
cattagcttctccagagagagattaaaatatataactcctactctaggaaatgaccatcactctgaattgatgctgtgattgtgggatttattatctgtamgtctcagtaatttttcaaatgctggctgggtgtggtggcttatgcctgtaatcccagcattttgggatgccaagacgggcaggcgatcacctgaagtcag

SEQ ID NO: 193175 - DNA, 201 bp, Homo sapiens
gagtaaacagaagcttaaattagttttacgatatattaaaatgaaaatatgattagggatatttatatgagttaattacatttatattttaataatttatrcatatttagaggtttataattagttttcacaaacagtatgcagcaaatgaggttgaaaaaagttgtgctccactatcaggaaacacaaaatcagttttta

SEQ ID NO: 193176 - DNA, 201 bp, Homo sapiens
gtatgtatttggtcctgctttcttcagacactctcttttagtagaagaaaatgtattttttgtaaagttgtgccctctcctggtgaaaatttctagacaaygtacaagataaatttatattcaggattcttttttctttatatagttaattagacctttaaaaaggattatgtacatatatatattcccatagaactcatt

SEQ ID NO: 193177 - DNA, 201 bp, Homo sapiens
aattagacataggttaaggaatccatgctaattgtttttacatgcatatgctaaggaaccgtattttcgctgctcggctagtatatttataaagagcgctstcaaaggagtaaacagaagcttaaattagttttacgatatattaaaatgaaaatatgattagggatatttatatgagttaattacatttatattttaata

SEQ ID NO: 193178 - DNA, 201 bp, Homo sapiens
tttattatttttcataatagaccagtgtttttatgttcagcttcattgaggtacaaatcacatgaaaattatatatattcaagattttttttacttttttwaattttagtcattctgttaagtgtggggtgatatctcattgtggttttaacttgtatttctctaaacgctaatgtcgttgagcatctttacatttttttt

SEQ ID NO: 193179 - DNA, 201 bp, Homo sapiens
gaacttgtctcttcttccttctctgcttgccttctactacttatccattcacatgctaccttttattctaaagcttgcaggactcttgagataaaattagytgaatcattgaagtatgttcctacaatacttggctcatatttcatttagaaactcaatttattatttttcataatagaccagtgtttttatgttcagctt

SEQ ID NO: 193180 - DNA, 201 bp, Homo sapiens
ggaaagtaatattattgaaattgcgtattggtattttataatttagaaataacaaggagtcttcttcatatataatgggcctaataatttttccatgtatrtaacttttcttataggtcactcctgtgcctggtactcacccacttttagtttttgtgaaccccaaaagtggtggaaaacaaggagaacggtatgtttttt

SEQ ID NO: 193181 - DNA, 201 bp, Homo sapiens
attgaattttgttttctaagaactgcaatagattatttttagttttcattactcattttgatgaagaacaattttttttaatgtaatattccctttggcawgatgccattccttatctgtatgggcttggttattttatagattgacatgccaggtcagaaatgataacatttagtcatgaagaattctgacaatgtttgg

SEQ ID NO: 193182 - DNA, 201 bp, Homo sapiens
gaactgtattaccacatgatatgacatggaacagttgacaaatggcaattttcccagtaatgtttgcctttttatttgatctgagccaaatctgaaactcwtaagaggaattccttcctgataacacttgtttaatttaaataatatattttaaatagtatgttttaattttattttaaataattttaaatttatatgttt

SEQ ID NO: 193183 - DNA, 201 bp, Homo sapiens
tattttaaaaggcttactcttataaagattagattgttggggagccaagagtccagtagattactgttgaagttattcaggggttataagacgtaggcttrttaggatggagcagtggaagtagagagatgtgatgggattctacatatattttgaggaatgagcaaaagatatgctgatgaattgactacagggtttatg

SEQ ID NO: 193184 - DNA, 201 bp, Homo sapiens
gctaaaatctaaattgaattttgttttctaagaactgcaatagattatttttagttttcattactcattttgatgaagaacaattttttttaatgtaataytccctttggcaagatgccattccttatctgtatgggcttggttattttatagattgacatgccaggtcagaaatgataacatttagtcatgaagaattct

SEQ ID NO: 193185 - DNA, 201 bp, Homo sapiens
aatgtttcttggcaatgaaaaagtgaataaaactgaattgattctatgacataaatgtacccactttaaacacttactctgcagtattactataagtcaayctttcccattaaccagcatagttaagcaagtccaaattccggctatgccatagaattatgagactgttttagtattaaaataaagttactgaataacata

SEQ ID NO: 193186 - DNA, 201 bp, Homo sapiens
atcatttatgattttatctccatttaaactcaaattggcaagagatcttttgaaagatttgaaaattattgctaaatatacacacttattaaatacatatrtgttatttatttacaggtatactttatatctctctatatatttatatttagtatgggtatgatatgaagagtcactctgatagcaaaaaagactttagga

SEQ ID NO: 193187 - DNA, 201 bp, Homo sapiens
gggctcgtttgccgaccaggctccctgtgccctgccaacattctgtctgctgcagctactctgggagtgcttttctctccctgaactgcagctttcagacrctcctcattcactggtgaatcaggtcccaccagggcccttccatttgacttgtggtgtattttttaaagtaatacctcactacgtttaggaataaatgag

SEQ ID NO: 193188 - DNA, 201 bp, Homo sapiens
cacgcctgcaatcccagcgctttgggaggccgaggcaagtggattacctgaggtcaggagttcaggaccagcctagccaacatggtgaaaccccatctctrttaaaaaatacaaaaattagccgagcatggtggtgggcacctgtaatcccagctacttgggaggctgagacaggagaattgcttgaacccgggaggcgga

SEQ ID NO: 193189 - DNA, 201 bp, Homo sapiens
atgattggttattgtttaaacattttacatgtttcattttacgtttcaaataattatgaatttatcactgctcttagggacttactttgtgtacgtttttgtatgactctgcaatgtgggatcactactgcttatatactttttccatttttgctctgtaattagttctaatgtacaatacaaatagagaactagagaaca

SEQ ID NO: 193190 - DNA, 201 bp, Homo sapiens
gcccatttgtatatacattgatgtaaacactttgaagagcaacttgtcagtagacataaatttaaagacatgctcatgccaacactcagcaatttccttcrtaggtatgtataaggatacttgtttaagagtgttaaacattatttgcattacttatataaaatttattggagccacctactgtactatcaacagtggatg

SEQ ID NO: 193191 - DNA, 201 bp, Homo sapiens
aattgcttgaacccgggaggcggaggttgcagtcagctgaaatcgtgccattgcactccagcctgggcaacaagagccaaactccatctcaaaaaaataartaaataaaaggtttaatagactcacagttccacgtggctgtggaggcctcaggaaaattataatcatgatggaagacacctcttcacaggggtgcaggaa

SEQ ID NO: 193192 - DNA, 201 bp, Homo sapiens
actgaaataaagcaggaagtttagacaaaaaaggagtaaaaagaaatgaacaaagcctccaagaaatatgggactatgtgaaaagaccaaatctacatttsactggtgtacctgaaagtgacggggagaatgaaaccaagttggaaaacattcttcaggatattatccaggagaagttccccaaactagcaaggcaggcca

SEQ ID NO: 193193 - DNA, 201 bp, Homo sapiens
gttgcagtcagctgaaatcgtgccattgcactccagcctgggcaacaagagccaaactccatctcaaaaaaataaataaataaaaggtttaatagactcayagttccacgtggctgtggaggcctcaggaaaattataatcatgatggaagacacctcttcacaggggtgcaggaaagagaactgccaagcaaaggggaaa

SEQ ID NO: 193194 - DNA, 201 bp, Homo sapiens
acttcttattttccttattgaatatggctaactagaataagcaatgcagagaagactttaaatgacctgatggagctgaaaaccatggcacgagaactacrtgaggcatgcacaagcttcaatagccgattcgatcaagtggaagaaagggtatcggtgattgaagatcaaattactgaaataaagcaggaagtttagaca

SEQ ID NO: 193195 - DNA, 201 bp, Homo sapiens
acgtggctgtggaggcctcaggaaaattataatcatgatggaagacacctcttcacaggggtgcaggaaagagaactgccaagcaaaggggaaaaagcccmgtatgaagccatcagatctcatgagaactcactatcacgagaacagcatgggggtaacagcctctatgattcaattacctcccaccatgtgcctcccagg

SEQ ID NO: 193196 - DNA, 201 bp, Homo sapiens
acgatggggttttctaaatatacaatcatgtcatccgcaaacagggaaaatttgacttcttattttccttattgaatatggctaactagaataagcaatgyagagaagactttaaatgacctgatggagctgaaaaccatggcacgagaactacgtgaggcatgcacaagcttcaatagccgattcgatcaagtggaagaa

SEQ ID NO: 193197 - DNA, 201 bp, Homo sapiens
ggggaaaaagcccagtatgaagccatcagatctcatgagaactcactatcacgagaacagcatgggggtaacagcctctatgattcaattacctcccaccrtgtgcctcccaggatacatggggattatgggaactacaattcaagatgagatttgagtggggacacagccaaaccatatcacacatcatagtccgttggt

SEQ ID NO: 193198 - DNA, 201 bp, Homo sapiens
ttcatccatgaccctgcaaaggacatgaactcatccttttttatggctgtatagtattccatggtgtatatgtgccacattttcttaatccagtctatcaytgaaggacatttgggttggttccaagtctttgtattgtgaatagtgccgcaataaacatacctgtgcatgtgtctttatcgtagcatgatttataatcct

SEQ ID NO: 193199 - DNA, 201 bp, Homo sapiens
gtcctagtgttttctgtgttacctctttttctttatatctgtttgtgtatttacatacattacctttttcatacacacacacacacacacacacacacacagagaaaataccgtttgcatctgtttcttcatttctgttgcaaccatttacttttagctcttaccagtcaactcaagctgatgattaatgctaatgttggc

SEQ ID NO: 193200 - DNA, 201 bp, Homo sapiens
ctgtcacccaggctagagtccattggcaagatcatagctcactgtaaccttgaattcctgtgttcaattaatcctcccacctcagccaccccaatagctasaacttcaagagtatgccaccattcctggtgattttgtttgtttttagagataggatctcactatgatgcccatgctggtctcaaacttctgggctccagc

SEQ ID NO: 193201 - DNA, 201 bp, Homo sapiens
ctttctttgtgaagtggctgttattttttttaatctccataatatcaaatggcattaaattgtggacatatgtatacacattgcaacttaaaaggcatctrctttctttcagatctcagtgaccagctgctggaggtggtcggcttggaaggagccatggagatggggcaaatatacacaggcctgaaaagtgctggccgg

SEQ ID NO: 193202 - DNA, 201 bp, Homo sapiens
aacccaggaggcggaagttgcagtgagccaagatcacgccattgcactccagcatggggtggggaagagcaagactttgtctcaaaaaaataaaaaaaggmaaattaaagtaacttaaaaatgtatctaagctgaggacagttcttcctttaacctaatccttttatttattttatatattatgtgcccaagtgtatgcta

SEQ ID NO: 193203 - DNA, 201 bp, Homo sapiens
gcagtgagccaagatcacgccattgcactccagcatggggtggggaagagcaagactttgtctcaaaaaaataaaaaaaggaaaattaaagtaacttaaaratgtatctaagctgaggacagttcttcctttaacctaatccttttatttattttatatattatgtgcccaagtgtatgctaagtgctttacatcaatttt

SEQ ID NO: 193204 - DNA, 201 bp, Homo sapiens
aaagaccatctagtcaactttcctatagtttgacaatgaaaaaaaaaaaaagaccaagagagggtggttattaattacaccaccagtttatctagctattwctaaaatccataatttctgagctactttatagggctctttttattttgaaaagctgtcttttgttgttcttattgttgtttctcttatgaataaaaggcg

SEQ ID NO: 193205 - DNA, 201 bp, Homo sapiens
ttgcatggggcttggctttggtttgctcctttggtcttattttcccagaggaacctctgggttatgggcaccctatttactcctatcagatgtcaggattwgcaggataactgctcagaattaaaatattgatccagattattacattacccatgccttttgtttcttctgagttgtagccagaaattgctggttggttca

SEQ ID NO: 193206 - DNA, 201 bp, Homo sapiens
tgtgcagtattaaccttagaaactatgagatttaataatgaagagaccttaaagaccatctagtcaactttcctatagtttgacaatgaaaaaaaaaaaaagaccaagagagggtggttattaattacaccaccagtttatctagctattactaaaatccataatttctgagctactttatagggctctttttattttgaa

SEQ ID NO: 193207 - DNA, 201 bp, Homo sapiens
taatgtttttttttccaaacacctacctatttaatcatcatcttactcattaagtgtatgttcttgcaacttcctttcatcttacttaaaaccttatcaamtaacatacttattttttttctgtttctcttctgattcagagtgaaaaatcccctttgatagttcctgatttcataatgcgtaaaattgaaacccttaact

SEQ ID NO: 193208 - DNA, 201 bp, Homo sapiens
tagtgaaataaaaatataattctttgggttatagctctactcaaaacctcagctggccttcagtgctcagtgtttctcttgtctagttttctagttaaaarttaatccagataatgtttttttttccaaacacctacctatttaatcatcatcttactcattaagtgtatgttcttgcaacttcctttcatcttacttaaa

SEQ ID NO: 193209 - DNA, 201 bp, Homo sapiens
cattcaacttatttgctcctatactatactgagtggcagagacttagtgaaataaaaatataattctttgggttatagctctactcaaaacctcagctggmcttcagtgctcagtgtttctcttgtctagttttctagttaaaaattaatccagataatgtttttttttccaaacacctacctatttaatcatcatcttac

SEQ ID NO: 193210 - DNA, 201 bp, Homo sapiens
taccaattaccaacagcctctgtgaatgaacaaggacatggtctcagggctgatttgcccttctaacttcaagtgctccatagtactttagggaaagtcamcaacctctcttttaccctcaaatcctgtggctttgcctccattttctttcagccattcacttctgttacaatactccaagccttgtaactgtcgagaact

SEQ ID NO: 193211 - DNA, 201 bp, Homo sapiens
gcctgtgtgtgttggggttgtggggaattccatttttatctctccttgttggtaccaattaccaacagcctctgtgaatgaacaaggacatggtctcaggrctgatttgcccttctaacttcaagtgctccatagtactttagggaaagtcaacaacctctcttttaccctcaaatcctgtggctttgcctccattttctt

SEQ ID NO: 193212 - DNA, 201 bp, Homo sapiens
atcaatgttataacaaaatgtcatagaaggaaagggtgttattcgagaaccctctgtacattgttttgcttgaagtcacagtttcccagtatctagcaatyatattgaggacttaccatataagccatgtcttcagctttatttcctttatgcaatcctaattcttctctctgaggaccttcccgtcccaaggctctatca

SEQ ID NO: 193213 - DNA, 201 bp, Homo sapiens
ttttctcctatcttctaatctggtgattcttaccctggctatacatcagaatcatccgaagtttggttttctttctttttcttttttaatgccaatgcctrgctctttcctgtgtcaattaaataacaatcaatcttcctcatccactttcttaacaatttaccacatatgtttacccttctaaaattgcatatgtaaaag

SEQ ID NO: 193214 - DNA, 201 bp, Homo sapiens
cttctgattttgtctctgtgctctttcctcagttgtcaccaccacatccactatcttgtaaatgtttttggaaatggtgctgcttgggagagttgtcagtsttcttttttctccatcttcctgaaagaatttttaaaactctattatcaatagaagttaatgtttgaactttggaatttactaatttacttattcttacaa

SEQ ID NO: 193215 - DNA, 201 bp, Homo sapiens
ttgtctacagttgcagatagaatgttgactcaccacactattcaaaaagacatgatgaatctcatccactgacctgccatttacttttctttagtgttctyaacccccttctctctgtttttttctttgagtttcccagctttttttcaagcttacactagatgcattgccttttccttttgttttaaaccatttcttcag

SEQ ID NO: 193216 - DNA, 201 bp, Homo sapiens
attgcaataactacagttctcttaatgacaccagcatttcaacactccagcccatttttatgtttctgccagatttgtttgcccataaaacaaagttcacsatgtcacccctctgctaataaacttctgtcagcttcttcttaatcataagatcaagtctaaaaccattaactttgtttacatgttctgaaacagacccta

SEQ ID NO: 193217 - DNA, 201 bp, Homo sapiens
gtagccccatgtggaaatactttactgtaaacattgtttttattcttcatcatcttggataaaatttactatgtattatttcccccagaataagcttttcyatatactttgcaccaaacatatcctcatctcaccctatttgatctctctatgcactgttgggagagactgtgtatctgattggctgtcaaggagtctctc

SEQ ID NO: 193218 - DNA, 201 bp, Homo sapiens
tttccatatactttgcaccaaacatatcctcatctcaccctatttgatctctctatgcactgttgggagagactgtgtatctgattggctgtcaaggagtmtctctactcaagtgactttattactattaattttttaactcccagaaattatgaagaaaagcaaaacaaagcaatacaaaccaaattgatcaaagagaat

SEQ ID NO: 193219 - DNA, 201 bp, Homo sapiens
tagaagaaaggtgagaaagagaggatttattcaaagcattttggtattggaataaaccaaatccaacagccaaagtaaatttactttgagccactcagagrtaccattattttgtaaatatcacttgtcaaaatgcaaataggggtagatcaatccagagaagctgtccttgttataaaaagtgaagacctaagttgacca

SEQ ID NO: 193220 - DNA, 201 bp, Homo sapiens
atgattgattatatttcattttaaaagtaaagcatgtaattgtttgatatgaattattttattttttcaagaatgagcattaataaaaaataccatgatarcacatgagtttaaacacttttgtaaaaatacaaagaatgtttcttaattggaggagtgtatatcgattgtaaagttgtaatacaatgtgtcaggaaaaaa

SEQ ID NO: 193221 - DNA, 201 bp, Homo sapiens
aatgggccctacctatgctgcaaaactcttttcaaacagatgctgactgtgtgccaatagatgtggcagtaactgtcaacaagatttatggcactttaacrtagactcaatacgagaagaaaggttgaaagagttctatgattttgtttaaagtttagtgtctcctgcttctgcagcaactctttctaggcagaagcgtca

SEQ ID NO: 193222 - DNA, 201 bp, Homo sapiens
atggtgtcactgtgctttataaacattcaccaaaatactacattattcgtttaaccaaaatttatccagtatctaccttaaataggacctacgttaagcayagagagtgcatataacataaggcagaaacttagctgtgaagttactttctgtaaattctgcaattctagagcaggtgttgacaaatagttttcatcacat

SEQ ID NO: 193223 - DNA, 201 bp, Homo sapiens
ctgtagatggacaaggcctgcaggtatgattttttaaatcaaaattttagtaggtttcatatttgatacttctaggctctaaaggggcatatgttcagctrtcaacacatttgtttaatctgcatattagcttagtagactctttcagaaagatctttattaatttatcaagatgtcagtcttacggttgattgacagagt

SEQ ID NO: 193224 - DNA, 201 bp, Homo sapiens
atatgtgcagaaaagtgtacatgtcttatatgtaccgtcaatgaattttgatagtcaatacacctatgtaaccactctctctgatcaataaatagaacacrgccaacaccacagaaacccctagttcacttgccctactcaatatgctgacctttttcaccatgaataaatgtttctggtttttatattttatagtagaat

SEQ ID NO: 193225 - DNA, 201 bp, Homo sapiens
gaagctcttgaattgcatttggttgttattctgaaccatttagacagccataatcttttcacttggctttccagtgcctgctctctgcaaatgtatgcatrgtaagcatacactcttctaaggtaaaaggcatctctgactcaggctctggaggctgattgaagtctcttattttggttgcttgagagtctctgagagttt

SEQ ID NO: 193226 - DNA, 201 bp, Homo sapiens
tatggcatatattgatttgcatctggccttttaaattccatattttcattattttatagtattaattttatgagtacgcagctttttccagtgggaagctrttactaattgtacttctatgaacattatcattgaagattatatatttttctgggtataaattgagtaataaaaattgctgggtcataaggtatgtgcatg

SEQ ID NO: 193227 - DNA, 201 bp, Homo sapiens
tgaaatattgcttttttctaaaaagccttgtttttcatttatctttaacagttccccctctttctctgttcctctttcccagcagcctagaaacttacctytatttactcatcttaaatgagaactctgtttccatgaaaatagtgctccttatttctctcccacccactcctatgacttctctcccaaccttctagcaac

SEQ ID NO: 193228 - DNA, 201 bp, Homo sapiens
cattcctcatgagttgatgcactgtggcttctttccctttcttccaaaacctcttcccctcataccctttccttttcattcagtcaaatgatgtgattcarttttttattaagaaaatgttatcactatgggtatacattgtgggtgaggggcggctaaaacacagaaacaggttttcaactgttaactattgttcttgtt

SEQ ID NO: 193229 - DNA, 201 bp, Homo sapiens
ccctaaacaggtagccatttgtgagtctgagtctggggtttttatgggcttagaatcggggaatgcatgctgatgggtccatggttggtcttgaaaaaaayatcatttgattagttaaaaggcatcattcagaaggaaccaatcaagactgagtgggtgagatggagatagaagttctcatgccagttgtggagtctatct

SEQ ID NO: 193230 - DNA, 201 bp, Homo sapiens
tgggtatacattgtgggtgaggggcggctaaaacacagaaacaggttttcaactgttaactattgttcttgttggtctgcatgaagcatctttgtagtgtyaagttaatttagctttctgtattgcaacaaaactgccttttcttcaaaacctctcactaatatattctgtaatttatctatccattcatttgatattgag

SEQ ID NO: 193231 - DNA, 201 bp, Homo sapiens
agtgttgttggccttgcccaggaaagaattcaaaggcaagccagaggcagaagaaaacagctttactcaacaggcagtgttatgtttgtggccttgttacrgctctgtgcctgctcctgcagagcagggctaccccttaggcagagagtagcagctcactgtagttttgcagtcatatttatatctcctttaattacatgt

SEQ ID NO: 193232 - DNA, 201 bp, Homo sapiens
ttcaaggatttccagtttctcgtccgtgaccaaaaggatcaaggtatgtgcacaccagaaagtgagtaagatatagtagaattgtattgagtcactgaagraaagctctcggcaatgagagaggacccctaaacaggtagccatttgtgagtctgagtctggggtttttatgggcttagaatcggggaatgcatgctgatg

SEQ ID NO: 193233 - DNA, 201 bp, Homo sapiens
cagagaatattaccactcttttattctcaccacctatagctcagcaagcaggaacattacagctcttttgctcctgcagttcaaggatttccagtttctcrtccgtgaccaaaaggatcaaggtatgtgcacaccagaaagtgagtaagatatagtagaattgtattgagtcactgaaggaaagctctcggcaatgagaga

SEQ ID NO: 193234 - DNA, 201 bp, Homo sapiens
aaacgtcacaaattatatctatataaactatgtttttgtttctttcctatatccattttaagcaagaaagtgctgctcaatcttattttatatttagtcawgtatagactatatattgaatggattatggattaattgaatccaaatataatatctagtttttcccctaattgaggatatcaagtcaatcactggaaaggc

SEQ ID NO: 193235 - DNA, 201 bp, Homo sapiens
tgtcctagtgttttctgtgttacctctttttctttatatctgtttgtgtatttacatacattacctttttcatacacacacacacacacacacacacacacagagaaaataccgtttgcatctgtttcttcatttctgttgcaaccatttacttttagctcttaccagtcaactcaagctgatgattaatgctaatgttgg

SEQ ID NO: 193236 - DNA, 201 bp, Homo sapiens
gcagagaatattaccactcttttattctcaccacctatagctcagcaagcaggaacattacagctcttttgctcctgcagttcaaggatttccagtttctygtccgtgaccaaaaggatcaaggtatgtgcacaccagaaagtgagtaagatatagtagaattgtattgagtcactgaaggaaagctctcggcaatgagag

SEQ ID NO: 193237 - DNA, 201 bp, Homo sapiens
attgccatgaatattttcttgccaacttggtttatagatttatatgtgcaagggtaatacacagataatttttgtggacaggctctatttgtttatgtacrtatttcactgataaaatgctgttggcttttttttttttctgttttggggcaatcctaaagtcaccataagttcgatgaattaaaagtgtctatatttgtc

SEQ ID NO: 193238 - DNA, 201 bp, Homo sapiens
ttgtcctagtgttttctgtgttacctctttttctttatatctgtttgtgtatttacatacattacctttttcatacacacacacacacacacacacacacacagagaaaataccgtttgcatctgtttcttcatttctgttgcaaccatttacttttagctcttaccagtcaactcaagctgatgattaatgctaatgttg

SEQ ID NO: 193239 - DNA, 201 bp, Homo sapiens
ttcctgaccttgtgatccacctgcctcagcctcccaaaatgctgggattacaggtgtgagccacggtgcctggccaactctttgatatttttaatacccamataaaattatagtttataagtgactcttcacctactttcgaattatggagtgaaatgtatagtcacataagtgctctggctgctgacagtcttttaaagc

SEQ ID NO: 193240 - DNA, 201 bp, Homo sapiens
tttgtcctagtgttttctgtgttacctctttttctttatatctgtttgtgtatttacatacattacctttttcatacacacacacacacacacacacacacacagagaaaataccgtttgcatctgtttcttcatttctgttgcaaccatttacttttagctcttaccagtcaactcaagctgatgattaatgctaatgtt

SEQ ID NO: 193241 - DNA, 201 bp, Homo sapiens
gttttaagaaagttgctttgttctgacaacagattcagacttcttcacattgtcgtgcccatttgtctttttttcataacttattatttactttaaaattytgtgaattttttatatcgttactataatgaattgaatgtgggacttcctccaacttctactggtgccttgccacgtttaaaagaaaaacccagttgttta

SEQ ID NO: 193242 - DNA, 201 bp, Homo sapiens
ctttgtcctagtgttttctgtgttacctctttttctttatatctgtttgtgtatttacatacattacctttttcatacacacacacacacacacacacacmcacagagaaaataccgtttgcatctgtttcttcatttctgttgcaaccatttacttttagctcttaccagtcaactcaagctgatgattaatgctaatgt

SEQ ID NO: 193243 - DNA, 201 bp, Homo sapiens
tctggatgacagattatagcacctgagtggaacacagaaataagagaacaaacatacattaaagagggcagaaagaacattttccccttacacgcaacacyagtttgtccaagcccatatagcacaacatggagagagatatcctccacatgggaaagaagagtgaaacgagtactccactttctgtcaaccacagaacca

SEQ ID NO: 193244 - DNA, 201 bp, Homo sapiens
tgttggatcattttctatcctctacaaatattgattgtatcattctctgggatttaagtgactttttgaatcactgaggtccccttctatcatccacaaaytttttaaataaattttttattttggaataactttagatttacagaaagtttacaaagatgttccatagataaactgaatccattttatctacttttccct

SEQ ID NO: 193245 - DNA, 201 bp, Homo sapiens
ataagagaacaaacatacattaaagagggcagaaagaacattttccccttacacgcaacactagtttgtccaagcccatatagcacaacatggagagagayatcctccacatgggaaagaagagtgaaacgagtactccactttctgtcaaccacagaaccatgccaatgccagtggactctggccccagacttgctcctg

SEQ ID NO: 193246 - DNA, 201 bp, Homo sapiens
aagtctagtgtaatgggaaaaagtcttaaaaatgtgtatgtgacataattgtctgcagtactctcaaaaaaggatgttggtaaaaactgaaaaaaaaaaaatgagatttttttcctcagatgacattttccccaatctcattatgctttactttatttttaatcaaaatttcctcctatccatccaaatcagttttgctaa

SEQ ID NO: 193247 - DNA, 201 bp, Homo sapiens
ttagatatattttctgaccgaaatggcatgaaactagaagtcaataacaggaagaatattggaaaattaaaaatatgaggaaactaaacaacatactcctraacaaccattggataaaagccaaaattaaaatgtaaattaaagaatatattgagacaaataaaaatggaaacaaaacctactgaaacccatgtgatacgg

SEQ ID NO: 193248 - DNA, 201 bp, Homo sapiens
agttctttactttgaagaactccttggatttaatcttcctattttaaagttcttaaccttaattacatctgcatagttccttttgccatgtatcaaaacayaatcacaaatttcagggattgggtgttggtagctgttctgcctaacgcaatgtctgtagaattaaaatatagtccatatgctttgattgctaaggaaata

SEQ ID NO: 193249 - DNA, 201 bp, Homo sapiens
gaggcaggagaatcactttaacccggggggtggaggttgcagtgaaccaagatggcaccactgtactctagcctgggtgacagagtgaaactgtgtcaaaraaaaaaaaaaaaaagaaaaggacacttcaactgatgatacctgtactaacctataaaatgggaataatagtagattccacaccttataagattattgaga

SEQ ID NO: 193250 - DNA, 201 bp, Homo sapiens
acacattaataaattgtctaagcttctgctgcagaaacaaaatagtagtcttaatttatagtcatatatattcatttacatattcatttatttatatgttmttttaacaatcatgtgttgaataaatagtacgttccattcactgataattatgaggatgcagaaataacttatgtttctcagaaaagtgattatatcatg

SEQ ID NO: 193251 - DNA, 201 bp, Homo sapiens
cactttgggaggctaaggcaggcagattgcttgagcccaggaattcaagaccagcctaggcaacatggtgaaaccgcatttctaccaaaaaaaaaaaaaawatatatatatatagccaagtgtggtagcccacacctgtagtcccagctacttgggaggctgaggcaggaggatccattgaatgcaggaggttgaggctgt

SEQ ID NO: 193252 - DNA, 201 bp, Homo sapiens
cactgatttctagataccactgtgaattaaatgacaaaaggataattttgtgctatttaagataaaaagaaatgaactgaactaagtgcttactttttttytttctttttaaaaattcaccatacagccatgtccagctagctcccctcagattggatctgtgtcaccagactcatgttgttcttagttgcatggctctaa

SEQ ID NO: 193253 - DNA, 201 bp, Homo sapiens
cctaaatagatgctgaaaaaacatgtgaaaaagaattaacatatttttgtaataaagacgctcaccaaattaggtatagaaggaatgtacattcattaacrtaataaacgccatacaagagagacccaaagccaacacactcaacagtgaaaagttgaaagcttttctcctaaaatcaggaatgagtcaagactgctctct

SEQ ID NO: 193254 - DNA, 201 bp, Homo sapiens
taataaagacgctcaccaaattaggtatagaaggaatgtacattcattaacgtaataaacgccatacaagagagacccaaagccaacacactcaacagtgraaagttgaaagcttttctcctaaaatcaggaatgagtcaagactgctctctctcaacacttgttttcaatatggtacatataggaactcctaatcagagc

SEQ ID NO: 193255 - DNA, 201 bp, Homo sapiens
gaatgagtcaagactgctctctctcaacacttgttttcaatatggtacatataggaactcctaatcagagcaattagctaagaacaaaataaaagtcattsacattgaaaagaaagaagtaaaatggtatctttgcagacgacataatcttatatacagaaaactccagactataccaaaaactgttagaattaaaaatga

SEQ ID NO: 193256 - DNA, 201 bp, Homo sapiens
tttgttttctgtttgagatcactgtaaataattaacaaaatataaagacaattttttttccaggtctgagaatgaataaaggtgccatcacccctccccgractacttctcctgcaaatacgtgttccccagaagtaatccatctgaaggacattgtctgttacctgtctctgcttgaaagaggaagacctgaggataagc

SEQ ID NO: 193257 - DNA, 201 bp, Homo sapiens
ctgttctacaattttctttttatcaagtaataataataaaaggtctttgacattttatcttcttcttcagtgcactctataaatcattccaaaaatatatmttttacctctcaaatttggctgctattggacttaaggaagagttgattagttcttcaatgtatagattgaatatatgcccatatttcttttatataagct

SEQ ID NO: 193258 - DNA, 201 bp, Homo sapiens
agtcctgttctacaattttctttttatcaagtaataataataaaaggtctttgacattttatcttcttcttcagtgcactctataaatcattccaaaaatrtatattttacctctcaaatttggctgctattggacttaaggaagagttgattagttcttcaatgtatagattgaatatatgcccatatttcttttatata

SEQ ID NO: 193259 - DNA, 201 bp, Homo sapiens
atagccagtctgtatgatttcagctctatgacactatgggaaaggcaaaatccgggagaaaatgaaaggttcagagattgttgggagggcagagataaatraacagagtagaaatattttagggcagtgaaacttctctgaaagacactataatggtagacacttcattatacacctgtccaaactcatagaatatacaac

SEQ ID NO: 193260 - DNA, 201 bp, Homo sapiens
tttatttatttatttatttttgagacagtttcactctgccgcccaggctggagtgcagtggcatgatcttggctcactgcaacctccacctcctgggttcmagcgattctcctgcctcaacctcccaagtatctgggactacaagcatgtaccaccgcgcccagctaatttttgtatttttagtagagacgaggtttcacc

SEQ ID NO: 193261 - DNA, 201 bp, Homo sapiens
aggtctagaataatctcccacaaaacaatgaaatacaaatatgtttctaataatttaaaatcctcaaaagagtaattcctgaagtaaagtttgtaaataawcttaggtattgtcatcttgattatctgttagtacaatgagaaattactgatattcagacatcttttttgcacacatatatacatactcacctcaatatga

SEQ ID NO: 193262 - DNA, 201 bp, Homo sapiens
ataacttattatttactttaaaattttgtgaattttttatatcgttactataatgaattgaatgtgggacttcctccaacttctactggtgccttgccacrtttaaaagaaaaacccagttgtttacactacccagtgctagggacattgttaactctagggaatgaatccgaatttgtgaatactcatggtaagaaaatt

SEQ ID NO: 193263 - DNA, 201 bp, Homo sapiens
tagctgacagtttcatcccaaggaggcaaagaagaaagaactcatagccagaggtttgtagctcagaagggcctgtacttgccaggcaagggggaccacaragataccatgccttccaggcatttgggactattttgttgaatctaaaacaggtgcacttctcactctgagctttagggttaaaactgcctttgccaggcc

SEQ ID NO: 193264 - DNA, 201 bp, Homo sapiens
aaagatatcaacctaagtgtccatcagcagatgagataaataagcagataagatagggtaagataagataagataagataaagaaaatgtggcatatatayacaatgtagtaccattcagccacaaaaaagaatgaaatcatgtattctgcagcaacatagatggaactgaaggttattatcttgagcaaaacaagccaga

SEQ ID NO: 193265 - DNA, 201 bp, Homo sapiens
gtgaatgctaaacatagctgagtcatggtcctcattcttgccaatgctggaacctgaacagcctttttattctgaccagcgtagagtcttttgtggactgrctcctgcacttctagctgcttttttaataatgtaattaacatttcctggctgctacaatccatggtgttactcttttacccagagtcaaacacccagatg

SEQ ID NO: 193266 - DNA, 201 bp, Homo sapiens
taaagatttttgtcatgatttccaggttcagttcaggagtgggtggtcacttgtgctaggacttcatttcttacagccctatccccacatcatttttccayggaagtaaatattatctaatgagataagcgaaggcatgttagaggaaaagcatgatttatagcaaactgtagcttcaaatggatttatccatagtagtat

SEQ ID NO: 193267 - DNA, 201 bp, Homo sapiens
ttgctgtaggatcattttttaaagcacaaaataaccttgacaaaaatgaaggatcgataatatgttgattaggagtctatttgctctaatagcaaaagttkccttgttgttagttcctgttgcaacactctcagaggtcgtagttcattactatctcctggcagtggtattttctacatacagaaaagttgaccctactga

SEQ ID NO: 193268 - DNA, 201 bp, Homo sapiens
agccttgctgtaggatcattttttaaagcacaaaataaccttgacaaaaatgaaggatcgataatatgttgattaggagtctatttgctctaatagcaaawgtttccttgttgttagttcctgttgcaacactctcagaggtcgtagttcattactatctcctggcagtggtattttctacatacagaaaagttgacccta

SEQ ID NO: 193269 - DNA, 201 bp, Homo sapiens
aagctgatgagtcattttgctatcatgttgttcttcatgagaattctgatcactaggaggggtgctctattgttatataatgttgtttgtcatgatatatrttagaagtttctatttggcaaatagagatttcttctttgttacacattaaagataacatagcataaaagccatttatgggaggactgttgttttgggtgt

SEQ ID NO: 193270 - DNA, 201 bp, Homo sapiens
tttagggaaataaagcattaaccctttttcttagagaaactagtaatccaataggttatatatagatgttcaagaattttttcttaaattcactgttttttattattgtgaaataatgtatatcttaatttctttcagataaaataatgtgaataataaattaatggaacctaaaaatggctttaacagatttaatatgtc

SEQ ID NO: 193271 - DNA, 201 bp, Homo sapiens
aaatcaggggactaatctctgagccacatttgctaaagttacccaaagtttcttagccaacaacaacaacaaaattgagtatgatttccaaacttacagartatattctttataatttgttacttagtttatagcaaatcatatatggtattctcagcacggaagatggatttaagtattgtcagcccaatctgacaagcc

SEQ ID NO: 193272 - DNA, 201 bp, Homo sapiens
gggcccacaaccaacctgaaaaccttaatgaatttcaaaatcataaccttctgcaagtcaatatcttgcctccctcttgtttctgcaacttttttttttttagtcatagaccatgtgttagcatcctgagctcatattacttcatagatgactccagataacaaatgccaacaactgttcactctgattccatccccttga

SEQ ID NO: 193273 - DNA, 201 bp, Homo sapiens
tatggtattctcagcacggaagatggatttaagtattgtcagcccaatctgacaagccgtttgccacaggggttaagaatgtgggttcagaagctagattrtcttcttttgaatttgggctccttcacttaccagctgtgtgatattaggcaaagtacttaacatttctattcctcagtccctttggctataaaattacat

SEQ ID NO: 193274 - DNA, 201 bp, Homo sapiens
ttataacacatataaatatgtccttaagccacatttcaggataataaatttcatctcacacaagaaacaaacatgatacgtctagacagaattttttttttcattttagcctttctgcttgaactcaaatcaaaggaaatagctgcattacataaaacgcattcacttgtggaaatggtaatgttttgatctccattaaat

SEQ ID NO: 193275 - DNA, 201 bp, Homo sapiens
cttcttttgaatttgggctccttcacttaccagctgtgtgatattaggcaaagtacttaacatttctattcctcagtccctttggctataaaattacattmattttaaaacagataacataaagtcctgttacagattagatgtgaagcatgtcaagcaacatctgtcaaacaatcaccactcaaaagttattagccaata

SEQ ID NO: 193276 - DNA, 201 bp, Homo sapiens
gagttctccaacaggagttgcattggagttgatgcgaattggcagaaagcagcatgaattgatttgatcactaaaaggccttgcatttggggtttttttttaaaatggaaaatggttccccaaagaaaacatatatcataggagaatgagaggaagagaagataaagaaaattgaatgttcgttgctgatcaattattcag

SEQ ID NO: 193277 - DNA, 201 bp, Homo sapiens
atgtactacagttaattttatgcaagtccgatttgctactggatctttatgtttgtttacatttctctcagctgcaaatggtgccatgtattgtttgcagstgttcatgtgtgtatgtttcaatacattttcacttttaataataaatgtatgtatactttatggtagtaaatgataaactaaactagcatctacatatct

SEQ ID NO: 193278 - DNA, 201 bp, Homo sapiens
tatgtactacagttaattttatgcaagtccgatttgctactggatctttatgtttgtttacatttctctcagctgcaaatggtgccatgtattgtttgcarctgttcatgtgtgtatgtttcaatacattttcacttttaataataaatgtatgtatactttatggtagtaaatgataaactaaactagcatctacatatc

SEQ ID NO: 193279 - DNA, 201 bp, Homo sapiens
atctcctgaccttgtgatccgcccacctcagcctcccaaagtgctgggattacaggcgtgagccaccgcgcccggccagcaccctcttctaatatcacgtygaggatcaggtttaacagatgaatttgggaagaacgcaagcattcagtctataacagtgtcattgagctaaaggctcttatgaaagaagaaattttgaga

SEQ ID NO: 193280 - DNA, 201 bp, Homo sapiens
gttgggaccatctgtagaggcattcactttaataaaattgtatatatttatatttcaatagaaattcaacacattttcatttttctgtgggttatctagthttttatcattttgatttgatacaatttttaaaatatcattgattcctcagagctctttttatcttaaagatatttatgtagctcagatgtggtaactatt

SEQ ID NO: 193281 - DNA, 201 bp, Homo sapiens
agacgcactcagaacatttacattaacagttgggaaaatcatcgaacacaaagcttattttataacggtgttgaatatctcatgcaatatattgaataccrtacactgtagactacagtactggttgtttaccctcccgatggtgtggctgactgggagctgcagaaacctgccactgcgcagcatctcaggggtattgca

SEQ ID NO: 193282 - DNA, 201 bp, Homo sapiens
tctctctctcagaatctctcataacactgtatttcatagaaggaaaatatcaataagagaaatttagatttagatttagaggtcttccactccttcatttwactcaagttaggtgatttgaccaacatcaaatagcaaagatggtacaataaatcagttatcatggatcccaatttagtttcaagttacgacaatggctgt

SEQ ID NO: 193283 - DNA, 201 bp, Homo sapiens
tggatcccaatttagtttcaagttacgacaatggctgtagaaatagaaaaaacaaagctggggtcattttgaagcaagatctgacaatattgtagatgaaytggaaagagagattacagtcaaagaagattgaattatcatcagtcttactgagagaatagaggtaatattaagaggagagatttttatttattggatgca

SEQ ID NO: 193284 - DNA, 201 bp, Homo sapiens
catttaaaaagagacagtctcacatatttgctttggaaagtgaaatgccatgccaaggtataaaagtatagctcctatatttctaatagtgtcttaggtgkatgcaacacattactttgatttttaaaaagaatcaggatatttgaattagttattcattattaaaatctaatatgttagcatctatatggttctaggaat

SEQ ID NO: 193285 - DNA, 201 bp, Homo sapiens
tagggtttttgtggttttaggtctaacatttaagtctttaatccatcttgaattgatttttgtataaggtgtaaggaagggatccagtttcagctttctamatatggctagccagttttcccagcaccatttattaaatagggaatcctttccccattgcttgtttttctcaggtttgtcaaagatcagatagttgtagat

SEQ ID NO: 193286 - DNA, 201 bp, Homo sapiens
catcactgttaatgcctgtgtaatctcattaagtaaagaagtcatattttagttgaaactgtttttgtctagcatcttttcaattcctcattttgttattwtaagtaacatgatagtgaacatctttatgaagaatggtttcttctggctgttctctactcagaagtgcaaaggatcattttccccatactgtgttatttc

SEQ ID NO: 193287 - DNA, 201 bp, Homo sapiens
agcagttgtaaggattgagagagtgagctgcctcttttcagaagtgttattagcaaaagtggcaatcatttagaaaggaaaaggataatttgtttttttttgcacactggttccagggagcccagttaaaagttttagaaaagaggagaagtgtggaagatttatgagacagagagagaaaggaagggaggaaagaaggaa

SEQ ID NO: 193288 - DNA, 201 bp, Homo sapiens
tgcattacttatttttcctcatcctcttcctcctcccaccctccaccctctgtcgttgttgccctctatctgtccatgtgttctcatcatcgagctctcayttataagtgagaacatgtggtatttggttttctgttcctacattagtttcctaaggaaaatggcctttagctccatccatgctcttgccaagaacacgat

SEQ ID NO: 193289 - DNA, 201 bp, Homo sapiens
gtttaaaattggaaaacttctctaacaaagaaataatcagatctgctggattttatatataagtaaattaatttgggctaatgcaaaatttgttctgcccytcttttgtagaatagattttctcatacatatacattggttttgtgtataatttcagcacagcctgctcattttcttaatgaaatttatatgttcaaattt

SEQ ID NO: 193290 - DNA, 201 bp, Homo sapiens
gatccatagccattgtcttctcatattttagaacaccttctccagggtcattaaaaaaaatttgtaccacccttctcagccttcccattcctccccaatcrttgttataagctgtaggttaatgattcagtagatatatgctcaccatttccagagattagcaaggtaagcatctcctctgcactgatgaaatgcttttta

SEQ ID NO: 193291 - DNA, 201 bp, Homo sapiens
cctctttaagaaattgtatgccccagtttcttttgctaatcttctctaagaggagcagatgaggttcagactcagttaatacaaagtggatattgatattatctctatcacattataaaaaatattagagaacttaagatgtctagttttattttttccttagtctttgactctgtagttaggaattggttattgaatgac

SEQ ID NO: 193292 - DNA, 201 bp, Homo sapiens
tacaggcatgcaatgtgaaataagcacatcatggagaatggggtatccatcctttcaagcatttatcctttgagttgcaaacaatccaattaccttctttwagttgttttaaaatgtacaattaaattattactgactgtagtcaccctgttgtgctatcacatagtaggtcttattcattctttcaaactataaaaagct

SEQ ID NO: 193293 - DNA, 201 bp, Homo sapiens
ttgccacctactcatctgacaaagggctaatatccagaatctacaatgaactcaaacaaatttacaagaaaaaaacaaacaaccccatcaaaaagtgggcraagtatatgaacagacacttctcaaaagaagacatttatgcagccaaaaaacacatgaaaaaatgctcatcatcactggccatcagagaaatgcaaatca

SEQ ID NO: 193294 - DNA, 201 bp, Homo sapiens
atgtctctatgtctcgtaagattgttcactgtttcctgctcatgatttctttcaactttcctggaacactatcagttccagtccaacatttttttttttttcaaattaagtgcatttatcttcaatcatttcaacacaactttaaggataatgtggaagctggtaacgatcaccaaaccctcactaagtaacatttttcat

SEQ ID NO: 193295 - DNA, 201 bp, Homo sapiens
tcttgatgaggaccctggtgtttaggattttgctgatttgggatataggttatctttaaaacaatagtcagccttcagcatcttatttacactgagaaggmcccagctgtgtctttttcttatattcttgtccacgaaatatgatgataagtttaagcaactttctattgttgatgatattcacttatttaatttttttat

SEQ ID NO: 193296 - DNA, 201 bp, Homo sapiens
taaaaaagcttccagagagtgatagacctaactcttttatatagggtggtcagagaaggctttttgctaaatggtatttgagcacagacttaaaaaaaaaagatgaagaaaatgggacaggtggaaatctggaggaagaatattttgaacagggaggaaaatagtcacgaagcatcaaggacagatccacattaggtgtac

SEQ ID NO: 193297 - DNA, 201 bp, Homo sapiens
aaacttattttagtcataaaatctatgggcttaaaagggttagaaaaatgaacaatgagcttcaatgatttaagtacatagtgaagactaagaccaaaaaagttaagcagattgtccttgaccacgtgactagatagaagggcaagtagaccgtgttttattcaggtcttgatgcatctaaaaattcatcttacgcttctt

SEQ ID NO: 193298 - DNA, 201 bp, Homo sapiens
agaataactttttctcccttcaggttgtaatataatttatgaacaaccgtcaggatttgctcaaagcatttctacaatgtaagatattgctttgaagggcmtgggtggcattactgaatgaattctgacctagattcctaagagaagcaggtctcacagctctccgctccttctcagacacgcagtaatctgagtctcaag

SEQ ID NO: 193299 - DNA, 201 bp, Homo sapiens
gtaaatattaggagacgagacaacattgtttttatatttctgggcaagcactttcattttcccctgaaacatacctggcatagtctttcacagctaacaaatgtcaagacattgcaaaatgtacatttataaataacatatgtaaacatagatgtgaagattataataaggacatgatctcttataccatagctacaatat

SEQ ID NO: 193300 - DNA, 201 bp, Homo sapiens
aggatttgtgacctttactgtgagtgacataagctaagccaaagtagaggcagaatgacctcttacctcacagaaagtcacacaggaggtcactttcaggrcaatgtaaggacaggtgccctactgcttctttgccctgcagggcctttcggtttggctgatttatccaacctcgcatacaccctgctccagtaattcaaa

SEQ ID NO: 193301 - DNA, 201 bp, Homo sapiens
accaccaggtctcatgagaactcacccactatcacaaaaacagcatggaagtaaccatctcgatgattcaattatctcccactaggtcgctcccacaacakgtggagattatgggaattattaggttggtgcaaaagtaattgcagttttggccttcactttcaatggcaaaaaccgcaattacttttgcaccaacctaat

SEQ ID NO: 193302 - DNA, 201 bp, Homo sapiens
gtaaagaatttttttaataggacaaacattccgctgtcccagagtaaggattctattattctcctttctctgctctctcaatcacaataatcatattcaaygacaggtttcttaatagtgagtcttgtctccctaatgtgctatgcagaacctatggcctggaatattgtgaatgtttataaatgtttatattttagaagc

SEQ ID NO: 193303 - DNA, 201 bp, Homo sapiens
ctcactgaaacttctgtctcccaggctcaagcaattctcctgcctcagcttcccaagtagctgggattacaggcacctgccaccatgcctggctattttttgcacttttagtagagatggggtttcatcatgttggcaaggctggtctcaaactcctgacctcaaatgatccatccacttcggcctcccaaagtgctggaa

SEQ ID NO: 193304 - DNA, 201 bp, Homo sapiens
tcaccctttccccacacactttaagtccaaaatgagtccccagactcatttcccttgggcagatcaatctatttcacacctcgtgaccttacttaggaggmctgtgtcagaaagaagttatgattccatttgtagcatttgctcaatattacctaccttttcactcgatgaatgcctgtgagcttgtcaaacagaaaccac

SEQ ID NO: 193305 - DNA, 201 bp, Homo sapiens
ctctactaggaagacttggtcttttctctgttgctctagctactgcagttatctagagttcattttgacacttcttttcacacatcccaccataactttamaatacagactattcaaaaagaaaaacagtattctggagcttattacattttttgtttatgtgtttgttttttcaaatcattaaaatgatcataacattaa

SEQ ID NO: 193306 - DNA, 201 bp, Homo sapiens
cagaaactaagttttttcaccaaagatctttctcttggggagggaagaaaaggtaagggagcactttctgatgtttttggttgaggagatagagagacatrgttcatttttccttaggagtcatcttacaccatggtcacagggacagctctgataatgatctggaagtatgaactaaggtttcttaggtgagtccaggat

SEQ ID NO: 193307 - DNA, 201 bp, Homo sapiens
cagcactttgggaggctaaggcaggcagattgcttgagcccaggaattcaagaccagcctaggcaacatggtgaaaccgcatttctaccaaaaaaaaaaawaatatatatatatatagccaagtgtggtagcccacacctgtagtcccagctacttgggaggctgaggcaggaggatccattgaatgcaggaggttgaggc

SEQ ID NO: 193308 - DNA, 201 bp, Homo sapiens
atatgtattatatattcattatttcatatgcttatataatgtatttacttttagaaatacatattttaacttttaaacctgtactctggtgagactctataggagggtttttttttattttttgtttgtttgtttcaacatagatcacatcagaaagtcttgaaatgactaggtgctttcttcagagtatttaaattttat

SEQ ID NO: 193309 - DNA, 201 bp, Homo sapiens
aattcatagtcgtttgaatcattgctttgcaatatgtaatacgtcatttttcttaggctgctttcaagatttttttctttgtctttagttttcagcagttkgactttgatgagtctgggcatgggtttctttgagcctatcttgttttagtttcactgagcttcacgaatctgtagctgtatgttttgccacatcggccca

SEQ ID NO: 193310 - DNA, 201 bp, Homo sapiens
taaaattataaatataaaatatgaattttattctgtattgatatataatatttgtacatgtttatggggtacatgtaatattttgttacatgcataaaatrtgtaatgatcaggtcagggtatttagggtatacatcaccttgagtatttcattatttctttatgttgggaagtcctctcttccagctattttgaaacata

SEQ ID NO: 193311 - DNA, 201 bp, Homo sapiens
tcaccttgagtatttcattatttctttatgttgggaagtcctctcttccagctattttgaaacatacaatgtgtgaaactatcgtcattctactctactawtgaacattaaaatttatttcttctatctaacctcgtgtttgtatccattaaccaacctctctttatccccctactccacaaacatgcaaactcttcccat

SEQ ID NO: 193312 - DNA, 201 bp, Homo sapiens
cagtacatgttaatggagaaaatgatggtagcaaaagtaataatatataataatttcatttaatatcttgaccttcttgtaaggagttcaagaaattcctragcatcatattatttcattttattttaatcttgaacaatgcagctgtgattaaatacctacaggagtagctattatgatatagagagttttactgagaag

SEQ ID NO: 193313 - DNA, 201 bp, Homo sapiens
atgctcagaaattattaggtgaatgtgttccaagaaatatgacaacttggacaacctggaaagttatggcaaataatgttttcaatagaataccaataaaygttaatctgtttgatataatttgatgattagactacaaacagtacatgttaatggagaaaatgatggtagcaaaagtaataatatataataatttcattt

SEQ ID NO: 193314 - DNA, 201 bp, Homo sapiens
atgaattataatgtgtaggaaacaagcccatttcacctttgcctacaagggagtgattatttttattatactgtaagtatagtaagcaaactggccctctyctctggagggagacatgtctctattgtccaaggctaggctgtttgttactcaaacatctttgaaaagatagtcttaagaagaaaaaaaagaaagaaagaa

SEQ ID NO: 193315 - DNA, 201 bp, Homo sapiens
accacaatgaaaatttatacctgagacttattcattcttccttcagaattcatctcattggagaattgttttttaaaaaaatccaatgtaattaaaacacwttttttgttgaataactttatatagaggtaaactctgttccagtgattggaaactgtctgcagagggagagatattaagtaattttggctatggggccat

SEQ ID NO: 193316 - DNA, 201 bp, Homo sapiens
cttataatacgttagcttatttaatcctcacaacagcccttctaggtaagtactgatattgccaccataccacagagaggtaaatgtattgcaaacaaacactgcagagaacattttaagacattacgtgcaagtcatctttagaaacgaagtttaattaaacttgatttgatcctttaacttctcgactctattaaattc

SEQ ID NO: 193317 - DNA, 201 bp, Homo sapiens
gcttataatacgttagcttatttaatcctcacaacagcccttctaggtaagtactgatattgccaccataccacagagaggtaaatgtattgcaaacaaacactgcagagaacattttaagacattacgtgcaagtcatctttagaaacgaagtttaattaaacttgatttgatcctttaacttctcgactctattaaatt

SEQ ID NO: 193318 - DNA, 201 bp, Homo sapiens
tggacatataatgtcatctaatgtagggaatgacatcccattcatgttgccatgttctattggtcaggaacatgtttcaggttttacccacatgcaagggkaggggagctgaggttaggggtgactcatgggtgcttaccctaaggtgtgttccccatactcatttatgggcaaatacttaagaagctgactaaagtaagt

SEQ ID NO: 193319 - DNA, 201 bp, Homo sapiens
tgcttataatacgttagcttatttaatcctcacaacagcccttctaggtaagtactgatattgccaccataccacagagaggtaaatgtattgcaaacaaacactgcagagaacattttaagacattacgtgcaagtcatctttagaaacgaagtttaattaaacttgatttgatcctttaacttctcgactctattaaat

SEQ ID NO: 193320 - DNA, 201 bp, Homo sapiens
ctgttgtagtgacaatctcaagtagtaactgtggcagtctgccacatttattcattactttttttttttttttttttggaaacagagtctcactctgtcgyccaggctggagtgcagtggcatgatctcaggctcactgaaacttctgtctcccaggctcaagcaattctcctgcctcagcttcccaagtagctgggatta

SEQ ID NO: 193321 - DNA, 201 bp, Homo sapiens
ctgcttataatacgttagcttatttaatcctcacaacagcccttctaggtaagtactgatattgccaccataccacagagaggtaaatgtattgcaaacaaacactgcagagaacattttaagacattacgtgcaagtcatctttagaaacgaagtttaattaaacttgatttgatcctttaacttctcgactctattaaa

SEQ ID NO: 193322 - DNA, 201 bp, Homo sapiens
gctctttctacccaacaaatatgaagggctgtagaagctcagggctgctgcctttgctcactagaagcagggagctatcttcttcttccctggaccctttyttgaaaacagtttcttttgttttttgttagcatctctgcattcctcctccttcattcagtcttgtaatgatggtctcaagtagtaacagtagtaactgtt

SEQ ID NO: 193323 - DNA, 201 bp, Homo sapiens
catgtttgccatcttgacgccattagatgggaagtactttgctttcccagcaaccaagggtaatatgtttggaacttatatataatttccattaataatarcacaaacaacactatatgactctgactctgtatgccaggggctcgtctgcttataatacgttagcttatttaatcctcacaacagcccttctaggtaagt

SEQ ID NO: 193324 - DNA, 201 bp, Homo sapiens
ctaccttccttccttccttctctctctcccttccttccttctctctctctcctttcctttctttctctttcttccttccttcctttctttctttctctttstttctttctttctttctttctttctttcctccttctttctttccttccttccttttctttctttccttccttccttccttccttccttttcttttctttc

SEQ ID NO: 193325 - DNA, 201 bp, Homo sapiens
tgcttattgggcatatatatattggtaatatgtaattgataagggaagatacagaacatatatgtgcctctatggtgttatcttctccactttgtcacatstttctttccattattttctaaacaaaacgtatacgcagtggctggtaaggtagcaggatcaaattatttttaattttttcttcatgtcaaaaataagacc

SEQ ID NO: 193326 - DNA, 201 bp, Homo sapiens
cttattgggcatatatatattggtaatatgtaattgataagggaagatacagaacatatatgtgcctctatggtgttatcttctccactttgtcacatgtwtctttccattattttctaaacaaaacgtatacgcagtggctggtaaggtagcaggatcaaattatttttaattttttcttcatgtcaaaaataagaccta

SEQ ID NO: 193327 - DNA, 201 bp, Homo sapiens
attgtcaacccatgatttgaaaataagctaacctatcatttggaggccaaataggaaatgaaaatatgtttctacacaaagcaagagagcttatttctaaytaattttcacttaaggaagtgctaaaatttatttttgcccagaataaaaggttttgcttacgagaagaaaagcagcttgtataaaagtaggtaaatcaaa

SEQ ID NO: 193328 - DNA, 201 bp, Homo sapiens
tcttcactgtaacataatcattgttttagatgtttctatccttttttgacctagtaaaaacaacaaataaaaaaattattttttaaaaatgttaagacccmatataaagcacgctaacatccttagtttgtattcatgatatttcaataagcatctaaaaattaattactaggtacacatagatataatacgaaattccac

SEQ ID NO: 193329 - DNA, 201 bp, Homo sapiens
tctttatccccctactccacaaacatgcaaactcttcccatcctctgataaccatcattctactctctacccgcatggaattaactttttaactcccacayatgaatgagaacatgtaatattaatctttctgtgcttggcttatttcacctatcatattgacctccagttccatctatgttgctgaaacttaaaatggtc

SEQ ID NO: 193330 - DNA, 201 bp, Homo sapiens
acataatcattgttttagatgtttctatccttttttgacctagtaaaaacaacaaataaaaaaattattttttaaaaatgttaagacccaatataaagcaygctaacatccttagtttgtattcatgatatttcaataagcatctaaaaattaattactaggtacacatagatataatacgaaattccaccatttgtaacc

SEQ ID NO: 193331 - DNA, 201 bp, Homo sapiens
gttaagacccaatataaagcacgctaacatccttagtttgtattcatgatatttcaataagcatctaaaaattaattactaggtacacatagatataataygaaattccaccatttgtaaccattcagcaattcaaccacccagacatcccacatagagaggattgcctgtaactaccctgcctagattcaacttcacgtc

SEQ ID NO: 193332 - DNA, 201 bp, Homo sapiens
gagttcagaaattgaagggttgtaaacataataataaccattatttgtcggagaatttataatgtaataggcaatatgctaaaagctttacatgcattacrtatatttgtaaagtggggatagtaataggactaccatcatattctcctttgaggataaaaatgtctgactgatatcaaaggcttagtgtaattttcaata

SEQ ID NO: 193333 - DNA, 201 bp, Homo sapiens
tccacaattttaagaattctactaaattatgcattgtaaatatggtgattaagtcttaaatagcatagagtatgttaaatctttccttagagcatgtgttkaactaagtcattatttctcagcaatgtcagaaagtttgttaggaagtagaagtatggtgtgtgtctctttctcacagctccagtagtatggaaactttct

SEQ ID NO: 193334 - DNA, 201 bp, Homo sapiens
gattattgattactttttgtgtttacattaatattgaatgaatgaatgattaacattccttaaacactgcaaagattatcaagaaaaataaaaaacaaacrtcttgttttttatgttatcttaaacaggcaaattaaaaaagatgatctatttttcggtgccaagataacaatgcattttagcatcttgttgcatatctta

SEQ ID NO: 193335 - DNA, 201 bp, Homo sapiens
attttgaattctctgtaatattattcctaggctagttataaaacttccagaaatgcagagtctggtggggaggtgtgaacatataactaactaaggatgtrtcttgctgcactgagcttcagcttttatttcacatcattatggctgtttcacccttcttttaaatttacctctttaacctttaagcaaagttactgaagt

SEQ ID NO: 193336 - DNA, 201 bp, Homo sapiens
cccagcagttctaaaattatttcacgaaaattacagaactatattacatcgatcagctgtaaaaaatttgattctcgttgaacagaaaaattgttcttttmtcaatgtatatgttgtttcaagttttttttcttctttagtgttattataataactttatgttctagaagacaatattgaaagggtctctggttcatccta

SEQ ID NO: 193337 - DNA, 201 bp, Homo sapiens
ttgtcatcatagtaatgataggcaaaaagaaacctcatttttccatattttggaaatctaactcagactcaatttcatggtattattcataaaggatagctgccttttatttatttaattttttaaatgtgtaggattacattctcactattcaaattctgatgaggaacacattaagaactagggtgctataatatttat

SEQ ID NO: 193338 - DNA, 201 bp, Homo sapiens
tttcaagttttttttcttctttagtgttattataataactttatgttctagaagacaatattgaaagggtctctggttcatcctacctttgctattaattktcctttttttggcagaaataatagcttgttttttttattaattggaatgaatactctccatttttctatgaaaattgttctgccttccatgcttatttca

SEQ ID NO: 193339 - DNA, 201 bp, Homo sapiens
ctgatgaggaacacattaagaactagggtgctataatatttataaaacatgtgtacatccattttggtttaaaatattcttcatgtacatgtattttaaaragtcatagcatgtccgtgtatttcttcatgtacatatattttaaagagacatagcataagaaaactggaagggacccagcctcactaagtgatttcataa

SEQ ID NO: 193340 - DNA, 201 bp, Homo sapiens
tttgactttgatgagtctgggcatgggtttctttgagcctatcttgttttagtttcactgagcttcacgaatctgtagctgtatgttttgccacatcggcmcatctccagctattatttcttcaaatattgacttctacgccacacactctctcctctccttctaaaactctgatgacatgtgttaagcactttatgtatt

SEQ ID NO: 193341 - DNA, 201 bp, Homo sapiens
ctgtatgttttgccacatcggcccatctccagctattatttcttcaaatattgacttctacgccacacactctctcctctccttctaaaactctgatgacrtgtgttaagcactttatgtattgtctcatagatctttgagtctgttcactttttatttccttctatattttctattgtttacattggatatctattcacc

SEQ ID NO: 193342 - DNA, 201 bp, Homo sapiens
tctgatgagcctttaagaatagagttaatacaatgagaacacatgggcacagggaagggaacatcacacaccagggcctgtcgagtggtagggggttaggkgagggagaacattaggacaaatacctaatgcatgtggggcttgaaacctagatgatgggttgataggtgcagcaaaccaccatggcacatgtatacctgt

SEQ ID NO: 193343 - DNA, 201 bp, Homo sapiens
gtaatgatgtggatgaccacatgagattttcttttttaaattacattgtaggcgaacacattttaggactattccaagtaagttatctgttagtataagasacttttagactatacggatgaggttaggtgaatgtccaaggtcatgaaacaaagagttatagaaccgggactgttcctaccttttattattgctgaaatt

SEQ ID NO: 193344 - DNA, 201 bp, Homo sapiens
catactgcccagggtaatttatctcacttttgaacttaaccatattattactgtccattagcaggaaatgataggatgtgaaacaatgaatatgttcagcmccatagccctttagaccagttatggtgtgttcttcctggaatacactctcttgttataatatctgatgagcctttaagaatagagttaatacaatgagaa

SEQ ID NO: 193345 - DNA, 201 bp, Homo sapiens
tgaacccgggaggcggaggttgcagtgagccgagatcgtgccactgcactccagcctgggcgagagagcaagactccatctcaaaaaaaaaaaaaaaaaaattttttttcaaatgctattatttttaagtgcctagtggtcttcagtttcccattagaaataccaagctacataataaatttgctcattttatggtgccat

SEQ ID NO: 193346 - DNA, 201 bp, Homo sapiens
ttgaacccgggaggcggaggttgcagtgagccgagatcgtgccactgcactccagcctgggcgagagagcaagactccatctcaaaaaaaaaaaaaaaaaaattttttttcaaatgctattatttttaagtgcctagtggtcttcagtttcccattagaaataccaagctacataataaatttgctcattttatggtgcca

SEQ ID NO: 193347 - DNA, 201 bp, Homo sapiens
cttgaacccgggaggcggaggttgcagtgagccgagatcgtgccactgcactccagcctgggcgagagagcaagactccatctcaaaaaaaaaaaaaaaaaaattttttttcaaatgctattatttttaagtgcctagtggtcttcagtttcccattagaaataccaagctacataataaatttgctcattttatggtgcc

SEQ ID NO: 193348 - DNA, 201 bp, Homo sapiens
catcatgaatcttcttgccatctcctaattggatttattttgctctcttttgtacccttgcacctacatcagtgtgtgtgtgtgtgtgtgtgtgtgtgtgtttcaacaggtatatgctcaataaatgatagttaaatggaagtgtattaaagtcaatgggtaaaaataaagtcaatgagtgcttgaaaatataaaaataac

SEQ ID NO: 193349 - DNA, 201 bp, Homo sapiens
gcatcatgaatcttcttgccatctcctaattggatttattttgctctcttttgtacccttgcacctacatcagtgtgtgtgtgtgtgtgtgtgtgtgtgtgtttcaacaggtatatgctcaataaatgatagttaaatggaagtgtattaaagtcaatgggtaaaaataaagtcaatgagtgcttgaaaatataaaaataa

SEQ ID NO: 193350 - DNA, 201 bp, Homo sapiens
acactaggattacaggtgtgaaccactgaactcagccttcagaaaattttattggataacactggtgtagacagatctcatttttactgcttttaaaaagmgtccaaagtttggaatgagatgatttgtcttcacctttttgctccgttgactgactggtatatgttcacgaacagtttacttactgactttccactttct

SEQ ID NO: 193351 - DNA, 201 bp, Homo sapiens
atacatgttcacaaacatattatgatggatggcccaagacatgggccaaatggaagatgaaaatttagagttcttagctctggctatggtttctaattttstttcaaatgtttatgatttaatcaatgtatccacccttaagagtcttgaaaaccagactcttaaaacaaaggtcttttattgagaggcagaagacagttt

SEQ ID NO: 193352 - DNA, 201 bp, Homo sapiens
cagaaaatgagtaagacagagtaggatttattaagcaacagaaaagctctcagcagtagaggggccccaaaagagggctgccagtaaggggctgagttcthtttctttcatgtggcaaaaacaaggaagtcttctgtgggttccaccctgatgggggagctaaagttccccctaggggtgatgcatccgtgcatacctggg

SEQ ID NO: 193353 - DNA, 201 bp, Homo sapiens
tttcaaaaacaaacaaaaaatagtaagaagggtagcattgttttgcataattgcaaatctctttaatgcctggcttcatggaagacagctgggtaaattayatctggtgctatgtttctgttactggatcatatgtcatatagcctcttgaaaacttcactgtacattcaaaagagaataagagtaagaaaagcaaataat

SEQ ID NO: 193354 - DNA, 201 bp, Homo sapiens
tccagactctaatttttttcacaactagaacctaatgtaaactggcctgccattattttctgtagcaatataatcttgagtttctttaaaaatgccttcartaggtcaggcatggcagctcacacctgtaatccctgcactttgggaggcctaagtgggcagatcacctgaggtcaggagttcaaggccagtctggccaac

SEQ ID NO: 193355 - DNA, 201 bp, Homo sapiens
tgtataaattattttatttgctcttgagatatttaagcccacatatgtatgtcatgcatgttcttttctattgggcaggaaatattgcaagcatatcgatrgtgataattaatattttctaaacagtcaaaaacaggtgtacctttccaaataaatctaaataaaattcaaaacaaacttgttgaatgacttcagaaaaga

SEQ ID NO: 193356 - DNA, 201 bp, Homo sapiens
atctttggtgaagggtgtgttgttctgagtgtattaactaacacaaaaacaaaaaagaaaaaaaaaagaaaaaaaaaacaaaaaaacaaaaaacaaacaaaacaaaacaaaaaaacaaaacaacaacaacaaaaagaaatagtatgattaacttaattttcaatccatatgttattgtatcaatttctgttttagagtcca

SEQ ID NO: 193357 - DNA, 201 bp, Homo sapiens
catgcacacgcatgcagtcatggaccacgttacaatgtttaagccagtgatggaacacatacgttctgtaagatttaatggagcctttatagaaacttaayatagggcatgtgatattggttttgcaaatcaagtagaggaaatgattgatattcagtaatggtgctgggacacttggttttccatataatatatataaat

SEQ ID NO: 193358 - DNA, 201 bp, Homo sapiens
ataaaatacatattttacagtaatttttgacagaaaggaaaataagtgaaccagcttatttcttatttatttcaaaactctgaattattagtagcataaawtgtttgtgtgtatctgcgtgtatgtcttgtgcatccatgtgtgtgttttttgcagtgtgtgcgtccatatatgtgcgcacgtgcactaggtaagcatacc

SEQ ID NO: 193359 - DNA, 201 bp, Homo sapiens
aaattttaaaagaaatttggggatctaattttattgtgatcctcacataaatattcaggtggttagaatacctgaaatcgaattaaaatttaaatttttaraaggcttcccatagattcctaattccagaaagagaaagaatctttagagcatcgttttttttaatcaaggcttgaagattcttgatttaaagacgttgaa

SEQ ID NO: 193360 - DNA, 201 bp, Homo sapiens
tacatattttacagtaatttttgacagaaaggaaaataagtgaaccagcttatttcttatttatttcaaaactctgaattattagtagcataaaatgtttktgtgtatctgcgtgtatgtcttgtgcatccatgtgtgtgttttttgcagtgtgtgcgtccatatatgtgcgcacgtgcactaggtaagcataccagaaag

SEQ ID NO: 193361 - DNA, 201 bp, Homo sapiens
atcttagcttgctgggctctgtggggatgggatcccctgagctaaaccacttggctccctggcttcagctccctttccaggagagtgaacggttctgtctygctggtattccaggcgccaccagggtatgaaaacaaatcctgcagctagctcgttgtctgcccaaacaaatggcagcccaattttgtacttgaaacccat

SEQ ID NO: 193362 - DNA, 201 bp, Homo sapiens
ctttgctttccatttgcttggtaaatcttcctccatccctttattttgagcctatgtgtgtctttgcatgtgaggtgggtctcctgaatacagcacaccartgggtcttgactctttatccaatttgccagcctgtgtcttttgattagggcatttcccccatttacatttaaggttaatattgttatgtgtgaatttgat

SEQ ID NO: 193363 - DNA, 201 bp, Homo sapiens
cctttaccattatgtcatgcccttctttgtctttttttatctttgttgatttaaagtctgttttatcagagactaggattgcaatccctggttttttttttctttgctttccatttgcttggtaaatcttcctccatccctttattttgagcctatgtgtgtctttgcatgtgaggtgggtctcctgaatacagcacacca

SEQ ID NO: 193364 - DNA, 201 bp, Homo sapiens
attccattcttgtatttttccttttcctctttctaaatgcagtgtagaacagtgcgggacaatgaacaaaacatgcaagttaaataaaagtgatttctagkcttggctccgcagatgtgacctgtggtactcagatcaagtcagctaacctctgtggtctcagcttcttctgtaagatcaagaggaggggtttgtttacca

SEQ ID NO: 193365 - DNA, 201 bp, Homo sapiens
tggattgattcctttaccattatgtcatgcccttctttgtctttttttatctttgttgatttaaagtctgttttatcagagactaggattgcaatccctgkttttttttttctttgctttccatttgcttggtaaatcttcctccatccctttattttgagcctatgtgtgtctttgcatgtgaggtgggtctcctgaata

SEQ ID NO: 193366 - DNA, 201 bp, Homo sapiens
tctattatattaccaattaattaacaaattagaaagctagttcatcatttctgaccttttatgcatgttaacttttaactttcatttctaatgactgtttkgaaattaagccttgcagttcatgttgaaagagagaaacaatctgattagcaagataaataaggcttgccttgataccaagtacatcttgatattgggctg

SEQ ID NO: 193367 - DNA, 201 bp, Homo sapiens
catagtaattatttaattgttgtgaaaatatttataatagtcttacatgttaagaacacatctcatccggtaggagaggaagaaagacttccctgaggtamtttgacttagtagtaaatatggagagggtagctttccagacagaggtagtaatgtgtataaagattactctgaatagagaatggttctttatagaaagtg

SEQ ID NO: 193368 - DNA, 201 bp, Homo sapiens
tttctacaaattattaaagtgcttcttaacaacactctacatagacctatgaagctaaatcccagtaatatagtgcgtgcataatattgatattcataagrataaagaggctattaaaagcatataagaatgattagtacaaggcaacattgcacaaaacaacccctctttcagcatctttctttatgctgagtttttttg

SEQ ID NO: 193369 - DNA, 201 bp, Homo sapiens
tttacacttgagtagttaataaatcattaaacttcagtgacaaagcaccagacattgagctgagtgttggagccatagtgggaggaaaaaaactctgagartcctggtacttatagagcttataagttaataacattgaaaaatatttaaaataataaatatactgtataattaattatcctaagcccaataaaaaaatga

SEQ ID NO: 193370 - DNA, 201 bp, Homo sapiens
agtgaactcattcctctgaggcacactctaaatgtttcattgttgcttgatctaactgttaatgttcttattgcaggaaaataaaatgaattctgcttacytgatgcaaaattataatattcaacaaatatgaagtagttgactaactaaaagaaaccactataggactgggcttagaaacattaggaaataggcctattt

SEQ ID NO: 193371 - DNA, 201 bp, Homo sapiens
tgagacagtctttatttcttcttcccctttgaaggataattttactggatatagaatcctaggttggtgggtttttttctttccacactttaaatacttgwctccactttcttcttgcttgcattgtttctgattagaggcacagtgtaattcttattcttgttcttctataggcaaagcatttattttctcacatttgtc

SEQ ID NO: 193372 - DNA, 201 bp, Homo sapiens
tctttctatttatttagctctcctttgatttttttaggactttgtaaatttcatcatatacatcctgtatatattttgttaaatttatacttaagaatttsactttactatttcactgattttagagtaaatggtattgtgttttaagattcaaattccagttgttcattgtcagtgtatagaaaggcaatttaattttat

SEQ ID NO: 193373 - DNA, 201 bp, Homo sapiens
agaagacctaaataagacataccatattcatgaattagacaactcaacataataaaatctatcaatactccataaattgacctataagtttaatccctttyctataaaaattcaagcaaagccttgcatctggaatacattttaaaaatctccaaactcatcagtaaaaatcaggcaatctgcctaaaaatatgcgcaaaa

SEQ ID NO: 193374 - DNA, 201 bp, Homo sapiens
tcttttcctttcctgtggatttgaaaacaaacattttagttaactgatctggaaatgaataaaaattgttgcttataaatttaggataaaaggagaagcayaatctctgttagtcacaaaattatttagtccagtttgccagcaaaagttacatcaaatagcttttagagtacatgaggaattctaaaatttagaaatata

SEQ ID NO: 193375 - DNA, 201 bp, Homo sapiens
tatctttggtgaagggtgtgttgttctgagtgtattaactaacacaaaaacaaaaaagaaaaaaaaaagaaaaaaaaaacaaaaaaacaaaaaacaaacaaaacaaaacaaaaaaacaaaacaacaacaacaaaaagaaatagtatgattaacttaattttcaatccatatgttattgtatcaatttctgttttagagtcc

SEQ ID NO: 193376 - DNA, 201 bp, Homo sapiens
atatctttggtgaagggtgtgttgttctgagtgtattaactaacacaaaaacaaaaaagaaaaaaaaaagaaaaaaaaaacaaaaaaacaaaaaacaaacaaaacaaaacaaaaaaacaaaacaacaacaacaaaaagaaatagtatgattaacttaattttcaatccatatgttattgtatcaatttctgttttagagtc

SEQ ID NO: 193377 - DNA, 201 bp, Homo sapiens
aatatctttggtgaagggtgtgttgttctgagtgtattaactaacacaaaaacaaaaaagaaaaaaaaaagaaaaaaaaaacaaaaaaacaaaaaacaaacaaaacaaaacaaaaaaacaaaacaacaacaacaaaaagaaatagtatgattaacttaattttcaatccatatgttattgtatcaatttctgttttagagt

SEQ ID NO: 193378 - DNA, 201 bp, Homo sapiens
tattttaaatagtatgttttaattttattttaaataattttaaatttatatgttttaaatttattttaaatatttataaatttaagtatcttaaatttatyattataaaataatatattttagatttatttttatatgtaatttatatatacacaacctatctgaaatttaaaattttactatttattttggtcaattaag

SEQ ID NO: 193379 - DNA, 201 bp, Homo sapiens
gataaaaatagacttctcagttgtcctcaaatgatttgtccaccctttcacatctattttcaagccaaaggttcagggaattcagtgtcttaaaaatcacrtgtgacagtatgtatttggtcctgctttcttcagacactctcttttagtagaagaaaatgtattttttgtaaagttgtgccctctcctggtgaaaatttc

SEQ ID NO: 193380 - DNA, 201 bp, Homo sapiens
gtctgatattgacagtggggtgttcaagtctcccattattattgtgtgggagtctaagtctctttgtaggtctctaagagcttgctttatgaatctgcgtscccctgtattggatgcatatatatttaggagagttagctcttcttggtggattgattcctttaccattatgtcatgcccttctttgtctttttttatctt

SEQ ID NO: 193381 - DNA, 201 bp, Homo sapiens
tactatattgaataggagtggtgagagagggcatccttgtcttgtgccagttttcaaagggaatagttccagcttttgcccattcagtaggatattggctrtgggtttgtcataaatagctcttattattttgagatacattccatcaatacccagtttattgagagtttttagcgtgaagggctgttgaattttatcaaa

SEQ ID NO: 193382 - DNA, 201 bp, Homo sapiens
gtaaacaaggagaatgaaaagagataagactagtaagaaagatcggttgatctcagaagcttattctaaagtttaaactaaggttttaaagtatgtttgartctatagagtcataataaaatgtggcaatgttacaataattctcttattatatgcgtttttcacttgaaagagtttagttattgctctatcttatttgat

SEQ ID NO: 193383 - DNA, 201 bp, Homo sapiens
tagacttctcagttgtcctcaaatgatttgtccaccctttcacatctattttcaagccaaaggttcagggaattcagtgtcttaaaaatcacatgtgacartatgtatttggtcctgctttcttcagacactctcttttagtagaagaaaatgtattttttgtaaagttgtgccctctcctggtgaaaatttctagacaat

SEQ ID NO: 193384 - DNA, 201 bp, Homo sapiens
taatacatataaaatttgtctaatatttatttttacatgtttttctatcagttaaaactatttggttatcttggcatggacggaatatatcataatttatmctgttacacttaacaaaatattttatttaacaactttatgcttagagacagatttcttgggaatgaaggatggtcattgatcataagtgtattttgtaat

SEQ ID NO: 193385 - DNA, 201 bp, Homo sapiens
aaaatcataattttgaatttatttttcagatattatatgaatgtcctttttgggagtctgttactggagacattttgtgggtgccatgttaatttgctttyttatgtttcttgtgtccctacatttatatctgtgaatctaattgtgtagtcaattttttccaacattatggagtagcttttgtagggataaatgttttcc

SEQ ID NO: 193386 - DNA, 201 bp, Homo sapiens
gaataataaagtagatggtaacatgtatttaatttattgtttgactcaccttaatattttcactgaaagccaggaatttctgattatttctgttgcccttktaatcgacaacagctttctcctctcctactcacctttctacctgtgcagattagtcatctgtcaatcaagccagcttgttattagatggagagtgggagg

SEQ ID NO: 193387 - DNA, 201 bp, Homo sapiens
gaggagaggcgctctgatttttagagcttccagtttttctgttctgttttttccccatctttgtggttttatctacttttggtgtttgatgatggtgatgkacagatgggtttttggtgtggatgtcctttctgtttgttagttttccttctaacagacaggaccctcagctgcaggtctattggaataccctgccgtgtg

SEQ ID NO: 193388 - DNA, 201 bp, Homo sapiens
aagattaaccccagtaattttctccccagatagcttaattttctggcatttctatagtggtataaatttcatagaaacaaataaataatgctacagacatraatatagatacacgtgttcatatatatccatatctattcacgtatgcagtgcataatgacatttcagtcaatgacaactgcatatacaactctagaccca

SEQ ID NO: 193389 - DNA, 201 bp, Homo sapiens
atttgagaaaaaggacatcaggatgctaggaggaaggggaaagctggtggctgagtagtctttctacaacaaatacctagtgtatttgtcagattattgamtggagaatacaagtaataaactatagcattatttgacatgtgtgttactgataagtctgctactattccagggagctgaaatggtacaaagttgtacatt

SEQ ID NO: 193390 - DNA, 201 bp, Homo sapiens
actacaataaaactcatcatttatatttcttaaaggctggggtatgttccagatactctactaaatgatttttctggattattttatttaatccacacacratcttaggagatagttacaattattatttttacttcacatattagaaaacaaattcagaagtataacttgctctagtttacatatgtagcaatttactaa

SEQ ID NO: 193391 - DNA, 201 bp, Homo sapiens
agtctttctacaacaaatacctagtgtatttgtcagattattgaatggagaatacaagtaataaactatagcattatttgacatgtgtgttactgataagwctgctactattccagggagctgaaatggtacaaagttgtacattatgtctgctgtcatgggaactgccttgtcatcttgcctaaggcttcagtagttctc

SEQ ID NO: 193392 - DNA, 201 bp, Homo sapiens
atactccagcacaaaggactaggccaataaacaagattgctgcctccttctcctttctgcctccctccttccttcttctattttctgtgtaattttgtcargataaagccatataagttttagttataccatatataaaatagaaatttagatcacttgtatgcctggtagattgactttagcagatcctttttggatact

SEQ ID NO: 193393 - DNA, 201 bp, Homo sapiens
gcctcccaggttcaagcgattctactgcctcagcctcctaagtagctgggactacagatgtgcaccaccatgcccagctaatttttgtggtttttttttttggtttattcattcaacaaagatttattgaatgtatttatggaacactgaggatacagtagtaaacaagaaaccctccttgtgattagtaaattacactct

SEQ ID NO: 193394 - DNA, 201 bp, Homo sapiens
aaaaaaatgagattcttgcctggtgcggtgcgggcacctgtagtcccagttacttagaaggtggaggtgagaagatcgcttgagcccagaagtttgagtgyagcctgggcaacacagtgagacccccattaaatagataaatgagattcttttttaaccacatgacttgtaaactactagctttaaaattatgtaatttaa

SEQ ID NO: 193395 - DNA, 201 bp, Homo sapiens
attccagggagctgaaatggtacaaagttgtacattatgtctgctgtcatgggaactgccttgtcatcttgcctaaggcttcagtagttctcattgtaaayaaatgtacacatcagcaggcttctcataggtttgcatatataaataaagagaaatgggccgggctcggtggctcaagcctgtaatccgagcactttggga

SEQ ID NO: 193396 - DNA, 201 bp, Homo sapiens
ctgcaacctccgcctcccaggttcaagcgattctactgcctcagcctcctaagtagctgggactacagatgtgcaccaccatgcccagctaatttttgtgktttttttttttggtttattcattcaacaaagatttattgaatgtatttatggaacactgaggatacagtagtaaacaagaaaccctccttgtgattagta

SEQ ID NO: 193397 - DNA, 201 bp, Homo sapiens
tcttcagacactgcaaaacaaaaaaagaagagcacactaagcctgaagcaagcagaaggaaggaaaaaacaaagattaaggcagaaattagtgaaataggraagtgaaaaaaatataaaaagtcagtgaagccaaaaacaagtttttttaaaagatcaacgaaattaacaaacctttagctagattgaccaagaaaaagag

SEQ ID NO: 193398 - DNA, 201 bp, Homo sapiens
cctgcctcggcttcccaaagtggtgggattacaggcataagccaccgcgcccggccggcaaacattttctaaatgttatattcaattcaattcaaaagaaragatgtagaagtcaagataatgggtgtctttggagagagaagaaaaaataatgatgggggaggatgaaaggggttctgatttgttagtaagaattctatt

SEQ ID NO: 193399 - DNA, 201 bp, Homo sapiens
tggcatgcttataagtcacaagatcaataggtaggaatcaattgtatttctagacccttgcaacacaacaaaaaatgaaattaaaaaaaaattttattatrgcctcagaaaagaataaaatgctaaaaataaatttagcaaatgaaattcaaaactgcaaaacatcattgaaagaaatttttaaaaattttaaaaaattaa

SEQ ID NO: 193400 - DNA, 201 bp, Homo sapiens
acaagtgagagaaaataattggaatcatatatctcatagagacttatttctataatatgtaatgatacaactcaataacaaaaaataaatagcccaattamagcatggcagatgtccttaatagacatttatccaaagaacacatagaaatggtatatatacgtatagaagagatactaatcagcacatgcaaaggtgctc

SEQ ID NO: 193401 - DNA, 201 bp, Homo sapiens
tcaggcaaggatttctgttctctctactcttattcaacacaatatcagaacttttctacccactgtgataaactgaagaaaagaaataaagacatgcataytggaagtgggggggggacccaattattcctatttgcaaatgacatgaaggtccacatagaaaatcacatagaaactgaaaaactaaaccaaacaatacct

SEQ ID NO: 193402 - DNA, 201 bp, Homo sapiens
aacacataaacagaattaaggacagaatcatatgataatctcaatagacaaagaaaaagcattctataaaattcaacataccttcatgataaaaatactcracaaaccagacatagaagaaacatccctcaaaatacagaacgtcatgtacaacaaacccacaaccaacatcatactgaacagggaaaagttgaaatcatt

SEQ ID NO: 193403 - DNA, 201 bp, Homo sapiens
gcattgagatattttgcccataggggtggcataaagtaatgtacttttaaaagtataattttatggtttgcagtattaacagaatgtacaataatctgacyaatgatgttcattacgaagaactattagtagtttaggtaaagataaacagtctttattttttccaaaatggctgagtggaagcatttccatcatgcttca

SEQ ID NO: 193404 - DNA, 201 bp, Homo sapiens
ttagttgcttttttatctttgtatacattagttttggaaattgaataagttaaaaaacatttaaattctgaggactgcagagaggagtaagacataatttytatcctgaaggaaattttggagtgatgcaattagcacaacaataattgtttgaagaaagaggcagaagagagatacaaatgtcaatgaaaaatgcattct

SEQ ID NO: 193405 - DNA, 201 bp, Homo sapiens
gtagaatattattttagagtttataaaccaaacaaagattggtagaatgtatgtataaagatcacttttacttgttgaaattagtatctgatgatttcttrttgcttgtctcttctctagtttgaagtctactttgtacattcagaaagtaatagcttaaccctaaaatgattaaaaataaataaatgaaaaccaattttt

SEQ ID NO: 193406 - DNA, 201 bp, Homo sapiens
agacatgaaaaatcattatagacaaatcaaagcaaggcatttgagacatttaaggattggtaaagaaatagaaagagtactttagaggtatttgtctgccrctatatgagttcctcctactgtacccttcagaaggttccaagccctgtctttaattactctctaaaactggggacagtgtacaaggaaattatgtacctc

SEQ ID NO: 193407 - DNA, 201 bp, Homo sapiens
gaccacctccattcctaagtctttttccttcctttcctgcttctttttgaagacatgaaaaatcattatagacaaatcaaagcaaggcatttgagacattyaaggattggtaaagaaatagaaagagtactttagaggtatttgtctgccgctatatgagttcctcctactgtacccttcagaaggttccaagccctgtct

SEQ ID NO: 193408 - DNA, 201 bp, Homo sapiens
gtggctcgagcacctccctcttgcatcaagacctatgtgaagtccaaaaggaacactgatgtaagtttgtgtgcatgcttgctttctgaaggtggccattrtgtagtgtgtcctcttatcacaatgttgtcattctgttctaggtcatgcaccattactgggttgaaggtaactgcccaaccaagtgtgataagtgccaca

SEQ ID NO: 193409 - DNA, 201 bp, Homo sapiens
acaaagacggggcagggaccaccctgatataaatgaaagcctagtcccctccaagtgtcaccactgcaatgatttaagtattctctgcccttttgtaacaytgctcaaggttcacattcctagaaaggcaagttttattggcctggaaacttggaagcctgagaaacaacgcagcaggatgacatgggaatgggagagtaa

SEQ ID NO: 193410 - DNA, 201 bp, Homo sapiens
aaaagcatataagaatgattagtacaaggcaacattgcacaaaacaacccctctttcagcatctttctttatgctgagtttttttgagaatctgacatttyaaaatatggttataatataaagataagacattattcaccgtaggatgaaacgaattggctttaacagacatagctgtgtgagctgcacagtacatacatg

SEQ ID NO: 193411 - DNA, 201 bp, Homo sapiens
acattgactcagcaattccaatcttaggtcagagtccatgaaaactgaaagcttatgtctacagaaagcctgtacattaatgtttaaagcaacattattcrtaatagccaaaggtcaaaacaatcaaaatgccaatcaggggatgaatggataaagaaaatatggtatattcatacaaataaatgttattcacttataaaa

SEQ ID NO: 193412 - DNA, 201 bp, Homo sapiens
taggccctgtcaagggtttcaagttttatcctaaagacaattggaaagaccaagtgtttttaaggaaggaagccatgtgatcagatctgtgtttgagggargctgagtagacttggggagaccagttaggaaataattgcagctactttgaactaggatggtggcatcagagatgaacaaaagtgaaagtataaggagtac

SEQ ID NO: 193413 - DNA, 201 bp, Homo sapiens
atgaccaggttaataaaaatattagtttgggctcatacatattaaaaaataaataggacattgtatgattatatactaacttaacgttgagctgataaatmcaatatacagataaatttttataatcataatcatcttcttttatttatatcctgctcctactgagatgaatctctggttacatttacatattgaattaca

SEQ ID NO: 193414 - DNA, 201 bp, Homo sapiens
ataccacagtgtatttgaaagtgactgtggtgtcctagtcaaattacacagaaaaggaagtagtcctgggagagtaatcttcacttctaatgtaaggcacmacatttacgatttcaatgcaatttatttttctccagcaacagcagtttaaaaactagtctattttaaagaatatctattttggtaccaaaatccgaaatg

SEQ ID NO: 193415 - DNA, 201 bp, Homo sapiens
aggcaccacatttacgatttcaatgcaatttatttttctccagcaacagcagtttaaaaactagtctattttaaagaatatctattttggtaccaaaatcmgaaatggagttgatggggaccagattctataccaaatagcagagagcaagagccatatcttttctcttacaagaggctctacaaactttacaaaatacaa

SEQ ID NO: 193416 - DNA, 201 bp, Homo sapiens
ccctttgccttgtaggcaactaagagttggggaaaatgtaaagttccttctcagcatggagtagcctaggattcattaagcatttatctgtcataaacacrgacctgaacagcttcattacaatacacagtgttatgtctggtgatgaaaaaagagcacattttaatgaaataaagtgaaattttaggtatctttctcaat

SEQ ID NO: 193417 - DNA, 201 bp, Homo sapiens
tctgtttaagcttatctagtggagtggtccatgaacacaaaatgtgtctattcaataagtgtctggaagtaatcattttatctattgtacacttcgtttgwtttattatgtcaatatgacttttaattatagaggtttttttcttatggcatattatgcatactactagaattcaagaaagaaattaattgatgtatatga

SEQ ID NO: 193418 - DNA, 201 bp, Homo sapiens
tctgattctaagatttatgcttctaatattaccttatgatatacttatggtatatacaaaccaaataaaatgcagattttaattcattttttttccatcartcttagcattattgacatttttgatagcatatctattgattgtgggggtctgtcctgtacattgtaggctagttagcatggcctctacctatgagatgtc

SEQ ID NO: 193419 - DNA, 201 bp, Homo sapiens
atgcaaatcttttggcatatttctatttctttatttttctctttttaaggagtttgttctctctttattgaagatattactcccatatcttctagattccmtttttgctgttgagaagtctgatattaacttattatgttgttaatgtttttgttgattctccttcttagtagtaatttttattatagctcatattttact

SEQ ID NO: 193420 - DNA, 201 bp, Homo sapiens
ctcgtaccaatttaatacaatcatatgctacaatacaaccctttgctataagtcatctccaacatgtgatgctgacacttgcttaggcgatgagtgtaaaytagcatcttattgcttatgtaatttgcatttccttattataaatgagattgaatatttctatatagatttttttattaatgtttcttttgtaaaatacct

SEQ ID NO: 193421 - DNA, 201 bp, Homo sapiens
ctattaatttcaggttcttatttatcaagttccatttactactgattatttcctatgtttgtcatatgactttaaaaagctgttcctcagttctctggagytaacaagatgctattagaaaatagcctttgtgttgttttcataaagcatgtatttctagtgtgtgaagaaaccttcccattagtgagtaagaaaattgcc

SEQ ID NO: 193422 - DNA, 201 bp, Homo sapiens
tcacagattggcatctttcacttaacttacatttaatgttcttccatgtctttatgtggctttgtccattcctattgccagtgtgtttatccgttcacccrttaaaggatatcttggttgctgctaagttttggcaattatgaacaaagctgccagaaacatttctgtgaaggattttgtgtggagtagaagtggaaacag

SEQ ID NO: 193423 - DNA, 201 bp, Homo sapiens
ttccagtgtggctgcactgttacatgttcccatcagcagtgtatgagttttctaatatctccatttatgtcaacacctgttattacctgtctttattatartcatcctcgtgtgtgggaagtgatatctcattgtggatttgatttgcattttcctgatgaccagatattttgagcattgttttatgtgcttatcagccat

SEQ ID NO: 193424 - DNA, 201 bp, Homo sapiens
tttgagggaaaaggaacataacgattttactgctgtaatactgacttaaagtgatctaaaatactcatttttgtatatgctatgagactgcactgattagrcaccaaagaagatactattaatcatctttaatgcaagtctaattataagataatgtcaatgacatactgcaggatgttgtcacaagataacttgtcttct

SEQ ID NO: 193425 - DNA, 201 bp, Homo sapiens
agtgattagaccggtaccaaaatcacctggagggcttagtaaaacacaaattgctgggccccagtcccagaatttcttcttcagttgggctggtgggaaakgctcagaatttgcatttctaacaagtttccaggtgatgctgaaagctgcaggtctgggggcccatacattaagaaccagtggtgctctcataaacacttc

SEQ ID NO: 193426 - DNA, 201 bp, Homo sapiens
ctctctcctgctgttacataaatgctgagacaaaactgaaatgtttattctcaaagcaggagacattgctcttgtaatcaagctctatttcagtcactttrtgtctaatactgactatcagattaatgcttgtattgattctttctgtatgttggatataggtgttccagtagtagcttgaggtatctttgcataaatttt

SEQ ID NO: 193427 - DNA, 201 bp, Homo sapiens
atcctcagtcacttgaggcttccagaaggaagttagttgaatataaatagctctgaggacaaagttttgcttaaaggaaagcgtatagttcagatagcttrggaaaagtgtatacgataagagaaaaaagagaggaatcccaacattttagaaattgaaagagaatgagattcttatgaaggaaattaagaagcactaatt

SEQ ID NO: 193428 - DNA, 201 bp, Homo sapiens
tgcttgtattgattctttctgtatgttggatataggtgttccagtagtagcttgaggtatctttgcataaatttttaaatttatgacctttatgtcaggaytatatttgatttcagtatgaaaatggcattttttttcacctgtgacaattagtaaattcaattagatatgtacaggctgatttctatataaagcaactat

SEQ ID NO: 193429 - DNA, 201 bp, Homo sapiens
aaaattgaaacgacttttccctctagtagaagtatcacacttcagatacaaacaaaaattcaccttaatgctgacacctacggatctttacatctgctccrttgcactcatggttatattatcttcttctcctcaagtgcctgtatatttatatgcaaccacattgatctttgatgttacaataatatttcttgtatagac

SEQ ID NO: 193430 - DNA, 201 bp, Homo sapiens
tggatataggtgttccagtagtagcttgaggtatctttgcataaatttttaaatttatgacctttatgtcaggattatatttgatttcagtatgaaaatgscattttttttcacctgtgacaattagtaaattcaattagatatgtacaggctgatttctatataaagcaactatatggttcagttgatcttattctttca

SEQ ID NO: 193431 - DNA, 201 bp, Homo sapiens
ggagaggtattggtgtggggtttgggcttaacaggaaaactagtaactgtgtaacacattcactgtctgacatctactccctttatttgtctaaaataaarccattgcgttgtatgcagatttccctcaagggatgagcccttcctcatgagaccattcaggcctctcagaagttttcttcattctatcctggaaaacttt

SEQ ID NO: 193432 - DNA, 201 bp, Homo sapiens
agcgctgtgtggctcgagcacctccctcttgcatcaagacctatgtgaagtccaaaaggaacactgatgtaagtttgtgtgcatgcttgctttctgaaggkggccattatgtagtgtgtcctcttatcacaatgttgtcattctgttctaggtcatgcaccattactgggttgaaggtaactgcccaaccaagtgtgataa

SEQ ID NO: 193433 - DNA, 201 bp, Homo sapiens
ataatgtcaatattgttaatgttctatatcatatgtgcacttttcttatatttctacatcaaccaagttatagatctaagatgaatatgtatttatgtgakacttgagtaagtaagcaaaaataaagcccagaagaatggagagtgaactcatcttatctatctttggctggcaattggcaataaggatatgaccttgtcc

SEQ ID NO: 193434 - DNA, 201 bp, Homo sapiens
gaagattatgaaatagcagatataatacatttagcagaatgcctagaatataagggatggttattattaatataaaaaagcttccagagagtgatagaccyaactcttttatatagggtggtcagagaaggctttttgctaaatggtatttgagcacagacttaaaaaaaaaagatgaagaaaatgggacaggtggaaatc

SEQ ID NO: 193435 - DNA, 201 bp, Homo sapiens
ccaagaccaggtagggagtaatactggttgaactaaggtgatggtgttgaaagtgatgaaatatggctgcattctggatatattttgaagttgacattaaygagttttactggttgatttaaatgacatgtagaagacaactaaatgataaagatttgggcctgagcaactacaagaatagagttaccatttacaaagagg

SEQ ID NO: 193436 - DNA, 201 bp, Homo sapiens
atgtattaattataaaccagatgatatttgaacactcattttgtaaaatctaaaagtataatagttaggagaccgtttaaaacctcttaaacgtcagacarttttactaattttcaagtaattaatattgctaacttcaaagataaataacaccattctttttgacatttattttaaagaagagccattttttaaatctta

SEQ ID NO: 193437 - DNA, 201 bp, Homo sapiens
aacgtcagacaattttactaattttcaagtaattaatattgctaacttcaaagataaataacaccattctttttgacatttattttaaagaagagccattktttaaatcttacattttgcaattgaatagcaaggtatgtagtaagtttaaagactagttcctaggatggcaaaaatatttatgaatttttaataatagtg

SEQ ID NO: 193438 - DNA, 201 bp, Homo sapiens
caggcgctgatctcgtagatttaattggggaataatgtatgtaaagaacttaaccgcataccagtgaggtggaaagtactcaaaaagaatgtttgctgttmgtattctttgtattgttgttatttcttattactactactattattattatcatgctcattatattgtgaaaaatctattcactattctaccttccacctt

SEQ ID NO: 193439 - DNA, 201 bp, Homo sapiens
ttgaaatcacaggcatggtctaatttttcttttctgtaaacagaatttggaggatattgctaatcttgtttagtaaacaacatataagaaaagtaatttgraatataggttatttataatttgattcaactgaatacaaatatttacactgaatgtatgataattttgctaggcacaatatacttttaacatactttgcct

SEQ ID NO: 193440 - DNA, 201 bp, Homo sapiens
ttattccctcttcctgactgccttcccctcggccctctatctagataggcatgcctttctttgtggaggaggttttcctgttgaacacaccacacacacayacacacgcacacacacgcacacactcacacacacatgcacacacacacattgtggaaagtaatattattgaaattgcgtattggtattttataatttaga

SEQ ID NO: 193441 - DNA, 201 bp, Homo sapiens
tgtagactctatagccatataatgtatatatagtacaatgtgaggtaataatcctaacaaatatatgaaagtattaattgaaaccattcaaatatcaattkgatgaagaatatattttgatctttataaacatcacaacatagcactttgagtgaaagttaggtcttcatgaagactgcaaattaagctagagtcataaca

SEQ ID NO: 193442 - DNA, 201 bp, Homo sapiens
ggataaaacacacatttaaaaaaaaaaaactctatttcactgaaaattgcaggtataaaattagtcagctaggtataaaatcagtctgtcaaaatcagtarctttcacataaaccagctataacccattagcaaatgtaactgaaaaaaaactataaagtacctagaaataaacttatcaataaatgtactaattatatga

SEQ ID NO: 193443 - DNA, 201 bp, Homo sapiens
ctcttagaagatataggtacatttattgactctcagaagacaaattctggtacaaattctactgcattaagacttggcttcctcctccactggagaaaaamattctgcaaaacttttctgccctaaaagtaggattccacaattaataaatttattctcattattcattctccaaatatcaagtacttataaggacaaacc

SEQ ID NO: 193444 - DNA, 201 bp, Homo sapiens
cattatacaaaattatatttgtataataaatttttctcaaattacaatatacaggagcttatatttatatacttcctactcttatttgcctttaccacagyactatttctttattgatgatactttcaaaatatattttatttaaaaaaatacagttcttaggtccatcttgtaaaacagtaaaaaataaagtcagaggat

SEQ ID NO: 193445 - DNA, 201 bp, Homo sapiens
tagggagcagtggatatgaaatgaggttctgttaatgtcattctttctctataaaattacaaccaggaccaggattagctctgaatttgtgtacctgtttyctttcagtctgcaagtacacagtccatgagcgctgtgtggctcgagcacctccctcttgcatcaagacctatgtgaagtccaaaaggaacactgatgtaa

SEQ ID NO: 193446 - DNA, 201 bp, Homo sapiens
ttcactgtttgactggattttctctaacttcattatacaaaattatatttgtataataaatttttctcaaattacaatatacaggagcttatatttatatwcttcctactcttatttgcctttaccacagcactatttctttattgatgatactttcaaaatatattttatttaaaaaaatacagttcttaggtccatctt

SEQ ID NO: 193447 - DNA, 201 bp, Homo sapiens
tgtcagaatgggcaaaaagatgatctgtgatgtgacattagtaataataacacagattgaccttagttggtagcaaataaagtttagggaaacccctcacwttcattgtcagtttcactgtttgactggattttctctaacttcattatacaaaattatatttgtataataaatttttctcaaattacaatatacaggagc

SEQ ID NO: 193448 - DNA, 201 bp, Homo sapiens
acattgatgtcagaatgggcaaaaagatgatctgtgatgtgacattagtaataataacacagattgaccttagttggtagcaaataaagtttagggaaacycctcactttcattgtcagtttcactgtttgactggattttctctaacttcattatacaaaattatatttgtataataaatttttctcaaattacaatata

SEQ ID NO: 193449 - DNA, 201 bp, Homo sapiens
tcagcagggtgtgtctgaagagaaaatggaggaatatggaaataaaatcaatgttttgttcaaaaaactttattatgtggaaaaaaataaaagctaagctkcatgcacacaagtcttcaaaacaaatacaataaaatgcaaatattttcaaaatatgttaaaaattcaggaaaaagcagaaatagaaagcattatgactga

SEQ ID NO: 193450 - DNA, 201 bp, Homo sapiens
ttctgccaaaataaaatgtacatgggtttaagtctttctgattctaaagaaataatcaaaaagtacacatgtatttataagtgtctctgtttctttattcrcagagtttttgactgtacacaatgtttgcaacagaaaaatctcaacaataacaacaaaaaagttaacttcagaaaaataaacacgtatttactccattaa

SEQ ID NO: 193451 - DNA, 201 bp, Homo sapiens
ccctgactgccacatgtcagccacatgaggctaataaaatggagtgcactttaatcaacttactaaacacaattcattgagacagaaccctttaataaaaycctaaattatatgtgcttaaattagaaaggtttggttactaaagagtcttggcgttatcagcagggtgtgtctgaagagaaaatggaggaatatggaaat

SEQ ID NO: 193452 - DNA, 201 bp, Homo sapiens
gccccatatttgtttgaaaatagtaacagcagttacattttctcccagaggtatattttctttagctacatgtctaagtatctctaattacatcagtgctstttgtgcctattcaaagttgatactaaatattgctttccattatcatcactttcttattttagagctttttaaaagtactctacccaataaaatatctgt

SEQ ID NO: 193453 - DNA, 201 bp, Homo sapiens
gcttgactgtaacgtggtcaattttattaatattgatcaaattagagcaaatctcccacctactacaaggaagaccaaaaaatctcaagaaatgttagctragaaatgggaatttagcacatacttaaaaccaggagcgctacaacaaacctatctggcaatcaaatctttctccatcactccctagcgtatcaaacaatt

SEQ ID NO: 193454 - DNA, 201 bp, Homo sapiens
caaagggcaaaagacatttgaataacttgttttagaatagatattatctactttgattagaaaaagataaggatgacaacaataactcatttattacataytagtttacagtttactatgcactttataaacatacattattttattcaaaaagttattttaaaaattaaaatgagcatatatgtttgtaaagtgttacta

SEQ ID NO: 193455 - DNA, 201 bp, Homo sapiens
tatatgtttgtcagaaatagaaatactcattaatcctcagtaattattagagtaggttattgctttgcactaactttaggttgctttccctctctctctcratctctctaatacattttgctctaattattttatctggctaaaattttctactgcaattcattagtcttacataagttacttacttttagcattttaaac

SEQ ID NO: 193456 - DNA, 201 bp, Homo sapiens
tgtgggctactctttctttctcatcagccagataaggatttagttagttaatatttgaattgaactgaatcagcatctcagccacatataggtgaaacttmaattagaagtttaaggtaaatgaaacttcatgcagtagtccgtgtctataataatttccaaagaaactgaagcttctgagttcatatcacaaatgggata

SEQ ID NO: 193457 - DNA, 201 bp, Homo sapiens
aattttttgcgatactagaaatcttaagaaaaactgacagacggtaatatcaagattctacctacctttggttgttctctgatatcaccataatctgttgmtgcaattgttatgattgtttttgttaactcttttacaaatagcataatgctggtcaagacaataaatcatcaaaataaatgacagactggaaaaccagta

SEQ ID NO: 193458 - DNA, 201 bp, Homo sapiens
ttcttatcttcatgaaacaagccagtgctttggtattttacactcatttgtcacatagtttatatcttgattgtaaaggccattcagagctaactgagagsctgtatgtctctatgtctcgtaagattgttcactgtttcctgctcatgatttctttcaactttcctggaacactatcagttccagtccaacatttttttt

SEQ ID NO: 193459 - DNA, 201 bp, Homo sapiens
tgtttctgaattgggaatttttgattatgtttaaatatctacgaaaagtgtatatacacatatatacatatatacatacatctatatatgtatgtatatayacacacacatatgtgtgtgtatatatacacatagatatgtatatgcgtacatatatacatatacatatgtgtatacacacacacacacacacacacatat

SEQ ID NO: 193460 - DNA, 201 bp, Homo sapiens
agctacattaaagaaattagcgcctgtgtcttatcaccatggagcatcctgatcaaagagaaggtgccatcctctctggttctctaatatgcgttttgctkatcctcatgagttaaaattcaaactatgttaagagataaagaaagactgtttgaggaatgctaatacgtatgttaaaagaggaaaagagaaagacatctt

SEQ ID NO: 193461 - DNA, 201 bp, Homo sapiens
gaggcaattttacattggtctttggaggcaaaacatgggtagcatggatccagtgttttcaaaaccttcacaaggcagcaaagttgtgaaaggtagaagtkagtctgtaatgacaatgagtggggaagtaagtttgaatttattttttctttttctttttttttttttcgagacggagtctcactctgtctcccagactgg

SEQ ID NO: 193462 - DNA, 201 bp, Homo sapiens
accatggagcatcctgatcaaagagaaggtgccatcctctctggttctctaatatgcgttttgcttatcctcatgagttaaaattcaaactatgttaagarataaagaaagactgtttgaggaatgctaatacgtatgttaaaagaggaaaagagaaagacatcttccttatttaaatattaaataaagttgaacagtttt

SEQ ID NO: 193463 - DNA, 201 bp, Homo sapiens
ctgaacctctattctacctgtcagagtgctcaatttccaagagttagaatgccaggtcaagatgccacctaagtgatggagttggagccatcacaacaggrgaggggattttgtctactctctagttaaacttcactgagaaagggtatttctatttgataatgcgataagcactacttttttcagcactcaacaaacatt

SEQ ID NO: 193464 - DNA, 201 bp, Homo sapiens
gcaaacaaaagtcttcgatttaccttattaaattaaaataaaacgtgaagtaggtctctagataactgctaggcaacagcctaggccacactgatgatatrataaacattcaaatactcttcagtgggtgccacatggagggtcccctcagtttcttcctgctgcaataatctcctccacttgctgaacagtctctttctt

SEQ ID NO: 193465 - DNA, 201 bp, Homo sapiens
tgcataaggtagagttgtatacttaaagggattttttaaacagggatatgtatatatataccatatatataggatatgtgtgtgtgtgtgtgtgtgtgtgrtatatcctatatatatactgtatatatatcctatatgtataactgtacccagggtaagcaataataatttttttcaaaaatcaaacttgtgccacatttg

SEQ ID NO: 193466 - DNA, 201 bp, Homo sapiens
gcccttcaggttcatccatgttgcaaaaaatgacaacgtcccatttctttttatggttgaatagtattccattgtgcatatataccataattattttatcyactcatctattgatggacatttaggttgatatcacatcttggctatagtgaatagtgctgttataaacatgggggtgaagatgtcactttgatacacaag

SEQ ID NO: 193467 - DNA, 201 bp, Homo sapiens
gtggagaaagagagagagggagggagggggagagagggagagagccaagaaagtcaactggtgaatggcagaaagaggatgggggaacaagcaattcttcygctatttgctgtctagctcaacatagtcaactagtataatccagctagttgtttctgctgcctaggaaggttattcgggttttccagtgggcactacctt

SEQ ID NO: 193468 - DNA, 201 bp, Homo sapiens
ccacaggtcagcgcactcacaattcttatcccctgcccggtcttgtactagtgaaactggtatttgtaactttagctcttcatatagtacaacacaattaytcatactaataatctaattttctatcttcaagaacatttagatcatgtcctgtctacctatgtaaaattgcgagaaaacatgtaacccttagcagatttt

SEQ ID NO: 193469 - DNA, 201 bp, Homo sapiens
tctgttttctacataataaattatcttcctgtgccacctaaatccccactaaatacatgaaaaataataaaacaaatgcacctgtaaaataaaaatatgasctctcagagtagtttcactaagtcaaaacttttttgttgcttatgacttttgagtcttccacagtaagacaaatgagataatttcatcgccctctgtatg

SEQ ID NO: 193470 - DNA, 201 bp, Homo sapiens
gacgaggtctcactctgttccccaggctagtctcaaactcttggtctcaaagcatcctcccaccttccccaaagtgctgggattacaggcgtcagccaccrtacctggcctaatttgagtttggattctgaatcaagcaaacctcagaagttctggatgttcctcttacctagtacatagtcacttgagtaaagagtctca

SEQ ID NO: 193471 - DNA, 201 bp, Homo sapiens
tttaatttttatgatactatactggaaatgaagaataattttttgaaaggaagaaatataagcaaatagttacacattacatttctcagcaagtacagcaytagtaacctaatacattgacttttaactcacaatatgttttcaattctgtcttttgcgaactatttttcctttggaatacacctttacttttaaaataag

SEQ ID NO: 193472 - DNA, 201 bp, Homo sapiens
aagaaatataagcaaatagttacacattacatttctcagcaagtacagcactagtaacctaatacattgacttttaactcacaatatgttttcaattctgycttttgcgaactatttttcctttggaatacacctttacttttaaaataagaagcaatgagaaaactaaaaaaaaaaagaaagaaagaaaagaataataat

SEQ ID NO: 193473 - DNA, 201 bp, Homo sapiens
taagcaaatagttacacattacatttctcagcaagtacagcactagtaacctaatacattgacttttaactcacaatatgttttcaattctgtcttttgcraactatttttcctttggaatacacctttacttttaaaataagaagcaatgagaaaactaaaaaaaaaaagaaagaaagaaaagaataataatacaagaaa

SEQ ID NO: 193474 - DNA, 201 bp, Homo sapiens
ccatattattgaaaatgtgaaaatattgcattaaattttatcttactttgagatgcattttataaaatcattataacttactaaaaatctatgaaaagtctacaaaaaatcctgctactattctcaagtgattaataagtcagaaggctgacttttcatttcatttcttttagaatcttacacagagtaaaatattatatg

SEQ ID NO: 193475 - DNA, 201 bp, Homo sapiens
aaagatttcatgaacctcaagtccagctttgtagctggacaaatggtaattttgatggaaggccaagagattgcccttaaaactatagcagttgtaaggaytgagagagtgagctgcctcttttcagaagtgttattagcaaaagtggcaatcatttagaaaggaaaaggataatttgtttttttttgcacactggttcca

SEQ ID NO: 193476 - DNA, 201 bp, Homo sapiens
gcaattatgattgatcatcttatcacttattgcctccaagtctcaccatctggcatttccttggattcattctatacctattcccaggacgttccgactcycttccaagctttcctcattttgccttgattgttctttcaaagtcagaattcatcatcaggatcatacctgcagactcttatgttttcttttcgttatttt

SEQ ID NO: 193477 - DNA, 201 bp, Homo sapiens
ttgtaaaccccgtgcccctgtctaccccatctagagctgattggttgataggataagagggaccctgacccacattacacactacagaccataggctgacyagtgacttagaagctaacaacaaggtataaagagaggcaagagaggctaagaaggttcatatgccagctaacattgtgacagagcagaaactatgagtaa

SEQ ID NO: 193478 - DNA, 201 bp, Homo sapiens
aggcaagagaggctaagaaggttcatatgccagctaacattgtgacagagcagaaactatgagtaagcagaggaaattggttaggagaaagaagagaacgyagcatatgtgcactaaaaatggagatgcctcgagaaacggagagcatagcctatgagagagaaactgagtaacctaaggctagaactgcatcacttttga

SEQ ID NO: 193479 - DNA, 201 bp, Homo sapiens
gtcccgctctgccagaatataaggttgcattctgagaagatatatttgattcttgtaagactcagaggtggagtcagggaaatagtgaattcagataaatrtaagaatatagccttcaaaatatatactaaccgtggctcatagcagcaaaatgttcactagttacactgtcacctctaattcagaaccaaacagaccatt

SEQ ID NO: 193480 - DNA, 201 bp, Homo sapiens
cttaatttccctctcctggagtgtggggtggacgcagtggctcactgctaatgaacagaataaagcacaagtgttagtgtgtgattgcagaaactaggtcktaaaaatcactgcagcttcctcctttcttcctaactgtgcactctgggtaaagccagctgccatgtcataaggagatcaagcagctccacagaaaagtca

SEQ ID NO: 193481 - DNA, 201 bp, Homo sapiens
tcctcttcagagcagctgcctgtgggtggtgggtgaatctcacagcatccttataaaatgtcttataatctggtgatgtgagagaaatatttgaagagagrcagtgtgtgtgtgtggtgtgtgtgtgtgtgtgtggtacagtgactatgggtgtgtgtgattttaatgtttaagataaaggtttttaaatctagaggtcat

SEQ ID NO: 193482 - DNA, 201 bp, Homo sapiens
tacttgcatattagaatttgctgaattttagcatatattatttgatttgatctttgcagcaatccaatgaggcaaccaggatatacgacactattcctatyttatgggtatagaaactacatttcagcaggttcatgtgatttctcaacatcaaaaatctgattatgttgtttactgtaaaaaatatctcagtggggaccc

SEQ ID NO: 193483 - DNA, 201 bp, Homo sapiens
gagggggagaggtcactgttggtgacggcagataagacaggtggctctcaagctttggtgtgcacatgcttcagctacctgtgtcctggaggcagacttcytaagggtttagatcacctattttctggagtacagggagctacatgggctcagatgctgggaacacagttgtaccaccagttccagttggtttcatgagac

SEQ ID NO: 193484 - DNA, 201 bp, Homo sapiens
acttttttgatgccagagatatccaattgtatatttggaacactttaactactacactggaagttattgtgttaaattaattcacattattcaagccagtytttcaggcaaaacaagtgtgtgtgtgtgtgtgtgtgtgtgtgtgtgtgtgtatcactttgtagatatagtgatttctaaatatttttcattcttcatcaa

SEQ ID NO: 193485 - DNA, 201 bp, Homo sapiens
ttttttgatgccagagatatccaattgtatatttggaacactttaactactacactggaagttattgtgttaaattaattcacattattcaagccagtttytcaggcaaaacaagtgtgtgtgtgtgtgtgtgtgtgtgtgtgtgtgtgtatcactttgtagatatagtgatttctaaatatttttcattcttcatcaata

SEQ ID NO: 193486 - DNA, 201 bp, Homo sapiens
gtactgtttttaactgcccctttatgtgattaagtaagattttacatgatgaattctattcagtatggtggagaatccagtgtgaacagtctcctggaatrccctgcacatcaaatttataaccattcttcaagatttcaactaccacagatgctataaaatctttcctagacactttctctcttcatcagtatttttgtg

SEQ ID NO: 193487 - DNA, 201 bp, Homo sapiens
tttttttttttttttttttttttttttgcaaaaaaagccttataataaacttagtgaatggcacaggaatcaatgaccctcaattgagaaaggtcagtacrttttaatcttgccaaggtacctacttattaattccttgtcttaattttatgaagtgttacaggcttttaatacagataattgaatatttgccacatattt

SEQ ID NO: 193488 - DNA, 201 bp, Homo sapiens
gtggtgtgtgtgtgtgtgtgtggtacagtgactatgggtgtgtgtgattttaatgtttaagataaaggtttttaaatctagaggtcatgtagttctatatrgtggttagatcagtgagctagatagtaagctagcagacttgactcatctccaaaacgaatatagaaactggataatacttggctggcaaaatcctgattt

SEQ ID NO: 193489 - DNA, 201 bp, Homo sapiens
tattagctttctttaaaacatacagctgcagcagtaagccacatatattttatttggccttgcaaattttctgttgagttctaggagctgtggatttttgmgatatttggctgaaactcaaaatgaaaaaatcattttaaaaaatagaaatgcatttcattctttaaaaatgctaaaaatatatgatgcaaaatgtcatag

SEQ ID NO: 193490 - DNA, 201 bp, Homo sapiens
ccaatttggaaattgttttatatatgtttactttgccagaataagcatggtatttggaaaaaagtacacaagtacttggcccaatcatctattcatttttwattcattcatttaaaatatattgataaagaacctcctatgtgccagatactgttgtcaaccatgagggtatattgaaaaacagacacagttcttgccttc

SEQ ID NO: 193491 - DNA, 201 bp, Homo sapiens
atgaaactgtcacaggattagggggaaatgtgctagctggagcaattagcacagtacgggagagtagcagaaaagcatggctagttaatgttaagatgggyaatatctgaatgagactactaagcaaaaaaaaaaaaaaaaaaaagaatgcaagagaaaagacagcagtccaaattgagaaagtgtatgctaaccagtagg

SEQ ID NO: 193492 - DNA, 201 bp, Homo sapiens
ggggaagaaaaacaagatatagtcctacctactttaaaacatgtttattccaattcttaatgaatccctttacataatgcatagtatttctaagatagaaygtgcagcccttcaggatgttaactacccatcttagtcctcagattccttccaaggaaggaaggaatcttccttgatgtgtaatgggagaattgtggccca

SEQ ID NO: 193493 - DNA, 201 bp, Homo sapiens
tcctacctactttaaaacatgtttattccaattcttaatgaatccctttacataatgcatagtatttctaagatagaatgtgcagcccttcaggatgttarctacccatcttagtcctcagattccttccaaggaaggaaggaatcttccttgatgtgtaatgggagaattgtggcccaagctacctcttggtgggaatga

SEQ ID NO: 193494 - DNA, 201 bp, Homo sapiens
aattctgagtttatcattccacatgcactccctatcttgccccttcatcctcttggactggcctttgcaatagccctgagaaagatgcctggctctgagcycagaaatcttccaagctattcttctaggaacagtaactacatttgggtcccatctgtgtcagtttgtttaggctgctgtaacaaaatatcacatactggg

SEQ ID NO: 193495 - DNA, 201 bp, Homo sapiens
tgtttcaatgacaatgtcagacattcctattacgaaccagaaaagagaaccccatagctacccactgggcaccacccgtgatctatagttacaaggcaaaygcaatgacaatgaacatttgaaatacattgactttggctgggcacggtggctcacgcctgtaatctcagcaccttgggaggctgaggtgggtggatcacc

SEQ ID NO: 193496 - DNA, 201 bp, Homo sapiens
aacttcgagctcttctatatacacatccacgtgtgttttgttctttattcattgactgggaccacgcgaagtcaaatgaaatgtaaatatgttttaaaggkgatctgttttcaatgcaaacataatttttctgcctgcataagaggcacctttcacaaggtgatcccgttcagtgttttcctttccaaattttttggcttt

SEQ ID NO: 193497 - DNA, 201 bp, Homo sapiens
aaacaggtacatttttcaaggcattacagatactgtggaaatagaaatatctaactagaaacttcttcctcttcctgctatgccatcacaggtaagacaamcatatcccattgccagtgttagcccaggacggcccaccctatttctcaaataggcactttccatttgttaaacttggatataaaaatggtttgaggtcat

SEQ ID NO: 193498 - DNA, 201 bp, Homo sapiens
tgtttcttaaagagttgatgaatacataatctgtgtgaaatatttatgaacatttaccatctgcaatgagagctccagtgatatcattgactatgcagaamtcagtaaacacaactatgctgaagaaacatgagcatctgctttaaaattaatagttaattctctgccccaaagcaatcatttagtatgcagaaagtccct

SEQ ID NO: 193499 - DNA, 201 bp, Homo sapiens
aatggagtgtcagggcaaaaacaaacaaacaatcaaacaaaaaccaaggcagctggctgtcacaaattctagtaatttaagtccatttgcaaaagccacamcctcaggaaaatgagcttattgtgtaggagcctttttccccctttgccgagagactacaaaacacttaaaaggcaatgtgggttcatggaaatgtaactg

SEQ ID NO: 193500 - DNA, 201 bp, Homo sapiens
cattgactatgcagaactcagtaaacacaactatgctgaagaaacatgagcatctgctttaaaattaatagttaattctctgccccaaagcaatcatttartatgcagaaagtccctttgcatatcactctttgaagcatgacttttcgtttagatcaaatgacttttcaaaattagtgttaattttcaattccaagtttc

SEQ ID NO: 193501 - DNA, 201 bp, Homo sapiens
ttaaaaaggcaacttatatgggtgaataagatcttaattatctaaatataaaaccctggatctattttgcacatagagcagaatatgagaagtatggaagktctagtgttcatatagtaagcacctcagtaagaataaagaaaggcacataagcagtgtgaaaaaaaaatctgtggaacatcatgctcaaaatgctatgca

SEQ ID NO: 193502 - DNA, 201 bp, Homo sapiens
ttgcattagtatagttgtataatttttgttgaataaagtgatcctgcttaatagtaaaaatttcctcctgctgaggatcagacaaaagatattaagatctrttaatttcaggttcttatttatcaagttccatttactactgattatttcctatgtttgtcatatgactttaaaaagctgttcctcagttctctggagtta

SEQ ID NO: 193503 - DNA, 201 bp, Homo sapiens
actggacagtcattaaaaagcatattttgggggaggccaaggcaggtggatggcttgaggccacaagttccagaccagcctgggcaacatagtaagacctkgtctctacaaaagattttaaaaattggctgagcatggtggtgatgcaggcctatagtcccagctactctaggggcacaggtgagaagattgcttaagccc

SEQ ID NO: 193504 - DNA, 201 bp, Homo sapiens
aagcaataagcaagtgttcacttcagtctccccttttctatttttttttcttttcctacctctctttttgtataggaaaggtaaattacctaaaaataggyttatagcatttcctcatagacttttccatttatttacatttaatgtctgaacttgctttcttaaaagattattctctccctctatcttacccttttccaa

SEQ ID NO: 193505 - DNA, 201 bp, Homo sapiens
gtgtatatatctatatgtgtgtgtgtgtatatatcttgatgcaatttgtcttgttatcccaattaattgtctctgcttctaaaaataatttattgtgagayattttcttatttaatcattaattttcagtcatgttataatgttagtaaaactgtttttcttaatattttctcccataatttgcatattgtatctctaatg

SEQ ID NO: 193506 - DNA, 201 bp, Homo sapiens
cctagataggaaatggtgggcctaggcagccattaagctgttctgcttctgagaagtatataataattttgtttaaatcaataaaaaatatataatcattsagactataaaaatattgtcaactgcagaaccaagtactaacccacgatcacattttctttcctgtaaagcttcagaatttctttcttctctctgcaaagt

SEQ ID NO: 193507 - DNA, 201 bp, Homo sapiens
gacatgtcaaccaatgaaacaaaatagcccagaaataaatccactcatttgtggtcaattgatctttcacataggtgccaagaacacataatcaggaaatsatagtctcctcaacaaatggtgttgggaaacctggacatccacatcctgaagaatagaatcgaactcctatttcacaacatataaaaaaaatcaacctaa

SEQ ID NO: 193508 - DNA, 201 bp, Homo sapiens
ctttacactaacctcgaatagactttcccatcttctatggggctttctcatctagatctttgctgaattgtcacttcttcagaaggacattctccaacccycctgtttaattcactctctccttcatcacctgtaattctctattacaattttatcattattggtgtaatatttgtcttctttttcctctgatcccttcgc

SEQ ID NO: 193509 - DNA, 201 bp, Homo sapiens
taggtctgctagtagtatgttgaataagagtggtaaaagtaggcatacttgtcctattccagttcttgtagaaaatgctttaagcttttctctgttcagtrtactgttagttgtgggtttgtcataaatggcctttattgtgtaggggtatatctaattctatgtccaatttttgagagactttatgatgaagaaatttta

SEQ ID NO: 193510 - DNA, 201 bp, Homo sapiens
acagtaaaaaacaaaaaagacttttgtctccattccaactcctttttcatcacactttacctagtgactagtagcattggaatgagcatgagcattttagkatctgactaaaagaggatgaggtccaattacatgattgaaccctgagacttataatatgtggttcatggatatttttgtgtatggttgttattgctagtt

SEQ ID NO: 193511 - DNA, 201 bp, Homo sapiens
ccatttgtaaaataacaagaaacaaaacttctctgataaaacagaaaaagaagggaatttcctcaacttgacaaagagcatctatacaatacccacagcttaacatctacataatggtaaaagaaggcttttctgcaaacattgggaagaagagaaagatgtccattatccctttttcaattcaacatagtgcttgaattt

SEQ ID NO: 193512 - DNA, 201 bp, Homo sapiens
gcttcctgctcttagggggcactgttttggaaatatggcagtcataactctctcgaaagcctatttaagggtctctgttaaaaggggccattgtttgagaytctggttgcatgatcgcttggagtttgatggcctgaaggtgagaagagacaaacggagttattagaagacatatattaaaaccaaacaaagagggatggg

SEQ ID NO: 193513 - DNA, 201 bp, Homo sapiens
gtcacaatttcatatgttgtagcctatgaaatttattttattggttgaccaccaattttcccttatctcctctactccagatcctccatgaaatgatggargaaattgactatgatcatgatggaaccgtgtctctggaggaatggattcaaggaggaatgacaacgattccacttcttgtgctcctgggcttagaaaatg

SEQ ID NO: 193514 - DNA, 201 bp, Homo sapiens
ttatagagacttgtagatattttggtattgtggataattaaaacgtattatcttttcttaaagtaggaaatattgtaacaactataacgtgatatttatcrgtgacaaagtcacaggtattcctgactacatttatatttgaaagaaatgcttaatttcaattacatgttagtgaaaataaagttgcatttttcctattca

SEQ ID NO: 193515 - DNA, 201 bp, Homo sapiens
ctttcttagtgtatcacttacacacaacctaattcattcattgtaagtgtactttttaatgattttagtaaattaatccaattttagaacatttttattaygcaaatcagaaccctcatgcccatttttattcaatcttggctctttttcccagtttcaggaaggaattgattggctttctgcctctaagatttgtctttt

SEQ ID NO: 193516 - DNA, 201 bp, Homo sapiens
ttctggttaacatgttggtagaaagtccacacatctgagaactatagaatccatattttgtgatagctccctattggaaaacatttaatttttcctagtgsagagaaaggaaaacagattccttacttaatgtgctaaaagtgtagtcaaattcatggtagctgccccggaaaacaattattttaagtctttttaaacctg

SEQ ID NO: 193517 - DNA, 201 bp, Homo sapiens
tattattcccagtggataatccagttaaacagatttgcaaaatatactctttatgggtcacttactgggctttacaaatggcattgttgaataaacatttyttaactacttctgacagtgtacttacattagtataaaaatctaaaatattgagttatcatgggcatttagcatttagctccttgatattttaatcacaga

SEQ ID NO: 193518 - DNA, 201 bp, Homo sapiens
ttgttatatttcttgaagtcttatatgtgaacattaaagttgctagttatttcacagtttttattttgttctaatacagcatctgcatataacaatctcaraacaagtttacactaaatctttgaaattgtgaaattaatcataattataatatatttaaaaatgtagaagcctaaaactttagaggaaatgtaatcttgg

SEQ ID NO: 193519 - DNA, 201 bp, Homo sapiens
caaagtcttttttaaatttcattttcttttatttctacattatctacctctttagtgaaactgtgatataattttagaagctgtcattttttattagtttkatttatatttggtttgataaaattctgttggtctgcagataattccgtcatcatgttcatgacaatcattgttatttggttcttaagtgagattggagtt

SEQ ID NO: 193520 - DNA, 201 bp, Homo sapiens
ctaatacagcatctgcatataacaatctcagaacaagtttacactaaatctttgaaattgtgaaattaatcataattataatatatttaaaaatgtagaakcctaaaactttagaggaaatgtaatcttggaaaacacctaatcattatggaaaccagcagggtgcagagaacttaagtgtcgttctgaaggtcacaagtt

SEQ ID NO: 193521 - DNA, 201 bp, Homo sapiens
ttcatactgcttttgctgtatcccataagctttgatatgttgttttcatttttgtctcatgatattctctaatttcctttttgatttcttttctcacccartgacttttcgagagtttattttattcacatgcatttgtgattgttcagttttctttctgcaattgatttctatatttgttcctttatggtcaggaaacat

SEQ ID NO: 193522 - DNA, 201 bp, Homo sapiens
acaatcagatctcgtgagacttatttactaccatgagaacagtatgggggaaaccacccccatgattcaattacctcccactgggtccctcccacaccacrtgggaattatgggagctacaattcaagatgagatttgggtggggatgcagccaaaccgtaccaggacttgaggccaaaggtaagattttggtcataaccc

SEQ ID NO: 193523 - DNA, 201 bp, Homo sapiens
acagtatgggggaaaccacccccatgattcaattacctcccactgggtccctcccacaccacgtgggaattatgggagctacaattcaagatgagatttgrgtggggatgcagccaaaccgtaccaggacttgaggccaaaggtaagattttggtcataacccataatataaatcaatttgaagggtatatatgtttttaa

SEQ ID NO: 193524 - DNA, 201 bp, Homo sapiens
agtaagagtgggagggacatcctcttaccttccaaaatttcagaagttatcctgattctatgaaacataactgaaaaaaacatagaaatttttcttaaatrtattgacatcaaaagctaaaccctatataaaaatatatgcaacctacagaatgggagaaaatgtttgccacctactcatctgacaaagggctaatatcca

SEQ ID NO: 193525 - DNA, 201 bp, Homo sapiens
ggttctgcagagaatcagcattgtcttgtatggcatctgccttgggggaggtcattacagtttccttaggcaatgtaaggccaatcttttataactatagwggcagagatgccagtaccactatgggtgggaatactgctgtcactgtgggtagaggaggccaattctgctggaggttggggagatctcttttactggtaa

SEQ ID NO: 193526 - DNA, 201 bp, Homo sapiens
tagcactttgagtgaaagttaggtcttcatgaagactgcaaattaagctagagtcataacaagaatagaaactaagcttctctgcaaacctacgacgcggraagcaaagaattttatgccattttgtaatgtaaatttataaaagaaaagatctcaactactttctgagtaaaatatgaggaactgtaatcttaatatcct

SEQ ID NO: 193527 - DNA, 201 bp, Homo sapiens
tgttaagtgcccttcacacatccctaagactggagaatgtcatttcacacccgtgtcaacctatttagaatgaagtcaaggactgtgtggagcttttattytcacttacacaggacctacaaaaaaagtttgataatgttatgctctagagacacttaagtttacctcaatgtatatatttttttcttacagcatacctat

SEQ ID NO: 193528 - DNA, 201 bp, Homo sapiens
taatcctaacaaatatatgaaagtattaattgaaaccattcaaatatcaattggatgaagaatatattttgatctttataaacatcacaacatagcacttkgagtgaaagttaggtcttcatgaagactgcaaattaagctagagtcataacaagaatagaaactaagcttctctgcaaacctacgacgcgggaagcaaag

SEQ ID NO: 193529 - DNA, 201 bp, Homo sapiens
taaagctctgattaattaaatgacttctccaagctactgccttttattattgacacagacaaaaccaaacccggtgcctggcttctagggaagggctgttytgcagctgtaccacactatgccatctccaaaacaatttgtatgtcatataatattgaaataaccttcttactatcacaggagtcttttcaactctcattt

SEQ ID NO: 193530 - DNA, 201 bp, Homo sapiens
cactcccggctaattttttgttgttgttgttgtattttcagtagagacgtggtttcaccgtgttggccaggatggtctcgatgtcctgaccacgtcatccrcccacctcggcctcccaattacaggcgtgagccactgtgaccggcctgataaattttaaagaataattatatttcaaaaatgttttaaactcacttctaa

SEQ ID NO: 193531 - DNA, 201 bp, Homo sapiens
gagaatcacttgaacccaggaggcgtaggtcatagtaagccaagatggcgccactgcactctggcctgggcaacagagtgagactctgtcaaaaaaaaaaagaaaagaaaaggagaataattatatgcaggcccttgcatcaaaatactaaaagtccacactgtgcttcaccaatagaattctaccaaaggctcctcacac

SEQ ID NO: 193532 - DNA, 201 bp, Homo sapiens
tctaaggttatcatgtaagtaatatgtgataactgctttcccagtactcatttaaaaatgacatttgtgcgtaaaatgattcattttcattttcaatgttmaaaaatagtgcctttctgcttagcctcccatttcagcatctgtaacaccattcaatgtgcttgttcaatttatctttcctgctagattataatttcttgg

SEQ ID NO: 193533 - DNA, 201 bp, Homo sapiens
tatttgagattgaatttctgtcaaaatggttatcagacaatgatggttacatattgctaactaaaagcaaacatgttaccaaataggccattttgtatgayttcctttctataaagtaaaattgcatattttgtatacatatattattctcatattcagtagatatcgatagagaacctactatgtgccagaaaccagtct

SEQ ID NO: 193534 - DNA, 201 bp, Homo sapiens
atagactttgttattcacaacaaagagagcaacaggagcttcacgtttgagttcaccttgcctccaaaatctcatgggaacgacagagtgggacccaattratgattgtgcacagcatcacgttttggaaaccctgacttaagaaaactaaatgaattataatgtgtaggaaacaagcccatttcacctttgcctacaagg

SEQ ID NO: 193535 - DNA, 201 bp, Homo sapiens
gcagaggttgcagtgagccgagatcacatcattgcactccagcctgggcaatagagcgagactccatctcaaaaaaaaaaaaaaaaaaaaaaaagacagaraaaagaaaaaagatagatttctatctaatgtcaataacttctgatacttcacagtttaagtgctgtctctcatcatttattttgtttgtttaagaattaa

SEQ ID NO: 193536 - DNA, 201 bp, Homo sapiens
gatggtgatctattttgttagtttcctctcctgtaaaagaggagaattggacccaaagagatctgaaggcctatcaaatcccatattttatgatcattattcttttcaaggggagtgcaataatatcatgtcttttctgaatctctcctagccttccagcttatgtcccactgattcattgatttaaaaccagtggaaaag

SEQ ID NO: 193537 - DNA, 201 bp, Homo sapiens
cacagatgttactgtgttggcattgtagccaattttcttaagtttcagctttctcaatgattctttgtaccttttctggctatagagtggctaagtggaakccattttgttaacaataactgtttcacacccagtgtgtaaaccagaaatgcatgctcatacgtctgttcattcctggagacaccagttcaaattcaccag

SEQ ID NO: 193538 - DNA, 201 bp, Homo sapiens
attttttgaaaagcaattgtaaataattttaagttattactttaaaaaacacagccttaataaaatggcatttccattttagaagcattattgacattttsatgtaaagcagacacctttaatgagctctcaatcaaaggaaatacttcagtaatgatacatgaattaatcgatcctgatcaaataaatctactccagtcc

SEQ ID NO: 193539 - DNA, 201 bp, Homo sapiens
caattgtaaataattttaagttattactttaaaaaacacagccttaataaaatggcatttccattttagaagcattattgacattttgatgtaaagcagasacctttaatgagctctcaatcaaaggaaatacttcagtaatgatacatgaattaatcgatcctgatcaaataaatctactccagtccattttgatttcac

SEQ ID NO: 193540 - DNA, 201 bp, Homo sapiens
ccttaataaaatggcatttccattttagaagcattattgacattttgatgtaaagcagacacctttaatgagctctcaatcaaaggaaatacttcagtaaygatacatgaattaatcgatcctgatcaaataaatctactccagtccattttgatttcactttatgagtagctgctcaggtcaaaagagtaacaactttat

SEQ ID NO: 193541 - DNA, 201 bp, Homo sapiens
aattaatcgatcctgatcaaataaatctactccagtccattttgatttcactttatgagtagctgctcaggtcaaaagagtaacaactttataagttactrcttatagcatttcacttgactaagtatttgtatctaactaattggacaagagaatatttgagaagatttcatactttattatagtgtagaattccaaaga

SEQ ID NO: 193542 - DNA, 201 bp, Homo sapiens
aattctgacctgctttcaaaagtcaatgtgcctgttacattcttccacatcacattgtccctttgtagcattatcccaatcagaatttgaaatctattttrgagattattctaacaacatctagcttcccaatatattgtttgctgtacaaatttgtgtttgtcttctcttactttttatcaccagaagttagtatggtat

SEQ ID NO: 193543 - DNA, 201 bp, Homo sapiens
aaagtcaatgtgcctgttacattcttccacatcacattgtccctttgtagcattatcccaatcagaatttgaaatctattttagagattattctaacaacwtctagcttcccaatatattgtttgctgtacaaatttgtgtttgtcttctcttactttttatcaccagaagttagtatggtatctgctttatagcagcaat

SEQ ID NO: 193544 - DNA, 201 bp, Homo sapiens
gaataccgtacactgtagactacagtactggttgtttaccctcccgatggtgtggctgactgggagctgcagaaacctgccactgcgcagcatctcagggktattgcatatcactaacccgggagaagagcaaaattcaagacttcaagtaaggtttctattgaatgtgtatcaccttcacaccattgtaaagtcaaaaca

SEQ ID NO: 193545 - DNA, 201 bp, Homo sapiens
acaatcaggtagcattaatattgtggttaattttaccctgtgaaaatgattgctttgtcttacaagccttctgtattccccatattgctagaaccataccrgtcacataaacaattgcttattgatttcagaaatgtccttattctgttcttactccctccaagacaaaaatctgaagtacttccatgataattaaccagg

SEQ ID NO: 193546 - DNA, 201 bp, Homo sapiens
gtttttatttacagcagatgagaaatatattttatttccaataataattgatttgtcaaaggtcatttttgccaggcacattgcctcacacctgttaattycaacacttttggaggctgaagtaggagaatcacttgaggccaggagttggagagtagcctggacaacatagcttgacctcatctctcatctctaaagaaa

SEQ ID NO: 193547 - DNA, 201 bp, Homo sapiens
tattccccatattgctagaaccataccagtcacataaacaattgcttattgatttcagaaatgtccttattctgttcttactccctccaagacaaaaatcygaagtacttccatgataattaaccaggctatgggcgtttttcctgcctccaacacctagggtttattaatgacaagttctataaaatcccaatcaatcac

SEQ ID NO: 193548 - DNA, 201 bp, Homo sapiens
tatcctcagagaccaaaacttcaactgagtaattgatcattaaaccgtgaaagagggatgtgcctactttgtcaggagccaccatgttttttcttcataaytgtgtttgataaaatatgttttgtcttcttacagtgtgtgttccacagttagcttctaatgactagtaattatcagtatgcccccacaacctgctattta

SEQ ID NO: 193549 - DNA, 201 bp, Homo sapiens
tgatctctgttgacttccattcacttgccaagagtctcaaagtccactgaagcacatgatttacagcatttgtcttcattcttattgcatcttcatttgaratatttactctgtcttaaccaaagattttgccgtatgattttataatacaactcattagaaaagaaaaacctcttattaatttcagttttcagtttattt

SEQ ID NO: 193550 - DNA, 201 bp, Homo sapiens
gtctcaaagtccactgaagcacatgatttacagcatttgtcttcattcttattgcatcttcatttgaaatatttactctgtcttaaccaaagattttgccrtatgattttataatacaactcattagaaaagaaaaacctcttattaatttcagttttcagtttattttaataaaacatgaattgttttggccaacgaaat

SEQ ID NO: 193551 - DNA, 201 bp, Homo sapiens
atgggcacattggactcctctgtgttactttttacaactgcatgtgaatctaaatttatcgcaaaataatgtctatttattattccccagctttattaagktataatttacaaatttttaaaaattatacatatattcaagatgtgcaacattatgttttcatatattgtgaaataattatcacaatgaagctaattacat

SEQ ID NO: 193552 - DNA, 201 bp, Homo sapiens
tgaattgttttggccaacgaaattttagcagctatgaagtgagttgaggttttaatttgcttgtgtggttaggcttttgcctcctgtactgtcactctcartaagaagagcatacccaggtagcttcttctccatcagcctgccctctaaaataaacacacatagaaaagactgaaatcctggagcaaagttctccagact

SEQ ID NO: 193553 - DNA, 201 bp, Homo sapiens
agaaaacaacagctgttatcatggagctgaactggatttgaaaacgctagcttaaaacaatgattataaatgcaatactgcatcattacattagaagcttycaggcgtacagcactagctcaaggcaacatttcccacatggcatgtgaaattatcttttcaaaatatattaaagtttctatgttcaaataagttcaaaca

SEQ ID NO: 193554 - DNA, 201 bp, Homo sapiens
cagtaagaagagcatacccaggtagcttcttctccatcagcctgccctctaaaataaacacacatagaaaagactgaaatcctggagcaaagttctccagwctcacaccgtggagcaacatggtccagcctagatcaactgaaaatagtcaaaccacagtctgataagcacgagacacaacgttattggaggccgatagga

SEQ ID NO: 193555 - DNA, 201 bp, Homo sapiens
agcccatagtaaatactaagaaaatacagaaagctttatctatcctcagaagccagagaggaaaatcaaatgaacgaggaaagatcttagtagaccaaaahgcatacacaacaggtggcagaaataaattacattaaaaagcaatcataataaattcaaacatacctaactcagcccgaaagggacagtgtctaacagtgt

SEQ ID NO: 193556 - DNA, 201 bp, Homo sapiens
atactagcaattatgattgatcatcttatcacttattgcctccaagtctcaccatctggcatttccttggattcattctatacctattcccaggacgttcygactcccttccaagctttcctcattttgccttgattgttctttcaaagtcagaattcatcatcaggatcatacctgcagactcttatgttttcttttcgt

SEQ ID NO: 193557 - DNA, 201 bp, Homo sapiens
ccaaatactagcaattatgattgatcatcttatcacttattgcctccaagtctcaccatctggcatttccttggattcattctatacctattcccaggacrttccgactcccttccaagctttcctcattttgccttgattgttctttcaaagtcagaattcatcatcaggatcatacctgcagactcttatgttttcttt

SEQ ID NO: 193558 - DNA, 201 bp, Homo sapiens
gaatagagggaaataaagcatgcagtcacaaagttcagtacaaataggctctcaatgaaaaaaattactaaacacacacacacacacacacacacacacccaaaaagtgaagtcaatgtgaagaaataactcacaaatgaaatgagttattgagtggtataaataataataataagtaatttctttatgtttcaaaagaaa

SEQ ID NO: 193559 - DNA, 201 bp, Homo sapiens
attcattctgcaagccatggatcaaggagtaattttactttcacatcttattatttaagaaatacattttgtaaggctatagctgtcatagatagtgattyatcaaatggacctgggaaaagtacacctttctggaaaggatttgccattctagatgctattaaggacatttatgattcttgggaggaggtcaaaatactg

SEQ ID NO: 193560 - DNA, 201 bp, Homo sapiens
gttaaattttaaggacatttaattgaggcttagaatgagcctttctattttacccacacattttattattttaatatccatatttatcttccagccagtcatagactgagaaagttaattgaagaaatgcatccttactttttcaaactaacttcaaggacaaataccacacagatggctgatttacaacagtgaagataa

SEQ ID NO: 193561 - DNA, 201 bp, Homo sapiens
cttgagtttttaaatatcagttcactatggcactctcttacatatctttacattaaccacatattattttttaaaatatttactcttaaaggtgtttttawttggaaaagctatctcttatcacaatgcctttctcaaaatcttttatttctttttatttgttgactcttcccattgtttgagctgtaatcttttggaaag

SEQ ID NO: 193562 - DNA, 201 bp, Homo sapiens
agttaaattttaaggacatttaattgaggcttagaatgagcctttctattttacccacacattttattattttaatatccatatttatcttccagccagtcatagactgagaaagttaattgaagaaatgcatccttactttttcaaactaacttcaaggacaaataccacacagatggctgatttacaacagtgaagata

SEQ ID NO: 193563 - DNA, 201 bp, Homo sapiens
tactattttcctagatattgacggtagtattgtcttccacttggcctttgccacaatagtagccctcattccataggtcagggaataaatgtggggagctrctgactatatctgttacaattaggcattctggaactggggaaataaccacaggatgggtgtggggacccactggacctgctgtgagatgaacctgagcta

SEQ ID NO: 193564 - DNA, 201 bp, Homo sapiens
tttctttctttctttctttctttctttctttttttgatggagtctcgctctgtcacctaggctggagtgcaatgacgcaatctcggatcactgcaacctcygcctcccaggttcaagcaattctcctgcctcagcctcccaagtagctagggactacattagtcactagtcccaattagttgagactacaggcatgaacca

SEQ ID NO: 193565 - DNA, 201 bp, Homo sapiens
tgatttactattttcctagatattgacggtagtattgtcttccacttggcctttgccacaatagtagccctcattccataggtcagggaataaatgtgggkagctgctgactatatctgttacaattaggcattctggaactggggaaataaccacaggatgggtgtggggacccactggacctgctgtgagatgaacctg

SEQ ID NO: 193566 - DNA, 201 bp, Homo sapiens
tgcaaaggtagtcaacagagggtgaaatcgtatattttccagaggagaagagaacagagcggagtgtgaaataagggtttactgtgtgccaaacaaagcarggaaaaggtcacatcgccatcaatctttcagggcagagaagacatcttgagtactgacaggacagtagtatgaagactcactgatccacaatgctggaac

SEQ ID NO: 193567 - DNA, 201 bp, Homo sapiens
tttaaagcaaatcgttagtcctcacatatatcatgttgttttggtttttattatttagtaccagtttcctctttaagaaattgtatgccccagtttctttkgctaatcttctctaagaggagcagatgaggttcagactcagttaatacaaagtggatattgatattatctctatcacattataaaaaatattagagaact

SEQ ID NO: 193568 - DNA, 201 bp, Homo sapiens
agctgggactacaggcgctcgctaccacgcccggctaattttttgtatttttagtagagacggggtttcaccgtgttagccaggatggtctcgatctcctracctcgtgatccgcccgcctcggcctcccaaagtgctgggattacaggcgtgagccaccgcgcccggccaattttcttttttttaagacaaagtctcggt

SEQ ID NO: 193569 - DNA, 201 bp, Homo sapiens
ttttctttaagaatgttgaatattggcccccactctcttctggcttgtggggtttctgccgagagatccgctgttagtctgatgggcttccctttgagggkaacccgacctttctctctggctgcccttaacattttttccttcatttcaactttggtgaatctgacaattatgtgtcttggagttgctcttctcgagtat

SEQ ID NO: 193570 - DNA, 201 bp, Homo sapiens
gcctagctaatttttatttattttattttttgtcaagacagggtcttgctgtatttcccaggctggtctcaaactcctcagctcaaacaattctctcaacrtagcctccccaaattgtggaatcacaggtgtgagccaccatgcctggcctcttattctttcttatttcttctctttcagatgatgcttatgtttgtaatt

SEQ ID NO: 193571 - DNA, 201 bp, Homo sapiens
cgccattctcctgcctcagcctcccgagtagctgggactacaggcgctcgctaccacgcccggctaattttttgtatttttagtagagacggggtttcacygtgttagccaggatggtctcgatctcctgacctcgtgatccgcccgcctcggcctcccaaagtgctgggattacaggcgtgagccaccgcgcccggccaa

SEQ ID NO: 193572 - DNA, 201 bp, Homo sapiens
tttagatcaatcatattaaaaatgactatttatataatgggattggtgtctagcttgattgtaacttcttacacattgcacttgctctttttttaaaaaaagtcgttccctctttcactgctttcacttcttttaattaactatttcatatgattatattattttcttctattttattatattattatacttcttcaaaaa

SEQ ID NO: 193573 - DNA, 201 bp, Homo sapiens
atttagatcaatcatattaaaaatgactatttatataatgggattggtgtctagcttgattgtaacttcttacacattgcacttgctctttttttaaaaaaagtcgttccctctttcactgctttcacttcttttaattaactatttcatatgattatattattttcttctattttattatattattatacttcttcaaaa

SEQ ID NO: 193574 - DNA, 201 bp, Homo sapiens
cactttacgcttgcaagatagcaaaaaggaaattctgggactcaatttataggcaagaacaaaggacactggcatgaaatattgctttacaaagtagcaamtacgaacatcctcccctggcaaagaaaaagagagacagagagactttgacattgctcttcagtcagagttgcttcagacagtcccatttgtcattggatc

SEQ ID NO: 193575 - DNA, 201 bp, Homo sapiens
tatttagatcaatcatattaaaaatgactatttatataatgggattggtgtctagcttgattgtaacttcttacacattgcacttgctctttttttaaaaaaagtcgttccctctttcactgctttcacttcttttaattaactatttcatatgattatattattttcttctattttattatattattatacttcttcaaa

SEQ ID NO: 193576 - DNA, 201 bp, Homo sapiens
taatatctgtttatctagaatatatagcggtaagtgagtatacacatgaccagaattctttagtaaaaagaaatcatcttaatttagtaccagaaaaggargaaaaaagcactgctttctggaaaaaaaaaaaaaaaaaaaaaagcatcatccagatcttggtttcgccctcattgaaacaaattaaatgaaaacttggca

SEQ ID NO: 193577 - DNA, 201 bp, Homo sapiens
ctaatttgtgacattcctcactgctcagtatgtgattagatgccatttataacaatgtgtttgtaaacttcaatgttttttataagatgtaaaactaactktattaaaacttctttgcaaatttgagtcatgaatgaacctcgcttataaatagcttatagggagtctttgctagagataataacatagaaaatgctctct

SEQ ID NO: 193578 - DNA, 201 bp, Homo sapiens
cattctatgagcaaaaacagaagtatgttaggctcaattctgttccctgacttaactgactagcttatagttttgatttagtattatttcaggataaatayaatctcagaaccaagaatgaccttttgagctgaatattttttaaaaacctgttatatattagtcttttctttttagtgatgatttcactattgttttcac

SEQ ID NO: 193579 - DNA, 201 bp, Homo sapiens
gatgcccagtaaggaagaggactttttaagtatgtgtgagaggggtatggctatgtttgtgcaggaaatttcaacactggtgtatggaatgaaaagaaccsgtgtgtttagaatagtatctactgtatcatgcctacctttggagcctctgtctctgtgcctcccactacttccttagccattaccatctgctatcagtat

SEQ ID NO: 193580 - DNA, 201 bp, Homo sapiens
aatgatttttccgttgcttaagagagtgctagttgaaaggtttatatcatattctttccaaatttctatataaatctaagttaactgttaaaagaaagcakgctgtttaactttctaaactttaagatattcttccaacaaacggaatttgaataaaaacttccagtcctttagactcaagaaaaaaaaaaactaaatatt

SEQ ID NO: 193581 - DNA, 201 bp, Homo sapiens
aatttcccaaaacccagcaaggactccactgatggaaaatgagatgggttagtgggtacatggatgaatgttttaaaagtttaatggttttatatttactrttacagttgtcttctctttgtggtaagaaatgctgaattttttactatcatttataatgttaatcaaaattttcttttaaaaattaattcaagtaaaaat

SEQ ID NO: 193582 - DNA, 201 bp, Homo sapiens
gattggctgtcaaggagtctctctactcaagtgactttattactattaattttttaactcccagaaattatgaagaaaagcaaaacaaagcaatacaaacyaaattgatcaaagagaataaatgagctgacgtctgtgaaagcttggcaaaacttaaatttcttttgcctctgaagataaatatgatttctagctcccatg

SEQ ID NO: 193583 - DNA, 201 bp, Homo sapiens
ttcatactagaggattgaaagacgtatcatatcactggaaatattaggaatttgattaattaacttactctacggtgagttttatactttcacttgttttyctgttagtaattatggtccttttgtttccatttgtagcactctcaagtgtttcttgtaacaccaactttatggtaatgaattcccttagctttttcttat

SEQ ID NO: 193584 - DNA, 201 bp, Homo sapiens
cagatatgaggctatccatacaaatttcctaaatataaagcctgatagcgatcttgccctttgagggtaatgatttgaagctaaggtggtagatagctccycaggaaattacaataatttctttctatcatcaggatatctgacaatcagttggggaggattttaaaaaattataagcatgaaagaactattaaaaagaca

SEQ ID NO: 193585 - DNA, 201 bp, Homo sapiens
cctggagcaaagttctccagactcacaccgtggagcaacatggtccagcctagatcaactgaaaatagtcaaaccacagtctgataagcacgagacacaaygttattggaggccgataggatttttgaggttgtttgttactcagcaacgttgaacaatagacataatagcactaactacatttgatgaataaattaagga

SEQ ID NO: 193586 - DNA, 201 bp, Homo sapiens
agaaaaccaatctcccagcttaaatgtatcagtcagagagaaaaaattctcctttacccagcctttttgctctatttagacattcaacacattagatgagkcctacccatattgtgaagggcaatctgctttactctgtctaccaattcaaatggtgatctcattcatagacaccttcacaggcacacacagagtaatgtt

SEQ ID NO: 193587 - DNA, 201 bp, Homo sapiens
agttctccagactcacaccgtggagcaacatggtccagcctagatcaactgaaaatagtcaaaccacagtctgataagcacgagacacaacgttattggargccgataggatttttgaggttgtttgttactcagcaacgttgaacaatagacataatagcactaactacatttgatgaataaattaaggacaaatttcaa

SEQ ID NO: 193588 - DNA, 201 bp, Homo sapiens
ccctaacatggcagttcctggaaccgttgaactagaactatcacttccattctcttcagctgctccctgtcacattcatgcactagaatgcctcattgccytcactttctgacttctactttacatcctttagctctcacacttcttcactccttcttaactactgtttgaccttctatagacctcatgtacttgatcctg

SEQ ID NO: 193589 - DNA, 201 bp, Homo sapiens
aattgtatataacttgagtaattccataagatgagatgcaatatggtcatatctcatattgtacaaataaattgttcaacatgctagttagcttaaaagcrgagagtttagcatcttctaaaggtttttctcattctctgcattttacaagatccctagggatagatagtcctaaagtgggtcagtctacttgaacctaag

SEQ ID NO: 193590 - DNA, 201 bp, Homo sapiens
agtttgtgataaaatacacacctctggattttgattaagaattaaagcaaatcaacaatgtgaaggtgagcaaaggtcatatactaagtgtaaacctttayagtgtgctgtctgaggaactgaatagccattctaggactgtgcttttcattactgagttaacatggctatcaagaagactgtatgttatgtaagatttga

SEQ ID NO: 193591 - DNA, 201 bp, Homo sapiens
ttccatataacagccacttttcaggaagttaaccatttagagcctgtaagtgctgtcgtgatcagtagtacctggacatgtagagccaacacttttttctratatcttcatttctttaaatcagggtcaggcaggatttttctttatatacctaaaatatgacattttaaaattcatcctctttccctgcatagtgggatt

SEQ ID NO: 193592 - DNA, 201 bp, Homo sapiens
tttcaggaagttaaccatttagagcctgtaagtgctgtcgtgatcagtagtacctggacatgtagagccaacacttttttctgatatcttcatttctttawatcagggtcaggcaggatttttctttatatacctaaaatatgacattttaaaattcatcctctttccctgcatagtgggattattttcccaaagtattaa

SEQ ID NO: 193593 - DNA, 201 bp, Homo sapiens
agggtaggcagttgagtgtgcatctaatttgctgttgggtagaatggacaatgagagaaagtccacttgtagatttgttcttctaagcatttgactcccasgagagttggaaaggtgtgtatgtaacagcataatattcaataaaaagaaggtcatgataacatttcttgtttcagaggttgaaagaaataaaagggcatt

SEQ ID NO: 193594 - DNA, 201 bp, Homo sapiens
ataggcataaaggttgaatgtatttatacatatgcatatgtatagctgggttttgtttgactgtaatatgtaatgatccatttggcatttcatgaagaagwtgacttatttttgtaatataatttgttgtaatataagtgcctcttatcacctatttaaaaatgatgtcactactactgtttccgtatttgacttttgatt

SEQ ID NO: 193595 - DNA, 201 bp, Homo sapiens
acaatgagagaaagtccacttgtagatttgttcttctaagcatttgactcccacgagagttggaaaggtgtgtatgtaacagcataatattcaataaaaaraaggtcatgataacatttcttgtttcagaggttgaaagaaataaaagggcattgcatctaaattgaatagaaggttaaatggggatatccgagacatatg

SEQ ID NO: 193596 - DNA, 201 bp, Homo sapiens
tgatgatttgcataaaaattgttttgttacagggtttagacttttacaataagattgtgtgactcatttaaaatgtttccagtaaaattatagctaattasagaaaatataatttatccttatctatcacttgctttagaattctatgtataggtaataatttgaagacatatttccatcaaatttggaaaactgctcttg

SEQ ID NO: 193597 - DNA, 201 bp, Homo sapiens
gtatgtaacagcataatattcaataaaaagaaggtcatgataacatttcttgtttcagaggttgaaagaaataaaagggcattgcatctaaattgaatagraggttaaatggggatatccgagacatatgtatgattcatctcaaaatatcagcatccaacagtttctcacattctgttacttttcatctagtatccatct

SEQ ID NO: 193598 - DNA, 201 bp, Homo sapiens
attgagctgagaattatacaaaaaattatctaatgataattttacttaataactacagtaatatatctatggaaatttgtgtatttattcattctttatttattaaaaatttaagttggtcattaggataagaactgtgcataaaacagataataagaaatcatctcagttctcaagaaacctaaaatatagtaggtgaaa

SEQ ID NO: 193599 - DNA, 201 bp, Homo sapiens
caaaggagcctcagactttgactctgcctccctttttaccttcctcttttcttgatattcaggtcttttgtccaggtacaaactgctttttttcccagacytcagtttctatttccaacatccacccacaccccatactctctgcctcgatcatttcttgattactgatcatgacatttctgctgcctggaatttgccttc

SEQ ID NO: 193600 - DNA, 201 bp, Homo sapiens
gtatttagatcaatcatattaaaaatgactatttatataatgggattggtgtctagcttgattgtaacttcttacacattgcacttgctctttttttaaaaaaagtcgttccctctttcactgctttcacttcttttaattaactatttcatatgattatattattttcttctattttattatattattatacttcttcaa

SEQ ID NO: 193601 - DNA, 201 bp, Homo sapiens
gattccacttcctctttcttggtttctctactgactccagttagaatcacactttcacctctatgcttcccaagcattctgttatttatcaagctgtctcmtatgaagatgaatatgtttgtctgttttccctaatagactgagattattgaaatctgaggcactgcttaatcatgtttacttttcccggaacctatgaca

SEQ ID NO: 193602 - DNA, 201 bp, Homo sapiens
atctaaagcaatgtagtatgacaatatttatttttatgaagagccatactactcccctaataagtctgatacacacacacacacacacacacacacacacwcacacacacgatggatacacatatatatgtagacatatatacatacatagtcttcatgttatactagagacagtgggagtatagacgtacatggcacccc

SEQ ID NO: 193603 - DNA, 201 bp, Homo sapiens
tgaaatattttcccccaggacgagcaagtctctgccaatgcaaattgatggggagccatggatgcagaccccatgcacagtgagtacagagtagttgataygctatgtcaatctcagttttgctttcctctttgactaaataaccacaataactgatttttttctttatttcttttcaacctatcagcaaatagtcttttt

SEQ ID NO: 193604 - DNA, 201 bp, Homo sapiens
ttctataattgttcaggccttagaacatggtagtaaaaaggaaaaaaatttcaagatatacaaaaaatatttgggggatgaaaatgattagagtcaataayagattattggttataagaggtaaggaaaagaaggtgtcaaggatgatctgggtttctggatcattttgaacaactgaataaatgatgaaacaataccttg

SEQ ID NO: 193605 - DNA, 201 bp, Homo sapiens
gatataacacctgagaactttttataactttggaaagattcaggaagtccataaactaaaaacagaaataaatattatagtgaaattagaaaataccaaakaaaatataaattgccttctaaaaaatcacaatttgacagacagctgactcaatagcaatatcagaacccataggagagtggaataaaacttcaaactgtg

SEQ ID NO: 193606 - DNA, 201 bp, Homo sapiens
gatttctgttctctctactcttattcaacacaatatcagaacttttctacccactgtgataaactgaagaaaagaaataaagacatgcatactggaagtgrgggggggacccaattattcctatttgcaaatgacatgaaggtccacatagaaaatcacatagaaactgaaaaactaaaccaaacaataccttggaacaat

SEQ ID NO: 193607 - DNA, 201 bp, Homo sapiens
tgcaaagcctaatttagggtaatataggcagaggcaccacaggtaacatgatattaaagataaagagaaatagaaaaaacagtttaagaagagaaaaaaaatagagaaaggcttatggtctttataggacagcaatgtgtgtgaatctggtacttaaatgccttgcctccttttattctcatagtaatgtgttaggtggtc

SEQ ID NO: 193608 - DNA, 201 bp, Homo sapiens
tcttcagtgggtgccacatggagggtcccctcagtttcttcctgctgcaataatctcctccacttgctgaacagtctctttcttgtgattttaaagtggcratttttacatagatggctctatacttagaaaccaagcagcattgtgttcactggcagaaaatgaaggcttaaaacttttataaaacaacttcaactggtt

SEQ ID NO: 193609 - DNA, 201 bp, Homo sapiens
gcgtcgtggtgggtacctgtaatcccagttactcaggagtctgaggcaggagaatggcatgaagccgggaggcgcaacttgcagtgccattgcactccagmctgggcagaacgagactccgtctcaaaaaaaaaaaaaaaaaaaaaaaaaagtattatattttcatgatagcagtttcatttactttgtgctctatttcct

SEQ ID NO: 193610 - DNA, 201 bp, Homo sapiens
aacgaggaaaaagaattgatgacatatggtaaagtcattttggatccttcagccttgtgtttctttaatacaaagagatgtaaatatgtataattaaagcragcattcaccatgtatagatatgctgaaaatatttatgactctcacactgatttcctctaagtatcaaaaatattattttatgatttataatatatatac

SEQ ID NO: 193611 - DNA, 201 bp, Homo sapiens
gtgtataagagaaaattcaatctaaagggaaattttactctggcctggtgcagaagccaagtcaccacacagtgtttttacatccctgttcagtagtaaamccataagaaaaaagaagtcaacattcaaattaaataaatttttcaattttataaatatgaattggctgggtgtggtggctcacgcctgtaatcccagcac

SEQ ID NO: 193612 - DNA, 201 bp, Homo sapiens
cagcagaattatagtacaaaaaaattgtactcaattattacattttgaattttgtcaataaaaacttgtagaaattaaaaaaaaaaaaaggcttgaagacyctggaggtatctgtcatcttaaaaaggtcttacctgaaagtacattccctctttgagattaaaaaactgtcacatgccctatttgtgttcttgtgagaac

SEQ ID NO: 193613 - DNA, 201 bp, Homo sapiens
tattaataatattttatctattaatgtcaaaataatacattagatgtttaatatatattcattttgagacatctgaaaggaaaatatttaattacgcagcmtctcagtaatattagtaatgaaatattctccccttgaaattcaagattttccttttagattatagatgtagaaaacttcaggaaaacgttgtgacttgtc

SEQ ID NO: 193614 - DNA, 201 bp, Homo sapiens
ggctggagggcagtggcccaatctcggctcactgcaagctccgcctcccgggttcacgccattctcctgcctcagcctcccgagtagctgggactacaggygcccgccactacgcccagctaattttgtttttgtattcttagtagagacggggtttcaccatgttagccaggatggtctccatttcctgaccttgtgatc

SEQ ID NO: 193615 - DNA, 201 bp, Homo sapiens; identical to SEQ ID NO: 33240

SEQ ID NO: 193616 - DNA, 201 bp, Homo sapiens
ctttttccatattctgctacttccctttaaatgtcactttcctgaaattaccactttgatccttcaactgaaattatttcccccagttatgaattctcatraggattcttagggacacagttttttaaatagaaaccaaattgtcatcttgtgaggctgagaaatgctaagtaataggaagattttgagtatgctgggcat

SEQ ID NO: 193617 - DNA, 201 bp, Homo sapiens
attgatttgcatatatgaaccatctttgcaaccctgggataactcctacttgatcatggtgaattatctttttttttttaaattatactttaagttttagrgtacatgtgcacattgtgcaggttagttacatatgcatacatgtgccatgctggtgcgctgaacccactaactcgtcatctagcattaggtatatctccc

SEQ ID NO: 193618 - DNA, 201 bp, Homo sapiens
atctcaatagaaaaatggttggaaaataggtttttctgaactaaatcttcaattttttatagtttatgccacctataaagatttataaaatgcatttcttytttatcatatgagatttttcttcaaacctataattttacgtatatgtattgctaataatgatgcctggcatttgtgtagaatttttcaaaaagagtgtta

SEQ ID NO: 193619 - DNA, 201 bp, Homo sapiens
ttgtaaagatgtgatagaaagtctaaagacatattgaactatatgtaattatatagtctataataaaagtcacaaatgaaatctggtggagcatcaaaggygtcaggattattgtataaccacgtgaaaataaagtaaggtaaattctacattacatctattacaaaaaaatcaaacatgaattcagggtttaatttttgc

SEQ ID NO: 193620 - DNA, 201 bp, Homo sapiens
tgggggggggacagagtctcactctgtagcccaggctggagtccagtggcctgatctcagctcactacaacctccgccttccgggtcctggttcaagcaaktctcctgcctcaggcttccgagtagctgggattacaggcacacaccaccatgcccagctaatttttgtatttttagtagagacagggttttgccatgttg

SEQ ID NO: 193621 - DNA, 201 bp, Homo sapiens
gttccccaaagaaaacatatatcataggagaatgagaggaagagaagataaagaaaattgaatgttcgttgctgatcaattattcagaatcaattatggtwtgctagggaaagcatactgtgccaaagccaaactaaactccaataagcatgaggattaattactctcatgcctgtataagctagaggaaggaggggctgg

SEQ ID NO: 193622 - DNA, 201 bp, Homo sapiens
ttcaagggtatatctaagaggtctctccctcttggcatttctgtttttcaataagatacttataacacatataaatatgtccttaagccacatttcaggataataaatttcatctcacacaagaaacaaacatgatacgtctagacagaattttttttttcattttagcctttctgcttgaactcaaatcaaaggaaatag

SEQ ID NO: 193623 - DNA, 201 bp, Homo sapiens
aagcttaagggtttgattcttgtgtctcacatgtacgctgcatggctttaaatcacttagcttaatttacagatttctaagtccaatcttatcctttatayataaatagcaaattttcagtgcaatgagccagcatctccaatagtagacagagccactgtcttccaggcctgtaggtaatctgagtccaataattcataa

SEQ ID NO: 193624 - DNA, 201 bp, Homo sapiens
cttagcacttagttataaaattagttaagggttatttgtattataggtactattgtttcaggatgaacggctttgtaagtattgttattaataaaatatawtttttctaaatttaactaatatcaaacaagttacgtacttctgtctcactaatatttaggttttagggcattaactggagctattgattataaaataact

SEQ ID NO: 193625 - DNA, 201 bp, Homo sapiens
tttttgatatattctcaatagctttagaccacttttattctagtagtagtaatgatggtggtaatagtggtattgccattttgccaatcagaaaatgagcsttggagaagttaaaaattcaactcggatacatatgttttctaagtcgccgaggaaactcctgaactcatatctcttgagtccaaatctcttactaatttc

SEQ ID NO: 193626 - DNA, 201 bp, Homo sapiens
gcatagtccaaaggctaggaactcagacagaattttcaggttacagtctggagcctttgatctcttttcttaaggctttcacctgattagatgaaggcccrcctatgttagggaggattatctgctttattcaaaatctactgatttacatgttaatcatatctataaaacatcttcacagcaacatctagactggtatgt

SEQ ID NO: 193627 - DNA, 201 bp, Homo sapiens
tagtagtagtaatgatggtggtaatagtggtattgccattttgccaatcagaaaatgagcgttggagaagttaaaaattcaactcggatacatatgttttmtaagtcgccgaggaaactcctgaactcatatctcttgagtccaaatctcttactaatttcactatactttctcttcacgtctgcgggttgtaaatgtgag

SEQ ID NO: 193628 - DNA, 201 bp, Homo sapiens
tatctcttgagtccaaatctcttactaatttcactatactttctcttcacgtctgcgggttgtaaatgtgagatattcagatctgcaaattttacaggcayataacttgttggggttgcattcgagcagcccctagatctttcctaagcattagtctgggcccacaaccaacctgaaaaccttaatgaatttcaaaatcat

SEQ ID NO: 193629 - DNA, 201 bp, Homo sapiens
ataatgaggaaagttatattgaaagcagtccttcaaatgtataatttataaccaataaattttaccttattgaagtgagacataaaataacttgcaatgcwtataattagatcattttagggaaataaagcattaaccctttttcttagagaaactagtaatccaataggttatatatagatgttcaagaattttttctta

SEQ ID NO: 193630 - DNA, 201 bp, Homo sapiens
atgtatgtatcatagtatactcagaaatgggcaagtagcatttcctagcttgaaacagcagtatgatatgcctcctcatactcaaattactgcctcacccytacttagggtttttaggccatttgccaaccagtagaactttgaattataatttccccctcactgtgttggaagtgtctcactctaaagggggttgaatgg

SEQ ID NO: 193631 - DNA, 201 bp, Homo sapiens
ttcagtaagccagagaaatccatatctactggctaaacaatagccagaaggctgactagaaatattgatttactttctaggccatttaggccttaatggcrgagaaaagctgaagtgctgtttacttttctgccagaatcgaccaaacaaccagtccattttttacaggtttttgattgatttcgcttagaggaattagag

SEQ ID NO: 193632 - DNA, 201 bp, Homo sapiens
taaaataccatttttaaaatcctcttttccttacctacttatcttgggttttgtctgcccttcatgaaataatttcctgaatattaatttgttaggcatcragcacacatacaaaagaaataaacaatggaagacgtgaatgtatgcaattgtcatcaaaattcaaatttgatctaagaaacacttatgttacaaggcagg

SEQ ID NO: 193633 - DNA, 201 bp, Homo sapiens
gttctgccctaaatttttcattagatttgttcttgcaaatgatttttgttaaattaaatgtccacatttatctcctaattttattctatttctcagcaatwtttttatagtgttggtctcaccattattccagaaactttatttgcttgcctttcacaaccctacagtcagctgggagctcttccagactccttagctgat

SEQ ID NO: 193634 - DNA, 201 bp, Homo sapiens
ttttaacttaattttcttttaacatacaaagatatctgagactctttgtaattgtatgagatgagataattagacatatatgtaattcttaaatttttttwaaaagtactatttacaatagaataggtaaattgggttaaatgcttggtaaattcagctgaaaatggattgaattatccaattataattaagatattatgt

SEQ ID NO: 193635 - DNA, 201 bp, Homo sapiens
gtgtgtctgaagagaaaatggaggaatatggaaataaaatcaatgttttgttcaaaaaactttattatgtggaaaaaaataaaagctaagcttcatgcacrcaagtcttcaaaacaaatacaataaaatgcaaatattttcaaaatatgttaaaaattcaggaaaaagcagaaatagaaagcattatgactgaacatatgt

SEQ ID NO: 193636 - DNA, 201 bp, Homo sapiens
gtaagaaactttattagccttgccaattttactaacatgttttctggtcatttgcctgtatacgtgcttacacacacacacacacacacacacacacacamaaacacacacacacacacagctatagctatttacaaagcactccataaatattaatctgttatgtgaaagcacaggtagatatttcattacattttgaat

SEQ ID NO: 193637 - DNA, 201 bp, Homo sapiens
cttgaaatattgcgataattacaaaaatgtgacacagacaccaagtgagcatgtgctgttggaaaacatggcactgatagacttgctagaagcagagttgycacagacattcaagttgtaaaaaatgcagtatctgctaaactcaataaagagtaatacaatgaggtatgcctgtacaagaatgcactttttgcaagaatg

SEQ ID NO: 193638 - DNA, 201 bp, Homo sapiens
gaggatagtagattggagtagggtggatcatggtaactaaagacaatctttttcaaagtgattagactatttactctttgaccagcatctcccctttcccrtcacattttgtcaacccccaccagcctctgataataggaggaatgagttctggtgacctattgcacagcatggtgactatagttaataaaaatgtattat

SEQ ID NO: 193639 - DNA, 201 bp, Homo sapiens
tattcaaatcaaatgttctaaagcctcaagttagaaactaatttaaaaaattgttcatgttctaattgttacttatcacctaaaagctagcttttttttttataatctccatactttaatgttttgttgaaaaaaaagacaagaacaaagatcaaacttgtcttgagataaaaagatgtaaagaggatcatataaatattt

SEQ ID NO: 193640 - DNA, 201 bp, Homo sapiens
tgcttaaaaataataatctgacagaatgcaacacatgacatatgcatatgttatatactgatacacaaagttctcttagacatatttgaagttaaaataawaccacacaagttaatgaacagtatgtatagcacagttttattcgtgttgaaaatatgtgtgtaataaagatttatgtacgaaaatttgtatacgtaagta

SEQ ID NO: 193641 - DNA, 201 bp, Homo sapiens
atgaaggacctgtttcatgaaagacagtttttccatgggggttgggggatgcatggttttgggatcatcaggcattagactctcataacgagcacacaacstagatccctcgcatgcttagtttacaataggattcatgctcctgtgagaatctaatgctgctgctgatctgacagaaggtggaactcaggcagtaatgct

SEQ ID NO: 193642 - DNA, 201 bp, Homo sapiens
agagtttattaaagaaaaagagtatattcattatggaatctagaatatgtaattacaaaatatttttaaattatagaatcttgaatatataattataaaayaggattaaaggatatgtaagttatcactgagatattttacagtttttataaaataaaaacgtatttcatcgggtaaaatgttaatgatacaaaactgaaa

SEQ ID NO: 193643 - DNA, 201 bp, Homo sapiens
tatgtaattacaaaatatttttaaattatagaatcttgaatatataattataaaacaggattaaaggatatgtaagttatcactgagatattttacagttwttataaaataaaaacgtatttcatcgggtaaaatgttaatgatacaaaactgaaaacatcttatttttaaactattaatcatgtgccataacatgcttat

SEQ ID NO: 193644 - DNA, 201 bp, Homo sapiens
cagggtttcaccgtgttagccagaatggtcttgatctcctgacctcgtgatccacccgccttgacctcccaaagtgctgggattatagacatgagccaccrcacctggcctgaacacacttttatacagatttgttgttgcatttctttatgtgattttcatttgcaaaaatttctatgactttttagattcagtcattat

SEQ ID NO: 193645 - DNA, 201 bp, Homo sapiens
cttcttttgaaagctctcaagttcaccaagcttgaataaatttaatcgcctgactgaatttcagccagatgcaccctgctgactttcaaagggtcctagawgggacaacataatggtgtgcaaggctcacatggagcattttctatgtttgatgggtgaaaacagtaatttatcacacaagtggcaattttccatgattcc

SEQ ID NO: 193646 - DNA, 201 bp, Homo sapiens
aaatgtggaactccaacaaaggaataaagcagacacacaaaagaggcctcatccgaaatgctgccatattagtctgacttttcaaaatacatcaactcttwaatcagtgataatattgaaagctatacctcagcaatagcagcaaaaaaatgatttgtaatttattgttcaagctggcaaggtctgaggaggctatcatga

SEQ ID NO: 193647 - DNA, 201 bp, Homo sapiens
gatttttttttttttccaaattatggcaccaccattttctagcagtgagagtgaaaaggacatctcacgtctgtaatcctagcactttgggaggccaaggmgagtggatcacaaggtcaggagttcaagaccagcctggccaagaaggtgaaacccgtctctactaaaaatacaaaaattagccgggcgcagtggcaggcg

SEQ ID NO: 193648 - DNA, 201 bp, Homo sapiens
tacatcttccctggacctagtctacaaatagcagcctcatcaggttttacatttctacagttcctaggtttcttcaccaccagtcttctgagtgccattamtatcctggaggtaaacagtgaacctcccagatgatgatatgatgagtgttcttcctctagtacttttggccatggaattcatttttctccctcagaacaa

SEQ ID NO: 193649 - DNA, 201 bp, Homo sapiens
ccacgctctctttctcgcttactattagaacccagatttgaattccaggatgataatgcattcagctaaaagacaacaccttccagcctcttctgaaattwtgtgtggacacataactaagttttgacctgtgagacgtatgcaaaaatattgtgtgagaccttcaggacaaatgcttaaagaaagttgactcagttagga

SEQ ID NO: 193650 - DNA, 201 bp, Homo sapiens
attgatttgtgtaaatacaaaggagatgaatgataactgaacttgaattcatgtcaaatgcataactcagactccaaaaagaagtcatactgacaaaacaraagattttactataacaaaaactttgcagaatcaagaactagagctctgggttgcttgctgagtttgggtgctattcctccttaagtacagatggaaact

SEQ ID NO: 193651 - DNA, 201 bp, Homo sapiens
gtttgtctgtgtctccacccaaatctcatcttgaattgtagctgccgtagttaccatgtgtcctgggagggacctggtgtgaggtaattgaatcatggggrgtgggtctttcctgtgctctttcccatgatagtgaataagtctcatgagatctgatggttttataaaggggagttcccctacacaagctcgcttgcctgc

SEQ ID NO: 193652 - DNA, 201 bp, Homo sapiens
agtgctatcgaagaaagcaaagcaggaaatgccagcgtgaggcatctatttataattttaaatagagcactcaagaaatcctacctgagaaggtgacattygaagagagacctggaaggtgaggaggaaaggcatgtggttaatagggggaagaaacttcccagcagagggaacagcagttatgaagaatcaaggcagatc

SEQ ID NO: 193653 - DNA, 201 bp, Homo sapiens
ccaggaaagtatatgagcccctaaaacaaggtgagtagataagagtatagattaataaatataaatataatttatatttagtaactaatcactttaagaartcatcatctgtaattctttctgttatacacatctctcataatgataaagatatcaaaaagcaagtagcagccaagtcaaaggatgtaaagatatttatca

SEQ ID NO: 193654 - DNA, 201 bp, Homo sapiens
aaagattgatgcaaaatttctaaacaaaatattagcaaagaaactcaattatcttaaaaatattaatacacaagaatcaatttgggtgcctgaaaggattkcaagaatgattaataatgcagaaatatataaatgtttattctcacactaaccgattaaaggacagagaccttgtcaaatctcaaaaatgcagaaaaactt

SEQ ID NO: 193655 - DNA, 201 bp, Homo sapiens
tatatgcatattattaatacttaacagcttcaaattatactgtaaaatatatgatagctttttaaatagtatttagtctatggccataccaccctgaatasacccaatctcttctgaaataatatttaatattttcaatgtttatgtaatcgttacttattgtaccctttactgtatgtattaagtagcgagtaattactt

SEQ ID NO: 193656 - DNA, 201 bp, Homo sapiens
agaccttgtcaaatctcaaaaatgcagaaaaacttaatatttttatatagtaaaaattcttatgataggagtagaagagaaacttgttaacctcataaaaratctccatcaaaaagaaggaaagtaaaaagaaagaaaaataaaatctcaataacagatatcctaaatgggcagattccaaaagtaattcttatcttcagg

SEQ ID NO: 193657 - DNA, 201 bp, Homo sapiens
tcctcttgttaccttatctacagtatgatcaaacaagcatggagttcagaatttaaaaataacaccattaacataaggattgcttcacgcaatccctcaargaatccatcttggagaaacagacattcctaaagtgttcactgataaaactccaggtgtcctagaattgcatattgctccactgttcctgagtctacattt

SEQ ID NO: 193658 - DNA, 201 bp, Homo sapiens
tatttgtgttactaaaatgaagcttagaatgatttaatatacttacaagttttagagtataagctaaaactccatattattgaaaatgtgaaaatattgcrttaaattttatcttactttgagatgcattttataaaatcattataacttactaaaaatctatgaaaagtctacaaaaaatcctgctactattctcaagtg

SEQ ID NO: 193659 - DNA, 201 bp, Homo sapiens
ataaataggcatttcacaaaaataagaaataaaatgaaaaagcgtgacaagtgttaaagagaatggattcaatagagcacatccattgtacattggtgcamcttctttgcgaaaaacattgatgttatctggtaaagttgcatattaatatgcattactctaaagtggccactacccttaagcactaggaagtacgtacag

SEQ ID NO: 193660 - DNA, 201 bp, Homo sapiens
agtaagagaactactaaacttggtggcaattccatttactcttaagagcacaagtagtttttatattttaacaaaatttcagaatgcagattaaaagggaragtttttccaattcattttacatagattgaaaacctcaatatcaatacctcataaccatagcttccaaaataaaatttacatgtgaatataaatgcaaca

SEQ ID NO: 193661 - DNA, 201 bp, Homo sapiens
tccccagatatttacaaagttctgctaaatatttctggtttacagcctcactatggatattagagaatagtcatggtattttttttgaaatttctgcctawtaaattatttctctagaaatgggctcttaaaagctctgccttggttagaaggaattcaaagaggaagtctgtaatgaacaaactcccacagcatccatgg

SEQ ID NO: 193662 - DNA, 201 bp, Homo sapiens
agaactactaaacttggtggcaattccatttactcttaagagcacaagtagtttttatattttaacaaaatttcagaatgcagattaaaagggagagtttytccaattcattttacatagattgaaaacctcaatatcaatacctcataaccatagcttccaaaataaaatttacatgtgaatataaatgcaacaatagca

SEQ ID NO: 193663 - DNA, 201 bp, Homo sapiens
agatgcattttataaaatcattataacttactaaaaatctatgaaaagtctacaaaaaatcctgctactattctcaagtgattaataagtcagaaggctgrcttttcatttcatttcttttagaatcttacacagagtaaaatattatatggcagttgaaatagttattaaaattttaatcctaaaggaataattttaata

SEQ ID NO: 193664 - DNA, 201 bp, Homo sapiens
aagtgtaagttgtaaaacaatgttctaggccatagagattttctggcttccatttcaaataaagtcagttccactgacaatgaatctacttgttttcttarcttattccactctgatagaactacagcacccagggagctgaaggctaatgaagcaacccaaatctgaaatatcactaattagagagttcttatctgaggc

SEQ ID NO: 193665 - DNA, 201 bp, Homo sapiens
agacatttggcaatgtctgcttgattgtcatgactaaagcagggtttttttgctaactagtaggtaaagttaggaatgctgctaaatacgcttactgcatrggacaacacctcaaatacaaagtaaagaattatacagctatacagctcaaaatgtcaatagtgtcgaggttgtaaaacccttatattaggaaacagaaat

SEQ ID NO: 193666 - DNA, 201 bp, Homo sapiens
ctctgggagagcaagatcaaccccttctcttcttcctcccctttaacttactcaatctgaagatgatgaagataaagacctttatgatgatcaacttccasttaatgaatagtatatatattttctctttcttataattttcttaacattttcttttctttagctgactttctggtaagaatacagtatataatatgcata

SEQ ID NO: 193667 - DNA, 201 bp, Homo sapiens
aacaacaacaaaaattcgtaatgttagcaaaactgaaagctgcattattgagaaaagttaatcagacctattgaaaaattgactttgcaaaaatactctawagagaattataagtaaacaacatatggtgaaaaacaaaaaatttaaaaaagtaataaaaataatgataaatatatatttatatatattccaattgaaaaa

SEQ ID NO: 193668 - DNA, 201 bp, Homo sapiens
agtctgtgtgtcaactgggtggttgtgcctttagtggaagattacctggagctattctatgctggtctccctcatatatctggcagttggttctagctgtyagtaggctgatgatgataatgggccatatgactcccagcatccaacaggttaagccagactttgttacataatggtggaaaaattttcagtagaaaaaga

SEQ ID NO: 193669 - DNA, 201 bp, Homo sapiens
tgctaagaagtctggtaaaaacaggacaaaactgaagaaattgggccagtgaagatgcatctataaagactatatagtaacagagataagaaattttcaasaggaatttttaaattccatttaatattaaaatacaaataaccagagtgatatcagcaacatggcagactaggaagacctacatcttcttcccctgacaaa

SEQ ID NO: 193670 - DNA, 201 bp, Homo sapiens
aaaaggaatcaaccagaaccatgaaggacaccccagttcccggggttgttggcagacagctcccgtggtagcatctggctgataaacgtgattgaagcccsggtaggtgagagggacagagagtctccctctgtgactcacatttccactgaagatctgagcaacctagaccaaggaagagcattttgtttctcctgagca

SEQ ID NO: 193671 - DNA, 201 bp, Homo sapiens
gcagtgataaaaagaatgaaatcatgtcatttgcagcaatatatatgtagctggaggtcattgtcctaactaaattaactgaggaacagaaaaccaaatamcacatgttctcacttataagtaagagctaaacattgggtacccatggacaaacatggcaacaatagacattggagactactagaacacggagagaagatc

SEQ ID NO: 193672 - DNA, 201 bp, Homo sapiens
gaaaaccaaataccacatgttctcacttataagtaagagctaaacattgggtacccatggacaaacatggcaacaatagacattggagactactagaacayggagagaagatcagggacaagagttgaaaaactattgagtactatgctcactacctgggtgacaggatcatttttatctcaaacttcagcttcatgcaat

SEQ ID NO: 193673 - DNA, 201 bp, Homo sapiens
tttgggttgcatctcattgagtaaaaactaacatacaaggcttgattctttgcacttagctttttttctctctctcccacatgtattcagtaactttgtcstagtgttttctgtgttacctctttttctttatatctgtttgtgtatttacatacattacctttttcatacacacacacacacacacacacacacacagag

SEQ ID NO: 193674 - DNA, 201 bp, Homo sapiens
tatacctgtgattaacttaataataaaataaataaaattttttatctatactttaaaatcattgccatttactgagtgcctgttttatgtcagtacttttrtctaaattttcttacttttttctaacataagctttccaatttatagttaaaataagtggtaacatagcaatggtaaataacttgcccaagcttacacaga

SEQ ID NO: 193675 - DNA, 201 bp, Homo sapiens
tagctttttttctctctctcccacatgtattcagtaactttgtcctagtgttttctgtgttacctctttttctttatatctgtttgtgtatttacatacaytacctttttcatacacacacacacacacacacacacacacagagaaaataccgtttgcatctgtttcttcatttctgttgcaaccatttacttttagctc

SEQ ID NO: 193676 - DNA, 201 bp, Homo sapiens
caacaatagcagacaaaaataataggaaataaattcaagtagtatgtctaaggacaaaaatctattgacccaatagggtttatttcaagaaagccaaaacrggtcaatattactacaattatttgttttaaataaaaacaagagttgctgttttttgtgattaaaaactaattgaaaaaaatttaagcttttttaataaat

SEQ ID NO: 193677 - DNA, 201 bp, Homo sapiens
cacacacacacacacacacacacacagagaaaataccgtttgcatctgtttcttcatttctgttgcaaccatttacttttagctcttaccagtcaactcargctgatgattaatgctaatgttggctattgttagtgggcactttctgtgtgccacgcctagtgctaaatactttacctatatctcatttgattcataaaa

SEQ ID NO: 193678 - DNA, 201 bp, Homo sapiens
gcagtttgttagtaagttggtgtctcagaccgaaccttcgtaagccctgctgaatgtggtaacatttctgcatcagagagatcttaactgctgtgaatctrtatgataccttgggttaaaaactctagggtttctggaaaattcatgtggcctagctccagtggcagaaaggactaaatctccattcaggcaagttgtgca

SEQ ID NO: 193679 - DNA, 201 bp, Homo sapiens
acagggattagcatcagtattttgcaagatctgaaagtatgaagttgatattcatttaaattttttgcgatactagaaatcttaagaaaaactgacagacrgtaatatcaagattctacctacctttggttgttctctgatatcaccataatctgttgctgcaattgttatgattgtttttgttaactcttttacaaatag

SEQ ID NO: 193680 - DNA, 201 bp, Homo sapiens
cagagatacagaatatttaatatttgttagatgttgaagtatcaaatcattggagagggataaaatgcacaatacataataaatgaagtgacagaattggktattcatttaaataaaaacaaattcatatttctacttcaaagccatgtgaaatatacatcaaatagattaaaaatacaaatggaagcaatacacttatat

SEQ ID NO: 193681 - DNA, 201 bp, Homo sapiens
atgatctctatcagtcaataaatcagtaagtatgatgctgtcatacttattgacatgatgatgtaaatagaaaaatcaccacatccatattgtgtaatggrcttataaattaaaatattttattatgtgatagtatctattaaaatttaaaaatgtgcataccctttgatccatccatctcatttctaaaaatctattcca

SEQ ID NO: 193682 - DNA, 201 bp, Homo sapiens
ccttgattatgtgatcatccatagtccagagtctcactctcatcttggcaaatggggaaacataattgaatcatgacacccagaaatggtcaggctcttaytcacttgctcaactttatctactataaaatttatataccacttaatatataggggaggtgatgataattcctttccagggattcagatacacaattccat

SEQ ID NO: 193683 - DNA, 201 bp, Homo sapiens
tatatctaggatgatttatctggcagaaggaaatttgccttaattacaacaatgtaatttattttgtggtttagagccccaaaacttaaagaaagaaactraaggttaaatggcaaactttgtcccctattatcagagagcaattttatcctgaatgattgtgcaacctaagattggtgagctctttctgaaactttcaat

SEQ ID NO: 193684 - DNA, 201 bp, Homo sapiens
atgcatatattgtttcacacggtggtatctcaaaagtcttgtaagctttattcagtctatttattcttgttctttttgcttttatgatcggagaatttcaratgacctgttttcaagttcattcattcacctgattaattgaatctactgttctttgttctgattgaatctactattgactgagtctactatagaggctgt

SEQ ID NO: 193685 - DNA, 201 bp, Homo sapiens
cacaagataaaaacaagcaattatggtgaacagaaattctctactttacctcctttatttcagccactaccaagtttcacatttagaaaaatagtattgtmtgaaaaatattcatttaggttttctaatatctcaataatatatgtgaaaattcttttataaaacatagtgagttatgttttgagtgtgctttggctgcaa

SEQ ID NO: 193686 - DNA, 201 bp, Homo sapiens
gaatcttttacctggtatgtgacagagcttctcaccaccaccatgacaaaccaggaaaaatgggcccacctcagcccttcggaattttcccaacttcagawatatgctgagtgtaagtattcatattgatattatgagattatttgacatttgtgctagacaaagtatcatttatttataagaatggatcatagatcctgt

SEQ ID NO: 193687 - DNA, 201 bp, Homo sapiens
ccacagacaagtgaagaaaatactcttttgggaaaatatttacatgtgattgaatttgaaaaactaatgttacataaaatataatatagaaattagtttgyttagctttttgagaatgtgcacatatttttcagcatatgtaaaatgtcatactaaatcattactgacttaaaaattttaagccttccatttccaatgcta

SEQ ID NO: 193688 - DNA, 201 bp, Homo sapiens
gatttcaagaattttagaagttttttgtcaagaaacagggaaaaccaaatatatatttcattacaagagttaatctccaaagtataagtaatttccacaartaaatagtaaaaaaatgaataacctagtgaattactctgttctcatgccgctaataaagacagacccaagactacgtaatttataaagaaaaataggttt

SEQ ID NO: 193689 - DNA, 201 bp, Homo sapiens
gtttgatatacagattattttgctacccaggtaataagcacagtacccaataggtagttttgcgatccttaccctcctcttaatcttcaccctcaaagagwtcccagtgtctgttattcttttctctgtgttcatacgtacttgatgtttagtcccacttataagtgaaaacaagcattattttgttttctggtcatgtgt

SEQ ID NO: 193690 - DNA, 201 bp, Homo sapiens
ttcaaaggaactatctatatgacagctttaggggactatcaaggaactctctgaaatttgaaataatgaatagtcaattgcagtgcaagataagcataagmaatgcaatatttaaaatataaatttttctaagtgaattttaacataaaaaattgtattttgaaatctcagtaagatagccatgctgcatatttaatcaat

SEQ ID NO: 193691 - DNA, 201 bp, Homo sapiens
caaacttttctccaaagaagacattcaaataatgaaccagtatatatttctaaatgctcaatattattaatcatcagggaaattcacatcaaaagcacaaygagatatcatctcatacctgctagaatggctattgtcagaaacaacaggtgattgtgaagatttggagaaattgggactcctgcataatgttgggatgca

SEQ ID NO: 193692 - DNA, 201 bp, Homo sapiens
ctccttgaatatagttcatcttgaaataaaaacctattaactaaagaaacaaattatctgcaccccatatatacatccaacataaaatgacataggataayggcaatagacactcccattcgaaaagtaaggaaacacaaaatacacagcagtcatttgttcatagcaattatgaaatccagcagaacacgtattgccagt

SEQ ID NO: 193693 - DNA, 201 bp, Homo sapiens
atttgtcaaaaggggagactattagcacctacctcacagagttgctttctgaagattgaatgacctaatacagtcatgtgattaggagactgcctttcgtstaactgtaagctctcaataaagctgacacattgttggaatagcattattttcatctttttatgttttgatctttgctctagcttcattgcctagaaagct

SEQ ID NO: 193694 - DNA, 201 bp, Homo sapiens
ggactcctgcataatgttgggatgcaaaatggtatagccactatgcaatacaatgtggaggtttctcaaaaaatgaaaaatagaactgttgtataattcakcaattccactcctgactatctaaaaggattgaaatcaggatcttgaagagagatgttcacactgtcatgtatattgcagcacactttgctatagccaaga

SEQ ID NO: 193695 - DNA, 201 bp, Homo sapiens
aattatctgcaccccatatatacatccaacataaaatgacataggataacggcaatagacactcccattcgaaaagtaaggaaacacaaaatacacagcastcatttgttcatagcaattatgaaatccagcagaacacgtattgccagtttcttgtttttaactcagttcagcttcctggagatgattctctgagctctt

SEQ ID NO: 193696 - DNA, 201 bp, Homo sapiens
tatttgtcaaaaggggagactattagcacctacctcacagagttgctttctgaagattgaatgacctaatacagtcatgtgattaggagactgcctttcgtgtaactgtaagctctcaataaagctgacacattgttggaatagcattattttcatctttttatgttttgatctttgctctagcttcattgcctagaaagc

SEQ ID NO: 193697 - DNA, 201 bp, Homo sapiens
tggtatagccactatgcaatacaatgtggaggtttctcaaaaaatgaaaaatagaactgttgtataattcagcaattccactcctgactatctaaaaggaytgaaatcaggatcttgaagagagatgttcacactgtcatgtatattgcagcacactttgctatagccaagatatagaagcaatataactgctcaaccaca

SEQ ID NO: 193698 - DNA, 201 bp, Homo sapiens
tccttagcagagcaattttaaaaatggagcacttgtttgtgaatatattttaatgagatttaaacagatttgagcaaggtaagcatcttcaacaaatcaamaaatgctattaaggagaatgtgtaaggtggcaaatttgcttcactaggacaattattgtttgctttaaaagattgttttcacaaattaagcagaaataga

SEQ ID NO: 193699 - DNA, 201 bp, Homo sapiens
tctaggattgtcccagtagcatccttgtgaactacctcctttctgtacaccccaacctgcttcctgggtcaactttcaaaaaatgcaaatattataagtcyctctcactcttaaaatatttttggtgattccctatttgaatcccaaacactctattacagtaaacaagggtctttaactggatcaacctactcattctct

SEQ ID NO: 193700 - DNA, 201 bp, Homo sapiens
agccttagctgaggtacttcaggcagggatttctccccaagtgggttgagtaagcaaatggagtcctaggtgtaaggactggaaagcagcagatctgaggmacacaagagccaaacatactgaacctacaggagtgttctggtctccaacagccataaaattgctgagcaggtgagtagagtttctcacttagacatctgg

SEQ ID NO: 193701 - DNA, 201 bp, Homo sapiens
tagaagtacaagtagtttttcgttatgtgggtgaattgtacagtggtgaagtctaggattttagtgcacccatcaccctaatagtttacatcatatgcaayaggcattttttcattccttttccccctttctttctccccgcttctgagtctccaatgtccaatatactactctgtatgcctttgtgtacccatagcttac

SEQ ID NO: 193702 - DNA, 201 bp, Homo sapiens
gtaaaccaccgtgcccagctgagttattctcataatttaattagaagagatacatatagaaaaaccaaggagaagcttattggccctggcccttgctcacmctttcctcacttttctctttaatgttattcttgatgctactatttattttgtccattataccttcaatgcatatttgaatctgtctacatctcttctgcc

SEQ ID NO: 193703 - DNA, 201 bp, Homo sapiens
tggaatatccatgaacaatttattaaaatcaattacacatgtggccacaaggaaaatcagttttttttaaaaaagcagaaatcttaaaggcaaattgatctcatataattcagtcatattacaagtacgcaaaaagttggtctaaaaatcttaacatttgaaaattgtaaaacatttctggttaattattggatcaaagtt

SEQ ID NO: 193704 - DNA, 201 bp, Homo sapiens
agccatgaagatgttatttttttaaaaagataaaaataagcaatagtcaaattaagaaagaactaggaaaaagctacaagacaaatagaaagttaagatgyaattgacaaaaagaaaacaacttggaaaaaaagagcggaagtataatgacagacaaagcccaaagcttttttctcccctaaaaaaatgacaaatagaata

SEQ ID NO: 193705 - DNA, 201 bp, Homo sapiens
ccaaagtaccaggattacagatgtaaaccaccgtgcccagctgagttattctcataatttaattagaagagatacatatagaaaaaccaaggagaagcttmttggccctggcccttgctcaccctttcctcacttttctctttaatgttattcttgatgctactatttattttgtccattataccttcaatgcatatttga

SEQ ID NO: 193706 - DNA, 201 bp, Homo sapiens
actacaattatttgttttaaataaaaacaagagttgctgttttttgtgattaaaaactaattgaaaaaaatttaagcttttttaataaatcaaaatacacrtataggggcataggggatgcattccaaataaaatgaggaggaagaccataattcttctctcactatgtcagtcaacaaatttttaaaagtgaactaattt

SEQ ID NO: 193707 - DNA, 201 bp, Homo sapiens
caaataaaatgaggaggaagaccataattcttctctcactatgtcagtcaacaaatttttaaaagtgaactaatttaataatgaaaaattaaatgtttatrtagagaaatcagctattaatatttgaaggtgattatatatgtaataaatattcatcaactagaaatgaaactagtaaagcaatgtaataaatactaaata

SEQ ID NO: 193708 - DNA, 201 bp, Homo sapiens
taaaatgaggaggaagaccataattcttctctcactatgtcagtcaacaaatttttaaaagtgaactaatttaataatgaaaaattaaatgtttatatagrgaaatcagctattaatatttgaaggtgattatatatgtaataaatattcatcaactagaaatgaaactagtaaagcaatgtaataaatactaaatatata

SEQ ID NO: 193709 - DNA, 201 bp, Homo sapiens
tataacattatatcatgtataaataatgatagcctttctttttctttatgatacatgtaacttttattgtctaattcttgatgtgttatatttctaaagaycgcacatacaatcttaaatagatactcagcagtgctatctggggtgtgttaggccattcttgcttgctgtaaagaaacacctgaggctgggtaatttcta

SEQ ID NO: 193710 - DNA, 201 bp, Homo sapiens
tataaaaacaatgttgatgagtacccaaaaaggcaaccacaactattttacatcattcatagtaactgttatattgaatacatactttaatgtagtgacartattacagactatacattttatattaaaccttacacaactctgagaaataggtatcactatctccattttgccaaagcataaaccctctaggttacataa

SEQ ID NO: 193711 - DNA, 201 bp, Homo sapiens
ttcaatacgtggatgcctaatattgataagtttaaatcttcagctactctgggttcctggaatgaaattaatgaaagggaagcctaattctgaaatctaaytgtatttcacatgactaggcacatacttctcatcacagatgggaagcatatatcatttgttaaataggatagcttaagcattatgatggtattttataca

SEQ ID NO: 193712 - DNA, 201 bp, Homo sapiens
ttatctttcacctcctactccaccaaaatctataacaaaaaggacacaatattttaggattgcagcaaatgtattttcagaataattgaattttacatatyatttcacaattgttttgtgaaagtaaaaattctaaattcatagacagattggatacaatccaaaagagaattagtaagcttgaatataacgttggtacct

SEQ ID NO: 193713 - DNA, 201 bp, Homo sapiens
ttgttttgtgaaagtaaaaattctaaattcatagacagattggatacaatccaaaagagaattagtaagcttgaatataacgttggtacctaactacattkgtacctcatatcccatttaggtttcatcagttgtcccaataatagtttttttccacaaaactagtccaaaatcatattagttttctgttattgatggttg

SEQ ID NO: 193714 - DNA, 201 bp, Homo sapiens
cgttggtacctaactacattggtacctcatatcccatttaggtttcatcagttgtcccaataatagtttttttccacaaaactagtccaaaatcatattasttttctgttattgatggttgtattgtgtgtatatatatatatgtatatatgtatattatatatatgtatatatatgtatatacgagagaatgtttttata

SEQ ID NO: 193715 - DNA, 201 bp, Homo sapiens
caggtgccagggaaaagagggtattgagaacaactctaggtgatatgagcagatattacatactgaatttggagagttttatcagtaaatatcataagaayttgtttataaaataatcatattttcacatgtatataaaaccaatttaggtttaaatatatcccttaactttaaaaaaatctttttaatttcaacttttac

SEQ ID NO: 193716 - DNA, 201 bp, Homo sapiens
taggggtagatcaatccagagaagctgtccttgttataaaaagtgaagacctaagttgaccaggtcatgctaaatcaaagaaagttaagtggtgtttttgktagatattgataaataaaaatatacttggtggtcatgtgtaagtgttgttatggtaaattggttagctgacatcacaaggcatcccttgggaatgatgct

SEQ ID NO: 193717 - DNA, 201 bp, Homo sapiens
ggtgaataagggctgaatgtaaattctcagaatttctgtttcttgtgatatgtttgctaaagtgagcatatcttggataactgatagaaacacacataatsctaattacgctgtgaggaactttgatggacataatggaaatacagggaataatcatttctatacaagccaaaacctcgtatatatattttttaaattttc

SEQ ID NO: 193718 - DNA, 201 bp, Homo sapiens
ttaaacttttgttgaatgaatgaatgaatcctggaaggtctggagaaaagaataacacaaaaatgttattagaaagttgctgaatatagaaagactattcyaatagtcataaaatattcattaagaatgtcttcagacctctttgtataaaccaatatttttctctccatctgtagaatgatatgtttttcatcagaatga

SEQ ID NO: 193719 - DNA, 201 bp, Homo sapiens
ctttgccaaatgtctttttaattgtcaaaatgttttacattctaatgtaagaagcagatatcaatatttataagtcaaacagaatactttaatttgatatragagacatactcgaataccataacaaaaacttctttgtttcatttctatgtgtgaaaatgtctgtcacttacatgtattgtcttctaattgagggcatga

SEQ ID NO: 193720 - DNA, 201 bp, Homo sapiens
aacagatagaaacttgcaaatcttttggaaggaaaaaaaatttggatataaaaaattatcttgcataatatgcctttgctctgatcttttaactaaatacrtgtgtgggcataattgtttctatataaagtgaaatgacatgagcataaaaataggaaaaaatgtgggttaaactagtttataacattgaagcaggtatac

SEQ ID NO: 193721 - DNA, 201 bp, Homo sapiens
taaggtgcttcttccttttctttttcagaatgaagaacaaattttggtattttgagtttggcacatctgaaactttctcagccacctgcaagaagctacaygaatctgtagaaatagaagtaagaaaaaaatgaattctcttttgtaatatgatgaaatggcttgagctttgttgttagtatatttgcattggagcccatg

SEQ ID NO: 193722 - DNA, 201 bp, Homo sapiens
aaattatagctactcctatcagatgaccctctatatacagctactctggggtttgttagctaaaacatccttagtcccttcaggatgttcaataagttgcstactattgctagttcaggatactgcattagtctccaatagctttccttacctgtccacatttcctaaataatcttttcattaaactcttaattatcaatt

SEQ ID NO: 193723 - DNA, 201 bp, Homo sapiens
aatagaagtaagaaaaaaatgaattctcttttgtaatatgatgaaatggcttgagctttgttgttagtatatttgcattggagcccatggaatgaaatatrtattagcaatccacagagacttactcaagattttaaattgtcattcctttcactcatttggaatacagcactatctgacatactaaagttaagtgtagat

SEQ ID NO: 193724 - DNA, 201 bp, Homo sapiens
attcatttaaataaaaacaaattcatatttctacttcaaagccatgtgaaatatacatcaaatagattaaaaatacaaatggaagcaatacacttatattrgaagaaaatatagaagtaaattgctatcatccggaacaggaaaacttgtcagagaccagcaagaaatctagaatctaaaaggtaattatggttgtgtttt

SEQ ID NO: 193725 - DNA, 201 bp, Homo sapiens
ccaaacctactgtcaattcatcttcaaaacaacaataattacttccattagattctcctgtggaatggatagttggccagagctcatactcttccacttcrtggcttcttttgactagaaatctgcagctacagtactttctacttatattatggaaatatcttccaaatagagctgtattcctgaacaccttaattttct

SEQ ID NO: 193726 - DNA, 201 bp, Homo sapiens
attcatatttctacttcaaagccatgtgaaatatacatcaaatagattaaaaatacaaatggaagcaatacacttatattagaagaaaatatagaagtaawttgctatcatccggaacaggaaaacttgtcagagaccagcaagaaatctagaatctaaaaggtaattatggttgtgttttcttgatctttcattttaaaa

SEQ ID NO: 193727 - DNA, 201 bp, Homo sapiens
tttgaaaagtgtcttctagtctctccttgagggattcttttctttctcttctgttgtcttttttgacaccatattctttcacttgtttttaggggatgggktgaggtaggataaagtgggggaggctttttccacctctaatctctaaatataagaactcgtctcctcagagctttgttctgtgtctctttcttccactac

SEQ ID NO: 193728 - DNA, 201 bp, Homo sapiens
ctttgaactgacccagagagaaactagcacaaatattcgttgtccctggtgttatgtagactgatttggactcagaagtcaagaatgttactgaaatcagkaagttttcagtaaaggctctaccaaacctactgtcaattcatcttcaaaacaacaataattacttccattagattctcctgtggaatggatagttggcca

SEQ ID NO: 193729 - DNA, 201 bp, Homo sapiens
aaaatatagaagtaaattgctatcatccggaacaggaaaacttgtcagagaccagcaagaaatctagaatctaaaaggtaattatggttgtgttttcttgmtctttcattttaaaaatatatattaaaactcattaacttttaaatttcaaaaaatgttttcaacaaaaataataaagatagggtgaataaacttaaatat

SEQ ID NO: 193730 - DNA, 201 bp, Homo sapiens
ttattcagaccttaagcttcaacccgaagctaagaaagaatgataataaggttggcaaatatctttgaactgacccagagagaaactagcacaaatattcrttgtccctggtgttatgtagactgatttggactcagaagtcaagaatgttactgaaatcagtaagttttcagtaaaggctctaccaaacctactgtcaat

SEQ ID NO: 193731 - DNA, 201 bp, Homo sapiens
tttacaaatggcattgttgaataaacatttcttaactacttctgacagtgtacttacattagtataaaaatctaaaatattgagttatcatgggcatttarcatttagctccttgatattttaatcacagagaagttcatttattagtttattccacaaatgcgtattgtctaattgctgacatagacattatagtggata

SEQ ID NO: 193732 - DNA, 201 bp, Homo sapiens
gccacctaatgataatccaccttctgcagacccagtaattactgcataaccctttgaagctgccatcccacttaacaaatcttgtttgttcctgctccacrgggcaatatcttaatcaaatatggaggttactgtaccctttcacaaaagtctttcattgctttttcatatattcatatttttctgtacatattttctatt

SEQ ID NO: 193733 - DNA, 201 bp, Homo sapiens
taggaaaaatatgactacttaattctcataaccataaatttcaagttagtggaatagttaacagaatttctccagttttcagccctttgtaacacattctyctatatctttactgaaaacacaaaggaaatattttaaccaaagaaatttagcaatgctcacagactgattaaaaaggaagaattttttgtctagtcgtga

SEQ ID NO: 193734 - DNA, 201 bp, Homo sapiens
cctaaaataagtaagagaaaagtatgttcataatttttctttgatgtgtattactatttattttcaaaggcctacagttaaattgtagtcattcttgaacwtagatatctgctgtagacaatttggttgtggcaagaacataaatacgttgaaatactggctgtttccagcgaagcagcattgtattgtggcaatttaaag

SEQ ID NO: 193735 - DNA, 201 bp, Homo sapiens
attttatctgtcattaaacttgataggcatatgtgcttcaaaattcaagtgcactgtagaggtttaggagtatgttaattatgtgtgtgtgtgtgtgtgtrtatatatatatatacacattatctaaattagcatattgtcactaaatactactagtattactagaaaagtagcaatattttaatatagtgtgtcctacat

SEQ ID NO: 193736 - DNA, 201 bp, Homo sapiens
cagtcagctcctttgcttagaaaacattcagtttaatctctacacgacagccaatactctcgttcccttaacaagattgttaactttaaagtccctgtgarttctgtgcagactggtcaaagtccagatgctctggcctcatcataattgactcttcttcaagaggtgataaaagtggtctactttagttcttcatatggc

SEQ ID NO: 193737 - DNA, 201 bp, Homo sapiens
aattggttagcacatgaattcctaattcaatacaaagtcagaatatgtattatatcatagtgtccttgggaaaggagtttttcactggaaaattatttttrgtaagtttctgttttcttaagctggggatggaaaataaagataaatttatcaatttgcaataatcaacattctaggaaatatctgtttctgttgaaaaag

SEQ ID NO: 193738 - DNA, 201 bp, Homo sapiens
ccaatactctcgttcccttaacaagattgttaactttaaagtccctgtgagttctgtgcagactggtcaaagtccagatgctctggcctcatcataattgwctcttcttcaagaggtgataaaagtggtctactttagttcttcatatggcctttctagaggtagagacctagaatcaaaaataacaagtttcctgccctc

SEQ ID NO: 193739 - DNA, 201 bp, Homo sapiens
agagcatcacttctgctataaggtatagcttcagaaagtcacaaaggtattaagtgcaaggggagaagccatagacaccacctgctgaagaagtataacaktgttcctgaagaccatgtgagatgaaaggtatcgtatcatcattcttggaaaataggatctatcatagcattttacattatttcatattgagaagattct

SEQ ID NO: 193740 - DNA, 201 bp, Homo sapiens
ggctgaagacagtgatagaaaagaggatatggtagcaagtataaagaaaatgggaatgtttaaaatctgttttttaaaaaaaaaaacattttggcatcaaygtgaagaagcatctgacagtaaaaatacaagtgggagtgagtaaaggggaaaattgacatttgggagaaagcctagaaagcagagatagaggaagaactg

SEQ ID NO: 193741 - DNA, 201 bp, Homo sapiens
agcttctctctcctgaagtttgaaccagtctcactaataaactcttctcattaactttaaaatcgattccagtaatttctacaagaaaaaaaaagtctctygatttcatattttttctctggataactacttctgtctctctgcttctcacaatcatactctccaagggttgatgagtcagtcttcacttcctgtactcag

SEQ ID NO: 193742 - DNA, 201 bp, Homo sapiens
atgcagggttggtcagaaatagcctcagaccacagtgcagacctgataaattctcaaccagcccattggggagctctggaacaaatatggaccatttaagrggtctccattgtacagaaatatcatggtcctaatacatccatcatctttttgttattgattcttgtctgggaaaagtgtgacctcagttcaaaacctaag

SEQ ID NO: 193743 - DNA, 201 bp, Homo sapiens
gcctcagaccacagtgcagacctgataaattctcaaccagcccattggggagctctggaacaaatatggaccatttaaggggtctccattgtacagaaatwtcatggtcctaatacatccatcatctttttgttattgattcttgtctgggaaaagtgtgacctcagttcaaaacctaagttgacttctgaagacaagaag

SEQ ID NO: 193744 - DNA, 201 bp, Homo sapiens
gagttcttagaggcaatagccagagttcccaagcatagtctctgccccatgtgtcctaatactgaaattacctataaagtaatgttttacgtttcattgartaaaaatagaaataattcttatctgatatagacatagaatcagacctactatggaaaaaaattacagtttatcattaattgtatctcatcacatttacca

SEQ ID NO: 193745 - DNA, 201 bp, Homo sapiens
gctggtcctgagttcttggcccgtatctgggaagaatgaggtgtgcagataactggagggtgagtaaggtgaagaggtgctctattgagtgacagtacagytctcaggacacccaaacggggtagctcctatctactggcaggttgtcccaaaatctgctcaactctcagctaagaagagacttacagtggatagctcctc

SEQ ID NO: 193746 - DNA, 201 bp, Homo sapiens
gttatacattcttctaaatttttttcaaagttttcaacttctttgcctttggtttgaatgtcctcccatagctcagagtaatttgatcgactgaagccttcttctctcagcttgtcaaagtcattctccgtccagctttgttccgttactggtgaggagctgcgttcctttggaggaggagagtcgctctgatttttagag

SEQ ID NO: 193747 - DNA, 201 bp, Homo sapiens
taagaatgattagtacaaggcaacattgcacaaaacaacccctctttcagcatctttctttatgctgagtttttttgagaatctgacattttaaaatatgrttataatataaagataagacattattcaccgtaggatgaaacgaattggctttaacagacatagctgtgtgagctgcacagtacatacatgatgaagttt

SEQ ID NO: 193748 - DNA, 201 bp, Homo sapiens
taccacctttatcaataattgtagctagatcttctggataatttgctgccacttcttcctcagcacttgctgtttatacagcttctttccttaagcttcawgaaccaacatctgcttgcatcaaactatttttcagcttcctcacatctctcagcttcatacaattgaatagagttagcggcttgctctggacttggcttt

SEQ ID NO: 193749 - DNA, 201 bp, Homo sapiens
ttataaaaaaaactattccacctcaaaagccatttttagataaatcacccaagacaaatatggtttctgaattcgggtcatcccaattgaggaataaagtkactgatttttaaatatatatttaatcattgttttaattatgcaatgtattcttattttgcaatctgacatgtgataaaggccatttgcagatttaaattt

SEQ ID NO: 193750 - DNA, 201 bp, Homo sapiens
ttcaagcaattctcctgcctcagcctcccaagtagctagggactacattagtcactagtcccaattagttgagactacaggcatgaaccaccatgcctggstaattttttgtatttttagtggaggcaaggtttcaccatgttagccaggctggtctcgaactcctgacctcaagtgatccacccacctcggcctctcaag

SEQ ID NO: 193751 - DNA, 201 bp, Homo sapiens
cagcttctttccttaagcttcatgaaccaacatctgcttgcatcaaactatttttcagcttcctcacatctctcagcttcatacaattgaatagagttagsggcttgctctggacttggctttagcttaagggaatgttgtggctcctttgatcttctgtctagaccactaaaacattctccctatcagcaataaggctgt

SEQ ID NO: 193752 - DNA, 201 bp, Homo sapiens
gtcaaatgaaacagcgttgtcgcagttttgcagttttggatcatagtacccagatgcttttcctatagctaaggtacttgtgaaaaccgcaggtggacacmtacatctttctcaggtgatatagatttgaaaaagccagtctgttttttaaagggaaacacagaaaaagaagagatttatcaacagttcctgaatttgtta

SEQ ID NO: 193753 - DNA, 201 bp, Homo sapiens
taattttactaattgccttcatttttattttcacatctttggtctcccatctgaagtcaaatgaaacagcgttgtcgcagttttgcagttttggatcatartacccagatgcttttcctatagctaaggtacttgtgaaaaccgcaggtggacacatacatctttctcaggtgatatagatttgaaaaagccagtctgttt

SEQ ID NO: 193754 - DNA, 201 bp, Homo sapiens
gactccaatgtttttgactagccatgtaattataaatgtgactaatataattgagaattttttctttgaaaaataataacctaaattgttttccattagayactgaagtttgacttgtgtatcagcaatgttagaaaccctgtgagaataaaaggagatgtcattgacatttttatatacaaaaatgagtgaatttataaa

SEQ ID NO: 193755 - DNA, 201 bp, Homo sapiens
tacacatgcatgcacacacacacacatgtaaattattcagttattctcctactgattcagtagtcacccaggaaccttctggaccaaaataataataatartaagactcaagtcttaggtgactcaagtaataaaaccctgtaaaaatctctctggacaacagtccttcagccagtcttttcctgattatacataccctcc

SEQ ID NO: 193756 - DNA, 201 bp, Homo sapiens
cttagtcagttcatatttccaataactgcatctacttcatttttaaaggcctacaaaagcgagaacatttttcttcctttatcttataaacagaacaatgrcaacagctttattgtgatgttctgctgaggttttctaaatatatgcaatttttgcatatcaaatgattgtcttatatctataactcaaggaatattttca

SEQ ID NO: 193757 - DNA, 201 bp, Homo sapiens
aagatactaatcttcaattatgtacatatcatttcctgaaaatggcagatgtttgttgaattcataatgttttattctccaattacattatttacttttayttatctcttcttgatgagtcatgtatttttcatttagttacctttatgcctatagttagaattctgtgtaattaaattattcatggttttttttgagacg

SEQ ID NO: 193758 - DNA, 201 bp, Homo sapiens
ctcaaggaatattttcagttatctcctgatttggattctcagaaataatcccttaattctacggaaataaaaatcatatactaatagcaatacaatttatktaataagacatgaaaatgaaattttagtgcacctattcatgtgttatcacaaatttattcttaaatgcacattatatacttcattttaaaaatactctac

SEQ ID NO: 193759 - DNA, 201 bp, Homo sapiens
ttggtgctgtgtccaatcaactgcccatgttgtgtattataaagtgacattataacatagatgggatcattggctttaacacaagctattgtgagacgcasagttatgcatttcagatatttgcatttagtcagggaaggaggtacggggagataggaaaatatttattaaacaacaggtaagtttcataattaaagttcc

SEQ ID NO: 193760 - DNA, 201 bp, Homo sapiens
tgtgtcatcaaaacagaagcgttattcttccaggaatacagttaacaatgcagtataaacaattttaaatttttattattgatgaaagttacatgatattraatgtatcattattcctgtgcttgtagagcacagcctatatcagctctacaacaagcaggcatgtttatgtgtaaagtacatgttttataaatctctatg

SEQ ID NO: 193761 - DNA, 201 bp, Homo sapiens
acaatcacaatgctatgagatgatatgtaaggaaattgggtaggataactgggatggaaatactagaaatctaaatgtgctgagaacaaaagagactattratagcatctggtaatgaatttggcattgaaattgaaatctctattaaaatattattacattacaacattgtctgacttactgacgtcaaattgggaatgc

SEQ ID NO: 193762 - DNA, 201 bp, Homo sapiens
ccaggaagaatgaaggggaattcacgtaattgctgtgtttaatagaacctagccatgaaaaatagtcttaattcttccatttcattttaaaaaactaagtstcttaacacacagatattcacacacatacatgcacacatgcacacacatgtgcatgtgtgtgcacacagtttttcttacaaatattagttatcattaagt

SEQ ID NO: 193763 - DNA, 201 bp, Homo sapiens
atgcaggtggggttgctgaagcagcagtgcatggtgggcaattagggatagtgagtactatgactttggaaagacaattgggagccagataatgcaggaamctatttgtcattgtgagagttttacttgattgaatttgtcatgcaaagtgaagcttcgaaagtctcagaagcagagtaacacactgacacattttcaaaa

SEQ ID NO: 193764 - DNA, 201 bp, Homo sapiens
aatgcaggtctggaacatggaagaaagggtttcagcagtaaaaattaaggagtagattgatgtggatgtgattgctcagaaaagcctatagaaggtacaayggcatagcctaggacatagtgaattagtcacaatatgctttgggaaggttttggattaggttgcttctatgtggttctctaaaaataactatcaatctat

SEQ ID NO: 193765 - DNA, 201 bp, Homo sapiens
agaggctgggacacacgaatcgcttgagcctgggaaatggaggctgtagtgagccaagatcgtgccaagattgtgccactgcacttcagcaggctgcatgwcagtgtgagactctgtctcaagaaaaaaaaagaaaggcttagtaagaaaaatttattccttagtgttttaaaaatataaatgacattttgaactgttaat

SEQ ID NO: 193766 - DNA, 201 bp, Homo sapiens
aggcatcattaaaattgcatctttatagtaaatatgtcacatgtttgctgatagtattatagcaacaattgcaaagttaataacaaatattatacctcccraaatgatgtatgggaatgttcctttattaaatgatactattgattctggcataatatcattagcttcttccttggaagactaagtacagggtctgtgcat

SEQ ID NO: 193767 - DNA, 201 bp, Homo sapiens
tggtaccgatgtttcaattggagtaaccacctgattaagtttataataatgcactatcattctccaaagttcatctgtcttctgcatgagccagatacacraattgaatgaggatatggtgggaattgccacccttataccttgcaagttcttgatgatggcactaatttctgtaatccctcagggacgcagtattgcttt

SEQ ID NO: 193768 - DNA, 201 bp, Homo sapiens
tttattaaatgatactattgattctggcataatatcattagcttcttccttggaagactaagtacagggtctgtgcatgttaataaatattttacttaagwgaaatattaaataaatgatgtgataagtccacaaatgagtagtatataaatgagaaaaacatgctcaatgatgtttttctgcatatcacatgaaaattca

SEQ ID NO: 193769 - DNA, 201 bp, Homo sapiens
ccagacaaggagagcctctgaaaaagcctgattttatccatgcagatttggatatatatttcgtggaaatatattccacgaaagacagcttttcagttatycttatatttgtagcccttctggataagcatcttgaaatatgtcaaagaagtatatttgtgagtgaattattttggtttccttgagtataattatcctgat

SEQ ID NO: 193770 - DNA, 201 bp, Homo sapiens
tggcaggtattaagtgtcttacacaacagatttagtcctcctgagatcatttatattatccttttgctcaccatgagaatcaggtataaagaatttaaatrtcaaagtgacagttttaggcagattaagctccagagttaccttactgaaatgtcacatgctaatcagttcagagtgtatggctaaattatatacgtttaa

SEQ ID NO: 193771 - DNA, 201 bp, Homo sapiens
aatatttagtttgtgataaaatacacacctctggattttgattaagaattaaagcaaatcaacaatgtgaaggtgagcaaaggtcatatactaagtgtaarcctttatagtgtgctgtctgaggaactgaatagccattctaggactgtgcttttcattactgagttaacatggctatcaagaagactgtatgttatgtaa

SEQ ID NO: 193772 - DNA, 201 bp, Homo sapiens
atccaattactccaattgcctttaggcttctcaatgcagtgactacagttcccactctgaggtctggcctacagacagtgatcacagagatctttaaggaygacagggctccactgacaaatttattattcacagtattggtgaaaggtatgccttctggactctcccactatgggtaagtaggccttaaatgacaaatct

SEQ ID NO: 193773 - DNA, 201 bp, Homo sapiens
ataatagctgtgctatcataaaagaatgagagaccagtagtgtggcagactagacatattgaaaagtatttcagcaacaaatacacatagaatatattgtwgggatcacaagaagtataaaaaattcccaaaggccaaaaaaacattaaaaaaaaaaacagcagttgacacaggaggtaaaataatgaagccaggttgccc

SEQ ID NO: 193774 - DNA, 201 bp, Homo sapiens
gtatgtatgtattgtgtgtgggtgtgtgtttgtgtgtgaatgcacgtgtgcttatttgggttggaggtcagctatgtctgttggtcaatgcaaatacaggyttatgtaatcaaattttcagttctagatcttttttctagtatgtcctactatgttatatgtagcacatatttataataaatacctcaagattaaaactat

SEQ ID NO: 193775 - DNA, 201 bp, Homo sapiens
acgtctatcgataagaattcatcaattttgtttatcttaaaaaaaacaggccaggtgcagtggctcatgcctataatcccagtacgatgggaggctgaggkgggtggatcacgagggcaagagttcgagaccatcctgccaacatggtgaaaccccgtctctactaaaaatattaaaatcagctgggcgtggtggcgggta

SEQ ID NO: 193776 - DNA, 201 bp, Homo sapiens
ggtatgtatgtattgtgtgtgggtgtgtgtttgtgtgtgaatgcacgtgtgcttatttgggttggaggtcagctatgtctgttggtcaatgcaaatacagrtttatgtaatcaaattttcagttctagatcttttttctagtatgtcctactatgttatatgtagcacatatttataataaatacctcaagattaaaacta

SEQ ID NO: 193777 - DNA, 201 bp, Homo sapiens
gaaagttttcctgcatgctgaaaaaagaagagtcaagaagaaatgtgttgcttattaggagaaatgccagtgatgcaggaatttttgctccttagttcagmtaaatccaggttcttgtctcatgaccaggaaaaattaagcatgcggacacattgaaggctgaggagggcagaatttattaagtgaaaggaaagtgctcag

SEQ ID NO: 193778 - DNA, 201 bp, Homo sapiens
ttggcacccacatttaagctttgaaaattatatgaccatctattacattttagatgtcacatgtcctcagaccttttctattataacacaagacagagttrgaccattttttaaaagatccctctgttattgataattgcctaaggtgcttcttccttttctttttcagaatgaagaacaaattttggtattttgagtttg

SEQ ID NO: 193779 - DNA, 201 bp, Homo sapiens
agttagaaactctataacagagaatggtccattaattttactaattgccttcatttttattttcacatctttggtctcccatctgaagtcaaatgaaacarcgttgtcgcagttttgcagttttggatcatagtacccagatgcttttcctatagctaaggtacttgtgaaaaccgcaggtggacacatacatctttctca

SEQ ID NO: 193780 - DNA, 201 bp, Homo sapiens
gatcatttatgtcaatgtggctaggagtgagggttgtacttaatatttgctatattgtatgtgctaaaggatttagtttctcctagattcattttctttcsttttgttattgggtttcccaaagaacttcttcttagttagagtctgtatcttgtagctctttcagtggtaagccctgttgatgaagttctaagtatttgg

SEQ ID NO: 193781 - DNA, 201 bp, Homo sapiens
gttttcttagtcatttagtttaaaatattttaaaatttctttggagacattttatttgacttatgttatttaaaaatgctgtttaatttctaaatattttrttattttctagctatctttctgttattgatttctgcgtagttccatttgagagcatactttgcttgacttataacctcttaaatttgttaaggtgtgttt

SEQ ID NO: 193782 - DNA, 201 bp, Homo sapiens
ttccttaaatgttacaattcagcaatgaaactgtctgggaatggtgtttctgctttaaaaggttaatcattgttcatttaatttctttagtaaatataagyctatttggattgtgtgttcctgcttatgtgagtttttatagatcatgtctttcaaggaatcagtcctttttaactaaattataaaatttgtgagaataga

SEQ ID NO: 193783 - DNA, 201 bp, Homo sapiens
tgttaaatttatacttaagaatttgactttactatttcactgattttagagtaaatggtattgtgttttaagattcaaattccagttgttcattgtcagtrtatagaaaggcaatttaattttatgtattacctttgtatcctgcaaccttgctacatttgtttattagtttcaggaagcttttcctttgtttgtttcatt

SEQ ID NO: 193784 - DNA, 201 bp, Homo sapiens
gttgttctacttcctcaccagcattgcgtattggagaatttttggattatagacattctaataagcatatcatggcaccttattgttcttataatttgcarttacctaataacatatgatgttttatatattttcatgtgtttatttgccatctgtataccttctttcatgaggtgtctttcatatatttttcccattttt

SEQ ID NO: 193785 - DNA, 201 bp, Homo sapiens
atgaaattctcccacttgtattttaaaaatagttacccatccctaaaggattaagtcttaagacctgatctggcttctagccccatattttttttttttttgtcatcatctcttatccctttgtccatagcctctgctcagtcctattacatggcttgtaacaccccgactgttgtacatttctctgtctttaagtatatt

SEQ ID NO: 193786 - DNA, 201 bp, Homo sapiens
actatgctcattacccaggtgacaaaataatctgtacaccaactcttcacaacacacaatttacctatgtaacaaatctgcacatgtgtccctgaacctaragtgggaatggaaaatttaaagtgggaatgaaaaaaaattaatttaaaaagaaaatgtaatttagtatgggagtcttttcaggcttactcagaaaaatac

SEQ ID NO: 193787 - DNA, 201 bp, Homo sapiens
tcaccacttcccctctccctccaaaacctctggaaaccactgattattttactatctctctagttttgccttttcgaaatgtcagatgggaggaggtgagkattgaaaaactacttattgggtactatgctcattacccaggtgacaaaataatctgtacaccaactcttcacaacacacaatttacctatgtaacaaatc

SEQ ID NO: 193788 - DNA, 201 bp, Homo sapiens
tgggtggatcacgagggcaagagttcgagaccatcctgccaacatggtgaaaccccgtctctactaaaaatattaaaatcagctgggcgtggtggcgggtrcctgtaatcccagttactcaggaggctgaggcaggagaattgcttgaacatgggaggcggaggttgcagtaagctgagatcacaccattgcacgccagcc

SEQ ID NO: 193789 - DNA, 201 bp, Homo sapiens
cttagttcttataatgcaagtttccattctttggttaaatgcatttctaaatattttagtcttagaaactaccatacgtggaataattttttgactttacygtatgattattacttgctagtatatagaaatagttaatttttctgtattgattttgaatcttgtgcccttgccaaacttatttataaattccagtgatgt

SEQ ID NO: 193790 - DNA, 201 bp, Homo sapiens
tgtggtgactggcttttaagatttttgacttggcaaatgaatacaaaatatgtataaaaacagaagatccagagcttacattgactgttgaaattttatgwaattcatcaacttgtacttttcagcaagttatttttctctaaggtatttatttcactttacccaaagatgcttttttgggtactaacaaaccatttaaaa

SEQ ID NO: 193791 - DNA, 201 bp, Homo sapiens
taaaagttgctgctttagaaatcatttttctgtgattctattttcctactaaaatatgtaatttcattctacaatgttgtattttataaacattataattmtatttcattaaaaaattggaagtattcatgttaacagggaaaaatagatcttaaacccgacaaaaattatagctcttcaggataatcttatcctacactt

SEQ ID NO: 193792 - DNA, 201 bp, Homo sapiens
atgccagcaaattatacaccaaaaaggaaatacataggaagctgtataggcatcaagcaaatgtgcgtacacacacaccccccagaggatgtccacaacaraaagacaaaccgtccaattaaaaaatggtcaaagaacttgaatagacattttgccaaagaatatacaaacgaccaataggcatataaaaagatgctcagc

SEQ ID NO: 193793 - DNA, 201 bp, Homo sapiens
tcttggtgtgttcttcagtataataattgcagaattgctattatgccagaaatttggatgtttattctatttttctccttttttcaccagtgaatgagaaraataatacccacagcttttgatagagctaccaaaatgaccacaaaacagaggaaagctcaatataagttttcaaatatttatctaggtttactaaacaaa

SEQ ID NO: 193794 - DNA, 201 bp, Homo sapiens
gaaatacataggaagctgtataggcatcaagcaaatgtgcgtacacacacaccccccagaggatgtccacaacaaaaagacaaaccgtccaattaaaaaayggtcaaagaacttgaatagacattttgccaaagaatatacaaacgaccaataggcatataaaaagatgctcagcattattagtcattagcgaatgactaa

SEQ ID NO: 193795 - DNA, 201 bp, Homo sapiens
aaaaggaatttttatggtacagtctgttaacaagaacacataaaacaaaatgataagtctcaaataagatgagtgatattatatgaggaatgagaattttkctcataagtttttactgattagtgtggtgaatgcaatattcaatattatttttaatacggaggagaagagaaaacatgttttctccctcaatgttgccaa

SEQ ID NO: 193796 - DNA, 201 bp, Homo sapiens
cctcaggtgctccacccgccttggcctcccaaagtcctgggattacaggcatgagccactgcgcctggcctgaattaggattatttaaagaatagtttaaygaacagactatgtctcaaggtgtaagcagggtttgaagatagcccaagagacgggggatagttcagtagcctggcaagtatctaggaaaaggtattcttc

SEQ ID NO: 193797 - DNA, 201 bp, Homo sapiens
tgaaggatgaattttcaccaaaggcctggcatgtatgatgaaatctcttctctggaaatagactaatcagccatttaagatttagataagagacaaaatarcataaactcatgggcttttattcccatacccgccagctgctctcatgcctatactttgtaaaatatagatctcttccttctagcaaatgacaccaagcca

SEQ ID NO: 193798 - DNA, 201 bp, Homo sapiens
tcctgagcttactgtatggaagactatactgtaggctgttgactgaactataagaaggaaacagttcttcaatgtagagcactgacctatttttcagccarttaagaaggctgcacctgagggagcatgcatggctatggctcataccagctattggaaataatgtagtcatttcattttgaaacagcgttcatgaacaag

SEQ ID NO: 193799 - DNA, 201 bp, Homo sapiens
gggcttaaacaattctcttaaatgctctctttttctctctctctcacacacacacatacacacacactcacacacacatgcacactcatacagaatgatgrgaaaaacaactgacttacttttcaaaaatacaattaagtactttcctttaaatgaacacattttctgcaatcattttcagctattagttaaattatgttt

SEQ ID NO: 193800 - DNA, 201 bp, Homo sapiens
atttttcagccaattaagaaggctgcacctgagggagcatgcatggctatggctcataccagctattggaaataatgtagtcatttcattttgaaacagckttcatgaacaaggaaaaggtagtctcttttcagaggtggtctccatgatgccttcttcaaaggagatggtgtcaaaataaagtggtttttagataaatta

SEQ ID NO: 193801 - DNA, 201 bp, Homo sapiens
ggagcatgcatggctatggctcataccagctattggaaataatgtagtcatttcattttgaaacagcgttcatgaacaaggaaaaggtagtctcttttcakaggtggtctccatgatgccttcttcaaaggagatggtgtcaaaataaagtggtttttagataaattatgactgccgagaaaagttttcacttttaaatat

SEQ ID NO: 193802 - DNA, 201 bp, Homo sapiens
tgagccttagtttctttgtccataggttttgtgatgactaaatgatagcacacatataacatatttagtgcagttcctaaaacatagtaacatttggatastgttacataatgaggacctgtaaggtaaaagactgtgtcatacacttagtgatgcaaagtcgtgttggatcatatagcccttcaggaaagagaagttttg

SEQ ID NO: 193803 - DNA, 201 bp, Homo sapiens
gcagaccaatttgacacagcagcaaatgcatctaatactgataaaccagtgggaaattaccttataccatgtgttaatattgcaaaatctgtttagaaaaktatgctttaactataacataatgtgcattgaagctagaaatatttatgtcttcagtgtcaattagaagcttgtggtgttgggcaatttaaggaacttttc

SEQ ID NO: 193804 - DNA, 201 bp, Homo sapiens
tgcattcaaaagtaatttccttccaccatgtggtaggagtggggaacatgacgtgtaatttgcttcccctcccaaacctggccacaatcctgagtgctgtyctgatagcagagctattgtctgttgtattgcttcacttcctacaactgcatggtgctagcacagttagttagcaaggaacagaaatagtatgttaaccag

SEQ ID NO: 193805 - DNA, 201 bp, Homo sapiens
gatataccaccaacaaattctatttcctttattttctcaggacctcattttctcattttaaattgaggaactataactctgatgtcttctgcattcaaaartaatttccttccaccatgtggtaggagtggggaacatgacgtgtaatttgcttcccctcccaaacctggccacaatcctgagtgctgttctgatagcaga

SEQ ID NO: 193806 - DNA, 201 bp, Homo sapiens
tggtcatactttaatgaccaatgtgatttcatagaaaagttctagagaacatgccaaagatgaaagtgagaatattggagatataccaccaacaaattctrtttcctttattttctcaggacctcattttctcattttaaattgaggaactataactctgatgtcttctgcattcaaaagtaatttccttccaccatgtgg

SEQ ID NO: 193807 - DNA, 201 bp, Homo sapiens
aaaaggaagagagcatcagccttattggactgttaaaagggttaggttctaaaatgtatgtataataaatagctctgtgtcttgcacataaaaggtgttcsactaatgtttagagacagtggctgtggtcatactttaatgaccaatgtgatttcatagaaaagttctagagaacatgccaaagatgaaagtgagaatatt

SEQ ID NO: 193808 - DNA, 201 bp, Homo sapiens
ttcacttataaaaggaagagagcatcagccttattggactgttaaaagggttaggttctaaaatgtatgtataataaatagctctgtgtcttgcacataamaggtgttccactaatgtttagagacagtggctgtggtcatactttaatgaccaatgtgatttcatagaaaagttctagagaacatgccaaagatgaaagt

SEQ ID NO: 193809 - DNA, 201 bp, Homo sapiens
atgacactgatataattattaacaatgatataaaaacctttttactgtaatctataattatccttctagaaccaaattcaaccctttccattatggaaagsataaggaaagtataacagagaaaatatggtctgaggagtctgactgaaccgaattcatcttaacggatcttggacaagttttctatctttagtttgttca

SEQ ID NO: 193810 - DNA, 201 bp, Homo sapiens
ttttgtagtgctgctgcctaaagtaatattttaaatgtctttaacaaggataatgacactgatataattattaacaatgatataaaaacctttttactgtmatctataattatccttctagaaccaaattcaaccctttccattatggaaaggataaggaaagtataacagagaaaatatggtctgaggagtctgactgaa

SEQ ID NO: 193811 - DNA, 201 bp, Homo sapiens
atttttctaatgatgttcggtttggtatagacatcaccttttaggaattaatacccttcagtttttaggacaatattacctttgcagaaaaattaagcaartagttccgaatttgtatatacccttctccttctccattttgccagcacacatcttgcattcgtgtcctacatctcttataattaatgaacgaatattggc

SEQ ID NO: 193812 - DNA, 201 bp, Homo sapiens
cactgtgatacacaaacaacttacatttttcacatgggttatgttatttttctaatgatgttcggtttggtatagacatcaccttttaggaattaataccyttcagtttttaggacaatattacctttgcagaaaaattaagcaagtagttccgaatttgtatatacccttctccttctccattttgccagcacacatctt

SEQ ID NO: 193813 - DNA, 201 bp, Homo sapiens
tgacattttgggtcaattattttgaggagctttcctgtgtattataggatggttaacagaatccttggcctttacatattttatgtcactagcactgcctktgccctagtcataacaatcaaaaacatttgcagacattgcaaatttttcctggggagcaaaataacccttggtggagaaccactgtgatacacaaacaac

SEQ ID NO: 193814 - DNA, 201 bp, Homo sapiens
attactctattctttctctctctctctctctctttttttctagataaaaattacacacaagaaccaagccccaatgctgatgggcccgcctccaaaaaccrgtttattctgctccctcgtcaaaaggacaagaaaccgaagcaaggaataatcctgtgttgtttcactcttagaaattgaattagcataattgggccatgg

SEQ ID NO: 193815 - DNA, 201 bp, Homo sapiens
gtagaatgaattcatctgtgctgagctgcttgagctgaccgtggcaaattcttctggttcatgtattgttcttcccatttgcttcttaacatttgactttmtctttgatttcccctttggggattaggccttaagcatcccaaagatctcaaagccgtcactatcagccttaagaccactggctctttaatttgactttct

SEQ ID NO: 193816 - DNA, 201 bp, Homo sapiens
tgaatacaatgtttcaaggaggaaataatgatggtttgaactacaatacagaaaaggaaaaggagaatatatttgagattatgaatttcaaataattttakataatttgtcttctaacttgcatattctacaaataaggaaacagagctttgagtggaaaagtgacttgtttaaaaatcacaaaagcatataatctcattt

SEQ ID NO: 193817 - DNA, 201 bp, Homo sapiens
tcaggcaatctgcctaaaaatatgcgcaaaatacatgaacagatattcatcaaaggagatatactgatgacaattgccatgtgactcaatggttttactcytcagcattaatcccagagaagtaaagcacatgttcacacaaaaactttttcactgatggtcacagtagctttctttgtaataggcaaaaactggaaaaaa

SEQ ID NO: 193818 - DNA, 201 bp, Homo sapiens
atattcaggtacaaatctcaccaaagacgtatagaatatatatgctgaaacttaaaaatttttgatgcaataaatcaaagaagacctaaataagacatacsatattcatgaattagacaactcaacataataaaatctatcaatactccataaattgacctataagtttaatccctttcctataaaaattcaagcaaagcc

SEQ ID NO: 193819 - DNA, 201 bp, Homo sapiens
agtgtttcaaccataataaatgttaaaataatgaaagatttaagcaaacccatttcttactgagtataacagtgatcatctttgcaactgagaatatgcayaattatgcacaattaagacctgtgaattatcttccccacctcttatgtctctgaggccaagtctgaaaagctcttgtattatatccatggaaatgcttcc

SEQ ID NO: 193820 - DNA, 201 bp, Homo sapiens
accaggacagggcagggcttgctgccactgccgaaagggctcgtttgatttggagtatcaccagtttaagtggccatctcagttgcaagagaacaggaagkgtggcaatttcgttagtatgagtgtgcacatttatatggtgcattcagtgcatcagtggactagccaaggatttgacagacatttttgggaggttgggca

SEQ ID NO: 193821 - DNA, 201 bp, Homo sapiens
ttaaaataatgaaagatttaagcaaacccatttcttactgagtataacagtgatcatctttgcaactgagaatatgcataattatgcacaattaagacctrtgaattatcttccccacctcttatgtctctgaggccaagtctgaaaagctcttgtattatatccatggaaatgcttccaccaagataaattgtatttggc

SEQ ID NO: 193822 - DNA, 201 bp, Homo sapiens
agtgtggcaatttcgttagtatgagtgtgcacatttatatggtgcattcagtgcatcagtggactagccaaggatttgacagacatttttgggaggttggrcagtcaaagatggcttgataaacgccgcatatatctcaggttgactggagtttatgtgcatgaacaacagagaacacaacaggcccaagctacccacacc

SEQ ID NO: 193823 - DNA, 201 bp, Homo sapiens
ttaataatgaagatctctgaggacagaccttcccagattaaaaaatgacaaatattccattgctggcatttatcgacttctattaaacaccctaccaaatsaatgcagaacgcacattctgttcaagcacttgtggaacattttctattagaaaccatttactgtttcacaaaacaagtctcaatgaatataaaaagattg

SEQ ID NO: 193824 - DNA, 201 bp, Homo sapiens
tatatctgataaaggacttgaacccagattatataaatatctctctccaataataataatgagaaacaatccaatttaaaaagtagactaattacttaaayagacatttcacaaaagattttttataaatgctaataagaaaatgaagatgtgatcaacattattaataattaaagaaatgcaaattaaaattacaaagat

SEQ ID NO: 193825 - DNA, 201 bp, Homo sapiens
aggcatcaagcaaatgtgcgtacacacacaccccccagaggatgtccacaacaaaaagacaaaccgtccaattaaaaaatggtcaaagaacttgaatagasattttgccaaagaatatacaaacgaccaataggcatataaaaagatgctcagcattattagtcattagcgaatgactaatcagatgtgagtcgaatcatt

SEQ ID NO: 193826 - DNA, 201 bp, Homo sapiens
ccactagtttccagtagataaaatgaaacaactactttagcagtttggaagtttcttaagaagttaattctacacctagaaatatacctcccaaaaatgamaatttatgctcatggaaatagttgtatgtaatattcatatcaacattattctttatagccaaaaactgggaaaattcataagcccataaactggtgaatg

SEQ ID NO: 193827 - DNA, 201 bp, Homo sapiens
gcattattagtcattagcgaatgactaatcagatgtgagtcgaatcatttcacatccactaggatggctgtaacaaaaaaagggttagaaaataacaagtkttggcaaggatatagagagactggaatccttacaccttactggtgggagtgtaaaatggtgtagctgttgtgaaaatcaatttggcagttcctcaaaaca

SEQ ID NO: 193828 - DNA, 201 bp, Homo sapiens
gtttggaagtttcttaagaagttaattctacacctagaaatatacctcccaaaaatgacaatttatgctcatggaaatagttgtatgtaatattcatatcracattattctttatagccaaaaactgggaaaattcataagcccataaactggtgaatggacaaacaaaatgcggcttacctgtaaaatttagtttgcagt

SEQ ID NO: 193829 - DNA, 201 bp, Homo sapiens
ttgcactgatgactagttaatgatgctgaattatacaagaaaaaatggacaattgagtaatgcaacctgaatttggaatgaataattaattcatcgttttytaaaaggaacatagcttgtatcatttacataaaatgtatttgcaaaaattaaattgcttatcctcctacaacataaagctgtttaaatcgtagatgtact

SEQ ID NO: 193830 - DNA, 201 bp, Homo sapiens
gaaatagttgtatgtaatattcatatcaacattattctttatagccaaaaactgggaaaattcataagcccataaactggtgaatggacaaacaaaatgcrgcttacctgtaaaatttagtttgcagttaaaagaaacaaaatattgctatgtgctataacatggtagaacctcacaagcatcatagtaagtgaaggaagc

SEQ ID NO: 193831 - DNA, 201 bp, Homo sapiens
aatagttgtatgtaatattcatatcaacattattctttatagccaaaaactgggaaaattcataagcccataaactggtgaatggacaaacaaaatgcggyttacctgtaaaatttagtttgcagttaaaagaaacaaaatattgctatgtgctataacatggtagaacctcacaagcatcatagtaagtgaaggaagctg

SEQ ID NO: 193832 - DNA, 201 bp, Homo sapiens
ctgtaatttcatgtccaacacgtaaagtacaattataacatcagaatgatactggtggacttagatacagatcctacatcttacaatattctataaagagrcattggtaacatggcaactcattgactgtggcgagatttactagcctccatttcagagcatggccttttcctgatttcatctctgacttttctggaaact

SEQ ID NO: 193833 - DNA, 201 bp, Homo sapiens
aatttaccatgggaaattttaaaattgcatttaaaatgcaatgataaggctttgttttgttttgttttgttttgttttgtctacagtgctgtgatagaatmtgtgggggaaacataagcaaagagttgttgattttgccctcctgggaagattattcaatctgttgcttcaaccactctccctgaaaatctgttttgtaaa

SEQ ID NO: 193834 - DNA, 201 bp, Homo sapiens
ctatagtatacaaggttgcctataatactcataggttataactaagctggatgtgacaaaatttttaatccatcaaaggatttcgtgccttaataggagcyggtaccttaatagacaaaaagggtctcaagtgtggccttcagttttgtagactctggaatttatttttctaatttcatgaagatatataaggctgtgcta

SEQ ID NO: 193835 - DNA, 201 bp, Homo sapiens
atgaggggaaaccagtttagcattccacacattttttttttcttttgatcttggacttcaagttcaattccaaattgttccactcacagctgagatatggraagaaagtggcagatgtgtatagaaatatattttaatctttaagagtatggagagatgctaggcgtgacgctaatagaaggatatcttaggaatgggaaa

SEQ ID NO: 193836 - DNA, 201 bp, Homo sapiens
atttgtaaggcccaattccctagaccccatagaaaagaatttgggcaagaaaaaaaatcagagctttgtcctcattgctatcaagaccatttaattaatcyttcatcaaagcaaagtcatctatataagcaccccctttagatactacatcaccagcattgggtaatattgttcccagactaaagtgagggtcaggctgct

SEQ ID NO: 193837 - DNA, 201 bp, Homo sapiens
atacaactttgttcaagtttcttcatctctgtgtctcagatttttcattcgtaaaatgtgggtaattatagtaccatatgtgtgtcatagggatgtagtaytagcaattattattattattttatttttacattttttagactgtgtctcactctgtaacccatgctggagtgcagtggtgtgatctcagctcactgcaac

SEQ ID NO: 193838 - DNA, 201 bp, Homo sapiens
tgaactatacttctgtaccaatatgatttctatagtatacaaggttgcctataatactcataggttataactaagctggatgtgacaaaatttttaatccrtcaaaggatttcgtgccttaataggagctggtaccttaatagacaaaaagggtctcaagtgtggccttcagttttgtagactctggaatttatttttcta

SEQ ID NO: 193839 - DNA, 201 bp, Homo sapiens
agcattccacacattttttttttcttttgatcttggacttcaagttcaattccaaattgttccactcacagctgagatatgggaagaaagtggcagatgtrtatagaaatatattttaatctttaagagtatggagagatgctaggcgtgacgctaatagaaggatatcttaggaatgggaaatacatattcaaaatctaa

SEQ ID NO: 193840 - DNA, 201 bp, Homo sapiens
tgatctatgaatttctcatccatatcactgaactatacttctgtaccaatatgatttctatagtatacaaggttgcctataatactcataggttataactragctggatgtgacaaaatttttaatccatcaaaggatttcgtgccttaataggagctggtaccttaatagacaaaaagggtctcaagtgtggccttcagt

SEQ ID NO: 193841 - DNA, 201 bp, Homo sapiens
cacagaaacaagacattcttaaccaagtaagacattttcttttctattaaagtctgtcttttctttctttattctgatatgatctatgaatttctcatccrtatcactgaactatacttctgtaccaatatgatttctatagtatacaaggttgcctataatactcataggttataactaagctggatgtgacaaaatttt

SEQ ID NO: 193842 - DNA, 201 bp, Homo sapiens
tccccccgaccccacgcagttttagattcagtgtttctgaggtgggggtcaagaatttgcatttctatcagttttctaacttatgctgatgccactgtttsggaaccaccttttgaggcctatggatctagggtgtgttttaaaatcaacctgtaaacttgaacttttagctaaataatcagagatatgagataatgagta

SEQ ID NO: 193843 - DNA, 201 bp, Homo sapiens
aaagttctcttcaatacatgacctcatccaatttataaaaaattactcttacaatatggcagaattcctaatgtcaattcacatgtgaagttatcactctscattggctggtcaagttgaccccaaagttgtttgcactgatgactagttaatgatgctgaattatacaagaaaaaatggacaattgagtaatgcaacctg

SEQ ID NO: 193844 - DNA, 201 bp, Homo sapiens
catggaagaatttatttctgctttgtgttcttaatgacatttaatgccaattgctttccaagaaaaatatggaatgtaagcttttggaatattgtgtctastcgtaaaagaatcaggctgacagattaaaatattgaattctaccatataaaattcaaaaatatcaccagattattttacctctgttaaaacgtcacaaat

SEQ ID NO: 193845 - DNA, 201 bp, Homo sapiens
agtcaccatatgctgcattttttgaggtagttattagatcattattagacacacatatcacccttttcaacaatgtaatacatttcataaatgtacagatmtattgttgaaacatgttattaaaataacgaacagttgaaaaacaaaaagttagatctcattacaacccaagaacaattctaaattaagagcaaaaccact

SEQ ID NO: 193846 - DNA, 201 bp, Homo sapiens
ttatcttaagtcagtctcagaaagataaatattgcatgttctcatttgtaagttagagctagataatatgtacagatggatgtcaagtgtggaataatagrcaatggagactcagatggatgagggagtaggagggggatggatgatgagaaattacttaatcggtacaatatacattattctgatgatgtatatcctaaa

SEQ ID NO: 193847 - DNA, 201 bp, Homo sapiens
cttgagccaggtggtgtatcttataatccaggacttagcttcagaagatgcacaaactgctggaagtgactggttggcagactgtctgccacagccgtggyctgagaggaatccatgttgggactaggtcataagaggaatgcaagttccactccctccagccaaagctgtggctatggggactgttccaccctccgcatt

SEQ ID NO: 193848 - DNA, 201 bp, Homo sapiens
tacctgatatggaaagcattgagatattttgcccataggggtggcataaagtaatgtacttttaaaagtataattttatggtttgcagtattaacagaatrtacaataatctgactaatgatgttcattacgaagaactattagtagtttaggtaaagataaacagtctttattttttccaaaatggctgagtggaagcat

SEQ ID NO: 193849 - DNA, 201 bp, Homo sapiens
ttgaaaggacagaggagcagataggaaactattcttgcccccaggttatttcagcttcagcagacagtagcagctccagtgccatttggtattactggacygaccaaatagcaatttccaaggtggacgaagaccatccataaagttcctatcactcactgcctcttttttcccccagcctcccactaggtaccaacacca

SEQ ID NO: 193850 - DNA, 201 bp, Homo sapiens
caaagcactatgctaagagtaagaatttaattgggggcaaagggagaatttttataggcccatcagatttaagagaggaactgaaggattgatagatccartttgcagttacagagaaggaataggacatgtccaccagcgatacgaaatggttgtgatgtaatgagcattatggaaaagtttaagtatgttctgttgata

SEQ ID NO: 193851 - DNA, 201 bp, Homo sapiens
gaagagcagcaaaacataaaagagacaaacgaggaaatttgtattctgtagaagcttgttaaactttacaggttcctaaaatttaaattcatgtattaatragaccttagttgcttttttatctttgtatacattagttttggaaattgaataagttaaaaaacatttaaattctgaggactgcagagaggagtaagacat

SEQ ID NO: 193852 - DNA, 201 bp, Homo sapiens
aattttttgtaattttcagatatcaaccaaacagaggaacttctagggctgttgaaaattagatatttttaatatcttaaatattaatcataatcgaagarcagcaaaacataaaagagacaaacgaggaaatttgtattctgtagaagcttgttaaactttacaggttcctaaaatttaaattcatgtattaataagacc

SEQ ID NO: 193853 - DNA, 201 bp, Homo sapiens
tctgagttgtagccagaaattgctggttggttcacaggaataagagggttaatgtaaaatgtaggcaaaaaaaaattcaaaacaactaatgagactagaayttaatgacaaatgtgtggtaagttttgaaacataatttttatctccccagtcctcatttttgttaaaaacaattcatgataggactgagttgtttgcaaa

SEQ ID NO: 193854 - DNA, 201 bp, Homo sapiens
gtaatagcaaaaactgtaactaccttcacaccaatccatcaactcctgaccttgtggagaaaaaaaaaaaaaaggcttaagcgtagggcagggaaatgccwggggaagaaacctcttgttcttatgcaaacagagagaaacttaattgttgtcccactgagctggactccttggccaagggaggggaagactgtatggatg

SEQ ID NO: 193855 - DNA, 201 bp, Homo sapiens
attcaggcccatagtattttgctatgctatggaaaaaatttttcactgacagattgtcatttttctacagactcaatgggtggatttcagagaggaacatrttgggatatatagtcaggagcacaagctttcatgattcttggcttatgtgctataattgatttaaaaaaaagcaattttttgtaattttcagatatcaac

SEQ ID NO: 193856 - DNA, 201 bp, Homo sapiens
cagttttctattagttcagtccattcagttaactcatgctctgcttgatattcgtgaatgtttcagctctttcatgagtcctgtacgttttccctttagtscaatgttacagtctccaaagttatcagaaacttgtattggagaacacccatcaaacttttatagctgattattaaccatcttttgaaggggatcaaaaga

SEQ ID NO: 193857 - DNA, 201 bp, Homo sapiens
aaatcaactgtggtccctgccaatctaggtaatagcaaaaactgtaactaccttcacaccaatccatcaactcctgaccttgtggagaaaaaaaaaaaaaaggcttaagcgtagggcagggaaatgccaggggaagaaacctcttgttcttatgcaaacagagagaaacttaattgttgtcccactgagctggactccttg

SEQ ID NO: 193858 - DNA, 201 bp, Homo sapiens
tcttgggtatccacaatgtaattcgtctgtaaagtcttaccatacagaagtagtattctgcatgtatatacattgaagatcttgtaaagatcatcatgtayatagtaactattttacattcactcgtttcctcattttctataaaattactgctgctatttatgattactatgacctgactgaaaataactaatgaaaagg

SEQ ID NO: 193859 - DNA, 201 bp, Homo sapiens
cagataaaatctccaaaagtcctctggatgcgattgctaagtgagtggcaatctgccgggacaggagacacatggttaaaaatctcaggcagatattcctwcttgaaacccttagcatcagagacccttgaattctgtgcttggacccctggaaagcagaaatattatacttaacgtttgaatgtctgaatcttttgcctc

SEQ ID NO: 193860 - DNA, 201 bp, Homo sapiens
agaacacccatcaaacttttatagctgattattaaccatcttttgaaggggatcaaaagaagacaattgtttatgaataacaaaatgaccagggtagttayagtcagaaatgtgattgacaaaatgtggttatctctgtggcttacaataacttaatataacaaccttaattgtgattgatagcatacactcaaacattag

SEQ ID NO: 193861 - DNA, 201 bp, Homo sapiens
ctcttatagttctgtaataactacattatttacgtataatccaagtagttttaagaaaaatagtcaaggtgattattcaaataatttagtgatgaaggttstatttctagatgacaaagacagaaggttgagtttgtcagattacaacagtgctgaataaatactttggtattgaacacttaaaatgtgaaatttattgat

SEQ ID NO: 193862 - DNA, 201 bp, Homo sapiens
tgttatctccctaaatagtctgtggctgttccttaaggaaaaaaatgagaaagcagtttttaaaattttgaacatttgtgtgtgtgtgtgtgtgtgtgtgygtgcgcgtggatgtgtttgagcccacagcaattcaatttttgaatagtcattcagttaagtctgacccaatttgtatcattaatggcttcattgatatgc

SEQ ID NO: 193863 - DNA, 201 bp, Homo sapiens
gtattgaacacttaaaatgtgaaatttattgattttttcttttccttgatttatacatttttggatgaggtgcctaaatctctttttgaaatctgttgatrtccaactttagtaggcaaatgaaaacgtagtttaatatattttaattattaaacatgttagattgtttgattcagtttctgacttatttgtaacagcagg

SEQ ID NO: 193864 - DNA, 201 bp, Homo sapiens
ataactccacaggggcttgctttattttcgcactttgtactctgtattgtagtttcttttaatgtgtataccctttgcattcagacaatatgcttttacccttaataaggaacctggggattcaaaacctaccttttgtagtgctgctgcctaaagtaatattttaaatgtctttaacaaggataatgacactgatataat

SEQ ID NO: 193865 - DNA, 201 bp, Homo sapiens
tactttttatttttatttgattttgatatttgttaatcaactctttctaaccctctaaacctaacaattgttagttaagaaatatgcattattcagagaaygtctcagctctgagttggagatcttgaggccactaacccttagtttccttttcttttatttgttatttgtttttgtttttgttttgagacaggttctcac

SEQ ID NO: 193866 - DNA, 201 bp, Homo sapiens
ttttatttagtaaaagtcttaatttattaatttaccatgggaaattttaaaattgcatttaaaatgcaatgataaggctttgttttgttttgttttgtttygttttgtctacagtgctgtgatagaatatgtgggggaaacataagcaaagagttgttgattttgccctcctgggaagattattcaatctgttgcttcaac

SEQ ID NO: 193867 - DNA, 201 bp, Homo sapiens
tttgagacaggttctcactctgtcatgcaggctcactatagccttgacctcctgggttcaagtgatcctcccacctcaggctcctgagtaactaggactgyggactaccactggccaatttctttttttccctagagttgtggtctccctatgttgctcaggctgatcttaaactcctgggctcaagcaatcctcctgtct

SEQ ID NO: 193868 - DNA, 201 bp, Homo sapiens
attccacacattttttttttcttttgatcttggacttcaagttcaattccaaattgttccactcacagctgagatatgggaagaaagtggcagatgtgtayagaaatatattttaatctttaagagtatggagagatgctaggcgtgacgctaatagaaggatatcttaggaatgggaaatacatattcaaaatctaatat

SEQ ID NO: 193869 - DNA, 201 bp, Homo sapiens
aactgaaccatagagaggttaaaaatatgcccagggacattcagccaagcattctggagccaagattcaaatctaaatctagctggctttaaatctctccrttacttcatggggcctttgagattaatctgacaagtatgtgttgagttttttggaataaagagacaaagaggcaggaaaatcacaaaggagactcactca

SEQ ID NO: 193870 - DNA, 201 bp, Homo sapiens
aactaggactgcggactaccactggccaatttctttttttccctagagttgtggtctccctatgttgctcaggctgatcttaaactcctgggctcaagcartcctcctgtctcagcctcccaatgtgttgagattacaggtgtgagccactgtacctggcctcctttttttaaaatgggacactaatggcatctttctcat

SEQ ID NO: 193871 - DNA, 201 bp, Homo sapiens
tgacgcaaggggtgcagtttcctctgccttcagaaaaagtctgaggactggaaggcccagaaacgaaagtgaaagagattcttgggttcgcattttactcrctcttcctcatatccccatataggccatcaaatgatgcaggaatttttgcttcttaattcagctaaatctgggtgcttgtctcatgatcaggaaaaatta

SEQ ID NO: 193872 - DNA, 201 bp, Homo sapiens
acattctagtgggtgtttaaaaattttttttttaattttttatttttttctctctcgactgaataatttctattagaatgctgttttttttctcttttttwaaaaaaatttatcttgccttcacttcttgcagtccagctactgcccaaattctttccttctatggcaaaaaattgtttttgaatgagttgcctatatttg

SEQ ID NO: 193873 - DNA, 201 bp, Homo sapiens
cagtagaccaaaagcaataccagcaaattttggtataaaataaaaggtagaacattttaactagttagtaactagtagaacattacaactagataaaacayttttatatttagaaaacaatccatatgctcattattttaatttaattctacactttttaactttctgctttaactaaacattattctacatcctagggag

SEQ ID NO: 193874 - DNA, 201 bp, Homo sapiens
catctgttatgttgctaaacaaaatactgattatggaagacctaggaacagaaggaagtgctaccataagtaactttgcttctaaccacaatgcttgtgamtattttcatcccacagacttcctgcaactttgcaataaaatcaactcctggttcctcatgggccttcatacatgttgaagattagctatcaattttggtc

SEQ ID NO: 193875 - DNA, 201 bp, Homo sapiens
gaccttctgctatgaagaagattgcattctctcttacccactaaaggacaacattctagtgggtgtttaaaaattttttttttaattttttatttttttckctctcgactgaataatttctattagaatgctgttttttttctctttttttaaaaaaatttatcttgccttcacttcttgcagtccagctactgcccaaat

SEQ ID NO: 193876 - DNA, 201 bp, Homo sapiens
caattccaaattgttccactcacagctgagatatgggaagaaagtggcagatgtgtatagaaatatattttaatctttaagagtatggagagatgctaggygtgacgctaatagaaggatatcttaggaatgggaaatacatattcaaaatctaatatacctttatatagatggttatatttctgttaatcctctaaaata

SEQ ID NO: 193877 - DNA, 201 bp, Homo sapiens
tttccttcccttccctccctccctctttctttctttctttctctctctctctttctttctttctttctttctttctttctttctttctttctttctttctyatctttaaaaatgtttacacagtgtaggggtagctttgtttttaccagatgaatgtctgaaatacggctaagatacatcataaatcatctcgtttaaaat

SEQ ID NO: 193878 - DNA, 201 bp, Homo sapiens
tcccaatgtgcggggattataggcgagccaccatgcctggccaagtgattataacttttatttgcagtgggaaatagaaaattttgtgtgactcactttcytactggatttgttggggaaaccagccccacaccacccagcaggtaccccgagtctggcggagacaaaggagttagaaagagacagaataagcttttaaaa

SEQ ID NO: 193879 - DNA, 201 bp, Homo sapiens
atggagagatgctaggcgtgacgctaatagaaggatatcttaggaatgggaaatacatattcaaaatctaatatacctttatatagatggttatatttctsttaatcctctaaaatattttaatcacactgtatgtgttacatattatatttatctaatgtcagaacagtttgcttattatatacaaagattgatctagtc

SEQ ID NO: 193880 - DNA, 201 bp, Homo sapiens
atatcaaactggctttgtaactaaactcctttacaaaatctttctttctttctttctttctttctttctttctttctttctttctttctttctctctctctttctctttctttcctttcttcctttctttctttctttcctttctctttccttcccttccctccctccctctttctttctttctttctctctctctctttc

SEQ ID NO: 193881 - DNA, 201 bp, Homo sapiens
ggctctgcccgatttattggtttataagccctttgttcttagggcagatgagagggggaggaaccgatgaggaaaaggattaatatgtgaaggagaactcstgagtcattcaataagatgtatagcagtggcggtttctgtgaatttccttgagcaaaggcatgtgtctaaactacttaagatctttaacttatcaggact

SEQ ID NO: 193882 - DNA, 201 bp, Homo sapiens
attttcaggtgctctaaatggacatttttaatcacactagagtagctatatcaattgtcttcgccactgtagaaatatttcttgctaaaatgtatgagttrtctaaaaccgtaatattgtctcctttgggcaatcttggatatgtactagcttcttcttattcttaaattgtttgatgcttttaatgacaacagccactgt

SEQ ID NO: 193883 - DNA, 201 bp, Homo sapiens
cttccttccttttccttgcccagtctttgtttcatgtgcagtggcttagtaggcaagcaattgcagttacagaatagaaagaattgacaaaactgagggtrttcaaggggagaagaatgacagcctgcacatattactgctctatgtgtgctctttgtctatcagtgttctctgagtgtaggatttcctccgtacatgttt

SEQ ID NO: 193884 - DNA, 201 bp, Homo sapiens
tagaatgctgttttttttctctttttttaaaaaaatttatcttgccttcacttcttgcagtccagctactgcccaaattctttccttctatggcaaaaaawtgtttttgaatgagttgcctatatttgctgcctcccattcctctcatcatattttctcttaaactcactctgggtttattttttttttcccagctactga

SEQ ID NO: 193885 - DNA, 201 bp, Homo sapiens
gagggtgttcaaggggagaagaatgacagcctgcacatattactgctctatgtgtgctctttgtctatcagtgttctctgagtgtaggatttcctccgtayatgtttcctgtcagtagatgttccttggcctgaggctgagttacgctttcataactccacaggggcttgctttattttcgcactttgtactctgtattgt

SEQ ID NO: 193886 - DNA, 201 bp, Homo sapiens
ggatttcctccgtacatgtttcctgtcagtagatgttccttggcctgaggctgagttacgctttcataactccacaggggcttgctttattttcgcacttygtactctgtattgtagtttcttttaatgtgtataccctttgcattcagacaatatgcttttacccttaataaggaacctggggattcaaaacctaccttt

SEQ ID NO: 193887 - DNA, 201 bp, Homo sapiens
aagcaccccctttagatactacatcaccagcattgggtaatattgttcccagactaaagtgagggtcaggctgcttattcttgccgcccaataacgagatrcagacaaactgggaaagaagagagtttatttctgttaccgggtacagggagaatgctgggaaaatatcaccagaccaactgaaaattacagtttcccaga

SEQ ID NO: 193888 - DNA, 201 bp, Homo sapiens
aatcagagctttgtcctcattgctatcaagaccatttaattaatccttcatcaaagcaaagtcatctatataagcaccccctttagatactacatcaccarcattgggtaatattgttcccagactaaagtgagggtcaggctgcttattcttgccgcccaataacgagatgcagacaaactgggaaagaagagagtttat

SEQ ID NO: 193889 - DNA, 201 bp, Homo sapiens
tccaggcatttccatacattctctgaaattcaggcagaggtttccaaatctcaattcttgacttctgtgtacccacaggaccaacaccacatggaagctamcaaggcttcgggcttgcaccctctgaagccaaggcccgagtcataccttggccccttttagccatagctggagcagctggaatgcaaggccccaagtccc

SEQ ID NO: 193890 - DNA, 201 bp, Homo sapiens
atccaggcatttccatacattctctgaaattcaggcagaggtttccaaatctcaattcttgacttctgtgtacccacaggaccaacaccacatggaagctracaaggcttcgggcttgcaccctctgaagccaaggcccgagtcataccttggccccttttagccatagctggagcagctggaatgcaaggccccaagtcc

SEQ ID NO: 193891 - DNA, 201 bp, Homo sapiens
tgagacaaggcaagtcccttttgcttatgagcctataaaatcaaaagcaactgagtcacttcctagatacaacgggggtacaggcattgggtaaaaacacrtcttccaaatagaagaaattggccaaaacaaaggagctacagggcccgtgcaagtttgtatccaatagggcagtcattaaacctcaaaattcaaaaatga

SEQ ID NO: 193892 - DNA, 201 bp, Homo sapiens
gtacctgccaccatgattcagttacctcccaccaggtccctcccatgacatgtggggattatggaaactacaattcaagatgagatttgggtggtgacatrgccaaaccatgtcattctgcccccagctctcccaaatctcatatcctcacatttcaaaacacaaccatgccttcccaacagtcccccaaagtcttaactc

SEQ ID NO: 193893 - DNA, 201 bp, Homo sapiens
tctgaattaatgtgacatttttactgaagcatgtgattattgtagctagatttaaatagatctgcttcacattagaattatttccagattctatacacaasagccaacacttccctctaatacactgctatgacaaattaaattagttcaaacttgctcaagggcaaattaagcaggatattaaaaaagaaaaaaaacacc

SEQ ID NO: 193894 - DNA, 201 bp, Homo sapiens
tgggcattgcctccattctggatcttggtattacctggaacttctccactttgaaatcatgagatacactaagtgataacattgctctctcttcctcccaycaatatccagtagcttgacccacctcattttcttccatgacttttttctcattctcccttctcttactgtccaaagaagacctagtatacaatataaata

SEQ ID NO: 193895 - DNA, 201 bp, Homo sapiens
tcttgcccatcttcaaaactccaccatttctgtatttcttcaggaaatttctacattcagcctacatcaaatgaattcttaggggaaacttctttattatytccttttctaatttaaagtagaagcttttaaaatattttaggtaaatatttttagtgtgtttcagaatcattgtaaatacttacccatatacttctcatg

SEQ ID NO: 193896 - DNA, 201 bp, Homo sapiens
catatcaaactggctttgtaactaaactcctttacaaaatctttctttctttctttctttctttctttctttctttctttctttctttctttctctctctytttctctttctttcctttcttcctttctttctttctttcctttctctttccttcccttccctccctccctctttctttctttctttctctctctctcttt

SEQ ID NO: 193897 - DNA, 201 bp, Homo sapiens
ctaaaaccatatcaaactggctttgtaactaaactcctttacaaaatctttctttctttctttctttctttctttctttctttctttctttctttctttctctctctctttctctttctttcctttcttcctttctttctttctttcctttctctttccttcccttccctccctccctctttctttctttctttctctctc

SEQ ID NO: 193898 - DNA, 201 bp, Homo sapiens
ctctaaaaccatatcaaactggctttgtaactaaactcctttacaaaatctttctttctttctttctttctttctttctttctttctttctttctttctttctctctctctttctctttctttcctttcttcctttctttctttctttcctttctctttccttcccttccctccctccctctttctttctttctttctctc

SEQ ID NO: 193899 - DNA, 201 bp, Homo sapiens
tctctaaaaccatatcaaactggctttgtaactaaactcctttacaaaatctttctttctttctttctttctttctttctttctttctttctttctttctttctctctctctttctctttctttcctttcttcctttctttctttctttcctttctctttccttcccttccctccctccctctttctttctttctttctct

SEQ ID NO: 193900 - DNA, 201 bp, Homo sapiens
ttgattatctcctggatctggaaagaaaggaaggaaaacaaagggggaaggggattctctattgaatgtggatttttcccaaaagagactttgcagggcawtttcaaggtatggcagggaaatatattttggggaaaatatattttgattttttccctagttatgccagaatcagactggaaagtaagtcacaatatacag

SEQ ID NO: 193901 - DNA, 201 bp, Homo sapiens
ggcatgaaccccacccctctccacctgcttttacaattaaaaatagaataatgttaaaacagggcaactatgtgtcttaaataaagatgacaaacttttcrtattttatttatttatttttgagatggagtctcactctgtctcccaggctggagagcagtggcacgatcttggctcactgcaacctctccctcccatgtt

SEQ ID NO: 193902 - DNA, 201 bp, Homo sapiens
tgactcaggtgagacttttgttcacttgacctagaactttgctgcttgcacaagaagacttcaaaaagatcatgaaaaacatgaaagtaaaaagtaaaaaktaaaaacattgactttatttttcaacataaactccaccagtcaagttgcacttgtaagcaatgataccaaccatttagtccatccttaaaagactgaggg

SEQ ID NO: 193903 - DNA, 201 bp, Homo sapiens
ctgtcagtagatgttccttggcctgaggctgagttacgctttcataactccacaggggcttgctttattttcgcactttgtactctgtattgtagtttctyttaatgtgtataccctttgcattcagacaatatgcttttacccttaataaggaacctggggattcaaaacctaccttttgtagtgctgctgcctaaagta

SEQ ID NO: 193904 - DNA, 201 bp, Homo sapiens
tgccttctttccttccttctttcttttcttcctttttcttccccttaatttttactaaagacaatggagctaaaaatccagataagagcagttgtcttctytcctgcaattcagagtaaattagatgaagcctccaaagaggttaaatattagggtgtgatacatactcacttacaggggctctagaggtgggaatcttaa

SEQ ID NO: 193905 - DNA, 201 bp, Homo sapiens
tgtgtgtttctctccaggaaaacaaaaccagaaacatatatacgtatgtgtgtgtatgtgtggggtatatgtgtgtgcgtgtgtgtgtgtgtgtgtgtgtrtatgtatatatgtgtgtatatgtgtgtatatatatatacacacacacatatgtatatatatacatgtatatatagatacacacatgcacatatacatata

SEQ ID NO: 193906 - DNA, 201 bp, Homo sapiens
aattgatatagaagttaaaaactaatgctggggtttttaggtgatctttttgtacttttccaagtataagttaaaaccaacattactctgtcacatctaarttttatttttagggtttatctgttgtttttacttgtgctttttcatcattagaaatggcttttttggccaggtatggtggctcacacctgtaatcccagc

SEQ ID NO: 193907 - DNA, 201 bp, Homo sapiens
cttttattcaattaattctgccaccatcaacaaaagaagacttgagatatctcatgagaaaatcacattttaaactttgaagagtaaaatcaagcagattrtcacaaaaatcatttctgttgtattcacctccatgatttagttttgttttctgtatgtacacattttgtgttataatttagaaacaatattccttatttt

SEQ ID NO: 193908 - DNA, 201 bp, Homo sapiens
tgagttaagaacatgagtacaatgccttattttaaatattttcacgttaaaatctaaaacaatatcgatgctattcacatttttacaaaatagagaataattattaattgcccatttatgtttactattttctcaatttgaaattacatatttacatcactagcagtaaagagctaggtattaaatgttatgagcttaact

SEQ ID NO: 193909 - DNA, 201 bp, Homo sapiens
ggaggcgggcagatttgaacacatttcaggtatacgacccaaagtaataggttgtactttgaacatcgaaggttacaaaaacagttacagtcaacacaacrttttcaagagtgggaaactgaataatcgtaccattacttttaattgttataccttatttgtgtatatcttttttttctcaaacggcagaccaatttgaca

SEQ ID NO: 193910 - DNA, 201 bp, Homo sapiens
agacatttggaattgctttaatttggccaatcttttgaatttttttaaatcataaaactaaaacttaatctttatttgattgctagaacaaattatatgasttctccaaaattaattcatatgattggaaatatatatgctagtgctgatgaacattccaagcaattattggcagtctatactgtaaactagcaaatcata

SEQ ID NO: 193911 - DNA, 201 bp, Homo sapiens
atgagttaagaacatgagtacaatgccttattttaaatattttcacgttaaaatctaaaacaatatcgatgctattcacatttttacaaaatagagaataattattaattgcccatttatgtttactattttctcaatttgaaattacatatttacatcactagcagtaaagagctaggtattaaatgttatgagcttaac

SEQ ID NO: 193912 - DNA, 201 bp, Homo sapiens
gttacagtcaacacaacgttttcaagagtgggaaactgaataatcgtaccattacttttaattgttataccttatttgtgtatatcttttttttctcaaayggcagaccaatttgacacagcagcaaatgcatctaatactgataaaccagtgggaaattaccttataccatgtgttaatattgcaaaatctgtttagaaa

SEQ ID NO: 193913 - DNA, 201 bp, Homo sapiens
tcttcagtgtcaattagaagcttgtggtgttgggcaatttaaggaacttttctgagccttagtttctttgtccataggttttgtgatgactaaatgatagmacacatataacatatttagtgcagttcctaaaacatagtaacatttggatagtgttacataatgaggacctgtaaggtaaaagactgtgtcatacactta

SEQ ID NO: 193914 - DNA, 201 bp, Homo sapiens
atgtgcattataaaaaccccctgtggagattttctttaaaagtgaacatacaagtaaggaataattaaaaactgatcttattaattgaaattatatatacwaaggtttccaagacatttttattgggttttatttttcaaggagaaaatgttagaggatttatgtgtgtgtttcagtaacactcactcctgtcctagtgac

SEQ ID NO: 193915 - DNA, 201 bp, Homo sapiens
acactcactcctgtcctagtgacaacaccaaaaaatgtttggtgtgacaagacagtgtcacaccagattaaaatagatttcagctgaagaataaaacagtwagctatagatccttgattaaaagacatactgaaatcatagtaaaaatattctgcttaaactttttcgaatccattatttgctttttgtaattagtagaat

SEQ ID NO: 193916 - DNA, 201 bp, Homo sapiens
tattgtctcagagaaaaagtatcagtagtaaagaaaatgttctaaatgaaatctaaatctaaaaatatttcttagttttatattaataaaatatttattgwggctacaaaatttattaaatattattataaacactttgtaagatttcattacttaccgttgtgccccaaatattcttattaaaatataaaaagaggtaac

SEQ ID NO: 193917 - DNA, 201 bp, Homo sapiens
atattgtctcagagaaaaagtatcagtagtaaagaaaatgttctaaatgaaatctaaatctaaaaatatttcttagttttatattaataaaatatttattkaggctacaaaatttattaaatattattataaacactttgtaagatttcattacttaccgttgtgccccaaatattcttattaaaatataaaaagaggtaa

SEQ ID NO: 193918 - DNA, 201 bp, Homo sapiens
tcttaaactcttatttccctttagaaaaaacacactgattttaattcaatcatagctcataaatagtgaatcatatctgcaagcagacattcaagacttcrctaccactagagaagagtaaagtgatggttgatggtgggaaattcaatccagaaaccctgtcctacaaattatcaggttatgtgataattaaaattctaa

SEQ ID NO: 193919 - DNA, 201 bp, Homo sapiens
ttccagtccagatttattcctaatctgtgaactaaacaagcaagcaagcaaacaaaagtcttcgatttaccttattaaattaaaataaaacgtgaagtagktctctagataactgctaggcaacagcctaggccacactgatgatatgataaacattcaaatactcttcagtgggtgccacatggagggtcccctcagttt

SEQ ID NO: 193920 - DNA, 201 bp, Homo sapiens
cgcctgcatcacactgcagtaagttaaactggacatggttggcaaattgagtggcttctgggtgtgtggtgcgggggaagggaagctgggaagaaatgggkaggaaagttagagaagcatagctttgaattctccatgaaatgttaaatcggttcgtctccctgactcctgtcctagttatgctatagtaggggtgctctg

SEQ ID NO: 193921 - DNA, 201 bp, Homo sapiens
tggttattctagttatacattcttctaaatttttttcaaagttttcaacttctttgcctttggtttgaatgtcctcccatagctcagagtaatttgatcgwctgaagccttcttctctcagcttgtcaaagtcattctccgtccagctttgttccgttactggtgaggagctgcgttcctttggaggaggagagtcgctct

SEQ ID NO: 193922 - DNA, 201 bp, Homo sapiens
tttttttttctaattccatgaagaattcatagttagtttgataggaatagtattgaatctgtaagttgctttgggcagtatggccatctgaacaatattgwctcttcctgtccatgagcatggatgtgttatctctgatttctttgagcagtattgtgtgatttccattgcatagtctctgcctaaaagctccttgatctg

SEQ ID NO: 193923 - DNA, 201 bp, Homo sapiens
ccagcaatgtgaacaaaactaagagcatcagccagccaaatttcctcttgcatctcagcacattaaactgggtaaaaaaaaaaaaaaaaaaaaaaaaaaaattggccttcaagggctacctataaagcccatcccttgcactctcttgatctggacatatgtggctttattccagcctcttctctgtaggtcttctagtcc

SEQ ID NO: 193924 - DNA, 201 bp, Homo sapiens
tcaaaggtattatgtgattgagctcacataactaagtcattttaatttgatgagaaagtgcaaaatacacaacaaatttacactcagaaaaggcaagttargctgtttacataaatatgatagcttaaaataggcacagccatctactgtgtcccatatggattaaaaaaagagaacttttagctttattcttaattatat

SEQ ID NO: 193925 - DNA, 201 bp, Homo sapiens
catgagttaagaacatgagtacaatgccttattttaaatattttcacgttaaaatctaaaacaatatcgatgctattcacatttttacaaaatagagaataattattaattgcccatttatgtttactattttctcaatttgaaattacatatttacatcactagcagtaaagagctaggtattaaatgttatgagcttaa

SEQ ID NO: 193926 - DNA, 201 bp, Homo sapiens
tggggtatattgaataaaataaattattaaaattaatattatgtttttatgtttctgatatggctactacaaagctttaacttgacatttgcagaacacawttgtggcttgcattatatttaaatgtcagagagctatcccataatgttgtagtctaaacatggctgagaataacaatgagagtcaagtttaaaccaagat

SEQ ID NO: 193927 - DNA, 201 bp, Homo sapiens
agctgagaattatacaaaaaattatctaatgataattttacttaataactacagtaatatatctatggaaatttgtgtatttattcattctttatttattaaaaatttaagttggtcattaggataagaactgtgcataaaacagataataagaaatcatctcagttctcaagaaacctaaaatatagtaggtgaaacaga

SEQ ID NO: 193928 - DNA, 201 bp, Homo sapiens
cgcttcagtgccaagatggtgagtgtgtctgcggggccttccggccgccgccccttttaccttggcttccaaggtgcctgagtcatgatgtcaaaaagaacaacgaaatcctggccatggcgcccacgtggaggccctgggtggaccgtggctgcctggccaggcctgtcttggcaacagggcagtaaggccttgtgtggc

SEQ ID NO: 193929 - DNA, 201 bp, Homo sapiens
gaaggtgaaattcccagggctgggagagggagcaggggttggctcagtccagctgtggtcctgcaggtcctggaggcagcatggagggtccagttgatgtrtgcgggaagattttggcgtggactggaggtctgagatgtttactgtgaaactgctctggctgggtggagacacagtggagggcaggaggccaggagagct

SEQ ID NO: 193930 - DNA, 201 bp, Homo sapiens
tgagaagaattattttcctttaccatttattaccacgtgtttacctctctctcgttttggactggtcggataatacttggggaaagagaggcgtagtcttygcttcattctttttgaagaccagccatggccagttccggttttacttctgactgtgcagtgttgaataagacagacctgtttcctctcaagaggccacag

SEQ ID NO: 193931 - DNA, 201 bp, Homo sapiens
gtgcccaccaccgcccttcccgtcgtcccaaacccaccgtcatctttgccccatgggggtcacagcagtgctctgcctgagggtgtccatctgtgccgacrccaggaccacgtccgccatggcctgtgctctctcccccctactagtgcatctgaactatcgccagaagggcgtgattgacgtcttcctgcatgcatggaa

SEQ ID NO: 193932 - DNA, 201 bp, Homo sapiens
ccccgcccggaaggagatccgcagaggacagtcatcaggtacagagcgcagggcaggctgcacgccgccgctcagggcttgatgttccgaaaaacaagatygcggaaacgcattgtgtctgagatctattttcctttgaaactgacagtgtatgctctgtaatctgtcctcattaaccttagattacagaatcgaattttt

SEQ ID NO: 193933 - DNA, 201 bp, Homo sapiens
ggaccacctcacctgcagattagacccccaagccaagacctgaaggatgggacccaggaggaggccacaaaaaggcaagaagcccctgtggatccccgccyggaaggagatccgcagaggacagtcatcaggtacagagcgcagggcaggctgcacgccgccgctcagggcttgatgttccgaaaaacaagatcgcggaaa

SEQ ID NO: 193934 - DNA, 201 bp, Homo sapiens
tgaactcctgacctcaggtgatccacctgcctcccaaagtgctgggattacagacgtgagccaccgtgcccagccataagtaagcattctttccttttttwaaaaaaaaaaaagtggagcaatctaaatatccatcagtaaagaagtacaaaattatggcttgtgccgggcatgttggctgcaacctgtcatcccagcact

SEQ ID NO: 193935 - DNA, 201 bp, Homo sapiens
gtggatcttgggtctgaggaaaggtacctggtgctttctggggaggggctgagccctccgtgtgggcctcgtgtgctgaggcagagtgtgggttgcacacrgggtgaaagctgctgtttgcatctgaccatgggttttcccttctcctgggtgcgggagtggacgtgttggctgtggtcagttcctgttcttgtccagcca

SEQ ID NO: 193936 - DNA, 201 bp, Homo sapiens
acctgtggccagagtcctcagcgccaggtggacttccctgcagggctgtgacagggacagacagcgctttctaacagtggccttgggagtggtaacctgcygaggaacagctcctgggctggggagctggaggcaggctgctgcccactggctaaggatctcagcaagaggggcattggggcattggcccccatgagcttg

SEQ ID NO: 193937 - DNA, 201 bp, Homo sapiens
accacggcctgcccgccagccacatggagctggcccaggagctcatggagacttgttaccagatgaaccggcagatggagacggggctgagtcccgagatygtgcacttcaacctttacccccagccgggccgtcgggacgtggaggtcaaggtgggcctgggcctgggtcagggtccatcaggaggagggtgctggcagg

SEQ ID NO: 193938 - DNA, 201 bp, Homo sapiens
taacagtggccttgggagtggtaacctgccgaggaacagctcctgggctggggagctggaggcaggctgctgcccactggctaaggatctcagcaagaggrgcattggggcattggcccccatgagcttgggccaccctcagactgccgtgggggtgttttgatttttttttttttcgaggcggaatctcactctgtcgcc

SEQ ID NO: 193939 - DNA, 201 bp, Homo sapiens; identical to SEQ ID NO: 33257

SEQ ID NO: 193940 - DNA, 201 bp, Homo sapiens; identical to SEQ ID NO: 33259

SEQ ID NO: 193941 - DNA, 201 bp, Homo sapiens; identical to SEQ ID NO: 33253

SEQ ID NO: 193942 - DNA, 201 bp, Homo sapiens
cagcctcggggtggccacactgcagcttgggggccctggcatccccatccccactgagcttcatggttgtgggacccagagtacttggaggggctgggcamccctcattttcatttctcagggcctgtctagggagggtctctgctgtgggcccagcatccccccagtttaggaggcacacgcacccatgactggggcacc

SEQ ID NO: 193943 - DNA, 201 bp, Homo sapiens
gtgatgaggctgaggggggtgcagggtgccccccgtgtggtgacgaggccctggctgctgcacaggtcccctcgggtggctattcttccatcaacaatgtycaggatcctcagaagcccgagcctagggacaagatggagagcttcttcctgggggagacgctcaagtatctgttcttgctcttctccgatgacccaaacc

SEQ ID NO: 193944 - DNA, 201 bp, Homo sapiens; identical to SEQ ID NO: 33262

SEQ ID NO: 193945 - DNA, 201 bp, Homo sapiens; identical to SEQ ID NO: 33264

SEQ ID NO: 193946 - DNA, 201 bp, Homo sapiens
gccaacatggtgaaaccccatctctactaaaaatacacaaattagccaggcgtggtggtgcgcacctgtaatcccagctactcagcaggctgaggcctgarctgggaggtggaggctgcagcaagcggagttcgcaccactgcattccagcctgggtgatagtgagactcagtctcgaaaaagaaaagaaaagtgatctcc

SEQ ID NO: 193947 - DNA, 201 bp, Homo sapiens
actgcactgctgactccgttttattaacaaatgttgacgacttcaagatttacccccttgagataggaggtgatattgaagccctgcaggggaacgataaygccccagacatgggtttggttttttgtttttgtttttttgtttttgagatggagtctttcactgtctcctgggctggagtgcaatggcgcaatctcggct

SEQ ID NO: 193948 - DNA, 201 bp, Homo sapiens
ggttttttgtttttgtttttttgtttttgagatggagtctttcactgtctcctgggctggagtgcaatggcgcaatctcggctcattgcaaccttggcctmctggtttcaaacgtgggttttttggagacagagtctagtggtgtggcccaggctggagtgcagtggcacgatctcagttcactgcagccttcgcctcccg

SEQ ID NO: 193949 - DNA, 201 bp, Homo sapiens
gggttttcccatgttgtccaggctggtctctaactcctgggctcaagcaatccacttgcctcagcctcccaaagtgctgggattacaggcatgagccaccacgcccagccaaatgtattttgaagatggatagataataggaaaacgttggagccatccatttgtctctgcatcctttactgttttatgtcatagaatttg

SEQ ID NO: 193950 - DNA, 201 bp, Homo sapiens
tgagagtttggaaatattcccaccgtgggaggggcttaagcgttttgtctggggccgtttagccagtcggcagtgtccccaggctcctaaggagctgtctyctgaagctgcctgtcgtattgaaaaacgaaagtaatttagtcagaggtcagaagctcagtctgtgaggtgtgggctgcacctgagggcgtcccatagagg

SEQ ID NO: 193951 - DNA, 201 bp, Homo sapiens
ttcccaccgtgggaggggcttaagcgttttgtctggggccgtttagccagtcggcagtgtccccaggctcctaaggagctgtctcctgaagctgcctgtcrtattgaaaaacgaaagtaatttagtcagaggtcagaagctcagtctgtgaggtgtgggctgcacctgagggcgtcccatagagggaaagaagggcagctc

SEQ ID NO: 193952 - DNA, 201 bp, Homo sapiens
cggtgctgagagtagcagtcagtggtgccatggcagcactgggcattctcgtgtcggcaatgtttccaatgcaacagtcagaaactggcgcctgcttttcrtggatgcttgtgtgtcttgcctagaagcagggacacttacaggaggggagaggtgatgaacggccctatgtgctcccatcccggaagctgtccgtgtcct

SEQ ID NO: 193953 - DNA, 201 bp, Homo sapiens
gcatttccaggtgggctccggtggaaccacacggctcgcctgggggtggccatcatccaggcgccctccaccctgagcttgcgctgggggccacattcacyatggggtggagagcgcttcggtgatgaggctgaggggggtgcagggtgccccccgtgtggtgacgaggccctggctgctgcacaggtcccctcgggtggc

SEQ ID NO: 193954 - DNA, 201 bp, Homo sapiens
gcttttcgtggatgcttgtgtgtcttgcctagaagcagggacacttacaggaggggagaggtgatgaacggccctatgtgctcccatcccggaagctgtcygtgtcctttgatgagtcttaggacttttatattttcctttattattggtattccctttattattagtatgactgttgtgagttagaatatttcatccttt

SEQ ID NO: 193955 - DNA, 201 bp, Homo sapiens
gtggcacgatctcagttcactgcagccttcgcctcccgggttcaagctattctcatgcctcaccctccccagtagttgggaccacaggcatgcgccaccayactcagctaatttttgtgtttttagtagagatggggttttcccatgttgtccaggctggtctctaactcctgggctcaagcaatccacttgcctcagcct

SEQ ID NO: 193956 - DNA, 201 bp, Homo sapiens
cacacctggctaatttttgtatttttagtagagacggggtttcgcgatgttggcgaggctggtctcaaacttctgacctcaggtgatctgcccacctcggyctcccagagtactgggattacaggcgggagccaccgtgcccagccaaaaaaatttaaaaaaagggaacgaagggactgtagcgcgtgtgcacagtgcgat

SEQ ID NO: 193957 - DNA, 201 bp, Homo sapiens
ggggccccttgggccgtcgccaccactgtagtcatgtacccaccgccgccgccgccgcctcatcgggacttcatctcggtgacgctgagctttggcgagarctatgacaacagcaagagttggcggcggcgctcgtgctggagggtgagggtcgcgccgggctgactggggcccggggctgccgtgcccgccgccctccca

SEQ ID NO: 193958 - DNA, 201 bp, Homo sapiens
agaaaggtagagctgtatgtaaccacctggctagaacacagatgttaatttgatgctgtctgactactttctaggtctctggtgtaagtactgatatgtcyagcctcccttatagagtaagtcagctggtgggcttgaacactcagcctaaataaccacacaaatttcgtagcactcattagcgtgtgtttggaaaagacc

SEQ ID NO: 193959 - DNA, 201 bp, Homo sapiens
gtttactgcagccctttgttattaacgctttaggacctgtgagagtttggaaatattcccaccgtgggaggggcttaagcgttttgtctggggccgtttakccagtcggcagtgtccccaggctcctaaggagctgtctcctgaagctgcctgtcgtattgaaaaacgaaagtaatttagtcagaggtcagaagctcagtc

SEQ ID NO: 193960 - DNA, 201 bp, Homo sapiens
gctgttgcaggcgtgcaggtcggtggtgttacattcacgctgttgcaggcgtgcaggtcggtgctgttacacacattcctgctgttgcaggagtacaggtmggtggtgttacacgtgctgttgcaggtgtgcaggtcggtggtggtacacacattcatgctgttgcaggagtataggtcggtggtgttacacacattcacg

SEQ ID NO: 193961 - DNA, 201 bp, Homo sapiens
gccgcttcagtgccaagatggtgagtgtgtctgcggggccttccggccgccgccccttttaccttggcttccaaggtgcctgagtcatgatgtcaaaaagaacaacgaaatcctggccatggcgcccacgtggaggccctgggtggaccgtggctgcctggccaggcctgtcttggcaacagggcagtaaggccttgtgtg

SEQ ID NO: 193962 - DNA, 201 bp, Homo sapiens
ccgcttcagtgccaagatggtgagtgtgtctgcggggccttccggccgccgccccttttaccttggcttccaaggtgcctgagtcatgatgtcaaaaagaacaacgaaatcctggccatggcgcccacgtggaggccctgggtggaccgtggctgcctggccaggcctgtcttggcaacagggcagtaaggccttgtgtgg

SEQ ID NO: 193963 - DNA, 201 bp, Homo sapiens
tgagcttagatcgcgccattgcactccagcctgggcaacaagagcgaaactctgtcaaaaaaagaaagaaagagagagagagagaatggaaggaaggaaaraaggaaggaaggaaggaaggaaggaagggagggaggaagagcaggctggggcagacatagtcgctggagtgagggcttggggcttagtctttggcaaggc

SEQ ID NO: 193964 - DNA, 201 bp, Homo sapiens
gcatggacacttctggttggggcatggacccctctgggtgagtacagattggaggagaagcatggttaggagcagaggaacccagcatcctctgggctccsccaaggacaggatccatttgatattcatctgtatctttagtctctagctgacacagtgccctgcacatgagagttgctcatttctagctgttgaagaaat

SEQ ID NO: 193965 - DNA, 201 bp, Homo sapiens
gctctcctccagccccctctccctctctgaggccgtctgtcagcacactctgctccctgctccactgctttttggctccctgccatgtctcccccactgarcagcttaaagatctggcttgagtttggacactactttgccctggtttttccctctgcaccctacctctcacatccacttcaggtatccactttctgctgc

SEQ ID NO: 193966 - DNA, 201 bp, Homo sapiens
ggacttgcccataatggctgctgagtcttttgaagcttcaggggagggaaggaaactggatacctagggtaagaaggaaagtggccctctgcttgccctakcaccccctcctgcactgcccgcaggctatcacgtgctttcagacctggtgagcgtggaaactcccggctgccccgccgagttcctcaacattcgcatccc

SEQ ID NO: 193967 - DNA, 201 bp, Homo sapiens; identical to SEQ ID NO: 33266

SEQ ID NO: 193968 - DNA, 201 bp, Homo sapiens
tagctttggatttcccttttttccctcagctctcacctcttatccccaagaggcgctttccctgtactgtcctgcaaaggctctctcctttatgtgccacrggttcattttattttagagatcacatgtgtggccctgcccaaagtcttgaacccttagctgggttctttgctcaaacatcaggccctgagtcattttccc

SEQ ID NO: 193969 - DNA, 201 bp, Homo sapiens
aactgctgatttgtagcatctcacgctggaactccaggcaacagagaagtggttaatgaaggtccagagtcagactgggattggaatcttggttccaccaycactatgggctattgggccttaggcagatttttgaatctctctaaaccatttttttcttatccataaaataggaataataatagcacctacctcacaggt

SEQ ID NO: 193970 - DNA, 201 bp, Homo sapiens
tggatataccagcggggaagtatggagggtctaaggcctgagctggccctgtattctgctatgggcatcgctaggtctgagcagagctctttcctccatcyagctcatcatccatggtagctttgccctgatccagctgccccgtttccacatcttcttcctggtcccagcaatcatctatgggggcgacaagctggtgag

SEQ ID NO: 193971 - DNA, 201 bp, Homo sapiens
ctgaccaacatgcagaaacctcgtctctactaaaaaaaaaaaaaaaaaaaaaaaattagccaggcatggtggtgcatgcctgtaatcccagctactcgggrggctgaggcagaagaatcgcttgaacccagaaggcggaggttgcggtgagccaagatcgtgtcattgcactccggcctggacaacaagagtgaaactcca

SEQ ID NO: 193972 - DNA, 201 bp, Homo sapiens
gaactccaggtgccagggccaccacttgcagctgtgtagggtcccctctgcagaactccaggaagtgctgagtgagggcagaactgagactcagagagagstggtgaggaggttcacattcggctgagatggagctcgggctaggtataatattaggagggctcagtgcagtgaggatatcccaaccctacagcagtgagg

SEQ ID NO: 193973 - DNA, 201 bp, Homo sapiens
cctcttacaccaaggccagggcagcactgggcttgtctcccattacccgctggcaggacatcaaccctgcactctcccggagcaatgacactgtgaggagkggtcaggacccagagggtagggcgggagggacaaggcacgtgggcctgagacatggaagataggcagtgaaacttgagcacaagagacaagcacctaatg

SEQ ID NO: 193974 - DNA, 201 bp, Homo sapiens
ttataaaaaaatttacaagaatgtttcatttctattaacatgtgcttaaaagaaacactaacaaaaggcttttcgtattttaagtatagaacaatgttaayttatttccagttctccaaaatgtcatatttattaaagatgacagaagcaaaaaaacagttggtaaatgaaatttgcctttcttaatttcttcttgttcca

SEQ ID NO: 193975 - DNA, 201 bp, Homo sapiens
gaaatgacgttcttgttcctggtgataaagcagctactttgaactagatgagagatccagaagagtggccaggcaggctccctaagacccagagccctttytgatttgtcctggggtgtaggcatcactaggattccaagccacccttcctgccagcaggaaagtcaggggttcgaaaggtgtggccgggcacagtggctc

SEQ ID NO: 193976 - DNA, 201 bp, Homo sapiens
tggccagtcactaacagtgccagtgctcatgctgtgtgctgtggcagccaacaaagagtggtgcagggacaaggaccaaaccttgactcgatgagagtacrgcctgtcatttccattgtttggcccagagggcccagagtggacaccctctgcatccattcattcagcacacatttatatagggcccacggtgtgccaggc

SEQ ID NO: 193977 - DNA, 201 bp, Homo sapiens
ggccatgtggtgaatgtgtacctgttctccatcagccccctcagcgtcctctcttgcctctttcctggcctcttccatgatgatgggtgagtaagtgcgartgtgtgtgtgtgtgtgtgtgtgtgtgtgtgtgtgtgtgtgtaatggggaggattccttttgggtggaaagaaattatctggctccagaggagactgtcac

SEQ ID NO: 193978 - DNA, 201 bp, Homo sapiens
gacagagtgagactccatctaaaaaaaaaaaaaaaaaaaaaaaaagaggtcagaagtcgagactcctaaggtacttctctgggacccccactctggccagsgtcctcgatcttgggctgaatgagtgagcacccaccctgggctgccccaagctcaccacttggtctgctcttccttagtcttacacagtgtgggccatgt

SEQ ID NO: 193979 - DNA, 201 bp, Homo sapiens
tcagcgtcctctcttgcctctttcctggcctcttccatgatgatgggtgagtaagtgcgagtgtgtgtgtgtgtgtgtgtgtgtgtgtgtgtgtgtgtgtrtaatggggaggattccttttgggtggaaagaaattatctggctccagaggagactgtcaccttctaggttacaggacagacagtgaccagcctgagcccc

SEQ ID NO: 193980 - DNA, 201 bp, Homo sapiens
acacaaggactctggacttagtctctggccaggaagggacgtgagtggtggaatctgaggaggaagggtgggtatcttagatgctacccaaagctccccaygggatgcagagcagcttcccccagggaccttcccaatctgaaacaattgagcaagctgacctaggaggtggggacaataggtggtattgccaggtaagga

SEQ ID NO: 193981 - DNA, 201 bp, Homo sapiens
tgcaaaagcagaaagcagagaaaacctgtagaaggatctgtcctggctggaggtgacaggatggtgacaccttccctacaacttctcccttgccagagctrctcacatccacgttccttccagccctcttctttccctagctttggatttcccttttttccctcagctctcacctcttatccccaagaggcgctttccctg

SEQ ID NO: 193982 - DNA, 201 bp, Homo sapiens
ctagcgacgcagttccgggtctggcggggcgcgggcgcggctcgcagggcggtgggacccccaagacctcacgaggatccccggagggagacgtgactccrgggtcttagaggggtttaggtcggatgggtgacttgctttgacgcctggcctggtctgtgggtggcaggtgatcgatggccttggacttggagcccagac

SEQ ID NO: 193983 - DNA, 201 bp, Homo sapiens
tctattcaaattctcttgaacctatttatattttcagtctgttccttccttggagtaacataatttctatactggctcctctctgtgaaacacagcatggttttttttttttttttttaatcctaaaatgatctgctttgaacttcagagggtgcttgctaattcctgcacactgagatttagtggataaggctgtgttta

SEQ ID NO: 193984 - DNA, 201 bp, Homo sapiens
agcctgggtgacagagcaagactctgcctcaaaaaaaaaaaaagagagagagatctcctctcaaggtgtctctttgctgtcccttccacacaggtctgagytcccccagaagtattactggtggttcttccagaccgtaccaggtgagaaccctccttgatccatgaatttctggacctgactgtgagttcaaggctctgg

SEQ ID NO: 193985 - DNA, 201 bp, Homo sapiens
ggcgctgcaggccctcagttcctcggccaaggagacaagcgcggcccccgcggcccgtcccgccagccttcccgcctccgccggcgcgcggcttccgcgtrgcaggccgccccgctccccggcctggcgcgctgcctctttgtctctccgcgcctcccctcctcccagacaaatggctgttggcaggaaattggacgcgct

SEQ ID NO: 193986 - DNA, 201 bp, Homo sapiens
atcttaggactctcactggggcatgttgagaccaaacccagcccctcccagaattatgagaaggggtaggctgagcagcctccacagggaagaggggcaakttagataagacacagatgagcctctggtcagggcttccccctgggggtaaggagagctggaagagaaggaacccagcactcctgattctgcagcttttta

SEQ ID NO: 193987 - DNA, 201 bp, Homo sapiens; identical to SEQ ID NO: 33269

SEQ ID NO: 193988 - DNA, 201 bp, Homo sapiens; identical to SEQ ID NO: 33271

SEQ ID NO: 193989 - DNA, 201 bp, Homo sapiens
ccgcccctaaccagctctctgtcctctgcactgaccctcgcttgcctgcctgggccccctccacagactacgcctttgccgcacatcacacgggcatcacrgacaccacccgcgtgggaatcatcctgtcgcggggcacagcagccagcatctctttcatgttctcctacatcttgctcaccatgtgccgcaacctcatca

SEQ ID NO: 193990 - DNA, 201 bp, Homo sapiens
gatgaagattaccagaccagcaagatttggctttgcactcggattgttcagatccagcaagcgtgtattaagcatctattgtttgctaggcacttaatagkcactatcttatttactgttctctccaccctcctgagtgggtatagaaggtccttgacttaggaacaatctgtgctttcttgcaccgatgtttaagccacc

SEQ ID NO: 193991 - DNA, 201 bp, Homo sapiens
tggtcgctgttatcaacattgaccccagtgctctgcagcccaatgtctttgtctggcataaaggtgagtggccaaggggtggctggaggagtggtgggtckggagcctcgtccctcttcagctctgggcttggctcaatgtggctgaacgtcaatctctgtgctccaagaggggagtgagctgtggttctgcccttgggaa

SEQ ID NO: 193992 - DNA, 201 bp, Homo sapiens
gcctcaaaggctgcagagacccagagcagtgtgggcaccataagggatattgttcaccccttcttgggggagtgcagctgccagagccctccatggggcaytgatgtccaccttgcagacttctgagagagactgggaggatatagggaaacaagacaaaaatgcagagacttgagtccacagctggcacaaaaatagagg

SEQ ID NO: 193993 - DNA, 201 bp, Homo sapiens
tcctctcattagctgggcatggtggtgcgtgcctgtaatcccagctactggggaggctgaggcaggagaatggcttgaaaccaggaggtggaggttgcagygagccaagatcatgccactgcactccagcctgggtgacagagcaagactctgcctcaaaaaaaaaaaaagagagagagatctcctctcaaggtgtctctt

SEQ ID NO: 193994 - DNA, 201 bp, Homo sapiens
gttctcagctaataatcaagtctattgcaattttggatgaatcaccagactttatcataaggagttgcccctgcccccatctgaaccccacctccaactaygaggctccagtggggggatgcccaggaatgggcttctctgcatgtgttgcttatcgctctcctcagggctgcccagactttccatcctcactcatctcag

SEQ ID NO: 193995 - DNA, 201 bp, Homo sapiens
aggacactactgggtgggcaggagacttagactactctgcattccagccctcctcgcaggagctcaactgggttcctgcccctactttgggctagttcctyctctagtagggttaggaggagaaatatctcctactatggactagttccagtggaataggagtggctggctacctcttcccccaatacacacacataccct

SEQ ID NO: 193996 - DNA, 201 bp, Homo sapiens
ttcaaaatgacttcagttggattgttgatctaatgaatttttattttttattttttgagacagagtctcgccctgtcgcccaggctggagtgcaatggcaygatctcaactcacagcaaccaccgccttccgggttcaagcaattctcctgtctcagcctcctgagtagctgggactacaggcacgcaccaccatgcctgg

SEQ ID NO: 193997 - DNA, 201 bp, Homo sapiens
ggctccagctgttccctgcagcagaactgcatacagggctctcctttgtgccgagacaaagagaaactgcaccatggcctcggtcaggttggctcctgccrtctgacctgccttctctcaggtgcagttctgtcctcactgacagataggagggtctgtttcatcttgcctgttgctcagcatttcacagttctgaagatg

SEQ ID NO: 193998 - DNA, 201 bp, Homo sapiens
tgggagttcctccaggcaaggttggagggggtaaagaaacccattccttcttacaaaggagcccagcacttggagccttattgggctgggagagggaaggkcatgttgggtggagcacaagtgaaactggctcagctctcaagaggaacaggaggagtggtggcaaggcagggctggtgggccaggttggccccaggaaca

SEQ ID NO: 193999 - DNA, 201 bp, Homo sapiens
caagccacccttcctgccagcaggaaagtcaggggttcgaaaggtgtggccgggcacagtggctcacatctgtaatccagcactttgagatgccgaggtgkgtggatcacctgaggccaggagctcaagaccagcctggtcaacatggcgaaacctcgtctctactaaaaatacaaaaattagctgagtgtggtgacgcac

SEQ ID NO: 194000 - DNA, 201 bp, Homo sapiens
gggaaggatggccaggcttctgatccaggcagaagagggcagggctagcacatcagaggctgagctggctgagccaccaccccatcccaccagccaacaargaatctgcagcagccttgtggtttaaaaggaaagccagcacaaaatagggtgtagaaacagagcagcatgacgtcaccctgccattgtactcagcctgtt

SEQ ID NO: 194001 - DNA, 201 bp, Homo sapiens
cactgaagggagtttcacttgggctaaattggctagggaagactttgaggagaagactggacttgggccaagggtctgggggaggtaagctaagctttgasagggcagagtggaaactgaagagcaatccaggtaaaaggaagggcatgagcacaggcagaggtgggaatggtgataggatattcaggaggcagaggggac

SEQ ID NO: 194002 - DNA, 201 bp, Homo sapiens
ggaccttgccttacagggagtaagtgtaagaccctgtagtgatcttacagggtcactatgacttacgaatccctgggaactgctgatttgtagcatctcaygctggaactccaggcaacagagaagtggttaatgaaggtccagagtcagactgggattggaatcttggttccaccaccactatgggctattgggccttag

SEQ ID NO: 194003 - DNA, 201 bp, Homo sapiens
tgataggatattcaggaggcagaggggacagggctggctgcagatggccatagggcattaggtggtggcaggacatgctgctggtgatcatgtggcagctrcagttgaaactgaggggctgtggctcagctgagaggccatgccacatggcggagcatagaaagagatgagcagagggtgacaaaaccaggcttgggcaac

SEQ ID NO: 194004 - DNA, 201 bp, Homo sapiens
cttgtcatggtacccatctgtgcctttctcctctgcctttgttcttggcttccctgaactgggcaggggcaagttggtttgaaacctggggttgggtggtragtggggtggtatcaggatatccctagaccctttaggacagaactggtttgcggatgcctccagaatcctgcctggtttacaaagactctttccctcagt

SEQ ID NO: 194005 - DNA, 201 bp, Homo sapiens
ctgaactgggcaggggcaagttggtttgaaacctggggttgggtggtgagtggggtggtatcaggatatccctagaccctttaggacagaactggtttgcrgatgcctccagaatcctgcctggtttacaaagactctttccctcagttaggggtgctccacataggatttgcttctgggagttcctccaggcaaggttgg

SEQ ID NO: 194006 - DNA, 201 bp, Homo sapiens
gtccaacccataaccaggttctcttcctctttatcatttggggtctgagcaaagctcccaaaccttccccatcaaggaagaaatcgactgctgatgagaasccatcccctgggagattggtggggtaatggaatggaaaggataggtgggtgtcacccttaggtgctaaaggaggaggcaggcaatagggacttgccatct

SEQ ID NO: 194007 - DNA, 201 bp, Homo sapiens
ccacgcaaaccacacagagcatggtccctttgggtaggagaatgaaacattagaggaggaagggacaagagaagtgtttgacctgcagagaagtcagctcyagggagaattgcctccctgttttcctgggactgcccccagggcccagcattggtcaggagccagggggaatctataatccacagctttttgcaggcctga

SEQ ID NO: 194008 - DNA, 201 bp, Homo sapiens
ccatctttgcatcccctggatgtagagtatactaatcaggctctggatcaaatgaataaatatgaatgagttcctctccccacaggtggcttctgattttrcacacaagggggagctatgctcccttattgccctgtgctaataattcaatattaactgagtgtcaccaatacagagctaaggactgggcacaaagggatt

SEQ ID NO: 194009 - DNA, 201 bp, Homo sapiens
tgccttccaccctatattcattttgcaggcctcacgggggttgtgctgctcctgatcctggccatcatgtatgtctttgcctcccaccacttccgccgccrcagtttccggggcttctggctgacccaccacctctacatcctgctctatgtcctggtgagggcttttggctgtgagccaggccaggagggtatgggcagg

SEQ ID NO: 194010 - DNA, 201 bp, Homo sapiens
ccctgcaggaggtccacccccaggtcagtccaacccataaccaggttctcttcctctttatcatttggggtctgagcaaagctcccaaaccttccccatcraggaagaaatcgactgctgatgagaacccatcccctgggagattggtggggtaatggaatggaaaggataggtgggtgtcacccttaggtgctaaaggag

SEQ ID NO: 194011 - DNA, 201 bp, Homo sapiens
tagaagtaaacagttcaggcatatttgctcccatagctggaagaggaaaacaaggatcagattggagaagtgatttatctaagatcccacagtggactggsagcagcactgagacctcagcctagtctcctgatccccaagcagggccctgcctaaggaacacactctgcagagtgctgggccaaagcagggttttccaac

SEQ ID NO: 194012 - DNA, 201 bp, Homo sapiens
gaatgcagtgggcagaggcccagcccatgtgctgtcagcattcagagggtgacagctcccctcctgtcctctgccctctgcttcttaactatacagccccrctttcctccctcggaagctgcagagggctccccgcagggcagcttccacccgctggtatctctttgagcccattcccatctgctcaggcagctgctgggt

SEQ ID NO: 194013 - DNA, 201 bp, Homo sapiens
aaaaaaaaaaaaaaaaaggaaggagggagggagggagggaggaaggaaggaaggaaaggaaaggagggctgtttgccaggggacctgagcctctctcatcrcagagagcagagaagctcaggccaggctgccccttgcctggctgaccctcagccccagtgctgcctgggcccccacagggtgagcttctgatgggggagg

SEQ ID NO: 194014 - DNA, 201 bp, Homo sapiens; identical to SEQ ID NO: 33267

SEQ ID NO: 194015 - DNA, 201 bp, Homo sapiens
cttctctgcatgtgttgcttatcgctctcctcagggctgcccagactttccatcctcactcatctcagcctgcctcaaaggctgcagagacccagagcagygtgggcaccataagggatattgttcaccccttcttgggggagtgcagctgccagagccctccatggggcactgatgtccaccttgcagacttctgagaga

SEQ ID NO: 194016 - DNA, 201 bp, Homo sapiens
gtggttggggagaggattcatgagagaagcatccattgaacagacatttactctgtgccaggaacatgatttaaagtcatttgaggacaaacaagttgaayttgaatatgtacaagaacagagggaccctcagctgggtgactccttcccagagcccaggcaggactgggcatctccactcattcaggatccttcggggct

SEQ ID NO: 194017 - DNA, 201 bp, Homo sapiens
tttttttttttttttaatttaaagaaagggtattgctctgttgcccaggctgtaatgcagtgatgcaataccagtttactgtaacctccaactcctgggcrcaagcaatcctcctgcctcagcctcccaagtagctgggactacaggagtgcaccactatgcctggctaattaaaaataaaaaaattagagtcagggatgt

SEQ ID NO: 194018 - DNA, 201 bp, Homo sapiens
gctctccgggtctgcaacagctactggagccgtgaggtccgagctgggggccacatatgtggtggatgtgtgtgtgtgcatgcttatgtgtgtgtgtgtakgtgtgtgtgtgtgtgtgtgtgtgtgtgtgtgagtgcatggtgaaagtggtcagtaaggctgacgcaggtagctgggataggctggggtgaaggaggcagc

SEQ ID NO: 194019 - DNA, 201 bp, Homo sapiens
tgagctgttatggtatctttgcatcttaggactctcactggggcatgttgagaccaaacccagcccctcccagaattatgagaaggggtaggctgagcagmctccacagggaagaggggcaatttagataagacacagatgagcctctggtcagggcttccccctgggggtaaggagagctggaagagaaggaacccagca

SEQ ID NO: 194020 - DNA, 201 bp, Homo sapiens
cctgtccttccgagagttcctggacatcctggtggtcttcatgaaaggtgagggaggagggaatgataggagaggctggacaggggctgatctgttggagrtggggaagccctgggaccaggtctccagccatggcagatgcccagaagtgcccaggccgaggtcaggaagcagagcgacccttgctgtgtccagaagtgg

SEQ ID NO: 194021 - DNA, 201 bp, Homo sapiens
acacactttagggaagcctgcctggccaactttctttcaggccttttccctgcccacctatggctgggtccagctcccattggggacaagggctgaggttsgagcacccgaaagcagggcctccattggtctgggactgtctactgtgcctgagcatgggatggtaggagtgctgtgcgtttgagccaggtcttcctgggc

SEQ ID NO: 194022 - DNA, 201 bp, Homo sapiens
accctgtagtgatcttacagggtcactatgacttacgaatccctgggaactgctgatttgtagcatctcacgctggaactccaggcaacagagaagtggtyaatgaaggtccagagtcagactgggattggaatcttggttccaccaccactatgggctattgggccttaggcagatttttgaatctctctaaaccatttt

SEQ ID NO: 194023 - DNA, 201 bp, Homo sapiens
gtcagccactagtgtgaggcctggtgagcctgctcaggaggggcagaaacagagggtgtggaagcttctggaggaggttggctggggaagagaacggggtsgggggcagactcagctggagtctatagggagccagagccgcctggcttgttaccaggacctcagtcactcccagcccttctctgagcaaagggagagttg

SEQ ID NO: 194024 - DNA, 201 bp, Homo sapiens
ctgaggacactactgggtgggcaggagacttagactactctgcattccagccctcctcgcaggagctcaactgggttcctgcccctactttgggctagttyctcctctagtagggttaggaggagaaatatctcctactatggactagttccagtggaataggagtggctggctacctcttcccccaatacacacacatac

SEQ ID NO: 194025 - DNA, 201 bp, Homo sapiens; identical to SEQ ID NO: 33270

SEQ ID NO: 194026 - DNA, 201 bp, Homo sapiens
aggaggttcacattcggctgagatggagctcgggctaggtataatattaggagggctcagtgcagtgaggatatcccaaccctacagcagtgagggaagcktgtgtgtgtgtgtgtgtgtgtgtgtgtacacttctgtgtgtgagggagagatggaggttgggattcattttttaccccacttgttacccaaggcagcccc

SEQ ID NO: 194027 - DNA, 201 bp, Homo sapiens
actgggatgagtgagtttggatatatatttctccctgggtctgccccattttatggggtgttgcttaatcatttgcgttattccattgacataaaatattwgcactcagagatcatttctggtcaagagaaattcgtgcatttttaacccaaaatagaaaccttcataaaagcatcataggtctccattcagtattgactg

SEQ ID NO: 194028 - DNA, 201 bp, Homo sapiens; identical to SEQ ID NO: 33371

SEQ ID NO: 194029 - DNA, 201 bp, Homo sapiens
tatttctccctgggtctgccccattttatggggtgttgcttaatcatttgcgttattccattgacataaaatatttgcactcagagatcatttctggtcargagaaattcgtgcatttttaacccaaaatagaaaccttcataaaagcatcataggtctccattcagtattgactgtaattgttcacatgcccacgctgaa

SEQ ID NO: 194030 - DNA, 201 bp, Homo sapiens
ctgggtctgccccattttatggggtgttgcttaatcatttgcgttattccattgacataaaatatttgcactcagagatcatttctggtcaagagaaattygtgcatttttaacccaaaatagaaaccttcataaaagcatcataggtctccattcagtattgactgtaattgttcacatgcccacgctgaatgctaactt

SEQ ID NO: 194031 - DNA, 201 bp, Homo sapiens
taaaatatttgcactcagagatcatttctggtcaagagaaattcgtgcatttttaacccaaaatagaaaccttcataaaagcatcataggtctccattcartattgactgtaattgttcacatgcccacgctgaatgctaacttgggctcaccctcaacacccacgaggtgggtactattattaccactcacatttgacca

SEQ ID NO: 194032 - DNA, 201 bp, Homo sapiens; identical to SEQ ID NO: 33377

SEQ ID NO: 194033 - DNA, 201 bp, Homo sapiens; identical to SEQ ID NO: 33291

SEQ ID NO: 194034 - DNA, 201 bp, Homo sapiens
gcagcctcccttctgccagcagaggggcttaatgcacccggcctcatttgtaattcatgtgcggtgagctcactgggatgagtgagtttggatatatattyctccctgggtctgccccattttatggggtgttgcttaatcatttgcgttattccattgacataaaatatttgcactcagagatcatttctggtcaagaga

SEQ ID NO: 194035 - DNA, 201 bp, Homo sapiens
gatgaggctctgcttgcatgggagagccagagaataaacaaataaataaacaagaaaagaccagatgacagtggctttaaagccaataaaacagggaaatrgtgaatgcgggaactgggaagaagagtcaccaaagtcagggaatcagggaagccttccccaaagaggtggcatttgaactggggcctgagtggtgaagca

SEQ ID NO: 194036 - DNA, 201 bp, Homo sapiens
gaatcggctcatgctctgaggctgtcacgcctgtgatggaagagacagagaagggggtggcctctcctcgccctggggacctgccattctcagcacaggcscatggcaggcagcagcctcccttctgccagcagaggggcttaatgcacccggcctcatttgtaattcatgtgcggtgagctcactgggatgagtgagttt

SEQ ID NO: 194037 - DNA, 201 bp, Homo sapiens
tctgcttgcatgggagagccagagaataaacaaataaataaacaagaaaagaccagatgacagtggctttaaagccaataaaacagggaaatagtgaatgsgggaactgggaagaagagtcaccaaagtcagggaatcagggaagccttccccaaagaggtggcatttgaactggggcctgagtggtgaagcagccagcca

SEQ ID NO: 194038 - DNA, 201 bp, Homo sapiens
ccaggcaccatggatcagcagtacccatgacagatgaggctctgcttgcatgggagagccagagaataaacaaataaataaacaagaaaagaccagatgasagtggctttaaagccaataaaacagggaaatagtgaatgcgggaactgggaagaagagtcaccaaagtcagggaatcagggaagccttccccaaagaggt

SEQ ID NO: 194039 - DNA, 201 bp, Homo sapiens
caaataaataaacaagaaaagaccagatgacagtggctttaaagccaataaaacagggaaatagtgaatgcgggaactgggaagaagagtcaccaaagtcrgggaatcagggaagccttccccaaagaggtggcatttgaactggggcctgagtggtgaagcagccagccatgggaagggcttggggaacaggatatgcaa

SEQ ID NO: 194040 - DNA, 201 bp, Homo sapiens
ctgcttgcatgggagagccagagaataaacaaataaataaacaagaaaagaccagatgacagtggctttaaagccaataaaacagggaaatagtgaatgcrggaactgggaagaagagtcaccaaagtcagggaatcagggaagccttccccaaagaggtggcatttgaactggggcctgagtggtgaagcagccagccat

SEQ ID NO: 194041 - DNA, 201 bp, Homo sapiens
gggaaatagtgaatgcgggaactgggaagaagagtcaccaaagtcagggaatcagggaagccttccccaaagaggtggcatttgaactggggcctgagtgrtgaagcagccagccatgggaagggcttggggaacaggatatgcaaaggccctgtggtggaaacaagccagctgtggttgaggaacaacaccaaggcagcc

SEQ ID NO: 194042 - DNA, 201 bp, Homo sapiens
aggatatgcaaaggccctgtggtggaaacaagccagctgtggttgaggaacaacaccaaggcagccagtgtggctggagtggagtgagcagggtgggccasgggtgagggagaacaggccagagagagggattaggaccaggtcttgtagggccttttatggcatggagggagctctgaagcaatgaagtgccttgccctg

SEQ ID NO: 194043 - DNA, 201 bp, Homo sapiens
aactcaggctggtatgggcacattctgcacttccacttaaactcagatggcaagcccatcaaaccttggtgccatggctgccctggtaattcctggctgascagtgcaaccagggagctggcccatgacctgggtggccactaagtagccaggactaatgtggccaaaagtcagccttcttcctgtgactcatccaggtgc

SEQ ID NO: 194044 - DNA, 201 bp, Homo sapiens; identical to SEQ ID NO: 33301

SEQ ID NO: 194045 - DNA, 201 bp, Homo sapiens
ggtgccatggctgccctggtaattcctggctgagcagtgcaaccagggagctggcccatgacctgggtggccactaagtagccaggactaatgtggccaaragtcagccttcttcctgtgactcatccaggtgcaccctgcgacatctgaatgtcaggctttcagccgctgtggcttccacttccaactggctccacgtcc

SEQ ID NO: 194046 - DNA, 201 bp, Homo sapiens; identical to SEQ ID NO: 33372

SEQ ID NO: 194047 - DNA, 201 bp, Homo sapiens; identical to SEQ ID NO: 33302

SEQ ID NO: 194048 - DNA, 201 bp, Homo sapiens
gcgtgtttaatgttcctgtgaatgcgcccttgagatttctctctttcccctccacacagagcttagaagcaaagttaagagactcatcagattctgagctrctgcgggatattttgcacaaggtaagaatcccagagtccctgggactcatgaccctgcctcctgaatctctccagaagacctgagagaagaactgcaggt

SEQ ID NO: 194049 - DNA, 201 bp, Homo sapiens; identical to SEQ ID NO: 33305

SEQ ID NO: 194050 - DNA, 201 bp, Homo sapiens; identical to SEQ ID NO: 33327

SEQ ID NO: 194051 - DNA, 201 bp, Homo sapiens; identical to SEQ ID NO: 33307

SEQ ID NO: 194052 - DNA, 201 bp, Homo sapiens; identical to SEQ ID NO: 33308

SEQ ID NO: 194053 - DNA, 201 bp, Homo sapiens; identical to SEQ ID NO: 33309

SEQ ID NO: 194054 - DNA, 201 bp, Homo sapiens
gacgctgtcgggcatggacatgatggggcttccagaagagttactctgggcctccagggtgacatcacaggacaggggtgcctcttaaggtgaccttcaasccacagccctctttttggagacaggcatactcccgttccagtcgttaccacatggctctgtcccagagccatgccctgtgtccttcagagaccacaggag

SEQ ID NO: 194055 - DNA, 201 bp, Homo sapiens; identical to SEQ ID NO: 33310

SEQ ID NO: 194056 - DNA, 201 bp, Homo sapiens
cccagctcttggctctgggaaaagggaacaatggacgctgtcgggcatggacatgatggggcttccagaagagttactctgggcctccagggtgacatcamaggacaggggtgcctcttaaggtgaccttcaacccacagccctctttttggagacaggcatactcccgttccagtcgttaccacatggctctgtcccaga

SEQ ID NO: 194057 - DNA, 201 bp, Homo sapiens
agatgttgtcattgcagcaggtaatgcccagccccgggcaccctgtgcaggtggtgtccttgcagctctacccagctcttggctctgggaaaagggaacartggacgctgtcgggcatggacatgatggggcttccagaagagttactctgggcctccagggtgacatcacaggacaggggtgcctcttaaggtgaccttc

SEQ ID NO: 194058 - DNA, 201 bp, Homo sapiens
cattgagtcagcactgcaggtgggtgtcagcacctctgacagctccagcgctttcgttttctatttaagacttagacaaagacttcagaatatacaaaaayctgcaatgagaggggggaatctagggaatgttttttaaaccatccacagcaaaaacagagatgacaggtgcaaaacagcttctagcatttggttgatgtt

SEQ ID NO: 194059 - DNA, 201 bp, Homo sapiens
cgttggcgactgtccttactgcaaaccctggttcacactggctcccctgggagggaggcggtttgggcccacatgccctgtgttcctgctcagaatgggcrttagaaatgctgccatagcctgtgccactgcagtggaagcatttttaggaaacggcttatatcttaagacaaacttcagatgcatggggccaaaacgctg

SEQ ID NO: 194060 - DNA, 201 bp, Homo sapiens; identical to SEQ ID NO: 33297

SEQ ID NO: 194061 - DNA, 201 bp, Homo sapiens
tttaggaaacggcttatatcttaagacaaacttcagatgcatggggccaaaacgctgtgtccatctacatctttgctgagggatcgggtagcctggagttygccctctgctgtgttggcttgaagctcataggagacttaagacgggctctcgagcaaccaacgttctgtcctttgccgtagactgtgaagcatcctgtgt

SEQ ID NO: 194062 - DNA, 201 bp, Homo sapiens
tgcttgcatgggagagccagagaataaacaaataaataaacaagaaaagaccagatgacagtggctttaaagccaataaaacagggaaatagtgaatgcgsgaactgggaagaagagtcaccaaagtcagggaatcagggaagccttccccaaagaggtggcatttgaactggggcctgagtggtgaagcagccagccatg

SEQ ID NO: 194063 - DNA, 201 bp, Homo sapiens
ctgagggatcgggtagcctggagtttgccctctgctgtgttggcttgaagctcataggagacttaagacgggctctcgagcaaccaacgttctgtcctttsccgtagactgtgaagcatcctgtgtgtgtgaagcacccgccgtccgtcaaatatgcccggtgctttctctcagaactcatcaaaaaggtcagttatgggc

SEQ ID NO: 194064 - DNA, 201 bp, Homo sapiens
gcttgcatgggagagccagagaataaacaaataaataaacaagaaaagaccagatgacagtggctttaaagccaataaaacagggaaatagtgaatgcggsaactgggaagaagagtcaccaaagtcagggaatcagggaagccttccccaaagaggtggcatttgaactggggcctgagtggtgaagcagccagccatgg

SEQ ID NO: 194065 - DNA, 201 bp, Homo sapiens
gcaactggctgcagccacatgtgacccatgggagacagtgcagggcgggaagaaggggaggccagcatctctccctcactctgcctcctggggtttccacrgcagctgctcctctggggccccagctcctagcatatggattctcattcctaccaggctggcccagcccacagcactggaaccctcacccgcaccctctgt

SEQ ID NO: 194066 - DNA, 201 bp, Homo sapiens
gggagagccagagaataaacaaataaataaacaagaaaagaccagatgacagtggctttaaagccaataaaacagggaaatagtgaatgcgggaactgggragaagagtcaccaaagtcagggaatcagggaagccttccccaaagaggtggcatttgaactggggcctgagtggtgaagcagccagccatgggaagggct

SEQ ID NO: 194067 - DNA, 201 bp, Homo sapiens
tggattctcattcctaccaggctggcccagcccacagcactggaaccctcacccgcaccctctgtcctgcccgctgaagggtttggagtttcctgctcttrtccgtctctgggttgccccacaggcccctgttggaagatttagctcttgccataccttcggaactagttcctctggtgaattctctgcattaatcctgct

SEQ ID NO: 194068 - DNA, 201 bp, Homo sapiens
ccaccaggagagggcagcagtcacccagtgtactctgctgctgccctgtgaatcataggacggggccagctgtggagaagcggcctgctgacagccacagsctgcagcatgggccgccctcacacttctgcctgggctcacttaaaagcaccttttgttttcctcctctctgtgtttgatccaaacacggctctctatcat

SEQ ID NO: 194069 - DNA, 201 bp, Homo sapiens
ctctctgtgtttgatccaaacacggctctctatcatggtcacctggcaactctcacggaatccttgtctcctgccctagactacacctaaccctaccctcycaacacctctggttcaaggccctcccatccaggtttccctaccaagtgaatttttttttttagagacaaggtctctgttgcccaggctgtcctcgaactc

SEQ ID NO: 194070 - DNA, 201 bp, Homo sapiens
gggccaaaacgctgtgtccatctacatctttgctgagggatcgggtagcctggagtttgccctctgctgtgttggcttgaagctcataggagacttaagaygggctctcgagcaaccaacgttctgtcctttgccgtagactgtgaagcatcctgtgtgtgtgaagcacccgccgtccgtcaaatatgcccggtgctttct

SEQ ID NO: 194071 - DNA, 201 bp, Homo sapiens
cctgctcagaatgggcgttagaaatgctgccatagcctgtgccactgcagtggaagcatttttaggaaacggcttatatcttaagacaaacttcagatgcrtggggccaaaacgctgtgtccatctacatctttgctgagggatcgggtagcctggagtttgccctctgctgtgttggcttgaagctcataggagacttaa

SEQ ID NO: 194072 - DNA, 201 bp, Homo sapiens; identical to SEQ ID NO: 33286

SEQ ID NO: 194073 - DNA, 201 bp, Homo sapiens; identical to SEQ ID NO: 33288

SEQ ID NO: 194074 - DNA, 201 bp, Homo sapiens; identical to SEQ ID NO: 33287

SEQ ID NO: 194075 - DNA, 201 bp, Homo sapiens; identical to SEQ ID NO: 33289

SEQ ID NO: 194076 - DNA, 201 bp, Homo sapiens; identical to SEQ ID NO: 33290

SEQ ID NO: 194077 - DNA, 201 bp, Homo sapiens; identical to SEQ ID NO: 33293

SEQ ID NO: 194078 - DNA, 201 bp, Homo sapiens; identical to SEQ ID NO: 33292

SEQ ID NO: 194079 - DNA, 201 bp, Homo sapiens; identical to SEQ ID NO: 33376

SEQ ID NO: 194080 - DNA, 201 bp, Homo sapiens
agcctctagagtagctgggactattcggcacacaccaccaagcccaacgaagtgaatattttatatggcagctggccggtattataccattccatcgcaartctcccctccaaacttggtgaaaatcatctggccatttttacagattagaacgaaagcaaacaagctctcactctgtctgcccccagcacgaggctgtcc

SEQ ID NO: 194081 - DNA, 201 bp, Homo sapiens
ggtgaaaatcatctggccatttttacagattagaacgaaagcaaacaagctctcactctgtctgcccccagcacgaggctgtccacacagagcctttggaygagctgtatgaagcgctggcggagaccctgatggccaaggagtccacccagggccaccggagctatttgctggtatgagaagggcaccctcctccccctc

SEQ ID NO: 194082 - DNA, 201 bp, Homo sapiens
tttgggaggccgaagtggttgcatctgaggtcaggagttcgagaccaacctggccaatatggtgaaaccctgtctctactaaaaatacaaaaatcaggccrggcgtggtggctcatgcctgtaatcccagcattttgggaggctgaggcggggggatcacctgaggtcaggagtttgagaccagcctggccaacatggtga

SEQ ID NO: 194083 - DNA, 201 bp, Homo sapiens
tcaacccaggaggtggaggttgtagtgagccaagatcacgctattgcactccagcctgggcaacgagagcaaatctctgtctcaaaaaaaagtacaaaaaktagccggacatggtggcacacgcctgtattcgcagctacctgggcggctgaggcaggagaattgcttgaacccaggaggcagaggttgcagtgagccaag

SEQ ID NO: 194084 - DNA, 201 bp, Homo sapiens
ttcatagccacacctgtcccctggccaccactgacatgtgttccatcgccagaattccgttgtctcaggaaggttcgatgaatggaatcctgtgtggcctragatgagtgtctttcacaccgcgtgacacccttgaggcccgtgaaagctgttggcatgccaacagttagctgcttctcattgctgagtggcgattggtcc

SEQ ID NO: 194085 - DNA, 201 bp, Homo sapiens
tcatggtttattcagccatgtggtggggctacttgtcttctaagccacttgccttctgatcgctggactgactctctcgccttctcttggtgcagccctcrggaggctcggtcacactctccgagagcacggccatcatctcctacggtaccacaggcctggtcacatgggacgccgccctctaccttgcagaatgggcca

SEQ ID NO: 194086 - DNA, 201 bp, Homo sapiens
agccagagaataaacaaataaataaacaagaaaagaccagatgacagtggctttaaagccaataaaacagggaaatagtgaatgcgggaactgggaagaaragtcaccaaagtcagggaatcagggaagccttccccaaagaggtggcatttgaactggggcctgagtggtgaagcagccagccatgggaagggcttgggg

SEQ ID NO: 194087 - DNA, 201 bp, Homo sapiens
agcaactgtgagggtgtgctgtcactgtcccatctcaccaacaaagacactaggacacacggaggccaagagacccccgagctcccgcagactgcaccccrgccacctggctctcacgcctccacactacacccaagccccccagtgccaccagcctttgccccagctccccctgagcacagcccctcctggcagccatgt

SEQ ID NO: 194088 - DNA, 201 bp, Homo sapiens
ggctttaaagccaataaaacagggaaatagtgaatgcgggaactgggaagaagagtcaccaaagtcagggaatcagggaagccttccccaaagaggtggcwtttgaactggggcctgagtggtgaagcagccagccatgggaagggcttggggaacaggatatgcaaaggccctgtggtggaaacaagccagctgtggttg

SEQ ID NO: 194089 - DNA, 201 bp, Homo sapiens
caacccagtgcctgtccacgtggggcagcccgttaactacagagccaacaaacaagccagcacacgaagacgtactgggttccacgacagagtcccccacmacctcgcacaggaggctggccgggcgcagggctcaggcctgtcatcccagcactttaggaggctaaggcaagaggactacttgaccccaggtgttcaaga

SEQ ID NO: 194090 - DNA, 201 bp, Homo sapiens
gttgcttaatcatttgcgttattccattgacataaaatatttgcactcagagatcatttctggtcaagagaaattcgtgcatttttaacccaaaatagaarccttcataaaagcatcataggtctccattcagtattgactgtaattgttcacatgcccacgctgaatgctaacttgggctcaccctcaacacccacgagg

SEQ ID NO: 194091 - DNA, 201 bp, Homo sapiens
cccaggagatggaggctgcagtgagccctgatctcaccactgcactccagcctgggcaacagagcaagaccctgtctcaaaaaagcaaagaaataaaaaawaaaaaaaaaaaaggaagtctttcttcagatacttacgtgaaaaaaaacctgcaatatattttaagtgaaaaaaacagtgccaagcagcacacatagtata

SEQ ID NO: 194092 - DNA, 201 bp, Homo sapiens
aactgtgattgaaaatcgtcccgggtcacagtgtctcacgcctgtaatcccaacactgtaagaggctgaggctttgggaggctgaggtgagcagatcacckgaggtcgagttcaagaccagcctggcccacatggtgaaaccccatctctactaaaaacacaaaaattagccaggcgtggtggtgcacgcctatagtcaaa

SEQ ID NO: 194093 - DNA, 201 bp, Homo sapiens
atttgcgttattccattgacataaaatatttgcactcagagatcatttctggtcaagagaaattcgtgcatttttaacccaaaatagaaaccttcataaargcatcataggtctccattcagtattgactgtaattgttcacatgcccacgctgaatgctaacttgggctcaccctcaacacccacgaggtgggtactatt

SEQ ID NO: 194094 - DNA, 201 bp, Homo sapiens
tgggcctccagggtgacatcacaggacaggggtgcctcttaaggtgaccttcaacccacagccctctttttggagacaggcatactcccgttccagtcgtyaccacatggctctgtcccagagccatgccctgtgtccttcagagaccacaggaggaaaacaaccacttctgggacgaagacagggcccttgagagaaggt

SEQ ID NO: 194095 - DNA, 201 bp, Homo sapiens
aaactgtgattgaaaatcgtcccgggtcacagtgtctcacgcctgtaatcccaacactgtaagaggctgaggctttgggaggctgaggtgagcagatcacstgaggtcgagttcaagaccagcctggcccacatggtgaaaccccatctctactaaaaacacaaaaattagccaggcgtggtggtgcacgcctatagtcaa

SEQ ID NO: 194096 - DNA, 201 bp, Homo sapiens
gtaaatacatgttggtgttagctagtgtttttattcagtctcaaaatgtttaataaatgccttctgtgagccaggcaccatggatcagcagtacccatgayagatgaggctctgcttgcatgggagagccagagaataaacaaataaataaacaagaaaagaccagatgacagtggctttaaagccaataaaacagggaaa

SEQ ID NO: 194097 - DNA, 201 bp, Homo sapiens
gtctcaaaatgtttaataaatgccttctgtgagccaggcaccatggatcagcagtacccatgacagatgaggctctgcttgcatgggagagccagagaatwaacaaataaataaacaagaaaagaccagatgacagtggctttaaagccaataaaacagggaaatagtgaatgcgggaactgggaagaagagtcaccaaag

SEQ ID NO: 194098 - DNA, 201 bp, Homo sapiens; identical to SEQ ID NO: 33294

SEQ ID NO: 194099 - DNA, 201 bp, Homo sapiens; identical to SEQ ID NO: 33296

SEQ ID NO: 194100 - DNA, 201 bp, Homo sapiens; identical to SEQ ID NO: 33295

SEQ ID NO: 194101 - DNA, 201 bp, Homo sapiens; identical to SEQ ID NO: 33299

SEQ ID NO: 194102 - DNA, 201 bp, Homo sapiens; identical to SEQ ID NO: 33298

SEQ ID NO: 194103 - DNA, 201 bp, Homo sapiens; identical to SEQ ID NO: 33300

SEQ ID NO: 194104 - DNA, 201 bp, Homo sapiens
gagctactgcgcccaaccccatttttgtttaaaaactaataataatcacccacacatggttatgagtacctatattcccaactcctcaggaggctgacgcrggaggatggcttaagcccaggagtttgtggccaccttgagcaacatagcgagacttcatctcaaaacaaaatttatcacaataatcattttcacataagt

SEQ ID NO: 194105 - DNA, 201 bp, Homo sapiens
gagacttcatctcaaaacaaaatttatcacaataatcattttcacataagtatacctataggggaaaacctagaatatacatatagcagtcttgtccaacytgcggcccaacgcaaatctgtaaactttcttcaaacagtacgaggtttttttgtgattttttttcttttagctcatcaggtattgctagtgttagtgtat

SEQ ID NO: 194106 - DNA, 201 bp, Homo sapiens
ggcatactcccgttccagtcgttaccacatggctctgtcccagagccatgccctgtgtccttcagagaccacaggaggaaaacaaccacttctgggacgargacagggcccttgagagaaggtggtgtttggctgggccaccgaaaacccctcacccctgccagcacactcagtcccctctctggtggaacagagctctgc

SEQ ID NO: 194107 - DNA, 201 bp, Homo sapiens; identical to SEQ ID NO: 33303

SEQ ID NO: 194108 - DNA, 201 bp, Homo sapiens
aggcgattcttcttcttccagtgtggcacagggaggccaaaagattggacatccctgatatacacattaacaggtgccatccttggatggcaggattatasagatttctacacattcatgtctgtactacttcattcttataaatacgcattttccactcgtaacaaaaaactgtgattgaaaatcgtcccgggtcacagt

SEQ ID NO: 194109 - DNA, 201 bp, Homo sapiens
agttactctgggcctccagggtgacatcacaggacaggggtgcctcttaaggtgaccttcaacccacagccctctttttggagacaggcatactcccgttmcagtcgttaccacatggctctgtcccagagccatgccctgtgtccttcagagaccacaggaggaaaacaaccacttctgggacgaagacagggcccttga

SEQ ID NO: 194110 - DNA, 201 bp, Homo sapiens
ccaaaagattggacatccctgatatacacattaacaggtgccatccttggatggcaggattatagagatttctacacattcatgtctgtactacttcattyttataaatacgcattttccactcgtaacaaaaaactgtgattgaaaatcgtcccgggtcacagtgtctcacgcctgtaatcccaacactgtaagaggctg

SEQ ID NO: 194111 - DNA, 201 bp, Homo sapiens
tggacatgatggggcttccagaagagttactctgggcctccagggtgacatcacaggacaggggtgcctcttaaggtgaccttcaacccacagccctcttkttggagacaggcatactcccgttccagtcgttaccacatggctctgtcccagagccatgccctgtgtccttcagagaccacaggaggaaaacaaccactt

SEQ ID NO: 194112 - DNA, 201 bp, Homo sapiens
gacatccctgatatacacattaacaggtgccatccttggatggcaggattatagagatttctacacattcatgtctgtactacttcattcttataaatacrcattttccactcgtaacaaaaaactgtgattgaaaatcgtcccgggtcacagtgtctcacgcctgtaatcccaacactgtaagaggctgaggctttggga

SEQ ID NO: 194113 - DNA, 201 bp, Homo sapiens
atggcaggattatagagatttctacacattcatgtctgtactacttcattcttataaatacgcattttccactcgtaacaaaaaactgtgattgaaaatcrtcccgggtcacagtgtctcacgcctgtaatcccaacactgtaagaggctgaggctttgggaggctgaggtgagcagatcacctgaggtcgagttcaagac

SEQ ID NO: 194114 - DNA, 201 bp, Homo sapiens
ttaaagccaataaaacagggaaatagtgaatgcgggaactgggaagaagagtcaccaaagtcagggaatcagggaagccttccccaaagaggtggcatttraactggggcctgagtggtgaagcagccagccatgggaagggcttggggaacaggatatgcaaaggccctgtggtggaaacaagccagctgtggttgagga

SEQ ID NO: 194115 - DNA, 201 bp, Homo sapiens
ggattatagagatttctacacattcatgtctgtactacttcattcttataaatacgcattttccactcgtaacaaaaaactgtgattgaaaatcgtcccgkgtcacagtgtctcacgcctgtaatcccaacactgtaagaggctgaggctttgggaggctgaggtgagcagatcacctgaggtcgagttcaagaccagcct

SEQ ID NO: 194116 - DNA, 201 bp, Homo sapiens
tattcagtggtgcatgtattgataaacatcttaaacaacagaaaacagggttcgagagcagagaactggtctgaccacaaatttaccagggtggagatttkccccaccctaataagcctgagggtactgcaggagaccagggcatacctcagtccttatctcaaccacataagacagacattcccagagtggctggtttta

SEQ ID NO: 194117 - DNA, 201 bp, Homo sapiens
tggcttatgcgaaactcctggagttttcaatttcctcatccattcttaccaaacgttgattttgttggaggattccactgcaaacctgccaaacccctacytaaggtaaacatacttttgttggttttattttgttggcttcgaagtttcagtagaaatgagtctatagttttcattcaaaatgtttgacttacactgaaa

SEQ ID NO: 194118 - DNA, 201 bp, Homo sapiens; identical to SEQ ID NO: 33438

SEQ ID NO: 194119 - DNA, 201 bp, Homo sapiens
atgctgtatagcagagtgttcgtgacagaattatcaacagtgtccaaaaattgttagcaacccaaatatctattcatcataaaatgaagacataatctgtsgtttatcaatcaatggaatactacatagtaatggaattacccaagaactgctacattaaagaaaaagacacttttgagtacgtattatgtaattcaatta

SEQ ID NO: 194120 - DNA, 201 bp, Homo sapiens
taccccgcatatcacactctgtgactgtagttaaaataaaactttatttcatgcccatctctttgctgtcctcttttgtgcacatttaaaaaatctagaakgcacttttcattagtccaactgaaaatcttgtattaagttttgcagtctgaagtcacacacaccacatagctttcagttacatctcctaaacaagtacgt

SEQ ID NO: 194121 - DNA, 201 bp, Homo sapiens
atgtcacatttggatttcaattcctatgttagtttcctaaggctaacggcctccagctccatccttatccctgcaaaatacatatttttgtttttttatgrctgcataatattccgtagtgtatatatgccatattttctttattcattccataattgatggtcatttaggttgactgcatgtccttgctattgtgaatag

SEQ ID NO: 194122 - DNA, 201 bp, Homo sapiens
taagaatgtcttggctatagcagaacatattaatcactgttgacaaagctttgtagcacgttatctaagtgttaataatcagttgaccaaatttagcaaartacaattttgagtttattcattagctttatttttattcatgataccaaaaggttcctcatttctaggccaaaaaaaaatccaaaattaacaataatggta

SEQ ID NO: 194123 - DNA, 201 bp, Homo sapiens
attattcaacaactaactataaactctacaattccatatgataaatgagactcccaagactgattcataaaaattccaaatcacaatactagactcaggamtgtcagtgattcttaaccaccagcttttattttcattttttattttttgaaaaactactggaaaactctgacaaactttaagtgaagcataaagcattgt

SEQ ID NO: 194124 - DNA, 201 bp, Homo sapiens
aaattaatatcacattttaagacatatgtacaaagtaagcattcttcaatgcattattatgcaacctcttaaaagaacgtttttgcttacataaaactgarattttattccattgttaaaactcagtatctctgtttaatgcaaattgtatgggctttatatagtcactttctcaagagagaaaagctgaagtaagactaa

SEQ ID NO: 194125 - DNA, 201 bp, Homo sapiens
atatgaagacaatcctgaaagagcttgttcagagaggtcatgaggtgactgtactggcatcttcagcttccattctttttgatcccaatgatgcatccactcttaaatttgaagtttatcctacatctttaactaaaactgaatttgagaatatcatcatgcaacaggttaagagatggtcagacattcgaaaagatagct

SEQ ID NO: 194126 - DNA, 201 bp, Homo sapiens
gctattgcatttccttgctgtttggctgtttgtttggttaaacagtgaagatgtttgctactatcttacatccctgtcttcggggaatttttgatatgttygatcaacctgtacacaaaaacactaaagaaatttctgaaaataaaacacaaattaatacaaatggaggcttagccctagggttgtattaatcatgagaac

SEQ ID NO: 194127 - DNA, 201 bp, Homo sapiens
ttcgtatattacctggatagccctttagagtgctctgtgcgggaacatacacattttagagaattgtgcactttgtttatgcatctttattctaagaaagkgtatctaaagtgaacagagcaaattgtactatgcagacttctcatcggatatggaggtaaagaaatattaatggtgtgatctttttatgtggagtagcat

SEQ ID NO: 194128 - DNA, 201 bp, Homo sapiens
acctcctccagcctttttttttttttttttcataagagaccaaataaaacttacgcactctcctagctgtgattgcccttcagttacagagactgagagcrgagggagaccaggtctgagataacaaagcaactcattccttgaaggacattcacactgatgtcctattttcaaactatttgaaaattgcatcattctgcc

SEQ ID NO: 194129 - DNA, 201 bp, Homo sapiens
acacagtaatgtagcttcacatacagttcgggaagcaactaggcttcgaagatgcttgcttcagaaatgtccctgactgctgtggcctccactatgttccraatgtcaaatttcttaatggccttgtccttgggcatgcattggttacagtttgtgctgagaataggctgcacgtggctgcagcccttttttggtacaacc

SEQ ID NO: 194130 - DNA, 201 bp, Homo sapiens
gatgttcattaatcacaaacatatagaaaataaaatacttgtcttttgttatcacatctgagaacacttttccacaaataatttcaatatccctgttaaakaattgactcactaataaaaacatttgggagcttgtatctccaggggtacaaggcagggggcgcttagacactactatatgtccactttccttttcttttt

SEQ ID NO: 194131 - DNA, 201 bp, Homo sapiens
attaatcacaaacatatagaaaataaaatacttgtcttttgttatcacatctgagaacacttttccacaaataatttcaatatccctgttaaataattgaytcactaataaaaacatttgggagcttgtatctccaggggtacaaggcagggggcgcttagacactactatatgtccactttccttttcttttttcttaga

SEQ ID NO: 194132 - DNA, 201 bp, Homo sapiens
gaggggctgcattaggtgagtgccttcttgctggtggggattctttgtagagtcctgaggtagcacagggcatcacatggtgagggagcagagcgtgctcrctcaggtctctcttcctgttcttataaagccatattcccatgataactcaatacgtcttattcccatgagaactcaataaactactaatccatgaatgga

SEQ ID NO: 194133 - DNA, 201 bp, Homo sapiens
tggcctccactatgttccgaatgtcaaatttcttaatggccttgtccttgggcatgcattggttacagtttgtgctgagaataggctgcacgtggctgcascccttttttggtacaaccgttgttccctcttttctttgtcatcttggaggcgtgcaccagagagtgtgttttgttttttaatgtgttttggtatggacac

SEQ ID NO: 194134 - DNA, 201 bp, Homo sapiens
ggctggagtgtagtggctcgatcttggctcactgcaagctctgcctcccaggttcacgccattcttctgcctcagcctcctgagtagctgggactacaggygcccgcaacaacgcctggctaattctttttaatatatatttttagtagagatggggtttcaccgtgttagccaggatggtctcggtctcctgaccttgtg

SEQ ID NO: 194135 - DNA, 201 bp, Homo sapiens
  misc_feature (1)...(201): n = A,T,C or G
gatagtgataaatggctaagccttttcaaatgtgagtaataggaactcctgaaaggctgttgagaaagcctagagagtcactgactctgaggcttgtattnagagttctttgaatgctgaccattgtgatagttgatgattgacttcagtcctccaccatcaccttctgtgttgggactagagaagttaaatatttgcttt

SEQ ID NO: 194136 - DNA, 201 bp, Homo sapiens
aaaagtccctttgagatgaaggatgtacttaggtgcaatattttttacaatacaatacaaaataaataccacatttgtaatcaatttatcattactttttwaaaaaataaactgggaaagatcttggtaaatagaacccactgctttatttccagagctttaaacagtcacaaaaggagtttgaatagaaaccatttgcaa

SEQ ID NO: 194137 - DNA, 201 bp, Homo sapiens
aattcatataactgcattattttgaatataagctacaggactgttaaaatgttcatgacacatttccagtgaagaaaatgtaatgctttctgagaagcagkggttgtaaggagaaaatgcacacaagtaactgaaagttcagtatttagccaccattgtatgtgtcagagagtgaaatgggataggagtttatgtgtgatc

SEQ ID NO: 194138 - DNA, 201 bp, Homo sapiens
tgatatcttttgagtggttgtggtaggcagggttggcttgtcttgcttatcattgatttctgcaggatccttaatttttcaatcttagtcccaacttttcyttgaatacttggtctccaagaggtaccacctcttctgtcttatctgattctcctccaaaatcacagtttccccgaggtagctggactgtgaattaccaag

SEQ ID NO: 194139 - DNA, 201 bp, Homo sapiens
acaaattactggaaagtaatttggggaaaaaagtcaattaaagatggaatcacttataatgatacacatacattttacatgaactggatgattggcatttraagtcttcttcctctgtgacagctgtcgacctaaaagaagaaagctcaggcaaaattaatatagagagtttatttgggccaaggttgaggtctgcagccc

SEQ ID NO: 194140 - DNA, 201 bp, Homo sapiens
cctctgtatatggagtttaaaaaaagtttgatacatatgatagcttggattttaagacaaacaggctatataattttgtgcaaaatcaaaataaacattakgagatagaggcaaggatgagaactaatggcaatatgggactgatagtgataaatggctaagccttttcaaatgtgagtaataggaactcctgaaaggctg

SEQ ID NO: 194141 - DNA, 201 bp, Homo sapiens
gagataatttaatagaattttttttttgtatatttctgtattagtagtgaagtaatccaggtagaaaatgttctttaattggtctaggagtaaatcttggraaaaaaaattgaactctggaatagggcagggggtaaattcaaaatgaaagtctgttgctaattaagatttttttgtggaaaaaactattctataattaag

SEQ ID NO: 194142 - DNA, 201 bp, Homo sapiens
ttagtcataaaagagctgcaagaggtttacaattttaacctttaattttgctgttggataaagtaaaaactaatttttacttcaggattttttcagaagtrtaaccagggaaatattaccaaggagaagttctgacattgatttaagatcttttgcattcagctgcttctttagtttagcaatgtgatttcagagttactt

SEQ ID NO: 194143 - DNA, 201 bp, Homo sapiens
tcagagtccttctgtaatcagtttcataaatgaagaaattaaaagcaaatatctatccttacttttatgtttacattttcaagaaaagctagagttttgargtctttaatatagttatgctatattaaatagaatttctgacctttattgtagttgtttgcattaaaaatcataaattttgttattcaacaaaatctgtta

SEQ ID NO: 194144 - DNA, 201 bp, Homo sapiens
gttgtgttacagcagcaatttaaaaaaaatttaagttacgggatacatttgctgaatgttcaggtttgttaacataggtatacatgtgccatggtgatttsctgcacctgtcatctaggttttaagccccgcatgcattaggtgtttgtcctaatgctctccctccccttatcccccactccctgacaggccccagtgtgt

SEQ ID NO: 194145 - DNA, 201 bp, Homo sapiens
ctgaggtagcacagggcatcacatggtgagggagcagagcgtgctcgctcaggtctctcttcctgttcttataaagccatattcccatgataactcaataygtcttattcccatgagaactcaataaactactaatccatgaatggattaatccattcacaaaggcagagcccatacaacccaatcttctcttaaaggccc

SEQ ID NO: 194146 - DNA, 201 bp, Homo sapiens
agtattagagagtgtctggacccatttttaaaatcatggcatttccttaatgatttctcatctccaaaaactgctcttgtctggtgtgtgtgtgtgtgtgygcgcgcatgccatgcatatgccattacttattctggtattacattttataatttttttttttttgagacagagtcttgctctgtcactcaggctagagtg

SEQ ID NO: 194147 - DNA, 201 bp, Homo sapiens
gtttttagtcttgttacctagtggtttatcaaagacccagaattttgatttatttactgtttttctcttttccaccctattattttcatccttgtgctttytttttgtccactttgttttcttttttcccttttgagtagaaaattttaattctttgatatttattgataaaagtttttaggctatgaatttttatctgat

SEQ ID NO: 194148 - DNA, 201 bp, Homo sapiens
cacacagtaatgtagcttcacatacagttcgggaagcaactaggcttcgaagatgcttgcttcagaaatgtccctgactgctgtggcctccactatgttcygaatgtcaaatttcttaatggccttgtccttgggcatgcattggttacagtttgtgctgagaataggctgcacgtggctgcagcccttttttggtacaac

SEQ ID NO: 194149 - DNA, 201 bp, Homo sapiens
aagtatacaattactatttatgttatgttgaggaaaaatgtaataacattatcattgatttagtttctcataactggcaacgtaccttcatatccctgacytcaaagtggcagcaacttgtctggtcacttcagagttggcagactcagggcagtgaggacctgtgcacctgtgcatggtgcttgagtttttcctaccaca

SEQ ID NO: 194150 - DNA, 201 bp, Homo sapiens
ttatttgcatagaggtctgcaaggtagaattttataaacaatttctggcttctccatatcaataattatttcccccttctcacttattttgtgtatttgtrctttttttctttgttcatgtttttagtcttgttacctagtggtttatcaaagacccagaattttgatttatttactgtttttctcttttccaccctatta

SEQ ID NO: 194151 - DNA, 201 bp, Homo sapiens
aaattaactccagatgggttaaaccaaaaactatgaaaaacctagaagaaagtctaggcaatactattcaggacataggcacgggcaaagatttcatgacraaatcgccaaaagcaattgcaacaaaagcaaaaattgacaaatggaatctaattaagctaaagagctgctgcacagcaaaagaaactatcatcaaagaga

SEQ ID NO: 194152 - DNA, 201 bp, Homo sapiens
catttaacatcttaaaataatatattttcctttagaaatgaaatattaatagaaatgggattggtaccataattctaattttgtaatgtagctttgaaatkttttctttgaaaataatttcaaacataacgaaaagttgtagaaataaaatagtgcaaagaacaattgccttttttaatagatttgcctgttgtgaatatt

SEQ ID NO: 194153 - DNA, 201 bp, Homo sapiens
ttagtagagatggggtttcaccatgttagccaggatggtctcaatcccctgaccttgtgatccaccctccttggcctcccaaaatgttgggttcacaggcrtgagccaccgtgcccggctctacttttctgaaatttaaacaatggtagctcaccaaaatgaactcagtgcatgactaatttctattaacattgtattact

SEQ ID NO: 194154 - DNA, 201 bp, Homo sapiens
gaccattgttatccatttcttatgaatcctttccgagaggtttcatgcctgtaggagcatcttgtgtgaatgcatgtatgtgtgtataatatgtccccttycctatttacacaaggagttgtatacaatacacactgttctgcatcttagatattgcggggaggagggataagactgtttataggaaaaattttatgagaa

SEQ ID NO: 194155 - DNA, 201 bp, Homo sapiens
gctgcacaaggatgccgccaggaatgctcgcacctcctaccgggatggcctgcgtaagacggggcggtctctgtgcgggtgtgcgggtgtgagccacggtrcccagggccagatcgcagaagtgaagctgggaggctggcctgcagactggggtgaggtcgccactccttcctttcaggctggagctactctgctagggtt

SEQ ID NO: 194156 - DNA, 201 bp, Homo sapiens
ttggaggcgtgcaccagagagtgtgttttgttttttaatgtgttttggtatggacacatttggagataatttaatagaattttttttttgtatatttctgyattagtagtgaagtaatccaggtagaaaatgttctttaattggtctaggagtaaatcttggaaaaaaaaattgaactctggaatagggcagggggtaaat

SEQ ID NO: 194157 - DNA, 201 bp, Homo sapiens
taacaaattggcacattttcagtctcctgggttaagagcctaggcagtgctatcagagagctgtttgctggaaagcctgcactgccacatcccctggcctrtgttctgctgctaagcctcattgtctgtgtgaacacatagattaattacctaaattgcgccctggatatatttaacacttccatcatgactccaatacat

SEQ ID NO: 194158 - DNA, 201 bp, Homo sapiens
tcttttcctttgcataattattcttcactttacaaagtattaaattatttaactattaaaagtagtacagcaaaaagaataaaatgcctaggaatacagcygtcaagggaagtgaaggacctcctcaaggagaactacaaaccactgctcaaggaaatcagagaggacacaaacaaatggaaaaacattccatactcatgg

SEQ ID NO: 194159 - DNA, 201 bp, Homo sapiens
gaaccaaagaaatgtggtagctttcatagaaacaactcttttcctttgcataattattcttcactttacaaagtattaaattatttaactattaaaagtartacagcaaaaagaataaaatgcctaggaatacagccgtcaagggaagtgaaggacctcctcaaggagaactacaaaccactgctcaaggaaatcagagag

SEQ ID NO: 194160 - DNA, 201 bp, Homo sapiens
taggtaaggtaaatcagaggataatctatataaaataggtaaagtaaatcataggataatagaaatatgtatgaaccaaagaaatgtggtagctttcataraaacaactcttttcctttgcataattattcttcactttacaaagtattaaattatttaactattaaaagtagtacagcaaaaagaataaaatgcctagga

SEQ ID NO: 194161 - DNA, 201 bp, Homo sapiens
tggtgggtccccaccagggacaacgatcttgtgtatgtagcaatttgcacatttgtgtatgtaacaaattggcacattttcagtctcctgggttaagagcytaggcagtgctatcagagagctgtttgctggaaagcctgcactgccacatcccctggcctgtgttctgctgctaagcctcattgtctgtgtgaacacata

SEQ ID NO: 194162 - DNA, 201 bp, Homo sapiens
gggtttaaaaacttgaaatgagaataaagggtagtatttacgagaaaatgagagagagtaaatcatatctaacctcctccagcctttttttttttttttttcataagagaccaaataaaacttacgcactctcctagctgtgattgcccttcagttacagagactgagagcggagggagaccaggtctgagataacaaagc

SEQ ID NO: 194163 - DNA, 201 bp, Homo sapiens
ccagagtgttggaacagcagctactaatatgtgcattgcggcaagtggaggagcagaggcattttatgaaatgggaattcactgctgggatattgcagtarctgccattattgttactgaagctggtggcgtgctaatggatgttactggtaaaattatgagatagtgaatcatttttccctttacatctcttggactttc

SEQ ID NO: 194164 - DNA, 201 bp, Homo sapiens
agggtttaaaaacttgaaatgagaataaagggtagtatttacgagaaaatgagagagagtaaatcatatctaacctcctccagcctttttttttttttttttcataagagaccaaataaaacttacgcactctcctagctgtgattgcccttcagttacagagactgagagcggagggagaccaggtctgagataacaaag

SEQ ID NO: 194165 - DNA, 201 bp, Homo sapiens
agtggccaatctatgtgagaaaatttagtttttgtttctaggtagttgggaaacagaagaggttttggagtggaaagtgacagataattctaacaatgtasagattatactggggtttgggtaattctgaactaagtagaggcagtgagaatagccaaggaaatgccagaattgggaagtgtttttaagattaaatttgaa

SEQ ID NO: 194166 - DNA, 201 bp, Homo sapiens
aagaacaattgccttttttaatagatttgcctgttgtgaatattttactccatttgctttatcatttaattattctttctcatcttctctctctctctgtrtgtgtgtgtgtgtgtgtgtgtgtgtgtacacacacatttttttctccctcattattttagagtatataatactgtgtttttttctgtaaccacagtacaa

SEQ ID NO: 194167 - DNA, 201 bp, Homo sapiens
tttcaaaacttcttttatttcagtattcccagtgttctttcttttatcttcactttatccctcacccaaacgtttacctatctattaaaatgttttcttgkgtcctttttctctatttcctaaaccagttattgattttttttttcctaaactccctttatttcacccagctatgcaaattgcgaggccagggatatgacc

SEQ ID NO: 194168 - DNA, 201 bp, Homo sapiens
cttacactcaaggcaaggggtattaggctctgcctcttgatgggagtattagagagtgtctggacccatttttaaaatcatggcatttccttaatgatttmtcatctccaaaaactgctcttgtctggtgtgtgtgtgtgtgtgtgcgcgcatgccatgcatatgccattacttattctggtattacattttataattttt

SEQ ID NO: 194169 - DNA, 201 bp, Homo sapiens
cagtggtgcgatctcagctcactgcaacctccacctcacgggttcaagcaattctcctgtctcagcctcctgagtagctgggactacaggtgcacgctacsacgcccagctaatttttgtatttttagtagagaggggtttcaccatattggtcaggctggtcttgaactcccgacctcaggggatccacccgctttggcc

SEQ ID NO: 194170 - DNA, 201 bp, Homo sapiens
gatttccataagatttagttagaaacaagttaccaagtgtagcttacactcaaggcaaggggtattaggctctgcctcttgatgggagtattagagagtgtctggacccatttttaaaatcatggcatttccttaatgatttctcatctccaaaaactgctcttgtctggtgtgtgtgtgtgtgtgtgcgcgcatgccatg

SEQ ID NO: 194171 - DNA, 201 bp, Homo sapiens
ttaagacttttagagaattctaaccactttgtgctgacatgtgttaaatattttcagaagatggctgatccttggcaggaatgcatggattatgcagtaamcctagcaagacaagctggagaggtatgaattaaaattttgtcagccataatgtgatgggtgtgaagtgtgtggttgccttattaaataaaatatgtattt

SEQ ID NO: 194172 - DNA, 201 bp, Homo sapiens
cacttttctggtttttttgtttttttttttttggagacggagtctcactctgtcacccaggctggagtgcagtggaatgatctgggctcatggcaacttcygcctcccaagttcaagcgattctcctgctcagcctcctgagtagctgggactacaggcacgccggctaattttttgtatttttagtagagatggggtttc

SEQ ID NO: 194173 - DNA, 201 bp, Homo sapiens
agggggtaaattcaaaatgaaagtctgttgctaattaagatttttttgtggaaaaaactattctataattaagacttttagagaattctaaccactttgtkctgacatgtgttaaatattttcagaagatggctgatccttggcaggaatgcatggattatgcagtaaccctagcaagacaagctggagaggtatgaatta

SEQ ID NO: 194174 - DNA, 201 bp, Homo sapiens
ctccccaattttatttcccaaaacagattatctcttgactcccttagcttctccaccagaaaacttccctccccaggtttcagccaatcatcaggtctcckccgctctactgcatcctgaatgtaaatcatctaaccgtctacccacacccactttctgccagtctgttcagtagccacaatgcagtgattcctcaagtgt

SEQ ID NO: 194175 - DNA, 201 bp, Homo sapiens
acttctcatcggatatggaggtaaagaaatattaatggtgtgatctttttatgtggagtagcatgccctgttcaccattcttttcttactcttggagccayataaaaatggaagcaaacaaccttgcttctttgagatcgagaaagaaactaatgaggtcactattggaatgctgtcaatacagaatgagttcagtccaga

SEQ ID NO: 194176 - DNA, 201 bp, Homo sapiens
tattgatggaacaactaagtttgtccataggtatgttttaaacattttagtacaattgctcttcgtatattacctggatagccctttagagtgctctgtgygggaacatacacattttagagaattgtgcactttgtttatgcatctttattctaagaaagtgtatctaaagtgaacagagcaaattgtactatgcagact

SEQ ID NO: 194177 - DNA, 201 bp, Homo sapiens
gcttctgaagggagaaagctgcacaaggatgccgccaggaatgctcgcacctcctaccgggatggcctgcgtaagacggggcggtctctgtgcgggtgtgsgggtgtgagccacggtacccagggccagatcgcagaagtgaagctgggaggctggcctgcagactggggtgaggtcgccactccttcctttcaggctgga

SEQ ID NO: 194178 - DNA, 201 bp, Homo sapiens; identical to SEQ ID NO: 33449

SEQ ID NO: 194179 - DNA, 201 bp, Homo sapiens
atgcccaggtcatcagcctgcatttctctgggctctcctccctgcagctggactggtactcctggatccctaatggcccatgcaccatgcagaagcccccrcccatctctaaggatgtgacagagaaggatatagtggacttactgcccaatctccaccaggcacgtatgcaaaagaccttcacaaagttccttggcagac

SEQ ID NO: 194180 - DNA, 201 bp, Homo sapiens
ccagggatggaagacttgaagacccagctggagaaagaactccaggtgctgctgggctttctgcccatccaccatcccagccattacccccacctcccttytcctcccatctccagccccttctctcatctcctccatctacacccaaggtttctcaacgttggcactattaacattctgcaccacataattctctgttgg

SEQ ID NO: 194181 - DNA, 201 bp, Homo sapiens
aagacttgaagacccagctggagaaagaactccaggtgctgctgggctttctgcccatccaccatcccagccattacccccacctcccttctcctcccatytccagccccttctctcatctcctccatctacacccaaggtttctcaacgttggcactattaacattctgcaccacataattctctgttggctggcggggg

SEQ ID NO: 194182 - DNA, 201 bp, Homo sapiens
accaagccatgaaggatgatctagagctgcaggcctggtgcagagagatgactgagactggactgcagagggcccaagaccaggggtgagacatggatccytccccactgaaccctgtcaacacccactcctctgcaaacaatctgcttcttctcacatcatcatgagacaccccacctgcccaaggaagctgagaattct

SEQ ID NO: 194183 - DNA, 201 bp, Homo sapiens
ggcacagagaggcaatgaacggaggggcgggggactgtaggtccagaaggtcctgcattggcccctgagactgagtgtcttcttcccagggaataggtacrtggaggggatggttgggcttttctacaatagtgaccaagccatgaaggatgatctagagctgcaggcctggtgcagagagatgactgagactggactgca

SEQ ID NO: 194184 - DNA, 201 bp, Homo sapiens
cagccattacccccacctcccttctcctcccatctccagccccttctctcatctcctccatctacacccaaggtttctcaacgttggcactattaacattytgcaccacataattctctgttggctggcggggggggggggggggggctttcctgtggatcgtagggtgtttagtagcattcctggcctctacccattgat

SEQ ID NO: 194185 - DNA, 201 bp, Homo sapiens
cctcccttctcctcccatctccagccccttctctcatctcctccatctacacccaaggtttctcaacgttggcactattaacattctgcaccacataattytctgttggctggcggggggggggggggggggctttcctgtggatcgtagggtgtttagtagcattcctggcctctacccattgatgccagcagcatcccc

SEQ ID NO: 194186 - DNA, 201 bp, Homo sapiens
cacattcctctcttccttcttcattgaacatatatcagccttagggaaaagcgcaagcttctggagagaaatagcaagaaaaactaaacaaagccttggaragctaaaagctgaatctgtttttggggggagatgggtagctaaaggaaatatttttgctacattggctaaagctggcagaagaggggatacgtgaagaat

SEQ ID NO: 194187 - DNA, 201 bp, Homo sapiens
agggtgagtaccaggtagaggctgggcacttgcttcctagggcacaaggtgggatgcttccttgatcttcttgcactccattctttccacaggttgaaggrcttggccattaaggggacactggatttcataaattgtgtgaaaaggctggaagatttcaaaaaaatattcccacatggaaagactgtcctggctggtcag

SEQ ID NO: 194188 - DNA, 201 bp, Homo sapiens
tcccagcactttgggaggccgaggcaggcagatcatgaggtcaggagatcgagatcatcctggccaacatggtaaaaccccgtccctaccaaaaaaaaaawaataataattagctgggcatggtgatgtgtgcctataatcccagctgctcgggaggctgaggcaggaaaatcgcttgaacccaggaagcagaggttgcag

SEQ ID NO: 194189 - DNA, 201 bp, Homo sapiens
catctccagccccttctctcatctcctccatctacacccaaggtttctcaacgttggcactattaacattctgcaccacataattctctgttggctggcggggggggggggggggggctttcctgtggatcgtagggtgtttagtagcattcctggcctctacccattgatgccagcagcatccccccggttgtgacaacc

SEQ ID NO: 194190 - DNA, 201 bp, Homo sapiens
gggcgcctcctgatggtgaagctgcgcaaacacaacgtgctgttgagtctcgactggttctgcaagtggatctcagtgcagggcccggggacccaaggcgmggcctttttcccctgctaccgctgggtgcagggccacggaattatctgcctgcctgagggtactggtgagctcggtggagaaggggcacagcccctggca

SEQ ID NO: 194191 - DNA, 201 bp, Homo sapiens
ccaggtcatcagcctgcatttctctgggctctcctccctgcagctggactggtactcctggatccctaatggcccatgcaccatgcagaagcccccgcccrtctctaaggatgtgacagagaaggatatagtggacttactgcccaatctccaccaggcacgtatgcaaaagaccttcacaaagttccttggcagacgcca

SEQ ID NO: 194192 - DNA, 201 bp, Homo sapiens
ttcatcatattggtcaggctggtctcaaactcctgacctcaggtgacccacccgcctcggcctcccacagtgctgggattacatacaggtgtgagccaccrcacccagcggctctcccattttctagatgtgtcacctcactcccattttcctccccaatctactccccatcctcgtgtgtttcctcagcaagtgtcccca

SEQ ID NO: 194193 - DNA, 201 bp, Homo sapiens
gctgcaggcctggtgcagagagatgactgagactggactgcagagggcccaagaccaggggtgagacatggatccttccccactgaaccctgtcaacaccyactcctctgcaaacaatctgcttcttctcacatcatcatgagacaccccacctgcccaaggaagctgagaattctccagagtgtgtccagaaatgctaac

SEQ ID NO: 194194 - DNA, 201 bp, Homo sapiens
ggcctggtgcagagagatgactgagactggactgcagagggcccaagaccaggggtgagacatggatccttccccactgaaccctgtcaacacccactccyctgcaaacaatctgcttcttctcacatcatcatgagacaccccacctgcccaaggaagctgagaattctccagagtgtgtccagaaatgctaacaagcac

SEQ ID NO: 194195 - DNA, 201 bp, Homo sapiens
attcctcgaggataaggatttagactttaatgtctccctagcaaaagggtgagtaccaggtagaggctgggcacttgcttcctagggcacaaggtgggatkcttccttgatcttcttgcactccattctttccacaggttgaaggacttggccattaaggggacactggatttcataaattgtgtgaaaaggctggaagat

SEQ ID NO: 194196 - DNA, 201 bp, Homo sapiens
catcccacaagggctcctgggatggagaagtgggggatcaaatgcccaggtcatcagcctgcatttctctgggctctcctccctgcagctggactggtacycctggatccctaatggcccatgcaccatgcagaagcccccgcccatctctaaggatgtgacagagaaggatatagtggacttactgcccaatctccacca

SEQ ID NO: 194197 - DNA, 201 bp, Homo sapiens
ttgagtctcgactggttctgcaagtggatctcagtgcagggcccggggacccaaggcgaggcctttttcccctgctaccgctgggtgcagggccacggaaytatctgcctgcctgagggtactggtgagctcggtggagaaggggcacagcccctggcaggctggaggaagaagcgggtggggggaggctactgtaaaaga

SEQ ID NO: 194198 - DNA, 201 bp, Homo sapiens
catatttcagactcctacaaagagtctaaccttgtacatttcagtctagcagcaatcaatttatatgtggagacacatacacagatacatacacacacgcrtacacatacacagtaatatggaaacacccaggacacacacttactatgagttggggggagaagtgagaataggttttgcaaaggagttgaaattttggct

SEQ ID NO: 194199 - DNA, 201 bp, Homo sapiens
accagctgctcctcctcacctccacctctccccggctgtgctgtggaggggaaacggagccaggattctctgaaggttcaccgaccccgccgtcctccctraagaccccaaaacctgagctgtgtactgtcgcgcaggaggcagagtttgagatcgacgtccccctgcacctggggcgcctcctgatggtgaagctgcgca

SEQ ID NO: 194200 - DNA, 201 bp, Homo sapiens
agctggcagaagaggggatacgtgaagaatgcagtggccttatgtggtggaaaaccagaaacttcgctgcagggagctccaagtctgaaggaagacatcastcatgaaaactttgcattcagttttttggttctgcagaaagtgattggtgtttaaagtaaaaaagacttgggtgggtagaggaaggatccaccctggaaa

SEQ ID NO: 194201 - DNA, 201 bp, Homo sapiens
tggctaaagctggcagaagaggggatacgtgaagaatgcagtggccttatgtggtggaaaaccagaaacttcgctgcagggagctccaagtctgaaggaaracatcagtcatgaaaactttgcattcagttttttggttctgcagaaagtgattggtgtttaaagtaaaaaagacttgggtgggtagaggaaggatccacc

SEQ ID NO: 194202 - DNA, 201 bp, Homo sapiens
ttgatgccagcagcatccccccggttgtgacaaccaaaaatgtgtctagatagtgctgaatgtcctggggttggggagaggaggaattgcccctgattgaraacattgatctacaacatctcctcctgtatcttcttttctttctccacattcctctcttccttcttcattgaacatatatcagccttagggaaaagcgca

SEQ ID NO: 194203 - DNA, 201 bp, Homo sapiens
gtagcattcctggcctctacccattgatgccagcagcatccccccggttgtgacaaccaaaaatgtgtctagatagtgctgaatgtcctggggttggggaraggaggaattgcccctgattgagaacattgatctacaacatctcctcctgtatcttcttttctttctccacattcctctcttccttcttcattgaacata

SEQ ID NO: 194204 - DNA, 201 bp, Homo sapiens
tctgcactaagagcttcctctggaactagatacaaaacttctcttaggtattttccctcactcttccctcccctctccccatagctcaaggttcatcccamgtgcattaacctttgagcacacacaaggtgggagtcctagggtgtgcaggccagaaccacagaaaagttcttttctgtatctccacatagctttccctgc

SEQ ID NO: 194205 - DNA, 201 bp, Homo sapiens
aggggatggttgggcttttctacaatagtgaccaagccatgaaggatgatctagagctgcaggcctggtgcagagagatgactgagactggactgcagagrgcccaagaccaggggtgagacatggatccttccccactgaaccctgtcaacacccactcctctgcaaacaatctgcttcttctcacatcatcatgagaca

SEQ ID NO: 194206 - DNA, 201 bp, Homo sapiens
ccaaggtttctcaacgttggcactattaacattctgcaccacataattctctgttggctggcggggggggggggggggggctttcctgtggatcgtagggkgtttagtagcattcctggcctctacccattgatgccagcagcatccccccggttgtgacaaccaaaaatgtgtctagatagtgctgaatgtcctggggtt

SEQ ID NO: 194207 - DNA, 201 bp, Homo sapiens
ccatctccagccccttctctcatctcctccatctacacccaaggtttctcaacgttggcactattaacattctgcaccacataattctctgttggctggcggggggggggggggggggctttcctgtggatcgtagggtgtttagtagcattcctggcctctacccattgatgccagcagcatccccccggttgtgacaac

SEQ ID NO: 194208 - DNA, 201 bp, Homo sapiens
gggctttctgcccatccaccatcccagccattacccccacctcccttctcctcccatctccagccccttctctcatctcctccatctacacccaaggtttytcaacgttggcactattaacattctgcaccacataattctctgttggctggcggggggggggggggggggctttcctgtggatcgtagggtgtttagtag

SEQ ID NO: 194209 - DNA, 201 bp, Homo sapiens
gaggtgttcttcaaggctcccagcctgcctggtgctgcctccagggatggaagacttgaagacccagctggagaaagaactccaggtgctgctgggctttytgcccatccaccatcccagccattacccccacctcccttctcctcccatctccagccccttctctcatctcctccatctacacccaaggtttctcaacgt

SEQ ID NO: 194210 - DNA, 201 bp, Homo sapiens
tcccttctcctcccatctccagccccttctctcatctcctccatctacacccaaggtttctcaacgttggcactattaacattctgcaccacataattctytgttggctggcggggggggggggggggggctttcctgtggatcgtagggtgtttagtagcattcctggcctctacccattgatgccagcagcatcccccc

SEQ ID NO: 194211 - DNA, 201 bp, Homo sapiens
cttttaaagctgatttctccccggatctccgggcaagatgggcaagtacacggtccgcgtagccaccggggatttgctcctggcgggctctcccaacctgstgcagctatggctggtgggcgagcacggggaggcagacctagggaagcagctgccaccggtgtggggaaaggtgagcgcggactgcggtgagagctgggg

SEQ ID NO: 194212 - DNA, 201 bp, Homo sapiens
caattgatgttcctagagcgggtttatgattcttggaagaatgatgccttctttgggtaccagtttctcaatggtgcaaaccccatgctcctgaggtgttyttcaaggctcccagcctgcctggtgctgcctccagggatggaagacttgaagacccagctggagaaagaactccaggtgctgctgggctttctgcccatc

SEQ ID NO: 194213 - DNA, 201 bp, Homo sapiens
ggctcagctctgccactttgtcaccatgtgcatcttcacatgcacaggtcagcatgcttctaaccacctgggccaggtaacctatgtgatcatcccacaasggctcctgggatggagaagtgggggatcaaatgcccaggtcatcagcctgcatttctctgggctctcctccctgcagctggactggtactcctggatccc

SEQ ID NO: 194214 - DNA, 201 bp, Homo sapiens
gtcctggggttggggagaggaggaattgcccctgattgagaacattgatctacaacatctcctcctgtatcttcttttctttctccacattcctctcttcyttcttcattgaacatatatcagccttagggaaaagcgcaagcttctggagagaaatagcaagaaaaactaaacaaagccttggagagctaaaagctgaat

SEQ ID NO: 194215 - DNA, 201 bp, Homo sapiens
catctccttagagtcccgggctcagctctgccactttgtcaccatgtgcatcttcacatgcacaggtcagcatgcttctaaccacctgggccaggtaaccyatgtgatcatcccacaagggctcctgggatggagaagtgggggatcaaatgcccaggtcatcagcctgcatttctctgggctctcctccctgcagctgga

SEQ ID NO: 194216 - DNA, 201 bp, Homo sapiens
gtgcattaacctttgagcacacacaaggtgggagtcctagggtgtgcaggccagaaccacagaaaagttcttttctgtatctccacatagctttccctgcstgagacctatttcgtgttctggtttcgagatctctgattctcatttcaccaggattctcatttcaccaggttcctcatctccttagagtcccgggctcag

SEQ ID NO: 194217 - DNA, 201 bp, Homo sapiens
gagactgagtgtcttcttcccagggaataggtacgtggaggggatggttgggcttttctacaatagtgaccaagccatgaaggatgatctagagctgcagrcctggtgcagagagatgactgagactggactgcagagggcccaagaccaggggtgagacatggatccttccccactgaaccctgtcaacacccactcctc

SEQ ID NO: 194218 - DNA, 201 bp, Homo sapiens
gttctctagggtttgtagagaatttgaccgagatataactctagggtgaaccaacatttacagactgagagaagggagcagagtgagaaaagaaacaagaraaggaacctcattgaggtaggaggaaaatcaaaaagtgcaatccatggcagccaggaaaagaaagcgtttcaagagggacgcgtgattatctgtctcaag

SEQ ID NO: 194219 - DNA, 201 bp, Homo sapiens
gctctcctccctgcagctggactggtactcctggatccctaatggcccatgcaccatgcagaagcccccgcccatctctaaggatgtgacagagaaggatmtagtggacttactgcccaatctccaccaggcacgtatgcaaaagaccttcacaaagttccttggcagacgccagcctgtcatggtgagaagcaaatgcct

SEQ ID NO: 194220 - DNA, 201 bp, Homo sapiens
aagaccttcacaaagttccttggcagacgccagcctgtcatggtgagaagcaaatgcctgggtcctgggaaggaggcagctcaaaggaggggaagtattcygggctgagagtcccaaggggctgagccaacttgtcttctgcctctcagcatgaggagaaatatttctctggtcctgagccccaagctgtgctgagacaat

SEQ ID NO: 194221 - DNA, 201 bp, Homo sapiens
acaacctcccaaaaccaatatacagacttccaacccagggatttgaaaaaggagggggatggaggattagatcagtgggattaggagttcggagctcagarctcacagggtgctccccaattgatgttcctagagcgggtttatgattcttggaagaatgatgccttctttgggtaccagtttctcaatggtgcaaacccc

SEQ ID NO: 194222 - DNA, 201 bp, Homo sapiens; identical to SEQ ID NO: 33457

SEQ ID NO: 194223 - DNA, 201 bp, Homo sapiens; identical to SEQ ID NO: 33458

SEQ ID NO: 194224 - DNA, 201 bp, Homo sapiens; identical to SEQ ID NO: 33459

SEQ ID NO: 194225 - DNA, 201 bp, Homo sapiens; identical to SEQ ID NO: 33460

SEQ ID NO: 194226 - DNA, 201 bp, Homo sapiens; identical to SEQ ID NO: 33461

SEQ ID NO: 194227 - DNA, 201 bp, Homo sapiens; identical to SEQ ID NO: 33462

SEQ ID NO: 194228 - DNA, 201 bp, Homo sapiens; identical to SEQ ID NO: 33463

SEQ ID NO: 194229 - DNA, 201 bp, Homo sapiens; identical to SEQ ID NO: 33464

SEQ ID NO: 194230 - DNA, 201 bp, Homo sapiens
  misc_feature (1)...(201): n = A,T,C or G
acatatattaaagtgaaaattggagaaatggaaacaattacagtacccttcaggggactcggggtgggggagggggagccttatttctgtaaacctaggcntcaaaggtgcctggtgatagtaggcactcaataaatattgaatgagtaaatgagtacagataagactaaaacgtttttgctggcgcggcggatcgcttga

SEQ ID NO: 194231 - DNA, 201 bp, Homo sapiens; identical to SEQ ID NO: 33466

SEQ ID NO: 194232 - DNA, 201 bp, Homo sapiens
aagcaccctagaaccagagctgtttaacttgtttctaagacttcagcaagttattcattcttatgctgctcctttacatatttctcatattcactctcacrcacaacttcctggaccactatctgtaggcaatgacaaagcagataaattgattgactctgtgtttcagcaagctcaagcctttcatacattattgcatca

SEQ ID NO: 194233 - DNA, 201 bp, Homo sapiens
gatgacaacatatcagaaaaatatagaaggaaactgaaggaagtcccaatgaatcgaatctggaccaatttgagcaatggaataatgatagctgtggattktaacctttggaataaaccaaatactcatgaaatcatattgacagaaaccagtataaggaaataaaagggaaaaaatgttctttcttagagtagaatttct

SEQ ID NO: 194234 - DNA, 201 bp, Homo sapiens
tccttggcaacttactaaggaggcagaagctgaattacagcttgtagaacaaatgcttcagtgaagacatgcctcctggctacagccacaaaagcctttgyttctgtttattcttccaaccccctactctccaataggacttttgggcccatttatagacaagtttgtaatggtaatagaatggctttttctatccaatca

SEQ ID NO: 194235 - DNA, 201 bp, Homo sapiens
aatgaatcactgatttgattggcaaatgcttaattataaatctaatcaaccatctctttttgtttgtgattcattcaggtgttttgttcatgtactgcacycatttttctcttgtggtaccgtctactggttcttctttgggatacagaagatacaaagggcaaatttataatttgttcaaattctagaatcctgagtcat

SEQ ID NO: 194236 - DNA, 201 bp, Homo sapiens
actggagctattcctattcggccatcttgactccaccctaccatagtggttttcatttagcatgtccaattaatgttggctgaagggcaaatttgcatacyttctgttatacaatattagattcaagaaacatttcctagttagatacagtgtccttcaaccttgacacattcagataaaatagatactacttcacataaa

SEQ ID NO: 194237 - DNA, 201 bp, Homo sapiens
aaagaaattatgtgtacctgtgataaatcaagcagctgaccaaccattacctcttcctccctgctcttttcacctaataaatatgaagggctgtagaagcycaaagcctttgttcactagaagcaaggagcccctgacaccttcttttaaaacagatctttttgtctttgtcttcatttctccattcatcccccttcaccc

SEQ ID NO: 194238 - DNA, 201 bp, Homo sapiens
ttcttccactgaggattaagtgcccctgtgagacacagaaaagtgatgatgagggtccctcacaggcagttataggtagcacatcagttgtttgtttggtwtgtttgttttgttttgttttgttttgagatggagtctcgctgggtcgcccaggctggagtgcagcggcacaatctcggctcactgcaacctccacctccc

SEQ ID NO: 194239 - DNA, 201 bp, Homo sapiens
aagttcgaactgggtggagcccaccacagctcaaggaggcctgcctgcctctgtagagtccacctctggggtcagggcatagccaaacaaaaggcaattgkgggagcccctcccccagcctcgctgccaccttgcagtttgatctcagactgctttgctagcaatgagcgagactccgtgggtgtaggaccttctgagcca

SEQ ID NO: 194240 - DNA, 201 bp, Homo sapiens
attctggtatgttgtgtctttgttctcattggtttcaaagaacatctttatttctgccttcactttgttatgtacccagtagtcattcaggagcaggttgktcagtttccatatagttgagcggttttgagtaaacaaagtggctgggaagttcgaactgggtggagcccaccacagctcaaggaggcctgcctgcctctg

SEQ ID NO: 194241 - DNA, 201 bp, Homo sapiens
taaaactcgataaataataaaacaaagtaattaaaatgttggataagacatgtcaccaaagaagatacagatggtcagtaaatacatgaaaagatgcttawtattattagttattagggaaaggcaatctaaaaccagaatgaagtactatgcacatattagaaaggctgaaattaaagagacaggtcatatcaaatgttg

SEQ ID NO: 194242 - DNA, 201 bp, Homo sapiens
tctgtcaccctttccttggttagtaaaaggaattccctgaccccttgcacttcccagatgaggagatgcctcgccctgctttggctcatgctcagtgcacygcacccactgtcctgcacccactgtccaacaatcctcagcgagatacacctggtacctcagttggaaatgcagaaatcattcgtcttctgtgtcgctcat

SEQ ID NO: 194243 - DNA, 201 bp, Homo sapiens
ataaaaaatattttacaaaacatatatctgctaaaagatacatagaacacatataaataactcttaaaactcgataaataataaaacaaagtaattaaaawgttggataagacatgtcaccaaagaagatacagatggtcagtaaatacatgaaaagatgcttattattattagttattagggaaaggcaatctaaaacca

SEQ ID NO: 194244 - DNA, 201 bp, Homo sapiens
ttctgctagcttttgaatgtgtttgctcttgcttctctagttcttttaattatgatgttaggttgtcagttttagatctttcctgctttcttttgagggtrtatagtgctacaaatttccctctacacactgctttgaatgtgtcccagagattctggtatgttgtgtctttgttctcattggtttcaaagaacatcttta

SEQ ID NO: 194245 - DNA, 201 bp, Homo sapiens
caaaataatgtcttttgcggcaacttaaatggagctggaggccattattccaagtgaaatcactcaggaatggaaagccaaacaacgtatgttctcgcttrtaagtgagagctaagctgtgagtacggaaaggtatataaagtaatataatgggctttagagactcagaaaggagagggtaggaatggggtgtgggataaa

SEQ ID NO: 194246 - DNA, 201 bp, Homo sapiens
tgcatttctctgatggccagtgatgatgagcattttttcatgtgtctgttggctgcataaatgtcttcttttgagaagtgtctgttcatatccttcgcccrctttttgatggggttgtttttttcttgtaaatttgtttgagttcattgtagattctggatattagccctttgtcagataagtagaatgcaaaaattttct

SEQ ID NO: 194247 - DNA, 201 bp, Homo sapiens
aatgccattactgtgtatctatccccccaccaaaaaaagagtcattatatgaagaaaaaaaaaacatgcacacatatgtttattgcaatccaattaacaaytgtaaagatatggaactaacctaagtctacactgaccaaagagtagataaataaaatgaggtgtatatataaatcattaaatactactcagccatgagaa

SEQ ID NO: 194248 - DNA, 201 bp, Homo sapiens
tcattattggacatttgggttggttccaagtctttgctattgtgaatagtgccactataaacagacatgtgcatgtgtctttatagcagcatgtttcaaarttctttgggtatatacccagtaatgggatggctgggtcaaatggtattcctagttctagaaccctgaggaatcaccacactgacttccacaatggttgaa

SEQ ID NO: 194249 - DNA, 201 bp, Homo sapiens
tgtttggttttttttccttgtgatagcttgctgagaatgatggtttccagcttcatccatgtccctacaaaggacaggaactcatcattttttatggctgyatagtattccatggtgtatatgtgacacattttcttaatccaatctatcattattggacatttgggttggttccaagtctttgctattgtgaatagtgcc

SEQ ID NO: 194250 - DNA, 201 bp, Homo sapiens
cccactgcccccaccccacaacaggccccagtgtgtgatgttccccttcctgtgtccatgtgttctcattgttctattcccacctatgagtgagaacatgyggtgtttggttttttttccttgtgatagcttgctgagaatgatggtttccagcttcatccatgtccctacaaaggacaggaactcatcattttttatggc

SEQ ID NO: 194251 - DNA, 201 bp, Homo sapiens
attaactcatcatttaacattaggtatatctcctaatgctatccctccccactgcccccaccccacaacaggccccagtgtgtgatgttccccttcctgtrtccatgtgttctcattgttctattcccacctatgagtgagaacatgcggtgtttggttttttttccttgtgatagcttgctgagaatgatggtttccagc

SEQ ID NO: 194252 - DNA, 201 bp, Homo sapiens
cagaattccaacaaggtttagagagccttaacccttggacctaccgcaaacagcaactcaatgtctttgttgttactattggattaatgttattatgtttytgttttttgttcatagtcttcaaaatcaggtggaccaccaaatggcaattgagagctgcagaacctgcaattacctttattcaattaatgaaaaaacaaa

SEQ ID NO: 194253 - DNA, 201 bp, Homo sapiens
gtaggaatatctgaagcctgttgtacaaagaaagaaattatgtgtacctgtgataaatcaagcagctgaccaaccattacctcttcctccctgctcttttyacctaataaatatgaagggctgtagaagctcaaagcctttgttcactagaagcaaggagcccctgacaccttcttttaaaacagatctttttgtctttgt

SEQ ID NO: 194254 - DNA, 201 bp, Homo sapiens
aatactcagctgtacaagtggatatcccagaatgaccttcttggtaatactctgcagaacaaatactgaatatatgactaacagctaattagaaggatagytcaacctgaaagaaacttacggaacatttattatcaaaaaactcaaatataaaggctaactactttatatttattttccagtcttaccaggaaaataact

SEQ ID NO: 194255 - DNA, 201 bp, Homo sapiens
gacatgaaatgtggatattcaatagtcttttagtagtactcatttcctaaaattgcttgttctcgttttttcatctattatatggaaggggtttaactagytgattgacaatttctttagagttctaacatcttatagctttggcattctactcatggaacaagatattttctttaccccaacaggttctgtggatggaaa

SEQ ID NO: 194256 - DNA, 201 bp, Homo sapiens
atccacctagccaagtagatttagagaagcagaagaacttgcctgccctgtttactgggccttgctaatgtcttaaacaggaaaatatgatagaaaaggarggaacagaatcctgcttttagggtagactccgtgcattataaaatgtggtcccataaagcctctgctctaaccatcagaaaaacacctcctcccaacgga

SEQ ID NO: 194257 - DNA, 201 bp, Homo sapiens
tagtagtacagtgactctccaattaaaactaatgtcataaggctcaaattatatttttgaaaaatacttggcaaaatatgttgtgcatacacaaactttargatttctttttttaaacaagtttttaaaagaaagtttacctcccatgtttaggatctgaaagtataccggttatgtcagaatgggttcatcattatttta

SEQ ID NO: 194258 - DNA, 201 bp, Homo sapiens
agtatacaacatgatgacaacatatcagaaaaatatagaaggaaactgaaggaagtcccaatgaatcgaatctggaccaatttgagcaatggaataatgawagctgtggattgtaacctttggaataaaccaaatactcatgaaatcatattgacagaaaccagtataaggaaataaaagggaaaaaatgttctttcttag

SEQ ID NO: 194259 - DNA, 201 bp, Homo sapiens
ccctgaggcaacaaaagtacaggatgtgcctgaaatatctaggggtgccagaaagtaaataagtatacaacatgatgacaacatatcagaaaaatatagarggaaactgaaggaagtcccaatgaatcgaatctggaccaatttgagcaatggaataatgatagctgtggattgtaacctttggaataaaccaaatactca

SEQ ID NO: 194260 - DNA, 201 bp, Homo sapiens
cgaagggctgtagaagcttagatcccttgttcactagaaacaaggagccccctgtcaccttcttttaaaacagatctttctgtctctgtcttcatttctcyattcatcccccttcattcaatcctgtagcaactggcagtgacaagtggtgcccaggacagggacatgagcaaagaaggtctgctggagcagagaaagtga

SEQ ID NO: 194261 - DNA, 201 bp, Homo sapiens
cattaaatgaaaataactttttacattaaattattagtttgagcttatctgtaaatatttactatttagatttaccatgttttagcttactacactctccwttttctgtattttatggaaatgataatttatttattctcttaagctgttaatgaaaagttatgcatagatacatttccaaaatgtctatgcgtaaatggc

SEQ ID NO: 194262 - DNA, 201 bp, Homo sapiens
tgaattatttctatccacatgaaatgattcacttatcacatttgatacttcgcatcttaattctgctttgtttgatttttgtagcattgcatcaattttcrtttatttgctattgggtatatgcctcttgtaaaatctgtatatattttatagtaatatgggtaatttttattaggtgtttctcttttaaacaaaaataaa

SEQ ID NO: 194263 - DNA, 201 bp, Homo sapiens
ttctcagttgtatacttacctgagtatattctatgccgtcttctcttcatggtatatgtgtttggagcagaaaaggtagtaaagacttgggtcatgaatgrtaagcacagtccactccactgaatgaaattcttaaatgtgtatatttgaaaggtaatacattctctttaagtttataattattttaattgtatcacatta

SEQ ID NO: 194264 - DNA, 201 bp, Homo sapiens
gagaacctgcaggaggcaagagacaggatagaataaaattaaatttgagagaaacacattgaatcagttcaaaatatttcagtgaagcatagaatgagtgrttaaaaccaggaaaccataatgacagagcttcagaagtaaagcaggcaatcaggagggctctaacatgtggtaatagcaaataacactttcatattttaa

SEQ ID NO: 194265 - DNA, 201 bp, Homo sapiens
tttgataaacaaatttagttacatctcaggttacaaaatcaatatacacaaatcagtagcacagttatacagcaataacatccaagctgagaatcaaattwaaaaattccatcacttttttaactgcaaaaaaatataatacctaagaacatacttaaccaggaagataaaatgtccgtacaaggagaactataaaacact

SEQ ID NO: 194266 - DNA, 201 bp, Homo sapiens
agaaaactctaaagatttcttcaaaagactcctagatttgataaacaaatttagttacatctcaggttacaaaatcaatatacacaaatcagtagcacagytatacagcaataacatccaagctgagaatcaaatttaaaaattccatcacttttttaactgcaaaaaaatataatacctaagaacatacttaaccaggaa

SEQ ID NO: 194267 - DNA, 201 bp, Homo sapiens
gatgcccacttttatcacttctattcaatatagaactggaagtcctagtcagagcaatcaggggaaaaaaaagaaatgaaagacatccaagttgaaaaagatgaagtcaaactatcactgttcacttatgatatgattgtatacctagaaaactctaaagatttcttcaaaagactcctagatttgataaacaaatttagt

SEQ ID NO: 194268 - DNA, 201 bp, Homo sapiens
tatgcagcaatgctttataataaataccttcaacaaattaggcatagaagggacttacctcaaagtaataaaagccatataggacaaactcacagccaacmttatactcaatggggaaatgctgaaattccctctgagaactggaacaagacaaggatgcccacttttatcacttctattcaatatagaactggaagtcct

SEQ ID NO: 194269 - DNA, 201 bp, Homo sapiens
acagggatgttttaacatatgcaagtcaataaatggaatacatcacataaacagatttaaaaacaaaagccacataatcatctcaatggatgcagaaaaartatttgataatatgcagcaatgctttataataaataccttcaacaaattaggcatagaagggacttacctcaaagtaataaaagccatataggacaaact

SEQ ID NO: 194270 - DNA, 201 bp, Homo sapiens
aaactacagactaataaatgacataacaaaaaacaaaaaaatctacagactaatatccctgatgaacagagatgcaaaaattctcaacaaaatactagctractgactccaatagcacctcaaaaagataatacatcctggtcaagtgagtttcatcccagggatacagggatgttttaacatatgcaagtcaataaatgg

SEQ ID NO: 194271 - DNA, 201 bp, Homo sapiens
acaggtccagaagaattcagagctgaattataccacacactcagagaataattagtatcaattattcccactgaaatgattcccaaaaataaagaaagagrgaattcttcctaaatcattctgtgaagccagtatctagaaaatgatataacaacaacaacaaaactacagactaataaatgacataacaaaaaacaaaaa

SEQ ID NO: 194272 - DNA, 201 bp, Homo sapiens
aaagctatataaatacatgaaaactaagtaatttgctcttcaatgatttttgggtaaaaatcaagatggaaattaataaattatttaaaatgaatgataayagtgacagagtgatcaaaatttctgggaaacagcaaaagtagtgctaagactaaggttcatagcattaaatgcctacatcaaaaaggctgaaagagcaca

SEQ ID NO: 194273 - DNA, 201 bp, Homo sapiens
tgataaataaatcagtaaaattgttctctgtaaaatcaggaaaatcaaaatcatatcaagtatcttcttagaccatagtgaagtaaaactggaaatcaacwccaaaaagaaccctcaaagctatataaatacatgaaaactaagtaatttgctcttcaatgatttttgggtaaaaatcaagatggaaattaataaattatt

SEQ ID NO: 194274 - DNA, 201 bp, Homo sapiens
ataactgtaaaatttccaccttcagtaaattgaaaactgttagagcagacaacaatatttaaaatttttcattttttagtgcctcaaatgttgttgtatcwttgagcacagcatcatggtaaaattcggatgaataaaaggcataaacttatctggaaaagaaaattctttcaagtgagggcatatgaagattctcaccaa

SEQ ID NO: 194275 - DNA, 201 bp, Homo sapiens
ctgcccttgagataaggcagagggtttattgggctaactaacacacaagccgcctgcagatggcaaagctgacagagcttagtaacactgtggttgtaggyacccagccctagacgctgccatggggctgagagtccaaaacgctctgccctggcctctgcacctgcctggcctctgcacctgcccatctgccttaggggt

SEQ ID NO: 194276 - DNA, 201 bp, Homo sapiens
cacgctcacgtgtgatccgattcttttgggacactgggcaagaactcaggatacataagactgtcacactggccttctgcccttgagataaggcagagggyttattgggctaactaacacacaagccgcctgcagatggcaaagctgacagagcttagtaacactgtggttgtaggcacccagccctagacgctgccatgg

SEQ ID NO: 194277 - DNA, 201 bp, Homo sapiens
caccttcccagtctatccctccttctgctacctatccatctcgctgagagccacctgcaccactcaataaaaccttgcattcactcttgagccccagaggygaaggttgcagtgagccaagacggcgccactgcactccagcttgggctacagagtgaggctccgtctctaaaaaacaaaaacaaaacgaaagaaaacaac

SEQ ID NO: 194278 - DNA, 201 bp, Homo sapiens
tcaactgtacactttaaataggtagaatttatagtacatcaattatacattactaaagctgtttaagagaaaaaaaaacaaggtaagcagatgttaaagtygtacctgaagctttcagtagtctcaccaataatctagactggagggatcccatgtgacttttagatatattagtggaactggagattgggcagcgaagtg

SEQ ID NO: 194279 - DNA, 201 bp, Homo sapiens
ccatcaacagagaatgaataaaaaaattgtagcatatctatacaatgaggtatttctccgcactatgaaggaatgaaccattggtacatgaagagtaaatraatctcaaaataaaaataatgatgctgagtgaaagatgctagtgaaacaagtatacagactgtggttccatttatatgaaactctataacatgcaagcaa

SEQ ID NO: 194280 - DNA, 201 bp, Homo sapiens
agattttacatttaagtatttaatacaccttgagttgatatctgtatgtggtgaaaggaagaggtcaaatttcagtcttctgcatatgactatacaattaycacagcatcatttattgaatagagggttctttcttcattgcttgttattcctgacttcattaaaaatcaggtggcagtaggtgtgtggctttattatttg

SEQ ID NO: 194281 - DNA, 201 bp, Homo sapiens
gtttgatagtttcctaaaaagttaaacatccacttaccctgtgatctagccaatttacttctaggtatttagccaagagaaatgaaaacacatatccattyaaagattttacacaaatgttcatcgtaattttatttgcaatgacctcaaattggaaacaatttaaatgtccatcaacagagaatgaataaaaaaattgta

SEQ ID NO: 194282 - DNA, 201 bp, Homo sapiens
tttaaaaattgttagatctgataaataaatcagtaaaattgttctctgtaaaatcaggaaaatcaaaatcatatcaagtatcttcttagaccatagtgaartaaaactggaaatcaactccaaaaagaaccctcaaagctatataaatacatgaaaactaagtaatttgctcttcaatgatttttgggtaaaaatcaagat

SEQ ID NO: 194283 - DNA, 201 bp, Homo sapiens
attaacagatccaagaattataggattatttcagtacatgctaaaaaaagcccataaaaatccaaatccctatataataaattataatggttttagatcaycaaaccatcaaaatgactttagaggaaacattctccaaaatgataaaggccatatatgatccatgactaaaatcatactgaacaagaaaaaaattaaaga

SEQ ID NO: 194284 - DNA, 201 bp, Homo sapiens
cccataccattcctgtggtattgaataagtctcatgagctctgatgattttatcagagatttccgctcgtacgtcttcatcattttctcttgccgccactwtgtaagaaatgcctttcaccttccgttatgattctgaggcctccccagccatgtggaactctaagtccaattaaaccgctttttcttcccagtctcaggt

SEQ ID NO: 194285 - DNA, 201 bp, Homo sapiens
ttaatatagatatacaggagaccaaaaaatagcgagatatatatatatatatacacacatacacatacgtgtgtgtgtgtatatatactatatatatacayactatatatatacacactatatatatatacacacacacaatatatatatatatatatatatatatatatatatatatatgtataatttttttgagacaga

SEQ ID NO: 194286 - DNA, 201 bp, Homo sapiens
aatctcgtcttgaattgtactcccaaaagttccacatttttgtgggagggacgtggtgagagttaatttgaatcacggggcagtttcacccataccattcytgtggtattgaataagtctcatgagctctgatgattttatcagagatttccgctcgtacgtcttcatcattttctcttgccgccactatgtaagaaatgc

SEQ ID NO: 194287 - DNA, 201 bp, Homo sapiens
tttttgagacagagtcttgctctgtggccaggctggagtgcagtggcacaatctcaataaccagtaatattttgaaaaataatttagtccttgcatttcckattttcaaccaacaacatatcatcaatagttataagagtgtgacacaggaacacagatcaccatataaataaatggaacagattttagaatccagaaatc

SEQ ID NO: 194288 - DNA, 201 bp, Homo sapiens
attggggaaggcatgataggttttgaaatgtgaggacatgagatttggaggggccaggggtagaattatacggtttggctctgtgtccccacccaaatctygtcttgaattgtactcccaaaagttccacatttttgtgggagggacgtggtgagagttaatttgaatcacggggcagtttcacccataccattcctgtgg

SEQ ID NO: 194289 - DNA, 201 bp, Homo sapiens
aaagtttggaaaatttgcagcctaataatgcaatagaaaagaaaatcttattttctgaggagaaattcaaactggctgcatgtatttgcattagtaatgaraagctgaatgttaatcctcaagacaatggggaaaatgtcttccaggaatgtcagagacctttgcagcagcctctcccatcacagacccagaggtctagga

SEQ ID NO: 194290 - DNA, 201 bp, Homo sapiens
taataggcaaagattggaacagtttggagggctcagaagaagacagaaaaatgagagaaagtttggaatttcatagagacttgttgaatgactttgacaamagtattggaaatggtatggacaatgaaatccaggctcaggttgtcttagatagagatgaggaacttgttaggaactagagcagaggtgattcttgttatg

SEQ ID NO: 194291 - DNA, 201 bp, Homo sapiens
aagcagtaaagattgatcttccttatgctctttcaaatagcattcagatgtacttctttacaagggggaaagagacagccaggtaggaggtggtccccagrgaatctccaaagagcttgaacactgagaagaatgttcactggggtggaacctcagcaagtttgtgccatttgcagtggggaagagccaggcccctcctct

SEQ ID NO: 194292 - DNA, 201 bp, Homo sapiens
ttgtacaaagaaagaaattatgtgtacctgtgataaatcaagcagctgaccaaccattacctcttcctccctgctcttttcacctaataaatatgaagggytgtagaagctcaaagcctttgttcactagaagcaaggagcccctgacaccttcttttaaaacagatctttttgtctttgtcttcatttctccattcatcc

SEQ ID NO: 194293 - DNA, 201 bp, Homo sapiens
actacttgggtgatggttgcaataaaatctcagaattaactaatatacaattaatacatataaccaaaaaccacttgtaccccgaaagctattgaaataaraaatattttacaaaacatatatctgctaaaagatacatagaacacatataaataactcttaaaactcgataaataataaaacaaagtaattaaaatgttg

SEQ ID NO: 194294 - DNA, 201 bp, Homo sapiens
aaaggcatgcatatattcacaagaaacaacagagaacagggaaccaggacctctccaaaaggacaatgcaaaaatctagtgattgacactaataagataayccaatttctgagctctctgacccagaatacaaaatagcagttttaagaaaacttagtaatgtctaagttaacacaggaagttatttcagaaatttatccg

SEQ ID NO: 194295 - DNA, 201 bp, Homo sapiens
caataacatccaagctgagaatcaaatttaaaaattccatcacttttttaactgcaaaaaaatataatacctaagaacatacttaaccaggaagataaaaygtccgtacaaggagaactataaaacactgttgaggccaggcacggtggctcacacctgtaatcccagaacattgggaggctgaggcaagtggatcacgag

SEQ ID NO: 194296 - DNA, 201 bp, Homo sapiens
gggttcaacatgcactacttgggtgatggttgcaataaaatctcagaattaactaatatacaattaatacatataaccaaaaaccacttgtaccccgaaarctattgaaataaaaaatattttacaaaacatatatctgctaaaagatacatagaacacatataaataactcttaaaactcgataaataataaaacaaagt

SEQ ID NO: 194297 - DNA, 201 bp, Homo sapiens
atttacaatatgatttggatctgtgtccccacccaaatctcattttcagttgtaatcaccagtgttggagatgggttttctgggaggtgattggatcatcrggtggatctttcatgaatgattcagcactatccctttggtgctgttcttgtaacagcattctcaagagatctgtttgtttaaaagtgtgtagcacctcct

SEQ ID NO: 194298 - DNA, 201 bp, Homo sapiens
aaacattctccaaaatgataaaggccatatatgatccatgactaaaatcatactgaacaagaaaaaaattaaagaatgtttcctagggactggaacaagasaaagatgcccactgtcagtcctcttatataacataataccagaagatgttgttagtgcaattaggagcaaaaaataataataataaaataaagtgcattc

SEQ ID NO: 194299 - DNA, 201 bp, Homo sapiens
attatttcagtacatgctaaaaaaagcccataaaaatccaaatccctatataataaattataatggttttagatcaccaaaccatcaaaatgactttagakgaaacattctccaaaatgataaaggccatatatgatccatgactaaaatcatactgaacaagaaaaaaattaaagaatgtttcctagggactggaacaag

SEQ ID NO: 194300 - DNA, 201 bp, Homo sapiens
agacttcaaataacctaatactatacatcaaagaactaaaaaagcaggaacaaaccaaacccaaagctaatagaaagaaagaaattataaagaccagaacrcagttaaataaatttgaggctaaaataaacacaatacaaaagatctatgaaacaaaaagttgtttttttgtgaagatgatggagaagaaaagagaaaatc

SEQ ID NO: 194301 - DNA, 201 bp, Homo sapiens
agcatccaatactcagctgtacaagtggatatcccagaatgaccttcttggtaatactctgcagaacaaatactgaatatatgactaacagctaattagarggatagttcaacctgaaagaaacttacggaacatttattatcaaaaaactcaaatataaaggctaactactttatatttattttccagtcttaccaggaa

SEQ ID NO: 194302 - DNA, 201 bp, Homo sapiens
taccaacatctatggaagatggccaaaaaaactgtaagaagaaagtttcttgtaacaaacatctgtatcaaaaaagttgaaagacttcaaataacctaatmctatacatcaaagaactaaaaaagcaggaacaaaccaaacccaaagctaatagaaagaaagaaattataaagaccagaacacagttaaataaatttgagg

SEQ ID NO: 194303 - DNA, 201 bp, Homo sapiens
caggactaccaacctcttagacatggaaactcttctccgtaactcagccaaaaattgacctcaaatcagagtagttgcttagcaacagcatgctgtaggaygtaagttctttaggtatactgggaacaagcccttaggcagtgttctcacacttccaggataatccatttggaacccccatcacttgggacaggcagagct

SEQ ID NO: 194304 - DNA, 201 bp, Homo sapiens
tctgtgacaaacgttacaatactttaaaaagagattagtatttaaatcagtagactgactaaagatatctctcatgattgtgggcaggtatcatccaatcygttaagaacccaaatagagcaaaaggcagaagaagacaaatatttctcttttctttggctgggacattaatattattctgccttctttatttgaggcttc

SEQ ID NO: 194305 - DNA, 201 bp, Homo sapiens
ttgagttgatatctgtatgtggtgaaaggaagaggtcaaatttcagtcttctgcatatgactatacaattatcacagcatcatttattgaatagagggttmtttcttcattgcttgttattcctgacttcattaaaaatcaggtggcagtaggtgtgtggctttattatttggttctctattctgttccattgctctatgt

SEQ ID NO: 194306 - DNA, 201 bp, Homo sapiens
agtattgtaaatgaagagtctgggtataatattttctagcattgtctccttcttctatagtgtcatagttgtttttcatcttttccttttacagacacacrtatttacacaaatagccataacagatgccatgtatatcatattccataacttcttccaaagaaagagattaggtcagttaaaaaatagccattactccaa

SEQ ID NO: 194307 - DNA, 201 bp, Homo sapiens
taactgcaaaaaaatataatacctaagaacatacttaaccaggaagataaaatgtccgtacaaggagaactataaaacactgttgaggccaggcacggtgkctcacacctgtaatcccagaacattgggaggctgaggcaagtggatcacgagctcaggcgtttgagaccagcctggttaacatagtgaaactctatctct

SEQ ID NO: 194308 - DNA, 201 bp, Homo sapiens
aacagaacaaagtttaagaatattaaaaacaaatacaccaaaatttattaaaaagcaatatttagaggacaatttatgaccttaaaatgcctacattaatwagacaaaaatttttaattaatatgcaattttatactttaaggaactagaaaaaatgaacaaaccccccaaagcagaagaaaagaaatagtgattattgct

SEQ ID NO: 194309 - DNA, 201 bp, Homo sapiens
aggaagataaaatgtccgtacaaggagaactataaaacactgttgaggccaggcacggtggctcacacctgtaatcccagaacattgggaggctgaggcargtggatcacgagctcaggcgtttgagaccagcctggttaacatagtgaaactctatctctactaaaaagagtacaaaaaattagctgagcatggaggtgg

SEQ ID NO: 194310 - DNA, 201 bp, Homo sapiens
aaattcacaaatgattacacattaaacaacataattcaaaataacaaagataaaatcaaaagaaaacagaacaaagtttaagaatattaaaaacaaatacrccaaaatttattaaaaagcaatatttagaggacaatttatgaccttaaaatgcctacattaattagacaaaaatttttaattaatatgcaattttatact

SEQ ID NO: 194311 - DNA, 201 bp, Homo sapiens
gtgaaactctatctctactaaaaagagtacaaaaaattagctgagcatggaggtgggcacctacaatcccagctacttgggaggctgaggcaggagaatcwtttgaatctgggaggcggaggttgcagtgatccgagatcacgccactgcacctcagcctgggcaataagaacaaaactccatctcaaaaaaaaagaaatg

SEQ ID NO: 194312 - DNA, 201 bp, Homo sapiens
gcaaattacttggcatggcgcaggccttagcccacctttgcctcaatggcattctcaaggaaagagaggtccaatccagaattcgatatgcaaaacagcaytcccatttattaatggcagcatttgagttgggacattattcaataataataacagtgctaaatgcagttttaatatgatcatggtagaaaatattaccac

SEQ ID NO: 194313 - DNA, 201 bp, Homo sapiens
atccctccccactgcccccaccccacaacaggccccagtgtgtgatgttccccttcctgtgtccatgtgttctcattgttctattcccacctatgagtgaraacatgcggtgtttggttttttttccttgtgatagcttgctgagaatgatggtttccagcttcatccatgtccctacaaaggacaggaactcatcatttt

SEQ ID NO: 194314 - DNA, 201 bp, Homo sapiens
ttaaacatactgctaaatgacaaacatgtcaatgaagttattaagaagaaaatttaaaaattttgtgagacaaatgaaaatggaagtacagcataccaacrtctatggaagatggccaaaaaaactgtaagaagaaagtttcttgtaacaaacatctgtatcaaaaaagttgaaagacttcaaataacctaatactataca

SEQ ID NO: 194315 - DNA, 201 bp, Homo sapiens
aatgttcactggggtggaacctcagcaagtttgtgccatttgcagtggggaagagccaggcccctcctctttctgtgtggaagctgggattcaagctttgrgcaggaagcactctagcagggggactctggcctttcagagtcctcgacattcaaaccatctgtgagcctaaatttttgtggccatgggacagacaaggat

SEQ ID NO: 194316 - DNA, 201 bp, Homo sapiens
acaaaaaattagctgagcatggaggtgggcacctacaatcccagctacttgggaggctgaggcaggagaatcttttgaatctgggaggcggaggttgcagygatccgagatcacgccactgcacctcagcctgggcaataagaacaaaactccatctcaaaaaaaaagaaatgaaaagtagatctaccattcaatacagca

SEQ ID NO: 194317 - DNA, 201 bp, Homo sapiens
tttcaaatagcattcagatgtacttctttacaagggggaaagagacagccaggtaggaggtggtccccagagaatctccaaagagcttgaacactgagaaraatgttcactggggtggaacctcagcaagtttgtgccatttgcagtggggaagagccaggcccctcctctttctgtgtggaagctgggattcaagctttg

SEQ ID NO: 194318 - DNA, 201 bp, Homo sapiens
aattagctgagcatggaggtgggcacctacaatcccagctacttgggaggctgaggcaggagaatcttttgaatctgggaggcggaggttgcagtgatccragatcacgccactgcacctcagcctgggcaataagaacaaaactccatctcaaaaaaaaagaaatgaaaagtagatctaccattcaatacagcaatgcca

SEQ ID NO: 194319 - DNA, 201 bp, Homo sapiens
tgagtgagctctgaccaccatttcccaaaaacagcaccccttgtcagcaggaagcagtaaagattgatcttccttatgctctttcaaatagcattcagatrtacttctttacaagggggaaagagacagccaggtaggaggtggtccccagagaatctccaaagagcttgaacactgagaagaatgttcactggggtggaa

SEQ ID NO: 194320 - DNA, 201 bp, Homo sapiens
gagcatggaggtgggcacctacaatcccagctacttgggaggctgaggcaggagaatcttttgaatctgggaggcggaggttgcagtgatccgagatcacrccactgcacctcagcctgggcaataagaacaaaactccatctcaaaaaaaaagaaatgaaaagtagatctaccattcaatacagcaatgccattactgtg

SEQ ID NO: 194321 - DNA, 201 bp, Homo sapiens
caagtgtttgtctttttcaggccaaaatcatttagagctctttctgcagacattacacataacacacacgcagacaggcaggagaaaacccagttcctggrtggggttttataagagccaggccaaggaaaacatgcagatatcaaacctgaaaaagagtcagtccctaaggcaggataagcccctactttgtgcaacaaa

SEQ ID NO: 194322 - DNA, 201 bp, Homo sapiens
cggaggttgcagtgatccgagatcacgccactgcacctcagcctgggcaataagaacaaaactccatctcaaaaaaaaagaaatgaaaagtagatctaccwttcaatacagcaatgccattactgtgtatctatccccccaccaaaaaaagagtcattatatgaagaaaaaaaaaacatgcacacatatgtttattgcaat

SEQ ID NO: 194323 - DNA, 201 bp, Homo sapiens
agagatgtgagtaagagcaagggtagaacgctcattcaaaaaaatagtaacaaaaaacttttcaaaacttgagaaacataaaatgtccaggtacagaaagrtcttagaacacaatgcaaacccaaataagactaccccaattaacaaaataatcaaagtcacaaaggacaaaaaaaaatacattaaagaaaaaagattgaa

SEQ ID NO: 194324 - DNA, 201 bp, Homo sapiens
cactatgattgcaagcttcctgaggcctcctgagaggtagaagccactatgcttcctgtatagcatacagaatgtgaggcaattaagcctctttactttayaaattactcaatgtcaagtaatttttatataaatgagagaaagacaaactgatatggtcactaagcttccccatcttatcaagttccctggtagacctgt

SEQ ID NO: 194325 - DNA, 201 bp, Homo sapiens
tctctgacaacacataaagaactaatttaaaatacatcaacaacccaaagttaacaaacagaagtacaaaacccagaatagaaaaagtaaatcttttctaycttcaatttggcaatggtttctaggacaaggcaacaaagtcacaaaaaactaagttaaaatggataaactgatattcttataaatgaatatgtttgttct

SEQ ID NO: 194326 - DNA, 201 bp, Homo sapiens
ggatcccagtggatataaaatgatctttcattgtggatttaatttgcattttccttgtggctaaagacataaccatcttttcatgcacttactggcaagtmattcgtcttcttttgagaaaattttattcctatcttttgaacatttctaacatttttatcttattattgattcataagaattatttttatattattggtg

SEQ ID NO: 194327 - DNA, 201 bp, Homo sapiens
tctgtgtttcagcaagctcaagcctttcatacattattgcatcaaaacacctcacccttacttgtatgtttcatctgcctcgtagccaggctcgagctatkgtgcaagcctgtcccacttgccagtatgtccctggtgatatacccataaaaggatgtaacccacgaggcttagctccaaatgaaatctggcaaatgggta

SEQ ID NO: 194328 - DNA, 201 bp, Homo sapiens
tgtaatggtaatagaatggctttttctatccaatcaaacagtaaaatctttacaagtttatctttctttaattactcaacttataactatggataggcatmgatcaaaaatgtttacaggatatgacccagacaaaattattgttcccttggatttccaacaacaggctgcagcatgggaaatgttgactgcttggcaaat

SEQ ID NO: 194329 - DNA, 201 bp, Homo sapiens
gcctcctggctacagccacaaaagcctttgcttctgtttattcttccaaccccctactctccaataggacttttgggcccatttatagacaagtttgtaayggtaatagaatggctttttctatccaatcaaacagtaaaatctttacaagtttatctttctttaattactcaacttataactatggataggcatagatca

SEQ ID NO: 194330 - DNA, 201 bp, Homo sapiens
actgaaagaagtgttcgacttcagaaagtaactctccgtagggacagattacaaacactgaaagatttccaacaattgttaggggatattaattggctgcrcctgatgataggtattgctacttatcgactcaaacacctttatcagaccctccaaggagattcttcattagactctccttggcaacttactaaggaggca

SEQ ID NO: 194331 - DNA, 201 bp, Homo sapiens
acccttccacgagaaggataagcctcgatttgccttctctgtgctttctatccatcaaagacaacctggttctcattatcaatggaaagttttaccacaargcatgcttaacagtcctgtgctatgtcagcattttgtaggacaggcattaaaggagcctcggaatatgtttcctactgcttacatcgttcattatatgga

SEQ ID NO: 194332 - DNA, 201 bp, Homo sapiens
aacccatggtttccacagatgggcactctcgatgtggaaatttggaacagaataggagaaggattaaaacgagctcatcaaaaaggtcttaaagttgaccyttctgatttctccacttggagtttgtttcttactgtctgtctgccattatctccttattctgctggacagcaggagtcatgttctgagtctaaaaattta

SEQ ID NO: 194333 - DNA, 201 bp, Homo sapiens
atgttccccttcctgtgtccatgtgttctcattgttctattcccacctatgagtgagaacatgcggtgtttggttttttttccttgtgatagcttgctgaraatgatggtttccagcttcatccatgtccctacaaaggacaggaactcatcattttttatggctgcatagtattccatggtgtatatgtgacacattttc

SEQ ID NO: 194334 - DNA, 201 bp, Homo sapiens
ctggcagctaatataaggttagtgccctaaagaggtactgggaatgggaagttttctgaatcagggtaacatggggcagaatctatctattcaggagcaayattatgtgcagttgcttaaagttttacttaaacaatctggtgctcaggttagttctcaaacattaactaagatgctgaagaaggtcactgtacataaccc

SEQ ID NO: 194335 - DNA, 201 bp, Homo sapiens
atttttagtattatcattattttaagatacaatttgcatagcataatatttacctatttaaaagtgagatctaaaagtagttagtacatttacatagttayaaagccatcaccataatataatttttgaacatttttatcaccctaaaataaacctcaaaatgcataaaatcactgttgataaacctccagtcctagggaa

SEQ ID NO: 194336 - DNA, 201 bp, Homo sapiens
gtgacaagtggtgcccaggacagggacatgagcaaagaaggtctgctggagcagagaaagtgaaactgaccagatgagcaagaaaccttgggacaagtctrctggcagctaatataaggttagtgccctaaagaggtactgggaatgggaagttttctgaatcagggtaacatggggcagaatctatctattcaggagcaa

SEQ ID NO: 194337 - DNA, 201 bp, Homo sapiens
catttttttctaaaataaggaaaagactagacattcattcttattacttctattcaacattatattggagattccagccaaagcaaataggaagtaacacraaacaaaaataatccttattagaaggtaagaaataagtacactctctttgttgacaaaaggcatgaccttatgtaaagaatatcttagactttcctagaa

SEQ ID NO: 194338 - DNA, 201 bp, Homo sapiens
taaatataaagtgtgtaagtgtatatcataatatttctcagcctaagcaaattcctacaataaaatcctccctcataggtgtgtactaatgtgtgtgtatwcatacatggctctttttgtctggagacacctattatgaagattaactcatttttttctaaaataaggaaaagactagacattcattcttattacttctat

SEQ ID NO: 194339 - DNA, 201 bp, Homo sapiens
attggacactagggtttgcactagtaaaccccacttgtagctccttaagttctaaggccatcatcctcagacaaataattacacaactatttctcctagtkctaaggccttcagtctcagattgaattacagcatcagctttcctaaatataaagtgtgtaagtgtatatcataatatttctcagcctaagcaaattccta

SEQ ID NO: 194340 - DNA, 201 bp, Homo sapiens
cattgtatatttaagctaaggcaattagacaatgacagaaaataagaaacatgcatattgaaaaagaagttaatacaattacatatgtcagtacatgatayaactttacatagagaatatcttaataaatctagtataaaatattagatcaaaaacaaataaataaccttgtcaggataaaagattgatatataaaaatca

SEQ ID NO: 194341 - DNA, 201 bp, Homo sapiens
cataccaacaaatcatataactcaataaaatgagcaaatctctcaaaagacactaactatgatatgcaattgacagaaactgaaaatagaaatagacttawaataaaaaataaaaatattcaataaaaccagaatgatgttaaatgtcatgaaactgataaaagacagctatgaaaagtctaaaactattattatgtgtat

SEQ ID NO: 194342 - DNA, 201 bp, Homo sapiens
aatattacagtacattgctaggagcaaatgcataccaacaaatcatataactcaataaaatgagcaaatctctcaaaagacactaactatgatatgcaatygacagaaactgaaaatagaaatagacttataataaaaaataaaaatattcaataaaaccagaatgatgttaaatgtcatgaaactgataaaagacagcta

SEQ ID NO: 194343 - DNA, 201 bp, Homo sapiens
aggaaatagataaattcctggaagcataaaacccttctagattaaatcaggaagaagtagaaaccctgaacagaccagtaacagtgggattgaattagaarttaaagaaattaccaccaacaacaaaatatacaggtccagaagaattcagagctgaattataccacacactcagagaataattagtatcaattattccca

SEQ ID NO: 194344 - DNA, 201 bp, Homo sapiens
ccaaaacaaatcatcacttgaccggaaaagcctcaataagtttaagaggattgaaatagtatgtgttattttctgaaaatacaaaggaataaccttcaatrtcagcagttttaaaaaattgagaaattcacaaatgattacacattaaacaacataattcaaaataacaaagataaaatcaaaagaaaacagaacaaagtt

SEQ ID NO: 194345 - DNA, 201 bp, Homo sapiens
acagagtgatcaaaatttctgggaaacagcaaaagtagtgctaagactaaggttcatagcattaaatgcctacatcaaaaaggctgaaagagcacaaattsacaatctatattgtcacaactcaagaaacactagaaacaagaacaaactaaacccaaagccatcagaaagaaagaaataggaaggatcagagcagaacta

SEQ ID NO: 194346 - DNA, 201 bp, Homo sapiens
gatctgataaataaatcagtaaaattgttctctgtaaaatcaggaaaatcaaaatcatatcaagtatcttcttagaccatagtgaagtaaaactggaaatyaactccaaaaagaaccctcaaagctatataaatacatgaaaactaagtaatttgctcttcaatgatttttgggtaaaaatcaagatggaaattaataaat

SEQ ID NO: 194347 - DNA, 201 bp, Homo sapiens
ggttggagtgcagtggcgcgatcacggctcactgcaaactctgccccccgggttcatggcattctcctgcctcagcctcccgagtagctgggactacaggygcccaccaaggcgtctggctaattttttgtattttgagtagagatggggtttcaccgtgttagccaggatggtttcaatctcctgacctcatgatctgca

SEQ ID NO: 194348 - DNA, 201 bp, Homo sapiens
gcctcccgagtagctgggactacaggtgcccaccaaggcgtctggctaattttttgtattttgagtagagatggggtttcaccgtgttagccaggatggtytcaatctcctgacctcatgatctgcacgtcttggcctcccaaagtgctgggattacaggtgtgagtcaccacgcctggccaagcctctttttcttcacag

SEQ ID NO: 194349 - DNA, 201 bp, Homo sapiens
ttttgagaagatactaggagtggaatttctgagccatatggaaagttgatgtttatgaagaactgctaaactgtttttcaaagtacttgcaccgtttttcrttacttctagctgtacaggagggttccaatttcttcatgctcttccctacacttgttatctcctatctttttgttacagggatcccagtggatataaaat

SEQ ID NO: 194350 - DNA, 201 bp, Homo sapiens
gggtttcaccgtgttagccaggatggtttcaatctcctgacctcatgatctgcacgtcttggcctcccaaagtgctgggattacaggtgtgagtcaccacrcctggccaagcctctttttcttcacagtatctggtttgtctttatcaacagtgtgaaaacagaaaaatagagtaaattggtactagtagggtggggcatt

SEQ ID NO: 194351 - DNA, 201 bp, Homo sapiens
accgctttttcttcccagtctcaggtatgtctttattagcagtgtcaaaatggactaatacaagtgtagatgcaaaagtcctcaaaaaatacaagcaaacyaaactaataatacattaagaagataattttctagggtaacacagaattcgtgcaagggaggagggaaggatgtttcaatacatgcaaatcagtaaacatg

SEQ ID NO: 194352 - DNA, 201 bp, Homo sapiens
actataacacactccaaaaagcagctacatatttaatattatcaagtgcatattaatatttccaaaacaaatcatcacttgaccggaaaagcctcaataartttaagaggattgaaatagtatgtgttattttctgaaaatacaaaggaataaccttcaatgtcagcagttttaaaaaattgagaaattcacaaatgatta

SEQ ID NO: 194353 - DNA, 201 bp, Homo sapiens
cctccccagccatgtggaactctaagtccaattaaaccgctttttcttcccagtctcaggtatgtctttattagcagtgtcaaaatggactaatacaagtrtagatgcaaaagtcctcaaaaaatacaagcaaaccaaactaataatacattaagaagataattttctagggtaacacagaattcgtgcaagggaggaggg

SEQ ID NO: 194354 - DNA, 201 bp, Homo sapiens
cctctatttcactcttaaaaatacacaaaaatttaaaaaaagatcaacaaggaaatagaatactagaagaacactataaatcttctagctctaacacacawctataacacactccaaaaagcagctacatatttaatattatcaagtgcatattaatatttccaaaacaaatcatcacttgaccggaaaagcctcaataag

SEQ ID NO: 194355 - DNA, 201 bp, Homo sapiens
tgccattcacctcctgctctgattctgaggcctccccagccatgaggaactttaagtctaattaagcctccttttctttcttttcttttttttttttttttgagacagagtctcgctctgtcccccaggttggagtgcagtggcgcgatcacggctcactgcaaactctgccccccgggttcatggcattctcctgcctca

SEQ ID NO: 194356 - DNA, 201 bp, Homo sapiens
gttttcattcttctccatgagagccatggaccactgctgcttctaatcagccatcttggcccaccccctctatttcactcttaaaaatacacaaaaatttwaaaaaagatcaacaaggaaatagaatactagaagaacactataaatcttctagctctaacacacaactataacacactccaaaaagcagctacatattta

SEQ ID NO: 194357 - DNA, 201 bp, Homo sapiens
agaatttattcactgttttcattcttctccatgagagccatggaccactgctgcttctaatcagccatcttggcccaccccctctatttcactcttaaaartacacaaaaatttaaaaaaagatcaacaaggaaatagaatactagaagaacactataaatcttctagctctaacacacaactataacacactccaaaaag

SEQ ID NO: 194358 - DNA, 201 bp, Homo sapiens
ctcccctggcttgtggcactctggggtgggctgtcatcccactccgctttttctcactctctgagttgtgccaactgctaagtcagtcccaatttgagaaycttaattcctcagttgaagttgcagaatttattcactgttttcattcttctccatgagagccatggaccactgctgcttctaatcagccatcttggccca

SEQ ID NO: 194359 - DNA, 201 bp, Homo sapiens
caccaaatggcaattgagagctgcagaacctgcaattacctttattcaattaatgaaaaaacaaaaagagggagatgttacaggccaaaagaatgagggtygtgaccaactcagcataccactggaggctatatgagcaaacagaaaactgttctcatgaaagcaggatgttggaaaactgatgactatgtctgcccccag

SEQ ID NO: 194360 - DNA, 201 bp, Homo sapiens
tatatatatatgtataatttttttgagacagagtcttgctctgtggccaggctggagtgcagtggcacaatctcaataaccagtaatattttgaaaaatartttagtccttgcatttccgattttcaaccaacaacatatcatcaatagttataagagtgtgacacaggaacacagatcaccatataaataaatggaacag

SEQ ID NO: 194361 - DNA, 201 bp, Homo sapiens
cagccttgtggaagatccctgtttcccctttttttttccttttcacccaataaaaccctgctttactcacctgttgaaccatctgccagcctaaattttcrtggccctgagatggacaaagacaccattgcgttatttagtccacctatttacactgtaatgacatctgctttttaccattaatctttaagcctcttccta

SEQ ID NO: 194362 - DNA, 201 bp, Homo sapiens
cctgggcttaacatgtcacctagaactaaagtgaatgcagtgacttttcggtaaagattttctaagcaaatatattccattaaaaaaagacagaaaaaaaatggaacaaataatccttcaatgcaaaggcatgcatatattcacaagaaacaacagagaacagggaaccaggacctctccaaaaggacaatgcaaaaatct

SEQ ID NO: 194363 - DNA, 201 bp, Homo sapiens
agaatgagactccatctcaaaaaaataaaataaattgcgaaacttaaaacttaaattgtaaaagttactaaatattgaggaataaaattcttaatgaatamataaaatctcatattcctcaattgaaaatcttaattaataaacaaattaaccaaaatccatattaaattcccagctgggttctttacagaaataaacatg

SEQ ID NO: 194364 - DNA, 201 bp, Homo sapiens
tgttattcctgacttcattaaaaatcaggtggcagtaggtgtgtggctttattatttggttctctattctgttccattgctctatgtctctgtttttgtaytactaccatgctgttttagttactacaggcttttaatatcctttgaaattaggtaatttgatgcctctggctttcttcttttagtttatgatttatttgg

SEQ ID NO: 194365 - DNA, 201 bp, Homo sapiens
tttcttcattgcttgttattcctgacttcattaaaaatcaggtggcagtaggtgtgtggctttattatttggttctctattctgttccattgctctatgtytctgtttttgtactactaccatgctgttttagttactacaggcttttaatatcctttgaaattaggtaatttgatgcctctggctttcttcttttagttt

SEQ ID NO: 194366 - DNA, 201 bp, Homo sapiens
tgttttctcctattctgtaggttatctgtttatgttattgaatgtttttctgtgcacaagttctttagtttaattaggtctcacttgtcaattttttttttgttacaatttccttttggggtaattgtcataaaactttggccagggcttgtatccaggatggtatttctgaggttttcttctcatatttatatagtctta

SEQ ID NO: 194367 - DNA, 201 bp, Homo sapiens
atgttttctcctattctgtaggttatctgtttatgttattgaatgtttttctgtgcacaagttctttagtttaattaggtctcacttgtcaattttttttttgttacaatttccttttggggtaattgtcataaaactttggccagggcttgtatccaggatggtatttctgaggttttcttctcatatttatatagtctt

SEQ ID NO: 194368 - DNA, 201 bp, Homo sapiens
acagtatctggtttgtctttatcaacagtgtgaaaacagaaaaatagagtaaattggtactagtagggtggggcattgctgaaaagatacccaaaaatgtrgaagcgactttggaactgggtaataggcaaagattggaacagtttggagggctcagaagaagacagaaaaatgagagaaagtttggaatttcatagagac

SEQ ID NO: 194369 - DNA, 201 bp, Homo sapiens
cgacctcacctggttccaataccacaacttgcatgtgattaggttcctgctggcctatgtgtcaactgtgatcttcatcatcacaagatgttgcctgtttyctttctgaaagtttgctaaaacaggaaagaaggagaaaagggattagttacataaaaggcttgaagctggaatgaccaaaagatagaattccttcagtta

SEQ ID NO: 194370 - DNA, 201 bp, Homo sapiens
tagacacttactctcatatgttacatgctacgtgtcaaacagaaagagctggccatgtacagcggcattgtttattgtcattcgcccatatgggtgttccyaaaccaataaaatctgacaatggacctgcttatgttagtcatgcttttcaaaattttttatagttatgggaaattactcataagacaggaattccttaca

SEQ ID NO: 194371 - DNA, 201 bp, Homo sapiens
aaacctgcacgttgtgcaaatgtaccctagaacgtaaagtataatagtaaaaaaaagaaaatatttgtgcctattgggcctcagctctattaatatttctrgtgcagttactaatcactcctggtctcatcgcccaaattgtattaattatacagaatgggttccctttgataattctaactcccctccttggacccagtg

SEQ ID NO: 194372 - DNA, 201 bp, Homo sapiens
gcatcagctcttgcccagattccacgaaaggttagataaaatgtcttaatggtggacagctactgaatgagtctgttaaactctgtaaagagtccaatcayagaaattttctgccagaaaaactaactgatatgatagctctaattatctcagatattggttcaaaaacaaaaatatatatggaagatactaaaataacga

SEQ ID NO: 194373 - DNA, 201 bp, Homo sapiens
ttttctccctaatcttgccaacacctgtcattttgtgctttttaatgatattcattctgactaggggggatggtatcttatagtggtttttatgattttcwtttctctgatgattagtaatgttgagtattttttcatatgcttgttggccatgtgtacttattcttgagaagtgtctgttctcttttggccactctttag

SEQ ID NO: 194374 - DNA, 201 bp, Homo sapiens
ttacattcccacgaacagtgtatgagcatcctcttttctccctaatcttgccaacacctgtcattttgtgctttttaatgatattcattctgactaggggrgatggtatcttatagtggtttttatgattttcatttctctgatgattagtaatgttgagtattttttcatatgcttgttggccatgtgtacttattcttg

SEQ ID NO: 194375 - DNA, 201 bp, Homo sapiens
tcctttatgcatcacccaggatacatcactcaactgcagtttccttgcaatttaatcccaggcatgattgagttaccatagaaaatatatgtgccacgcarccatgtatacaaatgtaacaaacctgcacattgtgcacatgtaccctagaatttaaagtataatttaaaaaattgtctttcctgacacctggcttttcaa

SEQ ID NO: 194376 - DNA, 201 bp, Homo sapiens
ttctacagtggctgaactaatttacattcccacgaacagtgtatgagcatcctcttttctccctaatcttgccaacacctgtcattttgtgctttttaatratattcattctgactaggggggatggtatcttatagtggtttttatgattttcatttctctgatgattagtaatgttgagtattttttcatatgcttgtt

SEQ ID NO: 194377 - DNA, 201 bp, Homo sapiens
gagccagttgaatctgaatgcaaagacatggggacagatcaagaaaaccacacaaaaagctgagaaactgctagagcgtcagggtgaggcaaaaacccctwactccaagtttatggccatgtcagctgtaatatcctgtgcagtatgttttccctgtgcagaggcaaaaacatattgggcatatgttcttaacctcccagt

SEQ ID NO: 194378 - DNA, 201 bp, Homo sapiens
gttgataaacgtaggtgtgcatgtgtctttctggtagaacaacttacagtcctttgggtatatacccagtaatgcgattgatgggtaaaatggtaattctrttttaggttatttgaaaaatcttcaaactgctttctacagtggctgaactaatttacattcccacgaacagtgtatgagcatcctcttttctccctaatc

SEQ ID NO: 194379 - DNA, 201 bp, Homo sapiens
ccagctcctccaatatgagccatgagccagttgaatctgaatgcaaagacatggggacagatcaagaaaaccacacaaaaagctgagaaactgctagagcrtcagggtgaggcaaaaacccctaactccaagtttatggccatgtcagctgtaatatcctgtgcagtatgttttccctgtgcagaggcaaaaacatattgg

SEQ ID NO: 194380 - DNA, 201 bp, Homo sapiens
gctattatgaatagtactgtgatgctgttgataaacgtaggtgtgcatgtgtctttctggtagaacaacttacagtcctttgggtatatacccagtaatgsgattgatgggtaaaatggtaattctattttaggttatttgaaaaatcttcaaactgctttctacagtggctgaactaatttacattcccacgaacagtgt

SEQ ID NO: 194381 - DNA, 201 bp, Homo sapiens
tctttatccaggccaccattgttgggcatatagattgattccatgtttttgctattatgaatagtactgtgatgctgttgataaacgtaggtgtgcatgtrtctttctggtagaacaacttacagtcctttgggtatatacccagtaatgcgattgatgggtaaaatggtaattctattttaggttatttgaaaaatcttc

SEQ ID NO: 194382 - DNA, 201 bp, Homo sapiens
gcttttcaaaattttttatagttatgggaaattactcataagacaggaattccttacaatccctgaggacaaggcattatagagctggcacatcaaacatrcattacatttattaatgtaattgatgtaactaacatacagtgtatgttgaaaaaaacaaaaagggggagtaggagaccagctaccacctcaaataaaatt

SEQ ID NO: 194383 - DNA, 201 bp, Homo sapiens
aatatgtggtatttggttttcctttctggtggtaatttgcctagggtaatgaattccagctgcatctgtgttgctcaagagacatgattttgtttttttttcattgctgcatagtattccatcatttatatgtgtaccatattttctttatccaggccaccattgttgggcatatagattgattccatgtttttgctatta

SEQ ID NO: 194384 - DNA, 201 bp, Homo sapiens
catgtacagcggcattgtttattgtcattcgcccatatgggtgttcctaaaccaataaaatctgacaatggacctgcttatgttagtcatgcttttcaaawttttttatagttatgggaaattactcataagacaggaattccttacaatccctgaggacaaggcattatagagctggcacatcaaacatgcattacattt

SEQ ID NO: 194385 - DNA, 201 bp, Homo sapiens
atataaatgccacaaaaaataattgcacaactatgatggttaattttatgtgtcaacttgactggtttaagagattaccaaatagctaaaaaaaaaaaaaattatttctggatttatctgtgagagcatttcatttttcctcctctaaattttactttaggttcagaaggttaaagtgtcaacttcttcatgagtaaattt

SEQ ID NO: 194386 - DNA, 201 bp, Homo sapiens
agctacaaagagaatgctatgaagttatcaataattcgccatgatttgccaattaagcccctggatcaagcagccttctggattgagtttgtcatgcagcrcaaaggagccaagcaccttcgggttgcagcccacgacctcacctggttccaataccacaacttgcatgtgattaggttcctgctggcctatgtgtcaact

SEQ ID NO: 194387 - DNA, 201 bp, Homo sapiens
caatgttacttttgatattaatgatttacaaagtaaaatccttaacttcgataagcaaactcaagtgtttcagccctgtttaaaagcttgggcagaattcsaacaaggtttagagagccttaacccttggacctaccgcaaacagcaactcaatgtctttgttgttactattggattaatgttattatgtttctgtttttt

SEQ ID NO: 194388 - DNA, 201 bp, Homo sapiens
aataagcacaaaacaatagaggaaatcctacaggtactaccatagtgtggccacgaaaagcctctttaacaggtattatttaaggggaagcctcaaaaagwtatagaagcaagcctcaagttgttgcaaggaggaatattccaagagagggagagaggggataaagggtgtaaaggggctcaggtgagaacacattgggga

SEQ ID NO: 194389 - DNA, 201 bp, Homo sapiens
gcaatgcatcgctctattcaaacagctcaatatgtagaaaattggacacgcacagctggccaggcatggatgcttcaaaataaaattaacgctgaaatatraacagaggtggcaatgttaaaggctactgttctttggctaggagaacaaataacaaagtttgcagttgcatcagcaattgcattgtcattttaatcatac

SEQ ID NO: 194390 - DNA, 201 bp, Homo sapiens
cccaaaaaaagacacaaatgagtatatattatataattcattatgtaaacaagcaatattaatctattagaagtcaaggtagttttaacttgaggacaaamgtagtgactaaaatggcccaagaagacagagtttttctaggcaggttgtgatgtcttatattataatctgcgtagtaggtaagttggtgttcacatcagg

SEQ ID NO: 194391 - DNA, 201 bp, Homo sapiens
ctcagcaactcatctctcaagtatatacccatcaaaaatgtattaatatgtatatctaatgatatacacacatttgcttaccccagaattagtaatagtgwtcaaaaatcttaacaacccaaatatccatcagtcataaaaataggagataatctgtggtatttgtcaattgactgaatcatattacagcaatggaattag

SEQ ID NO: 194392 - DNA, 201 bp, Homo sapiens
ggagggaacagaatcctgcttttagggtagactccgtgcattataaaatgtggtcccataaagcctctgctctaaccatcagaaaaacacctcctcccaayggaggaaggagaagggaatataagaaggagtcaagcagaaggaagccaggcatggaaagaggttcagatgccctcactccatgaaatatagtaggaactt

SEQ ID NO: 194393 - DNA, 201 bp, Homo sapiens
tcttccactgaggattaagtgcccctgtgagacacagaaaagtgatgatgagggtccctcacaggcagttataggtagcacatcagttgtttgtttggttkgtttgttttgttttgttttgttttgagatggagtctcgctgggtcgcccaggctggagtgcagcggcacaatctcggctcactgcaacctccacctcccg

SEQ ID NO: 194394 - DNA, 201 bp, Homo sapiens
tattcaattttgacattatatactgaaaacttttggcgctacatttctctttctctttattttgtcttgataggcgtatgcactgagcaatgtggaattayactatgcatttacatttacaaatgagaacataagggaaaccacaattcagagtaattctcaataaatttcaagcaaacacatattcaacaagggctttat

SEQ ID NO: 194395 - DNA, 201 bp, Homo sapiens
tcatctaagacccaaaaaagaatgcaaccttttaactcttatctatgacatgaaggcatcactttgaattgccccacctttcctgaccaaaccaatgtacrtcatacgcatattgattgatgtctcatgtctgctaaaatgtgtaaaaccaagctgtgccccaaccaccttgagcacgtgtcattgagactttctgaggca

SEQ ID NO: 194396 - DNA, 201 bp, Homo sapiens
tggtaatactctgcagaacaaatactgaatatatgactaacagctaattagaaggatagttcaacctgaaagaaacttacggaacatttattatcaaaaaactcaaatataaaggctaactactttatatttattttccagtcttaccaggaaaataactatatagttggtattttattatagacactcacattctttatg

SEQ ID NO: 194397 - DNA, 201 bp, Homo sapiens
aatagaataaaaaccataataaaagcatacaaatttaaatcaggaatagctctagacagagagtatgagggaaatttaatttttttaagcttttcatactytaatattttgtacactgatatattattttcatgaagatatcccagaatgagatcactgatgagtgtataaacagacaatatgctacctcaatattgggtg

SEQ ID NO: 194398 - DNA, 201 bp, Homo sapiens
tgaacccaggaggcgagggttgcagtgagctgagatggtgccactgcactccagcctgggcaacagagcaagactccatctcaaaaaaaaaaaaaaaaaaagaaagaaaagaaaaaagaaaagaaaagaaagaaattgtcacttgaaatttttcttggatgtagtgctgggtaatgtgtaatctacaagaagttatatgta

SEQ ID NO: 194399 - DNA, 201 bp, Homo sapiens
ttgaacccaggaggcgagggttgcagtgagctgagatggtgccactgcactccagcctgggcaacagagcaagactccatctcaaaaaaaaaaaaaaaaaaagaaagaaaagaaaaaagaaaagaaaagaaagaaattgtcacttgaaatttttcttggatgtagtgctgggtaatgtgtaatctacaagaagttatatgt

SEQ ID NO: 194400 - DNA, 201 bp, Homo sapiens
ctcactgctcatagccaggtaatggttccaatgactcccaactaaaaatactctacagaaagaacaaacaaacaaacaaacaaaaaaccctgccttaataracacaaggaatttagtagaactacaacatatggaattaaacacaacaaatgccaccttccaagaacccatattagtaattacagtattgtaaatgaagag

SEQ ID NO: 194401 - DNA, 201 bp, Homo sapiens
ggtataaagaattacagagctaaagaaatagacatataaaattatttcaatagtaacttttcctcactgctcatagccaggtaatggttccaatgactcccaactaaaaatactctacagaaagaacaaacaaacaaacaaacaaaaaaccctgccttaatagacacaaggaatttagtagaactacaacatatggaatta

SEQ ID NO: 194402 - DNA, 201 bp, Homo sapiens
gctgtgaaacaatttttccttaaaaatatcaaaatgggtcgataaaggtagttcacacctgtagtcccagaaatttggaaggctaaagcaaaaggatcacwtgagcccaagagtttgaaaccatcctgggcaaactggtaggactccatctctacaaaaaaatatttaaaaattactgggcaaagtggtgcatgcctgcag

SEQ ID NO: 194403 - DNA, 201 bp, Homo sapiens
attctacatgcatctttttctcagcaactcatctctcaagtatatacccatcaaaaatgtattaatatgtatatctaatgatatacacacatttgcttacyccagaattagtaatagtgttcaaaaatcttaacaacccaaatatccatcagtcataaaaataggagataatctgtggtatttgtcaattgactgaatcat

SEQ ID NO: 194404 - DNA, 201 bp, Homo sapiens
ctgtgttcatgtgactgtagacacttactctcatatgttacatgctacgtgtcaaacagaaagagctggccatgtacagcggcattgtttattgtcattcrcccatatgggtgttcctaaaccaataaaatctgacaatggacctgcttatgttagtcatgcttttcaaaattttttatagttatgggaaattactcataa

SEQ ID NO: 194405 - DNA, 201 bp, Homo sapiens
gtatattgagaatatacgtttattaagagtatatggaatagttagtgaattgaacttctgctgggccaaaaatcaggacttagcaaatgtgataagattcraaagcataaaaaggaaatgctctagccatactagaaataaattcgaaattatccaaaaaattataacttaaaaaacaactctaaattttggaaattaaat

SEQ ID NO: 194406 - DNA, 201 bp, Homo sapiens
gcctttggcaagcttagctgtgttcatgtgactgtagacacttactctcatatgttacatgctacgtgtcaaacagaaagagctggccatgtacagcggcwttgtttattgtcattcgcccatatgggtgttcctaaaccaataaaatctgacaatggacctgcttatgttagtcatgcttttcaaaattttttatagtta

SEQ ID NO: 194407 - DNA, 201 bp, Homo sapiens
agtctccttagttacattgataacctctgttgtgatgtcctcagtagcaatgcatcgctctattcaaacagctcaatatgtagaaaattggacacgcacasctggccaggcatggatgcttcaaaataaaattaacgctgaaatatgaacagaggtggcaatgttaaaggctactgttctttggctaggagaacaaataac

SEQ ID NO: 194408 - DNA, 201 bp, Homo sapiens
aaaatagtttaaaagcaaacaggaaagaattagaaaagaaacatacagcagattggaaaacagaaaataaaatacagaataagatagtagatttaaaagtraatctactagaactcatactaaatttaaacagagaaaaaaaagtgacttaaaaataaacatttgaagagcataaatataacctattgtatatatgtgtgt

SEQ ID NO: 194409 - DNA, 201 bp, Homo sapiens
tttaatattgagaaaataaatctgtaataatttttctgtgctccaaaagaaataatgtagaaaatgctgtgactattgattactattatcaatatatatawggaggtaccaccttagaaaatatactgaaaataccttaccaggaagataataagacagtgaatgattaaaaatagtttaaaagcaaacaggaaagaatta

SEQ ID NO: 194410 - DNA, 201 bp, Homo sapiens
tgattgactctgtgtttcagcaagctcaagcctttcatacattattgcatcaaaacacctcacccttacttgtatgtttcatctgcctcgtagccaggctygagctattgtgcaagcctgtcccacttgccagtatgtccctggtgatatacccataaaaggatgtaacccacgaggcttagctccaaatgaaatctggca

SEQ ID NO: 194411 - DNA, 201 bp, Homo sapiens
tgctatagtctccttagttacattgataacctctgttgtgatgtcctcagtagcaatgcatcgctctattcaaacagctcaatatgtagaaaattggacaygcacagctggccaggcatggatgcttcaaaataaaattaacgctgaaatatgaacagaggtggcaatgttaaaggctactgttctttggctaggagaaca

SEQ ID NO: 194412 - DNA, 201 bp, Homo sapiens
taaccatcttttcatgcacttactggcaagtcattcgtcttcttttgagaaaattttattcctatcttttgaacatttctaacatttttatcttattattsattcataagaattatttttatattattggtggaatgccttgtcagtctatgatttttaaatattttctcccactctttataggttgattcttttttttta

SEQ ID NO: 194413 - DNA, 201 bp, Homo sapiens
ttatctgtaggaatatctgaagcctgttgtacaaagaaagaaattatgtgtacctgtgataaatcaagcagctgaccaaccattacctcttcctccctgcycttttcacctaataaatatgaagggctgtagaagctcaaagcctttgttcactagaagcaaggagcccctgacaccttcttttaaaacagatctttttgt

SEQ ID NO: 194414 - DNA, 201 bp, Homo sapiens
gtggatgatgcccagtcgacttgtgattcctgtcaactttatcattgccttaatcaaagcacaatacagacacatgatatatccaccctaataattctagrttgcattcccagattatggattcctgtaaatctgtctgaaccttgggtggccacccccattttacatcttataaaactcttttttactcagcttactcat

SEQ ID NO: 194415 - DNA, 201 bp, Homo sapiens
tatcaattcattttttgagtctgaagtcacacacgcccccacctcttcatgtagccttcacttacctccagaagaattaggtgcttctttctctgaaatcygaaagcaattctaatggagtttgatgtgtataataatctgttatttagtagacactgcccctttcagagcattctattgtgcatttctcattttagtctt

SEQ ID NO: 194416 - DNA, 201 bp, Homo sapiens
atgatgagttaatgggtgcagctcaccaacatggcacatgtatacatatgtaacaaacctgcacgttgtgcaaatgtaccctagaacgtaaagtataatartaaaaaaaagaaaatatttgtgcctattgggcctcagctctattaatatttctagtgcagttactaatcactcctggtctcatcgcccaaattgtattaa

SEQ ID NO: 194417 - DNA, 201 bp, Homo sapiens
cacctgtccttttccctacttcagggttaatttcaaaagacactaaaaaataacagtgcctcttttattaccaataactctgcattttctgaaaataaatmctcaatctttttttttttttgagatgaagtctcactcttgtccccaggctggagtgcattggcatgaccttggctcactgcaaccttcacctcccaggtt

SEQ ID NO: 194418 - DNA, 201 bp, Homo sapiens
gcttgtagaacaaatgcttcagtgaagacatgcctcctggctacagccacaaaagcctttgcttctgtttattcttccaaccccctactctccaataggamttttgggcccatttatagacaagtttgtaatggtaatagaatggctttttctatccaatcaaacagtaaaatctttacaagtttatctttctttaattac

SEQ ID NO: 194419 - DNA, 201 bp, Homo sapiens
gaaggaaagcattaggagatatacctaatgtaaatgatgagttaatgggtgcagctcaccaacatggcacatgtatacatatgtaacaaacctgcacgttrtgcaaatgtaccctagaacgtaaagtataatagtaaaaaaaagaaaatatttgtgcctattgggcctcagctctattaatatttctagtgcagttactaa

SEQ ID NO: 194420 - DNA, 201 bp, Homo sapiens
acacttggacacaggaaggggaacatcacacactggggcctgtcatggggtggggggaggggggaaggaaagcattaggagatatacctaatgtaaatgaygagttaatgggtgcagctcaccaacatggcacatgtatacatatgtaacaaacctgcacgttgtgcaaatgtaccctagaacgtaaagtataatagtaaa

SEQ ID NO: 194421 - DNA, 201 bp, Homo sapiens
gcaaggtctggcatccgcggcagccattttaatggactggcctctcttagtaatagatcttaaagattatttctgtactatacccttccacgagaaggatragcctcgatttgccttctctgtgctttctatccatcaaagacaacctggttctcattatcaatggaaagttttaccacaaagcatgcttaacagtcctgt

SEQ ID NO: 194422 - DNA, 201 bp, Homo sapiens
taaaattacatttagccttatttactttaaattttttagctcctgttacagataataagactccggcagaatgacagtggcaaatgttaaagggaaaaaartttacctaaaggtattatagaagtccccagaagaagggcaatggaaaggcccagtagatttactaacgtggggatgagggtatgcttatgtttttacagg

SEQ ID NO: 194423 - DNA, 201 bp, Homo sapiens
caaattaaaccaatgggcgcattacagcaaggtctggcatccgcggcagccattttaatggactggcctctcttagtaatagatcttaaagattatttctktactatacccttccacgagaaggataagcctcgatttgccttctctgtgctttctatccatcaaagacaacctggttctcattatcaatggaaagtttta

SEQ ID NO: 194424 - DNA, 201 bp, Homo sapiens
aagggggagtaggagaccagctaccacctcaaataaaattacatttagccttatttactttaaattttttagctcctgttacagataataagactccggcrgaatgacagtggcaaatgttaaagggaaaaaagtttacctaaaggtattatagaagtccccagaagaagggcaatggaaaggcccagtagatttactaac

SEQ ID NO: 194425 - DNA, 201 bp, Homo sapiens
aattggatgcagaacatatcgaagagtcagttagtccctggaattcaccagtatttgcaattccaaaagagtcattaatgcacaaattaaaccaatgggcrcattacagcaaggtctggcatccgcggcagccattttaatggactggcctctcttagtaatagatcttaaagattatttctgtactatacccttccacga

SEQ ID NO: 194426 - DNA, 201 bp, Homo sapiens
tttgtgcacacacacacacacatgaaccagaataattaacccagaaacagaaaactaaatactatgtgttctcacttaaaagtgggagctaagcttggggyacacatagacaaaaatgggaacaatagacagtggggactactacagagggaagagaagggcagaaggcctgaaaaactattgggtactatgtaaaaatgt

SEQ ID NO: 194427 - DNA, 201 bp, Homo sapiens; identical to SEQ ID NO: 33473

SEQ ID NO: 194428 - DNA, 201 bp, Homo sapiens; identical to SEQ ID NO: 33474

SEQ ID NO: 194429 - DNA, 201 bp, Homo sapiens; identical to SEQ ID NO: 33475

SEQ ID NO: 194430 - DNA, 201 bp, Homo sapiens
tctcctcctgagaaagagatggaagagagaagcgcactgcctcaaagggcacactaaaagcgggtggggagccttaggagtagccagcagagtgaatcatwcaggctgagaactggacaggaccaaggtcccacccagggcaggaattccttcacagtctcccgacagctggtcatcagcctctgcttcaaaaactcccgt

SEQ ID NO: 194431 - DNA, 201 bp, Homo sapiens
ctctcccccatcagcagctctaatggcctctgcttccctcagcacagcacagccaggtcccctgcccccaccccagttctcaccgcggcatcgggcgcaayggctccgtccatattccaagagctctggggcagcccgagaggaagggggacctttccagggttcaggccctcccaggcgaatccgagcagcttcctcttt

SEQ ID NO: 194432 - DNA, 201 bp, Homo sapiens
aacctgtggcacagtctaaaagtgggaggcgggaaggccagggagtaagggatgatcaggggcacatgggcaacaataagagcctcgtggagctcggggcrgctgagttgggcccaggagcaggcgcagccccaatccttatcacgttcctgctgggcctccggcctgtgaccaactcagctgcacctctcccacccaccc

SEQ ID NO: 194433 - DNA, 201 bp, Homo sapiens
accgtggcggcatctttaactggcctccactcaatgggaaactgactcgcctgtgaaagacacagtgggagagctgaaaatgaatcagaagctttatgtawatgatttttaaattaaactttactttttcagactgcccctcccctttttgtaaaaagtccatttactgtaaaatcgttttttccagtttgtctgtggtgt

SEQ ID NO: 194434 - DNA, 201 bp, Homo sapiens
tggctactctgtaacccaatccctagttccttggttttcctgtccagctattttttcttttctttaaagtcttattaaaacaatatgtgctttttgtaagyaatttgaaatgcagaagagtaatgtgaagaaggaaaaaaaagtcacctgtaattccatatccagagagaaccttttacatagacttttttgcatatcctg

SEQ ID NO: 194435 - DNA, 201 bp, Homo sapiens
aagtgattagactgttaggctttgtgtgtgtgtgtgtgtgtgtgtgtgtgtgtgttttgctactctgtaaaaggctgtgtgtgtgtgtgtgtgtgtgtgtkgctactctgtaacccaatccctagttccttggttttcctgtccagctattttttcttttctttaaagtcttattaaaacaatatgtgctttttgtaagta

SEQ ID NO: 194436 - DNA, 201 bp, Homo sapiens
ccccctcgcgatggcgggcatcctgtttgaggatattttcgatgtgaaggatattgacccggagggcaagaagtttgaccgaggtaagtaaggtatgtagkggcggtttggaggaagaggctaacctcgcggacatgcccctgggccccgtgtccacccagctcttgtggcctgcccctaccagcaggtcctggtgtaggg

SEQ ID NO: 194437 - DNA, 201 bp, Homo sapiens
cccattctccactgccacccccaccagcctgccagcccagctgggagtggaaagcctctcacttagggtgggtggagagggcttggtggcctcagccccaytctggagctgcactgagcccagcggtgggttgggggacagcggaggctgaggatggctgggctgtgactgtggatgctggggtgatgggacgggagagtc

SEQ ID NO: 194438 - DNA, 201 bp, Homo sapiens
gactgagtcagaaaagaacagtttctacagatcccttgactggggacttacctgggttccaaggaggctctgcagggccccaaggaggagacggacctgtycagaaagctgccccaggagggatgagaggcaagtgggtcccagttgtccccgtgctgccatcactccctccagcagaagggtcactgctcccagaatgtc

SEQ ID NO: 194439 - DNA, 201 bp, Homo sapiens
ggtatccggggatttggtccagggacctggaggtttggttcagcagaccaggaatcttggctctgaatccctgctgccacttcagaagcccagagccagtwgttctggctgaggcagtgaagtttgtctccaacaatccagaagtcctgtttgggagctcgttcagtgtgaggactagagaggttctgctggggacagctg

SEQ ID NO: 194440 - DNA, 201 bp, Homo sapiens
tagtgtgagaggagcgagggcagcgcccaggaaacgcacaagtgtgcgggagagccagcaccaggagtaaggggcatttgggaggcagaggcggggctcarggggcgggagcagtgcccgggaagggggggccttgtgatagaagccagcactcaggaggaagggccagtgtgagggaagagctggtatccaagggacagg

SEQ ID NO: 194441 - DNA, 201 bp, Homo sapiens
tcatgccacttcctgcacttcctcctgacctccacaggagggaggcaggcgtccatgcctggcaaagcctcctgctgagctgccaaagctctagctgtttkctcagctgtcacatccaggtcctgtctttactgaactgtctacacagccttacctggggtgtgaggctctccaaggcttcctgttagcttttttgtttgg

SEQ ID NO: 194442 - DNA, 201 bp, Homo sapiens
ccccagccccctcagctcctcacccaatgacagcaaaggctggcagctcctgcaggtcaaaggggaagtcgagccggaatcgggttttgaagagggctgtratagtctctaaagggaagaacagcagagggaggcaggcctagcctcgtgggccccctacctggcaccatctcgggctgccctcatcccctgggtgccccc

SEQ ID NO: 194443 - DNA, 201 bp, Homo sapiens
gtaaagtgcaaaggagacttgcttccccaggaataaatgcagcattaagtgattagactgttaggctttgtgtgtgtgtgtgtgtgtgtgtgtgtgtgtgttttgctactctgtaaaaggctgtgtgtgtgtgtgtgtgtgtgtgtggctactctgtaacccaatccctagttccttggttttcctgtccagctatttttt

SEQ ID NO: 194444 - DNA, 201 bp, Homo sapiens
tgtaaagtgcaaaggagacttgcttccccaggaataaatgcagcattaagtgattagactgttaggctttgtgtgtgtgtgtgtgtgtgtgtgtgtgtgtgttttgctactctgtaaaaggctgtgtgtgtgtgtgtgtgtgtgtgtggctactctgtaacccaatccctagttccttggttttcctgtccagctattttt

SEQ ID NO: 194445 - DNA, 201 bp, Homo sapiens
gtgaaaaatgattcccttttcagtcctgtgtatcccttttaccagggctttgggtttcaggagaaagtaggaaatcttgtccagttgtctcccaggggcgycctgcagggaagggagctgtacacgagacaatgctgatgtcggcagtgtctgagaaccttacccttcctgagacagattctgggagtgggtgtaggatgt

SEQ ID NO: 194446 - DNA, 201 bp, Homo sapiens; identical to SEQ ID NO: 33479

SEQ ID NO: 194447 - DNA, 201 bp, Homo sapiens; identical to SEQ ID NO: 33480

SEQ ID NO: 194448 - DNA, 201 bp, Homo sapiens; identical to SEQ ID NO: 33481

SEQ ID NO: 194449 - DNA, 201 bp, Homo sapiens
ttaggcaatttttctaactctgcttctacaagagtttccctatcaattactgaatacccattatgtgtgtgtgtgtgtgtgtgtgtgtgtgtgtgtgtgtkcctcaatcacatgggaggagccatctattgtcctgtcttgaatggagttcctcctaggtcttgtcggtcctctgtatgtaattaagatttaaatcccttg

SEQ ID NO: 194450 - DNA, 201 bp, Homo sapiens
ggagaggcatagctaaggcttcttctttagaaggtggggttgtcctgctttgcctctttgtctcatttatttatttatttatttatttatttattttattttagcctttagtattcttcctttatggtgccccttgcagtgcatctctgccacatcttttaaggcctatacagcatttaagagctgtagaatttcttcctt

SEQ ID NO: 194451 - DNA, 201 bp, Homo sapiens
aggagaggcatagctaaggcttcttctttagaaggtggggttgtcctgctttgcctctttgtctcatttatttatttatttatttatttatttattttattttagcctttagtattcttcctttatggtgccccttgcagtgcatctctgccacatcttttaaggcctatacagcatttaagagctgtagaatttcttcct

SEQ ID NO: 194452 - DNA, 201 bp, Homo sapiens
gaggagaggcatagctaaggcttcttctttagaaggtggggttgtcctgctttgcctctttgtctcatttatttatttatttatttatttatttattttattttagcctttagtattcttcctttatggtgccccttgcagtgcatctctgccacatcttttaaggcctatacagcatttaagagctgtagaatttcttcc

SEQ ID NO: 194453 - DNA, 201 bp, Homo sapiens
ggaggagaggcatagctaaggcttcttctttagaaggtggggttgtcctgctttgcctctttgtctcatttatttatttatttatttatttatttattttattttagcctttagtattcttcctttatggtgccccttgcagtgcatctctgccacatcttttaaggcctatacagcatttaagagctgtagaatttcttc

SEQ ID NO: 194454 - DNA, 201 bp, Homo sapiens
ttagtgtctgatttagcagtaatattatatctatccatgtgagatcaaataattgtcccaaccctcgtaaaacatcaatgtagccatcagggttatctgakaatttagctaggtctattttaatttgtttcaagtctgagagggaaaaaggtacatacactctgactggcctgaattctccagaatacatcttaggggtgt

SEQ ID NO: 194455 - DNA, 201 bp, Homo sapiens
cattgggcacagtggcttatgcctgtaatcccagcactttgggaggccgaggtgggtggatcacctgaggtcaggagtttgagaccagcctggccaacatkgtgaaaccctgtctctattaaaagtataaaagttagctgggcgtggtcgtgggcacctgtaatcccagctactcaggaggctgaggcaggaaaattgctt

SEQ ID NO: 194456 - DNA, 201 bp, Homo sapiens
gggaggagaggcatagctaaggcttcttctttagaaggtggggttgtcctgctttgcctctttgtctcatttatttatttatttatttatttatttattttattttagcctttagtattcttcctttatggtgccccttgcagtgcatctctgccacatcttttaaggcctatacagcatttaagagctgtagaatttctt

SEQ ID NO: 194457 - DNA, 201 bp, Homo sapiens
gaccattaggaccaagtctgaattggaacatgggccaacttgtgcattctagctctgatttccatgacaacccggccattattagcaatttctaggcaacrgttggttaaattaaattttccacatactcttccttcagaggctaagtgataatctaatgccaatctatttcaatatatagcatttctcatttgtgttgct

SEQ ID NO: 194458 - DNA, 201 bp, Homo sapiens
agctcaagtgatattcccaactcagcctcccaaggagctgggaccacgggcaggtaccaccatgcccagctaattttttgattttttgtagagataaggtytcactatgttgcccagactactttcaaactcctgggcacaagtaacccccctgcctcagcctcccaaagtgctgtgattacagatgtgagctattgcacc

SEQ ID NO: 194459 - DNA, 201 bp, Homo sapiens
ggcagggtggctacagtaggccagaagtcccgctccacccctaaacctctcctgatgctataagttttttgttttttttttttttgttttttttttttgaracggagtctcactgtgtcatccaggctggagtgcaatggtgcaatcttggctcactgcaacctctgcctcctgggttcaagcaattctcctacctcagcc

SEQ ID NO: 194460 - DNA, 201 bp, Homo sapiens
atctcaaaatgaaagaaagaaagaaagaaagaaagaaagaaagaaagaaagaaagaaagaaaaaaaaaaagaaaaattaaacgtggggtaacacatatatyttatataatgtccaggcatctttgaggaccacagatatatatctgcatattacaatcatttcaggagattttttaaaatagtagtacttggatgcaacca

SEQ ID NO: 194461 - DNA, 201 bp, Homo sapiens
ctgctgctggatcatctggttagtggcttctgactcagatgaccttcgtcccctcgggcagtgggccttccagtcattcccttgacataaggggcatggayaagggggtggcttatttctattcagacaatctttttaaaagtgtccttgtagactgcactggaagcaggccctattaggcatttgatttgcccagccttt

SEQ ID NO: 194462 - DNA, 201 bp, Homo sapiens
ggtgggagttgaacaatgagaacacatggacacaggaaagggaacatcacacatcagagcctgttgtggggtggcgggaggggggagggataacattaggmgatatacctaatgctaaatgatgagttaatgggtgcagcacaccatcgtggcacatgtatccatatgtaacaaacctgcacgttgtgcacatgtacccta

SEQ ID NO: 194463 - DNA, 201 bp, Homo sapiens
cttatgtggcttgaggcagggtggctacagtaggccagaagtcccgctccacccctaaacctctcctgatgctataagttttttgttttttttttttttgktttttttttttgagacggagtctcactgtgtcatccaggctggagtgcaatggtgcaatcttggctcactgcaacctctgcctcctgggttcaagcaatt

SEQ ID NO: 194464 - DNA, 201 bp, Homo sapiens
gaccccttggatagtgacagatctggaggacagttgtctgggacaggagggtaagactgagaaggccgtgccagtgtccaggagacagttaaccccctggycctcaatggtcaagcatacctagggagggtgatggcatgggctggcatttgccctgggcaccctcagtcctgctgctggatcatctggttagtggcttct

SEQ ID NO: 194465 - DNA, 201 bp, Homo sapiens
atctagaactagaaataccatttgacccagcaatcccattactggttatatacccaaaggattgtaaatcatgctgctataaagacacatgcacatgtatstttattgtggcactattcacaatagcaaagacttggaaccaacccaaatgtccaaaaatgatagactggattatgaaaatgtggcacatatacaccatgg

SEQ ID NO: 194466 - DNA, 201 bp, Homo sapiens
atggtcttatgtggcttgaggcagggtggctacagtaggccagaagtcccgctccacccctaaacctctcctgatgctataagttttttgttttttttttktttgttttttttttttgagacggagtctcactgtgtcatccaggctggagtgcaatggtgcaatcttggctcactgcaacctctgcctcctgggttcaag

SEQ ID NO: 194467 - DNA, 201 bp, Homo sapiens
tcctgagagaagaggtgggagttggggggcttcctcttgactgcaccgcaccacaccagaaagagatgggggcaatggtgaccaaaaaaaaaaaaaaaaaatcacaaaattttctaccattttgagtatggctttttcatttttttcctttttaaatttttaatcatacgtatttaaggtgtacaacatgatgtcttcttg

SEQ ID NO: 194468 - DNA, 201 bp, Homo sapiens
gtagctaaaaaccagagtgcacagcccttcatcacatcagccatgatcacacagctgaggccactgcattttggagttagtaggaaattacggagcctgargacatctgatgtctcctggtgcctgtcggactcaggatggattgtggctaccatttggaccctggtagaaccatggacagcgggttgtacagtctttatc

SEQ ID NO: 194469 - DNA, 201 bp, Homo sapiens
agacacttctcaagagaagacatttatgcagccaacagacacatgaaaaaatgctcatcatcactggccatcagagaactgcaaatcaaaaccacaatgarataccatctcacaccagttagaatggcgatcattaaaaagtcaggaaacaacaggtgctagagaggatgtggagaaataggaacacttttacactgttgg

SEQ ID NO: 194470 - DNA, 201 bp, Homo sapiens
ttgttttcttgatgtcttatagcttttctgtctctcatttcctctcttactgacatcttttgtgtttacttgagtttttgtagtgacacactttgattttyttctcatttccttttgtgtatattcaataaatatttgccttgtggttaccatgggaattaaatatgatatcttgtagttctagcaatctatttaatactg

SEQ ID NO: 194471 - DNA, 201 bp, Homo sapiens
agacaatatcattttttatcttttgcaattatttttaacttaaactttattttgaccgggcatcgtggctcacgcctgtaatcccagcagtttgggaggcygaggcaggtggatcacttgaggtcaggagtttgagaccagcctgataaacatggagaaaccccatctctactaaaaataaaaaagattagccgggcacgg

SEQ ID NO: 194472 - DNA, 201 bp, Homo sapiens
tattgtttataacccacccagtttatggcattttgttacagcagcctgaatgggctaagacagtatgtgtgtaaattacctttttagcactgtgtttgctrcaatctataagttttaatatgctgtgttttttatttcatttgtctcaagataatttctaaatttcctcgtgacttcttctttgattcattggttagttaa

SEQ ID NO: 194473 - DNA, 201 bp, Homo sapiens
ctaagagataatatctattgtttataacccacccagtttatggcattttgttacagcagcctgaatgggctaagacagtatgtgtgtaaattacctttttrgcactgtgtttgctacaatctataagttttaatatgctgtgttttttatttcatttgtctcaagataatttctaaatttcctcgtgacttcttctttgat

SEQ ID NO: 194474 - DNA, 201 bp, Homo sapiens
aagagtcccattctccatgtgaggccccatcaagaagacagccatctatgaagcctcaccagacaccaaatttgttggtgacttgatcttgcattcccagyctccagagctctaagagataatatctattgtttataacccacccagtttatggcattttgttacagcagcctgaatgggctaagacagtatgtgtgtaaa

SEQ ID NO: 194475 - DNA, 201 bp, Homo sapiens
gcctaatggcttcctgatgtttgataggtgttccctcagaagttaggaattccctttctctccatattgctgtgtgggcatggaggactaggtaagcatasttagagtctgtatatatatttaccctttttccttctcctaattctagtgtataatggcccctgcttttgctaggatgtctctccctaacaaaggagtggg

SEQ ID NO: 194476 - DNA, 201 bp, Homo sapiens
tagctcattattctgtaggagaagagcaatatgagcttgataaagatctaaaacagaaagtagaaagataccagcaattaaggcagcttcagtgtctcctstgcttttctctatagatgtgcttccttgtttctgtttgtagaaacacttttgctacttcacatgcacatagtcaaacatagcaatcacagcatttcaggg

SEQ ID NO: 194477 - DNA, 201 bp, Homo sapiens
aaatgttgagtttaagtccataatttctttgttagttttctgtctcaatcatgtgtctaacattttcagtgtgttgttgaagtcccccactatttttgttkggcaaaatctttttataggtcaagaagaactcaccttataaatctaggtgttccaacatttggtgtgcatatattcaggacggttaagtcttcttgtcga

SEQ ID NO: 194478 - DNA, 201 bp, Homo sapiens
ccagctccttccaagttgccacgaaagacatgatttcacagctttttatggcttaatagcatcccatggtgtatatataccacattttctgtatccactcrttggttgatgggcactttggttggttccatatctttgcaattgcaaattgtgctataaacacgcatgtgcatatgtctttttcatataatgacttctttt

SEQ ID NO: 194479 - DNA, 201 bp, Homo sapiens
agtgagaacatacgctatttggttttccatttctgagttacttcacttagaataatggcctccagctccttccaagttgccacgaaagacatgatttcacwgctttttatggcttaatagcatcccatggtgtatatataccacattttctgtatccactcattggttgatgggcactttggttggttccatatctttgca

SEQ ID NO: 194480 - DNA, 201 bp, Homo sapiens
aatgttggggttatcaggcccaacaccaggtggtgggggtaatgaagtccggcagagtcaaaggattgagaaaaagacaatttgagaagtaaagtgggagsagggggccatcgcgactgtggaggctgcaaagttcctgagctctgggagcccatgctatttattggtaatccaacaaaggaacaggtggtgagaatgagg

SEQ ID NO: 194481 - DNA, 201 bp, Homo sapiens
tcatcaactggataccataagagttccccttgctttagaggaattagaaagaagaatggcttgattgttactacacacatgctcctgtccatttagctggmagttgccaatatgcccatgctccacagatccaatataggccagagggtgctttcgaagcatttggaacctctagttgatgccaagtgtggcttagggtag

SEQ ID NO: 194482 - DNA, 201 bp, Homo sapiens
gtcctgagagaagaggtgggagttggggggcttcctcttgactgcaccgcaccacaccagaaagagatgggggcaatggtgaccaaaaaaaaaaaaaaaaaatcacaaaattttctaccattttgagtatggctttttcatttttttcctttttaaatttttaatcatacgtatttaaggtgtacaacatgatgtcttctt

SEQ ID NO: 194483 - DNA, 201 bp, Homo sapiens
actcccacgagtcccctgatcacccaggggcacctttttgactaggagaagcaaatgacctttctctttggagcagaaaaactcagtctctcatttatctrtgaaaacgacacttcagttcctcatgcaaatgcactgagatgaaccaaatcaagataaattttagcagaaaatgcaggagagaattccatttagaatgca

SEQ ID NO: 194484 - DNA, 201 bp, Homo sapiens
agtcctgagagaagaggtgggagttggggggcttcctcttgactgcaccgcaccacaccagaaagagatgggggcaatggtgaccaaaaaaaaaaaaaaaaaatcacaaaattttctaccattttgagtatggctttttcatttttttcctttttaaatttttaatcatacgtatttaaggtgtacaacatgatgtcttct

SEQ ID NO: 194485 - DNA, 201 bp, Homo sapiens
tctccagaggtctatgacctctgagagggctcaaaatgctgggtaatcagcctttatatgcacttcctggatgagcaattttaaattaatttttgttgggratttccctgtagggccgctgcacgttgtggggggtcaagctcccagacactcccacgagtcccctgatcacccaggggcacctttttgactaggagaagc

SEQ ID NO: 194486 - DNA, 201 bp, Homo sapiens
tgttattgatgtcatcaataacatttttgtatattgcttaattaacatttatttaacatagatattgtaaatatatgttaacatatattaatatataatayaatatattaacatattaaatatatgttaataagttaacatatatttataattatttttatgatttgttttttaaatactgtaacaaataacaagtggagt

SEQ ID NO: 194487 - DNA, 201 bp, Homo sapiens
cattcatagtttgacagttaggagagttactatccttcattataaagcaactcttaaatgtttcttaaccaaaaagaaatttacattttttgagaattgayatctttgtgtttataaaatgttaacaaatgctgcatattttgtgcttctattattttaactttttagtcacccaaatttccactcggtggggtggggtgc

SEQ ID NO: 194488 - DNA, 201 bp, Homo sapiens
acctgctctctctctgacgtctggtgtctgagagataccggtgcacaataaaacttggtctccacaaagctttaccttaacctgaacattccttgccattratcccaggtcttcaaataaactcacccaattgtcagccacaaaatgtttaaatttacctatagcctggaagcccccactttaggttttcccacctttctg

SEQ ID NO: 194489 - DNA, 201 bp, Homo sapiens
tcatgctagatgcatccagctggctttcaaacttccatcacttttctccattttcttcagggaatctaattattattttgtgattgtttttgtattctttrggaaaatttcatgggaaaaagggacaagagactttatatcacatgctgtacataggaaactactactgttgatgaaaaaagtgaaactctggaaaatatt

SEQ ID NO: 194490 - DNA, 201 bp, Homo sapiens
cttgacctttatgttgttaattccttacttgcctttataatttacctcctaaggaactatccctaaccaaaattttattttacatgtgttcgaattttaarcaggtaatgctacattattatataataattgtgtttctaagatgtgtccctgttgttgcatattgctgtagtttatcttaattgtgtgcagcatcctatt

SEQ ID NO: 194491 - DNA, 201 bp, Homo sapiens
ccatttttacttcctgcagaaatggtacacttgccagcagttttgccaggagagtacatagaacaaaggagacagggtcatttataacctgacgcatccascctactgctgtgtccggtttccactggctggaacgggacctcacattctgtatttgtcccgattggctagcaacttagaacttttttaaagaggcaaagg

SEQ ID NO: 194492 - DNA, 201 bp, Homo sapiens
attgctggagtgggcctgagactttcacagacatgtaaagacacctgttggggtaggggcagtgggccaggggtgagagtaggacaaaaattttaaaagcrtatataaatgtgagatattaaagagatagaggctagagattgaaagctgattgggtctttatgaagggagggactggaagtagagctagatttgtccaca

SEQ ID NO: 194493 - DNA, 201 bp, Homo sapiens
catcctgttgaaggccaaagacattctctatcgactacagttgtctaaagccaagggcattgtgaccatagatgcccttgcctcagaggtggactccatascttctcagtgcccctctctgaaaaccaagctcctggtgtctgatcacagccgtgaagggtggctggacttccgatcgctggttaagtgagtctctggtct

SEQ ID NO: 194494 - DNA, 201 bp, Homo sapiens
tattcacctttttaaagattgttttggcagtttggggtcctttgagattctatatgcattttaggataggtatttctagttctgcaacaacaacaaaaaaaccattgggattttgacaggaattgtgttgcatctgtagatagctttgggcagtattgtcatcttaatattaagtctccaataaatgagtatcatatgtct

SEQ ID NO: 194495 - DNA, 201 bp, Homo sapiens
gcctttattcacctttttaaagattgttttggcagtttggggtcctttgagattctatatgcattttaggataggtatttctagttctgcaacaacaacamaaaaaccattgggattttgacaggaattgtgttgcatctgtagatagctttgggcagtattgtcatcttaatattaagtctccaataaatgagtatcata

SEQ ID NO: 194496 - DNA, 201 bp, Homo sapiens
tattttccaaagaactcctaacatatacccacacctacgtatccatgaaatgtcagtattcctccattgggacttctttgggtttttttccctccttattyatgtaaaagaattacagaattaccatgagacccagcaattctacttctaaggctacttactaccaagaagtggcagcaggaacttgaacagatactttat

SEQ ID NO: 194497 - DNA, 201 bp, Homo sapiens
gtaaagaatgcagactgagagcatggccagaaacaggttatgttggtaaatcaggttgagtggcaagaaaggttaagagagagagaaaagaagaatattarctagcaaagctggccttgttaggtacatgaagactccttcagagagaatagatggtaaatgtttcttttcagacttttaaagttgtcagattctcagtct

SEQ ID NO: 194498 - DNA, 201 bp, Homo sapiens
agcaacatctcactgccccagtctccagcacatgataatctctaatctgctttttaaaatctatgaatttgcctattttaggttcctcatataagtgaaartatacaacatttgcccttttgcgtttggcttatttcacttagcataacgttttcaaggttcatctatgtcttagcatgtaacaaaatgtcattcctctgt

SEQ ID NO: 194499 - DNA, 201 bp, Homo sapiens
taaataaaacccatctgatgagaatttatggtttgtagggcatgactccctagaccctttaggtaggaatttgggcaagattaaaataaaataaaataaawcagagctttgtcctcactaccaacattctgtgagggccataggctcttggacccctaaaggttcactataaaatcactgacatgagccagattgattaac

SEQ ID NO: 194500 - DNA, 201 bp, Homo sapiens
aaaaagaaaaattaaacgtggggtaacacatatattttatataatgtccaggcatctttgaggaccacagatatatatctgcatattacaatcatttcagragattttttaaaatagtagtacttggatgcaaccagagattctgattgagctgaaatggggataatccaaagaaatatatttaaagaaaaaaacaaggtc

SEQ ID NO: 194501 - DNA, 201 bp, Homo sapiens
ataatggtatgccagagtcagattggaaagtaagtcatgatataaagggttaaataaaacccatctgatgagaatttatggtttgtagggcatgactcccyagaccctttaggtaggaatttgggcaagattaaaataaaataaaataaaacagagctttgtcctcactaccaacattctgtgagggccataggctcttgg

SEQ ID NO: 194502 - DNA, 201 bp, Homo sapiens
gtgacagagctagacaccatctcaaaatgaaagaaagaaagaaagaaagaaagaaagaaagaaagaaagaaagaaagaaaaaaaaaaagaaaaattaaacrtggggtaacacatatattttatataatgtccaggcatctttgaggaccacagatatatatctgcatattacaatcatttcaggagattttttaaaatagt

SEQ ID NO: 194503 - DNA, 201 bp, Homo sapiens
aacccaaatcttctttcttttgtgaacagggactaatttgtgccacctactggggaatgaagatcaagccgggtttcatggggaaggccactccaccctaygacgtccaggtctggtcctaagggcattggcagggagcagttagggctcagcgggggttggacaatttgacaccaggtgacaacaccagccgcacttccc

SEQ ID NO: 194504 - DNA, 201 bp, Homo sapiens
gactactttcaaactcctgggcacaagtaacccccctgcctcagcctcccaaagtgctgtgattacagatgtgagctattgcacccagctaatttttttttgattgagcatgacatattttattttccaaagaactcctaacatatacccacacctacgtatccatgaaatgtcagtattcctccattgggacttctttgg

SEQ ID NO: 194505 - DNA, 201 bp, Homo sapiens
aatgagaggagcacatattgtccccttctcacccacagagggccctctgtgactgccaatttcttaggtgtacaaacccaggaactcacaggtaaataaayagacaccacaagcacagagacacaaaggcacagaaccgccccagcttcacctgggcactcagcagtttggcccacagacaggcttacacacacacacaca

SEQ ID NO: 194506 - DNA, 201 bp, Homo sapiens
ttcctatgacctccaccctctgtgccaaaggaagctgtgactccaaagcaggagatctggggacttggttcaccccagccctggcatctgcctcagaaccyttcatcctccaggtatcgcatcgggcctgcagaggttgaaagcgctttggtggagcacccagcggtggcggagtcagccgtggtgggcagcccagacccg

SEQ ID NO: 194507 - DNA, 201 bp, Homo sapiens
aggacaactcaaagtgggggcttccgggctataggtaaatttaaacattttctcattgacaattggttaagtttatctgaagacctgggatcaaaggaaawgttcaggttaagataaaggtttgtggagaccaagttttattgtgcagaggaatctgtcagataccagacatcagagagagagagagagaacaggttgtaa

SEQ ID NO: 194508 - DNA, 201 bp, Homo sapiens; identical to SEQ ID NO: 33482

SEQ ID NO: 194509 - DNA, 201 bp, Homo sapiens
aggagcagcctccatatgggacctgtcagctgctctaagagatgaaggagagggtggtcagtctcaatggctcccaactcttttgcctcaaggttacatcyttcacttccactcacatctcctgggtcaaagcaaatcccatgggtacatccaccttctaggggccagggggagaacctgaaatacttggggactccatta

SEQ ID NO: 194510 - DNA, 201 bp, Homo sapiens
tttatcatgaagagagattggattttttgaaagctttttctgcacctactaagaggatcatatggcttttcttttttattctgtttaagaggtgaatcctrtttattgatctgcatatgttgacccaaccttgcatcccaggaataaagcctacttgatcatggtgaattaactttttgatgtgctgcaggactcagttta

SEQ ID NO: 194511 - DNA, 201 bp, Homo sapiens
tgttcactcatgtgtgcaacgtttttcacatgcctacagtgtgagcagtgatgtggcagtgggcaaagatcttcctatcccaggagcacagacctgggtcyaagtctcagctctgccaattacagcttgaagaccataaggatattatgtatgctttctcacctcagctcccccacctttaaatggaaattataatgccaa

SEQ ID NO: 194512 - DNA, 201 bp, Homo sapiens
cccaactaaatatattttttttactctccccctttctctctttctcttccccacccctcatcaccaaggtcacagagtttaattttaaaaaacaagcttarcagtctggttaagggcacagactaggatgccgactgagtttgaatcctggctctgccatttgctagctgtatattaccaagcaaattacctaacctctct

SEQ ID NO: 194513 - DNA, 201 bp, Homo sapiens
ttacagtgtgggtgagcatctcttccaacatatttgcaatccatttccaatgctggacagagccactttctccctctgtctccattatccctctagcacawaaaggatgactgctatcccaggccctgtgcaaaattattactttagtgccaactcacatactcagctgacattattttgtaaaaaatatatagcaattca

SEQ ID NO: 194514 - DNA, 201 bp, Homo sapiens
ggttaaataaaacccatctgatgagaatttatggtttgtaaggtatgactccccaggcaccttagataggaatttgggcaagattgtaaaaatcagagctyagtcctcagtccccgctcttggccaaaaagcattccatagaatgcacatgtaggccaacaaacagcagcaggtcccatggcactaggaagactcattcct

SEQ ID NO: 194515 - DNA, 201 bp, Homo sapiens
tcacctctcccctattatgggcaaatcagacttagggttcctcaattattcacttctagggaagaaaatatctggaaccaagctatgccaagccatcaccyctaagagggcaaagctctatccttgggttaattatttaatcacctgcaaaccaaacctctccttctctacgccttctcatctccaactagtaatattcag

SEQ ID NO: 194516 - DNA, 201 bp, Homo sapiens
gtagctgggagtataagcgcccaccagcatgcccaactaaatatattttttttactctccccctttctctctttctcttccccacccctcatcaccaaggkcacagagtttaattttaaaaaacaagcttagcagtctggttaagggcacagactaggatgccgactgagtttgaatcctggctctgccatttgctagctg

SEQ ID NO: 194517 - DNA, 201 bp, Homo sapiens
agaggcctgagagtgacaaaggaggcacatttaggttttaccagagcatcttcataggagatgtggaggaaatgtgggtagagacagtagacattccagawgccacacacatgacaagcctgacagtggttccataattttgtagggaaagacagaatattctagcagggtgacctgagatgacagagcctcacctctccc

SEQ ID NO: 194518 - DNA, 201 bp, Homo sapiens
tttatatataatatatatataatatgcaaatttatatataagtataatttatatataagtatatatatcatataattatatgtatatatgacatgtaagtrtatataatatatgacatataagtatatattttatatatttatgtataattttatatataaattttatatatgagatataatatataaatgtttttatata

SEQ ID NO: 194519 - DNA, 201 bp, Homo sapiens
ggtcaggatgcatcttggttttatatattttagggaggcgtgagacatcaatcaaatacatttaagaaacacattggtttggttcagaaaggcaggacaaygcaaagcggggtctttcaggttataggtaaatttaaacattttgtcattgatgattagtttatctgaagacctgggatcaaaggaaatgttcaggttaag

SEQ ID NO: 194520 - DNA, 201 bp, Homo sapiens
ctcttgtttaggaataaaatgagaggcaggtttgactgatgcagttcccaacttgagttttccctttggcttagtgattttggggtttgttttcctttcakagtggaaaggtcccttctggatagtcatgatgtgctcagcgattgagcccagcagatgtgctgaattatgccacatgtgcgggacacagccccatcgcat

SEQ ID NO: 194521 - DNA, 201 bp, Homo sapiens
ttcccaactcagcctcccaaggagctgggaccacgggcaggtaccaccatgcccagctaattttttgattttttgtagagataaggtctcactatgttgcscagactactttcaaactcctgggcacaagtaacccccctgcctcagcctcccaaagtgctgtgattacagatgtgagctattgcacccagctaatttttt

SEQ ID NO: 194522 - DNA, 201 bp, Homo sapiens
tatcatgatttatttttagttatagacaactaaattacacaactcctttaaaaatttattttattaatgttattatgacttacatagttcattcacaagcrttcagactgttttatcttaaatatccctctttctttttttattttattttattttattttttattatactttaagttctagggtacatgtgcacaacgta

SEQ ID NO: 194523 - DNA, 201 bp, Homo sapiens
ttccatgttcctgccaacatttggtattgtcagacttattaatttttgccaggctggtgggtgtgtggtgttatcttaatacaactttatttttgcatctycctatgtttgagaattaattttaagctaaaccaaaacacactctttgaaacttatggatatttatgtatcttttagggactctgaaattgaaatggctag

SEQ ID NO: 194524 - DNA, 201 bp, Homo sapiens
aagtttaaaattctacaaatttaccaaaaaagcatttgcattactatttcccacttactatttttatgaattattcataataatttttaatttagatattktattagtccatcttattgaagactaaaacaaaaagtcttttaaatttttgattcagagggtgcatgtgcagattcgttacatgagtatattgcatgattc

SEQ ID NO: 194525 - DNA, 201 bp, Homo sapiens
gtgtatcactacagagtccttcccacctcctaggtgtctgggtttctctctccagaggtctatgacctctgagagggctcaaaatgctgggtaatcagccyttatatgcacttcctggatgagcaattttaaattaatttttgttggggatttccctgtagggccgctgcacgttgtggggggtcaagctcccagacactc

SEQ ID NO: 194526 - DNA, 201 bp, Homo sapiens
tctgcagctgactgagtgataaacttatcctttaagattagttagccttcagtagagtcaggtgacagagaggtatgcttcctcaatgcctccctttgtcyctccagaagagcagtaggattttcttcctttccttgtattatagtggacatcattgaataattcatagccttcttcctagttttccttagtccttccagc

SEQ ID NO: 194527 - DNA, 201 bp, Homo sapiens
gagataagaaaggccccttctgcctccaaaactctgattctgtaagccttcagtcatgtctcacattatacacacaaaccatgctgggtttgttttcttgkagtaatacttgagtttttaaagctctttatttcaaccccaaaaggcaaacattacagcaaagtcacatcttatgctgtagtctaatgtcagagaatttaa

SEQ ID NO: 194528 - DNA, 201 bp, Homo sapiens
gtagggttcagtgtcaccttgttttaccactcattcaataaacattgactttttaagctatggagtaggttggcactcactgtgagcccatgacttcattmtgcaggtggtgaaggcctttattgtcctgaccccacagttcctgtcccatgacaaggatcagctgaccaaggaactgcagcagcatgtcaagtcagtgac

SEQ ID NO: 194529 - DNA, 201 bp, Homo sapiens
cattggtcagccatccatcactaaaagagggctattctaattcacagtatgtccttaacttttgaacatccagtttcatcccataatcagctctaaatccyttttaaaaattctttatcatgcactccaaaaggagttggtttccatgcttttcctcccatttcctcccttgaggtgcactttcactctaaggtccaccag

SEQ ID NO: 194530 - DNA, 201 bp, Homo sapiens
tttagcctttgcagaagggcttcttggcacttttgtaggtgctgaagctggactgcatcatctgggtcctagtgggtgtcctcttgtcctcttaagaggcrtaagcataacttgggcgtgaccagacctgagacaccctccctgacttttccagcctttcactttaacttcctggagctctaatttctccttctcaggtga

SEQ ID NO: 194531 - DNA, 201 bp, Homo sapiens
tatattctgtcctccctgctggattatagttatgggaaattgccatgcttcaaggtctcccttggctctagccttctgaatagaattttgtataccaccaycaattgctccaggttttaaagttgcaactacaggagcagtaagttttgtagctaattcatcttctcacccattaagaggagagagaggatgtggctcttc

SEQ ID NO: 194532 - DNA, 201 bp, Homo sapiens
gttgcctttttcttttaccagcctttagcctttgcagaagggcttcttggcacttttgtaggtgctgaagctggactgcatcatctgggtcctagtgggtrtcctcttgtcctcttaagaggcgtaagcataacttgggcgtgaccagacctgagacaccctccctgacttttccagcctttcactttaacttcctggagc

SEQ ID NO: 194533 - DNA, 201 bp, Homo sapiens
aaagtgtcagaagcatatttggaatctgtgtaaatatttgtcttttggtcttttgctagccagagagctcttgtcagagctattagctctgctttctaagyagaagtttctgtaggcaaagactgcacctctactactgagtccaaagtcaccactgcatacccagctcagcagattccctttcgtatgaaactgcttcca

SEQ ID NO: 194534 - DNA, 201 bp, Homo sapiens
caaaggtgttaatagaaagcaccactatttgccacctcttcacagagctgagcttcttctactggcagtggctgatatttggttaatgccatcaactgtgyggtagtgtgttgagttattactgcctctatagttgactgaatcctcctaataaacaggggtaaaaggtaagggaggatgaggcagatgccaagaataaac

SEQ ID NO: 194535 - DNA, 201 bp, Homo sapiens
gctttccttgcccctttggacctaatctaggtaggagcccactactgataagctgcatccagatagttgtcagatgtgacaagagtgcccaagatgggggwtgttttcctggtcaatgaaaagatggcctttgtccttctcgtgcatttgatccacatctttaaccattgtgcccagagctcctggtccctttcagacaga

SEQ ID NO: 194536 - DNA, 201 bp, Homo sapiens
gatgggggagagatgcagctattcttgatgtcagagacactgttctgtttacatctatacttccagatcctgtgtaaatgtgtgtaaagcagtgtccaccyattttttggctagatccatttacagtagaaaagattagggcagggcttacaaattttagtgcaaaagaatcacttggaaaacttgttaagatgcagattc

SEQ ID NO: 194537 - DNA, 201 bp, Homo sapiens
ttggcaatggagatagaagggaatgcaaaaaactcaaaggacaatgtggtgaaatacagaatgaaggaaagaggggacattcaagatgacatccaaggaakgacagaaaggggaaaaggaagggaaagatgggggagagatgcagctattcttgatgtcagagacactgttctgtttacatctatacttccagatcctgtg

SEQ ID NO: 194538 - DNA, 201 bp, Homo sapiens
tacctagtgatgattctttaccgaattgaatattaccatgttggttttacatggaaattttctatttctgtcagtttcatttattagttagaattcttatrtagagatttcccttccccttttgatgacttattttttgtctatatagattagaatcagtgactcacagattcttttttgaatcacttctctcattttatc

SEQ ID NO: 194539 - DNA, 201 bp, Homo sapiens
tcttttatttcaccttgaggacttcctttagcatttcttgtaggggcaagtctagggatagtgaactttgacttttgtttatctgggaataccctaatttyccctttacttttgaagaatctttctggatgtaaaattcttggttggctttttttttctttaagccctttaaatatatcatccacttctttctggcctcaa

SEQ ID NO: 194540 - DNA, 201 bp, Homo sapiens
ctgggctcaaaaggagaaggtaagagatctgccgtgatggcgatataagaacaagggtggcctcactttccttatcttgctcctactaggctgaaaggtawggaaccaaagttacttctgcctcaacttatcagtgttgtggaagaagcttatatttcaaggttctattcccagcctggccatttccttacttcattgagc

SEQ ID NO: 194541 - DNA, 201 bp, Homo sapiens
aagggcattggcagggagcagttagggctcagcgggggttggacaatttgacaccaggtgacaacaccagccgcacttccctgctccagtcatccttcctyctctcttctcatttatcccttcagtttcatatggaggcctcagttgaaaactgcattattgtgagcatgaacaccgctgaccctggcagccagggcatca

SEQ ID NO: 194542 - DNA, 201 bp, Homo sapiens
tctgtaggtttgaaacagggtgtgagattctgcatcctggatagtgctgctgctgttgttctgtggcctgtactttacataacaagaagttagggtatttygatgcagacaagccaagtctaaagcccatggttgtgaaaaagaaaccaaaacaatcagttcctttctcatccccagggatcatcttcattcctgcgacca

SEQ ID NO: 194543 - DNA, 201 bp, Homo sapiens
ctgtgacggtttagcattttctttgatgcatatgtaatatgctctgctacctgagataatggagaacatatttatgagcctgggagagtagccaacaagtstgtgcacattccagaggccacaaggggttttatgccctgggcttagattatggtgcggcagggcagccttccaccctttggcacagagattggtgtccca

SEQ ID NO: 194544 - DNA, 201 bp, Homo sapiens
tgattagagtagtactcatctcctagggttgctctgagtactgaatggttcatatttgtaactcattgagagcattgcctggaacatagcaagtgctattyaaatgttcattagattacttaatgaattcattaaattacttaagattcattacttaaattacttaagattaaatgacttaagattcattgtattttacta

SEQ ID NO: 194545 - DNA, 201 bp, Homo sapiens
tagcttagtggaaaaagaaatacacggaagggggaactagaatagctcattattctgtaggagaagagcaatatgagcttgataaagatctaaaacagaaagtagaaagataccagcaattaaggcagcttcagtgtctcctctgcttttctctatagatgtgcttccttgtttctgtttgtagaaacacttttgctactt

SEQ ID NO: 194546 - DNA, 201 bp, Homo sapiens
tgggtattttctttgtatccatcttcccactctgccttttaaagggggcatttagaccaaaaataaataaataaataaataaataaataaataaataaatwctattcaatttagtaaaacaaaacattccttctatttcctctctacccacccctgtcaacttagtccttgccaaatctgttgcaagagtctgctgatctc

SEQ ID NO: 194547 - DNA, 201 bp, Homo sapiens
agaggaggaactgagctgtagcctagggcttttgtgtggtggatcagtgcatgctgcttgtgggcaggactccaccgtgtatcactacagagtccttcccrcctcctaggtgtctgggtttctctctccagaggtctatgacctctgagagggctcaaaatgctgggtaatcagcctttatatgcacttcctggatgagca

SEQ ID NO: 194548 - DNA, 201 bp, Homo sapiens
agtctgtttttatctgatataagaataaggactcctgctcttttctgtttttcatttgtgtggcagatatttctccatttctttgcttagagcctgtgggyatcattacttgtgagatgggtctcatgaagacagaagacagttgggtattttctttgtatccatcttcccactctgccttttaaagggggcatttagacc

SEQ ID NO: 194549 - DNA, 201 bp, Homo sapiens
atctaattagatgtgtactgttattgtctctatttccttaatgaagaaactgaggttccaaggatttaatgaatatactgaaatcacatgtctaataagtrggagagcagggtttgggtccaggctgtctgatttcacaatccattatttaacctagtctcccaatctgatgatgccaaaatatctctgccttaagagtat

SEQ ID NO: 194550 - DNA, 201 bp, Homo sapiens
tgtcttggtctccataggttcagggagcctatttcatgtttgtgcccctctaatgcagcaccaaatgtcacaggacaaacatagtaataataatagctaayctttagctattgtttatttttattattatgaatatatttgttatacatctatgagcataataaatctattattataaaattatttattagtataaatata

SEQ ID NO: 194551 - DNA, 201 bp, Homo sapiens
taaaatgggatctcagtccttaagctgtgttcacattggaacgtgactatggctgtggattagtttactaagtgccctttttctttgaagcagaaaataayacataatatatggtcttgaccaggagggcaagagaggtccaaatccagctttttggtgggtgaatggccaaggggatgaagtaaagtggagcttcagaga

SEQ ID NO: 194552 - DNA, 201 bp, Homo sapiens
cagaatggcatctcagcaatgtggctcccgaacatacatgcatttgtatattgaaaagtgttattaggccgggcacggtggctcatgcctgtaattccaaygttttgggaggctgaggtggaccgatcacctgaggtcaggagttcaagaccaggctggccaacatggtgaaaccccacctctactaaaaatacaaaaaaa

SEQ ID NO: 194553 - DNA, 201 bp, Homo sapiens
tcactgccttcaacaaaggagctctcttctttttgcagggtgacccagagaagacagctaaagtggaatgtggggacttctacaacactggggacagaggwaagatggatgaagagggctacatttgtttcctggggaggagtgatgacatcattaatgcctctgggtaggtgtggctgatgctgggctggctgttgttgc

SEQ ID NO: 194554 - DNA, 201 bp, Homo sapiens
gggctacatttgtttcctggggaggagtgatgacatcattaatgcctctgggtaggtgtggctgatgctgggctggctgttgttgccgtcacatgcctcayggaattttgcttacctagacattttttcacgcattggtgaaatttcagcctaaatctgaatagagccgtgtctatggtgccctgattccaggcttcagta

SEQ ID NO: 194555 - DNA, 201 bp, Homo sapiens
tgggtgtggttataaaagagcaccatcagagatcttcctgatgaggtggggaatgcacaaacctacatatgtgataaaactgcatacaactaaatacacasacacacaagtgaaatgggacatctgaagactggtggattgtatcaaggtcagtattctgcctaagatactgatcatatggttttgcaagatggtaccact

SEQ ID NO: 194556 - DNA, 201 bp, Homo sapiens
taaacatgaaaccatttgatcaatagatgcaaaaaaaattctaacaattctaaagacattgctgatattattttaccaataattttaaagctggctagatmcttactaaaataaaatcttatttagtaaagattttacttaagtcacatgaacttgaaaaagcatttgactagttttttttgtttagtatctgatttaagc

SEQ ID NO: 194557 - DNA, 201 bp, Homo sapiens
aaggagcagcctccatatgggacctgtcagctgctctaagagatgaaggagagggtggtcagtctcaatggctcccaactcttttgcctcaaggttacatscttcacttccactcacatctcctgggtcaaagcaaatcccatgggtacatccaccttctaggggccagggggagaacctgaaatacttggggactccatt

SEQ ID NO: 194558 - DNA, 201 bp, Homo sapiens
catctggagccctcctcacatccttggcctggaattctgtaacctgacccttttctccatccctccttggggcctaagagggaactaccagggggccaacrgaggctcagaagagcaggggcagaaagggcctagcctgggaatgagaggagcacatattgtccccttctcacccacagagggccctctgtgactgccaat

SEQ ID NO: 194559 - DNA, 201 bp, Homo sapiens
tctgtgccaaaggaagctgtgactccaaagcaggagatctggggacttggttcaccccagccctggcatctgcctcagaacccttcatcctccaggtatcrcatcgggcctgcagaggttgaaagcgctttggtggagcacccagcggtggcggagtcagccgtggtgggcagcccagacccgattcgaggggaggtgagg

SEQ ID NO: 194560 - DNA, 201 bp, Homo sapiens
tatatgacatataagtatatattttatatatttatgtataattttatatataaattttatatatgagatataatatataaatgtttttatatatttatatrtaatatgttttatatatatttatatttattatatattatatatatttatatttatatattatatattacatatattatatatttatatttttatatatta

SEQ ID NO: 194561 - DNA, 201 bp, Homo sapiens
tatttgcagttgctttgaacaccatagaagccttgcatttacaattgtagtaggcccaaggccctctcagtccaggggaagctcctgagaaacaagagagrctgagggaaccacagatcttatctgccatctcaagctcatgctagggcagaggtacattgatcgcagtaattttatatataatatatatataatatgcaa

SEQ ID NO: 194562 - DNA, 201 bp, Homo sapiens
gttttctgtctcaatcatgtgtctaacattttcagtgtgttgttgaagtcccccactatttttgtttggcaaaatctttttataggtcaagaagaactcaycttataaatctaggtgttccaacatttggtgtgcatatattcaggacggttaagtcttcttgtcgaactgaaccatttatcattatataatgccctcctt

SEQ ID NO: 194563 - DNA, 201 bp, Homo sapiens
caccatgcccagctaatttttaaatttttagtagagacagggtttcaccatgttggtcaggctggtctcgaactcctgacctcatgatcaacctgcctccrcctcctaaagtactggaattacaagcatgagccactgcgcctggctgtataaatgttttaaaatgggatctcagtccttaagctgtgttcacattggaac

SEQ ID NO: 194564 - DNA, 201 bp, Homo sapiens
caaaccatgctgggtttgttttcttggagtaatacttgagtttttaaagctctttatttcaaccccaaaaggcaaacattacagcaaagtcacatcttatrctgtagtctaatgtcagagaatttaattaaaacagagtactcttgaaaaatccctcgaatttcccaaagtcagtatgataccatttcacagcaagaccag

SEQ ID NO: 194565 - DNA, 201 bp, Homo sapiens
ggtcaaatgttgagtttaagtccataatttctttgttagttttctgtctcaatcatgtgtctaacattttcagtgtgttgttgaagtcccccactattttkgtttggcaaaatctttttataggtcaagaagaactcaccttataaatctaggtgttccaacatttggtgtgcatatattcaggacggttaagtcttcttg

SEQ ID NO: 194566 - DNA, 201 bp, Homo sapiens
ctttctccttaccgcggttcctgaagtgctggtgtcatcctgcagccccatctcaggttcagttgcactgctgggcaggatgcggggagagccagtctccrtccgggtgaaactcccccatggcatgccttggatgccaggtcttccacagccccagggccctagtcccatgggcaaaggagacagtaaatctgttatctc

SEQ ID NO: 194567 - DNA, 201 bp, Homo sapiens
aattagcctttgttaagcctctgatcagctttcttctctgcctcctgaactcagttaatgtacaccttgtaaccactttaataagctgagttgcattcacrcctacggagcttctaacttctgcaatttgtgcctgatatctccttgggcctgccttacaaatgctgtgtccaccatgcactgattttcagcagccttagg

SEQ ID NO: 194568 - DNA, 201 bp, Homo sapiens
tcacctctagttccttctctgtcccggtgaggaaggccttgacttatcctgaaaaggtgaacaccaacatgtactgatagcccccatcacagggtaattcrgtgaagttcataagcagtttttcacatggcatggcttctgtttcctgaactcctgggggtggagtaagcccttgtcatggattgttctgaacacaagtta

SEQ ID NO: 194569 - DNA, 201 bp, Homo sapiens
gcctcttgctacaggtcattgatgacaagggcagcatcctgccacctaacacagaaggaaacattggcatcagaatcaaacctgtcaggcctgtgagcctmttcatgtgctatgaggtaatgaccccccatctgcccccatcctggccccaaggatcccaacagggagctctgcatcctgaggcttcttcaagtcctcttt

SEQ ID NO: 194570 - DNA, 201 bp, Homo sapiens
ctagtattttgttgagaatttttgcatctacgtttatcagggatattggcctggagttttcttttgtcattgtatctctgccatattttggtgccaaaagyattctggcttcatagaatggttagaaaggagtcccttctccttaatcttttggattagttacagagggattggtaccagttctttgtatatctgttagaa

SEQ ID NO: 194571 - DNA, 201 bp, Homo sapiens
ccttggataaacagcatttctttattaatctttaatctactatgcattttctcctgtattttcagtctctcacttttcgctagttttacaccctcagtccrtaaacatattcagtgtacttatcctaaaatgccttcctttgaacctgctacacactgggtcaacccatcttttccaccttaataccaaacttcaccaaag

SEQ ID NO: 194572 - DNA, 201 bp, Homo sapiens
ttgccacctcttcacagagctgagcttcttctactggcagtggctgatatttggttaatgccatcaactgtgcggtagtgtgttgagttattactgcctcyatagttgactgaatcctcctaataaacaggggtaaaaggtaagggaggatgaggcagatgccaagaataaacaaaaacccaccagtgagggttttgaatc

SEQ ID NO: 194573 - DNA, 201 bp, Homo sapiens
tgctgggctggctgttgttgccgtcacatgcctcacggaattttgcttacctagacattttttcacgcattggtgaaatttcagcctaaatctgaatagarccgtgtctatggtgccctgattccaggcttcagtatacctcccgaaccttctctgcacgcagaagaatcaagcaaaatgaaattcaagagggtctggaag

SEQ ID NO: 194574 - DNA, 201 bp, Homo sapiens
aagcagttctcctgcctcagcctctggagtagctgggattgcaggcatgtgccaccatgcccagctaatttttgtacttttagtagagatggggattcacygtgttgaccaagctggtcttgaagtcctgacctcaggtaatgtgcccacctcggcctcctgaagtgctgggattgcaggcatgagccactgggcccagcc

SEQ ID NO: 194575 - DNA, 201 bp, Homo sapiens
ttggggtcctttgagattctatatgcattttaggataggtatttctagttctgcaacaacaacaaaaaaaccattgggattttgacaggaattgtgttgcmtctgtagatagctttgggcagtattgtcatcttaatattaagtctccaataaatgagtatcatatgtcttttcatttacttatctcttctttaatttctg

SEQ ID NO: 194576 - DNA, 201 bp, Homo sapiens
cttcccaaagtgctgggattatggatgtgagctaccgcgcctggcctttattcacctttttaaagattgttttggcagtttggggtcctttgagattctayatgcattttaggataggtatttctagttctgcaacaacaacaaaaaaaccattgggattttgacaggaattgtgttgcatctgtagatagctttgggcag

SEQ ID NO: 194577 - DNA, 201 bp, Homo sapiens
atggctgcaccattttatatacccaccagaatatttttgatccattttgagttaacttttgtatgtgttgtaaggtaacttcattattttgcaattgggcrttgaagtttcccagcactatttgttgacgactgacctttctccatggaatggttttggcacctatacttaaatcaattgacaatatatgggagagtttct

SEQ ID NO: 194578 - DNA, 201 bp, Homo sapiens
ttctatgaccactgttgtttaagtatctgttcaagttcctgcttccatttcttgggagtatagacctagatgtggaattgctgggttccatggtaattctrtgttgaactttttgaaataaattaccaaaccactttcacaatggctgcaccattttatatacccaccagaatatttttgatccattttgagttaactttt

SEQ ID NO: 194579 - DNA, 201 bp, Homo sapiens
ttcacttagcataacgttttcaaggttcatctatgtcttagcatgtaacaaaatgtcattcctctgtaagtctgaataaaattccactgtatgtatacaayacattttgtgtactcagttgtctcttaatggacattttggttatttccacattttgcttattgagaatgttgcttctatgaccactgttgtttaagtatc

SEQ ID NO: 194580 - DNA, 201 bp, Homo sapiens
ttattttttactttatattttatttatataaaatgtaacataaaattactcttttcaccatttttgagtgtacaattcagtagtatcaaataaagtaacartgttgtacagccatcacgattacccatcttcagaaaatgtttaccatcccaaacagaaattctactaataagcaacatctcactgccccagtctccagca

SEQ ID NO: 194581 - DNA, 201 bp, Homo sapiens
acaaatcacttatcctcgctgagcctccagggaactctattatcccattttacagagagaaaagctgcagattaaaagccctgcacatcttctgcacatcraataaatggtaggtttaggattaaaaaaaagtaaaaaccagagattatagaaaactgagatggattacaaggaaacctgctgaaactcctgatcaaataa

SEQ ID NO: 194582 - DNA, 201 bp, Homo sapiens
atctatctggtcctgggccttttttggttggtaggctattatttattgcctcaatttcagagcctgttattggtctattcagggattcaacttcttcctgrtttagtcttgggagggtgtttgtgtccaggagtttatccatttcttctagattttctagtttatttgtgtagaggtgtttatagtattctctgacggtag

SEQ ID NO: 194583 - DNA, 201 bp, Homo sapiens
tggaggtaacaaacagccccaaacaatggaggtttacaacactgaaggctctttttctgctcatgcctcatgtcctccatggctctccttggccctgccckccacatctcctcattctgccaccagaataaaggagcagcctccatatgggacctgtcagctgctctaagagatgaaggagagggtggtcagtctcaatgg

SEQ ID NO: 194584 - DNA, 201 bp, Homo sapiens
caagtcctcttttatttgctctaactcaatgaaatgaatgagttttcattcaactcgaagctcaccgtgcattctcccatcctttcctgtctgaacccacmtggaacttttgggatgttggggtagaatgaagactggcttcagaaccatcagacttgggtttcaatgatctactgtagtcaagaatataggctttgactg

SEQ ID NO: 194585 - DNA, 201 bp, Homo sapiens
ttaaattcaaatatcaaccctctcagtgagcagctgagtgactttgagcaagcaaatgtgcctccctcaagcctaggtttttttcttatttaaaatgggckacaaaaaaagtgccaacttcacacaaaaacatgtatgcaaatgtacatagcagctttactctaaatagtcaaaacctgaagacaacaatccagatggctt

SEQ ID NO: 194586 - DNA, 201 bp, Homo sapiens
tcccaacagggagctctgcatcctgaggcttcttcaagtcctcttttatttgctctaactcaatgaaatgaatgagttttcattcaactcgaagctcaccrtgcattctcccatcctttcctgtctgaacccacctggaacttttgggatgttggggtagaatgaagactggcttcagaaccatcagacttgggtttcaat

SEQ ID NO: 194587 - DNA, 201 bp, Homo sapiens
gtcaagtgaatcggtcatgaagcaagaattaaattcaaatatcaaccctctcagtgagcagctgagtgactttgagcaagcaaatgtgcctccctcaagcytaggtttttttcttatttaaaatgggctacaaaaaaagtgccaacttcacacaaaaacatgtatgcaaatgtacatagcagctttactctaaatagtcaa

SEQ ID NO: 194588 - DNA, 201 bp, Homo sapiens
agatttgggtatccaaggttataggtggcatcagagagcagaaagaatatttcagccagaataaacactgcatacatcatcatattctttgatcagactcmcaatgtggttaccttacttattaagggttatttcaaccctctgataaatcttatttggaaattacgggaccaacattaaattggaatttaataaatttaa

SEQ ID NO: 194589 - DNA, 201 bp, Homo sapiens
tcatgttccacaagagctattgcttaggggtcaagtgaatcggtcatgaagcaagaattaaattcaaatatcaaccctctcagtgagcagctgagtgactytgagcaagcaaatgtgcctccctcaagcctaggtttttttcttatttaaaatgggctacaaaaaaagtgccaacttcacacaaaaacatgtatgcaaatg

SEQ ID NO: 194590 - DNA, 201 bp, Homo sapiens
tgctcctgtccatttagctggcagttgccaatatgcccatgctccacagatccaatataggccagagggtgctttcgaagcatttggaacctctagttgaygccaagtgtggcttagggtagagaatggagataaaggatttggatctggtaagtaggagtaattctgggtgcttctccatagagttttgtttttagtctc

SEQ ID NO: 194591 - DNA, 201 bp, Homo sapiens
gccactgcattttggagttagtaggaaattacggagcctgaagacatctgatgtctcctggtgcctgtcggactcaggatggattgtggctaccatttggwccctggtagaaccatggacagcgggttgtacagtctttatccaccatctgccacagtttgacaccaaggtcatcatacaggtaagaagactcaccttccc

SEQ ID NO: 194592 - DNA, 201 bp, Homo sapiens
gtggcttagggtagagaatggagataaaggatttggatctggtaagtaggagtaattctgggtgcttctccatagagttttgtttttagtctcatcataayactgttgccctaggcaggttatttctcctactgcctctgtgaaagcctttccccaacgggcgatacggtactttccaattatggaggtttttaacaacca

SEQ ID NO: 194593 - DNA, 201 bp, Homo sapiens
ttcccaggaaggtaggaaagagggcaccgacatagaggctggacccagatgtgggcaaagtttgtgtgtgtgtgtgtgtgtgtgtgtgtgtgtgtgtgtgtcttgggaaaggaactggaagtagaagtgactacatactccttttcccttccactctcttttgttcagacctctcagggtctgagaggtgaaggctgggaa

SEQ ID NO: 194594 - DNA, 201 bp, Homo sapiens
cttcccaggaaggtaggaaagagggcaccgacatagaggctggacccagatgtgggcaaagtttgtgtgtgtgtgtgtgtgtgtgtgtgtgtgtgtgtgtgtcttgggaaaggaactggaagtagaagtgactacatactccttttcccttccactctcttttgttcagacctctcagggtctgagaggtgaaggctggga

SEQ ID NO: 194595 - DNA, 201 bp, Homo sapiens
atatatatattttttttttttttttttttttttgagatggagttttgctctgtcacccaggctggagtgtagtggtttgatctcggctcactgcaagctcrgcctcccaggttcacaactaatctcctggctcagcctcccgagtagctgggagtataagcgcccaccagcatgcccaactaaatatattttttttactct

SEQ ID NO: 194596 - DNA, 201 bp, Homo sapiens
atttaatatatgatatataatatataaatatgttttttatatatatatatatatatatatattttttttttttttttttttttttgagatggagttttgcyctgtcacccaggctggagtgtagtggtttgatctcggctcactgcaagctcggcctcccaggttcacaactaatctcctggctcagcctcccgagtagct

SEQ ID NO: 194597 - DNA, 201 bp, Homo sapiens
tatatattttatatatttatatataattttatatataaatttaatatatgatatataatatataaatatgttttttatatatatatatatatatatatatwttttttttttttttttttttttgagatggagttttgctctgtcacccaggctggagtgtagtggtttgatctcggctcactgcaagctcggcctcccagg

SEQ ID NO: 194598 - DNA, 201 bp, Homo sapiens
gtgtttgtgtccaggagtttatccatttcttctagattttctagtttatttgtgtagaggtgtttatagtattctctgacggtagtttgtatttctgtggkatcagcggtgatatcccctttatcatttttttaaatatccctctttcttgtgtaatcccatcatttttattttaggacaaaaatttaccatacaagattc

SEQ ID NO: 194599 - DNA, 201 bp, Homo sapiens
tcctgaccccacagttcctgtcccatgacaaggatcagctgaccaaggaactgcagcagcatgtcaagtcagtgacagccccatacaagtacccaaggaargtgagtgagggcagatggaagggatctggtggccctgaagcgttccctgctaggacgggctaggtatcactggaggtaacaaacagccccaaacaatgga

SEQ ID NO: 194600 - DNA, 201 bp, Homo sapiens
agtatatattatatatgacataaaagtatatattttatatatttatatataattttatatataaatttaatatatgatatataatatataaatatgttttwtatatatatatatatatatatatattttttttttttttttttttttttgagatggagttttgctctgtcacccaggctggagtgtagtggtttgatctcg

SEQ ID NO: 194601 - DNA, 201 bp, Homo sapiens
gattggaatagtttcagaaggaatggtaccagctcctccttgtacctctggcagaattcggctgtgaatctatctggtcctgggccttttttggttggtargctattatttattgcctcaatttcagagcctgttattggtctattcagggattcaacttcttcctggtttagtcttgggagggtgtttgtgtccaggagt

SEQ ID NO: 194602 - DNA, 201 bp, Homo sapiens
taaattatatatcctataattatatttatatatgacatgtaagtatatattatatatgacataaaagtatatattttatatatttatatataattttatawataaatttaatatatgatatataatatataaatatgttttttatatatatatatatatatatatattttttttttttttttttttttttgagatggagtt

SEQ ID NO: 194603 - DNA, 201 bp, Homo sapiens
tataaattatatatcctataattatatttatatatgacatgtaagtatatattatatatgacataaaagtatatattttatatatttatatataattttawatataaatttaatatatgatatataatatataaatatgttttttatatatatatatatatatatatattttttttttttttttttttttttgagatggag

SEQ ID NO: 194604 - DNA, 201 bp, Homo sapiens
tttaaagtagttttttccaattctgtgaagaaagtcattggtagcttgatggggatggcattgaatctataaattaccttgggcagtatggccattttcaygatattgattcttcctactcatgagcatggaatgttcttccatttgtttgtgtcctcttttattttgttgagcagtggtttatagttctccttgaagagg

SEQ ID NO: 194605 - DNA, 201 bp, Homo sapiens
tatacttatatataaattatatatcctataattatatttatatatgacatgtaagtatatattatatatgacataaaagtatatattttatatatttatawataattttatatataaatttaatatatgatatataatatataaatatgttttttatatatatatatatatatatatattttttttttttttttttttttt

SEQ ID NO: 194606 - DNA, 201 bp, Homo sapiens
gtcaggtagcgcgatgcctccacctttgttgttttggcttaggattgccttgacaatgcaggctcttttttggttccatatgaactttaaagtagtttttyccaattctgtgaagaaagtcattggtagcttgatggggatggcattgaatctataaattaccttgggcagtatggccattttcatgatattgattcttcc

SEQ ID NO: 194607 - DNA, 201 bp, Homo sapiens
ggttactgtagccttgtggtatcgtttgaagtcaggtagcgcgatgcctccacctttgttgttttggcttaggattgccttgacaatgcaggctcttttttggttccatatgaactttaaagtagttttttccaattctgtgaagaaagtcattggtagcttgatggggatggcattgaatctataaattaccttgggcag

SEQ ID NO: 194608 - DNA, 201 bp, Homo sapiens
cctcagctcccccacctttaaatggaaattataatgccaatcttaacagattgtgataaggtaaataaaaagaagtatataatgctctggctggtgtcccrcctgttgtatatgctcaccttgcagctgctgtggtccttgctatttttggtggctattgttccagattttggaagctcagggataaatagggcagtctct

SEQ ID NO: 194609 - DNA, 201 bp, Homo sapiens
tgcaaaattattactttagtgccaactcacatactcagctgacattattttgtaaaaaatatatagcaattcagttaatttgtctgcttccagacctgaawaatgctgacacttcgggcctatgtttgaatggctcacaggtcatatttggacaaggaggagggtgggccaggaagacacactccacccacgactccaata

SEQ ID NO: 194610 - DNA, 201 bp, Homo sapiens
ttttacataagataaacgtaagtcagagaaagcaactaggtacatatttgtctcaggtgagcagagagatgatttttgagttctgttctttgtcctatacstgtgaagatgagctataaatgtcagggtgaaatttagcagaactgtttgacagtaacgatcttggggcccacaaggaatttcttagtgggaaaattgtgg

SEQ ID NO: 194611 - DNA, 201 bp, Homo sapiens
ctcaccaccacccatccaccgtctgccagaatagttcgcagggactggcaggaagtgagtgacatccacttggccatggccaactgtaaaatgaccaaaargtaaataagaaagtgaggaactagaaggatgaatgatctgggtgacagacttaagagctctgaatgcacagagccagggtggctcaccaatgcctggcac

SEQ ID NO: 194612 - DNA, 201 bp, Homo sapiens
aaatgtggtccaattagctatattctgtcctccctgctggattatagttatgggaaattgccatgcttcaaggtctcccttggctctagccttctgaataraattttgtataccaccaccaattgctccaggttttaaagttgcaactacaggagcagtaagttttgtagctaattcatcttctcacccattaagaggaga

SEQ ID NO: 194613 - DNA, 201 bp, Homo sapiens
gcaagggtccacggcttcattcttgaagtcagcgagaccaagaacccactggaaggaataaattccagacacagtttggcaaccacaaagggactatcacstatcgccaagtggtgagcaccatcggacccatttcacttgctattccttcctatttttccttagaattcggggctaaataccaggcacctgccagcgagt

SEQ ID NO: 194614 - DNA, 201 bp, Homo sapiens
gatcatgaggtcaggagatcgagaccatcctggccaacatggtgaaaccccatctctactaaaatacaaaaagaaagaaagaaagaaagaaagaaagagaragagagagagaaagaaagaaagaattagccaggcgtggtggcaagactctcaaaaaaaaaaaaaaagacttgagctgagccctctgggctaagaagaatt

SEQ ID NO: 194615 - DNA, 201 bp, Homo sapiens
tcaaaatataagcattgttctgaaaaataatttaaaatatgtatatatgtatagacatatttatcttcacaacttataactggcagtattatacccaggakggtttgttacaaggtactttatcctattagtaaatatatatattttttaattttataggaagcagaaaatgtttgtggttgggatgtatgcaaaagtgac

SEQ ID NO: 194616 - DNA, 201 bp, Homo sapiens
aaataattcattgtgtgatccttaagcgattgtgtgaatattcctattccctaacattctttcacattatggtttgagtacctagtgatgattctttacckaattgaatattaccatgttggttttacatggaaattttctatttctgtcagtttcatttattagttagaattcttatgtagagatttcccttcccctttt

SEQ ID NO: 194617 - DNA, 201 bp, Homo sapiens
atttattaaacagggaatcctttccccatttcttgtttttgtcagatttgtcaaagatcagatggttgtagatgtttggtattatttctgagggctgtatkctgttccattggtctatatgtctgttttggtaacagtaccatgctgttttggttactgtagccttgtggtatcgtttgaagtcaggtagcgcgatgcctc

SEQ ID NO: 194618 - DNA, 201 bp, Homo sapiens
tagaatcctaggacatgcaccctggtgtgtacaagcatgcatttctgtagagtttttcaaggagaggaattgcgggtcacactgatacaacacaataccayactatcttccaaaccaatttatgcttctttatataagcagggcaggagaatttccattgttccatgttcctgccaacatttggtattgtcagacttatta

SEQ ID NO: 194619 - DNA, 201 bp, Homo sapiens
ctgaatggtattgcctaggttttcttctagggtttttatggttttaggtctaacatttcagtctttaatccatcttcaattaacttttgtataaggggaarggatccagtttcagctttctacatatggctagccagttatcccagagccatttattaaacagggaatcctttccccatttcttgtttttgtcagatttgt

SEQ ID NO: 194620 - DNA, 201 bp, Homo sapiens
tttttttattttattttttattttattttattttattttatttttctgagacagagtctcccactgtcacccaggctggagtgcagtggcctgatcttggytcactgcaagctctgcttcctggcttcaagtgagcatgtccagctaatttttatacttttagtagagatggggtttcaccatcttggccagcctggtctt

SEQ ID NO: 194621 - DNA, 201 bp, Homo sapiens
caaagcaggagatctggggacttggttcaccccagccctggcatctgcctcagaacccttcatcctccaggtatcgcatcgggcctgcagaggttgaaagygctttggtggagcacccagcggtggcggagtcagccgtggtgggcagcccagacccgattcgaggggaggtgaggagaacacagagatcatcatgtctgt

SEQ ID NO: 194622 - DNA, 201 bp, Homo sapiens
ggcattggcagggagcagttagggctcagcgggggttggacaatttgacaccaggtgacaacaccagccgcacttccctgctccagtcatccttcctcctytcttctcatttatcccttcagtttcatatggaggcctcagttgaaaactgcattattgtgagcatgaacaccgctgaccctggcagccagggcatcacac

SEQ ID NO: 194623 - DNA, 201 bp, Homo sapiens
actatatgatatatattatatatacttatatataaattatatatcctataattatatttatatatgacatgtaagtatatattatatatgacataaaagtrtatattttatatatttatatataattttatatataaatttaatatatgatatataatatataaatatgttttttatatatatatatatatatatatattt

SEQ ID NO: 194624 - DNA, 201 bp, Homo sapiens
ataagcataatttatatataagcataaatattatatataacttacatatacttacatatacatgtatatgtatatatatacttatatataaattatatacmatatatactatatgatatatattatatatacttatatataaattatatatcctataattatatttatatatgacatgtaagtatatattatatatgacat

SEQ ID NO: 194625 - DNA, 201 bp, Homo sapiens
gacatataagtatatattttatatatttatgtataattttatatataaattttatatatgagatataatatataaatgtttttatatatttatatgtaatatgttttatatatatttatatttattatatattatatatatttatatttatatattatatattacatatattatatatttatatttttatatattatataa

SEQ ID NO: 194626 - DNA, 201 bp, Homo sapiens
atttattggtaatccaacaaagaaacaggtggtgagaatgaggaggtcaaaagatcaggtgcatgatgaacacctgtgatggtatagcatttataaggagyatgttctgctactttagataatgggaatacaatcaatctaggagcctaggaaggctagaagcaaggagccagcaagtctagacacattccagaggacatt

SEQ ID NO: 194627 - DNA, 201 bp, Homo sapiens
tataatttatatataagtatatatatcatataattatatgtatatatgacatgtaagtgtatataatatatgacatataagtatatattttatatatttawgtataattttatatataaattttatatatgagatataatatataaatgtttttatatatttatatgtaatatgttttatatatatttatatttattatat

SEQ ID NO: 194628 - DNA, 201 bp, Homo sapiens
tgcataaatgtcttcttttgagaaatgtctgttcatatccttcgcccactttttgatggggttttttgttgttttcttgtaaatttgtttgagttgtttgwagattctggatattagccctttgtcagatgagtagatggcaaaaattttctcccattctgtaggttaactgttcactctgatggtagtttctttttttgt

SEQ ID NO: 194629 - DNA, 201 bp, Homo sapiens
gctcaacctatcagccatatgcaacatcctaggactgatttcccccacactcgcctgggagcacacagcctgcgctaagggatctgtgcctccccacattrctccccgcattggcctctcctgagaccgtctctttcacacactttcacacacctcccttgcctcaggactcctcatcggacaaaacaaccctctctcgtg

SEQ ID NO: 194630 - DNA, 201 bp, Homo sapiens
ttagatctggcagtcctaaagctggggcctgagtcaaggctttttttttttttttaatttctttaaaagtcttctcctggttagcctcctagaggaggggytctttctttccttctctttgtggcttagccataagctagaaatttgggatctaaatgcagcagaaccttgctgcccttaggaactctcttatttgacacc

SEQ ID NO: 194631 - DNA, 201 bp, Homo sapiens
ggcctccctttcacttatgggcatacaagaagataagcttagttagttagatctggcagtcctaaagctggggcctgagtcaaggctttttttttttttttaatttctttaaaagtcttctcctggttagcctcctagaggaggggctctttctttccttctctttgtggcttagccataagctagaaatttgggatctaa

SEQ ID NO: 194632 - DNA, 201 bp, Homo sapiens
agtgccacagaatctaattgcctggataagtatgtcactgggtgatgccatgaccttatggcttgagttagaaccttcatggcctccctttcacttatggrcatacaagaagataagcttagttagttagatctggcagtcctaaagctggggcctgagtcaaggctttttttttttttttaatttctttaaaagtcttct

SEQ ID NO: 194633 - DNA, 201 bp, Homo sapiens
gcacctctactactgagtccaaagtcaccactgcatacccagctcagcagattccctttcgtatgaaactgcttccatcagtaaaatattctatgtctggstccccaaggggcctatctgtcaaatctctctggcttgagaacacttcatctatcacatttacacagcaatgaagggggtctcctggtactgacttgatga

SEQ ID NO: 194634 - DNA, 201 bp, Homo sapiens
agaaaatgtttgtggttgggatgtatgcaaaagtgacacataatagtttagaagacaactaaacttgttttaccagctgtttaggcattttttttttttttgtaacctcttcttgatttggagggtttggtcttgttctaattttatccctcaaagctggcccttacaatcttacatgcccacctcttccgtgatagttcc

SEQ ID NO: 194635 - DNA, 201 bp, Homo sapiens
taaatatgttttttatatatatatatatatatatatattttttttttttttttttttttttgagatggagttttgctctgtcacccaggctggagtgtagkggtttgatctcggctcactgcaagctcggcctcccaggttcacaactaatctcctggctcagcctcccgagtagctgggagtataagcgcccaccagcat

SEQ ID NO: 194636 - DNA, 201 bp, Homo sapiens
caaggttcacaccataatggaaatttcattctagtgtagtgtcacacaaaatgaatatatatatatatatatatatatatatatatatatatatatatatrtatatatgtatgtatacatacagagagagagagagagagagagatgaagtctcactctgttgcccaagctggattgcagtggcgcgatcttggctcactg

SEQ ID NO: 194637 - DNA, 201 bp, Homo sapiens
ttggttaggatttttgatagaaaggctgctggctgtcagtggtcttgagagttgaagccaactgggcttctgggtcaggtggggacttggagaacttttgkgtctagctaaaggattgtaaatgcaccaattagtgctctgggtctagctaaaggactgtaaatgcaccaatcagcactctgtaaaaaaacaccaatcagc

SEQ ID NO: 194638 - DNA, 201 bp, Homo sapiens
tggcagggagcagttagggctcagcgggggttggacaatttgacaccaggtgacaacaccagccgcacttccctgctccagtcatccttcctcctctcttytcatttatcccttcagtttcatatggaggcctcagttgaaaactgcattattgtgagcatgaacaccgctgaccctggcagccagggcatcacacacagt

SEQ ID NO: 194639 - DNA, 201 bp, Homo sapiens
aaatcactgacatgagccagattgattaacaggagagaaagattgcaaatttatttaacatgtatacatgggagccttcagaatgaaaccccaacttctcraggatttacagaaattttcatactacaaaccaatactgagataagtctcaatcaatttagaggttattttgccaaggttaaagacatgcctgtgacacag

SEQ ID NO: 194640 - DNA, 201 bp, Homo sapiens
ttttaataatcaccattctgataggtgtgagatggtatctcactgtggttttaatttgcatttctctgattaatgacattgagcattttttcatatgtttkttggatgcttgcatgtcttcttttgagaagtgtctgtttatgtactttgcccattttttaattggattatttgggttttacttgttgatttgtgttcttt

SEQ ID NO: 194641 - DNA, 201 bp, Homo sapiens
taatctcctggctcagcctcccgagtagctgggagtataagcgcccaccagcatgcccaactaaatatattttttttactctccccctttctctctttctyttccccacccctcatcaccaaggtcacagagtttaattttaaaaaacaagcttagcagtctggttaagggcacagactaggatgccgactgagtttgaat

SEQ ID NO: 194642 - DNA, 201 bp, Homo sapiens
ttaatttttgtatatggcgaaaggtaggagcccaggtttattctgctacatatggctagccagttttcccagcaccatttatggaataggaagtcctttcyccattgcttatttttgttcactttgttgaagaccatatggctatagctgtgacttctctattgtgtttcactggtgtatttgtctgtttttgtaccagta

SEQ ID NO: 194643 - DNA, 201 bp, Homo sapiens
ttactctccccctttctctctttctcttccccacccctcatcaccaaggtcacagagtttaattttaaaaaacaagcttagcagtctggttaagggcacaractaggatgccgactgagtttgaatcctggctctgccatttgctagctgtatattaccaagcaaattacctaacctctctgagtctcagtttccttacct

SEQ ID NO: 194644 - DNA, 201 bp, Homo sapiens
gggtgctttcgaagcatttggaacctctagttgatgccaagtgtggcttagggtagagaatggagataaaggatttggatctggtaagtaggagtaattcygggtgcttctccatagagttttgtttttagtctcatcataatactgttgccctaggcaggttatttctcctactgcctctgtgaaagcctttccccaacg

SEQ ID NO: 194645 - DNA, 201 bp, Homo sapiens
atgccgactgagtttgaatcctggctctgccatttgctagctgtatattaccaagcaaattacctaacctctctgagtctcagtttccttacctgcaaaakgggcatgattagagtagtactcatctcctagggttgctctgagtactgaatggttcatatttgtaactcattgagagcattgcctggaacatagcaagtg

SEQ ID NO: 194646 - DNA, 201 bp, Homo sapiens
cagcttggggagggagctgcacaggccaggattgtttcagagaccccagggcctccacaggaaacactggttttccacacctcagtttcccctcatgacayagggactctgggggagtttgctgtgcatctttaatgaacatcttaattgttgcaagttccttcatgctaatagaaggatgataatgattacttttagtta

SEQ ID NO: 194647 - DNA, 201 bp, Homo sapiens
ctccacaggaaacactggttttccacacctcagtttcccctcatgacatagggactctgggggagtttgctgtgcatctttaatgaacatcttaattgttscaagttccttcatgctaatagaaggatgataatgattacttttagttactagattaaaaatctgatatccacagtgggtaagacatgattttcaataatg

SEQ ID NO: 194648 - DNA, 201 bp, Homo sapiens
aaacactggttttccacacctcagtttcccctcatgacatagggactctgggggagtttgctgtgcatctttaatgaacatcttaattgttgcaagttccytcatgctaatagaaggatgataatgattacttttagttactagattaaaaatctgatatccacagtgggtaagacatgattttcaataatgttagtggtg

SEQ ID NO: 194649 - DNA, 201 bp, Homo sapiens
ctgatgttgtcccaaaaagattttacccctaagacattgcaagaaatgtcacctcccagggaagatcgttgtattggttttcttccctccttgatgctggragtcccgaaggctccaggaagggaagaggtgtgaagcccttctcactctgcttggtcttaggagaccttagtgagtcccagcgcccccacctgaagcccc

SEQ ID NO: 194650 - DNA, 201 bp, Homo sapiens
tgtcccaaaaagattttacccctaagacattgcaagaaatgtcacctcccagggaagatcgttgtattggttttcttccctccttgatgctggaagtcccraaggctccaggaagggaagaggtgtgaagcccttctcactctgcttggtcttaggagaccttagtgagtcccagcgcccccacctgaagcccctgatagc

SEQ ID NO: 194651 - DNA, 201 bp, Homo sapiens
ttcacttttcccattgagtgacttttttcaattatatgcttttgtaaattagaagtgtttttactggcatttctttatgcacgtttttatttttaccatcrttttaatttaaaaaatgcagttacacattttccatgcatacctctaatttatggcaggttatacaggtcttgcagttatggaaatggtataaagtctcct

SEQ ID NO: 194652 - DNA, 201 bp, Homo sapiens
agaaatgtcacctcccagggaagatcgttgtattggttttcttccctccttgatgctggaagtcccgaaggctccaggaagggaagaggtgtgaagccctyctcactctgcttggtcttaggagaccttagtgagtcccagcgcccccacctgaagcccctgatagcctcctacccactacaatgtcgtgagtctgtaaat

SEQ ID NO: 194653 - DNA, 201 bp, Homo sapiens
gaataagtgaggttccagaaacactgcatatgtccaggctgcagtggagaatgtcgtagaatcctggattcatagagtgtggagccacggtgaagggtgcrtgagagagcccctcccccatagccaccccctgcctttccacaaggaattcccaaatgtcacccagtggattctcagacttctgtctcccatttcagtgtt

SEQ ID NO: 194654 - DNA, 201 bp, Homo sapiens
ccctccttgatgctggaagtcccgaaggctccaggaagggaagaggtgtgaagcccttctcactctgcttggtcttaggagaccttagtgagtcccagcgyccccacctgaagcccctgatagcctcctacccactacaatgtcgtgagtctgtaaatatcaagtccatttccaggcttgaacctcccagtccaaggcact

SEQ ID NO: 194655 - DNA, 201 bp, Homo sapiens
ctccaggaagggaagaggtgtgaagcccttctcactctgcttggtcttaggagaccttagtgagtcccagcgcccccacctgaagcccctgatagcctccyacccactacaatgtcgtgagtctgtaaatatcaagtccatttccaggcttgaacctcccagtccaaggcactgccctagaacacacctcgcttagatctg

SEQ ID NO: 194656 - DNA, 201 bp, Homo sapiens
gcactgccctagaacacacctcgcttagatctggctgaacttcaggggttcttctttccccctccccaggttcacccaagatcccaaggcggggcagttamtctcagagctatttacaaactgaaaagagaacattcctctcaagctttctgaagactgtctttacctcaatatttacactcctgctgacttgaccaagaa

SEQ ID NO: 194657 - DNA, 201 bp, Homo sapiens
gctggggcacaggggctgttcctaattgttttgtacctagccctggcatgattagggcaggtgggtagtggccagggcatggcaacccgatcaaagaggcrgttggagtgtgggctccaggttggctggaccctgagagggagtttctccaaggtcaacaaggcctcagatgccagagcatcagaatacagaaagcaaaac

SEQ ID NO: 194658 - DNA, 201 bp, Homo sapiens
tctcacttcttccccactatgtggacttttaaaatgcaagaatcatgcatgaggaattgtatccactctcatcctccagtattagcagagtccctggcacwtgctaagttctcgacagtgttagtccattgactgaaggcatcctgaagtgggtgggttttaggctgggttctgcagggtggataggatttggggatgcag

SEQ ID NO: 194659 - DNA, 201 bp, Homo sapiens
attcatgcacagagaagtttacttcaccaagagatagttaactgagatgaagctgagatacaagggctgccccatgggtacgctgagtgcatgaatagtcyaggcttgagggtgatgggagtgagggggagaagaggacatctttagcctttgctatgcccatgatgatgttctcagcatcaagagcctttcggggaggag

SEQ ID NO: 194660 - DNA, 201 bp, Homo sapiens
atgcacagagaagtttacttcaccaagagatagttaactgagatgaagctgagatacaagggctgccccatgggtacgctgagtgcatgaatagtccaggyttgagggtgatgggagtgagggggagaagaggacatctttagcctttgctatgcccatgatgatgttctcagcatcaagagcctttcggggaggaggcac

SEQ ID NO: 194661 - DNA, 201 bp, Homo sapiens
aaagagtatatacctcttgtttgatttccctcccaaaatattccaactacactcctcccattgatgtatgaacatctccatttggcagactcttggcaatscttgggattattaaaaaatgtttttggctattggataggcaaaataataataacaataacagcaatattattttcctctttaatttgcatttatctgaag

SEQ ID NO: 194662 - DNA, 201 bp, Homo sapiens
aagagtatatacctcttgtttgatttccctcccaaaatattccaactacactcctcccattgatgtatgaacatctccatttggcagactcttggcaatgyttgggattattaaaaaatgtttttggctattggataggcaaaataataataacaataacagcaatattattttcctctttaatttgcatttatctgaaga

SEQ ID NO: 194663 - DNA, 201 bp, Homo sapiens
cctgtgcttaggcctagcagagccagagtcctgcccacttcctttcagcccagccagcttggcaccaggagggagaacctgacacccctgttgccccactyacccagctcagtgttctcctgggaagcctctcacccacatcctctgcttttgtcttcacagaaattcttatctctggacttacagggagacttcaaagag

SEQ ID NO: 194664 - DNA, 201 bp, Homo sapiens
ccccagggctctctctagctgcacctcctgacctacattttctttcactgggccccaggccctttgcacttgctttttcttctgcctggaattcctttctktggatatttacaaggttcatgtgctcgttgtgcttgttttatgaaggtctttgcctccaaaacctcaaatgccactgcctccaaaaggccttccctgatt

SEQ ID NO: 194665 - DNA, 201 bp, Homo sapiens
ctctgcccactcccctgcttttttacattttctactccccaaaatggcactatggaagaaggctgaaccagaatcttccactctcaggaggcagagataayagcgatgattagccatggagggaggaagcctaaatctcagtccaaggacactcgcctcctcccagcacacaggaaactccaacagtatcctcctgatctc

SEQ ID NO: 194666 - DNA, 201 bp, Homo sapiens
gaagtcaaatatgcggggcactttttgaaatccttgttctgggccgaactgggcgcagatgcgtagaaaggcaaagacacaaaaggtccggctccgtggcrgggcgcgacctccgtacttggaattggacttggagcagctgagcccagcaagcctggcccgcgcggagacacagggagggtgaacatgctgagaccgccc

SEQ ID NO: 194667 - DNA, 201 bp, Homo sapiens; identical to SEQ ID NO: 33502

SEQ ID NO: 194668 - DNA, 201 bp, Homo sapiens
tcaccaagagatagttaactgagatgaagctgagatacaagggctgccccatgggtacgctgagtgcatgaatagtccaggcttgagggtgatgggagtgwgggggagaagaggacatctttagcctttgctatgcccatgatgatgttctcagcatcaagagcctttcggggaggaggcactggaggctgggtagaaagg

SEQ ID NO: 194669 - DNA, 201 bp, Homo sapiens
caagagatagttaactgagatgaagctgagatacaagggctgccccatgggtacgctgagtgcatgaatagtccaggcttgagggtgatgggagtgagggsgagaagaggacatctttagcctttgctatgcccatgatgatgttctcagcatcaagagcctttcggggaggaggcactggaggctgggtagaaaggaagg

SEQ ID NO: 194670 - DNA, 201 bp, Homo sapiens
aagagatagttaactgagatgaagctgagatacaagggctgccccatgggtacgctgagtgcatgaatagtccaggcttgagggtgatgggagtgaggggsagaagaggacatctttagcctttgctatgcccatgatgatgttctcagcatcaagagcctttcggggaggaggcactggaggctgggtagaaaggaaggg

SEQ ID NO: 194671 - DNA, 201 bp, Homo sapiens
tgagatgaagctgagatacaagggctgccccatgggtacgctgagtgcatgaatagtccaggcttgagggtgatgggagtgagggggagaagaggacatcyttagcctttgctatgcccatgatgatgttctcagcatcaagagcctttcggggaggaggcactggaggctgggtagaaaggaagggacagccagggtatg

SEQ ID NO: 194672 - DNA, 201 bp, Homo sapiens
cttgagggtgatgggagtgagggggagaagaggacatctttagcctttgctatgcccatgatgatgttctcagcatcaagagcctttcggggaggaggcaytggaggctgggtagaaaggaagggacagccagggtatgtgcagtagggtggtggcttgggtcccagttgggagaattatgcaggagagagattgcctttt

SEQ ID NO: 194673 - DNA, 201 bp, Homo sapiens
gtcagatcttggaactacaatgcaacactacagtcactgcaatcttggtgaacacacaccaaagagaagcatggggtagggtgagtctcagtgagcttgcrtgagtcagggctttctgataggagatgaggaaactcccttaagtaccttgaacagaaaaagaaatgtgttacaatagcatcctcatgtaaactgaaaatc

SEQ ID NO: 194674 - DNA, 201 bp, Homo sapiens
ccatgatgatgttctcagcatcaagagcctttcggggaggaggcactggaggctgggtagaaaggaagggacagccagggtatgtgcagtagggtggtggyttgggtcccagttgggagaattatgcaggagagagattgccttttgcaaagttgctgggagctggtgaactttggatagcatcctccttcagttgtaacc

SEQ ID NO: 194675 - DNA, 201 bp, Homo sapiens
tctgagcttttgcatgtgctgttccctctgcctggaatgcttattctatccgaagaacacctcttcatcctgcaagacccagcccccagttgcctccactsaaagactcatctcctcttcacctatgtttctccagcacattgcttttctctgtcatgacacttagcaggcagcccagcaggtgaaagttgacacatctga

SEQ ID NO: 194676 - DNA, 201 bp, Homo sapiens
agaccgcctgggttaaagtcctgctgctaccacttttgagttgtaggaccttgggcaggttaagtgcctccattttcccacctggagaatgccacagtatyagtatctacccaatggatagtttattttactgtgcttagaacagcacttgggacatagtttatgttatgagttcttttatatttcatgaataatattatt

SEQ ID NO: 194677 - DNA, 201 bp, Homo sapiens
ttgaaatttggcaagcacgggaagcaaggatggagtcttccccatcaggtctccatggggacaggagtcagatctccttcaaggtgcaattactatgaacmttttctaagtgttaacatcccagcacctcaatcccgagtgagtgatgcgagggttgtgggagagattccactcactgatgagaaagcctagggagatgga

SEQ ID NO: 194678 - DNA, 201 bp, Homo sapiens
atcccgagtgagtgatgcgagggttgtgggagagattccactcactgatgagaaagcctagggagatggaggttgagttctggtctacccatcagcaaggyatcccaggccagtcttggtggtatcaccttcatccctgtcagccacagcctgtgtctctgctccccattacaataaagctgcttcatgatctctctccac

SEQ ID NO: 194679 - DNA, 201 bp, Homo sapiens
ggtttcttcctgaacacaccactaggctgctctcattgtggtcaccaatgacctccccctgtgctccacccaacctcacaggacttcccagcagcagcagrtggccgctcagcctctgtgacatgcttccttcccagcccctttcctggtcccccctcctccctgtccacaggcctatcttgtctccctctccctccctac

SEQ ID NO: 194680 - DNA, 201 bp, Homo sapiens; identical to SEQ ID NO: 33503

SEQ ID NO: 194681 - DNA, 201 bp, Homo sapiens
atggcaacccgatcaaagaggcggttggagtgtgggctccaggttggctggaccctgagagggagtttctccaaggtcaacaaggcctcagatgccagagyatcagaatacagaaagcaaaacacatggtacatagaggggtgcagcgaggggcctcgaaatacccccatgccattttatagacagagaaactgagactca

SEQ ID NO: 194682 - DNA, 201 bp, Homo sapiens
atattttatggcctaaacaatactgttataagccaactacaaagcacatttcataaattatttatattattgtattattcttcaaaaaacaattgggtctrtctgaacaaaatctttctgccttatctgatcctctggatttggtttctagtacctatcagatttattttttccttcaagcaggatgaccctttttaactt

SEQ ID NO: 194683 - DNA, 201 bp, Homo sapiens
gttcctgagtcttcaacatcttaatttctgtcacagtctccttctgatcaaacatgacctcatatccctaatcttaaataaaacatggcatgctttgtctygacctaatatctcttgttagcaattatttttaatttgtctttttatttcaatctcccttcataactagcttttaacaacagtttttattttctcttttat

SEQ ID NO: 194684 - DNA, 201 bp, Homo sapiens
ataggttggagtggtgaattcgaattttaaggagtctcccacctaaagcaatactatattatcaaccaactcttacagagggacttcacagagtgcaaggycacaccctttcaaagattgcaacaaagagaagagaaagcccaccccaaggtttactgggctttcatagactgtactgctacaggtaaaaggggacagggc

SEQ ID NO: 194685 - DNA, 201 bp, Homo sapiens
tcactacgttgcccaggctggtgtcaagctccgggcctcaagcgatcctcccacctcagcctcccaaagcgctgaaattacagacggtgagccaccaggcrcagacagaacatggactttaaattaatctttacttttctttctagcacaatgccatgtgcatagtagggcttcagtaagtggagatagaactaaggcaat

SEQ ID NO: 194686 - DNA, 201 bp, Homo sapiens
atacaacatcagagatatatttacaaaggcctgtgtttaaaccgaattgccatttatcatacataggtatgacagcatacttgctatctattatactgggrcacaccactaaaactatcttagttcagtttgtatttatagtgtaagaataatcacgaatatattcttacctacctcatgagttttatggaggatttaaca

SEQ ID NO: 194687 - DNA, 201 bp, Homo sapiens
aatgtaattataatgatgtttcggaaaaacttttcatttttctggctttctgaagattttgctatgtcagcaacattctttgtgctcatcagaaagtaccraatactgccctgagggcatatgcagccttccacaaaacaaagtaaaaaaacaaattggacaagcatttaaaaaagcaaggaaagcaagtcagatacatac

SEQ ID NO: 194688 - DNA, 201 bp, Homo sapiens
aaagggtaagagtgagtgggagaccctttgggtgattacattttgtgtaacaccttggataaattttattctgatttttctaggagtgactttttttttgycatggaaatcttttattttcaagagtctcaatcatactgtacatataaaatgagaaatttagacttagaaaaatttaggttacaactgtatccagctatc

SEQ ID NO: 194689 - DNA, 201 bp, Homo sapiens
gcaccacaacttattcctggcccccaacaactcttggggaaggggtggattgaacaggtgaggagcaacctgccctcaccatgaacctctggaatcctggmaacctgagataccacaacacccatggacacttgagctagcagggaaagctgtgtagagagttgataggagcaggactctatcctgtgctgaactcacggg

SEQ ID NO: 194690 - DNA, 201 bp, Homo sapiens
taaactctgtacctctaccaaaaatgccttggtctgttcccatggcagtcagggaagggtttcacaagggagagttgaagtataaaatgactcttgagtcytaggcttaaaattgtaggctgtcagttctactgcattcttttggtgcaaacatattaaaaagtcagcttgaactcatgagtggggaacagatttcacttc

SEQ ID NO: 194691 - DNA, 201 bp, Homo sapiens
gcaccattgcactccagcctgggcaacaagagtgaaattccatctcaaaacaaacaaacaaacaaacaaaaagaatgctgctgctcatttagcaaaaaggrcactcatttaggacactgttcctgttgaagggtcactgttctacaatcccttagccttcgtattgttcatcttttaatcaatgtttaaatcaatctattc

SEQ ID NO: 194692 - DNA, 201 bp, Homo sapiens
cttctttctgtcaacatcatacatagacatcttatgcacatttcaagtgatttccatgtacaaaatccatttatagtaggagatgtagatcaagttggttmttttttttttttacatactggtttatttaaaatattgcagtacattttatgaaaataagtctattttttccacatgaaattcagtcaagggttttgagca

SEQ ID NO: 194693 - DNA, 201 bp, Homo sapiens
ttactattttaggtcagtgtccctggaaatagactcttaaatatggattaacatacaagaaatttatttgggtattattcttagagaaaaccactgtgaargaagtaagagaagctggattgggcagaaggcaagggagatgcaattgcaatagaatcttcagttgataatatcataagctctgaagttaatcactcctag

SEQ ID NO: 194694 - DNA, 201 bp, Homo sapiens
ctttagcccaacaactaatcatactgtctcttctgctttctgccacacatctgggagtaaaaagttcccaatcaattcttccattctaaatcatatactgrttgttggaagaactaaatttacatgggaatgcctctggcctggtaataaatcgcacatgcttttttgtttgtttgttttgctgtctacatttcctttgct

SEQ ID NO: 194695 - DNA, 201 bp, Homo sapiens
atgcctctggcctggtaataaatcgcacatgcttttttgtttgtttgttttgctgtctacatttcctttgctaacctttgatatgggaaatatttgtaaartgaggataccattaaatatgcaacacctttttaatatacttttcattccataaacttttttaaacattctgatttctccatatcttttctctttctgggc

SEQ ID NO: 194696 - DNA, 201 bp, Homo sapiens
cgcttgtcacttacatacaatttgttttgagtcacacttaacatttttctcttgataatttctctttatgatttcaagtaaaataaaacaggaacatgaasttgtacttcattatgttctttctacaccagtgacaaagccctaagatatgcttattgtgttagattttgttccttctcaaaatatcagaaaatgcaataa

SEQ ID NO: 194697 - DNA, 201 bp, Homo sapiens
ttccttctcaaaatatcagaaaatgcaataaggtacattttgtaacaaaatgtcttgaagaagcataaatcccatggagaacagaaacatgtgtcataacrtgatatctgatttatattgaacacctgtagactagagtttcttgtatttgcttttcatttgaaaatggcagaatggagcattgagcatcatcaatatggc

SEQ ID NO: 194698 - DNA, 201 bp, Homo sapiens
tcaccacatccagatgaaaattaagtccacaatgagatgccaccttactcttgaagaatggccataattaaaaagtcaaaagagtcaataaattattacamccaaatctcttctcaggcttgatttctaatttaagtcaaacatgcacttaagaaaatgtaagtgttatggaagctgatgtaagacaactcatatccctgg

SEQ ID NO: 194699 - DNA, 201 bp, Homo sapiens
tatggaagctgatgtaagacaactcatatccctggaagtggaaccagagacaatgatgaataactttaaagaaattgcttactagaaaggttgcacaatartatcatacttcccacctcagaggttcaagggtatttactacatctttatcagcattgactgtgaatgtgcaaaaaaagaagaggggtggccattttgata

SEQ ID NO: 194700 - DNA, 201 bp, Homo sapiens
gacaaatattctgaagaaaatgaaattgggtaatgggatagagactgattagcataggtgacctaattgtcactaggggaaagtatctctgatgctttgayctgagcagagaatgacccacatagtccagaagaaaaggggtctatgcagaggatacaagacgtacaaagacacagaaatgagggcaagcctggagaagta

SEQ ID NO: 194701 - DNA, 201 bp, Homo sapiens
tttctccatatcttttctctttctgggctttggtagtttttgagagtgaaatatactccagttttcccctcaaaggtaaaaggaaactctatcagaagagrttgatctgaattattgatgtgtattttatctctatgtgttctgtgcctctccgcctgattttttcagtcacctgtgaagcatctgctatatgcttggctc

SEQ ID NO: 194702 - DNA, 201 bp, Homo sapiens
ataataggtgcttcaagaccttgactttttgtccttctttctccctcatatgttattctatagatatttattaatacagtgatgagcacataaagttaacygagacatttcctctactttctgatcaatagatttattaataaaaattataaaataacttgaaagttaattatagtaaacatgtatatgtttttttttcca

SEQ ID NO: 194703 - DNA, 201 bp, Homo sapiens
acgatgccatggtcaccactcactgcagcctcaatctccctggctgaagcgatactcttgcctcagcctcctggagtagctggaactataggcatgtgccmccatgcccagctaatttttctattttttttttttttttgtagaaaacaaggttccactgtgttgcccaggctgatctcaaactcctgggcaacatactga

SEQ ID NO: 194704 - DNA, 201 bp, Homo sapiens
aaattagccaggagtggtggcacatgcctgtaatcccagctactcgggaggctgaggcaggagaattgctggaacctgggaggcaaaggttgcggtgagcygagattgcaccattgcactccagcctgggcaacaagagtgaaattccatctcaaaacaaacaaacaaacaaacaaaaagaatgctgctgctcatttagca

SEQ ID NO: 194705 - DNA, 201 bp, Homo sapiens; identical to SEQ ID NO: 33508

SEQ ID NO: 194706 - DNA, 201 bp, Homo sapiens
ggctaaaacttggctattatcattggctgaaattctgctacttattaaaagagtatactcttaatttagattgcagttcctttacatactaaattaagttscagtttgctatgtgtgggggcagctttaagccaaataaaatttaacactttaaaacaacatgaaaattgcaaagataccccatttgttattagagggtct

SEQ ID NO: 194707 - DNA, 201 bp, Homo sapiens
atatttaatgctgacaacttcgaagatatgccagatttaatcaacacaaaatatttttttaccaaggattagccaagtcatgtaaacttgaaaagtattcrggttagtttttctaacagaatacctgatttatataagcacttattttgaagatgattagatagagctcttttacattttaatttggcaatattataaaaa

SEQ ID NO: 194708 - DNA, 201 bp, Homo sapiens
gtaatactttaactgactgttttacaacttgtccagtgaaatgatgacctctatcactggatatttttccaggaatgccctataaggggatactaataagsttttagctactatttataatattggccttcctgcaagagaaatcttccatacaaacagaaaacatgcattgaaggtggcaactgaatgaaatgtttctgt

SEQ ID NO: 194709 - DNA, 201 bp, Homo sapiens
ttttcttttctcaaataatcagtgccttttcatcttacaccatatttttattagtaagcctcttctactttgtgtggtcttccttctaagctctgttctcrtctaggtctaattttaaaaagaaattcaactaagatatgaatacaatgagtttaactgtttgcttgtattacaaaataacttctatacataaaagtagta

SEQ ID NO: 194710 - DNA, 201 bp, Homo sapiens
tattttatctgtattattttttattttgaaacaatagtcattcttctttgggactaaaaatactttctttttcgttaactaaaacaaaatctcttcatacktgatagctttttcttaccaaaagcacattttaccttccttacatatttgcatatagagttgttttctcattattttttaaaaattaagcaacatctataa

SEQ ID NO: 194711 - DNA, 201 bp, Homo sapiens
gtagactacatgattatttcttataacataagaaatcacaacaagtcaaattccccaaatgcctaaatgttttaagactcaggatcaattttaaaaaacamatttcaatataaaaaaatgaaaatgcagaaatttaatggaaacacaatactacatgcaattactccaaataatttgcaatactgaggtaaacacttaaaa

SEQ ID NO: 194712 - DNA, 201 bp, Homo sapiens
aaaggaagtatgccctttcctatgcttataccctctgaatctcatattaagcattacactggaaaaacctaattaatactaagaaaacttgtgcaagggcrtcttgagaaatgtttttagatacccaacctctgaaaatgatgcaaatgatactaagtgccaacccactatgccagcacactggtatgcttttaattcttt

SEQ ID NO: 194713 - DNA, 201 bp, Homo sapiens
ctgtgaccattgtatgagctgtcttatgaccctacccataataaaataattttaatgaagaagtatttaaaatctgatatattggacttaaacaatgaatraaaaaacatatttgaagagataagttggagacttgtattagtggttttgagaacttaataaaaattaaaacaccctccccaaaaagaaataaaatgacag

SEQ ID NO: 194714 - DNA, 201 bp, Homo sapiens
acaaaaaatacaaaaattagcaggtgtggtggcttatacctgcagtcccagctactagggaggctgaagtgggaggaatgcttaagtccagggggttaagrctgcagtgagccatgatcatgccactgcactccagcctgggcaacaaagcaagaccctgtctaagaaaaaaaaaaaaagtgcagcctatccctcaccatt

SEQ ID NO: 194715 - DNA, 201 bp, Homo sapiens
gaaaggtatatgtatagagtcactaaactccttgcctctcaagagcagtgaatcaggagtatcaaatgtgtatttattttgcacaactctctaaacagttmatgcccaggactatcagtgttctctatacttttagaagtagagtccttagcattttggagtctagtaagataaagcagccaactccagaaatgccaaagc

SEQ ID NO: 194716 - DNA, 201 bp, Homo sapiens
atcactctggtagcatgaaaagactaagctttccatggggatatctcagggagaaatggatgaagtgaatacaaatccagaccccagcatttacacacacrcatctctgctttacagtattgtctttacttcaggtgaaaaaaacataggctatttaatgcaatgcacaaagtaagtttttggctattttttaatatagta

SEQ ID NO: 194717 - DNA, 201 bp, Homo sapiens
tacatctattgagatggtcatatggctttgtggttttgtcctttattaatgtgatatattacgtttgttgatttgtgtatgttgaaccatccttgaattcstggaaccaacctcacttgatcatggtgtatttttttttgatgtgttattggactaaacttgctagtattttgttgaggattttggcatctatgttcatga

SEQ ID NO: 194718 - DNA, 201 bp, Homo sapiens
gtttttgtaccagtcccatgttttaattactgtacgcttataatacagtttgaggttgggtaatgtgatgcctccaactttgttctttttgcttagggttrccttggctattcaagctcttttttggttccatatgaatttttaaatagtttttttttctatttttgtgaagagtatcattgttagtttgataggaatagc

SEQ ID NO: 194719 - DNA, 201 bp, Homo sapiens
aggcaaaattatttgtctagaaaacccatatttactcttcaggctttcagtgattgcatgaggccatccacattattgaaagtaatctgctctactaaaaycatgttaaagtcaactgattgtaggttttagccacatctgcacaatgccttcacagcaacatacagattagtattttattacattattgactactatagc

SEQ ID NO: 194720 - DNA, 201 bp, Homo sapiens
attttaatttctttcagtctcacatacttcctgaatctttctggttttttgtttgtttgttttttgttttctatctttggcactgacatttttgaagagtwcatagcagctttatacaatatctctcaatatgaatttgggtaattttatgtcataataattttctaattatggtaactgaaaaaaatgctgaataagtga

SEQ ID NO: 194721 - DNA, 201 bp, Homo sapiens
ttgtttctatagatattaaattaactaaaagtatcccttaagggaaatgaagggatgagccaaattaattgcagcaagaacacacccttaagacagagatygctcaggcttttctttgtagcttaagaatgcctttaagcggttttccaccctgggcaggccgggtgttccttgccctcattcctgtaaacccacaacctt

SEQ ID NO: 194722 - DNA, 201 bp, Homo sapiens
aagtgtcactttaagcacttcacataaactcaatagtcttcatttcttcataagcagggttgttgagagaactaaagtatatgagataatttaccaaaatrtaaggtatataattttaattcaaagtcagcaaatgaagttaaatatattatttcataattatgcatacttgccaaatataagtttaatatttcaagttgg

SEQ ID NO: 194723 - DNA, 201 bp, Homo sapiens
aagatagtcaaattcacatcttatacagttaaagtctctatggatactcaattattgattaccatctccctctgatatgtttctttgctttacatgatatkacacactctgtatttctgaccctgactactcattctcctactctgatttccaaaattcagcatggcctccagttctgttcttggggctccccctcctctt

SEQ ID NO: 194724 - DNA, 201 bp, Homo sapiens
ggtcaaaggaattttgcaggtatttacatctctctaatcagatatccactgataaattgataaataataatgcagtgagttaaacagggcttggttcctawttgcttataaatttagtattgatgctaatcaaattagctttcttgacattaattgtgatgggtaacttatgtgctacagagctaactgttaaagacttta

SEQ ID NO: 194725 - DNA, 201 bp, Homo sapiens
actttgattacacagaaatttgttcattctccagatgcgaactccttcatttacatgaccattttgaatctaaatatatatgcctttcttggtatcattcmgttattccagaccttccatatcattttaaaagatgaaatgtctttcagtagatggtgaagagcccattttttaaaaaaaaaactttattttgcacaggtg

SEQ ID NO: 194726 - DNA, 201 bp, Homo sapiens
gggctatattttaagctaccaagagcttcagtagaaagttgtttgaaaaatgggtgacaacgtttctgagattatagaaaggaaactattagatgaactaycagactggaagagtagctcatcaagattcctccatttgtagatttgatggtttctgaacggtttgtggctgactactttgcagttaaacatttattctac

SEQ ID NO: 194727 - DNA, 201 bp, Homo sapiens
atatatatgcctttcttggtatcattcagttattccagaccttccatatcattttaaaagatgaaatgtctttcagtagatggtgaagagcccattttttwaaaaaaaaactttattttgcacaggtgtaacacaggtggtacaccctttcctctctgccccatagggtgtagctctaactaccctctagggaagagaagg

SEQ ID NO: 194728 - DNA, 201 bp, Homo sapiens
tatgagttgtctaccattacattttctaattatagtgtttttcatgtcaaaataagtttgagaaatagaatattgtataaaaatatcaaatatctctcatytatatcatcgttttaaattgatttcagttaaaattccattggcaattttagtagcacttgacaataaaattctcaaagtgatttaaataatagaccagcc

SEQ ID NO: 194729 - DNA, 201 bp, Homo sapiens
gattaaacttcagatctttcagcctggtagacataagtctcttaaaacacagctaccttttaaaagctgtcctttaaaacttatttcacactttaactctytataaaccttctgtttttgtcaatttgatttactctcaaaggcatctgacattcttatatttcactcaccatgtctataaaacccttcttccctctttgc

SEQ ID NO: 194730 - DNA, 201 bp, Homo sapiens
ggcacttcatttaagttatatccactatttcctttgagagttattaggttaaggcacaatcacaaggctgtaaaaagcttaacttgctttacatgaagtcyaactgtataagtaccttacactttaatgtatcaaggggcaggtagtaatatttgtgaacaatttcacttctgtatgtttatgtctgagcttacacacaca

SEQ ID NO: 194731 - DNA, 201 bp, Homo sapiens
ggtccagcttcaatcttctgcatatggctagccagttatcccagcaccatttattgcatagagattccttttcttattgcctttttttgtcagccttgtcraagaatggttgtaggtgtgtggctttctttctgagtttttaaaattctgatctgttggtctatgtgtctgtgtttggtagcagtaccaatctgttaggat

SEQ ID NO: 194732 - DNA, 201 bp, Homo sapiens
ttcattaagaatgctgaaaataggcccccactctctcctggcatgtaagatttctgctgagaaattcattataaacttcatggggttccctttgtatgtgmcttgacctttttctctagctgcctttaacccttttcccatttagaaaaaaaagtgcagctcgctgccagcactcatttaattttatataaacagactctg

SEQ ID NO: 194733 - DNA, 201 bp, Homo sapiens
tttttatttagatctagtaatatttgctttataaatctgggtactccagtgtatttagaattgatatatccctttgactgattgatctctttatcattatrtatagtgaccttctttgtctttttttcagttttcgacttataatctgttgggatgccagatgggcagtcttcagacccccctggtggcagaggtgggatg

SEQ ID NO: 194734 - DNA, 201 bp, Homo sapiens
aaagacaaagtgaagtgataaatataaactacaagttagaggagtgtgcatttgttactataaagaggagcacagaaagagagcactagtaggagtgggtwgcagggtccaaagaagttctttttcgagaaacattatataatactatattctgatatggacattatagtagagaggagagaatttaaaaacttttgacaa

SEQ ID NO: 194735 - DNA, 201 bp, Homo sapiens
aaatatatagatataaggcatattgaattaaaattatctatagataaaatagaggtgcactcaggtaaaattttagactgctaatcttccctgaggaataytgattccctttggttttatcctctctttctattagatattaatttttactctctctctcttttattttctttttttggtctacagaaaagccaatagata

SEQ ID NO: 194736 - DNA, 201 bp, Homo sapiens
catggatgaagctggaaaccatcattctcagcaaactaacacaaaaacagaaaaccatacactgcatgttctcacacataagtgggagttgaacaatgagracacatggacacagggaggggaacatcacacaccggaacctgttggggtgtcgggggctagggtagggatagcattaggagaaatatctaatgtagatga

SEQ ID NO: 194737 - DNA, 201 bp, Homo sapiens
atgggttcagcaaacccctatggcacatgtatacctattcaatgaacctgcactttctgcacatgtactccagaacttaaagtataataaaaaaaaatttaaaaaaaacaacaacaaaaaaccctcagagactactatgcacatttctatgcacacaaggtagaaaatctggaaaaaaaattggtcaattctgagagatat

SEQ ID NO: 194738 - DNA, 201 bp, Homo sapiens
ttaacaaaatccaataaccattcatgatagaagctcttaaaaagttagaaatacaagggaattacctcaacttgaaaaataacatcaccctaagcttatarctgatataattctttatggtgaaagactgaatgctctcctatatgagattggaaataaggaaagtatatctgttcaccctactcttattcaacatagtat

SEQ ID NO: 194739 - DNA, 201 bp, Homo sapiens
agcaaacccctatggcacatgtatacctattcaatgaacctgcactttctgcacatgtactccagaacttaaagtataataaaaaaaaatttaaaaaaaacaacaacaaaaaaccctcagagactactatgcacatttctatgcacacaaggtagaaaatctggaaaaaaaattggtcaattctgagagatataacctccc

SEQ ID NO: 194740 - DNA, 201 bp, Homo sapiens
caaaaaattggatattgtataagaaatggataaattcctaaacacatacaacctaacaggactgaatcattaataaatagaacatctgaacaaactattarcaagggaatataataagtaagaaaaagtctcccagcaagaaaagaccaggaccttatgccctaatagctgaattctatcaaaaatttaaagaaaacagat

SEQ ID NO: 194741 - DNA, 201 bp, Homo sapiens
aaaaactacctatcaggtactatgcgtattacctgggtaatgaaataatctctacactaaaccccagagacacacaatttacctataagacaaacttgcayatgtacccctgaacttaagataaaagttaacaagtaaatatataaataaataaaattgaataaagtaaaaacacaattgcaaagatttcaagagaaatcc

SEQ ID NO: 194742 - DNA, 201 bp, Homo sapiens
ttatgatctataatattttatactgatgataaataattactgtatatataaaatatattttttagaaaaaatgaaatgatggatcatcactgttatttcartgatgaatttagcaaagtgaagtgaactttagaaattagttagatctctggaacattatagtaaaagctataatgagggccatggggcattgaaagcttt

SEQ ID NO: 194743 - DNA, 201 bp, Homo sapiens
gcagattttaaggtaattatacaattagaactgtttgttacagttctcattgccaatattatatgaaaatgagttgatgacactgtcctaatgactagatyagtgtgccttagtagtcaactacttagtatgactctttagcctattaataggtcaaagcttagcaccttttctttgagctacacatggcttggtcaaagg

SEQ ID NO: 194744 - DNA, 201 bp, Homo sapiens
ataatgagaacagcatggaggaaactgcgtccatgattcagttacttctcaccaggtccctcctctgacatgtggagattacaattcaagatgaggtttgrgtgggtccacagagccaaaccatattatagttgaaataacagaaacagaattcagaatatcaatataatcgaatatcattaagatgtaaaagtatgttga

SEQ ID NO: 194745 - DNA, 201 bp, Homo sapiens
ccaggtccctcctctgacatgtggagattacaattcaagatgaggtttgagtgggtccacagagccaaaccatattatagttgaaataacagaaacagaaytcagaatatcaatataatcgaatatcattaagatgtaaaagtatgttgaaacccactccaagtaagttaagaatcataataaaacaatgtagaagctgaa

SEQ ID NO: 194746 - DNA, 201 bp, Homo sapiens
acagctgtcaaatttcaaatgcctgactagtatttcaggagtcagctgtctaagtagtaatcctatagagatggaagaccaaagaggtatctgggatggayattgatttgcagtttaataaaatttatgaacctggaaaaacctgggctttgtttaacaatctgtaaaattaaggaaatgtattcattatttcctctgtgc

SEQ ID NO: 194747 - DNA, 201 bp, Homo sapiens
ccaaactaagcttcaagagtgaaggaaaaataaggtccttttcagccaagtaaatgctgaggacatttgttagcaccagacctgccttactagagctcctraaggaagcacataaatatgagaaagaaagaacattatcagccactacaaaaacaggctgaagtacatagacgtgtgacacgataaaacaattacataaac

SEQ ID NO: 194748 - DNA, 201 bp, Homo sapiens
gggacccagaaatctatcatagccagaaaacttatgtgaaagctgtaatgtcttattttgtgccaatactttctaaacatttacatcaagtgtaaaataawctcttcaggagaaagctggttttcccctgggatacattatcttttaaaatataaaatgtatatgtaccataagttattaaatcactgaagtatgcattgc

SEQ ID NO: 194749 - DNA, 201 bp, Homo sapiens
ctttgtatataatctatctctaatgttaaaaaagttttaaagttacacagtatggccatttccctagttctttgtgaagaaatgcttatattaactctgcmgtacttattgtgtctgaatggaagccagagagtaacctgagactgaccccgaaatgacacttctatacacacacacacacacacacacacacacacatgc

SEQ ID NO: 194750 - DNA, 201 bp, Homo sapiens
aaaatattgtcaaactatatatctggcaagtgtctaatatccagcatctataaggaacttaaacaaatttcgataaaaaacaatttctttaaaaagtggayagaggacaagaacagacatattttaaaagacatacatgaagcaaacaagcatgtgaaaaaagttcaatgtcagtgattatttgagaaatgcaaacttaaa

SEQ ID NO: 194751 - DNA, 201 bp, Homo sapiens
tttgctaaagttggaacaggaattaaaagaagttaaagattgtgtaagcaaaaactcagttgtatgtaagcaaacccagttccccgtgaggaagagaaaarggctggagtcctttaaaattaactctctgtttttctctctgtggctagtgagccttatttctccctttcccaggcattgtgaagactgtttctctagctg

SEQ ID NO: 194752 - DNA, 201 bp, Homo sapiens
taagtgagaatatatgctttatttagtttggatgttattaaaagagtaaatgactaaaaatgatttatatctgaatatataaattttaaagttgaataaamatgtatttgaatttggaaatttactctttatgaataaaatatagacttgtaaatataacagcatatctttaggacaggtactacaaacattgaaaaatgt

SEQ ID NO: 194753 - DNA, 201 bp, Homo sapiens
tttcccaggcattgtgaagactgtttctctagctgtgcagctgcaaggtcactagacagataatctcaagttgtaaaacatgttgttccttgaaaagtaakaaataatgtaatgcatgtcttaattgaataactgtctttgtttctcacttctgtaatatgcttccccctgcacagatctccccccaccccacgaaatgct

SEQ ID NO: 194754 - DNA, 201 bp, Homo sapiens
taataaaatcgaacaatatgtaacgcactcctcgtatgagttggatgaatgtaaactgaatttcatacttgcaactgactataaaattgaatgaatggcaygattcatttaacaaatattaattgagtacctgctctgtgtatcagctttgtggatccattattgaacaaagcagtcaaaaatcctcacctgtatgaagat

SEQ ID NO: 194755 - DNA, 201 bp, Homo sapiens
atcaagtcagtgtatttaggatattcataacatgagccccagtatatttttgttaagtatatttaccctactctactataaatattgaatttattccttctatcttgctgtatgtttataccctttaaccagttctcttcatcctcttcccttccctgactcacctttcccagtttctgtagtttcattgtctatctctat

SEQ ID NO: 194756 - DNA, 201 bp, Homo sapiens
tttgaagtcaagtactgtgatagctgaagttttgttctttttcttaggattgctttggctatttgggctcttttttggtgacatgtgaattttggaatcaytttttctaattccgtgaataattatgttggtagtttgaaagaaagagcattgtatctgtcaattgctttgggcagcatggccatttttacaataatgatt

SEQ ID NO: 194757 - DNA, 201 bp, Homo sapiens
aaaggaaggggacttttgatgacagcaacagagagaggctttttatagaaaaggtaaagacagttgtatgaatatctcttcagggtggttaatacaaaaakacacttacccactttgggtaaaaacatataaagtatgcagaagaaaggttatcattggaaaatagccaggtttaagttagagcaagtcagtgtgacagac

SEQ ID NO: 194758 - DNA, 201 bp, Homo sapiens
aatattctttattactgaattgtataagtcatagaggggtgatatggttggctctgtgtcctcacccaaatctcatctggaattataatccccacatgtcrgaggaggagcctgatgggaagttataggattatgggggccgtttcccccacgctgttctcatgatagtaagttctcaggatatctggttgtttaaaagtg

SEQ ID NO: 194759 - DNA, 201 bp, Homo sapiens
agttacataattatttcattatgtattacaatgtaataataatagaaataaagtgtgcaataaatgtaatgcacttgaaacatcctgaaaccgtatgcccycaccccggtctgtgaaaaaattgttttccacgaaaccagtccctagtgccaaaaagattggtactgttgtattaaaacattcaaatgcattgatgaacta

SEQ ID NO: 194760 - DNA, 201 bp, Homo sapiens
tttttttttcttttctttataaataacccaatctcaggtagttgttgataacagtgtaaaaactgactaataacaggggatttattatttttctatgctcyttaaaatgatttttatctacctgcataacaagaacatgcatattaaaaatgtggtgaataatagggtaataatgacacatttaatttgaattacataata

SEQ ID NO: 194761 - DNA, 201 bp, Homo sapiens
gattaagggcttaaacctaagacctgaatctataaaaattctaaaaatataacattgaaaaaaacccataatactttattaaatgcagcagaagtactaawctctggctcatattttgaagaaaatattgtgttattttggtcttctgtagcttattgagctgcattttccttctttatcacttattctttgaacacagat

SEQ ID NO: 194762 - DNA, 201 bp, Homo sapiens
gtgggaattacaggagctacaattcaagatgagatttgggtggggacacagccaaacaatatcattctctgcctccctgctttgtatgtatttactgtaarttaaccacatgtcaaatactgaggtagacactgagaacataacacaagaacattagtatacttgtcttcaaagtgcaacttatatatggaggtagaagag

SEQ ID NO: 194763 - DNA, 201 bp, Homo sapiens
gatgttgcttcctgacagcttacatcattcactcattgtatgagaaattgcttttaaaattcatggtctacatatggataaggcatgcatgttatggtttkctataaatcagaaaaagatggtatatagaatgtcccaactaggaacaaaccctccctgtgctacataagggctgaccctgctaagagtataaatggaatt

SEQ ID NO: 194764 - DNA, 201 bp, Homo sapiens
tcattaatttcccctttattcctttctactggttgtggaatggacagttttgtaactactacattggacaaacagtagaaaaaaagctttttgaggtgagyggaagttattgccaacctgagtatccagataaagacatgaaatacagctgccctggaccacttgtctacttggaaaattgtatgtgagagaaataaactt

SEQ ID NO: 194765 - DNA, 201 bp, Homo sapiens
tgaaaaattactgaaggtgagagagaataaatagtctaaggacagagagtgaatgaccaagttagggtttaaaccaaaacacactggcatcagatcttgcrttctcaagtactctgttacactgtttttccttccaaatctgaccacatttgaagtagttggtaatatattttatgtcaatgtatttgagaaaaaaaattt

SEQ ID NO: 194766 - DNA, 201 bp, Homo sapiens
aaacctaggaaaaactcatttggatattggtctaggcaaataatttatgactaagacctcaaaagtacacgcaacaaaaatagacaaactgaacttaaacyaaaaagcttctgcacagcaaaagaaacaatcaacagagagagctgacaacctgttgaacgggagaaaatatttgcagactatgcatttggcaggggacta

SEQ ID NO: 194767 - DNA, 201 bp, Homo sapiens
tgcatgtcagatgtcaaaatatttgtatcccatgagagtgctcctcaatgggtgacctcagcagaggaggattttaataatctaatggatagaatgacccrttctgtggacggcaatcagcctctttgcccagccacccctgtcatcgcccgatgggccatgaacaaagtggccatggtggcagggatagaggttatgcat

SEQ ID NO: 194768 - DNA, 201 bp, Homo sapiens
aggttagtgaaaactccacatagtgtgagaattaaaagaaaagaatatatatatatatatatatatatatatatatatatatatatgtaagtatgaaagamtatatacaaaaggcaaatgagatgtgtatgtgtgtgagggtgggttgatggtgttcgaaaggggtactgtaatatctcctctacttgtttttcaggcaaa

SEQ ID NO: 194769 - DNA, 201 bp, Homo sapiens
cttcctaattccttcattgtcccactggtcattcaagaacatctagtttaatttccatatacttgtatagttttcaaaattccttgtgattttaatttctrgttttgttccattgtggtcagagaagtttcttgatattatttcaaggttctgaatgttttaacacttcttttaccacctaacatatgatctattctggaa

SEQ ID NO: 194770 - DNA, 201 bp, Homo sapiens
tagaatgttcctcagtgaatattctctagtagattgtctaccctgacattttgcataccagtggattttgttggaactatttttcaaaccagtgatgaacmcattccctccattggttcctctcctggcactggtgttctaagttcttaatctgtaagatctccttactgtgttctcatccccttggtttatgatgtgcaa

SEQ ID NO: 194771 - DNA, 201 bp, Homo sapiens
aggacaaaattttagaggacttagaaaaaatacaattttaaagagaaataattgtgaaattattcgtgagtagctagtttaatatgaattataacaacctmcacacaagtacaggctgattaaatagttgaattgagtaattgttttgaaatacacgcctagttggacagccatttaaattctctaacaagctgcacagtc

SEQ ID NO: 194772 - DNA, 201 bp, Homo sapiens
gagatgcgaggagataaggagtgcaaaagcagtactacaaattgctgaaggagacgtgcagaggagttgttcagttatgaagggtaatttcaggtaaactrtccagaggaactgccatacaaacatgtatctatctatctatctatctatctatctatctatctatctatctatcatctatctatctatctatctgtcatc

SEQ ID NO: 194773 - DNA, 201 bp, Homo sapiens
atagaatactaacgttctatgaaaaaaaatagtctctgtttctgaatataggctaaatcatcctcatcagatcataagaattaacatcatatactaatctwttgattataaaatttttaatggaataaagctaataatgtcattctttttttattttattattattatactttcagttttagggtacatgtgcacaatatg

SEQ ID NO: 194774 - DNA, 201 bp, Homo sapiens
cactctctgaagccgtggtccaagctgtacttttgcctcttttagtcatggcttgaacaactgggatgcagggcaccaagtccctagactacaaacagcayggggaccctgggcctggcccatgaaaccacttttccctcctaggcctctgggcctgtgatggaagcggcttctgtgaagacctctgagatgtcctggaga

SEQ ID NO: 194775 - DNA, 201 bp, Homo sapiens
catgcaaattaattctctccctcaaattccctgtcttgcaataaaatcatattttaatttatccagtaagacaaaaaatgtaggtttctccttacattacmttcttcttaatccttctgtatctatccttgtctaagatcatcacagcaagcacatatttgttttgtttttcatcatacaaatcctctttctaagagtatt

SEQ ID NO: 194776 - DNA, 201 bp, Homo sapiens
atcatgtgttacactccttcatacagacttgctggattcaaaattctgccctatagtgacttgaggcaagaaaattaattttactacatgttgccaatcaygtttactgtcaacaaatgttggataataaatttgccttataagttgattgttataactgaaggaaatagctgaagtgccctgtgtaaataataggtgctt

SEQ ID NO: 194777 - DNA, 201 bp, Homo sapiens
tttctatgctctttaaaatgatttttatctacctgcataacaagaacatgcatattaaaaatgtggtgaataatagggtaataatgacacatttaatttgmattacataatatgttctttaagcattgcctttaatctcattttgaattatttcacttaaagaagtaatactttaaaattattatgttttaaattccatat

SEQ ID NO: 194778 - DNA, 201 bp, Homo sapiens
acaataaatataatactgaattggcttcatcctcttagaaaaataaggaaagaaacaaaagaaagaaacttataatctgttaagattatatgtctaaaaakgtaatagcaaccaaagttagttcaatagctaaaccaatggtttagaatgaaccatttaagcagttctctgattttttttttttactttaagttctagggt

SEQ ID NO: 194779 - DNA, 201 bp, Homo sapiens
gtaataatgacacatttaatttgaattacataatatgttctttaagcattgcctttaatctcattttgaattatttcacttaaagaagtaatactttaaarttattatgttttaaattccatatggatgtaattgattatacttttagattcaggatcgaccgatggtcattatgcatttacttataattacaaaatggaa

SEQ ID NO: 194780 - DNA, 201 bp, Homo sapiens
tactcatcccattttgtattttggtcaaaggtaaggtctgtatcacataatagaagccagagaggacagtttctatcattctctatccaagcatagccaamgggctgacccatagcttaaattaggagtaacttttttcttccaaggtggtaaaacttgatacccaagaatacagataatttattcatgggataataacct

SEQ ID NO: 194781 - DNA, 201 bp, Homo sapiens
attatttcacttaaagaagtaatactttaaaattattatgttttaaattccatatggatgtaattgattatacttttagattcaggatcgaccgatggtcrttatgcatttacttataattacaaaatggaaagtcctaagttaaaaagaggaaaatgtaatcatctacttagttcatgaatgcactttccgttaaaaaaa

SEQ ID NO: 194782 - DNA, 201 bp, Homo sapiens
ctgggcttttgtttgtccaaaggttgtgacaaacattttgagagaaaactgttttcgttgaacttggagaagaaaaaaaaaaaaagaaaccctgttaactytgatgaaagtcagtttatacaaacagcatacagcatacagaaataaatgagtagcatgtactgtgtaaaatgttgatatttttgaagaagatttatattg

SEQ ID NO: 194783 - DNA, 201 bp, Homo sapiens
gctcttagactgtttcccttatttgctaataggaaatcagtagctttaatttcaacttttactaagaagcactacaatagaaaaattttttaaaaatacartgttcttcagtgtcattcaatttcctgattttcctagtgctccttgtttttgctgtcacaatgctaatttcgttttgtatttttttcagcttattgtgat

SEQ ID NO: 194784 - DNA, 201 bp, Homo sapiens
gaacctcaaccaagaattttgttaagattcaataaaatattgcatctaataaaattaaattttatactatttaataaatattaactcctatctactgcctrgttttactgctattaaaatgtaaaattaataagtaaacatgcctacaaaacttgctcataatggttgtttcagaattgttagaactatatatgaaactat

SEQ ID NO: 194785 - DNA, 201 bp, Homo sapiens
tacactcctctatctccacataaaacatagcaaaacctgtctagttaccctaaccactcttattttaaagcatatgctttatgattgacttaaaggcattrtttataaacttatttatattatttatttaaaatgtagcatttactaaatttatatcaataacttatcataggttattcaatattcattaagtaattttat

SEQ ID NO: 194786 - DNA, 201 bp, Homo sapiens
tagggtgagattatacaggttaagaaatatttctgcagtatccagggcctaaattatagcaatcacacacaccaggagggggatgggaataaagagaaggkaaattgccaaaattgcccattagctttatttaaaaaaaattaagctattttcttctggagaattatcttgctcttgtggaaaaaataaatttttgagtta

SEQ ID NO: 194787 - DNA, 201 bp, Homo sapiens
ttactttaaaaatatgttcatctttgctctgcatttattcaatggtgttccagtctaggcctacttactagcttgtactgacttcagatatttttataackttccattctctttatggtttatttattcccccctttattgaattactacagtctagtgcatataaaaatatttgaaagaacagctgtgaattaaaaagac

SEQ ID NO: 194788 - DNA, 201 bp, Homo sapiens
ttttttatttcactagactaaaatgatattcatatttacacaatagcaacagcaaatgtgtaagttagcctccatccctacagagttggaaaatggcctasttaatagaaagtcaaggccagcactggattaaaagaacaccaagtgtctcttttccccatttccaactttagaatattttttcttacctttttttcacca

SEQ ID NO: 194789 - DNA, 201 bp, Homo sapiens; identical to SEQ ID NO: 33505

SEQ ID NO: 194790 - DNA, 201 bp, Homo sapiens
ttatctgacaaaaggctaatatccagaatctacaaggaacttaaacaaatttacaagaaaaaaacaaccccattaaaaagtgggcaaaggatatgaacagrcacttctcaaaagaagacatttatgcagccaaaaagcatatgaaaaaaagctcatcatcactggtcattagagaaatccaaatcaaaaccacaacgagat

SEQ ID NO: 194791 - DNA, 201 bp, Homo sapiens
gttctagtcaaaggatcattgttaatgatataaaagtttgtgaaatggagaaggtctggttttctaagaaattttgattattgtccaggcacagtggctcrctcctatcatcccagcagttttggaggctgaggtgggaacattgcttcaggacagtcgttcaagacctgcctgtgtaacatagcaagacctgtctctaca

SEQ ID NO: 194792 - DNA, 201 bp, Homo sapiens
gctatattgtctctataggttaattgtgcactaagagaaggtgaattggaataccagtgttggcagagaaagctgcctgggtttcaagtcatttttgttcrgtaaatttctactttccaggttctagaaatctctctgaaagctcagaaattagcttttacttccaatctaatggggaatagatatttcatgtttgagctt

SEQ ID NO: 194793 - DNA, 201 bp, Homo sapiens
tctaacaattcaatacatgtgggacctgggaaaagtcatttttttctctctcttagccccattctcctcatttgtaaagtgaggatatataaatctgcctwgattatgataatcttatgagataacctgtgaatgtaaaataaaataaattgtaaaattttcagttagtttacatactataattcaaccacctagatgtta

SEQ ID NO: 194794 - DNA, 201 bp, Homo sapiens
tgtgtcctgataaacagaaagtacaggatttaaaaaggagtcattacatgtgaaatattcaatagaagaaatagcaaaaaagatacttgtttaagggtccrtgcctattcacatggacaaagtatcaaaataaaggaatctgagaggtcatttaaataaatgaaatgatgcagattcaagggaaagatagattgaacctga

SEQ ID NO: 194795 - DNA, 201 bp, Homo sapiens
cacacaaatgcactccacctgctccttcatacctttgcatatcagtaaataatgccaccatctctccatgtactgaagccccaaatctaagatcatctttkatcctttaattatttattttcctttaaacccacagactaccataatcatgtcctgtttagagcacctaaaccacattacgaatgtatctattttgtattt

SEQ ID NO: 194796 - DNA, 201 bp, Homo sapiens
ttccttaaaatccacaagtatatgtattgctaaaggacaattatgttctaatgtttctatcctgagtgtggaatgtagattatgtgtatgtttttgttttkctaattcagattatttaattcctacctattgcctttagagaaaaaatgtaaaatccttggcaggaaataaagaaggtttccccctgtgaattcgctcaaa

SEQ ID NO: 194797 - DNA, 201 bp, Homo sapiens
gaggttgaggccctaggcagaatttaaatctcactccaaagcccttaaatattttcctagaacctcagccatgtgaaggtccccagcaaagggaggcaacygggcagtgtgattgtatagtgaaaagatggaggttgccagtagagtgtggataacttctgagacactgggaggccaccaaaggtaaatacagtggtattt

SEQ ID NO: 194798 - DNA, 201 bp, Homo sapiens
atgctgaagtctgcggtaaaaatgactccattacccaggtagtaagcatagtatttaacagcttttcaacattttccctgcctgccaacctccctattacyttctagtttctattgttgccatttttatgtcctcgagtacccaatgtttagtttacacttatacatgagaacaagcagtatttggttttaatttattggt

SEQ ID NO: 194799 - DNA, 201 bp, Homo sapiens
aaatatgactgattttaaatgtgaaaatagagtataaaaactgttcttggagttatttctaaacataactaacatgagaattgtctgaatcatcagaatcrcctatttcagaaaactcattaaataaatctttgtccaaaaaccattcaagaacgatgttaacatcatgcgtagcaatgctacattttctagcatttgaca

SEQ ID NO: 194800 - DNA, 201 bp, Homo sapiens
tgatgcgaaaataatcataaaagcgagatattttgttgcaaagttatctaggggcaaatgctgcagctgcaagtgccactggggagcactctggaaaaatrggaaaagggttaagattttttctttagcattggccttggacagtctggtgaccatatgccttggtgatgctcattttttatagtatctttcagatgttct

SEQ ID NO: 194801 - DNA, 201 bp, Homo sapiens
ctgtgtggaattaaaatagagaaatattagactagattgggtgcattcagggtggtagggctatagtagagatttgatctttatgatttgtgatacatatsacctaataaaatggttgatagaatgtcaggaatcacatcctgtgttttaaaaatttagtgtaaaagcctcgtatagagcatgaaaaaaaatgtgcagaat

SEQ ID NO: 194802 - DNA, 201 bp, Homo sapiens
aaaaataggaaaagggttaagattttttctttagcattggccttggacagtctggtgaccatatgccttggtgatgctcattttttatagtatctttcagrtgttctcaggatttcttttatttggatacttaagtctctagcaagattagagaaattttcttgaatttttccctcaagtagtttttctaggttctctctc

SEQ ID NO: 194803 - DNA, 201 bp, Homo sapiens
tgctaagtctccttaatgccatttttttttctggggtggggaggggaaattgtatattgtatttaaaataccacctgttaaattttcctgagcgactctcwtctctttgcctaagaaatgtgtttgctgatttggttctgcattttgtaaaatactcgtgttcttacaataaaagttgtttgatggagaaagataaaataa

SEQ ID NO: 194804 - DNA, 201 bp, Homo sapiens
gggggacagcctaaaaccctaatccaggagaatgggtcctccaaatgcttggagatctgcctggacatggagcagggagggaccctctgcaccaacatttytgcacaggagaggggtggcaactcaggctgctgaacgaggcaaacaggtgctctgaatgcctggagatatgactgggcttatgacagagagggccccctg

SEQ ID NO: 194805 - DNA, 201 bp, Homo sapiens
agaggttttgtttgttttataagtaaaagaaaaaaataaaaggctaagcacaggtcttttaaaaatatcaacatttaagaagagacagaatgaagcaagasagcccaagtaaggagacaaaacactaaaagagacgtaataagaatttaaacatttatttcaggaagatggaaggaggcagtggtgtcagatgaagtacca

SEQ ID NO: 194806 - DNA, 201 bp, Homo sapiens
tggaaggaagaggaaaaaaaaagaaaatgtgataatttattcaacaaactaagtaatgtatatccagttgacttcaaaactaataaccctttccacccctytctgtagcctcacagcaagaggtgacccaagaatgatacacagaaattattaaaatttcgagaaaagaagacaaaggagtataaaaactgtaaaagttaa

SEQ ID NO: 194807 - DNA, 201 bp, Homo sapiens
tttttaaattcaagttttaattcttttttcctccaaatataattttgtgattgtattcggtataaaacaatgacttatgggatacatgagttaatctcatrttgctctgattttctgagcatgctgacgtttctgagagccttgggctcattaatgcctaagtattagtaggtcactgggagtaggggtcttcatgtcttc

SEQ ID NO: 194808 - DNA, 201 bp, Homo sapiens
ataaattaatatcaaatatcacttgagaataaaatatccagttctatataagaacatttaattaatccattacataatacatattataagcttgtatatartagaaaataaatcacaaacttttcaagtcataatagaataaaacaaacagagctgagctgtctttaactgattttgataagaagaaatgctgtaaaatga

SEQ ID NO: 194809 - DNA, 201 bp, Homo sapiens
cacacatgtctaaaccatctaatggctattcattatactttgatacaaaattatttccgttgcctacaaagttctatgaactggctctgaactaacttgcsaagttcatcttatatgatttctgctacatattcactgtactacagccacattgatatttttggtttctaaattctcctagctcttccctacctgaaaaat

SEQ ID NO: 194810 - DNA, 201 bp, Homo sapiens
aatatcacttgagaataaaatatccagttctatataagaacatttaattaatccattacataatacatattataagcttgtatatagtagaaaataaatcmcaaacttttcaagtcataatagaataaaacaaacagagctgagctgtctttaactgattttgataagaagaaatgctgtaaaatgaatgtatacatatac

SEQ ID NO: 194811 - DNA, 201 bp, Homo sapiens
aaccatctaatggctattcattatactttgatacaaaattatttccgttgcctacaaagttctatgaactggctctgaactaacttgccaagttcatcttwtatgatttctgctacatattcactgtactacagccacattgatatttttggtttctaaattctcctagctcttccctacctgaaaaatagttaattccct

SEQ ID NO: 194812 - DNA, 201 bp, Homo sapiens
gtgcgcccacattgcaccactgcactccagcatgggcaacagaatgagactccgtctcgaaaaccaaaccaaaccaaacccaaccaaccaaccaaccaaamaaacaaacaaaaaccctgcaactgcctattctgtctccttgtcaatttcctacaaattatggattcttgtacaatagaggcaatcaaattctcctaaggt

SEQ ID NO: 194813 - DNA, 201 bp, Homo sapiens
attctcctagctcttccctacctgaaaaatagttaattccctcttcccgtaattctcacatccaggatcatcttctatttgtacctttgtttaaatatcamctcttaatagaggccatccctgaccacttaatttaaattatcactctctcattactctctatcatgccatcccactttattttcttcagaacacacacat

SEQ ID NO: 194814 - DNA, 201 bp, Homo sapiens
gaaggaagaggaaaaaaaaagaaaatgtgataatttattcaacaaactaagtaatgtatatccagttgacttcaaaactaataaccctttccacccctctytgtagcctcacagcaagaggtgacccaagaatgatacacagaaattattaaaatttcgagaaaagaagacaaaggagtataaaaactgtaaaagttaatt

SEQ ID NO: 194815 - DNA, 201 bp, Homo sapiens
ttcttagaataatgtcctggcacatagtaaataaaagtaaaagcttttttttttttttaaacggagtctcacttagtcacccaggctggagtgcagtgcgyaatctcagctcactgcaacttctgcctcccaggttcaagtgattctcctgcctcagcctccctagtacctggaattataggcagccgccaccatgcccag

SEQ ID NO: 194816 - DNA, 201 bp, Homo sapiens
atcaatttcagaattactgatttgaatggccatgtacaatttattattttactttaagtgatgatggagtttcctaagtctgtttcattttttaaatttcrtgacaatatctggatggtcagaagctgacaaccagtttctgctacaatttactttttaatcaaagaaagtatgtatgtattccatgataggtatttttga

SEQ ID NO: 194817 - DNA, 201 bp, Homo sapiens
tgaaaagaggagaattcacatttgtgtgtctgaaagtgtgatctgtatatgaatatacacatggaatacacacagacgaccaaatcgttgttctcttcaakatttttaaatggcttgatggagtgatttgataactgatatatgtggaattttgtccccccaaataatatgttgaagcccaaactctcaatgtgattttat

SEQ ID NO: 194818 - DNA, 201 bp, Homo sapiens
tgtataatcaatgctgactactgcaaatctcaaaccctccgtgatatttgtcatgcaaatttgaattgggatattactgattttgctgctgctctcctgcrtagcttttatctaaaaagtgagttagaggccgggtgcggtggctcatacctgtaatcccagcactttggtaggctgaggcagccagatcacctgaggcca

SEQ ID NO: 194819 - DNA, 201 bp, Homo sapiens
tgaatttattatactagtcatttagcaaacaattattgaagatctactgtattccaaacacaaaaatggcatgctatgatttctgcccttgaggttacagygttgggtagatactgacattcacacaaagattgcagtaagatggacttagtcctctaattgaagtcccaagaagagagagagaccaatattgctataggg

SEQ ID NO: 194820 - DNA, 201 bp, Homo sapiens
tctgggcagggcatctctgaaaaaaaggcagcagccccagtcagggacttacagataaaagccccacctccctgggacagagcacctgggagaagaggtgrttgggtgcacagcttcagcagacttaaacttccctgcctggcagctctgaagagagcagcagatctcccagcacagtgtttgagctctgataagggatac

SEQ ID NO: 194821 - DNA, 201 bp, Homo sapiens
ttctcaataaaaaaataaagttaatatcacaaattgttatacttgcttcataagactattgtatgagtcgatgacaataatatgcttaaagcatttcccarttttaaagaactgtaaattgtaaggcataattaactgtaagcttttttgaatattatataaactactagggaaacattttttactattagcataatattg

SEQ ID NO: 194822 - DNA, 201 bp, Homo sapiens
gagaaggtcacttgcaatgtgaacaccatcaggctaccagcagactttttgacagaaaccctataagccagaaaatattgggggcctatattcagcattctttttttttttttttttttttgagacagagtcttgctctgttgcccaggctggagtgcagtggcatgatcttggctcactgcaagctctgccttctggatt

SEQ ID NO: 194823 - DNA, 201 bp, Homo sapiens
attctctgaactcacaaatgctagctggccattttagttggaggaatgtaataaataatgagacaacgttggtaaattcattctcaaatgcagtgtttgtyattattcctttatgaaattagagctatatgcagcattttacttttccacatgtgtatattaaatagaatattcaagaaatgacaccatccttttattttt

SEQ ID NO: 194824 - DNA, 201 bp, Homo sapiens
agtgtgaaaatatatgttgcctattttctatagtaatcaagatagaatagaaaagctaaaaatataaagaaaacattaaaaaagtgtgtgataaaagctgragttagttactaggggttaaaataatacaaataaattacccagaatagtgagtacaactgcttgcccagacacaggaaatatattggatttggtaaaaca

SEQ ID NO: 194825 - DNA, 201 bp, Homo sapiens
agaccgacttctgtacaattttcacagcgtaaattatgaggtcaggggaaagcctggcctgaaaggacctccccctcgagctctgaacagggctggctgasgttcacactaacacgcgatgttgccatgacggtttcttactgggttaactgagatcatttgcaggcagccttcttgattcacatcgcagcacagcaaggc

SEQ ID NO: 194826 - DNA, 201 bp, Homo sapiens
aggtcaaacatggcacttttccatgttgtcttccctctggtgttcaggttgacaggacggcttttattcagaatattagaaggcatcctggcagagggaaratgtgaactcggcaacaatgtgaagatgcttaagccttatgcatagaagaacacaagtgcctttgcatcacatactattggaaaacacaagtcacatggc

SEQ ID NO: 194827 - DNA, 201 bp, Homo sapiens
ttctatcttacctaaagagtttccatccttgaatataatttttttagcatccacacaaaaaatcccccaaaatcacctttaaccaaaaggacttgctcttsattgtttatgcctaataatcagctcaggcagaaaagcaaacgttgcaccacagttagattttgtgacaatattatctctacatcaatattgcttaagtca

SEQ ID NO: 194828 - DNA, 201 bp, Homo sapiens
acaatttaacacaagtggtaaaaaaaatactttttgaaaaaatgacatttgatcagtgaaatctgaagctcataaagtagaagagagagtttgtgaggctrtttcagagcagatcattccataataggcacctaatgactacttttattctttttgttttaagtgaaaacactttacagagaaaataattcttttaatagt

SEQ ID NO: 194829 - DNA, 201 bp, Homo sapiens
cccaggtggtggtggtggtggtggtggtggtggtggtggtggtggtggtggtggtggtggttgttgttgttgttgttgttgttgttgtttgagacggagtktctctcttgctgcccaggctgcagtgcaatggtgcgatctcagctcactgaaatttctgcttcccgggttcaagcgattctcctgcctcagcctcccaag

SEQ ID NO: 194830 - DNA, 201 bp, Homo sapiens
cacatgattacaaggtcccatgtattagttctttttcacactgctgataaagacatacccgaaactgagaactaaaagagatttaattggacttacagttmcatatggctggggaggcctcagaatcatggtgggaagtgaaaggcacttcttacatggtggtggcaagagaaaaatgtggaagatgtgaaagcggaaacc

SEQ ID NO: 194831 - DNA, 201 bp, Homo sapiens
ttgttttttttttttgagacagggtctcaccctgtcacccaggctggagtacgatgccatggtcaccactcactgcagcctcaatctccctggctgaagckatactcttgcctcagcctcctggagtagctggaactataggcatgtgccaccatgcccagctaatttttctattttttttttttttttgtagaaaacaag

SEQ ID NO: 194832 - DNA, 201 bp, Homo sapiens
aatctctttctctaaaataattaaatagaggattgctaggcatatttgtcatctctctggaaaactgagaaatgaaatctgaatttatataacttcaaacrtaatgagccaaattcttgttccatagtcttgtattatgtatacatgtacaacactgatatcattttgcaaatacaacaggatagtgagatatgatgttat

SEQ ID NO: 194833 - DNA, 201 bp, Homo sapiens
gtgatcattaattcacctaagtatgttgctttccaacttttaaaggcagaaataattcttaataagctttcttcatgattattaaagtaggctatgttctytatagaatatttaaaaagtactgaataatttataaaattctgcaatcatagtaatctataagcctggggaaccactgtttttaggttattgtgtgcttta

SEQ ID NO: 194834 - DNA, 201 bp, Homo sapiens
tgattattaaagtaggctatgttctttatagaatatttaaaaagtactgaataatttataaaattctgcaatcatagtaatctataagcctggggaaccaytgtttttaggttattgtgtgctttaattttcaaagaacatcttgaatatggtgccttttcagtgaaaatatttcactgtattttaatttgctttgctggt

SEQ ID NO: 194835 - DNA, 201 bp, Homo sapiens
ttcagtgaaaatatttcactgtattttaatttgctttgctggtttaagcattagaatgcttctaagatttatgcttttcagccacatttttaataaaatcmtccagcatatttactagtatagtattgctcataacattctcatatttttaattgctcccatgctagttataattgttttcattccaagtttctttaactt

SEQ ID NO: 194836 - DNA, 201 bp, Homo sapiens
ctttaacttttttctgtgttgattagacttgccagaaatttatgaattcagtatattttaatgaaataaaacactgttacttttgaatgctatagttatcyggttttcttatcacctaatttctgcttttacttttctaattttcctgtatttctttttttctataatctgaagttaaattcttgagagtgctatctaagg

SEQ ID NO: 194837 - DNA, 201 bp, Homo sapiens
caaggtgaagtctattatttctttatccccagtgcctagcaaagatctgaaatctgttatcaactatctgtcaaataaatgagccaggtttaacactattwtcctgagagagacaaagtaatcaactaaacatcctaaaccaaaataatatgtgtcactcttgagtaaaacctgaggtaatatggaagttcatggagttga

SEQ ID NO: 194838 - DNA, 201 bp, Homo sapiens
gatcgtgcatgtttccctatattaatgccttttatatcattctatttttctaccactttgataagaaagctgatttcgattgttgtcaggaaaaaaaaaamcccacaaacttattttctattagtttctaacttctatattaagttatttctaactttctcacattagctataatttgtagactttaccctccttgtctga

SEQ ID NO: 194839 - DNA, 201 bp, Homo sapiens
acttattttaaatggctttatttataattaaagtagtgattaacaccacaacttgattatggaatatccgttgaaaaaaactactatatgtatcttaagcrtatttatctgtgtgtaaaaagaccacgattcaaaaagcatgttctgaaattgataggtcatggtgatcaattggccaggtagataaattggagagcaaaa

SEQ ID NO: 194840 - DNA, 201 bp, Homo sapiens
ttattcttgagaactataagcaagaaatggtggggggagaactgggtcagtccaaggccacccagagaactgccttccactttctcaaatacaattcatgrtaatgaactttggaatgtactcaaaaagtactcaataccaagcaagttctactttgtgatggtaaatgtgttttgtcccaatatgaatccctataacttt

SEQ ID NO: 194841 - DNA, 201 bp, Homo sapiens
atgaaacaccttttcatttttactttctccagtttctcctaagccataaggcttgttcatcagtgattaaaattgtggaagtgtagtgattttaagaatawagacttttttgtttagtgctttcttacctcatcacaatttttcttagaacgttatggcaaaaatggcaatgtattctactttgtgtaacatttgcttgtt

SEQ ID NO: 194842 - DNA, 201 bp, Homo sapiens
taacagtttgtactatcaggatcagggtgtaatattattggtaggactgaaaagtgatctgaactggattggaagcattattaaagcacagatagacccayggatgactgaaaggaaaaaaaaagcaagagaggatactttggaagtcatttctatattctgacccttttttgtttattaagggaaagacttggactttat

SEQ ID NO: 194843 - DNA, 201 bp, Homo sapiens
gtcattaatttcccctttattcctttctactggttgtggaatggacagttttgtaactactacattggacaaacagtagaaaaaaagctttttgaggtgartggaagttattgccaacctgagtatccagataaagacatgaaatacagctgccctggaccacttgtctacttggaaaattgtatgtgagagaaataaact

SEQ ID NO: 194844 - DNA, 201 bp, Homo sapiens
agggtgtaatattattggtaggactgaaaagtgatctgaactggattggaagcattattaaagcacagatagacccatggatgactgaaaggaaaaaaaamgcaagagaggatactttggaagtcatttctatattctgacccttttttgtttattaagggaaagacttggactttatctttgggtttgtgtgtttcacaa

SEQ ID NO: 194845 - DNA, 201 bp, Homo sapiens
gcagataattaggtttgaatgaggtcatagaggggatcttaagttgatagaatttagggctttataagaagaacgagagagagagatttatctctcttttygcatgcatacagcatggtaaggtcaagccagtatgtaagtcagaaggccaccctctacaagccaggaaaagagacttcaccaggaaccaaattggccagt

SEQ ID NO: 194846 - DNA, 201 bp, Homo sapiens
gcgcccagcttgaatttacaggttttctaaagtaaaggctctaagagaggaaagagacctctgtgattaggccatctggattctataagggttgggatgasagggaggtcagagacctagaggcaggaagaagcttatctaaagtttagtcaagcttaggaaaacattaaggctgtcttgatcaattatgagatttgtaaa

SEQ ID NO: 194847 - DNA, 201 bp, Homo sapiens
attctgacacaaattttaccaaccaaagcacatagggagaagaacagatagtgaaatggcaatgggtcagatatactgacctgcttcttcactgtttactkttatctctttgagtttggggaaattacataactttaaatggtgcttgctacatagtaagcttttgatacatattccttaatttagtaaattaatgaactg

SEQ ID NO: 194848 - DNA, 201 bp, Homo sapiens
aatttaggtcaaagtaagtaattccctgattcttatggaagtctgaattaaaattctggaaatatagagtcaagaaagaaaatgtacttaatatgccatawttattataaattaggtaaagtacacatttatcaatctgcattaaaggcttctagtagttgaagggtttaagaaccagttttataggaaatttcaaacatt

SEQ ID NO: 194849 - DNA, 201 bp, Homo sapiens
gtgattgttgtgtggagtattctctagatgtctgttaggtccacttttgtgagtgttcagcttaagtccagaatttttttgttagttgtttgcctcaatartctttctaatgccatcagtgaattattaaagtgtcccacgattattgtgtgggtgtctaaaacttttcataggtcaagaagaactgattttatgaatctg

SEQ ID NO: 194850 - DNA, 201 bp, Homo sapiens
ccacttttgtgagtgttcagcttaagtccagaatttttttgttagttgtttgcctcaataatctttctaatgccatcagtgaattattaaagtgtcccackattattgtgtgggtgtctaaaacttttcataggtcaagaagaactgattttatgaatctgggtacaccaatgctgggtgcatatatatttaggatagtta

SEQ ID NO: 194851 - DNA, 201 bp, Homo sapiens
acagcactattcacaatagcaaagatatggaatcacccttaaatgttcaccaatggtagactggataaagcaaatatattacttataaatcatggaatacyatgcacccacagaaaagaatgagatcctgtcctttgcagaaacatggatagagctggaggccatcatcctaagagaacttacaggggtacagaaaaacaa

SEQ ID NO: 194852 - DNA, 201 bp, Homo sapiens
tattcttgtatgctatttgcattttgtgtgtatgttgtgtgttgtataaatgagttttctgtattaaatatatattgatttttattacaagcaaagcacartgctacacactggatacacggtggtgaacacaatagtcaacatccctgctcttatgaagcttaacattctacaagataaaaggaacattgaatatggtac

SEQ ID NO: 194853 - DNA, 201 bp, Homo sapiens
gctacacactggatacacggtggtgaacacaatagtcaacatccctgctcttatgaagcttaacattctacaagataaaaggaacattgaatatggtactktaagctctcttaacaggcccttacataactgactctcattgaatcaacacccttcattcctacagcaaaatatagtgtctaatatctataggaagccgaa

SEQ ID NO: 194854 - DNA, 201 bp, Homo sapiens
gatgataccaatggataatgaaatagtcacttcatgtttgggtatggaggagctagaatagaagtttagcaatatattctttaatttgccttttgaatgtkagatgaatataacatatatgaaaatcaggaggggcagctccaattgtcaaagtgcaataaaaattttatatatctgacctcttattaacattctctacca

SEQ ID NO: 194855 - DNA, 201 bp, Homo sapiens
ttcctcctcagttatcatgtcctggagattatttgttcataagatctagtgtatctttctgaaagactgaaatagaaatgttactacaccagcaaagcagrccttactggttcttgcctaaactacgaaattagttttgtctttagtagacttaataattgatgtttccagtaattgtagtaagccttcaataaatatgct

SEQ ID NO: 194856 - DNA, 201 bp, Homo sapiens
gtgattgtatttgaaatttcaaatggcataaaagtcaaattaccttaaaatgacatattatgtaaatatatttaaacttaaccattggtagttagaaatakaaaatcttcagacatttgtcaaacacatactaacttcttcagctctaagaaaatcaagaacccctaaaagagcacaattataaacatcaaaattcggaaa

SEQ ID NO: 194857 - DNA, 201 bp, Homo sapiens
ataatgttatactctagcctgataagattagattacttattttagatataaattaccttacttgtttaacatatctcggagtaaaaatataaatgataaayatataatatagttaaaattatttattattttccttgtttcctgttttacatgaaaaagttattttctcttaaaaatgtgatgttttctgattgaataaac

SEQ ID NO: 194858 - DNA, 201 bp, Homo sapiens
aaattaccttacttgtttaacatatctcggagtaaaaatataaatgataaacatataatatagttaaaattatttattattttccttgtttcctgttttamatgaaaaagttattttctcttaaaaatgtgatgttttctgattgaataaactattatagacaaaaatctacaaataattagctttaccataatattttat

SEQ ID NO: 194859 - DNA, 201 bp, Homo sapiens
gaaaccaggtaggaatctgacattaccaaagaaaaggctgattgcacttttgagaactttagagaaggtgtggaaatccttatacagacaacttaggcatstgagccagtgaaggctagacaacttgatggagatgtagaacaacataaaaatttttaaaaatcaggcatggcttagttttattgtctgtaatgattttaa

SEQ ID NO: 194860 - DNA, 201 bp, Homo sapiens
aaatcaacatggtctctccctgctgctaatatggccagcctttacttggttcaattaaaatgattttagatgggggatctcatactaaagcagttttacartaaatagaaataaataccttgtgtctgaaatgtttttcttgtgatcctctaagtgatatcattcaatttttctgtgtgtctattaatatatgaattgatt

SEQ ID NO: 194861 - DNA, 201 bp, Homo sapiens
cctcacactgcacttctttcctttatttacaatgggaagaagtatcccaacttgcatgaccccaccttccatctcttctacttgtgacttctcaggtataygcctctgcctgataaatatttttattcctaatatttagctctattttctccatgaaattgttcccattaaacacctctttatatttactacacatctcta

SEQ ID NO: 194862 - DNA, 201 bp, Homo sapiens
taacatgattacttacgtttttactttattttaacaaggtatactttagccttaaagattattgaaaatttaagctctttcaacactgaagaacactgtgktcattctattggtcattgtggtcatgttatttaatataaaacattaaaatattttaagataggaatgtgcaaacaattgttcaatccacttatctatatt

SEQ ID NO: 194863 - DNA, 201 bp, Homo sapiens
gggatttcatacattttgcctaccactttttttaaaaaaatgtgtgactagccacatggtagacataataaatatttgtcaaaataatgaatcaatataayttgcattctccttttttctacctaggattataccataaatatttttccatgcttgtaaacagttatcatccctttaaatgaatgaatcagaataatagtg

SEQ ID NO: 194864 - DNA, 201 bp, Homo sapiens
gactgtacatttcaatcaccaaaaggttcagtgcttttctgaagccccttggcaacacacagcagtccctatgaaagtatttagcaaatccctttgtgatrcatgaggggtttaaagcagtaataaaccaatccctttacattgataaattcctcttaagtcaatgagggctttgcagggactgaagtctaaggatttttc

SEQ ID NO: 194865 - DNA, 201 bp, Homo sapiens
agttatcatccctttaaatgaatgaatcagaataatagtgataattatgataataataatactgacataacatcatttacaaagctaatctatataattaratattcaaaacattaattttgaattaaacattaatctctgaccttatagatagcattgataagaatatcttcatgtagatttctgttttcttctgtttaa

SEQ ID NO: 194866 - DNA, 201 bp, Homo sapiens
cttcagttaaatggtacattttccttcaatctggctcttggccagggataagcttaaaaacacccaacttagttttatataaaaagtacatgttgtcaagygggcttacaacagcatcgacctgctttactctcttcttataacagaataatatttggcttttatatctgcataaagaacgtatatctgtgtctctgcata

SEQ ID NO: 194867 - DNA, 201 bp, Homo sapiens
tcactccccaaacccactgcagtttactcaatatgtgtaaaataagtgatagaagatatttgtaaagtaagtgcacaaaataaatattgcgtttaactgtktggggcagaacccttatgttgatagaatattccaccatattttactttctttgccaaccattatcctaatggagtagaaatatattactttatatggcaa

SEQ ID NO: 194868 - DNA, 201 bp, Homo sapiens
taataactagaaataaaaagctcaacaatattttgcctcactcatcaaggagcttatagcctactgaatgaaaagaacctgtatatagatcatttcaatgrgtacaaaactattataataatgaaattccctgaagcttatagattcagggaagggcattcagagtggtctgaagtacagaggtttttggaagaagtaaca

SEQ ID NO: 194869 - DNA, 201 bp, Homo sapiens
aagttttacaataatcactctatgcctattgagattaattcacaaaacaacaaattcaccttttaaagtatacaatttagtgtattatcacatattcatawagttttacaataatcactctaattccagaatatcttcattaacccaaaagaaaccagatacccattagaagtcacatctcattttcccctccaggcctcc

SEQ ID NO: 194870 - DNA, 201 bp, Homo sapiens
tcaagaatcaaacttagaaaaaggtataatttttcaatgcatatatgaatatgaatattggttaaatttaaaatagtttaatcatacttcatttctactayctcaagatttcataatgttacatttctgtttcattaaaaatgtttcatgagttataaaactgctgagttttctaactttctgctctgagcattaatattt

SEQ ID NO: 194871 - DNA, 201 bp, Homo sapiens
atacaatttagtgtattatcacatattcatatagttttacaataatcactctaattccagaatatcttcattaacccaaaagaaaccagatacccattagmagtcacatctcattttcccctccaggcctccttgtaaacctactttctgtttctatgaatttgtctattttggacacttcataaaaatataatcataaaa

SEQ ID NO: 194872 - DNA, 201 bp, Homo sapiens
tattatcagggtgataaataaatatattaccataaaattatagcctagaaacacatatacattgcatatgcattgaaacctatatgaaaaaaatgtgtttraaaagcatatgttatatggtaccaggaaaattcactagactatgagaaaatttcaaaattagattatttctttagagtaaattaaatcaggtagattaaa

SEQ ID NO: 194873 - DNA, 201 bp, Homo sapiens
tctggcatcagttagtgaccagaagaagtgctctccatcccatttaggcctgatatttccttactccactgggatagcccagtaaaggttggcaaaaccarcaaaagagacccagtctcaagagtcgttcttagtagacctgagactcttcccctaagaaaagtgaagacatacacttcacattcaacaacataggtaggc

SEQ ID NO: 194874 - DNA, 201 bp, Homo sapiens
gatgtaaaatgtaaatcaatacacagagacaaataagtctactttgttttgaaatgtatcttcattatcagatggatttttacaagaaacaaaaatatcaytgtgcccaaggtaaagcaaaataattttggtaaatgacattgtgcaacagagagcagagtgtcccaaaaggtgaagaggctggaatttaaactgagtata

SEQ ID NO: 194875 - DNA, 201 bp, Homo sapiens
ggtctctggcaaggtcaattagctctatacccttctctctgagaatgcaagtggccaatcagggtaattttaacagatgcagaggcacagttttgcatatrcaatttgtttcaagaaattatgataagcacacaatgttttttaactgttattttaagttcaggggtacaagtgcaggcttgttacacaggtaaacctgca

SEQ ID NO: 194876 - DNA, 201 bp, Homo sapiens
ctccataaattcagtcctgttattctaaatgtggtaactgaagtatagatggattaaataacctcatgaagtttacacaattggtaaatctttgaactagkatctgaatccaggtaacacctggcagattaaaaggcaatgactttctgcagtcatgatttcaagtatagaaaattagaaaattcactgttaaataatcag

SEQ ID NO: 194877 - DNA, 201 bp, Homo sapiens
attgtatgtgattcttaacatataacttactttacaaatgtaacaactatttttaaaaagtctgtgctctgaattatcattgttttctttgaaaaactgtktatctgtatgtttttgggttttcaataatgtttttacttaaaagttttcacatatggcatttatttattttgttgacactttacatatgttgacatatct

SEQ ID NO: 194878 - DNA, 201 bp, Homo sapiens
aggtgtatttatgtttcacctgttgcccattgcgataataaaaaaaaaactcgagcaaaataaagtaatttacacaattcatatacaagtatggaggaggyaacttaatgatctaagaatctcatttcatccctgagtttctcagatgaactcctagaattatggctaaaaaacaaaatatgattaaatcttatcgtctag

SEQ ID NO: 194879 - DNA, 201 bp, Homo sapiens
gagtacttacctaataactgagcttcatatgttcatgctgagcactttgcttgttaccttgtagacaatagctcctgttcagctcagatccgactggaaamtataagaggtcatacagtactggagccattagagttctagcctacccttggaaatttacgtaagaacccagaaagttttatagggataaggacaccacct

SEQ ID NO: 194880 - DNA, 201 bp, Homo sapiens
gtaatgtgtctcaagtactttgctagttatttagtatccataatcttaataataacactagaaaataatggaaagtttcaaaaatttgcctaaataaatayattttatagcagaaattcatattctggcttggattacttcagatccattctcttttatcttaatctgtactgccttatagagtaactttctctttaatag

SEQ ID NO: 194881 - DNA, 201 bp, Homo sapiens
actggagccattagagttctagcctacccttggaaatttacgtaagaacccagaaagttttatagggataaggacaccacctttgaatcagaatataaccsttgaattaagaagataacaaaaataaagacatcctaactaaagctaaacaaaatacagaagatctgttagggttttattatcagaacaaaccagtaccat

SEQ ID NO: 194882 - DNA, 201 bp, Homo sapiens
ggatcatagaaaacaaagtaagaaaatgtttattttgctatgtaaatattgctatgctgttgtaaatgttgctttgctgttaaaatttgataatattattmtgtttctgatcaaaaggaatgtctgcaacatatttttagtgttccccaaaaatgtcttagactgttttcattcatagttataatataatgtttgatctgc

SEQ ID NO: 194883 - DNA, 201 bp, Homo sapiens
accagcctgtgaaacatagcaagaccccatctctttaaaaaaagtgaaaaataaataaaaatatattatttatacgtaccatgttgttaccattttagttraaaagaaactttaaatatttttcaatatgatttattttctttcaaatcattttggatagttaactagaattctattatgtgtgtgtgcgtgtctgcatgt

SEQ ID NO: 194884 - DNA, 201 bp, Homo sapiens
atgtatatatattgtatatataatcagatataaataaccaaatatatatatacatacacacacacacataaatatagttgagcctttaacatccccaactkctgtacagtccaaaatccacctgtaacttttaaccccaccgtaacacaactactaattgcccactgtcaatgaaggcttattaataacataaacagttga

SEQ ID NO: 194885 - DNA, 201 bp, Homo sapiens
tttcctgtgagagcttatttttttctttgagctaacatgtctgaaatcattctaataattattacgctcattcacattggaaatggcttctgcaagataaktactagggtacaactattagttagagtaaatagcataacaaataggcttaaatatctgaggaggaaaccaatcaaaattcttttattgctcatgtggttg

SEQ ID NO: 194886 - DNA, 201 bp, Homo sapiens
agagaaattgtatgaggctgattacttcatggcaaaacatctttttgcaatttgaaagaaaacactagtctggtgatgaaagaatcacatcaaatactgarcaaagtaaaatttaaaaagcccccatgtacataacatagtcaaaatgctataattgaaatataaagaaaattttaaagcaggcagaagggaaaacattct

SEQ ID NO: 194887 - DNA, 201 bp, Homo sapiens
ggatctgcttgacttgattcataggctgctttttaaggttttagtcaataatccaacacccaaaggaaaaaagaaaaatctaagaaaggtgtggatatgargcaaaagcctacctagagaaaccagtaaagatcaagttggtttaaaacggggttttggaggcaaaaaaatcaagttgattcaaaagagggtttgggaggt

SEQ ID NO: 194888 - DNA, 201 bp, Homo sapiens
aaacctaccacaaacagtactgcatgataagaatgcagaatcaggtttgctgggttaaaatacaataatacattataaaagttggagtttatacaaaaaamatccggcataatgggttatgcctgtatcccagcaattaagaaggctgaggcaggaggatgacttcaggccatgagttcgagaccagcttgggcaacatag

SEQ ID NO: 194889 - DNA, 201 bp, Homo sapiens
aattgtagcttccataattcccccatgttgtgggagggatctggtaggagataattgaatcatgggggcagttttcctcatactgttttcatggtagtaamtaagtctcacgagatctgatgcttttataagggaaaatctcttttccttggccttcaattctctcttctttgagaccatgtaggacgtgcctttcacctt

SEQ ID NO: 194890 - DNA, 201 bp, Homo sapiens
taaaggatggtggtcctcttctcacagctccaggaggtggtgccccagtaggcactctgtgtgggggttctgaccccacatttctcttttgcactgccctrgcagagattctccatgagggctttgcccctgcagcaaacttctgcctggccattcaggcatttccataaatctgaaatcaagccaaaggctcccaaaccc

SEQ ID NO: 194891 - DNA, 201 bp, Homo sapiens
ctaaatttatgtttattcctcctatttttgtcttgtcatgtgacctaatttttgtttgtatttaccataaataataaagcctctcccatttagtcattcaycaaatattcattgggattctaatatattgttctaggcacaggaaaatatagcaatgtacagaaatgtctttacattctgactaaaaaattgtatttcata

SEQ ID NO: 194892 - DNA, 201 bp, Homo sapiens
gaaataaagtcttatatccatgtcattccaggccttattgcaattttgctacaattagaacacctgtaattgacttaactcttctctgtaattcaggtttrctgatgtacagaggtaattctcttttgatagacaatcagaataaacaagtccaggagagacttgaggtcccggtgtcaccttgcctctcattcattcctt

SEQ ID NO: 194893 - DNA, 201 bp, Homo sapiens
gaagtattttctctctgtctttattttgtcccttaatttccataattggaatagatgtcctttatccattcaatggatgcctatcagatttagctttctakaaaaatttcaagttaaatttttgttaagatgataataaaatttagtgctgttgcttcctatatgaaatttctgcaatgctcgtgaggactcacatgatgc

SEQ ID NO: 194894 - DNA, 201 bp, Homo sapiens
aggaatactcaactgggaagggaaaaatgcctcaagtcactaaggggcaaaatggtagagtttaaacattcgacttgtaagggaaaaatgccacagttgtrcatgcgtataacttcagtaaacacactgctcatgcaacccctcccaagtgctagcaggccactgtgcaggcagacagcccaccccaagggaagaatcaag

SEQ ID NO: 194895 - DNA, 201 bp, Homo sapiens
aactgtctgaagtttttcttattttttatggttagtcattgattatgttattcatggatcgagaactgataaacatcttaatttcagaaaacactttcttkctccctatgccatccttttatatatttttttgagttggaatgttgtattttattgttgcagggtaaagaagcataaattctgtatgtatacattccaaaa

SEQ ID NO: 194896 - DNA, 201 bp, Homo sapiens
ttaagcatataagtcaacaacttttggcaaatttatattgtgtacaactatcaccgcaatccaggtttagaatattttcatcatcccagaaagaatccacrtgtccacttatagtcctctcatttgtcacccaaggcaaccactagtctcctttttttctctctatctttgcttttttggacgtttcacataaatagaatc

SEQ ID NO: 194897 - DNA, 201 bp, Homo sapiens
attaccttacttgtttaacatatctcggagtaaaaatataaatgataaacatataatatagttaaaattatttattattttccttgtttcctgttttacakgaaaaagttattttctcttaaaaatgtgatgttttctgattgaataaactattatagacaaaaatctacaaataattagctttaccataatattttattc

SEQ ID NO: 194898 - DNA, 201 bp, Homo sapiens
taggttatttgagataaaaattttactgctattaatttattgtttttgataacatgtacatgctaatgaggcctgtgtgagaaattagaaaatcatacatrtaattcttttcctataagatgatatacttaatgtggttttggaagattatgtggtttttggttttgttgttcatgatgttttgtttttaagacattctct

SEQ ID NO: 194899 - DNA, 201 bp, Homo sapiens
aaatattacgagacaatttttttgttgttatttgtttgttttttcttgagacagggtcttgttctgtcacctacgctagagtgcaatggcactatctcggytcactgtaacctctgtctcctaggctcgattgactgtcgcacctccatctcctgagtagctgggactacaggcgtgagtcaccatgcccgcctaactttt

SEQ ID NO: 194900 - DNA, 201 bp, Homo sapiens
gcaacccctcccaagtgctagcaggccactgtgcaggcagacagcccaccccaagggaagaatcaagggagaagggatgcaaccgcttggaagcatgccartgtacaaaatgccaagtcaaagctcaagcttcacacttgaatctctcaagttgcctgcttggccctcttccaagtatactttacttcctttcattcatgc

SEQ ID NO: 194901 - DNA, 201 bp, Homo sapiens
tgtctgttccttttctgtgtgtgttctattctgtgtgtttgtctcaaagcttgcttagcatccctcttagaaagaaatccatgcatatacttggggccacyggataattcccttgtctcaatctgctttattgtatttcattatacattttctgccacataaaatattattcactcttttgccttataaggtaacattcct

SEQ ID NO: 194902 - DNA, 201 bp, Homo sapiens
gttccttgaatttgggggaaaatgggccctgctgaaaatcagtgttttccaaatggaatagctctcctgatctcttcactaaaaaaaaaaagtagtagggkttttcttcttattctttaaataatagactgaaaaattatgaattttgatgtctttgcacagaaataggaaaagcttaaacctctttttagtaagttaaag

SEQ ID NO: 194903 - DNA, 201 bp, Homo sapiens
aataataacactagaaaataatggaaagtttcaaaaatttgcctaaataaatacattttatagcagaaattcatattctggcttggattacttcagatccrttctcttttatcttaatctgtactgccttatagagtaactttctctttaatagtttaaaaacaaccacaactacaacagcataagttgtttaataaaatc

SEQ ID NO: 194904 - DNA, 201 bp, Homo sapiens
atttctagaaatattttattgggtgcaagatattgtaattttttaaacttgtttatgctacatgttttgtattctcattaatattcttgagctttgtcccrgaatattgttaaattattttaaacacttttattattgtgagtcttgcttttaaggtttgttacatggtgctggtacagcttttagtcatgggctaatttt

SEQ ID NO: 194905 - DNA, 201 bp, Homo sapiens
tcttcgccttatttcactttccctgaatgttggtgtgtatatacagatacttccccatttaccaataaaattacgtcacaataaaccactcataagttgawaatgtaaaataaaaatgtattcaatacacctaaactaccaaacattgcagctaagcctagcctaccttaaaagcatacagaacacttacattagcctaca

SEQ ID NO: 194906 - DNA, 201 bp, Homo sapiens
tgataaaatatttcttctcataaaagaccccctaaaaattgaaaataatttaaaatctccaaggactggttttatagtataacttatgagtattttttaarattcttcttgcagtgactacttaaataactttgaacataaaaattaaaacataaagtctcttgtaaaaccttactataatgataattatgctactttagc

SEQ ID NO: 194907 - DNA, 201 bp, Homo sapiens
gaaaagctgtatggtatatattgaacctaaaatatataatttttattatgttgaaaatcatataaaatatattttggtttattcctctctatttagggtgyttgcagttatagtattcctaggatcctaaaatattattagttaaaatgttgagaaagtttttaagtacatactttaaaaagtcatatttcaagattatgc

SEQ ID NO: 194908 - DNA, 201 bp, Homo sapiens
tctcccataacaagctatctacacctctattacattgtcatagactgttgtttatgagtttccctctttttctgcatgacaatctcctctaaagcagaaakccagacatacttctgggtagcaataaattaaatgtaaattggttttgtccagggaaaatttcacccttaagccatgctgtgaaagcaggtgtgtgctttt

SEQ ID NO: 194909 - DNA, 201 bp, Homo sapiens
aacatagtgaattcctgtctcaatcaatcaactaatcaatcaatcaaataatgatggcataaagatatccaacaggtgacatgtgtttctcccccaacccygcaccccgccaggtgccatgactcttaatttattttactaagttttacaaatcaggcaaacctcatggattgagaaggagcattcaaagaaagtgcaaat

SEQ ID NO: 194910 - DNA, 201 bp, Homo sapiens
tcagtaataaagttgatgaggcttccttagaattactgtttcctcatattagtgttgtttggatcctaacataagaccactcccctgtaagaaaaggacastaactctcctaataaaggtagaaaatgctgacatcaagcttacactggcatgaagtgaaaggcttccttttgtcgggtctcttcttggcctataaggtta

SEQ ID NO: 194911 - DNA, 201 bp, Homo sapiens
agttctagcctacccttggaaatttacgtaagaacccagaaagttttatagggataaggacaccacctttgaatcagaatataacccttgaattaagaagwtaacaaaaataaagacatcctaactaaagctaaacaaaatacagaagatctgttagggttttattatcagaacaaaccagtaccatataaagaaagaaat

SEQ ID NO: 194912 - DNA, 201 bp, Homo sapiens
atagaaagtgttcagtttaaagctggcccatacaatagtaaggtatattgtcattcatagctgatgacagccatgatccttactgttttatgcctagacamatgaaaagatttatgtgataaaaggcttataatcagtttaaaatcaagcagttcttcactcaaattttccagtgtttaactttgtatttcattttcatct

SEQ ID NO: 194913 - DNA, 201 bp, Homo sapiens
aatttacgtaagaacccagaaagttttatagggataaggacaccacctttgaatcagaatataacccttgaattaagaagataacaaaaataaagacatcmtaactaaagctaaacaaaatacagaagatctgttagggttttattatcagaacaaaccagtaccatataaagaaagaaattatctctccttttaagataa

SEQ ID NO: 194914 - DNA, 201 bp, Homo sapiens
tagaaggcaagaagaatgatataaaatactaaatgagggagaggtcagggcaaaaagaatccttcaacaatgttaaacttttagaatttattttaggatcrttgagaaaccattaaaggcttttaggcaaggtttgggtgacttaatcagatttgtatttgtaaaaggtcatagtaactgctggatgaggaatggatgact

SEQ ID NO: 194915 - DNA, 201 bp, Homo sapiens
ggaaaatatcaagtaatatagcaatgagtgtggttctaggagaagagagaaaaatattaaaagtaacaatggcttaaaacttgtcaaactggtgaaaaatwtcaacctatacatctagaaattcagtgaaacacacaaagataaaaatattttaaagaaaatatttgcaaattgcgtccaataataagtataaattataat

SEQ ID NO: 194916 - DNA, 201 bp, Homo sapiens
ttagaaattgaaaaactcccaaatacccatcaacattggaatgggtaaataagttatattttacttatataatgaaatattatacatccgtgaaaattttwaaaaaagattcatataacatatatgaagataaggaacataattttgagtgaaaaaagttgtcatagaagaatatatacagtattattttatagttaagtc

SEQ ID NO: 194917 - DNA, 201 bp, Homo sapiens
ggaaatatatatatggaaatatatatatgatatatctatggaaatatatacatgatatatctatggaaatatatacatgatatatctatggaaatatatayatgatatatatatggaaatatatatatgatatatatatggaaatatatatatggatatatatggaaatatatatatatgttatatacaatgtttgttgag

SEQ ID NO: 194918 - DNA, 201 bp, Homo sapiens
ttatttaatccatgaccatctattatttatatattttccttgcttctttcttggtatttaggaaggagacaaacaacttataagggaaacatccacacatcaactgaattcagaacgctatgttcatactttcaaggatttatctaatttctcaggagccataaatgtcacctatcgctacctagctgccacacctttaca

SEQ ID NO: 194919 - DNA, 201 bp, Homo sapiens
agtgttttagtttcctaggtctgccataacgaattaccacaaagtgactggcttttaaaaagagcaatttattctctcgtggttctggaagccagaggttraaatcaaggtgctggcaggtccccactccctctgaaagttctaagggagaatccttgcccctttcagcttctggtgactttgcttctggtactctttgac

SEQ ID NO: 194920 - DNA, 201 bp, Homo sapiens
ttagattataaatgtctgaataaaaagttattcaggcaaaattactataaagtgtgtttcaaaattttttaaagtggtgcttatgtcttggaacaatgtarcattaaagttttttgaatgtgtcttataatattgtttgctttctaattaatatactatgtacatttcaagataaaattgtgaagtccaattacgaattct

SEQ ID NO: 194921 - DNA, 201 bp, Homo sapiens
gcccttctctttttgcaaaagagaaaaagcattttttttactttatctttaaaaagtaacttgtatgttatctaggtacctgtctaccttctctaatgggygtatatgagaatattaagctgcagaacactttaaaccatgtttttagaatttcatcagtaaatgttcacagcaatagggctcatacattattgtgattaa

SEQ ID NO: 194922 - DNA, 201 bp, Homo sapiens
tgaattaactaatgaatctggagaagaagtccaagctcactgtggctttgggttttcaagaaagagtgtgagtaaattgtcattgtttagaggtatatatrgtcacaaaagaattgctagccttgaactaaacctgtcactctggaaaaaatacatagactggtattagacttctcattgcggtattagaatctagaaaaa

SEQ ID NO: 194923 - DNA, 201 bp, Homo sapiens
cccaatataattataaatattacccttttttgctcttaaatgagttctggtttgaaagataaattacactttcactttaccttcatgtatgtttatcttaycctacagcatatagagaagaaaatggaagaaagtgttattaactggtatatgtcttcttattcaataccgaaaataaggctatgaagaaattattaacat

SEQ ID NO: 194924 - DNA, 201 bp, Homo sapiens
tgtatctatgttcatgagggatattgttctgtgctttttatttgttgtagtggctttgtctgattttggtattcaagcagtgatggcctcagggaataaaytgacaaatgtttcttcttttttttaattttctggaagagattctgtaggattactgtaatttcctccacaaattattcttagaattacaggaccaacaaa

SEQ ID NO: 194925 - DNA, 201 bp, Homo sapiens
ttacctgggcctgtaattttcttggaggatacttaactaccaactcaattggttttacagatagaggaccattgaagagatctattttgtatgtgtgtgtwtgtgtctctgtgtgtgtgtgtgtgtgagagagagagagagagagtgagaaagagatttggtaatttttttcttaataaattggtttattcactataagtt

SEQ ID NO: 194926 - DNA, 201 bp, Homo sapiens
aatggtggccatctctgctcactgtttggcctgtgataagttgtctttgatagcctgctgttttgttcttgaaccctgccatggctacaactctgggatarcagaactgtcaaaaataaaagtaaaagagcaagaggcacagagcctgtgaaagttagagaggacgtaaggcctgatagttgagagagaggggtaaatgat

SEQ ID NO: 194927 - DNA, 201 bp, Homo sapiens
gctgctgtgacaagactttactaattctgtgtggtaacaaatgtttttgtatttgccaatctgttaagttcacacacatgcatacacacacacacacatasacacacacacaaacacacatacacaaacacaatttttttaaaaattttcacttatttaaagatgagaaaggctgagtattttttacttgtatattggtca

SEQ ID NO: 194928 - DNA, 201 bp, Homo sapiens
aatgtttttgtatttgccaatctgttaagttcacacacatgcatacacacacacacacatacacacacacacaaacacacatacacaaacacaattttttwaaaaattttcacttatttaaagatgagaaaggctgagtattttttacttgtatattggtcatttatttaggattttttggtgaatctattaatactcctt

SEQ ID NO: 194929 - DNA, 201 bp, Homo sapiens
attgaacatattgaatatattgaaagttgatcaagatgtgttaaagtttatctaaagcaagtttatattaatcacctaacatgagtagcaaaattacgcgrttagttattatcataataaaatattattatgttatgcatatattaaaatgcatattactatgtattttcttcttatatctttaattatgtggttgtgtgt

SEQ ID NO: 194930 - DNA, 201 bp, Homo sapiens
agttaaagtaatttttcttaagtaaaaagaaatacttaagatcactagaacagctaatgctacattttttggaaacctttggctctttaatttatcttcarctttaaagaagtttgatttgtcattacaaaaaaaagtgttcattccatttctacatcaatatgcaggtatttgttgatatcctatattttagttattcaa

SEQ ID NO: 194931 - DNA, 201 bp, Homo sapiens
gttttcagagttgaatggagttgaaggggaacagggaaaagaagcaattaagaaccgcatagtatttcttgttctagatccttgaggaattaccacactgycttccacaacagggcagggaacatcacacacccgggccgattgggggctgggggacagggggagggacaacattagagaaatactgaatgtaaatgacta

SEQ ID NO: 194932 - DNA, 201 bp, Homo sapiens
atattttagttattcaagtttacatcagcatttggttcctctcccactaactgtttatattttaatgaagtgcgatggttaaatctttcaaataagatatraaagacattaaatatttataatttattttatttctcttctctgtcatttgtgattaattaggccagttgtcagcctatattttggataagaaacattatt

SEQ ID NO: 194933 - DNA, 201 bp, Homo sapiens
gcatacacattctcattaaattcaaagtcagttggtagagtagcaggggtgcattaattttctgagtatttagactaaatcatatctctgctacacttctytcaaaccagcaccaccctaaagtaaatgcagcttttactgtactaccattttggttacctacatagatgattgtaaagtacccactgtgatttaatctga

SEQ ID NO: 194934 - DNA, 201 bp, Homo sapiens
tgctaattgactgcttatctgttgaattttttccaagtacttccacttcttaccccaaagtataccataattctatgtctacttcagattttatattgacrtcagtatcaactctgggctaaatgttaagttaccatcaaaatatactttaatctagaaacaggttgtattagttttttttcatgctgctaaaaaagacat

SEQ ID NO: 194935 - DNA, 201 bp, Homo sapiens
atatggaaatatatatatgatatatctatggaaatatatacatgatatatctatggaaatatatacatgatatatctatggaaatatatatatgatatatmtatggaaatatatatatgatatatatatggaaatatatatatggatatatatggaaatatatatatatgttatatacaatgtttgttgagctagatcatt

SEQ ID NO: 194936 - DNA, 201 bp, Homo sapiens
ctcagagtaaaatgagaataaatgaaaatttcctctatctgatgaagtatttttctgaaaaacctagaactaacatcatatgtaatggcagaatattgatrctttcttactaagatttgaactaaggcaagaatgtgagttctcattgctttatttaacattatattagaggtcttgccagtgctatccagcaaaatcgtg

SEQ ID NO: 194937 - DNA, 201 bp, Homo sapiens
tatgatatatctatggaaatatatacatgatatatctatggaaatatatacatgatatatctatggaaatatatatatgatatatatatggaaatatatayatgatatatatatggaaatatatatatggatatatatggaaatatatatatatgttatatacaatgtttgttgagctagatcattgagatacattgagtt

SEQ ID NO: 194938 - DNA, 201 bp, Homo sapiens
ttttcaaattcactggatacatggtcaatatataaaagaacaattgtatgtaacagcaacaaacaagtgaaaattttaattgaagcacaataccatttgcygtggcataaaaacaataaaatcatagcaatgaatttagtggacaacatgcaatatatctgcactaaacattaaaaccatttctgggagaaatggtaaaga

SEQ ID NO: 194939 - DNA, 201 bp, Homo sapiens
aacatgcaatatatctgcactaaacattaaaaccatttctgggagaaatggtaaagaaggtctatggcaagacaaatagttttcatggattggaagattayatattgttagaatgtttgttatccaattattctatagattcaaagaaaccccaataaaaaatcccaacaaccagtttgttacaaatggactaaccaatta

SEQ ID NO: 194940 - DNA, 201 bp, Homo sapiens
aaaataaaaatttatctgtgttgacacaatttgtatcacctttgatgatgtattaagaatactatcattttgtgcatacttatatatatacacacacacaygaacatatacacatacacacacattaaaagaactttcaagtattttcatatgtttctgcttattgttttgttgatccctcttttatgcactttatagcat

SEQ ID NO: 194941 - DNA, 201 bp, Homo sapiens
cgctttatcaatgtgaacggcttaatttttatgcagtagtttagatttgatgcataaattatgaagacaatcttgcaattatgtatgccacaagtatctasaagtatatagtctatctttttcctcccttttctctaataacattcaattactgtgctagccccagttatgaatatttatcagtaaagaaacaggtggaaa

SEQ ID NO: 194942 - DNA, 201 bp, Homo sapiens
gccacataaaaatactttagaatatagaagacagtaataataacagtggcacaaatgtattagattttacatgttaggatgttgaaagaaagtaataaccraaaaagagcacatttttatagtgcctgaatggtggaatatgtatttttactaataaaaaggcatacatttttaaaatgagtacttttaattatttgtgtc

SEQ ID NO: 194943 - DNA, 201 bp, Homo sapiens
caggaggtggaggttgcagatcgcgccactgcactgcaacagagcaagactctgtttcaagaaaaaaagaaaaaaaaggaagaaaaatacttaatgaaaaygggagtttgtcactcctctcagaatatggggtttagagtaactgctgtctatgaaatttagtaatagatgttagtaaataaaatatacctataatcttat

SEQ ID NO: 194944 - DNA, 201 bp, Homo sapiens
gagtttgagttgcctgatatccaagtgggaatcctgaggaggcagttaggtatattgtctaaccctgagaagaaaagtctagggtagtgaaaaaaaaaaartgattgtaacattagtcataggtatgggcaaaattgcctaaggagggggtatagagtgcaatgagaaatgagtctgagtttgagtgctgaggaactcagg

SEQ ID NO: 194945 - DNA, 201 bp, Homo sapiens
gtcaccccaattgatctgaagtaggctcttagcactattgccaatcacagtaactgtccttatactacagtctcttttggagaaaattattttattctctytcctttttaaatctccaagaccccttattttcatgtgtttcttgttttagtcagaggagatattttttatttcacctccaaatatataaatttatgttca

SEQ ID NO: 194946 - DNA, 201 bp, Homo sapiens
tcctctcctaggatatccaaggactttcaaagcctttcaaagtttgatcaaatttcctactttggtaaggtgtttcctaaattttctaaacttccgttttrtggcacaagatagtctaatatacaaatgtcagcagttatttttagcctaaaaaatgtaactagaccaatttcttctaccaatgtacatccgacaatctca

SEQ ID NO: 194947 - DNA, 201 bp, Homo sapiens
gactgatctatctaacagactaatagagtgattattttatggatatatttattgatgttttaaacaataatgtttgcaaaatcaaattccctttatgtatyactaatctatgagaaaatgaagcaaaactaattctccagtaataatataaattcttgagttgttctgaagaaaccaaaactacagttttagtccaaatga

SEQ ID NO: 194948 - DNA, 201 bp, Homo sapiens
gctaagtggtgtccacagaacaagtcatcctatccatttgattattaaaattctcctctgctgaggtcactgttggtgagcactcacatgggatacaaatrtcttcacagtttttgaccactcagagaggtccatccacatccctcttccccaaatttatttgtcaccaattctctaatcatgctttttctaagtccctgg

SEQ ID NO: 194949 - DNA, 201 bp, Homo sapiens
aaatgtcagcagttatttttagcctaaaaaatgtaactagaccaatttcttctaccaatgtacatccgacaatctcaatttgatgtaaatgtctacctcartattttaagttcactgttaatggacacttaaaagcttcagtgttaaaacgatatatgaaaaaaaatcataacatttttatgttgaatacattctgtggag

SEQ ID NO: 194950 - DNA, 201 bp, Homo sapiens
gatgaagggtggtccttaaatttataaaccctacttacaacaaaaaccacaccatatcaaaaaaatatttctttttccaaacaaacctttttataatgggkttggggtgggagattctgcaagaaacaagaacttgaaatctatattagctaaaattttgaagtgaatatagatagtaagaaatgtatatagtcctataat

SEQ ID NO: 194951 - DNA, 201 bp, Homo sapiens
aatagttttcatggattggaagattacatattgttagaatgtttgttatccaattattctatagattcaaagaaaccccaataaaaaatcccaacaaccartttgttacaaatggactaaccaattattctggaaattcaaaggacctagaatagtcaaaacaacactaaaagcaaccataaatttggaggacatacattg

SEQ ID NO: 194952 - DNA, 201 bp, Homo sapiens
cacttagtagtctatagtagatgcacagtctaagtggctttcaacaaagttgctgtgatcgtttaatggcaaaatctcacatcatataaaaaatattttckcatgggtcatgcatacatgcagagtgcttaaaataatagtttctagaagaaaaaataggggaaataacttcacacccttgaaagcataagccacagccta

SEQ ID NO: 194953 - DNA, 201 bp, Homo sapiens
cttctgtccttatgtataaaatatactttggagtaataaaactgatattcatatatgaactattatatcctgtatttatctgaatgttcctgagtgtataratgtaattatttaaaactaaaatataaattctgtcctaataaataaatacaaaatttgaagttgacttaatgtatgtgataaagattcactcattattct

SEQ ID NO: 194954 - DNA, 201 bp, Homo sapiens
caaataccttttataaacactgctacttaacaaaacacatttggaaaataaaattttcactaattctgattaattaattaggtaaatcagtcttagcatawttagagggcagtattttcagtttgtgatcccccaggagctcaacattactttcactctccttttaaaggcagaaattatagtcagaaatgtgcatttcaa

SEQ ID NO: 194955 - DNA, 201 bp, Homo sapiens
atgtggatattcactgaattatcagtgagttttaaactcactgataaaactcactgataaaaattttataaaatatttgacttttatatatcgtccttgtyattccttatctatgagccaattatcttctgataatgtttgacttgtatttttaaatatgtcaaaataatatacattaaatgtatcatagtaacttatttt

SEQ ID NO: 194956 - DNA, 201 bp, Homo sapiens
tcattaatttacactgaaaaaatgcagagctgctttgaagcaagtctcacacacacacacaaaaaaaaacctttaaaaagtaaagatttttcccaattackatatggctttttactgtggaaattttacttgattacttcatatattttgaaagacaatggcatgtgttgtaaaatgagatagatattggtttgaattcga

SEQ ID NO: 194957 - DNA, 201 bp, Homo sapiens
gctgcagacccacatggattcaccactgctaacatatatatacatgtatagggataataattgctatatgatagctccctatttctcagactctgctgaartagtttgaagatctctttggaaagaccttttgtaacatttcaatctagccattatctctcatagacttcttttacttcatgacacttgccataataagta

SEQ ID NO: 194958 - DNA, 201 bp, Homo sapiens
tttttcacctttactgaggtataatagataaataaaattgtataaattaatcgtgtacactgtgatgttttaatataggtatacattgtgaaatgaacaayacaatcaagctaattaacatataaatcaccttacataattaccgtgtgtgtgtgtgtgtgtgtgtgtgtgtgtgtgtgtgatgagaatactgcagatcta

SEQ ID NO: 194959 - DNA, 201 bp, Homo sapiens
actcatgacagatactaatgatgtaatgttaagtaaaggcaattagggcaatatattatgagaataactatatttagcaagaacctaaatatgaaaatgtrttttatacgtgtgctgaagtatgttaaatgaagatatctctaacagggtggcttttgaaagaagtgacatccaaacacccaggtaagaatattttaggca

SEQ ID NO: 194960 - DNA, 201 bp, Homo sapiens
attttaaaatctatgttcataacaagagttattaatttatgtaatacaaggtagaatcattttagtggactgatattaaaaaacttttctcatttattgcrtaaacacatctcactcctcatagactttttctatggaaatatgattttataaatatagttaacttttatctgaataaaacttatttatcaataaagaaca

SEQ ID NO: 194961 - DNA, 201 bp, Homo sapiens
agagagaaatagtaagtcagatgagagatgatggtggcttaactgggaccttagcaacagagctaatggaaagtgcttgaattctacatgtagtatgtagmcagtgattctaatttaggattcgatgctgggccactgcattatttggaagttttaaaaatgaggaaaagtaaaaaagtagactaaaactagcatttattg

SEQ ID NO: 194962 - DNA, 201 bp, Homo sapiens
ggaataatttggatttaacagtataaatgataacaattattgttaagggttcaacatagatgagaatgaagaaaacatacatttgaagatgtgattacaayagagcctttcaatatgtttaacttagggtgggttaaaatataattcacgtcttagtttttaaaggccataggattttacttcaaatggaaaatatacttt

SEQ ID NO: 194963 - DNA, 201 bp, Homo sapiens
gattgagaaatagagataagtcaagaagaccctgtgaaggtcatagaaaaatagaatctcaaaatagaataagttggaaaattgaatctacaagaaactgmtatgatgcaatgtaactttagtatcagatcattggtaccaaatgaaagttacttacatttatcattcaacgaatgtccattgcgtatgtttgttatgttt

SEQ ID NO: 194964 - DNA, 201 bp, Homo sapiens
acaccagccataaagtaatgatgattctagggctatactctttgaatttagaaagtcagttagtgtctgtctttgatagaaacgttaggaggtagcataaratatttttcttttctgagaagatcaaatctctaaaaaggcacctggaatatcaactcctaagctgtccagcagctccaaaattaaaggactaaacatggt

SEQ ID NO: 194965 - DNA, 201 bp, Homo sapiens
tctctttacattcagcaccatggaaaagtacctggcatatggcagttatttggcaaatgtttattaaaaaggaagaaaaagaaactgaggtgaagtgatcrtcttgtttattcttcagtttgtgctttgaccatatattttaggagtgtgctgccagaggctgagtatgaatatgggatatgccgatatgaaactgaaaat

SEQ ID NO: 194966 - DNA, 201 bp, Homo sapiens
tgaggaaggaactcataatacaaaagtaagtttcaagttttaagacatggagggtcaatttctctttattcaaacaactgtaagcatcagttctatgggawaattaggccggtttcaccatccccacaagaacttcctgtaggtatctgctactctttccatctgggatccagattaaaaacacttacagtacaattgaat

SEQ ID NO: 194967 - DNA, 201 bp, Homo sapiens
actgaaataccgtctatcctattatactttacattctgcaaagacttctgcccccaaaacctaataccaccttctcagcccagcctgtcttagcttacttrtagttgtcattaattacatgtgtatagatatttctgacaaactttggttcaaaaatgtctcaaggtattttaaagtgttttataatccaagcacaatttt

SEQ ID NO: 194968 - DNA, 201 bp, Homo sapiens
tttctggttcttcctgtgatactagaaagcatgccttagtgcctttgggattctctcaagggaactgttattagataaagggaagggtagctttcctctcrtaatgtctttgtgtctctggtgaatgccagaggcaggaacttgcaggttatgtgaagcttctgttaatacagagatgttatgatatacttcaagggctct

SEQ ID NO: 194969 - DNA, 201 bp, Homo sapiens
atctaaatggaagaaagccataattgcttaatttttttttttggtggaagcatgctgaatagaacacatgtaagaaaatggactaactttaaaaatattgrtacacaaatgtcagaaactgaaataactaaaaacacgaagttcacaaagtaccattgtagggagtttcaaattaatttaggtcaaagtaagtaattccct

SEQ ID NO: 194970 - DNA, 201 bp, Homo sapiens
gaaccaagtgaaaggggtttcccctattaaaaccatcatatctcatgagacttattcactaccacaacaacagtgtgaggaaaaccacccccatgattcarttgtctcccaccaggtccctctcataacatgtgggaattacgggagctaaaattcaagatgagatttgtgtgagggcacagccaaagcatatcacttgtt

SEQ ID NO: 194971 - DNA, 201 bp, Homo sapiens
aaaatattggtacacaaatgtcagaaactgaaataactaaaaacacgaagttcacaaagtaccattgtagggagtttcaaattaatttaggtcaaagtaartaattccctgattcttatggaagtctgaattaaaattctggaaatatagagtcaagaaagaaaatgtacttaatatgccataattattataaattaggta

SEQ ID NO: 194972 - DNA, 201 bp, Homo sapiens
ttggtacacaaatgtcagaaactgaaataactaaaaacacgaagttcacaaagtaccattgtagggagtttcaaattaatttaggtcaaagtaagtaattycctgattcttatggaagtctgaattaaaattctggaaatatagagtcaagaaagaaaatgtacttaatatgccataattattataaattaggtaaagtac

SEQ ID NO: 194973 - DNA, 201 bp, Homo sapiens
taagcctgtgtgactatcggacataattttagttaattatgtagattatagctataatcaattctgtgctgataaatgtttctgtcaaatttattatggayttcaggcattttttcatgcattattatttcattcattggtatattccacaaccattaattgagtacctactatgaaccagactataatctataccttagg

SEQ ID NO: 194974 - DNA, 201 bp, Homo sapiens
gtattagtctactagggctttcataataaaatatcacagggtgggtatttcaaacaacagaaatttattttcttgtagttctggaggttagaagtcaaacwtcaaagtgccaccacaattggtttctggttaagcctctcttcctggcttgtagacggctgccttctcaccatgtcctcacatggcctctcctctgtgcct

SEQ ID NO: 194975 - DNA, 201 bp, Homo sapiens
atagcttataatagtgaaatcatcctgtatgttatcgtgagtattacctctggagagatttctttcaaccatacttattaacaatgaatacaattggattwcatcccatcccccatcttgctcaacttgactgacagatacttattttcccatgaggtaattcactccaatactggacaatttgagttaaaaattttttcc

SEQ ID NO: 194976 - DNA, 201 bp, Homo sapiens
accttatctttatcttaaaagaatgagatatgtgctaaatgtatgtaccactcttccttcgtcaactggtacccaaagaaatggtaccgaaatgccagctrttacccacatctttgagattactaccaaaaatatccatgaggtcttctgactgtatcattttctccataaaataggggtgtcactaaacagtaaaacaga

SEQ ID NO: 194977 - DNA, 201 bp, Homo sapiens
ggatatttagaaagctttataggtaagagtcaaagactagaaactaccaagtgttcattaatagaataattgatttaaaaattatagtatattcataaaaygcaatgcaataatacattcagtaataaaatcaacaatgatcaagactctatctcaaaaaaaaacaaaagccagaccaaaaaaaaacaaaagccagatcaa

SEQ ID NO: 194978 - DNA, 201 bp, Homo sapiens
atgaaagctaatgagagcaagagattggcttttatgtttgttgccatttcctagtactaagaattggtgaccaaaacattgaaggtgttcaataattattmttttgaagaggcagaataataccctagttaagaacactgatcatgaagacagatttcctgtactgaaattctggatctaacacgttttactgttcaactt

SEQ ID NO: 194979 - DNA, 201 bp, Homo sapiens
agagcttgacaggaaggggtcatgaggaaattctctggggatggaaatgttctatattctgatttggttattacttgtactgtgcattcatgtgtcaaaaytcatcttaatatacacttaagagctttgcatttcattatacataaatattaacattaatttataaacattgtataaaatattcattggcaagttttagaa

SEQ ID NO: 194980 - DNA, 201 bp, Homo sapiens
ctaccatattacctgatgttaaaagaaatcattcacatagtgttatgttacatgtgaatagaatgtgctcctggagttgcacaaattagcagccttcatawgagcaacaaagttaaccataaaagtatgttcttatgaagagcaacatagctacctgttaatagccagatgtaaagttatcaaatattttatggcctaaac

SEQ ID NO: 194981 - DNA, 201 bp, Homo sapiens
caaaacacatttggaaaataaaattttcactaattctgattaattaattaggtaaatcagtcttagcatatttagagggcagtattttcagtttgtgatcmcccaggagctcaacattactttcactctccttttaaaggcagaaattatagtcagaaatgtgcatttcaatttgtagctgacagtttagggttaagatat

SEQ ID NO: 194982 - DNA, 201 bp, Homo sapiens
attttacattcattgtattaataattatgacaatatatatgcttgttctatagtatatgatttcatagaccagaatgccaccttcaattaggaagaaattyttaaaatattttgttaatttacactatatctccaatatctacaacagacccagggcatgaaatacacataaaaaacacacacattaaatattaatatatg

SEQ ID NO: 194983 - DNA, 201 bp, Homo sapiens
atcagaatatgcagcttatttagaacaaaattctacctttttcccctaaactgtcccttaacattgtcatctctcctgctaatcctgcattaccctggatycttcctttttgtctctgcctccactcactgctgcctctgccataagccttcatactccagctgctacacactgctgcttctatccctgaggattccacga

SEQ ID NO: 194984 - DNA, 201 bp, Homo sapiens
actcctggttgtttttgtatgtttcatagtgacaacatttttgagactgcatatttaaatatattactaaactttattccattagccagtgttctgaataygcatgatttaaaatgaagtattccaaaaattctgatcttacttaaatgaaacttagggagccatgctctgagctttacaattcccatttcctgagttgtt

SEQ ID NO: 194985 - DNA, 201 bp, Homo sapiens
gactctgcagaacaagacaatagaattaactggcttcaaacatgcattatccttcaagaaataggaagaacagccctgaaagtgattcagagagcagcacrgttgctactcccatcacatacccaacaaggcaaaggtgttttctctttggtctcagaggaagagggccacctcctgggtttcagcagggcagaatgccac

SEQ ID NO: 194986 - DNA, 201 bp, Homo sapiens
gcccagtcctgtttggcagctctagacattactgttgttcgaattgtctcctttagtccattcaggtctgaacaaaactaagtttatagacagtgtcagaygtgtattaattaaatctaaacaagtgagcttaatgtctcagccacaacaatacgtaatcaacaaaacctcaaaaagcttccaatatacatctagagtcaa

SEQ ID NO: 194987 - DNA, 201 bp, Homo sapiens
agaatcaaggcattaatgaatgtgtaaaacattttctaaaaatctattcattccactaaggtattttcccttcacttttaagtgctctgactcattctacraattatttaaagctcagccactcaactactgagcacttatggcatgccagcagtgaacagagcaccaccactgctctccaggggttcatggtctagtgac

SEQ ID NO: 194988 - DNA, 201 bp, Homo sapiens
acacccacaaggagtgatttattctatgtgtaaaaatctggaaaatctttaaaaataagctgtcacttagctgagttttggaaaattagagactttttcasgtacaggtgggcaaaggatatttcagatagagggacctcattaagaacaaagtcaaaatgagaagagaaagcacagtgtgttcagttaaggtcaagttgc

SEQ ID NO: 194989 - DNA, 201 bp, Homo sapiens
acagtggttgaactagtttacagtcccaccaacagtgtaaaagtgttcctatttctccacatcttctccagcacctgttgtttcctgacttgttaatgatygccattctaactggtgtgagatggtatctcacaggtctctgatttttaaaaaagtataacttgaggacatttttaaaaaagaacatagtggcatttgaat

SEQ ID NO: 194990 - DNA, 201 bp, Homo sapiens
ccatttgacacactagaaaacctctatttactgttaaatgatgggctttcttataaaaaaaaaagaaaacctgaaaagccagagtatgaatccttgtcatytatacaattcataaaatcagtttaacctccccagatgtaagtgtgtgtatttgtaatttagttacttaattacttctagtcaagggggaggtttaaacat

SEQ ID NO: 194991 - DNA, 201 bp, Homo sapiens
tatatttatttgcaaactctacatttgataaaatattaacattcaatatataaggaagtcaaataattcaacagcaacacacatacaaaaaaacctgtttyttaatgagcaaaatacctgaatagacatttctctgaagaagaaatacacatggccaacaggtataggaaaacatgctcaacatcactaatcatcagggga

SEQ ID NO: 194992 - DNA, 201 bp, Homo sapiens
ccattctaatgtatagatatatagtgctgggtctggaagttgcagagataattttctaggagatctatgtatccctaactcagataaaatcagtaactgtytacatgatggtgaggatttagataatcctgtagctctcactggtatatatcatgaccatactaacttccttcttcatattttataaaaatgcactgtttg

SEQ ID NO: 194993 - DNA, 201 bp, Homo sapiens
cttaaaagttttcacatatggcatttatttattttgttgacactttacatatgttgacatatcttgcaattccaaagcaaatggtagaaacatttacacayctttcctgtagggacccaccatcatcctgggtcttaaatgtttatacaaataaaatcataaggaaaatgatcagcctaaggttaaagtaactcagaatat

SEQ ID NO: 194994 - DNA, 201 bp, Homo sapiens
ctagtcaaataagcttaagtttatgttaaattggggtatctttaataagtcaatgctttcactttgcatttaaaaacaagaagctgaatcactaaaatagyaatagcttcttaccttcatgtctaagaatttgtatttctttaacatagaagcaggaagacttttcttcatccttactaaatcattttctctttctccaga

SEQ ID NO: 194995 - DNA, 201 bp, Homo sapiens
ctcgggaggctgaggcaggagaattgcttgaactcaggaggcggaggttgcagtgagccgagatcgcccactatactccctgcctgggtgacagagaaggwctcggtctctaccaaaaaaacaaaacaaaacaaaaatggcagggggcgctgatgttttagcctccgtgtttatcccatttttgtggagtctttaatgttg

SEQ ID NO: 194996 - DNA, 201 bp, Homo sapiens
tcatcttaatatacacttaagagctttgcatttcattatacataaatattaacattaatttataaacattgtataaaatattcattggcaagttttagaaratgatttatgtatttgagtttttagctctttgatatggcattagtgatacacattttccaaaaataacaatgttacatttatttagagattaatatttac

SEQ ID NO: 194997 - DNA, 201 bp, Homo sapiens
tgactcaaaatcattgtcactttcacccaagttgtttaaggctaaggatgtgatattcttcactgagattcagagaactggtacgtaactaacagagaacmaattaagtaacaattttcacacagctccctggtcattaaaaaatagggaaaaggaggaaaatctggtgtactctagcttctaaggaagtcagttcctcag

SEQ ID NO: 194998 - DNA, 201 bp, Homo sapiens
aactcatcttaatatacacttaagagctttgcatttcattatacataaatattaacattaatttataaacattgtataaaatattcattggcaagttttaraagatgatttatgtatttgagtttttagctctttgatatggcattagtgatacacattttccaaaaataacaatgttacatttatttagagattaatatt

SEQ ID NO: 194999 - DNA, 201 bp, Homo sapiens
tctgtcagctttgcgattgaagcttgggtcttaaatttttttgttctgtgattatgccttgatgtttgcacaaaccacaacatggagcaagattgactctytaaaagtttaaactttttactcaagtataatatacatacagaaaaacatacagcttggtagtttgcacaaacaccaaacaataatataatcagcacccag

SEQ ID NO: 195000 - DNA, 201 bp, Homo sapiens
aaactaaatttctgttgtttaagctacacagtctgtgatgttttgttatagcagcttcaggcagactaacacacatacataaatatgcagactgatacatrtgtatgtttatatatttctatatacatgtctatatagaaatatttacatataatatgggaataatatgggaaacaggcagactggggaaaagatttgcat

SEQ ID NO: 195001 - DNA, 201 bp, Homo sapiens
aattcccagcctctagaactgggggaagtaaatttctgttgtttacaccactcaatttatgatgttcttgttatggtagcctgagctgattaaaacaatgrcaaattgatcaaactaattgctatttctattaagttctgtatctgtatcagatagtttgctggatactggaaataaactatgtattttaattatcataaa

SEQ ID NO: 195002 - DNA, 201 bp, Homo sapiens
aattacctcctcctaggtccctcccacaacatgtgggaattttggaagatacaattcaagttgacatttggctggagacacagccaaaccatattcaggtrtaatctgaaaatgtgaatagtatcgtattgaaaaaagcaaatagcaggcaaataggttgaatctaaagattcaggagaaaatcagaaaacagaatcttat

SEQ ID NO: 195003 - DNA, 201 bp, Homo sapiens
aaaataatagagccacaacccataaaaactgctgccacctgtacaaatttcagatcaccaagggaatttttcctatagatcatcaacttatattaaagttkcaacttgagaaaaaaatatttgctgctgaatatcttggttgaatgtacacaaaaaagtggattagtagtgtactagcttttacctccctgttgattcatt

SEQ ID NO: 195004 - DNA, 201 bp, Homo sapiens
gactcaacaagaaattgagctagaagtctggcaagggcaaacttatgaagacccaagacatgaagaaacccttgcatggttttttgccttcatctttactrtgcttgtctcctcattctttcatggtgtcaagacttaatagttcaagagtggaaaccgcagaagaaagtgatgcattctctctgctaacatcactattta

SEQ ID NO: 195005 - DNA, 201 bp, Homo sapiens
attgatgctacttagatttcataagattgtactcagccaagaaggaaaagaagctgtaatggtacgggacctggactacagcaaaagaaaagactcttttsttttctgaagcaattataaaaatattacctcagacactgcatgtcaggtcatctgtatttactaaattctcacatggtttcatccactctttttgtctag

SEQ ID NO: 195006 - DNA, 201 bp, Homo sapiens
caataataagaattcatacccgtacactacctattgacttgtgaggtacaccagatttaacaggtgtcctttttgattactgacaaaaccatttaaggaayaccaaaagaagaagccagagcagaacgtgaggccagagaagggacgacacaccaggatattaataaaaatacacaaaaatcaatcatcagggaattgaaa

SEQ ID NO: 195007 - DNA, 201 bp, Homo sapiens
cccagaaagcaagaggagtgctgagaggggagcctaacacttggcacttttctacacatttgctgatattttaattttagccaaaatgctaagaagctgartggaggtttgccagtttcatgggtagcagagacaaacatttagttcaagacctgccaaagaagatgggcttcggtaaacacttcaggctttcaactggca

SEQ ID NO: 195008 - DNA, 201 bp, Homo sapiens
gcatgcatctcagtttcttgcagtgtaaaatcttaattaaaatgagacaattagaaatcaactagtgcaggaatcttaattcactaatgagcagttgattytacccttgttcacccaagtttcttgaatacagacaaggatacatctattttttctactagttcacttctctttctgttctaaattctcacaatactccaa

SEQ ID NO: 195009 - DNA, 201 bp, Homo sapiens
aatttactcctgctttggcatctgatcatcaacagagaccagcaggattcataatctactacatgccttatgttgatgaaaaagatggtctaatgtcatcraaaatgaaatataatgaaataaatactaaagaaacatttggcaatttgcactttcactgtctctttttttttatactttaagttctggggtacatgtgca

SEQ ID NO: 195010 - DNA, 201 bp, Homo sapiens
tatgatgtgaggtaagagaagaaggaaacaaaagcgttaagtgaaaacagtggctagaaattttcccaaaataatgagacaagaaagctcaaagttaaaasgaactatgtacctaaagcagaatatatacaaatgaaacctcaatttactgaaagtcaaatacatagggaatattttgatttaaacaaaaggcacattatc

SEQ ID NO: 195011 - DNA, 201 bp, Homo sapiens
gaggagaacatcacacacaaggcctgtcggggggtcgagggaaaggggagggagagcattaggacaaatacctaatgcatgcagggcttaaaacctaaatkacaggttgataggtgcaatgaaccaccatggcacatgtatacctatgtaacaagcctgcacgttcagcacatgtaacccaggacttgaagtaaaatttaa

SEQ ID NO: 195012 - DNA, 201 bp, Homo sapiens
aattagaaatcaactagtgcaggaatcttaattcactaatgagcagttgattctacccttgttcacccaagtttcttgaatacagacaaggatacatctaktttttctactagttcacttctctttctgttctaaattctcacaatactccaaatctccaaattttagtaaaaactacatcgttttcctggctttaatgct

SEQ ID NO: 195013 - DNA, 201 bp, Homo sapiens
tgcacaaccccaagaaagatttgatagagcaataatatcagatgatgacacatttcataatgctacaataacttatccaaggaaaagcttagaatgctaartttgaacataccaacatatctataaaatacctaaagaaaatttgatataactaaaaatgaaaatagacaaacttaccatcataatgggagattttaacac

SEQ ID NO: 195014 - DNA, 201 bp, Homo sapiens
ttgtttgttttgagagggagtctccctctgtcacccagcccgcagcacagtggagcaatctcagctcactgcaagctccgcctctcggtttccagccattytcccgcctcagcctcccgagtagctgggactacaggcgaccgccaccacgcccggctaattttttttttttttttttttttttttttttttgtatttgta

SEQ ID NO: 195015 - DNA, 201 bp, Homo sapiens
tggttgtgtttgtttgtttgtttgttttgagagggagtctccctctgtcacccagcccgcagcacagtggagcaatctcagctcactgcaagctccgcctytcggtttccagccattctcccgcctcagcctcccgagtagctgggactacaggcgaccgccaccacgcccggctaatttttttttttttttttttttttt

SEQ ID NO: 195016 - DNA, 201 bp, Homo sapiens
acgcccggctaatttttttttttttttttttagtagagacggggtttcaccgttttagccgggatggtctcgatctcctgacctcgtgatccgcccgcctyggcctcccaaagtgctgggattacaggcgtgagccaccgcgcccggccatgagtgttctttatacctttgtttttctttttgggtaactatttaaagctt

SEQ ID NO: 195017 - DNA, 201 bp, Homo sapiens
tttaaatactctagaagggctgtgatgagatggatcactgtggttttgagaaaatgaggaatgcttcctaaaagaggtaagaagcaggattatttggcacyatttaaagcagtctgacacatcaaaggaacaggaatggtcaacacattctacttcattaatttccgctaactttactaggtatatcaatctattaagtta

SEQ ID NO: 195018 - DNA, 201 bp, Homo sapiens
ttactgcatgcattacggctttttaaaaattcagatatgtaagcctcattttgggtatagataaaacaaaaacagtaaaaatgccatctagtaatgtcaakggaatcctggaagaatatttacacaaaaaccctaaacattgactatctttccagtctttaggatgctgttgtttgctgcagctcttttggtagagcaaaa

SEQ ID NO: 195019 - DNA, 201 bp, Homo sapiens
ataatctcactaacagttaatgagtgttttttttttttttttttttttttttttttttttgagacggagtctcgctctgtcgcccaggctggagtgcagtkgcgggatctcggctcactgcaagctccgcctcccgggttcacgccattctcctgcctcagcctcccaagtagctgggactacaggcgcccgccactacgc

SEQ ID NO: 195020 - DNA, 201 bp, Homo sapiens
gctaactttactaggtatatcaatctattaagttattttaaataatggataatgttggatggggtgattaattactcaagaatagaaaggtgggtcacacrtgacataattgagaggaataccagagtttgggaaagagtttctgaagtcagtatttattcactatttatgaacttgagcaaacatgaactagggatagga

SEQ ID NO: 195021 - DNA, 201 bp, Homo sapiens
aaaatgtacaacctatggaaaaagagatgatgaggtggctccatatgtctatggattggttttaatttaaaatatatttatactctagcttgctccagaaagcattgtaagagggtcttgttaattacagcatccttatggaaataatcactactccataactcaaaatctagtgtggggtttttccaggattgagaaata

SEQ ID NO: 195022 - DNA, 201 bp, Homo sapiens
ttgtattcgggctaaactgaagatgactagaccctagaaaccagacagaagcacagagacccaaaaacaatttgaggatgcccatggggccaaaatataamgaagttcaaaaaaggaggcagaacatggtgtctgatgtctgataggaggaatctaggcaagaagactgaactcagagacaagattgtagtttccaggaag

SEQ ID NO: 195023 - DNA, 201 bp, Homo sapiens
aggttttccatcacttcctgattcaatcttgaaagttgtatgtttttaataatttacccattttctctaggttttccagtttgttagcatataacagttgytcctaatactctctgatgatcttttatcagttataaaatctctttttgtcagttataaaatctctttttttcatttctgattttattttcttttggatct

SEQ ID NO: 195024 - DNA, 201 bp, Homo sapiens
gattcgatgctgggccactgcattatttggaagttttaaaaatgaggaaaagtaaaaaagtagactaaaactagcatttattgagaaagaagaaaaaaaaatgacatctttgatgccaagtaaagaaaacagaaagcatgtagtgatgaaatgtgtcaaaagctgaggagatgatttagataaagtctggaaaaaattttt

SEQ ID NO: 195025 - DNA, 201 bp, Homo sapiens
aagaaaacacataatgaaaatatctacaataattttatgtatgttttgtttacacatctcttttgaattcaaactttcatacaaataaaggcttgaagagtataattactaacaaaactaactgttctccaggatagggcaaaaacaaatgtgataatcccaaactccaaattcacataggaacaatttatgtaggtattt

SEQ ID NO: 195026 - DNA, 201 bp, Homo sapiens
gagaaaatgcagtgagggaggggatgaactgttcataatataatggaaattacttttcccgtttggcacataaattaggaaaaaagtaaaaaaaaaaaaaagggagtgtttgaagtagtcatctgttaaaggtcaaatttccagagtcatccttgctacaaatctggggaaacacattattcaaaatgttttgttttaccc

SEQ ID NO: 195027 - DNA, 201 bp, Homo sapiens
ctctgtgtattagtccattctcacactgctgtaaagaatacctgagacagggtagtttataaaggaaagaggtttaattgactcacagttccacatggctrgaaaagccccaggaaacttacgatcatggcagaaggtgaagaagaaacaagtacctatttcttcacgaggcagcaggaaagagagggaaagtgaaggggg

SEQ ID NO: 195028 - DNA, 201 bp, Homo sapiens
tttcactgtgtaactcttttgcgatgtttgaataaaaacaaaatacacatatatatatatgatatatatcatatatatgtgtgtgtatgtgtgtgtgtgtgcttttgaaatgaaaaacaaagcacatttgatttaattcaatttcaaatatatttattaattgctttctgcacattagaataggcattagagatataattt

SEQ ID NO: 195029 - DNA, 201 bp, Homo sapiens
aagagaaagttggagaaataacaagggttatgttcatgtaaggctttataggctatttaaaagctttagacttttattttaggtaaagggataggcaatamcagcattttgaataggggatttatataatccaacttatatttaagaaaaaaaacaactcagacttctgcatttagatatattatgtgtggatatggggtg

SEQ ID NO: 195030 - DNA, 201 bp, Homo sapiens
cccattgccttttggaaagacagagaattgtgctgaatacttggaacatacctttgaaggaaatcctgcatatattgctgaattatttgatactggaataraacagaaactaatttcttttcattcaaacacatttactaacaccactacccacattttttcctaaactcatagaggttttaaaatgatacaagggcatcc

SEQ ID NO: 195031 - DNA, 201 bp, Homo sapiens
cttaaaaaagcaaaatatctaaaaggtgtcttgttcctgggctctgttagtagctagagtcagttcccttaacttgcatcgctgaaagttctgaagagccrttagagcccatagggagctgggaggtgtgtgttgtatgtgtacatgtgtgtgtatatatatgtggtggggagtgggggattagtgccttatgcatgccat

SEQ ID NO: 195032 - DNA, 201 bp, Homo sapiens
tattaggagaaaagagggaatagacaaaataatgttaagagaaagaaacaacataaaatttgttggattaaatatctcaattttggaccttgaatttacayagatttcatatgaatgtcttcaaacttcagaaagtttatatttttctgaatttgtgattttggaaaaccaaactgctatcgctgttattaaatttttccc

SEQ ID NO: 195033 - DNA, 201 bp, Homo sapiens
atcaaaaccacaatgagataccatcttacaccagttagaatggcaatcattaaaaagtcaggaaacaacaggtgctggagaggatgtggagaaataggaayacttttacactgtcagtgggacgtgaagtagttcaaccattgtggaagacagtgtggcaattcctcaaggatctagaacttgaggatccttgacccagcc

SEQ ID NO: 195034 - DNA, 201 bp, Homo sapiens
tctttttaaaagtcctgttgaaggaggtttctcattatataatgtatcactaactaaaactccctttttggcaagctgataaaaaagtaccttagctgttrtgctgtctaattacaggactcaaacctaacaattggaaggggaagctgagtgaatcagctgttaactctctttaaatgagatttatctatacttacagac

SEQ ID NO: 195035 - DNA, 201 bp, Homo sapiens
cttataggggaaggatggctttttgttttctggcttaatgttataaatcgataggtattgggtggtggaaaaatatagactctgttagagaatggagccasaggaggcaaaattgtctacaatcggcagctaccttttatgtgtgaactcagtagagcttttccttcctggtacctgacttgagactataagcaccctggc

SEQ ID NO: 195036 - DNA, 201 bp, Homo sapiens
tgtatctatccttgtctaagatcatcacagcaagcacatatttgttttgtttttcatcatacaaatcctctttctaagagtattcagtcttcccattttgygtatcaatggaaagtaaggcctacttatggaccttgttgtaggatcattacaacaaacacagtgatgaattgaatgactcttgcctctacttatatccac

SEQ ID NO: 195037 - DNA, 201 bp, Homo sapiens
gatttcataagattgtactcagccaagaaggaaaagaagctgtaatggtacgggacctggactacagcaaaagaaaagactcttttcttttctgaagcaawtataaaaatattacctcagacactgcatgtcaggtcatctgtatttactaaattctcacatggtttcatccactctttttgtctaggcatcaggaacagt

SEQ ID NO: 195038 - DNA, 201 bp, Homo sapiens
gataatgtgttaacaaaatacatgtaaaacaataaactgttctaaaattatgcttagattacatgtgatattaaaaaagagaacccataatttatgtgtgkgtggaatgtttaatttttaaagagtatattaactacatatatttgtgatgttgtcaacaaatgcattatttatatctacattaattattttatatatgta

SEQ ID NO: 195039 - DNA, 201 bp, Homo sapiens
tgccctctactgcacatatgtaaatatataaaactacaaatttgctatctactatcttgcatactttcatatctttatgtgcatatatgtcttttacaatwagattttaaagtatcatatgagaaagggttatgatgaattaagtttcctaataaggatttgcaaaatataaattgattgatagatgaaaattatggaatt

SEQ ID NO: 195040 - DNA, 201 bp, Homo sapiens
ctgcatgctgcagccctgagggattgggatcaacactcagctacatccttttgcccctcgagatcagacactggctgtgttgggggatcctaactactctyagcctactgggaaagtactcaggtgggactgcaggcaaagcaccaggttgggcagcagaggctgtactgtgcacatacgtctgtgagagtagccagggag

SEQ ID NO: 195041 - DNA, 201 bp, Homo sapiens
gtatgtaatggccacttgctaaatcactaaatacttgttgaatgcatgtcatgtgaataaaagatagatttctctatgaatagagtagccctgtgtgatayacgatgggaaaagagaaatccatgtgaggacatggaagcagtgtgggtgctgtggcttgaatgtgctccccaaaattgaaatgttgaaactgaatcacca

SEQ ID NO: 195042 - DNA, 201 bp, Homo sapiens
gtttctgacagatggaacaagttaaggttaccttctcaatatgaggactaaagcttttagccaatatttgtggagaagacacatttaagattttcttttgyccatacatgcaatgttatggaggctgtgaccacattttaggcaagaaactgaaagaacatcaagcacctatctggatgtctccaaagcctcatctggata

SEQ ID NO: 195043 - DNA, 201 bp, Homo sapiens
atatttcagctctgaaaaataggggccattccaagaaaagattacaaaaccctttctgtacagctaatagaaagtgttcagtttaaagctggcccatacartagtaaggtatattgtcattcatagctgatgacagccatgatccttactgttttatgcctagacaaatgaaaagatttatgtgataaaaggcttataatc

SEQ ID NO: 195044 - DNA, 201 bp, Homo sapiens
atccaatctatttttcaatcagcctttttttttcctttttcaacctcagacaattgcttttggggtcctagagtcccttgaaagttatgatggaaataggrgacctaaagttcaggtgactgaagggctgaagcaggaaggaaaaacgtctgggaggacaggtagacagaggaaagaggtctgaagaggcacatatcaaaa

SEQ ID NO: 195045 - DNA, 201 bp, Homo sapiens
catctccatgctttcttttttcttcatagcacatgcaactagctggcattttattatatattcatgggtatatttatcttgtatatttccagtagaatgtragctacataaagacagagttttattttgtttcattttgtttttcccaccaaatagagcccctgtttttagaacacttcttagaacataaaagactcaata

SEQ ID NO: 195046 - DNA, 201 bp, Homo sapiens
gaaataccatgaataatacctcatatgtaagaaaagtttctttttctaagttcagctgaaatatcttattgtaggcaagcctgttattaaatcttcacatytgacaaacgactttctcttagccattctgtccctctccactgttcatcatcccagccttagagatcggcactcttctttgaatgcattagtcactcatga

SEQ ID NO: 195047 - DNA, 201 bp, Homo sapiens
ggatttcattctattttatggctaaatagtattccattctattttatggctaaatagtattcattctattttatggctaaatagtattccattgtgtatgtatatatatatatatatatatatatatacacacacacacacacacattttctttacctattcatctgcatatggcacttctgttgattccttatcttggct

SEQ ID NO: 195048 - DNA, 201 bp, Homo sapiens
cattctgtccctctccactgttcatcatcccagccttagagatcggcactcttctttgaatgcattagtcactcatgaataatgacataaaagcttagcartgctccagaaagagaggcttttattatgcttttctaacaaccattaatatctataacactcagcagttttctaattttcttttataaaaggacaagctgt

SEQ ID NO: 195049 - DNA, 201 bp, Homo sapiens
gatttcattctattttatggctaaatagtattccattctattttatggctaaatagtattcattctattttatggctaaatagtattccattgtgtatgtatatatatatatatatatatatatatacacacacacacacacacattttctttacctattcatctgcatatggcacttctgttgattccttatcttggcta

SEQ ID NO: 195050 - DNA, 201 bp, Homo sapiens
gaataaaatctcctaagtttgaaataaaacctaaatttagcaactaaattgcatatttctaagttctccatggaatgagatgattactttgtttttgtttyatcttgtttttccctaattgaatatgtgtcatccaaaaggtctattgcaaagtcatgaataaattcttacagatatttttaccaaaattttaacactttt

SEQ ID NO: 195051 - DNA, 201 bp, Homo sapiens
atttcattctattttatggctaaatagtattccattctattttatggctaaatagtattcattctattttatggctaaatagtattccattgtgtatgtatatatatatatatatatatatatatacacacacacacacacacattttctttacctattcatctgcatatggcacttctgttgattccttatcttggctat

SEQ ID NO: 195052 - DNA, 201 bp, Homo sapiens
tttcattctattttatggctaaatagtattccattctattttatggctaaatagtattcattctattttatggctaaatagtattccattgtgtatgtatatatatatatatatatatatatatacacacacacacacacacattttctttacctattcatctgcatatggcacttctgttgattccttatcttggctatt

SEQ ID NO: 195053 - DNA, 201 bp, Homo sapiens
ttttcactgtgtaactcttttgcgatgtttgaataaaaacaaaatacacatatatatatatgatatatatcatatatatgtgtgtgtatgtgtgtgtgtgtgcttttgaaatgaaaaacaaagcacatttgatttaattcaatttcaaatatatttattaattgctttctgcacattagaataggcattagagatataatt

SEQ ID NO: 195054 - DNA, 201 bp, Homo sapiens
gagatacctgcttttcactgtgtaactcttttgcgatgtttgaataaaaacaaaatacacatatatatatatgatatatatcatatatatgtgtgtgtatgtgtgtgtgtgtgcttttgaaatgaaaaacaaagcacatttgatttaattcaatttcaaatatatttattaattgctttctgcacattagaataggcatta

SEQ ID NO: 195055 - DNA, 201 bp, Homo sapiens
agagatacctgcttttcactgtgtaactcttttgcgatgtttgaataaaaacaaaatacacatatatatatatgatatatatcatatatatgtgtgtgtatgtgtgtgtgtgtgcttttgaaatgaaaaacaaagcacatttgatttaattcaatttcaaatatatttattaattgctttctgcacattagaataggcatt

SEQ ID NO: 195056 - DNA, 201 bp, Homo sapiens
ctattcacaatggcaaagacctggaaccagcccaaatgtccatcaatgatagactggattaagaaaatgtggcacatatacaccaaggaatactatgcagmcataaaaaaggatgagttcatgtgctttgcagggacatagatacagctggaaaccatcattctgagcaaactaccacaagaacagaaaaccaaacactgc

SEQ ID NO: 195057 - DNA, 201 bp, Homo sapiens
caatatcaacaacaacaaaaatcacccaaaatattaagcaataaacacattcctcaaatttctctgtatgagttagaaaaaatcatgtggttcttttggartatagtgcaactcttcatgggccacactttgcacttcacctttttggctcatctaggatttgagtctaattagaggtctacaagcaaggtgggtgatggg

SEQ ID NO: 195058 - DNA, 201 bp, Homo sapiens
cctcccccgatccctcccatgacacatgaaaattctgggaggtacaattcaaactgagatttgggtgaggacatagccaaaccatataatttcacccctgscccctccaaatctcatgtcctcacatttcaaaaccaactgtgccttcccaacagtcccccaaagtcttatctcatttcagcattagcccaaaagtccaca

SEQ ID NO: 195059 - DNA, 201 bp, Homo sapiens
gtgctctgcagaagtttgctgaatgaatgtctggctgcctgagagaaggaaggaaggaaggaaggaaggaaggaaggaaggaaggaaggaaggaaggaagagaaactaggttctttctttgtgtactttagacatgctatgcttgagatgtccactaaagagcaaataagacatgtaggtattggttatcaagaagcctta

SEQ ID NO: 195060 - DNA, 201 bp, Homo sapiens
agtgctctgcagaagtttgctgaatgaatgtctggctgcctgagagaaggaaggaaggaaggaaggaaggaaggaaggaaggaaggaaggaaggaaggaagagaaactaggttctttctttgtgtactttagacatgctatgcttgagatgtccactaaagagcaaataagacatgtaggtattggttatcaagaagcctt

SEQ ID NO: 195061 - DNA, 201 bp, Homo sapiens
ttggaattagggttttggataaaggactttgagcagaaatttttaacagatctgtaagattgaagaaattatcttaatttaggtataagaaatcctaaaaytttattaaattctacattaataacctcatatttcagtaataattttataacagatcatgaaattttaaaagttggagggagaaataatgttatatttttt

SEQ ID NO: 195062 - DNA, 201 bp, Homo sapiens
aagtgctctgcagaagtttgctgaatgaatgtctggctgcctgagagaaggaaggaaggaaggaaggaaggaaggaaggaaggaaggaaggaaggaaggaagagaaactaggttctttctttgtgtactttagacatgctatgcttgagatgtccactaaagagcaaataagacatgtaggtattggttatcaagaagcct

SEQ ID NO: 195063 - DNA, 201 bp, Homo sapiens
caaagtgctctgcagaagtttgctgaatgaatgtctggctgcctgagagaaggaaggaaggaaggaaggaaggaaggaaggaaggaaggaaggaaggaaggaagagaaactaggttctttctttgtgtactttagacatgctatgcttgagatgtccactaaagagcaaataagacatgtaggtattggttatcaagaagc

SEQ ID NO: 195064 - DNA, 201 bp, Homo sapiens
ttgctactttttattctatgatttttcataagtcaatgagagtttcaaacctggagttatgaaagttttatttgtctgatatatgtagagaccaacagtcygcttttcaacagtccattgtctcatattggtgatgaagtggtgatagaattgagttaaagtttttcagttcttctttactcatgacgttctgtattctta

SEQ ID NO: 195065 - DNA, 201 bp, Homo sapiens
atatattttagatattagctttttattacatatacagtttacaagtatttttctccactttgaaagttgtcttttcaccctcttaataaggaaattcacargacaaaaggttttaatttggcagaagtccattttatcaattttttatttgtatcatacttttgttgtcatctaagcactttttgactagctctagatgct

SEQ ID NO: 195066 - DNA, 201 bp, Homo sapiens
ctgcatttattcaatggtgttccagtctaggcctacttactagcttgtactgacttcagatatttttataactttccattctctttatggtttatttattmccccctttattgaattactacagtctagtgcatataaaaatatttgaaagaacagctgtgaattaaaaagacagctctgaactatacagatttaataaat

SEQ ID NO: 195067 - DNA, 201 bp, Homo sapiens
ttttaaaaatatttaatgaggagctaatatacacaaagcagggataaacagctaataaagtagaagtagggtgaataaacataagatatctacactagatrtagggatctgcttgacttgattcataggctgctttttaaggttttagtcaataatccaacacccaaaggaaaaaagaaaaatctaagaaaggtgtggata

SEQ ID NO: 195068 - DNA, 201 bp, Homo sapiens
attcaatttttacttatcagggaacagatgggatttgccttgggtaggtgaatagcagagtctgccacatctctaaaaacaattgagttatcaatttttgktatgtttcttatatattcactctttaaaagataatatagaagaaagtgctttaatctcaatcagttttctaaatgtgttttattggaaaaaaaattttgt

SEQ ID NO: 195069 - DNA, 201 bp, Homo sapiens
attttgttttgcaatcaaatctggaaatccttgtcttttcataggtaattttaactgattcctgtatactaataactagtagattcaatcttgtgtgttayataatattttctgatttttgacttgattttctcatttttttcttttatttttatgtggaagacattttcttttagtgaataaatgaaaaaaaattctgat

SEQ ID NO: 195070 - DNA, 201 bp, Homo sapiens
gttttaggaaagagactggcagcattttatccctgccttagagatttatggaactttgaacttgagaaagatgatttagtgtatctagtggaagaaatttytaagcagcaaggcattcaagaggtgacttgtgtgctgttaaaggcattcagttttataagggaagcaaagcataaaagttcagaaaatttgcagcttgac

SEQ ID NO: 195071 - DNA, 201 bp, Homo sapiens
ctggaaatccttgtcttttcataggtaattttaactgattcctgtatactaataactagtagattcaatcttgtgtgttatataatattttctgatttttracttgattttctcatttttttcttttatttttatgtggaagacattttcttttagtgaataaatgaaaaaaaattctgatttccaatagaaattttcaga

SEQ ID NO: 195072 - DNA, 201 bp, Homo sapiens
gcagtagtgtgataatagttctttgaagccttgaatgcctgggttcaagcaatcctcccacctcagtctttcagtcttccaagtagctaggaccacaggcrtgtgccaccgtggctaattttttttttttttaattttcgtggagatgatgcctcactacgttgcccaccctggtcgcaaacacctgtcctgaagcaatcc

SEQ ID NO: 195073 - DNA, 201 bp, Homo sapiens
agaatgaatgacttaatcatgactaatactggcttgtctagatacaaccaaaagcagtgatatcctactggccatctttccccaatatatattttaatgcmgctatcaatgcgttatgcctctccctttctttttataattaattacttagaaataggtaaaaataaaaatttatctgtgttgacacaatttgtatcacct

SEQ ID NO: 195074 - DNA, 201 bp, Homo sapiens
aagcctcatgatccagtcacctgttaaaggcctcaccttttaatactgttacactggggattatctttcaacatgggttttgtgtgtttgtttgtttgttkgtttgtttgtttgttagagacagagtcttgctctgtcactcaggctggagtgcaatggcacaacctcagctcactgcaacctccgcctcccggtttcaag

SEQ ID NO: 195075 - DNA, 201 bp, Homo sapiens
agagacatatacctaatagagatttcaaacatataaccacacatatatatccaactgattttcaacaaaggcacccaatacaactgaataaatgggatagaaaagggacttcatcctcttcttcacaccatacacttaatttaagatggttattatacctaccctaaaaactaaaactataaagcctctagaagaaagcat

SEQ ID NO: 195076 - DNA, 201 bp, Homo sapiens
ctggtggatcacctgacgtcaggagtttgagaccagcctggacaacatggtgaaaccctgtctctactaaaaatacaaaaaattagccgggcatcgtggcrgacgcctgtaatcccagctactctggaggctgaagcagaagaatcacttaaacccaggaggtggaggttgcagatcgcgccactgcactgcaacagagca

SEQ ID NO: 195077 - DNA, 201 bp, Homo sapiens
gtggatcacctgacgtcaggagtttgagaccagcctggacaacatggtgaaaccctgtctctactaaaaatacaaaaaattagccgggcatcgtggcagaygcctgtaatcccagctactctggaggctgaagcagaagaatcacttaaacccaggaggtggaggttgcagatcgcgccactgcactgcaacagagcaaga

SEQ ID NO: 195078 - DNA, 201 bp, Homo sapiens
gagaaaattagtctccctaaaatgccagaaactttctatggtttaaaaactataaaagttactttaacattttattaaattcataaaataaattagtattkgttaaagcaaagtgttctactgcttatattttaaaatgaaataaaaataattcatttcatatacatgaaaaatatctttagcatctttaaatttttaaga

SEQ ID NO: 195079 - DNA, 201 bp, Homo sapiens
attttaaaatgaaataaaaataattcatttcatatacatgaaaaatatctttagcatctttaaatttttaagagaatacaatgtaacaaaaaatagtctcrctgcagtctgcatagctcaaattcacagtagtacatataacggcataatagttatacattttcatagttatcatcatataaattaatattagtatgtaca

SEQ ID NO: 195080 - DNA, 201 bp, Homo sapiens
tctccagctgagatgtgtaagctactctagagggttaagcttttcaacttttccatacagggaaaaaaacatcatcagttggttaattccccctctgcttyattcaacttcatgttggtttgccctataataaatttatttaatataatccaatcagaatagcatttccacagtaacatttgtgagaattccaaaatccaa

SEQ ID NO: 195081 - DNA, 201 bp, Homo sapiens
atactattcagtaatggagattgtattagtcagggttctctagagggatagaagtaatggaatatctatctatctatctatctatctatctatctatctayctatatgtttattaagtattaactcacatgattacaaggtcccatgtattagttctttttcacactgctgataaagacatacccgaaactgagaactaaa

SEQ ID NO: 195082 - DNA, 201 bp, Homo sapiens
tagatagatagatagatagattatatcctgttgcatgtagaaaacatgctgaaattattctgggagggttaaaactccaaaacaaacaaacaaaaaaaaaattgagtgagtcagtgttataaatcaagttaatttgcaacattatttttgagttgaaatattaagggtttaacatatttatatcattattttgagggcacc

SEQ ID NO: 195083 - DNA, 201 bp, Homo sapiens
gcactaaaatcaccagaaaatacatttgtctttaaaaattaactgaatgtagatagatagatagatagatagatagatagatagatagatagatagatagdttatatcctgttgcatgtagaaaacatgctgaaattattctgggagggttaaaactccaaaacaaacaaacaaaaaaaaaattgagtgagtcagtgttat

SEQ ID NO: 195084 - DNA, 201 bp, Homo sapiens
atttctgtgcactaaaatcaccagaaaatacatttgtctttaaaaattaactgaatgtagatagatagatagatagatagatagatagatagatagatagatagatagattatatcctgttgcatgtagaaaacatgctgaaattattctgggagggttaaaactccaaaacaaacaaacaaaaaaaaaattgagtgagtc

SEQ ID NO: 195085 - DNA, 201 bp, Homo sapiens
gatttctgtgcactaaaatcaccagaaaatacatttgtctttaaaaattaactgaatgtagatagatagatagatagatagatagatagatagatagatagatagatagattatatcctgttgcatgtagaaaacatgctgaaattattctgggagggttaaaactccaaaacaaacaaacaaaaaaaaaattgagtgagt

SEQ ID NO: 195086 - DNA, 201 bp, Homo sapiens
tatgatttctgtgcactaaaatcaccagaaaatacatttgtctttaaaaattaactgaatgtagatagatagatagatagatagatagatagatagatagatagatagatagattatatcctgttgcatgtagaaaacatgctgaaattattctgggagggttaaaactccaaaacaaacaaacaaaaaaaaaattgagtg

SEQ ID NO: 195087 - DNA, 201 bp, Homo sapiens
gaaaaaggaagacaattttgaacaatatgcctttaaaaaatgtagttattttcttgaattgaaatattatggaggcttaaaaaaccccacatatataatgktttatttttctgttatttttgtgcttcttgaaactatttcaatagttttcttttagataaagatgcaagcaaaaatagtctcaactttaggcagtataat

SEQ ID NO: 195088 - DNA, 201 bp, Homo sapiens
ttatgatttctgtgcactaaaatcaccagaaaatacatttgtctttaaaaattaactgaatgtagatagatagatagatagatagatagatagatagatagatagatagatagattatatcctgttgcatgtagaaaacatgctgaaattattctgggagggttaaaactccaaaacaaacaaacaaaaaaaaaattgagt

SEQ ID NO: 195089 - DNA, 201 bp, Homo sapiens
aagaagtatgttaactgtcatattttcacttaaggggaatatattaaataaattaaccttgagagattattctattgtggacatcttaagttctcaaataytaaatgagcacctcatgttttcccagtattaaaaaaaatcaagaaaaatgccctcccagtgtggatcatcttttaacacaaggaaatatcttcagtttct

SEQ ID NO: 195090 - DNA, 201 bp, Homo sapiens
aggttatgatttctgtgcactaaaatcaccagaaaatacatttgtctttaaaaattaactgaatgtagatagatagatagatagatagatagatagatagatagatagatagatagattatatcctgttgcatgtagaaaacatgctgaaattattctgggagggttaaaactccaaaacaaacaaacaaaaaaaaaattg

SEQ ID NO: 195091 - DNA, 201 bp, Homo sapiens
cagaggatacagtgatttaacatcctctctctctcttttctatttttaaaaattacaactgactcttccgaaaatctcaaacaatgtgctaaaggaggcamaagtaggaaaaaaagaaagcatttcagggaacatatttcatgttcttccaaaatcataccaatgatgataccaatggataatgaaatagtcacttcatgt

SEQ ID NO: 195092 - DNA, 201 bp, Homo sapiens
gaggttatgatttctgtgcactaaaatcaccagaaaatacatttgtctttaaaaattaactgaatgtagatagatagatagatagatagatagatagatagatagatagatagatagattatatcctgttgcatgtagaaaacatgctgaaattattctgggagggttaaaactccaaaacaaacaaacaaaaaaaaaatt

SEQ ID NO: 195093 - DNA, 201 bp, Homo sapiens
agaggttatgatttctgtgcactaaaatcaccagaaaatacatttgtctttaaaaattaactgaatgtagatagatagatagatagatagatagatagatagatagatagatagatagattatatcctgttgcatgtagaaaacatgctgaaattattctgggagggttaaaactccaaaacaaacaaacaaaaaaaaaat

SEQ ID NO: 195094 - DNA, 201 bp, Homo sapiens
tgacctggagcatggtgtacctgctgctgtatggactggaacacagagtttgtgttcccttcagtgggttaatacaggctcaagagaggaagtggtggctragcttcacaagagcacttgttaagtgtattctaatttctttggagcatttgaaagactattagaacaaaggaaagagggaaggattgagtcacccaaatc

SEQ ID NO: 195095 - DNA, 201 bp, Homo sapiens
gctaaaaactgaaaaacttctgaatatcaacagaaccgataaaatgggagaaagccttattcgaaactgaaatttatcccattatacttatgatatcttaraacagcaaaggtgacttccgtgtctgtttctgaaaagttaaaggtgtgtgtgtgtatgttctgtatcagagagagaatgggagtgtagaatagaaaagaa

SEQ ID NO: 195096 - DNA, 201 bp, Homo sapiens
gatttcttattgcaaaaattcagttaaaatatcatatttaaaaaataacttgagtttgccatctagtagcagttctttgaaaatccttccgctaaaggcaygttagaccatagaacctcgaatgtaatgtctcttatatacatgaaactttcctgaaatatcttattaattcacttctttacaagatggttcattccagtg

SEQ ID NO: 195097 - DNA, 201 bp, Homo sapiens
aattttatatatctgacctcttattaacattctctaccacaatcatgttagtgtctcttgcctccccataggattcattcacctacccagccattgaaatstgctcaacttccaggtttagtactaaaacttactttgcctcatcttatggtgagttcattacaaaatatattaccataatttcattttattagttgtcgt

SEQ ID NO: 195098 - DNA, 201 bp, Homo sapiens
tattcaggcttgtttttttttcagttctatatgaattttagaataactttttctaattctgtaaaaaatgacattggcagtttgatgggtatagtgttgtrtctgtagattcctttgggcagtatggccactttaacaatactgattcttccaatttatgagcatggaatgtttttccatttgtttaagcaacctgtgatt

SEQ ID NO: 195099 - DNA, 201 bp, Homo sapiens
cacttaaaagaactagagaagcaagagcaaagaaattcaaaagctagcagaagacaagaaataacgaagatcacagcagaactgaaggagatagagacacraaaaacccttcaaaaaatcaatgaatccaggagctggttttttgaaaagactaacaaagtaggtggaccactagccagacaaataaagaagaaaagaaag

SEQ ID NO: 195100 - DNA, 201 bp, Homo sapiens
taaaactgcacaactacatggaaactgaacaacctgctcctgaatgactactgcgtaaataacaaaataaagtcagaaataaataagttgtttgaaaccartgagaacaaagacacaacataccagaatttctgggaaacagctaaagcagtgttaagagggaaattgatagcactaactgcccacatgagaaagtgggaa

SEQ ID NO: 195101 - DNA, 201 bp, Homo sapiens
cacataattgtcagattcactaaggttgaactgaaggaaaaaatgttaagggcaaccagagagaaaggtcaggttacccataaaggggagcccattagaawaacagcagatctctctgtagaaaccctgcaagccagaagagagtgggggccaaaatacaacattcttgaagaaaagaattttcaacccagaatttcatat

SEQ ID NO: 195102 - DNA, 201 bp, Homo sapiens
ccaacctagcaagacaggccaacattcaaattcaggaaatatagagagcaccgctaagatactccttgagaagaataacccccagacacataattgtcagwttcactaaggttgaactgaaggaaaaaatgttaagggcaaccagagagaaaggtcaggttacccataaaggggagcccattagaaaaacagcagatctct

SEQ ID NO: 195103 - DNA, 201 bp, Homo sapiens
ttggtaatttcaaagtgactttccttacagcgttaagacagagtgggaactatttctgttatgttgacgtaggctgacgggaatatccagatttttttctkaaaactggcccattttaaagttcagcttgattatatatacttagcacaaattactgcattctgtttggtctggtcttcaggagcctagtgcaggaggctg

SEQ ID NO: 195104 - DNA, 201 bp, Homo sapiens
agcacttaacacagaatgctatcttgcccattaactatgagcttactgcctctttttccttgcatgtttttctaatcaaggacatactttctcccctgagrcacgtgggagtttagcaattacttgcagctctaacactaggcaatttcttctgggactgcaatctgttagagttcaattttctcaaccacagacaaaatg

SEQ ID NO: 195105 - DNA, 201 bp, Homo sapiens
gattggtaatttcaaagtgactttccttacagcgttaagacagagtgggaactatttctgttatgttgacgtaggctgacgggaatatccagatttttttytgaaaactggcccattttaaagttcagcttgattatatatacttagcacaaattactgcattctgtttggtctggtcttcaggagcctagtgcaggaggc

SEQ ID NO: 195106 - DNA, 201 bp, Homo sapiens
aaaatgtagagtacaagaaaatttctacgaccacatggctctatatttttttggattgctttagtgtgttataactgaaacactgcagtaacctaagtttytagaatgttcctcagtgaatattctctagtagattgtctaccctgacattttgcataccagtggattttgttggaactatttttcaaaccagtgatgaac

SEQ ID NO: 195107 - DNA, 201 bp, Homo sapiens
ctctaccttattttgttgtaagaatatagtatataacatgatataatataaaatatgagttaatccattttctatgatatcaggcttccagtcaacagtargctattaataattaagtttatggggtatcaaaacttacatgcagtttttttggctgcactggggttaacagctcctacccccatgttgttcaagggtcaa

SEQ ID NO: 195108 - DNA, 201 bp, Homo sapiens
aagcagaaacagataaatgcaactttttattaactctgaagtttcacctgccccttctttaatggttaaagcaagttaaagagccatgcttaatattaatmaattaaggaagtatactctacaaatactgaacatgcagcaagcacttgagaaaaaggaagaatttttacaaacaacaaaatattccaaatagggagtgca

SEQ ID NO: 195109 - DNA, 201 bp, Homo sapiens
tctatcatctatctacattatctatctatcttatctatctatctatctatctatctatctatttatctatctaatatacaaatttgaccccgaacatacahccttttttcaataacgattacatcaagtgctcctacctctcttgcctcccattccacctcctccacctcttttgcctctgccacctgtgacacagcaaga

SEQ ID NO: 195110 - DNA, 201 bp, Homo sapiens
tctatctatcatctatctacattatctatctatcttatctatctatctatctatctatctatctatttatctatctaatatacaaatttgaccccgaacatacacccttttttcaataacgattacatcaagtgctcctacctctcttgcctcccattccacctcctccacctcttttgcctctgccacctgtgacacagc

SEQ ID NO: 195111 - DNA, 201 bp, Homo sapiens
caataagctacaacactctttatagcaacagactgttgaatcaggacttatttagtgacaaaacaatttaaaatgatgaaattttgagaccaagattgtakgcaaacatgccagctggagataatatattataatatactcgaacttgaaagaaagctcacagtttggttttataagggctggtagatgaatgtatgcttc

SEQ ID NO: 195112 - DNA, 201 bp, Homo sapiens
tatctatctatcatctatctacattatctatctatcttatctatctatctatctatctatctatctatttatctatctaatatacaaatttgaccccgaayatacacccttttttcaataacgattacatcaagtgctcctacctctcttgcctcccattccacctcctccacctcttttgcctctgccacctgtgacaca

SEQ ID NO: 195113 - DNA, 201 bp, Homo sapiens
caggtactgagacaaccacaaatatattatatgggatttaggtggaagaatcccctctacagataaactagggtaatagaactttacaaggattttagtcrtattgttatgacattattataaagaaaagagaataaggaacagaatagcatcccaacagcaggaaaaataaaaccctctacttttcaagtaactaaatgt

SEQ ID NO: 195114 - DNA, 201 bp, Homo sapiens
atctatctatctatcatctatctacattatctatctatcttatctatctatctatctatctatctatctatttatctatctaatatacaaatttgaccccsaacatacacccttttttcaataacgattacatcaagtgctcctacctctcttgcctcccattccacctcctccacctcttttgcctctgccacctgtgac

SEQ ID NO: 195115 - DNA, 201 bp, Homo sapiens
agataggcagtgagggacaacagaagcataggattcaccaaggctcaaaaaagctgaccacagtgaatggtattttgcctgcacttgcctgacttacaccrgagctgagggaccctgaaaggcagcccactcccaattatatacctaagggacaatgcctcaccgtcagaggctacagcattaacgaacatctcatttcca

SEQ ID NO: 195116 - DNA, 201 bp, Homo sapiens
tttttacaaacaacaaaatattccaaatagggagtgcaaagatatatttattctcagttggttttagttaatcagcaaatattcactatgcttttcttcaraaacttgtatcagggagtgtacagtgtgaggtaaataatatatgaaatatgaatctctgataaccctaaacccagaaggtgacccaagaaaccatagaaa

SEQ ID NO: 195117 - DNA, 201 bp, Homo sapiens
cttttgtgtgaggcccaaggatcactcatgcttccaggctgcacagagcactgttggatctagctgaacgaattgttttctctgtctctggtaagggcttsttctgttttaccttctcttttaaaataaaggtagatgtgtcttacagagaaaatattataagggtcaaaaaggattactatctggtaagcttttattcag

SEQ ID NO: 195118 - DNA, 201 bp, Homo sapiens
acttagtccctttagtaatgcccatttgaagtatgcagaataagacagtaaaattagaattcaataattgaaagtacgaatgtgattttttatctgctttytctctctgcctctgaagctatgacaaacgaatgtgcccttttcaggggttaataaattatgaagacttttccacttctttcagagttagagacagagaag

SEQ ID NO: 195119 - DNA, 201 bp, Homo sapiens
ataataattatatataattgtatataatatgtatttgtatatatttatatataatatatattttttgtgtatatatatatatatatatatatataatatatataaatacatacatattacctatgtatgtccagttgtttcagcaccatttgttgaagggcagtctttccctcactgaattgctttgcaactctattaaaa

SEQ ID NO: 195120 - DNA, 201 bp, Homo sapiens
atggaactgagcatatcataaaggttgtctaggtaaattttcacaagtaagtggctctctacctgtgtgccatggcacaccataaaactctcaagggtatstcctaacatttgggtcaatgtggaaaatgcattttgcctaaaactgagtatacatattggtgctgcagtcagtcagataaaatatggagctgagtgaaac

SEQ ID NO: 195121 - DNA, 201 bp, Homo sapiens
atataataattatatataattgtatataatatgtatttgtatatatttatatataatatatattttttgtgtatatatatatatatatatatatataatatatataaatacatacatattacctatgtatgtccagttgtttcagcaccatttgttgaagggcagtctttccctcactgaattgctttgcaactctattaa

SEQ ID NO: 195122 - DNA, 201 bp, Homo sapiens
tacctgtgtgccatggcacaccataaaactctcaagggtatgtcctaacatttgggtcaatgtggaaaatgcattttgcctaaaactgagtatacatattkgtgctgcagtcagtcagataaaatatggagctgagtgaaaccaataatatggggaagaaaatgacacaatttgctgtgatgagaggcaaggtgtaaagtt

SEQ ID NO: 195123 - DNA, 201 bp, Homo sapiens
atatataataattatatataattgtatataatatgtatttgtatatatttatatataatatatattttttgtgtatatatatatatatatatatatataakatatataaatacatacatattacctatgtatgtccagttgtttcagcaccatttgttgaagggcagtctttccctcactgaattgctttgcaactctatt

SEQ ID NO: 195124 - DNA, 201 bp, Homo sapiens
gcttttgatattacaggctcataggtggaagcaacttgccttatctcagataagactttggactgtggacttttgggttaatgctgaaatgagttaagatwgggggactgttgggaaagcatgattggtattgaaatgtgaggacatgagatttgggaggggccaggggcacaacgatatggtttggctgtgtccccaccc

SEQ ID NO: 195125 - DNA, 201 bp, Homo sapiens
tatatataataattatatataattgtatataatatgtatttgtatatatttatatataatatatattttttgtgtatatatatatatatatatatatataatatatataaatacatacatattacctatgtatgtccagttgtttcagcaccatttgttgaagggcagtctttccctcactgaattgctttgcaactctat

SEQ ID NO: 195126 - DNA, 201 bp, Homo sapiens
gaacccggaaggcagagcttgcagtgagccgagattgtaccactgcactccagcctgggcgacagagtgagactccgtctcaaaaaaaaaaaaaaaaaaaagaaagaaagcaaacatttactaatatacatttactgagaatgaagcttaaattgatgtctatagagtgttttgccccctcatattaaacttttacacact

SEQ ID NO: 195127 - DNA, 201 bp, Homo sapiens
gtatatatataataattatatataattgtatataatatgtatttgtatatatttatatataatatatattttttgtgtatatatatatatatatatatatmtaatatatataaatacatacatattacctatgtatgtccagttgtttcagcaccatttgttgaagggcagtctttccctcactgaattgctttgcaactc

SEQ ID NO: 195128 - DNA, 201 bp, Homo sapiens
ttattaatatgtaggttgggaaacattggagaatggtttatccagtttaattagcctctagtgctgatttgttttgataatacaaataattagtttaaccrcaaaattgatgtaacagaaataattgtcaggcaattaaatattgcaatgatttcagctcctgggaaatatatagtatgtaagtaccacaataaaattgag

SEQ ID NO: 195129 - DNA, 201 bp, Homo sapiens
ctgtatatatataataattatatataattgtatataatatgtatttgtatatatttatatataatatatattttttgtgtatatatatatatatatatatatataatatatataaatacatacatattacctatgtatgtccagttgtttcagcaccatttgttgaagggcagtctttccctcactgaattgctttgcaac

SEQ ID NO: 195130 - DNA, 201 bp, Homo sapiens
gacacccatctctttacccgagtgagatagagtaatctggatttttctctattcaccttccaacctattattttacataaaaactgcactttactttttttacagttttcatttcagattttttagaacacatttacttattttagtgaaatctggtattgcatcaaaacatgtggctcacttacccgagggtttggggag

SEQ ID NO: 195131 - DNA, 201 bp, Homo sapiens
attactgtatatatataataattatatataattgtatataatatgtatttgtatatatttatatataatatatattttttgtgtatatatatatatatatatatatataatatatataaatacatacatattacctatgtatgtccagttgtttcagcaccatttgttgaagggcagtctttccctcactgaattgctttg

SEQ ID NO: 195132 - DNA, 201 bp, Homo sapiens
tgccactgacacccatctctttacccgagtgagatagagtaatctggatttttctctattcaccttccaacctattattttacataaaaactgcactttactttttttacagttttcatttcagattttttagaacacatttacttattttagtgaaatctggtattgcatcaaaacatgtggctcacttacccgagggtt

SEQ ID NO: 195133 - DNA, 201 bp, Homo sapiens
aaaattactgtatatatataataattatatataattgtatataatatgtatttgtatatatttatatataatatatattttttgtgtatatatatatatakatatatatataatatatataaatacatacatattacctatgtatgtccagttgtttcagcaccatttgttgaagggcagtctttccctcactgaattgct

SEQ ID NO: 195134 - DNA, 201 bp, Homo sapiens
atgccactgacacccatctctttacccgagtgagatagagtaatctggatttttctctattcaccttccaacctattattttacataaaaactgcactttactttttttacagttttcatttcagattttttagaacacatttacttattttagtgaaatctggtattgcatcaaaacatgtggctcacttacccgagggt

SEQ ID NO: 195135 - DNA, 201 bp, Homo sapiens
aattagaaaagttaaaaagtacccaatatgcaagaatatatatatatatatatatatatagagagagagagagagagagagagagagagagagagagagartttactatgtaataacaatttattccagttatataaatgataagaaatttattttacgtcattctaattaatttttgcttcacaaaatctcctcaaacac

SEQ ID NO: 195136 - DNA, 201 bp, Homo sapiens
tccgcagggtgggaagtgcttgtttctgctcttcctcgctcctggcgactgctcccatttcggagcaaagttgagacggatcgccagtggtgctgcaaccyagctgggtgtgcgcatgctcggcaaggcgcttacatgccagtcccctgctgccttggccccctccggacattgtgcagcaaggagcttagggagagatgc

SEQ ID NO: 195137 - DNA, 201 bp, Homo sapiens
ggggaagcaaaaaataaaatttaaaaaatataaaataaaattagaaaagttaaaaagtacccaatatgcaagaatatatatatatatatatatatatagakagagagagagagagagagagagagagagagagagagagtttactatgtaataacaatttattccagttatataaatgataagaaatttattttacgtcat

SEQ ID NO: 195138 - DNA, 201 bp, Homo sapiens
taaaataatgctaatgaatagtaaaatgcctacattaaaattggttagcttcctctcaccacattcaacaaatttttttcttgaattacaggtgttacaaytgtaacaatgttgttcaaaaaaaggaaaaaaataagtttttatagtagataatctgggctttattcagaaccttcaacaaaataagacttttcatatcta

SEQ ID NO: 195139 - DNA, 201 bp, Homo sapiens
tgcggctagaccaggcttactgcaagcagcttccatggctggcaccagggaacgcagtagcgcccagaagattggagatgccaggaaccgcagagccccaragagggtgtcacagcccatgctcgtcagtgcccaaaatccagagagggctgaggcggcaggggcctgatgtgtcagcactgccccaagagtgggcacagc

SEQ ID NO: 195140 - DNA, 201 bp, Homo sapiens
aacttactattcaagtgaagtgttggacatcattatattcagttttaaaccaaacctaatttaaatcagaattaaaactacatttatttttgataaagacyagatatctgtcaatttcctaatggctgccataacaagtatcatacactaggtgatttaaaataacagaaagttattgtctcacagttctgaaggctagaa

SEQ ID NO: 195141 - DNA, 201 bp, Homo sapiens
tcccctgttaagttataaaaaagttgaagggtaacatggtatcttaaatttattcttcatatcaacttacaattaacctcatacatggaaacatttatacraatttaagccaaaaagaaaaaaaaaactgttataagtgttctaattcatctttaagttttagtaacattaaattaatataatgttttataaatactcaaa

SEQ ID NO: 195142 - DNA, 201 bp, Homo sapiens
tatgaggcctccccagtcatgtggaactgtaagtccaactaaacctctttttcttcccagtttccggtatgtctttatcagcagcatgaaacaaactaatwcagaaattggtactaccaagagtggggcattgctgaaaagatacctgaaactgtggaagcgactttggaactgggtaacagacagagcttggaacagttt

SEQ ID NO: 195143 - DNA, 201 bp, Homo sapiens
gggtctggctgcctctaatttagtattgccaacatacccatcggtgactcaagccaaacagagaccacgccaggacactttttaatttgccaaagcaactygtgaaagaggtaaaccagtccaattctgataaattatctgcaaacaaattagatattcttacagcaaggaagtgtcaatactgtaaccaagcagaggtga

SEQ ID NO: 195144 - DNA, 201 bp, Homo sapiens
atctacattatctatctacctatctatcatctatctatctatcatctatctacattatctatctatcttatctatctatctatctatctatctatctattyatctatctaatatacaaatttgaccccgaacatacacccttttttcaataacgattacatcaagtgctcctacctctcttgcctcccattccacctcctc

SEQ ID NO: 195145 - DNA, 201 bp, Homo sapiens
tatctacattatctatctacctatctatcatctatctatctatcatctatctacattatctatctatcttatctatctatctatctatctatctatctathtatctatctaatatacaaatttgaccccgaacatacacccttttttcaataacgattacatcaagtgctcctacctctcttgcctcccattccacctcct

SEQ ID NO: 195146 - DNA, 201 bp, Homo sapiens
tgcatcagtttatgctaaagcctaatctatctatctatctatctatctatctatctatctgtctgtctgtctgtctgtctgtctgtctgtctgtctgtcthtctatctacattatctatctacctatctatcatctatctatctatcatctatctacattatctatctatcttatctatctatctatctatctatctatct

SEQ ID NO: 195147 - DNA, 201 bp, Homo sapiens
attttgggaggccaaagtgggaggactgcttgagcgcagaaattcaagaccagcctgggcaacaacatagtaatactacatctctgaaaaaaaaaaaaaaatagctgggtgtgtgggtgtggtggcatgcacttgcaagactcagctagctacttgagtgactgagagactgaggtgggaggatctcttaagcccaggggg

SEQ ID NO: 195148 - DNA, 201 bp, Homo sapiens
atattcaagtataaatgtgggaaaatggatgtgaagagacagtttttgtaatttgtcttttaaatgattttctttcttctgtgaagtagaaaaagtggtcwcagcagacagtggataattttgaggcaagaggacatagtacagaagacttctatataggtacagtaaaaaagtgaatgaattaggatgatacaatgtgag

SEQ ID NO: 195149 - DNA, 201 bp, Homo sapiens
gtaagaagcaattcctcatctatttacgtgtgatcatgagatttcaacaattcagtcaaatcttctagctctagttcccttgccatttttaccacatccaygattacttcctccactgccgacttgaaagtctcaaaattgtctatgagggttggaatcaacttatttcaaactcctattcatacttatattttgacctcc

SEQ ID NO: 195150 - DNA, 201 bp, Homo sapiens
tgccttgtgccttccccttcttaagcaacaaaaatacatcttaacccttttcattgggttattagggaattctaaaagcataattctttacactgttccaraaataattaagggaaaatgtggtatttttagaattccaaactgttctgtgggttctgtcaaaatctcatgtacttctcaatgatagcagaaaatacaatg

SEQ ID NO: 195151 - DNA, 201 bp, Homo sapiens
accaattgtatttcatttaagcatttgagggaaatggataggtggacaaattagatagatagatagatagatagatagatagatagatagatagatagagrtaatagacagatagatagataattagagagtttagaaaaccttggaagaccaaagtgtctgttttgaagtctatgctgacagggacaatgttttaaaaac

SEQ ID NO: 195152 - DNA, 201 bp, Homo sapiens
taaccaattgtatttcatttaagcatttgagggaaatggataggtggacaaattagatagatagatagatagatagatagatagatagatagatagatagwgataatagacagatagatagataattagagagtttagaaaaccttggaagaccaaagtgtctgttttgaagtctatgctgacagggacaatgttttaaaa

SEQ ID NO: 195153 - DNA, 201 bp, Homo sapiens
ggggattagcattcagctccttgttacttatgcaaatttctgcagctggcttgaatttctcctctaaaaatgggattttcttttctatcacattgtcaggstgcaaattttctgaacttttctgctctgcttcccttataaaactgaaagcatttatcagcacccaagtcacatcttgaatgttttgctgcttaaaaactt

SEQ ID NO: 195154 - DNA, 201 bp, Homo sapiens
agatatttctcccatggtcttggggattagcattcagctccttgttacttatgcaaatttctgcagctggcttgaatttctcctctaaaaatgggattttyttttctatcacattgtcaggctgcaaattttctgaacttttctgctctgcttcccttataaaactgaaagcatttatcagcacccaagtcacatcttgaa

SEQ ID NO: 195155 - DNA, 201 bp, Homo sapiens
ttgaggcttgcactctctgaagccgtggtccaagctgtacttttgcctcttttagtcatggcttgaacaactgggatgcagggcaccaagtccctagactrcaaacagcatggggaccctgggcctggcccatgaaaccacttttccctcctaggcctctgggcctgtgatggaagcggcttctgtgaagacctctgagat

SEQ ID NO: 195156 - DNA, 201 bp, Homo sapiens
aggattttacttcaaatggaaaatatacttttaagtcctctgcagactcttaggtatgttcaaatacttgtgtacagaagaaatatttttgctataatatstaaaaatttacacctttgtggacaacatctctacgttttcaaattaatgttagattgtcaataattagctataatcaccaatacaggtggtacttattta

SEQ ID NO: 195157 - DNA, 201 bp, Homo sapiens
ggcggaggttgcagtgagccgagatcgcccactatactccctgcctgggtgacagagaaggactcggtctctaccaaaaaaacaaaacaaaacaaaaatgkcagggggcgctgatgttttagcctccgtgtttatcccatttttgtggagtctttaatgttgtctggtctgactcaaaatcattgtcactttcacccaagt

SEQ ID NO: 195158 - DNA, 201 bp, Homo sapiens
ccttccattcccttgtgacctaaaactcttcagtggccttccattacgtacaggataataacaaaactagtatgcttcataaggcccagcatgatggtctstgtgttccagcaacatttactttcttttcatctctcttacaatttcttcttcagttccaccactgagccttagtttatgccattctgtctggctagcagg

SEQ ID NO: 195159 - DNA, 201 bp, Homo sapiens
ttcaagggaaagatagattgaacctgaggcagtatctatgtttaccaaatccagcttcgtggcgagtgagctgaaggggaatgtcttacacacctttgcaytgcaggatcctgcaaatggagattttttgtaacgcgttctctggagttagactgaatgggtgcagctctataatcaatgtctgcctgttaactgcataaa

SEQ ID NO: 195160 - DNA, 201 bp, Homo sapiens
atatcatatatatgtgtgtgtatgtgtgtgtgtgtgcttttgaaatgaaaaacaaagcacatttgatttaattcaatttcaaatatatttattaattgctytctgcacattagaataggcattagagatataattttattttattttattttattttttattttttttttttattatactctaagttttagggtacgtgtg

SEQ ID NO: 195161 - DNA, 201 bp, Homo sapiens
ttggggaagcaaaaaataaaatttaaaaaatataaaataaaattagaaaagttaaaaagtacccaatatgcaagaatatatatatatatatatatatatakagagagagagagagagagagagagagagagagagagagagtttactatgtaataacaatttattccagttatataaatgataagaaatttattttacgtc

SEQ ID NO: 195162 - DNA, 201 bp, Homo sapiens
gagtcacaaatgttacataatttttaaatatgtcccttcctaccaaaaattattataaatctttcaatagtatttgtgtatgtgaatttcagagacagagwctctaggtatgggaaaccagttggggaagcaaaaaataaaatttaaaaaatataaaataaaattagaaaagttaaaaagtacccaatatgcaagaatata

SEQ ID NO: 195163 - DNA, 201 bp, Homo sapiens
cctaaaagtaaaagacaagaacactcgccgaatgccactataaaaaaaaagttaaaatattttttgcagaacggatcttaagggtcaccctttaatatcayaaaaggagaaaattccaagtttgatgttaaaacatgagtcttagattttcatatggtaccaaatattactgtttttatagaatactttttaatgtgattc

SEQ ID NO: 195164 - DNA, 201 bp, Homo sapiens
tgctatttttacaccaacataatataaggaactacttgatactaggtaatttataaataaaagaagtttaattagctaacagttccacaggctacacagaagcatggctggggaagcctcaggaaacttacaattatggcagaaggtaaagtggatgctgacacatcttacatggccagagcagaggaggagagcaaagtg

SEQ ID NO: 195165 - DNA, 201 bp, Homo sapiens
ttgttggcagagccaaaaaatacatgtgtatgtatgtgtgtgtgtatgtgtatatatatatatgtgtatatatatgtatatatgtatatatatatatatatgtagttaatatccttttgtttgtttgagcagtaagccaattaaataactacaacaaaatattttattaaggttgtatcttctctttactaatgtttttaa

SEQ ID NO: 195166 - DNA, 201 bp, Homo sapiens
aactctcgtcctctgtgcacctgcaggcttaacaccatgtggaagccaccaggccttaggactggcactctttggagcagtggcctgagaaattttggggmccctgttagccatggctagagttggagcagctgagatgcagggagcggtgtcccaaggttgtacagagtagtgaggccctgagtctggcctgaaaaacca

SEQ ID NO: 195167 - DNA, 201 bp, Homo sapiens
attgttggcagagccaaaaaatacatgtgtatgtatgtgtgtgtgtatgtgtatatatatatatgtgtatatatatgtatatatgtatatatatatatatatgtagttaatatccttttgtttgtttgagcagtaagccaattaaataactacaacaaaatattttattaaggttgtatcttctctttactaatgttttta

SEQ ID NO: 195168 - DNA, 201 bp, Homo sapiens
aactctcttaatacatagggtcaatattagccttccttctccagtaccatgaaacacacccttcacattatcacaaacacattgagtccttgagtgtttargtctcatttttctttcattaccatccactacaagaaaacttcatgaagtgaaatggccttgtccattcatctccacttgagtaccaaaatattactatcc

SEQ ID NO: 195169 - DNA, 201 bp, Homo sapiens
aatcaagtcagtgtatttaggatattcataacatgagccccagtatatttttgttaagtatatttaccctactctactataaatattgaatttattccttctatcttgctgtatgtttataccctttaaccagttctcttcatcctcttcccttccctgactcacctttcccagtttctgtagtttcattgtctatctcta

SEQ ID NO: 195170 - DNA, 201 bp, Homo sapiens
tttaagaagtatatagccaacattttttcacatcaaaagaaaggtaagaaattttatttcaggctaaaaaaagaacactgaataaaacataagagaggttytcaccaaatggaggatgcatagtgcacttcctgtgatgattggaagagtgggggacaaaaatctaaagagaaaggctaaaccttttaacagctacaatca

SEQ ID NO: 195171 - DNA, 201 bp, Homo sapiens
caatcaagtcagtgtatttaggatattcataacatgagccccagtatatttttgttaagtatatttaccctactctactataaatattgaatttattccttctatcttgctgtatgtttataccctttaaccagttctcttcatcctcttcccttccctgactcacctttcccagtttctgtagtttcattgtctatctct

SEQ ID NO: 195172 - DNA, 201 bp, Homo sapiens
ttcatcttggaaatacccaagatattgataaagttatatgcatgcaatacttcagtcttctcattgaaaagggatcatcatgtaatttcctttgctggctrgtgcaagattttggctggtgcaagattttggagtcaaaggcattagagaatgtcctcaataccatctgcaacttaacagtgctaggatgcaagtggtcaa

SEQ ID NO: 195173 - DNA, 201 bp, Homo sapiens
gcaatcaagtcagtgtatttaggatattcataacatgagccccagtatatttttgttaagtatatttaccctactctactataaatattgaatttattccttctatcttgctgtatgtttataccctttaaccagttctcttcatcctcttcccttccctgactcacctttcccagtttctgtagtttcattgtctatctc

SEQ ID NO: 195174 - DNA, 201 bp, Homo sapiens
ctattataaaaagaggaaaactttttaatttttattttattgagataaaatatatcatgagtataatctggactggagtatatgattattaatattggcayattaattttattaaaacagtttaaatattaaaagaaaataagtcatttgcaaattagaagaaataatcagaatgagtctttagttatacaaatgtaaatt

SEQ ID NO: 195175 - DNA, 201 bp, Homo sapiens
aaagatcagagcagaaataaataaaattaaaatgaagaaaacaataaaaaagatcaacaaaacaaaatgttgcttgttttcgaaaaggtaagcaaagttgwtagactaagaaaaagagagaggagacccaaataaataaaatcaaaaatgaaaaggagacttacaactgacaccacagaaaattaaagaatcacttgtggc

SEQ ID NO: 195176 - DNA, 201 bp, Homo sapiens
tactatcagagtatttctcaacagaaagtcttcaagcaagagagagtggaaagatgtagtcaaagttctgaaagaaaaaaacaaaaacaaaaaacgtgacraccataaaaaccttattcacccagatggaaaatcagtaaggaaacattggacttgaacaacactttagatttaatggtcctaacagagataaacaaaata

SEQ ID NO: 195177 - DNA, 201 bp, Homo sapiens
gaaaatcttcaaataaacaacccaacaattcttattaaagaataagaaatcaagagcaaatggaacccaaaattagtagaagaaaaaaaaaaagatcagarcagaaataaataaaattaaaatgaagaaaacaataaaaaagatcaacaaaacaaaatgttgcttgttttcgaaaaggtaagcaaagttgttagactaaga

SEQ ID NO: 195178 - DNA, 201 bp, Homo sapiens
gttcagaagtaggttgtttaatttccatgtatttgtatagttttgaggattcctttgggaattaatttctaatttcattctgctatggtttgagaagatayttgatattgtttcaagtttttaaaatttattgagaattgctttgtggtttgttatgtgttctatcttggagaatgatttgtaggctgatgagaataatgt

SEQ ID NO: 195179 - DNA, 201 bp, Homo sapiens
aaaaagtagaaaatcttcaaataaacaacccaacaattcttattaaagaataagaaatcaagagcaaatggaacccaaaattagtagaagaaaaaaaaaaagatcagagcagaaataaataaaattaaaatgaagaaaacaataaaaaagatcaacaaaacaaaatgttgcttgttttcgaaaaggtaagcaaagttgtta

SEQ ID NO: 195180 - DNA, 201 bp, Homo sapiens
ccttcaatcattctccaagttatacctataaaattttagtttaaaatcccagctgtataagatctgactcaaggtaggaagagatattaatagaattttcraatggaactctactataagattctgatttcatctattcctatagggacaatgcagctaatggtctcctttaaagatttaatagcttataaatatatccaa

SEQ ID NO: 195181 - DNA, 201 bp, Homo sapiens
aggctgattacttcatggcaaaacatctttttgcaatttgaaagaaaacactagtctggtgatgaaagaatcacatcaaatactgaacaaagtaaaatttwaaaagcccccatgtacataacatagtcaaaatgctataattgaaatataaagaaaattttaaagcaggcagaagggaaaacattctacttacatagggaa

SEQ ID NO: 195182 - DNA, 201 bp, Homo sapiens
ggaaaatgtataaaatacaatattatgttggtgagaagctattatgatctataatattttatactgatgataaataattactgtatatataaaatatattytttagaaaaaatgaaatgatggatcatcactgttatttcaatgatgaatttagcaaagtgaagtgaactttagaaattagttagatctctggaacattat

SEQ ID NO: 195183 - DNA, 201 bp, Homo sapiens
atactacaaggcaacagtaaccaaaagagcttggtattggtacaaaaacaaacacgtagactagtggaacagaatagagagcccagaaataatgccatgcrcctacaatcatctagtcttcaacaaagttgacaaaaacaggaaatggagagaagacttactgttcaataaatggtgctgggataacttgctagctctagg

SEQ ID NO: 195184 - DNA, 201 bp, Homo sapiens
ctgtagaaaatcatgatttttggaattatacagatcataatataaatcccagccctgccactgatcagcagtgagatttaacctgttgaagcctaattttmtacctgtaaatttgggataaaagtgattttctatagtacatctatgaccatgaaatgagatactgtttgaaaagcatttggcacagtttttggtacatgg

SEQ ID NO: 195185 - DNA, 201 bp, Homo sapiens
aacatagtggcatttgaataaatatattttctggcggccattttcagcattttaaaagcattcagctagtattgttttcaatggtgtgtcttagtttactyattagctcttaaaattaaaacaataaataaatcccaaactatcaaaatactccctgaagctcagtagaaatcaactgaaaagtttcatttggtctggaaa

SEQ ID NO: 195186 - DNA, 201 bp, Homo sapiens
aaatgaactcacctcaaaaagaagtgacacaagaaaacttactttggaattaaacttttaaatgtaaactttggttacataagttaaaatgaagtacatawtttttctattttgactgatcttgaaatgacatagccatgtcacatttatctcctttaatattataattttaaaatgaggatttagagggaatagcttttt

SEQ ID NO: 195187 - DNA, 201 bp, Homo sapiens
cagtggttgaactagtttacagtcccaccaacagtgtaaaagtgttcctatttctccacatcttctccagcacctgttgtttcctgacttgttaatgatckccattctaactggtgtgagatggtatctcacaggtctctgatttttaaaaaagtataacttgaggacatttttaaaaaagaacatagtggcatttgaata

SEQ ID NO: 195188 - DNA, 201 bp, Homo sapiens
tttaatactgtttattttgaggccagtgttgtttagcttctagaaaaagaaaaaaaagaaaagagaagccttaaggagttagaatatagtttattctttamatgtaggagtgtgtgacttaacctttgcctggcatggcctcacaccctgtttataatttggtatcttattgttacaaagagtatcttctgtcagtcttat

SEQ ID NO: 195189 - DNA, 201 bp, Homo sapiens
ctattagtttcaaggaagaacaaaaataatcattactgtggaaaaccagaaaatagttaattgcattttttaaattaacattatcagtgagggacagatgratattatgtacccccagatttgtttcccagataacaaaatcacctgtgtattatttttttgcctggaatgcataatttaaaactaatcatgaacgtcaga

SEQ ID NO: 195190 - DNA, 201 bp, Homo sapiens
cagttacatcacttttctatttggaagaatttttttttttttattgtggtggaaggcagaatggtagaacccaagaaaagcatagtgctctcattgttctkaggaggcagaaatgagagttcaacaatggtgaaatggctgtaattgccaatggaaggtatgaagacaaaaggctccaggactttgcatgatgttgctttg

SEQ ID NO: 195191 - DNA, 201 bp, Homo sapiens
aggtatatctcccaatgctatccctcccccctcccccgaccccaccacagtccccagagtgtgatattccccttttatgtctcctttcttccaggagcacrtgttccactgagaagagagggataagatcttttaatcaataaagaaaagtaaaagcattaaaaatgccattattagagtaaagtaaaagaaaaagaatta

SEQ ID NO: 195192 - DNA, 201 bp, Homo sapiens
tatacataagaagacacaagttaacagtaacactgttattttcaacataagtggaatcccttaatgtaattgtataaatagcatggtgtgtgtgtgtgtgkatgtgtgtgcagccttatgtatttgagtggaacaattccataacgattaaatagaatcaaaactgggtctacagacagtttcagaataaatagtagaaaa

SEQ ID NO: 195193 - DNA, 201 bp, Homo sapiens
tattcatttcttttgagacggagtctcactctgtcacccaggctggagggcagtgacgagatctcagctcactgtaacctctgcctcccgggttcaagcgmttctcctgcctcggtttcccgagcagctgggactacaggtgctcgccactatgccaggctaatttttgtattttcagtagagacgaggtttcaccatctt

SEQ ID NO: 195194 - DNA, 201 bp, Homo sapiens
atgttaaaaatgaagcaatttgatgactgttactgggagaaacacctttctgcagtatggctgaatggttaatctgctcatccttttttttttttttttttgctggagaaaacaaacaaaacataaatgctgaatatgttaaaacaggggtctccaaaccctgggccacagatcaatactggtccatggcctgttaggaac

SEQ ID NO: 195195 - DNA, 201 bp, Homo sapiens
gaaaaaagtagactgaggaaaagtagtcagcaaaatagaaggaaaaccaggcccgtgtgttattaggaaagaggccaagttaaaaaaaaaaaaaaaaaaaagtattttagttggctagactcatcaatggtgccaattgcttctgataggccaaaaaaggtgagtactgaaaattgaccattggacttagcactgtagaaa

SEQ ID NO: 195196 - DNA, 201 bp, Homo sapiens
tgccgtacttattgtgtctgaatggaagccagagagtaacctgagactgaccccgaaatgacacttctatacacacacacacacacacacacacacacacmtgcatacacacatacatacacacacatacacacatacacacatgcatacacacatacacatacacacatgcaaaacacacatacacatacacacatgcat

SEQ ID NO: 195197 - DNA, 201 bp, Homo sapiens
ctgccgtacttattgtgtctgaatggaagccagagagtaacctgagactgaccccgaaatgacacttctatacacacacacacacacacacacacacacacatgcatacacacatacatacacacacatacacacatacacacatgcatacacacatacacatacacacatgcaaaacacacatacacatacacacatgca

SEQ ID NO: 195198 - DNA, 201 bp, Homo sapiens
tgtatttccacctggtttcttgacatacattttacactactctttgttataatgtcttcttatcacaatcacagaccctttcaacatctgcttgctttctytcagccaaactttgtgtttgtttgtttgtttgtttgtttgttttgctcttcttgttactcggggatcataggatacttgctatggctgccttgtgccttc

SEQ ID NO: 195199 - DNA, 201 bp, Homo sapiens
gatttgttatgctaagaatgtcctggatttcataataaagcaccttgaaatagtgaataatgaataatggagaatctaaatcacttgtgatttttttttttacctcattatgagaagtgctgagagctggcatttatcaccagtggttgcttcaatccattaaaccaatccacggagaggcagagttccactggagtttta

SEQ ID NO: 195200 - DNA, 201 bp, Homo sapiens
agatatgatttaatttgtaaagagaaaacttcaaatatttctgtcagatagaactgtatatagcctgatagtgtggattctagactagtttgaaagaaagmaatagtgaaaatgaatttcatgccagcagacactttaaaaactagatttagtagcagtcacattagcttagataatgggagaatttttcttcattgaaaa

SEQ ID NO: 195201 - DNA, 201 bp, Homo sapiens
agtgagattgctcccagtctggtttctcccccaataactcacagctctaatttaaacctacagaagtgcactctctgaaactacatacactcctgaatgtsttagagttttacaattcgatggcttatgactttcagaggatacagtgatttaacatcctctctctctcttttctatttttaaaaattacaactgactctt

SEQ ID NO: 195202 - DNA, 201 bp, Homo sapiens
taaatcagtacatttgaactgtcttcagaggcatttaaagggttttaaggcccctgggcccctaaaggtttttaaacagaggtttaacacaacaaaatttstgctttaaaaggatccttctagctgccttgtggagaatgggttagaagaaatgaaaatagacagacaataccacaagtgtttgctctgccttgaatagga

SEQ ID NO: 195203 - DNA, 201 bp, Homo sapiens
attattagaaaatatgttgcaggtagtaactacatggtatttgtaactatcctttcttttcaatgatatgtgaacataatcagccagtataaaacaatttytcatattattttaaatctactattgtgtattatatatgatacttgaaattaaggcaaactaagaatggggatttgtgttttgctatgaaattactcttcg

SEQ ID NO: 195204 - DNA, 201 bp, Homo sapiens
atgatgacttttctgtttttgtttgtctgggaaaaattttatttcttcttgatttttgaaggacggcttttctttgctatgtaaaatatgcttggctgacrtttagtttagttttgtttgtttgtgttttgcttggttatatgtgacttcatgcttttctcttgctgttattataactttttctttgtccttgacttttct

SEQ ID NO: 195205 - DNA, 201 bp, Homo sapiens
ggtaacatgcaagacaagtaaattatttttatcatggattattctttgcaaagagctcaaagcatcttccacgtgttcagtcttttgtattacttgactaygcaatgtactgacagaagatgagctttgtctactctaacatgaaggatttacataccccttaatagtgactccactggagaacaaaagccactaatgcat

SEQ ID NO: 195206 - DNA, 201 bp, Homo sapiens
tttaagaaatgtagaattcctaggaaaatcagttattagtgttatttagaggggagcatatctctgtggattgaattatgcccccaactcaaaaaaaaaaatcgtatgttgcaggcctaattcaccaggttgtgatattagaagacagaggcctttggttggtaaccatggttagatgaggttgtgtaggcgggactcaca

SEQ ID NO: 195207 - DNA, 201 bp, Homo sapiens
acatgaaggatttacataccccttaatagtgactccactggagaacaaaagccactaatgcattttttttgacttcctaattttattttaggttcacacasgttatcaaaaagtaaagggaaatgactaaacaaactcactcattatacttattgatggctatgtattgacttcacagtaaatgataactaaagtctatcc

SEQ ID NO: 195208 - DNA, 201 bp, Homo sapiens
agaacaaaagccactaatgcattttttttgacttcctaattttattttaggttcacacacgttatcaaaaagtaaagggaaatgactaaacaaactcactyattatacttattgatggctatgtattgacttcacagtaaatgataactaaagtctatccaaatttttcaaaaataatgccatgtatttcaaatgactcta

SEQ ID NO: 195209 - DNA, 201 bp, Homo sapiens
tttggctacacattgagctatttattctggtagctctatgatgattatagatttattctcaagaaatttttgatttacttagaaaaaaatcactttaattratttgttcttgttgtagaagagggcaagatatttttgaataatctaaagaggaggaaaattatattctacctctttccaaaatagtttgaaaaacaaagt

SEQ ID NO: 195210 - DNA, 201 bp, Homo sapiens
atctccccaaaagaaaaaagatcaatgaatcaaaaagatatctgcactgataggctcatcgcagcactatttatagtagcaaagacattgaatcaacttargtgtcatcaatagatgattggataaagaaaatttggcatatatacacaatggagtactattcagccaaaaaaatatgaaattatgacatttgcagcaaca

SEQ ID NO: 195211 - DNA, 201 bp, Homo sapiens
tcttgcttataattttattatggctgtattgtatgtctaatattgtaaataataatttttattttattatagctaatattcaagtgatgtttaaagcatgmtcggtactgtgttgaacacttacacattttcccctttaattgcccaacaatcctaaattgcaaactatcacaattttattgataagaaaacgtaggatta

SEQ ID NO: 195212 - DNA, 201 bp, Homo sapiens
tgaaagttctgaagagccgttagagcccatagggagctgggaggtgtgtgttgtatgtgtacatgtgtgtgtatatatatgtggtggggagtgggggattrgtgccttatgcatgccattgtataaaggtaaggttggatgggacagctaggttttcagccacccccttcctccatttttccctctcttttattctttcta

SEQ ID NO: 195213 - DNA, 201 bp, Homo sapiens
tcaatgaatcaaaaagatatctgcactgataggctcatcgcagcactatttatagtagcaaagacattgaatcaacttaggtgtcatcaatagatgattgrataaagaaaatttggcatatatacacaatggagtactattcagccaaaaaaatatgaaattatgacatttgcagcaacatggacaaaattggaggacatt

SEQ ID NO: 195214 - DNA, 201 bp, Homo sapiens
acaattttattgataagaaaacgtaggattatttaggaaagtcacactgctagtgaataatagagctaggaaacaacttataagtaggttatctatatccrgaacttttattcacactgttttattaagtagatagattgccattttgttcatttgtatgtgtgtgtttgtgtgtatgtgtggtgtgtgtgtgttttctat

SEQ ID NO: 195215 - DNA, 201 bp, Homo sapiens
cagctgtggacaacaagcgtttttacaagggcatgtttctcttttgtctctgtgtttttaattctcttaccacctaattctctgcaaacatattaataagkatttgatataaatttttatttgatactccaacttgtccttccattttttgagcagatttaattttaatataccctaatgcaataaagcctatttatctgt

SEQ ID NO: 195216 - DNA, 201 bp, Homo sapiens
ttcaaaatgttttgttttaccctgcaagtggcagaggtgaaattccttttgtgttgctcagagattttctctttggagtttttcctttcccatataaacayatgaaagtgcaatttatttctgtgttttgtgttccttttcctgatcagactggcaaacgatatgttggcatcatcaccttctcctttgtgacaaattctg

SEQ ID NO: 195217 - DNA, 201 bp, Homo sapiens
ctgtttttgtggtgaatcacatttgtcagtttgtgtgtgttgaatcatccctgtatccctggaatgaaacccacataatcatagtgaattatcattttgawgtgctgtcgaatttggtttgctaatattttgttgaggatttttgcatctatgttcatcaggaatgttggtctgtagtatttttgttgttgtttttatgtt

SEQ ID NO: 195218 - DNA, 201 bp, Homo sapiens
gacttcctttaaatggttgatagcttgttcacttatattgatgttatctgaaatgccaagacattttcccttttcatatagagtgtagggctgttcattamtattttttctggcatccattcattctaaaacattaaacagtgcccagaataactatgtgtttctaatagttagtgagaggtagttcctatcttcaaaaaa

SEQ ID NO: 195219 - DNA, 201 bp, Homo sapiens
acatggcacatgtatacatatgtaacaaacctgcacgttgtgcacatgtaccctagaacttaaagtataataataataataataataaaaataataataawaaaaatcagttggttgatttggctttatctctgaattctctattttgttgcattggtctatgcatctgcttttatattagtaccatactattttggttac

SEQ ID NO: 195220 - DNA, 201 bp, Homo sapiens
attaaacagtgcccagaataactatgtgtttctaatagttagtgagaggtagttcctatcttcaaaaaacacacattctgatagaggaaaacaactacttwgtaacaagtgataaccaccatttttagtgcttttttattcattcagcacacatttgtaaagtacctattatatactagacactatcataggatgtagaca

SEQ ID NO: 195221 - DNA, 201 bp, Homo sapiens
agaggaagagcttgcagtgagccgagatcgtgccactgcactccagcctgggtgacacagcgagactccgtctcaaacaaacaaacaaaaacaacaacaamaaaaaaacagtttggtagctagttgggatgggttgatatttgggctctcctacacaggggctattgttttctcagtgaagtttaaggctattccatcagt

SEQ ID NO: 195222 - DNA, 201 bp, Homo sapiens
agagcccaaagggtgaaggtaatcttaagcaaaaagaacacagcccgaggcatccaattacccaacttcaaactatactacaaggcaacagtaaccaaaasagcttggtattggtacaaaaacaaacacgtagactagtggaacagaatagagagcccagaaataatgccatgcacctacaatcatctagtcttcaacaaa

SEQ ID NO: 195223 - DNA, 201 bp, Homo sapiens
gtggcacatgcctgtaatcccagctactcgggaggctgaggcaggagaattgctggaacctgggaggcaaaggttgcggtgagccgagattgcaccattgsactccagcctgggcaacaagagtgaaattccatctcaaaacaaacaaacaaacaaacaaaaagaatgctgctgctcatttagcaaaaagggcactcattt

SEQ ID NO: 195224 - DNA, 201 bp, Homo sapiens
gacctaacggcaggtgtataggtcatggcggctctgccctcatgaataaattaatgctgttattgtgggttcattatcacagcagtgggcttgttataaargcgagtttggccatctctatctcccttgctatttctcgagctctcttgccctcctgccttccaccgtgagatgattttattttctttataaattacctag

SEQ ID NO: 195225 - DNA, 201 bp, Homo sapiens
aaaggagactatgatctatgagttaactatgaatttgggaaaacaatttcctcaacagtaaaaacctaaaatttttaaaaatagtaaagcaaaataacackttagcaaagtctcaggatacaaagccagtgtacaaaaattagtagcatttgtacacaccaacaacatccaagctgagatcccagtcaagaatgcaatccc

SEQ ID NO: 195226 - DNA, 201 bp, Homo sapiens
ggaagcggagcttgcagtgagccgagattgcgccactgcagtccgcagtccgacctgggcgacagagcgagactccgtctcaaaaaaaaaaaaaaaaaaaagaagatgtgtaaattttgttaaaaatttgctttatttggcttccctacattggaatttattgcaaaaataattaaaaatatataaagtaggtattttatg

SEQ ID NO: 195227 - DNA, 201 bp, Homo sapiens
gggaggggcatcagccattactgaggcttcagtaggcggttttcccctaatagtgtaaacaaagccactgggaagttcgaattgggtggaacctaccacartgaggcaaagctgctgtagccagactgcctctctagagtcctcttctctgggcatggcatctctgaaagaaaggcagcagcctcaatcaggggcttgtag

SEQ ID NO: 195228 - DNA, 201 bp, Homo sapiens
atcacttgaacctgggaggcagaggttgccgtgagcagagatcgcaccactacactccagcatgggtgacagagcaagactccgtctcaaaaaaaaaaaaagtgatttagatattcagaatccttctagctagtaactccattgtcttttcagtatgacctatgatgtctctttttaaggaaaaaagaaagcatggatgct

SEQ ID NO: 195229 - DNA, 201 bp, Homo sapiens
ctactaaaaatacaaaaaattaaccgggcgcggtggcgggcgcctgtagtcccagctactcgggaggctgaggcaggagaatggcgtgaacccgggaagcrgagcttgcagtgagccgagattgcgccactgcagtccgcagtccgacctgggcgacagagcgagactccgtctcaaaaaaaaaaaaaaaaaaaagaagat

SEQ ID NO: 195230 - DNA, 201 bp, Homo sapiens
tgctcctttagcttgcaggagtttgttattacccatcttctgaagcctacttctgtcaattcgtcaaactccttctctgtccagttttgttcccttgctgrtgaggagctgtgatcctttggaggagaaaaggcattctggtttctggaattttcagcctttttgcactggtttctcctaatcttcatagattgatctacc

SEQ ID NO: 195231 - DNA, 201 bp, Homo sapiens
tggttttgataatttcaatataattctatgtgtgtatacatgtgataacatgtaattatactatgtacgtactgtgatattttttgtaattacactgtttrcatcataggcttaatgtatttttcacatttaaagattttcaaatagtctgtctttaagtattgcttatgtcccattctctctttcctcttttcttgaaac

SEQ ID NO: 195232 - DNA, 201 bp, Homo sapiens
ctcaaatttaaaaaacaagaacaaagcaagaaataagaaatggctcagaattcagatttcttcaataggtagagtacacatttttcagttgtcaaaaaaawtaaaatcctgagttcctattgttgaattttgccttcctattatttttttaaaaacagaaagaaatatctaaaaagtagtgataaaggtgagagacaaaat

SEQ ID NO: 195233 - DNA, 201 bp, Homo sapiens
gttacaagcccattttatagtgaactaaacttctgttatatcaaggaatgcatgcaatatcagttattttaatgcccatattagtttaagctgagcttttygccatctgttccaactcttaaccatgaatgcaaaagaacacatttccctattacatttgtaaaatgtaatatataaatgatttaaatacagttatacact

SEQ ID NO: 195234 - DNA, 201 bp, Homo sapiens
agtcatattgaattaggactcaccctaatgacctcattttaacttaatgatctctgtaaagaccctatctccaaatacaattacattctgaggtattgacwgttatgaactcaacatatgagtttggggaaggagacacaattcaacccacaccaccttccttcaagctcatgtcatatttataataatatatcttataac

SEQ ID NO: 195235 - DNA, 201 bp, Homo sapiens
cgaagaggcatgtggtgctagacaggaagataataaatttggaagcaaagttctggaataagaagagtgataaaagcaaggatttagattaaaaaaaaaaaggagttttagtgagtgtgaataacaccttttcccccatgatagacgaaagctaggaagatacagataaagacatgaaagaatttaattagagacaatcca

SEQ ID NO: 195236 - DNA, 201 bp, Homo sapiens
aacatctgcagaaatttgaatgtacagtcatcaaagcaaaactttagtgcaggtgaattaggtgtatgtggagaatatagatggttatatgaaagactgakgttacaatcaaatataagcaggtgtgcacgttttaatgatcatgacttccatatccagtgattttgatataaaattattttaagaactgcggatacaatt

SEQ ID NO: 195237 - DNA, 201 bp, Homo sapiens
gtggtggataagctttgatgtgctgctggattcagtttgccaatattttattgaggattttttcatgtatgttcatcagggatattggcctgaaattttckttatttgttgtgtctctgccatgttttggtattaggatgctgctggcctcataaaatgagttagggaggagtccctctttatgtattgtttggaacagtt

SEQ ID NO: 195238 - DNA, 201 bp, Homo sapiens
cattttgtgctttaaagaaccattctccatgtaattgtgatgacttgattggaagtcagaaagatgaactgagaaattttggaattattgaagaagatttwtgtgacaaatattgttaaagtgggaattagaaggggcagaagtgaacaaagactttacggggcgcccttgataaaaagctttcattgtaatagagaagga

SEQ ID NO: 195239 - DNA, 201 bp, Homo sapiens
agaacatctgcagaaatttgaatgtacagtcatcaaagcaaaactttagtgcaggtgaattaggtgtatgtggagaatatagatggttatatgaaagactratgttacaatcaaatataagcaggtgtgcacgttttaatgatcatgacttccatatccagtgattttgatataaaattattttaagaactgcggatacaa

SEQ ID NO: 195240 - DNA, 201 bp, Homo sapiens
tgtggtttttgtcattggttctgtttatgtgatggattataattattgattggtatatgttgaaccagccttgcatcccaggtatgaagccaacttcatgrtggtggataagctttgatgtgctgctggattcagtttgccaatattttattgaggattttttcatgtatgttcatcagggatattggcctgaaattttct

SEQ ID NO: 195241 - DNA, 201 bp, Homo sapiens
ccaatcagcaccctgtgtttagctcaaggtttgtgaatgcaccaatccacactctgtatctagctgctctcgtggggccttggagaacctgtatgtcgaarctctgtatctaactaatctgatggggaggtggagaacctttgtatctagctcagggattgtaaatgcaccaatcagcaccctgacaaaacaggccactcg

SEQ ID NO: 195242 - DNA, 201 bp, Homo sapiens
tctaagaacatctgcagaaatttgaatgtacagtcatcaaagcaaaactttagtgcaggtgaattaggtgtatgtggagaatatagatggttatatgaaakactgatgttacaatcaaatataagcaggtgtgcacgttttaatgatcatgacttccatatccagtgattttgatataaaattattttaagaactgcggat

SEQ ID NO: 195243 - DNA, 201 bp, Homo sapiens
tgggctcaagcaatcctccgacctcagcctctctagtagctcggactccaggcgcacactaacatgcccagctattttttccattttttgtagagatgggkttttgccttgttgcccaggctggtttcaacctcctgagcacaagcaatccacctgcctcggcctcccaaagtgctgggattacaggtgtgagccactgtg

SEQ ID NO: 195244 - DNA, 201 bp, Homo sapiens
agcaagtggcagaatgagaatttgaatgtgatctgtctgagtacatcacagctctgccttatatgtgcgagaaaactaaagtgagcaagcagctgtgttaacaacaaagagtgatagctattatgctggcattttctcttcacactttccagatttggggtagagtgtaatgcggcttctaaatagaattgcctcctgttt

SEQ ID NO: 195245 - DNA, 201 bp, Homo sapiens
tcctgggttcaagcgattctcctgcctcagcctcccaagtagctgggattactggccagtgccaccacacccagcttattttgtatttttagtatagacasggtttctctatgttggtcaggctagtctcgaactcctgacctcgtgatccacccacttcggcctcccaaagtgctgggattacagggatgagccaccgcg

SEQ ID NO: 195246 - DNA, 201 bp, Homo sapiens
taaatatgctgatttcatgattttgaaaagaggataataaaattttaatacaagttaaatttgtgtctgcaaaaattgtttctccatatctcttacctgcattgtgagttttcattttaagactgaataaattagttgcatcatctgtgagtaccctcaatgatttcacacagattacttaaaagtaccctgataaaaatt

SEQ ID NO: 195247 - DNA, 201 bp, Homo sapiens
ataataaaatcaaggaaaatagaaatatcaaaaatgaagatgcatttaattcagttttttattctgtgtgtgtgtgtgtgtgtgtgtgtgtgtgtgtgtgkatgtgtgtgtgtgtcttttttggtaagaataacctacttttaatttcactgtaaaaagcacagatcatggcatttggggcatttactaaatactgtgcta

SEQ ID NO: 195248 - DNA, 201 bp, Homo sapiens
tagttacttcaatgggaattaattccaactactacttaggtccctatagtttcagcaatgatttaagattgtttcacatttgtgcatctcatttcatgatrctaattctctttctatagacattgtagatcatttggaaaatgtttttagatattcataagctttcggtatttaatactaatatttgtcaccagccaaaca

SEQ ID NO: 195249 - DNA, 201 bp, Homo sapiens
ccaggctaattttttttttttttttttttttttgtatttttagtagagacggggtttcaccatgttagccaggatggtctcaatctcctaacctcgtgatycgcccgcctcggcctcccaaagtgctgggattacaggcatgaaccaccgcacccagccaaaattatttaggtgatcctgatacctattaaagtttgagaa

SEQ ID NO: 195250 - DNA, 201 bp, Homo sapiens
gttttgagacggagtctccctctgtcaccaggctggagtgcagtggcgtgatatcggctcactgcaagctctgcctccagggttcacgccattctcctttytcagcctcccgagtagctggaactactggcgtccgccaccacgccaggctaattttttttttttttttttttttttgtatttttagtagagacggggttt

SEQ ID NO: 195251 - DNA, 201 bp, Homo sapiens
cataagagactctggaaaataatcccagaaaattatttgtttttctttgtttgttttgagacggagtctccctctgtcaccaggctggagtgcagtggcgygatatcggctcactgcaagctctgcctccagggttcacgccattctcctttctcagcctcccgagtagctggaactactggcgtccgccaccacgccagg

SEQ ID NO: 195252 - DNA, 201 bp, Homo sapiens
gttctttctgttcaggattgctttggctatttagagtctgtattagggttctctagagggagagaactaacaggatatatatatatatatatatatatatatgaaggggagtttaaggaatattgactcacatgatcacaaagtgaagtcccacaataggccatctgcaagctgaggagcaaggaagccaatctgtgtctc

SEQ ID NO: 195253 - DNA, 201 bp, Homo sapiens
tgttctttctgttcaggattgctttggctatttagagtctgtattagggttctctagagggagagaactaacaggatatatatatatatatatatatatatatgaaggggagtttaaggaatattgactcacatgatcacaaagtgaagtcccacaataggccatctgcaagctgaggagcaaggaagccaatctgtgtct

SEQ ID NO: 195254 - DNA, 201 bp, Homo sapiens
ttgttctttctgttcaggattgctttggctatttagagtctgtattagggttctctagagggagagaactaacaggatatatatatatatatatatatatatatgaaggggagtttaaggaatattgactcacatgatcacaaagtgaagtcccacaataggccatctgcaagctgaggagcaaggaagccaatctgtgtc

SEQ ID NO: 195255 - DNA, 201 bp, Homo sapiens
aggctgaaggtacttgccttgtctcggatgagactttggactgtggacttttgagttaatgctgaaacgagtttagactttgagggactgttgggaaggcragattgttttggaatgtgaggacatgggatttgggaggtggaatgatatggtttggctggttccccacccaaatctcatcttgaattgtaactcccacaa

SEQ ID NO: 195256 - DNA, 201 bp, Homo sapiens
aattccccagccattctaactggggagagatgatatcatatcaaggttttgatttgcatttctctgatgataagtgatgtcaaactttttaaatatacccrttgacaatttgtattgagaaagctctacggatatcctttgccaactttttaatggggttatttggttttctgctgtggagatgttaaattccctgtaaat

SEQ ID NO: 195257 - DNA, 201 bp, Homo sapiens
ctggtagcatgaaaagactaagctttccatggggatatctcagggagaaatggatgaagtgaatacaaatccagaccccagcatttacacacacgcatctstgctttacagtattgtctttacttcaggtgaaaaaaacataggctatttaatgcaatgcacaaagtaagtttttggctattttttaatatagtaatttat

SEQ ID NO: 195258 - DNA, 201 bp, Homo sapiens
attgaaccagcctattcaatatcaccaggatacttgaccagactgtgtatcagattcagatatcaccatgataaattgtgggataaaatgctagacagaaatttaattcattatatttctatgtgtttatcataccaataacctgaaagtaaaattaaaatattccaaatcctactaaactatcaaatcaactacagtaac

SEQ ID NO: 195259 - DNA, 201 bp, Homo sapiens
agttaggcaacgacttaatgagttaataaaaacatgcagtaataagaattatacctaagaattgtgctaagtaaatactaattaatgttagtttctttttwaaaaaaaaaaaaaaaaggattcggacataaaaatatgttccctagctttattttctaacattttgcagcttatcaaaattcctttgattcatctttatcc

SEQ ID NO: 195260 - DNA, 201 bp, Homo sapiens
ataattgaaccagcctattcaatatcaccaggatacttgaccagactgtgtatcagattcagatatcaccatgataaattgtgggataaaatgctagacagaaatttaattcattatatttctatgtgtttatcataccaataacctgaaagtaaaattaaaatattccaaatcctactaaactatcaaatcaactacagt

SEQ ID NO: 195261 - DNA, 201 bp, Homo sapiens
tacacaaatcagacgtagatttggtcttttcacatagtcccatatttcttggaggctttgttcatttctttttattcttttttctctacacttcccttctygcttcatttcattcatttgatcttacatcactggtaccctttcttccagttgattgcattagctcctgaggcttctgcattcttcacgtagttctcgagc

SEQ ID NO: 195262 - DNA, 201 bp, Homo sapiens
gtgtggcgattcctcagggatctagaactagaaataccatttgaccctgccatcccattactgggtatatacccaaaggactataaatcatgctgctataragacacatgcacacgtatgtttattgcggcactattcacaatagcaaagacttggaaccaacccaaatgtccaacaatgatagactggattaagaaaatg

SEQ ID NO: 195263 - DNA, 201 bp, Homo sapiens
atgtgtcttggagttgctcttctcaaggggtatctttgtggcgttctctatatttcctgattctgaatgttggcctgccttgctggattggggaatttctyctggataatatcctgcagagtgttttccaacttggttccattctacccgtcactttcaggtacacaaatcagacgtagatttggtcttttcacatagtcc

SEQ ID NO: 195264 - DNA, 201 bp, Homo sapiens
gaaggaaataaagggtattcaattaggaaaagaggaagtcaaattgtccctgtttgcacatgacatgattgtatatctagaaaaccccattgtctcagccyaaaatctccttaagctgataagcaacttcagcaaagtctcaggatacaaaatcaatgtacaaaaaccacaagcattcttatacaccaataacagacaaac

SEQ ID NO: 195265 - DNA, 201 bp, Homo sapiens
atgtttattgcttccttcaggagctcttttagggcaggcctggtggtgacaaaaatctctcagcatttgcttgtctgtaaagtattttatttctccttcayttatgaagcttagtttggctggatatgaaattctgggttgaatattcttttctttaagaatgttgaatattggcccccactctcttctggcttgtagagt

SEQ ID NO: 195266 - DNA, 201 bp, Homo sapiens
tttcaaatgccctctcaattttggaaaataacttatagcagttcttagcatcaacctaggaaaatctttagaattaatctcccagtaatctcacactattytattcagaatcaaatcttttacacctgccttcagtgaaggaagtgtttggctttattagttataaaagtttatttcctttttttaaaaatttttattttt

SEQ ID NO: 195267 - DNA, 201 bp, Homo sapiens
taccagttgttcctttccatgtttattgcttccttcaggagctcttttagggcaggcctggtggtgacaaaaatctctcagcatttgcttgtctgtaaagwattttatttctccttcatttatgaagcttagtttggctggatatgaaattctgggttgaatattcttttctttaagaatgttgaatattggcccccactc

SEQ ID NO: 195268 - DNA, 201 bp, Homo sapiens
atagacaatggaaaaacagtagagaaaatcaatgaaaccaaaagctgattctttgaaacaattaacaaaatcaacatttagctaccttgaccaaaaaaaaatacttaaattcctagaatcataaataaaagaagggacattgctctgaacttcctgaaatacatgagattattttacaaataaatattatgaacaattgta

SEQ ID NO: 195269 - DNA, 201 bp, Homo sapiens
aagagaggactgagcatgccatggtggatttttctttagaggtatatatggaccttaaagcgggagattaagagtattttggaccatattagccatgtagktcatgataaatgattacatttgtagacattttggtgccttaatgtcagtaagggttgcacaatgagttttgatagtcatgcattccagagatgtatagaa

SEQ ID NO: 195270 - DNA, 201 bp, Homo sapiens
tcctagctacatatcgctgaagctgagttcctggtgaaaacagttcaatagtggaagcaccgttgttcttctcactccctacttaagaggcagacgatctrccttggacacagtactgcggagtatactggaaccctaaccgccattgtcctggcttttgtggcagaggttccatgctaggagaagcaagccgaggaatct

SEQ ID NO: 195271 - DNA, 201 bp, Homo sapiens
ctaggattgcaacccctgcctttttttgttttccatttgcttggttgatcttcctccatccttttattttgagcctatgtgtgtctctgcacgtgagatgkgtttcctgaatacagcacactgatgggttttgactctttatccaatttgccagtctgtgtcttttaattggagcatttagtccatttacatttaaggtta

SEQ ID NO: 195272 - DNA, 201 bp, Homo sapiens
tggtgtggtgctgaaaaaaatgtatattctgtttatttggggtggagagttctgtagatgtctattaggtctgcttggtgcagagctgagttcaattcccrggtatccttgttaactttctgtctcgttgatctttctaatgttgacagtggggtgttaaagtctcccattattaatgtatgggagtctaagtctctttgt

SEQ ID NO: 195273 - DNA, 201 bp, Homo sapiens
ttgttataatttctgttcttttacatttgctgaggagagctttacttccaactatgtggtcaattgtggaataggtgtggtgtggtgctgaaaaaaatgtrtattctgtttatttggggtggagagttctgtagatgtctattaggtctgcttggtgcagagctgagttcaattcccgggtatccttgttaactttctgtc

SEQ ID NO: 195274 - DNA, 201 bp, Homo sapiens
ttctagtttgattgcactgtggtctgagagatagtttgttataatttctgttcttttacatttgctgaggagagctttacttccaactatgtggtcaattktggaataggtgtggtgtggtgctgaaaaaaatgtatattctgtttatttggggtggagagttctgtagatgtctattaggtctgcttggtgcagagctga

SEQ ID NO: 195275 - DNA, 201 bp, Homo sapiens
atccattactgctgatgattgtgttgaccctgagaaaatgcagtgagggaggggatgaactgttcataatataatggaaattacttttcccgtttggcacrtaaattaggaaaaaagtaaaaaaaaaaaaaagggagtgtttgaagtagtcatctgttaaaggtcaaatttccagagtcatccttgctacaaatctgggga

SEQ ID NO: 195276 - DNA, 201 bp, Homo sapiens
catctttgatgccaagtaaagaaaacagaaagcatgtagtgatgaaatgtgtcaaaagctgaggagatgatttagataaagtctggaaaaaatttttaaakacccctggatatgtcagcctggatgcaagtaatggctttgacaggaaaatttgcaatgaagtttaaagttcactgaaaggagtttaaagagtggataaag

SEQ ID NO: 195277 - DNA, 201 bp, Homo sapiens
ttacagatactcagtgatttaaaagaaataaaaagcctaaaatacaacctcctcagagaaaaccaatccatacgtagaacctatcagttgaagataaattrtttttagatagtatcatttaattagccactgaagaatctgtctagtgacatacatataaattgtacaacaaaagttaactgaacacacttgatttggctc

SEQ ID NO: 195278 - DNA, 201 bp, Homo sapiens
atgctctaagaacatctgcagaaatttgaatgtacagtcatcaaagcaaaactttagtgcaggtgaattaggtgtatgtggagaatatagatggttatatsaaagactgatgttacaatcaaatataagcaggtgtgcacgttttaatgatcatgacttccatatccagtgattttgatataaaattattttaagaactgc

SEQ ID NO: 195279 - DNA, 201 bp, Homo sapiens
tttcaagtaactaaatgtaaaaagtgatagaggatataaaagaacaacgtaaatcagaattagaaaaactcaatgacaaattgatcataaaaaaaagattygaggaaaaaaaagtaatccaaaacaaattattttagaaaaatatttcacaagtgaaggtaaaacttgaagaaacacaagagtgacttaaaacaacagaca

SEQ ID NO: 195280 - DNA, 201 bp, Homo sapiens
gacaatgaatgacaaacaaaataattaaattggataatatgtgaagaggtgatttatgttatgaaaacaaagataagcaaaaaagactagagggaattgamagaatccaaagagcagatggtaagctggggataagttgtggtgttaaaaatgtaatttacaacagtgttcattgggaatataagattcaagcaaagactt

SEQ ID NO: 195281 - DNA, 201 bp, Homo sapiens
atttttatcaaatcaattctgtgatgataaagcatcctacaaacttcattacattgtgctaagcttttaagtaacctctataagaagatggagagtgaatrgggccaaaagatgaaaaacgatatttgagaaagctgacagggagcttattgtgctcctgaaataataaatataggaaacacttatccatttccattgata

SEQ ID NO: 195282 - DNA, 201 bp, Homo sapiens
aatgtgtttttaggacacttgatcagtttacatgtgtttttatacatatactttttgtgcatatatttcaattattgactggttggaatttaaagaaccthtttatttgctttgtacaatgcaggaagaaactaatgcatttaaaaggtgtccacatcttgcaaaaataaaaagagatagggtaaaaacatgcatagcatt

SEQ ID NO: 195283 - DNA, 201 bp, Homo sapiens
catcttctccagcacctgttgtttcctgacttgttaatgatcgccattctaactggtgtgagatggtatctcacaggtctctgatttttaaaaaagtataacttgaggacatttttaaaaaagaacatagtggcatttgaataaatatattttctggcggccattttcagcattttaaaagcattcagctagtattgtttt

SEQ ID NO: 195284 - DNA, 201 bp, Homo sapiens
tttcatacactgttgcatctaaatggatgaaacaggtactgacacagaataagtttgttgaatgacaaatgtaaatttttcatagtttagaaagtctataraatttgattttttaagatatgaggaagtgttcactattatgctgttggtttgcttgcaatacctttgctaattaattcagacaatgtggtgtaaaaaagt

SEQ ID NO: 195285 - DNA, 201 bp, Homo sapiens
cacatcttctccagcacctgttgtttcctgacttgttaatgatcgccattctaactggtgtgagatggtatctcacaggtctctgatttttaaaaaagtayaacttgaggacatttttaaaaaagaacatagtggcatttgaataaatatattttctggcggccattttcagcattttaaaagcattcagctagtattgtt

SEQ ID NO: 195286 - DNA, 201 bp, Homo sapiens
ttgttggtggtctcaagtctgttttctctcttgtaagaatagtaactcatgctcttttgtgtgtgtgtgtgtgtgtgtgtgtgtgtgtgtgtgtgtgtgtkcatgatagatctttctctgttcttttatgttgaacctgtacatgtcattagatgtgacatggtgctcttgaaaagagcagacagtcgggtcttgtctttt

SEQ ID NO: 195287 - DNA, 201 bp, Homo sapiens
ctagggcaggggctaaatgctgccagtctctttgctaaaacataacaagagtcacttaacaagagtcacctctgctccagttcccaacaagttcctcatckacatctgagaccatctcagcctagaattgttcatatcactatttttgtcaaagccattcaacaagtctctaggaagttccaaactttcccacattgtcct

SEQ ID NO: 195288 - DNA, 201 bp, Homo sapiens
ccacatcttctccagcacctgttgtttcctgacttgttaatgatcgccattctaactggtgtgagatggtatctcacaggtctctgatttttaaaaaagtataacttgaggacatttttaaaaaagaacatagtggcatttgaataaatatattttctggcggccattttcagcattttaaaagcattcagctagtattgt

SEQ ID NO: 195289 - DNA, 201 bp, Homo sapiens
tgaaggtggggttttgccagggacccacctctgtctgcccagaatttctctgtctcctattgttaccactctttttaaaataaccacattttttttgctgwtgaaatagaaatttattttaaagtattattaattttattctaccatttatagcagctaatagaacttcaatcatatgatataatgtgctctgatatatct

SEQ ID NO: 195290 - DNA, 201 bp, Homo sapiens
aagagggcccatgctagtctgaaatccagcagggcagtcaaatcttagagctccaaaatgatctcctttgactccaggtctcacatccaggtcatgctgawgcaagaggtgggttcccatagtcttgggcagctctgcccctgtgtctttacaaggtacagcctccctcctggctgctttcatgggctggcattgagtgtc

SEQ ID NO: 195291 - DNA, 201 bp, Homo sapiens
ctccacatcttctccagcacctgttgtttcctgacttgttaatgatcgccattctaactggtgtgagatggtatctcacaggtctctgatttttaaaaaagtataacttgaggacatttttaaaaaagaacatagtggcatttgaataaatatattttctggcggccattttcagcattttaaaagcattcagctagtatt

SEQ ID NO: 195292 - DNA, 201 bp, Homo sapiens
tttcctgattgaataccctttatttccttctcctgcctaattgccctggccagaacttccaacactatgttgaataggagtggtgagagagggcatccctktcttgtgccagttttcaaagggaatgcttccagtttttgcccattcagtatgatattggctgtgggtttgtcatagatagctcttattattttgagatac

SEQ ID NO: 195293 - DNA, 201 bp, Homo sapiens
agtccacagtccaaagtttcatctgagacaaggcaagtcccttctgcctatgagcctgaatatcaaaagcaagctagttatttcctagatacaatgggggwacaggtattgagtacatatagccattccaaataggagaaattggccaaagcaaaggggtaagagggcccatgctagtctgaaatccagcagggcagtcaa

SEQ ID NO: 195294 - DNA, 201 bp, Homo sapiens
tctccacatcttctccagcacctgttgtttcctgacttgttaatgatcgccattctaactggtgtgagatggtatctcacaggtctctgatttttaaaaaagtataacttgaggacatttttaaaaaagaacatagtggcatttgaataaatatattttctggcggccattttcagcattttaaaagcattcagctagtat

SEQ ID NO: 195295 - DNA, 201 bp, Homo sapiens
ctgcaaacagggacaatttgacttcctcttttcctgattgaataccctttatttccttctcctgcctaattgccctggccagaacttccaacactatgttkaataggagtggtgagagagggcatccctgtcttgtgccagttttcaaagggaatgcttccagtttttgcccattcagtatgatattggctgtgggtttgt

SEQ ID NO: 195296 - DNA, 201 bp, Homo sapiens
acacgtgggaattctgagagaaaaaattcaagttgagacttgggtggggacacagccaaaccatatcattccatcccaacccctccaaatctcatgtcctyacatttgaaaatcaatcatgccttctcaacagtcccccaaaggtttaactcatttcaacattaacccaaaagtccacagtccaaagtttcatctgagaca

SEQ ID NO: 195297 - DNA, 201 bp, Homo sapiens
tgaggtgaaattgcttagagatggtttaatccaaagccttcattttgcagctgaggaaagtgaggccaacctaaggtcacttaaggtcatctagactgttkaatggcattgccagacttagaaatactgtcttctggttctcaggctagtggttttttattatactgtgctgttgtccattttgtgacatttctgaaaggg

SEQ ID NO: 195298 - DNA, 201 bp, Homo sapiens
caaaaaagattatataatataatatataaagattatatatataatatatatttataatatatattttatatattatatataatattatatgtgtgtgtgtrtatatatatatatatatatatatatatttaggaatttcatgagaaaattagcaatctggtaaaggtgaaaaggccagttttttgagaaaaagcatttgca

SEQ ID NO: 195299 - DNA, 201 bp, Homo sapiens
tcccagcaccaaaatttgtatcactcagcattctttagagaaacagaccctataggggtgtgtgtgtgtgtgtgtgtgtgtgtgtgtgtgtgtgtgtgtgkgcagagagagagagtgattttaagaaattggttcctgattgtagtgcctggaaagttcaacatttgtgaggcgggccagcaggctggaaactcagctaag

SEQ ID NO: 195300 - DNA, 201 bp, Homo sapiens
gaagctataaagttattttaaaataattttgattagtaaatatacaaaaataagatatattgtgtatttcgtctatttatatatatgtatgtatttactayggtagttatattgttttgctgctgtgaatttctgttaagtgattatttgaaacagaacacctatgagatttggatattatattttccttaaattaaatta

SEQ ID NO: 195301 - DNA, 201 bp, Homo sapiens
tcagtaataaaatcaacaatgatcaagactctatctcaaaaaaaaacaaaagccagaccaaaaaaaaacaaaagccagatcaaaaaaaaaaaaaaaaaaaacaaatacatactatttgtgccattgtgatgaagttacagaacaagctagatttatttatgggaatagaaatataaatatagagggcttgagtagagaaga

SEQ ID NO: 195302 - DNA, 201 bp, Homo sapiens
aaggtatgaagaaggtgtttagtaagaattagttgcttattttggcaggcatgtcagctaaatgtaagaggatagaaaatattatgtttgacagctgctayggataaaagttacatattaaagtagatcaggacaagatttgtgaaagattaatactagtttaaggagttgggattctgctgatatgtaactatgtccact

SEQ ID NO: 195303 - DNA, 201 bp, Homo sapiens
ttatgtatttaatatataactacataaaatataaattttaaatttaatataaaagtatgataaaacgtaaatattttatattatgtaaatatgaaatgtttatatatgtaaatataattttaaaatataaaaataaaatattataaggcttataatatagcttcattaatcaagatggtgttattgacataataataaaca

SEQ ID NO: 195304 - DNA, 201 bp, Homo sapiens
ttctcattggtctcaagatttctggctggcactccttgacagattaacaagagaaaagtataacaaatttatttattcaaagttttacatgacacaggagycttcagcaataaagtcccagagaaatggtgaaaaatgtatttttatccatggggtggaatgaagaatggacagttatgtaaaagaataatttgataaaaa

SEQ ID NO: 195305 - DNA, 201 bp, Homo sapiens
taattaatctatatgagcctctctttcttcacttctaaaatgaagataatagtaactatttcattaagttgcaaagattaagcgagctaaaaaaaaaaagraaaaaaaagggtccaacataggttctgtttaatgttttcttctttccctctttttttctataactgtaaagattttttagattttacattactatttaac

SEQ ID NO: 195306 - DNA, 201 bp, Homo sapiens
tgtatgcaaactaacacaagtgatttttggtgggcataagagtactaaagggagtggaagtgcagggacagttattgagtaataactaaaacttattgaaygtgtattatttgccaggcagtattgtatgcccttatatgtttcaacccatttaatactcagttatgtcatttagatcaggagtccctaacccctggtcca

SEQ ID NO: 195307 - DNA, 201 bp, Homo sapiens
ataattaatctatatgagcctctctttcttcacttctaaaatgaagataatagtaactatttcattaagttgcaaagattaagcgagctaaaaaaaaaaargaaaaaaaagggtccaacataggttctgtttaatgttttcttctttccctctttttttctataactgtaaagattttttagattttacattactatttaa

SEQ ID NO: 195308 - DNA, 201 bp, Homo sapiens
gataattaatctatatgagcctctctttcttcacttctaaaatgaagataatagtaactatttcattaagttgcaaagattaagcgagctaaaaaaaaaaaggaaaaaaaagggtccaacataggttctgtttaatgttttcttctttccctctttttttctataactgtaaagattttttagattttacattactattta

SEQ ID NO: 195309 - DNA, 201 bp, Homo sapiens
agatggtggtgtctacacagtaagagtggatacttcctttggtttggtttttattttggttgagtaacagattctgtatttctaaaactaggaattgttgwtggagctgagtagaacctcttcctacttatttcctgaatgtgaaatgttttgtttttgcaaataggtgtgcatagtccacatcatgaatatcagtccaat

SEQ ID NO: 195310 - DNA, 201 bp, Homo sapiens
gtacctcagaaatagttactatggtaaactttatgttatgcatttttgttagaataaaacattaagataaaaatttaatactttgattttaactcaaagarttttaactgaaagaattccatgttaagatatggaagactggagtaaggtcagatttgcaacgatatggtagagtcaattgttctattttgccgtgtttga

SEQ ID NO: 195311 - DNA, 201 bp, Homo sapiens
tcccacagttcctcagatggtggtgtctacacagtaagagtggatacttcctttggtttggtttttattttggttgagtaacagattctgtatttctaaaactaggaattgttgatggagctgagtagaacctcttcctacttatttcctgaatgtgaaatgttttgtttttgcaaataggtgtgcatagtccacatcatg

SEQ ID NO: 195312 - DNA, 201 bp, Homo sapiens
ctctcccacagttcctcagatggtggtgtctacacagtaagagtggatacttcctttggtttggtttttattttggttgagtaacagattctgtatttctraaactaggaattgttgatggagctgagtagaacctcttcctacttatttcctgaatgtgaaatgttttgtttttgcaaataggtgtgcatagtccacatc

SEQ ID NO: 195313 - DNA, 201 bp, Homo sapiens
tggtctccaagagagtagagatttagggatgaaatatttgttttacctgtaataatgcagcctttttttttatccagcaatcttggtagttgtttgctttratacataacactgaatttgaacgaagacaatgactgttaaaaatgcatctttttgaggtgggcattcagaggtaacatgcacagctgtgttttctgagtg

SEQ ID NO: 195314 - DNA, 201 bp, Homo sapiens
atattctagaatggtaatggtggtgatgttggtggtagggaagttctacacgtacaataaaaatgggttacatgtcagcatcaaaattacgtcactaactmaaatcaaacagtaagcatgttttgaatgtgtgggagtttataaaatgaaaagattagtcagtaaaatggactcaatttctttctcttttataacactgaa

SEQ ID NO: 195315 - DNA, 201 bp, Homo sapiens
ttcttaatcttgagttctagtttgattgcactgtggtctgagagatagtttgttataatttctgttcttttacatttgctgaggagagctttacttccaastatgtggtcaattgtggaataggtgtggtgtggtgctgaaaaaaatgtatattctgtttatttggggtggagagttctgtagatgtctattaggtctgct

SEQ ID NO: 195316 - DNA, 201 bp, Homo sapiens
gggaagacaatcacctggatgttaggggtatattctacatccctctttaaatgttaaggcatcaaaaatgtctacggccttgtttgcaagtttttttttttctggtagtgccttatttagcataggaggtaaaactgtacatatttctcaaaaaaaaaaatcttactttttaagtagggtttgagggcctccacgcaactc

SEQ ID NO: 195317 - DNA, 201 bp, Homo sapiens
tcttcctggtttagtcttgggagggtttatgtgtcgaggaatttatccatttcttctagattttctagtttatttgtgtagaggtgtttgtagtattctcygatggtagtttgtatttctgtgggatcagtggtgataacccctttatcattttttattgtgtctatttgattcttctttttttctttattaatcttgcta

SEQ ID NO: 195318 - DNA, 201 bp, Homo sapiens
gaagggtaatttcaggtaaactatccagaggaactgccatacaaacatgtatctatctatctatctatctatctatctatctatctatctatctatcatcyatctatctatctatctgtcatctatctatctacctacctacctacctacctacctacctacctatctatgggacctctatctgtttgtctgtctgcctgt

SEQ ID NO: 195319 - DNA, 201 bp, Homo sapiens
taggagtggtgagagagggcatccctgtcttgtgccagttttcaaagggaatgcttccagtttttgcccattcaatatgatattggctgtgggtttgtcayagatagctcttattattttgagatacgtcccatcaatacttaatttactgagagtttttagcatgaagggttgttgaattttgtcaaaggccttttctgc

SEQ ID NO: 195320 - DNA, 201 bp, Homo sapiens
tccagttttttattagtctgtataatcaatgctgactactgcaaatctcaaaccctccgtgatatttgtcatgcaaatttgaattgggatattactgattktgctgctgctctcctgcatagcttttatctaaaaagtgagttagaggccgggtgcggtggctcatacctgtaatcccagcactttggtaggctgaggcag

SEQ ID NO: 195321 - DNA, 201 bp, Homo sapiens
tggagtggcttctacttcttgatcactatccaactaaaattaactttcagaaacattagataattatagaaataaacatcaaaatgttacacacaaataarctgaggatacaaataaatccaccaagaacatatatattgctttgcaaattagtattaaaatataattgaattgattaaacatatttctgagcaattgtat

SEQ ID NO: 195322 - DNA, 201 bp, Homo sapiens
gtgatttttgtacattgattttgtatcctgagactttgctgaagttgcttatcagcttaaggagattttgggctgagacaatggggttttctagatatacratcatgtcatctgcaaacagggataatttgacttcctcttttcctaattgaatactctttatttccttctcctgcctaattgccctagccagaacttcca

SEQ ID NO: 195323 - DNA, 201 bp, Homo sapiens
agtggcgcatgcctgtaatcccagctacttgggcggctgaggcaggagaatcacttgaacctgggaggcagaggttgccgtgagcagagatcgcaccactrcactccagcatgggtgacagagcaagactccgtctcaaaaaaaaaaaaagtgatttagatattcagaatccttctagctagtaactccattgtcttttca

SEQ ID NO: 195324 - DNA, 201 bp, Homo sapiens
gtaggttgcctgttcactctgatggtagtttcttttgctgtgcagaagctctttagtttaattagatcccatttgtcaattttgtcttttgttgccattgyttttggtgttttagacatgaagtccttgcccatgcctatgtcctgcatggtaatgcctaggttttcttctagggtttttatggttttaggtctaatgttt

SEQ ID NO: 195325 - DNA, 201 bp, Homo sapiens
tcttcaatcactgataccctttcttccacttgatcgaatcagctactgaagcttgtgcatgtgtcacatagttctcctgccatggttttcagctccatcakgtcatttaacgtcttctctacactgtttattctagtttgccatacatctaatcttttttcaaggtttttagcttccttgtgatgggtttgaacatcctcc

SEQ ID NO: 195326 - DNA, 201 bp, Homo sapiens
ctgcttcagttctgctctgatcttaattatttcttgccttctgctagcttttgaatgtgtttgctcttgcttctctagttcttttaattgtgatgttaggrtgtcgattttagatctttcttgctttctcttgtgggcatttagtgttgtaaatttccctctacacactgctttaaatgtgtcccagggattctggtatgt

SEQ ID NO: 195327 - DNA, 201 bp, Homo sapiens
ttgtttttctcttgtaaatttgtttgagttctttgtagattctggatattagccctttgtcagataggtaggttgcagaaatgttctcccattttgtaggktgcctgttcactctgatggtagtttcttttgctgtgcagaagctctttagtttaattagatcccatttgtcaattttgtcttttgttgccattgcttttg

SEQ ID NO: 195328 - DNA, 201 bp, Homo sapiens
atttttgaatggttttttgtgcctctgtctgcttcagttctgctctgatcttaattatttcttgccttctgctagcttttgaatgtgtttgctcttgcttytctagttcttttaattgtgatgttagggtgtcgattttagatctttcttgctttctcttgtgggcatttagtgttgtaaatttccctctacacactgctt

SEQ ID NO: 195329 - DNA, 201 bp, Homo sapiens
tcctctccagcacctgtttccagactttttaatgattgccattctaactggtgtgagatggtatctcattgtggttttgatttgcatttctctgatggccwgtgatggtgagcattttttcatgtgtcttttggctgcataaatgtcttcttttgagaagtgtctgttcatgtccttggccaattttttatggggtttttt

SEQ ID NO: 195330 - DNA, 201 bp, Homo sapiens
tgaggaatcgccacactgacttccacaatggttgaactagtttacaatcccaccaacagtgtaaaagtgttcctatgtctccacatcctctccagcacctktttccagactttttaatgattgccattctaactggtgtgagatggtatctcattgtggttttgatttgcatttctctgatggccagtgatggtgagcatt

SEQ ID NO: 195331 - DNA, 201 bp, Homo sapiens
atcttggtaggttttatgtgtccagcaacttgtccattttctcttttggtcttcccatttgttagtttgtagctgttcataacagtttctattgacccttsggatatctgtgatttaaagtctctttatttctgattttatttacttgggccttctcccttattttcttggttagtctagctagaagtttcttggtttcat

SEQ ID NO: 195332 - DNA, 201 bp, Homo sapiens
ccaaaagacagaggtcgcagtaagcccaggtcatgccagtgtattccagcctgggtgacaaagtgagactcccactcaaaaaaaaaaaaaaaaaaaaaaargaagttactttaaaaaaatgtgaacctgttaaactgacatgttttagttaaataaaattaatgtaaaataatctatacttaagtattttacataaactta

SEQ ID NO: 195333 - DNA, 201 bp, Homo sapiens
tgccaaagtttttaatatgcatattttgtgtagtatactagaatatctatatatgaatgtactctaaaaatgaatcatatgcctaagagagtaagcaaaascagacagaatgtctgctttcaagaacctagtggaagatacaaacatcttaaaagtcacagaagtaaatctattgcaatgataaatgcaacaaaagagagc

SEQ ID NO: 195334 - DNA, 201 bp, Homo sapiens
ctgaaaaaattgattaaaaacttcactgtacaattgactacattataatttttctcaatttgagtttcttaaatctcaggggctagtactgtaaaatcaaygcaaagtaattacaaaatttaaaattccagatgttatgattacatacatcttgtcctttaatatccattctgtcaaataccttttataaacactgctact

SEQ ID NO: 195335 - DNA, 201 bp, Homo sapiens
cctaggaaggcttcccagtacagggtgacataaataaatgatgtgtgatgttacttgtactgccctattctctgcctccttttaaatacatatgttctttrtctgacttatgtaaccagtattaagaagagatggaaaaaaatagccatgaaaagatacttattaactcttctgaagttctctgcatactccatatgctgg

SEQ ID NO: 195336 - DNA, 201 bp, Homo sapiens
atatatatgagcagatctcgtgtatatatatgagcagaactcgtgtatatatatgagcagaaatcatgtatatatatgagcagaaatcatatatatatatacatatatatataacttcaccctccaaacactgctttccccgtgccaacaactagtaatatgtcatatgcttgttacaatggatgaatcaatactaatatg

SEQ ID NO: 195337 - DNA, 201 bp, Homo sapiens
tatatatatgagcagatctcgtgtatatatatgagcagaactcgtgtatatatatgagcagaaatcatgtatatatatgagcagaaatcatatatatatatacatatatatataacttcaccctccaaacactgctttccccgtgccaacaactagtaatatgtcatatgcttgttacaatggatgaatcaatactaatat

SEQ ID NO: 195338 - DNA, 201 bp, Homo sapiens
agagttgaggttgctgcagacccacatggattcaccactgctaacatatatatacatgtatagggataataattgctatatgatagctccctatttctcakactctgctgaaatagtttgaagatctctttggaaagaccttttgtaacatttcaatctagccattatctctcatagacttcttttacttcatgacacttg

SEQ ID NO: 195339 - DNA, 201 bp, Homo sapiens
gatgacatttgtgctgactctggtttatgtatgtatagaattttaggtgggcctgacttctggcctcacctaaactggcatatcctaattacatttggaaattggatgttaaattaaacctgatctacggaattttcttgatcatgtgctggagccttattcatcatctcctgcattgagaaaggaaatggatatggaaga

SEQ ID NO: 195340 - DNA, 201 bp, Homo sapiens
tgttaatagccagatgtaaagttatcaaatattttatggcctaaacaatactgttataagccaactacaaagcacatttcataaattatttatattattgkattattcttcaaaaaacaattgggtctatctgaacaaaatctttctgccttatctgatcctctggatttggtttctagtacctatcagatttattttttc

SEQ ID NO: 195341 - DNA, 201 bp, Homo sapiens
ttgcaatccaaaacaaatgagataatttcatgaagtagcaaagaaagactcttccaagtagatacaaatgatgcctttacgctgcatttacatggtatacycttttaattttgtcccagttgtgtaaatgtggaatactcaacataaaccagaattttcttattgatgaattaaagcataattagggcattactgtaggga

SEQ ID NO: 195342 - DNA, 201 bp, Homo sapiens
gtctctttcaaggattttgttattttaagcctttatttacatctaatccatcttgcattgacttgtgtgtgcggtgcaagaaacaattccaatttttttttccatatggatatccagttttctcagcaccatttgttgaagagactattccttccccattgtatattcttagcccccgatcaaagatcagttgactgtata

SEQ ID NO: 195343 - DNA, 201 bp, Homo sapiens
tctttgagaccatgtaggacgtgcctttcaccttgtgtaatgattgtgaggcttccccagccacgtggaactgtgagtgcattaaacctctttttctttakaaattacccagtcttgggtgtgtctttatcaacagcatgaaaacaagctaatacaggtccatatgaaagaattaagaaaaaccaccagtgattccatttt

SEQ ID NO: 195344 - DNA, 201 bp, Homo sapiens
actgattttttttctatttttataatttaaaattgttcattatattctgtattgcaatccaaaacaaatgagataatttcatgaagtagcaaagaaagacycttccaagtagatacaaatgatgcctttacgctgcatttacatggtatactcttttaattttgtcccagttgtgtaaatgtggaatactcaacataaacc

SEQ ID NO: 195345 - DNA, 201 bp, Homo sapiens
gagatttcttaaaatgcttttatacagtaattctccaaatctctactaagccggggttgtgtgtgtgtgtgtgtgtgtgtgtgtgtgtgtgtgtgtgtgttggtgcatggcttcattcaacacttaggcagctgacaactctgctttcactttctgcttgcacttcctgcttgtcagatgatgacaattctctagggattt

SEQ ID NO: 195346 - DNA, 201 bp, Homo sapiens
gcagcaaagcattcaagtggtgacttgggtgctgttaaaggcattcagttttaaaagggaaacagagcacaaaagttcacaaactttgtggcctgactatrtggtagaaaagaaaaattcacttttggtggagaaattcagctgactgcagaaatttgcataagtagcaaggagcccaatgttaattaccaagaccatggg

SEQ ID NO: 195347 - DNA, 201 bp, Homo sapiens
agatttggggctttttttttctttttttttgagagatacttggcaaataccaaaaaaagaaaaaaaaatccgttcttcattttattattttcatgatggastgtgtaaaactaaaacctaatatctttccttgagttttaagtgtgcttcattctgtgcaaaattaagccaataaatggcaaagtggcagttaaatgaaag

SEQ ID NO: 195348 - DNA, 201 bp, Homo sapiens
cagagatttcttaaaatgcttttatacagtaattctccaaatctctactaagccggggttgtgtgtgtgtgtgtgtgtgtgtgtgtgtgtgtgtgtgtgtgttggtgcatggcttcattcaacacttaggcagctgacaactctgctttcactttctgcttgcacttcctgcttgtcagatgatgacaattctctagggat

SEQ ID NO: 195349 - DNA, 201 bp, Homo sapiens
gctatctctacagaaactaaaacgtgagtcctgttgatttgtgttactgaattttactatgctatataactgtcctggtaatatgatatggcatttgttargatatataatgagatagtcttgattaagtgcaatttctgcattcttataaggaatacagaaagtgagaattgatatgtttgttttactgtttagtttaaa

SEQ ID NO: 195350 - DNA, 201 bp, Homo sapiens
gaagataattctgtgggaggctgaataattgtccccaaatatccacatcctgattcccagaactcgtgaatatgcttcatttcatttcatttctgctcaawgaacctcctttgtatgtcttttaacacaaatttgctaataatatattctctctgttctcatttaatgcatgttttaatttctccttcatatttgcaaaat

SEQ ID NO: 195351 - DNA, 201 bp, Homo sapiens
agaaagaacactgcagaagagtgcagtgggacgcttcagcaagagaggactgagcatgccatggtggatttttctttagaggtatatatggaccttaaagygggagattaagagtattttggaccatattagccatgtaggtcatgataaatgattacatttgtagacattttggtgccttaatgtcagtaagggttgcac

SEQ ID NO: 195352 - DNA, 201 bp, Homo sapiens
tggaaaggcctaggaatgggtaggatgagccatactataagcatatgttaaactttctaaaagctcccaaactgtttgccagagtggctgtatcattttgyatttctgtcagcaatatttaagtattctggtttctttctatcctcttcaatatttgctattgaattttatgagtttagctattataatgggtagaggtat

SEQ ID NO: 195353 - DNA, 201 bp, Homo sapiens
tagagaaatcttgtgcttcctctcaatgtgcccctcttgccgctacacacacacacacacacatacacacacacacacacacacacacacacacacacacmccgagaagagatagaactatattgctgtctatttaacacttaaagaaaatgacatttttcttaaataagtcttttaaatcttacaaatctttaaacactt

SEQ ID NO: 195354 - DNA, 201 bp, Homo sapiens
aacaatttctttaaaaagtggacagaggacaagaacagacatattttaaaagacatacatgaagcaaacaagcatgtgaaaaaagttcaatgtcagtgattatttgagaaatgcaaacttaaatcacaatgagataccatctcacaccagtcagaatggctattaataaacagtgaaaaaaataacaggtgcttgtgaggt

SEQ ID NO: 195355 - DNA, 201 bp, Homo sapiens
gtggccttcttctgatgctgcatattataatgcaaaccaggatttaaaatagtgggcacaatttatataaatagcatttaaatttggttgaaatttggaartaaaattaaccactaaaatccctttttgctatttctgtaagaaatattattcttagaaaatcatcactggccatcagagaaatgcaaatcaaaaccacaa

SEQ ID NO: 195356 - DNA, 201 bp, Homo sapiens
tctaagcagcaaagcattcaagtggtgacttgggtgctgttaaaggcattcagttttaaaagggaaacagagcacaaaagttcacaaactttgtggcctgrctatatggtagaaaagaaaaattcacttttggtggagaaattcagctgactgcagaaatttgcataagtagcaaggagcccaatgttaattaccaagacc

SEQ ID NO: 195357 - DNA, 201 bp, Homo sapiens
ctctaatgaccagtgattacgagctttttcttatatatgtgttggctgcataaatgtattcttttgaaaagtgtctgttcatattctttgcccaccttttratatggttgtttgtttttttcttgtaaatttgtttaagttccttgtagattctggatattacctctttgtgaaatggatacattgaaacaattttctccc

SEQ ID NO: 195358 - DNA, 201 bp, Homo sapiens
cttgagatgtccattacttagctgagtgcaggggctggattcagggagtgggaaggaaaagctaaaatttcaatagtttttacttgttcttaatcttcttygattttgttctaattttacatcttcataggatattggatttttacatctgcacacttacctggttaatgttcgttaaaagtacagcagtattctcacaag

SEQ ID NO: 195359 - DNA, 201 bp, Homo sapiens
ttatgcaatggccttctttgtctcttttggtctttgttggtttaaagtctgtttcatcagagactaggattgcaaccctgcttttttttgttttccatttscttggtagatcttcctccatccctttattttgagcctatgtgtgtctctgcacatgagatgggcctcctgaatacagcacactgatggatcttgactctt

SEQ ID NO: 195360 - DNA, 201 bp, Homo sapiens
tttctgtgggattggtggtgatatcccttttatcattttttattgtatctatttgattcttctctcttttcttctttattagttttgctagtggtctatcrattttgttgatcttttcaaaaaaccggctcctggattcattgatttttgaatggttttttgtgcctctgtctgcttcagttctgctctgatcttaattat

SEQ ID NO: 195361 - DNA, 201 bp, Homo sapiens
ttggtaggctactaattattgcctcaatttcagagcctgttattggcctattcagggggtcaacttcttcctggtttagtcttgggagggtgtatgtgtcraggaatttatccatttcttctagattttctagtctatttgcgtagaggtgtttatagtattctctgatggaagtttgtatttctgtgggattggtggtga

SEQ ID NO: 195362 - DNA, 201 bp, Homo sapiens
atgagcatggaatgtttttccatttgtttgtgtcctcctttatttcattgagcagtggtttgtagttctccttgaagaggtccttcacatcctttgtaagwtggattcctaggtattttattctctttgtagcaattgtgaatgggagttcattcatgatttggctctctgtttgtctgttgttggtgtataagaatgctt

SEQ ID NO: 195363 - DNA, 201 bp, Homo sapiens
ctttctacatatggctagccagttttcccagcaccatttattaaatagggaatcctttccccatttcttgtttttgtcaggtttgtcaaagatcagatggytgtagaagtgtggtgttatttctgagggctctgttctgttccattggtctatatgtctgttttggtaccagtaccattctgttttggttactgtagcatt

SEQ ID NO: 195364 - DNA, 201 bp, Homo sapiens
acccaaaagacagaggtcgcagtaagcccaggtcatgccagtgtattccagcctgggtgacaaagtgagactcccactcaaaaaaaaaaaaaaaaaaaaaaaagaagttactttaaaaaaatgtgaacctgttaaactgacatgttttagttaaataaaattaatgtaaaataatctatacttaagtattttacataaact

SEQ ID NO: 195365 - DNA, 201 bp, Homo sapiens
gttttgcaaacaaatctattgtgcaatataaaggaaaaaaataaaatcctatgattgataatgactcaagtaattacaaatatattatatatatatatattcagggtaaaaaagaagaaaatcaaaactttaaaagtttagaaaaatagaaataagtgaagattcagaaatagtaaattatttggtctagcaaatgataag

SEQ ID NO: 195366 - DNA, 201 bp, Homo sapiens
ttgttttgcaaacaaatctattgtgcaatataaaggaaaaaaataaaatcctatgattgataatgactcaagtaattacaaatatattatatatatatatattcagggtaaaaaagaagaaaatcaaaactttaaaagtttagaaaaatagaaataagtgaagattcagaaatagtaaattatttggtctagcaaatgata

SEQ ID NO: 195367 - DNA, 201 bp, Homo sapiens
gaaaaatgaaacccctgaccaactgagacagattgttagaatctcaccaacatatttaatttcttgacatctttgctttgttcttgctttcttctgaaacmaaaaaaaagaaaaaatattttactgacatcattggttaatatatacttatctttcaaagctcaatttctactatttcttttgttagaaacctacagattc

SEQ ID NO: 195368 - DNA, 201 bp, Homo sapiens
tatatatataagtaaatacatacatgaaaatgaaaactgaaaagaagagaacaaatctccctacctcatgaatctgatcattttgtcatgtctcttcttctgttatctatccatgacctattctctagacaaagttcaaagctttttaaaatctaaacacagtccacactttcctaactgcagtcttttactctcccttgg

SEQ ID NO: 195369 - DNA, 201 bp, Homo sapiens
atatatatataagtaaatacatacatgaaaatgaaaactgaaaagaagagaacaaatctccctacctcatgaatctgatcattttgtcatgtctcttcttctgttatctatccatgacctattctctagacaaagttcaaagctttttaaaatctaaacacagtccacactttcctaactgcagtcttttactctcccttg

SEQ ID NO: 195370 - DNA, 201 bp, Homo sapiens
aatatatatataagtaaatacatacatgaaaatgaaaactgaaaagaagagaacaaatctccctacctcatgaatctgatcattttgtcatgtctcttcttctgttatctatccatgacctattctctagacaaagttcaaagctttttaaaatctaaacacagtccacactttcctaactgcagtcttttactctccctt

SEQ ID NO: 195371 - DNA, 201 bp, Homo sapiens
ataaaacataattaaagagaagcagatagagcaggaagtaacagctgcctgtggtctccatggttgcaatgggtctacaaacagatagtaaaaacatggcwaatccttctggggtatttttaatagttgaattgaaaaaaaatatctgttacatttggcaattattgactttcatatgtttatatatagtcatgtggtgga

SEQ ID NO: 195372 - DNA, 201 bp, Homo sapiens
gacttgaacatattatcaataaagtgccttatgctatttcaggacaagttacaggattgattttcattagctgaaatcaggagaactgtttaaattacccraataattagaagatggctacataaaggatataatgctaaggaaatgaagataaaacataattaaagagaagcagatagagcaggaagtaacagctgcctg

SEQ ID NO: 195373 - DNA, 201 bp, Homo sapiens
ttgctattgtgaataatgccgcaataaacatacgtgtgcatgtgtctttatagcagcatgatttatagtcatttgggtatatacccagtaatgggatggcwgggtcaaatggtatttctagttctagatccctgaggaatcaccacactgaattccacaatggttgaactagtttacagtcccaccaacagtgtaaaagtg

SEQ ID NO: 195374 - DNA, 201 bp, Homo sapiens
actagaaaagcaagagcaaacacattcaaaagctagcagaaggcaagaaataactaaaatcagagtagaactgaaggaaatagagactcaaaaaacccttmaaaaaattaacgaatccaggagctggttttttgaaaggatcaactaaattgatagaccactagcaagactaataaagaagaaaagagagaagaatcaaat

SEQ ID NO: 195375 - DNA, 201 bp, Homo sapiens
atactaaaatgaggctttagacagaagtgaacttgtaacagaagtgaacacaagaaaatatttacagagagaaaaataaagtagaaaataaaatagccagrgccgcataaaatgtgacatttcctagacagaatacattgaaataatatgatcaacttagattttcttttctctagagaacttgtagtctatactcagctt

SEQ ID NO: 195376 - DNA, 201 bp, Homo sapiens
atcacccatccaccttttttaaaaaagtgatattattagaaaatacaattgttggaagctacgctagaaagattcatttatgggctattttcaaaagtttwcaatgttaggcatcttgtggggaagaaaagtgatcattaggtcatagcagaattttattttttagttattgtatttacttgtaattaataagcaaactca

SEQ ID NO: 195377 - DNA, 201 bp, Homo sapiens
caaactccaaattcacataggaacaatttatgtaggtatttgcatttctggatgccttattagtgatttcattggaatgctccaggaggattaattgtttrgatttgtacaagttctttttaaaagtcctgttgaaggaggtttctcattatataatgtatcactaactaaaactccctttttggcaagctgataaaaaag

SEQ ID NO: 195378 - DNA, 201 bp, Homo sapiens
tgcctttagagtcattgctaatttcacttcaaccccttgactatgtgtatatatagagagagagactatatacagagagagagactatatatatatatatatatatatatagactatatatagactatatatatatagtctatatatatagactatatatatatagactatatatatagactatatatatagactatatat

SEQ ID NO: 195379 - DNA, 201 bp, Homo sapiens
ttttggtttctaaattctcctagctcttccctacctgaaaaatagttaattccctcttcccgtaattctcacatccaggatcatcttctatttgtacctttgtttaaatatcacctcttaatagaggccatccctgaccacttaatttaaattatcactctctcattactctctatcatgccatcccactttattttcttc

SEQ ID NO: 195380 - DNA, 201 bp, Homo sapiens
ttcgttttatttcctttcttttttatcatgtaatgtaagatttattgacttcacatcagcatttaagtattgttgacttcctgtaatagtatttgggttgsgaaatggtgcatttctggttgcatgaaggatagttgtattatgtcagatattattatgaacttattattttctttatttgaagattatgtataatctcag

SEQ ID NO: 195381 - DNA, 201 bp, Homo sapiens
ttgcctttagagtcattgctaatttcacttcaaccccttgactatgtgtatatatagagagagagactatatacagagagagagactatatatatatatatatatatatatagactatatatagactatatatatatagtctatatatatagactatatatatatagactatatatatagactatatatatagactatata

SEQ ID NO: 195382 - DNA, 201 bp, Homo sapiens
tctctctcctgccaccatgtaagatgtgtctttcttttccttcaccttcctccatgattgtaagtttcctgaggcctccaaaaccatgtggaattgtacawcaattaaatctcttttctttttttttcttttctttataaataacccaatctcaggtagttgttgataacagtgtaaaaactgactaataacaggggattt

SEQ ID NO: 195383 - DNA, 201 bp, Homo sapiens
gttcagtttccatgtagttgagcggttttgagtgagtttcttgatcctgagttctagttcgattgcactgtggtctgaaagacagtttgttgtgatttctrttcttttacatttactgaggagtgttttccttccaactatgtggtcaattttggaataagtgtaatgtgctgctgagaagaatgtatattctattgattt

SEQ ID NO: 195384 - DNA, 201 bp, Homo sapiens
ctccagaccctgtttcccagggtatcaccagcagaggctgcagaacagcaaatattgcagaacggcaaatgttgctgcctgattcttcctctggaagcttsgtctcagaggggcacctggctgtatgaggtgtcagtcagcccctactgggaggtgtctcccagttagactactcaggggtcagggacccacttgaggagg

SEQ ID NO: 195385 - DNA, 201 bp, Homo sapiens
atcagcctgatactaaaatctggcagagacacaatgaaaaaagaaagctaccgactaaaatccctcatgaacatagacacaaaaatcctcaaaaaaaaaaagtagcaaattgaatccagcagcacatcaaaatgttaatacagcatgatcaactggactttattcctgagatgtgaggcgggttcaacataggcaaatcaa

SEQ ID NO: 195386 - DNA, 201 bp, Homo sapiens
atataattcactctgtgtatgagtccattctgttctaaccatcaatgattattgttatctagtacagcccatcctcaatcgtgtctctgtgattttatttrtactcacaagctggtgaggatttcctgattattgtaactagagtgcagatacttgtgaggaaatgacaggaaatgaggaaaggacagtagagaggggcag

SEQ ID NO: 195387 - DNA, 201 bp, Homo sapiens
attccctctttatctattaattggaatagtttcagaaggaatggtaccagctcctctttgtacctctggtagaatttggctgtgaatccatctggtcctgracgttttttggttggtaggtgattaattatggcctcaatttcagagcctgttattggtctattcagagattcaacttcttcctggtttagtcttgggagg

SEQ ID NO: 195388 - DNA, 201 bp, Homo sapiens
catgcctattagtctgttttctcactggtgataaagacatacccgtgactgggaagaaaaagaggtttaatgggacttacagttccacatggctggggagwcctcagaatcatggcaggaggtgaaaggcacttcttgcttggtggcagccagagaaaatgaggaagatgcaaaagcagaaacccctgatgaacccatcag

SEQ ID NO: 195389 - DNA, 201 bp, Homo sapiens
tgtttattttctcttttccctgaagatggctaaattgtggttgatctgtgttgcactaaatctcttttaaataaatctcacatttgacaaaaaagatatgytccagattgtctctgaagaaatacagtaatacaaatgaattgtcgcctaccaattcctttttcagtataaacctttaccttatttccaattagtccaagg

SEQ ID NO: 195390 - DNA, 201 bp, Homo sapiens
tttcaagcaattgtgaatgagagtttactcatgatttgactctctgtttgtctgttattggtgtataggaatgtttgtgatttttgcacattgattttgtrtcctgagactttgctgaagttgcttatcagcttaaggagatttgggtctgagacgatggggttttctaaatatacaatcatgtcatctgcaaacagggac

SEQ ID NO: 195391 - DNA, 201 bp, Homo sapiens
gattccttaattattctgcaccaaagtcagtcagcatatcccattcacctcttgctcagaggtgaatgtaggcacatagaccaatggaacataatagagarcctagaagtaaacccaaatacttacagccgactgatcttcgacaaagcaaacaaaaagccaaagtggggaaaggacacccttttcaaaaatggtgttgag

SEQ ID NO: 195392 - DNA, 201 bp, Homo sapiens
tagaattacaggaccaacaaaattacctgggcctgtaattttcttggaggatacttaactaccaactcaattggttttacagatagaggaccattgaagakatctattttgtatgtgtgtgtatgtgtctctgtgtgtgtgtgtgtgtgagagagagagagagagagtgagaaagagatttggtaatttttttcttaataa

SEQ ID NO: 195393 - DNA, 201 bp, Homo sapiens
cggggtttcatcgtgttagccaggatagtctcgatctcctgacctcatgatctgccctccttggcatcccaaagtgctgggattacaggcgtgagccaccrcgcccagccgtcagtttttcacttgtgttttaattacaagaaagtttctacaggtagtgtaattgttttataatttcataagattgtggaagaagtgatg

SEQ ID NO: 195394 - DNA, 201 bp, Homo sapiens
tttgttgtagtggctttgtctgattttggtattcaagcagtgatggcctcagggaataaattgacaaatgtttcttcttttttttaattttctggaagagrttctgtaggattactgtaatttcctccacaaattattcttagaattacaggaccaacaaaattacctgggcctgtaattttcttggaggatacttaacta

SEQ ID NO: 195395 - DNA, 201 bp, Homo sapiens
ggaaatatatatatgatatatctatggaaatatatatatgatatatctatggaaatatatatatggaaatatatatatgatatatctatggaaatatatayatgatatatctatggaaatatatacatgatatatctatggaaatatatatatgatatatatatggaaatatatatatgatatatatatggaaatatatat

SEQ ID NO: 195396 - DNA, 201 bp, Homo sapiens
accccaaatagtctcataggacttccttacttcattcagtcatctgctcaaacttcatttgctcaggcctcttttccttttgctttttttttttaataagmaaatggttttattcttaatttttagttcccatacagtatacaaatacacttttactctgataatacagctttgcaactagcaaagcagttgcgctaacac

SEQ ID NO: 195397 - DNA, 201 bp, Homo sapiens
ccttgtgaagcacatgatctctgtgacccacaccctattcatacaccccctccccttttgaaatcactaataaaaacttgctggttttatggctcagggggcatcacggaacctgccaacatgtgatgtcacccccagacacccagctttaaaatttctctcttttgtactctgtccctttatttctcagaccagccaaca

SEQ ID NO: 195398 - DNA, 201 bp, Homo sapiens
aaattatgataagcacacaatgttttttaactgttattttaagttcaggggtacaagtgcaggcttgttacacaggtaaacctgcatcatggaggcttgtygtacagattgtttcatcacgcaggtatttcattatggtactaggcttaatgattcctggttctctcctttcactctctaaggagcacaaattttaagtga

SEQ ID NO: 195399 - DNA, 201 bp, Homo sapiens
ttgtctgctctcaagccctgtctcctgataagatgttatcaatgacaatgcatgcctgaaacttcattaccaattttaatttcgccccagtcctgtggtcytgtgatctcaccctgcctccatttgcctttgtgatattctattaccttgtgaagcacatgatctctgtgacccacaccctattcatacaccccctcccct

SEQ ID NO: 195400 - DNA, 201 bp, Homo sapiens
tcactatggagaacagtattgaggttcttcaaaaacactggagatagaactacccaggaatcccattgctgggtatatatccaatagaaaggaaatgcgtrtatggaagagatgtctgcactctcatgtttactgcagcactagccacaatagccaagatatggaatcaacctaagtgtccatcagtggttcaatggataa

SEQ ID NO: 195401 - DNA, 201 bp, Homo sapiens
ttttagtagagacggggtttcaccgtgttagccaggatggtcttgatctcctgacgtcgtgatccacccgcctcggcctaccaaagtgctgggattacagkcgtgagccaccgcgcccggccagtgtcaacatttttttttttccgctgtgtgttctggggcactgatttcacttccattttgtaatttcaggcagaaaaa

SEQ ID NO: 195402 - DNA, 201 bp, Homo sapiens
ccatatttctcttctttcaaaagcaaatgggaaaaatattgctgaattctttttctcagcaaggaacatccctgagaaagagaatgcatccctgagggtgracctctgaaatggccacttcagggggcggccgtcttttatggtcgaagctgtagggatgaaataagccccagtctcccgtagtgctcccaggcatattag

SEQ ID NO: 195403 - DNA, 201 bp, Homo sapiens
acacttatcacttccccaatcaatagccttgtgatttcctatgcctgtctttaatcgcttaatcccgtcatcctcgtaagctggggaggatgtatgttgcytcaggcccctgtgatgattgcattaactgcacaaattgtttgtagagcatgtgtgtttgaacaatatgaaatctgggcaccttgaaaaaagaacaggata

SEQ ID NO: 195404 - DNA, 201 bp, Homo sapiens
aggacattacttcaaattagatgatatggagagggagagaagtagtaaaaagaagttgccaacgagttccaatattccttacaagaaggaaaaaaaaaaaagaaaatagtcctctctactcaaaaagaaaaggaaagctaaaagcatgcataaagcatgagtagataggtagcccctagaataaaatgcaatcatgcctaa

SEQ ID NO: 195405 - DNA, 201 bp, Homo sapiens
gtctttactgcaatctctgaacataaaatgtgaagatttcatggacacttatcacttccccaatcaatagccttgtgatttcctatgcctgtctttaatckcttaatcccgtcatcctcgtaagctggggaggatgtatgttgcttcaggcccctgtgatgattgcattaactgcacaaattgtttgtagagcatgtgtgt

SEQ ID NO: 195406 - DNA, 201 bp, Homo sapiens
gtataggatttgtaacattaaacacccctgtggttcatctcgtagctctctgacaccctccctctacatagtattgttcctcccagaatgattcgagcttyagaaaatgatctaccagggatttttctttcttcttttcgattatcattgtgggttcaaggttgggaatattcaaggaaaatggatatctttatgagaata

SEQ ID NO: 195407 - DNA, 201 bp, Homo sapiens
cttggtttataaacatatcatttttcactaataaaaaatggctcagttttggcattcagcattggcttgacgagaagaaacccctggtattggccatcctytctctcatatgtctctgttcccgtggctaatcttttcatggccccattgcaacagtactgcatagtcaaggataaggattggctgacattcacagaatgt

SEQ ID NO: 195408 - DNA, 201 bp, Homo sapiens
agactgatttgctaaagttggaacaggaattaaaagaagttaaagattgtgtaagcaaaaactcagttgtatgtaagcaaacccagttccccgtgaggaakagaaaaaggctggagtcctttaaaattaactctctgtttttctctctgtggctagtgagccttatttctccctttcccaggcattgtgaagactgtttct

SEQ ID NO: 195409 - DNA, 201 bp, Homo sapiens
ataaaaataaaaactaaataatatccacattcaaaaggtgagcaacttatatatagtttcatatataagacgttttctttttttgataatttatttatttwttttttatttatatatatactttttattttaccttaagttctagggtacctgtgcacaacgtgcaggtttgttacgtatgtatacgtgtgccatgttggt

SEQ ID NO: 195410 - DNA, 201 bp, Homo sapiens
atggaatatctatctatctatctatctatctatctatctatctatctatatgtttattaagtattaactcacatgattacaaggtcccatgtattagttckttttcacactgctgataaagacatacccgaaactgagaactaaaagagatttaattggacttacagttccatatggctggggaggcctcagaatcatggt

SEQ ID NO: 195411 - DNA, 201 bp, Homo sapiens
cagttgaagtctgaagtctgtaatggagctcaggacaccagataggatttcgcatataataatcttatcatatttttatagtcaaaaatatgagtgagccrggcgcgcggctcatgcctgtaatcccagcactttgggaggccgatgtgggcggatcacaaggttaggagttcgagaccagcctggccaacatggtgaaac

SEQ ID NO: 195412 - DNA, 201 bp, Homo sapiens
acatcctgcacatgtacaccaggattaaaataaaaataaaaactaaataatatccacattcaaaaggtgagcaacttatatatagtttcatatataagacrttttctttttttgataatttatttatttattttttatttatatatatactttttattttaccttaagttctagggtacctgtgcacaacgtgcaggtttg

SEQ ID NO: 195413 - DNA, 201 bp, Homo sapiens
ttagtggttatatatgcaaaggaatataaatcattcttttacaaagatacatgcacacttactttcattgcagcgctattcacaatagcaaatacatggawtccatccaaatgtccatcagtgatagactggataaaaaaaatgtggtacatatacactatggaatactatgcagccacaaaaaaggaataaaatcatgtc

SEQ ID NO: 195414 - DNA, 201 bp, Homo sapiens
tttgtaattacaaaattatttgtttcattctatattacaaatgctcctaggatttattaagtaatggcagaaatatgaaccaaaggttgataacacacataggtcattgcctaaacttctgtgtctataatcttcatagggagattattcttcaagttattctgagataaatagataataaacacatatgaatttttcacc

SEQ ID NO: 195415 - DNA, 201 bp, Homo sapiens
tcaagatgagatttgggtggggacacagaaccaaatcctatcagtctgcttctctttccccacaacaggaactcactcccgactctgggtcaatctaagtkggggagagtgtctgcagaggctgggtgtctccatatgtcctcctatgcttccaatcaccataggtgcgtttccactttcccattgttttcagcactctcc

SEQ ID NO: 195416 - DNA, 201 bp, Homo sapiens
aaaaagtcaagaaacaacagatgctgggaaggttgcagagaaataggaaaatggtttaacactgttggtgagaatgtaaattagttcaaccattatggacracagtgcggggattccccaaagatctagaaccagaaataccatttgacccagcaatcccattagtggttatatatgcaaaggaatataaatcattctttt

SEQ ID NO: 195417 - DNA, 201 bp, Homo sapiens
acttattcttagttcagccttgggagggtgtatgtgtccaggaatttatccgttcatcagaaaaggtctaatatccagaatctacaaggaagttaaacaaatttataagaaaaaaaacccattaaaaagtgggcaaagatattaacagacatttctcaaaagaagacattcatgtggccagcaaacatatggaaaaaaagc

SEQ ID NO: 195418 - DNA, 201 bp, Homo sapiens
caaaccagtagatgaaacttataggtaagagccagctgtggccaacatggctgggcatattcttgatctttgtttactgtaagcagttctttgctgcctargcaatgggctattctgtggagtgcaaagtggtcttatctccctgcttgcccacccctgtccctcaacccaagaagcaggtgctggggcaaagataggcag

SEQ ID NO: 195419 - DNA, 201 bp, Homo sapiens
aatattcataggctctattatataaaatgcctaatttcaatttttagccaatatattcaacagcagcaaaacgatgattaaaataataaagaagcattttsgtccacatgggagagaggacaactatgactatattttagtcaagtaatggtgatagcttgtatttatgcaacactctcaactaggcattgttctaaacat

SEQ ID NO: 195420 - DNA, 201 bp, Homo sapiens
tgtatttctggtagaattcagctgtaaatccatctggttctggtcttttatttggttggtaggctattactgcctcaatttcaaaacttgttattggtctrttcagggctttaacttattcttagttcagccttgggagggtgtatgtgtccaggaatttatccgttcatcagaaaaggtctaatatccagaatctacaag

SEQ ID NO: 195421 - DNA, 201 bp, Homo sapiens
ctagctgcctttaacccttttcccatttagaaaaaaaagtgcagctcgctgccagcactcatttaattttatataaacagactctgaggctaaagcaaatmtgactgattttaaatgtgaaaatagagtataaaaactgttcttggagttatttctaaacataactaacatgagaattgtctgaatcatcagaatcgccta

SEQ ID NO: 195422 - DNA, 201 bp, Homo sapiens
ttgtcataaatggctattatattgaggtatgtttcttaaatacctagtttattgagagtttttaacatgaaggaatgttgaattttattgaagtccttttytgcatctaattaaataaccatgtgtttcttgtctttagttctgtttatgtgatgaattacatttattgatttgtgtatattgaaccagccttgcatcctg

SEQ ID NO: 195423 - DNA, 201 bp, Homo sapiens
actaccttttttcatcccattgttttcagtctatgggtatctttatagatcaaatgtgtttcttataggcaacagataattgggcctcacttttcttctctgtgttatcttgaaatcattggttgaagtatcctttcattaagaatgctgaaaataggcccccactctctcctggcatgtaagatttctgctgagaaattc

SEQ ID NO: 195424 - DNA, 201 bp, Homo sapiens
tgaccacaggatgagtccaggaacacactggacccactgtaagtcagacctcagctaaaactccattaattacctgacctccataagcccctactttaacwggaggaccacaataaccttttgggtcccctggagtcaataacttagagccagtgtccagtagttcccaaaaggtctgatcattcccctatccccaaagca

SEQ ID NO: 195425 - DNA, 201 bp, Homo sapiens
gactaccttttttcatcccattgttttcagtctatgggtatctttatagatcaaatgtgtttcttataggcaacagataattgggcctcacttttcttctctgtgttatcttgaaatcattggttgaagtatcctttcattaagaatgctgaaaataggcccccactctctcctggcatgtaagatttctgctgagaaatt

SEQ ID NO: 195426 - DNA, 201 bp, Homo sapiens
gcttgtgacttttgcactttgactttgtatcctgagactttggtgaagttgcttaccagcttaagaagcttttgggctgagacgacaaggtttcctagacmtaggatcacagtatctgtatacaaagacaatttgacttcctctcttcctatttgaaaagaggaatttttatttctttctattgcttgattgtgctggaca

SEQ ID NO: 195427 - DNA, 201 bp, Homo sapiens
cacccaatacaggagcacacagattcatgaaacaagttcttagagacctacaaagagacttagtgttgggaaaaagctaaatgttgggaaaaaagctgagrcagggcttgcatgtctgacataatgtccagggctcagggcataaaccgctcgtggcatctggaatgagtctagacttgctggctccttgcttctagctta

SEQ ID NO: 195428 - DNA, 201 bp, Homo sapiens
tatcctattgattttggtatgtgtgtttccattatcatttgtttcaaaatgttctcaattttcttcctaattccttcattgtcccactggtcattcaagarcatctagtttaatttccatatacttgtatagttttcaaaattccttgtgattttaatttctggttttgttccattgtggtcagagaagtttcttgatatt

SEQ ID NO: 195429 - DNA, 201 bp, Homo sapiens
aaaagattaacaccagacaaagcaaaaatatttgccaaactcatatctggcaaagtcctgtgtctagaatacacaaaaagaaaaatcaaaattcaacagcyaaacaagccaaaaaatctaattataaaatggcccaaattatgaagaggatataaaaatggcaaataagcacatgaaaagctattcaacattattatgcag

SEQ ID NO: 195430 - DNA, 201 bp, Homo sapiens
ttttatgtcctcgagtacccaatgtttagtttacacttatacatgagaacaagcagtatttggttttaatttattggtatatagtcgctcatagtatccaytaatggtcctttgaatttctgtagtatcagatgtattgtctcctttttcatctctgattttgtttatttggatcctcttgttttttctttgaatgggtaa

SEQ ID NO: 195431 - DNA, 201 bp, Homo sapiens
tagtcctgaagcttagctctgtaggaagaagtccatcagatctgggattcccccagactctaacaattcaatacatgtgggacctgggaaaagtcattttyttctctctcttagccccattctcctcatttgtaaagtgaggatatataaatctgcctagattatgataatcttatgagataacctgtgaatgtaaaataa

SEQ ID NO: 195432 - DNA, 201 bp, Homo sapiens
atacatattaattttaattgatattaattttaattgtaaagcatgcttctttgaaacacatttatgcgtcagctgaagtagacagagagagagagagagayggctgtggcttcttaaattaatttaaggctttcttaaatttaatttaaaccttaaattaaatttctgtgtaatttggcattttacagcaaaagtagtcat

SEQ ID NO: 195433 - DNA, 201 bp, Homo sapiens
ttacttagaagataatttatttgaagaatttactttttaaaaatgcagtcgtgtctgtgaaactatgcaaccctatggccagaatttatgctctatgtatyttttagactacattaaacgaaacaactgcacattagtcctgaagcttagctctgtaggaagaagtccatcagatctgggattcccccagactctaacaat

SEQ ID NO: 195434 - DNA, 201 bp, Homo sapiens
agtgtgccaggatgcatcttgggagcaaaattcactattcaggaactgttcaagtgtcttttttttatatttcactactattgttttattatccacaatarccatgtttgtttccttagacatggaatgctaaaactatgttaaaatgcatacttcctctggttatttccccttggatcacagagaaacaaatggtaacct

SEQ ID NO: 195435 - DNA, 201 bp, Homo sapiens
aaaatgaaaaaggggatatcaacactgatcccacagaaatacaaaagaccatcaaagaatactgtaaacacctctacacaaataaactataaaatctagargaaatggataaattcctggacacatgcatcatccaaagactaaaccaggaagaagtcaaatccctgaatagggcaataacaagttctgacactgaggcag

SEQ ID NO: 195436 - DNA, 201 bp, Homo sapiens
taaaaattaaatactttaattttgttacccaaaaatattttctggtaatggaaaaccataattgtgtttttaattatgctcacgctgggaagataacttcrtggggtaacatattgatttgaatatatccttccttcagttaataagtccctcctttttttctttcatgcctattaattttgagtagaatacataactcca

SEQ ID NO: 195437 - DNA, 201 bp, Homo sapiens
atatcagtagattaagtattgccagaacaaatttaatactttaaaggagcacagttaattagatactgaacaatataatatccacaatatgtaataaatawttactagatatatggagaagcaagaaaaaagtatcatcattagaaacaaatacctatgactggtatatcaggattagctgtttcaatattttattttgtt

SEQ ID NO: 195438 - DNA, 201 bp, Homo sapiens
tcttttcagcaacatcccactactggtaccaacttactgtattagtttgttttcacactgctgataaagacatacccaaaactgggaaccaaaagaagttkaattggacttacagttccacatggctggggaggcctcagaatcacagtgggaggcgaaaggcacttcttacatggcaatggcatgagaaaaatgaggaag

SEQ ID NO: 195439 - DNA, 201 bp, Homo sapiens
acttccacctgttccttgcttcccttggctctgtggagtgcgcagccccctccccgcctcccccgctgcagcccgcgtcttcgcagtggcagctccagacrggcctctcctgcaatcaaaacggggccctcaaacaacaaaaacaaacaaacacggctcctatcccctatctctcaccatatacaaaaataaattaaaaat

SEQ ID NO: 195440 - DNA, 201 bp, Homo sapiens
gagttaatatatcaaaatactattaatatctgaagttatataaataattgttgccttcttttgccttttgttataattttataaatgattattcatatatktaattatttataattaattttatttattatattcaattcaattacttccaaaatggaatttgaggtggtttaacaatataattatacttttatttaaact

SEQ ID NO: 195441 - DNA, 201 bp, Homo sapiens
ccgggaggcggaggttgcagtgagccgagatcttgccactgcactccagcctgggtgacagagcgagactccgtctcaaaaaaaataaataaataaaaaawaaaaaataattactgatgaataagaataatggtaacatttgtataagattgagagggagcacagaagacacacatcttagtcacagctggaagacagaaa

SEQ ID NO: 195442 - DNA, 201 bp, Homo sapiens
tgatgagtgaagccagtgtttccaactagcagcattgacattttggatgatgccgatttctatagtgcaggactgtctcataattcctaggcattaaatatgcctatggctaatcaccatgaaagacatcattctccatacatcatggaggggagcagcactgccacccattgagaatcagtgattactataccctccaag

SEQ ID NO: 195443 - DNA, 201 bp, Homo sapiens
atgatgagtgaagccagtgtttccaactagcagcattgacattttggatgatgccgatttctatagtgcaggactgtctcataattcctaggcattaaatatgcctatggctaatcaccatgaaagacatcattctccatacatcatggaggggagcagcactgccacccattgagaatcagtgattactataccctccaa

SEQ ID NO: 195444 - DNA, 201 bp, Homo sapiens
aatttttctaagctcaaaccataaaaatataacacaccacatgtaataaataaaggagttattgagacagatatataaaacattttaaaaataattagagwattctgatataaactcatataaattataaatgaattataatacaatttattttaaaaaggtagaatttctataaatgcctaactattctcttctaactat

SEQ ID NO: 195445 - DNA, 201 bp, Homo sapiens
acattgaagcagaaatcaataatagaatgaccacaggaaaatctctaaacacatgaaaattaaacacacactcttaaatagtttatgtcaaatataaaatmttttaaaaaatgtagactagaatgaaaatacatatggagcatacaaaaatgcaagagatgcagctaaagcaatgctgagagaaaaatgtatagcatgaag

SEQ ID NO: 195446 - DNA, 201 bp, Homo sapiens
taaaatatataaatattttatacacatatataaatatatataaatatataaatatatataaatatatgtataaaatatataaatatataaatatttaaaawatatatatataaagtatatatataaaaaagtatatatatataattaaaccaaatttctaataatatttcagagcaatgataatattcagtggactaatat

SEQ ID NO: 195447 - DNA, 201 bp, Homo sapiens
tacatacagccttacaggtaccgaaacagagacaggctgataaacacatgtggtgacagaataacagatagaaattaaaaatgggataggaatagtcagaycccatgacaggggcaggcaaactgaaagacagtgtgaaacataccacagagagagatggatggatagacaggtagaaaagcacaaacgggcatacagggg

SEQ ID NO: 195448 - DNA, 201 bp, Homo sapiens
taacccgagaggcggaggttgcagtgagctgagatcttaccactgcaacagacagagactctgtctcaaaaaaaaaaaagtacatatatatatatatatawaaagtatatatatataaaatatataaatattttatacacatatataaatatatataaatatataaatatatataaatatatgtataaaatatataaatat

SEQ ID NO: 195449 - DNA, 201 bp, Homo sapiens
ctcccccaaaaagtcattttccagaccagtattatagagattatgccctgtgtttatgtcttggaaagggggtcttagaacactttctctgtttgctcttytgtgtttgaatactgcccaggggatactcagctccagtgtcatagatgagcctacacaaaattcttagttcagctaaggcaagtcatgcccaaccaaggg

SEQ ID NO: 195450 - DNA, 201 bp, Homo sapiens
tccgggaagtggaggttgcagtgagtcaggatggcgccactgcacttcagcctggcaacagagtgagactccgtctcaaaaaataaataaataaataaaamcaaatgtaattggacaaaaagcctgtcatctaatacctggcctggacagcggaaatcccagacctgcctgttcagattcttcttgacctccctgtgagac

SEQ ID NO: 195451 - DNA, 201 bp, Homo sapiens
aattatatataattgtatataatatgtatttgtatatatttatatataatatatattttttgtgtatatatatatatatatatatatataatatatataaatacatacatattacctatgtatgtccagttgtttcagcaccatttgttgaagggcagtctttccctcactgaattgctttgcaactctattaaaaatcaa

SEQ ID NO: 195452 - DNA, 201 bp, Homo sapiens
ttaagttctttgtagaatttgcacgttctgcacatgtatcccggaacttatagtataataaataaaaaagaaaaagaaagaaagcttcttttgccccccccaaaagaaagaaattaataaccaaaaagttttgaataaaaataaccatggaatccagccaaactatgaaatagtgaggaacaattctcagaagaaaagatg

SEQ ID NO: 195453 - DNA, 201 bp, Homo sapiens
aataattatatataattgtatataatatgtatttgtatatatttatatataatatatattttttgtgtatatatatatatatatatatatataatatatakaaatacatacatattacctatgtatgtccagttgtttcagcaccatttgttgaagggcagtctttccctcactgaattgctttgcaactctattaaaaat

SEQ ID NO: 195454 - DNA, 201 bp, Homo sapiens
taataattatatataattgtatataatatgtatttgtatatatttatatataatatatattttttgtgtatatatatatatatatatatatataatatatataaatacatacatattacctatgtatgtccagttgtttcagcaccatttgttgaagggcagtctttccctcactgaattgctttgcaactctattaaaaa

SEQ ID NO: 195455 - DNA, 201 bp, Homo sapiens
aaaagagacccagtctcaagagtcgttcttagtagacctgagactcttcccctaagaaaagtgaagacatacacttcacattcaacaacataggtaggctratagttaaaggatggaaaaggaaatgctatttaaaacattaaagataaaaaagcatgtgtgactttattaatatataatatatacggcctaataaagtag

SEQ ID NO: 195456 - DNA, 201 bp, Homo sapiens
caaaacccactgttgttctaaaaaaatttttagtggcacatgttagcaaattctcacataaaagataatttttatcttatctaattttttttaaccagaakgtattaaaaaatgacaaatttctagaacacttaattttgctggtacgtaaccttcatattaaagcttgtttaggtcagtgtgagaaagattgaaggttaa

SEQ ID NO: 195457 - DNA, 201 bp, Homo sapiens
aataaaagtatttgagtcctctatgaacaagcaaggcaacttttagaagtagcacatttattgctgaagtgtcaggtaaagtaaaatgtggaatgatttcraacaataagtgtaaataaaaatcatttaattcatctagatgttaggaatattttattgatccaaggtttgtcacagtggactaaatttgaagaagtataa

SEQ ID NO: 195458 - DNA, 201 bp, Homo sapiens
cactaattatcttttaatctgtgcaaaagaatggtttcacctgttcactgatttttaatgtctttttaatttcttcatgttatccaaatttgttatatttrttctgatttgttattttataaatttgcttatttttaagactattttttatgttcttgatgattaatattctgttattggtcttggaaatgctaattctct

SEQ ID NO: 195459 - DNA, 201 bp, Homo sapiens
ttgactgcctctgaaactactattttgcattggataatttaggaaaaatctattattacaagtttctagagaaagaataaattatgtacaatttgcagtayagtttttttcttttttgcatttgaatccttagaagactgaaaatctatgcagctggcaagaatttgattaaatatagcaacctatactacaccacagttt

SEQ ID NO: 195460 - DNA, 201 bp, Homo sapiens
atggctagatgggacagaaagcacccacttaatgataggcagttcaggtcacatggtgactttgatgacccatattcatatgttcagtttctaccaaagcrcagtaacaggccaagagctgtctctcaagaagagagtagttatctgcagaagatagtaggaccttgttccaaaatcccagaggcctctgctgtaattcac

SEQ ID NO: 195461 - DNA, 201 bp, Homo sapiens
actgtccttttttgtattttgcttctgtttttgacttaaagaagtctattttgtctgatataagtatagctgtccctgctttctttttgttcccatttgcrtggagtatctttttttcatccacttaccttcagcctgcatgtgtctaaagagagatttttgtagacagcatttagataggtctattttaaatattcattt

SEQ ID NO: 195462 - DNA, 201 bp, Homo sapiens
tggtgggtgcacatatatttataattgttatattttcctggcaactcttttatcgttatacactgtccttttttgtattttgcttctgtttttgacttaaagaagtctattttgtctgatataagtatagctgtccctgctttctttttgttcccatttgcatggagtatctttttttcatccacttaccttcagcctgca

SEQ ID NO: 195463 - DNA, 201 bp, Homo sapiens
caaataataagtaaaatattttagtaagtgctagaaaacatattaaaatggcttatcttttctctaattctgactgcaggcagaaattacctttaaaaggkttatcaaatacaagtgatgtttaaaattagaaaattaaaaataaattccaatttcatgccaaagtttttaatatgcatattttgtgtagtatactagaat

SEQ ID NO: 195464 - DNA, 201 bp, Homo sapiens
atggtgggtgcacatatatttataattgttatattttcctggcaactcttttatcgttatacactgtccttttttgtattttgcttctgtttttgacttaaagaagtctattttgtctgatataagtatagctgtccctgctttctttttgttcccatttgcatggagtatctttttttcatccacttaccttcagcctgc

SEQ ID NO: 195465 - DNA, 201 bp, Homo sapiens
taagtaaccacatagctattaaacagggtacattgagaaacgagtttagaattaagacagtactttaagggacagatgtgcttactttcagtgggagcaargggttgaaacaataaaaggtgggtgggagccagctgtggacaacaagcgtttttacaagggcatgtttctcttttgtctctgtgtttttaattctcttac

SEQ ID NO: 195466 - DNA, 201 bp, Homo sapiens
gatggtgggtgcacatatatttataattgttatattttcctggcaactcttttatcgttatacactgtccttttttgtattttgcttctgtttttgacttaaagaagtctattttgtctgatataagtatagctgtccctgctttctttttgttcccatttgcatggagtatctttttttcatccacttaccttcagcctg

SEQ ID NO: 195467 - DNA, 201 bp, Homo sapiens
ctactgttttctgcatatcacttactagccttttttaaaaaatggataaaatgttttctttctttcacctgtattttattttctgtgtttcttttgactawtttttgcttctctttttttatgtctcattttctccttaatcccttttaactctctttaaaaattgtcttttttattttttgcccattttctatcctggat

SEQ ID NO: 195468 - DNA, 201 bp, Homo sapiens
tggagaacagtgccttgcatatagtaaatgttcaattactattgcctctctttagtattttcattgttttcattgttactgacttgcttagtattatgtgkctgtgtcttttaattcattcaggagtttcattaaaaattgctattcactaacatgaaaactctggtatagtacaaacacaattttgggaaccaatcatac

SEQ ID NO: 195469 - DNA, 201 bp, Homo sapiens
gtaaaaggcaaaaaaatggaaaagagaaaagagtataaagtcctcaaagagacttttaagtacttcttttttcatgaactttacaggaattgaggaacagsgccttaaattaaaatttccctacggattcctccatttggcaagctttctctcctttgtggaaccttttccctccactcactttaaagcattaaaaaagtg

SEQ ID NO: 195470 - DNA, 201 bp, Homo sapiens
gtatgggagggctgagtgctgaaaagaatccaggcctctgatagttttgtacagacgctacatcaaccaaccctgaaaacgctctacctttaaattgttayattagactgtacctttccttattttcttgtactttcattgaaaacatatgtactttcagtgacacatgaaccatgtatttctgtgatgtcagtaggatat

SEQ ID NO: 195471 - DNA, 201 bp, Homo sapiens
cttcaaaatattttgctgaatgagtatggataaatacgtcagacttatagaaaatctaaagaacaaaatggtataatttgaaagttacaaaaattttgtgyttaattttgcaagtaaataagtccatgcttagtttaataattcatattatgtagagaaataatgaataagccaaactgacaaatagttataaatattcta

SEQ ID NO: 195472 - DNA, 201 bp, Homo sapiens
cctttttggctcatctaggatttgagtctaattagaggtctacaagcaaggtgggtgatgggggtggattctgagtagaattagtaaagtcttgcaaggcrtctcaaagttcatttaatttcctcagggaaggcagctgtaatgtcctcaaacaggtgtggaagggctgttgctaaagatgactgcagaattttggaattc

SEQ ID NO: 195473 - DNA, 201 bp, Homo sapiens
cattaataggcaacccaacatagatatagacatggacatatgtgtatatacttgcattgttcttacacaggaattttaccctatatgttcatgaggtaaarttcagtaacaaaccattttcttttgtttattaaggatacttctaaaatatatccagcaatgcattttttattatataaatgtaaaaaaaacatcgatatg

SEQ ID NO: 195474 - DNA, 201 bp, Homo sapiens
taaaggaatgatgtatgatctgatgaaattataccattcataaatgtgaaaatttgttcattaatggttattattgttacttgaatattgcaattaacagsagaaacacactttaattatgccaatttgattatcaaagaaaacctggaaaagttgaattatcctctttacttttgatcataattattgaatgacataatc

SEQ ID NO: 195475 - DNA, 201 bp, Homo sapiens
acactagacttttgagagtcctcaattgcagccagtttttataacctaatcctgccctgtctcctaccagatcagcatgaaataaatgtgacctcatgacmtaaactaagccctggaatctggagtagcatcatgaaaactctaatcagttttatttggatgcctatactggggagtcacataacacaggaagtcgatagc

SEQ ID NO: 195476 - DNA, 201 bp, Homo sapiens
aataatgttttttgtttgtttactttttgaagaatttcttcttcatggacagctttacttatttgttaaatactcattcttattaagcattaccctccatrtttggaactagacatttttggtttttgttaaataaccttttaaaatctaagccttaatagtgcaactttaatcattattataattatgatttagagcaaa

SEQ ID NO: 195477 - DNA, 201 bp, Homo sapiens
aattttctactcaaaatcttattgggggacatggtcaggaaaataaagaataaagatcagagaaacaataaaattatttgttctttttttctcacccttakgattttttaaataagttattggcatacaggtggtatttggttacaagagtaagttctttagtggtgatttgtgatattttgctgcacccatcgcctaagg

SEQ ID NO: 195478 - DNA, 201 bp, Homo sapiens
attttctactcaaaatcttattgggggacatggtcaggaaaataaagaataaagatcagagaaacaataaaattatttgttctttttttctcacccttatkattttttaaataagttattggcatacaggtggtatttggttacaagagtaagttctttagtggtgatttgtgatattttgctgcacccatcgcctaagga

SEQ ID NO: 195479 - DNA, 201 bp, Homo sapiens
agagtaagttctttagtggtgatttgtgatattttgctgcacccatcgcctaaggagtatacactgctccatatttgtagtcttttttcccttgccccccsaccactcttccccccaagtccattgtatcattcttgcctttgtgtcctcatagcttagctttcacatgtcagtgagaacatatgatgtttggttttccat

SEQ ID NO: 195480 - DNA, 201 bp, Homo sapiens
tgtattttttctaatagaaagaattgcacattaattcattgaaaacccacatagttttaaagaaattttatcaggtgggaatgcaagaacagggacagtawaaatttaaaaggaagttggatttcaggatttctgtgagcagaaagctagctgcgaacactcagctgcaaacaccagtcacttcttatgtaaaaggaagga

SEQ ID NO: 195481 - DNA, 201 bp, Homo sapiens
ggattgtttttctcttactgatttgtttgagttcgttgtagattcttgaggaagtcaaactgtaactatttgctaacaatatgatcgttaccttgaaaacyctaaggtctcctccagaaagttcctagaaatgtacatctgacaaaaattttaaagagtctcatttttttcattttataattgatttcttaatttactcag

SEQ ID NO: 195482 - DNA, 201 bp, Homo sapiens
aaatacatgatcatccagaacctttcctcttgtatttgattaggagatattttcaatgtattttgaatatttccattgcattcaatggagacatttcgcgyagttttcttgccacgtcacaccacaaaacatcagtgctctctttactactagaaatagagccattggtacctttatatctaaccagattagagcaccaat

SEQ ID NO: 195483 - DNA, 201 bp, Homo sapiens
cttttcaggttgccaggtctactgttttaaattatgtacagatagatttttgtaagaaaggaaaaaaattctcaaagaagtgtgtacttgtgtgtcttttrtagaatgcatctaaacaagttgtctaaaattatacatcttctctttatttacgcagcttattctcccttttttgttatctcagttttctttctctctccc

SEQ ID NO: 195484 - DNA, 201 bp, Homo sapiens
atcaaatacatgatcatccagaacctttcctcttgtatttgattaggagatattttcaatgtattttgaatatttccattgcattcaatggagacatttcrcgcagttttcttgccacgtcacaccacaaaacatcagtgctctctttactactagaaatagagccattggtacctttatatctaaccagattagagcacc

SEQ ID NO: 195485 - DNA, 201 bp, Homo sapiens
ctcccatagtttttttttttttttttttttttttaacaggagaaaaagaaataaggcaggaacagtgtaggaaagaagaaaacaaaagtaaaagaaaccamcaaagagagaaaggaaaggagaatggaaggaagaggaaaaaaaaagaaaatgtgataatttattcaacaaactaagtaatgtatatccagttgacttcaa

SEQ ID NO: 195486 - DNA, 201 bp, Homo sapiens
accatcagataaaatggccttttggtgaacatttgatttgtcgagagaatttcctcctaattcaagaatatctttgaaaatcttgagataactaattattkatttgtatgaaatatttttagtgaagcgcaccttagataaacaaccaatctttaatacgttcaagcctagagccctgaaaaatgacattttttttttttg

SEQ ID NO: 195487 - DNA, 201 bp, Homo sapiens
gtgctttaaaaaaggatctagaaatttcacatatggtgacatgtcaaatatgtcacagtaggtatggtattggtaccctatggttggaaggcactagtgtsaggctgattagtctatccaacaggtacctcttctttgagacctttctgtatccttctctctcctataagcctgagtcctttggccatagctaaatgattt

SEQ ID NO: 195488 - DNA, 201 bp, Homo sapiens
aaatgttgacattgatgaagccaggatcagctctactatgtccactaaaattctttctgtatcacaattttatgcacttagaaaaacaaatgaagctaccygttttattaattaaataataaatatgagttgtctaccattacattttctaattatagtgtttttcatgtcaaaataagtttgagaaatagaatattgtat

SEQ ID NO: 195489 - DNA, 201 bp, Homo sapiens
caatgtcctcccatagtttttttttttttttttttttttttaacaggagaaaaagaaataaggcaggaacagtgtaggaaagaagaaaacaaaagtaaaaraaaccaacaaagagagaaaggaaaggagaatggaaggaagaggaaaaaaaaagaaaatgtgataatttattcaacaaactaagtaatgtatatccagttg

SEQ ID NO: 195490 - DNA, 201 bp, Homo sapiens
aaattggcctaacatggtggtgtgcgcctgtggtcctagctactcgagaggcagaaggattgcttgaacccaggaattggagcctgcagtaggtttgatcmctgcactccagtcttggtggcagagtgagaccctgtctcaaaaagaaaaaaaagggggggaggatgatttctaattgttgttctataatgtcaatatcat

SEQ ID NO: 195491 - DNA, 201 bp, Homo sapiens
gaggcagaaggattgcttgaacccaggaattggagcctgcagtaggtttgatcactgcactccagtcttggtggcagagtgagaccctgtctcaaaaagamaaaaaagggggggaggatgatttctaattgttgttctataatgtcaatatcatgagaaaagtgtgtgcagaagctttctggtaaaggcagaatttaggta

SEQ ID NO: 195492 - DNA, 201 bp, Homo sapiens
cctgagcaaaatctttctgttctttctttttataatcctaaaataattttcattcttttttacatcagtattttcagaagtgatcaaattaaataggtaargtaaataaatgactaccaaattagcacaaatcccacctcactaacttttctgtgattattagataagcccaaatataaacatatttaatttcctgacatg

SEQ ID NO: 195493 - DNA, 201 bp, Homo sapiens
accctgcttcagcttgccctccttgggctgcacccactgtccaaccagcccaataagatgaaccaggtacctcagttggaaatgcagaaataacccgcctyctgagttgatcttgctgggagctgcagaccaaagctgttcccattcagccaccacagacagtgtctgtctcttttcttgaaagtgaagcacctaaccaag

SEQ ID NO: 195494 - DNA, 201 bp, Homo sapiens
aaataagatagttattgaggtttagtcagaatctggccaactttcctgataagagcagttgtcagatacaaacaggtgagttacaggctgtgtgagctctktcttcattctggtcacatttccactcacttttgtagcgtcctatattccttcaagtatgtagaatgtggataccatcttttcctggtttttagaactgat

SEQ ID NO: 195495 - DNA, 201 bp, Homo sapiens
atttccactcacttttgtagcgtcctatattccttcaagtatgtagaatgtggataccatcttttcctggtttttagaactgatacaaatattatcaatgrcaagagactggggacagacccagaaatatgccctcacctctacagggaaatttatttcagcattatgtcttctccatgcttggtaaaattatagcactaa

SEQ ID NO: 195496 - DNA, 201 bp, Homo sapiens
agaattccaagattggctttttcccctcttgttaatttcaatataaaaaacttgtattttttcttttcttctctctctctctcttttttttttttttttttggcctggctgtctaaagcattttctgaataagaattcatgtttgatatcaagtaaacttactgagataccttcagtgttgacagtctgggaccatttttt

SEQ ID NO: 195497 - DNA, 201 bp, Homo sapiens
aatggaaatatttctcatttttattttggtggtggttacattattgtataagttcattaagattcagtaaattgtacactttaaaaggactgaattttacrttatatattactaaataaacaaaaagggaagatttgcaaaacttcaaacttataataatggagggctccagctgtgtggaattaaaatagagaaatatta

SEQ ID NO: 195498 - DNA, 201 bp, Homo sapiens
ttgtttatggctatttttcagagaactaaaatatattgagattaaaagcctgaataaaataataagtagttaagggattttaagcaaaggcattattattrtaggaccattttgtgctttaaagaaccattctccatgtaattgtgatgacttgattggaagtcagaaagatgaactgagaaattttggaattattgaaga

SEQ ID NO: 195499 - DNA, 201 bp, Homo sapiens
aggctctacaaaagaattccaagattggctttttcccctcttgttaatttcaatataaaaaacttgtattttttcttttcttctctctctctctctttttyttttttttttttggcctggctgtctaaagcattttctgaataagaattcatgtttgatatcaagtaaacttactgagataccttcagtgttgacagtctg

SEQ ID NO: 195500 - DNA, 201 bp, Homo sapiens
gtaaaggctctacaaaagaattccaagattggctttttcccctcttgttaatttcaatataaaaaacttgtattttttcttttcttctctctctctctctyttttttttttttttttggcctggctgtctaaagcattttctgaataagaattcatgtttgatatcaagtaaacttactgagataccttcagtgttgacag

SEQ ID NO: 195501 - DNA, 201 bp, Homo sapiens
cagtaaaggctctacaaaagaattccaagattggctttttcccctcttgttaatttcaatataaaaaacttgtattttttcttttcttctctctctctctcttttttttttttttttttggcctggctgtctaaagcattttctgaataagaattcatgtttgatatcaagtaaacttactgagataccttcagtgttgac

SEQ ID NO: 195502 - DNA, 201 bp, Homo sapiens
ttgtttgtttgtttgtttgtttcattaggagccatcttgtaatatagaggcagaatgcaatagagcatggtcttaaataggctaagagaagctgactttcraaaaacatgagtaatctctaggtcctaccattatgtagattggacctatagagttggcagttgcttgggagatagatacacacacaaacaatactataca

SEQ ID NO: 195503 - DNA, 201 bp, Homo sapiens
acaccatcacagacacacccacaatcaatactttgtatccttcaatccaatcaagttgacactcagtattaaccatcacaatagacaaacccaaatccgargtaactgtctattcaggtgaggacaaactgctgccctttccgtgatagaagagatccaatataatcaacttgtcgccaagtagctggctgatcaccccaa

SEQ ID NO: 195504 - DNA, 201 bp, Homo sapiens
aacctttcaattgtaagaaaataaacttctgttatttaagccacccagtctgtagtacattgttatggccgtcctagcaaagtaatacaataaatgttttkactttgtaggccacataagattctgttgcatattattctgtgttctctttctcctccctctctttcactgttaaaaatttaaaaattattcttaggccaa

SEQ ID NO: 195505 - DNA, 201 bp, Homo sapiens
catctgaattcctcagatgcatctcatattaagtttaaaatatacagaaaaactccttaagattctgagttatatggggaaataaattcaacataacacatgtctgtctttactttttgtattgatatttggaaacacattgatatttggaaaattttggaaacaaaattttgtacgtttccaaatattaacacaaaaagt

SEQ ID NO: 195506 - DNA, 201 bp, Homo sapiens
acatctgaattcctcagatgcatctcatattaagtttaaaatatacagaaaaactccttaagattctgagttatatggggaaataaattcaacataacacatgtctgtctttactttttgtattgatatttggaaacacattgatatttggaaaattttggaaacaaaattttgtacgtttccaaatattaacacaaaaag

SEQ ID NO: 195507 - DNA, 201 bp, Homo sapiens
agagagaactattcctcatttcccacttttacattttcccaaaggatatggaaatagaagacaagacaataaatcctcttgctcattataccgtgccctttgcccttttcatttgcattttattttgctacgtggattatctagtgatatggccttaaattctaactgcacagagtagttcaagcgtaccaatccatccct

SEQ ID NO: 195508 - DNA, 201 bp, Homo sapiens
tacaggcacacaccaccacgcccggctaatttttgcatttttagtagagacaaggtttcactatgttggctggtctcgaacctgacctcaagtgatccacmaacctcagcctctcaaagtgctgggattacagacatgagcatcatgcccagtcccttcttatgtttgattgcttcagttgtacccagacaacctcccatt

SEQ ID NO: 195509 - DNA, 201 bp, Homo sapiens
caaaagacagaggtcgcagtaagcccaggtcatgccagtgtattccagcctgggtgacaaagtgagactcccactcaaaaaaaaaaaaaaaaaaaaaaaagaagttactttaaaaaaatgtgaacctgttaaactgacatgttttagttaaataaaattaatgtaaaataatctatacttaagtattttacataaacttat

SEQ ID NO: 195510 - DNA, 201 bp, Homo sapiens
ctggtacttacagatttgaatgaattcctgtcttcttgaggttcccaagatagcccatcttccctgggcctgctaggaagtgatcttccttactcatctgwaaggctaagaaccctagaagccaattattattgggccagctttttcaagatagctttgtaaaaattgttccttattataaagttaacctcagttcctaac

SEQ ID NO: 195511 - DNA, 201 bp, Homo sapiens
attaacatacatgtaacttggctactgacatcagttagaatatgtgccctagctaaatgggactctatttactgaagaaaagccttccctcaaaaaggtaraagtcattaaaatttatgcagtgatagtcataagtttttattttcacactgcacaatctccaaaattggcagcattctttgccatctgatgcaatgtttt

SEQ ID NO: 195512 - DNA, 201 bp, Homo sapiens
atgcaatgggttttgtagtaggggacagagattgggctaaactgtgaatacaaaaggaaaagtagaaggttatagccaaggagcaggatgtgagtcagtgkatggaaaaatcactaagagggtagagtaattatttgcaaaaatgacccagtaagtttcttgcttaaggcaagatagatttgtcagtcattacttgaggga

SEQ ID NO: 195513 - DNA, 201 bp, Homo sapiens
gatgatgtttccagttaaaaatgtgctatcatctctctatatatctacgtatctatctgtctgtctatcttagtttgagctgctataacaacgtttcatagagtaaggtggcttataaaaaacagaaatttattttctcacagttctggagcctggaagtctgggataactgtgccaacatggtcaggttttgatgagtgc

SEQ ID NO: 195514 - DNA, 201 bp, Homo sapiens
atcatgacccttattactgataaagtagactttattcaaggaacttcatggaggctaatgcaatgggttttgtagtaggggacagagattgggctaaactstgaatacaaaaggaaaagtagaaggttatagccaaggagcaggatgtgagtcagtggatggaaaaatcactaagagggtagagtaattatttgcaaaaat

SEQ ID NO: 195515 - DNA, 201 bp, Homo sapiens
tatctgtcttcaattttttttgttttctttcaacactttcaacatgttgtcctgtcttttagtcttatgcaatatgttacttttctccacttgcctaaaasgttttacatttatctttgtttttctccagtttgattatggtgcatctgaacatggttttatttgagtttatcctatttggtgttttctggaattataaaa

SEQ ID NO: 195516 - DNA, 201 bp, Homo sapiens
tggaaataaacccaagcaataagaactttagtttcaagaaaattaaattgagctgtttattgctattgagctcaaacagaataattctaacaaaatgcttmattttagtcagtaggtgtggttcatctttttaaactgagtgatattataataaaagtgataaaatagaaaattccacaaagttgataataattatttaaa

SEQ ID NO: 195517 - DNA, 201 bp, Homo sapiens
ttaggtagtaagtatgaatagtttatttaggagtacaataaatttgacgtaatttttctttaaattgacctaatttttgactggacttttgattttacctractgtaagaaaatactgccttagttgtttgtagtgccttcattaggtttgaaagcattatgctatttttctgtcaacgttgtacacctgtaagtacaaat

SEQ ID NO: 195518 - DNA, 201 bp, Homo sapiens
cacaaagttgataataattatttaaaataaaatctattaatagagcaattttaatttcccagattgaggaaaatggtcacaagatttttaaaagtttccargtaccaaaaagaatgataaaaggctcatataaatacacatcattgtaatataccaaacatcacgaatgattgagtcagaagttttcacagaggaaaaaca

SEQ ID NO: 195519 - DNA, 201 bp, Homo sapiens
tactcctatgagtgggtatgtcacattttgtttattgtgtatcaattaatgaatattcagtctatttccactttgggctattatgaacaatgtggttatgrctattcatgaaaatgttttgtgtttgcatatgttttcaattattttgagcattgctatgatttgaatgtgtcccccaaatttcatatgttggaatcctaa

SEQ ID NO: 195520 - DNA, 201 bp, Homo sapiens
gattagccttttgtgtgtagcttgtttcatttagtataatgatttcaagattcacctatgttgtagcatgagtcagtatttcgttcatttttatagatcartattactcctatgagtgggtatgtcacattttgtttattgtgtatcaattaatgaatattcagtctatttccactttgggctattatgaacaatgtggtt

SEQ ID NO: 195521 - DNA, 201 bp, Homo sapiens
tcagttctcatgctactgataaagacatacccaagacggggtaatttataaagaaaaatatatttaatggactcacagttccacatggctgggaagccctsacaattgtggcagaaggtgaaaggcacgttttacatggcagcagacaagagagaattgagaaccaagtgaaaggggtttcccctattaaaaccatcatat

SEQ ID NO: 195522 - DNA, 201 bp, Homo sapiens
tatgtttgattggtgtacctgaaagtgacaaggagaatggaaccaagttggcaaacacacttcaggatattatccaggagaacttccccaacctagcaagrcaggccaacattcaaattcaggaaatatagagagcaccgctaagatactccttgagaagaataacccccagacacataattgtcagattcactaaggttg

SEQ ID NO: 195523 - DNA, 201 bp, Homo sapiens
acaatagtgccaaatatatggacacttgaaactgttgtttatgcctacctaattcagtctatcagcattccaaactcctcaaagaaacacaaaattatttkcccagctagaatcaggtattcattctcaggcttcccaatctcttgcttcatgtaaacagctgtattggaggttgggtgtggatgtgttaacaagaaagag

SEQ ID NO: 195524 - DNA, 201 bp, Homo sapiens
tatttatattattcagagttattaacactaattgctgtaccaccaccaccaccaaacatccagaaatctcagtggcttaataaacttcatctgttgctaaytccttcctgagtggtttgcctccaagcagtaacaacaggctcctacaatcctcaaatgtctctgtctttatcttaaggaggtgaatgtggagaatcaagc

SEQ ID NO: 195525 - DNA, 201 bp, Homo sapiens
taaaacaacagttaatgttctctataatcaattgaagccttaacatcttattttcatacaaatgaaaatactattcttctagtctattctattaatattgktttataaaatatctgaatataaggtattgtgtcatttaaattagtattgtatcattaaattatccttagttctaccccaaatcttaagtatatgacctaa

SEQ ID NO: 195526 - DNA, 201 bp, Homo sapiens
caactggtgaaattgggatttcttttcttgttccagttattataaaaaatgtgttcagcttttcccagttcagtataatattagctgtgggcttgtcatayatgactttttggatgtagaggcatgcatcttctatgctgaatttgcccagaaactttatcatgaaagaatattgaggtttatcaaatgttttgtctacat

SEQ ID NO: 195527 - DNA, 201 bp, Homo sapiens
aattaaatattattgattaattaggattgtatgaattaattatttctactttattagaccccttaggttgtattttattgcaagtattgtatcatgatacractaaatagccagccataaacataagctataacaggcattttgcataattaaacaactagatatattttaaactgtggaagccattcttttcctaactct

SEQ ID NO: 195528 - DNA, 201 bp, Homo sapiens
tttaaagtagtttttccaattctgtgaagaaagtcatcagtagcttgatggggatggcattgaatctatcaattaccttgggcagtatgaccattttcacratattgattcttcctatccatgagcatggaacgttcgtccatttgtttgtatcctcttttatttcgttgagcaatggtttgttgttctccttgaagaggt

SEQ ID NO: 195529 - DNA, 201 bp, Homo sapiens
aatacatatatacatatataatacaataatacatataatacatatatatacatatacatatacatatatatatatatatatatatatatatatatatatawgagtttactaagtattaactcacatgatcacaaagtcccacaagaggccatctgcaggctgaggagcaaggagagccagtctgagttccaaaactgaaga

SEQ ID NO: 195530 - DNA, 201 bp, Homo sapiens
catggatggtagtcttggaagaaacattgcttgcaggataggtgtattagttagggttctctagagggccagaactagtggaatatatatatatatatatacacacacacacacacagatacattgtatacatatgtatgtatatatacatataatacatatataatacatataatatatacatatatgtattatacatac

SEQ ID NO: 195531 - DNA, 201 bp, Homo sapiens
ccatggatggtagtcttggaagaaacattgcttgcaggataggtgtattagttagggttctctagagggccagaactagtggaatatatatatatatatatacacacacacacacacagatacattgtatacatatgtatgtatatatacatataatacatatataatacatataatatatacatatatgtattatacata

SEQ ID NO: 195532 - DNA, 201 bp, Homo sapiens
ctggtattgatgaccaccttcttctacccattctgtattcccattgccttcagcaagcacctcagcacatcgtggtttttacctggtggagtgacccaacycttcatttctgaagtgtctgggtcatctgtagtcctgcctggagtgggctgttgtaatttcccattgaccttaatcacagggcatggtaattctaagaga

SEQ ID NO: 195533 - DNA, 201 bp, Homo sapiens
ggaagaaatactcatgacaatcacagtcctcatttctgcaactggtcacgtggttgtagctggtattgatgaccaccttcttctacccattctgtattccyattgccttcagcaagcacctcagcacatcgtggtttttacctggtggagtgacccaacccttcatttctgaagtgtctgggtcatctgtagtcctgcctg

SEQ ID NO: 195534 - DNA, 201 bp, Homo sapiens
gtagggaagcgaacagggcagctttcagtctgtgagcctctggcagaccactagtgtaagtccaagagtgcataaggggaataacttggagtctgatgttygagggcagaagcatccagtataggagaaagataaaggccagaaaactcagcaaatctgctctttccaccttcctctacctgctttattctaatcaagctg

SEQ ID NO: 195535 - DNA, 201 bp, Homo sapiens
ttctttctgttcaggattgctttggctatttagagtctgtattagggttctctagagggagagaactaacaggatatatatatatatatatatatatatatgaaggggagtttaaggaatattgactcacatgatcacaaagtgaagtcccacaataggccatctgcaagctgaggagcaaggaagccaatctgtgtctca

SEQ ID NO: 195536 - DNA, 201 bp, Homo sapiens
tgtttttcatagtggttataccattttgcatttgcaccaggaatgtgtgagattatattcccatctctgactttaagatttttaagttgtcacccttctartgggtatatagctgagattttaatttgcatgctggtagtcagcatttattcatatgcttatttaccattcatataattattttagtgaagtggctgttta

SEQ ID NO: 195537 - DNA, 201 bp, Homo sapiens
caaagatatggaatcacccttaaatgttcaccaatggtagactggataaagcaaatatattacttataaatcatggaatactatgcacccacagaaaagawtgagatcctgtcctttgcagaaacatggatagagctggaggccatcatcctaagagaacttacaggggtacagaaaaacaaataccacatgttctcactt

SEQ ID NO: 195538 - DNA, 201 bp, Homo sapiens
ttttcacagcgaatttaataagattgagtgcagtgtcctactctttttgtgctttaccatgtcatattgtccattgcctacctctgtatttaaaagtaatrttacttaggagttttaacttgagactatctgtcttatttcataagctttgaatttctgctttagctgcaatttagaataaggaacaatcttctacataat

SEQ ID NO: 195539 - DNA, 201 bp, Homo sapiens
tagctgagattttaatttgcatgctggtagtcagcatttattcatatgcttatttaccattcatataattattttagtgaagtggctgtttaaatatcttktccattcgttaagaatgttgttagacttcatgttattcttattattgagttctaagaattcattactgaagttctttatcatatgtgtttctgttctagc

SEQ ID NO: 195540 - DNA, 201 bp, Homo sapiens
gcagggcttactatatgaagcccctaaataaaattgttataatggattaaaataaacaaacaacaaaaatgcattgaaattaagaactccaatttcagagtatacataggaaaaaaatctatagagagaacaattttaaaacacaagaaattagtattacttgcaattacatacgaattttgaggagtgacattcatcact

SEQ ID NO: 195541 - DNA, 201 bp, Homo sapiens
ctcatttaagataaacagaagagttttgtggggagatacttattaaaataatacttaacaataagcaaggtacactataatgttatattatttttaactcygaaaactgaaggtacaaaatgacatgaccaaattccagaaaaaaatgacaccttcccagaataaaggactcacatgactgttttcatccctgagggcacc

SEQ ID NO: 195542 - DNA, 201 bp, Homo sapiens
gagaatagaaaaatggcctattgtgtactatgcttattacctggatgacaaaagaatctgtacaccaaacccctgcagcacacaatttaccaatatagcamacctgcacatgttcccctgcacctaaaataaaatttaaaaagaaaaatttacttttcacttagaaactataaactgtcatgaatattcaattttaaaggt

SEQ ID NO: 195543 - DNA, 201 bp, Homo sapiens
tccaatttttaacaaactattaatgaccacatataggttggagtggtgaattcgaattttaaggagtctcccacctaaagcaatactatattatcaaccarctcttacagagggacttcacagagtgcaaggccacaccctttcaaagattgcaacaaagagaagagaaagcccaccccaaggtttactgggctttcatag

SEQ ID NO: 195544 - DNA, 201 bp, Homo sapiens
gaatgtaaccaggctaaaggcctgaattaaaaggcacaaagtggcaggttggataaagaagcaagacccaatgatatgctgtcttcaagaaactcatctcwcatacagtgtcatccataggattaaagttaatggatggagaaaaatctgccaaggaaatggaaaacaaaaaagcaggcattgctattttaattccagaca

SEQ ID NO: 195545 - DNA, 201 bp, Homo sapiens
ttgtgtactatgcttattacctggatgacaaaagaatctgtacaccaaacccctgcagcacacaatttaccaatatagcacacctgcacatgttcccctgmacctaaaataaaatttaaaaagaaaaatttacttttcacttagaaactataaactgtcatgaatattcaattttaaaggtttcatgcctaatgaatattc

SEQ ID NO: 195546 - DNA, 201 bp, Homo sapiens
ctgtttatgtttgagatgaaatataccttctgtactacccccacagacctgcccacataatctaaatggaagaaagccataattgcttaatttttttttttggtggaagcatgctgaatagaacacatgtaagaaaatggactaactttaaaaatattggtacacaaatgtcagaaactgaaataactaaaaacacgaagt

SEQ ID NO: 195547 - DNA, 201 bp, Homo sapiens
cttttttaatattctaatttttattcatattttttcaaatatgactttaggttcatgacgtacatgtgcaggtctgttacatgggtgaactgtgtttcacygtcgtttggtatatgaatgatcacattcactcaggtagcaagcatagtacccgatttagtagtttttcaaccctcactccctccctcccacactctctgc

SEQ ID NO: 195548 - DNA, 201 bp, Homo sapiens
atgctaggctagcattttaatgtgtataaaacgtcacatcctgtctccaactcactaaatataataatcaaggctagtttcctggtgatattttaaaggayaagaaaaggatacaagaattaaaaattgccttttaagacaattttgtccttatttctacacagtatgtttattatagaaaaaagaaaaataaagagaaac

SEQ ID NO: 195549 - DNA, 201 bp, Homo sapiens
ttttaatattctaatttttattcatattttttcaaatatgactttaggttcatgacgtacatgtgcaggtctgttacatgggtgaactgtgtttcactgtygtttggtatatgaatgatcacattcactcaggtagcaagcatagtacccgatttagtagtttttcaaccctcactccctccctcccacactctctgctct

SEQ ID NO: 195550 - DNA, 201 bp, Homo sapiens
ataaaaataactgcttcacctaaaaaatagatttgtaatgacaggatataataattataaatatatatgcacccaacactggagaacgtagatatatgaarcaaatattattagagctaaagagagagatagactccaatataataacacctgtagactttaacacctcactttcagcattggacaaatctttcaggcaga

SEQ ID NO: 195551 - DNA, 201 bp, Homo sapiens
tgcagtcttgaagcagaaaagtaaatgtttttgatttctaaagatgctaatacttgattctttacattttgcggacagtcacgaagaaaaaattatagtgwtttatctttataaacaactgctatgcctagaataaagaaatgttgcagaaaaaaagtgcagcagttcttaaacattttgctttcagaatatcagtttctt

SEQ ID NO: 195552 - DNA, 201 bp, Homo sapiens
actatttgataccacaacagggagaccatagtcaataaccatctaattgtatattttaaaatatgaaagagtataattggattgtttgtaacataaagggyaaattacttgaggtgatggatatcccatttaccttgcggtgattattacacattgtatgcctacatcaaaatatctcatgtacctcgttaaatatagaca

SEQ ID NO: 195553 - DNA, 201 bp, Homo sapiens
cttcttaataatagctgttctgactggtgtgagatggtatctcattgtagttttgatttacgtttttctgatgatagtgatgctgagcattttttcatgcrtttgttggcagcttgtatgtcttcttttgcaaaatgtctgttcatgtcctttgcccattttttaatgaggttattctttgcttgttgatttaagtcccct

SEQ ID NO: 195554 - DNA, 201 bp, Homo sapiens
tgaataggtttgcatgttaggtacatgagccaaaattcttagagattcaactttcattgaggagtagacttggaaataaaatgtttaatttctggctcttygccaggcttccagtttctataatcataaattcttgatattattcagaggccagaggcagattttaaggtaattatacaattagaactgtttgttacagtt

SEQ ID NO: 195555 - DNA, 201 bp, Homo sapiens
aaattgaccattgccttctctgtgtcccccattagcctctaggctttatgtgttttgggattttataagttgtatccattgctgtatcagcagtgctagcrcagagtagaagctcattaaatgctgattaaatgaatgtatgatgagagaccccagacttagatccctttagggagccataatctgaaaggatttctctat

SEQ ID NO: 195556 - DNA, 201 bp, Homo sapiens
taattttactatatactgtttaaatgttgtgtgtggtctgctgcctatttatcctctcaagagaatatttctgcgttctatacctattgatatgcaaatamatagtttataaagatatttgggtatttctaatgtttagagtgagcagtggttaagagtaactttagtgtatattcttagaagtggaattgctagatcata

SEQ ID NO: 195557 - DNA, 201 bp, Homo sapiens
tatgctctgtttcccttttaaaatggaatgcttttaacagcacccaagtcacttttgaaggctttgctccttagaaatttcatctgccagataccctaaakcatccctgtcaagttcaaagttccacaaatctctagggcaggggctaaatgctgccagtctctttgctaaaacataacaagagtcacttaacaagagtca

SEQ ID NO: 195558 - DNA, 201 bp, Homo sapiens
acgtaccgcggcttccgctgcaggcgccagtttctggacaacgggaacgcggtggcaccccaaagctcggagacaccaggaaccacagagccccaaagagrgtattacagcatgttacagccctgggtcagagagcctgaaggcatggactcccagaaaggcttcagaccttctctccttgtcgcccacagcaagtggatg

SEQ ID NO: 195559 - DNA, 201 bp, Homo sapiens
cagccatttctttataaataggggtattcaatttttctttagtaaagtctctccttctaatttattcaagaaggaaaagggaaacactaaaattttctgtragatcattctacataggctccaagacacatatgctagatactcacttaaccactctttagatgtagataaatacctgaatcctagaaaagctaaattact

SEQ ID NO: 195560 - DNA, 201 bp, Homo sapiens
cacagccttaaggaattcctccttgaccttcctgatgaggccagatatccctattacaggttcttaacacagtatttaacactttcaaaagtttccattgyaggctttcttggttgattaaattgttaatgccagtcttcccacgagactgtaatctttatgaaagtaatggccagagtctactctgaatcagcactgaac

SEQ ID NO: 195561 - DNA, 201 bp, Homo sapiens
tcttaaatttgataaatgaattcagtaaacttgaaggatacaaaaaagcatacaaaaatcagtagtgtttctatggaccagcaacaatttagctgagaacsaaatcaagaaggtaatctcatttacaatagctacaaaaataaatataaatacctaagaatatatttaaccaaggaagtaaaagatctttggtgaaacact

SEQ ID NO: 195562 - DNA, 201 bp, Homo sapiens
tgtgacaccctcttgtggctctatggttccttgcatctccaggcttctgggcaccaccgtgttacccgcatccagatgtgagtgcctgtagcagaagctcyatgcagtaaatacctctggtccagccacagccttgcatggaactggcacatgtgccggtgtgtggagctgctcaccctgccagagccgctgatgtgcctg

SEQ ID NO: 195563 - DNA, 201 bp, Homo sapiens
gatgttattaaaagagtaaatgactaaaaatgatttatatctgaatatataaattttaaagttgaataaacatgtatttgaatttggaaatttactctttwtgaataaaatatagacttgtaaatataacagcatatctttaggacaggtactacaaacattgaaaaatgtttgctttgacttaagtttatatcatttgta

SEQ ID NO: 195564 - DNA, 201 bp, Homo sapiens
aacaaaaatgcctgcagagccctaggagtatttaagtttcccaatctttatattgctgtatttctctaggcacattatatgtggcattctgtcacccaaayaaatgcaaaacaaataagagaggttatgatttctgtgcactaaaatcaccagaaaatacatttgtctttaaaaattaactgaatgtagatagatagatag

SEQ ID NO: 195565 - DNA, 201 bp, Homo sapiens
aggtcattgaatcatgggggccggtcttttccatgctattctcatgatggtgaataagactcacgagatctgatgggtttatcaggggtttccgcttttgyctcttcctcatttttctcttgccaccgccctgtaagaagtggcttttgcctcctgccatgattatgaggcctccccagtcatgtggaactgtaagtccaa

SEQ ID NO: 195566 - DNA, 201 bp, Homo sapiens
ttttttttttttttttttttttgtatttgtagtagagacagggtttcactgtgttagccaggatggtcttgatctcttgacctcatgatccgcccatctcrgcctcccagagtgctaggattacaggtgtgagccacctcgcctggctgtaagctttggttttaacaggcaaaagcccttgttaggatatgccatgcagtc

SEQ ID NO: 195567 - DNA, 201 bp, Homo sapiens
tgtaaaaataggagaaaaatagagaagtaaaattaatatcagaaaacgaagggagaaaaatagttgaagttctattctgagctggtggaagaacctcatgycttcacaaaatgtgcgggaagagttagaccctgaattcctttcctcaaggtaaaacttgtcattgcttcttggaatcttgatcccttagctttcatccct

SEQ ID NO: 195568 - DNA, 201 bp, Homo sapiens
gattacaggcgtgagccactgtgcctggccaagggcagtcaaatcttcaagctccaaaatgatctcctttgacttcatgcctcatgtccaggtcacgctgwtgcaggggatgggctcccactgccttgggcagctctacctctatggctttgcagagtataacccctctcctggctgcttcatgagctggcattgaatgtc

SEQ ID NO: 195569 - DNA, 201 bp, Homo sapiens
tttcaatgatatgtgaacataatcagccagtataaaacaatttctcatattattttaaatctactattgtgtattatatatgatacttgaaattaaggcaractaagaatggggatttgtgttttgctatgaaattactcttcggtgaggcaacaaacaaagttttccattttttattaatatctgaaaagtataaatgtg

SEQ ID NO: 195570 - DNA, 201 bp, Homo sapiens
ttgccggaccctgaacaataggacaagtcattgcaaacttcctggaagtcttgagtacccattcttcaggctatttctccttcaaaggctcataaaagagwtgcatttttttcctttgcccagtgtccagctacactaggaaatggcattcgatccccttgggaaataatcagaaaatgttattcatgtatcctggtaata

SEQ ID NO: 195571 - DNA, 201 bp, Homo sapiens
tggaaatacccaagatattgataaagttatatgcatgcaatacttcagtcttctcattgaaaagggatcatcatgtaatttcctttgctggctagtgcaarattttggctggtgcaagattttggagtcaaaggcattagagaatgtcctcaataccatctgcaacttaacagtgctaggatgcaagtggtcaaatacagg

SEQ ID NO: 195572 - DNA, 201 bp, Homo sapiens
atgttatttctgttatgttagaagtataagggattagtagcagagatgtctagaaagcttctttaattggctttacaatcattctttttgaacaaaaaaawttttatttttctttgtattttagacaaatatacatagactaaaattataaaagcacaagtataacattatacttgagaatatttggtggaacctcccccc

SEQ ID NO: 195573 - DNA, 201 bp, Homo sapiens
atttttgagttgaaatattaagggtttaacatatttatatcattattttgagggcaccaaagtaactctaaattttaaatcttccatgtgtctttaaaatwaacgcatttgattgttttcataacaacgataatattaattatatcttatatttatgtaatactttttattttatataacaagcttctatgcattgtctca

SEQ ID NO: 195574 - DNA, 201 bp, Homo sapiens
caagtgaaagaccatgactcttcctttcacttgaacacttagaagccattgtagggctatcgatcagctaaatttcaatatttttgtgtctcagggaacarggagtctctagtagaagaagaaagatgagtaacagctggtcagtgcggtagtctgaacatgcacaacatttcactgtcttacatggttgtggtgtgtggt

SEQ ID NO: 195575 - DNA, 201 bp, Homo sapiens
gaaggacatcttgttgaattatgtttcattattttaatggtgtctatcatgagtcctaattttaaaggtttccaatttgtcaatcttttctgatgtaattrtgtgttttttcctaattatgacacttttacactgttggtgggaatgtaaattagttcagccattatggtagacagtgtggcaattcctcgaagatttaga

SEQ ID NO: 195576 - DNA, 201 bp, Homo sapiens
acatcctcactaggtattgccaagtttttaatttttgccattctgaagatttacagtggcatctcttcatgaaggtagtgtccattaatttgatgactatygaatttgagcattttttcttaggtttgttggccatttggtagcctacattttaaatgccttttcacattttaagtgccttttcacacttcttttatatca

SEQ ID NO: 195577 - DNA, 201 bp, Homo sapiens
tgccaccttgaatcctacatattacctacataagttattgcaggactgggagaattaaattatttgctgtatttatagtactcataatcgaatatagtatrtgctatataagtgtcagcaaatcttttttttattcttgttcatgctgtttttttcctttctccttcttcattagagtgttattgtatttttgtacctgac

SEQ ID NO: 195578 - DNA, 201 bp, Homo sapiens
atatatgatatatatggaaatatatatatgatatatctatggaaatatatatatgatatatctatggaaatatatatatggaaatatatatatgatatatmtatggaaatatatacatgatatatctatggaaatatatacatgatatatctatggaaatatatatatgatatatatatggaaatatatatatgatatata

SEQ ID NO: 195579 - DNA, 201 bp, Homo sapiens; identical to SEQ ID NO: 33507

SEQ ID NO: 195580 - DNA, 201 bp, Homo sapiens
tttttgtgtaattagagtttttcctccagtaatccattgaaattgccatgtcaaagattgctaatgatcaacatttgctacagttgaacacaaattaaaakaggttttgtatttgttgtatggacatacccattattctgacatattgttagttttcttttaacctttccaaatgttctttcttagagtcctatgaagtcc

SEQ ID NO: 195581 - DNA, 201 bp, Homo sapiens
ttattgagatggagtcttgctctgttgcccaggctagagtgcagtggcacgatcttggctcactgcaaactccgcctcccggttgaagagattctcctgckccagcctcctgagtagctgagattacaggcatgctccaccatgcctgtatttttggtagagatggagtttcaccatgttagccaggctggtctcaaactc

SEQ ID NO: 195582 - DNA, 201 bp, Homo sapiens
ctaacttcaccccaggaatctggggatgtcgctatgagtttcaatatattctaatgccaccaaaacctatttctgtcctactgccactatgttagtcataytttggtaagaaaaattaaattagagttactcaggaattgcattgcttgtttgcaattgatacgtctacataattctatgaattccatattataagtgaaa

SEQ ID NO: 195583 - DNA, 201 bp, Homo sapiens
tcattagaaacaaatacctatgactggtatatcaggattagctgtttcaatattttattttgttattataaatgagtatttagagaaaaatataaacacartaaattaacaaaaagaaacctcagtagaaaaatggtaactattacaaaaaagaactaaatgaaaattctagaactgaaaactccaatattcaaaaccaaa

SEQ ID NO: 195584 - DNA, 201 bp, Homo sapiens
gacatttggtatatttcccattttgaatatgtaagaaacaatggcatgattaaaagcttggtcatttcttcttaaatatattaggatatttgatgatgcakataagttttgacagttggaataagtataaatttttgattttgctattttttcttattctcttaatctaatagctttagaaattatcagatagaaagtaga

SEQ ID NO: 195585 - DNA, 201 bp, Homo sapiens
accttagccctcattatcattccaagacataatactatcatctgccttgtaaccaacagaaaaaatccctacctgccttcaacaaactcagaactttctaytgatctcctatcccctggattctttttctatatgtctatatatctgcttttatcactcatattcattactgttcctaaattttgaatctcttccactgag

SEQ ID NO: 195586 - DNA, 201 bp, Homo sapiens
ttttttcttattctcttaatctaatagctttagaaattatcagatagaaagtagagtatgtaaatgattgtttccttcaagctctttcacaaaaatgccaraaataacaacaacttgtttcacaaaatcagcagaacattactgattgaaaaaatcagctcaaagagtgaacttacacaagtttgcaacaaaaaaagctta

SEQ ID NO: 195587 - DNA, 201 bp, Homo sapiens
aactcagaactttctattgatctcctatcccctggattctttttctatatgtctatatatctgcttttatcactcatattcattactgttcctaaattttraatctcttccactgagtccttggggattcagtccatacattggtaaaatcacacacattctcaacacgctctcgatattctcctcccttttttattactt

SEQ ID NO: 195588 - DNA, 201 bp, Homo sapiens
tttattttttgacactgatataatacagcctcaaatattttgattattaattatagttctagaaaagccactttctcatttcaaatggaaatttaacatcmagaaggaataaaaactgctaacagtactgaaattctatgaggaaatataacttatttgtcttgtgtatttgtgagacatttacctattatcaactcaagc

SEQ ID NO: 195589 - DNA, 201 bp, Homo sapiens
ttggggcctagtggagaaaattactcagaaagcctgacaaaattttggtcatggagaaagtctttgtcaggctcttttcaatactctgacctctcagttckaatttgttttctcttacaatggcactttcctcccagtatcttggacattaatttctatggttaaacttagttattattaataattgtaaatgcaatatcc

SEQ ID NO: 195590 - DNA, 201 bp, Homo sapiens
caggctcttttcaatactctgacctctcagttctaatttgttttctcttacaatggcactttcctcccagtatcttggacattaatttctatggttaaacktagttattattaataattgtaaatgcaatatccatttcaaatatcctattgtctgaccagttcctctcctctggtttactccctctgatacctaactcca

SEQ ID NO: 195591 - DNA, 201 bp, Homo sapiens
acagatttctagcagatttcttttgttagaaacctacagatacaaccaacattatctgtgttcacaaagcactttatgcataaatgttcatagtatctacracattgcatttttgtcagctgtttatctgttagacttcacctgctgctttttttagtttttagaattcaataataatgttttagttctctttgttctcct

SEQ ID NO: 195592 - DNA, 201 bp, Homo sapiens
gcttttacactgttggtggaagtgtaaattagttcaaccattgtggaagacagtgtggcaattcctcaaggatctacaaccagaaataccatttgacatascaatcccattactgggtatatacccaagggattataaatcattctgttataaagacacatacacacatatgtttattccagcactatttacctgagcaaa

SEQ ID NO: 195593 - DNA, 201 bp, Homo sapiens
aggaaaaaatgttaagggcaaccagagagaaaggtcaggttacccataaaggggagcccattagaaaaacagcagatctctctgtagaaaccctgcaagcyagaagagagtgggggccaaaatacaacattcttgaagaaaagaattttcaacccagaatttcatatccagccaaactcagcttcaaacacaaaggagaaa

SEQ ID NO: 195594 - DNA, 201 bp, Homo sapiens
ttagtacaatgctgtttgaattactgtagatttaaaacatgtcagttacatttttatatacgaacactggacaatctggaagaaaattaagaaaacagttygatttataatagcatcaaaataataaaatacttaggaataaatcaaactaatgagctgagagacttatgcactgaaaacggtgaaacattgatgaaagaa

SEQ ID NO: 195595 - DNA, 201 bp, Homo sapiens
atgctgatgcaagagcttagttcccatggtcttgggcagcttcaaccctgtggttacgcagggtgcagcctccctcctggctgctttcaaaggctagcgcygagtgtctgtggcttttctgggtgcaccatgcaagctgtcagtggatctaccattatggggtctgaaggacagtgactgtcttctcacagctacactagg

SEQ ID NO: 195596 - DNA, 201 bp, Homo sapiens
gtagaactgtaggctgtacacgaagcatggctgagaggctcaggaaacttaacaatcatggcagaaggcaaagggaatccatgcacatcttacgatggtgragcaggagaaagagagcaaaggggaagtgctactcacttttaaacaatcagatatcatgagaactcactcactatcatgagaacagcaagggagaaatct

SEQ ID NO: 195597 - DNA, 201 bp, Homo sapiens
aacaatataatatccacaatatgtaataaataattactagatatatggagaagcaagaaaaaagtatcatcattagaaacaaatacctatgactggtataycaggattagctgtttcaatattttattttgttattataaatgagtatttagagaaaaatataaacacaataaattaacaaaaagaaacctcagtagaaaa

SEQ ID NO: 195598 - DNA, 201 bp, Homo sapiens
atcatttaaatcaaatttgggaagagttgttactgcccaaggtatttcaagtataaaaaaaatagctaaggtaacatatcatgtgaccttttagaagatgmctatttcaatgtgaatctttttagagtttgaccaccctaactcttctaaatagcaatacacagttattcacacacacacatgcatacatgcaggcaccta

SEQ ID NO: 195599 - DNA, 201 bp, Homo sapiens
gatgtttacactaaaagcccatgtattagttctttctcacactgctataatgaactatctgagactgggtaatttatggagaaacaccttttaactgattygtagaactgtaggctgtacacgaagcatggctgagaggctcaggaaacttaacaatcatggcagaaggcaaagggaatccatgcacatcttacgatggtg

SEQ ID NO: 195600 - DNA, 201 bp, Homo sapiens
atactggataatcagttaggcaccatcaggaatattgtagatgaatatggtaatggaggtggaggtggagtcatggcagaccaaaagttcaagaccttaayatacatgtacttaactctggtcaccttatcaccacaatgccctcaaatttaagctgtagaatcagctcaatgaatgttttagggcatgtgaatttttcct

SEQ ID NO: 195601 - DNA, 201 bp, Homo sapiens
taatctagtcacagaaatcatgcatcactccatatctctttttccatctcctgttgaaacttctctaaagacaggcttgtcagtctttgggtggaagaatmgttgcaacaaattccccttcctaattacgtactaggggaacgatagcattatttaattgcaatgaatatactggataatcagttaggcaccatcaggaat

SEQ ID NO: 195602 - DNA, 201 bp, Homo sapiens
gtacatgtggtttgcaagggaatggtctcactaacagctcaaagaatgaatgacaccacattataatggttagtttgtaccctttagggccagataatttytgatggaacccaaattctgcaacttaacagatggttgaaaaaggtcaagtgaattaacctctctgtgtgtacgttttctcatcaatataatgtagatagt

SEQ ID NO: 195603 - DNA, 201 bp, Homo sapiens
cttgtccaatgcatatctaagttcaaatgagtaaagataagatgtggttcaaatgccatcataaactaccacaaattatcgctttaagttgttggaagggrcataattttattgataaaagtaaaagaaattctagacctaaaataaaacatgaagtgagttattttaaatgggatttataaccatgcatttaatgtgaac

SEQ ID NO: 195604 - DNA, 201 bp, Homo sapiens
aggttcctcaattaactaaaaattgagctactatattatccagcaatcccactgctgggtatatactcaaaataaaggaaatcagcatatcaatgagatayctggactcttgtgtttgttgtagcactgtttacaatagctaagatttggaagcaacctaagtgtccatcaacagatgaataaatcagaaaaatacgatac

SEQ ID NO: 195605 - DNA, 201 bp, Homo sapiens
cctatgaaaataccaatgatattctttatagaaatagaaaataagatcctaaaatgaatatggaagtaaagaaaactcagaatagccaaagctattctacrcaaaaaagaacaaaactggaagaatcacattaacttacttcaaattatactacagatctatagtaaccaaaacagcatggtactggcataaaaacagaca

SEQ ID NO: 195606 - DNA, 201 bp, Homo sapiens
gcagcaagaatttcaagccagtggatcttagcttgctgggctccatgggggtgagacctgctaagccagtccacttggctccctgacttcagccccctttycaagggagtgaacaattctttctagcttgcgttgcaggcaccactggggcatggaaaaaaaaaacaaaaaaaaaactcctgcagttagctcagtgtctgt

SEQ ID NO: 195607 - DNA, 201 bp, Homo sapiens
gttcattaatagaataattgatttaaaaattatagtatattcataaaacgcaatgcaataatacattcagtaataaaatcaacaatgatcaagactctatytcaaaaaaaaacaaaagccagaccaaaaaaaaacaaaagccagatcaaaaaaaaaaaaaaaaaaaacaaatacatactatttgtgccattgtgatgaagt

SEQ ID NO: 195608 - DNA, 201 bp, Homo sapiens
taaaatgaagataatagtaactatttcattaagttgcaaagattaagcgagctaaaaaaaaaaaggaaaaaaaagggtccaacataggttctgtttaatgktttcttctttccctctttttttctataactgtaaagattttttagattttacattactatttaaccctcctactaaatacccaaaattcaatttgtaatt

SEQ ID NO: 195609 - DNA, 201 bp, Homo sapiens
atataaaatattatttacattatatatatataggttttcataagaatgaaagaacttgtattatatgctaggcattatgctacaaatttgtttcatcttayaccattcaacctgaacaacactgcaagaacattcattattaaaaccgttttataagagcgaagctggctaaggaaggttgagtaacttgcccaaggtcat

SEQ ID NO: 195610 - DNA, 201 bp, Homo sapiens
tgctttgaattttctaagaaaccaccatctgtaatttgtatttctataaagaagttcatggaaaatagcagttatgctaaagctattaattagagtggtasaaataagaaactcaggatataaatataagtcactttaaattcaaagctagtctgtcttgagatgtccattacttagctgagtgcaggggctggattcagg

SEQ ID NO: 195611 - DNA, 201 bp, Homo sapiens
aggtgtgagccaccgcgcccagcctatctcttatccttctctctcctccatctctctatttttatcaaatcaattctgtgatgataaagcatcctacaaasttcattacattgtgctaagcttttaagtaacctctataagaagatggagagtgaatagggccaaaagatgaaaaacgatatttgagaaagctgacaggga

SEQ ID NO: 195612 - DNA, 201 bp, Homo sapiens
actatgttttggcagccctagaaaactaacacattatcttaacaaatgtttcttgtctaagatagacattttatttccataacatccacagtggcttaggraatttatgtaggaagtcatacactgtaattatttatttataaatttctgaggaacaacgatgaaactagcaacattagttgtttgatattcttaaaattc

SEQ ID NO: 195613 - DNA, 201 bp, Homo sapiens
aatcaattaaaaaataacaaagcagattgcaaaatttgtaatcattcaaatactaggtggaaaactaaaatgtattttattcaatatggcagaggtattayattgaaaatgatttaatttcataattgccataaattttaaaagtgaataaatagtatcctctaaatagtaacattaaaatctcctcacttattctattaa

SEQ ID NO: 195614 - DNA, 201 bp, Homo sapiens
agaaggtttccccctgtgaattcgctcaaagctaattatttaaaattaagctttccatgctttccaccatgttctctacagggcactcatattgaactgcrtacttgaaatttccctaaatatcctacattgttacatctttttaactttgcatatattttctcctgattggtattctttcctctttcacctagaggagtt

SEQ ID NO: 195615 - DNA, 201 bp, Homo sapiens
aaatttaaaatggaaattaacatataatgagagttcaacataaaaatgatgcaaatgacaagataatttggctatttttgaggcatacaataataattagrgccaccactgatgacattaaactaagagatattgtggacagcagggatattgataaatttctaggaaatttatatgatttctaaaatacctaataatgtt

SEQ ID NO: 195616 - DNA, 201 bp, Homo sapiens
aaaccataatcactcttcttcacttcattattgtccatcagaacaaataattcttgttctccttgctcttgggttagaaatttcatgaacccattggcttstctactctagttctgaaaatccttaattcagtactatggtctctaaattaatcaacaccatcatgaagcattatggcttgtagctgattgcaaatatttt

SEQ ID NO: 195617 - DNA, 201 bp, Homo sapiens
ccatgttgaaaagtttcttgaaagcaagactatagtttttataaataaatgtttaacttaaaacaaatattaagttttattcttgcagttctatatcatamcttccttccttcattaaaaaatactatacattacttatatttacccctcatctttaagtatttttaaagtctaattatttaacaatggtcactcaagtct

SEQ ID NO: 195618 - DNA, 201 bp, Homo sapiens
taggctacacatatttaaagtgtgagatttgataagtgtagacacgtgtatatactactgaaaccatcatgacaatcaaaataatgaacacgtctgttacmcacaaaaattttgtgatcctttgcaattcctcacaccaattcttccacccccacctttctggttcccaggcaacagctgatctgctttctgtcactatgg

SEQ ID NO: 195619 - DNA, 201 bp, Homo sapiens
acttttgggttaatgctgaaatgagttaagattgggggactgttgggaaagcatgattggtattgaaatgtgaggacatgagatttgggaggggccagggkcacaacgatatggtttggctgtgtccccacccaaatctcattttgaattgtagcttccataattcccccatgttgtgggagggatctggtaggagataat

SEQ ID NO: 195620 - DNA, 201 bp, Homo sapiens
aacaatatttaaatagctcctaagtttcaaatgccctctcaattttggaaaataacttatagcagttcttagcatcaacctaggaaaatctttagaattamtctcccagtaatctcacactattctattcagaatcaaatcttttacacctgccttcagtgaaggaagtgtttggctttattagttataaaagtttatttc

SEQ ID NO: 195621 - DNA, 201 bp, Homo sapiens
aatgtatattatcacatgtctattttgcagtttcagtaataaaaataatgcattgagcatgtgagtactgtttgcaattaaagaacctgtggatacttacrcatagataaaattgaaaagtgactagtttgggaaatcacttggcatattctatacggttatctaatagctaaattatcaaccataatttgccagagaaag

SEQ ID NO: 195622 - DNA, 201 bp, Homo sapiens
tagtcagcctttgtaagctgagtgagttgtaatcattttaatactgtttattttgaggccagtgttgtttagcttctagaaaaagaaaaaaaagaaaagaraagccttaaggagttagaatatagtttattctttaaatgtaggagtgtgtgacttaacctttgcctggcatggcctcacaccctgtttataatttggtat

SEQ ID NO: 195623 - DNA, 201 bp, Homo sapiens
atgtgttctatcttggagaatgatttgtaggctgatgagaataatgtatattttgcagttattgggtagaatgtgctataaatatctgttaggttcatttrctgtagagtgtagtttaagtccagtgtttctttgttgactttctgcctcaacgatctgtctaatgctgtcagtggagtgttgaaatcgcttctatcattg

SEQ ID NO: 195624 - DNA, 201 bp, Homo sapiens
catgtgtatacatatacacatgtatataagtacatatgtgtaagtatatataaatatttgacatgagcaaaattaattttagataattacacatttacatrttaaagcaatgtaatccctatggaaatttatagcttttaattttcatttatatggcccttccttttcattttcttggtaaactttagttcagaaaacaat

SEQ ID NO: 195625 - DNA, 201 bp, Homo sapiens
gtttagaaaaccagattttttcattcaaatataaatgtaattgaagagttgatgtggcatcatatataataatttagttttctcttataaaaagaaattamcccaaattctgcctttgcctttagagtcattgctaatttcacttcaaccccttgactatgtgtatatatagagagagagactatatacagagagagagac

SEQ ID NO: 195626 - DNA, 201 bp, Homo sapiens
tgtcctcccatagtttttttttttttttttttttttttaacaggagaaaaagaaataaggcaggaacagtgtaggaaagaagaaaacaaaagtaaaagaamccaacaaagagagaaaggaaaggagaatggaaggaagaggaaaaaaaaagaaaatgtgataatttattcaacaaactaagtaatgtatatccagttgact

SEQ ID NO: 195627 - DNA, 201 bp, Homo sapiens
gtgtgtgtagacctatgtttctgtttctcttgagtaatttcctaggagtggaactgtagggtcataagaggtgaatcttgaggtttataggacactgccakatctttttctcaaagtgattataatctctaattgtattcttttatcaagttctaatttggaaattagactttcttacctaatcaatatgaattcaacctt

SEQ ID NO: 195628 - DNA, 201 bp, Homo sapiens
tctttcataactcaatcatagaagtgataacctatcacttttgccatattctgttcattaaaagcaattctctaggtacagctcacactcaacaagaagcmttacacaacagggtaaatatcagaaagcagggatcattgaaaccatctagaagttgcctaacacaggattaactgatataatatatttaaaaatatacag

SEQ ID NO: 195629 - DNA, 201 bp, Homo sapiens
tctgaaaactttcacagcttctataaatgccaatgcattatcattacgctcttggcattgaattctttcagtgctttaattgtggaatactattattcttmttattattactattttcagcacctattaccattcctaaaacatatcatttatttgataaaatttggttggcccaatgaataaacctgtagttactttgta

SEQ ID NO: 195630 - DNA, 201 bp, Homo sapiens
gttaggcaacgacttaatgagttaataaaaacatgcagtaataagaattatacctaagaattgtgctaagtaaatactaattaatgttagtttctttttawaaaaaaaaaaaaaaaggattcggacataaaaatatgttccctagctttattttctaacattttgcagcttatcaaaattcctttgattcatctttatcca

SEQ ID NO: 195631 - DNA, 201 bp, Homo sapiens
gtaactacataatctttttgctaccatatgtaagaactgacctgctgcctctctgtcccatcagttcaggctactgtataatagaatactacatatttggygacttcaacaacaatcatttatttctcacaattccagtggctggaacatccaagatcaaggctctgacagatctggtttgcggtgagggcactcctcctg

SEQ ID NO: 195632 - DNA, 201 bp, Homo sapiens
gatgcaaaatcaatgtacaaaatcagtaacatttctatacaccagtaacattctagctgacagccaaatcaagaacacaatcccatttacaatagccacaygcacacaaaatgaaatacctgggaattcatctaatcaaggatgtgaaactgctctacaaggacaagtacaaaacactgctgaaagaaatcatagatgaaa

SEQ ID NO: 195633 - DNA, 201 bp, Homo sapiens
taaagtttacaaacaggatgcaaattcattgctttctaattataaatacaatgagacagttttgttacactttctttccctttagacatattttgaggaawctgctttttagagagatattttgtagaaaagtttttattacttttcaaattttctttgctttattcattctctttttcttatagctgataaaattgcatc

SEQ ID NO: 195634 - DNA, 201 bp, Homo sapiens
atatatacacatatacatgtatgtatatatatacacatatatatgtatatacatatgtgtgtatgtatacatacacacacacacatatatatgtgtgtgtrtatatatatatatatatatgtcaggtaaatatttattcttgattttttatggccaaactgttcaagtagcaggctatatggaactggatatatttctaaa

SEQ ID NO: 195635 - DNA, 201 bp, Homo sapiens
ccttgtccattcatctccacttgagtaccaaaatattactatccattgctctatttttacttcttttttactcccttcagaagatttgtgtaagactaaartgtcatgcttttattcttctggtcccctttcagaattcagaataggcctcttaatttattccttgatctaggaagctggaaaactcactgagttgcaaaa

SEQ ID NO: 195636 - DNA, 201 bp, Homo sapiens; identical to SEQ ID NO: 33506

SEQ ID NO: 195637 - DNA, 201 bp, Homo sapiens
gtgctgtgcatgagaaagcaatgtagcccatttatttggaattgtatacttactaccactcacctaccagcttcacgtgtccaaaacacagggatgctcamttgtgcagaacctcaaagaaataaaagtaattggtcaatagtccttgaatgtgattacttgctttgcatttacaaaatatgtgagattatatacaagcaa

SEQ ID NO: 195638 - DNA, 201 bp, Homo sapiens
atgtgataactcgaataaagggaattgacactttaaaatgcatttttaaaatgttaattataccattactataaatgtccctagaacacagatacttattsttcacatttgaccatttgactatggaaatgactgcttcaatctcattgggagtaggctgtaggatagttaatgacatttttcttcttttatctgaattat

SEQ ID NO: 195639 - DNA, 201 bp, Homo sapiens
catattaaacatataagaacatttagaggtcttagatgcaagataatatgtggaggttttttgatacatattatgcttgttcaggaagaattttaaagatraagaaaaaaatcatttctcaagtttctctacatggaagtgacctttaaattgcccaactcagctctaactttctaaatgggataaacaagaacaaacact

SEQ ID NO: 195640 - DNA, 201 bp, Homo sapiens
gcttcaagtggctacaaacaacagtattatgtgttctatttgaagcttggatgcaattttattatatttatataataataaatatttgtaaaatataaacatatatgattacgtaagtatttatataatatatataatatatttcgtgattctacaaaatttgaagttacaaaacaggatccaagcttaatataaagtctt

SEQ ID NO: 195641 - DNA, 201 bp, Homo sapiens
cttcaagtggctacaaacaacagtattatgtgttctatttgaagcttggatgcaattttattatatttatataataataaatatttgtaaaatataaacatatatgattacgtaagtatttatataatatatataatatatttcgtgattctacaaaatttgaagttacaaaacaggatccaagcttaatataaagtctta

SEQ ID NO: 195642 - DNA, 201 bp, Homo sapiens
tggatatctccattatcctcatctcattatgacatattatatgaatgtataaaaatattacatgcatccccaacatatgtacatctattttgtatcaatgraaataaaaagcaaaacacttcaggatcatttaaaaaaagatcagtggcaaagccccatttcagaccaattgtatcctagaatggtgtgtgagcacagtgc

SEQ ID NO: 195643 - DNA, 201 bp, Homo sapiens
aagtttgagaactaccacactaaaatgtttggtatacgtttgacattacaaagccacgtacttacaaatctgagagagaatcctgaatatgtaaactctaraataatcctttggcagattcaccagaagaagacataaataaaaacaaaagaatggatttaataatatttcattggtccatgtgagaactgatgaggttct

SEQ ID NO: 195644 - DNA, 201 bp, Homo sapiens
agtctaacactatgtataatattgtgatgcctttcttctttctgtcaacatcatacatagacatcttatgcacatttcaagtgatttccatgtacaaaatmcatttatagtaggagatgtagatcaagttggttattttttttttttacatactggtttatttaaaatattgcagtacattttatgaaaataagtctattt

SEQ ID NO: 195645 - DNA, 201 bp, Homo sapiens
tttattctgtgtgtgtgtgtgtgtgtgtgtgtgtgtgtgtgtgtatgtgtgtgtgtgtcttttttggtaagaataacctacttttaatttcactgtaaaargcacagatcatggcatttggggcatttactaaatactgtgctactggctattttcctttctctatgtgaatgtgacaacattgcattagctggacacaga

SEQ ID NO: 195646 - DNA, 201 bp, Homo sapiens
tttctataatgtaattatgacttggtaatgtgtatttgaagccacaccgtaaagtaaaatgaacatcagcctataaggaaaatgtctggattttaaacccygctgcaatatcaatagctattgaacatcattagtttatctgaacctcagtttcttgatctattaaatggaaattataaactcctgttatgcttgttttaa

SEQ ID NO: 195647 - DNA, 201 bp, Homo sapiens
caaataggaatatccaaccccccacctgcaggtgacaataataggacattttgcaaacgccccaaagaagaacttcagaactttacgttcctttgtgagcrtgcgcttattgacttgagcaagtggcttatatagttcttgctggtttgcagacttgtttatatcatactttatttattgaaaatccaatactatacagaa

SEQ ID NO: 195648 - DNA, 201 bp, Homo sapiens
tttcacattattgggagtgatggttcagagccagccacctatgcttgactttcactctttaaaactctgcagttaatcacagccctcattatacaaaggtyacatggatataaagtttgaaagattcggttcaagactgcgagcggtggccaggaaaaaaaaaaaaaaggagaagacacaaagacaatgatcaaagaacaa

SEQ ID NO: 195649 - DNA, 201 bp, Homo sapiens
aagatgggctgagcttttggcaattttataacaaggaaaaagacataaatttgagctcaggacccaccaggaaagggccacggtaaacacaccaaaccttkggtcgggatcctaaagagttataccctcgctgtaataacaagagacagtccagccttcacaagagtggaaactcagcttcaggccatttcaattcctagt

SEQ ID NO: 195650 - DNA, 201 bp, Homo sapiens
ccccaaagaagaacttcagaactttacgttcctttgtgagcatgcgcttattgacttgagcaagtggcttatatagttcttgctggtttgcagacttgttmatatcatactttatttattgaaaatccaatactatacagaaaaacaatttgtaaagcaaagaaatgaggaacaaatctaatggctgatttaggatgcgct

SEQ ID NO: 195651 - DNA, 201 bp, Homo sapiens
tcattccattgccagctctcagaaatgaaaaagccagccccatcctgcactgtccatgtggacaatgtgctacctttctaattcaagcacctttttttttwtaaaaaaaaaaaaaaaaaaaaaaaggaagaaagaaaaagaaaaattcagattgaccttggctctcaccattaaaaaagcgaaaagtggtatattactttg

SEQ ID NO: 195652 - DNA, 201 bp, Homo sapiens
cattccattgccagctctcagaaatgaaaaagccagccccatcctgcactgtccatgtggacaatgtgctacctttctaattcaagcaccttttttttttwaaaaaaaaaaaaaaaaaaaaaaaggaagaaagaaaaagaaaaattcagattgaccttggctctcaccattaaaaaagcgaaaagtggtatattactttgc

SEQ ID NO: 195653 - DNA, 201 bp, Homo sapiens
gaggctcacttttaaagtgtccaaattgacttttcattctccatcgctagtaactttttaagacgcaacttttcaaaaatatgacttaaattcaggcttcraagctacatcaacggccagagttccattaactctgtgctctgtgggctcaccatcaccttgcctaaaatcaatgactcctccaactccaaaccggacatt

SEQ ID NO: 195654 - DNA, 201 bp, Homo sapiens
attgtgattggttaggaagtggtactcaaacatacaaaaaagaggcaaaatgtaaaaaactttaaagcaaattgagtttaatagaaaaacactaaattaamggataatccttaccttgtagttgcttttttaaaagtatctctgataatcaaaaaaaaaagtatctctgataatctatgtaaccagatcactatcttagat

SEQ ID NO: 195655 - DNA, 201 bp, Homo sapiens
tgataatctatgtaaccagatcactatcttagatatctttaagataattactttttaaagttttgtaaaatctaacagtggcttgtgtgtgtttgttactmttgttgttttggtctttaaaaaaataatgctgacaccatctcaattcacactgataacatttaaagcaagccctaagtttctgcttctgtgagttttctt

SEQ ID NO: 195656 - DNA, 201 bp, Homo sapiens
tcaattcacactgataacatttaaagcaagccctaagtttctgcttctgtgagttttcttgcagtggtcaaatatccacaacagtcccgcgtggaaggcaygggcaatgctagctttaaaacaaggaagtaaattatactctttacctcacttctttcacatgccaggatgcacggaacaaaacacaccgaatcattgcga

SEQ ID NO: 195657 - DNA, 201 bp, Homo sapiens
agtttctgcttctgtgagttttcttgcagtggtcaaatatccacaacagtcccgcgtggaaggcacgggcaatgctagctttaaaacaaggaagtaaattrtactctttacctcacttctttcacatgccaggatgcacggaacaaaacacaccgaatcattgcgagtttgacctttttggttataacatattcagtgatt

SEQ ID NO: 195658 - DNA, 201 bp, Homo sapiens
cagcatcctacccatcgttccttaatatcatgccatgaaaacacaggatgcggcagtttcccggcagggaaaacaacaacaacaacaaaatgaaaacacargtgtcagtatctatgaaaagcacagcaaaatgttgagcccatgagcctaatataatggttggtactgagtgctccctatctgaaaataatgttaaagtca

SEQ ID NO: 195659 - DNA, 201 bp, Homo sapiens
ccaaaaaaagaagtatcctgagccataagcagaaatatgtatgtgtatgtgttgacatgtatatgtataaatgtgtgtgtctacatgtatgtgtgtgtgtrtatatatatatgtgcaagctacaagcagaaatgtacgtttgtatatatatatatatatttatgtctgtgtgagccgcaaacagaaatatatatgtgagtg

SEQ ID NO: 195660 - DNA, 201 bp, Homo sapiens
aagtatcctgagccataagcagaaatatgtatgtgtatgtgttgacatgtatatgtataaatgtgtgtgtctacatgtatgtgtgtgtgtgtatatatatrtgtgcaagctacaagcagaaatgtacgtttgtatatatatatatatatttatgtctgtgtgagccgcaaacagaaatatatatgtgagtgtgtatctgta

SEQ ID NO: 195661 - DNA, 201 bp, Homo sapiens
agtatcctgagccataagcagaaatatgtatgtgtatgtgttgacatgtatatgtataaatgtgtgtgtctacatgtatgtgtgtgtgtgtatatatatakgtgcaagctacaagcagaaatgtacgtttgtatatatatatatatatttatgtctgtgtgagccgcaaacagaaatatatatgtgagtgtgtatctgtat

SEQ ID NO: 195662 - DNA, 201 bp, Homo sapiens
tgctaaaaactgcagatagttttagaagtagttagagaccagtagctacaagactgatagttatacctctcaggaaaatgatggaagccacagctgaaaamaaataaaactttcatcttagaattctatacctagtgaaaatatttttgaaaaataaaggcagagaacaaaaattttaagcaaacgaaagctgctttttgt

SEQ ID NO: 195663 - DNA, 201 bp, Homo sapiens
tagctgcattttaaatatttgtctaaaataaaccttaacctatcgcagggcgtgctgccccagcctgagactggctgcttcatctacagttgtttctctayttgtccttgcgtagggaagttttatcaccacaaggaccgtttctcctctgtttaatctaacacctgctagtctgagattctctaaatgtcccacaataaa

SEQ ID NO: 195664 - DNA, 201 bp, Homo sapiens
ttccttcctttataataatgaataaatattaaaatcctgcaaagatactgctcactgtagttttgaatgatgctaccaagaaatctgtgggggaaaagcaygccgtttttctatcaaattttattttcccaaacaaacctgttaagtcctgctatctcacttgacaaaataacccacggcaaaggactttttattaccaga

SEQ ID NO: 195665 - DNA, 201 bp, Homo sapiens
ccaaaagaaaactagggggtggacacacatttacgttgcagtcttatttcccaaggcgtcataattttcatcactctcttattggttgcaggaggaaaaargcatcttctccatttcagatgtgtctttctgggtgaagggatctccatttgcgttaacatccctgaccccctctgccactcacttattcctgctcaaggg

SEQ ID NO: 195666 - DNA, 201 bp, Homo sapiens
tgcgagtttgacctttttggttataacatattcagtgattacagcacccaggttcccacagggcatacaattggtaaaagaaattctccatcactttttamgctatctgagaagccatctgagcttgaataaaatcagacactcagaagggagagctgggaaggagttcttcatttgataacattttgtttggggatacca

SEQ ID NO: 195667 - DNA, 201 bp, Homo sapiens
aattggtaaaagaaattctccatcactttttacgctatctgagaagccatctgagcttgaataaaatcagacactcagaagggagagctgggaaggagttyttcatttgataacattttgtttggggataccatgatgagggacgggtgaaatacaccaattttgaaatctatacctctcaggaaacgtgtaatctaacca

SEQ ID NO: 195668 - DNA, 201 bp, Homo sapiens
aaatccatttgactccccttgggtgtgtgggtagtaaaaggtttttgaagctgtatctccaacctttaaagcaagacgacaataatctcaaatttactcayttttacctgtgataccaatgtcaccccttatcaccagtgagcaaaagacacctagatcatttggggaaaatgagagaagtaaaatgccaggttttgtagc

SEQ ID NO: 195669 - DNA, 201 bp, Homo sapiens
gtgactaggatcaatttaaattcaaaaaagagaaacagagagagaaagagctctgagttggtgaaggctttggaaccctaacagaggattccaacctgcasggcttgccaggcagagggtcttgtcagcagcgggagcctaagcacttgggaggcaagtactccccaaaagatcccaacagagattctccttcctagagta

SEQ ID NO: 195670 - DNA, 201 bp, Homo sapiens
aggatcaatttaaattcaaaaaagagaaacagagagagaaagagctctgagttggtgaaggctttggaaccctaacagaggattccaacctgcacggcttsccaggcagagggtcttgtcagcagcgggagcctaagcacttgggaggcaagtactccccaaaagatcccaacagagattctccttcctagagtaaacagc

SEQ ID NO: 195671 - DNA, 201 bp, Homo sapiens
agtggtaaacatatattgagagcctaacataatcatagtaggtggaaaacaaatgttagttgcctgctttttgcaaaatccttggtgtcctatgcctcttmcccaattcgtacgacctaccaaatccagcacagtcactatgactaaaaaattaaaacttgctcctagatgtgctaccaatggtaacccgagggctgaatg

SEQ ID NO: 195672 - DNA, 201 bp, Homo sapiens
tttcttcagtgctttgagacagatagggaaaaggagataaaatcaacatgaaaccaaacaatttcttggaagagaaacagatcaggaatcttacgattctyacgagctgaactgctcccctgccatcccaaactcatacactgaagccctaacccccaacatgactgcatttggagatggggcctttatggtcataattaa

SEQ ID NO: 195673 - DNA, 201 bp, Homo sapiens
tgccacaatctgacccttcgaatagacaatatccttttaacattcggttctaaactgacctgaagcaaaacaagaactaaagacgtgaagatgaccttgayctgtagattttcactgcaagaaaatgtgaataattataacagcaagttcagaacccatgtggatgacaaccacagaaaatttaattttagacaatttaca

SEQ ID NO: 195674 - DNA, 201 bp, Homo sapiens
agatgcctggtgacttctcagggtgggctgtccccagtgtgttttatgaccatgcaggaaggaaaaataaggaatttaaaaaatcttctttcaaaagatayggattcttatcggactttcattccttagtaaagttgcattaaacccagagacatttattctttaattttccctattctctcatatggaaggtaggaagaa

SEQ ID NO: 195675 - DNA, 201 bp, Homo sapiens
taggaattcgaggttacagtgagctacgatcctgccactgccctccagcctgagtgatggagcagattctgtctcaaaaaaataaaacataaagaccctcyaccaataaaaagaaagtaacaccgcatgaaattttttgtaatcaaaatatacatggcacttttttttttttttttttttttttttttgagacggagtctt

SEQ ID NO: 195676 - DNA, 201 bp, Homo sapiens
gggtggagcagacagacttggagtttggaagccagatggaccaagcaaggagcctgactctgagctcaccagctgtgcaattcgggtgagttccttcaccyttctgagccatcccttggctcgtctggaaaatgcaaaaaaaaaaaaaagaaaaacaccaggtttttgcatcctcctggatgagggatataaagtgcctga

SEQ ID NO: 195677 - DNA, 201 bp, Homo sapiens
actgagttctcctgaagcattataaaaaacaaatcagttacatgttttaaatatccgttggcaagcatcatagcatggctcttaatctgagaaataatttyaattaaactaaaaagaggtaagtcattgaacacacaataattaaacagcagactgtgctgtcagcaaaactgggctggctcttgcaggattatcagaggg

SEQ ID NO: 195678 - DNA, 201 bp, Homo sapiens
acaatacgtaaggaaattcctcatggactaacacaagcggtcagacaccacactagttgctttcattccaccttgtcgaattctcacaactctgtgatgcygacgtcatggttcccattttacagatgaggaaactgagactccggggtgaaagatactgtgccaggccccagaattggcaagctggaaagcatagacgtc

SEQ ID NO: 195679 - DNA, 201 bp, Homo sapiens
agtaaggtctaaagagagagacatgactcaatgaacaccaaagcagacacccaggaaacagcatcctttgctcaccctgtcctgggaatcaaataagcctrttatgaatctgaatgtatattacaagcaaatactatttttccagctacacgttcttccttgtttcactgtatcacaataattttttaaaagcataggcat

SEQ ID NO: 195680 - DNA, 201 bp, Homo sapiens
gtgaattctctattctagacgtctcaaaagtcacatagaggtacatgtgcttatatgttcaactcccaaaaggactgacaagtaaaaaaggaatcacagaycgacatgtcattttccctgctattatctttttgagtcagttttagtggaaggtgttttttttgttgtttgttgttgttgttttgtttttttttcagtaat

SEQ ID NO: 195681 - DNA, 201 bp, Homo sapiens
tgacaactctctaatatttttcttcccttgcaagctcagctcagccttgcaggtatctcccttgcttttgtgagctagcttccccaggattctacttctaygcatgacatgcagtctggaggttctagcagtctgatttttctattcattgaaagtcatgagcatttgttcctcaggggttaatttgaaattatttcaggc

SEQ ID NO: 195682 - DNA, 201 bp, Homo sapiens
agctcagctcagccttgcaggtatctcccttgcttttgtgagctagcttccccaggattctacttctacgcatgacatgcagtctggaggttctagcagtytgatttttctattcattgaaagtcatgagcatttgttcctcaggggttaatttgaaattatttcaggccaggcatggtggctcatgtctgtgattccact

SEQ ID NO: 195683 - DNA, 201 bp, Homo sapiens
gagcctgtaatcccagcactttgggaggccaaggcgggcagatcacttgaggttaggagttcaagaccagcctggccaacatggtgaaaccccgtctctawtaaaaatacaaaaattagctggacgtggtggcacacacctgttgtcccagctagttgggaagctgaagcaggagaatctcctttacccaggaggtggacc

SEQ ID NO: 195684 - DNA, 201 bp, Homo sapiens
ataacacgcggataaggttttttaaaaagcatcctttgaaaagttaaatatgattaaattcttcaatccaaacaagactagctttataaccagtaatacayggcatgtagaagtcactccctcaaggttgatggtgagatcttaatttggctaacccttccattttacataataagaagtaaaaagtttgcttggaatttg

SEQ ID NO: 195685 - DNA, 201 bp, Homo sapiens
aattatggcaattataaaacctccctggtatagattgtcagattaataaccagcattagcagagctcagctacaccatcagcacgtgagaatcgaagagcycagagctacagggctaagtcgtaacaggagcaaagcaaagaagccaactaaaagaaacccagccagaactgtaaaagaaatctgcccacaaaataaaatg

SEQ ID NO: 195686 - DNA, 201 bp, Homo sapiens
tggtatagattgtcagattaataaccagcattagcagagctcagctacaccatcagcacgtgagaatcgaagagcccagagctacagggctaagtcgtaayaggagcaaagcaaagaagccaactaaaagaaacccagccagaactgtaaaagaaatctgcccacaaaataaaatgggtaaggctgccactcagactagct

SEQ ID NO: 195687 - DNA, 201 bp, Homo sapiens
acctgatttacaaaagtgggcctcggggggctggatttggtccacgtgccacaatctgacccttcgaatagacaatatccttttaacattcggttctaaastgacctgaagcaaaacaagaactaaagacgtgaagatgaccttgacctgtagattttcactgcaagaaaatgtgaataattataacagcaagttcagaac

SEQ ID NO: 195688 - DNA, 201 bp, Homo sapiens
agacttggagtttggaagccagatggaccaagcaaggagcctgactctgagctcaccagctgtgcaattcgggtgagttccttcacccttctgagccatcycttggctcgtctggaaaatgcaaaaaaaaaaaaaagaaaaacaccaggtttttgcatcctcctggatgagggatataaagtgcctgacacagcatatgac

SEQ ID NO: 195689 - DNA, 201 bp, Homo sapiens
atggacttgctcatgctttcattcataagacaaacaaagtgaagatgactttaaaaataaagacatgattccaagagcaataaactttacacactccactraaatctccatatggttagcccggcatgtgtatttgacaattaaaaaaaacaacaacagtcaagcgcttacccattcttctaaaatgcgtgacactgcttc

SEQ ID NO: 195690 - DNA, 201 bp, Homo sapiens
atgcagtctggacttcattctgaaatccagcgatgtttcaaaaatcaaacagctcgcatcactctctagctcaaaccctctaatgtcttcctcaccgctayctcagagtctaccagatacccatcccccaacagcacctctcctacccactccattcatctccagccacactagcttccctgatgatccttgaaatctcca

SEQ ID NO: 195691 - DNA, 201 bp, Homo sapiens
ctttctctgtgaatttcctcttgatcacaggattgaacaggtacttaaagtaatagacactttataaattaacttctaagggacattttgaaaattaaatkatagcacatgaggcaagcaatcaattagtaatcgatacatatccaatagtcatgcatataagatgaaagggcaattcgttaaaaaacaaatggcccgaca

SEQ ID NO: 195692 - DNA, 201 bp, Homo sapiens
agcgtgattaatataaattacagaagaagcaattaaacttgaccacagatacacacatttgttcaagctgatggtgactctgcactcactccatacctacygtagattttgcttttctttatagttactcagaagatgcataattggaaataaaggttaagaaaaatcaaggccgggcgtggtggctcacgcctgtaatcc

SEQ ID NO: 195693 - DNA, 201 bp, Homo sapiens
tcctgtacttttaaatacaaatagaaatacagaaataattagaaactacccagagtttcgccagatgtggtggctcacacctgtaatcccagtactttggkaggctgaggcaagtggactgcttgagcccacgagttcaagaccagcatgggcaacatagcaagacctcatctctattaaaaatacaaaagaaattagcca

SEQ ID NO: 195694 - DNA, 201 bp, Homo sapiens
tagtccaagctactcaggaggctgaggtgagaggatcacttggcccaggagggagaggctacagtgagctatgatcacgctgatgcactgaagcctgggtracagagcaagaccctgtctcacaaaagcgaatcaatttaaatgttctctagaagcacaaagatcaagctgctggtacagtcacacactgcataacaacac

SEQ ID NO: 195695 - DNA, 201 bp, Homo sapiens
gtcccataagattacaacactgtatttttactgtaccacttctgtgtttagatacacaaatacttaccattgtgttatgactgcctatagtattcagttcrgtaccatgctatacaagtttgcagcctggaagcaacaggctatcccatacagcctctgtgtataatgggttataccacgtaggatttgtaagtacatcct

SEQ ID NO: 195696 - DNA, 201 bp, Homo sapiens
tggaggcttaaagtccaaggtcaaggtggcagcatggtcacgttcttggggagggccctcctactagttacagatggctgccttcccactgtgttctcacmttcacatagcttaaggaaagttagctacctttctatcctcttctcatcagggcacaaatcttacttatgagggctccaccctcatgatctaatcacctcc

SEQ ID NO: 195697 - DNA, 201 bp, Homo sapiens
acttatgagggctccaccctcatgatctaatcacctcccagaggcccctgtattagtctgttttcatgctgctataaggacatatcgaagactgggaaatktataaaggaaagaggtttaattgactcacagttccacgtggctggggagacctcaggaaacttacaatcatggcaggagaggaagcaaacacgtccttct

SEQ ID NO: 195698 - DNA, 201 bp, Homo sapiens
tcttcacatgacagcagtaagagaagtgccaagcaaaagggaagaaagccccttataaaaccatcagatctcatgagaactcactcattatcgtgagaacrgcatgattcaattatctcccaccgggtccctcccacaagacatggggatcatgggaactatagttcaagatgagatttcagtggggacacaaccatgtcc

SEQ ID NO: 195699 - DNA, 201 bp, Homo sapiens
gatgagatttcagtggggacacaaccatgtccaaataccatgaccttaagattagggtttcaacataggaatttttggggaagacataaacatttagtctmcaatactcattctgatttttcaaaactgtcataaatctacatttaagtaaaatatcctgattttagtatgctggcaagtagtctgacaaaaaaaaaaaga

SEQ ID NO: 195700 - DNA, 201 bp, Homo sapiens
ttctatgtttagatacacaaatacttaacactgtgttatgactgcctataatcttaggtttgcagcatagaagcaccgagtttgtggtggtccattatagyagcaacaggacattaatacaccttcccaataattaagtaaacatgtaaggaacatacaagtgagatgcaaacatgtgtacactcgggtaagtcaatcact

SEQ ID NO: 195701 - DNA, 201 bp, Homo sapiens
taatgtaaatgaaattacagtgacatgacattgacgatgatcttgaaatccaactcccccacaggcatttccagatgaagttctaagatgtacaccacgcytatatgctcaatgccacatctgcaatgactagctaatccatacctctgtttctgtagttactttgattacctgaatgatcacacttgcctcccaggccat

SEQ ID NO: 195702 - DNA, 201 bp, Homo sapiens
aagatgtacaccacgcttatatgctcaatgccacatctgcaatgactagctaatccatacctctgtttctgtagttactttgattacctgaatgatcacayttgcctcccaggccatttcaattacatagttctgagttccaaagagttagagatcgtgcttactaaacacgatccacagctgccaaatcttaagaactta

SEQ ID NO: 195703 - DNA, 201 bp, Homo sapiens
agagaaacagatcaggaatcttacgattctcacgagctgaactgctcccctgccatcccaaactcatacactgaagccctaacccccaacatgactgcatytggagatggggcctttatggtcataattaaggataaatgaggtcataatgggggagccctaatccaataggactggtgtccttatgaaaaggggaaatct

SEQ ID NO: 195704 - DNA, 201 bp, Homo sapiens
taatgggggagccctaatccaataggactggtgtccttatgaaaaggggaaatctggacacagcacacggtgaggagactatgtgaacacgaagaagcctrctgagatggttaatattgagtgtcaatgtgattggattgaaggatgcaaggtgctgttcctgggtgtgtctgtgcgggtgtttccaaaggaggttaacat

SEQ ID NO: 195705 - DNA, 201 bp, Homo sapiens
ccaactaattttttgtatttttagtagagaaggggtttcaccatgttggccaggctggtcttgaacccttgacctcatgattcacctgccttggcctcccraagtactgggattacaggcatgagccaacagtgccagacctactgtctgctttttatacaatgtgaatcattagaaaagcaacaccctctcgccaacccc

SEQ ID NO: 195706 - DNA, 201 bp, Homo sapiens
cctaatccaataggactggtgtccttatgaaaaggggaaatctggacacagcacacggtgaggagactatgtgaacacgaagaagcctactgagatggttratattgagtgtcaatgtgattggattgaaggatgcaaggtgctgttcctgggtgtgtctgtgcgggtgtttccaaaggaggttaacatttaagtcagcgg

SEQ ID NO: 195707 - DNA, 201 bp, Homo sapiens
gacggtgaatgattctgaataattcttagtctgggatcactggtctatctcaaggtactacatgttagagtaaaactataaaacagcaaattctatcatckgaaattgactcacagggacccaattaaggctcaaaatataagaaagaaagactgaacagtgggtctttgacatcatccatccaacctttttccttaaaga

SEQ ID NO: 195708 - DNA, 201 bp, Homo sapiens
gtgggcggatttcttgaggtcaggagtttgagactggcctggccaatacagcaaaaccccacctctactaaaaatacaaaaatcagccgggcatggtagcrtgcacctgtaatcccagctattgggaggctgaggcaggagaattgcttgaacctgggaggcagaggttgcagtgagctcagatcgcgccactgtactcca

SEQ ID NO: 195709 - DNA, 201 bp, Homo sapiens
tttgacaattaaaaaaaacaacaacagtcaagcgcttacccattcttctaaaatgcgtgacactgcttcactcgcccttgccatgttcctgcaggccaagrtcacatgtgcaccatggagggcaaaagacttggcggtttcgaaccctatggtttaaaggaaagtcaatgttagaaaacataacatcaacacagtgagtca

SEQ ID NO: 195710 - DNA, 201 bp, Homo sapiens
aactaatctgattaatgtaaatgaaattacagtgacatgacattgacgatgatcttgaaatccaactcccccacaggcatttccagatgaagttctaagawgtacaccacgcttatatgctcaatgccacatctgcaatgactagctaatccatacctctgtttctgtagttactttgattacctgaatgatcacacttgc

SEQ ID NO: 195711 - DNA, 201 bp, Homo sapiens
ttcttaataaatgagttaaaggaagaaacattctcaaacccctgactaataaagcagatgacactgacaatgaactacaaacaaatgcgtgaataataatkgacttgctcatgctttcattcataagacaaacaaagtgaagatgactttaaaaataaagacatgattccaagagcaataaactttacacactccactgaa

SEQ ID NO: 195712 - DNA, 201 bp, Homo sapiens
ctacaagactgatagttatacctctcaggaaaatgatggaagccacagctgaaaaaaaataaaactttcatcttagaattctatacctagtgaaaatattyttgaaaaataaaggcagagaacaaaaattttaagcaaacgaaagctgctttttgtttgtcacctacactacacctagtgtcacgtatagacccacactag

SEQ ID NO: 195713 - DNA, 201 bp, Homo sapiens
taaaggatgctcttcaggcaggaggaaaatgaccttagctataaacccagagatgcagaaagtaacaaagagcaacataaagggtaacgacatgttaagayccaaatggtaagagtgaaatctgtgagttttaaaatatatagcaaaaattactatatcaataataataacaatgcttaacctaggaggtgagtaatggaa

SEQ ID NO: 195714 - DNA, 201 bp, Homo sapiens
gcgagaccctatctcaaaacaacaacaacaaaaacctaaacgatagggtttggagagcttccagattgctgagcatgtggtgcctggagaggggcatgccrggagggggtatggaagctccacatcccctccgcatgcctggccctatgtaccgcttcatctgtactctttgtaatatcctttatcataaacaggtaaaca

SEQ ID NO: 195715 - DNA, 201 bp, Homo sapiens
gttctgagaaggaaagtaacttgctcgggtcatacagataggaagtggttatcccaggtttcaaaactaggtcacgtctgcttccagagtcagtgttcctstcctacatctttccagatagaaacttgctaccaatgaagcttgccctaactgtcagcgaagctattttcagcaatggtacaatttctccacctgaaagca

SEQ ID NO: 195716 - DNA, 201 bp, Homo sapiens
aagtaatagacactttataaattaacttctaagggacattttgaaaattaaattatagcacatgaggcaagcaatcaattagtaatcgatacatatccaayagtcatgcatataagatgaaagggcaattcgttaaaaaacaaatggcccgacataagaaaagcctatcaatcttgctaatcatcagagataggcaaattt

SEQ ID NO: 195717 - DNA, 201 bp, Homo sapiens
ttcgacattatcacaagacagctgtaagcacggtgctgagaattaaatatgacaagtacggaatcttcataaattttaaacggctatcaatgtaatacaayatgataatcaataaatacgaatctgtaacaattaagtacattgtagaggtaagggtaaaaatgaaaaacattgtattagctttaacttcagtttctgtgc

SEQ ID NO: 195718 - DNA, 201 bp, Homo sapiens
ctgttatgaatctgaatgtatattacaagcaaatactatttttccagctacacgttcttccttgtttcactgtatcacaataattttttaaaagcataggsatatcatgaaatcccttgctttgtagaagattccattataagagtaatcattattgaaccttttagcccagatgtaatttcttacatgttacaacaagtt

SEQ ID NO: 195719 - DNA, 201 bp, Homo sapiens
tataaattatattgcatgaataggacaaaatactgtgttacacctaaaaagaatgaggagaaatgatacggagatgcaaggaaacatttccatgttataattttttttttttttctcttgagacggagtctcgctctgtcgcccaggctggagtgcagtggcgcgatctcggctcacttcaagctccgcctcccgggttca

SEQ ID NO: 195720 - DNA, 201 bp, Homo sapiens
actatatccttggtcccaagactaatgcaagcccttagtaaatatttatgtagacacgtatcaacatcaacttctacatagacagagaaaagtaagaaatyagagatagggttaaagcttccttctttctaatcttaacaaccataagcataacagtctcctagttgcaatcatgggcgttcaccacgttttatttttctt

SEQ ID NO: 195721 - DNA, 201 bp, Homo sapiens
attaaacttgattatggtctatttttcctacctagaaggtaagcctatgagggcagggattctgtttcgtttaatactatatccttggtcccaagactaakgcaagcccttagtaaatatttatgtagacacgtatcaacatcaacttctacatagacagagaaaagtaagaaatcagagatagggttaaagcttccttct

SEQ ID NO: 195722 - DNA, 201 bp, Homo sapiens
aaaagaaatagccaggtgtggtggcaggtaccggtagtcccagctactcagaaggctgatgtcgagggattgcctgagtccaagagttcaagggcacagtsagctatgattatgccactgcactccagccagagtgacagagcaaggccctgtctcaatttaaatggaagaaagaaaggaaagagaaagaaagagagagag

SEQ ID NO: 195723 - DNA, 201 bp, Homo sapiens
atgacaattctaaatttatatgtacttaataatagagcctctcatatatgtcaaaaattgacagaattaggacaataaatagacaaattcacaattataayggaagattttaacatatccctcttagtaacagataaaataagcagacaaacacaaagtatatagaagacttgaacaacttaattgataaactgaaaataa

SEQ ID NO: 195724 - DNA, 201 bp, Homo sapiens
aactacatatattaaaaagaagaccaggcacagtggctcatggctgtaatcccaggaatcggggtggccgaggcgggtggatcgcttgagcccaagagttygagaccagcctgggcaacatggcaaaattccatctctacaaaaaattagttgggcgtggtggtgcacacctgtggtcccagctactcaggaggatgatca

SEQ ID NO: 195725 - DNA, 201 bp, Homo sapiens
taatgtcgacgctacttccatttttaacacatgcatacatgcctgctataggaagaaactaaaaataacaaaccaaatgctatctaattgataattcatgrgcctttatgaattttaatacagagcaatcaaggcaagtgagaaaaaaagggaggagcctattcctattccaaacaaggtatttcctgagcatcctgattt

SEQ ID NO: 195726 - DNA, 201 bp, Homo sapiens
gatctaccatatagtactgtgctcatattgtatcatgtacttataaaatataatggtttcacaggtatatacttatctccaaacttatcaagttctatacrtcaaatacgtgaggctttttgtacgtcaatcatacctcaataaagttgtttttaaaaatgaaaaataaagaaaaggactacagatcctatgaaccctaag

SEQ ID NO: 195727 - DNA, 201 bp, Homo sapiens
tagtactgtgctcatattgtatcatgtacttataaaatataatggtttcacaggtatatacttatctccaaacttatcaagttctatacatcaaatacgtraggctttttgtacgtcaatcatacctcaataaagttgtttttaaaaatgaaaaataaagaaaaggactacagatcctatgaaccctaagaagatcttaag

SEQ ID NO: 195728 - DNA, 201 bp, Homo sapiens
tattgtatcatgtacttataaaatataatggtttcacaggtatatacttatctccaaacttatcaagttctatacatcaaatacgtgaggctttttgtacrtcaatcatacctcaataaagttgtttttaaaaatgaaaaataaagaaaaggactacagatcctatgaaccctaagaagatcttaagatatggtgaacaac

SEQ ID NO: 195729 - DNA, 201 bp, Homo sapiens
cttggctttgcgtggacagagaagcacaagggtagcaggctcagggatctgcaggagcttgaacccatggtgcaagctcccttgcatttcacaaatgtcaytgagtggcagcagaacctctgggccaagaactttactggaaggagagataaagacgaaacagacaagcaaaaaggcagggtgcttggcaaaaaaaaaaaa

SEQ ID NO: 195730 - DNA, 201 bp, Homo sapiens
ggactgtgggtccctttgaaatttccaggtcaaagcaatgatcaggaatatctttcttcacagtttcatcacagggtattaaaagaaaaaaaaaagatgtmagagagtggaaatgagagtaaacaattcttagtcattcaatagcagctacgtttttaacagattgagaaagcatcgatataacacaaggccaggcaggtt

SEQ ID NO: 195731 - DNA, 201 bp, Homo sapiens
aatgaataaatattaaaatcctgcaaagatactgctcactgtagttttgaatgatgctaccaagaaatctgtgggggaaaagcatgccgtttttctatcarattttattttcccaaacaaacctgttaagtcctgctatctcacttgacaaaataacccacggcaaaggactttttattaccagaaagggcacatctgaca

SEQ ID NO: 195732 - DNA, 201 bp, Homo sapiens
ggcttaatagctcactgtcttgggttttaagctttgaacacaaacattcaagttctatgaaatggaaaaggtgcaaagtaatttaaatacctacttatctkatactatcttacatagttttcactctttagaacagaggtcacaaactgatgatcagaggacaagtcaagcccacagacctgttttgtgtggcccatactt

SEQ ID NO: 195733 - DNA, 201 bp, Homo sapiens
ttagttgccagcattaaaacattggggagatcacaggtccaaaagctagatgtgtagcttctctgaaaaagcttacaccactgggggcccaatcccacgtrgtgacaggttagctgagaagccactgtcagctagaggtggggtttgggctttctagttggtcatgttgaccatgatcatcacccgtgctgctggcattac

SEQ ID NO: 195734 - DNA, 201 bp, Homo sapiens
agcaataatgtcatgaaaacacatgcccttgtgtgatttggcagaacaggctgctccctgaacacaatgggcctttttattaagtggatcccttcatcccyggcattttatacaaacaaaacaaaagagagagaaaaagaaacaaacacgacactagtaacagtcttcagtttgaacttcatcacagagaattagaagacc

SEQ ID NO: 195735 - DNA, 201 bp, Homo sapiens
tttccatgttataattttttttttttttctcttgagacggagtctcgctctgtcgcccaggctggagtgcagtggcgcgatctcggctcacttcaagctcygcctcccgggttcacgccactctcctgcctcagcctcccgagtagctgggactacaggcgcccgccaccacacccggctaattttttgtatttttagtag

SEQ ID NO: 195736 - DNA, 201 bp, Homo sapiens
catgcctgtaatcctagcacattgggaagctgaggcaagaggatcacttaaacccaagggtttgagaccagcctggacaacacagtgagatcccatctctaaaaaaaaaaaaaaaattgtggagcacagtgccatgcacctgcagtcccagttactcaagaggctgaggtgggaggatcacttgagcccagaagttggagg

SEQ ID NO: 195737 - DNA, 201 bp, Homo sapiens
tgtaaaaaactttaaagcaaattgagtttaatagaaaaacactaaattaaaggataatccttaccttgtagttgcttttttaaaagtatctctgataatcaaaaaaaaaagtatctctgataatctatgtaaccagatcactatcttagatatctttaagataattactttttaaagttttgtaaaatctaacagtggctt

SEQ ID NO: 195738 - DNA, 201 bp, Homo sapiens
cctactgagaacaattagaaaagatggacaaaataacacacgtgcatacacacccatatctgtttgaaggcatcagaagggcactatgactaagaattttkggggccaagatctgcaaaaactgcaaggccagcatttggcagcttttttccttcaaggcatatttcatttccaaacatagtggttggaagcctgagaaga

SEQ ID NO: 195739 - DNA, 201 bp, Homo sapiens
gactaccaaaggaagcattttaataattaccttcattgtgaaaatcaaatctgttatgagataataaaatgaaggaaatcagttagggagcaccatctttaaaaaaaaaaaaaaagaaatttaaaattttataaggaagaatttagaaatccagggtctagaaatggaaactacatagaatatatgtattttgcccctagc

SEQ ID NO: 195740 - DNA, 201 bp, Homo sapiens
ttaccggagcaccacttaaattaccccaagttctcaaccaggggtgattttgatccccaggggacagaagcaaatgtctggagacattttcagtggccacrgttgtggggtagagtcctactggcatctagtgggtaaacaccaggcattacaaaacatcttaccatgaacagggcagcccctgacaacatagaaccatct

SEQ ID NO: 195741 - DNA, 201 bp, Homo sapiens
atagagggaagatgatgtgaaaagatacagggagaatggcttgtgcagatggaggcagagactggaattaccctgccacaggccaatgaacatctagggcyaccagaagctgaaagaggcaaggaagggtccttccctacacattttaaagggagtatggccctaccaacaccttgatttcagacttctagcctctagaac

SEQ ID NO: 195742 - DNA, 201 bp, Homo sapiens
tgattccaagagcaataaactttacacactccactgaaatctccatatggttagcccggcatgtgtatttgacaattaaaaaaaacaacaacagtcaagcrcttacccattcttctaaaatgcgtgacactgcttcactcgcccttgccatgttcctgcaggccaagatcacatgtgcaccatggagggcaaaagacttgg

SEQ ID NO: 195743 - DNA, 201 bp, Homo sapiens
aagagacctgagcatggtgcagggggtggactgtatcgggcacctctcatgcaccccttcaaattctcacagctccattttactcaaaccatttttacgcycaccatgcagttttcaaccaacttgacacaaatgcaaccagatggcctcacctggggctacaatatggatccccccatttccatcctagagattctctga

SEQ ID NO: 195744 - DNA, 201 bp, Homo sapiens
ttcataagacaaacaaagtgaagatgactttaaaaataaagacatgattccaagagcaataaactttacacactccactgaaatctccatatggttagccyggcatgtgtatttgacaattaaaaaaaacaacaacagtcaagcgcttacccattcttctaaaatgcgtgacactgcttcactcgcccttgccatgttcct

SEQ ID NO: 195745 - DNA, 201 bp, Homo sapiens
ctcctgtcctcctttcccttttggttttcacatccttattctgagctaaccacatcacgagcacatctttactgctcaactgagttctcctgaagcattayaaaaaacaaatcagttacatgttttaaatatccgttggcaagcatcatagcatggctcttaatctgagaaataattttaattaaactaaaaagaggtaag

SEQ ID NO: 195746 - DNA, 201 bp, Homo sapiens
agactaatgcaagcccttagtaaatatttatgtagacacgtatcaacatcaacttctacatagacagagaaaagtaagaaatcagagatagggttaaagcytccttctttctaatcttaacaaccataagcataacagtctcctagttgcaatcatgggcgttcaccacgttttatttttcttaataaatgagttaaagga

SEQ ID NO: 195747 - DNA, 201 bp, Homo sapiens
ccctctgtggcggcatatatatgaagtcatccataagaagaaaataagaacttggtcctagacacaaaacaatacgtaaggaaattcctcatggactaacrcaagcggtcagacaccacactagttgctttcattccaccttgtcgaattctcacaactctgtgatgctgacgtcatggttcccattttacagatgaggaa

SEQ ID NO: 195748 - DNA, 201 bp, Homo sapiens
gagtccagtgctaagattctgccccaggcatttactcacaaatacgtaaataaagaatgctcacagcagcatagtttaggcccaatatcagatgatatcgyaagaaagactgatgcaagaaagagagaactgtgaaacaccattgcttggaataacaaatagcaaaacaatgcaaacaacctaaatggccaccaaagggaa

SEQ ID NO: 195749 - DNA, 201 bp, Homo sapiens
aatgcctgatgtttccaagagcttaaatactataatggcagatattgatgtacagaaattaaagtaaaatatgaaactaaacagagaatgaagagataagmcagaggtgtgctctgaataaaagaagtaatgaaaaggaaaaatttcataccaattgtcataataaaaacaaaggctaaaggcaactaagagaagaggggc

SEQ ID NO: 195750 - DNA, 201 bp, Homo sapiens
tcacatgtgcaccatggagggcaaaagacttggcggtttcgaaccctatggtttaaaggaaagtcaatgttagaaaacataacatcaacacagtgagtcawgttgaatggcctttaccggagcaccacttaaattaccccaagttctcaaccaggggtgattttgatccccaggggacagaagcaaatgtctggagacatt

SEQ ID NO: 195751 - DNA, 201 bp, Homo sapiens
tctgctttttatacaatgtgaatcattagaaaagcaacaccctctcgccaaccccacccccgacaattctaatcagttaaatgctgcctccttgcagattytgtccattggtcctggttctgtcccttgaagaaagctaggattatctctctcctagatagctactgagagaactaatttacataaatcttttcttctacc

SEQ ID NO: 195752 - DNA, 201 bp, Homo sapiens
caccgagtttgtggtggtccattatagtagcaacaggacattaatacaccttcccaataattaagtaaacatgtaaggaacatacaagtgagatgcaaacatgtgtacactcgggtaagtcaatcactaacagcgtcgcgatgatgacacaccaacaagactagctttcccaaatccctcccggatcaggccagcaggaaa

SEQ ID NO: 195753 - DNA, 201 bp, Homo sapiens
gcacatgacagcctccgctgagccaaatggcccaaagacttctgaatgagcttttgctgcaacaaaaaactttggatcattttgagagcctcccgtgaggygccaatatgttgcagtaccttcccggccccgacactgatgtgattcatcgtaggtaacatatgaatacgctcaagctggccagcagcttgaaaaattgga

SEQ ID NO: 195754 - DNA, 201 bp, Homo sapiens
tttgggctttctagttggtcatgttgaccatgatcatcacccgtgctgctggcattacccgccaggccactgcaggcacttgatgctcagtgcacattatycaggaaacatccttgctacagacatgactcaagccttaccacaaaacaccctcagtccatatgttcacaactcaatcaccgaatctcaaagaacatctcc

SEQ ID NO: 195755 - DNA, 201 bp, Homo sapiens
caggccactgcaggcacttgatgctcagtgcacattattcaggaaacatccttgctacagacatgactcaagccttaccacaaaacaccctcagtccataygttcacaactcaatcaccgaatctcaaagaacatctcccactgatctggttgagattttatttaaaccatgtcaaaccctactatgtcaagtgtgagact

SEQ ID NO: 195756 - DNA, 201 bp, Homo sapiens
acaccctcagtccatatgttcacaactcaatcaccgaatctcaaagaacatctcccactgatctggttgagattttatttaaaccatgtcaaaccctactmtgtcaagtgtgagactattaggatgctagctatgccttggaaaaccccgcagtagcacttggctttgcgtggacagagaagcacaagggtagcaggctca

SEQ ID NO: 195757 - DNA, 201 bp, Homo sapiens
aagaacttcagaactttacgttcctttgtgagcatgcgcttattgacttgagcaagtggcttatatagttcttgctggtttgcagacttgtttatatcatmctttatttattgaaaatccaatactatacagaaaaacaatttgtaaagcaaagaaatgaggaacaaatctaatggctgatttaggatgcgctcttcccgg

SEQ ID NO: 195758 - DNA, 201 bp, Homo sapiens
ggagcaggcagccgcacaccatgagactcactggtaggctggacaggtggggacagtcgcccacagaatcctcaggcacaaaaaacatgaaggtgggaacyctgtcccctcaaatactgacaaagctcccacagaggtaggagctaagaaaaaggcagcttctttccccgatgccaggaaggttccttctggtttaagttt

SEQ ID NO: 195759 - DNA, 201 bp, Homo sapiens
aaaccgcagctagagagtttgaaagcaaaatctgcaaagtatgaacattgatactaaacatggtaaaaagatgggccatggggtggagcagacagacttgsagtttggaagccagatggaccaagcaaggagcctgactctgagctcaccagctgtgcaattcgggtgagttccttcacccttctgagccatcccttggct

SEQ ID NO: 195760 - DNA, 201 bp, Homo sapiens
tggggacaaatgttacttgtaactgggcacaattaaaaggccacagagatggtgatttccagccccctccagccccgccccacaaacatagcactaaaacsatctttaggaaccaatcaacaagttgtagaatcttccagcacacatcctctccctccctggagatctgccattatgcataaagcaagaagataggcctaa

SEQ ID NO: 195761 - DNA, 201 bp, Homo sapiens
gttaaggaactcacaagatcagagggcaaaaaagggggaggaccccaatgggcatggtagcctgacttcaagcaggtgtaccccaccatcaggccccccamactaccacaatcaccatgtgactgtggatttgtgatattgtgatataataagaaatacatactgggtcttcatccaggttcctggcacagagctcctaaa

SEQ ID NO: 195762 - DNA, 201 bp, Homo sapiens
aaaaaagggggaggaccccaatgggcatggtagcctgacttcaagcaggtgtaccccaccatcaggccccccacactaccacaatcaccatgtgactgtgsatttgtgatattgtgatataataagaaatacatactgggtcttcatccaggttcctggcacagagctcctaaaatccttgaaattggccaggcatggggt

SEQ ID NO: 195763 - DNA, 201 bp, Homo sapiens
taattttttgtatttttagtagagaaggggtttcaccatgttggccaggctggtcttgaacccttgacctcatgattcacctgccttggcctcccaaagtrctgggattacaggcatgagccaacagtgccagacctactgtctgctttttatacaatgtgaatcattagaaaagcaacaccctctcgccaaccccacccc

SEQ ID NO: 195764 - DNA, 201 bp, Homo sapiens
tgacttcaagcaggtgtaccccaccatcaggccccccacactaccacaatcaccatgtgactgtggatttgtgatattgtgatataataagaaatacataytgggtcttcatccaggttcctggcacagagctcctaaaatccttgaaattggccaggcatggggtctcatgcctgtaatcctagcacattgggaagctga

SEQ ID NO: 195765 - DNA, 201 bp, Homo sapiens
attacggtctacagcagttgggtgattgctactgaaggcaggcagatgcctggtgacttctcagggtgggctgtccccagtgtgttttatgaccatgcagraaggaaaaataaggaatttaaaaaatcttctttcaaaagatatggattcttatcggactttcattccttagtaaagttgcattaaacccagagacattta

SEQ ID NO: 195766 - DNA, 201 bp, Homo sapiens
tgggaggcctaggtgtgtagatcatgagatcaggaggtcgagactatcccagccaacatggtgaaactccgtctgtattaaaaatacaaaaattagctggrcatggtgacgcgtgcctgtagtcccggctactcgggaggctgaggcagaagaattgcttgaacgcaggaggtgaaagttgcagtgagtcgagattgtgcc

SEQ ID NO: 195767 - DNA, 201 bp, Homo sapiens
accgagtttgtggtggtccattatagtagcaacaggacattaatacaccttcccaataattaagtaaacatgtaaggaacatacaagtgagatgcaaacatgtgtacactcgggtaagtcaatcactaacagcgtcgcgatgatgacacaccaacaagactagctttcccaaatccctcccggatcaggccagcaggaaat

SEQ ID NO: 195768 - DNA, 201 bp, Homo sapiens
atgactcgggaggtcgggcacggtggctcatgcctgtaatcccagcactttgggaggcctaggtgtgtagatcatgagatcaggaggtcgagactatcccrgccaacatggtgaaactccgtctgtattaaaaatacaaaaattagctgggcatggtgacgcgtgcctgtagtcccggctactcgggaggctgaggcagaa

SEQ ID NO: 195769 - DNA, 201 bp, Homo sapiens
attgcatgacatgcaaccctgttaccggacatccggttcacttcgtaaaccctgaagaagatatttgcagaaacctctccccatatcctaacaacaacaamaaaaaaaagtcaagagctcttattttattctttccattaaggaattaaattactctcttcctccatcttcttccaaccctaatcttccctttaggagtct

SEQ ID NO: 195770 - DNA, 201 bp, Homo sapiens
ctacactgtcagtgggaatggaaattggagcaacaagataagaaatgactcgggaggtcgggcacggtggctcatgcctgtaatcccagcactttgggagkcctaggtgtgtagatcatgagatcaggaggtcgagactatcccagccaacatggtgaaactccgtctgtattaaaaatacaaaaattagctgggcatggt

SEQ ID NO: 195771 - DNA, 201 bp, Homo sapiens
aatttaatgatgcaaaaacagttgtgctacagcattatcttccaagactggtttaaacatgaatgtcactgtacaatcaggttaccatagtgtcactagcrtccctggaattttacctttctagtttcaaatattacatcaaataggcagagttttacaattttgacacgccctcctgctagtcccaagaacactgcaagc

SEQ ID NO: 195772 - DNA, 201 bp, Homo sapiens
acctgaagtgaagtagaccagcaaatatcaagggtcaaggagttgggggatgatatagagacgaagcctaacagatgtcaccagagcaagaaggccttacracttcacatcctctctgcagggtatgaatggtgcaatggaatgaaatggtaactacagcttctggtgcaaaatttgagtttccataatcatcatcttggg

SEQ ID NO: 195773 - DNA, 201 bp, Homo sapiens
tgcaaagtatgaacattgatactaaacatggtaaaaagatgggccatggggtggagcagacagacttggagtttggaagccagatggaccaagcaaggagmctgactctgagctcaccagctgtgcaattcgggtgagttccttcacccttctgagccatcccttggctcgtctggaaaatgcaaaaaaaaaaaaaagaaa

SEQ ID NO: 195774 - DNA, 201 bp, Homo sapiens
ccccactggggtctttcaagagctctacactggaatgtcgaggtcttgctgtagctgttcatgaagtatgttttgatacctaataagctcttgttctttamatgcaatgcccctcagaggtcctgagatctcaagacagggagtgggatatgccagaccccgagaaataaagcaacagaagcccaactccaatagatactg

SEQ ID NO: 195775 - DNA, 201 bp, Homo sapiens
aaaaaccacagattttaaaaacaagcaaaggaaccaaatagacaattctccaaagaaaacatacaaatagccaagtgtatgaaaaggggctcactgtcacwaattctcaggaaaatgcaaattgaaaccacagtgagatgtcacctcacacctcttaaggtggttctcatcataaaatgaaagataacaagtgtggttcag

SEQ ID NO: 195776 - DNA, 201 bp, Homo sapiens
ggcagttgggacatagctatcaaatttgaagtggacatgctctttgacccagccacaaccagaaatttatcctacaaatagacttgcaaatatgtgggagkaatattcagtacggcattatctacgacagactgcaatcaaccaaaatgttttatcaattaggttatataaattatattgcatgaataggacaaaatactg

SEQ ID NO: 195777 - DNA, 201 bp, Homo sapiens
ttatatcatactttatttattgaaaatccaatactatacagaaaaacaatttgtaaagcaaagaaatgaggaacaaatctaatggctgatttaggatgcgytcttcccggtaatctacaactattaataatattaatagcttttatctttttgtttagctacagatcgttcagaacaatggagataagccctgtgacttgt

SEQ ID NO: 195778 - DNA, 201 bp, Homo sapiens
taaaatccttgaaattggccaggcatggggtctcatgcctgtaatcctagcacattgggaagctgaggcaagaggatcacttaaacccaagggtttgagaycagcctggacaacacagtgagatcccatctctaaaaaaaaaaaaaaaattgtggagcacagtgccatgcacctgcagtcccagttactcaagaggctgag

SEQ ID NO: 195779 - DNA, 201 bp, Homo sapiens
aaaaaaaaaaaaagaaaaacaccaggtttttgcatcctcctggatgagggatataaagtgcctgacacagcatatgacagggatttgataaatgggggctrttagctgtcccattgtggatgtgagaatagcattctgctggctaaaaggcagacatgaatgttctagaacatggcgatcccggaatgtgcagtgaaggca

SEQ ID NO: 195780 - DNA, 201 bp, Homo sapiens
ctgactctgggtcgttagtgtcaaaactgaattgtaggacaccaagctggggtccagaaaattggagaattacgtaaaaggagggaacactccacacattkgtcatgggaagggctctgtatgagagaagaggaagacacagtgtttccttcctttagggttaagagcacacactagaagcagctccttgaggcaggagaa

SEQ ID NO: 195781 - DNA, 201 bp, Homo sapiens
actccacacatttgtcatgggaagggctctgtatgagagaagaggaagacacagtgtttccttcctttagggttaagagcacacactagaagcagctcctkgaggcaggagaaaccagcctggaatgcccccaccaggctcacaccccacagggtcttgactgtcagtcaaatacaaatcatgggatttgccatctattct

SEQ ID NO: 195782 - DNA, 201 bp, Homo sapiens
accagcctggaatgcccccaccaggctcacaccccacagggtcttgactgtcagtcaaatacaaatcatgggatttgccatctattctctgtggatattaygagatataggcttctcatatgtgtacatgcttggcatgtgtataatttaagctaaacctactaagcagctgtccggaaagagggagaagtggtccaaata

SEQ ID NO: 195783 - DNA, 201 bp, Homo sapiens
tgccatctattctctgtggatattacgagatataggcttctcatatgtgtacatgcttggcatgtgtataatttaagctaaacctactaagcagctgtcckgaaagagggagaagtggtccaaataccacctgtttcatcaacagcctaccagtgctcccttcggtgtaatcccatcaaggcacagaattgaggtctcttc

SEQ ID NO: 195784 - DNA, 201 bp, Homo sapiens
ttaatacaagaaagtaacaattgctccataattccaccccctacacgtgctgtctggcccaagttcatgttcttcagagggcaatccttttgttaactaascaatgacacacacaggcatgcgcacacacgtgcacacacacacccatggtctcacttcgtataattctgtactcacactcctatctactaagacaaccaa

SEQ ID NO: 195785 - DNA, 201 bp, Homo sapiens
gtttggccttttttattttgatgaattaatttatagccacttcaagagaagaagggaacccaactctgaatttgtaagcacactatattctattactgaaygtgtctcattgttttcacagctggtacaggatttcctttcaccattgaggcctccgttactctttctcgtctgctcgagacagggttctttatgatttag

SEQ ID NO: 195786 - DNA, 201 bp, Homo sapiens
tttaaaaaagaaaaattaagaaaaaaaaaaagaccttcattccattgccagctctcagaaatgaaaaagccagccccatcctgcactgtccatgtggacartgtgctacctttctaattcaagcacctttttttttttaaaaaaaaaaaaaaaaaaaaaaaggaagaaagaaaaagaaaaattcagattgaccttggctct

SEQ ID NO: 195787 - DNA, 201 bp, Homo sapiens
ttcattccattgccagctctcagaaatgaaaaagccagccccatcctgcactgtccatgtggacaatgtgctacctttctaattcaagcaccttttttttwttaaaaaaaaaaaaaaaaaaaaaaaggaagaaagaaaaagaaaaattcagattgaccttggctctcaccattaaaaaagcgaaaagtggtatattacttt

SEQ ID NO: 195788 - DNA, 201 bp, Homo sapiens; identical to SEQ ID NO: 33514

SEQ ID NO: 195789 - DNA, 201 bp, Homo sapiens; identical to SEQ ID NO: 33515

SEQ ID NO: 195790 - DNA, 201 bp, Homo sapiens; identical to SEQ ID NO: 33516

SEQ ID NO: 195791 - DNA, 201 bp, Homo sapiens; identical to SEQ ID NO: 33517

SEQ ID NO: 195792 - DNA, 201 bp, Homo sapiens; identical to SEQ ID NO: 33518

SEQ ID NO: 195793 - DNA, 201 bp, Homo sapiens; identical to SEQ ID NO: 33519

SEQ ID NO: 195794 - DNA, 201 bp, Homo sapiens; identical to SEQ ID NO: 33520

SEQ ID NO: 195795 - DNA, 201 bp, Homo sapiens
ttgtggagacaggatcactctttgttgcccaggctagtctggaactcctggcctcaagcaatcctttataggtgtgagccaccatgcccagccttaagtastagaatattggttccttcgcttcagtttcagttgtggggaagagaattacaataacctgttaggcacccccagatttttttgtattcatttactacatgc

SEQ ID NO: 195796 - DNA, 201 bp, Homo sapiens
tcctcctgcctcagcctcctgtaactgggactacaggtgcatgctgccacgcccagctaatttttaaattttttgcggagacaggatcttgttatattgcyaaggctggtttcaaactcctgttttcaagcgatcccccctacctcagcctcccaaagtattgggatttcaggtgtgagcaccatacctggcaggaattgc

SEQ ID NO: 195797 - DNA, 201 bp, Homo sapiens
ttttgctaatgcctcagaacctgagcgatgccaaaagatgccttttaacctggatgatccctatccactgcttgtagtgaacattggctcaggagtcagtrttttagcagtccattccaaagacaactataaacgagtgactgggacaaggtagtgacctttttggttgtattgctgcattcacattgttttatacacaga

SEQ ID NO: 195798 - DNA, 201 bp, Homo sapiens
tttctcttatccagtttaggttccaagttttgaacattgatgtcatttaaaaattaagtatacattaagaagtttaccctgagtgcaccttgtaagaaacttttttttttttaatttttgagtgtctttccagtgtttatgcaaatacaaatacatatttttacttttctccccatatacaaaaggtaatctaccattata

SEQ ID NO: 195799 - DNA, 201 bp, Homo sapiens
taagacccagccctcttctcgctgggaccactctgaggcgatctgcggaagctgaggggcctcggaggaggggccgcgatgcatctcgggctttgtagtcyacctgcacaactacagccagagagcggggcctcacgaaccggagaactacaatccccagcagccgggcggaagcggagcgagggggggctcgcgtcacgt

SEQ ID NO: 195800 - DNA, 201 bp, Homo sapiens
ttgttttagaaaacgcagataaacaagaaagataaagtcacccgtattccccgcacccggagcgaaccgctattaatattatggtgaatacccgtagatayttttctatgcatgtacttaaattctgactatgcttttagaaaggtcgactttcatttgcttccttttatgtttagtcttttaaaaaccttttattccagt

SEQ ID NO: 195801 - DNA, 201 bp, Homo sapiens
tacaggtgcatgctgccacgcccagctaatttttaaattttttgcggagacaggatcttgttatattgccaaggctggtttcaaactcctgttttcaagcratcccccctacctcagcctcccaaagtattgggatttcaggtgtgagcaccatacctggcaggaattgctttttaaggaggtgcttttctcctgggttac

SEQ ID NO: 195802 - DNA, 201 bp, Homo sapiens
atgtttccaccaagtgatttttttctttggtttattctttgatctaacaagtttggttttactaaacaatttttgttgccttcgttatgttatttcagcamtcagcattagtcataggttttttttctgtgtgttcattgaatacatgaatgatccacccttttactttagagaaagaatataatgtataaatgcaactta

SEQ ID NO: 195803 - DNA, 201 bp, Homo sapiens; identical to SEQ ID NO: 33524

SEQ ID NO: 195804 - DNA, 201 bp, Homo sapiens
gaaggtatttcaaccatgaactgtcccagataataaaaaataaggctggacacggtggtttacacctgtaatcccagcactttgggaggctgagtggggcrgatcacgaggtcaggagttcgagaccagcctgaccaacatggtgaaaccccatctctactaaaaataggaaaattagccgagcatggtggcacgcgcctg

SEQ ID NO: 195805 - DNA, 201 bp, Homo sapiens
attggttccttcgcttcagtttcagttgtggggaagagaattacaataacctgttaggcacccccagatttttttgtattcatttactacatgcagttaarttctgatctgagcaattatcagtccacataatgttttggattaacttaacttgaatcattttgtgatcaaagtcaaatggctgtatcattacaaattagt

SEQ ID NO: 195806 - DNA, 201 bp, Homo sapiens
aggaaaattagccgagcatggtggcacgcgcctgtagtccaagctgttcgggaggcttgaggcaggagaattgctggaacccaggaggcggaggttacagkgagccgagatcacgccactgcactccagcctgggcaacagagcaacactccgtctcaaataataataataataataatattaatattattttaactttaa

SEQ ID NO: 195807 - DNA, 201 bp, Homo sapiens
aatcattttgtgatcaaagtcaaatggctgtatcattacaaattagtaacagagattcaaattattctgctcttaaaagcttccatgtcttggccgggtgyggtggctcatgcctgtaatcccagcactttgggaggccaaggcggacggatcacgaggtcaggagatcaagaccatcctggctaacaacggtgaaacccc

SEQ ID NO: 195808 - DNA, 201 bp, Homo sapiens
caaataataataataataataatattaatattattttaactttaaatcactcaggttaacaaaagatatatttgttttgtttttgaatacctgtatggggttttttttggcataattaaaacatttattgatcacatagtgtgtgtatggcattttctttatgtgcattgcatcatttaactgcatactagaagaagctgt

SEQ ID NO: 195809 - DNA, 201 bp, Homo sapiens
tgtcgcccaggctggagtgcagtggtatgatgtcagctcactgcaacctctgcctcctgggttcaagcaattctcctgccttagcctcccaagtagctggrattacaggcacacgccaccaagcctggctaatttttgtatttctggtagagacgaggtttcaccatgttgcccaggcttgtccgaactcccgacctcagg

SEQ ID NO: 195810 - DNA, 201 bp, Homo sapiens
catatttcaaaggtgtgtagacatcaagaatacagattcagaaaattttttataatagctaacaacgcagaaattggtaggtttccaaatattattaaacraatagattgtgcatagttgtgtgttctcaagtggttaatattatatgctaacttaaaagctgtactacataacagttatttttaaattacacagggttac

SEQ ID NO: 195811 - DNA, 201 bp, Homo sapiens
gtttgtggctaactggtttttaatttgtgtttctaaaatggatatatatatatatatatatttttttttttttttttttttttcctcccatagctttcccrtggtttggcatggacattgggggaactctagtaaagctctcgtactttgaacctattgatatcacagcagaggaagagcaagaagaagttgagagtttaa

SEQ ID NO: 195812 - DNA, 201 bp, Homo sapiens; identical to SEQ ID NO: 33528

SEQ ID NO: 195813 - DNA, 201 bp, Homo sapiens
cgatctgcggaagctgaggggcctcggaggaggggccgcgatgcatctcgggctttgtagtccacctgcacaactacagccagagagcggggcctcacgamccggagaactacaatccccagcagccgggcggaagcggagcgagggggggctcgcgtcacgtgggcgttcggcctgggcgggctatttctcagtgcggcg

SEQ ID NO: 195814 - DNA, 201 bp, Homo sapiens; identical to SEQ ID NO: 33529

SEQ ID NO: 195815 - DNA, 201 bp, Homo sapiens
cacagaagttatgaaatcagtataataatgtcattttcaccagtaaaagagcatgtatttgcacaacagcaaaaaaaaaaatatatatatatatatatatwttttttttttaagtgaaagagggtgccatgttgcccaggctgctcttgaacttctgagctcaagcaatctgcctgtctcggcctcccaaagtactgggat

SEQ ID NO: 195816 - DNA, 201 bp, Homo sapiens; identical to SEQ ID NO: 33521

SEQ ID NO: 195817 - DNA, 201 bp, Homo sapiens
tatagaaatctttacatgttgttgaccttattttatacaggtgtaggataaattcccaaaagttggattgcaaatgcatttttgagatattgttaattatrcaaaagagcggtactgtttttcactctcaccagcggtaaatgaaagtgcctgtttcaccagtagagtgctaacttttgcatttttgctaatcagatggag

SEQ ID NO: 195818 - DNA, 201 bp, Homo sapiens
tatgaaatcagtataataatgtcattttcaccagtaaaagagcatgtatttgcacaacagcaaaaaaaaaaatatatatatatatatatattttttttttttaagtgaaagagggtgccatgttgcccaggctgctcttgaacttctgagctcaagcaatctgcctgtctcggcctcccaaagtactgggattacaggcat

SEQ ID NO: 195819 - DNA, 201 bp, Homo sapiens
atgaaatcagtataataatgtcattttcaccagtaaaagagcatgtatttgcacaacagcaaaaaaaaaaatatatatatatatatatattttttttttttaagtgaaagagggtgccatgttgcccaggctgctcttgaacttctgagctcaagcaatctgcctgtctcggcctcccaaagtactgggattacaggcatg

SEQ ID NO: 195820 - DNA, 201 bp, Homo sapiens
atttaactggagcatttacttggaagcaacagtgttctattgattttaaactttattatgtttatattttgttcttttttccaaagcatttttcttctttrcctattttttgactttttaatggatattaatatatgtaaacccttaaactgcagtactggggaacattgtaatttattcttataggatgaattaatgtga

SEQ ID NO: 195821 - DNA, 201 bp, Homo sapiens
tttcagctttatagaggcataaaaagtatgttttaatctctagaagggctagtttcactcctttgcttgattttctgtatgaacttggcaaacattttctytattacaaaaatgtttttggaatctcagtaagtttacatattaacttagggacaaatgatatctttatagtaagtcttgctgttgaagaacttagcttgt

SEQ ID NO: 195822 - DNA, 201 bp, Homo sapiens
ccgggcttcctgcttgtgtccttgaaatgccggtgggttcctgggagttgtcactgttgttacagttggagctttcaaacgtacgtgcatgcagtctgccmgtgtgtaattgctttggcttgtttttgtttagaatatcaactagttcatgtttgttttagaaaacgcagataaacaagaaagataaagtcacccgtattc

SEQ ID NO: 195823 - DNA, 201 bp, Homo sapiens
aaaacttaaagtataataataatttttaaaaaaagatttaaacaaaggagtgtatcataattgagaatttatgtctcttctgtttgtgctgccttctttgkgcctttttttttttttttttttttttttttttttttttttgccttgctgaggttctgcatctcgtgctttttaatagtgattatttttctggcataaaga

SEQ ID NO: 195824 - DNA, 201 bp, Homo sapiens
ttcagtctgttaactaaatccaacagtgattcaggggtagaacttgctagaaatttagatgagactagggagcaaaggtttacagtttaggaattagataygatttcattctgtgagcatatccagaagaataatagaagcaaataaatttctgtaattgacatgttggccagctggacataaatttactcattgtattta

SEQ ID NO: 195825 - DNA, 201 bp, Homo sapiens; identical to SEQ ID NO: 33525

SEQ ID NO: 195826 - DNA, 201 bp, Homo sapiens
accctcccgctgggattacaggcatgagccatgttcctggccaggatccctttagtctgaaatctgcatggtaccagtagcaattaaatagttatgttagkgttctctgcttccttagcaaacacttagtaggatactgagtttatcacaccttgttagaaattaacagtctgctcttgtggctagatagcttctgctgtt

SEQ ID NO: 195827 - DNA, 201 bp, Homo sapiens; identical to SEQ ID NO: 33526

SEQ ID NO: 195828 - DNA, 201 bp, Homo sapiens; identical to SEQ ID NO: 33522

SEQ ID NO: 195829 - DNA, 201 bp, Homo sapiens
gatacttttgctgtttttacagtgtttcatgtgatctctttaactgttaagaaatccacaactataaaacagggcgctgacaccttccctgcccgcctatyggggttcctgtaaaactcacctgagaggcaacaagccaaaaccctgtgaaaactacaaattcctatataactgtaaggtaatttggtcttaacttcacag

SEQ ID NO: 195830 - DNA, 201 bp, Homo sapiens
actatgcccagctaatttttttgtttttggcagagatggggttttgccatgttgcccttgccaggctggtcttgaactccttagcttaagtgaccctcccrctgggattacaggcatgagccatgttcctggccaggatccctttagtctgaaatctgcatggtaccagtagcaattaaatagttatgttagtgttctctg

SEQ ID NO: 195831 - DNA, 201 bp, Homo sapiens
ccaggttgggctgtagcatctaggtaagtttaacatttgtgttatttaagttacagaagttaagtaattcaagttgcttatgtttttggaaagcaatgtamcagaaagttgtaagggtgctttctcttatccagtttaggttccaagttttgaacattgatgtcatttaaaaattaagtatacattaagaagtttaccctg

SEQ ID NO: 195832 - DNA, 201 bp, Homo sapiens
tttttggcagagatggggttttgccatgttgcccttgccaggctggtcttgaactccttagcttaagtgaccctcccgctgggattacaggcatgagccaygttcctggccaggatccctttagtctgaaatctgcatggtaccagtagcaattaaatagttatgttagtgttctctgcttccttagcaaacacttagtag

SEQ ID NO: 195833 - DNA, 201 bp, Homo sapiens
aggtgtgagcaccatacctggcaggaattgctttttaaggaggtgcttttctcctgggttacttgaagtgattataggccagttttattgtattaaaatgyttatagaaacaaagattttcatgcccttagtgttgacctatttattgaaaaaagaatgatctgaattttttctcatccctggagcacatggtatttagta

SEQ ID NO: 195834 - DNA, 201 bp, Homo sapiens
tacaattttcccttgctttatgtggtggttcaattcctagcaaatttagtatatatttaaaactacgtgggttgggcacagtggctcacgcctgtaattcyagcactttgggaagccaaggtgggcggatcacttgaggttaggagctggagaccagcctgaccaatgatggtgaaacctcatctctactaaaaatacaaa

SEQ ID NO: 195835 - DNA, 201 bp, Homo sapiens
catgcccagccttaagtagtagaatattggttccttcgcttcagtttcagttgtggggaagagaattacaataacctgttaggcacccccagatttttttktattcatttactacatgcagttaaattctgatctgagcaattatcagtccacataatgttttggattaacttaacttgaatcattttgtgatcaaagtca

SEQ ID NO: 195836 - DNA, 201 bp, Homo sapiens
aaatgctccttctaacaaccccacaatatcaccccttaccacaaaatctttcttcagttgaatctctcccacactaggttcccacgccacccctaatcccrctcgaagcagccctgagaaacaccgcccattatctctccataccacccccaaagttttttgctgctccaacacttcaccactattttgttttgagtttct

SEQ ID NO: 195837 - DNA, 201 bp, Homo sapiens
tggaacatattaatgaagaaaacaaagatctggctttgtggagcttgcattcattctagtgacatattaagtaaattgtgtagtgtgtattaggtgataartgctatttttttaaaaagagaccatcaaacaggataaagaggattgggaatagggcagagagtggtagaggacaaattgctaagtaattgagtggttaaa

SEQ ID NO: 195838 - DNA, 201 bp, Homo sapiens
aaggaaagctttattgaaaatgtgattcttaggcagaggtttgaaggaggtgagggggaaactgtgcatgtagacattttggggagaaagcttccagcagmgagaacaaatatgcaaatcctctgaattattctgtatttaaatccagaacttggtctcatcagttttttaataacttagaaacttaagtgttagttggtt

SEQ ID NO: 195839 - DNA, 201 bp, Homo sapiens
aaacgagtgactgggacaaggtagtgacctttttggttgtattgctgcattcacattgttttatacacagaagttatgaaatcagtataataatgtcattytcaccagtaaaagagcatgtatttgcacaacagcaaaaaaaaaaatatatatatatatatatattttttttttttaagtgaaagagggtgccatgttgcc

SEQ ID NO: 195840 - DNA, 201 bp, Homo sapiens
cattttgtggattttggatgatgtgtgcagaactaatttttaaatattcaggattatacagctatatgccaggaatgtagtaggtgttatactaataaagsgtagttgtgtttttttgcattttaaaataaattttaaataaatatttagaaaccttttatattgtaaaatctattatttttacaagttttttctttgttc

SEQ ID NO: 195841 - DNA, 201 bp, Homo sapiens
cggagccgaagctggactgtactgctgccatctcggctcactgcaacctccctgcctgattctcctgcctcagcctgccgagtgcctgcgattgcaggcaygcgccaccacgcctgactggttttggtggagatggggtttcgctgtgttggccggccggtctccagcccctaaccgcgagtgatccgccagcctcggcct

SEQ ID NO: 195842 - DNA, 201 bp, Homo sapiens
ttagcagcatccctggaatctacccacaggatgccaatagcaacctcttccccagatgtaataatcaaaaatgtccccagctactgtcagatgtccaggtrgggtagaagtcggggggagacaaaaattgccttccagttgagaaccaccattttagaccataagaccatagaggaagctgtattgagaaagatcatacaa

SEQ ID NO: 195843 - DNA, 201 bp, Homo sapiens; identical to SEQ ID NO: 33550

SEQ ID NO: 195844 - DNA, 201 bp, Homo sapiens
gtttactgcagcactattcacagtagtcgagatatgaactcaaccttcaagatatgaactcaaccttcgtgcccatcagtgaataaatggatgaagaggayaaagggtcttcaaaaagttcataggaaatgtgtagtacttaaaaggaaactatgcatggatttcaacttttttacaccaaaataaactcatactaacttg

SEQ ID NO: 195845 - DNA, 201 bp, Homo sapiens; identical to SEQ ID NO: 33552

SEQ ID NO: 195846 - DNA, 201 bp, Homo sapiens; identical to SEQ ID NO: 33553

SEQ ID NO: 195847 - DNA, 201 bp, Homo sapiens
taaaaatgtggacaaaaatattttaaaagtgaagaagatagacttaaatatacagatgtggatacatagactgcccagtgaccccatctcggcagaaattyattcttgcatggaattcctgaagccaaagaaacaagcagttggtgagacagcatccccatggaacagaataaggctgcctgctgcaaggtttggcaattc

SEQ ID NO: 195848 - DNA, 201 bp, Homo sapiens
aaaattacccaaagctttagcatgaaaatgcccaagaagcttcaccagacagtccttctcccctaaaactatgctcctgctcatttctctcagctaaatasggttattttttttttgagaattttgatgggaaatcattagatatccacgttacagtcctgatttgggtccttctggtatcttttttgtatcctgatcata

SEQ ID NO: 195849 - DNA, 201 bp, Homo sapiens
aacctcttccccagatgtaataatcaaaaatgtccccagctactgtcagatgtccaggtagggtagaagtcggggggagacaaaaattgccttccagttgrgaaccaccattttagaccataagaccatagaggaagctgtattgagaaagatcatacaaccttcccagtttacagtatttttctgataatccttcagatg

SEQ ID NO: 195850 - DNA, 201 bp, Homo sapiens
acctcttccccagatgtaataatcaaaaatgtccccagctactgtcagatgtccaggtagggtagaagtcggggggagacaaaaattgccttccagttgaraaccaccattttagaccataagaccatagaggaagctgtattgagaaagatcatacaaccttcccagtttacagtatttttctgataatccttcagatgg

SEQ ID NO: 195851 - DNA, 201 bp, Homo sapiens
ttattgtatatcttaaaacaacttaaagaatttaattagattgtaacttagaggctaaatgcttgaggggatggacaccccattctccatgttgtgtttayttcacattgcatgcctgtatcaaaacatctcatgtacatcataaatatatacaccaatatgtacccacaaaaaatttaaacatagtaaaaaattttttaa

SEQ ID NO: 195852 - DNA, 201 bp, Homo sapiens
tctcactgtgtctttatatggtagaaggaactagctagctttctagaacctctttaaaagggcactgatcacctcccaaagttcctgcctcataatacaaycacattgggaattaggtttcaatatatacatttggaggaaacacagacattcagaccatactgctacttgccctgggttttaccttagttaacctccctg

SEQ ID NO: 195853 - DNA, 201 bp, Homo sapiens
aaaaataactattgcaggtgccaatacctcccaacacaagtagtttcggtactgagactatctctgaggacttaaacaccaactttatcacatttacataygtaataatcaccctgtccattctcacacatctctacttgctggagactatttttctttatatctaaaatgctttagcaccttttcctataaaaggcatat

SEQ ID NO: 195854 - DNA, 201 bp, Homo sapiens
taaggagtaccctaaagagatgcaccttaaagttgaagactatgtatataaatcttcagttactaattgggactgatactaaaaataactattgcaggtgycaatacctcccaacacaagtagtttcggtactgagactatctctgaggacttaaacaccaactttatcacatttacatacgtaataatcaccctgtccat

SEQ ID NO: 195855 - DNA, 201 bp, Homo sapiens; identical to SEQ ID NO: 33555

SEQ ID NO: 195856 - DNA, 201 bp, Homo sapiens; identical to SEQ ID NO: 33556

SEQ ID NO: 195857 - DNA, 201 bp, Homo sapiens
tgagagcaaagaaagcaaattgttttctcatattctggtattagaggaatagaatgtttcatgtccaagctcccaaaattgcttttttttttttcttaaawtgatcattgttttttttttttttttttctgttttttattgtactttaagttttagggtacatgtgcacattgtgcaggttagttacatatgtatacatgt

SEQ ID NO: 195858 - DNA, 201 bp, Homo sapiens
tcatatcacacctgggaagtctttatcttctattttacagcaaagaaaaatgttctcgtctctattgttcttaaggtttacaagttttactcactcctatwatctaattttatcttcacaacatgtgcgtgttaagctaaacacgttaatatttccattttataaatgatgcagacacggctaagtttgttcacatgctct

SEQ ID NO: 195859 - DNA, 201 bp, Homo sapiens; identical to SEQ ID NO: 33557

SEQ ID NO: 195860 - DNA, 201 bp, Homo sapiens; identical to SEQ ID NO: 33558

SEQ ID NO: 195861 - DNA, 201 bp, Homo sapiens
gagtgccaaattagtgtcaggcattggggtagacattttaaaatgaataaaacatgctaaagataagtagaaaaaaaattctaaagaaagtgatttacatytctatttaaagtttacattctccatatatgagttaaaaaatatgttctaccaagtcttaattgaaactaaaaagagcttaaaaagtgactgaaaaacatc

SEQ ID NO: 195862 - DNA, 201 bp, Homo sapiens; identical to SEQ ID NO: 33559

SEQ ID NO: 195863 - DNA, 201 bp, Homo sapiens; identical to SEQ ID NO: 33560

SEQ ID NO: 195864 - DNA, 201 bp, Homo sapiens
tgtttttttttagatggagtcttgctctgtcaccaggctggagtgcagtggcacgatctcagctcactgcgacctcctcctcctgggttcaagtgaccctsctgcctcagcctcccaagtagccaggattacaggcacgcgccaccacacccagctaattttttgtattttagtagagatgcggtttcaccatgttggcca

SEQ ID NO: 195865 - DNA, 201 bp, Homo sapiens; identical to SEQ ID NO: 33561

SEQ ID NO: 195866 - DNA, 201 bp, Homo sapiens; identical to SEQ ID NO: 33562

SEQ ID NO: 195867 - DNA, 201 bp, Homo sapiens
tacacgaatacacattaatttagaatccacattaacttaaacacatgaacaagaaaacattcctgtgtttgctgcctaagatcgtctcctctgtcacactytgggaaacagtatcacctccttaattctcctggcaatgctgggagttggaaagaattagctctctttaaacaaaggaggaaacacaggttcagaggactt

SEQ ID NO: 195868 - DNA, 201 bp, Homo sapiens
catgcggcccccacacatccacacctgcatggcaagaaggaagagagaggatgacgtttctgcttccagttcaccatcccgccaggccagcatcccttagygcactcagcaaaagcatcagcctggattgtctgctgaagcctggatcacagacctaatgacatgggaaaacacagtaatataataacagcggtaaaaaca

SEQ ID NO: 195869 - DNA, 201 bp, Homo sapiens
ttgcagccttgacctccaggctaaaggaatcctcctcctaccttagccttccaagtagctgggactacaggcacgcagcacaccaccatgcccagctaatyaaaagaacttttttttagagatgaggtctcactgtgttgcccaaagctggtcttgaacttttgggctcaagcaatactcctgcctcgacctcccaaaatg

SEQ ID NO: 195870 - DNA, 201 bp, Homo sapiens
ccagtccctgaggggcggcccttacctgcatgttgttccaggcagcctccccacggcctcggacgcagccctctagccttagtggggagcccaaggccccrtgctttgtgtctgcacacagccctgtgcccacatttcggatctgaaagggaaagagggaagaagtggaccactgaggtgccttaaggtgcccaccgggtc

SEQ ID NO: 195871 - DNA, 201 bp, Homo sapiens
ttaattgatttctgctctaatctttatcattgccttctgtttgctttgggtttcatttgctcttctttttctagtttcttaaggtggaagattggattattaacttaagtttttcttctttttaagtgtaggcatttatagccataaatttccctctgagcactgatttttctacatcccataaattttgatatgtcatgt

SEQ ID NO: 195872 - DNA, 201 bp, Homo sapiens
tcaaagccattctggaagcagatgttaaggtgaacttgtcacttggtatgtaggtccgactcccatcccagaggtggcagtgggccttggctcaagatcamgtttgaactaaaatattacttggatttttcacaaagagtgtccgttgaaagcaataaggaattccagaacagaactgcacttcttgtccctctctcacac

SEQ ID NO: 195873 - DNA, 201 bp, Homo sapiens
taattattcacaggattatgtccctggtctaatctccctgcaatgggcatctgttgtttttgcctgtccagtgcaccttctccctattggggactgtcctyccaactgctccacctggggcctgtgacccaggatggccagctggagcacccaacctcctgggctctggagctggtgtagggcagggtaatggggtatata

SEQ ID NO: 195874 - DNA, 201 bp, Homo sapiens
taattgatttctgctctaatctttatcattgccttctgtttgctttgggtttcatttgctcttctttttctagtttcttaaggtggaagattggattattaacttaagtttttcttctttttaagtgtaggcatttatagccataaatttccctctgagcactgatttttctacatcccataaattttgatatgtcatgtt

SEQ ID NO: 195875 - DNA, 201 bp, Homo sapiens
aattgatttctgctctaatctttatcattgccttctgtttgctttgggtttcatttgctcttctttttctagtttcttaaggtggaagattggattattaacttaagtttttcttctttttaagtgtaggcatttatagccataaatttccctctgagcactgatttttctacatcccataaattttgatatgtcatgttt

SEQ ID NO: 195876 - DNA, 201 bp, Homo sapiens
attgatttctgctctaatctttatcattgccttctgtttgctttgggtttcatttgctcttctttttctagtttcttaaggtggaagattggattattaacttaagtttttcttctttttaagtgtaggcatttatagccataaatttccctctgagcactgatttttctacatcccataaattttgatatgtcatgtttt

SEQ ID NO: 195877 - DNA, 201 bp, Homo sapiens
cacctgctcccatctatcacctcctaccctctccatacccgctggactccctatgtggatgctgctgacaactggccgcaatgcattcacttttctgcccygggggcttgtgaatttttctttctgtgactgttgaaaccccaaacaaacattaattacctaattcattcattcattcattcattcattcatacatgatct

SEQ ID NO: 195878 - DNA, 201 bp, Homo sapiens
ccacctcctgtcagacctcactggtccttatcgtgtgtgtgtgtgtgtgtgtgtgtgtgtgtgtgtgtgtatgtgctttccttttatcttttatttttttwatttttttaatttttttgagacaggttctcactctgtcacccaggctggagtgtagtggcacaatcttggctcactgcaacctctgcctctcaggttcaa

SEQ ID NO: 195879 - DNA, 201 bp, Homo sapiens
ttgtaagtgaaatctgatgggacactggagcgtgtgcatgagcagagaagcacgctgttcctctctgccctgtctgcatgcagcatgtgcgaagacactgaataaataggggcgctgggggtcccagaggccctgctttcccttcaaaccggaactcgctctgggtgtgctaagaagggcaacagcatcctaagaagcagg

SEQ ID NO: 195880 - DNA, 201 bp, Homo sapiens
tgtaagtgaaatctgatgggacactggagcgtgtgcatgagcagagaagcacgctgttcctctctgccctgtctgcatgcagcatgtgcgaagacactgaataaataggggcgctgggggtcccagaggccctgctttcccttcaaaccggaactcgctctgggtgtgctaagaagggcaacagcatcctaagaagcagga

SEQ ID NO: 195881 - DNA, 201 bp, Homo sapiens
gtaagtgaaatctgatgggacactggagcgtgtgcatgagcagagaagcacgctgttcctctctgccctgtctgcatgcagcatgtgcgaagacactgaataaataggggcgctgggggtcccagaggccctgctttcccttcaaaccggaactcgctctgggtgtgctaagaagggcaacagcatcctaagaagcaggaa

SEQ ID NO: 195882 - DNA, 201 bp, Homo sapiens
taagtgaaatctgatgggacactggagcgtgtgcatgagcagagaagcacgctgttcctctctgccctgtctgcatgcagcatgtgcgaagacactgaataaataggggcgctgggggtcccagaggccctgctttcccttcaaaccggaactcgctctgggtgtgctaagaagggcaacagcatcctaagaagcaggaac

SEQ ID NO: 195883 - DNA, 201 bp, Homo sapiens
acttgttggccaacctgccaaccaacctgcccatttactctgtccttccacacccacgcctgagcatcctctctgcacaacctcccacctattcattacasctgcgattttcaaccttgggcctcatcggaagcacctgcagggcatgttgaaacacagctggctgggctccacggcagcctctgactcagcagcctgggg

SEQ ID NO: 195884 - DNA, 201 bp, Homo sapiens
ggggctgtgggcagcgcggatggctggtgagggcgtcgttaggctctgctaccactggagggcactgccggctctcctttccctccacgcggcccctgacrcttcccggagctcagctcccacccactgatggctctcagggagacgcgcggcctctttgagcctctcggctttccttgtaagtcacaggacaacgctctt

SEQ ID NO: 195885 - DNA, 201 bp, Homo sapiens
ggcggaagctggcaggagatcagacgatacttggattccaaggagttcatgaacaaaggctgtaaagttgctaagaaactgcctttctgggggttcaccattttttttttttgttcccgtggtgttgtgtgtgagtgagtgtgagtgtgagcacacccagggctgtcactctgccaggcctgagtgaagtcacactcgaag

SEQ ID NO: 195886 - DNA, 201 bp, Homo sapiens
tttacacttatttctctcacatctccccttgttagagacataaaaaggaccttgggatttcagtgggcttcgggctcctcatacctctactctcaacaccktcctacttccgagtcccagtcccgtctgaggcccaactgtacttcttgtgcttggattacagagatttgcctggatccttggagtaagtctccatttttg

SEQ ID NO: 195887 - DNA, 201 bp, Homo sapiens
ttgttatcctagattctagaaggggcctcatcttttgacttctttctatagagggccacttctaaagctacagcactcatttggaaaaggacactgggatsaacacgtaagcgttgcaagcacaggggccgcctctcttgcagacaggtggccaaagcagggcttgtgctgggccagaagtggaagtaattcctcgccagc

SEQ ID NO: 195888 - DNA, 201 bp, Homo sapiens
gtctagggccccagggtgcctcagtgcagctgatggtcctaggccaaccccttctacccgccaaggaaagccaccaccttacccgggccaggctgactccrgccgggaccttgtagggcacatacttcctgtagatatggcccaccctggagcaggggatgtcctccatgcggcccccacacatccacacctgcatggcaa

SEQ ID NO: 195889 - DNA, 201 bp, Homo sapiens
ctaaaaggtcctttgtcccccactacttcctgctgtctccatccccagccctgatgtactctggccctcccgagaggggatgtgcacagggctgcaattaktggaagtgctgcctggagaaatgcaattatattctgatcttgggggagaaaaaaaaatccagccagtcaatagaacagaacattggtctcgagataatgg

SEQ ID NO: 195890 - DNA, 201 bp, Homo sapiens
aaagcaggagatattgatcaggcgccagcatcccataacaataactcttcctttatacaaagtgattgatgtggaagtgatgcttttgcctggcgggtatkgcccaggtcgctgctgggctgccctctgcctttcaggtggtgcagtggccctgagcaggtgggacaccttaccctgctctatttctgaacgtctcccggg

SEQ ID NO: 195891 - DNA, 201 bp, Homo sapiens
actcctgggtcctttgagagcatcccagtgcaggccacgcccatcacttcagaatgtcctctggcctgaccaagagccccgtgcagccctccaccctcacytcattccactcacttcttgctcaccacacccattgactcccctcatagactcctccctctgcctggctacctcatactcatccttcaggtccccttaaga

SEQ ID NO: 195892 - DNA, 201 bp, Homo sapiens
tacggctagtttaagatgattttgtcacttttatatttatttcttttcgagacagggtctccctctgtcacacaggctagagaacagtatcacaatcactscttactgaagccttgacctcatgggcttaagtgaccctcctgcctcagcctcccaagtagctggggccacaggtgtgtgccaccatacctggctattttt

SEQ ID NO: 195893 - DNA, 201 bp, Homo sapiens
gggccacaggtgtgtgccaccatacctggctatttttttttgtagacatgggggtctccctgtgttgcccacactggtcttgaactcctgggctcaagcartcctcccaccttgacctcccaaagtgctaggaatacaggcatgagccattgcacccagcctttctgtcacttttaacattaagagtccttaccaacccct

SEQ ID NO: 195894 - DNA, 201 bp, Homo sapiens
gtgctaggaatacaggcatgagccattgcacccagcctttctgtcacttttaacattaagagtccttaccaacccctctgtgccctgccagactcagggcmagtgttggcaggagtctcatctgttgtatttgccattggacccccagtgcctagcacagtgctctgcccgtaagaggcactcggtcatgaaagaggaggt

SEQ ID NO: 195895 - DNA, 201 bp, Homo sapiens
gcctataaaagacaattacccgctcttatctcctaaactgagggggaaagaaacgagtggtgatgtgcattgggaaaacacaatgggacccagaaagaagrgcgcagtggaagggattgtccatggaggggaacccgagagggcaggggctggggcagagcttctctctgttgaggaaatggctgcctggaagctagccag

SEQ ID NO: 195896 - DNA, 201 bp, Homo sapiens
acccgctcttatctcctaaactgagggggaaagaaacgagtggtgatgtgcattgggaaaacacaatgggacccagaaagaagggcgcagtggaagggatygtccatggaggggaacccgagagggcaggggctggggcagagcttctctctgttgaggaaatggctgcctggaagctagccaggaatggcacggcacccg

SEQ ID NO: 195897 - DNA, 201 bp, Homo sapiens
gaaaagactggcagctggccacggcttttgccgttggcatctcagctgaggacccctatgaagttcaaaccctaatcagttgcatttgggggaaagactayactaataattgccaccaatcattcagcattcactgtgtgcttaggaggcacatagggtagcagttaggagcttggttctggaattagaattgaggtccca

SEQ ID NO: 195898 - DNA, 201 bp, Homo sapiens
gggtgttcagacatatatgtagaaaacacttgggtatctgtaccaggcactgtgtgatgttgggtccaaagtcagttggtatggatgaaacctccatgttycccatatttttctaaacagcatttgtattcaatgctaggctattgcggtacacaacttcttctgcaccaacttgccctggtctaaggggatctaggacct

SEQ ID NO: 195899 - DNA, 201 bp, Homo sapiens
atacgcccagccagcctctgtgtgtgtgtgtgtgtgtgtggtggtggtggtgggggagttcatgcttgtaactgttctttttttttcttttttcttttttyttttgagacagagtttcactctggttgcccaggctggagtgcaatggcgcgatctcggctcaccgcaacctctgcctcccggattcaagcgattctcctg

SEQ ID NO: 195900 - DNA, 201 bp, Homo sapiens
tgacacttcccggagctcagctcccacccactgatggctctcagggagacgcgcggcctctttgagcctctcggctttccttgtaagtcacaggacaacgstcttctaggtcccgggggctgcaattctacacgtcaaggttgtcaagtggaggaggaggcagcgccctggacaggaggcagtgcggtctaatgccaaccc

SEQ ID NO: 195901 - DNA, 201 bp, Homo sapiens
agtgacaaagttgaaaaggctctgttgcttttccgtgatgtcagcagggattaaagcagtctctgctccctgtggggcctcttgtgggatatgctcttcaccctacccccacaactcaggggctcaaggaccaggcagaccccagcccctgaatcaagagccctcttcaccctgaaccatttggccagcaccttttacacc

SEQ ID NO: 195902 - DNA, 201 bp, Homo sapiens
agccctcttcaccctgaaccatttggccagcaccttttacacctagtgcccacaggggccctgcctcccttgaaagaggaagtctgcagtgagtgccagaccctggggggcctgccaaggggacatgagggctcagttcctattgaatttttccaagactgttgagttggtgtgttcaaacagccactgctgggtgagaga

SEQ ID NO: 195903 - DNA, 201 bp, Homo sapiens
ggatgtttactggatgcagctggtaaaaaaaaaaaaaaagtagaaaagaacaactttagttttaaatttacttctaaatttaagctgtattttttttttttgagacggagtcttgctctgttgcccaggatggagtacaatggcacaatctcggttcactgcaacctccggctcccaggttcaagtgattctcctgcctca

SEQ ID NO: 195904 - DNA, 201 bp, Homo sapiens
aggttgcaatatcacccttgctcagcttctgggtgtgtcctgccttcttttcacacgtcctgtttcacttagtcttcttgataacactgagttttatgggaaaaaaaaaaatcagagttttttttttttttttttaagtctgttcacgtagcctgggactgggctagcctttcagtaaccatatcagtatcacacaaagcg

SEQ ID NO: 195905 - DNA, 201 bp, Homo sapiens; identical to SEQ ID NO: 33567

SEQ ID NO: 195906 - DNA, 201 bp, Homo sapiens
atttagcgaacatttattatgttccaggcactgagctaagcttttaatatattttggctcatatcatgctcacgactgcactatgaagtaaagattattcyatcccctaaataatataaagaggagaggttaagtcactttcccaaagtcacacagcagctagctcattgaatttgcactagaacccaggcagtttgatgc

SEQ ID NO: 195907 - DNA, 201 bp, Homo sapiens
catgctgttaatctgaattttaaattgtcactgcataatataaagatgaaaggtaaaattcatgctaataacttaaagttttaatttttctacactgagarcactaactaacaagtaaaaatacaccatgacaaggctagagagagaccaggaaagaaaggaaacgattttatattcacgcctttcctccctgcactgact

SEQ ID NO: 195908 - DNA, 201 bp, Homo sapiens
tgtgtaatactgtgctgttctgcctccttacctgagggttatgatcagaacagctgccacttattgagtgcctcctctttggttagctctaggccaaatakacatatcatcccatttagttcttacaacaaacttttgaagaagttattttattaccacttttagggatgaaagagccaaggcaccatgaggtaggtgtgt

SEQ ID NO: 195909 - DNA, 201 bp, Homo sapiens; identical to SEQ ID NO: 33563

SEQ ID NO: 195910 - DNA, 201 bp, Homo sapiens; identical to SEQ ID NO: 33565

SEQ ID NO: 195911 - DNA, 201 bp, Homo sapiens; identical to SEQ ID NO: 33566

SEQ ID NO: 195912 - DNA, 201 bp, Homo sapiens
gaaggggtgaagcactgtattgccttaaaaaaaaattaagcaggtgccctgctccccccgcatcccatcttactttgcggtatttccacagctggttgccyttcatgctgtggcagtcgtacagcgtgacagggctggtgtgggaaatggcatcaaagcagaacttcttggtgtgctgggggtctccaggccggatgtcct

SEQ ID NO: 195913 - DNA, 201 bp, Homo sapiens
taaaaaaaaattaagcaggtgccctgctccccccgcatcccatcttactttgcggtatttccacagctggttgcccttcatgctgtggcagtcgtacagcrtgacagggctggtgtgggaaatggcatcaaagcagaacttcttggtgtgctgggggtctccaggccggatgtcctctctccaggtgaaggtgaatacctg

SEQ ID NO: 195914 - DNA, 201 bp, Homo sapiens
caatactgaacactcttagggccccaagtatggcctttgaccggaccaaatcacctggggttgtgacagagaacagaagctgtgcagtaactgcaatgttycccccaggacggcagaaactaaaaagccccaagaggacttctttctcttctgctgcagatgagtggcatcgatactaaaagctgccccaaacaggcaaat

SEQ ID NO: 195915 - DNA, 201 bp, Homo sapiens
taataggtgtgtgctggaatttccttgtaattgcaagttctatttctctattaactaatgaaattcagcattttaaatatgtttatttgccattcatataytttttttggtaaagtatctgcccgctttaaaattaaaaaaattattgacttttgagagtttgagaggatacaagtcctttcatttatatattctagatac

SEQ ID NO: 195916 - DNA, 201 bp, Homo sapiens
cctcctcctgtccccaccaacccccatgtccttaggtcagccactgatctgctttctgtttctagagattagtttgcaatttctagaattttctataaagsaatcatacagtatgtattctcttttgtgtcattctttcactcaacataattttgttgagaatcatctatgtcctaacagcatttatcaataattcatcgc

SEQ ID NO: 195917 - DNA, 201 bp, Homo sapiens
tgctgggattacaggcatgagccactgtgcccggctgcacttttctttttaaatggaatcagttgccaacatttaagacttgaggatttcacagtgaagtstagatttctgactactcttgaatgactacaaaatccggcatggtaggtttgtggcacaaatgaataagtggatgggctctgttgaaagaaggggtgaagc

SEQ ID NO: 195918 - DNA, 201 bp, Homo sapiens
tagagacggggtttcaccatgttggccaggctagtctcgaactcctgacctcaggtgatccacccacctcagcctcccaaagtgctgggattacaggcatsagccactgtgcccggctgcacttttctttttaaatggaatcagttgccaacatttaagacttgaggatttcacagtgaagtctagatttctgactactct

SEQ ID NO: 195919 - DNA, 201 bp, Homo sapiens
agtctgcagtgagtgccagaccctggggggcctgccaaggggacatgagggctcagttcctattgaatttttccaagactgttgagttggtgtgttcaaayagccactgctgggtgagagaggatgggttgcaggtgttcatgaagatcctatggtcactttcactgcagtccatgcagctgccactgacagggtggtaca

SEQ ID NO: 195920 - DNA, 201 bp, Homo sapiens; identical to SEQ ID NO: 33564

SEQ ID NO: 195921 - DNA, 201 bp, Homo sapiens
tcaactcccacccctgtagggggatgcagctgtctgctctgggtcccttgctgctccaccgcaggagttcccagcacaggagttcccaaacatatcctgcyagcttgtttccaggaccctttcactgcccctgtggcagtcttctcatagaagcaccatgcctctagacaagtacaaatctaattgtgaaagcctgttccc

SEQ ID NO: 195922 - DNA, 201 bp, Homo sapiens
ggagaatccaaagcctagggaggggaaggaactctcttaatgggatgtagcatatatcaagtgcaggaacccggcctatcagaagggctgtgggctgtgartggagggaaaaaaggcctggtgtgtacctgaaaatatagtactcatccatttgtccactcatcaagtacttattgagcttctactaagttccaggatccc

SEQ ID NO: 195923 - DNA, 201 bp, Homo sapiens
agggaaaaaaggcctggtgtgtacctgaaaatatagtactcatccatttgtccactcatcaagtacttattgagcttctactaagttccaggatcccctamgccccagttccaaccaaacagagaaaagtagagcccaaaactttgagcaaattgctggcttctctgactgtttcccaataagtgtgccactgccaaccac

SEQ ID NO: 195924 - DNA, 201 bp, Homo sapiens; identical to SEQ ID NO: 33568

SEQ ID NO: 195925 - DNA, 201 bp, Homo sapiens
gtggcggtattcaggccggcgctggtaaatgtactctgcgtactcatccatccacacttcggccacccgcttaaggttctatggggcaagaagcaatggasgggtcagtctttccaagaagccaaagccaggcagtggggtgaaaagggtcctggcaggtcgaggtcaacccttcttattttatgttccatcaaaaatccc

SEQ ID NO: 195926 - DNA, 201 bp, Homo sapiens
actccaggaacagaggaacacattcggggacagacagtagagacgcggacggggacgctgagggacagacttggaggagcggcatatgaggggacctaaaraggatagaggtgctatcaggagaggggcggactaataaaatgaaagggccagggccagaggactcgcggatccgtgggaggaagggtgggtgaaatagga

SEQ ID NO: 195927 - DNA, 201 bp, Homo sapiens
actaaaagctgccccaaacaggcaaattttacctttgtttctaaagcaccatcatgtaggagagccatctgagggctgggcaacctcgcaggactcacttytgggtggcctaggctaccttggtgttctcccacataatgttcaaggggacatagtgacaaagttgaaaaggctctgttgcttttccgtgatgtcagcagg

SEQ ID NO: 195928 - DNA, 201 bp, Homo sapiens
cagcatttctagtttggaggtctacctggccttttccgtgggctcagggccatctgaaacactgccctgtaaagctggtgctgggctgtccttgtgcctgragagtgctaaaattgacatttcaaatacccagagagcagggggagatatcccgcatgtccatagctgcaaagaaatgtctaggggggctccctcttctga

SEQ ID NO: 195929 - DNA, 201 bp, Homo sapiens
agcaaaaggtaaacatgaagggctggcatggagctgggtgtatatctggctgtgggacgtcgggttcttttctccactgcaaatgagactacagttgtgaygatggtgggaggttccaggggtgcaggtcttcaccaaggaccatgttgtaccacagcctctgctgagctgagggacacatgtccccctgctttcccaaca

SEQ ID NO: 195930 - DNA, 201 bp, Homo sapiens
ccatgaaatggagccagtcaagttctgtccttccttcccctcccacatactttgtcaagtcccaggacctactgatatgggctcagcaatgacaaatgccrgagtgctcagaggacacacccatcccttttcagggtgtgaacccagactggaaaggagaaccaaaggatgggaaaggcaggcccgggacggcttgctgct

SEQ ID NO: 195931 - DNA, 201 bp, Homo sapiens
agtaggtggtctacgtgaagaatgatgaaaagaagaatgacacatgagaaggaagaaggcagagaccactttagagaaagtctggaggtttactcaacaaygttcacaatcacaattgtacatggtaaatcagtctttcacaaaggcttatttttccaggcaggaggagaggctggtggtcttgagcttttggcctggaat

SEQ ID NO: 195932 - DNA, 201 bp, Homo sapiens
atcatcttagttgttttaggtctgcctttcactctagaatgatggctgttgggagtttttagtacccagcagaatgcctgagtccgaagtaggtggtctaygtgaagaatgatgaaaagaagaatgacacatgagaaggaagaaggcagagaccactttagagaaagtctggaggtttactcaacaacgttcacaatcaca

SEQ ID NO: 195933 - DNA, 201 bp, Homo sapiens
ccgactcagcatgctccatgaccttcttgctaaggtcaagttcttatactctcacgtgtacttctcctttgcagagcttaccacagtccctaactatacayttattttaatgatcatttgtttaatgtctatttttctaactagatcataagtgccttgcacagtcttttaatttctagcacagtgcctggtatatagtag

SEQ ID NO: 195934 - DNA, 201 bp, Homo sapiens
gcccctgcgcccagctaccactgaaaattttgatgaagactgcattgaatctgtagatcagcttggcaagtactgtgatcttaatattgttttctgattcrtgagcagggaatgtcactttcttaggtcttctttaatatccttcaacaatgttttgtagtcgtcagtcttgcacttatttggctaaatttatttctaagt

SEQ ID NO: 195935 - DNA, 201 bp, Homo sapiens
tctaggagtctgacatgtaattaacaaagcaaaaggtaaacatgaagggctggcatggagctgggtgtatatctggctgtgggacgtcgggttcttttctycactgcaaatgagactacagttgtgatgatggtgggaggttccaggggtgcaggtcttcaccaaggaccatgttgtaccacagcctctgctgagctgagg

SEQ ID NO: 195936 - DNA, 201 bp, Homo sapiens
ggtttcaccatgttgcccaggctggtcttgaactcctgacctcaggtgagccacccgtcttgggctcccaaagtgctggaattacaggcgtgagcccctgygcccagctaccactgaaaattttgatgaagactgcattgaatctgtagatcagcttggcaagtactgtgatcttaatattgttttctgattcatgagcag

SEQ ID NO: 195937 - DNA, 201 bp, Homo sapiens
gggtttcaccatgttgcccaggctggtcttgaactcctgacctcaggtgagccacccgtcttgggctcccaaagtgctggaattacaggcgtgagcccctrcgcccagctaccactgaaaattttgatgaagactgcattgaatctgtagatcagcttggcaagtactgtgatcttaatattgttttctgattcatgagca

SEQ ID NO: 195938 - DNA, 201 bp, Homo sapiens
gtacttattgagcttctactaagttccaggatcccctaagccccagttccaaccaaacagagaaaagtagagcccaaaactttgagcaaattgctggcttytctgactgtttcccaataagtgtgccactgccaaccaccaccaccaccaccaccaccacaacaacaacaacaaagctcacactctgtgtctagctcagca

SEQ ID NO: 195939 - DNA, 201 bp, Homo sapiens
ggaatcccctttccacggtgttcaggaagatcttaaaactcatccccggggctgactcttgtcatttatcactgacccatgcctctccctcccagctggcygtgtcagcaccccaggctgcagatgtttcagagaacctggctgccagtccctgaggggcggcccttacctgcatgttgttccaggcagcctccccacggc

SEQ ID NO: 195940 - DNA, 201 bp, Homo sapiens
ggggtttcaccatgttgcccaggctggtcttgaactcctgacctcaggtgagccacccgtcttgggctcccaaagtgctggaattacaggcgtgagccccygcgcccagctaccactgaaaattttgatgaagactgcattgaatctgtagatcagcttggcaagtactgtgatcttaatattgttttctgattcatgagc

SEQ ID NO: 195941 - DNA, 201 bp, Homo sapiens
ggtttgtggcacaaatgaataagtggatgggctctgttgaaagaaggggtgaagcactgtattgccttaaaaaaaaattaagcaggtgccctgctcccccygcatcccatcttactttgcggtatttccacagctggttgcccttcatgctgtggcagtcgtacagcgtgacagggctggtgtgggaaatggcatcaaagc

SEQ ID NO: 195942 - DNA, 201 bp, Homo sapiens
ttattctataaattttttagttttcactcttacatttaagtcttttatccattttaaggtaatttttgtatgtagtgtgaggtaaaggtacaaatccattmttttgtatgtggatatacaattgtcctagtgccattttttttttttttgagatggagtctcactctgttgcccagactggagtgcagtggcatgatcttg

SEQ ID NO: 195943 - DNA, 201 bp, Homo sapiens
gtaggtttgtggcacaaatgaataagtggatgggctctgttgaaagaaggggtgaagcactgtattgccttaaaaaaaaattaagcaggtgccctgctccycccgcatcccatcttactttgcggtatttccacagctggttgcccttcatgctgtggcagtcgtacagcgtgacagggctggtgtgggaaatggcatcaa

SEQ ID NO: 195944 - DNA, 201 bp, Homo sapiens
ggatcagggcaaatcagccagcatttctagtttggaggtctacctggccttttccgtgggctcagggccatctgaaacactgccctgtaaagctggtgctrggctgtccttgtgcctggagagtgctaaaattgacatttcaaatacccagagagcagggggagatatcccgcatgtccatagctgcaaagaaatgtctag

SEQ ID NO: 195945 - DNA, 201 bp, Homo sapiens
ttttaaagcgtacaattcagtggtttttagtatatttacaaagttgtgcaaccatcaccacttcttttttaattaatttatttgtctaaatttatggagtrcaagtgtcattttgttacaaacatagatagattacatagtggtaaagtcaggtcttttagtgtatccatcactggagtaatatacattttgcccattagg

SEQ ID NO: 195946 - DNA, 201 bp, Homo sapiens
atgagcactgggcttggagccagggcatctgggatttagccttggcactgccaccttccggtggagggaccctgcccagtcacctaaccgctctgggccasgttgcaatatcacccttgctcagcttctgggtgtgtcctgccttcttttcacacgtcctgtttcacttagtcttcttgataacactgagttttatgggaa

SEQ ID NO: 195947 - DNA, 201 bp, Homo sapiens
gacagagctttaacatcgacatataataaaacattcttgtgtattgaccataaaggaactaaaacttttaaaaatatatattaaaagatataggccagacycacgcctgtaatcccagcactttgggaggctgagttgggcagatcacttgaggtcagaccagcctggccaaaatggtggaaccttgtctctactaaaaat

SEQ ID NO: 195948 - DNA, 201 bp, Homo sapiens
aaaaatattttttaaacaaaacaaagttacaaaagaaaatatcaatacatttggccacataaaatttgtccaaataaacttaaaaaatgcaaatataggamagagctttaacatcgacatataataaaacattcttgtgtattgaccataaaggaactaaaacttttaaaaatatatattaaaagatataggccagaccca

SEQ ID NO: 195949 - DNA, 201 bp, Homo sapiens
acacccagggctgtcactctgccaggcctgagtgaagtcacactcgaagggaagaactgcaggctgccgtgcaggtgcagcaccaccatggaccccaggtrtccctaagctgggcagaccaggctttgaggataacaaaagtggaaccagctgcccgaggccagaggttggcagagctgtgtgcagctgcagcagggaagc

SEQ ID NO: 195950 - DNA, 201 bp, Homo sapiens
aagtattactacagttagctcttatccactgaattaatctataataatggttctataacaagcaggaggcggtaatgtctctttatcaggtgggccttttaaaaaaaaaaacaacagcaacaacaacaacaacaaactttctttgagacatggtctcgttttgtcacccaggctggagtgcagtggcacacacagctcact

SEQ ID NO: 195951 - DNA, 201 bp, Homo sapiens
cctggctggaccgagggccagactccaggaacagaggaacacattcggggacagacagtagagacgcggacggggacgctgagggacagacttggaggagsggcatatgaggggacctaaagaggatagaggtgctatcaggagaggggcggactaataaaatgaaagggccagggccagaggactcgcggatccgtggga

SEQ ID NO: 195952 - DNA, 201 bp, Homo sapiens
agaaatgaaacaattcatccacacaaacacttttacatgaatgttaacagcagcattattcacaatagccaaaaggtggaaacagctcaaatatccatcarctgatgaaaggataaacaaaatgtggtatattcacacaatgaaatattaatgatacaaaggaagtgctgacacatgctgcaacatagatgaactttgaaa

SEQ ID NO: 195953 - DNA, 201 bp, Homo sapiens
gcagcaggtgaggaaagtgtttgtgagtagacttggggacagaggaagagggaattcttatgtatgtgatgaaaattcctgattccatctgcagtgtagamcccacccagtgagaacttctgatatgtgatatatctgagagcaaaacttcagggttcaggggaaattctccgctccaaaacatctttcttcaacccctgg

SEQ ID NO: 195954 - DNA, 201 bp, Homo sapiens
aagaaatgtctaggggggctccctcttctgactcctcacctggcagctgatcagcattcaatactgaacactcttagggccccaagtatggcctttgaccsgaccaaatcacctggggttgtgacagagaacagaagctgtgcagtaactgcaatgttccccccaggacggcagaaactaaaaagccccaagaggacttct

SEQ ID NO: 195955 - DNA, 201 bp, Homo sapiens
catgtttagaagcaggtggctggtgatcttaagttttgctcagtggccataaatgcatttgtagcatctgaactggtaatttcacacgtgggacagccatmgtcggaaataggcctatcagagataatatgaagtacagtgatgttcattatggaattatttataataggaaaaataaaatagaacctcagagttccaaaa

SEQ ID NO: 195956 - DNA, 201 bp, Homo sapiens
ggctggtgatcttaagttttgctcagtggccataaatgcatttgtagcatctgaactggtaatttcacacgtgggacagccatcgtcggaaataggcctaycagagataatatgaagtacagtgatgttcattatggaattatttataataggaaaaataaaatagaacctcagagttccaaaagggaagtggttaagtaa

SEQ ID NO: 195957 - DNA, 201 bp, Homo sapiens
aactcctgacctcaggtgagctgcctgcctcggcctcccaaagtgctggattacttacaggtgtgagccacagcacctggtcttccctagtgccatttttygaaaagactgttctctctccgttggatgattttgattccgttgtcaaaaagcaatagactgtaaatgtatgagttctggactctcagttctgttccattg

SEQ ID NO: 195958 - DNA, 201 bp, Homo sapiens
tgggattacaggcgtgagccaccgtgcccagtcataaatggattttcttaatttaatttttgtttattgtcagtgtgtagaaatacaacttgctttttctyggtcagtctagctgaaagtttgctcatttttgtagacaacccttttcaaggaaccaactctcggtttcattgattttttttctatttgtctaatctcttt

SEQ ID NO: 195959 - DNA, 201 bp, Homo sapiens; identical to SEQ ID NO: 33569

SEQ ID NO: 195960 - DNA, 201 bp, Homo sapiens
attacctaattcattcattcattcattcattcattcatacatgatctggtcattggtcaggtttgttctaaaaaccatgctggaaaaaatggaacagaaaygaactgccaagggtggaccaaagatacagagccttgaaagccgggtgaaggtattggaacttgttggccaacctgccaaccaacctgcccatttactctg

SEQ ID NO: 195961 - DNA, 201 bp, Homo sapiens
cattcattcatacatgatctggtcattggtcaggtttgttctaaaaaccatgctggaaaaaatggaacagaaacgaactgccaagggtggaccaaagatayagagccttgaaagccgggtgaaggtattggaacttgttggccaacctgccaaccaacctgcccatttactctgtccttccacacccacgcctgagcatcc

SEQ ID NO: 195962 - DNA, 201 bp, Homo sapiens
gtggggaggcaatgcggtgtgggggtgttgggaactgctatgataaggaacttgtattcagaatatatgcagaactcttattactcaataataaagagacraataacccaattgaaaagtgggctaagggtttgaatagacatttctccaaagaagataaacaaatggccaataagcccatgcaaagatgctcaacatcct

SEQ ID NO: 195963 - DNA, 201 bp, Homo sapiens
catcaggcattagattctcacaaggagcacccaacctagatccctcccaagtgcagttcccagtggggttcacactcctgtgaaaatctaatgctgccgargatttgactggaggcagagctcaggtgctaatgctcccttgcctgctgctcacctcctgctgtacggccccattcccaaccagtacctctccatgcaggt

SEQ ID NO: 195964 - DNA, 201 bp, Homo sapiens
ggttgggggtgagtggggatgatttcaggatgaaactgctccatctcagatcatcaggcattagattctcacaaggagcacccaacctagatccctcccawgtgcagttcccagtggggttcacactcctgtgaaaatctaatgctgccgaagatttgactggaggcagagctcaggtgctaatgctcccttgcctgctgc

SEQ ID NO: 195965 - DNA, 201 bp, Homo sapiens
ataaaattttgtcagtggaaaatggaagtaccaatagtagtgataagaagtatgcatctgtcaagtaagtgaaaatacaacccactgaatgggagaaaatrtttgcaaatcatatataaggcagtggtccacaacctttttggtaccagggaccggttttgtggaagacaatttttccacggttgggggtggggagggggt

SEQ ID NO: 195966 - DNA, 201 bp, Homo sapiens
ttttagtagagatgggtttcaccatgttgtccaggctggtctcgaactcctggccttaagtgatccactcaccttggcctcccaaagtgctgggattacargtgtgagccaccgcactggctgtttctgaatcttaacaatgttctctgcagcttgcattgcaagaactggtactgactccaacagagtatcacccagtct

SEQ ID NO: 195967 - DNA, 201 bp, Homo sapiens
aggcatgtaccactgctcccggctaatcttgtatttttagtagagatggggtttctccatgttggtccggctggtctcggactcccaacctcaggtgatcygcccgcctcggcctcccaaagtgctgggattacaggtgtgagccaccgctcccagccattctttatgtataattttgtagtctttattcaaggcatactt

SEQ ID NO: 195968 - DNA, 201 bp, Homo sapiens
gcttggcataatcaaaaagaaagccagggcaggagcagagggagaaaggggaagagggatgggaggggaggccagagacgcgggcagggctcccgcagggscctcacggggcagaacaaggagtcttcacagaaggtcttcagtgagggagacacacaatccacttacatcttacaaagatgactctgccagtggggtgga

SEQ ID NO: 195969 - DNA, 201 bp, Homo sapiens
tcactccaactgaaaacaagtctggacactctgaccatggccagactggttaagaatgatactgaaatttaccagtgtcattcttaaaggattgaataacrtcatattttaattctaattataattaccattttaattaatattgcataattgtatcttccagacacagcttgaaaagctctttctcccagattttgaact

SEQ ID NO: 195970 - DNA, 201 bp, Homo sapiens
ttcaacccctggctgttgtccccccaccccaattttaactcttcggttttacctccttcgtaagttttttccctattgcaatctaaaatttcctctgaaasgttaaaggggagttagcagtttaagctgttatcagtcatttgcacctcagtgtgaaggattgctctaggagcagaaggtcaggcaggggtcccaaatgtt

SEQ ID NO: 195971 - DNA, 201 bp, Homo sapiens
tgcttttcgtcttccccgatggccccagtgatgggtgcaggatccaagaataagacttgattcctgcacctttactggtatactgggaaagaggcatataytttctgctgggttggccaagcagtaggggttggtcagcctgaagcttctggaagccattttgataccttcagcatgaggccaacacaaaaggaacatgag

SEQ ID NO: 195972 - DNA, 201 bp, Homo sapiens
tagctaccccaggctcatatgtgagtcaaacacaatatattccccccatttttttttactttaaattggtcttctgaaagagccccaactcttatgctccycttttccaagctccaacctatccatcaatgaatgggtaggtcctctcagctcagagacccaggatcccatggtggcatgctcgtctgcttgcaaagactg

SEQ ID NO: 195973 - DNA, 201 bp, Homo sapiens
tgggtaggtcctctcagctcagagacccaggatcccatggtggcatgctcgtctgcttgcaaagactggtctgcctcggccagcatgggcctcacgggccrcaccatgcgcagttcacaggtccccatgctcaggagggcctggcttgatttaaagctctgctgccactgtcttgaaattctgaataattttatctttgaa

SEQ ID NO: 195974 - DNA, 201 bp, Homo sapiens
ctgctgccactgtcttgaaattctgaataattttatctttgaactgttttgtaagtgaaatctgatgggacactggagcgtgtgcatgagcagagaagcaygctgttcctctctgccctgtctgcatgcagcatgtgcgaagacactgaataaataggggcgctgggggtcccagaggccctgctttcccttcaaaccgga

SEQ ID NO: 195975 - DNA, 201 bp, Homo sapiens
tagattgttctggtgagaaatacttatgcatgcagcaggtgggaaatacagatcatgtcatttcacccattctgaacatgagttacatgctgttaatctgmattttaaattgtcactgcataatataaagatgaaaggtaaaattcatgctaataacttaaagttttaatttttctacactgagaacactaactaacaagt

SEQ ID NO: 195976 - DNA, 201 bp, Homo sapiens
aagaagcaatggaggggtcagtctttccaagaagccaaagccaggcagtggggtgaaaagggtcctggcaggtcgaggtcaacccttcttattttatgttscatcaaaaatcccagccccaccgtgagtttaggccttctgtgtttctatttatcattatgcatgttttaagggcttcacagcttatagttggcccatagg

SEQ ID NO: 195977 - DNA, 201 bp, Homo sapiens
tgccagccagagctgctgggccatatggcctccaaggagagacaaggagagcctgtccaaggatgaaatcaacccagaatgaagcagagcggagggctggrtccaggaatgcattccgccttttaacaccagaatccagccatgtctgaagctagagctaccttggactttccagttacagaagcctgtatattctttctt

SEQ ID NO: 195978 - DNA, 201 bp, Homo sapiens
ctaccttggactttccagttacagaagcctgtatattctttcttcgctaagccaatttgatttggctttttgtcattttcaactgagagttttgaccaagytatgtgataaaggcaaattataatttgaaaccaaaaggtgtaattccatcagcagctggaatttctaataatcctttgaggtgcaaaggttgctgctact

SEQ ID NO: 195979 - DNA, 201 bp, Homo sapiens
tggagtgcagtggcacgagcacagctcactggaacctcgacctcctgggctcaagcagttctcctgcctcagcctcccaagttgctgcaactacaggcacrtaccattacgcctggctaattttttcttttttttttttttttttgtagagacagggtcttcctatgtttcccataggaaaatgttgtcaaactcctgagc

SEQ ID NO: 195980 - DNA, 201 bp, Homo sapiens
ttagtctggaggccctctaggagtctgacatgtaattaacaaagcaaaaggtaaacatgaagggctggcatggagctgggtgtatatctggctgtgggacrtcgggttcttttctccactgcaaatgagactacagttgtgatgatggtgggaggttccaggggtgcaggtcttcaccaaggaccatgttgtaccacagcc

SEQ ID NO: 195981 - DNA, 201 bp, Homo sapiens
gggttcacactcctgtgaaaatctaatgctgccgaagatttgactggaggcagagctcaggtgctaatgctcccttgcctgctgctcacctcctgctgtayggccccattcccaaccagtacctctccatgcaggtgtggggaggcaatgcggtgtggggaggcaatgcggtgtgggggtgttgggaactgctatgataag

SEQ ID NO: 195982 - DNA, 201 bp, Homo sapiens
ttacacccagcctgatacgcccagccagcctctgtgtgtgtgtgtgtgtgtgtggtggtggtggtgggggagttcatgcttgtaactgttctttttttttsttttttctttttttttttgagacagagtttcactctggttgcccaggctggagtgcaatggcgcgatctcggctcaccgcaacctctgcctcccggattc

SEQ ID NO: 195983 - DNA, 201 bp, Homo sapiens
tgtggtgctaaagacagttggctttgctgtcagaactgggttcagatctggactccacccatgacttgttataacatgttagcaattatttcacttcttgrgtctgatgaaataggtggtgacaaattcttaacacagtgcctagaacatcataagtggttaataaatgtcagctatcatgattcctaccgtagttacatt

SEQ ID NO: 195984 - DNA, 201 bp, Homo sapiens
gttacatttgcccccccagaagttggatatcttttttgtgtggttctgtataattatttttgaacataaaactttttattatttaggattattattttttmtgagtgccagagatggaattgtggtcaaagactacaaagttttccaaggtctaagggccaggctcactgaccctttttttctttcctgtcttttctgccc

SEQ ID NO: 195985 - DNA, 201 bp, Homo sapiens
caaaacagtatgtagtgtggaattccatttatattttgtaaaaattttgtgcagacacacacacacacgtgcatgcacattaaggatacacaaaaaactastaactgtggttgcccctaggatagggactatgactcaagggagagaagatagaagtaattttaattttataatcattgttcctatttggatttttgtttt

SEQ ID NO: 195986 - DNA, 201 bp, Homo sapiens
ttgcccctaggatagggactatgactcaagggagagaagatagaagtaattttaattttataatcattgttcctatttggatttttgttttactacatgtstatatttcttttataataataaaaataccatctagtactgttattttaaaaaggaaatatggaatagcaaaaaaaaaaaaaaaaaggaagaatcttagaa

SEQ ID NO: 195987 - DNA, 201 bp, Homo sapiens
ctggacttaaatgatcctcctacttcagcctcccaaaacactgggattacaggcattagccgccgcaccctgctatatggcacttttgagattacttgagratgtgcatatgcacagagtggtgaagaaaattcgagttgtccagcaggcgctgtcacagactgaatgtctgtgtcccttcctgaattcatttgttgacat

SEQ ID NO: 195988 - DNA, 201 bp, Homo sapiens
tggataccagacgcttgtcaaatataatctgaaaatattttctcattctgtgagtttttttctgttttctttttatttcttttcttttccttcttttttctttttttttttcaaggcagagcctcgctctgtcacccaggctggagtgagatggcatgatcttggctcacggcaacctccgcctcttgggttcaagtgatg

SEQ ID NO: 195989 - DNA, 201 bp, Homo sapiens
gaagaatgacacatgagaaggaagaaggcagagaccactttagagaaagtctggaggtttactcaacaacgttcacaatcacaattgtacatggtaaatcwgtctttcacaaaggcttatttttccaggcaggaggagaggctggtggtcttgagcttttggcctggaattccagtctgaattttcaaatattccctgcct

SEQ ID NO: 195990 - DNA, 201 bp, Homo sapiens
cctggaattccagtctgaattttcaaatattccctgcctccaacccctttgggatcctagtcttcaagccaataacagagcaggagtctgaccctgttctkttgcctggcacggctgaatcaaagccattctggaagcagatgttaaggtgaacttgtcacttggtatgtaggtccgactcccatcccagaggtggcagtg

SEQ ID NO: 195991 - DNA, 201 bp, Homo sapiens
ggtttcaccatgttggtcaggatgttcttgaactcctgacttgaagtgatctgcccacctcagactcccaaagtgctgggattataggtgggagccaccgmacctggcctcttttcactttcttaatagtgtacattgaggcacaatagtttttaatttgattttaatttaattttaaaatttaatttgaaatttaataat

SEQ ID NO: 195992 - DNA, 201 bp, Homo sapiens
gtctcaaaaaaacaaaacaaaacaaaacaaaacaaaacaaaacaaaaaaacccaacttaatttaaaatttaataagtaattttaaaatttaattttaaatsaatgaagtccaatttatttattctttagttgattgtgtttttaatatattttaggaaacgattgtccaatttaaggtcacaaagattaacatttattctt

SEQ ID NO: 195993 - DNA, 201 bp, Homo sapiens
tgtaattccatcagcagctggaatttctaataatcctttgaggtgcaaaggttgctgctactttcatcatgaagcacaaagataatcagttttaaaaaatkacagccacatgattggcaagcagaggcagcaggtgaggaaagtgtttgtgagtagacttggggacagaggaagagggaattcttatgtatgtgatgaaaa

SEQ ID NO: 195994 - DNA, 201 bp, Homo sapiens
ttatgtgaatttgaattactgggtttacccaatgggaggcagtgagtggcagatgactggaaggtagaaaaggaggaaggacaggatatgtattcctcccmtctcctcttgttttggcagtagctgcaatttactacctgcagctgcagatcccattgggaagcccctgttcctggctacagccttctctgcattatagta

SEQ ID NO: 195995 - DNA, 201 bp, Homo sapiens
tgctagaggaagttgaaggcctaacagagactgtctacatgaacactctgaaacacaatatttcctctgctttttccagtatgtccaccaggctcttttgkctcactgtctaacctgctcgagtcacagaggtaatgagggtagtttcactccaactgaaaacaagtctggacactctgaccatggccagactggttaaga

SEQ ID NO: 195996 - DNA, 201 bp, Homo sapiens
ctggaacctcgacctcctgggctcaagcagttctcctgcctcagcctcccaagttgctgcaactacaggcacataccattacgcctggctaattttttcttttttttttttttttttgtagagacagggtcttcctatgtttcccataggaaaatgttgtcaaactcctgagctcaagtcatcctcctgctttggcctccc

SEQ ID NO: 195997 - DNA, 201 bp, Homo sapiens
agtgtaggcatttatagccataaatttccctctgagcactgatttttctacatcccataaattttgatatgtcatgtttttattttcgtttgtctcaaataattttctaattttcctggaaattcttttttgacccattggtcattaagagtgtttgtttaatttccatatattttgaatttccctaaattttccattact

SEQ ID NO: 195998 - DNA, 201 bp, Homo sapiens
ttgcctggatccttggagtaagtctccatttttgtttcaccaagtttgagtagtttctgttattgccttccctaagatcctttttccagaggcaaagatargaaagatttcagcaagtttagtaaacaatgtaagactggctacttgttcctgaggcaggcaagctggtggacagctcatccttcctgaactgcttctacc

SEQ ID NO: 195999 - DNA, 201 bp, Homo sapiens
tttaattgatttctgctctaatctttatcattgccttctgtttgctttgggtttcatttgctcttctttttctagtttcttaaggtggaagattggattattaacttaagtttttcttctttttaagtgtaggcatttatagccataaatttccctctgagcactgatttttctacatcccataaattttgatatgtcatg

SEQ ID NO: 196000 - DNA, 201 bp, Homo sapiens
caattgctatgtgccaggtacctgtcagacctacacaggtttgaattctggcactagttacttaatgtttccatcgccaacatcacgtttcatgttccccrtccctaaaatggggttaaaaacaagtgagaattaagtgagataagtaaaatgctttgcatgcctggctcgaagggaatttttataagtattactacagtt

SEQ ID NO: 196001 - DNA, 201 bp, Homo sapiens
agtgagataagtaaaatgctttgcatgcctggctcgaagggaatttttataagtattactacagttagctcttatccactgaattaatctataataatggytctataacaagcaggaggcggtaatgtctctttatcaggtgggccttttaaaaaaaaaaacaacagcaacaacaacaacaacaaactttctttgagacat

SEQ ID NO: 196002 - DNA, 201 bp, Homo sapiens
aagggaatttttataagtattactacagttagctcttatccactgaattaatctataataatggttctataacaagcaggaggcggtaatgtctctttatsaggtgggccttttaaaaaaaaaaacaacagcaacaacaacaacaacaaactttctttgagacatggtctcgttttgtcacccaggctggagtgcagtggc

SEQ ID NO: 196003 - DNA, 201 bp, Homo sapiens
ttgctcctggtctggagttggagtgtccccatggtcccttgtagccggaagagtctcagtcttgggcgtaccgagagagcgtgcgcttttcctgcctggcwccctcctcagggatcgccaaatggcctttcagaagaacgcgattcctgcttcaagggactgaacctagaacctaccccccgcccgtgtcggatggggctg

SEQ ID NO: 196004 - DNA, 201 bp, Homo sapiens
atttttggaatcaagatttaatgcagacttggattgggtattgaatatttttgatttgtctacttttctctccatagggagcttacagcttcattgcaccrtgtgtggcatttgggtcctgtttggcagcaatgactgcctttctgtttagtgtctgtgtgctatgaagattgcaaacggggtccagatgcattctgtttt

SEQ ID NO: 196005 - DNA, 201 bp, Homo sapiens
gctgtgattgtgccactgcacttcagcctgagggacagagccggaccctgtctcagaaaaacctagaacaacaacaaacagagagaggagcctggacgtaytgagctacgttagtgttcgcgggctgctgtagtgatggcttacaacatcagaaatttattctcttacagttctggaggccacaagtccaaaatcaaggtg

SEQ ID NO: 196006 - DNA, 201 bp, Homo sapiens
gaatcaagatttaatgcagacttggattgggtattgaatatttttgatttgtctacttttctctccatagggagcttacagcttcattgcaccatgtgtgrcatttgggtcctgtttggcagcaatgactgcctttctgtttagtgtctgtgtgctatgaagattgcaaacggggtccagatgcattctgttttgagaatg

SEQ ID NO: 196007 - DNA, 201 bp, Homo sapiens
gagctgtgattgtgccactgcacttcagcctgagggacagagccggaccctgtctcagaaaaacctagaacaacaacaaacagagagaggagcctggacgrattgagctacgttagtgttcgcgggctgctgtagtgatggcttacaacatcagaaatttattctcttacagttctggaggccacaagtccaaaatcaagg

SEQ ID NO: 196008 - DNA, 201 bp, Homo sapiens
aagtggtttatgcacatttttggaatcaagatttaatgcagacttggattgggtattgaatatttttgatttgtctacttttctctccatagggagcttayagcttcattgcaccatgtgtggcatttgggtcctgtttggcagcaatgactgcctttctgtttagtgtctgtgtgctatgaagattgcaaacggggtcca

SEQ ID NO: 196009 - DNA, 201 bp, Homo sapiens
atttttctaggtgatcgtagaagaaatggtgaaaaggaaaggcaagaatggaattgcctgctagtgggaagtagaagagagtattaaaacttttttctttytaagtcaaatcagtgtcatatacatgagaatgctaggcggtatgatggcattatcagcttggctttctccttaaataggaagtgccctgttttactcgga

SEQ ID NO: 196010 - DNA, 201 bp, Homo sapiens
catttttggaatcaagatttaatgcagacttggattgggtattgaatatttttgatttgtctacttttctctccatagggagcttacagcttcattgcacyatgtgtggcatttgggtcctgtttggcagcaatgactgcctttctgtttagtgtctgtgtgctatgaagattgcaaacggggtccagatgcattctgttt

SEQ ID NO: 196011 - DNA, 201 bp, Homo sapiens; identical to SEQ ID NO: 33574

SEQ ID NO: 196012 - DNA, 201 bp, Homo sapiens
cctaatgggagatcgctatagaaaagatggtttaaattttagtctttgaagtggtttatgcacatttttggaatcaagatttaatgcagacttggattggrtattgaatatttttgatttgtctacttttctctccatagggagcttacagcttcattgcaccatgtgtggcatttgggtcctgtttggcagcaatgactg

SEQ ID NO: 196013 - DNA, 201 bp, Homo sapiens
gacttgggtctcatccccaagatacctcacgtagatgcaaatattctaaaatccaaaaaaaattccaaaacccaaaatacttctggttccaaacatttcasagaagggatactcaatctgcgtatacataaatatttatgtatcacatacatagtatgtatataatatgcatttccattcctctacaggttgctattctgg

SEQ ID NO: 196014 - DNA, 201 bp, Homo sapiens
ttccgtgtacacaaactttgtttcctgtacaaaattatttgaaatattatataaaattacctttaggctatgtgtataagatatatgaaacataagtgaayttcacgtttagacttgggtctcatccccaagatacctcacgtagatgcaaatattctaaaatccaaaaaaaattccaaaacccaaaatacttctggttcc

SEQ ID NO: 196015 - DNA, 201 bp, Homo sapiens
ttttactggattctgccaataagaaagtgttcctgggcagagatacatgaggagtcagaccttcgtttaaagcagtgacagaagatggatttttggctgtrtgttcagaagctaaaggtaatagtaaatttatctatagattttcattattgtcttggtcgtgtgttttcttttaaattctatttgaaaatctcttagcaa

SEQ ID NO: 196016 - DNA, 201 bp, Homo sapiens
gtatgcctgtcaacctaatgggagatcgctatagaaaagatggtttaaattttagtctttgaagtggtttatgcacatttttggaatcaagatttaatgcmgacttggattgggtattgaatatttttgatttgtctacttttctctccatagggagcttacagcttcattgcaccatgtgtggcatttgggtcctgtttg

SEQ ID NO: 196017 - DNA, 201 bp, Homo sapiens
cgcttataacacagaaagtcaagctgttggagaaattggactgtagtgtaaaggtatggatgacatggtgaaaatgtgtgatagagatattcaagatattkaaggactagagctacctgcattcataacagaacaagaggtcacgtcagtttataaaattaaagagagacttccaagacaaaagccgttgatgatgaggca

SEQ ID NO: 196018 - DNA, 201 bp, Homo sapiens
aaaggaggaattgagcaaacaatttgtgtgttggatggtgtgtttgcatttgttttactggattctgccaataagaaagtgttcctgggcagagatacatraggagtcagaccttcgtttaaagcagtgacagaagatggatttttggctgtatgttcagaagctaaaggtaatagtaaatttatctatagattttcatta

SEQ ID NO: 196019 - DNA, 201 bp, Homo sapiens
gcttaatattcactaagcagtgttaagacgacttaggtaaatgattccctgatgaacacacttgattttcaaagcactttcctaacccgtttttaattggwatagagtcaaaggcagatggcttattagtagtcatttcatttaaatctcatggaattttcctgctaaatctcaaagtaaatttgttataggctgttttgt

SEQ ID NO: 196020 - DNA, 201 bp, Homo sapiens; identical to SEQ ID NO: 33577

SEQ ID NO: 196021 - DNA, 201 bp, Homo sapiens; identical to SEQ ID NO: 33578

SEQ ID NO: 196022 - DNA, 201 bp, Homo sapiens; identical to SEQ ID NO: 33579

SEQ ID NO: 196023 - DNA, 201 bp, Homo sapiens; identical to SEQ ID NO: 33580

SEQ ID NO: 196024 - DNA, 201 bp, Homo sapiens; identical to SEQ ID NO: 33581

SEQ ID NO: 196025 - DNA, 201 bp, Homo sapiens; identical to SEQ ID NO: 33582

SEQ ID NO: 196026 - DNA, 201 bp, Homo sapiens
gatctgatcttacagtcaaggaaaaagaagaactgattgaagagtggcaaccacaacctcttgttcctcctgtcccaaaagaccatcctgctgtcaactayaacatcgtttcaggacggagtcttgctctgtcaccaggctggagtgcagtggtgcgatctcggctcactgcaatctccacctcccaggttcaagccattc

SEQ ID NO: 196027 - DNA, 201 bp, Homo sapiens
tgcattttaacaaacattatttcaattgtccctttaaggtaagttggtagtatctccattttacaggtgaggaaaatgaagcttacagtggctaattagtrtgctcaaggtcacacaagtaataattatagcccagatgtgatgctatacagaattttgttaaattcttaaagctcactccctctttctattatttatact

SEQ ID NO: 196028 - DNA, 201 bp, Homo sapiens
agggtttcttccttgagggggagctccagaccacaggaggcaggaccctctgtggggtgcccgtgttccgagggataagactcagcctcataggggcgccrtcccacctgactggaaaagaaggcccaagatgtcactgacggttgaagaggagtgggaaacggcccaagattcccggggcaggcacaggtgcaggagcag

SEQ ID NO: 196029 - DNA, 201 bp, Homo sapiens; identical to SEQ ID NO: 33584

SEQ ID NO: 196030 - DNA, 201 bp, Homo sapiens
tgttataaaagtcaaggtgcttgtgacccaccttccggaaggaagcggttaactatggcgacctccacggagcagtgggttctggtggggatggtacaggygctttaggaggctcctgcttaccatcttattttggaagggattctgttactctggataatcagacttcttttctctaagacttacaaattacaggaacga

SEQ ID NO: 196031 - DNA, 201 bp, Homo sapiens
tctgatactctggataatcagacttcttttctctaagactcacaaattacaagaacgatctgatcttacagtcaaagaaaaagaagaactgattgaagagwggcaaccagaacctcttgttcctcctgtcccaaaagaccatcctgctctcaaccacaacatcgtttcaggacggagtcttgctctgtcaccagtctggag

SEQ ID NO: 196032 - DNA, 201 bp, Homo sapiens
cttaccatcttattttggaagggattctgatactctggataatcagacttcttttctctaagactcacaaattacaagaacgatctgatcttacagtcaargaaaaagaagaactgattgaagagtggcaaccagaacctcttgttcctcctgtcccaaaagaccatcctgctctcaaccacaacatcgtttcaggacgga

SEQ ID NO: 196033 - DNA, 201 bp, Homo sapiens
cctcccttctttcatccctccatcatgtccctattcttcctggaccaccttagttactatctcctccatgaagctttttaaaattaacccctagccttccsgaaggaagcggctaactatggcgaccgccatggagcagtgggttctggtggagatggtacagttgctttacgaggctcctgcttaccatcttattttgga

SEQ ID NO: 196034 - DNA, 201 bp, Homo sapiens; identical to SEQ ID NO: 33592

SEQ ID NO: 196035 - DNA, 201 bp, Homo sapiens
tttcatccctccatcatgtccctattcttcctggaccaccttagttactatctcctccatgaagctttttaaaattaacccctagccttccggaaggaagyggctaactatggcgaccgccatggagcagtgggttctggtggagatggtacagttgctttacgaggctcctgcttaccatcttattttggaagggattct

SEQ ID NO: 196036 - DNA, 201 bp, Homo sapiens
tccttgagggggggctccagaccacaggaggcaggaccttctgtggggtgcccgtgttccgagagataagacacagcctgacaggggcgccgtcccacctgactggaaaagaaggcccaaggtgtcgctgacggttgaagaggagtgggaaacggccccagattcccggggcaggcacaggtgcgggagctgcagggtgag

SEQ ID NO: 196037 - DNA, 201 bp, Homo sapiens; identical to SEQ ID NO: 33586

SEQ ID NO: 196038 - DNA, 201 bp, Homo sapiens
gggcgccgtcccacctgactggaaaagaaggcccaaggtgtcgctgacggttgaagaggagtgggaaacggccccagattcccggggcaggcacaggtgcrggagctgcagggtgagcccggccagctgggaaggcctcacagacaagacgagcaggttgccgatggcgtggccaggacctgcggtgggaccaggaacaaa

SEQ ID NO: 196039 - DNA, 201 bp, Homo sapiens
aacatcatggagttgcgagcagacagcatgggtttcttccttgagggggggctccagaccacaggaggcaggaccttctgtggggtgcccgtgttccgagrgataagacacagcctgacaggggcgccgtcccacctgactggaaaagaaggcccaaggtgtcgctgacggttgaagaggagtgggaaacggccccagatt

SEQ ID NO: 196040 - DNA, 201 bp, Homo sapiens; identical to SEQ ID NO: 33590

SEQ ID NO: 196041 - DNA, 201 bp, Homo sapiens
cttctgccctcacctccatcttcaggagcctggctgggatcacctgctcatctaatgaaggaagttgaaggttaaacttgcctctgagacgagggatcctyacggggctgaggtgtccaaacatcatggagttgcgagcagacagcatgggtttcttccttgagggggggctccagaccacaggaggcaggaccttctgtg

SEQ ID NO: 196042 - DNA, 201 bp, Homo sapiens
ttgggaggccgaggcgggtggatcacgaggtcaggagatcgaggccatcctggctaacacggtgaaaccccatctctactaaaaatactaaaaattagcckggcgtggcggtgggcgcctatagtcccagctactcaggaggctgaggcaggagaatggcgtgaacccaggaggcagagcttgcagtaagccgagatcacc

SEQ ID NO: 196043 - DNA, 201 bp, Homo sapiens
ataagccggacacggtggctcacgtctgtaatcccagcactttgggaggccgaggcgggtggatcacgaggtcaggagatcgaggccatcctggctaacayggtgaaaccccatctctactaaaaatactaaaaattagccgggcgtggcggtgggcgcctatagtcccagctactcaggaggctgaggcaggagaatggc

SEQ ID NO: 196044 - DNA, 201 bp, Homo sapiens
taactgggactgtgacaaatggctgtgtgctcaaacttaatccatgtatagtgcttagaactgagtctggtgtgtagaaagtgcccaacacataagccggwcacggtggctcacgtctgtaatcccagcactttgggaggccgaggcgggtggatcacgaggtcaggagatcgaggccatcctggctaacacggtgaaacc

SEQ ID NO: 196045 - DNA, 201 bp, Homo sapiens
ggacatatatagacataggagaggggatttatgatgggaattggctcactcgattttggaggctgagaagttccacaatctaccatctgcatgctggagayccaggaaaccccgtggtataattccatctgagtccaaaggcctgaaaaccagaagagccaatgttataactccctgtccgagtgcaaagtatcgagaacc

SEQ ID NO: 196046 - DNA, 201 bp, Homo sapiens; identical to SEQ ID NO: 33599

SEQ ID NO: 196047 - DNA, 201 bp, Homo sapiens; identical to SEQ ID NO: 33601

SEQ ID NO: 196048 - DNA, 201 bp, Homo sapiens
agttctccccaggttgtcatctgtgccaatccaaaaggcatgaaaatcaagtctggatccatggggaaggtgtccccaccctacaatgtgcaggtagcagmctcccccaacttctggcaaggcctggcgtggagaggagaaagacacacaggcctggctggcacgggctgctgggctgctgggctgctggaggggcccagg

SEQ ID NO: 196049 - DNA, 201 bp, Homo sapiens
tggagaagaggggaatgttgccgtcgtatcagaaccacccggcccttctgtttcttcaattgctatttggtaagagacggggaacagctgttctcatgacrgtgactgtgtgctaagcattgtgcaccacactttgtaagtatctatttgtttaatccttacaatgactgcatgaggtaggttgctactattattaataaa

SEQ ID NO: 196050 - DNA, 201 bp, Homo sapiens
caggggacttcacagtgcagccagggatgagagcccgtggattagctgatcatccagatcacagaactttgggaattacctagatctcaaaaccccatattgggggaaacctttagaaaagagttctaaattattagaaattgggatgggggtggaagctgtgcctaaatgtgcagaattatagacatggacatgtgtgtg

SEQ ID NO: 196051 - DNA, 201 bp, Homo sapiens
ttgaataagataaccctgatttctttgtgtgtctctgtgcatctgctttcttctttattttctcttatatctgtgtctgttgggtctctctatttcatggytaccttttatttgtgttacatgatactaacttttcatttataagaggaagacatacttgtaaaactgtatttcaaccaatgtgaagcttaaccaatgaga

SEQ ID NO: 196052 - DNA, 201 bp, Homo sapiens
caaaattagctggatgtagtggcacatgcctataatcccagctatttgggaggccgaggcaggagaatcacttgaacccgggaggcagaggttgcagtgarccaagatcacgccattgcactccagcctgggcaacaagagcgaaacaccatctcaaaagaaaaaaaaaaatcagctcatatgattttgagagctgtcagg

SEQ ID NO: 196053 - DNA, 201 bp, Homo sapiens
actaaaaatacaaaattagctggatgtagtggcacatgcctataatcccagctatttgggaggccgaggcaggagaatcacttgaacccgggaggcagagkttgcagtgagccaagatcacgccattgcactccagcctgggcaacaagagcgaaacaccatctcaaaagaaaaaaaaaaatcagctcatatgattttgag

SEQ ID NO: 196054 - DNA, 201 bp, Homo sapiens
taacatgatgatatccagttccacccatgttattgcaaaaaacaagacctcatttttttttatggatccattgtgtatatgtacattttctttatccattmatctgttgatggacacttaggttgcttcaaaacatagtagattctttttttaaaaaaattattttcataggttattggggaacaggtggtgtttgattac

SEQ ID NO: 196055 - DNA, 201 bp, Homo sapiens
cgtctctactaaaaatacaaaattagctggatgtagtggcacatgcctataatcccagctatttgggaggccgaggcaggagaatcacttgaacccgggargcagaggttgcagtgagccaagatcacgccattgcactccagcctgggcaacaagagcgaaacaccatctcaaaagaaaaaaaaaaatcagctcatatga

SEQ ID NO: 196056 - DNA, 201 bp, Homo sapiens
tattttaaaatgtacaattaagtttttattgactatagtcaccctgatgtgctttaaaataacaggtcttattcattcattctattattttggtaccaacwaaccatccccacctttctcccagcccccgactacccttcccagcctctggtaatcatccttctaatctctatttccatgagttcaattgttttgactttt

SEQ ID NO: 196057 - DNA, 201 bp, Homo sapiens
tgtggtgttttgatgtaggcatgcaatgcgtgaaaatcacatcatagagaatagggtatccatcccctcaaagcatttatcttttgtgttacaatctacaytctttcagttattttaaaatgtacaattaagtttttattgactatagtcaccctgatgtgctttaaaataacaggtcttattcattcattctattatttt

SEQ ID NO: 196058 - DNA, 201 bp, Homo sapiens
ggcaggcagatcacccgaggtcaggagtttgagaccagcctgaccaacatggagaaaccccgtctctactaaaaatacaaaattagctggatgtagtggcrcatgcctataatcccagctatttgggaggccgaggcaggagaatcacttgaacccgggaggcagaggttgcagtgagccaagatcacgccattgcactcc

SEQ ID NO: 196059 - DNA, 201 bp, Homo sapiens
gctgtatcacatggtagctaactgcacaggctgtgccatcagtcaaagagtcagacctggactctgaacctacacctttgattcgctagctgtgtggcctkggggaagttgcctaatctcctgagctgcagtttcagcctcatctgtaagaaagggataacatatctctatagagttgctgagtgaatgaaatgatacaag

SEQ ID NO: 196060 - DNA, 201 bp, Homo sapiens
cagacatagctgagcaagagccctggggatcttttttaaaaaatcagcccatagggccaggcgccatggctcacgcctgtaatcccagcacttttggaggmtgaggcaggcagatcacccgaggtcaggagtttgagaccagcctgaccaacatggagaaaccccgtctctactaaaaatacaaaattagctggatgtagt

SEQ ID NO: 196061 - DNA, 201 bp, Homo sapiens; identical to SEQ ID NO: 33594

SEQ ID NO: 196062 - DNA, 201 bp, Homo sapiens
tacctctatacccaaagtcttccctactatccactcaacatccccttctgttttatgccagggactgtgatgattccaggtgtcactcagctgacgcagarggacctcaagtaccggctgcaggcgtccagggccaagtccattatcaccagtgactccctagctccaagggtggacgccatcagcgccgaatgcccctcc

SEQ ID NO: 196063 - DNA, 201 bp, Homo sapiens; identical to SEQ ID NO: 33595

SEQ ID NO: 196064 - DNA, 201 bp, Homo sapiens; identical to SEQ ID NO: 33598

SEQ ID NO: 196065 - DNA, 201 bp, Homo sapiens
tgagataagctgtatcacatggtagctaactgcacaggctgtgccatcagtcaaagagtcagacctggactctgaacctacacctttgattcgctagctgkgtggccttggggaagttgcctaatctcctgagctgcagtttcagcctcatctgtaagaaagggataacatatctctatagagttgctgagtgaatgaaat

SEQ ID NO: 196066 - DNA, 201 bp, Homo sapiens
atgagtgggatatagaatttcaggctgcaggagaaaacatataaatcagtgaatttaaggcttctttggtgtggctccctggccttccgtaatctggttcstgaccacttggttcccttcaatcattgcctatgctctagctagattcttagatgtaagactatttcgttgctatttctcctgcatggggtgcccttgtct

SEQ ID NO: 196067 - DNA, 201 bp, Homo sapiens
tctctaatttttggcagatggtggttggccttgaccgaatcggacgtcttctggaacacgacagacactggctgggtgaaggcagcctggactctcttctytgcctggcctaatggatcttgcatttttgtgcatgagctgtcccgagttgatgccaaatttatcctgaatgtaagaggaaaaaccagtaataccccatat

SEQ ID NO: 196068 - DNA, 201 bp, Homo sapiens
ctgacattctctaatttttggcagatggtggttggccttgaccgaatcggacgtcttctggaacacgacagacactggctgggtgaaggcagcctggactstcttctctgcctggcctaatggatcttgcatttttgtgcatgagctgtcccgagttgatgccaaatttatcctgaatgtaagaggaaaaaccagtaatac

SEQ ID NO: 196069 - DNA, 201 bp, Homo sapiens
aagtggaaaggctcttctttatctgtactgagttctccccaggttgtcatctgtgccaatccaaaaggcatgaaaatcaagtctggatccatggggaaggygtccccaccctacaatgtgcaggtagcagcctcccccaacttctggcaaggcctggcgtggagaggagaaagacacacaggcctggctggcacgggctgc

SEQ ID NO: 196070 - DNA, 201 bp, Homo sapiens
tctgtattcttagcctagggcataggtacatggaagatgctcaataaatgctggttgagacaatagttgacttgaaggttcttgttcaggtttcacaagtrtaagtgagtacccactgagcagggctccaaatgtggtgatatagataatacaatcctttttaaaggtagagtcattgccaagggtactgacattctctaa

SEQ ID NO: 196071 - DNA, 201 bp, Homo sapiens
cgtgtgtcccaggattcaagtgcatgaccgcttttctgtcttccatgtttgcagacacagtttcccattcctgggatgctcctgcttctctacctcacctrtataatccctatatattgtttatgtctaactcaagtgtcacctcctccaccacagcatttctcagaaacccatgtccatcattgctctgggttaggtgcc

SEQ ID NO: 196072 - DNA, 201 bp, Homo sapiens
tgtatggatagaccacattttatttattttatttttatttttatttttatttttttgagacagagttttgctcttttacccaggctggtgtgcagtggtgygatctccgctcactgtaacctctgccttctggtttcaagcgattctcttgccttagcctcccagatagctgggattacaggtgcccgccaccacacctgg

SEQ ID NO: 196073 - DNA, 201 bp, Homo sapiens
ccgtggtagtgccacctagtgtttttacgttttacagggaggcatctacagagcacaactgcgtgaggacaaagtgtcaagacccactggctatctacttyaccagcggaaccaccggggaccccgagatggtcgagcactcccagagcagctacggactgggttttgtggccagcggaaggtaccagagcagcttgtcta

SEQ ID NO: 196074 - DNA, 201 bp, Homo sapiens
cacctgggaagccatcagcctgggaaggcagccggtgcctgaatacttcaactttgcccatgatgtgctggatgtgtggagtcggctggaagagatgaagmctgttctgtcctagagtccatctggggcatctgaggctgccctcatgtaccacaatgagactcaaggctccaagacatgttgatgaggaaatttggacct

SEQ ID NO: 196075 - DNA, 201 bp, Homo sapiens
ctgtttttaccgtggtagtgccacctagtgtttttacgttttacagggaggcatctacagagcacaactgcgtgaggacaaagtgtcaagacccactggcyatctacttcaccagcggaaccaccggggaccccgagatggtcgagcactcccagagcagctacggactgggttttgtggccagcggaaggtaccagagca

SEQ ID NO: 196076 - DNA, 201 bp, Homo sapiens
ccccatattgggggaaacctttagaaaagagttctaaattattagaaattgggatgggggtggaagctgtgcctaaatgtgcagaattatagacatggacrtgtgtgtgttctaccagaaagtcctcataccttggtaagaaagcatgggctcttttgagtgagttatgtaaccattttgagcctcagtctcctggtctgc

SEQ ID NO: 196077 - DNA, 201 bp, Homo sapiens
aggtgtcactcagctgacgcagagggacctcaagtaccggctgcaggcgtccagggccaagtccattatcaccagtgactccctagctccaagggtggacrccatcagcgccgaatgcccctccctcaagaccaagctgctggtgtcagacagcagtcggccaggctggttgaacttcagggaactcctccggtgaattgg

SEQ ID NO: 196078 - DNA, 201 bp, Homo sapiens
ggcgtgaacccaggaggcagagcttgcagtaagccgagatcacctcactgagctccagcctgggcgacagggtgagactctgtctcaaaaaaaaaaaaaaagtgtccaacaaatgtttcgtagttacagtagtaagagtaagaggaagctctttctaaaagcatatctgtctgaacatgaaatgatagtggccttcctccc

SEQ ID NO: 196079 - DNA, 201 bp, Homo sapiens
actttgaggggaaatatttggtgcttttcttctatcctttggatttctttctttttttttttttttccgagacggagtcttgctgtgtcacccaggctggrgtgcagtggcacgatctcggctcactgcaacctccccctcctgggttcaagccaattctcctgcctcagcctcctgagtacctggaattacaggcgcctg

SEQ ID NO: 196080 - DNA, 201 bp, Homo sapiens
gcttctggaagaacaagtttgacaaacatattgtggtctggttccggtcaagcaaaattctggtaccagttcctcataccatgcacctgatgtcacccagsatgcgccctattttaagggtacagccgtggtcaatggagagttcaaagacctaagccttgatgactttgaggggaaatatttggtgcttttcttctatcc

SEQ ID NO: 196081 - DNA, 201 bp, Homo sapiens
agttcctcataccatgcacctgatgtcacccagcatgcgccctattttaagggtacagccgtggtcaatggagagttcaaagacctaagccttgatgactytgaggggaaatatttggtgcttttcttctatcctttggatttctttctttttttttttttttccgagacggagtcttgctgtgtcacccaggctggagtg

SEQ ID NO: 196082 - DNA, 201 bp, Homo sapiens
atatttggtgcttttcttctatcctttggatttctttctttttttttttttttccgagacggagtcttgctgtgtcacccaggctggagtgcagtggcacratctcggctcactgcaacctccccctcctgggttcaagccaattctcctgcctcagcctcctgagtacctggaattacaggcgcctgccacgacgcctgg

SEQ ID NO: 196083 - DNA, 201 bp, Homo sapiens
ctttggatttctttctttttttttttttttccgagacggagtcttgctgtgtcacccaggctggagtgcagtggcacgatctcggctcactgcaacctccscctcctgggttcaagccaattctcctgcctcagcctcctgagtacctggaattacaggcgcctgccacgacgcctggctaatttttgtatttttagtaga

SEQ ID NO: 196084 - DNA, 201 bp, Homo sapiens
tgcttctggaagaacaagtttgacaaacatattgtggtctggttccggtcaagcaaaattctggtaccagttcctcataccatgcacctgatgtcacccascatgcgccctattttaagggtacagccgtggtcaatggagagttcaaagacctaagccttgatgactttgaggggaaatatttggtgcttttcttctatc

SEQ ID NO: 196085 - DNA, 201 bp, Homo sapiens; identical to SEQ ID NO: 33608

SEQ ID NO: 196086 - DNA, 201 bp, Homo sapiens
agtgaataagttcagctcccgggcaaatccactgcagaaacggactcttccctccaccatccagtggagaggcaggaggggcgggaggaagagcggacagsggcatttgcgggaggtgcgcgcccggggctctctgtgggccaaaggcggccccccaacccgcagccccgggcagccaatggcgcccagcccctcccccga

SEQ ID NO: 196087 - DNA, 201 bp, Homo sapiens
gtgaataagttcagctcccgggcaaatccactgcagaaacggactcttccctccaccatccagtggagaggcaggaggggcgggaggaagagcggacagcsgcatttgcgggaggtgcgcgcccggggctctctgtgggccaaaggcggccccccaacccgcagccccgggcagccaatggcgcccagcccctcccccgag

SEQ ID NO: 196088 - DNA, 201 bp, Homo sapiens
tatttggtgcttttcttctatcctttggatttctttctttttttttttttttccgagacggagtcttgctgtgtcacccaggctggagtgcagtggcacgrtctcggctcactgcaacctccccctcctgggttcaagccaattctcctgcctcagcctcctgagtacctggaattacaggcgcctgccacgacgcctggc

SEQ ID NO: 196089 - DNA, 201 bp, Homo sapiens
cactggatactgtgaaatgaatcttggtggagagggcaagaagggctgggtgcggtggctcacacctgtaatcctagcactgtgggaggccaaggcgggcsgatcacttgaggtcaggagttaagagaccagccttgccaacagtagcctgtaatctcagctactcaggaggctgaggcaggagaatcacttgaacctggg

SEQ ID NO: 196090 - DNA, 201 bp, Homo sapiens
tttttttttttgagacagagttttactttgtcacccaggctggactgcagtggtgcgatctctgctcactgcaacctctgcctcccaggttcaggcaattmttgggcctctgccttcccagtagctgggattacaggcacgtgccaccacacccggctagcttttgtattttttggtagagatggggtttcatcatgttgg

SEQ ID NO: 196091 - DNA, 201 bp, Homo sapiens
gagtttccagactgaaaggacctgcttgccctgtgctcagcatgatggatagaaacaaagctgcactagaggacagcactgtgaaatttcagaacactgcrgacaaagagaagaccttacatgcttcaagacaggaaaaaaatgacattcaaaagctccggaattagaagtggctttggatttcatgctattaacattgga

SEQ ID NO: 196092 - DNA, 201 bp, Homo sapiens
acccaggctggaatgtaatggtgtgatcttggctcactgcaacctccacctccgaggttcaagcgattctcctgcctcagcctcctcagtatctaggattrcaggcacatgccaccatgcctggataatttttgtatttttagttgagatggggtttcaccatgttggtcatgctggtctcaaactcctgatcttgtgatc

SEQ ID NO: 196093 - DNA, 201 bp, Homo sapiens
ccacctcagcctcccaaaatgggattacaggtgtgagccactgtgcgcgggctttttttttttttttttgagacggagtcttgctctgttgccaggctggrgtacagtggcgccatctcagctcactgcatcctctgcctcccaggctcaagtgattctcctgctccagcctcctgagtagctgggattacaggcctgcac

SEQ ID NO: 196094 - DNA, 201 bp, Homo sapiens
accacgctcggctagaaacagattcttgaatgcaaacctaaatgcaatttgtttccttcccttcctgctgtggaacagaaatgtccagtctgggcaaactmatttttcctttgatatagattgtatgcatgttttttttttttgagacggagtcttgctctgtcgcccaggtggaagtgcagtgacgtgatcttgactcac

SEQ ID NO: 196095 - DNA, 201 bp, Homo sapiens
gaaactggtcgctttttgtcctagatataggggagtccaggatggtgtggtggagtctttagagtcgaatatgacccgaggcaagctcatattcaggtttsgggcaaggagctttgattgacccttaattttttcagtggaacggaaaacttcggtaaaatagcttctgaccttcggaacagatggattcaccttggaaag

SEQ ID NO: 196096 - DNA, 201 bp, Homo sapiens
tcatttgctatatttctatgttaattataaaaatgcttcaagcggccaggcacggtggctcatgcctctaattccagcattttgggaagccgaggcaggcrgatcatgaggtcaggagatcaagaccatcctgggctaacacggtgaaaccccatctctactaaaaatacaaaaaattggccagcatggtgacgcacgcct

SEQ ID NO: 196097 - DNA, 201 bp, Homo sapiens
cgcctgaccgcccgccagtcccagagtttagggccaggggccccgcctacctgagggcactggcctggcggaccgcgccgggggagcacttccgctggacscacgcacttccggccccctggaaccaatgagagtgcgaccgagatgttccactcgctggcgtccgggccgctggtgatctccggtagcactcgggccggc

SEQ ID NO: 196098 - DNA, 201 bp, Homo sapiens
ttattttctttttcctttgtagacaacaagggaggtgtcacagttttccatttagatcaacaacttcaagttcttaccatggaaaattccgagaagactgmagtggttctccttgcttgtggttcattcaatcccatcaccaacatgcacctcaggttgtttgagctggccaaggactacatgaatggaacaggtaggagc

SEQ ID NO: 196099 - DNA, 201 bp, Homo sapiens
gaggaggagagttccaggaagaaaatcctctgggaaaaaaacagattgaatagaatagcaattgtaaattaaaccatttgaaattgatgttttgttgattaaaaaaaaaattgcttgctgagcacagtggctcatacctgtaagcccagcactttggaattggccaaagtggacaggttcgcttcgagattctgagcccag

SEQ ID NO: 196100 - DNA, 201 bp, Homo sapiens
atctgattctcataaaataaaagctcataaaaactgtgaactgtcattctttttttttttttgagacagagttttgctcttgttgcccaggctggagtgcratggcacaatctcggcttactgcaacctctgcctcccgagttcaagtgattctcctgcctcagcctctcaagtatctggggttacaggcgtgcgccacca

SEQ ID NO: 196101 - DNA, 201 bp, Homo sapiens
ttctcaagaaatggagttgtcggccaggtgaggtggctcatgctcgtaatcccaacactttgggaggttaaggtgggcggattgcttgagcccaggagttygagaccagtctgggcaatatagtgaaaccttatctctacaaaaaaatacaaaagagtagccaggtctggtggggcatacctgtagtcccagctacttggg

SEQ ID NO: 196102 - DNA, 201 bp, Homo sapiens
taattcctaacttagtgctgtgtctgggatgtggaaggtggtccgaaaatgttggtggcgtcaagggatagtgggtatatattaggtaacctctccagatragaacagatgaacagtcatttccatgtgttcaggtgctgtgcctgtcagagatactttgggagattttatactgaatacgttcttcttgcccattagtac

SEQ ID NO: 196103 - DNA, 201 bp, Homo sapiens
taactatgattaccacagaactctaccaaaactaattgtttcacttagttctgtctgattatggaatctctttattaccatcagttgtttttcagagttayaatttgaatatgaaaccatttttctagcccaccttagagaagactgttgacacactagttgaaatggttgcaatagcctctaccttgcaagacacttcag

SEQ ID NO: 196104 - DNA, 201 bp, Homo sapiens
atgttttgccacaaggatttaaatgaaggtgccaatttagcaagaaatagaagtcttgctgtatactgtgccaaacccaatccaacagcttcagttttttkttgttgttgttgttgttgtttgtttgtttgttttgaggcaagatgttgctttgtcatccaggccaaagtgcagtggtgtgagcatggctcactggagcct

SEQ ID NO: 196105 - DNA, 201 bp, Homo sapiens
tcactgcattatccaggatggtctcgatctcctgtccttgtgatccacccacctcagcctcccaaaatgggattacaggtgtgagccactgtgcgcgggctttttttttttttttttgagacggagtcttgctctgttgccaggctggagtacagtggcgccatctcagctcactgcatcctctgcctcccaggctcaagt

SEQ ID NO: 196106 - DNA, 201 bp, Homo sapiens
caaactcctggcctcaagcaatcctcccacctaggcctcccaaagtgctgggattacaaatgtgagctaccatgcctggcctgttgttatcttgagtttawaatgaaagggctttctgaaaagcctttctgtttagtatctgttcttagagttctgaactttccagtgactgactgtatcatttagggttcagactaggaa

SEQ ID NO: 196107 - DNA, 201 bp, Homo sapiens
taaataggggatctaacccaggaaagagatgaagaagttttcagaataatagcttcacaaatagagatttttcatctggataagaggaggagagttccagraagaaaatcctctgggaaaaaaacagattgaatagaatagcaattgtaaattaaaccatttgaaattgatgttttgttgattaaaaaaaaaattgcttgc

SEQ ID NO: 196108 - DNA, 201 bp, Homo sapiens
gcatattctcaagtagtttcatgataaagggtgtatgagagatcaaccctttatcatgaaacgcttgaggatacgctccagaaagattagaaagcaaagcragaaataaataggggatctaacccaggaaagagatgaagaagttttcagaataatagcttcacaaatagagatttttcatctggataagaggaggagagt

SEQ ID NO: 196109 - DNA, 201 bp, Homo sapiens
acatctatagtcccagcactttgggagtctgaggcaggaggattgcttgaggccaggagttcaagaccagtgtgggcaacatagtgagacctcatctctcmaaaaaactaaagttagctgaacatggtggcacgtgcctgtagtcgcagctatctgggaggctgaggcggtaggatcacttgagcccaggagttttggttg

SEQ ID NO: 196110 - DNA, 201 bp, Homo sapiens
ctcgggttcttctatccaacactgatatttttctttcttttctaacagtttggtaatctattagtactatatcctatactgttactaattgctttataatrtgtaaggttttttaaaaaaattaacaggattataagccccttgaagactcttttactgaggcttgaaaactacttaatgaaattaaaatttacagactcg

SEQ ID NO: 196111 - DNA, 201 bp, Homo sapiens
gtatcagattctattagagagaatgataccttcctgataatcaaaatctgaaattatagtatgaaataatttaactagattttttatttttttgagacagrgtcttactctgtcatccaggctggtgtgcagtggtgtgatcttggctcactgcaacctctgcttcctgggctaaagtgatcctccagtctcagcctccca

SEQ ID NO: 196112 - DNA, 201 bp, Homo sapiens
tttcaaactcctggcctcaagcaatcctcccaccttggcatcccaaggtgctgggattacaggcatgagccacagtgctcagcagcaaatataatgtttcycaagaagtgtgattcctaggagaaaggagaaggtagtttgggtggaagagattgggtggctttgttctgttcaaaggatgggcgagactatgtttgtggg

SEQ ID NO: 196113 - DNA, 201 bp, Homo sapiens
atttaaaaattttttaaaattttcttcattggttgtaattccaattggcaaaacattttcttgggcacttattcacacttataatacttatggcttcatayagtatcagattctattagagagaatgataccttcctgataatcaaaatctgaaattatagtatgaaataatttaactagattttttatttttttgagaca

SEQ ID NO: 196114 - DNA, 201 bp, Homo sapiens
tcctttaaggacttttccaatttaaaaattttttaaaattttcttcattggttgtaattccaattggcaaaacattttcttgggcacttattcacacttayaatacttatggcttcatatagtatcagattctattagagagaatgataccttcctgataatcaaaatctgaaattatagtatgaaataatttaactagat

SEQ ID NO: 196115 - DNA, 201 bp, Homo sapiens
ttgaatggagtaaacattcactccctgaggcactaaagcatagattgagtagggtttaatcaagcgatcctttaaggacttttccaatttaaaaatttttwaaaattttcttcattggttgtaattccaattggcaaaacattttcttgggcacttattcacacttataatacttatggcttcatatagtatcagattcta

SEQ ID NO: 196116 - DNA, 201 bp, Homo sapiens
attgtaaattgtttcataaacaattagatattaaaatatttataataaaacaatttttaaaagaatgcctcagatgtcttgtaaggtaaaatatattttawctagaattattgttctttattgttgtttctccttttaatagataaattttgaatagttattagaaaaacataacaaaattcagagatagaaacagttgtc

SEQ ID NO: 196117 - DNA, 201 bp, Homo sapiens
cttaacgaaagttaccacttttctgatacccatcactatagattagttgtgtttattcctgaaattcatataagtggaatcaaatcattcttttatgtctmatttcctgtgttgaacattacatctgtgaaatccatgttttttgagttagtagtagtaattctttttcattgctctgtattatttcattatacgagtgtc

SEQ ID NO: 196118 - DNA, 201 bp, Homo sapiens
tgtgccaccactcccggctaattttgtatttttagtagagatgggatttctccatgttggtcaggctggtctcaaactcccgacctcaggtgatccgcctrcctcggcctcccaaagtgcttggattacaggcgtgagccactgcccctggcccatccattctgttttttaaaaaatttgataggactcgaagaaaaaata

SEQ ID NO: 196119 - DNA, 201 bp, Homo sapiens
agaaggtaagaggtcttttgtaaccattgaaagaatagcagattgtgtgagcaaaagcaacgctgtagtgggaaaaataagagatgagaaagtggagacarcaagtatacttttatttatttatttagagacagggcctcaatctgtggcccaggctggagtgcagtggcttggtcacagtacactgcagcctcaacctcc

SEQ ID NO: 196120 - DNA, 201 bp, Homo sapiens
ggccgacagacctagactctgtctcaaaaaaaaaaaaaaaaaaaaaaaaaggccgggtgcgatggctcacacttgtgatcccagcactttgggaggctgargcaggtggatcacttgagttcaggagttcgagaccagcctggccaacatggtgaaaccccgtctctactaaaaatacaaaaattagccaggtgtggtggt

SEQ ID NO: 196121 - DNA, 201 bp, Homo sapiens
tttttctttctttactgtctgctttttaagtcttctggtcttccctcttcccaaccctaggtgttatatactcactgtatcatgttcattcattctcttgkgtttactaatgtgttgtaattaagtctctctttcctcctggactcaaaggcaggtttatatttgtcttattactttttgacttcctgttgcttgtttatg

SEQ ID NO: 196122 - DNA, 201 bp, Homo sapiens
tttaacatgtttaagaagtatgtctgtgacaacatctaattgagctgttgatgaagttagtttatagtcatcagcttcattttctatattcttcattcccygtacaaaatacttgtcatacccagtgggtgttccagacttagcatgttttaaaatcaaggtagcattgtcatattttgttttgattggcttttgctcagg

SEQ ID NO: 196123 - DNA, 201 bp, Homo sapiens
tctcaatctctgcattaaatttctattttgttttgattgtacaatgtccaccacaactggaagagttgttttagttggttcttgagacttagagtagaatsaggacactctcaaattgaactatgactttgaaaaaagaagtggataatgtttcaaacctgaatcaggaacatttcatatttgctttttttttttttttga

SEQ ID NO: 196124 - DNA, 201 bp, Homo sapiens
gtgggcgtttggtctgcaggttctttaggaggccggtgtccgcaggttgagcgtggatacagctcctgagcaactggaatctgttgagggtggggaagackgattttggcttgctttcctaggtggtggtctgctttgctcatcctgcatgattagatctgttctgaagtcttgcctgagtgaatgttaggcagagtcgga

SEQ ID NO: 196125 - DNA, 201 bp, Homo sapiens
attttctagagttttatataaatggaattacatagtatgtacttttctttatagtctggcttctttcactcaaataattattttgagattcttctctgttkttgcatgtataaataattcattcattttttgtagtaatatcccattatatgggtataccaaaatttatcattcatttgctgatgagcatttgggttattt

SEQ ID NO: 196126 - DNA, 201 bp, Homo sapiens
ttatgtgataggctttcactgcttcttcatgtgggggcatctctgcaatgtaaattgctattttccagttattttacttaaattaaaacaaataaagtttytgaagacactcaggaaatgtgtgaatttactgagtatataaccttagaacccttgagcaggaaaacatcaaatcacaaatagggaggtgagtatactggc

SEQ ID NO: 196127 - DNA, 201 bp, Homo sapiens
aggctgaggcaggtggatcacttgaggtcaggagattgagaccagcctggccaacatggtgaaaccccgtctctacaaaaaaatacaaaaattagtcgggygtggtggtgcgtgcctgtagtcccagctactcaggaggctgaggtgggaggatcacttgagtccagtgagctgtgattgcaccactgcactccagcctgg

SEQ ID NO: 196128 - DNA, 201 bp, Homo sapiens
gttggtctataagattttctttgttaagctggttgtgaacactggtgttataaaactattactcgaggccaggcgcggtggcttacgcctctaatcccagmactttgggaggccgaggcgggcggattacctgaagtcaggagttcaagaccagcctggctaacatggtgaaaccccgtctctactaaaaatacaaaaatt

SEQ ID NO: 196129 - DNA, 201 bp, Homo sapiens
ttaaggaaactcatttgaggctcctggccacgaatttaaagagaaaccaatttatcagacatcgtgtatttgtgtgtgtgtgtgtgtgtgtgtgtgtgtgwgagagagagagagagagagtgcatgtccatccagccacatgcagctgtgtaggtatcaacacagaataggcagaaaattgcgctgaaagagagagagaga

SEQ ID NO: 196130 - DNA, 201 bp, Homo sapiens
ccccttgccgtggctgggatctcgcgggaagagctgcgggcacggcggtggctcggtctcccggctgcgcgcggagcgggagggctctcctcacacaagckcttccttgccgagaggctggagctgcggcaccgcaggcctgagccaccccttctctgctgtctccttctcttcctcagggctcccgtgtctgctcgccct

SEQ ID NO: 196131 - DNA, 201 bp, Homo sapiens
tggtctgcaggttctttaggaggccggtgtccgcaggttgagcgtggatacagctcctgagcaactggaatctgttgagggtggggaagactgattttggyttgctttcctaggtggtggtctgctttgctcatcctgcatgattagatctgttctgaagtcttgcctgagtgaatgttaggcagagtcggatagtgcagg

SEQ ID NO: 196132 - DNA, 201 bp, Homo sapiens
atgattccttctcatatctgagtcagtttctggcagtgaggatggatccaccattgagctaaagttagttctcccagtttttgccactcagagttgtggcrtggatattggagaacacagtcacaatgtctgcttacagtgtttgccttggttgtgttctaatgctctgaggttctttattcattcttatctgttacattt

SEQ ID NO: 196133 - DNA, 201 bp, Homo sapiens
gtgaaacatcgcaccataaagacagatggcgagaggggtgcccccctccgtggcagctcactgccttttgagtactcttactgcctgtgtacccttcaaaygggcctctccaaaagcttctacttccaaagcatttttatctagaagtcaaatgtaagtgtttcaagcttgattccaggctgagagcacttcatagctttt

SEQ ID NO: 196134 - DNA, 201 bp, Homo sapiens
cttagactaataggtcagaatgcaggcagcagatggtaagacctgagtaagaagctagctagttctgttctgcaggttggcaaaggccagtcacagatggygacagtgaggctacaagtagatcccagttctgggatcaagcaagtgccaaagcctcacactaaaattatctgcagcactgctgagagacgtgcaggatcc

SEQ ID NO: 196135 - DNA, 201 bp, Homo sapiens
gaaagatttttttagtggtcccttttagtatagtcttaatactgtggataatttggcatcatccttgaaggagggctatgattttattcatttatcaaatrtttgaccattttatgccaggcactgctctaggctctgtaagtacctcagtgaacaaaacagacaaaaatccctacccctaccctgagaagacatacattt

SEQ ID NO: 196136 - DNA, 201 bp, Homo sapiens
catgtagaatttataggcattctctatattttaacatccaggaatttttcataagaatgaacatcaatcccaatattgaaatagtaggacatggcttaatrctgatcctgaaccattaataatgatttttgttacagcttcccagccacttcttcaatttagttgtagctctgggcatgcaatgcggaataatgacatctc

SEQ ID NO: 196137 - DNA, 201 bp, Homo sapiens
gtcatattaagtatttttacatctatattcataggaaaattggtctatagttttcttataatatcttagtttggttttgatacagggtcatggtgcccttwtagaatgacttgagaagtgttctctcttcttcaattttctggataagccttttagaattagtattatttcttccttaaatgtttgttagaattgaccagt

SEQ ID NO: 196138 - DNA, 201 bp, Homo sapiens
acataattttaatgtgcatttcttgctttgttttgctaatgacttattacttgctgtttattttatatttattttagactatggaaatgatgttagacaaraagcaaattcaagtgattttcttattcaagttcaaaatgggtcataaagcagcagagacaactcgcagcatcaacaatgcatttggcccagaaattgcta

SEQ ID NO: 196139 - DNA, 201 bp, Homo sapiens
gtctcctcctctggactcttctaacagcttttgtctcagccacttattggcactcaaagtgtgcaactgtgtgtggccatttttcatattatgcacaaggkgtggctataagataaggagacataaatatgcaagttttcaaaccaggacaagggacagggaaaaaaaaaaaaaaaagaagagttgccaaagaatcaggag

SEQ ID NO: 196140 - DNA, 201 bp, Homo sapiens
ttattgcttcttgataggtctaatagttttttatcgaatgctcattattgtgaattttatgttatttgctggatttggttgcattattttaaaggatgttrgtttttttctagtatgccactgttacttacagataagttcgatcctttcaaagcttatttttatgcagcttcagggagaatctagagtagccttaaggac

SEQ ID NO: 196141 - DNA, 201 bp, Homo sapiens
tcacactaaaattatctgcagcactgctgagagacgtgcaggatccacaggcagaattctaggcttggatagctaaaacagagaccatagtggttctggcyccttggtggctctaagtgcaaaacatgaggaagggagcacttggtaccagatggagaggttgcgggaacagagcatgactgtcagaccacagagtgaaac

SEQ ID NO: 196142 - DNA, 201 bp, Homo sapiens
gagcttaaaagatcatttgatctaagcctctcatctcttcttttctttctttcttgctggcaggcatggaggaagaggaactttccattccatctattccttttttttttttttgagacggagtttcgcttctgttgcgtaggctggagtgcaatggcctgatctggctcaccgcaacctctgcctcccaggttcaagtga

SEQ ID NO: 196143 - DNA, 201 bp, Homo sapiens
ttttttttttagctcttttttagttaccattttttcttttttttctttctttactgtctgctttttaagtcttctggtcttccctcttcccaaccctaggkgttatatactcactgtatcatgttcattcattctcttgtgtttactaatgtgttgtaattaagtctctctttcctcctggactcaaaggcaggtttatat

SEQ ID NO: 196144 - DNA, 201 bp, Homo sapiens
tcaacctgggaggcagaggttgtagtgatcagagctcgccccactgcactccagcctgggtgacagagcgagactccatctcaaaaaacaaaaaacaacamcaaaaaaaaaattagctgggcctggtggtgcatgcctgtagtcctagctacccaggagtctgaggcagagaatcacttgaactgggaggtggaggttgcc

SEQ ID NO: 196145 - DNA, 201 bp, Homo sapiens
tgccatccctatatagtcatatctctcatcctaaccactgacaacgtaactcctggccttaaagagcatatagttttataggggagataatagagatataycaacaattcagtacaaagaacaacacaagtggctgtgtgcagtggctcatgcctgcaatcccagcacttcaggaagccaaggcgggtggatcacttgaga

SEQ ID NO: 196146 - DNA, 201 bp, Homo sapiens
atggtgggaagaacagagtttttaatcttacataaaatgtactctctttgaggtctttggtttgtgacccacttttggattgccttagagtgttcttgcarctggaatgataaaggaatctcttttctctcttcttagaatattaaaggagacaggaagaagtccagatgaagtgactcatggaaccatttgtttatctga

SEQ ID NO: 196147 - DNA, 201 bp, Homo sapiens
gagcccaggaatttgaggctacagtgaactacagtgagctatcgcaccaccacacaccagcctgggtgacagggcaagacccagtctcaaaaaaagaaagaaaaaatccatgagtaaagtatagtttgtgacttgagtcaaatttatcctcactttctgaaagcattcacaatagaaatttaattatgagatgaaaattag

SEQ ID NO: 196148 - DNA, 201 bp, Homo sapiens
gacagacctcttgtctctgccctgtcgggaggactcaaggcttcacagagcaacagcaagttgaagatgattgcttgaggccaggagtttgaggctgcagygagctatgactgtgccactgcactccagtctgggcaaatagagcaagaccctgtctcaaaaaaaaatgtaattaacaagatattggctgggcacagtggt

SEQ ID NO: 196149 - DNA, 201 bp, Homo sapiens
tagcgtgcacctgtagccccagctactcagcaggctgaggcaggagaatcacttgaacccgggaggtggaggttgcagtgagctgagatcgcgccactgcmctccagcctggcaacagagcgagacttcatcccccgcctccaaaaaagaaggaagtcttgtcttatactgcaatatggtgaacattgaggaggatgtaat

SEQ ID NO: 196150 - DNA, 201 bp, Homo sapiens
gtagctcctgcctgtaatcctagcactttgggaggctgaggcaggtggattgcctgagctcaggagttcatgaccagcctgggcaacacagtgaaaccccrtctctactaaaatacaaaaaattagctgggtgtggtggtgtgtgtctgtaatcccagttaccctagagggtgaggcaggagaatcgcttgaacctgggag

SEQ ID NO: 196151 - DNA, 201 bp, Homo sapiens
ttaataattattaaatacattttctcaaaaaaattagtatagctacagaaaagtatgcttacatttcatatacattaaaatgacttttagaccaggtgtgrtggctcacgcctataatcccagcactttgggaggctgaggcgggcggattacttgaggtcaggagtttgagacaagcctggccaacatagggaaatcttg

SEQ ID NO: 196152 - DNA, 201 bp, Homo sapiens
atcctagcactttgggaggctgaggcaggtggattgcctgagctcaggagttcatgaccagcctgggcaacacagtgaaaccccatctctactaaaatacraaaaattagctgggtgtggtggtgtgtgtctgtaatcccagttaccctagagggtgaggcaggagaatcgcttgaacctgggaggcggaggttgcagtga

SEQ ID NO: 196153 - DNA, 201 bp, Homo sapiens
agacgaaaggggagaactaagcttaccagcttttaagttaacagaaatagtattttaatgacccatggtgagcaaatgtgaagaaaaaggtttttagtttwgttttgtttttacctttaatatctactacgttcttaagaaagcaaacaattttgtccctataatcagcatactttttagaagaaaaaccttttgtttttt

SEQ ID NO: 196154 - DNA, 201 bp, Homo sapiens
ggaggccaaggcaggcggatcacaaggtcaggagattgagaccatcctggcttacacagtgaaacactgtctctactaaaaaaaatacaaaaaaattagcygggcttggtggcaggcacctgtagtcccagctactcgggaggctgaagcaggagaatggcgtgaacccgggaggtggagcttgcagtgagctgagattgc

SEQ ID NO: 196155 - DNA, 201 bp, Homo sapiens
ctgtctctactaaaaaaaatacaaaaaaattagccgggcttggtggcaggcacctgtagtcccagctactcgggaggctgaagcaggagaatggcgtgaayccgggaggtggagcttgcagtgagctgagattgcgccactgtactccagcctgggcgacagagcaagactctgtctcaaaaaaaaaaaaaaaattcttat

SEQ ID NO: 196156 - DNA, 201 bp, Homo sapiens
agcctcccaaagtgctgggattacaggtgatctgcgcccagctgatctgttgtaattttaatagcatcttgtaggatggcagctgatacagggtccgcttrtatatttctgcccttgaggttagtcctgtatattatgatattctcttgttttcaagcagcacatctgtgaacattctcggcaatctgtctgttagtgtca

SEQ ID NO: 196157 - DNA, 201 bp, Homo sapiens
agccagaccctgtctccaaaataaaacaaacaaaaaaatataggaatgtgtgagattgcttgaggcgagagtgtggagagagaaggggctgcaaagcaagycctgggatgtgcagcgtatataggctgaatgtaggagggggagctggcaagctcattgttatgtggcagtggccaggaggagggagggagtgccatccgc

SEQ ID NO: 196158 - DNA, 201 bp, Homo sapiens
tgaagcaggagaatggcgtgaacccgggaggtggagcttgcagtgagctgagattgcgccactgtactccagcctgggcgacagagcaagactctgtctcaaaaaaaaaaaaaaaattcttattgttcttattataaaagtcaattatgctttgaaactgataaggtggtactttgaaaccggtgactgggctgggtgcgg

SEQ ID NO: 196159 - DNA, 201 bp, Homo sapiens
gacagcgcgcgcctgaggccgcaggccccggacgccgtctgctgggtcctcgccggaggctgttccaagcctgagtggctgcgtctgccgaggacgttggygaccctggtctctgaggtgccgggagtagggaataaaagagtaaagcattgtcccgggccagctctccgcggagcgtaggggaagttagagcttggagga

SEQ ID NO: 196160 - DNA, 201 bp, Homo sapiens
tggctgcgtctgccgaggacgttggtgaccctggtctctgaggtgccgggagtagggaataaaagagtaaagcattgtcccgggccagctctccgcggagsgtaggggaagttagagcttggaggaggtcaaatcacttaacgtcttggagttgaaatttaaagccggccgtggatctaaaagtacttagagttatcagca

SEQ ID NO: 196161 - DNA, 201 bp, Homo sapiens
atcacttaacgtcttggagttgaaatttaaagccggccgtggatctaaaagtacttagagttatcagcactaagttcaggcgtggggctcttgtttaaacttttttttttttctaacttcagtggattggacgtttggttgtccaaattcatcaccttgatatttgcatgtgctgttttccacattcaaacagcaaagcct

SEQ ID NO: 196162 - DNA, 201 bp, Homo sapiens
tattattattgttgttgtttatttatttatatttttgagacggagttttgctctcgttgccccggctgaagtgcaacggcacgatcttgtctcactgcaacctccgcctcccgggttcaagtaattctcctgcctcatcctcccaagtagctgggattacaggcatgcaccaccacacccggctaatttttgtatttttag

SEQ ID NO: 196163 - DNA, 201 bp, Homo sapiens
ggaggctgaggcaggcggatcatgagatcaggagttggagaccagcctgaccaacacggtgaaaccccatttctactaaaaatacaaaagttagccggggygtggtggtgcacacatgtaatcccagctactcaggagactgaggcagattctcaaggagaatcgcttgaacctgggaggcggaggttgcagtcagccaag

SEQ ID NO: 196164 - DNA, 201 bp, Homo sapiens
tgtaaggctgacaacagaacttgtgtgtacattctgtgatgtatgtctagcattatatgtatatatatgtatatatatgtatttttttaagactgggtctcacactgtcaccaaggctaagctcttttgctttttatggccttacacataatgcttattatttgatatttttctaaataacatatttgtttttaagaagaa

SEQ ID NO: 196165 - DNA, 201 bp, Homo sapiens
gaaattacatgtgggctggacgcagtggttcacgcctgtaatcccagcacttaacgaggctgagggcgcggatcacctgaggtcaagaattcgagaccgayctggccaacgtgacaagaccccatctgtgctaaaaataaataccaaaaacgtagccgggcatgttggtgtgcacctgtaatcccagctactcaggaggct

SEQ ID NO: 196166 - DNA, 201 bp, Homo sapiens
gtaaggctgacaacagaacttgtgtgtacattctgtgatgtatgtctagcattatatgtatatatatgtatatatatgtatttttttaagactgggtctcacactgtcaccaaggctaagctcttttgctttttatggccttacacataatgcttattatttgatatttttctaaataacatatttgtttttaagaagaaa

SEQ ID NO: 196167 - DNA, 201 bp, Homo sapiens
aggagaatcacttgaacccgggaggtggaggttgcagtgagctgagatcgcgccactgcactccagcctggcaacagagcgagacttcatcccccgcctcyaaaaaagaaggaagtcttgtcttatactgcaatatggtgaacattgaggaggatgtaatgctaagtgaaataagaggacaaatagtgtatcattctcctt

SEQ ID NO: 196168 - DNA, 201 bp, Homo sapiens
aaattaaaaagtaaagttttggctgggtgtggtggctcatgcctgtaatcccagctttttgggaagtcaaggcaggtgggtgacctgaggtcaggagtttragaccagcttggccaacatggtgaaaccccatctcttactaaaaatataaaaaattagccaggcatggtggcgggcgccggtaatcccagctactcagga

SEQ ID NO: 196169 - DNA, 201 bp, Homo sapiens
caggtgtgatgccacatgcctgaggtcccaggtatttgagaggctgagtaagagaattgcttaagcccagaagatggagtttgcagtgagccaagattgcrccactgcactccagcctgggcaacagagtgagaccctgtctcaaaaaaaaaaaaaaaaaaaagtccgggcatgttggctcacacctgtaatctcaacaca

SEQ ID NO: 196170 - DNA, 201 bp, Homo sapiens
gatgccacatgcctgaggtcccaggtatttgagaggctgagtaagagaattgcttaagcccagaagatggagtttgcagtgagccaagattgcaccactgyactccagcctgggcaacagagtgagaccctgtctcaaaaaaaaaaaaaaaaaaaagtccgggcatgttggctcacacctgtaatctcaacacattgggag

SEQ ID NO: 196171 - DNA, 201 bp, Homo sapiens
gtcccaggtatttgagaggctgagtaagagaattgcttaagcccagaagatggagtttgcagtgagccaagattgcaccactgcactccagcctgggcaasagagtgagaccctgtctcaaaaaaaaaaaaaaaaaaaagtccgggcatgttggctcacacctgtaatctcaacacattgggaggctgaggtgggcagatc

SEQ ID NO: 196172 - DNA, 201 bp, Homo sapiens
ccagcactttgggaggccaaggttggaggattgcttgagccaggaagcttgagaccagcctgaacaacatagtgagaccctgtctctattaaattaaaaastaaagttttggctgggtgtggtggctcatgcctgtaatcccagctttttgggaagtcaaggcaggtgggtgacctgaggtcaggagtttgagaccagctt

SEQ ID NO: 196173 - DNA, 201 bp, Homo sapiens
ctgagtaagagaattgcttaagcccagaagatggagtttgcagtgagccaagattgcaccactgcactccagcctgggcaacagagtgagaccctgtctcaaaaaaaaaaaaaaaaaaaagtccgggcatgttggctcacacctgtaatctcaacacattgggaggctgaggtgggcagatcacctgaagttaggagttcg

SEQ ID NO: 196174 - DNA, 201 bp, Homo sapiens
attattattgttgttgtttatttatttatatttttgagacggagttttgctctcgttgccccggctgaagtgcaacggcacgatcttgtctcactgcaacctccgcctcccgggttcaagtaattctcctgcctcatcctcccaagtagctgggattacaggcatgcaccaccacacccggctaatttttgtatttttagt

SEQ ID NO: 196175 - DNA, 201 bp, Homo sapiens
ttattattgttgttgtttatttatttatatttttgagacggagttttgctctcgttgccccggctgaagtgcaacggcacgatcttgtctcactgcaacctccgcctcccgggttcaagtaattctcctgcctcatcctcccaagtagctgggattacaggcatgcaccaccacacccggctaatttttgtatttttagta

SEQ ID NO: 196176 - DNA, 201 bp, Homo sapiens
aattctcctgcctcatcctcccaagtagctgggattacaggcatgcaccaccacacccggctaatttttgtatttttagtagagacggggtttcaccatgwtggtcaggctgatctcgaactcctgacctcaggtgatccacctgccgcggcctcccaaagtgcagggattacagtcgtgagtcaccaggcgcggcctgat

SEQ ID NO: 196177 - DNA, 201 bp, Homo sapiens
caagtagctgggattacaggcatgcaccaccacacccggctaatttttgtatttttagtagagacggggtttcaccatgttggtcaggctgatctcgaacycctgacctcaggtgatccacctgccgcggcctcccaaagtgcagggattacagtcgtgagtcaccaggcgcggcctgatctttttaaaaagatgagtctg

SEQ ID NO: 196178 - DNA, 201 bp, Homo sapiens
tcttcttgctccttcctgaaggccagcttgttctctgctcctgttacctctgcctgctggtactgcttgtgttgtctgcctctgtcttgaacattactttyctccctttccatcttccttatttcttctgtgttcttttctactattccccgtctctcattcttctgtctttggaaccaacagaatgttttttggtgatgt

SEQ ID NO: 196179 - DNA, 201 bp, Homo sapiens
caactgggacctgttgattaccctattatagtattctgtaggaacatcaatgttactgaaatgggcttatatgtaagtatcagaagatttcatgagcacayttttttcactcaaaggaatttttggaatttcgtaaggcaagaagtgacatgcttctctccaggaagaatcagctcctgttggagttcagtttctggaatg

SEQ ID NO: 196180 - DNA, 201 bp, Homo sapiens
accacggctcactgcagccttgaccttccggacttaagggatcttcccacctcagcctcccaagtagctgggactacaggcccacaccaccatgcccagctattatttatttatttatttatttatttatttatttgagacagagtgtcactctgttgcccaggctggagttcagtggcgtgatctcggctccctgcaacc

SEQ ID NO: 196181 - DNA, 201 bp, Homo sapiens
ccacggctcactgcagccttgaccttccggacttaagggatcttcccacctcagcctcccaagtagctgggactacaggcccacaccaccatgcccagctattatttatttatttatttatttatttatttatttgagacagagtgtcactctgttgcccaggctggagttcagtggcgtgatctcggctccctgcaacct

SEQ ID NO: 196182 - DNA, 201 bp, Homo sapiens
cacggctcactgcagccttgaccttccggacttaagggatcttcccacctcagcctcccaagtagctgggactacaggcccacaccaccatgcccagctattatttatttatttatttatttatttatttatttgagacagagtgtcactctgttgcccaggctggagttcagtggcgtgatctcggctccctgcaacctc

SEQ ID NO: 196183 - DNA, 201 bp, Homo sapiens
ggctcactgcagccttgaccttccggacttaagggatcttcccacctcagcctcccaagtagctgggactacaggcccacaccaccatgcccagctattatttatttatttatttatttatttatttatttgagacagagtgtcactctgttgcccaggctggagttcagtggcgtgatctcggctccctgcaacctccac

SEQ ID NO: 196184 - DNA, 201 bp, Homo sapiens
ccacctcagcctcccaagtagctgggactacaggcccacaccaccatgcccagctattatttatttatttatttatttatttatttatttgagacagagtstcactctgttgcccaggctggagttcagtggcgtgatctcggctccctgcaacctccacctcctgggttcaagcagttctcctgtctcagctacctgaac

SEQ ID NO: 196185 - DNA, 201 bp, Homo sapiens
tttttctaacttcagtggattggacgtttggttgtccaaattcatcaccttgatatttgcatgtgctgttttccacattcaaacagcaaagcctatcctgmcttacccagagttgctttctcgtattcattgctttgggtagtttaaattacctaaggaactgtgtgttaaactcgccatgggccagggaggtttcagtaa

SEQ ID NO: 196186 - DNA, 201 bp, Homo sapiens
atcctcccaccacggcctcccaaagtgctggcattacagggatgaatcaccacacccggctgctaatttttaatttttttgtagagaggggggtcttgctrtgttccccaggctagtctcaaactcctggcctcaagcagtcctcccaccctccgcctcccaaagttctaggattataggtgtgagccattgtgcccagcc

SEQ ID NO: 196187 - DNA, 201 bp, Homo sapiens; identical to SEQ ID NO: 33613

SEQ ID NO: 196188 - DNA, 201 bp, Homo sapiens; identical to SEQ ID NO: 33615

SEQ ID NO: 196189 - DNA, 201 bp, Homo sapiens
tatactgattgaacaactcttctagatagttggggtatcagaaacctaagcttctgatcagcagggtgttggaatacaacataattcagctaaaaggttarctccacatgccgttttatcatgatgttctaaggtcagttgttagaacacagagtaggtggtctttttcctgttactgatcaggtgctgtccacctggtca

SEQ ID NO: 196190 - DNA, 201 bp, Homo sapiens
tgaggtgggaggatcacttgagcctaggaggtcaaggccgtggtgaaacatcatcgtgccattgcgctccaggctggttgacagagtgaccttgtctcagaaaaaaaaaaaaaaaagactgaaagtttgcttttcccacgtggcctaatataattttgctcagaatttccccagcccagtatattacacacctgaagtagt

SEQ ID NO: 196191 - DNA, 201 bp, Homo sapiens
agtttgataaaccattagtcttcattttaaacagcctgccctgagtatggtgaaggtttagtctaccgattctcgttagcgtatctaattcagtgtcttamacaaacatcatctcattcttacagggctcgtgcaatccgcttcagacaggatggtaacgaagccgtcggaggattcttctctcagattgggcagctgtac

SEQ ID NO: 196192 - DNA, 201 bp, Homo sapiens
tgggaggctgaggtgggcagatcacctgaagttaggagttcgagaccagcctcgctaacatggcaaaaccccatctctactgaaaatataaagattagccragcgtggtggtgcactcctgtaatcccagctacttgggaggctgaggcaggagaattgcttgaacccaggaggcagaggttgcagtgagctgagatcaca

SEQ ID NO: 196193 - DNA, 201 bp, Homo sapiens
atgaaaggtgtgggaacaggtctctggagcagcagtgtggaagacggggtactggggctggatggagtgtggtggtggggaggggagtcagggagctgctkctttaaggcaggagtcttcttggcatgggtctgtcaacctcttctctcccccgggtctgtgcttccaaatgctggtgctgtttgcacacttgtgtctttg

SEQ ID NO: 196194 - DNA, 201 bp, Homo sapiens
ctgggcactgcctccaatgcagggttgtctattcctgctcatgtcatgcgacgaaaaggaaatgttggacatacatttccctagcagaatccctctttccytgtcctcgattttcattgatcccatgttatttctgaacattcatgagtcacgcatcagatacatttaatatcagatcctaatttaaaaagtaaatgctac

SEQ ID NO: 196195 - DNA, 201 bp, Homo sapiens
gtggctcacacctgttatcccagcactttgggaggccaaggtgggaagatcacttgaggtcaggagattgagaccagcctgaccaacttggtgaaaccctrtctctactaaaaatacaaaaattagccacgtatggcggtgtgcacctgtagttccagctactcaggaggctgaggcaggagaatcacttgaacctgggag

SEQ ID NO: 196196 - DNA, 201 bp, Homo sapiens
gagattgagaccagcctgaccaacttggtgaaaccctgtctctactaaaaatacaaaaattagccacgtatggcggtgtgcacctgtagttccagctactyaggaggctgaggcaggagaatcacttgaacctgggagacagaggttgtagtgagccaagatcaccccattgcactatagcctgggtgacagcagactgtt

SEQ ID NO: 196197 - DNA, 201 bp, Homo sapiens
cctctgttctccaggatccaagtcccttccgctgattctcctatgatttgcgatctaaacctgcttacagaatttgtaaactttaagacgaaaggggagarctaagcttaccagcttttaagttaacagaaatagtattttaatgacccatggtgagcaaatgtgaagaaaaaggtttttagtttagttttgtttttacct

SEQ ID NO: 196198 - DNA, 201 bp, Homo sapiens
atagataaataattcttacaactcaataataagaatacagataactcaattaaaaaatgggtaaagaatttgaaaagacagcagctgggtgtggtggctcwcacccgtaatcctagcactttgggaggccaaggcaggaggatcgcttgatgctaggagttggtgaccagcctgggcaacatggtgaaaccctgtctctat

SEQ ID NO: 196199 - DNA, 201 bp, Homo sapiens
acagagcaagactctgtctcaaaaaaaaaaaaaaaattcttattgttcttattataaaagtcaattatgctttgaaactgataaggtggtactttgaaacyggtgactgggctgggtgcggtaactcatgcttgtaatcccagcactttgggaggccaaggcaggcatatcagttgaggccaggagtttgagaccagcgtg

SEQ ID NO: 196200 - DNA, 201 bp, Homo sapiens
ctgggcgtggtagcgtgcacctgtagccccagctactcagcaggctgaggcaggagaatcacttgaacccgggaggtggaggttgcagtgagctgagatcrcgccactgcactccagcctggcaacagagcgagacttcatcccccgcctccaaaaaagaaggaagtcttgtcttatactgcaatatggtgaacattgagg

SEQ ID NO: 196201 - DNA, 201 bp, Homo sapiens; identical to SEQ ID NO: 33616

SEQ ID NO: 196202 - DNA, 201 bp, Homo sapiens
tgggagcattgcttgaggccaggagtttgagaacaacttgggcaacatagcaagaccccatctctacaaaaaatttaaaaaaattaaccatgcaagatgaygtatgcctctagtcccagcttctcaggaggctgaggtgggacgatcacttgagcccaggaatttgaggctacagtgaactacagtgagctatcgcaccac

SEQ ID NO: 196203 - DNA, 201 bp, Homo sapiens
ggccaggtgcagtggctcacagctactttgggaggctaaggtgggcagatcacctgagatcaggagtttgagaccagcctgggcaacatggtgaaaccccrtctctacaaaaaatacaaaaattaaccaggtgtggtagcacatgcctgtaatctcagctgcttgggaggctgaggcacgagaatcacttgaacctggaag

SEQ ID NO: 196204 - DNA, 201 bp, Homo sapiens
ttcagaaggctacccttctgtatgattccatacatacgatgttctagaaaaggcaaaactgagggacaaggaacacagcagtggttgctagagatggggaraggggttgattataaaaggattaacttcaaggggtgaagaagctgttgtgatgctggttacattactttaggcatttgtcaaaactcagtactgtctgcc

SEQ ID NO: 196205 - DNA, 201 bp, Homo sapiens
tcgcttgaacccaggaggtggaggttgcagtgagccaaggtcacgcctctgcactccagcctgggtgacagagcaagactccatctcaaaaaaaagaaaaraaaaattacatatgacccagcaatttcattcctgggtgtctacccaaaagataccatccatataaacacttatatatatgtgtataagtgtttcttatac

SEQ ID NO: 196206 - DNA, 201 bp, Homo sapiens
tacaggcaccagccatcacacccggctaattttttgtgtgttttttagtagagacggggtttcactgtgttagccaggatggcctcgatctcctgacctcrtgatccgcctgcctcggcctcccgaagtgctgggattacaggcatgagccaccgtgcctagcctgttttttgtttttagggggagatgtgtgtgtttatt

SEQ ID NO: 196207 - DNA, 201 bp, Homo sapiens
aagagaacttgtacctttttgcctttttttttaacttcaacttatatcttttcttttttctttttcttttttttttttttgagacggagtcttgctctgtygcccaggctggagtgcagtggcgcagtctcggctcactccaatctctgcctcctgggttcaagcgattagcctgcctcagcctcccaagtagttgggatt

SEQ ID NO: 196208 - DNA, 201 bp, Homo sapiens
tgacttcaagtgatctgcctgcctcagcatcccaaagtgctgggattacaggtgtgagccaccgcgctcggccccagtttttctcttttttcggttatgaratttcctgctgtgcatgaaataatttctaagatcccttctgtctccaacaaatagttctgtgatctttatttctaatgaacctttcctccttagatcatc

SEQ ID NO: 196209 - DNA, 201 bp, Homo sapiens
tcctgggttcaagcagttctcctgtctcagctacctgaacagctgggacttacaggcgtgcaccaccacgcctggataatttttgtatttttagtagagayggggtttctccatgttgcccaggctggtctcaaactcctggcctcaagtgatcctcccaccacggcctcccaaagtgctggcattacagggatgaatcac

SEQ ID NO: 196210 - DNA, 201 bp, Homo sapiens
ctttcttttttttttttttttcctgagacagagtctcgctctgtcacccaggccggagtgcagtggggtgatctcggctcgctgcaacctctgcctcccgrgttcaagtgattctcctgtctcagcctcccgattagctgggactacaggcgtgcgccaccacaaccagctaatttttttgtatttttaatagagatgggg

SEQ ID NO: 196211 - DNA, 201 bp, Homo sapiens
aattgctcgagcgcaggaggtggaggctgaagtgagccgagatcgcgccactgccctccagctgacatgagagaacaaggccctgtctgaaaaaaaaaagaaaaaaagaaattaaaaagcaaatatatatagagaaaaacttttaatggtaaaatgttcatttttaaaatctagatgcagggcagaaaagtcttgtcatgt

SEQ ID NO: 196212 - DNA, 201 bp, Homo sapiens
ggggaggggagtcagggagctgctgctttaaggcaggagtcttcttggcatgggtctgtcaacctcttctctcccccgggtctgtgcttccaaatgctggbgctgtttgcacacttgtgtctttggccttcactggttctgcttagaatctcccttccatgggtatctacctgaccatctgctcctcttctttccagtctt

SEQ ID NO: 196213 - DNA, 201 bp, Homo sapiens
ggaggctgaggcaggagaatggcgtgaacccgggaggcggaacttgcagtgagccgagatcccaccactgcactccagcctgggcgacggagcgagactcwgtctcaaaaaaaaaaaaaaaaaaaagatcatatgaatgaagcacggtgtgctcctgctgcctcatcctgtggtctcagcgttaagtcctttcccttcttc

SEQ ID NO: 196214 - DNA, 201 bp, Homo sapiens
aaccccagaccatctagtgagtatttattgagtgccttctgcatacctggtgctgctgggcatggcagccagggtgcccaggaagcatgttcctggccttygttgctgcagccatataccacgctcctgccaggctgcttttgacacttagatttttttttttttttttgaaacggagtcttgcactcttgcccaggctgg

SEQ ID NO: 196215 - DNA, 201 bp, Homo sapiens
taactccacatgccgttttatcatgatgttctaaggtcagttgttagaacacagagtaggtggtctttttcctgttactgatcaggtgctgtccacctggycaaattttgctggttgtttaattagtgttgctgtttcttctctttaagtcaagaggtgttgccaaagattcacgaagataaacactacccttgtactttg

SEQ ID NO: 196216 - DNA, 201 bp, Homo sapiens
ctgctgggcatggcagccagggtgcccaggaagcatgttcctggcctttgttgctgcagccatataccacgctcctgccaggctgcttttgacacttagatttttttttttttttttgaaacggagtcttgcactcttgcccaggctggagagcagtggcgtgatcttggctcactgcaacgtccgcctcccaggttcaag

SEQ ID NO: 196217 - DNA, 201 bp, Homo sapiens
ttgcccaggctggagagcagtggcgtgatcttggctcactgcaacgtccgcctcccaggttcaagtgattctcctgcctcagcctcccgagtagctgggaytacaggcgtccaccaccacacctggccatttttttggtattttttagtagagacagggtttggccatgttgcccaggctggtcttgaattcctgacccca

SEQ ID NO: 196218 - DNA, 201 bp, Homo sapiens
gcctggctaacatggcaaaaccctgtttctactaaaaatacaaaaattagccgtgcacggtggcacaccatgtagtcccagctactcaggaggctgaggcrggagaatcgcttgaacctgggaggtggaggttgcagtcagctgaaatggtgccactgcactccagcctggcaacagagcgagattctctcaaaaaagtgt

SEQ ID NO: 196219 - DNA, 201 bp, Homo sapiens
gagacggggtttcaccatgttggtcaggctgatctcgaactcctgacctcaggtgatccacctgccgcggcctcccaaagtgcagggattacagtcgtgartcaccaggcgcggcctgatctttttaaaaagatgagtctgacttgggagagggggcagaattaagggtagtggccagctgagtggaccctggcactgaga

SEQ ID NO: 196220 - DNA, 201 bp, Homo sapiens
gccagaagctcaagaccagcgtggacaacatgatgaaaccctgtctctactaaaactacaacatttagcagggtaactacaacatttagcagggtgtggtsgtgcagggctgtagtcccagctatacaggtggctgaagcaaggtaattgctcgagcgcaggaggtggaggctgaagtgagccgagatcgcgccactgccc

SEQ ID NO: 196221 - DNA, 201 bp, Homo sapiens; identical to SEQ ID NO: 33614

SEQ ID NO: 196222 - DNA, 201 bp, Homo sapiens
aaaaaaaaaaaaaaaaaaaaaaaaaaacttgccaggcgtggtggtggcacatgcctgtagtctcagctattcaggaggctgaggtgggaggattgcttgascctggggaggtggagactgcagtgagccatgatcatgccactgcactcccagtgagaccctgtctcacaaaaataaaaaataaattgaaaatggaattag

SEQ ID NO: 196223 - DNA, 201 bp, Homo sapiens
ctggggatattttaatagggagtggatattagatatgatggaataattgtttttctcagatgtgatgatagcattgtagttctgtcattgtgttttggagrtacatgctgaaggatttacgggagaagtatcattatgtccaaactctactttcttttttttttttttttcctgagacagagtctcgctctgtcacccagg

SEQ ID NO: 196224 - DNA, 201 bp, Homo sapiens
gtggctcacacctgtaatccaagcacttagggaggctggggtggacagatcacttgaggtcaggagttcaagaccagcctggccaatgtggtgaaatcccrtctctactaaaaatacaaaaattagccaggcgtggtggtgcacacctgtaatcccagctacacaggaagctgaggcaggagaatagcttaaacctgggag

SEQ ID NO: 196225 - DNA, 201 bp, Homo sapiens
acaccgcacccagcccttaccacttgttaaaagcctttttagaaccactttgctctcctccaaactagccattgatagaaccgtcttttattttcacaacygcctgtgaaagaccctttttgcagttccccatcataattttgctttagtttgggatctttaggatggagggcatccctccagtgattaggagacacccaa

SEQ ID NO: 196226 - DNA, 201 bp, Homo sapiens
gaggctggggtggacagatcacttgaggtcaggagttcaagaccagcctggccaatgtggtgaaatcccatctctactaaaaatacaaaaattagccaggygtggtggtgcacacctgtaatcccagctacacaggaagctgaggcaggagaatagcttaaacctgggaggcagaggttgcagtgagccgagatcccgcca

SEQ ID NO: 196227 - DNA, 201 bp, Homo sapiens
ccattttaaccattttaagcatacagttcagtggcattaagtagattcacattttggggaaacatcactaccattcatcttgagaatttcttcatcttccyaaactgaaactccttaccccaacctcccctttcctcacctcctggcaacctccgttctgctttctgtctctgtgggtttatctactctaggtatccatgt

SEQ ID NO: 196228 - DNA, 201 bp, Homo sapiens
gtagttcagagagcaggggtgtttctcaggatttcagagtcatcagctgctttgaaggtgtgcttccttcacctgtgttttaacgccctgccccaggggtkgtccctgtctcccttgggtacagtgccctgtggcaccttgggtgctctagttccaggtttgcctcgcttcccctctgagggtgttctggagaagcagtgc

SEQ ID NO: 196229 - DNA, 201 bp, Homo sapiens
agcatggtggcgggtgcctgtaatcccagctactcaggaggttgaggcaggaggatggctcgaacccaggaggtggaggttgcagtgagctgagattgtgycactgcactccagcctgggtgacagaatgagactccgtctcaaataataataaagtaaataaaataacttttgatttgccttagataacttgataccagt

SEQ ID NO: 196230 - DNA, 201 bp, Homo sapiens
agtggttcacgcctataatcccagcactttgggaggccgaggcaggtggatcatctgaggtcaggagttaagagaccagcctgaccaacatggtgaaaccycatctgtactaaaaatacagaaaattaggcatggaggcgcatgcctgtaatcccaggtacacaagatgctgaggcagaagaatcgattgaactcaagagg

SEQ ID NO: 196231 - DNA, 201 bp, Homo sapiens
aatgtaacccagtggcattggtagaggtaatcagtaccagccatgttgcatggcaagtatatttcaggccgggcgcagtggctcacgcctgtaatcccagmactttgggaggctgaggtgggcagatcacctgaggtcgggagttcgagaccagcctgacgaacatgatgaaacctgtctccatttgagagactgaggcag

SEQ ID NO: 196232 - DNA, 201 bp, Homo sapiens
cctccgcctcccggtttcaagcgattctcccgcctcagcctcctgagtagctgggattacaggcaggcgccaccacacccagctaagttttgtatttttamtagagacagggtttcaccctgttggccaggatggtctcgatttcctgacctcgtgatccacctgcctcagcctcccaaagtgctgggattacaggtgatc

SEQ ID NO: 196233 - DNA, 201 bp, Homo sapiens
ggagggagggagtgccatccgctgccaaagtgttaggtaaaatgacagaagaaaacaggatttgctgaatcagtttcagcaagggagaagggcgtcctccygggagcctcatccctgcctgtacattagccagcgtatttcacttagtgctgctcagcagcaagcttggaattcccagccgcttcctggacattgcataag

SEQ ID NO: 196234 - DNA, 201 bp, Homo sapiens
ggagtttaatggcatgaccacggctcactgcagccttgaccttccggacttaagggatcttcccacctcagcctcccaagtagctgggactacaggcccayaccaccatgcccagctattatttatttatttatttatttatttatttatttgagacagagtgtcactctgttgcccaggctggagttcagtggcgtgatc

SEQ ID NO: 196235 - DNA, 201 bp, Homo sapiens
tttggttcttttagatataaatgaaatatcatcaaagaatagctcaaagtgacttatgcaacttgaatgtatattttttccttagggtgtttatcccaaaytatttgggcatttgctgcaattcgcagtttttttaaaaaaaacaccaaaatagttatttttcaagttagagatgttttaattaaaacatcttgtttttgg

SEQ ID NO: 196236 - DNA, 201 bp, Homo sapiens
gcgtgatgtttccaaggtccatccacatgtagtaggcaccaatatttccattgtatggatacagcacattttgtttgttcattcatcaaccaaatggccakcttggttgttgctaccttttggttattatatatattacatgattccatttatgtgaaaggcccagaataggcaaatctatagaggcagaaagcaggtaag

SEQ ID NO: 196237 - DNA, 201 bp, Homo sapiens
caccttggaatctcctggggagatgagacaataccaaggctctctctcacttagcgtgatgtttccaaggtccatccacatgtagtaggcaccaatatttycattgtatggatacagcacattttgtttgttcattcatcaaccaaatggccatcttggttgttgctaccttttggttattatatatattacatgattcca

SEQ ID NO: 196238 - DNA, 201 bp, Homo sapiens
gcccctggctgccttatttcatctgcacccaatcgtatccattgcttgtcagtgggtctcaaccttggctgcaccttggaatctcctggggagatgagacrataccaaggctctctctcacttagcgtgatgtttccaaggtccatccacatgtagtaggcaccaatatttccattgtatggatacagcacattttgtttg

SEQ ID NO: 196239 - DNA, 201 bp, Homo sapiens
tcttcattagaaaagtaaaaatgctggagaaccctggatttgaaaggcatggagcttcgtggtgaaggtagtagttctggaaaacccactagggacgagayacatgctaaagttgaatgagctgatggatatgaaccaccagtccaagaatctgtttaaagttcagacttaaaacagtagcaaataagaagtcctatttgt

SEQ ID NO: 196240 - DNA, 201 bp, Homo sapiens
caatgagacgtccctcctgcccctggctgccttatttcatctgcacccaatcgtatccattgcttgtcagtgggtctcaaccttggctgcaccttggaatytcctggggagatgagacaataccaaggctctctctcacttagcgtgatgtttccaaggtccatccacatgtagtaggcaccaatatttccattgtatgga

SEQ ID NO: 196241 - DNA, 201 bp, Homo sapiens
gataaaatcggtcacgctgtgttgggattggggttgctgttatcatccctcatccccacccctgctaggcatccacaaacagtcatcttcaatgagacgtycctcctgcccctggctgccttatttcatctgcacccaatcgtatccattgcttgtcagtgggtctcaaccttggctgcaccttggaatctcctggggaga

SEQ ID NO: 196242 - DNA, 201 bp, Homo sapiens
aaggtgactgtaaggtccaggctgagcaggaaggtaaagcaagaaggaaacatgaggttgtgaagagaagtttagagggatgaggaggcaggagaggtgarcagttgcatgatgtagctagagtggcgatgttagatcttggggccagagatctttacaatgattatgaagatcaaagggcattagaatcaagctataaag

SEQ ID NO: 196243 - DNA, 201 bp, Homo sapiens
atcatccctcatccccacccctgctaggcatccacaaacagtcatcttcaatgagacgtccctcctgcccctggctgccttatttcatctgcacccaatcdtatccattgcttgtcagtgggtctcaaccttggctgcaccttggaatctcctggggagatgagacaataccaaggctctctctcacttagcgtgatgttt

SEQ ID NO: 196244 - DNA, 201 bp, Homo sapiens
ttatcatccctcatccccacccctgctaggcatccacaaacagtcatcttcaatgagacgtccctcctgcccctggctgccttatttcatctgcacccaaycgtatccattgcttgtcagtgggtctcaaccttggctgcaccttggaatctcctggggagatgagacaataccaaggctctctctcacttagcgtgatgt

SEQ ID NO: 196245 - DNA, 201 bp, Homo sapiens
tgttatcatccctcatccccacccctgctaggcatccacaaacagtcatcttcaatgagacgtccctcctgcccctggctgccttatttcatctgcacccratcgtatccattgcttgtcagtgggtctcaaccttggctgcaccttggaatctcctggggagatgagacaataccaaggctctctctcacttagcgtgat

SEQ ID NO: 196246 - DNA, 201 bp, Homo sapiens
gcagaggtgtcctgtgtccaaaccccatgaggcgtatcagctggctgaagataaaatcggtcacgctgtgttgggattggggttgctgttatcatccctcmtccccacccctgctaggcatccacaaacagtcatcttcaatgagacgtccctcctgcccctggctgccttatttcatctgcacccaatcgtatccattgc

SEQ ID NO: 196247 - DNA, 201 bp, Homo sapiens
tgcaccagtgttactataatagtttggcctaaacccatttctggcctgcggctgcaggaggttgactcccagcttgcttccatttgaaagatcccagcaamaagcacacttggcatttccagccaaacccactttgtgcagcgaaggaaaagttgaggagtgcctctgttgttttcccccaaatcatttggcagaaatgtg

SEQ ID NO: 196248 - DNA, 201 bp, Homo sapiens
gttacttgaggtccctttgtgaagaggaatgtttgtgtttatgatgaagatgtctagactttcaaaggccatttgcagtattttttttaacagccaacaaytcctccttccctatgccctagacatatgaattttttttttttgccctaatttatcacagaggaatgaatgtttatttgctttaatgagaaatgcagaatg

SEQ ID NO: 196249 - DNA, 201 bp, Homo sapiens
agcatcaaaaagaataaaatacttagaaataaatttaagaagtgtaaaacttgtactctgaaaactataaaatgttgttgaaagaaatgagaggagatctraataaatggaaaagtatcccatgatcatgatttgaaggcttaacattgttaagatggcagtcctccctaaactgatttacagatttaacttgatccctat

SEQ ID NO: 196250 - DNA, 201 bp, Homo sapiens
ttgttataaagccaggatatctgatatcaaattaaattgttttttttttccctttagattttcttcaatcacatctgaataaatcacttgaaggtaacctrgatgtaatatagtgaaatgcttgaaagagctgcgtatcttttacacttacagcagtatgattttctgttgtacccattatatggtacctgcagctagttc

SEQ ID NO: 196251 - DNA, 201 bp, Homo sapiens
atgcttgaaagagctgcgtatcttttacacttacagcagtatgattttctgttgtacccattatatggtacctgcagctagttcagataaagagggcattwaactgtcaagggaacctgagaggagactctagtaatctggaaagtctgttggatctttgagggattttgggatggtgagagtggggctaggatctctggc

SEQ ID NO: 196252 - DNA, 201 bp, Homo sapiens
gctttggctaggtgctaagctgctgtagccggttgaatgtagaggtcactatcttttccgaatacctgtaagtaaattaaatcattctctactcccatgtrcctgccaacctaatgggaaatcgctatagaaaagatggtttaaattttagtctttgaagtggtttatgcacgtttccggaatcaagatttaatgcagagt

SEQ ID NO: 196253 - DNA, 201 bp, Homo sapiens
ccaacctaatgggaaatcgctatagaaaagatggtttaaattttagtctttgaagtggtttatgcacgtttccggaatcaagatttaatgcagagttggaytggatattgaatatttttgatttgtctgcttttctctccatagaaagcttatagcttcattgcaccatgtgtggcatttgggcgctgtttggcagtgatg

SEQ ID NO: 196254 - DNA, 201 bp, Homo sapiens
ccaggaggcagatgttgcagtgagctgagatcacatcgctgcattccagcctgggagacagagcgagattccatgtcaaaaaaaaagatgactgagatacagactccctcagagttgactctaacacaaattaggtaagagcccaaggtctggctgggccagcaccttgatcggcctcatcctgcagcgtctactagaatg

SEQ ID NO: 196255 - DNA, 201 bp, Homo sapiens
ttccgtgatgattagtgatgttgaatattttttcataaacttggtgatttgtatattttcttttgagaaatgtctgtttattttttgatagtttcttttgytgtgcagaagctctttcatttaattagatcccatttgtcaatttttgcttttgtggcaattgcgtttggcatcttcaccatgaactctttgcccatcact

SEQ ID NO: 196256 - DNA, 201 bp, Homo sapiens
ggcctcccaaagtgctgggattacaggcgtgagccaccgcgcccggccgagcttttatcattgttaaccgacacagcagagggagccattgaaagcgagtratcggtttggatgcaccttctgaagtgatcgctttggtccctgtgaagagtgcagattgtcacagggccaggggaagacagaggccagtgaggaggcatt

SEQ ID NO: 196257 - DNA, 201 bp, Homo sapiens
gtacacaaatgctcatagcagcattattcataatagcgccaaagtgaaaacaacacaaatgcttgtctactgatgagtggagaaatagaacatggtttgaytatgcaatggaatattattcagtcatcaaaaggaatgaagtactaacacgtgctacaacacggatgaactatgagaatattaagctaagtggaagaaacc

SEQ ID NO: 196258 - DNA, 201 bp, Homo sapiens
tgcaatgaggcctcccctctatccttatctgtctggttgagtcattctgggctgactgggcaccatcatgagacgggcaggaggtctcatcattgggcacscaggcatcatgggcatgtggcctcccatgggcggcctcattccaggagcaggtcccactggcatcatcccaggaggaggagagcccatcattggcatcat

SEQ ID NO: 196259 - DNA, 201 bp, Homo sapiens
tgtatgatttactctttccttcattataggatggaaatgattttttataagctgtatttaatagtcatagtcatactccaacttgagttacactatagctrtgttattggtgttaagagtgagtcagtgaatgttctttagaattctgtgtagtgatttttaaccaattcaaatactactattatcacagtttatatattt

SEQ ID NO: 196260 - DNA, 201 bp, Homo sapiens
cccgtttctactaaaataaaaaaaaattagccgggcatggtgcacacgcctgtagtcccacactactcaggaggctgaggcaggggaatcgcttgaacccrggaggtggaggtttcagtgagctgagatcatgccactgccctccagcctgggcgacagaggaagacgctgtctcaaaaacaaaacaaaacattacaaaca

SEQ ID NO: 196261 - DNA, 201 bp, Homo sapiens
atggtgaaaccccgtttctactaaaataaaaaaaaattagccgggcatggtgcacacgcctgtagtcccacactactcaggaggctgaggcaggggaatcrcttgaacccgggaggtggaggtttcagtgagctgagatcatgccactgccctccagcctgggcgacagaggaagacgctgtctcaaaaacaaaacaaaac

SEQ ID NO: 196262 - DNA, 201 bp, Homo sapiens
tcactgcagccttgaccttctgggctcaggtgatcctcccacctcagcctcctgagtagctgggactgcaggtgcacaccaccatgcctgactaatttgtytattttttgtagagatgaggtttcaccatgttgcctaggctggtctcaaactcctgggctcaagcagtcctccatccacctcggcctcccaaagtgctga

SEQ ID NO: 196263 - DNA, 201 bp, Homo sapiens
ctgggctcaggtgatcctcccacctcagcctcctgagtagctgggactgcaggtgcacaccaccatgcctgactaatttgtctattttttgtagagatgakgtttcaccatgttgcctaggctggtctcaaactcctgggctcaagcagtcctccatccacctcggcctcccaaagtgctgagattacaggcatgagctgc

SEQ ID NO: 196264 - DNA, 201 bp, Homo sapiens
cctgggctcaagcagtcctccatccacctcggcctcccaaagtgctgagattacaggcatgagctgctgtgcctggccaaggttttttattattattattrttatgaaaacttttcgataaacataaaagtagagagactagtttaatgagctatcatatacccatcacatagatttaaaaactattaacatttgcaatat

SEQ ID NO: 196265 - DNA, 201 bp, Homo sapiens
tgtcttggttgtacgttttcttttaaattatatttgaaaatctcttagagagcaatccagaattttacaagtgactaagttatgagtctttaccttttttwaaaaaaacagaggagttgtactctccttttcagcacttaaattctgtaatccttgaaggatgattctttagtgcagtcgtttattttttgctgtgctaat

SEQ ID NO: 196266 - DNA, 201 bp, Homo sapiens
ggctcaagcagtcctccatccacctcggcctcccaaagtgctgagattacaggcatgagctgctgtgcctggccaaggttttttattattattattgttaygaaaacttttcgataaacataaaagtagagagactagtttaatgagctatcatatacccatcacatagatttaaaaactattaacatttgcaatatttac

SEQ ID NO: 196267 - DNA, 201 bp, Homo sapiens
gcagttatagcacagcaagtgttaggatttctaaaacagctttattgataattcacataccatgtaattcacccacttgaagtatacagttcagtggtttktagtatattcacagatgttggtaaacaacactccaatcagttttaggattgtttttccacctcaaaaaaaaccaaatcaaatcctatgccctttacctta

SEQ ID NO: 196268 - DNA, 201 bp, Homo sapiens
cctccatccacctcggcctcccaaagtgctgagattacaggcatgagctgctgtgcctggccaaggttttttattattattattgttatgaaaacttttcrataaacataaaagtagagagactagtttaatgagctatcatatacccatcacatagatttaaaaactattaacatttgcaatatttactccatttgtttt

SEQ ID NO: 196269 - DNA, 201 bp, Homo sapiens
cctctggattccctattctgtatgtttcatatgaacgggattatatatcataccggcttttgtgactggattctttcacttggtatagtgctttcaagatwtgtctatgccgtagcatgtatcagtacttacttcttatggccaaatgatattccattacatggatacactgcattttgtttattcgcttgtcagttgatg

SEQ ID NO: 196270 - DNA, 201 bp, Homo sapiens
ccaaagtgctgagattacaggcatgagctgctgtgcctggccaaggttttttattattattattgttatgaaaacttttcgataaacataaaagtagagasactagtttaatgagctatcatatacccatcacatagatttaaaaactattaacatttgcaatatttactccatttgtttttctgaagtatttacaaaata

SEQ ID NO: 196271 - DNA, 201 bp, Homo sapiens
gcaggtttgttacatatgtatacatgtgccatgttggtgtgcttgctgaataatattccatttgtttgcatgcaatgcaatttgtttatccattcttgaaytacccatttctaattgagttattttgtctttttattactgaattgtaatagttccttatgtattctagatacaaatcccttctgttcatcagggttgcag

SEQ ID NO: 196272 - DNA, 201 bp, Homo sapiens
aagtgctgagattacaggcatgagctgctgtgcctggccaaggttttttattattattattgttatgaaaacttttcgataaacataaaagtagagagacyagtttaatgagctatcatatacccatcacatagatttaaaaactattaacatttgcaatatttactccatttgtttttctgaagtatttacaaaatagtt

SEQ ID NO: 196273 - DNA, 201 bp, Homo sapiens
ttaaaaactattaacatttgcaatatttactccatttgtttttctgaagtatttacaaaatagtttacagtagttatgtaattgcatcctgatattcaccmctacgtaatttactttccctctaaaaacatgagggcagtttttatatgatcattgtcatacctaatcaaattaccagtaattccttaatatcctctaaga

SEQ ID NO: 196274 - DNA, 201 bp, Homo sapiens
catttataatagcatcaaaaagaataaaatacttagaaataaatttaagaagtgtaaaacttgtactctgaaaactataaaatgttgttgaaagaaatgaraggagatctgaataaatggaaaagtatcccatgatcatgatttgaaggcttaacattgttaagatggcagtcctccctaaactgatttacagatttaact

SEQ ID NO: 196275 - DNA, 201 bp, Homo sapiens
gtaatttactttccctctaaaaacatgagggcagtttttatatgatcattgtcatacctaatcaaattaccagtaattccttaatatcctctaagatcaastttacattcagatgtcttgtcctcaaaatgtcaattgtgattatttttttctttgagcaaagataataagatctcaagatttaatgacagagattccatg

SEQ ID NO: 196276 - DNA, 201 bp, Homo sapiens
catgtgtgtgtgggtgcttattaaataaaccagttcctggagctcactcccagtgactgccagtctgatgattaggggctcagctaggacctaggtttgcraaagctcccagctgatctcatgcagccagcctggctctggctctggctctgggagctgggttgggaactagtctttggtgctattctgctgaaacttcaa

SEQ ID NO: 196277 - DNA, 201 bp, Homo sapiens
ttggacttcatcaaaattaaacatttttgcacatcaaaggacaccatcaagaaagtgaaaagacggcccacaagttggaagaaaatacttgcaaatcatgyatagcactttttgatggtaaacttgaggaagacatttatcttttatcccttacctgtacagcagtaacatcctaatatctctctccctgcctctttttgc

SEQ ID NO: 196278 - DNA, 201 bp, Homo sapiens
atcctaatatctctctccctgcctctttttgccattctttaaattctttctcacttaattttcagatttaatattggctgaagcagggataatgagatcartcaaaggggtccttaggacactagtcacagtgtttgtactaatactggaactggcttattttcaggcatttctagtgtgatcagatggcaaagaacaagc

SEQ ID NO: 196279 - DNA, 201 bp, Homo sapiens
tgtcagttgccaggactgctgggaaagcctggtaaagagaacactggggaaaagcagcctcctgctcccctgggccttctttgagcctgatgatcacttgmtatggaacttaccctctgaaattccttaattgttcttttctatatccttgacactgtccttttccagaccaaattatctcatctggaatactgcaacaat

SEQ ID NO: 196280 - DNA, 201 bp, Homo sapiens
ctctagttctccaggtgacatatgcaggttctggtggtgggtaggcaggcatttcctcaggcctctcagtagtaagtgtgagcactagctctggaggcagrtgagtcaatctccaggcccccagatggtacattcaggcaccagcatattcctatgcatttctagataaaagtatttttcagaaaacctgagtgtatgtcc

SEQ ID NO: 196281 - DNA, 201 bp, Homo sapiens
gtttttgtttgtgaaataggctccttctcctgaaaaagccgaggaggagagtgagaggcttctgagggaactctatttgtttgatgttctccgcgcagatygaactactgctgcccatgggtaatatttttagaggctattgtaaaacaaaaacaaaaaaacaccaaaaacaaaacaaaacaaaaagctcaataccctgag

SEQ ID NO: 196282 - DNA, 201 bp, Homo sapiens
aactcttggtgtttttgtttgtgaaataggctccttctcctgaaaaagccgaggaggagagtgagaggcttctgagggaactctatttgtttgatgttctscgcgcagatcgaactactgctgcccatgggtaatatttttagaggctattgtaaaacaaaaacaaaaaaacaccaaaaacaaaacaaaacaaaaagctca

SEQ ID NO: 196283 - DNA, 201 bp, Homo sapiens
caacaatgaaccttagaacaagtcatctctcatctttgctcttgcctgtaactactaagcgactactccatcttctgttcttagggattttaaattgttgrcgtttttgatttagtcaggaatgcgttgtatggggatatcaaacctgcatgctctccaagcattgactgtagtctgatcttagtaggtcgtgcacatata

SEQ ID NO: 196284 - DNA, 201 bp, Homo sapiens
gagagtggggctaggatctctggctaggttggagccagcctgcatttgtatctgtatcttggaagcaaacttagaatgcagagacagatgtggcatggacrctgtcagctctagccaaccactaaatcctaaggtgggagagatgcaggctttggctaggtgctaagctgctgtagccggttgaatgtagaggtcactatc

SEQ ID NO: 196285 - DNA, 201 bp, Homo sapiens
aatactcatcatcactggccatcagagaaatgcaaatcaaaaccacaatgagataccatctcacaccagttagaatggtgatcattaaaaagtcaggaaayaacaggtgctggagaggatgtggagaaataggaacacttttacactgttggtgggactgtaaactagttcaaccattgtggaagacagtgtggcgattcc

SEQ ID NO: 196286 - DNA, 201 bp, Homo sapiens; identical to SEQ ID NO: 33623

SEQ ID NO: 196287 - DNA, 201 bp, Homo sapiens
tttttttttttaaacgtaaaggcatagtatcatggctaagactgcagactttggaacctgacttgtggtttgaaatcctggctctactcatttatgtaacmaaaataatagtgtctgctatggggaaattttaaggtgaaatgatataattcatgtaaagtaagtagggtagaacttagcatgtagtaagtacttaatgag

SEQ ID NO: 196288 - DNA, 201 bp, Homo sapiens
attgagcctttatatgctactgcctcccttgagagacttgccttggaaggcaaaaatatcttaggtattacaatggtttatggccctccaaaacatcacartaaataagcagatagacaggatagctctggtattggaatttcatggggctggggtgaggttaggaaaataagtgtctaaaaaggctctctagctgaggtg

SEQ ID NO: 196289 - DNA, 201 bp, Homo sapiens
ggaggtagattacctgaggtcaggagtttgaaaccagcctgagcaacataatgaaactccatctctacaaaaaaatacaaaaactagccaggcttggtgaygcatgcctgtagtcttagccttatgggagcctgggtgacagagcgagaccttgtctcaaaaaaaaaagaaagtaaaggcataagtcaggtgcagtggcac

SEQ ID NO: 196290 - DNA, 201 bp, Homo sapiens
atgaagatgacatccattgtggtcttgtacattttgttgcctttccggggtgaaggacattggtgaccatttgtttcctctggagcggtcgattggtcatraacttcctggtccaggtagttactgtgtcattcatgatggtggttgatcctcaggtagttagggaggaaaataaacaagaagttatatatttaaaatcac

SEQ ID NO: 196291 - DNA, 201 bp, Homo sapiens
tgatcctcaggtagttagggaggaaaataaacaagaagttatatatttaaaatcacgtttcaattttagacctgattaattgacttaataaagggcattarcacttctacttcctacagtccctccctttagctctggaaactagttatttctaggttgttttatgttgttaaggttgaccaccttctctttctgttctgc

SEQ ID NO: 196292 - DNA, 201 bp, Homo sapiens
ttctatatccttgacactgtccttttccagaccaaattatctcatctggaatactgcaacaattttcttttctcagtgcttttagaataacctgtcaaaawctcatctgattatagtattgcctgcttaaaaccttttaattactccccattccctatccgggttgtgtagctcacttgagctctgctggctggtgaggga

SEQ ID NO: 196293 - DNA, 201 bp, Homo sapiens
tcctcaggtagttagggaggaaaataaacaagaagttatatatttaaaatcacgtttcaattttagacctgattaattgacttaataaagggcattagcayttctacttcctacagtccctccctttagctctggaaactagttatttctaggttgttttatgttgttaaggttgaccaccttctctttctgttctgcaat

SEQ ID NO: 196294 - DNA, 201 bp, Homo sapiens
cttttaattactccccattccctatccgggttgtgtagctcacttgagctctgctggctggtgagggaatctgggtcctttttctggtatttgaattcagygctacacaggttactggctgggtagacaatctcaaattgtaaatcacgagtattccatgtagatagtccattacgatctacaataaaacattgatgtttg

SEQ ID NO: 196295 - DNA, 201 bp, Homo sapiens
tacctcagtgatgacaaataaatgactcccagcctatcataacattaggactccagttcatccctttgcttcataagtgtgtcttttccttttgtgtattkgctttagtatagaaaataggttttcttgattagaaatctaagaagaagaaattgaacactggagatttttctatttctttgaattacgaaaagttagtgt

SEQ ID NO: 196296 - DNA, 201 bp, Homo sapiens
gaagaaggtgactgtaaggtccaggctgagcaggaaggtaaagcaagaaggaaacatgaggttgtgaagagaagtttagagggatgaggaggcaggagagrtgaacagttgcatgatgtagctagagtggcgatgttagatcttggggccagagatctttacaatgattatgaagatcaaagggcattagaatcaagctat

SEQ ID NO: 196297 - DNA, 201 bp, Homo sapiens
agaaatctaagaagaagaaattgaacactggagatttttctatttctttgaattacgaaaagttagtgtaatttggcagtatatccctgtgccattattgyctctcaggtaagtagatggtagggcttaggaaaatagaaaattttttttcctattttgcttatttaatgggtatgtgtttgtattaaaaagggaaaatag

SEQ ID NO: 196298 - DNA, 201 bp, Homo sapiens
ttgaatgattttagtttcaagacctacttcctattttgtttggagggaacacattaagatttggcacactccaccattgagtaaataccatcatgatagaygttgatgattgtgtatttcatttcaataactaatccagcccaagattttctggagctgtttgatttactgctgtgtttataggttttgagatagaaactg

SEQ ID NO: 196299 - DNA, 201 bp, Homo sapiens
gattttaaatagtaaaactatgatcttggtgtttatcaggaatatacatcttctgtccctgtcttatgcaaggcacataactaggacacttccacttcctyttttgcatgtagggggcttggactccagcttggttgctgccactctgttgaagcagctgaaagaagcccaagtacagtatcctctccagacatttgcaat

SEQ ID NO: 196300 - DNA, 201 bp, Homo sapiens
gcaggcgagggaacagtgctggatggggcttgtatgtggtgggctgtaaagtcatttttctttttttcccttgtttagttttcaccattgttaattcataragctttgtgaactcccatcatgtttgattttcaagggaagttattttctttaacaagtaaatgggtatttctttatataataaggtggcagatcatattg

SEQ ID NO: 196301 - DNA, 201 bp, Homo sapiens
caccaaaaacaaaacaaaacaaaaagctcaataccctgagaaaataaaaatcaatagctgattggctatatgttacatatagttggctatatgttacaaastgtgacttttatagagaaaatgaagctgtttcttaactttgtcccaaaaggattaggccacatttcaaagtggtgttgtggtatatggagagaagtcttc

SEQ ID NO: 196302 - DNA, 201 bp, Homo sapiens
gaatcccagatgagttctttgtgaaatctacaagctgactctcaaattcatatggaattgcaagagactaagaatagccaaaacaatcttttgaaaatgargaacaaagtaggagacctcatattaactgattttaaaacttactacaagacaatggtaataaggacaatataatactgacagaaggatagatgtatagac

SEQ ID NO: 196303 - DNA, 201 bp, Homo sapiens
gttatcggttgaacctgggaggcagaggtgtcctgtgtccaaaccccatgaggcgtatcagctggctgaagataaaatcggtcacgctgtgttgggattgkggttgctgttatcatccctcatccccacccctgctaggcatccacaaacagtcatcttcaatgagacgtccctcctgcccctggctgccttatttcatct

SEQ ID NO: 196304 - DNA, 201 bp, Homo sapiens
aaatggctgttggatatgcactgtgttgtacactgtcctctgtgtacttttatctgttatgacccatgcaattctcacaaagaccctatgatgataagtaygctcttttgaaagtaaaggtgtctgggcatggtggcctacacctgtaatcccagcactttacgaggctgagggaggtagattacctgaggtcaggagttt

SEQ ID NO: 196305 - DNA, 201 bp, Homo sapiens
tgcaaggcacataactaggacacttccacttcctcttttgcatgtagggggcttggactccagcttggttgctgccactctgttgaagcagctgaaagaarcccaagtacagtatcctctccagacatttgcaattggcatggaagacagccccgatttactggctgctagaaaggtaaggtgctgtctctgtcccttgtg

SEQ ID NO: 196306 - DNA, 201 bp, Homo sapiens
aagaacaacctcaggatcctttttaataatgctgtaaagaaacgtttgatgacagacagaaggattggctgccttttatcaggtgaagtcaattaaaaaaacctaattatatttcatgtgtgtttaattgaaatgatttgtagccatccctttggtttttactataaaatatttactgtatgatttactctttccttcatt

SEQ ID NO: 196307 - DNA, 201 bp, Homo sapiens
tttgttacatatgtatacatgtgccatgttggtgtgcttgctgaataatattccatttgtttgcatgcaatgcaatttgtttatccattcttgaattacccatttctaattgagttattttgtctttttattactgaattgtaatagttccttatgtattctagatacaaatcccttctgttcatcagggttgcaggatac

SEQ ID NO: 196308 - DNA, 201 bp, Homo sapiens
cccacttgaagtatacagttcagtggtttttagtatattcacagatgttggtaaacaacactccaatcagttttaggattgtttttccacctcaaaaaaaaccaaatcaaatcctatgccctttaccttagtttttgctggcaggatcaactaggtttttgtttgtttgtttgtttgaagagatggggtcttgctcagtcg

SEQ ID NO: 196309 - DNA, 201 bp, Homo sapiens
ttataaaatcaaagagagccttccaagacaaaagccattgttaatgaagcagatgactctggagaaacatttaaaagtcatctggccgaatgcctcttcartctcagaggacccgcttcctagttgctcagctgcttctgatgtttcttctcacctgaaaaaggaaaaaaaaatacagtgtatagtaaccttttaatcaaa

SEQ ID NO: 196310 - DNA, 201 bp, Homo sapiens
ttctcatttaaaaagttttaaaatagttattcaggaaattccttttacacatttctttattcctttattaagggtctactatgcaccagacatcatttttytaggtgattggagatgaaatggtgaaaaggaaaggcaagaatggaatttcctgctagtgggaggtagaagaagagagtattaaaaattttttctaagtca

SEQ ID NO: 196311 - DNA, 201 bp, Homo sapiens
aaaattcctaacatacagtaaagaacagaacaacaagcacctagattaaatagtcattaatgttttgccatagttgcttgatttttctttctacacacacrcacacacacacacacacatgtttttgctgaatcatttgagagtacagtgcagatattatgacactcctaaatatataagcatttatctcctaagaataag

SEQ ID NO: 196312 - DNA, 201 bp, Homo sapiens
gataagctcagaatctaaaccttagactagggaatggcaaactttttccataaagatgcaaacggtaatattttaggcttttggtctagataacctctgtygtagtgacacagtggtgccatcgtagcctaaaagcttatgtagacaatggataaatcaatggacctggttttattccagtaaaacttaatttatacagtc

SEQ ID NO: 196313 - DNA, 201 bp, Homo sapiens
gcaaacggtaatattttaggcttttggtctagataacctctgtcgtagtgacacagtggtgccatcgtagcctaaaagcttatgtagacaatggataaatsaatggacctggttttattccagtaaaacttaatttatacagtcagagggccagatttggcccttggtctatagttggccaaccctgtttagagcagtcaa

SEQ ID NO: 196314 - DNA, 201 bp, Homo sapiens
gctacccataagcctgtatgatttaagaatatcgctaagaaagtgaggaaagtcattcatcttagatgacttttttttgtttgtttttgttttgttttagrcagtcttgctctgtcacccaggctggagtgcagtggcttgatctcagctcactgtaacctccacctcctgggatcaagcaattcttgtgcctcagcctcc

SEQ ID NO: 196315 - DNA, 201 bp, Homo sapiens
atgatttaagaatatcgctaagaaagtgaggaaagtcattcatcttagatgacttttttttgtttgtttttgttttgttttagacagtcttgctctgtcayccaggctggagtgcagtggcttgatctcagctcactgtaacctccacctcctgggatcaagcaattcttgtgcctcagcctcccaagtagctgggattac

SEQ ID NO: 196316 - DNA, 201 bp, Homo sapiens
gacattttgatagtgaatattttgtatcttctattaacttgaaatgttttatttgttataaagccaggatatctgatatcaaattaaattgttttttttttccctttagattttcttcaatcacatctgaataaatcacttgaaggtaacctagatgtaatatagtgaaatgcttgaaagagctgcgtatcttttacactt

SEQ ID NO: 196317 - DNA, 201 bp, Homo sapiens; identical to SEQ ID NO: 33647

SEQ ID NO: 196318 - DNA, 201 bp, Homo sapiens
ttttagccagtcactggtaaggggggttaggctaaaatgataagctcagaatctaaaccttagactagggaatggcaaactttttccataaagatgcaaamggtaatattttaggcttttggtctagataacctctgtcgtagtgacacagtggtgccatcgtagcctaaaagcttatgtagacaatggataaatcaatgg

SEQ ID NO: 196319 - DNA, 201 bp, Homo sapiens
cgccccgtgccctgcgccccgcgccagcatcctcctcgcgtgccctggggctgctccggaaggaaggggtggaggatgcggtcttcagcctggcacccggsagacgcggttcgcgggcgcctgctgatgctgcggctcctgcggtagggagggcggggcggacgcctagcgattgttacgcacctgacagctagcggaagg

SEQ ID NO: 196320 - DNA, 201 bp, Homo sapiens
agatcgagagcatcctggacaacatggtgaaaccccgtctctactaaaaatacaaaaattaactgggagtggtagcaggcacctgtaatcccagctactcrggaggctgaggcaggagaatcgattgaatccaggaggcagaggttgcagtgagccgagattgcaccactgcactccagcctggcaacagagcaagactcc

SEQ ID NO: 196321 - DNA, 201 bp, Homo sapiens
aggtaggtaaatcaactcaaggtaaaactgtccattgccatcagattatatttgtaatttttacctgatgctcctttttttgtcacgtcagaatgggatasaaaaacatctcctgagagagacgtttgaggattccaatctgatacccaaagagattctctggcgaccaaaagaagccttcagtgatggaataacttcagt

SEQ ID NO: 196322 - DNA, 201 bp, Homo sapiens
ttgttaggcacaaatgactaaaacagagccaccaagtattaaaaatatgcatatgagtgttctttaaaaggcactgcagctatccatattatgaatacttyagcattttctaagtgatgggtgattcaaagggtctcatacaagttacagtcacgtcttaacattttctgtttcgtgaaatgagactaaacacaagtattt

SEQ ID NO: 196323 - DNA, 201 bp, Homo sapiens
ctaaagtcattacagcgtccactaaaattttgcccctctctcgatgccttcctctttagaagcctgttccttcagggatagatcccaactcagtgttacamggtactgaactctgattttcacaaaatatagtaactgccccccaaaattaataatagtatttttgagctgggcacggtggttcatgcctgtaatcccagc

SEQ ID NO: 196324 - DNA, 201 bp, Homo sapiens
ttgccatcagattatatttgtaatttttacctgatgctcctttttttgtcacgtcagaatgggatagaaaaacatctcctgagagagacgtttgaggattycaatctgatacccaaagagattctctggcgaccaaaagaagccttcagtgatggaataacttcagttaagaattcctggtttaagattttacaggaatac

SEQ ID NO: 196325 - DNA, 201 bp, Homo sapiens
tgatgggtgattcaaagggtctcatacaagttacagtcacgtcttaacattttctgtttcgtgaaatgagactaaacacaagtatttcctgccattttaarccattttgctcttatatgcttattcttacaggttgatgatgcaatgatggcaaatgcagcccagaaatttcccttcaatactcctaaaaccaaagaagga

SEQ ID NO: 196326 - DNA, 201 bp, Homo sapiens
aaaaaaaaaagaagttaaatgaatacttttgaccattgatggaagttgctttcattccctcttacttaatcatctttatcttagccctgaaagagggatgytttaaccccatttgtaacaagtgagtctgaggctcaggaaagtgatagaatttagcaaagtccaccttgctacctggtggccccagctagaactcagccc

SEQ ID NO: 196327 - DNA, 201 bp, Homo sapiens
cttggcctcccaaagtgttgggattacaggtgtgagccactccacccagcccagagaaggcttttcatacttgcttggcagcctcctgcatcctacgccakcacctggcgctcacaacctgtgggctgctctcatccgtgatcatctctccccaggcctgctgttccttgagaaaggaagttgtaatgggcagaattctag

SEQ ID NO: 196328 - DNA, 201 bp, Homo sapiens
aagataaaatcggtcacgctgtgttgggattggggttgctgttatcatccctcatccccacccctgctaggcatccacaaacagtcatcttcaatgagacrtccctcctgcccctggctgccttatttcatctgcacccaatcgtatccattgcttgtcagtgggtctcaaccttggctgcaccttggaatctcctgggga

SEQ ID NO: 196329 - DNA, 201 bp, Homo sapiens
ttgctatttttagtagagatggggtttgctgaatgcagccccagtcacgtactcccttcttggtcaatcgatcacgactctctcatgatcacgaccctctyatgtggacccccttagagttgtgagcccttaaaagggacaggaattgctcacttggggagctgggttgttagagacgtgtgccaccactcccagctaatt

SEQ ID NO: 196330 - DNA, 201 bp, Homo sapiens
tagggtttttatggttttaggtctaacatttaagtctttaatccatcttgaattgatttttgtataaggtgtaaggaagggatccagtttcagctttctayatatggctagccagttttcccagcaccatttattaaatagggaaccctttccccactgcttgtttttgtcaggtttgtcaaagatcagatagttgtagat

SEQ ID NO: 196331 - DNA, 201 bp, Homo sapiens
aagtcagctgtcaaagcttaggtggtctttatgctgtaatgtgaaagcaaatatttcttcgtgttggatggggactgtgggtagataggggaacaatgagmgtcaactcaggctaacttgggtgtgaaaaaaataaaagtcctaaatctaaaccattgctgtagtcatttatgttcatgcagtctcttcataagaggtaac

SEQ ID NO: 196332 - DNA, 201 bp, Homo sapiens
tctgttacaatggtgaaatctacaaccataagaaggtgaggagaaagaaaccagatgtctggatgcgattaaacttcagagtttgttggttacgatgatgytacatattctgtatcatgctttttcctttgcaaagcactctatgttcgttatctcatttgctctaagtatgtaaatagggaactgatgaataaaaaggtg

SEQ ID NO: 196333 - DNA, 201 bp, Homo sapiens
tttgtggctctgttacaatggtgaaatctacaaccataagaaggtgaggagaaagaaaccagatgtctggatgcgattaaacttcagagtttgttggttaygatgatgttacatattctgtatcatgctttttcctttgcaaagcactctatgttcgttatctcatttgctctaagtatgtaaatagggaactgatgaata

SEQ ID NO: 196334 - DNA, 201 bp, Homo sapiens
accttttgcatctccttgaaatgtctgcctttgcacactctccctgaaagaggagggcaagggagccaggatagaaagtgaggtggagaagtgtagagctmtggacggacaagcaggagatacgcagcacaaggaagcacactaggtaacacaccaagcaggggaacctgtctttcactacataggcaagatgctacggga

SEQ ID NO: 196335 - DNA, 201 bp, Homo sapiens
actggtgatctgcttcccttctcatctggttgttggcagcattcagttccttgcaggctgctggtctcagggccccaggttcctgctgtcctcagcttccygccacatgggcctctccatctggccactcatgacatggcagctcacatcttcaaagccagcaagatagcctcctagcaagacaacttaacatcctatcta

SEQ ID NO: 196336 - DNA, 201 bp, Homo sapiens
tttggcttcatgtatcaattagatttagattttattgttttagagatgggggtctccctttgtcgcccaggctggagttgagctcacctcagcctcaaackcctgggctcaaactatccttctgcctcagcctcctgagttgctgggactaccatggtgtgccaccaatttttatagagatgtgatctcgctgtgtttccc

SEQ ID NO: 196337 - DNA, 201 bp, Homo sapiens
ccttcctttatggagctctcagtaaaacaagaaagctcacgatgtcctggcatttgtcagaaatacatttggtatatgtagctggggtcacatgcttgacwtgcctattgaaagcttctgggtaggaagagaacaatcatcacagcatcacagcctggcataactgtctcccaggacaggtctccctggggagactgagac

SEQ ID NO: 196338 - DNA, 201 bp, Homo sapiens
gaatcccttgagcccaggaggcagagactgcagtgagccgagatcacaccactacactccagcctgggtgacagtgagactcttaaaaaaaaaaaaaagasagagatgatccttcctttatggagctctcagtaaaacaagaaagctcacgatgtcctggcatttgtcagaaatacatttggtatatgtagctggggtcac

SEQ ID NO: 196339 - DNA, 201 bp, Homo sapiens
gaaaacccactagggacgagacacatgctaaagttgaatgagctgatggatatgaaccaccagtccaagaatctgtttaaagttcagacttaaaacagtascaaataagaagtcctatttgtgaaaaacaaacaagaaacaacaatgaaagagcaaaattagcctggtgtggtggtgcatgcctgtaatcctagctactca

SEQ ID NO: 196340 - DNA, 201 bp, Homo sapiens
tctcagctactcaggaggctgaggctggagaatcccttgagcccaggaggcagagactgcagtgagccgagatcacaccactacactccagcctgggtgasagtgagactcttaaaaaaaaaaaaaagacagagatgatccttcctttatggagctctcagtaaaacaagaaagctcacgatgtcctggcatttgtcagaa

SEQ ID NO: 196341 - DNA, 201 bp, Homo sapiens
ctaggtgtggtgatgcacacctttgatctcagctactcaggaggctgaggctggagaatcccttgagcccaggaggcagagactgcagtgagccgagatcrcaccactacactccagcctgggtgacagtgagactcttaaaaaaaaaaaaaagacagagatgatccttcctttatggagctctcagtaaaacaagaaagc

SEQ ID NO: 196342 - DNA, 201 bp, Homo sapiens
agatctgcctggcgaacatgagtaaaccccgtctctaccaaaaatatgaaattagctaggtgtggtgatgcacacctttgatctcagctactcaggaggcygaggctggagaatcccttgagcccaggaggcagagactgcagtgagccgagatcacaccactacactccagcctgggtgacagtgagactcttaaaaaaa

SEQ ID NO: 196343 - DNA, 201 bp, Homo sapiens
aagatctgcctggcgaacatgagtaaaccccgtctctaccaaaaatatgaaattagctaggtgtggtgatgcacacctttgatctcagctactcaggaggmtgaggctggagaatcccttgagcccaggaggcagagactgcagtgagccgagatcacaccactacactccagcctgggtgacagtgagactcttaaaaaa

SEQ ID NO: 196344 - DNA, 201 bp, Homo sapiens
ctgtatgttcagaagctaaaggtaataataaatttttctatagattttcattattgtcttggttgtacgttttcttttaaattatatttgaaaatctcttrgagagcaatccagaattttacaagtgactaagttatgagtctttacctttttttaaaaaaacagaggagttgtactctccttttcagcacttaaattctg

SEQ ID NO: 196345 - DNA, 201 bp, Homo sapiens
ttgaggccaggaattcaagatctgcctggcgaacatgagtaaaccccgtctctaccaaaaatatgaaattagctaggtgtggtgatgcacacctttgatcycagctactcaggaggctgaggctggagaatcccttgagcccaggaggcagagactgcagtgagccgagatcacaccactacactccagcctgggtgacag

SEQ ID NO: 196346 - DNA, 201 bp, Homo sapiens
gtggagccttttcttcctggacactatgaagttttggatttaaagccaaatggcaaagttgcatccgtggaaatggttaaatatcatcactgtcgggatgwacccctgcacgccctctatgacaatgtggagaaactctttccaggtagcagacacccacccacctattccccatccttctccaagggaaaaaaattttaa

SEQ ID NO: 196347 - DNA, 201 bp, Homo sapiens
ttttaaaaaaacagaggagttgtactctccttttcagcacttaaattctgtaatccttgaaggatgattctttagtgcagtcgtttattttttgctgtgcyaatatgctctacatctagcttgatcttaagtgcagttttaagttttcctgtgtcatactataatcgtagggttgactctgcaattattgcattgtggtac

SEQ ID NO: 196348 - DNA, 201 bp, Homo sapiens
gcgaatcacttgaggccaggaattcaagatctgcctggcgaacatgagtaaaccccgtctctaccaaaaatatgaaattagctaggtgtggtgatgcacasctttgatctcagctactcaggaggctgaggctggagaatcccttgagcccaggaggcagagactgcagtgagccgagatcacaccactacactccagcct

SEQ ID NO: 196349 - DNA, 201 bp, Homo sapiens
tcaggtaagtagatggtagggcttaggaaaatagaaaattttttttcctattttgcttatttaatgggtatgtgtttgtattaaaaagggaaaataggaaygtagatgatgttaactaatcgtgaaagttattgggaagggttacctaatttgaataaaggtatcattgtgaatttctaggtcttgttacattgaagcact

SEQ ID NO: 196350 - DNA, 201 bp, Homo sapiens
ttgggaagccgaggtaggcgaatcacttgaggccaggaattcaagatctgcctggcgaacatgagtaaaccccgtctctaccaaaaatatgaaattagctrggtgtggtgatgcacacctttgatctcagctactcaggaggctgaggctggagaatcccttgagcccaggaggcagagactgcagtgagccgagatcaca

SEQ ID NO: 196351 - DNA, 201 bp, Homo sapiens
ctctttcctagaggggaagactttcagagctgggcttggcaacagcctgactatcagaggctgaattaaacaaataggtacctccctggagtgaatggtgygtttctcctgttcggggaaccgtgcttttatggtggagtttgtgttctgtcttggtctccggatgtgtgtatctgtgggtggatgtctgcatgtaaatgg

SEQ ID NO: 196352 - DNA, 201 bp, Homo sapiens
tatttaatgggtatgtgtttgtattaaaaagggaaaataggaatgtagatgatgttaactaatcgtgaaagttattgggaagggttacctaatttgaataraggtatcattgtgaatttctaggtcttgttacattgaagcactccgcgactccctttttaaaagtggagccttttcttcctggacactatgaagttttgg

SEQ ID NO: 196353 - DNA, 201 bp, Homo sapiens
taaagttcagacttaaaacagtagcaaataagaagtcctatttgtgaaaaacaaacaagaaacaacaatgaaagagcaaaattagcctggtgtggtggtgyatgcctgtaatcctagctactcaggaggctgaggcatgagaatcacttgaacgcgggagacagaggttgcagtgagccaagattgcaccattgcactcca

SEQ ID NO: 196354 - DNA, 201 bp, Homo sapiens
tgtccctttgctttacatttttatagctaggactttgaagctgaactggaggaacttcttagccaatactatcttctcaaatcaaaagtttatagttgcaraagacacgttttttagtgtcatggcaaccaggcaacctattatcttaacttaaatttagaggttgagcatccctaatctgaaaatctgaaatttgaaatg

SEQ ID NO: 196355 - DNA, 201 bp, Homo sapiens
aagacaggccaggtgcattggcttatgcctgtaatcccagcactttgggaagccgaggtaggcgaatcacttgaggccaggaattcaagatctgcctggcsaacatgagtaaaccccgtctctaccaaaaatatgaaattagctaggtgtggtgatgcacacctttgatctcagctactcaggaggctgaggctggagaat

SEQ ID NO: 196356 - DNA, 201 bp, Homo sapiens
actgggctgtttcacatggatgtaacataaaaaagacaggccaggtgcattggcttatgcctgtaatcccagcactttgggaagccgaggtaggcgaatcrcttgaggccaggaattcaagatctgcctggcgaacatgagtaaaccccgtctctaccaaaaatatgaaattagctaggtgtggtgatgcacacctttgat

SEQ ID NO: 196357 - DNA, 201 bp, Homo sapiens
ggaactatttctgaacacccctaggtttcccctgtgttcgccctttcctttcacatttggacccctttgtgtgctgaccactgggctgtttcacatggatrtaacataaaaaagacaggccaggtgcattggcttatgcctgtaatcccagcactttgggaagccgaggtaggcgaatcacttgaggccaggaattcaaga

SEQ ID NO: 196358 - DNA, 201 bp, Homo sapiens
gggaactatttctgaacacccctaggtttcccctgtgttcgccctttcctttcacatttggacccctttgtgtgctgaccactgggctgtttcacatggaygtaacataaaaaagacaggccaggtgcattggcttatgcctgtaatcccagcactttgggaagccgaggtaggcgaatcacttgaggccaggaattcaag

SEQ ID NO: 196359 - DNA, 201 bp, Homo sapiens
ctgtcccttgtgtagtgtagttagagtagacttgttattagaatgaaaatggagtcaataatgggtgattctactgctgctgtattgactgggtcaattgwtttaaattgattgtattaaaatagaatgaaatggctgttggatatgcactgtgttgtacactgtcctctgtgtacttttatctgttatgacccatgcaat

SEQ ID NO: 196360 - DNA, 201 bp, Homo sapiens
ccatctcaaaacaaaacaaaacaaaacaaaacaaaaacacacacacacacacacaaaaaccaaaaatactgatgcccatgtttcatccccaagggattctktaataattgatctgggctgcagagcccgggcactggggttttaaaatctccccaggtgattctgatgtgcagctgtgtttgagaatctccttctggaatg

SEQ ID NO: 196361 - DNA, 201 bp, Homo sapiens
gaattttaaaacctgtttagaaaatgacaaaatggttccgggttattttattttacagtagtacttttggattaagtacatataaatggcttataaatacmaggtcattattgtggaaactactttatattaatatgaagtccagtatagtagtaaagctttcaattatttccaaaaatcaaatcaaaggcatttttggtg

SEQ ID NO: 196362 - DNA, 201 bp, Homo sapiens
caagattccatctcaaaacaaaacaaaacaaaacaaaacaaaaacacacacacacacacacaaaaaccaaaaatactgatgcccatgtttcatccccaagrgattctgtaataattgatctgggctgcagagcccgggcactggggttttaaaatctccccaggtgattctgatgtgcagctgtgtttgagaatctccttc

SEQ ID NO: 196363 - DNA, 201 bp, Homo sapiens
ctctattaaaaatacaagaagttagccaggcgtggcggtgcacacctgtaatcccagctacttgggaggctgaggtaggaaaatgggttgaacccgggagrcagaggtagcagtgagctgagatcgcaccactgcacttcagcctgggtgacagaacaagattccatctcaaaacaaaacaaaacaaaacaaaacaaaaac

SEQ ID NO: 196364 - DNA, 201 bp, Homo sapiens
ctgaggctgggagttcgagacctgcctgggcagcatggtgaaaccctatctctattaaaaatacaagaagttagccaggcgtggcggtgcacacctgtaaycccagctacttgggaggctgaggtaggaaaatgggttgaacccgggagacagaggtagcagtgagctgagatcgcaccactgcacttcagcctgggtgac

SEQ ID NO: 196365 - DNA, 201 bp, Homo sapiens
tctatttgtttgatgttctccgcgcagatcgaactactgctgcccatgggtaatatttttagaggctattgtaaaacaaaaacaaaaaaacaccaaaaacraaacaaaacaaaaagctcaataccctgagaaaataaaaatcaatagctgattggctatatgttacatatagttggctatatgttacaaagtgtgactttt

SEQ ID NO: 196366 - DNA, 201 bp, Homo sapiens
taggcaaatctatagaggcagaaagcaggtaagtggttgccaggagctgggggaaaggggaggggatggagagtgcttgatggatacagggttattttttktgggggcggggggtgttaatgaaaatgttttggaactagacagagatgatgattgcttaacattgtgaatgtatttaatgatactgaagtgtatggtttc

SEQ ID NO: 196367 - DNA, 201 bp, Homo sapiens
aaaggattaggccacatttcaaagtggtgttgtggtatatggagagaagtcttcttccataggttgtttgaggtggagttttcacctttaaagggtaacarcattctgctcacatctgaacaaccaagatggaagaggcaaggctgctacagcagctaccgttaagtgttttaaagagaagtaaagatcgtaaacatcatg

SEQ ID NO: 196368 - DNA, 201 bp, Homo sapiens
attttgtttgttcattcatcaaccaaatggccatcttggttgttgctaccttttggttattatatatattacatgattccatttatgtgaaaggcccagartaggcaaatctatagaggcagaaagcaggtaagtggttgccaggagctgggggaaaggggaggggatggagagtgcttgatggatacagggttatttttt

SEQ ID NO: 196369 - DNA, 201 bp, Homo sapiens
ttgtgctctcaggcacatgaactggtggcactgagcaggtagcactcttgtgaatacatttataggccagggtctttctcctcaacaattagagttgaacrtgttttgtttttgtttttgtttttctagtagcttttaaaaaaaaattatcctttctctagagcatcaggatctagtagccttgtctcctaaatactcatt

SEQ ID NO: 196370 - DNA, 201 bp, Homo sapiens
ctgttggcctgctgctgagtctggcatcgctgctcatctgtcgacaccgttctgcttcctcctttcgtgcttatgaaacacagtactggtgttttctatgrgtgaaactaagtggaggaaaagcacagatacacaaactgtcccattatgcagtgttatgggccttttcactctgcagtgttgaaactgccttggcctcac

SEQ ID NO: 196371 - DNA, 201 bp, Homo sapiens
tcacgaggtcaggagatcgagaccatcctagctaacacagtgaaaccccgtctctactaaaaatagaagaaaattagctgggcgtggtggcgggcacctgyagtcccaactactcgggaggctgagccaggagaatggcatgaacccgggaggcagagcttgcaatgagccgagatcgtgctactgcactccagcctgggc

SEQ ID NO: 196372 - DNA, 201 bp, Homo sapiens
ctcagcagcagcaggaccagagccctcactcctcacggggatatataataaaggcaaaccttctcttagtgagatgacctcttatctgcactcctccccarttaaggccaacacttaagccttcattttcctacttagaaaaatttttctttaaatttgatttattttaaattgaggtgggatctcactgtgttgcccagg

SEQ ID NO: 196373 - DNA, 201 bp, Homo sapiens
cacggggatatataataaaggcaaaccttctcttagtgagatgacctcttatctgcactcctccccagttaaggccaacacttaagccttcattttcctayttagaaaaatttttctttaaatttgatttattttaaattgaggtgggatctcactgtgttgcccaggttggcctcaaactcctaggctcaagagatcctc

SEQ ID NO: 196374 - DNA, 201 bp, Homo sapiens
acacgaatgccggagccccaccgggcactgcctaccagagtccccttcccctgagccgaggctccctggctgctgtggcccatgcacagtccctggtagargcacagcccaacgtggacaagctcgtggaggaccacctggcagtgcagtcgctcatcagggcatatcaggtaaggcgggtgctttacccgcacacgggaa

SEQ ID NO: 196375 - DNA, 201 bp, Homo sapiens
tgagccgaggctccctggctgctgtggcccatgcacagtccctggtagaagcacagcccaacgtggacaagctcgtggaggaccacctggcagtgcagtcrctcatcagggcatatcaggtaaggcgggtgctttacccgcacacgggaaagggtgcagtgttccttaggtcatgcctcatgggccctattggcctttctg

SEQ ID NO: 196376 - DNA, 201 bp, Homo sapiens
gtagctgggattacaggcatgtgccaccatgccaggctaatttttgtatttttgtaaagatagggcttcaccatgttggccaggctggtcttgaattcctkacctcaagtgataacacctacctcagcctcccaaagtgctgggattacaggtatgagccaccatgcccggacaagattatcctggcccttggtgtaaaga

SEQ ID NO: 196377 - DNA, 201 bp, Homo sapiens
gctcttgttgtctgagatggttggacctgtacccaggagtctaaggctgtatgcgctcctggccccagagcagccccaacttagaagactccattttcacracagtttacagacatttgcataaagttctcattgccctgcctgatggtgatgctttacttacatttaatgtgtgtgtatgttagattggtgatataatca

SEQ ID NO: 196378 - DNA, 201 bp, Homo sapiens
ctcactgcaggtctgtggccctcagcaccctgcaaggagaacagggctttgtaagggctctggaaagatcaggaacagtcagaacatgctggaccaggtgytcacacatgacgtcttgcagatggttccctggttttgttctgtttcagtttttaattgtcccattttctaaaattggaaaacaattgttggaagaagctc

SEQ ID NO: 196379 - DNA, 201 bp, Homo sapiens
ggggtttcaccatattggtcaggctggtctcaaactcctgaccttgtgatctgcctgcctcagcctcccaaagtgctgggattacaggcgtgagccaccgygcctggccccgagatggacttctaagagcctggtgcctcctctcgctcctggcacctctcctcttcctgaattcctccctgccgagctctgcagatctgg

SEQ ID NO: 196380 - DNA, 201 bp, Homo sapiens
ttgggaggctgaggcaggcggatcacgtgaggtcgagagtttgagaccagcctgaccaacatggagaaaccccatctctactaaaaatacaaaattagccrggcgtggtggcgcatgcctgtaatcccagctactcgggaggctgaggcaggagaatcgcttgaacccagaaagtggaggttgcagtgagccgagatcgcg

SEQ ID NO: 196381 - DNA, 201 bp, Homo sapiens
tttctagtagcttttaaaaaaaaattatcctttctctagagcatcaggatctagtagccttgtctcctaaatactcatttttaaaacctttctttcttgtktttttttttttttttttgtacaggcagttgtgaaaaacttcaggacaaaaatgtttcatttaaggacttgtgctgctaagttgaggccattgacggcttc

SEQ ID NO: 196382 - DNA, 201 bp, Homo sapiens
tacaagtgacccaggtccctgaaggaagcacttcatgaccctatgaagagggcttctgcctggcacccactccatcccatcctcagtcacacttgattggrgtacatttcagaacaagcctcctgcttatcccctccttctggctgaatgggcagtcggcagtcttcattcagccaggcctggttagaaatccccttgact

SEQ ID NO: 196383 - DNA, 201 bp, Homo sapiens
agtgattctcttgcctcagcctcctgagtagcagggattacagaggcacaccaccacggctggctaatttttatatttttagtagagatgaggtttcaccrtgttggccaggctggtctcgaactcctgacctcagctgatctgcccacctcggcctcccaaggtgctgggattacaggtgtgagcctccatgcctggcca

SEQ ID NO: 196384 - DNA, 201 bp, Homo sapiens
gagagaggtcctagtgtctgaaggagtggacaaggccatcgcagctcatcgttagtgcaagagagaactgccatcagccagcgcctgaggaaagctcccartggcattgggaggccattggagagactgacgcaaggaagtgatgagatactggttggttataaagatgatttgttatagtttagaattgattagaggagg

SEQ ID NO: 196385 - DNA, 201 bp, Homo sapiens
acctcaagtgataacacctacctcagcctcccaaagtgctgggattacaggtatgagccaccatgcccggacaagattatcctggcccttggtgtaaagaktgatctttgacttgcaacctggacattctgggtgttatgttatggactcttgatcttgtttaaatctctaagcaatgcaggcttcctctgctggggcagg

SEQ ID NO: 196386 - DNA, 201 bp, Homo sapiens
aatcttgggggcttatcaccaaaaggaagtctgcttccactgggctcctgtaaacaagctttccctttaagtattagtgacacttacgaattttttttttwaatttagctaggtgtggtggcacatgcctgcagttctagctactccacaggctgaggtgggaggattgctgaagcccaggaattcgaggttacagtgcgc

SEQ ID NO: 196387 - DNA, 201 bp, Homo sapiens
catgcagtctaggcagcatcttgtgtgtttagatgagacttagtgggtcaggaccgtgtgtgtgtgtgtgtgtgtgtgtgtgtgtgtgtgtgtgtgtgtgtcgaacagcagagtgacatcaggtgacagccttgggttagcatcacagatgcagcaggcatggtgtggtgtgggtgagctgaagggaaatgcaaaccgttt

SEQ ID NO: 196388 - DNA, 201 bp, Homo sapiens
ccatgcagtctaggcagcatcttgtgtgtttagatgagacttagtgggtcaggaccgtgtgtgtgtgtgtgtgtgtgtgtgtgtgtgtgtgtgtgtgtgtgtcgaacagcagagtgacatcaggtgacagccttgggttagcatcacagatgcagcaggcatggtgtggtgtgggtgagctgaagggaaatgcaaaccgtt

SEQ ID NO: 196389 - DNA, 201 bp, Homo sapiens
tccatgcagtctaggcagcatcttgtgtgtttagatgagacttagtgggtcaggaccgtgtgtgtgtgtgtgtgtgtgtgtgtgtgtgtgtgtgtgtgtgtgtcgaacagcagagtgacatcaggtgacagccttgggttagcatcacagatgcagcaggcatggtgtggtgtgggtgagctgaagggaaatgcaaaccgt

SEQ ID NO: 196390 - DNA, 201 bp, Homo sapiens
ctccatgcagtctaggcagcatcttgtgtgtttagatgagacttagtgggtcaggaccgtgtgtgtgtgtgtgtgtgtgtgtgtgtgtgtgtgtgtgtgtgtgtcgaacagcagagtgacatcaggtgacagccttgggttagcatcacagatgcagcaggcatggtgtggtgtgggtgagctgaagggaaatgcaaaccg

SEQ ID NO: 196391 - DNA, 201 bp, Homo sapiens
  misc_feature (1)...(201): n = A,T,C or G
gaagggctgcctccctttcagtccagttgatgccagagccttggagttggctcttgttgtctgagatggttggacctgtacccaggagtctaaggctgtangcgctcctggccccagagcagccccaacttagaagactccattttcacaacagtttacagacatttgcataaagttctcattgccctgcctgatggtgat

SEQ ID NO: 196392 - DNA, 201 bp, Homo sapiens
tcagctgatctgcccacctcggcctcccaaggtgctgggattacaggtgtgagcctccatgcctggccagaatcccctctttttggtcaggaagagtgacrttgcccttcaaggtggcttggttccctgtccaggtttgaggagttcctacagcggaagtggtcctctgagaagcgctttggtctagaaggctgcgaggta

SEQ ID NO: 196393 - DNA, 201 bp, Homo sapiens
gggatctcggctcactgcaagctccacctcccgggttcacgccattctcctgcctcagcctcccaagtagctgggactacaggcgcccgccactacgcccrgctaattttttgtatttttagtagagacggggtttcaccgttttagccgggatggtctcgatctcctgacctcgtgatccgcccgcctcggcctcccaaa

SEQ ID NO: 196394 - DNA, 201 bp, Homo sapiens
ccaggcacatgcagcagagggatgggctgggccaactcagtgtcccctgccctcactgccccctccctccatctctcaggtatgccggccgggacccagcrgctgctccagccaccggcaacaagaagacccacctgacggagctgcagcgcctcctggacacggccttcgacctggacgtcttcaagaacttctcgtaga

SEQ ID NO: 196395 - DNA, 201 bp, Homo sapiens
tagatcatgtggtatctctgtgttcaactttttgtggaaatctcagactgtttcaaagtggctgtgccatttttacattcccactggaaatatatcagggwtcctttttttttttttttttttttttttgagacagggtcttaccccgtcacccacgctggagtgcagtggtacagtcttagctcactgcaacttctgcct

SEQ ID NO: 196396 - DNA, 201 bp, Homo sapiens
atctacctgcctcagcctcccaaggtgctcttattacaggcatgagccactgtgcccagcctgtgtctacatatgtttgaattccttttcgggtatatacstaggagtagaattgctagatcatgtggtatctctgtgttcaactttttgtggaaatctcagactgtttcaaagtggctgtgccatttttacattcccact

SEQ ID NO: 196397 - DNA, 201 bp, Homo sapiens
tctagtctgggcaacagagtgagaccctgtcttgaaaaaaataaataggctgggcgtggtggctcacacctgtaatcccagcactttgggcggccgaggcrgacggatcatgaggtcaagagatcgagaccatcctggctaccacagtgaaaccccgtctctactaaaaatacaaaaaaattaggcgggtgtggtggcggg

SEQ ID NO: 196398 - DNA, 201 bp, Homo sapiens
cgaaactctgtctcaaagaaaaaaataaataaataaaaaatatatgtatatgtatgtatgtgtgtgtgtgtgtatatatatatatatatatatatatatttaaaatcaacttttaaagaatagcaatagtaaaacagtcctgcttacagtgttccttttcctgaagttgtaattgtcagaactatgtgggaagtttgcttt

SEQ ID NO: 196399 - DNA, 201 bp, Homo sapiens
aagagcgaaactctgtctcaaagaaaaaaataaataaataaaaaatatatgtatatgtatgtatgtgtgtgtgtgtgtatatatatatatatatatatatatatttaaaatcaacttttaaagaatagcaatagtaaaacagtcctgcttacagtgttccttttcctgaagttgtaattgtcagaactatgtgggaagttt

SEQ ID NO: 196400 - DNA, 201 bp, Homo sapiens
acaagagcgaaactctgtctcaaagaaaaaaataaataaataaaaaatatatgtatatgtatgtatgtgtgtgtgtgtgtatatatatatatatatatatatatatttaaaatcaacttttaaagaatagcaatagtaaaacagtcctgcttacagtgttccttttcctgaagttgtaattgtcagaactatgtgggaagt

SEQ ID NO: 196401 - DNA, 201 bp, Homo sapiens
attgcactccagcctgggccaacaagagcgaaactctgtctcaaagaaaaaaataaataaataaaaaatatatgtatatgtatgtatgtgtgtgtgtgtgtatatatatatatatatatatatatatttaaaatcaacttttaaagaatagcaatagtaaaacagtcctgcttacagtgttccttttcctgaagttgtaat

SEQ ID NO: 196402 - DNA, 201 bp, Homo sapiens
ggttcttgcagatgtgcaacgatgacccagatgtcctgccagtgagtaatacaggccctgtcagcccagccattctcggggtgtctggtgggaaacctggrgaagagcaatctatctggtcatcctgaagtggcagaccgtgcctctgtccctttctccatcctggggagctcacgtgagtggacaggtgtggccccatgc

SEQ ID NO: 196403 - DNA, 201 bp, Homo sapiens; identical to SEQ ID NO: 33653

SEQ ID NO: 196404 - DNA, 201 bp, Homo sapiens; identical to SEQ ID NO: 33655

SEQ ID NO: 196405 - DNA, 201 bp, Homo sapiens; identical to SEQ ID NO: 33657

SEQ ID NO: 196406 - DNA, 201 bp, Homo sapiens; identical to SEQ ID NO: 33660

SEQ ID NO: 196407 - DNA, 201 bp, Homo sapiens
cattgcactccagcctgggccaacaagagcgaaactctgtctcaaagaaaaaaataaataaataaaaaatatatgtatatgtatgtatgtgtgtgtgtgtgtatatatatatatatatatatatatatttaaaatcaacttttaaagaatagcaatagtaaaacagtcctgcttacagtgttccttttcctgaagttgtaa

SEQ ID NO: 196408 - DNA, 201 bp, Homo sapiens
tgctgtggacactgggcctgttgccatcatagctgctcctgctggaagcttttgaagatggtttttgtgggggcatggtggctttatgtctttatgcctgyttctgttgctgggagtctccagggggcacagtgtgggaatcacatgcatgctctgcccctccctgcttgtagaggggaggggacaggatggttaaaagtg

SEQ ID NO: 196409 - DNA, 201 bp, Homo sapiens
atgaacccgggaggcagagcttgcaatgagccgagatcgtgctactgcactccagcctgggcaacagagcaagactccatctcaaaaaaaaaaaaaaaaaagaaaagaaaaaaaagaaaatatggtttggggttgtcttagtccattttgtattgctataaagtataaaggaatatctgaggttggataatttataatgaa

SEQ ID NO: 196410 - DNA, 201 bp, Homo sapiens
accagcctgtgctgagagcagactcagcactagtaccttttacctcagaggagtcccctgtggggagcccggcagctttttttttttttttttttttttttgagacagggtctcactctgtcacccaggctggagggcagtggcacaatcatggcccactgcagcctcaacctctgggattaaccaatccccctacttcag

SEQ ID NO: 196411 - DNA, 201 bp, Homo sapiens
caaaaaagaaattccagggaactccctggtgtgttttgccttgagacctccctagctggtgtgccttattctctccacctttcagagttgtcttatgattkttttgcatataatgtctaggatttttagttgtacttattgggggaatagggaagaatatgtgtactccgctttcacaaagcactcatatatagatctagt

SEQ ID NO: 196412 - DNA, 201 bp, Homo sapiens
tgattgcaccactatactctggcctgggtgaccctatctgtaaactacacacacacgcgcgtgtgcacacacacacacatctgttagatcctgttagttaatggctgttgagttctgtatttttgctgaatttctgtctagttttttagtcagttattgagagaggggtattaaagtcttcagctataaatgtgggtttgt

SEQ ID NO: 196413 - DNA, 201 bp, Homo sapiens
agagatcagactcccctgcatgaggcagatggtccaggcctgtgcattatcattgtgtcttttctagtttgtgtctagcagcagtatatagcagtgctctyggtagtgggaccatctgagtgacgtacatctgtgccctagccagcattataaaagaacctgtctgaaaaaaacagaagaccttaaggaccagcatactgg

SEQ ID NO: 196414 - DNA, 201 bp, Homo sapiens
tatgattgcaccactatactctggcctgggtgaccctatctgtaaactacacacacacgcgcgtgtgcacacacacacacatctgttagatcctgttagttaatggctgttgagttctgtatttttgctgaatttctgtctagttttttagtcagttattgagagaggggtattaaagtcttcagctataaatgtgggttt

SEQ ID NO: 196415 - DNA, 201 bp, Homo sapiens
ctatgattgcaccactatactctggcctgggtgaccctatctgtaaactacacacacacgcgcgtgtgcacacacacacacatctgttagatcctgttagttaatggctgttgagttctgtatttttgctgaatttctgtctagttttttagtcagttattgagagaggggtattaaagtcttcagctataaatgtgggtt

SEQ ID NO: 196416 - DNA, 201 bp, Homo sapiens
tctatgattgcaccactatactctggcctgggtgaccctatctgtaaactacacacacacgcgcgtgtgcacacacacacacatctgttagatcctgttagttaatggctgttgagttctgtatttttgctgaatttctgtctagttttttagtcagttattgagagaggggtattaaagtcttcagctataaatgtgggt

SEQ ID NO: 196417 - DNA, 201 bp, Homo sapiens
tagttgtgtaaattttgatgatgctccagtaactgtttcttcaaacgtgggtgagaattaagctgtaaatgctaattttaatgtaattttactttttttttaccccttccctctttttttttcttctgtccttttgtgtgtgtccttccctctcatcgttggccactcatagatacgagggcaccatgtagcacagctgga

SEQ ID NO: 196418 - DNA, 201 bp, Homo sapiens
tcgcttgaacccaggaggcagaggttgcaatgagccgagattgcactactgcactccagcctgggcaacagagctagactctgtctcaaaaaaaaaaaaaatttttaaatataattcacataacataaatgtaattatttggcctggtcctggtgactcacaactggattcccatcactttgggagactgaggcaggagga

SEQ ID NO: 196419 - DNA, 201 bp, Homo sapiens; identical to SEQ ID NO: 33663

SEQ ID NO: 196420 - DNA, 201 bp, Homo sapiens
taccggcgcaacggccacaacgagatggatgagcccatgttcacgcagccgctcatgtacaagcagatccgcaagcagaagcctgtgttacagaagtacgmtgagctgctggtgtcgcagggtgtggtcaaccagcctgagtatgaggtacgtccctgcggctctatcccagtgcgcctttccagggctggcgatgactag

SEQ ID NO: 196421 - DNA, 201 bp, Homo sapiens
agctccaaatagttcaggcctgtaagcaccaaggaatgcttcccaggcaggagctgtggtggtgaggagggccactcctcattgacagagcagctctactrtgtgaaggagagatacacagaatcctaattctagagaaggtaaactccagggcaggcatgaggaatgaagaacgtggccatcacctaggagagatggggc

SEQ ID NO: 196422 - DNA, 201 bp, Homo sapiens
gtgttttgccttgagacctccctagctggtgtgccttattctctccacctttcagagttgtcttatgattgttttgcatataatgtctaggatttttagtkgtacttattgggggaatagggaagaatatgtgtactccgctttcacaaagcactcatatatagatctagtttctcaaatagctaaagaactaaaagtgta

SEQ ID NO: 196423 - DNA, 201 bp, Homo sapiens
ggtatcagggtaattctggcttcataaaatgaattgagaagtgtttctcctattttccaaaagacagtaaatagaattggtgttaactcttcttcaaataytttatagaattttccagcaaaatcatttgggcttagaggttagtttttcacaaggtttttatttattaattagatttccttattagccatagggcttttc

SEQ ID NO: 196424 - DNA, 201 bp, Homo sapiens
tggcatgggccatgggcaggtgttgtaatggggcaacataggggaggtcctgggtctctggcccttcatgccatggcctggcaagtaaggctctctccctkgggcaagtgtattctgccttagaaaggagatgcatggagttttgtaaatgctatatgctttaaagtgttatccatgtggatatttgcataaggaggaagc

SEQ ID NO: 196425 - DNA, 201 bp, Homo sapiens
ttgttggaaaagctccaggtagggggcagtgatggagggcaggagccgttggcaaagccattcattctcaaagggcactgatgatgctgccctgaaaacartctgccagctgagcacctgggtggttggccagtttggtctgcagtgcaagcagggaattctgtccactctgagttttttaataaagtggaatatatgcta

SEQ ID NO: 196426 - DNA, 201 bp, Homo sapiens
ttgtatttttagtagagatggggtttcaccatgttggccaggatggtctcaatctcctgacctcatgatccgcccgcctcagcctcccagaatgctgggaytgcaggcgtgagccactacacctggccggactttataaattttaaaaagctgcaaatgcaggaccatcatcttaaatagcctgtgtttaggacttttaca

SEQ ID NO: 196427 - DNA, 201 bp, Homo sapiens; identical to SEQ ID NO: 33659

SEQ ID NO: 196428 - DNA, 201 bp, Homo sapiens
tgagaaattactaaaaggttagtgccggttttttagatgaagtcatcatgttattaaaaaatagtctgtttagtctctaggttactgttctctggctcccctccccatccaagactcccttggagggaggtttgaggactttgggattctcatatctcttcgcgtccatgattggatcgtgaggtgaggagatagccttta

SEQ ID NO: 196429 - DNA, 201 bp, Homo sapiens
acctctgcctcccaggctagagtgattctcccaccaaagcctcccaagtagctgggaacacaaggtgtgcaccaccgtgcctggctaatttttgtactttygtagagacggagtatcaccatgttgcccaggctggtctcgaactcctgagctcaagggatcctcctgcctcagcctcccaaagtgctggccaacccactg

SEQ ID NO: 196430 - DNA, 201 bp, Homo sapiens
gctctgtgctttcctctgccctgcccacctgcctaaagcctgcctccctgttcttgttaactgatgcccatttcttttctttcctttttctttttcttttytttttttttttttttttttgagacgagtctcgctctgtcaccaagtctggagtgcagtggcgcagtctcggctctctgcaacttccgcttcctgggttca

SEQ ID NO: 196431 - DNA, 201 bp, Homo sapiens
tattctgtttgtatcataaatggaattgttggcctaatttcctcttcttattgttcattgttagtgtatagaaacacaactggttttggttacgtgcataygatgcgtagtgcttaagtcagggtattagggtgtccgtcacccgagtacgatacatgtttgttaaccttactcctttatcaaacgttgaacttaattcct

SEQ ID NO: 196432 - DNA, 201 bp, Homo sapiens
ctctgctctgtgctttcctctgccctgcccacctgcctaaagcctgcctccctgttcttgttaactgatgcccatttcttttctttcctttttctttttcytttctttttttttttttttttttgagacgagtctcgctctgtcaccaagtctggagtgcagtggcgcagtctcggctctctgcaacttccgcttcctggg

SEQ ID NO: 196433 - DNA, 201 bp, Homo sapiens
tttgtgtttttttgagacagagtctcactctgtcatccaggctgatgcaatcgtagctcactgcagcctcaattcctgggctcaagtgatcctcctacttyggcctcccagagtactgggattacatgtgtgagccactgtgcccagacttttattctgtttgtatcataaatggaattgttggcctaatttcctcttctt

SEQ ID NO: 196434 - DNA, 201 bp, Homo sapiens
tgatgtgatatcatggatgttactgaagactgtggttgcagattgtggcagatttcacacacacacacccctacacacacacacacacacacacacacccytacacacacacacacacacacacacccctacacctgcagattatatctagaataaaactgagccctgaggtttcagaatcaaggactattatgtgcccag

SEQ ID NO: 196435 - DNA, 201 bp, Homo sapiens
gaatcttgggggcttatcaccaaaaggaagtctgcttccactgggctcctgtaaacaagctttccctttaagtattagtgacacttacgaatttttttttttaatttagctaggtgtggtggcacatgcctgcagttctagctactccacaggctgaggtgggaggattgctgaagcccaggaattcgaggttacagtgcg

SEQ ID NO: 196436 - DNA, 201 bp, Homo sapiens
gtgattcttatgcctcagcctcccgagtaactgggactacaggtgcacgtcaccacgcctgactagtttttgtatttttagtagagatgggattttactttgttggccaggctggtcttgaacccctggcctcaagtgatccacccaccttggcctcccaaagtgctgggattacaggtatgatcaaccacgcctggccat

SEQ ID NO: 196437 - DNA, 201 bp, Homo sapiens
catcttagcccttaaactagatttaatggttttttgttttgttttgttttgagacagagtctcactctgttgctaggctggagtgcagtggtgcaatctcrgctcactgcagcctccacctaccaggttcaagcaattctcctgcctcagcctcccaagtatctgggtctacaggcatgcaccaccacacccagctaattt

SEQ ID NO: 196438 - DNA, 201 bp, Homo sapiens
gaattgcttgaacctgggatgggaggttgcactgagccgagatcacaccactgcactccagcctggactacagagcaagactccgtatcaaaaaaaaaaaatctccagctgttgtggcagctctgctgggcagcacttaactatgtgtcagattcagtgactgcggatagcaaaatgtcatgatttacttaaacaggatca

SEQ ID NO: 196439 - DNA, 201 bp, Homo sapiens
ttcccgtgagtcatcttaagggaagtttaaaaatctcagctgggtgtggtggctcacgcctgtaataccagcactttgggaggctgaggtgggcagatcaygaggtcaggagtttgagaccagcctggccaacataatgaaaccctgtctctactaaaaatacaaaaattaaccaggtgtgatggcatgcacctgtagtcc

SEQ ID NO: 196440 - DNA, 201 bp, Homo sapiens
tcctgggcattttgggcaagatttccaaaatgttttatgtttgaaggccaactgaagtattaataaaaacttactgagaactcttagtgaccctcggttgrgcaaaacacatttgaggaatccagagtcgaaatgctgggggatcatcagcctgttgtcatccaccctggtggccagtctcttctttacactctggcttct

SEQ ID NO: 196441 - DNA, 201 bp, Homo sapiens
gcgggtgctttacccgcacacgggaaagggtgcagtgttccttaggtcatgcctcatgggccctattggcctttctgagtgtatgttgtcactttacttawacctcctcaaatactaggtgctttctccctgctttgggaggctaaaaaacaaatacacaagaaaaagaaccaggctagccctatttgagcaaatctccca

SEQ ID NO: 196442 - DNA, 201 bp, Homo sapiens
ggccttttagctcattatgttcgtatttttttcctgtttgtttctaacttctctgtattacatataagggcattttctaaacttttcaccacatgattacygatgtaagtcatgtcttgttttttttggtttgtttttgtttttgtttgttttgttttgtttcagacagagtcccactgttgtccaggctggagtgcagtg

SEQ ID NO: 196443 - DNA, 201 bp, Homo sapiens
aattgaattgcttattggtagggagaattccccacacatttagtcacagaaatcttctgtgttggttgttgtgtgagagcagaggaatagactcataataygtcttttgcgtctgctgctttttactgagcataatgttttcaaggttcctccaggttggagcatgcaccagcacttccttagtttcattgcagaatgctg

SEQ ID NO: 196444 - DNA, 201 bp, Homo sapiens
agggtttaaggatcatgtaatgatgtgtgggtttttttccctcaaagacttatttactgagaaacagcagactgtttttgctaggtcttgcctttttaatyacccccctacctagccaatgtcatattgataggcgtcagtagttggtttatttccctcattctttgtgccctgggatagggtacctcctacccaactggg

SEQ ID NO: 196445 - DNA, 201 bp, Homo sapiens
cgtccttcccgaccgggacgcactctccttcccgcctgtgaggaccgcgtcgctttgtccgaaagacagtgtggcctgctcgagttgcgtcggagcatctrgctttggggtggccctgggtgggactgcctgtttggattaccgcgcagaccttggcgccgcccccacacctgctgccagaagttgggtcgaacagattga

SEQ ID NO: 196446 - DNA, 201 bp, Homo sapiens
accctgtctgtgttgatcgggcctgtgtgcagcctgttggccgaggtgagagggggtttggggtggtacaggcaaagctccatctgcacatgtgtgaagaracaccagacaagtagagtcagccttcagagcaacctccgcctcctgaattcaagtgattctcttgcctcagcctcctgagtagcagggattacagaggca

SEQ ID NO: 196447 - DNA, 201 bp, Homo sapiens; identical to SEQ ID NO: 33662

SEQ ID NO: 196448 - DNA, 201 bp, Homo sapiens
gttagtgccggttttttagatgaagtcatcatgttattaaaaaatagtctgtttagtctctaggttactgttctctggctcccctccccatccaagactcycttggagggaggtttgaggactttgggattctcatatctcttcgcgtccatgattggatcgtgaggtgaggagatagcctttagaaccctctctttgagt

SEQ ID NO: 196449 - DNA, 201 bp, Homo sapiens
catgattggatcgtgaggtgaggagatagcctttagaaccctctctttgagtggtcagtcacgtggtattccctctgaaaccctggagcagatgctttgtrtagctgggctggggttcccccaaatagggttgcataattattgaggacagatgaggcctcaaccagacgaccacaggtgaccccagactgtgggtcttcc

SEQ ID NO: 196450 - DNA, 201 bp, Homo sapiens
caggaattcgaggttacagtgcgctgtgatggtgccactgcactccatcctgggcaacagagggagaccctgtctctaaaatttaaaagaaggtggggggygggtatattcccatgactgctgggccaccaggtcccattttttcaggaatgccactttgtctcagccttattgcccagatctagcccagtccttccctgt

SEQ ID NO: 196451 - DNA, 201 bp, Homo sapiens
tattgggagcctctgggtttatgtatgagtcagatgcgtagagttgctcaccatggagggcccagggtaggcaggcattattgaacaactgctccatgtgytcttttcaatctttgcagaccccacccacgtctcccttgctcagacctggctccccatggcttatgaaagggggctgagtgcagaaggtggcaggcagga

SEQ ID NO: 196452 - DNA, 201 bp, Homo sapiens
aggtgatctcagctcactgcaacctccacctcctggttcaagtgattctcgtgcctcagcctcccgagtagccaggattacagatacgcgccaccacgccyggctaatttttgtatttttagtagagacggggtttcaccatgttggccaggctggtctcaaactcctgacctcaatcagtctgcccacctcagcctccca

SEQ ID NO: 196453 - DNA, 201 bp, Homo sapiens
aataaagacggggtttcaccatgttggccaggctggtcttgaactcccgacctcaggtgatccgaccgcctcggcctcccaaagttctgggattatgggcrtgagccatcatgcccggcctgatgcctgtttcttgatggttttttcttcttgcacttttcacgtgtcagctcctaaagtgtgtacatgtggtcgctgcag

SEQ ID NO: 196454 - DNA, 201 bp, Homo sapiens
aggtgagcagctgccacatgcagagagcactgaggatactgtttctagcctttcaagagcttcctttgaagaaagagcactggtcactgtgaggaaagtgyattatggttgcatagaattctgagtttgtgggagcttggggagcagtgacttttgacttggaaaacagagcttcatttattacagctaagtgcttttagt

SEQ ID NO: 196455 - DNA, 201 bp, Homo sapiens
tcttgggggtggttagtggttttctccttaatctcccatattctttttcactcacctgcagcctggtcccagctcacctgcccagcctggtttcttaaccrtctgtacaccctgcatgtggcagtatcatgagtctcagcacatggtgggcaggcactggccaggtgctcctgttgtctattctctttggccaaatgtctt

SEQ ID NO: 196456 - DNA, 201 bp, Homo sapiens
cacagagcatggcatctgctggtgcttcgtgcgggtccccagcgtatttgcttgtcaagtcagagctcctaattattacctctgttgtcctgtctcagccmccgccaccatgtgctccatgaccagaatgtggacaagagaacctgcatccccatgaaccatctctggcccaatcaggccccctatactgtgtgcaacagc

SEQ ID NO: 196457 - DNA, 201 bp, Homo sapiens
gtgggccacatgtggcccaggacagctttgaatgtggcccaacacaagtttgtaaactttgttaaaacattatgagatgtttttgcgatttttttttttttaaagctcatcagctgtcgttagtgttagtgtattttatgtgtggccctagacaattcttccaatgtggcccagggaagccaaaatattggacatccctgt

SEQ ID NO: 196458 - DNA, 201 bp, Homo sapiens
tgttaagagtaagaagctcattttagtcatcttcctgttcacaaaccttacagtatgccacatatagttaatagatatttgttgaattgaatgagaattaytggatttttagaaataatggtattcattggctcagcatcgtgcctcacacctgtaatcccagcccttttgggaggctgaggtgggtggatcacctgagtt

SEQ ID NO: 196459 - DNA, 201 bp, Homo sapiens
tgactagaaaaggtgggccacagggccagttctcacttttgccagttatgaggatacacgtgagaggatgtgaaatatttacaactacagcatttcaatgsataactttttggagaatctgggccactgagatgctttataaaggaagtgggccttaaacagtgttttggggaagggaaggggatgttttcaggttgaggt

SEQ ID NO: 196460 - DNA, 201 bp, Homo sapiens
cctctcaggttcaagtgattctcctgcctcagcctcccgagtagctgggattacaggtatgtgctgccactcccagctaattttgtatttttagttgagayggggtttctccatgttggtcaggctggtctgaaactcccaaactcgggccatccgctcgcctcggcctcccaaagtgctgggattacaggcatgagccac

SEQ ID NO: 196461 - DNA, 201 bp, Homo sapiens
tatagataaccctgccggtagagtgcatctccatcacacgtgtgtgcacatccacccaagtagataatcctgctggtagagtgcacctccgtcatgtgtgytgccatccatatgtgcatgaaggcacagaagctcataacagtggtgaacattggagagggcagctgagacctcaaccttgcaaaatgggtttctttctgt

SEQ ID NO: 196462 - DNA, 201 bp, Homo sapiens
ctgacctcaagtcatctgcccacatcggcctcccaaagtgctgggataacaggtgtgagccactgggcccagccacctggcttttttttttttttttttttgaagatggcattttgctgttgttgcacaggctggagtgccatggcgtgatctcagctcactgcaacctccacctctcaggttcaagtgattctcctgcct

SEQ ID NO: 196463 - DNA, 201 bp, Homo sapiens
tactaagagagtacattggtggtatagtggtaagtatagctgcctcaaataatatactaagaggtattattaatacacccatagtggaaaaaagtacagcrtatatttggagtatacctctgtcatatgtgtgtatgcacagccactagtatagataaccctgccggtagagtgcatctccatcacacgtgtgtgcacatc

SEQ ID NO: 196464 - DNA, 201 bp, Homo sapiens
ggctcaagcaatcttgctacttcagcctcctgagtagctgggactgcaggcacgtaccaccacgcctggctgttttttttcttttcttttcttttcttttyttttttttgagacggagtgtcactctgtcgcccaggctggagtgcagtggcgcgatctcggctcactgcaacctccgcctcctgggttcaagcaattctc

SEQ ID NO: 196465 - DNA, 201 bp, Homo sapiens
atttttgtcagtgctcttctgcatccattgagatgaccatatagtttgctaatgatgaagtacattaattttcaaatgtggaatttttgtcttatgttcaygaggggtattgatcttttgttgtaatgcctttatctggttttgctatcagggtaatgctggcctcgtgaaatgttaagaggaggttcctcttctatattc

SEQ ID NO: 196466 - DNA, 201 bp, Homo sapiens
ttttattttcagtaaggctgtgatgaacattctcatgaatatttctgcacaggcctgatacatatcacctgttagattcttccaccagccgtagctaaggrttcccctcatcgatgcgtgtgaagtttccataacagatattctagtgccttttaactctaggcactctcctaggtaccaggcagagcaccggtgtgctcc

SEQ ID NO: 196467 - DNA, 201 bp, Homo sapiens
ttagtcttgtggccagctttttttgagtcctaaagactcaagatcaaatagatattctaaaagttttaatgtttttttttattattatgctttaagttctrgggtacatgtgcacaacatgcaggtttgttacatatgtatacatgtgccatgttggtgtgctgcacccattaactcgtcatttacattaggtatatccat

SEQ ID NO: 196468 - DNA, 201 bp, Homo sapiens
ggaaagctcttccttgcagagaatgccaactaataaatttaggagtaatcgaaactggtgtttgccatccatcaaccacccaaggggctggttcagacgcwgttgtcaatactgctgaggctggggtggaggtttgaggaggaacaggatgtaaagtttcttctcacaaaatactaccactatactcattgccaaggaaaa

SEQ ID NO: 196469 - DNA, 201 bp, Homo sapiens
taaatactgtaaatctactactgtcatgcttacagtgttagaggaagggaaactgtcatcataggtaatggagcctgggctggggaagtgattcccgcatygatcaatgctcactgtaaagaacgagtatgacccacagggacgcagaggtcattccatggcttcaagctcatgggccaggacagtgccacagaaacttca

SEQ ID NO: 196470 - DNA, 201 bp, Homo sapiens
atggtatataattctctttatatgtctttgtatctgtctctttatatattttgcatccatattgatgagggatattggtcattttctttttttgtactatmtttgcttttggtatcagggtaattctggcttcataaaatgaattgagaagtgtttctcctattttccaaaagacagtaaatagaattggtgttaactctt

SEQ ID NO: 196471 - DNA, 201 bp, Homo sapiens
actacaggcacccgccacaatgcacagctaatttttttgtagttttagtagaggcggggtttcagcatgttggccaggctggtctcaaactcctgatctcrggtgatccacccacctcgacctcccaaagtgctgggattacaggcatgaaccaccatacccaaccatttctttagtcatagatataccttcaagttttca

SEQ ID NO: 196472 - DNA, 201 bp, Homo sapiens
tatgcaacccagttccaaacaggccactgaccagtactggtctgtggcccgggggttggggatccctggtttagagaataataacaggaaaaaaaagtgtwcatgttcagtacaggcagttttttaccaactattttcaatccacgtttggttgaatccatggatgcagaacccacagatacggagggctgactgtataca

SEQ ID NO: 196473 - DNA, 201 bp, Homo sapiens
cccggaggtcttggagcctcttccctactgctcaccccttagtacagcaaacctccctgctggcacccccagtcccatcacagcctgtctgccctgtgccyctccagcccccagagacttctagacctgtgggatcctcttcaggtgctcagagcaggccaaactccccagctggtagacttgctgctccctgatgaagag

SEQ ID NO: 196474 - DNA, 201 bp, Homo sapiens
attggtctcgaactctcacccttgatgtatgcaggtcttcaagaaaacagcaggtcagatgtgaccgctagacagtttgtagaacacttcaagacccgtcrtctcatttgaacctcagagagccgggactctggagccacactccctgcattggaatcccagcccactattactagctgtgtgaccttgggctagttgctt

SEQ ID NO: 196475 - DNA, 201 bp, Homo sapiens
aattttttgtatttttagtagagatggggtttcaccgtgttagccaggatggtctcaatctcctggcctcgtgatccacccgtctcggcctcccaaagtgytgggattacaggcgtgagccaccacgcccggctataatttttatatttttagtcgagatggggtttcaccatgttggccaggccgttctcaaactcctga

SEQ ID NO: 196476 - DNA, 201 bp, Homo sapiens
tctgagtgctcaaccatcagcttctctgtgtgcctgtgttactgcctaccttcctgaccccatcccccaggcccacaagcccagacagtaagggtcaggarcatgttttgtgtatccaaataaatgccttgatttcaccagtggctcagaaagctgttatgtatagtagaaatccgatgaaaagtttacaggtagaaggaa

SEQ ID NO: 196477 - DNA, 201 bp, Homo sapiens
atttgcctattctggaatgtgatattattatcgtatatgggtttttgtccatgattcctggttccatagttcttgttatttcctaagtaactaaaataagsatgtattttgttaaagtatttctccttggttcctgaagtagcttccaaacagcttcagagtgataaaggtggaagtcttttgttacaatgttggggtgct

SEQ ID NO: 196478 - DNA, 201 bp, Homo sapiens
gtattgggcaccaggggggagtgataaggattaatccaagaagaatgaacctttgggtccttcctgtcacctttatctgcacccacatcaccacactgacyatagtttctagttctgcctactagccacatgttactattgagcacttgaaatgtacaaaatatttgaatgactttttaaatgttgaaaagataatgtttg

SEQ ID NO: 196479 - DNA, 201 bp, Homo sapiens
agatcacgccactgcactccagcctgggtgacagagggagactccttctcaaaggaaaaaaaaaaaaaaaagaagtggaaccaattattactttaccaggytctataattttaaatactgtaaatctactactgtcatgcttacagtgttagaggaagggaaactgtcatcataggtaatggagcctgggctggggaagtg

SEQ ID NO: 196480 - DNA, 201 bp, Homo sapiens
ttctttcttgtttttttttttttttttttgtacaggcagttgtgaaaaacttcaggacaaaaatgtttcatttaaggacttgtgctgctaagttgaggccmttgacggcttcccagactgttaagacattttcacaaaacagaccagcagcagctaggacatttcaacagattcggtgctattctgcacctgttgctgctg

SEQ ID NO: 196481 - DNA, 201 bp, Homo sapiens
acctctgagcaagggcattaatctattcatgagggatccaccctcacaaacaaaacatctcccatgtggccccacttccaacattggggatcaaatttcakcaggaggtttgtgggggaacaaacgggttaataaaaatatcttaaatagccgggcgcggtggctcacgcctgtaattccagcactttgtgaggccgaggc

SEQ ID NO: 196482 - DNA, 201 bp, Homo sapiens
aattcacaaggcactttaggcaatgccagttgggtggttggaatgcattttgagtattttaatcttttatgtttgatttatgaatgacttatcagaaatayatgtagtcattccttggtatctgtgggggattggttccagggcacactgaggatactaaaatccaaggaagctcatgtcccttgtataaaatgaaatata

SEQ ID NO: 196483 - DNA, 201 bp, Homo sapiens
taatcccgtgctggacacttatggctccttttagtcttaatttggccaggaaacaataagaacatttcatcaggtctagtcagatgttggagacttcgcaraataccagttcactgtgcattcctggagcctgagaaaatgctgatgtaaggtattcaagcgctagtgattcttgaactgtgctttttgctgtactctagc

SEQ ID NO: 196484 - DNA, 201 bp, Homo sapiens
ggtacatgtgtgggtttgtaacatgggtacgttaagtaatggtgggaattgggtttctagtgtacccatcacccagataatgaacattgtacccaataggyaatttttcaaccctcactctcctaccaccctcccccaccgccacttgataatctttaacttcacatgttaagagcaatctcagcacttgtggctttttgt

SEQ ID NO: 196485 - DNA, 201 bp, Homo sapiens
tgtgttcgaagcttgtgctgagtggcggctgcaagaggaaaagcagtcttgccctgttatcctagcaggatgattaaataagtttaaacaacagttaaaaktctagctctcttttctctctctctctccccctctccacccccttccctctttcctttctctctcctctctctcccggcccttaaaaagaaaaataaataa

SEQ ID NO: 196486 - DNA, 201 bp, Homo sapiens
acttagttttcctttgcctgggaacctctatttctccttcattcctacaggacatttttggtggatgtaagattctggttagacataatccttttcccttwtctttcaggtcctgaaaagtgttgtgccatttctttcttttcttttcttttcttttttttttttttttgagacagagtctcactctgttgcccaggttgg

SEQ ID NO: 196487 - DNA, 201 bp, Homo sapiens
ttttcaatacatattaagtatggaaaccttacctccttttatatctctttactgtcctgcatttataatataattatcttagatattttctctacatacawttagaacttcatcagacagagttataagtttgcttcaaccatcaaacataatttagaagacccaagaggaggagaatctgatgtatttacccagattttt

SEQ ID NO: 196488 - DNA, 201 bp, Homo sapiens
tgaccctcttaccatgatggaatgtccctctttgtctccagtaattttctttgctctgaagttacttcatctcatattaatataagccattcctacttacrtttgattaatgtttacatgatgcattttttcctccctttacttcaacttgtctatatcacatttgaagtgagtttcttgtggataagcatataggtgggt

SEQ ID NO: 196489 - DNA, 201 bp, Homo sapiens
aaatgacgctgcctgatggctttccatcgtcagggtgctaacctcccctccttctgattcaccttattccagctgttctatgaatcatttccatgtttaayaaaattgaccccctgaccatgtaacccacccacttctcccttgatgtgtgtgtgtgtccctgtgatggtgtctgtgctacctgttactgtggtaatggtg

SEQ ID NO: 196490 - DNA, 201 bp, Homo sapiens
tttgataaccattccttgattttcagggaaagcagccagcctcctgaaggaattgggaagacagtgtagtatagtaataagagggtaggtcccagcgtttmtaagctcctgtgcctcatctgtaggtggttgagagaatgaaaggaggtagcatgagcagggcactcagctcggaggcagtgcctagccaacattgcttat

SEQ ID NO: 196491 - DNA, 201 bp, Homo sapiens
gagggtctctatgcgttcagattacaggtgcaggctgttggcctgctgctgagtctggcatcgctgctcatctgtcgacaccgttctgcttcctcctttcrtgcttatgaaacacagtactggtgttttctatgggtgaaactaagtggaggaaaagcacagatacacaaactgtcccattatgcagtgttatgggccttt

SEQ ID NO: 196492 - DNA, 201 bp, Homo sapiens; identical to SEQ ID NO: 33669

SEQ ID NO: 196493 - DNA, 201 bp, Homo sapiens
cttaaaaagaaaaataaataaataaaaacatttggaattctaatagaacccactgagcttctgaaaggaagtgcattatgctgtgctgtgaaggagcccarcaggggctcacggtcactcagcaggatgatggatgcaggcttcagggccaggagccagacgcagcaagaaaaaaccaaaaatttggattatgaagtaaat

SEQ ID NO: 196494 - DNA, 201 bp, Homo sapiens
cgcttgaacccaggaggcagaggttgcaatgagccgagattgcactactgcactccagcctgggcaacagagctagactctgtctcaaaaaaaaaaaaaawttttaaatataattcacataacataaatgtaattatttggcctggtcctggtgactcacaactggattcccatcactttgggagactgaggcaggaggat

SEQ ID NO: 196495 - DNA, 201 bp, Homo sapiens
tgactgggactacaggcacatgctactacacccagctacagtggtttttagtatgttcacaatactgtgcagtcacatctctggtggttgttttctttaarttattttttctgaataccaaaaaatacatgcttattatagaatgttttaaatattctacaaaaaagaaaaagggaaggaaaaaaaaagtattccacaaaa

SEQ ID NO: 196496 - DNA, 201 bp, Homo sapiens
tatgaaaattaaacccaagttcccttgttggggtctaacctggagggaaggctgcttcctgacattgaaggggaggccaagactgtgaaaatagggaaggygtggggagggagaagggtaaggaagcctcaggcccatggcattgctgcatcttctatctttctgctgcccactgtggccttgattgcccagcacggagag

SEQ ID NO: 196497 - DNA, 201 bp, Homo sapiens
ttcaagaagtaatttacaatgcttcaaagcactcaggtgttggaaaatctgtgtgctttctgtaaattgtgacaaccagaatatcttctattgttctcttmactctcctcttctttggtttgtgtcttttgtttgccttttattttaaaaatataaaaaagtacagataaaagagcattcacatactcagtactaagaatg

SEQ ID NO: 196498 - DNA, 201 bp, Homo sapiens
ataaattctgagtataacttttcacagtgacaaaaatgattgagatgtactttactgggttttttgttgttgttttgttttttgagacagtctctttctgkagcccaggctggaatgcagtggcacgatctcgactcactgcaacctctccttccagattcaaccaattctcctgccttagcctcctgagtagctgagact

SEQ ID NO: 196499 - DNA, 201 bp, Homo sapiens
tctttatgccttttgccagatttgggagatttgtagccattatttctttgaatgcttttccagcccctccttctgccttcatcagggactccaatgacatyaatattagatcttttgttatttccctgaggccttgttctgtcttcaagttcactgatttcctctgtctttattctgccctttaacccatgctaaagcttt

SEQ ID NO: 196500 - DNA, 201 bp, Homo sapiens
tccccagaaatgcctgtgtttttagctttttggaagactaaaaccagagtgcacagagcagggagccaaaccttccaggcctggctggtagtgtagcccakagagccccacaggttcttgctcagctgcctggatatagagaagggagtggatggtgcacactgcacatgcaccacgaagggcaaaactgccggggttgtt

SEQ ID NO: 196501 - DNA, 201 bp, Homo sapiens
aacgaggacgtacaagcactcaaggagctgatattacataacccggtaagaggcaccatggaagtgtctggagctgcagacatgggggcactcaaagatcytgatgctccttcttaggggattctttggtgttttgggtgggacagttgtcacttagtgtctcatccctggtcctgaggcactaaaagccagtggtctaaa

SEQ ID NO: 196502 - DNA, 201 bp, Homo sapiens
tcttaccctccttctcaacttttatttaagctgtgctaaatgttttcttcaagggaaccagatttagttctttacagaattttccagtgaaataaaacatrttgtaatagctgtgtttgagatgaaataagaggttgtgggtagaggggaggcacctaaaggaaaagaggaaaggtgcctgggctacctatgcagataacc

SEQ ID NO: 196503 - DNA, 201 bp, Homo sapiens
gctgttgctccataggaaggcggtgggtaacgagagagctgaggggaggaaggaggcaagctccaaaagcctgggaagggcggttcccgtttgtctgaggytttctcttggccctgtacccgtgcaggccggcctgagaacctggtgctgttgtggcaaacactctgggctggagttcaggttacctggatccttgtccgg

SEQ ID NO: 196504 - DNA, 201 bp, Homo sapiens
tacctactgtgctcgggatgtccgagtggccaatgtctcagctgctgaagactcagtctctcagaggtgggtaaaagcagcaaagctgtacctgaatgaakctacacagtgttgtggggttgggtttgtgtgtggcaaaaaagagagcaaatccagggtgagatcccagctgctacattctgcctgatactgatgtcttgt

SEQ ID NO: 196505 - DNA, 201 bp, Homo sapiens; identical to SEQ ID NO: 33711

SEQ ID NO: 196506 - DNA, 201 bp, Homo sapiens
gctttcttctccacagagaacaggggccccattctgctcccctaccagttccggatggaggagatcgagggcttccgctatcgctgcagggtgagctgctrtggtggggaggggaatgagaggggaggggctgtggcccagggattgcaccgtcttgctgagcatccaggtgtgaagggaggatttggggcagcctcactg

SEQ ID NO: 196507 - DNA, 201 bp, Homo sapiens
agtgttgtggggttgggtttgtgtgtggcaaaaaagagagcaaatccagggtgagatcccagctgctacattctgcctgatactgatgtcttgtccacctscagagctgtgctgatggagaagccagatgtggtagtagggaccccatctcgcatattaagccacttgcagcaagacagcctgaaacttcgtgactccctg

SEQ ID NO: 196508 - DNA, 201 bp, Homo sapiens
aagagattaagaagaggaaaaaggaaagggtgatggttactgtgatactagggatggcagaggggccttgagcttgctctgctgagctgattctctgtccrctcttggctgcaggtgccacatcatctcacagttcaaccaaggcttctacgactgtgtcatagcaactgatgctgaagtcctgggggccccagtcaaggg

SEQ ID NO: 196509 - DNA, 201 bp, Homo sapiens
taccatggggtactccttgggagaggagaagagagtgggtgacgggttcttgggcttggggccacacaggccacccccatccacacacggggacagatggrtcatcactgtaagaggcccaggtgcagctaacctgcatgttcggcatcccaggaaggcggtgggtcccctgctgctttcccccaagggggaggtgcagga

SEQ ID NO: 196510 - DNA, 201 bp, Homo sapiens
ccgagatttgggtacatgtcaaagctccaggctgccccaggaaaccctgactcctggaacggttccattgttgaagagtcctctgtatgtcagggtcttaygatctacaggcatttagaggaagttttgctgattcagcgtgtgaatacgtgcccagaggagaggaagggtccggctgacattgagttatctctgcagggc

SEQ ID NO: 196511 - DNA, 201 bp, Homo sapiens
ccatagggggcttgctaggtaaactcaggtgcatccagagccgaaggttacatgggaaggaatgaggttggttgcgtgtccatatggaacagtctgtaagrtgatgcccagcaaaaaggggtacagggtactgccatgtgtgtcatggagaagggaaaatggaaacatccactcccgggaggttctgagaaatgcacagaa

SEQ ID NO: 196512 - DNA, 201 bp, Homo sapiens; identical to SEQ ID NO: 33713

SEQ ID NO: 196513 - DNA, 201 bp, Homo sapiens
ccctgtacccgtgcaggccggcctgagaacctggtgctgttgtggcaaacactctgggctggagttcaggttacctggatccttgtccggccctgctaccrccaacctttgcgtaatcttcgacaaagcactttcttttctttcttacataaaaagggagcacatctatcttttctacttacagaattattgtgagaattt

SEQ ID NO: 196514 - DNA, 201 bp, Homo sapiens
aacctggtgctgttgtggcaaacactctgggctggagttcaggttacctggatccttgtccggccctgctaccaccaacctttgcgtaatcttcgacaaascactttcttttctttcttacataaaaagggagcacatctatcttttctacttacagaattattgtgagaatttagcttcataactagtatatttaaagta

SEQ ID NO: 196515 - DNA, 201 bp, Homo sapiens
atcagagtacgttattctttttgagggtcagtgcctggggaaagaactctccactctgcattctgaggcgggcagagtgatagatgatcaaagtactgctragtagtgttgcagcagatgggtcaggtaggctggaaggggtagagacacgtggacacagtgatgtgcactgctggctaaagtctttaattcatattctta

SEQ ID NO: 196516 - DNA, 201 bp, Homo sapiens
aacagatattcactgtttctctgaaattccagtatagctgggcatcctgctttttatttgctaaatgtgcaaccctaggttgtgagacctctctgacccaygcgtggcctcctccaggaagtcttcctgagcgccagcctgggctgggcatcctcctctgtgtgtctgatgctgctctgacctcatgaagctctaattgct

SEQ ID NO: 196517 - DNA, 201 bp, Homo sapiens
agaacggagttaccggctacgcctgttcttggaacagttcagcatccccacctgtgtgctcaatggagagcttccactgcgctccaggtctgccacagccracatcttggttgaaataagttgaagatagagatggaaaggggacccagttaatgttctgtttcttaagcacttagtaggggccaggttctagatgtgact

SEQ ID NO: 196518 - DNA, 201 bp, Homo sapiens
tgctgttgtcccagaacagaggtcaggccgagatttgggtacatgtcaaagctccaggctgccccaggaaaccctgactcctggaacggttccattgttgragagtcctctgtatgtcagggtcttatgatctacaggcatttagaggaagttttgctgattcagcgtgtgaatacgtgcccagaggagaggaagggtccg

SEQ ID NO: 196519 - DNA, 201 bp, Homo sapiens
atgtgcctgcattcatccatccatggcattatcatggaaccaaaagatggaaacagcctggggccaccatagggggcttgctaggtaaactcaggtgcatycagagccgaaggttacatgggaaggaatgaggttggttgcgtgtccatatggaacagtctgtaagatgatgcccagcaaaaaggggtacagggtactgcc

SEQ ID NO: 196520 - DNA, 201 bp, Homo sapiens
agacagactctgtaaggcctaaaccgacaaggtagcaagagaagagccagtggtggtgcgagggatgcaggggttggcaggcatgaggtcaggaccctggrattggtttctgtagtgcagcccaggctagagctttatgtggccattaatactgggcacctctcctcatctttggcaggctctgggtaatgacttctttca

SEQ ID NO: 196521 - DNA, 201 bp, Homo sapiens
tgctcacattctcctggccctgtgcagatgtggtagtgaatagatgtatgtcataggctgccagttgcgtcagaattggagaatttgctgcagaatcagcrggagggcagggatgggagcagtagcggtgagcccactgctcaggcaagcatctcttccagttcctcctgctctccgtggcctggtacgccctcacaagaa

SEQ ID NO: 196522 - DNA, 201 bp, Homo sapiens
aagagtcctctgtatgtcagggtcttatgatctacaggcatttagaggaagttttgctgattcagcgtgtgaatacgtgcccagaggagaggaagggtccrgctgacattgagttatctctgcagggcctctgatccggaagcaggtgtggcccggggcatagacttccaccatgtgtctgctgtgctcaactttgatctt

SEQ ID NO: 196523 - DNA, 201 bp, Homo sapiens
agtaatgggccacaggtgaagaaactacctgttgacttttatttcagctgcattttctttctttaaggatgtctgtctttttctttcttgttacatgtttrttgtaacaaatctaaacaatataggagagtgatttaaatagtggaagtctaaggtgctcacattctcctggccctgtgcagatgtggtagtgaatagatg

SEQ ID NO: 196524 - DNA, 201 bp, Homo sapiens
aactttacctttcagaaggcctgttgctgtaggccttcccttctcaatgtagtcctttattgatgtgtttctctttgttctgtgcttggaagtattttatrtatggtttatatggtatactctatataccacaacaataagggcattttggggttttaggttacaaaactggaggagagttagggtgccaggaatccttaa

SEQ ID NO: 196525 - DNA, 201 bp, Homo sapiens
aacaagggcattctttttcttttttctttcttttttttttttttttttttttttttttgagatggagtcttgttctgtcacccaggctagagtgcagtggygccatctcggcccagtacaacctccgcctcctgggttcaagcgattctcccgcctcagcctcctgagtagctgggattacaggcacccaccatcatgcct

SEQ ID NO: 196526 - DNA, 201 bp, Homo sapiens
cagatgtggtagtagggaccccatctcgcatattaagccacttgcagcaagacagcctgaaacttcgtgactccctggagcttttggtggtggacgaagcygaccttcttttttcctttggctttgaagaagagctcaagagtctcctctggtaaggcagaggtgggtgtgattcctagtggaaacatctgtgagtaggag

SEQ ID NO: 196527 - DNA, 201 bp, Homo sapiens
agaagccagatgtggtagtagggaccccatctcgcatattaagccacttgcagcaagacagcctgaaacttcgtgactccctggagcttttggtggtggaygaagctgaccttcttttttcctttggctttgaagaagagctcaagagtctcctctggtaaggcagaggtgggtgtgattcctagtggaaacatctgtgag

SEQ ID NO: 196528 - DNA, 201 bp, Homo sapiens
ctcacttaaccctgtgttgccccacacagtatcgtgaagagcgcttccgactgacgagcgagagcaccaaccagagggtcctatggtggtccattgctcasactgtcatcctcatcctcactggcatctggcagatgcgtcacctcaagagcttctttgaggccaagaagctggtgtagtgccctctttgtatgacccttc

SEQ ID NO: 196529 - DNA, 201 bp, Homo sapiens
acagatattcactgtttctctgaaattccagtatagctgggcatcctgctttttatttgctaaatgtgcaaccctaggttgtgagacctctctgacccatrcgtggcctcctccaggaagtcttcctgagcgccagcctgggctgggcatcctcctctgtgtgtctgatgctgctctgacctcatgaagctctaattgctg

SEQ ID NO: 196530 - DNA, 201 bp, Homo sapiens
tggtcctggactgctctctgtggccgtcgtcatgggggtaccttgactcccaaggaataccatggggtactccttgggagaggagaagagagtgggtgacsggttcttgggcttggggccacacaggccacccccatccacacacggggacagatgggtcatcactgtaagaggcccaggtgcagctaacctgcatgttcg

SEQ ID NO: 196531 - DNA, 201 bp, Homo sapiens
cttgtccggccctgctaccaccaacctttgcgtaatcttcgacaaagcactttcttttctttcttacataaaaagggagcacatctatcttttctacttasagaattattgtgagaatttagcttcataactagtatatttaaagtagcttcataaacatcagagtacgttattctttttgagggtcagtgcctggggaaa

SEQ ID NO: 196532 - DNA, 201 bp, Homo sapiens
agcttccactgcgctccaggtctgccacagccgacatcttggttgaaataagttgaagatagagatggaaaggggacccagttaatgttctgtttcttaarcacttagtaggggccaggttctagatgtgactgatactgacttctcccaactccaaaatacctatcatggccgggcaccatggcttatgcctgctgtaat

SEQ ID NO: 196533 - DNA, 201 bp, Homo sapiens
taggagagtgatttaaatagtggaagtctaaggtgctcacattctcctggccctgtgcagatgtggtagtgaatagatgtatgtcataggctgccagttgsgtcagaattggagaatttgctgcagaatcagcgggagggcagggatgggagcagtagcggtgagcccactgctcaggcaagcatctcttccagttcctcc

SEQ ID NO: 196534 - DNA, 201 bp, Homo sapiens
gctgcagaatcagcgggagggcagggatgggagcagtagcggtgagcccactgctcaggcaagcatctcttccagttcctcctgctctccgtggcctggtrcgccctcacaagaagcggaagaagctgtcttcctcttgtaggaaggccaaggtacggctcctggggactgcggacagccccaggactcctcccaacctgc

SEQ ID NO: 196535 - DNA, 201 bp, Homo sapiens
ctgcctcactgtctgctggtcagttctgggttcacttaatggctttgtgaatgtaaataaggggcaggtcttggccctagaggattgagatgtttttctawatcttagaactatttttggataaattatatattttccttcctagtagaagtgttactgcctgtaactagctcaaaataccaatgcagtttctgcattctg

SEQ ID NO: 196536 - DNA, 201 bp, Homo sapiens
ggctgtgagaagaataaggatttccatactggtgtgtcatatttacagataggttgtgacctaaaaagttttttaaaaaacagcagttagggcctgggcgyggtggctcacgcctgtaatcccagcactttgggaggccgaggcgggcggatcacaaggtcaggagatcgagaccatcctggctaacaacggtgaaaccct

SEQ ID NO: 196537 - DNA, 201 bp, Homo sapiens
cttcagggctgtgttccccgggatcggttggactcatcctggagcaggagaaggcaggaaggggagaggctctggaaagtgaagagaggcccagctggggggctgggtgtggccagctggagggacgaaggccttaagcactcaggcatccgccctgtccttcctgcggctctgtcccaggaacaggcctccgtgtgctta

SEQ ID NO: 196538 - DNA, 201 bp, Homo sapiens
ccttcagggctgtgttccccgggatcggttggactcatcctggagcaggagaaggcaggaaggggagaggctctggaaagtgaagagaggcccagctggggggctgggtgtggccagctggagggacgaaggccttaagcactcaggcatccgccctgtccttcctgcggctctgtcccaggaacaggcctccgtgtgctt

SEQ ID NO: 196539 - DNA, 201 bp, Homo sapiens
cacacggctgcaccccttgtgtccacatcccctggtggctcttgcaccaccgtagcagagcccacggcgacagacactggatgtcccacggagcggcaggygtgtgcggttgcctcttgacgggttaccagccctcgtggcagaaggtgctgagtgtggggaggggcagggacgttgctgtgccacacggtgtttaaccat

SEQ ID NO: 196540 - DNA, 201 bp, Homo sapiens
gcggatgcccggtggggttgcgtctgccgggggtgcgcagtcagggcacagtccagaggtgcggcgctttagggagactcgagcatccggaaccctgtggyccctaccccatttctgttcccacagcaggcgacgggaaggtggcggagcggctgctggactacaccaggactgtacaagccctggtcctgcccagaaatg

SEQ ID NO: 196541 - DNA, 201 bp, Homo sapiens; identical to SEQ ID NO: 33731

SEQ ID NO: 196542 - DNA, 201 bp, Homo sapiens; identical to SEQ ID NO: 33733

SEQ ID NO: 196543 - DNA, 201 bp, Homo sapiens
gggtgcgcagtcagggcacagtccagaggtgcggcgctttagggagactcgagcatccggaaccctgtggtccctaccccatttctgttcccacagcaggygacgggaaggtggcggagcggctgctggactacaccaggactgtacaagccctggtcctgcccagaaatgtgcccgacaccaacccctatcgctccagcg

SEQ ID NO: 196544 - DNA, 201 bp, Homo sapiens; identical to SEQ ID NO: 33722

SEQ ID NO: 196545 - DNA, 201 bp, Homo sapiens; identical to SEQ ID NO: 33723

SEQ ID NO: 196546 - DNA, 201 bp, Homo sapiens; identical to SEQ ID NO: 33724

SEQ ID NO: 196547 - DNA, 201 bp, Homo sapiens
accgccctgtgtatggcctcttccgggtgaaagtgaggccggggcgagacaagtcagtgttctcccgctcaccttcccccttgggcctgggggtcgtgccrtcgtcccatgagctaagagggtccctgtcatcgtggggttccacttggggctttgttctgggaccttcagggctgtgttccccgggatcggttggactca

SEQ ID NO: 196548 - DNA, 201 bp, Homo sapiens
accccatttctgttcccacagcaggcgacgggaaggtggcggagcggctgctggactacaccaggactgtacaagccctggtcctgcccagaaatgtgccygacaccaacccctatcgctccagcgcaggtgagggcgtccacgctgcgtgtgggtggtgccgccgtggttcgcacacgggcgcccgtcgtttttagggca

SEQ ID NO: 196549 - DNA, 201 bp, Homo sapiens; identical to SEQ ID NO: 33725

SEQ ID NO: 196550 - DNA, 201 bp, Homo sapiens
ctgtgtgagaacagcttcctctcctgaccgggaccctgtccaaggcaggggtcctgaccgctggcttcatcttccacccagggccgtggggtgggcaccaygcttgctaagatgcacgccaaggacccccggcagaccccggcaccgagggcgtgccgtgctgggcccgtgctctgtcctccgaggcggaaatgtcactgg

SEQ ID NO: 196551 - DNA, 201 bp, Homo sapiens
atgagctaagagggtccctgtcatcgtggggttccacttggggctttgttctgggaccttcagggctgtgttccccgggatcggttggactcatcctggagcaggagaaggcaggaaggggagaggctctggaaagtgaagagaggcccagctggggggctgggtgtggccagctggagggacgaaggccttaagcactca

SEQ ID NO: 196552 - DNA, 201 bp, Homo sapiens
ccatgagctaagagggtccctgtcatcgtggggttccacttggggctttgttctgggaccttcagggctgtgttccccgggatcggttggactcatcctgragcaggagaaggcaggaaggggagaggctctggaaagtgaagagaggcccagctggggggctgggtgtggccagctggagggacgaaggccttaagcact

SEQ ID NO: 196553 - DNA, 201 bp, Homo sapiens
gggaccctgtccaaggcaggggtcctgaccgctggcttcatcttccacccagggccgtggggtgggcaccacgcttgctaagatgcacgccaaggaccccyggcagaccccggcaccgagggcgtgccgtgctgggcccgtgctctgtcctccgaggcggaaatgtcactggctgggcccggcagcggatgcccggtgggg

SEQ ID NO: 196554 - DNA, 201 bp, Homo sapiens; identical to SEQ ID NO: 33728

SEQ ID NO: 196555 - DNA, 201 bp, Homo sapiens
cgccctctccatgggtgttttcaaggctgggtgagccggctggcacacagggcaccagccatgccctcgcctccggcctgcagagcctctgccctctgccygttgcaccctcgctcaccctcctgccaggcccatggctgcatctctgggcatgtcccgatatctggatatctgctggaagcctcaagaagccactgaggc

SEQ ID NO: 196556 - DNA, 201 bp, Homo sapiens
gtcctcggcggcccacggcgtgctctacatgtcgctcttcatccgcagggacctcatctggttctgctcaggtgggcgcggctggaggggtgggcgcggcwggaaggtggcagcgtcccacaggtgagctgagggctgcccctcccacagaggtggagtgctccacggtgaccacacgcatcgtgtctcagatcaagacca

SEQ ID NO: 196557 - DNA, 201 bp, Homo sapiens
gattcacccacaggcgcctgcaggtttcgggaggagccggcccaccacatgctccctccttccaggagctcccgcccagcctggacgagttcctgctcccrgccgaggccgactatgcccaggacctgtatgtcatcggggtccaggagggctgttctgacaggtagggcggctgcaggccctgcagtgcctgcccagggg

SEQ ID NO: 196558 - DNA, 201 bp, Homo sapiens
gccctgtgtatggcctcttccgggtgaaagtgaggccggggcgagacaagtcagtgttctcccgctcaccttcccccttgggcctgggggtcgtgccgtcrtcccatgagctaagagggtccctgtcatcgtggggttccacttggggctttgttctgggaccttcagggctgtgttccccgggatcggttggactcatcc

SEQ ID NO: 196559 - DNA, 201 bp, Homo sapiens
acaggcgcctgcaggtttcgggaggagccggcccaccacatgctccctccttccaggagctcccgcccagcctggacgagttcctgctcccagccgaggcygactatgcccaggacctgtatgtcatcggggtccaggagggctgttctgacaggtagggcggctgcaggccctgcagtgcctgcccaggggctgccgtct

SEQ ID NO: 196560 - DNA, 201 bp, Homo sapiens
tgcagtgcctgcccaggggctgccgtctctgaagcagctgggtgctgagacctgtggtcatggctgggcacgggtctgcagtgcctgcccgggggctgccrtctgtgaagctgctgggcgctgatacccggttcgtggccgggcacagatctgcagtgcctgcccgggggctgccgtctctgaagctgctgggcgctgaga

SEQ ID NO: 196561 - DNA, 201 bp, Homo sapiens
gggtggtcgttggacagactcgtgcttggagagggaaacaggccgagggccaacgtgaggcgtgtttggtgtgtcagaggctgcctcggagaccgggcagmtccctttttggccctggcctcagtttcccctcattcggaggagtcgctggtactcaaggcaccgcagtgggattcacccacaggcgcctgcaggtttcgg

SEQ ID NO: 196562 - DNA, 201 bp, Homo sapiens
agggtgacatctgtcctgtgagctactcttcctgccccgggatcaagacgtccgaccaccgccctgtgtatggcctcttccgggtgaaagtgaggccgggkcgagacaagtcagtgttctcccgctcaccttcccccttgggcctgggggtcgtgccgtcgtcccatgagctaagagggtccctgtcatcgtggggttcca

SEQ ID NO: 196563 - DNA, 201 bp, Homo sapiens
gcagtttctagaatgtcctcgggctactcggtaggtggagcaggactgtgcttcaccggaatcttcagaagctcaaccccaggcctgacgcgtgtggcgcyggagctctgcgttcactgtgcagctgaacatcaggggctgcgtgctgccgggagcttctgtcccaggtgtggttaacactaggatgtttctaacaggaag

SEQ ID NO: 196564 - DNA, 201 bp, Homo sapiens
cccctcccacagaggtggagtgctccacggtgaccacacgcatcgtgtctcagatcaagaccaagggggccttgggcatcagcttcaccttttttggcacytccttcctcttcatcacgtcccacttcacctgtaagttgcttggtgcccgcaccgcaggtgctgtgtgagaacagcttcctctcctgaccgggaccctgt

SEQ ID NO: 196565 - DNA, 201 bp, Homo sapiens
gacactggatgtcccacggagcggcaggcgtgtgcggttgcctcttgacgggttaccagccctcgtggcagaaggtgctgagtgtggggaggggcagggaygttgctgtgccacacggtgtttaaccatctgtgtgcaccgccgtattaaaatctgaaagcatcagcctggacaacgtggcgagaccctgtttctacaaaa

SEQ ID NO: 196566 - DNA, 201 bp, Homo sapiens; identical to SEQ ID NO: 33727

SEQ ID NO: 196567 - DNA, 201 bp, Homo sapiens
tttactgcctaccctaaatccagggtggtcttatctcgagatccttaattaaacacgtttgcaaagaccccgtttccgaataaggtcccattccaaggttmtggggctctgggagtggacatggctttggggatcactgttcagctcaccacagtccccgaaggtagcctcacttccccgcgtctgtggtgcaccagcagg

SEQ ID NO: 196568 - DNA, 201 bp, Homo sapiens
aacagcttcccatttccagacctccggtctgttctagaataggagtcggcgcactctttctgtcaagggggagacacagacagtggggaccaaagggcgtstgtgtgccagtgagtctattagggacatacattggaacctcgctcttttttctttctctgccgttccacacagtaaaacccattctgagtttgcgggccg

SEQ ID NO: 196569 - DNA, 201 bp, Homo sapiens
catgatgggcgctgccggcaaaggggccgtgggcctccagcctggtgaccgaggagcccctgctgggcccgggatcacttgacaggggtgcccacaggaaygctctctgtcccgaatgaccactgtgtgaacacagctgtcccgaccgggattgtcgacagttttaggggtgaggtagcgaggttcctccctgctgacatg

SEQ ID NO: 196570 - DNA, 201 bp, Homo sapiens
ctgctggactacaccaggactgtacaagccctggtcctgcccagaaatgtgcccgacaccaacccctatcgctccagcgcaggtgagggcgtccacgctgygtgtgggtggtgccgccgtggttcgcacacgggcgcccgtcgtttttagggcagttctgaagaggcagcgtcctgagctttgggaagcgagggccgaaac

SEQ ID NO: 196571 - DNA, 201 bp, Homo sapiens
gaccccggcaccgagggcgtgccgtgctgggcccgtgctctgtcctccgaggcggaaatgtcactggctgggcccggcagcggatgcccggtggggttgcrtctgccgggggtgcgcagtcagggcacagtccagaggtgcggcgctttagggagactcgagcatccggaaccctgtggtccctaccccatttctgttccc

SEQ ID NO: 196572 - DNA, 201 bp, Homo sapiens
gtggaccagcccctgccacgctgcagccgagcactgctcaccctgggggcaggcatgcagaggtcatgctgttgatttcattccaggcctgcgccacctcygggagctcaaggctagggaggattggccagaggaagcacctggtgctgaactaggcttgccctgctgtgaacttgcacttggagccctgacgctgctgtt

SEQ ID NO: 196573 - DNA, 201 bp, Homo sapiens
gacccccggcagaccccggcaccgagggcgtgccgtgctgggcccgtgctctgtcctccgaggcggaaatgtcactggctgggcccggcagcggatgcccrgtggggttgcgtctgccgggggtgcgcagtcagggcacagtccagaggtgcggcgctttagggagactcgagcatccggaaccctgtggtccctacccca

SEQ ID NO: 196574 - DNA, 201 bp, Homo sapiens
ggatgcccggtggggttgcgtctgccgggggtgcgcagtcagggcacagtccagaggtgcggcgctttagggagactcgagcatccggaaccctgtggtcyctaccccatttctgttcccacagcaggcgacgggaaggtggcggagcggctgctggactacaccaggactgtacaagccctggtcctgcccagaaatgtg

SEQ ID NO: 196575 - DNA, 201 bp, Homo sapiens
acaagggtgacatctgtcctgtgagctactcttcctgccccgggatcaagacgtccgaccaccgccctgtgtatggcctcttccgggtgaaagtgaggccrgggcgagacaagtcagtgttctcccgctcaccttcccccttgggcctgggggtcgtgccgtcgtcccatgagctaagagggtccctgtcatcgtggggtt

SEQ ID NO: 196576 - DNA, 201 bp, Homo sapiens
ttcagggctgtgttccccgggatcggttggactcatcctggagcaggagaaggcaggaaggggagaggctctggaaagtgaagagaggcccagctggggggctgggtgtggccagctggagggacgaaggccttaagcactcaggcatccgccctgtccttcctgcggctctgtcccaggaacaggcctccgtgtgcttag

SEQ ID NO: 196577 - DNA, 201 bp, Homo sapiens
tataaacaatcagatttggacaccctggctaaagaagcatccatcccaattatcaatgggctgtcagatttgtaccatcctatccagatcctggctgattrcctcacgctccaggttggtttatttatttgtcttacaaaagagcaaaatcaaataattcctgacttgctttaagtgaaacagtttacttaaatcatggta

SEQ ID NO: 196578 - DNA, 201 bp, Homo sapiens
gtataaacaatcagatttggacaccctggctaaagaagcatccatcccaattatcaatgggctgtcagatttgtaccatcctatccagatcctggctgatyacctcacgctccaggttggtttatttatttgtcttacaaaagagcaaaatcaaataattcctgacttgctttaagtgaaacagtttacttaaatcatggt

SEQ ID NO: 196579 - DNA, 201 bp, Homo sapiens
caatcagatttggacaccctggctaaagaagcatccatcccaattatcaatgggctgtcagatttgtaccatcctatccagatcctggctgattacctcaygctccaggttggtttatttatttgtcttacaaaagagcaaaatcaaataattcctgacttgctttaagtgaaacagtttacttaaatcatggtattggtg

SEQ ID NO: 196580 - DNA, 201 bp, Homo sapiens
tatctttttcttggtttgccacagtgtattgtctagcatggcagatgcagtattggctcgagtgtataaacaatcagatttggacaccctggctaaagaakcatccatcccaattatcaatgggctgtcagatttgtaccatcctatccagatcctggctgattacctcacgctccaggttggtttatttatttgtcttac

SEQ ID NO: 196581 - DNA, 201 bp, Homo sapiens
tgccacagtgtattgtctagcatggcagatgcagtattggctcgagtgtataaacaatcagatttggacaccctggctaaagaagcatccatcccaattakcaatgggctgtcagatttgtaccatcctatccagatcctggctgattacctcacgctccaggttggtttatttatttgtcttacaaaagagcaaaatcaa

SEQ ID NO: 196582 - DNA, 201 bp, Homo sapiens
cgaatttacgcctggatttcatctccttcatcccgtgccttttaggaacactatagctctctgaaaggtcttaccctcagctggatcggggatgggaacartatcctgcactccatcatgatgagcgcagcgaaattcggaatgcaccttcaggcagctactccaaaggtagggaaactttttgccttgaaactaacccct

SEQ ID NO: 196583 - DNA, 201 bp, Homo sapiens
aatatgactgccacatataatagtcaaaaagtggtcttatccccatctctttagactgctaaagttgctgcctctgactggacatttttacactgcttgcmcagaaagccagaagaagtggatgatgaagtcttttattctcctcgatcactagtgttcccagaggcagaaaacagaaagtggacaatcatggtaagcaag

SEQ ID NO: 196584 - DNA, 201 bp, Homo sapiens
cacgatctcggctcactgcaacctccgcctcctgggttcaagtgattctcctgcctcagcctcccaagtagctgggattacaggtgcccgccactgtgccyggctaatttttgtatttttagtagaggcagggcttcaccatattggccaggctggtctcgaactcctgacctcaggagatccacctgcctcggcctccca

SEQ ID NO: 196585 - DNA, 201 bp, Homo sapiens
gccttgtgcaatgattgtgaggcctccctagccattggaactgtgagtccattaaacctctttttctttataaatttcccagtctcgggtatgtctttatyagcagcgtgaaaaaggactaagacagagctttttccctatgttttcttttagtagtgttacagcttcagagcttatatttaagtctttaatccattttga

SEQ ID NO: 196586 - DNA, 201 bp, Homo sapiens
tctccttcatcccgtgccttttaggaacactatagctctctgaaaggtcttaccctcagctggatcggggatgggaacaatatcctgcactccatcatgakgagcgcagcgaaattcggaatgcaccttcaggcagctactccaaaggtagggaaactttttgccttgaaactaacccctctcttaaatcatcctcagatg

SEQ ID NO: 196587 - DNA, 201 bp, Homo sapiens
atttggacaccctggctaaagaagcatccatcccaattatcaatgggctgtcagatttgtaccatcctatccagatcctggctgattacctcacgctccasgttggtttatttatttgtcttacaaaagagcaaaatcaaataattcctgacttgctttaagtgaaacagtttacttaaatcatggtattggtgttttatt

SEQ ID NO: 196588 - DNA, 201 bp, Homo sapiens
ctaatactgagattaagactatttattttaaccttaataattgctacacataagcgaatttacgcctggatttcatctccttcatcccgtgccttttaggracactatagctctctgaaaggtcttaccctcagctggatcggggatgggaacaatatcctgcactccatcatgatgagcgcagcgaaattcggaatgcac

SEQ ID NO: 196589 - DNA, 201 bp, Homo sapiens
atactgagattaagactatttattttaaccttaataattgctacacataagcgaatttacgcctggatttcatctccttcatcccgtgccttttaggaacwctatagctctctgaaaggtcttaccctcagctggatcggggatgggaacaatatcctgcactccatcatgatgagcgcagcgaaattcggaatgcacctt

SEQ ID NO: 196590 - DNA, 201 bp, Homo sapiens
cagtgtattgtctagcatggcagatgcagtattggctcgagtgtataaacaatcagatttggacaccctggctaaagaagcatccatcccaattatcaatrggctgtcagatttgtaccatcctatccagatcctggctgattacctcacgctccaggttggtttatttatttgtcttacaaaagagcaaaatcaaataat

SEQ ID NO: 196591 - DNA, 201 bp, Homo sapiens
tatgtatgctagaatggtaccaagctgttgctgacaaatgatccattggaagcagcgcatggaggcaatgtattaattacagacacttggataagcatggracaagaagaggagaagaaaaagcggctccaggctttccaaggttaccaggttacaatgaaggtacaaattgatgcctctctgaaggttcattaattccat

SEQ ID NO: 196592 - DNA, 201 bp, Homo sapiens
actgagattaagactatttattttaaccttaataattgctacacataagcgaatttacgcctggatttcatctccttcatcccgtgccttttaggaacackatagctctctgaaaggtcttaccctcagctggatcggggatgggaacaatatcctgcactccatcatgatgagcgcagcgaaattcggaatgcaccttca

SEQ ID NO: 196593 - DNA, 201 bp, Homo sapiens
ctgagattaagactatttattttaaccttaataattgctacacataagcgaatttacgcctggatttcatctccttcatcccgtgccttttaggaacactrtagctctctgaaaggtcttaccctcagctggatcggggatgggaacaatatcctgcactccatcatgatgagcgcagcgaaattcggaatgcaccttcag

SEQ ID NO: 196594 - DNA, 201 bp, Homo sapiens
aataaggcattattaagcataattatcttagattatctttttcttggtttgccacagtgtattgtctagcatggcagatgcagtattggctcgagtgtatwaacaatcagatttggacaccctggctaaagaagcatccatcccaattatcaatgggctgtcagatttgtaccatcctatccagatcctggctgattacct

SEQ ID NO: 196595 - DNA, 201 bp, Homo sapiens
atttattttaaccttaataattgctacacataagcgaatttacgcctggatttcatctccttcatcccgtgccttttaggaacactatagctctctgaaasgtcttaccctcagctggatcggggatgggaacaatatcctgcactccatcatgatgagcgcagcgaaattcggaatgcaccttcaggcagctactccaaa

SEQ ID NO: 196596 - DNA, 201 bp, Homo sapiens
ctatagctctctgaaaggtcttaccctcagctggatcggggatgggaacaatatcctgcactccatcatgatgagcgcagcgaaattcggaatgcaccttsaggcagctactccaaaggtagggaaactttttgccttgaaactaacccctctcttaaatcatcctcagatgcaattacccagtgacaaaaaaagctctct

SEQ ID NO: 196597 - DNA, 201 bp, Homo sapiens
gaaaggtcttaccctcagctggatcggggatgggaacaatatcctgcactccatcatgatgagcgcagcgaaattcggaatgcaccttcaggcagctactscaaaggtagggaaactttttgccttgaaactaacccctctcttaaatcatcctcagatgcaattacccagtgacaaaaaaagctctcttccatttaagta

SEQ ID NO: 196598 - DNA, 201 bp, Homo sapiens
gtatgccaaagaggtatgctctttacatgtaaagctattattgccttttactgtcccatgaagttatttaaccagcgtgtttatgtatgctagaatggtaycaagctgttgctgacaaatgatccattggaagcagcgcatggaggcaatgtattaattacagacacttggataagcatgggacaagaagaggagaagaaa

SEQ ID NO: 196599 - DNA, 201 bp, Homo sapiens
ccatagtacatgggtcttttctgaaatacatatttctcccttttaaatctctttttacaggtgtggacaaccactacaaaataaagtgcagctgaagggcygtgaccttctcactctaaaaaactttaccggagaagaaattaaatatatgctatggctatcagcagatctgaaatttaggataaaacagaaaggagaggt

SEQ ID NO: 196600 - DNA, 201 bp, Homo sapiens
ggattacaggcaggtgacaccatgcatagctaatttttgtatttttagtggcgggtaggggggtttcatcatgttgcccaggctggtctcgaactcctgamctcaaatgatccacccacctcagcctcgaaaagcactgggattacaggcgtgagccaccgtgccaggccggcacttctaataaggacccagttaatgcag

SEQ ID NO: 196601 - DNA, 201 bp, Homo sapiens
caaagaggtatgctctttacatgtaaagctattattgccttttactgtcccatgaagttatttaaccagcgtgtttatgtatgctagaatggtaccaagcwgttgctgacaaatgatccattggaagcagcgcatggaggcaatgtattaattacagacacttggataagcatgggacaagaagaggagaagaaaaagcgg

SEQ ID NO: 196602 - DNA, 201 bp, Homo sapiens
tcttagattatctttttcttggtttgccacagtgtattgtctagcatggcagatgcagtattggctcgagtgtataaacaatcagatttggacaccctggytaaagaagcatccatcccaattatcaatgggctgtcagatttgtaccatcctatccagatcctggctgattacctcacgctccaggttggtttatttatt

SEQ ID NO: 196603 - DNA, 201 bp, Homo sapiens
gtttgccacagtgtattgtctagcatggcagatgcagtattggctcgagtgtataaacaatcagatttggacaccctggctaaagaagcatccatcccaaytatcaatgggctgtcagatttgtaccatcctatccagatcctggctgattacctcacgctccaggttggtttatttatttgtcttacaaaagagcaaaat

SEQ ID NO: 196604 - DNA, 201 bp, Homo sapiens
gtatgctagaatggtaccaagctgttgctgacaaatgatccattggaagcagcgcatggaggcaatgtattaattacagacacttggataagcatgggacragaagaggagaagaaaaagcggctccaggctttccaaggttaccaggttacaatgaaggtacaaattgatgcctctctgaaggttcattaattccattca

SEQ ID NO: 196605 - DNA, 201 bp, Homo sapiens
gaggcaatgtattaattacagacacttggataagcatgggacaagaagaggagaagaaaaagcggctccaggctttccaaggttaccaggttacaatgaakgtacaaattgatgcctctctgaaggttcattaattccattcatgaaggccagaaccatctaatcacttattcactttagggggagcagactgtcctttca

SEQ ID NO: 196606 - DNA, 201 bp, Homo sapiens
tcgctaatgtttatccatttctttctttctttgttgtgtcatcaggctgtcatggtgtccctgctgacagattactcacctcagctccagaagcctaaatkttgatgttgtgttacttgtcaagaaagaagcaatgttcttcagtaacagaatgagttggtttatggggaaaagagaagagaatctaaaaaataaacaaat

SEQ ID NO: 196607 - DNA, 201 bp, Homo sapiens
agaaaacaaatatgactgccacatataatagtcaaaaagtggtcttatccccatctctttagactgctaaagttgctgcctctgactggacatttttacastgcttgcccagaaagccagaagaagtggatgatgaagtcttttattctcctcgatcactagtgttcccagaggcagaaaacagaaagtggacaatcatgg

SEQ ID NO: 196608 - DNA, 201 bp, Homo sapiens
tgacttttcagttgagatgatgccaattctttgtaattttgttttccactttagttgttttttcaaaatgatttttttcttttttttttattgtaggcttwgcacttctgggaggacatccttgttttcttaccacacaagatattcatttgggtgtgaatgaaagtctcacggacacggcccggtttgtaaatattttct

SEQ ID NO: 196609 - DNA, 201 bp, Homo sapiens
aaaacaaatatgactgccacatataatagtcaaaaagtggtcttatccccatctctttagactgctaaagttgctgcctctgactggacatttttacactrcttgcccagaaagccagaagaagtggatgatgaagtcttttattctcctcgatcactagtgttcccagaggcagaaaacagaaagtggacaatcatggta

SEQ ID NO: 196610 - DNA, 201 bp, Homo sapiens
gattatctttttcttggtttgccacagtgtattgtctagcatggcagatgcagtattggctcgagtgtataaacaatcagatttggacaccctggctaaakaagcatccatcccaattatcaatgggctgtcagatttgtaccatcctatccagatcctggctgattacctcacgctccaggttggtttatttatttgtct

SEQ ID NO: 196611 - DNA, 201 bp, Homo sapiens
ccttttaaatctctttttacaggtgtggacaaccactacaaaataaagtgcagctgaagggccgtgaccttctcactctaaaaaactttaccggagaagawattaaatatatgctatggctatcagcagatctgaaatttaggataaaacagaaaggagaggtatgtaacattttctttttacgttccattactaccagtc

SEQ ID NO: 196612 - DNA, 201 bp, Homo sapiens
attcccaccaacaatgcacaggagatccccccctctctgcattcctgtcaacacttatctttcatttttttaaaaataaaagccactctaataggtgtgtrgtgatatctcattgtggtttaatttgcattgccctaatgattaatgatactcagcattttttcatgaacttgatgatttgtatgtcttctttggaaaaat

SEQ ID NO: 196613 - DNA, 201 bp, Homo sapiens
gttaatcaccttctttgtctggttttaaaatttatgtaaaggctagtgagtgatttagtattgaaagctgagatgtgagtaaagaattcctctctgtattytaagtcatgcctcagtgcatgcaaggttgggtgattttctaatttccagacctctctgttggttctctaagtacttattgattccttttctaagaattat

SEQ ID NO: 196614 - DNA, 201 bp, Homo sapiens
ttcatcccgtgccttttaggaacactatagctctctgaaaggtcttaccctcagctggatcggggatgggaacaatatcctgcactccatcatgatgagcrcagcgaaattcggaatgcaccttcaggcagctactccaaaggtagggaaactttttgccttgaaactaacccctctcttaaatcatcctcagatgcaatt

SEQ ID NO: 196615 - DNA, 201 bp, Homo sapiens
tttgtaattttgttttccactttagttgttttttcaaaatgatttttttcttttttttttattgtaggctttgcacttctgggaggacatccttgttttcytaccacacaagatattcatttgggtgtgaatgaaagtctcacggacacggcccggtttgtaaatattttcttctctccaaagctgatttcagaatctgat

SEQ ID NO: 196616 - DNA, 201 bp, Homo sapiens
gatagtgaaagctggggcaattggttgtctctttaaattccaaaaggcactattgagttttggaattctagatgtaaaaatcatattctactgaacatggkgggaccacatcttgaaaaagggaaggagacgcgatattgaaaagaaaataatatatatttaagaaaacatgtataataaaattacctaaataagatttaa

SEQ ID NO: 196617 - DNA, 201 bp, Homo sapiens
  misc_feature (1)...(201): n = A,T,C or G
ctgaatataatcctcttaagccattatggaaaccggaagaggtgcttccaagagttagaaagcaccatgccttatgtttgcctttatgattaaagaagtcngagatagtgaaagctggggcaattggttgtctctttaaattccaaaaggcactattgagttttggaattctagatgtaaaaatcatattctactgaacat

SEQ ID NO: 196618 - DNA, 201 bp, Homo sapiens
atgatgagcgcagcgaaattcggaatgcaccttcaggcagctactccaaaggtagggaaactttttgccttgaaactaacccctctcttaaatcatcctcrgatgcaattacccagtgacaaaaaaagctctcttccatttaagtatagcacaggtgaggccacagaatttaggttacgttaccagccctactattaaata

SEQ ID NO: 196619 - DNA, 201 bp, Homo sapiens
atctgtctggagttgggcagaggagggtcaggttttcataccctcctgtcaatcagccattgaatgtgggttgccccaaaagggtgtgtgaccttgggtgyggctgctctctgcagcagaggcagtgcccaaagggggctgacagctgaaagccgtcttctggcagcactcccagcagctgggggaataagtcctttattc

SEQ ID NO: 196620 - DNA, 201 bp, Homo sapiens
ttggcagagcccagcagctgacactttatttagtcatttctgtctaggagctggtttgtaaatatgcaactcaggggagtgacttggctcattgccaaatrgaatcatggaagccaacaagtctgaaaatccaatcaaggtgactaaattctgcttagaaaggcatcacaggaatatatatttatgtgaaataaatcaggg

SEQ ID NO: 196621 - DNA, 201 bp, Homo sapiens
gggtgaaatttcagccccagaactccacgtgggtgggatcaggctgaaactagtaaccatttgagaccacgtccttgcttagcttccctccacacacccgmcccacccctctctgacacctcaacctgattcccttctgctgagagtgtgtcctcaataaatcactggcacaagaatccccatctcaggctacgttttagg

SEQ ID NO: 196622 - DNA, 201 bp, Homo sapiens
tctggctctctctgtgatcttgggctcctaatcaacttaggcaagtaccttaacttcactaagaccagtttattcatatgaaaaatgaggataaaaaatasaaccaacctcttaaggttatgaggattcaatgagatcagagtcatgtgagcattgtagtcaggacccagggacaggtaggtgcagatccacctctcacca

SEQ ID NO: 196623 - DNA, 201 bp, Homo sapiens
ggatgcatgatgaatgtgtagctaaaacactagggcttcatcattgatctaagtgaaagttgtagtgccccatgttgtaacagagtagcattttcccagcwgagaaaacacctccaaaccaaacaccttcgaggtcattgaaaactgaatggggatttcaatagagttaagtaagaaggtggttccagtatgaaatactaa

SEQ ID NO: 196624 - DNA, 201 bp, Homo sapiens
tgatacaatttatacctaagtaattttttgttgctgttgcaaatgtgattattttcttaattttcttttcagatagttcattattagtatattagaaatgytactgatttatgtatgtcgatttcattttctgcaattttactgaattcccttaccagttctaacagttttttggtggacattatgctaagtaaaataacc

SEQ ID NO: 196625 - DNA, 201 bp, Homo sapiens
ctttgtgtggttccaacttggtcattcatgcctttggggaaataataagcaagtgagattatccaactacattacttgctcatgtaacatctattttttttccagaaactttataatacatcattagtgcttattagcatttatagtgtatttgcatggagtgagattaatctcctttcaaataaatccattttaaccaaa

SEQ ID NO: 196626 - DNA, 201 bp, Homo sapiens
tcataccaaagaatttcagctccataaaagcagtgatttttgtctcctttgtttattgtatctccagggccaaggacagtgtctcagtgtctggatgttartggtgctcatttgtatccaatgagtgaatacaactaagactcagatttgaaatgtatgaaactcttagtctctgttcaagttcatatggtgtcttggttt

SEQ ID NO: 196627 - DNA, 201 bp, Homo sapiens
attgccttttactgtcccatgaagttatttaaccagcgtgtttatgtatgctagaatggtaccaagctgttgctgacaaatgatccattggaagcagcgcmtggaggcaatgtattaattacagacacttggataagcatgggacaagaagaggagaagaaaaagcggctccaggctttccaaggttaccaggttacaatg

SEQ ID NO: 196628 - DNA, 201 bp, Homo sapiens
taagaccttggtagagttacatgtatcaagaaacataggacttgggcacaatgtacatacggctgactttcttttgaaaaaggaaagtagtttctgggggrgggcagggcagaggtaagaagtaattggtacgtgaaggaagtgaggaagtgttagggaccattatggaaatgtattctttttttgttttttgagacgaaa

SEQ ID NO: 196629 - DNA, 201 bp, Homo sapiens
ccaacatggtgaaaccccatctctactaaaaataaaataaaaaaaattccgcacacctgtagtcccagctactagggaggctgaggcaggagaattgcttsagcccaggaggcagaggttgcagtgagcccagatcctgccactgcactccagcctgggcaacagagcaaggctctgttaaaaaaaaaggccgatgcagtg

SEQ ID NO: 196630 - DNA, 201 bp, Homo sapiens
gtggtcttatccccatctctttagactgctaaagttgctgcctctgactggacatttttacactgcttgcccagaaagccagaagaagtggatgatgaagdcttttattctcctcgatcactagtgttcccagaggcagaaaacagaaagtggacaatcatggtaagcaagaaacaaggaatggaggataagttctttgtg

SEQ ID NO: 196631 - DNA, 201 bp, Homo sapiens
acacataagcgaatttacgcctggatttcatctccttcatcccgtgccttttaggaacactatagctctctgaaaggtcttaccctcagctggatcggggwtgggaacaatatcctgcactccatcatgatgagcgcagcgaaattcggaatgcaccttcaggcagctactccaaaggtagggaaactttttgccttgaaa

SEQ ID NO: 196632 - DNA, 201 bp, Homo sapiens
tctgaaatacatatttctcccttttaaatctctttttacaggtgtggacaaccactacaaaataaagtgcagctgaagggccgtgaccttctcactctaaraaactttaccggagaagaaattaaatatatgctatggctatcagcagatctgaaatttaggataaaacagaaaggagaggtatgtaacattttcttttta

SEQ ID NO: 196633 - DNA, 201 bp, Homo sapiens
catagtacatgggtcttttctgaaatacatatttctcccttttaaatctctttttacaggtgtggacaaccactacaaaataaagtgcagctgaagggccrtgaccttctcactctaaaaaactttaccggagaagaaattaaatatatgctatggctatcagcagatctgaaatttaggataaaacagaaaggagaggta

SEQ ID NO: 196634 - DNA, 201 bp, Homo sapiens
cttttctgaaatacatatttctcccttttaaatctctttttacaggtgtggacaaccactacaaaataaagtgcagctgaagggccgtgaccttctcactstaaaaaactttaccggagaagaaattaaatatatgctatggctatcagcagatctgaaatttaggataaaacagaaaggagaggtatgtaacattttctt

SEQ ID NO: 196635 - DNA, 201 bp, Homo sapiens
tacacataagcgaatttacgcctggatttcatctccttcatcccgtgccttttaggaacactatagctctctgaaaggtcttaccctcagctggatcgggkatgggaacaatatcctgcactccatcatgatgagcgcagcgaaattcggaatgcaccttcaggcagctactccaaaggtagggaaactttttgccttgaa

SEQ ID NO: 196636 - DNA, 201 bp, Homo sapiens
tctctttagactgctaaagttgctgcctctgactggacatttttacactgcttgcccagaaagccagaagaagtggatgatgaagtcttttattctcctckatcactagtgttcccagaggcagaaaacagaaagtggacaatcatggtaagcaagaaacaaggaatggaggataagttctttgtgtggttccaacttggt

SEQ ID NO: 196637 - DNA, 201 bp, Homo sapiens
aatctctttttacaggtgtggacaaccactacaaaataaagtgcagctgaagggccgtgaccttctcactctaaaaaactttaccggagaagaaattaaakatatgctatggctatcagcagatctgaaatttaggataaaacagaaaggagaggtatgtaacattttctttttacgttccattactaccagtcccctttt

SEQ ID NO: 196638 - DNA, 201 bp, Homo sapiens
tttaaccagcgtgtttatgtatgctagaatggtaccaagctgttgctgacaaatgatccattggaagcagcgcatggaggcaatgtattaattacagacayttggataagcatgggacaagaagaggagaagaaaaagcggctccaggctttccaaggttaccaggttacaatgaaggtacaaattgatgcctctctgaag

SEQ ID NO: 196639 - DNA, 201 bp, Homo sapiens
ctacacataagcgaatttacgcctggatttcatctccttcatcccgtgccttttaggaacactatagctctctgaaaggtcttaccctcagctggatcggrgatgggaacaatatcctgcactccatcatgatgagcgcagcgaaattcggaatgcaccttcaggcagctactccaaaggtagggaaactttttgccttga

SEQ ID NO: 196640 - DNA, 201 bp, Homo sapiens
tgtaaccaagttggcagagcagtatgccaaagaggtatgctctttacatgtaaagctattattgccttttactgtcccatgaagttatttaaccagcgtgyttatgtatgctagaatggtaccaagctgttgctgacaaatgatccattggaagcagcgcatggaggcaatgtattaattacagacacttggataagcatg

SEQ ID NO: 196641 - DNA, 201 bp, Homo sapiens
atgtaaagctattattgccttttactgtcccatgaagttatttaaccagcgtgtttatgtatgctagaatggtaccaagctgttgctgacaaatgatccaytggaagcagcgcatggaggcaatgtattaattacagacacttggataagcatgggacaagaagaggagaagaaaaagcggctccaggctttccaaggtta

SEQ ID NO: 196642 - DNA, 201 bp, Homo sapiens
gcctggatttcatctccttcatcccgtgccttttaggaacactatagctctctgaaaggtcttaccctcagctggatcggggatgggaacaatatcctgcmctccatcatgatgagcgcagcgaaattcggaatgcaccttcaggcagctactccaaaggtagggaaactttttgccttgaaactaacccctctcttaaat

SEQ ID NO: 196643 - DNA, 201 bp, Homo sapiens
atgggacaagaagaggagaagaaaaagcggctccaggctttccaaggttaccaggttacaatgaaggtacaaattgatgcctctctgaaggttcattaatkccattcatgaaggccagaaccatctaatcacttattcactttagggggagcagactgtcctttcattccctataaaaggactcactgactgtatccccta

SEQ ID NO: 196644 - DNA, 201 bp, Homo sapiens; identical to SEQ ID NO: 33752

SEQ ID NO: 196645 - DNA, 201 bp, Homo sapiens
aatgaataaatgtgaagttgcagatggccccttagtgatctgaataggctgctaggggaagagcatatggtatccccacttcccacttgtactgactgtcrggtgctgttagaatcaataggcaactatttcttttctttttctttctttctttcttttttttgagacagtgtctctctctgtcacccaggctggagtaca

SEQ ID NO: 196646 - DNA, 201 bp, Homo sapiens
aaaacaatatatcactctaagatgttgagactaatcagttcttttgaaaaaacagactccaagtagcaactaataaatactgacaaagctgctgcaaagamgccttatatgtgatggggataacgacatttttaaataaaatacaagtttgaaaaccatccctgaaattcttgctggcatgtgcaaagcaggctgtctcca

SEQ ID NO: 196647 - DNA, 201 bp, Homo sapiens
aatcaaataattcctgacttgctttaagtgaaacagtttacttaaatcatggtattggtgttttattttcaaataccagcttgacaaagaattacagcttrtgtgtgcattttctggggaaaacaggacattgttaaaaacagactctaagatcgctctgcactcaaccctattcccaaacccttttagcccatatctcat

SEQ ID NO: 196648 - DNA, 201 bp, Homo sapiens
atgggtcttttctgaaatacatatttctcccttttaaatctctttttacaggtgtggacaaccactacaaaataaagtgcagctgaagggccgtgaccttytcactctaaaaaactttaccggagaagaaattaaatatatgctatggctatcagcagatctgaaatttaggataaaacagaaaggagaggtatgtaacat

SEQ ID NO: 196649 - DNA, 201 bp, Homo sapiens
agcgaatttacgcctggatttcatctccttcatcccgtgccttttaggaacactatagctctctgaaaggtcttaccctcagctggatcggggatgggaamaatatcctgcactccatcatgatgagcgcagcgaaattcggaatgcaccttcaggcagctactccaaaggtagggaaactttttgccttgaaactaaccc

SEQ ID NO: 196650 - DNA, 201 bp, Homo sapiens
gtgactgaaggggagcactgaggtggagctgtccactgatattttggaggagctgatatgttggagtctctaacaccacactcaggtttgatcatttattrgaaggactcacagggatcagcatacagtgatactcatggctaagatttatcacaacaaaagaaacaaagcaacatcagccaagaaaaaaggtgcatgagg

SEQ ID NO: 196651 - DNA, 201 bp, Homo sapiens
ctccttcatcccgtgccttttaggaacactatagctctctgaaaggtcttaccctcagctggatcggggatgggaacaatatcctgcactccatcatgatsagcgcagcgaaattcggaatgcaccttcaggcagctactccaaaggtagggaaactttttgccttgaaactaacccctctcttaaatcatcctcagatgc

SEQ ID NO: 196652 - DNA, 201 bp, Homo sapiens
gaaaacaaatatgactgccacatataatagtcaaaaagtggtcttatccccatctctttagactgctaaagttgctgcctctgactggacatttttacacbgcttgcccagaaagccagaagaagtggatgatgaagtcttttattctcctcgatcactagtgttcccagaggcagaaaacagaaagtggacaatcatggt

SEQ ID NO: 196653 - DNA, 201 bp, Homo sapiens
atctctttagactgctaaagttgctgcctctgactggacatttttacactgcttgcccagaaagccagaagaagtggatgatgaagtcttttattctcctygatcactagtgttcccagaggcagaaaacagaaagtggacaatcatggtaagcaagaaacaaggaatggaggataagttctttgtgtggttccaacttgg

SEQ ID NO: 196654 - DNA, 201 bp, Homo sapiens
tggcagatgcagtattggctcgagtgtataaacaatcagatttggacaccctggctaaagaagcatccatcccaattatcaatgggctgtcagatttgtascatcctatccagatcctggctgattacctcacgctccaggttggtttatttatttgtcttacaaaagagcaaaatcaaataattcctgacttgctttaag

SEQ ID NO: 196655 - DNA, 201 bp, Homo sapiens
cttcatcccgtgccttttaggaacactatagctctctgaaaggtcttaccctcagctggatcggggatgggaacaatatcctgcactccatcatgatgagmgcagcgaaattcggaatgcaccttcaggcagctactccaaaggtagggaaactttttgccttgaaactaacccctctcttaaatcatcctcagatgcaat

SEQ ID NO: 196656 - DNA, 201 bp, Homo sapiens
ttgtctagcatggcagatgcagtattggctcgagtgtataaacaatcagatttggacaccctggctaaagaagcatccatcccaattatcaatgggctgtsagatttgtaccatcctatccagatcctggctgattacctcacgctccaggttggtttatttatttgtcttacaaaagagcaaaatcaaataattcctgac

SEQ ID NO: 196657 - DNA, 201 bp, Homo sapiens
gttatttaaccagcgtgtttatgtatgctagaatggtaccaagctgttgctgacaaatgatccattggaagcagcgcatggaggcaatgtattaattacaracacttggataagcatgggacaagaagaggagaagaaaaagcggctccaggctttccaaggttaccaggttacaatgaaggtacaaattgatgcctctct

SEQ ID NO: 196658 - DNA, 201 bp, Homo sapiens
agtttcctatggccaccacaacaaattaccacaaacatggtggcttagaacaacagaaatttattttcccacagttctggaggctagaagtccaaaatcartgtgtcaacaggaccacaattccctttccagtggctttcagtcatccttggcattccttggcatcaccccaaactctgcctccatctttgcctgggcttc

SEQ ID NO: 196659 - DNA, 201 bp, Homo sapiens
tgtaattattttttcaaggaataaaatgaatataaggaactagacttgcctttttcaagggctctggctctgaccagactgcagtgacagttttgatggartatttgtacgtgcttctcattgtttcccacaacattgtatcctccctcttatgtgcagcctgaataataataatgtggtttgtgtctggtgtaccaagga

SEQ ID NO: 196660 - DNA, 201 bp, Homo sapiens
ctttagactgctaaagttgctgcctctgactggacatttttacactgcttgcccagaaagccagaagaagtggatgatgaagtcttttattctcctcgatmactagtgttcccagaggcagaaaacagaaagtggacaatcatggtaagcaagaaacaaggaatggaggataagttctttgtgtggttccaacttggtcat

SEQ ID NO: 196661 - DNA, 201 bp, Homo sapiens
gaaatacatatttctcccttttaaatctctttttacaggtgtggacaaccactacaaaataaagtgcagctgaagggccgtgaccttctcactctaaaaawctttaccggagaagaaattaaatatatgctatggctatcagcagatctgaaatttaggataaaacagaaaggagaggtatgtaacattttctttttacgt

SEQ ID NO: 196662 - DNA, 201 bp, Homo sapiens
tctttttacaggtgtggacaaccactacaaaataaagtgcagctgaagggccgtgaccttctcactctaaaaaactttaccggagaagaaattaaatataygctatggctatcagcagatctgaaatttaggataaaacagaaaggagaggtatgtaacattttctttttacgttccattactaccagtccccttttttta

SEQ ID NO: 196663 - DNA, 201 bp, Homo sapiens
aagcataattatcttagattatctttttcttggtttgccacagtgtattgtctagcatggcagatgcagtattggctcgagtgtataaacaatcagatttsgacaccctggctaaagaagcatccatcccaattatcaatgggctgtcagatttgtaccatcctatccagatcctggctgattacctcacgctccaggttg

SEQ ID NO: 196664 - DNA, 201 bp, Homo sapiens
cgcctggatttcatctccttcatcccgtgccttttaggaacactatagctctctgaaaggtcttaccctcagctggatcggggatgggaacaatatcctgyactccatcatgatgagcgcagcgaaattcggaatgcaccttcaggcagctactccaaaggtagggaaactttttgccttgaaactaacccctctcttaaa

SEQ ID NO: 196665 - DNA, 201 bp, Homo sapiens
ttttctgaaatacatatttctcccttttaaatctctttttacaggtgtggacaaccactacaaaataaagtgcagctgaagggccgtgaccttctcactcyaaaaaactttaccggagaagaaattaaatatatgctatggctatcagcagatctgaaatttaggataaaacagaaaggagaggtatgtaacattttcttt

SEQ ID NO: 196666 - DNA, 201 bp, Homo sapiens
atacatatttctcccttttaaatctctttttacaggtgtggacaaccactacaaaataaagtgcagctgaagggccgtgaccttctcactctaaaaaactytaccggagaagaaattaaatatatgctatggctatcagcagatctgaaatttaggataaaacagaaaggagaggtatgtaacattttctttttacgttcc

SEQ ID NO: 196667 - DNA, 201 bp, Homo sapiens
tcccttttaaatctctttttacaggtgtggacaaccactacaaaataaagtgcagctgaagggccgtgaccttctcactctaaaaaactttaccggagaadaaattaaatatatgctatggctatcagcagatctgaaatttaggataaaacagaaaggagaggtatgtaacattttctttttacgttccattactaccag

SEQ ID NO: 196668 - DNA, 201 bp, Homo sapiens
cataagcgaatttacgcctggatttcatctccttcatcccgtgccttttaggaacactatagctctctgaaaggtcttaccctcagctggatcggggatgrgaacaatatcctgcactccatcatgatgagcgcagcgaaattcggaatgcaccttcaggcagctactccaaaggtagggaaactttttgccttgaaacta

SEQ ID NO: 196669 - DNA, 201 bp, Homo sapiens
ctagtgttatattgggcccacccagggtaatctccccatctcaagatcactaacttatgaatatgaatcttcaaaattccttttgtcaagtaaagcaatayattcattggttctgtgggttaggacatggacatctttggggaccattattttgtctaccacatgacactttttgtcaatgtatttcacatttttactgtg

SEQ ID NO: 196670 - DNA, 201 bp, Homo sapiens
tggtgtggagaagcttccatcagaagtggtagaataagaaaaataaggataagaattatatagtaaatttcataaagctcaaataattcatttcaaggatycttctttgaaattgtctttcacacctttttgatgttaaaatatcctttttaaattaaattaaggtagtaacattatacctgtttatttgcttttctcatg

SEQ ID NO: 196671 - DNA, 201 bp, Homo sapiens
ttgctggttcatgaaatttgaaaatctgggagccatgggcatgataaatccattaaaaattagaaaaaatctgatctttaagtctagaaaaatattgttayaggaatatagtttttaatctttgattctctaatccctggggccaagcagtccttgaattttgtaagcaccagagtttattgctttctgtgtcagttcagg

SEQ ID NO: 196672 - DNA, 201 bp, Homo sapiens
ggcttgggagtgaagactggtggagtgtgctttgaatattcaaaaaggttagttactaagtcactctggaagagggggacactttctatcattttaataarctggttatttaaagtagggttaagaatatgcagaatttatagaattggggctcaaatttagccattctagtcctcccaaattaggaacttgaataacttt

SEQ ID NO: 196673 - DNA, 201 bp, Homo sapiens
tgggaggcggaggttgcagtgagccgagatcgcgccaatgcactccagccacctgggtgacagagcgagactctgtctcaaaaaaaaaaaaaaaaaaaaaatcacttcacttcagaaaaccatacaagagatgggaccaaaagttgaatggggtcatgatgttttccttggccaacagtggaatttgtttcctagtttatt

SEQ ID NO: 196674 - DNA, 201 bp, Homo sapiens
tataggagacacttaaagtaggagctgaatgaataaatagcagcttgttaagagcatggaatctaaatcagatggatctggaattaaattctagcttagcyaactagtagttctgtgatctccaaattgcttagcctttctcttttttaatctttttaaatatataaaatatatgaaacctacagacacttcaagaaaata

SEQ ID NO: 196675 - DNA, 201 bp, Homo sapiens
atgactgcccaaatgagcaatcagacagggtcaaggaggaagtaccgcaaacaaaaacatattggttgatatttcaaatagattattctaccttacgagtrtcagagctttctagggcttagaagcaaacaactattacatgtgatttttaccttgcaatgattaataatgaagcttaccaaatagatatcaaaaagaaag

SEQ ID NO: 196676 - DNA, 201 bp, Homo sapiens
  misc_feature (1)...(201): n = A,T,C or G
tcatattattgagttgctctgtgtaatgcaaaaaaattgggaattcattccttctaacaaggcactaatactgagattaagactatttattttaaccttantaattgctacacataagcgaatttacgcctggatttcatctccttcatcccgtgccttttaggaacactatagctctctgaaaggtcttaccctcagctg

SEQ ID NO: 196677 - DNA, 201 bp, Homo sapiens
cttagaagcaaacaactattacatgtgatttttaccttgcaatgattaataatgaagcttaccaaatagatatcaaaaagaaagttcagggggattaagcracttgccaaattcactcaattaatacagatagcaccaagattcagatctgaagcccactattcttactaatgcacactccttccccctaaagagaaggaa

SEQ ID NO: 196678 - DNA, 201 bp, Homo sapiens
aatgaatgccttttaaaaacatcacttcagctgggtgcagtggctcatgcttgtaatccctgcactttgggaggccgaggtgggtggatcacctgaggtcrggagttccagaccagtttggccagcatggcaaaaccctgtccctgttaaaaatacaaaaaaagaaaaagaattagctgggcctggtggcatgcacctgta

SEQ ID NO: 196679 - DNA, 201 bp, Homo sapiens
ttctggatctgagatgtccattcatctgtctggagttgggcagaggagggtcaggttttcataccctcctgtcaatcagccattgaatgtgggttgccccraaagggtgtgtgaccttgggtgcggctgctctctgcagcagaggcagtgcccaaagggggctgacagctgaaagccgtcttctggcagcactcccagcag

SEQ ID NO: 196680 - DNA, 201 bp, Homo sapiens
agcaaggtagaagtagtgaagcctgtcaatagatagctatcaattatagaagctggggttgtggtggcagcagtggagagggtaagagtaacagatcctakgtatgttttgaagagagagacaacaagattactgatgtattgggtaagagagagatgtcaaggatgactttaagatttctgcctgagcaaatgtgaaggc

SEQ ID NO: 196681 - DNA, 201 bp, Homo sapiens
agctggggttgtggtggcagcagtggagagggtaagagtaacagatcctaggtatgttttgaagagagagacaacaagattactgatgtattgggtaagakagagatgtcaaggatgactttaagatttctgcctgagcaaatgtgaaggctggtgatggaacaaatggaaaggggaaggttgggaattcggtcttagata

SEQ ID NO: 196682 - DNA, 201 bp, Homo sapiens
acgtggtatgggtgaaccgtatgatatgctttgccattgtgaaactttccttaagcctttaatttaagtgctgatgcactgtaatacgtgcttaactttgyttaaactctctaattcccaatttctgagttacatttagatatcatattaattatcatatacatttacttcaacataaaatactgtgttcataatgtataa

SEQ ID NO: 196683 - DNA, 201 bp, Homo sapiens
tgctacacataagcgaatttacgcctggatttcatctccttcatcccgtgccttttaggaacactatagctctctgaaaggtcttaccctcagctggatcrgggatgggaacaatatcctgcactccatcatgatgagcgcagcgaaattcggaatgcaccttcaggcagctactccaaaggtagggaaactttttgcctt

SEQ ID NO: 196684 - DNA, 201 bp, Homo sapiens
gactattttctgattcttgcaattcatcaaaaatcagtgccacctttttcaggaaccccatctaatccccaccccctgatgatagaagttagaagagggtyacgtcaagctggaggtctcctgtggcttgaagcaagggagcaggtaacaagcccctccacctggttaagatgtttggggtcagagagcagagacagaaat

SEQ ID NO: 196685 - DNA, 201 bp, Homo sapiens
acagcagtgggtatttgcgttaagaagtggcaggtatgtaggggaagaccgaatgccaaggggatataaacaagacacagacactcgtagttttttgtttycatagcgtgcttggtggtggtggggcttcatttcaatggccaatgatggaatgtatttttccagttatatatcatttgtttttaccctacacactctatt

SEQ ID NO: 196686 - DNA, 201 bp, Homo sapiens
gcagaaggctgtgccatgagaacaggtgcaattaaggagggggaggaggaaatcctcagggcacaaagagaacaagcatagtacaatatcagaagaggctsgcatgggagatgggggatgtcagaaaaaggagtagagtagctattgtagaaatctgactttcttttgtgtacgtcattactgcttaatctgccaaaatat

SEQ ID NO: 196687 - DNA, 201 bp, Homo sapiens
gaagtttatcctcaagaagacagcagtgggtatttgcgttaagaagtggcaggtatgtaggggaagaccgaatgccaaggggatataaacaagacacagayactcgtagttttttgttttcatagcgtgcttggtggtggtggggcttcatttcaatggccaatgatggaatgtatttttccagttatatatcatttgttt

SEQ ID NO: 196688 - DNA, 201 bp, Homo sapiens
gtcttttctgaaatacatatttctcccttttaaatctctttttacaggtgtggacaaccactacaaaataaagtgcagctgaagggccgtgaccttctcaytctaaaaaactttaccggagaagaaattaaatatatgctatggctatcagcagatctgaaatttaggataaaacagaaaggagaggtatgtaacattttc

SEQ ID NO: 196689 - DNA, 201 bp, Homo sapiens
tcatctccttcatcccgtgccttttaggaacactatagctctctgaaaggtcttaccctcagctggatcggggatgggaacaatatcctgcactccatcaygatgagcgcagcgaaattcggaatgcaccttcaggcagctactccaaaggtagggaaactttttgccttgaaactaacccctctcttaaatcatcctcag

SEQ ID NO: 196690 - DNA, 201 bp, Homo sapiens
ttttaaatctctttttacaggtgtggacaaccactacaaaataaagtgcagctgaagggccgtgaccttctcactctaaaaaactttaccggagaagaaaktaaatatatgctatggctatcagcagatctgaaatttaggataaaacagaaaggagaggtatgtaacattttctttttacgttccattactaccagtccc

SEQ ID NO: 196691 - DNA, 201 bp, Homo sapiens
gtcttatccccatctctttagactgctaaagttgctgcctctgactggacatttttacactgcttgcccagaaagccagaagaagtggatgatgaagtctyttattctcctcgatcactagtgttcccagaggcagaaaacagaaagtggacaatcatggtaagcaagaaacaaggaatggaggataagttctttgtgtgg

SEQ ID NO: 196692 - DNA, 201 bp, Homo sapiens
tggtattctgttacagcaacacaaaatggacaaagccacccacacaaagagtgaggaatatgagaagtttatcctcaagaagacagcagtgggtatttgcrttaagaagtggcaggtatgtaggggaagaccgaatgccaaggggatataaacaagacacagacactcgtagttttttgttttcatagcgtgcttggtggt

SEQ ID NO: 196693 - DNA, 201 bp, Homo sapiens
atttaaccagcgtgtttatgtatgctagaatggtaccaagctgttgctgacaaatgatccattggaagcagcgcatggaggcaatgtattaattacagacrcttggataagcatgggacaagaagaggagaagaaaaagcggctccaggctttccaaggttaccaggttacaatgaaggtacaaattgatgcctctctgaa

SEQ ID NO: 196694 - DNA, 201 bp, Homo sapiens
tgtggtattctgttacagcaacacaaaatggacaaagccacccacacaaagagtgaggaatatgagaagtttatcctcaagaagacagcagtgggtatttkcgttaagaagtggcaggtatgtaggggaagaccgaatgccaaggggatataaacaagacacagacactcgtagttttttgttttcatagcgtgcttggtg

SEQ ID NO: 196695 - DNA, 201 bp, Homo sapiens
gtttatgtatgctagaatggtaccaagctgttgctgacaaatgatccattggaagcagcgcatggaggcaatgtattaattacagacacttggataagcaygggacaagaagaggagaagaaaaagcggctccaggctttccaaggttaccaggttacaatgaaggtacaaattgatgcctctctgaaggttcattaattc

SEQ ID NO: 196696 - DNA, 201 bp, Homo sapiens
aaccagcgtgtttatgtatgctagaatggtaccaagctgttgctgacaaatgatccattggaagcagcgcatggaggcaatgtattaattacagacacttkgataagcatgggacaagaagaggagaagaaaaagcggctccaggctttccaaggttaccaggttacaatgaaggtacaaattgatgcctctctgaaggtt

SEQ ID NO: 196697 - DNA, 201 bp, Homo sapiens
aagttatttaaccagcgtgtttatgtatgctagaatggtaccaagctgttgctgacaaatgatccattggaagcagcgcatggaggcaatgtattaattamagacacttggataagcatgggacaagaagaggagaagaaaaagcggctccaggctttccaaggttaccaggttacaatgaaggtacaaattgatgcctct

SEQ ID NO: 196698 - DNA, 201 bp, Homo sapiens
acaccatatagccagggacaacacaggcagaaaaattgcccaatgacactgtggttcttttgtagccagaacaccactgacacagcctggtacctgaggcycttgaaaccagatgtcagatactccattatagccaccacagctgaaatagatttctctacctgcatatgtagcagaagatccaatctctccgaagacggc

SEQ ID NO: 196699 - DNA, 201 bp, Homo sapiens
tatttctcccttttaaatctctttttacaggtgtggacaaccactacaaaataaagtgcagctgaagggccgtgaccttctcactctaaaaaactttaccdgagaagaaattaaatatatgctatggctatcagcagatctgaaatttaggataaaacagaaaggagaggtatgtaacattttctttttacgttccattac

SEQ ID NO: 196700 - DNA, 201 bp, Homo sapiens
tccaataaataaataaatattagttcagaactgttctcttaccattttcttgagaaaacacattttaactgtaaccctgcaaagctgaaacctaattcacyttctctaggtccctaagcagactgtcgctaatgtttatccatttctttctttctttgttgtgtcatcaggctgtcatggtgtccctgctgacagattact

SEQ ID NO: 196701 - DNA, 201 bp, Homo sapiens
caaatatgactgccacatataatagtcaaaaagtggtcttatccccatctctttagactgctaaagttgctgcctctgactggacatttttacactgcttkcccagaaagccagaagaagtggatgatgaagtcttttattctcctcgatcactagtgttcccagaggcagaaaacagaaagtggacaatcatggtaagca

SEQ ID NO: 196702 - DNA, 201 bp, Homo sapiens
taagcataattatcttagattatctttttcttggtttgccacagtgtattgtctagcatggcagatgcagtattggctcgagtgtataaacaatcagattkggacaccctggctaaagaagcatccatcccaattatcaatgggctgtcagatttgtaccatcctatccagatcctggctgattacctcacgctccaggtt

SEQ ID NO: 196703 - DNA, 201 bp, Homo sapiens
ttatttaaccagcgtgtttatgtatgctagaatggtaccaagctgttgctgacaaatgatccattggaagcagcgcatggaggcaatgtattaattacagrcacttggataagcatgggacaagaagaggagaagaaaaagcggctccaggctttccaaggttaccaggttacaatgaaggtacaaattgatgcctctctg

SEQ ID NO: 196704 - DNA, 201 bp, Homo sapiens
tgtatgctagaatggtaccaagctgttgctgacaaatgatccattggaagcagcgcatggaggcaatgtattaattacagacacttggataagcatgggayaagaagaggagaagaaaaagcggctccaggctttccaaggttaccaggttacaatgaaggtacaaattgatgcctctctgaaggttcattaattccattc

SEQ ID NO: 196705 - DNA, 201 bp, Homo sapiens
ccacagtgtattgtctagcatggcagatgcagtattggctcgagtgtataaacaatcagatttggacaccctggctaaagaagcatccatcccaattatcratgggctgtcagatttgtaccatcctatccagatcctggctgattacctcacgctccaggttggtttatttatttgtcttacaaaagagcaaaatcaaat

SEQ ID NO: 196706 - DNA, 201 bp, Homo sapiens
gcgtgtttatgtatgctagaatggtaccaagctgttgctgacaaatgatccattggaagcagcgcatggaggcaatgtattaattacagacacttggatamgcatgggacaagaagaggagaagaaaaagcggctccaggctttccaaggttaccaggttacaatgaaggtacaaattgatgcctctctgaaggttcatta

SEQ ID NO: 196707 - DNA, 201 bp, Homo sapiens
aagtctcacgagatctgatggttttataagggaaaagccctgttgcttggttctcattctctctcttgcctgccaccatgtgaggcatgccttttgccttktgcaatgattgtgaggcctccctagccattggaactgtgagtccattaaacctctttttctttataaatttcccagtctcgggtatgtctttatcagcag

SEQ ID NO: 196708 - DNA, 201 bp, Homo sapiens
tttaagaaaacatgtataataaaattacctaaataagatttaaattcttcctcctttagggttatgagccggatgctagtgtaaccaagttggcagagcartatgccaaagaggtatgctctttacatgtaaagctattattgccttttactgtcccatgaagttatttaaccagcgtgtttatgtatgctagaatggtac

SEQ ID NO: 196709 - DNA, 201 bp, Homo sapiens
cacagtgtattgtctagcatggcagatgcagtattggctcgagtgtataaacaatcagatttggacaccctggctaaagaagcatccatcccaattatcartgggctgtcagatttgtaccatcctatccagatcctggctgattacctcacgctccaggttggtttatttatttgtcttacaaaagagcaaaatcaaata

SEQ ID NO: 196710 - DNA, 201 bp, Homo sapiens
gtctagcatggcagatgcagtattggctcgagtgtataaacaatcagatttggacaccctggctaaagaagcatccatcccaattatcaatgggctgtcakatttgtaccatcctatccagatcctggctgattacctcacgctccaggttggtttatttatttgtcttacaaaagagcaaaatcaaataattcctgactt

SEQ ID NO: 196711 - DNA, 201 bp, Homo sapiens
ttcatctccttcatcccgtgccttttaggaacactatagctctctgaaaggtcttaccctcagctggatcggggatgggaacaatatcctgcactccatcrtgatgagcgcagcgaaattcggaatgcaccttcaggcagctactccaaaggtagggaaactttttgccttgaaactaacccctctcttaaatcatcctca

SEQ ID NO: 196712 - DNA, 201 bp, Homo sapiens
tccccatctctttagactgctaaagttgctgcctctgactggacatttttacactgcttgcccagaaagccagaagaagtggatgatgaagtcttttattytcctcgatcactagtgttcccagaggcagaaaacagaaagtggacaatcatggtaagcaagaaacaaggaatggaggataagttctttgtgtggttccaa

SEQ ID NO: 196713 - DNA, 201 bp, Homo sapiens
tggatttcatctccttcatcccgtgccttttaggaacactatagctctctgaaaggtcttaccctcagctggatcggggatgggaacaatatcctgcactscatcatgatgagcgcagcgaaattcggaatgcaccttcaggcagctactccaaaggtagggaaactttttgccttgaaactaacccctctcttaaatcat

SEQ ID NO: 196714 - DNA, 201 bp, Homo sapiens
acataagcgaatttacgcctggatttcatctccttcatcccgtgccttttaggaacactatagctctctgaaaggtcttaccctcagctggatcggggatrggaacaatatcctgcactccatcatgatgagcgcagcgaaattcggaatgcaccttcaggcagctactccaaaggtagggaaactttttgccttgaaact

SEQ ID NO: 196715 - DNA, 201 bp, Homo sapiens
aactgaacacatttcttagtttttaggtggcccccgctggctaacttgctgtggagttttcaagggcatagaatcgtcctttacacaattaaaagaagatrctgtttaatctgaggatcctgttaaacaatgcagcttttagaaatggtcacaacttcatggttcgaaattttcggtaagtgatggtcagagacttgggtt

SEQ ID NO: 196716 - DNA, 201 bp, Homo sapiens
gcagctgaagggccgtgaccttctcactctaaaaaactttaccggagaagaaattaaatatatgctatggctatcagcagatctgaaatttaggataaaayagaaaggagaggtatgtaacattttctttttacgttccattactaccagtcccctttttttaaaggcagccttcccaaagaaagagggaaaaaaatacat

SEQ ID NO: 196717 - DNA, 201 bp, Homo sapiens
ttattacttattttctaataaagaatatgttttaaaacataatttatatataagatatattttaattctattcttgtccttgatttatagtatttgccttyattgcaagggaagtccttaggcatgatttttgagaaaagaagtactcgaacaagattgtctacagaaacaggtaagtccactgccaaattcacacttgtg

SEQ ID NO: 196718 - DNA, 201 bp, Homo sapiens
atataatagtcaaaaagtggtcttatccccatctctttagactgctaaagttgctgcctctgactggacatttttacactgcttgcccagaaagccagaakaagtggatgatgaagtcttttattctcctcgatcactagtgttcccagaggcagaaaacagaaagtggacaatcatggtaagcaagaaacaaggaatgga

SEQ ID NO: 196719 - DNA, 201 bp, Homo sapiens
tacttattttctaataaagaatatgttttaaaacataatttatatataagatatattttaattctattcttgtccttgatttatagtatttgcctttattkcaagggaagtccttaggcatgatttttgagaaaagaagtactcgaacaagattgtctacagaaacaggtaagtccactgccaaattcacacttgtgttga

SEQ ID NO: 196720 - DNA, 201 bp, Homo sapiens
cattattaagcataattatcttagattatctttttcttggtttgccacagtgtattgtctagcatggcagatgcagtattggctcgagtgtataaacaatsagatttggacaccctggctaaagaagcatccatcccaattatcaatgggctgtcagatttgtaccatcctatccagatcctggctgattacctcacgctc

SEQ ID NO: 196721 - DNA, 201 bp, Homo sapiens
attttctaataaagaatatgttttaaaacataatttatatataagatatattttaattctattcttgtccttgatttatagtatttgcctttattgcaagrgaagtccttaggcatgatttttgagaaaagaagtactcgaacaagattgtctacagaaacaggtaagtccactgccaaattcacacttgtgttgaagaga

SEQ ID NO: 196722 - DNA, 201 bp, Homo sapiens
tcgagtgtataaacaatcagatttggacaccctggctaaagaagcatccatcccaattatcaatgggctgtcagatttgtaccatcctatccagatcctgsctgattacctcacgctccaggttggtttatttatttgtcttacaaaagagcaaaatcaaataattcctgacttgctttaagtgaaacagtttacttaaat

SEQ ID NO: 196723 - DNA, 201 bp, Homo sapiens
gtgtataaacaatcagatttggacaccctggctaaagaagcatccatcccaattatcaatgggctgtcagatttgtaccatcctatccagatcctggctgdttacctcacgctccaggttggtttatttatttgtcttacaaaagagcaaaatcaaataattcctgacttgctttaagtgaaacagtttacttaaatcatg

SEQ ID NO: 196724 - DNA, 201 bp, Homo sapiens
attaacctacaggatgaaactttcttggagagcaataaaatgcatggtcagtagtaaaaaacctactcttgttccaaagcagtccctactggttacatggrgatatttaataggcctattgctacctaagggaacataatcccagagaggacacgaacatgggaaggtgaaatggggatgagttagaagaagcatttccta

SEQ ID NO: 196725 - DNA, 201 bp, Homo sapiens
ttgagcattttttcatatacctgttggccatttgtatgtcttattttgagaaatgtctattcatgtcctttacccactttttaatgtgttttttttttttttcctcttaacttgcttgagtttcttggtattctagtattagtctcctgtcaaatgaatactttgtaatttttttttcccattcagcaggttgtcttttca

SEQ ID NO: 196726 - DNA, 201 bp, Homo sapiens
accagaaagtatgttgccacagaaaccaaggaaggagagtttcaagaaatagggaataggagagattggtgtgtgtgtgtgtgtgtgtgtgtgtgtgtgtttggtagtggagaatagttcaatgttgtcaggatgtggatcatggtggaggtgaggccagaaaggacagttgagcactcatcccaaagacagagatattca

SEQ ID NO: 196727 - DNA, 201 bp, Homo sapiens
ggaccagaaagtatgttgccacagaaaccaaggaaggagagtttcaagaaatagggaataggagagattggtgtgtgtgtgtgtgtgtgtgtgtgtgtgtgtttggtagtggagaatagttcaatgttgtcaggatgtggatcatggtggaggtgaggccagaaaggacagttgagcactcatcccaaagacagagatatt

SEQ ID NO: 196728 - DNA, 201 bp, Homo sapiens
ttctataagtgtgtccagtgtttcctgaagttttgattgttttttctttatgctatgctatctatttccttgaatatttatcccttcacttcttatttttkttgttgttgttgttgtttttattatttcctttcactgggcttcacctttctctggtgcctccctgattagcttaataactaacctcctgaattcgttttc

SEQ ID NO: 196729 - DNA, 201 bp, Homo sapiens
gctatgaacttcccttttagcaccacttttgctgtatcccagaggtttggtttttataggttgtgttattattgtcaatcagattgaagaattttttttttattatactttaagttctagggtacatgtgcacaacgtgcaggtttgttacatatgtatacatgtgccatgttggtgtgctgcacccattaacttgtcatt

SEQ ID NO: 196730 - DNA, 201 bp, Homo sapiens
atggattgtgaagattttttcccactctatgggttgtctgtttactctgttgactgttcctgttggcgtgcaaaaactctttagtttaattaagtcccaastgtttgttttgattgcatttgcctttgggttcttggtcatgaaatccttgcctaagccaatgtctacaagggtttatctaatgttttcttctagaatttt

SEQ ID NO: 196731 - DNA, 201 bp, Homo sapiens
atacctaaggatgattaaggacagatgtagactatgaatctctggagggcagaactggtcccagtgcctggaaattataagcaagaatattccaacttacrctaaaatagaattccaataatttaaaatatccaacagtaagggagattgtctcctctggatatgagtttcctatttttggaaaggctcaagcagaagctg

SEQ ID NO: 196732 - DNA, 201 bp, Homo sapiens
gtgtcattgcatatgatatggatctcttttaaacagcatgcagttgaatcttgcttgtttatccaacttggcacttcgtgcctttgaattggggcatttarccagtttacattcggttaatattgatacatgtaggtttgatcctgtcattgtgttgttacctggttattatgcagacttgattgtgtgctttctttatag

SEQ ID NO: 196733 - DNA, 201 bp, Homo sapiens
tctgtggccaacaagcatatgaaaaaattctcaacaacactaattattagagaaatgcagattgaaaccgcaatgagatgccatctcacacctgtcagagyagctgttattaaatagtcaaaaaccaacaaatgccaatgagattgtggataaaagggaatgctcatacactgctggcagaaatgtaaattagtttagtca

SEQ ID NO: 196734 - DNA, 201 bp, Homo sapiens
atccttcatccctaatactttgtagtaatattccacatttattgaacttttactatttgccactgtcctaagctcttcgtgtatttgaattttttttttttagtcaccagtaaaagctgtctgagttaggaactatgattatttccattccattttacagatgggcaaattgtgttcagagaagttaagtaacttgttcaa

SEQ ID NO: 196735 - DNA, 201 bp, Homo sapiens
ctgcagtatgcctagggaaaggcaggaaatcccccaggcactacccagggatgttctgagtcagatttttctctctgatcctccctcagggacatttgagmtttattgccaggcaggcagccatcgagaagcagggatgagggcaatctataatgtctcccagtgtcctggccaccaagccacccctcgccaacgctacca

SEQ ID NO: 196736 - DNA, 201 bp, Homo sapiens
atgaagaaataaagctgcacatgtagaaccatctgatcttttttaaatatgacaaaagcaaggaatgggaaaagaagttcctaatcaataaatgatgctgkgataaatgactagcaatatgcagaagattgaaactggaccctttctttaatcatatacaaaaatcaactcaaaattgattaaagacttaaatgtaaaacc

SEQ ID NO: 196737 - DNA, 201 bp, Homo sapiens
ttgtgttcacacatactttgtgtgtatatttgtatatatacatacatattttgtgtacatatatacattcctcataagctctcatttgttaaaaagtttcyacaatggggaaaaaagcctttgaaactgttgttctaataaaactcaataattttctacatgagaagctgagaaattgaaaatgatttgttcaatgtcaca

SEQ ID NO: 196738 - DNA, 201 bp, Homo sapiens
ggaaaagaaatatgtgacagaagaaagacttcaaataaaatggctgataattttccaaaattgttgacagatattaaaccacagactcaaaaaactcaaarcaccacaacttggctaattattaaaaaaaaaaaaatgcacccaccccagacatacaacgtaaaatctactgaaaaccaaagacattcagaaaatcttaaa

SEQ ID NO: 196739 - DNA, 201 bp, Homo sapiens
tgattctcaaggacccttatagctgttacatcatgttttcttgattctctaacctctaaatctgtcttcatcagctagttttgtgaaggataaggacaggyctcctgtcctatttggattgacttgtttttttcaggtgatgactatagatagttaccttttagagtactccccatcccaggatgcccattttttttttct

SEQ ID NO: 196740 - DNA, 201 bp, Homo sapiens
aaattcccttgacatttgcttatctgaaaaggatcttatttttcctttgcttatgaagcttagcttggccagatatggaattctgagttgcaatttatttyctttaagaatgttgaacttgggtggctgaagtgcgaggatcccttgagcccaggaattcaaggttgcatgtagctatgatcatgccactgcactccagcc

SEQ ID NO: 196741 - DNA, 201 bp, Homo sapiens
tctaggtcttagaaggatgttttgtcagggtaaaccactaattctatgaagtgctcatatatgtccctttctttaatgctccctgtgctcctgcattaatkaaactttatttatttaattatttttgtttacattaggtccacttatcaaaggtgaagttggtgatatcctgactgtggtattcaagaataatgccagccg

SEQ ID NO: 196742 - DNA, 201 bp, Homo sapiens
ttattgtagatcctatgtgtcctaacatcaagtcctaggttcaactgaattggtggttttaaatggggagtttggaaatggaaattaatctaagagggttrtttctgcttttctgttgcttacagattcttaagacccctctctttctattcctttcttatgagtacccctttcagcttactattgctaaggaaaggatct

SEQ ID NO: 196743 - DNA, 201 bp, Homo sapiens
tacaaccgtgcctcccagccattcagcatgcagccccatggggtcttttatgagaaagactatgaaggcactgtgtacaatgatggtgagccaacagggtytctagtaaatgtgggctctaggtggtaccatgtgtctctagaaaacaaataaatgggagatggagaggatgaagtaggcagaattatttgccatatgtgg

SEQ ID NO: 196744 - DNA, 201 bp, Homo sapiens
gaggattttgctgataataggatatgtcagacttgaagaccagagggtggcaggaatgtggtcaggttcaggccctgggttgaagacataggcagggatgrtaggagggaattattgtagatcctatgtgtcctaacatcaagtcctaggttcaactgaattggtggttttaaatggggagtttggaaatggaaattaatc

SEQ ID NO: 196745 - DNA, 201 bp, Homo sapiens
gagacctgggagttgagagaaatttctgacccggtgcaactggaggttccttgttacacttctaggtgaggtggtcacttatcagtggaacatcccagagwggtctggccctgggcccaatgactctgcttgtgtttcctggatctattattctgcagtggatcccatcaaggtaaatacaagattggctacctggaggtg

SEQ ID NO: 196746 - DNA, 201 bp, Homo sapiens
acagtacttcattgaggcccatgagattcaatgggactatggcccgatggggcatgatgggagtactgggaagaatttgagagagccaggcaggtaagagrcagtgggatccctctctttaattctttaattggtccagctccaaacatttattatctttcttccagaaatctctcactttactcagggatccaaatcatt

SEQ ID NO: 196747 - DNA, 201 bp, Homo sapiens
gaaatttatcaatttcctctagattgtctagtttatgtgcatagaggtgttaataatattctttgttggctatctgtatttctgtagggtcaatggtaatrtcccctttgtcatttctaattgtgtttatttggatattctttctttcttctttattaatctaactagaagtctattttattagttacttcaaaaaacaaa

SEQ ID NO: 196748 - DNA, 201 bp, Homo sapiens
gtctctgtcgggttttggtatcagggtgatgctggcctcgtagaatgagttagggaggagtccctccttctcatttttttgcaataggtttagtaggaatkgtagcagatctttgtacaccttgtagaattgggttgtgaatctgtctggtcctgtgctctttttttatggaggatgtggctggtaggctattactgattc

SEQ ID NO: 196749 - DNA, 201 bp, Homo sapiens
actgcagttgcataatctcagctcactgcaacctccgcctcctgggttcaagcaattctcatgcctcagccttgcgggtagctgggattgcaggcacatgmcaccacacctggctatcttttttgttttgttttgtatttttagtagagacggggtttcaccatgttgggcaggttggtcttgaactcctgacctcaagtg

SEQ ID NO: 196750 - DNA, 201 bp, Homo sapiens
atagaaaaattataccctttgaaaagcttttgctctgtcatagtgatgtgtgattggacttaatgggcccaattattaaatatctggatttaggtatgagytgtattttataaggaccctgtatacaagtatatcaattatagtaccttaagagctaaccaaaaaatcattaacctacagaagcatgattatgatctaagc

SEQ ID NO: 196751 - DNA, 201 bp, Homo sapiens
cagcactaaggatcagggaaattcaaatcaaaaccacagtgtgatatcacattacttctgcaagaatggccatagtcaaaaaaataaaaaaaagtaatggrtgttggcatggatatggtgaaaagggcacacttttaaactgttggcggaaatgtaaactagtacagcctctatggaaaacagtgtgaagattccttaaag

SEQ ID NO: 196752 - DNA, 201 bp, Homo sapiens
ttggcatgacatgcagacatacttgaaataggaggaatgcagaataggcttagagtctgaacttgaagaaggtatctagaagggctaaaccaaggttagawgtggtttagtagcatgatggaaccagaaaataaaataggccagatggaaaaaaaactttggaaattaatataatggaccatactcgggataggtgtgtgc

SEQ ID NO: 196753 - DNA, 201 bp, Homo sapiens
agaagagaatgaaaatcaagcaaaaggggtttcctcttataaaaccatcagttattgtgagacttatttactactatgagacagtatggaggaaagcacgsccatgattcaatgatctcccactgggtttctcccacaacatgaattataggagctacaattcaagatgagattcgtgtggaacacagcaaaaccatatcg

SEQ ID NO: 196754 - DNA, 201 bp, Homo sapiens
acctagggaagctatgttataccaggatggcctcactattccccattctcaatgttttcatatgatatactggaattatggaatattttatgaaacaaccrtgacaataaacagtgaagggggaggaaggaaatcatgaattcatgaaccagattttactgggttttctatagcttcaaggtatgagtctctgaggatggt

SEQ ID NO: 196755 - DNA, 201 bp, Homo sapiens
  misc_feature (1)...(201): n = A,T,C or G
tgaggatagggaaagtagaaaagaaaggttgagggtgtcccaggagggagaagagcaaggtcacaaaaataaaatgatggaggaatgatgaagaaagatcntaaagaagatgggattcactcaccactgcctcttggggagacctgggagttgagagaaatttctgacccggtgcaactggaggttccttgttacacttct

SEQ ID NO: 196756 - DNA, 201 bp, Homo sapiens
tcttaaagtccatttttagtcccaaagtcctatgattttggaaaactgaaacatagggaagattaaattgctgcatttcatatagcaagtaatggaagaaygagaaaataaactcatctcttgactccttgaccagagttctcctcattattcaatattccatgttgctgctactgctgctccaaaatgcctttgtagttc

SEQ ID NO: 196757 - DNA, 201 bp, Homo sapiens
aaacagtgaagggggaggaaggaaatcatgaattcatgaaccagattttactgggttttctatagcttcaaggtatgagtctctgaggatggtaagttgtrataaatgctaggggcagaataacttaggaacatcaaaatgtgaaaaaactatatatatacacaaggaatcagttttttcattgtaccgctgtttaattat

SEQ ID NO: 196758 - DNA, 201 bp, Homo sapiens
atcagggttttggaggattttgctgataataggatatgtcagacttgaagaccagagggtggcaggaatgtggtcaggttcaggccctgggttgaagacayaggcagggatggtaggagggaattattgtagatcctatgtgtcctaacatcaagtcctaggttcaactgaattggtggttttaaatggggagtttggaaa

SEQ ID NO: 196759 - DNA, 201 bp, Homo sapiens
ttttttgtactgacaaatatatatcttccttagccttgcagataattcatgatatcctttcatcatcttcttctttcctccctccttccctccctccctcyctctccctttccctctccccctctccctttccctctccctcacctcggtggcccctaaaccttgctcctgatccataaatctgctttaatatttgcttgt

SEQ ID NO: 196760 - DNA, 201 bp, Homo sapiens
aagcagaatcaaaaccaaaatcagagtatcaagaaatccaagccaggtcaaaactaaaaccaaagtatcaagcaatccaagtcaagtcaaaaaaaagaacyaaagtgctggtacaggcacaccatgggtgatcaggccacgcttccactcaaatggagtaggcaagttccaaagactagtcttaccaactttcagatgtct

SEQ ID NO: 196761 - DNA, 201 bp, Homo sapiens
ttttttccttcagttacctgggaggaaccattgattgtcctgtcctgaagggagttcctcctaggtctggttggaactttgtatggtaattaagatttagwtcccctgttaggaaacctgctgggttaagggaattttcagtggttaatgttaaatcatccttttcttttattgccttaggatacttctcaactggtgagg

SEQ ID NO: 196762 - DNA, 201 bp, Homo sapiens
caaaccaggccccagaggaacaggacattccagtagttttgtttctggaaaagagggcacccagcccttccccctccctcatcctcccatcccagtaaacyctgccaaattggaatcctggacttaatttaggagaaaggccctgtaaccaagatactgactgaacatggctggcggactcaggctggggtctgcagtgca

SEQ ID NO: 196763 - DNA, 201 bp, Homo sapiens
acttgtagaataagtcctgtcatctctgtgcaattgattgcacctctggcacctacctaccccataggcctattagaaatatcaaatgataaatctgtttktaaactagacagaatcctataaggagaaaatctgtaagatttcattccctccctatgtctcaccatcctttgccctctggttgcagcagtagttaatact

SEQ ID NO: 196764 - DNA, 201 bp, Homo sapiens
tgtccatatgtacccaatgcatagctaccacttataagtgagaacttttttgttttctgttcctgcattcatttgctgagaaattaatggcctccaggtayatccatgttgctgaaaaggacataatttcattctttttcaagtctgcatagaattccattgtttgtacataccacattttctttatccagtccaccactg

SEQ ID NO: 196765 - DNA, 201 bp, Homo sapiens
ccttgggtgcagatggcaagcaggtattgtcagggttatctggctggaaagcctgctgggagaaggatgaagctgggttgctggataggagttaagcatgraactgggttctaaagtttagggaatagaagaaaaataatcaagctggtccatcagaaattaatagttggtgacctcatactatcttgcatgttatttttt

SEQ ID NO: 196766 - DNA, 201 bp, Homo sapiens
aagaagatgagacatttcaggagagcaataggatgcatggtgagttgggaaaaggtggccacattgtgacagggaacattgttggagggtatccactgggyctagtatttggtggatgctttcacatacatagtcctttttagtcatcacgagggcaaggagtagtagatggctcttccctgttttacatgtgaggacact

SEQ ID NO: 196767 - DNA, 201 bp, Homo sapiens
ttttactagtttgttgattccagaaatattgagagttttattcttctatctcttattcctttccatttccatatatgtttgccaggatcaccaatactagkgatggtagtggtcatcttcaactttctcccaatctcaagagagtgcatgtaaagtttctctctctttgctatgattcctttttggaaatttatttaaatt

SEQ ID NO: 196768 - DNA, 201 bp, Homo sapiens
attctattgtttaagccatttggatcataagtcaccactgttgaatgcttgttcactgtatgctgatggcctgtactagtctctcccaggaatattttcarttttatcatgtgtttctccagttgtggagctcttgcctgggacagttttctgtctaggtaaatgagttcaaggcacaactgctttgttgacacctctctg

SEQ ID NO: 196769 - DNA, 201 bp, Homo sapiens
atgcccttgtttacactgacaacaaagtggtattggagtgttatagggttacagagaataccttcaattaccaattataggtttttaatttaccttggctyttaaaggaatagggtacactttttttttcttaactacttgtatctctctctctctctctttctttctctctctctgtctctgattttctgtctctttttc

SEQ ID NO: 196770 - DNA, 201 bp, Homo sapiens
ggctggggttacatgaaccaactgttagccaagttcttgtgtccccctggagagcttgctcttggggagatacaggtagcaaagctttttgtggggttatyccatatccccacaaagggtccaaacagagtttgaagttggtcctactataattcctggccattttcataaaggaaagcccaggtgggaccagttcttgta

SEQ ID NO: 196771 - DNA, 201 bp, Homo sapiens
acaaagtggtattggagtgttatagggttacagagaataccttcaattaccaattataggtttttaatttaccttggcttttaaaggaatagggtacactytttttttcttaactacttgtatctctctctctctctctttctttctctctctctgtctctgattttctgtctctttttctctttgactttccttttacct

SEQ ID NO: 196772 - DNA, 201 bp, Homo sapiens
atattagatgttattagggaattttcttaggtggaataatggcattatagcgacataggagatgcgtgctaatatcatgatgtttgtattctacttccaartgattcaacaaaagcaaacaaacaaaaactgtatgtatgtgtgtgtagatgtatatacacatagagtagataaataaagatggcaaaatgttagcaatag

SEQ ID NO: 196773 - DNA, 201 bp, Homo sapiens
tcccctccctgtcataaatgccttagagcttggacttggatctcagcttaatcagttttgtctccacttcccctttcttgcttcaaggttcacatgtgtgmgaggcagataattctaggggctgccatggcttggctaagcttcccttgaccactgagcatttctaagggagttgaggctggtggctcctccttccttcct

SEQ ID NO: 196774 - DNA, 201 bp, Homo sapiens
aaggaatcaggtaagttaaagaaactgggctaaatgggttttgctttctcagtcactcaacctggctcttgcctcttcagttttctggacacgtagaaagyccctttgttctctttcttctacaccagcagtttttatttgcctgtttcccagagtaatgtgggccatggagtcaggccacctcctctgggctctgctgtt

SEQ ID NO: 196775 - DNA, 201 bp, Homo sapiens
tgtagctatgggatctgggacaataaagtaagtgaaaatgagattggggctgacaatgggatgagagaaattgctggcctctggtcctggctgaatggctwatcaaccatttaaatttgcataggtaaattccacttctctcagctgaaattttctcatctgtaaattggagttaataatttttgccctatatgccttaaa

SEQ ID NO: 196776 - DNA, 201 bp, Homo sapiens
ctctaggtattgccccaaccagtatttctaatcctccattgcacctgtccctccattgccccaactgatatttctaatcccctgacacctgtccctctccraattacttcaaaacctgttgagctcacatgaattgacccagcctgaaaccggtttggctctatgcattgaagcctagtgcaggcctgcttcttttgaaat

SEQ ID NO: 196777 - DNA, 201 bp, Homo sapiens
aaggttaatgtgaccatgggagtggttggtagaattggagtagacatcaaagttattggagttaaaagggctagaaactgtgaggcttgagtatttgatgrgtcagcacccatggttggaattgagggagaggaagactgagccaggtactaaagacttccataaatgaagagaactgctagctaacaataacaagaaatg

SEQ ID NO: 196778 - DNA, 201 bp, Homo sapiens
gatgaacccggtacctcagatggaaatgcagaaatcacccgtcttctgcgtcgctcacgctgggagctgtagaccggagctgttcctattcggccatcttkgctcctcctcccccaggtgttctttgtgcttcttgtatttggatgtctaggcctctatcaaggccagggaagttttcccctattgctcctccaaatatgt

SEQ ID NO: 196779 - DNA, 201 bp, Homo sapiens
tgatgggtcagcacccatggttggaattgagggagaggaagactgagccaggtactaaagacttccataaatgaagagaactgctagctaacaataacaakaaatgattgtagttctagccaaataatatgagcctcaaaagagatatgtttttacaaaaagaggaggaacaatgatctcaaagaagtattgagatgatgt

SEQ ID NO: 196780 - DNA, 201 bp, Homo sapiens
gccagaaaggacagttgagcactcatcccaaagacagagatattcacgagtagagttaaagtggcatagagaggaaggcagaggtgttgaggatgactcakcagtttcaagttgtgtgaaaccatagtacatagctgatgccatgctcctggccagtgctggagtagtctggtctcatctccccaccttgtcttgtgtttt

SEQ ID NO: 196781 - DNA, 201 bp, Homo sapiens
tgcaatttcattactttttttctttgtttgtgggttaggaacaatttttttttcaataggttattgtggtacaggtggtatttggttacatgaataagttstttagcggtgatttgtgagattttggtgcacctatctcctgagcactatacactacaccctgtttgtagtcttttatccctcgtgcccccccagcctttt

SEQ ID NO: 196782 - DNA, 201 bp, Homo sapiens
tgcttgtctcacttggatgtacttctctgctgcagatcccataagagacacaaattctggcctggtgggcccgctgctggtgtgcagggctggtgccttgrgtgcagatggcaagcaggtattgtcagggttatctggctggaaagcctgctgggagaaggatgaagctgggttgctggataggagttaagcatggaactg

SEQ ID NO: 196783 - DNA, 201 bp, Homo sapiens
ctcttgttttgtcctaaacaaagatagtcactttttggtcagtatcctctggaaaaggaacctctcaaggcttgaagatggggggcaaaattatgactctytttcttctttcccagagtggcttccagcttcttaaagtctgacaagaaccggatagggggaacctacaagaagaccatctataaagaatacaaggatgac

SEQ ID NO: 196784 - DNA, 201 bp, Homo sapiens
aattgttgacagatattaaaccacagactcaaaaaactcaaagcaccacaacttggctaattattaaaaaaaaaaaaatgcacccaccccagacatacaaygtaaaatctactgaaaaccaaagacattcagaaaatcttaaaaaaacagagaaaataaaatgaaatatagaaagaaaagttatagcaattttttcatcag

SEQ ID NO: 196785 - DNA, 201 bp, Homo sapiens
aataagtccgagtgcatggtagccccttgtagagtccccagagtcttcccccttcaacccagcttttgtgtcttccttccatctattctcagtatcttccmtttgaatactttttaggagcatgccatttgtgtcagtacctcagtggcatctgttccacctggctgtgtctggtcagccactttacttaacaagtgttta

SEQ ID NO: 196786 - DNA, 201 bp, Homo sapiens
agtgaactactttgaagaagtggtcaatgggttgttgctgccatgagcatgtacaacctctggagctagaagctcctcaggaaagccagttctccaagttyttaacctgtggcactgaaaggaatgttgagttacctcttcatgttttagacagcaaaccctatccattaaagtacttgttagaacactgaaagactgaat

SEQ ID NO: 196787 - DNA, 201 bp, Homo sapiens
tggaaatcaaaactatagtgagataacacttttcacatgctaggataactaaaataaaagatttttaaaagcagacaataactaattttcatgcagatgtwgagaaattggaaccctaatatgttgctggtgagaatgcaaaatggtgcacgtgctttggaaagcagtttggcaattctttaagtggttaaacatagcatt

SEQ ID NO: 196788 - DNA, 201 bp, Homo sapiens
ctccttggcagtgaactactttgaagaagtggtcaatgggttgttgctgccatgagcatgtacaacctctggagctagaagctcctcaggaaagccagttytccaagttcttaacctgtggcactgaaaggaatgttgagttacctcttcatgttttagacagcaaaccctatccattaaagtacttgttagaacactgaa

SEQ ID NO: 196789 - DNA, 201 bp, Homo sapiens
atgttgagaaattggaaccctaatatgttgctggtgagaatgcaaaatggtgcacgtgctttggaaagcagtttggcaattctttaagtggttaaacatarcattaccatacaactcaggaataaatgaaaacatatatccacataaaaacttgtacacaaatgctgatagcagcactattcataataactaaaaagtgga

SEQ ID NO: 196790 - DNA, 201 bp, Homo sapiens
cagaggtgttgaggatgactcagcagtttcaagttgtgtgaaaccatagtacatagctgatgccatgctcctggccagtgctggagtagtctggtctcatstccccaccttgtcttgtgtttttgttttccagccattaatgggtttctgttctctaacctgcccaggctggacatgtgcaagggtgacacagtggcctgg

SEQ ID NO: 196791 - DNA, 201 bp, Homo sapiens
aaaagaagaaactgaggtttagatgggaagtgagggattaggtctcttggcccaaggtcacacaataagttaattatgggggtacaaggtacaggcgcttsgaaaacatagaggaaagaacaattgtctaatgaaatcaaagaaaactttgcagagacatgtaaaatttaaggtagggctagaaagataaggagtaaagtg

SEQ ID NO: 196792 - DNA, 201 bp, Homo sapiens
tgtgcagcttcagggcatgaggaagggtgcagctatgctctttcctcatacctttgtcatggccatcatgcagcctgacaaccttggtaagtgccttagcrgctggccctagaggctttgttgggtatagggccaggaatggggtcgggaagagggagggatggtgaagagaaaataataggcatgttaagggttctagga

SEQ ID NO: 196793 - DNA, 201 bp, Homo sapiens
taatcctcattttactgatgagggaactgaaaaacacagaggtttagcaattgccacaaggttttatgtgtgcatatatatatatatatatatatatatayacacacacacacacacataatatatttttatatatgtatatatatatgatttatatataataaatgaaagatagggttaccaaccatggcagtttgccta

SEQ ID NO: 196794 - DNA, 201 bp, Homo sapiens
gtgctcagctaaaagttaggtgattctattactaaaaaagaaggagagaacggaaatggagatacaaattagcagtctccactactttgtttttggtgctstcactacactttagcaatttttactctttgcgttgttcgttgaaggttgaagtcttcctgctaaacatctaaaaattttactttatttttaattcttgat

SEQ ID NO: 196795 - DNA, 201 bp, Homo sapiens
agattccatctatcacctctgtctatatacatgctaaaaggaaaatatgttactaattgatactgactttgaaaacactaatttaagccacaattgaattwtcagcaactactgagaataaaatttgactttatgtagaaatcagttatttatttagttcctctcacttgtttctgatcagaacccagtgagatacttcta

SEQ ID NO: 196796 - DNA, 201 bp, Homo sapiens
gatcctgttccaactcactgggtgggaacccccaactgggatcttcagccacctcctacaggtgtgtttggaccagcaactggcccatatctccctgacgyagagctcccagagggaggaacagactgccatctttgctgttttacagccttcactggtgataccaggtactggaaaatctgaggtaactcagggctggag

SEQ ID NO: 196797 - DNA, 201 bp, Homo sapiens
aagtagatgtggaaagaaatgagtagaccctttctttcaacgtgtttataaactagtagaagggatcattttaaaagagaggggcacttagccctttaacmtgtggtttagatataaagtgcattagaggtggagaagtgaagaatgtagaactctatttgggccaaaatagtcagggagggctttctggaaaagaaacat

SEQ ID NO: 196798 - DNA, 201 bp, Homo sapiens
atatatttttatatatattttaaatatttaaatattttatatattttaaatattatatatatatttgtgttcacacatactttgtgtgtatatttgtatayatacatacatattttgtgtacatatatacattcctcataagctctcatttgttaaaaagtttctacaatggggaaaaaagcctttgaaactgttgttcta

SEQ ID NO: 196799 - DNA, 201 bp, Homo sapiens
caggaaggaagagttgaaaagacagagggaaaagactaatttttggaacaaggtttctgataaggcagcagggaatgagaatcagagctaacatgaaagaktagtgcaagagtggaggaaagtcatctttctactctaagaagaaagaagacagaaaatataaggatcaatgtgtaggtttgaccagggggtttgacagac

SEQ ID NO: 196800 - DNA, 201 bp, Homo sapiens
gtattcaagaataatgccagccgcccctactctgtgcatgctcatggagtgctagaatctactactgtctggccactggctgctgagcctggtgagtgggracacttagtgaaagaacaaaggacatgcatcacgtctgcttcaggcttctggatttttccttaaaaaattaatgtacttcagactggagtgatagctcat

SEQ ID NO: 196801 - DNA, 201 bp, Homo sapiens
ttaataatgaaaaaacttgtatgctgaggttgctaagattgatggtaagaatgaatattctatctatgcaattgtgaagaaggaaaaataaattcatgcargtttttctgtagcacttcaaactacaaaagctatggccacaatgtatgataagtgcttagttaagatgaaaaaggcattacatttgtgggtggaagatat

SEQ ID NO: 196802 - DNA, 201 bp, Homo sapiens
tcaacgagacagaaagttaacaaggatatccaggaactgaactcagctctgcaccaagtggacctaatagacatctacagagctctccactccaaatcaamagaatatacattcttttcagcaccacaccacacctattccaaaattgaccacatagttggaagaaaagcactcctcagcaaatgtaaaagaacagaaatt

SEQ ID NO: 196803 - DNA, 201 bp, Homo sapiens
gctgtccttcagataagtttttcttgcttttatattctttgattcccttggggatttgattgtggtgcaaggtgggttcagtagaatgtttttttttttttaagtgatcctcttaaaaatattttagtacatagaaagtcatttatacatattattaaagcaaattatgaaacattatgtgtagaaaacttccatttatgt

SEQ ID NO: 196804 - DNA, 201 bp, Homo sapiens
tccagtttcagtcttctgcatatggctagtgagttatcctagcaccatttattcaattaggggattgtttgtttccccactgcctgtttcatttttagcttgttgaagatcagatagttgtaggtatgtggccttctttttgggctcattatcctgttatattggtctatgtgtctatttttgtaccagtaccatgctgtt

SEQ ID NO: 196805 - DNA, 201 bp, Homo sapiens
gttggtcttgaactcctgacctcaagtgatctgcctacctcagcctcctaaaaagctgggattacaggcgtgaaccaccacacctggccattgagcagttktttttttcctatatgattgttggctgcatgtatgtcttcttttgagaagggtctgttcatgtcctttgcccacttttaaatggggttgtttttaccttgt

SEQ ID NO: 196806 - DNA, 201 bp, Homo sapiens
ttgactttaaaaaagaataatgaaatatatacagtgtttgtaagatgtatgggtgggagctatgcttctatagtttggtgaagctactgtatatttatttmagatatgtgaaaatgtgaaaaaagaaagtaagccttagaatcaaggaattaatggtaataattctcacttatgtaatactctgtgacacagaccatacta

SEQ ID NO: 196807 - DNA, 201 bp, Homo sapiens
catgaagctggttctgacttagcttccccataaatactcaaatgaaaatgaggggttgatggccaggtgctgatagtactctttggattcctctagttatrgttacattttcctgagcaacaaggatgggctcctgggttccagatacaagaaagctgtattcagggaatacactgatggtacattcaggatccctcggcc

SEQ ID NO: 196808 - DNA, 201 bp, Homo sapiens
catcactggagagttttaagcagaagtagggatgtaagagcagattaatgtatgttttcaagtgagagatgttccaaataagtcttaaagtccatttttartcccaaagtcctatgattttggaaaactgaaacatagggaagattaaattgctgcatttcatatagcaagtaatggaagaacgagaaaataaactcatct

SEQ ID NO: 196809 - DNA, 201 bp, Homo sapiens
ttaattcaaccagttatgttgaattacattgattgatgttgatgaacaatcatcaaacaagtgtcaggtaccagggatatcaaaataagtaagacatagcygctatttttcagcgtctataaatggaatgaggcacagaaataataatgctggatgctgtgtgctgtacaaaaagggcaagcaataataacagttaacatg

SEQ ID NO: 196810 - DNA, 201 bp, Homo sapiens
ggcagcagggaatgagaatcagagctaacatgaaagattagtgcaagagtggaggaaagtcatctttctactctaagaagaaagaagacagaaaatataargatcaatgtgtaggtttgaccagggggtttgacagactgacagataatttcagcctatggtctttctcttctctctgatggagcaaatagagtcatctgc

SEQ ID NO: 196811 - DNA, 201 bp, Homo sapiens
ttgtatgtgtcaatagtttactatttgttattgctgagtagtattccatggtatgaatgtaccacattttgtacaacttttcactgttaaagggaatttakattttatccagttattagctcttgttaataaaattactatgactatctgtatagaggcattgattgattgagacagagtctcgctctgtcacttaggctg

SEQ ID NO: 196812 - DNA, 201 bp, Homo sapiens
atatatagccaccatttgaacaaaaatggttttctggggttgtcagtcattggcattctatcaacaagaatagtgaaggggaaaatgtctttgaatattcrtacagacttagcaaatgtgggtggagaatacaactcttctgtttacccttagagagagagatgaatgattgcacattatgacttcctatataatttaaaa

SEQ ID NO: 196813 - DNA, 201 bp, Homo sapiens
gagccaacagggtttctagtaaatgtgggctctaggtggtaccatgtgtctctagaaaacaaataaatgggagatggagaggatgaagtaggcagaattakttgccatatgtggatgttgttgaatgaatgaataatataatagtaaaacagagctgggcttcaataataagagaaaatttcttttaaatatatttaaata

SEQ ID NO: 196814 - DNA, 201 bp, Homo sapiens
acatgaagctggttctgacttagcttccccataaatactcaaatgaaaatgaggggttgatggccaggtgctgatagtactctttggattcctctagttayggttacattttcctgagcaacaaggatgggctcctgggttccagatacaagaaagctgtattcagggaatacactgatggtacattcaggatccctcggc

SEQ ID NO: 196815 - DNA, 201 bp, Homo sapiens
tggattcctctagttatggttacattttcctgagcaacaaggatgggctcctgggttccagatacaagaaagctgtattcagggaatacactgatggtacrttcaggatccctcggccaaggactggaccagaagaacacttgggaatcttgggtaagggaattctacttccctcctagtgtttagcagcctgaactccac

SEQ ID NO: 196816 - DNA, 201 bp, Homo sapiens
ttccctctactttcttctattgggcctgcagaaaggggtggataaagaattctttcttctcttcactgtgttggatgagaacaagagctggtacagcaatrccaatcaagcagctgctatgttggatttccgactgctttcagaggatattgagggcttccaagactccaatcggatgcatggtatggggagtacttttgc

SEQ ID NO: 196817 - DNA, 201 bp, Homo sapiens
cactccagcctgggtgacaagtaagactccatctcaaatatatacatacatatatatatatatatatatatatatatatatatatatatatgagcttagakacctgaaataggaatatagccaaaactaagccacagcctgagtttttctctatcaaatactcattttctcaatccccgaataggctatggcttagacttg

SEQ ID NO: 196818 - DNA, 201 bp, Homo sapiens
gataatggcctccagctccatctatgtttctgccaaggacatgatctcattcttttttatggctgcgtaatctacagtgtacttataatgcttcttttttwaaaaaaaaaaatccaatctactattgatgggcatttcagatgactctgtgtctttcctattgcgaatagtgctgcaatgaacatattcattcatgtcttt

SEQ ID NO: 196819 - DNA, 201 bp, Homo sapiens
tatctttattattgtgaatagtgctacaagaaatatataagtgcaggtattccattgatatattgttttcttttcatttgggtaaatacctagtagtgacwttgctggattgaatagtaattttttagtttttttagaaattttcataccatgttttatagtggctccactagtttacatttccaccaatagtgtgtaaga

SEQ ID NO: 196820 - DNA, 201 bp, Homo sapiens
atttgttgtacagactattatctcactgaggtactaagcctagtacccaatagttattttttctgatcctttccctcttcccacccctcacatttgagtargctccagtgtctgttgttccctgatatgtgtccatgtgttcttatcatttagctcccacttataagtgagaacatgcagtatttggttttctgttcctgc

SEQ ID NO: 196821 - DNA, 201 bp, Homo sapiens
tttggattgacttgtttttttcaggtgatgactatagatagttaccttttagagtactccccatcccaggatgcccattttttttttctccatttcagcaktgccccccagagacattgaagaaggcaatgtgaagatgctgggcatgcagatccccataaagaatgttgagatgctggcctctgttttggttgccattag

SEQ ID NO: 196822 - DNA, 201 bp, Homo sapiens
tagtcatttgggtatatacccagtaatgggatggctgggtcaaatggtatttctagttctatatccctgaggaatcgccacactgacttccacaatggttsaactagtttacagtcccaccaacagtgtaagagtgttcctatttctccacatcctctccagcacctgttgtttcctgacttttgaatgattgccattcta

SEQ ID NO: 196823 - DNA, 201 bp, Homo sapiens
aacatacgtgtgcatgtgtctttatagcagcatgatttatagtcatttgggtatatacccagtaatgggatggctgggtcaaatggtatttctagttctakatccctgaggaatcgccacactgacttccacaatggttgaactagtttacagtcccaccaacagtgtaagagtgttcctatttctccacatcctctccag

SEQ ID NO: 196824 - DNA, 201 bp, Homo sapiens
ctcagacagaaaaagtaatgaaatagtagcatttgcagcaacctggatggaattggaaactgttattctaagtgaagtaactcaggaatggaaaaccaaayatcgtatattctcactcataagtgagagctgagctatgaggatgcaaatgcataagaatgatacaatgaactttggggattcaggggaaagggtgggagg

SEQ ID NO: 196825 - DNA, 201 bp, Homo sapiens
atatagacaatctatggtcatgcctcaaggaactggagaaacaagaacaaatcaagcccaaactcagcagaagaaaggaaataaccaagatcagagcagarctaaatacaactgaaacaaaaatatacaaaagataaatgaaataaaaaactggttctttgaaaagacaaataaaattgatagaccgttagggagattaac

SEQ ID NO: 196826 - DNA, 201 bp, Homo sapiens
tgggagcactctcaggatctgtgtcactcaagctggccagagtcccccgcagggatgctccacagggcaggcctaagccgcctaaggggctgcctcgactrtctgttaatcaccttgcttcctggtcaaggaaccaagaaatgtagcaggaaaagccacagataaaacccctcagacactgagttaaagaaggaagggttt

SEQ ID NO: 196827 - DNA, 201 bp, Homo sapiens
ggtgatcaggccacgcttccactcaaatggagtaggcaagttccaaagactagtcttaccaactttcagatgtctggactccaggtgccatttccttcccrgtgttcagccactgcattgatcctccacaggggcctgccatgcgctgctctggcaaggcattccactggggcaattgcctacttgggagcactctcagga

SEQ ID NO: 196828 - DNA, 201 bp, Homo sapiens
gtttctagaccaaagaaacccaaacaccattttatatttaataatgcttcttgtatgatttttatgccagataagctaaatttcacctttatattagtatrctattaatgttaaacttagttttagtaaaactttgtatacgtatttattcagtttttaatgtcggaccataaggtaagatttttatagactctttttaac

SEQ ID NO: 196829 - DNA, 201 bp, Homo sapiens
agactcctggttgacattggagtctttattgaaatttccccagattaaatggtcctaatttactaatgcccagtctgaggagagtcaggagggacagaggwacttttctgaagtagagagctgtctttgacttggcaagtccccacagggtataacaaggcaagcattaaatacaatagtttgaggcaaaatcgacttggt

SEQ ID NO: 196830 - DNA, 201 bp, Homo sapiens
actttttaactatgcccttcaaaatccaatcattgaaaacttattgaattaaaaggaatcaggtaagttaaagaaactgggctaaatgggttttgctttcycagtcactcaacctggctcttgcctcttcagttttctggacacgtagaaagcccctttgttctctttcttctacaccagcagtttttatttgcctgtttc

SEQ ID NO: 196831 - DNA, 201 bp, Homo sapiens
gctggataggagttaagcatggaactgggttctaaagtttagggaatagaagaaaaataatcaagctggtccatcagaaattaatagttggtgacctcatrctatcttgcatgttattttttgtactgacaaatatatatcttccttagccttgcagataattcatgatatcctttcatcatcttcttctttcctccctcc

SEQ ID NO: 196832 - DNA, 201 bp, Homo sapiens
taaggctagaaagagagattgtccttcagttacagcttatctgagttactaccaagggtggaaacaactttttctttatattttatatggagagggagcarctgggacaatttctttaccagccactctttgttcctcaccaaaaaatgtagatgggtaggctgtgttggcttttgtgtctttgagtaattaaagggtcaa

SEQ ID NO: 196833 - DNA, 201 bp, Homo sapiens
agtgcaggatatttgtaaaagagtagttcaaatgctgaccatggcagtgagggaatttggaccagatagggaaaagaatggagtcaggaggaacctgattwaaaaaggtagaggagagtagggatcttctcaaggacatagcacttatcccaccttgtaattctacatggtttttttgttggtttacttgtatgttgtttc

SEQ ID NO: 196834 - DNA, 201 bp, Homo sapiens
aagcacagacagggaagcccaggagttcacctgtctttgtaggcagtaggaagaaagatggtttaatagtgccaataacacaactacctgcccactggtcrggtattttggtgtaagctctatgcccacaaatccagtataatccagtgggggctgtccagtcccggtgggactctgggtgggttcacagagtttgcaact

SEQ ID NO: 196835 - DNA, 201 bp, Homo sapiens
gacaatctgggcctctggcttgccatgtgcacaagcataacaattgcttttttttaacgtgtggatggaatatttgatccattccaaccaggcatttgcawcttggtatgctgtcttaattgccaaagtttgttttaagtctttaacttctatgatcctctagtaaaatgaatgtatgattttgggaaattaaaaaaactg

SEQ ID NO: 196836 - DNA, 201 bp, Homo sapiens
tatatttttgtattgcaatgaaattcttgtatgcaaagttcatttggaaaaataaagaatacctgggcaagaagagccaaaacattaaaaaaaaatactgrtgaaatcacactagtgtaacccaatagtatagcatattataaagatgaagttacaataattaaagtgacatgatactgtaaataaaaatcagtaggacaa

SEQ ID NO: 196837 - DNA, 201 bp, Homo sapiens
catgacaatcacttagagggattgttagattgcccataggctgctgagcccatgcccagagtttctgaatcttcaggtgtggagagattcccaacaatttkcatttctacaaattgctaagtggattctgatgctgctggtggaagaaataaactttgaggaccactgatttacaggaagttattatggggtgggagtggt

SEQ ID NO: 196838 - DNA, 201 bp, Homo sapiens
cccactgggatggacagagcagcatgtgaagatccatatcatgaatctttgctccaggaactacagcagaaacataccactgagagaatccacagaccctytgatggaggtgcattgccgctgcaagctccatgggacagccaagggactgtgagttgtcttgctttctcagttgggaggcttgtagcctggggaaagttc

SEQ ID NO: 196839 - DNA, 201 bp, Homo sapiens
atttgccactaccaagtcagcactacaagaactgctaaaaggaactctaaaacttgaaaccaatcctcaaactacaccaaaatagaacctccttaaagcayaaacctcacaggacctataaaacagcaacaatgaaaaaaagccaaggtattcaggcaacaaacagcacaatgaatagaacaataccttacatctcactac

SEQ ID NO: 196840 - DNA, 201 bp, Homo sapiens
aaatttctgacccggtgcaactggaggttccttgttacacttctaggtgaggtggtcacttatcagtggaacatcccagagaggtctggccctgggcccartgactctgcttgtgtttcctggatctattattctgcagtggatcccatcaaggtaaatacaagattggctacctggaggtgggtcaaactccctggcaaa

SEQ ID NO: 196841 - DNA, 201 bp, Homo sapiens
tctcacttggatgtacttctctgctgcagatcccataagagacacaaattctggcctggtgggcccgctgctggtgtgcagggctggtgccttgggtgcasatggcaagcaggtattgtcagggttatctggctggaaagcctgctgggagaaggatgaagctgggttgctggataggagttaagcatggaactgggttct

SEQ ID NO: 196842 - DNA, 201 bp, Homo sapiens
tttttcacattcaaatctgtaatcagaccagagtttgcatttttatatgctattagctatagatccatttttaatttttctttatatagaaagaaaatttwcttaataacatcttctaaaccattcaactttcccccctttgagttgctttgccaccattatttcatgtttagtttctgtaaatatattaatcagtctcca

SEQ ID NO: 196843 - DNA, 201 bp, Homo sapiens
ttttcacattcaaatctgtaatcagaccagagtttgcatttttatatgctattagctatagatccatttttaatttttctttatatagaaagaaaattttmttaataacatcttctaaaccattcaactttcccccctttgagttgctttgccaccattatttcatgtttagtttctgtaaatatattaatcagtctccaa

SEQ ID NO: 196844 - DNA, 201 bp, Homo sapiens
agctattaaccaggtgtagtaagaagcttactcctgagattctagagcctagaatttggggaacattcttcaaaagctggacttattttaatagacaggargagggacgaagggaatgggtagcaccagatatttgtcatgaagattttcttccttatcttttcattttggatcctataaagcaacatgttctcattataa

SEQ ID NO: 196845 - DNA, 201 bp, Homo sapiens
ttttattaactgtcacctaccaaaatattgactcaaatcctgcagctatttgatttcaagcttttaattaatctggtattctctgtgggactccaattgcrtctaaatggatgtgagagtcaaaagacccataaggggcttctcttgtgttacgatgtcttatttttcctccctatggttgatgaaatgccagggtgaaag

SEQ ID NO: 196846 - DNA, 201 bp, Homo sapiens
aactgagtccaacacctctacacagttatgcttgaccgggctctctgatactgggagcaaggtggcgggatttagggtgttgcaaacttcaatggttatgyggagattttcacatagcaagctttggtacttggttaatctagcatttgttaaccaataatgtcctttggttgtcattaaagttaccacagcatggggggc

SEQ ID NO: 196847 - DNA, 201 bp, Homo sapiens
gggtgccagactttgggatacagcagagagagcttggcatgacttattactccaggctgtagaatcctggaaaagggttaccatgcagcccacacctggtygactggaggaccaccttagtggaaaggggacaatctgggcctctggcttgccatgtgcacaagcataacaattgcttttttttaacgtgtggatggaata

SEQ ID NO: 196848 - DNA, 201 bp, Homo sapiens
aatagtgccaataacacaactacctgcccactggtcaggtattttggtgtaagctctatgcccacaaatccagtataatccagtgggggctgtccagtccyggtgggactctgggtgggttcacagagtttgcaactttgggaatttactaaatggatttttcttagtgtggtttgaactccactaggtggctgtttttgt

SEQ ID NO: 196849 - DNA, 201 bp, Homo sapiens
cttattagtgattatttctaagacagcttgtaaccatatgattcagttgagcatgtaaatgggggtcgggtatccccacgagctgtcttgtgccaaagtaycaggaccatagtattgtatgattctctcagggggccatgtatcatcttttaaattttctatagctatgcttctctttttgtgggaagcacagacagggaa

SEQ ID NO: 196850 - DNA, 201 bp, Homo sapiens
cgcaatgagttttctcatgcttcggctgtgcgtggaccagtcagcttccgggtgtgactggaacagggcttgtcgtcttcttcagagtcactttgcagggrttggcacagctgctcctgtccgcgtaccactcacagtctactgatgttcaaggatggtttcagaggttgggcctcctagcataaactgagtccaacacct

SEQ ID NO: 196851 - DNA, 201 bp, Homo sapiens
ttcttgcaagacagatcgatagtgattcatatagtacacttgtgccgaagtattttggtgaactaaggtagcaatgaagctttttatcatttgaagaagtrcaggtagcaaggaagcagtaagcaggtttctattactattataactcctattataagagttttaaatctttttagcactgggaaccactttccaaacatg

SEQ ID NO: 196852 - DNA, 201 bp, Homo sapiens
actattctcagttaccattgtattgtgtttgtttttctatgccattaaaatgctacaaacattttaatgactataaaacactttatctcaaggatttgtcraaatttatttactttttcctctattgcttggacatgtaggtttttttcagtatttttgaatattgtaagtcaggttgcaatgaatgaatgcatatatcct

SEQ ID NO: 196853 - DNA, 201 bp, Homo sapiens
gaacaaatgaggcttgaggagtgtattgaaagtttgtacttgtcacccagaggaacaggattggaagctattgaaccaaacagcactgaggacacaattgwgactggaaaatagaaatttgaagaagcagcactacagaaggctgtagagttttctccagctgtgttcagcacatcacagtctaagatcagagaaggcaga

SEQ ID NO: 196854 - DNA, 201 bp, Homo sapiens
tcctgtcccttttaagggctcacaactttaagggggtccacatgagagggtcgtgatcgattgagcaagcagggggtacgtgactgggggctgcatgcacyggtaattagaatggaacagaacaggacagggatttttacagtgcttttctatacaatgtctgtaatctatagataacataactgattaggtcaggggtca

SEQ ID NO: 196855 - DNA, 201 bp, Homo sapiens
tagggattttgaattaatgtattttaagtgctatgcaagtttttgccaatattattcttattctgtgaaatttgagttgaattcagttgttgagagtgagraggtaaggaacaaatgaggcttgaggagtgtattgaaagtttgtacttgtcacccagaggaacaggattggaagctattgaaccaaacagcactgaggac

SEQ ID NO: 196856 - DNA, 201 bp, Homo sapiens
ttcacattcaaatctgtaatcagaccagagtttgcatttttatatgctattagctatagatccatttttaatttttctttatatagaaagaaaattttcttaataacatcttctaaaccattcaactttcccccctttgagttgctttgccaccattatttcatgtttagtttctgtaaatatattaatcagtctccaatc

SEQ ID NO: 196857 - DNA, 201 bp, Homo sapiens
tttcacattcaaatctgtaatcagaccagagtttgcatttttatatgctattagctatagatccatttttaatttttctttatatagaaagaaaattttcttaataacatcttctaaaccattcaactttcccccctttgagttgctttgccaccattatttcatgtttagtttctgtaaatatattaatcagtctccaat

SEQ ID NO: 196858 - DNA, 201 bp, Homo sapiens
ttttttcacattcaaatctgtaatcagaccagagtttgcatttttatatgctattagctatagatccatttttaatttttctttatatagaaagaaaattttcttaataacatcttctaaaccattcaactttcccccctttgagttgctttgccaccattatttcatgtttagtttctgtaaatatattaatcagtctcc

SEQ ID NO: 196859 - DNA, 201 bp, Homo sapiens
gaaagaatagcctgcaaaataactaaattccttagagagcttcttcacatttctggtttggaatattggctgtaagcatttattagctctatggcattggkaaagaagtaacttcacctctctgagtcttggttttctctctctctctcttttttaatgagactaatgatatctgcctatttctcagggatgtttttgaga

SEQ ID NO: 196860 - DNA, 201 bp, Homo sapiens
tgagcattttttcatatacctgttggccatttgtatgtcttattttgagaaatgtctattcatgtcctttacccactttttaatgtgttttttttttttttcctcttaacttgcttgagtttcttggtattctagtattagtctcctgtcaaatgaatactttgtaatttttttttcccattcagcaggttgtcttttcac

SEQ ID NO: 196861 - DNA, 201 bp, Homo sapiens
ttttctttcagcactttaaatatgtcagttaacttatttctaacctccatggtctcagagaagaaattggctattaatcttattgagaatttcttttctgwgacaaatcttgttttgcatcttttcaggttctctttgtcttttttaaaatagtttaattacaatgtgccttggtgtgggtagagttttgctaatcctact

SEQ ID NO: 196862 - DNA, 201 bp, Homo sapiens
ccttgtagagtttctgctgagaagtacactgttagcccaatggggttcctttgtaggtgacctgcccctttcctctatctgcctttaacattttttcctcyattttgaccttgaagaaaactgaagactatgcacactaggaatagtcatcttgtatagtatctttcaggtgtgctatgcaattcctggatttgaatgctg

SEQ ID NO: 196863 - DNA, 201 bp, Homo sapiens
ctactacctgggcatccgggatgtgcagtggaactatgctcccaagggaagaaatgtcatcacgaaccagcctctggacagtgacatgtaggtttaatttmttgtggtatttgaggggaagttatgggagcactcttgaggtcaggaagtagcctcttgaggcccctttcccagggtgtggtagcagccagctcctgattg

SEQ ID NO: 196864 - DNA, 201 bp, Homo sapiens
tcatgaaacgcttcatggatgaatgctgcgagcacctaatacggaagtgacttcctctcttttctgctttctcatggtgacttgagaaacaggctttaatycctctttggtaactgagtaagggcattgtttatctagcagagcctagagagtgaattggcatgtttggctgcttaaccataaaatatggggattcagtga

SEQ ID NO: 196865 - DNA, 201 bp, Homo sapiens
ctacaacttccgcctccctggtgcaagcaattctcctgcctcagcttcccaattagctgggcttacaggtgtgtgccaccactcctggctcatttttgtatttttttttttttttttttttgagacagagttttgcttttgttgtccaggctggagtgcactggcacaatctcggctcaccgcaacctctgcctcccagat

SEQ ID NO: 196866 - DNA, 201 bp, Homo sapiens
atctcctgacctcatgatccgcccacctcggcctcccaaagtgctgggattacaggcgtgagccaccgcacctggcgaacctcagaagcttctaacctgctttttttccctttgaatttcaggtcacaagaggaccagattaaaaatgctattgataaactttttgtgttgtttggagcagaaatactaaagaagattccg

SEQ ID NO: 196867 - DNA, 201 bp, Homo sapiens
ctgaggcaggagaattgctgaacccagaaggcggaggttgcagtgagccaagatcacaccactgcactccagcctgggcgacagagcaaaactccgtctcaaaaaaaaaaaaaaaaaaaaatcttctaaacccaagttgtgacattttttttaaatgaatattaacaaaaaaatacattcattgatagtatatgttcataa

SEQ ID NO: 196868 - DNA, 201 bp, Homo sapiens
tgaggcaggagaattgctgaacccagaaggcggaggttgcagtgagccaagatcacaccactgcactccagcctgggcgacagagcaaaactccgtctcaaaaaaaaaaaaaaaaaaaaatcttctaaacccaagttgtgacattttttttaaatgaatattaacaaaaaaatacattcattgatagtatatgttcataaa

SEQ ID NO: 196869 - DNA, 201 bp, Homo sapiens
aagatatttatttgccaaataaagttactgaacttgtgaacttcggccgggtgtggtggctcaagcctgtaatccgagcactttgggaggccgaggcaggycgatcatgaggtcaggagatccagaccatcctggctaacacggtgaaaccccatctctactaaaaatacaaaaaaattatctgggcgtggtggcgggcgc

SEQ ID NO: 196870 - DNA, 201 bp, Homo sapiens
ctgaggcaggaggatcacttgagcccgggaggtcaaggctgtaatgagccataatcacactactgtgcttccagccttagctggagaccctgtcttggggraaaaaaaaaaggataagatgggaaattttatgttatatgtattatttggccacaataaaaaaatgttttaagagaaaaaaaaagatggagggaaggaaat

SEQ ID NO: 196871 - DNA, 201 bp, Homo sapiens
tactttggcttttgaaaactatttccctagccatcgacgagtacaagccccaggatgctaccaccaacccgtccctgatcctggccgcagcacagatgccygcttaccaggagctggtggaggaggcgattgcctatggccggaagctgggcgggtgagtgcctggactcgggagggtcccagctaggccctcgtgctagt

SEQ ID NO: 196872 - DNA, 201 bp, Homo sapiens
atcacaccactgcactccagcctgggcgacagagcaaaactccgtctcaaaaaaaaaaaaaaaaaaaaatcttctaaacccaagttgtgacattttttttwaatgaatattaacaaaaaaatacattcattgatagtatatgttcataaatgttatatagttgtaaaatagtctgttgggtttgtgatctgtagtttgtga

SEQ ID NO: 196873 - DNA, 201 bp, Homo sapiens
cagtgggatgcacattttcctttgaccagcgttctcccagctgtcgcaccgctcactcccatgctgttacaggtcacctcttgcaggggcatatttgatcrctgggcacttagtgtttgttgttccatcattatgcaaacagccgcctcttgatgaaccttcagtgacccagaagaaggtgtgagaagtgtggctggaccc

SEQ ID NO: 196874 - DNA, 201 bp, Homo sapiens
tctactaaaaatacaaaaaattagccgggtatggtggcaggtgcctgtaatcccagctactcgagaggctgaggcgagataattgcttgaacctggaagayggaggttgcagtgagccgggatcacgccactgcactctagcctgggcgacagagcgagactccatctcaaaataacaataataataataataaaccatca

SEQ ID NO: 196875 - DNA, 201 bp, Homo sapiens
gagggtcccagctaggccctcgtgctagtctagttggccttgcttccctccctaactgaattttagttctcaaacaccatgaactcaaggggggaaaaaamccctatctttttgcctatttttgtttattgaagtgtaatctgcatgaagtaacctgcacctgtggtaaatgagcagttcagagagttttgccaatgtgtg

SEQ ID NO: 196876 - DNA, 201 bp, Homo sapiens
ccctgaaacccatttttgccccaatgggccttggttttgttttaattttgtaaaagccatttgctaaaagctgactttatccaggggtgattttacaggaygaaatgggctgttttcagtgcctcattcagtgcattctggcagacctgtgttagcactgtgccagatgtcatgttgaaatgagtatagatgcacaacagg

SEQ ID NO: 196877 - DNA, 201 bp, Homo sapiens
aatttccatcactgaccttctcctctcctttcacctgttcctttctctcttcaagggaggaatctttcctgcctgttttggagctgtccataaataaattmtctacttgcttttcttttctttttttttggaggcggagtctcgctctgtcgcccaggctggagtcagtggcgtgatctcagctcactgcaagctccacct

SEQ ID NO: 196878 - DNA, 201 bp, Homo sapiens
agttgctgtcagagccattctgcaaacctccagtgaggggaaggttgagggcagtggttggtgctcacggtggtgctgctcaaaactgacaggcagacacycggcctccagcttgctctgcgtggtgggcaacctgcgtgatctgaggggatgggttcttcttgctcctacaggctctcctttgataaagatgcgatggtg

SEQ ID NO: 196879 - DNA, 201 bp, Homo sapiens
ggccgggtgtggtggctcacacctgtaaccccagcactttgggaggctgaggcgggcggatcatgaggtcaggagatcgagaccatcctggctaacacggygaaaccccatctctactaaaaatacaaaaaactagccggccgcagtggcgggcgcctgtagtcccagctactcgggaggctgaggcaggagaatggcgtg

SEQ ID NO: 196880 - DNA, 201 bp, Homo sapiens
gtagagactgtattttggatagttgccaaggatggcaatgatgggaagcatgatgagattaactgaccttaggcatctgaatgatactttggagtcaagtyattcacttggcacagactgtacccccgttgaagtcagaggcctcatagggctaagagggcagtccttgcttagaattggggaacaggatcagttaattct

SEQ ID NO: 196881 - DNA, 201 bp, Homo sapiens
ttttcccccacagctatccagcagtgtgtgaatttttgcaaaacaataatttgttatcgattattagagctcatgaagctcaagatgcagggtaagaattstgtttccctgacccaaattaacacctaaaatataaatcaaacttagtaaccatgattgatgctttacgatgcatattaagctatttgttttgcagctata

SEQ ID NO: 196882 - DNA, 201 bp, Homo sapiens
cctgtggtcatggttctgatgacatcatcagggcagcccccctgcccaggtattatggcctgtcagcattccctgtgccctccaaaccttaggcctagaaygcggagctgccaacataacattcacccttttgaacagatggagtcaggcacactaacacagccttctgtcctcaataacacagccattattgccacttgc

SEQ ID NO: 196883 - DNA, 201 bp, Homo sapiens
gtctggttggcagggcacacttaatcactgagactcagcatttcagcagtttgcaaaggaaagtgatatgaagggacagctgcaagtaagccacaacctasatctgaagagatcaagcactcatttcacttggaggaaagagagaaggaaggaagctgaggacttagcagggtaagtttttttttccgtcaacctgtctgc

SEQ ID NO: 196884 - DNA, 201 bp, Homo sapiens
attttttttgtatttttattttttggaaggctttgctaacacttgtcacctataaagctatgatgtttatatttaggtttaaacatttcacattttaaggraagactgaaatgaggataggattcagttaaagtaagatttatgtgttgctacttacagctactaatttctttcttcttaaaaatcattaattatgttttt

SEQ ID NO: 196885 - DNA, 201 bp, Homo sapiens
taaggatctgaagtttgcagtttcttagagggctagcagggagagcaactgagtaaattgggtcctgttccagaacaaggcatgtaggcatgtttgtgctytggttccctccatttccctttgcttgcctcactgtgtttacccaactacatcctgctttgtgttaatcctcatctctatgtttttttgtcttgtctcatt

SEQ ID NO: 196886 - DNA, 201 bp, Homo sapiens; identical to SEQ ID NO: 33990

SEQ ID NO: 196887 - DNA, 201 bp, Homo sapiens
gcagaattattttctatgataattttaagtttgttttctattacttttaaaaatatgtcatttataggggattgatattgttatttattttctgtattttwacctttcttttattctttaaaagttattatgagtattgcaatagtatgttaaataggcatgatggtagataatgctttagtcctcttcttataataataa

SEQ ID NO: 196888 - DNA, 201 bp, Homo sapiens
tagctgtttacagcccccatgtgaggctgtctgggggactgggagaagatttataaatagcccaatgtcttcagctgttggattttctttttttttttttytttagcttaaatcttttatgaaggggtggagagattgctttgcttgaaatgggcccttctgcatatcttaacaccatttttgggcattccaccgaaattc

SEQ ID NO: 196889 - DNA, 201 bp, Homo sapiens
gggttaacattttttttgtatttttattttttggaaggctttgctaacacttgtcacctataaagctatgatgtttatatttaggtttaaacatttcacaktttaaggaaagactgaaatgaggataggattcagttaaagtaagatttatgtgttgctacttacagctactaatttctttcttcttaaaaatcattaatt

SEQ ID NO: 196890 - DNA, 201 bp, Homo sapiens
gtggtgcttatattttagtaagggacaaagaaagataatagaggatggtaagggtagtagaggaaaaggagcaaagatcaagcagcttcattaaacaaaartacaagataaattcactagaaaaattttcttttgcagtgtgtcttatatttatgggttctgaagattctatacccaagcacattatttcttctgagaggc

SEQ ID NO: 196891 - DNA, 201 bp, Homo sapiens
taaaagctgtagcttcagtgctcataatatttaccctttagaagatcataaacatgtcatggagcctatttttttcccctaaaatatgtcttttgtttctrtctttcaagttggatttctttttctcttttcttgcagtcagatccagtcattatcttagtttttaattatatgtaattgtggactgcttgaattttaaat

SEQ ID NO: 196892 - DNA, 201 bp, Homo sapiens; identical to SEQ ID NO: 33989

SEQ ID NO: 196893 - DNA, 201 bp, Homo sapiens
gcatgagttcatctagtcccctccatgtaagctggtggcaggggtcttggtactggtttagatgagtgtggaacaggctaatagaatattgtaagcatgcrtgccctaaacttgagcctttctctctatttattccattgaaagtaggttcagctgcagcccggaaagaaatcataagaaacaaaattcgagcaattggca

SEQ ID NO: 196894 - DNA, 201 bp, Homo sapiens
agttcctgtccccagatgtcctgatgcccaccatggcaggggagcccaatagactcccaggtaactcccccaaatctaatattatatgccagaatttggtmccttttcaggggcctccaagggtcaaatcagtatacctatggggaggggggtatcccaaggtggagtggtgtgaagatatgaattactgcttcaaagtcg

SEQ ID NO: 196895 - DNA, 201 bp, Homo sapiens
agtgatgtgagtattagtgaccatacacagtaattcagtctagatttcttttcctgtggttggaaagcaaaaatacatgatgtggaaaagcctgaatttcwtgtagtcacttttgacagccctctaagggtcattgtctattaaaatagcaacagatctgatgttttccttagtcataattaggtttctttttggtgttgt

SEQ ID NO: 196896 - DNA, 201 bp, Homo sapiens
ttttgaatgaatttacatttgacttcacaatttcatttcacttggttccataataagtgctctttttttttcttttctctcttctcttctctttctttttctttctttctttctttctttctttctttctttctttctttctttctgtctttctttctttctttctctctctctctctctctttctctctctctctctgtc

SEQ ID NO: 196897 - DNA, 201 bp, Homo sapiens
ccctggctggagtacagtggcatgatctcggctcactgcaacctctgcctcccaggttcaagcaactctcctgcctcagcctcccaagtagctgggattayaggcatctgccaccacgccccgctaatttttgtatttttagtagagacgggatttcgccatgttggccaggctgttctcaaactcctgacctcaagcgat

SEQ ID NO: 196898 - DNA, 201 bp, Homo sapiens
agccattccttaggattttaaggtcacattttattcctggatgctttatgtccccacctccacctgagccctcatcctctgttccctactatactcccaayttctactctttgttttatccacctatccctattacctgaccctttgtcttccctgtctcccatccttggggggacatgtagccctgtggtcatggttctg

SEQ ID NO: 196899 - DNA, 201 bp, Homo sapiens
tcagcctcccaagtagctgggattataggcatctgccaccacgccccgctaatttttgtatttttagtagagacgggatttcgccatgttggccaggctgttctcaaactcctgacctcaagcgatatacccaccttgacctcccaaagtactgggattacaggcatgagccactgcacctggccagttcttaagttttag

SEQ ID NO: 196900 - DNA, 201 bp, Homo sapiens
aatacatgtatattttaatatagagacagggtttcgccatgttgcccaggctggtaactcctgagctcaagcagtctacccgctttggcctcccagggtgmtagggtgacaggcatgagctaccacacccagccgaggatgaatatattttcaaatcctttgcttattttataattgggttatttgtcttaaaattttctt

SEQ ID NO: 196901 - DNA, 201 bp, Homo sapiens
gatgccccttgatgaatcttaccacatatttaataaagcttttcaggaaaaacaatatatgcctcaatggtaaggcacaccctcatacctgaaacacttamaatatagaaaaattaatgtcttgaaattgaggaaaatatggtaatagcaatgaatgtcatgaattttatatatggcctatatctagaccctatgtcttct

SEQ ID NO: 196902 - DNA, 201 bp, Homo sapiens
acgttttgaatgaatttacatttgacttcacaatttcatttcacttggttccataataagtgctctttttttttcttttctctcttctcttctctttctttttctttctttctttctttctttctttctttctttctttctttctttctgtctttctttctttctttctctctctctctctctctttctctctctctctct

SEQ ID NO: 196903 - DNA, 201 bp, Homo sapiens
caacataacattcacccttttgaacagatggagtcaggcacactaacacagccttctgtcctcaataacacagccattattgccacttgctcagtcgtcartgtaaaccctcagagtcagctgaactattttaggccaaacatactgtttttgtaaagtatttttcattaataaatctataagacagttctatttaattcc

SEQ ID NO: 196904 - DNA, 201 bp, Homo sapiens
cgttttgaatgaatttacatttgacttcacaatttcatttcacttggttccataataagtgctctttttttttcttttctctcttctcttctctttctttttctttctttctttctttctttctttctttctttctttctttctttctgtctttctttctttctttctctctctctctctctctttctctctctctctctg

SEQ ID NO: 196905 - DNA, 201 bp, Homo sapiens
acatttgaacttcagagcatatgaaataccatattttctcaatagtatgatgccccttgatgaatcttaccacatatttaataaagcttttcaggaaaaayaatatatgcctcaatggtaaggcacaccctcatacctgaaacacttaaaatatagaaaaattaatgtcttgaaattgaggaaaatatggtaatagcaatg

SEQ ID NO: 196906 - DNA, 201 bp, Homo sapiens
gttttgaatgaatttacatttgacttcacaatttcatttcacttggttccataataagtgctctttttttttcttttctctcttctcttctctttctttttctttctttctttctttctttctttctttctttctttctttctttctgtctttctttctttctttctctctctctctctctctttctctctctctctctgt

SEQ ID NO: 196907 - DNA, 201 bp, Homo sapiens
attgccttccctggggttaattcaggaagaccaggttaaagggtacaaatgaataggtcagtctttaaaaatttgtttgcacaactgactacatcagacawttgaacttcagagcatatgaaataccatattttctcaatagtatgatgccccttgatgaatcttaccacatatttaataaagcttttcaggaaaaacaat

SEQ ID NO: 196908 - DNA, 201 bp, Homo sapiens
tatatcctataaatcattcatggtttatttctgttggtttcagtgattatgagcaaccactggaggtgaagaacaacagtaatctgcagagaatgggctcytccgagtcaacagattcaggtatttaagtctgctgtgtggggagcaatactctgaatttcctgaaacatgccttttcacccaggaggttagttttggtga

SEQ ID NO: 196909 - DNA, 201 bp, Homo sapiens
ttggaatcacaggtgtgagccactgtgcctggtcagtagttgtatttttcaagcctcatatgatttgacaaggtaaaacgtttaaaaactatgccaagaamatctggtacctattgtttctatggttggaactcacagaaagttatctgggtcacctctatctgaataaccaaacaatcatgatatgaatcagttttattc

SEQ ID NO: 196910 - DNA, 201 bp, Homo sapiens
tgtggtgtggcctagaaatggtttctggcagcctggctgcttcttaatctcatggcctatctcctgcatgtgaccttttaattatatcctataaatcattyatggtttatttctgttggtttcagtgattatgagcaaccactggaggtgaagaacaacagtaatctgcagagaatgggctcctccgagtcaacagattca

SEQ ID NO: 196911 - DNA, 201 bp, Homo sapiens; identical to SEQ ID NO: 33998

SEQ ID NO: 196912 - DNA, 201 bp, Homo sapiens
ttccctggctcaagtgatcctcccacctcaacttccagaggagctgggactatatataggtgcacaccatcacacccggctgatttttgtattttttgtaracatgggggtctcactctgttgcccaggctggtttcaaactcctgcctcggcctcccaaagtgctaggattataggcaagagccactattcccagccttt

SEQ ID NO: 196913 - DNA, 201 bp, Homo sapiens
ttcggtctggaggaatttgtcctccatctctaacagagctttattaaaccaggaagggttcttttgatgcaaatgttatttggggattgatttggcactgyaatccctgttgaggggggcactgtagaccttgtgaggttagctgtaaacccatggaatggaaacttctatgctgtgtcctggctgtgtcctggcaaggtg

SEQ ID NO: 196914 - DNA, 201 bp, Homo sapiens
tattaaaccaggaagggttcttttgatgcaaatgttatttggggattgatttggcactgtaatccctgttgaggggggcactgtagaccttgtgaggttarctgtaaacccatggaatggaaacttctatgctgtgtcctggctgtgtcctggcaaggtggattcctggccacatttactggttacctactgcagtgtgtg

SEQ ID NO: 196915 - DNA, 201 bp, Homo sapiens
atgttatttgcaaataggagaaaaaacagtaaatacgctatgaaaatattaagacttgtacaaacatgacatttttgacaatctaatagacgtaacatcarttctggcaaaagtacaagccatgaatatttgttgcctgacttaaataaagacccaggtactttgtttagtgttttaattttaatgacaaaatggtgtttt

SEQ ID NO: 196916 - DNA, 201 bp, Homo sapiens
ctcctgggctcaagtgagtaacccaccttggcctcccaaagtgctgggattacaggcatgagccaaaccacctgcacccccttttttttttttttttttttaaggaaggaaggaaaacttagtttcagagcaattcggttagacactggaataataggagacctagtcaataacccacatctgtttttgttcactccagat

SEQ ID NO: 196917 - DNA, 201 bp, Homo sapiens
gtataaagattatatcgtagtatctggcacacagtaattcctcgtttaaaaactgagcatttaaatcccaagtctaaagaacgaggatagattttatagarggaagttaccctttattcccccctgtcagaactggagttatatataagtgcattctctaggccattttatggtctttatagagatttgcatctgcttgcc

SEQ ID NO: 196918 - DNA, 201 bp, Homo sapiens
atcactgtactccagcctgcactccactcctgtactccactgcactccagcctgagcgacagagcgagactctgtctttttaaaaaaaaaaaaaaaaaaaagttaagacatactttttctaaacttaatcctagttttaaccccccttgtttctttctctttttctggagatagtttcagtctgtcacccaggctggagtg

SEQ ID NO: 196919 - DNA, 201 bp, Homo sapiens
gctctcactctggagttgtcctgttttacttcaatattttgggcacattccttaacctgcaaggtctagttttctcacctgtaaaatcgggacaatcaggwtgtatttgatggttaaaaagttaatgcacagaaagtacttagtactgtgttggcatagaaatcactgtaatattagccattactgctttttttttttttt

SEQ ID NO: 196920 - DNA, 201 bp, Homo sapiens
gatgatttaccaaaggatatacataagtaggaaaccaggatttaatgatctctggctgggtgtggtggctcatggctgtaatcccagcactttgggaggcygaggtgggaggatcacatgaggtcaggagttcaagacagcctgggtaacatagtgagaccctatctgtacaaagttaaaaaataagctgagtgtggtggc

SEQ ID NO: 196921 - DNA, 201 bp, Homo sapiens
taaaactacctataaagtgtaccattgtcatatttgaattgcccatttccagtccccatgtgcattactgtatgatgaacgtgtacggacccacaaagctycattgagatacaggtgccaaatggtctactgggctattcagctagaagaactgcaaaaatcacaaactggtcttgtggacttaaagatcactcttgatga

SEQ ID NO: 196922 - DNA, 201 bp, Homo sapiens
aggccctgtgagagttgctaggactagatgaatcggcagtgtctgttggctaatttagaattgatcttagatcatcccaggaaaccttcggtttatttgtyttaccattcaagtgaacaggttttaatgaaagatgggtctgtctgttttttttcctgtaaggacaaccgatgcaagctgtttgactccccttccctgtgt

SEQ ID NO: 196923 - DNA, 201 bp, Homo sapiens
atcttgggatacattttcatataatcagtaatggctaaaattttgctttgtataacaagtataacatagtatgttttcatcataaaaactagtgacccatycaaggaaatgaaagtggatcagagctctcattattaatccatgaattttgtcttacagctttcctcaaatgaaagagatagcagtgaaccagggaatttc

SEQ ID NO: 196924 - DNA, 201 bp, Homo sapiens
ttttcctgttcaagttgggatttttctggttcttggtatgaccggtgattcttccattgtctcctgtatatttgtgagtctccggtctatgtaaattttaygttttagcaggcttcctctgatactgcaagaaaggcatgggtggaagtccgggttccccagcacaaactccattgacaccttgggtggggacttgtctca

SEQ ID NO: 196925 - DNA, 201 bp, Homo sapiens
gtgcacaccatcacacccggctgatttttgtattttttgtagacatgggggtctcactctgttgcccaggctggtttcaaactcctgcctcggcctcccamagtgctaggattataggcaagagccactattcccagcctttccttagtctcataagtactcaagatgttcggtctggaggaatttgtcctccatctctaa

SEQ ID NO: 196926 - DNA, 201 bp, Homo sapiens
ggcgggagaggccgtcgggaccttccaggggaagaggtggagatccttgggcctaagcccgagccaggcccaccttcacccctttcggattgctccgtackctccttctatctctatccctggaagctctttggaatctacccccgcggggaaaatcaggctcttctaggcactcactttcaccctttgctaaaccatcct

SEQ ID NO: 196927 - DNA, 201 bp, Homo sapiens
attaggtgaaactttaatttggaggcagaaaggtgatcagtgcccactttcttgcctctttcacccaagctgaggcctgagttggttttcatggacagtaratgtctcaactatgtcttgcaggaagcctttgagtttaagaagccagtaagacctgtatctcgtggctgcctgcactctcatggactccaggagggtaaa

SEQ ID NO: 196928 - DNA, 201 bp, Homo sapiens
gggatctttgccacttgtggtgtggcctagaaatggtttctggcagcctggctgcttcttaatctcatggcctatctcctgcatgtgaccttttaattatrtcctataaatcattcatggtttatttctgttggtttcagtgattatgagcaaccactggaggtgaagaacaacagtaatctgcagagaatgggctcctcc

SEQ ID NO: 196929 - DNA, 201 bp, Homo sapiens
tgcctcagccttccaagtagctgggactacaggtgcacgctgccacgcccggctaatttttttttttttttagtagagacggggtttcaccatgttgcccsggctggtctcaaactcctgagctcaggcaaaccgcccgcctcagcctcccaaagtgctaggattacaggcatgagccacggcgcctggcctgccatttta

SEQ ID NO: 196930 - DNA, 201 bp, Homo sapiens
ccttgaacccaggaggcagaggttgcagtgagccgagatcgcgccagtgcactccagcctgggcgacagagtgagactccatctcaaaaaaaaaaaaaaaaggtgactgggtgcggtggctaactcctgtaatcccaacactttgggaggccaaggcaggtggatcacaaggtcaagaggtcgagaccatcctggccaaca

SEQ ID NO: 196931 - DNA, 201 bp, Homo sapiens
tgtggtgagccatgatcatgccactgtactccagcctaggtgacagagtgagattctgtctctctctcacacacacacacacacacacacacacacacacaaaggttatacttgcacacacttcacctgattttattaatttttaacattttgtcacatttgtatgtacatgctctacacacaggcaactacagtacaact

SEQ ID NO: 196932 - DNA, 201 bp, Homo sapiens
ctgtggtgagccatgatcatgccactgtactccagcctaggtgacagagtgagattctgtctctctctcacacacacacacacacacacacacacacacacaaaggttatacttgcacacacttcacctgattttattaatttttaacattttgtcacatttgtatgtacatgctctacacacaggcaactacagtacaac

SEQ ID NO: 196933 - DNA, 201 bp, Homo sapiens
gataagttcatattttttaattctcaataacctgaactataattacagaacaaatgagctacagtttttttgtttgtttgttttgttttgtttttgagacrgagtctccctctgttgcccaggctggggtgcagtgcagtggtgtagtcttgacttgctgcaacctctgcctcctgggttcaagtgcttcttctggctcag

SEQ ID NO: 196934 - DNA, 201 bp, Homo sapiens; identical to SEQ ID NO: 33999

SEQ ID NO: 196935 - DNA, 201 bp, Homo sapiens
tggcacacagtaattcctcgtttaaaaactgagcatttaaatcccaagtctaaagaacgaggatagattttatagaaggaagttaccctttattcccccctgtcagaactggagttatatataagtgcattctctaggccattttatggtctttatagagatttgcatctgcttgccctaactcatttcagcagattctca

SEQ ID NO: 196936 - DNA, 201 bp, Homo sapiens
tcagtgatgctgctatggaggaaattgccagtgcatttcattcttcatgaattcatattactgcagagtttatctgtatttgtacagataagaccattggkgcaaagatcctttaggttaaaggaactgcaagagcaagtcttaaaatgtaatgtaggcttctgtatgtagaatgtaatttaatatagaactggggatagg

SEQ ID NO: 196937 - DNA, 201 bp, Homo sapiens
ctggcacacagtaattcctcgtttaaaaactgagcatttaaatcccaagtctaaagaacgaggatagattttatagaaggaagttaccctttattcccccctgtcagaactggagttatatataagtgcattctctaggccattttatggtctttatagagatttgcatctgcttgccctaactcatttcagcagattctc

SEQ ID NO: 196938 - DNA, 201 bp, Homo sapiens
agtgtggtgagcaagggctgtaacacctcactttccataaggctgtatagacacatgagctatgggtgggtgggtctgcgtcatctgagctggcatattartaatgctgaacagtgtctccttcaccctgctgccttttgtgagatggacaccttggtgtcattttgttaaaggcagcaagtgcttgccttgcatgtcatg

SEQ ID NO: 196939 - DNA, 201 bp, Homo sapiens
ctatatatttactttctccccttttccattcctgctgaaatgccacagttcataatccttgtccttacaatcttcaggtttagtgtgaaacccactgcctscatgaactctcctgatgatttctttatcaacctgggaagtgtcatgagaaagaatatggaaatgagttccagccttgagtgcttggaacagtgtatcagc

SEQ ID NO: 196940 - DNA, 201 bp, Homo sapiens
aagaaggggtcatgggaacccctacttaaagctggtggtcgtagatcagaagatccagaggcccaactggtgtctgaagggtggtgtggttttgaggactrggccctcaacttcctgatctgacgctctgcaggtagatagtgtcagaattgaattggacggcacccagctattttccactgcagaactgcttgcttgctt

SEQ ID NO: 196941 - DNA, 201 bp, Homo sapiens
gccattactgcttttaatacttaattatgagttcttaagtgaatattttagggcaagggacctgtgagtgttttcattccataaagtggaatcatacgatrtgtattctatcatatctggctttaaaaaacattatgcttgtaagaatcgtccacgttgagtaaaccagtagggcttttttttttttcattgcttttagta

SEQ ID NO: 196942 - DNA, 201 bp, Homo sapiens
attgctccgtacgctccttctatctctatccctggaagctctttggaatctacccccgcggggaaaatcaggctcttctaggcactcactttcaccctttkctaaaccatcctcaggatcttcgtttgctgtgatctttgttccttctcaacaaaggaccatggcattttctttcctggcgtttatgtaaaatcatctcag

SEQ ID NO: 196943 - DNA, 201 bp, Homo sapiens
ttagttgagtatagccaaagattgaaatgcatgataggatttggggatctgggttttaggcctcactttggctacctacaaattatgacctttagtcatgrtatctctctgcatgtctcctgatgtataaggagtgtgggttaggagggaccatggtcattcctagcttttaccatctagtcagtttgaaaaaagcctatc

SEQ ID NO: 196944 - DNA, 201 bp, Homo sapiens
ttttacccaactttcagaaagcttcctgggcttttcctgatagcaaaaaatgcatcccacggtgtttcccgcggaagagctactttcccttcaatctctgkcatcccgtttgctaagcacatgtcttgtgcgtttcccaacttctgaaaagcagaaagtgtcctgttcaactttcatcccgactctgtctcagtacttaga

SEQ ID NO: 196945 - DNA, 201 bp, Homo sapiens
tttacccaactttcagaaagcttcctgggcttttcctgatagcaaaaaatgcatcccacggtgtttcccgcggaagagctactttcccttcaatctctggyatcccgtttgctaagcacatgtcttgtgcgtttcccaacttctgaaaagcagaaagtgtcctgttcaactttcatcccgactctgtctcagtacttagaa

SEQ ID NO: 196946 - DNA, 201 bp, Homo sapiens
ctagaaccgactggatcaactcaggagtagctcccggcaagtacggcgttcctcctcacctcctggctgccgagggccgtttccttagaaagcacttcccmccagccccaagctccccttctccagcaaccttgacctttagttttaatctcctttaggacgtgccccccaccgtactgccttccccagtccccgcccctc

SEQ ID NO: 196947 - DNA, 201 bp, Homo sapiens
cttcccatccatgagtatggaatgtttttccatttgtttgtgtcctcctttatttgcatgagcagtggtttgtagctctccttgaagaggtccttcacatsccttgtaatttgtattcctaggtattttatttattctctttgtagcaattgtgagtgagagttcactcatgatttggctctctgtttgtctattggtgta

SEQ ID NO: 196948 - DNA, 201 bp, Homo sapiens
gcagtgtttatctttatgctttttcagataagtttataccatggatagcacaaaggagaagtgtgacagttacaaagatgatcttctgcttaggatgggayttaatgataataaagcaggaatggaaggattagataaagagaaaattaacaaaattataatggaagccacgaaggtatgtttcttgtttcttttgatgtg

SEQ ID NO: 196949 - DNA, 201 bp, Homo sapiens
tcagttgtttttggaacatcagcccaggaagtggtaaaggaaattcgtttcagaattgagcagaaaacaacactgacagccagtgcaggtatttaaaagartattgatggccactgtagttataattttcagactggctaatttaagtgtaatattagtagtttctcattataaagtatatagtaacattttacttactta

SEQ ID NO: 196950 - DNA, 201 bp, Homo sapiens
atcctcaaatactccaaaactcagttgtttttggaacatcagcccaggaagtggtaaaggaaattcgtttcagaattgagcagaaaacaacactgacagcyagtgcaggtatttaaaagagtattgatggccactgtagttataattttcagactggctaatttaagtgtaatattagtagtttctcattataaagtatat

SEQ ID NO: 196951 - DNA, 201 bp, Homo sapiens
cccaggaagtggtaaaggaaattcgtttcagaattgagcagaaaacaacactgacagccagtgcaggtatttaaaagagtattgatggccactgtagttayaattttcagactggctaatttaagtgtaatattagtagtttctcattataaagtatatagtaacattttacttacttagtctttcattcaacttctaaca

SEQ ID NO: 196952 - DNA, 201 bp, Homo sapiens
tcctcttgttttgcaaaaatattaaaagctaaagctaaaaattcaaagttgcacctatactttcatttttgtcatacaaaaattgtggccatatggtttcrgtgtatgttttcatgtatctgtatgtaaaataattgaagaacatggaaaaataatctgttaaagtcttgaattgtgattttttattttcttgaaatttca

SEQ ID NO: 196953 - DNA, 201 bp, Homo sapiens
aatataagaaaatctttttattagcacagtcttgcttatacctggtatcacattataaatatagggatagtaatgggagagggtcatggtatcaaaatacygtgacagaataagtcaaaacttggattaaaacagtggcctataatcagagaaatgcaaatcaaaaccacaatgagataccatctcacaccagttagaatg

SEQ ID NO: 196954 - DNA, 201 bp, Homo sapiens
tattattttatgactattctatacaacttaccatactattactttcatgtaacataactcactatcatccaaattttgatattcattctataataagtatrccttaaaaccaatgaagtttagttggtagaaatataagaaaatctttttattagcacagtcttgcttatacctggtatcacattataaatatagggatag

SEQ ID NO: 196955 - DNA, 201 bp, Homo sapiens
aaatatatgggcaagacagcttaaatgtaggatgtttgcatttagccacttcactctttagtagtgaaggtatggtgaaattatgactgaattacattcayctgctttactagacaatgacaggtaattggattaatgaagcgtaaggcaaaatatagagtaattttagctcagtgtgatagtcgaagggaaaaaaattca

SEQ ID NO: 196956 - DNA, 201 bp, Homo sapiens
tgaccacatagaccttttatttttgttctagatgaaaagtttccaaaatcccaaatagaccaaattcgaaaagtttactattatactatactattactttmtataatgtaacatctatactaattgtactatactattattttatgactattctatacaacttaccatactattactttcatgtaacataactcactatca

SEQ ID NO: 196957 - DNA, 201 bp, Homo sapiens
agttcaagaccagcctgaccaatatggtgaaaccccgtctctactaaaaatacaaaaataagccaggcgtggtggcatatgcctgtagtcccagctactcrggaggctgagacaggagaattgcttgaatcctggaggtggaggttgcagtgagccaagattgcaccactgcactccagtctgggcaacagagcaagactc

SEQ ID NO: 196958 - DNA, 201 bp, Homo sapiens
acatcctatcatggggtgtataatagccacatgatgtcatggttgatattaaccttcatcacttggttagtgtttgctaggcttctccactgtgaagttastgtttttccctttggaagtaagtcagtaaatctaactaccctcagatgagagagagcaggaattaacttcctcctccaggggatactaaaatatacataa

SEQ ID NO: 196959 - DNA, 201 bp, Homo sapiens
gttgattttgtcaaatatcaaatgattgtaggcatgtggttgtacttctcagttctctattctgttccatttgtctgtgtgtctgttttgtactgctaccrtgctgttttggttaccatatccttgtaatatagtttgaagtctggtaatgtgatgcctccagctttgttctttttgcttagggttaccttggctattcga

SEQ ID NO: 196960 - DNA, 201 bp, Homo sapiens
gtttcctggtctgtgatagtttcttagtttttccttctttttcatgaccttgacagtgttgggtagtactatacaggtattctgcagaatgtcgcccaatytgggtttgtctgatgattttctcatgattagatcagggttatggatttttagaaagagtatcacaaagaggaagtgtccttctcataacatcctatcatg

SEQ ID NO: 196961 - DNA, 201 bp, Homo sapiens
cagtaagccaacagaagaaatgaacaaagttctaaataattaacagaaaaggaaatacaaatggctcttaaaacaagtgaaattactaccattttcatttrtaattaaagaaatacagattgaaagttctctcagatacctttctttcactagtcaggttggcaaagattctaacatactctattggcaagactgtaggag

SEQ ID NO: 196962 - DNA, 201 bp, Homo sapiens
tgagaagcagcaataaagggatagtggaaaaacaactttattagaaattataataaaaataaaaacatagcaaacccaaatttttattccatatattcttgaaatagggaggcctcaagcaatcctcctgccttggcctcccaaagtgttgagatttgatgtgagccaacatgccaggcccaatattctttttttatggct

SEQ ID NO: 196963 - DNA, 201 bp, Homo sapiens
aaattacagcttgggttttaaattttacttgtatagattaacatcaaattttaacattataaaagcaattctacagaggaacatttacattatgctacagwatcttcagttgtaccttcctgttcagcataaacatcatatgccaaagaggtactatattttgttgtatatttcctttgttgcttttttaagacattatta

SEQ ID NO: 196964 - DNA, 201 bp, Homo sapiens
aaagcagggtactaaacaatgtatctaaaattctactgtttatataaaaaatgagaggaaaatgtcttcttgtttgcttattttatatatatacacacatacacacacacacacacacacacacacacacacacacacacacacacacacacacacacacacgtggaatatttcttttttttgtttgtttttgagagggag

SEQ ID NO: 196965 - DNA, 201 bp, Homo sapiens
cagagtgcgatggcgatggctcaaccttgctctacctggagttggctagggcaatttaactgaggctaaaaaatccaaggtggcttcattcataggtctgrcacttcgactgaggagattggaatggattccagcttcagaactttctcctctccattgttgcttcaacatttagtaatctaccccaaaatatttacaatg

SEQ ID NO: 196966 - DNA, 201 bp, Homo sapiens
ttccctatgttgcatagatcacaactattacacagccacctccagctgcagggtaagctgggaaagtgagtatttagcctttcttgccttgatagtggagrccggccacaaaaatggaagttagaaatgagtatgtctgctgcaaaatcacttttcttacttgcttcctttgtttatttctaccccctttcatttctttct

SEQ ID NO: 196967 - DNA, 201 bp, Homo sapiens
ggtagctgggattagagatgctcactgccatgcctggctagtttttgtatttttagttgagacagggtttcaccatgttggccaggctggtcttgaactcytgagctcaagtgatccacctgcctcggcctccaaaagtgctgggattacagatgtgagccaacatgttgggcctgtaatgtgttttaaattttaaatttt

SEQ ID NO: 196968 - DNA, 201 bp, Homo sapiens
tgaatgaggattcctgttgctaaatatcattgccctcatttggtgttgtcagtattgtgaattttggctattctaatatgtgtatagtggtatctcattgktgttttaatttgcatttccctgatgacatatgatgtggagcatcttttcatgtgcttatttgccatctgtatatgttctttgttgaggtgtctgttaagg

SEQ ID NO: 196969 - DNA, 201 bp, Homo sapiens
taatcagtgttctctttaatggttataaaacattaaatgataaatgatggcatttctgatcttggatcctagaaactaaactaaactagatttttgttttkgtcttcagaaataatgtagggaaacctaacttatgaagtatatacttcttaaaataaaggtgagttattttcctgtttatgacttagataatccaggaaa

SEQ ID NO: 196970 - DNA, 201 bp, Homo sapiens
ttaatggttataaaacattaaatgataaatgatggcatttctgatcttggatcctagaaactaaactaaactagatttttgtttttgtcttcagaaataaygtagggaaacctaacttatgaagtatatacttcttaaaataaaggtgagttattttcctgtttatgacttagataatccaggaaaggaagttaataaact

SEQ ID NO: 196971 - DNA, 201 bp, Homo sapiens
cattgaaacattatttatttattttagtcttctctgactagtttggtttttattggacatgtttgcttagagattctttgtaacttacctgttgaatttctttttttttttctgctaggtcactctgcctcttttttggcactagatggaggcttaattccagctttgcctctgccctagtaaaggatcagagtgttgcct

SEQ ID NO: 196972 - DNA, 201 bp, Homo sapiens
aagaagttttaaaaatcctacaaaagtttagtaagaaaaggtattttttaaagtcgtactttaactcagcaaaacttctggcagtatgccagtgaaaaccraagtgtttttagttattttagtctggttatttatgtaagtcagagaactcttcaaatttgagccggatctagctagtttatatgcagataacaaatgagt

SEQ ID NO: 196973 - DNA, 201 bp, Homo sapiens
tctttctaggacattcagtgagataaataaagcggaagagcaatacagcctatgtcaagaactttgcagtgagcttgctcaggatctacagaaagaaagacttaaggtgctttattttgatatggtgtccttagtttttaagttttttaatagtaaaatgctaccttaaaagctagagttagattacacatttcttaaaga

SEQ ID NO: 196974 - DNA, 201 bp, Homo sapiens
ttactactgctttgacttcagcaaaaacaagatttaggaagctcttattttcagaaaaggaaatgagaggggaaatttttctctcttagaaaataaaaaamctcagcacctaattaataagatttttactatgtaaattaaactttatccaatcattctttgtcccatttggtacccttttgtttgttttgtttgtctcct

SEQ ID NO: 196975 - DNA, 201 bp, Homo sapiens
ttttgtttgtctccttatttctttttcaatatttttcatggtattttaagaggatgatttaaacagagataaacttctgatttaatgggttttttttttgkttttttttttttcttttttttttggagacagagtctcgctccgtcgcccaggctggagtgcagtggctcaatcttggctcactgcaacctccacctacca

SEQ ID NO: 196976 - DNA, 201 bp, Homo sapiens
taaggaaggagatgtaatgattcttcgaaagccttaaactacatttcttttcttttccggattcattcattcagtactgactactttactttgtgttaggcactattctaggcactgtagataacagcagcgaataggacaaattcctgccctcatggagtttacagactagtgtgagagatagaaaataaccaaataaac

SEQ ID NO: 196977 - DNA, 201 bp, Homo sapiens
caattttctttatccagtctatcattggtgagcatatagattgattccatgtctttgctgttgtgaatagtgctgcagtgaacaaacacaagcctgtatamaaagaccttatttttcaaagcagttttaggttcacagcaaaattgaataaaaggtacaaagattttccatatactcctgtctccccacaggcatagcctc

SEQ ID NO: 196978 - DNA, 201 bp, Homo sapiens
tggtggtatataatgactaatgtaactacgttcttcaattttattttacaaccaaagctgagctgatttatatttccttcccctgtctcagggttagctgytgtaattcattacaaaataagaataatttgcctaaataagatactctttatcttaaaggtcaaagcacatcataatatactgctagttgatttatctttg

SEQ ID NO: 196979 - DNA, 201 bp, Homo sapiens
ctgggttgaagtaattctcctgccccagcctccggagtagctgtgcgccaccattcctggctcatttttgtatttttagtagagatggggtttcaccatgytagccaggctggtctcgaactcctgacctcaggtgatcctcccacctcagcttcccaaagtgctgggattacagacgtgagccaccttgcctggcctgtt

SEQ ID NO: 196980 - DNA, 201 bp, Homo sapiens
tttcgtattcatacttctctctctcttcccgccacctctctctccctcactctccctttcccccatcccctgtctcctccccttctctcttattacttttsgtatattttgcatattttctggtagattaattccaggtgactttgatcacagtgtggttttttatatagctttgtttacctcttataggtgggaggaggc

SEQ ID NO: 196981 - DNA, 201 bp, Homo sapiens
ccatattggccaggctggtctcgaacccctgacctcgtgatccacccacctcggcctcccaaagtgctgggattacaggtgtgagccaccgcgcccagcchtatttatttatttatttatttatttatttatttatttatttatttttgagacggagtcccattctgtctggcccaggctggagtgcagtggtgtagtctt

SEQ ID NO: 196982 - DNA, 201 bp, Homo sapiens
cttaatgataatataaaattaaatttagctattttttcttaatgtacaatatacattttttctagaaccacattttatttataacttacagaatctactcrtcattaatttcaacctattgtctgaataattacttattaatgttgttaaacagtgacaaaattcatgtattttgattagcctactttacttgccccataa

SEQ ID NO: 196983 - DNA, 201 bp, Homo sapiens; identical to SEQ ID NO: 34002

SEQ ID NO: 196984 - DNA, 201 bp, Homo sapiens
ttggttccattcttcttgtcagttttagtttcaccaatcaaatgtaggtttggtcttttcacatagtcccatatttctaagaggctttgtttgttcctttwattcttttttctctaaccttgtcttcatgttttatttcattaagttgatcttcagtctctgatatcctttcttccgcttgatcaattcagctattgatac

SEQ ID NO: 196985 - DNA, 201 bp, Homo sapiens
gtcttcatgttttatttcattaagttgatcttcagtctctgatatcctttcttccgcttgatcaattcagctattgatacttgtgtatgcttcccgaagtkcttgtgctgtgtttttcagctccatcaggtcatttatgttcttctctaaactggttattctagttagcagttcctgtaaccttttatcaaggttcttagc

SEQ ID NO: 196986 - DNA, 201 bp, Homo sapiens
atgcctataatcccagcactttgggaggccaaggcagatggatcacttgaggtcaggaattcaagaccagccttgccaacatgatgaaaccccatctctaytaaaaatacaaaaattagctgggcatggtggtgcatgcctgtagtcccagctactcaggaggctgaggcaggagaatcacttgaacctagaaggcagagg

SEQ ID NO: 196987 - DNA, 201 bp, Homo sapiens
gctattctctggttcagaattgaggtactaaaagaagtaggttttaattagcatgttaaattttggtaatattgaaaggttccatttattaggtatgggattttactgtaagaagttagccttcttcaagatttttctactagtactcctttcactttttaaaccaactttaatatactgctataaattcattatttttct

SEQ ID NO: 196988 - DNA, 201 bp, Homo sapiens
atttgtagtcttttatttttacaaacattactagtgaagtagggaataacgtattttataactttctatatgtgcaagtataactgtggaagagattcctrcaatggaattgtttcaccaactacacatagcacaaaagaatatatgcatgtgtgatttttatgaattgccaaattaccctccatggtgtttctatcaatt

SEQ ID NO: 196989 - DNA, 201 bp, Homo sapiens
aggtgctggagaggatgtggagaaataggaacacttttacactgttggtaggactgtaaactagttcaaccattgtggaagttagtgtggcgattcctcarggatctagaactagaaacaccatttgacccagccatcccattactgggtatatacccaaaggattataaatcatgctgctgtaaagacacatgcacacat

SEQ ID NO: 196990 - DNA, 201 bp, Homo sapiens
gccgaaatttgagcaataccatagtgcacattgacatggatgctttctatgcagctgtagaaatgagggacaatccagaattgaaggataaacccattgcygtaggatcaatgagtatgctggtaagtaaagatcaaatacaaaaaggaaattttataacgtactcaagtaagctttactgtttcatgaagggggaattct

SEQ ID NO: 196991 - DNA, 201 bp, Homo sapiens
cttcacattatttttatcaaggcaagtcacgtggcatgaggaactagaacccacttttgataagagtaacttgtaaagtattgtggctgtgatctacaatrtaccacaaatctaaaagttagagaaattcttatttaaaagtttgtttgtcctctgctatagatctagcttttatgtcaattatattaaacttatttacta

SEQ ID NO: 196992 - DNA, 201 bp, Homo sapiens
aagcagggtactaaacaatgtatctaaaattctactgtttatataaaaaatgagaggaaaatgtcttcttgtttgcttattttatatatatacacacatacacacacacacacacacacacacacacacacacacacacacacacacacacacacacacacgtggaatatttcttttttttgtttgtttttgagagggagt

SEQ ID NO: 196993 - DNA, 201 bp, Homo sapiens
agcagggtactaaacaatgtatctaaaattctactgtttatataaaaaatgagaggaaaatgtcttcttgtttgcttattttatatatatacacacatacacacacacacacacacacacacacacacacacacacacacacacacacacacacacacacgtggaatatttcttttttttgtttgtttttgagagggagtc

SEQ ID NO: 196994 - DNA, 201 bp, Homo sapiens
gcagggtactaaacaatgtatctaaaattctactgtttatataaaaaatgagaggaaaatgtcttcttgtttgcttattttatatatatacacacatacacacacacacacacacacacacacacacacacacacacacacacacacacacacacacacgtggaatatttcttttttttgtttgtttttgagagggagtct

SEQ ID NO: 196995 - DNA, 201 bp, Homo sapiens
acccgggaagttgcagtgagctgagatcacgctgttgcactccagcctgggcaacaagagtgaaactccacctcagaaaaaaaaaaaaaaaaaaaaaaaargcccaagagcagatatctatagaagcttaattcataattgccaaaactttgaagcaagcacgatgtccttcggtacgtgaatggataaataaactgtggt

SEQ ID NO: 196996 - DNA, 201 bp, Homo sapiens; identical to SEQ ID NO: 34008

SEQ ID NO: 196997 - DNA, 201 bp, Homo sapiens
actttccaactgatttgtcagttttccctgctctaaaccatcttatgcattttttacagattagctataaacagcattcccataatagcactctcatgtcaaaaaaaaaaaaaaagcagttttcaaaagctctcaactgtctccaagatttagcagtggaatgagtaggaaaagggagtgatttttagtgtatgattattt

SEQ ID NO: 196998 - DNA, 201 bp, Homo sapiens
aattacagcttgggttttaaattttacttgtatagattaacatcaaattttaacattataaaagcaattctacagaggaacatttacattatgctacagtwtcttcagttgtaccttcctgttcagcataaacatcatatgccaaagaggtactatattttgttgtatatttcctttgttgcttttttaagacattattat

SEQ ID NO: 196999 - DNA, 201 bp, Homo sapiens
atgaggattcctgttgctaaatatcattgccctcatttggtgttgtcagtattgtgaattttggctattctaatatgtgtatagtggtatctcattgttgktttaatttgcatttccctgatgacatatgatgtggagcatcttttcatgtgcttatttgccatctgtatatgttctttgttgaggtgtctgttaaggtcc

SEQ ID NO: 197000 - DNA, 201 bp, Homo sapiens
acaataataaaatataaacccataaacacccatgaacaacaaaatacacacccataagtaagtggatgggtggatggatgaatggatggatggatggatgratgggtgtgtggacagagactgatagacacttaataaattaagattaatgttgtggttaatggtgtttcaatattatgttgtctaaaagtatgttaactt

SEQ ID NO: 197001 - DNA, 201 bp, Homo sapiens
ctctgattatccgacatggaggctcgacaaccgagcaggagaccggcccccgctccctcagctgcgccggaggaggcgcccagtcctcggggtgaagggtygggggatggcgaagcgaagagtgcccgctccggtgtgggggggagcaggaggagggacgaagtccgcccgccgcgccgccgccgcgcctgacaccgagcg

SEQ ID NO: 197002 - DNA, 201 bp, Homo sapiens
caagcattgtctgcctggctacctgtggcaagggtagatggagtggccagccaaattctggctgaagcaggaccactgggctggaggctgttgctgagccycatccagcaaggagtagtggagaaatcttactgctttcaggcactgcagtggcggcctctattgaggctataacactggtgctgatctgctccggggcgc

SEQ ID NO: 197003 - DNA, 201 bp, Homo sapiens
tataaaatgtaaagttttgtattttcatgacattaagtgaatacaattatcccttggtatccatgggggattggctcccagacctcccacagacaccaaartccacgattgctcaagtccctgatataaaatggcatagcatttacatataacctttatatagtattccatagactttaaatcatctgtagattccttaga

SEQ ID NO: 197004 - DNA, 201 bp, Homo sapiens
cgcatttttagatttctagagtttgctttgtagaaagtaattttgaggttgtcagagaataaatgacgttagaaaggtttttaaagtaaaacaagaatgtkagatgatagcctgggattttctcttggttgtaaatgaatatcttactgagaaccacgttaaccatgcctgcccctcaaagataggaaaggttggatatat

SEQ ID NO: 197005 - DNA, 201 bp, Homo sapiens
ttagctgttgtaattcattacaaaataagaataatttgcctaaataagatactctttatcttaaaggtcaaagcacatcataatatactgctagttgattyatctttgtccaatctagtaaaattttttgcatttaaaaatagaaaatattatatatgatgtatttagtaaacacctatccattgggatatctgaatgtca

SEQ ID NO: 197006 - DNA, 201 bp, Homo sapiens
caggaaaacaagcttagggctcccattgattctacattatggtgagttgtgtaattatttcattatatattacaatgtaattataataggaataaagtgcmcaataaatgtgacgtgcttgaatcatctcaaaactatcaccccaccagtccgtggaaaaattgtcttccacgaaaccagtctctggtgccaaaaaggtta

SEQ ID NO: 197007 - DNA, 201 bp, Homo sapiens
ctgtctcccatcacccccagatgggattctctaattgcaggaaaacaagcttagggctcccattgattctacattatggtgagttgtgtaattatttcatyatatattacaatgtaattataataggaataaagtgcacaataaatgtgacgtgcttgaatcatctcaaaactatcaccccaccagtccgtggaaaaattg

SEQ ID NO: 197008 - DNA, 201 bp, Homo sapiens
gtgtccttagtttttaagttttttaatagtaaaatgctaccttaaaagctagagttagattacacatttcttaaagatgaatacaaattaataaacgtcaraatagtgtattcctatccccaacagtcagatacaaatccaattctgacccatatctggagtctgtgatgaggtgattctatgaagaagcaccttatgaga

SEQ ID NO: 197009 - DNA, 201 bp, Homo sapiens
tacaatattttgttggctaattggatcttttgcctctccatataaattttagactcagtttgttgacatccacaaaatagcttgctgggattttgactagkattgcattgagtgtatagatgaagttgggaagaactggcatttgataatagagtcttcctgttcatgaacatggaatatctctccatttaaagatgctcc

SEQ ID NO: 197010 - DNA, 201 bp, Homo sapiens
ggtgtaactttattgtttgaggatgtggaacataaagcctgatgtcactttgtataaaatcttactttattaattccttactttcacaagagaatgggggraaatcattaaataattatgtcaaagcatcccctgagggcctcccataacaattacttgcatgatgtgttttaaaagctttacattgggattaaagtaaat

SEQ ID NO: 197011 - DNA, 201 bp, Homo sapiens; identical to SEQ ID NO: 34004

SEQ ID NO: 197012 - DNA, 201 bp, Homo sapiens
aaataaaagcaattaccaattttaatttaaaaaacaatacaatatacatagataaacacttataaacaataataaaatataaacccataaacacccatgamcaacaaaatacacacccataagtaagtggatgggtggatggatgaatggatggatggatggatgaatgggtgtgtggacagagactgatagacacttaat

SEQ ID NO: 197013 - DNA, 201 bp, Homo sapiens
tgagtctcttcctgttactgtgagaaattcttttattaatattttaaaggcatactatataaagcagtgtggtggtatattaggtatcagtagaatcctcwtgatagttatttagtaaacgtgttttgcttcctgtttttttctaacctttttattgtttcacttctactataatttcacatccttttcttcttagtcaaa

SEQ ID NO: 197014 - DNA, 201 bp, Homo sapiens
tttctctgatacatttctagattgattttttgtgttatttgggatgtcactgagtttccataaaatcactattttgtattcatggtccaagagctcacatrtcactctctcgttagggttagtcactggttccttgctttgtccatttgaggagataatggtttgctgttgtttcttttggatgtacatctatgtctttgc

SEQ ID NO: 197015 - DNA, 201 bp, Homo sapiens
aatttgcctaaataagatactctttatcttaaaggtcaaagcacatcataatatactgctagttgatttatctttgtccaatctagtaaaattttttgcayttaaaaatagaaaatattatatatgatgtatttagtaaacacctatccattgggatatctgaatgtcattttagttagaaatacctaaagtattaaaatc

SEQ ID NO: 197016 - DNA, 201 bp, Homo sapiens
atgcccagttagccatttttgttttatccaaaatattggagctttaagtgcttgatttttactggaacgtctcttttaattcttacagcaatatcctatgyaaaggaagttaataaatactcaacagtgtctctagggagtacttctcattcagaatcttagttggctgccagttacagacttcacagagtttcattttca

SEQ ID NO: 197017 - DNA, 201 bp, Homo sapiens
acccaaatgtccaacaatgatagactggattaagaaaatgtggcacatatacaccatggaatactatgcagccataaaaaatgatgagttcatgtcctttktagggacatggatgaagctggaaaccatcgttctcagcaaactattgcaaggacaaaaaaccaaacaccacatgttctcactcatagatgagaattgaac

SEQ ID NO: 197018 - DNA, 201 bp, Homo sapiens
gcaggagaatcgcttgaacaacccaggaggtggaggttgtggggagccaacttggcaccactgtactccagcttgggcaacaagagcgagactccatctcaaaaaaaaaaaaagtgtaatgaggttgtaatctcaatttttagcttcactttaaaatctattaataataaatattgattcttttctaggtttctggaatag

SEQ ID NO: 197019 - DNA, 201 bp, Homo sapiens
acagagactgatagacacttaataaattaagattaatgttgtggttaatggtgtttcaatattatgttgtctaaaagtatgttaacttttttaaaaaattwaggttgacagatttgcaatggaattagaacaaagccgaaatttgagcaataccatagtgcacattgacatggatgctttctatgcagctgtagaaatgag

SEQ ID NO: 197020 - DNA, 201 bp, Homo sapiens; identical to SEQ ID NO: 34003

SEQ ID NO: 197021 - DNA, 201 bp, Homo sapiens
aaaaaaagagaatagcttgctgaagacattattatagcattaatatatgagtctgaggagaattttttcccatttgacttgctttctatttattatctttytcttttctagatgattccatgtccaagtatttcagatgccactttcttattctcatttgactgttatttcttaggtatattttctggattaaaatagagt

SEQ ID NO: 197022 - DNA, 201 bp, Homo sapiens
tatatagagatcttttagattgaaatagtataaaaaatacttaatacatttcacttgtataagtacatacatataattgaatataaacatgtacatatagrtgaaattgtacccttcatatccagtcttacattccaggagatacaatagaactatcagcacaaattttgcagtaaatcttagttgactcaaattcacatg

SEQ ID NO: 197023 - DNA, 201 bp, Homo sapiens; identical to SEQ ID NO: 34006

SEQ ID NO: 197024 - DNA, 201 bp, Homo sapiens
acttaatgctagccatataaacatgcataccatttccaaattatcctggattatagtttactttgtgcgccaaaattattcttgtctttctaggacattcmgtgagataaataaagcggaagagcaatacagcctatgtcaagaactttgcagtgagcttgctcaggatctacagaaagaaagacttaaggtgctttattt

SEQ ID NO: 197025 - DNA, 201 bp, Homo sapiens
cccacacacaatcaaaaattcacatataatttttgactcctgaagaacgtaactactaatagcctattgtaaactggaagccttactaataaggtatacarttgattaatatgtattttgtatgttatatttgttctgtactgtatttttacaataaagaaagccagagaaaggaaaatgttattaagaaaatcataaagg

SEQ ID NO: 197026 - DNA, 201 bp, Homo sapiens
tgaccctttcctatgtgtgtaggttgtgttttgtcgtgaggattgccgcattgaagagtctaaggctgggctagaggtttcccggttttattcccattggygtattcaggggtatttatgtcctcattcctttggtgacagtcttttaaaatctttgccaatctgataaaaccatgtgttaacgcttttaaatttatattt

SEQ ID NO: 197027 - DNA, 201 bp, Homo sapiens
tgtgaatgggcagagatgggccagtgacgcaacacagtaaagtgtattttggttataggcatcgtctctaaacttatgtaaaacattattaaaaaatggawggacaacgatgaaatgatggccaaaaatatagaaaaggataccttgcatgtcctgtgaaatgcaaaggaattctaaagtgtcattatgagttacctcatg

SEQ ID NO: 197028 - DNA, 201 bp, Homo sapiens
gtgacagtcttttaaaatctttgccaatctgataaaaccatgtgttaacgcttttaaatttatatttctttaatgattagtggggttaaacacattgctayttatgaattccacaaattttgattgagcgtctgttaggtgagataccattcttactgttggtgataaaatcgttggcggacgggtgacagaacaggtggt

SEQ ID NO: 197029 - DNA, 201 bp, Homo sapiens
caagccttggggcccttgagagcccagtgcggctgctgagctacagagccacactctgcggctgcttgtgtggttcgagtgtgaagtccagggacgctgarggtttataggtttttatctaagaagactcttggccacagtcaatctccagaggttgttggggtaaatgcacgggatgccaagatgcaaccaggtcagtat

SEQ ID NO: 197030 - DNA, 201 bp, Homo sapiens
ggcaggagcgcagactcctcttctctccctccagttcttacctgtagaactttctgagagcaggtggttgggagcagtttcttcttgatgaatagcaatayatacctaagggctcgcttggggaggacctttaggtttccagcctgttatgtaactggaatggactccgtttctcttagcactagaaaaaacaggaagaca

SEQ ID NO: 197031 - DNA, 201 bp, Homo sapiens
gctctggggaagacattctcacaggatccaccgtgattctggcggagcttctgggatgctggctctgtaatgacccacagagctgatgagcagagccatgrcccagccggacaccgtaacgtgtctaattgcagcataagtgtaaaattcaggggcaattatttacactcttaaaatgaattataccacagataaacttgg

SEQ ID NO: 197032 - DNA, 201 bp, Homo sapiens
tctccctccagcccctcccagtcgcgtagcttctgacgccgtcctcaccccgcccgcggccgacggggccccaacgcgcaggcgcggtaaccacggcggcrgtgtctagtgaggatttgaaatcggtcgcgcgtgcgcaccggcgacacggcccggcgaccgaggccgcgcttcctcctgccgcccccgtccccgccccct

SEQ ID NO: 197033 - DNA, 201 bp, Homo sapiens
taaaactccagtacttagaacatatatcctttaaaagaaatccacacttaacctgattgtgaagaatgagttgtttgtagattaaaattcgaaacagtgcwtttcttatgaaaattaagcttctcctgactggcttccttggtgactgctgtgacagattcctttgatttgctgtcccagttttccacacgtgagaattca

SEQ ID NO: 197034 - DNA, 201 bp, Homo sapiens
cactgaactgagagtggtgctcatctgtgtgacaagcaggatggaagcttgctataaatattgtgatataatgctaatgacctttacacagctaaaatcartcctttcacttttccggttttatgtgatactgccatactagtcagtctaacactgacccctgttggttgtgcttcagcataacgaaattaggatgacgag

SEQ ID NO: 197035 - DNA, 201 bp, Homo sapiens
ggctttctctcatgtgccctcgtccatccctttcgagttggcactgtccgatagaattctgtgatggtgatggccacttctgcatggtccggcaaggggcwgggcgccacatgtggctactgagtattgcagtgtggctggtgagagcaacaagctggatttttaattaatttgttttaattcatttaaatagacatgtgg

SEQ ID NO: 197036 - DNA, 201 bp, Homo sapiens
agaggctgatttctgattcttacaatcaaaccctcttgattaatgcacctttctggatgctcattttgtactgggtgtaactgttggtgcaggggtgcccrtctggttctgtgagtccagtgcacatcagtccaagctcagggaattctctgtattcagaaatgtccatttcatggtaaacaataaacatttcttggtgct

SEQ ID NO: 197037 - DNA, 201 bp, Homo sapiens
ttgagctgatacacagcagggacaggccattcctatcctctcttcacggagcatgcattctaatggggcgggggacacaaatgataaatgagataaaatayatatgacgtggtatagtgtcccccaaaaagatatgatcaagtcccaaccctgggtgcctgcgaatatgaccttatttggaaactctttgcagatgtaatc

SEQ ID NO: 197038 - DNA, 201 bp, Homo sapiens
aacatgatatatgcactgaaaagtgcacatgtaccaggtgcacctcttggtgagagttaacgaagtgcacatgctcatgtcactgtcatgtggaccagagygagcaggcagcaccagaggttccctccaggcccaggttccagaaggggctgttggctcttctcattagcacgagacaagccctggccggccactttctca

SEQ ID NO: 197039 - DNA, 201 bp, Homo sapiens
tgcctggggtctcacggcgcccgtgaggtgtaggcaggtgctttgcctctgagctgtctgtagaatggggtgacggcggtttcatcagactcagtgaagcrtgtcatacagtgagtgtctggtcacagcaggaagatggtgaatgtcagctaatgagtattcatcaccaatgaatagtaacagttttttttactaaggcta

SEQ ID NO: 197040 - DNA, 201 bp, Homo sapiens
gttaaagaggaacaacttagctgttcctttcgtggttccaaaaaatatacatatatgaaaagcctcttatctttgggggaagtttgaagatgagactgttkctggtgtgtacttgctaaggtttatgtcagttcaagattataagccccccagggactatgaggtacttgcctgttgtatgacagttcttagctcacctgt

SEQ ID NO: 197041 - DNA, 201 bp, Homo sapiens
ctttgacagccaccgcaggacaaagttgatagctgtggggttgcggagtgttgaggatttcatagggaagccagtcctgcgcagtagtacgctcaggttcrtgctttcttgaggtgttccagaactggcctggagggaggctgcagtgtggaagcgggatttctgtcacctggagtattcttagaagttgcattctatgaa

SEQ ID NO: 197042 - DNA, 201 bp, Homo sapiens
gcacttcacctccttaggggccataggctagtgggattgtgtcttggcctttgtgggagacacaggcacatgtgccttggtgcttatcctccccacacgartgtgtaggctgtggcgaggggagcagtggctgacgtgcgttttcttctgtcagcgacatagacctggtggtcttcgggaaatgggagcgtcctcctttac

SEQ ID NO: 197043 - DNA, 201 bp, Homo sapiens
gtcacttccttctctcaacagtcttcctggtcacgagcaccattgtggctcatgtgtgtggggctcttttggcttagctctctgcacgagtttgctccttkagttcccagagctgacccttgaaatgagtgatattactcctgttttgtagacagaaaactgaagccttgacagtctgacgtgacctggcaagaggtgctg

SEQ ID NO: 197044 - DNA, 201 bp, Homo sapiens
aggaatctctgggtccgcaggagtgatccagcgtaggcagtgccggagtaggtgctgggagagcggggcctcagcctggtttgggggcaggcattttcatytgaatcccctcacatacctagtgctgttgggagaatgatttaaccttcttgctttccatcttatgctacaaatatggaagtcttcccttaagttcagcga

SEQ ID NO: 197045 - DNA, 201 bp, Homo sapiens
cataaaataggttcatagcagagcgcagcacagagcaacatggagcaactgttatgacctggagtgtctccagtccagcatgcaggtgataggtctcagcrtttttgcacgcaggttaatgatggtgcagacggtcacttccttctctcaacagtcttcctggtcacgagcaccattgtggctcatgtgtgtggggctctt

SEQ ID NO: 197046 - DNA, 201 bp, Homo sapiens
ctgaggagctgaattttaattttatttacttttaattaaaatttaaatggccatgtatttagacagctctgaactgcagtaactttaggctctatttgaamgtgtttgattcagtaactgttgctgaaataaattgaaactcatacaacagtaaaagctgtgttactcagcaagttatcactgtgaaagctctagaaattg

SEQ ID NO: 197047 - DNA, 201 bp, Homo sapiens
cgtagcctgtctctttagccactggaaatgtagagcaaagcgagaattgtccaaagagataagctaataaagaggaaaacaggctgggtgcaatggctcaygcctgtaatcccagcactttgggaggccaaggagggcggatcacaagttcaggagatcgagaccatcctggctaacacagtaaaaccccatctctactaa

SEQ ID NO: 197048 - DNA, 201 bp, Homo sapiens
gggagtgtctgtcttgcttggcccagcctcccagagaccttagctctcttagtacatgggctctgcctaccttgatccccagctcaccaccctagtgcagktgcttcttcgctcttgttccactccttgtcgccatccaccctgtgctttctcgatgtgtccttactcggtgtttctgtggagcagggcatcctgggcttc

SEQ ID NO: 197049 - DNA, 201 bp, Homo sapiens
gatgaagtgttttctgaactctttgcagcttctaacatagtgttctgtgtatagtgaaggaaaacaaaattaagggccagggaacattaagtaggcaactrgaacagcactgtccagtagaacttcctgtggagatggaataattctatttttgcactaatacagtagccactggccatatgtgacttttgagcacttgaa

SEQ ID NO: 197050 - DNA, 201 bp, Homo sapiens
acgtgcttggctcttgagagcctagctccatcagcccatgtcacacactcacaggtctggctttagctggtttcgccatggtttctaacttgagcctcagyttccccccctgtgaagcagagcctgtggcacccacctcagagagtacatgaaagacttggaagcactctgtgagttgtcatgcgagagattaaaaaggcc

SEQ ID NO: 197051 - DNA, 201 bp, Homo sapiens
gagggcggatcacaagttcaggagatcgagaccatcctggctaacacagtaaaaccccatctctactaaaaatacaaaaaattatccgggcgtgatggcaygcacctgtagtcccagctacttgggaggctgaggcaggagaatctcttgaatccaggaggcggaggttgcagtgagccgagatcacactactgcactcca

SEQ ID NO: 197052 - DNA, 201 bp, Homo sapiens
aaaaattaatacctaactatgaaaagttagaaagcctggagaagtatggaggtgagttgtccaccattgggccactagagagtgccctatgagcctgtccstggtgtcctggactctggtggtgtgcactgcatttgctggcagtgagccagggggtgggccacatctgggcccgggcggggtggatctctgcagaagttt

SEQ ID NO: 197053 - DNA, 201 bp, Homo sapiens
tgttgccgttacttcaggtagaacttaaagttgacagtacattctactctgcaggtggaaatgtggagtgccattttgacaaattggaatgccctgtttayaatatgctttaatgagttaaatctgggggatgtggatagaattttagtatcctagctttggcattcttccatgactttgggccaattatttaataattcc

SEQ ID NO: 197054 - DNA, 201 bp, Homo sapiens
atgaaaatatatgattgtgtctacttgtgttaggatgaataggaaaggagagtcatctgaaaccggacactgacattcaggtgctgcccattatggagagwgtggctcaatgattaaaccatggtttttatgattaccatttgctatgttatgttaaagaggaacaacttagctgttcctttcgtggttccaaaaaatata

SEQ ID NO: 197055 - DNA, 201 bp, Homo sapiens
agtcacctctggaacccagttatcttaagttgatagcagtctatctttgctttgcagaagatgtggggaacacttgtcctgcaagcccaggttcgtagcartgttggcttccccagaaccttggcttcagagcactgtgcctcctttaggaggcacaagaaaactcccacacggttcttccctctgtcccttcctgagccc

SEQ ID NO: 197056 - DNA, 201 bp, Homo sapiens
gtatcctagctttggcattcttccatgactttgggccaattatttaataattccaagcctgcatctttgttagaatctctaaatttctctactcctgttattatcctcagaacaggactgtgaggtgcagtaggccacatggtgtagtggtttaggtggacagacttgccagtgctgttctcatggatagcctaggactgt

SEQ ID NO: 197057 - DNA, 201 bp, Homo sapiens
tacagctgtcagctgcacacacaagtctttcgtaacacagactacacttacattatttctcctacaatattatttctagagatactttgaaattacatagytgtttttaaaatttgcttttcctgagtaaccattttataaagttgacaattattttagagagctttgttaaaatgttctttctagttattacagactttg

SEQ ID NO: 197058 - DNA, 201 bp, Homo sapiens
tgttcacgaggtgtcctgcattggctagcttaggaaaggggtctttcctatgcaggtgggggttgatgacttacccaagagtcacctctggaacccagttmtcttaagttgatagcagtctatctttgctttgcagaagatgtggggaacacttgtcctgcaagcccaggttcgtagcaatgttggcttccccagaacctt

SEQ ID NO: 197059 - DNA, 201 bp, Homo sapiens
atgttgggctctgttaacagctggactggtggctgtctgaattgggaccatgcttggggtgaggtttttttcttacttttttttttttttttggtgagacrgagtcttgctctgtcgcccaggctggagtacagtggtgcaatctcggcccactgcagcctctgcctcctgggttcaagcgattctcctgcctcagttttc

SEQ ID NO: 197060 - DNA, 201 bp, Homo sapiens
ggttgtgtgtctgcgtctgggctcagcgtgcctgtgggatggtacttatccctttcctgtgtcatttacctccatgaaatttatgaagggatgttctgccrtatttcagtagaatctagatatgttggtgaaggaaggccttctaggaatatgggatggctgtgtgggattcatccatggttgagagttgaaaatttcttt

SEQ ID NO: 197061 - DNA, 201 bp, Homo sapiens
cctgggttcaagcgattctcctgcctcagttttctgagtagctgggactacaagcatgtgccaccacgcctggctaatttttttctatttttagcagagayggggtttcaccattttagtcaggatggtcttgatctcctgaacttgtgatccatccacctcagcctcccaaagtgctgggattacaggcgtgagccaccg

SEQ ID NO: 197062 - DNA, 201 bp, Homo sapiens
ctccctctctctcactcgctcatacttactttgtgtaattggtgatttccagccttttgtatagtcctttctcgaatagttgttttctgtcatcttggcgrgggcctcaaggggttgactgtacggagggcaggggctgcagagctgcagctgctgcctggggtctcacggcgcccgtgaggtgtaggcaggtgctttgcc

SEQ ID NO: 197063 - DNA, 201 bp, Homo sapiens
cacctgcacctgctgtcttagacacctgcggtggccgcacatcttcgtgatgctggcgcgcactcaagtgcgaagaccatcggctgagggatttgttgggtttttttttttttttttttggaagggggagaatggtgtgattgtttctcttaagttcaccttaaaatttagaaatttcaccctgtcacccacccctgcttc

SEQ ID NO: 197064 - DNA, 201 bp, Homo sapiens
caacttgtgtgtgattcacatccttatagtgtttagcagaatgtaagttaaggcaggagcttcctcctgcctgtgtggtgataggggagggggcattcacatgtttctcattgtcaggtgcttttgattgaggctgggggcaagttttaaaacatgatatatgcactgaaaagtgcacatgtaccaggtgcacctcttggt

SEQ ID NO: 197065 - DNA, 201 bp, Homo sapiens
aacttgtgtgtgattcacatccttatagtgtttagcagaatgtaagttaaggcaggagcttcctcctgcctgtgtggtgataggggagggggcattcacatgtttctcattgtcaggtgcttttgattgaggctgggggcaagttttaaaacatgatatatgcactgaaaagtgcacatgtaccaggtgcacctcttggtg

SEQ ID NO: 197066 - DNA, 201 bp, Homo sapiens
gacagaatctcactccatcacccaggctggagtgcagtggtgtgatctcagctcactgcaacctccgcctcccgggttcaagcaattcttgtgcctcagcytcttgagtagctggaattacaggtgtgtgccaccacacccagccaatttttgtatttttagtagagacggggtttcaccatgttggtcaggctggtctca

SEQ ID NO: 197067 - DNA, 201 bp, Homo sapiens
gaactgaggcaggcactaaaagcagctgactggcagccctagaaacatgaagggtttcatttatagtttcagtccttttccttctttcgagccttaatttaaaaaaaaaaaaaaaaaaagccttgaagtcctgcttctgagttttctaatttgtgcaggtattagttgccttgtaacataatcaaaaataaataaaaatga

SEQ ID NO: 197068 - DNA, 201 bp, Homo sapiens; identical to SEQ ID NO: 34029

SEQ ID NO: 197069 - DNA, 201 bp, Homo sapiens
acatggttcttgcctttagtcattcacggaatgggaagaatgcttttctctcagatggaggagttgggaagtcccagagggcaggtgtccatccctgctcyctatgtaacatcacgtcggtgcttagtgtggtcactgcccgaggacgtgggcattgtgcctgctgtctggctccaacactgctgtctctctctttctcca

SEQ ID NO: 197070 - DNA, 201 bp, Homo sapiens
accatcttctcttatgtacactcgtcccttgttctacattttggggcatttttacagtcccaaaatgtagtcagaagtatttacttctcacccagatcatkctgtggtagtggaaagggtggtatttgaaggggtgggagatgagataggaatgggaaggaagagtaacgtggtcgtcaagagtggaattcgaaacagttt

SEQ ID NO: 197071 - DNA, 201 bp, Homo sapiens
gccaaataaaagtctggggccaagcacctctctccatcccagcacatagggtgggcgtggcagagactaactcctgttccctgttggctccctcccctcaygtctctttgatgcttggtcacctctggtgctgatccagggctacaggggctgggcagaatgtgggtcctgctgtgaggggctggggcctgggagtcgtcc

SEQ ID NO: 197072 - DNA, 201 bp, Homo sapiens
atagcctttttgctgcagggaatgacgttggccggagctcctatggcgccatgcaggtgaagcaggtcttcgattatgcctacatagtgctcagccatgcygtgtcaccgctggccaggtcctatccaaacagagacgccgaaaggtaatgggttgtgtgtctgcgtctgggctcagcgtgcctgtgggatggtacttatc

SEQ ID NO: 197073 - DNA, 201 bp, Homo sapiens
cccgtgcccattgtgttcgcctgtctgggctttgctggtagggtctggaagagtttcagtggtgagggcctgcttcagagtcacttgtatgagaagatccraaacatgtggacgatggtgtgcatgtggggagggtctgacatagcctttttgctgcagggaatgacgttggccggagctcctatggcgccatgcaggtga

SEQ ID NO: 197074 - DNA, 201 bp, Homo sapiens
tctagaaaagataaaactccagtacttagaacatatatcctttaaaagaaatccacacttaacctgattgtgaagaatgagttgtttgtagattaaaattmgaaacagtgcatttcttatgaaaattaagcttctcctgactggcttccttggtgactgctgtgacagattcctttgatttgctgtcccagttttccacac

SEQ ID NO: 197075 - DNA, 201 bp, Homo sapiens
aggcgagaaatgccagctaaaggaaaagactgtggttacagagggaaattggcagaaagatttaatttagtgttatgatgaattcattgctttgcattttkcctctcacacttaatttgttggggtgcaaaaatgcttcatgctggaaatatgaagaagacaggtgggaggactgtgggaagtaaacgcaatagaagacat

SEQ ID NO: 197076 - DNA, 201 bp, Homo sapiens
caggcgcgtgtccctgggccttctcctctgtgtggctctgtgtgctgtccgcccggttgctggctgccctcctctgctgtgtgcaaggcctgtgtgtgtcrgggaagcctttcttgtcacacatgtcatactttttccaatttgttttttgcatttgtatttttttattcagctcctatacatttaaaaaaacacctcaga

SEQ ID NO: 197077 - DNA, 201 bp, Homo sapiens
tctctctgctgagactgtggcggatgaaaccaggatttagtggatggtcaccaggtagcttgggcagacctgggccgcggggcccctgaggactcatacgyctttttcctgttcacatgttccttccccacaccttggcccattctcagtccctcccatgctccttagcgtgaggcactcagggaggtgcccatggggcct

SEQ ID NO: 197078 - DNA, 201 bp, Homo sapiens
tgctcttcaggttcccccttcccccttgtcatctggtctgagggagcatgtccacccccagcgcaacacgaacagcagcagccaggctttccctccctccygccatctcctgccgctctgccttccttgccagcctcactctgctctcctgctccggaggcccccactgtcctcatggcctgtgtagcaagcacataaaca

SEQ ID NO: 197079 - DNA, 201 bp, Homo sapiens
tgctacttgcttccactttgccagctgttcgttggccctgttttgtcttctgctgtttgccttatttatgaaacagaatggaaacaggcgagtttgatttsttataattcctaggagtcatagaatggaagcaggtgagtttgatttgttataattcctaggattggataatttgccttcccctctctccatctttaatta

SEQ ID NO: 197080 - DNA, 201 bp, Homo sapiens
cccctgcaatctggtcccatcttgttccattttcaagggccttgctcttcaggttcccccttcccccttgtcatctggtctgagggagcatgtccaccccmagcgcaacacgaacagcagcagccaggctttccctccctcccgccatctcctgccgctctgccttccttgccagcctcactctgctctcctgctccggag

SEQ ID NO: 197081 - DNA, 201 bp, Homo sapiens
ttggcggggtgggaagtggcaatactttaggtgactgacagttgaaattaaccttacacaagagccaaactgtaggctgatgcagggccactcacctttgkactcacccctggcaggtcctgtaagaggtgctacttgcttccactttgccagctgttcgttggccctgttttgtcttctgctgtttgccttatttatgaa

SEQ ID NO: 197082 - DNA, 201 bp, Homo sapiens
ccatccacctcagcctcccaaagtgctgggattacaggcgtgagccaccgcatctggccacatatttttttaaattaaatgtgatacataaaattaggctscaggcatggcctgatttgcaggtgcttcatgagcaagcgtgcacagcatttatttgctgctcctggagtctctcgtgtgtgcttgtagcctagccttaag

SEQ ID NO: 197083 - DNA, 201 bp, Homo sapiens
acggccgccaccagtctcacactgcctcgtgggcagtcctggagtcgtgcggcaccttgctggtccctgctctccttgaagaagggccagtggggcacttygccagagccttcttgtctgactccgtcatccaagaggcatggatggccgggcccccggcagtttccattctattctgagaaggcaaaacaaaattattcc

SEQ ID NO: 197084 - DNA, 201 bp, Homo sapiens
gaaagaacaacttcgcacaccggcctcttctttgcattttggctttgctttcccagtctcctcctgctgtttttcttgctctgagactttcctgaagccgrcgtgtgttccctctcagtctgcttggccgcgactttgcagtgcagggaatgtgctttgggtgtagcccaagcacaggctgctgcatgctgggatcgacag

SEQ ID NO: 197085 - DNA, 201 bp, Homo sapiens
aatgcacctttctggatgctcattttgtactgggtgtaactgttggtgcaggggtgcccatctggttctgtgagtccagtgcacatcagtccaagctcagrgaattctctgtattcagaaatgtccatttcatggtaaacaataaacatttcttggtgcttgtctgtgatttatattgaaaaaaatttgtctcagaataaa

SEQ ID NO: 197086 - DNA, 201 bp, Homo sapiens
cggagacggagcagtgcgctgttgcgtccatccacagatggcctccagagtcatgcggttgcagggaggccgaagggccagggaggccgctgggtgggcayggctgggcggtgccctcacgtgggttttgttgggctactcttactgtgcactttttctcagtttggtcagtgttccgccttgctgcctggcccccaaccc

SEQ ID NO: 197087 - DNA, 201 bp, Homo sapiens
cagcaatgacaaggtcagcaaaatatcttagcaaaacttgattgattgattccatgcacaggcaagcgctgttctgggcaccggagacggagcagtgcgcygttgcgtccatccacagatggcctccagagtcatgcggttgcagggaggccgaagggccagggaggccgctgggtgggcacggctgggcggtgccctcac

SEQ ID NO: 197088 - DNA, 201 bp, Homo sapiens
tttctgctaacaaatcaaattattcattgcagaggtaaaatattttcagaatgttaattttagatgtcgtagagagtgtacatcagcaatgacaaggtcarcaaaatatcttagcaaaacttgattgattgattccatgcacaggcaagcgctgttctgggcaccggagacggagcagtgcgctgttgcgtccatccacag

SEQ ID NO: 197089 - DNA, 201 bp, Homo sapiens
tggcagtgttagtattgaatgagataatccaaaaaatgtaaaaatgtttacatttttaaagggatagttggcgatttaaatggtttctgctaacaaatcarattattcattgcagaggtaaaatattttcagaatgttaattttagatgtcgtagagagtgtacatcagcaatgacaaggtcagcaaaatatcttagcaaa

SEQ ID NO: 197090 - DNA, 201 bp, Homo sapiens
aggatgccttttctcccaacactggggatgcacactcgtcagcatcctatttttgagatttctatgttgtggtagttctctgttgctgtgtagcaaattarcataaactcagaggcttagaagaacactcacttatggtcttaaggattttgtgtgtcagatcagggatggcggggctgggttctctgcttaggcttttgc

SEQ ID NO: 197091 - DNA, 201 bp, Homo sapiens
agctgcttgagctagcaagcaaggcttgcactagcttccaggcgcagtcacgcagtttcacagcaggcgcggttccctcggagcacccagagctgccctgyggtagtcagcagttgtgctgtggctgcactgccaggctgggtggcaggtggatcggagccagcagatgtggctcaggaagtgccttcttggcctctcctt

SEQ ID NO: 197092 - DNA, 201 bp, Homo sapiens
taaagtagagcaggtgtgacctgtccggaacatccttgtgatgctcagcagggcctgctgcagagcacgggaggcatcactctaggggcctttccctcccrtactttcctgtgagtgtccaggatgcatgagagaggttgttgtgagacctgccttaaagggtggcggtggcacgtgtggaccttgctttctgagtttcac

SEQ ID NO: 197093 - DNA, 201 bp, Homo sapiens
ggccggcgggggaagcgcctgcggtggcgtccgctgcccccgcccggctgctcggaaacttccaccggcggcggtgacggccacgctgccctgcgcacgcrcagcgcggctcaggcggcagcccggtgacaccggccctagcgcgcatgtctgcacgccggggtctgcgcgccgcggcgggccgagggcggcgtgcgggcc

SEQ ID NO: 197094 - DNA, 201 bp, Homo sapiens
agttttcattttatactttcagaggagaaatgaaactgaatttcgtggccagaaatatgtttgagcgtcatcctgatgtaagaacagaacagaaagtgtgrtgacatttcattgtaactctagtatgttttcttttttgtccattagactacatgaggaaataattgacttttataacttcatgtccccttgtcctgaaga

SEQ ID NO: 197095 - DNA, 201 bp, Homo sapiens
gacagggcggcagccgcggggcctcacgtcgcccaggctcgcggggcaccgcgatgatcaacgacactggcgtttgctttggacctcacaggatgtgtggktggcgctgtattccaaacagtgccactgtcaacccggcttccatcgcgctcgggacaccgggatggcaaacggcaggctgtggatggcgggcggtttccc

SEQ ID NO: 197096 - DNA, 201 bp, Homo sapiens
cacagagttttcattttatactttcagaggagaaatgaaactgaatttcgtggccagaaatatgtttgagcgtcatcctgatgtaagaacagaacagaaartgtgatgacatttcattgtaactctagtatgttttcttttttgtccattagactacatgaggaaataattgacttttataacttcatgtccccttgtcct

SEQ ID NO: 197097 - DNA, 201 bp, Homo sapiens
agcaaggcttgcactagcttccaggcgcagtcacgcagtttcacagcaggcgcggttccctcggagcacccagagctgccctgcggtagtcagcagttgtkctgtggctgcactgccaggctgggtggcaggtggatcggagccagcagatgtggctcaggaagtgccttcttggcctctccttaatctctttcagagtct

SEQ ID NO: 197098 - DNA, 201 bp, Homo sapiens
accttgcatggcatttgcagcatttgcagcgtgcttgggtttgctttactagggtgaaagtgttgcaccccccagcacccacaaaggcacctctgctcacmctccggtgaggttctgactggccctgggacatcacctgctccaggatcctatgtggctcatcccaggagagatgtgggagggaaggggaaaaaaggctta

SEQ ID NO: 197099 - DNA, 201 bp, Homo sapiens
ttttccttctttcgagccttaatttaaaaaaaaaaaaaaaaaaagccttgaagtcctgcttctgagttttctaatttgtgcaggtattagttgccttgtawcataatcaaaaataaataaaaatgatttataattagcttattaactgtatcagtaaatggatactttaaagaggatcattgatccctcaaaatagaagca

SEQ ID NO: 197100 - DNA, 201 bp, Homo sapiens
cctttctgtgctgcactcagatgaacattctttaaaatatgtcatttaagaaaagtttgcaggactactcgggaggcagaggcaggagaatcctttgaacyggggagttggaggttgcagtgagccgagatcgcaccacagcactctagcctggtgacagagcgagactctgtctcaaaataaataaataaataaataaat

SEQ ID NO: 197101 - DNA, 201 bp, Homo sapiens
ccctggaggtttggtatgtgagaacataagactaaacttatttctattttgttgaggagaaatgattaaaacttttcattgatgtacttctgtggcagacttttggagaattgaaccagcgggcatattcagtatttgaagtcatagatgagtaaaggaggtatgttgtagtttgcgctggcggcgtggcctgtggtcggc

SEQ ID NO: 197102 - DNA, 201 bp, Homo sapiens
gtttactatacctccaccgaccctaggggttgctcctgttccttgcagacaagctggtgtagaaggaactgcgtctttgaaagccgtccaccacatgtctyccccggccattccctcagcgtcccccaacccgctctcgagccctcatctgtatcataaggtatagctctgtcctggtgcattcacctacctgttcaagct

SEQ ID NO: 197103 - DNA, 201 bp, Homo sapiens
cgccctgatctccactgctgagagctgggccagcctcggggacgtgctggtgacagggcctgtgttggggctctgagagccccgggcagttcatttgctcytgatgcaggtttctcttatactaaccagttaataatcacactttgagaaatccttatttaatgcttctaattaacttttgtctttctaactgtttacatt

SEQ ID NO: 197104 - DNA, 201 bp, Homo sapiens
cttcttaagaacatactggcctcagggcttaccctgcctggtggtcgcagtggtgtccaggtgactctggccccactggcatgtcctcacacgctgagtcyttggttggttgccctcaagtgtagacattaaagcccagaataggtgtgtactgaatgcactgtccctacgttgcctatcactggcatttgaacttttcgt

SEQ ID NO: 197105 - DNA, 201 bp, Homo sapiens
agttcttgttggtgagaatatttctaaaatagccttttatttgctgaattttttaggggaaaaatttttttagtaaagttgtcttaaagagtgaaaacccraagtagagaaacaatatcagtataacatacaatttaaaaaatggcttcgaagttacattaaatgatttcaaaaattctgccaaataaaagtctggggcca

SEQ ID NO: 197106 - DNA, 201 bp, Homo sapiens
accatggtttttatgattaccatttgctatgttatgttaaagaggaacaacttagctgttcctttcgtggttccaaaaaatatacatatatgaaaagcctyttatctttgggggaagtttgaagatgagactgtttctggtgtgtacttgctaaggtttatgtcagttcaagattataagccccccagggactatgaggta

SEQ ID NO: 197107 - DNA, 201 bp, Homo sapiens
gcacccttcccgctggtggcccctgggaacagcatccgagctgtgatatgcactagaggagattgatggtcctttgaattagaagagtaactttttgagtmtttggccattggtgtgttgttctaggaaatcctctcttttttgtggtgttgaggtcccccatgtatagtttcagcagcgaggacactgtggttcttgagt

SEQ ID NO: 197108 - DNA, 201 bp, Homo sapiens
taatgttctcactgtcatgaatgctatgatagtagaatcactgggtaactacctgtgatgatcgcagcttccttggtctgtctctgccaagatgctttaaragtagtgaaaatggaattccatgtctgttttcttacagttctagtcacactgtcctgtcttcactttcccctctgagatgtggcccttatatatagcctt

SEQ ID NO: 197109 - DNA, 201 bp, Homo sapiens
cagggcagagccttggggctgagatgggggaggagccagctctgccctgggagagatacaaagcgcctgcctgggtgaggcagtgcacgggtgggcttgcytcacctctttggccccagcttcaaaaccagccagtcctccctggctttggctttaattcacatttacaagcttgaaaaccagttaatcccattagctcag

SEQ ID NO: 197110 - DNA, 201 bp, Homo sapiens
ggatttattctattatgatcaatgcatagaaatttcttcgatttggagactgaacactagtgagcagaactgaaattgagctttaaaagatattgatgackggtctgtggataggagactttagtgtggtttttatgcagacgtcctgccagctgtaaattccctggaggtttggtatgtgagaacataagactaaactta

SEQ ID NO: 197111 - DNA, 201 bp, Homo sapiens
gtatgaattagtaaaactgaaattattacatttcctttattaggattataaaagcaatgatgacttattgaagaaaatttggaaaatacagaaactacctrtaatttttccattgttaacatttgagcatatttcttgtcacttttaatggtgctttaaatatgtagcaaatgtatcatttcgtattttaaaaaaatgcta

SEQ ID NO: 197112 - DNA, 201 bp, Homo sapiens
gcagctgcctgtccttgggttgactacaaagaagtcacctttgaacaacttagaaattgtgccttttggggaaggcagggcagagccttggggctgagatsggggaggagccagctctgccctgggagagatacaaagcgcctgcctgggtgaggcagtgcacgggtgggcttgcttcacctctttggccccagcttcaaa

SEQ ID NO: 197113 - DNA, 201 bp, Homo sapiens
gctttttcaggggccttgcctttggcagggcagggacgtgtactgctgcagtctagggtatgggataactttctaaaccagacccagaacttcatggccgmaggggccttttagccatgcggggctaggagctgacacagcgtcagcagcatgagggcctgtggtgctgggcggcagagcccagagggagcccctgctggt

SEQ ID NO: 197114 - DNA, 201 bp, Homo sapiens
ttttgccgtttagttcctttgccctttacctactgcagtgcagctgcctgtccttgggttgactacaaagaagtcacctttgaacaacttagaaattgtgmcttttggggaaggcagggcagagccttggggctgagatgggggaggagccagctctgccctgggagagatacaaagcgcctgcctgggtgaggcagtgca

SEQ ID NO: 197115 - DNA, 201 bp, Homo sapiens
gtgtttggtgtgcttcttccagccccactgttctttctaaagtgttttattttacatacgctgtcctggcttctgggctatgacctttgccttttttgccstttagttcctttgccctttacctactgcagtgcagctgcctgtccttgggttgactacaaagaagtcacctttgaacaacttagaaattgtgccttttgg

SEQ ID NO: 197116 - DNA, 201 bp, Homo sapiens
agttaatgagtttccagtattttctgtcgcattttacgttgtaatggaaaagactgggaactgaactcacatgcagtttgtcaaatcactttttccctagmattcaggattgatgagattaacggggtgttaaaggtaaactgaggcacataattaacatggacagaactgtagacctgagtgttgagagttgggaaattt

SEQ ID NO: 197117 - DNA, 201 bp, Homo sapiens
aaaccactagttttaagggttttgaaggaagagttggaggaggagaggaagagaataaattcacagttaatgagtttccagtattttctgtcgcattttaygttgtaatggaaaagactgggaactgaactcacatgcagtttgtcaaatcactttttccctagaattcaggattgatgagattaacggggtgttaaaggt

SEQ ID NO: 197118 - DNA, 201 bp, Homo sapiens
gagccttaatttaaaaaaaaaaaaaaaaaaagccttgaagtcctgcttctgagttttctaatttgtgcaggtattagttgccttgtaacataatcaaaaakaaataaaaatgatttataattagcttattaactgtatcagtaaatggatactttaaagaggatcattgatccctcaaaatagaagcaatgcagtcattcc

SEQ ID NO: 197119 - DNA, 201 bp, Homo sapiens
tgttaggtgatttctgtctttccgtttgaaagagatttcagatcattgtaacatttctggaatcctgtcgatctgaaggaatggctaggatgtagtagttyaagggaaatgaaaagtcgaatgtattttgatgtttctgcatcagacctgctcggtggagtccatttctcagcttcgggagccacgtgcttggctcttgag

SEQ ID NO: 197120 - DNA, 201 bp, Homo sapiens
ggcctctccttaatctctttcagagtctgtgggcccttgattgcactgtgggttgtttcagactccagtattaggagactgaaccccttggtggttttttkgtgtgtgtgtgctgagctgggttgaggacatgttaagcaggtggggtgcctcccctgggtttgctccgggtggtacctgtggtgtggggtggttctgagt

SEQ ID NO: 197121 - DNA, 201 bp, Homo sapiens
ttctgtgctgcactcagatgaacattctttaaaatatgtcatttaagaaaagtttgcaggactactcgggaggcagaggcaggagaatcctttgaaccggrgagttggaggttgcagtgagccgagatcgcaccacagcactctagcctggtgacagagcgagactctgtctcaaaataaataaataaataaataaataaa

SEQ ID NO: 197122 - DNA, 201 bp, Homo sapiens
cagaggcaggagaatcctttgaaccggggagttggaggttgcagtgagccgagatcgcaccacagcactctagcctggtgacagagcgagactctgtctcaaaataaataaataaataaataaataaataaataaataaataaataaaagtttgcaggaaagccgtgtgaatatatgaaaatacagtgattgaaaagtcct

SEQ ID NO: 197123 - DNA, 201 bp, Homo sapiens
agaggcaggagaatcctttgaaccggggagttggaggttgcagtgagccgagatcgcaccacagcactctagcctggtgacagagcgagactctgtctcaaaataaataaataaataaataaataaataaataaataaataaataaaagtttgcaggaaagccgtgtgaatatatgaaaatacagtgattgaaaagtcctg

SEQ ID NO: 197124 - DNA, 201 bp, Homo sapiens
gaggcaggagaatcctttgaaccggggagttggaggttgcagtgagccgagatcgcaccacagcactctagcctggtgacagagcgagactctgtctcaaaataaataaataaataaataaataaataaataaataaataaataaaagtttgcaggaaagccgtgtgaatatatgaaaatacagtgattgaaaagtcctgt

SEQ ID NO: 197125 - DNA, 201 bp, Homo sapiens
ggcaggagaatcctttgaaccggggagttggaggttgcagtgagccgagatcgcaccacagcactctagcctggtgacagagcgagactctgtctcaaaataaataaataaataaataaataaataaataaataaataaataaaagtttgcaggaaagccgtgtgaatatatgaaaatacagtgattgaaaagtcctgttc

SEQ ID NO: 197126 - DNA, 201 bp, Homo sapiens
ggtgataggtctcagcgtttttgcacgcaggttaatgatggtgcagacggtcacttccttctctcaacagtcttcctggtcacgagcaccattgtggctcatgtgtgtggggctcttttggcttagctctctgcacgagtttgctccttgagttcccagagctgacccttgaaatgagtgatattactcctgttttgtaga

SEQ ID NO: 197127 - DNA, 201 bp, Homo sapiens; identical to SEQ ID NO: 34030

SEQ ID NO: 197128 - DNA, 201 bp, Homo sapiens
tatgaagtgtttggtgtgcttcttccagccccactgttctttctaaagtgttttattttacatacgctgtcctggcttctgggctatgacctttgcctttyttgccgtttagttcctttgccctttacctactgcagtgcagctgcctgtccttgggttgactacaaagaagtcacctttgaacaacttagaaattgtgcc

SEQ ID NO: 197129 - DNA, 201 bp, Homo sapiens
gtgataggtctcagcgtttttgcacgcaggttaatgatggtgcagacggtcacttccttctctcaacagtcttcctggtcacgagcaccattgtggctcatgtgtgtggggctcttttggcttagctctctgcacgagtttgctccttgagttcccagagctgacccttgaaatgagtgatattactcctgttttgtagac

SEQ ID NO: 197130 - DNA, 201 bp, Homo sapiens
gcagcaaagcccacccgtcgccaggcatgggtgagagattaattcatttgtgttcatcctaaccactggctggcatgttcatgcagaagtgtctctattcstttgtggtaaattggtcaaattaagaaaatagctagtttttctgatgagcattaattaagaagacaataagatctagagcagcactgtccagtagaagca

SEQ ID NO: 197131 - DNA, 201 bp, Homo sapiens
tgccatactagtcagtctaacactgacccctgttggttgtgcttcagcataacgaaattaggatgacgagaatctgaaattacatctaccatccaggtgaytaagttatgcagaatatagtccaacttatttgcccatatttggttaatcagatatctgtgtttgcaggaagtttgctgtatggattaccaatttcaaaaa

SEQ ID NO: 197132 - DNA, 201 bp, Homo sapiens
ggggaggaataccaggccaccccctcttctccctgtgcaagggaacagacatttgacaaaaacggatgccatgttacgctgattttgtgtgtctaaggcaractgcagcaggtgttatctccgtgctcttcctttcctggagtgttgagcatctcttgatagtaggggatgcccctgagggtggtgaatgtggctgcacag

SEQ ID NO: 197133 - DNA, 201 bp, Homo sapiens
ttgctggggtatgagggttgttgcatgcagtagagtcctacaaataaccacaattgctaggtgttgggagttcttatagtaaacttttgcttgtaactctktttctcatttgaagtatgttgggaaacacgagttgatacttctttaaagcgtgtgatacactgtaatagctgcatgttctgtaacttatttcacctggct

SEQ ID NO: 197134 - DNA, 201 bp, Homo sapiens
caaaggctggagttaggagctggggtgcgcagagccctggaagggtttggcaggccaggggagaagggagtaacagtctcgctctgtgcttcaggcttttycttgctggttcaagtgtccgctaaaagcagctaacgtaatcagtacagctcctctattttgggaaatcaaaccccaaatctttaatttgatttacaaagc

SEQ ID NO: 197135 - DNA, 201 bp, Homo sapiens
ggccacagtcaatctccagaggttgttggggtaaatgcacgggatgccaagatgcaaccaggtcagtattgcaagtctgagaaaaggggttctcgttagcrcacttctgctgctgacagtaacgggtgatgctgacatagaagcagcctgggacctggacagcaggcaaggaaggaactgccagccgtcccacggcctctc

SEQ ID NO: 197136 - DNA, 201 bp, Homo sapiens
ggtcacagcaggaagatggtgaatgtcagctaatgagtattcatcaccaatgaatagtaacagttttttttactaaggctatgtaatgtagcctcagaatyccactcagcacagccccctggcagcggtgcctctgagagctggcatgatggagagagcctggttggccttactggtgtggttggggcacttgggagaacg

SEQ ID NO: 197137 - DNA, 201 bp, Homo sapiens
ctagagaaattgctgtgagtttaggtggaacactggtgcttacattatgattgagccccaccaggttctgaagatgtgtcttgtgcctgtggctcacgtcrtggggagcctttcagggacacagtggcatcaccagccaggccctgtgtgttgaaatggttatggtggaactacgtgggctcatgaaacgtgagaggcttc

SEQ ID NO: 197138 - DNA, 201 bp, Homo sapiens
ccttagcgtggcggggggttttctcttgagtcttggatactttgttaccggtcccatcttcctgtgggtgggagtgtctgtcttgcttggcccagcctccyagagaccttagctctcttagtacatgggctctgcctaccttgatccccagctcaccaccctagtgcagttgcttcttcgctcttgttccactccttgtcg

SEQ ID NO: 197139 - DNA, 201 bp, Homo sapiens
ccatgtcactgttggaattttcaagctgggtggaatcttaaggaccagctagagcagctcagccccgaaaatgagaaagtgaagtcctgtgacgtgacggrcttctaaaggtcacgtggcacatccgccaggcccccgagagggcgctgggtctcgctcccacaccactgctctttgtaaagtcctgtggcccctttttgt

SEQ ID NO: 197140 - DNA, 201 bp, Homo sapiens
cagacctcatgctcatcatcaggaggcttcccgggactgctgcctgagatttctaagttcctaatgtggttcatgcttctggtgagtttctttgaggcgaygccccctgcgttgcctctggtcagctcagtcctgtggtcctgcagggcatcctacagtgtcctctgtctgtgacttgtgccgcgccaccttgacctggca

SEQ ID NO: 197141 - DNA, 201 bp, Homo sapiens
cctcaggcacttcaggctcctgaagggtctgcagtctcgtctctgcctgggaaaccacgatttgcagcatattccacagacctcatgctcatcatcaggakgcttcccgggactgctgcctgagatttctaagttcctaatgtggttcatgcttctggtgagtttctttgaggcgacgccccctgcgttgcctctggtcag

SEQ ID NO: 197142 - DNA, 201 bp, Homo sapiens
ccacgctgggggctacgcctgttgtttaagaatggccggaaaatatgttgcctgcattgtgtctccaggacccgtgtgggagggttaacttgggaggggcrgggtcccactagccctagattgcaagggtaaactgcctggtgtccttcatggtgagtcttactccatgacttgatcctagagaaggaccagctaaggact

SEQ ID NO: 197143 - DNA, 201 bp, Homo sapiens
tgatggtgcagacggtcacttccttctctcaacagtcttcctggtcacgagcaccattgtggctcatgtgtgtggggctcttttggcttagctctctgcaygagtttgctccttgagttcccagagctgacccttgaaatgagtgatattactcctgttttgtagacagaaaactgaagccttgacagtctgacgtgacct

SEQ ID NO: 197144 - DNA, 201 bp, Homo sapiens; identical to SEQ ID NO: 34028

SEQ ID NO: 197145 - DNA, 201 bp, Homo sapiens
taaataaataaataaataaaagtttgcaggaaagccgtgtgaatatatgaaaatacagtgattgaaaagtcctgttcacgaggtgtcctgcattggctagyttaggaaaggggtctttcctatgcaggtgggggttgatgacttacccaagagtcacctctggaacccagttatcttaagttgatagcagtctatctttgc

SEQ ID NO: 197146 - DNA, 201 bp, Homo sapiens
cctccaatcttttcgcaggaaaaaaaaaaaaaggcttaatgctcgtgctgtggaagtcagaatggagcaaagtgggttctgtctgtcttgctgctgtgagygtgtgatggaacaacagtgtcatttgctttttctcagaaatatttaatgcatgtttgtgacataatttttcaaagtaattttaagtaaatattttaaagt

SEQ ID NO: 197147 - DNA, 201 bp, Homo sapiens
cttgaagtacctgaatgattgggagagccatggcgaggatcttccaggtcagcccccgtcgtgtgtgatgttccttgggctctgcggatgctcggtgcttycatcggtgtccacacctctttattccgctcctcctttgcttgtctaatcctattttgccagtaagttttttattcttgaggctttgttggccctgtgttg

SEQ ID NO: 197148 - DNA, 201 bp, Homo sapiens
ttcctgtgagtgtccaggatgcatgagagaggttgttgtgagacctgccttaaagggtggcggtggcacgtgtggaccttgctttctgagtttcactctcygagtcccagaggtataagcttgtgaagagaagcgtgtatgtatgatcacactaagcagatacttgctcctgcactgttggaggaggaagaggagttaatt

SEQ ID NO: 197149 - DNA, 201 bp, Homo sapiens
ggcaggtgctttgcctctgagctgtctgtagaatggggtgacggcggtttcatcagactcagtgaagcatgtcatacagtgagtgtctggtcacagcaggmagatggtgaatgtcagctaatgagtattcatcaccaatgaatagtaacagttttttttactaaggctatgtaatgtagcctcagaatcccactcagcaca

SEQ ID NO: 197150 - DNA, 201 bp, Homo sapiens
tggcatgcgtgcccttgtggctcctctcaagtccagctgtgtgcatggaggaaacaggtcacgttaagtctctatattcttgaagtacctgaatgattggragagccatggcgaggatcttccaggtcagcccccgtcgtgtgtgatgttccttgggctctgcggatgctcggtgctttcatcggtgtccacacctcttta

SEQ ID NO: 197151 - DNA, 201 bp, Homo sapiens
aaatgcagtgtgtattcctcatgggaggatgagcctgctgtggagcattggctgaacccagttgggtctttgcctggtagcccatgtggcaaccctcactrtttgtccttttctggggaggagttttctgcccttggacactttgcctggtggcttggccttgtgagactgccagtctgccttctgcttcaagtaggatga

SEQ ID NO: 197152 - DNA, 201 bp, Homo sapiens
gagaaaggccaccaaaaagtctttcggttgtggcttagctaaggaaataactgagttttaaaggctcacctgggctggccaatagtaaaggaccttgttgstgagaagctgcttggggttgtgatatagtcccaggacatgcacttctgaaaatgcagtgtgtattcctcatgggaggatgagcctgctgtggagcattgg

SEQ ID NO: 197153 - DNA, 201 bp, Homo sapiens
catcctgggcttcctttctgatccctggctcctgtgatcttccgtgctgggctccctcttcccttcccttttccactgtgttgccctcacacagctggcaygccatggatgtcgctcacccaagcccttcctaatgttgctcaccaaaacccctcccaccttgcccctgggaccttctccccttccaggctgcatgcaggc

SEQ ID NO: 197154 - DNA, 201 bp, Homo sapiens
caacaactaattgaatgtaatttttaaaattaaattaggcaaaacctaatgttgggtttgttagtcacattagcagcgttcccggctcagcagagcccgtractgatgctgccggggcggctccacgccgcagttctcaggagttattaaccaaggctttttccctccacagacagcaggatcaagatcaaagagcgaata

SEQ ID NO: 197155 - DNA, 201 bp, Homo sapiens
gcatcctgggcttcctttctgatccctggctcctgtgatcttccgtgctgggctccctcttcccttcccttttccactgtgttgccctcacacagctggcrtgccatggatgtcgctcacccaagcccttcctaatgttgctcaccaaaacccctcccaccttgcccctgggaccttctccccttccaggctgcatgcagg

SEQ ID NO: 197156 - DNA, 201 bp, Homo sapiens
agaccttagctctcttagtacatgggctctgcctaccttgatccccagctcaccaccctagtgcagttgcttcttcgctcttgttccactccttgtcgccrtccaccctgtgctttctcgatgtgtccttactcggtgtttctgtggagcagggcatcctgggcttcctttctgatccctggctcctgtgatcttccgtgc

SEQ ID NO: 197157 - DNA, 201 bp, Homo sapiens
gagtttctttgaggcgacgccccctgcgttgcctctggtcagctcagtcctgtggtcctgcagggcatcctacagtgtcctctgtctgtgacttgtgccgygccaccttgacctggcatccactgtcctctaccgcgtttgcagataggagccactgttggtgcctttttgtcgtgtgtgttgaatggtcagggtcccaaa

SEQ ID NO: 197158 - DNA, 201 bp, Homo sapiens
gaagagaggtggtgaaacggatcgaaactgtggtgaaagacctttggccgacggctgatgtgagtatgttctttggagttctgtgtcgcacgtcacgtgcragtaaatttaaataccctgtgatgatgatgtgtcggctagatccacacagaccttttctcgttggcccgaggcagcagttctccaagtgtgctttgagaa

SEQ ID NO: 197159 - DNA, 201 bp, Homo sapiens
gccttggggcctgtgctggagctggttcccagcctcagaagtgtgcctaactgtgccacattcattggaaagctgctttcacacttcctggatggaattckctcattttttcaatataaagtcactgagatgatttttttggagaagtctttaaaggccagttatacatttattgatacttggtattgacaaagttcagtt

SEQ ID NO: 197160 - DNA, 201 bp, Homo sapiens
cacagacctcatgctcatcatcaggaggcttcccgggactgctgcctgagatttctaagttcctaatgtggttcatgcttctggtgagtttctttgaggcracgccccctgcgttgcctctggtcagctcagtcctgtggtcctgcagggcatcctacagtgtcctctgtctgtgacttgtgccgcgccaccttgacctgg

SEQ ID NO: 197161 - DNA, 201 bp, Homo sapiens
aatgtaatttttaaaattaaattaggcaaaacctaatgttgggtttgttagtcacattagcagcgttcccggctcagcagagcccgtgactgatgctgccrgggcggctccacgccgcagttctcaggagttattaaccaaggctttttccctccacagacagcaggatcaagatcaaagagcgaatagccacatgcaatg

SEQ ID NO: 197162 - DNA, 201 bp, Homo sapiens
atctgacctcaggcacttcaggctcctgaagggtctgcagtctcgtctctgcctgggaaaccacgatttgcagcatattccacagacctcatgctcatcaycaggaggcttcccgggactgctgcctgagatttctaagttcctaatgtggttcatgcttctggtgagtttctttgaggcgacgccccctgcgttgcctct

SEQ ID NO: 197163 - DNA, 201 bp, Homo sapiens
ttgggaagagactgaccagctatctctagggttctcccccaatctgaagacttaagtgggtagactctgcattctcatgggacagagtgtgggatacagckaactgatcctccaggatttctacgctgtttttattgtattcccagtgattttcccatagtttagaaatattgaaatgtcctcatctgagatgattatagg

SEQ ID NO: 197164 - DNA, 201 bp, Homo sapiens
aatctcctgtccctataatctctatgaaggtgagaactttttctggacctcaggatttaagtgtccaacctagctgatctcccacctccccaacccccccyccacacacacacacaaggctcctccgcaggggactcgggtgggagatctgcaggtgggtgccgtggggagggacagctgcctgcttgtaaatccgccccc

SEQ ID NO: 197165 - DNA, 201 bp, Homo sapiens
cttgtagttgagggttcttggcccctgctagctgcacttcttaattagaggaacttgaacagtttctggaggttggaaagaaaaaacaaggagatgacttrcggcgctcagagccagtaacatgctggcagccagcaggcctgaaaggggcagcagggagggccgtgtctgccttctctgggcttcaatggtgggtgacac

SEQ ID NO: 197166 - DNA, 201 bp, Homo sapiens
attgcctcagggagagaatgcttggctgtgaattgatgcccttttggtaaggccgtcccctcctgcgtgtctcaggaactggggcagagatttctctgcarcactgtggaatgagcaagttcagattcagccagtgctgtgtgggggtttgtaaagacagcacccccctcccctaaaaggctgccagccccaggctgccct

SEQ ID NO: 197167 - DNA, 201 bp, Homo sapiens
gggctggtacaccacggtctatgcctgcatgtggatcttccagcatggagcacccgtgcttaggaggttaacaaccaggagtacgtgcatggcattggagkggggcatgctatagccggagaaggttgggaagtcctggcttaggagacgttattgaaaaattcccagagccagcagggtgctgatatttcttgccaatgc

SEQ ID NO: 197168 - DNA, 201 bp, Homo sapiens
gatgactgagcatgtgtgtgcatgtgaagtccttgtggcagtgactggcgcagctttccctatattctatcataagataaacagtgaagatttcaagtgaygcttgtaaaaatcaccgattgaattattttctttagctattatgattcttaatcaaaaagccgagattgtattgcaatgcccttatacaaataaaagaat

SEQ ID NO: 197169 - DNA, 201 bp, Homo sapiens
gttgagtctgatgaaaggttcatgtgatagaatgcaagcatggggggtaggggatctcagttttatttttcaaacaggatttatacaaatgaagtggaagrattctttgcagaaatgccttggttatttgcttcttgaatcattgctaatcagaattctttggaacagtctgttattgtttttcattcttcgcaatgaaga

SEQ ID NO: 197170 - DNA, 201 bp, Homo sapiens
gctgcctctcctggaaaggtggaaattttgctcttgggaactcactctagagaggcggcggtgtggtttgggcattcccttaagagacaagaccagacccmccccccccacggcaatgcctgttttcccctcagagcacccccttccttccccgaaccccttaggaccaccacctctggggtagacgttccaggtcttggt

SEQ ID NO: 197171 - DNA, 201 bp, Homo sapiens
ttcctcctctgaactgcggaggaggaagctcggcattgtttagaaaaagttcatttctgtgcttatcctgccagtttacataattacaactgtattgcccyttctctttgctaaatgtccaacactttgtttgtgccaaatagatgtttgccacaagatctgtttccctgagcagactccccatcctcttcattttgcccc

SEQ ID NO: 197172 - DNA, 201 bp, Homo sapiens
ccatatgccaagcggcaatatagcaatgggcaatatataaaatacacgggtccttgtaagtatattttcttttctctgtatttaaaattgagattctaacrtacagtttgcaagtgagagatttctttattgaaagtaattatcaactttttcatttcttactttgataaaatcctaactgaacccattgccctccaccta

SEQ ID NO: 197173 - DNA, 201 bp, Homo sapiens
actgctgtggtttctttcaatcctaattataggaagtgctgaattgcagttcaaagttagtgaaaatggagacatttttcccatccaaatatatatacccsgaggagtgcatgggccccaggttaagaactcgaggtagtgtgtggctctaggtggtgatggctgtcttgcgaaagatcctaaaccttattctgcagctca

SEQ ID NO: 197174 - DNA, 201 bp, Homo sapiens
caagtatctttttgttaatatttaggaaatatccatggatctgacaatagacagtggcctgggtatatagtggggacatgggcacagtgggatcctggggwcagcagggtcttcagaaattccaagtgatgttcttagaggaaacactctacttaagggtgattgagactcgacattaacatggggcattagtcactcagt

SEQ ID NO: 197175 - DNA, 201 bp, Homo sapiens
atgctccgagacttcagaactgggtcttggtcaggactcgaccagaaaagacaatctcaacctaggactcaagacccagatgtgggaggaggcgtatgaaraaagcagccaatgggctaccctgagagtcagggacctggtatcaagaaaggagggggatctgccggcagctgcagggccaccattgagggtaagggcaag

SEQ ID NO: 197176 - DNA, 201 bp, Homo sapiens
aattaactaaggcgtcaagcacagttggagtgaacgataaacggaaggcagcattttccataagtaaaagctttcagagtgtgcatctctaaatcatccayttcttcgctactgactcttttcctttcttttgatgttgttattttcttgacataattacagcaaagattggtacattgcacccaatcttaattgtatctc

SEQ ID NO: 197177 - DNA, 201 bp, Homo sapiens
aaagggaaaggcattttagagattctgaaaataactcaagaaagaagtgctttttgaacataattgttacattggtaaaatcactcagattgaaggaatgkctaccttaaaataatttctctaaaataaatactaattcttcatcacagtatttggcaggcattctcgaggtgtttgactgagttctttgatgaaggagct

SEQ ID NO: 197178 - DNA, 201 bp, Homo sapiens
ggacctgggaggcggaggttgcagtgagccaagatcgtgccactgcactccagcctgggtgacagagtgagactctgtctaaaataagaaaaaaaaaaaaatgaggagcccacagatgtgatgcacggcaggtgtgtttggagtgaaggatcgtgttccctgcatgtcagcagggcgcagccagccttcttcctgaggaca

SEQ ID NO: 197179 - DNA, 201 bp, Homo sapiens
aaaaaccctgtctccaaataaggtcaccctctgaggtgctgtgggttaggggttcaccatgtaccttggtgaagggaggagaaacaattcagcccataacrcaaccaaacaggcatttcttaaccagttgctcatcttgtttctgcaactgctgtgctagtttgaaaagcagtagatgaagccacacggagggaggcactg

SEQ ID NO: 197180 - DNA, 201 bp, Homo sapiens
  misc_feature (1)...(201): n = A,T,C or G
cttagaatcaacttcctctcttgattacattcttaagactcttttacgataatagaacacggcattttccacggagatcccgaatttgctttgtctacacnaagctatcttatgccgtatctttgtcccctatttccttgcaaacataaagtgtgtgctgggtttcatttacatcacctgtataacaccagccagtctgga

SEQ ID NO: 197181 - DNA, 201 bp, Homo sapiens
gcacctggctgctgtgtgttgtaggagctgctggtggggaggcctggtccccattcacatcccagtacgtgcccacagttgtgctgtagcaccagtgcccygaattggaagtgcagagggtctgttcagagagaaattctgttcgcgaaggttcctgaacagcaggcgatggttggtaattatgcgcctgccagtacataa

SEQ ID NO: 197182 - DNA, 201 bp, Homo sapiens
atctcctgtccctataatctctatgaaggtgagaactttttctggacctcaggatttaagtgtccaacctagctgatctcccacctccccaaccccccccmcacacacacacacaaggctcctccgcaggggactcgggtgggagatctgcaggtgggtgccgtggggagggacagctgcctgcttgtaaatccgccccct

SEQ ID NO: 197183 - DNA, 201 bp, Homo sapiens
ctcctgtccctataatctctatgaaggtgagaactttttctggacctcaggatttaagtgtccaacctagctgatctcccacctccccaaccccccccccmcacacacacacaaggctcctccgcaggggactcgggtgggagatctgcaggtgggtgccgtggggagggacagctgcctgcttgtaaatccgccccctgc

SEQ ID NO: 197184 - DNA, 201 bp, Homo sapiens
aaaggcagagacctggcatcactttgtcttgtttgacccagcacctaacacattgaatgaatgcataaatgaatgaatgagaagcattagacaattaaggragatgcagacgtgccaggctgaaattcaattacatgggggccgaactggggagttaagtttggggccacttgtcatcttattagctgtgttgaaatgttt

SEQ ID NO: 197185 - DNA, 201 bp, Homo sapiens
attctagagcttgcaaacatattttaagtgtataatacagtgatcctaaagaaaggctggggaaagaatttgagtttggaggatagcagtgaaaagagggycacatgaacaggtgaagaggaggctggcatgtccttggtgcagggccttgggtaaggaaggtgctaagtaaggaacagggtggtggcctcacttttctgc

SEQ ID NO: 197186 - DNA, 201 bp, Homo sapiens
gtataatacagtgatcctaaagaaaggctggggaaagaatttgagtttggaggatagcagtgaaaagagggccacatgaacaggtgaagaggaggctggcrtgtccttggtgcagggccttgggtaaggaaggtgctaagtaaggaacagggtggtggcctcacttttctgcgtggtgcagactgcaaacgcccttgattt

SEQ ID NO: 197187 - DNA, 201 bp, Homo sapiens
caagacccaatctcaggatccagtggttctcaacctcggtttccactccccagtgcctgggggtggagggcgctttgcacctcgtttcaacagggactctkgggggggctctgggatgcttcgggtgcccctctccgcccccagcaattcagacacagctgctctgtgtcctggaaaggaaagagccctccgggatgaccc

SEQ ID NO: 197188 - DNA, 201 bp, Homo sapiens
gtggcttcacaagtatctttttgttaatatttaggaaatatccatggatctgacaatagacagtggcctgggtatatagtggggacatgggcacagtgggrtcctggggacagcagggtcttcagaaattccaagtgatgttcttagaggaaacactctacttaagggtgattgagactcgacattaacatggggcattag

SEQ ID NO: 197189 - DNA, 201 bp, Homo sapiens
aagcgtttccactttctcctctcagtgtatttgctcccttccttcccccgacaccagcctgtctccctctgctgcccaggggccccaggcgacctccctcscctcacactccccttgcaccctctatcctcccttcctgcccctccctcttccttccctctgcccctgccaccctcccagggccctgagcagtgcggggag

SEQ ID NO: 197190 - DNA, 201 bp, Homo sapiens
tccccttgcaccctctatcctcccttcctgcccctccctcttccttccctctgcccctgccaccctcccagggccctgagcagtgcggggaggcatggagrggctgaggcctccccactgactcggcagccacggcgatgcagcgcccagcgtcttcacggtggaactagccacttcttcccctccctgtttcctcttcca

SEQ ID NO: 197191 - DNA, 201 bp, Homo sapiens
agatcatgaaccatcagagaaagacgaagggtgtggagtgcaccttaactgcagtgtcaggaaagtggacatttttagccacaaagccagggccgtcaaarggctttctggtgatgctgactgccaaaggcatgtcactccggccctacatacatcatgtgaattatctttctctaaacactgaatttattggtcagagtg

SEQ ID NO: 197192 - DNA, 201 bp, Homo sapiens
tggccatccttaaaaaccctgcccagatgccccaacttctctgcaaacagctcctcaaccactccttcaataaaagcgatgacttcctcctctgaactgcrgaggaggaagctcggcattgtttagaaaaagttcatttctgtgcttatcctgccagtttacataattacaactgtattgccctttctctttgctaaatgt

SEQ ID NO: 197193 - DNA, 201 bp, Homo sapiens
gggtctctgccctgcgggccccaccgccccagcctctccacccgcgccccccagactgtgttccttcccatccccctttgttcctgcagcatcgacacatycctcctcacaaactttaggttttgcaggtttatctgtttttcttagctgtcccagaattttttctttcttcctttttcagatcactgtatcgcctttatc

SEQ ID NO: 197194 - DNA, 201 bp, Homo sapiens
ctggccagaactggccacatggccccatctgactgcaagggaggcagaaatgtaaggacccacatggctatttgtggagcattaacgctctctaacaaatycagttcctcaaaaatagctgagcctttaggattttctatgtaggcaattctagcatctacaaataatgaggtcaacagaaagtcacatcccagtgacgca

SEQ ID NO: 197195 - DNA, 201 bp, Homo sapiens
aagttgatgctttttcttaatcaccattttcatcattttaaatgttttaccaaatttagatggaagatgctttctgaaagccttcaattctacttcttagragaattttactcagttaacttatagttacttccggaaatgattattagttgttaattttattgatcaaattgtttgaaacaagcacctaccagagtgctt

SEQ ID NO: 197196 - DNA, 201 bp, Homo sapiens
cctcaaaaatagctgagcctttaggattttctatgtaggcaattctagcatctacaaataatgaggtcaacagaaagtcacatcccagtgacgcagaaaamctcagtaccgtaagagccaggcaaacaaagccagcacaaaacttatttttgctgcttcaaatatggagattgaagaagcttgattttttgttacctttga

SEQ ID NO: 197197 - DNA, 201 bp, Homo sapiens
ttagacttcagccttgaagccaaagctctgccaggtgctggaagggaactggccctccagcctgcagctggagaggaccccgcccacaagagacaagcccygcccctgtggagcaagctggagaaccagctagagcaatgatgtgctgggcagaaacgcacaggctctccagggcctggcccctgctgataggtgctggat

SEQ ID NO: 197198 - DNA, 201 bp, Homo sapiens
ggatacaccagaccagtcacaaggcgcatcagagaacagttatgttccatcatgtgcactttacgtgcattcttgttttactcagaagtagacaaattcaytaaaatatcctcaattatcaccaccggtctgccacaagacttgagaagagggtagaatggccttcttcatgattcctgcagaggctgacagacttgtgcg

SEQ ID NO: 197199 - DNA, 201 bp, Homo sapiens
gggacaggggcaggaagtaggaccctctacacacccccatgcctacaccagcgcccacactctcagggccagtgatcaccatgacactgtctcaaacagcmcaccttgtgtgcttctccatcctgacctccacgtgccccccaggcctcactgggcctcacaaactgacctttggcctggccgtgacctcctcccagtcac

SEQ ID NO: 197200 - DNA, 201 bp, Homo sapiens
gatactggctgtttttctgcacccgtgaacacacacacatgcacacacacgtgtgcacacacacacttccacaggcatacatgattttttcagcagtgggmccatgctgttcaggatagtctgaggtgtgcacatcttttctcataaggtccctggacatattcctggtcaactaagtcttcaaaaggctgctgagccccc

SEQ ID NO: 197201 - DNA, 201 bp, Homo sapiens
acaccagcgcccacactctcagggccagtgatcaccatgacactgtctcaaacagcccaccttgtgtgcttctccatcctgacctccacgtgccccccagrcctcactgggcctcacaaactgacctttggcctggccgtgacctcctcccagtcaccctgccaccattgcagaccaagtcgccattttagtcatgccaaa

SEQ ID NO: 197202 - DNA, 201 bp, Homo sapiens
catggagacagcagctgctggcctggtggaagtgtccagcaggacgcgggtgtgtggaactggcatttgggtggcagggagaggctgcaggcgggaatttsaagagttcccccatgtggcacgtgtaagccaaagaccaagtgggctgttgaccaaatctgggtggttctttggaaacaaattgcatatgcaaggctgttc

SEQ ID NO: 197203 - DNA, 201 bp, Homo sapiens
tgtctcaggaactggggcagagatttctctgcagcactgtggaatgagcaagttcagattcagccagtgctgtgtgggggtttgtaaagacagcacccccmtcccctaaaaggctgccagccccaggctgccctatctgtttggtgccagagctgaattgttctgcatctgggcagtgaggctgcccccaccctgctggtg

SEQ ID NO: 197204 - DNA, 201 bp, Homo sapiens; identical to SEQ ID NO: 34037

SEQ ID NO: 197205 - DNA, 201 bp, Homo sapiens; identical to SEQ ID NO: 34038

SEQ ID NO: 197206 - DNA, 201 bp, Homo sapiens; identical to SEQ ID NO: 34039

SEQ ID NO: 197207 - DNA, 201 bp, Homo sapiens
ggatctcagttttatttttcaaacaggatttatacaaatgaagtggaagaattctttgcagaaatgccttggttatttgcttcttgaatcattgctaatcmgaattctttggaacagtctgttattgtttttcattcttcgcaatgaagatgacattggggatcaggggaagaggaatgtgtattcccttctgggatcaca

SEQ ID NO: 197208 - DNA, 201 bp, Homo sapiens
aggatagtctgaggtgtgcacatcttttctcataaggtccctggacatattcctggtcaactaagtcttcaaaaggctgctgagcccccaagggtgcaggstgatgtggacgtctgagccagccctgtcgggtgacagttaggaggcctccagttcttccctccctaaacaacccacggggactgtcctgtgtatcatgtt

SEQ ID NO: 197209 - DNA, 201 bp, Homo sapiens
aaggttaccccaggttacagtcccgtcagcagcaggaggctggaaacctcccaggcctctccaaccctgatgatttcactacttcccgatctcactggcawagcatatctcatcttttttggcttacatattttctattttattcaggtgtagcatctttcatacagttgggtttttgtattttggtagggatggatttag

SEQ ID NO: 197210 - DNA, 201 bp, Homo sapiens
attttgcccttggtccatttttcgtttgattgttatttatcttattatctttaggaattttttgtcaagtggattcccagccctcagcattggttatctcytgcagcatagcccattatcctaaaactcagtgtcttgaagacaccaacatgtcttctctcctagtttctgtagttgaggaatctgagtgctgcatgcctg

SEQ ID NO: 197211 - DNA, 201 bp, Homo sapiens
ggcagggcccgggggaagtgtgagcatggggggtggggtgggtggtgctggaggaggcagggtcattgtaaagggagcattagacttcagccttgaagccraagctctgccaggtgctggaagggaactggccctccagcctgcagctggagaggaccccgcccacaagagacaagccccgcccctgtggagcaagctgga

SEQ ID NO: 197212 - DNA, 201 bp, Homo sapiens
atgtagagtcttattattgctgtgctttattgcaaaaacagactatttgagaaagtaacctatcttttatagagtttgtgcccagatcatattttcacackgaaattttacctgaaaatatatctgaagacttccagtggttccaaaatctcatttactttattttttgacattgctgaatttccttctgcattgtgaaac

SEQ ID NO: 197213 - DNA, 201 bp, Homo sapiens
tgcattctggtcctggccaaaatgacaaacacagactgcccccatcatctcgggacagagactcaccagggaggtcacccaccctgttcaccacgtcaggsaggtagcgtgtgccgaggcccccacatgtgctgcaaagaccagaatgtacgtagtaaaggtagactcagggccctgatcatctcggggcttacataaacc

SEQ ID NO: 197214 - DNA, 201 bp, Homo sapiens
ggaacagggtggtggcctcacttttctgcgtggtgcagactgcaaacgcccttgattttttgatcaccaccccctccccacattctgtgagcagcaggacygggagcgagaccgtggtccgaagttctcccgaaacccaggtaggctttgtatttgtgctgttattattattattattattattattattattattattat

SEQ ID NO: 197215 - DNA, 201 bp, Homo sapiens
tcccatagtttagaaatattgaaatgtcctcatctgagatgattataggcagaaagcatcctcctatccccagtgtttttcagcacccaccccccccccccgccggcatatcattctaggaaggaatattatcctttatgtggaaatggagcctgcaatgatatctaaatcagttcctgggcctgggtggtgttgccataa

SEQ ID NO: 197216 - DNA, 201 bp, Homo sapiens
ggccctgatcatctcggggcttacataaaccatgtggcaaatgacaggatggctggccaggagctccctgttgagatgacattgagagagacacaggtaaktggtggccaaggagcatccagtgccagggggcacagccaggcgggtcacttttttcgtttgtgtttgtttgtttgtttgagtgaatggtcagtatcttgt

SEQ ID NO: 197217 - DNA, 201 bp, Homo sapiens
attatttttgccttacggatcaatatgtatgtattagggtgattacttagtgtcagattgggtgcccatattgcttcccgtaagatgtctgtcaggaattkgatataactataccaagtaaagatcaattgctgctaggattaatttgtgctggagtccctcatgattagtgacatatgctactcaactctgcttctcagc

SEQ ID NO: 197218 - DNA, 201 bp, Homo sapiens
ttatctcatatcattacatttttagcaaaaagttcctttttctgcgcttgcttcctccaagaaagtaccatctgtttcaaaacagttcagtaattgctagwactttctttaaaatgtagaggcaagtgctgcttctgttttgtaagcgcccatgaactgtgcctttggtgctgccagagctggaggattttgtatagtatt

SEQ ID NO: 197219 - DNA, 201 bp, Homo sapiens
gcgtctctctctgcaggcctggccccgggtcacttggcatggtggcccaccacctccatcccatctcgccttgcacgccaggtgctcattatccccatgcwggaggtgagggcgggtagtgacatgggtgcagcggctaggtgcagggagggtgacctgctcacgggcctatggctagagagcagagagggggcacgctcc

SEQ ID NO: 197220 - DNA, 201 bp, Homo sapiens
agtccactctagagcacggcttctccacagggctattcagccccctagggagtgcttggcaataggcagagacatttttggttgccaccactcgggagagsggtactaatggcattcagagaatggaggccaggaggctgctgaacagcctcagtgcacacggctgggaacgacccagggaggctgctcaacactctgcgg

SEQ ID NO: 197221 - DNA, 201 bp, Homo sapiens
tcccttaagagacaagaccagacccaccccccccacggcaatgcctgttttcccctcagagcacccccttccttccccgaaccccttaggaccaccacctytggggtagacgttccaggtcttggtctctttcagacctgcttctttttcttcatccccttacctcactgccccaagcagttaaatcctttatcagggcta

SEQ ID NO: 197222 - DNA, 201 bp, Homo sapiens
tatgttgcccagctggtctcaaattcctgggctcaagcagtcctcccacctcggcctcccagagtattgggattacaggtgtgagccacctcacccagccrtacaacacacaaaatgtttaaaggccctgtattaggttgctggggctgccataacagaggacctggaagtccaagatcaaggtgtcagcagggctcattt

SEQ ID NO: 197223 - DNA, 201 bp, Homo sapiens
acaagtatctttttgttaatatttaggaaatatccatggatctgacaatagacagtggcctgggtatatagtggggacatgggcacagtgggatcctgggracagcagggtcttcagaaattccaagtgatgttcttagaggaaacactctacttaagggtgattgagactcgacattaacatggggcattagtcactcag

SEQ ID NO: 197224 - DNA, 201 bp, Homo sapiens
gggaggctgaagcaggagaatcacttggacctgggaggcggaggttgcagtgagccaagatcgtgccactgcactccagcctgggtgacagagtgagactytgtctaaaataagaaaaaaaaaaaaatgaggagcccacagatgtgatgcacggcaggtgtgtttggagtgaaggatcgtgttccctgcatgtcagcaggg

SEQ ID NO: 197225 - DNA, 201 bp, Homo sapiens
ttccacgtcttgataggctcaaacacgcctttaaaaatgagagccctggccaggtgcggtggctcatgcctgtaatcccagcactttgggaggccgaggcrggtggatcactcaaggtcaggagttcaagactcacctggccaacatggtgaaaccccgtctctactgaaaatacaaaaaaaattaacagggcgtggtggt

SEQ ID NO: 197226 - DNA, 201 bp, Homo sapiens
tctaactgtggcatgcgggggccttcagactcatagtgataaccccacaggcttcgtcgttcattcctcagtaaataagcttgagcacctgagaggggcartgagcactttagtactggaataatgcgtggtggggcatcacctggaggttccatcctcacacgtggtgagaaggggctttgagcacagtctccagaaccc

SEQ ID NO: 197227 - DNA, 201 bp, Homo sapiens
atcacctggaggttccatcctcacacgtggtgagaaggggctttgagcacagtctccagaacccaactggagtcccaccaggtcacatcccacctccagtrcctgacagctgcatggcattgtgcaatttacatctgtgcttccgtttctccgtcttgaggagaggctggagcagtctttccccgatgatgactgagcatg

SEQ ID NO: 197228 - DNA, 201 bp, Homo sapiens
gtggtgagaaggggctttgagcacagtctccagaacccaactggagtcccaccaggtcacatcccacctccagtgcctgacagctgcatggcattgtgcartttacatctgtgcttccgtttctccgtcttgaggagaggctggagcagtctttccccgatgatgactgagcatgtgtgtgcatgtgaagtccttgtggca

SEQ ID NO: 197229 - DNA, 201 bp, Homo sapiens
catcacctggaggttccatcctcacacgtggtgagaaggggctttgagcacagtctccagaacccaactggagtcccaccaggtcacatcccacctccagygcctgacagctgcatggcattgtgcaatttacatctgtgcttccgtttctccgtcttgaggagaggctggagcagtctttccccgatgatgactgagcat

SEQ ID NO: 197230 - DNA, 201 bp, Homo sapiens
tcccagagccagcagggtgctgatatttcttgccaatgctcagacatcacagggctccaactccagtgccgggatgaggcttgggttggtgaggcactgcctcttcctgcctctacttccacagagaagttacttgctccttcattcttcatcaatcatttgaaaaatcccaagtgcatctccctcctgggtgagaattag

SEQ ID NO: 197231 - DNA, 201 bp, Homo sapiens
gagacagagtttcactctttttgcccaggctggagtgcaatggcgtgatctcagctcactgcatcctctgcctcccgggttcaagtgattctcctgtcttstaagggcttttttaaaaacacaaacacaaatattgagaattacgtaattaagtagaattgggaaacaggcctagcaaacaaggtcagttgtaaaccaaga

SEQ ID NO: 197232 - DNA, 201 bp, Homo sapiens; identical to SEQ ID NO: 34040

SEQ ID NO: 197233 - DNA, 201 bp, Homo sapiens
gtggcgcgatctcggctcactgcaagctccgcctcccgggttcacgccgttctcctgcctcagcctcccgagtagctgggactacaggcgcccgccaccaygcctggctaattttttgtatttttagtagagacggggtttcaccatgttagccaagatgatgtcgatctcctgacctcatgatccacccgcctcggcctc

SEQ ID NO: 197234 - DNA, 201 bp, Homo sapiens
ttctagagaaattgtaaaacaattttaagagttttgtgtgtaacataaaaatatctgcttaacagttttgtgtacaataaaaagcttaggtttatcacatsatatgataaattcagtcatttcgtgaggcttttaagagactctctggcctgtgttaccaaaatctcttgcatgttgctgtctgaattctggttgtcttaa

SEQ ID NO: 197235 - DNA, 201 bp, Homo sapiens
tagttaccaaattatttcctcagttagaggtaatatgctttgggaaagcaatcaaaatacctgattaggtattcaaggagaactgggacagctaccaaacygataattactttaaaagggagagtcgttatattctagttatgttctgatacttctcgggatttcttttttaggatgcattttcataagctgcagagttag

SEQ ID NO: 197236 - DNA, 201 bp, Homo sapiens; identical to SEQ ID NO: 34036

SEQ ID NO: 197237 - DNA, 201 bp, Homo sapiens
ctgtaaacctagacaaagtagcatcagcattggggaatgctggccatgaagagtgccagagtttactggcttccactccaggcttggagcgtgggacgatsgcgtgactggccagggaccttgttctgtcagttgtgtgtgcagcagcagggtccccaaaagctgcttgatggtgcactgactcagagccctgctttcact

SEQ ID NO: 197238 - DNA, 201 bp, Homo sapiens
ccttcctttcttcccttcatgctagactggtgcaggctgtctgcagattccctaaccactccccttccccacccctcagtggcttgggcttcctctcaacrtggtgtctggctgtctgcagattccctaaccactccccttccccacccctcagtactcaacaacatagcaggagctacatacccacagttgtccttagaa

SEQ ID NO: 197239 - DNA, 201 bp, Homo sapiens
tggccagggaccttgttctgtcagttgtgtgtgcagcagcagggtccccaaaagctgcttgatggtgcactgactcagagccctgctttcactgtggctcrcctcctgagtgtcccctttttagttaattaggcatcgccaggggcagggaaccaaatggcaattgagtgacaattcctcactcctctcctggcccctcag

SEQ ID NO: 197240 - DNA, 201 bp, Homo sapiens
ctgtgtggctggtccatgtagccatgtggcccctcgtgccccaccacccaatgcactgtcctctatgccctcagatctggtgggatgttctagtcatctaytttgtgaagccacttctctggtcgcctgtatgtgtttggcttgggcgtgagtcaacaggtctctggggcaaacagtgcattctgaaagtgtaaccgaaag

SEQ ID NO: 197241 - DNA, 201 bp, Homo sapiens
ctcagtgttttttggaatacggtttcattgctgataaatggaaaggccaggcatgcccccacactgaccaagaagttgtagtaatggcagaaatgtttccrgtaatgtctacactttcctactcagtaagtcggcaagctaagctaaggtttaattgttcagttattttctcattgttacacacatcattcattcattcac

SEQ ID NO: 197242 - DNA, 201 bp, Homo sapiens
cagcgagcagggagggctggtctgcatactccaagtcctggtttcctggaggaagtcgcccagcctgtgtggctgcctccagccctttccctgaggattckgggcccctcctcaggccctggccctgaggctgcctgtctttggtcttgcccctcatggcaccctcaggccacacgcatgctcttctgcggtgcctctgcc

SEQ ID NO: 197243 - DNA, 201 bp, Homo sapiens
ccctggcctgctaatcccacaaggctgggaggaaaccagctgagtgggaggaccaaggacaccggactgggagagcagatttgggaccaatcaggtggcaraggattgtgagatgagggcaggtgtgtctgcagaagccagaagaagctgcccgaccttgccccttacctggccaacacggctgggcatggtcagggagcc

SEQ ID NO: 197244 - DNA, 201 bp, Homo sapiens
tgctgtgctagtttgaaaagcagtagatgaagccacacggagggaggcactggatggagaatgttgcccgcagctttgagcagagagatggctgcacaccyggagggaagctagaacagcctagagcaaaaatagtgactggcaggggtgggtaacgccatctgattcgtccagggagacgtggatttttggtagcgtgct

SEQ ID NO: 197245 - DNA, 201 bp, Homo sapiens
gagggctggtctgcatactccaagtcctggtttcctggaggaagtcgcccagcctgtgtggctgcctccagccctttccctgaggattctgggcccctcckcaggccctggccctgaggctgcctgtctttggtcttgcccctcatggcaccctcaggccacacgcatgctcttctgcggtgcctctgccttcagtctcgg

SEQ ID NO: 197246 - DNA, 201 bp, Homo sapiens
cagatttgggaccaatcaggtggcaaaggattgtgagatgagggcaggtgtgtctgcagaagccagaagaagctgcccgaccttgccccttacctggccarcacggctgggcatggtcagggagccacactcaccgagcctcttctattcctattcttcagtgctaggctctcctctcccgctctcttcctctccagccct

SEQ ID NO: 197247 - DNA, 201 bp, Homo sapiens
gcctccagccctttccctgaggattctgggcccctcctcaggccctggccctgaggctgcctgtctttggtcttgcccctcatggcaccctcaggccacaygcatgctcttctgcggtgcctctgccttcagtctcgggagtccttgattcgaacccagctcttctatagcccttggcaagtcagttaatggaagcccagt

SEQ ID NO: 197248 - DNA, 201 bp, Homo sapiens
atttgggaccaatcaggtggcaaaggattgtgagatgagggcaggtgtgtctgcagaagccagaagaagctgcccgaccttgccccttacctggccaacasggctgggcatggtcagggagccacactcaccgagcctcttctattcctattcttcagtgctaggctctcctctcccgctctcttcctctccagccctgtg

SEQ ID NO: 197249 - DNA, 201 bp, Homo sapiens
cctgaggattctgggcccctcctcaggccctggccctgaggctgcctgtctttggtcttgcccctcatggcaccctcaggccacacgcatgctcttctgcrgtgcctctgccttcagtctcgggagtccttgattcgaacccagctcttctatagcccttggcaagtcagttaatggaagcccagtttcctactcgttgca

SEQ ID NO: 197250 - DNA, 201 bp, Homo sapiens
attttgccccttcttgcgatgcaagaagtgcttactgtgggtcagctgctgtgcagaatgcttaatgtgaatgatttgattaaatccttgtagcagcctawgaagtaggtgctgttgttattcccattttacagaggaagaaactgaggcttgctgaggttgaatcatgcacagagctgagctgccaccaggcaaccagtc

SEQ ID NO: 197251 - DNA, 201 bp, Homo sapiens
aacagttctcctgagccttctcacctattgcatcagatggcagctttacgcaaagaaaccccaaagtacttgagagcagggtgagtgcgtgatggtgttawctgctcgaattatatgctgtcgactgcggttgagttctctggtgttttcctgaatcaatattaagcattacttaagaaaattacattgctgtgtgggcat

SEQ ID NO: 197252 - DNA, 201 bp, Homo sapiens
tgcacatgctcacatatgcacacacacacccccaggctcacaataagggctatattcaccttctctggatccttctgtttcctgtctcatccgactagatscagctgaagtcccctgcttgtcagtggcttcagtgtcattgatctgatttgggaatgtgtttcttagaagagtctgatctgttgtagagtctcatttgtc

SEQ ID NO: 197253 - DNA, 201 bp, Homo sapiens
ttgccccttcttgcgatgcaagaagtgcttactgtgggtcagctgctgtgcagaatgcttaatgtgaatgatttgattaaatccttgtagcagcctatgargtaggtgctgttgttattcccattttacagaggaagaaactgaggcttgctgaggttgaatcatgcacagagctgagctgccaccaggcaaccagtccag

SEQ ID NO: 197254 - DNA, 201 bp, Homo sapiens
tcctggaaaggtggaaattttgctcttgggaactcactctagagaggcggcggtgtggtttgggcattcccttaagagacaagaccagacccaccccccccacggcaatgcctgttttcccctcagagcacccccttccttccccgaaccccttaggaccaccacctctggggtagacgttccaggtcttggtctctttca

SEQ ID NO: 197255 - DNA, 201 bp, Homo sapiens
attcacccaaggtcacacagccaggaagtattggagctgggatttgaagccaggtctactgaattatgcaactccttccccaccaaatacacacacaagcrcacacacacacaagcacacacacacacaaacacacacacacacttaaattccatgcccaagcctccccctcccccaagcatagtgagccatttcacacct

SEQ ID NO: 197256 - DNA, 201 bp, Homo sapiens
gcaggtctaacactctcctaatctgacaataatgaatatcaatgacatttcaaaatatctacaacaatatcacaactgtaatgcgattttaaaacatttgyctattggtgacaaagccaaggcattgctaatactgctgtggtttctttcaatcctaattataggaagtgctgaattgcagttcaaagttagtgaaaatgg

SEQ ID NO: 197257 - DNA, 201 bp, Homo sapiens
aagtggggtactggatcaaagggtgggaacaccctccatattgattggatacagtgctgccaaattgcccttcagaaaggttaccccaggttacagtcccrtcagcagcaggaggctggaaacctcccaggcctctccaaccctgatgatttcactacttcccgatctcactggcaaagcatatctcatcttttttggctt

SEQ ID NO: 197258 - DNA, 201 bp, Homo sapiens
gtgagccatttcacaccttcaatttgggaccccttgtcctctcccaccacagcctggtaaacacctgcccacctatgtctcaaggcttagcttacgttatkgtcaacagaaatctttctgaacacacaaatcactgccaccacccctcttctctctcctttctttctctcttccccagtgtagaatccgtcatactgtctg

SEQ ID NO: 197259 - DNA, 201 bp, Homo sapiens
gcaagggcatgtcagaaaaacggctctgtgaccctggcagagccaggaaataaagggggaatgcagggagtggcttccaagtccagcatttcactgtgtcrtatttaaacagccagtcagaagatgaacctatgaaaaaaaaactgttaattgtaaacgtgggtgtaagagacaggagatgcgatgagagctccttatcac

SEQ ID NO: 197260 - DNA, 201 bp, Homo sapiens
gtccaactgaggccagcatcaccccgactcctggttgtcttccatctgctcctcccctctgatgccagatattccacatttgccagggcttcccaagataytgtcacatgggcagtgttgcctggtttcttcttctgcatagtccagagccgtcttgtgccgtcataagatgggtcagtcccttttgaccactgcagagac

SEQ ID NO: 197261 - DNA, 201 bp, Homo sapiens
cttttcaaccagagactaggaatttgaacttagaatcaacttcctctcttgattacattcttaagactcttttacgataatagaacacggcattttccacrgagatcccgaatttgctttgtctacactaagctatcttatgccgtatctttgtcccctatttccttgcaaacataaagtgtgtgctgggtttcatttaca

SEQ ID NO: 197262 - DNA, 201 bp, Homo sapiens
agcagtagatgaagccacacggagggaggcactggatggagaatgttgcccgcagctttgagcagagagatggctgcacacccggagggaagctagaacarcctagagcaaaaatagtgactggcaggggtgggtaacgccatctgattcgtccagggagacgtggatttttggtagcgtgcttatgagtcactgtgttgt

SEQ ID NO: 197263 - DNA, 201 bp, Homo sapiens
cctgactgtagtgagggtagagccactgaatctggaagaccacttagcctaattttacaccctctgcagtgaaggaggcgagcccagagactttgaggggyttgtccacagtaggacaggagccacaaggccactgccttactgtggctttctgatcctttatgttgcttcatgagactattaggcaattcatgtggccct

SEQ ID NO: 197264 - DNA, 201 bp, Homo sapiens
tacttgttcttctatcaagtagggcaggcaggaggacacaggcaggactgcatcctaaaaatagccccacacccgcttggagagctccagcagctcagccyggggtgcatggggcagctcctggtagaagctacttttacttcaccatgagactttgagaatctgaacttgcaggaagagggttgtagtgtatttttgtat

SEQ ID NO: 197265 - DNA, 201 bp, Homo sapiens
gagctcctcatgattctaatgggcagcccgggttggaaaagctgcctgacgctggccatggtccacctcctccctccccacccatctggcagacacagccycacccaccagtaaccacagcccagagcttcagaagtggtgataattaatccccccaacctccccaccccacctggctcacactccctgtcctaggtcaac

SEQ ID NO: 197266 - DNA, 201 bp, Homo sapiens
ggacttttttcttcctctaagtgctcttaacccaaaaaagccaattaaatggagaacaatataaatagattttctctgttgctgccaactttgatctgccmtcatgacgataacaatttattagagaaggagatggctctaatttggttcagtttaacaaatgttactccgttggaatcagacacccctctgtgatgagag

SEQ ID NO: 197267 - DNA, 201 bp, Homo sapiens
gggagcgagaccgtggtccgaagttctcccgaaacccaggtaggctttgtatttgtgctgttattattattattattattattattattattattattatwattatttttgatgcggagtcttgctctgtcgcccaggctggagtgcagtggcgcgatctcggctcactgcaagctccgcctcccgggttcacgccgttct

SEQ ID NO: 197268 - DNA, 201 bp, Homo sapiens
ggggcctgagcagggagggggtggggtcccgatgtttgtgcagaggagacacctctgctgcctctgcagagcctgcacctcagcagcacctcaggagcagmcaaggcataaagcagtcaacgcggtgccctcagggcaaatgcaccaagcatggttccagcttattttgaggtgtttggttgttaaaagtttttcagcact

SEQ ID NO: 197269 - DNA, 201 bp, Homo sapiens
cagtgattttcccatagtttagaaatattgaaatgtcctcatctgagatgattataggcagaaagcatcctcctatccccagtgtttttcagcacccaccmcccccccccgccggcatatcattctaggaaggaatattatcctttatgtggaaatggagcctgcaatgatatctaaatcagttcctgggcctgggtggtg

SEQ ID NO: 197270 - DNA, 201 bp, Homo sapiens
tttttcacctctttaactttggtatcataagaattccattacattggtagcatctttaaattagcttgatttcttttgctggcgttcagttagaaaattaygtagaagaatattcttatttaaaacatttacctctgtgctccctaaatgcacatcaaaagtccttgttagccattaaatgttgttgatattcattctttg

SEQ ID NO: 197271 - DNA, 201 bp, Homo sapiens
cttgttagccattaaatgttgttgatattcattctttgttacagaatgcaatgcccacttgaaaacttcttggctaccattttgtttcaaggtgaaaaacyggttcataaatcaaattttaaaatttgtaaaaagctgtggaccccagcaattatcacaagtcacacagaatgaacatcaactgtttcagtacaactgaaa

SEQ ID NO: 197272 - DNA, 201 bp, Homo sapiens
aatgcctgcttcacattctcttaactggtcagtcaactgaggccttgagcattgacccaaaatctagggtgaggctttctgcatttgggaagagactgacyagctatctctagggttctcccccaatctgaagacttaagtgggtagactctgcattctcatgggacagagtgtgggatacagctaactgatcctccagga

SEQ ID NO: 197273 - DNA, 201 bp, Homo sapiens
cgtcttgacttacacttttaaaaagtgcacttctgatgcacttctcactgcatcagaatggtccctcagattttccataagacctctgagctattcctccyagttgcgagctgcccagccatccagaccgaaacgaggaagacattagccaaacccaatataaggaatattgtggtggtggatggtgttcgcactccattt

SEQ ID NO: 197274 - DNA, 201 bp, Homo sapiens
cttctgatgcacttctcactgcatcagaatggtccctcagattttccataagacctctgagctattcctcccagttgcgagctgcccagccatccagaccraaacgaggaagacattagccaaacccaatataaggaatattgtggtggtggatggtgttcgcactccatttttgctgtcaggcacttcgtataaagacct

SEQ ID NO: 197275 - DNA, 201 bp, Homo sapiens
ctattcctcccagttgcgagctgcccagccatccagaccgaaacgaggaagacattagccaaacccaatataaggaatattgtggtggtggatggtgttcrcactccatttttgctgtcaggcacttcgtataaagacctgataccacatgatttggctagagcaacacttacgggtttgttgcatcagcccagtgtcccc

SEQ ID NO: 197276 - DNA, 201 bp, Homo sapiens
agggccatggtatgatagtggaagcttacccaaaataatagatccagaagaaatgaccaggagtttctgtgcaacactaacactaggcaacggcatttcartgcattcctaaatgacatttatagttcctagctcctgttaggaaaacgattcttgtggccttctgttaaatgctttgcacttaagccttgccagtgttct

SEQ ID NO: 197277 - DNA, 201 bp, Homo sapiens
ggagctactggctgcaggttggtcgtggcagctgccaacagattacggaaggaaggaggccagtatgccttagcggctgcctgtgcagctggagggcaggrccatggtatgatagtggaagcttacccaaaataatagatccagaagaaatgaccaggagtttctgtgcaacactaacactaggcaacggcatttcagtgc

SEQ ID NO: 197278 - DNA, 201 bp, Homo sapiens; identical to SEQ ID NO: 34046

SEQ ID NO: 197279 - DNA, 201 bp, Homo sapiens
attttccataagacctctgagctattcctcccagttgcgagctgcccagccatccagaccgaaacgaggaagacattagccaaacccaatataaggaataytgtggtggtggatggtgttcgcactccatttttgctgtcaggcacttcgtataaagacctgataccacatgatttggctagagcaacacttacgggtttg

SEQ ID NO: 197280 - DNA, 201 bp, Homo sapiens; identical to SEQ ID NO: 34048

SEQ ID NO: 197281 - DNA, 201 bp, Homo sapiens; identical to SEQ ID NO: 34050

SEQ ID NO: 197282 - DNA, 201 bp, Homo sapiens
tctcatactgaatttgctttatcccattctcttttttcttttatcatctttctgtcctgcgtaaattttggtttgtcagttatggtatggcatttaagtayttttatttgattgtcttaaagcagtcaaaaataagagtgttagccaattagatatcattcctgaccttctattagattaagcaaattatctacagaagag

SEQ ID NO: 197283 - DNA, 201 bp, Homo sapiens
  misc_feature (1)...(201): n = A,T,C or G
ctgctttgctcactttttgtgacttttccccttcagttaggttggcttagttacaggatagttctgttactctgacattgttagtttttaaatgatcttcnggagttgactttttttgttcattagtctgctttccttaggatctgtacatcaaggttttgtgactcatctgaaaagcattttagtctccttgggagaaag

SEQ ID NO: 197284 - DNA, 201 bp, Homo sapiens
gcacttagtattcattaaacattaaaccactctctgtcacttccttttcttagagctcctgcttcctttcttatttaagagtttgtgtctaaaacgtggtratacaatcttttgtaaaagtctgttgtaagctcttagcactgataaactcaacttaaaccacacatcatctctataaggtatagttaatgactaggaaaa

SEQ ID NO: 197285 - DNA, 201 bp, Homo sapiens
taaatgataactttttctttctgaaaccaaaatgtgactaaatcagctcttgtgaggcagtggtactcaaacttgcacaggcgtgagtctccctggaaggsttgctccagcagagagctagatgctaccctaaagtgtcttatttcataggtcttcaaggggctggaaaatgtacatttctagcaagttcccaagtgatgc

SEQ ID NO: 197286 - DNA, 201 bp, Homo sapiens
gcagatcacctgagcccggagaggatgaggctactgtgagccctgatcgtgccactgcactctagcctgggtgacagaacgagacccagtctcaaaaaaawtttttttttagctggatgtggtagcatgcacatgtagtcctaactagtcaggaggctgaggtgggaagattgcttgaacccaagagtttgaggttacagt

SEQ ID NO: 197287 - DNA, 201 bp, Homo sapiens
taaaaactgaagaaatacagtagctgtcatgaaatggatgcaggcttgtattgtttgactttgagaacgtttaaatgcttgttaccctgccaggaatcttyttgaaataaccaataatcttttaaaaataaaaatattcttttatctgtatttgataaaggttgagaatttgtcagtggttttaaataaagatgcaaacag

SEQ ID NO: 197288 - DNA, 201 bp, Homo sapiens; identical to SEQ ID NO: 34056

SEQ ID NO: 197289 - DNA, 201 bp, Homo sapiens
aagcttaatgctggaattaatcttttttttcccccaatgactttggtctactttaggtgcagttgaattatctaacagaggactaccattgtaataacttycaattcattttttaagatattgcagattaaaaagcagtaacatttcattttctgaaataggatagctatggatgtgttataactaacagtaggcactatc

SEQ ID NO: 197290 - DNA, 201 bp, Homo sapiens
ggtcttgaactcctgggttcaagtgatcctcccaccttggccttccaaagtgctgggattgcaggcgtgagctactgtacccagcctatttttttttttttattaatacacaggaaaggtgtgatttttctcttaaagaatcggaagatgaagtctcagtttttgtttaaccagcaaaaggaaatctggtgtttttactca

SEQ ID NO: 197291 - DNA, 201 bp, Homo sapiens
tagacaaaaatcaaacctttaatttaaccttactcttattttaaggtgtacttgatgatttttagagctcttgggtttgtgatattcaacctaatattctrtgtctacattgtgttctttttcttctaaaaactttacatttttaaagatgactggtaatttaaaataacaaaggaatgaaacaaattacattatccctca

SEQ ID NO: 197292 - DNA, 201 bp, Homo sapiens
ttaaaccttctaaaaacaactctcttggctttactccctccccccacacccctcccgccaacacacacacacacacacacacacacacacacacacacacwctctctctctctctctctctctctctctctctctcgcgcacgcgcgcgcgctctctctctctctgttccttttgcttactttggatttggtttgctgttc

SEQ ID NO: 197293 - DNA, 201 bp, Homo sapiens; identical to SEQ ID NO: 34059

SEQ ID NO: 197294 - DNA, 201 bp, Homo sapiens
caaggttcacccatatcgtagcacctgtcagaatttcctttctttttaaaaaatactaaataatccactgaacataggtaccacattttgttcgtccttgkattgcttcctggaaagacttttaaaagagacacagtattggcttagtagacaaggtgatctccctggccccctacttgccccacacttgggaatatatag

SEQ ID NO: 197295 - DNA, 201 bp, Homo sapiens
gtattttctacaatccaaactgtattaaatatagtcatgggttgagtacacatgtggtttgtgggggtgttttgtttttgattaccaggaaatgattgggygagaggtaatactatataaatgagaaatttctagcaagttatagtcttaccactcattcataattagggaatatacttattcacttagcctaggcaactt

SEQ ID NO: 197296 - DNA, 201 bp, Homo sapiens
acttttcaacaccagaatttccgtttggttctttttgttgttaaattctgttagtctctgtttgtttagaaattgtcatattttacttctttaagcatggyttcctttagttcattgaacataagcataagagctgtttttgaggtctctgctaagtctggaccttctcaaagtcagtttcttttgcctactttttttctg

SEQ ID NO: 197297 - DNA, 201 bp, Homo sapiens
cagtgttatttcactgagtttgtgtcttgtcatgctcctccggttgtcatactggaagtatatttctgaattaatttttttttttttttttttttttttttagacagagtcttgctctgtcactcaggctggagtgcaatggcgcgatcttggctcactgcaacctccacctcctgggttcaagcacttctcctgcctcaa

SEQ ID NO: 197298 - DNA, 201 bp, Homo sapiens
agttctcatgttttatctatggaatgctcaagtaggatttactttagatcttttttcttccagagtcttgtttttaatatcttaaggtatgagatttcttygctatcttctcagagatttttctttgacatggtggtaataatgcagcttatggttttgaaatggatgtttgtcatgaatttgctaatcatccagttcttg

SEQ ID NO: 197299 - DNA, 201 bp, Homo sapiens
  misc_feature (1)...(201): n = A,T,C or G
gatgagaagcaggacaatgaggtaaatttgagttaccatttctgttttctgtgtttcaagttatgataccagatactattctctcttaagagagtgttatnctttcatcaaacgtattaaagtatatttgaaagttagggatgggccgagcacacacctgtggtctcagctactcaggaaactgaggcaggaggattgctt

SEQ ID NO: 197300 - DNA, 201 bp, Homo sapiens
tatctcttactaggattgtttggaaaattaaagagataatggataagcaataatagtgcctagcacatgataattgttaataaataaaagtaaaaaatagagagcctttttacccaaggtcaaaacataattctgtggcaaaattgggataaagaatccaaagatcctaaaattggtcctgtactcaccctaccatggtga

SEQ ID NO: 197301 - DNA, 201 bp, Homo sapiens
gtacataaatgtaagttttctatattggtgtaaacagactgtacactttaaaaaatttttccctaaacgctgcttcttttaataaatattatataattttmaaattttagattttagggagacatttttaatattataggtcttgtacaaatttccctttttctatccagccagaaagattttaagtcatacattatggag

SEQ ID NO: 197302 - DNA, 201 bp, Homo sapiens
ctccgcctcccaggttgaagtgattcttctgcctcagcctcccgagtagctgggactacaggcgtgcgccaccacgcctggctaatttttgtatttttagkagagatggggtttcaccatgttggccaggctggtctcgaactcctgtcctcaagtgatccgcctgcctcagcctcccaaagtgctgggattacaggtgtg

SEQ ID NO: 197303 - DNA, 201 bp, Homo sapiens
gcaacctccacctccccggttcaagcgattctcctgcctcagcctcccgagtagctgggattacaggcgcccaccaccatgcccggctaatttttgtattyttagtaaagacggggtttcaccatgttggccaggctagtctcgaactcctgacctcaggtgatccacccgccttggcctcccaaagtgctgggattatag

SEQ ID NO: 197304 - DNA, 201 bp, Homo sapiens
aaaccttctaaaaacaactctcttggctttactccctccccccacacccctcccgccaacacacacacacacacacacacacacacacacacacacactcwctctctctctctctctctctctctctctctctcgcgcacgcgcgcgcgctctctctctctctgttccttttgcttactttggatttggtttgctgttctt

SEQ ID NO: 197305 - DNA, 201 bp, Homo sapiens
tcaagtgttcagttgcctgaagatgaactctttgctcgttctccagatcctcgatcaccaaaggtgtgttggtttgttattttcaaaattaaataatacarttgttttgttctgacacagaatcttcagtgatctgtatttaaagtgtgacaatgaaataacactttaaatgaaaatacacacaaccaggagcctttttcg

SEQ ID NO: 197306 - DNA, 201 bp, Homo sapiens
gtgttagagttaactgaaattgacagtcaccacattttttttaacctattggagttctagtgaatgttttatcttaaacctaggacaagggtaaataacasgttctccccttttcctcagaattttatttccttttttattcttttttctcactgcctaagtttcatacttaataagcctgtttctttagaatgacttttt

SEQ ID NO: 197307 - DNA, 201 bp, Homo sapiens
ctcgaactccttaccttgtgatccgcctgccttgggcctcccaaaatgctgggattacagacatgagccacggtacccggccgatccatttttttttttttaagtggaggaattttttaatttttagtgtcttttggtaaattatggttttcaaggaattggtttatttcatctggattttcaaatttgaggtaaagttgt

SEQ ID NO: 197308 - DNA, 201 bp, Homo sapiens
tttttaagactgacaaatgctggtacttcatcttctataagtggactataatttcttttctcaagacaactacataagcagacaaaattgcaaagatctgmcctgtgtcgagtatgacagccacgactcgtggctctccggtcggagggaatgacaaccagggccaggctcctgatggacagtctcagccccccctccaac

SEQ ID NO: 197309 - DNA, 201 bp, Homo sapiens
tgattcagcaactctacatgattccttccattaggaacggtattcttgccattgaaggcacaggtagtgatgtagatgatgatatgtctggggatgagaarcaggacaatgaggtaaatttgagttaccatttctgttttctgtgtttcaagttatgataccagatactattctctcttaagagagtgttatactttcatc

SEQ ID NO: 197310 - DNA, 201 bp, Homo sapiens
ggtgtactttttcagattctttacatttatgatttaaccaatctggttttggaagatacaggcagaaagaacacccagtggaggcacataaaaaatgttaytagactgggtgcagtggctcatgcctgtaatcccagcactttgggaggtggaggtgggcggatcacttgaggtcaggagttcaagaccagcctggccaac

SEQ ID NO: 197311 - DNA, 201 bp, Homo sapiens
ctaagaggcaaaattgaggacattgggtaaaatttttattggtgaaataaaaaatataattaaatacagttatgtataacttaggtctaatgagaaaaacaatttggtgtgtgtgtgtggaggggaggtaatacagtattttgctttattgggtaaagttcagtgttccctgtcatcaaattgattgcagacgttctgtgt

SEQ ID NO: 197312 - DNA, 201 bp, Homo sapiens
acagggtggaaccctgtctctactaaaaatacaaaaattagccgggcgtggtagcatgcacctgtaatcccagctacttgggaggctgagacaagagaatygcttgaacctgggaggccgaggttgcagtgagctgagatggcgccaccgtactccagcctgggtgacagagcgagtctctgtctcaaaaacaaaaacaaa

SEQ ID NO: 197313 - DNA, 201 bp, Homo sapiens
aaggtttttgagtgtgataaaacactacagaagtgctaagtgtattgagaatttgctgctgattgtatttataacaattacttgacgtttgcagaaatttmgcactttccctccaaatttataggtgtaagagaagcgggggcaaggtgcaccacattttaaaactgcaaatgtgtgaaaatttatttagagattcagatt

SEQ ID NO: 197314 - DNA, 201 bp, Homo sapiens
ttgagaagggaacaagcaagctgctagtctccgaatgagcataggacaaaaacataaactttctgagtggtgtgatagcagcctccaagccacacagacakgcagtggtaaagggtaaaaatctactagtcaaggaggcttaaacacagcgtttggccaataaggggcttatactgatgcaggggcaactcctaggtaggc

SEQ ID NO: 197315 - DNA, 201 bp, Homo sapiens
acaaagcattgggtgaataataagctaccccgactcaggggcaactcttaggaagccagacatgaaaattacatgtatccctggcagtctggaagacttgstgcatccttgctggagtgattgagaagggaacaagcaagctgctagtctccgaatgagcataggacaaaaacataaactttctgagtggtgtgatagcag

SEQ ID NO: 197316 - DNA, 201 bp, Homo sapiens
  misc_feature (1)...(201): n = A,T,C or G
aggcttgagccctcaccagggaccccaccctcatacctcttgtccttattcttacagtgtaatgaatgcatcagcaaattgaaaacagatagtttttgccntttcttaatttaattaaaatgacagttaagtactttgatatattgcctttggagtcatttccaggaggctatatttgtttgttttcttggtataatggcc

SEQ ID NO: 197317 - DNA, 201 bp, Homo sapiens
attagccatcttgagagagaaaaaaaaaagatacctggagttagaacatcatctgttgtcggcctgtctgctatgttgcagtatatgcattgttgaaaacytcatagtctgcaaaaatcaggtaccaaaaactaacaatgtgtatagggaaaaatgggcttaagagtaaactgatcacttcaaagctatgttactttgtaa

SEQ ID NO: 197318 - DNA, 201 bp, Homo sapiens
ttgtttagaggtcaccttttatcattacctttcagagcaaagtaataatccatgtgactcatggagaaagtatattttaagcagaaaaaacaacagatgtrtatgtccaggcatgtcaggaacatgcctgacatgtgaaagaacagcagggaaactggagtggatggaacagaggcggtaggggacggggacagttgtagg

SEQ ID NO: 197319 - DNA, 201 bp, Homo sapiens
aaaacaagggttatagatgtcggttaaacatagaaatttgaaaggaagagaagtaattccctttgattgttggtgcataaaaccggaataggcaaaattcmcaagtcaagattaatttccaagtcaagataatttccatgtttgagcttaaggatgatctatcaaattgttttctaagaaactcatttcactttgatgtcc

SEQ ID NO: 197320 - DNA, 201 bp, Homo sapiens
tacaatattgaacagaattggtgagaggggacatccttgttaaaggtgcacttttgatagggttaaaagaccagtgttcaacactttccaatcctgacttygggcaaatcatttaccctttctgtttccttatctaaaatagaaaataacagcctatagtgtacgcgggtggtcgtgtctgctttttagaagcccatgagc

SEQ ID NO: 197321 - DNA, 201 bp, Homo sapiens
tatttttttctgctgtttccacagcctgttgttttattccctgcctagttaactcacttatgttacctctctgatccgagaaagcatttgactttgccackcctgggatagtgctttcagagcagagctgagtatttggttaaatgtttagaaaaggagtcaaggataatactgtacaggaggttagtgggagtcagtttg

SEQ ID NO: 197322 - DNA, 201 bp, Homo sapiens
gttgtgatattttcattaaaagaagtaaatgtacaaaagtataatttttaagtttttacatcagtagctaagaatttagatagtacgaactcttctggttrcaacagagtttaattgcctaattatattgttaagttcttctcgtttcagtcaaactcagcgaagtccccatgtgttttatcgccatgacttaatcaatca

SEQ ID NO: 197323 - DNA, 201 bp, Homo sapiens
accaaatccacaaggaaggttaacttcctttgaccctgagaaagctcttatgttaatcatgcctggttactttatcatcttgaacattgttctgtttttartcagcattattgtgagttcagggttactgctcctatatatcttacatcatggttagtcaatcggatttagcatgtggaagagtcaatagatgctcataga

SEQ ID NO: 197324 - DNA, 201 bp, Homo sapiens
attacccttatataagtcagaaccattttgcccctctcttccctgaaacttgcatgcagtgcggtaatgtactgtagaaagcatgttatctcattatgtcmccatattgtctgcaataatagggagggcgttctaagttaggatctttttgagttttaagtacctgattttttataaatatctgaatacctatgtaggttc

SEQ ID NO: 197325 - DNA, 201 bp, Homo sapiens
taatacaaagcttttataacagtgctgggctttttggagttctggtagtaagtgtgaaataaaaacaaacttaaagcttttattatttaaattaaactctytactgtaattacaacatgatgcttgtattgctaatcttaaaagaaaagcttttattttataattctcaaaataatttgaaaataaaattctcctgagtat

SEQ ID NO: 197326 - DNA, 201 bp, Homo sapiens
ctttttgtgacttttccccttcagttaggttggcttagttacaggatagttctgttactctgacattgttagtttttaaatgatcttccggagttgacttyttttgttcattagtctgctttccttaggatctgtacatcaaggttttgtgactcatctgaaaagcattttagtctccttgggagaaagtataaacagaac

SEQ ID NO: 197327 - DNA, 201 bp, Homo sapiens
tggagcttttggtaggtcttctgttctacttcaaattctctctacacctcctaccctcctgggacattgaacctctgtggcctcaacttttgacccatgayaaagctaaagctgtcaggactatctctcagagtgtttcctaatccccatcttcccccaagatgtttgaagatgtttaaatgagatcatttattcaaacat

SEQ ID NO: 197328 - DNA, 201 bp, Homo sapiens
gtagtgaggtctggcgccctctactggtgaaggctaagtatagcttgtgttgtacagttaggtctcttgtctctagtgagtcaaatattttaatggaaaamcaagggttatagatgtcggttaaacatagaaatttgaaaggaagagaagtaattccctttgattgttggtgcataaaaccggaataggcaaaattcacaa

SEQ ID NO: 197329 - DNA, 201 bp, Homo sapiens
tttttaaagtagttcttattaggtaagtaaaaagacagcttcttgttaggataaaaacagatttttgtcatgatccctgacacagatacttaatgaagtamacagaaaacaattacatgtttccactttcacctttcttcagtatttattcagagaatgtgccactatggatacagaggtacataataacctctaatctca

SEQ ID NO: 197330 - DNA, 201 bp, Homo sapiens
ctatcatagtaaaaaatgatctctcatgttctcatgtatttttcatcatgtttagtgcaataccataaaccttgaataacattacgggactcatgaagtgycactagtggtgctggcgaacaggctcccaagaagcagagaaaagtcatgacgttataatgttctgcaaagtttcttataagaaaaagttgaattgcttga

SEQ ID NO: 197331 - DNA, 201 bp, Homo sapiens
ttggtagctaatgcttaattgtattttgggattatcttatttttcccccactgtgtcttttcaccgtaatttaaaattatgttttaatattatgacaaaargacaaaagctctgcttgctttgaggtgaatgtacataggcacttaccctttttcgatgtttgctttttagggttcattttcttggatatcactacattcc

SEQ ID NO: 197332 - DNA, 201 bp, Homo sapiens
tggcgttaaacataagtttcatagtttattagagcttccttatccttagaactgggataatgataacttttttgtgtaattgcagggattaaatgaaacartgtatggaaaacccctagcctagggactggcacttagtattcattaaacattaaaccactctctgtcacttccttttcttagagctcctgcttcctttct

SEQ ID NO: 197333 - DNA, 201 bp, Homo sapiens
tataatacaaagcttttataacagtgctgggctttttggagttctggtagtaagtgtgaaataaaaacaaacttaaagcttttattatttaaattaaactmtttactgtaattacaacatgatgcttgtattgctaatcttaaaagaaaagcttttattttataattctcaaaataatttgaaaataaaattctcctgagt

SEQ ID NO: 197334 - DNA, 201 bp, Homo sapiens
gtcagtgtctaatgatgagaagagggcaaacaggatgaatattgagaagcagttatttgatttgtcagtaagtagaacattgatctgtggaccttcttctyatgcgtcccctaatgcacatactcaaaagctttgtatgtaatttttaggggaattaatcttgaagcccatccctacgtctcgattaagaccttctggctt

SEQ ID NO: 197335 - DNA, 201 bp, Homo sapiens
gctaagaggcaaaattgaggacattgggtaaaatttttattggtgaaataaaaaatataattaaatacagttatgtataacttaggtctaatgagaaaaacaatttggtgtgtgtgtgtggaggggaggtaatacagtattttgctttattgggtaaagttcagtgttccctgtcatcaaattgattgcagacgttctgtg

SEQ ID NO: 197336 - DNA, 201 bp, Homo sapiens
ggctaagaggcaaaattgaggacattgggtaaaatttttattggtgaaataaaaaatataattaaatacagttatgtataacttaggtctaatgagaaaaacaatttggtgtgtgtgtgtggaggggaggtaatacagtattttgctttattgggtaaagttcagtgttccctgtcatcaaattgattgcagacgttctgt

SEQ ID NO: 197337 - DNA, 201 bp, Homo sapiens
ggtctaccctgatctaagcagtctggacccattgcctggacaatcatagtatccttgatcttcccacctgtagtgttgtactcttctaatctgttgactayacggcaagcagagtgatctctagaaaatatgagcatgttgctttcctgcttaaaatctttccatgtcttcccgttatctttgaattaagttcaaactttt

SEQ ID NO: 197338 - DNA, 201 bp, Homo sapiens
tgatcatttcaatgtttcaaagttgttttcctgtttttctttcagaaaatatttccaacttacgtatttctttcagtaactagtttaacatttttagtgartgaatgaacagttaagaccattataggccgggcacggtggctcaggcctgtaatcccagcactttgggaggccaaggtgggtggatcacctgaggtcagg

SEQ ID NO: 197339 - DNA, 201 bp, Homo sapiens
tgtgggctcaactattaaaaataacttactgtatttcagactccttaacatgaacctcctcatttaacacactctgtcagagggagagatccccagacttytcagccactcctgcctgtttgagaaggattctcaaacaccccctcccccagagaaggggcctcattttgttgcccaggctggcctcaaactcctgggctc

SEQ ID NO: 197340 - DNA, 201 bp, Homo sapiens
gacaatttccagaggcttttagtgttttttgttttttaaaaaaataattttcaccagttaacgattgtttcactggggagagcatttacggagcctttgakggcaccattccaaaagttatttttaatgtaaaattactcaaattgcctacagccacttaaaaatttgtgtttgagaatgctttggaaaagatgctgaagt

SEQ ID NO: 197341 - DNA, 201 bp, Homo sapiens
ttcatccatattgtagcatgtcaaaatttccttgctttctaaagctggattattttccattgtttgtatgtatattttattgacacattcatctgtcaaayggatacatatgcttccacattttggctattgtgactaatgccgctatgaacatgggtgtacaagtatttgttcaagtccctttcagttcttttgagtgta

SEQ ID NO: 197342 - DNA, 201 bp, Homo sapiens
ggggagggttggggtgactgacttagagagacaaagctaagatgcataaatatcaggtggaactgcgtacatacttctgagacagagcatgtggcctgackaagccaagaagaataatgtggggctaggaggtggtggtgatgagcatctggttcagacctataacccccaaccccatgctgcattcagcttctgttactt

SEQ ID NO: 197343 - DNA, 201 bp, Homo sapiens
gtggatttctgtagcgactagaacttacacgagaatttgcaaaatttctagtagaacctgcttaaattaagcatgttattttttggaagttccatagttayaacgttaattgaatttacacggtgcagtttacaggtgtatataattgcttcagattgtcttttagtttaaataagcaagttgtaggtatagattaaatat

SEQ ID NO: 197344 - DNA, 201 bp, Homo sapiens
ggcaagaaacttgaagtgggtgctttcttcatgttttatataatgaaactagaatacctaaatttgaaacagccagcttttgaaaaagctggtaatggttrtattgcagcagaaaatcataggctttggactcaaatggacttgagttccaatcctgcttctaattgctactctatggcgttaaacataagtttcatagtt

SEQ ID NO: 197345 - DNA, 201 bp, Homo sapiens
gttgaggggtgggtagaagcctggaatgttactaagtaacctatagtgcagtcctagacagaacagtcctgtacaacgaagattacctggccaaacgtcartaacggaaaccctgggttagatgatggtagtattttactagtgtagttttcttgttatttggaaatactcattgaagtatttaagggtaaaaggacatat

SEQ ID NO: 197346 - DNA, 201 bp, Homo sapiens
tgggtttagtatattatgattataatctcttcctggtggtacacagccctcatggttgccaaggagggccttcccccagagtggagacatataattcataygtgctttaatgctaatttttatttacttcatttgcatgtggtgtttaatttcattgtcagaggtcaggaacccggctgtctcactagggttttttctgct

SEQ ID NO: 197347 - DNA, 201 bp, Homo sapiens
atatctgcaaactgagagatgtgagtctgcatagttgcctaggtctgaaacatgacccaaacatattagctgtatgactgtgggcaggttatttatgctakaataatgtctggcacatagtaaattcccctctgaattttaacatcatacctttttttcctcctaaccttggtaccttttcttcttccaatttattacact

SEQ ID NO: 197348 - DNA, 201 bp, Homo sapiens
gaatttagtagactgttgccttttttcaacttcaactttcatttattgtttgggaaaaaatttttaaaagtcattttccaactgtcaccttttcccttctrcttgccaaaactgttgtcaaagtgtacatttgatcataaatgttttcatggccttaaaaatgtacacactattaaacccaacaattctacttagagaaat

SEQ ID NO: 197349 - DNA, 201 bp, Homo sapiens
tggtctaccctgatctaagcagtctggacccattgcctggacaatcatagtatccttgatcttcccacctgtagtgttgtactcttctaatctgttgactrcacggcaagcagagtgatctctagaaaatatgagcatgttgctttcctgcttaaaatctttccatgtcttcccgttatctttgaattaagttcaaacttt

SEQ ID NO: 197350 - DNA, 201 bp, Homo sapiens
gcttccccttctgtttttatgttcttttgagtttatgtatttttatattcattcattctcattttagtggggtttggggatgaagtactgataaatatagygcagtacaccatatttagttgacataatttttaaagctgtcttctgcttttattacctccattttctaaattaaacaccttgttgggcttctcatcttgc

SEQ ID NO: 197351 - DNA, 201 bp, Homo sapiens
tatatagaggaacatttccagcctgttccaagaaagaggtgttagaaggtggtatccctcaaactcttagtgtcaatttgaggttatagtcctggacatasagcttaagttcatgtattatgtggtgttggcttgagtgcttgttgtgtgtaggtagggtaatcctgtatccttactattaatttatttcccttttatact

SEQ ID NO: 197352 - DNA, 201 bp, Homo sapiens
tgccctcttggagcattttattctagtgagatctatatagtacataacagtttttaaaaaagatagatccatgattcccagatctgagaatcatgagacarggttttcccaagggtcatcagagagaaaatatggtattgtgattctcaatctttcttttttctttcttttttttggagatggattcttgctctgtcacca

SEQ ID NO: 197353 - DNA, 201 bp, Homo sapiens
actttttaaaatatatatcagattccaaatgggattttcatttgaagaagggtctatgccatctttagaaaaaaacaaaaaaatggaaaacctttgaaaakttaagcagttttaactcataaatattgatggattagttatttgtgaaagtcacttgattgaatacctcatttttcaatgatgccatataagcaggctgct

SEQ ID NO: 197354 - DNA, 201 bp, Homo sapiens
gttgacagatgacagcccacaagccacatcaagccccctgcttgtttttgtgcatcccaagagctatatttttaagtggctacaaaaaaaaaatctagaakaataatattttgtgatacatgaaaattatatgaagtttaaattttagtgtccatgatcaaaaccaggctcatttgtttacattcagtctacatgactgct

SEQ ID NO: 197355 - DNA, 201 bp, Homo sapiens
ctagtgagtcaaatattttaatggaaaaacaagggttatagatgtcggttaaacatagaaatttgaaaggaagagaagtaattccctttgattgttggtgyataaaaccggaataggcaaaattcacaagtcaagattaatttccaagtcaagataatttccatgtttgagcttaaggatgatctatcaaattgttttcta

SEQ ID NO: 197356 - DNA, 201 bp, Homo sapiens
ttctcaataatgaaattgattggcttaaaagaattagggtaagttttagttaatactccatttatatgtcattattagtaaatagaatgttttattgatgrtttatattttttgagcattttggttaaatggaaaactccaaagattgataaaagggaccaaagaatgtactctgcatcagtggacgttagtaatctgtga

SEQ ID NO: 197357 - DNA, 201 bp, Homo sapiens
tttttttttttggtgaatgcctgttccccccctccccccaccgtggcattatttgtatattttttggattgtagttcttgatatattttgaatgctaatcyttgtcagttcaagagttacaaataatttctcccaatttggttatctttttcattcacttaatggttgtactggttgaatagatgttcttaatttctcctt

SEQ ID NO: 197358 - DNA, 201 bp, Homo sapiens
aaagactttacagtaattagaaggtattcattcttatatggtgggatatctgaaataggagcatgtcttctaattcctgttcaccacttacattggtacaracagacagaactatgccccagtgatttaatctatacttactacgtatactgcttctgtctcacagatggaattactatgaacaaaatgcaatgttttgtg

SEQ ID NO: 197359 - DNA, 201 bp, Homo sapiens
agtaaataaactagtaaatagcaaaagaaatgagatgaagaaacattctaaatgataactttttctttctgaaaccaaaatgtgactaaatcagctcttgkgaggcagtggtactcaaacttgcacaggcgtgagtctccctggaagggttgctccagcagagagctagatgctaccctaaagtgtcttatttcataggtc

SEQ ID NO: 197360 - DNA, 201 bp, Homo sapiens
gaggccgaggcaggcggatcacgaggtcaggagattgagaccatcctggctaacacggtgaaaccccgtctctactaaaaatacaaaaaattagctgggcrtggtggcacgtgcctgtagttgggctgaggcaggagagaggcgtgaacctgggaggcaggacttgaagtaagccgagatggcgccactgcactccagccc

SEQ ID NO: 197361 - DNA, 201 bp, Homo sapiens
cagctatatgacctcggcaagctgtgtaactctgtgccaattttctcacctgttaaaagttttaataataaggccaggcgcagtggctcatgcctgtaatyccagcactttgggaggccgaggcaggcggatcacgaggtcaggagattgagaccatcctggctaacacggtgaaaccccgtctctactaaaaatacaaaa

SEQ ID NO: 197362 - DNA, 201 bp, Homo sapiens
aaaatgctttgcctgccatgtattctcattattagaattcaaatactgtacctccaaattatgtcactgaatcctaacttgccttcagagatgcagttttrtaaaaggtattgatgtgtagcaaattaccctcaactacagcagtcataaacttagttataacttttttaaagtttgcattactctcgagtgtcctgaatt

SEQ ID NO: 197363 - DNA, 201 bp, Homo sapiens
taccatgtttatgaaatagtttaagaattaactttttaggctgggctcagtggctcatgcctgtaatccctatgctttgggggaggccaaggcaggagaakcacttgagctgaagagtttgagcctgggcaacatagcgagacttcatctctactaaaaattaacaacaaaaaagttggctgggtgtggtggtgtgcacct

SEQ ID NO: 197364 - DNA, 201 bp, Homo sapiens
ctgtagaggaaagaagagaggcaggcaatttataaaagagtttttgcttctcatttaatgtagttattttgttgttttcatcctccttacaaatgagggtygcagtgttggttagtccctttagactctccaggctgtagaaagtgttcgtcttctggtcgggcgtggtggctcataatcccagcactgtggaaggccaag

SEQ ID NO: 197365 - DNA, 201 bp, Homo sapiens
tttcaccatattggccaggctggtctcgaactcctgatttcaggtgatccacccaccttggcctcccaaagtgctgggattataggcatgagccaccataygcggccaaattttttgaggaactgttttctagagtgactgcaccattttacattcctaccagcattgcacaagagctccaatttctccatatccttgcca

SEQ ID NO: 197366 - DNA, 201 bp, Homo sapiens
gtcttgaaatgtttttgaatcatctgaatgaagatatctagaacattaaagccgtgagcgtgggctagatcatccagggaaatcagtgtgagaagatagcstggcatgggaacttggagaaacatcagtttttaagagacaaggaggagtcgcaaataagaacaaaaagaggtagaaagaaaatcaggaatccagggagga

SEQ ID NO: 197367 - DNA, 201 bp, Homo sapiens
catttatatgaaaatagattagcatgggactgaggggaggttggagggaagggagaatgctattaatggtatgaagtttctttttgggggtgatgaaaaartaatctgagatcgattttggtgataattgtgcaactctgaatatactgagaacctttgacttgtacactttaaatggacgatttgtatggtatgtgaatt

SEQ ID NO: 197368 - DNA, 201 bp, Homo sapiens
ttttctttggtccttcagcctcacaagtgctatatctaacagaggttagtttttggggttttttgttgttgttgttttctttgtttttccttttaaatttrttctgtgttctttaaatttgacctttcatatggtaaggtgaatgatttgggtaaaattgtaatgaagtagttttgaaatgaaatattaatttgaaataaa

SEQ ID NO: 197369 - DNA, 201 bp, Homo sapiens
tgcagtggcgtgatttcggctcactgcaccctctgcctcctgggttcaggtgattctcctgcctcagcctcccgaatagctgtgattacaggcacctgccmtcatgcccggctaattattatatttttagtagagacgaggtttcaccatgttggccaggctggtctcgaacgcttgacctcaggtgatccacccacctcg

SEQ ID NO: 197370 - DNA, 201 bp, Homo sapiens
caaggggtaaccttgagtgccatgttaggacatttgccttttactgttaaggtaatgagagatgtactttgaagtttaagtgaaaggagacattagatttstgtttgtttttgaaagataattctgatggcattcgtggcagatgtgttggagagttgagtgtcgggggattgagatggtattttaaccgttcttctgaaa

SEQ ID NO: 197371 - DNA, 201 bp, Homo sapiens
  misc_feature (1)...(201): n = A,T,C or G
tatggtgctttttataagaagtggaatcagtggatttggtgatgggatattcagagaaggaggggacagggaagagatgtgaagaatgatgcccaaaattntaacatgaacaactgtgagtggatagtggtaccatttactgaggggaaacacaggaggagaaacatgtatgtatgggaagaaaggggtgagttcagtttg

SEQ ID NO: 197372 - DNA, 201 bp, Homo sapiens
ctggatttaataatttcccttttattttcctgattgtacacctatcacttattcttcccacatacttttttttgagatattttttatctgaatgtgggcaractatcacgtttgattaatggtttgtgtatagaatcctaggtttgaaaatatattccttctggctggtggcattgctgatgagaagaccaaagtcctctt

SEQ ID NO: 197373 - DNA, 201 bp, Homo sapiens
tgtgcacctgtaatcccagctactcaggaggctgaggctggagaatcccttgaacccaggaggtggaggttgcagtgagcccagatcgcggtactgcactscgtctagcctgggtgacagagcgagactccgtctcaaaaaaaaaaaaaaaagttcagattttggagcattttggattccagatttttcagataagggatg

SEQ ID NO: 197374 - DNA, 201 bp, Homo sapiens
ttttaaagtaaactgaaattgggaggtgttttgattgatttataactctgttaatcctgagaactttttgaaataacatagtttattatttggtagtgatrtgggtagctttaaaacatctttgataaacttagtgatgaatgtggcgttttgaagtaattattagtttgttggagagtgggaagttggttgaaatggagt

SEQ ID NO: 197375 - DNA, 201 bp, Homo sapiens
gagagattctggaacatagggcaaattttagcagagttgggataatgactgggtaagaaaggataattctttgttctaaaagggatttctctggtattaargccctgtgtgaaagctgctggagaaattcagttctgcaaagtttaaagtaaatggtttgctgtttatggagtactagattacttaatgcagtccagcctt

SEQ ID NO: 197376 - DNA, 201 bp, Homo sapiens
aggtagtgtgctcagtgtgctccttcagccctcctgaagacataggaaaataatggaattagactttattttctattatagtcatttccagactattccaraggggcctcaagagttaacatgcagccatggagaggctgaggccaggtggtttaagtgagcagatgagttttaagcactaactagaagttgtgtgagatt

SEQ ID NO: 197377 - DNA, 201 bp, Homo sapiens
tttcatatacgtctgggacaccaaagggtcagtatagaggtaaatgagaaatgaacttgctatgcagaaagggacagcaaaaaatcctgcatatctcaacyttggcacttggtggagggagggattaaaaaaaaaagtgaaaatctaaaccacaagccagtatttaaacagtttcgtagtctgaattcaaattatagttgc

SEQ ID NO: 197378 - DNA, 201 bp, Homo sapiens
ctggttagtacacttgaactcaaaaatagagactataaactctcctttagatctcgctcgtcttctaattcgctgggctgccattttggtttcagcaaatrccttcaaattcttgaagaattatgtattaaatataaaaaagtgtcaacattcgttttctcaatttttaaactcatgtgctgtgtcatacatctaacttta

SEQ ID NO: 197379 - DNA, 201 bp, Homo sapiens
aagcaaagaatgactatactgatataggtatattttattgacagatctgagcattttatatacaacagctacacaaaggatatattacccccattcacacrtaaagaaacttgaagcctagaaagtttaagtagtttttacttgctcaaagttacttggtttataagtggtagagcctgcatttatgtctagttcagtcta

SEQ ID NO: 197380 - DNA, 201 bp, Homo sapiens
aaccttcatttttgataatagttttaaatttttacttttctatttctaaattttaattttctattttatgccaagttatacagtatctgccaatttcactktctgtgcttacttttaggttattctttgaatttcccttagatcatagctcttcttgattaggaaacaaactttccctactttaaatagtctcacgtagtc

SEQ ID NO: 197381 - DNA, 201 bp, Homo sapiens
tttctcagaatttatccctgtcattaagcaaagaatgactatactgatataggtatattttattgacagatctgagcattttatatacaacagctacacaraggatatattacccccattcacacataaagaaacttgaagcctagaaagtttaagtagtttttacttgctcaaagttacttggtttataagtggtagagc

SEQ ID NO: 197382 - DNA, 201 bp, Homo sapiens
gaaccttcatttttgataatagttttaaatttttacttttctatttctaaattttaattttctattttatgccaagttatacagtatctgccaatttcacygtctgtgcttacttttaggttattctttgaatttcccttagatcatagctcttcttgattaggaaacaaactttccctactttaaatagtctcacgtagt

SEQ ID NO: 197383 - DNA, 201 bp, Homo sapiens
ccttcatttttgataatagttttaaatttttacttttctatttctaaattttaattttctattttatgccaagttatacagtatctgccaatttcactgtstgtgcttacttttaggttattctttgaatttcccttagatcatagctcttcttgattaggaaacaaactttccctactttaaatagtctcacgtagtctt

SEQ ID NO: 197384 - DNA, 201 bp, Homo sapiens
atgagtctgatagagcagaactttctaccataacatctgatactttttacttaggcaaaatgatacaagaatttatttctgaagagatttgtagtttttarccttcaaattagcatttcttctagtagttcataaagccaatttctagaaagttctgaagaaaacaaagttgtttgaatggaaagacttaaggaaattatc

SEQ ID NO: 197385 - DNA, 201 bp, Homo sapiens
ccttgtctctaaagaaaatagaaaaaataagccgggtatggtgaacatgcctgtagtcccaactactcaggaggctaaagtgggcagatcacctgagcccrgagaggatgaggctactgtgagccctgatcgtgccactgcactctagcctgggtgacagaacgagacccagtctcaaaaaaaatttttttttagctggat

SEQ ID NO: 197386 - DNA, 201 bp, Homo sapiens
tgtccaggcatgtcaggaacatgcctgacatgtgaaagaacagcagggaaactggagtggatggaacagaggcggtaggggacggggacagttgtagggartaaagtcagagaggataacaaacaccctgtgagggtttttataggtcattgtgaagacattgaccctaagtgagatgggaatctttcagagggttttaag

SEQ ID NO: 197387 - DNA, 201 bp, Homo sapiens
tagaggtcaccttttatcattacctttcagagcaaagtaataatccatgtgactcatggagaaagtatattttaagcagaaaaaacaacagatgtatatgyccaggcatgtcaggaacatgcctgacatgtgaaagaacagcagggaaactggagtggatggaacagaggcggtaggggacggggacagttgtagggagta

SEQ ID NO: 197388 - DNA, 201 bp, Homo sapiens
ggtgccataaaaggtaaaatactttgagaattggaaaggccataacttactttctacctggaaggagcaaaagtgaaggttttgtgcaggatgtagcatgygagctcatgtttgggcaggatttatatgtgcataaaagtagaagatggtcattgccagtgcgctctctctctccctttctcactcccagttatgtggctt

SEQ ID NO: 197389 - DNA, 201 bp, Homo sapiens
gctaactgccattggctatggtcatgttcgagctgtggcagaagcttgtcagccaggtgtagaaggtgtgaatcccatgacacaggtaatacagacttttyaaaaatccttttataatagtagatagcaatttttaaagtaaaactaattagtattttaagtgtagagttcaaggttgactcaatgttcaaagtgccttat

SEQ ID NO: 197390 - DNA, 201 bp, Homo sapiens
aattcaaaatccgaaatttggggccaggcgcggtggctcacccctgtaatcccagcactttgggaggctgaggcgggcagatcacttgaggtcaggagttygagaccagcctggccaacatggtgagacccccgtctctactaaaaatatgaaaattagccaggcatggtggtgtgcacctgtaatcccagctactcagga

SEQ ID NO: 197391 - DNA, 201 bp, Homo sapiens
tcgaactcctgacctcaggtgatctgcctgcctcccaaagtgctggattataggcatgagctactgctccctggcctttttttttttttttttttttttttggagatagagtcttgctctgttgcccaggctgaagtgcaatggctcgatctcagctcactgcaacctctgcctcccaggttcaagcaattcttcagcctc

SEQ ID NO: 197392 - DNA, 201 bp, Homo sapiens
aaaaaactgcttacatgtaatggcgtttacttaaaccctcctcccggtgagtatcaagagagtttagcttcttagtaataaagaataatttatagtaggcrtcaacatgtttaagttcataaaattaatgttttcactttaaatgagtctaatttgctgggtgtggtggttcacgcctgtaatcccagcactttgggaggc

SEQ ID NO: 197393 - DNA, 201 bp, Homo sapiens
tggagagtgggaagttggttgaaatggagtaggtagagttgatctagaaaatggattgggtagtatctagtaccttataaagtggcctattgttcatttgmccatttacagttaaacgttttaaaacaggaaataaaattactagaataagatctatacaaattgttttatcacgattttgagaattttattttgaaagcc

SEQ ID NO: 197394 - DNA, 201 bp, Homo sapiens
aagttaaagagttatacagcaggtgtgtagatggcttcttaaattatttgtgtggatttctgtagcgactagaacttacacgagaatttgcaaaatttctmgtagaacctgcttaaattaagcatgttattttttggaagttccatagttataacgttaattgaatttacacggtgcagtttacaggtgtatataattgct

SEQ ID NO: 197395 - DNA, 201 bp, Homo sapiens
tctgtttccagagcacagcaagagagagagctaaacactcaggcgactactttactcttttaagacaccttcttaattacgcttacaatagtaatattaaygtacccaatgctgaagttcttctcaataatgaaattgattggcttaaaagaattagggtaagttttagttaatactccatttatatgtcattattagtaa

SEQ ID NO: 197396 - DNA, 201 bp, Homo sapiens
aacagggttttttgccctctaccctttatgaaaattacccttatataagtcagaaccattttgcccctctcttccctgaaacttgcatgcagtgcggtaawgtactgtagaaagcatgttatctcattatgtcaccatattgtctgcaataatagggagggcgttctaagttaggatctttttgagttttaagtacctgat

SEQ ID NO: 197397 - DNA, 201 bp, Homo sapiens
ctgtaccccttaagcaataactccccatccccccagcccctggcaaccatcattctactttctgtttctgcaagcgtgactaatctgggtacccgtgtacktggaattatgcagtattgttcttttgtgaatgacttatttcacttagcatgatgtcctcaaggttcacccatatcgtagcacctgtcagaatttcctttc

SEQ ID NO: 197398 - DNA, 201 bp, Homo sapiens
cacaggggttccagtttctccccttatccttgctatcacttgtgttttctgcctttttgattatagccatcctagtgatatctcatagtggttttggtttrcatttccctgatggctaataatgttgagtatcttttcatatgcttattgaccatttgtatgtcttacacattcagatcctttgcccatttttcaattgag

SEQ ID NO: 197399 - DNA, 201 bp, Homo sapiens
tgagctcagcgagagccccagcctgaggggagaaggggaagagggccgtcgccggccaaggaggaggaggaggcgggcgcggcgaggagcgagttccggcsccggtgtgcagccttttggttgagacgcccgcagccccgagcccggccgccgcagcctttcgatacactttgttgccggtcacccccgggcctgggatgc

SEQ ID NO: 197400 - DNA, 201 bp, Homo sapiens
ggaaaagataaataggtttagtaagtctaattccatttaatgatgcatacgtgtgggaatggtgaggataggaaagatgattagccaacagttttaatgaygtcaaacctggagggtagcaagtttgttattctatgttgaatttttaaaatcttaaattaggaacttatttcatctcttagtctactaactattaaggaa

SEQ ID NO: 197401 - DNA, 201 bp, Homo sapiens
  misc_feature (1)...(201): n = A,T,C or G
gtaccaatgatcagttttaagttaaatgtagtattaatgaaacttcagctttttactttctcttcttgtttgtatagcccctttttcctgattagattcantggtgatactaaattcgaacagttccataattcatgttttttatatctaaaaccaattactttttcccctttctatttgtaggttatgcaatggtctctg

SEQ ID NO: 197402 - DNA, 201 bp, Homo sapiens; identical to SEQ ID NO: 34051

SEQ ID NO: 197403 - DNA, 201 bp, Homo sapiens; identical to SEQ ID NO: 34052

SEQ ID NO: 197404 - DNA, 201 bp, Homo sapiens
agttgaatatggtttgaaagtaaatagaacggactggtgtaatttccagtaatgaaacaagctgatttttaacaaataatatatttgattttaaacttacygtatacaaatttttacttgtgtaaaatataatagagatcagattatttgctatgtagaaaaggtttttacaaaagtataaacagacagttcttgcatact

SEQ ID NO: 197405 - DNA, 201 bp, Homo sapiens
agtccaatgagattataatgtcgtatttttactgtaccttttctatttttagatgcacagattcaccgttggtttgcagttgtctacagtatgtagtacartaacatgctgtacaagtttacaacctaggagcaattggctataccatctaggtttataggtacactatgatgttcacatgacaaaatacctaatgatgca

SEQ ID NO: 197406 - DNA, 201 bp, Homo sapiens
tgtttagtgcacatcagattgacctaaagagtttattaacacattgctgggccccacctccagtatttctgattcaggaggtctgcattggagcctgagarttggcatttctaacaagttcccagataatgctgatgttgctgctctggggaccgtgcttttggaactgccagtacggtatacggcagcagtccccaaccc

SEQ ID NO: 197407 - DNA, 201 bp, Homo sapiens
tttcataagtaaaagtatagggattaacacagagaaacttacttgggcttttataaaacgggagtaaataatttagaggtaattattttgtgtattttatrttctagataatgtcactgcatcccagatacatctcttttctttggcaagttgcagacttaggtagcagcctaaatatgccaccccttagagatggagcaa

SEQ ID NO: 197408 - DNA, 201 bp, Homo sapiens
acccagtctcaaaaaaaatttttttttagctggatgtggtagcatgcacatgtagtcctaactagtcaggaggctgaggtgggaagattgcttgaacccargagtttgaggttacagtgagctaggatgatgccactaaacagcctgggtgacagagggaaaccctgtctaaagtaaaagggactgactgttgtgaagata

SEQ ID NO: 197409 - DNA, 201 bp, Homo sapiens
  misc_feature (1)...(201): n = A,T,C or G
gtaaaataataatgtaataaatgtcttatcttttgaagagtttaagttggttgtgatattttcattaaaagaagtaaatgtacaaaagtataatttttaantttttacatcagtagctaagaatttagatagtacgaactcttctggttacaacagagtttaattgcctaattatattgttaagttcttctcgtttcagtc

SEQ ID NO: 197410 - DNA, 201 bp, Homo sapiens
ctcccaagtagctgggattacaggcgcccaccaccaagcctggcttattttctgtatttttagtagagatggagttttaccatgttggccaggctgatctygaactactgacctcaagtgatccacccgcctcggcctcccaaagtgctgggattataggcatgaggcaccatgcctggccttattttcaagatactgaaa

SEQ ID NO: 197411 - DNA, 201 bp, Homo sapiens
ttgatggattagttatttgtgaaagtcacttgattgaatacctcatttttcaatgatgccatataagcaggctgctaagtcttttttctggttgttgttgkgagacagggtctcacccaggattctctacttaaatatgactgttgttaattgagtgctacaattaaattagccattgccatctttaattggagtgcagcg

SEQ ID NO: 197412 - DNA, 201 bp, Homo sapiens
taacttttttattgctaacattctatgacttacgggtttcgcattataaaaatggcaaatgtatgggtgcagcaaaccaacatggcacatgtatacatatrtaacaaacctgcacgttgtggacatgtaccctagaacttaaagtataatttaaaaaaaaaaggcaaatgtagtttacattaagtccataactaaaatgtt

SEQ ID NO: 197413 - DNA, 201 bp, Homo sapiens
cttaccccactacattctacagggaaagcacattctttttttcctactttttccatgtaattgaggaataaaatctcggttttatatactgttgtttgtgrtcttgttgcttttttttcccctgaaaaatatagttgtacatattgttctgtgaatgttacatgttacatgttttatttcattcatttcttaggctttggg

SEQ ID NO: 197414 - DNA, 201 bp, Homo sapiens
gcagccttttgttatgtccagagtctaaattgtatatatgagagaaatggtttaatagaacaggagaggagctatcacaaaaaaatgactggaagtgactwgatgatgtatttgatctgcactattaaggatttgtagggattaaaagatgggaaagtcagactatttcaaagagtagaaatttcataagtaaaagtatag

SEQ ID NO: 197415 - DNA, 201 bp, Homo sapiens
cccagtgatagtgttgactctttattcttccatttatcccctcggggccaatagattgttagagctagacaagcaatctaaatgttaggcagctgatgagsaacagacagtgatcttagcattttagtcttaggttccttctaagcagtgtaatagaatgatcaaggcaatacaaccatgtgatttatgttctataccaaa

SEQ ID NO: 197416 - DNA, 201 bp, Homo sapiens
ttacgattgatcgctaccttcttaggaatgtacttggctcattttcaacctttatgtcctttaccaccacctttagctttttaaaaggaaacttgttttgkctaagtctgttcttactttatagttcttttataatgccaagcctatgttttgtaagtgcttcaagactccatgaatttaaaaaacataagagtagagatg

SEQ ID NO: 197417 - DNA, 201 bp, Homo sapiens
ccccattctctttgttaaatagatttttgttctctgctttgggagctctgcctgccttttttacgattgatcgctaccttcttaggaatgtacttggctcmttttcaacctttatgtcctttaccaccacctttagctttttaaaaggaaacttgttttgtctaagtctgttcttactttatagttcttttataatgccaa

SEQ ID NO: 197418 - DNA, 201 bp, Homo sapiens
tgaaataattttgagtttataacatttttaatttttaagtttatatctgcctctgtcctttttctctccttgtacgtgtgtttctttattttgattttggygattatttttaaatgtagttgtcattctatttattttcttagtcaaatatacattttttgtgttcttcactgtactaaaagatggcccatttagagtaag

SEQ ID NO: 197419 - DNA, 201 bp, Homo sapiens
agtttcttaagaaaacctcttgaagtagtcctttaagtcccaatctctgatgaaatatgcattcctgaaagtagagtgtttatgcctgtttgcatattccratatatgtggaattagaaagtagtttggtcgtaatatatggggcttttttctttaccaaagcatcaaaaccaaatatgtttccagacattatgaatgtcc

SEQ ID NO: 197420 - DNA, 201 bp, Homo sapiens
ttcaatgtttcaaagttgttttcctgtttttctttcagaaaatatttccaacttacgtatttctttcagtaactagtttaacatttttagtgagtgaatgwacagttaagaccattataggccgggcacggtggctcaggcctgtaatcccagcactttgggaggccaaggtgggtggatcacctgaggtcaggagtttga

SEQ ID NO: 197421 - DNA, 201 bp, Homo sapiens
ggggacattcgaaccatagcagtaactttactcataaaacttttcccatattgcttagcagcatccctggtctctactcactaaatgccattagtaccctrcccttccccaagcatgataaccatgttgtattacaataccattttagaggttttaaaaaaatgtattttagagtttttaattgggtgtcttctaaattga

SEQ ID NO: 197422 - DNA, 201 bp, Homo sapiens
ccactgagtgttaactttgattcagatctctcaaatgagtaaactataattcaagaccattaaatgatttgcttagaattcactacttctgaccgggtcaygctggtaatcccagcacttcaggaagccaaggtgggaggattgcttgagcccctggagtttgagatcagcctgggcaacatggcataactctgtctctac

SEQ ID NO: 197423 - DNA, 201 bp, Homo sapiens
ttatatttactccgaagcaacacagtgcagcaggtgttactcccatctgatcagtaagaaacccaagattccaatggcttaaggtagcttgtttgaaataycacagccagtatacgatggaattgcactactcaactaggtctcttttacttaagtctgtgctcttcctattagaccggtagtttttcaaacttacgtagg

SEQ ID NO: 197424 - DNA, 201 bp, Homo sapiens
gcctcagacttaagcagggagaacaaagggagagggtggtttgtacagggtttcttcttggggtgaggaaaaatgtagacttagattgtgatgatgattayacaactgtactaaaaaaattgaattgtatttaaatggatagattttatggtactttatgactcgatgttttttttttaaatgaacttttaaaataagttc

SEQ ID NO: 197425 - DNA, 201 bp, Homo sapiens
aactcctggcctgaagcaatactactgcctgggttgggcttcccaaattgctgggattacaggcatgagctaaaacttgattttctttccagtttcttaaraaaacctcttgaagtagtcctttaagtcccaatctctgatgaaatatgcattcctgaaagtagagtgtttatgcctgtttgcatattccaatatatgtgg

SEQ ID NO: 197426 - DNA, 201 bp, Homo sapiens
ttcgtcaggtggcacaggagcagttctttttaatgtgcaccagatgttgcatgggacaccggcctctacttttcttcattactctactctttactgttttrggggtgagactttttaaaatatgcttatcaatgtgattcattctttaagcaagaaacattcagaaatttgtggttttagcttgcattaaagttaggacag

SEQ ID NO: 197427 - DNA, 201 bp, Homo sapiens
taggccagttggacaaatgcgagtaaaaagcaacgtgaaaagctacttgagctgatacgtcgtcttgcagaagatgataaagatggtgtgatggcacacaragtgttgaaccttctgtggaatctggctcacagtgatgatgtgcctgtagatatcatggacctggctctcagtgcccacataaaaatactagattacagt

SEQ ID NO: 197428 - DNA, 201 bp, Homo sapiens
gtgcttgtgcttttagtttttatatcccttgatcaataatgagattgagtatctttctgtatattttttgagctatttgcctttttttttttttttttttkggtgaatgcctgttccccccctccccccaccgtggcattatttgtatattttttggattgtagttcttgatatattttgaatgctaatccttgtcagttc

SEQ ID NO: 197429 - DNA, 201 bp, Homo sapiens
ctaataaacactgatcagcaacttagtgcatttgctgctgctataacagaacaccacagactgggtaatttataaagaacagaattttatttggcttatgrttctggaggttgggaagtacaagaggcatggtgccagcttaaccgtgagttttgggggggacattcgaaccatagcagtaactttactcataaaactttt

SEQ ID NO: 197430 - DNA, 201 bp, Homo sapiens
tgtgcttgtgcttttagtttttatatcccttgatcaataatgagattgagtatctttctgtatattttttgagctatttgccttttttttttttttttttttggtgaatgcctgttccccccctccccccaccgtggcattatttgtatattttttggattgtagttcttgatatattttgaatgctaatccttgtcagtt

SEQ ID NO: 197431 - DNA, 201 bp, Homo sapiens
ctcttactaggattgtttggaaaattaaagagataatggataagcaataatagtgcctagcacatgataattgttaataaataaaagtaaaaaatagagagcctttttacccaaggtcaaaacataattctgtggcaaaattgggataaagaatccaaagatcctaaaattggtcctgtactcaccctaccatggtgattg

SEQ ID NO: 197432 - DNA, 201 bp, Homo sapiens
tctcttactaggattgtttggaaaattaaagagataatggataagcaataatagtgcctagcacatgataattgttaataaataaaagtaaaaaatagagagcctttttacccaaggtcaaaacataattctgtggcaaaattgggataaagaatccaaagatcctaaaattggtcctgtactcaccctaccatggtgatt

SEQ ID NO: 197433 - DNA, 201 bp, Homo sapiens
atctcttactaggattgtttggaaaattaaagagataatggataagcaataatagtgcctagcacatgataattgttaataaataaaagtaaaaaatagagagcctttttacccaaggtcaaaacataattctgtggcaaaattgggataaagaatccaaagatcctaaaattggtcctgtactcaccctaccatggtgat

SEQ ID NO: 197434 - DNA, 201 bp, Homo sapiens
gacttaggtagcagcctaaatatgccaccccttagagatggagcaagagtacttatgaaacttatgccgccaggtaagaatttttaaatgatgatcaagtrcttgctggacaataaaggagtatattagcaaattctgtttctaaatggaccgtgctttttggtatagactataacaagagttgacagatgacagcccaca

SEQ ID NO: 197435 - DNA, 201 bp, Homo sapiens
tctttcggattttttggttggtatatcactaagttttgtgttttgtgtaagtatttttccttgtttttgatattaacatagtatataattttcagcttatyacagccaaacttacacagataagttccaatatgccttcaagccctgatagctcttctgattcctccactggatctcctggaaaccatggtaatcattaca

SEQ ID NO: 197436 - DNA, 201 bp, Homo sapiens
aacaggtaaacaggagtcagtttatgcttttatcccctagaactgggttttatgcttaattttagaggatggctcaattgtttgttgtgactacaaagtamgaagtaggattatctagactagctttgggagcatgatccagaagagggatggtttggagtgggggtcatggtgtaacatgtttgaacttaaccactgtag

SEQ ID NO: 197437 - DNA, 201 bp, Homo sapiens
ggtttcaccatgtttgccaagctggtctcaaactcctggcctcatgtgatccacccacctcagcctctcaaagtgctgggattacaggcgtgagccaccaygcctggccattaatgataattttaaatcagaggttttcaacctttgtgtatctaaatcacttggggacctttagaaaaatgcaaataattgggactcttc

SEQ ID NO: 197438 - DNA, 201 bp, Homo sapiens
gtgtctacactgtggtatcaaatagggtagtcactacccacaagtggctaattaaatttaaattaattaagattaaatgaaacaaaattcagttcctcacytggactgggcacatttcaaatgctcagtggccacatgtggatatatgggacagtgcagatagagaacattttcatcatttcacagagttctgttgacagt

SEQ ID NO: 197439 - DNA, 201 bp, Homo sapiens
acagctccattttgtgagctctaggaccaaaccaatcaatactatttgatacatcttttgggcagagaaacatgagaaactctgtgacaatatcaaggtastatagataaggtacatgttcttgagaaacttatggtctaaacaggtagagcaagcaaatatgaaagaaatcttaggggctcatactgaaatataaacagg

SEQ ID NO: 197440 - DNA, 201 bp, Homo sapiens
gatagcttcccaatacttaaaagactttttgagtaagattggtagtgatattaatgaatgtgtgtttttttttttaaggattgtagaatgaaatgtatcartgttaggaagatttgcataactcagtgaaccaattattttccaatagatgatgttatgaaatcatgcttggataacagccattcaaagtgcatgttaaac

SEQ ID NO: 197441 - DNA, 201 bp, Homo sapiens
gcaattcagcctgacaccttgccacctgatccctcttcctgcattagaggaagaggaagagaaggctgtatttaggccagactccttgtttgtgatttctytcctttggtaccaccttgatccgtccatacttacgtaggccgggggaagaatgagctccctgactttttttttaatgatttttattttattgtggtaagc

SEQ ID NO: 197442 - DNA, 201 bp, Homo sapiens
aatggagactttccactgcataaatgccatttaggcctatcttcctctttagtgatcaaaggtcagctgacattttagccaaagcacacatggagacttcraaaggaagagaaagaaaagttgagttgcaccaaaactggagctgtaaagttccttattttggcaggaatcagagaggataacaagatactttatttggaa

SEQ ID NO: 197443 - DNA, 201 bp, Homo sapiens
ccttttctgtaactctgcctagaaccctggcaataactgggggagtccctcttcttgctgctactgcaaagctcagtctccattgccttaggcctgttttytcagccccagccagtcacatcatttccacttgacctttgcaattcagcctgacaccttgccacctgatccctcttcctgcattagaggaagaggaagaga

SEQ ID NO: 197444 - DNA, 201 bp, Homo sapiens
ttgaactattgtctgaagaatgtcttttgtagctattgaaaggtggtgccttcatgttcctttaccatctggaaataactgaatgagaggttctgtgtcarcaattggcttggtactggccttccataggtgtttcaattctgtttaattaaagcaagtcaaagagaagcattgcttttggttagaatgctctttagcata

SEQ ID NO: 197445 - DNA, 201 bp, Homo sapiens
ccaggcgtggtggcgggtgcctgtagtcccagctacttgggaggctgaggcaggagaatggcatgaacctgggaggcgaagcgtgcagtgagctgagatcrtgccactgcactctagcctaggagacagagcgagactccatctcaaaaaaagaaaaaagaaaaaaaaagatatatgtatatatataaaatattgtagaaa

SEQ ID NO: 197446 - DNA, 201 bp, Homo sapiens
ttggctttaaagacaatgttggatgagcagggcagatagctttttttttttttttttttttttgagatggagtctcgctctgtcacccaggctagagtgcrgtggcacgatctcagctcaccgaaacctccgcctcccaggttcaagcgattctcctgcctcagcctcctgagtagctgggattacaggctcccaccacca

SEQ ID NO: 197447 - DNA, 201 bp, Homo sapiens
actatagataaggtacatgttcttgagaaacttatggtctaaacaggtagagcaagcaaatatgaaagaaatcttaggggctcatactgaaatataaacagggaatattgacgtccacattttagaacagaaggaagaggccttttcaaatcattctgggtactaccagtcagcattgttgggtagaggctttttaagaac

SEQ ID NO: 197448 - DNA, 201 bp, Homo sapiens
tactatagataaggtacatgttcttgagaaacttatggtctaaacaggtagagcaagcaaatatgaaagaaatcttaggggctcatactgaaatataaacagggaatattgacgtccacattttagaacagaaggaagaggccttttcaaatcattctgggtactaccagtcagcattgttgggtagaggctttttaagaa

SEQ ID NO: 197449 - DNA, 201 bp, Homo sapiens
ctggaaataactgaatgagaggttctgtgtcagcaattggcttggtactggccttccataggtgtttcaattctgtttaattaaagcaagtcaaagagaarcattgcttttggttagaatgctctttagcatatacagatgaaatgattaggttcttatgtgcaatagaacagttcagagatttttgatggtgaaattgaa

SEQ ID NO: 197450 - DNA, 201 bp, Homo sapiens
tgtggtttttttttttttttttttttttttttgagacagagtcttgctctgtcgtccaggctggagtgcagtggtgcgatctcggctcactgcaagctccrcctcccgggttcacgccattctcctgcctcagcctcccaagtagctgggactacaggcacccgccaccaggcccagctaattttttgtatttttagtaga

SEQ ID NO: 197451 - DNA, 201 bp, Homo sapiens
tggagcctggggaggtagagaatgcagtgagctgggatcacgccattgtactccagcctgggggacagagtgagaccctgtctcaaagaaaaaaaaaaaaagagaagaaaaacagcagacagtagcaaccagggcagcatatatattcacttatgtcccgtaggagacagaaaggctttccatgactctcttctaagaatg

SEQ ID NO: 197452 - DNA, 201 bp, Homo sapiens
tccttggggacgtggcgccgccgccggccgggccctccttccggctgggcaaggggccgcggggagcagctcgggactgaaccgagaggtgccgaaggaamcggcgggccgcttgatcccgtgagtgtgggcgcgagagggctgtgggacccggagggacggggagaggaagcgggacccacaccccgccacctggggacg

SEQ ID NO: 197453 - DNA, 201 bp, Homo sapiens
ggacttgctgtggcttgaagaggtggtgcccatgatgggagtacaggtggggccgtgaggctggaccaggactagagaagcttgagcacccccgagttgcygctcattgaattcctccactttcttatatagcctcagatgctgtgatgtctgaccttgtggatatttgcccttggaatttctactttactttctaccgta

SEQ ID NO: 197454 - DNA, 201 bp, Homo sapiens
tgtatcagtgttaggaagatttgcataactcagtgaaccaattattttccaatagatgatgttatgaaatcatgcttggataacagccattcaaagtgcaygttaaacccatgttttttaatggattttaatgtaacagagtatgaaaagtttttagatagggttttagattccaattgcaactcatctttttttaggggg

SEQ ID NO: 197455 - DNA, 201 bp, Homo sapiens
aaatatagatagatacaacctatgtctatgaaagctctttggggttcaataagttttaagattataaaggagtcctaaggcccccaaatttgagaaccagygcactagagaaaagttattcattatgcagaaggggatgggatccagaatcttgcaagagacaagcagagtgggtggttttcagagaagggaagcaggaag

SEQ ID NO: 197456 - DNA, 201 bp, Homo sapiens
tgtggttttgtctaacgatgtgaaatcaccaataaacactggctagattggtttcaggagcgtgatgcgtggtttgttgttctgattgggggtggttttaytgtgaagctaatgatccctataccttaaagcccctcacttacatgggctttttttctatttgtaatgctgaatcttgtttttaaaagaaggctttccaaa

SEQ ID NO: 197457 - DNA, 201 bp, Homo sapiens
cccatgacttgctggacatcaaacagatgagagaccgcaacagccaaccagtggttaaaaaaatcaagccaggtactaatcagaatatattttgttgtcartctcttttaaggcatgaaagaggagacaaaagaagcagaaagcaagctacccctttcttcttgagagtctgggtaatgggagggatatctctttcattgt

SEQ ID NO: 197458 - DNA, 201 bp, Homo sapiens
cagtttatgagaagagagtttagtgactaactttgggattttttgttctttcttgcaggaagcagttggctatcttggctgacctagtgaaagatttaccmctggagtttgacttcctcttttcacagtctcaagcagaagtgatctctgggaagcaggaaggtactgggccttaaggggtgcagctggttaacctctaag

SEQ ID NO: 197459 - DNA, 201 bp, Homo sapiens
tagattttcctgattttctcaagaatgtttattcgtagtgggcttgttcaaatcagaatctgaacaagggtcatgcattgcatttgattaatatgtctctwtagtctcttttaatctataattgttaaccttaccacctcactcccctgcctttaaaagcaagaaaaaattggatcacctggtagaaagaatttgccacat

SEQ ID NO: 197460 - DNA, 201 bp, Homo sapiens
gtgaaaaaggaataataatagtatctacctcataaagttatgaggatgaaataataccatgtttgtaaagcatttagcaaactgtccagcataagtgttcratacattttaacaattataactatactaggtatctcctgccattgctgaggataaacatgataatgcatttacattctggagcacagtatttgatacata

SEQ ID NO: 197461 - DNA, 201 bp, Homo sapiens
taaagcatttagcaaactgtccagcataagtgttcaatacattttaacaattataactatactaggtatctcctgccattgctgaggataaacatgataaygcatttacattctggagcacagtatttgatacatatctattgttcaataaatgttattccctttccccttactgatgattccattctgggccttctaata

SEQ ID NO: 197462 - DNA, 201 bp, Homo sapiens
cctgagtcttatgtgagccgctttttaaagaaagttttgtctgtttgtttgttttaacttaaggaatctctgcaatggcagacactccagaacatgccagkgattaccttcgtcctctgctgagctttgctgctgctcatgtgcctgtgaagaagcacaaggagacccctctttacatcctctgcacagcaggcatgaggc

SEQ ID NO: 197463 - DNA, 201 bp, Homo sapiens
tcagtcattggctccctgcggtttccttggggacgtggcgccgccgccggccgggccctccttccggctgggcaaggggccgcggggagcagctcgggacygaaccgagaggtgccgaaggaaccggcgggccgcttgatcccgtgagtgtgggcgcgagagggctgtgggacccggagggacggggagaggaagcgggac

SEQ ID NO: 197464 - DNA, 201 bp, Homo sapiens; identical to SEQ ID NO: 34123

SEQ ID NO: 197465 - DNA, 201 bp, Homo sapiens
gaaataacccacttagaggtgaggaaggtgaagcgggaggaggtaggtcttttaataacttgtgggaatatggagtggcttattgcaaaggaaagtattasaattcttttctctttttttaaaatttaattatttttgtcacacagatatcagtgttttaaatcggcttggatgtaccaagtcttacatgaaggattccac

SEQ ID NO: 197466 - DNA, 201 bp, Homo sapiens
ctccgtcagcgggtggcattcctgggactcttcttcatatcctgtctccttttacttatgttaatcatagactttcgacattggagtgcttcattaccacragataggcaatacgaaaggtgagtcagctttagattttggcactcaagtcataaatattttcataagctgtttaacacactactgactttgacccttttg

SEQ ID NO: 197467 - DNA, 201 bp, Homo sapiens
gggcaatgctgagccccctgctggctcgctccaacaccagccaggcctcactcaatggcatatatcaatcgcctattgacttcaacaacagcgagttctayggcttctctgagtttttttattgtacagaggatgtgttgcgcattggtggccgctaccatgggccaacatttgccaaggctgctcaggtaaattattaat

SEQ ID NO: 197468 - DNA, 201 bp, Homo sapiens
ttactaatgtttgtctaatttcaggatcagtttttcctacctctgcccagcctcctggtacttcactgtgcccacagtgagtccatttctccgtcagcggrtggcattcctgggactcttcttcatatcctgtctccttttacttatgttaatcatagactttcgacattggagtgcttcattaccacgagataggcaata

SEQ ID NO: 197469 - DNA, 201 bp, Homo sapiens
taaaaacttataatttatctgtcagtggagacagcttgtgatatcagggagactgtagcagtgcttaacttgatctaaaccagggcttctcatcgttggcmctcttgacattttgggtcagataattctttgtcatcaggggttatcccatgcatcatatgatatctcttgcctataccagatgtcagtaacaaccctccc

SEQ ID NO: 197470 - DNA, 201 bp, Homo sapiens
cattaccagatgtgtggggcagggtggaaattgcccatcattgagaacatctggtttaaacagagagctgtggcaatatggggactggcagccaacttagyttgcaaagttgaatgggagccattcttgcttcatggaaggtaaagtatttacctgggccttggatgagagtaggcttttttttttttgcagagtggaggc

SEQ ID NO: 197471 - DNA, 201 bp, Homo sapiens
tattgtcctgagagatctggatgagagcgtctatctggtcttctagttcagaagttgtaaaactaatgacttcaattttggatatattgagtttaagatayccaaggaacatatatgtcagaatatccacaggactgttggaaatgtgagtttagcagtcagcagagaatttcatgctggggttggaaatgtgggggacta

SEQ ID NO: 197472 - DNA, 201 bp, Homo sapiens
acaatatgtggtgttttatgtctggcttcttttatttagcaaaatgttttcaaggttcagccatctcgtggtatgggtatttcattcctttttaatggctraacagcattccattgtatgaccaaccatgctgtattttgtttatccatttatcagctgatgaacatttcagtggttttccctttttggctattatgcaca

SEQ ID NO: 197473 - DNA, 201 bp, Homo sapiens
aaaatacagaaaaatacatgtgagaaaatgatatctgtagtaattctacctcctatataactacagatagtgttttgggtttctaatttcatatttagttyttaatttagtgtctaatttgtaccttttagtgcagtcttgtcattttgtgtctttgtttaaaataatgctatgaggatgaaagaatgcttaagatgtttt

SEQ ID NO: 197474 - DNA, 201 bp, Homo sapiens
tgtctcctgcaggcaccatgatgtttgaagatcatttgttttgaaagtttcacaccagttttggttttccttcttcattagctgctgtgcttccttttccrttttcttcttttgttctactcctttcttttctgtctgctgttttctgctgcctccaaactacttcttgccagactgcatcttcttcccatgcgttggtat

SEQ ID NO: 197475 - DNA, 201 bp, Homo sapiens
aatgtcacctccagtatttttcctcttgctagctattttctgttgtaatgtgcttttggagatgatatcacccagaggggcaagcccatctttcttttggkttgaggtattaagaggcagagtggtatggggtccctgggaatattagatgttgtaaaaagcaatgatggtggaagtttgtttagatttaaaatagaggag

SEQ ID NO: 197476 - DNA, 201 bp, Homo sapiens
gtcagcagccaggcaggcgacagaagtgagggaagtgggctaggtgggggttgcccacaactggagcatgtatcccagttaatgggctggttactgtcacrcacaagcactgtcccagcatttgccagttctcatctgtccagaaaagtcagaaatccatattttttatgaagtctttcagtttagagattcgcattctag

SEQ ID NO: 197477 - DNA, 201 bp, Homo sapiens
acatttatcagctcctggcccatcttgtttttatctgttttcccatccacaatccccctcttacttcaactgggttgttttgaagctaatcccaaacatcmtataattacatttgtagatattttaatatgctctctgaagatagggactcttaaaaaaaagaaaaagaaaaacacagccacagtatcattattgcctttg

SEQ ID NO: 197478 - DNA, 201 bp, Homo sapiens
tggtaaacacaagataagtaggctgacttagaaataacccacttagaggtgaggaaggtgaagcgggaggaggtaggtcttttaataacttgtgggaatayggagtggcttattgcaaaggaaagtattagaattcttttctctttttttaaaatttaattatttttgtcacacagatatcagtgttttaaatcggcttgg

SEQ ID NO: 197479 - DNA, 201 bp, Homo sapiens
tgcaagaatttaatatgtataacaatgaactttttttaagaaactatacttgacattatactggaagattattacttcaaatatagatcttcactttgaastgctaacaacattcttcatcaagtagtactgacaactgtctgagccagcagaatatttttgtattgaatattttttaatccaagataacttgtcttattt

SEQ ID NO: 197480 - DNA, 201 bp, Homo sapiens; identical to SEQ ID NO: 34120

SEQ ID NO: 197481 - DNA, 201 bp, Homo sapiens
gcagacatacaaaccaaaaggaatgattattttggtgagaattacaacaccgagggaggccaatgacaggtttctaaccatcctcttccatctgctctccstgctcatgtcagtcctatgtggagtagaatgaaactatctttgtcttttgacgttgctatttgttagtcctaacctcagcccctctgaagcctaagaggc

SEQ ID NO: 197482 - DNA, 201 bp, Homo sapiens
ggccgcggggagcagctcgggactgaaccgagaggtgccgaaggaaccggcgggccgcttgatcccgtgagtgtgggcgcgagagggctgtgggacccggwgggacggggagaggaagcgggacccacaccccgccacctggggacgaccggttcctagaggacagagctggcccacgagaacgccccgctcccaggatgc

SEQ ID NO: 197483 - DNA, 201 bp, Homo sapiens
gcttggtaaaaatgaaagaaactgtgagacaatggcatttaaaacattttaaataatcctgaatgcctaatatatttttttgtacaactcacaaagttatrtacattcacaaagttgtgcagccaccactattgaattccagaacatttcatcgccccaaaaagaaaccccatattcactccccactcatttcccattagc

SEQ ID NO: 197484 - DNA, 201 bp, Homo sapiens
acctaacctaacaaatgtcatagcttagcctagcctactttaaaggtgctcagaacatttacattagcctactgttgtgcaaaaccacctaacagaaggcrtattttataataaagtattgaatatctcatgtaatttattgaatactgtactgaaagtgaaaaacagaatggttgtgtggatactcacggtatactttct

SEQ ID NO: 197485 - DNA, 201 bp, Homo sapiens
tggagtgcagtggcatgatctcagctcacttcaacctccacctcccaggttcaagcgattctcatgccttagcctcccgagtagctgggattacaggtgcrcaccaccatgcccggctaatttttgtatttttagtagagacagggtttcaccatgtttgccaagctggtctcaaactcctggcctcatgtgatccaccca

SEQ ID NO: 197486 - DNA, 201 bp, Homo sapiens
ttgtttgtttgtttgtttttgtcattgtggcagattgcttggtcagaagacaggtctgagtcccgacaatccatttctggatccctgcctgccagtgggaytcacagatgtggtggagaggaacagccaagtcttacatgtccgaggaagaggagactgggtgtcttgtggggcaatgctgagccccctgctggctcgctc

SEQ ID NO: 197487 - DNA, 201 bp, Homo sapiens
acccaggaattggcagcaggacggagaaggacagtagggatactggatatgggaggagcctctctccaaattgcttatgaagttcctacctcaacctctgyccttcctgcaaagcaggtactttaccttttagggaaatttagttgctaggaatgctagtatttgagaaggaaggacactgtctttggacttagaccaacc

SEQ ID NO: 197488 - DNA, 201 bp, Homo sapiens
gccttggatgagagtaggcttttttttttttgcagagtggaggctgagggaaggccacctgcatggagggaacactatatacaaaggcacagaaaaagcarcacagaggccagaatgtccagggaatgacgaatagccttttgcagtataggattttcaggtgtgctagtagttaagactgggaagataagatggagctaa

SEQ ID NO: 197489 - DNA, 201 bp, Homo sapiens
ttatttgtttactcacaacaaaccagtctttaggactgagctcttactaatcacttccaagatactgacaagctaaaatgtcattcttgggttaccctggraaacacatctgactaaagaacaggggtaggatgtctagagcaatctttcataacatacagaggcactccagacattgtgtcattgacttagaaggctttt

SEQ ID NO: 197490 - DNA, 201 bp, Homo sapiens
gaaaaagcagcacagaggccagaatgtccagggaatgacgaatagccttttgcagtataggattttcaggtgtgctagtagttaagactgggaagataagmtggagctaaatcatgagcagtattgagtgctatcataaggggactggcttttatttccatagatagtggaaaaccaccaaaagtttttgagtaaggcagt

SEQ ID NO: 197491 - DNA, 201 bp, Homo sapiens
aagaagctgccaagatcctgctggctgagttcaacctgggctgtgatgtgcaacacactgaacacgtgtacagggtttatgtcacaacttttctgggtttyggaggcaactttgcccggcagcgctacgaagaccttgttctgaatgaaactcttaacaaaaacaggtacatttgatatgggatctgagtttctgaaatat

SEQ ID NO: 197492 - DNA, 201 bp, Homo sapiens
atgacgaatagccttttgcagtataggattttcaggtgtgctagtagttaagactgggaagataagatggagctaaatcatgagcagtattgagtgctatyataaggggactggcttttatttccatagatagtggaaaaccaccaaaagtttttgagtaaggcagtcacatgggcctcagtttcatttataaaataatta

SEQ ID NO: 197493 - DNA, 201 bp, Homo sapiens
tgattattccagacttgattttctcagggataggggccaaaatagtgagcctattatagcaaagccagaagaaatcagtggttaccaaacagagttctcawcaagtgatttgacaacaaaagtgatttttttttttttttgagacagagtctcactttgttgcccaggctggagtgcagtggcatgatcttagctcactgc

SEQ ID NO: 197494 - DNA, 201 bp, Homo sapiens
agtagagacagggtttcaccatgttggtcaggctggtctcaaactcctgacctcgtgatccgcctgcctcagcctcccaaagtgctaggataacaggcgcragccactgcggccggcccgtgattctattagttcatttttcttttctttctttctttctttctttttttttttttttttttttttttgagacagagtctc

SEQ ID NO: 197495 - DNA, 201 bp, Homo sapiens
ggactaactaggttgtgatactttttagtctatattcgttagtatgtatttaacaggtaaaacgaaggcatggatctgatactaagaaataggtgacaagygggactggggcttcaagtcttaaagaaatgacttttgtgtgtgtgcagatttagaaaggaacatggttatggaaagcaacactggtacggaatgcatact

SEQ ID NO: 197496 - DNA, 201 bp, Homo sapiens
gtgcatgttaaacccatgttttttaatggattttaatgtaacagagtatgaaaagtttttagatagggttttagattccaattgcaactcatctttttttrggggggtggggtggggtggggtttagattccaattgcaactaatttttttttttttttttgagatggagtctcgctctgttaaccaggctggagtgcagt

SEQ ID NO: 197497 - DNA, 201 bp, Homo sapiens
ggacgtgagatgtttttagtggggctactttcatcaaactctggtagcctgataccttacttttatgtactgtcagatatttgggacaatttttaggtactctgtaccctggactatttcagataaactcagatgaattttgtatctttgatgtctgttcctctaaactcaataccgtcagcagccaggcaggcgacagaa

SEQ ID NO: 197498 - DNA, 201 bp, Homo sapiens
accaaaagtttttgagtaaggcagtcacatgggcctcagtttcatttataaaataattaaactgtgaaggtccttctcagctctgaattttgtgatgatgtcagttgtgtgactgtgatctgatctttttgtagtgaaaaaatttttgtgtcagtaggagaaagaatataggtcacggaaccttgagtgagaagtaataaa

SEQ ID NO: 197499 - DNA, 201 bp, Homo sapiens
caccaaaagtttttgagtaaggcagtcacatgggcctcagtttcatttataaaataattaaactgtgaaggtccttctcagctctgaattttgtgatgatgtcagttgtgtgactgtgatctgatctttttgtagtgaaaaaatttttgtgtcagtaggagaaagaatataggtcacggaaccttgagtgagaagtaataa

SEQ ID NO: 197500 - DNA, 201 bp, Homo sapiens
accaccaaaagtttttgagtaaggcagtcacatgggcctcagtttcatttataaaataattaaactgtgaaggtccttctcagctctgaattttgtgatgatgtcagttgtgtgactgtgatctgatctttttgtagtgaaaaaatttttgtgtcagtaggagaaagaatataggtcacggaaccttgagtgagaagtaat

SEQ ID NO: 197501 - DNA, 201 bp, Homo sapiens
gcagccaacttagcttgcaaagttgaatgggagccattcttgcttcatggaaggtaaagtatttacctgggccttggatgagagtaggcttttttttttttgcagagtggaggctgagggaaggccacctgcatggagggaacactatatacaaaggcacagaaaaagcagcacagaggccagaatgtccagggaatgacg

SEQ ID NO: 197502 - DNA, 201 bp, Homo sapiens
cctgacaccttgccacctgatccctcttcctgcattagaggaagaggaagagaaggctgtatttaggccagactccttgtttgtgatttctctcctttggkaccaccttgatccgtccatacttacgtaggccgggggaagaatgagctccctgactttttttttaatgatttttattttattgtggtaagcatacaacat

SEQ ID NO: 197503 - DNA, 201 bp, Homo sapiens
tgacccttgaatgctgaagggacggagaaaccaaaggaggaggcaggcaaattgttcgttggtattcattgatttattgagggaatttgcagacagaagcrtggccctgggtagctgcaagacagatagatctccatactgttactccccagacccagggcttatatagtacagggagatggtatatgcaccctgtgcaag

SEQ ID NO: 197504 - DNA, 201 bp, Homo sapiens; identical to SEQ ID NO: 34141

SEQ ID NO: 197505 - DNA, 201 bp, Homo sapiens
ggggtggctctgccacctttgtgctcaacgggaccttggccagttacccgtcagatcactggtaagcacgtgagagccgccttcgtgagggctgaagtccrggtctgccccagcctgtctcattcagccaatattgagtgcctgctatgtgccaggccccgggggttcaagagagcagaaattgctgcagtccctccccca

SEQ ID NO: 197506 - DNA, 201 bp, Homo sapiens
agtagagatggggtttcatcatgttggccaggctggtctcgaactcctgacctcaggtgatccatctacctcggccttccaaagtgctggaattaacaggygtgagtcaccgcacctggctaatttttgtatttttagtagacacagggtttcatcatgttggccaggctggtcaacttggaatgttctatgttcagggtg

SEQ ID NO: 197507 - DNA, 201 bp, Homo sapiens
gggtgtcccatggacaaaaccaagatgctggttaggcagggctcttctcttatctggaaagaatcctcttgtttaggttgttggaagaatccccgtcgccycctcagttgtgactgaggtcttggtttccctgctggccgccatctggggcctcagctccttcaagctgcccaggttccttcccatgtgtgtcctctcccc

SEQ ID NO: 197508 - DNA, 201 bp, Homo sapiens
ttatctggaaagaatcctcttgtttaggttgttggaagaatccccgtcgcctcctcagttgtgactgaggtcttggtttccctgctggccgccatctgggrcctcagctccttcaagctgcccaggttccttcccatgtgtgtcctctcccccagttgtccggccaccctctcatccccctcgtatttcaaatctcacttc

SEQ ID NO: 197509 - DNA, 201 bp, Homo sapiens
gccatcaacctggatgggggtggctctgccacctttgtgctcaacgggaccttggccagttacccgtcagatcactggtaagcacgtgagagccgccttcrtgagggctgaagtccgggtctgccccagcctgtctcattcagccaatattgagtgcctgctatgtgccaggccccgggggttcaagagagcagaaattgc

SEQ ID NO: 197510 - DNA, 201 bp, Homo sapiens
gttcgggatccgccgcgacgggaccctggtcaccgggtgaggaggcagggagccccgtgctgtcgagggcagagggcctgagatttgggttgtagccgtgyctccgtgttcaagtcacttaaccaagctgagcccctgtttcctcctctgcagaatggggataggaatcgcttccttgcagagtttattcatcatccagta

SEQ ID NO: 197511 - DNA, 201 bp, Homo sapiens
tggggtgtcagaaacatcaactcatcaagactgatgatttttttttttttgagacagagtcttgctctgttgcccaggatggagggcagtggcatgatacyggctcactgcaacctctgcctcccgggttcaagcgattctcctgcctcagcctctggagtagctgggactacggacgtgtgccaccacgcccggctgatt

SEQ ID NO: 197512 - DNA, 201 bp, Homo sapiens
aaataaggtcacgttcaggggctagtccagggagggcagggggtgcttcacctttagcccggctctgtacacatgggcaggggcaggtatcctgtcctgtygagaaaggctctgacactggaggccccaacctttctcctccctcctccctcctcccatctcctttccatagagtgtccccttggctggcatgggccgggc

SEQ ID NO: 197513 - DNA, 201 bp, Homo sapiens; identical to SEQ ID NO: 34143

SEQ ID NO: 197514 - DNA, 201 bp, Homo sapiens
ttgagtctcaaaaaaaaagtatttgttgatgataaagcttgttctgatcctgagtgggaccaggtgggagagagcagtggagaaacaaggaagccaatgamgggccgtaacagggatcaagtggtagttgggctgggtatggcctggggattgagggccatagatggatttgagctctgttgggggatggtcatttctgtt

SEQ ID NO: 197515 - DNA, 201 bp, Homo sapiens
ccttgccctaggccctcacctggcctccccggtcttgtctcggcagccggctgccgctgtgatgccggatggaccgggtccaactgcagtgaaggtaggarctgccacgccactagcggatggggagacggtggcccccggcagcccccactgctcctctgctgcttctgtctccaccttctggtctgggaaatgcttgcc

SEQ ID NO: 197516 - DNA, 201 bp, Homo sapiens; identical to SEQ ID NO: 34144

SEQ ID NO: 197517 - DNA, 201 bp, Homo sapiens; identical to SEQ ID NO: 34145

SEQ ID NO: 197518 - DNA, 201 bp, Homo sapiens
agatctttgccgattccaagaactcatcatcttcagctttaggcctcacctttcctgaaccctagataggatacaaggaaatggtcacaaagtgagcaggragaagatcttggttccaatcccagcttagccatcgatgacttgtctacccacctatgccgtagacaagtccctcggcctccctgagcctcatttctagcc

SEQ ID NO: 197519 - DNA, 201 bp, Homo sapiens; identical to SEQ ID NO: 34146

SEQ ID NO: 197520 - DNA, 201 bp, Homo sapiens
gctttaggcctcacctttcctgaaccctagataggatacaaggaaatggtcacaaagtgagcagggagaagatcttggttccaatcccagcttagccatcratgacttgtctacccacctatgccgtagacaagtccctcggcctccctgagcctcatttctagcccctgtaaagagagtgttttggtttgctctggttgc

SEQ ID NO: 197521 - DNA, 201 bp, Homo sapiens; identical to SEQ ID NO: 34147

SEQ ID NO: 197522 - DNA, 201 bp, Homo sapiens
ccggctgccgctgtgatgccggatggaccgggtccaactgcagtgaaggtaggagctgccacgccactagcggatggggagacggtggcccccggcagccmccactgctcctctgctgcttctgtctccaccttctggtctgggaaatgcttgcctcttgtcttctgccccggcctcacctgcacatcactgtgtgactcc

SEQ ID NO: 197523 - DNA, 201 bp, Homo sapiens
agagggcaccacatgtgaaaggcccagggctgggagggattgtagggagcggaggaacctataaaagactggagagggctgggcacaggggctcacgcctrgaatcccagtgctttgggaggccgaggtgggaggttcgcttgggcccaggagtttaagaccagtgtgggcaacatagaccctgtctttatgaaaaaataa

SEQ ID NO: 197524 - DNA, 201 bp, Homo sapiens; identical to SEQ ID NO: 34148

SEQ ID NO: 197525 - DNA, 201 bp, Homo sapiens
caccagccagagaaggctctctgtgttgaacactcctgtgattccagtggctgcacccagatcctccgggccgtttcccctcccttaaggattcctatgcyatgtaacagcacaggcatgggtgtgatctcacgtgttcacagcttccgggggctaggatgagacatgcttgggggcgggggccacttagaaatgtgcctg

SEQ ID NO: 197526 - DNA, 201 bp, Homo sapiens
cggactgtgcacggagagtgagtgggggttctggggagggggctctgcccagccctgccttgccctaggccctcacctggcctccccggtcttgtctcggyagccggctgccgctgtgatgccggatggaccgggtccaactgcagtgaaggtaggagctgccacgccactagcggatggggagacggtggcccccggcag

SEQ ID NO: 197527 - DNA, 201 bp, Homo sapiens
aatagatagacgccatcttgtaggtaggtaggtagacaggtgagaatggagagaggggtggttgggggcagcctggagggagttgaggggccgtctggggrtgtcctctcctcacacatcacatccctctacagccaggacaacatgtggcgctgtccccgccaagtgtccaccgtggtgtgtgtgcacgaaccccgctgc

SEQ ID NO: 197528 - DNA, 201 bp, Homo sapiens
caacctggatgggggtggctctgccacctttgtgctcaacgggaccttggccagttacccgtcagatcactggtaagcacgtgagagccgccttcgtgagrgctgaagtccgggtctgccccagcctgtctcattcagccaatattgagtgcctgctatgtgccaggccccgggggttcaagagagcagaaattgctgcag

SEQ ID NO: 197529 - DNA, 201 bp, Homo sapiens; identical to SEQ ID NO: 34142

SEQ ID NO: 197530 - DNA, 201 bp, Homo sapiens
atagacgccatcttgtaggtaggtaggtagacaggtgagaatggagagaggggtggttgggggcagcctggagggagttgaggggccgtctgggggtgtcstctcctcacacatcacatccctctacagccaggacaacatgtggcgctgtccccgccaagtgtccaccgtggtgtgtgtgcacgaaccccgctgccagcc

SEQ ID NO: 197531 - DNA, 201 bp, Homo sapiens
tgaggatgacagaataagaactgagatctgaaggaggtggtagctgggtgggggtgggagagccttccgggcagagggcaccacatgtgaaaggcccaggrctgggagggattgtagggagcggaggaacctataaaagactggagagggctgggcacaggggctcacgcctggaatcccagtgctttgggaggccgaggt

SEQ ID NO: 197532 - DNA, 201 bp, Homo sapiens
caagcgattctcctgcctcagcctctggagtagctgggactacggacgtgtgccaccacgcccggctgatttttgtatttttagtagagacgggatggggkggggaacgggggagtgggttcaccatattggcctggccggtctcgaactcctgacctcaagtgatccacccacctcagcctcccaaagtgctgggatgac

SEQ ID NO: 197533 - DNA, 201 bp, Homo sapiens
agacgagcaaggaggctgctgtgcttcccagggaggtaccaggtagctcagaccagtgggaagtggagttaggcaagaagcaggaggcctcccaaggggcrgtgatcagccaggctgcttttccttcaggttcctttagcaaatttgtgaatgtgatatcagccaggacggccattggccacgaccggaaagggcagctgg

SEQ ID NO: 197534 - DNA, 201 bp, Homo sapiens
gccactgcactccagcccgggcaacacagcgagactctttgtctcaaaaaaaaaaaaagagtgggcggtcaaggaaggcctcactaaggaggtgatctgayaaaggagcaagctagagaaaagcacagttcccagccagagggaacaggaagtgcaaagtggctgcagggtggtgaggggacacccaggagctgaggcagg

SEQ ID NO: 197535 - DNA, 201 bp, Homo sapiens
atcaacaaaagccgggtaaatagctaacatacattctgattgctgtgtgtgcagcaaagcaaccaacggggtgaacccgttgtaaatagtgttgattttasggagggtgatctggaacacgcctctccgaggtgacctttgagtgggaacttgaagatgaatcactaagtgagccaaggtcagaactggaggaagagcgtt

SEQ ID NO: 197536 - DNA, 201 bp, Homo sapiens
ccaccacgccctggcaagattgatgatttgaattatttaaaattatcttaaaaattatttgagtctcaaaaaaaaagtatttgttgatgataaagcttgtwctgatcctgagtgggaccaggtgggagagagcagtggagaaacaaggaagccaatgaagggccgtaacagggatcaagtggtagttgggctgggtatggc

SEQ ID NO: 197537 - DNA, 201 bp, Homo sapiens
aagatgatcttttctggtaatgctatggtagacctagaaaacacaagagattctaatttttttaaaagctactagattaataaattcatttggcaaagtgyttagataaatatatttctcaaaaaaatcaatagcctttctccatactaacaataaaatataatgcccatataaggaaaaactataaagttatttatttat

SEQ ID NO: 197538 - DNA, 201 bp, Homo sapiens
aaaataataagaatgctgatatcactgtttttattcaacattattttagaggtcataccacatgataaaacaggaaaacaatcaataaacatattgtcaargaacagggaagatgatcttttctggtaatgctatggtagacctagaaaacacaagagattctaatttttttaaaagctactagattaataaattcatttg

SEQ ID NO: 197539 - DNA, 201 bp, Homo sapiens
ctccagggcacgtgggttatgagtcacctttcctttgagctgacccacccctcactgactagactcttaaacacacactgccccgtctaatacacaccagyatgattcttaatccccacagtcattcacgctgcccatctggcagcaccttaatgatctacagcaagcttgtggcctactaaaaacgcctccattgttttt

SEQ ID NO: 197540 - DNA, 201 bp, Homo sapiens
gtggatcactgcagaaatactgctctgttcgattgtaaaatagtatgttgccctagactgggggtgggagggggtatggcacataatgaagtatacccacwgctaaaatcctaaaaattctggattctgaagcacatttgaccactggggttttagataacctatctttatttgtgtaatcatcaccacaaccatcctagg

SEQ ID NO: 197541 - DNA, 201 bp, Homo sapiens
aactggaccttgggagctgtggacacaatagcagctggataggtcaggcaccagccacatgccaaggctatcctatgggttaacctgcacagtccgcaatmccttaccctcgattctaaatctaaaaaatctgaaaactgctgcatatttcaaaactgtgcagcaaattcattgtttgtaaacaaaccttctttgaagcaa

SEQ ID NO: 197542 - DNA, 201 bp, Homo sapiens
aatccagcagtacatcagaaagcttatccaccatgatcaagtgggcttcatccctgggatggaaggctggttcaacatacgcaaatcaataaatgtaatcyagcatataaacagaaccaatgacaaaaaacacatgattatctcaatagatgcagaaaaggcctttgacaaaattcaacaaccattcatgctgaaaactct

SEQ ID NO: 197543 - DNA, 201 bp, Homo sapiens
cccatctgcttgctgtataagaacctggccaacaagattgtccccattgccatccaggtaggctgctggggggcacacctttctgagcagctcagtcctcygcgatccagggctcctgggtggctccattcacactccagctgaggaagctatgtcttgaaagacactagggcttcctgcaggccctgaggtgggctgtcc

SEQ ID NO: 197544 - DNA, 201 bp, Homo sapiens
gccataaaaaaggatgaattcatgtcctttgtagggacatggatgaagctggaaatcacccttctcagcaaactatcgcaaggacaaaaaaacaaacactrcatgttctcactcataggtgggaattgaacaatgagaacacttggacacaggaaggggaacatcacacaccaaggtctgtcatggggtgggggtaagggg

SEQ ID NO: 197545 - DNA, 201 bp, Homo sapiens
cactcctattcaacatagtgttggaagttctggccagggcaatcaggcaggagaaggaaataaagggtattcaattaggaaaagaggaagtcaaattgtcyctgtttgtagatgacatgattttatatctagaaaaccccatcgtctcagcccaaaatctccttaagctgataaggaacttcagcaaagtctcaggataca

SEQ ID NO: 197546 - DNA, 201 bp, Homo sapiens
gtcttctgttgcttttgccacaggagattttagttctttattttattaactatgtattgtttacatctataacttttgggtttcctcctttgcttaagaaraccctttccatcccagtgttacacaaatacttcccccgtaattttgtctaatacttttataatttcccctttgagtttagagctttcattcatctacctt

SEQ ID NO: 197547 - DNA, 201 bp, Homo sapiens
ttcttaatccccacagtcattcacgctgcccatctggcagcaccttaatgatctacagcaagcttgtggcctactaaaaacgcctccattgttttttaaartgtgcagttattttccggatcatgaatagagaaattgtatccctgttgttggtattgattcagtgttccagctcaagtttgagttcttagactttatatt

SEQ ID NO: 197548 - DNA, 201 bp, Homo sapiens
taggagttaatgggtgcagcacaccaacatggcacatgtatacatatgtaacaatcctgcacgttgtgcacatgtatcctagaatttaaagtataataataaaaaaaaagacatacacggaaaaaaggaacacaaatccacaggaacagttggtggactgtgcctttttccgaagatgtctttaagggcatcaatatttaa

SEQ ID NO: 197549 - DNA, 201 bp, Homo sapiens
cccaccttgcaaaggggagaacactggagaaagaagcagaccttgtgtgagaataaaaaaggggcacgaggagaaacccaacagaatggttgattttctckttagaaatgctgctgcccatgctcctgtcgcaccctcctccccaccctcacctgcagactcagctgcctccggctgcaaggctgacctagtcttgagaca

SEQ ID NO: 197550 - DNA, 201 bp, Homo sapiens
aaggcagaacttggcttgtgttttaggtatttacacaaaagcaactttgggttcctttggactaggatgtgtttgatgagagcactagcttcatagtggcyagtcatggcatgggaaggacgttaggaaggcaggaatggctggacaagaagaggtgctgaaatcaggacatggggaaccaaacttggcaaactgccccca

SEQ ID NO: 197551 - DNA, 201 bp, Homo sapiens
catgtgcgcagtaagagaatggcatagtctattgggacagccacatcaaaataccacagaccagatggcttaaacggcagatatttgtctctcacaggtcyggaggctagaagtccaagattagggtgccagccaatccacttgctggtgagggccctcttcccagcttgcagatgtctctgtgttcccacagcatggtca

SEQ ID NO: 197552 - DNA, 201 bp, Homo sapiens
gacttcacagcccaggcccgctggtgctggggtcccccacacacctgcccacgcctgctgccctcctgtggctgggagcgcacccttccctcttgtactckgcagccccacggttcagtcccttgcattggattgggcgggaggctcctccctagcacctctccacccggctgcccttgtcattctctgcgttaaacatcc

SEQ ID NO: 197553 - DNA, 201 bp, Homo sapiens
gcacagcaaagttggtgcgactggactttggaagaggtcccagaaccttactggacacagggtcagcctatgatgtgttgactttattttgagtacatcartctccctgtgtaacatcgtctgacagtgtgggcggccctcagctgagggggcagaccaaaggctggcatttaactcaatttcttctcctttctcatgctc

SEQ ID NO: 197554 - DNA, 201 bp, Homo sapiens
gatgctcagggcacagcaaagttggtgcgactggactttggaagaggtcccagaaccttactggacacagggtcagcctatgatgtgttgactttattttragtacatcaatctccctgtgtaacatcgtctgacagtgtgggcggccctcagctgagggggcagaccaaaggctggcatttaactcaatttcttctcctt

SEQ ID NO: 197555 - DNA, 201 bp, Homo sapiens
ctacctacagaactttttatgcagtggtgcacacctgtaccactataagcccagtctcagggttcccactctgatgctcagggcacagcaaagttggtgcsactggactttggaagaggtcccagaaccttactggacacagggtcagcctatgatgtgttgactttattttgagtacatcaatctccctgtgtaacatcg

SEQ ID NO: 197556 - DNA, 201 bp, Homo sapiens
catgcttagtaagcatcagaggggtgcaggcctccagcacttattcagcagaaagatcagcacccagccttcacttcctccctgcgcccagcatcatcctrtagggcaggcctgggtgggggagctgcgggtccctgaggcaccaggtcacctgactgggccccctctgaggcctcctcctctcccctccccagctgctgg

SEQ ID NO: 197557 - DNA, 201 bp, Homo sapiens
accaaattcacattctcaagcaacaccgacgtaaagaactggaaacacggcaaaaacaatatcggtgagttatgacatcagatcgagtggccacggggccrtggtttcttctatctcaagagcatggtatgaaataaaccctttccacagtgtatggcctgtcactgctggaaagtcaccaaggcaccagctcccagtgtg

SEQ ID NO: 197558 - DNA, 201 bp, Homo sapiens
ctaggttttcttctagaatgtttaaagtttgaagtcttacatttaagtctgtaatccatctagaggtaatttttgtatatggtgagaggtaggggcccagygtcattcttctgcatataggtagccagtttttccaacactatttattgaataggatgtcctttccttattgtttatttttgttgattttgtcaaaaatca

SEQ ID NO: 197559 - DNA, 201 bp, Homo sapiens
agccggagcttagaaagcccagtgtgtcatccagagtcatgcaggttgtaagtaatatggctgggacaggaaataccaccgcagggccctttaccccctcyaggctcttctgattccaaagtcactgttaaagaaattcagatacttctggaacttcccaagaggcgaagttctccaacaactatactctgaagtgaaata

SEQ ID NO: 197560 - DNA, 201 bp, Homo sapiens
ttggcaaagtgtttagataaatatatttctcaaaaaaatcaatagcctttctccatactaacaataaaatataatgcccatataaggaaaaactataaagttatttatttatttatttatttatttatttatttatttatttgagatggagtttcgcactgtcacccaggctagagtgcagtggcgtgatctcggctcact

SEQ ID NO: 197561 - DNA, 201 bp, Homo sapiens
tggcaaagtgtttagataaatatatttctcaaaaaaatcaatagcctttctccatactaacaataaaatataatgcccatataaggaaaaactataaagttatttatttatttatttatttatttatttatttatttatttgagatggagtttcgcactgtcacccaggctagagtgcagtggcgtgatctcggctcactg

SEQ ID NO: 197562 - DNA, 201 bp, Homo sapiens
ggcaaagtgtttagataaatatatttctcaaaaaaatcaatagcctttctccatactaacaataaaatataatgcccatataaggaaaaactataaagttatttatttatttatttatttatttatttatttatttatttgagatggagtttcgcactgtcacccaggctagagtgcagtggcgtgatctcggctcactgc

SEQ ID NO: 197563 - DNA, 201 bp, Homo sapiens; identical to SEQ ID NO: 34154

SEQ ID NO: 197564 - DNA, 201 bp, Homo sapiens
gcaaagtgtttagataaatatatttctcaaaaaaatcaatagcctttctccatactaacaataaaatataatgcccatataaggaaaaactataaagttatttatttatttatttatttatttatttatttatttatttgagatggagtttcgcactgtcacccaggctagagtgcagtggcgtgatctcggctcactgca

SEQ ID NO: 197565 - DNA, 201 bp, Homo sapiens; identical to SEQ ID NO: 34149

SEQ ID NO: 197566 - DNA, 201 bp, Homo sapiens
ctggcccctccgccacccctccggggtgtcctgcccagggtgccctccggccttggggcagggaatccgggcacggggtgggcgccgggccctggggtccycagggactgggcctcagcccgccggtggttccaccctaggcttccccaagtcggtcaagagccgggagcagctgtcggagtacctgaccgtggtgatctt

SEQ ID NO: 197567 - DNA, 201 bp, Homo sapiens
gaggtgggaggatggcttgagtccaggagtttgaggctgcagtgagccatggtcgctccactgcactccacactgggcaacagagtaagaccctatctttaaaaaaaaaaaaaaaaagtaaaagaaaacacagaaggaacactttccttgctggatttgtaaggttactgttaagcagacactgtgcttgaaaacagagag

SEQ ID NO: 197568 - DNA, 201 bp, Homo sapiens
tgaggcgatgctgcatgagcccctctggacactagaaggcctgggctcaatgctgagtaaagtgcaggcatgactgtgccctcagcatgcatagggcagcrggcatagattcatacacgtgagtttgcacttaagctgcagtaagagctacagaggaaatgaacagagacagcatcactccagtgagccctccagatacac

SEQ ID NO: 197569 - DNA, 201 bp, Homo sapiens
ctgctgccctcctgtggctgggagcgcacccttccctcttgtactctgcagccccacggttcagtcccttgcattggattgggcgggaggctcctccctakcacctctccacccggctgcccttgtcattctctgcgttaaacatccctcccccatctcacaggacaagggcttgcacctctgcctgcctggcctcctcgc

SEQ ID NO: 197570 - DNA, 201 bp, Homo sapiens
gctagcagccactcagcagaaatgaaagcacaaatgtgtgtgggtagcaacaggagcatagtttgtgatggggaaaaaaattgaaaacagtctgaaggcaraagaggattgagtgagtgagcccttccatgtcctcaccataaaatgttgaggcgtctttgaaaggaatgctttggttcccttccagctgacctggagggg

SEQ ID NO: 197571 - DNA, 201 bp, Homo sapiens
aacctcctgttttgaggtcaaacagacccagctgggtaattggtgactcactcctggttcctccaaagaacaggggcaagggaccacccgggacctcaggygccccagcacaggacctctttctggggcaccctctggcactgggccatcttcaggccctacagggctctcggggcctgcgtaggcctctcatctcccaga

SEQ ID NO: 197572 - DNA, 201 bp, Homo sapiens
agcagccactcagcagaaatgaaagcacaaatgtgtgtgggtagcaacaggagcatagtttgtgatggggaaaaaaattgaaaacagtctgaaggcagaaraggattgagtgagtgagcccttccatgtcctcaccataaaatgttgaggcgtctttgaaaggaatgctttggttcccttccagctgacctggaggggtct

SEQ ID NO: 197573 - DNA, 201 bp, Homo sapiens
tagggaaggagcgatatcccccaggcaaggaaggctgcggaggggccaggccaggagagaagggccctgagctcagtggacgggcagggtgcctgtggagraagggagggacgtagcagcaggaggaagggtgaggacccaggctggggatcgggagaagtgatggcggaggaaagagaggccggaagaggagggggcctg

SEQ ID NO: 197574 - DNA, 201 bp, Homo sapiens
ctttgctcctgccctgcacagcacaactgtggcgtaaaaaatggaaaagctggtagcagaaggaaagagcagggagacagaggttaggtgaacctcaatgrcctcattaaagcaaattgagaaagagagtttccttcccagtgaggcgggacagtgcagaaatgcggcccgtcctgggagaagtaggggcgaggggtgggg

SEQ ID NO: 197575 - DNA, 201 bp, Homo sapiens
gcggaggggccaggccaggagagaagggccctgagctcagtggacgggcagggtgcctgtggaggaagggagggacgtagcagcaggaggaagggtgaggrcccaggctggggatcgggagaagtgatggcggaggaaagagaggccggaagaggagggggcctgctggcctggcactggaaagcaaagcgtgggtttgta

SEQ ID NO: 197576 - DNA, 201 bp, Homo sapiens
ttatggcttaagtgccaatcctaagctgcatccatgttgctgcaaagaacacgatttcattcttttttatggctatgtagtattccttggagtacatgtaycacattttctttatctggtgccactattgatgggcacctaggttgattacatgattttgatattgtgaacagtgctgcaataaacatatgtgtgcctatg

SEQ ID NO: 197577 - DNA, 201 bp, Homo sapiens
gattttctgtttctgggttaattcacttaagattatggcttaagtgccaatcctaagctgcatccatgttgctgcaaagaacacgatttcattcttttttrtggctatgtagtattccttggagtacatgtatcacattttctttatctggtgccactattgatgggcacctaggttgattacatgattttgatattgtga

SEQ ID NO: 197578 - DNA, 201 bp, Homo sapiens
ttttccaggagaggggtgggcaattccaggaactgaaggttcctcccttttttagaccatatagggtaacttcctgacattactatggcatttgtaaactrtcatggcactggtgggagtttcttttagcatgctaatgcattataattagcatataatgagtggtgaggatgaacagaggtcactttcatcaccatctta

SEQ ID NO: 197579 - DNA, 201 bp, Homo sapiens
cagtatatacctaggtgtatctttttcctttttttttttcccccccacctaggacttgtcattgagaaaaatgacgagacaagtctcaatcattttaggaratttatttgcgaaagttaaggacgcatgcccgggagacagcactatgcctttctctgaaggtgattttgagggctccaaatttaaagggaaaagggcggg

SEQ ID NO: 197580 - DNA, 201 bp, Homo sapiens
gttgagttcgccagttttgacttatgtgtagagtccggcagcatcattttttggcatttaactcgtcacatctatttcacctaacctctttcttcttagtraactgacactcgggtcggtctctcatctttcgtgccagtcaagcaggtttcagacaccacaaatgccgaatgagctgctgccattccttcatcttacccc

SEQ ID NO: 197581 - DNA, 201 bp, Homo sapiens
ggttaagataaggggttgtggaaacaaagttttttatcatgcagatgaagcctccaggtagcaggcttcaggtagaatcaattgtaaatgtttcttatcartcttaaagagtctgttctaatgggcttaacatctctgtgttgatgtgaatgctgatcagttgtgcctgaattccaagaggaggagagtacaatgaggcac

SEQ ID NO: 197582 - DNA, 201 bp, Homo sapiens
gattgacctatgtgtgtgtccatgtctgggccctcagctgttcctgggcatgtacccagaagagcattttatcgagaagcctgtgaaggaagccatggccmgattccgcaagaacctcgaggccattgtcagcgtgattgctgagcgcaacaagaagaagcagctgccatattactacttgtccccagaccggattccgaa

SEQ ID NO: 197583 - DNA, 201 bp, Homo sapiens
tcaaggcccggggcatggagagcaaagaagacatcccctactacttctaccgggacgacgggctcctggtgtgggaagccatcaggacgtgagcgcccgcrgggcggtggtcctgggggaggagccgggacccctgcctgactacctggggcgggcctggcccctccaccgctagcgctgaatggggacggggtgggggag

SEQ ID NO: 197584 - DNA, 201 bp, Homo sapiens
cgatttcctcccatgagaatgggcgggggcagctccgggaagggtggcggatggagccgccctctccccaggaccacaggggcgctttccagtgaaggcgscgtaggaaacgccagtctgtgccgcagtgtacgtagaggcgctatgagcccgagtttcccacgtccagggacaaactgggagccgtgactgtcaggccgc

SEQ ID NO: 197585 - DNA, 201 bp, Homo sapiens
cccccgcagtcggcagcgctggcccctccgccacccctccggggtgtcctgcccagggtgccctccggccttggggcagggaatccgggcacggggtgggygccgggccctggggtcctcagggactgggcctcagcccgccggtggttccaccctaggcttccccaagtcggtcaagagccgggagcagctgtcggagta

SEQ ID NO: 197586 - DNA, 201 bp, Homo sapiens
caagtcctcaggtagggcctccgggacgtctccggacccggctcccccgcagtcggcagcgctggcccctccgccacccctccggggtgtcctgcccaggrtgccctccggccttggggcagggaatccgggcacggggtgggcgccgggccctggggtcctcagggactgggcctcagcccgccggtggttccaccctag

SEQ ID NO: 197587 - DNA, 201 bp, Homo sapiens
caccgcctccgcccagcacgccgcggtcaacttcggccaggtaggcagggccgggcccgctgggcagggctcccttctcaaggccgctgcctcctcccccrccccggttctgcacgcgtactgcaccctcggacagcctcggggcctggcacgggacttgcaggatggattctgcccgctcagccaagggcgctggccgcg

SEQ ID NO: 197588 - DNA, 201 bp, Homo sapiens
ctagagcagacttcacagcccaggcccgctggtgctggggtcccccacacacctgcccacgcctgctgccctcctgtggctgggagcgcacccttccctcytgtactctgcagccccacggttcagtcccttgcattggattgggcgggaggctcctccctagcacctctccacccggctgcccttgtcattctctgcgtt

SEQ ID NO: 197589 - DNA, 201 bp, Homo sapiens
gcaccgacagcccagccccctgggtgtatttgcatgtgtgtgtgtgcacgtggacacacatatgtgccagtgagcttgtgagtgtgtctgcatcactcagmagccgggatcgggatcaggaccaggatccctccttgtgggtctctccagccctcacctgagcacacaacaggccctcaacagagttgcatgggtcctgga

SEQ ID NO: 197590 - DNA, 201 bp, Homo sapiens
agccaatggagacaggacacggtagcagggacaagctgcgtaaggaataaaaattgcttctctccattattcaggtgtgctctcgccattgttccatctgygaggagcaccctttctgcagaaagtaaaattggcttgctaaaaaaactttttgtctaaatgctgatttttccttgcagtaccgaggaacaagcattctgt

SEQ ID NO: 197591 - DNA, 201 bp, Homo sapiens
ccaggccctgcccagccctcgcatccctcaggtagcaccccacctcgttttgagccctctgtagccttaccaagcttggactctcacatgggcccttgccycaaccttcctcctttccccagcccattagtgaccaggccagatgaccactgaagttgagacactgtttgggctgcaaatgacaaaacccaactcaaacca

SEQ ID NO: 197592 - DNA, 201 bp, Homo sapiens
cccctccttggtcctcagggagtgctgaggcttctggggtctctctgaccagggtggagccactggccaccagggctctggagcacttgggatttggctcrtccaaaccaaaacctgctgcaagtgcaaagttcacacctgatttttaagacttagaataaggaggtggggaatgtgaaatatctcatttaatagttttag

SEQ ID NO: 197593 - DNA, 201 bp, Homo sapiens
ctgttccccaggacacgcggctggggcatgggcctgacacacgggcctcgctggccagccagtagagttggaaaaggcaaatgagttcatggtgatcctcrgctgatgctgatggccgcccctgccatcactctccgtccctgttctcgaatcctacaagcattggctgctggggtgactgcatgctaaaagtacccatgt

SEQ ID NO: 197594 - DNA, 201 bp, Homo sapiens
agatgtggagtgggagggatcactgacatcccacagggggacctgtggctgggagtgggtggcagaaagggagccctggagagatgttctcagagtcagtratgcccctaaaggaagaaaacagctaggagcctgctgttccccaggacacgcggctggggcatgggcctgacacacgggcctcgctggccagccagtaga

SEQ ID NO: 197595 - DNA, 201 bp, Homo sapiens
tttggctcgtccaaaccaaaacctgctgcaagtgcaaagttcacacctgatttttaagacttagaataaggaggtggggaatgtgaaatatctcatttaakagttttagattggtttcatgttgaagtgataatattctggatatattgggtaaaataaaattatattattcaccggcatttcacctgtttccttttattt

SEQ ID NO: 197596 - DNA, 201 bp, Homo sapiens
tgcagtattcgattttctgtttctgggttaattcacttaagattatggcttaagtgccaatcctaagctgcatccatgttgctgcaaagaacacgatttcmttcttttttatggctatgtagtattccttggagtacatgtatcacattttctttatctggtgccactattgatgggcacctaggttgattacatgatttt

SEQ ID NO: 197597 - DNA, 201 bp, Homo sapiens
tctcaagtataaacagacaggcacgcctaatgtgcaagtcacactctgctctccctcctccctcccccctccttggtcctcagggagtgctgaggcttctrgggtctctctgaccagggtggagccactggccaccagggctctggagcacttgggatttggctcgtccaaaccaaaacctgctgcaagtgcaaagttcac

SEQ ID NO: 197598 - DNA, 201 bp, Homo sapiens
cagaatgtagaacaccaagagtgaaccttgaactatggactttgagtgatgaggatgagtcagtgtaggctcatggattgtaataaatgcaccactgtgggggggggggatattgataactggggggctgtacatgtgtagggacaggagtaaatgggaaatctctacttttgttaccggtggagggtgtaccgcattttg

SEQ ID NO: 197599 - DNA, 201 bp, Homo sapiens
ttttatgtgaaactgtctggtatttaaaagcagccaactaatctcaagtataaacagacaggcacgcctaatgtgcaagtcacactctgctctccctcctscctcccccctccttggtcctcagggagtgctgaggcttctggggtctctctgaccagggtggagccactggccaccagggctctggagcacttgggattt

SEQ ID NO: 197600 - DNA, 201 bp, Homo sapiens
gtctcttggacattttaaaatgtattcagtatatacctaggtgtatctttttcctttttttttttcccccccacctaggacttgtcattgagaaaaatgaygagacaagtctcaatcattttaggaaatttatttgcgaaagttaaggacgcatgcccgggagacagcactatgcctttctctgaaggtgattttgagggc

SEQ ID NO: 197601 - DNA, 201 bp, Homo sapiens
ttgccggctgagctctttacctactgtgtgacttgggagagctgctaaaccagctggagcctcagtttccccccatgtaaaatgggtacagcaaggaatayctgccttgcagggtcaaagtgaggattaagtgagatagcatgggtaaagcccctagcacacaacaggggggctcctcggccccagaggatgtcaggaaca

SEQ ID NO: 197602 - DNA, 201 bp, Homo sapiens
tttggtttcaaatcacaaaaatcaactccatctggtttaatccaagaactctattggctcaggcaacagtaaaaagcaatgctaactcatttgggaccagrgctcagatcatcccctgcactgtctctctctcgctccatgtctcaatcctctgcctctggtgattttttccttaggagggtttccttatgtggaggtaaa

SEQ ID NO: 197603 - DNA, 201 bp, Homo sapiens
ccagcttgacaagcattcctagcccagaacactcagctgacgaggggtgctgggggaggaaggaggcagcaaggctgaaagaagcttctctgggtattccrgtgcctggctgctggtcgtagccatggtgagaccacagcagcctccctggaagcaagcacctgtgtaaaagcccctccttccccacaaggggctggatcc

SEQ ID NO: 197604 - DNA, 201 bp, Homo sapiens
gattgctttggctattcggctattttttggttccatatgaattttaggatttttttttctaattctgtgaaaaatgatgttgataatttgataggaattgygttgtatctgtagattgctttcttccaacccattagctgggatgtttttccatttttttgtgtcatctatgatttctttcatcagtgttttatagttctc

SEQ ID NO: 197605 - DNA, 201 bp, Homo sapiens
aaggtcacagtctgtcaggtggaagccagttcctcctggccagtgctcataggccaccaagacgctaactgcaggcccatctggcctacagcagccgcttycttttcctggcagcagtgtcagccagggtcctgggcattatgcagactgtcttgtgcaacatcagaggaggaattgcggggaatgtttctccatgatgct

SEQ ID NO: 197606 - DNA, 201 bp, Homo sapiens
agatccatttccagaactcagattgctggaacaaatcagcattttttcatcttaagaaataccgacaaaaatcctttcacaaaattgtatcgtaatttgcrgtcctaccagctgtgtatgaaaagatacttttgcccatccatacatttgtcagtacccgatgaccttgtttgacagtctaaaaatccctaagaccttgtg

SEQ ID NO: 197607 - DNA, 201 bp, Homo sapiens
cccagccactgcagacccttccccctctgcttctgcagcacctctcccgaaacacgctcattcccgcccccgcagaccttccctacctcctggagaccccmctcaacccctgtagagtcccctgcccgtgcagaatcccctcccccttcccccgcagcccccctaccccacccggcggacagccccgcctcgcttcctgtc

SEQ ID NO: 197608 - DNA, 201 bp, Homo sapiens
cagaggagagaagtacacattctgagctccgctgagtcgcaggaaagggagaggggtgcccagaggtcatcactctttccccaggcctgatttttggtccrtctgctgagcctgatttggacacatctctctgcctcctgcagcaagggaacattttcatcgtggactttgagctgctggatggcatcgatgccaacaaaa

SEQ ID NO: 197609 - DNA, 201 bp, Homo sapiens
aaggggagtgtcattcactagaaaatgggcaagaagtttgagtacttactgtacaaaatataagcagcaagtatacaaaaggtgttcaacttcattaggamtcggggaaatcagaagatcacagtgaactgctgctactaccacacatatgcccccagatgggcaacacttcaacaactgacaacacctgagtattaaaga

SEQ ID NO: 197610 - DNA, 201 bp, Homo sapiens
tggccaaggtcacagtctgtcaggtggaagccagttcctcctggccagtgctcataggccaccaagacgctaactgcaggcccatctggcctacagcagcygcttccttttcctggcagcagtgtcagccagggtcctgggcattatgcagactgtcttgtgcaacatcagaggaggaattgcggggaatgtttctccatg

SEQ ID NO: 197611 - DNA, 201 bp, Homo sapiens
gtgattattcttccaggtctcaagctaaaaggatttttcaaacaagactcagaacatattaaacacaaaggaaaagattggtaagtttgcctccctcaagrtaaggacactctgttcattgaaagacaccaggagagagtgaaggcaagtcatggagtgattgacgagaattattcctagtatgtgaaggacctacaaatc

SEQ ID NO: 197612 - DNA, 201 bp, Homo sapiens
aactgtcttagcttcatcccccttttcatcaaaaacattccttgaaacagaataaagaaacaacaaacagccacacgtatgtgggtactgggtctgctacrgagggctcggctgatgggtggcactgggccactggacatgcatctcgaggacaggggccagccagcacggagggctgaaggagaaggagaagaaatcaga

SEQ ID NO: 197613 - DNA, 201 bp, Homo sapiens
acactagggcttcctgcaggccctgaggtgggctgtccataggggcggagagggttctactccccaaggcacacttgagaagcccctggccagtcgaggcrcactgtggaggacctgccctgggatcatattctgcactctccaccccagcaccctgaccaagggcccccagtcaaggtgctgccaggggccaggcaggtg

SEQ ID NO: 197614 - DNA, 201 bp, Homo sapiens
gtacctgcagcctgcattctgaatttagcaagctctggccttgggtttctattttcttgtcctgtgcagtgagcatttggaaacttctcctcagcaccaarcacggagccatttagcagaaaatacatgagttttcaagtcaattgaactgttcatcgccccaaaagccaggcaacacggtagagcagctggatctctgtt

SEQ ID NO: 197615 - DNA, 201 bp, Homo sapiens
tattgtgtgattctatctgtatgaaatgtccagaataggcaaacccacagagtcagattagtaggtgagtagttgcctagcactaggagttggggaggggraacaaggagtgaatgttaatgggttcgaggtgtcctctggggatgagattatttcagaattgggttataatgatggttacacatacaactctgcaaatat

SEQ ID NO: 197616 - DNA, 201 bp, Homo sapiens
ttcaaaaatatgctaaatggaaaactcacttacggaagaccccatattgtgtgattctatctgtatgaaatgtccagaataggcaaacccacagagtcagrttagtaggtgagtagttgcctagcactaggagttggggaggggaaacaaggagtgaatgttaatgggttcgaggtgtcctctggggatgagattatttca

SEQ ID NO: 197617 - DNA, 201 bp, Homo sapiens
ggcattatgcagactgtcttgtgcaacatcagaggaggaattgcggggaatgtttctccatgatgctcgagtctgggaacataatgtcaatattttcactrtcagtatcaataattacaggagctacccttgattaggggcctgtggtgggacaggcattgtgacaggtgctttacacacaaggtcatcagttgtcaccca

SEQ ID NO: 197618 - DNA, 201 bp, Homo sapiens
gaaaccccatgtctacaaaaatacaaaaattagccgggcatgttggtgcacgcctgtaatcccagctgcttgggaggctaaggcaggagaatcacttgaayccgggaggcggaggttgcagtgagcctagatcccgccactgcactccagcctgggtgacagagcaagactccatttcaaaaaaagaaaagaaaagaaaag

SEQ ID NO: 197619 - DNA, 201 bp, Homo sapiens
caacaccaaggcccgtgagcagctcatctgcgagtgtggcctctttgacaaggtgggtgccctcctaccctacttgttgcctggaagagcccagcctggcygccttcactccctatctgagatctagacaccctttcaggaggcctggaagggtgaaggctggagtctgctcagagcactggctccagcatcctcctgatg

SEQ ID NO: 197620 - DNA, 201 bp, Homo sapiens
gtcattcttctgcatataggtagccagtttttccaacactatttattgaataggatgtcctttccttattgtttatttttgttgattttgtcaaaaatcakttggttgcaggtatatggctttatttctgggttctctgttctgttccattgatctctgtgcctatttttgtaccagtataccatgctgtttttgttactg

SEQ ID NO: 197621 - DNA, 201 bp, Homo sapiens
ctgccaacatctgtcatttttttactttttaataatagccattctgactggtatccctttgtggttttaatttgcatttctctgatgattagtgatgttgrgcattttttcatatgtttgttggccacttgtatgtcttcttttgagaagtgtctgttcctgtcctttgcccactttttaatggtggtgttttttcttaag

SEQ ID NO: 197622 - DNA, 201 bp, Homo sapiens
ggtgagttatgacatcagatcgagtggccacggggccatggtttcttctatctcaagagcatggtatgaaataaaccctttccacagtgtatggcctgtcrctgctggaaagtcaccaaggcaccagctcccagtgtgggtgcacaatccccaaacttcaccttacctacaactccagacaagagatggagaggagagtaa

SEQ ID NO: 197623 - DNA, 201 bp, Homo sapiens
aattttagattcaggtacatgtgcaggtttgttacatggttatattgcataatgctggggttaggcttctattgaacccatcactcaaatactgagcatartacccaatacccagtttttcaaccctttcctccctccctccccttcctggagtccccagtgtcttttgttcccacttttatgcccatgtgtacacaatgc

SEQ ID NO: 197624 - DNA, 201 bp, Homo sapiens
tgtatgcagcccatcacaaagccagccacactgcccaggctgtgccatggcaacttccagcagtacaccctctcggtcacctgcaggctccttgttcatcytgacacatgaggagaaaaagacagtactcacaaaggcctctagccttgtggccccaggaccctctcctgagcatcatggcctcctaggagacccagggta

SEQ ID NO: 197625 - DNA, 201 bp, Homo sapiens
gaacagtttttttttttttaatatataaaattttagattcaggtacatgtgcaggtttgttacatggttatattgcataatgctggggttaggcttctatygaacccatcactcaaatactgagcatagtacccaatacccagtttttcaaccctttcctccctccctccccttcctggagtccccagtgtcttttgttcc

SEQ ID NO: 197626 - DNA, 201 bp, Homo sapiens
gggaccacccgggacctcaggtgccccagcacaggacctctttctggggcaccctctggcactgggccatcttcaggccctacagggctctcggggcctgsgtaggcctctcatctcccagaaataagttcttttccccacccagactgacaccagatgctacagtgaggtttacccctccagcttgacaagcattcctag

SEQ ID NO: 197627 - DNA, 201 bp, Homo sapiens
agctctttttttactggtcagaacagtttttttttttttaatatataaaattttagattcaggtacatgtgcaggtttgttacatggttatattgcataaygctggggttaggcttctattgaacccatcactcaaatactgagcatagtacccaatacccagtttttcaaccctttcctccctccctccccttcctggag

SEQ ID NO: 197628 - DNA, 201 bp, Homo sapiens
gaaaacagtctgaaggcagaagaggattgagtgagtgagcccttccatgtcctcaccataaaatgttgaggcgtctttgaaaggaatgctttggttccctyccagctgacctggaggggtctccacaatgagttaacagtggaaaaacaagacacaagggaccgataaaggatacatatctgtcgtatacaaatagctcct

SEQ ID NO: 197629 - DNA, 201 bp, Homo sapiens
gttgaggctgtcgtggcgaggacagttgtgttaccgagctggactgggatctgcttgcccagtgcagcaaaaccaaacactgagattgggatataatctasgagaacacaaggcatttattgcggggaccaaaaaaggagaattgggcagctcactcttaagaccggaactccctgatggcttgcaggtaagggtttttaa

SEQ ID NO: 197630 - DNA, 201 bp, Homo sapiens
tcctggggttgaggctgtcgtggcgaggacagttgtgttaccgagctggactgggatctgcttgcccagtgcagcaaaaccaaacactgagattgggatakaatctaggagaacacaaggcatttattgcggggaccaaaaaaggagaattgggcagctcactcttaagaccggaactccctgatggcttgcaggtaaggg

SEQ ID NO: 197631 - DNA, 201 bp, Homo sapiens
aggtcagagcttcggccagcaccggagcagatcccacagcgcctgctgtaccaggtgcatgttgcagtgggcggtcagagggtcctggggttgaggctgtygtggcgaggacagttgtgttaccgagctggactgggatctgcttgcccagtgcagcaaaaccaaacactgagattgggatataatctaggagaacacaag

SEQ ID NO: 197632 - DNA, 201 bp, Homo sapiens
ggaggaaactgtaaaaatgtcagttctaccaaattctattataaaaacttaatgcacttccaagtaaaatttcagccagaattttttatctttcttggtgsgggtgtggtggtggtgaagaggaactaaaaaggagagaaaacaattaaaaaattgaaagattcatatggaaaaagaaatctagcatagtcaaaaattttt

SEQ ID NO: 197633 - DNA, 201 bp, Homo sapiens
atgaagtcatgtttccctcaaaaaaatgatttgttctgtagtcaaattaatttggaaaacattgcaaactcttcagcagtggttctcaaagtatagcttgygtcagaatcccctggggcccttgctaaaatctggatggctacactccccgcctagagtgggttaaactcagtgcccactggcaggaaactgaaacttggc

SEQ ID NO: 197634 - DNA, 201 bp, Homo sapiens
tgtgggaagccatcaggacgtgagcgcccgcggggcggtggtcctgggggaggagccgggacccctgcctgactacctggggcgggcctggcccctccacygctagcgctgaatggggacggggtgggggagtcccagcgtccgtgagggggttgccgccgggcaccgctccgcagacctggctgggtcgcccaccccggc

SEQ ID NO: 197635 - DNA, 201 bp, Homo sapiens
gccctcagctgttcctgggcatgtacccagaagagcattttatcgagaagcctgtgaaggaagccatggcccgattccgcaagaacctcgaggccattgtmagcgtgattgctgagcgcaacaagaagaagcagctgccatattactacttgtccccagaccggattccgaacagtgtggccatctgagcacactgccagt

SEQ ID NO: 197636 - DNA, 201 bp, Homo sapiens
taactttggaatgaaattgtttagggaggtgtgtcatagcggaaccttaaacaataacaagaaaatgattatcataaagccgaggatggtcattaccgggratggaaggagggttgattgggaaaggtgggggtgagggtacggacaatgttctgattttttacctggatggtgttcgtacaggtgttttgtacatttttc

SEQ ID NO: 197637 - DNA, 201 bp, Homo sapiens
gacatttcatgttcatgaatcagaggacttaattttgttaaaatggcaataccccacaaattaatgtacacgttcaacacaacccttatcaaaattctagstgatttctttgcagaaattgacaagctgtcaattctgcaaattcatatggaaatggaagggacccagaatagccaaaacaatcttgataaaaagaaaaca

SEQ ID NO: 197638 - DNA, 201 bp, Homo sapiens
cattattaaagaagatctaaataggttgaaagacatttcatgttcatgaatcagaggacttaattttgttaaaatggcaataccccacaaattaatgtacmcgttcaacacaacccttatcaaaattctagctgatttctttgcagaaattgacaagctgtcaattctgcaaattcatatggaaatggaagggacccagaa

SEQ ID NO: 197639 - DNA, 201 bp, Homo sapiens
agagcgggtcatgaatcactggcaggaagacctgatgtttggctaccagttcctgaatggctgcaaccctgtgttgatccggcgctgcacagagctgcccragaagctcccggtgaccacggagatggtagagtgcagcctggagcggcagctcagcttggagcaggaggtccaggtaggggttgatgggctggggaagtg

SEQ ID NO: 197640 - DNA, 201 bp, Homo sapiens
aaaccctttccatcccagtgttacacaaatacttcccccgtaattttgtctaatacttttataatttcccctttgagtttagagctttcattcatctacctttttttttttttttgagacagagtcttgctctgtttcctaggctggagtgcagtggcatgatcatggttcactgctgcctcaaactaacccaggctcaat

SEQ ID NO: 197641 - DNA, 201 bp, Homo sapiens
ggaggaaagtatgagagaccaaggagaggcagtagaagagggagcagggcaaggagggaagagggggacagcgatcctccccctccgctgctgggccttcsgcctgcccgctccttccatgctgccagctcctgagtaactgtgagccgagcgatcactgtccccacatgacagatgctgaagccggagcttagaaagccc

SEQ ID NO: 197642 - DNA, 201 bp, Homo sapiens
atgtactgggaagtaagaaataaaaccgtctttgttagcagatgacatgctcatctatgtagaaaatccaaaagaatggataaagaaactcctggaactartaagtggttacagtaaggttgtaggatacaaggttaatatacaaaagtcaatcactctcttattcaccagtaatgaacaagtggaaattgaaattcaaaa

SEQ ID NO: 197643 - DNA, 201 bp, Homo sapiens
atcacctgagcccgggaagtcgaggttgcagtgatccaggattgtgccactgcactccagcctggatgacagagtgagaccctgtcttaaaaaaaaaaaaattcctatttctctattacacacatcttgagtgcagcacttaggttttctatatatacatgtagacaaggtctgtttctattttgcttatcactgtatcac

SEQ ID NO: 197644 - DNA, 201 bp, Homo sapiens
acttggcatctctttgttgtgattttcaaggttataagttgctttggtcctaggattgaagttgaaatctgagtttatcagtgctaaccatggtgctagtrgtcaagagatcttgagaattttggctgctgagtcttggtgcagggtgcaggttttcttttcttttttcttttttttttttttgagatagtctctgtcacc

SEQ ID NO: 197645 - DNA, 201 bp, Homo sapiens
tctccttattgctaaatcgaatggtcattactaattttttggatcctgtcttatgtaatgtctccactgcatttggtactatagagctctcttttttttttcctcaaaggtgcttgtcctggattctgtggcactttgttccttgtttttccattgtcctgggggacacactcattttctattttgccttgcatggtcact

SEQ ID NO: 197646 - DNA, 201 bp, Homo sapiens
taagttgctttggtcctaggattgaagttgaaatctgagtttatcagtgctaaccatggtgctagtagtcaagagatcttgagaattttggctgctgagtsttggtgcagggtgcaggttttcttttcttttttcttttttttttttttgagatagtctctgtcacccaggctggagtgcagtggtacaaacatggatcac

SEQ ID NO: 197647 - DNA, 201 bp, Homo sapiens
aaaataaacaatgatctttcatagtgataagttcaaagcagtagttaaaagccacagttcagaggaaggattttttgtttaactggtgtgtgtgtgtgtgtatgtgtgtgtgtgtttctgtgtgtgtagagtgatagagttgttgggcaggaaaattttccctgagcaaatgacaggtaaatttggctttgaagaagcaaa

SEQ ID NO: 197648 - DNA, 201 bp, Homo sapiens
attttttgtatttttggtagagacgagttttcaccatattggccaggatggtctcagtctcttcacgtcgtgatcttcctgccttgacctcctgaagtacygggattacaggcgtgagccaccatgcctggcggggaaaattctaaaagccatattatataaaacttggaaagaaaaggactatttggtaaaagcttattc

SEQ ID NO: 197649 - DNA, 201 bp, Homo sapiens
caagccccaggataaaggaagccagaaaatttaatgggaatgacatgtaaatattagagaggtgaagaagactcgatacattttcttggaaatttaaaaadgtacctataatttgctccacattaaaaagtaagacacttaaaccagagtcatcttaacatcctttccaaattccatttctttctttagaacacagttata

SEQ ID NO: 197650 - DNA, 201 bp, Homo sapiens
gaaaataaacaatgatctttcatagtgataagttcaaagcagtagttaaaagccacagttcagaggaaggattttttgtttaactggtgtgtgtgtgtgtgtatgtgtgtgtgtgtttctgtgtgtgtagagtgatagagttgttgggcaggaaaattttccctgagcaaatgacaggtaaatttggctttgaagaagcaa

SEQ ID NO: 197651 - DNA, 201 bp, Homo sapiens
taagtcttaagaagtgggatgattttatttctccctaggtttgctaaagcaatgcctgtccacatagcgtgccataatgttctaccctctctgatttgcaytgtgactcaatgaattaaaatcttgatatgcaggtcatctctcctaggttggaaatgatactgagttaaaccatgcctgatgttcaaagaattattttat

SEQ ID NO: 197652 - DNA, 201 bp, Homo sapiens
tcccagccaagggtccttcaggtaggaggtcctgggtgactttggaagtccgtagtgtctcattgcagataatttttagcttagggcctggtggctaggtyggttctctcctttccagtcggagacctctgccgcaaacatgctccgccagatcatcggtcaggccaagaagcatccgagcgtaagttcgtgaccgctctc

SEQ ID NO: 197653 - DNA, 201 bp, Homo sapiens
agctctttatcctctttctaccttatcctgtttaggtactgacagcctgcttcatgctccctctgccagagccccctgtactgatggcctccttgccttgygcagcacaatgcacaggtgtgtcaccccaccccaaccctgcataaatgactaccttgctgggcctttgaactaaattatttaggaaggcaggaagaatat

SEQ ID NO: 197654 - DNA, 201 bp, Homo sapiens
aataagttcttttttagtattattaaattcaatgctcatattttctcagattttgtcagtgggggcctcttcaagctgacgtatgtgacattttgataaarctcccatctttgagcacttcctttttttctgtcataagattcaggctcatctgtaatttccttgccccagtcctagaatcagtcatttctcaagaatccc

SEQ ID NO: 197655 - DNA, 201 bp, Homo sapiens
tctaccttatcctgtttaggtactgacagcctgcttcatgctccctctgccagagccccctgtactgatggcctccttgccttgtgcagcacaatgcacargtgtgtcaccccaccccaaccctgcataaatgactaccttgctgggcctttgaactaaattatttaggaaggcaggaagaatatgaagttaacaatttta

SEQ ID NO: 197656 - DNA, 201 bp, Homo sapiens
acactagaactggattaagcaagtcaccggcaaccttttagggagttctgatataaagagagcagagaagtggggaagtaactggtaaaggaagttgaaasaagagagtttattttgccaagatgagaaatattatagttcatttttatgctgatggaaaagtctcagtagaaagggaaaattgataatgcatgagagagg

SEQ ID NO: 197657 - DNA, 201 bp, Homo sapiens
caccagttagaatggcaatcattaaaaagtaaggaaacaacaggtgctggagaggatgtggagaaataggaacacttttacactgttggtgggactgtaawctagttcaaccattgtggaagtcagtgtggcgactcctcagggatctagaactagaaataccatttgacccagccatcccattactgggtatatacccaa

SEQ ID NO: 197658 - DNA, 201 bp, Homo sapiens
cagcattttgggaggctaaggtgggtggatcacctgaggtcaggagtttgagaccagcctggccaacatggtaaaaccccatctccattaaaaaaaaaaaaggctgggcatagtggctcacacctgtaatcccagcactttgggaagctgaggtgggaggatcacctgaggtcaggagttcaagaccagcttggccaacat

SEQ ID NO: 197659 - DNA, 201 bp, Homo sapiens
gaacccgggaggcggagcttgcagtgagccgagatcatgccactgcactccagcctgggcgacagagcgagactctgtctcaaaaaaaaaaaaaaaaaaaacctatttcaaagtgaaagttattgctatttgaattttatacctttatgtaaaaatttaataagtagataaattggaagaggctgtttatggttattagac

SEQ ID NO: 197660 - DNA, 201 bp, Homo sapiens
actacagcctccacttcccaggctcaagtgattctcttgcctcactctcctgagtagctggaactatggcacgcacaaccacacccagctgattttttgtrtttttagtagagatggggttttgccgtgttggccaggctggtcttgaacccctggcttcaagttgatccgtctgtctcaaccccccagtgctggtattac

SEQ ID NO: 197661 - DNA, 201 bp, Homo sapiens
ggattattactcatagcaacgtttttttgttgttgttgttggagacagagtctcactctgtcgcccaggctggagtgcagtgccattatcttggctcactrcagcctccacttcccaggctcaagtgattctcttgcctcactctcctgagtagctggaactatggcacgcacaaccacacccagctgattttttgtgttt

SEQ ID NO: 197662 - DNA, 201 bp, Homo sapiens
gggacatacattcaaactagagcagttcccccccaaaaaagctaaaaataattatactaaattttacttctttcaagtttattacccaactctggtcagaytttatcctcaccactccactaaaaacgcttctgttaaggttttatcagtgacctctgtttgtgaattcaagttgatcatcagtatcactttgacctaaca

SEQ ID NO: 197663 - DNA, 201 bp, Homo sapiens
gcaccaacccacagatgcatggtgtgacacagcacctgacaagaataagtacacccattacagctatgaggggagtaagaattgaggctattattcttttycatttattgaaccacttttctagcctgtaaaggggtcatttacccctgagttgttggttaactcattggacagagcagtcagaccttccaatgtctttgt

SEQ ID NO: 197664 - DNA, 201 bp, Homo sapiens
ttgctcagctattcctttaacagcatctctagtgtagttaataaatcactgttggttgtagtagatgcagtttatccatttacatttttattaattgtcayccaccaaaatattgactcaaatcctgcagctatttgattttgggctttaaattgacctggtattccccgtgggactctaattgtgtctaaatagacgtga

SEQ ID NO: 197665 - DNA, 201 bp, Homo sapiens
ttgccatgctataatctagcaaaagctatgaataaaacagcaagagacaggaccaaaataagatttgagcattaaaggcccagcaatacttctcaactgartaacagttgaagctccccaaagctaagatcagaatatgttgtgccttcccaactattgtttcagagactctaaaagtagccagcattaaactgagaaaaa

SEQ ID NO: 197666 - DNA, 201 bp, Homo sapiens
gtttatccatttacatttttattaattgtcacccaccaaaatattgactcaaatcctgcagctatttgattttgggctttaaattgacctggtattccccktgggactctaattgtgtctaaatagacgtgagagtcgagagacccttaaggggcttctcttgccttatgatgtcttatttttctttcctctggttgatga

SEQ ID NO: 197667 - DNA, 201 bp, Homo sapiens
agaggagtgagccctcctgtaaaggcactagttagagtgttccaccctcatgacctaattacctctcaaaggcccagcctccaaataccatcaccattggygtttgaggttacaacatgaattttgggaggacataaacattcagtccgtagcagaggattatttgttgccatgctataatctagcaaaagctatgaataa

SEQ ID NO: 197668 - DNA, 201 bp, Homo sapiens
ccaaaacaaacttccttcatgtctgcggtctagagtgtctaaggccacaagattagaggttaggataatacatgttacactgttaacttttagcaaacttyacttttgttgaaaaccttgtaagtttgggatttcaattatcgtttgctattaataagaccttgtttagtccaacttaacttagaattggtatagatggtt

SEQ ID NO: 197669 - DNA, 201 bp, Homo sapiens
taagaaattgatattttgttttaaatgtggggacatcagcagtggactttatagttcttggtgccttcttactgagaaatttcctttagcacctatttttrttagtttttagaccaaagaaagccaaacaccattttatatttcacaatgcttcctgtatgatttttataccagataagctaaatgtcacctttatattag

SEQ ID NO: 197670 - DNA, 201 bp, Homo sapiens
ctttctgaggattccctattctgcatattcaggaatactgtgggccacaagaggtatttcacatgagatttgaaaaaaaaaaagaaatgtgacagcaaccrtgatctgtttaaacttggaaggtctgtggagggcaccaggaaaatttttcctgagacagatgagtttggctttgaagaaagccacagataatccacgttg

SEQ ID NO: 197671 - DNA, 201 bp, Homo sapiens
tgttgaaacacagattcttcagccttatccccagagattctgattcagctggtcttttgtggggcatgagaatttagagtagtctgtggaactactcttcyagagaatgatttcatggactgagaccatttattgattccccaaacataaccttccttatgtgtaaaaaattttgcatacaaagaccctgcacagcatcaa

SEQ ID NO: 197672 - DNA, 201 bp, Homo sapiens
tcagcctcccgagtagctgggattataggcatgcgtcaccaagccttgctaatttttgtatttttagtagagacagggcttcaccatgttcaccatgctgsccttgaactactgaacacaagtgattgggccaccttggcctcccaaagtgctgggattacaggcatgggccaccagccaacttttagttattttataaag

SEQ ID NO: 197673 - DNA, 201 bp, Homo sapiens
aatgtatggttttaggaaattacaaaaactggttggggcagtccatccttgcccactgattgctggaccaactacagcataaaagctctacatcgggggggcaagactcctggttgacactggagtctttatcgaaatctccccagattaaatggtcccaatttactaaggcccagtctgaggagagtcaggagggacagc

SEQ ID NO: 197674 - DNA, 201 bp, Homo sapiens
attggattttgggattttatgtgggagctgaagaggaatatttataatggacacaatcagagatttgcttttgggagattcatctggcatagttgtacatrgtgaattgcacagaagagacacaggagttaggaagtccaactgaaaggccatttaaaaaataacttatattacgtgtatttattagggaaacattaattg

SEQ ID NO: 197675 - DNA, 201 bp, Homo sapiens
catgcgtcaccaagccttgctaatttttgtatttttagtagagacagggcttcaccatgttcaccatgctggccttgaactactgaacacaagtgattggsccaccttggcctcccaaagtgctgggattacaggcatgggccaccagccaacttttagttattttataaagtacaattaaattattattgactatagtca

SEQ ID NO: 197676 - DNA, 201 bp, Homo sapiens
ctttcacttctttggttagctcctagggatttaatttatgtgtggttgttttaaatgggattgcttttttgatttctctttcggagttttcactattggcmtgtagaaatgctactgatttttgtatgttgattttgtatcctgcaactttgctgaatttgttctaatagttttgttttgttttaaactcatgttgtttaa

SEQ ID NO: 197677 - DNA, 201 bp, Homo sapiens
ccactcagggatgaacaagggctgactgattgataagctcttgaaaattcttaagctcactgcatcccttcaggtctccaaggaacgctaagtttcctccytgttgtgagagacacaaagtgaactgagtgttgggagacagaagctggatgaccctcaggggctgacccacagggtgctggactttgggatatagcagag

SEQ ID NO: 197678 - DNA, 201 bp, Homo sapiens
tatgtgtggttgttttaaatgggattgcttttttgatttctctttcggagttttcactattggcctgtagaaatgctactgatttttgtatgttgattttstatcctgcaactttgctgaatttgttctaatagttttgttttgttttaaactcatgttgtttaattaacagttttttggtggagtctttaggtttttcca

SEQ ID NO: 197679 - DNA, 201 bp, Homo sapiens
caacccttcctcttgcattttcttacagctctttcttttcaaacttttttttaacatgtcttggcttagttgttttgcttgattttccaaaagaagaagcyctggataaggcggaggatagctgagggaggttttagtagctgccatttttatgagcctctgcaccaacccacagatgcatggtgtgacacagcacctgac

SEQ ID NO: 197680 - DNA, 201 bp, Homo sapiens; identical to SEQ ID NO: 34166

SEQ ID NO: 197681 - DNA, 201 bp, Homo sapiens
tcctgaagagagctgtttcagtggagtgatgagaacaaaagcctgattgaaataggtgcaagagagaacggaaacactagaactggattaagcaagtcacyggcaaccttttagggagttctgatataaagagagcagagaagtggggaagtaactggtaaaggaagttgaaacaagagagtttattttgccaagatgaga

SEQ ID NO: 197682 - DNA, 201 bp, Homo sapiens
tacaagcattaatatgtccttagtagaaactctggaccagtttcaaatatgtcatttttttttaagttactgagagagggagtttttttttttttttttttaaagcaatcacagtaagatttatttctaaaaattaatattaattgattataaagaaatgttggaaatgtaaacagcaaaaataccgtattatttaaaagc

SEQ ID NO: 197683 - DNA, 201 bp, Homo sapiens
cggcaaccttttagggagttctgatataaagagagcagagaagtggggaagtaactggtaaaggaagttgaaacaagagagtttattttgccaagatgagwaatattatagttcatttttatgctgatggaaaagtctcagtagaaagggaaaattgataatgcatgagagaggagaaaatagctagagctatgtccttaa

SEQ ID NO: 197684 - DNA, 201 bp, Homo sapiens
tgatttatcactctgaagaacagggtccccgatcagtgtgtgtccagcactgcttgacaggtgtacatctatgatggattattactcatagcaacgttttkttgttgttgttgttggagacagagtctcactctgtcgcccaggctggagtgcagtgccattatcttggctcactacagcctccacttcccaggctcaagt

SEQ ID NO: 197685 - DNA, 201 bp, Homo sapiens
attaagaatgcagagtattaggaccattgatcagatcaggacattaaaataatcatgaattatgacccaagtagtgttggagacagtactagaagtgggcscaaagcccaaatatccaaggcattaaaggaagtgatctggaggtgaacagatgactacaacaaggagggtagagggtgatatggcttgatgaagagaata

SEQ ID NO: 197686 - DNA, 201 bp, Homo sapiens
cccgggaggtggagcttgcagcgagccgagatggcgccactgcactccagcccgggagacagagcaagactccgtcttaaaaaaaaaaaaaaaaaaaaaaattttgactcttgaaaggaactcttgatgagcgtcagagttgggcaagtaaactgaggcataaactaatctattgaatacctagatattattatcagtcgc

SEQ ID NO: 197687 - DNA, 201 bp, Homo sapiens
ccggtggctcacgcctgtaatcccagcactttgggaggccaaggcgggtggatcacgaggtcaggagattgaggccatcctggctaacatggtgaaacccygtctctactaaaaatacaaaaaattagccaggcctggtggcgggcaccagtagtcccagctactagggaggctgcagcaggagaatggcgtgaacccggg

SEQ ID NO: 197688 - DNA, 201 bp, Homo sapiens
ggttcagaaatgtctaaatctgaatttattatggatagcaaatacttaagagaaaaaaatcatgaaatataagcttaacgagatcagggatttttttttttggtcattttcatttactgttatagtcccaattcctacaataatgcctagcatataacagatattcaacaaatggttgttaaattgtgaatgaataataag

SEQ ID NO: 197689 - DNA, 201 bp, Homo sapiens
agtattcaaagccttgtggtagatgaaagggtgtaaaatatgaatagaagagaactaaggaatgaaccctggggcatggcaacaatatgaaaaaaaaaaaaccaacaaagcataaaagatggttagaagtaactagtgaggtaggggaagcccggggacatgttctggaagcagaataaacaaaatattcaaggagaaggg

SEQ ID NO: 197690 - DNA, 201 bp, Homo sapiens
tggcctcccgaagtgttggtattacaggcattagccactcatcatagttttctatctctccatattgtaactcccttttcccacagtgagaaactgggctrccatcccccttaacatatttatgcattagatgagtcccttctgaatggaaccaatttcctgattctcctaccagcacccttcctcgacaggactgagctc

SEQ ID NO: 197691 - DNA, 201 bp, Homo sapiens
tagagacagggtttcactgtgttggccaggctggtctcgaactcctgacttcaggtgatccacctgccttggcctcccgaagtgttggtattacaggcatkagccactcatcatagttttctatctctccatattgtaactcccttttcccacagtgagaaactgggctaccatcccccttaacatatttatgcattagat

SEQ ID NO: 197692 - DNA, 201 bp, Homo sapiens
atggcgtgatcctggcttactgcaacctctgcctcctgggttcaagcgattctcctgcctcatcctcctgagtagctgggattacaggtaccctccaccaygcctggctaatttttgtatttttagtagagacagggtttcactgtgttggccaggctggtctcgaactcctgacttcaggtgatccacctgccttggcct

SEQ ID NO: 197693 - DNA, 201 bp, Homo sapiens
taggtttttccaaatatgaaattatatcatctgcaaaaatagataatttgacttcttccttcccaacttagatgccctttatttctcccatatatttttaktggacagagctggaattatatgtataaatatacatatgaatacattaatttgtatgtatgtatatatatatgctcatatacatatacacatgcacatatt

SEQ ID NO: 197694 - DNA, 201 bp, Homo sapiens
gagttttcactattggcctgtagaaatgctactgatttttgtatgttgattttgtatcctgcaactttgctgaatttgttctaatagttttgttttgtttkaaactcatgttgtttaattaacagttttttggtggagtctttaggtttttccaaatatgaaattatatcatctgcaaaaatagataatttgacttcttcc

SEQ ID NO: 197695 - DNA, 201 bp, Homo sapiens
tttttctagcaccatttattgaagagactgtcttttcctcaatgtatgttcttggcacctttgttgaaaatgagttcactgtaggtgtgtggatttgtttrtgtattctccattctgttccattggtctatgtgtctgtttttatgccagtaccatgctgttggtcactatagctctgtagtataatttgaaggtaggtaa

SEQ ID NO: 197696 - DNA, 201 bp, Homo sapiens
ttttgccttgcatggtcactcaataattgttttctgatagaattaataaatgacaaaaagcacataaaagtgagtaatcagtgaatgatttttccttcatsttttccttaatttcactggtctatattatgagtatgtgggtgtatgtgtgtgttttctgatattataacataagactggccatgttttgccacaccaatt

SEQ ID NO: 197697 - DNA, 201 bp, Homo sapiens
gccaccatcattggagtaccgtgagcaaggaagaaagtagtagatgaagtcagagaagtgctgggggaccaagtagtagatgaggtcagagaagtgctggsggatcagactttgtagggtcttgtagaccattgtacagtcttggctttttctttaagtgagctggagaaccatgggaggattttgaacagtggagtgatg

SEQ ID NO: 197698 - DNA, 201 bp, Homo sapiens
gcactcatcccagcatgagggacgcaccctcatgactccatcttaccctaattaccccccaaatgctccatcttaattgccacaactttggggggtagggmttcaacatatgaattttgggggaattcattcagtccataatacccccaaatctccatggtttaacacaatagaatttagtgaagttcaaaacaggtgttt

SEQ ID NO: 197699 - DNA, 201 bp, Homo sapiens
gagattcatctggcatagttgtacatggtgaattgcacagaagagacacaggagttaggaagtccaactgaaaggccatttaaaaaataacttatattacrtgtatttattagggaaacattaattgttaaaagaaataaatcttcctgtgttagttagcttgggttggcataacaaaatacatagactgggtgacttaaa

SEQ ID NO: 197700 - DNA, 201 bp, Homo sapiens
aggagaaaaatcccataaaaaagtgggcaaaggacacgaacagacacttttcaaaagaagacataagtgtggccaacagtcacaggaaaaaaagttcaacrtcattgaccattagaggtcttcctctttaaagatttttctggccaggcaaatcccagaagttttggaggccaaggtgagaggattgcttgagcccaggat

SEQ ID NO: 197701 - DNA, 201 bp, Homo sapiens
tgtgtcctcacaggacattcattttgtgcatgtggagagagagagaaagagaaagggagatagagatatctctggtgtctcttcctcttcttataaagacmccaatcctaacagattagggctccacccttatgacctcacttaaccataattacctccctaaaggcaatatattgaggaattgagaaacatagtcatatt

SEQ ID NO: 197702 - DNA, 201 bp, Homo sapiens
gcaggatgcatccccaactaattttaggtaataagaaatggaaggactgtgtatcaatttattgtagttgtattacagtcccaagcaaggcagggcatcckgggaatgggaatttgtaaaaatgccagggtaaacaggattgggaattggagtgatagacaaagacaagactgtttgggagcgtgggggtagtgataggaa

SEQ ID NO: 197703 - DNA, 201 bp, Homo sapiens
gtaggattgcactctcctgtaccttgaggtgacttgcactggataacgatatatggacagaagtaatgctagtcacttctacacagaaaatatgagtcagkgcacattttaccgtttgttcttcctcttaccctgaaacatggaaacaggcagatgaactttccttagttggaattcctgagtgaggagaatatagggcta

SEQ ID NO: 197704 - DNA, 201 bp, Homo sapiens
caatgtaagctttcctgccattagctgagtttagcgtaagacagaagatctgaaactcaagaccagccctgggcaaggcacagtggctcatgcctgtaatrccagcagtttgggaggccacagtgggaggactgcttgaacccaggagtctaagaccagcctgggcaatatagccagaccctatctctacaaaaagtaaga

SEQ ID NO: 197705 - DNA, 201 bp, Homo sapiens
catactgtttttgttaacctacatcactggcttttctagtcagtctcttgctcatgcccctttgtttcctgagctattttctgttccatttatttatttaraaagggtctctctcacccaggctgcagtgcagtggcacattcatggctcactgcagcctccacctcccaggctcaagtcatcctcccacttcagcctccc

SEQ ID NO: 197706 - DNA, 201 bp, Homo sapiens
ttaaacttgtcaaagtagcacatgaaatgttatacctcacaatacgaagggtccagcttcattcttttgcatgtggctgtccagttatctcagaaccattygttgaaaagcctcttcttcccctactggagagacttgccatctttgtcaaaaattggtgaattcactgatgtataggctaatttctagactcttaactct

SEQ ID NO: 197707 - DNA, 201 bp, Homo sapiens
atatggcttgatgaagagaataaggttaggtttctttcttaaaaggaataggagaatggtctggaagtaacagcggaggagcaagaaggacaattataccrtgaagagctgtgggtaaaattttatcctgaaatttcattacaaaatagctttggttcagaaatgtctaaatctgaatttattatggatagcaaatactta

SEQ ID NO: 197708 - DNA, 201 bp, Homo sapiens
aaaacaaagacaagaacaaacaaggtctgagaactggacacattttgccacctaactttagagttaagtgaattaggaacaagtggggctagctttacaawactagattcattatgaaactagggataagttatcaacataattaaaaatgagaaaacagcagcccatgtaacaattgctttgtttttattatgctaaaat

SEQ ID NO: 197709 - DNA, 201 bp, Homo sapiens
aatgtttttttgtaattttagtaaagtcagggtttcaccatgttggtcaggctggtctcgaactcctgacctcaggtgatccactcgcctcggcctcccawtttctgggattacaggtgtgagccactgctcccggcctgatttttttatatatgtttttaaaatttaagttacacatataaaaattaaaggttatcattt

SEQ ID NO: 197710 - DNA, 201 bp, Homo sapiens
agtttgtcttgccattgtaacattttaccttactcaaacgaatatgtctttggctatcgtgatgccgctgtcatcactatgaccacctgtatgggccacartagttctttttggagatcttactctctcagtcttatactcaggcatgagtgacccacagtttagcatttacaggtgcagattttatgactgtaaaatgta

SEQ ID NO: 197711 - DNA, 201 bp, Homo sapiens
tcagggtttcaccatgttggtcaggctggtctcgaactcctgacctcaggtgatccactcgcctcggcctcccaatttctgggattacaggtgtgagccaytgctcccggcctgatttttttatatatgtttttaaaatttaagttacacatataaaaattaaaggttatcatttatgtgtgtcgctatgtgctagccctg

SEQ ID NO: 197712 - DNA, 201 bp, Homo sapiens
aaacgaatatgtctttggctatcgtgatgccgctgtcatcactatgaccacctgtatgggccacagtagttctttttggagatcttactctctcagtcttrtactcaggcatgagtgacccacagtttagcatttacaggtgcagattttatgactgtaaaatgtaacacatgcttattggataatacaaacaacaactag

SEQ ID NO: 197713 - DNA, 201 bp, Homo sapiens
ctgaaattccagggctggattgattggtttgatctatttaatcaaaactataacccagtaacactgtgcagacagagtgagataacagcctaccgtcattmcttcctttgtctctacaaattgtcctaatgcagctaggctaacagcgttgcgatcccaccatttagttttacacatgtgaagagcagaagggagagtatt

SEQ ID NO: 197714 - DNA, 201 bp, Homo sapiens
cctaatgcagctaggctaacagcgttgcgatcccaccatttagttttacacatgtgaagagcagaagggagagtatttgacgtttcatattgtgtattaaygtaagaggaaaaagaaggagcacgatttcccaggattctttgatcctgttttaaatagactagtatatatctgtaaaatcttcagaggatttgtaagata

SEQ ID NO: 197715 - DNA, 201 bp, Homo sapiens
aaagtagtagataatgataagcacattggcaaaatgttcattatttccttttctctaactatcactgtatgattacaaataactttttttgtttttgtttwcaaatttcttttaaatttatttataaacctatttcaaggccgggcgtggtggctcaagcctgtaatcccagcactttgggaggccgaggtgcgcggatca

SEQ ID NO: 197716 - DNA, 201 bp, Homo sapiens
taactatcactgtatgattacaaataactttttttgtttttgttttcaaatttcttttaaatttatttataaacctatttcaaggccgggcgtggtggctyaagcctgtaatcccagcactttgggaggccgaggtgcgcggatcacgaggtcaggagatcgagaccatcctggctaacatggtgaaaccccacctttact

SEQ ID NO: 197717 - DNA, 201 bp, Homo sapiens
tggttgacactggagtctttatcgaaatctccccagattaaatggtcccaatttactaaggcccagtctgaggagagtcaggagggacagcggtacttttmtgaagtagagagctgtctttgacttggcaagtccccacagggtataacaaggcaagcatcaaatgtaatagtttgaggagaaattgacttggttatgtta

SEQ ID NO: 197718 - DNA, 201 bp, Homo sapiens
taggttttattttattcaataagttcttttttagtattattaaattcaatgctcatattttctcagattttgtcagtgggggcctcttcaagctgacgtawgtgacattttgataaagctcccatctttgagcacttcctttttttctgtcataagattcaggctcatctgtaatttccttgccccagtcctagaatcagt

SEQ ID NO: 197719 - DNA, 201 bp, Homo sapiens
ctgtctcaaaaaaaaaaaaaaaaaaaacctatttcaaagtgaaagttattgctatttgaattttatacctttatgtaaaaatttaataagtagataaattkgaagaggctgtttatggttattagactacaaacttttttttgataaactactttcttatgaatagacatggagaaatgtaaaatacagacatttaaaaat

SEQ ID NO: 197720 - DNA, 201 bp, Homo sapiens
accggaaattctaggggtggtacatgtgctaaaagacttttagttttgagggaaaggaaagtggaagataaaccaagtatataatttctaagaaattgatmttttgttttaaatgtggggacatcagcagtggactttatagttcttggtgccttcttactgagaaatttcctttagcacctatttttattagtttttaga

SEQ ID NO: 197721 - DNA, 201 bp, Homo sapiens
atcccttcagtggaaaatggcatttgatatttggaaaccaagttttaagtgctaggtatgcttgtttctaatgagatatttatttttctttacttttttcycttggagataggggtctccctgtgttgcctagggtgatcttgaactcctgggctcgggtgatcctcttttttctctcttttcagcctttcacgtagctga

SEQ ID NO: 197722 - DNA, 201 bp, Homo sapiens
gcactattaaagacagtcgcatccgggccctcctgccgcaagctgccctcccagccaagggtccttcaggtaggaggtcctgggtgactttggaagtccgyagtgtctcattgcagataatttttagcttagggcctggtggctaggtcggttctctcctttccagtcggagacctctgccgcaaacatgctccgccagat

SEQ ID NO: 197723 - DNA, 201 bp, Homo sapiens
tatgcttgtttctaatgagatatttatttttctttacttttttctcttggagataggggtctccctgtgttgcctagggtgatcttgaactcctgggctcrggtgatcctcttttttctctcttttcagcctttcacgtagctgactacaggttcatgctaccatgcttggctataggtacatgccaccacacctagctgc

SEQ ID NO: 197724 - DNA, 201 bp, Homo sapiens
aggtcctgggtgactttggaagtccgtagtgtctcattgcagataatttttagcttagggcctggtggctaggtcggttctctcctttccagtcggagacytctgccgcaaacatgctccgccagatcatcggtcaggccaagaagcatccgagcgtaagttcgtgaccgctctcctaatgttttcccttgtccttcttgc

SEQ ID NO: 197725 - DNA, 201 bp, Homo sapiens
ttgaagaaccaagaaaaattttgataaaatgagcaggctcattaattcggagcttaaattctgaaaactatctctttttttctttttatcatataaaaacwgtgccatatttatttaggccactagatcattcagctctgtcttctttgaatactgccaccaataaatattttctagggaagcaatttttttcaagcaagg

SEQ ID NO: 197726 - DNA, 201 bp, Homo sapiens
gttgtcccaggcctctgtgaccctctacgccatgcattgtggggttttgtctgacaggaggaaggagacggacactgctcggaaaaaaaacctagtttttyctagttagtgaatattggaacagtctggtggccgctctcttttgcaggttgtgcggtccaggagggatagatgtgcgctgtgtgggtcagagactagcat

SEQ ID NO: 197727 - DNA, 201 bp, Homo sapiens
cttcagaccttcacgtgttattacctccgccctgtacacctgcatcctccgttttcacctggttaatgtccgctcctccttcagagctagtgtaacttccrgtggagccttctcctatgatttctagtcccaattattaatacttgcttgatcatttgattaatgctttaagctacgtatgagattggagagggttcagag

SEQ ID NO: 197728 - DNA, 201 bp, Homo sapiens
tagggtgatcttgaactcctgggctcgggtgatcctcttttttctctcttttcagcctttcacgtagctgactacaggttcatgctaccatgcttggctayaggtacatgccaccacacctagctgctaatagggtatttctgttaccataactttttaaaaaaattttttatttattattgttttttaattttttgtggg

SEQ ID NO: 197729 - DNA, 201 bp, Homo sapiens
agatcaacgtcctgaagagtttccccaatgttttttttagtagtttcatagttcaaagtcttaattttaagtctttaatccatttgatttgatttttgtayaaggcgagagataggggtcaagtttcatttttctgcctgtggatatccagtttttctagcaccatttattgaagagactgtcttttcctcaatgtatgtt

SEQ ID NO: 197730 - DNA, 201 bp, Homo sapiens
atgcagaagcttttaaacttgatatgatccaatttgtccatttttgctttaattgcctgtgctcgtggggtattacttgagaaatttttgcccagatcaaygtcctgaagagtttccccaatgttttttttagtagtttcatagttcaaagtcttaattttaagtctttaatccatttgatttgatttttgtacaaggcga

SEQ ID NO: 197731 - DNA, 201 bp, Homo sapiens
tgctatgcagaagcttttaaacttgatatgatccaatttgtccatttttgctttaattgcctgtgctcgtggggtattacttgagaaatttttgcccagaycaacgtcctgaagagtttccccaatgttttttttagtagtttcatagttcaaagtcttaattttaagtctttaatccatttgatttgatttttgtacaag

SEQ ID NO: 197732 - DNA, 201 bp, Homo sapiens
ttcaattgttttcatttttagctcacacaaataactaagaacatgcaaagcttgtctttttatacctggcttacttcacttaatgacctccagttccaccrtgttgttgcagatgacaggatctcattcttttttacagctgaatactactccattgtgtatatatgtcacattttatttatccattaatctgttgtttcc

SEQ ID NO: 197733 - DNA, 201 bp, Homo sapiens
tttttatttattattgttttttaattttttgtgggtacataggtgtatatatttatggggtacatgaggtactttgatacaggcatgcaatgagtaatgatcacatcaaagaaaatggatattcatcacctcaagcacttaacttttgtgtaacaaacaatccaattatacacttttagttattttattttgtttatttat

SEQ ID NO: 197734 - DNA, 201 bp, Homo sapiens
gagtttgagaccagcctggccaacatggtaaaaccccatctccattaaaaaaaaaaaaggctgggcatagtggctcacacctgtaatcccagcactttggsaagctgaggtgggaggatcacctgaggtcaggagttcaagaccagcttggccaacatggtgaaaccccatctctactaaaaatacaaaaattagccaggc

SEQ ID NO: 197735 - DNA, 201 bp, Homo sapiens
ttttttatttattattgttttttaattttttgtgggtacataggtgtatatatttatggggtacatgaggtactttgatacaggcatgcaatgagtaatgatcacatcaaagaaaatggatattcatcacctcaagcacttaacttttgtgtaacaaacaatccaattatacacttttagttattttattttgtttattta

SEQ ID NO: 197736 - DNA, 201 bp, Homo sapiens
actaaaaatacaaaaattagccaggccatcagagaaatgcaaatcaaaaccacaatgagataccatctcacaccagttagaatggcaatcattaaaaagtmaggaaacaacaggtgctggagaggatgtggagaaataggaacacttttacactgttggtgggactgtaaactagttcaaccattgtggaagtcagtgtgg

SEQ ID NO: 197737 - DNA, 201 bp, Homo sapiens
attttttatttattattgttttttaattttttgtgggtacataggtgtatatatttatggggtacatgaggtactttgatacaggcatgcaatgagtaatgatcacatcaaagaaaatggatattcatcacctcaagcacttaacttttgtgtaacaaacaatccaattatacacttttagttattttattttgtttattt

SEQ ID NO: 197738 - DNA, 201 bp, Homo sapiens
ttcacgtagctgactacaggttcatgctaccatgcttggctataggtacatgccaccacacctagctgctaatagggtatttctgttaccataactttttwaaaaaattttttatttattattgttttttaattttttgtgggtacataggtgtatatatttatggggtacatgaggtactttgatacaggcatgcaatga

SEQ ID NO: 197739 - DNA, 201 bp, Homo sapiens
tttcacgtagctgactacaggttcatgctaccatgcttggctataggtacatgccaccacacctagctgctaatagggtatttctgttaccataacttttwaaaaaaattttttatttattattgttttttaattttttgtgggtacataggtgtatatatttatggggtacatgaggtactttgatacaggcatgcaatg

SEQ ID NO: 197740 - DNA, 201 bp, Homo sapiens
gagatatttatttttctttacttttttctcttggagataggggtctccctgtgttgcctagggtgatcttgaactcctgggctcgggtgatcctcttttttctctcttttcagcctttcacgtagctgactacaggttcatgctaccatgcttggctataggtacatgccaccacacctagctgctaatagggtatttctg

SEQ ID NO: 197741 - DNA, 201 bp, Homo sapiens
tctctgtagggcgataacattagggtagtagaaagaatgttacatttacagtcatacaataagttcagatctcaaatctgctgttttcatttacttttttyggttcatgaaattatctaatttctctgagtctcgttttctctttggtaaagtagaactgctaataccaaatcttgtaatgttttgaggattgacataaaa

SEQ ID NO: 197742 - DNA, 201 bp, Homo sapiens
taagttacacatataaaaattaaaggttatcatttatgtgtgtcgctatgtgctagccctgtgccaagtgctttattattattttttatctttatgattgscctatgaggtaggcactagcattattataccagttttataataagaaaacaagaacataggttaaataactgtccaagattataatgctaataattggcg

SEQ ID NO: 197743 - DNA, 201 bp, Homo sapiens
aagaaaacaagaacataggttaaataactgtccaagattataatgctaataattggcgaagctggaatgaagccctgtctttctgactataaaactcacaygcttggtagggcatggtggctcacgcctgtaaggccagcactttgggaggctgaggcaggtggatcacttgaggtcaggagtttgagaccagtctggtca

SEQ ID NO: 197744 - DNA, 201 bp, Homo sapiens
ctttggaagattaccagccaattattttgtagaatatttctctacgtggatttgtttgatgtttctcacagttagatgtcagttatacatttttggcaagkatgcatatcggtgatgttgtgttcttattgcatcctatcaagtgatagatgatttcaatttgtttcataactggtaactttgatcatttcattaagaagg

SEQ ID NO: 197745 - DNA, 201 bp, Homo sapiens
ttggcaagtatgcatatcggtgatgttgtgttcttattgcatcctatcaagtgatagatgatttcaatttgtttcataactggtaactttgatcatttcaktaagaaggagtctattgggcaccttcactgtaaagtttctctttttttcctttgtaattaaaaagcattttatcgggaggtattttgagagtatgtaaat

SEQ ID NO: 197746 - DNA, 201 bp, Homo sapiens
actgtaaagtttctctttttttcctttgtaattaaaaagcattttatcgggaggtattttgagagtatgtaaatattccatgccacttagactttcatccrctagttttagtatctgtggatgtttcctgattgattatttcttttgtggtccgttatgttcactacatttatatgtcatcattctgctacagagaaaatc

SEQ ID NO: 197747 - DNA, 201 bp, Homo sapiens
aggggactggttttaccaggtgtgccatttacacatcccacgaaaagactggccctcccaccctagtcttttattatgtaaacgtggcctccacgtggctrgtcgccatgatgcctgtacacgtggtgtcatctggaggctgccatgacagctggcacacgtggtgataagaaaaagagggcaggagatgccacattgaat

SEQ ID NO: 197748 - DNA, 201 bp, Homo sapiens
cgatgtagaagaagaacatagctattgtagactaaggaagggtttgcttttgcttaataaatgttcctttttaagagaggcaactttaaaaaggaggtaartagaatgagagaggagaatccttccataaggcggaattagccctggataaggtgatagtaaagtgggagatgtctaaataatatagcatttacatcctta

SEQ ID NO: 197749 - DNA, 201 bp, Homo sapiens
gtgggtaaaattttatcctgaaatttcattacaaaatagctttggttcagaaatgtctaaatctgaatttattatggatagcaaatacttaagagaaaaawatcatgaaatataagcttaacgagatcagggatttttttttttggtcattttcatttactgttatagtcccaattcctacaataatgcctagcatataac

SEQ ID NO: 197750 - DNA, 201 bp, Homo sapiens
cctgattctcctaccagcacccttcctcgacaggactgagctctttatcctctttctaccttatcctgtttaggtactgacagcctgcttcatgctccctytgccagagccccctgtactgatggcctccttgccttgtgcagcacaatgcacaggtgtgtcaccccaccccaaccctgcataaatgactaccttgctggg

SEQ ID NO: 197751 - DNA, 201 bp, Homo sapiens
aagaccattgattggaaaagaggagatcaagtaattaagaatgcagagtattaggaccattgatcagatcaggacattaaaataatcatgaattatgaccsaagtagtgttggagacagtactagaagtgggcccaaagcccaaatatccaaggcattaaaggaagtgatctggaggtgaacagatgactacaacaaggag

SEQ ID NO: 197752 - DNA, 201 bp, Homo sapiens
agaggctttgatatatagacattttctcagtgatagtataatttaatttgtagttggtaactgaattttgaatgaatgtttagaagtggaaactgaagtayttataggttattaaaatgaaaataaaatgtagtaaactgttattttataagcacctaagggatcatatatataacagcaataaaatagctgttgaagaaa

SEQ ID NO: 197753 - DNA, 201 bp, Homo sapiens
acgaacatatgaggggttagatctaagcaggcactattaaagacagtcgcatccgggccctcctgccgcaagctgccctcccagccaagggtccttcaggkaggaggtcctgggtgactttggaagtccgtagtgtctcattgcagataatttttagcttagggcctggtggctaggtcggttctctcctttccagtcgga

SEQ ID NO: 197754 - DNA, 201 bp, Homo sapiens
gagtcatcttaacatcctttccaaattccatttctttctttagaacacagttataagaaatcttacctcaatgtaagatctactttatttaaattttaagdcaaaacagtccaataacagtttgagacttggaaatcaatgtgcagaaactactgtaatctctcgttggccagtgttttaagtatttgaagatggttattc

SEQ ID NO: 197755 - DNA, 201 bp, Homo sapiens
atgattttatgttgttaaatattcttttaaaaattcatatctgtaattgttactgtagaaaaccaaatacaaagaattctaaaacctttgtaccgtctctrtgtatttgagattacttaaaatatctttttttctgttccaagttctactcagtgaatgtggattacagcaagctgaagaaggaacgtccagatttctaaa

SEQ ID NO: 197756 - DNA, 201 bp, Homo sapiens
tgcaaagaatttgtttttcaagccccaggataaaggaagccagaaaatttaatgggaatgacatgtaaatattagagaggtgaagaagactcgatacattwtcttggaaatttaaaaatgtacctataatttgctccacattaaaaagtaagacacttaaaccagagtcatcttaacatcctttccaaattccatttcttt

SEQ ID NO: 197757 - DNA, 201 bp, Homo sapiens
tattacagacgtgagccactgtgcccgcagcctgatagcaacttttaacatcaccctttgtggatttcacgttttccccttaacctgattataatttggcytctaaatccttcagtaaatctccttacaagaagaaaataaaaatgcaatggctaagctgaaacatcgatctcatctgtgttatattttgcctctaaaaag

SEQ ID NO: 197758 - DNA, 201 bp, Homo sapiens
agtgattctcttgcctcactctcctgagtagctggaactatggcacgcacaaccacacccagctgattttttgtgtttttagtagagatggggttttgccrtgttggccaggctggtcttgaacccctggcttcaagttgatccgtctgtctcaaccccccagtgctggtattacagacgtgagccactgtgcccgcagcc

SEQ ID NO: 197759 - DNA, 201 bp, Homo sapiens
attgcatttaattatctttttgatgtccttcaatcaaaaccagtttttcagtgtttctttgactttcaaccttgacactttggaagattaccagccaattrttttgtagaatatttctctacgtggatttgtttgatgtttctcacagttagatgtcagttatacatttttggcaagtatgcatatcggtgatgttgtgtt

SEQ ID NO: 197760 - DNA, 201 bp, Homo sapiens
gtgcatttgtgttaatcttcttgaatctactgcaatactgttcttgatagtagcccatatataattttagatagctttattgggaaatgattcttatagcrtatacttcacctacttaaaatgtgcaattcagcggtgtttcacatattcacagatatgtgcaattatcactacagccaactttagaacattttaatcacc

SEQ ID NO: 197761 - DNA, 201 bp, Homo sapiens
gagagagagaaaatatcttagaagttatgtaaaccacaaaacaaagcagtaccttatattactagcctctttttgttgcaggatctctccctctaaattayagcagttcattcagcaagtagggaaggtaattcttgttaatcctctattctgttggcgattcttccacgtacttagtagagttaaggcaaaaacttaccg

SEQ ID NO: 197762 - DNA, 201 bp, Homo sapiens
ccctagagaaggctgctttctgccagaggtgaccaggtggtgccctggtagatccaggtcccagtgtgccacctccaagattaaagatggcattgtttcarggagctctgcttacgttttataaagaggctagtaatatcagaagtggaataacggttaaagtcagaagagagatgatagtttgtctcttgaagaaccaag

SEQ ID NO: 197763 - DNA, 201 bp, Homo sapiens
ttaggaatatatactataatatagcaaatattatgtaagatattgaaagggctccattgtctgggggtatatatcctggctcttggtcgtggttgagaaakaattcaggacactgacacacatgaggagtgggttcaggagcagaaagtttaatagaaaaagaaaagagagagaaaaagctttctcatattgagaaagtcg

SEQ ID NO: 197764 - DNA, 201 bp, Homo sapiens
tgggaggccaaggtgagaggatgacttaaggccaggagttgaaggccagcacagccctggtgacttagcaagatcccattttacatacatatatatatatwtttaaggagcttctttttctaagatgcatgtaaagattataagatgtaatcagatgcagcaaaatatgtagcaggtgactaagtgtggagttccttcagg

SEQ ID NO: 197765 - DNA, 201 bp, Homo sapiens
tattaccagccgattatttccatgagcttttcattttttgtaatacctcattgaatatagtcagctgcaaccaacacactgctaaacttctctgttctaccttttcccttaaggccacaagttcagtaggtatatcatctttcagttatttcagttggcaacattatcaaagttttgccatgggatagtattgaaaaacca

SEQ ID NO: 197766 - DNA, 201 bp, Homo sapiens
ttctgaactttgtcacggtcgaaggaactttcctcctaccctctgtaaatattacacaaacagagggaccatcactccagaccctcaaagctgaatacagyggtggcttgctgtcagaccagggtttgagggggggaactgaggcacagagccggaagcctgtgacttccatcctcgggtgtaacctggagacgggggttt

SEQ ID NO: 197767 - DNA, 201 bp, Homo sapiens
tccgcccgcctcggcctcccaaagtgctgggattacaggtgtgagccaccgcgcccggccaaaaaaaacatgttttttaagcatgaagtttgggttgcacytcagtgcctcctcttcccccattggtacagaaatgcgcccatgctggttccagctggatcagatccccttcaaggacatgtggcccgacgacagctactg

SEQ ID NO: 197768 - DNA, 201 bp, Homo sapiens
tttttcatcacaacctgcagtaagaaatacgttttgtactctgatagagtgtacacactcaggtgtgcaggtacagctaaagtaagttgcagtagccgccyttattacataaaagggggctctacttttccgattcatttctctttttttctccagaggtgggatctcacccatggcacactcttggctcactgcagcctc

SEQ ID NO: 197769 - DNA, 201 bp, Homo sapiens
agccgtggtctctgcaccgaggctccagtagcgtacctgcccctgctctgcgcccaccctaaaatgagaaacacggtcatgaggatgaaatataaacgatygtcaggttcctcacaatcactcagtgaactcctcagagagtcagtgtacgtttgggctggccagacgcagtggctcacccctgtaatcccagcactgtgg

SEQ ID NO: 197770 - DNA, 201 bp, Homo sapiens
gagatcatctgtgtaaacatcgctgcacagacgttagcccccgttcgtgtttttgttctgagaaaggtaggccagcttgcctggagaggagaactacagastaaagagggtcctggcacggaggaaagccaggacgctgcagcctagtggctttccaattttttcatcacaacctgcagtaagaaatacgttttgtactct

SEQ ID NO: 197771 - DNA, 201 bp, Homo sapiens
ctgggcctgggctgtcactggtacacagagggcactgggctagaactgcgttcctcccaccagaggctccacaccatctccgggcccctccccagagcctytcaaccaaaatcagtgtcttcaaagttcaagttgattctgaagctcagccaggtcgggaccagataatgcattctaggggacatcctcctgggtctccca

SEQ ID NO: 197772 - DNA, 201 bp, Homo sapiens
aagcagaaggatcgcttgagcccaggagttcaggaccagcctgggcaacatagcaagaccctgtctctacagaaaaacacacacacagaaaaattagccgkgcatggtaagaggaggagactgaggtgcccagcggctgcagcccgtgcatccccagggtcccagcacagagtgggtgttcagaagtgtctgctgagggac

SEQ ID NO: 197773 - DNA, 201 bp, Homo sapiens
tagactccctgccttatcgcaaggacagagggctttctgtatccctaggtttcttgccttgatgtactggagcaatcagatcacacggcggcttggagagygagtgcaaggttttatgagtggaattagccctcagcagatgggggagccagaaggcagttggagtgggaaggtgattttcccctggagtcgggctgctga

SEQ ID NO: 197774 - DNA, 201 bp, Homo sapiens
ttgggttgcacctcagtgcctcctcttcccccattggtacagaaatgcgcccatgctggttccagctggatcagatccccttcaaggacatgtggcccgaygacagctactggtttccactcctgcttcagaagaagaaattccacgggtacttcaagttccagggtcaggacaccatcctggactacacactccgcgagg

SEQ ID NO: 197775 - DNA, 201 bp, Homo sapiens
actgggaggtgacgctttttaagacgagcaacagccggccgccaagaggcgggtgaggccccactgagcacttctattgcatctaactggggagccatttrtacccaagtagaagcacacgttcactttgtagctcaagcccaactttaattagccatctgtatgaataaatgctgattccaggtccgtttcctctccagt

SEQ ID NO: 197776 - DNA, 201 bp, Homo sapiens
cagcaaacagcctcgccctcaggggatgacgtaccatcagccacaggccaccagcacggccctgggcttcagtacctgcgagtctgaatggatttgctccyggggcaaccccaggcccgtgctgctcaggagggggaggcagggaggagcgtcggcagcccggtctctggggaggctggttcctgctttatccacgcaata

SEQ ID NO: 197777 - DNA, 201 bp, Homo sapiens
gtccagagggctggactcagaccctcctctgtggggcaggggacaggcacgtagggagtactgaattgtgggggtgtgcagatttgggcttcaggcgcacrgtgtgagccgacctttctagacagcatccctgatccccaaagactagcgaggccggggacacaggagcagcgatgggaagcaggcccgccggaacctccg

SEQ ID NO: 197778 - DNA, 201 bp, Homo sapiens
accatcagccacaggccaccagcacggccctgggcttcagtacctgcgagtctgaatggatttgctcctggggcaaccccaggcccgtgctgctcaggagsgggaggcagggaggagcgtcggcagcccggtctctggggaggctggttcctgctttatccacgcaatacccagtcctattctatcaggaggaccccaaga

SEQ ID NO: 197779 - DNA, 201 bp, Homo sapiens
taggcacaggacggggacgtggcgggctcgggaaatgcaacatttgggcaaaaaaacagaaatgcctgtcctcacccaggtccctgggcacaggcctgggkgtggagccctggccagagaccacgccctcctctacccagcacttccctgcccccttccttatcatctggtcccttttctcagacaccacaacttccaaga

SEQ ID NO: 197780 - DNA, 201 bp, Homo sapiens
ccgcagggagctgcaggaggagagcggtctgacagtggacgccctgcacaaggtgggccagatcgtgtttgagttcgtgggcgagcctgagctcatggacrtgcatgtcttctgcacagacagcatccaggggacccccgtggagagcgacggtgagtctcacagggcctgctccccctccccactatgcgggtcccatct

SEQ ID NO: 197781 - DNA, 201 bp, Homo sapiens; identical to SEQ ID NO: 34177

SEQ ID NO: 197782 - DNA, 201 bp, Homo sapiens
ggagttgagaaggcggctgggttccttgaggtgtggaatgtcatgcactcctcctttcttgcgtggaaagcccgaggtataaagtgtgtatgatgtttgcttttttttttttttttttttttaagacagggtctagctcggttgcccaggctggagtgcagtggagtaatcccagctcactgcagcctccaactcctgggc

SEQ ID NO: 197783 - DNA, 201 bp, Homo sapiens
ggcctccaaaaatgctgggattacaggcatgagccaccctgcacccaacctgtttgcatttttattttttaactttaagctattaagggttaatgtttgcrtttcttaagggaaaaacagaggagaaagagccaaaggaaaaacactgaaatggtagcattcctgggtgatgagtttatggcgttttgtttcctggttgtc

SEQ ID NO: 197784 - DNA, 201 bp, Homo sapiens
acagtgccagcgtggggcccatgagccgtggtctctgcaccgaggctccagtagcgtacctgcccctgctctgcgcccaccctaaaatgagaaacacggtmatgaggatgaaatataaacgatcgtcaggttcctcacaatcactcagtgaactcctcagagagtcagtgtacgtttgggctggccagacgcagtggctca

SEQ ID NO: 197785 - DNA, 201 bp, Homo sapiens
tacgaaaagcgcgcgcggggattccaggagtcgtggtgaccagggaggggagccgggccagcgggcggcaggagactaggggagctgagccatgggcttgsgggagagcggggccgggagctcgaaggagaccagaagagcagggtcgggggctcgagggagacgaggagagcggggccgggggtttgggagagagacaag

SEQ ID NO: 197786 - DNA, 201 bp, Homo sapiens
agcctcagtgtcttcatctcagaatgaagaacagtccgcagcccttcggactcttgtgaagataaaatgaggaaatgaactcgaaggacttagaacggtgygcggtgtgcggtgcgtgctgagtgcgtgttagctgttgtggtgcggtggtgctgggggctgcagggcgtatctggaagcctctgtgcagcagcttgaatt

SEQ ID NO: 197787 - DNA, 201 bp, Homo sapiens; identical to SEQ ID NO: 34175

SEQ ID NO: 197788 - DNA, 201 bp, Homo sapiens
agagctaagtgacctggagcagggggttaagcgtgagcctcagtgtcttcatctcagaatgaagaacagtccgcagcccttcggactcttgtgaagataaratgaggaaatgaactcgaaggacttagaacggtgcgcggtgtgcggtgcgtgctgagtgcgtgttagctgttgtggtgcggtggtgctgggggctgcagg

SEQ ID NO: 197789 - DNA, 201 bp, Homo sapiens
aggtgggccagatcgtgtttgagttcgtgggcgagcctgagctcatggacgtgcatgtcttctgcacagacagcatccaggggacccccgtggagagcgayggtgagtctcacagggcctgctccccctccccactatgcgggtcccatctcctggctgggagaaaggccatccgcccaaaccatctctgagtgccaggga

SEQ ID NO: 197790 - DNA, 201 bp, Homo sapiens
gcagggaagggcttgttcccaggcgcagcagcacttgggcatcccgtggtgaagtcagccccttacacctcctccaggcacagctgtggggagcatgtccmgagaaggcgcaggaagaggcccaggccacgtgtcccgtgtggtcagcctggggaccagagttaaaaccagagctcctccttcaggaaacagatcatagaa

SEQ ID NO: 197791 - DNA, 201 bp, Homo sapiens
aagagccaaaggaaaaacactgaaatggtagcattcctgggtgatgagtttatggcgttttgtttcctggttgtctataacaaatatgtaatttttaaatyagcaacagcgttagactacttcggggaaacctggctctgtgtgccacgaagcagggaagggcttgttcccaggcgcagcagcacttgggcatcccgtggt

SEQ ID NO: 197792 - DNA, 201 bp, Homo sapiens
ggggcaaagtgcaagaaggagagaccatcgaggatggggctaggaggtaaggatggggcaggtctggccatagaaccggctttcccagggcacagggattsgggctgtagggccacacccttggtttcaccactaagagctaagtgacctggagcagggggttaagcgtgagcctcagtgtcttcatctcagaatgaagaa

SEQ ID NO: 197793 - DNA, 201 bp, Homo sapiens
tcccagcactttgggaggccaaagcagaaggatcgcttgagcccaggagttcaggaccagcctgggcaacatagcaagaccctgtctctacagaaaaacayacacacagaaaaattagccgtgcatggtaagaggaggagactgaggtgcccagcggctgcagcccgtgcatccccagggtcccagcacagagtgggtgtt

SEQ ID NO: 197794 - DNA, 201 bp, Homo sapiens
gaggcacagagccggaagcctgtgacttccatcctcgggtgtaacctggagacgggggtttcaccatgttggccaggctggtcttgaacacctgacctcamgggatccacccgcctcggcttcccaaagtgctgtgattacaggcgtgagccaccgtgcccagccgagaccctgtcttaaagaaagaaagaaaaaaatcct

SEQ ID NO: 197795 - DNA, 201 bp, Homo sapiens; identical to SEQ ID NO: 34180

SEQ ID NO: 197796 - DNA, 201 bp, Homo sapiens
gggcaggggacaggcacgtagggagtactgaattgtgggggtgtgcagatttgggcttcaggcgcacggtgtgagccgacctttctagacagcatccctgrtccccaaagactagcgaggccggggacacaggagcagcgatgggaagcaggcccgccggaacctccgactcccacctccccacgccacggacgctgcacc

SEQ ID NO: 197797 - DNA, 201 bp, Homo sapiens
tagagagacccccatgtctacaaaaaatttaaaaattaaccaagcagggtgagcaaatgcctgtagtcccgttactcaggaggccaaggtgggaggatcaytggagccccagatgtggagcttgcatttagctgagatcctgccactgcactccagcctggacaaagcaagaccttgtctcaaatttttttttaatttaac

SEQ ID NO: 197798 - DNA, 201 bp, Homo sapiens
tccttagtctcaatacccttttgtgtgaaggaaaaagggatggtcctggcggcctaggtagaggttatacgtgttcttttttccctgtagaattttgcacrttggtccttagctatgctatcctttttaggaggaagaatggtgttttctgaggaagagttaggccagcccttggaggcaaggtctgggcccagaacagaa

SEQ ID NO: 197799 - DNA, 201 bp, Homo sapiens
caacattcagaggttagtagaggagaagtcaaaattgataaactactatgaaatggacaagtacagtcatgacattatgaatcgcagggagagggtgggcrtggaataggatcatagaaagctgtttcaggaaacagatcaaccccctgatttatgaatgaggaatttgatctaggaaacaggcccagagagggtcaatga

SEQ ID NO: 197800 - DNA, 201 bp, Homo sapiens
ctcgatggccgagagccgtgaaggggactttggctgcacagtaatggaactgaggaagctcatggagctgcgttcgagggatgcactgacccagattaatrtccactatggaggtgtacagaatctctgcagtagactgaaaacctcccctgtggaaggtaaaggccatatcaggggtggggagttggaggaaggtggcta

SEQ ID NO: 197801 - DNA, 201 bp, Homo sapiens
gactctgtctcaaaaactataaataaataaataaataaataaataaataaatgtaatatattcatggcctgcccccttagataagtgataccataccatcractcatttttctacctttctttcttcacttaccaacataacttagagattatttcataatagtaattataaagctgggcgatatagagagacccccatgt

SEQ ID NO: 197802 - DNA, 201 bp, Homo sapiens
ccttcttgtttgcttgcttcgttccccattccagttttttccccctccttttattgtctcttctttccctgtcccattcccacctcaaccaatctttccartccccaaagaacagagcagtttggttggtataggctagaagatagccttttaccttctgtgtggtttcctgtggagtctcatggcctcgtgagtggaaga

SEQ ID NO: 197803 - DNA, 201 bp, Homo sapiens; identical to SEQ ID NO: 34193

SEQ ID NO: 197804 - DNA, 201 bp, Homo sapiens
aaaattagcccgtcatggtggtgcgtccctgtaatcccagccactcaggaggctgaggcaggagaggagactcgcttgaacccaggagtcagaggtagcartgagctgagatcacaccactgctgtccagcctgggcaacagagggagactctgtctcaaaaactataaataaataaataaataaataaataaataaatgt

SEQ ID NO: 197805 - DNA, 201 bp, Homo sapiens
tgaactcctggcctcaagcgatctgcccaccttggccccccaaagtgctaggattacaggcatgagccctcatgcgcagcctcagcccaatgttttgatastggcttgtgttccttgagtatacattagctagttagagtaagaggagttgccccagtggccaagagttggttagacttaagaaggcttggagatgtttag

SEQ ID NO: 197806 - DNA, 201 bp, Homo sapiens
gaagccatttcagaaaggagtagctgaaactctgtcgcaagattgtcagacttgtaccctgtgtgtcttagggttaaaagtgtataacattcaggccatgraaaggtgttggggatgaataagagtttgaatttataatgcctggaaagcaaccttctcccagattgtacagagctgaagacttgtaaagagtctccatgt

SEQ ID NO: 197807 - DNA, 201 bp, Homo sapiens
cactgctcttccagtgggaagggtggtagggcaaagagtaacctgcccaagggcctggctcatgtaagttgactgacagctcttctcacgctgattctgaygtcttcctcttcgctgcgcttgttttcagttcatctccgcaatacctacccgatccctgaagttcctgaaggaggctgggcatggcaccaccaaagagga

SEQ ID NO: 197808 - DNA, 201 bp, Homo sapiens
catcagaccgtgtcttgcctgccaactcgatggccgagagccgtgaaggggactttggctgcacagtaatggaactgaggaagctcatggagctgcgttcragggatgcactgacccagattaatgtccactatggaggtgtacagaatctctgcagtagactgaaaacctcccctgtggaaggtaaaggccatatcaggg

SEQ ID NO: 197809 - DNA, 201 bp, Homo sapiens
gaggctgaggcgggagaatcacttgaacccgggagtcagaggttgcagtgagccgagatagcaccattgcactccaacctgggctacagagtgagactccrtctcaaaaaaaaaaaaaaaaaggccaggcacagtggttcacgcctataatcccagcactctgggaggccaaggcaggtggatcataaggtcaggagttca

SEQ ID NO: 197810 - DNA, 201 bp, Homo sapiens
gctaatttttgtattttttttttgtagagacagggtctctccatgttgcccagggtggtcctgaactcctggcctcaagcgatctgcccaccttggccccmcaaagtgctaggattacaggcatgagccctcatgcgcagcctcagcccaatgttttgatagtggcttgtgttccttgagtatacattagctagttagagt

SEQ ID NO: 197811 - DNA, 201 bp, Homo sapiens
cattttggtgggtggaatacaaggatatcaggcagcctaaatgaagttttccatgaaacaagtgttataagggccttgaaggggctttgctggttgcaggrgtggcgggggcaggagggagggcttaccctaaagcggttagacacattttcctccttactcccaatttgtctggtctgttttaaatgcgcccagctcttg

SEQ ID NO: 197812 - DNA, 201 bp, Homo sapiens
aaggactggaggaagaaggaaggctgtggttacagaggctctctccagaagagaggtaactaaataatgcactctgcatatgaggaagtggcttctccatyacttgcctctacattttcctgtctcaccaccttctttcaatggagggggagaaaggggagtgggaagaagaaatagaagattgctactttagtggacata

SEQ ID NO: 197813 - DNA, 201 bp, Homo sapiens
gggaaaaaaaatgctataaactgcaaatctgaaattcaaatgtgttgttccactgagaccagaagaagaagaggagttttaaaagggataatttgttggarccaataaagctttttgctgatgaacagaaaccaatactgctgtgcactgagaataaaaactcatgcccacttgtaactgtgctgtcctcaatgcgtctcc

SEQ ID NO: 197814 - DNA, 201 bp, Homo sapiens
aaagcaacgtataccccagtccagtgtgtgttgccataatttgcaattcagcttaacagtgcacccaatctatatttgcattttgatattatttaagctcyatgtacaaggttttgcatgtatttatatggttcttagggaaaaaaaatgctataaactgcaaatctgaaattcaaatgtgttgttccactgagaccagaa

SEQ ID NO: 197815 - DNA, 201 bp, Homo sapiens
acctaccttggaaagagggactcagctgggtgatgaatgaaggaaatgtttggccacacttggagcaatgtctttaggaataatacagagttgccaaaatrcctgtcaatgattgtagaaacgtattgagtgggaagggagacaccgcgttcttactgtgcgcctccccaggtgtaatcgaatcctggaccggaaagggga

SEQ ID NO: 197816 - DNA, 201 bp, Homo sapiens
tcaggcctagctatcagttcagctcagatctcaactgtcacttaaacccttgtgcttagactgggtacctcttgcccttgcagatgctggatacttatggytgctctaatggtttctttttgtctatctttgaacctttattccagagatccagttgtcatcggtatccaggaagctctcctcttcctcctcctgacgtct

SEQ ID NO: 197817 - DNA, 201 bp, Homo sapiens
tagcttgaggatttagatgaacgtctatcaccttaagatctctggggcttaactgtgttcccgtcactgtgccttttgagggcagtggcatgttttaccargaattgtccattttgctacaagctgagatgtactgggattgggctcttcctcggtgtagcagattgaaatttctagtagtattgtcaatctggaaaaaat

SEQ ID NO: 197818 - DNA, 201 bp, Homo sapiens; identical to SEQ ID NO: 34204

SEQ ID NO: 197819 - DNA, 201 bp, Homo sapiens
ggaagccatttcagaaaggagtagctgaaactctgtcgcaagattgtcagacttgtaccctgtgtgtcttagggttaaaagtgtataacattcaggccatggaaaggtgttggggatgaataagagtttgaatttataatgcctggaaagcaaccttctcccagattgtacagagctgaagacttgtaaagagtctccatg

SEQ ID NO: 197820 - DNA, 201 bp, Homo sapiens; identical to SEQ ID NO: 34188

SEQ ID NO: 197821 - DNA, 201 bp, Homo sapiens; identical to SEQ ID NO: 34189

SEQ ID NO: 197822 - DNA, 201 bp, Homo sapiens
ttgttttcccagcttctagagaaggcacatttctggaggcccagctggtatatttttgtctggtgggaaaggtatggcatctgaagcactgaaaggagggsaggccatgaagaaccgtatctttcccagagatgatgtttagaaagtgtgctattctctaaagattattcttttctcctttttcttttctttctttcttct

SEQ ID NO: 197823 - DNA, 201 bp, Homo sapiens
tgatcgaatgtggcattcctaggactaatgctgtctgagtgttgagaagcaaagggcttattgggctcattatttggtacttaagtgttgtcaggaggtcratttagccaggacaccaactttgtctttagctccctcctttcaatcaacacattctttttgagtacctgctgtgtgctgataactattctagacactagg

SEQ ID NO: 197824 - DNA, 201 bp, Homo sapiens
cagaccagcctgggtgacataataacaccccatctctatttttttttttttttttttggagacagagtcttgctgtgtcacccaggctggagtgcagtggmatgatcttagctaactgcaacctccgcctcccaggttcaagcaattctcatgcctcagcctcctaggcagttgggactacaggtgtgtgcaccaccacgc

SEQ ID NO: 197825 - DNA, 201 bp, Homo sapiens
tctcatgcctcagcctcctaggcagttgggactacaggtgtgtgcaccaccacgcccagctaattttttgtattttagtagagatgggatttcaccctgtkggtcaggctggtctcgaactcctgacctcaggtgatctgcctgccttggcctcccaaagtgttgggatgaggaggcttacaggcataagccaccacgccc

SEQ ID NO: 197826 - DNA, 201 bp, Homo sapiens
ctgtgggtcaggctggtctcgaactcctgacctcaggtgatctgcctgccttggcctcccaaagtgttgggatgaggaggcttacaggcataagccaccaygcccagcctctattttaaataaaaagaaaaaaaaaaggaaatgggatgctaaatcacaaggtatataactgtacccatcatatctttggatcactcactg

SEQ ID NO: 197827 - DNA, 201 bp, Homo sapiens
tctgctggatacacttttaatgtagttctccttaatcttttttgtttgttttgttttttgtttttttggtttttttgttttgagaaggagtctcactcttkttgcccaggcaggctggagtgcaatggtgcaatcttggctcactgcaacctccacctcctggattcaagcaattatcctgcttcagcctcctgagtagct

SEQ ID NO: 197828 - DNA, 201 bp, Homo sapiens
aactgcctctcacttagagggatagaagtttctgtgcttcctgcttcacaggactgctgtggagtgccagtatgatcgaatgtggcattcctaggactaaygctgtctgagtgttgagaagcaaagggcttattgggctcattatttggtacttaagtgttgtcaggaggtcaatttagccaggacaccaactttgtcttt

SEQ ID NO: 197829 - DNA, 201 bp, Homo sapiens
tctcttaatccaaatgaatgagaaacaaagagcatatattacagcaggggagatttacattagcaagaaggaagactttaataactgcttacctgtctctygctttgggttgtaaattccttaaagatagagaaggctgcagcttgctacaggcaattctctagcataggagtaggatctggctaagcacagagcaataaa

SEQ ID NO: 197830 - DNA, 201 bp, Homo sapiens
aatcccagctactcgggaggctgaggcgggagaatcacttgaacccgggagtcagaggttgcagtgagccgagatagcaccattgcactccaacctgggckacagagtgagactccatctcaaaaaaaaaaaaaaaaaggccaggcacagtggttcacgcctataatcccagcactctgggaggccaaggcaggtggatca

SEQ ID NO: 197831 - DNA, 201 bp, Homo sapiens
gtgggcggatcacctgaggtcaggagttcaagacctgcctggccaacatggcgaaaccctgtctctacaaaaatacaaaaattagccgggcaatatggtgygtgcctgtaatcccagctactcgggaggctgaggcgggagaatcacttgaacccgggagtcagaggttgcagtgagccgagatagcaccattgcactcca

SEQ ID NO: 197832 - DNA, 201 bp, Homo sapiens
tttttttttttttctttatgagagatggggtcttgctctgttgcccaggctggtctcaaactcctggactcaagcagttcttctgcctcaccagtttgtaktaatgtaagagttaccatagggcttgttctggaactggggagacggtgttggaaaacaacctttccattagtaatttttagtccccagtaccaacagtga

SEQ ID NO: 197833 - DNA, 201 bp, Homo sapiens
gggtggtagggcaaagagtaacctgcccaagggcctggctcatgtaagttgactgacagctcttctcacgctgattctgacgtcttcctcttcgctgcgcytgttttcagttcatctccgcaatacctacccgatccctgaagttcctgaaggaggctgggcatggcaccaccaaagaggagatcaccaaggatgccgagg

SEQ ID NO: 197834 - DNA, 201 bp, Homo sapiens; identical to SEQ ID NO: 34202

SEQ ID NO: 197835 - DNA, 201 bp, Homo sapiens
aaaatcagttaatcttggctgggtgctgtggctcacacctgtaatcccaactttaggaggccgaggtgggcggatcacctgaggtcaggagttcaagaccwgcctggccaacatggcgaaaccctgtctctacaaaaatacaaaaattagccgggcaatatggtgcgtgcctgtaatcccagctactcgggaggctgaggc

SEQ ID NO: 197836 - DNA, 201 bp, Homo sapiens
gatcacgaggtcaggagatcaagaccatcctggctaacatggtgaaaccccgtctctactaaaaatacaaaaaattagctgggcgtggtggcgggcacctrtagtcctatagctactcgggaggctaagacaggagaatcacttgaactcaggaggcggaggttacagtgagccaagtggagagccactgcactccaccct

SEQ ID NO: 197837 - DNA, 201 bp, Homo sapiens
ggaaaggtgttggggatgaataagagtttgaatttataatgcctggaaagcaaccttctcccagattgtacagagctgaagacttgtaaagagtctccatktactctcggccattgctgtctagatagggcccatgggaacagccatgagatagggttgaaggagttggaggaccctaccctcagccagtctcttactatc

SEQ ID NO: 197838 - DNA, 201 bp, Homo sapiens
catccagctccctgtggctgagattgtggttggtgatattgcccaagtcaaatacggtgagagctccgtgtttcttttgcttaccccaccaccacccccawttaagggataggtcctttggcatgagggggctgggaattgctgaaaacccaaaaagataagatccaaaattgtattcacttctaggttagagtttaaaga

SEQ ID NO: 197839 - DNA, 201 bp, Homo sapiens
ttgcgggtgagccactttgggggtgggtagcagctggggtcctggttggaggtgggggcagagaaagaaggtagcgtgagagcaagtgcacaggtcaggartaagcgcagcttcacctcccagtgcttgctgtgctcccgctacacggtgcattatgctactatatgtactcatacagtactcttgagtacagtgtgtact

SEQ ID NO: 197840 - DNA, 201 bp, Homo sapiens
tcaacacagcccgggccattgccaccaaatgtggcattctgacacctggggatgacttcctgtgcttagaaggcaaagaattcaaccggctcatccgcaaygagaaaggcgaggtgggtcctggctagggggaaccaggacctcacctgacaaggaaaaggcgggttctagcataaggcatctgggtcatgtgcgggaagg

SEQ ID NO: 197841 - DNA, 201 bp, Homo sapiens
gagccagtattaaacttggtcaataataatagtccatttggccaccactgtattgctgactggcaattttagcataaaagttgtagctggctgggcacgayggctcacgcctgtaatcccaacactttgggaggccaaagcagatcacgaggtcaggagatcaagaccatcctggctaacatggtgaaaccccgtctctac

SEQ ID NO: 197842 - DNA, 201 bp, Homo sapiens
ttacacaattctaaaggcaggtgggacttaattatctcttttggctggccgcagtagctcatgcatgtagtcccagcactatctgtgctttagctaagatwctctgtgagactgctctagcataagaagcatttagagcattaatggagtataagtcagaaggcatgaaatattccatcccattctacctggtggtaagaa

SEQ ID NO: 197843 - DNA, 201 bp, Homo sapiens
gggtgcctttctcctgtctgccacaaagggacagacaaacagggacagcttaccagggtcatcaccctcatctgcgcctttcccctttcttcactctccayaggtgccagatgctattgccaaatgcaaacaagctggcattactgtcagaatggtgacaggtgacaacatcaacacagcccgggccattgccaccaaatg

SEQ ID NO: 197844 - DNA, 201 bp, Homo sapiens
ccttcaagggtagccccacctggggacccatgaaaggacccaaatataaggaaagcactgagaataattctgcctatctcttgtccctctgggaaagtgcstagagagtaggtgtggtatgtatgtggtgcatgttctgtgtgtgtgtgtgtcatatatctgtgtggtatgtattgtgtatgtggtttgtgtttggtgtgt

SEQ ID NO: 197845 - DNA, 201 bp, Homo sapiens
acgaaggggagaaaaagaagaaaggtaaggggcatctggaatgagattctctttcctctcatccccatggacaaacaaggaagcgagggagcagatctggwtagaaagcatggttggaagaatctgctgccatgaagaaagcagatatccaaactccttgctgagataaagatgtaaatccttggctccagggagctctga

SEQ ID NO: 197846 - DNA, 201 bp, Homo sapiens; identical to SEQ ID NO: 34201

SEQ ID NO: 197847 - DNA, 201 bp, Homo sapiens
gtgatatgaacacagctcactgcacactgcagcttccacctcccaggctcaaatgaccctcccacctcagcctcccaacttgctaggaccacaggtgtgcrccatcatgcccagctaatttttgtattttttgtagagacagggtttcaccgtgttacctaggctggtatcgaactcctgagttcaagcgattctcccgcc

SEQ ID NO: 197848 - DNA, 201 bp, Homo sapiens
ttttttggtttttttgttttgagaaggagtctcactcttgttgcccaggcaggctggagtgcaatggtgcaatcttggctcactgcaacctccacctcctrgattcaagcaattatcctgcttcagcctcctgagtagctggggttacaggcatgtggctaattttgtatttttagtagagatggagtttcaccattttga

SEQ ID NO: 197849 - DNA, 201 bp, Homo sapiens
ttgttttgagaaggagtctcactcttgttgcccaggcaggctggagtgcaatggtgcaatcttggctcactgcaacctccacctcctggattcaagcaatyatcctgcttcagcctcctgagtagctggggttacaggcatgtggctaattttgtatttttagtagagatggagtttcaccattttgaccacactggtctc

SEQ ID NO: 197850 - DNA, 201 bp, Homo sapiens
gcatctctgtagcagattcttacttggccctatacatctggcagttcatggttgagtagcatgagatggagcaaagatcttgtccattaggggctttcagyctcatgtggtctcctatttctgaatcttcctcagaggccacagcatatttctcaccaattctaagaagttgttaccctttgccagtgctgtattataagt

SEQ ID NO: 197851 - DNA, 201 bp, Homo sapiens
cttggccctatacatctggcagttcatggttgagtagcatgagatggagcaaagatcttgtccattaggggctttcagtctcatgtggtctcctatttctraatcttcctcagaggccacagcatatttctcaccaattctaagaagttgttaccctttgccagtgctgtattataagttagtgacttggagcctagactc

SEQ ID NO: 197852 - DNA, 201 bp, Homo sapiens
attataagttagtgacttggagcctagactctttaggatgaaaaaagagaaagagagttttacatagatatctatacctagtttatgtcttattttctttrcaacctaagggagcttccctacctgttttctttacttctagaatttggtttcctatctcataggctttgagttcaaatgatagctccaccatttactaac

SEQ ID NO: 197853 - DNA, 201 bp, Homo sapiens
cctgtctcaccaccttctttcaatggagggggagaaaggggagtgggaagaagaaatagaagattgctactttagtggacatatctctcaaggaacagtctttttttttttttttttttttttttttttttgagatggcgtcttcctctgttgcccaggatggagtgcagtggcaccatctcagctcactgcagactctac

SEQ ID NO: 197854 - DNA, 201 bp, Homo sapiens
tatacagtgctcatacttataattaggtgttcaatagattagttttctcagattaaaacagagtccatgcatctgtagatacttgccagaacatgggtgcytatggagtgcaatgttttgtcctatctggagaggttactgtgtgtgtaactgcaactactgtccatttcatttgctcacttcttaatcacaaaaaaaaaa

SEQ ID NO: 197855 - DNA, 201 bp, Homo sapiens
cctgagtgtactcccatctacatccagtactttgtcaagttcttcatcatcggcatcactgtactggtggtggctgtgccagaggggctgcctctggctgwcaccatctcactggcctactctgtgaaggtgagactagaacaatcctatctcttcctttaggatagagatgggagagaagggtaccatgtaacctttagt

SEQ ID NO: 197856 - DNA, 201 bp, Homo sapiens
atacttgccagaacatgggtgcctatggagtgcaatgttttgtcctatctggagaggttactgtgtgtgtaactgcaactactgtccatttcatttgctcrcttcttaatcacaaaaaaaaaaaaaaccctgggtaaggtggcaatatctaattgctttcatgtggctcagtctttgccttctaatggtagtccttaatca

SEQ ID NO: 197857 - DNA, 201 bp, Homo sapiens
atgtaagagttaccatagggcttgttctggaactggggagacggtgttggaaaacaacctttccattagtaatttttagtccccagtaccaacagtgacgycctagtgtgtaagaagaataaagagataagaaaaggagaaaaaaataagaaagaaaaagaaagaaaagaaagaaaagaaaggaagaaagaaagaaaaaaa

SEQ ID NO: 197858 - DNA, 201 bp, Homo sapiens
tcctcatcacttttatccccttctttctgcaccgaccgagactggcagaaagaagctgaaacttcagggtggctagttggggctaggcggctgtttccctrtctccgccactgtttggtcgctccctaggctttttcagagagaaatgttttcctgtgtgtaagggttaatggccctgagatctcttaatccaaatgaatg

SEQ ID NO: 197859 - DNA, 201 bp, Homo sapiens
accacttggctggagaatcatcttgagctgtttagtggaggacagtttatgaaaaggaaacaaaacacattctctcaggaactaaataattcatttctgcrgctgcctgcagatgaataagggggaagcttgcctggtgctgttgaagtaacacggagacacctttcaaagtctttgccatcaggcagaaacggttcaaac

SEQ ID NO: 197860 - DNA, 201 bp, Homo sapiens
tttcctctcatccccatggacaaacaaggaagcgagggagcagatctggatagaaagcatggttggaagaatctgctgccatgaagaaagcagatatccaractccttgctgagataaagatgtaaatccttggctccagggagctctgatgaaaaccagatcctggctctaggctcccaaatcaggttgaatttgagcct

SEQ ID NO: 197861 - DNA, 201 bp, Homo sapiens
acaaggagtccctgaaaatcgcaacaaaggtaacctctccaactactcatttaccatctctacctgcccacactcaaaccagacctttccaggccatcttycttctcccttttcctctccataaatctgttatctgctgctgtggctcagatgcctcatcctgaggaaggtgcagagatttttggggtggtctcaaggtcc

SEQ ID NO: 197862 - DNA, 201 bp, Homo sapiens
gaacccaggaggcggaggttgcagtgagctgagaccacaccattgcactccagcctgggtgacagattgagagttgtctcaaaaaaaaaagagaaagaaargaagttccccagtcaatcccacctcgttagtgtataggagagatagatggagtgaatattctaaactatatacctggtaggaacttatcccctataggca

SEQ ID NO: 197863 - DNA, 201 bp, Homo sapiens
gcatggtgagtgtgtgcctgtgctccctgattcttcttggctgaggtgttgagctgatactgttgagtggcaaggagtcctttgccttctgagctttgagmaccctcagtcttgggtgggtctgcaggctgtagtagagtgggacgagataaagaaagccttagccagcagagacacattctcctccagagaaaacggacc

SEQ ID NO: 197864 - DNA, 201 bp, Homo sapiens
tgtttgtagcactgcctcctggattaggtttctctccctggtccctttcattcccttctccacataagactatgctcctcttcacaatttggaaacagctrgagaaagcagcatgattgggcacagttgctgtgtatcagagacatgaacgtgcatttgaattatgagagccaggtcttttctcaataggcaggaggaagg

SEQ ID NO: 197865 - DNA, 201 bp, Homo sapiens
gctgttcagattgggaaagccggtgagtagggtagagcctcgttgtggtttatcaatgttgtcttggatcctcatcacttttatccccttctttctgcacygaccgagactggcagaaagaagctgaaacttcagggtggctagttggggctaggcggctgtttccctatctccgccactgtttggtcgctccctaggctt

SEQ ID NO: 197866 - DNA, 201 bp, Homo sapiens
agcctcgttgtggtttatcaatgttgtcttggatcctcatcacttttatccccttctttctgcaccgaccgagactggcagaaagaagctgaaacttcagkgtggctagttggggctaggcggctgtttccctatctccgccactgtttggtcgctccctaggctttttcagagagaaatgttttcctgtgtgtaagggtt

SEQ ID NO: 197867 - DNA, 201 bp, Homo sapiens; identical to SEQ ID NO: 34195

SEQ ID NO: 197868 - DNA, 201 bp, Homo sapiens; identical to SEQ ID NO: 34198

SEQ ID NO: 197869 - DNA, 201 bp, Homo sapiens
taaagcctaaagtgaggcatgttcaagatgccacagtgaccaaattcacgccatccaggatgcacctgactctggaagctgatgaggctaatgatgctaaygtgtatcctggatccctgaggtccgctcccaacatcagcccttcagcctcagctgggttctaacaaaaccccctgccacctccacgttgatctttgttgt

SEQ ID NO: 197870 - DNA, 201 bp, Homo sapiens
ctagagcaaactacaaaatccctaagccctggatggcacaaggatcacggttaccactgacccctctctgcctacccttgaaaaacaacaggctaggcatrgtggctcacttctgtaatcccagcactttgggaagccaaaatggtaagatcgcttgagcccaggagttcgagaccagcctgagcaatattgtgagacctc

SEQ ID NO: 197871 - DNA, 201 bp, Homo sapiens
gaggtcgggagttcaagaccagcctgaccaacatggagaaaccgcgtctctactaaaaatccaaaattagccgggcgtagtggcacatgcctgtaatcccmgctactcgggaggctgaggcagaagaattacttgaacccgggaggcagaggttgtagtgagctgagattgcgccattgcactccagcctggccaacgaga

SEQ ID NO: 197872 - DNA, 201 bp, Homo sapiens
aaattagccaggcatggtggtgcgtgcctgtaatcccagctactcaggaggctgaggcaggagaatcgcttgaacccagaaggcagaggttgcagtgagcygagatcgcaccactgcactccagcctgggtgacagagtgagactccattacaaaaaaaaaaaagtgactattaataaattacccatagttcatcaaaagt

SEQ ID NO: 197873 - DNA, 201 bp, Homo sapiens
ggacgtggtggtgggcgcctgtaatcccagctactctggaggctgaggcaggagaatcgcttgaacccggaaggctgaggttgcagtgagctgagatcgcrccattacacaccagcctgggcaacaaggcaagactctgtctcaaaaaaaaaaaaaaaaaagaagaagaaaagtggattgcagactcactatgcacctgac

SEQ ID NO: 197874 - DNA, 201 bp, Homo sapiens
tagccaggcatggtggtgcgtgcctgtaatcccagctactcaggaggctgaggcaggagaatcgcttgaacccagaaggcagaggttgcagtgagctgagrtcgcaccactgcactccagcctgggtgacagagtgagactccattacaaaaaaaaaaaagtgactattaataaattacccatagttcatcaaaagttggc

SEQ ID NO: 197875 - DNA, 201 bp, Homo sapiens
ctgatgccaatctatctctggctagggccctaggactgccctccagcctgggttcatatgacttgtttctctggacaggtctgctcatgtctgctctcacrgttttcatcctgattctatactttgtgattgacaactttgtgataaatcgcagaccatggctccctgagtgtactcccatctacatccagtactttgtca

SEQ ID NO: 197876 - DNA, 201 bp, Homo sapiens
gctcattgtcatctttatccttgtctttgcgggtgagccactttgggggtgggtagcagctggggtcctggttggaggtgggggcagagaaagaaggtagygtgagagcaagtgcacaggtcaggaataagcgcagcttcacctcccagtgcttgctgtgctcccgctacacggtgcattatgctactatatgtactcata

SEQ ID NO: 197877 - DNA, 201 bp, Homo sapiens
ctcattgtcatctttatccttgtctttgcgggtgagccactttgggggtgggtagcagctggggtcctggttggaggtgggggcagagaaagaaggtagcrtgagagcaagtgcacaggtcaggaataagcgcagcttcacctcccagtgcttgctgtgctcccgctacacggtgcattatgctactatatgtactcatac

SEQ ID NO: 197878 - DNA, 201 bp, Homo sapiens
attcaccacccagccagcactataccattgtttttaacaccttcgtgctgatgcagctcttcaatgaaatcaactcccgaaagatccatggagagaagaaygtcttttcaggcatctaccgcaacattatcttctgctctgtagtcttgggcacattcatctgccaggtgagattctatctgcagttggggcaggagatct

SEQ ID NO: 197879 - DNA, 201 bp, Homo sapiens
acccctctctgcctacccttgaaaaacaacaggctaggcatagtggctcacttctgtaatcccagcactttgggaagccaaaatggtaagatcgcttgagsccaggagttcgagaccagcctgagcaatattgtgagacctcatctctacaaaaataaacaaaattagccaggcatggttgcgcacctgtagtcccagcta

SEQ ID NO: 197880 - DNA, 201 bp, Homo sapiens
aagagcatcagaatcacttggaaagttcatgtgaaatcacatgttccaaggctccacagttagacgtcttaattcagtaggtctgggatgaataccagaatttttttttaacaggcacaccagttaattctgatgttcagaaaggtttagaagccccccagattctatcctcacactcaagtagtttatgattataagcct

SEQ ID NO: 197881 - DNA, 201 bp, Homo sapiens
ttcaatccactgctcttagtatggttttgatgctcaaagtgatccaccattaggcagaagaggcctcttcaacattgctgagtcctttagatacaaccccrgttgtttttaatagctttcttggtttattcttggttttttcgttcttttttatcctggataggagatagtccatttctccaaggattcctgcttcatttt

SEQ ID NO: 197882 - DNA, 201 bp, Homo sapiens
ttgtatttttagtagagatggggtttcatcatgttggccaggatgggctcgatctcctgaccttgtgatctgcccacctcagccccccagagtgctgggawtacaggcatgagccaccacgcctggcttatttctttttttacagattcaaaaaattaacctcaggtcccataatgagtacatagttgcagtaaaattcaa

SEQ ID NO: 197883 - DNA, 201 bp, Homo sapiens
ctgaggcaggaaaatcgcttgaacccaggaggcggaggttgcagtgagctgagaccacaccattgcactccagcctgggtgacagattgagagttgtctcaaaaaaaaaagagaaagaaaagaagttccccagtcaatcccacctcgttagtgtataggagagatagatggagtgaatattctaaactatatacctggtag

SEQ ID NO: 197884 - DNA, 201 bp, Homo sapiens
ctttgggtctgctctttccaaaataacctgtctttgctttgtttttcttcaggatcaaccacttctactatgtgatttcttttctcctagccaagattccytcagtccagtacctccttgctcctttccagtcttctgtcctgggaggctgagatttatgggtcttccttgccctccactaccaatttctatttccttgac

SEQ ID NO: 197885 - DNA, 201 bp, Homo sapiens
cctgaggaagcggcccaccttgggaagggttttgctgaccagaatgagaaaagaagcattgttctccaagttcatcatcctctggctgtgaccttgaatcractgctttatctctaggagctggaagtctagcagatagggagcaaatctccaagccatgcgtgtattaaactggaggtgctgaagcagggaaactgctgt

SEQ ID NO: 197886 - DNA, 201 bp, Homo sapiens
attgttctccaagttcatcatcctctggctgtgaccttgaatcaactgctttatctctaggagctggaagtctagcagatagggagcaaatctccaagccrtgcgtgtattaaactggaggtgctgaagcagggaaactgctgtatactcggaagagtagcattcggttattagccagagatggctagatcttgcatggcc

SEQ ID NO: 197887 - DNA, 201 bp, Homo sapiens
tgcaaataatgctcccttgggtacctattttcccattttcaaaatctttatctgttcagatgtcttcctcaggtcctaacccaaatctctccttttgacayttaaggtaacactcctgggttcttttttgagacagagtctctctctcgcccaggctggagtgcagttgcatgatctcagctcactgcaacctctgcctcc

SEQ ID NO: 197888 - DNA, 201 bp, Homo sapiens
gcaaataatgctcccttgggtacctattttcccattttcaaaatctttatctgttcagatgtcttcctcaggtcctaacccaaatctctccttttgacacktaaggtaacactcctgggttcttttttgagacagagtctctctctcgcccaggctggagtgcagttgcatgatctcagctcactgcaacctctgcctccc

SEQ ID NO: 197889 - DNA, 201 bp, Homo sapiens
aagccatttcagaaaggagtagctgaaactctgtcgcaagattgtcagacttgtaccctgtgtgtcttagggttaaaagtgtataacattcaggccatggwaaggtgttggggatgaataagagtttgaatttataatgcctggaaagcaaccttctcccagattgtacagagctgaagacttgtaaagagtctccatgta

SEQ ID NO: 197890 - DNA, 201 bp, Homo sapiens
gccctgatgtcttcctgcccaaagtcctggacctcattgtcaatggcatttctatcaacagtgcttatacctccaagattctggtaagcatttcctttgcrtagacacttagagtgggtggttggaagggaacatccattttctctgaaatgaacccccttattgtttacactgcctaaattgccatcccacatcccattt

SEQ ID NO: 197891 - DNA, 201 bp, Homo sapiens
gattgtagaaacgtattgagtgggaagggagacaccgcgttcttactgtgcgcctccccaggtgtaatcgaatcctggaccggaaaggggaagcagtgccwttcaagaataaagacagagatgatatggtacgcactgtcatcgagcccatggcctgtgatggactccggactatctgcatagcttaccgggacttcgatg

SEQ ID NO: 197892 - DNA, 201 bp, Homo sapiens
cctctgcctcccagattgcaattctcttgcctcagcctccctagtagctgggattacaggcatgcgccaccacacccagctaatttttttgtatttttagyagagatgaggtttcaccgtgttggccaggctggtttcaaactcctgacctcaagtgatacacccaccttggcctcccaaagtgctgggattacaggcatg

SEQ ID NO: 197893 - DNA, 201 bp, Homo sapiens
cctatggccgaaataagcctctgatctcacgcactatgatgaagaacatcttgggccatgcattctatcagctcattgtcatctttatccttgtctttgcrggtgagccactttgggggtgggtagcagctggggtcctggttggaggtgggggcagagaaagaaggtagcgtgagagcaagtgcacaggtcaggaataag

SEQ ID NO: 197894 - DNA, 201 bp, Homo sapiens
caggctggtctcgaactcctaaacataagcaattcacccaccttggcctcccaaagtgctaggattacagacgtgagataccatgcctggcctctttattktatttatttttgagacagcgtctctctctgttgcccaggctagagtgtaatgacatgatcatggctcactgccacttcaaaactgccttttatcattttc

SEQ ID NO: 197895 - DNA, 201 bp, Homo sapiens
tggagaaacgtaggcaggtgtttggacacaacgtgatcccccccaaaaagcccaagactttcttagaattagtgtgggaagctcttcaagatgtcacgctyatcatcctggagattgcagccatcatctccctggtcctgtccttttatcgccctgctggtgaagaaaatgaacgtgagtgtcctaaacagctcagcgtga

SEQ ID NO: 197896 - DNA, 201 bp, Homo sapiens
ctccctggtcctgtccttttatcgccctgctggtgaagaaaatgaacgtgagtgtcctaaacagctcagcgtgactcttatctgggttctttccaccaccrccaccaagcgcttagtattggtggctgacaggttatagcttaaaacatttcccccattatccagagtgggctttccaaaggaaaccaagcagtagctact

SEQ ID NO: 197897 - DNA, 201 bp, Homo sapiens
tgtcttctattaaatcctttttcggaatgtcaggaatcctctacccttttaagacattttatttatttattaattattattattattattattttaatggmatcttgctctgtcacccaggctgggtgcagcagcttaatctgggctcactgcaacctcctgggttcaagcaattctcgtgcctcggcctcctgagtagct

SEQ ID NO: 197898 - DNA, 201 bp, Homo sapiens
tgggaggttgaggtgggcagatcacctgaggtcaggagttcaagaccagcctggccaacatggtgaaacccggtctctactaaaaatacaaaaattagctrggcatggtggcaggtacctgtagtccctgctactcaggaggctgaggcagaagaatcacttgaacctgggaggtggaggttgcagtgagccaaggtcgtg

SEQ ID NO: 197899 - DNA, 201 bp, Homo sapiens
gctggacgtggtggtgggcgcctgtaatcccagctactctggaggctgaggcaggagaatcgcttgaacccggaaggctgaggttgcagtgagctgagatygcgccattacacaccagcctgggcaacaaggcaagactctgtctcaaaaaaaaaaaaaaaaaagaagaagaaaagtggattgcagactcactatgcacct

SEQ ID NO: 197900 - DNA, 201 bp, Homo sapiens
tgaggcaggagaatggcttgaacccagcagatggaggttgcagtgagccaagatcgtgccattgcactccagcctgggtgacagagcgagactctgtctcaaaaaaaaaaaaaaaaaaaaaggaaggagggaggaaggaaggaaggaagctgggcacagtggctcacgcctgtaatcccagcactttgggaggccaagacc

SEQ ID NO: 197901 - DNA, 201 bp, Homo sapiens
caggagaatcgcttgaactcgggaggcggaggttgcagtgagctgagatcacgccattgcactccagcttgggcaacaagagtgaaactccatcccccccmaaaaaaaaaaagcagaaaactacagaatgagaaaatggagtcttcacctgcccactcattgagctgcagagagtagccctcagcactcatacccagtctc

SEQ ID NO: 197902 - DNA, 201 bp, Homo sapiens
aggagaatcgcttgaactcgggaggcggaggttgcagtgagctgagatcacgccattgcactccagcttgggcaacaagagtgaaactccatcccccccamaaaaaaaaaagcagaaaactacagaatgagaaaatggagtcttcacctgcccactcattgagctgcagagagtagccctcagcactcatacccagtctcc

SEQ ID NO: 197903 - DNA, 201 bp, Homo sapiens
atggagtataagtcagaaggcatgaaatattccatcccattctacctggtggtaagaacttaggtcatttaaaccctttagcctggagagagggagagagraagagattattattattattattattattattattattattattattattattttgggatggattctcactctgtcacccaggctggagtgcagtggcat

SEQ ID NO: 197904 - DNA, 201 bp, Homo sapiens
ctgcaacctccacttaccaggctcaagcagtcctcccaccttagcctcctggttaactgggactacaggtgtgcaccaccacgcccagctaatttttgtattttttttttgtagagacagggtctctccatgttgcccagggtggtcctgaactcctggcctcaagcgatctgcccaccttggccccccaaagtgctagga

SEQ ID NO: 197905 - DNA, 201 bp, Homo sapiens
actttctgttttatgttccttctgtacccttctacttcttttctcctctgcagagttgaaggcgtgacagtgagatattgagggcctccaattctttttcracaacattcaactaatacttaaaaactgctaggtgctagggacacaagggtgaacatgacaggtgcagtgcctccttccatagagcttacaggctaaaag

SEQ ID NO: 197906 - DNA, 201 bp, Homo sapiens
gtacccttctacttcttttctcctctgcagagttgaaggcgtgacagtgagatattgagggcctccaattctttttcaacaacattcaactaatacttaawaactgctaggtgctagggacacaagggtgaacatgacaggtgcagtgcctccttccatagagcttacaggctaaaagaagatgcatatgaatgaaggcaa

SEQ ID NO: 197907 - DNA, 201 bp, Homo sapiens
attattattattattattattattattattattattattattattattttgggatggattctcactctgtcacccaggctggagtgcagtggcatgatctyggctcactgcaacctccgcctcccaggctcaactgatcctcctgcctcagccttccaagtagctgggaccacagatgcgcgccaccatgccgggttaatt

SEQ ID NO: 197908 - DNA, 201 bp, Homo sapiens
caatcccacctcgttagtgtataggagagatagatggagtgaatattctaaactatatacctggtaggaacttatcccctataggcaagacaacaaatagraaagtggaaaagaggccgggtgcggtggctcacgcctgtaatcccagcactttgggaggccgaggctggcagatcataaagtcaggagttcgagaccagc

SEQ ID NO: 197909 - DNA, 201 bp, Homo sapiens
aacttaaaaggaaaattttgaacaaagatgaaattttggaactgtgctgccatactactactcctagaacaaatgcagagtttctcaaaggtgtcggaatracatgggcttaagtgagatactggcagtggcaacagaaatgtgagaatttggaggtagaatagacaggatttgctctctaccttttaattagtttccaag

SEQ ID NO: 197910 - DNA, 201 bp, Homo sapiens
ttggagccccagatgtggagcttgcatttagctgagatcctgccactgcactccagcctggacaaagcaagaccttgtctcaaatttttttttaatttaayttaaaaggaaaattttgaacaaagatgaaattttggaactgtgctgccatactactactcctagaacaaatgcagagtttctcaaaggtgtcggaataac

SEQ ID NO: 197911 - DNA, 201 bp, Homo sapiens
taagcctcccatacagattgaactgttggtgatttttagcagtggaaggacatttaagaagtcatctatctttagagaactcttttttttaagggttttaytctaggaaatttcaagaatatgcaaaaatagggagaattgacaggtacctgtcactcagcttcaactatgatcaacacatggccaatcttgtttcagtga

SEQ ID NO: 197912 - DNA, 201 bp, Homo sapiens
cccttttgtgtgaaggaaaaagggatggtcctggcggcctaggtagaggttatacgtgttcttttttccctgtagaattttgcacgttggtccttagctaygctatcctttttaggaggaagaatggtgttttctgaggaagagttaggccagcccttggaggcaaggtctgggcccagaacagaatgggaaacaagggga

SEQ ID NO: 197913 - DNA, 201 bp, Homo sapiens
aactcccgaaagatccatggagagaagaacgtcttttcaggcatctaccgcaacattatcttctgctctgtagtcttgggcacattcatctgccaggtgasattctatctgcagttggggcaggagatctggaatgataaagggcagaagctgggagccagggttccctacatacctaggaaaaggaatgaaggaattacg

SEQ ID NO: 197914 - DNA, 201 bp, Homo sapiens
ggcagtgcccattcctatgccatcgtggtcagtgcggccaggagcaggcagggcgggtgggggggcacggctgctgaacagcatgggacctccagctgccwcccacggcatgtatgctggggtgggatggtggggggtcctgccctgccctgccctgggggctgtgccctgtatagggggataggtagcctgatctacccc

SEQ ID NO: 197915 - DNA, 201 bp, Homo sapiens
ggtgaccctggcttcagcaggagcccaagacaggtggatgggcaggcatggtcctctgagctttctgatgtttctcacccttggtgggaggcccattttcttttttttttttttttttgagatggtctcactctgtcacccaggctggagtgcaatggcctgatcacagctcactgcagccttgaactctcagcctgcagc

SEQ ID NO: 197916 - DNA, 201 bp, Homo sapiens
caatttcatgcagtgctttgggctgagccaagtctgcagcaggcagaaggctctgagaagttgttgcagcctgggccaaggacaattcagagcttgggggyacaggggtgtgctcagcaggactgggtggacaggccctttgttgcgaaggggaagagtacaggcttccaggagcaggtgtttgaggcttctttgggaggt

SEQ ID NO: 197917 - DNA, 201 bp, Homo sapiens
aaggctctgagaagttgttgcagcctgggccaaggacaattcagagcttgggggcacaggggtgtgctcagcaggactgggtggacaggccctttgttgcraaggggaagagtacaggcttccaggagcaggtgtttgaggcttctttgggaggtggccagaggagatgcctgttttctggggcaggatttggagggagcc

SEQ ID NO: 197918 - DNA, 201 bp, Homo sapiens
gaggttcagccaggctgtcacaggctttgaagtttcccatctgagagcctggctgttggagagtgtgggtttggaacttgaggctagggggttcttttctsatctgtgccagccacagccttcggataggcagagcaatgatgggggagggcgtaaaagaagaaatgaactgaggaaagagaagaggaaaacaggcttcaa

SEQ ID NO: 197919 - DNA, 201 bp, Homo sapiens
cggtgcagttttggcttactgcagccttgacttcccaggctcaggtgatcctcctgtctcagcctcccaagtagctgggattctagatgtgtgtcatcacrcccagctaatttttgctttattttttattttttggatatgcagtctccctctattgcccaggatggagtgcaggggcatgatctcagctcactgcaacct

SEQ ID NO: 197920 - DNA, 201 bp, Homo sapiens
tcaccaagagccagttcctcatcaatgggaaacctttctatttccacggtgtcaacaagcatgaggatgcggacgtgtgttggggctcctgggtccttgtsggggctgcttctggtcaccctccactttcgccttccctgtgtcctgcagttgagggcagctcagggcaatgaggcaaatggctccaaatggagagggggc

SEQ ID NO: 197921 - DNA, 201 bp, Homo sapiens
cctgggctacagagtgagattctgtctctcaaaaaaacaaaaacaaaaacagtctgtactgtggaggcctcgggcaggtgccaggagctctgagcacagaygggtccctctgttgggtttttcttcccttctaagggccatttcttcttatttatttatttattttttgagatggagttttgcacttgttgcccaggctgg

SEQ ID NO: 197922 - DNA, 201 bp, Homo sapiens
ttctaagggccatttcttcttatttatttatttattttttgagatggagttttgcacttgttgcccaggctggagtgcaatggcacaatctcggctcaccrcaacctctgcctcctgggttcaagtgattctcccgcctcagcctcccgagtagctgggattacaggcatgcgccaccacgcccagctaatttgtattttt

SEQ ID NO: 197923 - DNA, 201 bp, Homo sapiens; identical to SEQ ID NO: 34261

SEQ ID NO: 197924 - DNA, 201 bp, Homo sapiens; identical to SEQ ID NO: 34262

SEQ ID NO: 197925 - DNA, 201 bp, Homo sapiens
aatttagggggtgccaacacgcctggctaattgaaaaaaaaaaaattatctgggctcggtggctcacacctgtaatcccagcactttgggaggtggaggcsggcgaatcgcctgaggccaggagtttgagaccaggctggccaacataacagggtgaaacctcatctctactaaaaatataaaaattagccaagtgtggtg

SEQ ID NO: 197926 - DNA, 201 bp, Homo sapiens
tgcgcgctggggctgcagggcgggatgctgtacccccaggagagcccgtcgcgggagtgcaaggagctggacggcctctggagcttccgcgccgacttctytgacaaccgacgccggggcttcgaggagcagtggtaccggcggccgctgtgggaggtgcgatctcggggcagggccgggaggcgcccgaaagcccggcgg

SEQ ID NO: 197927 - DNA, 201 bp, Homo sapiens
gccttgaatcctaggatccacctctgatgttcactgaagagtaccagaaaagtctgctagagcagtaccatctgggtctggatcaaaaacgcagaaaataygtggttggagagctcatttggaattttgccgatttcatgactgaacagtgtaagtggcagtttggctcatgggataacgtacccgtcctcattttttcag

SEQ ID NO: 197928 - DNA, 201 bp, Homo sapiens
gtcggcggttgcctgggcggcgctcgggccgttgttgtggggctgcgcgctggggctgcagggcgggatgctgtacccccaggagagcccgtcgcgggagkgcaaggagctggacggcctctggagcttccgcgccgacttctctgacaaccgacgccggggcttcgaggagcagtggtaccggcggccgctgtgggaggt

SEQ ID NO: 197929 - DNA, 201 bp, Homo sapiens
cttgctgtgttgcccaggctggtcttaagccatcctcctgcctcagcctcccagagtgctgggattacatcccccttaccttctctgccagaggagccccygcagtgtgtgaatgctgagtcatgctgtctactgagtgctgaacgggctctgctgctctggtcctaggctccgtatgtggatgtgatctgtttgaacagc

SEQ ID NO: 197930 - DNA, 201 bp, Homo sapiens
atgctgagtcatgctgtctactgagtgctgaacgggctctgctgctctggtcctaggctccgtatgtggatgtgatctgtttgaacagctactactcttgrtatcacgactacgggcacctggagttgattcagctgcagctggccacccagtttgagaactggtataagaagtatcagaagcccattattcagagcgagt

SEQ ID NO: 197931 - DNA, 201 bp, Homo sapiens; identical to SEQ ID NO: 34279

SEQ ID NO: 197932 - DNA, 201 bp, Homo sapiens
gcccgcaggcagttcttcaacaacgtttctctgcatcaccacatgcaggtgatggaagaagtggtgcgtagggacaagaaccaccccgcggtcgtgatgtrgtctgtggccaacgagcctgcgtcccacctagaatctgctggctactacttgaagtgagtgctccctccctgccctcggctagagtgggaaggagaccct

SEQ ID NO: 197933 - DNA, 201 bp, Homo sapiens
tgaatcgctttgtgtcttttttttttttttgtagcaccgacgagagtgctggggaataaaaaggggatcttcactcggcagagacaaccaaaaagtgcagygttccttttgcgagagagatactggaagattgccaatgaaaccaggtatccccactcagtagccaagtcacaatgtttggaaaacagcctgtttacttga

SEQ ID NO: 197934 - DNA, 201 bp, Homo sapiens
ctaacttgacccatcagaagacatctgaatcgctttgtgtcttttttttttttttgtagcaccgacgagagtgctggggaataaaaaggggatcttcactyggcagagacaaccaaaaagtgcagcgttccttttgcgagagagatactggaagattgccaatgaaaccaggtatccccactcagtagccaagtcacaatg

SEQ ID NO: 197935 - DNA, 201 bp, Homo sapiens
acttggctctgctatctcctagatccgagggaagggcttcgactggccgctgctggtgaaggacttcaacctgcttcgctggcttggtgccaacgctttcygtaccagccactacccctatgcagaggaagtgatgcagatgtgtgaccgctatgggattgtggtcatcgatgagtgtcccggcgtgggcctggcgctgcc

SEQ ID NO: 197936 - DNA, 201 bp, Homo sapiens
atcactgcactccagcctaggggacagagcgagactccatgtcaaaaaataaaaataaaaaaatatatatatatctttttctttttctgagatgaggcttrcactgtggcccaggctggagtgcagtggtgagattattgacagccgttgtggggccgcggttctaagtttaaaagaatttaggctgggtgtggtggctaa

SEQ ID NO: 197937 - DNA, 201 bp, Homo sapiens
gagcacctcgcacctagccccatgcctgcctcccagcctgcactccgtttgcttgatgcattaataaatatccctcccaaatctgcatccatccacctcckgtgttcaagagctgtttcagggcgtcaacctcatttttgccagtgtccagcctagtgacctcagctctgtgtacctggaagagtggctgctcctctgggg

SEQ ID NO: 197938 - DNA, 201 bp, Homo sapiens
gcgcctcctcatgccctgacctgcagccccctccccgtatctcctgtgtctgcagtgggtgaatggggtcgacacgctagagcatgaggggggctacctcyccttcgaggccgacatcagcaacctggtccaggtggggcccctgccctcccggctccgaatcactatcgccatcaacaacacactcacccccaccaccct

SEQ ID NO: 197939 - DNA, 201 bp, Homo sapiens
ccaggcctgtgccccactcgcttggtcctcagaggtggcctccttactggctttgtttccagatagcctcctatcacccgtgcccaagtggtctttctaasagatccaaatttgtatttgtttttgagaccggatctctctgtcacccaggctggagtgtggtggtgcgatcactgctcactgcagccttaacctcctggg

SEQ ID NO: 197940 - DNA, 201 bp, Homo sapiens
gccctgacctgcagccccctccccgtatctcctgtgtctgcagtgggtgaatggggtcgacacgctagagcatgaggggggctacctccccttcgaggccracatcagcaacctggtccaggtggggcccctgccctcccggctccgaatcactatcgccatcaacaacacactcacccccaccaccctgccaccagggac

SEQ ID NO: 197941 - DNA, 201 bp, Homo sapiens
ttttttttttgtagcaccgacgagagtgctggggaataaaaaggggatcttcactcggcagagacaaccaaaaagtgcagcgttccttttgcgagagagayactggaagattgccaatgaaaccaggtatccccactcagtagccaagtcacaatgtttggaaaacagcctgtttacttgagcaagactgataccacctgc

SEQ ID NO: 197942 - DNA, 201 bp, Homo sapiens
aatttttgtatttgtagtagatagagttggggtttcaccatgttggccaggctgatcttgaactcctgacctcaagtgatccacccacctcggcctcccaragtgctgggattacaggtgtgaaccatcgtgcctggccccgtgttgtgttctggcggtggaagatgggacagagaggatgggagggtgtctgagccattc

SEQ ID NO: 197943 - DNA, 201 bp, Homo sapiens
cactcacctcctccagcctgacctgcgcccactgcactgctcccctcgcttcagctttgggctctcctcccacggccccgtccacgttccctcaccgccarcagccaggcctgtgccccactcgcttggtcctcagaggtggcctccttactggctttgtttccagatagcctcctatcacccgtgcccaagtggtctttc

SEQ ID NO: 197944 - DNA, 201 bp, Homo sapiens
gaactcaggaggcagaggctgcagtgagctgagatcacaccactgcactccagcctgggggacagactgagactgtctcagaagaaaaacatttttttttkatagagatggggtctcagtctgtcaccaggctggtcttcaactcctggactcaagtgatcctcctgccttagcctcccaaagtgtgggaactccaggcat

SEQ ID NO: 197945 - DNA, 201 bp, Homo sapiens
tgcgcccactgcactgctcccctcgcttcagctttgggctctcctcccacggccccgtccacgttccctcaccgccagcagccaggcctgtgccccactcrcttggtcctcagaggtggcctccttactggctttgtttccagatagcctcctatcacccgtgcccaagtggtctttctaacagatccaaatttgtatttg

SEQ ID NO: 197946 - DNA, 201 bp, Homo sapiens
tttttttgacacagagtttcgctctcgttgcctaggctggagtgcagtggcgcgatctcggctcactgcaatgtccacctccctggttcaagcgattctcrtgcctcagcctcccgagtagctgggattacaggcatgcgccaccacgcccacctcattttgtatttttagtagagatgaggtttcaccatgttggtcagg

SEQ ID NO: 197947 - DNA, 201 bp, Homo sapiens
ttaaaacacaagattggtcttcaaagagaataacatctgcggtgtcttgtgaggatggatgaggggctgccaagttcgcaatgaatgtgtcccatttcttyttagtttatggacttaccataaactgaagatagcagtttggtgggttggagaagcatgtggtaatggtgggaattataatacattacttacagggaaaga

SEQ ID NO: 197948 - DNA, 201 bp, Homo sapiens
tgaggggggctacctccccttcgaggccgacatcagcaacctggtccaggtggggcccctgccctcccggctccgaatcactatcgccatcaacaacacaytcacccccaccaccctgccaccagggaccatccaatacctgactgacacctccaagtgggtaccatcctgcctccattgcacacacccaccttcccgccc

SEQ ID NO: 197949 - DNA, 201 bp, Homo sapiens
cctcccaaatacggtcaaaaagcaaacaggagagtcagctatagtgaatcggaaatggctggcttgccttttccttgtctattttgtagccaaggaggaasgaaaaacgggacctcatcatggatttacttttgggatacactcattattccatagaagggtacaaagcctgagaaacttaaggtatttcagtctgttgta

SEQ ID NO: 197950 - DNA, 201 bp, Homo sapiens
gtctgttgtatattacttgcgaaaagcaggcttatcaaatacaggtgagtttcaacgcatcttgaatttggcagcatttacaagtcttcaggccaggtgtrgtggctcacgcctgtaatcccagcactttgggaggtcagggtgggaggatcgcttgaggccaggagttcaagaccagcctgttcagcatagcaagacccc

SEQ ID NO: 197951 - DNA, 201 bp, Homo sapiens
cggatggggctcaggctgtcggggtgctcacacctggtgctttggctgtcataggtgcagctgactgcacagacgtcactggggcctgtgtctgacttctvcacactccctgtggggatccgcactgtggctgtcaccaagagccagttcctcatcaatgggaaacctttctatttccacggtgtcaacaagcatgaggat

SEQ ID NO: 197952 - DNA, 201 bp, Homo sapiens
cctcatgccctgacctgcagccccctccccgtatctcctgtgtctgcagtgggtgaatggggtcgacacgctagagcatgaggggggctacctccccttcraggccgacatcagcaacctggtccaggtggggcccctgccctcccggctccgaatcactatcgccatcaacaacacactcacccccaccaccctgccacc

SEQ ID NO: 197953 - DNA, 201 bp, Homo sapiens
ctggctcccactaggcgctatctcttcagaaaggcccaaggcttttcaagggtaactgtcccagatacccctagccctctgcctacccagttaccagacasctgggtacccagcatgtaaaccttagtttgcaaataaaagataaacttttagtgctttttttttttttggagatggagtctcactctgtcgcccaggctg

SEQ ID NO: 197954 - DNA, 201 bp, Homo sapiens
gctgctacaagatggcctcactgtacagccctcaaacgtgaggacttctttctccatagacaccagatggccaatcagtactttctagagttctttaactwcttcagaatgcaagaacagtacatacatactccaacagccattgaaagattcacattcatgggaaaacacaagtcttgatgaaatcttgacttaagctct

SEQ ID NO: 197955 - DNA, 201 bp, Homo sapiens
aaaagataaacttttagtgctttttttttttttggagatggagtctcactctgtcgcccaggctggagtgcagtggcacaatctcagctcactgcaacctstgcgtcctgggttcaagcgattctcctgccccagcctcctgagtagctgggaccacaggcacccaccaccatgcctgtataatttttgtatttttagtag

SEQ ID NO: 197956 - DNA, 201 bp, Homo sapiens
ggtctgtacttctgtacacgacacccaccacctacatcgatgacatcaccgtcaccaccagcgtggagcaagacagtggtgagggcttctggtaggatccyctcagcggggcccagggtggctctgtttgttccctgtttggaaagctctcccaggaaaaaggtgctcccagcatctctacaccctcacagattcccttcc

SEQ ID NO: 197957 - DNA, 201 bp, Homo sapiens
gctgagtcatgctgtctactgagtgctgaacgggctctgctgctctggtcctaggctccgtatgtggatgtgatctgtttgaacagctactactcttggtrtcacgactacgggcacctggagttgattcagctgcagctggccacccagtttgagaactggtataagaagtatcagaagcccattattcagagcgagtat

SEQ ID NO: 197958 - DNA, 201 bp, Homo sapiens
atgcctgtcatccagcactttgcaaggaggccctggtataaggatcacttgaggccagtagttcaagagcagcctgggcaacatagcgaggccatcaccacaaaaaattaaaaaattagccagggatggtgatgtgtgccggtagtcccagctgctgaggcaggagaatcacttgagcctgggatgtcaagggtgcagtga

SEQ ID NO: 197959 - DNA, 201 bp, Homo sapiens
ctatcaggctggtctagaactcctggccttacgtgattgtcctgcctcagactcccaaagtgctgggaatccaggcatgagacaccatgcccagcctgtcrtcatttttttaatctatctcatttttttgtcctcctcaccaaagatatgttggtttgtcttgtgaggttttttttttcctgtggattcctgaaccccatc

SEQ ID NO: 197960 - DNA, 201 bp, Homo sapiens
catgccagttccctccagcttcaatgacatcagccaggactggcgtctgcggcattttgtcggctgggtgtggtacgaacgggaggtgatcctgccggagygatggacccaggacctgcgcacaagagtggtgctgaggattggcagtgcccattcctatgccatcgtggtcagtgcggccaggagcaggcagggcgggtg

SEQ ID NO: 197961 - DNA, 201 bp, Homo sapiens
cggatgaatgaatgaacaagatgaggtgagaaggaagaggtaaagggaaaaggagaacaggaagctgtcctctgcgtggcacctgtgataaatggtttctrgggacatccctgatggcagttttgtggagaggtgcgaggctttatgcggtaagaaatgagctgcaggctgggcgcagtggctcaagcctgtgatcccagc

SEQ ID NO: 197962 - DNA, 201 bp, Homo sapiens
tgctgcaggttatgtgagggagtgcccgatagtagggcgcctcctcatgccctgacctgcagccccctccccgtatctcctgtgtctgcagtgggtgaatrgggtcgacacgctagagcatgaggggggctacctccccttcgaggccgacatcagcaacctggtccaggtggggcccctgccctcccggctccgaatcac

SEQ ID NO: 197963 - DNA, 201 bp, Homo sapiens
gggccttcctgctggagggcaggccggatggggctcaggctgtcggggtgctcacacctggtgctttggctgtcataggtgcagctgactgcacagacgtmactggggcctgtgtctgacttctacacactccctgtggggatccgcactgtggctgtcaccaagagccagttcctcatcaatgggaaacctttctatttc

SEQ ID NO: 197964 - DNA, 201 bp, Homo sapiens
gggtataggattcggagatgggggtagaaggagtgatgttagagagctcggtctaggactagaggatcatatgcccttatgtaaaatacatctcaagttarggaagaaagcagcggctccatgcttttttttttttcccctttgtttttgtttgtttgttttgagacagggtcttgctctgtggaccaggctggagtgcag

SEQ ID NO: 197965 - DNA, 201 bp, Homo sapiens
cagttctgactcttacattctctttgccttgaatcctaggatccacctctgatgttcactgaagagtaccagaaaagtctgctagagcagtaccatctggrtctggatcaaaaacgcagaaaatacgtggttggagagctcatttggaattttgccgatttcatgactgaacagtgtaagtggcagtttggctcatgggat

SEQ ID NO: 197966 - DNA, 201 bp, Homo sapiens
tgacttctacacactccctgtggggatccgcactgtggctgtcaccaagagccagttcctcatcaatgggaaacctttctatttccacggtgtcaacaagyatgaggatgcggacgtgtgttggggctcctgggtccttgtcggggctgcttctggtcaccctccactttcgccttccctgtgtcctgcagttgagggcag

SEQ ID NO: 197967 - DNA, 201 bp, Homo sapiens
aaaggacagaactaaaagtcatccctctgtgcactggagacaaaagcatatctgactgcttcctgtactctatgtttatttatctcatgaaaaaaatgcakattcactgagctcaagataaatgcataattgactatttctccacccttttctttccacatgtaaaatgtagattctgtaaacgctgatcaaagactcaaa

SEQ ID NO: 197968 - DNA, 201 bp, Homo sapiens
gggcatggtggcttatgcctgtcatccagcactttgcaaggaggccctggtataaggatcacttgaggccagtagttcaagagcagcctgggcaacatagygaggccatcaccacaaaaaattaaaaaattagccagggatggtgatgtgtgccggtagtcccagctgctgaggcaggagaatcacttgagcctgggatgt

SEQ ID NO: 197969 - DNA, 201 bp, Homo sapiens
acactccctgtggggatccgcactgtggctgtcaccaagagccagttcctcatcaatgggaaacctttctatttccacggtgtcaacaagcatgaggatgyggacgtgtgttggggctcctgggtccttgtcggggctgcttctggtcaccctccactttcgccttccctgtgtcctgcagttgagggcagctcagggcaa

SEQ ID NO: 197970 - DNA, 201 bp, Homo sapiens
gagagggggctcatggggtggctctccagggtcctggctctcagaggaagtgcagcttcgacagggacaggggtcacttggctctgctatctcctagatcygagggaagggcttcgactggccgctgctggtgaaggacttcaacctgcttcgctggcttggtgccaacgctttccgtaccagccactacccctatgcaga

SEQ ID NO: 197971 - DNA, 201 bp, Homo sapiens
gtggtgagggcttctggtaggatcctctcagcggggcccagggtggctctgtttgttccctgtttggaaagctctcccaggaaaaaggtgctcccagcatstctacaccctcacagattcccttccacctatgaagctaaaattcagcctgtgtgagcggatacgggctcccaaaatcacccgtgtggttgacctcgctag

SEQ ID NO: 197972 - DNA, 201 bp, Homo sapiens
cgtaccagccactacccctatgcagaggaagtgatgcagatgtgtgaccgctatgggattgtggtcatcgatgagtgtcccggcgtgggcctggcgctgcygtgagtctctgctgtgcacctgctccgcctgcccagcccgggggcgtcaccgtgaccctctgtcccttccctcctggcccgcaggcagttcttcaacaac

SEQ ID NO: 197973 - DNA, 201 bp, Homo sapiens
ttaccttctctgccagaggagcccccgcagtgtgtgaatgctgagtcatgctgtctactgagtgctgaacgggctctgctgctctggtcctaggctccgtrtgtggatgtgatctgtttgaacagctactactcttggtatcacgactacgggcacctggagttgattcagctgcagctggccacccagtttgagaactgg

SEQ ID NO: 197974 - DNA, 201 bp, Homo sapiens
tttttgtagcaccgacgagagtgctggggaataaaaaggggatcttcactcggcagagacaaccaaaaagtgcagcgttccttttgcgagagagatactgkaagattgccaatgaaaccaggtatccccactcagtagccaagtcacaatgtttggaaaacagcctgtttacttgagcaagactgataccacctgcgtgtc

SEQ ID NO: 197975 - DNA, 201 bp, Homo sapiens
gcagcttcgacagggacaggggtcacttggctctgctatctcctagatccgagggaagggcttcgactggccgctgctggtgaaggacttcaacctgcttygctggcttggtgccaacgctttccgtaccagccactacccctatgcagaggaagtgatgcagatgtgtgaccgctatgggattgtggtcatcgatgagtg

SEQ ID NO: 197976 - DNA, 201 bp, Homo sapiens
aaaaatatatctttttcagggcgggcgcggtggctcatgcctgtaatcccagcactttgggaggccaaggtggggggatcacgaggtcaggagatcgcgascatcctgactaacatggtgaaactccgtctctactaaaaatgcaaaaaattagccgggcatggtggcaggggcctgtagtcccagcgactcgggaggctg

SEQ ID NO: 197977 - DNA, 201 bp, Homo sapiens
cttggctctgctatctcctagatccgagggaagggcttcgactggccgctgctggtgaaggacttcaacctgcttcgctggcttggtgccaacgctttccrtaccagccactacccctatgcagaggaagtgatgcagatgtgtgaccgctatgggattgtggtcatcgatgagtgtcccggcgtgggcctggcgctgccg

SEQ ID NO: 197978 - DNA, 201 bp, Homo sapiens
gcaagggcccagcaaaccacagtcctcccatcctaggtatcccaagggttactttgtccagaacacatattttgactttttcaactacgctggactgcagyggtctgtacttctgtacacgacacccaccacctacatcgatgacatcaccgtcaccaccagcgtggagcaagacagtggtgagggcttctggtaggatcc

SEQ ID NO: 197979 - DNA, 201 bp, Homo sapiens
ccgctatgtgtcagggcttgtgctaggcctgggggcacagccgtgcagcacactggtcctggacccttttgggggcctaggagctgagcccggctcttctstccacagtcaggccccaccgtggacatgccagttccctccagcttcaatgacatcagccaggactggcgtctgcggcattttgtcggctgggtgtggtac

SEQ ID NO: 197980 - DNA, 201 bp, Homo sapiens
gcgtcaccgtgaccctctgtcccttccctcctggcccgcaggcagttcttcaacaacgtttctctgcatcaccacatgcaggtgatggaagaagtggtgcstagggacaagaaccaccccgcggtcgtgatgtggtctgtggccaacgagcctgcgtcccacctagaatctgctggctactacttgaagtgagtgctccct

SEQ ID NO: 197981 - DNA, 201 bp, Homo sapiens
gagtcatgctgtctactgagtgctgaacgggctctgctgctctggtcctaggctccgtatgtggatgtgatctgtttgaacagctactactcttggtatcrcgactacgggcacctggagttgattcagctgcagctggccacccagtttgagaactggtataagaagtatcagaagcccattattcagagcgagtatgga

SEQ ID NO: 197982 - DNA, 201 bp, Homo sapiens
aatgctgagtcatgctgtctactgagtgctgaacgggctctgctgctctggtcctaggctccgtatgtggatgtgatctgtttgaacagctactactcttrgtatcacgactacgggcacctggagttgattcagctgcagctggccacccagtttgagaactggtataagaagtatcagaagcccattattcagagcgag

SEQ ID NO: 197983 - DNA, 201 bp, Homo sapiens
gctgtctactgagtgctgaacgggctctgctgctctggtcctaggctccgtatgtggatgtgatctgtttgaacagctactactcttggtatcacgactaygggcacctggagttgattcagctgcagctggccacccagtttgagaactggtataagaagtatcagaagcccattattcagagcgagtatggagcagaaa

SEQ ID NO: 197984 - DNA, 201 bp, Homo sapiens
aggtcaggagtttgagaccggcgtggccaacagatattgaaaccctgtctctactaaaaataaaacaattagcggaacacagaggtgggcgtctgtaatcycagctacttgggaggctgaggcaggagaattgcttgagcccaggaggtggaggttgcagtgagccaagatcatgtcattgcactccagcctgggctacag

SEQ ID NO: 197985 - DNA, 201 bp, Homo sapiens; identical to SEQ ID NO: 34290

SEQ ID NO: 197986 - DNA, 201 bp, Homo sapiens
agctgagatcacaccactgcactccagcctgggggacagactgagactgtctcagaagaaaaacatttttttttgatagagatggggtctcagtctgtcascaggctggtcttcaactcctggactcaagtgatcctcctgccttagcctcccaaagtgtgggaactccaggcatgagccaccttgtcttgtcaaagggaa

SEQ ID NO: 197987 - DNA, 201 bp, Homo sapiens
tccagcctcagcctcccgagtagctgggattacaggcacatgccaccacgcccagctaagttttccttttttcctttttatgagatggagtctcactccgyggccaggctggagtgcagtggcgcaatctcgtctcactgcaaccttcaccttccaggttcaagtgattctcctgcctcagcctcctgaggagttgggatt

SEQ ID NO: 197988 - DNA, 201 bp, Homo sapiens
ccctagccctctgcctacccagttaccagacagctgggtacccagcatgtaaaccttagtttgcaaataaaagataaacttttagtgctttttttttttttggagatggagtctcactctgtcgcccaggctggagtgcagtggcacaatctcagctcactgcaacctctgcgtcctgggttcaagcgattctcctgcccc

SEQ ID NO: 197989 - DNA, 201 bp, Homo sapiens
ctgggattacaggtgtgagccaccatgcccagccagcaaacagttttaatttcactgtagtcttggtcctctttgaatgcagtctctctcttttttttttkggggggggacagtctcgctctgttggccaggctggagtgcagtggcatgatcttgactcactgcaacctctgtctcccgggctcaagcaattctcctccc

SEQ ID NO: 197990 - DNA, 201 bp, Homo sapiens
tgggattacaggtgtgagccaccatgcccagccagcaaacagttttaatttcactgtagtcttggtcctctttgaatgcagtctctctcttttttttttgkgggggggacagtctcgctctgttggccaggctggagtgcagtggcatgatcttgactcactgcaacctctgtctcccgggctcaagcaattctcctccct

SEQ ID NO: 197991 - DNA, 201 bp, Homo sapiens; identical to SEQ ID NO: 34365

SEQ ID NO: 197992 - DNA, 201 bp, Homo sapiens; identical to SEQ ID NO: 34366

SEQ ID NO: 197993 - DNA, 201 bp, Homo sapiens
ccgggtgcctggcccctcactgcttgcaaagcagcatcctggccactggggcagtagcctgtttagcagtgctcaccacaggcccaggttcaagctcctcygcgagcgccaagatgagttttggcacccctgatttattgatgagttaacagagcttcgagatgttcatccagggtaaccaactagtagtcctcggcagag

SEQ ID NO: 197994 - DNA, 201 bp, Homo sapiens; identical to SEQ ID NO: 34367

SEQ ID NO: 197995 - DNA, 201 bp, Homo sapiens
agagtgagaccctgtcttaaaaaaaagaagggagaaagtgtcagatggtgatgaggtctgggggggaaatagagaatggggatcaggagtgtggatggtgrtattccctcaccaagaggtgacatgtgagcagggagctgggaggtgagggtgtgacccgtgtggaaatcagggaaaagcattccagcctgagggaacagc

SEQ ID NO: 197996 - DNA, 201 bp, Homo sapiens; identical to SEQ ID NO: 34368

SEQ ID NO: 197997 - DNA, 201 bp, Homo sapiens; identical to SEQ ID NO: 34370

SEQ ID NO: 197998 - DNA, 201 bp, Homo sapiens; identical to SEQ ID NO: 34371

SEQ ID NO: 197999 - DNA, 201 bp, Homo sapiens
agtgcctgcggttaggggaccaggtgcagctgcatgtggatgaggtaaggatcctccctaactgttcccaataccctgcagccccttcactctcccaaccycctgccctcacccaggacgctgggtgacaaaagtatttcaggcctggcgtctaggctgcatggcgaagcatacggccacccacctgctgaactgggcact

SEQ ID NO: 198000 - DNA, 201 bp, Homo sapiens; identical to SEQ ID NO: 34372

SEQ ID NO: 198001 - DNA, 201 bp, Homo sapiens; identical to SEQ ID NO: 34373

SEQ ID NO: 198002 - DNA, 201 bp, Homo sapiens
tcctcttctgattctgttcctagggtgccatgcccaccttcacagcagaggcctgggcactggcagtgtgcagccacatggggggcaaggcgtggggctcrcgagtggtggcccaaggcaccggaagcactactgacctggaagctgccctcagtatagcccaaacctatgccctcagccagctctgacccaggtccgccc

SEQ ID NO: 198003 - DNA, 201 bp, Homo sapiens
gggacagggccctgcgaggctgaagtcccactttcattctttcattctccatgcacttcttccatgcccatgcccaccctgcagcaccgggcacggcaggmtgagccagttcagaagcagggattgtggcttgatgtccatgcgcttggggagctgcagcgccaaggagtgcccccaactgacgacagccccaagtacaac

SEQ ID NO: 198004 - DNA, 201 bp, Homo sapiens
ggcaattaataatatagcagatgctgtttggcttctgtgttctcctatagactcctgcttcacgggcaaaaatggccgtgtctgatgccaaggtccaaggraactggcaaatgcctagaacagtgcctagcacatactaggtcttcaataaatatttgttgaatacctcttgaatgaatgctgatactcccctgtcactct

SEQ ID NO: 198005 - DNA, 201 bp, Homo sapiens
ggaatgggctgttttggggattcgaggccatgttgttcaagtactcacccagttctgatagtagaaattcagtaaatggtcacagatatgttcacttgtascaccaaatatgagccccgtgagggcagggcctggcttgtgctcatctgtgaggcttctcagcccaggactggactggcaaggccattctggatgtggttg

SEQ ID NO: 198006 - DNA, 201 bp, Homo sapiens; identical to SEQ ID NO: 34379

SEQ ID NO: 198007 - DNA, 201 bp, Homo sapiens
ttcgggaccgccatggccaccggctggtgccctccgcttccgtgcggccccgcggcgaccccagtttgctttttgtcaatgcgggcatgaaccaggtgagrgccgaaccatactgatagggagcggagttcgtgagttttctggtgagaaagacgctgcaggattgggcaaaagaagcgagaggcggagttcgtagctttt

SEQ ID NO: 198008 - DNA, 201 bp, Homo sapiens
aggtggcccaggtgagggaagtgggagagcagcccaccgcccccattaatacccatcctggtccagctctctgattttacacctttaattcctcccagacaaaggggccaaggctgggtggaagtatctatgaggatactccaggacagggatggggaatctccttgttcctgaaaacagcccctccccaccccagaaggc

SEQ ID NO: 198009 - DNA, 201 bp, Homo sapiens
caggtggcccaggtgagggaagtgggagagcagcccaccgcccccattaatacccatcctggtccagctctctgattttacacctttaattcctcccagacaaaggggccaaggctgggtggaagtatctatgaggatactccaggacagggatggggaatctccttgttcctgaaaacagcccctccccaccccagaagg

SEQ ID NO: 198010 - DNA, 201 bp, Homo sapiens
tcaggtggcccaggtgagggaagtgggagagcagcccaccgcccccattaatacccatcctggtccagctctctgattttacacctttaattcctcccagacaaaggggccaaggctgggtggaagtatctatgaggatactccaggacagggatggggaatctccttgttcctgaaaacagcccctccccaccccagaag

SEQ ID NO: 198011 - DNA, 201 bp, Homo sapiens
gtcaggtggcccaggtgagggaagtgggagagcagcccaccgcccccattaatacccatcctggtccagctctctgattttacacctttaattcctcccagacaaaggggccaaggctgggtggaagtatctatgaggatactccaggacagggatggggaatctccttgttcctgaaaacagcccctccccaccccagaa

SEQ ID NO: 198012 - DNA, 201 bp, Homo sapiens
ggctctggatctcctactttgatggtgaccccaaggcagggctggacccagacctggagaccagggacatctggctgagcttagggtaagtcagccccctycttatgttcattcctggaggtcaggaggactggaaagtggagactaccagcaccaatcctcagagtcttagcatttcattccaggatattgtggggtcag

SEQ ID NO: 198013 - DNA, 201 bp, Homo sapiens
  misc_feature (1)...(201): n = A,T,C or G
ctctcagtgagtgctagccaagccgggctgccccagggtctggggagggcaaagtcctgaccaggagacagctaggggtctgggaagcgatgggctcaccntctgtctttcgtggtccaggtgctggtgaaggtggtacggcagctgtgtgagcaggcccccagcacgtctgtgctcctactcagcccccagcccatgggg

SEQ ID NO: 198014 - DNA, 201 bp, Homo sapiens
aagtcaacatttgttttggttgattttctgcatctacgttttatggtgtgatttttaaaaaatctctattgcagtgtttggcaaactttttttgaaaagggccacgtattaaatattttaggctttccaggccaagaggcaaaatcgaagttgttatgtaggtatttctttttttagtatttattgatcattcttgggtgt

SEQ ID NO: 198015 - DNA, 201 bp, Homo sapiens
gattgctcagctggggcttagttcagaagttggggctaattggaaacctgcctctcagcctgacccctctgcttgtccttcctgccccataggctgcaaaraaaactcaggagctgctggagcggcactcgaaggggcctctgattgtggacacagtctctgctgagtctctctcagtgagtgctagccaagccgggctgc

SEQ ID NO: 198016 - DNA, 201 bp, Homo sapiens
caagtcaacatttgttttggttgattttctgcatctacgttttatggtgtgatttttaaaaaatctctattgcagtgtttggcaaactttttttgaaaagggccacgtattaaatattttaggctttccaggccaagaggcaaaatcgaagttgttatgtaggtatttctttttttagtatttattgatcattcttgggtg

SEQ ID NO: 198017 - DNA, 201 bp, Homo sapiens
agaagtctcaagggctggggcatgggggtgagtcagaggctgtgcaaggacggggtggtggcagcttccttctcctgccagctgagaaccatcacccaggycattcccccacttctgtctctttcaaactgtgtttctcccccaactcccaagtctggctcagaacccccggaagcctactgacttgattagtgccattca

SEQ ID NO: 198018 - DNA, 201 bp, Homo sapiens
ctgcacccatgtgcccagagacactccagcagatacactgagaagtctcaagggctggggcatgggggtgagtcagaggctgtgcaaggacggggtggtgscagcttccttctcctgccagctgagaaccatcacccaggccattcccccacttctgtctctttcaaactgtgtttctcccccaactcccaagtctggctc

SEQ ID NO: 198019 - DNA, 201 bp, Homo sapiens
ctcaggggtgcccagcagcagagccagtgttcatacttggacaccaatgtggccatatcagctattggcagctggcatgtgttttgattatttggtgctgstgccttgattggtcctgattgttaaatcttatttgtccctgaccagtaatgagttgagaggccttgtcctggggagatgaatgtaatcctgaccctcctg

SEQ ID NO: 198020 - DNA, 201 bp, Homo sapiens
aaactcaggagctgctggagcggcactcgaaggggcctctgattgtggacacagtctctgctgagtctctctcagtgagtgctagccaagccgggctgccycagggtctggggagggcaaagtcctgaccaggagacagctaggggtctgggaagcgatgggctcaccgtctgtctttcgtggtccaggtgctggtgaagg

SEQ ID NO: 198021 - DNA, 201 bp, Homo sapiens
tgcccaggtccctggcctgcgctctctggatgaggtgagttggggaagcccttttgctggagatcgggggcctccttcaggcatacctggaggctttatcyttctcctttggcagttaacgggcctgtcccctcttgacctcaggtttacccagaccctgtgcgggtggtatcagtgggggtgcccgtggcccatgcattg

SEQ ID NO: 198022 - DNA, 201 bp, Homo sapiens
cagtaggcctgggacttctgggttgagtgggtgcatgggacacacgcaggtgacatgctcaggctcaggggtgcccagcagcagagccagtgttcatactyggacaccaatgtggccatatcagctattggcagctggcatgtgttttgattatttggtgctgctgccttgattggtcctgattgttaaatcttatttgtc

SEQ ID NO: 198023 - DNA, 201 bp, Homo sapiens
gctctctggatgaggtgagttggggaagcccttttgctggagatcgggggcctccttcaggcatacctggaggctttatccttctcctttggcagttaacrggcctgtcccctcttgacctcaggtttacccagaccctgtgcgggtggtatcagtgggggtgcccgtggcccatgcattggacccagcctcccaagccgc

SEQ ID NO: 198024 - DNA, 201 bp, Homo sapiens
tccttgtgcagcagtgaggagtcaggctacagagtgtctggggcctcgcccagctctgatgtgggatcctgaaggccctccagcaggggccttcccttcayctccagccgctccccttccttgtttctactgtcatccaagccattcttgcctaaactgggctgccctctccctctgctgccaccctgtctccctgcgctt

SEQ ID NO: 198025 - DNA, 201 bp, Homo sapiens
cgggtatttgtgtttggcatctggtggcttctgcgtggttagaagggccctggaccttatttttctccccttctttgtctaatccctcccctcctcaacaktctttgtctttctttctcaaagctgaagtggcctggtccttgtcactgtgtggagacctgggactccccttggacatggtagagctgatgctggaggaga

SEQ ID NO: 198026 - DNA, 201 bp, Homo sapiens
tggcttgtgctcatctgtgaggcttctcagcccaggactggactggcaaggccattctggatgtggttggctttagggctgagggcagatgctctagaggmgataaagagcacccacctgggccaggtcaggcagggccactggctgactcttctgcttcccagggctgcagggcacccccttacttgggccgagtagggg

SEQ ID NO: 198027 - DNA, 201 bp, Homo sapiens
tcagggaagggcaggggtgatgtactgcttctggccataggctgtggaaactgctgtgatgccccagtggcagcggcgggagctgctggccacagtgaagrtgctgcagcggcgtgccaacactgccatccgtaagctgcaaatgggacaggtgagaggaggtttggctgcacccatgtgcccagagacactccagcagat

SEQ ID NO: 198028 - DNA, 201 bp, Homo sapiens
aggtggccagtgccactgagcagtgagctgggataggggcaggtgaggaggctggagagcggggtcagacaaacaatatgcttattaaaacaagttgtacrgcacctgcctcaagcctgagctgaagctgaaaattggcacttcaaagcaggaggaagcaaagagatggaggaaagccctccttccctaccagaatgagtc

SEQ ID NO: 198029 - DNA, 201 bp, Homo sapiens
tggtccttgtcactgtgtggagacctgggactccccttggacatggtagagctgatgctggaggagaaaggggtccagctagactccgctggactggagcrgttggcccaagaggaggcccaggtacaagctgtggcaccccatgctgggttctgttaggacacctcttccccagccctgagctcctgggggaggagctgt

SEQ ID NO: 198030 - DNA, 201 bp, Homo sapiens
tctcctgccagctgagaaccatcacccaggccattcccccacttctgtctctttcaaactgtgtttctcccccaactcccaagtctggctcagaacccccrgaagcctactgacttgattagtgccattcagccctgattgcacctccactgtggatccccctttctcccgcccactcctggtccatctgtgctctgacct

SEQ ID NO: 198031 - DNA, 201 bp, Homo sapiens
ccaccctctcctagccctattacctcccctattcctccctggactccttcagactctccctagcactccaattgggttgggctccagctggcccagatatktgtctgcagggtgggtgtcttccctggccctgctggtccctacctcagagactatggctcagggaagggcaggggtgatgtactgcttctggccataggc

SEQ ID NO: 198032 - DNA, 201 bp, Homo sapiens
  misc_feature (1)...(201): n = A,T,C or G
ggcccatgcattggacccagcctcccaagccgcactgcagacctctgtggagctatgctgtgggacgtgagtcactcctttgtgctgcctggcccaggggncccggatccttgcccttcccttggtctttggagccatcagcccttaatgggagatgcacgctggcttctcccttctctactgtcatgccccgactttctg

SEQ ID NO: 198033 - DNA, 201 bp, Homo sapiens
tactgagatccactacgaccttgctggtggggtgggagccccccagctggtagagctttggaacctggtcttcatgcaacacaacaggtaatagggtgctraagcaggatgagaatccctgactagaagtgggaaaggtggcaattagaagactttgatctgtttcatataaaaacaaacatgtaaacggtgcttaccgtg

SEQ ID NO: 198034 - DNA, 201 bp, Homo sapiens
caggggggccaggcttcagaccgtggctacctggtgcgggcagggcaagaggtgagtctccatcacaacccaggctgatttctgtgggcggcagacccaarcctgagtgggagccaaggggagggaaaggctacaggcaccttgaccactaccctccctcaggacgtgctgttcccagtagcccgggcccaggtctgtgga

SEQ ID NO: 198035 - DNA, 201 bp, Homo sapiens
gatgaatgtaatcctgaccctcctgtcccctccctgcaggcccgagagctaggccagagcctggcccaggaagtgaaagcggccactgagcggctgagtcwggggagccgggatgtggcggaggcactgaggctgtccaaggacataggacgactcattgaagtgagggccacgcctaccaccccaccctctcctagccct

SEQ ID NO: 198036 - DNA, 201 bp, Homo sapiens
ctggaggctttatccttctcctttggcagttaacgggcctgtcccctcttgacctcaggtttacccagaccctgtgcgggtggtatcagtgggggtgcccrtggcccatgcattggacccagcctcccaagccgcactgcagacctctgtggagctatgctgtgggacgtgagtcactcctttgtgctgcctggcccaggg

SEQ ID NO: 198037 - DNA, 201 bp, Homo sapiens
gggcaaagtcctgaccaggagacagctaggggtctgggaagcgatgggctcaccgtctgtctttcgtggtccaggtgctggtgaaggtggtacggcagctrtgtgagcaggcccccagcacgtctgtgctcctactcagcccccagcccatggggaaggtgctgtgtgcctgtcaggtggcccaggtgagggaagtgggag

SEQ ID NO: 198038 - DNA, 201 bp, Homo sapiens
ctgggaacaagatggcagcagaaatgcttttgtcttaagtcgggagctaaactcatgtggcttgattacttcagtggggtctccctctcacccgtcttccycccccaccccatgctggtttctgctgcaggaggaggcttgtaacatggcctgggaactgctgactcaggtctatgggatccctgaggaaaggctctggat

SEQ ID NO: 198039 - DNA, 201 bp, Homo sapiens
ggacgaggcagccttcctggcctccctggagcggggtaggcggatcattgatcggactctgaggaccctggggccttcagatatgttccctggtaagcagkatacctagcccatgcacaaggggctcgctgagactcaccaaggtgggcagaggagggagctctgggccagccccatgcctcatatccacccctgacctct

SEQ ID NO: 198040 - DNA, 201 bp, Homo sapiens
gttcatacttggacaccaatgtggccatatcagctattggcagctggcatgtgttttgattatttggtgctgctgccttgattggtcctgattgttaaatyttatttgtccctgaccagtaatgagttgagaggccttgtcctggggagatgaatgtaatcctgaccctcctgtcccctccctgcaggcccgagagctagg

SEQ ID NO: 198041 - DNA, 201 bp, Homo sapiens
atacttggacaccaatgtggccatatcagctattggcagctggcatgtgttttgattatttggtgctgctgccttgattggtcctgattgttaaatcttayttgtccctgaccagtaatgagttgagaggccttgtcctggggagatgaatgtaatcctgaccctcctgtcccctccctgcaggcccgagagctaggccag

SEQ ID NO: 198042 - DNA, 201 bp, Homo sapiens
gccagtaggaggaatggggagagggagagctttgaggtgggagcacacactggacctcgtccttcccactccccatattgctgaccatgagccgctggggrttcatgtctgggctctgaacccctttaggctggttcttcgtcggatcctgcgtcgagctgtgcgtttctccatggagatcttaaaggcaccacctggctt

SEQ ID NO: 198043 - DNA, 201 bp, Homo sapiens
gggcattagaaggcttagagagtgaaatctctgcagctattagccaacagcttcctcctgccttgacgacctggattctctctgatccccaggcaaatgaraagaccaaatgttaggcaattaataatatagcagatgctgtttggcttctgtgttctcctatagactcctgcttcacgggcaaaaatggccgtgtctgat

SEQ ID NO: 198044 - DNA, 201 bp, Homo sapiens
gaagtgggaaaggtggcaattagaagactttgatctgtttcatataaaaacaaacatgtaaacggtgcttaccgtgtgtcaggcacaattctcaacacctyatagataataactgatttaattgtagtctttgcctgtgacagcttaaacaagtcactgctattctctgttgaacttgatgatcaacgagttgaacttgat

SEQ ID NO: 198045 - DNA, 201 bp, Homo sapiens
aagaagggggaagctttctgggcaggaaaacactcagaggcagtaatggttcatggcttattctgggaacaagatggcagcagaaatgcttttgtcttaastcgggagctaaactcatgtggcttgattacttcagtggggtctccctctcacccgtcttccccccccaccccatgctggtttctgctgcaggaggaggct

SEQ ID NO: 198046 - DNA, 201 bp, Homo sapiens
ccgtctgggctccctactaaatgagtctcagttttgttccctgaagttattgggtgtggttgaagaagctgagacggaggatgccacctttcagcgtcccrtttccagctcccaacacattcctccttcttttaccttgcctattttactaggcagagggtctccggttcatgatttgtttacctcttctctgctccccac

SEQ ID NO: 198047 - DNA, 201 bp, Homo sapiens
tgcacgccagcacaacaagagtgaaaccccatctcaaaaaaataaaaaagtcattaatcacacagaaatccccagctggctttagctttctgttccagaamcactggaaaaaccaaaacaggccaaacacactttcaaaacaacacctttaatctatgtgggcaaagggagaaaaaggggatcatggaataggagttatag

SEQ ID NO: 198048 - DNA, 201 bp, Homo sapiens
catgcattggacccagcctcccaagccgcactgcagacctctgtggagctatgctgtgggacgtgagtcactcctttgtgctgcctggcccaggggccccrgatccttgcccttcccttggtctttggagccatcagcccttaatgggagatgcacgctggcttctcccttctctactgtcatgccccgactttctgttca

SEQ ID NO: 198049 - DNA, 201 bp, Homo sapiens
ctccagcctgggcaacgagactgaaactctgtttcaaaaaaaaaaaaatgcagtgattactatgaaagtcagggtaatggtcacctttgggagaaggaagstggttgggggcagggcagaatccatggaggggccctggggtggctgcaaagttctatttcaagacctgggtagtggatacaaagatgtctgcctttgaat

SEQ ID NO: 198050 - DNA, 201 bp, Homo sapiens
tctacgcagaacaggggggccaggcttcagaccgtggctacctggtgcgggcagggcaagaggtgagtctccatcacaacccaggctgatttctgtgggcrgcagacccaagcctgagtgggagccaaggggagggaaaggctacaggcaccttgaccactaccctccctcaggacgtgctgttcccagtagcccgggccc

SEQ ID NO: 198051 - DNA, 201 bp, Homo sapiens
ccaggcttcagaccgtggctacctggtgcgggcagggcaagaggtgagtctccatcacaacccaggctgatttctgtgggcggcagacccaagcctgagtkggagccaaggggagggaaaggctacaggcaccttgaccactaccctccctcaggacgtgctgttcccagtagcccgggcccaggtctgtggaggtttcat

SEQ ID NO: 198052 - DNA, 201 bp, Homo sapiens
gcttattctgggaacaagatggcagcagaaatgcttttgtcttaagtcgggagctaaactcatgtggcttgattacttcagtggggtctccctctcacccrtcttccccccccaccccatgctggtttctgctgcaggaggaggcttgtaacatggcctgggaactgctgactcaggtctatgggatccctgaggaaaggc

SEQ ID NO: 198053 - DNA, 201 bp, Homo sapiens
aactgggcactgaggcagaccctgggccctggcacagagcagcagggctcccatctcaatcctgagcagctgcgcttggatgtgaccacccaggtgagccyggcatagaaagacaggcttcatgtgaggtgacaggcataaaagagagacagcctgctgtgagcgggttgcccttagagtcctgggctctaggcccagcac

SEQ ID NO: 198054 - DNA, 201 bp, Homo sapiens
  misc_feature (1)...(201): n = A,T,C or G
aaatatcgagcccagcatcctatcagcaagctaagaaagctgtccttgcttacaagaagcaggagaacttgaggaggctccttttccaaactgctcagccnttgacctcaggacccccttctgccaccctacagggaaaccagttccccatttgagtccctctcccagcccctcaatgtgtctgagcctccagggcaggtg

SEQ ID NO: 198055 - DNA, 201 bp, Homo sapiens
cttgggccgagtaggggtggcagacgaggggcgcacagacacagcgtaccgcgtggtggctgaccacatccgcacactcagtgtctgcatctctgatggcrtcttccctgggatgtcaggtcccccgtgagtctggaagggctacagagaggacaggggctgctgggggtctcaggtggaggagggagggaacaggagagg

SEQ ID NO: 198056 - DNA, 201 bp, Homo sapiens
gtcactcctttgtgctgcctggcccaggggccccggatccttgcccttcccttggtctttggagccatcagcccttaatgggagatgcacgctggcttctsccttctctactgtcatgccccgactttctgttcactccttcctcccacaggcacctgttacgtactggggctgtaggggacctggttatcatcggggacc

SEQ ID NO: 198057 - DNA, 201 bp, Homo sapiens
cccacctgggaccctgttcctccccctcctgctcatgcccatgtccctggtacctggacagccccctgcccattctcaccaccctctgctctaccaggtcygctacatctcagacttcttcaaagcccgacccccacagcactgtctgaaggaggaggagctggaacggaagcccagcctgtcactgacgttgaccctggg

SEQ ID NO: 198058 - DNA, 201 bp, Homo sapiens
tgcccattctcaccaccctctgctctaccaggtctgctacatctcagacttcttcaaagcccgacccccacagcactgtctgaaggaggaggagctggaayggaagcccagcctgtcactgacgttgaccctgggcgaggctgaccacaaccactatggatacccgcactcctcctcctgaggccggaccccgcccaggca

SEQ ID NO: 198059 - DNA, 201 bp, Homo sapiens
ttagccaggggcctgcctggagatcagccctcctgagacaatttctgtgggggtggaagtgggggagggagaaagtcgctcagaactgatggtcctggacyggccacggtccccagagcctcagcctcccaggcccaggctttgttgaagatgtccgggccctggactggcgctgtctgggcccccactgacctgacccag

SEQ ID NO: 198060 - DNA, 201 bp, Homo sapiens
gggcccctgggccgaccgagacccccactggttcctgcggctgctcttgcaggtctcggccggggaagcctacctggtgtacacagaccggctctattctygctcggacttcaacaactacgtggctgctgtatacaaggtgctggggaccttcctgtttggggctgccgtgagccagtctctgacagacctggccaagta

SEQ ID NO: 198061 - DNA, 201 bp, Homo sapiens; identical to SEQ ID NO: 34389

SEQ ID NO: 198062 - DNA, 201 bp, Homo sapiens
aaattgggccatgtttcttaatgtattgtccaatctctgattttttttgagacagaggctcactctgtcacccaggctggagtgcaatgatctgagctcaytgcagcctcggactcccaggctcaagccatcttcccacctgagcctcccgagtagctaggactacaggaacgtgccaccacatccagctactgtttattt

SEQ ID NO: 198063 - DNA, 201 bp, Homo sapiens
tatcagatgactggaacagaaaaggggaacagtttctgctactgggatttgagtgcatctaacagcagcagcctccgtgtcgagccctcccttctgtgggyggggcggggacaagggggaggttggaaggcgctgagtgagccacctgccccttctccttcctcaggttgtctttctactcgggacactcttcctttggga

SEQ ID NO: 198064 - DNA, 201 bp, Homo sapiens
cagggtaaataatctttttttttttcttttttttttttgagacagagtctgggcccaggctggagtgcggtggtgcaatcttggctcactgcaacctccayctcctgggttcaagtgcttctcctgcctcagcctccccagtagctgggattacaggtgtgcgccaccacgcccggctaatttttgtattttcatttactt

SEQ ID NO: 198065 - DNA, 201 bp, Homo sapiens
tagtaagtccaacatctgggtgtcctgagggacaatttctattattacatttttttccctgtgtattggccacacctgtgtttttctacatgccttgtaatttttttttttttttgagacagagtctcaccctattgccaggttggagtgcagtggcgatctcggctcactgcaacctccacctcccaagttcaagcaaat

SEQ ID NO: 198066 - DNA, 201 bp, Homo sapiens
tgagtggtacctgtgggtaatagggcccccttcagagtccccagctctccagcagccttggggaggcccgtgcggaggagtgagggcccctgggccgaccragacccccactggttcctgcggctgctcttgcaggtctcggccggggaagcctacctggtgtacacagaccggctctattctcgctcggacttcaacaac

SEQ ID NO: 198067 - DNA, 201 bp, Homo sapiens
gttatatatttttgaaagattgaccatttcatcatcatagaatgagatatatgagttttgtctcaacaatttttgtcttgatgtctgttttgtctgatatyaacatagctattctggttctctttttgttattgtttgcatggaatattttttttttccattcttggactttcaacctgtttatgtctctgactgtaaagt

SEQ ID NO: 198068 - DNA, 201 bp, Homo sapiens; identical to SEQ ID NO: 34392

SEQ ID NO: 198069 - DNA, 201 bp, Homo sapiens
tgtgtttgtctgaggggatgcgaaagggagtgttatttgggctgtgaaaaaagctcttccttgctgtctggtgagagtagaggtgggaggcctccaggccraggcaggtgtgtggggccccaaggcccagctggtgagagaacctcacagctcccaggcttttcttccccaccagcctccctgcccttcgctatcctgacg

SEQ ID NO: 198070 - DNA, 201 bp, Homo sapiens
gatctcggctcactgcaacctccacctcccaagttcaagcaaatctcctgcctcagcctcccaagtagctgggactacaggcatgtgctaccacacccagytaatttttgtatttttggtacagacggcgtttcaccgtgtgggccaggatggtctcggtctcttgacctcgtgatccgcctgcctcggcctcccaaagtc

SEQ ID NO: 198071 - DNA, 201 bp, Homo sapiens
actgtgtgccagctcccactttcctggagctcgtgggaggagacggggacagtgaacgaacgcacagactgagatggtgggaggggctgtgcgttccgggytgtctgcacgaggggctctggcaggggggccgcgtcccggcttgtctgcgcgaggggctctggcgaccgcgtccagcactactgctgtgtgtttttcttt

SEQ ID NO: 198072 - DNA, 201 bp, Homo sapiens
ttggaaggcgctgagtgagccacctgccccttctccttcctcaggttgtctttctactcgggacactcttcctttgggatgtactgcatggtgttcttggyggtgagtctgtttctcccgggcttgcttttcgggggaaccatggctaaatcactcccttccctggacctcagtttttccagctgtaaaatgggtgggtag

SEQ ID NO: 198073 - DNA, 201 bp, Homo sapiens; identical to SEQ ID NO: 34386

SEQ ID NO: 198074 - DNA, 201 bp, Homo sapiens
ctcaatgaagaacaccgcctttccttgactccagtagatgttgcaccctctccatcttaggagaaaatgtgcgttggctgtcaagactacactgacagcastggtcactcatttgcagacagggtgaagtgtgggggaaggcgcagtagtgacgctgaaccctacatttatgtagcattgatgctaggcaccagaaccctc

SEQ ID NO: 198075 - DNA, 201 bp, Homo sapiens
gtagatgactcctgcttccctggccaccctcagctcagcagggccccaggagccccagtgccatggcagcaccttccataagtggctcctgaatgtgtctytgatccctgaggccagggctgggtctgtcctggtcaccacgtggctggtcgatgaaggggcaagtgcgtgagcgaaggtgtctcagctgtgcccttcctt

SEQ ID NO: 198076 - DNA, 201 bp, Homo sapiens; identical to SEQ ID NO: 34388

SEQ ID NO: 198077 - DNA, 201 bp, Homo sapiens
taaaaaaaaaagatattttgggcagagagaagtggctgtgcaaaggtgggtgtttgctgagttagttcaaggagcagaaaggaggctgccagggtgtgagrggcagagcgcctgaggagtttgtgtttgtctgaggggatgcgaaagggagtgttatttgggctgtgaaaaaagctcttccttgctgtctggtgagagtag

SEQ ID NO: 198078 - DNA, 201 bp, Homo sapiens; identical to SEQ ID NO: 34390

SEQ ID NO: 198079 - DNA, 201 bp, Homo sapiens
tggtctcgaatgcctgggctcaagcaatcctctcgcctcagcctcccaaagtgctgggattagaggtgtgagccactgagcccgttcagggtaaataatctttttttttttcttttttttttttgagacagagtctgggcccaggctggagtgcggtggtgcaatcttggctcactgcaacctccatctcctgggttcaag

SEQ ID NO: 198080 - DNA, 201 bp, Homo sapiens; identical to SEQ ID NO: 34391

SEQ ID NO: 198081 - DNA, 201 bp, Homo sapiens
tctgtgtggggccgggggacacagccttgccctgagtggtacctgtgggtaatagggcccccttcagagtccccagctctccagcagccttggggaggccygtgcggaggagtgagggcccctgggccgaccgagacccccactggttcctgcggctgctcttgcaggtctcggccggggaagcctacctggtgtacacag

SEQ ID NO: 198082 - DNA, 201 bp, Homo sapiens
tgctactgggatttgagtgcatctaacagcagcagcctccgtgtcgagccctcccttctgtgggcggggcggggacaagggggaggttggaaggcgctgartgagccacctgccccttctccttcctcaggttgtctttctactcgggacactcttcctttgggatgtactgcatggtgttcttggtggtgagtctgtttc

SEQ ID NO: 198083 - DNA, 201 bp, Homo sapiens
ttacagtgaagtgaaggtctttgatgacctccttcctacctgctaaccaaatatggaaatctgttctggacagagtccatggccgtgccaggaagcaggcsttagccaggggcctgcctggagatcagccctcctgagacaatttctgtgggggtggaagtgggggagggagaaagtcgctcagaactgatggtcctggac

SEQ ID NO: 198084 - DNA, 201 bp, Homo sapiens
gggtgtttgctgagttagttcaaggagcagaaaggaggctgccagggtgtgagaggcagagcgcctgaggagtttgtgtttgtctgaggggatgcgaaagrgagtgttatttgggctgtgaaaaaagctcttccttgctgtctggtgagagtagaggtgggaggcctccaggccaaggcaggtgtgtggggccccaaggcc

SEQ ID NO: 198085 - DNA, 201 bp, Homo sapiens
tctcctctggagtcatggtgggaagaaaggcggagaggaagttccaggagctgggaggcccgaggggtgacaggcatgccaggtacctgcacaaagctctrctgccccggctcgatggtgttggaggcctggaggaagtgtgggctgaggtagaggcccagctggaaagagaggctgtccatgttgaggcagtgcaccttt

SEQ ID NO: 198086 - DNA, 201 bp, Homo sapiens
aaaaacccaccccaaaaaaggaaagaggacaaacacaaggcaagggtgtttcagcagaggcaaacatcgcgagcaaaagcttgcaggtgggagaggccaaggccagttgctgaagtccttgccagctggcagggactgtgccctgtaagtgggggatgagtccagaggcaggcagggaccaggccacagtgaacttgtggg

SEQ ID NO: 198087 - DNA, 201 bp, Homo sapiens
gcatcgacagcgatgacgccctcaaccacgacttcttctggtccgaccccatgccctccgacctcaagggcatgctctccacccacctgacgtccatgttygagtacttggcaccaccgcgccggaagggcagccagatcacccagcagtccaccaaccagagtcgcaatcccgccaccaccaaccagacggagtttgagc

SEQ ID NO: 198088 - DNA, 201 bp, Homo sapiens; identical to SEQ ID NO: 34397

SEQ ID NO: 198089 - DNA, 201 bp, Homo sapiens
aggcttgaaagatccaggagtattgatctgggggtgggctgtccaggattcagaagattggggatccaagtgcctggatttgggggagaggcaggaatcakgggtagtggagggccccagaacctggaaaatagaaaatgtccgcgggcgctgtgtcaagagccggttgccctagaccagaccctgatgccagtgaggcgg

SEQ ID NO: 198090 - DNA, 201 bp, Homo sapiens
ctcctctctggaagggaggctggtttggtgacagggcctgtcttggggtggggagtgtgtgggagaaaaaaacacctgacacaggctgtgcgccagtctcrgttccatcagctgttctgtggccttgggcagaacatctgagtcagcgctgggtttctcttctgtgaaccagaaatgtgacgtgtatcagggttggagccc

SEQ ID NO: 198091 - DNA, 201 bp, Homo sapiens
gggcaccaaccaggctggtcctgatacctttttggccccagctcttacctcattgctgatcatacttgctgacacctgcatgccacagctggagtaagcaytgcgcaagacaaacttgtcacccctgtcctctgcctcacagctggggtcccagaaggtcaggcccgtgatggtgcacttcaaatgctgggtcggaagaga

SEQ ID NO: 198092 - DNA, 201 bp, Homo sapiens
atggcacacacctgtagtcccagctacttgggaggctgaggcaggagaattgcttaaacctgggaggtgcaggttgcagtgagccaagatggcgccactgyactccagcctgggtgacagagcaaaactccatctcaaaaaaaaaaaaaaaaaagtgtttgctaagtaaatgtcttaaaaaaataataagcttgtcattga

SEQ ID NO: 198093 - DNA, 201 bp, Homo sapiens
ccttctagccctgccagtttgactatgccgtcttctgccctaacctgacagaggtgtcatccacaggcaacgcaggtgagaggtgacaggcatggcccctrgggatgagcaggggtccctgaggtagacagtgggggcttccaaactggaggtttggggtaggaaataaatttgttttactgtgtaagaacactttagtgt

SEQ ID NO: 198094 - DNA, 201 bp, Homo sapiens
ggcccactgctggctgcagcggcaggaccgccatggtgagtgggcagctgagtgggcaggcaggtgggtggcacctgtggagcctgcctaggagggtcccrgacacacttggtctcacacaccccgcaggtgctggggagccaaaggcatccaggccagggctcctgtggcagctgcccctggcacctgtgttccagccca

SEQ ID NO: 198095 - DNA, 201 bp, Homo sapiens
tccaacctgaaggtcccctggcagtgctgagggaccgagcccagcagatctcagtaagtctgattggaatggggcagcggcagggtgggtttgtgtccctyctgtttgaggaggcactgcatcctctggggcctcagtttgcccatctgtgcagtgaggacgctgggccagctgccaggcctgctggaacacatctcagtt

SEQ ID NO: 198096 - DNA, 201 bp, Homo sapiens; identical to SEQ ID NO: 34403

SEQ ID NO: 198097 - DNA, 201 bp, Homo sapiens
ctggctcccagggtgagttcacaccagtgctcccagctggcggctgctcagtctctcctgctgggcgagcgcggggggccggggctatgccatgctgctgrtggagcagggggtgctctgggtgctcccgatgctgtggttggtgctgctgctctccgaggaggccggggcagccaccgccaccacgggctcccgcttgct

SEQ ID NO: 198098 - DNA, 201 bp, Homo sapiens; identical to SEQ ID NO: 34400

SEQ ID NO: 198099 - DNA, 201 bp, Homo sapiens
cctgtctaagcctcagtttcttgggggcgatgctgccagcccctcacagggctcagcgcagcacccagcatgcttggagggtgagaacaaattgaaaaaaratcccacatttttttcctctgaaaattttggtaagacggccaggtgcggtggctcatgcctgtaatcccagctcttggggatgccaaggctggtggatta

SEQ ID NO: 198100 - DNA, 201 bp, Homo sapiens
agcactttgggaggctgaggcgggcggatcatgaggtcaagaggtcgagaccatctggccaacatggtgaaaccccgtctctgctaaaaatacaaaaattrttagctggacgtggtggcgcatgcctgtagtcccagctactcgggaggctgaggcaggacaattgcttgaacctgggaggcagaggttgcagtgagctga

SEQ ID NO: 198101 - DNA, 201 bp, Homo sapiens; identical to SEQ ID NO: 34402

SEQ ID NO: 198102 - DNA, 201 bp, Homo sapiens
gcaagaccctatagatgtctaggtgtgtctggtttcatgagcatagaaaactatgggacacatacttagtcgtcaacaggattgccagaggaggaactgtgtgtgtgtgtgtgtgtatgggggaagggggaagggagtaagcaaaataaaaatatttaaagcctcatgattattattattattattattattttcgagaca

SEQ ID NO: 198103 - DNA, 201 bp, Homo sapiens
tcctccctctgagttgctcctctgtgggttggaatgtggaaccccagagtcatgagggttggggtggagcttcggggaactccagaattcgaataccccarccttctgtagttctggccccgctctggcagggagcaatatagcaatggaccccattggagagaatgagggcaaaggcccaggagtgaagtcgggggagcc

SEQ ID NO: 198104 - DNA, 201 bp, Homo sapiens
gttccaggagctgggaggcccgaggggtgacaggcatgccaggtacctgcacaaagctctgctgccccggctcgatggtgttggaggcctggaggaagtgygggctgaggtagaggcccagctggaaagagaggctgtccatgttgaggcagtgcacctttttctgggggaggacgggagggagacttggtcaatctggcg

SEQ ID NO: 198105 - DNA, 201 bp, Homo sapiens
acactgaaggcagaatgaatgcccttccacaggcgaatccaggatgctcctgggaaggccatacggccattaaagacgctgaattagcagtgtccctgggragacagggaaggaggcgcagaggctaagaataaggactctggggccagacgtcaaatcttggttttgtgacttgagcatatgcttttactcctttgggcc

SEQ ID NO: 198106 - DNA, 201 bp, Homo sapiens
tctgagcttccatttttccacctgtaaaatagggatcatctgtaattcacacaattttcatgagattccaggtgccaaacacagggataagtgcttaatamatgtttatttgttttgagacagcgtcttactctgtcactctgttgcccaggctgtagcgcagtggcgccatcttggctcactgcaacctccgcctccctg

SEQ ID NO: 198107 - DNA, 201 bp, Homo sapiens
tgccaagactacagcagcattggggaaaaggattgcaaacatccctggacccaaccccacccctccatgcaatccaactcccagaaatcaagcccttcgaygtaaacgcatatccatagcagcaaaacactgaaggcagaatgaatgcccttccacaggcgaatccaggatgctcctgggaaggccatacggccattaaag

SEQ ID NO: 198108 - DNA, 201 bp, Homo sapiens; identical to SEQ ID NO: 34393

SEQ ID NO: 198109 - DNA, 201 bp, Homo sapiens
ccgtgcgcatgctcaataccctgcagaccaatgccggctacctggagcaggtgaagcgccagcggggtgaccctcagacacagttggaagccatggaactrtacctggcacggagtgggctgcaggtaaggtagagagggcctgtgaccacctcccacccccatttgtgattcccgtagctgaggcagggaccttgtctgt

SEQ ID NO: 198110 - DNA, 201 bp, Homo sapiens
tggcatggcaggcgggcctggtactggccttgttgccctggcttggccactggtctgctggctgtctctgtgcctgtggaccctgagtgagccttaacctrctatctgggcactgtggttgccaggatgccgtgcgcatgctcaataccctgcagaccaatgccggctacctggagcaggtgaagcgccagcggggtgacc

SEQ ID NO: 198111 - DNA, 201 bp, Homo sapiens
cacccctgtcccttactccctctccccttcgctgataggcctttctctgtgccccacagaccaacagaacttcacagtgacactggaccaggtcctgctcygctgcctggaacaccagcagcactggaaccacctggacgaagagcaggccagcccggacctctggagtgcccccagcccagagcccggtgggtccgcatc

SEQ ID NO: 198112 - DNA, 201 bp, Homo sapiens
ttccctccacagcaaggtgtccctgccttcactgtgctccaacctgaaggtcccctggcagtgctgagggaccgagcccagcagatctcagtaagtctgaytggaatggggcagcggcagggtgggtttgtgtccctcctgtttgaggaggcactgcatcctctggggcctcagtttgcccatctgtgcagtgaggacgct

SEQ ID NO: 198113 - DNA, 201 bp, Homo sapiens
gtggtggaggtgggcattggcggggcttatgactgcaccaacatcatcaggtgagcgcagttgcttgggacgaggggtggcagccaggagcacagcctcayctgccgcctggtggctcagggcagggcctcatggccttttcctcccctgcaggaagcctgtggtgtgcggagtctcctctcttggcatcgaccacaccag

SEQ ID NO: 198114 - DNA, 201 bp, Homo sapiens
atgacagaaacactgagatggttctctgcaccctgtggtctgggggcatcctgggagaggggtgcctccttcacacacagctgctgggatgccaagactayagcagcattggggaaaaggattgcaaacatccctggacccaaccccacccctccatgcaatccaactcccagaaatcaagcccttcgatgtaaacgcata

SEQ ID NO: 198115 - DNA, 201 bp, Homo sapiens
ccaggaggtcagctgcatgtctctctgcccagtgtttattcattcaataaacattcagttagcacttaccatattggcccatgtttatggcaacctttaattttttttttttttttgagactgagtctcactctatcgcccaggctggagtacaatggcacgatcttggctcactgcaacccccgcctgccaggttcaagc

SEQ ID NO: 198116 - DNA, 201 bp, Homo sapiens
cctcccaagtagcttggattacaggcacctgccaccacaccaggctaatttttatatttttagtagagatggggtttcaccatgttggccaggctgttctygaactcctgacctcaagtgatccgcccacctcggcctcctaaagtgctgggattacaggtgtgagccacggtgcctggccttaattttcataattaaaaa

SEQ ID NO: 198117 - DNA, 201 bp, Homo sapiens
tggacggtgcgcacaccgccagcagcgcgcaggcctgcgtgcgctggttccgccaggcgctgcagggccgcgagaggccgagcgggtgaggggcggggctgggggtggggccggggctggcccacgaggaggggcgggatcttggggaagggcggggcggggtcgtggggaagggcgggggcgggcccatggggaggggcg

SEQ ID NO: 198118 - DNA, 201 bp, Homo sapiens
gggattacaggcaggtgccatcacacctggctaacttgtatttttagtagagacagggtttcaccatgttgacagattttgaacctgaggtgatccacccrcctcagcctcccaaagtactgtgattacaggcaagagccactgtgcccggccacaaacggctgttaaacacaaaaaaagtgttcagcctccttcacgata

SEQ ID NO: 198119 - DNA, 201 bp, Homo sapiens
gccaggctggtctgaaactcctggcctcaagcgactgacccaccgtggcttcccaaagtgctgggattacaggtgtgagccactgctcccagccgagtgcytacttaataaatgttaacaagaaaaacccaccccaaaaaaggaaagaggacaaacacaaggcaagggtgtttcagcagaggcaaacatcgcgagcaaaag

SEQ ID NO: 198120 - DNA, 201 bp, Homo sapiens
ctgaggcaggagaatggcgtgaactcgggaggcggagctggcagtgagccgagatcgcgccactgcactctaggtctgggcgacagagcgagactgtctcaaaaaaaaaaaaaaaattaatttttgagacagagtctcactctgtcccccaggctggaatatagtggcacaatctcagctcactgcaacctctgcctccta

SEQ ID NO: 198121 - DNA, 201 bp, Homo sapiens
atttcttccaatgaataagtgaatgaatgacatcgtttccctgtgggaaggtggggattgaggcagagttcctcagtctgctcctaccccagcccctcctyctgtccacacgcacctgcagatctgcccgcatgagtgggcactggcccacttactggttcccctgccccctttgttttctattgttcttcctggagagag

SEQ ID NO: 198122 - DNA, 201 bp, Homo sapiens
tgaggcaggagaatggcgtgaactcgggaggcggagctggcagtgagccgagatcgcgccactgcactctaggtctgggcgacagagcgagactgtctcaaaaaaaaaaaaaaaattaatttttgagacagagtctcactctgtcccccaggctggaatatagtggcacaatctcagctcactgcaacctctgcctcctag

SEQ ID NO: 198123 - DNA, 201 bp, Homo sapiens
ggctttccaccttacaccacaggagggactccggctctgggatctcattcttggaggaatggcttagagcacctatgccacctcctacagatgagtccacygaggccaccaatagtagatctggaaaaaatacttgccctacagaggacagaaactgagggataatatcagtactacacaaagtgcctttttttctttttt

SEQ ID NO: 198124 - DNA, 201 bp, Homo sapiens; identical to SEQ ID NO: 34408

SEQ ID NO: 198125 - DNA, 201 bp, Homo sapiens
agctcctggacttcaaattctatatattgagagagttggagagtatatcagagatatttttggaaaggagttggtctatgcaatgtcagtttggaatcttyttgaaagtttaatgtttttattaggagatttaaagaaaataaaggtctacaatatctttaggtttttttttttcctgtttaccgcacaaactgaccacat

SEQ ID NO: 198126 - DNA, 201 bp, Homo sapiens
gcctgtaatcccagctactcggtaggctgaggcagaagaatcgcttgaacccaggaggcagaggttgcagtgagctgagatcatgccactgcactccagcstgggtgacagagtgagactcccgtcttgggaaaaaaaaaaaaaccaaaaaaacctctttctttgggccaagcctccactgagtgccagggatacagcagc

SEQ ID NO: 198127 - DNA, 201 bp, Homo sapiens
tcttccctcgatgccagccattcatcgacagtcagcatgtcatccacaagtatttcctgccccgagcctatgctgtcgccatcccactggctgcaggcctyctgctgctcctgtttgtgggtaagtcatcacctcctccccttgaccctgggcagggtttcgggaagaccccacctctgaacatgcttccacactttggcg

SEQ ID NO: 198128 - DNA, 201 bp, Homo sapiens
gggtggctctgctgtgtcatgccctggcctcccagcagccctgagcttagatcttatgtggcctttctggtctgtgtatcccaggactgttcatctcctaygtgatgctgaagagcaagagagtgaccaagaaggctcagtgaaggtcccgcagggatgaggctgccagccccttctctgcttcccctccagcacagggac

SEQ ID NO: 198129 - DNA, 201 bp, Homo sapiens
tgtcatgccctggcctcccagcagccctgagcttagatcttatgtggcctttctggtctgtgtatcccaggactgttcatctcctacgtgatgctgaagascaagagagtgaccaagaaggctcagtgaaggtcccgcagggatgaggctgccagccccttctctgcttcccctccagcacagggaccaagtgggggagcc

SEQ ID NO: 198130 - DNA, 201 bp, Homo sapiens; identical to SEQ ID NO: 34412

SEQ ID NO: 198131 - DNA, 201 bp, Homo sapiens; identical to SEQ ID NO: 34417

SEQ ID NO: 198132 - DNA, 201 bp, Homo sapiens; identical to SEQ ID NO: 34418

SEQ ID NO: 198133 - DNA, 201 bp, Homo sapiens
cacagctcctggacttcaaattctatatattgagagagttggagagtatatcagagatatttttggaaaggagttggtctatgcaatgtcagtttggaatyttcttgaaagtttaatgtttttattaggagatttaaagaaaataaaggtctacaatatctttaggtttttttttttcctgtttaccgcacaaactgacca

SEQ ID NO: 198134 - DNA, 201 bp, Homo sapiens
ccctctgagcctcagtttcttcacctgtcaagtggggcaggatgcagtgactccctgccgaggtgaccgtgaggatggggtggcacagccagatgtgcccrgaagggctctgcaggccccacagactctgatgcttactatctgtgtcactgtgggcaagggacttaccatcgctggggcacggttttagcccctttgcaa

SEQ ID NO: 198135 - DNA, 201 bp, Homo sapiens
cgctgcgcagaggctaccctctcaagctgctctgctgactcctgctggccacggcctggaatggcagccatcacctcccagtagcctcctgggctgctctsgggtgggggtgagggggcggtgagcaagaaggaaactgaggggctggcttccttatgggtttgtaaacacacccctccctggccccctctgaaaatgagg

SEQ ID NO: 198136 - DNA, 201 bp, Homo sapiens
cgccagcgcctcccgcgtggattggatgcagccgcagtcggcgccatgctattggtcggccgcgaggtaggggcggggcctgattcctgcagcggggcggyggggaatgcggccaaagcccgggaagctgctgcgggggcgatggctgcgccgagcccggggccccgcgaggtaggtgcggacccgagagaggacaggaga

SEQ ID NO: 198137 - DNA, 201 bp, Homo sapiens
cgcgcccagcctaatttttgctttagaaagggtccttgccctttttagctggtcattccacttccaggacgctgacgtcatcatcattggcaccgtcttcctgtcttcatctcagtagtggtaactgtcattccttcatgctgactgggagcctccctgggagggtagactcatccccatttgagaaatgtgagaactgag

SEQ ID NO: 198138 - DNA, 201 bp, Homo sapiens
ttcctcccctgcagggcttcgagctgggcacgctggccggccccgcctttgcctggctgcgccgctccctgggcctggcggaggaggactatcaggctgcsctgggccccggcggcccctacctgcagttcctcagcacctccaagagcaaggccagcttcttcctgtcgtgagcttgcggcaggggtggggcaggggtgg

SEQ ID NO: 198139 - DNA, 201 bp, Homo sapiens
gcgctcaggtgggggcactgatgctccggcagggccccagcggagctggttcctccgccagatggaactggataccaccttcctccgggagctcaacgtgytggattacagcctcctgatagccttccaacgtctccacgaggatgagaggggcccgggcagcagcctcatcttccgcacggccaggtgagcctcccacag

SEQ ID NO: 198140 - DNA, 201 bp, Homo sapiens
gtgtttgtcctctcctcagcgctcaacccctggaacaaaggtgaggtgcccggggagggtggacgcatggctctgtgggtgggatctgggttctgggaggktggacgcatggctccgtgggtgggctctgggttcagggcctggatggagactaaaagccaggtgaggggacctagactccagactccagtgccatcctct

SEQ ID NO: 198141 - DNA, 201 bp, Homo sapiens
ccggagaattgcttgaacccagggaaggggaggttgcagtgagccgagatcgcgccattgcactccagcctgggcgacagagtgaaactccatctcggaaraaaaaaaaaaggaatcacaaaataggcctattgtgagcagcttctttcccatagcatgtgctcaaggttcatctgcgtggggtgtgtgtcagtgcttcgt

SEQ ID NO: 198142 - DNA, 201 bp, Homo sapiens
gaggttttaccatgttgccaggctggtctcaaactcctggcctcaagtgatcctccctccttggcctcccaaagtgctgggattacaggcgtgagccaccrcccccggcccccagttggaaatttagacttaaggagctgaggtggacactgggggcacactgggcaggcccaggacaggcagaataagggggtgggacca

SEQ ID NO: 198143 - DNA, 201 bp, Homo sapiens
gggcaggcaggctgaggggggccaggggctctcttgcggaagtcccccatgctggccccttgaccctcatgaaccctgctgcaaccctgtgattcaggccrcgtcattctactgcagcaagatgggctttgaacctctagcctacaggggcctggagaccggttcccgggaggtggtcagccatgtaatcaaacaagggaa

SEQ ID NO: 198144 - DNA, 201 bp, Homo sapiens
ccccatctctattaaaaatagaaaaattagctgggcatgatggtgggcacctgtaatcccagctactcaggaggctgaggcaggcacatcgcttgaacccrggaggcagaggttgcagtgagccaacgtcgtgccactgcactccagcctgggcgacagagcaagactccatctcaacaaaaaaaaacaaaaaacaacaaa

SEQ ID NO: 198145 - DNA, 201 bp, Homo sapiens
aaaacaaaaaacaacaaaaaaccccaacaacaacaacaaaaacatataattcagctcccaccgacccctccgctggcatctttgtacagccatgcaacacsgcccttcctagtttcgtttcctcctcagcctggcccaacactgaccccacaggtgctcagaaaacctgggatatcagaggagaggaattttaagcagtgc

SEQ ID NO: 198146 - DNA, 201 bp, Homo sapiens
acgcagaggccaccaggcaggagcagcaggcaagggttctggaaggctccagccctcaccaattccccgatcccatcttctctgcagaaagcacgggaacrgggcgccaaaatcatgcgggagccctgggtagagcaagacaagtttgggaaggtgaagtttgctgtgctgcagacggtgagttccctttggtgcccccac

SEQ ID NO: 198147 - DNA, 201 bp, Homo sapiens
catggtgaaaccccatctctattaaaaatagaaaaattagctgggcatgatggtgggcacctgtaatcccagctactcaggaggctgaggcaggcacatckcttgaacccgggaggcagaggttgcagtgagccaacgtcgtgccactgcactccagcctgggcgacagagcaagactccatctcaacaaaaaaaaacaaa

SEQ ID NO: 198148 - DNA, 201 bp, Homo sapiens
ggccaccaggcaggagcagcaggcaagggttctggaaggctccagccctcaccaattccccgatcccatcttctctgcagaaagcacgggaacggggcgcyaaaatcatgcgggagccctgggtagagcaagacaagtttgggaaggtgaagtttgctgtgctgcagacggtgagttccctttggtgcccccacccctcct

SEQ ID NO: 198149 - DNA, 201 bp, Homo sapiens
acgccaagcaggtagaagccggggcaaggtgctggagtgagcagacggcagggcagagggctgcctgacaagggcaggcctccagcagggtctgtgattgscccttgggagggaggatcaggccaggggtgggccagatactctgaatcctaattacaccagcgggaaagttatctgtcagcaaaatgtgcaggcagcagt

SEQ ID NO: 198150 - DNA, 201 bp, Homo sapiens
gccagatactctgaatcctaattacaccagcgggaaagttatctgtcagcaaaatgtgcaggcagcagtctatcttcccaggagggtctctgcccctgagrcaatagggcaggcaggctgaggggggccaggggctctcttgcggaagtcccccatgctggccccttgaccctcatgaaccctgctgcaaccctgtgattc

SEQ ID NO: 198151 - DNA, 201 bp, Homo sapiens
gaggcaatagggcaggcaggctgaggggggccaggggctctcttgcggaagtcccccatgctggccccttgaccctcatgaaccctgctgcaaccctgtgwttcaggccgcgtcattctactgcagcaagatgggctttgaacctctagcctacaggggcctggagaccggttcccgggaggtggtcagccatgtaatcaa

SEQ ID NO: 198152 - DNA, 201 bp, Homo sapiens
agatatttgggttgtttccacttttggggtgttatacgtaatgctactgtgaacatctatgtacaaggctctgtgtggacgtgttttcaatgcactttggwatatatctaggagtagctaggtcacatggtaattccatgttcccttttgtttgtttagagatggagtcttgctttgtttcccaggctggggtgcagtggt

SEQ ID NO: 198153 - DNA, 201 bp, Homo sapiens
gttttctgggtccttggctcatctcctctctttcccgccacagggttttggagccggcaacttcaactcactgttcaaggctttcgaggaggagcagaacytgcggggtaacctcaccaacatggagaccaatggggtggtgcccggcatgtaagccccgcccaccccacggaggccacagccacacagccacgccccctg

SEQ ID NO: 198154 - DNA, 201 bp, Homo sapiens
ctggaactcgcccaacttccctactggctgctccccttgggtcccgcccaccagcggactcggcccccaaggctccgcccacactgaccacgcccctcggsggggccgccctctgctccagccctcccgattaaagcgtgccccggtccaatactgtgtctgtgtttgtgttgcgcataaggcagtagtgccttatggcag

SEQ ID NO: 198155 - DNA, 201 bp, Homo sapiens
ggattttaaacaggggaatgacatgatccgacttttaaaagatcccgcagcaggtcatggtggctcacgcctgtaatcccaacactttgggaggtcgaggygggtggatcacctgaggtcaggagttcgagaccagcctgaccaatatcgtgaaaccccgtcttactaaaaatacaaaaattagccgggcatggtagcctg

SEQ ID NO: 198156 - DNA, 201 bp, Homo sapiens
gctttgtttcccaggctggggtgcagtggtgcgatcttggcccattgcaacctccagcctcctgggttcaagcaattctcctgcctcagcctccccagtarctgggattataggcgcccgccaccacgcccagctaatttttttttttttttttttgagacagagtcttgctctgttgcccaggctggagagcagtggccg

SEQ ID NO: 198157 - DNA, 201 bp, Homo sapiens
gcttgaggccaggagtttaagaccagcctgagaaacacagggcgaccctgtatctacaaaaaaaacagttttaaaaaattagctgggcatggtggttcgtscctgtagtcccagctactcaggaggctgaggtgagaggatcacttgaggccaggaggtcaaagctgcagtgagccatgatcaggctactgcattccagcc

SEQ ID NO: 198158 - DNA, 201 bp, Homo sapiens
ttgcttgaggccaggagtttaagaccagcctgagaaacacagggcgaccctgtatctacaaaaaaaacagttttaaaaaattagctgggcatggtggttcstgcctgtagtcccagctactcaggaggctgaggtgagaggatcacttgaggccaggaggtcaaagctgcagtgagccatgatcaggctactgcattccag

SEQ ID NO: 198159 - DNA, 201 bp, Homo sapiens
gcatgacaggcgcctgtaatcccagctactcgggaggctgaggcagaagaatcacttgaacccgggagacagaggttgcagtgagccaaggttgcaccacygtactccagcctgggcgacagagcgagactccatctcaaataaataaataaaaattttaaaaaataaaagttaaaaaattaaattaaacataaaaatggt

SEQ ID NO: 198160 - DNA, 201 bp, Homo sapiens
  misc_feature (1)...(201): n = A,T,C or G
aataaatgaagtaggtgcttcattgagtacctcccctgtgccaggcactgagcttggcgctgggtacaccatcatgagcaaaacagtgtccccgccctcanggaaactctcaaacaagtgacagattgcaattcatttcagaaaggagaagtgacttacccaagatcacgcatctggttagggtcagatgcaggttggaac

SEQ ID NO: 198161 - DNA, 201 bp, Homo sapiens
gggtgataccctgtctaaaagaaaaacaaaaacagttaggccagacacagtggctcacacctataatcccagcattttgggaggttgaagtgagaggattscttgaggccaggagtttaagaccagcctgagaaacacagggcgaccctgtatctacaaaaaaaacagttttaaaaaattagctgggcatggtggttcgtg

SEQ ID NO: 198162 - DNA, 201 bp, Homo sapiens
atcccagctctgttacttcacagccatttcaccctgggcaagtcgcttcatctctctaggcctcagtttcttcatctgtaaaatggggactgtaatagtawatgagttgacaaaataaaatgtccggcccattagtaaatgctacataagtgtgagtccaggcgcagtggctcatacctataatcccagcactttgggagt

SEQ ID NO: 198163 - DNA, 201 bp, Homo sapiens
gtggctcacacccgtaatcccagcattctgggaagccgaggtgggaggatcacttgaggtcaggagttcaacaccagcctgaccaatatggagaaaccccrtctctactaaaaatataaaaactcagtgggcgaggtgttgggcccctgtaattccagttactcaagaggctgaggcaggagaatcgcttgaacccgggag

SEQ ID NO: 198164 - DNA, 201 bp, Homo sapiens
atctgtgtctgtggtcccagctactggggaggctgaagtgggagaatcacttcaacccaggaggtagaggctacagtgagccatcatcaggccactgcacyccagcctgggtgataccctgtctaaaagaaaaacaaaaacagttaggccagacacagtggctcacacctataatcccagcattttgggaggttgaagtga

SEQ ID NO: 198165 - DNA, 201 bp, Homo sapiens
  misc_feature (1)...(201): n = A,T,C or G
gctggggtccagcacatcgctctcaagaccgaagacatcatcacagcggttagaacccccttccctgtccgaattcctctctcattcagagccagggacgntctctgcaaaattgagagggcgggtggcggcagtcctgggcccgtttctctgggctgggagactgacaggactccctcactgcttcttgcaactcatggg

SEQ ID NO: 198166 - DNA, 201 bp, Homo sapiens
gttagctatgattgagccacttttctccagcctaggtgacagagagtgaggccctatctccccgcaacctcaaaaaagaaattttttttaaaatgaggaarttaaggttgggcatggtggctcatgcctataacagtttctgcccttgtggagcaataaacaaaataagtaaaatataaatgctagatggtagagagcacc

SEQ ID NO: 198167 - DNA, 201 bp, Homo sapiens
tgaggcaggagaatcacttgaacccgggaggcggaggttgcagtgagccgagattgcgctactacattccagcctgggcgacacagtgagactctgtctcmaaaaaaaaaaaaaaaaaaaaaaagatccattttaggactaggtatggtggttcatgcctgtaatcccagcactttgggaggccaaggcaggtggatcact

SEQ ID NO: 198168 - DNA, 201 bp, Homo sapiens
ctgcgggagaagctgaagacggccaagatcaaggtgaaggagaacattgatgccctggaggtgaggcccaggcaggatccgcagccttgtggggggagtaygagctctgcattgcatcttttcagaaatattgtctcagcccggaggggagcccagaccaagtccctgctggcaaaggacatttattctagggtctatgtg

SEQ ID NO: 198169 - DNA, 201 bp, Homo sapiens
cagcctcccctagcagagccccctgtctcccgcctaggagctgaaaatcctggtggactacgacgagaaaggctacctcctgcagatcttcaccaaaccgktgcaggaccggcccacgctcttcctggaagtcatccagcgccacaaccaccaggtactgcttgtccccggcaggcccgaggggacaggcagctagcacac

SEQ ID NO: 198170 - DNA, 201 bp, Homo sapiens
tgtggtggccaactatgaagagtccatcaagatgcccatcaatgagccagcgcctggcaagaagaagtcccagatccaggtgaggccgcccctggctgggrgagaggggagcagggaagaggtctgggggctcttgtagggtcagggatgtgggtgatggggcaaatgacagtggtctccttgtttccctcccccaggaat

SEQ ID NO: 198171 - DNA, 201 bp, Homo sapiens
aatcccagctactcaggaggctgaggcaggagaatcacttgaacccgggaggcggaggttgcagtgagccgagattgcgctactacattccagcctgggcracacagtgagactctgtctcaaaaaaaaaaaaaaaaaaaaaaaagatccattttaggactaggtatggtggttcatgcctgtaatcccagcactttggga

SEQ ID NO: 198172 - DNA, 201 bp, Homo sapiens
tgagcctcttagccagcacctcccaaccccctctgttcccttcccccctcccaccccagccctaggcaccattaatctaccttcagtctctatagatttgsctattctggacatttcatcaaaaggaatcacaaagtccaggcacggtggctcatgcctgtaatcccagcactttgggaggctgaggtgggcggatcatga

SEQ ID NO: 198173 - DNA, 201 bp, Homo sapiens
gccacagccacacagccacgccccctgattctggaactcgcccaacttccctactggctgctccccttgggtcccgcccaccagcggactcggcccccaasgctccgcccacactgaccacgcccctcggcggggccgccctctgctccagccctcccgattaaagcgtgccccggtccaatactgtgtctgtgtttgtgt

SEQ ID NO: 198174 - DNA, 201 bp, Homo sapiens; identical to SEQ ID NO: 34435

SEQ ID NO: 198175 - DNA, 201 bp, Homo sapiens
cctgtaccccttctcaaatgcctgccaatcttttaatcccatctggaagttctttctaaggtctaacttaaatccatattgctgcaacataagtctatttccctgtgtgaaaccttggcaggcctcctgagggggtttccccatccaagacacccaggagctcaacttccacatgagaaacctcttttgaggcttggcaag

SEQ ID NO: 198176 - DNA, 201 bp, Homo sapiens
acactctagcctggccaacaagcaagactccgtctcaaacaaaaaaaaaaaaaaaaaaaaaggctaggtacagtggctcatgcctgtaatcccggcacttkgggatgttgaggtgggcccggcatggtggtacacgcctataatcccagctactcaggaggctgaggcaggagaatggcttgaacccgggagatggaggtt

SEQ ID NO: 198177 - DNA, 201 bp, Homo sapiens
aatataaaaactcagtgggcgaggtgttgggcccctgtaattccagttactcaagaggctgaggcaggagaatcgcttgaacccgggaggtggaggttggkcgacagagtgagactccagcctgggaaacagagcaagattttgtctccaataaacaaataaaataaaatagaccgggcgcacttgctcacgcctgtaatc

SEQ ID NO: 198178 - DNA, 201 bp, Homo sapiens
ctggctaacacggtgaaaccccgtctctactaaaaaaaaaaaaaaaaaaatacaaaaaagtagccgggcgtggtagcgggcgcctgtagtcccagctactygggaggctgaggcaggagaatggcgtgaacccgggaggcggagcttgcagtgagccgagatcgcgccactgcactccagcctgggcgacagagcgagact

SEQ ID NO: 198179 - DNA, 201 bp, Homo sapiens
atcccagcagtttgggaggctgaggcaggaggatcacttgaggccaggagttcgagaccagcatgggcaagatagggagaccccatctctacaaaaattawaaatacaaataaaaaataaataggccaggtgcagtggctcacacctgtaatctcagcaatttgggaggccaaggcaagaggactgcttgagcccaggaat

SEQ ID NO: 198180 - DNA, 201 bp, Homo sapiens
gaggtttcaccgtgttatccaggatggtctcgatctcctgaccttgtgatccgcccgcctcagcctcccaaagtgctgggattataagtgtgagccaccgygccccacctcttcaacttttattataggttctggggtatatgtgctggatgttcaagtttgttacataggtaaacgcatgcatggtggtttgctacacag

SEQ ID NO: 198181 - DNA, 201 bp, Homo sapiens
ctttttttttttttttttgagatggagtctcgctctgtcgcccaggctggagtgcagtggcacgatctcggctcactgcaagcgctgccttccgggttcaygccattctcctgcctcagcctcccgagtagctgggactacaggcgcccgccaccacgcccggctaaattttgtatttttagtagaggtttcaccgtgtta

SEQ ID NO: 198182 - DNA, 201 bp, Homo sapiens
gctttgaacctctagcctacaggggcctggagaccggttcccgggaggtggtcagccatgtaatcaaacaagggaaggtgagtcaccacccccaggacagmccccaacccctgcctggccaacatggtgaaaccccatctctattaaaaatagaaaaattagctgggcatgatggtgggcacctgtaatcccagctactca

SEQ ID NO: 198183 - DNA, 201 bp, Homo sapiens
tggaacacctatgtggtctgggacatgcgcttaactttcctgtgcctcagcagtatctttttgttttcctcaaaaaaatttttttttaaagatggagtctygctctgtcgcccaggctggagtgtagtggtgtgatcttggctctctgcaacctccgcctcccaggttcaagtgactctcctgcctcagcctcccgagtag

SEQ ID NO: 198184 - DNA, 201 bp, Homo sapiens
aaaaaaaaaaaggatccaatgaggtcatttgtgtatagcacttagaacagtgcctggcacattagacactcagcaaagatgaccaattctgtttaggaccygtgttactgtaatacagagacaatcatagctcttacctccttgagattaaattcaacataaagggctgggcacagtggctcacacctataatcccagcag

SEQ ID NO: 198185 - DNA, 201 bp, Homo sapiens
gtagagcaagacaagtttgggaaggtgaagtttgctgtgctgcagacggtgagttccctttggtgcccccacccctcctgctgtcggcaccactgagatgycaggagccccgcagctgactccatcaaaccatcccacccatgggccttggagcacagacattgtccctcaagtctgtcccccgtattgcctggccagtgt

SEQ ID NO: 198186 - DNA, 201 bp, Homo sapiens
ctgggcctcagtttccctatttgccaaatgagcatgagtattgggggtaatggctgaagctggctggggttcctacctggggctggagaaactggaggggsctgcaggaccacgcagaggccaccaggcaggagcagcaggcaagggttctggaaggctccagccctcaccaattccccgatcccatcttctctgcagaaa

SEQ ID NO: 198187 - DNA, 201 bp, Homo sapiens
aatctcagtactttgggaggccgaggcgggcggatcatgaggtcaggagttcgagaccagcctgaccaacatggtgaaaccctgcctctactaaaaatacmaaaattagccaggcgtggtgacacatgcctgtaatcccagctactcaggaggctgaggcaggagaatcacttgaacccgggaggcggaggttgcagtgag

SEQ ID NO: 198188 - DNA, 201 bp, Homo sapiens
caagaccagcctgaccaacatggcgaaccccggtctctactaaaaatacaaaaattagctgggtgtggcagtgtgtgcctgtaatcccagctacttgggargctgagacaggagaatcgcttgaaccaggaaggcggaggttgcagtgagctgagattacgccactgcactccagcctgggtgagagagagagactttgtc

SEQ ID NO: 198189 - DNA, 201 bp, Homo sapiens
taatcccagcactttgggaggcggaggcgggtggatcacctgaggtcaggagttcaagaccagcctgaccaacatggcgaaccccggtctctactaaaaayacaaaaattagctgggtgtggcagtgtgtgcctgtaatcccagctacttgggaagctgagacaggagaatcgcttgaaccaggaaggcggaggttgcagt

SEQ ID NO: 198190 - DNA, 201 bp, Homo sapiens
acttgctcacgcctgtaatcccagcactttgggaggcggaggcgggtggatcacctgaggtcaggagttcaagaccagcctgaccaacatggcgaaccccsgtctctactaaaaatacaaaaattagctgggtgtggcagtgtgtgcctgtaatcccagctacttgggaagctgagacaggagaatcgcttgaaccaggaa

SEQ ID NO: 198191 - DNA, 201 bp, Homo sapiens
aggcaggagaatcgcttgaacccgggaggtggaggttgggcgacagagtgagactccagcctgggaaacagagcaagattttgtctccaataaacaaatamaataaaatagaccgggcgcacttgctcacgcctgtaatcccagcactttgggaggcggaggcgggtggatcacctgaggtcaggagttcaagaccagcct

SEQ ID NO: 198192 - DNA, 201 bp, Homo sapiens
gtccttgcactaacatggaaaatacgactgggtgcagtggctcacacccgtaatcccagcattctgggaagccgaggtgggaggatcacttgaggtcaggrgttcaacaccagcctgaccaatatggagaaaccccgtctctactaaaaatataaaaactcagtgggcgaggtgttgggcccctgtaattccagttactca

SEQ ID NO: 198193 - DNA, 201 bp, Homo sapiens
actacatcggccaattcttgcctggatatgaggccccagcgttcatggaccccctacttcctaaactgtgagtgtccctcagggcagaggtgggtggaaasccctgagggactgtgaaaagtaatgccccttcctccatgtccactgcgcatgtgtgttggggcagaatggagccggctagggaattcctggaagtcctca

SEQ ID NO: 198194 - DNA, 201 bp, Homo sapiens
ggggccgagccaggctgttttccacccgtagtatggggacaccacacacaccctggtggagaagatgaactacatcggccaattcttgcctggatatgagsccccagcgttcatggaccccctacttcctaaactgtgagtgtccctcagggcagaggtgggtggaaagccctgagggactgtgaaaagtaatgccccttc

SEQ ID NO: 198195 - DNA, 201 bp, Homo sapiens
ggagtgtagtggcacgatctctgctcactgcaagctctgcctcctgggttcatgccattctcctgtctcagcctcccaagtagctgggactacgggcaccygccacgccaccacacccggctaattttttgtattttttagtagagacaggatttcaccgtgttcgccaggatggtctcgatctcctgacctcatgatcca

SEQ ID NO: 198196 - DNA, 201 bp, Homo sapiens
ctcaaggttcatctgcgtggggtgtgtgtcagtgcttcgttcctttttgtggctgaaaaatatcccattgtatagatagacacacattgtttatctattcytcgttgatagatatttgggttgtttccacttttggggtgttatacgtaatgctactgtgaacatctatgtacaaggctctgtgtggacgtgttttcaatg

SEQ ID NO: 198197 - DNA, 201 bp, Homo sapiens
agaggccaccaggcaggagcagcaggcaagggttctggaaggctccagccctcaccaattccccgatcccatcttctctgcagaaagcacgggaacggggygccaaaatcatgcgggagccctgggtagagcaagacaagtttgggaaggtgaagtttgctgtgctgcagacggtgagttccctttggtgcccccacccct

SEQ ID NO: 198198 - DNA, 201 bp, Homo sapiens; identical to SEQ ID NO: 34433

SEQ ID NO: 198199 - DNA, 201 bp, Homo sapiens
gcccaggggccgagccaggctgttttccacccgtagtatggggacaccacacacaccctggtggagaagatgaactacatcggccaattcttgcctggatrtgaggccccagcgttcatggaccccctacttcctaaactgtgagtgtccctcagggcagaggtgggtggaaagccctgagggactgtgaaaagtaatgcc

SEQ ID NO: 198200 - DNA, 201 bp, Homo sapiens
aaaaataccccaaaattatccaggtgtggtagcacatgcctgtagtcccagctacttgggaagctgaggtgggaggagcaattgagcctggagattgaggytgcagtgagccaagactgcaccactgcactccagcctgggcaagagtgagactctgtctcgagcaacaacaacaacaaaaagatctaaatctctgatggg

SEQ ID NO: 198201 - DNA, 201 bp, Homo sapiens
atcacagggggagttagcagaggcaggacagacacccatccctacctagtttgtctcccatagccccaactctgggcctgggcctcagtttccctatttgscaaatgagcatgagtattgggggtaatggctgaagctggctggggttcctacctggggctggagaaactggaggggcctgcaggaccacgcagaggccac

SEQ ID NO: 198202 - DNA, 201 bp, Homo sapiens
ttgctaaataaatgcatgaatcttcttattattctcatccaaccattctttttacagatggtgaaattgaggactagagaaggggactgatcacagggggmgttagcagaggcaggacagacacccatccctacctagtttgtctcccatagccccaactctgggcctgggcctcagtttccctatttgccaaatgagcat

SEQ ID NO: 198203 - DNA, 201 bp, Homo sapiens
cccagctaatttttgtattttagtagagatggagttttgccatattggccaggctggtcttgaactcctgacctcaagtgatccacccacctcggcctccyaaagtgctgggattacaggcatgagccattttgcctggcctcagaattactgtttcttgagcacaactctaaaccaaacactgtacccaacaggcagcct

SEQ ID NO: 198204 - DNA, 201 bp, Homo sapiens
gcccggctagttttgtatttttagtagagatggggtttctccttgttggtcaggctggtcatttccttttttttcttttttcattttctttttctttcttktgtgtgtgtgtgtgtgtcagagtcttgctctgttgcccaggctggagagcagtggcgcaatcttggctcactgcaacctccacctcctgggttcaagcga

SEQ ID NO: 198205 - DNA, 201 bp, Homo sapiens
cacgcccggctagttttgtatttttagtagagatggggtttctccttgttggtcaggctggtcatttccttttttttcttttttcattttctttttctttyttttgtgtgtgtgtgtgtgtcagagtcttgctctgttgcccaggctggagagcagtggcgcaatcttggctcactgcaacctccacctcctgggttcaag

SEQ ID NO: 198206 - DNA, 201 bp, Homo sapiens
  misc_feature (1)...(201): n = A,T,C or G
acaagtttgggaaggtgaagtttgctgtgctgcagacggtgagttccctttggtgcccccacccctcctgctgtcggcaccactgagatgccaggagcccngcagctgactccatcaaaccatcccacccatgggccttggagcacagacattgtccctcaagtctgtcccccgtattgcctggccagtgtacggggactg

SEQ ID NO: 198207 - DNA, 201 bp, Homo sapiens
acccctgcctggccaacatggtgaaaccccatctctattaaaaatagaaaaattagctgggcatgatggtgggcacctgtaatcccagctactcaggaggstgaggcaggcacatcgcttgaacccgggaggcagaggttgcagtgagccaacgtcgtgccactgcactccagcctgggcgacagagcaagactccatctc

SEQ ID NO: 198208 - DNA, 201 bp, Homo sapiens
cctaggatcgcttgaacctgggaggcggaggttgcagtgagccaagattgcaccactgcactccactccagcctgggcaatagagcaaaactccatctcaraaacaaaaaccaaaacaaaacctgtaccccttctcaaatgcctgccaatcttttaatcccatctggaagttctttctaaggtctaacttaaatccatatt

SEQ ID NO: 198209 - DNA, 201 bp, Homo sapiens
agccgggcatggtagcgcacccctgtaatcccagctactcaggaggctaaggtgggggagatcacttgaaccctaggatcgcttgaacctgggaggcggargttgcagtgagccaagattgcaccactgcactccactccagcctgggcaatagagcaaaactccatctcagaaacaaaaaccaaaacaaaacctgtaccc

SEQ ID NO: 198210 - DNA, 201 bp, Homo sapiens
ttttagcagtgttattgacatatgtcacataacatgtcatttttttaaggtgtacaattctatgatttctagctatttgctatgttgtgcaactatcatcmaaatccattttaggactgggtgtggtggttcatgcttgtaatctcagtactttgggaggccgaggcgggcggatcatgaggtcaggagttcgagaccagc

SEQ ID NO: 198211 - DNA, 201 bp, Homo sapiens
agcctgctcagggacagattctggaaggtggaaatgggtgatggaggccgtccctggaggcgctcagagcatatgtgttccaccgcccaccctacaggtasctgaaaaacctgcagttccaccgcttctggtccgtggatgacacgcaggtgcacacggaatatagctctctgcgatccattgtggtggccaactatgaag

SEQ ID NO: 198212 - DNA, 201 bp, Homo sapiens
cagggaagaggtctgggggctcttgtagggtcagggatgtgggtgatggggcaaatgacagtggtctccttgtttccctcccccaggaatatgtggactakaacgggggcgctggggtccagcacatcgctctcaagaccgaagacatcatcacagcggttagaacccccttccctgtccgaattcctctctcattcagag

SEQ ID NO: 198213 - DNA, 201 bp, Homo sapiens
gtgctctgtcctcggcggggatgggtgcccaggggccgagccaggctgttttccacccgtagtatggggacaccacacacaccctggtggagaagatgaamtacatcggccaattcttgcctggatatgaggccccagcgttcatggaccccctacttcctaaactgtgagtgtccctcagggcagaggtgggtggaaagc

SEQ ID NO: 198214 - DNA, 201 bp, Homo sapiens
tccccttgggtgggacatcttcagtaacgcttccagaagcaccttgtgttggaacctccaagtctcactgtccttctttttctccttagacgacttacagkgacaaaggggcaaaggtaagcaggcgaaatgtgggaaatgtaggggcctgagtctagaagggggtcggagtgcagggagactggggtttcagcagagagc

SEQ ID NO: 198215 - DNA, 201 bp, Homo sapiens
gttccctttggtgcccccacccctcctgctgtcggcaccactgagatgccaggagccccgcagctgactccatcaaaccatcccacccatgggccttggakcacagacattgtccctcaagtctgtcccccgtattgcctggccagtgtacggggactgcaggagccaccagccactcctcccaggcttcccttcctccca

SEQ ID NO: 198216 - DNA, 201 bp, Homo sapiens
tcatttagctctcacttctaagtgagaacatgcagtgtttggttttctgttcctgcgttagtttgctgaggataacggcttccagctccatccatgtcccygtaaaggacatgatcttgttcctttttatggctgcaagcctcagtatcttcaactatgactcctcatagggtcatcgtaaggatccaatgagaactgggc

SEQ ID NO: 198217 - DNA, 201 bp, Homo sapiens
gaaaggcattcctggcagagggatcagcaagggccgaggtaggagcatgccctgagcgtctgaggaacagaaagaataggctagagtggatgggaggctgyttttgagcgatgacctaggtcagacaggtaagcaagagccagttcctcttgtgagctattattcaggaatctggattttgttcttttgtgaccagaaacc

SEQ ID NO: 198218 - DNA, 201 bp, Homo sapiens
aggcagggatgtgtgctgactgcttctgtgcaacaatttatgggcaaaagatttgagtactggaatggaaaaaatgaagaaaaaaaattcacttttcagaragaaattgtgcctaattctgagttacagctttctttataaaggctctcccaggggcctgtgaagggcccagaagagacactgggtgtgaaggagccagga

SEQ ID NO: 198219 - DNA, 201 bp, Homo sapiens
acgcgctgcgggtcctgtcactccacccacgctgtccatccccgctgatgctctgagccaggtggtagcaggtgggggtggcgccccgctcacggtcaccrtctgctcttcccgaggggggcgaggcagggcttgtgattaaagtcctgtgttccggcgcccgtgtcccaaaggcagcccctgggagcccttccggcagca

SEQ ID NO: 198220 - DNA, 201 bp, Homo sapiens
cccttaggcagggagagaagccaagtggggtggtgtcgtctccaatgccagcgcctcgcaaggaccccaggaaggacaagagcctctcctgccaagaaagkgctttaatgattataaagtgtccaaaatatactggcagaaataagcggatctgagcgtttctcttcaaacctaggatatgcagggtgagagcatggcagg

SEQ ID NO: 198221 - DNA, 201 bp, Homo sapiens
ttgggtccttactgaatattaggaactgaggcctgggtgttgggtgggctgcgtggtcctgggtgccatagctcacagaggacgggcatgtgtgcactcaytgtgtgtgcaggcgtctgtaaacacagccagtgcaggggtgcgtgtgtgctgtgtgcgcaggagagtgtaaacagtgcacgggcgcgtgtgtgctcactg

SEQ ID NO: 198222 - DNA, 201 bp, Homo sapiens
gtgacgctgctggaggaaacacctcaggacacggcctacaacaccaagaggtaagctgccctctcgtcctgccttctgaaactgccctgtgccccgtgtgktgggtgtggcacccttactgctcgggctgccgggggctcagaaggccttcaccagagggctgcgtggggccgccggcctctcccttgagtgtgtctgatg

SEQ ID NO: 198223 - DNA, 201 bp, Homo sapiens
aggccgaggcggcagatcacaaggtcaggagttcgagattggcctggccaacatagtgaaaccccgtctctactaaaaatacaaaaattagccgggcgtgrtggcgggcgcctgtaatcccagctactcgggaagcttgagacagaagaatcgtttgaatccgagaggcggaggttgcagtgagccgggatcgcgccattg

SEQ ID NO: 198224 - DNA, 201 bp, Homo sapiens
ggcggcagatcacaaggtcaggagttcgagattggcctggccaacatagtgaaaccccgtctctactaaaaatacaaaaattagccgggcgtggtggcggscgcctgtaatcccagctactcgggaagcttgagacagaagaatcgtttgaatccgagaggcggaggttgcagtgagccgggatcgcgccattgcactcca

SEQ ID NO: 198225 - DNA, 201 bp, Homo sapiens
gctgacagctgtgtgggaagggcccagggccctgtctgcccagccggctgagcacagacggtcttgcctccaaggggtttggattcctcagcagagccgtrgaaggtgcagtgatggtgagaaactgcccgtcacacagtgaaaagcctggcgccgtgacggtgagaaactgcccgtcacacagtgaaaggcctggcgcgg

SEQ ID NO: 198226 - DNA, 201 bp, Homo sapiens
gccacggagctgctcatcgtggtgaagtacgacccccacacgctcaccctgtccctgcccttctacatctcccagtgctggaccctcggctccgtcctggygctcacctggaccgtctggcgcttcttcctgcggtgagtcagggcagggcgcgtatgttctgaaggagggccgctgtccgggtcccttggcacaggcact

SEQ ID NO: 198227 - DNA, 201 bp, Homo sapiens
gcgcctggcctgatttttttttttttttttttttttgagacagatcttgctctgtctcccaggctagagtgcagtggcacaatcatcctagcgcactgcarcctcaacctgggcttaagcgaatctgccacctcccgagtagctgggactacaggtgcctgccaccacgcctggctaattttttatagagatggggtctca

SEQ ID NO: 198228 - DNA, 201 bp, Homo sapiens
gttgttgctgaggtccagctcacgcaggctgtggttggccaacagggttgcggcgaggctgctgcagctgctgtcactcacatcgcagtcggccaacctgkgtgaagcagggcgggggtcagggtgccgggcgtgcctggcaccgcactgaccggcagagcaggcctgggcctggggggcgcgacggacacctgtgctcgg

SEQ ID NO: 198229 - DNA, 201 bp, Homo sapiens
tcatcagcgtgatgttcgagttcctggagtacagcctggagcaccagctgcccaacttcagcgagtgctggtgggatcacgtaggtgccagcacagccccyggggcagtcggtgcaggctgaggggcattctcggaacccctgtgcccagcgcggcccctggaccccctcattctccccggggggcagtgggtgcaggctg

SEQ ID NO: 198230 - DNA, 201 bp, Homo sapiens
ttcagcgagtgctggtgggatcacgtaggtgccagcacagcccccggggcagtcggtgcaggctgaggggcattctcggaacccctgtgcccagcgcggcmcctggaccccctcattctccccggggggcagtgggtgcaggctgaggggcattctcggttcccctgtgctcttccggggtcctcctcggggggctcgtta

SEQ ID NO: 198231 - DNA, 201 bp, Homo sapiens
atctgtctcaggcccacgtttgggagtatgtggctggctggatagcagacgtagcataggcctcacttttctgtgccgttttgcagtcccacctgcagtgygtgagcatcttgctccgagacctcaccagcactctgcattgtgatgttcttaatttcagccgttccagcagatgtgcactgatgctgtgtcgtggcttgg

SEQ ID NO: 198232 - DNA, 201 bp, Homo sapiens
attccggacctccacagggactaggtgccagctgtccatggggcctgcagtggggctggtgtgggggcaggtggtgacgctgcatcccgctccccagggayatcacattgaggtacaaggagacccggtggcagaagtggcagaacaaggatgaccagggcagcaccgtcggcaacggggaccagcacccactggggctgg

SEQ ID NO: 198233 - DNA, 201 bp, Homo sapiens
aacgttctgtcgtctgtctttgtagcttactggaggttttggctctgcgtgagtgtggtctacgagctgtttctcatctttatactcttccaggtaagctktttttctgggttggatacctgggaacttaggtgacagtgtggccccaggcatggtgacaaaggaggccttgcccacacagccctcgagtgatgggaggaa

SEQ ID NO: 198234 - DNA, 201 bp, Homo sapiens
caggcgtgagccaccgcacccagccagcaccggcttattaatggtgagatgttaatgggaaaactgggcctgtgagatatgggagcttttactatttttayaataattctgtaaatctaaaaccattctaaaattaaaaatttatttttaaaatgcaatatatttgttttccttttaaagcacttccctcattcttaccca

SEQ ID NO: 198235 - DNA, 201 bp, Homo sapiens
ctgtgcacaggcgagtgtaaacagtgcacgggcgcgtgtgctcactgtgtgcgcaggcgagtgtaagtgcacgggcgtgtgtgctcactgcgcaggcgagygtaaactgcacaggcgcgtgtgtgctcactgtgcgcaggcgagtgtaaactgcacgggcgcgtgtgtgctcactgcgcaggcgagtttaaacagtgcacg

SEQ ID NO: 198236 - DNA, 201 bp, Homo sapiens
gtgtgtgctcactgtgcgcaggcgagtgtaaactgcacgggcgcgtgtgtgctcactgcgcaggcgagtttaaacagtgcacgggcgcgtgtgtgctcacygtgtgcgcaggcgagtgtaagtgcacgagcgcgtgtgtgctcactgcgcaggcgtctgtaaacagtgcatgggcatgtgtgctgtgtgtgtgcaggcgac

SEQ ID NO: 198237 - DNA, 201 bp, Homo sapiens
gggcattctcggaacccctgtgcccagcgcggcccctggaccccctcattctccccggggggcagtgggtgcaggctgaggggcattctcggttcccctgwgctcttccggggtcctcctcggggggctcgttacccctcacccctgcaacgagtgctggcccctccctgcagtggatcatggacgtgctcgtctgcaacg

SEQ ID NO: 198238 - DNA, 201 bp, Homo sapiens
gccaagtggggtggtgtcgtctccaatgccagcgcctcgcaaggaccccaggaaggacaagagcctctcctgccaagaaagtgctttaatgattataaagkgtccaaaatatactggcagaaataagcggatctgagcgtttctcttcaaacctaggatatgcagggtgagagcatggcaggggctggtgggccccagggt

SEQ ID NO: 198239 - DNA, 201 bp, Homo sapiens
gacccgtgagggctgcggcagtccgggtggagacacccccggggggcaggggccggagggctggggagcagagcctgggaggccggagcctgggcaagtcmgcctggaggaccctgcggggcccgggacgctgaaccccctgctgcccctgcaggaagccccacaagaagctgggcccgcaggcctggctggtggcggcca

SEQ ID NO: 198240 - DNA, 201 bp, Homo sapiens
gtaggacctgggttagacgtgaggacacactctggtggatgtaggacctgggttagacatgaggaaactgaggcacagaggggtgcatcatctctccgagsacacactccgatggatgtaggaactaggtctctgcctccatttgcagatggtcatgcagagggggtctcaggcgagtgtctggcacaggcagtggctggg

SEQ ID NO: 198241 - DNA, 201 bp, Homo sapiens
cacaattaggacgcacaagaattccactggccctaaaactcctttgtgttaccccttggtagtcatacccggccctgacccctgacagctggtgagggttygcttctgtctcttctagaatggaatcgtggggtgggcagcctcttcccaccctgcacagtgcctctgaggttcacccaggatcatgcggtgggcagcctc

SEQ ID NO: 198242 - DNA, 201 bp, Homo sapiens
cgagatcacgccactgcactccagcctgggcaacagagcgagactccgcctcaaaaaaaaaaaaaaaagatctgcctgccttggcctcccaaagtgcgggrattccaggtgtgagccaccacgcgcggcctgggctcctctttctcggcagtgacagtttctcaggccccttgtttttggtgagctggacggtttcgagga

SEQ ID NO: 198243 - DNA, 201 bp, Homo sapiens
tgcatgggcgtgtgtgctcactgcgcaggcatctgtaaacagtgcatgggcatgtgtgctcactgtgtgcacaggcgtctgtaaactgcacgggcgtgtgtgctgtgtgtgtgcaggcgagcgtaaacagtgcacggatgcgtgtgctcaccgtgtgcgcaggcgagtgtaagtgcacgggtgtgtgtgctgtgcgcaggc

SEQ ID NO: 198244 - DNA, 201 bp, Homo sapiens
ttgcgtttattcctgggattctgcatgtgaatgggagcctgtgctgtatctgggagatgctgactgggttgcaggcacgtccgagggtcagggtggggccragtgcagcctcctcctccagtgggcctgtgtgtggagtggtggcattctgggtgtccctgaggcctggtcgtttccatcttcttcctgagcccacatgga

SEQ ID NO: 198245 - DNA, 201 bp, Homo sapiens
gcatgggcgtgtgtgctcactgcgcaggcatctgtaaacagtgcatgggcatgtgtgctcactgtgtgcacaggcgtctgtaaactgcacgggcgtgtgtgctgtgtgtgtgcaggcgagcgtaaacagtgcacggatgcgtgtgctcaccgtgtgcgcaggcgagtgtaagtgcacgggtgtgtgtgctgtgcgcaggcg

SEQ ID NO: 198246 - DNA, 201 bp, Homo sapiens
catgggcgtgtgtgctcactgcgcaggcatctgtaaacagtgcatgggcatgtgtgctcactgtgtgcacaggcgtctgtaaactgcacgggcgtgtgtgctgtgtgtgtgcaggcgagcgtaaacagtgcacggatgcgtgtgctcaccgtgtgcgcaggcgagtgtaagtgcacgggtgtgtgtgctgtgcgcaggcga

SEQ ID NO: 198247 - DNA, 201 bp, Homo sapiens
gtaaacagtgcacggatgcgtgtgctcaccgtgtgcgcaggcgagtgtaagtgcacgggtgtgtgtgctgtgcgcaggcgagtgtaaactgcacgggcgcgtgtgctcaccgtgtgcgcaggcgagtgtaaacagtgcacgggtgcgtgtgctcactgtgcgcaggcgtctgtaaacagtgcacgggcgtgtgtgtgctca

SEQ ID NO: 198248 - DNA, 201 bp, Homo sapiens
taaacagtgcacggatgcgtgtgctcaccgtgtgcgcaggcgagtgtaagtgcacgggtgtgtgtgctgtgcgcaggcgagtgtaaactgcacgggcgcgtgtgctcaccgtgtgcgcaggcgagtgtaaacagtgcacgggtgcgtgtgctcactgtgcgcaggcgtctgtaaacagtgcacgggcgtgtgtgtgctcac

SEQ ID NO: 198249 - DNA, 201 bp, Homo sapiens
ctcactgtgtgcgcaggcgagtgtaaactgcacgggcacgtgtgcttactgtgcacaggcgagtgtaaacagtgcacgggcgcgtgtgctcactgtgtgcrcaggcgagtgtaagtgcacgggcgtgtgtgctcactgcgcaggcgagtgtaaactgcacaggcgcgtgtgtgctcactgtgcgcaggcgagtgtaaactg

SEQ ID NO: 198250 - DNA, 201 bp, Homo sapiens
acgtggatgatggggtcagagatcactgagctgcccctcaagggggcctggaacccgggtgctggggtcatgctgcctccgtggctccaaggtgagggtcmtcttcacgagcaaagagaaccaataaagtgacaacgaacgtctgaggcttccagccctccccccagctccccgtgtcctgctttggggtccagtgcagcc

SEQ ID NO: 198251 - DNA, 201 bp, Homo sapiens
acccagacaatgagactgacccctttcacaacatctgggtaagacgccgggggccctgaggcgagcccctccccaggtgtggccccgtgccggaccaggcrccatccacgctcctgcctcgcacccctcagcccacacttggggtctcctggtgcagagatgtgctgaggccctgtccgtctggatggtgctcatggtggg

SEQ ID NO: 198252 - DNA, 201 bp, Homo sapiens
agagagagactacgggggaaactgcctcatctacgacccagacaatgagactgacccctttcacaacatctgggtaagacgccgggggccctgaggcgagyccctccccaggtgtggccccgtgccggaccaggcgccatccacgctcctgcctcgcacccctcagcccacacttggggtctcctggtgcagagatgtgct

SEQ ID NO: 198253 - DNA, 201 bp, Homo sapiens
ttagtagagacggggtttcaccgtgttagccaggatggtctcgatctcctgacttcgtgatccgcccgcctcagcctcccaaagtgctgggattacaggcrtgagccaccatgcctggccagccttatttttaaaaattaatatttatgttattaaagttaaaaagttataaaactagtgtgtctttattcagcttgctgt

SEQ ID NO: 198254 - DNA, 201 bp, Homo sapiens
caggctggttttgaactcctgagcacagacagtacacccgcctcagcctcccaaattgctaggattacaggcgtgagccactgcgcccggccccgttttgyttttcttgagtcaacgttattgacctataatttactataatctgtgtctgattcacgcgtacggctgatgagttttaacagactcagagccccgtgtgcc

SEQ ID NO: 198255 - DNA, 201 bp, Homo sapiens
ggtgggagggtgtcgcactgcagccacccagaggttcgagaagccgtggggctcccggacctcccagaagccctgatcctggtcgggtccccgctccgtcmtcagggtcggggcggtggaaagaggcggcagggcaggaagtcccgcccctgcctgggcttgggcactgccccatcccacttctgagggaccctgtgctac

SEQ ID NO: 198256 - DNA, 201 bp, Homo sapiens
actgcgcaggcgagtgtaaactgcacgggcgcgtgtgtgctcactgtgtgcgcaggcgagcgtaaactgcacgggcacgtgtgctcactgcgcaggcgagygtaaacagtgcacgggcgcgtgtgtgctcactgtgtgcgcaggcgagtgtaaactgcacgggcacgtgtgcttactgtgcacaggcgagtgtaaacagtg

SEQ ID NO: 198257 - DNA, 201 bp, Homo sapiens
ctgcacatccgccggcctaagctgctgctcaccgaaacccactgggactctggctgaggccggccccaaggagctttgccgaggagggagcaccttgcccmtgcccagagcggtccctcgcatcctccttcccgtgaacctgcatctttggttgcagttacagctctcacgcttccatcttatgaatcacaggagtcccgt

SEQ ID NO: 198258 - DNA, 201 bp, Homo sapiens
ggaggagggcagtctctgggtaatcggagggaggaggaggggagtctctgggtaatcggagggaggaggaggggagtctccgggtaatcagagggacgagsttggagtggccgctgtgatggtggattaccattgcacgtttagcccagaagagacaaagatggttaaacagtgtgtgcgcagtggttaatggatacacac

SEQ ID NO: 198259 - DNA, 201 bp, Homo sapiens
acaggctgctcaccccatcccttgagctttgcgtttattcctgggattctgcatgtgaatgggagcctgtgctgtatctgggagatgctgactgggttgcrggcacgtccgagggtcagggtggggccgagtgcagcctcctcctccagtgggcctgtgtgtggagtggtggcattctgggtgtccctgaggcctggtcgt

SEQ ID NO: 198260 - DNA, 201 bp, Homo sapiens
ttcacgccctcaccctagtgaagtggctgaattgccaggattgatcacagctctgttctgtgtctgatcacaggacatacaccgtcctgcagagtctgcargcgggtgggaggagccattgaacagacctggcgtcctgggagggacacggaattcttcccttgagagtctcatgctatcttgagcggcactctgtcactt

SEQ ID NO: 198261 - DNA, 201 bp, Homo sapiens
ctactaaaaatgcaaaaaattagcctggcatggtggcaggcacctataatcccagctactcgggaggccaggaggcggaggttgcagtgagccgagatcgmaacattgcactccagcccgggcaacagtgcgagactctgtctcaaaaaatatagatatagatatagatagatagatagattcttaccatgcaatctagca

SEQ ID NO: 198262 - DNA, 201 bp, Homo sapiens
gcagccatgactcggcctgcagggctcactgtccagggctcccgggcctcactctgcacctggtgcccagcccaggatgaccagccacccacggaaagccsctggcgagaggcacacgggaaacagcaaacaaaagacaaaacactgagggtggaaattcagtagactggctggtaaatgagaacatctcccaaaaataaa

SEQ ID NO: 198263 - DNA, 201 bp, Homo sapiens
aaaaatttatttttaaaatgcaatatatttgttttccttttaaagcacttccctcattcttacccaacgggacacaccttctcaagtacttaagtaattcttttttttttttttttttgagactgagtcttgctgtcacccaggctggagtgcagtggcgcgatctcagctcactgcaacctctacctcccagattcaagt

SEQ ID NO: 198264 - DNA, 201 bp, Homo sapiens
ggggtgacgcacgcctgtcgggcggagggcggcctggggtgacacggatggtggcctgggatgacacgcgcctgtcaggcggagggcggcctggggtgacrcgcacctgtctggtggatggcggcctggggtgacgcgcgcctgtcgggcggatggtggcctggggtgacgtggatggcggcctggggtgacgcagatggt

SEQ ID NO: 198265 - DNA, 201 bp, Homo sapiens
gtgtgcttcttccccatcctgaccacattctgcaagacgagcagggtgcaggtgggagacgcagctcctttgtaaatcctgggtcaggctgtgttgctgcygcaaatgcctactttattaatactctttgttctgtttaacttagtgtaaacacacatttttggggctgtcttcagcttacaaaggactttattattccca

SEQ ID NO: 198266 - DNA, 201 bp, Homo sapiens
tgacacggatggtggcctgggatgacacgcgcctgtcaggcggagggcggcctggggtgacacgcacctgtctggtggatggcggcctggggtgacgcgcrcctgtcgggcggatggtggcctggggtgacgtggatggcggcctggggtgacgcagatggtggcctggggtgacgcggatggcggcctggggtgacgcag

SEQ ID NO: 198267 - DNA, 201 bp, Homo sapiens
gtggcctgggatgacacgcgcctgtcaggcggagggcggcctggggtgacacgcacctgtctggtggatggcggcctggggtgacgcgcgcctgtcgggcrgatggtggcctggggtgacgtggatggcggcctggggtgacgcagatggtggcctggggtgacgcggatggcggcctggggtgacgcagatggtggcctg

SEQ ID NO: 198268 - DNA, 201 bp, Homo sapiens
aggaggctcaggtaggaggattgcttgagcccaggaggcagaggttgcagtgcaacaagattgcactccagcctgggcaacagagccaggaccttgtctcaaaaaaaaaaagtggccagccacagtagctcacacctgtaatcccagcactttgggaggctgaggcgggtggaccatctgaggtcaggagttcgagaccag

SEQ ID NO: 198269 - DNA, 201 bp, Homo sapiens
aggcggatcacgaggtcaggatatcaagaccatactggctaacacggtgaaaccccatctctactaaaagtacaaaaaattagcctggtgtggtgacgggygcctgtggtcccagctactcgggaggttgagacaggagaatggcatgaacttgggaggcggagcttgcagtgagccaagatcgcaccactgcactccagc

SEQ ID NO: 198270 - DNA, 201 bp, Homo sapiens
ttctcggttcccctgtgctcttccggggtcctcctcggggggctcgttacccctcacccctgcaacgagtgctggcccctccctgcagtggatcatggacrtgctcgtctgcaacgggctgggcatctactgcggcatgaagacccttgagtggctgtccctgaagacgtacaagtggcagggcctctggaacattccgac

SEQ ID NO: 198271 - DNA, 201 bp, Homo sapiens
gctgtatgagttctttataaattctggataaaaagtattttttttcttttttttttttgagattgagtctcgctctgtcgcccaggctggagtgcagtggygcgatctcggctcactgcaggctccgcctcccgggttcacgccattctcctgcctcagcctcccgagtagctgggactacaggcgcccacccaccacacc

SEQ ID NO: 198272 - DNA, 201 bp, Homo sapiens
actacaggcgcccacccaccacacccggctaattttttgtatttttagtagagatggggtttcaccgtgttagccaggatggtctcgatctcctgacctcstgatccgcccgcctcggcctcccaaagtgctgggattataggcgtgagccaccgcgcctggcctgatttttttttttttttttttttttgagacagatct

SEQ ID NO: 198273 - DNA, 201 bp, Homo sapiens
gccagagccaccgcgctcctggctgtcatcacgtcgttggctttgcgatctaaacctgcttgttgttttggtttttctttctttctgttttctttcattctttttttttttttttttttgagacagaatctcactctgtcacccaggctggagtgcagggatgtgatctcagcttactgcggtccccgactcctgggccga

SEQ ID NO: 198274 - DNA, 201 bp, Homo sapiens
gtgtggtgggagggtgtcgcactgcagccacccagaggttcgagaagccgtggggctcccggacctcccagaagccctgatcctggtcgggtccccgctcygtcctcagggtcggggcggtggaaagaggcggcagggcaggaagtcccgcccctgcctgggcttgggcactgccccatcccacttctgagggaccctgtg

SEQ ID NO: 198275 - DNA, 201 bp, Homo sapiens
cacccctcagcccacacttggggtctcctggtgcagagatgtgctgaggccctgtccgtctggatggtgctcatggtgggcagggggcccctgctctctargctgtcgtggacgtggtctccacaggccacggcagcacctgtgagtccctggccttcttcccggggtctggcaggtgctgctcaggtgtgggctgatctg

SEQ ID NO: 198276 - DNA, 201 bp, Homo sapiens
agcttactgcggtccccgactcctgggccgaagtaatctcccctcaccctccctcttcccaagtagctgggaccagacatgcgccaccacatccagttaatttttttttttttttggtagaaatagggtctcactatgtttcccgagctggtctccaactcctgggctcaagtgatcctcctgcctcagcctcccaaagct

SEQ ID NO: 198277 - DNA, 201 bp, Homo sapiens
atacaaaaattagctggatgtggtggcacgtacctgtggtcccagctactcaggaggctcaggtaggaggattgcttgagcccaggaggcagaggttgcartgcaacaagattgcactccagcctgggcaacagagccaggaccttgtctcaaaaaaaaaaagtggccagccacagtagctcacacctgtaatcccagcac

SEQ ID NO: 198278 - DNA, 201 bp, Homo sapiens
gggaagcgtgagtggggagaggagtccgagatgccacctttctgatctggggagctggggccttccccaacaggagaaacatgagaaagattcgacttggyagtgcggggagggaagttagtactggtcgtggtgacctgtggcccgctcagaacatgatggtttcatgggtgtagctgtcccctcagagagcgcctgcag

SEQ ID NO: 198279 - DNA, 201 bp, Homo sapiens
ttactttgccaatcttcgatttattgacggggaagcctgtcctggagccaccttcttccacgcgtcttgttaacttgggggccggcagggagccctcaacyctctgcagtcacaacacattgaagtggacaagtgatgagtcctgtgcagcggaggctctgggtggggggcagggagaagggctttctccagaaaggtggt

SEQ ID NO: 198280 - DNA, 201 bp, Homo sapiens
ccctcgcatcctccttcccgtgaacctgcatctttggttgcagttacagctctcacgcttccatcttatgaatcacaggagtcccgtttgttttggatgakttgacaccaaaaagacacaggagctctctagagacacttcctgggggtcctgccgcgttggagcagggaggcagtagctcctgacgccttccctcctacg

SEQ ID NO: 198281 - DNA, 201 bp, Homo sapiens
gcccagagcggtccctcgcatcctccttcccgtgaacctgcatctttggttgcagttacagctctcacgcttccatcttatgaatcacaggagtcccgttkgttttggatgagttgacaccaaaaagacacaggagctctctagagacacttcctgggggtcctgccgcgttggagcagggaggcagtagctcctgacgcc

SEQ ID NO: 198282 - DNA, 201 bp, Homo sapiens
gtgactgtcggcacggcactgccgagccgtgggagggactgggtggtgcagcggccagtggatctcagaccctgagctgagcacgactggagaggatgggygcatccgagcgtctgcagagcacagagcgcgtccgcagagcgggtccacaccttgggtgcagcgagcggatgtgagcagtgtgcctgtgaccagggctgt

SEQ ID NO: 198283 - DNA, 201 bp, Homo sapiens
cacggatgcgtgtgctcaccgtgtgcgcaggcgagtgtaagtgcacgggtgtgtgtgctgtgcgcaggcgagtgtaaactgcacgggcgcgtgtgctcacygtgtgcgcaggcgagtgtaaacagtgcacgggtgcgtgtgctcactgtgcgcaggcgtctgtaaacagtgcacgggcgtgtgtgtgctcactgcgcaggc

SEQ ID NO: 198284 - DNA, 201 bp, Homo sapiens
atgcactggtcatgttcatggcgtggccgacggggaggctgctgccccatcctcccaaccccgacgaccccagcccggccatgcagaggcatagtcgaccrtctcactaaggaacattccacagaattcctgaccaggcctcctccaaaccatccaggtcatcagagacaaggagagtctgagaaaccgtcccagcctcgg

SEQ ID NO: 198285 - DNA, 201 bp, Homo sapiens
agcagggtaggtggattaggaagcaggaccgggtctcacctcaagtgtcccacatggcaagaattgtcaagagcaggagtgcagggggtgtcttgggagcrctccccgaaagcattcaccaggcccccaccaggcgcatcacaaagcctcaccaccccaagccaggccctgccctcccaggcctggttcctatgggaagca

SEQ ID NO: 198286 - DNA, 201 bp, Homo sapiens
ggcagccctggccgcaccacccgcccagcgcgtgcacatacaccagctgctccaggaggcagcccggctgccggacgctctccaccagctgcaggatgccsgcgtcccccaggcagttgttgctgaggtccagctcacgcaggctgtggttggccaacagggttgcggcgaggctgctgcagctgctgtcactcacatcgc

SEQ ID NO: 198287 - DNA, 201 bp, Homo sapiens
ctgtgaacgcagttgctcctccggcctggcctctcccgctggagggcagcttcgcggcatccttgctgtgcctgccggtgggctcactggggagcttccgytgcgtggacacggcaccgttcactgatctgcctgtatgggggtgaccctgggggagagtccagctttcctcaccagtccattacatttttatcccatttt

SEQ ID NO: 198288 - DNA, 201 bp, Homo sapiens
tctagaaacacaattaggacgcacaagaattccactggccctaaaactcctttgtgttaccccttggtagtcatacccggccctgacccctgacagctggygagggttcgcttctgtctcttctagaatggaatcgtggggtgggcagcctcttcccaccctgcacagtgcctctgaggttcacccaggatcatgcggtgg

SEQ ID NO: 198289 - DNA, 201 bp, Homo sapiens
accttgaaaaaattaaaatttctgctttgtaaaagacactgttaagggaacgaaaaggtgagccacaagctgttgaaaatgtttacaaaacacctatctgwtaaagtacttgtattcaaaatatgcaaagaactcttaaagctcaagaagaagaaaaacaggctgggcagggtggctcacacttgtaatcccagcactttg

SEQ ID NO: 198290 - DNA, 201 bp, Homo sapiens
gtacccggcacccacccagtccattccggacctccacagggactaggtgccagctgtccatggggcctgcagtggggctggtgtgggggcaggtggtgacsctgcatcccgctccccagggacatcacattgaggtacaaggagacccggtggcagaagtggcagaacaaggatgaccagggcagcaccgtcggcaacggg

SEQ ID NO: 198291 - DNA, 201 bp, Homo sapiens
atacggccatattcacgcgtttgtgtgatacggacattcacgcgtttgtgtgtaggacatattcacatatttgtgtgtatggacatattcacgcgtttgtratacagacatattcacgcatttgtgtgtacagacattcacgcgtttgtgtgatacggatatattcacgcatttgtgatacagacatattcacgcgtttgt

SEQ ID NO: 198292 - DNA, 201 bp, Homo sapiens
caccctggcactgaccgtggctctgtggctccttccagtgaaattgccgtggtgcacctgtcctgagtccattctcatggcctggacccgcactgctgcayaccagaagcccagctcctgggcagccaccctacctgcccctacgcagggtgtccacacagagggtgtccgcacacagggtgcccacacacagggtgtccc

SEQ ID NO: 198293 - DNA, 201 bp, Homo sapiens
tagtgtaaacacacatttttggggctgtcttcagcttacaaaggactttattattcccaatcttaaaactccatcagtgcatgatgagattttttatcatygtggcaaaattgacttttctgaggcagtgtacattctgtgaattttagcatttgtgtagacttctagaaacacaattaggacgcacaagaattccactgg

SEQ ID NO: 198294 - DNA, 201 bp, Homo sapiens
ggttccgttagccagcggggctcttgcacggacaggggccgacacggaccgcagaccatctggtcagcagccaagcgagtaaactcgtcttctcaggtttrtctccacaggcaggcaggctagaccttgggtgtgtcctctgcctgaattccatggattctgacgccagtctcagaagtgcgtgtggaagagaagctggtt

SEQ ID NO: 198295 - DNA, 201 bp, Homo sapiens
accgtgctcttcatcctcacctgtacgcttggctatgtgacgctgctggaggaaacacctcaggacacggcctacaacaccaagaggtaagctgccctctygtcctgccttctgaaactgccctgtgccccgtgtggtgggtgtggcacccttactgctcgggctgccgggggctcagaaggccttcaccagagggctgcg

SEQ ID NO: 198296 - DNA, 201 bp, Homo sapiens
atgatgagattttttatcatcgtggcaaaattgacttttctgaggcagtgtacattctgtgaattttagcatttgtgtagacttctagaaacacaattagracgcacaagaattccactggccctaaaactcctttgtgttaccccttggtagtcatacccggccctgacccctgacagctggtgagggttcgcttctgtc

SEQ ID NO: 198297 - DNA, 201 bp, Homo sapiens
ttccctggtgcggggtcccttaggcagggagagaagccaagtggggtggtgtcgtctccaatgccagcgcctcgcaaggaccccaggaaggacaagagccyctcctgccaagaaagtgctttaatgattataaagtgtccaaaatatactggcagaaataagcggatctgagcgtttctcttcaaacctaggatatgcagg

SEQ ID NO: 198298 - DNA, 201 bp, Homo sapiens
tttatatcagtgtggacgtacagatacttgtcttacacttgcatatttatttcagcgctgctctatttatcgtggtgcccaaattcttttgccaaaaggartttccacgtggttcctgtattgctttcacacaccctcacggagttcttggcttttcgttttgtttttctgaggacatcctgacttcctagcactgcggga

SEQ ID NO: 198299 - DNA, 201 bp, Homo sapiens
tcttccaggtaagctgtttttctgggttggatacctgggaacttaggtgacagtgtggccccaggcatggtgacaaaggaggccttgcccacacagccctygagtgatgggaggaagcagggctagacccccacaaagtaggccgagctgcggggggtctccaggagcatctgtgcggcccttgagtgatggggggcagca

SEQ ID NO: 198300 - DNA, 201 bp, Homo sapiens
cttccaggtaagctgtttttctgggttggatacctgggaacttaggtgacagtgtggccccaggcatggtgacaaaggaggccttgcccacacagccctckagtgatgggaggaagcagggctagacccccacaaagtaggccgagctgcggggggtctccaggagcatctgtgcggcccttgagtgatggggggcagcaa

SEQ ID NO: 198301 - DNA, 201 bp, Homo sapiens
ctcacgcgctgcgggtcctgtcactccacccacgctgtccatccccgctgatgctctgagccaggtggtagcaggtgggggtggcgccccgctcacggtcwccgtctgctcttcccgaggggggcgaggcagggcttgtgattaaagtcctgtgttccggcgcccgtgtcccaaaggcagcccctgggagcccttccggca

SEQ ID NO: 198302 - DNA, 201 bp, Homo sapiens
tactcaggaggctgaggcaggagaatctcttgaacccaggaggcggaggttgcagtgagccgagatcgcaccgctgcactccagcctagacgacagagcgrgactccgtctcaaaaaaaaaaaaaaaaaaaaattaccaacaaagagttactatttgggcacatttggttggaaaacacctaaaatctcacttggtaacgg

SEQ ID NO: 198303 - DNA, 201 bp, Homo sapiens
gttgaaacaggtgtgagtcatcctgttctaaagcaagttgctgaacagtttctcaacatgaggggtgggcttggtttatctggtgcaaaggccaactaccrtggaggtaagcatttcattctattagggttaatttatcagaagggcgtttccccactagaatagcatattgaggtggaataggcctgaatatttactact

SEQ ID NO: 198304 - DNA, 201 bp, Homo sapiens
gaagtgtgtcagtgctgcaggagactctggtactgaccacagatgaccaacttttcttatctgtcctaggttatcaaggctgcctataatcaagtaaaaasaatagctcaaggaaacctttccaacacagatgtccaagctgccaagtaagtctcagtattaactgtgttttatgtttttgttatttgaaagttgtattct

SEQ ID NO: 198305 - DNA, 201 bp, Homo sapiens
acatgcagaggatccagattgcacaaccggatccagaggccttgggaagcattagggagctctccagctgtctcactcaaatctgtagcagcatatggacycacaaatggaggccaaagtgggccctcaattggacactttggcaaccctgaagagacttcttcccttcagacttactgttttagtatgttccagagaagg

SEQ ID NO: 198306 - DNA, 201 bp, Homo sapiens
ttgggaggctgaggcgggcggatcacctgaggtcaggagttcaagaccagcctagccaacatggcgaaaccccgtctctactaaaaatacaaaaattagtygggcatggtgacacatgcctgtaatcccagctatcggggggctgaggaggagaatcgcttgaacccaggaggcagtgattgcagtgagctgagatcgtgc

SEQ ID NO: 198307 - DNA, 201 bp, Homo sapiens
ggtcccctgaaagctacctgacaatctccttattacctagagaggaaacctaggagtaagtaaaattcagattaaatgacttgtccaaggtcacatggcamgatggcggcagaaccataactagatggggacttcccaaaacccaggccagtataccttccaagtgataccagctaggttaaagttagaaaagtggtttag

SEQ ID NO: 198308 - DNA, 201 bp, Homo sapiens
tgtcagtggagtcttctgagtgtttcctggaagaagtcgggtcccaggctctagttgctggttcttacatgccaccatccacagtccttcagcagattgaytcagtggctaatgctgatatcataaatgtaagtaaatgaaaacttaacgatttaacaacagagaacttaaccttaatgatccaatttcagaaggatgcat

SEQ ID NO: 198309 - DNA, 201 bp, Homo sapiens
gaaagctacctgacaatctccttattacctagagaggaaacctaggagtaagtaaaattcagattaaatgacttgtccaaggtcacatggcaagatggcggcagaaccataactagatggggacttcccaaaacccaggccagtataccttccaagtgataccagctaggttaaagttagaaaagtggtttaggtggactc

SEQ ID NO: 198310 - DNA, 201 bp, Homo sapiens
gtgctgtatatttgtactttttacatagaagtcgtaagttttttttttttcttagttaccccaaaccaattttcacccatctggaaaggatagcatttctrttgaaagtacatgttttagccctacttttgtatattaagcctaaggtggtaatataaaccagtgataaccaagtctcaccaatcttcagatcgcctgagt

SEQ ID NO: 198311 - DNA, 201 bp, Homo sapiens
tgcttcattactacttatataaacacaaaagaaacctgacatactacgtaagctacattataataaaaatcatagtccacgttttcaagtttaggccagtrtatgctctaatttctttttattcctttttttttttttttttttgagacagagtcttgctgtgtcgcccaggccagagtgcaatgacacgatctcagctca

SEQ ID NO: 198312 - DNA, 201 bp, Homo sapiens
attgggtcttgggagcaccaaattttattcactcatcatctcctctaataacctcatgaactttagtcataatcagaatgatttgtatggcattgtataayatttgccaaaacaaactgaataaaatgaatgcattttgggtccattatctaatatttaatgggaccctttcaccctaccagtaactgcattttatatatt

SEQ ID NO: 198313 - DNA, 201 bp, Homo sapiens
taccatacccagcaaactaaattgatgacgataaagtaaagctaattgtaattcataactgaaaagcagtactaaaagcaagtgataaccagcagccaacytagtacagcactaatgatgtacaacaaacagccttctggacagcacagagtggaggcattgcagactgtgcagggatgtccgggaaactccagtgaggag

SEQ ID NO: 198314 - DNA, 201 bp, Homo sapiens
ttattcatatttgaattgctatgcccatatatcttaaaagtttactttttggaaaattataggccaaaattacaaagaaggttaactataccatacccagsaaactaaattgatgacgataaagtaaagctaattgtaattcataactgaaaagcagtactaaaagcaagtgataaccagcagccaacctagtacagcact

SEQ ID NO: 198315 - DNA, 201 bp, Homo sapiens
taggttttaaaaatgttgtctttactgaaagtgcatttccctaaatgcttcttcacttatctcacagatgtcattgaaaatttgcatgcagcagcttaccrgaatgccttggctaatcccttgtattgtcctgactataggattggaaaagtgacatcagaggaggtaccaataaaacatattttgaaatgtgcttgtttt

SEQ ID NO: 198316 - DNA, 201 bp, Homo sapiens
atttttgttaattttgtcttttgtttgtttctttaaaggcggcaaagaagtttgtttctggccagaagtcaatggcagcaagtggaaatttgggacatacrccttttgttgatgagttgtaatactgatgcacacattacaggagagagctgaacgttctctcagcccagagcagcaaacacatgaaagtcagaagtctct

SEQ ID NO: 198317 - DNA, 201 bp, Homo sapiens
cctatccataaattcttgaaatgacaaaataagttcgcctgcttgatgatatatatttttatttttgttaattttgtcttttgtttgtttctttaaaggcrgcaaagaagtttgtttctggccagaagtcaatggcagcaagtggaaatttgggacatacaccttttgttgatgagttgtaatactgatgcacacattaca

SEQ ID NO: 198318 - DNA, 201 bp, Homo sapiens
cttcaccattatccagtatggagaaggggccctcacttctttcttgtcgtctctgtgaatcatcacgtcacaattaatgtcttttcctacactaatagtakggttcttcttcttatatccatgccagtctctggagatggatattggtctccttgcagggtgatgcacagttgaccacggatatctataatattgaagtct

SEQ ID NO: 198319 - DNA, 201 bp, Homo sapiens
gtgtgtgtttggggacaggatggcatggggaaagcaccgagccgcagaaaagactcgtgggttaatactgtgttgtaggaaatactggagaatgaaaccartggtgaacaagccattttcttcttccctctatccttaatctggccccaggtgaaatccgagaacagaatggagacagtcttgtccatgctgcttttgtag

SEQ ID NO: 198320 - DNA, 201 bp, Homo sapiens
ttcaactttatttgccattttaaaaaattgtggtcaaatgtatataacataaaatttatatatatatatatatatatatatatatatatatatatatatattttagacagtctcgctgtgtcgcccaggctggagtgcagtggcatgatcttggctcactgtaacctccgcctcttgggttcaagcgattctcctgcctca

SEQ ID NO: 198321 - DNA, 201 bp, Homo sapiens
cttcaactttatttgccattttaaaaaattgtggtcaaatgtatataacataaaatttatatatatatatatatatatatatatatatatatatatatatwttttagacagtctcgctgtgtcgcccaggctggagtgcagtggcatgatcttggctcactgtaacctccgcctcttgggttcaagcgattctcctgcctc

SEQ ID NO: 198322 - DNA, 201 bp, Homo sapiens
tggctttacatttttgactcataattcttatctcgatgtcttctgtagtgatattctaatggagttcctgctcaatgtcaccacagcaccagaatttcgtmgttgggaagtagctgaccttcagcctcagctaaagattgacaaagctgtggcctttcagaatccgcagactcgtaagtacatttccagatcacatttgat

SEQ ID NO: 198323 - DNA, 201 bp, Homo sapiens
gtacgaaaagatcttcaactttatttgccattttaaaaaattgtggtcaaatgtatataacataaaatttatatatatatatatatatatatatatatatatatatatatatattttagacagtctcgctgtgtcgcccaggctggagtgcagtggcatgatcttggctcactgtaacctccgcctcttgggttcaagcga

SEQ ID NO: 198324 - DNA, 201 bp, Homo sapiens
gggtacgaaaagatcttcaactttatttgccattttaaaaaattgtggtcaaatgtatataacataaaatttatatatatatatatatatatatatatatatatatatatatatattttagacagtctcgctgtgtcgcccaggctggagtgcagtggcatgatcttggctcactgtaacctccgcctcttgggttcaagc

SEQ ID NO: 198325 - DNA, 201 bp, Homo sapiens
aagggtacgaaaagatcttcaactttatttgccattttaaaaaattgtggtcaaatgtatataacataaaatttatatatatatatatatatatatatatatatatatatatatatattttagacagtctcgctgtgtcgcccaggctggagtgcagtggcatgatcttggctcactgtaacctccgcctcttgggttcaa

SEQ ID NO: 198326 - DNA, 201 bp, Homo sapiens
gccttactctccttggtaatacgaagacattcattatatctctactttattttaaatacagtttaccaagttaccaaatggcttggtgattgcttctttgkaaaactattctcctgtatcaagaattggtttgttcattaaagcaggcagtagatatgaggacttcagcaatttaggaaccacccatttgctgcgtcttac

SEQ ID NO: 198327 - DNA, 201 bp, Homo sapiens
taatttcaatattgttgtgtctcaggagtaggaatatccaaagagagggagaaagacttggggagcagctggtcagtggaacactcaggacagaaacagcrtttctttttttttaattaatttatattaaagacagggtcttgctctgtttcccaggctggagtggagtggtgcagacataccttattgcagccttgaact

SEQ ID NO: 198328 - DNA, 201 bp, Homo sapiens
ggaagctatacatgccttactctccttggtaatacgaagacattcattatatctctactttattttaaatacagtttaccaagttaccaaatggcttggtkattgcttctttggaaaactattctcctgtatcaagaattggtttgttcattaaagcaggcagtagatatgaggacttcagcaatttaggaaccacccatt

SEQ ID NO: 198329 - DNA, 201 bp, Homo sapiens
ttgaatgcagtgcaatgacttatcagagctctgtatagtatgatgtcattgaagcattatctgctatagggaaatttacacatgtatactaatgcttccakgaaagaggagagaattgcctccttcatgttttggttctggttggacaagttgcattgagttggctctgagacatctaaattgagaacccaggagagggga

SEQ ID NO: 198330 - DNA, 201 bp, Homo sapiens
tgccactgcactccagcctgggtgacagagcaagactctgtctcaaaaatatatataaataaataaataaaagaaattgaagtgccttcttatgctttacrtggactgagccaatggttctccaagtttattgtacataagaattacctggaacacttgttaaaaatctgggcttccaggctgcatccacagggacctgag

SEQ ID NO: 198331 - DNA, 201 bp, Homo sapiens
ggtggtggtgactgataatttcttaaaatcagacaacagtgaagtttgctgcattgattgactcttccttttgtgaaagacttctctgtagcatgagatgytgtttttagccgtttacccacagaacttctttcaaaattagtcagtcatctcaaaccttaccacttttttatcaaccaagattatgtaatattctttttt

SEQ ID NO: 198332 - DNA, 201 bp, Homo sapiens
ttataaacataacgaaagactccatgttagagtgtgtgtatgtgtgtatgtttaaataatacatttgactaggcgcagttgctcatacctgtaatcccaggactttgggaggctggggcaggaggatcacttgaggccaggagttcaaccagcctgggtaatgtggcaagacactgtctttacaaaaagatatttaaaact

SEQ ID NO: 198333 - DNA, 201 bp, Homo sapiens
ggatgcttttgtgcccatatttaagctgccgttgcttacaagacctgtactgcccttccccacctgccttttccatcataccctatgctcacagacaaatmtcagcaagaggcaggagttgcttcactaatcaaaaccttacattaaaatagttttacctagatctaagttctagtcccaaatcaaaaagcaatctgtgga

SEQ ID NO: 198334 - DNA, 201 bp, Homo sapiens
tggaactaaccttccatctgtgtttttgcctcagtaaagaagtgtgtcagtgctgcaggagactctggtactgaccacagatgaccaacttttcttatctstcctaggttatcaaggctgcctataatcaagtaaaaacaatagctcaaggaaacctttccaacacagatgtccaagctgccaagtaagtctcagtattaa

SEQ ID NO: 198335 - DNA, 201 bp, Homo sapiens
tctcctggctggtgtcagcctccaggtttacgtcttgagtccatctcccacacggccattacagtgatccttctgacctgaaagtaagccttcttattatctatgggataaagtccaaacagcatatacgtatatggccttgcgtgatcttaccccagcccacttctcttactttatgctctaccctcttctccttccagc

SEQ ID NO: 198336 - DNA, 201 bp, Homo sapiens
cccagcataaaggaaagggagcagtcattttagaaatatttaaatgaaaaaacaaagccgtgatagttctgaaagaggtaacctatttacagaatacttcrgttcgtgacagaactggctaagtaaaatattaatctattttgtttataccgtgaaggtccaagttttttctaggcaaacttaaagaaatcgtgccctgtt

SEQ ID NO: 198337 - DNA, 201 bp, Homo sapiens
agcaacttataaggccttataagtatttattttcttccaaactgtacttttatgtttttacagctttttatatttatgctaatataacctaataagtgttkttaacttcctcagttacattacttcgttcagaaccatttcacaagtgcaagaatggctttgattggacttggtaagtttagagtattgcctgcctgtcag

SEQ ID NO: 198338 - DNA, 201 bp, Homo sapiens
atacaagtctgtaagcaagcgccgctgactcttgggagtcatacaacttctggtgggagcagaaatgtgcaggaagagcagaaatagctcaactcagtggytcagcatgggacaggctcccctccacatgcaggcctggggactgatgttatttcatgatgatgcttggtgtcacagaggagcattatctttgttgctcag

SEQ ID NO: 198339 - DNA, 201 bp, Homo sapiens; identical to SEQ ID NO: 34464

SEQ ID NO: 198340 - DNA, 201 bp, Homo sapiens
catgctataaaattcacccttttgaagtgaatagttctgtggtttttaacagattcaactattaccactacctaatttcagggtgtgttcatcatcccccmaaaagccccatacccattagcagtcactccccattctcatcttccccctgcctgtggcatccactaatctactttgtttttgtttttttttttaaagaga

SEQ ID NO: 198341 - DNA, 201 bp, Homo sapiens
tgaacagtctcggcatagaattggatggcttgggtgttgtattttgagcatatgttttgtgtgtgtttggggacaggatggcatggggaaagcaccgagcygcagaaaagactcgtgggttaatactgtgttgtaggaaatactggagaatgaaaccaatggtgaacaagccattttcttcttccctctatccttaatctg

SEQ ID NO: 198342 - DNA, 201 bp, Homo sapiens
ctgcctgaacagttactgtgtagtctcctggctggtgtcagcctccaggtttacgtcttgagtccatctcccacacggccattacagtgatccttctgacstgaaagtaagccttcttattatctatgggataaagtccaaacagcatatacgtatatggccttgcgtgatcttaccccagcccacttctcttactttatg

SEQ ID NO: 198343 - DNA, 201 bp, Homo sapiens
gcgtccattaggaggggattgatcaaataaatggtggtagagccatagaaagggattctttataaccattaaatatttgatgtagactactcacttagaartttgtaaattatgaaagataagttagaaacaatatcaatagaatgataccattttagaaataaattgaagataatattaactacacagaaaattctagat

SEQ ID NO: 198344 - DNA, 201 bp, Homo sapiens
aggttctagttcttttaagcaatagtttttataataaaatcccagggtaattcacctcagttagtaccttgtagttcattacagcaacttataaggccttrtaagtatttattttcttccaaactgtacttttatgtttttacagctttttatatttatgctaatataacctaataagtgtttttaacttcctcagttaca

SEQ ID NO: 198345 - DNA, 201 bp, Homo sapiens
gtaagtaaatgaaaacttaacgatttaacaacagagaacttaaccttaatgatccaatttcagaaggatgcataagcgtccttgggcagtgtattattctyatgtttggtgctcatctacttaatgtggaggcaggagggctcattcccataagatccgcaacaagcttccctgtcagctcgagtatatgtatcttcctcc

SEQ ID NO: 198346 - DNA, 201 bp, Homo sapiens
taaactcaagggaaaatctatcttcttgccccttattaatagagtcactactgtagatgtgaggcagtgaagaccgcacagtgcagtggaagaacagaatrtgtttattactccagcctattggaaccagaagttgagacgtattttcttctcagactgctggcttctgtttctagcttctggcatacgctgggtctgact

SEQ ID NO: 198347 - DNA, 201 bp, Homo sapiens
ttggagagacatcttgaggttaggcttcacaactcataagatgtggagaaggcgtgaactaagaaattaaggatcaaagattatccagagatttttttgagttagggggttgaaataccaaaagcatgatccaaaaaaagaaaaaaaattgataaggaattggagctcatcaaaatcaacttttgctttacaaaagaccct

SEQ ID NO: 198348 - DNA, 201 bp, Homo sapiens
gactagaatagtggtggtaaaatagaagaaatgactgagagctgttatgaagagagtatcatcaccagcactgggaggtaggccatttatagaggatcagrgagaaaggaagaagtaaaggtgactctgagatttccagcctggataccgactgaaatgggaagctcttgggggagggaacatagctttactgaaacatat

SEQ ID NO: 198349 - DNA, 201 bp, Homo sapiens
agagctcattggtgatacatgacccttaaagcaacaaaagaggatttagtgctcacagggataaattaagctggaaaggtagaagaaatatgatggaggayattttcaggtagagaaaagaggtaaaggcactcattacacatagcttcaaccagttccgtccagtatgagacagaaaaagtttgatctagaaagatacac

SEQ ID NO: 198350 - DNA, 201 bp, Homo sapiens
gcaaccaagatgtcttgcaataggtgaatggataaacccgttgtacatccagacaatggactattattcagcactaagaaaaaatgagctatcaaaccacraaaagacatggaggaaacttaaatgcatcttgaaagaagccagtccaaaaaggttacatactgtttgattctaaccatatgactgtaaaaagatgatggt

SEQ ID NO: 198351 - DNA, 201 bp, Homo sapiens
atgccctaatcacgcaagaagtaagtggtaaactcaagatttgaacccagacctggtggccctcttctccgtggcagcattgccctgtgacacctactcarcatccatctcctctgcttttttctagtcgctagtaaacctttcccctagtaaaccctctccccctgctcaggttcccaaagtgagcttcagaagcagttt

SEQ ID NO: 198352 - DNA, 201 bp, Homo sapiens
aatttctttttaaaaattaatagagacagggactccctattttccccaggctggtctcgaactcctgggctcaagggatcctcatgcctcagactcccaargtgctgggattacaggcgtgagccactgggcttggcctgaaggtttaaaagtgagttaataacccaaaaaataaaaaaataaaaaaattatatatatata

SEQ ID NO: 198353 - DNA, 201 bp, Homo sapiens
gaccctatagtttcaagctaactccctctcacctctcagtggctactgaccccacaagtccttgcttcctaacaaaatcctcctcccttatccaacttttraggccttcaaaatccttccactcctggcccttctccagttcttctcatggtgttgcagccttgatgaacactagccatccagcccgttttccctgctccc

SEQ ID NO: 198354 - DNA, 201 bp, Homo sapiens
cctagaagctgaagggagcctctctgaccttctggtggcgtccaaggcctaatcatgatatgccttgaggtgaataggggatattagcatttaggttttttgtgcaagagagcgagagttggtctccagttcaagtcaaaaatcccagcttccatttcccactggtgtttgggtggggcaaaatagagcaaatagctttca

SEQ ID NO: 198355 - DNA, 201 bp, Homo sapiens
ggagaccatattgtactgggacaagagaccactatataggctaatccagtagtccagataggaacagatgtggccctggactagggtagtggcaaggaagrtggtgagagtgattcaagaaacatttttgcagtagaattgacagatctatgactcttttgaatgtggaacctctttgttttactgctgaggaaactaagg

SEQ ID NO: 198356 - DNA, 201 bp, Homo sapiens
taagaaaagtccacataggcggtatgtgaatatggccaaactcttgacagtatagaactttaggaagcagatcagtctctaatgtatataatattattagscccatttaatagatgtaggaactgaggcctaggggagttaattagcctgtacaaagtcacacagcaggtaagtgcggaagataggattccaactgagacg

SEQ ID NO: 198357 - DNA, 201 bp, Homo sapiens; identical to SEQ ID NO: 34483

SEQ ID NO: 198358 - DNA, 201 bp, Homo sapiens
aacttctattgatacatgcacaaatctgcatgaacctcaaaggcattatgctgagtaaaaaaataaaatagcctatcttaaaaggttacagactgtttgawtgcatttatatggcattctcaaaaagacaacactacagtgatggagaacagatcagtgcttgctaggtgtgggggagaaaggaagatgtgattgcaaaag

SEQ ID NO: 198359 - DNA, 201 bp, Homo sapiens
tattatttcgggggtctttttttgtacatatttagagggtacaagtgcaggcttcttatatgcatatattgcatggtggtgaagtctgggcttttactggrcccatcacccattatttcgggtattttgatgaaatcaggaacgttcaggatggtattatttcaggtattttgaatgcacaaaattcaatgcctctaaaca

SEQ ID NO: 198360 - DNA, 201 bp, Homo sapiens
aacacccacctaccccagccctacccccgtatcaaactcctgaaaaaaaagaaaaaaaaaaaacagtatacagcaggggtccccaacccccctggggccayggggctggtggcctgttaggaaccgggacacacagcaagaggtgagcagcaggcaagtgagcattaccatctgagctccacctcctgtcagatcaggggc

SEQ ID NO: 198361 - DNA, 201 bp, Homo sapiens
ttgagaggcttaggagggaggattgcttgaggccaggagttcaaaaccagcttgggcagcatagcaagaccccatctctacaaaaaatttaaaaatatttwaaaaaaataaaaatggacaaaagatattaataggcacctcaccaaagaagatatacagacagcaagtaagtgcagatgctcctctgcctattgcagtggg

SEQ ID NO: 198362 - DNA, 201 bp, Homo sapiens
tgaataggtactgagcacctactaggtgtcaggcactactgagggtgctaacagtagagtaatgaccaagacagcagacaaggtccctgccctcatagagstggtgagaggaagccaacagcgagcaaataaagaaacaaacacacaagatgttttctgtgcgctaagtggattgaagaaaataaaacagaatcatgtgac

SEQ ID NO: 198363 - DNA, 201 bp, Homo sapiens
ggccttgatatggcctctggccacctctccagctgcattgctcccctccctgaacttcatcctgtatcctgacctcaaaaactttgcagttggctttatayatcctgctctgttcctgctgcctggaacattcttccctcctttgcccttcaataaaccacctactctgtgaagcctcttatgccctctttttctgcccac

SEQ ID NO: 198364 - DNA, 201 bp, Homo sapiens
atagctttcaaactctaaagcattatacagatgtaaggctgtattattcctcctaccactgctattcccattatcctggatttcccagcccagaatttttstctgagaaaaagaaatgtggagaaggcacatcgaccaaagaacctcggagctctgtctccaaaacggctgggaggcattgcccagcccagcagatagaca

SEQ ID NO: 198365 - DNA, 201 bp, Homo sapiens
tgtctgctttggaggtggtgatgttctgttctgacagtcactttccacatatagacttacagattcaactttcaaaagggtcacttttataccccgccaaratttctgacagagaactacccaagtacaagcatcttggtttacatagatgacattttcatggcactgaccagcaactgtggtcttacacaaggtcatcct

SEQ ID NO: 198366 - DNA, 201 bp, Homo sapiens
tagaagaggaaataaggaattttccttctgcctggcagagctgctgattgttgcataaacaaaccaataatattcaaagagtagttggaggcctctaataygtttaattaagcatttttttcttgtgtgcccgaagtacatgcccaaagcgattgtattgctcatttccctccagcttctagttctaaaatgatcaagggg

SEQ ID NO: 198367 - DNA, 201 bp, Homo sapiens
caagtacacttgtaacccttttattgggtgtctggatccagtctttgggaaaattcccatcagggaatcttgtttcattgtgactctaaaacatattaaaratatacttcttcagttccaaatcttggcagctatgtgactggctctttcaggcctaatctctatagctacacttttctggtggccactataccaggccac

SEQ ID NO: 198368 - DNA, 201 bp, Homo sapiens
aacctagatgtaatgaaaatattcctagaaagacacacaataccaaaactaacaagaaaaaatggaatggagtatctgaatagacctaaaccaagtaaaakagattgaattaataattttttgaattcccacaaagaaaaccccaggcacatatggtttcactagtcaattctactgattgataccaataatggttgattt

SEQ ID NO: 198369 - DNA, 201 bp, Homo sapiens
tcaggacatggtggctcatgcctgtagtcccaactactcaggaggctgaggtggaaggatcacttaagcccaggagtttgcaactgcagtgagctatgatygcgccactgcactccagcctaggcaacagattggagacctcatctcaaaaaaacaaacaaaaaaaaagataatccagaagaaaagcaagtaaaagatatg

SEQ ID NO: 198370 - DNA, 201 bp, Homo sapiens
atagaaaggattataacagaatgcaatgaacaattgtacgtgaacaaattacactacccgcatgaaatggacaaatacctagaaacacactaaataccaawacttaagactcaagaagaaaaagaaaatctgaatagacctacaataattaaacaaattggattagttatcaaaaaaaacctgccaccaaagaaaggcaca

SEQ ID NO: 198371 - DNA, 201 bp, Homo sapiens
tcttgaaggcatgtgtcgttgttcataagaaagtacaggttagagagcagatggcttagtccagctcatgactactattgtaaaatcatccttgcaccatsttcatttgcttaaagctggttgcctttcctctggtgaatgtactccagaggaactggctcacggtgaaccttccagagttggaataatgctgatatgatt

SEQ ID NO: 198372 - DNA, 201 bp, Homo sapiens
tgaatatccttgttaattttctgtcttgttgatctgtctaatactgacagtggggtgttaaagtctcccacttttattgtgtgggagtctaaatctctttktaggtctctaagaacttgctttatgaatctgggtgctcctgtattgggtgcacatatatttaggatagttagctcttctttttgcattgatccctttacc

SEQ ID NO: 198373 - DNA, 201 bp, Homo sapiens
ggcgcccctccctcagcctcgctgccgccttgcagtttgaactcagactgctgtgctagcgatcagcaagactccgtgggcgtaggacccccccaagccakgtgcgggatataatgtcctggtgcgccgttttttaagcccatcggaaaagcgcagtattagggtgggaatgacccgattttccaggtgctgtctgtcacc

SEQ ID NO: 198374 - DNA, 201 bp, Homo sapiens
tcttaaaagaagggggaactttaggggactagatctcaagggttagatccttggctgtaaagactcccttggattgctttttggctgttggctgtagcaayttgttttcttacagagatgaagcatctggtttttgttatctcaatgatgctgtcctgggaatattacgattgcgacggaaatttgagcgtattctctacg

SEQ ID NO: 198375 - DNA, 201 bp, Homo sapiens
gcgtgaacccgggaggcggagcttgcagtgagccgagatcccgccactgcactccagcctgggcgacagagcgagactccgtctcaaaaaaaaaaaaatawataaaataaaataaaaaataaagttggacccttacctcgcaccatatataaaaattaatttaaaatagatcaaagacttaaatgtaagagctaaaactat

SEQ ID NO: 198376 - DNA, 201 bp, Homo sapiens
tgctgtgtcaactgtggtccaaaaatattaaatggaaaattccagaaataaacaattctcaagttttaaattgcatactgttccgaatagcatgataaaayctcacactgtcctgctccctcccacccaggatgtgaatcatccctttgtccagagtatccatgccatctatgctacccgccattagtcacttagtagctg

SEQ ID NO: 198377 - DNA, 201 bp, Homo sapiens
tgaggaacccagactttgctattattaccagcagccagcctgcttcagcaaagaatgggttatgtatgactgtgcctaccgtgtcgctcagttagttaaarccaggtgctaatgaaaccaggacaacaggcttaatcccagtagaattgagttctgtcacatagcagccagtcctggtcccagctgaccatcttgcaacca

SEQ ID NO: 198378 - DNA, 201 bp, Homo sapiens
tccaccttgcagggtggctgtgaagattgaatgcttctgtgtgtacaaagcacctctcataaggtcagtgctcttatcagggctagtaagtgagaaagccrtattttgaacccagatcttgctgactcaaaacctaggctctctgcttcctcacaaagcctttgaaaataccggatcatatttaagcctcacaaaactcca

SEQ ID NO: 198379 - DNA, 201 bp, Homo sapiens
ctatcagtaacacatctacaataatgcctttgtattagttatttcgctctaacaatcattctaagcctagctccaaattctggggtcaccgtactgcagcytagactccgactacacttatttcctttgagttgttttgtcaaggccccatcatagacagactttttttcaacatactgacaatattactgcttctcttgg

SEQ ID NO: 198380 - DNA, 201 bp, Homo sapiens
tggcgtgaacccgggaggcggagcttgcagtgagccgagatcccgccactgcactccagcctgggcgacagagcgagactccgtctcaaaaaaaaaaaaawaaataaaataaaataaaaaataaagttggacccttacctcgcaccatatataaaaattaatttaaaatagatcaaagacttaaatgtaagagctaaaact

SEQ ID NO: 198381 - DNA, 201 bp, Homo sapiens
aaatctattttagtgtattttaattgcttgtaaactaagtgtttcctgtatatgccactgaccatgaataattagaatcatttcaatgactgggttttggraagtgaatgggagagcagacaaaaaggggctgctcagaaacgagagtcatttgttaaagcgtgagtggaagcgttgtctcagccttccccagttttggtt

SEQ ID NO: 198382 - DNA, 201 bp, Homo sapiens
gtttggattcccccttcctacaccacagtccagggattacttccaggtagaaagcctgggtgaaagtagggttcacctcattcgtatcctctgtctttcargaatcagtatcttgtactgtttattgtccaatttctgaaaatagatgtttcctgtaatttgttaattttccagttgtctctagagagaaagtaatctcgc

SEQ ID NO: 198383 - DNA, 201 bp, Homo sapiens
ggaggctgaggcagaagaattgcttgagccagggagtcagaggttgcagtgagccgagatcgcgccactgcactccagcctggcgacagagtgagactccrtctcaaaaaaaaaaaaaaaaagccttgtggaaacacacgggagggaatgaggaactctgactttggggagttagcaaagacttcaaagaggttacatttg

SEQ ID NO: 198384 - DNA, 201 bp, Homo sapiens
cctaaaggccctacccaaagtgcctgtaggatattatcaaaacctagtctgttgctttagtgcagaagtgtgggtgctacctgaaggcagaaaggaatacytataagcttgtacccagtaccaattgtttgggaaccagaaatctaggctgctacatttcaaagggaagtgagaaaattggagcttatgaaagataaatga

SEQ ID NO: 198385 - DNA, 201 bp, Homo sapiens
tgatttcactgaagaattctaccaaacatttaaagaaaaattcacaacaattctacacaatctttcagaaaatagaagaggaggaaacacttcccaactcrctttattaagctagtattatcctgagaccaaaaccagacaaagatagtaccaaaaaaagaaagaccgtatttctgctctcagctttgacatctgaaagac

SEQ ID NO: 198386 - DNA, 201 bp, Homo sapiens
ctgttttaagtgctttagatgcgttatttatctgtatcctcacaacacaacaactattattatccccatttcatagatggcttgcccaagttgacagaatkagtaagtggcagggctaggattcagacccaggcagggtggctctggagtctgagctcttcaccactaccctacacaacctctcttgccaccccactgttt

SEQ ID NO: 198387 - DNA, 201 bp, Homo sapiens
atgaaacaagaagttggttcttcaaaaacatgaaaaaaatttacaaatctctagtaagagtgaccaaaaaaaaaaaaaaaaaaaaaaaaaaaaaaaaaaamcagagaagacacaaatttccaatatcaggaatgaaatgggatcttaccacagcttccacaggtatcaaagcaatactagcaaaatacagcattctatata

SEQ ID NO: 198388 - DNA, 201 bp, Homo sapiens
accattaactgggacagagaacagaagaggaagaaagaaaatactttagtttctgttagagcaatttgagtttgagtcacgaatatacacgtagaaaagtycaaaagcaaatgaatgtgaaagtgtggttctcagaaggaagtcagctcaccactcagcatgtagaaattcatccattctctaatacctatatttctttcc

SEQ ID NO: 198389 - DNA, 201 bp, Homo sapiens
aagaaataagcaaagtatccaaggtctcccaaatagtgagtgacagagtcaaaacttccaagtctagttgtttcccctctaacatgttacctcaaaaatcrtctttaaaaatattttgctttccgtcctactcttaagaagtatttaagaacagaagaaactgtctgtgctcttatttcattgtggactgaaatttgttga

SEQ ID NO: 198390 - DNA, 201 bp, Homo sapiens
tgtttctcctctactatccaatgtatctaaccccagatgctataggacacatttatatcatgatgctacctctggctctgtcctttttgtgtaaggatgcyggatgagtaaacaccttaggttataggaccattcctgaagccattcctacaccattagcagtaagttaactatacacaataagtgattgcaagccacata

SEQ ID NO: 198391 - DNA, 201 bp, Homo sapiens
tcaacagagagggttggggaaagtggtatatgttagaacagtaattcagcagcatgggagaggaagctgaccagagacaagtaaaaggataaacaagaaasctgcaagtgcatgtgaagttggaaaccatggattttggcccatgatactcgtctgtccagtgatacagttttcttcagtagtgacagaacagagaaggca

SEQ ID NO: 198392 - DNA, 201 bp, Homo sapiens
ccttgcccatcatggagattacattctagtgtggaagatagacaataaacaactaaataaaaatttaatgttgtttactgataaattctgagggatgctaytcagtaaagacctctcggaggaggtgacatttgggaacagagattaatgaaatgagggaaggagatttacaaaatttgagttcggccgggcatggtagct

SEQ ID NO: 198393 - DNA, 201 bp, Homo sapiens
gacggtaaagaaaatggcagcaacaggtaggactaactttttcaagaagcttgttgtttaagaaaaaaaatcacaatcaagtgaaaaaaaaaagaaggatrtacaagaatgttcaccttagccttgtttatgataacaaaaaagtggaactgtcctaaatgtccaagaatgaggggatgacaggtcaacagagagggttgg

SEQ ID NO: 198394 - DNA, 201 bp, Homo sapiens
aaataaaaatggagactgctccccaaagttacagtaacttagacagcaacttttaagaaaccatgaaaacccttggcatattactcatgaagacttggaayttctacctaaatctgtgaagtgggaactactgatattgacagggtacagcacaacaccctgtgctgggtacttcacatacatgatctcttttaacctcac

SEQ ID NO: 198395 - DNA, 201 bp, Homo sapiens
aacactggtaagggaactgggtatctaggacacagcaaggacttattcttttacaaaatatccttttctgcctttggaatttttaactaaatacatatatyacttactcaaactttttcaatacaatggttttaaagtagtttatgctagaatgtaacagactttttgcaattattgtcagtatctcctcaactaccttta

SEQ ID NO: 198396 - DNA, 201 bp, Homo sapiens
aacattccaattaaaaattagagattggtcaaatggattttaaaaacataattcaactatatgttgttcataaaagaaatactttaaattcaaaggcacaygtaggttggaagtaaaaggatggcaaaagatatagcatgcatacggtaacaaaaagagagctggtgtggctatactaatagacaaaattataaatatatg

SEQ ID NO: 198397 - DNA, 201 bp, Homo sapiens
tttaaagtagtttatgctagaatgtaacagactttttgcaattattgtcagtatctcctcaactacctttaatctagcctccaaagttagggcgggcaggytaaattggggcccttgtttgccctggtgtctggctctagagtctatcctcttaccagctggttgtaccccccaccccaatgcaagaatgattcaaaagtt

SEQ ID NO: 198398 - DNA, 201 bp, Homo sapiens
tgtataattctaagctagtaggtactgtcgactctgaatacagggtaccatttgaattgtgctcaacactgactctttgggatcctttcctgtgttctgasttctctctggagtacagattttagttggaaggagaggggcatgaatgatctccaggtcctctgaaagatgtgaagtctttcaggtggcttctggtgtatt

SEQ ID NO: 198399 - DNA, 201 bp, Homo sapiens
ctcctccagactgcctttgattacagtgcttcctgtctctctgtatgtagccctcatgagttcttccttgcgtacgcattttgagggggaaaaaactttcyttgtcaagttttcctcacataacctcccttacctctgcattttccctgtgctttaaaacagccacagtagctaagaagagacttcagtatgcaaaatgag

SEQ ID NO: 198400 - DNA, 201 bp, Homo sapiens
tctttctttctttctctttatttttaagagacagagtcttactccgtcagccaggcttgagcgcagtggtatagtcatagcttactgcagcctcaacttcytgggctcaagcgatcctcccacctcaccctcccaggtaaataggactacaggtgcactccaccatgcctggttaattgttttattttgtagagacaagct

SEQ ID NO: 198401 - DNA, 201 bp, Homo sapiens
tttccttccttcctttcattcgtccattcattcagccatttactgagcacctactatgagtgaggcactgtgcaagactttggaaatcaaccaaaagtaaracagccaggccctgccctcagggagcattgtttctgtttcagagaagtggccagtagggtttggagcccagtgtttctacttggggaagtgtggcaaggc

SEQ ID NO: 198402 - DNA, 201 bp, Homo sapiens
gcacctataatcccagctacttaggaggctgaggcaggagaatcacttgaacctgggagatagaggttgcagtgagctgaaattgtgccactgtactctakcttgtatgacagagtgagactctgtctcaacaacaaaaaaaaaaggaagcaggtagatcttcagtgaaagagagccgaaaaagtgtaatttactccttta

SEQ ID NO: 198403 - DNA, 201 bp, Homo sapiens
ttagctaggtgtgggattataggtgcgcacctataatcccagctacttaggaggctgaggcaggagaatcacttgaacctgggagatagaggttgcagtgagctgaaattgtgccactgtactctagcttgtatgacagagtgagactctgtctcaacaacaaaaaaaaaaggaagcaggtagatcttcagtgaaagagag

SEQ ID NO: 198404 - DNA, 201 bp, Homo sapiens
aatgtaaaactgagctgggtgtgatgacatatacctgtagtcccaactacttgggaggctgagatgtgaggatcaattgagcccaggaggtcaaggctgcmgtgagccatgattgcaccactgcactccagcttgggcaatagagtgagaccctgtcttaaaaaaaaaaaatggtagtgaagtacattctagatgaagaga

SEQ ID NO: 198405 - DNA, 201 bp, Homo sapiens
attgcttggaaaggggaagtccagttatagttttccatgagtttgaaaaggaacccccaaacttcacttggggccaaagttctacctcatcttgtaattaygagattagagaccagaggttcgtattacttttattcctcagcttgttagttttatattgctgccttctcatctaccctccttctcacagctgctttctag

SEQ ID NO: 198406 - DNA, 201 bp, Homo sapiens
attctgctggttatttttgcttctgtggggccagtggtaacattcccttcatcatttctaattgtgtttatttggatcttctttcttttcttctttattartctagctagcggcctatcttattaattttttcaaaaatctaacttttgcattcatcaatcttttgaaaggtttttcatgtctcaatttccttcagttcag

SEQ ID NO: 198407 - DNA, 201 bp, Homo sapiens
ctaggattttgctttgtcttccgtctggattgcaggagctccttgcctgcacctctattatggttcttcccacagtgcattataattgatcatttgcatarctgtatctccattcactccttgagggcaggggccaagtcttgtgcatctcttcatgaccagagcctggcacacaggagtgctcaagaaacattggtatca

SEQ ID NO: 198408 - DNA, 201 bp, Homo sapiens
tatatgcatatgaaaatatcttagagggaaataaaacacaatgttaacagtggctttgtgaggatggtgatattgggtatgtgatacacatatatatatatgtatatatacgtatatatacacatacatatatatatttttttttttttctaagacaagagtttcactctgtcacctaggctggagtgcagttgtgcaatc

SEQ ID NO: 198409 - DNA, 201 bp, Homo sapiens
atatatgcatatgaaaatatcttagagggaaataaaacacaatgttaacagtggctttgtgaggatggtgatattgggtatgtgatacacatatatatatatgtatatatacgtatatatacacatacatatatatatttttttttttttctaagacaagagtttcactctgtcacctaggctggagtgcagttgtgcaat

SEQ ID NO: 198410 - DNA, 201 bp, Homo sapiens
tctccgctccacacataccagctgcatgacttctgtcaagttatcctactgtcctgggcttcagatcctcagcttcaaatggaaacaatagtagtacctaytgcatgggttggttgtgagaattaagttagtcaatctattaaaaatgcttagacactttaggtgcctgacacataataagcttgtaatacgtgtagtatt

SEQ ID NO: 198411 - DNA, 201 bp, Homo sapiens
gaacataccaagatagaccacagcagaaaatggtggagtaggcaaccacaagctcctgttaccccacagaaacacaggaaaataagcagaaactgtcagamacaactttgtcagaacagaactctagaaaacaatcaaaggtttacagcaactgagcaaatgccaaatcaaaaaaaaagtcaacttaaaacttattagaaa

SEQ ID NO: 198412 - DNA, 201 bp, Homo sapiens
ggcatccacatccctgccccccatggtaccctcagcctggtaaaatagctcataatctcctttgggatcatggtcccttttgaaaatctgattccgactgktcttatattacttaaatattagggtggcagcttcctgtctccctaaagaaagccaagaacttttgtccctagaacatgggatcttgttaaatccagtata

SEQ ID NO: 198413 - DNA, 201 bp, Homo sapiens
ggaggcggagcttgcagcgagaggagatcgcgccacggcactccagcctgggcgacagagcaagactcctctgtctcaaaaaaaaaaaaaaaaaaaaaaaagaatgcaaattccttgagagcagagatcacatcataatttacctttgaatcctcagctgtactgtacacttaatatcagataaatgtttgatgaatgaat

SEQ ID NO: 198414 - DNA, 201 bp, Homo sapiens
gaatagatgacagagaatgcagttagacataaaccatttgcaaattatatgcaagtacacttgtaacccttttattgggtgtctggatccagtctttgggraaattcccatcagggaatcttgtttcattgtgactctaaaacatattaaagatatacttcttcagttccaaatcttggcagctatgtgactggctctttc

SEQ ID NO: 198415 - DNA, 201 bp, Homo sapiens
attcttaattttaaaaagaggatagtctcagatcaataattaaactgcaaccctaataaaatagaaaaagaagggcaaaataaaaccaaagcaagtagaargaaggttataataatgaacagaaacaaatgagattgaaaacagaataataataaattcaatgaaacaagaagttggttcttcaaaaacatgaaaaaaatt

SEQ ID NO: 198416 - DNA, 201 bp, Homo sapiens
acatcatgctcactgcaaggcagcctccctcctcccaaatccctgcatccctgaaccatttgtaatagatattcagaagtcactgaggcatttaccatatsctgcatcccctggcaggttgagttgttgcagaatgagtcagcagtacctgagctcagataggattgagagaatttagagaaaacatacctatggaaagtt

SEQ ID NO: 198417 - DNA, 201 bp, Homo sapiens
ttatccaccaagcatttttgtatgtgttatccttttatcttcacataagtcccataaagttccccattttacaaataagaaaactgaactacagaacagtygacttatctgaggttatagagctagtaagtacagaattaggacaggaacccaattctctgactccaaatctgactccaaattcaaaatgcatgataacat

SEQ ID NO: 198418 - DNA, 201 bp, Homo sapiens
cactacatgcccagcttcttccatgtggctaatcctaaacactaaactccctggaaatgggaagaagacagccttgggcaacctttgaaattctggccccygacataggctttgtagccctccctaggccccgccccctcccccaccatagtgtaatctgaagcttctagctccctttccctagtagagaaggaaaagaaa

SEQ ID NO: 198419 - DNA, 201 bp, Homo sapiens
agcaggaactggaaccctggccgagtccgaaaaaagccagatctggaaggtggctgcggaacggttttaagcggaagatggaggagccggaggaaccggcrgacagtgggcagtcgctggtcccggtttatatctatagtcccgagtatgtcagtatgtgtgactccctggccaagatccccaaacgggtaagggaagtcg

SEQ ID NO: 198420 - DNA, 201 bp, Homo sapiens
cattcttgaataagaaactcccattcacacaattagccttgagaatgtagatagaagtttaagcaaaactgtccttcaagtctgtgcagtctgtccttccycctccagactgcctttgattacagtgcttcctgtctctctgtatgtagccctcatgagttcttccttgcgtacgcattttgagggggaaaaaactttcct

SEQ ID NO: 198421 - DNA, 201 bp, Homo sapiens
caaagtcagacgttatgtactgatcaattgattgagacggtataacaatcataaacacatatacaccaaacaacagagccttaaaatatatgaagcaaacrctgaaaaaattgaagagagaaatagttgtacaataataggtacagagaataatagtacagagaatcaaagccaaaatttgtttctttgaaaagatcaatg

SEQ ID NO: 198422 - DNA, 201 bp, Homo sapiens
gagatttcacaaagatttctaaattgagttagaatttcaagtctattgtgacatgcaaattagtcctgcttgcccattggcagcaatgcagctgaagtgcmtagagacgggccataaaatggaaacatcaaagtgattaaatgtgcccgaagagcataattgagtgcatgaataagagaaaataaaacaaattgattttct

SEQ ID NO: 198423 - DNA, 201 bp, Homo sapiens
ttttcacacaatttcttcctgtgagcctcatagacaaccctttaaggttggtggggtgggaactcatgccccatttgaccaacgtggcgacagagccttgmagaattaagtgttggtggaaaccaggcccctgatcgcagtgctggggacctttcctactactccgtgctgcctgctgctgagccagcctttcccctgtgc

SEQ ID NO: 198424 - DNA, 201 bp, Homo sapiens
ttaaagagactatttctgcttttctttttttttttttacgctgatgtttttaggccagtatggtgcattctttgattgaagcatatgcactgcataagcaratgaggtaagttgtctttcttgaacatagccctgaagctaggtgttcgtagccttaatatcctgcttcacagtggggcaaggaaaagaatggtcttttga

SEQ ID NO: 198425 - DNA, 201 bp, Homo sapiens
tagaggagtacaacaggacaagggcacaggaaggtgaggagactctgcctcttcaaaggaaattagcagaatgcatggaaaagaagcaaaaaaaaaaaaaraaagaaagaaagaaaggaatcaaacatttattgagcacctactatttaccaggtactttactagttgctttcacaggacttatttcatttaatcctacaa

SEQ ID NO: 198426 - DNA, 201 bp, Homo sapiens
tccttatggcgaggtcacagagttcccaagagcagcagagaataagccccaaaatataagtgctttttaaaaaatagctctattggggtataattcacatrcattacctgactttgaattttgttttctcccctgtttgcagggaatctgaagcatgtggtctagttgacagaaagagatcaggtttccagagctgaggag

SEQ ID NO: 198427 - DNA, 201 bp, Homo sapiens
tcttggcctctctaggcagttgagtctgcccgctgtggtctgaacttcttgtctccctaggccccagcctgtgctagcctttagaattttctcaggctgcyacccactgctggaaaagctagatgtgaggggaaaacaatgggcattatttaagcttgcatttttattgttaccccaattcaacattgctcatcatcaact

SEQ ID NO: 198428 - DNA, 201 bp, Homo sapiens
tggggtttctggttaattgaattttctggcttagtggacagttatactagacagactttttttgttctatccatgttctttaacctctttttaaaatgtaygtatacatttttgccttagtaagcacagtggactgaacctgattgaatcttgctatcactaaaagttacacagtgtttctgtactctgacttctattgaa

SEQ ID NO: 198429 - DNA, 201 bp, Homo sapiens
taattaaacctcttttctttataaagtacccagtctcagatatttctttgtagcaattcaagaacagcttcatacacagtacattattgttgttgttgttkttgttgttgttgttatttgagataaggtctgactatgttgtcaaggctggtctcaaacttctgagctcaagtgatcctcctacctcaacctcccaagtag

SEQ ID NO: 198430 - DNA, 201 bp, Homo sapiens
tcttttgctaaatttattgctaggggccggatgcaatggcttatgcctgtaatcccagcactttgggaggcccaagcagtaggatcacttgcggtcaggarttcaagaccagcctggccaacatggcaaaaccccatctctactaattgtacaaaaattagccgggcatggtgatgcgcgcctatagtcccagctattcgg

SEQ ID NO: 198431 - DNA, 201 bp, Homo sapiens
aagtcataagggaggccaatctgggaggcgtaggttgataaatctatcccagttttgaagaaacagcccaaaccttctttctctctgtgctgggtcaattrcatcattgtcactggtttggctcactatgctgttatgagtaccctaaaatgcagaactatgtccactgcctcctctgttttatatcctattagctcagga

SEQ ID NO: 198432 - DNA, 201 bp, Homo sapiens
ttccaggagcctactgccagcttgggcttcttcatcaagcaagttcctctctttcttgtttcactaaagagtataagagatggaaaggcttcttgtcatcrttgttattgctgttgttaaacagaaaaataagttacaaaaatgtcatgctgaaaattttaaaaattctgggccgggcgccatggctcgagcttgtaatcc

SEQ ID NO: 198433 - DNA, 201 bp, Homo sapiens
tcaatctcgctgcttgttactggtctgttcagagatgctttatgttcctggtttaatgtaggagggttgtatatttccaggaatttatccatctcctttargttttctagtttgtgcacgtaagtgttcttagtagcattgaataatctttggtatttctgtggtatcagttgtaatatctcccatttcatttctacttga

SEQ ID NO: 198434 - DNA, 201 bp, Homo sapiens
tatatatgtaaactaacaagaaaattaaaatggtacagtggaagatatctatttaataaaaaaagaatgcagtaatggaggaatcgagcaacaaaaaagcytaagacatggagaacaagtagcattgtggcatacatagactatgccttatcagtaattatattaaatgtaaatgattaaacattccaattaaaaattaga

SEQ ID NO: 198435 - DNA, 201 bp, Homo sapiens
ctcatcttatagagagataaagagaagtatttatagatgaactgtatctggatgctccagaggaggaaaatgtatatggagggtggggagggagggggacrtgggtaaaacaaaattttaaaatgttgatcactgttaaagtggattgaatgaaaatatgggagttgattatatagtctctctggttttgtggtttttcaa

SEQ ID NO: 198436 - DNA, 201 bp, Homo sapiens
agttatcaaaaaaaacctgccaccaaagaaaggcacaagactagatggcttcactgcttaattctaccaaatgtttaaagaaaaatcaaatgcaattcttycactttctttccaaaaaatgaaagaggaaggaacacttcctaataattctatgaggctgttattatttacagatttcaaaacttactacaaagctacagt

SEQ ID NO: 198437 - DNA, 201 bp, Homo sapiens
aagagaccactatataggctaatccagtagtccagataggaacagatgtggccctggactagggtagtggcaaggaaggtggtgagagtgattcaagaaayatttttgcagtagaattgacagatctatgactcttttgaatgtggaacctctttgttttactgctgaggaaactaaggcacagagaggccaggttgataa

SEQ ID NO: 198438 - DNA, 201 bp, Homo sapiens
aagcctctcccttcacttactagctgtgtgaccttggccaagtaactccctctctctgagccttagtcttattgtctatcaaatggcgacacttacctgtrcctacctcatgggggtggttgcgagggaccaaagagataatgcagaaaagcatgtagtagagcgcatgttatatattagtagtagacactgttcttgctc

SEQ ID NO: 198439 - DNA, 201 bp, Homo sapiens
gattacaggcgtgagccactgggcttggcctgaaggtttaaaagtgagttaataacccaaaaaataaaaaaataaaaaaattatatatatataaatatatrtatatatatatttgtatatatatatttatatatatttataaatatatatatatatatatcaaggtgactattaatacagctgttaagtagatataaaaac

SEQ ID NO: 198440 - DNA, 201 bp, Homo sapiens
tctccttggcagcattgctctgtcaaatctgctcatcatcccgtctgctctttccgatcgcccctagtaaaccctcctacctcacactacatgcccagctycttccatgtggctaatcctaaacactaaactccctggaaatgggaagaagacagccttgggcaacctttgaaattctggcccctgacataggctttgtag

SEQ ID NO: 198441 - DNA, 201 bp, Homo sapiens
ggcctattttggggtgagtgagaccacgggcctcaccccggaccaagttaagcggaatctggagaaatacggcctcaatggtaagtgtcccttggaagagmggctggtaattaatgccctcctgcacccccaaaacacacgcacacgcatgcacgcgtttctcccttcagggtttcttaaggaagagctgggccgttgtcc

SEQ ID NO: 198442 - DNA, 201 bp, Homo sapiens
agacatccgaatcctcgccatcaaatccaccacgctgcgggttgaccagtccatcctgacaggtctgctggcctgggtgggaagatgcatgggggtgggaygtggggaggaagaggcaacaagggggaggtgagtggaaagacagagaaccctcactgtctgagcaacataaagagaccctgtctctacaaaaaaatttta

SEQ ID NO: 198443 - DNA, 201 bp, Homo sapiens
aggaggaaagggttggaggaaggggacccagtacacccagccctctgccagggtgcaagggaggcagtggtttgcttccttcttacgctaggtggaaggasggtatgacaggtaggagcctggggcaccgacttcctcttcctcctctgcccatctcaggccaaaggtgtctatgagaaggtcggcgaggccaccgagaca

SEQ ID NO: 198444 - DNA, 201 bp, Homo sapiens
tcactgacctttcaccctgactctcatccagcctttctgcctgcctgtcctccccttcctgcacccctggtaccctccctcggctcctccagcagctgccytggtggtaaccaagagacgcccccatcctggagcaggggtggggaggggcagctcagagcagctgcttctctgaggaagctgacaccaaggccagcattc

SEQ ID NO: 198445 - DNA, 201 bp, Homo sapiens
aaataatatacagagtacctccaatgctccacagcaattgctcagttgcaccaattgtacagtgcagatcacataacatttctatcattactaaaagttawagggccaggtgtggtggttcatgcctgtaatcccaatgctttaggaggccaaggcaagaggattgcttgaggccacgagtgagaccaggctggacaacac

SEQ ID NO: 198446 - DNA, 201 bp, Homo sapiens
cccccgcttctctcctgtcccatcccatcctgtcttgtccatgtccccagctcactctccctggctccccgcctccctgcctccctgagatgctcagaccrggctgtcaggttcccgatatgtggtcctctccatgaccaccctgtgccccccgctgccttgagtcctgcccactcataccttccgctcactcctctcctg

SEQ ID NO: 198447 - DNA, 201 bp, Homo sapiens
atggtacaagcagaggctcgggagaggctcccgtcacacactacaggtcccctccccagggcaggggatttgggctccatgagctccttgaggggctcttytggtcagccccaccctgggggccatttccccattaactacccccagcccgaggcagggtgagggggaagggctgtcagttacattaaggtggttgttgtt

SEQ ID NO: 198448 - DNA, 201 bp, Homo sapiens
ggtggtctctgaatgctgttctggtctcctagggtgcccctgagggcgtcatcgaccgctgtaactatgtgcgagttggcaccacccgggtgccactgacrgggccggtgaaggaaaagatcatggcggtgatcaaggagtggggcactggccgggacaccctgcgctgcttggccctggccacccgggacacccccccga

SEQ ID NO: 198449 - DNA, 201 bp, Homo sapiens
catttattgagcatgtactatgtgctgagcagtacacctgcccatcccttctcagggctcacagccagtgggaagagatgtgggagttcaagaccagcctragcaacagagcgagactccatctcgccgtggacacgggggcagaagggatgggtgtcacgatgaggggttgccagcttcaggagctcaagccaagggcct

SEQ ID NO: 198450 - DNA, 201 bp, Homo sapiens
ttgatggtacaagcagaggctcgggagaggctcccgtcacacactacaggtcccctccccagggcaggggatttgggctccatgagctccttgaggggctyttctggtcagccccaccctgggggccatttccccattaactacccccagcccgaggcagggtgagggggaagggctgtcagttacattaaggtggttgtt

SEQ ID NO: 198451 - DNA, 201 bp, Homo sapiens
tgacccttgttggccaagggcatctttgatggtacaagcagaggctcgggagaggctcccgtcacacactacaggtcccctccccagggcaggggatttgkgctccatgagctccttgaggggctcttctggtcagccccaccctgggggccatttccccattaactacccccagcccgaggcagggtgagggggaagggc

SEQ ID NO: 198452 - DNA, 201 bp, Homo sapiens
caggagaatcgcttgaacctgggaggcggaggttgcagtgagcagagatcgtgccactgcactccagcctgggcaacagagcgagactccatcccctgcgccccccccccccccgaaaaagacacaatttggggccacgtgtcagggctcacacctataatgccagcactttgggaggccaagcctggcagatcacttgag

SEQ ID NO: 198453 - DNA, 201 bp, Homo sapiens
gagcatgtactatgtgctgagcagtacacctgcccatcccttctcagggctcacagccagtgggaagagatgtgggagttcaagaccagcctaagcaacasagcgagactccatctcgccgtggacacgggggcagaagggatgggtgtcacgatgaggggttgccagcttcaggagctcaagccaagggcctgatgcaag

SEQ ID NO: 198454 - DNA, 201 bp, Homo sapiens
tcgtaagtgtgggagggtctctgggggctggctgggggtgtgaggctgggatcgggcgaatgcggggctcgcagtcactggatcctcccgtccgagtcccragcatcccattgtacagacggggcgggctggcgcgcagcagcgggtgtgattcgcgtcctcctctctcctcccctgcaccccagaggcaggttttatttt

SEQ ID NO: 198455 - DNA, 201 bp, Homo sapiens
cggcatgagggtcacctcttgcctgattccctgcctcctctttcccttcccagggcaccaacattgcagccggcaaggccttgggcatcgtggccaccacyggtgtgggcaccgagattgggaagatccgagaccaaatggctgccacagaacaggacaagacccccttgcagcagaagctggatgagtttggggagcagc

SEQ ID NO: 198456 - DNA, 201 bp, Homo sapiens
acatgcttttctcggtgagcaatccgggaccagccatcacacactcagtcaagccaggtgcccgggttggagagaaacatggcgtgtgagaagagatggcrtggggagatgcggcatgagggtcacctcttgcctgattccctgcctcctctttcccttcccagggcaccaacattgcagccggcaaggccttgggcatcg

SEQ ID NO: 198457 - DNA, 201 bp, Homo sapiens
atctgtgtgcctgcccttctcccctgcagatgtttatcattgacaaggtggatggggacatctgcctcctgaatgagttctccatcaccggctccacttamgctccagagggagaggtgtaagtcacccaggcatcttctccccagctcctcacgccccttcccacaccccctttctccctggggccctccatgtggtttt

SEQ ID NO: 198458 - DNA, 201 bp, Homo sapiens
caatttttcaaaccacacagactttaaaataattgtagaatataatttcacaacattttgttctatttgttattgtcttctatcttgtccatctatccatyctgtcttcttctagtgtctttttttatgcttttcaaagtaagttgcagttgttagtataccacacccttaacttgagcatgtatgttaactaaaacttag

SEQ ID NO: 198459 - DNA, 201 bp, Homo sapiens
ttagtaggtaaataagaaataaacataccttatttaaaaaaaaatttcaaagaacccaagggaggggagagccaaggtgcacattagaaggagattacagwactcttccagtgcacagtggatgtgttgtgattccagagttctatgtatgtatgactgtgtagcccagatttaccagcatgggctcagttttaaatgtta

SEQ ID NO: 198460 - DNA, 201 bp, Homo sapiens; identical to SEQ ID NO: 34504

SEQ ID NO: 198461 - DNA, 201 bp, Homo sapiens
aaattaaagtaattctgatgatttggtatttctaaagattttcatagatgacagttgagaactactctcagatgagattcttccattgctggtaagtcatstaataaaacacttaagtaaatattttaatgaggaatgataacattttaatattggcacattgtgagtctaccttctgtagttagtaggtaaataagaaat

SEQ ID NO: 198462 - DNA, 201 bp, Homo sapiens
tgcttgattattctgaatggtaggtaaaaggataggaaatttattattttctgtatgttttaaatatctcaaaaataaatgtttttaaaggaaaggcacaytatcgtacaacatttatgttgaaaaggaccatgaagatcatttcatccaaccttcttactttacagtgcagccaaagaaagttaccagaataagagtaaa

SEQ ID NO: 198463 - DNA, 201 bp, Homo sapiens
ttttgttgtagataatgtctctgggtctttggttttctcattcagtttgctgtttttgtaggggaggttgggagggaataaaacaaaaaataataataatmataactatgtcgttgccatcatcatctttccagaacctgctacctgcccttcacctgattttcgtatttatcagtatcattaccttaatctgttatctca

SEQ ID NO: 198464 - DNA, 201 bp, Homo sapiens
ccattgagtatgatgttagctagctgtgggtttgcttcaagttgaggaaattcttttattaaacctagtttactgagtgttttttaatcaaaaaaaaaaaaggaggggctgtgggttttgttaaatgcttcttctgtatcaagattttcatgttgttttgtcctttattaatatgttgtattaatggacttttgtatattg

SEQ ID NO: 198465 - DNA, 201 bp, Homo sapiens
taagtaaatttcacatccttgttttatacttttactatacatgtgtacatgtatctgtaagtgatatgtggtgttggtttttgtattaaatttttacagayatgtataacgctgtctttcaatagcttgatttttttaaactcagtatcaagtttttgaggtgtatatgttgatgcgtgtacatgtagtttattcagtttc

SEQ ID NO: 198466 - DNA, 201 bp, Homo sapiens
taatattggatttttgtatttctattgactatagatattttcttaaaatatagcagtatgtcttatccttagttttgcttttttttggtttcagttatctktggtcagcagtggtccaaaaatatttattaagtagaaaattccatgaataattcagggtttttgatgtatgtgtgtgttggcgggtgcagggcagggaga

SEQ ID NO: 198467 - DNA, 201 bp, Homo sapiens
aaaatatgcccttgtgctttctgaaactgccttctttactcctctatcccacacatatatttgaacttttttttggtttttattactgacctggtccattyggaagttattcccagaagtttttcctcggtacaaggtttgtttctggtgggggtttggtattcgggtgttttaagggcccagagcttactacatcatgat

SEQ ID NO: 198468 - DNA, 201 bp, Homo sapiens
attcttatttttatttaagatgtgctcatttctttctgaatttgtatttctcatcactggtggtctgtcttgtctgctgctgcattctccttttgtgttgkaatgtggtgttactagtttcccattgtttatgactgaatttttctggtctacttttgtctaccggaaagttttgcttctcattcgccagactcttcccat

SEQ ID NO: 198469 - DNA, 201 bp, Homo sapiens
atccatgtactagatacagtatccatccatgtactggatacagtcatactgttagcaaattttagatacataaagtaaaacaaacaaaatgcagtataaamagttaatattggaatctagtgttgattttatgattaatctcaatgaggttactgtatattcataattctataggtacacaaaaatatttggtaaaagatt

SEQ ID NO: 198470 - DNA, 201 bp, Homo sapiens
gcatatagcaggtgcatatttaactaaaagtgtcttttcctcatttttaatattggatttttgtatttctattgactatagatattttcttaaaatatagyagtatgtcttatccttagttttgcttttttttggtttcagttatctttggtcagcagtggtccaaaaatatttattaagtagaaaattccatgaataatt

SEQ ID NO: 198471 - DNA, 201 bp, Homo sapiens
cattgtttatgactgaatttttctggtctacttttgtctaccggaaagttttgcttctcattcgccagactcttcccataataactttatttagacttccraattctgtttttcttgtttatgtttctataacagatgttacttttttctggacctgttattactagacctcatggtggagcagggaggaattgtgtggct

SEQ ID NO: 198472 - DNA, 201 bp, Homo sapiens
attcagagtttatttccttcccaaatacttcatagatgttggtttgtaggaataacttaaaagtctcactcgctttctgtcttttctagtaatttttatcrtggattctgattgcctagatctgctaattcattgagggttacaaaattgtgatactcgaattctttattcctccttcctttattacctgtaatacttctt

SEQ ID NO: 198473 - DNA, 201 bp, Homo sapiens
acaagtatcaacctacacagtggttagggcaaataaaaatgagggggagaaagtaatgaatggcaccaatttttttagtccttaaccaggacagtgagatkaggcagagtgagttctttgggaaaataattgagtttgatattagatacgttgaatgtagatgttaatgagacatccaaatggatgtgtaccgttggtaat

SEQ ID NO: 198474 - DNA, 201 bp, Homo sapiens
agcctggccaacatggtgaaaccctgtctctactaaaaatacaaaaattagctaggcgtggtggcacacgtctgtaatcccagttacttgggaggctgagrcacgagaatcgcttgaacctgggaggcagaggttgcagtgagctgagatcacaccattgcactccagcctgggcaagcaagatttcatctcaaaaaagaa

SEQ ID NO: 198475 - DNA, 201 bp, Homo sapiens
aacagtcttgctctgtcactgaggctggagtgcagtggcgcagtctcagttcactgcaacctccgcttcctgggttcaagtgattctcctgcctcagcctyctgagtagctggggttacaggtgcacaccactacacctggctaatgtttgtatttttagtagagataagggttttgccatgttggccaggctggtctcaa

SEQ ID NO: 198476 - DNA, 201 bp, Homo sapiens
ggcttcccaggatcaagcactttttgagtgaaatggtagtcttttatttaattcttaagataatatgtccagatacatactagtatttccattttacaccytaaaaaactaagccctgaattctcacagaaagatgtagaggttcccagttctatctgcttttaagcaaatgcccttactactctactgtctacttctgtg

SEQ ID NO: 198477 - DNA, 201 bp, Homo sapiens
tcagtacttccacatttttgctgaactggatacagtaggcagcttaccaaatattctatggtagaaaacttgggacttcctggtttgcttaaatcaaatayattgtactctcttaaaacggttggcatttataaatagatggatacatggtttaaatgtgtctgtttacatacctagttgagagaacctaaagaattttct

SEQ ID NO: 198478 - DNA, 201 bp, Homo sapiens
tgtacccatgtttctgctatttccattattttttccaagattccatcttttattacttccattagccagtcttcaaaggcagttctgctagtgagaaattmtttttgtttttctctttctgaagatgactttattttccctttattcccaaagaatagttttatttgtgctatttggggttcgctcagcttcttgaagctg

SEQ ID NO: 198479 - DNA, 201 bp, Homo sapiens
ttttatattgtctttcattgtgaaacatatattatagcagaggtgggagtcattaaaaattctacatgttgtacactacatgtataagggtatatttggcrcaatggaggtaggattgtctgtgtgcctctaaaattaacctctcaagtagttaatctgatgatgacaagtatgtcactttattgataaaagggagaatta

SEQ ID NO: 198480 - DNA, 201 bp, Homo sapiens
ttattgtggtaacggacaggaataataactacattttacaggtctaatcattgctaattagaagcagatcatatgccaaaagttcatttgttaatagattsatttgaactttttaaaattcttaggaaaaatgtattaagtggtagtgaatctccaaaactaggccacaacatctatttaagttatagaataactggacta

SEQ ID NO: 198481 - DNA, 201 bp, Homo sapiens
ttccttccctcccactccttggcaatcaccgatccttttactgtgtctctaactttgccttttccagcatattatatacttgtaatcatacagtatatagycctttcagcttgactatttttacttactaatatgcattaaagtttcttccatgtcttttcataggttgttagtacctctctttttccattttctggacat

SEQ ID NO: 198482 - DNA, 201 bp, Homo sapiens
ggaaacgcttgaacacgggaggcggaggttgcagtgagccaagatcatgctactgcctggcgacagagtgagactgcctctcaaaaaaaaaaaaaaaaaaactttttagaaacgttgttttggggaatttttagtgtgtgaattcattttaaatatgtgaactccatttgacatggacaatggatcttaatagtttgtgat

SEQ ID NO: 198483 - DNA, 201 bp, Homo sapiens
gggaaacgcttgaacacgggaggcggaggttgcagtgagccaagatcatgctactgcctggcgacagagtgagactgcctctcaaaaaaaaaaaaaaaaaaactttttagaaacgttgttttggggaatttttagtgtgtgaattcattttaaatatgtgaactccatttgacatggacaatggatcttaatagtttgtga

SEQ ID NO: 198484 - DNA, 201 bp, Homo sapiens
ctctggcacatgcattacttcattccttggtcccagcccaccaccccagtatctggcacgtagtgtattagtatttgtgtgtgtgtgtgtgtgtgtgtgtstgtgtgtgtgtgtgtgtgtatatgtatatagaatttaaaatttttactccggcagttgtcttcaaatactctaattttggggggcatgattatcattctg

SEQ ID NO: 198485 - DNA, 201 bp, Homo sapiens
agtacaggacccacaaagacaagaaagatgtctgtcttttttgaatgcttatagttgagtgactttctcacatttgtgtgtgtgtgtgtgtgtgtgtgtgtaaaaccctatcacataatggaacttcattttcccatgcccttccaatctaagagcagttctatggactcaatacctcctacccaccagctgctactgtaa

SEQ ID NO: 198486 - DNA, 201 bp, Homo sapiens
aagtacaggacccacaaagacaagaaagatgtctgtcttttttgaatgcttatagttgagtgactttctcacatttgtgtgtgtgtgtgtgtgtgtgtgtgtaaaaccctatcacataatggaacttcattttcccatgcccttccaatctaagagcagttctatggactcaatacctcctacccaccagctgctactgta

SEQ ID NO: 198487 - DNA, 201 bp, Homo sapiens
cctttcatgcatggtgccttcctgagcctgccattgctggacccaagtacttttctgtagtccttcctttaaccaccctgttgccagtgctctaacctacmctcagtagtgctctgttgaggggcaggtggtggagggggtggggtctggccttgggtgatccctaatcagtatgattccgcacaagccactcttcgatgt

SEQ ID NO: 198488 - DNA, 201 bp, Homo sapiens
gtcaggagttcgagaccagcctggccaacatggtgaaaccctgtctctactaaaaatacaaaaattagctaggcgtggtggcacacgtctgtaatcccagytacttgggaggctgaggcacgagaatcgcttgaacctgggaggcagaggttgcagtgagctgagatcacaccattgcactccagcctgggcaagcaagat

SEQ ID NO: 198489 - DNA, 201 bp, Homo sapiens
taagtttttgttttgggaattgaaaaaatcttttgtgcatctatggtatgtgatacgtatactaatggataaatcctgtttcacacaaagattaattgggyaacatttttctttcctagttttctgaagtcagtggtcatgttgtgtgttggtgattgaaaatatgctgtttaggctgggcgccttggctcactcctgtaa

SEQ ID NO: 198490 - DNA, 201 bp, Homo sapiens
cttttcatgtaatgaaatcagaagggatggcttttccatttcaagcttctgttaataagtagtcttagaattgcctttgtgtactgtagccaacaccccamctcatatatttttataatctttgtgatgcagaataaattctgaaactttccacctcctaattaaatatagaaatactgaaaacaataaagcaccatgtat

SEQ ID NO: 198491 - DNA, 201 bp, Homo sapiens
aacctcatgattaaggtctttatcacagaacaaataaaaattacatttaatttacacatgtatatcctgtttgtgataaaaatacatttctgaaaagtatwctttacgtcagatttgggtttctattgactaaaatgtgttcatcgggaatgggaataacccagaacataacaagcaaaaaattatgacaaatatatagta

SEQ ID NO: 198492 - DNA, 201 bp, Homo sapiens
cctttttcacgctgctgataaagacgtacctgagactgggaaaaaaaaaagaagtttaattggacttacacttccacatggctgggaaggcttcagaatcwtggcgaaaggtgaaagacacttcttgcatggcagtgacaagagaaaatgagaaggatgcaaaagcggaaacccctgataaaaccatcagatctcgtgaga

SEQ ID NO: 198493 - DNA, 201 bp, Homo sapiens
gctgtaccagacctgttgtgttaatctgatcaatggcaagtgaatcataagattgacctgaaaggaaaagatatttttaggggacatagaatcatattggrtaagattattcctatagttcattttcaggaaatctgaacaggaatctcgtgtaaggaatcacatgtgaattatagaagagagtctgatgtaagactttat

SEQ ID NO: 198494 - DNA, 201 bp, Homo sapiens
gctccttatttttaaacttaaagtgacaatgacattttcaaagattttaaaattcttataaacaggttaaaatacttatatactgtataatttgatttctratttctaagctctacttttctattggaaattacagatttttttcagacttaattcttaagatgttttcattgtttcacagtagcaactaaacatgtagta

SEQ ID NO: 198495 - DNA, 201 bp, Homo sapiens
cctctccctttcctcactttcttttcccctttttcccttttcccctctcctcttcttttctttaatagtacttggggaaaggtataccttttattttacgkatttgctcagggtaaagagagagttaagaggccaaatgattagatggcagggtcactggagggcagagataaataatagatcctaaactaagggttggca

SEQ ID NO: 198496 - DNA, 201 bp, Homo sapiens
tggcgcatgcctgtagtcccaactactcaggaggctgaggcaggggaaacgcttgaacacgggaggcggaggttgcagtgagccaagatcatgctactgcytggcgacagagtgagactgcctctcaaaaaaaaaaaaaaaaaaactttttagaaacgttgttttggggaatttttagtgtgtgaattcattttaaatatg

SEQ ID NO: 198497 - DNA, 201 bp, Homo sapiens
gtgatcaaggaaacatgttaaagctccttatttttaaacttaaagtgacaatgacattttcaaagattttaaaattcttataaacaggttaaaatacttayatactgtataatttgatttctgatttctaagctctacttttctattggaaattacagatttttttcagacttaattcttaagatgttttcattgtttcac

SEQ ID NO: 198498 - DNA, 201 bp, Homo sapiens
agaagatagaggttataagtttatggaagaatatagtattgccatcatgaggtccctcaaactgccttcacatctgaatgggaaaattgtttaaaaaaaawaaataaataaataaataaaatccagggccctaacctctagaggtttagattagaagctgtattgtagagcctatgaatctgaacttctggtaatactcca

SEQ ID NO: 198499 - DNA, 201 bp, Homo sapiens
atcattcttgaaaatgtagattaagagctttttagaggccaagtgccatggctcacgcctgtcatcccagcactttgggaagccgaggcgggcggatcacragatcaggagatcgagaccatcctggccaacacggtgaaacctcatctctactaaaatacaaaaaaaaaattagccggacgtggtggcgcatgcctgtag

SEQ ID NO: 198500 - DNA, 201 bp, Homo sapiens; identical to SEQ ID NO: 34508

SEQ ID NO: 198501 - DNA, 201 bp, Homo sapiens
gttctgggaaatcgttcattcatttacagatgaacagaaaagactcttcttgcagtttacaacgggcacagacagagcacctgtgggaggactaggaaaaytaaagatgattatagccaaaaatggcccagacacagaaaggtaggtaattattaacttgtgactgtatacctaccgaaaaccttgcattcctcgtcacat

SEQ ID NO: 198502 - DNA, 201 bp, Homo sapiens
gatttggtatggattacccagaatcacacatcatgactgaatttgtaggttttaggaactgatttgtatcactaatttattcaaattcttttatttcttasaaggaatattctaatgaaggaaattatctctttggtaaactgaattgaaagcactttagaatggtatattggaacagttggagggatttctttgcttttt

SEQ ID NO: 198503 - DNA, 201 bp, Homo sapiens
ttgaaggttaacctatatttcaaacaactgaaaatactgatttgttcatatttattttttcatgaaaatcgtcttgttctatatttaataggtttttgttyggttcatggtactaatgagttcacaattgtaggtttagtcttgaaataatctaaattcacttcatcccattgtaacagaccctacatcatactgaatata

SEQ ID NO: 198504 - DNA, 201 bp, Homo sapiens
actcattgcagtctcaggctggagtgatcctcccatctcaccctcctgagtaggtgggattagcatatgccaccatgcctggctaatttttttattttttmatttttttgtggagatggggtcttgccgtgttcaggttggtttcaaactcctggtctcaagcggcttggcctcccaaggtgctaggattacaggtgtgag

SEQ ID NO: 198505 - DNA, 201 bp, Homo sapiens
gttttagtgaaatcttaagagataggtaaaaatcagagtagccctggctaagggtcttggtagttacaacgagtgtgcctgctcctaccacccccaccccyaccttgagacaccacagaatttctcatagagcacagtgtgaattctattgctaaattggtggtatggggtttctcagcagagaatgggacatcacagtga

SEQ ID NO: 198506 - DNA, 201 bp, Homo sapiens
gtacactattaatagaaggcagccttcacaaaatgccatctgcagatctgttatttcttctaataaaggaaatgatgtaaaattaccttaaatagaaatartgttaattcttctggagacatattccataatccaaacacgaaatgtttgaaatacttgaagatgccatataaataagtcctttgtaaaaagataatatta

SEQ ID NO: 198507 - DNA, 201 bp, Homo sapiens
taaggacatgagtaaggttatgtctcacctgtttttaaggaaatgtggatataagatgggttctagtccattaaaaggtggtaatttatactaagtcttaytgtgagagaccataaactgctttagtattcagtgtatttttcttaattgaaatattttacttatgacttagtagatactaagacttaacccttgagtttc

SEQ ID NO: 198508 - DNA, 201 bp, Homo sapiens
aacaaaatgcagtataaacagttaatattggaatctagtgttgattttatgattaatctcaatgaggttactgtatattcataattctataggtacacaaraatatttggtaaaagatttatagttgagaaaatgctagacactaaagtttgttaacttacaatttaagaataagggctgggtgcagttgctcacgcctgt

SEQ ID NO: 198509 - DNA, 201 bp, Homo sapiens
tgagtttctattctaataaaggactactaatgaacaattttgaggttagacctctactccattgtttttgctgaaatgatttagctgcttttccatgtcchgtgtagtccagacttaacacacaagtaataaaatcttaattaattgtatgttaatttcataacaaatcagtaaagttagctttttactatgctagtgtct

SEQ ID NO: 198510 - DNA, 201 bp, Homo sapiens
ctttcagtatcttggggtccttatctgtaaagtggagttaatgtttccttcctcataagggtgttgtgaagattaaattagttgctatgtgtgaaatgctrcaaaagtgctatatattattgttgctgtattcatggaatatttttgttctataatgctatggtaggttttcagaaaatattttagaaccaataaaataac

SEQ ID NO: 198511 - DNA, 201 bp, Homo sapiens
tggctagaggcttattgattttattgatcttttcagagaactagttgatttctttgatttttctctattgatatcttgttttcaatttcattgatttctgytctaatttttattacttctatttggatttaatttgctttttctagtttcataagttggtagctcagataattgatttttagatcattcttttcttttctt

SEQ ID NO: 198512 - DNA, 201 bp, Homo sapiens
ttgttcataatatcccttgattatccttttaatgtccatgagatctgtaatgatgtccactcttttcattctgatattagttattttgtcctttgtctctytttcttagcctggctagaggcttattgattttattgatcttttcagagaactagttgatttctttgatttttctctattgatatcttgttttcaatttca

SEQ ID NO: 198513 - DNA, 201 bp, Homo sapiens
tcttaactctgtcacccaggcctggagtacagtggcacgatctctactgactgcagccttgacctcccacctcagcctcccaagtagctgggatgacaggygcatgccaccaccccccactattttttatttatttatttatttatttatttatttatttatttatttatttattagttttttgtagaaacaaggtttcat

SEQ ID NO: 198514 - DNA, 201 bp, Homo sapiens
gatctgtacttaaatatttcattttgggacacgctaatgtaaaatggtattgtgtttttaatttcaaattcaacttatgcattgctggtttacaggaaagstattaacttttttatatgaaccttgtatcctgcagctttgctataatcacttattagttctaggaggtttttgttgtttttctttttctttttttcaatt

SEQ ID NO: 198515 - DNA, 201 bp, Homo sapiens; identical to SEQ ID NO: 34501

SEQ ID NO: 198516 - DNA, 201 bp, Homo sapiens
acagtgcacagttaacctcaatcatgaagaaatgtggatatgacccgtaattttggatcattttactgcctgcaatattgagagaagcagcaaattattayagatttttttgggagacgacctaaagtttaagaaatacaactgttgaaagttacctgtcagagacacaaaggtacccaatcaatcttgttgaataaattg

SEQ ID NO: 198517 - DNA, 201 bp, Homo sapiens
tgaggtcattggtataggtaggtagttcattgaaaaaaataggtaagcattaaattttgtttgctgaatctaagtattagatactttaagagttgtatatyataaatgatattgagcctagaatgtttggctgttttacttttagaactttttgcaacagagtaaacatacatattatgaaaataaatgttctcttttttc

SEQ ID NO: 198518 - DNA, 201 bp, Homo sapiens; identical to SEQ ID NO: 34509

SEQ ID NO: 198519 - DNA, 201 bp, Homo sapiens
ctttgtcatcttcactctactgttgagcccatctaatgattatttttctcctattgtattttttaggtctataatttccatttgcttttttttccttgtawcttgtttccttgctgagattttctattgtttcgtttttgaaacagtagaacttgtaattgcttgtcaaatcatttctctgatggcagcattaagatcctt

SEQ ID NO: 198520 - DNA, 201 bp, Homo sapiens
tttagaaatcaagcccagaaaatagtgacttcatatatgagactcttgtatgttttctgttgaggagtggtaacttgaattaataattgtggatttttttwaaaaagaaaaatatattcattgcttttatatattgtgaaattcaaaccagactagcagcttttttcctgaggtttttagagaaattgtctttgatgacaa

SEQ ID NO: 198521 - DNA, 201 bp, Homo sapiens
tctgtctttcgctcagaagtctactcagtcttattttcctcagtcccccatttttttctctagtaaagcaagactaaaaacaaaagtttaagtacttggtrtatactttattctatattttaaattctattctagaattttaaggaaacaactgcttttaaagccttaggtgttagtgtaaaattaactgtgagctcttta

SEQ ID NO: 198522 - DNA, 201 bp, Homo sapiens
aaagattctgcattatttaagcaactcaggtggttttctagcagagacaaaagggggctttaactgcctgaagtcattattattgcttgctttctggtacmctttttatttcacttacatagttttgagacacatgaataattaatacacttaatgactgatcataaggcagccagcaccttactttacatagtttagcag

SEQ ID NO: 198523 - DNA, 201 bp, Homo sapiens
ttctttcatgttgacatctttaattttaaaactgttttatttagtgcttaaatcttgtttacaaaattgtcttcctaagtaatatgtctacctttttttttggaatatggaatattttgctaactgtttctcaattgcattttacagatcaggagaacctcagtctgacgacattgaagctagccgaatgtaagtgtaact

SEQ ID NO: 198524 - DNA, 201 bp, Homo sapiens
cctgatactagcaatcatcttcttttcatgtttatcttttcaatcactagctagagatgatcgctatggaaaatcctgcagacttgaagaagcagttgtakgtggaatttgaaggagaacaaggagttgatgagggaggtgtttccaaagaattttttcagctggttgtggaggaaatcttcaatccagatattggtaaat

SEQ ID NO: 198525 - DNA, 201 bp, Homo sapiens
aagtcagtatatctgggttttaatcagtccttcaacactagttccaaaatcttgggcaagtcagttaatcactcggaggctgcttaattttttttttttttaattcttagtatattatctgtcttgattaggtaaagccaaagttgttataagactcaaggtactattgaccaaaatgcttcagaaactataacattacat

SEQ ID NO: 198526 - DNA, 201 bp, Homo sapiens
tataataattactcttctgatgaattttacattgacacctaatttgaagctttgaatattattttttgaacaatgaattgggtttatatattaaagtgttmtaaccaaaggtttgtttaatttattagagttattaagcctacgctcagatcaaggtagcagctagactggtgtgacaacctgtttttaatcagtgactca

SEQ ID NO: 198527 - DNA, 201 bp, Homo sapiens
caactctgggtcttggaacttctggaaaacagcagctattccaaaaatctggggattagtggtgcctgtaacatcaagtccagggagattgagcagggaartactggaaactcaggtactcatcctaacttcctggttttccagatggggttgccatttgttccttttctttcctccacaagataattttagtgtatctgt

SEQ ID NO: 198528 - DNA, 201 bp, Homo sapiens
gggtttcaccgtgttggccaggctagtctcgaactcctggcctcaagtgatccacccaccttggcctcccaaagtgctgggattacaggcgttagccaccrcgcccagccatttgtgagcacattatgtcaggcactgttctgagatacttagatgttagcttgtttatccatgacagctctatggaataggtactattat

SEQ ID NO: 198529 - DNA, 201 bp, Homo sapiens
ggtcagtacacaaaatatatcatttgtttttacctgtgaaatgaaatatctttcatcctattagccagaagggagaaagccttggcctgaaaataacactyatctcaaaaagttgggaaatgtggtccaactctgtgcccaggaaaagaggaaatagattttgatgactacatagtctctgcactgcttgccagctcataa

SEQ ID NO: 198530 - DNA, 201 bp, Homo sapiens
tgtactaatcactgtgcttattgtttgaatgtttggtacaggaagcgagcagctgcaaagcatctaatagaacgctactaccaccagttaactgagggctrtggaaatgaagcctgcacgaatgagttttgtgcttcctgtccaacttttcttcgtatggataataatgcagcagctattaaagccctcgagctttataag

SEQ ID NO: 198531 - DNA, 201 bp, Homo sapiens
gacttcccataatgtctcaatagagctgtttaagtttctagccataattggtatgggaatatagctctaaaccttcaaggctgctaccatttctcacattyctatatctagaaactgtagccaggcagcactttcagtgaggtgagtgggtccaggtttgttcaattacttttgtaccaacctaataccttaatagtattt

SEQ ID NO: 198532 - DNA, 201 bp, Homo sapiens
tcagcttatggcagccttgactctcaggctcaagtgatcctcagcctcccaagtagctgggactacaggtgcatgccaccacacttggctaattttttttwaaaaagtttgtagagagtagcctcactatgttgcccaggctggtgttgacctcctgggctcaagtagtcggcctgcctcagcctcccacagttatgggat

SEQ ID NO: 198533 - DNA, 201 bp, Homo sapiens
ttaatttgggaagaaatggtatctttgttcatctatgagtcacatttggaactagctcaaaggccatgggtcctgattcctttttttttttttttttttttcttgtagaggggaggtatggtgtcaagaaaacatagtcaccattattacgaaaagtaaaatatggaagagatgatccctaccatcaatcagcttacaact

SEQ ID NO: 198534 - DNA, 201 bp, Homo sapiens
ttctatggcttcatcttcttagtgcttgtattcattgcttatattccagttgtcttgtaaattcatttttttagtgaactaagccagacacggaaagacaratatcacatgttctcactgatatgtgggaactaaaaaaacattgaacacaaattttacagctgacacacatatgcctgccacctagattctgccattaat

SEQ ID NO: 198535 - DNA, 201 bp, Homo sapiens
gtgatcctcctgcctcagcttcccaagtagctaagattatagacatgtgccactatagctagttggtttttttttggttggttggttttttttttttttttggtagagaacgtatctcagtgtgttgcccagactggtctcaaacttctggcctcaagctatcctcccacctcagcctcccaaagtgctgggattacaggc

SEQ ID NO: 198536 - DNA, 201 bp, Homo sapiens
gatgctatctcacctcactgccagctccgcctcccgggttctcaagtgattgtcctgcctcagcctcccgagtagctggaattacaggcgcccaccaccaygcccgattagtttttgtatttttagtagagacagggtttcactgtgttggccaggctggtctcacactcctgacctcaggtgatccacccaccttgccct

SEQ ID NO: 198537 - DNA, 201 bp, Homo sapiens
gttgaagtaatttccatatctttctagcgaattgagcgtttttgtttttgtttttttgagacagaatcttgctcttgtcacccaggctggagtgcaatgaygctatctcacctcactgccagctccgcctcccgggttctcaagtgattgtcctgcctcagcctcccgagtagctggaattacaggcgcccaccaccatgc

SEQ ID NO: 198538 - DNA, 201 bp, Homo sapiens
tttaatgaggaatgataacattttaatattggcacattgtgagtctaccttctgtagttagtaggtaaataagaaataaacataccttatttaaaaaaaaatttcaaagaacccaagggaggggagagccaaggtgcacattagaaggagattacagtactcttccagtgcacagtggatgtgttgtgattccagagttct

SEQ ID NO: 198539 - DNA, 201 bp, Homo sapiens
tgttctaagcactttatatatattaacacatttaattttctcacaattggtaatgtgaagaagaataatactctcaccatgataatgctcgtagatactaycatttaaattacgaggaaacttacgtccagaaagatcaagtaattcattcagggtcacatagttaattaagaggtagagccattatgtgaacttgggcat

SEQ ID NO: 198540 - DNA, 201 bp, Homo sapiens
gctagagttttcaacataaaagatcatgtcatttgctaacagaagtaattttacttcttacttttctcatttaatacctttcatttctttttcttgcccarttgctaactctggcaggatgtctaacagtatgttgaatagaagtggtgaatgtgtgcattcttgttccatttgtgatcttagagggaaaactttcagttt

SEQ ID NO: 198541 - DNA, 201 bp, Homo sapiens
gggttatttctcttcccccacatcattttggctttgctacaaccccagcaggttaggctctggttaactagtttctcctgaggacaaaccttgttaagacyggaatagtctagtgtacttgaaaatcatttctctttgcctcccctgctgagggttgaggatttttctcctatatttactgtgagaagctggtcaattgcc

SEQ ID NO: 198542 - DNA, 201 bp, Homo sapiens
ttagaacaacagttttctatcaagtgtggtctggttcacttagaattagatggggtagattttttgaaaagcgttttgaagttaaattagaagctaatggytttttgtcactaaatcaaattttgttttatgcgtttaagtgctacatttatttgataggcaggtgaatgtaacagattaaacttgaaaataatgtagcta

SEQ ID NO: 198543 - DNA, 201 bp, Homo sapiens
ggggattgcttgaaccctggagttccaggctgcagtgagttgttatcacaccactgcactccagccgcggtgacagaccctgtcccttaaaaaaaaaaaaattataaccagccacattgaaatattttgtaagacattaatagaagactaaatgttctcatatgtttactgtttgtgttaagtacgtatggtttttagaac

SEQ ID NO: 198544 - DNA, 201 bp, Homo sapiens; identical to SEQ ID NO: 34510

SEQ ID NO: 198545 - DNA, 201 bp, Homo sapiens; identical to SEQ ID NO: 34500

SEQ ID NO: 198546 - DNA, 201 bp, Homo sapiens
gccacattgaaatattttgtaagacattaatagaagactaaatgttctcatatgtttactgtttgtgttaagtacgtatggtttttagaacaacagttttytatcaagtgtggtctggttcacttagaattagatggggtagattttttgaaaagcgttttgaagttaaattagaagctaatggctttttgtcactaaatc

SEQ ID NO: 198547 - DNA, 201 bp, Homo sapiens
gttgttggccaattttttaattgggttgtttgttttcttgtggaattttaagagttccttacactgtctctgtctgtcttgtctgtctgtctgtctgtctrttgagacagagcctcgctctgtcacccaggttgcagtacagtggcacagtcttggctccctgcaacctctgccacctgggttcaagtgattctcctgcgt

SEQ ID NO: 198548 - DNA, 201 bp, Homo sapiens
attctatttttttttagattttttttttttttacaggagttctaggttcacagaattgagaggaaggtacagagatttcccctgtacctccttccacacamatgtatagattctctcatagccagtgtgcatctcccaccagagtggtacatgtctttctgatgaacctatattgatacatcataattacccaaagtccgt

SEQ ID NO: 198549 - DNA, 201 bp, Homo sapiens
caaaagcttcagtgaaaacaccttacctcaggttgccgtctttgaatgcttttctactatcttaaacttgttttctttcattgcgccttttcttccttctsttagagacttgtcctatggctcttctactgtcttccagctacaattccctcttgttcctgacatgtactgctcagagccaggagatggataagtagtagt

SEQ ID NO: 198550 - DNA, 201 bp, Homo sapiens
ttggctgttttacttttagaactttttgcaacagagtaaacatacatattatgaaaataaatgttctcttttttcctctgattttctagatgtgacttacytaacagaagagaaggtatatgaaattcttgaattatgtagagaaagagaggattattcccctttaatccgtgttattggaagagttttttctagtgctga

SEQ ID NO: 198551 - DNA, 201 bp, Homo sapiens
agctgttatagcctgttgattctaattgagttgacctttctgttactgttcttagtcacacacacacacacacacacacacacacacacacacacacacamgcatcccttatctataatctagctagtgttttattaataactaaaaagctatgccatttgtatgtagtttgttctaagtaaatcagagatacataagacg

SEQ ID NO: 198552 - DNA, 201 bp, Homo sapiens
cccatccgtttttatctacagtaatgttcacctctgcatcactgctgcttcccatgtctacaggcatgccaactcaaaactgttttaccccaaaagcttcrgtgaaaacaccttacctcaggttgccgtctttgaatgcttttctactatcttaaacttgttttctttcattgcgccttttcttccttctcttagagactt

SEQ ID NO: 198553 - DNA, 201 bp, Homo sapiens
ttcattccttggtcccagcccaccaccccagtatctggcacgtagtgtattagtatttgtgtgtgtgtgtgtgtgtgtgtgtgtgtgtgtgtgtgtgtgtrtatatgtatatagaatttaaaatttttactccggcagttgtcttcaaatactctaattttggggggcatgattatcattctgtcttctggcagtacatgg

SEQ ID NO: 198554 - DNA, 201 bp, Homo sapiens; identical to SEQ ID NO: 34505

SEQ ID NO: 198555 - DNA, 201 bp, Homo sapiens
ccacctcagcctcccaagtagctgggatgacaggcgcatgccaccaccccccactattttttatttatttatttatttatttatttatttatttatttatttatttattagttttttgtagaaacaaggtttcatcatgttgcccaggctgatctcaaactgctgggctcaggcaatctgcctgcattggcctcccaaagt

SEQ ID NO: 198556 - DNA, 201 bp, Homo sapiens
actggttggtatgagactacagaggaagaatacctaattatcttaaaagtggtatataagctgaaaccttgaggatgcttgggaatagctaagaatcatastgttctaggcaggaagaataacacctggaatcagagaagacagcagaacaagtccactgagtagtaagaagttccgtattgcagtaatgtagagttagct

SEQ ID NO: 198557 - DNA, 201 bp, Homo sapiens
aatttttagctcttctgtctgggagatacaagtttggaagcaatcttggggtacttacccacaaggctggtggagaccaggtgtgtcacataggtgatttkcttgctccctgggggagagggtggagtgaaatttttgcatttgtgtcacagccaagtcactgccacctccagcatgccccagtttttagttcttatgtaa

SEQ ID NO: 198558 - DNA, 201 bp, Homo sapiens
agcttcccaaaggccccacctcttaatactatcaccttggaggttaggctttcaacatgaattttgggggacacattcagaccacagcactagagcaggcrtgaattggttattggtaaatcagtaaatgatcaactaacatttattaggttcctcctgtggcttctatgagctgagctaagtacaggacccacaaagaca

SEQ ID NO: 198559 - DNA, 201 bp, Homo sapiens
cccacctcagcctcccaagtagctgggatgacaggcgcatgccaccaccccccactattttttatttatttatttatttatttatttatttatttatttatttatttattagttttttgtagaaacaaggtttcatcatgttgcccaggctgatctcaaactgctgggctcaggcaatctgcctgcattggcctcccaaag

SEQ ID NO: 198560 - DNA, 201 bp, Homo sapiens
tgccaccatgcctggctaattttgtatttttagtagagacagagtttcaccatattggccaggctggtcttgaactcctgacctcgtgatctgcctgcctyggccttccagagcgctgggattacaggcttgagccaccgcacccaaccagatcagattttttatgtttggtatttactctttacctctaacactaaggct

SEQ ID NO: 198561 - DNA, 201 bp, Homo sapiens
tcccacctcagcctcccaagtagctgggatgacaggcgcatgccaccaccccccactattttttatttatttatttatttatttatttatttatttatttatttatttattagttttttgtagaaacaaggtttcatcatgttgcccaggctgatctcaaactgctgggctcaggcaatctgcctgcattggcctcccaaa

SEQ ID NO: 198562 - DNA, 201 bp, Homo sapiens
ctcccacctcagcctcccaagtagctgggatgacaggcgcatgccaccaccccccactattttttatttatttatttatttatttatttatttatttatttatttatttattagttttttgtagaaacaaggtttcatcatgttgcccaggctgatctcaaactgctgggctcaggcaatctgcctgcattggcctcccaa

SEQ ID NO: 198563 - DNA, 201 bp, Homo sapiens
agttttagaattgtctaaattcgagaattcataaagctgtagcccggtggaaaaagttatttgacatctcagaaattaaaaattgcagagattttgtgtgktttttttttttttgttactggtttgttttttttttttaatgtcagatatgtttatagtgttggagaaagattctgcattatttaagcaactcaggtggtt

SEQ ID NO: 198564 - DNA, 201 bp, Homo sapiens
aagtgctacatttatttgataggcaggtgaatgtaacagattaaacttgaaaataatgtagctatgattccttcaaggaaaaacccacctacctttagttyttttagtatattgcattataagtcttttgtgtgtgcatatatagcaggcataaattggcataattctgggtttaattttaggctaggcgctatggaagtt

SEQ ID NO: 198565 - DNA, 201 bp, Homo sapiens
ggtaagatgttttattttcaattgagaattgttgcctgaaaaccatgtgggagatttaaatgtattagtttttatttgttttttcttctgtgacataaagrcattttgatatcgtagaaccaattttttattgtggtaacggacaggaataataactacattttacaggtctaatcattgctaattagaagcagatcatat

SEQ ID NO: 198566 - DNA, 201 bp, Homo sapiens
caccaggatttctgaagttgaacgtgagttattggctttgccagagactgctgtgttatatgcagacctgtatgcaagcagttggccttttttccccccccttttcagtgtagaaaatgaaaaggatgctttcctcatcttggtggtaaaggcttttgttggtaaaggtagaattgaatgtaccaaatgccttagtccgta

SEQ ID NO: 198567 - DNA, 201 bp, Homo sapiens
tagttttagaattgtctaaattcgagaattcataaagctgtagcccggtggaaaaagttatttgacatctcagaaattaaaaattgcagagattttgtgtgttttttttttttttgttactggtttgttttttttttttaatgtcagatatgtttatagtgttggagaaagattctgcattatttaagcaactcaggtggt

SEQ ID NO: 198568 - DNA, 201 bp, Homo sapiens; identical to SEQ ID NO: 34502

SEQ ID NO: 198569 - DNA, 201 bp, Homo sapiens
gatattccacttacaaatttatttttaagtctcccatgttgttgataattgggaaaaatagtttttattccagatagatattctgtgttaactataagtcraatgtttacaagctgttaaaaatgaaatactgattatgtaaaagaaaaccggattgatgctttaaatagactcattttcctaatgctaatttttaaaatg

SEQ ID NO: 198570 - DNA, 201 bp, Homo sapiens
tccatgtagcttaatgaagactctttttcattagctgcttccacccctttacagccgcttaagggacacttctgcttttgaaggtaccccccttcctttcrtgcatggtgccttcctgagcctgccattgctggacccaagtacttttctgtagtccttcctttaaccaccctgttgccagtgctctaacctacactcagt

SEQ ID NO: 198571 - DNA, 201 bp, Homo sapiens
ttccccttatagttattaatttttaatatgcaagtagcatccttactatggaaagaataaataagaaatcaaaagatggaagaagttttaaaactcacttaatcacatcatccagagaaaatgctattaatgctttgaaataacaatgggttcatcctacacctgctactttttaactgacttttgtcagttagtgatata

SEQ ID NO: 198572 - DNA, 201 bp, Homo sapiens
tttccccttatagttattaatttttaatatgcaagtagcatccttactatggaaagaataaataagaaatcaaaagatggaagaagttttaaaactcacttaatcacatcatccagagaaaatgctattaatgctttgaaataacaatgggttcatcctacacctgctactttttaactgacttttgtcagttagtgatat

SEQ ID NO: 198573 - DNA, 201 bp, Homo sapiens
ttttccccttatagttattaatttttaatatgcaagtagcatccttactatggaaagaataaataagaaatcaaaagatggaagaagttttaaaactcacttaatcacatcatccagagaaaatgctattaatgctttgaaataacaatgggttcatcctacacctgctactttttaactgacttttgtcagttagtgata

SEQ ID NO: 198574 - DNA, 201 bp, Homo sapiens
gttttccccttatagttattaatttttaatatgcaagtagcatccttactatggaaagaataaataagaaatcaaaagatggaagaagttttaaaactcacttaatcacatcatccagagaaaatgctattaatgctttgaaataacaatgggttcatcctacacctgctactttttaactgacttttgtcagttagtgat

SEQ ID NO: 198575 - DNA, 201 bp, Homo sapiens
tgcctctcttccctcagtgccagcaggtttattttttgttttgcaagccagctctgcctccttacagtatgacatctgatgctggagggtcgcactttcamaaatgagtcagctggtacatggggttatcatcaatttttagctcttctgtctgggagatacaagtttggaagcaatcttggggtacttacccacaaggct

SEQ ID NO: 198576 - DNA, 201 bp, Homo sapiens
cccgggttcacgccattctcttgcctcagcctcccaagtagctgggactacaggcgcctgccaccacgtgtggctaatttttttgtatttttagtagagayggggtttcactgtgttagccaggatggtcttgatctcctgaccatgtgatccacccgcctcagcctcccaaagtgctgggattacaggcgtgagccacag

SEQ ID NO: 198577 - DNA, 201 bp, Homo sapiens
attttagtgtctttttttctcattaaaaatatcagtagccactatcaaagacctatctgtatgtataaacaggaaagtatttctcaaaaaaacttcaaggytttaaacattttactataaacattatagaaaacattaaaaatttcttaatatgcattttaaagtatgccttttatgtggtgaacgttttaactaaacatt

SEQ ID NO: 198578 - DNA, 201 bp, Homo sapiens
aagttggtagctcagataattgatttttagatcattcttttcttttcttttttttttgagatggagtctcgctttgtcgcccaggctggagtgcagtggcwcgatctcggctcaccgcaagctccgcctcccgggttcacgccattctcttgcctcagcctcccaagtagctgggactacaggcgcctgccaccacgtgtg

SEQ ID NO: 198579 - DNA, 201 bp, Homo sapiens
gtatggccacctgatctgaccactttctttcatgttgacatctttaattttaaaactgttttatttagtgcttaaatcttgtttacaaaattgtcttcctragtaatatgtctacctttttttttggaatatggaatattttgctaactgtttctcaattgcattttacagatcaggagaacctcagtctgacgacattga

SEQ ID NO: 198580 - DNA, 201 bp, Homo sapiens
ttaattctctggtttattttgagtttatttttgtgaagggtgtaagacctgtgtctagactcttttttttttttgcatgtggatgttcagttattaccackgtttattgaaaaagactattttcttcattgtattgcctttgcctctttgtcaaatactgccattgctcctttgactatgtgggtccatttctgggctctc

SEQ ID NO: 198581 - DNA, 201 bp, Homo sapiens
tactgatgtcctctctgtggttttgttgtggaaagatttagttaaatgaactgtaagaattcagtacctaaaatggtatctgttatgtagtaaaaactcartggatacagtatcttatcatcgtcactagctttgagtaatttataggataaaggcaacttggtagttacacaacaaaaagtttatgatttgcattaatgt

SEQ ID NO: 198582 - DNA, 201 bp, Homo sapiens
aacaaaaaaacagacacatcgacccacaaaacagaatggagagcacagaaataaattcgtgtactatcagttgattttggacagggtgcaaagaacacagyggggaaagggaagtctgttcaataggtggtgttgggaaaatggaatatctacatgcatgagaatgaaatcagacctgtatctcacatcatataccaaatt

SEQ ID NO: 198583 - DNA, 201 bp, Homo sapiens
agaggctgaagaaggaggattgcttgagctcaggagcttaaggtggcagtgaactgtgattgcatcactgcactccagcctggatgacagcgtgagaccckgtcttttaaaaacaaaagaaacaaaaaaacagacacatcgacccacaaaacagaatggagagcacagaaataaattcgtgtactatcagttgattttgga

SEQ ID NO: 198584 - DNA, 201 bp, Homo sapiens
ggttcaggctcactctagtagaccaggatgccaggccagcagcacctgtgtaccaaggctccaggacctaccctgctgacccagactccaggccagcccckgtagactcaggctgcataatctctggacaggctgactggtgaagggctttacccaataaagtcactctgcaaagactggaacaagtctcagcttcttcaa

SEQ ID NO: 198585 - DNA, 201 bp, Homo sapiens
acttagaccctaacattgagctcgccccagtaaaactcaatgctaggcaggcccccatggccccaaacttcaggccaatacccacaaaccaagcttggagrcccaccccagcaccaagctggatcccacagccctaggctctaagcctgtctagtgctagggtggtccctgcagccctgccctctagatcggcccctgtgg

SEQ ID NO: 198586 - DNA, 201 bp, Homo sapiens
cggtatatattgtgaatctgcaagaaacgactataaaatgtatttctcaaatttatgtgacccaaccatgtgacttgtcttttaagctttaaaaaattgtrgtaaaatacacataatgtaaaattttccatttcaccatttttaagtatttggctcaatggtattaagtatattaatattgttgcacagtcacgatcagaa

SEQ ID NO: 198587 - DNA, 201 bp, Homo sapiens
gccggtatatattgtgaatctgcaagaaacgactataaaatgtatttctcaaatttatgtgacccaaccatgtgacttgtcttttaagctttaaaaaattktagtaaaatacacataatgtaaaattttccatttcaccatttttaagtatttggctcaatggtattaagtatattaatattgttgcacagtcacgatcag

SEQ ID NO: 198588 - DNA, 201 bp, Homo sapiens
actgattttaagattcttgttagagttgcttaaagttggaagcctaaagtcagtgagaagttcacaaatcaggactttgtaatgccaatttgaaaatttarcttttgacctcaaaaaacattttttatctagtttgggaatttctaagtgttagaaatcaatattatattgactcattcattgttgctgatgctgtttata

SEQ ID NO: 198589 - DNA, 201 bp, Homo sapiens
tgagagtttgaattctaacctcgggacttttggtaacttatttataatattctagaaatatactgttattaggatgagtagaaattcattcagacagaaaytattataaattactgcaagaaaaatgtctgctagttctgcatatattcatttttctcttgattaaaaaacaatttccaatttgagtagaacaactttgct

SEQ ID NO: 198590 - DNA, 201 bp, Homo sapiens
gatgatagatagatagatacatatcaaaaagaaacttgaaaaaggcttcgaacagaacttgccgatgttactcatccctcctcggtacagacattctgttwgaacagatggttgtaatggggcagcatcactccctattcccattaaaaacatgaccattctgagatttcaggccccttcgaggaatttttctcaagaatt

SEQ ID NO: 198591 - DNA, 201 bp, Homo sapiens
atttaaattcaattaaaatttttttccttagtcatttaaaagggaagaaatcaatttttagtagtactcattccaaagattccaattttccttttttttartcttttattttttggtggagggaggcaggatctggctctgaggcccaggctggagtgtagtggttctgtctcggctcactgcaacctccacctcccaggc

SEQ ID NO: 198592 - DNA, 201 bp, Homo sapiens; identical to SEQ ID NO: 34498

SEQ ID NO: 198593 - DNA, 201 bp, Homo sapiens
ctaatgaaggacattgtggttgcttccacattttgctaattatgaataaaactgctgtagatatcggtgtgcaggtttttgtgtggacttaggttttcagygactttctgtaaatactagggagtgcaattgctggatcttatggtaaaagtgtttagttttgtaggaaacatccaaactgtcttctaatatgacgctatc

SEQ ID NO: 198594 - DNA, 201 bp, Homo sapiens
acgtttgctcagaaattaaaaaatagaactaccatatgattcagcagtcacacttggatatatatgtatttatatatatatatatatatatatatatatatagaataaaatcagtgcgctgaagagatctgtactcccatgttcctttcggtatcatttgcaatacccatgatacagcatcagcctaagtgttcatggata

SEQ ID NO: 198595 - DNA, 201 bp, Homo sapiens
tgacgtttgctcagaaattaaaaaatagaactaccatatgattcagcagtcacacttggatatatatgtatttatatatatatatatatatatatatatatatagaataaaatcagtgcgctgaagagatctgtactcccatgttcctttcggtatcatttgcaatacccatgatacagcatcagcctaagtgttcatgga

SEQ ID NO: 198596 - DNA, 201 bp, Homo sapiens
catgacgtttgctcagaaattaaaaaatagaactaccatatgattcagcagtcacacttggatatatatgtatttatatatatatatatatatatatatatatatagaataaaatcagtgcgctgaagagatctgtactcccatgttcctttcggtatcatttgcaatacccatgatacagcatcagcctaagtgttcatg

SEQ ID NO: 198597 - DNA, 201 bp, Homo sapiens
atagcatgacgtttgctcagaaattaaaaaatagaactaccatatgattcagcagtcacacttggatatatatgtatttatatatatatatatatatatatatatatatagaataaaatcagtgcgctgaagagatctgtactcccatgttcctttcggtatcatttgcaatacccatgatacagcatcagcctaagtgtt

SEQ ID NO: 198598 - DNA, 201 bp, Homo sapiens
aaatagcatgacgtttgctcagaaattaaaaaatagaactaccatatgattcagcagtcacacttggatatatatgtatttatatatatatatatatatatatatatatatagaataaaatcagtgcgctgaagagatctgtactcccatgttcctttcggtatcatttgcaatacccatgatacagcatcagcctaagtg

SEQ ID NO: 198599 - DNA, 201 bp, Homo sapiens
tacagcatttatggaaaatagcatgacgtttgctcagaaattaaaaaatagaactaccatatgattcagcagtcacacttggatatatatgtatttatatatatatatatatatatatatatatatagaataaaatcagtgcgctgaagagatctgtactcccatgttcctttcggtatcatttgcaatacccatgataca

SEQ ID NO: 198600 - DNA, 201 bp, Homo sapiens
agtacagcatttatggaaaatagcatgacgtttgctcagaaattaaaaaatagaactaccatatgattcagcagtcacacttggatatatatgtatttatatatatatatatatatatatatatatatagaataaaatcagtgcgctgaagagatctgtactcccatgttcctttcggtatcatttgcaatacccatgata

SEQ ID NO: 198601 - DNA, 201 bp, Homo sapiens
attttaagtttatatttgtattattcatcagtccttaataaaatacaaaagtaatgtatttttaaaaatcatttcttataggtatgttcacatacgatgartctacaaaattgttttggtttaatccatcttcttttgaaactgagggtcagtttactctgattggcatagtactgggtctggctatttacaataactgta

SEQ ID NO: 198602 - DNA, 201 bp, Homo sapiens
aattagtacagcatttatggaaaatagcatgacgtttgctcagaaattaaaaaatagaactaccatatgattcagcagtcacacttggatatatatgtatttatatatatatatatatatatatatatatatagaataaaatcagtgcgctgaagagatctgtactcccatgttcctttcggtatcatttgcaatacccat

SEQ ID NO: 198603 - DNA, 201 bp, Homo sapiens
ttctcaagtgctaatataatagaaatcaatgttgcatgcctaattacatatattttaaatgttttatatgcataattattttaagtttatatttgtattaktcatcagtccttaataaaatacaaaagtaatgtatttttaaaaatcatttcttataggtatgttcacatacgatgaatctacaaaattgttttggtttaa

SEQ ID NO: 198604 - DNA, 201 bp, Homo sapiens
aaattagtacagcatttatggaaaatagcatgacgtttgctcagaaattaaaaaatagaactaccatatgattcagcagtcacacttggatatatatgtatttatatatatatatatatatatatatatatatagaataaaatcagtgcgctgaagagatctgtactcccatgttcctttcggtatcatttgcaataccca

SEQ ID NO: 198605 - DNA, 201 bp, Homo sapiens
attggtaaatacattagtaatgtgattatggtgtcgtatcatcttttgagttagttatttgtttatcttactttgtaaatattttcagctatgaagagcascaaaagaaggatttggtatggattacccagaatcacacatcatgactgaatttgtaggttttaggaactgatttgtatcactaatttattcaaattcttt

SEQ ID NO: 198606 - DNA, 201 bp, Homo sapiens
tttacatatacttaaatcttgaaacccagtatagcaaaactaagccaaaacaaacaaaaaaatccatcccttgataggaagtcagtatatctgggttttartcagtccttcaacactagttccaaaatcttgggcaagtcagttaatcactcggaggctgcttaattttttttttttttaattcttagtatattatctgtc

SEQ ID NO: 198607 - DNA, 201 bp, Homo sapiens
gaataggtactattatcctagttctacctataaggaaactgagactcggagaggttaagtaacttgcccaagatttctcagctagtgaatgaccaaacagrgacataagtccagcctggccttggagccttttgagcaccggatctcataaaagaggggactggaagagaggacttgactctagttttcaaaatacatata

SEQ ID NO: 198608 - DNA, 201 bp, Homo sapiens
gtgccaccacacctggctaagttttgtatttttagtagagacggggtttcaccgtgttggccaggctagtctcgaactcctggcctcaagtgatccacccrccttggcctcccaaagtgctgggattacaggcgttagccaccacgcccagccatttgtgagcacattatgtcaggcactgttctgagatacttagatgtt

SEQ ID NO: 198609 - DNA, 201 bp, Homo sapiens
ctaaaatggtatctgttatgtagtaaaaactcaatggatacagtatcttatcatcgtcactagctttgagtaatttataggataaaggcaacttggtagtyacacaacaaaaagtttatgatttgcattaatgtatagtttgcattgcagaccgtctcaactatatacaatctaaaaataggagcatttaattctaagtgt

SEQ ID NO: 198610 - DNA, 201 bp, Homo sapiens
taatatgtagttgcaggcataccatgccagacataaggacttaaagatacagagttaggggtttgtaagcatagaggtgctatgggaatggatgacattgygcagaaaattggtttaggttaagaaaagtggctattgacagaaacttggagagaggccatgtatgaggtaggaagatgaactagcagaagaccttattgc

SEQ ID NO: 198611 - DNA, 201 bp, Homo sapiens
ctaacataagtgtcattaaaacatagcttttattacatagattttaggaatgccacaggataaatcattctcttaaaataactgcaggtggcagaaatgtyagaataattctcctcctccatacacagcacatattacttgtttaaagtattctagttcatataaaaattgaacttttgtattactgctattaggtatgta

SEQ ID NO: 198612 - DNA, 201 bp, Homo sapiens
actgcagggcagcttttctgctatgttggagggttctgtgctacagcagacttgttttctcttgtcagcctccccaaaaggagtatcatgaactggggtcygattcctctcctccttacctgagagatgctcctgcaagtttcatgtccagttttctgttgttgtgtgtttcttttttgttttctcttgctgactggtgga

SEQ ID NO: 198613 - DNA, 201 bp, Homo sapiens
ctgacttcttttaatgtatttgtgagatttattcacattgttggttgtagtaattgtttatgatagtcgctgtatattccattttaagaatggaagtgatwttccattttaagaatatgccatagtttaatctgctgttacggacatttaatcatttttggtttggaactgttaagaatattgctgctgctctaaacattt

SEQ ID NO: 198614 - DNA, 201 bp, Homo sapiens
tttatatgttaaggagattagtcctttaacgctggtaaattcgcaaatattttttcccagtttgtcatttgtcttttaaccttgcttataggatttttttrccaaatgaaaggttttatgtttatgtagttagctattaatctttttcgttattatgctttgatatgcatttctttagttatgtttattttattcattttc

SEQ ID NO: 198615 - DNA, 201 bp, Homo sapiens
taaaaaacaatttccaatttgagtagaacaactttgctatgtttaatagacccaggacagatttattttaaggtaataatctttcaatccttcttcttctrtactggattggtttaaattacttagcttgtcttatcaatggtttttaatagcctactttaatatatgtaaaaagtagtaattaatatgttacagtttggt

SEQ ID NO: 198616 - DNA, 201 bp, Homo sapiens
cagtcttgtagttgtcagagctttgtttctgtccaattatatgcaatggttcatggttttgttgtagataatgtctctgggtctttggttttctcattcartttgctgtttttgtaggggaggttgggagggaataaaacaaaaaataataataataataactatgtcgttgccatcatcatctttccagaacctgctacc

SEQ ID NO: 198617 - DNA, 201 bp, Homo sapiens
ttttagatagggtaggtagagaaaacttcactgaaatggtaacttgggtgaagaactgagggagatgagagagctagccatgtggatatttgggggaagarcatttcaggcagagtgtagtgaatagggaaaccccaaagtgagagtgcctgatgtgtttgaagaactcgaggtgtggccagtgtagctttagaaaagtaa

SEQ ID NO: 198618 - DNA, 201 bp, Homo sapiens
tggagagtgcttcctgagccttgtgcctgttgtggcaggctcccccttgctggtgttcctggcagtgctcctgaccacattgtgtccctgggctgtggaayacttgcaggaaaggtgaacactgccaggaccaattatagcagaattcctcctgccagtacacagcagcactgtggctctggaccagcaaggagagtctca

SEQ ID NO: 198619 - DNA, 201 bp, Homo sapiens
taaattagtacagcatttatggaaaatagcatgacgtttgctcagaaattaaaaaatagaactaccatatgattcagcagtcacacttggatatatatgtwtttatatatatatatatatatatatatatatatagaataaaatcagtgcgctgaagagatctgtactcccatgttcctttcggtatcatttgcaataccc

SEQ ID NO: 198620 - DNA, 201 bp, Homo sapiens
gtaaattagtacagcatttatggaaaatagcatgacgtttgctcagaaattaaaaaatagaactaccatatgattcagcagtcacacttggatatatatgkatttatatatatatatatatatatatatatatatagaataaaatcagtgcgctgaagagatctgtactcccatgttcctttcggtatcatttgcaatacc

SEQ ID NO: 198621 - DNA, 201 bp, Homo sapiens
atgggcaaaggacttgaatagacatttctcaaaataagacatacaaatggccattagaatggctattaaagtatgatgaggatttgcagacaagagatatmttgcgcatggcaggaatgtaaattagtacagcatttatggaaaatagcatgacgtttgctcagaaattaaaaaatagaactaccatatgattcagcagtc

SEQ ID NO: 198622 - DNA, 201 bp, Homo sapiens
tggaatctgaatgaattgcagtgagggtaattttgagagtctgataaagaagtgaggggttgttttttgtttttgtttttgtttttagctaagaaatttaraaaacaggtttgtgtgtgtgcgtgtgtgtgtgtgtgtgtgtgtgactgattttaagattcttgttagagttgcttaaagttggaagcctaaagtcagtga

SEQ ID NO: 198623 - DNA, 201 bp, Homo sapiens
tttgtgtaagtacgttctatgatatttgcacaatgattaccatgctgagagttgttggggttttgttttttttttctttttgaatctgtacatttatggtwttccttaaatttggaagattgttgccattgtttcttctatatatatattttttaccacctttactcctctttcatcatttcctctttttctgggactcca

SEQ ID NO: 198624 - DNA, 201 bp, Homo sapiens
catcttgctttcagattgactttttacgatcgttgctttttgattaagtccatttacatttattgcagttggcaatataattgtgtttaagacactatttsttttctatttgtctaatcttttcttccttttctgccttcttttcggttaatggagcatttttggaattttgtattgtctccattattagcttgtccctct

SEQ ID NO: 198625 - DNA, 201 bp, Homo sapiens
taagtattgaatttttaaaattttgtattgaggttaaatatacatacataatttaccatcttttttaagtgtacagttcatttttaatgattttttaagtrtacagttttttaagtgtacagttcagcaataataaatacagttatgttcttctgcctttgtcctctcactccccacttcggctgctagtaaccaccagtc

SEQ ID NO: 198626 - DNA, 201 bp, Homo sapiens
tgatcctcctgccttggcgtcccaaagtgctgggattatagacatgagccactgcgtccagcctgtatcatatttttattctgatatcttttgtaattttktttttagtgaagtagggaggtttatattagataatcttccaaggtaattatcagcttggacattatatgctaatatgtcttttgtttgtttttaaaataa

SEQ ID NO: 198627 - DNA, 201 bp, Homo sapiens
gcagaggcctttctaccctgagtgctcacaaatctcctaagccaacaccagctcatcagctccttctgtcactcaagagaagccttgaatcacgtccatarcaatgacaacctgctaaggcacttagatgctcatgctgggcaatgtccattcttctcctgcactgtgcagtcaacaccgtccctcaggtgacctggtgga

SEQ ID NO: 198628 - DNA, 201 bp, Homo sapiens
cccacatcagtcacagacaggaaaaaccaggagaagcagcatcatggcccattcccagagcaacagaaaagcccagggatcagtgaaactcagggagacaktggtggcacaggaacctaagtgggatgagctgacctaataacccagaggcacagcctagccaagaccctgcttctgtggaaagttttggagccccgtggc

SEQ ID NO: 198629 - DNA, 201 bp, Homo sapiens
ataaagtggtatctcctggtggttttgatttgcatcccctgatgactaatgacattgaacagctttccatgtgcatattggccatttgtgtatcttcgtgrggggaatatctattcagatctttggctcatttttaattggattatttgcctcttattatggaattggaagagttcttcttacattctagatataattttc

SEQ ID NO: 198630 - DNA, 201 bp, Homo sapiens
atcagtctgcagcctagtcacacctgaatcactctacattgcgtaaaactttaaatgggctggtgtcgatagcctgtatttaacaagaagagcagctaacrtttctcatgtatttcccatatggcagacattgttacaaacactttatatttactgtttaattgatttctctccacaaccctaggagctaagcactgttgt

SEQ ID NO: 198631 - DNA, 201 bp, Homo sapiens
gaattagaacaggaagaacttcaaaaccagttagatactgacaaggagccaattgctatatcttgaaggaaattgtgcagtctttgtttgttgttgttgtkgtggtggtggtggtggtggttgttgttttgagacagggtctcgctctgttgcccaggctggagtgcagtggcgcaatcacagctcacttcggcttcgact

SEQ ID NO: 198632 - DNA, 201 bp, Homo sapiens; identical to SEQ ID NO: 34555

SEQ ID NO: 198633 - DNA, 201 bp, Homo sapiens
tagtttgaacccgggaggcagaggttgcagtgagctgagatggcgccactgtactccagcctgggtaacagactccatcgcaaaaaaaaaaaaaaaaaaaatttacacgaacacacacgtaagcatggcatgctccctgacacagtgagtcttttttctcaaacacacatcctagcatagacacaaaagcccttttccagg

SEQ ID NO: 198634 - DNA, 201 bp, Homo sapiens
ttgattctcgttctccttctccctgcatacctccaggcaccaagaacagcttccagacactgcagatgaagctagaaaacatcaccaacccctggagcccragacaccgcgtggtccagccaactctggagcagacgcagtactcctgggagcgccaggcggccttccgcttcaaaaggaagctgcctaagtacctgctct

SEQ ID NO: 198635 - DNA, 201 bp, Homo sapiens
ccactctacaatgtatatgtatatcaaaacatcatgtttcacccaagaaaaacatacaagttatgtcaagtaaaaaaaaaaaaaagatgaaaaaaaaaaaagcaaagcagatttctctgagcaccatcagtgcctgcattgagttcttttttatcaatggagctgctccatgaatggctctgagtcttgcctgcacctcgg

SEQ ID NO: 198636 - DNA, 201 bp, Homo sapiens
aattagctaaatttaaccactctacaatgtatatgtatatcaaaacatcatgtttcacccaagaaaaacatacaagttatgtcaagtaaaaaaaaaaaaaagatgaaaaaaaaaaaagcaaagcagatttctctgagcaccatcagtgcctgcattgagttcttttttatcaatggagctgctccatgaatggctctgagt

SEQ ID NO: 198637 - DNA, 201 bp, Homo sapiens; identical to SEQ ID NO: 34560

SEQ ID NO: 198638 - DNA, 201 bp, Homo sapiens
actaaaacagcgtggtactggcataaaaacagatgcataaaccaatggaacaggatagagagcccagaaataaatctacaccttcatagccacctgattttcaacagcagtgcgaagatagcacagtggaaaaaggacaattgcttcaatagaatggtgttagaaaaactggatatccacaaacagaaaaatgaaattacc

SEQ ID NO: 198639 - DNA, 201 bp, Homo sapiens
ctcatctaatgacctcatcttaacttaattacttctttatagaccctatttccaaatatagtcacattctgaggtactaggggtacgacttcaacatatgmattttgggggacacagttcagcccatgacagcgcctcactaggtgctggtgatacttgatcctgaccaggctgctccatcaacaagagtaacgagtggaa

SEQ ID NO: 198640 - DNA, 201 bp, Homo sapiens
tgggaatattcagggtgtctcctggatgatatcaccataaaagaatggcatgggtagaataactaatgctgccagacccaacaaggccaccaggaccacaygggcggctcctacccctcagccccagtcacctctctggacagagcctcccatgcctggagaaaaatgggtgcccctgctctaggattgcagccacagcag

SEQ ID NO: 198641 - DNA, 201 bp, Homo sapiens
tgtcacccaggccggagtgcagtggctcaatcttggctcactgccacatcatcctcccgggttcaagtaattctcctgcctcagcctcctgagtagctgggattacaggcacgcaccaccacgcccggctaatttttgtatttttagtagagacagggtttcatcatgttagcagtctggtctggaactcctgacctcgtg

SEQ ID NO: 198642 - DNA, 201 bp, Homo sapiens
catatggcagacattgttacaaacactttatatttactgtttaattgatttctctccacaaccctaggagctaagcactgttgtcattattttcattttawaactaagaacatgaaggcccagagagtttaagcagcgtgcccaaggccacacagcaagtcctagtggcatgagtcactgggacttgactcagacagcctg

SEQ ID NO: 198643 - DNA, 201 bp, Homo sapiens
gaatcactctacattgcgtaaaactttaaatgggctggtgtcgatagcctgtatttaacaagaagagcagctaacatttctcatgtatttcccatatggcrgacattgttacaaacactttatatttactgtttaattgatttctctccacaaccctaggagctaagcactgttgtcattattttcattttaaaactaaga

SEQ ID NO: 198644 - DNA, 201 bp, Homo sapiens
tgccgccaacgcctgcaggacacctctctgaacacccgtgacacctcatggcacctctgctgtcagagcttcactaggactcaccagactaagcagacagktatacccacggccaacacacagcaaggacacagcggggtctggaggggtcagggcacagactcgctgagctctccctcccatgaaggctgcacagagcat

SEQ ID NO: 198645 - DNA, 201 bp, Homo sapiens
ggcacttagcacagtgccgggcacagaatctgcatctgattcaactggggcataaatggatgaaggaacttgttaaataatgacacaatggccgccttggwttctttgcattctcgttggagtgagaaatctcctttttctgaaaactgacctgaatgtggaggacagacaagtagtgactcttggctctgcaatccatga

SEQ ID NO: 198646 - DNA, 201 bp, Homo sapiens
caggactgggcacctctacctcacccccaaagccatcagtctgcagcctagtcacacctgaatcactctacattgcgtaaaactttaaatgggctggtgtygatagcctgtatttaacaagaagagcagctaacatttctcatgtatttcccatatggcagacattgttacaaacactttatatttactgtttaattgatt

SEQ ID NO: 198647 - DNA, 201 bp, Homo sapiens
ctgcccccaccacatgcccctgctctgttttcccctgagcatgtgccccactggaacacactgggtcaccacttgccgccaacgcctgcaggacacctctstgaacacccgtgacacctcatggcacctctgctgtcagagcttcactaggactcaccagactaagcagacagttatacccacggccaacacacagcaagg

SEQ ID NO: 198648 - DNA, 201 bp, Homo sapiens
gtaatctgatgaccctcacagggtcattgtgaggagtgaataaaatatacacgtgaggcacttagcacagtgccgggcacagaatctgcatctgattcaaytggggcataaatggatgaaggaacttgttaaataatgacacaatggccgccttggattctttgcattctcgttggagtgagaaatctcctttttctgaaa

SEQ ID NO: 198649 - DNA, 201 bp, Homo sapiens
tctcttctaatccaaatccccccaattctctgcggagttggtgagcccataactgagaatacataactcacagtcctcttgaacactgagggtgaaagacrttagcattcattgtctttgtatcaatcatcattttaacatggaaggcaaatccccttcctcagaaacaccaaagaccttctggaattgcaagcaagcttc

SEQ ID NO: 198650 - DNA, 201 bp, Homo sapiens
ggagtctcatatcccagccctcagcaaatctcccccagcctcccttccagctacatccagaatgtggccacttctcatcacttccacccctgcaaccctgrcctggcaaccagccttgccccccaagactattgcaaccaccccccggcctgctctctgctcctgccatcattgcagccttcactcttttgcattctgtct

SEQ ID NO: 198651 - DNA, 201 bp, Homo sapiens
caggcgtgagccaccgcgcccagccggttctcacttcttcatatgtaatctgatgaccctcacagggtcattgtgaggagtgaataaaatatacacgtgargcacttagcacagtgccgggcacagaatctgcatctgattcaactggggcataaatggatgaaggaacttgttaaataatgacacaatggccgccttgga

SEQ ID NO: 198652 - DNA, 201 bp, Homo sapiens
ccgtgtgtgaaagggtctaactccatcatgtgcatgtggcccctttccctttaaatctttgcaagtctcttttctcgatccatcctcactccattaacttygtcgcagtttcctttgtggaatggaaacagattgtagtcctcaaaatcaggttgttcctgaaactctcttctaatccaaatccccccaattctctgcgga

SEQ ID NO: 198653 - DNA, 201 bp, Homo sapiens
agaatctgtatatacacttgagagagggagaatgccatgactgtgaggctttgcattgaactcagtgctgctatgtcacagcggaaagcaaaactgagctrtactcagctgacaccacggagggaacatgtggaccagccctggccagagggtactcacccagcccagcagtcagagcatgagttccagcaagcctcaccc

SEQ ID NO: 198654 - DNA, 201 bp, Homo sapiens
ctttctcttgagcatatacccaggagtgggattgctgggttatatgataacaacgttaagtcatttgaggaacagccagacagttttccgaagtggctgcrtcatctcaccatgaactgcctgtgaggcttccagtttctctgcctcctggccccacctgttattaccttgcttttgaattctagccatcctagtggatat

SEQ ID NO: 198655 - DNA, 201 bp, Homo sapiens
gtaaagaggattttgtctcgcattttggataccagctcagccacagtatgttagggcactgataaaggctgtgaggcccccattccaggccctagctcccmgacaacatttctggacacaccatgggccaagggagcccattgtcttgaaggatgagttcctatgcctggcaacattcaccacaagctgactgaagttcct

SEQ ID NO: 198656 - DNA, 201 bp, Homo sapiens
ggcgctggggactatgcatggggccccagctgccccaggacagcctccagcttggggcagggcaaggggaggaagctcagtccatgggaaaattccatggycctaacctgagggaagcccatctctgcccataagacaactaagttcatctcctctattgcattccagagccgtggagcgagagatgccggccctgggctg

SEQ ID NO: 198657 - DNA, 201 bp, Homo sapiens
gggcagaggttggggctggtcacgtaggcacactctctgcccaccacaactaacaagattccagattcccaataggaaagcaggtgttcactaatcacatwgtctgtaaaaacagtcagcaggccggcacagcggggcaggatcctgaaagttaagttcccagatgccagcccagggccagcccctgtcatcagctgtccc

SEQ ID NO: 198658 - DNA, 201 bp, Homo sapiens
ctgcatcctgtggtttgagttccagctcagctgcagtagaatagaacaacaggtagacttctaagattttagattcccatccatggctccagatggcatcyctggacccactcaggacctaggggacctcaccaacctgaagggaaggatgtaagcctggctggcgtcaccacctttgctgattgtagagccctagggcct

SEQ ID NO: 198659 - DNA, 201 bp, Homo sapiens
tgggaggctgaaacgcacacatttatttatcacagttctggacgctggaagcctgagcccaaggcatctgcaaggttggttccctctgagacctctcctasgctcacggatgtctgtgttctgcctgtgttctcctcatcacatggtcatccctctgtgtgtgtttgtgttccaattacctcttctcataaagacaccaga

SEQ ID NO: 198660 - DNA, 201 bp, Homo sapiens
acctggcccttttatgacccttacttgtttacttgacccttacttgaggacatctgactctactcactctagttcatgccccccagggcacagccagggcwtttcatatctgtgtctgcacagcaagggcagtatagtgtggtagggctgtgcagctctgaaagcactgccagggtgggttgagatcttggttctcatttc

SEQ ID NO: 198661 - DNA, 201 bp, Homo sapiens
acccagtacaaaggccacctgctctgggaaacatttcccaaaccactgccccaccctgggtgactggaccactccctcctccatgccctgtacatacctcrctctctgcacctggcccttttatgacccttacttgtttacttgacccttacttgaggacatctgactctactcactctagttcatgccccccagggcaca

SEQ ID NO: 198662 - DNA, 201 bp, Homo sapiens
ttggatagaatgttctgcaaattgttaggtccctttgtctatagtgcagtttaaatctaatgtctctttgttgactttctgcctagatgatatatgtccartgctgagagtgggggtcaatctttgtgcttcccaacctgctgctgaggttgctcctttggcctgtaataacctcaccactagcatctgttcccctcacaa

SEQ ID NO: 198663 - DNA, 201 bp, Homo sapiens
atttttttcttctttaagaatccaatgcacatttcgtgaggtagctactaaagagagccaggaggaaggaagaattctgctgtgtctactgcccagccccrgctgccagacacagctgcagctggagggaggaatgtgggatttgacggggaagctgtcagctggccagcactgccaggcatggtcagtgaagatacaaag

SEQ ID NO: 198664 - DNA, 201 bp, Homo sapiens
aaattctttatttcaaagatcagcaacatattttaacttctgcttcctgattttctggcctcttgatttttttcttctttaagaatccaatgcacatttcrtgaggtagctactaaagagagccaggaggaaggaagaattctgctgtgtctactgcccagccccggctgccagacacagctgcagctggagggaggaatg

SEQ ID NO: 198665 - DNA, 201 bp, Homo sapiens
ccctgtctagcactccttccttctgccaatggggagctgtagaagaggaaggggactaaaagagaaaatcataacaggaaggaattggagccagcaagggytaagctcagaaccagcatccaagactttggcctcagttacctgttacatttttgctgctgccaccagtctgcctggggcctctcttcctgatgcctgctg

SEQ ID NO: 198666 - DNA, 201 bp, Homo sapiens
ctctggagtctcatatcccagccctcagcaaatctcccccagcctcccttccagctacatccagaatgtggccacttctcatcacttccacccctgcaacmctgacctggcaaccagccttgccccccaagactattgcaaccaccccccggcctgctctctgctcctgccatcattgcagccttcactcttttgcattct

SEQ ID NO: 198667 - DNA, 201 bp, Homo sapiens
tcccctgagtaaggaaggctgcaggactgaaggacatttacagaggagtgaggagagggcagaaataaatggatggatgcacaggcagcggcccgacggckctggggactatgcatggggccccagctgccccaggacagcctccagcttggggcagggcaaggggaggaagctcagtccatgggaaaattccatggccct

SEQ ID NO: 198668 - DNA, 201 bp, Homo sapiens; identical to SEQ ID NO: 34566

SEQ ID NO: 198669 - DNA, 201 bp, Homo sapiens; identical to SEQ ID NO: 34567

SEQ ID NO: 198670 - DNA, 201 bp, Homo sapiens
atacatttggcagcagactttttagtggaaatcttacaagccaggagatagtggcatgacatatttaaggtgctgaaggaaaaaacttttactctagaatyatatatctggtgaaaatatccttcaaacatgaaggagaaatactttcccagacaaacaaaagctgaggaatttcatcaacaccagacctgtcctacaaaa

SEQ ID NO: 198671 - DNA, 201 bp, Homo sapiens
gaagaaaaaagagtctctgcttggtaatccggagaattcttctggaccttatcaaagaccaccaacgtgatacctctacaagtgtgcaagaaccacggtgytactgggctaggggtgcccactaaagcagatacagcttagatcatagcacccaagtccttttgaatacctggaaactgttcccaaggaggacaggctcaa

SEQ ID NO: 198672 - DNA, 201 bp, Homo sapiens
ccttccccttcctcctagatccctgtcaggtcctttcacctgagccttgattccatgtgactatgatagttggttgtttggttggtgcccatatttgtttkctagagctgccatagcaaagtaccacaactgggaggctgaaacgcacacatttatttatcacagttctggacgctggaagcctgagcccaaggcatctgc

SEQ ID NO: 198673 - DNA, 201 bp, Homo sapiens
gctgaaacgcacacatttatttatcacagttctggacgctggaagcctgagcccaaggcatctgcaaggttggttccctctgagacctctcctaggctcayggatgtctgtgttctgcctgtgttctcctcatcacatggtcatccctctgtgtgtgtttgtgttccaattacctcttctcataaagacaccagacatatt

SEQ ID NO: 198674 - DNA, 201 bp, Homo sapiens
gaaaagcctttagggaaactggcttgttactaagacagatgtgaactaaacaagacagacgtgaactaaacaagacagacgtgaactaaacaagacagacrtgaactaaatcaactctctgatcttatggagcaggggaaggggaaaagtcaaggagccctcacacacactcaccacatctcagggcccctggagtcctct

SEQ ID NO: 198675 - DNA, 201 bp, Homo sapiens
tgtgcagtctttgtttgttgttgttgtggtggtggtggtggtggtggttgttgttttgagacagggtctcgctctgttgcccaggctggagtgcagtggcrcaatcacagctcacttcggcttcgacttcctaggttcattatgcttttgggttaatttcttaccagtggtatctgtgataaattacagattgacagggcc

SEQ ID NO: 198676 - DNA, 201 bp, Homo sapiens
tcctactacacacaggacaggcccgtgagcatgatcaggctcaaactatcaatggtgccaaggttaaaaatccttgatgtagacaatgatagcaaagaccrtgaggctggaaagaaatccagagctatttaggaattagaacaggaagaacttcaaaaccagttagatactgacaaggagccaattgctatatcttgaagg

SEQ ID NO: 198677 - DNA, 201 bp, Homo sapiens
ctagacgtcctactacacacaggacaggcccgtgagcatgatcaggctcaaactatcaatggtgccaaggttaaaaatccttgatgtagacaatgatagcwaagaccgtgaggctggaaagaaatccagagctatttaggaattagaacaggaagaacttcaaaaccagttagatactgacaaggagccaattgctatatc

SEQ ID NO: 198678 - DNA, 201 bp, Homo sapiens
atgctgctagacgtcctactacacacaggacaggcccgtgagcatgatcaggctcaaactatcaatggtgccaaggttaaaaatccttgatgtagacaatratagcaaagaccgtgaggctggaaagaaatccagagctatttaggaattagaacaggaagaacttcaaaaccagttagatactgacaaggagccaattgc

SEQ ID NO: 198679 - DNA, 201 bp, Homo sapiens
acttaataatcacactcccaaagggcaaggattttttttaaaaatgatcctaaaagcagcaagagaaaaaaaaaaaaaaaacaagtaacatacaatggagstccaatacatttggcagcagactttttagtggaaatcttacaagccaggagatagtggcatgacatatttaaggtgctgaaggaaaaaacttttactcta

SEQ ID NO: 198680 - DNA, 201 bp, Homo sapiens
ggccagagatgctgctagacgtcctactacacacaggacaggcccgtgagcatgatcaggctcaaactatcaatggtgccaaggttaaaaatccttgatgwagacaatgatagcaaagaccgtgaggctggaaagaaatccagagctatttaggaattagaacaggaagaacttcaaaaccagttagatactgacaaggag

SEQ ID NO: 198681 - DNA, 201 bp, Homo sapiens
aaaagttaagaatctaaagacagcagcggagcgttaagccaagtagagagcccttctgagtgtgagacgtgggagactgcacagccgcatggccaggagcyggtgctgactcagaccactcccagttgtccttggcctcggcctaaggagcctgcgatgttgtataaagactcttcccttgagttgagagttaatagcatc

SEQ ID NO: 198682 - DNA, 201 bp, Homo sapiens
tagcctgaaggcttcctctggtgctcacataggtgcaaatgtcaaccagccccttcaattttgtttcttcagtcctcaacctccctccagacccaggtgcrgtgtcactgcaaaggggcatttggttttaaagaaattaccccctgtctagcactccttccttctgccaatggggagctgtagaagaggaaggggactaaa

SEQ ID NO: 198683 - DNA, 201 bp, Homo sapiens
tcctgatttttcatgttactggtcgcagcctgaaggtgcattttcaaatagcctgaaggcttcctctggtgctcacataggtgcaaatgtcaaccagcccyttcaattttgtttcttcagtcctcaacctccctccagacccaggtgcggtgtcactgcaaaggggcatttggttttaaagaaattaccccctgtctagca

SEQ ID NO: 198684 - DNA, 201 bp, Homo sapiens
ttaatgaaaaaataagtccctaagctggagaaagagcccctggggtacaattctagtggtaagaagctgccaggctctcctgatttttcatgttactggtygcagcctgaaggtgcattttcaaatagcctgaaggcttcctctggtgctcacataggtgcaaatgtcaaccagccccttcaattttgtttcttcagtcct

SEQ ID NO: 198685 - DNA, 201 bp, Homo sapiens
ataccttttacctcatctgatgccaacgattttgtcataccttcatatccattattgtgcctgtttcacaaatgagaaaactgagtgaggtttaaaaaatwaacttttttttttttttttttgagacagagtctcactctgtcgcccaggctggagtgcagtggcgcaatctctgctcactgcaagctctgcctcccgggt

SEQ ID NO: 198686 - DNA, 201 bp, Homo sapiens
attgttgggaaggtggaatgagataatgctcataaagcatttaaaacggggtctgtatctggagcagtgcagtgtatgttggcatggtggtcacagtcacycctctgtatgagctccataagtacaatcagatacactatctcagttttcctctctccgtggttttgagcctgctcagagtgggcctggggtgcctttcat

SEQ ID NO: 198687 - DNA, 201 bp, Homo sapiens
tcatcatagctaacatttattgagtgatttctatgtgtcaaaaacattagttaggtgctttacataccttttacctcatctgatgccaacgattttgtcayaccttcatatccattattgtgcctgtttcacaaatgagaaaactgagtgaggtttaaaaaataaacttttttttttttttttttgagacagagtctcact

SEQ ID NO: 198688 - DNA, 201 bp, Homo sapiens
tatggtatcaacctaaatgtccatcaaaggacaaatggatttaaaaaaatgagttgtatatatacacatggaataccacttatccataaaaaagaatgaartctgccatttgtgataacaggatgaacttggaggacattctgtaagtgaaataagccaggcacagaaagataaataccgcatgatctcactcatcaagat

SEQ ID NO: 198689 - DNA, 201 bp, Homo sapiens
atgatcatcatcatcatagctaacatttattgagtgatttctatgtgtcaaaaacattagttaggtgctttacataccttttacctcatctgatgccaacrattttgtcataccttcatatccattattgtgcctgtttcacaaatgagaaaactgagtgaggtttaaaaaataaacttttttttttttttttttgagaca

SEQ ID NO: 198690 - DNA, 201 bp, Homo sapiens
tcaactctctgatcttatggagcaggggaaggggaaaagtcaaggagccctcacacacactcaccacatctcagggcccctggagtcctctgtattaccckcattcatacctccccaactgtaaccatcatcatcatcatagctaaccatgatcatcatcatcatagctaacatttattgagtgatttctatgtgtcaaaa

SEQ ID NO: 198691 - DNA, 201 bp, Homo sapiens
aacagaactacaatatgatccagcaaccccactactgggtatatattcaaaggaattgaaatcagtatgttgaagagatatctgcactcccatgtttattrcagcactatgcacaataaccaaaatatggtatcaacctaaatgtccatcaaaggacaaatggatttaaaaaaatgagttgtatatatacacatggaatac

SEQ ID NO: 198692 - DNA, 201 bp, Homo sapiens
ataagacaactaagttcatctcctctattgcattccagagccgtggagcgagagatgccggccctgggctgggccgtggctgccatcctgatgctgcagayggccatggcggagccctccccggggactctgcccaggaaggcaggggtgttttcagacctaagcaaccaagagctgaaggcagtgcacagcttcctctgg

SEQ ID NO: 198693 - DNA, 201 bp, Homo sapiens
caagtaccgggagtcggagctgtgcagcagcagcatctaccaccagaacgacccctggcacccgcccgtggtctttgagcagtttcttcacaacaacgagmacattgaaaatgaggtactgccctgtccccagccctgcccggtgctggccctgcctccttccagctcagcccaggaccatcctcatcaccatcagggagt

SEQ ID NO: 198694 - DNA, 201 bp, Homo sapiens
cccgacggcgctggggactatgcatggggccccagctgccccaggacagcctccagcttggggcagggcaaggggaggaagctcagtccatgggaaaattycatggccctaacctgagggaagcccatctctgcccataagacaactaagttcatctcctctattgcattccagagccgtggagcgagagatgccggccct

SEQ ID NO: 198695 - DNA, 201 bp, Homo sapiens
accagaacgacccctggcacccgcccgtggtctttgagcagtttcttcacaacaacgagaacattgaaaatgaggtactgccctgtccccagccctgcccrgtgctggccctgcctccttccagctcagcccaggaccatcctcatcaccatcagggagtcccaaccaccctttgcccagatctgtccccagtcgcaggag

SEQ ID NO: 198696 - DNA, 201 bp, Homo sapiens
atcatcttcctctattctgaccctgaggctgttccctgggcaggactgaggggggccagcccagggccctgagccaagctgcttcgcctgtgcctggcagktaccccctggcagtgaccaagtaccgggagtcggagctgtgcagcagcagcatctaccaccagaacgacccctggcacccgcccgtggtctttgagcagt

SEQ ID NO: 198697 - DNA, 201 bp, Homo sapiens; identical to SEQ ID NO: 34563

SEQ ID NO: 198698 - DNA, 201 bp, Homo sapiens
tgagtacaagaaggttatagaacaccaagcagattgaacccaaagaagaccacttcaaggcacttaataatcacactcccaaagggcaaggattttttttwaaaatgatcctaaaagcagcaagagaaaaaaaaaaaaaaaacaagtaacatacaatggaggtccaatacatttggcagcagactttttagtggaaatctt

SEQ ID NO: 198699 - DNA, 201 bp, Homo sapiens; identical to SEQ ID NO: 34564

SEQ ID NO: 198700 - DNA, 201 bp, Homo sapiens; identical to SEQ ID NO: 34565

SEQ ID NO: 198701 - DNA, 201 bp, Homo sapiens
aacttcctgacctcaaagtataatacaaagcaatagtaactaaaacagcgtggtactggcataaaaacagatgcataaaccaatggaacaggatagagagyccagaaataaatctacaccttcatagccacctgattttcaacagcagtgcgaagatagcacagtggaaaaaggacaattgcttcaatagaatggtgttag

SEQ ID NO: 198702 - DNA, 201 bp, Homo sapiens
gaggcatcaaacttcctgacctcaaagtataatacaaagcaatagtaactaaaacagcgtggtactggcataaaaacagatgcataaaccaatggaacagratagagagcccagaaataaatctacaccttcatagccacctgattttcaacagcagtgcgaagatagcacagtggaaaaaggacaattgcttcaatagaa

SEQ ID NO: 198703 - DNA, 201 bp, Homo sapiens
aagcaaaaagaacaaagctagaggcatcaaacttcctgacctcaaagtataatacaaagcaatagtaactaaaacagcgtggtactggcataaaaacagaygcataaaccaatggaacaggatagagagcccagaaataaatctacaccttcatagccacctgattttcaacagcagtgcgaagatagcacagtggaaaaa

SEQ ID NO: 198704 - DNA, 201 bp, Homo sapiens
gaaccaagtatttttaaaatgaaaaaaaaattgaacttaatgagaatttgctgtttaacttttaaaagtaaggcatatcacaacaccaatgacattcttcrcagaaataacaaaagtattcctggaatttgtatggaaacacacacaaaaaaaaacccaaaaagctgaaataagcaaaaagaacaaagctagaggcatcaa

SEQ ID NO: 198705 - DNA, 201 bp, Homo sapiens
aacatatgaattttgggggacacagttcagcccatgacagcgcctcactaggtgctggtgatacttgatcctgaccaggctgctccatcaacaagagtaaygagtggaaatttcagctccttagaaccaagtatttttaaaatgaaaaaaaaattgaacttaatgagaatttgctgtttaacttttaaaagtaaggcatat

SEQ ID NO: 198706 - DNA, 201 bp, Homo sapiens
tctttatagaccctatttccaaatatagtcacattctgaggtactaggggtacgacttcaacatatgaattttgggggacacagttcagcccatgacagcrcctcactaggtgctggtgatacttgatcctgaccaggctgctccatcaacaagagtaacgagtggaaatttcagctccttagaaccaagtatttttaaaa

SEQ ID NO: 198707 - DNA, 201 bp, Homo sapiens
acctcttctcataaagacaccagacatattggattaagactcatctaatgacctcatcttaacttaattacttctttatagaccctatttccaaatatagycacattctgaggtactaggggtacgacttcaacatatgaattttgggggacacagttcagcccatgacagcgcctcactaggtgctggtgatacttgatc

SEQ ID NO: 198708 - DNA, 201 bp, Homo sapiens
attccatgtgactatgatagttggttgtttggttggtgcccatatttgtttgctagagctgccatagcaaagtaccacaactgggaggctgaaacgcacayatttatttatcacagttctggacgctggaagcctgagcccaaggcatctgcaaggttggttccctctgagacctctcctaggctcacggatgtctgtgtt

SEQ ID NO: 198709 - DNA, 201 bp, Homo sapiens
aatattagtcaacacataaataacaaaggaccaattccagaaggtgttaaattgaatcatatgaaactgccattttttgtaagtcaaaaatggtcaagtgycagcaatttcacatgaagaattcttaaaaatcattaaggcggacaacccaacagaaaaaattgccaaagatctgacactgtacataagaggaagcccaaa

SEQ ID NO: 198710 - DNA, 201 bp, Homo sapiens
ctgagatggccaacaacttactcacatgcagagggaaaataacacttagaaagaaaaataagagttttgaaaagagaggggggtgaatgaaaagcctttakggaaactggcttgttactaagacagatgtgaactaaacaagacagacgtgaactaaacaagacagacgtgaactaaacaagacagacgtgaactaaatca

SEQ ID NO: 198711 - DNA, 201 bp, Homo sapiens
ggcactcctgagccacgaacttttcctgactctattctttcctttccaactaggagttaccccggtcaccacgttcgcccttctcaacctgactaagtggkcgttagcactgtccgcccactgcatgggcactacctgccccagtgtcctctcccctctccgctctgtgccatagccttagctaccctggccagctttctc

SEQ ID NO: 198712 - DNA, 201 bp, Homo sapiens; identical to SEQ ID NO: 34558

SEQ ID NO: 198713 - DNA, 201 bp, Homo sapiens
ccctgggcaggactgaggggggccagcccagggccctgagccaagctgcttcgcctgtgcctggcaggtaccccctggcagtgaccaagtaccgggagtcrgagctgtgcagcagcagcatctaccaccagaacgacccctggcacccgcccgtggtctttgagcagtttcttcacaacaacgagaacattgaaaatgagg

SEQ ID NO: 198714 - DNA, 201 bp, Homo sapiens
cccagggcatcccccaacatcccggttattcaagacagttggctgttggatgtggtggaggatggagatcctggggtagaatgaggaggtttcagttctgrcagcttgattctcgttctccttctccctgcatacctccaggcaccaagaacagcttccagacactgcagatgaagctagaaaacatcaccaacccctgga

SEQ ID NO: 198715 - DNA, 201 bp, Homo sapiens
ttagctacaatgggacctatagacctgtgtgaccagcccccagttcctcccccagttcctcccaggaagcccaggagcctcactggggcagacaataaacyctcagagcctcgctctgtgtgctgcttcttgcggggaggcacagggccatgtgtgtaggaaacacacgaacagacgtgcacacacacagacgtgcacaca

SEQ ID NO: 198716 - DNA, 201 bp, Homo sapiens
cctcacttcagcctagatacagagtgagatgctgtctcaaacaaaaaaaaaaaagaacaaaaagtaggggaacaaagataaagagaaagtctttattagtkttctttttgctttttagtttgcttgtttatgcaagtagtgttaagttgttatcaacttaatagattgtaagagtatttgcaagccctgtggtaatctcaa

SEQ ID NO: 198717 - DNA, 201 bp, Homo sapiens
gcagtgactgttctggtgatttctgaagtcctacatgctacctccaatatgcacctggaatgtcatagtcaccaaaatggtttaacacaaatacatccctkcaccacacaaggtcacatgtctaccaacacaaattctttatttcaaagatcagcaacatattttaacttctgcttcctgattttctggcctcttgatttt

SEQ ID NO: 198718 - DNA, 201 bp, Homo sapiens
ctgctcccccttccccttcctcctagatccctgtcaggtcctttcacctgagccttgattccatgtgactatgatagttggttgtttggttggtgcccatrtttgtttgctagagctgccatagcaaagtaccacaactgggaggctgaaacgcacacatttatttatcacagttctggacgctggaagcctgagcccaag

SEQ ID NO: 198719 - DNA, 201 bp, Homo sapiens
tgtttgtttgttttgttttgtttttgaaatggagtctcgctctgtcacccaggccggagtgcagtggctcaatcttggctcactgccacatcatcctcccrggttcaagtaattctcctgcctcagcctcctgagtagctgggattacaggcacgcaccaccacgcccggctaatttttgtatttttagtagagacagggt

SEQ ID NO: 198720 - DNA, 201 bp, Homo sapiens
caagcctagttgtttgtttgtttgttttgttttgtttttgaaatggagtctcgctctgtcacccaggccggagtgcagtggctcaatcttggctcactgcmacatcatcctcccgggttcaagtaattctcctgcctcagcctcctgagtagctgggattacaggcacgcaccaccacgcccggctaatttttgtattttt

SEQ ID NO: 198721 - DNA, 201 bp, Homo sapiens
gcccattggagaaagctgggaaaaatggaaaagtataacaaaaagacaaaaattacccataatttcacaccccagagataaccactgttaatatttttgtrtgatcttttcactagtgatagatagataaacaaataagtagactgacatacaaatgcattaggcacatttttcccacaagtggaaaaacaccaataatta

SEQ ID NO: 198722 - DNA, 201 bp, Homo sapiens
aggcgagggcgtttggtcactctctgaatccacctgccaccacttgcccctggcgacagcagtcccctcactctgcatcagggactttgcattccttgctmcttcagcctgaaatgcccccgccaccaggcatccttgtggcccactccttcaccacattgaggagaagaggagtcccctttctgaaaggtcaggccctgc

SEQ ID NO: 198723 - DNA, 201 bp, Homo sapiens
gagcctaaagaggttaacaatccagcaacaacgaagaagaatattttgatggaatttctccttgtctttgccatatattatatgccttttttcagagtacrctattcatcaagaacttgagcttctcgaacactatattttggttatagacttttttattgcttttttatgattataaaaataaatacatgcccattggag

SEQ ID NO: 198724 - DNA, 201 bp, Homo sapiens
tatcaatggagctgctccatgaatggctctgagtcttgcctgcacctcggaatcaactggggagcttttaaccccaccccctacaaacccaggcccccctrtctaaatcagaatccggaggtgggacctctgggcaccaatagttaggaacactgcctgggtgattccaacatgcagccagcggggagaacaccccacaat

SEQ ID NO: 198725 - DNA, 201 bp, Homo sapiens
ggctccaacatagaccttgagattgctaaatgttctcattctgagctaatctggagcctaaagaggttaacaatccagcaacaacgaagaagaatattttratggaatttctccttgtctttgccatatattatatgccttttttcagagtacactattcatcaagaacttgagcttctcgaacactatattttggttata

SEQ ID NO: 198726 - DNA, 201 bp, Homo sapiens
ttttttatcaatggagctgctccatgaatggctctgagtcttgcctgcacctcggaatcaactggggagcttttaaccccaccccctacaaacccaggccyccctatctaaatcagaatccggaggtgggacctctgggcaccaatagttaggaacactgcctgggtgattccaacatgcagccagcggggagaacacccc

SEQ ID NO: 198727 - DNA, 201 bp, Homo sapiens
cttcactgtgaaactggctccaacatagaccttgagattgctaaatgttctcattctgagctaatctggagcctaaagaggttaacaatccagcaacaackaagaagaatattttgatggaatttctccttgtctttgccatatattatatgccttttttcagagtacactattcatcaagaacttgagcttctcgaacac

SEQ ID NO: 198728 - DNA, 201 bp, Homo sapiens
acatattcacagcttccaggaatcaggatgtgaccctcttggagagcaattattcagcctaccacatgcacatctaatgagtttttacaaatgcatacatytgtgtgactcaaactcccagcaagatagccttaccatcacccccagaacattctcatgccccttcccagtctgtcccagtctcaccctcaccccctagag

SEQ ID NO: 198729 - DNA, 201 bp, Homo sapiens
tcagaatcctgtcagaaaatttaacagagattgaaataattgaaaagaatcaaacagaaattctggagttgaaaatttcaattgacatactgaagaatgcrtcagagtctcttaatagcagaactgctcaagcagaagaaagaattagtgagaatagacaggctatttgaaattatatcgccagaagagacaaaaaaaatt

SEQ ID NO: 198730 - DNA, 201 bp, Homo sapiens
aataaatacctaactttttaatgctcgaacactgacgaacatccacaagcatcaaagccatccaggaaaacaagacctcatcaaatgaactaaataaggcrccagggaccaacctggagaaacagagatatctgacctttcagacagagaattcaaaatagctgttttgaagatactcaaagaaattcaagataacacaga

SEQ ID NO: 198731 - DNA, 201 bp, Homo sapiens
atgtgtgtaggaaacacacgaacagacgtgcacacacacagacgtgcacacacacacagacatgcacacacacacagacgtgcacacacacagacgtgcaygcactcacacggacatgcacacacatggcatgtactttattcacactggtctactgcagtccagaaaagccaccattactaacaaaaaggaagctcgctg

SEQ ID NO: 198732 - DNA, 201 bp, Homo sapiens
gtgaacccgggaggcggagcttgcagtgagccgagatcacaccactgcactccagtctgggcaacagagcaagactagttctcaaaaaaaaaaaaaaaaaaatcctaaggaaaagaaaatatatctacaatccattaagtgggagtggctcatcccaaaggtctttatcctcgtctccttcactttaagtgggctgaggaa

SEQ ID NO: 198733 - DNA, 201 bp, Homo sapiens
acatcaccaacctcttgctttcatagttacctctcctactcactctgatcccctgccttcttcttataaagactgtgattacatcagttccacatggatarcgcaggataatctcccatctcaagattcttagtttaatcgcatctgcagagtcctttttgccatgtgaaacaacatattcacagcttccaggaatcagga

SEQ ID NO: 198734 - DNA, 201 bp, Homo sapiens
ccaaaatcagtctggctgggccaaagtcaaggtgtaatcagggctggcttcttctggtatctctgaagggacaatctgtttccttgcctttttcaccttcraaagcattccttggctcatgaccccttcctcacatcaccaacctcttgctttcatagttacctctcctactcactctgatcccctgccttcttcttataa

SEQ ID NO: 198735 - DNA, 201 bp, Homo sapiens
agcattgcactggctcctcgttgccttcaggataaagtctatattccctccacatctccttccctactcctccagcattctgactggctgagccaactacycttaccccagtacagacaacctaactttgcagaactactcacaattcctaaacaccatcgaggatcaagcctctgcctttttcccttcaacattttacta

SEQ ID NO: 198736 - DNA, 201 bp, Homo sapiens
gtggaaaggtcattctagcagaggcagacaggctatatttggaggagacaagtttgggagcaggaaagccagtaggagtctactgcaggaatttaggtaaracatagcaaaagcacaatccaaaataatacaggaggaaatggaatgcaggagataggtgaaggaattctcaggaaatagaacttgctggggcattgggtg

SEQ ID NO: 198737 - DNA, 201 bp, Homo sapiens
tggggtgcctcttctgcaagttacccttgggattctttaccaggtttccatggggactgctgcctctttctgaccgatttgcaagagctccttgtgtattmtagatattagtcctgtcactttttgaaaacagctttattgagacacaccttacaattcacccatttaaagtgtataattcaatgcattttagtacattca

SEQ ID NO: 198738 - DNA, 201 bp, Homo sapiens
tcttttttatcaatggagctgctccatgaatggctctgagtcttgcctgcacctcggaatcaactggggagcttttaaccccaccccctacaaacccaggyccccctatctaaatcagaatccggaggtgggacctctgggcaccaatagttaggaacactgcctgggtgattccaacatgcagccagcggggagaacacc

SEQ ID NO: 198739 - DNA, 201 bp, Homo sapiens
gcaaagggaattgccggacggcaggtggcacagaattcctttggaactccaaattcttttttcagcttagtcttccctatgattctgacattttctacctraaggcagaacacatgggttgagcttgggttctcagaatagaggggtggaaaccaaagcgggtctgcttgagaggattcatttttgagccttcttcccaac

SEQ ID NO: 198740 - DNA, 201 bp, Homo sapiens
ttcacccaagaaaaacatacaagttatgtcaagtaaaaaaaaaaaaaagatgaaaaaaaaaaaagcaaagcagatttctctgagcaccatcagtgcctgcrttgagttcttttttatcaatggagctgctccatgaatggctctgagtcttgcctgcacctcggaatcaactggggagcttttaaccccaccccctacaaa

SEQ ID NO: 198741 - DNA, 201 bp, Homo sapiens
aaacatcatgtttcacccaagaaaaacatacaagttatgtcaagtaaaaaaaaaaaaaagatgaaaaaaaaaaaagcaaagcagatttctctgagcaccaycagtgcctgcattgagttcttttttatcaatggagctgctccatgaatggctctgagtcttgcctgcacctcggaatcaactggggagcttttaacccca

SEQ ID NO: 198742 - DNA, 201 bp, Homo sapiens
cttattttgagttttattcaaggacacagaagtccacttcttcttggaggaaggacagaatttagtccaatgtctgagaagctttaataggctgccagggwaaagaattatgagctgcctctttctctgggacatatgtgccattgttttcctctcagcacaaagactttgctgtgccctggggtaggggctttgcttcac

SEQ ID NO: 198743 - DNA, 201 bp, Homo sapiens
tacaacactgtaactgtggtgtgtaaactacttttaagtagaaagaccaaaatatgaaccaatcaaaaatcataacaacttttcaaaacatagacagtacrgtaagatataaatggaaacatcaagagttaaaaagtgggggaaggcctcacatggtggcttctgcctataatcccacagggcacccctgtaatccaagca

SEQ ID NO: 198744 - DNA, 201 bp, Homo sapiens
caaacccactctcgccactgtagctgcccacagaggcacctcccaagccataggcccctcctaggccagctcaggcctcaccttgtccctccctgcagggyggggtctgattgacttcaagaaggagtcagagatcagcttaagggcaaaggctggaagcagagcgaactgggagcagagcacacaggtgcgttctgatgg

SEQ ID NO: 198745 - DNA, 201 bp, Homo sapiens
gagagtttaagcagcgtgcccaaggccacacagcaagtcctagtggcatgagtcactgggacttgactcagacagcctgactctagagcctacctttgaayttctacactaaatttcaaaatctgtctacctaaaaggtatttcgttgtgtcagaaatgtagttttgctgttaatacaggtgtcttcttctccaggacaca

SEQ ID NO: 198746 - DNA, 201 bp, Homo sapiens
aattaacagatcgtggcattgcatggctcgtcacagagaagccaaggcaaattcttgtggaaggcggcacttgtctggaaacagactcaggacaagtgtgytgcacagccagcttcctcaaacccactctcgccactgtagctgcccacagaggcacctcccaagccataggcccctcctaggccagctcaggcctcacct

SEQ ID NO: 198747 - DNA, 201 bp, Homo sapiens
aaagtaggggaacaaagataaagagaaagtctttattagtgttctttttgctttttagtttgcttgtttatgcaagtagtgttaagttgttatcaacttawtagattgtaagagtatttgcaagccctgtggtaatctcaaatcaaaaaacatacaacagatgcacaaaaattaaaaagcaagaaatcaaatcataccacc

SEQ ID NO: 198748 - DNA, 201 bp, Homo sapiens
gggaggatcgcttgagccccagaggcggaggtggcagtgagctgagatcacgccatgcacctcacttcagcctagatacagagtgagatgctgtctcaaacaaaaaaaaaaaagaacaaaaagtaggggaacaaagataaagagaaagtctttattagtgttctttttgctttttagtttgcttgtttatgcaagtagtgt

SEQ ID NO: 198749 - DNA, 201 bp, Homo sapiens
aaagaagaccacttcaaggcacttaataatcacactcccaaagggcaaggattttttttaaaaatgatcctaaaagcagcaagagaaaaaaaaaaaaaaaacaagtaacatacaatggaggtccaatacatttggcagcagactttttagtggaaatcttacaagccaggagatagtggcatgacatatttaaggtgctga

SEQ ID NO: 198750 - DNA, 201 bp, Homo sapiens
agctgcttcgcctgtgcctggcaggtaccccctggcagtgaccaagtaccgggagtcggagctgtgcagcagcagcatctaccaccagaacgacccctggsacccgcccgtggtctttgagcagtttcttcacaacaacgagaacattgaaaatgaggtactgccctgtccccagccctgcccggtgctggccctgcctcc

SEQ ID NO: 198751 - DNA, 201 bp, Homo sapiens
aattgacatactgaagaatgcgtcagagtctcttaatagcagaactgctcaagcagaagaaagaattagtgagaatagacaggctatttgaaattatatcrccagaagagacaaaaaaaatttttttttaatgaagcacacctacaggatctagaaaatagcctcaaaagggcagatctaagagttgttggccttaaagag

SEQ ID NO: 198752 - DNA, 201 bp, Homo sapiens
cataccttcatatccattattgtgcctgtttcacaaatgagaaaactgagtgaggtttaaaaaataaacttttttttttttttttttgagacagagtctcrctctgtcgcccaggctggagtgcagtggcgcaatctctgctcactgcaagctctgcctcccgggttcatgccattctcctgcctcagcctcccaagtagg

SEQ ID NO: 198753 - DNA, 201 bp, Homo sapiens
tcataccttcatatccattattgtgcctgtttcacaaatgagaaaactgagtgaggtttaaaaaataaacttttttttttttttttttgagacagagtctyactctgtcgcccaggctggagtgcagtggcgcaatctctgctcactgcaagctctgcctcccgggttcatgccattctcctgcctcagcctcccaagtag

SEQ ID NO: 198754 - DNA, 201 bp, Homo sapiens
tggggaaggcaatcatcttcctctattctgaccctgaggctgttccctgggcaggactgaggggggccagcccagggccctgagccaagctgcttcgcctrtgcctggcaggtaccccctggcagtgaccaagtaccgggagtcggagctgtgcagcagcagcatctaccaccagaacgacccctggcacccgcccgtggt

SEQ ID NO: 198755 - DNA, 201 bp, Homo sapiens
gtctctgtgcatttggggaggggggcggggaggactcctgtgggtcacctgaacccggttaacagcagcccgtcctgctgactcccaggacagatgatctstcatcttggggaaggcaatcatcttcctctattctgaccctgaggctgttccctgggcaggactgaggggggccagcccagggccctgagccaagctgct

SEQ ID NO: 198756 - DNA, 201 bp, Homo sapiens
gccaacgattttgtcataccttcatatccattattgtgcctgtttcacaaatgagaaaactgagtgaggtttaaaaaataaacttttttttttttttttttgagacagagtctcactctgtcgcccaggctggagtgcagtggcgcaatctctgctcactgcaagctctgcctcccgggttcatgccattctcctgcctca

SEQ ID NO: 198757 - DNA, 201 bp, Homo sapiens
ggaggccaaggtgggcagatcacctgaggtcaggagttcgagaccagcctggccaacacagcgaaaccctgtctctactaaagatacaaaagttagccggrtgtggtcgtgggcgcctgtaatcccagctactcgggaggctgaggcaggagaatcacttgaacctgggaggcagaggttgcagtgagccaagatcgcatc

SEQ ID NO: 198758 - DNA, 201 bp, Homo sapiens
ttaagtgggctgaggaagaggaggaggaggggctggtcttgctgtctcacggtggcagaggcggaagaaactccaaatgaaagtggacttgtgtgctgggygcaggagctcacgcctgtaatcccagcactttgggaggccaaggtgggcagatcacctgaggtcaggagttcgagaccagcctggccaacacagcgaaac

SEQ ID NO: 198759 - DNA, 201 bp, Homo sapiens
tggcctcggcctaaggagcctgcgatgttgtataaagactcttcccttgagttgagagttaatagcatcctttgaaaccaggttacctagcatgttttttycttaaaatgccacagggaaattaaaagttttctgacgtctaggtacctaacacctcttccatcttccttgtccatgtcatctgtttattaattcactcca

SEQ ID NO: 198760 - DNA, 201 bp, Homo sapiens
gactagttctcaaaaaaaaaaaaaaaaaaatcctaaggaaaagaaaatatatctacaatccattaagtgggagtggctcatcccaaaggtctttatcctcstctccttcactttaagtgggctgaggaagaggaggaggaggggctggtcttgctgtctcacggtggcagaggcggaagaaactccaaatgaaagtggact

SEQ ID NO: 198761 - DNA, 201 bp, Homo sapiens
ggacaggttccaatggcttcaaatcagagatagcacaactattggggtgcaaaacatttttaagccccacaaaaagctaatttatcatactggagccctcmcttctagaataagttataatgccattgagatggtaaaagatatactcagggtctaatagttgtttgaagatttttaaagttatgtaaaaatatttgcatg

SEQ ID NO: 198762 - DNA, 201 bp, Homo sapiens
gcagctaccgcctgcagatccactccatggccgaccaggtgctgcccccaggctggcaggaggagcaggccatcacctgggcaaggtgaggaagacccagrgggcctgggggagggtcagtggcttccctcagtgtgtgtgtctgtgtctgtctgtgtttgtgtctatggggttcctagtctatgtggatatacacatata

SEQ ID NO: 198763 - DNA, 201 bp, Homo sapiens
ctgcgctaggacctacaagggcggcctctgggagccctctgctttacctcctctcctgggtcaggctgcagaaagaacaagctcctccaccctgcctggtrggcatggaaggagggcaagtgttggtagccatggtaactcggggtagccatattttcgtgcagtcactctgaccccatctcgatggacaaggattgtccc

SEQ ID NO: 198764 - DNA, 201 bp, Homo sapiens
attaaaaagaaaactgaagaacccaaaattctgtcaaagtcaaatatctttagacaaatcttgaggacaaagggaatggaaattccatcaaagtggtgcartgacctgagtaggagtttacagattataatcttaacatcattatgctgaggtaaagaggccagtccccaaaggttacgtactgcatgattccactgatat

SEQ ID NO: 198765 - DNA, 201 bp, Homo sapiens
gcctgcaaagggagctccactgacgacccctgcaccccaggttctgtgtgttcgggctcggctcccgggcatacccccacttctgcgcctttgctcgtgcsgtggacacacggctggaggaactgggcggggagcggctgctgcagctgggccagggcgacgagctgtgcggccaggaggaggccttccgaggctgggccc

SEQ ID NO: 198766 - DNA, 201 bp, Homo sapiens
ggatggaggggtccctgaggagggcatgaggctcagccccagaaccccctctggcccactccccacagctctgcattcagcacggctggaccccaggaaayggtcgcttcgacgtgctgcccctgctgctgcaggccccagatgagcccccagaactcttccttctgccccccgagctggtccttgaggtgcccctggagc

SEQ ID NO: 198767 - DNA, 201 bp, Homo sapiens
atgaccatcgacaaatactgataaattgtggtatattcaagtgccatatcgcactaagtgtgaacgaaacacaaccacacacaacagtgcaggtgaatctsaaaaaatgtgaagagaagaaaaagccagaccaaagaatacatactgtactacagggttcactttatataaagttcagaaacaggcagaactaatccacgg

SEQ ID NO: 198768 - DNA, 201 bp, Homo sapiens
tgtggaaagacaaggcagcagtggaaatcaacgtggccgtgctgcacagttaccaggtgcagaggcccagactggccaggaaggcaaagggtttgcatacrggggcagcaggggcgggggatggaggagaggcagccatttagaaactagggcaggatttggacaggcagaagaagttccgtagtcccagtgccatggcgc

SEQ ID NO: 198769 - DNA, 201 bp, Homo sapiens
ctcccatcgcttcaagtcggactccaaaccaactacctatgccgtcctttctccctcccctcacaggaggcaatactgaccctgaggagtcgtctcagtcmgtgcaagaggcccggtcaggctccttctgggtgtctgtggtcacctgaaaccctccggggaacagattccgggccttctgggttccccactgttgtctgg

SEQ ID NO: 198770 - DNA, 201 bp, Homo sapiens
cagcccacccccctccacatgcccctgcatctcagcctccactcctcacctggggtcctgggcaattcgggaaatggaggcaaggaggctggctgtggccrcagctggacagggggctgtcgggctcagatctctcggaggcaggagagggtgcacgaagaggttggccaggaaggcctcaggctgggtgcaagaggagag

SEQ ID NO: 198771 - DNA, 201 bp, Homo sapiens
gccagggcgacgagctgtgcggccaggaggaggccttccgaggctgggcccaggctgccttccaggtgagcccagcccagcccctgctctgactcctgccmcctgggatgcctcctcctgcctcactctgccctgattctgtttggttctttggtcccttcctgttccttccaaaatccaccctcatctctccatggcata

SEQ ID NO: 198772 - DNA, 201 bp, Homo sapiens
ggagttgagggacatgcacgggacttgggtgaccctcagcctccagccttacccccaaccctggctcaaactctcccccatcccacccctgcacccctttyccccctcccacccctgcacccttcctccctctcccccaccccacccctgccccccctcccatcccagctctaaacccctcctccctctcccccgtcccac

SEQ ID NO: 198773 - DNA, 201 bp, Homo sapiens
gggggcatggggatgggtgtgaacatgtagttgttctttcaggcataggacccatagctctagagctttcatcagattctcaaaggggaccttgactcggmaaaggttaagacccattttagagatgagaaattaaagcctggagctgaggagcgactggcccaaagtccctctctgctctgaggtgccttcgcaggcaaa

SEQ ID NO: 198774 - DNA, 201 bp, Homo sapiens
gctcggccatcacagtgttcccgcagcgctgccctggccgaggagacttccgaatctggaacagccagctggtgcgctacgcgggctaccggcagcaggayggctctgtgcggggggacccagccaacgtggagatcaccgaggtgggcaccgagggccacccatgagggtgtccccaaggtggagaatgaggaaaccagt

SEQ ID NO: 198775 - DNA, 201 bp, Homo sapiens
tgaagaactgggaggtggggagcatcacctatgacaccctcagcgcccaggcgcagcaggtaaggccggcatgccctgtccccatcgtctccagggaaagrgtgggtaaggcctggcctcagatggggccggagagggaagctcaacccttctttgaattggtcccttgtttccaaaaagaggagaggactgggaagaacc

SEQ ID NO: 198776 - DNA, 201 bp, Homo sapiens
atgagaccaaggggagggcaggtaccaaaggcaagggctgggccctgagcttctggcttcctggtgcctggtacatagtaggtgttgactggattgaggasaaaggaaaatagaattttcaaagggattagggctaagactcaaagaagaactgcccaaggtggattcttgactgtgccagagctgaccgaggtctgtcca

SEQ ID NO: 198777 - DNA, 201 bp, Homo sapiens
tggcggtgaccccgagcgcggtcatggcggtgagcacgtgctccacggctagcacgtcctcgtcgtagacggtgagcacaagcagcgcggcgaagagtgcrcccgcgaagaaaacgagctggcgggccagcagcgtgcgcaggggcgcggggggcgcagcggtgcgcaggaaggcggcggcggggcggtaggcgcgggcca

SEQ ID NO: 198778 - DNA, 201 bp, Homo sapiens
ctctaggcccgcctcctcccgcccctgccccgcccctttggctctgcccctgttgacaccgccccagggcacgcaggccccaccaggcccgctccggagamtttcacgtccagggccagccagcagccccgggctgcgcccccgcgcccacccccaccagggcccgccctaaccccgccgccccgcagacctacgtgcagg

SEQ ID NO: 198779 - DNA, 201 bp, Homo sapiens
tgggggatttgctgcccacactcctaggcggcctcttagacatccgttggtgcctaacccaagcatcagtttggcagaggccgagtccctcctctgtactrgataccaagtcagcttccatagggatggggagacacctggcccagggaggagatgagaagcagcccggatggtgctacatatgtcagagagcagggcagg

SEQ ID NO: 198780 - DNA, 201 bp, Homo sapiens
gccccgtggggtcccctctgccgcccgaattgtgcgtcccttcccaggagcacttactatctgcacgcactttgtggaaagctaagggctttacataaagyatctcatttaatcttcaccagaacacaatgaggtgtaaagatggggaaactgaggcatgtcactgtaagtacgggattcggaatttgaatgcaggtctga

SEQ ID NO: 198781 - DNA, 201 bp, Homo sapiens
tgttgcccaggctggtctctaactcctgggttcaagcaatccacctgcctcggcctcccaaagtgctgcgattatagacgtgagccactgcacctggccckcagtatcttaagcaagttggaatctcgtgaaaccctttttgctgccttagtgtccgtttcagccctcattctgacctaccttttcaagaaaaatagcacc

SEQ ID NO: 198782 - DNA, 201 bp, Homo sapiens
tctccccatcccacctctgcacccctcctccctctcccctctcccacccctgtacccttcctccttctccccgtcccacccctgcacttctcctccctctmacccatcccacccctgcacccttcttccctctcccccatcccaccactgcacccctcctccctctccccctgttccacccctgcacccctcctccctgcc

SEQ ID NO: 198783 - DNA, 201 bp, Homo sapiens
cgcagacctacgtgcaggacatcctgaggacggagctggctgcggaggtgcaccgcgtgctgtgcctcgagcggggccacatgtttgtctgcggcgatgtyaccatggcaaccaacgtcctgcagaccgtgcagcgcatcctggcgacggagggcgacatggagctggacgaggccggcgacgtcatcggcgtgctgcggg

SEQ ID NO: 198784 - DNA, 201 bp, Homo sapiens
ccacctcacccgcgcttcccttccctctgtaaatcagggctgtgcagggtctctgtgaaagcattctacactctcttagagatgaaacagccaaagtaatrgtggtttcagcccaaaacgctgggctgccaggctgggcgacggtggcctgtggggaggccccactagcactgtgccccggagaagagccttcccaagcgc

SEQ ID NO: 198785 - DNA, 201 bp, Homo sapiens
ctgattgccagctcggggatagggctgagcctcagtgctttgcccagggtgatcctgacagccttggtccaggcaccagtccttactcagccccacccacyggccaagcccattcctcacccccaggtggtctttgctcccatttactgacgttactatgtgccagcaactccatcataggctatacagacataatctgtg

SEQ ID NO: 198786 - DNA, 201 bp, Homo sapiens
ggcggcttctaggatgcgggtaatgtttcttaatgggatactggttacacaggtgtgttcagtttgtaaaaatccacagagctgtacatttacaacatgtrcaacactattccagcattttattttttgttttatttattttgagaacctatttatgttgcccaggctggccttgaactcctagcctcaagagatcctcct

SEQ ID NO: 198787 - DNA, 201 bp, Homo sapiens
tcagacagaggcaagggctgaagctgaggccagcacagaagccacaggaagccagaggccagacagcctggggcggtgcctgcaccgcagaactggtccckggccgggcaagcaagcacagggagaggtggatccctgggggctgtggctttttaagcctgggcttcctcaggggcagtgctgcctgtctggggatcatgt

SEQ ID NO: 198788 - DNA, 201 bp, Homo sapiens
ggtaccaaaggcaagggctgggccctgagcttctggcttcctggtgcctggtacatagtaggtgttgactggattgaggacaaaggaaaatagaattttcraagggattagggctaagactcaaagaagaactgcccaaggtggattcttgactgtgccagagctgaccgaggtctgtccaagacctaaggatgctacaag

SEQ ID NO: 198789 - DNA, 201 bp, Homo sapiens
tgtgagggggttggacccttgcctggggaggccctgcctctgtgcacccgggacaccctcacaccttcctctcccgcagcgccgtgaagatctccgcctckctcatgggcacggtgatggcgaagcgagtgaaggcgacaatcctgtatggctccgagaccggccgggcccagagctacgcacagcagctggggagactct

SEQ ID NO: 198790 - DNA, 201 bp, Homo sapiens
gcttgccctgcatcctggtgggtccaggcactggcattgcccccttccggggattctggcaggagcggctgcatgacattgagagcaaaggtgaggctggkgactaaaggactgcctgaagggagtcacacaatctagggacagaggggtggggctggaaggcaggaaataggaaagagagggcaggaaacaaagtccaca

SEQ ID NO: 198791 - DNA, 201 bp, Homo sapiens
gctgggcagttccatgatgcccagtgtccaccaggctctgtcccctgcaggccccaccctcctcaccgtcacttgaccaggatggcttctcctcatcaggygagggtggctgtgaggggctggagcagggcctggacaggatggaggctgcagcctcaccccacggctcctgctgctgctgctgctggtgaagctgcatgg

SEQ ID NO: 198792 - DNA, 201 bp, Homo sapiens
tttttttgagatgggaagaacttgggtcctccttgctccacccaccctgcatggtgagaatggtggagcaggaaaggcaaaggggacctgatggagtgtcyctcctgccagggctccctccttccggctgccacccgatcccagcttgccctgcatcctggtgggtccaggcactggcattgcccccttccggggattctg

SEQ ID NO: 198793 - DNA, 201 bp, Homo sapiens
ctccatctcttcagaaaatttaaaaattaaccaagagtggtggcacgcacctatagatctagctactaggaaggcagaaaaatcccttaagcccaggagtytgaggttacagtgaatgatgatggagccactgcaccccaacctgggcgacagagcaagacccatatctaaaaacaatactactacttacgtcaatattgt

SEQ ID NO: 198794 - DNA, 201 bp, Homo sapiens
gggctgggccccctgcactatggagtctgctccacgtggctaagccagctcaagcccggagaccctgtgccctgcttcatccgggggtaagtgagatggargacttggtggggagctgcccagggtcagggtggcagctttggtgaggagtgtcactggtgaggggtgtcactggaaacaggaaggagctctgtaacatgt

SEQ ID NO: 198795 - DNA, 201 bp, Homo sapiens
caaggaagtacagtatggtaccacttttacttaaaaaaaaactataaatatgcacatgcacgtaagttcaaggaaaaagggctggaaggttaacacctgtsaatggcgcatatgcccggagggaagatggggtggtctttgtcttatcactttacacatttctgtaatgtcatttttcaaaaacatcagatcgcttttgaa

SEQ ID NO: 198796 - DNA, 201 bp, Homo sapiens
tgttcagtttgtaaaaatccacagagctgtacatttacaacatgtacaacactattccagcattttattttttgttttatttattttgagaacctatttaygttgcccaggctggccttgaactcctagcctcaagagatcctcctgccgcaggctcctttttcaaaagaagaaattgagcgctgtttagatgccaacata

SEQ ID NO: 198797 - DNA, 201 bp, Homo sapiens
tggggtggtctttgtcttatcactttacacatttctgtaatgtcatttttcaaaaacatcagatcgcttttgaaattttcaaaacaaataaaaattaagtkacaaatcaataataatgaggatcagctggtacagttttaaacttctatgtagtttgaaatgaaacaaaactaaccctgatgcaaacactcccctcgccag

SEQ ID NO: 198798 - DNA, 201 bp, Homo sapiens
ctgagcccaggggagcagggagctagaaagagggggctctatcagcatcttcaggggtgccctggaggacaggaagtgttacaagtcaggactcatgaggmacccggaaccacaggtgttcagagatcaagttggggcctgaatcttgcactgccagggaggccagagtgaggagggcagggcctccgggggccacagcac

SEQ ID NO: 198799 - DNA, 201 bp, Homo sapiens
cccctctggcccactccccacagctctgcattcagcacggctggaccccaggaaacggtcgcttcgacgtgctgcccctgctgctgcaggccccagatgakcccccagaactcttccttctgccccccgagctggtccttgaggtgcccctggagcaccccacgtgagcaccaaagggattgactgggtgggatggagggg

SEQ ID NO: 198800 - DNA, 201 bp, Homo sapiens
actcctaggcggcctcttagacatccgttggtgcctaacccaagcatcagtttggcagaggccgagtccctcctctgtactggataccaagtcagcttccrtagggatggggagacacctggcccagggaggagatgagaagcagcccggatggtgctacatatgtcagagagcagggcaggaagggatcagtgtggctgc

SEQ ID NO: 198801 - DNA, 201 bp, Homo sapiens
tccagtgcagcccctcacccacacccactgctaccccagttcccctgcttcggcccgcaccctccctcacaccccagcccacagactcggggctggccttrgttactggaacgcctgtgaccacagcactaagagaagcaagctgccccatgggggacttggtcccatggccttggcctccttcaccatcactggccgcca

SEQ ID NO: 198802 - DNA, 201 bp, Homo sapiens
attacaggcacccaccaccacgcccagctaatttttgtatttttagtagagacggtgtttcactatgttggccaggctggtctcgagctcctgacctcacratcctcccacctccgcctcccaaagtcttgggattacaggtgtgagccaccgcgcccggaccgagggtgaaggattttaagagacccttccttcatgctg

SEQ ID NO: 198803 - DNA, 201 bp, Homo sapiens
gcacacaggttcatttaagtgagaacccacacttacagagcaagctgcccaaaaaccacgaccaggagggcccagagaaagagctgtccccggggccttgrggacagggtgacagccacccagagatcatggagaaggggacgtaaggaagacctcacagaggagtcatcctgcgactgtgttggttgggtccttcaggaa

SEQ ID NO: 198804 - DNA, 201 bp, Homo sapiens
tggtacgatctcggcttactgcaacctccgcctcccgggttcaagagattctcctatggcgtgaacctgggaggtggagcttgcagtgagccaagattgtsccactgcactccagcctgggcgacagagccagactctgtctcaaaaaaaaaaaaaaaatattctcctgtctcagcctcctgagtagctgggattacaggc

SEQ ID NO: 198805 - DNA, 201 bp, Homo sapiens
gccaagtgggtcccctgggagccccgctctcccacacacaccctgggggccccactctcccccacacaccctgggggaccctgccccagcagtgttctggrcctaccactcagtatcccaaaaccctgttgtgagggggttggacccttgcctggggaggccctgcctctgtgcacccgggacaccctcacaccttcctct

SEQ ID NO: 198806 - DNA, 201 bp, Homo sapiens
acacacacacacacacacacacacacacacacacacacacacatgccaggatggaaagggagatgctaagagacccctggagcctgaaaccccacacaagstacgctcccagcccacccatgtggctgcctccctgcaagcacatttgcttaactgcgcgtccccaagtcatttccattatcagtgcaagtttttaataca

SEQ ID NO: 198807 - DNA, 201 bp, Homo sapiens
cctaacaccacgtgggcccctcccgccctcccccagcacttgcacaaagcctggaggagggcctccctgtcccacacaacttcctgcttgtccccttcccrcccctctcctccccaggagcggctcccaggcccacgaacagcggcttcaagaggtggaagccgaggtggcagccacaggcacctaccagcttagggagag

SEQ ID NO: 198808 - DNA, 201 bp, Homo sapiens
agctggaagcgccagaggtaccggctgagcgcccaggccgagggcctgcagttgctgccaggtgggccctgccctcaccctaacccggctggttctctgakgcccccacaccccgggactaaagcactctggggccaggccctgctccctagctcaggctgcctcatttgcccctccccgcccccaggtctgatccacgtg

SEQ ID NO: 198809 - DNA, 201 bp, Homo sapiens
ttatcctccactgcttttcagaggagtctggccaacacaaatcctcttgtttgtttgtctgtctgtctgctgctcctagtctctgcctctcccagtctctsagcttccgtttctttcttaaactttctctcagtctctgaggtctcgaaatcacgaggcttcgacccctgtggaccagatgcccagctagtggcctttctc

SEQ ID NO: 198810 - DNA, 201 bp, Homo sapiens
ccagggatgctggccctcagcccctcccaagggcagggcctttcctgtcccagaggcagagaccctgaagccgtccctggggctggggctgggcctagccwgtatccccagggccctgtgacaaccttgtctttgtcctctcttgccaggagttataagatccgcttcaacagcatctcctgctcagacccactggtgtcc

SEQ ID NO: 198811 - DNA, 201 bp, Homo sapiens
tccaggctgcaatggcagtccagacctgcctgcttctgagagccgggacagtcctgaggtcttcagagatgggggtgtggtgtgtcagggccccaggctckgaaccccagggatgctggccctcagcccctcccaagggcagggcctttcctgtcccagaggcagagaccctgaagccgtccctggggctggggctgggcc

SEQ ID NO: 198812 - DNA, 201 bp, Homo sapiens
ctgctggaggtgctggagcagttcccgtcggtggcgctgcctgccccactgctcctcacccagctgcctctgctccagccccggtactactcagtcagctyggcacccagcacccacccaggagagatccacctcactgtagctgtgctggcatacaggactcagggtgaggcaacaagcaggagcaggcctggccacagc

SEQ ID NO: 198813 - DNA, 201 bp, Homo sapiens
gcccctgctctgactcctgccccctgggatgcctcctcctgcctcactctgccctgattctgtttggttctttggtcccttcctgttccttccaaaatccrccctcatctctccatggcatagccagctcttctgggtcaggggcagaggatgacatggccctgccgaccacaggggtgcctagcccaggcagaagtgcag

SEQ ID NO: 198814 - DNA, 201 bp, Homo sapiens
gtcccctgcaggccccaccctcctcaccgtcacttgaccaggatggcttctcctcatcaggcgagggtggctgtgaggggctggagcagggcctggacagsatggaggctgcagcctcaccccacggctcctgctgctgctgctgctggtgaagctgcatggaaaggaggaggaatgagggctgcaccccaaggagggcag

SEQ ID NO: 198815 - DNA, 201 bp, Homo sapiens
gtctgatccacgtgcacaggcggaagatgttccaggctacaatccgctcagtggaaaacctgcaaagcagcaagtccacgtgaggacgacggctttaccgmcccccaacccctgtcctgaacaccctgaccctggaccctcctcctcccacattctcccgcccccacccctctctgactccccataagtgcccctctcccc

SEQ ID NO: 198816 - DNA, 201 bp, Homo sapiens
ccacccaggagagatccacctcactgtagctgtgctggcatacaggactcagggtgaggcaacaagcaggagcaggcctggccacagcagggttgggaccrgcccctctctggcccctcaccggcctctccttcccacccccagatgggctgggccccctgcactatggagtctgctccacgtggctaagccagctcaagc

SEQ ID NO: 198817 - DNA, 201 bp, Homo sapiens
ctggcggaaaaggtgctgtccttggcgccggcctcagccactggggctgccaaccccccaggagcaagacgcagtgaagccgcccaggcgcctcactaggkcgacccctggtggcgggaggtcctcagccctcaccggcctgtcccgcaggccgcctgtgagaccttctgtgtgggagaggatgccaaggccgccgcccga

SEQ ID NO: 198818 - DNA, 201 bp, Homo sapiens
gtgagagtttgggggagctgggggagctgatgcatttggagacacaaacagaaagggggtctgaaaagctctccctctgtgcctcaagtcgttttcccacyaaaagccagggctccaggatgccctccattccaggctgcaatggcagtccagacctgcctgcttctgagagccgggacagtcctgaggtcttcagagatg

SEQ ID NO: 198819 - DNA, 201 bp, Homo sapiens
atccacgtgcacaggcggaagatgttccaggctacaatccgctcagtggaaaacctgcaaagcagcaagtccacgtgaggacgacggctttaccgcccccmaacccctgtcctgaacaccctgaccctggaccctcctcctcccacattctcccgcccccacccctctctgactccccataagtgcccctctccccacccc

SEQ ID NO: 198820 - DNA, 201 bp, Homo sapiens
atagacgtgagccactgcacctggccctcagtatcttaagcaagttggaatctcgtgaaaccctttttgctgccttagtgtccgtttcagccctcattctkacctaccttttcaagaaaaatagcaccagcaattgacttttttttagcataaaggtgtatagacacccatataacctacagccttcacaaggcatagcac

SEQ ID NO: 198821 - DNA, 201 bp, Homo sapiens
caggctcggaaccccagggatgctggccctcagcccctcccaagggcagggcctttcctgtcccagaggcagagaccctgaagccgtccctggggctgggkctgggcctagcctgtatccccagggccctgtgacaaccttgtctttgtcctctcttgccaggagttataagatccgcttcaacagcatctcctgctcaga

SEQ ID NO: 198822 - DNA, 201 bp, Homo sapiens
tgtattgacctggagggatgtctgcaataaattattgattaaaaccaaggaagtacagtatggtaccacttttacttaaaaaaaaactataaatatgcacrtgcacgtaagttcaaggaaaaagggctggaaggttaacacctgtcaatggcgcatatgcccggagggaagatggggtggtctttgtcttatcactttaca

SEQ ID NO: 198823 - DNA, 201 bp, Homo sapiens
ggcagaggagcccagaccaacccagtccggccaggggcccccgaacaatacactgaggctacctagacaggccgaccccgctgctcaagggcaggctctcyaacagtcaccaaaacacaaacatcagcccaggtactgcagtcctgctgggccctgtcctcagagctccctgtgcactatccccaggtggccctccccccg

SEQ ID NO: 198824 - DNA, 201 bp, Homo sapiens
gctgctcagcaccttggcagaagagcccagggaacagcaggagctggaggccctcagccaggttgggggccaccccaatgaggcacaggggctagagagaygggatgagctggggggaccccagtggcaggaaacccccatgcaaagtcccccctggactttcttctcctggctgacatgcactggtgctttaagacccag

SEQ ID NO: 198825 - DNA, 201 bp, Homo sapiens
cccaatgaggcacaggggctagagagacgggatgagctggggggaccccagtggcaggaaacccccatgcaaagtcccccctggactttcttctcctggcygacatgcactggtgctttaagacccagctcctcagggaggaattcatggctggattctccaggtcttagagaaaactctattggcctgaactgagcaggg

SEQ ID NO: 198826 - DNA, 201 bp, Homo sapiens
gaagtgcctggagagtgctggtgtaccccacctgcattctgggaactgtagtttccctagtcccccatgctcccaccagggcatcaagctcttccctggcyggctgaccctgcctcagccctagtctctctgctgacctgcggccccgggaagcgtgcgtcactgaatgacagggtgggggtggaggcactggaaggcagc

SEQ ID NO: 198827 - DNA, 201 bp, Homo sapiens
agcttgccctgcatcctggtgggtccaggcactggcattgcccccttccggggattctggcaggagcggctgcatgacattgagagcaaaggtgaggctgkggactaaaggactgcctgaagggagtcacacaatctagggacagaggggtggggctggaaggcaggaaataggaaagagagggcaggaaacaaagtccac

SEQ ID NO: 198828 - DNA, 201 bp, Homo sapiens
cacacacacacacacacacacacacacacacacacacacacacatgccaggatggaaagggagatgctaagagacccctggagcctgaaaccccacacaasctacgctcccagcccacccatgtggctgcctccctgcaagcacatttgcttaactgcgcgtccccaagtcatttccattatcagtgcaagtttttaatac

SEQ ID NO: 198829 - DNA, 201 bp, Homo sapiens
cagccccaaacggagctggaagcgccagaggtaccggctgagcgcccaggccgagggcctgcagttgctgccaggtgggccctgccctcaccctaacccgrctggttctctgaggcccccacaccccgggactaaagcactctggggccaggccctgctccctagctcaggctgcctcatttgcccctccccgcccccagg

SEQ ID NO: 198830 - DNA, 201 bp, Homo sapiens
ttacacaggtgtgttcagtttgtaaaaatccacagagctgtacatttacaacatgtacaacactattccagcattttattttttgttttatttattttgakaacctatttatgttgcccaggctggccttgaactcctagcctcaagagatcctcctgccgcaggctcctttttcaaaagaagaaattgagcgctgtttag

SEQ ID NO: 198831 - DNA, 201 bp, Homo sapiens
ccgtgcacgctgcgccaggctctcaccttcttcctggacatcacctccccacccagccctcagctcttgcggctgctcagcaccttggcagaagagcccakggaacagcaggagctggaggccctcagccaggttgggggccaccccaatgaggcacaggggctagagagacgggatgagctggggggaccccagtggcag

SEQ ID NO: 198832 - DNA, 201 bp, Homo sapiens
ccttcccaagcgcggggttgcttgcagggctgcagcccactcccatgactttggtgttcggctgccgatgctcccaacttgaccatctctaccgcgacgargtgcagaacgcccagcagcgcggggtgtttggccgagtcctcaccgccttctcccgggaacctgacaaccccaaggtgtgagaccctgagggcgcaatgg

SEQ ID NO: 198833 - DNA, 201 bp, Homo sapiens; identical to SEQ ID NO: 34637

SEQ ID NO: 198834 - DNA, 201 bp, Homo sapiens
gaaagggtgggtaaggcctggcctcagatggggccggagagggaagctcaacccttctttgaattggtcccttgtttccaaaaagaggagaggactgggargaaccagaggagttgagggacatgcacgggacttgggtgaccctcagcctccagccttacccccaaccctggctcaaactctcccccatcccacccctgc

SEQ ID NO: 198835 - DNA, 201 bp, Homo sapiens
tgtgctgcccactgccgggctggccttgttgctggaccatccccacaccctcaaatgcacccccaccaaaaggctgtcccctccctctgggctcctctccraggctcccctagcaatctagcttgctctggagctggcactggggctatttgctgccacatcaatgcctgggctttatttaaaataagggggtggagtcag

SEQ ID NO: 198836 - DNA, 201 bp, Homo sapiens
cagaggcaagggctgaagctgaggccagcacagaagccacaggaagccagaggccagacagcctggggcggtgcctgcaccgcagaactggtcccgggccrggcaagcaagcacagggagaggtggatccctgggggctgtggctttttaagcctgggcttcctcaggggcagtgctgcctgtctggggatcatgtctgca

SEQ ID NO: 198837 - DNA, 201 bp, Homo sapiens
tccacgtgcacaggcggaagatgttccaggctacaatccgctcagtggaaaacctgcaaagcagcaagtccacgtgaggacgacggctttaccgccccccmacccctgtcctgaacaccctgaccctggaccctcctcctcccacattctcccgcccccacccctctctgactccccataagtgcccctctccccaccccc

SEQ ID NO: 198838 - DNA, 201 bp, Homo sapiens
actcatgaggaacccggaaccacaggtgttcagagatcaagttggggcctgaatcttgcactgccagggaggccagagtgaggagggcagggcctccgggkgccacagcacccaggacatctgtcttcccacccacaggtcctgtgtatggatgagtatgacgtggtgtccctcgaacacgagacgctggtgctggtggta

SEQ ID NO: 198839 - DNA, 201 bp, Homo sapiens
ccctgccccagcagtgttctgggcctaccactcagtatcccaaaaccctgttgtgagggggttggacccttgcctggggaggccctgcctctgtgcacccrggacaccctcacaccttcctctcccgcagcgccgtgaagatctccgcctcgctcatgggcacggtgatggcgaagcgagtgaaggcgacaatcctgtatg

SEQ ID NO: 198840 - DNA, 201 bp, Homo sapiens
tgggtggtcacggagacccagccaatgagggaccctggagatgaaggcaggagacagtggatggaggggtccctgaggagggcatgaggctcagccccagraccccctctggcccactccccacagctctgcattcagcacggctggaccccaggaaacggtcgcttcgacgtgctgcccctgctgctgcaggccccagat

SEQ ID NO: 198841 - DNA, 201 bp, Homo sapiens
tttggagaggagttgtgggggtgaaggcagaaggggaggccaggcttgggactcaccaggggcgaggtgcagttgctgagcacccccggggtggaggggcygcgagccgaggtggcaccccaggcagctgcatcttgttgtactcggccccagaggtgcccaagaaacttagagctgtgccctggggggcgccagagtgga

SEQ ID NO: 198842 - DNA, 201 bp, Homo sapiens
agccacccctgcacactctggcccacccttgtgccccggcccctctaggcccgcctcctcccgcccctgccccgcccctttggctctgcccctgttgacamcgccccagggcacgcaggccccaccaggcccgctccggagactttcacgtccagggccagccagcagccccgggctgcgcccccgcgcccacccccacca

SEQ ID NO: 198843 - DNA, 201 bp, Homo sapiens
gtcattaggtcacttcagaactctggctaagctttggctctctcattcatttagactcagagttctgccctgaaactatagctcccagagccagagctggkatcaaaccggctggccctgtggctttctgaaagcttctgtgttcctctctatgtccctgggctgtctgatgttgggcagcatggcacctgggaactacag

SEQ ID NO: 198844 - DNA, 201 bp, Homo sapiens
agaatggtggagcaggaaaggcaaaggggacctgatggagtgtctctcctgccagggctccctccttccggctgccacccgatcccagcttgccctgcatyctggtgggtccaggcactggcattgcccccttccggggattctggcaggagcggctgcatgacattgagagcaaaggtgaggctggggactaaaggactg

SEQ ID NO: 198845 - DNA, 201 bp, Homo sapiens
cacctctgcctctgccctgcctacttgaatgaggtgcagggcatctcacctgctcagagcagcccttgaatgagccccagctatttctagggtcctcaaaygaaacctcccacggccaagtcatacccaacatgggcctcctcccctattctggcccctgctcggagatgctgagtgacagaggctggacttggggtgttt

SEQ ID NO: 198846 - DNA, 201 bp, Homo sapiens
ctggacaccagagccaagtccagaagccctggtggaacaggggtgaaaagcataggttctgacttcagactgctgggccgcagccctggctatcccacccyaggtgagagcaggctgctctgtgcctcagtttccccatcttcatagtggaattgtattggtgcctacccagagggttgtgtcaacaattaggatggcacc

SEQ ID NO: 198847 - DNA, 201 bp, Homo sapiens
agcctgcacccccagccctcccgggcgcatcatctggagcccagcagtcacctttaccaggactcaccagtatccgcaggcagcccttgtggcaaacccascaacccacactactaggggtagagtggctctgccctcacctcacagtgatgcctgcctggccaggaaaagtggctcccaagccttcagccttccaactct

SEQ ID NO: 198848 - DNA, 201 bp, Homo sapiens
tcaagggacttcccagcacctacaacaaagacttacaggtgcgaggccgggggaggcctggctagtatgtgccagttctcagggctctggcacactcaggyagggccccaccccgggattgccatacatcctcccatcctgtgcacacagctccatccgtggctgcccttgaactctctgcccttcctttgttggggtatt

SEQ ID NO: 198849 - DNA, 201 bp, Homo sapiens
ctcaccactcgcccacctgtgcccccagattcaccaagagaacatgggacaggctctcagccccgacatgctggccactgaccttgcctattacctggtcygcaaaggggtaagtgtgtagcagccagggggagggtgaggagatggggtgccccccccagagggtgggggagctcaggaatgggtgcaagcggcccagcc

SEQ ID NO: 198850 - DNA, 201 bp, Homo sapiens
aaaaaaaaaaaaggaagggggtgcaggcaatggaggcagatcagggcatggagaaacctgcctcagcgccatcttcctccctggcacccagatgccattcygccaggcccacgaggcctccgggaaagctgtgttcatggccgagaccaagggggtcgccctcaaccagctgtcactgcaggagctgcagaccatcaggta

SEQ ID NO: 198851 - DNA, 201 bp, Homo sapiens
acctcttcctctctccccagccccctgttctcgggcgacgtgatctgcgtgtgggactacgggcacagtgtggagcagtatggtgccctgggcggcactgygcgctccagcgtcgactggcagatccgccaggtgcgggcgctactgcaggcacagcaggcctaggtcctcccacacctgccccctaataaagtgggcgcg

SEQ ID NO: 198852 - DNA, 201 bp, Homo sapiens
ggggtaaggggcaggaccagctcaaagatggggtgggggcggaggctgcctctgcagggcagagtcctttggcagtcgggactgttgggcatagaggagtmagctcacagctcagggccagagcactggagaggtctctggggtgcatacaggaaccaggagtggagctgaagcatgtcctatcccctgccagccctccct

SEQ ID NO: 198853 - DNA, 201 bp, Homo sapiens
attaagtagttatttttattactaacaacctaggcagggtggcccaggagcccgctgggggaggcggtgccaggctcctggctgaggggcaggctggcccyaattctgactggctggctccagtgatcaggaccagggccccacgtggtgctttgctggagatctaggcttggtggggcagctgtggggtaaggggcagga

SEQ ID NO: 198854 - DNA, 201 bp, Homo sapiens
ttcaacccagcccaactcagtgccccatcccctggccctgaagagaccattctggcccagatgtgtcctggcttggagtagcaccttctgctaccacactrggcctccactctcctcagtgcccaaggggaggcacctcactctgatctccctgtggggtcctcttatgcctgccagtaaggataggagtttggttctaga

SEQ ID NO: 198855 - DNA, 201 bp, Homo sapiens
tcagggcatggagaaacctgcctcagcgccatcttcctccctggcacccagatgccattccgccaggcccacgaggcctccgggaaagctgtgttcatggmcgagaccaagggggtcgccctcaaccagctgtcactgcaggagctgcagaccatcaggtacggcccatccccttccccatgctgcctcctaggaagtgag

SEQ ID NO: 198856 - DNA, 201 bp, Homo sapiens
ccggcattgctgctacccactacaggtggctgaggagtgggcccagggcaccttcaaactgaactccaatgatgaggacatccacacagccaatgagcgcygcctgaaggtacgacccctggagccccaccgctttccttgcctcccctctccaccttgcccagggccactttgagcattagcaccattctgtttacttcg

SEQ ID NO: 198857 - DNA, 201 bp, Homo sapiens
ctgcctgggttgactcctctgggggtatagaccgtgaccctgggtctcccttcacctccaggagctcattggtgcaacggcagggaagctgcacacgggayggagccggaatgaccaggtgctttagcccctccaccccctgctccgtgttgtcccaaccttgaggagcccagggggcagttagagttctgcagcggtcct

SEQ ID NO: 198858 - DNA, 201 bp, Homo sapiens; identical to SEQ ID NO: 34655

SEQ ID NO: 198859 - DNA, 201 bp, Homo sapiens; identical to SEQ ID NO: 34658

SEQ ID NO: 198860 - DNA, 201 bp, Homo sapiens
ccttgagcccaggagctcaaggatgcagagagccaggattgtgccattgcactccaacatgggcgaccctgtctcaaaaaagcccaaaacaacaacaacaaattagctaggcacggtggtgtgcatggctgtagtcccagctacttgggaggctgaggctggaagatcccttgagtccaggctgcagagggctataatggc

SEQ ID NO: 198861 - DNA, 201 bp, Homo sapiens
cccttgagcccaggagctcaaggatgcagagagccaggattgtgccattgcactccaacatgggcgaccctgtctcaaaaaagcccaaaacaacaacaacaaattagctaggcacggtggtgtgcatggctgtagtcccagctacttgggaggctgaggctggaagatcccttgagtccaggctgcagagggctataatgg

SEQ ID NO: 198862 - DNA, 201 bp, Homo sapiens
cttcccacagccacgccgtggcactgacccgagactctgagcggctgctggaggtgcggaagcggatcaatgtcctgcccctggggaggtgggtgaggctycagtgccccgagggcctggtgggggtggctgctgcatagccttagggattgacagagctgggaagtgcagagtgggacagaaaaccgccttatctgctca

SEQ ID NO: 198863 - DNA, 201 bp, Homo sapiens
gtaggttggcagggctgatgaggaaaactgccctgcctgggttgactcctctgggggtatagaccgtgaccctgggtctcccttcacctccaggagctcaytggtgcaacggcagggaagctgcacacgggacggagccggaatgaccaggtgctttagcccctccaccccctgctccgtgttgtcccaaccttgaggagc

SEQ ID NO: 198864 - DNA, 201 bp, Homo sapiens
tgctcggagatgctgagtgacagaggctggacttggggtgtttctggcaaagcctcactgcaggaagccccacagctcaggcccagtccttggttcacacrgtcccacttccagcttcttttgcccttaagactgatttgtccctgggagatcaccagatccctcattcaggtggagtgctgcagcgtgacactttttcca

SEQ ID NO: 198865 - DNA, 201 bp, Homo sapiens
cctctgggggtatagaccgtgaccctgggtctcccttcacctccaggagctcattggtgcaacggcagggaagctgcacacgggacggagccggaatgacyaggtgctttagcccctccaccccctgctccgtgttgtcccaaccttgaggagcccagggggcagttagagttctgcagcggtcctggctcctcagggaag

SEQ ID NO: 198866 - DNA, 201 bp, Homo sapiens
cttggacctgggaggtggaggttgtagtgagccgagatcacgccactgcattccagcctgggcaacaagagcgaaactctttctcaaaaacaacaacaacaaaaaaacaggccaggtatggtggctcatatctgtaatcccagccctttgggaggccaaggcaggaggactgcctgaaaccaggagtttcagaccactctg

SEQ ID NO: 198867 - DNA, 201 bp, Homo sapiens
gcaacatagcaagaccccatctttttttttttttttgagacggagtctcgctctgtcgcccaggctgaagtgcaatggtgcaatctcaactcactgcaagytctgcctcctgggttcatgccattctcctgcctcagccctcctgagtagctggaactacaggcgcccaccactacgcccggctaattttttgtattttta

SEQ ID NO: 198868 - DNA, 201 bp, Homo sapiens
cgcctaacctcctcctgccccctgtatggtcaggctgggtggggatgggagaggcctggtgactgggaaccttttctcccagccgagttcctgttctgggsttcgctgtgcatgacccatctcagcaggatggccgaggacctcatcctctactgcaccaaggaattcagcttcgtgcagctctcagatgcctacaggtaa

SEQ ID NO: 198869 - DNA, 201 bp, Homo sapiens
ggctcctcagggaagcaacacatcggcctccctgagcaccatctcctccttgcacaggtggtcacagacctcaggctgtggatgcggcagacctgctccaygctctcgggcctcctctgggagctcattaggaccatggtggatcgggcagaggcgtgagtcctacagggacacccagggggcagacagaggtgtgatgga

SEQ ID NO: 198870 - DNA, 201 bp, Homo sapiens
tcttggacctgggaggtggaggttgtagtgagccgagatcacgccactgcattccagcctgggcaacaagagcgaaactctttctcaaaaacaacaacaacaaaaaaacaggccaggtatggtggctcatatctgtaatcccagccctttgggaggccaaggcaggaggactgcctgaaaccaggagtttcagaccactct

SEQ ID NO: 198871 - DNA, 201 bp, Homo sapiens
gggtgacccaggcctgcagggttccagtgtcacaggcaggccttgcatgagcctccacccgagcttctgctcctcctctcccacagggaacgtgatgttcycttcccggggtacacccatttgcagagggcccagcccatccgctggagccactggattctgaggtgagccaggtgaggtgcaggggctgtgctagagggg

SEQ ID NO: 198872 - DNA, 201 bp, Homo sapiens
ctggattctgaggtgagccaggtgaggtgcaggggctgtgctagaggggaggaccccggctgccctgaccctcctgcccctggcttcccacagccacgccrtggcactgacccgagactctgagcggctgctggaggtgcggaagcggatcaatgtcctgcccctggggaggtgggtgaggctccagtgccccgagggcct

SEQ ID NO: 198873 - DNA, 201 bp, Homo sapiens
gaactgcttgaacccgggaggaggaggttgcaatgagccgagatcgcgccattgcactccagcctgggctacagagcgagactcctgtctcaaaaaaaaakaaaaaaaaaaaagaaaactcaccatttgcagatttgaaggcaggaagctaagccaagcacagctagcttggctgtgcctggagcagccagagtcactccc

SEQ ID NO: 198874 - DNA, 201 bp, Homo sapiens
tgagccaggtgaggtgcaggggctgtgctagaggggaggaccccggctgccctgaccctcctgcccctggcttcccacagccacgccgtggcactgacccragactctgagcggctgctggaggtgcggaagcggatcaatgtcctgcccctggggaggtgggtgaggctccagtgccccgagggcctggtgggggtggct

SEQ ID NO: 198875 - DNA, 201 bp, Homo sapiens
tgggtgcggtggctcacgcctgtaatctcagcactttgggaggccgaggtgggtggatcacctgaggtcaggagttcgagaccagcctggccaacatgggraaactctgtctctactaaaaatacaaaaattaggcaatgtggtggtgtgcgcctgtaatcccagctactcgggagcctgaggcagaagaactgcttgaac

SEQ ID NO: 198876 - DNA, 201 bp, Homo sapiens
aaggcagggggaggggcggggcctctgggctgatggtgggtggccaggggggcaggatcccgggtccagcccctgtgcctccctcttcccgcagtgtgccrggctcctgatgaccctcaagggacttcccagcacctacaacaaagacttacaggtgcgaggccgggggaggcctggctagtatgtgccagttctcagggc

SEQ ID NO: 198877 - DNA, 201 bp, Homo sapiens
catgtggtgggaaagaaccccaacttcaaggccacacacagtggctcatgcctgtaatcctagcactttcagaggccaagatgggaggatcacctgaggtyaggagttcaagaccagcctggccaacatggtgaaaccccatctctactaatgatacaaaaattagctgggtgtggtggcacgtgcctgtaatcccagcta

SEQ ID NO: 198878 - DNA, 201 bp, Homo sapiens
gagtgggtaagagagtatctgcccaaggcagggatgtcctggcagaggggcaggtcctgggcctggcagcttcagatcccagggtccccagggctcaccaytcgcccacctgtgcccccagattcaccaagagaacatgggacaggctctcagccccgacatgctggccactgaccttgcctattacctggtccgcaaagg

SEQ ID NO: 198879 - DNA, 201 bp, Homo sapiens
caggcatggtggtgggcacctgtagtcccagctactcaggaggctgaggcaggagaatggcgtgaatctgggaggtggagcttgcagtgagccaagatccygccactgcactccagcctgggtgacaaagagagactccatctcaaaaaaaaaaaaaaaaaaaaaagaattaaaaaagatttttttaatgaacaaaacagg

SEQ ID NO: 198880 - DNA, 201 bp, Homo sapiens
agccgaggtgggcgggtcacttgaggccaggagttcgagaccagcctggtcaacatggtgaaaccccgtctcttttgatgtaaaaatacaacaattagctsggtgtggtggcacactcctgtaatcccagttactcgggaggctgaggcaggagaattgattgaactgggaggtggagtttgcggtgaggtgagatcgcgc

SEQ ID NO: 198881 - DNA, 201 bp, Homo sapiens
tcgccctcaaccagctgtcactgcaggagctgcagaccatcaggtacggcccatccccttccccatgctgcctcctaggaagtgagcctgggtgcctggarcccagggtggcctggcgccctggcccacctcttcctctctccccagccccctgttctcgggcgacgtgatctgcgtgtgggactacgggcacagtgtgga

SEQ ID NO: 198882 - DNA, 201 bp, Homo sapiens
gggttgactcctctgggggtatagaccgtgaccctgggtctcccttcacctccaggagctcattggtgcaacggcagggaagctgcacacgggacggagcyggaatgaccaggtgctttagcccctccaccccctgctccgtgttgtcccaaccttgaggagcccagggggcagttagagttctgcagcggtcctggctcc

SEQ ID NO: 198883 - DNA, 201 bp, Homo sapiens
tgagaagatggttcaagttgagagtgagacagagccgagtgggtaagagagtatctgcccaaggcagggatgtcctggcagaggggcaggtcctgggcctsgcagcttcagatcccagggtccccagggctcaccactcgcccacctgtgcccccagattcaccaagagaacatgggacaggctctcagccccgacatgct

SEQ ID NO: 198884 - DNA, 201 bp, Homo sapiens
ggagacccccatctctactcaataataaaacaaatagcctggcgtggtggcccatgcatatagtcccagctacttgtaaggctgaggtgagaggacacttrtgcccaggagtggaggctgcagtgagctatgatcacgccactgcattccagcctggataacagagtgagaacctatctctaaaaataaataaataaacga

SEQ ID NO: 198885 - DNA, 201 bp, Homo sapiens; identical to SEQ ID NO: 34650

SEQ ID NO: 198886 - DNA, 201 bp, Homo sapiens
tcccttgagcccaggagctcaaggatgcagagagccaggattgtgccattgcactccaacatgggcgaccctgtctcaaaaaagcccaaaacaacaacaacaaattagctaggcacggtggtgtgcatggctgtagtcccagctacttgggaggctgaggctggaagatcccttgagtccaggctgcagagggctataatg

SEQ ID NO: 198887 - DNA, 201 bp, Homo sapiens
agagactctgggggtgctccccagcaatttgtatttttcttagtaaattctccagtggctaggcctggtggctcatgcttgtaatcccagcactttgagargctgaggcaggagaagcgcttgagcccaggagttcaaaaccagcctgagcaacatagcgagaccttgtctgtaaaattaaaaaaattaaattagccagtc

SEQ ID NO: 198888 - DNA, 201 bp, Homo sapiens
tgaggccccactccagatggctgaatcagagactctgggggtgctccccagcaatttgtatttttcttagtaaattctccagtggctaggcctggtggctyatgcttgtaatcccagcactttgagaggctgaggcaggagaagcgcttgagcccaggagttcaaaaccagcctgagcaacatagcgagaccttgtctgta

SEQ ID NO: 198889 - DNA, 201 bp, Homo sapiens; identical to SEQ ID NO: 34653

SEQ ID NO: 198890 - DNA, 201 bp, Homo sapiens
gtgggacctcggggactccggtcctcctagcctccaaaggagagagtgggggcgccagacctgcctcgggccaccctgctgggaatcgccctccaggaagyaattttgaaaattacctaggaagcctgcacccccagccctcccgggcgcatcatctggagcccagcagtcacctttaccaggactcaccagtatccgcag

SEQ ID NO: 198891 - DNA, 201 bp, Homo sapiens
ccgggagatggagactgcagtgagcagagatcacgccactgcgctccagcctgtgtgacagtgcaagactccatctcaaaaaaaaaaaaaaaaaaaaaagrcagtgtttctggaggctagtcccccaactagcagcaccagcatcacctcagaagtcctgagaaatgtgatgtgaggccccactccagatggctgaatcag

SEQ ID NO: 198892 - DNA, 201 bp, Homo sapiens
acccgggagatggagactgcagtgagcagagatcacgccactgcgctccagcctgtgtgacagtgcaagactccatctcaaaaaaaaaaaaaaaaaaaaaagacagtgtttctggaggctagtcccccaactagcagcaccagcatcacctcagaagtcctgagaaatgtgatgtgaggccccactccagatggctgaatc

SEQ ID NO: 198893 - DNA, 201 bp, Homo sapiens
ccgcctaacctcctcctgccccctgtatggtcaggctgggtggggatgggagaggcctggtgactgggaaccttttctcccagccgagttcctgttctggscttcgctgtgcatgacccatctcagcaggatggccgaggacctcatcctctactgcaccaaggaattcagcttcgtgcagctctcagatgcctacaggta

SEQ ID NO: 198894 - DNA, 201 bp, Homo sapiens
gaggccgaggcagatggagcacttgaggtcaggggtttgagaccagcctggccaacatggcgtaaccacgtctctactaaaaatacaaaaattagccaggygtgatggcccacacctgtaatcccagctactcaggaggcggaggcagaagaatagcttgaacccaggagatggaagttgtagtgagccaagatcatgccg

SEQ ID NO: 198895 - DNA, 201 bp, Homo sapiens
ttcaccgtgttagccaggatggtctcgatctcctgaccttgtgatctgcccgcctcggcctcccaaagtgctgggattacaggcgtgagttaccgcgcctkgccacaagaccccatctttacaaaaaactaaaaattagctgggcatggtggcatgtccctttagtcccagctactcaggaggctgagacaggaggatcgc

SEQ ID NO: 198896 - DNA, 201 bp, Homo sapiens
tcttcccgcagtgtgccgggctcctgatgaccctcaagggacttcccagcacctacaacaaagacttacaggtgcgaggccgggggaggcctggctagtaygtgccagttctcagggctctggcacactcaggcagggccccaccccgggattgccatacatcctcccatcctgtgcacacagctccatccgtggctgccc

SEQ ID NO: 198897 - DNA, 201 bp, Homo sapiens
ttagtatagatggggtttcaccgtgttagccaggatggtctcgatctcctgaccttgtgatctgcccgcctcggcctcccaaagtgctgggattacaggcrtgagttaccgcgcctggccacaagaccccatctttacaaaaaactaaaaattagctgggcatggtggcatgtccctttagtcccagctactcaggaggct

SEQ ID NO: 198898 - DNA, 201 bp, Homo sapiens
  misc_feature (1)...(201): n = A,T,C or G
caagttcaggggtcactcatggcagggatgcctggtactgagagactcagggctcctgcctccctcctgggactgtgcaaaagatccctccccccagctgntgccccaccctgatcaggggagggggctgggcaacctagttgggggagagggggccactccctgtcctccagcttagccctgcttcctcccaccccccca

SEQ ID NO: 198899 - DNA, 201 bp, Homo sapiens
  misc_feature (1)...(201): n = A,T,C or G
ccagggagaatcaccctcagcacccgccaagacctgcagacacacctgaaaccagagggcaggggcctgtggctcctggtgaaaccttcattcattgcctntgggcactgaggtcatcaagttcaggggtcactcatggcagggatgcctggtactgagagactcagggctcctgcctccctcctgggactgtgcaaaaga

SEQ ID NO: 198900 - DNA, 201 bp, Homo sapiens
ttggacctgggaggtggaggttgtagtgagccgagatcacgccactgcattccagcctgggcaacaagagcgaaactctttctcaaaaacaacaacaacaaaaaaacaggccaggtatggtggctcatatctgtaatcccagccctttgggaggccaaggcaggaggactgcctgaaaccaggagtttcagaccactctgg

SEQ ID NO: 198901 - DNA, 201 bp, Homo sapiens
aactgggaggtggagtttgcggtgaggtgagatcgcgccactgcactccagcctgggcaacagagcgagactttgtgtcaaaaagaaaaaaaaaaaaaaaaggaagggggtgcaggcaatggaggcagatcagggcatggagaaacctgcctcagcgccatcttcctccctggcacccagatgccattccgccaggcccac

SEQ ID NO: 198902 - DNA, 201 bp, Homo sapiens
gagggcctggtgggggtggctgctgcatagccttagggattgacagagctgggaagtgcagagtgggacagaaaaccgccttatctgctcagcgggggacyctgcatggagccccagctctcgctaaggtgacgaccaagccattgaatgtgtctgagcagggccagagccctccagcaaggctcctggcaagcccagcct

SEQ ID NO: 198903 - DNA, 201 bp, Homo sapiens; identical to SEQ ID NO: 34701

SEQ ID NO: 198904 - DNA, 201 bp, Homo sapiens
cactgttattcaacatagtactgcaagtcctagttagagcaatcagacaagagaaagaaattaagggcatccaaattggaaaggaagaagtcaaattaccrttgtttgcagaggatttgatcttgtgtttggaaaagcataaagattccacaaaaactataagaactgataaattcagtaaagttgcaggatacaaaatca

SEQ ID NO: 198905 - DNA, 201 bp, Homo sapiens; identical to SEQ ID NO: 34702

SEQ ID NO: 198906 - DNA, 201 bp, Homo sapiens
gattaaaaaaaattaaagcaggtcaaaatggctggcaagcaggccatttcagcatcaggcaagtggctggatggtattcgaaaatggtattacaatactgyaggattcaataaactggggttaatgagagatgatacaatatatgaggatgaagacataaaagaagccataagaaggcttcctgagaacctttataatgac

SEQ ID NO: 198907 - DNA, 201 bp, Homo sapiens
gtgccctggaaccagtgctactgtggttaccagcatgcccttgtgacagactcagcaccaagaggatccctttggctaggactccccacagtgtcataggmggccccaggaaaaagaatagcaggaggaccacagcaatctttgacactaaggccctctaaaactttcatcactactgctgccttcaaatacatctacaac

SEQ ID NO: 198908 - DNA, 201 bp, Homo sapiens
gaatgatgagggtccattattttattcttgaggtatgggtagaagaggaaagagttatgggtagaatagtttggccattgaaatgcaaatgaatggcagcytaatacatttagatttgaattagacacgtgaaagtgataaggttacctcattgatgttttctttagagaatatttggaatctgtatcatgttacagcttc

SEQ ID NO: 198909 - DNA, 201 bp, Homo sapiens
agttaggtatctctaatgttcaaaagaaatttcattcctaagaaaaggggactagaattaaaactgctattttacaatattgtccataggttattatctcytcatcacctaattccttctcctcgctttctaatagttttaattttcacttggatatccatggggattctgaagcactgattccactcccagctctgtaga

SEQ ID NO: 198910 - DNA, 201 bp, Homo sapiens
ttgcgtctctgttttcctctagcagtgttcacactgagcttgtgtgtttgtgtgttttgtgtggcagtggcatttttttttcttttttgagatggagtctkgctctgtcacccaggctggagtgcagtggtgtgatctcggctcactgcaacctctgcctcccaggttcaagcaattctcctgcttcagcctcccgagtag

SEQ ID NO: 198911 - DNA, 201 bp, Homo sapiens
ggagagaaagaaaggccacttagggttggatatcccttttttctcccatggactttctcatctcatcttaactgaatgactgctctttaataagttaggtrtctctaatgttcaaaagaaatttcattcctaagaaaaggggactagaattaaaactgctattttacaatattgtccataggttattatctcctcatcacc

SEQ ID NO: 198912 - DNA, 201 bp, Homo sapiens
gcgtgatgatgtctgcttgctcagagggtttcttgacagaaccagctccagcattcattccttcatgctatttatcagtctggcagttgctgctgctgcarcaggcacctctttcttgtctcctccctgttgctagtggtaattctgttactgaggacctgtatgaagttctcctccctttgctaacctgctttataggct

SEQ ID NO: 198913 - DNA, 201 bp, Homo sapiens
cagcaactcaggaggctgaatcgcttgaacctgggagtcagaggttgtagtgagccaagatcgctccactgcactccaacttgggtaacagagcgagtctcattgtcaaaaaaaagaaaagaaaaaagaaaagaaaagaaaagaaaggggcttattatgtatgaataccaaaagatgctcctctctcccctatcattcaag

SEQ ID NO: 198914 - DNA, 201 bp, Homo sapiens
tttgccctcctaggctcattgcagcattaatcacaatagccaaaatattaaaacaaccaaagtgttgattgataaatggataaaaaagttatatatatatmtatggaatatttttcagccttacaaaaggaaatcttgccatttgcaacaacttgagtcaacctggaagacattatactaagtgaaatcagctacacacag

SEQ ID NO: 198915 - DNA, 201 bp, Homo sapiens
tatagattggacttcaaacattgtcaggttgattaatgaaatctacctaactaggctattaagagattattttaatcttttaaatttttttttttgagatrgagtctcgctctgtcaccaatcttttaaattctaattcagtttagcatttctattttatggtgagcaaacaagccaatacagtcattgtaatacatttgc

SEQ ID NO: 198916 - DNA, 201 bp, Homo sapiens
agagtcacttcattagcatagtcaggtgtaatcgaaaggggcttatttgctgggcagggtggctcacacctgtaataccaacacttttgaaggctgaggtsggcagatcactagaggtcaggatttcaagaccagcctggccaacatggcaacaccccatctctactaaaaatacaaaaaaatagctgggtgtagtggcac

SEQ ID NO: 198917 - DNA, 201 bp, Homo sapiens
gtgctctggctaccataggggctttgagcatgagtaagacatgtttcaacccacatgagaaacaacttagtaggggcaaagtggacattcaattaataaayaactgcaaggatttctggtcgagagatgccaaagcgtcacactgagcttcaagagaaaggatatgtctggtcaagatgctctcagaagatttcctgggga

SEQ ID NO: 198918 - DNA, 201 bp, Homo sapiens
atcctaatttatatagctagttatcttttatgtagctaatgatttgcttgtatggatattggtagaagacagattccatgttacaaaaagtttgagaatawcagtgtaaataactgttttattgcaggatttctcaaagcctgtaatacactaatgtgtccagtgaatcaccaataacatgtagcatttttcgtatttggt

SEQ ID NO: 198919 - DNA, 201 bp, Homo sapiens
atcactgtttcattgttgaggtgttaacactccctcagcctaagacaggaagtttccaatttctctagcctccggatgttccagaatggcatttaggatcrtctgtagtatggccttagtggatctctcactgttccatcacatatgtctcaccttctgggcaaactggacccattgccattttctaaatgtactcatgtt

SEQ ID NO: 198920 - DNA, 201 bp, Homo sapiens
aaggcaaatttagagaagcactctttcttggactgcttcatggcatttggaagcgggaagttccagtgtcctgcaaggtcagtgagacagctgggccacayttatccagaaagtctgcagaaagatgatggctcagaggggaacaactttggcttaatctctttatatatatatttaaactatagggaaatccagaagaac

SEQ ID NO: 198921 - DNA, 201 bp, Homo sapiens
cagtcttttattgctttttacataagtggaatgagaatttagacaagaaaaagatgagtaaaacctttctgacaaggactgtcttagctatttgatagctrtaagactgtgggaacctaagttggataccaatccatcacattacagtaatcaacattggcttagttttttgtgtcatacattttaccttgtcaagagaaa

SEQ ID NO: 198922 - DNA, 201 bp, Homo sapiens
cgtgaaatcactttctgacctctgtagtctatttatttctcattaaaaatttttttacaggcaaagataagattaaagtgtctgaggatgacctggagaawctccttctaattaaatggtgtgttttggaaaccattcgtttaaaagctcctggtgtcattactagaaaagtggtgaagcctgtggaaattttggtaagct

SEQ ID NO: 198923 - DNA, 201 bp, Homo sapiens
aacctattgaatcagaaacttttggatccctgcaatctgtgttttcacaagccttccccgtgatgctgatgcatgcttaagatttgagaaccacttctctrgtatatatcaggtttttactaactcttttttacttaaagatttttacattctccctcagaaacgtctttcaaatttgacttctctacatacctcccattg

SEQ ID NO: 198924 - DNA, 201 bp, Homo sapiens
agtgtttaaaactttaggagagaattcaacttgaacatccatgagcagtttaactttatttttttatgtattgcgtctctgttttcctctagcagtgttcrcactgagcttgtgtgtttgtgtgttttgtgtggcagtggcatttttttttcttttttgagatggagtcttgctctgtcacccaggctggagtgcagtggt

SEQ ID NO: 198925 - DNA, 201 bp, Homo sapiens
tgatgagctgcttgtcctgaggtaggaagttgagctaaactggccaaacagagtgaaaggagagacttcttcaggatgaggccccgttcatcctgtcccaytggatatgaacaaggaagcatgcagcctcagatgttactagcagcaagttcaagaggaataagctgtatgatggtgcagtctgtagatggcagagcagaa

SEQ ID NO: 198926 - DNA, 201 bp, Homo sapiens
gcaaactggacccattgccattttctaaatgtactcatgttgtctgcagtcttacttttgttcttcctctttgcctaaaatatccacccattcacctcccwatgttgaagttggaccatttgctaatttaatatatatatactggggttgactctatgcaagaaactaatcatatttgtagttttagagaaatatattcat

SEQ ID NO: 198927 - DNA, 201 bp, Homo sapiens
agaccttccttctctaaaatattttagcccacacctccatcaactttctttcctgttcttatttattattctagaatgcattctactagaatttaagcttyatgagaacatgaatattgtttttgtttactggggtgacttcagtgcttagaagtatataaagcacataaggacacaataaacatcgaatgaatgaatgaa

SEQ ID NO: 198928 - DNA, 201 bp, Homo sapiens
agacacaccaccttcctttattattctaccttttggcctgcttctttcccatctcctttgctcatcttcctcaatttcctgacttccaaattttggattaycccagggctccttccgtagattttttttaatcaagtttatttaactcactctgtaagtgatctcatactgccccatggctttaaataattgtctaaataa

SEQ ID NO: 198929 - DNA, 201 bp, Homo sapiens
ataaatcccttcacatgcctcaaactgcaaaacctgggaatggcagaaatgatatctttcatattaaagaaaaaggcatgatctcttgtttattaacatcratatttgtcacatagccatggtttggcaatgtttatttcttttaaacagacattattgcaagctacgctggatattgtagagacggaaacaagtaaggaa

SEQ ID NO: 198930 - DNA, 201 bp, Homo sapiens
acatctgagaatgtcctccccagagcgtctacttgctgttccttactacagagtgtccactcctccccttgcccatgttttctgctggctctggaatgctstcactcaacaagtctacttatttaaaggttcttttgccctcatggtgtagctcaagtttcacctccatataaagtcagtgttaatcatgccaggttgtag

SEQ ID NO: 198931 - DNA, 201 bp, Homo sapiens; identical to SEQ ID NO: 34704

SEQ ID NO: 198932 - DNA, 201 bp, Homo sapiens
ctttttgtgtccactctccatgccttctttccaaagacttgttcagagtatgctggtctccttgatagtctagtctctttcagtgggagaatttcttcctrgctgtatctagttggccatcttggctccctaaaaaaattaacagtgatttttgatacttagaccaaagtgattctaaaacaaactgtgtttatttctgag

SEQ ID NO: 198933 - DNA, 201 bp, Homo sapiens
aaatgtcatgggagttgtgggatctcccatagctaggatctcagaagcccctggtgaaggtgagccactccatgcctatttcacttaccctttctttaggrggctcttgggcccagaaatgagtcctggtgctcggcaaccccctgcagtgttcccaactttctctactttcagcctatggtctgtgtcctttttgtgtcc

SEQ ID NO: 198934 - DNA, 201 bp, Homo sapiens
cattcccatgtcaaaccctctgggctctttccaggctggaattctgtttccaccaactctccaggcaattatcactagcagctcaaatgtcatgggagttrtgggatctcccatagctaggatctcagaagcccctggtgaaggtgagccactccatgcctatttcacttaccctttctttaggaggctcttgggcccaga

SEQ ID NO: 198935 - DNA, 201 bp, Homo sapiens
tgttccattttgagcattaaggaaaagtcaactttaattctcttgcaaaagcaagcacatttttgctaacacaatgggtttttatttctttgtatggttgkttttttttttttttcattttacttttggggttcatagaaccttaggaaatctcacaaaatgcatggatcccctttgtagaaaagtgcatacttcttcata

SEQ ID NO: 198936 - DNA, 201 bp, Homo sapiens
aagaagaggactgcctgattttaagattaatcaatgaagccacaaaaaggataaacagatttgaatgtaccatagcaaaatttaatgtctcattttttaaragtgtaactcaaatgtgaatataatgtaaacatcaatatacaacacaactataaataattttaatatttaaagaactgacacaaatcaataagaatgagt

SEQ ID NO: 198937 - DNA, 201 bp, Homo sapiens
actgtataaaggtgctatttatcgctagaatttctgatccagtaggaacaggggaggggctacagaattgcatttctttccttttttttttttttttttttggttggggggttgttttttatttgtttttgagacagagtctccaaacactgtgagctgagttcagtggcacaatctcagctcactgcagcctccgcctcc

SEQ ID NO: 198938 - DNA, 201 bp, Homo sapiens
tttgttttctggctacttaatttttttaatccctgggtttatttattaattgcaatttgattatgattcacattagcatgattttctttttctttttttcyttttttttttttttttttttgagatggagtcttgctgtctcccaggctggaatgcagtggtgcgatctcagctcattgcaaactctgcctccggagttca

SEQ ID NO: 198939 - DNA, 201 bp, Homo sapiens
tgtattttaaaacacatttcacatgggcttatctatgttgagtaatgacagaggctcatattttctcctctgttgggcaactggtcaatgttcctttttakgcatactagaagtattctcccaccacccttccctaaggtagttcgaacaggctctctttgtttgcttttgcctctgtgccctttcctggaaatggaatga

SEQ ID NO: 198940 - DNA, 201 bp, Homo sapiens
ttttctactgaatgaatggttgattgtcatttcaacatcagtctctttctctcttttacacaattcccaaagaccatcaccttttttttttttttttttttgagatggagtcttgctctgtcaccaggttggagcgcagtggcgcgatctcggctcactgcaccccctgcttcccaggttcaagcaattctcctgcctcag

SEQ ID NO: 198941 - DNA, 201 bp, Homo sapiens
gagaacactttttaaagaaatgttctctcaggttataaaaagtacaagtctgagtgaattcccatgatctcaaagagcattttatctcacaattcttattstagaatgagaaacatcaattaactttatttaactattgaacttgtttcaataaattataaaatcaggtgaccagaaagtacaggaaatggccgtcaaatc

SEQ ID NO: 198942 - DNA, 201 bp, Homo sapiens
ccttttggcctgcttctttcccatctcctttgctcatcttcctcaatttcctgacttccaaattttggattaccccagggctccttccgtagattttttttaatcaagtttatttaactcactctgtaagtgatctcatactgccccatggctttaaataattgtctaaataatgatgactcttatatttataaatcttct

SEQ ID NO: 198943 - DNA, 201 bp, Homo sapiens
cttgtatttgagaagtgttattagtagctttctcccttttatacttagaaatagctgattgcttttaaggagtgagcaaatttaaatccccatagatttartgacaagttaaaaatccaatttattctgaggaatttgttccataaacaaatgcatcccctcaactctagttgttaaatataattaaaggaattgtattta

SEQ ID NO: 198944 - DNA, 201 bp, Homo sapiens
aatgactgctctttaataagttaggtatctctaatgttcaaaagaaatttcattcctaagaaaaggggactagaattaaaactgctattttacaatattgkccataggttattatctcctcatcacctaattccttctcctcgctttctaatagttttaattttcacttggatatccatggggattctgaagcactgattc

SEQ ID NO: 198945 - DNA, 201 bp, Homo sapiens
gtccatataaatggaaacatatgatatgtggtcctttgtgtctggctcctttcgtctagtgtacagttttatattataatgttttacattaattgattttyaggtcttgaagcatccatgcatttctggaataaatcctgcttaatcctcatgtataattttctttatatgttgctagattcagtttgctagtattttttg

SEQ ID NO: 198946 - DNA, 201 bp, Homo sapiens
atttctagcttctgacgaccattaatttacttattgtcctgacacatttgccttttgtggacagtccatataaatggaaacatatgatatgtggtcctttrtgtctggctcctttcgtctagtgtacagttttatattataatgttttacattaattgattttcaggtcttgaagcatccatgcatttctggaataaatcc

SEQ ID NO: 198947 - DNA, 201 bp, Homo sapiens
gtttttctgttctatgctcttgtctcccgcaagatcaccatttccttcttgggaaagtcttttatgaatttccaatgctgtatctctgtggcttcaacacycacttctaggcactttgcccaactttcttataaaacaaatctcagggtaaaaactactattgaatacttgcgaaaggaaagggtcagactcataccactt

SEQ ID NO: 198948 - DNA, 201 bp, Homo sapiens
gccagtcaagttaacatatagaattaaccatcatctaggcatcatctaatctgttgagttttgtttctctggagaaccctgagtaaatttacccacccacrtataggagggcagtctgccctactcagtctactgattgaaatgctaatatcaactagtaataccctcacagacacacccagaaataatgtttagtcaaat

SEQ ID NO: 198949 - DNA, 201 bp, Homo sapiens
gaggctgaggagtcccatgatgtgctgttgatgcaggctctcagtggattggatggtgcacacttacattagggagggaagcctactttactgagcccackaattcaaatactcatctgtcatccagaaacaccctcacagacacacccagaataatggttaaactgaataccccatggccagtcaagttaacatatagaa

SEQ ID NO: 198950 - DNA, 201 bp, Homo sapiens
tttttctatgttattgtttatttttaaaacccattgttctcttctgacacaaaaaatgctccttcgaatagtactaccactgcaacagctacattatatgratgctttcagtctataagacactactgcagaattgaaaactatttatgaaagacatcaaactttttttttaaccatacttatacagaagctattcaataa

SEQ ID NO: 198951 - DNA, 201 bp, Homo sapiens
aaatccaacattggaatccaggagtagttttaggtaaaaattacatcctcattcctctatcaagaatgatgagggtccattattttattcttgaggtatgsgtagaagaggaaagagttatgggtagaatagtttggccattgaaatgcaaatgaatggcagcctaatacatttagatttgaattagacacgtgaaagtga

SEQ ID NO: 198952 - DNA, 201 bp, Homo sapiens
caccactgcacttcagcctgggcaacagagggagactctgtcttaaaataaaataaaataaaataaaatagaataaaatagaataaaatagaataaaataraataaaatagaatagaataaaatagaataaaatagaataaaataaaaaaaatacaaaataaaaaacaaactaggtctccttcacctcagcatcagatgac

SEQ ID NO: 198953 - DNA, 201 bp, Homo sapiens
gccgagatcacaccactgcacttcagcctgggcaacagagggagactctgtcttaaaataaaataaaataaaataaaatagaataaaatagaataaaataraataaaatagaataaaatagaatagaataaaatagaataaaatagaataaaataaaaaaaatacaaaataaaaaacaaactaggtctccttcacctcagc

SEQ ID NO: 198954 - DNA, 201 bp, Homo sapiens
attgcagtgagccgagatcacaccactgcacttcagcctgggcaacagagggagactctgtcttaaaataaaataaaataaaataaaatagaataaaataraataaaatagaataaaatagaataaaatagaatagaataaaatagaataaaatagaataaaataaaaaaaatacaaaataaaaaacaaactaggtctcct

SEQ ID NO: 198955 - DNA, 201 bp, Homo sapiens
tgaatctgggtgcttcagcattagattcatgcatatttaggaaagttaactcttcttgttgaatttaaccctttatcattaggtaacacccttctttgtcytttttgagcattgttggtttaaagtctcttctgtttgaagtaagaataacaacccctactctttttttattttctgtttgcttgatagatctttctctat

SEQ ID NO: 198956 - DNA, 201 bp, Homo sapiens
gtttatattgaaccaatcttgtatccaaggtaaataaagtaaacaaagtaagttttatttactctaaagtagactttattcctgggatacaaagtatggtkgattagctttttggtatatggctgaaatcaatttgctagtattttgttgagaattgttgcatgtatgttattcagcaatattggcttgaagttttctttt

SEQ ID NO: 198957 - DNA, 201 bp, Homo sapiens
ttatttcaatccatcttactcactacatacagatgagttttccttaaataataatctgattgtcactctctcattgagattctggtgccactacctgctgrccaaactcattagcctagaactccgggccctccataatctgacaccagccttacctttctaaacatctgagaatgtcctccccagagcgtctacttgctg

SEQ ID NO: 198958 - DNA, 201 bp, Homo sapiens
acacctgtaatcccagcattttgggaggttgagatgggcggatcacttgaggttaggagtttgcgaccagcctgaccaatatggtgaaacctcgtctctaytaaaaatacaaaaaaattacttgggtgtaatggtgggtgcctataatcccagctacttgggaggctgaggcaggagagaatagcttgaacccctgaggca

SEQ ID NO: 198959 - DNA, 201 bp, Homo sapiens
cttccattatgaatcaaacaaaaaggaaatactacaaagtttaaggatctgtggtcaggcagcagtgtcctgatgctagcagtgagggctgttccattttragcattaaggaaaagtcaactttaattctcttgcaaaagcaagcacatttttgctaacacaatgggtttttatttctttgtatggttgtttttttttttt

SEQ ID NO: 198960 - DNA, 201 bp, Homo sapiens
ttgccctcctaggctcattgcagcattaatcacaatagccaaaatattaaaacaaccaaagtgttgattgataaatggataaaaaagttatatatatatayatggaatatttttcagccttacaaaaggaaatcttgccatttgcaacaacttgagtcaacctggaagacattatactaagtgaaatcagctacacacaga

SEQ ID NO: 198961 - DNA, 201 bp, Homo sapiens
ttcccttggccttgaagatcaggatgatgtcattttggaactcataacttgtgattttcctatctactaacctagccataatgactagggtgagacttgcrtgtctaatacctggcccaggagagatttctcaggaagctttatttcttccactgttttctacctttaatacccaaagtgggtcttgtgataccctagctc

SEQ ID NO: 198962 - DNA, 201 bp, Homo sapiens
aggcttgtggcacagagcatcatcattcagagaatgtcaagtaatataacgtggctagagccacatggtgtcaagggggagctctgggggagaggagactrcagagataggtaaggggcagatcttcaagggctggctgtattctgctgtggtgtttgaaagattgcgtgtgtgtgtgtgtgtgtgtgtgtctgtgtctgc

SEQ ID NO: 198963 - DNA, 201 bp, Homo sapiens
aagttgattatacaaaatgaagtcatttatgtcatacccaactaaaatgagtcaagaagccatgagaaaaacactaaggttacatacacctgttttttttttaaaaaaaaatgtcttataagctcaatccagatctgcatggacctaaccataatttcaagactgcaagtcccacctggcaactgctgaaactcacctatc

SEQ ID NO: 198964 - DNA, 201 bp, Homo sapiens
cataaaaatgcatgaaagtataaaacccactggtcatggtaaatatatagtcaaaatcagaatattataatccaataatggtgttatataaatatgtttttaactcccgaaaaaaatattaaacacaaaagtattaaaaataactatagctacaatattttgttaagagatagataatataaaaagcagtaaattgtgaca

SEQ ID NO: 198965 - DNA, 201 bp, Homo sapiens
gaggtctctggttgagaaaataagccagaaatctgaacagttacagttttctgcccttattttctcacaggaattgttgtcattgcttcattatttttgcrtagaagtcatacaaatgctatatattttccaaaactattgaataattttctgaagtgacagtataaacactaattttttataatttggtttttacttttt

SEQ ID NO: 198966 - DNA, 201 bp, Homo sapiens
ttagctttggggttggtttgtgcttggttttctagttcccataggtgatattagattgttaatttgagatctttctaacttcttgttgtaggcatttggtkctgtaaactttcctcttaccactgatttagctgtgtctcagagattctggtatattgtatatttgttttcattcatttccaagtatttgtttttatttct

SEQ ID NO: 198967 - DNA, 201 bp, Homo sapiens
attgttgccttgaactctttagttcagatgtcagctgtttatttatcatctcttttaaaaagcaaatacaagcttgaatagagagtactcaactacttgtwtattcagcataatttgaccaatctggggagttgacttttttaaacttcttaatatgtcgtattatgtatcctgatataaaaagaataagaaatgataggg

SEQ ID NO: 198968 - DNA, 201 bp, Homo sapiens
tttttttttctttattaatctatctagctggtggtctatgaatcttagttattctttcaaaaaacaaagttttggttttcttaatcttttgtatggatttktgcgtctcgatttttgcatctcagttttggtcaactccagttttggtcatttattttcttctgttagctttggggttggtttgtgcttggttttctagtt

SEQ ID NO: 198969 - DNA, 201 bp, Homo sapiens
gctaccaaaggattattaaaagacaacaaacaaaaaacaagtaaacaaaaagaaataaaaaaacccttatggttgttagaaatttgaggatttaggaactrcaaatagggattgttgccttgaactctttagttcagatgtcagctgtttatttatcatctcttttaaaaagcaaatacaagcttgaatagagagtactca

SEQ ID NO: 198970 - DNA, 201 bp, Homo sapiens
ttttcttttacagccattaaagttttaggtcttacatttaagtcttcaattcatcttgagttgatttttgtatacagtgaaaggaaggggtccagtttcartcttctgcatatggctagctagtttatcccagcaccatttattgaacagggtatcttttccccattgcttgtttttattgcttacttatccgatctgatg

SEQ ID NO: 198971 - DNA, 201 bp, Homo sapiens
tatgtccagaatggtagttccttgattttcttttacagccattaaagttttaggtcttacatttaagtcttcaattcatcttgagttgatttttgtatacrgtgaaaggaaggggtccagtttcagtcttctgcatatggctagctagtttatcccagcaccatttattgaacagggtatcttttccccattgcttgtttt

SEQ ID NO: 198972 - DNA, 201 bp, Homo sapiens
cagcagatgctggaccttatagaaatggtgagcatcattatcattgaatgccaacaatgctaacaggttagattctggaaagacactggtgaatataagakaagacaactggcctttgtgcagcttgcatctacaaaacaaatagaaaggcacatgcccacatgtctacaaatggaaaaaggcaatgcactcttgattgtc

SEQ ID NO: 198973 - DNA, 201 bp, Homo sapiens
tgtcacagtttttgagccagaattgtagaaagagccttatttgtggtaacctctttagccagataaagcgaagggtggcaggcctatagccttcaggtgtrtacaactaaagagattgttattagaataaggaattgtattctttttcttctgcctgaatggaaggctaaagttgatgttggatattgtgaagttcattga

SEQ ID NO: 198974 - DNA, 201 bp, Homo sapiens
atgattactgaaaatattttatttaaagtttttttttttggattgcttcttatggagttaaaccaaaaagtaaactggcttggcaaccatgaatatctaartaatattgtctgagccttgagtatgcgtcagcagatgctggaccttatagaaatggtgagcatcattatcattgaatgccaacaatgctaacaggttaga

SEQ ID NO: 198975 - DNA, 201 bp, Homo sapiens
aacctcaaatatctctttgtattatttacaatacgctgacctccccttgaccctacacagtttcatatcttatttctaactcgggcgaaaaaagtcagaayatttggagcctacaaagtatctttatgggggcgatggagtgagactcctctcaaaaaaaatatatctttatggaaagtcacgatcatgaatacgctataa

SEQ ID NO: 198976 - DNA, 201 bp, Homo sapiens
ataaattataaaatcaggtgaccagaaagtacaggaaatggccgtcaaatcaccaggctcttctaggagaaggcagggatgggttgtcaaagcatgtcctraacactctgttgtcaggtgcaggggaaatcagtggacttggaaaccaactcccctgaaggaatttacttaacatagtagaaaaaatcaaatgctagaatc

SEQ ID NO: 198977 - DNA, 201 bp, Homo sapiens
acatatctcttattaataatatctagttgttttcaaaatatgctttctactaatgtgctcttaaggttaatttaaacatcatcctttttaaaaaatatatrtatggctaatactaaatatgcttttgttcaccttcaaagaagttcatatttttgatatatgtttttctttttaaggttgcattttggacacttgcatacg

SEQ ID NO: 198978 - DNA, 201 bp, Homo sapiens
acagtgggggctggctataaaagggcatcatttaagatctttgtggtgatggaaacattctgtatcttgactgtatcaatgtcaataacttggttgtgatrctgtactatagttttgcaagatgttaatactgggaaaacagtaatggatacgtaggctctttctgtaacatttcttacaaccgcatgataatctacaatt

SEQ ID NO: 198979 - DNA, 201 bp, Homo sapiens
cttaccagctagaatcaagataaatacctacgtgtctgtaaatggcgggtgtcactccttgccaaagctttagaaagccttcctcttcaatgatccctagrgctgtgcgcaccattcccctatagggggcagattctcttgcaccgtctcccaaccgagcaagagctgcttctccttgcatttggagtcgagtttttgtga

SEQ ID NO: 198980 - DNA, 201 bp, Homo sapiens
tgtttgtgtcatatctgatttctttccttggtgttttttaattcttattttaaatatattttacctccctggttagctgtgttcctaggtattttatgtgkgtggctgttgtgaatgggagtgcattcttgatttggctctcagcttgggtgttgttggtgtatagaaataccactgatttttacacattgattttgtatt

SEQ ID NO: 198981 - DNA, 201 bp, Homo sapiens
gaaataaagatggcctttttaaacaaatggtgatggagcaatttgatagcgtaagccaaaacaaacaaaacaacaacaaagaaccacccccaacacacacraaacatgaatttctacctaagtcctatatctgatataaaattaactcaaaatagataacagacttaaatgtaaaacataaagatataaaacctgtagaaa

SEQ ID NO: 198982 - DNA, 201 bp, Homo sapiens
acacaagctataaaatcaagtcctcctcttgtgagtgccactgtggaagcagagcagaaaaatgttctaactggcatagttgcaaccatcttcctttaagrgtgactaaggcccacatagctagttaggtagccttggaactggggcaaaaatcacctgtgttgcatttacactacagccagtgttggattaggcagtgaa

SEQ ID NO: 198983 - DNA, 201 bp, Homo sapiens
ctaatgtaaagatagtaataaattattgttgttaaaatatattttgctaaaacacatgagattgattagataccatttttgtgtcaaccactgtactggasatgttgagatacattatttcactgttacatcatcacaacaacctatgtagaagaggtatcctattccacataagaaaaaaccagagacaacgagcaaaaa

SEQ ID NO: 198984 - DNA, 201 bp, Homo sapiens
gaaactggtcaaaatccaaaaagtggttcctggaactgtttgagaaaaacattccagatataaaagcatgtaaatctgcaaaagataattccatggtaagyatttcttacctttcttttgctaatgtaaagatagtaataaattattgttgttaaaatatattttgctaaaacacatgagattgattagataccatttttg

SEQ ID NO: 198985 - DNA, 201 bp, Homo sapiens
ataattgtttcctaacattttcacaagagtgtgcacatatcctggagagtatataaaagagggttaggaatgagggtgggaaaggtgaatgtggctaattytgagactctgagccaggttatcagaatccttattgatttttagccatgcttctctcttctcactgctttgcaaaggagcaatgagtcactcaaaggagca

SEQ ID NO: 198986 - DNA, 201 bp, Homo sapiens
gtaaagaagagcatgtttactctgaaatatgtatgctttctagatattctctgttggcagatatttatacatctttcacaatcaagtaacaattttattcdtttcttccaggtggtttgctctgttagaggttcagatgtgtattattttaatactttataaatatgactgtagtcttctggacccattacccaaacaggt

SEQ ID NO: 198987 - DNA, 201 bp, Homo sapiens
cacactcttgtatttgagaagtgttattagtagctttctcccttttatacttagaaatagctgattgcttttaaggagtgagcaaatttaaatccccataratttagtgacaagttaaaaatccaatttattctgaggaatttgttccataaacaaatgcatcccctcaactctagttgttaaatataattaaaggaattg

SEQ ID NO: 198988 - DNA, 201 bp, Homo sapiens
ccaaatattttctcccattctgtagattgtctgtttactccgttgacagtttctcttactgtgcagaagcttttcagtttaattaggtcccacctgtctakttttgtttttattgcaatggcttttggagactttatcatgaaatccttggcaaggcctatgtccagaatggtagttccttgattttcttttacagccatt

SEQ ID NO: 198989 - DNA, 201 bp, Homo sapiens
cagcatgcccttgtgacagactcagcaccaagaggatccctttggctaggactccccacagtgtcataggaggccccaggaaaaagaatagcaggaggacyacagcaatctttgacactaaggccctctaaaactttcatcactactgctgccttcaaatacatctacaaccttggccactgaggacccccacagtcctgt

SEQ ID NO: 198990 - DNA, 201 bp, Homo sapiens
acaggatttcattctttttatagctgcacaggatttcatggtgttactatgtaccatactttctttttcttttctctgtctctctctttttttttttttttctgagacaggccctgttgcccaggctaaagtgcactggcgtgatcatagctcactgtagcttcaacctcctgtgctcaagcatcctcctgcctcagcctc

SEQ ID NO: 198991 - DNA, 201 bp, Homo sapiens
aaatgacttcatttggacaatgtataccaaggtagattttttttgcactagaaatttaatcccacaaatccttagttgtaatccccagaaaattgcactcrttcttgatttgtgttccaggcgccaatttattttctcatgcaccaaatactcagtgagtcagagaaagttgcctgtaatatggctgatgatcaaagttca

SEQ ID NO: 198992 - DNA, 201 bp, Homo sapiens
acatggcactaataaagaactaaaaggttttgggcagagtggattcatgtgaagcatgacttaggttatatggttatgctaatattctatgtgtgagacakggagtggtagaatctaccagatttggaagatgattagaagcgggggtcaggtgagaggaaggctttgaggtggactgtggctttaaatccaggtgtctgg

SEQ ID NO: 198993 - DNA, 201 bp, Homo sapiens
ccactgatggtattttatagaaaagggtttgtttgagtcccccaggaggataatgtagagaagagaagagggcccagaactgacacctggcagtcttgggrtacattcagaagttggatagcgggaaagatacctcctgtcatctctggattcatctggtatgagcagactggaacctcagtggaacacccttggaagaga

SEQ ID NO: 198994 - DNA, 201 bp, Homo sapiens
gtaaggctgaaaatgtacactggcccaattgaaaaggccccttaatacctgatgtatgagtttgtatgcagctcacatggcactaataaagaactaaaagrttttgggcagagtggattcatgtgaagcatgacttaggttatatggttatgctaatattctatgtgtgagacatggagtggtagaatctaccagatttgg

SEQ ID NO: 198995 - DNA, 201 bp, Homo sapiens
caactcaggaggctgaatcgcttgaacctgggagtcagaggttgtagtgagccaagatcgctccactgcactccaacttgggtaacagagcgagtctcattgtcaaaaaaaagaaaagaaaaaagaaaagaaaagaaaagaaaggggcttattatgtatgaataccaaaagatgctcctctctcccctatcattcaagaaa

SEQ ID NO: 198996 - DNA, 201 bp, Homo sapiens
ggcggatcacctgaggtcaggagttggagactagcctggccaacatggtgaaaccctgtctctaaataataataataataataataataataataataatwggtaacctgagattttgccacatgccaattatagtggtaagcgctttacacgtattaacacttttaatcctgacagcaaccttgtgggcacgtactttct

SEQ ID NO: 198997 - DNA, 201 bp, Homo sapiens
agaggagaatttctagctgagagctaaaaggtgaaagggatccagcctttcaaacagttggaaaaggcagaggaaataataataataagtaacctgaggaygggcatggtggctcacgcctgtaatcccaacactttgggaggctgagatgggcggatcacctgaggtcaggagttggagactagcctggccaacatggtg

SEQ ID NO: 198998 - DNA, 201 bp, Homo sapiens
atgggatttgggatatttaatatgtgcacgtactgatggaagaaagagttgggagggtcagcctgtcaattctccttatcttccattggatgtaataaccygttctcagaaacgttgcagtcagtccttcatatctttcgcactccattgttatcactgccttttccaggctttgcctattgttatgaatgtcaaactgaa

SEQ ID NO: 198999 - DNA, 201 bp, Homo sapiens
agaacaaatcacagatgtgcattgaagtatgcacagtatgggtacggagctatttctaagagtcatagtaaaaaaggtcttttacactaaagaatcattcraaaacttagtgtatttccttttctttttctttgtatggtccaagaatgctacattatttttctcacatgacactgacatttgagaaactaaaaatatttt

SEQ ID NO: 199000 - DNA, 201 bp, Homo sapiens
aaaaaaattcccacaaatctgtaaccagcccattctcgctatctataaataactgttataaagcctgttgtaggccaggcacgatggctcacgcctataakcccagcactttgggaggccgaggtgggtggatcacctgaggtcaggagttcgagaccagcctggccaatatagtgaaaccccgtctctactaaaaataca

SEQ ID NO: 199001 - DNA, 201 bp, Homo sapiens
atcagcctaccattatggtttacctttctattttaattaaaatataattttatttaaatatttagagtacatatttagatgtggtgggtttttttttttttgcttctttgtgttttgtttttttcaaaataactactaaagtaataccagattgtaaaagattaattgacagcgtaagtactcacacttatgggtaactga

SEQ ID NO: 199002 - DNA, 201 bp, Homo sapiens
atttcatcagcctaccattatggtttacctttctattttaattaaaatataattttatttaaatatttagagtacatatttagatgtggtgggtttttttytttttgcttctttgtgttttgtttttttcaaaataactactaaagtaataccagattgtaaaagattaattgacagcgtaagtactcacacttatgggta

SEQ ID NO: 199003 - DNA, 201 bp, Homo sapiens
tgtttttagagttatctccatttggtgggtgtcccccagccggaagggcaatgccgaattgaatataaacaaagaatatgacatctgttgggcctcacaakgaccagggccttctggaggagtggcactaccccacctggcagcacctagacctgagctctacaaaaacacactgcttcactttgttttaggacttagttc

SEQ ID NO: 199004 - DNA, 201 bp, Homo sapiens
taaatatggtaaatcaagttatttggctggtgcaaaagtaatggtggtgtttgccattagtttatttaccttatttagagaggatgtataaagaggagaasatgtaatggcttccatcaccactgagacatttcttcctcctgtagagttttatgtattctcaatatggtgaatattattgtatccacagagctgaagaat

SEQ ID NO: 199005 - DNA, 201 bp, Homo sapiens
tgaggcagagattgcagtgagccgagatcacaccactgcacttcagcctgggcaacagagggagactctgtcttaaaataaaataaaataaaataaaataraataaaatagaataaaatagaataaaatagaataaaatagaatagaataaaatagaataaaatagaataaaataaaaaaaatacaaaataaaaaacaaac

SEQ ID NO: 199006 - DNA, 201 bp, Homo sapiens
gaggcaggagagaatagcttgaacccctgaggcagagattgcagtgagccgagatcacaccactgcacttcagcctgggcaacagagggagactctgtctyaaaataaaataaaataaaataaaatagaataaaatagaataaaatagaataaaatagaataaaatagaatagaataaaatagaataaaatagaataaaat

SEQ ID NO: 199007 - DNA, 201 bp, Homo sapiens
tacttgggaggctgaggcaggagagaatagcttgaacccctgaggcagagattgcagtgagccgagatcacaccactgcacttcagcctgggcaacagagsgagactctgtcttaaaataaaataaaataaaataaaatagaataaaatagaataaaatagaataaaatagaataaaatagaatagaataaaatagaataa

SEQ ID NO: 199008 - DNA, 201 bp, Homo sapiens
attaaggattgcaatctcagagctattcacatagcgttttgtgctttgatttactcttgatataataaggctaatgtatggagagataaataaaactcttrggtgacatttcaataggaattatgtaagtgcgtaagtgacacagaaagtattttattactcacaaatatgcacatttcagcatttcacttgatttctttt

SEQ ID NO: 199009 - DNA, 201 bp, Homo sapiens
ctatgaacatccgttttgcgtaactgaaaatctaagtaatatggcttggctctgtgtacccacccgcatctcatcttgaattgtaatccccacatgtaaarggagggacctggtgggaggtgattggataatggggacagttttccccaggctgtccttgtgatagtgagtgagttctcataatatctgatgctttaaaag

SEQ ID NO: 199010 - DNA, 201 bp, Homo sapiens
aaactattgaatattcagtcatttaagttttctgtagatctattctcatagatcagtggctctcgaattggtgtgagcatcagcatcactagtagggcttrttagaacagactgtataaaggtgctatttatcgctagaatttctgatccagtaggaacaggggaggggctacagaattgcatttctttcctttttttttt

SEQ ID NO: 199011 - DNA, 201 bp, Homo sapiens
cccccaattttgattactagagatgagctgacatttcctcacttaggcctgatcttaacaggtgccttagattgaaccagactgagaagatactcggtctbcttaattcaggatctaatctatgtacccaattactacctgactgggacttaatagcagtctttccaccacttccagtgttaggagctcttcattgcactt

SEQ ID NO: 199012 - DNA, 201 bp, Homo sapiens
cttgctaccaaaggattattaaaagacaacaaacaaaaaacaagtaaacaaaaagaaataaaaaaacccttatggttgttagaaatttgaggatttaggarctgcaaatagggattgttgccttgaactctttagttcagatgtcagctgtttatttatcatctcttttaaaaagcaaatacaagcttgaatagagagtac

SEQ ID NO: 199013 - DNA, 201 bp, Homo sapiens
tcaagcatatttttgtgcaactccttcattttccaaatgatgaaatcagtgctatagagattgtgatttgcctaatttccttacttaaatatatatacacytgtttgttcttctaatgtcttggatcctcacctcaattgaatgaatgtccacagttttcaagttcaggatttttcagattttataaaagtaataagggta

SEQ ID NO: 199014 - DNA, 201 bp, Homo sapiens
gaagaccaacatggtccctgacttcatagaatttacaatctacattaaatatgtcacatttcttcattggggatgattctgtaggggaaatgtcagtaccwgtttatgacaaaatctcactcaataaatgtagaaatccattaaatttttatatttaaaaaattgtagtttcttgaagtcagtcctcttcattatttgaac

SEQ ID NO: 199015 - DNA, 201 bp, Homo sapiens
cctgtttttgatagaagacttatttcatgttcttcaggcaattgcttctgtcattggtttccaaggagtacaaaaaaatacaaataaagcaaattaaaacygtgatctgctgtttcttagaactggaaagttacagggccgaacagaatgttaagaggtcatttagtctgttctctgcctttaggtaaaactgtcaaaaat

SEQ ID NO: 199016 - DNA, 201 bp, Homo sapiens
ggaaaccgaatgacctttgttactgaagaagaaggaattaatgtgtttctaaaatccaaaaaagtagattttgaactagcagtgcaaaatatcgtttatcrtacaggtaaagaatattttcagatagtccattcgaaatccaacattggaatccaggagtagttttaggtaaaaattacatcctcattcctctatcaagaa

SEQ ID NO: 199017 - DNA, 201 bp, Homo sapiens
aaaaaattgaaacctatagattggacttcaaacattgtcaggttgattaatgaaatctacctaactaggctattaagagattattttaatcttttaaattwttttttttgagatagagtctcgctctgtcaccaatcttttaaattctaattcagtttagcatttctattttatggtgagcaaacaagccaatacagtcat

SEQ ID NO: 199018 - DNA, 201 bp, Homo sapiens
caacagtttcctgggccaggaggttctcacattagcctaagatgctacttatattatctgaaattaaagggtaactttttaaatatacttgttttctactraacaggaggatttaacctatccatgatgatatgtgtgggcatttttcttcctttttcttctaacagatagaaattaggaagatgttttaagtattattta

SEQ ID NO: 199019 - DNA, 201 bp, Homo sapiens
tctgttttaaaatgtccttaattttgtcttattacttattacttattttaaacagccaatgcatgaaatgttttgtttctaaagagaaataaaatagcaamttgttcaggaaagcaaatgacttcatttggacaatgtataccaaggtagattttttttgcactagaaatttaatcccacaaatccttagttgtaatcccc

SEQ ID NO: 199020 - DNA, 201 bp, Homo sapiens
aaccaaggtagactttggaatacccactaaaaacactctgcattttgtttctgctatgtattaacatttataacactgaatatgatttaattctaatatakttataaaactttacatataagtaaacttatagattagagaaaaacattttctaagccattcacctcatttttgattcaaaaaatatgactaccatattta

SEQ ID NO: 199021 - DNA, 201 bp, Homo sapiens
tacccctgagcctgatacctgtggccatgatggtaggtttgacccacttttgcatgcagaatcacaatctaaccaaggtagactttggaatacccactaamaacactctgcattttgtttctgctatgtattaacatttataacactgaatatgatttaattctaatatagttataaaactttacatataagtaaacttat

SEQ ID NO: 199022 - DNA, 201 bp, Homo sapiens
ctggtctcaatctcatgacctagtaatccacccacctcggcctcccaaagtgctgggattataggcatgagccaccgtgcccggccgacaatcaccttttytcctaatgcatgctataatctaaatccttacggagaaaattaaatatttacccccagattacttaggctgatctctctcatggtaaaattagtgcattat

SEQ ID NO: 199023 - DNA, 201 bp, Homo sapiens
gggctctaaactgtagagtggtttctagtggcctgatatctggccctgagatgattaaggcagaggaatattgcttcttgggttatctgggccagatagargggtgtagttctagattggttgatttgcatgtcaaaggtatgctccaggctgagttctgtgccaactggaagaactagcttgccccgagagggagaggag

SEQ ID NO: 199024 - DNA, 201 bp, Homo sapiens
agaactaattttaattccacagacatcccttttttatgctgtgacctgttattcctaaagtgctttccaattaatttctatatatattttttctcatgtasaaactggtcaaaatccaaaaagtggttcctggaactgtttgagaaaaacattccagatataaaagcatgtaaatctgcaaaagataattccatggtaagt

SEQ ID NO: 199025 - DNA, 201 bp, Homo sapiens
ttattttacttggccctcaaacttattttttgagtgctcaccatgtgaaggcattgtgtgaagtaccagagctatgaagatgagtaaagtaacagtccatrttcttgcagaaacttatgaactaagtgctttttataaaaattgaagacaggtttggaagtatccagaagatattaggagagaaaaaggaatatttacatt

SEQ ID NO: 199026 - DNA, 201 bp, Homo sapiens
ttgcttttaaggagggaactttaggagatccttgctctgctatttttactgacatcaccctgaaatataagttttaaaatttctttggaaaacctcccagrcttatgtggattaacccttaattcatccattattttacttggccctcaaacttattttttgagtgctcaccatgtgaaggcattgtgtgaagtaccagag

SEQ ID NO: 199027 - DNA, 201 bp, Homo sapiens
ttcagatctggctgaaacaatcaaaatttataactaattgccaaatataatcataataatttttcttttgactataacttcagcattaggattcttgaggwgaatggtcttaaacatggcttaggaatgcttactaatataatctatgtttgttttatttcagtatggaccaatatttacagtctttgctatgggaaaccg

SEQ ID NO: 199028 - DNA, 201 bp, Homo sapiens
taccaaatttcttattgcttttaaggagggaactttaggagatccttgctctgctatttttactgacatcaccctgaaatataagttttaaaatttctttrgaaaacctcccaggcttatgtggattaacccttaattcatccattattttacttggccctcaaacttattttttgagtgctcaccatgtgaaggcattgt

SEQ ID NO: 199029 - DNA, 201 bp, Homo sapiens
aagaagttccaaccttgttgtgccctatctagtgactgtgggttgttgattttcactgtgaatgcagacttctggcttttaaggcttctatggagatataragaggggtttgagaatagggcaggttaaaatgatgttaagcttgatgttcttatcaagattcaactgtttttttcttgaatagacattcttgaattgctg

SEQ ID NO: 199030 - DNA, 201 bp, Homo sapiens
tctaggaaactgccaaacttgtcgcataatgagaatactgtagtactgaggtttagaagaagttccaaccttgttgtgccctatctagtgactgtgggttkttgattttcactgtgaatgcagacttctggcttttaaggcttctatggagatataaagaggggtttgagaatagggcaggttaaaatgatgttaagcttg

SEQ ID NO: 199031 - DNA, 201 bp, Homo sapiens
ctgagattcaaagagaagtggaggtgggagggagcgacaatggaaaaatcacctgaaaactgggacagaggaaggaagctacagttacgaaggagagctgsaaaagttgcagcagaaaggttgggagtcccgacaggttccgtagcccacagaaaagaagcaagggacggcaggactgtttcacacttttctgcttctgga

SEQ ID NO: 199032 - DNA, 201 bp, Homo sapiens
aaagacagtcttgcaagtaaggtcttctaggaaactgccaaacttgtcgcataatgagaatactgtagtactgaggtttagaagaagttccaaccttgttstgccctatctagtgactgtgggttgttgattttcactgtgaatgcagacttctggcttttaaggcttctatggagatataaagaggggtttgagaatagg

SEQ ID NO: 199033 - DNA, 201 bp, Homo sapiens
atactgagtgagctccaagtcatgtcaaataaagacagtcttgcaagtaaggtcttctaggaaactgccaaacttgtcgcataatgagaatactgtagtamtgaggtttagaagaagttccaaccttgttgtgccctatctagtgactgtgggttgttgattttcactgtgaatgcagacttctggcttttaaggcttcta

SEQ ID NO: 199034 - DNA, 201 bp, Homo sapiens
tcccagcattttgggaggttgagatgggcggatcacttgaggttaggagtttgcgaccagcctgaccaatatggtgaaacctcgtctctactaaaaatacraaaaaattacttgggtgtaatggtgggtgcctataatcccagctacttgggaggctgaggcaggagagaatagcttgaacccctgaggcagagattgcag

SEQ ID NO: 199035 - DNA, 201 bp, Homo sapiens
ctcagccaggtccagtggctcacacctgtaatcccagcattttgggaggttgagatgggcggatcacttgaggttaggagtttgcgaccagcctgaccaayatggtgaaacctcgtctctactaaaaatacaaaaaaattacttgggtgtaatggtgggtgcctataatcccagctacttgggaggctgaggcaggagaga

SEQ ID NO: 199036 - DNA, 201 bp, Homo sapiens
gtattcccaatcaaaagtttggtaccccagacataatgttgcatgtataatggagatattctttataattttaatgttgtgtgctaaaattaaaaggtttrgcaaactgcatcttctaacatatttttttttcatcattttccttgacaagttcctctagatcagtattctcaaaatgtggtccccagaccaccagtatta

SEQ ID NO: 199037 - DNA, 201 bp, Homo sapiens
cttagaaaatagtctctaaacagtgtagtatatgtgcataatttaaaataaatgagtatcaatatattgtagggcatgctgaaatattttattatcaagartgtgtgatcaaaatgcttgggcactcttagacaaggagtgcaaaaggaaaagtggatttagaggtcctggggaatttgatgttcctgtagaacattcagg

SEQ ID NO: 199038 - DNA, 201 bp, Homo sapiens
aatccaggaaataaatgatgaagaactacactgagggagtcatggagggactggagataaggggttaaggaggagaattaagagctatttaggagaaccayaaaaaaaggacttggtgcctaattggatatggagggtgatggagaggatttagtctatgacaatgttctgtcccgttggactaattgtattcattaaggg

SEQ ID NO: 199039 - DNA, 201 bp, Homo sapiens
ttgctaaaacacatgagattgattagataccatttttgtgtcaaccactgtactggacatgttgagatacattatttcactgttacatcatcacaacaacytatgtagaagaggtatcctattccacataagaaaaaaccagagacaacgagcaaaaaaatacaattccgatgttccgtattgatttctgtgttatcatac

SEQ ID NO: 199040 - DNA, 201 bp, Homo sapiens
gctcaagcaattctcccaccttggcctcctaaagtgctgagattacaggcatgagccactgcacctggccccacattattttaaatccagtccactgttartgggcatctaggttgatttcatgtctttgctattgtgaatagtgttgcaatgaacctatgaatgaatgtgtatttttggtataatcatttatattccttt

SEQ ID NO: 199041 - DNA, 201 bp, Homo sapiens
aagataatttaaaaattggcaataataactgctttaagcctagactatctaataataaaatccaaggatgtcttctacctcttttaattcagcactgtggktcttttttttttttttttttttttttgagacatgcaccaccacacccagctgattttgtatttttagtagagacggggtttctctgtgttggtcaggctg

SEQ ID NO: 199042 - DNA, 201 bp, Homo sapiens
acgctccagtggaattgtgaacagaaggaagttattttattttaaaaaattatctccattcccaccagtagcctgacattatgaacctaacacagagattygggaggctatagcttatcatgcaggaaatttctcacatagcctcatttacctttgctagcctagcttttaaaatccaagaatggacccaggaaattgtag

SEQ ID NO: 199043 - DNA, 201 bp, Homo sapiens
tgggtcttgtgataccctagctcaagagattttgtgtgaagtcactctctcctttttcattgcttagcttcagtggctgaaagagatgcctctgatagctrtagattatttgatatccctgttcatatttataagcttggagataggttctactctggtgcctctcattttaaatctttcactatcttattctggggcagc

SEQ ID NO: 199044 - DNA, 201 bp, Homo sapiens
tactcggtctccttaattcaggatctaatctatgtacccaattactacctgactgggacttaatagcagtctttccaccacttccagtgttaggagctctwcattgcacttaccaatttgaacacttttctctgagttaaataaacatggcgcccactttgcccttatttttctagaaaggaatgtctgtgatccaaatgt

SEQ ID NO: 199045 - DNA, 201 bp, Homo sapiens
atagtgccactgcactccagcctgggcaacaaagtgagaccccatctctttgtatacgtgaaatgtaaattagtaaggccagattcaccctaattaaggcyagattttaataagttattaaagcttattataaaactgctataacaaaagagtacacaattggcacaggaaaaacaattgatccacataacccttgtgtat

SEQ ID NO: 199046 - DNA, 201 bp, Homo sapiens
ccaattattttgggtggtgcttttcattattctacttcctctaactaatcctgtacaccttctatctaagtctttattatctaagtctttattatcttccyaagtcttcattatctgcttcttccttttcttgttttacagctgtgtttttattttttaattgcacactttttaatttactttttagcaacagggtctcac

SEQ ID NO: 199047 - DNA, 201 bp, Homo sapiens
cccccgtgcatcaagggctggattccttggattggagttggatttgagtttgggaaagcccctctagaatttatagagaaagcaagaatcaaggtatgtgrtcgtggcagacggggtctccagaggagacaatgctttcttttttaaactttctttcattgactcttaagtgcagggctagaacacggggaacatacctgc

SEQ ID NO: 199048 - DNA, 201 bp, Homo sapiens
ttgaggacacatataggctgaaagtgaaggggatggaaaaagatattccatgtaaatgtaaaccaaaagacagcagagttagctctgattagacaaactakacgttaattcagaaactgtaaaataagacaaagaaggtcattatataatgataaagggataaattcatcaagagggtaaaacaattgtaaatatatgtgt

SEQ ID NO: 199049 - DNA, 201 bp, Homo sapiens; identical to SEQ ID NO: 34714

SEQ ID NO: 199050 - DNA, 201 bp, Homo sapiens
gaaaaaattgaagagagaacacttccaaacccattttacaaagcattaccctgacacaaaagtcagacaaggaaactacaagaaaagaaaactacaggtcyatattcctgatgaacataaatgcaaagcttctacaaaaaaaaatactagcacctgtattcaacagcaaattaaaaggatcatacaccatgatcaagtagt

SEQ ID NO: 199051 - DNA, 201 bp, Homo sapiens
aaatgttttcttcccacaggaacgttggaaaaaggcaaatttagagaagcactctttcttggactgcttcatggcatttggaagcgggaagttccagtgtyctgcaaggtcagtgagacagctgggccacatttatccagaaagtctgcagaaagatgatggctcagaggggaacaactttggcttaatctctttatatat

SEQ ID NO: 199052 - DNA, 201 bp, Homo sapiens
agaagggctttcagcttttccccattcagtatgatactagctgtggatctgtcatatatgccttttattatgttgagttatgttttttctttgtttgtttktttttgagacagagtgttgcactgtcacccaggctgaagtgcaatggcacgatcttggctcaccgcaaccttcacctcccaggttcaagtgattctcctg

SEQ ID NO: 199053 - DNA, 201 bp, Homo sapiens
acccctggaggaaaggcttttcatactgagtgagctccaagtcatgtcaaataaagacagtcttgcaagtaaggtcttctaggaaactgccaaacttgtcrcataatgagaatactgtagtactgaggtttagaagaagttccaaccttgttgtgccctatctagtgactgtgggttgttgattttcactgtgaatgcaga

SEQ ID NO: 199054 - DNA, 201 bp, Homo sapiens
ataatttgccaactcataccctatgctatggctgcatacaggggagaaggagaatagggtccaatatatgtggctgcatgtaagctccagacttttgtagstgtaaaaatgatataattttgaaccatttatgaaatcctggccagttaaaaattcaatcataattgatcatcacattatttagttttattgttcagaaga

SEQ ID NO: 199055 - DNA, 201 bp, Homo sapiens
atgcactcctagtaacagccacttataatcttcctaatgaaacagaaaacagtatgtcaaatcgagaagggctgaggttctccagttcttcattcttgctstcccatctgctcttgtgactgagcatcagtgagtttgctgtcagatgtgcatagaggccaataccatggcactggcttttgagaaaagaaaacttttatt

SEQ ID NO: 199056 - DNA, 201 bp, Homo sapiens
tgtggaaggtaaattgattcagtaatccaggaaataaatgatgaagaactacactgagggagtcatggagggactggagataaggggttaaggaggagaawtaagagctatttaggagaaccataaaaaaaggacttggtgcctaattggatatggagggtgatggagaggatttagtctatgacaatgttctgtcccgtt

SEQ ID NO: 199057 - DNA, 201 bp, Homo sapiens
caacactcagccaagcagttgacaactctgccttagctttcgctttctacctgtgccagagcctcaaggatgggtgtacatgacagcttgtggccttctcrtgtctttcctgaacatgagtaaagccctgggcaaatggatgcccttctaaattcctgggaattcattagacctctgcaaagccactatgaacaactcatt

SEQ ID NO: 199058 - DNA, 201 bp, Homo sapiens
taggcagtggttttcttgctttctttttctagagtacattctagaagaagcttgtccaacctgaggtccgcaggccacatgtggcccaggatggctttgargtttgtgtttgacccaacacaaacttgtaaagtttcttaaaacattatgagattttgcatggaccttttttttttttttaagctcatcagctattgttag

SEQ ID NO: 199059 - DNA, 201 bp, Homo sapiens
gtggagaggaagggcactacagcctggaggacagttatcaggaaatgcttccagaggagattgagcctcagaaagggaaaggcttgtggcacagagcatcrtcattcagagaatgtcaagtaatataacgtggctagagccacatggtgtcaagggggagctctgggggagaggagactgcagagataggtaaggggcaga

SEQ ID NO: 199060 - DNA, 201 bp, Homo sapiens
ccattctttgctaagggactgtgtgtgcatgttggccatgccttcaacactcagccaagcagttgacaactctgccttagctttcgctttctacctgtgccagagcctcaaggatgggtgtacatgacagcttgtggccttctcatgtctttcctgaacatgagtaaagccctgggcaaatggatgcccttctaaattcct

SEQ ID NO: 199061 - DNA, 201 bp, Homo sapiens
cattatgacatgcagttagttgcttagaaaaacaactttgcaaaacttgtttttaagcttcagtaaggtaaatccagagcgccatttaatgtaaaataatmtaatcccactactaaggcaatacccatttaagagctctagctaatggtccatgtgctgtacaatggtgagactttttcttgtgtgaacacagcctccatg

SEQ ID NO: 199062 - DNA, 201 bp, Homo sapiens
ttaaataatagaatgtaacaactttggaaattagattcttccctttcctcagggtttgttgttgttgctgtttattgttcttgttgtttgtttgtttagtkactttccttaactaattctgtaatgtttgcattctttgtcatgggtggccacagaagtctctgctccattatttagtgatcaggtattaactagacagat

SEQ ID NO: 199063 - DNA, 201 bp, Homo sapiens
ggacattttaaataatagaatgtaacaactttggaaattagattcttccctttcctcagggtttgttgttgttgctgtttattgttcttgttgtttgtttdtttagtgactttccttaactaattctgtaatgtttgcattctttgtcatgggtggccacagaagtctctgctccattatttagtgatcaggtattaacta

SEQ ID NO: 199064 - DNA, 201 bp, Homo sapiens
tttaattttgttctaatctttacaatttctctatttagttctttagaaaagatttccttagttctttgaacataatgaaaatatctgatttaaaatctttrttaagtccagcaacagtttcttcagggaggctttctgttgattcctttttttcctctgtgaataatctattcagacagtcttctacttatagtggttcaa

SEQ ID NO: 199065 - DNA, 201 bp, Homo sapiens
gaaggtagaagtgcgttctcaggttgtcatcttgagctataagtttgtgtgcatgtaacatgcatcaacttataaataaaattatatatatataatcatakataattaacataccataaaatttatcctttcaaagtgtgaaatgtagtagtttttagtatatttataagattgcaaccatcaacactgtctagtcccaga

SEQ ID NO: 199066 - DNA, 201 bp, Homo sapiens
gcttgtctcttacctcctagtagactaagtgtattgcaagcaagagctgcgccttagttattgtaatactggtacagcctgtctcagctcctggtccctaygtggtacttaagaatctgtcagattgaatggagttcataggttcctagactccactaaccaaaggtgtttgcttctgactccttaggaattctatctata

SEQ ID NO: 199067 - DNA, 201 bp, Homo sapiens
cctgggctcaagtgatcctcctgccacagcctcctgagtagctaggaccacaagtgtgtgccagcatattgggcttcattttttttaatgggacattgggrcagaggaaggtagaagtgcgttctcaggttgtcatcttgagctataagtttgtgtgcatgtaacatgcatcaacttataaataaaattatatatatataa

SEQ ID NO: 199068 - DNA, 201 bp, Homo sapiens
gcttcttccttttcttgttttacagctgtgtttttattttttaattgcacactttttaatttactttttagcaacagggtctcactttgtcacctggagtrcagtggaatgatcatagctcactacagcctcgagctcctgggctcaagtgatcctcctgccacagcctcctgagtagctaggaccacaagtgtgtgccag

SEQ ID NO: 199069 - DNA, 201 bp, Homo sapiens
agttagttcttgaactatcttgatagctgcctttcagcctactcttgtgttctctatttgtttactttaaaatgaaagctttttggggctcctttgtgaaratgcttgcttagccccaattattttgggtggtgcttttcattattctacttcctctaactaatcctgtacaccttctatctaagtctttattatctaagt

SEQ ID NO: 199070 - DNA, 201 bp, Homo sapiens
tagaaacatgtgtggtttgccaggctactgctacaatccctgaggccccagtgctcatattcccagagtccatggacaatctctaggcttattatttgctytccccagtctgtattcaccacagatactttaagctgctttttaagccttccttctcatgttacatctctccttcctattcatttaactggtatttctctt

SEQ ID NO: 199071 - DNA, 201 bp, Homo sapiens
atttaaaaatgtgctgaagcatacccaatatctataacaaaatgaagatattgaaatgaacaaaatattcttggatatttttaaaactttgggtggaggarattatgaagggatggtaaataaaaattaaataaacagtattaagtgttttaaggcatgttaacaatattttatattctttatcttaagtatgctacagta

SEQ ID NO: 199072 - DNA, 201 bp, Homo sapiens
tggtgtgatgttggctcactgcgactccaactcctgggttcaagcgattcttctgcctcagcctccccagtagctgggattacaggtgcccgccacagccrgctaattttcctatttttagtagagacagggtttcaccatgttggtcaggctggtctggaacttctgacctcaagtgatccacctgccttgttctcccaa

SEQ ID NO: 199073 - DNA, 201 bp, Homo sapiens
cctgaggcttccctagccatgctgaactatgagtcaattgagcctctttcctttatagattgtccagtcttgggcagtcctttatagcagtataaaaatgsaccaatacagaatgtttaaaaagagatagccaaactattagctcatagctcatttgtatggaaattttatttctaggaggagtaaccataggatcaccat

SEQ ID NO: 199074 - DNA, 201 bp, Homo sapiens
gaatgatcatagctcactacagcctcgagctcctgggctcaagtgatcctcctgccacagcctcctgagtagctaggaccacaagtgtgtgccagcatatygggcttcattttttttaatgggacattggggcagaggaaggtagaagtgcgttctcaggttgtcatcttgagctataagtttgtgtgcatgtaacatgca

SEQ ID NO: 199075 - DNA, 201 bp, Homo sapiens
aatgtatctggactgtagattttgagggagaagggctgaaaataccagctctcttaatcacccatttatagattatcccttaaagtgaatagatttccatyatctcacagaatacgttgaatcttttttatttgtttgttttgagataaagtctctctctgtcacccaggctggagtgcagtggtgtgatgttggctcact

SEQ ID NO: 199076 - DNA, 201 bp, Homo sapiens
catgtttaaatatttcattgaacagatgaaatatattaatatttattcttgagtcagcttcccatccctcccatatagtagatgtatgctactatacatasagaagatgtatagtagcatactatacataccagcatagtatatgtatagtagcatagtatacatactatactggtatggtaacatagagaagatgtatgc

SEQ ID NO: 199077 - DNA, 201 bp, Homo sapiens
acatgcctgtagtcccagctcctcgagaggctgaggcgggaggattgcttgagctcaggagttccagattccggtaagctatgattgagccactgcactcsagcctgggcaacagagcgagaccttgtctcttaaaaaaaaaaaaaaaaaaaaaaaaaaaaaaaaaaagaatatgactgcattatttgatgttttactact

SEQ ID NO: 199078 - DNA, 201 bp, Homo sapiens
tatatataatcatctcattttgtgctttaaatatatatataattcttatttatttatattttgaggtcaatcttatctcaatgagctataaataaaataarccataagatcatttctattttgcaagtacttaaacttaattaagtcagtactattcctttgccccttttccttaataagaagctgatatagttaggcttt

SEQ ID NO: 199079 - DNA, 201 bp, Homo sapiens
atatatgtatgtgtgtgtatatatatatatataatcatctcattttgtgctttaaatatatatataattcttatttatttatattttgaggtcaatcttayctcaatgagctataaataaaataagccataagatcatttctattttgcaagtacttaaacttaattaagtcagtactattcctttgccccttttccttaa

SEQ ID NO: 199080 - DNA, 201 bp, Homo sapiens
cctactttgtactctgcctcaaggcccataggactcagagctcaggcttcagatgggttaggcactgggtcactaggaggctccattgtggcccaagataktaactataatttatgaaattatttttatgggaaaaccatttctaagttccaagaaatttctgactgccaaatgatttttttagaagatttctccaaacca

SEQ ID NO: 199081 - DNA, 201 bp, Homo sapiens
attatgaagctaagacataagtatgtcaagaacagaagaacagaaacagcaattcaagagtggtctttttttctttttcaacttttattttgggttcaagrggggtacatgtgcaagtttgttgcatgggtagattgagtgtctcaggagtttgatatacaaatgatttgtcaaccaggtagtaagcacagtgcctcaccc

SEQ ID NO: 199082 - DNA, 201 bp, Homo sapiens
attttctaagccattcacctcatttttgattcaaaaaatatgactaccatatttataacccagttgttttccaaaacaatatgatgtgtctgccaagacamtagaattacccaaagaaattaagggccacttaaccagggcactttaaccagagcgatggtctgtagtttatgtagacaatcatctttacttgttgcatac

SEQ ID NO: 199083 - DNA, 201 bp, Homo sapiens
cagtcattattttcctggccatttcattttgatacttcattatgaagctaagacataagtatgtcaagaacagaagaacagaaacagcaattcaagagtgrtctttttttctttttcaacttttattttgggttcaaggggggtacatgtgcaagtttgttgcatgggtagattgagtgtctcaggagtttgatatacaaa

SEQ ID NO: 199084 - DNA, 201 bp, Homo sapiens
gactgaggaaagaaaagtccactgcccctgctctaacactgtcattagtatccacaagaacaggacatcctctgcccctcttctcagtgctaccatggccrttgtccctgtctcagagtccaatttttctgtttcataacctgagcctccactgtagtttctgccttcaagaactctggccacaaaccctaatatcaaaca

SEQ ID NO: 199085 - DNA, 201 bp, Homo sapiens
gtttaaaaagagatagccaaactattagctcatagctcatttgtatggaaattttatttctaggaggagtaaccataggatcaccattagaacaatcctgkctgcagtcaggaaaacaatagctccagagcatgcactcctagtaacagccacttataatcttcctaatgaaacagaaaacagtatgtcaaatcgagaagg

SEQ ID NO: 199086 - DNA, 201 bp, Homo sapiens
cttctttagacagaaactacgtatttttagagcacgctgagctcttactctgtgcaaggcagtgctctggctaccataggggctttgagcatgagtaagayatgtttcaacccacatgagaaacaacttagtaggggcaaagtggacattcaattaataaataactgcaaggatttctggtcgagagatgccaaagcgtca

SEQ ID NO: 199087 - DNA, 201 bp, Homo sapiens
catctctcatcacctcaccttctgcatggagtcaacaacttgcaggtccctagatactatttttcttctaagtctgtcccttggaatggattttctctctrccaagtgtaccttcttcacttgcgcagctcccatactgcaccctcaaattgttgactgtctttttcgcttgttgcagtgcctctagggacttgagaggaa

SEQ ID NO: 199088 - DNA, 201 bp, Homo sapiens
aagagaagagggcccagaactgacacctggcagtcttgggatacattcagaagttggatagcgggaaagatacctcctgtcatctctggattcatctggtrtgagcagactggaacctcagtggaacacccttggaagagagggtggatccattaccaaaccgccaagaaccagtgcgacagcttgttctgatctgcatct

SEQ ID NO: 199089 - DNA, 201 bp, Homo sapiens
tccagtcacagtgaatatgctctttaataaaagtttgttttccacaaacaagaaaaaaatcaaggagttccatcagtattttcaagtttatgatgaagatkttgagtatgggtcccagttgccagagtgtcttctaaggtaacagttgtttcctataattaattcattgaccaagcttatctcagcaattcaacacctctc

SEQ ID NO: 199090 - DNA, 201 bp, Homo sapiens
gtaagcaaatatcaaaacttcttaagagtgactttttcccaagagaatctgtcacctattatctgctccccatatattgctatgaaataatgccttgcttkgtatcctttgcctttcttctttggtcttcgggtctgactttttgtgtgtttctgtctttgtagacatctcctttatccagtcacagtgaatatgctcttt

SEQ ID NO: 199091 - DNA, 201 bp, Homo sapiens
tggaatgtttttgctgaactgaagtttaacgatatgttcccagaaatttgtattttaaaacacatttcacatgggcttatctatgttgagtaatgacagargctcatattttctcctctgttgggcaactggtcaatgttcctttttatgcatactagaagtattctcccaccacccttccctaaggtagttcgaacaggc

SEQ ID NO: 199092 - DNA, 201 bp, Homo sapiens
caggctctctttgtttgcttttgcctctgtgccctttcctggaaatggaatgaattgaaatggacgaacactctctactttcttggatttactgcattctwtctttctctttattatgctacctttctaaaactctgaaacttctacctgtgttctcttttcaaggttttatatgtttagtagaaaagtttatcttcaaga

SEQ ID NO: 199093 - DNA, 201 bp, Homo sapiens
actcttgaacccagttctagtggagaaagattaaaacctttttgctttttctatgttattgtttatttttaaaacccattgttctcttctgacacaaaaaatgctccttcgaatagtactaccactgcaacagctacattatatggatgctttcagtctataagacactactgcagaattgaaaactatttatgaaagaca

SEQ ID NO: 199094 - DNA, 201 bp, Homo sapiens
cttggaagaaaacaatataatattagggcaaaaggtatgatgccagttaatggttttccctctcccttccatgattactgaaaatattttatttaaagttyttttttttggattgcttcttatggagttaaaccaaaaagtaaactggcttggcaaccatgaatatctaagtaatattgtctgagccttgagtatgcgtca

SEQ ID NO: 199095 - DNA, 201 bp, Homo sapiens
aagcgggggtcaggtgagaggaaggctttgaggtggactgtggctttaaatccaggtgtctggtagaggtggtggaaatacagaaatcaggaatgagagakagtctgggagcaagatctgaagttttcctttgaaagtagagtgtgtcaaaatatatatatcacttaaccaaaatctaccagttaaatataaatgttgaat

SEQ ID NO: 199096 - DNA, 201 bp, Homo sapiens
gggtatattccatatattacataagagccctaataggactgtagaggtcaggtaaggcttgctaccaaaggattattaaaagacaacaaacaaaaaacaartaaacaaaaagaaataaaaaaacccttatggttgttagaaatttgaggatttaggaactgcaaatagggattgttgccttgaactctttagttcagatgt

SEQ ID NO: 199097 - DNA, 201 bp, Homo sapiens
ttatatttcttctgcttgggggtcttgatctgtaaattatagttttcaaaaaaatttgaaaatgtttcactattacttctcaaaatattttccctgcttgstcatctatatctctaataacatgtatgttagacttcgttattttataagttaataacctatttatttttataggcttttattctgtgtacttcattttag

SEQ ID NO: 199098 - DNA, 201 bp, Homo sapiens
ttaattactgtcaagcatatttttgtgcaactccttcattttccaaatgatgaaatcagtgctatagagattgtgatttgcctaatttccttacttaaatrtatatacacctgtttgttcttctaatgtcttggatcctcacctcaattgaatgaatgtccacagttttcaagttcaggatttttcagattttataaaagt

SEQ ID NO: 199099 - DNA, 201 bp, Homo sapiens
tgttccttaagacctgcccaaatattaattcttttaaattttctactgaatgaatggttgattgtcatttcaacatcagtctctttctctcttttacacamttcccaaagaccatcaccttttttttttttttttttttgagatggagtcttgctctgtcaccaggttggagcgcagtggcgcgatctcggctcactgcac

SEQ ID NO: 199100 - DNA, 201 bp, Homo sapiens
cctataattttataaaaattcaacataatccaaaattcaacataatttgttatatatcaggatataaattgatcaggtagaatcctagagtttaattactgtcaagcatatttttgtgcaactccttcattttccaaatgatgaaatcagtgctatagagattgtgatttgcctaatttccttacttaaatatatatacac

SEQ ID NO: 199101 - DNA, 201 bp, Homo sapiens
caagagagaaaatgtgcaaatatactatattcaatagcattcaagtgtgaaaggactcaaaaattttttttcttttatttactaattcagagccaaaaaaagccaaaaaaaaggactttgtttttgacattgagtactctcataatttagtttacgggatggtttcctgctgcattttcctgggcttatttaaaactactg

SEQ ID NO: 199102 - DNA, 201 bp, Homo sapiens
gaggaaagatatgaaataagtttgagtggccaagagagaaaatgtgcaaatatactatattcaatagcattcaagtgtgaaaggactcaaaaatttttttkcttttatttactaattcagagccaaaaaaagccaaaaaaaaggactttgtttttgacattgagtactctcataatttagtttacgggatggtttcctgct

SEQ ID NO: 199103 - DNA, 201 bp, Homo sapiens
ccacaacgaggaaagatatgaaataagtttgagtggccaagagagaaaatgtgcaaatatactatattcaatagcattcaagtgtgaaaggactcaaaaawtttttttcttttatttactaattcagagccaaaaaaagccaaaaaaaaggactttgtttttgacattgagtactctcataatttagtttacgggatggtt

SEQ ID NO: 199104 - DNA, 201 bp, Homo sapiens
cttgcttattgatgtagtaatacatataaacttttattaactattttatatgcctttttatcttttaaaaatactttggcttttttaaaaatagaaaaaawtttaaaaactgtaatctgttaaggaaaaaggagacattaaaaaaaagtggctcacgcctgtaataccagcacttcgggaggctgaggcgggcggatcaca

SEQ ID NO: 199105 - DNA, 201 bp, Homo sapiens
gtaatttagaagtccccattctttgctaagggactgtgtgtgcatgttggccatgccttcaacactcagccaagcagttgacaactctgccttagctttcrctttctacctgtgccagagcctcaaggatgggtgtacatgacagcttgtggccttctcatgtctttcctgaacatgagtaaagccctgggcaaatggatg

SEQ ID NO: 199106 - DNA, 201 bp, Homo sapiens
tgttcacactgagcttgtgtgtttgtgtgttttgtgtggcagtggcatttttttttcttttttgagatggagtcttgctctgtcacccaggctggagtgcrgtggtgtgatctcggctcactgcaacctctgcctcccaggttcaagcaattctcctgcttcagcctcccgagtagctgggactacaggcacatgccacca

SEQ ID NO: 199107 - DNA, 201 bp, Homo sapiens
tctgacctctgtagtctatttatttctcattaaaaatttttttacaggcaaagataagattaaagtgtctgaggatgacctggagaaactccttctaattmaatggtgtgttttggaaaccattcgtttaaaagctcctggtgtcattactagaaaagtggtgaagcctgtggaaattttggtaagctttggtttggtttt

SEQ ID NO: 199108 - DNA, 201 bp, Homo sapiens
aaataatagaatgtaacaactttggaaattagattcttccctttcctcagggtttgttgttgttgctgtttattgttcttgttgtttgtttgtttagtgaytttccttaactaattctgtaatgtttgcattctttgtcatgggtggccacagaagtctctgctccattatttagtgatcaggtattaactagacagatat

SEQ ID NO: 199109 - DNA, 201 bp, Homo sapiens
cctggaaattttccagaaatgcaaactcttgggccccacatccaacctattgaatcagaaacttttggatccctgcaatctgtgttttcacaagccttccmcgtgatgctgatgcatgcttaagatttgagaaccacttctctagtatatatcaggtttttactaactcttttttacttaaagatttttacattctccctc

SEQ ID NO: 199110 - DNA, 201 bp, Homo sapiens
gaacacttagtacataccgggcactgctctaagtttgtgtgtcattcataaactaattcaaaaattagaacctcaggatttctcattttaacattgtctaracaaagcacttattctttctttaatttttcatcttatagtctttttgatggtaaagatctccaaaacttaaatttcttatatttccttagcactttattc

SEQ ID NO: 199111 - DNA, 201 bp, Homo sapiens
aacagtgtgctgttgacataaagatagacatgtagaccaatacaatagaatagagagcccagaaatagaccctggaatatgtggtcaaatgatttttgacmaagatactaagaccattccatgggaaaggagcagtcttttcaatgaatggcgctgggacaactaaatatttacatgcaaaagaatgaagttggactctta

SEQ ID NO: 199112 - DNA, 201 bp, Homo sapiens
gatgactgctacctcaaatgcacagatatcattgcaaggtcataaacacatacacaaaggaaaaatgacatcaccaaaggaccactataattttccaatgygaaaccctaaagagttagagatctgtaagcttcctaaacaaggaattaaaaataattattttagagaagctcagcaagatacaagagaactcaataatat

SEQ ID NO: 199113 - DNA, 201 bp, Homo sapiens
tatatgcctttacatggcaatgtgtttgtctcttttgcaaaatagtcacagagcagctgccctccttttagtctcatccctcctctgagaagctgattttwctccaagatatatcaccacccttcctccctaggtcatttctcagtctgagtatagagtaacatgaggggctttagcaggactgtccatggttgtccttgg

SEQ ID NO: 199114 - DNA, 201 bp, Homo sapiens; identical to SEQ ID NO: 34709

SEQ ID NO: 199115 - DNA, 201 bp, Homo sapiens
cctcccaccgcgggcctggcctccaccgccacctctgccaggcgggcatggaaggggcgacctctccgatgcgcactgccgggcgcgaagccgcccgcgcwccctcccccagcgcggcgcgtgccactggcccgggaggcccaggcgtgggcagccgggtacctagctcggccacggtagccgcgcagccggacagtagga

SEQ ID NO: 199116 - DNA, 201 bp, Homo sapiens
attggaacccagcttctaatgtggaaaatttaagtatagttggctccttttatttgtgggttctgtatcctctgattcaaccaactgcaggttcaaaataytaaaaataaaaccccacaataaaaaaatacagtattagcaactatttacataatgttcacattgtattaggtatcaaataatctggagatgatttgaagt

SEQ ID NO: 199117 - DNA, 201 bp, Homo sapiens
acattgtattgggtattgtaagtaatatagaaatggtttaaggtatatgagaggatgtgcataggttatacgcaaatactttgccattttatataagggayttgaggatccctggatacaaatctgtgagggggtcctgggaccagttctccacaaatgccaagggacaagtgtagtttgacctttttggttttttgctac

SEQ ID NO: 199118 - DNA, 201 bp, Homo sapiens; identical to SEQ ID NO: 34718

SEQ ID NO: 199119 - DNA, 201 bp, Homo sapiens
cccaattccattccttgggcatgccatagcatttgggaaaagtccaattgaatttctagaaaatgcatatgagaaggtaagtcttccaaataattagaggaaaaaaaaaaaaacaactagagaagtgctttttaaacttttttaaaaaagtggcagaacatttaaaaacattgtaatcatatacatatcctcagtatagga

SEQ ID NO: 199120 - DNA, 201 bp, Homo sapiens
aaggtactcttctctgccctgtatataaaatttggcagcagctctgtgaagaactgctattattattattaccattttataggtgagagaaacgaaacacagagagactaagttctctgactataggaccaaagtcatacagcaagtaggtggaggagctgggatttgaacacggacagtctggctcactgcgttctacca

SEQ ID NO: 199121 - DNA, 201 bp, Homo sapiens
cgtccggacagggggcggtgctcacgcccaaggccccgctgacgcgatgtaggccgagatcacctcaggcgctcgcggtgcaatcacagagcgcgccgtcrccgctcgagctcgccctgagatccctccgctcagcgccttcaacgccgtgtcccggcaccccgcacccgggcacacaaaaaacgggtcgcccgcgattct

SEQ ID NO: 199122 - DNA, 201 bp, Homo sapiens
agaattgaggagtattaccctttttcattattttgtttgattttcaggatacttaatgttgtaatctgcaggtctcattttgtggcatctaaagaaacttytatgaagaatgctagagttcttgctagagctgatctactctcttaaaaactctaaaatcagtggctctagttcacttgcagtgagagaagcatgagattg

SEQ ID NO: 199123 - DNA, 201 bp, Homo sapiens
atcgggaaatcaaggatattttctataaggcaatccagaaacgcagacagtctcaagaaaaaattgatgacattctccaaactttactagatgctacatayaagtaagagctattcagataacatattaagctgaagcaggaaattacacattaaaacacagttaaatagtatttccagttaaaaaacagtgatgctggca

SEQ ID NO: 199124 - DNA, 201 bp, Homo sapiens
agtgactgggtatggtaaaagtttgctaatgaactgtaatggagtcttttgtaatcaaaatcgttttgtgctggtctgtctcttccctaagagaaaaaaamctcttgacttgtgatagtcaaatataagagaccactatacctgaaaaatgtattcattatgacactttatttaaaggttgaggcatgaaatgtatctgcc

SEQ ID NO: 199125 - DNA, 201 bp, Homo sapiens
aaagtttaggagttgaagcttgttttctgaatctgctagtattttcaccccctacaaaaaactattgtattagaaagtgaaaagtagaaccagattccatrgaagaaccagagtgactcttctgctttaagacttgatttggtattaaaattggaattttatgttaatttaaaagagtatcctactttctgttgaactgga

SEQ ID NO: 199126 - DNA, 201 bp, Homo sapiens
aggacatcaggtgtgtgtttctcccactgtcaatcaaagacttaaagactcatgggtagaacgcctggactttaatcctgatcgctacttacaggataacycagcatcaggggaaaagtttgcctatgtgccatttggagctggtaagatgattatattttagattggaaatgtttgttctgataacatatttgtctctgt

SEQ ID NO: 199127 - DNA, 201 bp, Homo sapiens
tgcgccactggactccagtctgggcgacagaatgagactccgtctcaaaaaaaaaaaaaatcattttcttcaatttaacagccttattaacctagctttcratctcccaaatgttatttgattgtgccttttacagtcagcaataagtagcttttgaaaactacccttttactgacaatgcaatgtacaaacttttgacca

SEQ ID NO: 199128 - DNA, 201 bp, Homo sapiens
ataacagtttatatagcctttacattgtattgggtattgtaagtaatatagaaatggtttaaggtatatgagaggatgtgcataggttatacgcaaatacyttgccattttatataagggacttgaggatccctggatacaaatctgtgagggggtcctgggaccagttctccacaaatgccaagggacaagtgtagtttg

SEQ ID NO: 199129 - DNA, 201 bp, Homo sapiens
tttctatttgagaccaccagagaattgaggagtattaccctttttcattattttgtttgattttcaggatacttaatgttgtaatctgcaggtctcatttygtggcatctaaagaaacttttatgaagaatgctagagttcttgctagagctgatctactctcttaaaaactctaaaatcagtggctctagttcacttgca

SEQ ID NO: 199130 - DNA, 201 bp, Homo sapiens
caactccctgtgatttcacccctgaccaatcaccacacctggctcactggctaccccccaactcccacccaccaagttatccttaaaaactctgctctccraatgctcagggagactgatttgagtaataaaactccagtctcccacacagctggctctgcgtgaattactttattgcaactcccctgccttgatgaattg

SEQ ID NO: 199131 - DNA, 201 bp, Homo sapiens
aggtactcttctctgccctgtatataaaatttggcagcagctctgtgaagaactgctattattattattaccattttataggtgagagaaacgaaacacagagagactaagttctctgactataggaccaaagtcatacagcaagtaggtggaggagctgggatttgaacacggacagtctggctcactgcgttctaccac

SEQ ID NO: 199132 - DNA, 201 bp, Homo sapiens
aatctctcagctcactgcaacctccacctctgggttcaagtaattctcgtgccttagcctcctgagtagctgggattacaggtgtgtaccaccacgctcasctaatttttgagcttttagtagagactgggttttgccatgttggccaggctggtctcgaattccaggcttgaagcaatctgcccaccttggcctcccaca

SEQ ID NO: 199133 - DNA, 201 bp, Homo sapiens; identical to SEQ ID NO: 34716

SEQ ID NO: 199134 - DNA, 201 bp, Homo sapiens
actcttctctgccctgtatataaaatttggcagcagctctgtgaagaactgctattattattattaccattttataggtgagagaaacgaaacacagagagactaagttctctgactataggaccaaagtcatacagcaagtaggtggaggagctgggatttgaacacggacagtctggctcactgcgttctaccactttg

SEQ ID NO: 199135 - DNA, 201 bp, Homo sapiens
ccttggcaacagagtgagaccctgtctcaaaaacagaaacaaaaaaccaaacacacacacacacacgcacgcgcacacacacacacacacacacacacacrgaaaccaaccaaacaaaaatgtaataaaatgtagaaccagtttattccttggttcaaaagtctgaagaatcatgagaagaaaggccatggataactgata

SEQ ID NO: 199136 - DNA, 201 bp, Homo sapiens
ctgtgttcaagcaattctcctgcctcatcctcctgagagctgggactacaggcacgtgccaccatgcccaactaatttttctatttttagtagagacaggrtttcatcatgttggccaggctggtttcaaactcctgacctcaggtgatccacctgcctcagcctcccaaagtgttaggattacaggcgtgagccactgag

SEQ ID NO: 199137 - DNA, 201 bp, Homo sapiens
cattccacaaatatacaggtaattcaataattattgtgcatgaatacatacacaatgcttatatatacaaattccagtttgttttcatgtgctggcaaggkatttgtatacaatcataagctgtgttcatattggtcccattgaatattcacaatacaaaagcacaaaagaaccattgatttacaaaaggaaatctattta

SEQ ID NO: 199138 - DNA, 201 bp, Homo sapiens
ttccagtttgttttcatgtgctggcaagggatttgtatacaatcataagctgtgttcatattggtcccattgaatattcacaatacaaaagcacaaaagarccattgatttacaaaaggaaatctatttaaaatcacttcaattaatgatgtttcaaaggattatcttctcatgccagcatgaaattgagtagttgaacct

SEQ ID NO: 199139 - DNA, 201 bp, Homo sapiens
gaccttggcttactgcaacctcggcttcccaggttcaagctattctccttcctcagcctcccaagtagctgggtacacaccaccacgcctggctaattttygtatttttggtagagacaaggttgtaccatattggccaggctggtcttgaactcctgacctcaagtcatctgcccgccttggcctcccaaagtgctggga

SEQ ID NO: 199140 - DNA, 201 bp, Homo sapiens
acaccaccacgcctggctaatttttgtatttttggtagagacaaggttgtaccatattggccaggctggtcttgaactcctgacctcaagtcatctgcccrccttggcctcccaaagtgctgggattacaggtgtgagccaccatgcccagttggtattttgttttgattttgcatttccctggtgactagtgatgttgag

SEQ ID NO: 199141 - DNA, 201 bp, Homo sapiens
ggcctccactcaggaactgactgaaggcaggaagacagcttcaactccctgtgatttcacccctgaccaatcaccacacctggctcactggctaccccccaactcccacccaccaagttatccttaaaaactctgctctccaaatgctcagggagactgatttgagtaataaaactccagtctcccacacagctggctctg

SEQ ID NO: 199142 - DNA, 201 bp, Homo sapiens; identical to SEQ ID NO: 34719

SEQ ID NO: 199143 - DNA, 201 bp, Homo sapiens; identical to SEQ ID NO: 34720

SEQ ID NO: 199144 - DNA, 201 bp, Homo sapiens
caaagaaaaaataatccttacaaagtattttaaatgggatagtttttttcgatgatacataaaagcacaatatagtagcagggataatggttacattaagygcttaaagtaagtgcttcctccttaactccacccgatttgcatgccttaccactttcttttttttttttttttctttgagacagggtctcgctctgctgc

SEQ ID NO: 199145 - DNA, 201 bp, Homo sapiens; identical to SEQ ID NO: 34721

SEQ ID NO: 199146 - DNA, 201 bp, Homo sapiens
tgaggcccgagaatcacttgaacctaggaggcggaggttgcagtaaaccgagattgcgccactggactccagtctgggcgacagaatgagactccgtctcaaaaaaaaaaaaaatcattttcttcaatttaacagccttattaacctagctttcaatctcccaaatgttatttgattgtgccttttacagtcagcaataag

SEQ ID NO: 199147 - DNA, 201 bp, Homo sapiens
tacgatgtgcctaatccagtaggtgacactgttaccataaataaagacaaatctatacctcagtagttatagctaatagtgagacattatacatttaaaaygtagaaacagccaggcatggtggctcattcctgtaatcccagcactttgggaggccaaggtgggtggatcactcaaagtcaggagttcaagaccagcctg

SEQ ID NO: 199148 - DNA, 201 bp, Homo sapiens
cattaagatgctaagtaagccaaggtactcttctctgccctgtatataaaatttggcagcagctctgtgaagaactgctattattattattaccattttayaggtgagagaaacgaaacacagagagactaagttctctgactataggaccaaagtcatacagcaagtaggtggaggagctgggatttgaacacggacagt

SEQ ID NO: 199149 - DNA, 201 bp, Homo sapiens; identical to SEQ ID NO: 34722

SEQ ID NO: 199150 - DNA, 201 bp, Homo sapiens
ggtttatatatgtttttatttttttaataatgcattattttgtgattttaaaaagttactgtcgtagtgttgcatattttttgtaacatcactatatgtayttttctctttttagtatggacctgtatttagttttaccatggtaggcaagacatttacttaccttctggggagtgatgctgctgcactgctttttaatag

SEQ ID NO: 199151 - DNA, 201 bp, Homo sapiens
ggatgtggtggcacacgcctgtagtcccagctgcttgggaagctgaggcccgagaatcacttgaacctaggaggcggaggttgcagtaaaccgagattgckccactggactccagtctgggcgacagaatgagactccgtctcaaaaaaaaaaaaaatcattttcttcaatttaacagccttattaacctagctttcaatc

SEQ ID NO: 199152 - DNA, 201 bp, Homo sapiens
gaatttatctactcttatgttgattcaattaggatacttcttgcttgttgcgattaaatccttggactattcttcctgtaagccaagcttctctttagttsttatatttgaaatatggaccaatttgtaaatgctcatcttaaatgtcactcctagaaataagtacagttatgggccaagcaagcactgtgctaagcacta

SEQ ID NO: 199153 - DNA, 201 bp, Homo sapiens
ttattcttttcatgatgaagtgctcatgagtggggttttgagatgtgtttctgggatctgttttggctgtttagagggacagggtgcttcacattgtttgrtttattgcccctctttgttgttgtacatagtcacatgtctgtctacagactttttttgatgatatgaataggatcttgtttcttcttgagttctgttttt

SEQ ID NO: 199154 - DNA, 201 bp, Homo sapiens
ttcctgcctacccattcctgcctgaaattctaacataagcgctgtttagagattgctgacttcagaagtcctcttttaatgcaacaacttcacgtgtgggrtacatctatgtgtatgttttaccctcaaaagccaaatacgaaattgttttaagttgatatagaacacaaatcagacaattggccccaatgcttggtatgg

SEQ ID NO: 199155 - DNA, 201 bp, Homo sapiens
aaggaggagtatggcaagatgaaaagaattgctttaaggtttatatatgtttttatttttttaataatgcattattttgtgattttaaaaagttactgtcktagtgttgcatattttttgtaacatcactatatgtacttttctctttttagtatggacctgtatttagttttaccatggtaggcaagacatttacttacc

SEQ ID NO: 199156 - DNA, 201 bp, Homo sapiens
tcctgacttcaccccctcaccaaacttgttacttgatttttttattataataggtgtgaagtgatacttttttttttttttttgagacagagtcttggtgygatgcccaggctctagtgcaatggcgcgaccttggcttactgcaacctcggcttcccaggttcaagctattctccttcctcagcctcccaagtagctggg

SEQ ID NO: 199157 - DNA, 201 bp, Homo sapiens
atttgtgtactgtgtacttccaacccaacgctggctcactggaaatcatcttgagttaaaataatttttagtttgcctattatctagccagtttttaaatrtatgtacagatggttcttgatttatgtgattcaacttataattttttgactttatgatggatttatcaggatgtaaacctatcataagtcaaggagcatc

SEQ ID NO: 199158 - DNA, 201 bp, Homo sapiens
caaataatggaatcaatgataacttagcatactgggatttaatttgaaagggttattagacaatgctgttacttcatcaaaaggacttcctgcctacccaytcctgcctgaaattctaacataagcgctgtttagagattgctgacttcagaagtcctcttttaatgcaacaacttcacgtgtggggtacatctatgtgta

SEQ ID NO: 199159 - DNA, 201 bp, Homo sapiens
tgattaaactatattctatgctttagtctttccaaagggatcatttaaatgacagatgacttgtcattggtcacactttttccacatataaaggaaaatayaaagtcctttgggaacttcagatcttaactttatgtaataaatttaatactgtggtgtataacacaatatataaaagaatcatagttttttttttgagag

SEQ ID NO: 199160 - DNA, 201 bp, Homo sapiens
ccaggcgcagtggcacgtgcctgtattctcagctactgagaagctgagatgggaaggtcgcttgagctcaggacttggggtccagcctgggcaacatagckaaaccctgtctctgaaaaaataaatacattttaaaaagcctcttgaccataaatttaaggctttatttctggactcagttctattccattgatatgttta

SEQ ID NO: 199161 - DNA, 201 bp, Homo sapiens
cctaatcaaagtgtatgaagatttatttctgtgtattcttcttagtgttttgtagtttcatatcttacatttaggtctttgatccattatgaattaatttrtgtatatgatgtgaggtcatcattcttttgcatgtgtttatccagttgtcccacactgtttgttgaaaagactattttttccacgttgaattgtctttgt

SEQ ID NO: 199162 - DNA, 201 bp, Homo sapiens
tgggaaaccatcatcataatttaattttagaacatttacatcactcccaaaagagagctggtacccattagcagtcatgcttcattctccctgactgctgyccctggcaaccattaatctccttttgcctctgtgagtttgcctattctggatatttcatgtaaatgggatcatacaatttgtagtcttttgtgactacct

SEQ ID NO: 199163 - DNA, 201 bp, Homo sapiens
tgtctcttccctaagagaaaaaaaactcttgacttgtgatagtcaaatataagagaccactatacctgaaaaatgtattcattatgacactttatttaaakgttgaggcatgaaatgtatctgccaaaatgttaaatttgtgtctttggttcattccttagggatgggcgtcctttgactgatgatgaagtagcagggatg

SEQ ID NO: 199164 - DNA, 201 bp, Homo sapiens
tcgtggttgcggcatttgtggttgtagcggtctgtactgaccgcagcagtggtgcccctagtggcggtggctggattggcggctgtgggtttgaacgaccsggtggtcgttggggcccttggtgggggtcctgacggagatgctgttggcagctggcccgtcatcctggaggctgccctgtgtggttcagtgttctgtggg

SEQ ID NO: 199165 - DNA, 201 bp, Homo sapiens; identical to SEQ ID NO: 34735

SEQ ID NO: 199166 - DNA, 201 bp, Homo sapiens; identical to SEQ ID NO: 34738

SEQ ID NO: 199167 - DNA, 201 bp, Homo sapiens
ggggggattctgcgagccggagctgtccccctactctcctcagggactcgttggttcgcgccagcgccttttaagggcaccgtggggcgaaccgagcgctsagagctgctccggccgcggccctgggagctggaggaaccgcggtaggtggtggagggcaggtggcgctggggcctcggggcgggcacctcaaccgtccct

SEQ ID NO: 199168 - DNA, 201 bp, Homo sapiens; identical to SEQ ID NO: 34741

SEQ ID NO: 199169 - DNA, 201 bp, Homo sapiens
tggtagtggtggagacttaataaaaggtggttttgtcttcctgaagtggaaatatagcgccgtcaacatcttttccccatctgcctgtttcctccttcccyttctgtttaaggaaagtctaaccaccgcacttctccccacctccccgcacctccccccaggcaaacgcaagcaactgaaccgcctatgatgtcataatca

SEQ ID NO: 199170 - DNA, 201 bp, Homo sapiens; identical to SEQ ID NO: 34734

SEQ ID NO: 199171 - DNA, 201 bp, Homo sapiens
gggcggggcagcagagcaggtgaggggcactgtggctaattgcgtgacgcggcccgaaccgagtgggaggctgcagttgggccgttggagggagggagggmaggggcgatgcctttgtttaccttcttccgacatggcctcccccgcgggtttcaagatgtgcctccaactggggccgtccactttctgcgatattttgga

SEQ ID NO: 199172 - DNA, 201 bp, Homo sapiens; identical to SEQ ID NO: 34736

SEQ ID NO: 199173 - DNA, 201 bp, Homo sapiens
accacccccatccctaaatcaaagcgccaggctcgttcccaacagcgctgtccgagagacactttgagagagacacgacacggagctgcgccctccatggrtggcttggggggattctgcgagccggagctgtccccctactctcctcagggactcgttggttcgcgccagcgccttttaagggcaccgtggggcgaaccg

SEQ ID NO: 199174 - DNA, 201 bp, Homo sapiens
caggaggtgtggggctgggacctgaggggaaggtccccaaagggtttgtgactctcctccctgttggcctgacctgatcctaccttgtcttggtacagcayaacctcagcatccctgaaacaggagtgtcaggggttactgccatccaataggagatggggtgggggtctgatctttatttttgggggctgctggtggagg

SEQ ID NO: 199175 - DNA, 201 bp, Homo sapiens
tttgtgtcctggtttgattccttatggcttccgttctgttccccctcgcagcctggcctgttttaggaaactcaggctgagagtatcagttgcgtggtggyagttgcattgttccaattaccactgtgtgtggccacatcccaacaattaaaatgcagaaaaacacaaattcactgtcttgacttgatcctagaggtggct

SEQ ID NO: 199176 - DNA, 201 bp, Homo sapiens
atgcctcatgaaaagctggagagtttgcttcattccctgctcctcatagctggttagcctgaggcctggggtctctagggtaaaatcctgcacttaggttycctctctggttgatctttgagggcagcagagttaagaaaccaagagcagaagtgatataagctttagcttctcccgtaagaatataggggaagcagctga

SEQ ID NO: 199177 - DNA, 201 bp, Homo sapiens
cctactctcctcagggactcgttggttcgcgccagcgccttttaagggcaccgtggggcgaaccgagcgctcagagctgctccggccgcggccctgggagytggaggaaccgcggtaggtggtggagggcaggtggcgctggggcctcggggcgggcacctcaaccgtccctccctccttccctctttcccctcccccagc

SEQ ID NO: 199178 - DNA, 201 bp, Homo sapiens; identical to SEQ ID NO: 34743

SEQ ID NO: 199179 - DNA, 201 bp, Homo sapiens
aagctatcattaatattattcttattataaatgccttccagaaggtgcttcctggaggggcctgccccactgttcctgtgctgagttccaggacagcctcmacttcagctaccatccctcaggcctgagcctgcacctcagaccacccagtcggggaaactcccccaaggagcagcccttctcccaagtcctaagacctga

SEQ ID NO: 199180 - DNA, 201 bp, Homo sapiens
ttaaggttcaggccgatccggcagctgcaagaggggctcctgggactccgagcaggccctaatccgcgcttggaccacacttcccagcagccttcacgccrcggacgggtcctttgctgggggaagggggattccttcgaagaggtggtcgtggagggcggggcagcagagcaggtgaggggcactgtggctaattgcgtg

SEQ ID NO: 199181 - DNA, 201 bp, Homo sapiens; identical to SEQ ID NO: 34733

SEQ ID NO: 199182 - DNA, 201 bp, Homo sapiens
atgatgttcctgccctcacggagcttctattcttcaattcaatggaaacaatgggctccaaattttgtcagaaagtttacaaacgccaggcatggtggctmacgcctgtaatcccagcactttgggaggccaaggcaggcggatcatgaggtcaggagattgagaccatcctggctaacacggtgaaacctcgtctctact

SEQ ID NO: 199183 - DNA, 201 bp, Homo sapiens
ccatctgcaaacatttactgactctgactaggcactggcagtacaaagtaatgaaacactgcagatgatgttcctgccctcacggagcttctattcttcamttcaatggaaacaatgggctccaaattttgtcagaaagtttacaaacgccaggcatggtggctaacgcctgtaatcccagcactttgggaggccaaggca

SEQ ID NO: 199184 - DNA, 201 bp, Homo sapiens
tggtccctgccctcatagtggttagtagagggaagaactatagaccaaatacactcagtatgaattttgccaccatcaagtctgacttcgtatacttgtcrtttgccccaaatatccagcccctgcagaattccagccagctagccagaggagtttggattaggccctttgtcccttaatgagccgtctcccaaaagtcac

SEQ ID NO: 199185 - DNA, 201 bp, Homo sapiens
agaaagaaaaaagaaactgtagtgaataaccttgtacatatgtcattttttcacatgtgaaaatatatctgaggtataaattcgtagattattaattactsagttaaagggcccctgatcgtagggacatttagatggaggcatcactggtggacaatcagaactccctaactcgtgctgctcagcagttctgcatctcat

SEQ ID NO: 199186 - DNA, 201 bp, Homo sapiens
agcatgaagccaggagttcgagaccagcctggccagcatggtgaaaccccgtctctattaaaaatacaaaaattagctgggcatggtggcaggcgcctgtwatcccagctactcaggaggctgaggcaggagaatccctggaatccaggaggcggaggttgcagtgagccgagatcgcacccactgcactccagcttgggc

SEQ ID NO: 199187 - DNA, 201 bp, Homo sapiens
  misc_feature (1)...(201): n = A,T,C or G
ccgtcaacatcttttccccatctgcctgtttcctccttccctttctgtttaaggaaagtctaaccaccgcacttctccccacctccccgcacctccccccnggcaaacgcaagcaactgaaccgcctatgatgtcataatcacaatcccattacctcatcctgctgggggggagggggcggagagagaagagagggagtga

SEQ ID NO: 199188 - DNA, 201 bp, Homo sapiens
atttacataagagccagaaaccatcaacccaacctcttcacacactaacgtctacattcaatctctttaaaaaagacttaaattttggctcatgtgggagrtggtggtagtggtggagacttaataaaaggtggttttgtcttcctgaagtggaaatatagcgccgtcaacatcttttccccatctgcctgtttcctcctt

SEQ ID NO: 199189 - DNA, 201 bp, Homo sapiens
actcttgtcctgtgctgtatgaatcatggtacttaacctggaagagcccactaatggctcaaaacccagcccaaaaggaagggggcagggatttttccacygatagagaagggacagcaaaacttgggtggagaagggtttgagatgttggaagatgtggattgtttgacttactaactttgggaagacaagaggaagaac

SEQ ID NO: 199190 - DNA, 201 bp, Homo sapiens; identical to SEQ ID NO: 34731

SEQ ID NO: 199191 - DNA, 201 bp, Homo sapiens
ttctccacgaccccctcccccttttttctgaggctgattgttgctattactttactcttgtcctgtgctgtatgaatcatggtacttaacctggaagagcmcactaatggctcaaaacccagcccaaaaggaagggggcagggatttttccaccgatagagaagggacagcaaaacttgggtggagaagggtttgagatgt

SEQ ID NO: 199192 - DNA, 201 bp, Homo sapiens
ccgagcaggccctaatccgcgcttggaccacacttcccagcagccttcacgccgcggacgggtcctttgctgggggaagggggattccttcgaagaggtgrtcgtggagggcggggcagcagagcaggtgaggggcactgtggctaattgcgtgacgcggcccgaaccgagtgggaggctgcagttgggccgttggaggga

SEQ ID NO: 199193 - DNA, 201 bp, Homo sapiens; identical to SEQ ID NO: 34739

SEQ ID NO: 199194 - DNA, 201 bp, Homo sapiens; identical to SEQ ID NO: 34744

SEQ ID NO: 199195 - DNA, 201 bp, Homo sapiens
cacccccccccccgccccggggaccagcggacgccccatgccccaccccgcggggacaggcagggcaacagagggagaggttgaagattggaggggcctasccttttgcttcttcatgggggtggggggaggggtgttccccacttgtcacccctttccccaccagaaccatatggaagaagagcaggcagatctccacct

SEQ ID NO: 199196 - DNA, 201 bp, Homo sapiens
atccaataggagatggggtgggggtctgatctttatttttgggggctgctggtggagggaaagcctggactgagagttaggtctggtggggttgctgagarggcctagcggcctgctgctctgtgaagggctgagccccgtgccagttgttaaactgagaagttttaacttgtttagtgaatattcagggctgtctctacc

SEQ ID NO: 199197 - DNA, 201 bp, Homo sapiens; identical to SEQ ID NO: 34745

SEQ ID NO: 199198 - DNA, 201 bp, Homo sapiens; identical to SEQ ID NO: 34746

SEQ ID NO: 199199 - DNA, 201 bp, Homo sapiens
  misc_feature (1)...(201): n = A,T,C or G
ataatcatttgggcatccctctctctcacttgagcagctgttttctaagtggtgctggtattccagttagaaacaacagagcatgaaccagtttaagggtngcaaataagtttcaacttgattgccaactctattttatttcatatctggactgccaagttcataatttctgaagctgtgtttaggcttagctggaaagag

SEQ ID NO: 199200 - DNA, 201 bp, Homo sapiens
acaggcatgagctactgtgcccggccttcttgctgctttctctatgcatactgaaaaagctccctgtcagcaaccccaagcctatgacctgatggctgtcwtttagcgttgtaaattaaccattgctgacaaggaaatagggagaccacaattggagaggtctacatcataggctcactcttgggatgaggaagtaaactg

SEQ ID NO: 199201 - DNA, 201 bp, Homo sapiens
tcggtaagagaccacccaggaactgtacctagggttggggtcaggtgcttttgctcctgacgcagtcttggctgatttgtgagcagtgctgtttggtggcrcctatcttttcctccttcccttctgccttttagctaaattccccttgattggccctttctccagatattgagcagggaatatagaccttggaccagccag

SEQ ID NO: 199202 - DNA, 201 bp, Homo sapiens
ctgtttgatggattctcctttagcctgaaggtatgatctcagagtcacttgataacttggaatccatgatgcccaacaaggtcaggaagattggcgagctygtgagatacctgaacaccaaccctgtgggtggccttttggagtacgcccgctcccatggctttgctgctgaattcaagttggtcgaccagtccggacctc

SEQ ID NO: 199203 - DNA, 201 bp, Homo sapiens
ggtagtgtctaactgttccattctacatatgatattggctgttgatttatgatagacagtctttattattaaggggtcctcacacatcttcctgtttggargaggttttgtgttggtttaatcagcttaggagggaaaggtgatcatcagggtcactttcgtgcagaatcccacctctgcccacaattcctgccttctttg

SEQ ID NO: 199204 - DNA, 201 bp, Homo sapiens
aagaaagtggccaagcaggatgcagctatgaaagccatgacaattctgctagaggaagccaaagccaaggacagtggaaaatcagaagaatcatcccactrttccacagagaaagaatcagagaaggtaggtgtcctcctgccatctgggaggatcagttccctgtcagtgtctggattgtaactgactcccttgaggcaa

SEQ ID NO: 199205 - DNA, 201 bp, Homo sapiens
agccttgagggtggcaatgagggatgaggtaggtttttaaaactcatggtctccatcccatattaggaaatcaaagtctccaaatgctacttattggccaktgttatctggactaggcattgtctaagcaacaagcaggacaggacgcttgcaggggtttttgataagttatctctcactatgtctatgagtcaggataat

SEQ ID NO: 199206 - DNA, 201 bp, Homo sapiens
ctgcctgaggctttttttagttacttatttttctagaagtagaaggagtatacgctgaaataatgataaaaatatagtaaacacataaggagtgtgtagcytagatccctcgcattcacagttcacagtcgagttcacactcctacaagaatctcatgctgctgctgatcccacaggaggcggagctcggaccagaatgct

SEQ ID NO: 199207 - DNA, 201 bp, Homo sapiens
tggaatacctgcctgaggctttttttagttacttatttttctagaagtagaaggagtatacgctgaaataatgataaaaatatagtaaacacataaggagygtgtagcctagatccctcgcattcacagttcacagtcgagttcacactcctacaagaatctcatgctgctgctgatcccacaggaggcggagctcggacc

SEQ ID NO: 199208 - DNA, 201 bp, Homo sapiens
taataaattaaccttagcttactgtaacttttttactttatttttactttattttttactttattaacttttttattttttgttccttttgtaataatacktagcttaaaacacaaacatgttgtactgctatccaaaaatatttcctttgtttatatccttaattctatagtcttttttctgtttgtaaatttttttatt

SEQ ID NO: 199209 - DNA, 201 bp, Homo sapiens
tgaatccccctcagacagacgggtcatgatgtggcagtggcagcctttgcttttcacccgtccatttgaacctgtctgatggaatccatcccctctgtgasctgagctgcctcccactgctcggcctgtttttaaatgctgtccttttttctgctaactctgctgcttcatgttcttttctaaaaacacaaaatgaccttt

SEQ ID NO: 199210 - DNA, 201 bp, Homo sapiens
gcctgagcaacagagcaagactccatcttgaaaaaaatcattcaagctgattgaaaaagtagtcatttcaatgaaaagtctcatttccgtctcagacttcyagtttccctccctagacccatatattactatagccctgcattagcaactgggatgcggtctgagaagcatggttttgttgttgtgagaacatcagtgtgt

SEQ ID NO: 199211 - DNA, 201 bp, Homo sapiens
atcccaaatcccttcctcttctttccacctccagcgtcagcactctaatccaagccactgtctcatctagactgtcacaatagcctcctaactgatctttmtactttatttactcaacacttatttatggagtatcttctattttttttagaacaggaaccaaacattaaccaatagtcacctaaagaaatgtaagatctc

SEQ ID NO: 199212 - DNA, 201 bp, Homo sapiens
caccgcgcctggccacatttcttgctttcttgtaacttcaaaagccagttttagctgggagcaatggttcacgcctgtaatcccagcatttttggaggccraggcaggcggatcacctgagatcaggagtttgcgaccagcctggccaacatggtgagaccccacctctactaaaaatataaaaattagccaggcatgata

SEQ ID NO: 199213 - DNA, 201 bp, Homo sapiens
ggggctggcgcggcccagcggtcgggccagggtcgtgccgccggcgggtcgggccgggcaatgcctcgcgggcgcaatgaatccgcggcaggtaagccggkccggccttggaccttcgccgccgtctgggttcgtttacaacctcacaggctttgtgttgcagtgcgtagcgtgtgcgtcttgtgagtgttagagtgtgtg

SEQ ID NO: 199214 - DNA, 201 bp, Homo sapiens
taggccttcccctcctccctaagccgttttctgagagaggtgcaggagcaggtgggttggggcaggctgcatacacagtgggggtgggttgtgctgctaarcagcagcaggtccacaatcccccctctgcatagctcctggggggaaaggatggaggagcgtgtgcacggctgcctgcctgttgaaggtggtggttctaat

SEQ ID NO: 199215 - DNA, 201 bp, Homo sapiens
cttgaagctttcagaacaaatagccttcatcctgttttccatcggtttccttccattattctatttctgttttaaacaccttcctagggaatcgctgtgtraaaggagattctctcagcctaaaaggagaaactgtcaatgactgccatgcagaaataatctcccggagaggcttcatcaggtgagcgaggtcagagctgt

SEQ ID NO: 199216 - DNA, 201 bp, Homo sapiens
gcgcagtggctcacacctgtaatcccaacattttgggaggccgaggcaggcggatcacgaagtcaggagattgagaccatcctggctaacacggtgaaacsccgtctctactaaaaatacaaaaaattacccaggcatggtggcatgtgcctgtagtcccagctactcgggaggctgagacaggagaatcacttgaacctg

SEQ ID NO: 199217 - DNA, 201 bp, Homo sapiens
tgaggccgaggcaggcatatcacgaggtcaggagtttgagaccagcctggccaacatggtgaaaccctgtctctactaaaaatacaaaaattagctgggcrtggtggcgtgcacctgtagtcccagctactcaggaagctgagacaggagaatcacttgaacccaggaggcagaggttgcagtgaactgagattgcgccac

SEQ ID NO: 199218 - DNA, 201 bp, Homo sapiens
ctgcctgcctgttgaaggtggtggttctaattttataaacctcctctgcacagatgggtaggctagcacttgctgccactcctgagctgtgaagtcagcgwttacctcactcagatagctggtcaggccctgcactgtaggtcctaataggccagtggacagattgaggaaaacaggagcttctgaagggcataacagaga

SEQ ID NO: 199219 - DNA, 201 bp, Homo sapiens
ctcaaaaggctctgcaaggtccagggaccccaagtctctacaaggctgctaggattttaccattagtcactgggcacagaggtgctgtttacaggaaaggraagacctgggtcagggagctgtgtggtaagatcagggttctattttgaatgtgttagtttgggagatctgggagatccccaagtcaaataggaggtgggg

SEQ ID NO: 199220 - DNA, 201 bp, Homo sapiens; identical to SEQ ID NO: 34761

SEQ ID NO: 199221 - DNA, 201 bp, Homo sapiens; identical to SEQ ID NO: 34762

SEQ ID NO: 199222 - DNA, 201 bp, Homo sapiens
cataaacacctgagcacaacccccttgtagatgttatttctgtttgataattatctgtttattggtcatgtctccactagacggagagccccttgaggacagagtgtcctttgctttgtattccttatctcctacccttagctagtattatttgtcttcatagcactcataactgacattgtatatttatttgtttattta

SEQ ID NO: 199223 - DNA, 201 bp, Homo sapiens; identical to SEQ ID NO: 34763

SEQ ID NO: 199224 - DNA, 201 bp, Homo sapiens
ataaacacctgagcacaacccccttgtagatgttatttctgtttgataattatctgtttattggtcatgtctccactagacggagagccccttgaggacagagtgtcctttgctttgtattccttatctcctacccttagctagtattatttgtcttcatagcactcataactgacattgtatatttatttgtttatttat

SEQ ID NO: 199225 - DNA, 201 bp, Homo sapiens; identical to SEQ ID NO: 34764

SEQ ID NO: 199226 - DNA, 201 bp, Homo sapiens
ccagttgagtgcaaaagttaggctctgagatctaagccttgagggtggcaatgagggatgaggtaggtttttaaaactcatggtctccatcccatattagsaaatcaaagtctccaaatgctacttattggccagtgttatctggactaggcattgtctaagcaacaagcaggacaggacgcttgcaggggtttttgataa

SEQ ID NO: 199227 - DNA, 201 bp, Homo sapiens; identical to SEQ ID NO: 34765

SEQ ID NO: 199228 - DNA, 201 bp, Homo sapiens
gcactgtcagcatctggaattcttccgtatgtactggctactggtttagtgtctattctcttccctttcaatctcctcaccaccatagatgttttaagagsacaaagatcttacttggttttgctcaccgttctttcccagcaccaagcatagtgcctggcgcatagcaggggctgtgaaatatgtgaagaatgaatgaat

SEQ ID NO: 199229 - DNA, 201 bp, Homo sapiens; identical to SEQ ID NO: 34766

SEQ ID NO: 199230 - DNA, 201 bp, Homo sapiens
tggagctccctggtttgtattgtccagcaaagatgctgtagtagtttcccgtggctgtctgctgtaaaaaaataaccacaaactaggtggcttaaaacaayggaaatttattatctgacagtgctggaggccagaaatctgaaatcagtatcactgggccatgttggcagggctgtgctccctccagaggctgtaggggag

SEQ ID NO: 199231 - DNA, 201 bp, Homo sapiens
taacttactggagtggataaatgcacttaatagcttttggagacctctttttcttctgggggtacctgaggcatttcttgctttctttttttttttttttkagatggagtttcgctcttgttgctcagggtggagtgcagtggtgcgatctcggctcactgcaacctccgcctcccaggttcaagtgattctcctgcctca

SEQ ID NO: 199232 - DNA, 201 bp, Homo sapiens
tgaggcaggagaatcacttgtacctgggaggtggaggttgcagtgagccgagatcatgccactgcactccagcctggataacagagtgagattctggctcaaaaaaaaaaaaaaaaaaagccatttgtgatcattaacatcaatagaatatatgtcagcataaatactgccacagagcactactcagccagttgggcaact

SEQ ID NO: 199233 - DNA, 201 bp, Homo sapiens
atttttgttgctgtattgtattccatcatgggcatatgccaccatttatccattttacttttgatggacatttgggttgtttccagtttgggggctattadttacaaataatgcaaccatgaacttcttggggtttaccattacctttctagataatggtaaactggtttcctgtagtgactaagagctgctctgcatcct

SEQ ID NO: 199234 - DNA, 201 bp, Homo sapiens
tggtggcgattgtcgaaattcatagatttatacacttaaaaggataaattttactgtatctaaattatatacctcaattttgttaagatatatatatatatttttttttttttaagcactcctttgaaaggattaaggacgcctaacttgaaggaaaagcatttctgcacaggtgtcagtgtattgcactgtggaacctgt

SEQ ID NO: 199235 - DNA, 201 bp, Homo sapiens
ttctgtctactgtggctggtgacgttaactaattttatgacttcttttctgttttttttttttttttttttggagatggagtctcactctgtcacccaggstggagtgcagtggcgcagtctcagctcactgcaacctccgcctcctgggttcaaacaattctcttgcctcagctcctcgagtagctgggattacaggcat

SEQ ID NO: 199236 - DNA, 201 bp, Homo sapiens
atctaacagcctgatacaggtcttgtccctgccctttcctcaggtttttacagccatagctagtaaatataacatactgcatctcatcgcctttgtttggycttcacccaaacgcagccacgctctgccgcaggatatgtggcagagccaggtggggaatcagtggctcagagcccactctgcttttcaggacataggctg

SEQ ID NO: 199237 - DNA, 201 bp, Homo sapiens
aacaactgacaccatctcggagtcagcttcccactcttccctctaccctatctcgccagcccacctttcctcctctcatacccagctcctctgtctgctcytgtcccaacataattggatttacagaatttcggacttgaaagagacctgaaagtttattgaggccaatctcctctcttggaagatgcggaatgagagctc

SEQ ID NO: 199238 - DNA, 201 bp, Homo sapiens; identical to SEQ ID NO: 34747

SEQ ID NO: 199239 - DNA, 201 bp, Homo sapiens; identical to SEQ ID NO: 34748

SEQ ID NO: 199240 - DNA, 201 bp, Homo sapiens
atcctggacggtaccagaggcactgtggatgggtaaggagacaggagagcgcagtgaggaccaagcctctgccctgacttgcaagggtgcatcatacctcygcagtctcagggcttgagagccgcctcccctcccacggtgtctccactgtgagctccttatcttacaggtcccaggtgaataatgagtgcttttgtttct

SEQ ID NO: 199241 - DNA, 201 bp, Homo sapiens
aatacaaaaaaaaaaaaaaaaaaaaaagccaggagtgatggcgctcgcctgtaatcccagctactccgtaggctgaggcaggagaatcgcttgaacccggsgggcagaggttgcagtgagccgagattgcgccattgcactccagcctgggcaaaaagagcgagactccgcctcaaaaaaaaaaaaaaaagtaccttccgt

SEQ ID NO: 199242 - DNA, 201 bp, Homo sapiens
caagtgcgttatgctaagcacgagaagccagactcaaaaggctgcatactgtatgagtccatttatatgacattctggaaaaaaaaaaccacagttatagsgatggaaagtggatccgtgggtgccagggactgggtatcgtggaagaaattgattgttgagtggcatgaaaaagctttttagggaaatagaaatgttcta

SEQ ID NO: 199243 - DNA, 201 bp, Homo sapiens
agatgttttaagaggacaaagatcttacttggttttgctcaccgttctttcccagcaccaagcatagtgcctggcgcatagcaggggctgtgaaatatgtraagaatgaatgaatgtagcctgtggcccaagcttaaggaggatagaaaccacgccagggagtggtttggtccattggcgcctgtgggtctgacccaagtc

SEQ ID NO: 199244 - DNA, 201 bp, Homo sapiens
gctgcctgcctgttgaaggtggtggttctaattttataaacctcctctgcacagatgggtaggctagcacttgctgccactcctgagctgtgaagtcagcsattacctcactcagatagctggtcaggccctgcactgtaggtcctaataggccagtggacagattgaggaaaacaggagcttctgaagggcataacagag

SEQ ID NO: 199245 - DNA, 201 bp, Homo sapiens; identical to SEQ ID NO: 34756

SEQ ID NO: 199246 - DNA, 201 bp, Homo sapiens
cctaattcattttctttttccactgtcttattctgcaggggtattccctcagcggatactacacccatccatttcaaggctatgagcacagacagctcagrtaccagcagcctgggccaggatcttcccccagtagtttcctgcttaagcaaatagaatttctcaaggggcagctcccagaagcaccggtgattggaaagc

SEQ ID NO: 199247 - DNA, 201 bp, Homo sapiens
aaccctgggaggagaattttttaaaagaagagtactcaatccacagtgaactacggcatgtttgttaaacacaattgaccaccacacagcgaagacccaamtgaggttcaagagaaggaatttttatggaccctgttagcacaagtcaaggtccttctccagtaccactgggaagctttggagaagaaaagggggacagtg

SEQ ID NO: 199248 - DNA, 201 bp, Homo sapiens; identical to SEQ ID NO: 34759

SEQ ID NO: 199249 - DNA, 201 bp, Homo sapiens
aggtggcagacaaggtgggacttggcaactacctgatgagatccaggagatgaggccaggaggcgggcagcaaagatgacgcaggtttctagccttaatargctaggaggagagtgatgccattagcaataagaactacaggagaaggagctgagtttgagggaactattaatttggttcagaatatgtgctgtttgagtt

SEQ ID NO: 199250 - DNA, 201 bp, Homo sapiens
agggacaaagaagaaaaaagaggtgaaagacctttgctgtgtcaccaaaccctgggaggagaattttttaaaagaagagtactcaatccacagtgaactamggcatgtttgttaaacacaattgaccaccacacagcgaagacccaactgaggttcaagagaaggaatttttatggaccctgttagcacaagtcaaggtcc

SEQ ID NO: 199251 - DNA, 201 bp, Homo sapiens
cggaggctgaggcaggagaatcacttgaacccgggaggcggagattgcagtgagctgagatcacactgcactccagcctgattgcagtgagccgagatcakgccactgcactccagcttggcaacagagcgagactccgtctcacaagaaaaaaaataaccgtgtgagtactattccatagaatgaatgtttcataattta

SEQ ID NO: 199252 - DNA, 201 bp, Homo sapiens
ggatggaaagtggatccgtgggtgccagggactgggtatcgtggaagaaattgattgttgagtggcatgaaaaagctttttagggaaatagaaatgttctrtatcttgattgtggtggcgattgtcgaaattcatagatttatacacttaaaaggataaattttactgtatctaaattatatacctcaattttgttaagat

SEQ ID NO: 199253 - DNA, 201 bp, Homo sapiens
gggtaaaattaagattaaacacagggaaagaacattctcacaggtgaggatggtgttgaaccctagaataatcgtttcccagataccttgaacaaaaatcsagcagttagagaagcctgaccatgaagcaaatttgacttttgtccctctagataacaaaagttatctttttgaaagtaatggtgtaatttgaatgagtgt

SEQ ID NO: 199254 - DNA, 201 bp, Homo sapiens
agccgggccggccttggaccttcgccgccgtctgggttcgtttacaacctcacaggctttgtgttgcagtgcgtagcgtgtgcgtcttgtgagtgttagaktgtgtgtgtgtgtgtcgtcttgccaagcagcattgctggtttaggaatttgtgcgtcttgtgagtgtgtgtgtgtgggtgtgtgtcgtcttgccaagcag

SEQ ID NO: 199255 - DNA, 201 bp, Homo sapiens
ggaaacaacccagacgtccatcagctgatggattcataaataaaacatcaaatatatccataaattgaatattattttggccataaaaagaagtgaagtgytgatacatgcttacaatatggatgcacttgaaaacttgatgccaaatgaaaaaagccagtcacaaaagatcacatattgtatgattccatttatatgaaa

SEQ ID NO: 199256 - DNA, 201 bp, Homo sapiens
cgtcttgtgagtgtgtgtgtgtgggtgtgtgtcgtcttgccaagcagcattgctggtttaggaatttgtgcgtcttgtgagagtgtgtgtgtgtgtgtgtgcgtgtgtgtgtagtcttgccaagcagcattgctggtttaggaatttgtgaatttgtatcctgctcattaattctgcagaatggagcagtgcgtgaagagg

SEQ ID NO: 199257 - DNA, 201 bp, Homo sapiens
gtcttgtgagtgtgtgtgtgtgggtgtgtgtcgtcttgccaagcagcattgctggtttaggaatttgtgcgtcttgtgagagtgtgtgtgtgtgtgtgtgcgtgtgtgtgtagtcttgccaagcagcattgctggtttaggaatttgtgaatttgtatcctgctcattaattctgcagaatggagcagtgcgtgaagaggg

SEQ ID NO: 199258 - DNA, 201 bp, Homo sapiens
tgtggtggcgattgtcgaaattcatagatttatacacttaaaaggataaattttactgtatctaaattatatacctcaattttgttaagatatatatatatatttttttttttttaagcactcctttgaaaggattaaggacgcctaacttgaaggaaaagcatttctgcacaggtgtcagtgtattgcactgtggaacct

SEQ ID NO: 199259 - DNA, 201 bp, Homo sapiens
gtggtggcgattgtcgaaattcatagatttatacacttaaaaggataaattttactgtatctaaattatatacctcaattttgttaagatatatatatatwtttttttttttttaagcactcctttgaaaggattaaggacgcctaacttgaaggaaaagcatttctgcacaggtgtcagtgtattgcactgtggaacctg

SEQ ID NO: 199260 - DNA, 201 bp, Homo sapiens
catggttttgttgttgtgagaacatcagtgtgtatttacataaacctagatggcatgggctcctacacacgtacaggctgtatggtatggccggttgctcytaggctacaaacctgtacagcatgtaactgtagtgaatactgtgggcagctgcaacacactggtaagtattggtgtctatctaaacagcaaaaagataca

SEQ ID NO: 199261 - DNA, 201 bp, Homo sapiens
atgggatccctacctcacaccatatacaaaagtaaattccagagagaataaggatttaaagatttttaggagtaagagtaagtgaataaatattagggtamggggaaaagaaaaacaggataaatattaataaattcaaagttaagaacatctaccaaaatagaaaatgaaaggatacatatggaaggataaatttgcaac

SEQ ID NO: 199262 - DNA, 201 bp, Homo sapiens
tcagtactgtgttgggaatattgagagtggagagttgagtataacttataggacacctaatgttaattacctttcagacactgcaatgtgtgtgtgccataaaaaaaaaaaaaatccagtagctctgatacgagggaaagtaaatggtttaacaggtgctgagtaggagaagctcaaggagaggaaaccccaagggctgaa

SEQ ID NO: 199263 - DNA, 201 bp, Homo sapiens
ataggacacctaatgttaattacctttcagacactgcaatgtgtgtgtgccataaaaaaaaaaaaaatccagtagctctgatacgagggaaagtaaatggtttaacaggtgctgagtaggagaagctcaaggagaggaaaccccaagggctgaagaaggtgggagtcaggagtctcctgaagcaagtggcatttaaggagc

SEQ ID NO: 199264 - DNA, 201 bp, Homo sapiens
ccttctcaactcccttaaattctgtcaaagggaaaagtaagttaggttgctggagaggctatgctgaggcctcagaacctctgtactcctggaagttctgygtgctttgcctcctgctcccctctctgtgttcctgttggcaggcccctaggcaggatttaggaggtaggcaagtcaccctagccaagtcataagcccatg

SEQ ID NO: 199265 - DNA, 201 bp, Homo sapiens
gctggagttgcagcgagaatcaattatagcacagtttgacttaggaaggagagggggaagggcttccccaagaagtactgcctgagctgagactttaaggwtgatgaagagagaaagactgagggttctaggcgaaggacactgttaaatcctgtggtgggagaagcgcagagctggcaaagaggctgagaggaggcactt

SEQ ID NO: 199266 - DNA, 201 bp, Homo sapiens
cgctgttacagccttggaggactggggttcagtttcatccaatcacatttcttcttttgtcatagtcatctaaacgatagatcttagagacaggtgggcarggggtgcactggtgagcctgacttaaggagaggtcatctcgtcccttccctagtcccatctcccttggttattgttatttcatgtgattgttctggttat

SEQ ID NO: 199267 - DNA, 201 bp, Homo sapiens
agaccagccggaccatatgaggaaaccctgtctctactaaaaatacaaaaattagctgggcgtggcagcgggtgcctgtaatcccagctactcgggaggctgagacaggagaattgattgaagctgggaggcggaggttgcagtgagctgagatcgcaccactgcactccagcctgagcaacagagcaagactccatcttg

SEQ ID NO: 199268 - DNA, 201 bp, Homo sapiens
gaccagccggaccatatgaggaaaccctgtctctactaaaaatacaaaaattagctgggcgtggcagcgggtgcctgtaatcccagctactcgggaggctgagacaggagaattgattgaagctgggaggcggaggttgcagtgagctgagatcgcaccactgcactccagcctgagcaacagagcaagactccatcttga

SEQ ID NO: 199269 - DNA, 201 bp, Homo sapiens
ctgagcaggagaattacttgaacccaggaggcggaagttgcagtgacctgagattgtgccactgcactccagcctgggtgatggagtgagactccgtctcaaaaaaaaaaacaaaaaaatcagaagtaatggcatttcatttattcatatttatgtgttatttgcatttccttttctgtgaaccacctgttcttgtccttt

SEQ ID NO: 199270 - DNA, 201 bp, Homo sapiens
tgctcggccgcaagattctggccgccatcattatgaaaaaagactctgaggacatgggtgtcgtcgtcagcttgggaacaggtgagtgaggctctgagacmtgccgcctcccatggcgcctgaaagcgggtgcctctcatcctcccctggagtccatgcatgtaagtccaaggcagggagaagagacttcattttagctac

SEQ ID NO: 199271 - DNA, 201 bp, Homo sapiens
tggaagttctgcgtgctttgcctcctgctcccctctctgtgttcctgttggcaggcccctaggcaggatttaggaggtaggcaagtcaccctagccaagtyataagcccatggctcaattgccttctcagcccttcaagggctgttccacaggcagcaaagggaggggcctccacaggttcaccactgcagccctaattca

SEQ ID NO: 199272 - DNA, 201 bp, Homo sapiens
gtaggctagcacttgctgccactcctgagctgtgaagtcagcgattacctcactcagatagctggtcaggccctgcactgtaggtcctaataggccagtgracagattgaggaaaacaggagcttctgaagggcataacagagagcaaaaccactgaagctgagtggctgcagctgcagccagggaaagagccagtaggat

SEQ ID NO: 199273 - DNA, 201 bp, Homo sapiens
ttttggttgctcacaagactataatggtaatttttggctcatcatttttgtgtgtgtgggttttatcttaattcattgttaaagagatagtgggtttcccmtgagctagtttcctatcatctgtgcctatgtttgcttcactgagctatggggaaagagtcactggctgctttgtttacaaaaagaaaggacaggctgagc

SEQ ID NO: 199274 - DNA, 201 bp, Homo sapiens
ttttgagatggagtctcactctgttgcccaggctggagtgcagtggcacaatctcagctcactgcaacctctgcttcccaggttcaagcgatcctcctgcytctgccccactagtagctgggattacaagtacctgccaccacgcccggctaatgtttgtatttttagtagagacggggtttcgccatgttggccaggctg

SEQ ID NO: 199275 - DNA, 201 bp, Homo sapiens; identical to SEQ ID NO: 34752
  misc_feature (1)...(201): n = A,T,C or G

SEQ ID NO: 199276 - DNA, 201 bp, Homo sapiens
gaaatgtccagaatagacaaatccatagagacagaaagtagatgagtggttgccagggccaggagtgggagagttggagagatgaggagtgactgcgccartgggtagaaggtttctttttggagcgatgaaatgttctaaaattgactgtggtgacagttgcagaactctgtgaatatactaaaaatgactgaattgtat

SEQ ID NO: 199277 - DNA, 201 bp, Homo sapiens
gcaccagtggcatctgacatgaacctgtgggggacagggctgtccctcagcctttggaaaggagccatttcaaagaacctccctttgtgggtaaatttgcrtctgggtggggtggggttcatcaggcaccttttgattacgtacccagcagggcccttccccagcagagcccacgattgattgattgattgattgattgat

SEQ ID NO: 199278 - DNA, 201 bp, Homo sapiens
gcggtgtgagctcctgcccttccaccccttgtcctatacccctcttctcccatgacttggaggcagcagacaatcctgtccccttcctggccccttgcccrtcactcctcagggtggatggctctgccatctctgtcttccacttagcagccttgctcccctcctcaacactattgcctgggctggtacaagagatggaga

SEQ ID NO: 199279 - DNA, 201 bp, Homo sapiens
tagtttgcttcatatcctcaccaacattaggtattgtgagtctttttttattttagccattctgtagctgtgaagcggcatcccattgtggttttatcacrtgttctagtcagttatttacatgtctgttcccattactagactgtgaacttcataagggaaggttcatgcagtaagtagttttgttttttttgttgttgt

SEQ ID NO: 199280 - DNA, 201 bp, Homo sapiens
atccgggaagactaaggagacaagcgtcaactggtgtctggctgatggctatgacctggagatcctggacggtaccagaggcactgtggatgggtaaggaracaggagagcgcagtgaggaccaagcctctgccctgacttgcaagggtgcatcatacctctgcagtctcagggcttgagagccgcctcccctcccacggt

SEQ ID NO: 199281 - DNA, 201 bp, Homo sapiens
gactaaccagtgttttcttagttttgttttcttcttgtctctcattttctctagactgcagagtcccagacccccaccccttcagccacatccttcttttstgggaagagccccgtcaccacactgcttgagtgtatgcacaaattggggaactcctgcgaattccgtctcctgtccaaagaaggccctgcccatgaaccc

SEQ ID NO: 199282 - DNA, 201 bp, Homo sapiens
ctgtagctgtgaagcggcatcccattgtggttttatcacatgttctagtcagttatttacatgtctgttcccattactagactgtgaacttcataagggarggttcatgcagtaagtagttttgttttttttgttgttgttcttattaaccttcctcttcttattttgagggtgatacatgctttattattaaaaagaact

SEQ ID NO: 199283 - DNA, 201 bp, Homo sapiens
ccgtcattctcttttgcctccatccctcctccccagagttggaggaaagcagtggattttgtggttagtcattctttggactcacactaaaagaaacattrgtgccatgttcaaatatatcagaagacctaggaaataagaaatttgacctacttttctaaatgaaatcccagactgagcaaagagctcaccacatttgaa

SEQ ID NO: 199284 - DNA, 201 bp, Homo sapiens
caactcccttaaattctgtcaaagggaaaagtaagttaggttgctggagaggctatgctgaggcctcagaacctctgtactcctggaagttctgcgtgctktgcctcctgctcccctctctgtgttcctgttggcaggcccctaggcaggatttaggaggtaggcaagtcaccctagccaagtcataagcccatggctcaa

SEQ ID NO: 199285 - DNA, 201 bp, Homo sapiens
tgctagtttgcttcatatcctcaccaacattaggtattgtgagtctttttttattttagccattctgtagctgtgaagcggcatcccattgtggttttatyacatgttctagtcagttatttacatgtctgttcccattactagactgtgaacttcataagggaaggttcatgcagtaagtagttttgttttttttgttgt

SEQ ID NO: 199286 - DNA, 201 bp, Homo sapiens
aaaacactgttatgcagtacatgactataccagtttcttgagtccttctagaaattgctgtgcataactagcacattttcccttttgtctttttaaacaartatatcttctgttttatacgttgactcctttacttaccagacttcttgcatagctgcatagtatttcattgaatagaagctgacaaattcagtttctcag

SEQ ID NO: 199287 - DNA, 201 bp, Homo sapiens
gtggaattatttatgctacccaacactttgggatgcgggagtcagatattggtggtcatagtggttttgcatcaagatggcatcactcttgccatgcaacmggcatgttttcttaatctctaaggtctatcacaaagtggaaaagcaaggtgtaaagtgaggggagaggtgaagattgtctgtatatgtctagaatatttt

SEQ ID NO: 199288 - DNA, 201 bp, Homo sapiens
caggtcatttttagcaactgagtggtttaagattgccagtgactccctcaacatttcctgaagtgtttatggctcctctgtttgatggattctcctttagyctgaaggtatgatctcagagtcacttgataacttggaatccatgatgcccaacaaggtcaggaagattggcgagctcgtgagatacctgaacaccaaccc

SEQ ID NO: 199289 - DNA, 201 bp, Homo sapiens
gctgggatcacagatgtgcaccaccatgcctggctaatttttttttttttttttttttgagacagagtctcactccatcgcgcaggctggagtgcaatgaygcgatctcagctcactgcaaactctacctcccgggttcaagtgagtctccctcctcagcctcccgagtagctgggattacaggagcatgccaccatgcct

SEQ ID NO: 199290 - DNA, 201 bp, Homo sapiens
tttcaccatctttatcagactttatcagacttaataggtgagaccctctgacatcagcctccctttccttctgtaccaccccttgccacatgcacacagartgaagctcttctccaaaaggactgtatattaatctacttgcaagtggcacaaacccagtgtaaattaacttaagcaaaaaaaggttttttcctccctttg

SEQ ID NO: 199291 - DNA, 201 bp, Homo sapiens
tcatagctcactgcagccttgacctccagggctcaagtgatcctctcaccccagcctcccaagtagctgagactataggcacagaccaccgtgcccagctaaatttttttttttttttttaagagacaggggtctcgctatgttgcctgggggattactatgttgcccaggctggtcttgaactcctggcctcaagtgatc

SEQ ID NO: 199292 - DNA, 201 bp, Homo sapiens
tttttttttaagagacaggggtctcgctatgttgcctgggggattactatgttgcccaggctggtcttgaactcctggcctcaagtgatctcccaccttarctcctcaagttgctgggattacaggtgtgagccacaatggctggctctaagaagtcaatttagagaaaaatattaattaatagtccaagtaatacctgga

SEQ ID NO: 199293 - DNA, 201 bp, Homo sapiens
tagctcactgcagccttgacctccagggctcaagtgatcctctcaccccagcctcccaagtagctgagactataggcacagaccaccgtgcccagctaaatttttttttttttttttaagagacaggggtctcgctatgttgcctgggggattactatgttgcccaggctggtcttgaactcctggcctcaagtgatctcc

SEQ ID NO: 199294 - DNA, 201 bp, Homo sapiens
agtgacaggggccagtctcagaagaactatgctcctcctctcaaggtccccagaagcacagccaaagacagttaagacgtctacttttggtgccttttttggggggggggggtcctcctaactcctaagtggaggtggctcttgctgtcatgcgagttattcctaggctttactcttagcctcgagagagcagtaactggg

SEQ ID NO: 199295 - DNA, 201 bp, Homo sapiens; identical to SEQ ID NO: 34767

SEQ ID NO: 199296 - DNA, 201 bp, Homo sapiens
tggccaggctggtcttcaactcctgacctcagatgatccacccgcctcagcctcccaaagtgctgggattacaggcatgaaccaccgcgacagccatgacytttaatatctaaatgctggagaccactcagagctcccgattcctccatctagttgcttacttgtcacctctgtttggattaacatccctaatatgacatg

SEQ ID NO: 199297 - DNA, 201 bp, Homo sapiens
tacaaaggactcccgggggccttttctggactctgcctactccaggcccagtcatttggccatttcttttccatctgagtgggtttgtaaagcagcaaatcacagtgattcggcagactgtcaccactcactttttctttggattcttgtgatgtctttaagctctcacgagtccagtttctccagcattctccctttttc

SEQ ID NO: 199298 - DNA, 201 bp, Homo sapiens
acaaaggactcccgggggccttttctggactctgcctactccaggcccagtcatttggccatttcttttccatctgagtgggtttgtaaagcagcaaatcacagtgattcggcagactgtcaccactcactttttctttggattcttgtgatgtctttaagctctcacgagtccagtttctccagcattctccctttttcc

SEQ ID NO: 199299 - DNA, 201 bp, Homo sapiens
tatgtctatgagtcaggataatagtgccccagtcattgttttggtagaagtccagtccactggctaggcagccatgttgggattcatcactttgtagtttytaactttttactgtattccatattggaaagttcagccctcctctgagatacccattgtccactagaactccagacagaagtgctggagagggcagtgggc

SEQ ID NO: 199300 - DNA, 201 bp, Homo sapiens
aactgacattgtatatttatttgtttatttattgcctgtctctcctcattgactgtctttcattagcttcatgagaacaatgtggaaaggaattttctttkatcaaagcaaaacaaaactaccttgaggcctaggacagtgcctcatactggcatatagtatatgttcagtaaatgtttattaaatgaatgaatggaaatc

SEQ ID NO: 199301 - DNA, 201 bp, Homo sapiens
gggatgaggtaggtttttaaaactcatggtctccatcccatattaggaaatcaaagtctccaaatgctacttattggccagtgttatctggactaggcatkgtctaagcaacaagcaggacaggacgcttgcaggggtttttgataagttatctctcactatgtctatgagtcaggataatagtgccccagtcattgtttt

SEQ ID NO: 199302 - DNA, 201 bp, Homo sapiens
gtctgcagttacttgagctgctaagattaaatgacaataggagttgttgttctttcaaggcataaactgaccttctgttgaggaaagttcactgctttgcyactgtgtcctatgttagattaaaaggggtggggggagcagcggtgcagcttccctcgcacagtagttgtgattaaagcttttctggatcatttctgaaga

SEQ ID NO: 199303 - DNA, 201 bp, Homo sapiens
gcctatttccctgagaaacactgcagaaggcagggcagtggctgccttgagcctgcccaggacaggactgtgactgtcccctcctgctttctacaagccayggagataggggcattgctcttgcatgaggctggggctgagagcagccccctacaggctggatctggatcctagggaagaagaagatgggagatctccccc

SEQ ID NO: 199304 - DNA, 201 bp, Homo sapiens
aacatagtgcggccctatttctacgaaaaaaaatttttttaattagccaagcatggtggtatgtgcctgtagtcccagctgcttaagaagctgaggcaggrggattgcttgagcccaggagtttgagattgcagtgagacatgactgtaccactgcactctggcctgggtgacagagaccttgtcttttaaaaaataaata

SEQ ID NO: 199305 - DNA, 201 bp, Homo sapiens; identical to SEQ ID NO: 34751

SEQ ID NO: 199306 - DNA, 201 bp, Homo sapiens
aataggaagtaaatgagggaatggagttgggcgctttaaaaatcagacagtgtatgaagtaacagtgacttgtggggagaaaggtagtcccttctgatttctgcttaagaagagagtccaagttggtgctagcatttcgttaagccttcctcatacttcataatcttcctttatagtaaggacaggctcagagcctttgca

SEQ ID NO: 199307 - DNA, 201 bp, Homo sapiens
ttagtaaagttttgttaaatgatcgaatggggcgtttttagcgcagtgtgcaagtgccctattaggggtaggcgcccagtaactcgagaagcatggagtargaaaccacaaacagcacctgctccccctcctctccccctacctgctgtggggaaggcctcccttgtaaatttgaaaggttgattcacgggaagccgtgga

SEQ ID NO: 199308 - DNA, 201 bp, Homo sapiens; identical to SEQ ID NO: 34753

SEQ ID NO: 199309 - DNA, 201 bp, Homo sapiens
cataaacgttgattccttttactgcctgagctgctaagtcttgaaactgaagcctctgttatatgcagttagagtatccaaagctgggttctcagccagtrgattaggatctggttgaaagctaggattcttgatgccttgtctggtacatttccaagctgttttgctccaccatgctcttccctctgtgtttggaaatta

SEQ ID NO: 199310 - DNA, 201 bp, Homo sapiens; identical to SEQ ID NO: 34754

SEQ ID NO: 199311 - DNA, 201 bp, Homo sapiens
taaatatatcagtataaaactttgcacgtaagagttcatattcttttcaaacacatggggcagtcatgaaattctcctggatccctgaggtaaagatactrcacaatctgtccctcctgaccgccttcaccatcttcttttcatgccactgtccctctcattctgaacttaagcccactggcctgcacgggcctgccagca

SEQ ID NO: 199312 - DNA, 201 bp, Homo sapiens; identical to SEQ ID NO: 34757

SEQ ID NO: 199313 - DNA, 201 bp, Homo sapiens
atggggcccggctaaaccctacttggcaggaatcgctgaccactgtggggcccacccagtccagctgctgtccactcaagcagcggcaggtgtcaggtcayacccaggcctctctcttcccctcccttcagagctaccattgtgtcaggccagcccggtgcggtgtgagctcctgcccttccaccccttgtcctatacccc

SEQ ID NO: 199314 - DNA, 201 bp, Homo sapiens
aaagaaaaatgtaccaggcccaggcctctagatgagagtttggaaatacacacaaaactaagaaaagtaaaaatacattgcttagtaatatatataaatgygaaaagaaattaaagcaatataatagttgtgtaaacacaaattcaggatgggagttacttctgatggagaggcagtggcacaagatggggaccacttaca

SEQ ID NO: 199315 - DNA, 201 bp, Homo sapiens
gtaactagaaaattaccttctcaactcccttaaattctgtcaaagggaaaagtaagttaggttgctggagaggctatgctgaggcctcagaacctctgtaytcctggaagttctgcgtgctttgcctcctgctcccctctctgtgttcctgttggcaggcccctaggcaggatttaggaggtaggcaagtcaccctagcca

SEQ ID NO: 199316 - DNA, 201 bp, Homo sapiens; identical to SEQ ID NO: 34895

SEQ ID NO: 199317 - DNA, 201 bp, Homo sapiens
ataatcgataattaaattttggaatattcccccctaactttttaattctgatatttttgtagttgaacccacctggtttctatatttcctttatacaaagytgtgaacgatatccagctctccccaccctttaacacttatatatggtatatagattttgtgtgtgtgtgtgtgtgtgtgcatgtgtgtgtgtgttttcag

SEQ ID NO: 199318 - DNA, 201 bp, Homo sapiens; identical to SEQ ID NO: 34896

SEQ ID NO: 199319 - DNA, 201 bp, Homo sapiens; identical to SEQ ID NO: 34897

SEQ ID NO: 199320 - DNA, 201 bp, Homo sapiens; identical to SEQ ID NO: 34898

SEQ ID NO: 199321 - DNA, 201 bp, Homo sapiens
cttgtgggataaagtctcaaccctttcataggaggataagatccttcatgtcctggcctctgctaaccttacagcttaatttctacctcattgctaccaayaccatttactccagcagtgcccagtacaccatgctttatctcatcctcagtgcatgctgaacctactatttatagtaatctttcggctgggccccgtggc

SEQ ID NO: 199322 - DNA, 201 bp, Homo sapiens
gctgatatatgcagtcatataatgaagtaggcctgtgtattcaatttagtactatagtagtgatggttcttcatgcttcttaaacaagtggttaaagtttyttcaggccctctgtggtggctcacacctgtaattgattgaggccaggagtttgagatcttcctgggtaacatagtgagaacctgtcccgacaaaaagttt

SEQ ID NO: 199323 - DNA, 201 bp, Homo sapiens
taggctgatatatgcagtcatataatgaagtaggcctgtgtattcaatttagtactatagtagtgatggttcttcatgcttcttaaacaagtggttaaagyttcttcaggccctctgtggtggctcacacctgtaattgattgaggccaggagtttgagatcttcctgggtaacatagtgagaacctgtcccgacaaaaag

SEQ ID NO: 199324 - DNA, 201 bp, Homo sapiens
cctcccaagtagctgcgattacaggcacgtgccagcatgcccagctaatttttgtatttttagtagagatggggtttcaccgtgttggccgggttggtctygaactcctgacctcaagtgatccacctgcctcggccactcagaatgctgggattataggcatgagccactgcgcccagcctaattttttttttttttttt

SEQ ID NO: 199325 - DNA, 201 bp, Homo sapiens
tgtgcctggcctggaattggttctttaggatagatttccagaagtggaattactgagcttaaaagtgtaaaaaattcatgctcctcaatatacattgtcarattctctccagaagggttctatcacacttctatttggaatgtttgagaatgtgatgtcactcttaagtagaattgaacaaacaaaaatagtagctggact

SEQ ID NO: 199326 - DNA, 201 bp, Homo sapiens
tgaggcaggagaattgcttgaacccgggaggcggaggttgtggtgagccgagatcgcgccactgcacgtcagcctgggcaacagagcgaaactccatctcaaaaaaaaaaaaaatgtgggcactggagctttagagtagactggagaggtcttaacttcatctgcgcacgtgggccgcgtctttagtgactttttaaactc

SEQ ID NO: 199327 - DNA, 201 bp, Homo sapiens; identical to SEQ ID NO: 34899

SEQ ID NO: 199328 - DNA, 201 bp, Homo sapiens
aggatgggaaactcagtcttatttggtggaaccaagggatgaaaacgaataaaattttggaaggagactagcttgttttttgttggctaggagattattcttaatctatgatttgagaacagagaccaggcctgaaatttccgggaggcagaattcagcgtaatatgtacttccaacattgttctggggctctgccagaac

SEQ ID NO: 199329 - DNA, 201 bp, Homo sapiens; identical to SEQ ID NO: 34900

SEQ ID NO: 199330 - DNA, 201 bp, Homo sapiens; identical to SEQ ID NO: 34901

SEQ ID NO: 199331 - DNA, 201 bp, Homo sapiens
tttttgagacaaagtctcgctttgtcgcccaggttggagtgcggtggtgcaatcttaacctctgcctcgcaggtttaagtgatcctcccgcctcaacatcmcaagtagttgggattacaagtgtgagccaccacgcctggctcatttgtatttttagtagagatagactttcaccatgttggccaggctggtcttgaactc

SEQ ID NO: 199332 - DNA, 201 bp, Homo sapiens
tatcaacaaatcttcaccttgggcatatctgctcttggtctgattttcattcattcagtgaataccagtttagtttagtttagaaatgagaggaagctacttttttttttttttttttaattgaggcagagtctcattctgttacccaggctggagtgcagtggtgtgatctgggctctctgcctcctgagttcaagtgat

SEQ ID NO: 199333 - DNA, 201 bp, Homo sapiens
aaatatacgtatttgagcctaactttgtagatgttgaccagaaggtagaattccttaattctgcaggaccagaagcatgagtagtatacttcagtatgtcmgtatggctaatgttttaagaattgcagtgtgagataacacagttaatttgttcataggccgaggagtgaccttcctatttcctatacaagcaaagacatt

SEQ ID NO: 199334 - DNA, 201 bp, Homo sapiens
ttggccgggttggtctcgaactcctgacctcaagtgatccacctgcctcggccactcagaatgctgggattataggcatgagccactgcgcccagcctaattttttttttttttttttttttttttttggagacagggtctcactccctttgcccaggctgaagtgaagtgcattggcgtggtctcggatcactgtagcct

SEQ ID NO: 199335 - DNA, 201 bp, Homo sapiens
acaccactgtactccagcatgggcgacaaagcaagaccttgtctcttaaaaaatatacgtatttgagcctaactttgtagatgttgaccagaaggtagaaytccttaattctgcaggaccagaagcatgagtagtatacttcagtatgtcagtatggctaatgttttaagaattgcagtgtgagataacacagttaatttg

SEQ ID NO: 199336 - DNA, 201 bp, Homo sapiens
catgttggccaggctggtctcgaactcccaaccccaggtgatctgcccgcctgggcctcccaaagtgttgggattacaggcatgagctactgttcccagcrgactctgtctttaaaaaaaaaaaaaaaaaaattagcatagtgtcacaatgcctcctttacaaataagcagatactgcttaagcttagggagagtcttggt

SEQ ID NO: 199337 - DNA, 201 bp, Homo sapiens
tgtcaatcagcatattaatagttcaggaaagttttgttaatgaaagagttttgggccaggcatggtggctcatgcctgtaatcccagcactttgggaggcyggggtaggcggattgcctgggcaacacggtgaaactccatctctataaaaaatacaaaaattaggccgggtgcggtggctcacacctgtaatcccagcac

SEQ ID NO: 199338 - DNA, 201 bp, Homo sapiens
agaccttgttcaagtcgttcttttcctggaatgctgttctttaaggactagattaagaaacaaatactacacagtaatttgaattcaattatttttctttrtcaggtactggttcttgcacctacaagagagttggcaaatcaagtaagcaaagacttcagtgacatcacaaaaaagctgtcagtggcttgtttttatggt

SEQ ID NO: 199339 - DNA, 201 bp, Homo sapiens
ttcgctgggtgtggtggtgggcgcctgtagtcccaggtactcgggaggctgaggcatgagaataacttgaactcaggagtggaggtttcagtgagctgagrttgtgccacttcactacagcctgggcgacagagcgagactctgtctcaaaaaagaaaatctgttttacaactgtttgacccacatgagttgaatagttac

SEQ ID NO: 199340 - DNA, 201 bp, Homo sapiens
gtgggttgcctgagctcaggagtttgagaccagcctgggcaacatgggaaaaccccacctctactaaaaatacaaaaattcgctgggtgtggtggtgggcrcctgtagtcccaggtactcgggaggctgaggcatgagaataacttgaactcaggagtggaggtttcagtgagctgaggttgtgccacttcactacagcct

SEQ ID NO: 199341 - DNA, 201 bp, Homo sapiens
gtggactgcacttagggacttgctttcaaagaatagagtaaggtggggagtgaggactttaccgaggagagatgaacaaacactacctgggccagttgatygtgggtcacatcattagtgataggcacatagccatgtgcccctgataagaggtggtaaggcgagcattcacttcgggtattcctcccccaaatatgtaac

SEQ ID NO: 199342 - DNA, 201 bp, Homo sapiens
tcataatgaaactgtgttttcccacacttcagggacactggcttttggaccatgatgggtggccagtgttatttttgaccagtgacttgttaagcacttakgttatcaccttttctttgaagaagtggcaaatattttgtttttctcatgctttttaaaaattgaatactaattaaagcacacaaaaacaaaacattctct

SEQ ID NO: 199343 - DNA, 201 bp, Homo sapiens
atatggtatatagattttgtgtgtgtgtgtgtgtgtgtgcatgtgtgtgtgtgttttcagacagagtctcgctctgtcgcccaggctggagtgcagtggtrcaatctcggttcactgctacctccgcctcccgggttcaagcgattctcttgcctcagcttcccaagtagctgggattataggcccatcactacccccagc

SEQ ID NO: 199344 - DNA, 201 bp, Homo sapiens
tggccgggttggtctcgaactcctgacctcaagtgatccacctgcctcggccactcagaatgctgggattataggcatgagccactgcgcccagcctaattttttttttttttttttttttttttttggagacagggtctcactccctttgcccaggctgaagtgaagtgcattggcgtggtctcggatcactgtagcctc

SEQ ID NO: 199345 - DNA, 201 bp, Homo sapiens
ggccgggttggtctcgaactcctgacctcaagtgatccacctgcctcggccactcagaatgctgggattataggcatgagccactgcgcccagcctaattttttttttttttttttttttttttttggagacagggtctcactccctttgcccaggctgaagtgaagtgcattggcgtggtctcggatcactgtagcctca

SEQ ID NO: 199346 - DNA, 201 bp, Homo sapiens
agtgctaagggaccttctccctcatgtccccaggtttataaccacaattgctagtgttcactgacctgcataggctactcaggtgtttgtctctctttttkggtttagtgttactcatgtattttacttcaataggatgtagagtcctacattcatcgatccgggcggacaggcagagctggaaggacgggggtgtgcatc

SEQ ID NO: 199347 - DNA, 201 bp, Homo sapiens
gatgccatcaggtatgttccctaccactgctatggtctgttttagtgttggttcaaatactgcatgtctttgtacagtaataagatttgacttaaaaaaawttttttttttaaatttttgagacagggtctcactatgttgcccaggctggtctcaactcctggtctcaagcagtcctcccagctcagcctcccaaagtgc

SEQ ID NO: 199348 - DNA, 201 bp, Homo sapiens
aacctgtctgtactaaaaatacaaaattagccgaggataatggcgcatgcctgtaatcccagctactcaggaggctgaggcaggagaatcacttgaacccrggtggcagaggttgcggtgagccgagatcgcgccattacactccagcttgggcaacaagagtgaaactccgtcttaaaaaaaaaattttatatatatata

SEQ ID NO: 199349 - DNA, 201 bp, Homo sapiens
agccaggcctggtgtcaggtgcctgttgtcccagctacttgggaggctgagacagcaagatcacttgaacccggtaggcggaggttgcagtgagctgagaycatgccactgcactccagcctgagtgacagagtgagactctgtctcaaaagaaaaaaaaaagactagatatattgagttaaaatacattaagcttcttaa

SEQ ID NO: 199350 - DNA, 201 bp, Homo sapiens
gactgcttatcttattggaaacaattgatggccactgtacattaaactgtggttcattttcctgtagggaattaagttcaaacgaataggtgttccttctkcaacagaaataataaaagcttccagcaaagatgccatcaggtatgttccctaccactgctatggtctgttttagtgttggttcaaatactgcatgtcttt

SEQ ID NO: 199351 - DNA, 201 bp, Homo sapiens
ctgaggcatgagaataacttgaactcaggagtggaggtttcagtgagctgaggttgtgccacttcactacagcctgggcgacagagcgagactctgtctcraaaaagaaaatctgttttacaactgtttgacccacatgagttgaatagttactaaggggcactcttcattttccaagatagtgaaactattgatatatac

SEQ ID NO: 199352 - DNA, 201 bp, Homo sapiens
ggtgtcctggctaggtgccatggctcacacctgtaatctcagtattttgggaggctgagctgggaagataattcttgagaccagcctgggtaatgtagtgmgaccctgtctctaccaaaaaaaaaaaaaaaaaaaagccagatgtagtggcatgcacctgtaggaattcaaagttacagtgagttgttaattgcaccactg

SEQ ID NO: 199353 - DNA, 201 bp, Homo sapiens
cgtcttaaaaaaaaaattttatatatatataaatcttttcctccaaagtagcttttatgactttgcttagccttaaatcttaccaggcaatgttaggggcrtctttatctgtacttcagagtctttaggacacatgtttatgcaggtaaacttttaccttgctgtgtttgctaatggagagcctcaagaacactcaaaggc

SEQ ID NO: 199354 - DNA, 201 bp, Homo sapiens
gccatggctcacacctgtaatctcagtattttgggaggctgagctgggaagataattcttgagaccagcctgggtaatgtagtgagaccctgtctctaccaaaaaaaaaaaaaaaaaaaagccagatgtagtggcatgcacctgtaggaattcaaagttacagtgagttgttaattgcaccactgcactccagcctaggca

SEQ ID NO: 199355 - DNA, 201 bp, Homo sapiens; identical to SEQ ID NO: 34903

SEQ ID NO: 199356 - DNA, 201 bp, Homo sapiens
accatcagatcttatgagatttattcactatcacaagaacagcataagaaagacctgcccccatgattcaattacctcccaccaggcccctcccacaacaygtgggaattcaagatgagatttgggtggggacacaaccaaaccatatcagacttcttccataagtggttttggctccagacacacagtgaagtcacctgt

SEQ ID NO: 199357 - DNA, 201 bp, Homo sapiens; identical to SEQ ID NO: 34904

SEQ ID NO: 199358 - DNA, 201 bp, Homo sapiens
ttcaaaggaaagtgagcgtctgtttgttgttgttgttttgttttgtttcgtttttgagatagggtctcaatctgtcacccaggctggagtgcagtggtgcrattgtggctcactgtagccttgacctcctgggctcaggtaatcctcctgcctcaacctcctgagtagctggggctgcaggtgtgcaccaccatgcccagc

SEQ ID NO: 199359 - DNA, 201 bp, Homo sapiens
ccccagaaagttctctcgccccttccaccatgtaaggacacagcgagaaggctccatcttaatccaggaagcaggtcctaacaagacactgaatctgcccygccttgaccttggactcccagcctccagaaatgtgagcaggaaatgtctgctgtttgtgagccccccaggctatggtattttgctagagaagtctgagta

SEQ ID NO: 199360 - DNA, 201 bp, Homo sapiens
ctccatttttaacatcttataacgcctagaagagatcacttgatttccaggcacatcgtgttctatcactggtttcttcaaaatttattagagcaattttrtcttgtgtatatttgttaataattgtatcacaaatgatttaatattgtaattattataatatttattgttaaaaatgcaaataatatatattatataagt

SEQ ID NO: 199361 - DNA, 201 bp, Homo sapiens
agtctggggatgtgtctgggctaagcagagaaaatcacttcgagaaatcactgatgtctgccaagggctgggagaaaggaggacaccggggcattcaattrgcacacctgccctcatcagtccgaatgctatttcagtgcaaacttttattgcattgtgtcttagtccatttcacgctgctgataaagacatatctgagac

SEQ ID NO: 199362 - DNA, 201 bp, Homo sapiens
ccccaggtcctttgcacctgctggcccctctgcttggaagcttctttctccaaatgctgaatgatttattccaacaccacctcctccgagtggcttttcayctgtccctttccaaaataatcttctcctttccttttgccctgattcacttttggaaacagttcctatgtgagtttagagtttattttactgcatttgatt

SEQ ID NO: 199363 - DNA, 201 bp, Homo sapiens
tagcattttggcactcctaaatctcaccacctattttctgccgggcctgtgcccttctagggtcagcatcgatttcccagtattcactttccagtggttcmttctggcctcacaggaccagctggtacaggacataagataagagctcctattgcaccttccagcattaatagcaatagtcctggatgacaccgtgaaatc

SEQ ID NO: 199364 - DNA, 201 bp, Homo sapiens
caagactggctccgccccacacctcacccatcacacgctgcataatatccacggggttcctgccatggctcagcttacgctgtcatccctgtaagtgttakaaccaatgattcaagtatcaactgtggcagcagcttagttaccttaggtgcaaaaaagagaaatatttttttttgttcatatatataaattgtcgatttt

SEQ ID NO: 199365 - DNA, 201 bp, Homo sapiens
cttaagtttttgagatttgtagacaaattctagcactgctcttgactgtgtgactttggtctggtcaattcttcacttttttcttttttttttttttttgkggggggcagagtgtagctctgttgcccaggccagagtgcagtggcacgatcttggctcactgcaacctccgcctcctgggttcaggcgattctcctgcct

SEQ ID NO: 199366 - DNA, 201 bp, Homo sapiens
gacttaagtttttgagatttgtagacaaattctagcactgctcttgactgtgtgactttggtctggtcaattcttcacttttttcttttttttttttttttggggggggcagagtgtagctctgttgcccaggccagagtgcagtggcacgatcttggctcactgcaacctccgcctcctgggttcaggcgattctcctgc

SEQ ID NO: 199367 - DNA, 201 bp, Homo sapiens; identical to SEQ ID NO: 34909

SEQ ID NO: 199368 - DNA, 201 bp, Homo sapiens
gctagactacgcttgctgtcatcagtcactgcagagctgccggaggacaagccaaggccagtgttcggttaggacacaggctggcctcaagggatgcaggraaggagtgctggccgattgtatattaaatagtgtctgtgcataggcatgcctttgatgttttgtttatgtcctttctgggctgagtctgctgaggtgctg

SEQ ID NO: 199369 - DNA, 201 bp, Homo sapiens
caagcaattctcctgcctcagcctccaagtagctgggattacaggcatgcgccaccgtgcctggctaatttttgtatttttagctgagacgaggtttcacsatgttggtcagactggtcttgaactcctgatctcaggtgatccacccaccttggcctcccgaagtgccatgtgtcattctgtagaactggttcctgatag

SEQ ID NO: 199370 - DNA, 201 bp, Homo sapiens
aaaattctggtccgtttaattttcattagttcttatttgtgtttcaagaaatctagtgttccatattggttgatttcaatattcagtcagaacaacaggtrttgattcatgaagctttgaagtacatttctcatctttgtgcttccccctgcttcaattctccagagctacttagattacaaaagtctgtcttaaatttca

SEQ ID NO: 199371 - DNA, 201 bp, Homo sapiens
atttttctgttttgcttacagagcagaacatcatgaagtcttgacagaatataaagaaggagttggaaagtttataggtaaaaattaagttacttatatgtgccttgtgatgtgttaatttggagtttggaggtgctgttacctctttgatctttcattcatatgtttgtttattcataaatttaataagtattatttgaa

SEQ ID NO: 199372 - DNA, 201 bp, Homo sapiens
gccctctagtatctagggcaacatatttgtcatgtggaatatgtccaatgcatttagctggtaaatttagaataaatcgcaagaacaatcgcctggggccytcaaaaaggccacatacatctacagaatattatttaggaaagtataacttaagggtgaaaacagctggtgaaactgctctgtagctgaaagctgagaagc

SEQ ID NO: 199373 - DNA, 201 bp, Homo sapiens
cagtctgtgccctctagtatctagggcaacatatttgtcatgtggaatatgtccaatgcatttagctggtaaatttagaataaatcgcaagaacaatcgcytggggccctcaaaaaggccacatacatctacagaatattatttaggaaagtataacttaagggtgaaaacagctggtgaaactgctctgtagctgaaagc

SEQ ID NO: 199374 - DNA, 201 bp, Homo sapiens; identical to SEQ ID NO: 34907

SEQ ID NO: 199375 - DNA, 201 bp, Homo sapiens; identical to SEQ ID NO: 34906

SEQ ID NO: 199376 - DNA, 201 bp, Homo sapiens
gtactttctggaatgtcactgtgacttctttcttaggtaccaggaggactttaacccgctggtgagaggatgttcctgttactgctgtaagaatcacactygggcatacatccaccatctgctggtgaccaatgagctgctggccggagtcctgcttatgatgcacaactttgaacactactttgggtttttccattacat

SEQ ID NO: 199377 - DNA, 201 bp, Homo sapiens
agaaaagctgacagaaagattaaaccaaatccattgtttggcgtcttgtattcctttagagcataataaggagttcaagataaaacaacaaagttttaaaytgtagggtgcctaagccatctttgttagatacaggctgtaaatcttacgtaagatatttatctctataaagaacaaattaagatacagattgaattgaat

SEQ ID NO: 199378 - DNA, 201 bp, Homo sapiens
ttatgatttcataaaatattaatagttgggtattatttaggccttctcaaattcgatttcaaaaaaactctttattttcttcagatgaatttgtagacttygtcttgtcagaagactggagccaggtaatgattgctttagaaaagctgacagaaagattaaaccaaatccattgtttggcgtcttgtattcctttagagc

SEQ ID NO: 199379 - DNA, 201 bp, Homo sapiens
taagttcctaaagttatctctagctaagagacttggaggtagtctaaagcaggcctggatagtcatttcacaaattaaaactcttattttgtccttttccycttgaacctgtttagtgtacattttatttatttacttatttttcttgaaacatggtctcactctcttaccctggatggaatgcagtggcacagtttcagc

SEQ ID NO: 199380 - DNA, 201 bp, Homo sapiens
tatttttctgttttgcttacagagcagaacatcatgaagtcttgacagaatataaagaaggagttggaaagtttataggtaaaaattaagttacttatatgtgccttgtgatgtgttaatttggagtttggaggtgctgttacctctttgatctttcattcatatgtttgtttattcataaatttaataagtattatttga

SEQ ID NO: 199381 - DNA, 201 bp, Homo sapiens
gtgcagtggcgcaatctccactcagcgcagcctcctcctcctcggctcaagcgattctcccacctcagcctcccgagtaactgggactacaggtgcatgcygccacacccggctgatttttgtatttttagtagagatggggtttcacagtgttggccaggctggtcttgaactcctgacctcaagtgatccacctgcctc

SEQ ID NO: 199382 - DNA, 201 bp, Homo sapiens
gtatttttctgttttgcttacagagcagaacatcatgaagtcttgacagaatataaagaaggagttggaaagtttataggtaaaaattaagttacttatatgtgccttgtgatgtgttaatttggagtttggaggtgctgttacctctttgatctttcattcatatgtttgtttattcataaatttaataagtattatttg

SEQ ID NO: 199383 - DNA, 201 bp, Homo sapiens
tgtatttttctgttttgcttacagagcagaacatcatgaagtcttgacagaatataaagaaggagttggaaagtttataggtaaaaattaagttacttatatgtgccttgtgatgtgttaatttggagtttggaggtgctgttacctctttgatctttcattcatatgtttgtttattcataaatttaataagtattattt

SEQ ID NO: 199384 - DNA, 201 bp, Homo sapiens
atgtatttttctgttttgcttacagagcagaacatcatgaagtcttgacagaatataaagaaggagttggaaagtttataggtaaaaattaagttacttatatgtgccttgtgatgtgttaatttggagtttggaggtgctgttacctctttgatctttcattcatatgtttgtttattcataaatttaataagtattatt

SEQ ID NO: 199385 - DNA, 201 bp, Homo sapiens
gtcttttcccattcccccgttcctgatatctatgaaaatatttagactggaagcagtaataagcatgctatcattcattttcctgaagattttttttttttgcaaaatgcttggcctctaggtgttgtgaagctccttctatacttaatgctcttttcttgacaggacctagaagaatcccttaggatgaagctgagtctt

SEQ ID NO: 199386 - DNA, 201 bp, Homo sapiens
attctagaatcctatacttcatttttcaaacgtattagttttacccaatgaaggttcttcgtgcctttatatgaatttaatttaaaaaacactgttcatgkgtgtacatttaaactctttacatactttacacagctcagatgagagagtatttttggagtaagatagaatttttggaggagccagcaagttcttgtctct

SEQ ID NO: 199387 - DNA, 201 bp, Homo sapiens
gaaaagaagtgtaattataaaaaacatttaccataacctgaacaatgaatgaagaaaggaagacttggttcttctagctctggacaaaattccatttttttaaaaaaaatattgatttccagctgaagtatagtacatctctgatgttttcctcagattttaaaatatttgcattcatccccacaaaacagaatcactgac

SEQ ID NO: 199388 - DNA, 201 bp, Homo sapiens
acataaaaaagagcagcagccagccagccctgatttagtacatctccacatctgttttcatggagtggcaaaacctggccgagtgccattaatagtctcaraatgccttacctattacaagttgagtatcctttatccaaaatgctagggaccagaagtgcttgagattttggattttttcagatcctggaatatttgcag

SEQ ID NO: 199389 - DNA, 201 bp, Homo sapiens
ctggttgcaaccaagaaataacatcatttgaaattaatctgaaggaaaaaaagtaagaaatttttaaaagtttggattttgctttctgacttctgaatttyagtctgtgttaaaagtttatgggacaattctcaatttatgatttcataaaatattaatagttgggtattatttaggccttctcaaattcgatttcaaaaa

SEQ ID NO: 199390 - DNA, 201 bp, Homo sapiens
ataaagtgaaaaaactgcagaggttttacacttgcttttttttcactggaatcctgttttattttccttaacgaaaatgtgggctagcatatgatatttargcacatggtttactaaactttttttgcattttttaaaaaatgattgtctttttgactgaagaacttaagaaactgtcatcgtgaatcaatgaaacttact

SEQ ID NO: 199391 - DNA, 201 bp, Homo sapiens
caggaagtcagcctatggtgtatccctcagatgctcagatcccactgtctgggatgatcccttataccttttccttatttcgataattatagtgggatggratggtttataagacttagagtagggctgcctaaggatgaggttaagatgaagaacactgtatcctcagcattttcattgttgcaaaaaaatttgagggta

SEQ ID NO: 199392 - DNA, 201 bp, Homo sapiens
tttaccatgatgtaacttatttgggtgaggagaagagggctccagttgtacagagtatttacagaatgacacattattatgttatgtatttttctgttttrcttacagagcagaacatcatgaagtcttgacagaatataaagaaggagttggaaagtttataggtaaaaattaagttacttatatgtgccttgtgatgtg

SEQ ID NO: 199393 - DNA, 201 bp, Homo sapiens
atactactttatggaaacagaactaaagttagatcattttgtgtaatgtatatactgactttatacttaattgaaaagcctactatatgaccaattaacakaatagtctgcagcgttgtgttaacaacagagattttaaaggggcaagagaaggaagaaaattcaagtattctgaaggagttgatctttgccagtttcatg

SEQ ID NO: 199394 - DNA, 201 bp, Homo sapiens
cttagggaagatgtcttattctctttatgtcttttcccattcccccgttcctgatatctatgaaaatatttagactggaagcagtaataagcatgctatcrttcattttcctgaagattttttttttttgcaaaatgcttggcctctaggtgttgtgaagctccttctatacttaatgctcttttcttgacaggacctaga

SEQ ID NO: 199395 - DNA, 201 bp, Homo sapiens; identical to SEQ ID NO: 34905

SEQ ID NO: 199396 - DNA, 201 bp, Homo sapiens
gggatccatttgcagcatcctatagcttctctaaaattctgcccctagggacccatgatattattgagatttattattagtgagatcactttgtgggcatrtcattttatctttgcggtagctagttccccttggatggtacctggaataagcatatttgatagtaaattctttaagtaaagtcaaatgagatcaacatgt

SEQ ID NO: 199397 - DNA, 201 bp, Homo sapiens
aggatgaagcgtttgtatatggctgtattctgatatgttaatattatcctttattccagaaataggattttatatgcagatgtatgcatctatttatttakaggaaaagcttagcagtgacagctagaacatcagttcttctatacaccgctttctcctaacgctttttctggtatctaggactcacttgaatgaaaatcc

SEQ ID NO: 199398 - DNA, 201 bp, Homo sapiens
cattctgccaggaaatgtaaactaaagttgatttgaaattggtgaaaatgaagttagggaagctatgccctcggactgttgcagcgatcctaggaccagcwctgtaactggtctgtctgaaaggcggttgaataaattgtgctcatacaaactatgcagtaccacgaagtagtttttttcaaaagggtaagttagctttat

SEQ ID NO: 199399 - DNA, 201 bp, Homo sapiens
acaataaccaaaaattgcaaagaaaccaaatgtgtattgcctgataaataacttgtgaactgataaattaattgtggtatgaccatacaatgggatgctayttagcaacaaaaaggaatgaactcctggtacaagcaacaacttgagcatttttttaaaaagtattatgttaattgacagaagtcagaaataagatatata

SEQ ID NO: 199400 - DNA, 201 bp, Homo sapiens
taaggttgtgccttggattattttctggccagaacacagaacaaagcattccagagaaaccttggtttgtttatctactttcttcaatgcgctcatttttkcagccccgtcagtatggttatcaggaagagaaattggttataagaagactattttctgcatctactttctcttcaatatgttttgttttcaacagcgtta

SEQ ID NO: 199401 - DNA, 201 bp, Homo sapiens
tctctgcatcccctgagtacacttggttcttggtcttgaagatggtccaactgagtagtggctacaccctgtccaagctgtggctctctaaactgactcamaaactgcctctcttgcttctgcttactccctgtctgtgatgtgccctgggggcagacaagtttcattatcattatattggtttttcttcatttcttgact

SEQ ID NO: 199402 - DNA, 201 bp, Homo sapiens
acaaaacaattttgaagcaatcacaggtttctctacccataattgtctaaatctgataatttagagccacaggaaacccttgcaggaaaatatcatgggtrcaacattttgaaagtcatctcaagtgttaataagtctgttcgtcttatattacgtagagtcagtagcaaagggcaaaacagtatttatctctttggggac

SEQ ID NO: 199403 - DNA, 201 bp, Homo sapiens
gatattcatgtatagaacagtaatttttaacacatcttaaactgaaccaggcattataatagtttatctccaggctgattttgtttgtttttaaactgatktctaggggcttcttccattaaagtgaacaactcaaaattttggtctccagatttgtattgtaccatgattcggtctaccagggtttgatatgaaggagtc

SEQ ID NO: 199404 - DNA, 201 bp, Homo sapiens
catccgtttgtgaatgaagctgtccttatatttcatacacgtgttcaaaattcccaggctttgcttttgccataaggagcctgactcatcatgtttttgtrttttttaaaacaatacagcaacattctcttccttaagcctcacagtattctttcattggatagttgtcctctgggctaataccacagctatattttattt

SEQ ID NO: 199405 - DNA, 201 bp, Homo sapiens
taatctataaatgtttatgtgttctgaatggaccaccgaccagttttttccctgtttttcttcctccccttgggcttccgtattctctgagacacaacaawattgaaattagtccaattaataatcctccaatagcctctaagtattcaagtgaaaggatgagttgtatatctctcactttaaatcaaacgctagtaatga

SEQ ID NO: 199406 - DNA, 201 bp, Homo sapiens
gttgcacttgaatgtttaatgcagttttatttacaataaccaaaaattgcaaagaaaccaaatgtgtattgcctgataaataacttgtgaactgataaatwaattgtggtatgaccatacaatgggatgctatttagcaacaaaaaggaatgaactcctggtacaagcaacaacttgagcatttttttaaaaagtattatg

SEQ ID NO: 199407 - DNA, 201 bp, Homo sapiens
atctttatgttttatttcagcatttgcaagtgaggaagcagcacaaccctgggttttagataatttctaacagagaggccccagcaattcagcaggcagcrtcctgagtctttggcagcctggtccctctttcgcaaattctccacctttgcgaacagagggtctttaggacacagattcttaaaagtgcaggtaagcaaa

SEQ ID NO: 199408 - DNA, 201 bp, Homo sapiens
aagaagtgactgaattgttacaaactcataataaaactttaatgaatgaggattgcttcttatgcaggagcaaagaaagtgattccttgagatgaaatcarctcctagtgagaatgctctgaactttgttgaaatgacaacaaagggttaggaatagtagataaatttagttgataaaacagtggcagggttcgagaggat

SEQ ID NO: 199409 - DNA, 201 bp, Homo sapiens
gcattcactggccttggcataactgcttggtagccatcagaaccaagtaaaatcctcttcatgaaggaccttcaagcctgtgactaggctgtcttgtttcyttccttgatttaagcttccccaggtgtaactaaatccctgtttcccccagtatgacagtgcttgaggtttctttaccaacttatccagactaaataatct

SEQ ID NO: 199410 - DNA, 201 bp, Homo sapiens
gctaggaatataatgtaaagccctacaatgaaaaagaagactgcaaattgtggccttaggggactttccctgccccgttcagagacacatgatttttttttaacagaaatccctggaaaaattactttagagccatgttttcttgcattctgcattttcattaatggtagtatactgaaatcacaaattcattcattcttt

SEQ ID NO: 199411 - DNA, 201 bp, Homo sapiens
aagaatgaaccagatctttaggcaccatatggatagacctaaaaattaaaaatatagagtgataaacacaaatttcagaatattatgtatttgctattcaratgttaacactgaaaacaatatcatatactctataatgtttatgaatatgtatgtgtgggtatgtgtttttgtgtgtatatataaaaaggggactgacta

SEQ ID NO: 199412 - DNA, 201 bp, Homo sapiens
tatagtttgatacattcatataatcacatcaggataattaggatatttgagtcttcacatatttgttaactagatttcagtttacacttgataataaaccktgttacaatgtctttgaggtaacatttgccgttcatgtaagtagatcattgtttatagtcacatcatttataagtctaaccacttcaagactaaagacca

SEQ ID NO: 199413 - DNA, 201 bp, Homo sapiens
caagggagcagaaagtgtttttttcagtggactttgggtgatattccatgtggtcatccatgagatgggacttccctaatggtcaaccaacattcactgartgtccaccatgtaacaagagatgttcttgtgggtggggttgggagcgtgccgtgttggacacagcaaagcccctgctcttacagagcttatgttttatgg

SEQ ID NO: 199414 - DNA, 201 bp, Homo sapiens
catataaatgtagtaaaaaaaaaaaaaaaaaatagaaaacctctactataaaaaccaatgaactaaaaagaagtataaagcagaaaaaccatttgaatcasgctcagctcttcatctggaaagtaaagtttatataaaagtagtaaaaactagatattttataaaaattattggtagttcaaggatagcacagtggcaata

SEQ ID NO: 199415 - DNA, 201 bp, Homo sapiens
gctgttattttggcttaaaagaaaacctataaaaagcgacgcccagaaaccaaaaacaaacccaaagcaccttcttttaggatttttcagtagcgagggtkggcggggacagtggggaggagcaggagggggagaagaggttgctgttgaaaggtaatgtttaaaaacagtgtgtgggggtagggatgaaaataacgtggt

SEQ ID NO: 199416 - DNA, 201 bp, Homo sapiens
ttaagtgcaacaggaagctttttaagggttttaagcaagagaacaaagcagtctggttatgtcttaaatattctggctgtggcatggacaatggaatgtgrgggacaagggtggaaatgaagaggccaattaggttgctgtattcgggtataatatgatggtggcttgggacaggattgttgtaggagaggaagagatatg

SEQ ID NO: 199417 - DNA, 201 bp, Homo sapiens
tggtagagcagtccaggcagaaaggatgtttgctgcagggcctcaggaggagatgatcctgagtttgagaggagtagcaaagaaacccagtgaagctggaragtagcaggcagggggagagtggtggaattggaagctgaagcggtgagcaaagatcaggctgcataggactttgtaagctaggattagaaacttggattt

SEQ ID NO: 199418 - DNA, 201 bp, Homo sapiens
tgttaaatttgtcttttacatttaattacataagacaatggaaacttttccttttttcctttgaagcaaaagagaaaaccaaacatgttttataggttttwaaaatatattctataaaggctttttttgcatttacattttagagaggattgtgtcaaggtttttgtctgtctgcaaatgtgtaatgaataatattgtcaa

SEQ ID NO: 199419 - DNA, 201 bp, Homo sapiens
gtgtactggggtgacgtttttcattgggagcccagatttttttttttaatttaccttcttggggattgcgtacacttctgtagaagatacttttcttctcscctctgccccagaagagaaatgccctttgaattttgtattgtattttctagactgggttgttttataatgtgaataatgtcgtcagtaaatagttatcca

SEQ ID NO: 199420 - DNA, 201 bp, Homo sapiens
gcttcagagcacaggataaaaggctgatgtttgtccaactctgaaacctctgagaactgtgatgggaatggcagatactgcacttggtctacatatcttgwatgttttactatccacagaatgaataatggtcctgttttaggacatgaagaagaagttgggagaaggacaaccttccgacttttttatccagaatctgtt

SEQ ID NO: 199421 - DNA, 201 bp, Homo sapiens
ttccttcttctttgataaaatagaaaagccctcagtttaaaaagcagcccaacaattagactttggttagtaatagggaaccatgcagagcatactagacrtgggatgttccttactcattgaaagatcgtctttaaactgccttacaacttttttttttttaaattttatttatttatttattttttgagatggagtctt

SEQ ID NO: 199422 - DNA, 201 bp, Homo sapiens
atttagtcttcagttcccctggaggtaagactgaattatcattggctccacaattaattttcaaatacaaatgaacatttctgcctttgatcaaccaactrtttcatgaaaaggaatgatctccttggccattatgtgtgaaagattgatctattgctttgtggcttcagagcacaggataaaaggctgatgtttgtccaa

SEQ ID NO: 199423 - DNA, 201 bp, Homo sapiens
gaatgctttcaagtgtaaggaagggctgtgtattcagatatcagcatactgctccaagaaagacatcagagagttttgaactgattgaaagcccaaatctrttggatcagttgaggagcagagcaaaatatgaccaagcaataaacgagtaccttcaaagcttttaagaaattcttatagtttgtataggtggttgggagg

SEQ ID NO: 199424 - DNA, 201 bp, Homo sapiens
cagaggagtgcacaaagcatataagtatagttcaataaatttccttacagtgaatgcacccaggcaagctgcctccagatgaagaaataggacaatacagrccctccagaagggtaccatgtgttcccacccagtcactattactactcacatgtaaccactactctgacttttgccaccatagattaattctttcctgtt

SEQ ID NO: 199425 - DNA, 201 bp, Homo sapiens
acatagaatgcaaataatgattaatctacataaaatgtcaatgattgttgattgtggctcttgggctttgtaaagaatttactcttctattcacatatgtwcttttcctccatcactttgactttgacagattgctggtcaaaatgctctagataacaagaaataaaaatctgttcaaggcatgtttaattgggtaaaaca

SEQ ID NO: 199426 - DNA, 201 bp, Homo sapiens
tcaggtgaacagacaactcaagtgtctgaacccgcagggctgagctgccaactcctggctgtgtaactcctcccagataatgcccctccctgaggtcctakctgggcttccaagacccctatttcttggatagctccatcttctctaatgttttgtaaagtttttatggaaatatatcagacatacagaggagtgcacaaa

SEQ ID NO: 199427 - DNA, 201 bp, Homo sapiens; identical to SEQ ID NO: 34936

SEQ ID NO: 199428 - DNA, 201 bp, Homo sapiens; identical to SEQ ID NO: 34920

SEQ ID NO: 199429 - DNA, 201 bp, Homo sapiens
tttccagcttcataacttatcactgcatgactccgaacaaatagcctaacttctctgagccttactttccttatctataaatttgaaataatatccacatsacagtaattgtgataatgaaaaaaacacatacaaatatttgagcatagtttctgccaaatatcaaatatttaatcagtgttatctgccactattactatt

SEQ ID NO: 199430 - DNA, 201 bp, Homo sapiens; identical to SEQ ID NO: 34921

SEQ ID NO: 199431 - DNA, 201 bp, Homo sapiens
tgtcttcaatgggcatattccaaaagttctttcctttctgaatacattttcactgaagctcctactcaagctatatgttacctggaagaggttttcccagkgttacatccccaccctcacagttgaaatgaaacattctctcctgtctgtcccaactgtgatggataatagcacacatcacacatcacagtttccaattta

SEQ ID NO: 199432 - DNA, 201 bp, Homo sapiens
accagagatctgtttagtatgcattttaggtgatgcttattgagaaggtgaaggaagcatggaactcctatttggcacccactctgatttttggtgtgttytcatatgctattttatttaatcttcctgacaaaactcctgcaagaaaggaatttttagccccattttatagcttaaaaaaccaagattgccttaggttga

SEQ ID NO: 199433 - DNA, 201 bp, Homo sapiens
tttgaacctcgtaactcttcgggtctccagcggccacctcttttaggctagcccgaatgtttgactttccggtcctcaatcttcctcacctagctgcagamcataaaactgtctttttatttacagggagatgttaaatatttgggaacatctgctcaggctgccaggttattttccgtttgaaagcatgccgatttgaca

SEQ ID NO: 199434 - DNA, 201 bp, Homo sapiens; identical to SEQ ID NO: 34925

SEQ ID NO: 199435 - DNA, 201 bp, Homo sapiens
ggagggattgaaaatcatgctgactgcaggagtcctttagtctgaagttgccaagagtctgaagtgaagtaaatgtatagtcagagactctagataaagartgaatggcaaataaccctgtaggatccccacagagggagcacagtgacacatgttttgtaacatcacagatgttcagttagcattgctgagttgtgtgtt

SEQ ID NO: 199436 - DNA, 201 bp, Homo sapiens; identical to SEQ ID NO: 34930

SEQ ID NO: 199437 - DNA, 201 bp, Homo sapiens
cttctttagaacgcgtatcacaatgtgactgcagagcagctctttttgaaggacattatagaaaaaaacctcgtaatcaacttgactcaagattgactctrcagactcagaagatgatgctaacagtgttagttttatttttgtactgcaatttttagtttaaaatatgttggatgcactcgtcaaataattatgtatact

SEQ ID NO: 199438 - DNA, 201 bp, Homo sapiens; identical to SEQ ID NO: 34932

SEQ ID NO: 199439 - DNA, 201 bp, Homo sapiens; identical to SEQ ID NO: 34935

SEQ ID NO: 199440 - DNA, 201 bp, Homo sapiens
caagaccctcttgtcaaatatctatcacactggttttcaagatatatgtaagataaggaaagaggatgcttggtttttctttctaaaagtataatggtgcrgctgagattgtgatattgctatgtatgcatttggaatatttattttctagtcagatactgttacaatttatcattgaagtactagattagcctttcccta

SEQ ID NO: 199441 - DNA, 201 bp, Homo sapiens
gagcatctgctggacagccctccccgcccccaagtccttaccaacctgtgccactggtacttatttttcttgactgattaggtagacactgatttaggcakgactctttaatatttgagagcatagagcttccaattaaaatatgttaaaagtattttttaaattttaaaccttacaatcagatgaactgtactactcaaa

SEQ ID NO: 199442 - DNA, 201 bp, Homo sapiens
gggttggcggggacagtggggaggagcaggagggggagaagaggttgctgttgaaaggtaatgtttaaaaacagtgtgtgggggtagggatgaaaataacrtggtgactgctagtgtatcagaaatcacaccgagtctaaagtcgtaagtcccatttgccttacgaggaccagctgggtgctgtgagtaggtggatagtta

SEQ ID NO: 199443 - DNA, 201 bp, Homo sapiens
aacaaacagacccttctggaacctactgtgacatgagatgtgtccacaaggcgaggtttcaggcacacactgaaggagcatctgctggacagccctccccrcccccaagtccttaccaacctgtgccactggtacttatttttcttgactgattaggtagacactgatttaggcatgactctttaatatttgagagcatag

SEQ ID NO: 199444 - DNA, 201 bp, Homo sapiens
agccaccgccgagagggcacccggggatcctggagccccagtgaagggcgggagggacgcgcagcctcgcgggtaagcccaggagccgtgggggccgagakaatctgctctgggaccctcttttgtcgaatcgccggcgaggttgtgcaattgggaagccaagaggagtgtccagctcctcgttcactattgttttcttgt

SEQ ID NO: 199445 - DNA, 201 bp, Homo sapiens
agttatgttactttcttatttagaaacagagagcccaggaccatgaggcttccgcctgctggacagcaaggacttccagtagcttctcagctgttttcccrgtcactttcagaagcaaggctgctatagctaattgatgtatgcaagatgtaattacagccattgatagggaaaatatcagcaatatgatgcccttggaag

SEQ ID NO: 199446 - DNA, 201 bp, Homo sapiens
cattctacatatccctgaagaaaacatcatggtgtttgagaaccagaactgaaacaatgggaactggaaatgactgcaattccatttcagttgacagcttratactcattcacaaaaggctaattaaggcttcacaggattcacattaaatttattatggctataaatgttttcctggaatgtcacattgtagaataatag

SEQ ID NO: 199447 - DNA, 201 bp, Homo sapiens
ccagggatgggtcacatggctatgtctagatgaaacattggcagaggcaatgagctcactattataggcttaggaaagcagggatctgctagcaaggcacrtggggtaatgggtgttgggaatgtgagtggtatgatttgccatagattgttacactgaaggtagagtcatgtattttaatgtacatgatggtattgaagg

SEQ ID NO: 199448 - DNA, 201 bp, Homo sapiens
cccagggatgggtcacatggctatgtctagatgaaacattggcagaggcaatgagctcactattataggcttaggaaagcagggatctgctagcaaggcayatggggtaatgggtgttgggaatgtgagtggtatgatttgccatagattgttacactgaaggtagagtcatgtattttaatgtacatgatggtattgaag

SEQ ID NO: 199449 - DNA, 201 bp, Homo sapiens; identical to SEQ ID NO: 34927

SEQ ID NO: 199450 - DNA, 201 bp, Homo sapiens
gatgtagagaaaccaatgtagtccagggattttgcttcaaagaggagttgagaaatcagatggcagttagagatggttatgcaatcagggttttttttttktttgttttcttcttttgaaaagattggaggcactatagtacattggttaactggtggaaatgagaaagagattggggtggtaaaagagaggggaaggggg

SEQ ID NO: 199451 - DNA, 201 bp, Homo sapiens; identical to SEQ ID NO: 34928

SEQ ID NO: 199452 - DNA, 201 bp, Homo sapiens
tggctgttggaattgttgatgggtgacaaaatagtaagtaggcaaaattgttctgccttcagattacctttagtgctttttttccttaaaaaacagacagmcacactgttctattctctatattttttactttcagaacactaatggtttttggaagaaaccagccttaaacctgatttataaaccttatcaaatccgaat

SEQ ID NO: 199453 - DNA, 201 bp, Homo sapiens
agtctggttatgtcttaaatattctggctgtggcatggacaatggaatgtgggggacaagggtggaaatgaagaggccaattaggttgctgtattcgggtwtaatatgatggtggcttgggacaggattgttgtaggagaggaagagatatgtggactgactgaagatgtgttttagacatagagttatcgggatttgttg

SEQ ID NO: 199454 - DNA, 201 bp, Homo sapiens
  misc_feature (1)...(201): n = A,T,C or G
ctacttgtgcaacaagtggaatttggcactgggtttctgacagtatgcatggattcttggaatcagttttgtaaaagatggctcaatctctcacttgtccntctgtccaacagcataccctgtaaaaagtgtgtggtggttggtaatggaggagttttgaagaataagacattaggagaaaaaatcgactcctatgatgta

SEQ ID NO: 199455 - DNA, 201 bp, Homo sapiens
ggggctctggtggtatgctggtggcttgttggcctttgcccctgcatgttccatgtaggtggagtcaggtagcccagtgtcagactgggaactccaggccmggatggatgcaggagcccctgaggcacctgggctcagggcgaggcagccccttttcttgacagaggattggcctacagccttcattgaatggagaggatt

SEQ ID NO: 199456 - DNA, 201 bp, Homo sapiens
aaaatgcccttccacttatacaatataattagataattggtttatttgtggaagctttttcctgtgagcaagcagaggaaccatgtttatcacaaggatakcctggctggcccgtgtcctttgcaacttgaatactgaagctgtgaattgtacatgaaatacgatagtgccttaacttcctaaatgtttttcaggtggcgt

SEQ ID NO: 199457 - DNA, 201 bp, Homo sapiens
ctctcaatagtgtgatttgtagagtcccccggatcccaaggcaagggtctatggaacctgttcaggtcaggtgtttctgtggtgttcgctgccggtgtgcstcagcagatgtggcaggaggaggtaaatagccacgtgcccttggggtgagtttcggtttctccagctttcagggacttctaaaaagtgagcctggttgca

SEQ ID NO: 199458 - DNA, 201 bp, Homo sapiens
gctaaccaagcctaaagctagcagaagatgagaaataaccagtagtagacttgacttgaaggaaattgagacagaaaacaaacaaacaaaaaaaaaacccmaaaaaaacccatgcaaaatgccatataaacacagacctcttgtctttgagctgattctatgaaatcacctttcccataccattagattttagtcttaaga

SEQ ID NO: 199459 - DNA, 201 bp, Homo sapiens
agcagcaaaatctcttccaaaagcatctaatagacttccctaatatcttattgcccagggatgggtcacatggctatgtctagatgaaacattggcagagrcaatgagctcactattataggcttaggaaagcagggatctgctagcaaggcacatggggtaatgggtgttgggaatgtgagtggtatgatttgccataga

SEQ ID NO: 199460 - DNA, 201 bp, Homo sapiens
tgtgtctgtccatgaagggtttagggtatttccttcattttgaattctgctgattatagaagaaaattgattagtttttaaatatgaattcttcacataaytgatgatcattaataagtttttgtattaagctgttttcctctttcccagctaagtctggatcctgccatccaccacccctttcatttattttccttgttg

SEQ ID NO: 199461 - DNA, 201 bp, Homo sapiens
tcctttggaaagccagttctgaaaggcaggcaataatgtaatatgtactgttggattttttgttttgtttttgtgtttggtaatttcatcatcctggaaarcattttttaggagatcagaagtgagtttactaaaatggcgttttccttaaagttttaaaaatgactttacatttttctggggcagctgaaccattcttag

SEQ ID NO: 199462 - DNA, 201 bp, Homo sapiens
aaagtgatttggctccaaaatgacatttagataatcaagtctctgaaaacaacctaatttctactccaaggaatgtacaaatttgtgatgtatttgtttgrtagaatagagcatttaaaaagaatgaaccagatctttaggcaccatatggatagacctaaaaattaaaaatatagagtgataaacacaaatttcagaata

SEQ ID NO: 199463 - DNA, 201 bp, Homo sapiens
tgggtcctttggaaagccagttctgaaaggcaggcaataatgtaatatgtactgttggattttttgttttgtttttgtgtttggtaatttcatcatcctgkaaaacattttttaggagatcagaagtgagtttactaaaatggcgttttccttaaagttttaaaaatgactttacatttttctggggcagctgaaccattc

SEQ ID NO: 199464 - DNA, 201 bp, Homo sapiens
tactgttttttaactctttggggctacagatccctttacaatcaatcaactctctggaaaactgcaaatacataagactttttcgtatatgattccaagtktgctatggctgcctgtagcctttccaggggtgtgcgtccagtgaggaccactgcaaaactggaatagtgttttaaacttttttgaacatgactcaggaag

SEQ ID NO: 199465 - DNA, 201 bp, Homo sapiens
tccaagaaagacatcagagagttttgaactgattgaaagcccaaatctattggatcagttgaggagcagagcaaaatatgaccaagcaataaacgagtacyttcaaagcttttaagaaattcttatagtttgtataggtggttgggaggtgaaattccagggctaggaatataatgtaaagccctacaatgaaaaagaaga

SEQ ID NO: 199466 - DNA, 201 bp, Homo sapiens; identical to SEQ ID NO: 34922

SEQ ID NO: 199467 - DNA, 201 bp, Homo sapiens; identical to SEQ ID NO: 34923

SEQ ID NO: 199468 - DNA, 201 bp, Homo sapiens
gaagagctggtctatataaaggaatggttataaagacggatgaaggactcttaagatgtgaagaaaggaagtagaagacatgaaaaggggcaaggagaagraaaaagcaatgggatcaatgaggctgaatgactcctaggttacaatggtacataggataaagaaaattttatgctgaaggcagttaatgctttcggacaa

SEQ ID NO: 199469 - DNA, 201 bp, Homo sapiens
cttgccctattctgttgctggggtgtgggtacagggtgactgcagtgcttattcctcttataagagtttgtcaggtggtaatataggttctgtgggtgatrgctgcagaagagctggtctatataaaggaatggttataaagacggatgaaggactcttaagatgtgaagaaaggaagtagaagacatgaaaaggggcaag

SEQ ID NO: 199470 - DNA, 201 bp, Homo sapiens
gttaaccttatttcagagtacaacaattttgatgggtctttaaaccaacttaaatgtgattcttcttacctgtcagtcacacacatccatgtgctacatgmctgtgtggctttgagcaagtaattttctctccaggggtttgtcctccaagttctctttcaactctggtatcctgtggctctgtgttcccacttttttaaa

SEQ ID NO: 199471 - DNA, 201 bp, Homo sapiens
tcgggatttgttgccgtattagatgtgaagagtaatgagaataaagaaatcaaggatgcctcctactctgttttcagcttaggagattggctggagagtgktatcatttattaagttggggaagactggtataggagcaggtttagaggaaaaccatgatatgaacatgttagatttgagatgcttgttagatttgcagtg

SEQ ID NO: 199472 - DNA, 201 bp, Homo sapiens
atatgatggtggcttgggacaggattgttgtaggagaggaagagatatgtggactgactgaagatgtgttttagacatagagttatcgggatttgttgccrtattagatgtgaagagtaatgagaataaagaaatcaaggatgcctcctactctgttttcagcttaggagattggctggagagtggtatcatttattaagt

SEQ ID NO: 199473 - DNA, 201 bp, Homo sapiens
catttattaagttggggaagactggtataggagcaggtttagaggaaaaccatgatatgaacatgttagatttgagatgcttgttagatttgcagtgggtwtgtcgagtaggcagttggataaacaggttaaaatcttgatggtgtgtggcctataagctgtatttaaaccatggactgggtgagatttcccaaggagaga

SEQ ID NO: 199474 - DNA, 201 bp, Homo sapiens; identical to SEQ ID NO: 34949

SEQ ID NO: 199475 - DNA, 201 bp, Homo sapiens
agatgtgaagagtaatgagaataaagaaatcaaggatgcctcctactctgttttcagcttaggagattggctggagagtggtatcatttattaagttgggraagactggtataggagcaggtttagaggaaaaccatgatatgaacatgttagatttgagatgcttgttagatttgcagtgggtttgtcgagtaggcagtt

SEQ ID NO: 199476 - DNA, 201 bp, Homo sapiens
gtcaatcccattactgggtatatacccaaaagattataaatcattatactatatagacattatactatatagactttatactacatgcacatgtatgtttrttgcagcactgttcacaatagcaaagacttggaaccaacccaaatgcccatcaatgatagattgaataaagaaaatgtgacacatagacaccatggaata

SEQ ID NO: 199477 - DNA, 201 bp, Homo sapiens
acaatgatatgctcttcctatagaatgttactcattgaatcttgtatctttttaatacagctctagacttgtaagtcgcagttggttctttttctacttgygcaacaagtggaatttggcactgggtttctgacagtatgcatggattcttggaatcagttttgtaaaagatggctcaatctctcacttgtccatctgtcc

SEQ ID NO: 199478 - DNA, 201 bp, Homo sapiens
taaaagtccttgaactgctgggaccataagtaggagaggctgagtatgaggaattgccctgcagaagagatctgcctgaaaccctagacccctcttttttyttggcttatagggtatgtgggtggaggtccaggaccttgagtctgagtgatgaccagtgataatggcacatgtatatgacagatggtagctactcttacc

SEQ ID NO: 199479 - DNA, 201 bp, Homo sapiens
tgcttgaaccagggaggcggaggttgcagtgagccgagatccaccactgtactccagcttgggcgacagagcaagacttcgtctcaaaaaaaaaaaaaaaagataattgtgagtccttgcagcaattatctgcaaatatttgtaaagatgcttgactccatacatgcaagctactgtcaggattctggaggctatatgact

SEQ ID NO: 199480 - DNA, 201 bp, Homo sapiens
ccaccaacattccttctgaaagcatgccaagttttatgaagaatgctttagtcctgcagcacaggtggttatatagtaactagacataaatatcttacctractaaagcacctgtgtcaagtcagttgcctgctaaatggacaaggatttgtaaaagctgcctggttgctctctcaagcagcatccattatgtcagcatca

SEQ ID NO: 199481 - DNA, 201 bp, Homo sapiens
ccagaaaagaatataggaatagaagaggaaatcatgatagtacccatctttcacaaacagactagaatttcaagccattaggtatttcaagaacagtaccrtgcgttattgccagtcaggcttacagagccatctcgagttcattaatgtacctgcagcattggtaataaatactctgtgatttttaatttctctgaagtg

SEQ ID NO: 199482 - DNA, 201 bp, Homo sapiens
ctcagttgggatagattccactgtgaatgggaaaactcaaaatatcagttgtgattgtaagaaggaagttctccatttgtccagttttcatgtaaatgaaytctgcaggtaaacttgccagggctggttctgtgagcatcagggaccaaggctgcttctctatcttgacgccaccattcctaaatatacaacttgttcctt

SEQ ID NO: 199483 - DNA, 201 bp, Homo sapiens
aagacattaggagaaaaaatcgactcctatgatgtaataataaggtaaatatattttctatttgctaccctagaattgtttcaaaagaatatggtttcttrccttaatacagctgtgttttgacaggaaggggagatgtttccatttggttttttttttattgcacaaccttctctcttggttgttggctagagttagacc

SEQ ID NO: 199484 - DNA, 201 bp, Homo sapiens
cttcttgctgccttggtcttgctgtttcctgcccctttcctcctgtcaccagaatctccccactccccaccatcatgctaagttcatttcttagcattacstttcttgggagagaagtagagtgtagctggtgaggagggattgaaaatcatgctgactgcaggagtcctttagtctgaagttgccaagagtctgaagtga

SEQ ID NO: 199485 - DNA, 201 bp, Homo sapiens
gaggccactttctcagaaacagaaaagccagcagcaatttggagaagctcttctgggaaacctggagcttttatcttcagtgttataaagagaacatcttyccttataattaggcttgggtgtggatttcagctgtcatttatgggatagtgaccccagacttgtcatagctgatacaacttcacatatatggtactttta

SEQ ID NO: 199486 - DNA, 201 bp, Homo sapiens
ctcctgtcaccagaatctccccactccccaccatcatgctaagttcatttcttagcattacctttcttgggagagaagtagagtgtagctggtgaggaggsattgaaaatcatgctgactgcaggagtcctttagtctgaagttgccaagagtctgaagtgaagtaaatgtatagtcagagactctagataaagagtgaat

SEQ ID NO: 199487 - DNA, 201 bp, Homo sapiens
ctagagaggtctatttgtgtttgattataaaaaagcgaattgttctttagggttttatttttcccccttgttgctctcatgttattttccacccttattawtttgtggcttctccttccttgcctctaggttaaactttttgagtagaaattttcccttttattaacttttaatgaactacatagaatgcaaataatgatt

SEQ ID NO: 199488 - DNA, 201 bp, Homo sapiens
attgcccaaagagtatgttttggagaatacataggaattttgacttgtaaatactgacttctttccctagaccttcatatactgtcttagatgtaaatacrttaaaaaattttgctgatactggtaagttttatccttgttggatctttgcataaatgtcattctttttttttttttttgtgaaagggagtctcactctgt

SEQ ID NO: 199489 - DNA, 201 bp, Homo sapiens; identical to SEQ ID NO: 34941

SEQ ID NO: 199490 - DNA, 201 bp, Homo sapiens; identical to SEQ ID NO: 34943

SEQ ID NO: 199491 - DNA, 201 bp, Homo sapiens
tcacttgaggttaggagttcgagaccagcctggccaacatggcaaaaccccatctctattaaaaatacaaagaattagccaggcatggtggcacgtgcctrtagtcccagctacttgggaggctgaagcaggagaaattgcttgaacccgggtggtggaggttgcagtgagccaagattgcatcactacacttcagcctgg

SEQ ID NO: 199492 - DNA, 201 bp, Homo sapiens; identical to SEQ ID NO: 34945

SEQ ID NO: 199493 - DNA, 201 bp, Homo sapiens; identical to SEQ ID NO: 34947

SEQ ID NO: 199494 - DNA, 201 bp, Homo sapiens
ctgtttttcttcctccccttgggcttccgtattctctgagacacaacaatattgaaattagtccaattaataatcctccaatagcctctaagtattcaagkgaaaggatgagttgtatatctctcactttaaatcaaacgctagtaatgattaagcttagtgaggaaagcctgttgaaagccaatacagaccagaaactat

SEQ ID NO: 199495 - DNA, 201 bp, Homo sapiens
tataaaatatatatttttttctttctttttaaattttatttatttattttatttttttgagacggagtcttgctgtgttgcccaggctggagcgcagtgaygccatcttggctcactgcaacctccgcctcctgggttcatgccattctcctgcctcagcctcgcgagtagctgggactacaggcacccgccaccatgcct

SEQ ID NO: 199496 - DNA, 201 bp, Homo sapiens
gaatgagttcatgtcctttgcagggacatggatgaagctggaaactatcattctcagcaaactaacacaggaacagaaaaccaaacactgcatgttctcaytcataagtgggaggtgaacaatgagaacacgtggacacaggaaggggaacatcacacactggggcctgtcgcagggttgggggctaggggagggatagca

SEQ ID NO: 199497 - DNA, 201 bp, Homo sapiens
ctggtttaagtaacattcgaatgttcctgttcaccctaaattcttgccactcaaagcaggggcttcagactagcagcactggcattcttttttttttttttgcatgatttgggagcttgctggaaatgcagataaccaggccctgccctagacatgctgaatcagaatgagcaacttaacaggatgctcaggtgatgccaa

SEQ ID NO: 199498 - DNA, 201 bp, Homo sapiens
agccataaaaaagaatgagttcatgtcctttgcagggacatggatgaagctggaaactatcattctcagcaaactaacacaggaacagaaaaccaaacacygcatgttctcactcataagtgggaggtgaacaatgagaacacgtggacacaggaaggggaacatcacacactggggcctgtcgcagggttgggggctagg

SEQ ID NO: 199499 - DNA, 201 bp, Homo sapiens
atgtttattgcagcactgttcacaatagcaaagacttggaaccaacccaaatgcccatcaatgatagattgaataaagaaaatgtgacacatagacaccawggaatactatgcagccataaaaaagaatgagttcatgtcctttgcagggacatggatgaagctggaaactatcattctcagcaaactaacacaggaacag

SEQ ID NO: 199500 - DNA, 201 bp, Homo sapiens
cagctcaagcgatcctccagccttagcctctggagtagctaggaacacagatgtgagccactatgcctggctcatttttgtgtgtgtgtgtgtatttttcmtggagatggggtttcaccatgttgcccaggctgttctccaactcctgagctcagagcgatccatcaaccttggcctcgcaaagtgctaggattacaggcg

SEQ ID NO: 199501 - DNA, 201 bp, Homo sapiens
ctcatggatttgcctatagaagttgccaatctactgattcaaatatacagacttcttggcccttatatttttctttttctttctttcttttttttttttttctttttgagatggagttttgctcttgttgcccaggcaagagtgcagtggcgcaatcttggcttacagcaacctccgcctcctgggttaagcgattctcct

SEQ ID NO: 199502 - DNA, 201 bp, Homo sapiens
agcttccccaggtgtaactaaatccctgtttcccccagtatgacagtgcttgaggtttctttaccaacttatccagactaaataatcttttttttttttttgagatggagtctcgctctgttgcccaggctgaaattcagtgacatgatcttggctcactggagcctctgcctcccaggttcaaggaattctccctgcctc

SEQ ID NO: 199503 - DNA, 201 bp, Homo sapiens
atgtgtggactcacaaaactctgctaataaccacttaacctatttattaatcatctgcctcaaaatcagggctgaagacttttgaaataatgtagttagaagactctgtacagtgaccatactttgggaaaccctggtttaagtaacattcgaatgttcctgttcaccctaaattcttgccactcaaagcaggggcttcag

SEQ ID NO: 199504 - DNA, 201 bp, Homo sapiens
agttttgattttaaaagcttgcaaatatagtaggtatttggcaaaatcattctttatcctttccttccaggtttcatcagtttcacccttttctgtgtgcrgctgattttagaaagattgcttccttgtatggtagcgataagtttgatttgccctatgggatgagaacatcaggtcagtagtagtattcttacctggttc

SEQ ID NO: 199505 - DNA, 201 bp, Homo sapiens
agtgggctgtagggaaagcttttgcacaagaaccagcaaggaaagtaatttaaaaggctatcaaaagttaaaagtacatgcaactcgttacttaacattcragttctttattcggatttttttagatataaagtactccattggtgctgctaatactttgagattgggaaagaatgatggtaattgtatttttcttcttta

SEQ ID NO: 199506 - DNA, 201 bp, Homo sapiens
cataagaatcaaattggtggatgctgtttaaatgcacattcctgagccccagagattcagattaagtagaggctcaggagtgtgcatgttaacaagtcccygcctggtgcagactcttgagcctgccctagagtcacctcctttcaccaatatctgaatttacccttctagacttcaagataccaatggaacaccattagg

SEQ ID NO: 199507 - DNA, 201 bp, Homo sapiens
ttattcatttattgacttttttactcatgaaataagtaaatattattgtgcacccataatgtgacaggaattgtgctggaggggaacccgtgtaaaatgtkcttctttattaccaactttgctacttattagcaagatagcctttgacaagttttttttttttaaacttttcaaaatcctggctgcctcttctgtagtatg

SEQ ID NO: 199508 - DNA, 201 bp, Homo sapiens
ctcagtgtgatagagtggaaacttctgtgaacactaaggtctaagctatcagttcattgttgagcaatgttatataactgaccacgtctaagactgagctyagtcaatcccattactgggtatatacccaaaagattataaatcattatactatatagacattatactatatagactttatactacatgcacatgtatgtt

SEQ ID NO: 199509 - DNA, 201 bp, Homo sapiens
catctatcatatgccaagtactctgctattataaagggatccatgggcatatagtagagggattcagtgtgtgtgtgtgtgtgtgtgtgtgtgtgtgtgtgcatgcatgtatgtacatatgctttcaagtggagttagggagagaaaatctgtaggttgaatagagctatgaatttttcagaataaactaggcttaaggag

SEQ ID NO: 199510 - DNA, 201 bp, Homo sapiens
tatttcttcctgttttttaaaagtccttgaactgctgggaccataagtaggagaggctgagtatgaggaattgccctgcagaagagatctgcctgaaaccstagacccctcttttttcttggcttatagggtatgtgggtggaggtccaggaccttgagtctgagtgatgaccagtgataatggcacatgtatatgacaga

SEQ ID NO: 199511 - DNA, 201 bp, Homo sapiens
tgaaactcctaaaaatatggtgacgtagagctgcaaagaatctttggaatgggcgttctaaatgaggcaatgtctatgttatttcttcctgttttttaaaagtccttgaactgctgggaccataagtaggagaggctgagtatgaggaattgccctgcagaagagatctgcctgaaaccctagacccctcttttttcttgg

SEQ ID NO: 199512 - DNA, 201 bp, Homo sapiens
gcatctatcatatgccaagtactctgctattataaagggatccatgggcatatagtagagggattcagtgtgtgtgtgtgtgtgtgtgtgtgtgtgtgtgtgcatgcatgtatgtacatatgctttcaagtggagttagggagagaaaatctgtaggttgaatagagctatgaatttttcagaataaactaggcttaagga

SEQ ID NO: 199513 - DNA, 201 bp, Homo sapiens
aagtgttattgccaaagagtagtcctagggatgccctcaaaagagtttctatgtgattttcagaaaaatgcgtaaatctttgcaatatcctttaccaggargaaaagtggactttcattgataaggtttcctttcaaaagcattggcatgatttcctatagtaaaggcccttctctctttctgtttgtcccctataagctg

SEQ ID NO: 199514 - DNA, 201 bp, Homo sapiens
aagagctaaccaagcctaaagctagcagaagatgagaaataaccagtagtagacttgacttgaaggaaattgagacagaaaacaaacaaacaaaaaaaaamccccaaaaaaacccatgcaaaatgccatataaacacagacctcttgtctttgagctgattctatgaaatcacctttcccataccattagattttagtctt

SEQ ID NO: 199515 - DNA, 201 bp, Homo sapiens
tgtgaagttttacagtcacccaaaggacactgaaagtcattgttccacacataaaaaggcagaggaagccagaatcacaagccaaatggatgaagtcaagragagaatgaatcagtcctttcagagtatggggtacttgctagagagtgagggaagcaatgagtaacgaggagtgcgattcagacagcttatctgtaccat

SEQ ID NO: 199516 - DNA, 201 bp, Homo sapiens
ctcatttttctctgttggagaccaagatgcttgacgtgaagtgtgtatttgtgtaatgtgtattggttcatttcagttttttataacttcaaactatgccrtcaacctaatcaattttaattttgattgcatatcaatagcaaccataaattttttcaacccccaaatttatgtagctctgatttgtagaatattgttttt

SEQ ID NO: 199517 - DNA, 201 bp, Homo sapiens
ctcttgcccaagagaataggagtgctattttttgggtgcagagagtgagggtagtggatagaggtctgaaagtgtagacagagtttgccataagagcagcrttagattttgtccaggtttatctcatttttctctgttggagaccaagatgcttgacgtgaagtgtgtatttgtgtaatgtgtattggttcatttcagttt

SEQ ID NO: 199518 - DNA, 201 bp, Homo sapiens
ggtagtctacagatgtaaggcctccattaaaaaggaaaatggcagaacttaccctcttgcccaagagaataggagtgctattttttgggtgcagagagtgrgggtagtggatagaggtctgaaagtgtagacagagtttgccataagagcagcgttagattttgtccaggtttatctcatttttctctgttggagaccaag

SEQ ID NO: 199519 - DNA, 201 bp, Homo sapiens
cagaatcttgatgatgatcaacactggtcccaaatcaggacatttttaacctacattcatttttttctaagttgttcctacttaagaattagttcaccccytgctaatcagctcatggcttccctttataggctgtttcccatacttttccatgcatcctccaaactactgatgagattctttctgtctcacttgttaagg

SEQ ID NO: 199520 - DNA, 201 bp, Homo sapiens
ttaattatcactcatggatttgcctatagaagttgccaatctactgattcaaatatacagacttcttggcccttatatttttctttttctttctttctttyttttttttttctttttgagatggagttttgctcttgttgcccaggcaagagtgcagtggcgcaatcttggcttacagcaacctccgcctcctgggttaag

SEQ ID NO: 199521 - DNA, 201 bp, Homo sapiens
aactttttattggcacctgtcatacagtgtttattcttctgtccttattctctagcctagggtgagaaaaattccagtctttatccttaccttgttaaacwttgctagagtcaccatggtatttgcttcaacacctaggacacaatatctgaatccttctcaacattataatggatccaaatgagaatgaaacctatttca

SEQ ID NO: 199522 - DNA, 201 bp, Homo sapiens
gccggtgtgcgtcagcagatgtggcaggaggaggtaaatagccacgtgcccttggggtgagtttcggtttctccagctttcagggacttctaaaaagtgarcctggttgcagcttctacaatgcagtaatcctggcccttctctgaaggtcctttgaatcattgctcttggaatcacttctgggttgctcatcacctcagc

SEQ ID NO: 199523 - DNA, 201 bp, Homo sapiens
tttttctcttactagttttgcagcctgggggcctataagactgctaatgtaacccatgacccttcagcatatcccacagttgagctatgagagtcttaaawattatttttattctcagttgaatgggccttctttgggactcttcttaaccaatacataagtgaggagtaagaaaactcttaaaattagaacattatatgc

SEQ ID NO: 199524 - DNA, 201 bp, Homo sapiens
ctttctagaatagggattgaaatcaaacttgcttgtaaaagcatctagagttatgttactttcttatttagaaacagagagcccaggaccatgaggcttcygcctgctggacagcaaggacttccagtagcttctcagctgttttcccagtcactttcagaagcaaggctgctatagctaattgatgtatgcaagatgtaa

SEQ ID NO: 199525 - DNA, 201 bp, Homo sapiens
catgagactaaggcaagcatcactcatcagaaatactcaaacattttataaacacaagaatggggcaagacaccaaagggcctcaagtggaacacgcaagratgagaccaggccatatactgtgaagcattaaagctctaaagagtgtcacaaagtgaaaaagcaatccccctgctcattacaagtcagaaaatcccagct

SEQ ID NO: 199526 - DNA, 201 bp, Homo sapiens
agatataaagtactccattggtgctgctaatactttgagattgggaaagaatgatggtaattgtatttttcttctttagaacgcgtatcacaatgtgactrcagagcagctctttttgaaggacattatagaaaaaaacctcgtaatcaacttgactcaagattgactctacagactcagaagatgatgctaacagtgtta

SEQ ID NO: 199527 - DNA, 201 bp, Homo sapiens
tttcaacagcgttattatagattcacataaactggaaatctttttctgttttatttcctttttcagagattcatagtgttttaaatatctaggtatcttcrgatgacttgagctaccaaaggtttatgttacatgacttaaactaccaaaaacatgtttatgttttagaaaaaaattctatttaaaaatgaaacgacaatt

SEQ ID NO: 199528 - DNA, 201 bp, Homo sapiens; identical to SEQ ID NO: 34929

SEQ ID NO: 199529 - DNA, 201 bp, Homo sapiens
tttctccctctgcctggtaccagaaggctgcaacatagttacctgcagagtcagcctgcagcactgtggtgacttctcttggactcaggtgattaacttcrctgctgctatagcgaactggggtttcctcatggtccactgcttttgcaggaagaaactgcttcattcctttccaccaaccttcattgtgacggcaagcca

SEQ ID NO: 199530 - DNA, 201 bp, Homo sapiens
ttatgtgtatgttatgttttattgtctgtgtttaaatgtgtgactacatgggcttgcctttagtacatccatactctctcggctcagacagtccttacacyctgagatttcatggcatgtgatagatgggtataattatctgtgatggatggttggatggatagatggatgagataggttggttggatagatggatggatg

SEQ ID NO: 199531 - DNA, 201 bp, Homo sapiens
agcattaagttctagatttttgagggatcataaaagcccaaggtgacaagccttcaacattgtgagtcatattttgcttattcaactgatcctgtgagggygggggttgtatttttttgttttattttttattttaaaactattttgcagagaatttgagaatttaattgggttaaacttactatttctattctaacatca

SEQ ID NO: 199532 - DNA, 201 bp, Homo sapiens
  misc_feature (1)...(201): n = A,T,C or G
attaaaaaaaattatacatttttgtatagccagtataatgatatggattatatgctgtagttacttttagttttgattttaaaagcttgcaaatatagtangtatttggcaaaatcattctttatcctttccttccaggtttcatcagtttcacccttttctgtgtgcggctgattttagaaagattgcttccttgtatgg

SEQ ID NO: 199533 - DNA, 201 bp, Homo sapiens
cttctgggaaacctggagcttttatcttcagtgttataaagagaacatctttccttataattaggcttgggtgtggatttcagctgtcatttatgggatartgaccccagacttgtcatagctgatacaacttcacatatatggtacttttaaatttagaaatagcttagcatcagcacttttataatattactttgtttt

SEQ ID NO: 199534 - DNA, 201 bp, Homo sapiens
gaaaaacctgtggcatacaaaatattctaaatgtgcttgtaatcattttccacacttgtttatttttttaatgcaaatcttagcagtataaagtggacacsccatatttaaggaagagcttgaatatcctgtctctttttgtgcttttagtcagagctctgcatatattttaagaaaaggcattgaggaactcaatcaaac

SEQ ID NO: 199535 - DNA, 201 bp, Homo sapiens
aagaggtgcagggagtatttttgtttgctgccacagaacctctcagtggtggcatgaatgagttcccagggcatttgcttccctttgggcagggtgcccgrttctggtttctgactgacattatttttgtctcatagggtggcacctgtggaaatgaaacggagaaataagatccagccttgtttatcaaagccagctttt

SEQ ID NO: 199536 - DNA, 201 bp, Homo sapiens
atctttctgcacgtttagtgagtatttccaaaattacatgcccacatcatttttttctatagttccttttgtatattttttccaataatgcttatatttgrgccattgtgaaaatccatttgtataacaacctggcctttgctttggacttcattccttgtgtttcaggtgagccagccatgagagggtatcttgtggcca

SEQ ID NO: 199537 - DNA, 201 bp, Homo sapiens
atttgctttctcctgacatagttttcatttctaactaatttagaatagtggcatgtgggggtggtgactgcattaatagcagcaagaaccaacagctgacrgcaagggaggagtgaaaagcaactcaaccagataatcatgccagtttaggactgcttagcaaatagccccacacacccattagctgcagagggtttcaac

SEQ ID NO: 199538 - DNA, 201 bp, Homo sapiens
cctgtttaatgtcaagatcttgaaaactcttttttttggtaatcaaagctatattaaagggccttatgtctttttaaaagcagataacctcttaaattctstttttttctttgaatgtttttgctcaaagcaaaatgcccttccacttatacaatataattagataattggtttatttgtggaagctttttcctgtgagca

SEQ ID NO: 199539 - DNA, 201 bp, Homo sapiens; identical to SEQ ID NO: 35028

SEQ ID NO: 199540 - DNA, 201 bp, Homo sapiens
tacaatgatgagaagtttctaaggctgatgtatttgtttaatgagaacttccacctactcagcactccctggctccaggtgaagccactttcctctttcaycagtcatcaactgtagagtttacgttagaaaaagaaggaaaatttgggttatatgtgatagacaggactgcaaaagccaaacaacatagcttcgaggggt

SEQ ID NO: 199541 - DNA, 201 bp, Homo sapiens
ccttcaactcgaaatatactatcctatatagcataatattcaaaacaacattcttcactgggggtttccagatgaaagcccacattttgttaacatgactsactgagacagtctttgtttctcctagggcacagtcgtagtgccaactctggactctgttttgtatgacaaccaagaatttcctgatccagaaaagtttaa

SEQ ID NO: 199542 - DNA, 201 bp, Homo sapiens
cactcccaccctgtgggatactgcatctccaggagtgctcacattggcctggtgaccagagaggtggaggaaatctggaaaagagcctcagcagatagtgyctgggactgtagtgaattctaatgccaggaacaaactatcacaaccagccctggggttaatcctgtgagaagattagggctttcatcttcatttagacct

SEQ ID NO: 199543 - DNA, 201 bp, Homo sapiens; identical to SEQ ID NO: 35026

SEQ ID NO: 199544 - DNA, 201 bp, Homo sapiens; identical to SEQ ID NO: 35029

SEQ ID NO: 199545 - DNA, 201 bp, Homo sapiens
gtatgaaggctggtccccgaattagtcagtgttgctggtatccttccactcaagtacattttgtgcttcttttaataggcagagaagggtgagtcctgccytgtgatggccgtttgcccacagcctcctcctccccgcttcccctagtctcactgttaacagtgtcgtgtctctgaaactccctcagtgtctcatcaatac

SEQ ID NO: 199546 - DNA, 201 bp, Homo sapiens
tggataattgagattgtatgaaggctggtccccgaattagtcagtgttgctggtatccttccactcaagtacattttgtgcttcttttaataggcagagargggtgagtcctgccttgtgatggccgtttgcccacagcctcctcctccccgcttcccctagtctcactgttaacagtgtcgtgtctctgaaactccctca

SEQ ID NO: 199547 - DNA, 201 bp, Homo sapiens
agcccacactgatttcccaggactgtctgagcatcttctccaccagtttggcccctcgtggcagcagacactagccctgtagcaggaggggttagcaggarccgtttagctcctgcctgagctatgaccaaggtcagggggatctcacctctcccaggatggccctcatgctgtggagggagacagagccctggcctgccc

SEQ ID NO: 199548 - DNA, 201 bp, Homo sapiens
tcctatggcttgtggctcaagaacaaatgtggagcccacactgatttcccaggactgtctgagcatcttctccaccagtttggcccctcgtggcagcagamactagccctgtagcaggaggggttagcaggagccgtttagctcctgcctgagctatgaccaaggtcagggggatctcacctctcccaggatggccctcat

SEQ ID NO: 199549 - DNA, 201 bp, Homo sapiens
tagctctctccaggccctgctgctcaaccctttctagtctgcagactttgagaattgcattttgtctgaggagaagccctcagccttccttgtgggcatgyactccccaactgtgcgcagctgcaggacttccaggcctccccagcttcatccacctgcaggtgctcaggatcctgatcccctgcccccttcccaccttgg

SEQ ID NO: 199550 - DNA, 201 bp, Homo sapiens
tgcgtatctgctgcctagcagggcccagtcctcttgcagaccagcggtgtggggagccctggctgggactcctagactgcatctgaaccacagggacctayggacaaggagagggtctcgtgagtccccagatactgcattttacaactctaggttccagctacacagttcagggagcaagggtggccattaaacacgtga

SEQ ID NO: 199551 - DNA, 201 bp, Homo sapiens
atttgttgattccaaatgtgttcatactctcgggaggatccatcaagcaactcttgggaggagagacagggcagggccaggccttgacagctcagaagggygcagtagggacagttcttggttttcccagctctgatgctttgcacagtcacttgtgtgacctgcaagattttagtgaagaaacttgctgtggagtcggaa

SEQ ID NO: 199552 - DNA, 201 bp, Homo sapiens
ctgctcaaccctttctagtctgcagactttgagaattgcattttgtctgaggagaagccctcagccttccttgtgggcatgcactccccaactgtgcgcasctgcaggacttccaggcctccccagcttcatccacctgcaggtgctcaggatcctgatcccctgcccccttcccaccttggtgaaacttcttgtatcctt

SEQ ID NO: 199553 - DNA, 201 bp, Homo sapiens
ctcttgggaggagagacagggcagggccaggccttgacagctcagaagggcgcagtagggacagttcttggttttcccagctctgatgctttgcacagtcrcttgtgtgacctgcaagattttagtgaagaaacttgctgtggagtcggaaagctgcaagttgaggtgtgtgtggtgtgagggttaaaaatctgtgagaac

SEQ ID NO: 199554 - DNA, 201 bp, Homo sapiens
ctcccaccgcagcatgctctgagtttcatacacacactcttggcttcagcatgaccactggacgcaagtcagcctgcctggctgccaagctggcctggggytttggggtcacatgggcgggacgcttagctctctccaggccctgctgctcaaccctttctagtctgcagactttgagaattgcattttgtctgaggagaa

SEQ ID NO: 199555 - DNA, 201 bp, Homo sapiens
tgctcaaccctttctagtctgcagactttgagaattgcattttgtctgaggagaagccctcagccttccttgtgggcatgcactccccaactgtgcgcagstgcaggacttccaggcctccccagcttcatccacctgcaggtgctcaggatcctgatcccctgcccccttcccaccttggtgaaacttcttgtatccttg

SEQ ID NO: 199556 - DNA, 201 bp, Homo sapiens
tgtaaattccccaaatttgatgaaaaagatccatctacatatccaaaagcttaataaatgaatattcatttattgtcatttattcatttattctcaaaatrgaataaatgaaaggagagccatacctgcacacactgtagtcaaacaatcaaagggaaactgggagtcctggaagcagcaagagtgagatgagtcgtcagg

SEQ ID NO: 199557 - DNA, 201 bp, Homo sapiens
agctgcggacactgctcgcttcagggctttgctcagctgcagctggtgacctccagagagggagtctctgatgtcccgctggggtggatgtcctgagaccrggaagggggaagagacccactgaaatcctatctcccagcctcacctctgctgtctcctccacgcttcctgtctccagagccccgagttcagcataagcag

SEQ ID NO: 199558 - DNA, 201 bp, Homo sapiens
gcggctgcatctccctggatggccagccttgcacattttaggctgcagctttctgtctgaagctgcttgttaaccctcatggtgatgtggtgagatggctrgatgcactgctgtgaggggaggtgttatggtctgtgctgaacacctggtactcttgcacactggttggtccataccccactaagacacccctggttgcag

SEQ ID NO: 199559 - DNA, 201 bp, Homo sapiens
ttcatttagacctgacccctgactgctttctatctaatccttcactaagcaactccttcaactcgaaatatactatcctatatagcataatattcaaaacwacattcttcactgggggtttccagatgaaagcccacattttgttaacatgactcactgagacagtctttgtttctcctagggcacagtcgtagtgccaac

SEQ ID NO: 199560 - DNA, 201 bp, Homo sapiens
gtatcaccgtgactgtggccgacctgttctttgcggggacagagaccaccagcacaactctgagatatgggctcctgattctcatgaaataccctgagatygaaggtaggcaagtgactgaagggacaccgtgcgtgcggctgcatctccctggatggccagccttgcacattttaggctgcagctttctgtctgaagctg

SEQ ID NO: 199561 - DNA, 201 bp, Homo sapiens
ccacctcagcctcccaagtaactgggccacaggtgcacaccaccacacccagctgattaaaaatttaaaaaaattattttggctgggcacagtggctcatrcctgtaatcctggcactttgggaggctgaggcaggcgatcacgaggtcaggagttcgagaccttcctggccaacatgatgaaaccctgtctctcctaaaa

SEQ ID NO: 199562 - DNA, 201 bp, Homo sapiens
cgtcggcgatggccaaataataaactaacagtaatattatagtaatagcatccgaaggatgagatcaggattagggcgatggcccccgcgcgttgcctgcsgagcgaggcgcactgagtcgcccaggaatccggcctctcggcgactgtgcgggagagtttatggggatgggcggggctgcttctgagcaggagtcgccgc

SEQ ID NO: 199563 - DNA, 201 bp, Homo sapiens
gctcatacctgtaatcctggcactttgggaggctgaggcaggcgatcacgaggtcaggagttcgagaccttcctggccaacatgatgaaaccctgtctctmctaaaatacaaaaaagtagccgggtgtggtggcacgcgcctatagtcacagctactcaggaggctgaggcaggagaatcgcttgaacctcagaggcacag

SEQ ID NO: 199564 - DNA, 201 bp, Homo sapiens
atgaaaccctgtctctcctaaaatacaaaaaagtagccgggtgtggtggcacgcgcctatagtcacagctactcaggaggctgaggcaggagaatcgcttsaacctcagaggcacagggtgcagtgatccgagattgcaccccactgcactctagcctgacaacagagcaagaatcagtctaaaaaaaaaattgtagagac

SEQ ID NO: 199565 - DNA, 201 bp, Homo sapiens
ctggggttaatcctgtgagaagattagggctttcatcttcatttagacctgacccctgactgctttctatctaatccttcactaagcaactccttcaactsgaaatatactatcctatatagcataatattcaaaacaacattcttcactgggggtttccagatgaaagcccacattttgttaacatgactcactgagaca

SEQ ID NO: 199566 - DNA, 201 bp, Homo sapiens
tcgtagtgccaactctggactctgttttgtatgacaaccaagaatttcctgatccagaaaagtttaagccagaacacttcctgaatgaaaatggaaagttyaagtacagtgactatttcaagccattttccacaggtgagaaagatcagaggcagtaccttcccttgaggagcagcccacactcctcatctcccctccaca

SEQ ID NO: 199567 - DNA, 201 bp, Homo sapiens
tggcacggagcggggggtgcataacacgccccgggacagttacgggcgctagccacgtcggcgatggccaaataataaactaacagtaatattatagtaayagcatccgaaggatgagatcaggattagggcgatggcccccgcgcgttgcctgccgagcgaggcgcactgagtcgcccaggaatccggcctctcggcgac

SEQ ID NO: 199568 - DNA, 201 bp, Homo sapiens
tactgggcagacatggtcttcccaacttaacaccggtttttgcagttgagctctggataattgagattgtatgaaggctggtccccgaattagtcagtgtygctggtatccttccactcaagtacattttgtgcttcttttaataggcagagaagggtgagtcctgccttgtgatggccgtttgcccacagcctcctcctc

SEQ ID NO: 199569 - DNA, 201 bp, Homo sapiens; identical to SEQ ID NO: 35023

SEQ ID NO: 199570 - DNA, 201 bp, Homo sapiens
gatgagcactgggggtgccttctttactgggcagacatggtcttcccaacttaacaccggtttttgcagttgagctctggataattgagattgtatgaagrctggtccccgaattagtcagtgttgctggtatccttccactcaagtacattttgtgcttcttttaataggcagagaagggtgagtcctgccttgtgatgg

SEQ ID NO: 199571 - DNA, 201 bp, Homo sapiens
tcacacccagtgctggagccccagcttctaacagggcactatttccctcctgtaggcatcactgatgagcactgggggtgccttctttactgggcagacayggtcttcccaacttaacaccggtttttgcagttgagctctggataattgagattgtatgaaggctggtccccgaattagtcagtgttgctggtatccttc

SEQ ID NO: 199572 - DNA, 201 bp, Homo sapiens; identical to SEQ ID NO: 35025

SEQ ID NO: 199573 - DNA, 201 bp, Homo sapiens
gcagcacacagcatgaacaccatcctatcagctaatcgccttcctgccagggagcaggatgggggccccaagacccttccctttggcaggggtcactgagkggaagggctggccccactcccaccctgtgggatactgcatctccaggagtgctcacattggcctggtgaccagagaggtggaggaaatctggaaaagagc

SEQ ID NO: 199574 - DNA, 201 bp, Homo sapiens
gaagagaactgaataagccatcatcaactgagataatggatgccaaaacatccagtaaataacctcatagagcttagctctcactaagtttttggagcatyttccagtaattcaaaggacctggggaaccttaagcactgcttaggatgctccataaacatcttctgcgtgggtaggggagtggatggatggctggatggg

SEQ ID NO: 199575 - DNA, 201 bp, Homo sapiens
gggcgcagactggcggaaaattagcagagccctgggcatgggctgcacctggcccttaagggacaatgatggaaatattccttattagcacaatactgagyacaggctgtgtgataatgtgtcaagggaactgcagacatcctttcagaaaaagttcataaaacggagaaagtttggttcccaacctagatttttaacctg

SEQ ID NO: 199576 - DNA, 201 bp, Homo sapiens
tttttcactcaacatatgatgatgttccatgggaactccaaacacggggaggctaggcgacttgctcaaggcagctgttacctctgtcagaaagacagagrctttcagattcaagaagtagaccctgcatgtctgattctgttctgtaaacccccttcatactcagaagcatgcaataaacaagcctggggtaattatcaa

SEQ ID NO: 199577 - DNA, 201 bp, Homo sapiens
agcctttgaaacgatggccaacagcagctaataataaaccagtaatttgggatagacgagtagcaagagggcattggttggtgggtcaccctccttctcakaacacattataaaaaccttccgtttccacaggattgtcctcccgggctggcagcagggccccagcggcaccatgtctgccctcggagtcaccgtggccct

SEQ ID NO: 199578 - DNA, 201 bp, Homo sapiens
caaagtctacctcctcacatctccccacctctctcaccagaaatggcttcagaattgctgtgtggctttgcacttttaacagttgttaattatcagcacartattcatattattgctgtatgtgtttaatattttacctgggtactgtacataacattttgcagcttggttttttcactcaacatatgatgatgttccatg

SEQ ID NO: 199579 - DNA, 201 bp, Homo sapiens
tttatgaggaggttccaatatagacaaaaggaaaataaatatgattgacatgtatatatccattgccaaattgaacgtttattaacattttgcgatacttmcatcagagctcttaaaaagaaaatgtgttacagagccagccaaagtctacctcctcacatctccccacctctctcaccagaaatggcttcagaattgctg

SEQ ID NO: 199580 - DNA, 201 bp, Homo sapiens
caagttgttactatgttttgtaggctggtcttgaactcctgggctcaagtcatcctcctgccttggcctcccaaagtgctggggttacaggtgtggccacmgtgccccatccctggcctttgctttttcaatcacatggaaatgtgaagggtgaaggagccaaaagtttagggaaggaatcattgtatggatctgcagtga

SEQ ID NO: 199581 - DNA, 201 bp, Homo sapiens
ccaaagccaaggcttcaatttcagtctgtggggagctgactctgctgctctcaagcactagaagaaggaaccagtaatcgaggaaacttgtggaccccaawgggtgtctgtcccggccaggcctggctgggcccacacaggacaacagggttcaggggtctggacagctgtttctgcccagggaattgtccctgccacctc

SEQ ID NO: 199582 - DNA, 201 bp, Homo sapiens
gctggactcttcctccagacattatctgtctagggtgggctgagaatttgcctttctaacaagctcccaggtggtgctgatgctgtgagtccagggaccaygctttgaaaaccactgctctacatcattctgttttttgttgttttgtttttgttgttgtttttttgaaacagagtcttgttctgtctcccaggctggagt

SEQ ID NO: 199583 - DNA, 201 bp, Homo sapiens
gtaaagacaggcataagaaattataaaagtattaatttggggaactaataaatgtccgtgaaatcttcacaatccaggttcttctgccatggcttcagccrgtccctccgttcggggtccctgacttcccgcaacaggtaacataccaacatgtgtaggtggtgaggttgccattttaatgaaaatgaaacagagcgactc

SEQ ID NO: 199584 - DNA, 201 bp, Homo sapiens
aagacctggattcaagtctcaacccaagccctggccagctctgggaccccggacaagtcggcctcactctctgcccctcagtgggctcctgtgtagatggrgataatgatggctttatatcctgagaatgtggggaggggattaagtggccaaaatacctgagagtgcgcactcagtgcctggctcagcaaatgcccttgt

SEQ ID NO: 199585 - DNA, 201 bp, Homo sapiens
tgggaggattgcttgagcctaggagttcaagatcagcctgggcaacatggcgagaccccgtctctataaaacataaaaaaaaattagccaggcatggtggygcacacctgtagtcccagatacttgggaggctaaggcaggaggatcgcttgagcccgggaggttgaggctgcagtgagccataattgcaccactgcactc

SEQ ID NO: 199586 - DNA, 201 bp, Homo sapiens
tgggacacagcatcttcccagaggtgattttggggtctgccctccaggcctggcccaggtgagagccaagtggtcttggcctgggaggctgggaggggctrgcgactgtccaccccaccccaccccggacccaggcatcatctgcagcagcgggcacacgtggcggcaaaagagacgcttctgcctggtgatgatttgagg

SEQ ID NO: 199587 - DNA, 201 bp, Homo sapiens
gtggccaaaatacctgagagtgcgcactcagtgcctggctcagcaaatgcccttgttccctccttccctctccccagaacccctcctccccttcttcttctttttttttttttttttttgacccagagtcttgctatgttgcccaggctggagtgcagtggcacaatctcggctcactgcaacctccacctcctggcttca

SEQ ID NO: 199588 - DNA, 201 bp, Homo sapiens
tgctctccagcctgggatccaagagtgaaactgtctcaaaaacaaacaaacaaacaaacaaacaaacaaaagcaaaaacaaagaatgacttgtgagttccwggaggcagaggttgcagtgggcggagattataccactacagtccaacctgggtgacagagcgagactctgtctcagaaaaaaaaagactgacttgcatca

SEQ ID NO: 199589 - DNA, 201 bp, Homo sapiens
ggtcacctgccctgagaaatcctcctgaatgccaggcccccaaaccttttttattccctgctgtgccatacctgccccacattctgttgttattctgttgkcattcaaattgttgtctgtctcccatgcctctctctgacctggctcgtagaaggtgcttggtaagcacttgggtttttttgtttttgtttgttttgtttt

SEQ ID NO: 199590 - DNA, 201 bp, Homo sapiens
gtgccacaagtttcgtgaccttgggcaaaagtacctgtcctgttagagcctcagtttctccatctgtaaaatggagacaacagtccctcctccataatgcttttttttttagacggtatctcactctgtcacccaggctggagggcagtggcacagtcttggctcactgcaacctctgcctcctgggttcaagtgattctc

SEQ ID NO: 199591 - DNA, 201 bp, Homo sapiens
tctcggctcaccacaacctctgtctcccacgttcaagcgattcttctgcctcagcctcctacatagctgggactacaggtgtgccaccatgcctggctaattttttttttttttttgtatttttagtaaagacggggtttcaccatgttggccaggctggtctcgaactcctgacctcgggtgatcgcccgcctaggcctc

SEQ ID NO: 199592 - DNA, 201 bp, Homo sapiens
cgactcatcttggtgccctggtgcagggtgatgcctctgtacatagaggtggtggcgggagccctgagactttcctcggaaaggagctttggctctgcccygagtactgccctggagtacagtggtgtgatctcagctcactgcagcctccacctccggggctcaagcaattctcccacctcatcctcccaagtagctggt

SEQ ID NO: 199593 - DNA, 201 bp, Homo sapiens
tttcccagggatcttccttgctgagaaaaagaattcagtgatatttctcccatttgcttttgaaagaagagaaatatggctctgttccacccggctcatcrgtggtcagagtttaaggttatctctcgtattccctgaacaattgctgttatcctgttcttttttcaaggtgcccagatttcatatcatttaaacagacat

SEQ ID NO: 199594 - DNA, 201 bp, Homo sapiens
cccaggctggagtgcagaggcgtgatcttggctcactacaacctttgcctgcctcagcctcccgagtagctgagactataggcacttgccaccacgcccgrctaatttttgtatttttagtagagatggggtttcaccgtgttggccaggctggtctcaaactcctgacctcaagcgatccgccctgattggcctcccaaa

SEQ ID NO: 199595 - DNA, 201 bp, Homo sapiens
ctctgcatagggtagctcaaaacatggcagctgaaccccatcagagagagcaagcaagagggcacccaaaatagaagcaatggtctttttgtaacctaatmttagatgtgatatcccattgcttttgccatattctttttttttgagacagaatctcgctctgtcaccccaggctggagtgcagtggtgcaatctcagctc

SEQ ID NO: 199596 - DNA, 201 bp, Homo sapiens
gcagtggctcaatcttggctcactgcagcctctgcctcccaggttcaagctattctgcctcagtctcccgagtagctgggatgacaggtgtgtgccaccaygcccggctaatttttgtattttttagtagagatagggtttcaccatgttggccaggctcgtctagaactcctgacctcaagtgatctgcctgcctcagcc

SEQ ID NO: 199597 - DNA, 201 bp, Homo sapiens
acggagctgtccagggtgacaggcccttggtcacactctggctgactgccccatgcatggggcttctgggccatgggcattgcctccatcactctccttgmtctgtggccccaggggtgggtcctgctctcgccactgtggtacaggaagtgttcatggcttcgagtcagacaggaggggcttcagttcccaccctgctgc

SEQ ID NO: 199598 - DNA, 201 bp, Homo sapiens
gggattacaggcatgagccaccgcgtccggccaatatttatttatttttgagacagagtcttgctctgtcacccaggctagagtgcattggcacgatcacrgctcaccacagcctctatctcccagctcaatcgatcttcccacctcaccctcccgagtagctaggactacaggcatgagcccccatgcctggctaatttt

SEQ ID NO: 199599 - DNA, 201 bp, Homo sapiens
gttggggctacagtgtcacctgaagactcccctaggggaggctccacttcaagctcacttacatggaggtcttcaggacccggttgctcatgaactgttgkctggagaccttcagttccttgacacatgggcctctgcatagggtagctcaaaacatggcagctgaaccccatcagagagagcaagcaagagggcacccaa

SEQ ID NO: 199600 - DNA, 201 bp, Homo sapiens
ctcccgagtagctgagactataggcacttgccaccacgcccgactaatttttgtatttttagtagagatggggtttcaccgtgttggccaggctggtctcraactcctgacctcaagcgatccgccctgattggcctcccaaagtgctgggattacaggtgtgagccactgcgaccagccagcatctgctgctccatttct

SEQ ID NO: 199601 - DNA, 201 bp, Homo sapiens
attatctgtctagggtgggctgagaatttgcctttctaacaagctcccaggtggtgctgatgctgtgagtccagggaccatgctttgaaaaccactgctcyacatcattctgttttttgttgttttgtttttgttgttgtttttttgaaacagagtcttgttctgtctcccaggctggagtgcagtggtgtgatctcggct

SEQ ID NO: 199602 - DNA, 201 bp, Homo sapiens
caccgcgtccggccaatatttatttatttttgagacagagtcttgctctgtcacccaggctagagtgcattggcacgatcacggctcaccacagcctctayctcccagctcaatcgatcttcccacctcaccctcccgagtagctaggactacaggcatgagcccccatgcctggctaattttcgtagtttttgttgttgt

SEQ ID NO: 199603 - DNA, 201 bp, Homo sapiens
attacaggtgtgagccactgcgaccagccagcatctgctgctccatttctgcattctttattggtttctgtttagaatgcaggcttcaaactcgctaagcttttttttttttttttaatttcaagctttttctttggtcagaatcaagaattctgtagtcagccctctggtctctacagggatagctggtttaattttgtg

SEQ ID NO: 199604 - DNA, 201 bp, Homo sapiens
tacaccatgctgtcctccatgacgtgcagcgcctcagcagcgtcatggccatgggtgccgtgcgccagtgtgtgacctccacccgtgtgtgcagctatccygtgagcaaggtaggtggccctacgcagccccacacccaacccagtgcctgcagaaagcatccttcctgccagcacagccatctgctatagcttctgccaa

SEQ ID NO: 199605 - DNA, 201 bp, Homo sapiens
caccacagcctctatctcccagctcaatcgatcttcccacctcaccctcccgagtagctaggactacaggcatgagcccccatgcctggctaattttcgtwgtttttgttgttgttgttgctttgtttttttgcagagatgcagtttcaccatgttgcccaggttggtctcgagcatagttgaagatgatagctctctggt

SEQ ID NO: 199606 - DNA, 201 bp, Homo sapiens
atgccactctaggtaagtgaaccaatgtgttcaatggagatgttttacactgtcattctgtccttggcagaaattggccagcaagtttacaggtttgtcargagtctctgggaaagtggataggaccagggcatcaggtcatcttgctgctggcgtggcagaaggacccaggcccaggttgtctagaagctgtgccaactt

SEQ ID NO: 199607 - DNA, 201 bp, Homo sapiens
gaacaatttcccctgaaaacaatttctgcattctgtttttttttttgttgttgttgttttgtttttttagatggaatcttgctctgtcgcccaggctggartgcagaggcgtgatcttggctcactacaacctttgcctgcctcagcctcccgagtagctgagactataggcacttgccaccacgcccgactaatttttgt

SEQ ID NO: 199608 - DNA, 201 bp, Homo sapiens
ttcaccatgttggctaggctggtctcaaactcctgacctcaggtgatccacccgcctcggcctcccaagtgctgggattacaggcgtgagccactgcaccyggcctggcctctgttttttttaaactcataaaatggagataaattgcctacctgcacacttatactgagggtggactcaagcaaaatatgtaaagcccac

SEQ ID NO: 199609 - DNA, 201 bp, Homo sapiens
catgcctctctctgacctggctcgtagaaggtgcttggtaagcacttgggtttttttgtttttgtttgttttgttttgttttgtttttgagacggagtttygctcttgttgcccaggctgagtgtagtggcacgatctcggctcactgcaacctctatcccccgggttcaagtgattctcctgcctcagcctcccaagcag

SEQ ID NO: 199610 - DNA, 201 bp, Homo sapiens
atgcagggtgggagggggattgcagaaattgtggacttcgtgcagaatctaagaagtctaatctaagaaattctgagtgcaggagaagtccactgccaatrgaacagggtggcgaaaaccactgaacagagctcaactccaggagagcactgtgtgtggctggaagaagttttctgaaaagccacttgagatgggagttgg

SEQ ID NO: 199611 - DNA, 201 bp, Homo sapiens
ccacagtcagagtcatcggggcccttgtgtttggccaccacttcctcttagaggatcccatcttccaggaactgactcaagccatcgactttggcctggcmtttgtcagcactgtgtggcgccgggtaattggcatttggggaggcaggtgtgcaggccattaccttaggggcccgaggcaggcaggggcctcagccaggg

SEQ ID NO: 199612 - DNA, 201 bp, Homo sapiens
tccttggaaacctgtggcagctatgctttcagctgcacccagagacactgctccaggtaggaagcctgtgctcaagctggaggccctaaaggggtggacasatgaacccctcttctctctcagaccagcggcactggagacagaaagaaggaacagaggtcagacacgtgtggggtgaatcctggtcttaccattcattag

SEQ ID NO: 199613 - DNA, 201 bp, Homo sapiens
gcagccccacacccaacccagtgcctgcagaaagcatccttcctgccagcacagccatctgctatagcttctgccaacctgccagctatcagtcacttaayctctctctctctctgtggcgtttgggacgggggttatgattataaaagaatgtagccgggtgccatggcttacgcctacaatcccagcactttgagaggc

SEQ ID NO: 199614 - DNA, 201 bp, Homo sapiens
acaccatgctgtcctccatgacgtgcagcgcctcagcagcgtcatggccatgggtgccgtgcgccagtgtgtgacctccacccgtgtgtgcagctatcccrtgagcaaggtaggtggccctacgcagccccacacccaacccagtgcctgcagaaagcatccttcctgccagcacagccatctgctatagcttctgccaac

SEQ ID NO: 199615 - DNA, 201 bp, Homo sapiens
gtctagaagctgtgccaacttaagttaaaaagagggggccagggtactgctctgtgttatgccgtttgggattagaaatttccttattaagagctcattcmtgccaatttgattctaggacttgttctgtgataaaggctccaggggcccattaacgagctgaaatcaatattgagcttttacaacttggacgagagatgt

SEQ ID NO: 199616 - DNA, 201 bp, Homo sapiens
gagacgcttctgcctggtgatgatttgagggctgggcctaggcaagctggcgctggaggtgcagctgcagaaagaggcagcagagctggcagaagccttcygccaggagcagggtaagtagcaggctggcggcaggcctaccctcaccccctctccccacgcacgcgcacacccctgcagaacaggcgagcttcactgcat

SEQ ID NO: 199617 - DNA, 201 bp, Homo sapiens
gatcgcccgcctaggcctcccaaagtgctgggattgcaggtgtgagccaccacactgggcatctacatcattcttaatggctgcataatgttccaccaaayggatgttttgcaattttaacccttgttggtgaacatttaggccatttgcaatttatgtgccttaggcttggtctgcattttgtattatctccttaaaact

SEQ ID NO: 199618 - DNA, 201 bp, Homo sapiens; identical to SEQ ID NO: 35037

SEQ ID NO: 199619 - DNA, 201 bp, Homo sapiens
ataaataaataaaaataaatttaaaaatataataatgcatgaagaatacctagcacagtccctggtacatgctaagtgcctaataaattgcaactactaayaataatcaataaatattccttcgcctggttcatggtcagcacaccttacccagtccttccctttgtcagctgactgagccctggctgtcccctgaggatg

SEQ ID NO: 199620 - DNA, 201 bp, Homo sapiens
tccttcctgctcctgaaacttggcaccttctgctgggacaggagctgtcttcctcctggcccactccccttccccatccttggaaacctgtggcagctatrctttcagctgcacccagagacactgctccaggtaggaagcctgtgctcaagctggaggccctaaaggggtggacagatgaacccctcttctctctcagac

SEQ ID NO: 199621 - DNA, 201 bp, Homo sapiens
ggtgggcccgatccccgttgcggtgctgagtggcttccaggtggtgaaggaagcactggtctccaactcggagcagttctccggcaggtccctcaccccgytcttccaggacctgtttggagaacgaggcagggctgcccctcctgctggggagggggaggcggctagatggtcactacactcagggagttggggatggct

SEQ ID NO: 199622 - DNA, 201 bp, Homo sapiens
ggcagggctgcccctcctgctggggagggggaggcggctagatggtcactacactcagggagttggggatggctcagagctgttaacagagaggggactgyccaggaggacctgcgtgaggggtgggggtgggatgacaaggaaccagctctgggagttgaaagacctggattcaagtctcaacccaagccctggccagct

SEQ ID NO: 199623 - DNA, 201 bp, Homo sapiens
ccggctaatttttgtattttttagtagagatagggtttcaccatgttggccaggctcgtctagaactcctgacctcaagtgatctgcctgcctcagcctcycaaagtgctgggattacaggcatgagccaccgcgtccggccaatatttatttatttttgagacagagtcttgctctgtcacccaggctagagtgcattgg

SEQ ID NO: 199624 - DNA, 201 bp, Homo sapiens
gcagtggcacaatctcggctcactgcaacctccacctcctggcttcaggcaattcttgtgcctcagcctctcgagtagctgggattacaggcaggcaccaycacgcccggctaattttttttttttttttttgtagtagaaatgggatttcaccatattggcaggatgttctcgatctcctgacctcaggtgatccactcg

SEQ ID NO: 199625 - DNA, 201 bp, Homo sapiens
gctggtcttgaactcctgacctcgagtgattggcctgcctcagcctaccaaggtgctgggattacgggtgtgagccaccgcacccggccgcttttgccatrttctatttgttgggtttgttgttgttgttgttgttggtttgagacagtgtctccctctgttgcctgggttggagtgaagggacacaataatagctcactg

SEQ ID NO: 199626 - DNA, 201 bp, Homo sapiens
agggcaccggaggcccccagggacttcatcagctgctacctggcccagatctccaaggtgagcctggaacagctgctcaggaaaggaggggccatcttttygggctgcacctcgtttctgagcacctcctttctaagccatggtctcagtttctcatctttgactctatctacgagcttccaaagcacgctgaaaatgtga

SEQ ID NO: 199627 - DNA, 201 bp, Homo sapiens; identical to SEQ ID NO: 35038

SEQ ID NO: 199628 - DNA, 201 bp, Homo sapiens
tcctgcctcagcctcccgagtagctgtgattacaggcatgtgccaccatgcctggctaatttttgtatattttagtagagatggagtttaccatgttggcyaggctggtcttgaactcctgacctcgagtgattggcctgcctcagcctaccaaggtgctgggattacgggtgtgagccaccgcacccggccgcttttgcc

SEQ ID NO: 199629 - DNA, 201 bp, Homo sapiens
gctggagtgcagtggtgtgatctcggctcaccacaacctctgtctcccacgttcaagcgattcttctgcctcagcctcctacatagctgggactacaggtrtgccaccatgcctggctaattttttttttttttttgtatttttagtaaagacggggtttcaccatgttggccaggctggtctcgaactcctgacctcggg

SEQ ID NO: 199630 - DNA, 201 bp, Homo sapiens
agggaccatgctttgaaaaccactgctctacatcattctgttttttgttgttttgtttttgttgttgtttttttgaaacagagtcttgttctgtctcccasgctggagtgcagtggtgtgatctcggctcaccacaacctctgtctcccacgttcaagcgattcttctgcctcagcctcctacatagctgggactacaggt

SEQ ID NO: 199631 - DNA, 201 bp, Homo sapiens
tccagatgagaggcagccctgggttactcaagtcaaaggctccagcccactttggagccccccgactcagaggctggctcctgagtaggccctgggtgggygtctctctccacagctgtatgacgtgtttccctgggccctctgccacctcccaggaccccaccaggagatatttaggtaccaagaggtcgtgctgagctt

SEQ ID NO: 199632 - DNA, 201 bp, Homo sapiens
tggccgcacaggtctcagatcaggcttcaaggaaaccccagggctctgtcaggagagaattttagacctggagctgcgccccccactcgcccacccccgamttgcccggccatggatgaccctgtctccacattcaaccaggagaacctggtctaggtggtgatcgacctgtttctgggaggcaccgacaccacagccacc

SEQ ID NO: 199633 - DNA, 201 bp, Homo sapiens
agaggcagccctgggttactcaagtcaaaggctccagcccactttggagccccccgactcagaggctggctcctgagtaggccctgggtgggcgtctctcyccacagctgtatgacgtgtttccctgggccctctgccacctcccaggaccccaccaggagatatttaggtaccaagaggtcgtgctgagcttaatccacc

SEQ ID NO: 199634 - DNA, 201 bp, Homo sapiens
gccgcacaggtctcagatcaggcttcaaggaaaccccagggctctgtcaggagagaattttagacctggagctgcgccccccactcgcccacccccgaatygcccggccatggatgaccctgtctccacattcaaccaggagaacctggtctaggtggtgatcgacctgtttctgggaggcaccgacaccacagccaccac

SEQ ID NO: 199635 - DNA, 201 bp, Homo sapiens
ggcccattaacgagctgaaatcaatattgagcttttacaacttggacgagagatgtctgctgaaagtggaatcaaagcttgacagtagatcattaaatgtkacagatattcctaaactgttcctaaccatttcatcagctgagtgatcgtgacaacagcaatagtccctgatacgacggttgcacttccagcctgtctctc

SEQ ID NO: 199636 - DNA, 201 bp, Homo sapiens
cacaggtctcagatcaggcttcaaggaaaccccagggctctgtcaggagagaattttagacctggagctgcgccccccactcgcccacccccgaattgccmggccatggatgaccctgtctccacattcaaccaggagaacctggtctaggtggtgatcgacctgtttctgggaggcaccgacaccacagccaccaccctg

SEQ ID NO: 199637 - DNA, 201 bp, Homo sapiens
catggctaggatgaggcaccttgcctaagcgtgccgtactgcaacaacggcaaaaaagaacaatttcccctgaaaacaatttctgcattctgttttttttkttgttgttgttgttttgtttttttagatggaatcttgctctgtcgcccaggctggagtgcagaggcgtgatcttggctcactacaacctttgcctgcctc

SEQ ID NO: 199638 - DNA, 201 bp, Homo sapiens
ctgctgcccctgatgttcccgggctcttgtgctgcctggcctctgacccctggacctagtctcagggcctatcttaagccccttggaatttgctggctgcrcagctgtgatgtcttcttgggttcactcatcacagtgccagccatgaccagcccctccctgcaggtgcgggcggcacccagagactcacccgtgctgttg

SEQ ID NO: 199639 - DNA, 201 bp, Homo sapiens
tcttactccctgctcttgggcctgaagcagagccgctggctcagtggggcgctccattctgaggtccctggcatgcaccacggaagcccagcgggaccacmcacccacctgccccagctccccagcggaggtcctgagatggcagattaaatactctggggttctgaattccacagatgaactgggtcccccacgggtatg

SEQ ID NO: 199640 - DNA, 201 bp, Homo sapiens
acagtgccagccatgaccagcccctccctgcaggtgcgggcggcacccagagactcacccgtgctgttgggaagtcgctggcgatggagatggtcctcacyggtgaccggatctcagcccaggacgccaagcaagcaggtatgggttggggctgcccgcaagagccacctggaaacccggggtgggagccccacagaaacc

SEQ ID NO: 199641 - DNA, 201 bp, Homo sapiens
  misc_feature (1)...(201): n = A,T,C or G
ttaataggaaccatcccaggtaaagagtgacactgtctctggcatagatgccttaggtaattactcaaaatctgcctgtgtctcagggcccacagctcatntctgaccagaggccctggatggacagccccatggctggtcagtggtccctctgtggacagccacggaggctagagtggttgtgacagagcttgggggggg

SEQ ID NO: 199642 - DNA, 201 bp, Homo sapiens
agaataacaccgtggggttgatccaactgaaccgccccaaggccctcaatgcactttgcgatggcctgattgacgagctcaaccaggccctgaagatcttygaggaggacccggccgtgggggccattgtcctcaccggcggggataaggcctttgcaggtacgcgcggcagcagaggcctttgtgtctgggcagatgtgg

SEQ ID NO: 199643 - DNA, 201 bp, Homo sapiens
gaagccatccagtgtgcagaaaaaattgccagcaattctaaaattgtagtagcgatggccaaagaatcagtgaatgcaggtaggggatctgccaggaagasactggagaggtctccgtggctgtcaggagcattcctcagcagcaggctttctggctccaaatgaatatgccttaagccctcctgggcagaaatgcttctc

SEQ ID NO: 199644 - DNA, 201 bp, Homo sapiens
gacgcctctctgcctcccaggcagggaccttgccctccccacctccccgcgtggcttccagccctgcggatctgactgcggccggtcggcggtgggggcgyccaactggctgacctgagacctcttgtgacccacgatctgccgccatgactgggtgggaggacgggcggcgccgaccccgagggcagggataggtgccga

SEQ ID NO: 199645 - DNA, 201 bp, Homo sapiens
ccctgggcccctgtgagcatgagtgaggcagagccagggagagacgggcggacattggcatcaggctctgtgaggatactgcgcgtccagctctgtttctrttccttttcctgccaggatgaccggaaagaagggatgaccgcgtttgtggaaaagagaaaggccaacttcaaagaccagtgagaaccagctgcccctgct

SEQ ID NO: 199646 - DNA, 201 bp, Homo sapiens
caggctggtctgaaccatttcaaatgcacatttcagcggcattaagtacgttctcgttgtgcagccatgactatccaagaaagctttcattttcccaaacrgaaactgtccccgttaaacaacaaccccttttctgcttccctccagctcctggcacccacgcttctacttcctgtctctatggagggacctccatttatc

SEQ ID NO: 199647 - DNA, 201 bp, Homo sapiens
tagctggcattacagcgtccctacagctgtccacgtggcctggtgtcagccgtgcccagcaaccccactgcctgtgtctggtgtgctctgaagttccttgytggtctgagagatataggatgggtgggctctctgctctctggtaactggaacctcctttccactcctgctagctggagctgatatcaaggaaatgcagaa

SEQ ID NO: 199648 - DNA, 201 bp, Homo sapiens; identical to SEQ ID NO: 35055

SEQ ID NO: 199649 - DNA, 201 bp, Homo sapiens
ccctgagctgcatccagttgtctccctcgtgggagccccacagaaacccagagctgcatccaggtgtcccccatgggggagccccacagaaacccagggcrgcatccaggtgtccccctcgtgggagccccacagaaaccccgggcagcatccaagtgcccccacggtggttgcatgagcttttgggtcctgaggacctgg

SEQ ID NO: 199650 - DNA, 201 bp, Homo sapiens
aaaatgcagtgtaagcaatgggcatctccaggcctcagtggccggtcctcccactgccctgttggtgatcacagtccccgtgtctggccgcctctgccgtyggagctgtggccagcctggcccacatgtctgagagcacagtgaccgcagtgccaagatcactcagcactcaggaaggggcacgtgcggcacttcccgtgt

SEQ ID NO: 199651 - DNA, 201 bp, Homo sapiens; identical to SEQ ID NO: 35043

SEQ ID NO: 199652 - DNA, 201 bp, Homo sapiens
ctgttggttctgccaggtctccgctggggcagtgcctttgagaagggcggcaccatggaagcctgtgcagggctgggccacgtcgaaagcacagttgtgcrtgggtcagtgaggagggcttcctgtcaccgtgcaggaaaagttctgcatgtaatatctccgttcataactctgggactttgtttttcagcttttgaaatg

SEQ ID NO: 199653 - DNA, 201 bp, Homo sapiens
gaattgcaccctcaagcagctcctttattgaaaatgcagtttcagccgggtgggtgtcgagcatccgtagccccagcttcctgggaggctgaggcgggtcrttcgagtccaactgggcagcaaagcaagaccccgtctcaaaaaaaagacttttttaaaaaatgaggccgggcgcggtggctcaccctgtaatcccagcac

SEQ ID NO: 199654 - DNA, 201 bp, Homo sapiens; identical to SEQ ID NO: 35044

SEQ ID NO: 199655 - DNA, 201 bp, Homo sapiens
ttgtcctcaccggcggggataaggcctttgcaggtacgcgcggcagcagaggcctttgtgtctgggcagatgtgggaggcacgtatggccttgggagaagyctccagacagatttgcgcctctgtgatggcagaggcatgcgactggggacttcctcaaatatcgagtgaagacggtcatgggaacggcttgcatgagcag

SEQ ID NO: 199656 - DNA, 201 bp, Homo sapiens
tgctgaggagcccccgctggtccctctgggcatgctgtgctcggacggaaagcggggcctgtgggtccttgtgtccctgccgctgaagaatggggctgctytgagggaaacgctgtctgctgccttcatacagatgctgattaaagtgatagcgattcagattacaccacgccttgtagtcatgtctgcaatgagcattct

SEQ ID NO: 199657 - DNA, 201 bp, Homo sapiens
gggaagaataacaccgtggggttgatccaactgaaccgccccaaggccctcaatgcactttgcgatggcctgattgacgagctcaaccaggccctgaagaycttcgaggaggacccggccgtgggggccattgtcctcaccggcggggataaggcctttgcaggtacgcgcggcagcagaggcctttgtgtctgggcagat

SEQ ID NO: 199658 - DNA, 201 bp, Homo sapiens
tttgtttttcagcttttgaaatgacattaacagaaggaagtaagttggagaagaaactcttttattcaacctttgccactgtgagtaaacagtgttcaacyggagaatcaagcaaattccagtcacacaagttgctgggaatttccttttaaatgttatcattaagtatcgtttctttctggtcagaactgccagcctcac

SEQ ID NO: 199659 - DNA, 201 bp, Homo sapiens
aatgacagtcctataacattctttttagtggccctgacgtttcatactatggacatgtcatcatgcccttggttctaggtatttcccccagggaagcccamctgcccccagctcagtgcagacgccagagagcgtttgccggtgtctcctccacttggccccgcagctcagtgtgcgtaggtggtctagattgtggtcatg

SEQ ID NO: 199660 - DNA, 201 bp, Homo sapiens; identical to SEQ ID NO: 35053

SEQ ID NO: 199661 - DNA, 201 bp, Homo sapiens
aggctaccatctatccttgtgcctgagagctacacctggagccactgaggactcggcagggagccctcagagggcctcttggggtcacactgtatccaccratggggccacatcccttcccccactctccccagtttgatacctgtgtgaatagatacccctttttgccttcttgctccaggtgctaactttgagtacatc

SEQ ID NO: 199662 - DNA, 201 bp, Homo sapiens
gatggagatggtcctcaccggtgaccggatctcagcccaggacgccaagcaagcaggtatgggttggggctgcccgcaagagccacctggaaacccggggygggagccccacagaaacccagggcggcatccaggtgtccccctcgggggagccccacagaaacccggggcagcatccaggtgtccccctcatgggtgccc

SEQ ID NO: 199663 - DNA, 201 bp, Homo sapiens
cgcccaactggctgacctgagacctcttgtgacccacgatctgccgccatgactgggtgggaggacgggcggcgccgaccccgagggcagggataggtgcygacacgggctgtcctcccggctgtttagttcttgcggacttgaacttcccggcctcctccatctgccagtgtgggcccatggagatccgtgcagacggtg

SEQ ID NO: 199664 - DNA, 201 bp, Homo sapiens
tggggttgatccaactgaaccgccccaaggccctcaatgcactttgcgatggcctgattgacgagctcaaccaggccctgaagatcttcgaggaggacccrgccgtgggggccattgtcctcaccggcggggataaggcctttgcaggtacgcgcggcagcagaggcctttgtgtctgggcagatgtgggaggcacgtatg

SEQ ID NO: 199665 - DNA, 201 bp, Homo sapiens
gaagagactggagaggtctccgtggctgtcaggagcattcctcagcagcaggctttctggctccaaatgaatatgccttaagccctcctgggcagaaatgsttctcagtgtctcagttctgctgtctgtagagtcgtggtttctggtcacgcactcaggaactccgctgagatgttcccagctcccctttgtaccagggcc

SEQ ID NO: 199666 - DNA, 201 bp, Homo sapiens
cgtcacctagactggtagagagaggccgtgaaaatccccgcgcccaggcccagctctgattgggcaggtgttcctgccgctgagtcccctccccggccccctgggcccctgtgagcatgagtgaggcagagccagggagagacgggcggacattggcatcaggctctgtgaggatactgcgcgtccagctctgtttctgtt

SEQ ID NO: 199667 - DNA, 201 bp, Homo sapiens
aactcttttattcaacctttgccactgtgagtaaacagtgttcaaccggagaatcaagcaaattccagtcacacaagttgctgggaatttccttttaaatkttatcattaagtatcgtttctttctggtcagaactgccagcctcacctttaacgggatcagattggttccatcagtgggtcttgatgttaggaaaaaagt

SEQ ID NO: 199668 - DNA, 201 bp, Homo sapiens
caaaatctgcctgtgtctcagggcccacagctcatatctgaccagaggccctggatggacagccccatggctggtcagtggtccctctgtggacagccacrgaggctagagtggttgtgacagagcttggggggggccttagagtcccgggactgtgactgtgcccacatctgatggtgttgggagaggctggtcctgggt

SEQ ID NO: 199669 - DNA, 201 bp, Homo sapiens
ggcagggaaaggctgagaagggagcagaggtcccaaatgtaaaatggtctctgccatggggaggctcggttcacctcccgagacctggggttggcggctgygtgtgcgcctggcaggtggctacgcaggcttgcagcccagcaccacgctgttcgttcttggcctggatcccttttagttctccctctgccagggaagtgg

SEQ ID NO: 199670 - DNA, 201 bp, Homo sapiens
agagagaagacatggacccaagagctgcagggtggggacaaccgacgcgctctttgtcccctggatgtggtgccacagcctgaatccaatagcacgggccrctgacgcgctgacctggggctgggttagtcgctcgtcccccttgctctgaaatggagagtgcacgtgaccacggccagtcctggacaatcctgccatgcc

SEQ ID NO: 199671 - DNA, 201 bp, Homo sapiens
ggataaggcctttgcaggtacgcgcggcagcagaggcctttgtgtctgggcagatgtgggaggcacgtatggccttgggagaagcctccagacagatttgygcctctgtgatggcagaggcatgcgactggggacttcctcaaatatcgagtgaagacggtcatgggaacggcttgcatgagcagctttgtgtatgccaga

SEQ ID NO: 199672 - DNA, 201 bp, Homo sapiens
ctgcactcagggtgcccttcgctgccctctgagttggacgaggccgattctgaggcctggagctgtgagctcggtgcatttgtttcgggtctgatccctakaacagctgctactataagggaccagtgcctggggtcagggaggcctataagcttctaatatgttgaccacagaggctggggagggccctacagagtcatc

SEQ ID NO: 199673 - DNA, 201 bp, Homo sapiens; identical to SEQ ID NO: 35049

SEQ ID NO: 199674 - DNA, 201 bp, Homo sapiens; identical to SEQ ID NO: 35050

SEQ ID NO: 199675 - DNA, 201 bp, Homo sapiens
gagcgagccctgaaaggctataggcgagggggcggctccgcggggccgggcgaggagtccagagagccatggccgccctgcgtgtcctgctgtcctgcgtycgcggcccgctgaggcccccggttcgctgtcccgcctggcgtcccttcgcctcgggtgagtgcgcggtgagagctggcggcccgaatctcctcctgactc

SEQ ID NO: 199676 - DNA, 201 bp, Homo sapiens
ggagcgagccctgaaaggctataggcgagggggcggctccgcggggccgggcgaggagtccagagagccatggccgccctgcgtgtcctgctgtcctgcgyccgcggcccgctgaggcccccggttcgctgtcccgcctggcgtcccttcgcctcgggtgagtgcgcggtgagagctggcggcccgaatctcctcctgact

SEQ ID NO: 199677 - DNA, 201 bp, Homo sapiens
tgattgacgagctcaaccaggccctgaagatcttcgaggaggacccggccgtgggggccattgtcctcaccggcggggataaggcctttgcaggtacgcgyggcagcagaggcctttgtgtctgggcagatgtgggaggcacgtatggccttgggagaagcctccagacagatttgcgcctctgtgatggcagaggcatgc

SEQ ID NO: 199678 - DNA, 201 bp, Homo sapiens
gtcctgggttacctgatgccagagcccatgcatttaactaccaccttctaccaccaaaacataattagtatttctaagttatttcaataattaaaaactayttatttagagaattttgtgtgccaggtcctagtgtaagcacttggggaataacagtacaaaaataaaaacagataagaatctttgtccttgtgaaattta

SEQ ID NO: 199679 - DNA, 201 bp, Homo sapiens
  misc_feature (1)...(201): n = A,T,C or G
tctggaactcctgaccaccggtgatccacctgccttggtctcccaaagtgctgggattacaggcatgagccacagcgcctggcctccagctttcttaaatnataactaactccttgctcccctttgactcttgtttttataggcagccctgcaagttgggggccatggagagaggctacaccagtgtcgagaagtcatgct

SEQ ID NO: 199680 - DNA, 201 bp, Homo sapiens
tcatggcctaccttgcttaacatgaagaccttggagaggagagtgcagagcatgtgcatggtctggggacctcactgtgttgggaagaggaaaaaagtccrggagactcagtagttccttggtttctctcataggaacacatagagtttttttctccttgtttattatacagttccatgcccttcttttagtagttattac

SEQ ID NO: 199681 - DNA, 201 bp, Homo sapiens
ttcttagttttctatgaaattcatttttatcataaaaggcattgaacatctttttttgcttaatcttttgagatgataatgtggtttttctcatttaaatmattaatgtactgaaattacaatgatgtattttctgatgttgagtaattcttaatttcttgattcttaacaataaaccataataactttaacttctataaa

SEQ ID NO: 199682 - DNA, 201 bp, Homo sapiens
aaagtagcccctcttgtttcatttctttgcagaccaagatcagggctgactatctcaacctctcccaattcataccctcctttctgacgtgaattctgttrtgttccactcaacaaatctaaaatctaattagtgtttttaggctttatcttactgtgggtcttggtaagttattgaatgtgcaatttcttggcagatgca

SEQ ID NO: 199683 - DNA, 201 bp, Homo sapiens
ttgagccctgtcctttaggagtttatagtcttattgaatgaagtgaagaaaataatatgatgctacttaaaatgtataatggcttttatattttaaatatrttagaggtctttcaggtaattgatattaactgtgatgttgtattattgaaactgcattataggatattttcttttcatatctatttcacagttaatatca

SEQ ID NO: 199684 - DNA, 201 bp, Homo sapiens
tgtattattgaaactgcattataggatattttcttttcatatctatttcacagttaatatcacagttcttttcaaagaagcatttgtgattatagccatcycctatgaagcgttgttgtgaaattaatagaaagaatcattggcatttcatggttttgctgaccgtgggcttgagaggattctgagcagaaggaaagaaca

SEQ ID NO: 199685 - DNA, 201 bp, Homo sapiens
aggcagaaagtggagagtgtggtgctcaatgtggcctttgcaattctacttacctccagtggtgggtgacagtcctggccttctggccttattcacgtcaytgcacttcaggagggcaaatgtgcgctgtaactgaggtggttttaaattatctgtctcttgttctaatatcccagggcttccagcaaaagttctccttcc

SEQ ID NO: 199686 - DNA, 201 bp, Homo sapiens
catttgggtgagtcatcactcctcattctaggtgggacggcactctaagcacattctgagaaagcaacctccgagcagtactcctcttgtcctggtagaaragaataggtctcatgatagctccttccgctgggtgggttgtgtaatttgcaacaaggattctaaaaggaagtttaaatcaatcagaggctgtgtatgtgg

SEQ ID NO: 199687 - DNA, 201 bp, Homo sapiens
gctggggcagcaaatggtgaatatccatcactccactgtgggtggccagtccacaacagggagcctgtggcatgcagttggcaatgcgtgacgtgactgaytgaattttaccaggagaagaagaatggaacttggcattctggaaaaaggaaaatttacaaacatttggaagtaggaggaattgtagtgctttgtgggaac

SEQ ID NO: 199688 - DNA, 201 bp, Homo sapiens
acctgggccttggagaggaggccgtcttctcctttgttgcccaggactgagagacctgctagtgtatcctggcaactgttgtgctcacctcaaggatgacragtccctcagaactgtgacttttcttatgttgtccacatttcagaggcttctttttcacatgtgccagcaaatgactgcccacagcaagtctcttgttct

SEQ ID NO: 199689 - DNA, 201 bp, Homo sapiens
gaagaatgattcctttggcaaccgtggaattatttactgactagaagaggaaatcttctgtttgaataacccctttgaactgcctgacacgtggtggaagyttgtcaaatgtttgttgaatgaacagaagtgtccagggaacttagactgttttgagagcaatcaaaaagcacatatttattcagagatttaccatgtacc

SEQ ID NO: 199690 - DNA, 201 bp, Homo sapiens
ggaagccagaagacatgggagccactgatgcagtccaaatagctcagcctcacagagcagaaaagagggcagggaaggctggagaggcagctggggcagcwaatggtgaatatccatcactccactgtgggtggccagtccacaacagggagcctgtggcatgcagttggcaatgcgtgacgtgactgactgaattttacc

SEQ ID NO: 199691 - DNA, 201 bp, Homo sapiens
aaacaccccagtattattagagctctaccacacagattctgcaacatggggaaactcaatttaatacattttcattgaatacctacctataagcctccgtkgtatgaaaggcatacaaaatgtgtatttactatatatattgtaaagtgattatatatactattgtgaaactagatcactatttggtctactagctaatat

SEQ ID NO: 199692 - DNA, 201 bp, Homo sapiens
acagcatttagtccattgcatgccctggtattataccatcttgtggatccttcccttcctttctattgtgtggcccttctctctcccttcctttcagagcraatacagagtgagagagcctttggagccagacatctgggctccagtcttggttttatcactgattcactgtatggcttacctaaattacttaaactttct

SEQ ID NO: 199693 - DNA, 201 bp, Homo sapiens
ctgcttgtcacctttggttggcacatgatttgtgctgtaccttatgcataaaagaaagaaggttgtatttctcattctaaacaaatcaaaataggtctctyttttactcatcttatgaattccaaataactctacctcaaattagtgaagtttaacagaaaaatctattgtgcttatggcaagaatcttcatcacctgatt

SEQ ID NO: 199694 - DNA, 201 bp, Homo sapiens
cacaggaggcaaaggttgcagtgagctgaaattgtgccactgcactccagcctgggtgacgagtgaaactgcatctcaaaaaaaaaaaaaaaaattacacyatagaaacatcccagcattggcacagaagccatagcattttatacttttttggttcactgaggagttttgtgtttaggtaaaaaagagacagtagcaact

SEQ ID NO: 199695 - DNA, 201 bp, Homo sapiens
agatttaaattttttgatactactttcagttcactgcaccaagacaaccattcatctgtctctgggtaccttcacatcccttttctccaaaaccacacgcycttggtttctttagctatattgcaggtcttgagatcaggtaatgctgtgttccccagctctacttttaagtaattattttgctaaagtatcttcacctga

SEQ ID NO: 199696 - DNA, 201 bp, Homo sapiens
agttgaggttttgcttcctttcttcccagaattgctttggaatccttatgcagtttgctctgctttctttgtagtgaccaagtttatatactggcacttckgaatcccaagaaaatgacttgctattcaattgacatttcaaaatctaagatggtacccttgcaaccaagaaaatataatttattttataaaagaaaaaac

SEQ ID NO: 199697 - DNA, 201 bp, Homo sapiens
gagtgaagccacactaatatctcaggatttctactgcacaaagctcaggtgagggttagatgtatactgtcactttatttttgtttagctcaggtttaaarttctcctatttgctgtcttcttgatcacttccaatctactctctttagtttaccctttacccaagagattgaatgcttgcttggataccttaagccattt

SEQ ID NO: 199698 - DNA, 201 bp, Homo sapiens
  misc_feature (1)...(201): n = A,T,C or G
aacgaacgaggagaaagttggataccacaggatacttttgttgcaaaattatggcccgttttcacagcttggtattttgtagatgataagaagtgcatttncttttctaatggaaggtgtgtaccaagaatggaaaactgtttttatgtttgataaacattgggtctaactacaaactaacacctcatgatagtcatgaga

SEQ ID NO: 199699 - DNA, 201 bp, Homo sapiens
ttatgtggctgaaatgtattcaactgcgcatgtgtacataagacttaatctctagacatttcatgataatttgacagcataattgaagtgagggggaaagrattgagtggtttgtttcacttacatttcttcacccacccctaaaataaaatattctctgaagcaaatgtcaggaacttcttccaccactgtcaccatgtg

SEQ ID NO: 199700 - DNA, 201 bp, Homo sapiens
tgcatacatcttcctttaagaccaaattctgaaaccacctatagataattcatgatatatcatagaaaacagacatacatgaatcatagtgagaaatatarataacgaacgaggagaaagttggataccacaggatacttttgttgcaaaattatggcccgttttcacagcttggtattttgtagatgataagaagtgcat

SEQ ID NO: 199701 - DNA, 201 bp, Homo sapiens
aaagtgctgagtggagtctgagccaggttgaagaaaaacaagccatggaatgggggttttcagagaatgtcagacatggcacattacgacagttgtctgarcatagttttttgggaagctccaaatgtattttgccctttccagtggctgctaggctgctggtttttactgggatcaaggagctgttggttttcagtgcta

SEQ ID NO: 199702 - DNA, 201 bp, Homo sapiens
ttgaatggtggacatcctcagtatcaaatgctgtgaagtcagcaccagcacactcaacacccaagggggtggttcacaaagtgcatccatagccctgccaygcccagtgtgacatgactgaaagtgatgatcatggtcactttcattctttcttcctgacctgaatctgcctgggaatatgaacattgggttcatccttac

SEQ ID NO: 199703 - DNA, 201 bp, Homo sapiens
ttcctctcttgtccttcttcctctcttgtccttcttctgtcttttcttgcttctccctctttccatctgtattcttcttcctctatttctccaatttcttytgtttcccattctctttctaatctcttatctatatttcatctcttcttcactctgtcttccatagttacctttcccttctcctgtgagtacctcttattt

SEQ ID NO: 199704 - DNA, 201 bp, Homo sapiens
tgtctaatagttgtcaaagtgatttactattttattcttccagcaacaatatatgagagttcttgttgttccacattcttgccaacatttagtgttctctrtctttttattttagtgaaatgaaatcacatttcattttggatttactttacattacccagatagctaaagtattgagcatttttttctgggcttattggg

SEQ ID NO: 199705 - DNA, 201 bp, Homo sapiens
aaaaattaaactttactgccctttccagtgtgttttgcatttacaggcgcatccacagtacctgccaggagacccagtgcatgctgggtggtggccatatrgaatggcagtgtactgtgcaagtcaccggattgatatcaaactctgtaacttcctaactgctagagagttttctctctcatatctcagtccccttgatga

SEQ ID NO: 199706 - DNA, 201 bp, Homo sapiens
catgcctgtaatcctagctctttgggaggccgaggcagctggattgcctgagctcaggagttcgagagcagcctgggcaaaatggtgaaatcccatctctwtcaaaatacaaaaaattaggcaggcgtggtggcatgtgcctgtagtcccagctactcgggaggctgaggcaggagattgcttgaacctgggaggcagagg

SEQ ID NO: 199707 - DNA, 201 bp, Homo sapiens
gttctactttttacttctgtgagatcaacttttcctagcttccacaaattaacgagaatgtgtggtggttaacgttctcttcctatcttattttatttagsataatgttctccagtttcatccatgttgccacaagatttcattctttttaatggctgaataatattccattgtgtatacatactacatttttttttttat

SEQ ID NO: 199708 - DNA, 201 bp, Homo sapiens
atgatgttagctgggtcttgaagcataaatcggtactctccaaacaagtatctttattccaggataatctgaggaggatatttattccaggataatctccrttttagaacgaagtgttgatttcattattttgtggtgactcactctcccacctggtcaaggttcctcaccactagatggattttttgtgtatgtgctgtt

SEQ ID NO: 199709 - DNA, 201 bp, Homo sapiens
ggtttgtgtggttcctgggagttagaacatgggcatcatttttggtggttgtagtggtgagcactgttctgcccaccacagtggttttctttgcatttatsctgttttaggtccactggtctccttggacctaaaggtttatttttttccccaacgaactaggaatatttttattcatgtattttatgctcaattctccct

SEQ ID NO: 199710 - DNA, 201 bp, Homo sapiens
tcctgggagttagaacatgggcatcatttttggtggttgtagtggtgagcactgttctgcccaccacagtggttttctttgcatttatgctgttttaggtycactggtctccttggacctaaaggtttatttttttccccaacgaactaggaatatttttattcatgtattttatgctcaattctccctttctctgcttct

SEQ ID NO: 199711 - DNA, 201 bp, Homo sapiens
ctgtgccccagtggtcaggattctcttttcaatggcgctcaggctgtctcatgcaggtgctactctgtgttttcattccatgcaccttgctcatatttatstaccccaaaccgttcatggaactccaccttccatttcttttgctcctgagccaccttgagccccttgcacgtggacctccacatactttaaacctcacca

SEQ ID NO: 199712 - DNA, 201 bp, Homo sapiens
cctgtttgccacatcataaagacatgcatgagagtgatcatgagtagcttgaaagtgacacgtggtttttcatttgtgaacacattatcttgctgtttcaktggtcctcagtcctgagcctgtgcatgtgtgctgtacccaatattgccacgtgggtttgttggctaaagctgggtgctgcccatgttgtggttgcagtct

SEQ ID NO: 199713 - DNA, 201 bp, Homo sapiens
tacagcatttgtttgtagatcagaacagtatgtgtgctttcttctgaggtctgatcatggtgagagtgtaggatgcatgctgaagtttcacagcagtgtcsatacctttgtgctcggtgaatccacctccctatcatctcctctggtgacagatacactcatgcgcacctactctttaatttcaggccaatcaatccatct

SEQ ID NO: 199714 - DNA, 201 bp, Homo sapiens
tagaggaatgatgaggaggaaagaagaaaagggggaggaggaggacggggatgaatttccagttatctgatggatctgaacatgtttttctttttttactrttaatatttggtttctccttttgtaaactacctgttcaaatctttggttcactttgtgggggaggatgtttatctttttcttattagtatctattagttg

SEQ ID NO: 199715 - DNA, 201 bp, Homo sapiens
ttccagttatctgatggatctgaacatgtttttctttttttactattaatatttggtttctccttttgtaaactacctgttcaaatctttggttcactttktgggggaggatgtttatctttttcttattagtatctattagttgtagaaaacatcttttattttgtggctaatctttttaccttcttcatggtgtttttg

SEQ ID NO: 199716 - DNA, 201 bp, Homo sapiens
cagtggaaacattaagttttaatgttacatctggaaactggagccctactccttgttagaagataagcttggcagtgattgattgcactgtcctctgcatktcctctgtattgaatgcctatcacttcgtcatttaaattgctcctggagccatctcctgggcccaggctgcttccctggctctgagaactcatcttcctt

SEQ ID NO: 199717 - DNA, 201 bp, Homo sapiens
ggcctaccttgcttaacatgaagaccttggagaggagagtgcagagcatgtgcatggtctggggacctcactgtgttgggaagaggaaaaaagtccaggasactcagtagttccttggtttctctcataggaacacatagagtttttttctccttgtttattatacagttccatgcccttcttttagtagttattactgta

SEQ ID NO: 199718 - DNA, 201 bp, Homo sapiens
atgattcttcttcactgaccacttgagaatatatttactgggactagcagaaaatcattgagagggattctaggatggtaaaccgtgttcaggtaaatgcstttttgtttgttttgttttagggaagcacatagttagcctgctctttacccaggtcgcttggagagtgttggtttctccagtcacgggtggttggcagag

SEQ ID NO: 199719 - DNA, 201 bp, Homo sapiens
ttttctattcttttttgtttagtcttacaagaggtttgtttaccttgttagtctttaaaacacaagcagatgatctcttgcgcttgatctccatgtcacarattttttccttcgggtactttgttccaggaatgaggctggggctgatagtggcggtgaggaaggaaaggagagtaaggtttgctcttgcttcacccctcc

SEQ ID NO: 199720 - DNA, 201 bp, Homo sapiens
cttgcttcacccctcccccaacccaggattgcctgttctttccatctgacagcaagtagaatgacttaggcagtaaggaggaggatatgctttgagagggrttgagggaaaatattccagggaagagtgtagtgtgaaaagatagaaaatctcaagacatagctgcagtgcaaaggagagctatggtcttgggtcaataaa

SEQ ID NO: 199721 - DNA, 201 bp, Homo sapiens
ataaatgtatgtatactgttgactgtatgctgactgtatcctctctcctctccctacacacgaaactctgtgactcccagtacccagtggcccataagagmaagaggccctgaaatttaagcttccttagtttcataataaatccatctctgcttaagagtagatgttcattattttatcatatcaagtacactgaagctt

SEQ ID NO: 199722 - DNA, 201 bp, Homo sapiens
ggaagagtgtagtgtgaaaagatagaaaatctcaagacatagctgcagtgcaaaggagagctatggtcttgggtcaataaatggcaatgaatgcattaggkcagggactgtctcagttttcctctcaagtcacagaaaagcaatatctgacgttctcagaagactaacacatgctaggttaaatagacagcgactgtcacg

SEQ ID NO: 199723 - DNA, 201 bp, Homo sapiens
ggaaaataattcaataggagatagatccattgaggctatttagtacaggaggctagttatgggatgctagaagaactgaaaagaggtcaacccatagattrgcaattcataaatcgacaactgcaggaagtctctgtcacctctagggctagagggacagcgagagaagatggtgttattagcatcaaggagctcaggcta

SEQ ID NO: 199724 - DNA, 201 bp, Homo sapiens
acctgagaggcctgttgatgggcatggtgggagggtcatacggcagaactagaactctggagaagggaatcgctccaggagagttggagcctcagtgaggrctgcctgtctgagttggagccacagggacaggttcgcctggagagagtgcttctcagtaggaaatggaagctcaaaggaattactagctattgccagaca

SEQ ID NO: 199725 - DNA, 201 bp, Homo sapiens
cattttgtgtagttcattcaacctacacttattatgtgtcaggcactgtcttagttgctggggatgaagataaatgaaaagactagtttcgctcctgaagraactcacagttcagttttgaagaaggtcacataagtcacttcagaacaataaaactgttattcaaccgtgtgtataatatggttgtggcacaaagggaga

SEQ ID NO: 199726 - DNA, 201 bp, Homo sapiens
tggagcctcagtgagggctgcctgtctgagttggagccacagggacaggttcgcctggagagagtgcttctcagtaggaaatggaagctcaaaggaattaytagctattgccagacactgattgagaaaaagagatgggaagaaatacttactctctcctccctttcagcccactaatatttatatttgtatttttatttc

SEQ ID NO: 199727 - DNA, 201 bp, Homo sapiens
ctcatttatatatgtctatctatggttactgtttcatggctgggcttaagaatgaaagtgaggtgtatttcttaagttagctgtcagaaagagagttggtkttcctcatctctgagcttttaagcaagccccgaggcttcatgttgaacaagagaagatgctattcaaaaagggatgtgagaaacaaacatcaaagccagt

SEQ ID NO: 199728 - DNA, 201 bp, Homo sapiens
ttgcaaactacatgagaaataatcacatatacatctcatttatatatgtctatctatggttactgtttcatggctgggcttaagaatgaaagtgaggtgtrtttcttaagttagctgtcagaaagagagttggtgttcctcatctctgagcttttaagcaagccccgaggcttcatgttgaacaagagaagatgctattca

SEQ ID NO: 199729 - DNA, 201 bp, Homo sapiens
tgtctgatattctgcttctctttattcctgctccatttttaacccatacaatatgcatttctctctgatatcaaggtcctcatggtatatctcttgacttwtataagctatgtgtgttctgcaatctgccaggttttataatcttggtttacctcagttttgatattgtacgtaattctagacttctgtttggtttttaac

SEQ ID NO: 199730 - DNA, 201 bp, Homo sapiens
agctttggatatgatggttagaggcacagctcagggaaatatagctgcattcatacaatcctattgcttcagtatctactgtcagatgcttttgaaagacrcatatttttaagattgtgttttttctctctattggaaaataggtcactgtacatttatttaatgtgcagcattcacaaatcaaacacactctgaccattt

SEQ ID NO: 199731 - DNA, 201 bp, Homo sapiens
aggctaaagtgcagtggtacgatctcagctcagtgcaacctctgcctcccaggttcaagcaattctcctgcctcaaccttctgagtagctgggattacagstgcccgccaccctgtgcagctaattttttttgtatgtttattagagacagggtttcgccatgttggccaggctggtctcaaactcctgacctcgtgatcc

SEQ ID NO: 199732 - DNA, 201 bp, Homo sapiens
ttttggtcaatttttctaattagttataagactaaacccaaagtattatttatcttagaaaaagattaaacagggatatgattctagtatataagtatcartttcctgcctaaacttataataggtactaggtctgtccataattatgttttcataatgtttcattaaggaaaatagagggatattcaggaaaacactatc

SEQ ID NO: 199733 - DNA, 201 bp, Homo sapiens
gcttgcctatggggctttataaacctctgaacacgttgaccttgggactttggggttgtcctgctgagcgctagcagccaagtcatgggagttgaggtccraagcccaaggagaggggtcaggaccattttcaaagactttggcctgactactgagaagcccctttggggttttccttcagtacttactccaacgtgtttt

SEQ ID NO: 199734 - DNA, 201 bp, Homo sapiens
gccaaaagatgcgtaagtctggaaatattctccatggtccatatgtattttaggcaagtgagaattttctgcttcattatctgattaccttgtgaggtatwtcctgaccatctgtcatctaccttctcacctgtactctccttcctttaaaacttcatccaaagttctctcctactctttattggcttagttcccttcgaa

SEQ ID NO: 199735 - DNA, 201 bp, Homo sapiens
atcaacaattcaaactactctaggaatctaaaactgaacaaagaactttctagcaagtcagttggaaatgttttataaattagttggtcattaaaataackcctgtgttacctattaaacataaaagattattcgagataatcccaaacacacttcatagcaaggctcagcgtgagaagagggaaaatgatctagtattta

SEQ ID NO: 199736 - DNA, 201 bp, Homo sapiens
gaaccctgaaacatggaaatgtaattagttccatgattttggccacctgagcaccacatatcaattagtttcaaatatattttgtcatgacagtccacatrtaagatgcatttattaaatcattataagctctctttcctagggcgcacagaggctagtaagttatctatttctttaaggagctgatgatccagttaagac

SEQ ID NO: 199737 - DNA, 201 bp, Homo sapiens
cttatgcactcacagtattgttggtttctgcctgaagcccctttcctggctgtcatccctttgctcactgtggcctcatagctggtgattccttgcattasgtctgggaattctggagtgaggtgccatgagctcagactttgccctggtgtttttggtcctgcagcagcctctggcctctgagctcctctgagatgggga

SEQ ID NO: 199738 - DNA, 201 bp, Homo sapiens
catgcccaccatcctaaaacctagcatatatattattgtgttgttatttaagtaaatgttggtcatgtttttattagaacagtgtaatataatggactgtkatctatactgtattccatattgtcttagtttaaacggatatgttcccccctctgcccaccccgtaccacacacctacaaataagtttcttttgaatacca

SEQ ID NO: 199739 - DNA, 201 bp, Homo sapiens
ggaggcgtgaaaaatcagaagtattttggggctcacacttgagattggattggggaagatacggctaaaagtaagtgggagtaatgagggggctgtcccastaattgggttcagatgacatttgcttgattttagggatgtacgagatattcgtggatcttgtgttgaagcacctaatacacgatgtcccttctgaagacg

SEQ ID NO: 199740 - DNA, 201 bp, Homo sapiens
aatcctgaaaacggtgcctgtgccactgcacagatcatagtgtcaatagaaattgttacccagaagagaagagtgctctccaagcagtatattgatgagtwcagtgccgtttcttaccagtggattaagcccataccatcctgtactctgtgcaaggccttccattaggttttgtgggaaacaaaggcatgaataaaattg

SEQ ID NO: 199741 - DNA, 201 bp, Homo sapiens
aaatcagtttacaagactatgaaggattccactatgacaaggagaaactccgagaagcttgtaagttggaagtgcctcattgatttcatgcgatcagcctrtcttcagcttcttgatcctccttggtttgatgggtagattcatttatccttgtgcctgaaaatcatggttagagaagtgaagtgaaacacagtaacatgt

SEQ ID NO: 199742 - DNA, 201 bp, Homo sapiens
tatataaagcaagtaaattgtctgttacccagtgggagcttttgaaagtaggctaccagcaagctcgatgtgatcgcttctaactactgaagacctacccmctatatctgggacttcctgtataggaatacaagagacttaaaaaaaaaaaaaaaaaaaaaaacccaaaggtctagacacttgctgagctctctgacatac

SEQ ID NO: 199743 - DNA, 201 bp, Homo sapiens
tgaggcaagttcattttaaaattggaactaattttttttttaaacccacaagtcaaaatacttagtcttttagatcgtagatatggatgaagttaaatagytctttaagaacagcactgcatggaaaataactaggtttactagctaagtttagcatataaagctctttactgaatggcttctttgtcaaccccaggctgg

SEQ ID NO: 199744 - DNA, 201 bp, Homo sapiens
gttcaggtaaatgcgtttttgtttgttttgttttagggaagcacatagttagcctgctctttacccaggtcgcttggagagtgttggtttctccagtcacrggtggttggcagagctggtcagtggcttgcctctatccacattgcatctctttctgcctgccagtgaattgttcccttcctgatgttcccattttggggt

SEQ ID NO: 199745 - DNA, 201 bp, Homo sapiens
ctcagaagactaacacatgctaggttaaatagacagcgactgtcacgaataaatcaaagtattactaatagtaaatgattcattctagaaagtcttggggmtttctattagggctcttagagactatgtcttataagatgctaagcctagaccaatctgagacatgaaaagtatgtatttctaataagttttaaaaaatta

SEQ ID NO: 199746 - DNA, 201 bp, Homo sapiens
taggttaaatagacagcgactgtcacgaataaatcaaagtattactaatagtaaatgattcattctagaaagtcttggggctttctattagggctcttagrgactatgtcttataagatgctaagcctagaccaatctgagacatgaaaagtatgtatttctaataagttttaaaaaattacttatactctaatttgttcc

SEQ ID NO: 199747 - DNA, 201 bp, Homo sapiens
aaaagctaattacagtacttcctcttgtctctgtgcaaccatcttggattgattgtgaaatgccggtaggggcggcattgacagttattaactctacctgyttgtaatatttgctgttgttttatttttgagtctgagaagatggcttaaaagtggtctagactactgtgtatgacttcaaataccaagaggttggaaggt

SEQ ID NO: 199748 - DNA, 201 bp, Homo sapiens
agggacaggttcgcctggagagagtgcttctcagtaggaaatggaagctcaaaggaattactagctattgccagacactgattgagaaaaagagatgggargaaatacttactctctcctccctttcagcccactaatatttatatttgtatttttatttcttgttcctttgtgtatgacgtgaggtagaatactgatttt

SEQ ID NO: 199749 - DNA, 201 bp, Homo sapiens
tgttcctttgtgtatgacgtgaggtagaatactgattttatttttctctatatagtgggaaatattcccagcctctttggctaaattatccatcatttctycaataatttataatgccacatcaccgtagttcatgtactcgtatctttgagtctattctgttctgttattcatttccactggctttcactattttaatga

SEQ ID NO: 199750 - DNA, 201 bp, Homo sapiens
cattctctttccttaatatagcctgttgtgacttcatagtactgagtgggaacaagctggtttctttgaaagaatgatagtgctcaatcttttattgtttygtttgtagtaacatgagtaatatataaatatgctccctgtaaaaattaaacatctcagataagagagtctcctttcaccagcatttaaaatgataagcat

SEQ ID NO: 199751 - DNA, 201 bp, Homo sapiens
gacgtgaggtagaatactgattttatttttctctatatagtgggaaatattcccagcctctttggctaaattatccatcatttctccaataatttataatrccacatcaccgtagttcatgtactcgtatctttgagtctattctgttctgttattcatttccactggctttcactattttaatgactgcatctttaagta

SEQ ID NO: 199752 - DNA, 201 bp, Homo sapiens
caaactgtcacttttttgtaactttctcatgaatctcactgggctgctcctatcttctaaaaagaatataaaatggatcctccattctctttccttaatayagcctgttgtgacttcatagtactgagtgggaacaagctggtttctttgaaagaatgatagtgctcaatcttttattgtttcgtttgtagtaacatgagt

SEQ ID NO: 199753 - DNA, 201 bp, Homo sapiens
acattttcctgtgtacagggcaacatttctttatgcagttttattcacattaaccagtactattggccaccttctatgtgctggtcacttcgtggcccaargtaagacagagtctctgtcttctgtaatccaatcagaagggtcagaaaagcaagtttaccatatagtacaagtagaataggatgagttccataagaaaag

SEQ ID NO: 199754 - DNA, 201 bp, Homo sapiens
ttagaatggaggaatttagaatacagaggggtaaaaaaatgtcaatctatggacataaatccttgattcctctggaacgggaaaatattatagacagtaarggcactgaaaaactttcagagtcttttattaatgccataaaagatattgtaattaaatccaagagacatgcatttagatttttcaaagatgattctaata

SEQ ID NO: 199755 - DNA, 201 bp, Homo sapiens
aaatatttttgaaaggtgtatagttccctcttgcagatagcacaaccttgtttcagaatcctagagtctgtgttgattttcctattggtgcttgttataarcatcacagggcatcttttctccttctctaaatttctaatcacatggagtgacagggattctttcattgcaggctggacctgctgcagcactgtttcatgc

SEQ ID NO: 199756 - DNA, 201 bp, Homo sapiens
tgggacggcactctaagcacattctgagaaagcaacctccgagcagtactcctcttgtcctggtagaagagaataggtctcatgatagctccttccgctgrgtgggttgtgtaatttgcaacaaggattctaaaaggaagtttaaatcaatcagaggctgtgtatgtggaaacagtgcgattcatgtgctgagatgttttt

SEQ ID NO: 199757 - DNA, 201 bp, Homo sapiens
ttaaggctgggctcactcaaccttatgatgtagtgatctgacagaactcagctcatgacacctgatgattcatggacaggtatttctccaccagagtacartaacctgccagaaaatatttttgaaaggtgtatagttccctcttgcagatagcacaaccttgtttcagaatcctagagtctgtgttgattttcctattgg

SEQ ID NO: 199758 - DNA, 201 bp, Homo sapiens
tcttttaaataccccacctagcaaaataaaaatttggcacctctctgagttactctgttttttctcaatgattctaattccttaattccttatgaacagcyatcttttttgtgtgttttaagtttttatcttctctaggccagaattaatttggagaacgagaactaactagaacaatgatattgttagtcctcaggagct

SEQ ID NO: 199759 - DNA, 201 bp, Homo sapiens
aatgtgggtgatctgagccacctactcatgcatccctggtactgcttgttccagatctcagatggtcccacttactataacaatggattaaggctgggctsactcaaccttatgatgtagtgatctgacagaactcagctcatgacacctgatgattcatggacaggtatttctccaccagagtacagtaacctgccagaa

SEQ ID NO: 199760 - DNA, 201 bp, Homo sapiens
aaagtactcaggcattgcaaatcaggcaaagttgaaaacaccccagtattattagagctctaccacacagattctgcaacatggggaaactcaatttaatrcattttcattgaatacctacctataagcctccgtggtatgaaaggcatacaaaatgtgtatttactatatatattgtaaagtgattatatatactattgt

SEQ ID NO: 199761 - DNA, 201 bp, Homo sapiens
tgttccaacccgtctggttgacgaatattgtgaagccttaatttattctgcctgatttcagtcccatcagcagaaactttttgtggttttgtggttttggrctagtcctgtgctttttatgactcagatttttatccttaaaatgataaaaatttttgtggtagtttgtggtagatattccctacagtcccttccagaatg

SEQ ID NO: 199762 - DNA, 201 bp, Homo sapiens
ctcaaagcccggagctctggggaccagaagcacaaactcccaaagtgggccacagtaggcatagccactgttactttctctcactggtttctgtatttctrtattttgtcatggagacacagcaccatgaaatgatcatagatttagtgagtaaacatactgagtctggtggatggtgctcataggatattttctcaaagc

SEQ ID NO: 199763 - DNA, 201 bp, Homo sapiens
taaatgagcagatttaatcctactattgaggaagaaatgaattacccttctcctggtgaattaatatttgtcaaaccattcagttacatttaataaattayctctattaaagctttaaagttacttaacccagaggtaacagcagagttaatagaattcatttaagtgtgtgagttagatctttgtttctccacacactag

SEQ ID NO: 199764 - DNA, 201 bp, Homo sapiens
tcaccgtcatgggatttagaccctcaaagcccggagctctggggaccagaagcacaaactcccaaagtgggccacagtaggcatagccactgttactttcwctcactggtttctgtatttctgtattttgtcatggagacacagcaccatgaaatgatcatagatttagtgagtaaacatactgagtctggtggatggtgc

SEQ ID NO: 199765 - DNA, 201 bp, Homo sapiens
acttaccatgttcagtgtggagttgaggaatgtgagagggatgtcatattatcactggaaatggtggtggctggggagtcatatcgggcatgggacttctytgcggtacttctggggccctctgaaccccctactctaagaagatcagaacaagagatatctccacaccatgctagcactacttatttggaattcagggag

SEQ ID NO: 199766 - DNA, 201 bp, Homo sapiens
agaagtccacatttacaaaatccagatggattatgtctcaacagaagctgttggccggggttcccagagtcactaggataaagctggcagcttggcttttyctaaagggtccttcctcctggctctccgggtatgtctccgttgtctggattttagaataatgtgccttttctatttcttcacccttttttttagaaagtg

SEQ ID NO: 199767 - DNA, 201 bp, Homo sapiens
ataaacacttcatatgcagaatgcttctgataatgtgtttctcagaacagaacaaaacacgctgttcgaagagcatcaagtgagttttcctgcggtactcsagaggcaattccaaccataatagagcatgagactgtcaggtatgctgtcagcccagcatacacatgaacagcaaagctgcccaaggggtaggattgaagc

SEQ ID NO: 199768 - DNA, 201 bp, Homo sapiens
ataggctcactgacacgtatgcacacaggtgcgtctacagcaggcttgagtgtttaggttgagtggtatgtggttgaggtgtaagtgagcagacaggcagrttggtgtcagaagctgggagctgcagggaacagagtaggtagatggtgaggtgagtgagcgtgtatgttgtgtaagaggaaaaatggaactgtcagactt

SEQ ID NO: 199769 - DNA, 201 bp, Homo sapiens
tgaccaggggtgaattggtaattttacatctttttttcaagcattccaagtagaggaggcaccccctgtgacttccagtggcattctgcagcaattaagtygcattcattcagctcatcatttaccttgcagccatcaactcctttcaaaatatccctttgattgtcagtaactacggacgtgaagctgtgggtttcttcc

SEQ ID NO: 199770 - DNA, 201 bp, Homo sapiens
catctactgggaggactgagatcagaaaattattcctccaaagctgtcacttccactcctgtaaattaatataaagcgagaatgggagagaagatattgcytttttggagtacaatgttaataaagcaagtttaattgcttcctttactctaaatctgccactaagagtagggcgagaggctcaaagagaatattaatcca

SEQ ID NO: 199771 - DNA, 201 bp, Homo sapiens
gaataagccatttttatttcaaccttttggttaatttttagaattctgaaaatgttgattttgacaatttttgcaactgctctcatactttcagggagcaycattctgtctggagtgcttctttttcctaggtggttttcatatcaggactgacttcttttgagacacaaatatcagactaggaagttgttttgtgagtac

SEQ ID NO: 199772 - DNA, 201 bp, Homo sapiens
tatcatcattaaccaaagtcaccatgttgtacaatggatctcttgaacttagtctgctgaactgtaattatacgtcctttgaccaatatctccccaacctsaacagtgctattttctaaaagccaaatatatctaaatataggaatctatttaaaaaaaaaaaaaacaagatatttcaagcccagctcacatgggggtcat

SEQ ID NO: 199773 - DNA, 201 bp, Homo sapiens
agatctccctggaatcaattccttctctccattcctcctgtcattgcttcagatcaggctttcaaatctgttgattacactattaaattagaactgtgccygagacatcaatgagtatgagctattattatctttattattgctattctgtagcctcctgttcccgtctccagtttttcttcatttcaatccatactgtgt

SEQ ID NO: 199774 - DNA, 201 bp, Homo sapiens
cttgtaagttttgatcatttcatggagcttaccaagaaaatgcacatatctaaaacctattgtaaagtatattataccagatataaagactgaaatagtcrtgacacccattatttcatttccaggtttattgactaaaaacgataaaacatcataagaggtgcaatactttataaagtcctttgccttcccaaatataat

SEQ ID NO: 199775 - DNA, 201 bp, Homo sapiens
gagctccttttaagcaaatgagcaaaatatacaattaatatataaatctataatttccaagatagagtcccataagaaggaatatggaattctattcatcrtacgattaaaaaaaaaaaaaaacagtttgcttccccctttccccaataccgcactacacatttctggaaaatagggttgttgctcatcaggtcatacatt

SEQ ID NO: 199776 - DNA, 201 bp, Homo sapiens
atatagatggtttctatgcacctcacctcatcctctgtaagggcttgctgatctgcttatcgttgtgcctaatatttttctacattctagggcttaatgcrcaaatttcatgctttatttacctgttttccctattagactatgagttctttgatatagtttccaacgaagagcaaacaaggaaaaagtgtttattaaatg

SEQ ID NO: 199777 - DNA, 201 bp, Homo sapiens
agtagagacggggtttcaccaggttgaccaggctggtctcaaactcctgacctcaggggatccacccgcctcggcctcccaaattgctgggattacaggcrcgagctaccacacctggctgggagtctgtgattttaacgagcacctcaaataattctgatgcagatgggtcgcaaacctaactttgagaaataccgtatg

SEQ ID NO: 199778 - DNA, 201 bp, Homo sapiens
agagaatgggtcaggtagactaactagggctttttttcgttatctagagatgaaggcagatggacagagaccaaggtaatgtcaggacagaggaacgaacrttgctccttgaagtccctagtattacaaagtagagacatctaattaagcagtttagcttttacacaaaaagaaaaaagaaaagaggaaagagataaacta

SEQ ID NO: 199779 - DNA, 201 bp, Homo sapiens
tccacccagagctcggcaatcagtccacttatgtaaaggcgcaatacacttagggccccttccacatttaacattctatcttattgctttcaaatttattyttagaggtgaattatttatgtcctcataggtgtagaaatagtcttaccactcagcacttttcatacagtaaaaggttacttcaaaagtgcagcggatatt

SEQ ID NO: 199780 - DNA, 201 bp, Homo sapiens
agaaggacactgcaaagagtgaggcctaaaatggaaaccagtcatgatttttattttgctactttctttacggacacgaatgcacacagtgtagagcagcyttaactctgaattggaacaaggtcgtgtaagtgccaggacgttatttccagaagcccacagctgctgattcctacacccagtgatttccactgccttttc

SEQ ID NO: 199781 - DNA, 201 bp, Homo sapiens
ctggtggtggaacaagcctcggggtgagtgtgcttctcctggcctgtgaggctggccttagggtgacatccatgtctggttcgcctttgaacttgacatcrttctaatgacatcaaatgattttgaagtgtagattttcttgttgtgtttccttagagtggttattataagtctgtcttatgaatggccgtgaagaaacac

SEQ ID NO: 199782 - DNA, 201 bp, Homo sapiens
agagctcggcaatcagtccacttatgtaaaggcgcaatacacttagggccccttccacatttaacattctatcttattgctttcaaatttatttttagagrtgaattatttatgtcctcataggtgtagaaatagtcttaccactcagcacttttcatacagtaaaaggttacttcaaaagtgcagcggatatttactgcg

SEQ ID NO: 199783 - DNA, 201 bp, Homo sapiens
gaataatagtataattttcattttattaatgaatatttataagacttaaagataacaaaaatctttattagtacttgtgaaaaattatcattcaacactayattttgagaaaatcaatacggatagcacattttcaaaagaaagcaaaaaaacctagtcatcatgtaatgtttgcttactaaaccttaattgctctcattc

SEQ ID NO: 199784 - DNA, 201 bp, Homo sapiens
tgtcctcataggtgtagaaatagtcttaccactcagcacttttcatacagtaaaaggttacttcaaaagtgcagcggatatttactgcgggttttgttgcmttgagtgtgcagggaataagggagctcttgcagaagtcagacttgggggtaaaggagaaagtttgcaggaaggtttgggggtagtacatgtgccaggtat

SEQ ID NO: 199785 - DNA, 201 bp, Homo sapiens
ttttattaatgaatatttataagacttaaagataacaaaaatctttattagtacttgtgaaaaattatcattcaacactatattttgagaaaatcaatacrgatagcacattttcaaaagaaagcaaaaaaacctagtcatcatgtaatgtttgcttactaaaccttaattgctctcattctgatcttatttaccttctaa

SEQ ID NO: 199786 - DNA, 201 bp, Homo sapiens
tagtccaacagatacaacacttgttttttagatttttctatgtttttaatagataagtgaaaattagggtctgaatagccagggcggggatatcaaattgrcagagattcccaagccagattgaaatttttgaaaattaaaaattagatttctctcattcttccattatatatctttttataaacactagttgtaggatta

SEQ ID NO: 199787 - DNA, 201 bp, Homo sapiens
gttggaaggtgttcaagccattttcagtccggttagactcagcagaataccttcttaccaggcaggttttacattttatctgtcatgaggcctactcaagwctacaaaataaaaagagtaaaatcatatcagataataaggcaaaaagaattttagtaacttctcacatcattctcctctgctttcttgctcaccagtcag

SEQ ID NO: 199788 - DNA, 201 bp, Homo sapiens
gttggcgggaggtgtgtaatagactaggaaggggcacgtaggaaccttctgggtgttatacattttccaaactttggtctcgatggaggttcacatgtgtrtataaaatatttattaaactgtataataaaatttgtgtgctctatgtatgttatacaacaaaaatgtatgatttttcttttatttcctagaaggataaat

SEQ ID NO: 199789 - DNA, 201 bp, Homo sapiens
gttttctaagtaagtcattttccatcattgccttcaaggatgttttatatcaattgttcagatttccataatatagaagatgcctccatgaaaaaaaaaaaatgtttacctaagtttccacggaaagaatgagttagaaataagggagaatgtgaaatcaaaaagtcagagtttttgctgtcggagagaggcttgtcagct

SEQ ID NO: 199790 - DNA, 201 bp, Homo sapiens
tcgatggaggttcacatgtgtatataaaatatttattaaactgtataataaaatttgtgtgctctatgtatgttatacaacaaaaatgtatgatttttctyttatttcctagaaggataaataatactaaatacattttttttttactaagtcagaagaggttatacaaatgtgttgctccttaatgacagacttttaata

SEQ ID NO: 199791 - DNA, 201 bp, Homo sapiens
tgttttctaagtaagtcattttccatcattgccttcaaggatgttttatatcaattgttcagatttccataatatagaagatgcctccatgaaaaaaaaaaaatgtttacctaagtttccacggaaagaatgagttagaaataagggagaatgtgaaatcaaaaagtcagagtttttgctgtcggagagaggcttgtcagc

SEQ ID NO: 199792 - DNA, 201 bp, Homo sapiens
tttatctttctaagtttctgaatcagataaaagactcaatgttcatggaaacttctttctgttttgtgttgtgtatgtgtctgctttttttaaaaaaaaaatggaaatagcttgtttttataattataaacccctcacatagaaaactagtaatgtaggaagatatgctccaaaaagcaaaaaattgctggaaacctcaca

SEQ ID NO: 199793 - DNA, 201 bp, Homo sapiens
tcccagcctctttggctaaattatccatcatttctccaataatttataatgccacatcaccgtagttcatgtactcgtatctttgagtctattctgttctrttattcatttccactggctttcactattttaatgactgcatctttaagtattatatatttcggattctaacaggggcagtctgctatccattgcccctgt

SEQ ID NO: 199794 - DNA, 201 bp, Homo sapiens
caagggctgcgtgctgtgcctgaagggccagaggcgctccacactgctccctgttctttcacccagtgcctttctcgctctgctcaaatgtatgcacagaagagaatggcttcagtattcagatacatctagacaattagtctgtttaatactgcattgactatcacctaaatcaaatagtagtagcttttaaaaaaatta

SEQ ID NO: 199795 - DNA, 201 bp, Homo sapiens
attattgaatcatttttataagtatattagtcaagattctccaaagaaacagaacaaaagggagtgtgtgagtgggggagagagattgagatttattttawtctcacgtgaattgtgaattggaggctggcaagtcccaatttgcaccaatttgcagggtaggctgacaggctagagacccagggagcagttgatgtttaa

SEQ ID NO: 199796 - DNA, 201 bp, Homo sapiens
cttcttttttctttttagagtcttcagcaagttggatgaggcccactcatgtttgctttactcaaagtctactgagttaaatgttaatctcattaaaaaamtactttcatagaagcatctagaatgtttgaccaaatatctggttactgtggcttaggtaagttgacatgaaattaacatgacaacaagattccttaaaat

SEQ ID NO: 199797 - DNA, 201 bp, Homo sapiens
ctgcaatcagaacgtatgtgtatataaaacaagccccaaactcaaatgttacccattcatatatgttgaaggaattcaattatctttatttttatttttttgagacagaatctcactctgtcacccaggctagagtgcagtcatggctcactgtaactttgatctcctgggctcaagcaatcttccctccttagcctccct

SEQ ID NO: 199798 - DNA, 201 bp, Homo sapiens
ctgggattacaggcatgtgccaccacgcctgactaatttttgtatttttagtagagacagggtttcgccatgttggccaggctggtctcgaactcctgacstcaggtgatccaaccgcctcagcctcccaaagtgctgggattacaggtgtcagccaccgctctgtgccctgaggctgaattattattattcagtggatag

SEQ ID NO: 199799 - DNA, 201 bp, Homo sapiens
aaaaaaaaaaacagtttgcttccccctttccccaataccgcactacacatttctggaaaatagggttgttgctcatcaggtcatacattctagcagctctkttccccatccaaagtatatgaatatttttagaagcaataacatttagtttgaaaaattgagaagtaattgggtgaagaccttactgaattagtaagatgt

SEQ ID NO: 199800 - DNA, 201 bp, Homo sapiens
aaccaagacacttttgagggtgaaagtggctgctgttaataatgatgccgtaacattagggataaaccagaactgcatcaccctagcttatgggacattarggcatctatgtaaaactaaaactgtcctgcaaagccgggacctcctgctgccatgtggattgatatttggggactgatattggagggtactgaaagccag

SEQ ID NO: 199801 - DNA, 201 bp, Homo sapiens
ttttaagaaccttatatgtgattagttgaagaaacattattgaaattagagggccattataatttcatggcttcaaaaaatttcttacatgttcatacctyttagtttgtttctgtgacttccaaaaatagttcaagtacataatgcaaaattatagtgatgatttacctaatcctatgtaattgttcatcattttctagc

SEQ ID NO: 199802 - DNA, 201 bp, Homo sapiens
ggttttatgccctgtttagccagtgccatgccttttgcagtgcattttatttcattctcgtggagaacagagactgctttttgccatcttggcacaggggktcatgtgtggttgtcattagtcagttcccctagggatctcatgagaacagatcatatgaagcaatcacgttaaatatcatatttcttatctatcctcatc

SEQ ID NO: 199803 - DNA, 201 bp, Homo sapiens
tggacgtagtcttccccaaggaggagagagaggtactcactgccttccatctacataaacaaaggggtcatcaaagtaatcctttccataacaccggctastttgtatctaacaacaaaacaaatacattcttcactttataaggcagaaacccacaaacggatgtttttacagctgcactacattttttttatttttatt

SEQ ID NO: 199804 - DNA, 201 bp, Homo sapiens
ctagagatctatccaaacatgttaaagttgttgtaagtattgaatatgttgatttatttcatttgaatatgatatgactgccacaaaaaactcccaaatamttagtttatatattgaatcactggactgcatagaactttggagatcattttgtgtagttcattcaacctacacttattatgtgtcaggcactgtcttagt

SEQ ID NO: 199805 - DNA, 201 bp, Homo sapiens
ccttaatgtctcatagtaacctcaaactacatgctagaaactggactcattaactttatttccttgacttttctaccccaccatccagtgagcctattccmttcacagctgtacacatgaaactaccatccattcatttgtcctgttcctggcctctggggttccctcagtcgcttctacttctatacacctgtgttagtc

SEQ ID NO: 199806 - DNA, 201 bp, Homo sapiens
acaacaggtgtgcgctaccatgcccagatgtatttttggtagagacagggtttccccatgttgctcaggctggtctcgaagtcctgggctcaagtgatctkcccgcctcagcctcccaaagtgctgggattacaggcgtgagtcactgtgcccagctaaggctggataatttataaagaaaagagttttatttggctcaca

SEQ ID NO: 199807 - DNA, 201 bp, Homo sapiens
tttagatttttctatgtttttaatagataagtgaaaattagggtctgaatagccagggcggggatatcaaattggcagagattcccaagccagattgaaakttttgaaaattaaaaattagatttctctcattcttccattatatatctttttataaacactagttgtaggattagaacaaaaggagttagttctttttgt

SEQ ID NO: 199808 - DNA, 201 bp, Homo sapiens
gtttacagtcagggcagaaggtgaatggggagctggcatatcatatggtgggagagagagcaagagagacgggggaggcaccatactcatttaaacaactrattctcacatgaactcagagtgagaactcactcactacctcaaggagggcaccaggtatttatgagggatctgcccccatgacccaaacacctctgacca

SEQ ID NO: 199809 - DNA, 201 bp, Homo sapiens
atatttattaaactgtataataaaatttgtgtgctctatgtatgttatacaacaaaaatgtatgatttttcttttatttcctagaaggataaataatactraatacattttttttttactaagtcagaagaggttatacaaatgtgttgctccttaatgacagacttttaatattgtcttgaaactccattctgtggctac

SEQ ID NO: 199810 - DNA, 201 bp, Homo sapiens
tttgaggaaaaaaaagtttctgtaacaatcactgctaacctctttgttctaaatgttctaaatgcattatcatatttaatttttacaaccctatacagtargctctcatctccgtttgacaggtgttgaaaactgaagtatggtgaagttaggttccttgccaaaactcatccatacgtgagagatggtctgtgtcctcca

SEQ ID NO: 199811 - DNA, 201 bp, Homo sapiens
attttttttttactaagtcagaagaggttatacaaatgtgttgctccttaatgacagacttttaatattgtcttgaaactccattctgtggctaccatgaygaactgagttctgtctttcattttgatccttaaagctgctttgctttccagagtgttttaaattaagtaattgatgttattttgcattttgttgatctta

SEQ ID NO: 199812 - DNA, 201 bp, Homo sapiens
gtggctgactccttttgtacccaaattcagcctgtagatagtaagcatactcataaacattcacatcctttttgctcctttttttttttttttttttttttgcaattcagcaagtatgtcttattccattcattgattcattcatttaacaaatatttgtgtagtgcctaacaggagctgcctgttatagatggtacacag

SEQ ID NO: 199813 - DNA, 201 bp, Homo sapiens
ttttgatccttaaagctgctttgctttccagagtgttttaaattaagtaattgatgttattttgcattttgttgatcttatacaggttagagatagcttgwggaagtttagataaaaagcaaacacctatttaaacttgaaaagtaacaatgtgctgcatattaaagtattggataaatacaatttagaggttaataaact

SEQ ID NO: 199814 - DNA, 201 bp, Homo sapiens
tggaaacattgtggtctgctacatgactctcattttattaccggttagctgttatccttgttccgaattctgcctgagcttctttttgtatgtctctctttgcagctaatagaaagctataaaaatggaggcagtctgctaattcagggaccagaccactgttcactccttcactacgcagctaaaaccggcaacggggag

SEQ ID NO: 199815 - DNA, 201 bp, Homo sapiens
aagctcaaacctcagcgtcatgcaatatatccttgtaacaaacctgcacatgcatcccctgaatctaaaataaaaatgaatttttttttttttttttttttgagatggagtctcactctgtcgcctgggcaggagggcagtggcgcgatctccgctcactgcaactccacctctcgaattcaagcaattctcctgcctcag

SEQ ID NO: 199816 - DNA, 201 bp, Homo sapiens
agggagggggacaaaggctgaaaaacctcttgttgagtactatgttcactgtctgggtgacaggatcaatagaagctcaaacctcagcgtcatgcaatatrtccttgtaacaaacctgcacatgcatcccctgaatctaaaataaaaatgaatttttttttttttttttttttgagatggagtctcactctgtcgcctggg

SEQ ID NO: 199817 - DNA, 201 bp, Homo sapiens
ttttttatatttttttatttttagtagagacagggtttcaccatcttggccaggctggtcttgaactcctgacctcgtgatccacctgccttggcctcccraagtgctgggattacagatgtgagccaccatgcctggctgagaacataggctatgttttgaacttctgtgtgtgttacaaggctttgcattaactgctcc

SEQ ID NO: 199818 - DNA, 201 bp, Homo sapiens
attcttccctcctctaacaagagtatatttactactgtgtaagttaatttctttttaatgacaaaacagagcagaacaaaaataacaacttctccctcctrctggtaatgatttgtccctgtagaaaaaggaaataccaatgtcacattttctcataattagttaactgagtgaaactgaagtttcagggaaacctgccat

SEQ ID NO: 199819 - DNA, 201 bp, Homo sapiens
attttttatatttttttatttttagtagagacagggtttcaccatcttggccaggctggtcttgaactcctgacctcgtgatccacctgccttggcctccyaaagtgctgggattacagatgtgagccaccatgcctggctgagaacataggctatgttttgaacttctgtgtgtgttacaaggctttgcattaactgctc

SEQ ID NO: 199820 - DNA, 201 bp, Homo sapiens
ttcttccctcctctaacaagagtatatttactactgtgtaagttaatttctttttaatgacaaaacagagcagaacaaaaataacaacttctccctcctgytggtaatgatttgtccctgtagaaaaaggaaataccaatgtcacattttctcataattagttaactgagtgaaactgaagtttcagggaaacctgccatg

SEQ ID NO: 199821 - DNA, 201 bp, Homo sapiens
ttgttttagttgttataactttggtatgagtccagatatctgttggaggatatatcctgtaatttgtcctttgggagtgacttggttataattgagttttkcctgtttcatataaattataaaattagcgtatcaaattttgtggtgaaattttttatgaaaattgcatgaatctataaatttgtataaagaaaattgata

SEQ ID NO: 199822 - DNA, 201 bp, Homo sapiens
gctcttttcctactgccttccccatgtcccatctctggtgattccacctgtcgaggtgggcaagctcagtgggagctcttaggaccgcagtagaagctatrtagtcagcaggcagtgcagttggccccactgcaagaagaaataaagcttgccgtgtgcctcattcagaaggggacagccagccttgttgtacctgcttcc

SEQ ID NO: 199823 - DNA, 201 bp, Homo sapiens
ggtgcattttactaattgatttttaaatagaaatcaatatcgtatttatgagaagaactcagattggttcttatatttaccgcctttatacattgctagakttgatttgctaatattttgtttagatatttacatccatgttcataagtgtgattagtctttaattttgctttctattatgtagtatgtatatgatattca

SEQ ID NO: 199824 - DNA, 201 bp, Homo sapiens
gtctcaaaaaagtaaacttgactgatgttacagatggaaatatgtgcagatctttaattgcattgctaggtagagcctactgtactgagcgtcacagtacrtcactttgcaatgactttgggctatcataaatataaagttgctagagtgtccttttttttgccccatatcagatttttcctatagaatccccgttgtaaa

SEQ ID NO: 199825 - DNA, 201 bp, Homo sapiens
gctcatgttgctttcgagctttagagagttacttctactctgcttgcgggaccctctctagacctcgcctttcttgtctttatttagccataagctttctrtcacctcctaccatctctctggcaggcaccttcattgtccttcatgcaggtctcacctcaatgctcattaatttccgtgtcttggaaccacctctataga

SEQ ID NO: 199826 - DNA, 201 bp, Homo sapiens
ctattctgtatgatactgtctgacatttttatatattcaatatttctactactgactgtcattgaaatcatttgttggtgtgtcatgttgaatagcgtgasccctgttttgcagaacagaggaaaggcacagtgacacaatggtaagggcacagattctgctgccaccctgtctgggtttggaccctcactttgaccttta

SEQ ID NO: 199827 - DNA, 201 bp, Homo sapiens
tattctgtatgatactgtctgacatttttatatattcaatatttctactactgactgtcattgaaatcatttgttggtgtgtcatgttgaatagcgtgagscctgttttgcagaacagaggaaaggcacagtgacacaatggtaagggcacagattctgctgccaccctgtctgggtttggaccctcactttgacctttac

SEQ ID NO: 199828 - DNA, 201 bp, Homo sapiens
gacttggaaatgacttacgggtgcacatgggtctgcatattaaggtctcttgtggctgtgggagtgagtgggagtgacgggagctactgtgggcattcttktgtacatctggccatagcagtgggtcccaggctagatcactggcacttctttaattaaggctctgtttctgcccagagcaaatttgaggttctctgcttc

SEQ ID NO: 199829 - DNA, 201 bp, Homo sapiens
gaactgtttatgggagatcgttattaaagaatagatatttgatttttccattggtttggagaaactaggagtcaggcactaaggacgtgctgtgtactcawaacttttctccagctatccataaggctaatatacatttttgacaggaatttttttaagtaagaatttttttttacattgtatttatagatgtaaaagcac

SEQ ID NO: 199830 - DNA, 201 bp, Homo sapiens
tttcagcattgctagaatcaagagatgatattcttgttgactgttgaccatgcttttccagatcacccactgttgcacattcatgaaattggagtgagcawacaaatttgttgagagaattatcttaactagattcaacctctgtgcccatgaggtactgtcattctcagtgattcaaatagatatttgggtacaggtggt

SEQ ID NO: 199831 - DNA, 201 bp, Homo sapiens
aaagagagctgaagaacattaccctattattcataacagattttccatattaattatatagatacaataaggtgattgacatctctggacccaaattcackttctgtaaaataaagtggttgaacaatatgtactttaaatttttgttcaaatctgaattcctaaagcatgattatagtaaaaacaatctgcagaaataca

SEQ ID NO: 199832 - DNA, 201 bp, Homo sapiens
agtggttgaacaatatgtactttaaatttttgttcaaatctgaattcctaaagcatgattatagtaaaaacaatctgcagaaatacatgcagactataaaygggaaggaaaaggaatacttttgttagtctttgtgagtaaaatatttatttaaaaatggactccccacccagaaaacaaagcaaaacaaaaaacctaaat

SEQ ID NO: 199833 - DNA, 201 bp, Homo sapiens
tctttgactctcatctcctctatcttctctaccagtaaagcagccagagttcaaaagtcacgtgagctacctctcagcagcattactaaaatatgcttctractattttctgttcctgcccttgctgccttcacataatctgtctcttctgatatacccgttagattgatataagaatcccaagcctgtgttccttagctt

SEQ ID NO: 199834 - DNA, 201 bp, Homo sapiens
taaattctgagaaatgtttcaatacagtcttgagaacataggctattttgttgttgtttttttgtttgttggttggttttgagacagagtctcgctctgtsgctcaggctggagtgcagtggcatgatctcggctcactgcaacctctgcctcccaagggttcaagcagttctctgcctcagcctcctgagtagctgggat

SEQ ID NO: 199835 - DNA, 201 bp, Homo sapiens
ttgctattattatacacaaactaaaaagctaggtcccactgtgttcagaagctccttatatatatgggagcatatgtcatttatcatagcataggaatctrcacagagtatgaactacagtaaataccttccccacaaaaagtaataagcagatttatctaggttcatattcatatgctagttacctgatagccaatatgc

SEQ ID NO: 199836 - DNA, 201 bp, Homo sapiens
ctggggagttttttcatcatcttgctttattgcttacatgtacctaattttattacataaatgctttcagttagttaattcatttttctttccttttctgkctcctttctcctttctttatctgtttctctctctccctttttattaacttttaaattctgagaaatgtttcaatacagtcttgagaacataggctatttt

SEQ ID NO: 199837 - DNA, 201 bp, Homo sapiens
ttgaatattacatgtcatagattttctacctatagataaaacatttacataataaacattaaatcaggatattattttaaaaatcagttaataaaactatrtggaatacagcaaggaatgtggagaaaagtttaagcacaacatgtgcattttgtctttttatgttatggcagtgcggatagccttgatttactcacacac

SEQ ID NO: 199838 - DNA, 201 bp, Homo sapiens
ttatttttttcttctataattttggaaaaaaagagttagctgactgctactatgggcagacaacaatgtggcaataggatattatttttaaaactaaaaaataactgaatatgaaagatcaaacttttaaaaaatagacataagtgttcagagttgtgattctattttgcatgtaacaatgtagttatttcagttgcttta

SEQ ID NO: 199839 - DNA, 201 bp, Homo sapiens
  misc_feature (1)...(201): n = A,T,C or G
gtttcctactatggtggtggttaattttactaattttagtatgtttatcagagactccttggttatgtacaatggacttgggggtttccagctttcttttncttttttttctttgagatggagtctcgctctattgcccatgctggagtgcagcggcttgacctcggctcactgcaacctctgcctcccaggttcaagcga

SEQ ID NO: 199840 - DNA, 201 bp, Homo sapiens
cctttgtgactggcgtcatgtatgttacacagcaggttgaaagtgacatgctgtgattctggaagagtgtgagtctattggccctgtaacccatgagcttkttttcactaacccagtgctcaaagcaaattaattcacccacgaagtttgctttaacacttatctaagcgttactatcaatgttctaggaagtaacaagta

SEQ ID NO: 199841 - DNA, 201 bp, Homo sapiens
tccttttttttctttgagatggagtctcgctctattgcccatgctggagtgcagcggcttgacctcggctcactgcaacctctgcctcccaggttcaagcrattatcttgcctcagcctcctaagtagctgggactacaggtgcctgccaccatgcccagcttttttttttttttgtatttttagtagagaccgggtctcg

SEQ ID NO: 199842 - DNA, 201 bp, Homo sapiens
cgaggcttctggattcttcacgtagttctcaagccttggctttcagctccatcagctcctttaagcacttctctgtattggttattctagttatacattcktctaaatttttttcaaagtttttaacttgtttgcctttggtttgaatttcctcctgtagctcagagtaatttgatcgtctgaagccttcttctctcaact

SEQ ID NO: 199843 - DNA, 201 bp, Homo sapiens
aacctctgcctcccaggttcaagcgattatcttgcctcagcctcctaagtagctgggactacaggtgcctgccaccatgcccagcttttttttttttttgkatttttagtagagaccgggtctcgccatgttggccaggctgctctggaactcctgaccaccggtgatccacctgccttggtctcccaaagtgctgggatt

SEQ ID NO: 199844 - DNA, 201 bp, Homo sapiens
acttcatcttccatcactgataccctttcttccagttgatcgcatcggctcccgaggcttctggattcttcacgtagttctcaagccttggctttcagctmcatcagctcctttaagcacttctctgtattggttattctagttatacattcttctaaatttttttcaaagtttttaacttgtttgcctttggtttgaatt

SEQ ID NO: 199845 - DNA, 201 bp, Homo sapiens
gcagagtgttttccaacttggttccattctccccgtcactttcagatacaccaatcagacgtagatttggtcttttcacatagtcccatatttcttggagkctttgttcatttctttttattcttttttctctaaacttcccttctcgcttcatttcattcacttcatcttccatcactgataccctttcttccagttgat

SEQ ID NO: 199846 - DNA, 201 bp, Homo sapiens
gcttagtttggctggatatgaaattctgggttggaaattcttgtctttaagaatgttgaatatcggcccccactctcttctggcttgtagagtttctgccmagagatccgctgttagtctgatgggcttccctttgtgggtaacccaacctgcctctctggctgcccttaacattttttccttcatttcaacttcggtgaa

SEQ ID NO: 199847 - DNA, 201 bp, Homo sapiens
agtccctgatctaaaatagctcagtatttgcatatagcctttgcacatcctcccgtacacttcaagtcgtctttagattacttataatacctaatctaatrcaaatgctatataaatagttgttatactgtatttttaaaatttattgtaatttttactgttgtatcattattattattttttgaatgttttcgatgtgag

SEQ ID NO: 199848 - DNA, 201 bp, Homo sapiens
tgtctgtaaagtattttatttctccttcacttatgaagcttagtttggctggatatgaaattctgggttggaaattcttgtctttaagaatgttgaatatyggcccccactctcttctggcttgtagagtttctgcccagagatccgctgttagtctgatgggcttccctttgtgggtaacccaacctgcctctctggctg

SEQ ID NO: 199849 - DNA, 201 bp, Homo sapiens
tttttttttttttcaggtaattcagtctagtctgatgcttatctctaatataatatacttttctttttgaatgacagattaatttcagatgtaaaccaacwtttcgagaaggaggctcaaggtcaccaagagaagtgagtatttcagagcttgatttcaagtatcacctttgatttctcattgattcagtggattcataga

SEQ ID NO: 199850 - DNA, 201 bp, Homo sapiens
attgtaatttttactgttgtatcattattattattttttgaatgttttcgatgtgaggttggttgaatctgcagatttggaacctgcagatacggagggcyggctttactttccccagcctctccttccttgtccttcaacgcagggtttttgataaacaccatatccttggctcattatctgtgcttctaatccgatggg

SEQ ID NO: 199851 - DNA, 201 bp, Homo sapiens
ttgcaacccctgcctttttttgttttccatttgcttggtagatcttcctccatccttttattttgagcctgtgtgtgtcactgcacatgagatgggttccygaatacagcacactgatgggtcttgagtctttatccagtttgccagtctgtgtcttttaattggagcatttagtccatttacatttaaagttaatgttgt

SEQ ID NO: 199852 - DNA, 201 bp, Homo sapiens
tttctgtcacctcctaccatctctctggcaggcaccttcattgtccttcatgcaggtctcacctcaatgctcattaatttccgtgtcttggaaccacctcyatagacgctaaggacaaacaaagatgaattttcctgacaacttaaatgcccatgatttctccttccttattgcctgttttgtttttttgagtgtgttcca

SEQ ID NO: 199853 - DNA, 201 bp, Homo sapiens
gtggcatgatctcagctcactgcaacctctgcctcccaggttcaagcgcttctcctgcctcagcctactgagcagctggaattacaggtgtgtgctaccayggccggctaatttttgtgttttttactagagatgatgtttcaccatgttggccaggctggtctcgaactcctgacctcatgtgatccacccgcctcagcc

SEQ ID NO: 199854 - DNA, 201 bp, Homo sapiens
gtttcctttttcatggtcttctccaataaaaagataggcatattattaccttttcagatccaaaccattattttagctcagggttcccaagaaacggactyggagttgagatttatgtgtatgaagtttattgagtgatctcagaagtgacaccggtaaggaagtaaaagcaccaggactgggtagagggaggtgttgaac

SEQ ID NO: 199855 - DNA, 201 bp, Homo sapiens
tgaatctgcagatttggaacctgcagatacggagggccggctttactttccccagcctctccttccttgtccttcaacgcagggtttttgataaacaccayatccttggctcattatctgtgcttctaatccgatgggttctatattaacagagatatgtctgcccagcttcacatgccaattttacccttattggtaggc

SEQ ID NO: 199856 - DNA, 201 bp, Homo sapiens
aaatgataaataatatagttacgtgaagtataatctaagaagaaactgaggttgaatttttaaaatcactgtgattaaaatttaaggcctataattattgyataatgttgattttagttttctttttcagaaaaataaatgttattacacatcactatcactttatagtcacacaaaagatggttgaaaacttgactggcc

SEQ ID NO: 199857 - DNA, 201 bp, Homo sapiens
catgcatatgtatttttgtgcatgtaatgagtgtgtgtgtgtgtgtgtgtgtgtgtgtgtgtgtgcgtgtgtacatatttatcccttcttgctgcagcatwactctttgaccagaattgtttactggcttatttttctcttcagtttcacaataaggtgacctgcttcatgctgcatcacattgaagaaccctgctccctg

SEQ ID NO: 199858 - DNA, 201 bp, Homo sapiens
taatcccttaaaattttttcctgttgtctaaaatatatctttttttactgtttttcaagtcaggatccaaagttcacaactgccttttgttgacgtagttyttaagcttcccttagtatagaacaataccccctgttatttgtcaggccacttacccgttgatgaaattgggtcactttacccataggatttcccatattt

SEQ ID NO: 199859 - DNA, 201 bp, Homo sapiens
tatagttgtatttattttgaaaaagtaatcacttagaccttactgctcttaagaaaggtggctatgtcctctaattgggacgtgattatgtcatttggctkgatgttattttgttgtccaggaaaagtaaaacaagtatgttttcttgagtaaaagctcttgtcttataaatacattggtttgctgcctttaatagagact

SEQ ID NO: 199860 - DNA, 201 bp, Homo sapiens
cttataaatacattggtttgctgcctttaatagagacttgatttactttaatgtggtaagtgaaaggagagaaagaaatggaacaagcaaaggcactccarattattttcacattctattatgatattatcaataaaaccattattttctttctttttcattgttttctttttagtatttgtagcatcaaaatatctaact

SEQ ID NO: 199861 - DNA, 201 bp, Homo sapiens
ctctgtggctaggctgaagtgtagtggcactattatagttgattgcaatcttgaactcctgagttcaagtgatcctcccgcctcagcctcctgagtagctrggacaacagttgcatgccaccgtgcttatttatttatttaaaaaaaagtttttagagatgatctcactatgttttcagggtagtctcaaactcctgaatt

SEQ ID NO: 199862 - DNA, 201 bp, Homo sapiens
gcactttgggaggctgaagcgggtggatcacctgaggtccggagtttgagaccagcctggccaacatggcgaaaccccatctctactaaaaatacaaaaaktagctgggcatggtggcacgcacctgtgatcctagctactcaggaggctgaggcaggagaatcgcttgaacccgggaggtggaggttgcagtgaactgag

SEQ ID NO: 199863 - DNA, 201 bp, Homo sapiens
aagtatctgctcctaaagtcttggagaatattaatctttgtacagtcttgtccttcttgtaactctttatggtaagaataaatagttgagcttcaagaatrtcagagagggagaaaatctgtgcaggctggaatggtccaaaaggcattatttgagttaggctttgaggaaaggatggggagaaagtgaatgcgtgtcatg

SEQ ID NO: 199864 - DNA, 201 bp, Homo sapiens
ggattgcaacccctgcctttttttgttttccatttgcttggtagatcttcctccatccttttattttgagcctgtgtgtgtcactgcacatgagatgggttcctgaatacagcacactgatgggtcttgagtctttatccagtttgccagtctgtgtcttttaattggagcatttagtccatttacatttaaagttaatgt

SEQ ID NO: 199865 - DNA, 201 bp, Homo sapiens
gtttaaagtctgttttatcagagactaggattgcaacccctgcctttttttgttttccatttgcttggtagatcttcctccatccttttattttgagcctrtgtgtgtcactgcacatgagatgggttcctgaatacagcacactgatgggtcttgagtctttatccagtttgccagtctgtgtcttttaattggagcatt

SEQ ID NO: 199866 - DNA, 201 bp, Homo sapiens
tttacacctaatttattcattgctttcatctttaaacaaacattattgagtgtttacttcagttactcaatgctctgtgggatattggagaagcagagacragaacattaaggtttcagttgtgttgcctatgacagaattacgaagccatgtgacaagcatccaagtagaggttctggttgttcttccatatgaacgact

SEQ ID NO: 199867 - DNA, 201 bp, Homo sapiens
aactatgtggtcaattttggaataggtgtggggtggtgctgaaaaaaatgtatattctgttgatttgggttggagagttctgtagatgtctattaggtccrcttggtgcagagctgagttcaattcctgggtatccttgttgactttctgtctcgttgatctgtctaatgttgacagtggggtgttaaagtctcccattat

SEQ ID NO: 199868 - DNA, 201 bp, Homo sapiens
tcagaaggaatggtaccagttcctccttgtacctctggtagaattcggctgtgaatccatctggtcgtggactctttttggttggtaagctattgattatkgccacaatttcagctcctgttattggtctattcagagattcaacttcttcctggtttagtcttgggagggtgtatgtgtcgaggaatttgtccatttctt

SEQ ID NO: 199869 - DNA, 201 bp, Homo sapiens
gcaccatttattaaatagggaatcctttccccattgcttgtttttctcaggtttgtcaaagatcagatagttgtagatatgttgtgttatttctgagggcyctgttctgttccattgatctatatctctgttttggtaccagtaccatgctgttttggttactgtaggcttgtagtatagtttgaagtcaggtagtgtgat

SEQ ID NO: 199870 - DNA, 201 bp, Homo sapiens
gcccagcttttttttttttttgtatttttagtagagaccgggtctcgccatgttggccaggctgctctggaactcctgaccaccggtgatccacctgcctyggtctcccaaagtgctgggattacaggcatgagccacagcgcctggcctccagctttcttaaataataactaactccttgctcccctttgactcttgttt

SEQ ID NO: 199871 - DNA, 201 bp, Homo sapiens
aaatcactatatccagctggttgtcttattataggttggtgcaaaagtaatttggtttttgtcatttcagtgacaaaacctgcaatcatttttgcaccaamctaatgcattctctgttataattctttcctaaatgactaaaacatgacttaataacaccttattttgtttttgtttttggagatggagtctcgctctgtc

SEQ ID NO: 199872 - DNA, 201 bp, Homo sapiens
acagggtctgtattatggtgctgatttgggcctctatacctccagagaattaagttactttaaactccactatggacatttataaaaggaagagtgagacmctgtgttttcatagggttttttttttttttacacataacactttgttaattccctttctcttattttcatctctcttttcttctctttttctgttttctt

SEQ ID NO: 199873 - DNA, 201 bp, Homo sapiens
ggctagccagttttcccagcaccatttattaaatagggaatcctttccccattgcttgtttttctcaggtttgtcaaagatcagatagttgtagatatgtkgtgttatttctgagggctctgttctgttccattgatctatatctctgttttggtaccagtaccatgctgttttggttactgtaggcttgtagtatagttt

SEQ ID NO: 199874 - DNA, 201 bp, Homo sapiens
ttgccattgcttttggtgttttagacatgaagtccttgcccatgcctatgtcctgaatggtaatgcctaggttttcttctagggtttttatggttttaggyctaacgtttaagtctttaatccatcttgaattaatttttgtataaggtgtaaggaagggatccactttcagctttctgcatatggctagccagttttccc

SEQ ID NO: 199875 - DNA, 201 bp, Homo sapiens
acatgttatacataggtaaatattgtaaataaagtagacacatactgtttaaaatccctctgagttgtaaccacttcaccctgaatatttgattctgtttytcttggtagaaataaattcaggggagaggcacatagtgatgtgaaaaattactgattttgagaaatagatgacaaatattgaatactgatgtggatgaga

SEQ ID NO: 199876 - DNA, 201 bp, Homo sapiens
atagtattccatggtgtgtatgtgccacattttcttaacccagtctatcattgttggacatttgggttgcttccaagtctttgctattgtgaatagtgccrcaataaatatacgtgtgcatgtgtctttatagcagcatgatttatagtcctttgggtatatacccagtaatgggatggctgggtcaaatggtatttccag

SEQ ID NO: 199877 - DNA, 201 bp, Homo sapiens
atgttatacataggtaaatattgtaaataaagtagacacatactgtttaaaatccctctgagttgtaaccacttcaccctgaatatttgattctgtttctyttggtagaaataaattcaggggagaggcacatagtgatgtgaaaaattactgattttgagaaatagatgacaaatattgaatactgatgtggatgagaga

SEQ ID NO: 199878 - DNA, 201 bp, Homo sapiens
tgtgatagtttactgagaatgatgatttccaatttcatccatgttcctacaaaggacatgaacttatcattttttatggctgcatagtattccatggtgtrtatgtgccacattttcttaacccagtctatcattgttggacatttgggttgcttccaagtctttgctattgtgaatagtgccacaataaatatacgtgtg

SEQ ID NO: 199879 - DNA, 201 bp, Homo sapiens
tcattaagtgctttgtcaggtaacaccaccagttagcagggagagaatgggattcatgcaccagccatcttctgagtcctgctctttctgtttcaccagcygcatccacgtctctttctagagcttaaagaaatttcagaaaatcatccaagtttgcaaattggtagaaattgctccacgcctcagactgataataatttg

SEQ ID NO: 199880 - DNA, 201 bp, Homo sapiens
ctgccagaatccactcagttttccttgtgtggttacatttccatcctgtcaccctcgctagtgaagacaattgtttcagccattgagaaaaaaaaaaaaaaggtattttataagattgcaagaaagtgatttaaaccatgactatgtctgttaactgtttgctttgtttctctgactgtgtgcctctctagtcacccaatc

SEQ ID NO: 199881 - DNA, 201 bp, Homo sapiens
cttggcttcccaaagtactgggattacaggcatgagccaccatgcctagcctctcattcctcttctacaccccacataaggtgcatgaatcattagacacrtatatttttttttccctaaggctacgtattcctaaaagtagtttaagttacctattacctctaggcttttttttccataagaatcatcaataaattaaat

SEQ ID NO: 199882 - DNA, 201 bp, Homo sapiens
tttatcgttttggtggcctcctcttgcaaaggactggctggtgaatggtttccctgaattatggacttaccctaaacatatcttatcatcattaccagttrcaaaatattagaatgtgttgtcactgtttcatttgattcctagaaggttagtcttagatatgttactttaacctgtatgctgtagtgctttgaatgcatt

SEQ ID NO: 199883 - DNA, 201 bp, Homo sapiens
tactgtaccaaggctggagggggcacgcatgggccctagaagggtgcgtggaatgggtacctgggtggggaagggttaaagagggggcctcggtctgcttsaccaagatattttccttccctgattcctgccccaaatgtagactacttatccaaaatatggatccaactttgtgtaatattttaataagagggtcttcta

SEQ ID NO: 199884 - DNA, 201 bp, Homo sapiens
tacagtttgcttacaaacatcaacaaaagaaagagacaggaagagatgaagtgtgcaagagagagtgagagcaaccatcaatgtcagacagccaaaaaatrggcatatagatttttttataaatagacctcatatgtctcatttgcatgggcttttgggatgattaaagcctattgttctctaggattacttgaaatacac

SEQ ID NO: 199885 - DNA, 201 bp, Homo sapiens
cacaactgccttttgttgacgtagttcttaagcttcccttagtatagaacaataccccctgttatttgtcaggccacttacccgttgatgaaattgggtcmctttacccataggatttcccatattttgattttggctgattcttaccatgtttccaaattatttctcttattgcccatatttcttgtaaactaatattta

SEQ ID NO: 199886 - DNA, 201 bp, Homo sapiens
aaagctgaacagtcctaccctcagacataactttttttaggcgcatctgttggacaaactgaaggacacctgtgctgcatttttcaacaggttactagagkaaaacaaatggtgaaaatgtttgcaaacatcttgatcaactgccccctttaggcacataatcctgaaaacggtgcctgtgccactgcacagatcatagtg

SEQ ID NO: 199887 - DNA, 201 bp, Homo sapiens
tcatttgcatgggcttttgggatgattaaagcctattgttctctaggattacttgaaatacacatttcctgcaggttacagcccaatggacacagaatgayttgtgtattagtccatccattctcacattgctatacagaattacctgagactgggtaatttgtaaagaaaagaggtttcattggctcatggttccacagg

SEQ ID NO: 199888 - DNA, 201 bp, Homo sapiens
ttccttttcttattgcaggatggtagccagaaaatgaaggggccttggctatttcagtcaggcccgtgaattggatgagtgtctcccacctcttctactcsatccatagtctgtggtcctggggaatcccactgctgagtgttttcagaatatgaatctatgctcttgtgcctatttaaactctgctgtcacacctgtcct

SEQ ID NO: 199889 - DNA, 201 bp, Homo sapiens
tacccataggatttcccatattttgattttggctgattcttaccatgtttccaaattatttctcttattgcccatatttcttgtaaactaatatttagacmcagagactcaattatatttaggtttaatttttttttttttttttttttttttttttggtaaaagggatacactggcagtacattgccatcacaggaagag

SEQ ID NO: 199890 - DNA, 201 bp, Homo sapiens
tgattttggctgattcttaccatgtttccaaattatttctcttattgcccatatttcttgtaaactaatatttagacacagagactcaattatatttaggkttaatttttttttttttttttttttttttttttggtaaaagggatacactggcagtacattgccatcacaggaagaggatatcagccatttcactctcag

SEQ ID NO: 199891 - DNA, 201 bp, Homo sapiens
gtagtagtggttgtttttttggagagtatcattacgaaattacttaattatgtttttatgtattatgtgtttttccaatacgttgtcatcattcttcttcytatgtttatattgtttcatctccaaccattggaacctcttccacatggtgtctgtcttcacatttgttatgagccatgaggttttgagagcttccttggt

SEQ ID NO: 199892 - DNA, 201 bp, Homo sapiens
gtgatttattatatggttgttacactcggccacaaataaacacagaaatagtccagaatgtcacaggtccagggcagaggaccaacatgggcattttgttyatgagcaaggtgggtctcagaggtgatcggcgatcagagggcgatgaagttctagatccattgagacaagctctagacagtagcatgcagtcccacaact

SEQ ID NO: 199893 - DNA, 201 bp, Homo sapiens
aggctgaagtgtagtggcactattatagttgattgcaatcttgaactcctgagttcaagtgatcctcccgcctcagcctcctgagtagctaggacaacagktgcatgccaccgtgcttatttatttatttaaaaaaaagtttttagagatgatctcactatgttttcagggtagtctcaaactcctgaattcaagtgatcc

SEQ ID NO: 199894 - DNA, 201 bp, Homo sapiens
ttttaattgggctgtttgttttcttcctgtgaactttgagagttcatcatgtattctgcacccaaggcctttgtgtgctttgcagacattctctcccagtrtatatcctgtcttttcattctcttggtgatatcttttgtagagtgaaaccttttgacagaatccagatgatttttttttttctttatagagttgtggttt

SEQ ID NO: 199895 - DNA, 201 bp, Homo sapiens
agatgaaatgtgttcaatatttaaagattatgtgtagtctattttggttaaaatgctgttttaaagttacacatagacactcaaatatcactaattaattygttaaagtgcttagagttactagagggttagcaactataccagtagttagaagcctagtttcagtgttcttcatggttggtatgaaagaccacaagtgtt

SEQ ID NO: 199896 - DNA, 201 bp, Homo sapiens
tatacacacacacgcacatgcacacacgtatacgcacacacagacacacagatccagtgtagactctattctgtgccattgacctatggcttatgcctttkccagtgccatattctttctattattgtacctttatagtaactcttaaaatctggttgcattattcttccaaatttattcttcattgtcaacactgttgtg

SEQ ID NO: 199897 - DNA, 201 bp, Homo sapiens
ttatgtgtagtctattttggttaaaatgctgttttaaagttacacatagacactcaaatatcactaattaattcgttaaagtgcttagagttactagaggkttagcaactataccagtagttagaagcctagtttcagtgttcttcatggttggtatgaaagaccacaagtgttttcttctgtgaaatgacatttttaaaa

SEQ ID NO: 199898 - DNA, 201 bp, Homo sapiens
ggtgttttgcatgttcccttttgtttgtatatcacttacgcgtttacagtgtgcttcagtgttgtttcattttaaccttcaggatgactctgggagctagmcaggacaggaacttcttataaatgggaccctgagacctagttgttcagacaaatgggaccctgagacctagttgtccagggtcttaaagacagtaaaggg

SEQ ID NO: 199899 - DNA, 201 bp, Homo sapiens
catttcctgcaggttacagcccaatggacacagaatgacttgtgtattagtccatccattctcacattgctatacagaattacctgagactgggtaatttrtaaagaaaagaggtttcattggctcatggttccacaggctatacaggacgcatcgatggggaggcctcaggaaacttacaatcatggcagaaggcgaagg

SEQ ID NO: 199900 - DNA, 201 bp, Homo sapiens
gttatattgcagcctcattatttgtgcctgctactgcctggacagtgggggctaggggaggcaggtgcctggttctgtaatcttctgccagatttgaaccragtttggtgcatagcaggcacttaatgagaagcacactttatgaggcagcactgtgtgatggttgagtctgggctttggagtcttccctcttggggacct

SEQ ID NO: 199901 - DNA, 201 bp, Homo sapiens
caggttcaagcgcttctcctgcctcagcctactgagcagctggaattacaggtgtgtgctaccatggccggctaatttttgtgttttttactagagatgakgtttcaccatgttggccaggctggtctcgaactcctgacctcatgtgatccacccgcctcagcctcccaaagttctggcattacaggcgtgagccaccac

SEQ ID NO: 199902 - DNA, 201 bp, Homo sapiens
gcgtgcaccaccacgcccaggtaatattttgtctttttagtggagacagggtttcaccatgttggtcagcctggtctcaaactcctgacctcaggcaatcygcctgccttggcctcccaaagtgctgggattacaggcatgagccaccatgcccagctgcgggaatactctttattaaaatttacctacagcattgcattg

SEQ ID NO: 199903 - DNA, 201 bp, Homo sapiens
gattttctattttgtttgctttcctcaaatagtcctccctctgtaataactagtcactttggctctaagacaagaacttattcttggaaaaatctaattttgcaacgtccaataaccctggtatttttcattcccatggtactcttgcatagagagcttaaatacagtggctttgtcctttaccttatcttgtttgttttc

SEQ ID NO: 199904 - DNA, 201 bp, Homo sapiens
atctgttctcttggaagaaaatatcagtttgctgtcatctccacccttcagccaccccttatgttagtatactgcagaatgaaaatattgctcaaaatgcmcttggtaaacattcagtgacaactaatgctaaaaacggacagatggtggcagcattgaccagctgctgctgtgcatggctgctcagggacaaagcggagg

SEQ ID NO: 199905 - DNA, 201 bp, Homo sapiens
aaaaaatttcttacatgttcatacctcttagtttgtttctgtgacttccaaaaatagttcaagtacataatgcaaaattatagtgatgatttacctaatcytatgtaattgttcatcattttctagcccatatattcttgaaaaaaagcttttttctttattaccagaattttctatccaccactcaaaatatatttcctt

SEQ ID NO: 199906 - DNA, 201 bp, Homo sapiens
tcaagaaaaggtcatattctgatttttatcttgatttcttttgggctaattttaagcacatttcttttaacacatgttggctttattaagtgcaaacatayattaaaatatcaaaaggaagaattattgtgcacatattcaaaagggtcccccagtcatccaatactgtgtggtcattttctttcagagctcagcaaaact

SEQ ID NO: 199907 - DNA, 201 bp, Homo sapiens
aggttactagaggaaaacaaatggtgaaaatgtttgcaaacatcttgatcaactgccccctttaggcacataatcctgaaaacggtgcctgtgccactgcmcagatcatagtgtcaatagaaattgttacccagaagagaagagtgctctccaagcagtatattgatgagttcagtgccgtttcttaccagtggattaagc

SEQ ID NO: 199908 - DNA, 201 bp, Homo sapiens
gtgaattataatttgataatccactaggacttcttaagtggttatgaaataatagggggcatatgtcagggtcctttgaagtcctaaagggtgactactgmcagaaagacttgcttggaagattaagagcacttcagaattgattattttaagaaccttatatgtgattagttgaagaaacattattgaaattagagggcc

SEQ ID NO: 199909 - DNA, 201 bp, Homo sapiens
agacttcaggatgctgttaccagatatatcttctctatttttaaatgtgagcatgccaccctctttttgtggaccagctaataggtactgctttgcttttrttattgttttgttcttgtattttgctttagtcttttcctcgtagataatgtttggtgaaaatggcttaaccctacctgtgacaccctgccttaattctaa

SEQ ID NO: 199910 - DNA, 201 bp, Homo sapiens
aactctttcagaatttgcagggagcttggggatgctttgctcctctctccaaatgagaaggtaatggggaaatcctgtgataagggtataaggaaagcaartacgagagcaggctttacgcctttgacatcggaaagtctatagtcatgactagagttattctcttttgacttttgtcaccagtgggaaatgagaaaggaa

SEQ ID NO: 199911 - DNA, 201 bp, Homo sapiens
tttcttctctcctgagctaacttctttcccctccctctctctctttctttctttcttttttgagacagagttttactcttgtcacccaggctggagtgcartggcgcggtctcggctcactgcaacctctgcctcccaggttcaagtgattctcctgactcagtcccctgagtagctgggattacaggcacccaccaccat

SEQ ID NO: 199912 - DNA, 201 bp, Homo sapiens
agctaatagaaagctataaaaatggaggcagtctgctaattcagggaccagaccactgttcactccttcactacgcagctaaaaccggcaacggggagatygtgaaatatatccttgaccacggtaagtaggcatagtgaacttaccaaggatcacttacctgtgaaatccattgcattttgcattttctaagttaccctt

SEQ ID NO: 199913 - DNA, 201 bp, Homo sapiens
acttttctatctctgaatccctttggtttctagtaatattgaattgttttcaggactttcagatgagagctgggtttttctatagattcctatggctccaycctggggagatggcaggggtatgtcactgggcttttgggaagtcgggttgagcacttaccagagtgaggctttctgggcttctttcagccatagtacgtc

SEQ ID NO: 199914 - DNA, 201 bp, Homo sapiens
aagttctggatgatctctactgcattctattggctaaaacaagtcacagggccagcccagatttaaaaggttgggaaacagattccactgtttgatggcaygagctgtgaaaaattcatggagatatttaatctaccacactcccttatgtcccggtctctgcagtttaaagtgaacaatgtcctaaacttctgactcacc

SEQ ID NO: 199915 - DNA, 201 bp, Homo sapiens
aatgccataaaagatattgtaattaaatccaagagacatgcatttagatttttcaaagatgattctaataaagtaactatctagattcagctaatttgcarcactgtcagaaattataaagatcttgtttactataatccaatatagatgaatatatatgtttacattttgaagatcttgaatatttataacaattttaag

SEQ ID NO: 199916 - DNA, 201 bp, Homo sapiens
agaatgtaacttgatttggacatagggttgttgcagatgtaattaattaggatgagttcatctggagtagagtgggccctaatccagcatgacatgtgccsttataagagaagacacacgctgggcgcggtggctcatgcctgtaatcccagcactttgggaggccgaggcaggtggatcacctgaggtcgggagttcaag

SEQ ID NO: 199917 - DNA, 201 bp, Homo sapiens
tttggaaagtattttggagatacctgtgccctgctctctaaggagttcctgtagggatttctgcttatgaattccagtatattgtttctctttgggatgayaaatggagtttctgttgccacaccttgccacagacccactttttgaaaaacactaaaatccactttgcaagtgtataaatattgcaggcaggcagcttcc

SEQ ID NO: 199918 - DNA, 201 bp, Homo sapiens
tgtccctatttagaacaatctatttagagggttaaaattctctttatgttgtgaggtaagtgtggttgccaagtagtgcattgtggagatatcaaaaccayagtgttgagaaattgaacttaaagtttgtgtgtagttttaaatgattggtccaaacagacagtaatgggaagcttaggatagtaaagaagagataaaaga

SEQ ID NO: 199919 - DNA, 201 bp, Homo sapiens
ttatgtattatgtgtttttccaatacgttgtcatcattcttcttcctatgtttatattgtttcatctccaaccattggaacctcttccacatggtgtctgycttcacatttgttatgagccatgaggttttgagagcttccttggttttaggaacaataccatgtcccaggatcatttaatgcatttcctgtccatacctg

SEQ ID NO: 199920 - DNA, 201 bp, Homo sapiens
tggagatacctgtgccctgctctctaaggagttcctgtagggatttctgcttatgaattccagtatattgtttctctttgggatgacaaatggagtttctrttgccacaccttgccacagacccactttttgaaaaacactaaaatccactttgcaagtgtataaatattgcaggcaggcagcttccacattctttggcaa

SEQ ID NO: 199921 - DNA, 201 bp, Homo sapiens
caaagccatttgtaccacaggtctaagggaggagtggtggcatttagaattagaaatgaaaaatgaaatgaacaagatcaaaatgaacaagattgaccagyggaaatcaaatgagactgttaggggagactgttaggaaggatagatttaacatgtcacgactggggaaatagctgttggaaaataaagctctttctcatt

SEQ ID NO: 199922 - DNA, 201 bp, Homo sapiens
tagctatacagacttgtgagtctcagcactcacaagtacagaagaagtgctatctttgtttagaaataggagagttatttttctgtctggcacagatggakactctttgagttgtatactatttgagatggtatttcgagatgcatgtgtagagaagagagaaagatgtttccaggtagggacagtagaatgaacaaaaac

SEQ ID NO: 199923 - DNA, 201 bp, Homo sapiens
ttataagaagaaaaaaatcaaggctaccaggggagggaaaactttttaaaccattaggtctttagacagagaaagaaagaacaatgacttccatcccactstcatagtgatttaaggtgagtattatctttgcattttacatgtcagacaactgataggacagttggatcataaatttcgagtagggtcaagagtcacttt

SEQ ID NO: 199924 - DNA, 201 bp, Homo sapiens
gcatataaagctctttactgaatggcttctttgtcaaccccaggctggaggagttcaattcctttttatttggtgaattccttaattggattttgtttgcygatcttactttctcacattgtaagattttaataaatcattataatcattccctcatgtcttacaaaaataacctttctgacggttcccgaatgacttttt

SEQ ID NO: 199925 - DNA, 201 bp, Homo sapiens
gcatcacaagaccctcctgattctatttcaggtacttctcagaccacacttagatattattataggggaaaagcccctctcccttctagggagtgacttarttcaatcacaaatcagcgctcatgtttaagctctagacccttgtgagacattttttgggaggccattcagaaattgaacttccacggttcctgatgatcc

SEQ ID NO: 199926 - DNA, 201 bp, Homo sapiens
ttaggaggcccttcatcaacttctttttatttctttctattgcaatttagatacaaccactttcatccctatcctcagagaagaaaaaaggatgattcatsagccatgataatccctaccaaataccaccaacattatagaaaatatcaacttcttaaggtttcacttggtcctagcccaaatccaatagtacagatactt

SEQ ID NO: 199927 - DNA, 201 bp, Homo sapiens
caagcccgtaccagtgttgccttatggatgtggttaggaaagttacacttgggaattaaatcctgtctgagaaatgagttcacaagttctcaggggcattyagctgccaggccatttttacacattaagcaaaaaaaaaaaaaaaaaaaaaaaaaaaaaaaagtcttttgggcattgcatttatttacatgaatataataa

SEQ ID NO: 199928 - DNA, 201 bp, Homo sapiens
gcaaagaaaccatttgttttcaagtcctgcatttttgagttgctgagagatctttatggagtaatgatggcaattctaagacatcattagaggaggacctrgacatgggtttccttgaaatgaggtttaattttccctgaacaatacccactctcttgggctagtatccctatgttctatcaaaggttagagatgcagttg

SEQ ID NO: 199929 - DNA, 201 bp, Homo sapiens
tctccttctgtctttgaaacttaggctttagactttttttttctttttttttaaaaaatttttaacttgcttagtcttctaagtaaattactggacaatawtgccacctactggcaagaaaaatagctttttctctttatataatattttacttgtgtaagaaaaacattttgaaggaatgtattgggatgaaccgtgtaa

SEQ ID NO: 199930 - DNA, 201 bp, Homo sapiens
caattactcctgtcaggatgctggctcctttctgtgcctgctagtctcttaacacaaaaattccaaagtaactgggtgcagcagtagcttaaagtttaagrgcttcctgttaagtcccatgacgaagaaattcaccgtcatgggatttagaccctcaaagcccggagctctggggaccagaagcacaaactcccaaagtgg

SEQ ID NO: 199931 - DNA, 201 bp, Homo sapiens
gtgccatattctttctattattgtacctttatagtaactcttaaaatctggttgcattattcttccaaatttattcttcattgtcaacactgttgtggctrtttgagttcctttgtctttccatacacatttttagaatcagcttgcctatgtctccaaaaattctactagaaattggatgactggaattatattgagtct

SEQ ID NO: 199932 - DNA, 201 bp, Homo sapiens
attgtacctttatagtaactcttaaaatctggttgcattattcttccaaatttattcttcattgtcaacactgttgtggctatttgagttcctttgtcttyccatacacatttttagaatcagcttgcctatgtctccaaaaattctactagaaattggatgactggaattatattgagtctatagatcaacttggggaat

SEQ ID NO: 199933 - DNA, 201 bp, Homo sapiens
cctagtttcagtgttcttcatggttggtatgaaagaccacaagtgttttcttctgtgaaatgacatttttaaaatacgcaaatcataacacttcatccacrcccttttttagcaacgaaagtgaatttatcggttgcaaataagaacaggaaaatacaactgtttgtgattgcaaatcctggggaagatttttagcatttt

SEQ ID NO: 199934 - DNA, 201 bp, Homo sapiens
tttttacttgttcccattccaacagttcttaatttttcttcatctcaacagttggaatttgcagaattcttctatgagaatgcatgttacctctatgtctratttccatttgtttctatttcctgtggtacttacttctcctttgccttttattaggatatttgtccaagttttatactccttaagcatgaaagaatgtac

SEQ ID NO: 199935 - DNA, 201 bp, Homo sapiens
gagaatgcatgttacctctatgtctaatttccatttgtttctatttcctgtggtacttacttctcctttgccttttattaggatatttgtccaagttttawactccttaagcatgaaagaatgtacaaagagtgtatgtgggaacttaaagtctaaaattcctaccttaaaatacttttttaaaggttgtcatctctagtt

SEQ ID NO: 199936 - DNA, 201 bp, Homo sapiens
ccacctaaccagttctggacaatatgttgtgattggaagtgatgtgtatcacttgtgggatggaatgtttatttgccacaaataaataactaaaaaaaaaacttctccagggatctcttttccttctgccacagttacatcttcttaattgtcagcctgggtccagaaagccccagccaattctttatagacaggcagtgc

SEQ ID NO: 199937 - DNA, 201 bp, Homo sapiens
ttagtgttttaattagctacagaaatagaaattaagcctggacaaaccagtatttgtttactgagtaaaaactcagtaaaccaatgagtattttagttgtrtatatatatataatctgtttccacaaagcagaatatgagctcaatctagttttctaggtcctgatttttctatatataacatactgatgtacgtatcata

SEQ ID NO: 199938 - DNA, 201 bp, Homo sapiens
aatctggagttgccacgaggtgaggagccatatccctggtagcctaatcactgaatctactagagaatttgctgtgaattttctttcttaattctctcagmtgcttcagcttcctaaaccctttatgttgttttccttagacatcaatatcttttaatttctccccagccttctcacttccatactttaccctcatttcct

SEQ ID NO: 199939 - DNA, 201 bp, Homo sapiens
atgtgtgctgtacccaatattgccacgtgggtttgttggctaaagctgggtgctgcccatgttgtggttgcagtctctgtgggtaagcagtacagcatttrtttgtagatcagaacagtatgtgtgctttcttctgaggtctgatcatggtgagagtgtaggatgcatgctgaagtttcacagcagtgtcgatacctttgt

SEQ ID NO: 199940 - DNA, 201 bp, Homo sapiens
tgagcctgtgcatgtgtgctgtacccaatattgccacgtgggtttgttggctaaagctgggtgctgcccatgttgtggttgcagtctctgtgggtaagcagtacagcatttgtttgtagatcagaacagtatgtgtgctttcttctgaggtctgatcatggtgagagtgtaggatgcatgctgaagtttcacagcagtgtc

SEQ ID NO: 199941 - DNA, 201 bp, Homo sapiens
ctgccaagttgccctggtctttgctcacttggtcattttctttttcttttccttttttttttttttttttttttgagatggagtctcgctctgtcacccaractggagtgcagtggtgcgatcttggctcactgcaagctccgcctcccgggttcatgccattgtcctgcctcagcctcatgggtagctgggactacaggc

SEQ ID NO: 199942 - DNA, 201 bp, Homo sapiens
ggcctgatagcaagctgttctcaggaagccagagctgcgatgtcagagcatgggggaaggccgacaggcacaaggggtaacctgatgcacccctgggagcyccaaaggtggtggggaaggccaacttcgtggggcacatccatgcatcagacccatcagtagtggggaaagcaggtagagtgttttgtcctactgcagaag

SEQ ID NO: 199943 - DNA, 201 bp, Homo sapiens
ctgcagtttaaagtgaacaatgtcctaaacttctgactcacctggaatcccttagagcttcgtttttctatttgactttggttctgggtcttaagaacccmagtttcacaaataaaaatacaagatggccgggcatggtgggcccatagtcccagctacttgaggctgaggcagaaggattgcttgagcccaggaggtgta

SEQ ID NO: 199944 - DNA, 201 bp, Homo sapiens
gatttactttttttcactttttttggttcactgctgctatttgtgggtggtttcccactctgccaggggcagttgatgtccaatatgtaccaagtctaggkggagacaagagaggacacaagtggctgcatggcctgatagcaagctgttctcaggaagccagagctgcgatgtcagagcatgggggaaggccgacaggca

SEQ ID NO: 199945 - DNA, 201 bp, Homo sapiens
gtcctaaacttctgactcacctggaatcccttagagcttcgtttttctatttgactttggttctgggtcttaagaacccaagtttcacaaataaaaatacmagatggccgggcatggtgggcccatagtcccagctacttgaggctgaggcagaaggattgcttgagcccaggaggtgtaagctgagtgagctagaattgc

SEQ ID NO: 199946 - DNA, 201 bp, Homo sapiens
ttttccccttgtcacttgatttactttttttcactttttttggttcactgctgctatttgtgggtggtttcccactctgccaggggcagttgatgtccaayatgtaccaagtctaggtggagacaagagaggacacaagtggctgcatggcctgatagcaagctgttctcaggaagccagagctgcgatgtcagagcatgg

SEQ ID NO: 199947 - DNA, 201 bp, Homo sapiens
acctaacattccaatacaaatcagtttctcatcaccccgcattgactcttgcaaagactgagtcacacaataccactccgcccaaatggaaggacacaaargaattcagtcttttttaggggggtgggggtgcttatttttccagtgctttggttagatgttataaattaatcagcttaatatttatgctcacgagaagaa

SEQ ID NO: 199948 - DNA, 201 bp, Homo sapiens
ctctagaaaccatacacaatgtgcccaaatagtaaatgcacatcgtgtacacagactcatacagtatgaataaacagtccactaggctagcacaactgcartgtcatcttcattcctgttttccccttgtcacttgatttactttttttcactttttttggttcactgctgctatttgtgggtggtttcccactctgccag

SEQ ID NO: 199949 - DNA, 201 bp, Homo sapiens
ccctgtcattttccatgggtttcaaaaaaattgaagggcagaggaattttttttctgtgttactaacatggaagtttttcagtcatagtctttaacttgasctctgccttttaatttgtcttcttgttattttatggttcactctccactgcctgctcattgcagaatgtgtgacttctctgcctcacaagcttgctccat

SEQ ID NO: 199950 - DNA, 201 bp, Homo sapiens
aagctcatttctgtttagcaagtttgaggccccaggtgtataactagactacttagtttcagttcgccaatccctggaggtcagtgatgagaaaaaaaaaatggttttgcccaagttaagaattcctcccattatctgaattctcctaggagaaaaatgtacagtattgaacctaatgataaagttgttaaccatgctgct

SEQ ID NO: 199951 - DNA, 201 bp, Homo sapiens
ctcaaaaaaaaaaaaaaaaaaaaaaaaaaagaaaagaaaaagaaaatgctttacaaatatgaaaactcctccctggttttttttgaaagcttaatgtttgyctaacaaaaccgtaaataggattctataatattgatgttagaaatgaatttatatttttctagttttaagggaatagctgtatattactttagatggtgg

SEQ ID NO: 199952 - DNA, 201 bp, Homo sapiens
aaatgattcattccaagatattatagctgtgtttagttgggtaatttcatatattcagactgccatgacaacactccgttccagaggaacaaacttacttcttgggaacctggagacttgtctgaagctgactgcctcaaacacagatatctgttttgtcctgttttattttttgtttgtttgtttgttttcgaagtttgt

SEQ ID NO: 199953 - DNA, 201 bp, Homo sapiens
ttatgaaaatatttatgttgttatgttctatctaaagtcttaaataaaagtacaaatattgtggctgacagtcttagcccaggtagtagttttactccatagttttaataaaataaaacctttaaaaggtaattgcagtcatggtttaaaagaaaaaagtagagtgaatttctccaaggcagattttattctattcttagg

SEQ ID NO: 199954 - DNA, 201 bp, Homo sapiens
aaatgaatttatatttttctagttttaagggaatagctgtatattactttagatggtggtactatataaaaatatgttttcccattacatccaaaggtgaygatattaatttattgctagagaaagaattgatattgagttatagagattttccagaaggtattttaagaccctttgctggtcctttgtgactggcgtcat

SEQ ID NO: 199955 - DNA, 201 bp, Homo sapiens
tgggaggctgttctatccaggaaagactggattccacccaactgtgacaaaggtaaatgagaaagtccaggaaactctcagggctgtggtcaggagagggraaaagaaatacaagtaaatgactgaaacgacagagaaagaacattcagagctgacattaagagcttctctttcccttcctaagtaggatggatcatcacc

SEQ ID NO: 199956 - DNA, 201 bp, Homo sapiens
tcacttccaggcaaacaatttctgaggtctcagaaggcatcctatacctttcctgcctcaccaggatctctaatagcacaggaagaaagactgtggagatrggagagcacaatccatctcttttgtttgtaaagaaaatgttattatgatgttcagtccaaggatcaccgcatttttgatggatggcaatttttaacactt

SEQ ID NO: 199957 - DNA, 201 bp, Homo sapiens
ggcaaggaagaattgtttcccaggcattcacctccaaaataaactgttggtccccggctgcattctccaacttccaccaacactcttgttttctcagtgtrtctgtcttaggtgaataatttgattaaacagatctaaagtgtgaaagagtgatcattttgaaatattttcaaaaaaattcgcttgcaaatctcaagttgc

SEQ ID NO: 199958 - DNA, 201 bp, Homo sapiens
aattagcagtaccaatgggaacagagctactaatgagtgtaggctgctcatgttcatggaatttcttccaaaaggagtggcttagaatgttcactgaaggygacaggcactctttaagaggaccattgggtacttaagccccttgctgacgtgaagagtgccctgttggcagctaaataggcctcaggtgcttgtttctca

SEQ ID NO: 199959 - DNA, 201 bp, Homo sapiens
gaatgcctgacctcaggtgatctgcccgccttggcctcccaaagtgctgggattatagcactgtgcccagccaaaaatttcaactttgaatacctccttckgtggaaagagatagtaagtgtaacataaagtttactccagtgcaatcccctcctatgtgtggaaactttcgagtactagagaaatacgtcccctccctta

SEQ ID NO: 199960 - DNA, 201 bp, Homo sapiens
ttgctttgtaatagaaataattacaatgtttgctgtatttatgtatttattatatatgcccactttaatactagggaactcttcagaacagactgttaacrtttcttttttgtcttttgaattgaatattgtagaaatcagctctcaggaggaagtgtgcagtctgtaaaatcgtcgtccacaccgcctgcattgagcagc

SEQ ID NO: 199961 - DNA, 201 bp, Homo sapiens
caagaccgttatctctctgcagtctgattccctggtcttggctgctgcagttgtctatttattattaaaattgttcatagcattacaaagcctgtcccagyggatttcctggttaccagatgtattcttccagcttctgttgtcaggtaacagctagatctgtgcctaatgatcaggatcaattactcctgtcaggatgct

SEQ ID NO: 199962 - DNA, 201 bp, Homo sapiens
gaattaaaacaaccaaatgatgaacctatggaaagtcctatttctgaaatcatagtattggtgggaggattgggcagctaagacccaaactagctcctgtrataggtctggttccttagtctgtagccagagcgatgcataaaaaatgtcagtctgggagaaaaaaaagctggtctgaatctcttaatgaagacttttcag

SEQ ID NO: 199963 - DNA, 201 bp, Homo sapiens
tgagttttcctgcggtactcgagaggcaattccaaccataatagagcatgagactgtcaggtatgctgtcagcccagcatacacatgaacagcaaagctgmccaaggggtaggattgaagccctcctgagctgctgatgattctactgaaatacttaaggacaaaatataaggaattcacactgaccttagtggaggctgg

SEQ ID NO: 199964 - DNA, 201 bp, Homo sapiens
ggctggctgctcacaaaatagaaaaattggacagaatgtttctgataaggtaaatacagcaaaggctatgcagaaatatgtatctcagagagtgagctatkgggcagctatggtataagttatctggtagccacgcaagaagtaacggattgaataaaggcaaactatgaagacttcagtcatgataagatcaagagaatt

SEQ ID NO: 199965 - DNA, 201 bp, Homo sapiens
gagatcccgacggtacacatggacagagtaggggcctaatacgtatttatcaaataaatgaggcattctatttggattgtttgaagcagtttgaaataatwatttcttaagcccttcctctcattaatgtatttttctcaggcctttcttattgtctgggcagttgttctttctataatctagataatgcctgcatgatat

SEQ ID NO: 199966 - DNA, 201 bp, Homo sapiens
taaaccaggagatacaggacttgagctttgttctaaactgtcataaatagctgtgaaaagagaaaacattaagaagactgatttccccagggtgcagaggrgaacaagctctctcaaagttggaaagagtgttacgattctccaatttcgctatatgtcttaaactactttttagagaaatatctacttctgccaggtgga

SEQ ID NO: 199967 - DNA, 201 bp, Homo sapiens
ttcatatgcagaatgcttctgataatgtgtttctcagaacagaacaaaacacgctgttcgaagagcatcaagtgagttttcctgcggtactcgagaggcarttccaaccataatagagcatgagactgtcaggtatgctgtcagcccagcatacacatgaacagcaaagctgcccaaggggtaggattgaagccctcctga

SEQ ID NO: 199968 - DNA, 201 bp, Homo sapiens
caagagttcatgaacatctttatggagttgttttctgagttccttcctttctgctgtcatccctggtactttctggtctcttggggcttcctttgtttggkccttgtgccagaaagctaagggtttagttacctcactctgctgcatactgcctgtaactgtgttcatgtccagggccaaccaatgataacagaaagaaaa

SEQ ID NO: 199969 - DNA, 201 bp, Homo sapiens
tcactctgctgcatactgcctgtaactgtgttcatgtccagggccaaccaatgataacagaaagaaaaagaagcaatgatagtttctgccactctcttggygtcacagctcttgtgattagagaggaagcccctcttccctcctaattttaggtgccagaaggctttgtcattgcggctgccagaaatagtgaaaaggcct

SEQ ID NO: 199970 - DNA, 201 bp, Homo sapiens
cctgaaggtggtacagcaataatgtaatgcataatcagtgattttatttcttgtttgttgcttttagttatgggagtaggtttttcctttgaaccaaattsttttgagtggtcccattcaggccaatgattctggcctaatcacacatgattaggtgtgatgaagaatgtagtcagatgtcagaaaaaagatgtttttctc

SEQ ID NO: 199971 - DNA, 201 bp, Homo sapiens
attgtcatatcatgattacatttatgttttaaacagtgtgcagtgtgatgaaatttttggatgcatggggcccaattagcctaggtgcaagatgatattarcttggtctaaaggggttttagtggaaggagcaaagaagcatacgtatttgaaagatttagaggaggataaactgcagcagagagaaagaaggagcttctg

SEQ ID NO: 199972 - DNA, 201 bp, Homo sapiens
caattagcctaggtgcaagatgatattagcttggtctaaaggggttttagtggaaggagcaaagaagcatacgtatttgaaagatttagaggaggataaaytgcagcagagagaaagaaggagcttctggtaacttagttggcaaaccagaagagtgttttgaactgaattccaaaagtaaagagcttcaggcagcaggga

SEQ ID NO: 199973 - DNA, 201 bp, Homo sapiens
attatgaaaatatttatgttgttatgttctatctaaagtcttaaataaaagtacaaatattgtggctgacagtcttagcccaggtagtagttttactccatagttttaataaaataaaacctttaaaaggtaattgcagtcatggtttaaaagaaaaaagtagagtgaatttctccaaggcagattttattctattcttag

SEQ ID NO: 199974 - DNA, 201 bp, Homo sapiens
aattatattatgaaaggtctctttattctgtttacttagttgtggtcctacaattagaaaataagacttgatttgtgttattcagaaccctctttcctttyctttcctctctttataaactctgccacaccttaactctttaaggaagtaacaaaaatgataccaaagtggaaatttacatgcatgcctttgtaaactata

SEQ ID NO: 199975 - DNA, 201 bp, Homo sapiens
atatatagtgtgtatataatatatatgtatatatgtctgtatatacatatataatataatgtatatatacacatgtatataatatataatatatacatgtktatatattatatatacatatatacatatagagagcaagagagagactatatgtaacatatattttttctgtatatattatatagtatctctgtatccata

SEQ ID NO: 199976 - DNA, 201 bp, Homo sapiens
ggtggctaatacacaaccttcctgagagtctgagaatgaatcgcactcatgggccagtggagcctccagaaatgtgcttcatgtctggggcagaaatctgyccagattctgattcgtggattataatttttgaatcatacctcctggacccaaaaaccaatttcgagggtaccaaaacagcctaagtacttcaacttgtgt

SEQ ID NO: 199977 - DNA, 201 bp, Homo sapiens
atttcaaggtattttccaggatatggatctatctatatatctatctatctggagatatatatatatatatatttggagttatatctatatctatatctatmtatatctggagttatatatatctctctatatagatatctgtctggagatatatatagatatctatatatatctgtatctatctatctgtctgtttatcta

SEQ ID NO: 199978 - DNA, 201 bp, Homo sapiens
gtatgtatataacatatatacatatatagtgtgtatataatatatatgtatatatgtctgtatatacatatataatataatgtatatatacacatgtatawaatatataatatatacatgtgtatatattatatatacatatatacatatagagagcaagagagagactatatgtaacatatattttttctgtatatatta

SEQ ID NO: 199979 - DNA, 201 bp, Homo sapiens
ttgtaggttcttctgtctttttatttgtgtagattctactggagataaaaagtgggaacataattcaacatggatttatttcctgatccagaggtcaaagracagaaatggatgaccaaatcagttatgactttttcacaaagggaaaagctgctagaaagcagctcagaaatgctccaatgccaagctgtgctatagcat

SEQ ID NO: 199980 - DNA, 201 bp, Homo sapiens
atatttatatgtatatacatatatatgtgtatatataatatttatatgtatatacacatatatatgtgtatatatatttatatgtatatatacacatatawgtgtatatattatatataacataatatatatgtatgtatataacatatatacatatatagtgtgtatataatatatatgtatatatgtctgtatatacat

SEQ ID NO: 199981 - DNA, 201 bp, Homo sapiens
atacatatatatgtgtatgtatataatatttatatgtatatacatatatatgtgtatatataatatttatatgtatatacacatatatatgtgtatatatwtttatatgtatatatacacatatatgtgtatatattatatataacataatatatatgtatgtatataacatatatacatatatagtgtgtatataatata

SEQ ID NO: 199982 - DNA, 201 bp, Homo sapiens
tcctactgttaccactcttacattggccatccttaaaattagttggattttttaagctttgcctcttctagaagctgttttttgttcttttctttctaacrttttatgcctttagttctgatattggccaccaggtagcaacagtgccttgagtagctcaagtctcataaataggaaactgttgtagacagacaaaaagat

SEQ ID NO: 199983 - DNA, 201 bp, Homo sapiens
aactcttcagaacagactgttaacatttcttttttgtcttttgaattgaatattgtagaaatcagctctcaggaggaagtgtgcagtctgtaaaatcgtcrtccacaccgcctgcattgagcagctagaaaaggtaagagcgcgccccctgctgcagttttgttacattgcaagtatttggtcttcagaggcccggtgtaa

SEQ ID NO: 199984 - DNA, 201 bp, Homo sapiens
tgctgaatctaatttattatgtaacaagcacatgatcttattaaatgttttaaaaaatcaatagaaaatacgatataaaagtgggctccaaaggctctttytgcatatttctatattcttatgtaaattccagaaacttttggtttctggagaagtgttctccagatcactgttcaattctgataaggaacccacctttct

SEQ ID NO: 199985 - DNA, 201 bp, Homo sapiens
tggtaactacttctgcatgctaataatgttccaggcagatactggttaggaagtctatttgtcaaataggacaagcagaaaagacaaataggagagacttkgcaagagaagattcacctggtcccagtgaatagcaggtgtgaaagagaagaggtcaagatgatttggatgaccaggagaattatgaaatcccataacatc

SEQ ID NO: 199986 - DNA, 201 bp, Homo sapiens
tctccctgctgctctccacagatgtccaggtaccttaatggttaggttctctgtaccttgagcttatttgcaaggcagagcctcaaaagaactgctttttwaatttttccactgatagaactggagcttggtaaactaacttgcccaaggtcatagcagttagtgatactcacaggacttaaacccaggaggtctgaatgt

SEQ ID NO: 199987 - DNA, 201 bp, Homo sapiens
cttaatattttgcttcataagacgccatcccaagcaactcgtttgagaatgagaaattgccctgattcctaaagcccacctaatcttcccctttctccctwgttagccacttaattatttttcagttattctattccagttttatttcataaacttgatcgaaagctgcttgacagcagagaccataccattcttttttat

SEQ ID NO: 199988 - DNA, 201 bp, Homo sapiens
tcacataatgggaaagcaaaaagaaatgaaaactgtgtcctcacatggtggaaaagatagaaaggacaggcagctttctcaaggctcttttagaagggcaytgatttccttcatgagggtggagccttcgtgacttaatcacttcctaaaaggccccacctcttaataccacactggggattaagtttcaacatgaatttt

SEQ ID NO: 199989 - DNA, 201 bp, Homo sapiens
agagctggtccacatgccagcacatcctattggcaagattataagtggtgccatcacttaccccattttgccttctctaaaggctgctattgatttttccygaaacactttggcgttaagcatcttggtgcctttgggctcaggataggaataccctcctccctatagagcctgtcagtgatggggaaatggccagtttcc

SEQ ID NO: 199990 - DNA, 201 bp, Homo sapiens
ttttctaagtaagtcattttccatcattgccttcaaggatgttttatatcaattgttcagatttccataatatagaagatgcctccatgaaaaaaaaaaaatgtttacctaagtttccacggaaagaatgagttagaaataagggagaatgtgaaatcaaaaagtcagagtttttgctgtcggagagaggcttgtcagctt

SEQ ID NO: 199991 - DNA, 201 bp, Homo sapiens
aacatgaattttggagggtttatacaaacatacaaatcacagcagctgtcttctccctttcctgattccacatgacagaagccatctcttccttccgcacrtggatgtctgagcacatccagactcttgagagcccagacttaagagagagaggctgtgagaaggaagatggcagttctctcctggaagtcttgacttctc

SEQ ID NO: 199992 - DNA, 201 bp, Homo sapiens
ggcgctcagcatttggggaggagagagggaggtggaatggcttggctgggtataagcccagagttttggaaaatgccgtttcttcccgcagggctcttggytgttagagaaatcaccatagtcaccaacagtgagtgcaagggaaagaaaggagagggcccgcaggaaagattagtaggtgaggtgggctctgctgattca

SEQ ID NO: 199993 - DNA, 201 bp, Homo sapiens
aattaaataaaggccagagtaagatgtgcagttggaacagccaggtgttagattttctctgactcagagatgaacagcttcccagcaagggaagaagttcraggagagaggccggtaggagaggaagccacttctataatttggcactaataagaaatttactctggaaaatctcagtttttcacaaaccatctttcactt

SEQ ID NO: 199994 - DNA, 201 bp, Homo sapiens
taatatctcaggatttctactgcacaaagctcaggtgagggttagatgtatactgtcactttatttttgtttagctcaggtttaaagttctcctatttgctgtcttcttgatcacttccaatctactctctttagtttaccctttacccaagagattgaatgcttgcttggataccttaagccatttggtgcccacctacc

SEQ ID NO: 199995 - DNA, 201 bp, Homo sapiens
caggtggatatagttatcttgttcttctcagctacgttctaattcatgaacacatagatttggccagcagtgatgtcaagtgcccagtgccttggggaacyggcttggcattgagattttattggttaagagagagatttcctgaaccaatattgagctgtttgccaggttctggcttgagtaatttttttttctaatagg

SEQ ID NO: 199996 - DNA, 201 bp, Homo sapiens
gtgtttttgaaattcattcatattgatatatgtgggtttttaataatttttgatatagaatattgcatcatacatatgctataaattgtttctctatttckatagtgatttctaatattctattattttttaaaatgcagcaaacatcctgtgcccttctgtgttgcagaatatatatgcagtttcagcttactcgataat

SEQ ID NO: 199997 - DNA, 201 bp, Homo sapiens
gtgctatctcggctcactgcaacctctgcctcccgagttcacaccattctcctgcctcagcctcccgagtagctgggactacaggcgcctgccaccacgcycagctaattttttgtatttttagcagagacggggtttcactgtgttagccaggatggtcttgatctcctgacctcatgatccacctgcctcggcctccca

SEQ ID NO: 199998 - DNA, 201 bp, Homo sapiens
cctgcaggttcaggaggcatttccaaaagaggaatcttcaatgctttaaacaagatactggaatctcagttaaataccatttgctattgggagagatgtartgtgtattttctagggtgacagctttggacagcagcaatttgactgtgtaaaggcttacatatctttctattcctaattttataatgcttaaaatatttt

SEQ ID NO: 199999 - DNA, 201 bp, Homo sapiens
tgaggtgtatttcttaagttagctgtcagaaagagagttggtgttcctcatctctgagcttttaagcaagccccgaggcttcatgttgaacaagagaagawgctattcaaaaagggatgtgagaaacaaacatcaaagccagtgtaagaaatggaggaattgtgtagactgaggatgtctgaagaattttaggtaagaacg

SEQ ID NO: 200000 - DNA, 201 bp, Homo sapiens
ctcttgaattcctgggctcaaacagtcctcccacctggctgtcccaaagtgctgggattacagacgtgaaccaccgtgcctgactagtctttatttttttmtctcttgtttttctccttttgtctcgtttcctttattagtgagactcaaattaacttttcaaaaatcacaggtgttattgtttctacactaaaagtcaca

SEQ ID NO: 200001 - DNA, 201 bp, Homo sapiens
ctctggaataattctgggtagtgactctggtcagaaattgtgaagaacagctttcttccttgtccccaccttcatattgtcaaattattgctgtgctagcycaattaaaagccttgaggatcccctcacttgcatagaggcttagaccctggataactgtggactcaccgtggcatggctctgagaacaccgaatgacaga

SEQ ID NO: 200002 - DNA, 201 bp, Homo sapiens
gactttcatggtaagagtgataacctcttccaccccttcttactatgcacaataagttaatttttaataataatgatatccaccaataaagagagcaaatycccaggatcgtctttctaaagacaaaaatactcagtaccttgaactgtgtttggcacttacaagcatatttattcatccattcaatcaaatgtttaagca

SEQ ID NO: 200003 - DNA, 201 bp, Homo sapiens
aataaccatgtggtaaattagttatgggagtaagtttttcctttgaacagaattcttttgagtggtccctattctggccaatgattctggcctaatcacayatgaaaaatctatgctcaaaagcatagattttttttattttaaaaagttttgtaagtctgtggagtacaagtgtaattttgttacatgcgtagattacat

SEQ ID NO: 200004 - DNA, 201 bp, Homo sapiens
gaagagggcaagagatggcagggagagaagcagtggtacagagctagaaaggaagacattccaagcagtgtttgtagattgaatggattaattcatgaatrcacaaaacattgtgaaagggaaaattcacagaatatttccattcctaaggatgcatctatagtcatttgatgtatatgcatagtatttctttctggtctg

SEQ ID NO: 200005 - DNA, 201 bp, Homo sapiens
  misc_feature (1)...(201): n = A,T,C or G
atggcagacagtgaaacgtgagtgttgccttttattacatagtctaggttattttcttcagaacatatctgggagaagaatgtaatctatagagcatatcntaggtaattttaacttaattaattcaaagtccactttcaactttgttcataaatgtgcagggctaatagcctaaataaaaaattacggaatagaaattga

SEQ ID NO: 200006 - DNA, 201 bp, Homo sapiens
gccaagaagtcccacaggataccatctgaaagttggaggaccaggaaagccagtggtgtaaatcagtgcaagcccaaagacctgagaaccaggggagctgstggtatatcttccagtctgagagcctgataactggagtgcaggagtgggtatcactggtgtaagtcctggaaagagaaccaggagccatgatgtcaaagg

SEQ ID NO: 200007 - DNA, 201 bp, Homo sapiens
agagaagggatcctgattgaaaaagtcatcagctctgggatggtgcctaaactgatgataatgtttgttttcaaccttatttctaaagtagcgaaatagcyactgctccccaaacaggaacaaagataggctgtacaactaatcctgaaagccatatttgaaaaggtataaagatgagttggtgtggagaggaatgaggtg

SEQ ID NO: 200008 - DNA, 201 bp, Homo sapiens
aagagaagattgagactgcttctaacataaagaagtgataaatgcttgaggtgatagattgcttaattaccctggtttgatcattatacattgtatacacrtatcaaaatatcacatgtaccccataaacgtgtaaaattattatgtatcaataaaaaattaacttaagaaacaactctaggcacctttcattgtaacctt

SEQ ID NO: 200009 - DNA, 201 bp, Homo sapiens
aaactccatccttatgtgcagcccaagttcaatggaaagtaggaatagttcagaacaggggctcttgagtaagagaaacctaggatgaaagctggtgttccgttttagtggttgtaatatttagggcatgttatctatctgagactcattttcctcattttaaaaatagaaataatgacatccatctctcaggattgtggc

SEQ ID NO: 200010 - DNA, 201 bp, Homo sapiens
caacgaggtgctcagtctgggatttctgagggactgtcactggggagaggctgttgctaatgaggtgcaaattggcagcagctggggaggagctgctctcyccctctagggctgggccccaggggaggaggggagggttgctctgacattttcagaggaggttggtgaggggccgaaactagagactcctcaccctttagc

SEQ ID NO: 200011 - DNA, 201 bp, Homo sapiens
atctttttaaaaaaatgctgagctctcagctctttatttccacaatgacatcttgttgaacacatcatggtaccttgcagagaacgaattaactgctgtgwgttttctccctttttataaatcccattatcactttcacatggacttagtgtgaaaggtggctctttctgctttggctcttagggccttggcttgtgtcat

SEQ ID NO: 200012 - DNA, 201 bp, Homo sapiens
tttatcagatacgtgttttgcaaagattttcacccagtctgtggctaatttttcattttcttaacactctcttttcacagagtggaagttttgattttaaygaagtctgacttaaccatttttttctttcatggatcatgcttttggtgttgtatctaaaatgtcattgccataccaagcttatctagcttttctcctatg

SEQ ID NO: 200013 - DNA, 201 bp, Homo sapiens
tttgtttagatcttttgcccagttttttaattggctctcttattgttgggttttaagaattctatgtattttttgggtaccagtcttttttttttttttttgcatctcttatggattctttgttgtaggctcctagatgtggattgcagagttacagaacatttaggaatactagtacctactgtcaaagtgcacaaattt

SEQ ID NO: 200014 - DNA, 201 bp, Homo sapiens
ttttccataacaacatccttcagaattcgtcagtatgttcatgagtgcagttagagacacctagaaagttccaaaggaacattttgaaaacctgagtcatwctttctcatttgaagaaaactttcagaatttcttaggaaaataaacctctacttcaaaaataaatgcccaagctatttaaagattaaaacagaagctttc

SEQ ID NO: 200015 - DNA, 201 bp, Homo sapiens
aaggcagaggtcggaggagagaggcacagtcagtgtgcggaggaatcaggtagcagcaatccaaactcccagctggtcatctgagagcaggaagccagccrtggaggggtgggtgagaggggtctcagagcttcacagtgtcaggaatggataagctgataaagaccgaggtactagaaatagaattgtcccctgtgattc

SEQ ID NO: 200016 - DNA, 201 bp, Homo sapiens
tgagcacatccagactcttgagagcccagacttaagagagagaggctgtgagaaggaagatggcagttctctcctggaagtcttgacttctcagtcccagytttgtgtgttggtatgtgtactgaaaaacaatttatttgaagatacagcatagaaggaaaaataaaccatttcctatgaagtaatgattcaacttctaac

SEQ ID NO: 200017 - DNA, 201 bp, Homo sapiens
ttcccacactgagtggctggcctcaagcctgctgcctcctggggagagccctggctctcaaactctcccagggtctcactgtgcctctcagatatcctctrtggctgccccctccttccacctgccactcacacagaatctaaagtggatagagcagagtgggtgttggcctggttctttgaacttgggttctcaggagat

SEQ ID NO: 200018 - DNA, 201 bp, Homo sapiens
atttattatgtaacaagcacatgatcttattaaatgttttaaaaaatcaatagaaaatacgatataaaagtgggctccaaaggctctttttgcatatttcyatattcttatgtaaattccagaaacttttggtttctggagaagtgttctccagatcactgttcaattctgataaggaacccacctttctggtttgaatgt

SEQ ID NO: 200019 - DNA, 201 bp, Homo sapiens
cacatccagactcttgagagcccagacttaagagagagaggctgtgagaaggaagatggcagttctctcctggaagtcttgacttctcagtcccagctttstgtgttggtatgtgtactgaaaaacaatttatttgaagatacagcatagaaggaaaaataaaccatttcctatgaagtaatgattcaacttctaacctgt

SEQ ID NO: 200020 - DNA, 201 bp, Homo sapiens
agaacaagctgcaccacgagttgtttaagtttatagagagcacccaagagaaagggttgaaagatagagggaaggaggagttgtagcttagtagagttgamccagggctcagcctataagaaagaagagagagaaagaggagttagtttacatagaagatcaacaccatagagcaggggtgtccaatcttttggcttccct

SEQ ID NO: 200021 - DNA, 201 bp, Homo sapiens
aaatcattctgctgtggatgccaagtcaggatctcttggcttattcgccactttagtctcagatttgcctaaaatgaggaaagcaaaaagttcgtgatacyaatggtatagcaccatccagaaaactcttgagacaacacagatctcttcttggaggctgcgttatcaaacactgccctcattcgtcacagagatgtggca

SEQ ID NO: 200022 - DNA, 201 bp, Homo sapiens
ggaaactactcgtggttatgattctgtcatatgatcttctacctattcaaggggacttcaaactgggaagctgttggaaaccaacaaacataaataacaaygcttgggagcgatatggggtacaagctgaaagatgctataatgttggctatggggagaaaaggagcgaagagtaggaacttaactgtttccagagggggg

SEQ ID NO: 200023 - DNA, 201 bp, Homo sapiens
ggaaagaaagaaattcccataaggaagtaaatgtcctaaattagattatttatgtttaatggaataattgaaaatatttaatggaataattaaaaacctcrtgctaattttatgagggagtcattttcaaaagttctatgtgaaagaatttcaaaaaagagcccttctttgtgttcctagagaaaaaaaaatgtgatttgc

SEQ ID NO: 200024 - DNA, 201 bp, Homo sapiens
tcacctttttgacttttctctatgtcctctaaggctggaaacattgtggtctgctacatgactctcattttattaccggttagctgttatccttgttccgrattctgcctgagcttctttttgtatgtctctctttgcagctaatagaaagctataaaaatggaggcagtctgctaattcagggaccagaccactgttcac

SEQ ID NO: 200025 - DNA, 201 bp, Homo sapiens
agcttttgaaagtaggctaccagcaagctcgatgtgatcgcttctaactactgaagacctacccactatatctgggacttcctgtataggaatacaagagrcttaaaaaaaaaaaaaaaaaaaaaaacccaaaggtctagacacttgctgagctctctgacatacttggtaattgattaatggttgcacaatcctggattc

SEQ ID NO: 200026 - DNA, 201 bp, Homo sapiens
aagaagcttagctacagtcaccaagctatttctgcttatagccataattactctttcactcaggagaatgctaagccaacatagagatgcttttgttctcmactccacccctcactactccttcgagagagagaccatagagaccagtgctcagaaaataaatgaaaaaagtaattcagcatgattcagtttccctagcct

SEQ ID NO: 200027 - DNA, 201 bp, Homo sapiens
gtggaggaattttttttttttttaataaccgtgaactttatcctgaagtagcagcagagttccttttaagcaaaggaatgatagagtaaaaaaaaaaaaawatatatatatatatatatatatagtattttagaaagaaacaagtagcaagagtgtgtaaaatagcctagtggtatgggaatttggaagtccgcagacaca

SEQ ID NO: 200028 - DNA, 201 bp, Homo sapiens
ctgtaatgttcaatattttataaacttagaccatatcctcatgtagccaccttatcctcaggctacaaaattctgttttgttttttttttccagtcttctytcatatagaaactactacattttctgaatcattttgggtctcactctgtggattatctctagcctattaggtatgtgttggatgattaacagaaggtttg

SEQ ID NO: 200029 - DNA, 201 bp, Homo sapiens
ttctagctatttaaaactatttaatatattattaactatagtcatcctacaatggtatggaacactaggacttattctttgcatttaggtcatttatgctstttcaccttatgggatgtttgattatctataatgtgtgccatctaacttcttgagagataatgtgttccttttgcttattacctgctgggttatttaatt

SEQ ID NO: 200030 - DNA, 201 bp, Homo sapiens
aaatttaagtgccttatcttggtgtcagactcactccttggagtggttcctgtgaaaccttggatcgcgttacctgagactactctccacctcagatgtgrcaacacaaagctctttgcagattccctcagacaccatgacttacttttatctctttgttcacatccttccttcatcttgcgaggatttttcaaagcttct

SEQ ID NO: 200031 - DNA, 201 bp, Homo sapiens
aggatcaaggcagttgaccctgaacaggtcccatgctgctatcctttgtcgatctccccacaaagaaagggagtgtcattttaagacaacgcagttgaacrgaacaggatatccttttagagttttgtggaaaattgctagctacttcttcctgccctcttgccccccagtttagggatgttccttacctccattgtcctt

SEQ ID NO: 200032 - DNA, 201 bp, Homo sapiens
tcttgctttattgcttacatgtacctaattttattacataaatgctttcagttagttaattcatttttctttccttttctgtctcctttctcctttctttmtctgtttctctctctccctttttattaacttttaaattctgagaaatgtttcaatacagtcttgagaacataggctattttgttgttgtttttttgtttg

SEQ ID NO: 200033 - DNA, 201 bp, Homo sapiens
caggatcaaggcagttgaccctgaacaggtcccatgctgctatcctttgtcgatctccccacaaagaaagggagtgtcattttaagacaacgcagttgaayagaacaggatatccttttagagttttgtggaaaattgctagctacttcttcctgccctcttgccccccagtttagggatgttccttacctccattgtcct

SEQ ID NO: 200034 - DNA, 201 bp, Homo sapiens
tcctaaaatcccttaaattccaacgttgaattattcattcaaaaataatgtctgatgcctacacctgttccactggtgggagtcattcttcctgtggttayttgggacctatgatagcattgtcatcctcatgattacacattttctccagcggacaccacccctacctacccatgttgtcctctgctttctctctgctct

SEQ ID NO: 200035 - DNA, 201 bp, Homo sapiens
catgtacctaattttattacataaatgctttcagttagttaattcatttttctttccttttctgtctcctttctcctttctttatctgtttctctctctcyctttttattaacttttaaattctgagaaatgtttcaatacagtcttgagaacataggctattttgttgttgtttttttgtttgttggttggttttgagac

SEQ ID NO: 200036 - DNA, 201 bp, Homo sapiens
caacctctgtaccctgggtccagtaaagctataaccagaatatatttttaatcactgtgaccggcattcacttaagcagagatagggcaaggagaaagagmccatggtgtgtactattgtcaaactagttatctttcataggtttttagacttgtgactacttcaaaaccccttttctgttttcattgtttcagtgtgatg

SEQ ID NO: 200037 - DNA, 201 bp, Homo sapiens
cttctctccatttttctccattcttctcttcttcctaccttctttttcctctgatgttcaagtagccctcatcatttctataaatttccaaggcttcagcrttggtcaaagggaaggcactcagcccaggggcagtgagtaagtttaacattcttatggtcctttgcatctgctcacccaggactcatacatactcaatat

SEQ ID NO: 200038 - DNA, 201 bp, Homo sapiens
ggggcctggcatggtgggaacaggtggggatcttagtctgttcctgctgctaggacaaaatatcttagactggatcatgtttaagtaatagaaatttattkctcatggttctggattctgggaagaccaagatcaaggtgctagcaaattactctctgcttcaaagatggaaagctcttgctgcatcctcacataatggga

SEQ ID NO: 200039 - DNA, 201 bp, Homo sapiens
ctaagcacagaaatttattacaaatttccatggaggctttaaaattttaattacaatgtgactttgaagatctccagaaaatttaaaaaataatttctgtktcagccaatgtcataaaaatttattgacatttgatgcttatagtctgtttgcaatatgttagccatcaaggcagcaaatatttctttgatatgcatctag

SEQ ID NO: 200040 - DNA, 201 bp, Homo sapiens
agactgatgccatatctgctgtcaggctcagataattgaaaccttagggataggggtctagtcttgttagtatcctcacaatttggggagatttggaggcraaaaacaaaacaaaacaaaataattccctgtgtattagaagaatggatcatgacgctaccatcctggtattaactggaagatctaacaagatcttggtca

SEQ ID NO: 200041 - DNA, 201 bp, Homo sapiens
gtgggaacataattcaacatggatttatttcctgatccagaggtcaaagaacagaaatggatgaccaaatcagttatgactttttcacaaagggaaaagcygctagaaagcagctcagaaatgctccaatgccaagctgtgctatagcatcagaaccatgtacagttgcagaggaatttgatttccttgcattcatttact

SEQ ID NO: 200042 - DNA, 201 bp, Homo sapiens
ctcgctctgctcaaatgtatgcacagaagagaatggcttcagtattcagatacatctagacaattagtctgtttaatactgcattgactatcacctaaatyaaatagtagtagcttttaaaaaaattactaaacttaatcaacactatttggaaagggggctagagtcagatattatgatcagttgatggctagctcaagg

SEQ ID NO: 200043 - DNA, 201 bp, Homo sapiens
ggtaactcgatgagtgagtgcaaacatcctcccgctgggcgagatcgcaggcgctgttgcctttgcttgtgaccatagcacggacatcctttctgtgcttmtggaagtgcctggggctttggaaaaaggaggaaaaaatagagtgcttcatttagagaaactgtgatttaaatgtataagcacaaagggagggcgtgtgct

SEQ ID NO: 200044 - DNA, 201 bp, Homo sapiens
agctcttttgacgtccagcccagtgttgtatcagcaggttggtggttctcatttggtgccagaacaccccagccacataacaaaatcggtttgtttatggrgtctgttttgttgaggtacagtgatacctgtggcacttggcttgaaatgtggttggtttctccacagcaaaagttatgtaaatctgaacttaaagtgtcc

SEQ ID NO: 200045 - DNA, 201 bp, Homo sapiens
tgatagcatcagctggcggaggtgaggccttaggggaaactctgtttaggagaactgagaacaagctgcaccacgagttgtttaagtttatagagagcacscaagagaaagggttgaaagatagagggaaggaggagttgtagcttagtagagttgacccagggctcagcctataagaaagaagagagagaaagaggagtt

SEQ ID NO: 200046 - DNA, 201 bp, Homo sapiens
gttgaaagatagagggaaggaggagttgtagcttagtagagttgacccagggctcagcctataagaaagaagagagagaaagaggagttagtttacatagragatcaacaccatagagcaggggtgtccaatcttttggcttccctgggccacattggacgaagaagaattgtcttgggccacacatgaaatacactaaca

SEQ ID NO: 200047 - DNA, 201 bp, Homo sapiens
attttttgacagcttgtccggattagtgtttcttatccttcactgccagacagtggagatgagtcagggcagaagctgtaggtggaagactaagagtaggraggaatgaacgagagccagagtcaagagctacctgttctacttgacatcgtgacagctggcctctatgtaacggggttggatgactcaggattgtatctg

SEQ ID NO: 200048 - DNA, 201 bp, Homo sapiens
ccatctctctttagaatttgtgcatgtatatctacacttttaaatagccacagtttaaatctctctctctgtctgtgtgtgtgtgagagagagagagagaraaagagagagagaatgcaccatgtgtgagtgtgcacatatgtatctatagtttgatatgtatgtgctattttgggtgagtaaagtgggattccatatgga

SEQ ID NO: 200049 - DNA, 201 bp, Homo sapiens
catggagctatttatttggtacaatgatcatgcctctacccttcctttggaacttaacataactttttaaatagttaaaactttatcattcaacaaaaatkagaaattttgagcgatgccaagtaatatatacaggcattcaaaagaatggacactctttctccctttactgctgacttcttattcagtggcctcatttaa

SEQ ID NO: 200050 - DNA, 201 bp, Homo sapiens
atgaagacttcttggtaaggatgaaagtaaattgatttttgttccaggaagaaagggaattttattaaaagcaagggaaatattttcgatatattaaaatkttttatggttctgttttaggttgagtttaagaattttatttttataaaactaccaagacagagcaaagaacctttgatcttcacaattgaagaaaacata

SEQ ID NO: 200051 - DNA, 201 bp, Homo sapiens
tgttagtatatagaaatactatggattttttttttcttttgatacagggtctcactctgtcacccaggctggagtgcagtggtgcgatttcagctcactgmaacctctgcctcctgggttcaagtgatcttcccacctcagcctcctgagtagctggggactacaggcacatggtaccatgcctagctaacttttgaagta

SEQ ID NO: 200052 - DNA, 201 bp, Homo sapiens
tgggagggccaggcgcggtggctcacgcctgtaatcccagcactttgggaggctgaggcaggtggatcacctgaggtctggagttcaagaccagctgaccwacatggtgaaaccccgtcactaccaaaaatacaaaaaattagccgggcatggtggcgcatgcctataatcccagctacttgggaggctgaggtaggagaa

SEQ ID NO: 200053 - DNA, 201 bp, Homo sapiens
atgtttttttttttttttttttttttttttggtgtgtttttaaaatgtttgtttccaattgctcattgttagtatatagaaatactatggatttttttttycttttgatacagggtctcactctgtcacccaggctggagtgcagtggtgcgatttcagctcactgcaacctctgcctcctgggttcaagtgatcttccca

SEQ ID NO: 200054 - DNA, 201 bp, Homo sapiens
aatacacttatgctgagtttttcctgagtttttgatccatagatagataggaatctggtgggagttggaaatatgggcaaaaaatggtgggagggccaggygcggtggctcacgcctgtaatcccagcactttgggaggctgaggcaggtggatcacctgaggtctggagttcaagaccagctgaccaacatggtgaaacc

SEQ ID NO: 200055 - DNA, 201 bp, Homo sapiens
attacttacggctcagagataagctcgaggaagtgcctgcagccctcaatttctggatgaaaccttaagattatgcgtggagttttgagtgtgtgtgtgtktttctgttttggaagatccatagttacagtaaaagttcaatgaccccaaactgtcactgagttagcaaaatgcatttttatgtatatttaggagtttttg

SEQ ID NO: 200056 - DNA, 201 bp, Homo sapiens
ctttccagtgtgttttgcatttacaggcgcatccacagtacctgccaggagacccagtgcatgctgggtggtggccatatagaatggcagtgtactgtgcragtcaccggattgatatcaaactctgtaacttcctaactgctagagagttttctctctcatatctcagtccccttgatgatacatgtctcatgcatgggt

SEQ ID NO: 200057 - DNA, 201 bp, Homo sapiens
tttgaggagaagtctgtttgtggggtgcctgagatacaggtgagcactgatttagtgcgcatagactataggcacctgcacttcttggccaggagggtgcygttatagcagacagtttttatgctttgggtacattaacttaatacttctctttaagcattccatttttatgttctcatttccttgtttgtgatatataca

SEQ ID NO: 200058 - DNA, 201 bp, Homo sapiens
catctgcttcgcttctggtgaggcttcaggaagtttacagtcagggcagaaggtgaatggggagctggcatatcatatggtgggagagagagcaagagagacgggggaggcaccatactcatttaaacaactaattctcacatgaactcagagtgagaactcactcactacctcaaggagggcaccaggtatttatgaggg

SEQ ID NO: 200059 - DNA, 201 bp, Homo sapiens
ccaacattgggaattacagttgaacatgagatttggatatgaacacagatccagacatatcaatggtcagtgctgggagagctgtgtgggtcaatggagckcactaaagctaccatcagtccaagacaataagctcaatgtgccctgatggcttgccaaggccagcgatgctaccaacgttatccaatcagttgaggacac

SEQ ID NO: 200060 - DNA, 201 bp, Homo sapiens
gcatctgcttcgcttctggtgaggcttcaggaagtttacagtcagggcagaaggtgaatggggagctggcatatcatatggtgggagagagagcaagagagacgggggaggcaccatactcatttaaacaactaattctcacatgaactcagagtgagaactcactcactacctcaaggagggcaccaggtatttatgagg

SEQ ID NO: 200061 - DNA, 201 bp, Homo sapiens
atgaaatacactaacactaacaatagctgatgaactgaaaaaataaaaatcacacacacacacaaatcttacgatgttttaagaaagtttacgaatttccrttgagcctcattcgcatccatcctgggtcgcatatggcttgcgggctgtgggttggacaagcttgccatagaggattctgataagctctgagagttttag

SEQ ID NO: 200062 - DNA, 201 bp, Homo sapiens
ctctaggaccacaaggcagaggtttcatggagccgagatcacaccactgcactccagcctgggcaacagagcgagactctgtctgaaaaaaaaaaaaaaaactcaaacaacaacaacaacacaccccaaaactgttacttactttctaccagaggcagtgatgcctgcatccaagccaccccatgccctctgaaagactta

SEQ ID NO: 200063 - DNA, 201 bp, Homo sapiens
tccaggaaagaatgaaccacttacctatagacacttacagagaagaatcttgatatatagttgaggccttcattaagcaggtaccgagtagctcaggtttkgggccaatggttgtaaccatgacacatacatagattacttagaagcctaattaatggcttaagctccattagatttatttaagtgataagaatctgccta

SEQ ID NO: 200064 - DNA, 201 bp, Homo sapiens
tggctgggtacggtggctcacacctgtaatcccagcactttgggaggccaagatggccagatcacttgagaccaggagttcaagaccagcctggtcaacayggcaaaaccccttctctgctataaatacaaaaattagacaggtgtggtggcatgcgcctgtaatcccagctactcaggaggctgtaatcccagctactca

SEQ ID NO: 200065 - DNA, 201 bp, Homo sapiens
tatatgatggcattttttgtagcacttagctttgcaggtgttcaagaagcagcctcaacttaaaaatactgttactggctgggtacggtggctcacacctrtaatcccagcactttgggaggccaagatggccagatcacttgagaccaggagttcaagaccagcctggtcaacacggcaaaaccccttctctgctataaa

SEQ ID NO: 200066 - DNA, 201 bp, Homo sapiens
cttcctaataataagccagattttgttttgtacttcttgccaaaatgtaactccatgatgacatttgttttgtacattgctgccttcttactgcctcaaayggggcctggcatggtgggaacaggtggggatcttagtctgttcctgctgctaggacaaaatatcttagactggatcatgtttaagtaatagaaatttatt

SEQ ID NO: 200067 - DNA, 201 bp, Homo sapiens
taattacaaccttaagccatcccttcagaagtagtcatatgccaaattctaccttagtctaaaataattctttttctgtgtgatggggctaaaaacatcarttctccctgctgctctccacagatgtccaggtaccttaatggttaggttctctgtaccttgagcttatttgcaaggcagagcctcaaaagaactgctttt

SEQ ID NO: 200068 - DNA, 201 bp, Homo sapiens
atcttgtactaaatagacactgtctttccttaacatttaggtaggacggacttataaaacatctagcctctttgacatttttggggagggggtagtggggmaggtaaaatgaggaacattttttgataactctttcaatttttaaaatagccctaatctatttaatttctgtatttattacaccaaacttcgtaagttata

SEQ ID NO: 200069 - DNA, 201 bp, Homo sapiens
agttctgtatactttttattccccaatattgtcttctgtacagcaataattacaaccttaagccatcccttcagaagtagtcatatgccaaattctacctyagtctaaaataattctttttctgtgtgatggggctaaaaacatcagttctccctgctgctctccacagatgtccaggtaccttaatggttaggttctctg

SEQ ID NO: 200070 - DNA, 201 bp, Homo sapiens
gtggtgtcacagccggcggggacacctccgggcatgcctgacctggtggtggaacaagcctcggggtgagtgtgcttctcctggcctgtgaggctggcctyagggtgacatccatgtctggttcgcctttgaacttgacatcgttctaatgacatcaaatgattttgaagtgtagattttcttgttgtgtttccttagagt

SEQ ID NO: 200071 - DNA, 201 bp, Homo sapiens
tttgccaaatatgcttgtcatttcttctaattaggtttttaaataaatcaaagaactcttgttttcatttaccttggattatacagcaacaatcttgttgygtatgttgccagagagacaatgcctactgagaggacaccagattcctgacattctaagagcttaggaaggttcctcccctccactttcctaagcattcca

SEQ ID NO: 200072 - DNA, 201 bp, Homo sapiens
gctttgccaagttctgtatactttttattccccaatattgtcttctgtacagcaataattacaaccttaagccatcccttcagaagtagtcatatgccaamttctaccttagtctaaaataattctttttctgtgtgatggggctaaaaacatcagttctccctgctgctctccacagatgtccaggtaccttaatggtta

SEQ ID NO: 200073 - DNA, 201 bp, Homo sapiens
acttgatgctagtttaaagttgaatgtgatcattacaactgaatcttctcctggaattttttggagagaagcagcatcctgagaatttctcctattagagwtcagttcctcagaaatcacctcaaaggcccacctcagcaacctctctgaatatttggaacctggaaattccaacctcattattatggaagtaaagacaca

SEQ ID NO: 200074 - DNA, 201 bp, Homo sapiens; identical to SEQ ID NO: 35068

SEQ ID NO: 200075 - DNA, 201 bp, Homo sapiens
tctttgtttagcagtttttatatttacttttatttttttcttctataattttggaaaaaaagagttagctgactgctactatgggcagacaacaatgtggyaataggatattatttttaaaactaaaaaataactgaatatgaaagatcaaacttttaaaaaatagacataagtgttcagagttgtgattctattttgcat

SEQ ID NO: 200076 - DNA, 201 bp, Homo sapiens
ttgcacatgaaaatatttaggagtaaaagttcacagaacttggcaaagctagatgcatttatgattcccagtgaatcaactgatgtttttccctatgtctyttcaagccattctttgtttagcagtttttatatttacttttatttttttcttctataattttggaaaaaaagagttagctgactgctactatgggcagac

SEQ ID NO: 200077 - DNA, 201 bp, Homo sapiens
tgctttgcacatgaaaatatttaggagtaaaagttcacagaacttggcaaagctagatgcatttatgattcccagtgaatcaactgatgtttttccctatrtcttttcaagccattctttgtttagcagtttttatatttacttttatttttttcttctataattttggaaaaaaagagttagctgactgctactatgggc

SEQ ID NO: 200078 - DNA, 201 bp, Homo sapiens
ttgctttgcacatgaaaatatttaggagtaaaagttcacagaacttggcaaagctagatgcatttatgattcccagtgaatcaactgatgtttttccctaygtcttttcaagccattctttgtttagcagtttttatatttacttttatttttttcttctataattttggaaaaaaagagttagctgactgctactatggg

SEQ ID NO: 200079 - DNA, 201 bp, Homo sapiens
tttttcttgagctgcttcccatttatgcctcattagcataattcacagcggtcatccatacctgtgaattcgtgttagattacctttgctgtgtttgatgrttatactaaatttcatttttttgcgagctaagccttcacagtttgttgctcatgtaccatggctggctgctcacaaaatagaaaaattggacagaatgtt

SEQ ID NO: 200080 - DNA, 201 bp, Homo sapiens
gaaatcgtaattaaaatagtcatccattgggaaaagaagttgaaacttggtaaatcagacttacagtaactccaagaattggagccagaaagaagcatgcrgagcacctagactggttcctagtgtagtggccaccctttaacgacatggtccatgcttcgttttttgtgaccttccgtcacatgccttgcatttcattgg

SEQ ID NO: 200081 - DNA, 201 bp, Homo sapiens
aaaaatagcaatatatatatacaaatatatgtgtatatgtgtgtatataagtgtacaaaaggcattatagtagtctgtaagaaattatatgatcatttaamatgttgatgtaaaaaattaatgacaaatttatgatatattactaagaaaggttgtaaaacagtatgtaaatgaattgtggttttgtttttataaaaatac

SEQ ID NO: 200082 - DNA, 201 bp, Homo sapiens
catccattgggaaaagaagttgaaacttggtaaatcagacttacagtaactccaagaattggagccagaaagaagcatgcagagcacctagactggttccyagtgtagtggccaccctttaacgacatggtccatgcttcgttttttgtgaccttccgtcacatgccttgcatttcattggctttaataaatacacattaa

SEQ ID NO: 200083 - DNA, 201 bp, Homo sapiens
tgaaagaagttaaggcaattcattattactattaaatcagggctaaagggtgaaaggcagacagagttatgcttttctgtctcataaaagaaaaacaactmtatatgagtagcaaatgcctggttgaattacaattatttataaaaatcaatgtttctacatagtgcgtgttacaaggggcaagccttacactgaactaag

SEQ ID NO: 200084 - DNA, 201 bp, Homo sapiens
ataaaaatacgtatagaggcatataaaagacaaaatctagttatcaatggaaggttagtagtggttatcttagtttggtggaatgattagggatattcctyttcttctttgtgcttttcaagctttccaagatttctttaatcaatatctaccacttttgtattgagaaactagcttagtttttagagagatgaaatagcc

SEQ ID NO: 200085 - DNA, 201 bp, Homo sapiens
gctgtttctttaagaactcacttcttcttaaaggaacaaggtggaaagagcttcacaaaagttggaagaggatgcaaatgtatttcagggaagcatttcasagaagttagaactctacttttgcttttctaacaactcccaaaattgaagtttaattgtcaggtcaccaggaaagtatccaattgttaaaatcagattcct

SEQ ID NO: 200086 - DNA, 201 bp, Homo sapiens
tatttataaaaatcaatgtttctacatagtgcgtgttacaaggggcaagccttacactgaactaagaaatgttaatgaaaacaggatatttataaggtacwaaatgtagaatgattacataactttaaggatcttgtctcaacatgagttaagatttatattcataatatctttaaaaagtaaaaaaaaacttgcaaacat

SEQ ID NO: 200087 - DNA, 201 bp, Homo sapiens; identical to SEQ ID NO: 35062

SEQ ID NO: 200088 - DNA, 201 bp, Homo sapiens
gagcttcacaaaagttggaagaggatgcaaatgtatttcagggaagcatttcacagaagttagaactctacttttgcttttctaacaactcccaaaattgmagtttaattgtcaggtcaccaggaaagtatccaattgttaaaatcagattcctgtgcctttaagtaatgatgtattgtttaacttcaattattaatacca

SEQ ID NO: 200089 - DNA, 201 bp, Homo sapiens
agtgctaattagagctgcaactctggcttcagctatgatattattatctaggactgaataaacaatataaggcttatggaaattgcagaagcgctagggcrataataatagtaacaacaactattattatttttgaccacttattatttgccaggaaggtgctaactgccttatatatgtctcatttagtgctcactacat

SEQ ID NO: 200090 - DNA, 201 bp, Homo sapiens; identical to SEQ ID NO: 35063

SEQ ID NO: 200091 - DNA, 201 bp, Homo sapiens; identical to SEQ ID NO: 35066

SEQ ID NO: 200092 - DNA, 201 bp, Homo sapiens; identical to SEQ ID NO: 35069

SEQ ID NO: 200093 - DNA, 201 bp, Homo sapiens
gttccacccatagtgcttctgtagacctgggatgggccctggaaatttgtgtttctgacaagtttctagctgatgcacactttgagaacaagtgatttaakcccaggctttatttgaggatcaagtagggcagcagggagtgttgattaactcccaggaaagtcagtacaacctctgattgggtccttattacttcttcta

SEQ ID NO: 200094 - DNA, 201 bp, Homo sapiens
ttttacctttgtgttgagaattcgtatttgctcagcaaccatattgttaagagttcatttgactttctgcatctatagaagcacataaaaagaatttttttctttttgtactcaaggcacacatgatatatgatggcattttttgtagcacttagctttgcaggtgttcaagaagcagcctcaacttaaaaatactgttac

SEQ ID NO: 200095 - DNA, 201 bp, Homo sapiens
tcccaatttgcaccaatttgcagggtaggctgacaggctagagacccagggagcagttgatgtttaagctcaagtccaaaggcaggctgaggtcaaattcytcctgttctgggaaggttcttcttttttctttttagagtcttcagcaagttggatgaggcccactcatgtttgctttactcaaagtctactgagttaaat

SEQ ID NO: 200096 - DNA, 201 bp, Homo sapiens
ttttgaggcagtgccactgagcctggagctgtgtgtctggagccttgcgtatccaaggagaaagcgcttgagtggccctgagtcagaaaaagcctttggcrttgcctctcccttttttgtaatagtgcctctttctccctggctgcggttcccttctcagcctcccctgtttggcatgcccattacacccctggcagggtg

SEQ ID NO: 200097 - DNA, 201 bp, Homo sapiens
aaaacgaaattagctgcacatggtggcgtgcacctgtagtcccagctactcaggaggctgaggcaggagaattgctttggaggcagaggttgcagtcagcygagatcgtgccactgcactccagcctgggcaacagagtgagactccatctcaaacataaataaataaataaaataataaaaaaaacccagtgcctagaaa

SEQ ID NO: 200098 - DNA, 201 bp, Homo sapiens
aaaagctggtgatatctgtctgagcactggttagacaagaggaaatgatggcagatggaggcctgaggatagttaggtttcactggcagagaccagatggwcccactggattggagaggcccggctatgtgagcctgatgtcaccccttaccctcaatgcatccagctttccttcatcttttcccatgcctactctttgca

SEQ ID NO: 200099 - DNA, 201 bp, Homo sapiens; identical to SEQ ID NO: 35060

SEQ ID NO: 200100 - DNA, 201 bp, Homo sapiens
atgaggaaactgaatttatcgaattatttttgctataaatatttattagtgtggacaataattaataccaccactactaatagcatttaggttccctacascatgttttaccatggagctttaaaacacaccagtgggctgggcgcagtggctcacacctataatcccagcactttgggaggccaaggtgggtggatcacc

SEQ ID NO: 200101 - DNA, 201 bp, Homo sapiens
gcttgaaggcaaaacaaagaaacagacagaaaggggagatgactttccaaaaaggtgagttgctggttatcaaagggtaatacgggccaactagggatgtygttttaagatgggaaattgtgtttcgatgctgagaggaaagagtaggtagagagaaattggtttaagattcaagagaggaaattttggttgaattaagat

SEQ ID NO: 200102 - DNA, 201 bp, Homo sapiens
atcataaaacgctagttctgaaagtgattgtagcagcatactgtaatcactttacatatgaggaaactgaatttatcgaattatttttgctataaatattyattagtgtggacaataattaataccaccactactaatagcatttaggttccctacagcatgttttaccatggagctttaaaacacaccagtgggctgggc

SEQ ID NO: 200103 - DNA, 201 bp, Homo sapiens
aaagaattgtaggtacaacctagaatcataaaacgctagttctgaaagtgattgtagcagcatactgtaatcactttacatatgaggaaactgaatttatsgaattatttttgctataaatatttattagtgtggacaataattaataccaccactactaatagcatttaggttccctacagcatgttttaccatggagct

SEQ ID NO: 200104 - DNA, 201 bp, Homo sapiens
ggaggcggagcttgcagtgagccgagatcccgccactgcactccagcctgggcgacagagcgagactccgtctcaaaaaaaaaaaaaaaaaaaaaaaaaaagaattgtaggtacaacctagaatcataaaacgctagttctgaaagtgattgtagcagcatactgtaatcactttacatatgaggaaactgaatttatcga

SEQ ID NO: 200105 - DNA, 201 bp, Homo sapiens
aaaaggagaaataattattttgaggactggctagcagtcttggccacaaagaccaaggagagaaacgtagttaatgctaacatctgtggattgggaggaaraagggaaactagagagtaatagcaacaataataaatataatgaacatctattaacttcttgttttatgcggaacattgggctttatgcatttttatgttt

SEQ ID NO: 200106 - DNA, 201 bp, Homo sapiens
gaggctgagatgggtgaattgcttgagcagaggagttcgaggctgcagtgaactatgattataccactgcactccagtgtgggtgacagagcaagaccctrtctatagaaataaatttttaaaaatattcatttaattttgttttcccacagaattttgtacgtcatcactgggtgcacaggcgtcggcaggaggggaaat

SEQ ID NO: 200107 - DNA, 201 bp, Homo sapiens
ggcgcggtggctcacgcctgtaatcccagcactttgggaggctgaggcgggtggatcactaggtcaggagatcgagaccatcctggctaacatggttaaamcccgtctctactaaaaatacaaaaaattagccgggtgtggtggcgggcgcctgtagtcccagctactcgagaggctgaggcaggagaattgcgtgaaccc

SEQ ID NO: 200108 - DNA, 201 bp, Homo sapiens
aaaaattgataaataaataatgcaaataatctatatttacaataataagtgagggtatgctcttgacattttatttattttttaattgtacacttttgccstatgtgcattttgctggtatgtctctgaacatgacctttgctaaattaactccttcctgactttacttttgttccagtgaggggtgtttggctgttcttc

SEQ ID NO: 200109 - DNA, 201 bp, Homo sapiens
ggcaagtgtatacctatgtaaagctgcacattctgcacgtgtatcccagaacttaaagtataataaaaaattgataaataaataatgcaaataatctatakttacaataataagtgagggtatgctcttgacattttatttattttttaattgtacacttttgccgtatgtgcattttgctggtatgtctctgaacatgac

SEQ ID NO: 200110 - DNA, 201 bp, Homo sapiens
tacatccctttggccttaccagggaaatattgggaaggaaggaccttgtattactacctaatgaccccatagtattgtttgacagtctatacaaccagatragcaggcaaggtagtaccctgctaaagagacaggctttctcatatctcataaatatttcacatcctggttctacatgctggttttattccatattagcca

SEQ ID NO: 200111 - DNA, 201 bp, Homo sapiens
gttttaaacctctttgtagctgtattactttcttattgctgctgagaacaaatgaccacaacagtggcttaagacaacatacatttattattttaaattcrtggagatcagaagtctaaaatgggtttgtaggcctgtgttccctctggagattctatggaagaattagtttccttgtctttttcagctactggaggctgc

SEQ ID NO: 200112 - DNA, 201 bp, Homo sapiens
tttatatgtgtgtagtaattaaaggctataaacttaaaatcatggaatacactaataaatatatttgtacattgcttatgatttcagtgaaatccaaaaaattgaaaattcagaatggcacttttattataagagagctttgaaatagaattactggaatgagaaaaaagactgtttcttttagactctttatcttgtaat

SEQ ID NO: 200113 - DNA, 201 bp, Homo sapiens
gggttgttgaggccaagctaggctgagacccttgattcccaggtctaaattccaggaagacagtgaatcttagaagtctaaagtctgaatggccaggcgcrgtggctcacgcctataatcccagcactttgtgaggccaaggcgggtggatgacctgaggtcaggagttcaagaccagtctggccaacatggtgaaacccc

SEQ ID NO: 200114 - DNA, 201 bp, Homo sapiens
gttcgagggttgttgaggccaagctaggctgagacccttgattcccaggtctaaattccaggaagacagtgaatcttagaagtctaaagtctgaatggccrggcgcagtggctcacgcctataatcccagcactttgtgaggccaaggcgggtggatgacctgaggtcaggagttcaagaccagtctggccaacatggtga

SEQ ID NO: 200115 - DNA, 201 bp, Homo sapiens
gctctttgggaggccgaggcagctggattgcctgagctcaggagttcgagagcagcctgggcaaaatggtgaaatcccatctctatcaaaatacaaaaaaytaggcaggcgtggtggcatgtgcctgtagtcccagctactcgggaggctgaggcaggagattgcttgaacctgggaggcagaggttgcagtgagccgaga

SEQ ID NO: 200116 - DNA, 201 bp, Homo sapiens
ccattatctcttgtctctctaagttttgggccatagcggcagtcctgtccctgaactttctgcctactactgtcaataattttgtcacgcagttgcaaaamtcttccccagatattatgctcaaaatacatcaaaatgaaattaccctctgggacaagtataccttttactcaaaggacacatggatgtccactgaccttg

SEQ ID NO: 200117 - DNA, 201 bp, Homo sapiens
ggcaggagaatcacttgaacccagaaggtggaggtggcagtgagctgagattgtgctactgcactccagcctgggtgacacagtgagactctgtctcaagraagaaaaaaatatgagaaagcagagggaaacattccccaataatgcacttggaagtggaggtgaaagaggtggttctgctctcatttctgtgacctttgg

SEQ ID NO: 200118 - DNA, 201 bp, Homo sapiens
ccacctcccaggcctccctttctccatggaaactcccattccacctctccctccctcattctctctcctttcttcttccttttcttttctttctttctttyttttttttttttttttttttttttttttgagacggagtctcactctgttgcccaggctggagtgcagtggcacaatctcagctcactgcaacctctgcct

SEQ ID NO: 200119 - DNA, 201 bp, Homo sapiens
ccattcccaagcaagcacaacttcacataatactttccagaagttcattgctgaagcctttccttcacccagcagagcaacttgattttctacaacttccytcatcagagccacaagagtatgggatatggagaccactaaaactacatccctttggccttaccagggaaatattgggaaggaaggaccttgtattactac

SEQ ID NO: 200120 - DNA, 201 bp, Homo sapiens
tgagagatgacaatttttttccccttggtctgttaatatggtgcattttactaattgatttttaaatagaaatcaatatcgtatttatgagaagaactcarattggttcttatatttaccgcctttatacattgctagatttgatttgctaatattttgtttagatatttacatccatgttcataagtgtgattagtcttt

SEQ ID NO: 200121 - DNA, 201 bp, Homo sapiens
atagtcagcatcattgacttgttcctgatcccaaagtgagtgccatccacaagtcacaattaagtaagaagttcactgccaggtggtcatgatgcaggtgrcagtacttgttttgtggatatttcttataaggatcttttccttcgctctaatttgttaaattcaacagatgttgaattttatttaatactcttttcttca

SEQ ID NO: 200122 - DNA, 201 bp, Homo sapiens
tgttgtcaaaaagcatggtctacccaaagccattcttcaagcatctgatttcccagctgtctttctgctatatatttaaacttctagttctctttggggargagggtggtagacttgtgtgaggatatagtctgaatgaagtctccgagtgattttttgttgatgttataggggtgggagttcggggagaggagggagagt

SEQ ID NO: 200123 - DNA, 201 bp, Homo sapiens
tattcctgctaaagttttaaattcataaatcttatctgaagcgtctttttgtgggaagagaattctatataggcaatctcatctacaaagaattttgtttygtcctttccaatcattatgctttgtatacatatttctggtgctttctgcactggttaaaaccttcagtgcagtattgactagtaacagagatagtcagca

SEQ ID NO: 200124 - DNA, 201 bp, Homo sapiens
ttataggggtgggagttcggggagaggagggagagtctttggcctcacactcccctctgagtcctgaatggggttctctcagcatctcattttcccgctaytcctgacacactcctccctgaccctattttagaggtccctgttatcaaatggaagtgcttcttatgtcttccttcattctgctaagctgactgttctcta

SEQ ID NO: 200125 - DNA, 201 bp, Homo sapiens
cccagtggaaacattaagttttaatgttacatctggaaactggagccctactccttgttagaagataagcttggcagtgattgattgcactgtcctctgcrtttcctctgtattgaatgcctatcacttcgtcatttaaattgctcctggagccatctcctgggcccaggctgcttccctggctctgagaactcatcttcc

SEQ ID NO: 200126 - DNA, 201 bp, Homo sapiens
caaactcttaactctcttttatcggccatgtccctggaaaaccaaagacatgattgaatggatagaactatggagataattcttccctcctctaacaagartatatttactactgtgtaagttaatttctttttaatgacaaaacagagcagaacaaaaataacaacttctccctcctgctggtaatgatttgtccctgta

SEQ ID NO: 200127 - DNA, 201 bp, Homo sapiens
aagttcaattgagaaatcatttgtgaaatcactttctgatttttttttttttttttttttttgagacggagtctcactctgtcgcccaggctggagtgcartggcacgatctcggctcactgcaagctctgcttcccgggttcacaccattctcctgcctcagcctcccaagtagctgggactacaggcggccgccaccat

SEQ ID NO: 200128 - DNA, 201 bp, Homo sapiens
tctcattgtggttttgatttgcatttctctagtgatcagtgatgatgagctatttttcatgtttgttggccgcataaatgtcttcttttgagaagtgtctrttcatatcctttgcccactttttgatggggttgtttttttttcttgtaaatttgtttaagttccttgtagattctgcatattagacctttgtcaaatgag

SEQ ID NO: 200129 - DNA, 201 bp, Homo sapiens
tattttattttattttatatattttgagacggagtcttgctctgtcacccaggctggagtgcagtgacacgatctcagctcactgcaacctccacctcccrggttcaagcaattctcttggctcagcctcccaagtagctgggattacaggcatgtgtcaccacaccaggctaatttctgtatttttagtagagacggggt

SEQ ID NO: 200130 - DNA, 201 bp, Homo sapiens
atttgaggaatcagggaccaaaatttcaactttttttattttattttattttattttattttattttattttattttattttattttattttatatattttgagacggagtcttgctctgtcacccaggctggagtgcagtgacacgatctcagctcactgcaacctccacctcccaggttcaagcaattctcttggctca

SEQ ID NO: 200131 - DNA, 201 bp, Homo sapiens
acttatttgaggaatcagggaccaaaatttcaactttttttattttattttattttattttattttattttattttattttattttattttattttatatattttgagacggagtcttgctctgtcacccaggctggagtgcagtgacacgatctcagctcactgcaacctccacctcccaggttcaagcaattctcttgg

SEQ ID NO: 200132 - DNA, 201 bp, Homo sapiens
atcccaggctttatttgaggatcaagtagggcagcagggagtgttgattaactcccaggaaagtcagtacaacctctgattgggtccttattacttcttckatgttattcctgttttcttctcctgtcccctctgtacacacaagatcatccacacctgcggcttcagctgccaagtctttattgctgcctgcacagccgc

SEQ ID NO: 200133 - DNA, 201 bp, Homo sapiens
ttgacttatttgaggaatcagggaccaaaatttcaactttttttattttattttattttattttattttattttattttattttattttattttattttatatattttgagacggagtcttgctctgtcacccaggctggagtgcagtgacacgatctcagctcactgcaacctccacctcccaggttcaagcaattctct

SEQ ID NO: 200134 - DNA, 201 bp, Homo sapiens
tttgacttatttgaggaatcagggaccaaaatttcaactttttttattttattttattttattttattttattttattttattttattttattttattttatatattttgagacggagtcttgctctgtcacccaggctggagtgcagtgacacgatctcagctcactgcaacctccacctcccaggttcaagcaattctc

SEQ ID NO: 200135 - DNA, 201 bp, Homo sapiens
ttgggatttgacttatttgaggaatcagggaccaaaatttcaactttttttattttattttattttattttattttattttattttattttattttattttattttatatattttgagacggagtcttgctctgtcacccaggctggagtgcagtgacacgatctcagctcactgcaacctccacctcccaggttcaagca

SEQ ID NO: 200136 - DNA, 201 bp, Homo sapiens
attgggatttgacttatttgaggaatcagggaccaaaatttcaactttttttattttattttattttattttattttattttattttattttattttattttattttatatattttgagacggagtcttgctctgtcacccaggctggagtgcagtgacacgatctcagctcactgcaacctccacctcccaggttcaagc

SEQ ID NO: 200137 - DNA, 201 bp, Homo sapiens
tattgggatttgacttatttgaggaatcagggaccaaaatttcaactttttttattttattttattttattttattttattttattttattttattttattttattttatatattttgagacggagtcttgctctgtcacccaggctggagtgcagtgacacgatctcagctcactgcaacctccacctcccaggttcaag

SEQ ID NO: 200138 - DNA, 201 bp, Homo sapiens
ataggacagttggatcataaatttcgagtagggtcaagagtcactttatgactattactagaaaagatcattaccaaaagagtaaactaagaaaaaaaaamcaaaaaagaaaaataaaaacatgaaaaatggcctccttttttacatttccacataggtgatctccatacgaggagatgaacttgaacttggttgggcggg

SEQ ID NO: 200139 - DNA, 201 bp, Homo sapiens
tcctgagtagctgggactacaggcgtgtgccaccacgcccagctaatttttttgtatttttagtggagacggggtttcaccatgttggccaggatggtctygatctcctgacctcgtgatctgcccgccttggcctcccaaaatgctgggattacaggtgtgagccaccatgcccggcctgtatctttattttaatagggg

SEQ ID NO: 200140 - DNA, 201 bp, Homo sapiens
cagctaattcactcaaaagagaaaatatctcattttgttccatctcacctttggagttgttcatttatccaatcagtcacaaaagtgttaagtgtctacartgatcagttatgctatgtagttatgttttacaaatatgctatatggaactttggtttggggcccctttgtatcttacttggactttggaaattctctcat

SEQ ID NO: 200141 - DNA, 201 bp, Homo sapiens
tgaatatgttgatttatttcatttgaatatgatatgactgccacaaaaaactcccaaatacttagtttatatattgaatcactggactgcatagaactttrgagatcattttgtgtagttcattcaacctacacttattatgtgtcaggcactgtcttagttgctggggatgaagataaatgaaaagactagtttcgctcc

SEQ ID NO: 200142 - DNA, 201 bp, Homo sapiens
aaaatgataaaaatttttgtggtagtttgtggtagatattccctacagtcccttccagaatggacattgggatcatgttccaatcactcatttgtgaagarcactctaaatctgaaaggaaggcaagcagtcagtggtatttgttgttacccagttgagatgaattgtttgcattttaagagacagctaattcactcaaaa

SEQ ID NO: 200143 - DNA, 201 bp, Homo sapiens
tcagtcccatcagcagaaactttttgtggttttgtggttttggactagtcctgtgctttttatgactcagatttttatccttaaaatgataaaaatttttrtggtagtttgtggtagatattccctacagtcccttccagaatggacattgggatcatgttccaatcactcatttgtgaagagcactctaaatctgaaagg

SEQ ID NO: 200144 - DNA, 201 bp, Homo sapiens
gccttaatttattctgcctgatttcagtcccatcagcagaaactttttgtggttttgtggttttggactagtcctgtgctttttatgactcagatttttawccttaaaatgataaaaatttttgtggtagtttgtggtagatattccctacagtcccttccagaatggacattgggatcatgttccaatcactcatttgtg

SEQ ID NO: 200145 - DNA, 201 bp, Homo sapiens
ggtaaaattactatgaaattattcttgattatcattataattatcatataaaatattgatcatgcttattatttccttttaggtcaccagtctcttcagargatcatggtaagaatcatctgtcttatttataccaattcaggattgaaacttgacccctggtctttgcagttcattgtcagagcaaataattgtttaagc

SEQ ID NO: 200146 - DNA, 201 bp, Homo sapiens
tttcacagcaattttgcaggcagtaatagctggtgatcttatgaaggtaagatatcttcctaccaaatctttggcgatgctttaagaactttaaatcaacrtcattcctcatcaaaactctatgttcccatctatcatttatcatcccctgcttgcactggctgggtagaagaggcaggatgttcttttgagaactgagca

SEQ ID NO: 200147 - DNA, 201 bp, Homo sapiens
ctttggccatttccctgctatggatttgagtgagccaatcattcagagaagaggactccttcaaaataggggaagtatgtgatgtcttgtctttcccttcraaatttcaacaactctgaatataatgttatatgtctctctctttctcctcagaaaagaataagtgtgagtcaaagccgtagtcttcaagctggaggtgaa

SEQ ID NO: 200148 - DNA, 201 bp, Homo sapiens
aagcatcccaaagtagctaaaaattattttcaaccatttttgtattgactgaatgattcttgtcctgaggtttatcttcatgtctcataaatattagttayagtaattggcagctctattgccaaactcctgagtttatctttggccatttccctgctatggatttgagtgagccaatcattcagagaagaggactccttc

SEQ ID NO: 200149 - DNA, 201 bp, Homo sapiens
ccagtgagaaaggctggtatgtggatgataaaaaataagggaatccagtgggaggataaatcaaccctacccagggaggccaaatggtgcttctcaggcartgttgactagggattgtggcaggtttccgctcaccacccccatgtccatctcccagaagccaattttctttccaccaaatcttgggactctgtagttttc

SEQ ID NO: 200150 - DNA, 201 bp, Homo sapiens
taagatacagccttagttttcaagggggttacaacccagtgagaaaggctggtatgtggatgataaaaaataagggaatccagtgggaggataaatcaacyctacccagggaggccaaatggtgcttctcaggcagtgttgactagggattgtggcaggtttccgctcaccacccccatgtccatctcccagaagccaatt

SEQ ID NO: 200151 - DNA, 201 bp, Homo sapiens
atgcaatttcatatctgtactccttttcacacgcctattgctattctgcctggagttcttctccttcctaacttacctaataagctcctctttattcttcraagccaagttcagatgattcttgtttttctaagccttctttcacacttttcatactgaatcaatctccctgttctctgtgctacctctttgcctcatata

SEQ ID NO: 200152 - DNA, 201 bp, Homo sapiens
tcaagcaattctcctgcctcagcctcctgagtagctgggactacaggcgtgtgccaccacgcccagctaatttttttgtatttttagtggagacggggtttcaccatgttggccaggatggtcttgatctcctgacctcgtgatctgcccgccttggcctcccaaaatgctgggattacaggtgtgagccaccatgcccgg

SEQ ID NO: 200153 - DNA, 201 bp, Homo sapiens
aaggtaagagcccagccacctcatggcctcgcaggaggctccccaggcctctgcaagcaactgaggtagatgagtcctgtccccaaatccagtgttcactrcatcagttcctttctgaaagaccttacttgtccaggtctccttaagaggcattgtagttgttctagaactcactgcatgaggcaatggtgttaataaaaa

SEQ ID NO: 200154 - DNA, 201 bp, Homo sapiens
gtaacctactgaatgcttcttttttgagatggagtctcgctctgtcgcccaggctggagtgcagtggcgcgatctcggctcactgcaagctctgcctcccrggttcacgccgttctcctgcctcagcctcctgagtagctgggactacaggtgcccaccaccatgcctggctaatttttttgtatttttagtagagacgag

SEQ ID NO: 200155 - DNA, 201 bp, Homo sapiens
acagctcctctggcttcttaacacagccagtgtacctacttcccaggtttgagggctgccagcaacccccagacacaccgttcaaacctccacactcaacyaccagccctgagcccagtgactcctgtacatagacacccaggagcccaggaattgtcccgcagtggacatgccaaagcaggtctccatgccttttcagag

SEQ ID NO: 200156 - DNA, 201 bp, Homo sapiens
taattaggatgagttcatctggagtagagtgggccctaatccagcatgacatgtgccgttataagagaagacacacgctgggcgcggtggctcatgcctgkaatcccagcactttgggaggccgaggcaggtggatcacctgaggtcgggagttcaagaccagcctgactaacatggagaaaccccatctctactaaaaat

SEQ ID NO: 200157 - DNA, 201 bp, Homo sapiens
acatagggttgttgcagatgtaattaattaggatgagttcatctggagtagagtgggccctaatccagcatgacatgtgccgttataagagaagacacackctgggcgcggtggctcatgcctgtaatcccagcactttgggaggccgaggcaggtggatcacctgaggtcgggagttcaagaccagcctgactaacatgg

SEQ ID NO: 200158 - DNA, 201 bp, Homo sapiens
gtagagacggggtttcaccaggttgaccaggctggtctcaaactcctgacctcaggggatccacccgcctcggcctcccaaattgctgggattacaggcgygagctaccacacctggctgggagtctgtgattttaacgagcacctcaaataattctgatgcagatgggtcgcaaacctaactttgagaaataccgtatga

SEQ ID NO: 200159 - DNA, 201 bp, Homo sapiens
tttttgtatttttttagttgagatgaggtttcaccatgttggccaggctggtctcaaactcctgacttcaagtgttctgcccacctcggcctcccaaagtrctgggattacaggtgtgagccaccgtgtctggccaacatatgatttttgaggagacacagtttagtccatagtatcccccataaaaaataattacatgcc

SEQ ID NO: 200160 - DNA, 201 bp, Homo sapiens
gcagtttgaggctgcagtgagctgtggtgatgccattgcagtccagcctgggcaacagagcaaggccctgtctcaaaaacaaacaaacaaacaaacaaacmcaaacaaaaagagtgacaaggataaaagagtgacaaggataaaagagtgattgatgctgttattggagtctagtatgccaggttgaatttggattttatt

SEQ ID NO: 200161 - DNA, 201 bp, Homo sapiens
ttgcctgtaaccattactagaatttcggtagcacttgagcaagaaaacatgcctatatctagaaatctgtatttatgtctatttaggtgaatctccactcttagatgaatagatctatcgatgtaaatctatcaatgtaaatatatatatagctatacagacttgtgagtctcagcactcacaagtacagaagaagtgcta

SEQ ID NO: 200162 - DNA, 201 bp, Homo sapiens
tttgcctgtaaccattactagaatttcggtagcacttgagcaagaaaacatgcctatatctagaaatctgtatttatgtctatttaggtgaatctccactcttagatgaatagatctatcgatgtaaatctatcaatgtaaatatatatatagctatacagacttgtgagtctcagcactcacaagtacagaagaagtgct

SEQ ID NO: 200163 - DNA, 201 bp, Homo sapiens
ttttgcttaggttgcagccatttcacttaagactggccattttagcttggctaaatgtttacttggcttgtttcctacttatttcagatgccatgcccttytagaatgttccacatccatcccttcctctgtccatccatctgtccctccttccctctctctctcatttttcctagataagaaggggcaagctctctctta

SEQ ID NO: 200164 - DNA, 201 bp, Homo sapiens
gtatgggtgtggaccaattgctgtgaaactcattccaaaagttgaatatccagactgccagtttaacaaattgctgataatatttccaaagttttgcttargttgcagccatttcacttaagactggccattttagcttggctaaatgtttacttggcttgtttcctacttatttcagatgccatgcccttttagaatgtt

SEQ ID NO: 200165 - DNA, 201 bp, Homo sapiens
taaaaatctgttgtatttctaaccccagaagagattcactgacacatgatatattttttaaaaatctgagataacttgatattcccccaaatttaactctrttcccatgcaaactggttaaacttcagtttgagcaccagtttattctgcacttttaaattgccatgataatttacacagatctagggtttaaaacacaag

SEQ ID NO: 200166 - DNA, 201 bp, Homo sapiens
ctgcccaagaccatgggaacccatctcttgtatcagcacgacctgaatttgagacatggagtcaaagttgatcattttaagctttaagatttgactgcccrgttgaatttcagacttgcatggggcctgttgcccctctgttttggccagtctctcccatttggaatggctgtatttacccaatgtttgtatccccattgt

SEQ ID NO: 200167 - DNA, 201 bp, Homo sapiens
tctgctagggcagtgcagaagggaaatgtgaggttagagcccccactcagagtccctcctggggcaccacctattgaagctgtgagaagagggccactgtycttcagaccccagaatggtagttccaccgacagcttgcactgtgcacctggaaaatccacagacactcaatgccagcctgtggaagcagccaggagaggg

SEQ ID NO: 200168 - DNA, 201 bp, Homo sapiens
aataagtggccaacaatgagctcattcaatgagctcaatgagctcaagtgagtctcatatttagtctaacttatccggaagtttttctaatgattcacttycttgaactatgatgaagtttctatgcatcagagtgagaagggagcagggagagacccttacatgggaagaccaggcttagaagaaaattcttttggggaa

SEQ ID NO: 200169 - DNA, 201 bp, Homo sapiens
ttaaggaaacagtcacagtagctaagcgactttcccaaggccatgtgccataagggacattgccaggttcaggctggttttcggatctgaagtctcatactcttttcactgcaggatgctgtttcaacacatgaatctatggaaaaatagcaccatttccctctcattaattttacttacttgaattaatctcactggttt

SEQ ID NO: 200170 - DNA, 201 bp, Homo sapiens
atgaataattacaaggttacttggtgatcgttgaaaaatagaaaggaaaataaattgtctaagagaatgactaatattttaagtaacttctcaggagatcrccccacaacagaattcatttgtcttttgctggaattatttgtgcttcccaaatgtcgctctgtcttaagttagagttaatgttcaatgactgttttttta

SEQ ID NO: 200171 - DNA, 201 bp, Homo sapiens
attctcaagtgtaatttaatgagtagattaactggctgcaaaaaagaaaaggattaacggtaacaaaggtctgttttgtgccgcatactgtgctagatacrtgactgttagtgattcacttaattctcatactcaccctggaaggtggacatcctttctattttatatactgcatttctgcaaggttataaatgctcatga

SEQ ID NO: 200172 - DNA, 201 bp, Homo sapiens
ccggcccctactgaatgcttttaagtgacttttcttggtttaatttatcacctttcgtagagaagtaagcactggctcatataagttatttgggaaaaagygaatatttgtagtatttagaatgtccagattcctgcatcttacctttgtgtatagctgggaacttaaaaatgaaaaattgcaacctaactaagcacaaaa

SEQ ID NO: 200173 - DNA, 201 bp, Homo sapiens
aaactgtgcagccagcagatttatttgttaaagtaattgatgaattcattaattcatcaaacatttgttgagttcctgctttgtactagaatctatattggttacttgggattctgaggtgaagaagatacggtttctgccttcaagggtcttagaatcctgtgggcagaaaggaaatcaacacgaaaatacagggaaatg

SEQ ID NO: 200174 - DNA, 201 bp, Homo sapiens
gaaatttgcaaagtgggtaattagaaaagggtatctctggcttatttgcatgttttccataaattttttttttttttttttgagacggagtctcgctgtcrcccaggctggagtgcagtggcacgatctccgctcactgcaggctccgccccctggggttcatgccattctctttcctcagcctcctaagtagctgggact

SEQ ID NO: 200175 - DNA, 201 bp, Homo sapiens
atttttgcagattagttggaatttcaagtaatcatgacatttgcaaatgaagataattttactttttccttcccaatatgtatgcctttattattattatwaactttattttccctctctttttacactggctagaacttccattacaatgttgaataaaagtggtgagggcagactcccagatttgtttgaatgttaggg

SEQ ID NO: 200176 - DNA, 201 bp, Homo sapiens
ctccattgtttaataataatagctatcatttcaataaatatttattatttgtctattaatttacatgcctttttcttttttgtaatttttattaaggtatrtttaaatgcaagttatgagttttgcaaatgtgtacagttgtataatctatatatttattaagatatcaaacatttgcatcactccagagagttaacttgt

SEQ ID NO: 200177 - DNA, 201 bp, Homo sapiens
gtctttaataacataagtaaaaatttacatgtcagtctttcacaattccatttcaaatgtcttcttacatttaaactgactttgacttagtttatcacacycaggtttgttggacaagtttctgtttttggatcttcctccaacctcaaatcagccattcataaattcaacaaatattaattgactgcttaccttatttct

SEQ ID NO: 200178 - DNA, 201 bp, Homo sapiens
ccattcactatcatgagaacagcatgggaaagacctgcccccatgattcattcatctcccaccaggtccctcccacaacatgtgggaattatgggagctayaagatgagatttgggtggggtcacagagccaaaccatatcaggctccaagcagctgtgcccaggaaaagtgatcctagctcaattcagcatctgggagct

SEQ ID NO: 200179 - DNA, 201 bp, Homo sapiens
gcattgataaattgtggtataaacaaaccttgatcctggcaatatagtagccaggatctttaaaaaagataaatatttaaatatttatctttaaattatcytttaaattatctttaaaaaagataaatatttctgaatatttgctaatctgggtggtgattccactattaaaattagcatagacctgagttttaatagact

SEQ ID NO: 200180 - DNA, 201 bp, Homo sapiens
ctgccgtaacaaaatactatacattggatggcttaaataacagacatttatttctaaaagatctggaggcaggaagtccaagctcaggatgccggcatggwtgggtctggtgtgggctctctttcttgcttacagacggctgccttcttgctatatcctcaaatttgtgtgtgttagtccaggttctctagagaaatagaa

SEQ ID NO: 200181 - DNA, 201 bp, Homo sapiens
atttgatgaatcatttcagtttggaaactaatgttttaggaaatattcttcattttgttttttatatttattctctattttcttttgttttttgagactcstattatggggatgttttttgaaactcctcttattgggacctcctggactaggtttctaatttttttagtttttctctcctactttctatctctttttatt

SEQ ID NO: 200182 - DNA, 201 bp, Homo sapiens
ccctggtgtctagtgttcccttctttgtgtccatgggtacacaaaggtggggaatatttgtgtcctacttataagtgagaatatgtgatacttattaaatmgatttctgttcctgaattagttcgctgagggtaatggcctccagctccatccatgttgctgcaaaggacatgatcgcatttttttttaatggctatgtag

SEQ ID NO: 200183 - DNA, 201 bp, Homo sapiens
gttgccttgatgggcagtgacagccaaagagcttcactgggtggtggaagtaagatctgtgctcatttgtacatgccagaagcaacagcagtgtgatgacrtgcatgctcatcagctggagtggggccctggtgagccaggggcttccagcctccatacaggcatttgcaagtggcagtaatagtgggtgcgatggggcac

SEQ ID NO: 200184 - DNA, 201 bp, Homo sapiens
cactgggtggtggaagtaagatctgtgctcatttgtacatgccagaagcaacagcagtgtgatgacatgcatgctcatcagctggagtggggccctggtgrgccaggggcttccagcctccatacaggcatttgcaagtggcagtaatagtgggtgcgatggggcactggcgggtgtggggctggtggtctccatgtgtgc

SEQ ID NO: 200185 - DNA, 201 bp, Homo sapiens
gcatgccagcaaagtggtacagaggatgctgcagtggtgggagggtgcgggtgggctgatgtgccttggcagaggccactgggctggagctatttgattgycaggcacagtcagccagcgcaggagctattatgcatgtccctgggagacaccccagttaggcatctgcggctgcactgcaagcaggagatgccagcatac

SEQ ID NO: 200186 - DNA, 201 bp, Homo sapiens
tcactgtgattaaaatttaaggcctataattattgcataatgttgattttagttttctttttcagaaaaataaatgttattacacatcactatcactttayagtcacacaaaagatggttgaaaacttgactggcctaaggtcaccagtctgagtgtcactgttggggtatacagttaagaccctaatactgtggtattgt

SEQ ID NO: 200187 - DNA, 201 bp, Homo sapiens
atggttgtggagggtgagggagggagacttggaaaaaattgcattaattttgctgttttgcccaatgcctgggaagaaaatatgctgtaaccattggttaygaaggtcttctctggaaggctacacaccttagcctccagggcataggcctccattgtaaccagtattttgttctccagttcaaccctgtggctctcagtt

SEQ ID NO: 200188 - DNA, 201 bp, Homo sapiens
gaaaatgctggttcccatgcatctgtgtgtgtgggtgagaagatgaggcaatcagagcccgacatgcattactggggactttctggccatctgcgtattcmggtctagctggtgtgtaacatggagcaccagcattggacttagaatgcaccaagatctgcctgcatgttgctcctgctctgtcagcctcaaatgccagtt

SEQ ID NO: 200189 - DNA, 201 bp, Homo sapiens
attagaacacaaaacatgaaatgttctaaatgtataattagaataaatctgatgcttggttaaaatatttttattgagaagagaatatatagtaggatacmacaaaatatttggaaattataaagggtaataacccaacaaatatctgagtattccctacccattttaataacaaagggtaccatcgtaataacctctgaa

SEQ ID NO: 200190 - DNA, 201 bp, Homo sapiens
gtagcctgaaaatccaccaggacttgaatcagtgcctttcttatttctcaccagttgcctcccctgaactaaaccaggaacagggaagcagtgaaacaggrtggactttgttattttctaatctgcatttctgccctaggtctattacttcttattcatgtcacatttaaaatgacttaatcttgaaaatcagttttctca

SEQ ID NO: 200191 - DNA, 201 bp, Homo sapiens
ccttctcacctgtactctccttcctttaaaacttcatccaaagttctctcctactctttattggcttagttcccttcgaaacatatcttctcagctattarctcaggatacgtctagtgtgtttgttacttacgtatgtgtaactgtaggttattctctgcaaatctgtgaattgagaaaggactcattgtttttctattt

SEQ ID NO: 200192 - DNA, 201 bp, Homo sapiens
cctcttggacattttgaacctttaaaactttatcaaaatatgttagatttatcctagctaggtttatgaaactacttttatttattattcctggcttataygatgtagtcatttttggtgtgagagttaaaattgtgggtattttgtaccatatttttttatgccctatctgtaactattcatggagatcaacggatggat

SEQ ID NO: 200193 - DNA, 201 bp, Homo sapiens
cctcctgccaggattctataagtccatggtgagagtatgtcattccttccctgctcaactcaccactaccccaggggttactgagggccaggaactgatgwatggtagcccctgcagggtttccagcttcctcccccttaaacccagcatctgtgtcctttctctagccattctcaataccttccttctgaagatctgctt

SEQ ID NO: 200194 - DNA, 201 bp, Homo sapiens
gtctcacaggagtcatgtagagtgggcataggactaaggaaggccctttggggcagcagtttgcatgggctttggagaaagtttggggatgtggtctgtaktatctgtatacataagcacaagttctttcatgttttgaacatccatggagtggaaagagaaggaggtctaactatggaccacaagcactatgttttgttc

SEQ ID NO: 200195 - DNA, 201 bp, Homo sapiens
gggcataggactaaggaaggccctttggggcagcagtttgcatgggctttggagaaagtttggggatgtggtctgtagtatctgtatacataagcacaagktctttcatgttttgaacatccatggagtggaaagagaaggaggtctaactatggaccacaagcactatgttttgttctaatactccttggagtacaagaa

SEQ ID NO: 200196 - DNA, 201 bp, Homo sapiens
gagtacaagaattatgagtttcagcatctcatttaggtaactacaaaggaatatttatcaggataggaagatagaacatatttcatttaacagttttgggrattaacattaaacttataaatatctagaaatatggaatgcaggtctttatgttcttgccttgagccttataaatgttggtagtgggcctgttctcatgtt

SEQ ID NO: 200197 - DNA, 201 bp, Homo sapiens
atttgactctctaagggctctgagtcagttgccaatttttcatctacttcatctgttattttatccttatttttgttgatttcttttaaaaatctatttaytgtaggttagtagtatttctggtgagagattaatatgtgcatgaaatatgccatcttattctggaacacagcttgttcttttcacttagttagaacttgt

SEQ ID NO: 200198 - DNA, 201 bp, Homo sapiens
aagttagtttttagaaaactggcatataacttacgaaactactgctagctaatccttgtagtactatgctaaattaaaagatagatgattgggtatgtctrttttctggctaaagatgctcaaaagatagtgaaaagagtaagggagaataaaaattgatgttttgataatttatttttaaatatagtgttgtattgagtc

SEQ ID NO: 200199 - DNA, 201 bp, Homo sapiens
taatcccaaacacacttcatagcaaggctcagcgtgagaagagggaaaatgatctagtatttagtgtgtatacagatctaagtctatgtttgaatttgatrggaagcacaatatgtcatttggtgaaactcaaggattcgttgtaattattagatagaacgtgattcctaaaattatagcaagcacatgataaggcagaac

SEQ ID NO: 200200 - DNA, 201 bp, Homo sapiens
atggtcctactgtcattttcagccactgttcattgatgtacactcactgttcagggtagtagagtccacaaaagcatgcaatgtcactgacatagcggacrgtagctagcacaggcgtttagtgtggccatgagcctcagctcttgctcctataatttcatttctcaggaattgttgttcttccctgttgctgggtcttgg

SEQ ID NO: 200201 - DNA, 201 bp, Homo sapiens
gttcttggttctcagtgctggaatatagcggcatggaaacacacagagaaatctccacctctctgtaactctgtaattttgaaccccatggcttctggggmgtagttctgtttccccttctcatgaagctcctcatagacagctcctctggcttcttaacacagccagtgtacctacttcccaggtttgagggctgccagc

SEQ ID NO: 200202 - DNA, 201 bp, Homo sapiens
gctaaacccttttatagttactctgtcattggccattctgactatgttgtgtgcagggcaaatgagttttgttcttcccattggagaaaggctatctaagraagacccatgggaaattagcaagtaagccagggctggagttcccagagaggccctgcatgaggtcccataggaagccgctaggatctcgaggtctagtcg

SEQ ID NO: 200203 - DNA, 201 bp, Homo sapiens
agtagctcaagtctcataaataggaaactgttgtagacagacaaaaagatgaagttgtctgcattcaggaaggaaggagtaagtgtccagaatcctcaatktttaattcccccggcactgcatcctcatgttgtctattgcaaatgcaagcataaatttaggcataagcataaaaaatgcaagcataattatcaactgtcc

SEQ ID NO: 200204 - DNA, 201 bp, Homo sapiens
aacaccgttcacatctagggtgagcatccacctactgcatatttagtaaatattcgtgggctctgggcctagatctgtgatagcgtctgatcaaagtccaygtgggagccatcacttgacactgttaggggcttaaaataaatgttgtgacaatatgcaaacactgaacaaatgccaaagcaggtagacgacctgtccctt

SEQ ID NO: 200205 - DNA, 201 bp, Homo sapiens
tacagctgaaaacacagactcagaaaatgaatgagtcatttgagttgaacataaaaaaggagacctggatgaggatttagagagaagatccattcaactcygtaagcctacaaagtaagattagactaaatagatagaaattttattctactcccaaaggataaacatcattttccatttctttttgtagacaggcaaagc

SEQ ID NO: 200206 - DNA, 201 bp, Homo sapiens
taattcccccggcactgcatcctcatgttgtctattgcaaatgcaagcataaatttaggcataagcataaaaaatgcaagcataattatcaactgtccatkagcagcctccctgttctgccaatccatcgttactgcgacaattcacttcatctcagggccagtgaaacacaatgagatgaggggcaggtggcaaggggca

SEQ ID NO: 200207 - DNA, 201 bp, Homo sapiens
tgatccaccagcctcagcctcccaaagtgctgggattacaggcttgagttactgcacctggtccccaccaactttttatctgctcatatgagagcattacrtgggctgggctctgtgaaaattatattcagatatttagtagatgctagttgacctttgggcaaattaaccttccacaggtctttttttaaagtaggcagt

SEQ ID NO: 200208 - DNA, 201 bp, Homo sapiens
ttccttactttcattagagaccaagccaatccaattttcttttttctgcatttatatctgtcttgttccctctcttatttcacttttttcttaatgaaagraagttctccttctagtgaaacagaaaatcttgctaatcaaggggcatatgaagcactgtaaaaaacatacttttgaaatcttgagggttaaaacacttat

SEQ ID NO: 200209 - DNA, 201 bp, Homo sapiens
ctctctaggccagcaataaccaatgggtcacattgccctattttttatatgacttttgtaaaaaagattgtgtgtgtgtgtgtatatatatatatatatakagagagagagagagagagaaaatgggtgatggataaacaagttaaatattcattttacattacagtattggtttgctgaatataaattcttgaaaaacgc

SEQ ID NO: 200210 - DNA, 201 bp, Homo sapiens
ctagtgggaaagtggaaactgttgtaggttgttgggaaaagatgggagctaagagcaagagagcaaaagtgtaggaaagtggatgggagaaagtgttaagyggtggttagagtctgatttcttctgtcttgcttagctgatcattctggagatgaactgagatcatatgtgaattcatttgggatctataaagtttgattc

SEQ ID NO: 200211 - DNA, 201 bp, Homo sapiens
aaaagaaaacagataccccgcccagaagactaggtttaagtaagctgctgctagtgggaaagtggaaactgttgtaggttgttgggaaaagatgggagctragagcaagagagcaaaagtgtaggaaagtggatgggagaaagtgttaagcggtggttagagtctgatttcttctgtcttgcttagctgatcattctggag

SEQ ID NO: 200212 - DNA, 201 bp, Homo sapiens
aaaccaacaggaaatagggaaagagggttaatggaggtcaggttgaagccatagaagggtgctagggcaggacttatattttggctggaaaggggtaattkgtagtataattttctcagggcttaatatcaccagtaaattccacagtgtagttcctattacctgaatttgtcaaagcttcctcgttgttttagtctgctc

SEQ ID NO: 200213 - DNA, 201 bp, Homo sapiens
actgcaataaagtcaaagaagataaggaaaactggtgtccaagggaataggcaatgatgctgatataaagaaatgacttttatatggaaccaaagacttaygaacccagtccccaaatggtctctaagtgtagacctggctacctgtgtaaaagaggaaaatagttagaactggcaggattaatagtaggaaagccttcct

SEQ ID NO: 200214 - DNA, 201 bp, Homo sapiens
agagtgttagatattagggttctcggctccttcctaattgtgggggccaatagtcaactgcaataaagtcaaagaagataaggaaaactggtgtccaaggraataggcaatgatgctgatataaagaaatgacttttatatggaaccaaagacttacgaacccagtccccaaatggtctctaagtgtagacctggctacct

SEQ ID NO: 200215 - DNA, 201 bp, Homo sapiens
ctgggatgtggagcagtaatcacttaccatgttcagtgtggagttgaggaatgtgagagggatgtcatattatcactggaaatggtggtggctggggagtyatatcgggcatgggacttctttgcggtacttctggggccctctgaaccccctactctaagaagatcagaacaagagatatctccacaccatgctagcact

SEQ ID NO: 200216 - DNA, 201 bp, Homo sapiens
ttagccaattttttattctcctcaactttccatttttgtaaacaattaccagccatatatatttgcttctgaaatgatgcatttggagaggaagtggaaawgtggtggctttgtccttcaagcatacgctgtatgtcaccctctcccactgtctctgttgttcactcctcagatggttgaaatgggaaagcattgactaca

SEQ ID NO: 200217 - DNA, 201 bp, Homo sapiens
tggagttgaggaatgtgagagggatgtcatattatcactggaaatggtggtggctggggagtcatatcgggcatgggacttctttgcggtacttctggggycctctgaaccccctactctaagaagatcagaacaagagatatctccacaccatgctagcactacttatttggaattcagggagatggagaccacattccc

SEQ ID NO: 200218 - DNA, 201 bp, Homo sapiens
tcccataaatgtgaactgcaccagcaaagccaggagacccaaactcatcattacaattgttgttggttgtttttgcaaaaatttgagggggagtcttaacygtctccattccacaaattgcaaaaagcatatatgacgatttctttatcattttttttgatgaaagatgtatattagagtcacttttcttgggtgtggcct

SEQ ID NO: 200219 - DNA, 201 bp, Homo sapiens
gtgaatagaatcactacactcattagcaaggaagcctaggaggcatgacaatggtgacaagttcgttataaaactttatgaaaggagtcaggctttcacartctgccagtaaaacctcattaatttcaaccctgttaatttgcactttgtgataatgtggaggtggttggtgattttctctttgtagtctatgaaaacccc

SEQ ID NO: 200220 - DNA, 201 bp, Homo sapiens
ataatgtggaggtggttggtgattttctctttgtagtctatgaaaacccctatttgctaagcgacttatcagtataaacagttaccatgacagtatgtatstggtctgaggtaaagaaaagctttctaagtgtttaaagggatttccaaagccttcttcacaagccaaaagtttatatgcacattaaatataatccccatt

SEQ ID NO: 200221 - DNA, 201 bp, Homo sapiens
ggaggtggttggtgattttctctttgtagtctatgaaaacccctatttgctaagcgacttatcagtataaacagttaccatgacagtatgtatctggtctraggtaaagaaaagctttctaagtgtttaaagggatttccaaagccttcttcacaagccaaaagtttatatgcacattaaatataatccccatttatcaga

SEQ ID NO: 200222 - DNA, 201 bp, Homo sapiens
caaagccttcttcacaagccaaaagtttatatgcacattaaatataatccccatttatcagaacaaaattgcctgtcttttacttctggtctcctctatargagattgaaataataatataacacttactttaaacactatgtaggacttataggtttcaacagcttaatgaccttctctcagtccagcttggtttgattt

SEQ ID NO: 200223 - DNA, 201 bp, Homo sapiens
tcttctggctcccagagagttcattaccaggtaacaaataattgactctccttgtttcttaccttctggccaaatgaagtccatctttcaattaatgtctyattttgatttagagttcacatcttccctagggatagagttcattctaagaatctagtgaaaatggtattctgattcttttgcattttcctgattttggac

SEQ ID NO: 200224 - DNA, 201 bp, Homo sapiens
gggatgagtgtcagaggtgtcaccttttcccatatccttccttaggacaaggaaggcgcaagaagagtgataaaaatcaggggactttgagcatgaaggartggttggaacaaaaaagatccaagaagcccagaatttgctcattaaacaggaaagaaaaagagactgtgttagaactaacgtggccagagcacagggaga

SEQ ID NO: 200225 - DNA, 201 bp, Homo sapiens
ttttggagtcatcagcaaatggatgaatggtgcttaaaactacaaggccggaggagatcacttagggaggagttcagttaaagaggagggcccactgttcyatctatgtttattcatgagtcaagaagagtgcaggttcaagacagcaactggtcaagaagaatcatggaaactgagataagcagcagggaagctggaaat

SEQ ID NO: 200226 - DNA, 201 bp, Homo sapiens
cataaaggtatgaaattgaattacttggctttcatttaatctctatgcacttcccccgactcccccatgttctagctgtctgttttcatgtttttagttgrccttttaaaatactaggtgggagagcacccagaagtgtaaaatgtcatgccaccagccaagctagacaatctccccccagaggtagcccagcaccttgtc

SEQ ID NO: 200227 - DNA, 201 bp, Homo sapiens
ccaaatttattcttcattgtcaacactgttgtggctatttgagttcctttgtctttccatacacatttttagaatcagcttgcctatgtctccaaaaattytactagaaattggatgactggaattatattgagtctatagatcaacttggggaatgttgatatctttactgtgttgagactctcagttcataaattctct

SEQ ID NO: 200228 - DNA, 201 bp, Homo sapiens
tactgtttctgttcatttgtattttccccctatttttaactagttagtcaagaaatcttaagctaagctatagaagaaaaaacaggataagcaagaccagrtttttaattgtggcaagcttacttattttgtcagtagatagtgagtggctgttctcaaaccaagaaaactcatagtgagactttaaactgttttccaaca

SEQ ID NO: 200229 - DNA, 201 bp, Homo sapiens
tgctaaatcccttctagggagtttgagatgttccatggaagccgggtttagaacccctgatccagagcctaatcagtatggcagtatcttgtggcagatgytggcaggaaggcaaatttatttttacccaggatgtttgtctcttctttgctctactaacttcccagacaaaatttaaatttagcaaactaatggcagtgc

SEQ ID NO: 200230 - DNA, 201 bp, Homo sapiens
ctgatcactgcattaaatctgtctgtataataatttatgaggtaattggttaaaataagccagaagttaagaccatgagagtgttagatattagggttctyggctccttcctaattgtgggggccaatagtcaactgcaataaagtcaaagaagataaggaaaactggtgtccaagggaataggcaatgatgctgatataa

SEQ ID NO: 200231 - DNA, 201 bp, Homo sapiens
attgttagttcatctcactagtcaatcagtatgtattggacactttttacaatctggtacattctgatcactgcattaaatctgtctgtataataatttakgaggtaattggttaaaataagccagaagttaagaccatgagagtgttagatattagggttctcggctccttcctaattgtgggggccaatagtcaactgc

SEQ ID NO: 200232 - DNA, 201 bp, Homo sapiens
tttatgcagttttattcacattaaccagtactattggccaccttctatgtgctggtcacttcgtggcccaaagtaagacagagtctctgtcttctgtaatscaatcagaagggtcagaaaagcaagtttaccatatagtacaagtagaataggatgagttccataagaaaagataaaagcccatctggaaggagagagtaa

SEQ ID NO: 200233 - DNA, 201 bp, Homo sapiens
aagaaaaaacaggataagcaagaccagatttttaattgtggcaagcttacttattttgtcagtagatagtgagtggctgttctcaaaccaagaaaactcayagtgagactttaaactgttttccaacacaggcactgtctgcggcttcatggatcacttgccataaaatacctaaagggtaacacaaaggctcatgaaagc

SEQ ID NO: 200234 - DNA, 201 bp, Homo sapiens
acacttctcagcataactacatatattgtatttcttttagaaggaataattaaactggcattaattcccaattttatatctactttattccaaacacaaaycaaactcaaaaacatgtttaattacatttggaagctgcatacatagcttacggaagtcatgccctatgaaagtcaaagtaaataatcgcttctccacctt

SEQ ID NO: 200235 - DNA, 201 bp, Homo sapiens
attatcttatttcaagcagagaagtttgaaataaataaaaatcagtcaatcttcccactttgggttggaggtgtaagtggtgtgtaactgagctgagagaragactagatggaattgtagatgtgatacctgtgttcacatctgagagtgcggaagcctccccgtctcgctgaaaaagatttcttaggattaagagtagaa

SEQ ID NO: 200236 - DNA, 201 bp, Homo sapiens
gaaataaaactaggacatcctaaaatcccttaaattccaacgttgaattattcattcaaaaataatgtctgatgcctacacctgttccactggtgggagtmattcttcctgtggttacttgggacctatgatagcattgtcatcctcatgattacacattttctccagcggacaccacccctacctacccatgttgtcctc

SEQ ID NO: 200237 - DNA, 201 bp, Homo sapiens
aagtgattcattgatgatgaggtgccattatttttgaaacctgcacttgagtcgacgtatgaattacttctcaaagtttgtattttctgtatgcttctttsaatacatagctaattgttagttcatctcactagtcaatcagtatgtattggacactttttacaatctggtacattctgatcactgcattaaatctgtctg

SEQ ID NO: 200238 - DNA, 201 bp, Homo sapiens
ggcattcaccgtcacagccctggggcttcgctctgctttcccctcttgacagcacactttgaacctgattgtttatctggtaaagttcttctcaggctgarctcctcctctgtgaagacttccctacttctctcttccaagcagaattcactccctttctgagacaataccactaatataataggtttgggcttctatcaa

SEQ ID NO: 200239 - DNA, 201 bp, Homo sapiens
tcactattgtacagatgagaaaactgtctcacacaggggaaataatttaagtcaaagggctataattgatggagtcaattaattggattcagactcagttytaagtcacccaaagcccctatcttttcccattacattctgctgtcttcatgttgagtctgaaactgactccttaatttttttacgtacttaatattacac

SEQ ID NO: 200240 - DNA, 201 bp, Homo sapiens
ccccatacagagcccttcaaagccagagaaaatcctaataaaaatgctaaagaagttccttcaacataggtggaggaaaactgttttgagatgaaagatcmctgtataagattcttccactgttactttcttattgctcgatgatatggaatatgctttggggtgaggggccaaaattgatgttgctaattatttgccttg

SEQ ID NO: 200241 - DNA, 201 bp, Homo sapiens
cccaaggaacagcttacacctgataccaggtgggtttggactcacaacctcagatctacacctaaacttcagagtctccttttctgctagttcttagctcrgttccatcttttccctgccatagggaataaatcaagcctgtgcatgcttgagcacctagacccaaatggtttgccctatttctaggcttaaaaaacaaac

SEQ ID NO: 200242 - DNA, 201 bp, Homo sapiens
tgctgtggtttgctgcccacagggcttctcagaaccaaggtactcatttcaccgctgctgggagtgttggctgctgctggtccacatctgagccccttccsaggtattgtctctgacacaagaagatctctgccatggttatactctccccaggggctgcctgtactcaaagactggttgatgtaaagtttgagagtcttg

SEQ ID NO: 200243 - DNA, 201 bp, Homo sapiens
ttcaaggtattttccaggatatggatctatctatatatctatctatctggagatatatatatatatatatttggagttatatctatatctatatctatatmtatctggagttatatatatctctctatatagatatctgtctggagatatatatagatatctatatatatctgtatctatctatctgtctgtttatctatc

SEQ ID NO: 200244 - DNA, 201 bp, Homo sapiens
acagagcagaaaagagggcagggaaggctggagaggcagctggggcagcaaatggtgaatatccatcactccactgtgggtggccagtccacaacagggascctgtggcatgcagttggcaatgcgtgacgtgactgactgaattttaccaggagaagaagaatggaacttggcattctggaaaaaggaaaatttacaaac

SEQ ID NO: 200245 - DNA, 201 bp, Homo sapiens
cagagcagaaaagagggcagggaaggctggagaggcagctggggcagcaaatggtgaatatccatcactccactgtgggtggccagtccacaacagggagsctgtggcatgcagttggcaatgcgtgacgtgactgactgaattttaccaggagaagaagaatggaacttggcattctggaaaaaggaaaatttacaaaca

SEQ ID NO: 200246 - DNA, 201 bp, Homo sapiens
cccaattttatatctactttattccaaacacaaatcaaactcaaaaacatgtttaattacatttggaagctgcatacatagcttacggaagtcatgccctrtgaaagtcaaagtaaataatcgcttctccaccttcttccaccttttcctgttatctcagcccgatatccctggaaaccctccaatttttacaaagcatct

SEQ ID NO: 200247 - DNA, 201 bp, Homo sapiens
tgtagtttaaatgtaggtgaaaagagagagtgatcacaggtggtgctaaagatgtgggtaagggccagatcatagagtgcatcacagcactgatctaggarcatttactttattcagcattcttgaggagttagtaaaatttttttaaagataaatatttatatgggaaggtttcagtgtaaaaatagacaaaataataca

SEQ ID NO: 200248 - DNA, 201 bp, Homo sapiens
tggaagctgcatacatagcttacggaagtcatgccctatgaaagtcaaagtaaataatcgcttctccaccttcttccaccttttcctgttatctcagcccratatccctggaaaccctccaatttttacaaagcatctagagtgcctccatctttaatgtgcttgagaatcacctggagagctcccctccacagatgtata

SEQ ID NO: 200249 - DNA, 201 bp, Homo sapiens
tgtggtataggcagctttttctgacttcctacagagaagttctagagatctatccaaacatgttaaagttgttgtaagtattgaatatgttgatttatttmatttgaatatgatatgactgccacaaaaaactcccaaatacttagtttatatattgaatcactggactgcatagaactttggagatcattttgtgtagtt

SEQ ID NO: 200250 - DNA, 201 bp, Homo sapiens
ctttctcttgatttttctgtaactaggcatctgtgtttgctaattgtctcttattaccaataattatttaggctcttacccacccacagagcctgagagaraggggctctgtctttcatgatgtttacatttcaaaaaatgacttctagctcctggagaaagacattcctgggttgtaaaatttggcatgagtctgggagc

SEQ ID NO: 200251 - DNA, 201 bp, Homo sapiens
gctatattagaagttaataatgttagatttcagacaaagaactgggcctaaaatgatgatgatatttgatccttccttcactgttaaaacttagcctttgscaatgagagcaatcaattgcaggtagatccttaagtctctgcccaaaataatattttctcttttcattggtttattttatgtaacacatactcaaaatta

SEQ ID NO: 200252 - DNA, 201 bp, Homo sapiens
tgcataatgacatcttgatcaatgatggactgcatatacaacagtggtcccataagattttattttattttattttttttaattcttcagctaaaaccgcrgaagaggtgatttattatatggttgttacactcggccacaaataaacacagaaatagtccagaatgtcacaggtccagggcagaggaccaacatgggcat

SEQ ID NO: 200253 - DNA, 201 bp, Homo sapiens
ttcaacaaatatttttagtacctagtatgtgcctacatactggggaaagaacaataagcaaaacagataaaattcttgttctcatgaagcttatgtttacktggaaggagacaaataataaatctgtaggcaaaaatacaataatctagagaattataagccctttggaaaacacagaagaagcagagtgaatgaagacgg

SEQ ID NO: 200254 - DNA, 201 bp, Homo sapiens
gccattttccgaagtgggaagtcacttcactgagaagtctacgtaactgtagctttttctagctttatttacttaataaatacatactaattcctaacttwctttaagatcatttgctaatttcaggaggcataaaagattaaatgaaacagatttttaaagaggcaggtctcttagtctcatggttatctgtgaagatag

SEQ ID NO: 200255 - DNA, 201 bp, Homo sapiens
tttaaaaaatgtaaatgtggatggatgcagggtcagcaggttctgtctggtgttgggaggttgggactgagaaaggtttcacagaagcagaagcacttgakctggttctttaaagacaagtatgatttagatggcagaggcaaagggaagggctttccaagccttagaatagcagtggcagaggcatggaagtgctgaggt

SEQ ID NO: 200256 - DNA, 201 bp, Homo sapiens
gttcttgttatatgctcaaaatattggagctattattattattatttgaagagacaatctagcccaccctaaatcatgcagatgtggagctacttggtgartgcagagactgttgataaagtttgtcagtttattcaatatttaagatgaagttttaaatttgctttgtaatagaaataattacaatgtttgctgtattta

SEQ ID NO: 200257 - DNA, 201 bp, Homo sapiens
ccttttcttgactgccatttcgattctgcaagtggcaaaaataaactggaaagtggatgatcactctcatatgctctattgacaaataagaaaaacagggaccaaaaacaactttctctgggcagtctggggaataaaagctgctgggaggatctagtgtacacatgcgtgtagcactttttacattcgctaaaccctttt

SEQ ID NO: 200258 - DNA, 201 bp, Homo sapiens
tccagttgtctcacaaatatcatttattttcttatgcagtttctttgagtcggaatccagataaaacttacacattgtggttggttgatatgaccttaaastctccgtagtttccccttcaactcttcctcatttatttattgaagaaactggtcatttgtcctgtcaagtttctgagtctgaattttgcagataggatcc

SEQ ID NO: 200259 - DNA, 201 bp, Homo sapiens
taaaactgtgtaagtttctttatagttatgaattaggaaagcaagaggttatccagtgagtaaaaaggacatggagaaattctcagggttgaagttttacmcttaccatatatctttgttttaagaaaaaggtaatattaaatgtatgcttattttgataatatacataagaattaaagtaaattatcagttataatttta

SEQ ID NO: 200260 - DNA, 201 bp, Homo sapiens
cctttcttgcgggtatcgtgggagttggggaagttgaagagcaaggcatcaattgatagggtgggctctagttttccaaaagattattcagaaagccttcrtgtgactccacatggctggtattggcatgcggaacaatgtgggcctgctgatattgcactgtcctttcctgaagtcatttccctcaacacagcttggtta

SEQ ID NO: 200261 - DNA, 201 bp, Homo sapiens
gaattaaagtaaattatcagttataattttatgactcataaataaataactatatttgatgtgtttctaattgctttatttttacatttttaaaaatacaygaaaccatattataaggaaaacccatactacaaatggctacctacttttttattgtataaatatagcctaatttatgtaataattattttatgcaaagtt

SEQ ID NO: 200262 - DNA, 201 bp, Homo sapiens
gattaattttgacaagagagaacagaacaaaatatatacatgaaaatagagaaaaatatatgatcttaagctaatgagatatgaagaaatataaggagcakgaaaatataaaaattaaaatgtgtaatcaccagtaaagcatgtataagacatgaatctcctaaatcagttgaaacaagagacaaaggcctttaccgctgc

SEQ ID NO: 200263 - DNA, 201 bp, Homo sapiens
ctattgtaagtgtgtatttgtttccattttgttttttatagccccttttttactgcagggaacctctgcttttactgttctttacagtctgcaaaagaaasgctttctgatttgatggcagctgaaggtggggctgatttgcaaactcagggctcaactttaagtggagaaatgggaagagggcatttttcttctaggaaa

SEQ ID NO: 200264 - DNA, 201 bp, Homo sapiens
catgaaaatagagaaaaatatatgatcttaagctaatgagatatgaagaaatataaggagcatgaaaatataaaaattaaaatgtgtaatcaccagtaaarcatgtataagacatgaatctcctaaatcagttgaaacaagagacaaaggcctttaccgctgctattagcaacacttggcatccctttcagatgtttcagt

SEQ ID NO: 200265 - DNA, 201 bp, Homo sapiens
aggggagcttagagagattaaatgacttgcctaaactcacccagccaatttgtggtggagctgagctccctgccgctcagctcggtgccccacacttctgygctgtgctgtcttccgggaatgctggctgttggggaatgctgatagagctgctggctgaaaaaaactattcaggagctgtggaggggcgatatagaccca

SEQ ID NO: 200266 - DNA, 201 bp, Homo sapiens
aacgaagggactaaagtccattatcatcaaggtttttgcttgtgtttgtattttatgacagtaagatgttagttacttttattaattccttaaatgcatgraacagatttgcctttatattatgaatagaatgcagattcaatttctgcaaataatgtttctttgtattccagggaaacttgctgttgaaagttctccttc

SEQ ID NO: 200267 - DNA, 201 bp, Homo sapiens
gattaaatgacttgcctaaactcacccagccaatttgtggtggagctgagctccctgccgctcagctcggtgccccacacttctgcgctgtgctgtcttcmgggaatgctggctgttggggaatgctgatagagctgctggctgaaaaaaactattcaggagctgtggaggggcgatatagacccacctcagccagagaac

SEQ ID NO: 200268 - DNA, 201 bp, Homo sapiens
tggcacaaatcaacgagacctgagggatgagggatgaatctgtgtcttcttttttatggttatgggcatgaacagttaggatgaaaccagacctgcgtgtwctggtttggctgatgatggatactttcaaaattgtatcaaagaaaatagacaatggaagtctggcagactttacaatgagtatctagtaaatcggatatg

SEQ ID NO: 200269 - DNA, 201 bp, Homo sapiens
tgtatttatagatgtaaaagcactgagagcttcattactagaaagcagcccctatggttttcagcattgctagaatcaagagatgatattcttgttgactrttgaccatgcttttccagatcacccactgttgcacattcatgaaattggagtgagcatacaaatttgttgagagaattatcttaactagattcaacctct

SEQ ID NO: 200270 - DNA, 201 bp, Homo sapiens
cactggcacttctttaattaaggctctgtttctgcccagagcaaatttgaggttctctgcttcttttcctattgcagaaggggccctacctaggaaggatkttgaagttctgtttcttcctttattttttttttatccttttggatgtaacagcgcaccaaccactgccagagctgacagaattggaatggaagtaggtgg

SEQ ID NO: 200271 - DNA, 201 bp, Homo sapiens
ttttccttcttcacgttttcaccaatgaaattggtcttactgtagatcttagtaacctcagcatatgtttttttttctatcctttttaagctgagaactckcatctattcactgaaagaaagcactttatggcttctctttggcatatctgagttgccaccatcactactcttgcattttggaaccattattaagtaaaac

SEQ ID NO: 200272 - DNA, 201 bp, Homo sapiens
gggctttggaaaaaggaggaaaaaatagagtgcttcatttagagaaactgtgatttaaatgtataagcacaaagggagggcgtgtgcttgcctatggggcyttataaacctctgaacacgttgaccttgggactttggggttgtcctgctgagcgctagcagccaagtcatgggagttgaggtccaaagcccaaggagagg

SEQ ID NO: 200273 - DNA, 201 bp, Homo sapiens
atccccccttggaaagccccccagtagatgcctgaaactgtgaattgaaccaaacttgattcccatcaattgtagcacatttctgtttgtctcttccaccsacaaatttaatgccttttccatcttaactaagcacttgtcatagactgtggccataatttttgcaatttgaggtgcaacagtaaatctagaacgaattta

SEQ ID NO: 200274 - DNA, 201 bp, Homo sapiens
ctttataaatcttatttccttgtcgtaaaatgtgtttgcatttgttaggattggctagctagagtgtgttgccataacaagtcctggaatctgatcaattwagcaaaacaaaagaatgtttcttgctcacacaaagtctgagtagagcctggatagtgagtggcagtaggggtttaggttgcctactctttgttgtgctgc

SEQ ID NO: 200275 - DNA, 201 bp, Homo sapiens
tttcttaatagatttagggactggccaggagactagcatgactgccatgtaggggttttgaccagcatagtcgaagagaaggttataaatttggtgccagrttacagaacattctgaatgccatctgcattttttttcccctagcaacttctgctgatcgcttttatcgaatagacagatctcaggtaagtttttttccag

SEQ ID NO: 200276 - DNA, 201 bp, Homo sapiens
tttcttgttagaaccttcaccctggctcctctacgacaagggtatctttcttctttattctggtgcttgcctccttatctggtttccccacttcttcttgsccttagtttctgctgatatgttcttttgtccagttgcctcttactgggtctccctgatgccagttgtgtgtccctgtgcaggtctctgctctactgtgac

SEQ ID NO: 200277 - DNA, 201 bp, Homo sapiens
tggaggagtgtgtttttcatggtgaagccatttggaatctgccaggttgaagcactgaaccaggagtaggaagacctgcatctaggcctcagcaccacccmctcaccagctctatagccctgtgcatctcatttctctgcagccgagtcctttcttgttagaaccttcaccctggctcctctacgacaagggtatctttct

SEQ ID NO: 200278 - DNA, 201 bp, Homo sapiens
agaagatgaggcaagaccatttctagatatatctaagaaaaagtcctggttaattggaaatcctgaaccaaggggattcatctctccctatctcccactgyctgcgttagcgcagctttggggaggatcaccaactgatcaagcttctgacaacacagtgtgatcctttgacacgttgcagaatttcattattcctcgaga

SEQ ID NO: 200279 - DNA, 201 bp, Homo sapiens
gtggaggagtgtgtttttcatggtgaagccatttggaatctgccaggttgaagcactgaaccaggagtaggaagacctgcatctaggcctcagcaccaccycctcaccagctctatagccctgtgcatctcatttctctgcagccgagtcctttcttgttagaaccttcaccctggctcctctacgacaagggtatctttc

SEQ ID NO: 200280 - DNA, 201 bp, Homo sapiens
ttgttcttctttaggaacatttgcactttgtgatggagatttcccaagatgagatttttattctggacccagatatggtggtgtcacagccggcggggacrcctccgggcatgcctgacctggtggtggaacaagcctcggggtgagtgtgcttctcctggcctgtgaggctggccttagggtgacatccatgtctggttc

SEQ ID NO: 200281 - DNA, 201 bp, Homo sapiens
gtgtgcttctcctggcctgtgaggctggccttagggtgacatccatgtctggttcgcctttgaacttgacatcgttctaatgacatcaaatgattttgaartgtagattttcttgttgtgtttccttagagtggttattataagtctgtcttatgaatggccgtgaagaaacacaaaaccagatttacaccatgtccaagc

SEQ ID NO: 200282 - DNA, 201 bp, Homo sapiens
gaaacacaaaaccagatttacaccatgtccaagcctctttccccatcacagcaacccttcctaacaaacctagaaagcactagtacttgtgtttgtgcttrtacgtttgtagtaactctgttatctacattaaaaattgacacaggtgatttgacaaattttctcctcttcctcttctttgctatttccaggctgctggag

SEQ ID NO: 200283 - DNA, 201 bp, Homo sapiens
aaacatgcattaaacagaatgttattacaataataataatagtcatcaccatcattctagtgaccttgaaaatttggtacaattatccttaattcatagawtaaaaaattgagacctaaagggttatgttacttgtctaatatttcacagaaaataagtagaaaaaatgagatatagtcctgggttacctgatgccagagc

SEQ ID NO: 200284 - DNA, 201 bp, Homo sapiens
ataatagtcatcaccatcattctagtgaccttgaaaatttggtacaattatccttaattcatagattaaaaaattgagacctaaagggttatgttacttgyctaatatttcacagaaaataagtagaaaaaatgagatatagtcctgggttacctgatgccagagcccatgcatttaactaccaccttctaccaccaaaac

SEQ ID NO: 200285 - DNA, 201 bp, Homo sapiens
attgagacctaaagggttatgttacttgtctaatatttcacagaaaataagtagaaaaaatgagatatagtcctgggttacctgatgccagagcccatgcrtttaactaccaccttctaccaccaaaacataattagtatttctaagttatttcaataattaaaaactatttatttagagaattttgtgtgccaggtccta

SEQ ID NO: 200286 - DNA, 201 bp, Homo sapiens
caacggggagattgtgaaatatatccttgaccacggtaagtaggcatagtgaacttaccaaggatcacttacctgtgaaatccattgcattttgcattttytaagttacccttcatccaggcagttttcagaatggcagaaatactctcgaacttttagcagactctgcccctgcttatttgaggcagtcgtggttgcaga

SEQ ID NO: 200287 - DNA, 201 bp, Homo sapiens
ttggctgattcttaccatgtttccaaattatttctcttattgcccatatttcttgtaaactaatatttagacacagagactcaattatatttaggtttaawttttttttttttttttttttttttttttggtaaaagggatacactggcagtacattgccatcacaggaagaggatatcagccatttcactctcagtgatg

SEQ ID NO: 200288 - DNA, 201 bp, Homo sapiens
catttcgattctgcaagtggcaaaaataaactggaaagtggatgatcactctcatatgctctattgacaaataagaaaaacagggaccaaaaacaactttytctgggcagtctggggaataaaagctgctgggaggatctagtgtacacatgcgtgtagcactttttacattcgctaaacccttttatagttactctgtca

SEQ ID NO: 200289 - DNA, 201 bp, Homo sapiens
attgtataaatatagcctaatttatgtaataattattttatgcaaagtttcctttatgaagcttttaggtttttgatgttttatattgcagataatcctgyaattaacataattgtttgtaaacctctcttcacatttcaaattattttcttatggcaaatcctaaggaaattacaatgacataagcattttgaagcctct

SEQ ID NO: 200290 - DNA, 201 bp, Homo sapiens
tgtttacttgcccaagagcggcatatagagttcctggatgagaagtgatttagtagacagagttcctggggccggccgcgactgtggcggtgggggcggtrggagccccgcaaggcgttgggggtcgctgaaggccagccagctgcattccaggtggcacgagggaccgcccttgtgctcagagaagtgatttaaatatcc

SEQ ID NO: 200291 - DNA, 201 bp, Homo sapiens
atagtagagtctaaaagatgcttgcagagaggccaaaatggcagcaaataactaggaaagatgtgatatcagcctatatatgtaatattaaaggtggaatrtttatataaattatatcttatgaggaggaaaaaaatcattataactaggtgtaaacatttgggatttagttaggtctacctttgctaggtatatgacttt

SEQ ID NO: 200292 - DNA, 201 bp, Homo sapiens
gagactgaaataataaaaaaggtgtagggagaaagtacttctttctttttacggacatatctaaaaaacccataatatttatgagattgttttttaaccaygagaaacacatttatgctgatatagaaaaatcaaatatgttattttagatttttcttcttccttcacccttagcgatacctctgggtattctagttgtgc

SEQ ID NO: 200293 - DNA, 201 bp, Homo sapiens
catggtggaggagtgtgtttttcatggtgaagccatttggaatctgccaggttgaagcactgaaccaggagtaggaagacctgcatctaggcctcagcacyaccccctcaccagctctatagccctgtgcatctcatttctctgcagccgagtcctttcttgttagaaccttcaccctggctcctctacgacaagggtatc

SEQ ID NO: 200294 - DNA, 201 bp, Homo sapiens
aaatgatgtttaaatattatacttgatgaaacagggaagagaataaacttccatccctggaaggaagtaaaggaattatatatgttttatacagataaaawtctggaacagacaattatgtccttacaaacaacaacatttgagagtaaggataagtttatttttattgttaccattttgttttttttaaaagaagtcaaa

SEQ ID NO: 200295 - DNA, 201 bp, Homo sapiens
aagttgggaaaaagttgaaaactgctattctaaaggaattgcacagtttattgcaataatatataaaaaaatctctgtaaagcagtatacagtgtaaggcmcacattttcgtatgatttgatgagttcccagaatcactaacatgtttcccagaaggaaaaagtagaaagttaaaaaatgaattctgttctaaatacaata

SEQ ID NO: 200296 - DNA, 201 bp, Homo sapiens
cgaggtagacgcttcagtgagctgagattgcaccactccagactggacaacagagtgaaactctgtctcaaaaaagacaaaaaaaacaacaacacagcatsgattcatagaagttgtgggatacgtcacgtacttcagagtcatttggaaattgtttgtgttccatgggcagtgaattaaccccctaacgttccatctgtt

SEQ ID NO: 200297 - DNA, 201 bp, Homo sapiens
ctacacaggatcctccccttgagggctttgcattttggtgtgcttcatggtggaggagtgtgtttttcatggtgaagccatttggaatctgccaggttgargcactgaaccaggagtaggaagacctgcatctaggcctcagcaccaccccctcaccagctctatagccctgtgcatctcatttctctgcagccgagtcct

SEQ ID NO: 200298 - DNA, 201 bp, Homo sapiens
tctttcagaatttgcagggagcttggggatgctttgctcctctctccaaatgagaaggtaatggggaaatcctgtgataagggtataaggaaagcaaataygagagcaggctttacgcctttgacatcggaaagtctatagtcatgactagagttattctcttttgacttttgtcaccagtgggaaatgagaaaggaacat

SEQ ID NO: 200299 - DNA, 201 bp, Homo sapiens
atggctccaccctggggagatggcaggggtatgtcactgggcttttgggaagtcgggttgagcacttaccagagtgaggctttctgggcttctttcagccmtagtacgtcccacctttctgtgggccatgacctcagactggttttcacattccttcctcctctcttcctccctgctatgaaagagccgtgctccaggaca

SEQ ID NO: 200300 - DNA, 201 bp, Homo sapiens
taggaacaaaaatatgattgaaaccaaaattagcctagaactagaagtggcctttacagatcatctactaatatcctgctcattttgcagctgaaaagackggggctgagagatctagttgtataaaattgtctctgaaacctaggacttctgacttccaggtctttactaaattccagtgtaatttttaaaattttcaag

SEQ ID NO: 200301 - DNA, 201 bp, Homo sapiens
tgggtcagaatctaaggatctgtctgggagtaagttccccagtttagggaagtggacagactttttgacatttataggtctggatttttagttaccacatygggtgaaccatgtggtctgcctttttagaagatgaacacaattttagacataattggtagacgagcaagttttacatcctggtaagtcacctttgtggag

SEQ ID NO: 200302 - DNA, 201 bp, Homo sapiens
taaagtttgtgaaccaggaccccctatcgatacctttttagggattgtgagatctgactttttttttttgtattgttgattttgctatttctcagggatgrgagttcaccacccacacttttgtgctgttactatttgaccacctcttcctctttgctccccccacaacttttattatccagggagaaatcttttggaata

SEQ ID NO: 200303 - DNA, 201 bp, Homo sapiens
ttagtttttacttcttctttctttggaggcagaaattgggcataagacaatatgaggggtggtctcctcccttagcggaattccgtacattttgttctaarttataaccaaaaaactgaagtttataaatatgaggccttccttttccctctttgtagactaaagtttgtgaaccaggaccccctatcgatacctttttag

SEQ ID NO: 200304 - DNA, 201 bp, Homo sapiens
atttcatttctgccttttagtttttacttcttctttctttggaggcagaaattgggcataagacaatatgaggggtggtctcctcccttagcggaattccrtacattttgttctaagttataaccaaaaaactgaagtttataaatatgaggccttccttttccctctttgtagactaaagtttgtgaaccaggaccccct

SEQ ID NO: 200305 - DNA, 201 bp, Homo sapiens
gtcagtgtgaagccagctcttccaaggacccaggggaagctgccatcgctgccgtttctgcctctgcctttctttgctcaaaagttggcaaatgctggtcmtgtcgtggatctatttatagtaggcacacgtctacccaccttgttcttttcttagcatcaacttgacatgctatcaattatccatgaggtgaatgacaac

SEQ ID NO: 200306 - DNA, 201 bp, Homo sapiens
ttgagcttttatgcgtctgtcaaacaaccctgaaagttccatcacgtgtgatattttaaattttgctcccaaatggagaaaggcatcttcccacccctctkctgtgagtcaaaccactcaagcagggctgtggctgtcagtgtgaagccagctcttccaaggacccaggggaagctgccatcgctgccgtttctgcctctg

SEQ ID NO: 200307 - DNA, 201 bp, Homo sapiens
gatcttcattcaacaatttttaaatttagctgttgcttaacagataagtaaactgaggctcctagagggtaaaatatttatcttaggtcacttcaaatggmaagtgtagtttgacctgaggtcggtttggcttctgactccatgctttttccattgtcctacactatcttcccaaagggaccatacaaagtcagcgtacca

SEQ ID NO: 200308 - DNA, 201 bp, Homo sapiens
aaaattgctaaatatatataaactatgttctaatcaaaataagcgtaaaaattatatagaaggccatcatgtaccaaccaccttgatttattatgtcattrtttttctatatttgcattatatctttctttcaagccataaacaacacagagtagtgtaaaaaatattgttttatggttttgttttgtattgtacaagttg

SEQ ID NO: 200309 - DNA, 201 bp, Homo sapiens
atgctccaaaatccaaaacttttaaagtgctgacctgatgctcaaaggaagtgcttattggaacattttggatttcagatatttggatttgggatgctcawctggtaagtataatgcaaatattccaaaatcctaagaaaataaaaaatctgaggcacttctggtcccaagcattttggataagggatactcaacttgtat

SEQ ID NO: 200310 - DNA, 201 bp, Homo sapiens
ctgtaatcctagcactttgggaggctgaggcgggtggatcacgaggtcaggagatcaagaccatcctggctaacatggtgaaaccccgtctctactgaaawtacaaaaaattagccgggcgtggtggcgggcgcccgtagtcccagctactcgggaggctgaggcaggagaatggcgtgaacccgggaggcggagcttgca

SEQ ID NO: 200311 - DNA, 201 bp, Homo sapiens
atttaaaatgacatgattctggaaatgtatttgctcttatcattaattgtaccaccacgattagtgacaagactatatttcatttggcagaagattaataragagggaatttacttaaattttagcagaccaaatctatttgagttgtaaggaagaattttgccacttgaggatctatgagaaaagaaaataggcatggaa

SEQ ID NO: 200312 - DNA, 201 bp, Homo sapiens
tgatggagatttcccaagatgagatttttattctggacccagatatggtggtgtcacagccggcggggacacctccgggcatgcctgacctggtggtggarcaagcctcggggtgagtgtgcttctcctggcctgtgaggctggccttagggtgacatccatgtctggttcgcctttgaacttgacatcgttctaatgaca

SEQ ID NO: 200313 - DNA, 201 bp, Homo sapiens
atctagttttgttaccttaaaagctatagcatcatattttctaaagcatcttgtactaaatagacactgtctttccttaacatttaggtaggacggacttrtaaaacatctagcctctttgacatttttggggagggggtagtggggcaggtaaaatgaggaacattttttgataactctttcaatttttaaaatagccct

SEQ ID NO: 200314 - DNA, 201 bp, Homo sapiens
cattaattgtaccaccacgattagtgacaagactatatttcatttggcagaagattaatagagagggaatttacttaaattttagcagaccaaatctattygagttgtaaggaagaattttgccacttgaggatctatgagaaaagaaaataggcatggaatgaaaactctgatatattcttcttaagttttctttgagaa

SEQ ID NO: 200315 - DNA, 201 bp, Homo sapiens
aaatctcaagacatagctgcagtgcaaaggagagctatggtcttgggtcaataaatggcaatgaatgcattaggtcagggactgtctcagttttcctctcragtcacagaaaagcaatatctgacgttctcagaagactaacacatgctaggttaaatagacagcgactgtcacgaataaatcaaagtattactaatagta

SEQ ID NO: 200316 - DNA, 201 bp, Homo sapiens
ttccaaggttcaagtgattctcctgcctcagcctcccgagtagttgggattacagacatgtgccaccatgcccagctaattttgtatttttagtagagacrgggtttctccatgttgctcaggctggtctcgaactcctgacctcaggttatccacccgcctcggcttcccaaagtgctgggattataggcgtgagccgct

SEQ ID NO: 200317 - DNA, 201 bp, Homo sapiens
catttagtgctcactacatttctattatcagtcccattttcagatcacaaaatggtttaaagaaggtaactttagcgttctgaccatttagattggaactwaattttttgaccatacgtcttgctttatccacttgctatcatgtcttaatattaacggatatcactcctatataattcatgtttccagtgacagaatgag

SEQ ID NO: 200318 - DNA, 201 bp, Homo sapiens
acagtgtttgacaatgcttttacatacatgatctcagtataattcagtattatctggatgtttataacatgtaatgcataatatatcaataaatagggtamaatcctagtatcgttagtgttaaccaaactaggtatttagttaagcatttgccctaatggaatttccttgtttggtgatttagtagaaaagtcagaaatt

SEQ ID NO: 200319 - DNA, 201 bp, Homo sapiens
ggtggttgtagtggtgagcactgttctgcccaccacagtggttttctttgcatttatgctgttttaggtccactggtctccttggacctaaaggtttattyttttccccaacgaactaggaatatttttattcatgtattttatgctcaattctccctttctctgcttctgggatttaattaaatgtattttagattgctt

SEQ ID NO: 200320 - DNA, 201 bp, Homo sapiens
aaatccttatggaagttggacctgcctcgaaatcccccatgaaggaagagtgggtttatgtctgtagatgcgccactggttatgggggctccatgcctgcrtgctccttgcctctctcctggctggaggagggtgtggggagcccgctggcaagctaggggtgaaggtgagagtggggaccatatttgcacctaaggatga

SEQ ID NO: 200321 - DNA, 201 bp, Homo sapiens
aattctggaacagacaattatgtccttacaaacaacaacatttgagagtaaggataagtttatttttattgttaccattttgttttttttaaaagaagtcraatgtgtttttttgcatattttaatgggctgtttatcatttattgttgaaatagaagagatatattctggatacaagtcttctgacagatttatttatta

SEQ ID NO: 200322 - DNA, 201 bp, Homo sapiens
ggactgtggtttatttggcaattcaatgccctaagagacttaagagcattcaggtcgatttgtttccactttgttccacgtgtgagtgaccaaggcaaagrtctcaatctagacctagaagcaatttttaagcctgaaaagctcacttgtctcgattctctgtttctccctcctccctctgcccttaaactaaagtcaacc

SEQ ID NO: 200323 - DNA, 201 bp, Homo sapiens
ataattttggcttttatatgtaagtatatgattcagctcaaattaatttttgtgtattgtgtaagatacatattcattcataaaaaatgcatttatccagytttttccagcactatttgttgaataaactttccttttctgtaaaattgctttggtgcttttgcttggtgtctagattctattctgttccattgatttgtt

SEQ ID NO: 200324 - DNA, 201 bp, Homo sapiens
cattaggaactggaccaggaacccaagtctttttctttcaattttcagagttttgcagtttgctctttggcttgtggatgccaacacttagagtttatatrgtcagtttctgcgatcctgagatgtatttttttttgcaattgcagttggttgtttctcctcctacagtttgtttagcctcttcctcatccattatcctcc

SEQ ID NO: 200325 - DNA, 201 bp, Homo sapiens
aacagagaaagaaagggagaatgagttcatcttggtgtaaactcttcacccagcctaggcctgtaattagttaagaatttcttggagatctttttcccttkttctattgccacccacttctatagctgcttgagaatctctatcaataagaatgtagaagggctgggcatggtggcttacgcctgtaatcctagcactttg

SEQ ID NO: 200326 - DNA, 201 bp, Homo sapiens
agcatgagtcagaattgaaattcagtcttattctgagttttatattccctcctatgccctgttatactaccaaagtcttaaactctgagaaatttacaagkgtgtttctagttaaacgcacgcatgaatgggtttagttttgcttgtgtgatagaacatgtgcaaaatggtcctttttcctttaaccattttgtaactgcc

SEQ ID NO: 200327 - DNA, 201 bp, Homo sapiens
aaggaggagagagaaacagagaaagaaagggagaatgagttcatcttggtgtaaactcttcacccagcctaggcctgtaattagttaagaatttcttggaratctttttccctttttctattgccacccacttctatagctgcttgagaatctctatcaataagaatgtagaagggctgggcatggtggcttacgcctgta

SEQ ID NO: 200328 - DNA, 201 bp, Homo sapiens
cacctcatgatagtcatgagaaggatgggacatatttacttctgtctttaatcttctcttgcagatattgtgctggcacaatgccctggggaaacccaggwgatcaccatgatttcgaacctcagcgtcatgatgatggttatattgaagtcattggatttaccatggcctctttggtgagcaatataactgttttattaa

SEQ ID NO: 200329 - DNA, 201 bp, Homo sapiens
atttgatctggtagcttcttcagtttaaacttaaaatcagctagaagggaaaggaaagcttggtatgagagaaatatagtggttagtacacaggcctgcgsctttttgaggtatccactaaaagacagtgggtgagtttggcctcaagtctgcgtgcaaaaggatcatacagacttcagttaatccagactctcagcccca

SEQ ID NO: 200330 - DNA, 201 bp, Homo sapiens
tgtcgattgcctcaattgcctcagtctatctgtgtgtctcagggtacatatatttttctgtttagctctattttctcactcacgctatggtagcaaaggcrccacaactagtatgcctttttgtttctagtttttcaggataccacattttttacttctggagaatgaggcatgagaatatcaagactctgtttttttttc

SEQ ID NO: 200331 - DNA, 201 bp, Homo sapiens
tttgatctggtagcttcttcagtttaaacttaaaatcagctagaagggaaaggaaagcttggtatgagagaaatatagtggttagtacacaggcctgcggstttttgaggtatccactaaaagacagtgggtgagtttggcctcaagtctgcgtgcaaaaggatcatacagacttcagttaatccagactctcagccccag

SEQ ID NO: 200332 - DNA, 201 bp, Homo sapiens
agggggaaaatacagggaaagaagaagaaagaggagaacatggtgaagagtatcaagaggaagagatcgctgagtgctgctgagggattcaggtaagaaartagtcattaatgatttctgtgtactttctttgagtgagcactgctgtggttgttttacaaatgttgtcttatttaatcaccacaataaccaggtgaggta

SEQ ID NO: 200333 - DNA, 201 bp, Homo sapiens
gcacacaatgaaccagatctcatgaaagcttgaggtgggtaagggcttggggagagctattgaaccgagcaaggagatcagatatctggagaaggtgatayttgaatggttttgaaaaaaaggagttagctgtgatccatgctggggtgagggtgttccacattcaggcagcaactataatgatgtcataaccaggacctg

SEQ ID NO: 200334 - DNA, 201 bp, Homo sapiens
gggtaattgtgcttattgtgaaagtttcaggttctcaacaggaagacagactgttggacagcgattttgattttggaaatattctttcagcttcacaatcwgataagcgggagaaaattaatcttcttagtgggatgcaggttttgctgaaatatatcttagagatgaaatcagtgctgtcaggataaagatggctcctgg

SEQ ID NO: 200335 - DNA, 201 bp, Homo sapiens
gcatccacctactgcatatttagtaaatattcgtgggctctgggcctagatctgtgatagcgtctgatcaaagtccatgtgggagccatcacttgacactkttaggggcttaaaataaatgttgtgacaatatgcaaacactgaacaaatgccaaagcaggtagacgacctgtcccttatttagcggtctgtttttcaggc

SEQ ID NO: 200336 - DNA, 201 bp, Homo sapiens
ggcggaaatcgaagagggagcaggtgtctcacatggcaggagaaggagcaaaactgagagttggggggaggtagcacacagttttaaacaaccagatctcytgagaactcactcactatcctgaggacagcaccaagccatgagggatctgcccccatgacccaaacgcctcccaccaggccccacctccaacactgggga

SEQ ID NO: 200337 - DNA, 201 bp, Homo sapiens
ggcagtattgattggatccctctttaaagcatgtgagttccttggatgaccaaactgtgcatttctccctctgtctccatagcactttgcaccatacctaraatggtaggcatccaacaaggcaggcttttgggatgaatagaaggatgttccattcatagaacatcccttgatagaaaaggtgctttgtcaaaccaaaat

SEQ ID NO: 200338 - DNA, 201 bp, Homo sapiens
atgatctgtcctagggcaacaccgttcacatctagggtgagcatccacctactgcatatttagtaaatattcgtgggctctgggcctagatctgtgatagygtctgatcaaagtccatgtgggagccatcacttgacactgttaggggcttaaaataaatgttgtgacaatatgcaaacactgaacaaatgccaaagcagg

SEQ ID NO: 200339 - DNA, 201 bp, Homo sapiens
aagaactttgtcagcctgagcttcccagcaagcgaacaaggtgcctggagagattgactggtgggatgtgtgtttgtggataacgtgggtggccatgtttmaaggatgctgtagttggggactctcagctgctttgggcaagaggtcacagagatctccaggcgagtctttagtttaaatgctctgtttgcagttttctta

SEQ ID NO: 200340 - DNA, 201 bp, Homo sapiens
gaacatagataaagctttgggggtgaaattgacaatagagtgtgtctcctttctctctttagccagtgggaaggttgggtgacttggggctgcaggattcygggaggcctccgtatcgtatgctgcctgtccttagagtccatccagacctgagggctacttagctgaattgtttagtaaacgacgtgggattcagctgca

SEQ ID NO: 200341 - DNA, 201 bp, Homo sapiens
agagccagttctgccaactgtctgtggttgtcataggtatgcttcatcaaatattctggcgcatggtaggtgtacttcctggctttgtatatttgagtggkgccacctaaccagttctggacaatatgttgtgattggaagtgatgtgtatcacttgtgggatggaatgtttatttgccacaaataaataactaaaaaaaa

SEQ ID NO: 200342 - DNA, 201 bp, Homo sapiens
acatcttcttaattgtcagcctgggtccagaaagccccagccaattctttatagacaggcagtgctagatagacataaactgctgttattttaacaagtgrgatatgtcttatgttcctacagtataacctacttcatctcgactaacacaatgatccatagtcagggacatgtgctttttggtgagcagtcaaggtgtgg

SEQ ID NO: 200343 - DNA, 201 bp, Homo sapiens
agtgcaaaggagagctatggtcttgggtcaataaatggcaatgaatgcattaggtcagggactgtctcagttttcctctcaagtcacagaaaagcaatatstgacgttctcagaagactaacacatgctaggttaaatagacagcgactgtcacgaataaatcaaagtattactaatagtaaatgattcattctagaaagt

SEQ ID NO: 200344 - DNA, 201 bp, Homo sapiens
cttcccacttcatttccctgtctcttttctactggcatgcatacatcttcctttaagaccaaattctgaaaccacctatagataattcatgatatatcatrgaaaacagacatacatgaatcatagtgagaaatatagataacgaacgaggagaaagttggataccacaggatacttttgttgcaaaattatggcccgttt

SEQ ID NO: 200345 - DNA, 201 bp, Homo sapiens
gggtcaataaatggcaatgaatgcattaggtcagggactgtctcagttttcctctcaagtcacagaaaagcaatatctgacgttctcagaagactaacacrtgctaggttaaatagacagcgactgtcacgaataaatcaaagtattactaatagtaaatgattcattctagaaagtcttggggctttctattagggctct

SEQ ID NO: 200346 - DNA, 201 bp, Homo sapiens
caagttaagaagttgtactttcagggtgtaactaggaaggagagagaactgtagacaggaaatgtggggagagtcctctttggtgttccgcatcatccttmctgtcctatgttcctctcctcaccacagtggtgactgaggataaggttaaagacagagagtttgtcttctctttcctttgcaaactgcatcttcctctgc

SEQ ID NO: 200347 - DNA, 201 bp, Homo sapiens
ccaagttaagaagttgtactttcagggtgtaactaggaaggagagagaactgtagacaggaaatgtggggagagtcctctttggtgttccgcatcatcctkactgtcctatgttcctctcctcaccacagtggtgactgaggataaggttaaagacagagagtttgtcttctctttcctttgcaaactgcatcttcctctg

SEQ ID NO: 200348 - DNA, 201 bp, Homo sapiens
tacaggtgcctgccaccatgcccagcttttttttttttttgtatttttagtagagaccgggtctcgccatgttggccaggctgctctggaactcctgaccwccggtgatccacctgccttggtctcccaaagtgctgggattacaggcatgagccacagcgcctggcctccagctttcttaaataataactaactccttgc

SEQ ID NO: 200349 - DNA, 201 bp, Homo sapiens
gaacatatctgggagaagaatgtaatctatagagcatatcataggtaattttaacttaattaattcaaagtccactttcaactttgttcataaatgtgcarggctaatagcctaaataaaaaattacggaatagaaattgatgacaattgtcataatgcttgcctccatagtcagcgctaatcatcatttagagcttgctt

SEQ ID NO: 200350 - DNA, 201 bp, Homo sapiens
tgtagtggtgagcactgttctgcccaccacagtggttttctttgcatttatgctgttttaggtccactggtctccttggacctaaaggtttatttttttcsccaacgaactaggaatatttttattcatgtattttatgctcaattctccctttctctgcttctgggatttaattaaatgtattttagattgcttgttatt

SEQ ID NO: 200351 - DNA, 201 bp, Homo sapiens
ctctgcttctgggatttaattaaatgtattttagattgcttgttattgtctcataggccatgaaatagaataaaacatttctgtctctgtttttcagatayggtaatttctattcatctgtttttatcttcactggcctctttttttctgcagctttcaatttgctcttaagttcactcagcaataattttgtttttttca

SEQ ID NO: 200352 - DNA, 201 bp, Homo sapiens
ccaataccacactgtcttaattagctgtatggtaacccttgaatctggtaatatgaatcactttattgttctaacagtgttttccttgttctagatctttkggcatttgcatataaatattagaatctgttattatctgcaaaaaattaggattttaattggaattgcatttaagttttagataatttggggaggaattgg

SEQ ID NO: 200353 - DNA, 201 bp, Homo sapiens
acgcagcggcgccaggcgccagggtcctcacttctgcctcctggatttcctccgcctttctgcttcaccgagggccctgtgatccgattccatcgaattarccgctgtttaccgagggtctgctgcgcctaaggaaggcaccgggcgacgagcaaggcggggacgcagtttggggacgcaggggtccgggccccagtccag

SEQ ID NO: 200354 - DNA, 201 bp, Homo sapiens
ggtaaagtgggtaactctttctgatttttttggttcacttcaagactatatgatcttgaaattttaaataaataagctaaaaaggccctaaaatattttawtaaaacccactgagggccgggcgcggtggctcacgcctgtaatcccagcactttgggaggccgaggcgggcggatcacgaggtcaggagatcgagaccat

SEQ ID NO: 200355 - DNA, 201 bp, Homo sapiens
aagctgcttcttgagagtcgtctcttgtcatccctctgggttttagctcagtgtgacgaagctatttaaaatatgtgtgtttttaaatgattctaaaaatraagtattcacattgttatgcctcactccctccccactattgagtcctgctcccctgacagcaactttccatttctctagcttatccttctggtatttatt

SEQ ID NO: 200356 - DNA, 201 bp, Homo sapiens
gtaaagtgggtaactctttctgatttttttggttcacttcaagactatatgatcttgaaattttaaataaataagctaaaaaggccctaaaatattttatwaaaacccactgagggccgggcgcggtggctcacgcctgtaatcccagcactttgggaggccgaggcgggcggatcacgaggtcaggagatcgagaccatc

SEQ ID NO: 200357 - DNA, 201 bp, Homo sapiens
accaaactcttcttacagaactttaccctcgaccaccattgctggatctgccacagtcagagttcatctaccgggtctaacacgtctcggcttcttttgcmttttctcccgtgtctcccttgggtgtcgcagaagcagcaagagattattatcatgtagtagggctccgtaatcagaatgcgaaatccctatgcataaatg

SEQ ID NO: 200358 - DNA, 201 bp, Homo sapiens
gaaacccatttctttgactcagatagctttcactttagttccaaattttcagggacatttggtaccaaactcttcttacagaactttaccctcgaccaccrttgctggatctgccacagtcagagttcatctaccgggtctaacacgtctcggcttcttttgcattttctcccgtgtctcccttgggtgtcgcagaagcag

SEQ ID NO: 200359 - DNA, 201 bp, Homo sapiens
  misc_feature (1)...(201): n = A,T,C or G
aaacccaggtgatcaccatgatttcgaacctcagcgtcatgatgatggttatattgaagtcattggatttaccatggcctctttggtgagcaatataactnttttattaaaatgaaatgtattttagtcacagagtttattcaattcacaggactttagttaactttttctcctgctttatcaagttacacattttatgaa

SEQ ID NO: 200360 - DNA, 201 bp, Homo sapiens
tgatacctcccttaagtaggcccagtccagtttaagtgcaatctcttgagtgccttgtgtcagacactgtgccggtcacccagggctccagggtgaatcasgaatagctctcacatgtgaattcacagtctagttggggagacagaacagaccaaaagcagataatatttaaataacatgatgctggctaagagagaggta

SEQ ID NO: 200361 - DNA, 201 bp, Homo sapiens
cctgtgattgccaatcgcctagtattcttgttgaggaaataagggaaggtgaacggactgaatagccacatgatggttgcattttaggtgtatttatgacraaattttaggtatctggtcattcccaaatattttccctttgtcttctcactcatggcactgaatatttaaataccaatatgcgattaacaaggtaaagtt

SEQ ID NO: 200362 - DNA, 201 bp, Homo sapiens
gaaacacacaacttatattcaggattaatggagccaggttatggggtagggttggtcttgccagggccactcagaccacagcagcacaactgcctctttascacacaaaggctggtcctacactcaactcagatcattttaaaaacagagagaagccatgaaaaagagggacaaaccaaacaggaatcaggagacctggct

SEQ ID NO: 200363 - DNA, 201 bp, Homo sapiens
catgctcaactcgtaggatgccatcatcaaacagctttgccttctccctccatttattctttaaacctgcacagtgggacatgtccttccctggcaattcyggtcactcttaggcaattaaaaaacaaaacaaaacaaaacattcaggttaaaaacaccagataattcagtacctgaaacgtccagcattatgtactagca

SEQ ID NO: 200364 - DNA, 201 bp, Homo sapiens
gggttggtcttgccagggccactcagaccacagcagcacaactgcctctttaccacacaaaggctggtcctacactcaactcagatcattttaaaaacagrgagaagccatgaaaaagagggacaaaccaaacaggaatcaggagacctggctcttgagcaggtctgcttttttatctttctaagtttctgaatcagataa

SEQ ID NO: 200365 - DNA, 201 bp, Homo sapiens
cttgattagcttaatagtcggccttctgaattctttttttgtcaattcagagatttcatcttggtttggatccattgctcatgagctggtatgatttttcrgggtgttaataatcttgttttgtcatattaccagaattgtttttctggtttcttctcatttgggtagactatgtcagaggaaagatctgggcttcaagcg

SEQ ID NO: 200366 - DNA, 201 bp, Homo sapiens
agaagccatgaaaaagagggacaaaccaaacaggaatcaggagacctggctcttgagcaggtctgcttttttatctttctaagtttctgaatcagataaargactcaatgttcatggaaacttctttctgttttgtgttgtgtatgtgtctgctttttttaaaaaaaaaatggaaatagcttgtttttataattataaacc

SEQ ID NO: 200367 - DNA, 201 bp, Homo sapiens
caagatttagagcttcttttagcagttcttgtaatgctgacttgggagtggcaaattctctcagcatttgtttgtctggaaaagactgtatctatccctcrtttatgaagcttagtttcactggatacaaaattcttggctggtaactgttttgcttaaggaggctaaaaatagaatcccagtcccttctagtttatatgg

SEQ ID NO: 200368 - DNA, 201 bp, Homo sapiens
gtgcatacgtatttaaaattgtgatattttcctgttggacttgtctttttatcattctataatgtccctctttgtcttttttagctgctgttgctttaaartttgttttgcctgatataagaattgctactactgctggattttagtgtccagttgcatggaatatctttttctacccctttgccttaaatttatctgagt

SEQ ID NO: 200369 - DNA, 201 bp, Homo sapiens
ttcacacaggtaattgcatcaaatgtttccaacatgtttcttcttaaattgatagtcattaggtgatttataatctcaataattacagatttttttctgamcatcaatgatattgttccttttccctcggcttctgctacactaacagcaattatattacatttttctattctgtatgatactgtctgacatttttatata

SEQ ID NO: 200370 - DNA, 201 bp, Homo sapiens
gatactttcaaaattgtatcaaagaaaatagacaatggaagtctggcagactttacaatgagtatctagtaaatcggatatgaaaaggaaaggggggggggaacctcatcttctctgtgaatttctaaaaaagtgttcacataagacagggctagatagtttgaaggatattttccaagcccaaaactgtacaagaggaag

SEQ ID NO: 200371 - DNA, 201 bp, Homo sapiens
aaggtataaagttcttgggatgttatgtttccttttgaatgctaatatgcccattcgttgctccccattggttccaggtgagcagtgggaaattaatgatraccaggtggttgtaaaatggacctgtgacccacagcagggaaaaactggattgaaataccatattgcaaactgattctatctaattcttatcagccatca

SEQ ID NO: 200372 - DNA, 201 bp, Homo sapiens
tgatgatggatactttcaaaattgtatcaaagaaaatagacaatggaagtctggcagactttacaatgagtatctagtaaatcggatatgaaaaggaaagsggggggggaacctcatcttctctgtgaatttctaaaaaagtgttcacataagacagggctagatagtttgaaggatattttccaagcccaaaactgtaca

SEQ ID NO: 200373 - DNA, 201 bp, Homo sapiens
gtatatacatagtgttaacaagcttattctaagatgactatattttgatggtttaccatattgttcaatacctttcctattttctgactttttaattctgkgattatatttattgttcttttcagaaggtgataaccttttttaaaaagcctccacaattcatatatatatttaaaacttaaagcccagtctttgcaaaca

SEQ ID NO: 200374 - DNA, 201 bp, Homo sapiens
tcccgagttcacaccattctcctgcctcagcctcccgagtagctgggactacaggcgcctgccaccacgcccagctaattttttgtatttttagcagagayggggtttcactgtgttagccaggatggtcttgatctcctgacctcatgatccacctgcctcggcctcccaaagtgctgggattacaggtgtcagccaccg

SEQ ID NO: 200375 - DNA, 201 bp, Homo sapiens
ttagggacctcatggggagaagttgagatgattatcctgagtacagaatagccaacttccaagtgggtattgtgggtgtgcgtgtgtgtgtgtgtgtgtgtatgtacattcgtatgtactagcatgcactagtaacacgtgtatgtttgtgagtgatactggctgtctaggaaggatgagtagggtttggatgaatctctt

SEQ ID NO: 200376 - DNA, 201 bp, Homo sapiens
tttagggacctcatggggagaagttgagatgattatcctgagtacagaatagccaacttccaagtgggtattgtgggtgtgcgtgtgtgtgtgtgtgtgtgtatgtacattcgtatgtactagcatgcactagtaacacgtgtatgtttgtgagtgatactggctgtctaggaaggatgagtagggtttggatgaatctct

SEQ ID NO: 200377 - DNA, 201 bp, Homo sapiens
atttagggacctcatggggagaagttgagatgattatcctgagtacagaatagccaacttccaagtgggtattgtgggtgtgcgtgtgtgtgtgtgtgtgtgtatgtacattcgtatgtactagcatgcactagtaacacgtgtatgtttgtgagtgatactggctgtctaggaaggatgagtagggtttggatgaatctc

SEQ ID NO: 200378 - DNA, 201 bp, Homo sapiens
tatttagggacctcatggggagaagttgagatgattatcctgagtacagaatagccaacttccaagtgggtattgtgggtgtgcgtgtgtgtgtgtgtgtgtgtatgtacattcgtatgtactagcatgcactagtaacacgtgtatgtttgtgagtgatactggctgtctaggaaggatgagtagggtttggatgaatct

SEQ ID NO: 200379 - DNA, 201 bp, Homo sapiens
tggaaagtcacctgggtttcccaccacttgtagttttctaaggttaattaaatctatttgcattttataatgagaaaaatatcacaaccttttttttttttaaagaaaacaagctacctttttttaaagtgatttgaaatagaaatgcctctgctagcttctctttttcatgctgagaggacatttcccagcaagccccaa

SEQ ID NO: 200380 - DNA, 201 bp, Homo sapiens
gaggtagaatggcttttgtagccaagtctatgtgtagaaaatttggaatggaaattaagaaactgtagtgatgactgctgcttctaacagtaaaggaaatmtttatgtgtatcttccagatgtttactgaagtagaaccttagtaagttatttgacatgaagcccaaagttataatagacacaaagatgcttcatttcaag

SEQ ID NO: 200381 - DNA, 201 bp, Homo sapiens
aacagaccaaaagcagataatatttaaataacatgatgctggctaagagagaggtagccatggagttaagtatcttcctctccattttattcagccttttgttttaaaattctacctttatgatgtatttcaacagagttctgtgtcatgattttggatttagtggaaaaagaacagaggagattttcttgttaccttaat

SEQ ID NO: 200382 - DNA, 201 bp, Homo sapiens
acacaaaaattccaaagtaactgggtgcagcagtagcttaaagtttaagagcttcctgttaagtcccatgacgaagaaattcaccgtcatgggatttagaycctcaaagcccggagctctggggaccagaagcacaaactcccaaagtgggccacagtaggcatagccactgttactttctctcactggtttctgtatttc

SEQ ID NO: 200383 - DNA, 201 bp, Homo sapiens
attttttatactgttcagttcctgtattaggctgttttcgtgctgtttataaacacatacccgagactgggcaatttacaaaagaaaggggtttattggayttacagttccacgtggctggggaggcttcacaatcatggtggaaggcaaggaggagcaagtcacatcttatgtggatggtgacaggcaaagagagagctt

SEQ ID NO: 200384 - DNA, 201 bp, Homo sapiens
tgtctcataggccatgaaatagaataaaacatttctgtctctgtttttcagatacggtaatttctattcatctgtttttatcttcactggcctcttttttwctgcagctttcaatttgctcttaagttcactcagcaataattttgtttttttcattttattatggatgatgttttcttgcttctttgcctgtgttgtcct

SEQ ID NO: 200385 - DNA, 201 bp, Homo sapiens
tttctgtctctgtttttcagatacggtaatttctattcatctgtttttatcttcactggcctctttttttctgcagctttcaatttgctcttaagttcacycagcaataattttgtttttttcattttattatggatgatgttttcttgcttctttgcctgtgttgtcctagtggatgatacatcgtatgtgggtctggat

SEQ ID NO: 200386 - DNA, 201 bp, Homo sapiens
ttcatctgtttttatcttcactggcctctttttttctgcagctttcaatttgctcttaagttcactcagcaataattttgtttttttcattttattatggrtgatgttttcttgcttctttgcctgtgttgtcctagtggatgatacatcgtatgtgggtctggattgtgtttcgttgtgacttagtgtgtactgtcttag

SEQ ID NO: 200387 - DNA, 201 bp, Homo sapiens
aattagctgtatggtaacccttgaatctggtaatatgaatcactttattgttctaacagtgttttccttgttctagatctttgggcatttgcatataaatwttagaatctgttattatctgcaaaaaattaggattttaattggaattgcatttaagttttagataatttggggaggaattggaatattaacaatatgaat

SEQ ID NO: 200388 - DNA, 201 bp, Homo sapiens
cagtgttttccttgttctagatctttgggcatttgcatataaatattagaatctgttattatctgcaaaaaattaggattttaattggaattgcatttaarttttagataatttggggaggaattggaatattaacaatatgaatgttccaatccatgaacatggtatatttctccatttatttaggtatttaatatccat

SEQ ID NO: 200389 - DNA, 201 bp, Homo sapiens
catatacaaatacatatttgtttattgaccttgtctcataactttgctaaattgacttattagatccagtagcttgttttttttaatagattccttaggtytttctgcaaccacaattatattgtttgaaatagagttttactgtttccttacatgcctttccatttttattttttatttaaaaaatttttatgccactct

SEQ ID NO: 200390 - DNA, 201 bp, Homo sapiens
atatgacatgaaccaactacaacagcataaatgagatggtttctctgagtattttccattgctcagatctgattattgatctggtgagccttgctgagacraaggttgagcttctcaatgcacgttctctccaagaggtaggagagtatcataaggagaaggcatcattatgtccatgtgggacaaccagcttccttctgt

SEQ ID NO: 200391 - DNA, 201 bp, Homo sapiens
aacatcccagcattggcacagaagccatagcattttatacttttttggttcactgaggagttttgtgtttaggtaaaaaagagacagtagcaacttgtggrtatccgtcttacttatgagtaaaatgatcatctccattatcacaaaatatctgaatatacaaagacatcattattgtgatattagtgcatactcagttgc

SEQ ID NO: 200392 - DNA, 201 bp, Homo sapiens
gaagaactgggcttcctccaccctgagttgctgtgtgtcctttcctgccagtgttctcagccagccatcatgccatgagcacagctcgctgcacgtccgtygtcagtggggaagtcagtgatccagcttgtcacatcatgtttcaaaaatattgcactattatagtcatctcttgtgtttataatgcagcttctccatgaa

SEQ ID NO: 200393 - DNA, 201 bp, Homo sapiens
gaattctcctaggagaaaaatgtacagtattgaacctaatgataaagttgttaaccatgctgcttagctttgaccagatgacggggtagaagtccacttaycatacactcctgctgggccaattgtatgtgggtgtcacttctctaatagtatttgggaagaagatgaggcaagaccatttctagatatatctaagaaaaa

SEQ ID NO: 200394 - DNA, 201 bp, Homo sapiens
gagcactggttagacaagaggaaatgatggcagatggaggcctgaggatagttaggtttcactggcagagaccagatggacccactggattggagaggccyggctatgtgagcctgatgtcaccccttaccctcaatgcatccagctttccttcatcttttcccatgcctactctttgcatttgacttcccaagtaggagg

SEQ ID NO: 200395 - DNA, 201 bp, Homo sapiens
ggattcatctctccctatctcccactgtctgcgttagcgcagctttggggaggatcaccaactgatcaagcttctgacaacacagtgtgatcctttgacaygttgcagaatttcattattcctcgagaccaagaatacttgttttgttattcttcatgcaacagacttcttgttcttctttaggaacatttgcactttgtg

SEQ ID NO: 200396 - DNA, 201 bp, Homo sapiens
ctggctaccgtatacggaatgatttgagaggggtaaatacatttgacactctaggccagaaataatgagaaataattaagaaaatcagtaatagtagacarctgttggcttgagagagactgaagtggaaccaagtgggtttaattactacctggacttagaaaatgagggatgaggacgaggtgattgacggcaccagtt

SEQ ID NO: 200397 - DNA, 201 bp, Homo sapiens
aatgtttaactataatgtgtgaggtctgatttgtgatttcattgtgattaccctaagaaatagggtaaacaattcagtcaatcgtgtattgaacaaatcartattgggcaccttcagtgactgaagtcaggcactgaagatatacaactaaagaagaaataattattgcccttgaagagcttatatttaaaggggaaatat

SEQ ID NO: 200398 - DNA, 201 bp, Homo sapiens
atgtgtttctctggccaaacgcctgatagtatcttcttggcaagttcattatttattcccctttactggtgtgagggttttcccaaagtgtcatgtctttrcagagtttttcctacccttccgtgctatacgtgtggtaccattttatgcatttgtttttgctaatatgaaataaatcccattataaataattccaaggga

SEQ ID NO: 200399 - DNA, 201 bp, Homo sapiens
tcttgcctccactgcctagaggataaagccctaaagtctgagctcattgtacctcttcagccatgttctcactcatgttagctgtatctgaatcatcaagraagcttgtcaaactctctgtgccccaattcttttctccaagagattctgggaagcttttgggtgatagggaagggagatatgacacattcctgggggggt

SEQ ID NO: 200400 - DNA, 201 bp, Homo sapiens
gggagctccagtgttaggtgcatacgtatttaaaattgtgatattttcctgttggacttgtctttttatcattctataatgtccctctttgtcttttttarctgctgttgctttaaagtttgttttgcctgatataagaattgctactactgctggattttagtgtccagttgcatggaatatctttttctacccctttgc

SEQ ID NO: 200401 - DNA, 201 bp, Homo sapiens
catttagttctgctctgatctttgttatttcttttcttctgcttggtttgagtttagattgttcttgtttctccagttccatgaggtgtgaccttagatcrtctatttgtgctctttcagactttttgatacaggcatttaatgctatgaactttcctcttagcactgcttttgctgtatcccagaggttttgataggttg

SEQ ID NO: 200402 - DNA, 201 bp, Homo sapiens
agtagtattccgtctgtatatacaccaaattttctttatccactcattgattgatgggcatttgggctggttccatatttttgctattgcaagttgtgccrcttaaacatgtgtgtgcaagtatctttttcatataatgacttcctctgagtagatacctagtagtgggattgctggatcaaatggtagatctatttttag

SEQ ID NO: 200403 - DNA, 201 bp, Homo sapiens
ccccatcaagttggaccgtccagtaggcagctggaaatgtggctccagaactgacaagaagtgtggatgggacccagagatctggatatgatcagagaagsctttgaaggaggaacaggaacctcaagagaaattacacattatcgtatccctaatatgctgtctcacttttagtaaaatattaagtatttctaaaaagat

SEQ ID NO: 200404 - DNA, 201 bp, Homo sapiens
tgcaacaatcccattacggatgctaaaactatagtcatttcagtgggagggtagcatggggagtgggtggtagtctttttatttttattttattttttttwaaaaaacctctcccacttccaaatcttttgcattcatttattttaagctttgcagcttagggtactaaaatgagaaacaaaaagtaaaaaagagtgtcat

SEQ ID NO: 200405 - DNA, 201 bp, Homo sapiens
taatacacaatctgtaacatagtcaaagaagaaataaagagtcggcaaactatggcccatggaccagatctcgctggctgtttttgtaaataaagttttaytggaatacagccatgcttattcatttatgtattatctgtggctacttttgtgctacagtgacagagtggagtagttgtgactgagattgtgtggtcttca

SEQ ID NO: 200406 - DNA, 201 bp, Homo sapiens
catcaccaaggggatggcaccaagccattcatgagggatccagcaccatgacccaaacacctcctgccaggccccatctccaacaatgtggatcacatttyaacatgagatttggaaggaacaaatatccaaaccatactagttgcctagaaaaatgcctggcacatggcaagcactcataaatgttagtgataagctatt

SEQ ID NO: 200407 - DNA, 201 bp, Homo sapiens
cttttttctgaggattacatttgaaatcctaaaacaatgtagttcaggttaatatcaacttaattttaatagttttcaaaaacttagttcatatacagctstgtttccttctcttttgtgtaattattgtcatatcaatgacctctttacacattataactatatcaacattatcttataattattggtttatgctgtttc

SEQ ID NO: 200408 - DNA, 201 bp, Homo sapiens
cctttattaggttgaggacgttcccttatattcctagttttgttgagtggtttttaatcatggacagatgttgggtttttacaaaaatgctatttctatgkctattgagatgatcatgtgggtttggtcacttagtctattaatatggtatattatattgattgattttactgtgctaaactaaccttgcactcctagggt

SEQ ID NO: 200409 - DNA, 201 bp, Homo sapiens
ttatagctatgtaatgatgtaaaggacacagttgttttatgaaatccatttccccttgctccttccttttgaaaccttgatcttttttttctctttctagyagctaatgagattcaggaaagccgatcccatttccaactccagggagcaagaaagtataatatttgaccttccagcctcttagcatcagctggtacttcc

SEQ ID NO: 200410 - DNA, 201 bp, Homo sapiens
tgctgtcagaatacacatatgggcctgatttgaagaggaaagggtttgttctagggtttctttcagagtgagaggtttactacgtatggtggtgctaaggcacataatgatgatgaagaagaagatgacgatgatgccataatgataaaagctgccatttgttagatctgtgctatgtggcaagcactgttagttcaacaa

SEQ ID NO: 200411 - DNA, 201 bp, Homo sapiens
attgttcatagcattacaaagcctgtcccagcggatttcctggttaccagatgtattcttccagcttctgttgtcaggtaacagctagatctgtgcctaaygatcaggatcaattactcctgtcaggatgctggctcctttctgtgcctgctagtctcttaacacaaaaattccaaagtaactgggtgcagcagtagctta

SEQ ID NO: 200412 - DNA, 201 bp, Homo sapiens
ttgatgagagtttaatgaggagaatatttaaaatgtgtgaaaagcatgggggatggtgggtggaaccacaagaaaaaatggagaacactgtgactaatgtyagagagctgtggtcaagctaagcctgaagaggtgaggagatggagaggaccccttcccaggagctgcaactttcagtcacaagactcagccagcctgtgg

SEQ ID NO: 200413 - DNA, 201 bp, Homo sapiens
catctgctactgatattcatcatctctctcctcaaccacttatcctggattcacctcactctcaactagtgcctctggtctaggtgacctacctggtaggsggaccaagaccgttatctctctgcagtctgattccctggtcttggctgctgcagttgtctatttattattaaaattgttcatagcattacaaagcctgtc

SEQ ID NO: 200414 - DNA, 201 bp, Homo sapiens
tgtggtcaagctaagcctgaagaggtgaggagatggagaggaccccttcccaggagctgcaactttcagtcacaagactcagccagcctgtggtgacctasagcctggagaaatagatacccagtagatacccagctccacatatcttcatgttctagtggccaaacccaacagaaaccatagcacaagggattgtttgat

SEQ ID NO: 200415 - DNA, 201 bp, Homo sapiens
agttagcattaatatgtgtggatttgatcctgtcattgtgttgttagctcattactgtgcagatttgtttgtgtgattgctttatagtatcactggtctgkgtatttaggcatgtttttgtagtggccagtaatgacctttcctttccatatttagcactcccttcaggacctcttataaggcgggtctggtggtaatgaa

SEQ ID NO: 200416 - DNA, 201 bp, Homo sapiens
attcaccgtcatgggatttagaccctcaaagcccggagctctggggaccagaagcacaaactcccaaagtgggccacagtaggcatagccactgttacttyctctcactggtttctgtatttctgtattttgtcatggagacacagcaccatgaaatgatcatagatttagtgagtaaacatactgagtctggtggatggt

SEQ ID NO: 200417 - DNA, 201 bp, Homo sapiens
aacacagtgtgatcctttgacacgttgcagaatttcattattcctcgagaccaagaatacttgttttgttattcttcatgcaacagacttcttgttcttcyttaggaacatttgcactttgtgatggagatttcccaagatgagatttttattctggacccagatatggtggtgtcacagccggcggggacacctccgggc

SEQ ID NO: 200418 - DNA, 201 bp, Homo sapiens
gcataagcataaaaaatgcaagcataattatcaactgtccatgagcagcctccctgttctgccaatccatcgttactgcgacaattcacttcatctcaggrccagtgaaacacaatgagatgaggggcaggtggcaaggggcaacatggatcatgctaggaaagtgtgtgacaactgcaaacaagaagagactgaaataat

SEQ ID NO: 200419 - DNA, 201 bp, Homo sapiens
ctctttccttccaaataagcatgtatagcccaagatattggaaaaagaaggttcttttgcacaaaggaaacttaaaccaggagatacaggacttgagcttkgttctaaactgtcataaatagctgtgaaaagagaaaacattaagaagactgatttccccagggtgcagaggggaacaagctctctcaaagttggaaagag

SEQ ID NO: 200420 - DNA, 201 bp, Homo sapiens
gctcaaggtcctctactgtgttcacaaatctgcagagtgtttgactattaagacagtagagtaactgcaatctcgtgtggccacttgccactaggaagacrtggagggagggcatgagaagtggaatctacagatatgaaagatctttggggatggagaagtaacttaatttgtccacgtagattcatgtttattgttaaa

SEQ ID NO: 200421 - DNA, 201 bp, Homo sapiens
cactctatctagtgaataattctcacgtctatgtcttgtattaggagatctctttctgagagtttgatctacattatctctagctagaatgtttggtatartgtctgcctgccacagataaagcactacatacctatttgttaaattgaacctggatattgttgtttcagcttctccccttcacctttccacttttgtttg

SEQ ID NO: 200422 - DNA, 201 bp, Homo sapiens
ttgtgatttcattgtgattaccctaagaaatagggtaaacaattcagtcaatcgtgtattgaacaaatcagtattgggcaccttcagtgactgaagtcagkcactgaagatatacaactaaagaagaaataattattgcccttgaagagcttatatttaaaggggaaatattaaaccaattattaaagttccttctaataa

SEQ ID NO: 200423 - DNA, 201 bp, Homo sapiens
tattagggcttgcctgcattcctagtcctgaggatgactttcttgtaatgtatcctgagaaccagtggtgaatggcgctgcttgactctgccccaggagtrcttgtctacttgggaggaagaggactttctgtgtttcctacagtctgagacaaagatagaccttgaaagctaatctgtaatagttcaaggtgcccaagga

SEQ ID NO: 200424 - DNA, 201 bp, Homo sapiens
gagagatcattggaataggatcctggagacctattatgtcagaaattaacattataattgcttaataatgaggaggtagaagtggtctctaatgttgaggkgatgcaagggaggagtcagagagatggtaggggcactaaactgcaatttcccaatcaacatatatttcaatatttcaacaactcataggattttactgat

SEQ ID NO: 200425 - DNA, 201 bp, Homo sapiens
gggatagatactgataactgggcaggttattctagaattgccgtcactttcttgaaagccacagccagccacaggacccagaattgtccatccaggtggawatttacgattgtacatacaaccaccaccagctgggcccagcccagcattctgagattctttgggggaaccagtaatattgctcagacagcatgatttgtt

SEQ ID NO: 200426 - DNA, 201 bp, Homo sapiens
gggtagtttaagctgccagtatctttcctctggctctttcttatctcagtttctcaaatttatggtgtaagagcattatcgtttaaagatacttagatttsatttgtgagaatgaaggaaaggggttggagatatagaatcacctgggatctctgttgattatctaatgtgatgatttcaaaagactaagaagagtattat

SEQ ID NO: 200427 - DNA, 201 bp, Homo sapiens
ggcccactcatgtttgctttactcaaagtctactgagttaaatgttaatctcattaaaaaaatactttcatagaagcatctagaatgtttgaccaaatatytggttactgtggcttaggtaagttgacatgaaattaacatgacaacaagattccttaaaatagtatttctattattttaatttgaattacattgaattgg

SEQ ID NO: 200428 - DNA, 201 bp, Homo sapiens
ctgtttttatcttcactggcctctttttttctgcagctttcaatttgctcttaagttcactcagcaataattttgtttttttcattttattatggatgatrttttcttgcttctttgcctgtgttgtcctagtggatgatacatcgtatgtgggtctggattgtgtttcgttgtgacttagtgtgtactgtcttagcatta

SEQ ID NO: 200429 - DNA, 201 bp, Homo sapiens
accaaatatctggttactgtggcttaggtaagttgacatgaaattaacatgacaacaagattccttaaaatagtatttctattattttaatttgaattacrttgaattggtacattaattttggaaaattaacattattagagtattgaattattctgttcatgaatataacatgcctctccatttacttaagtcttccct

SEQ ID NO: 200430 - DNA, 201 bp, Homo sapiens
tattaaaagatggatagggtatatttcttttgttccagaattatacaaatctattttattccattgctccattatattttattgattctgtcactatactkccagaatattgcagattttagaggaatgattgtccatatagctacctttaaagcatacaaatgatttttttctcaaaccgcatcatgaatacgagtctaa

SEQ ID NO: 200431 - DNA, 201 bp, Homo sapiens
agagagctttctgtggtctcttttataaggagcctgattgcatccatgaagagtctactctcattacttgatcacctttcaaacaccttacctcctattamcattgcgttggggtttaggatttcaacataaaaattttgaggggacacaaaccccagtcctttgcagaggtcttcctttacaaccacctttaaatacata

SEQ ID NO: 200432 - DNA, 201 bp, Homo sapiens
aaatagtatttctattattttaatttgaattacattgaattggtacattaattttggaaaattaacattattagagtattgaattattctgttcatgaatrtaacatgcctctccatttacttaagtcttcccttacatctttcaataaagttttaaagttttctgcataaaagtctgcatgtactgtttttgttgatatt

SEQ ID NO: 200433 - DNA, 201 bp, Homo sapiens
gatcacaaatgagtggtgtattttatcaaaggttttttgtatctgtgaaattgacatacaattttcccctttcttttgtttatatcactaatttcattaakttttaaaaatcttatactgatcttgcatttctaggataagcccctcttaggcttgatttattatcatttttatattgctagatacagtttactaatattt

SEQ ID NO: 200434 - DNA, 201 bp, Homo sapiens
tgtggtcactgccaagcttccagaaagtgttaactatataaattattttcggtatgtcactttctagtcattgtaacctgttctgatctgatatctactctacccatttactgaaattgcttcttttttcagtgttgcctatgatctcctatatgctaaatgtattaggtattatttatttttctgttctttccttatcca

SEQ ID NO: 200435 - DNA, 201 bp, Homo sapiens
atactgaatcaatctccctgttctctgtgctacctctttgcctcatatatattttgatcattatatattttttacattataatcatttatttacatatttktctttttcactagattatgagttccctgaaattgttctttgtgtttccttcccttggcacatggcctggtaataatagggtctcaagtaataaattgaat

SEQ ID NO: 200436 - DNA, 201 bp, Homo sapiens
gatcttgcatttctaggataagcccctcttaggcttgatttattatcatttttatattgctagatacagtttactaatattttgttaagcatttttgtgaytatgattatgagggagagcgataaataaatttcttttcttgcataatttgattgggttttgatataaaggttctactggccttggaatctgagacaagaa

SEQ ID NO: 200437 - DNA, 201 bp, Homo sapiens
gagggtggttaggaggtgagtggcaagagccttccggatagaaagaagagcacacaagtccaagtgagagagggtgtactgagtaagacatgagatctgasatagcaagagctggaccctgaaggtccttgtaagccatgctgcaagttgagtgttttatcatcaggatagttgggaggtgagcattaaactactttaagc

SEQ ID NO: 200438 - DNA, 201 bp, Homo sapiens
aacagtctgggatacaaccacatgtctttcaggtgtggtgaaaagaataaccagagggctttcctgcatgcctcagttgtcaggtttaagataattatctstttctgggattgaacctctgttgttaaaataactacttatattgctgatttcagaatatttcttctctcctgagctaacttctttcccctccctctctct

SEQ ID NO: 200439 - DNA, 201 bp, Homo sapiens
atttttatattgctagatacagtttactaatattttgttaagcatttttgtgattatgattatgagggagagcgataaataaatttcttttcttgcataayttgattgggttttgatataaaggttctactggccttggaatctgagacaagaaatgacattctcttctatttcctgaaagaatttgtgaagactggtact

SEQ ID NO: 200440 - DNA, 201 bp, Homo sapiens
ttcactgatcgagtgaacatttattgagtggttatcatgtgctagagcctcctagttctgactgtggtagaaggctctcagggattgtctgcaagatgacratcccttacctaggcctggaagtccaaggggaatattcagtatttccccattgctcttaggatcaaaatctctgtccttatttggcctgtaaagttgagg

SEQ ID NO: 200441 - DNA, 201 bp, Homo sapiens
tccaaatcctgatgtaaggatttaagtaggagagatacctggatttgaattgttgtgaaatacagtggtaggttgactagctttattccaacagagtgagrttgatagtctttgttgccatgagatgcttcaccttttcccctaccaaccttcaaagacatggtggagcggaatcactgggcaacaccagtgggaatagtt

SEQ ID NO: 200442 - DNA, 201 bp, Homo sapiens
tgaacatttattgagtggttatcatgtgctagagcctcctagttctgactgtggtagaaggctctcagggattgtctgcaagatgacaatcccttacctargcctggaagtccaaggggaatattcagtatttccccattgctcttaggatcaaaatctctgtccttatttggcctgtaaagttgaggttctgtctggttc

SEQ ID NO: 200443 - DNA, 201 bp, Homo sapiens
actaggtttatgagaaaccaattcttgagctgaagataaaaaggaaaagaagataaaaaggaaaaacagtaccagaaaaagaactacttggaaagggttaygtgataggagtgatatttgcaaagaggaagcaagcaacctgtgctcacctggcagagagcaagccagggacataaatacagcgactgcccacttcacctt

SEQ ID NO: 200444 - DNA, 201 bp, Homo sapiens
ttcataaagatgaattttgcttctcacatttactggcaagattcatcttcagaaagtggaaacgaagtcacgtggctgactttgaatgtttaactgtctgstgcccttctttctctcaggatctcagactggtggaatcctgccctgcggaaacgcatgctgagtgacagtgggctggggatgatagctccctattatgag

SEQ ID NO: 200445 - DNA, 201 bp, Homo sapiens
gtctgggatacaaccacatgtctttcaggtgtggtgaaaagaataaccagagggctttcctgcatgcctcagttgtcaggtttaagataattatctctttytgggattgaacctctgttgttaaaataactacttatattgctgatttcagaatatttcttctctcctgagctaacttctttcccctccctctctctcttt

SEQ ID NO: 200446 - DNA, 201 bp, Homo sapiens
gtggctgagtagtattccatgctgtaattataccacattttctttatccactcattggttgatgggcatttaggcccattttatatttttgcaattgccarttgtgctgctatgaacacgtgtgtgctcgtgtcttccaaaaatgcatttttttgcataaagttttccactgagtgatggggcaggggggcacatgctaaa

SEQ ID NO: 200447 - DNA, 201 bp, Homo sapiens
catctaccaaacagacgctaaagaaggatgggcacggtgagtggaaaaaggaggttgaagagttgtttttgctcccaagtgtttcataatgaatgaggttragaagagaaaataaaataccctgtccccttgctcttatctggctcaaatacagcctgtattatttagcgtcaaagaaattatcttctcatgctttgttca

SEQ ID NO: 200448 - DNA, 201 bp, Homo sapiens
cctaaaataacatggatcttgggtgaaggtttttgaaatgccttatattaaaaagtccttgtatttgaaaaccagtaaagaagtatttgggaaccattatrcgttctttcagtactgcatatgcagaatattttgggtcttcacagatagacttgtgacgcaaaaataaaataaactatctcgtaatcacacagaacagat

SEQ ID NO: 200449 - DNA, 201 bp, Homo sapiens
ttactggaaaaatattggttgctgtggagattatctactacgttgtccttactctcaaagagattacagttaaaacacaccaatatcaacatgaacaactrggaaatagcaatgagccaatcacagcagagatcttaattggcttcataacaaagtgtggtctgtaagccaatgggaatgaaaggagaatcaataaatccc

SEQ ID NO: 200450 - DNA, 201 bp, Homo sapiens
tataacaaagcaggcaaagatgtatacttcaagagtcactacctacctaggctggggcaattagaaattctaaatatatgtacataagtatttagcaaagwtatatacttcaagagtcactacctacctaggctggggcaattagaaattctaaatatatgtacataagtatttagcacagatgataaaggatgggcaatt

SEQ ID NO: 200451 - DNA, 201 bp, Homo sapiens
tttgtttatttctgtcttaataccacactgtattaattgttaatggattataacaggtcttgatatctgctaatgccttccctacttccaaatctttttcstagggagtcttaactccttttgttctttgttcttccttataaattttagaattagcttgtcaagttccctcaaaagcctgtgggacttttgattgaaatt

SEQ ID NO: 200452 - DNA, 201 bp, Homo sapiens
gattgcaccactgcactccagcttgagtgacaaaaagagaccctgtctctaaaataaaaattaaaaaaaattgggtaggttaacttacagcttaataagtyaatggcaacctctacaaaattatcctaacagtaattaaacagatgttttatgtagaattagaaaagaaaatagtggtcataaagagctagcatgagttcc

SEQ ID NO: 200453 - DNA, 201 bp, Homo sapiens
gatcagattctcaaaaaccagaccactggtcttaggcttctctctgcttttcaccaaaaagcaagatgtagaaaagagcagtaaacagagaggggtgattrtattatgggaaaccacagagaagattcagtgtagtcctttttatggcggttatttttgtttctgttttctgattaggaaggagggatggaggataacaat

SEQ ID NO: 200454 - DNA, 201 bp, Homo sapiens
gataaaagcccatctggaaggagagagtaaggttactggtgagtaaaaggatgttgatatcaagttctgtaagagtcaggtaggaatggagtaaaaaacaygggtggaaaaattttcttaggccagaaggtagagctggttgttatttgtttttcacagaaggagaggcaaaggaataggctagctatcgtactgtgaaat

SEQ ID NO: 200455 - DNA, 201 bp, Homo sapiens
aagtcacaaagaaaaaaaatatgcaatttttcctcttccttttccttcttgagagccaaaaaaggcgtgtctgtgccatttcttctcacgactaaataatrggccctcccacatcccaccagctctgaaccagtacactgaagaaagccactcttttgacattttcctgtgtacagggcaacatttctttatgcagtttta

SEQ ID NO: 200456 - DNA, 201 bp, Homo sapiens
tgttccagggggacgtggagatatattacttctaaattctctgatctgttgaccaaatgcggcaaggctaaccgagaaaatcatctggttttaaaagataytcctaaaaaagttgagacagttgcaactaattcttggctgctgcaaagattcctgctgtggaggggacttgaagcagaacatgcccctcactgccctttg

SEQ ID NO: 200457 - DNA, 201 bp, Homo sapiens
aaggtaataaatatggggctttgaaatagtgtatgggggatattaccaaaaatcccacctggcaaattattataaggactcaagactttttcggccgggcrcggtggctcacacctgtaatcccagcactttgggaggccgaggcgggcagatcacaaggtcaggagatcgagaccatcctggctaacacggtgaaacccg

SEQ ID NO: 200458 - DNA, 201 bp, Homo sapiens
gcctccctgttctgccaatccatcgttactgcgacaattcacttcatctcagggccagtgaaacacaatgagatgaggggcaggtggcaaggggcaacatrgatcatgctaggaaagtgtgtgacaactgcaaacaagaagagactgaaataataaaaaaggtgtagggagaaagtacttctttctttttacggacatatc

SEQ ID NO: 200459 - DNA, 201 bp, Homo sapiens
gctgggttaggaacattcataggacttcatgaaccctactaagttacaacctgctcttttacaaatgtggaaactgaggctcagaggggttaaatgatttrcccagtgtcctactgcttaaagtatcagagttgagatttgaacccaatttgcgtgactccagtttttaaaatatttactgtaccaaggctggagggggca

SEQ ID NO: 200460 - DNA, 201 bp, Homo sapiens
cttatctatcctcatcagtcttggtcccccaggttaccactagcaaagaaaagaggaaaacagtaagctgtaacacatagagatggctttgggttagaaasacttccactcttagctagtctttcttgggcaagttgcacagtctcatagggtctcagttcccttagctgggtaagtcgtacctacttggcatggcagaag

SEQ ID NO: 200461 - DNA, 201 bp, Homo sapiens
ttcccatgcatctgtgtgtgtgggtgagaagatgaggcaatcagagcccgacatgcattactggggactttctggccatctgcgtattcaggtctagctgktgtgtaacatggagcaccagcattggacttagaatgcaccaagatctgcctgcatgttgctcctgctctgtcagcctcaaatgccagttgtctggcacag

SEQ ID NO: 200462 - DNA, 201 bp, Homo sapiens
gaaaagtgtttgagaaatgctcacacaatgtttgcagttttcctaggactcatactcatcatctctgatccataacaacaaccttttggggtggtcatatygggctgttcacttctacctaaagataaagaagagtcagagaggcttactcactatccagagctttatggcttctttgctttcttagggcagtgctaggaa

SEQ ID NO: 200463 - DNA, 201 bp, Homo sapiens
aaacttaggtctatactactcaaagtatttcaactagtagtcaactggggggaagcaagccttttagggttgatatgatttttcatttgagatctgattaycataattaaagcagaactcacatatagtttgcaaaagttgttgataaagttctgaggaacctcagtgattgccttctggcctcatgctgtttctcccggg

SEQ ID NO: 200464 - DNA, 201 bp, Homo sapiens
atgaaaagagtacattttaaaaggcataaaaagaaagtactcgttgatgctacatttaattaatccctagaacacatcacattttgtgtcagaaaatgaarttctatacatgattcaccaagttccaaagttatagctcaggtatttgactgaaatagaaatacttttcatcttgggccattataaaaattaagaaaaaag

SEQ ID NO: 200465 - DNA, 201 bp, Homo sapiens
atttaaaaactgcagttggtccttcgaattcctatcagctttgaagttctgttatggtagaattcaaagcatgatcttagaatcataagaaaatctgcccyccaaaaatctgtaacatgaggtggatgagacttgctatgggacaagacagcgttgtccttggttctgagtactgggcaggggggccgggccctgttcttc

SEQ ID NO: 200466 - DNA, 201 bp, Homo sapiens
ctacttttacaatcagaaacccagctgggtagtttaagctgccagtatctttcctctggctctttcttatctcagtttctcaaatttatggtgtaagagcrttatcgtttaaagatacttagatttgatttgtgagaatgaaggaaaggggttggagatatagaatcacctgggatctctgttgattatctaatgtgatga

SEQ ID NO: 200467 - DNA, 201 bp, Homo sapiens
ctgaacactacacctttaagatttatccaagttgctgcatgtatcatttatttgttcctttttattgcccagctgtatttcattgtatggatgttttagcwtgtttacccactcccccattgaaggatatctgggttattcttccagtttggggcaataatgagtagagttcctataaacattgatgaacaggttttatgt

SEQ ID NO: 200468 - DNA, 201 bp, Homo sapiens
agagagatgtcttccagtatttgaagagttaatttgaagaaaagagaagtgacttgctatctgttgttagaaatggaaaagtcatagaggtagaatccacygactctaactttataacaataaacaaacattacctgggaaacctaacaatgcacactcctgtttccctctttgctccaaatgctgattcagtatgcttgg

SEQ ID NO: 200469 - DNA, 201 bp, Homo sapiens
ctgtttttgttgatattgtaaatggcattttatatcctattgtatttgtttatttaatgctagagtagtagaatactattggttttttaattcaacagtgyatcagccatctttcttatgagttttaacacttggcctgtgaattttcttggaatttttgtgtgtgggatgatatcagtagaaatattagtaagtttgcat

SEQ ID NO: 200470 - DNA, 201 bp, Homo sapiens
attaaggtttcagttgtgttgcctatgacagaattacgaagccatgtgacaagcatccaagtagaggttctggttgttcttccatatgaacgactttgtaytgaatgtttattatatttgcttttatttttaatatttaaagttaacatactgtaaaacggacttttctggtgtacagttccataaagtttaagacatata

SEQ ID NO: 200471 - DNA, 201 bp, Homo sapiens
agtagtagaatactattggttttttaattcaacagtgtatcagccatctttcttatgagttttaacacttggcctgtgaattttcttggaatttttgtgtrtgggatgatatcagtagaaatattagtaagtttgcattttttcttttaattctttttttttctaattttatttctttgtctcattgtgttggtcagtact

SEQ ID NO: 200472 - DNA, 201 bp, Homo sapiens
cttaatatgaatcttgtgttcccagccatgttcacagattttaatatgaagtattctgaagccaaacaatgattgattggttttcttggtggaatgagtgmataaaagaatacatgtctaaatagaattgcacaatatctaacatctggtgatatgtatgacaaagcaattcctaaagttcagttatataatctactttca

SEQ ID NO: 200473 - DNA, 201 bp, Homo sapiens
ttttttccttatatatttcataaaatttcctaatatactatttggctttgagatttctttaaggcaagtatagatatagaattattcatattatctatttyttcttgagtcaactttattaagttaaatatttcatgaaacttgttcattattttgtctaaattgttgagtttatgtttacaatgctattaatattttact

SEQ ID NO: 200474 - DNA, 201 bp, Homo sapiens
atcaggcaggactttccatgggcttagagattactttcttggagctgaaagctcattgctttatcagtaggttttgacattttacccactgctacattttrgacttcactttctaaagtagttagtgggattttgctgtggtttccctcatattggctgctgttattatgcatctagttccatcttctctggtagattttt

SEQ ID NO: 200475 - DNA, 201 bp, Homo sapiens
aataaatcatagagtgggattcagactcaggcagtctggcttcaaagttcatgtttttaacaattcatagtctgctgcctttcgtctgtcaggatcctgtrtatttctcaaggcccacttgaatgattacctttccaaagaattcttctttgattcttgctgtcagagttaattacaccctcactggagtttatcattcat

SEQ ID NO: 200476 - DNA, 201 bp, Homo sapiens
actccgtctcaaaaaaaaaaaaaaaaaaaaaaaaaaagaattgtaggtacaacctagaatcataaaacgctagttctgaaagtgattgtagcagcatactrtaatcactttacatatgaggaaactgaatttatcgaattatttttgctataaatatttattagtgtggacaataattaataccaccactactaatagcat

SEQ ID NO: 200477 - DNA, 201 bp, Homo sapiens
agaactccctgaaagctgttaatactcacatttgtggtttattacagtcctttccacgtagaatcatggttcactagctaacttctcccagcaaccatgtrctataatatacatggcatagagccaagcagggaagctcattcgaaccttgatgtccagagttttaagtgggggttggtcctgtagacagcgttgactgcc

SEQ ID NO: 200478 - DNA, 201 bp, Homo sapiens
gtgagaacaaaaaaatatgttttttagcatttcagctcagaattattttgtgctgtgtactctgctttgtcctttgttttctccatatcacatatgcttayctagcatttattatgtttcagggactgttacagatactttacatattaattaatttgctctcccaacaacctttggccatatgtggtataattatctccc

SEQ ID NO: 200479 - DNA, 201 bp, Homo sapiens
gtttttgttcgtcttgctttagctctttaaatagttgttttgttttcttctggcctccatattttataatgaaaagtcagctgtcatttgcatcattattyccttgtatatagtgtgtctttttttctctgttcttgagattttctctttatttgttgtttttttaaaaatcaaaattttaatttatgagtagtaattgtg

SEQ ID NO: 200480 - DNA, 201 bp, Homo sapiens
cagaattgctttctgttgccctctttgatttgaaatggagctgtgaagtttttcatgttctatgtgcttccatcctctaagttaacagttcaatttttggrtgagatactttagggtccatggttgcctggggttgtatagaattccatgctaagcattggtttttatgggaagtgcataataccgttagactatgtcatt

SEQ ID NO: 200481 - DNA, 201 bp, Homo sapiens
taatttataattacctttccattgaaacacttctgaaacaataaaaatttaagccataataataaatcccagggcaaaattaaatatgaaggtaataaatrtggggctttgaaatagtgtatgggggatattaccaaaaatcccacctggcaaattattataaggactcaagactttttcggccgggcgcggtggctcaca

SEQ ID NO: 200482 - DNA, 201 bp, Homo sapiens
cgtaacatagttctggaaagatacataaaattttgtaacagggctgcctctagggtagaggattaggagacgatagtaaaaaagcttttttgtcttgtctsatttttaaatttgtatgcattacctgttaaaataataatatgttaaaaatacatcatggagacttgataatgcagtgacaattaagtgattaaccaaata

SEQ ID NO: 200483 - DNA, 201 bp, Homo sapiens
tttgtcttgaagatcttgaaagaagttgataaagaagagcttaatcatagcaaaatttcttagattcttaattcggaccacaagcaaaatggtctgttttmagcttctgctatgaaaaattacatggagtttttctcatggtttcaaattattttattcctaaggctcaaggctcttgatgtgatggtgaacatctgggag

SEQ ID NO: 200484 - DNA, 201 bp, Homo sapiens
aaccccaaatcacaaaggtactaaggaatagaggcagatgtgccattctagtgatttccagctgggaagaatttgctccctgtaggggacatttggcaagrtctgaagactttgaaatctgttggataaaggccaaggatgctgttaaacatcttagcgtgcacagagaagcctcctaccatgaagaattatccagcccca

SEQ ID NO: 200485 - DNA, 201 bp, Homo sapiens
gacctcactcttataagaactgaaacatatccattgtttttggccattagaaggttaataatgactttgtggagtgtggtttctatggcatgagagggtaraggtcaaattatagtggatccagggatgaaagtgaggactgtgctccccggaagcacaacttggaagtgaagaagtaggaattttattgaaaaagtctgt

SEQ ID NO: 200486 - DNA, 201 bp, Homo sapiens
aaagggtttgttctagggtttctttcagagtgagaggtttactacgtatggtggtgctaaggcacataatgatgatgaagaagaagatgacgatgatgccrtaatgataaaagctgccatttgttagatctgtgctatgtggcaagcactgttagttcaacaaatatttttagtacctagtatgtgcctacatactgggga

SEQ ID NO: 200487 - DNA, 201 bp, Homo sapiens
gtctctcattgtgaattcattctctgttgctgcattggaaattgccctaaagcttagtggctagaaataatatttattatctcacagatttgtgggtcagraatataggagtagctgagctcggggtctctggctcaaggtttctcttgaggtagcagtcaatttgttggctgggctgccatcatctcaaaacttacctgg

SEQ ID NO: 200488 - DNA, 201 bp, Homo sapiens
gtttctgattaaattatgctatttttgtaacccacagaagatcccatatggtcaatttcaagttcccgttactttcagtatttttcctagatgttatttcrcttaggacaaacaggatgcaatttgtggggtggttgtttgaccttctcgtattaaaaggttgtaagtgttgtctctttcagctgcccattttagaagtta

SEQ ID NO: 200489 - DNA, 201 bp, Homo sapiens
tgaatgctttgaagtaaaactaataccatttagtgagtatgcacagacccagcatagggaactaagtatttcaatgtttatgattttaaaacactgtcatrtttcgtgctgtccaatcacgtttagctttaatagttttccgtccaatttttcggaacccaccagacttgatttttaagagttagttcaaagattgcccaa

SEQ ID NO: 200490 - DNA, 201 bp, Homo sapiens
agaggatgcagtgagctgagattgcaccactgcactcccgcctgggtgacagggtgagaccctgtctcaaaaaaaaataaaaattacactaaaaataaaamtgtgtttacaatttgcatgtgcacactatacatattataccacaatttatttttaacagtaatgtaccatggaaattcatcttgctaataggtgaaactc

SEQ ID NO: 200491 - DNA, 201 bp, Homo sapiens
gactaaagtccattatcatcaaggtttttgcttgtgtttgtattttatgacagtaagatgttagttacttttattaattccttaaatgcatggaacagatwtgcctttatattatgaatagaatgcagattcaatttctgcaaataatgtttctttgtattccagggaaacttgctgttgaaagttctccttccatgagta

SEQ ID NO: 200492 - DNA, 201 bp, Homo sapiens
ccagccaaggagcccagagcgactttggactggagtgtaggtgttggccttttcatttaaacatcacttcagtgcatgttttgtgtctctcattctcaggrttcctctagttacaaggaagacttgcttaataattttcaacattgcctgctgacctgtcctcagataccttagctgtagctccattttcaaactcctatg

SEQ ID NO: 200493 - DNA, 201 bp, Homo sapiens
tagaaatattagtaagtttgcattttttcttttaattctttttttttctaattttatttctttgtctcattgtgttggtcagtacttccaatattatgttsaaaactttcgttgctgatggataactttgtttcttgaaaggaatgcttctaaatttttttttattgtgaataatatttttttctaggtatcttggtgggt

SEQ ID NO: 200494 - DNA, 201 bp, Homo sapiens
ctcatagaactccctgaaagctgttaatactcacatttgtggtttattacagtcctttccacgtagaatcatggttcactagctaacttctcccagcaacmatgtgctataatatacatggcatagagccaagcagggaagctcattcgaaccttgatgtccagagttttaagtgggggttggtcctgtagacagcgttga

SEQ ID NO: 200495 - DNA, 201 bp, Homo sapiens
aatttgcagggagcttggggatgctttgctcctctctccaaatgagaaggtaatggggaaatcctgtgataagggtataaggaaagcaaatacgagagcargctttacgcctttgacatcggaaagtctatagtcatgactagagttattctcttttgacttttgtcaccagtgggaaatgagaaaggaacatgaaagact

SEQ ID NO: 200496 - DNA, 201 bp, Homo sapiens
ccaagaccacactcagcttcagtaactcactagaaacactcatagaactccctgaaagctgttaatactcacatttgtggtttattacagtcctttccacrtagaatcatggttcactagctaacttctcccagcaaccatgtgctataatatacatggcatagagccaagcagggaagctcattcgaaccttgatgtcca

SEQ ID NO: 200497 - DNA, 201 bp, Homo sapiens
aagaaaacaaaaatagttcatttgtctactgcattcttgtgctaatgccacccaggctagacaactttatgcaggattcaagagtccccaagactaccctstcttctgacatcagttgcaagttcgggacccccaagaccacactcagcttcagtaactcactagaaacactcatagaactccctgaaagctgttaatact

SEQ ID NO: 200498 - DNA, 201 bp, Homo sapiens
tatttatccggttcataaagcaaattgattgatgagaggcgaagcacctttacattcacacactgtgtacttgtccttttctgcatagaccaagggtaaarggagaagagatggtgagaaatccaggcaccctgtgggctctgcctttgtgaggaatcgtagctcagtatcacgagaactcctgacaaccttctctgagaa

SEQ ID NO: 200499 - DNA, 201 bp, Homo sapiens
gagtctagtatgccaggttgaatttggattttattttataaatagggaaacatctaagcattctgaacaagggagaggcacaatcatggctctcttttggsggaaactaaatttatactaacgttaaataaatcggagagggtgtcagagttcagagcagaagaaaacaagactccgaaattagatgcactgtccagcgta

SEQ ID NO: 200500 - DNA, 201 bp, Homo sapiens
gaagagcgtgtaaaaatatgacaaggaacagccacaaaaccacctgtaaagagccaaaatcaggaagattgcatctgatgagttgaaactagtgaccggcygtggttgtatactgacttctaagctgagaagcatagaaaaacaaatggggaaaaagaaataagagaaaagagaagcaggcaaattttaaagaagcagaaa

SEQ ID NO: 200501 - DNA, 201 bp, Homo sapiens
cattcatttgtcctgttcctggcctctggggttccctcagtcgcttctacttctatacacctgtgttagtccatttttgcattgctgtaaagaaatacctraggctggataatttatttatttatatttatttgtttatttattgagacagaggctcactttcttgtccaggctggagtgccatggtgccctcttggctca

SEQ ID NO: 200502 - DNA, 201 bp, Homo sapiens
taatctctagttcctgaaaggcttggtaggcatgactccaaagtctgcttgaaaaataaatggatttatgccgttttaatcccaagtaactgtctttaaayttccttcctaattcaatgcattgtgttagattttaaggcgcacacagtactttggccttcctactcttcacaaggacatcatcttttcacttccacagtg

SEQ ID NO: 200503 - DNA, 201 bp, Homo sapiens
ttgaccacagtggcagatggggtccagcagggacgacgagggtcctgttgttccctttccccacttgactcttgggtggaaattctctctgctctgtaacrctttggctcaggggaatcaatgggggtcatctcaaaggcgtctactactatgattctctggcttctgttactctattcttcttccttcatctgtaaggaa

SEQ ID NO: 200504 - DNA, 201 bp, Homo sapiens
tttcacattccatatgagctccacaaatcagcattaatgtatttgctttgaacaattgttacttttaaagaaattaagagatgaaagacaaatagaaagtyctttgttacccacctgtctccctttccagtgctattcactccttcctgttgatccaagtttccatctggcgtcatttttctttaatttcaatgatttcct

SEQ ID NO: 200505 - DNA, 201 bp, Homo sapiens
tttgttctgtttaaggtgcaaaaacagtcacctctctgtgccattccctctcctccactctcttgtttgattccctcatcttctaccattagtctactctkctggactcaatgtatggaaatgagcaatctttatttaattcagtattactatttattgagcaatgaaaagggttggagcctctttgattctttcaaataa

SEQ ID NO: 200506 - DNA, 201 bp, Homo sapiens
tctctctttttagacacattttatcttactacttgctactcatatagcagtaaagcattgtatttttttttcattcaggatgaaataatctaatttgcagwcttcaatttcacatttcttgaactactatattgcttatatttctaaggaagtaaattatttgaaaactcaaacatttgtttaagatgattatgtaaacag

SEQ ID NO: 200507 - DNA, 201 bp, Homo sapiens
taactgtttctaactgtagacccaaaggctttgtcccttcctgaagcaatatgaggaaaaggtatcaagggagagaagggcttccctgaagttctgccagscttccctgatgatgaaccttgtttagcacttttagttgagtctgaatagaagggataatccatgttctttttctccatatgaaagagaaaggtggggtgg

SEQ ID NO: 200508 - DNA, 201 bp, Homo sapiens
gagtgagactccatctcaaacataaataaataaataaaataataaaaaaaacccagtgcctagaaatgttaattcttgataaaatgaaaaaaatcttaatratagatgttcctgacagtaaaatagcttgtaaaatgttgtgtcaaaaactatgaattagctgatattggtgccactgcaaattatgtaagtaaaatttct

SEQ ID NO: 200509 - DNA, 201 bp, Homo sapiens
atatagtgtgtctttttttctctgttcttgagattttctctttatttgttgtttttttaaaaatcaaaattttaatttatgagtagtaattgtgcatattsatggaatacataatgatgcttcaacacatataatgtacagtgatcaaatcaggataattagcatatcgatcatctcaaacatttgtcatttctttgtgtt

SEQ ID NO: 200510 - DNA, 201 bp, Homo sapiens
aaaataatagtacctgaatatcactaaatatttactcagagtttgaatttccagttgtctcacaaatatcatttattttcttatgcagtttctttgagtcrgaatccagataaaacttacacattgtggttggttgatatgaccttaaactctccgtagtttccccttcaactcttcctcatttatttattgaagaaactg

SEQ ID NO: 200511 - DNA, 201 bp, Homo sapiens
gtaaaatagcttgtaaaatgttgtgtcaaaaactatgaattagctgatattggtgccactgcaaattatgtaagtaaaatttctcattttggtgactagcygagtatatcaaagaggaaaataattcaataggagatagatccattgaggctatttagtacaggaggctagttatgggatgctagaagaactgaaaagagg

SEQ ID NO: 200512 - DNA, 201 bp, Homo sapiens
aggataattagcatatcgatcatctcaaacatttgtcatttctttgtgttgggaacatttaatatcctcctcctagttttttgaaactagatattactgtyaactatagtcatcctacagtggtatagaacactaaaatttatttcttctatcttgttttaattttgtatcctttaacaagttttttcctgtccctccctt

SEQ ID NO: 200513 - DNA, 201 bp, Homo sapiens
atatacatcatatgcatagcatatatatcattttatccatcaataattcgaaatggacttttaaaagatactttcttttataaacacaaccacaataacaktatattatttaaaaaaatgaaaataatagtacctgaatatcactaaatatttactcagagtttgaatttccagttgtctcacaaatatcatttattttct

SEQ ID NO: 200514 - DNA, 201 bp, Homo sapiens
tttctagcctctagtatcctctgttctactttttacttctgtgagatcaacttttcctagcttccacaaattaacgagaatgtgtggtggttaacgttctsttcctatcttattttatttagcataatgttctccagtttcatccatgttgccacaagatttcattctttttaatggctgaataatattccattgtgtata

SEQ ID NO: 200515 - DNA, 201 bp, Homo sapiens
ggaagtaggaggaattgtagtgctttgtgggaactataagtagtttcatgtagtttaaatgtaggtgaaaagagagagtgatcacaggtggtgctaaagaygtgggtaagggccagatcatagagtgcatcacagcactgatctaggagcatttactttattcagcattcttgaggagttagtaaaatttttttaaagata

SEQ ID NO: 200516 - DNA, 201 bp, Homo sapiens
atctttctgagttttatagaatcctgtgatatctctcagtgtttcctgctttcacactgtctctccctcacgttctctcatgactttctcttccagtgacstagactttaacttcagggtaaagcaatgttctgacctctaggatgattctatctgatcatccctgagagccaagggatccagaccctggctttgcacact

SEQ ID NO: 200517 - DNA, 201 bp, Homo sapiens
tggtacctgaatccacggcaagtctttgatctttctcaggaagggccaaaagatgcgtaagtctggaaatattctccatggtccatatgtattttaggcamgtgagaattttctgcttcattatctgattaccttgtgaggtatatcctgaccatctgtcatctaccttctcacctgtactctccttcctttaaaacttca

SEQ ID NO: 200518 - DNA, 201 bp, Homo sapiens
ttattaaaatgaaatgtattttagtcacagagtttattcaattcacaggactttagttaactttttctcctgctttatcaagttacacattttatgaattrtagagttgcttaggaaaaacaagaaaaaaaatcatcatttatgtcactaagaaaactgatgcacatttgtttgaacctcaagaataaatgagtatcactt

SEQ ID NO: 200519 - DNA, 201 bp, Homo sapiens
tgggaggtcatagaaatgagacgcctagaaaatgctcaggtgaatgagcacattgctgtctggatgagtgttggacagagtgattttgtcatgagttaacstggcactacttttcttccttgtctactcctctgtaattaggttcagtggagaaggctgaggttagagatgacctcagtatgcgaggttgattttctttgt

SEQ ID NO: 200520 - DNA, 201 bp, Homo sapiens; identical to SEQ ID NO: 35104

SEQ ID NO: 200521 - DNA, 201 bp, Homo sapiens
caaccctgagtttttggcccagggacagcttcctttatgggaaagcggagcttggcttgcaatactattcttatagtactgaggattggtcattcattcartagacaatactgactctgcccatggcctggccctgagccacatactgaggactcaggagtcagatccagcccttggctcctaggagctctccagcatggt

SEQ ID NO: 200522 - DNA, 201 bp, Homo sapiens; identical to SEQ ID NO: 35105

SEQ ID NO: 200523 - DNA, 201 bp, Homo sapiens
gtggcaaatcaggaacccagcaactgtgccgccgtggccgtggggcgcattttggacgagctggatgcggatatcgtctgtctccaggaaaccaaagtgamcagtgagcgctctggattccaggatccctacatactttttctttcccgctaacttttgtcccctgtcccatgtaattttactttcccagtttcctattct

SEQ ID NO: 200524 - DNA, 201 bp, Homo sapiens; identical to SEQ ID NO: 35108

SEQ ID NO: 200525 - DNA, 201 bp, Homo sapiens; identical to SEQ ID NO: 35101

SEQ ID NO: 200526 - DNA, 201 bp, Homo sapiens; identical to SEQ ID NO: 35102

SEQ ID NO: 200527 - DNA, 201 bp, Homo sapiens
ccctttaagatgttgcgcgtggtgagctggaacatcaatgggattcggagacccctgcaaggggtggcaaatcaggaacccagcaactgtgccgccgtggmcgtggggcgcattttggacgagctggatgcggatatcgtctgtctccaggaaaccaaagtgaccagtgagcgctctggattccaggatccctacatactt

SEQ ID NO: 200528 - DNA, 201 bp, Homo sapiens
tggggatgttggttgctatggaaacatggatgagtttacccaagaggaactccgggctctggatagtgagggcagggccctcctcacacagcataagatcyggtaatagctcatatctccctgctactgagcactgctggtgctactctttgagtgtgaagattctaaggcttgccatgtaaacatacatgcaccgtggag

SEQ ID NO: 200529 - DNA, 201 bp, Homo sapiens
ttgccacccagaatggggatgttggttgctatggaaacatggatgagtttacccaagaggaactccgggctctggatagtgagggcagggccctcctcacrcagcataagatccggtaatagctcatatctccctgctactgagcactgctggtgctactctttgagtgtgaagattctaaggcttgccatgtaaacatac

SEQ ID NO: 200530 - DNA, 201 bp, Homo sapiens; identical to SEQ ID NO: 35106

SEQ ID NO: 200531 - DNA, 201 bp, Homo sapiens
ataagcatggtatatttgtcaaaactaataaattaacatgggtaagttactattaactaaactacataatttattcagacttcttcagttttttcactaaygtcctttatatgttccaggatccaatccagcataccacgttgggattaattgtcttatttccttagaatcatccaatctgtgacagcttttcagtctttc

SEQ ID NO: 200532 - DNA, 201 bp, Homo sapiens
tttgattctaagcctgatattcactgtgccaagtctaatgcatgattctactgattggaagagaaaagaatcccatgttagccctatagtctccttttctycattctttttgtctccttcttttccttgttaatctcaacatcctgtctctctgccccacttcactctatctctccccctcttccttcctctccccaattt

SEQ ID NO: 200533 - DNA, 201 bp, Homo sapiens
aggtgcctaccctaaaaagcctggttcaagtggtgaaaccttctcagatcattccaagtacaattagtctttccttctctctcactgtcttccgtggcttmatattgtctttgtcagagcattgaacaaactctgtgggagctctccatttactggtttactcactgtcttacctgttggactgtgagtgccttaaaggcc

SEQ ID NO: 200534 - DNA, 201 bp, Homo sapiens
tatgtcttggggatccagtgaaggccagaatagacaaagtctctgccctcatcctaaagacagacagtaaataggacattacatctcagtgtgacaaaggrctatgagaggagaagtagaagggattatggaggatcagagggtaagggtgctcctgactcaacttggtgctggggaatttacaaggaaagcttcctggag

SEQ ID NO: 200535 - DNA, 201 bp, Homo sapiens
ggttcccctcggtgctgccagtgtttccctcactggactggccatgtcttgagaacaagaacaccccagcacccagcacagggccacgaacactcaatacrtgtgtgaatgcccttagaacctgggtaccaggaaccctgcttaagcaataagtgttcacagtgtcaaaaagtaatgtctcccaaatcccacaacccctac

SEQ ID NO: 200536 - DNA, 201 bp, Homo sapiens
atatatttataaaaatacatacttatatgtataatgtacacctacagacctatctgtacaatcatagaaaaacatcatacactcagcctgaacacatctaytcacatacactcactgtcacatctacacagccacacacctcacacacacacacacacacacacgcacacacacacacacacacgcatacacacttatgga

SEQ ID NO: 200537 - DNA, 201 bp, Homo sapiens
actaaaactagagctgactccaccactaaagctggcactggtacaaggcatgccaccaaagctaatgctggcttcactgctgaaactagtgctggtgctgkgtgcacaaccaaagctaatgctggctgcgctgctgaagctggagctagtgctcagtgtaccaccaaagctaatgctggctgtattgctgaagctggcact

SEQ ID NO: 200538 - DNA, 201 bp, Homo sapiens
tgctagtgctgagtacaccactaaagccagccgtggtgctgagtgtgcctccaaagccagagctggctccaccactgaaagtggcactggtgctgagtggrccactaaaactagagctgactccaccactaaagctggcactggtacaaggcatgccaccaaagctaatgctggcttcactgctgaaactagtgctggtgc

SEQ ID NO: 200539 - DNA, 201 bp, Homo sapiens
ttaaatccattatttttaggtgttttgtatttggaaggactctttacaaatatagcctaaaatatcaccagaaatagaaatctctcttctatattctaccrtatacaacttgagtaagataccgtactacttaaaattacctgaaagtttacagaagagcttgaggaaaatgtgaccagctgtcataagatccttttctaa

SEQ ID NO: 200540 - DNA, 201 bp, Homo sapiens
gaaatgtgtcaatcctttgacaatggcccagagaagaaacattgttttttactttgccactcaataaacacacacgtttgtgtgtgtgtgtgtgtgtgtgkatgttaaatcaaaaaatatgctttttatgatccactgtattattgtgtcaactactgtgtaataaattaacctcaaaacgtagtggcttaaaacagcaaa

SEQ ID NO: 200541 - DNA, 201 bp, Homo sapiens
tttgcaattctgattctttggtttgtttctgtggattcttattcatacaggtttttcgtgtgtgtgtgtgtgtgtgtgtgtgtgtgtgtgtgtgtgtgtgttggctttttttcttcctacacgggtaatgtacatcccagccccaaacccacataaatgcaggactgggctaggaaatctcaggaactgttcactcttttg

SEQ ID NO: 200542 - DNA, 201 bp, Homo sapiens
tggctattcttggtccaatgcccttctccataaattttggaatcagctttccaagttacacacatatacaaacacacacacacacacacacacacacacasagagagagagagggagagagagagagagaacttttgggattttgatggaaattacattcaatctgtaaatcagtcaatttgaggagagttgccatctttg

SEQ ID NO: 200543 - DNA, 201 bp, Homo sapiens
ccttctctcctcctctgcatccccacatcctagtatgcctatgccctggccaacttcattcagtcccagggcatcagctccctgaaggtgtggaccagtcrcatgaagaggaccatccagacagctgaggccctgggtgtcccctatgagcagtggaaggccctgaatgagattgatgcggtgagatgcatggggtgaatc

SEQ ID NO: 200544 - DNA, 201 bp, Homo sapiens
ttacaagtttctgtccttgctataggggtaatttccccaagatagtgatgttttcattttaaattgtttttcaaatgataatttatttttaaaaaaatatrtaggcattgcatttacagagtatttacacactgactgcataggctgaactgcaaactggggcagctggcctggcaaaaaaaaaaaaactgttatatcact

SEQ ID NO: 200545 - DNA, 201 bp, Homo sapiens
aagctggcactggtgctgggtgcaacaccaaaggtaatgccaggtccaccactgaagccaccactggagctgggtgcaccattgaagctaatactagcacsatcgctgaagccagccctggtactagctcctctgctgaagttgacgttggtgctggcatctgcattttcttgggctctggcctcaatttcaaatgaaaat

SEQ ID NO: 200546 - DNA, 201 bp, Homo sapiens
ctggtactagctcctctgctgaagttgacgttggtgctggcatctgcattttcttgggctctggcctcaatttcaaatgaaaatctgctccaggcctgagmatcatcgcctaactcttcccttgttaggcagtcgatatccatgtcatcccaattccagggcccagccacagcttcctctccaatccccatttgggctctt

SEQ ID NO: 200547 - DNA, 201 bp, Homo sapiens
gtgggaaggttgcaaaagagtgaagtaagaggacacttgtgcatcttcgaggcaagctgtgcagttctatgagttatacacataaaagcctcaaaacaacrggtcaggggagcgggagagggcaggtgagagtgagtcatctgggctggatgactctggcctatggacttgtcctactttgaggccattgctctctgttcc

SEQ ID NO: 200548 - DNA, 201 bp, Homo sapiens
ggtaaaattaaaatgaatggtaccttgaagaacacataagaatttggtgggtgaagaatggaaaataaggatataagcatatactaagtatggcatctccrgagaactataagtagcttaaattggctaaagccaaatgtgtggaggaataagggagccatgggagataaggatgaagaaataatttggggcccaatcatg

SEQ ID NO: 200549 - DNA, 201 bp, Homo sapiens
tctgcccaacctctcgccctctgcacccaataccccactagtacatacaggagcagaggcaggctaggaccagaggaaagaagagaggggactgaagacaractttgagagggctcagaaacccagtacaccccctgtcccagccctgtccacctgctgctgtggccacagcgagagaaaagacagctagtaagataggaa

SEQ ID NO: 200550 - DNA, 201 bp, Homo sapiens
atctatatcttagtagttaagagaagagtatctagaacaaggatgcctaggttcagattctttctctttcacatactagctgtactgcctttcacaaattwctttaacttctctggcctcagtgtcctcatctgtaaaatggggagaataatgatgaattttaaataacataagtaaaaagtttagaacagttcatgacac

SEQ ID NO: 200551 - DNA, 201 bp, Homo sapiens
ttgaagcttcttttatggcctagaatattgtctctcttggagcatgtttgatgtacactttggaaaaatgtatagtctgctgtttggagatggagtgtttkacagatgtttgttattactactttgtgttgaagtcctctatttccctgttgttgatcttctatgtagttgttctatccattattgaaagagtggtcttga

SEQ ID NO: 200552 - DNA, 201 bp, Homo sapiens
gtttcttatcaagttgaacttaaacaaatttacaagaaaaaaacaaccctattaaaaagtgggcaaaggacatgaacagacacttttcaaaagaagacacrcatacagccaacaagcatatgaaaaaatgctcaacatcactgatcattagggaaatgcaaatcaaagccacagtgagataccatctcacaccagtcagaa

SEQ ID NO: 200553 - DNA, 201 bp, Homo sapiens
tcctacacgggtaatgtacatcccagccccaaacccacataaatgcaggactgggctaggaaatctcaggaactgttcactcttttgtttccctccacgaytgagccaaggttgagacagtctcagttaggtgcttcttcttcacccgctgattacgtcacctttgtctggtccacactttagtcaggctctcagatccaa

SEQ ID NO: 200554 - DNA, 201 bp, Homo sapiens
atgaacatttttattgctcttgcttcatattgccagattgctttccagtaagggattatgcccatttacactgaagatcgatctgaaactcagcaccagcraaatccagaacttgcctgtctccatggctggttttaatttccccattctgcagtggcttgttaatattagttctgacctttggggcaaggtgaacacatg

SEQ ID NO: 200555 - DNA, 201 bp, Homo sapiens
gctgtcatgcggtgcctcctggcctatttcctggataaaagttcaggtactaccctcatctctgctttgggaatgtttgatggtatttgagacactgacaycaacaattagatatctatatcttagtagttaagagaagagtatctagaacaaggatgcctaggttcagattctttctctttcacatactagctgtactgc

SEQ ID NO: 200556 - DNA, 201 bp, Homo sapiens
agcgcaccccactgcaagggccttgtgttgagtctggcccagtcctggaaaggtctgcccatgggaattttagacagtatcagttctaggacacaggatgyccatccctctaaagctagtataagaaaggcactgactaagcactttctgaaccagatcagtatacccagaacacttcagggccagacaaagccccaaaca

SEQ ID NO: 200557 - DNA, 201 bp, Homo sapiens
gaactggcactggaaccaaatgttcttgattcctagtttagagttcttcccctctgggcaaatgtgcctcatcttcctttctcactcaagtatctctcttwcgtttagtcctatgaggatctggttcagcgtctggagccagtgataatggagctagaacgacaggagaatgtactggtgatctgccaccaggctgtcatg

SEQ ID NO: 200558 - DNA, 201 bp, Homo sapiens
gctgcctcttaggcctggtgtcttccccacacatcacatagctgtctaaattctcctccatacaggcgagtcatgatctgtacacagtatgaagctggggrtgtggctggtgatgggggaggggaggtgatacctcagggaagacctgtgcctaccttgggggcctatggacagatggattgttcttttctaaggctgcaa

SEQ ID NO: 200559 - DNA, 201 bp, Homo sapiens
ctctatctgtaatatcaggaaactgaacttgatgatctttcttcaaggatcctttcagctctgattccttgatgtgtaaggtgttcctaagatgactaaartagtgctttcctgagcaatatgaacagttcaggaccctgggaacaaatgcccccctcctgtgggtgttgcgattattattacaaaagtgttcttcacacg

SEQ ID NO: 200560 - DNA, 201 bp, Homo sapiens
atttacacactgactgcataggctgaactgcaaactggggcagctggcctggcaaaaaaaaaaaaactgttatatcactttcaggcatgagattccatttycaatgtggatgctgatgtgttagcatttccaggatatttttaaggtgtctcagagcaatgcaaaattatattcaatgtctacactgttttacagtcttgg

SEQ ID NO: 200561 - DNA, 201 bp, Homo sapiens
ttgttataatttctgttcttttacatttgctgaggagtgctttacttccaaccaggtggtcaattttggaataagtgcggtgtggtgctgagaagaatgtrtattctattgatttggggtggagagttctgtagatgtctattaggtccgcttggtgcagagctgagttcaattcctggatatccttgttaactttctgtc

SEQ ID NO: 200562 - DNA, 201 bp, Homo sapiens
gaactgagagcatttgagggcagggattggaaatttctgtccccaagagattgcccttgtgtagcccagctcagtggaagaaagttgagcttcttcatagycaatcgttggaggttcattgggggtgggaaggttgcaaaagagtgaagtaagaggacacttgtgcatcttcgaggcaagctgtgcagttctatgagttat

SEQ ID NO: 200563 - DNA, 201 bp, Homo sapiens
aaaaacatcatacactcagcctgaacacatctactcacatacactcactgtcacatctacacagccacacacctcacacacacacacacacacacacgcasacacacacacacacacgcatacacacttatggacaacaggcacaaacccagagctgtgttcacagagacccaggtgctcatgtgctactgtttcacaatc

SEQ ID NO: 200564 - DNA, 201 bp, Homo sapiens
tagaaaaacatcatacactcagcctgaacacatctactcacatacactcactgtcacatctacacagccacacacctcacacacacacacacacacacacrcacacacacacacacacacgcatacacacttatggacaacaggcacaaacccagagctgtgttcacagagacccaggtgctcatgtgctactgtttcaca

SEQ ID NO: 200565 - DNA, 201 bp, Homo sapiens
tagaggtgggcctgtttgaatgaatgaataaccaagtaggggcttcggtgagcaatcgtcaaataagcgctctctctctctctctctctctctctctctctgtcatgctcttttctattcccttggcccaccatcacattggaaagagtatggctttttataagtttggaacatttaaactctttgctctgcttgttcatc

SEQ ID NO: 200566 - DNA, 201 bp, Homo sapiens
catagatgagactgctgtcctgcggacctcaagagctgtgggcagccagagttcatctctcatctccatccccatttacaaatgagcacctgaagctcagygaactaagactgttaggggcagaggtgacaggataccctgttggctgcctcttaggcctggtgtcttccccacacatcacatagctgtctaaattctcct

SEQ ID NO: 200567 - DNA, 201 bp, Homo sapiens
tgagtggatagggatccacttccaacttactcacaaggttgttggcaagattcagttcctcataacatattggaatgaggtccttagtttctcactagctsttgaccagagatcatcctcaacttcttgccatgtgggtctctccctagggaagctcacaacatgacagctggcttccaacagagcaagtcaatgagagag

SEQ ID NO: 200568 - DNA, 201 bp, Homo sapiens
ttagaggtgggcctgtttgaatgaatgaataaccaagtaggggcttcggtgagcaatcgtcaaataagcgctctctctctctctctctctctctctctctctgtcatgctcttttctattcccttggcccaccatcacattggaaagagtatggctttttataagtttggaacatttaaactctttgctctgcttgttcat

SEQ ID NO: 200569 - DNA, 201 bp, Homo sapiens
cttatatattggggagaaggaaaataggtcccgtcctcaaaaaactctgaagcttcttgggaaattaaatgttcttccaccccaaggcagtcagaggctasaccagggttacaaatgactggagggaaggatgtaggggtcagaatttgggaacagtgaagtccttccaagggagaaagaagtgtcacaaaagttcccaga

SEQ ID NO: 200570 - DNA, 201 bp, Homo sapiens
agcaaggtcttcaaagggaagaaagggttggcccttttctttgccaggtcaaacctgaaggttgaagtgggagtactgggacagaagcttaaggattatayatctgcttcctcagggtgcgagatttactcagacgcaggcaaccatgcttccatgatccaaggtatccgtaacagtggagcagccaagtttgtcttcagg

SEQ ID NO: 200571 - DNA, 201 bp, Homo sapiens
gcttaaggattatacatctgcttcctcagggtgcgagatttactcagacgcaggcaaccatgcttccatgatccaaggtatccgtaacagtggagcagccmagtttgtcttcaggcacaatgaccctgaccacctaaagaaacttctagagaagtctaaccctaagatacccaaaattgtggcctttgagactgtccactc

SEQ ID NO: 200572 - DNA, 201 bp, Homo sapiens; identical to SEQ ID NO: 35134

SEQ ID NO: 200573 - DNA, 201 bp, Homo sapiens
gaaggaaggcacatgtctccctatcctccccatccttccctctactttgtctcataggacacagtttatataggatcactaactcaacattgactcccatsaaggaagagaaacctacccagttcctcgatgcctgacaagagtttctttttctccttttctcctgttttctcctggccagggagaccctgcagcgtcatg

SEQ ID NO: 200574 - DNA, 201 bp, Homo sapiens
caagactgtgaaccgctgggctgatgcatatccctttgcccaacatttctctgaggcatctgtggcctcaaaggatgtgtccgtctggtgtagtaatgatyacctgggcatgagccgacaccctcaggtcttgcaagccacacagtgagtagtaggctttcagccatcagcagtggccagaggagatgaaaaaccacacat

SEQ ID NO: 200575 - DNA, 201 bp, Homo sapiens
ttcgtggatgaggtccatgctgtaggactgtatgggtcccggggcgctgggattggggagcgtgatggaattatgcataagattgacatcatctctggaastcttggtaagtgaatgctttgggccttcttatataccctccagagaggaggcccttacaaaattcttttctgcctcctccccaaagctataggggttgtt

SEQ ID NO: 200576 - DNA, 201 bp, Homo sapiens
ggccaagccctgaggcgagcccaccagcgcaatgtcaagcacatgcgccagctactcatggacaggggccttcctgtcatcccctgccccagccacatcawccccatccgggtgagagccccaccatgcccattgccctctccacctatttattctgggagcctcacgctcccaacaaacctacatctgttgctgtcttca

SEQ ID NO: 200577 - DNA, 201 bp, Homo sapiens; identical to SEQ ID NO: 35140

SEQ ID NO: 200578 - DNA, 201 bp, Homo sapiens
cttaaaacgaattcttttcatcctcatatctgctcctgcaggaaactatgtcttcagttatgaccagtttttcagggacaagatcatggagaagaaacagkatcacacctaccgtgtgttcaagactgtgaaccgctgggctgatgcatatccctttgcccaacatttctctgaggcatctgtggcctcaaaggatgtgtc

SEQ ID NO: 200579 - DNA, 201 bp, Homo sapiens
ggaccaaactgttctcaaatccaccttaaggcaacaaaggctggaggaggtaagaagaggctgctagcaaaaggggagaatgttagggtcctggggtaaargttccaagttatactggccatctttgcctaataattaggacggttcatgtgaaaagtgtcaagatagcatgaactggccccaaaatatacccagaatctg

SEQ ID NO: 200580 - DNA, 201 bp, Homo sapiens
cccctccccctaccaccttcagagaagctgctgctggcttggactgcggtggggctgcccctccaggatgtgtctgtggctgcctgcaatttctgtcgccrtcctgtacactttgagctcatgagtgagtgggaacgttcctacttcgggaacatggggccccagtatgtcaccacctatgcctgagaagccagctgccta

SEQ ID NO: 200581 - DNA, 201 bp, Homo sapiens
tttaccacttctctgccccccatggtgctctctggagctctagaatctgtgcggctgctcaagggagaggagggccaagccctgaggcgagcccaccagcrcaatgtcaagcacatgcgccagctactcatggacaggggccttcctgtcatcccctgccccagccacatcatccccatccgggtgagagccccaccatgc

SEQ ID NO: 200582 - DNA, 201 bp, Homo sapiens
gtacccgggtttgattgttgtgctgcagcgtcgactgctccaacacaggactttgttcgagaggaactaggaagcgaaggatcttgagctgggtgcctgcraactcagggaggaagcgggtgcacagaggtgggcactgttttgcaggcacagaggacacactcaagactgcacccacagggcagtggtcagagcccatca

SEQ ID NO: 200583 - DNA, 201 bp, Homo sapiens
gcacagacttccagaatgaggtccgtaactccttctcatctttggcttctgaagtcttggcctgccccttcaccactttggccactgccttctcttctggrgtcttcggggtcatgagggcgctcatcagtggtaggctaggcagctctatgtcaggagaggcttggggacagctaggggagggctgaaagtagctcttca

SEQ ID NO: 200584 - DNA, 201 bp, Homo sapiens
gtgcagaccacccaagataatcacccttgagatatggccacactgttgacatctttcataggcccctttgggatatcattaaggacaaaaacttcaaaatkgaaatttaatgatgtttagaaaagaagagtaaggtacattatcctgcatctactttctaaatgcaggacccagggtggctgctccagttacctgagccaa

SEQ ID NO: 200585 - DNA, 201 bp, Homo sapiens
tgaagtgggagtactgggacagaagcttaaggattatacatctgcttcctcagggtgcgagatttactcagacgcaggcaaccatgcttccatgatccaargtatccgtaacagtggagcagccaagtttgtcttcaggcacaatgaccctgaccacctaaagaaacttctagagaagtctaaccctaagatacccaaaat

SEQ ID NO: 200586 - DNA, 201 bp, Homo sapiens
gtatggtaggccattagaaggagtttggcttttactctgagagcccttgaaaggatttgaacacaggactgatatttctgactcgggttttaacaaaattsctccaacttctatgtagagaatacactaaaagggagcaagggtggaagcagggagacccaagagtgggctacagtaatatcccaggtgagagatgatggt

SEQ ID NO: 200587 - DNA, 201 bp, Homo sapiens
aggaaactatgtcttcagttatgaccagtttttcagggacaagatcatggagaagaaacaggatcacacctaccgtgtgttcaagactgtgaaccgctggrctgatgcatatccctttgcccaacatttctctgaggcatctgtggcctcaaaggatgtgtccgtctggtgtagtaatgattacctgggcatgagccgaca

SEQ ID NO: 200588 - DNA, 201 bp, Homo sapiens; identical to SEQ ID NO: 35150

SEQ ID NO: 200589 - DNA, 201 bp, Homo sapiens
aaggcctgatgtttccaactcctgaagagaaattaccacttcccttccagacctaattgacttttgcaaagcaggccacaaaaggggtgggggggtggggkacaaggaatgctgcaatgagtgttttctggctgtctgctggggtagagttgcagttggcccttttcacctctgggagtacagattgggtgctgacacaag

SEQ ID NO: 200590 - DNA, 201 bp, Homo sapiens
ggaagcgaaggatcttgagctgggtgcctgcaaactcagggaggaagcgggtgcacagaggtgggcactgttttgcaggcacagaggacacactcaagacygcacccacagggcagtggtcagagcccatcacctcaggcagcaggaaagaggcctgaaaggtgtctatgaccagggtcctgtcccccagcacatagtcaa

SEQ ID NO: 200591 - DNA, 201 bp, Homo sapiens
gccacacagtgagtagtaggctttcagccatcagcagtggccagaggagatgaaaaaccacacatggaaaaaaaaaaaaggcagagctggcagtggaaacytgggttctatcaccacttcttttgtccaaggtcctccatcatatctattccttggatatgaaataagtcaacacaccatgtttcccaaactcttcggtgt

SEQ ID NO: 200592 - DNA, 201 bp, Homo sapiens
aaacaggatcacacctaccgtgtgttcaagactgtgaaccgctgggctgatgcatatccctttgcccaacatttctctgaggcatctgtggcctcaaaggwtgtgtccgtctggtgtagtaatgattacctgggcatgagccgacaccctcaggtcttgcaagccacacagtgagtagtaggctttcagccatcagcagtg

SEQ ID NO: 200593 - DNA, 201 bp, Homo sapiens
ctgaaagagaagctgagaggacagagaccactgagtttacaaaatatttctggaacatctaatgtgtgccagcacctatactagggtcacaaataaatgaraagcagcccctacacttgtagggctccagtttggttggggataccatagtgaacacaaacaatgacactaagggatgatcaaagctccacaaggcagtgc

SEQ ID NO: 200594 - DNA, 201 bp, Homo sapiens
tttttaatgcaaaactatctttgtcaccccaccctcagccctggtcaaaaccctttagtggacccccattcccccaggaccaaatccaaatttcttatcayagcttctaaagttctcaataatctggcttctatgtatctcttcggtctcacctttttgcatccctcctctcactatttcattcagtaatacattcattca

SEQ ID NO: 200595 - DNA, 201 bp, Homo sapiens
tttcattttctctttctctcgactcaatctctgttttcatctctaccctgctccctttccctctacctttgatctctttttccccctcaatttctgttctyttaactctaccaccaccaccacatctttgttctctctctactttcctccttttatctttcctaaattttcttttcttctggcttttctcctagtcccttc

SEQ ID NO: 200596 - DNA, 201 bp, Homo sapiens
gcaggcttcatctttaccacttctctgccccccatggtgctctctggagctctagaatctgtgcggctgctcaagggagaggagggccaagccctgaggcragcccaccagcgcaatgtcaagcacatgcgccagctactcatggacaggggccttcctgtcatcccctgccccagccacatcatccccatccgggtgaga

SEQ ID NO: 200597 - DNA, 201 bp, Homo sapiens
ctttaccacttctctgccccccatggtgctctctggagctctagaatctgtgcggctgctcaagggagaggagggccaagccctgaggcgagcccaccagygcaatgtcaagcacatgcgccagctactcatggacaggggccttcctgtcatcccctgccccagccacatcatccccatccgggtgagagccccaccatg

SEQ ID NO: 200598 - DNA, 201 bp, Homo sapiens
atgtgaagagctgtgtttctaaacccctcccccaccctagccccaagcttcatcttagctccactcctgaccctatccagctaaaggtccccacccagctmctgcctatctagtcattgcatatggcaagacttgaaagtcctatctcaaagcagcagaattatcagctacgactgccttgtcatggacagatgagcagag

SEQ ID NO: 200599 - DNA, 201 bp, Homo sapiens; identical to SEQ ID NO: 35131

SEQ ID NO: 200600 - DNA, 201 bp, Homo sapiens
ttggaagatctagtctaacccattttttccctcccctccccctaccaccttcagagaagctgctgctggcttggactgcggtggggctgcccctccaggaygtgtctgtggctgcctgcaatttctgtcgccgtcctgtacactttgagctcatgagtgagtgggaacgttcctacttcgggaacatggggccccagtatg

SEQ ID NO: 200601 - DNA, 201 bp, Homo sapiens
attgacttttgcaaagcaggccacaaaaggggtgggggggtgggggacaaggaatgctgcaatgagtgttttctggctgtctgctggggtagagttgcagytggcccttttcacctctgggagtacagattgggtgctgacacaagagaggattttaaagtcgtagggaaaaactttcagtaatgatctgttacttggtct

SEQ ID NO: 200602 - DNA, 201 bp, Homo sapiens
gctagagggagtggacacattatggagagagagggtgggaaggatgaaattggagaggctttgtgagtaaggaagtttttatgatgcatgttgaagtacaygtgaatatgttgtaagaatattccagaataagggaattccacgagcaatgacctagagataggaaagcagtgggtatgtattgacaacataattctgttt

SEQ ID NO: 200603 - DNA, 201 bp, Homo sapiens; identical to SEQ ID NO: 35137

SEQ ID NO: 200604 - DNA, 201 bp, Homo sapiens
tcctcatatctgctcctgcaggaaactatgtcttcagttatgaccagtttttcagggacaagatcatggagaagaaacaggatcacacctaccgtgtgttmaagactgtgaaccgctgggctgatgcatatccctttgcccaacatttctctgaggcatctgtggcctcaaaggatgtgtccgtctggtgtagtaatgatt

SEQ ID NO: 200605 - DNA, 201 bp, Homo sapiens
atgggatctgtgtatatcttattcctttctgtctccaggcaaggcctttggctgtgtgggcggctacattgccagcacccgtgacttggtggacatggtgygctcctatgctgcaggcttcatctttaccacttctctgccccccatggtgctctctggagctctagaatctgtgcggctgctcaagggagaggagggcca

SEQ ID NO: 200606 - DNA, 201 bp, Homo sapiens
aatctatcccaaaattcagtgatgttccctcatctagttccctccatctgcttaatggagctagtgatggtggagccagagtggcaggtactgattagcckttctcctgagtccaggtgggcaatgcagcactcaacagcaagctctgtgatctcctgctctccaagcatggcatctatgtgcaggccatcaactacccaa

SEQ ID NO: 200607 - DNA, 201 bp, Homo sapiens; identical to SEQ ID NO: 35147

SEQ ID NO: 200608 - DNA, 201 bp, Homo sapiens
cctgcaggaaactatgtcttcagttatgaccagtttttcagggacaagatcatggagaagaaacaggatcacacctaccgtgtgttcaagactgtgaaccdctgggctgatgcatatccctttgcccaacatttctctgaggcatctgtggcctcaaaggatgtgtccgtctggtgtagtaatgattacctgggcatgagc

SEQ ID NO: 200609 - DNA, 201 bp, Homo sapiens
tcttattcctttctgtctccaggcaaggcctttggctgtgtgggcggctacattgccagcacccgtgacttggtggacatggtgcgctcctatgctgcagrcttcatctttaccacttctctgccccccatggtgctctctggagctctagaatctgtgcggctgctcaagggagaggagggccaagccctgaggcgagcc

SEQ ID NO: 200610 - DNA, 201 bp, Homo sapiens
ccactgccttctcttctggagtcttcggggtcatgagggcgctcatcagtggtaggctaggcagctctatgtcaggagaggcttggggacagctaggggarggctgaaagtagctcttcaggtttttctggcctctgctagagccaacctgactgggctgaggcctggttgagcgcacttgggctttgttttggcatgtct

SEQ ID NO: 200611 - DNA, 201 bp, Homo sapiens
tccctctaccaatttcacatgcccacctgccccaccaggattgcccagtaaaaagccctgcattcttcaaatctttctggaccttagctttctcacttgtwtagtaaagggatgaatcccatgatcactaacagccctgccagctctgacatgccataagcttatgattccaacagtaaaagcctgataaatatccatccc

SEQ ID NO: 200612 - DNA, 201 bp, Homo sapiens
tccatggtcataactgctaggtctaccacctctctgagctgatgacccagactcctgggccttttgttcagtattctcttttgctctgggcttcaattgtwgagctctcagtattcttggttctctgaatgtccacctaggctaggcttttgtaagaatatatgaggcatccacgatggctccaccagtccctaagttcca

SEQ ID NO: 200613 - DNA, 201 bp, Homo sapiens
tttctaaaattctgactatattgctcccttgcttaaaccccttcatgtttccctctagactctaaagcagtgacctccaaggggtatgcaaaatgattacwgggtgaaggaacagaatatgtattagaattttatgtttttttatcttaaaaataggaaatcaagcatcactgatactgatctttaatatacagactgaca

SEQ ID NO: 200614 - DNA, 201 bp, Homo sapiens
ctcatctgtactgtgacagatttggaagatctagtctaacccattttttccctcccctccccctaccaccttcagagaagctgctgctggcttggactgcrgtggggctgcccctccaggatgtgtctgtggctgcctgcaatttctgtcgccgtcctgtacactttgagctcatgagtgagtgggaacgttcctacttcg

SEQ ID NO: 200615 - DNA, 201 bp, Homo sapiens
gaaataagtgaagaaagtggaagaggaatgtagtgtcactatacagaaagtaaacagatttctattctcatcctaattcactgtgagaccctaggcaagtmattcactctctgaaaaaaaggcttggcctgtaatttccaccaccctttctagttttgattttgtgatcttctaaattttcctgtttctaagaatttctga

SEQ ID NO: 200616 - DNA, 201 bp, Homo sapiens
gggatgtaaggatgtgtacatttttgatattaatacattttgtcaattagccctccaacatggctgtaccagttatcaaggagggtatccatagtctcatwcccttaccagcccttgatattatcaaactttaaatctttatcaattgataggtgaaattttgttttcccagttttatttttcctgattaagaatcttttt

SEQ ID NO: 200617 - DNA, 201 bp, Homo sapiens
accttgcatatcctcaacactggataattatatccctctgctttctctccttctgcacgtagagaggaccattaccggggaacattaccccacctcacagraaggaaacactataaattcatcacctcccaactcaactgagctcttaacacacatacatagttattttatgtctccacaggagctttttcaaacttcttc

SEQ ID NO: 200618 - DNA, 201 bp, Homo sapiens
ccaggaatagtacagagaggcaccacctaagtatccttcccaatgacctgggaagtcccacacactttcctccattagggcacttcgagtttttctctacstcacctcagaggtttgttaacctcagtagattttattcttccagttccttttctgggtacaggcagaacagagtagaaagaacggaggaaatgcatctga

SEQ ID NO: 200619 - DNA, 201 bp, Homo sapiens
cttatactggacaccagagacagagagataataagatgtttttgctcccatgcaactcccagtctgcttgtctttcaagccattttctccagaaagccatwactcattttctcaggtggaagttatcccttaatcttataataaggccacagttccttgatggcagtgcagttggtggcaggggttggggaggtccaggaa

SEQ ID NO: 200620 - DNA, 201 bp, Homo sapiens
tcaatgactgagcaaataaatgaatatgtggaaaaagagttggagaactcaaaatcagcaacatgggtaaaatacagactagccagggagagacttaaaaygaattcttttcatcctcatatctgctcctgcaggaaactatgtcttcagttatgaccagtttttcagggacaagatcatggagaagaaacaggatcacac

SEQ ID NO: 200621 - DNA, 201 bp, Homo sapiens
ggcctctgaggttccagccatattgaacattctgagttctcctcacacttatcttcctgcgttttggactctttcagtctcaccccagtctttgggccgtrtactcggccctctgagagtgagctgtgggacatgtgggcagggatccgcaacaatgacgggaacttagtcattgacaggtaagaagttaccctttgcttt

SEQ ID NO: 200622 - DNA, 201 bp, Homo sapiens
cgaagatctctaggtagttaataactatcaaaatgtcacttctttggccttcacttttattatgtaaaagtactcagatcaggccgaatacaattttattytctttatccaatgccggaggctattgtcgaagccacggcctgccatttcataccctttgcaataggtggcgctgacgcctggcagggagaaggcggcagc

SEQ ID NO: 200623 - DNA, 201 bp, Homo sapiens
gtctcggtcagctttgtgcctatgtgaagggcaatgtaatcattgcatggtaacagcaatctcccaccccatcttaccaggttttggtttgtagatgagtggacaatgttacctgactgcttacagtgggtctctgcttttcctacaggatgagggagtggtgggtccaggtggggctgctggccgtgcccctgcttgctg

SEQ ID NO: 200624 - DNA, 201 bp, Homo sapiens
aactgctgggagaatgggggtagggactgagattccaacctgcagaccttaccttttagtataagttttctttgtagcttgatatgtattccaatattagtttttttttttttttttttgagcaacctgtcaggtaatatataaaatattaatagatataaccaccattggttctctctccttaccatccctgatttcatt

SEQ ID NO: 200625 - DNA, 201 bp, Homo sapiens
ttaaatccatctgtggcttctcattttctctagaacaaattcctaattccctacgatgaaattctcttgctatcctaattttttgccggctcaaaggactwcccgttttccccaaacacgcggccctgagcctccggtgctttgcgaaagccgtcccctccggctggaatgttctttgtctctctggtaaatgtctattca

SEQ ID NO: 200626 - DNA, 201 bp, Homo sapiens
actgctgggagaatgggggtagggactgagattccaacctgcagaccttaccttttagtataagttttctttgtagcttgatatgtattccaatattagtttttttttttttttttttgagcaacctgtcaggtaatatataaaatattaatagatataaccaccattggttctctctccttaccatccctgatttcattt

SEQ ID NO: 200627 - DNA, 201 bp, Homo sapiens
taaatccatctgtggcttctcattttctctagaacaaattcctaattccctacgatgaaattctcttgctatcctaattttttgccggctcaaaggacttmccgttttccccaaacacgcggccctgagcctccggtgctttgcgaaagccgtcccctccggctggaatgttctttgtctctctggtaaatgtctattcat

SEQ ID NO: 200628 - DNA, 201 bp, Homo sapiens
ctgctgggagaatgggggtagggactgagattccaacctgcagaccttaccttttagtataagttttctttgtagcttgatatgtattccaatattagtttttttttttttttttttgagcaacctgtcaggtaatatataaaatattaatagatataaccaccattggttctctctccttaccatccctgatttcatttt

SEQ ID NO: 200629 - DNA, 201 bp, Homo sapiens
tcattattgctcctgacctcctctcatttgctatattcaattaagtaagtatacaatttttattatgttggcttgggttacttccagttttactgttttaraaaactaatgttgaagtaaaagcttcatgtccatacagtttattttttccttacattttcaaactatactacttgtataaatggaatgattttatttgca

SEQ ID NO: 200630 - DNA, 201 bp, Homo sapiens
ggtcaagagcaataacgaaaaatgtttgtcataaaccgtttttcattattgctcctgacctcctctcatttgctatattcaattaagtaagtatacaattwttattatgttggcttgggttacttccagttttactgttttaaaaaactaatgttgaagtaaaagcttcatgtccatacagtttattttttccttacattt

SEQ ID NO: 200631 - DNA, 201 bp, Homo sapiens
tgctgggagaatgggggtagggactgagattccaacctgcagaccttaccttttagtataagttttctttgtagcttgatatgtattccaatattagtttttttttttttttttttgagcaacctgtcaggtaatatataaaatattaatagatataaccaccattggttctctctccttaccatccctgatttcattttt

SEQ ID NO: 200632 - DNA, 201 bp, Homo sapiens
aacctttcggggtgcagagttgcagagccgcggagggcccgggccgtgcgcagccgaagggaggcctgcagcgccccctctggatgcagcgggcaccggcyggccgccccgctcacccgctcgcaccccacgtttgttcaccagtatttcagtttacggtcagaaaatgaacacagacacttcgtgatactctacactttt

SEQ ID NO: 200633 - DNA, 201 bp, Homo sapiens
ttgcttgagcccaggaagcggaggttgcagtgaactgagatcatgccactgcacttcagcctgggcacagagtgagactccgtctcaaaaaaaaaaaaagaaaaaaaaaaagaagtagatgtcaacacagaagatcatgtgttacaatcctcttattttaaaaatgaggaggctagccaggtcctttggcacatgcctgta

SEQ ID NO: 200634 - DNA, 201 bp, Homo sapiens
tctcgcggcgacgccatcaggtgggcggcaggttgggtggtattattacgggagtgtgtttttctgtttacaagatgaagaaatcaaggctcagaaatttytggaaagtttgttactggagtttgcttattgtctccgctcatggctcatcaaatagttgggattttggccaaaaaatgtttgcttaacccattttgccta

SEQ ID NO: 200635 - DNA, 201 bp, Homo sapiens
ggtaaatgtctattcatcattcaagaccacccttcgcccctccccttaattacttcctcccctgtgcgccctcaaattcttgtactcattcaagcagtatytattaggggccagctttgtggccggcaccgtggcgggctctggggctacaaaaggtgaataatacttgggctctgcctctgagggccttacacgttaggg

SEQ ID NO: 200636 - DNA, 201 bp, Homo sapiens; identical to SEQ ID NO: 35184

SEQ ID NO: 200637 - DNA, 201 bp, Homo sapiens; identical to SEQ ID NO: 35186

SEQ ID NO: 200638 - DNA, 201 bp, Homo sapiens
accttgagaagtaggaccaaatggttctatccgtcttatggacaggtactttggagaaaaaaagaaatgactgccctaataatgcctaaaaaatagcctgrggagctgacattgtttaagaaacatggttattttaccactgtaaaaccacaggcttgtttttagattttagcaaaaagtatcagggatatgggggggaaa

SEQ ID NO: 200639 - DNA, 201 bp, Homo sapiens
gggtaggcaaaacaaaatgccaagtaccaaaccattcagtagcaggagatttggctaaagatttagttcctagtataaaaccttttgccccggtgaggatyttcctctgggttcttgagctttacctccacttattcccctccagctactcaaagatggaggtgtgctgtcacccatcctcacacgactgatgaacttctt

SEQ ID NO: 200640 - DNA, 201 bp, Homo sapiens
tgtcaaagattgtggcctagagcaatgtcgtgaaaagttgctgccattacaattctgggccaaatcctaaggcttgatattttaaagcaaaggtgttggcygcttgccagggaagtagaaggaattcataaatcacttatgggtcagactgcatggcccagactgcatggcctctgaggttccagccatattgaacattct

SEQ ID NO: 200641 - DNA, 201 bp, Homo sapiens
catgacttcatcctgtgtatgtgggctttcctttcctcagagaccacatcactattccatatttgagcaggccagcatcgtggaagcgcttttgcggcatytggggctccagaaccgcaggatcaaccttctttctcatgactatggagatattgttgctcaggagcttctctacaggtcagtggagcttcagacttcagc

SEQ ID NO: 200642 - DNA, 201 bp, Homo sapiens
cattgtttaatctttacaacagcatttggagataggtgccattaacctcattttataggtgaagaaactgagaaacagattggaaatgatttgttttgagygggggtcaagagcaataacgaaaaatgtttgtcataaaccgtttttcattattgctcctgacctcctctcatttgctatattcaattaagtaagtataca

SEQ ID NO: 200643 - DNA, 201 bp, Homo sapiens
taaacattgtggattctaagaagtaaagcctttagtagtaaaagatttaccaacaaataaagtgtttctgaaaaaggttgcgttgctctagttctagcaaygtgctcactctgcagctgtgggatctctgggtgccatcttgttttcctgccactctccctattccctggcagaccctgtccccttggaatgcccacagaa

SEQ ID NO: 200644 - DNA, 201 bp, Homo sapiens
tgtggcaaagggcagagtgggaaaggtgggagggagctgccaggtctcaaccacctgggggagaccatgacaaagtaagagacacttatgaggtatttccrgaaagctttgttagaataataattaaagaaaagggtatgtcactagggcaaaagattagaaagaaggcaaaagagatggatctgtacaggctaactgcag

SEQ ID NO: 200645 - DNA, 201 bp, Homo sapiens
tctcatctcactgcaacttctgcctccgggactcaagctattctcctgcctcagcctcccaagtagctgggactacaggcacacaccactacacatggctwatttttgtatttttggtagagacggggtttcaccatgttggccaggctggtctcgaactcctgacctgaagtgatccgcctgcttcagcctcaaagtgct

SEQ ID NO: 200646 - DNA, 201 bp, Homo sapiens
gagcgggggtcaagagcaataacgaaaaatgtttgtcataaaccgtttttcattattgctcctgacctcctctcatttgctatattcaattaagtaagtayacaatttttattatgttggcttgggttacttccagttttactgttttaaaaaactaatgttgaagtaaaagcttcatgtccatacagtttattttttcct

SEQ ID NO: 200647 - DNA, 201 bp, Homo sapiens
tgcttgagcccaggaagcggaggttgcagtgaactgagatcatgccactgcacttcagcctgggcacagagtgagactccgtctcaaaaaaaaaaaaagaaaaaaaaaaagaagtagatgtcaacacagaagatcatgtgttacaatcctcttattttaaaaatgaggaggctagccaggtcctttggcacatgcctgtac

SEQ ID NO: 200648 - DNA, 201 bp, Homo sapiens
gcttgagcccaggaagcggaggttgcagtgaactgagatcatgccactgcacttcagcctgggcacagagtgagactccgtctcaaaaaaaaaaaaagaaaaaaaaaaagaagtagatgtcaacacagaagatcatgtgttacaatcctcttattttaaaaatgaggaggctagccaggtcctttggcacatgcctgtact

SEQ ID NO: 200649 - DNA, 201 bp, Homo sapiens
cttgagcccaggaagcggaggttgcagtgaactgagatcatgccactgcacttcagcctgggcacagagtgagactccgtctcaaaaaaaaaaaaagaaaaaaaaaaagaagtagatgtcaacacagaagatcatgtgttacaatcctcttattttaaaaatgaggaggctagccaggtcctttggcacatgcctgtactc

SEQ ID NO: 200650 - DNA, 201 bp, Homo sapiens
ttgagcccaggaagcggaggttgcagtgaactgagatcatgccactgcacttcagcctgggcacagagtgagactccgtctcaaaaaaaaaaaaagaaaaaaaaaaagaagtagatgtcaacacagaagatcatgtgttacaatcctcttattttaaaaatgaggaggctagccaggtcctttggcacatgcctgtactcc

SEQ ID NO: 200651 - DNA, 201 bp, Homo sapiens; identical to SEQ ID NO: 35179

SEQ ID NO: 200652 - DNA, 201 bp, Homo sapiens
cggaccggcgcatgcagcgagcggggctgcgagggcgctgctgtggccaggcgtctggcatgctgaccacgtcgcgctgctgtaaaggaaacctgccccgsgcagcggcggtggctggagcgggagaaaccggactttgtgcaactttggccatagtggccatcccatgaatctgtttactagcttggtggtgggtccaac

SEQ ID NO: 200653 - DNA, 201 bp, Homo sapiens; identical to SEQ ID NO: 35191

SEQ ID NO: 200654 - DNA, 201 bp, Homo sapiens; identical to SEQ ID NO: 35192

SEQ ID NO: 200655 - DNA, 201 bp, Homo sapiens
ctaggttttgtatcacacaaaaaattatttatagaaaatattttcttgggctgggtgaggatgctcacgtctgtaatcctagctttttgggaggctgaggygggaggactggttgagcccaggagtttggcaccactctgggcaacatagtgagaaaaatttttctctacagataatttaaaagttagccaagtgtggtgt

SEQ ID NO: 200656 - DNA, 201 bp, Homo sapiens; identical to SEQ ID NO: 35181

SEQ ID NO: 200657 - DNA, 201 bp, Homo sapiens; identical to SEQ ID NO: 35183

SEQ ID NO: 200658 - DNA, 201 bp, Homo sapiens
gcgatgtaggatttttagaaccccagcatcgctctggtgcgacttaaaggataggccccagcatcgccctggtgcgatgtaggatttttagaaccccggtrtctccgtggcgcaccttaggatttcaagaacgggataatcgcagtgccgagatcgccgcggtgcagcttaggatttcaagacccaggtatcacggtggcg

SEQ ID NO: 200659 - DNA, 201 bp, Homo sapiens; identical to SEQ ID NO: 35185

SEQ ID NO: 200660 - DNA, 201 bp, Homo sapiens
ccctcgtggctcgccacctctcacggttcagtacccacgcttcgaacgagggatgggagcaggcgccacggccggcaccccagagccctgctgccccttakttcgagcggccatcctcctgtggggcttgtgggcagcctgtggggtttgtgggcggcctgtggggtttgtgggtggtctaaggaaagagttggggcactc

SEQ ID NO: 200661 - DNA, 201 bp, Homo sapiens
tatacagattgaaaggagaaaaggcctgttctcacctaacgcagttaagcttacattttacaaataattgtgtcattttaatgtcaatttggtcacagttkcttgttctttgtatcagattacttagattttaacatcttcgaggttatttttatagggatttggcataattgattgtactttccttcttcctagactctg

SEQ ID NO: 200662 - DNA, 201 bp, Homo sapiens
  misc_feature (1)...(201): n = A,T,C or G
attaattaccaggaataaagcattttccaagaggatcatctgtgggacctgtggtagtttcatggcgttttctctttatggaagtctgttaagccaagatngggctgaagctcctgtgcaactgtaggtctggtgaaagggaggggcaggagcagaaagcccaaatcatcgtttctttcttgtagatttgggaaggtctga

SEQ ID NO: 200663 - DNA, 201 bp, Homo sapiens
tgagagtgagctgtgggacatgtgggcagggatccgcaacaatgacgggaacttagtcattgacaggtaagaagttaccctttgctttggtttccagagamgtgtttttgtggagagtggggattgcttgttctgttccttgctggcttattccctatcacaggaaggctgatgatgacctatggggcaaaccaaaaagtc

SEQ ID NO: 200664 - DNA, 201 bp, Homo sapiens
gaaggctgtttggattactaatcaagaggctataggtggtttgtgcttatttgtcttttcattcttacagatttaaaaaaaaattatggtgtttcacacayagtgattagtgctcaggaaattattggttgatttcaaatgtcaagggtctgttataactgaagagagacttaaagaatgatagtatcctggacttagagg

SEQ ID NO: 200665 - DNA, 201 bp, Homo sapiens
cggagggcccgggccgtgcgcagccgaagggaggcctgcagcgccccctctggatgcagcgggcaccggccggccgccccgctcacccgctcgcaccccasgtttgttcaccagtatttcagtttacggtcagaaaatgaacacagacacttcgtgatactctacacttttcaaaggcgtaagggatgccttttaaaggat

SEQ ID NO: 200666 - DNA, 201 bp, Homo sapiens
ttgattatgtcacataagaatgttccataccttcctgtggcctactggatacaagctagtagtaaacagcttgcatataattttaaataaaataccccctstctcatctcctcctgggattaagggaagatccttggttatctctgcttgggcagtgagttgctgtgtgatccacttgtttgatgcttcatccttctctaa

SEQ ID NO: 200667 - DNA, 201 bp, Homo sapiens
gtgggctttcctttcctcagagaccacatcactattccatatttgagcaggccagcatcgtggaagcgcttttgcggcatctggggctccagaaccgcagratcaaccttctttctcatgactatggagatattgttgctcaggagcttctctacaggtcagtggagcttcagacttcagcttatgatgctaggagagtac

SEQ ID NO: 200668 - DNA, 201 bp, Homo sapiens
tgatgaattagatgtgaagaagctatgtaattgccaaggttgcagagctcctaagtgatagagccagagtcaaacgctgcatatacacagggaacccgaaytgaatttcagtttcttctggagagtcttccacagggctcaatactatgtttctattaccacttcttgatttatgttttggatatttatctgttgacttcc

SEQ ID NO: 200669 - DNA, 201 bp, Homo sapiens
cagaagcccacctgctaccccccacaacagctgctctctgccttccagccgcactgaaccactgcgggtcctgaatgtccacagcggccacccccaccccrtgccttcccgccagcggctcgatcctcctggactgcctctccgcctctttccaaaacagcagaggccccacagttcacaagcctcagggggcaggaccca

SEQ ID NO: 200670 - DNA, 201 bp, Homo sapiens; identical to SEQ ID NO: 35210

SEQ ID NO: 200671 - DNA, 201 bp, Homo sapiens
gatgagtgcctcctcgtggccccagaatggaatgccgccgtcggtaggggtctgccgggcataaaggggccttcggaaccccaccagagtcacagccaggragggcagcggggcgcaccaggccgaaggctcacgccacagggagggcagctaggacatggggggaagcgcgttaaaccagggagtcctggaaggggacga

SEQ ID NO: 200672 - DNA, 201 bp, Homo sapiens
ttttcccatctctcatactctgttacagatcagcatctgtgagggactacacatcttgccaatgcagagataactcagcactctgcatcctcagcattctyggcttaatcctttccgtcccagatgagatcatcctgacagccgtctttcagaacatttcctttctcgtgctcccttctggtggctggggcctgatggaca

SEQ ID NO: 200673 - DNA, 201 bp, Homo sapiens
gcggagaggagagctggccaggtttctgttcaaaccgaactacgcctatggaacgctgggctgccctcccttgatccccccaaacaccactgtcctgtttragattgagctgcttgacttcctggactgtgctgagtcagacaagttttgtgctctctcagctgtaagttccagagcacagatgtcagcactttatagaga

SEQ ID NO: 200674 - DNA, 201 bp, Homo sapiens
ctccggcccctgtaagtgccccatcgtgctctctgtcgctccagttagatgccccatcctgccccgcgagctccaattacgtgccccacctaaccccccaygtccgtgcctcatcatgacccgcacgctatggttacatgccccgcctcgcgctaccgcgcgtgccccatcatgctctgcgcgctcccattacgtgccgcc

SEQ ID NO: 200675 - DNA, 201 bp, Homo sapiens
tgtctggcttctttcacttagcacaatactgtccaggttcatccatgtccatatgtcattccgtcattccttttttttttttttctgagatggagtctcaytctgtcgcccagactggagtgcagtggcacgatctcagctcactgcaacctctgcctgccaggttcaagcaattctcttgcctcagcctccagagtagct

SEQ ID NO: 200676 - DNA, 201 bp, Homo sapiens
cgcctggccagaaaatattgttaaaaataaaaatgaaagccaggcacattggctcacacctgtaatcccagcactctgggaggctgaggtgggtggatcaygaggtcaggagttcgagaccagcctggccaacatggtgaaaacccgtctctactaaaaatacaaaaaatagctgggtgtggtggcgggtgcctgtaattc

SEQ ID NO: 200677 - DNA, 201 bp, Homo sapiens
aagtatggggtttcctgctttcaagggatttgaatctagttagggagttaaatgcagctccaacagctaaccaatacctatggtctgaatgtttgtgtctycccaaaatgtgtatgttgaaacctaatcatccatgtgatattaagaggtgaggcctctgggagatgatgaggtcatgaagatgaaaccctcttacatgga

SEQ ID NO: 200678 - DNA, 201 bp, Homo sapiens
ctgggattacaagtgcgagccacggcgcctggccagaaaatattgttaaaaataaaaatgaaagccaggcacattggctcacacctgtaatcccagcactytgggaggctgaggtgggtggatcatgaggtcaggagttcgagaccagcctggccaacatggtgaaaacccgtctctactaaaaatacaaaaaatagctgg

SEQ ID NO: 200679 - DNA, 201 bp, Homo sapiens
tgccccacacaggcctgatgccacctcaccctcctgcaccccaacaccctgggctccctgccccacacagccctgaggccacctcaccctcccgtaccccracaccccgggctttctgccccacacaggcgtctctgagcctttcccagggtcccacgctccctcatggggctgaggcaggaggctcccctcccctgttct

SEQ ID NO: 200680 - DNA, 201 bp, Homo sapiens
cccaacaccccgggctccctgccccacacaggcctgatgccacctcaccctcctgcaccccaacaccctgggctccctgccccacacagccctgaggccayctcaccctcccgtaccccgacaccccgggctttctgccccacacaggcgtctctgagcctttcccagggtcccacgctccctcatggggctgaggcagga

SEQ ID NO: 200681 - DNA, 201 bp, Homo sapiens
cccctccccacctagtttccatcttttctcctgtttgtgtcatgtatggaagctttccttgactttttgccacctcttctgatgaatttttcatttaaaaytggggggccaggcacagtgactcacacctataatcccagcacttcaggagtccaaggtgggaggattgcttgaagccaggagttaaagatcagtctgggc

SEQ ID NO: 200682 - DNA, 201 bp, Homo sapiens
ccctcctgcaccccaacaccccgggctccctgccccacacaggcctgatgccacctcaccctcctgcaccccaacaccctgggctccctgccccacacagscctgaggccacctcaccctcccgtaccccgacaccccgggctttctgccccacacaggcgtctctgagcctttcccagggtcccacgctccctcatgggg

SEQ ID NO: 200683 - DNA, 201 bp, Homo sapiens
tccctctctgtcacctaggctatagggcaatggcatgatctcggctcactgcaacctccgcgtcccgagttcagacgattctcctgtctcagcctccaagktagctgggattacaggcgtgtaccaccacatctggctaattgtttttgtattttagttgagacagggtttcaccgtgttgaccaggctggtctcaaactc

SEQ ID NO: 200684 - DNA, 201 bp, Homo sapiens
tgcagagagaagatttattcctgtacctcggggtgtcgggcagcttaagctcatctgttcacattgtttctgtgtgatcatgagagactcgatattatggwggcgtgggtgtttttggtccattttccttacattctttcttctatcctagtgaaatactcgggatacctggaacacatggacagacccttcgattctaat

SEQ ID NO: 200685 - DNA, 201 bp, Homo sapiens
cctcaccgcgtggcctctgtagttccagagctcgcgagggccagggccgttggcggcggttggaacgaaacgatgagtgcctcctcgtggccccagaatgkaatgccgccgtcggtaggggtctgccgggcataaaggggccttcggaaccccaccagagtcacagccagggagggcagcggggcgcaccaggccgaaggc

SEQ ID NO: 200686 - DNA, 201 bp, Homo sapiens
cacaggcctgaggccatctcaccctcctgcaccccaacaccccgggctccctgccccacacaggcctgatgccacctcaccctcctgcaccccaacacccygggctccctgccccacacagccctgaggccacctcaccctcccgtaccccgacaccccgggctttctgccccacacaggcgtctctgagcctttcccagg

SEQ ID NO: 200687 - DNA, 201 bp, Homo sapiens
cttccggcctgaattagtttttttaagacgaaagctagggactcctatgtcccctttgtgtgatgcttccgcaaagctcttgaacctctgagccaaagggycggcacccaaaatgcagagagaagatttattcctgtacctcggggtgtcgggcagcttaagctcatctgttcacattgtttctgtgtgatcatgagagac

SEQ ID NO: 200688 - DNA, 201 bp, Homo sapiens
ccctcctgcaccccgacaccccgggctccctgccccacacaggcctgaggccatctcaccctcctgcaccccaacaccccgggctccctgccccacacagscctgatgccacctcaccctcctgcaccccaacaccctgggctccctgccccacacagccctgaggccacctcaccctcccgtaccccgacaccccgggct

SEQ ID NO: 200689 - DNA, 201 bp, Homo sapiens
gccggcgctccgcgggttcggttccgcccgcgtttgtgttggcagcggcccacggcgcgcggccgggcgcatgaaaggggcctctgtctgcgccccagccrccccgctcccctttcactcttaatataatcttcacttcatttttaacccagcggaggttctcttggaatttttccccttcttccaaaaatacatgtgcgt

SEQ ID NO: 200690 - DNA, 201 bp, Homo sapiens
accttgggctccgggtccccagggagcctcagggcttcgatcaccctggccagggagacgttgggcagggagctgctgccgtccaccgcctgccggcacayggggcagcgcagctcggcatccaggtggcaggacagggaaaccaggcagcccttgcagtaagagtggccacactgcagcatcaggggctccttgaagacc

SEQ ID NO: 200691 - DNA, 201 bp, Homo sapiens
ccctgagaccacctcaccctcctgcaccccgacaccccgggctccctgccccacacaggcctgaggccatctcaccctcctgcaccccaacaccccgggcyccctgccccacacaggcctgatgccacctcaccctcctgcaccccaacaccctgggctccctgccccacacagccctgaggccacctcaccctcccgtac

SEQ ID NO: 200692 - DNA, 201 bp, Homo sapiens
tccgcgggttcggttccgcccgcgtttgtgttggcagcggcccacggcgcgcggccgggcgcatgaaaggggcctctgtctgcgccccagccaccccgctyccctttcactcttaatataatcttcacttcatttttaacccagcggaggttctcttggaatttttccccttcttccaaaaatacatgtgcgtgcgtgtgt

SEQ ID NO: 200693 - DNA, 201 bp, Homo sapiens
tgccccacacagccctgagaccacctcaccctcctgcaccccgacaccccgggctccctgccccacacaggcctgaggccatctcaccctcctgcaccccracaccccgggctccctgccccacacaggcctgatgccacctcaccctcctgcaccccaacaccctgggctccctgccccacacagccctgaggccacctc

SEQ ID NO: 200694 - DNA, 201 bp, Homo sapiens
gggttgtgactctggtctgtccccccaccccccccaacaaaggacagtctggcggtgttgcccagagtgttaggaggccgccccctctacagctgggtttytgaagtgctcggccgtgcgctgcaccagcagttcccagcaagcaggtgagacagactgccagactatacatctccatcatcgcccacctttctgtttccc

SEQ ID NO: 200695 - DNA, 201 bp, Homo sapiens
ccgccacctcgcgcccctgcacgtacccaacgtgccctgcgtggtcccgttacgtgtcccatcatgtttcgtgcgctcccattacggatcatacctcgcamctcaccgcgtggcctctgtagttccagagctcgcgagggccagggccgttggcggcggttggaacgaaacgatgagtgcctcctcgtggccccagaatgg

SEQ ID NO: 200696 - DNA, 201 bp, Homo sapiens
gggggaccggggcgtgctgaaggacgtcatccgagaaggagctggagacctagtggcgcctgatgcttcggtgctaggtacgccctggggcggtttgtcckcaggatccatgtcatcgcactctgttgggaagagagaggcctcattttcaaaaagcacttaatggggttggaaatgctttgtttgaagtggatttttgtt

SEQ ID NO: 200697 - DNA, 201 bp, Homo sapiens
tttcagtgtttctggatgtgagtggagaattccagccaccagatgtcacctcctccaaacacagacctcctctaacgagtgtgtatttccctctccagctrttacagggactatgtggataaagagaaagaaatgtggcaccgcatgttcgcgccctgtggcgatggttctacagcaggagaaagttgaaggtaatcaaag

SEQ ID NO: 200698 - DNA, 201 bp, Homo sapiens
agggaacagcaggcacagagtcagaagtgggaaatgcagctggacgcctgcaccactgcctggtctctgccccttctctcctcccctttcccagcaacacycctgtgtccccaaggtcaccagaatcaggtggaaactgggttacatcacgggactggggaggcagcctttgttgggcctgctctgataacattcaggtgc

SEQ ID NO: 200699 - DNA, 201 bp, Homo sapiens
aagtttattgctacttactgtattctttttgatgctattgtaaatggagttgttttcttaatttcatttttgggtagttcgttgctagagcatagaaatawacctgacttttggccgggcatggtggctcacgcctgtaatcccaacactttgggaggctgaggcaggtggatcacgaggtcaggagatcgagaccatcct

SEQ ID NO: 200700 - DNA, 201 bp, Homo sapiens
cctggaagaaaacggacggagcaggagcagagggaggggagacgggcagtggtgcggcccccacccgggggctcggggcgcacaggggtccccgccgcccrcccggccgccccgcgattcctgcgcgtcagcagagcggaaacgcggagcagcgccagccggggcgggctggatggggcctggcagcgcggccggcgctcc

SEQ ID NO: 200701 - DNA, 201 bp, Homo sapiens
acaggatgggggggtcctcctctgaccacccccacatccccaaccccgggatgaatgaacgggctttttggaaattggggtcagcagggaggggtgggcgyctcctccaggggtcgctccccggagctggtcagagaatggtgtcaccaggtgtggccagctggggctgtcctcccagagcgggtaggaagggagacagga

SEQ ID NO: 200702 - DNA, 201 bp, Homo sapiens
cgcagctcggcatccaggtggcaggacagggaaaccaggcagcccttgcagtaagagtggccacactgcagcatcaggggctccttgaagacctccaggcwgatgggacactgaagccggtcctccagctctggcaggctcacctgccaagccatccacactcactgcccgggctgaaacacaggcatccgacctcagtcc

SEQ ID NO: 200703 - DNA, 201 bp, Homo sapiens
cacagatgagctcctggtccttctcgcagaaaaggctgagcgggttccggtggtgcacgcagaccttgggctccgggtccccagggagcctcagggcttckatcaccctggccagggagacgttgggcagggagctgctgccgtccaccgcctgccggcacacggggcagcgcagctcggcatccaggtggcaggacaggg

SEQ ID NO: 200704 - DNA, 201 bp, Homo sapiens
acataacccactccttgctttctgggcaagcctggtggccccagggaacttcatcaccctcctcggccccctgcctatggcctgagcctgggtgccagggygctgctgagaagggcacttggcctctctctgccacccaaatgctagacacagtccccaggaaagggcacagtccccaggaaagggctgacacaaagacca

SEQ ID NO: 200705 - DNA, 201 bp, Homo sapiens
accgtggatgtcctgaagccagccagcctcccggtggcctgtgggatggtatggtgcaggagtgacagcgcctctgccggggcttcccttcattcccccascaacactggagaccactgaagtctctgcactttgcaaggacggaggaggctggctcagaggggcccagaggcttcccagagaccccctacttgtcagatc

SEQ ID NO: 200706 - DNA, 201 bp, Homo sapiens
taggttcagagtgggagctggagaagaaggaattgtttaggggctagatgaggcacgatgcctcaggctgggaagactgctcagagcgcaggttctttgarttggctttgctgaggctgggttttggtaacacagccatgttctctccccttgagacctaggcatttgggagatggcttaacgggcaaggtataatctttg

SEQ ID NO: 200707 - DNA, 201 bp, Homo sapiens
tgtcccactactcggggggttgaggtgggaggatcacttgagcccaagagttggaggctgtgtgagctgtgactgcaccactgcactccagcctgggtgayagagcaagaccctgtctcaaaaaaaaaaaaaaaacatggagactcgtgtgtgtacacagcaccagaggacacaggctcaaacgtactgtcattatggcga

SEQ ID NO: 200708 - DNA, 201 bp, Homo sapiens
ccaagtgagcctcccacctcagcctccccagtagctgggattacaagcatgagccgctgcttccggcctgaattagtttttttaagacgaaagctagggamtcctatgtcccctttgtgtgatgcttccgcaaagctcttgaacctctgagccaaagggccggcacccaaaatgcagagagaagatttattcctgtacctc

SEQ ID NO: 200709 - DNA, 201 bp, Homo sapiens
aaaatattttagaaaataagccaggcatggtggtgcgtgcctgttgtcccactactcggggggttgaggtgggaggatcacttgagcccaagagttggagrctgtgtgagctgtgactgcaccactgcactccagcctgggtgacagagcaagaccctgtctcaaaaaaaaaaaaaaaacatggagactcgtgtgtgtaca

SEQ ID NO: 200710 - DNA, 201 bp, Homo sapiens
ctctcagcctccatgagtacccacagctgtgcctccaggtctcccccacagtgcccacactgccccgaagcctttctcgaccccgtgtcccctctcattascctccctgaccttggtcaccctccttcctcaagggtgccgtctacactggcttctccactctcagccagtgactccttgccccgctgccgtcccatctcg

SEQ ID NO: 200711 - DNA, 201 bp, Homo sapiens
cggtcagcttacctacgcgtggctttcattcttttgctcttggtttatcataacatttttcttctaggttgttttgctagtattgcctagcatttatactkttttcttagtgtatttttattaattttggtcaaaatttttattcatattttaaatgccaggtattcttctacatgtttcacatgtgttaatatttttaat

SEQ ID NO: 200712 - DNA, 201 bp, Homo sapiens
ccagggcctcaccttctgacagaatcggcttagagagcagaaaccaagtcctgggggagcaggctgcactgcctctctttgtggaggaggagggcgggtgmtgccaccaggggaccagggtatcatcaagaggcctcccctggaagtgcctgccctcccccagtgctcccttcaacccgcgttgctggagtggtggctcta

SEQ ID NO: 200713 - DNA, 201 bp, Homo sapiens
ccgcgggttcggttccgcccgcgtttgtgttggcagcggcccacggcgcgcggccgggcgcatgaaaggggcctctgtctgcgccccagccaccccgctcscctttcactcttaatataatcttcacttcatttttaacccagcggaggttctcttggaatttttccccttcttccaaaaatacatgtgcgtgcgtgtgtg

SEQ ID NO: 200714 - DNA, 201 bp, Homo sapiens
gacactgaagccggtcctccagctctggcaggctcacctgccaagccatccacactcactgcccgggctgaaacacaggcatccgacctcagtcctgtccmctcccctccccctgtccagcactcatccaccaccctcaaccctaaggagcaccagaattttagaggaaacactttgagtcctggatcccagtcctaaccc

SEQ ID NO: 200715 - DNA, 201 bp, Homo sapiens
gccccctgccccacacagccctgagaccacctcaccctcctgcaccccgacaccccgggctccctgccccacacaggcctgaggccatctcaccctcctgyaccccaacaccccgggctccctgccccacacaggcctgatgccacctcaccctcctgcaccccaacaccctgggctccctgccccacacagccctgaggc

SEQ ID NO: 200716 - DNA, 201 bp, Homo sapiens
ggagagtactctctggttggtcgagattctgggatttggtcctggctcagagctggcctgaggtgagccccggagcagcgggccctcagcccagtgccaaygccgaggccacaggaggcctctggggccaggggttccctggttccaaaatagctttcctgtgacccggctgtcctgctcagttgccaggaaaccccggga

SEQ ID NO: 200717 - DNA, 201 bp, Homo sapiens
cccgacaccccgggccccctgccccacacagccctgagaccacctcaccctcctgcaccccgacaccccgggctccctgccccacacaggcctgaggccayctcaccctcctgcaccccaacaccccgggctccctgccccacacaggcctgatgccacctcaccctcctgcaccccaacaccctgggctccctgccccac

SEQ ID NO: 200718 - DNA, 201 bp, Homo sapiens
ctccctgccccacacgaccctgaggccacctcaccctcctgtaccccgacaccccgggccccctgccccacacagccctgagaccacctcaccctcctgcrccccgacaccccgggctccctgccccacacaggcctgaggccatctcaccctcctgcaccccaacaccccgggctccctgccccacacaggcctgatgcc

SEQ ID NO: 200719 - DNA, 201 bp, Homo sapiens
gcgccccgacaccccgggctccctgccccacacgaccctgaggccacctcaccctcctgtaccccgacaccccgggccccctgccccacacagccctgagrccacctcaccctcctgcaccccgacaccccgggctccctgccccacacaggcctgaggccatctcaccctcctgcaccccaacaccccgggctccctgcc

SEQ ID NO: 200720 - DNA, 201 bp, Homo sapiens
gattacaggtgcctgccaccacgcccagctaatttttgtatttttagtagaaacgaggtttcaccatgttggccaggctgattttgaactcctgacctcargtgatcccccccagcttggcctcccaaagtgctgggattacaggcatgagccactgtgcctggccctcctctcatgtcttattcagagcctgatggtgcg

SEQ ID NO: 200721 - DNA, 201 bp, Homo sapiens
tcagcctcccgagtagctgggattacaggtgcctgccaccacgcccagctaatttttgtatttttagtagaaacgaggtttcaccatgttggccaggctgrttttgaactcctgacctcaggtgatcccccccagcttggcctcccaaagtgctgggattacaggcatgagccactgtgcctggccctcctctcatgtctt

SEQ ID NO: 200722 - DNA, 201 bp, Homo sapiens
tacactggcttctccactctcagccagtgactccttgccccgctgccgtcccatctcgctgctgatctgctcgggccatgggatccagcaggcatttcttygtcccgatcggacctgactttactactctgaaacttcctcctccccaagacactgtcttccttgaatttccaagcttccagctccgggatttcctggctc

SEQ ID NO: 200723 - DNA, 201 bp, Homo sapiens
aagcgattctcctgcctcagcctcccgagtagctgggattacaggtgcctgccaccacgcccagctaatttttgtatttttagtagaaacgaggtttcacyatgttggccaggctgattttgaactcctgacctcaggtgatcccccccagcttggcctcccaaagtgctgggattacaggcatgagccactgtgcctggc

SEQ ID NO: 200724 - DNA, 201 bp, Homo sapiens
tagaaatgagaaggaatgtgacttgcctgcctcgtggactgtggggttggagctggggagcgcaggagtgccgtggggtccttctgccgcagctcgcccgrgccttgtgctggaggcacgtgcagggagcaccaaggaggaaggcaagctgggtgcccctaacccatcgcgcaggaggtcagtgggatggtggtgtgccct

SEQ ID NO: 200725 - DNA, 201 bp, Homo sapiens
tcacccaggctggagtacagtggcgtgatctcggctcactgcaacctctgcctcctgggttcaagcgattctcctgcctcagcctcccgagtagctgggaytacaggtgcctgccaccacgcccagctaatttttgtatttttagtagaaacgaggtttcaccatgttggccaggctgattttgaactcctgacctcaggt

SEQ ID NO: 200726 - DNA, 201 bp, Homo sapiens
aactcagtttgagtcctgataaattttcagtgtttctggatgtgagtggagaattccagccaccagatgtcacctcctccaaacacagacctcctctaacragtgtgtatttccctctccagctgttacagggactatgtggataaagagaaagaaatgtggcaccgcatgttcgcgccctgtggcgatggttctacagca

SEQ ID NO: 200727 - DNA, 201 bp, Homo sapiens
tgccggtaatggtcattttgtcttctcctcttgtatcttttttgtttcccctcacaagacagagtttcactcttgtcacccaggctggagtacagtggcgwgatctcggctcactgcaacctctgcctcctgggttcaagcgattctcctgcctcagcctcccgagtagctgggattacaggtgcctgccaccacgcccag

SEQ ID NO: 200728 - DNA, 201 bp, Homo sapiens
gagagaagatttattcctgtacctcggggtgtcgggcagcttaagctcatctgttcacattgtttctgtgtgatcatgagagactcgatattatggtggcrtgggtgtttttggtccattttccttacattctttcttctatcctagtgaaatactcgggatacctggaacacatggacagacccttcgattctaattact

SEQ ID NO: 200729 - DNA, 201 bp, Homo sapiens
ttacagatattacactgtggggcatggagctgggccttctgagcatgcggagaggagagctggccaggtttctgttcaaaccgaactacgcctatggaacrctgggctgccctcccttgatccccccaaacaccactgtcctgtttgagattgagctgcttgacttcctggactgtgctgagtcagacaagttttgtgctc

SEQ ID NO: 200730 - DNA, 201 bp, Homo sapiens
ggtgggagcccagcagaccgcagaggccacagatgagctcctggtccttctcgcagaaaaggctgagcgggttccggtggtgcacgcagaccttgggctcygggtccccagggagcctcagggcttcgatcaccctggccagggagacgttgggcagggagctgctgccgtccaccgcctgccggcacacggggcagcgca

SEQ ID NO: 200731 - DNA, 201 bp, Homo sapiens
tcccccataactccatcacttggtaataggtccatggtttttaaggtatatcttcttctgtaatggtgaaattctctacttgtcttaatattaaacattcrgtccagattgctagttaaagcttgcttggcattagtgtctgagatgtgagtatctcttaggttacatttcaagccttttaggacttgccagcaatttcct

SEQ ID NO: 200732 - DNA, 201 bp, Homo sapiens
aaaaggcctattcatccccgacattttcatagcggtccataaactgctgctatctgcactttcagatgcgcccaccagcatcacaggtaaatgttgccttygtcactgatgctggccatgtgaaccctggccttcaggtctttcagtggcctttggagtacatatttgcaggtcttcagaactgagatgtgagccagagga

SEQ ID NO: 200733 - DNA, 201 bp, Homo sapiens
tggcaggacagggaaaccaggcagcccttgcagtaagagtggccacactgcagcatcaggggctccttgaagacctccaggcagatgggacactgaagccrgtcctccagctctggcaggctcacctgccaagccatccacactcactgcccgggctgaaacacaggcatccgacctcagtcctgtcccctcccctccccc

SEQ ID NO: 200734 - DNA, 201 bp, Homo sapiens
ataaattttcagtgtttctggatgtgagtggagaattccagccaccagatgtcacctcctccaaacacagacctcctctaacgagtgtgtatttccctctscagctgttacagggactatgtggataaagagaaagaaatgtggcaccgcatgttcgcgccctgtggcgatggttctacagcaggagaaagttgaaggtaa

SEQ ID NO: 200735 - DNA, 201 bp, Homo sapiens
gagcagagggaggggagacgggcagtggtgcggcccccacccgggggctcggggcgcacaggggtccccgccgcccgcccggccgccccgcgattcctgcrcgtcagcagagcggaaacgcggagcagcgccagccggggcgggctggatggggcctggcagcgcggccggcgctccgcgggttcggttccgcccgcgttt

SEQ ID NO: 200736 - DNA, 201 bp, Homo sapiens
ccagcactcatccaccaccctcaaccctaaggagcaccagaattttagaggaaacactttgagtcctggatcccagtcctaacccacatgaccttgggccycagtttccgcagctgtaaaacaaaagactgcagtgaaaaaaactggtcccttgaagatatgtgtgtgtgtgtgtgtgtgtgtgtgtgtgtgtgtgtctac

SEQ ID NO: 200737 - DNA, 201 bp, Homo sapiens
gactacaagtgtgtgccagcatgccctgctgattttttttattttgtaagatggggtctcattatatttcctaggctgatctcgatctcctggcctcaagygatcctcctgcctcggcctcccagagtgctgggattataggcatgagccaccgcgcccagccatggagcagtcacatctttaagatcactgtggagttgt

SEQ ID NO: 200738 - DNA, 201 bp, Homo sapiens
cagactatacatctccatcatcgcccacctttctgtttcccctaccgcaaataaacaacccctagagaggtgggagggtgtcactttttttttttttttttgagatggagtccctctctgtcacctaggctatagggcaatggcatgatctcggctcactgcaacctccgcgtcccgagttcagacgattctcctgtctca

SEQ ID NO: 200739 - DNA, 201 bp, Homo sapiens
gcgctgcaccagcagttcccagcaagcaggtgagacagactgccagactatacatctccatcatcgcccacctttctgtttcccctaccgcaaataaacaacccctagagaggtgggagggtgtcactttttttttttttttttgagatggagtccctctctgtcacctaggctatagggcaatggcatgatctcggctca

SEQ ID NO: 200740 - DNA, 201 bp, Homo sapiens
tgcgctgcaccagcagttcccagcaagcaggtgagacagactgccagactatacatctccatcatcgcccacctttctgtttcccctaccgcaaataaacaacccctagagaggtgggagggtgtcactttttttttttttttttgagatggagtccctctctgtcacctaggctatagggcaatggcatgatctcggctc

SEQ ID NO: 200741 - DNA, 201 bp, Homo sapiens
atattatggtggcgtgggtgtttttggtccattttccttacattctttcttctatcctagtgaaatactcgggatacctggaacacatggacagacccttmgattctaattactttaggaaaactcctcggctaatgaaacttggagagggtaggttcagagtgggagctggagaagaaggaattgtttaggggctagatg

SEQ ID NO: 200742 - DNA, 201 bp, Homo sapiens
tgagggagacatggaggccagagtactgctgacttagagggggaagaaactgatagcactgagcaggatactgagcaagcttcacccaccttctttgtccvttcttacagatattacactgtggggcatggagctgggccttctgagcatgcggagaggagagctggccaggtttctgttcaaaccgaactacgcctatgg

SEQ ID NO: 200743 - DNA, 201 bp, Homo sapiens
gtgcgctgcaccagcagttcccagcaagcaggtgagacagactgccagactatacatctccatcatcgcccacctttctgtttcccctaccgcaaataaacaacccctagagaggtgggagggtgtcactttttttttttttttttgagatggagtccctctctgtcacctaggctatagggcaatggcatgatctcggct

SEQ ID NO: 200744 - DNA, 201 bp, Homo sapiens
acggtgcgtacagagagcctcactccggctccatggaatagacgtgaaagtcaccgaggtgcgtttccaacctcagaattactcagcagccctttcctgcrtcactggctcctttttgattctgcaaggaggcccttcccagcttccctcttgatgcccacatcccccttcccttccaggcagccccacgcctctccaggc

SEQ ID NO: 200745 - DNA, 201 bp, Homo sapiens
caagacctgttcagtgcttggtggccaaatagtggttttgagcactgacttctgtgcttggcaagttccgtcagtttttgattccatgggacactgcttcmtcagagaacatcaggggaagactgaagacgtagacttccttctggctctagggtgtaaaatgggacaggttataacactggtgtggcttctgtcagattc

SEQ ID NO: 200746 - DNA, 201 bp, Homo sapiens
cgtgcgctgcaccagcagttcccagcaagcaggtgagacagactgccagactatacatctccatcatcgcccacctttctgtttcccctaccgcaaataaacaacccctagagaggtgggagggtgtcactttttttttttttttttgagatggagtccctctctgtcacctaggctatagggcaatggcatgatctcggc

SEQ ID NO: 200747 - DNA, 201 bp, Homo sapiens
attcagaggtgactccaacacagaaggctgtaaacagaagtgcatgatctgaaaaagaagagctcacagctgtagtaacacttcctttctttcaattactrtttttttaaatggagacatgttctcactatgttgcccaggctggtctcgaactcctgggctcacgtgtactaacacttccattgtggcattactgctttt

SEQ ID NO: 200748 - DNA, 201 bp, Homo sapiens
cctcccacgggccaaagaccccttccctcacacctcctcctactcctgaatcttcacccaccctcactgcctcctctgggtccttgaggggcagacatgcmtcttcctctgtgccagtgacactggccccaccggctccattgccatcctctacctgcaagcacagccccgtgcctccttccaaatgtgacagtcctccaa

SEQ ID NO: 200749 - DNA, 201 bp, Homo sapiens
tgatgcctgaagcctcaaacatattcagctgctgtattcaggtggtgcgtgaccccgaagcggccatgcacttttatccttctctcagatgttgaggaaaytcccccctcctttgctttttccgttgaagagaagctgaagcctttgggctgtagagtattgagccctgctacttggccagccttggggaaagaggatctt

SEQ ID NO: 200750 - DNA, 201 bp, Homo sapiens
tgagagctgtcttgtcctttccaccataaattctcggcaggaaaaaagatgaacaaagtgatcagaacctattcaggccacagttggtagattcctagtcrgaaacataggttacatctaaggaatcataggtgataggaggcggccagattcaggaagacattcaaatatgtgtggatggatttggacttgatgaagtgg

SEQ ID NO: 200751 - DNA, 201 bp, Homo sapiens
agtatgccttttccatctttgcattttctagcttctggagccatgccaggtgcacgattggtgctcaggaaatgttggttggactaagtgtgaaatagccraagcaacagaccagcctctaataaaacatcctccaggctggctctgggattggctgttggacccttggtattgccagggacagaaacctatctttagcat

SEQ ID NO: 200752 - DNA, 201 bp, Homo sapiens
tagcaggaggggcctcgttcaagagcagacagattttgttgcctgctgttcccaaacataccaaatgcaaggaatggctgccagaggaaagtgttccgaaygggggaaagccatgcctgccctgccccgcgtggcccgccttcacactgtctcctgccatccctgtggggagccgactgttggtgggcactctagatgcta

SEQ ID NO: 200753 - DNA, 201 bp, Homo sapiens
agacagagtctcactctatcacccaggctggagtgtactggcgccatctcggcctcactacaacctccgcctcccaggttcaagggattctcctgcctcarcctcccaagtagctgagattacaagcgcctgctaccacatccagctcattttttgtatttttagtagaggtggggtttccatgttggccaggctgatctt

SEQ ID NO: 200754 - DNA, 201 bp, Homo sapiens
gggtagctgggactacaggctgacaccaccacccctggctaatttctatattttttgtagagatcatgttgccaggctggtctcaaatttcttggctcaarcaatcctcccaccttggctctcaaagtgccaggattacaggcatgagccgccacacccggccacagctgggattttgatagggattgcgttcaatctgta

SEQ ID NO: 200755 - DNA, 201 bp, Homo sapiens
ctgcagcctcgaactcctgggctcaagcgatcctccttcctcagcctcctgggtagctgggactacaggctgacaccaccacccctggctaatttctataytttttgtagagatcatgttgccaggctggtctcaaatttcttggctcaaacaatcctcccaccttggctctcaaagtgccaggattacaggcatgagccg

SEQ ID NO: 200756 - DNA, 201 bp, Homo sapiens
atagcccactgcagcctcgaactcctgggctcaagcgatcctccttcctcagcctcctgggtagctgggactacaggctgacaccaccacccctggctaayttctatattttttgtagagatcatgttgccaggctggtctcaaatttcttggctcaaacaatcctcccaccttggctctcaaagtgccaggattacaggc

SEQ ID NO: 200757 - DNA, 201 bp, Homo sapiens
catcttcctgcctcagcctcccaagttgctgggaccacagccacgtgccaccacgcctggctaatttttgtattttttgtagagacaggttctcccgatgwtgcccaggctcgtctcgaactcctgggctcaagcaatctgcttgcctcagcctcccaaagtgttaggattacaggtgtgagccaccacgcccagcctgtc

SEQ ID NO: 200758 - DNA, 201 bp, Homo sapiens
cacttgaacccagaggacagagctttcagtgagccaagattgcaccactgcactctagcctgggtgacagagccagactgtttcaaaaaaaaaaaaaaaaattgaatcattaaatacgtagacttttgtgtctggcttctttcacttagcacaatactgtccaggttcatccatgtccatatgtcattccgtcattccttt

SEQ ID NO: 200759 - DNA, 201 bp, Homo sapiens
gagttcaaaaccagcctggccaacatagtgaaaccccgtctctactaaaaatacaaaaattagccaggcttggtggtgcgcacctgtagtcccagctactygggaggctgaggcaggagaatcgcttgaacctgagaggtggaggttgcagtgagcggagatcacaacattgcactccagcctgggtgacagaactagacc

SEQ ID NO: 200760 - DNA, 201 bp, Homo sapiens
gagcagcgccagccggggcgggctggatggggcctggcagcgcggccggcgctccgcgggttcggttccgcccgcgtttgtgttggcagcggcccacggckcgcggccgggcgcatgaaaggggcctctgtctgcgccccagccaccccgctcccctttcactcttaatataatcttcacttcatttttaacccagcggag

SEQ ID NO: 200761 - DNA, 201 bp, Homo sapiens
tgtaatcccagcactctgggaggctgaggtgggtggatcatgaggtcaggagttcgagaccagcctggccaacatggtgaaaacccgtctctactaaaaakacaaaaaatagctgggtgtggtggcgggtgcctgtaattccagctactcaggaggctgaggcaggggaattgcttgaacccaggaggcggaggttgcaat

SEQ ID NO: 200762 - DNA, 201 bp, Homo sapiens
tcacattgtttctgtgtgatcatgagagactcgatattatggtggcgtgggtgtttttggtccattttccttacattctttcttctatcctagtgaaatastcgggatacctggaacacatggacagacccttcgattctaattactttaggaaaactcctcggctaatgaaacttggagagggtaggttcagagtgggag

SEQ ID NO: 200763 - DNA, 201 bp, Homo sapiens
taaaaataaaaatgaaagccaggcacattggctcacacctgtaatcccagcactctgggaggctgaggtgggtggatcatgaggtcaggagttcgagaccrgcctggccaacatggtgaaaacccgtctctactaaaaatacaaaaaatagctgggtgtggtggcgggtgcctgtaattccagctactcaggaggctgagg

SEQ ID NO: 200764 - DNA, 201 bp, Homo sapiens
tgcggagaggagagctggccaggtttctgttcaaaccgaactacgcctatggaacgctgggctgccctcccttgatccccccaaacaccactgtcctgttygagattgagctgcttgacttcctggactgtgctgagtcagacaagttttgtgctctctcagctgtaagttccagagcacagatgtcagcactttatagag

SEQ ID NO: 200765 - DNA, 201 bp, Homo sapiens
tgaaagcagtgttgtgggtgtgcttaatgaaggcatgattaattctagctgggaggttcagggaaggcttcctggaagtgggggcatttgaactgagcctrgaagtttgaataaaatttatatcagtagaagctgggcacaggctcaggaggaagacattgcaggaagagggaactgtgtgagggagacatggaggccaga

SEQ ID NO: 200766 - DNA, 201 bp, Homo sapiens
gggagacaggaatgtctttctttcttcctgtgcccgggcctcctcggggtcgccaccgccgctgagggtcccccatcctgcgcccccctccggggactggrggtgcaggacaggatgggggggtcctcctctgaccacccccacatccccaaccccgggatgaatgaacgggctttttggaaattggggtcagcagggagg

SEQ ID NO: 200767 - DNA, 201 bp, Homo sapiens
gatttttagctctgatagtttttgcgtgtggattctttagggttttgtacataagactgttactcctcttgaccatctgccttccctctccacaggccctrttgcttctgcgccggcgatcagcaccccctgaagagcagcacctggtggaggccgccaagcttcctgttctcctgaacctgtcctttacatacctgaagc

SEQ ID NO: 200768 - DNA, 201 bp, Homo sapiens
gcagtgctcaactcagctactgcaaaaatgctgtctttttttttttttttttttttttagacagagttttgctcttgttgcccaggatggagtgcagtggygcaaattcggctcgctgcaacctccgcttcctggcttcaagcaattttcctgcctcagcctctcaagtagctgggattacaggcatgcgccatcacaccc

SEQ ID NO: 200769 - DNA, 201 bp, Homo sapiens
aaaaggctgagcgggttccggtggtgcacgcagaccttgggctccgggtccccagggagcctcagggcttcgatcaccctggccagggagacgttgggcarggagctgctgccgtccaccgcctgccggcacacggggcagcgcagctcggcatccaggtggcaggacagggaaaccaggcagcccttgcagtaagagtgg

SEQ ID NO: 200770 - DNA, 201 bp, Homo sapiens
cagctgctgagtcctgagatgtttttaatggctgtttgattcccaggttcttcacctaccaacgaggggagagagctgtggttctccatcattgggggagyggaagggagctcccagcgcagccgtggcagccaccttccaggagcaggggctggaatgtcctgtggccgcatctctcatggacgcggctgaaacgtgttt

SEQ ID NO: 200771 - DNA, 201 bp, Homo sapiens
tcttcaggtgtggacaggtgagttggaagccagtgacttgggaataaacacccaggaaaaggtagtagcagtgctcaactcagctactgcaaaaatgctgkctttttttttttttttttttttttagacagagttttgctcttgttgcccaggatggagtgcagtggcgcaaattcggctcgctgcaacctccgcttcctg

SEQ ID NO: 200772 - DNA, 201 bp, Homo sapiens
atagcactgagcaggatactgagcaagcttcacccaccttctttgtccattcttacagatattacactgtggggcatggagctgggccttctgagcatgcrgagaggagagctggccaggtttctgttcaaaccgaactacgcctatggaacgctgggctgccctcccttgatccccccaaacaccactgtcctgtttgag

SEQ ID NO: 200773 - DNA, 201 bp, Homo sapiens
agggagttaaatgcagctccaacagctaaccaatacctatggtctgaatgtttgtgtctccccaaaatgtgtatgttgaaacctaatcatccatgtgataytaagaggtgaggcctctgggagatgatgaggtcatgaagatgaaaccctcttacatggagttagtggccttataaaagaggtccctgagagctgtcttgt

SEQ ID NO: 200774 - DNA, 201 bp, Homo sapiens
tcggttcaccacaacctccgcctcccatgttcaagtgattctcctgcctcagcctccaatgtagctggaattacaggcacctgccaccacacccagctgayttcgtatttttagtagagatggggtttcaccatgttggccagacgggtctcgaactcccgacctcaggtgatctgcccgcctcagcctcccaaagtgctg

SEQ ID NO: 200775 - DNA, 201 bp, Homo sapiens
gctgtcttatttcacttagcatgtttttgaggtttatccatgttgtagcttgtacaaacctcattctttttttgttttttgttttttatgagacagagtcyctgttgcccaggctggagtgcagtggcacgatctcggctcactgcaacctctgcctcccaggttcaagcgattctcctgcctcagcctcccaagtagctg

SEQ ID NO: 200776 - DNA, 201 bp, Homo sapiens
ggcacttggcctctctctgccacccaaatgctagacacagtccccaggaaagggcacagtccccaggaaagggctgacacaaagaccacccttgccctccragagtaggaaaggcggcgggcacggtcacgggcagtcctccaggcacagtggcaggagcccggaaatgttggcagccagcccctcttgtctgcagagggg

SEQ ID NO: 200777 - DNA, 201 bp, Homo sapiens
aatgcccagagtttagagatggaagggaggaccaaggaaggctcatgactttctgcctgtgctgccatctcctgacacattttctccagttcttccatgtkcttttttttttttttttttttttgagacagagtctcactctatcacccaggctggagtgtactggcgccatctcggcctcactacaacctccgcctccca

SEQ ID NO: 200778 - DNA, 201 bp, Homo sapiens
gatggctctgctgctttttgtccattcatcagttggacatgtgggttgtttccacttcgtgattattatgactgatgcagtgagcgtttatgtacaagttmtcgtgtgaacacgttttcagttttcttgggtatgtgcctaggagtgcaattgctggattgtgtgggaactgtcaaaatttttgaggaactgccaaactgc

SEQ ID NO: 200779 - DNA, 201 bp, Homo sapiens
aaactcaaaatttcaattgtaaaattttcaggagttttgtgccctcgttaatgtcactttggtagtttgaaatcagctctgggaggaatatttacagcatrggaataggcaaatgctacaaacaggggtccacctcccccgagagctggctattaaacatgtaccagcacaccactgtgtgcaggacatgtcaaatgacaa

SEQ ID NO: 200780 - DNA, 201 bp, Homo sapiens
cagagaccccctacttgtcagatcccggcaccgggggctgcctttctggcctcacccggggcatagtgggctgggtccgccctgggggcctgctttgtggygccccacctctccccgcggtggaatctccacggtcatttcagagggaaggtcatgagaccctgggcaggaaggacttgccccgggggacagaggcacgct

SEQ ID NO: 200781 - DNA, 201 bp, Homo sapiens
agccctgttacctgctggatattgggtgagattctggggcctggttcagattgtctaaggtggtgaagtgtctttgtaaactgaccctgagtgtctggtcrtgtcttccagctgtggcactgggctgagtggaagttatctgtcagatgaagggcactattgggtgggcctggatatcagccctgccatgctgggtaagta

SEQ ID NO: 200782 - DNA, 201 bp, Homo sapiens
accagcctggccaacatggcgaaactccagctctactaaaaatggaaaaaattagccgggcgcgatggcgggtttctgtaaccccagctactcgggaggcygaggcaggagaatagcttgaacccgggagggggaggttgcagtgagccgacatcacggcactgcactccagcctgggcgacagagcaagactttgtttca

SEQ ID NO: 200783 - DNA, 201 bp, Homo sapiens
attagccgggcctacgggaggctgaggcaggagaatcacttgaacctgagaggcagaggttgcagtgagctgcgatcgcaccactgcactccagccttggygacagagtgagaccctgactcaataaataaataaatagctattggatactgtttcttttttttagggacagggtctctctattgcccaggctggagtgcc

SEQ ID NO: 200784 - DNA, 201 bp, Homo sapiens
gatccaccctcctcggcctcccaaagtgctgggattacaggtgtgagccaccgtgcacagcctaactttttttgtatttgttgtagagatgggtttttgcyatgttgctcaggcgatccacacacctgggcctcccaaaatgctgggattataggtgtgagccaccctggcctctttcttcctgcttttagtcctgcaggc

SEQ ID NO: 200785 - DNA, 201 bp, Homo sapiens
aatgatggaatggttttcaagaggccaagtaggaccagctgtgggtttatcccattttacctaaggattttacacaatacattgagtgcaggaatggcacrcaatgattgcactcagtaatataccaaaccactcctggctttgtttagaccctagacttgggccctcatccttctcgtagacctcttgcgaggattttcc

SEQ ID NO: 200786 - DNA, 201 bp, Homo sapiens
gcggtcgtgggggtggaacatgcgtattactaagcggtcgccgggctgatgacataaaaaccgggtgccggcaggcgccagtcgcaggtgtgctgctgagscgtgagaatggcgtcccgcggccggcgtccggagcatggcggacccccagagctggtaagtcccggggcccgcggacacccctctccccacttctgcggc

SEQ ID NO: 200787 - DNA, 201 bp, Homo sapiens
tgtaatcccagcaccttgggaggctgaggtgggaggatcatttgaggccaggagtttgagacctgcctgggcaacataatgaaacttcctttccagggagraaaaaaaaaaaaaaaaaaaaagctctgagagcatcttattttgtttaaaggcaagaaataaaatttccttttgtggagctctggcatctcccagctctgt

SEQ ID NO: 200788 - DNA, 201 bp, Homo sapiens
ggggagaggtgagatggtatagcaaactgtttttttggagacggattcttactgtattgtccagactggagtgcagtggcacgatctcggctcactgcaamctctgcctcctgggttcaagcgattctcctgccttagcctcctgagtagctgggattacaggtgctcaccaccatgcttggctaatttttgtattttagt

SEQ ID NO: 200789 - DNA, 201 bp, Homo sapiens
gtgcactttggttcctgcaggggctgagtgaaaatcaggatgaagttgaacccagggagtctgtgttcaccaatgagaggtaaagcaactgctgaagcctrccccggctgcagcgggggctgccacatttgttagacatggactttctctctgccctcacccaagcctctcaggtcacatgcagcagggacaccaaggtga

SEQ ID NO: 200790 - DNA, 201 bp, Homo sapiens
agtgatgttcctgtttctttcaggtccggggatcccgagctgtcctgcagctgtaccctgagaactcagagcaggtgagtccctcggctactgggtgtgcmggggagttgggggactcaacaggtaagctgtcctggggaagcgacaaagaatcttatgcagattggcgggaaaaggaggaaacatgcaccctagtgtggc

SEQ ID NO: 200791 - DNA, 201 bp, Homo sapiens
caacaactaaccaccccgttgttgcttcccttcatagcagaactcagacctgcctcttcttcccctcccaccattctctcaatccacttctcaggctgacrattctgtctcatcacaaattgttcttgtcaactccaccaccaatttccatcaagccacatctggtcacttgtgactttttttcatgtccttaatgtgcct

SEQ ID NO: 200792 - DNA, 201 bp, Homo sapiens
cttgccctgtctctggtttctacggatggtcacaggggtcttcggggttaccccgccctctttccttcttccctcatacccctcagtccttccttttcagmccctcctttccatccctgtcttcctgcccccaagctgtgggaccctaagctcctgctgtgaactgtcgactgtgctcttgaagtctaggtgatgatgtgt

SEQ ID NO: 200793 - DNA, 201 bp, Homo sapiens
tgtcttggcctcagaaagtgctgggattacagggcgttgaaccactgtacgtggcctcaacctgcactttctaagaagggaagctgtgggaggaggggtttctcttggagagccaggacggatgatgtcaagaggcttgaagtggttgggggagcaacgtggattgctccgttgcctgactaggtcccttcctttttagca

SEQ ID NO: 200794 - DNA, 201 bp, Homo sapiens
actgcactccagcctgggcgacaacagagcaagactccgtctcaaaaaaaaaaaaaatatgactccagtttcttttacctgtttctttaagtttcttcttsactggctattgggaagccatgcgtggctcacattctgtttctcacagacagtgctgctgtaggtttttgtgcattgttgatccttctagatgagagaaac

SEQ ID NO: 200795 - DNA, 201 bp, Homo sapiens
cattaacccgggaggcggagcttgcagtgagccgagatcgcgccactgcactccagcctgggcgacaacagagcaagactccgtctcaaaaaaaaaaaaaatatgactccagtttcttttacctgtttctttaagtttcttcttcactggctattgggaagccatgcgtggctcacattctgtttctcacagacagtgctg

SEQ ID NO: 200796 - DNA, 201 bp, Homo sapiens
tatcctcccagcggaggcctttcatggaccgatactcctgccgtttgcgaagggcctcccgccgggccctcaggcgccgttcccgctccagttgttccccrtagtgggcctggtagaaggcgtcaaagttgaacatcgtgcggttggcgccgggggaggcccgagaaccgtcgtgggtccgagaggtgggcggcggggtac

SEQ ID NO: 200797 - DNA, 201 bp, Homo sapiens
actttgggaggccgaggctggcggatcacaaggtcaggagatagagaaatcctggctaacatggtgaaaccccgtctctactgaaaatgcaaaaaaaaaaattagccgggcgtggcggcgggcgcctgtagtcccagctgctggggaagctgaggcaggagaatggcattaacccgggaggcggagcttgcagtgagccga

SEQ ID NO: 200798 - DNA, 201 bp, Homo sapiens
gtgggtggttttcaaagtcgaatgtgacaatttgtcctaaacatgtggtaaaagaggcgctgggcggtgggtacgggcgaggggtcagtcctggtgggggraaggaagtaatggccgtaggatgcttatcgtggcgccttgttgccaataaatctccaagacagcagttggtgtattattgtctgaatttcatagagggta

SEQ ID NO: 200799 - DNA, 201 bp, Homo sapiens
ttttttttaagagatggggtctacctatgttgcccaggctggtgttaaactcctggcttcaagcaattgtccggcatcaggctcccaaagtgatgggattrtaggcgtaagccactgtgcccagcttaaaaatgagtccgttttgaaggatctgagtggtttttgcctccttagcctggtctagcccacccctagttttcc

SEQ ID NO: 200800 - DNA, 201 bp, Homo sapiens
gcccacagctgggcacagccatgcatgttcctcacgtccaccataggtttatgctgcctgaccccttgggtctttgctcatttcccttagtttccctagtycattccccatggggagctgggacccttctggatgacctcttctctgaggcgcccatctcgtgctcccagggagcactcccatctcctccctcccagggga

SEQ ID NO: 200801 - DNA, 201 bp, Homo sapiens
gatttgcttttacacatctgcttggcagctggtgcaatgataagttgttaccacaaaataacatggtcctgaattacatggaatttttggggtcactttcraatggttgaatttgttgatcccaacttagaaggggtcagaaaagagtacctcgggatgattgatccgttttttgtttgtttttaacttggcttttttttg

SEQ ID NO: 200802 - DNA, 201 bp, Homo sapiens
ggatgaggaacaggatagttatttactgcaaagagagcctttattagctttgtcttcaaattaatgatgttaatttcagttgttcactaggattagctgakagtctgagattttaagtcctaaaaatgagttctttttaaattttgttttttgagacagacttttgctttgttgcctgggatggagtgcaatggtgtgatc

SEQ ID NO: 200803 - DNA, 201 bp, Homo sapiens
ttgctatgttgtccaggctggtttgaagtcctggcctcaggcaattctgtcttggcctcagaaagtgctgggattacagggcgttgaaccactgtacgtgrcctcaacctgcactttctaagaagggaagctgtgggaggaggggtttctcttggagagccaggacggatgatgtcaagaggcttgaagtggttgggggag

SEQ ID NO: 200804 - DNA, 201 bp, Homo sapiens
tacatctgggaacaagacccaggggggttggggaataatttcaagggtagcagatgctttttggtaatggtcagatgaggtgttttaagctgtgaaaaacygaaggccagcagtatggtctgtatgtttcggaaggggatggtcagtttttgtttgtcttcggggagaggtgagatggtatagcaaactgtttttttggag

SEQ ID NO: 200805 - DNA, 201 bp, Homo sapiens
ggagtgcagtggtgtgatcttggctcactgcagccttcgcctcccaggctcaagcgattctcctgcctcagcctcccaagtagctgagattacaggagcaygccaccacacccaactaatttttgtatttttagtggaggtgaggtttcactatgttggccgggatggtttcaatctcttgaccttgtgatccaccctcct

SEQ ID NO: 200806 - DNA, 201 bp, Homo sapiens
tgccagcctgggagctggcagggtgggtgggggtggatgactattgccatgaagagcttccctttatttgaagggtccagggctgctttgatctttttttyctgagactgtcctattccttttctgcacagggaagtcagacctgacacccagtacaccggccgcaagcgcaagccccgcttctaagtcaccacgcggttc

SEQ ID NO: 200807 - DNA, 201 bp, Homo sapiens; identical to SEQ ID NO: 35234

SEQ ID NO: 200808 - DNA, 201 bp, Homo sapiens; identical to SEQ ID NO: 35236

SEQ ID NO: 200809 - DNA, 201 bp, Homo sapiens
acaaatacacatcccatgggattttcagatttacaaggttagagcaaggcccaagagtgtatttttttggattctaaaactttgcagtctggccaacatgrtgaaacccagcctctactaaaaagccagacgtggttgttgtttttttttttttgagatggaggctctctctgttgcccaggctggagtgcagtggcggga

SEQ ID NO: 200810 - DNA, 201 bp, Homo sapiens
catcccatgggattttcagatttacaaggttagagcaaggcccaagagtgtatttttttggattctaaaactttgcagtctggccaacatggtgaaacccwgcctctactaaaaagccagacgtggttgttgtttttttttttttgagatggaggctctctctgttgcccaggctggagtgcagtggcgggatctcggctc

SEQ ID NO: 200811 - DNA, 201 bp, Homo sapiens
tcccatgggattttcagatttacaaggttagagcaaggcccaagagtgtatttttttggattctaaaactttgcagtctggccaacatggtgaaacccagyctctactaaaaagccagacgtggttgttgtttttttttttttgagatggaggctctctctgttgcccaggctggagtgcagtggcgggatctcggctcac

SEQ ID NO: 200812 - DNA, 201 bp, Homo sapiens; identical to SEQ ID NO: 35231

SEQ ID NO: 200813 - DNA, 201 bp, Homo sapiens
gctcccggagttgcggtccgggtggtagagaaagcactgacggtagtaagccgccttgatttgggcctgcgtggctgtggaggggacgccgagcagatcayacagcgccgtgcgcgaatacgagcagtcgccctgggaataagtcctcgctcctaggcccaggctgggtgcagaattttgtggaaagccacgggcctgcag

SEQ ID NO: 200814 - DNA, 201 bp, Homo sapiens
gtggccagtcacgtaaaggggggggcggggcggtcgtgggggtggaacatgcgtattactaagcggtcgccgggctgatgacataaaaaccgggtgccggmaggcgccagtcgcaggtgtgctgctgaggcgtgagaatggcgtcccgcggccggcgtccggagcatggcggacccccagagctggtaagtcccggggccc

SEQ ID NO: 200815 - DNA, 201 bp, Homo sapiens
cagccccagagtgcagaccctggagtgctcacatcctctggaatctggaggcagagacctctgctctgcaggtcccagaaaggcgtgtcagttccttctcrtgggactggacctcgtccctgtcggaagggtcaggcctgggtgcctgggcttctggagtggggcagatggtttgagaactctccagggtgacctgagtgc

SEQ ID NO: 200816 - DNA, 201 bp, Homo sapiens
gtggaagttatctgtcagatgaagggcactattgggtgggcctggatatcagccctgccatgctgggtaagtatgtcctgtctggcaccagggtggattaycctgatgggtgtggagaagccacaggtatttctctttctctgactgccttttctctaatgtagatgaggctgtggaccgagagatagagggagacctgct

SEQ ID NO: 200817 - DNA, 201 bp, Homo sapiens
actggacctcgtccctgtcggaagggtcaggcctgggtgcctgggcttctggagtggggcagatggtttgagaactctccagggtgacctgagtgcacttyggttcctgcaggggctgagtgaaaatcaggatgaagttgaacccagggagtctgtgttcaccaatgagaggtaaagcaactgctgaagcctgccccggct

SEQ ID NO: 200818 - DNA, 201 bp, Homo sapiens
ggcactccccgtcttcacctccttcctttagctccattgatgactttcccccttgctgcttctcccatggctcacctcttgccccctggttcgccactctrccctcactttgtactctttgtagaatcttgagatgactcctcctgtgtccccagccctgctctgcagctgctcctgctttgtgctggctcatcaggctca

SEQ ID NO: 200819 - DNA, 201 bp, Homo sapiens
cccctctccccacttctgcggccaccgcgtctgaattattcctctacatgccattttctctttttcgcagttttatgacgagacagaagcccggaaatacrttcgcaagtgaggggagcctgaatactgcggggcgtccgggggtcgggaagcggcaagttgcccctgttgctggcgttgcccggaaaggccgtagaattt

SEQ ID NO: 200820 - DNA, 201 bp, Homo sapiens
tactatccccagccctaacaatgcctcacacataatggaaattcaggaaatacttggtgaatgaaggaagagaggggtgtccaggccctaagctcatgcartcatttgtaagacagtgatgttcctgtttctttcaggtccggggatcccgagctgtcctgcagctgtaccctgagaactcagagcaggtgagtccctcgg

SEQ ID NO: 200821 - DNA, 201 bp, Homo sapiens
agtgctagagcagcccagcctaatagagttgcagatcccagtggttgtttattactagctaagtgatttgcttttacacatctgcttggcagctggtgcartgataagttgttaccacaaaataacatggtcctgaattacatggaatttttggggtcactttcgaatggttgaatttgttgatcccaacttagaaggggt

SEQ ID NO: 200822 - DNA, 201 bp, Homo sapiens
accacgtaggcctgggagatgcgcgtgaagcgctcggcggcctccgcgctcccggagttgcggtccgggtggtagagaaagcactgacggtagtaagccgycttgatttgggcctgcgtggctgtggaggggacgccgagcagatcatacagcgccgtgcgcgaatacgagcagtcgccctgggaataagtcctcgctcct

SEQ ID NO: 200823 - DNA, 201 bp, Homo sapiens
cccggtaactattccggttatgatgatgcctgggaccaggaccgcttcgagaaggtaagtggggccggagttgtctggggagggttatgaaggccagaccytgtggtctgagcagcctgtgtctgtctcagaagctgctcttgggggtcgctccgtttgtaagtttgttgagcaatgtgctagacgctccgtttacaggcc

SEQ ID NO: 200824 - DNA, 201 bp, Homo sapiens
ggctgaaacagacagacatgagttctggaaaggcaaattaacatccttcctttggctaacttcacagctgaggaatgccattggattgcttgaccacagcygggctcagacacaggttatagctgatgacaaagacaaactatgggggctgtgatggtgagccagcctgaagcttctgagatgggaacaaggtttagacaa

SEQ ID NO: 200825 - DNA, 201 bp, Homo sapiens
agaggagcagccgctgtgtggggcccacggtccgagacaccaacactgctacctaggaccatgagaatacagctcaaagggcctggctccaaagtgaggartggggacaagacacccccacccagggcagaaccatctttgggctcttccctcccatttagggctctttgtgagatggacagctccaggctgtcttcccca

SEQ ID NO: 200826 - DNA, 201 bp, Homo sapiens
gtcacatttcttcctgttttagtcccgggtgctcatgaagtaaccctggagtatgtcactggttttaagactaggttgaaaaaggcagatgggtccctttytgtacgaaactgagatttttactgacatgcagatgtgctttagagttaatgtttctacaaaaagtttctataaacaatagaaaatttctagcatgaagtc

SEQ ID NO: 200827 - DNA, 201 bp, Homo sapiens
atggtgaaggtggttgatagcgatgaagacggcagggttggggtggggagcattacgctgagaccaggaagaggggcggagaggtacttaacatttcaagwggagggtacatctcaattgagccttgaatggtaagtaaaaaagaacaggagttaaattatgaagggtttgtttcaagtcagtgaagttcaggatatacag

SEQ ID NO: 200828 - DNA, 201 bp, Homo sapiens
cgatatttaagattccaggaggcggtgcgttgccacggagacggagcagggctactaggacgcacgcgcgagatagaacctctagtctcgtggagagattraagatggcggcttctcaggcggtggaggaaatgcggagccgcgtggttctgggggagtttggggttcgcaatgtaagccttgtggccttgagctcgggcg

SEQ ID NO: 200829 - DNA, 201 bp, Homo sapiens
tctgtctcagaagctgctcttgggggtcgctccgtttgtaagtttgttgagcaatgtgctagacgctccgtttacaggccaaattagacacggtttctacycagttctgcaaagatgttcagtcttgttgaggaatggtgtgtataaacagtgaatctagtgtaatatggtgaaggtggttgatagcgatgaagacggcag

SEQ ID NO: 200830 - DNA, 201 bp, Homo sapiens
tccttccctccttaattttcctggaattttgctgagcattttaccttctcattctttgtaaatttctcattaaacattctaggaagagagatagctccctmcctctggaggttggggttacggggataggtagggggtctgttgggtttttgcagataagtggttatttttccttgggcaggtgccaactatggctgtgga

SEQ ID NO: 200831 - DNA, 201 bp, Homo sapiens
ggctgctggcagctggtgccttggggccattacctggatgttttcttcgaaccctccccattccgggccagctccatttcgggcgccgcccgccggcgccrctgtagttgccatgtcccttgagggctcccgtcgctgaaacccgcgctagccccgcgcgcggagtgggcaagatgtgggcctccggaaggtagacgtcca

SEQ ID NO: 200832 - DNA, 201 bp, Homo sapiens
gaaaagccaaatctccaagtagaatgggaactatctgggacatctagacagaatagtttaagccctaactccctttcttgatactttagtataattacttytggtcctgcacagggcctgttctctccagctccagacctggatctctttccaggctgacagtggtggaaagtgaggtggcagtgcaagaagggcctagag

SEQ ID NO: 200833 - DNA, 201 bp, Homo sapiens
ggtgcctgaatttaggataaggcccaagagactaggagcagactgagtgatgaagctgcagccatccttcccccatgccttccccactcaccagtgcctcrtatatctggaaggccagatggaccagggaagccatgcacccgtcgtgctgcccgtgcatctgtaagcctttcagcacactggtgaaaagccacgtaactg

SEQ ID NO: 200834 - DNA, 201 bp, Homo sapiens
ctcactccaccattgtatcctcaggcagctttcaacctagtgcagccacccccccaaagttgtctgtcctgcttacgataatagtgtcagacgtcttcatyccatggagtaggatagcaaccagagtgaagaccagcatgagaggtccatagagttcacctgcaattttctgtcaatataccaattcattcaggctggagg

SEQ ID NO: 200835 - DNA, 201 bp, Homo sapiens
atctgactgtagtgtgcatgaaggtctaggtgttaggagggaagcttcttcaagagaaggctcctcacctgcttcgcacctgagcaggctccacatcaaaktagggtctgaggatgtcgatgttggcgtacaagctgaaggccctggaggcttgtcttttcccagcctgccacatctgaagtaaggaagatgggcataggt

SEQ ID NO: 200836 - DNA, 201 bp, Homo sapiens; identical to SEQ ID NO: 35238

SEQ ID NO: 200837 - DNA, 201 bp, Homo sapiens
catctgagacagaggaaacagcaagtgcaaaggcttggaggtgggagtatgatggaggcacacagcaagagggctggtccagagatgataactacatgtarggtgtcttctcctcaccagactgcaaggaaactgacctggttcagaaggaacagtatttaggaggctaagagcagaactccaaggtctcacaggctcact

SEQ ID NO: 200838 - DNA, 201 bp, Homo sapiens
gtgcctgagtggaccttgaggctggggaggccagactgaggggtcattcatggaagggcaagatgtgtgaactctaaaggggatgttagcactaaagactkcccagccctggtccttggaggtactatacttgatactgtgccaagtttagcagtagcctgtaccatggatcccatcaggtgaccagattcttgcccaaag

SEQ ID NO: 200839 - DNA, 201 bp, Homo sapiens
ttaccatatggaggtaggtgaaaagaggtccgaggatgggggataccagggcttcatagtgctctgggggacagaagagcaccagaggctttacaaagacmcgtgctgcaacaagttaagaaattttagtgcataggcacacatctctcacctgccaggtggtgggttgcacccctgggcagaatcaatccctaaaggatt

SEQ ID NO: 200840 - DNA, 201 bp, Homo sapiens
ggctttggggccccaggacagatgccgaccaaggcctggctactctttttaacatcactcttgcccaccacacctggctccttaccagcagtgccaacatytgcagcatggtgatctgggcgttgcacaggtaggcaaggaagtaaatgaaggatgagactcccagccagtagccgaagcaggtgccaatggctgtgccca

SEQ ID NO: 200841 - DNA, 201 bp, Homo sapiens
tccctctgagactgggttaggtctcccgataaacactcagagccctgccactttccttcacagcaaataccacaattatgactgcacagttattttcatgyttattttcaatgggaaaatgaattaaagcagtatcctaacaaggtcacaactggaaggccaggcgtggtggctcatgcctataatcctggcactttggga

SEQ ID NO: 200842 - DNA, 201 bp, Homo sapiens
agatagagcaggaagagcatgtgtagggcagccagggtgccacagaggagcagccgctgtgtggggcccacggtccgagacaccaacactgctacctaggrccatgagaatacagctcaaagggcctggctccaaagtgaggagtggggacaagacacccccacccagggcagaaccatctttgggctcttccctcccatt

SEQ ID NO: 200843 - DNA, 201 bp, Homo sapiens
gtttttaatgacatgatacacttagatacataatctcatctcttccttccagttctgcctcttccctctggttgctgtgacctgttttgtttctctctctrattttctgaccttttgggttatgtagagacttttgaaaggatatgaagcatgggtctgagtcggtagtcaggaatattgttcaagttgacaaaggctgag

SEQ ID NO: 200844 - DNA, 201 bp, Homo sapiens; identical to SEQ ID NO: 35240

SEQ ID NO: 200845 - DNA, 201 bp, Homo sapiens
acacctgtaatcccagcactttgggaggccaaggcgagtggatcacggggtcaagagagcgagaccatcctggctaacatggtgaaaccccgtctctactaaaaaaaaaaaaaaaaaaaaaaaaaattagtcgggcatgggggcgagcgcctgtagtcccagctactcgagaagctaaggcaagagaatggtgtgaacctg

SEQ ID NO: 200846 - DNA, 201 bp, Homo sapiens
gaacagaggaagtgacatctgaggtaggttttgagggaagatgagtagtcagttagatggaaaagaagaggaagatggtgtgctattattacttgtttcartgacaggtgcagtgatgagaggtgatggggtcatgaagacggggagcccatcagagcccagggcttgaaatctgactgtagtgtgcatgaaggtctaggt

SEQ ID NO: 200847 - DNA, 201 bp, Homo sapiens
gactctctctgaccactttcttctcctttgggtcttcgttttatgcaaaagttgggaatggacagcagtgatccactgaaggacattattactagtgactstgtccagttggatagacattacagaattaaaataagtgagtaaggtaacagtagcccctatgaaggctggatctcagagtctgcctgctggtaacagcct

SEQ ID NO: 200848 - DNA, 201 bp, Homo sapiens
gaaaaatctcgcgatatttaagattccaggaggcggtgcgttgccacggagacggagcagggctactaggacgcacgcgcgagatagaacctctagtctcrtggagagattgaagatggcggcttctcaggcggtggaggaaatgcggagccgcgtggttctgggggagtttggggttcgcaatgtaagccttgtggcctt

SEQ ID NO: 200849 - DNA, 201 bp, Homo sapiens
tctgcagcctcatcttctccactgcagaaaaccagggggccaagttccacaggagtgcagaaaaggaaggacaaggaaagcagcgaccctaatcagactcwctctgaccactttcttctcctttgggtcttcgttttatgcaaaagttgggaatggacagcagtgatccactgaaggacattattactagtgactctgtcc

SEQ ID NO: 200850 - DNA, 201 bp, Homo sapiens
ccagggtcgaggagaggtgggatcggccggaacacaaaaaggagaagcccggatgtttggacaaaagcaacttccggaagctggggacgtggacgggggcsgggaaaaatctcgcgatatttaagattccaggaggcggtgcgttgccacggagacggagcagggctactaggacgcacgcgcgagatagaacctctagtc

SEQ ID NO: 200851 - DNA, 201 bp, Homo sapiens
gccctttcaggtcaatgttaatcccactgactttagtgtgcacgaagacccaaagaagagagttttgtaaatggagcggacttccaggcccagagggggartccccaagacacttctggacatcgccggccctccggctgctggcagctggtgccttggggccattacctggatgttttcttcgaaccctccccattccgg

SEQ ID NO: 200852 - DNA, 201 bp, Homo sapiens
actcttaaaaaacaacaaaaaaaggggacatccattagggataagataaaccttaggagaaaaaaggttacatttcttacctaatatagcagatttttccrcgtcaagcatatccagagccttggtgaaaggctctgccattttggctagcatttctggtgcatataatgtattgtgggttctgaaagaaacaagaatgct

SEQ ID NO: 200853 - DNA, 201 bp, Homo sapiens
gggtaggtggggaggggttctcaaaggagctgacccattttctgcattggctgcagagccttgcagtcctggccaggagttcttggccttgtgcctttcaraagtgccgacaggcatcaaggaggtacttacgcagctacagctcagtggcagctgcaaaccccatctacgaaacatgtcatcaggactgtcctttaatag

SEQ ID NO: 200854 - DNA, 201 bp, Homo sapiens
gcaggtagaaagccaagagggttgtgcttttgctgttagtagcttaggaggagtattcttcctaaccctagaagggtttcctataggcacgttccctcttyctctccaggcaaagatcatgccaagttttcaccagtggcaacagccagttacaggctcctgccagacatcaccctgcttgagcccgtggaaggggaggca

SEQ ID NO: 200855 - DNA, 201 bp, Homo sapiens; identical to SEQ ID NO: 35239

SEQ ID NO: 200856 - DNA, 201 bp, Homo sapiens
agaagctaaagaaggttgtgaggcttgcccgggttcgagatcattatatctgtgagtatgaagtggtgagatgagtgggcagtgctctttggtgctgcagyttccttccagtctagatgtgaagtttatgagtaagttttacaggcaagccctgcctagactaaagtgtctctttggtccccagtctctgttgagtcaacg

SEQ ID NO: 200857 - DNA, 201 bp, Homo sapiens
ggtgagaaaatgaaattttgggagaagtggactatctgggttcaaatcctggttgactgtgatgttgggtaagttacttatctttgtacatcagtgtcttycatctgtgagaacacttgccttgtctcccaagtttgccataattaaatgggaaacacgtaaagcattcagcatagtgctggcactcagacgtttactagt

SEQ ID NO: 200858 - DNA, 201 bp, Homo sapiens
atgtcaaaaatatcctgtgttaacagtgaaaaaatcttaaagttcttttcctaaaatcctaaatggcactgatattgaattccattatactcttagtttarctgcatttccgtcaggctgcacattatggtcactggcccaaaaagtaggaataaaaaaataggaaggaggacatccttgtaacaaactctccttcaccat

SEQ ID NO: 200859 - DNA, 201 bp, Homo sapiens
taggcgtgagccactgcacctggccttacaaaacagttttataatgattatttttgagatggggtctcactgtgttgcccatgttacctgtgaactcatgmtcaagtgatcctcccacttgaggcttccaagtagctggaactatcggcatgtgccactgtgtctggctttatcttataatgatcatataattattattaa

SEQ ID NO: 200860 - DNA, 201 bp, Homo sapiens
aggcagatcacctgaggtcaggagttcaagagcaccccagccaacatggtgaaaccctgtctctactaaaaatacaaaaattagccaggcatggtggtggrtgcctataatcccagctacttgggaggctgaggcaggagaattgcttgaacctgggaggtggaggttgcggtgagccgagattgcgccattgcactccag

SEQ ID NO: 200861 - DNA, 201 bp, Homo sapiens
tctagtctctgttaagccacatgtctcttgattacgtgtattattgttcattatggcagggtgggagtggagcagacaatctcaaggttgcctctgtttaytgcctgcatgaatgatccttatacttcttaggtaccgggaagccagtgttgaagtgatggagataatgtctcgttttgctgtgattgaacgtgccagcat

SEQ ID NO: 200862 - DNA, 201 bp, Homo sapiens
tcttatggccatacatggtggtttacacctgtaatcccatcactttgtgaggccaaggctgggggctggggaggtggggggcatatggggggggattgctygagtccaggagtttgagaccatccttggtgacatggtgaaaccccgtctctacaaaaaatacaaattagctgggcgtggtggcatctgcctgtagtccta

SEQ ID NO: 200863 - DNA, 201 bp, Homo sapiens
tggcagggcagcatggccagaagtcaccttatatattgtagggacagcaatagaactgtccctgcctgaagggttcagaagcccatgttggcctgggcttmtcctgctgtaatggcttgtacatcagtgacatggccgatgcccttggtgacaccctcccggaacagcagtttggcgcccaccttcaggtactctgggtgt

SEQ ID NO: 200864 - DNA, 201 bp, Homo sapiens
ttgtacatcagtgacatggccgatgcccttggtgacaccctcccggaacagcagtttggcgcccaccttcaggtactctgggtgtttcaggaagcggaaaygtaccactgccttctcgcctgtccgcagtttgtcctgcagcaaataagtggtcactcccctggccagtgccttctgtcccattctctgccagccgtggct

SEQ ID NO: 200865 - DNA, 201 bp, Homo sapiens
ctagaattcagatgctcctcataactttatttctggtctccatcctttccacccacagaatgacagggtagccacccagctggttgtgagcattcgtgtayaaggagacaaacgcctcagcagcctgcgccgctgctgtgcccttacccgctatgatgctcacaagatgagccatgatgcatttactgtcatcaagaactg

SEQ ID NO: 200866 - DNA, 201 bp, Homo sapiens; identical to SEQ ID NO: 35256

SEQ ID NO: 200867 - DNA, 201 bp, Homo sapiens
tggccgggcggggggctgaccccccaacctccctcccggacggggcggctggccgggcagaggggctcctcacttcccagtaggggcggccgggcagaggygcccctcacctcccggacggggcggctggccgggcaggggggctgacccccccacctccctcccggactgggcggctggccgggcggggggccgacaccc

SEQ ID NO: 200868 - DNA, 201 bp, Homo sapiens
cttgccctcgggcccgcggggcccgtccgctcctccagccgctgcctcccgggcggcgctcgccggcgcggcggcaaagactgagacagctctgctgcccrctgaactccatcctcccggcggtcgggcggcggcggctgcggtcggtcgcggcagcggctccgcttcatatctgcagctggggcccgcgggcgtcagcgc

SEQ ID NO: 200869 - DNA, 201 bp, Homo sapiens
ttgtatgccaggaaactgggatgaagaccgaatatatatttcacaatattataagtatccttttctggctgtgtgtatgagtatattgctctttcttttcyttttttttttttttttgtgggtgggggacggagtttcactcttgttgcccaggctagggtgcaatggtgcaatctcggctcaccacaacctccatctctt

SEQ ID NO: 200870 - DNA, 201 bp, Homo sapiens
atcctagggatagaatacatgggtgaactgacccagttcactgaatcccagctccagagtcattttggggagaagaatgggtaagtgattcattttttttwaaatcataacctttatggagatgctatattcaaatatagacaaaaccatctagtaaaatccagacctatctttaggttaacatttgtttcttgagattat

SEQ ID NO: 200871 - DNA, 201 bp, Homo sapiens; identical to SEQ ID NO: 35261

SEQ ID NO: 200872 - DNA, 201 bp, Homo sapiens
ctctgtttattgcctgcatgaatgatccttatacttcttaggtaccgggaagccagtgttgaagtgatggagataatgtctcgttttgctgtgattgaacrtgccagcattgatgaggcttacgtagatctgaccagtgctgtacaagagagactacaaaagctacaaggtcagcctatctcggcagacttgttgccaagc

SEQ ID NO: 200873 - DNA, 201 bp, Homo sapiens; identical to SEQ ID NO: 35259

SEQ ID NO: 200874 - DNA, 201 bp, Homo sapiens; identical to SEQ ID NO: 35262

SEQ ID NO: 200875 - DNA, 201 bp, Homo sapiens
acttcttaggtaccgggaagccagtgttgaagtgatggagataatgtctcgttttgctgtgattgaacgtgccagcattgatgaggcttacgtagatctgmccagtgctgtacaagagagactacaaaagctacaaggtcagcctatctcggcagacttgttgccaagcacttacattgaagggttgccccaaggccctac

SEQ ID NO: 200876 - DNA, 201 bp, Homo sapiens
tggggatgttgtgggataccaagttttagagatgtcttgagtttctggttttatttttgtttttaatgtagaaaccattagttacagctattaagctctgygtgtgtgtatgttatgtgtatgtttatattcaccaactttgatgggttgacagtaatgaggtttttatactttgcatgcttccaggtcctggcaaaactg

SEQ ID NO: 200877 - DNA, 201 bp, Homo sapiens
ctgggtgtggtggctcacacctgtaatcccagcactttgggaggccaaggcaggtgaatcacctgaggtcaggagttcaagaccagtctggccaacatggygaaaccccatctctactaaaaatacaaaaattagccgggcgcagtggcaggtgcctgtaatcccagctacttgggaggctgagacaggagaatcacttga

SEQ ID NO: 200878 - DNA, 201 bp, Homo sapiens
caggcaactacccaaaaccattggctgtagtaagaacttcccaggaaaaacagctcttgctactcgggaacaggtaagctggcattcttgacagaacactrcctcttttaaaggggtcagtgggtaggttttggtagctgtggaaggtttaataggttagaggagacctttataaagtatgaagaaaacagatgttctgtc

SEQ ID NO: 200879 - DNA, 201 bp, Homo sapiens
agtctggccaacatggcgaaaccccatctctactaaaaatacaaaaattagccgggcgcagtggcaggtgcctgtaatcccagctacttgggaggctgagrcaggagaatcacttgagtccaggaggcggagggtgcagtgagccgagattgcgccactgtactccagcctgggtggcgacagagcaagactctgtctcaa

SEQ ID NO: 200880 - DNA, 201 bp, Homo sapiens
actgaattcccagaatatatgctctcatttgtcctgaaccttttggagagctgtttacaaagtagaatgtcttacgtttgctgctaattagatagttatgrtgtgacctatcaattctttgtctcctttgttatcagccgtagtcttggaggaaagctaggggcctctgtcattgagatcctagggatagaatacatgggt

SEQ ID NO: 200881 - DNA, 201 bp, Homo sapiens
catggcgaaaccccatctctactaaaaatacaaaaattagccgggcgcagtggcaggtgcctgtaatcccagctacttgggaggctgagacaggagaatcrcttgagtccaggaggcggagggtgcagtgagccgagattgcgccactgtactccagcctgggtggcgacagagcaagactctgtctcaaaaaaaaaaaag

SEQ ID NO: 200882 - DNA, 201 bp, Homo sapiens
tatttttgagatttctgaactgctttgttttggattgaatgatggcatctgtggtcaaaaagtttctaatatgtttatagattacttgtgttaaatgttasttgtttttgcttgtgatcatataatatgttttctgtttccttttttttctaaccttagaataattgcagtgagttatgaagctcgtgcatttggagtcac

SEQ ID NO: 200883 - DNA, 201 bp, Homo sapiens
gtggcaggtgcctgtaatcccagctacttgggaggctgagacaggagaatcacttgagtccaggaggcggagggtgcagtgagccgagattgcgccactgyactccagcctgggtggcgacagagcaagactctgtctcaaaaaaaaaaaagaaaaaaaaaaaaaagatgtaacatgtaaactttgcttttgctgctgaac

SEQ ID NO: 200884 - DNA, 201 bp, Homo sapiens
ttgttcaagtggagcagcggcaaaatcctcatttgaggaataaaccttgtgcagttgtacagtacaaatcatggaagggtggtgggtatgtatcattgttwttgtcacaactattcaatggtaacacagtggcactgtggcaggtcctttgttgttgtggtggtggtggtggtggtgacagggcctttctctgttgtccca

SEQ ID NO: 200885 - DNA, 201 bp, Homo sapiens
ggctcaggcctgtaatcccagcactttgggaggccaaagcgggcagatcacaaggtcaggagatcgagaccattctggctgacacggtgaaaccccatctytactaaaaatacaaaaaattagctgggcgtggtggcaggcgcctgtagtcccagctactcgggaggctgaggcaggagaatggtgtgaacccggcaggca

SEQ ID NO: 200886 - DNA, 201 bp, Homo sapiens
tttgaggcatttctttattttttagagagttccttgtcatatagacgtgttcatagtctgaatgctttctgccttggtagttctggcattgtgctaaaaaygtttgcctccgtgattcttccttttccatgcttctattattgaccatctgcctgccgattgaccctttcagttactattgtctagtctctgttaagccac

SEQ ID NO: 200887 - DNA, 201 bp, Homo sapiens
tctaactgtccataaaatgttgtgttacagaaaaatggctactggacaggatcgagtggttgctctcgtggacatggactgtttttttgttcaagtggagyagcggcaaaatcctcatttgaggaataaaccttgtgcagttgtacagtacaaatcatggaagggtggtgggtatgtatcattgttattgtcacaactatt

SEQ ID NO: 200888 - DNA, 201 bp, Homo sapiens
aactgaattcccagaatatatgctctcatttgtcctgaaccttttggagagctgtttacaaagtagaatgtcttacgtttgctgctaattagatagttatratgtgacctatcaattctttgtctcctttgttatcagccgtagtcttggaggaaagctaggggcctctgtcattgagatcctagggatagaatacatggg

SEQ ID NO: 200889 - DNA, 201 bp, Homo sapiens
tttttaatcttcttctcaaattctaactcccagagtaactgaattcccagaatatatgctctcatttgtcctgaaccttttggagagctgtttacaaagtrgaatgtcttacgtttgctgctaattagatagttatgatgtgacctatcaattctttgtctcctttgttatcagccgtagtcttggaggaaagctaggggc

SEQ ID NO: 200890 - DNA, 201 bp, Homo sapiens
gatgggcgggcgggcagagacgctcctcacttcctagatgtgatggcggctgggaagaggcgctcctcacttcctagatgggatggcggccgggcggagaygctcctcactttccagactgggcagccaggcagaggggctcctcacatcccagacgatgggcggccaggcagagacactcctcacttcccagacggggtg

SEQ ID NO: 200891 - DNA, 201 bp, Homo sapiens
agtagccagtctcctaggcacttctcttagcgttccctccccaacccatgcacccacctcaccttgcgaagcagtgcacggtcaaagtccccaagcgccartgtagcagcctgaccagctcgcagcacacgacaggcagagcggttgcgctggatgctgcatactctcagctccaggaagcagccatcatccgtggggccc

SEQ ID NO: 200892 - DNA, 201 bp, Homo sapiens
cttagcgttccctccccaacccatgcacccacctcaccttgcgaagcagtgcacggtcaaagtccccaagcgccagtgtagcagcctgaccagctcgcagyacacgacaggcagagcggttgcgctggatgctgcatactctcagctccaggaagcagccatcatccgtggggcccaccaccagctggtccccctcacggc

SEQ ID NO: 200893 - DNA, 201 bp, Homo sapiens; identical to SEQ ID NO: 35272

SEQ ID NO: 200894 - DNA, 201 bp, Homo sapiens; identical to SEQ ID NO: 35273

SEQ ID NO: 200895 - DNA, 201 bp, Homo sapiens
ggtggtggcatggaacagtaagactatctctgcctcaaacaccgagcagatggtaggattcatctccgggctcaccatcaccatgccctggggaggaacaraccccaggcccaggaagggcagctctaacatcagactctccctccccagccaccccacaccctttatagctcctgaatttcctcttcctctacacaactc

SEQ ID NO: 200896 - DNA, 201 bp, Homo sapiens; identical to SEQ ID NO: 35253

SEQ ID NO: 200897 - DNA, 201 bp, Homo sapiens; identical to SEQ ID NO: 35255

SEQ ID NO: 200898 - DNA, 201 bp, Homo sapiens
gtctcactatgttgcccgggctggtcttgatgagttcctggcctcaagcaattttcccacttcagcgtcccaaagtgccaggattataggcgtgagccacygcacctggccttacaaaacagttttataatgattatttttgagatggggtctcactgtgttgcccatgttacctgtgaactcatgctcaagtgatcctcc

SEQ ID NO: 200899 - DNA, 201 bp, Homo sapiens
tcttggctatatgccatgtgccgagggattgaacatgatccagttaaacccaggcaactacccaaaaccattggctgtagtaagaacttcccaggaaaaayagctcttgctactcgggaacaggtaagctggcattcttgacagaacactacctcttttaaaggggtcagtgggtaggttttggtagctgtggaaggttta

SEQ ID NO: 200900 - DNA, 201 bp, Homo sapiens
ccttcaatgaggtaaagggtaaatgtcattttaaagttattattaaagtatcggccgggcgcagtggctcacgcctgtaatcccagcactttgggaggccraggtgggtgaatcacctgaggtctgtctcagttctacaagtagtaggaatctctgtcttagctctacaagtagtaggaatctgagctcttccatctggga

SEQ ID NO: 200901 - DNA, 201 bp, Homo sapiens; identical to SEQ ID NO: 35258

SEQ ID NO: 200902 - DNA, 201 bp, Homo sapiens; identical to SEQ ID NO: 35265

SEQ ID NO: 200903 - DNA, 201 bp, Homo sapiens
aggcttacgtagatctgaccagtgctgtacaagagagactacaaaagctacaaggtcagcctatctcggcagacttgttgccaagcacttacattgaaggkttgccccaaggccctacaacggcagaagagactgttcagaaaggtacttccatagcatcatactgcttctgcttcctgcctttggaacctgctttgcttg

SEQ ID NO: 200904 - DNA, 201 bp, Homo sapiens; identical to SEQ ID NO: 35252

SEQ ID NO: 200905 - DNA, 201 bp, Homo sapiens
gattgcttgtttgttggtggggagaaatcctcacacatttggtcacagaagtctaccttattgattgttgttgagtgaaagaatctttttttttttttttwaaatttatttttttattgataattcttgggtgtttctcacagagggggatttggcagggtcatgggacaatagtggagggaaggtcagcagataaacaag

SEQ ID NO: 200906 - DNA, 201 bp, Homo sapiens
caatgagctgttgggcacacctcccagacggggtggtggccgggcagaggggctcctcacttcccagtaggggcggccgggcagaggcgcccctcacctcscggacggggcggctggccgggcggggggctgaccccccaacctccctcccggacggggcggctggccgggcagaggggctcctcacttcccagtaggggc

SEQ ID NO: 200907 - DNA, 201 bp, Homo sapiens
aaagataaaagggcaatataatatagttatttggttttgttttaacaagaataatcatttaatttcaccttaacgttttttgctggtcttattaggtcttrgctatatgccatgtgccgagggattgaacatgatccagttaaacccaggcaactacccaaaaccattggctgtagtaagaacttcccaggaaaaacagct

SEQ ID NO: 200908 - DNA, 201 bp, Homo sapiens
gtgtgtatgttatgtgtatgtttatattcaccaactttgatgggttgacagtaatgaggtttttatactttgcatgcttccaggtcctggcaaaactggcytgtggactaaacaagcccaaccgccaaaccctggtttcacatgggtcagtcccacagctcttcagccaaatgcccattcgcaaaatgtaagtattcaggc

SEQ ID NO: 200909 - DNA, 201 bp, Homo sapiens
caataaggtgaaggctaatagtagatttcaaagagaaacattgatatccttagtcaaatacagtagggacagtgggacattgaaattattacacataggcygggtgcagtttcgcacgcctatgtgagtggatcgcgtgagcccaggagttgaagagcagcctgggaaacatgttgaaacccagtctctacaaaaaattag

SEQ ID NO: 200910 - DNA, 201 bp, Homo sapiens
gattctcttcagattgataacctcacctctccagacctgcagctcaccgtgggagcagtgattgtggaggaaatgagagcagccatagagagggagactgkttttcagtgttcagctggaatttcacacaataaggtgaaggctaatagtagatttcaaagagaaacattgatatccttagtcaaatacagtagggacagt

SEQ ID NO: 200911 - DNA, 201 bp, Homo sapiens; identical to SEQ ID NO: 35270

SEQ ID NO: 200912 - DNA, 201 bp, Homo sapiens; identical to SEQ ID NO: 35271

SEQ ID NO: 200913 - DNA, 201 bp, Homo sapiens
gagcactgccctgaatcctgtcttctccctcaggactgccctttcctggccacaccaagtttggcacctctccagaaagttggcagggagcaagtggcagwcagcacccctctctccctagcctattaacacacagagccgccaatggcagggcagcatggccagaagtcaccttatatattgtagggacagcaatagaac

SEQ ID NO: 200914 - DNA, 201 bp, Homo sapiens
catggtcatgaaaaacaaggaacaaccgaggaaatgccacagattggggggcagtaaagtatgtagttaataatatgccaatgttcatttttaaattttgrtaattgtgttaagtaagatgttaacatcaggaaactgggagtaggagaactctaccatttttgcgattttctgtaagtctaaaagtatttcagagtaaaa

SEQ ID NO: 200915 - DNA, 201 bp, Homo sapiens
aataaaacatttttattctgtacaatatatatgtgtatttaaatatatatacatatgtatatatatatatatgcacagagaaaccttagccaacaaatccytgagtccatgggaacccaggacactaacaaagggaaaggagagtccatgcctaaagagtaggaaatatggcaacatctttccctttcctcctggttccct

SEQ ID NO: 200916 - DNA, 201 bp, Homo sapiens
attttcccatgaccattattttggaattgatattttcataaagattaatttggtggcagtataataaactaaattgcacaaaagagaaatcaaagaaagcrggaaagcttgcgagtgtagcatcaggtgatagagacataaacttcagaagtagcaatagatctagatgaacaagatgaaataaaactgataggtttcatt

SEQ ID NO: 200917 - DNA, 201 bp, Homo sapiens
tataccccccagccacccaactagaaagaaggaaataagaaataaagagctccatttttttctcttcatgaaaatatcttcctttttttctcttctctcaycttccctgcaaataatctacccagatggcaattgagttgcaaataaagtaaacatctctcagttacaacttttccttttgttaaaggaaagagaaagata

SEQ ID NO: 200918 - DNA, 201 bp, Homo sapiens
aaaaaatcctaaaatttatcttgaaccgcacacgatcctgaatagctacggcaatccagagcaaagtgaacaaagctggaggcattatactgcaaagttayataaccaaaacaacatggtactggcttaaaaacagacagagaccaatggaacagaatagagaatccagaaataaatccacacagttacagtcaacttatt

SEQ ID NO: 200919 - DNA, 201 bp, Homo sapiens
cccaattgtccaacaacgatagactggattaagaaaatgtggcagatatacaccatggaatactatgcagccataaaaaatgatgagttcatgtcctttgyagggacatggatgaagctggaaaccatcattctcagcaaactatttcaaggacaaaaaaccaaacacaacatgttctcactcataggtgggaattgaaca

SEQ ID NO: 200920 - DNA, 201 bp, Homo sapiens
caggcgtgagccaccgtgcccggccaagattctgttgagcttcttactctccttgctgtactggttctatttaggttcaaacttaatgactcttgctccargaggggcaactgtccttgttttctctagtgtagtccttctcgctgcttagctcttcctcactggaacttggcagcagtcagtctgcattccactggtttt

SEQ ID NO: 200921 - DNA, 201 bp, Homo sapiens
acagtgccactctgaaaatgaagccaaagagaaagctgcactttttgctttacaacagttggtaagaactgtccatgacttctctattaaaatttttattmgtccctatagaaagcttgtattgcattgtcttgtaacttttaaatacttccacagggctccttaggcatgaatttccctttgccttcacaagtatttgca

SEQ ID NO: 200922 - DNA, 201 bp, Homo sapiens
ctagttttgttgtgaaaattagaaaactaacctatagataccatttttgtctatcagctgtcattttaatgaaagagagtagagtcagtaattgaagtttrttataagtttatgacttgaaccttagccagtgggagttttttgagggtctaggagtactctgacttaccagtcttacactttctatcacttttaataata

SEQ ID NO: 200923 - DNA, 201 bp, Homo sapiens
ttggaaatcttagtggatgcagaatcagatgaacttgtaagtattttatttatcattcatttattagatgcctataatgtattaaactgtagctgctgggwtgtttaccagggaggtattatatgttgtaactctagaaatttggagcctaaataaggatgaagcaaagaaacattcatacaaattagataatagttcaag

SEQ ID NO: 200924 - DNA, 201 bp, Homo sapiens
tataatggtctggctattttgccgtacctgggaatccatattcggcagaaacctgttatgccaaggaaccctcttagttgctttagggtttggggatgagrataagcagtataggctggatacattccccactgagggccctggtgcctttggataattttagccctaagtatttaaactgctgtgagcagagctgagcct

SEQ ID NO: 200925 - DNA, 201 bp, Homo sapiens
ctttggataattttagccctaagtatttaaactgctgtgagcagagctgagcctttggtttggaaaccttgtagccacaggtggcgaggaaatttaagagygcttgggtggcttggtggcacaaggtttctgaatgggcggccaaaagtaaatcatccgcgtaccgaaggacaagagtgtccaggtatgaaaattggctca

SEQ ID NO: 200926 - DNA, 201 bp, Homo sapiens
ccctctcagcctaaacaaaataagaaattaggtaagtaaactaaatactattaccaataatatcattttaaaaattcaattcatttggttctttttaatcrtgtacttttaaagataaaactgcttttattttaatgtatttatttattttagagatggtgtcttgctgtgttggccaggctggtctcaaacttctgacct

SEQ ID NO: 200927 - DNA, 201 bp, Homo sapiens
gctgggtatagaggaacaacagcctcattcataatcctgagatcttgcactaacctccactgtctgttgggtttctgtactcctaaatttggagtattgcrggagctattgcatggttttactaggccttgggcttttaggtccttaacaatcttttggagtccttgttgggcctcgggtctaagggggtactgcctttgg

SEQ ID NO: 200928 - DNA, 201 bp, Homo sapiens
atagctctgtggtgatgtagtctcaatgagctaaacttgtcacaagtgaaagaagacagcagccccattttgataaaggtctggcaaagtaacttaaacactgtcttgaatgaactgggtttggttcacgcacatggctcaagtgcttcaccaaagaaataagcggcagctggtttgcaactgcaaaagggaaagttggct

SEQ ID NO: 200929 - DNA, 201 bp, Homo sapiens
ctgcaacctccacctcttgtgttcaagctattctcgtgcctcagcctcctgagtagctgggattcaggcaagcgccaccatacgcagctaattttttatayttagtagagacagagttttgccattttggccaggttggtctcaaactcgtgctctcaagtgtccacctgccttggcctcccaacgtgccaaagtgcttag

SEQ ID NO: 200930 - DNA, 201 bp, Homo sapiens
ttctcttcaatccttatattcagaagcgattattggaagccatggagacatgtaaccactccctcaaaaaggaagagaggaaaagaaaccaacatagtgartgcctaatgtgctggtatgatagagacacagagtttatctatccttctccatggccagaaaagttccctgccatagaacgatgttgtacaaggtaatgtt

SEQ ID NO: 200931 - DNA, 201 bp, Homo sapiens
tttgtaaagtaagagattaatgctctgtgaattatgatatagtattataatagattcacacttaaaatttgattttctgctgccttgcttatttgcacttyagtggcaactgttggggtaatagcttcagagaactttgcagtggtagcagtattctagggccctttgaaacaataaatagcatatttttcatgcaataaa

SEQ ID NO: 200932 - DNA, 201 bp, Homo sapiens
ggcattattgccccagaaagacactgactgcagctgatgaaacagcccttccaagaattaaggatgccaaagaccaaataactgtgctgagatatacttasgcagcaggcatgcataagtgtaaacttgctgttataagcaaaagcttgcgttctcactgttttcaaggagtgaatttcataccaatccattattatgcta

SEQ ID NO: 200933 - DNA, 201 bp, Homo sapiens
gagtccaggatttggaactagagccacctgaaatcctgattctgttatttaataatgggtggccttgagcaattcacttcactttttagcagtttcctgcktgctcttctataaaaccctacaataagtgcataatttgagatagtattttattaataaagatagactcttttctcttttttggtagcatcttatatgaac

SEQ ID NO: 200934 - DNA, 201 bp, Homo sapiens
ctcttctccaactcctggtggcctcaagtgatccgcccacctcagcctcccaaagtccttggattataggcatgagccaccgtgcctggcctgtgtttttytgttctgtttgttttaatttaaatctttttaaaaatagagatgggtttttgccatgttgcccactctgatcttgaactactgggctcaagtgatctgccc

SEQ ID NO: 200935 - DNA, 201 bp, Homo sapiens; identical to SEQ ID NO: 35321

SEQ ID NO: 200936 - DNA, 201 bp, Homo sapiens
atgaaagaacaacgtgtatcaattatgaaaatgtgagaatgagatgacagagaaagttagaagtaaatgaaaaaaaaatgcagagctgagcctcaaatagragcaagacgagcaaatgataccatttgagaaaacaatcggcagtggaaagatgaaattttaaaaaataaaatagatttaaaagattcaagaaaaagtaac

SEQ ID NO: 200937 - DNA, 201 bp, Homo sapiens; identical to SEQ ID NO: 35322

SEQ ID NO: 200938 - DNA, 201 bp, Homo sapiens; identical to SEQ ID NO: 35323

SEQ ID NO: 200939 - DNA, 201 bp, Homo sapiens
actgtgatttgatcattatacattgtatccttgtatcaaaatatcacatgtaccccataaatgtgtgttataattattatgtattcataaaactagaaacaaaaaaaaaatagtaaaaaatattaactacttaaaaaatttagttagaagagtgatattactcgaattttttttttaaagagatggggtgtcattttgttg

SEQ ID NO: 200940 - DNA, 201 bp, Homo sapiens
tcgaaatgggagtccccaagttttacagatggatctcagagcggtatccctgtctcagcgaagtggtgaaagagcatcaggtgggtgagcgaggggcaackgctcagaaagccgaggacccggggctccgcggccctctccaccttagagctggggctttcgagccacctctttcccctcgtcgtctggacgattagtggc

SEQ ID NO: 200941 - DNA, 201 bp, Homo sapiens; identical to SEQ ID NO: 35326

SEQ ID NO: 200942 - DNA, 201 bp, Homo sapiens
aagaaaccctaggaaaaacttctggacattggcctagacaaagatttatgactaatctcaaaagcaaatgcaacaaaaacaaaaatagacaaatgggactyaactaaactaaaaagctcctgcacagcaaaagaaataatcaacagagtaaacagacaatctacagtatttgcaaactatgtatctgacaaaggactaaat

SEQ ID NO: 200943 - DNA, 201 bp, Homo sapiens
aaagatagggaatcaacctaagtgtccatcagtggatgattggataaagaaaatgtgtgtgggtatgtgtgcgtgcgtgtgtgtgtgtgtgtgtgtgtgtrtacacacaccatgtactactatcctatacacacaccatgtaatattatccagccataaaaagaatgaaatcacgtatcttgtagcaacattaatggaact

SEQ ID NO: 200944 - DNA, 201 bp, Homo sapiens
cgtcaccctgttgtgctatcacatagtaggtcttattcattctttttttttattttttattttggatacaaggtcgcgctctgtcaccccggctggagtasagtgacgcaatctcggctcactgcaacccctgcctccccggttcaagcaagtcttgtgccttagccacccaagtagctgggattaggcgtgtgccactac

SEQ ID NO: 200945 - DNA, 201 bp, Homo sapiens
gatagggaatcaacctaagtgtccatcagtggatgattggataaagaaaatgtgtgtgggtatgtgtgcgtgcgtgtgtgtgtgtgtgtgtgtgtgtatayacacaccatgtactactatcctatacacacaccatgtaatattatccagccataaaaagaatgaaatcacgtatcttgtagcaacattaatggaactggg

SEQ ID NO: 200946 - DNA, 201 bp, Homo sapiens
tttttatatgaattgtattaaacctatagatcaatttggggagatttaactatgttgaatattcttatccatgaacacaatatatctcttcatttatttaratctttgatttctctcatcattgttttggtttttttcatcatactgatcaggtacatgttttgttagacttatacctgagtatgtaatttttcttggagt

SEQ ID NO: 200947 - DNA, 201 bp, Homo sapiens
gaggataacttgagcctgggaggtcaaggctgcagtgagctgtgatcgtgccactgcaccccagcctgggtgacagaatgagacctgtctcaaaaaaaaaraaaaaaaaaaagaagataatgactaactcaagtaaaaacaaaaggttttacaagaaaatacataatggatctctttttacaagaaaagaaacattatcag

SEQ ID NO: 200948 - DNA, 201 bp, Homo sapiens
caacaaaggccgttatcgcatttaacaacttactttttccacttgaatgtgtcactttatgctggtagttggttatcttaaatatgaatgaacaaatatgyattccttggtagagattaagaagagagaaaaagtgctgctaaaagattagagactcagacaaagaaaggaagaggaaaggaataaattcctactacatgt

SEQ ID NO: 200949 - DNA, 201 bp, Homo sapiens
attatatatttagatgaaaggtcagcaaacttcttctgtaaagggcaaatagtaaatattttaggctttgtagactttacaatgtctgtcacaactactcractttaccatgtagcgcaaaagcagccatagacaggaagtaaatggataactatgttccagtaaacttttatctaaaaaactaggaggctgtctgaatta

SEQ ID NO: 200950 - DNA, 201 bp, Homo sapiens
aatgaagaatgattatatatttagatgaaaggtcagcaaacttcttctgtaaagggcaaatagtaaatattttaggctttgtagactttacaatgtctgtyacaactactcaactttaccatgtagcgcaaaagcagccatagacaggaagtaaatggataactatgttccagtaaacttttatctaaaaaactaggaggc

SEQ ID NO: 200951 - DNA, 201 bp, Homo sapiens
ggctaataaagaatgctattgctagcattctacctctgctataaaataacagttgtattaaaggaaaaaagtgtatttaaataaggaacttaagaatgtcyatgctttctctgtaaatgtttacatttcaagttaacatttaatttttttcttgtataatccaaatgtcctatgctatctgctataaataacataaatttg

SEQ ID NO: 200952 - DNA, 201 bp, Homo sapiens
cataaaatttttttgcaacaatttatttagaacactattacatattaactataaatatatttgcacaaaaagtttattcttacttttttaatagactttaraagggcctgccaaatataatattaagctattgaagagaaatgaaagtccagaagtctcagaaacccaaaaggttgtgactggttatccaaatgctattga

SEQ ID NO: 200953 - DNA, 201 bp, Homo sapiens
atgacctaaattttccaacactgctaatttcttatattcagatagtagaattatgggcagtactaattttttaaaattatttttatatgttgttaaaatayggggaaaagtatatgtttattattaacctaattcataaagatgccacttgtttaaaactcagttttgttttataggtattatccttatcattatgcacct

SEQ ID NO: 200954 - DNA, 201 bp, Homo sapiens
tgccccaccatctaaagtggttcatcttggagataaagaacaatctaactgggcaaaagaagtacaaggaatttcagaacagtgagtatcgttaaaagtayttaatatcatggaactaaaatccgttttaatgtactcattctctaacttattttccatttaacatagtagttactctgaatactaattacaccttcatcc

SEQ ID NO: 200955 - DNA, 201 bp, Homo sapiens
ttcccaagaggttcagatcttggaggcatcagaaactattagagaagataaagaggaggcatgtgctgaaaagagagggattggttgaaagtctatgtgcraagtggtgagactacccccgtcttccctctgtgacgcagccagacctctgcaagcaaaaaactggaggtgtgttttctagaggagctatctagatatggg

SEQ ID NO: 200956 - DNA, 201 bp, Homo sapiens
tttagttcagaattttttcactttattaagtgtgaagtgattatggagaaagaattaaaattaaattatttgaattcttttaaagttttttttgaagaaargtggtgttcaagtattccagcaaagcagtcgtggagaaaacatgatgttggaaatcttagtggatgcagaatcagatgaacttgtaagtattttatttat

SEQ ID NO: 200957 - DNA, 201 bp, Homo sapiens
gctagagtccaggatttggaactagagccacctgaaatcctgattctgttatttaataatgggtggccttgagcaattcacttcactttttagcagtttcstgcttgctcttctataaaaccctacaataagtgcataatttgagatagtattttattaataaagatagactcttttctcttttttggtagcatcttatat

SEQ ID NO: 200958 - DNA, 201 bp, Homo sapiens
tactaaaaatacgaaaattcgaaaattagctgggtgtgatggcacacacctgtagtcccagctactcaggaggctgaggcaggagaatcgcttgaacccasgaggcagaggttgcagtgagctgaaatcgcgccactacactccagcctgggtgacagagctagactctgtctcaaaaaaaaaaaaagaaaaagaaaatct

SEQ ID NO: 200959 - DNA, 201 bp, Homo sapiens
taatttgcatttccctgatgactaataaaattgaacatcctttcgtgtttgttggccatttgaatatgcatactcttttgtgaaatgcctgttcaagtctkttgccctttttaaaattgggttgattatctttttctcattactttatagttttcttactggcttattgtgtcattctcaatttcaggggaaaactaagta

SEQ ID NO: 200960 - DNA, 201 bp, Homo sapiens
cagtttgggaggcagaggtgggtggatcacttgaggtcaggagttcgagaccagcctaaccaacatggtgaaaccgtctctactaaaaatacgaaaattckaaaattagctgggtgtgatggcacacacctgtagtcccagctactcaggaggctgaggcaggagaatcgcttgaacccaggaggcagaggttgcagtgag

SEQ ID NO: 200961 - DNA, 201 bp, Homo sapiens
ttaatttaaatctttttaaaaatagagatgggtttttgccatgttgcccactctgatcttgaactactgggctcaagtgatctgcccgcctcggcctcccraagtgctgggattacaggcgtgagcccccgtgcccagactaggtcttattcgttctttcagtttttcttttatacccattaacctttcccacctctcccc

SEQ ID NO: 200962 - DNA, 201 bp, Homo sapiens
aggatgggtatagagaagactaagcagcttttattatatttttcctaaagaattgatatgagcaagactaagcttttaaaaaataattattagcctgggcmacatggcaaaacagcctgggcaacatgataaaaccccatctctaatctacaaaaaatacaaaggtagccagacatggtggcatgcacctatagtcccagc

SEQ ID NO: 200963 - DNA, 201 bp, Homo sapiens
ccagttatattgaaatacagttagaatccggtaaagtgccattgtctggtgggggctccctttctggcttgcagatgatgcgtcttctcatattctaacaygatggagagaaagagctctattctctttctattcatataaggacactaataccatcatggatgttgcaccctaaagacctcatctaaacttaattaccta

SEQ ID NO: 200964 - DNA, 201 bp, Homo sapiens; identical to SEQ ID NO: 35317

SEQ ID NO: 200965 - DNA, 201 bp, Homo sapiens
cttttttaaaaaaataaacattttattgatataatttacataccataaagtaaattcattattttaaagtatacgataagtggttttttgtattttcacamaattgtataaccaacaccaccatctaaatttagaacattttttgtcacctgaaaaagaaacaccatacctattagcagtcactcctccaggccttggcaa

SEQ ID NO: 200966 - DNA, 201 bp, Homo sapiens
aatcaccactcactgcagccttgaacctatgggttcaaagattctctcacttcagtctctcaagtagctagaacagacacgtgctgccacacccagcttaytcttctttttaatactcttcttggctattattgcatatttattctcctaggaaaactttggaaaatcgttctgtaaaatgtaaaaaaaaaaaaaaaaaaa

SEQ ID NO: 200967 - DNA, 201 bp, Homo sapiens
aatgaggaggtacctggatatactaagaaagttggaagtgaatggatgtattcatctgcagcagaacaacttctggcagagtacttagagaggtaagtacrtaataagatactagtagtcattccaaaatcttaggaaaatactgtttattttgccttcctgatattagttttagaggacaaatatttccattagtaaaat

SEQ ID NO: 200968 - DNA, 201 bp, Homo sapiens
ctgggagaagatagaaagtttagtggtttggaaatcctagataaaattgaacaaagtagttgaacatgcaagttggatgaagaggaagttatcagacagtragatgtttgtgttagtgatttcagaggttcggtagttatggataatgtcaaaaaccaagtcatagccatagaaattgctggcttacgcatatctacaact

SEQ ID NO: 200969 - DNA, 201 bp, Homo sapiens
aatcttattagtgtttttcatattaaaagttttcttcttcttagaatttgtgtatgtgtatttcataacactgaaatatattatgattcttctctcctaayctaaaagtgtcttaaatagctgaactttaattaagctatactgttttacaggtctggctgctttttatctctatgaaaagaatatttgaacatagtgcat

SEQ ID NO: 200970 - DNA, 201 bp, Homo sapiens
aacctctaccaaaaaaaaaaaaaatgaactggatgttgtggtgtatacctgtattcccagctacctgggagactgaagtgagaggatcacttgagcccagsaggttgaggctgcagtgagccatgattgcctcactgcgctccagcatgggtgtcagagcaaatccctgtctcaaaacaaaaacaaaaatgtttatgcctt

SEQ ID NO: 200971 - DNA, 201 bp, Homo sapiens; identical to SEQ ID NO: 35316

SEQ ID NO: 200972 - DNA, 201 bp, Homo sapiens
ggtcagagaaatggggctgcttttttaccctcaggcttaatacttggcttttaatacctccttatctgaaaactccatgctccagatacctttagtagactttttttggcattaactttttattatggaaattttcaagcataaacaaaaatagaaaaggtaatataatgaacatcgtatacccttcatctaacttaaata

SEQ ID NO: 200973 - DNA, 201 bp, Homo sapiens
aatttttataaaaatgtatttattaaaagttgaagataagaagtagttataatattaagattttgtttaatttataagaattttaattttcagggtgcagytctacctcaagaaataagccaagtaaatcaacatcataaatctggctttaatgacaacagtgttaaatatcagcaaagaaaacatgaccctcacagaaaa

SEQ ID NO: 200974 - DNA, 201 bp, Homo sapiens
gtcagagaaatggggctgcttttttaccctcaggcttaatacttggcttttaatacctccttatctgaaaactccatgctccagatacctttagtagactttttttggcattaactttttattatggaaattttcaagcataaacaaaaatagaaaaggtaatataatgaacatcgtatacccttcatctaacttaaataa

SEQ ID NO: 200975 - DNA, 201 bp, Homo sapiens
aaactaaatctttttatgttttagttaaattttttttaggttatacttttcagagaaaaaaaaatctcttctgttttttattgtataatctggaaagagaytaaaaggagaaactgagaaggggctgctgagaatttagtagttttatatcacattaaaattatgcaagatcttggtgagcatacatatgttttcatgaaa

SEQ ID NO: 200976 - DNA, 201 bp, Homo sapiens
ttacatgttgcatattatagtagcataaaattcacagaaactagggccagtttggatatagtccaacactgttttttcttgattagtactgtagaacatgracattcaacattttgtagaaagagttttgtagaattgtttagaaaaaatgtcagcttttagtacagatttaaatttttgtttcttttaggttatattaat

SEQ ID NO: 200977 - DNA, 201 bp, Homo sapiens
ctttttaatactcttcttggctattattgcatatttattctcctaggaaaactttggaaaatcgttctgtaaaatgtaaaaaaaaaaaaaaaaaaagtgtaaaaaaaaaatttgatcaagtcgttgatgctgaggccaggcgcagtggctcacacctgtagtaattccatcactttgggaggcctgggcaggcaaatcgct

SEQ ID NO: 200978 - DNA, 201 bp, Homo sapiens
tgtcattttaatgaaagagagtagagtcagtaattgaagtttattataagtttatgacttgaaccttagccagtgggagttttttgagggtctaggagtastctgacttaccagtcttacactttctatcacttttaataatatcccttattaatattatagtagtcctcaataagctttatatgtttctttaggatctga

SEQ ID NO: 200979 - DNA, 201 bp, Homo sapiens
ggggtttcttgttggtaatgattttatccctcatctacctcatttacatattaatcatgatgcactgcctcttctttatggaacatatgttaccatcctgycagaacttgggggtaagaagaatttaataatctctcgaggatactttaatttagtgccaccttaccctaaaaatgtgacttagtttagtagattattgca

SEQ ID NO: 200980 - DNA, 201 bp, Homo sapiens
gtgactttgatggcttttattgattcatttttttaactgacaaaattatattaagaacatttacactctgtaccaaaaatgaaagtcgtctaatgacaccrcttgaagttcaaacactattgacagtttattgtacctctcttgagatattttagatgcatatgttattttttcccttttaatttcttggaagttctatat

SEQ ID NO: 200981 - DNA, 201 bp, Homo sapiens
aaattagctgggtatggtggcatatgcatgtaatctcagctacttgggaggctgagaataagaattgcttgaacctgggagacagaggttgtggtgaaccragatcataccactgcactccagccttgatgacacagtgagactctatcttaaaaaaaaaaaaaaaaaaaaaagcaataacttaaaaggtcagtgttataa

SEQ ID NO: 200982 - DNA, 201 bp, Homo sapiens
ctagaattttctgaaataattttttttcagagaagatgggtagatattatgttttttgattttgagttattacacatccgaaatgtctttttttttttttwaatttacacataggtttagaattttggaggcccagtttcttttccttttctcttagagctctgcatacatctctccattatgttattttatgtaatgttg

SEQ ID NO: 200983 - DNA, 201 bp, Homo sapiens
ccaataatatatattttaaaataaccaaaagagtggaattgaaatgttcctaacacagcaaaaatgataaatacttgaggtgatggatatctcagttactstgatttgatcattatacattgtatccttgtatcaaaatatcacatgtaccccataaatgtgtgttataattattatgtattcataaaactagaaacaaaa

SEQ ID NO: 200984 - DNA, 201 bp, Homo sapiens
tagatcagattatgcaccatatattaaaaaccctttcatgcaggatagtaagaaaatacaataaattttatttcattcatatatatatatatatatatatwttttttttttttagtgagacggggtcttactatgtcactcagggtggagtgcagtggcacattcatattatacctcaccacaacctggagctcctgagtt

SEQ ID NO: 200985 - DNA, 201 bp, Homo sapiens
attacttaatggctgcaatgtatgcagtgtacataattcaggtgatgaatataagaaaagcccagactttaccactctgcaataaatccatgtaacaaaaytgcactcgcaccccttacgtttatacaaatttttaaaataaataataactagaaaagcaagaggaaaccaaacccaaaattattagaagaaaagaaatga

SEQ ID NO: 200986 - DNA, 201 bp, Homo sapiens
aacataagtagttgataacgcatattttgtatatgtattatatagtgtgttcttacaataaagtaagatagaagaaaatgttattataaaatcataagagaaatatatttactattaattaagtggtagtggttgatcataacagttttcatcttcgtcttcatgttgagtaggcagaggaggggttcatctgctgtcttg

SEQ ID NO: 200987 - DNA, 201 bp, Homo sapiens
tgaggcaggagaatcgcttgaaccctcagaggcagaggttgcagtgagcagagatccagccactgcactccagcctggcaacagagccagactccatctcaaaaaaaaaaaaaaaaaaaaaaaaacatgagatagaatctgacagcgtataagaaggataatactcatgaccaaatgggatttattttagaaatacaaagt

SEQ ID NO: 200988 - DNA, 201 bp, Homo sapiens
caaccttatgataaaggcatataaaaaatcttactgcaaacaacatacttaatagtaaaagaaggaccaatttcctgtaaagtcaagaataggacaagatrtccattctaaccacttctttctaacgttttactggaggtccagtgtgttaagatgaagaaaataagtaaaattgtttttagtggcaagtggcattattat

SEQ ID NO: 200989 - DNA, 201 bp, Homo sapiens
tgagccatggagctgaaagccaaactagagtgggtaaaggaatgattgagagttgcagaagtggagacacagtagaaattgacaacttgttcaaaaagttyagctgtgagagagagaccaagagatcttgacctcttatctgttgttccccttctgaatgagcttgaacttctatgagggcagcaaaggacagagagagtc

SEQ ID NO: 200990 - DNA, 201 bp, Homo sapiens
gtattgattaaatcgatatctgaatgctgactgggagttaggcaaggaatgaaaaggaagtgtttcatgatgagggaagacttacatgaaaagccctgtgrcaggaggaaaagcagtgtgtattgaggaagatttggcaacaaagaaaaaagaaagtggcaacctcagaagtaggaggacagctagaagagggttatatca

SEQ ID NO: 200991 - DNA, 201 bp, Homo sapiens
gtggaacctggaatttcttatatttggctttggtgcttacatgttgcatattatagtagcataaaattcacagaaactagggccagtttggatatagtccmacactgttttttcttgattagtactgtagaacatgaacattcaacattttgtagaaagagttttgtagaattgtttagaaaaaatgtcagcttttagtac

SEQ ID NO: 200992 - DNA, 201 bp, Homo sapiens
gaaatgtgaaaccacactttaaaaattcaggaaataggccaggcgcagtggcttacgcctgtaatcccagcactttgggaggccgaggcgggcggatcacragatcaggagattgagaccatcctggctaacaaggtgaaaccccgtctctactaaaaatacaaaaaattagcctggcatagtggcaggcgcctgtagtcc

SEQ ID NO: 200993 - DNA, 201 bp, Homo sapiens
atttgcttttatggagaatagtaatcattttatttctcatgtttcctattctagcaaatcccatctgcattttcaaaccatccaccaaagtagaaaaattmaaaaccaaaaaatgatacagtgaatactagagacttttagatgataacacaactctgtttggtttggttttgttcaaagcacctgtgctaggctctgttt

SEQ ID NO: 200994 - DNA, 201 bp, Homo sapiens
ataaatataattgcaaatattcctaaaacttgtatcagcatatgatattagtagtagtattctccttttcaggccagtataatgataaattcatttgtgtrgatagtccacacagtcctaggaaaggatcctgaggttgaatgttgtaaggaagagtaattataggtgaagtaagtgtaggccttttgccaaaggggaaaa

SEQ ID NO: 200995 - DNA, 201 bp, Homo sapiens
aattttggatggtgaacatcttttcatgtgcttattagacttatgacttttttgtttattcatttctgaattgctttccattttctgtgattgctttaaawttttttttttttttttttttttgaggtggagtctcgctctgtcgcccaggctggagtgcagcggcacgatctcagctcactgcaagctccgcctcctggg

SEQ ID NO: 200996 - DNA, 201 bp, Homo sapiens
attttttaaaattatttttatatgttgttaaaatatggggaaaagtatatgtttattattaacctaattcataaagatgccacttgtttaaaactcagttktgttttataggtattatccttatcattatgcacctttcctgtctgatatacacaacatcagtacactcaaaatccattttgaactaggaaaaccttttaa

SEQ ID NO: 200997 - DNA, 201 bp, Homo sapiens
gttattttcagttttaaaccatagtatttttttaacaagtcccttgaaaagtaattctttgatttcaagttagctttgttttaaagatgcaaagaaactcygtaaatcattcagagcctggcttcgttttcagcacctttaaacagattttcaatttgtctctacactgaagaaagtaggctaaaaccgacaaaatctgaa

SEQ ID NO: 200998 - DNA, 201 bp, Homo sapiens
agaaacccaaaaggttgtgactggttatccaaatgctattgataaggtaaaaaactatttattccaattctcttcccaaactttaacacctgggaagatgrttgagtgaaaatcgaatgaccatttttgtacataaaactcagctttttgtgtgttcttgtattatacgttcatcttcatgcccaaaatatttattctttt

SEQ ID NO: 200999 - DNA, 201 bp, Homo sapiens
tttcataacactgaaatatattatgattcttctctcctaatctaaaagtgtcttaaatagctgaactttaattaagctatactgttttacaggtctggctrctttttatctctatgaaaagaatatttgaacatagtgcatatcttcttcagtggcgtgtgctggtgccttgaatgtcactgtttaatgtagttttcaaat

SEQ ID NO: 201000 - DNA, 201 bp, Homo sapiens
tgccatcggatgacctaaattttccaacactgctaatttcttatattcagatagtagaattatgggcagtactaattttttaaaattatttttatatgttrttaaaatatggggaaaagtatatgtttattattaacctaattcataaagatgccacttgtttaaaactcagttttgttttataggtattatccttatcat

SEQ ID NO: 201001 - DNA, 201 bp, Homo sapiens
tggactccgaatgtatttttgtggtgttacgttatccgtagatttctagcatgaagttagcctcacgatgctgtgcaaaggattttaaaatatgagagtcmctgaaagagtttaaacatctgttcatgttaaatgctctatggattttaattaaagacttgagaatgattttataagctgtttgttcttttattactatgc

SEQ ID NO: 201002 - DNA, 201 bp, Homo sapiens
tcaaagagaaaaaaaataggtgatagagttgaaaacttaacaagagaaggattctttaatatctgacacgtttatcaaagccatgaaagatggaaatcacwaatacttgtctcttaagcctttccaggtacaggcccagaactttaagatgggaaaatgagggaaaaaagggctggactccacatttgaccgatagacaaa

SEQ ID NO: 201003 - DNA, 201 bp, Homo sapiens
ctatcagaatctctagtagttgagaaactcctgggaactattttttaccatactcccctggtatttgttaaagtagtttttgggagccactagcctagaaratctagtgttaaggagggattttataaacctactacatcagtctgggttcagttgcaggtgatagaaagcactctagctatttcagacaaaaaggggtgt

SEQ ID NO: 201004 - DNA, 201 bp, Homo sapiens
ccaccatgctcggctaattttgtatttttagtagagacagggtttctccatgttggtcaggctggtcttgatctcctgacttcaggtgatccacctgcctyggcctcccaaagtgctgggattacaggcgtaagcctcttcacctggccaaaattctgcatttctaataagctcttaggtgatcatattttgaatagccag

SEQ ID NO: 201005 - DNA, 201 bp, Homo sapiens
ggcctcccaaagtgctgggattacaggtgtgagccacaacacctggccttccctcagaattttgaaaccactgttccattctcttctcgtttccatattgytgttgataaatcctgtgccattctgattctgaatttctgtatgtgatctattttcattttctgaaatctttttagcacctttcccttactggtgcttttt

SEQ ID NO: 201006 - DNA, 201 bp, Homo sapiens
cgggcgctctctatggtcggccgggcggtgtgttgtcatccgcggagcgacgaccggaggctgcggcggagccccggcggggcgtttggtttcggtttggscctgactgggattagtgttgacgatcgaaatgggagtccccaagttttacagatggatctcagagcggtatccctgtctcagcgaagtggtgaaagagca

SEQ ID NO: 201007 - DNA, 201 bp, Homo sapiens
acttatatatctaaatactatatatctaagactaaagaccatatacttttagtcttgagcagattaggatcaagaggtggtgtgttcaaatcctgatctctttttttttagcagttttgtttattgtagtggtatggatgaaacgattttgtaactattttagacatgtaataggcttgagtgaatttgtaaatgcgttca

SEQ ID NO: 201008 - DNA, 201 bp, Homo sapiens
tatgctcttaggaaagtttttagaaatacatcatcttataaattgagctattgctgtgatttgaggttcctctaccgaattaaaaagtaatatttactaaygctgatgatggattgtccaccaaaaattatttgacttttctccctaacacatttagtattgttttccttccaaccctgatataacttttacttttagatg

SEQ ID NO: 201009 - DNA, 201 bp, Homo sapiens
aataaccataataactaaaatatagaagaataatcaaaactgagcttttctaagaattgaaagcaaaactttttgttccttgaacgacattttaaaactcktgtgtgtgtgtgtgtgtgtgtgtgtgtgtgcacgtgtgcgcatgtgtggtttaaattcagccctcatggagaccataaagcaaatgtgggtttaaatctc

SEQ ID NO: 201010 - DNA, 201 bp, Homo sapiens
aaggagaaaaaactaaaaaacactgtaattctgaagatcatttaaacttttcttagtaatgcaggatcatcattaaaagtattagtagttggctgggcacrgtgactcacagctgtaattccagcactttgggagaagggtggatcacttgaggttaggagtttgagaccagtctgggcaacatctccacaaaaaataaaa

SEQ ID NO: 201011 - DNA, 201 bp, Homo sapiens
gtaggaaaagatcacatttaaatatgatattgaaaggataatagatgattggattttgatggggtttcttgttggtaatgattttatccctcatctacctyatttacatattaatcatgatgcactgcctcttctttatggaacatatgttaccatcctgccagaacttgggggtaagaagaatttaataatctctcgagg

SEQ ID NO: 201012 - DNA, 201 bp, Homo sapiens
ttttgcatcctgaaactttactgaatttatcagttctgatagttttttggtggagtattcaggtttttccaaatattgtttggttcccatctggaaagtcwgtacaatgctgaaagtggaatcttgacgtatccagctattactatatttggatttatctctttctttagctccagtaatatttgctctatatacctgggt

SEQ ID NO: 201013 - DNA, 201 bp, Homo sapiens
atctcctgacctcgtgatccacctgcctcggcctcccaaagtgctgggattacaggcgtgagccactgcacccagcccagtaagactgttttttttttttwaaaaagtacatgccctaagacccagcagttttcacttttaacctagggaacattcacctgcataaaggacacatttgcatgttcattgtagcattgttta

SEQ ID NO: 201014 - DNA, 201 bp, Homo sapiens
ttctttgtcagtttcacctaaactctcgggctctttaaagatggaatcctctagggctaaattattggacttcttctgtatctatacccatttccatagayagatagatagatagatacatagatacatagatagatacatagatagataattatagacagatagatagatgatagagaaaaaaatagatttagataagat

SEQ ID NO: 201015 - DNA, 201 bp, Homo sapiens
tagaaccaaattaattttaagacaaaattagataaagatggtcccattgtcaaaaacaagtaagttttactttatttcagtataggaaaaaaaaaaaaaamaactcataggctttagagtcttagggtcactagctcagaatccagcccctgttatagaactaactggctctgtgactttgagcaagccacttaactgctt

SEQ ID NO: 201016 - DNA, 201 bp, Homo sapiens
ctaatgtatatccctgcattttgtctccctcgaatggatatgtgaatttttgtttccattgtcagtgtttctgctcccagcattatttgatacgctgtgayattgattataccccccagccacccaactagaaagaaggaaataagaaataaagagctccatttttttctcttcatgaaaatatcttcctttttttctctt

SEQ ID NO: 201017 - DNA, 201 bp, Homo sapiens
atacgctgtgacattgattataccccccagccacccaactagaaagaaggaaataagaaataaagagctccatttttttctcttcatgaaaatatcttcctttttttctcttctctcatcttccctgcaaataatctacccagatggcaattgagttgcaaataaagtaaacatctctcagttacaacttttccttttgtt

SEQ ID NO: 201018 - DNA, 201 bp, Homo sapiens; identical to SEQ ID NO: 35341

SEQ ID NO: 201019 - DNA, 201 bp, Homo sapiens
aaattaggatgttattaccatgcattcatttagcagaaaacttatagaacatttttactaagtgaactggccatggtttttatctatcattcctttgtatrtgactacagtgacttctagtggtaacttctatccaaagacctatcttaaattagccaggcatggtggcacatgcgtgtaatcccagctactcaggaggct

SEQ ID NO: 201020 - DNA, 201 bp, Homo sapiens
ccgcaggcaatcttaccttcatgatgactctgggaccaaggtatcctctaaaacaccaggttcagctgcacctggaggggaaacaaaagacacccagtcamcaccacaggagcccctctgcactggcggaggcggagggaaagaagcgagcgacgtccgaaccccgaagaaagagccgcaccaggcgccagcccccgaacc

SEQ ID NO: 201021 - DNA, 201 bp, Homo sapiens
gtgaggtgactcaacgtctgtaatttcagcaatttgggaggctgtagcggccggattgcttgagcccaggagtttgagaccagcttgggcaacatgggaasacactgtctctacaaaaacaaaaattaaccgggcgtggtcgcttgcacctatagtgccagctactcgggaggctgaggtggaggctgcagtgagctgtga

SEQ ID NO: 201022 - DNA, 201 bp, Homo sapiens; identical to SEQ ID NO: 35342

SEQ ID NO: 201023 - DNA, 201 bp, Homo sapiens
agttttgaatagttcaaataagtgaaattttcaattttttttattagattattattgaagtgacagaaatgttgcataatgccagtttactcatcgatgayattgaagacaactcaaaactccgacgtggctttccagtggcccacagcatctatggaatcccatctgtcatcaattctgccaattacgtgtatttccttg

SEQ ID NO: 201024 - DNA, 201 bp, Homo sapiens
aacagaatcttctttttaaaccagactaggtgtcttttcacaaacaccctgcaatacaaattcctttgcagtttgacactgaaagatgattagtttcatgkgatctttatgtttctcctttttgacagattagctttgaagtttaaatccaatggagaagactcaagaaacagtccaaagaattcttctagaaccctataa

SEQ ID NO: 201025 - DNA, 201 bp, Homo sapiens
taagtgaactggccatggtttttatctatcattcctttgtatatgactacagtgacttctagtggtaacttctatccaaagacctatcttaaattagccasgcatggtggcacatgcgtgtaatcccagctactcaggaggctgaggcaggagaatagcttgatcttgggaggcggaggttgcaagtgagccgagatcacg

SEQ ID NO: 201026 - DNA, 201 bp, Homo sapiens
atcgtctttctcccggagtatgaatggaaggattcagtatgcgcttcacatttgtatgtctctggccattctcaaaccaggcccttccctttgaaaagtcktttgcatgggatgttcacttcttagacgcaaggttgtgtgccctggtttcatcgtctaacgcgttagaaggcgctttcatttcttcatgggtgttgagcg

SEQ ID NO: 201027 - DNA, 201 bp, Homo sapiens
ttttggaggctgtgagaaaatatacaaacgtgattcttgctcccaacttgtagttgagaaaagatagatactaacatttaaatagagaagtatatgagatscttttttaattctacttttaatgatgttcgataataatcttttagctaagccattattcttcctgttttgcatcttcttttcttacttcaatccctgata

SEQ ID NO: 201028 - DNA, 201 bp, Homo sapiens; identical to SEQ ID NO: 35346

SEQ ID NO: 201029 - DNA, 201 bp, Homo sapiens
aagcccatcctactttaaaattgtttattcaagttcagatgaaaagagtggactagtaggcaactgaagtgctttagagtctcccgtgcctgccctaattytagaaggttgtgcactttatgatccagatttctgagtggttgagaatgagttattgagcagtgcaaggcaagctctgcagtaggtaatggattgatgagg

SEQ ID NO: 201030 - DNA, 201 bp, Homo sapiens
tctgaacatttcgtataaatggaatcatacaatatgtagtctcttgagattggcttctttcacttaacatgttttcaaggcttcatagctgtagaatcttkctttgtttttttgagactggagtcactctttcgcccaggctggagtgcagtggtgtgatctcagctcactgcaacctctgcctcccgggttcaagcagtt

SEQ ID NO: 201031 - DNA, 201 bp, Homo sapiens
tacttcaccttgttttgttcattttccagtacgttatcctctatctgaaaaacttttcttcccttctttgcctagcaaaagccttcgcactcagcttagaygtcaactccaccagaaaactttccatagctctctgatttagctgtcctcttctgtcctctcatagcatttcctacaattattttatgttggaatactcat

SEQ ID NO: 201032 - DNA, 201 bp, Homo sapiens
aaacactagctggaactgggctggcattaatagcaagccagttatcagtgctgacaaaagtctaacaagcatcgcttgaatgtctcttactctgctacttaacaaagcaaggactgcctacagttacattttaaccataatgcttacttatgctgtgaccaccttctgtgacttctttttttttaattctcattacttgga

SEQ ID NO: 201033 - DNA, 201 bp, Homo sapiens
ataatcccagcattttgggaggccaacacaggtgaattacctgaggtcaggagtttgacaccagcctggccaacatagtgaaaccctgtctctactaaaawtacaaaaattagccaggtgtggtggcaggtgcctgtaatcccagctacttgggaggctgaggcaggagaatcgcttgaacccagggggcggaggttgcag

SEQ ID NO: 201034 - DNA, 201 bp, Homo sapiens
aggcaggagaatcgcttgaacccagggggcggaggttgcagtgagccgagatcacaccattgcactctagcctgggtgacaagagcgaaattccatctccaaaaaaaaaaaaaagaaaacagtattttagttttaactttttatgtaaccattttcctgaaaccttatctaaaattaggatgttattaccatgcattcatt

SEQ ID NO: 201035 - DNA, 201 bp, Homo sapiens
gcaggagaatggcgtgaacccgggaggcggagtttgcagtgagacgagatcacgccactgcactccagcctgggcgacagagtgagacgctgtttcagaaraaagacacaaggcaagttggttgtcgatacctggaaaaattgaagttcttatgttttcataccactgaaaatgcttgtatgtaaatatcctctgggacag

SEQ ID NO: 201036 - DNA, 201 bp, Homo sapiens
tgttattaccatgcattcatttagcagaaaacttatagaacatttttactaagtgaactggccatggtttttatctatcattcctttgtatatgactacartgacttctagtggtaacttctatccaaagacctatcttaaattagccaggcatggtggcacatgcgtgtaatcccagctactcaggaggctgaggcagga

SEQ ID NO: 201037 - DNA, 201 bp, Homo sapiens
cactgcactccagcctgggtgacagagtgagaccctgtctcaaaaaaaaaagcaagaagcgcagtggctcacgcctgtaatcccagcactttgggaggccraggcgggcggatcacgaggtcaggagatcgagaccatcctggctaacacggtgaaaccccgtctctactaaaaatacaaaaaatgagccgggcgtggtag

SEQ ID NO: 201038 - DNA, 201 bp, Homo sapiens
gtaatggattgatgaggctggatttagcaagtctgatcaatctaaaggaagtttctgaatgtgttttttgtagttaaaatactcataattaaaacacttaycacattgtcacattttatttttaaattgcaggtaaacaagtgagaaccaaactttcacaggcatttaatcattggctgaaagttccagaggacaagctac

SEQ ID NO: 201039 - DNA, 201 bp, Homo sapiens
tgagaatttgtatgttgtaagtctttgtggcagtgtatacatttgtgttgcaacttattaacacatacaccgggcttttttttttttttttagaagattcrtagctttcatcatattctcaaaaggtttctgtgacccatgagatggtttacagtatggggaagcatcaaagcacttgcacagttgatggttatatgtgtg

SEQ ID NO: 201040 - DNA, 201 bp, Homo sapiens; identical to SEQ ID NO: 35343

SEQ ID NO: 201041 - DNA, 201 bp, Homo sapiens
tccagcctgggcaacagaatgagactccgtctcaaaaacaaaaaacaaaaagacctatcttgagctttccgtgtaagaaaaagatgatactgttgggtgargtgactcaacgtctgtaatttcagcaatttgggaggctgtagcggccggattgcttgagcccaggagtttgagaccagcttgggcaacatgggaagacac

SEQ ID NO: 201042 - DNA, 201 bp, Homo sapiens
aaatatttattagttgtgaaaattaacacacctgagactttcataatctgttaattaaactgagtaagttttgaatagttcaaataagtgaaattttcaattttttttattagattattattgaagtgacagaaatgttgcataatgccagtttactcatcgatgatattgaagacaactcaaaactccgacgtggctttc

SEQ ID NO: 201043 - DNA, 201 bp, Homo sapiens
cctagttcttgattgaatttagtcctcatgcaagatattattttatattgaggttgctaaatatttattagttgtgaaaattaacacacctgagactttcrtaatctgttaattaaactgagtaagttttgaatagttcaaataagtgaaattttcaattttttttattagattattattgaagtgacagaaatgttgcat

SEQ ID NO: 201044 - DNA, 201 bp, Homo sapiens
ttgaatgtctcttactctgctacttaacaaagcaaggactgcctacagttacattttaaccataatgcttacttatgctgtgaccaccttctgtgacttcyttttttttaattctcattacttggaaataatgttttaagacattagataacatatttaaaattatcactaggtacctcacctttttattcaagtacgttc

SEQ ID NO: 201045 - DNA, 201 bp, Homo sapiens
ctgacttgttacacttaaggtaagggctatccatccattttgctgcaaatgacatgatttcattttgttttaatggctgagtaatcattcgttgtatatataccacattttctttattcagtcatctgctgatggacacttaggttgattccatatctttactattgtgaatagtgctgtaataaacacatagtgcaagat

SEQ ID NO: 201046 - DNA, 201 bp, Homo sapiens; identical to SEQ ID NO: 35345

SEQ ID NO: 201047 - DNA, 201 bp, Homo sapiens
caacttaaaaaccaagacaacactttgaccaatataatcacttgaatgaagaattttctaattgagatataatttacataccacccatttaaagtgtacayttcagcagtttttagtgtattcacagggctgtgcaaccatcacaatttaattttataacattttgatccctgcgaaaagaaaccctgtactcattagcaa

SEQ ID NO: 201048 - DNA, 201 bp, Homo sapiens; identical to SEQ ID NO: 35347

SEQ ID NO: 201049 - DNA, 201 bp, Homo sapiens
tctgcagcccaggccaactggggacctcaccctcccatccccaggaaccatgaacgctgcctgtgagctgctgggccgcctgcaggctgaggtcctggagygcgtgagcctggtggagctgacctcgcttaagggcagggagaagctggcacctgtacccttcttctctctcctgcagtatgagtgaccacagggcctccc

SEQ ID NO: 201050 - DNA, 201 bp, Homo sapiens
gacggatgccccgcccctcacccacgctccgccctccggggatgccccacccctcgtggcggtcccgcccgtccccgcgcaggcgcgctcgggctgccgcwggctcttcgcacgcggccatggccgactccgagctgcagctggttgagcagcggatccgcagcttccccgacttccccaccccaggcgtggtattcaggt

SEQ ID NO: 201051 - DNA, 201 bp, Homo sapiens
gtgcaacaaagctgttttctgcgggaggctgaggaccacacaccacttcccactccaggctgagctggagattcagaaagacgccctggagccaggacagmgggtggtcgtcgtggatgatctgctggccactggtggtaagggtctccccgcagccaactgctgtggctccaagggcctggtgggagtgggacaggacct

SEQ ID NO: 201052 - DNA, 201 bp, Homo sapiens
cgagtcactcctgtcacttaccctgacaggcctagactcccgaggcttcctctttggcccctccctggcccaggagcttggactgggctgcgtgctcatchgaaagcgggggaagctgccaggccccactctgtgggcctcctattccctggagtacgggaaggtaagagggctggggtggccagaggaagggcagggcca

SEQ ID NO: 201053 - DNA, 201 bp, Homo sapiens; identical to SEQ ID NO: 35377

SEQ ID NO: 201054 - DNA, 201 bp, Homo sapiens
cctggagtgcccaagctgaatccacagggcccagctgccttgcttcttgttccttctgcgagctggtattgagcgcctgccacgagccaggccttccctgstgaagatcacggaatgcccacccagggaagggaggcctggaggcctccgggagagcccaagaggtggcccagggagaacagagtgttcctggccgtcttg

SEQ ID NO: 201055 - DNA, 201 bp, Homo sapiens
ccgaaagcgggggaagctgccaggccccactctgtgggcctcctattccctggagtacgggaaggtaagagggctggggtggccagaggaagggcagggcyaggccaccgtggccactctcccccagttctaaaaggccttcccaggcgtgtcaagtggagctgctgtggttacagtggccttgggagctcagagaggttg

SEQ ID NO: 201056 - DNA, 201 bp, Homo sapiens
cccacccagcactcaccatggctcctcagggcggccctcggcctctggggtgcaggactccccagcatcctgggcactggccttcagcgcccggactcttrcccccagctcccgggcccgttgcaggcatgacgcaagctcagagatggtgtccttcagggggatcaggggacacggtgccgtcaggcaggcaggcaggcc

SEQ ID NO: 201057 - DNA, 201 bp, Homo sapiens
tgtgccggtcaatgcagtgtcccagtgtgcagcatcgcctgcccaggccaactccccacatggggctagtggcagagccaggcttagaggctgcagctggrgacagagggcaaatgccaccaactctctggatccgccagccaaggaggaagccagatgaggcgtcaagctcatcaccaaggcttccacctcttaagcctg

SEQ ID NO: 201058 - DNA, 201 bp, Homo sapiens
agacataggctgggctcacacagccaggtaacagcaaggtggggttggagtcagggtctagggtggcagctgccaagctgtgcaacaaagctgttttctgygggaggctgaggaccacacaccacttcccactccaggctgagctggagattcagaaagacgccctggagccaggacagagggtggtcgtcgtggatgatc

SEQ ID NO: 201059 - DNA, 201 bp, Homo sapiens
ccagggagaacagagtgttcctggccgtcttgcctctcctagggtgtgacagcccactccctggacactgccctgaggaaagcgccagctcttgctggagycacaacactgccagagctcccttctcacctcctgcaggaagccctccctgacctcctgccaggccggggcagggtttccctgagcgtcccccaaccatca

SEQ ID NO: 201060 - DNA, 201 bp, Homo sapiens
agggatgctccaagcacagggttaggtgctgaggcagtgctggtgccaccatcttcacacagcggggccgggggccgctcaccttgtggtgctccttgacrtgctccaccagcttctggctgaagatctgccgtcgctgcaggaggcgcgaggccgtgagctggggggctgctccgtcagcctctgtgggacgagtccagg

SEQ ID NO: 201061 - DNA, 201 bp, Homo sapiens
aaactgtgcggctcacagatggggaaaccgaggtcccgcacccagcactcaccctgctccagcagtggctcgatggtgagctggtaatctgacctcctggygccatccttgaaggtggggacactgcgctcctggcggaagcggtaggaggccgggtacacggttttgatctggccaacattgcgctcctcaaaacgccta

SEQ ID NO: 201062 - DNA, 201 bp, Homo sapiens
gctcccttctcacctcctgcaggaagccctccctgacctcctgccaggccggggcagggtttccctgagcgtcccccaaccatcacagctcaggccacctsgagagactccctttttagacagaagccctggtgcagagctgcctttgagagtaagctgaggcctgtcaggtttctaccagcccagttacagatgggctgc

SEQ ID NO: 201063 - DNA, 201 bp, Homo sapiens
tctaaaaggccttcccaggcgtgtcaagtggagctgctgtggttacagtggccttgggagctcagagaggttgagacataggctgggctcacacagccagstaacagcaaggtggggttggagtcagggtctagggtggcagctgccaagctgtgcaacaaagctgttttctgcgggaggctgaggaccacacaccacttc

SEQ ID NO: 201064 - DNA, 201 bp, Homo sapiens
gcaccggctgcccacagggaacacattcctttgctggggttcagcgcctctcctggggctggaagtgccaaagcctggggcaaagctgtgtttcagccacrctgaacccaattacacacagcgggagaacgcagtaaacagctttcccacaagagccgtctcctgtcctcctgttccccagggcagggagccccaggacaa

SEQ ID NO: 201065 - DNA, 201 bp, Homo sapiens
ccttcccaggcgtgtcaagtggagctgctgtggttacagtggccttgggagctcagagaggttgagacataggctgggctcacacagccaggtaacagcarggtggggttggagtcagggtctagggtggcagctgccaagctgtgcaacaaagctgttttctgcgggaggctgaggaccacacaccacttcccactccag

SEQ ID NO: 201066 - DNA, 201 bp, Homo sapiens
tccgcgccgccatcggcctcctggcgcgacacctgaaggcgacccacgggggccgcatcgactacatcgcaggcgagtgcccagtggccgcatctagggcscttccgcctctgcgcgcgccgagggcagcacgtgggctctgcgcgtctgcttgggggagggcctttggggtgcttcagggggcgccgggacgggcgccgt

SEQ ID NO: 201067 - DNA, 201 bp, Homo sapiens
taatctgacctcctggtgccatccttgaaggtggggacactgcgctcctggcggaagcggtaggaggccgggtacacggttttgatctggccaacattgcrctcctcaaaacgcctatgggaggatgggggcggctcaggaggcaggcccgggcccacccccaactccaggacagccacagcccacccccggccactcacc

SEQ ID NO: 201068 - DNA, 201 bp, Homo sapiens
caacccggcctttgccggggcctcgtggccgcccacccagcactcaccatggctcctcagggcggccctcggcctctggggtgcaggactccccagcatcytgggcactggccttcagcgcccggactcttgcccccagctcccgggcccgttgcaggcatgacgcaagctcagagatggtgtccttcagggggatcaggg

SEQ ID NO: 201069 - DNA, 201 bp, Homo sapiens
caaaggtgggcgtctcggagcggttgtggagcatgcccacgatggtgtccatgctgcggaacatctccgccagcacctggtacttgtagggcagcacgagycccggcaggccgggctgggccagggcatggaagcgctggtaggcgggcgccttctcgccactgtcagggagggaggagcctcatgagaagcagtaggccc

SEQ ID NO: 201070 - DNA, 201 bp, Homo sapiens
cacctgctctctgcagcccaggccaactggggacctcaccctcccatccccaggaaccatgaacgctgcctgtgagctgctgggccgcctgcaggctgagktcctggagtgcgtgagcctggtggagctgacctcgcttaagggcagggagaagctggcacctgtacccttcttctctctcctgcagtatgagtgaccaca

SEQ ID NO: 201071 - DNA, 201 bp, Homo sapiens
gctgggagccaaccaggtaccccttgccaccggccaaccctggcccctggggattcccatgctgccgagtcactcctgtcacttaccctgacaggcctagwctcccgaggcttcctctttggcccctccctggcccaggagcttggactgggctgcgtgctcatccgaaagcgggggaagctgccaggccccactctgtgg

SEQ ID NO: 201072 - DNA, 201 bp, Homo sapiens
cagatgggctgctcagctcagagagaggggtggtgactcccctaggaacacacagctaagaagtggtcccttaaaagacagacccaggtctgcactctgayctggaagcagctccgggtaggtgatgggtaacattccttaaatggtgcatgtcactggcctttcagctgggagccaaccaggtaccccttgccaccggcc

SEQ ID NO: 201073 - DNA, 201 bp, Homo sapiens
ttggagtcagggtctagggtggcagctgccaagctgtgcaacaaagctgttttctgcgggaggctgaggaccacacaccacttcccactccaggctgagcyggagattcagaaagacgccctggagccaggacagagggtggtcgtcgtggatgatctgctggccactggtggtaagggtctccccgcagccaactgctgt

SEQ ID NO: 201074 - DNA, 201 bp, Homo sapiens
ccccatgccttcccctccccaacccaggggctggcctggagcacctgctctctgcagcccaggccaactggggacctcaccctcccatccccaggaaccaygaacgctgcctgtgagctgctgggccgcctgcaggctgaggtcctggagtgcgtgagcctggtggagctgacctcgcttaagggcagggagaagctggca

SEQ ID NO: 201075 - DNA, 201 bp, Homo sapiens; identical to SEQ ID NO: 35379

SEQ ID NO: 201076 - DNA, 201 bp, Homo sapiens
cccacgatggtgtccatgctgcggaacatctccgccagcacctggtacttgtagggcagcacgagtcccggcaggccgggctgggccagggcatggaagcrctggtaggcgggcgccttctcgccactgtcagggagggaggagcctcatgagaagcagtaggcccctacccctccaacgccacagcaggcccctcggcca

SEQ ID NO: 201077 - DNA, 201 bp, Homo sapiens
cagggctcatgatagtacaacagctgcccaccatcctggcacaggccacctccatgctgagcgcaggcttgcgttcggacacaaagacgctccgcagcacrcgggccagctcaggcagccgttctaagcgctgcagccgctgctcctgctccgggcaccgcgtcatctgtgccagctgcttctgtgcctccttggctcgga

SEQ ID NO: 201078 - DNA, 201 bp, Homo sapiens
gatagtacaacagctgcccaccatcctggcacaggccacctccatgctgagcgcaggcttgcgttcggacacaaagacgctccgcagcacgcgggccagckcaggcagccgttctaagcgctgcagccgctgctcctgctccgggcaccgcgtcatctgtgccagctgcttctgtgcctccttggctcggatctgcagcag

SEQ ID NO: 201079 - DNA, 201 bp, Homo sapiens
tctcctggggctggaagtgccaaagcctggggcaaagctgtgtttcagccacactgaacccaattacacacagcgggagaacgcagtaaacagctttcccmcaagagccgtctcctgtcctcctgttccccagggcagggagccccaggacaacaccagacttcagctgtactgtgggcatgtgctgcttggcgtgatgcc

SEQ ID NO: 201080 - DNA, 201 bp, Homo sapiens; identical to SEQ ID NO: 35384

SEQ ID NO: 201081 - DNA, 201 bp, Homo sapiens
aggttcaagcgattctcctgccggctactgtactccgagtagccgggactacaggtgcccaccaccatgcctggctaattttttgtatttttagtagaggyggggtttcaccatgttagccaggatggtctcgatctcctgacctggtgatccgcccgcctcggcctcccacggtgctgggattacaggcgtgagccaccg

SEQ ID NO: 201082 - DNA, 201 bp, Homo sapiens
ccccagccgtgtgaccagagctctctgtccccagctttgccagcgccgagtaccaggaggccctcagcaggatcacctcggtcgtccagcagcaccaggargccttggtccccgcgcagccccagctcaacgtgtgcaactgggcggtcatggtaagtggctggtgtgtgggcggccgtctctttgccggggctgcagcca

SEQ ID NO: 201083 - DNA, 201 bp, Homo sapiens
gctccggtccacgtccccaccagcagcaacgcagctcccagcctgggcattgagaaactccagcttcagccacactcgcagaagttcctccctgcatctcygctatggcagcgatggcaggtgtctttttatgtggatgttgtcgatattagaagtgattgaaaatggtgaaaaggcatcatctgtgcagatgtcctcaga

SEQ ID NO: 201084 - DNA, 201 bp, Homo sapiens
tggcagcgatggcaggtgtctttttatgtggatgttgtcgatattagaagtgattgaaaatggtgaaaaggcatcatctgtgcagatgtcctcagagcacrgcatgacggcgccgtggacccaagattcacagcatcgcaaactgcggccctgacatcgcgaaccgtggcacctcgtcgagccgtgtaatcgtatcttcgt

SEQ ID NO: 201085 - DNA, 201 bp, Homo sapiens
tggtgaaaaggcatcatctgtgcagatgtcctcagagcacagcatgacggcgccgtggacccaagattcacagcatcgcaaactgcggccctgacatcgcraaccgtggcacctcgtcgagccgtgtaatcgtatcttcgtgaagatgaaaggaatccaaacactccgcagcttgcattggaattttagaactgcagatgc

SEQ ID NO: 201086 - DNA, 201 bp, Homo sapiens
cccccccagggattggcccccagccccatcgggtcggtgcagagtgccctgaccgtgttgctgccatgtgtttcaggtgagccaccagctgggcagcatcwtggacctcttcaccaccagcctggcccttgcgggcctgacgccgcccagcgacagggccattgatggcctcaacctcctccccaccctcctgcagggccg

SEQ ID NO: 201087 - DNA, 201 bp, Homo sapiens
gcctccaggtggccccagcgtgtccttcctgtcattacatggtcctcccctcccatcccacaggcctatcttctattaccgtggcgacacgctgatggcgkccaccctcgggcagcacaaggctcacttctggacctggaccaactcctgggagaacttcagacaggtacagggctcgggacgtgggcgcaggcggagctg

SEQ ID NO: 201088 - DNA, 201 bp, Homo sapiens
gtgtgtcatatttgtaaatgtttacgtagtagtgagtgctggggagacccacaggccccagcccacatatcccgggtcctggtcacaggcagggacaggaygggacggctctactcacagcctctctgccagggcttggcctgctgagccttcatttcctctcttgcccgtgagtctgagggcagaggatggctcgggtgc

SEQ ID NO: 201089 - DNA, 201 bp, Homo sapiens
atggacctcttcaccaccagcctggcccttgcgggcctgacgccgcccagcgacagggccattgatggcctcaacctcctccccaccctcctgcagggccrgctgatggacaggttggtgctagacctgccccggccccttcccccgatccaagtagtgaagcccagagctgctaatcaggtgcaacccccaggcccagca

SEQ ID NO: 201090 - DNA, 201 bp, Homo sapiens
gtccttcctgtcattacatggtcctcccctcccatcccacaggcctatcttctattaccgtggcgacacgctgatggcggccaccctcgggcagcacaagrctcacttctggacctggaccaactcctgggagaacttcagacaggtacagggctcgggacgtgggcgcaggcggagctgcccccatctctatccagacgt

SEQ ID NO: 201091 - DNA, 201 bp, Homo sapiens
ccgtcttctgcgtcaatcacgctgggagctgcagcccggagctgttcctattcagccatgttggaacggaatccccacacccggctaattaaaaaaaaagktttttttagtgacagtgtctgtctgtgagacccaggttggtcttgacttcctgagctcaagcgatcctccctcctcagcctcccaaagtgttgggataac

SEQ ID NO: 201092 - DNA, 201 bp, Homo sapiens
aggtggccccagcgtgtccttcctgtcattacatggtcctcccctcccatcccacaggcctatcttctattaccgtggcgacacgctgatggcggccaccstcgggcagcacaaggctcacttctggacctggaccaactcctgggagaacttcagacaggtacagggctcgggacgtgggcgcaggcggagctgccccca

SEQ ID NO: 201093 - DNA, 201 bp, Homo sapiens
ctgcccgtggtgccctgtgggggttttagatgttcaatggtaacctgctcactctgcagggaggctgtccacacctgcttttcatagccaagaaaggcgcygataaataatgaaagaacagggtcagcagatgagagctggcccagcagcctgggacgctgtcctcagaaggcccacgtgtgggacgttgccctcggctgg

SEQ ID NO: 201094 - DNA, 201 bp, Homo sapiens
tgatgacagacgcagcccagagcctccaggtggccccagcgtgtccttcctgtcattacatggtcctcccctcccatcccacaggcctatcttctattacygtggcgacacgctgatggcggccaccctcgggcagcacaaggctcacttctggacctggaccaactcctgggagaacttcagacaggtacagggctcggg

SEQ ID NO: 201095 - DNA, 201 bp, Homo sapiens
tcctcccctcccatcccacaggcctatcttctattaccgtggcgacacgctgatggcggccaccctcgggcagcacaaggctcacttctggacctggaccmactcctgggagaacttcagacaggtacagggctcgggacgtgggcgcaggcggagctgcccccatctctatccagacgtggcccctgagcaccgtcctgg

SEQ ID NO: 201096 - DNA, 201 bp, Homo sapiens
atgttcaatggtaacctgctcactctgcagggaggctgtccacacctgcttttcatagccaagaaaggcgccgataaataatgaaagaacagggtcagcagatgagagctggcccagcagcctgggacgctgtcctcagaaggcccacgtgtgggacgttgccctcggctggtcagaaggcacatgtgtgggaggtttttg

SEQ ID NO: 201097 - DNA, 201 bp, Homo sapiens
gtgttgctgccatgtgtttcaggtgagccaccagctgggcagcatcatggacctcttcaccaccagcctggcccttgcgggcctgacgccgcccagcgacrgggccattgatggcctcaacctcctccccaccctcctgcagggccggctgatggacaggttggtgctagacctgccccggccccttcccccgatccaagt

SEQ ID NO: 201098 - DNA, 201 bp, Homo sapiens
ctcccatcccacaggcctatcttctattaccgtggcgacacgctgatggcggccaccctcgggcagcacaaggctcacttctggacctggaccaactcctsggagaacttcagacaggtacagggctcgggacgtgggcgcaggcggagctgcccccatctctatccagacgtggcccctgagcaccgtcctgggggaggc

SEQ ID NO: 201099 - DNA, 201 bp, Homo sapiens
gctccaggacacgggcagacgaggcccctcacggccgcaggtcaggggctccaggacacaccttccctcttctcattgcagggcattgatttctgccctgrgcagaacgtttcaggggtcacaactcacaatctggaagaccacacgaagctgcccctgatcttccacctgggacgggacccaggggagaggttccccctc

SEQ ID NO: 201100 - DNA, 201 bp, Homo sapiens
gatttctgccctgggcagaacgtttcaggggtcacaactcacaatctggaagaccacacgaagctgcccctgatcttccacctgggacgggacccaggggwgaggttccccctcaggtgagtcggtgcagggcctcctggctgctgaggcagtgccagccggactcccccaaatgcaggctccacagggacagagccctct

SEQ ID NO: 201101 - DNA, 201 bp, Homo sapiens
cagctttgccagcgccgagtaccaggaggccctcagcaggatcacctcggtcgtccagcagcaccaggaggccttggtccccgcgcagccccagctcaacrtgtgcaactgggcggtcatggtaagtggctggtgtgtgggcggccgtctctttgccggggctgcagccacccacccggggcccaggatgaaccgtggcca

SEQ ID NO: 201102 - DNA, 201 bp, Homo sapiens
gtaccaggaggccctcagcaggatcacctcggtcgtccagcagcaccaggaggccttggtccccgcgcagccccagctcaacgtgtgcaactgggcggtcrtggtaagtggctggtgtgtgggcggccgtctctttgccggggctgcagccacccacccggggcccaggatgaaccgtggccagcacagggcagaggcagg

SEQ ID NO: 201103 - DNA, 201 bp, Homo sapiens
gtgaatcacagtatgccgttggctgcctgatccatttgtcaccatcctccaggtatggagatgccttttgtcaccatcctgcaggtatggagacgccgtcmgggagattgatgacagcattgggaagatactggagctcctccaagacctgcacgtcgcggacaacaccttcgtcttcttcacgtcggacaacggcgctgc

SEQ ID NO: 201104 - DNA, 201 bp, Homo sapiens
cctcgcaggtggatctcagactgctgtgctagcagtgagcaaggctccgtgggcatgagaccctccgagccaggcccgggatataatctcctggtgtgtcrttagctaagaccgttggaaaagcgcactatttgggcgggagtgtcctgattttccaggtgcagtctgtcacggcttcccttggctaggaaagggaaatcc

SEQ ID NO: 201105 - DNA, 201 bp, Homo sapiens
gacgcgtggggacggggaccgcaccaacctcgccccgtgggacgtgtggggacggggaccgtgggaggcatgaggaggtcggcctgaggctggaggacgayggtgtggctctctccataggaagccctggacttcattaagagacaggcacggcaccacccctttttcctctactgggctgtcgacgccacgcacgcaccc

SEQ ID NO: 201106 - DNA, 201 bp, Homo sapiens
agtcatggcagtgagtaggactgtcgccaagacctgggactcctcccagcgagagtgctcccttgcggtatcttctgagtcagtggtgagcgtggagcccmctccctcaagccctgggactcctccccgcagtattttctggtgagtgatgagcgtggagcccactccctttacagcattttccgctgcatccattcatgt

SEQ ID NO: 201107 - DNA, 201 bp, Homo sapiens
tggtgagcgtggagccccctccctcaagccctgggactcctccccgcagtattttctggtgagtgatgagcgtggagcccactccctttacagcattttcygctgcatccattcatgttatttgtggcctggaacaggtaggaggatgacccaggtgagcacaagcagatccggacgcagctctgctgactgccgaccttc

SEQ ID NO: 201108 - DNA, 201 bp, Homo sapiens
aagggtgtgtcatatttgtaaatgtttacgtagtagtgagtgctggggagacccacaggccccagcccacatatcccgggtcctggtcacaggcagggacrggatgggacggctctactcacagcctctctgccagggcttggcctgctgagccttcatttcctctcttgcccgtgagtctgagggcagaggatggctcgg

SEQ ID NO: 201109 - DNA, 201 bp, Homo sapiens
ctcagggctgggcgtggtggctcacacctgggatctcagcactttgggaggtggaggcgggtggactgcttgagctcagttcactcaagaccagcctgggmaacgtggcaaaactccatctctaccaaaaatacaaaaaagttggcctgacacggtggttcacacctgtaatcccagcactttgggaggctgaggcaggtg

SEQ ID NO: 201110 - DNA, 201 bp, Homo sapiens
gctgccagggagcgagccgctgtgggtgttggttcatgcacaggtttccacgtggacacacttttcagttctgttgggcgtgtaccagggaggcgctgccrggcggcgtggccaccctgcgtggcgctgccggacctctcaccaggtgctgcgtgtcacgttcttacatggtgtgtgagggctccagtttccagtgagttc

SEQ ID NO: 201111 - DNA, 201 bp, Homo sapiens
ctggactgccgtggcgcgatctcagctcactgcagcctctgcctcctgagctcaggggattctcctgcctcagcctcccaagtagctgggattacaggtgygtgccaccatgcccagctgattttttgattttttatagagatggggtctcaccttgttgcccaggctggtcaacgagagagaaaagtatttcagagactt

SEQ ID NO: 201112 - DNA, 201 bp, Homo sapiens
tcggcctgaggctggaggacgacggtgtggctctctccataggaagccctggacttcattaagagacaggcacggcaccacccctttttcctctactgggstgtcgacgccacgcacgcacccgtctatgcctccaaacccttcttgggcaccagtcagcgagggcggtgagtcctggctccatggagcatagacctcgct

SEQ ID NO: 201113 - DNA, 201 bp, Homo sapiens
ttgcagtgagtcgagattgtgccctccagcctgggcgacaacagcaagacttcgtctcaaaaaaaaaaaaaaaaaaaaaaaagccagaaacgcattctgtmtcggtctggaggccggaagtctgagctcaaggtgtgggcaggacctcgctccctcggaaacctgcaagggacctcttgcccctgcagcttctggtggccc

SEQ ID NO: 201114 - DNA, 201 bp, Homo sapiens
gggcctgtgaacgtggtggttgaattcagctgggcctgtgaacttggtcgttgtgtttagaatgtgttgtctttcccaggtgttgtgtgtttgtgctgccraagctgctgaaggcggcctgtagagggcaggggcccaggcaggcacagtcacttcactggtgtcttggttggtgcttggagcacctcaggagggaatatg

SEQ ID NO: 201115 - DNA, 201 bp, Homo sapiens
ggaggccccagctgtgcttgactccagagatgggacactcagtaccgtggcatttaggccaattatggaaaggccagagcaaccccacccctttgaagccrtccactggcctgggatcagcagaggagggctgtggtgggggtgctggctctgtccttcataagccacatgaacttgaactgaggccattcctcttctggg

SEQ ID NO: 201116 - DNA, 201 bp, Homo sapiens; identical to SEQ ID NO: 201051

SEQ ID NO: 201117 - DNA, 201 bp, Homo sapiens; identical to SEQ ID NO: 35403

SEQ ID NO: 201118 - DNA, 201 bp, Homo sapiens
caccttcgtcttcttcacgtcggacaacggcgctgccctcatttccgcccccgaacaaggtgagtgctcgctgtcacttctcacggtttccccacagccascgtgtcagcgaagagtgcctggaccggctgtgcccacggggtctgtggtgggcagagcatgaagggtccctctgggtccagcgggaggagcagatgtcac

SEQ ID NO: 201119 - DNA, 201 bp, Homo sapiens
ccagcgagcttctgaagcccacgtctgtccacagtggcccccaggctcacagcccctcctcagcacgtgtctggtgggccaggcgtgcagtgatgtgggcsaggtccgcggccttgtccagcttgacgtaggtgtcggtgcggatgcggtggaggctgagccagtccggcagcagctcggagaggagcagcaggtgcttct

SEQ ID NO: 201120 - DNA, 201 bp, Homo sapiens
ttttgggacggagtctccctctgttgcccaggctggagtgcagtggtacaatcttggctcactgcaacctccgcctcccaggttcaagcgattctcctgcyggctactgtactccgagtagccgggactacaggtgcccaccaccatgcctggctaattttttgtatttttagtagaggcggggtttcaccatgttagcca

SEQ ID NO: 201121 - DNA, 201 bp, Homo sapiens
ctcggcctcaccgctctcctccccacgcaccccgtgctcggcctcaccgctctcctccccacgcaccccgtgctcggcctcaccgctctcctccccacgcwccccgtgctcggcctcaccgctctcctccccacgctccccgtgctcggcctcaccgctctcctccccacgcaccccgtgctcggcctcaccgctctcctc

SEQ ID NO: 201122 - DNA, 201 bp, Homo sapiens
ccacgcaccccgtgctcggcctcaccgctctcctccccacgcaccccgtgctcggcctcaccgctctcctccccacgcaccccgtgctcggcctcaccgcyctcctccccacgcaccccgtgctcggcctcaccgctctcctccccacgcaccccgtgctcggcctcaccgctctcctccccacgcaccccgtgctcggcc

SEQ ID NO: 201123 - DNA, 201 bp, Homo sapiens
ctcggcctcaccgctctcctccccacgcaccccgtgctcggcctcaccgctctcctccccacgcaccccgtgctcggcctcaccgctctcctccccacgcwccccgtgctcggcctcaccgctctcctccccacgcaccccgtgctcggcctcaccgctctcctccccacgcaccccgtgctcggcctcaccgctctcctc

SEQ ID NO: 201124 - DNA, 201 bp, Homo sapiens
accaggccgggacagggctggggctctgctccccaggctgggagccacccgtggctgtgctcagcagcagcctggaaaaggtgaggggagccaccccagcrccgcccggctccatgcgtagtgggttcagggacgtctgtaccccacagacctccccacccacctgcccacggaaaggctccagctgagaaaaatgccaat

SEQ ID NO: 201125 - DNA, 201 bp, Homo sapiens
ccccggcattgccgcctgcgagggccgtcctgggcatcggtccccggcattgccgcctgcgagggccgtcctgggcatcggtccccggcattgccgcctgygagggccgtcctgggcatcggtccccggcattgccgcctgcgagggccgtcctgggcatcggtccccggcattgccgcctgcgagggccgtcctgggcat

SEQ ID NO: 201126 - DNA, 201 bp, Homo sapiens
cagggcagaggcaggcgtgcttccccgcctccgtcagtggtgaggccctcgtgcctcagagcacacgcggcggcgtccgggattcgggaggcaggagccargcgactcggggaccagaacaacgctgcaccagggcagccgcaggtccacagccggccacccgggcctctgcctggctgagctgagactggggagctccaa

SEQ ID NO: 201127 - DNA, 201 bp, Homo sapiens
cagaggcaggcgtgcttccccgcctccgtcagtggtgaggccctcgtgcctcagagcacacgcggcggcgtccgggattcgggaggcaggagccaagcgaytcggggaccagaacaacgctgcaccagggcagccgcaggtccacagccggccacccgggcctctgcctggctgagctgagactggggagctccaaggccc

SEQ ID NO: 201128 - DNA, 201 bp, Homo sapiens; identical to SEQ ID NO: 201070

SEQ ID NO: 201129 - DNA, 201 bp, Homo sapiens
tgcagctgccaggacagggcagggatgctggcaggtgagagccacagaagctcacagtggagccccgaggtgccctgacgtggcccagggtgcaagggggkcctcacaggctgtcttctctccttggagtccggggcttcctccgcagccctgtccacacctcttcctgcactgcagaccggttgtttctgccagggcgct

SEQ ID NO: 201130 - DNA, 201 bp, Homo sapiens
caaacagaattgtgtcccatgagacatggagggcctttgagaggaaaaagcccagacctggcccagctctgggactccacacgttaggaggggctgaggcraggagcggccaccctgccaagctgagccttacaggcaggggccatgtagcctgccgtccaccggggaaatggatcattgcatccagacaaagaccaaggt

SEQ ID NO: 201131 - DNA, 201 bp, Homo sapiens
cgccgtgccgtgggaaggaaggtggtggctctgaacagccagggagccacagcgtgggccggcggatgtaacaggagagcaccggccatcgggagcacctmccagcagtgaggaccatggagggcagatggccttgtccctgcccagggacagtccaccctgcagggttatttaggactgggcagggcagggccacctccg

SEQ ID NO: 201132 - DNA, 201 bp, Homo sapiens
atggcggccaccctcgggcagcacaaggctcacttctggacctggaccaactcctgggagaacttcagacaggtacagggctcgggacgtgggcgcaggcrgagctgcccccatctctatccagacgtggcccctgagcaccgtcctgggggaggcacaggagggtgagacaggcaggaactccaccccctccacagcctt

SEQ ID NO: 201133 - DNA, 201 bp, Homo sapiens
ggagcggccccatcgtgcacgcacgcaggcgatgctgaggtttgggctggcgtggagcggccccatcgtgcacgcacgcaggcgatgctggggtttggccragctctgccgctggctgggacacagggtggtgctggcttccacggtccccgacacgctcttggcaccatgggcagctccccaggccagaagcacctgcag

SEQ ID NO: 201134 - DNA, 201 bp, Homo sapiens
aggccagacagaggggcctcggagtgttggcttctaccaggctcctgctgaggtgggcgctcagggagacggctggaggatccgaggagagccaaagcccyaggcggtgccctccccttctccttctagagcaaagtcctggcccactgcctgtttaaaagcacttttttccaacaatacacactgtaaaatttgaagaag

SEQ ID NO: 201135 - DNA, 201 bp, Homo sapiens
cttccttccctcacatgaagctttccagggccgtgcgcggtgtggggtgcccttcctttcgatggttgggtagtgtgccgcggtacgtgcgtgagtttccygagacataacacgttaccacaggccaggtggccttagcggaaatggattcttgccggattctggaggccagaagtgcaaaatcaaggtgtcagccgggcc

SEQ ID NO: 201136 - DNA, 201 bp, Homo sapiens
cgcggtgtggggtgcccttcctttcgatggttgggtagtgtgccgcggtacgtgcgtgagtttcctgagacataacacgttaccacaggccaggtggcctyagcggaaatggattcttgccggattctggaggccagaagtgcaaaatcaaggtgtcagccgggcccctccccctcaggctctccaggaaggtccttgctg

SEQ ID NO: 201137 - DNA, 201 bp, Homo sapiens
ctccccgtgctcttccctgcagatgggatggggtgacctcggggtgtatggagagccctccagagagaccccgaatttggaccggatggctgcagaaggghtgcttttcccaaacttctattctgccaaccctctgtgctcgccatgtaagtcagcggggccctcgcccccaggaaggggtgagcccaacaggccgaggcc

SEQ ID NO: 201138 - DNA, 201 bp, Homo sapiens
tcatccctcgagtcacagcccctagcacccgccaccactgccccccggctgcctcctgccacgtcgtccttggaggggccacgtcattacacacaggagcygtggcggaggagctgcctgtccaccctaggggcctgttggatggtgaaagctctggtctaaaccacaaagaagccaccaggaaggagagtaacagcctag

SEQ ID NO: 201139 - DNA, 201 bp, Homo sapiens
ttcctgtttccaggcatctgggtcacaggccccagttccaccccctgaagcacggatttgatgagtggtttggatcccccaactgccactttggaccttaygacaacaaggccaggcccaacatccctgtgtacagggactgggagatggttggcaggtaatggagccccaccccttcccctcccacgtcctgaactgctg

SEQ ID NO: 201140 - DNA, 201 bp, Homo sapiens
taattacctggcaggaaatattttctgccctggaaaacccagaggagacacacttgggttcgaggcatgacccgcaaaactctcctgggagttcagaaaamgtggaaggaaggagccggggccacgaggggcatgtcaggcgggttccaggcggctgggaggctcctcacgatgcaccacccttcaccgtgcagggaaccc

SEQ ID NO: 201141 - DNA, 201 bp, Homo sapiens
gtaagggaacggggcaatcatataagcgtttgtctcaggggagccccagagggatgacttccagttccgtctgtcctttgtccacaaggaatttccctggrcgctaattatgagggaggcgtgtagcttcttatcattgtaactatgttatttagaaataaaacgggaggcaggtttgcctaattcccagcttgatttttc

SEQ ID NO: 201142 - DNA, 201 bp, Homo sapiens
ctgaactgctgtgcccggcgtgcctgccccccgcctctagcactggtgggctcaagtcgccactcatgagggctggtctgtccctgggtccccgggcaccragggctttggtttggtggcttctgtcccaccaagttttgccccagagcctatgagactcctgcctggggtttcccaccttttcagggtcgtagatccctg

SEQ ID NO: 201143 - DNA, 201 bp, Homo sapiens
gagggctttggtttggtggcttctgtcccaccaagttttgccccagagcctatgagactcctgcctggggtttcccaccttttcagggtcgtagatccctktagctgtcctgagagaggaaggcccccagcagagcgagcccacacggtctgccctagctgtcagggtactgcccatgtggtctacgggtggggaggccgg

SEQ ID NO: 201144 - DNA, 201 bp, Homo sapiens
cgcccagctaatttttgtatttttagtagagacagagtttcaccatgttgcccaggctggtctcaaattcctgacctcatgatccaccttcctcagcctcmcaaaatgctgggattacaggcatgagccatgacgcccagccctagccttcttttaaatgaagcccatggctttgctggtgaaatcagggagaacgggact

SEQ ID NO: 201145 - DNA, 201 bp, Homo sapiens
caccatcctgcaggtatggagacgccgtccgggagattgatgacagcattgggaagatactggagctcctccaagacctgcacgtcgcggacaacaccttygtcttcttcacgtcggacaacggcgctgccctcatttccgcccccgaacaaggtgagtgctcgctgtcacttctcacggtttccccacagccagcgtgtc

SEQ ID NO: 201146 - DNA, 201 bp, Homo sapiens; identical to SEQ ID NO: 201066

SEQ ID NO: 201147 - DNA, 201 bp, Homo sapiens
gatgacatggggcgtagctggacaattcaggatcacctctccagtcttgaaatttttttttttgagacggagtctcgctctgtcacccaggctggagtgcrtgcagtggtgcgatcttcgctcactgcaagctgtgcctcctgggttcacaccattctcctgcctcagcctccctagtagctgggacgacaggtgcccacc

SEQ ID NO: 201148 - DNA, 201 bp, Homo sapiens
ccagccggaagggccggcggacgctcgctaggtcggctcgctggccggggctccgcggctcccgtggttgccatggcggcggttgtcgcggcgacgaggtrgtggcagctgttgctggtgctcagcgccgcggggatgggggcctcgggcgccccgcagccccccaacatcctgctcctgctcatggacgacgtgagtgcg

SEQ ID NO: 201149 - DNA, 201 bp, Homo sapiens
tgcagaaggcgctcattcctcctccccgtgctcttccctgcagatgggatggggtgacctcggggtgtatggagagccctccagagagaccccgaatttgraccggatggctgcagaagggctgcttttcccaaacttctattctgccaaccctctgtgctcgccatgtaagtcagcggggccctcgcccccaggaagggg

SEQ ID NO: 201150 - DNA, 201 bp, Homo sapiens
ccagacgtggcccctgagcaccgtcctgggggaggcacaggagggtgagacaggcaggaactccaccccctccacagccttctctgtgtggcccccagtcrttcagcgtggcctagggcatggcagctgacaggctggagaggagggagggacctcttcctgccccgcgtgatgacagtagccccgcggcatagctacagg

SEQ ID NO: 201151 - DNA, 201 bp, Homo sapiens
ccagctaatttttgtatttttagtagagacagagtttcaccatgttgcccaggctggtctcaaattcctgacctcatgatccaccttcctcagcctcccaraatgctgggattacaggcatgagccatgacgcccagccctagccttcttttaaatgaagcccatggctttgctggtgaaatcagggagaacgggactttc

SEQ ID NO: 201152 - DNA, 201 bp, Homo sapiens
catgttgcccaggctggtctcaaattcctgacctcatgatccaccttcctcagcctcccaaaatgctgggattacaggcatgagccatgacgcccagcccyagccttcttttaaatgaagcccatggctttgctggtgaaatcagggagaacgggactttcttggcctaaattctgaagtctgtctggatctgtgttcttt

SEQ ID NO: 201153 - DNA, 201 bp, Homo sapiens
aaggagccggggccacgaggggcatgtcaggcgggttccaggcggctgggaggctcctcacgatgcaccacccttcaccgtgcagggaaccccggccgccrccatgcctgccgccctcggttgtgcccagacgctctgcagggtaggcgggcagtgccagcaccctcctcgggtgaggccttggtcttttgtccctgccgt

SEQ ID NO: 201154 - DNA, 201 bp, Homo sapiens
  misc_feature (1)...(201): n = A,T,C or G
ctacctgcaggtgatggggaccgcaccatcctcgccctgtgggacgcatggggacggggaccgcaccaacctcatcctgtgggaggcgtggggacaggaangcatcaacctcaccccgtgggaggcatgggttcagggacctcatcaccctcgccccgtgggacgcgtggggacggggaccgcaccatcctcgccccgtgg

SEQ ID NO: 201155 - DNA, 201 bp, Homo sapiens
  misc_feature (1)...(201): n = A,T,C or G
ccctgtgggacgcatggggacggggaccgcaccaacctcatcctgtgggaggcgtggggacaggaatgcatcaacctcaccccgtgggaggcatgggttcngggacctcatcaccctcgccccgtgggacgcgtggggacggggaccgcaccatcctcgccccgtgggacgcgtggggacggggaccgcaccaaccttgcc

SEQ ID NO: 201156 - DNA, 201 bp, Homo sapiens; identical to SEQ ID NO: 201049

SEQ ID NO: 201157 - DNA, 201 bp, Homo sapiens; identical to SEQ ID NO: 201050

SEQ ID NO: 201158 - DNA, 201 bp, Homo sapiens
  misc_feature (1)...(201): n = A,T,C or G
atggggacggggaccgcaccaacctcatcctgtgggaggcgtggggacaggaatgcatcaacctcaccccgtgggaggcatgggttcagggacctcatcancctcgccccgtgggacgcgtggggacggggaccgcaccatcctcgccccgtgggacgcgtggggacggggaccgcaccaaccttgccccgtgggacgcgt

SEQ ID NO: 201159 - DNA, 201 bp, Homo sapiens
acgcgtggggacggggaccgcaccaacctcgccccgtgggacgtgtggggacggggaccgtgggaggcatgaggaggtcggcctgaggctggaggacgacrgtgtggctctctccataggaagccctggacttcattaagagacaggcacggcaccacccctttttcctctactgggctgtcgacgccacgcacgcacccg

SEQ ID NO: 201160 - DNA, 201 bp, Homo sapiens
attgaaaatggtgaaaaggcatcatctgtgcagatgtcctcagagcacagcatgacggcgccgtggacccaagattcacagcatcgcaaactgcggccctracatcgcgaaccgtggcacctcgtcgagccgtgtaatcgtatcttcgtgaagatgaaaggaatccaaacactccgcagcttgcattggaattttagaact

SEQ ID NO: 201161 - DNA, 201 bp, Homo sapiens
ggacgacggtgtggctctctccataggaagccctggacttcattaagagacaggcacggcaccacccctttttcctctactgggctgtcgacgccacgcaygcacccgtctatgcctccaaacccttcttgggcaccagtcagcgagggcggtgagtcctggctccatggagcatagacctcgctggaggccccagctgtg

SEQ ID NO: 201162 - DNA, 201 bp, Homo sapiens; identical to SEQ ID NO: 35432

SEQ ID NO: 201163 - DNA, 201 bp, Homo sapiens
gcatcgcaaactgcggccctgacatcgcgaaccgtggcacctcgtcgagccgtgtaatcgtatcttcgtgaagatgaaaggaatccaaacactccgcagcytgcattggaattttagaactgcagatgccgttcccctccatttcctgctttttggcaatgggatgacgttgcttttgtaatgaaagaagggtgtgtcata

SEQ ID NO: 201164 - DNA, 201 bp, Homo sapiens
gattctcctttcatctgatccacagaggcagagaagggtgccagggagtgagggcgtggcctggctctggggtctttgggcctggtttgaggctcctctgyctctcacaggccttgtgaccccgctcagtccctgctgtgggcgtgtgagcatgtatgcatatctgtagacccagctgggcagcggggctcacgccccccc

SEQ ID NO: 201165 - DNA, 201 bp, Homo sapiens
gggtctggcccagccttgccaaggaccagcaatgaggggacgcccaggcaccctagccccggccgcccaggcaccccagacacccaggcaccccagccccrgctgcccagaaaccccagccccagacatccaggcaccccagccccggccgcccagacacccaggtaccccagccctggccgcccaggcactccagcccta

SEQ ID NO: 201166 - DNA, 201 bp, Homo sapiens
cccctcacctggactcaaaaagaggctgcttgatctgcatgaagccacgcgggtgtgcagggcagggacttgagtcccagagggccgcggacactccctgytccaggtcacctgctggtgagtgccaggccccactgctgctttcggacaaggacgttgagctgacagcttaatttgtgtagcgtcctgcccatgtgcttc

SEQ ID NO: 201167 - DNA, 201 bp, Homo sapiens
ccccacagacctccccacccacctgcccacggaaaggctccagctgagaaaaatgccaatttcagcgttttggaaccttgccatctgcctcgctccctgargaagggaaaccctctccccacctgaggaagggaaaccctcttcccagagccaccaagttgccttttcccgtgggccacaaagtgaaattgaattcgatgg

SEQ ID NO: 201168 - DNA, 201 bp, Homo sapiens
tgcgtggggccagctccttctggaggctccaggagatgttctgttccctgccttttcccaatcctagtagctgccccattcctgagctcctggcccctccmccgtcaaagccagcagcacgcaggcatctgtccctggccttcctgttccacgttttttttttttttttttttttttttgagatgaagtctcactctgttg

SEQ ID NO: 201169 - DNA, 201 bp, Homo sapiens
ccttcatttcctctcttgcccgtgagtctgagggcagaggatggctcgggtgcctgctgcctgtcctagcgaggcccggggccgctgcaggcttgagcacrtggtcccagtgactgctcactgtggttctcagcccgttagagctctgcagcctcagcctgtccaggccagcccctctccgtccttcgctgtcagccccag

SEQ ID NO: 201170 - DNA, 201 bp, Homo sapiens
gagctctgcagcctcagcctgtccaggccagcccctctccgtccttcgctgtcagccccagccgtgtgaccagagctctctgtccccagctttgccagcgycgagtaccaggaggccctcagcaggatcacctcggtcgtccagcagcaccaggaggccttggtccccgcgcagccccagctcaacgtgtgcaactgggcg

SEQ ID NO: 201171 - DNA, 201 bp, Homo sapiens
cagtgatgtgggcgaggtccgcggccttgtccagcttgacgtaggtgtcggtgcggatgcggtggaggctgagccagtccggcagcagctcggagaggagmagcaggtgcttctccatttcccctgggggaggagaggaggacactgaggctggtgctgggccccagccctgcacgggcagcacttgaaaccagcctgacc

SEQ ID NO: 201172 - DNA, 201 bp, Homo sapiens
cgtgtgaccagagctctctgtccccagctttgccagcgccgagtaccaggaggccctcagcaggatcacctcggtcgtccagcagcaccaggaggccttgktccccgcgcagccccagctcaacgtgtgcaactgggcggtcatggtaagtggctggtgtgtgggcggccgtctctttgccggggctgcagccacccaccc

SEQ ID NO: 201173 - DNA, 201 bp, Homo sapiens
ggtgagtgctcgctgtcacttctcacggtttccccacagccagcgtgtcagcgaagagtgcctggaccggctgtgcccacggggtctgtggtgggcagagyatgaagggtccctctgggtccagcgggaggagcagatgtcaccgagcctcgagcaaggcccttctggcccaggactaacctggaagcaggagtgaccttg

SEQ ID NO: 201174 - DNA, 201 bp, Homo sapiens
tccttcgctgtcagccccagccgtgtgaccagagctctctgtccccagctttgccagcgccgagtaccaggaggccctcagcaggatcacctcggtcgtcyagcagcaccaggaggccttggtccccgcgcagccccagctcaacgtgtgcaactgggcggtcatggtaagtggctggtgtgtgggcggccgtctctttgc

SEQ ID NO: 201175 - DNA, 201 bp, Homo sapiens
ccaccctcgggcagcacaaggctcacttctggacctggaccaactcctgggagaacttcagacaggtacagggctcgggacgtgggcgcaggcggagctgyccccatctctatccagacgtggcccctgagcaccgtcctgggggaggcacaggagggtgagacaggcaggaactccaccccctccacagccttctctgtg

SEQ ID NO: 201176 - DNA, 201 bp, Homo sapiens
aggtggtggagacgctaacggggattgacaggcgtggcagccccttgtaaacctgcgcgtgcctcgtctgtcacgcgtctgtctactcgttggggctcttrttgacgcccggggtctgagccacacccttcttatccagtttctgtttctgtcacctccacatagcgagggcggcactgctcacaggacggctacccatcc

SEQ ID NO: 201177 - DNA, 201 bp, Homo sapiens
agccccagagggatgacttccagttccgtctgtcctttgtccacaaggaatttccctggacgctaattatgagggaggcgtgtagcttcttatcattgtarctatgttatttagaaataaaacgggaggcaggtttgcctaattcccagcttgatttttctcttggctgagtgattttggggtccggagatttattttcct

SEQ ID NO: 201178 - DNA, 201 bp, Homo sapiens
caacctcatcctgtgggaggcgtggggacaggaatgcatcaacctcaccccgtgggaggcatgggttcagggacctcatcaccctcgccccgtgggacgcrtggggacggggaccgcaccatcctcgccccgtgggacgcgtggggacggggaccgcaccaaccttgccccgtgggacgcgtggggacggggaccgcacca

SEQ ID NO: 201179 - DNA, 201 bp, Homo sapiens
ctccgcagcttgcattggaattttagaactgcagatgccgttcccctccatttcctgctttttggcaatgggatgacgttgcttttgtaatgaaagaaggstgtgtcatatttgtaaatgtttacgtagtagtgagtgctggggagacccacaggccccagcccacatatcccgggtcctggtcacaggcagggacaggat

SEQ ID NO: 201180 - DNA, 201 bp, Homo sapiens
ccatcgggtcggtgcagagtgccctgaccgtgttgctgccatgtgtttcaggtgagccaccagctgggcagcatcatggacctcttcaccaccagcctggyccttgcgggcctgacgccgcccagcgacagggccattgatggcctcaacctcctccccaccctcctgcagggccggctgatggacaggttggtgctagac

SEQ ID NO: 201181 - DNA, 201 bp, Homo sapiens
aaagaagggtgtgtcatatttgtaaatgtttacgtagtagtgagtgctggggagacccacaggccccagcccacatatcccgggtcctggtcacaggcagrgacaggatgggacggctctactcacagcctctctgccagggcttggcctgctgagccttcatttcctctcttgcccgtgagtctgagggcagaggatggc

SEQ ID NO: 201182 - DNA, 201 bp, Homo sapiens; identical to SEQ ID NO: 201052

SEQ ID NO: 201183 - DNA, 201 bp, Homo sapiens
agcttctcggggtctcctcggggctcacccagcgctgctcttccagcctacacaccgcaggagattgtgggcggcatcccagactcggagcagctcctgcyggagcttctgaagaaggccggctacgtcagcaagattgtcggcaagtggtaagtctcctggccacgcctgcccaggcgtcctgctccatccacttcctgg

SEQ ID NO: 201184 - DNA, 201 bp, Homo sapiens
cccgcccacggccgtgcctagaagccatctcataccacctctcctgcagcccgttctgaagagcagccgcaagctggattcgttccaggacaggacaggcygcgcaaggaaacccggacagctggcctgggggccagggcgagtgggcacagaggtgtggcctgcagggctgctgtgggccggaggatgagattaggtgcc

SEQ ID NO: 201185 - DNA, 201 bp, Homo sapiens
ccttgccaaggaccagcaatgaggggacgcccaggcaccctagccccggccgcccaggcaccccagacacccaggcaccccagccccggctgcccagaaaycccagccccagacatccaggcaccccagccccggccgcccagacacccaggtaccccagccctggccgcccaggcactccagccctagacacccaggcac

SEQ ID NO: 201186 - DNA, 201 bp, Homo sapiens
tgggttcagggacctcatcaccctcgccccgtgggacgcgtggggacggggaccgcaccatcctcgccccgtgggacgcgtggggacggggaccgcaccarccttgccccgtgggacgcgtggggacggggaccgcaccaacctcgccccgtgggacgtgtggggacggggaccgtgggaggcatgaggaggtcggcctga

SEQ ID NO: 201187 - DNA, 201 bp, Homo sapiens
ggtttggatcccccaactgccactttggaccttatgacaacaaggccaggcccaacatccctgtgtacagggactgggagatggttggcaggtaatggagycccaccccttcccctcccacgtcctgaactgctgtgcccggcgtgcctgccccccgcctctagcactggtgggctcaagtcgccactcatgagggctggt

SEQ ID NO: 201188 - DNA, 201 bp, Homo sapiens; identical to SEQ ID NO: 35390

SEQ ID NO: 201189 - DNA, 201 bp, Homo sapiens
ttcagggacctcatcaccctcgccccgtgggacgcgtggggacggggaccgcaccatcctcgccccgtgggacgcgtggggacggggaccgcaccaacctygccccgtgggacgcgtggggacggggaccgcaccaacctcgccccgtgggacgtgtggggacggggaccgtgggaggcatgaggaggtcggcctgaggct

SEQ ID NO: 201190 - DNA, 201 bp, Homo sapiens
aaccccacccctttgaagccgtccactggcctgggatcagcagaggagggctgtggtgggggtgctggctctgtccttcataagccacatgaacttgaackgaggccattcctcttctgggaagaggccggccagtttcactgtggtctgtgaagttatgatttaatgaactccgtgaatcacagtatgccgttggctgcc

SEQ ID NO: 201191 - DNA, 201 bp, Homo sapiens
tggagcatagacctcgctggaggccccagctgtgcttgactccagagatgggacactcagtaccgtggcatttaggccaattatggaaaggccagagcaaycccacccctttgaagccgtccactggcctgggatcagcagaggagggctgtggtgggggtgctggctctgtccttcataagccacatgaacttgaactga

SEQ ID NO: 201192 - DNA, 201 bp, Homo sapiens
gaggtcggcctgaggctggaggacgacggtgtggctctctccataggaagccctggacttcattaagagacaggcacggcaccacccctttttcctctackgggctgtcgacgccacgcacgcacccgtctatgcctccaaacccttcttgggcaccagtcagcgagggcggtgagtcctggctccatggagcatagacct

SEQ ID NO: 201193 - DNA, 201 bp, Homo sapiens
acagaggccatgtccagggaggcagcagaaatctgctgtggtgaaatctgcctcggggaaatctgcgtcggggatgctgctttcaaagccgtagctgcagmagaactttcctcagacgacacgcaactgacgtgagacccgcccacggccgtgcctagaagccatctcataccacctctcctgcagcccgttctgaagagc

SEQ ID NO: 201194 - DNA, 201 bp, Homo sapiens
acaggttggtgctagacctgccccggccccttcccccgatccaagtagtgaagcccagagctgctaatcaggtgcaacccccaggcccagcagccctcctsgttctggacacaggcgtgctcgtgcccagggcaggaggaggcaggggtgcctgagacgagaggacctggggacctgcctgtggggcaggggccatcctgg

SEQ ID NO: 201195 - DNA, 201 bp, Homo sapiens
tcctctactgggctgtcgacgccacgcacgcacccgtctatgcctccaaacccttcttgggcaccagtcagcgagggcggtgagtcctggctccatggagyatagacctcgctggaggccccagctgtgcttgactccagagatgggacactcagtaccgtggcatttaggccaattatggaaaggccagagcaaccccac

SEQ ID NO: 201196 - DNA, 201 bp, Homo sapiens
gtacagaggccatgtccagggaggcagcagaaatctgctgtggtgaaatctgcctcggggaaatctgcgtcggggatgctgctttcaaagccgtagctgcwgaagaactttcctcagacgacacgcaactgacgtgagacccgcccacggccgtgcctagaagccatctcataccacctctcctgcagcccgttctgaaga

SEQ ID NO: 201197 - DNA, 201 bp, Homo sapiens
cgtggggtccctgaagtgtcctgggttcctgtttccaggcatctgggtcacaggccccagttccaccccctgaagcacggatttgatgagtggtttggatyccccaactgccactttggaccttatgacaacaaggccaggcccaacatccctgtgtacagggactgggagatggttggcaggtaatggagccccacccct

SEQ ID NO: 201198 - DNA, 201 bp, Homo sapiens
gtgtagcgtcctgcccatgtgcttcccctgagcaaggcctttgtgctgcggacgtggaagcacgagtgtcccctgtggccgggcggtgacctgcggacgtkggcgcacgagtgtcccctgtggccgggcggtgacctgcggacgtgggcgcacgagtgtcccctgtggccgggcggtgacctgtggacgtgggcgcacgag

SEQ ID NO: 201199 - DNA, 201 bp, Homo sapiens
aagtgtcctgggttcctgtttccaggcatctgggtcacaggccccagttccaccccctgaagcacggatttgatgagtggtttggatcccccaactgccastttggaccttatgacaacaaggccaggcccaacatccctgtgtacagggactgggagatggttggcaggtaatggagccccaccccttcccctcccacgt

SEQ ID NO: 201200 - DNA, 201 bp, Homo sapiens
agacttccctgaggcccctcacctggactcaaaaagaggctgcttgatctgcatgaagccacgcgggtgtgcagggcagggacttgagtcccagagggccrcggacactccctgctccaggtcacctgctggtgagtgccaggccccactgctgctttcggacaaggacgttgagctgacagcttaatttgtgtagcgtcc

SEQ ID NO: 201201 - DNA, 201 bp, Homo sapiens
gtcctgggttcctgtttccaggcatctgggtcacaggccccagttccaccccctgaagcacggatttgatgagtggtttggatcccccaactgccactttrgaccttatgacaacaaggccaggcccaacatccctgtgtacagggactgggagatggttggcaggtaatggagccccaccccttcccctcccacgtcctg

SEQ ID NO: 201202 - DNA, 201 bp, Homo sapiens
cagccccacccactcccagcatcaaagtcttgagatatgaaccccctgctaatctgccttaattgggaagaaaatcatttagtgtaatggagagtctaaaractggaagtgagaactggggctgagggctgagcacccaggctgaggagggaagctgctcgtggggcagtgtctggagggcaatgatgcccaggagtgttt

SEQ ID NO: 201203 - DNA, 201 bp, Homo sapiens
aagaaaatgctggtgggcccaggccagcgagcttctgaagcccacgtctgtccacagtggcccccaggctcacagcccctcctcagcacgtgtctggtggrccaggcgtgcagtgatgtgggcgaggtccgcggccttgtccagcttgacgtaggtgtcggtgcggatgcggtggaggctgagccagtccggcagcagctc

SEQ ID NO: 201204 - DNA, 201 bp, Homo sapiens
ccaagggggcagggacactcatgcggcatccctgctgccgcctagggctggagactgtccttagtaccctgagcagcacccagaatccaaagtctgtcccyggaaagtgccctcagggccatgcggcgtctgacgtggcacagaagtggcctggatggggacacagaaccaaactgcactcatttcagccaagaaggctcc

SEQ ID NO: 201205 - DNA, 201 bp, Homo sapiens
ggtggccccagcgtgtccttcctgtcattacatggtcctcccctcccatcccacaggcctatcttctattaccgtggcgacacgctgatggcggccacccycgggcagcacaaggctcacttctggacctggaccaactcctgggagaacttcagacaggtacagggctcgggacgtgggcgcaggcggagctgcccccat

SEQ ID NO: 201206 - DNA, 201 bp, Homo sapiens
tggccagtccccctcaggctggcctcagggagctgtaccgtcccagcctgcactgcaggtttctgctgcctcagtgggatgcacctcaccctgacatgggygcattcgcccactgtgactaggtgccactgagcccaaggtcccttctcagcccatgagcagctctgcgggcgtcctgccccctgtcctcccacctccctt

SEQ ID NO: 201207 - DNA, 201 bp, Homo sapiens
ctgcacgtcgcggacaacaccttcgtcttcttcacgtcggacaacggcgctgccctcatttccgcccccgaacaaggtgagtgctcgctgtcacttctcasggtttccccacagccagcgtgtcagcgaagagtgcctggaccggctgtgcccacggggtctgtggtgggcagagcatgaagggtccctctgggtccagcg

SEQ ID NO: 201208 - DNA, 201 bp, Homo sapiens
ggtgacctcggggtgtatggagagccctccagagagaccccgaatttggaccggatggctgcagaagggctgcttttcccaaacttctattctgccaaccstctgtgctcgccatgtaagtcagcggggccctcgcccccaggaaggggtgagcccaacaggccgaggcctcccgggtccttccagccctgactctgggcg

SEQ ID NO: 201209 - DNA, 201 bp, Homo sapiens
gcggtgtggggtgcccttcctttcgatggttgggtagtgtgccgcggtacgtgcgtgagtttcctgagacataacacgttaccacaggccaggtggccttvgcggaaatggattcttgccggattctggaggccagaagtgcaaaatcaaggtgtcagccgggcccctccccctcaggctctccaggaaggtccttgctgt

SEQ ID NO: 201210 - DNA, 201 bp, Homo sapiens
ggggtgtatggagagccctccagagagaccccgaatttggaccggatggctgcagaagggctgcttttcccaaacttctattctgccaaccctctgtgctygccatgtaagtcagcggggccctcgcccccaggaaggggtgagcccaacaggccgaggcctcccgggtccttccagccctgactctgggcggctgcatca

SEQ ID NO: 201211 - DNA, 201 bp, Homo sapiens
gggtgtatggagagccctccagagagaccccgaatttggaccggatggctgcagaagggctgcttttcccaaacttctattctgccaaccctctgtgctcrccatgtaagtcagcggggccctcgcccccaggaaggggtgagcccaacaggccgaggcctcccgggtccttccagccctgactctgggcggctgcatcaa

SEQ ID NO: 201212 - DNA, 201 bp, Homo sapiens
tgagtggtttggatcccccaactgccactttggaccttatgacaacaaggccaggcccaacatccctgtgtacagggactgggagatggttggcaggtaayggagccccaccccttcccctcccacgtcctgaactgctgtgcccggcgtgcctgccccccgcctctagcactggtgggctcaagtcgccactcatgaggg

SEQ ID NO: 201213 - DNA, 201 bp, Homo sapiens
tggacgcagcccccagtgtcctgttaggatggggttggtggcagcttctcggggtctcctcggggctcacccagcgctgctcttccagcctacacaccgcrggagattgtgggcggcatcccagactcggagcagctcctgccggagcttctgaagaaggccggctacgtcagcaagattgtcggcaagtggtaagtctcc

SEQ ID NO: 201214 - DNA, 201 bp, Homo sapiens
tcagaacttccgagtgtccccacgtggggtccctgaagtgtcctgggttcctgtttccaggcatctgggtcacaggccccagttccaccccctgaagcacrgatttgatgagtggtttggatcccccaactgccactttggaccttatgacaacaaggccaggcccaacatccctgtgtacagggactgggagatggttgg

SEQ ID NO: 201215 - DNA, 201 bp, Homo sapiens
gtggacgcagcccccagtgtcctgttaggatggggttggtggcagcttctcggggtctcctcggggctcacccagcgctgctcttccagcctacacaccgyaggagattgtgggcggcatcccagactcggagcagctcctgccggagcttctgaagaaggccggctacgtcagcaagattgtcggcaagtggtaagtctc

SEQ ID NO: 201216 - DNA, 201 bp, Homo sapiens
aacttccgagtgtccccacgtggggtccctgaagtgtcctgggttcctgtttccaggcatctgggtcacaggccccagttccaccccctgaagcacggatbtgatgagtggtttggatcccccaactgccactttggaccttatgacaacaaggccaggcccaacatccctgtgtacagggactgggagatggttggcagg

SEQ ID NO: 201217 - DNA, 201 bp, Homo sapiens
gcagcccccagtgtcctgttaggatggggttggtggcagcttctcggggtctcctcggggctcacccagcgctgctcttccagcctacacaccgcaggagwttgtgggcggcatcccagactcggagcagctcctgccggagcttctgaagaaggccggctacgtcagcaagattgtcggcaagtggtaagtctcctggcc

SEQ ID NO: 201218 - DNA, 201 bp, Homo sapiens
gtttctgtttctgtcacctccacatagcgagggcggcactgctcacaggacggctacccatccgcaatggcttctacaccaccaacgcccatgccagaaayggtaggctgcccaccgcctccagggacacccttggggtgcagggttgggcaggtgggctacgggtggtgcccgtgtctccgggactcgggtggcaagctg

SEQ ID NO: 201219 - DNA, 201 bp, Homo sapiens
gcgctgctcttccagcctacacaccgcaggagattgtgggcggcatcccagactcggagcagctcctgccggagcttctgaagaaggccggctacgtcagsaagattgtcggcaagtggtaagtctcctggccacgcctgcccaggcgtcctgctccatccacttcctggccttggttccaagggacatggccacaagttt

SEQ ID NO: 201220 - DNA, 201 bp, Homo sapiens
cttccagcctacacaccgcaggagattgtgggcggcatcccagactcggagcagctcctgccggagcttctgaagaaggccggctacgtcagcaagattgycggcaagtggtaagtctcctggccacgcctgcccaggcgtcctgctccatccacttcctggccttggttccaagggacatggccacaagtttccaaatga

SEQ ID NO: 201221 - DNA, 201 bp, Homo sapiens
tccagcctacacaccgcaggagattgtgggcggcatcccagactcggagcagctcctgccggagcttctgaagaaggccggctacgtcagcaagattgtcrgcaagtggtaagtctcctggccacgcctgcccaggcgtcctgctccatccacttcctggccttggttccaagggacatggccacaagtttccaaatgagg

SEQ ID NO: 201222 - DNA, 201 bp, Homo sapiens
ctacacaccgcaggagattgtgggcggcatcccagactcggagcagctcctgccggagcttctgaagaaggccggctacgtcagcaagattgtcggcaagwggtaagtctcctggccacgcctgcccaggcgtcctgctccatccacttcctggccttggttccaagggacatggccacaagtttccaaatgaggagggtg

SEQ ID NO: 201223 - DNA, 201 bp, Homo sapiens
  misc_feature (1)...(201): n = A,T,C or G
cgccctcggttgtgcccagacgctctgcagggtaggcgggcagtgccagcaccctcctcgggtgaggccttggtcttttgtccctgccgtgcccaggcatngcccatactcagtgctggagggtgctcgtcttaccaagaattttgtgaaggtggtatctgttgctgctcagaacttccgagtgtccccacgtggggtccc

SEQ ID NO: 201224 - DNA, 201 bp, Homo sapiens
gctcagtcttagccttcagaaaatgctttccagttgaaatgtatgtgggccagtaaagaggatgggagctggggagaggtgttccgcgtgcaaaggcccasaggtgagagggcagagcatgtccagggagctgcagaattgtttggttggagcggagagtgccaagggttatggggggaaaggatcccagagcaggttatt

SEQ ID NO: 201225 - DNA, 201 bp, Homo sapiens
atttccctggacgctaattatgagggaggcgtgtagcttcttatcattgtaactatgttatttagaaataaaacgggaggcaggtttgcctaattcccagsttgatttttctcttggctgagtgattttggggtccggagatttattttcctttcacaccttctcagcagctgccaagaatcaggtgcccagctcccgctg

SEQ ID NO: 201226 - DNA, 201 bp, Homo sapiens
gaaaacgtggaaggaaggagccggggccacgaggggcatgtcaggcgggttccaggcggctgggaggctcctcacgatgcaccacccttcaccgtgcaggraaccccggccgccgccatgcctgccgccctcggttgtgcccagacgctctgcagggtaggcgggcagtgccagcaccctcctcgggtgaggccttggtct

SEQ ID NO: 201227 - DNA, 201 bp, Homo sapiens
cagagcaaccccacccctttgaagccgtccactggcctgggatcagcagaggagggctgtggtgggggtgctggctctgtccttcataagccacatgaacytgaactgaggccattcctcttctgggaagaggccggccagtttcactgtggtctgtgaagttatgatttaatgaactccgtgaatcacagtatgccgttg

SEQ ID NO: 201228 - DNA, 201 bp, Homo sapiens
tatggagacgccgtccgggagattgatgacagcattgggaagatactggagctcctccaagacctgcacgtcgcggacaacaccttcgtcttcttcacgtyggacaacggcgctgccctcatttccgcccccgaacaaggtgagtgctcgctgtcacttctcacggtttccccacagccagcgtgtcagcgaagagtgcct

SEQ ID NO: 201229 - DNA, 201 bp, Homo sapiens
cctgtttccaggcatctgggtcacaggccccagttccaccccctgaagcacggatttgatgagtggtttggatcccccaactgccactttggaccttatgmcaacaaggccaggcccaacatccctgtgtacagggactgggagatggttggcaggtaatggagccccaccccttcccctcccacgtcctgaactgctgtg

SEQ ID NO: 201230 - DNA, 201 bp, Homo sapiens
ccacaagtgatggttcagaaaccaaaatccggtcttgggggcttgtcagaaacacagattcctacgccccaccgtgactgactgagtcagaaccatggggrggccagaagttggctgcattttaagtaccccaaacaccgggaggcttgtgaacattcacgttcgggaagcaccagtcggcagctgcgcacgtggcaccca

SEQ ID NO: 201231 - DNA, 201 bp, Homo sapiens
ccccagcattgtcagcgccaggctttctcccacgagccctcgcctcaagcctcctgctccctccccacggtcttttctggcccctgctgacccctacgctycagcatcccccagcccctcctgagaggtctctctcagccccacccactcccagcatcaaagtcttgagatatgaaccccctgctaatctgccttaattgg

SEQ ID NO: 201232 - DNA, 201 bp, Homo sapiens
  misc_feature (1)...(201): n = A,T,C or G
gcagtgccagcaccctcctcgggtgaggccttggtcttttgtccctgccgtgcccaggcatagcccatactcagtgctggagggtgctcgtcttaccaagnattttgtgaaggtggtatctgttgctgctcagaacttccgagtgtccccacgtggggtccctgaagtgtcctgggttcctgtttccaggcatctgggtca

SEQ ID NO: 201233 - DNA, 201 bp, Homo sapiens
gaccgcaccatcctcgccccgtgggacgcgtggggacggggaccgcaccaaccttgccccgtgggacgcgtggggacggggaccgcaccaacctcgccccrtgggacgtgtggggacggggaccgtgggaggcatgaggaggtcggcctgaggctggaggacgacggtgtggctctctccataggaagccctggacttcat

SEQ ID NO: 201234 - DNA, 201 bp, Homo sapiens
agacctttagttgagagaacatgcacagctgcctgccctgaaagccccaggcgtcccattcaggaagaggcaaccagaacagaccgacggccccaccacartcgtgcgcgggctcctctgcgatggctggcagcacagctcactcagcacacctgtatcatcatcgacgtcaccatgttatcaaaggccctgctaagagaa

SEQ ID NO: 201235 - DNA, 201 bp, Homo sapiens
ggacctcatcaccctcgccccgtgggacgcgtggggacggggaccgcaccatcctcgccccgtgggacgcgtggggacggggaccgcaccaaccttgcccygtgggacgcgtggggacggggaccgcaccaacctcgccccgtgggacgtgtggggacggggaccgtgggaggcatgaggaggtcggcctgaggctggagg

SEQ ID NO: 201236 - DNA, 201 bp, Homo sapiens
ggggacatctggtcccagtggcctgacaagggcccctctctcccaggtggcagcaacggcccctttctgtgtgggaagcagaccacgtttgaaggagggakgagggagcctgccctcgcatggtggccagggcacgtcactgcaggccaggtgagtcagcgtccaccggtctgccgggcagcaggtccaggcctgcagcca

SEQ ID NO: 201237 - DNA, 201 bp, Homo sapiens
gagaccccgaatttggaccggatggctgcagaagggctgcttttcccaaacttctattctgccaaccctctgtgctcgccatgtaagtcagcggggccctygcccccaggaaggggtgagcccaacaggccgaggcctcccgggtccttccagccctgactctgggcggctgcatcaaccttgtctattcctactactgca

SEQ ID NO: 201238 - DNA, 201 bp, Homo sapiens
gggatgaaacccccactgggagccacaccaggagcaaaagccgctgtccagacagagccgtcctggtgcccgggcgtgggggcagcacctcttgacacggyagtgccgggtccgggaccctcatcttttgtgaattttattttgcttaacttgactcttcttggcggaagtgctcattcattacatgacggtgaccagaag

SEQ ID NO: 201239 - DNA, 201 bp, Homo sapiens
tgggccctcctgggaggaccgcctgccctttctaacactgctggccctcggaggccctcagccacttggcagctgcatcccccatacccgggacctccccrccaagttctcatttctccaatggcagccttcagagctgagaggccgagtcaagagggtgccatctcccaagttcccatgattcctggggagcgtctgtgt

SEQ ID NO: 201240 - DNA, 201 bp, Homo sapiens
gtgccatctcccaagttcccatgattcctggggagcgtctgtgtagctgcccacctggaccgaggtggtccccacactgaggccaattggttgggagtccrgggttgacctgggcaggggacacatcaaaactgctcgaggccaagcgcggtggctcacgcctataatcccagcactttgggaggccaaggcaggtggatc

SEQ ID NO: 201241 - DNA, 201 bp, Homo sapiens
cgcgccactgaactccagcctgggtgacagagtgagactgtctcagaacagcaacaacaaaatgcccgctgctgctgggtccagaagagcttgaataactscatgttctttttctcaattttcatttcccagaactgggcacctccgggctgtgaaaagttagggaagtgtctgacacctccagaatccattcccaagaag

SEQ ID NO: 201242 - DNA, 201 bp, Homo sapiens; identical to SEQ ID NO: 35433

SEQ ID NO: 201243 - DNA, 201 bp, Homo sapiens
cctggtcctcgactcccacacgggcagcttctccttgcaggggccctgtgatgacctccaaactcccgggctctgaaggcaccgaggcaggaacggcactkcccggtgggtcccgggtgggctggtgggcactgttgagtggcggcggccccagggcccacctgcgaggttctcatttgtgcctccttcatgctgggccag

SEQ ID NO: 201244 - DNA, 201 bp, Homo sapiens
gaccaaagtgagcctctctccggctcttggagcaccagggcccatgcagcctgtcttggggtcatttgaaatggtggaaactttacaagggcccgatgggsaggtgagccccactcggcctccaggcacagccctcctcaaggtccctgctgtccatgcaggtggcagtcctactctgtgggtgagtcctggagccacttg

SEQ ID NO: 201245 - DNA, 201 bp, Homo sapiens; identical to SEQ ID NO: 35434

SEQ ID NO: 201246 - DNA, 201 bp, Homo sapiens; identical to SEQ ID NO: 35435

SEQ ID NO: 201247 - DNA, 201 bp, Homo sapiens
ctggtcctcgactcccacacgggcagcttctccttgcaggggccctgtgatgacctccaaactcccgggctctgaaggcaccgaggcaggaacggcactgsccggtgggtcccgggtgggctggtgggcactgttgagtggcggcggccccagggcccacctgcgaggttctcatttgtgcctccttcatgctgggccagc

SEQ ID NO: 201248 - DNA, 201 bp, Homo sapiens
gacgatggcgtgagacccgggacccgcgtaggtctgggagacgatggcatgagactcgggacctgcgtaggtctgggagatgtgaggttccccactgcagygggtgcccaccaggccgggacagggctggggctctgctccccaggctgggagccacccgtggctgtgctcagcagcagcctggaaaaggtgaggggagcc

SEQ ID NO: 201249 - DNA, 201 bp, Homo sapiens
gcgtctctggcacagaggagagggagtgtggccacctggacccctgcttctgggacagctgagcggcctttgagaaatgcagatcccccatccagactcamacacaccctgcggctgcctctgctgcccctggagtttgggagcagcttcctcacccaaacccactcctgctctggtggccaagggggcagggacactcat

SEQ ID NO: 201250 - DNA, 201 bp, Homo sapiens
cttgtcgaaataatattttggttatgttgggttaaataaaatataaagttagtctgtatttcacctacttctgcttttctaatgtggctcccggtaaatakggaattgcatgtggactcaccctacgtttccataggacagcaagggttcaggccgtgcagggtggaggggtggggtgtggccaccggggcacatgtgggg

SEQ ID NO: 201251 - DNA, 201 bp, Homo sapiens
atcctgcaggtatggagacgccgtccgggagattgatgacagcattgggaagatactggagctcctccaagacctgcacgtcgcggacaacaccttcgtcktcttcacgtcggacaacggcgctgccctcatttccgcccccgaacaaggtgagtgctcgctgtcacttctcacggtttccccacagccagcgtgtcagcg

SEQ ID NO: 201252 - DNA, 201 bp, Homo sapiens
gaaggtggtatctgttgctgctcagaacttccgagtgtccccacgtggggtccctgaagtgtcctgggttcctgtttccaggcatctgggtcacaggcccyagttccaccccctgaagcacggatttgatgagtggtttggatcccccaactgccactttggaccttatgacaacaaggccaggcccaacatccctgtgta

SEQ ID NO: 201253 - DNA, 201 bp, Homo sapiens
ccacatcctcactcagcctgtgatggtcctaggtgactccaagtcacccctgcagtcagcagacccagtgggaggttggctctgcccgtgtcatgttagcstgatgtgggtctcagccctgcgccaagcacactgggggaggggcacatgctgacctgtccagcccaggcctcggagcctcgggcctaccccagaagggag

SEQ ID NO: 201254 - DNA, 201 bp, Homo sapiens
ctgaagcacggatttgatgagtggtttggatcccccaactgccactttggaccttatgacaacaaggccaggcccaacatccctgtgtacagggactgggrgatggttggcaggtaatggagccccaccccttcccctcccacgtcctgaactgctgtgcccggcgtgcctgccccccgcctctagcactggtgggctcaa

SEQ ID NO: 201255 - DNA, 201 bp, Homo sapiens; identical to SEQ ID NO: 35439

SEQ ID NO: 201256 - DNA, 201 bp, Homo sapiens
tcgggcgtggccctctaactccctgacttacgctgcgaatttcgttgtctcgaagggctgtgttggaggaatctaccaccatgacaaacttcaccttggarttggtgacgtagccgtatctgcacagctggttagggaaggcactcgtaacacagggactgccggtggagggccctctgtgggccctcactttggagaaat

SEQ ID NO: 201257 - DNA, 201 bp, Homo sapiens
ggggccttggagacaggtgagacccagtgacaagttccactctggcccacacacagctcctgcctcccagggcgagcagcactctgtgtctccactccttrtttggaaaatagggttaaggagggtcagccctgaccacagaggaagtggagagtcagggccacccaggccagctcctgttgccacagcagcctcgtcgag

SEQ ID NO: 201258 - DNA, 201 bp, Homo sapiens
acgggactttcttggcctaaattctgaagtctgtctggatctgtgttcttttcagatattatgaagaatttcctattaatctgaagacgggggaagccaasctcacccagatctacctgcaggtgatggggaccgcaccatcctcgccctgtgggacgcatggggacggggaccgcaccaacctcatcctgtgggaggcgt

SEQ ID NO: 201259 - DNA, 201 bp, Homo sapiens
ctttgtggttttatctgcctttggtctttgatgctggtggcctaaagatggggttttggcgtagatgtcctttttgttgatgttgatgctattcctttctstttgttaattttccttataagagtcaggtccctcagctgcaggtctgttggagtttgctgaaggtccactccagaccctgtttgcctgggtatcaccagt

SEQ ID NO: 201260 - DNA, 201 bp, Homo sapiens
agagtcaggtccctcagctgcaggtctgttggagtttgctgaaggtccactccagaccctgtttgcctgggtatcaccagtggaggctgcagaacagcaamtattgcagaatagtaaatattgctgcctgatccttcttctggaagctttgtcccagaggggcacctgcctgtatgaggtgtcagtgggcccctactggga

SEQ ID NO: 201261 - DNA, 201 bp, Homo sapiens
ccttctgggccagcatagcttcgctggatgagctgggctctgcaggtgaagcctccctgttaagtttctgcttttcctgactttctcagaggacagagggstgaggcggggcagctcatgaataattttttatgttgaagacttgtcgaaataatattttggttatgttgggttaaataaaatataaagttagtctgtatt

SEQ ID NO: 201262 - DNA, 201 bp, Homo sapiens
ctggacttcattaagagacaggcacggcaccacccctttttcctctactgggctgtcgacgccacgcacgcacccgtctatgcctccaaacccttcttggrcaccagtcagcgagggcggtgagtcctggctccatggagcatagacctcgctggaggccccagctgtgcttgactccagagatgggacactcagtaccgt

SEQ ID NO: 201263 - DNA, 201 bp, Homo sapiens
agtgctggggagacccacaggccccagcccacatatcccgggtcctggtcacaggcagggacaggatgggacggctctactcacagcctctctgccagggyttggcctgctgagccttcatttcctctcttgcccgtgagtctgagggcagaggatggctcgggtgcctgctgcctgtcctagcgaggcccggggccgctg

SEQ ID NO: 201264 - DNA, 201 bp, Homo sapiens
acaggcacggcaccacccctttttcctctactgggctgtcgacgccacgcacgcacccgtctatgcctccaaacccttcttgggcaccagtcagcgagggyggtgagtcctggctccatggagcatagacctcgctggaggccccagctgtgcttgactccagagatgggacactcagtaccgtggcatttaggccaatta

SEQ ID NO: 201265 - DNA, 201 bp, Homo sapiens
acggcgctgccctcatttccgcccccgaacaaggtgagtgctcgctgtcacttctcacggtttccccacagccagcgtgtcagcgaagagtgcctggaccrgctgtgcccacggggtctgtggtgggcagagcatgaagggtccctctgggtccagcgggaggagcagatgtcaccgagcctcgagcaaggcccttctggc

SEQ ID NO: 201266 - DNA, 201 bp, Homo sapiens
gcagcaccaggaggccttggtccccgcgcagccccagctcaacgtgtgcaactgggcggtcatggtaagtggctggtgtgtgggcggccgtctctttgccrgggctgcagccacccacccggggcccaggatgaaccgtggccagcacagggcagaggcaggcgtgcttccccgcctccgtcagtggtgaggccctcgtgc

SEQ ID NO: 201267 - DNA, 201 bp, Homo sapiens
aactccgtgaatcacagtatgccgttggctgcctgatccatttgtcaccatcctccaggtatggagatgccttttgtcaccatcctgcaggtatggagacrccgtccgggagattgatgacagcattgggaagatactggagctcctccaagacctgcacgtcgcggacaacaccttcgtcttcttcacgtcggacaacgg

SEQ ID NO: 201268 - DNA, 201 bp, Homo sapiens
tgaatcacagtatgccgttggctgcctgatccatttgtcaccatcctccaggtatggagatgccttttgtcaccatcctgcaggtatggagacgccgtccrggagattgatgacagcattgggaagatactggagctcctccaagacctgcacgtcgcggacaacaccttcgtcttcttcacgtcggacaacggcgctgcc

SEQ ID NO: 201269 - DNA, 201 bp, Homo sapiens
cgtgcagggaaccccggccgccgccatgcctgccgccctcggttgtgcccagacgctctgcagggtaggcgggcagtgccagcaccctcctcgggtgaggycttggtcttttgtccctgccgtgcccaggcatagcccatactcagtgctggagggtgctcgtcttaccaagaattttgtgaaggtggtatctgttgctgc

SEQ ID NO: 201270 - DNA, 201 bp, Homo sapiens
gatgacagcattgggaagatactggagctcctccaagacctgcacgtcgcggacaacaccttcgtcttcttcacgtcggacaacggcgctgccctcatttycgcccccgaacaaggtgagtgctcgctgtcacttctcacggtttccccacagccagcgtgtcagcgaagagtgcctggaccggctgtgcccacggggtct

SEQ ID NO: 201271 - DNA, 201 bp, Homo sapiens; identical to SEQ ID NO: 201071

SEQ ID NO: 201272 - DNA, 201 bp, Homo sapiens
ttgtccctatgaccagtctcagtgactcagtggggagggagggggagggcctggggacatctggtcccagtggcctgacaagggcccctctctcccaggtkgcagcaacggcccctttctgtgtgggaagcagaccacgtttgaaggagggatgagggagcctgccctcgcatggtggccagggcacgtcactgcaggcca

SEQ ID NO: 201273 - DNA, 201 bp, Homo sapiens; identical to SEQ ID NO: 201073

SEQ ID NO: 201274 - DNA, 201 bp, Homo sapiens
gaaatcagggagaacgggactttcttggcctaaattctgaagtctgtctggatctgtgttcttttcagatattatgaagaatttcctattaatctgaagaygggggaagccaacctcacccagatctacctgcaggtgatggggaccgcaccatcctcgccctgtgggacgcatggggacggggaccgcaccaacctcatc

SEQ ID NO: 201275 - DNA, 201 bp, Homo sapiens
gcagcggggctcacgcccccccagggattggcccccagccccatcgggtcggtgcagagtgccctgaccgtgttgctgccatgtgtttcaggtgagccacyagctgggcagcatcatggacctcttcaccaccagcctggcccttgcgggcctgacgccgcccagcgacagggccattgatggcctcaacctcctccccac

SEQ ID NO: 201276 - DNA, 201 bp, Homo sapiens; identical to SEQ ID NO: 201074

SEQ ID NO: 201277 - DNA, 201 bp, Homo sapiens; identical to SEQ ID NO: 35379

SEQ ID NO: 201278 - DNA, 201 bp, Homo sapiens
ctcatgcggcatccctgctgccgcctagggctggagactgtccttagtaccctgagcagcacccagaatccaaagtctgtccccggaaagtgccctcaggsccatgcggcgtctgacgtggcacagaagtggcctggatggggacacagaaccaaactgcactcatttcagccaagaaggctcctcttagcggcataagtc

SEQ ID NO: 201279 - DNA, 201 bp, Homo sapiens
ccaacctgggcaacaccgcaaaaccctgtcccccacccccgcccaaaaaaaaaaaaccacaaacccatattaggtattcatgcaaaaactcagtgataccktagccagcaaatcctctgagaagggaatgcagctcttccttaagtctgctttgtagtgtttggttgtgtgggtttttttaacttcataaatcatgggaag

SEQ ID NO: 201280 - DNA, 201 bp, Homo sapiens
gaggcggggttgcaccatgttgatcaggctggtctcgaactcctgacctcaggtgatccgcccgcctcagtgtcccaaagtgctagggttacaggtgtaarccactgcacccggccaacatgaactttatttaattcatttacaaacctctagaaatgaatatataaatgacctgagcttatatatgttttaaacaagtaa

SEQ ID NO: 201281 - DNA, 201 bp, Homo sapiens
ttgtgtgggtttttttaacttcataaatcatgggaagctgtgctggcagtaggagataactcagcagtagacagattgctcttcgctgctttcttttaagaagcaggttataaaactgttgggagcctggtggagtagttaatagatcatcgtaagcaatttgaagtaatttttttttttttgatacagccttgcattttg

SEQ ID NO: 201282 - DNA, 201 bp, Homo sapiens
acataaggaggaagtcaaatcaaatctctaaatagaaaaattattctggacctgaatctgtataccagggaggagcatagcaccttcctagagtcatcacygtgctttgagatgttgcttaaccacacaatttaaggagttcttggaagccttgatggtaatgacgtcactttgtattaaaatatgggaggctcctgaatt

SEQ ID NO: 201283 - DNA, 201 bp, Homo sapiens
tcatcgtaagcaatttgaagtaatttttttttttttgatacagccttgcattttgaaggcaagcgagctagagagaaaagagtttagtgagtaagaaatcrgcgccacctctgattttgtgccacctctggcacaagtttcagggcctctgggtcccccagcctggaacttgtgccacactctctgcctcactgtgtggcc

SEQ ID NO: 201284 - DNA, 201 bp, Homo sapiens
cacaagtttcagggcctctgggtcccccagcctggaacttgtgccacactctctgcctcactgtgtggccagtcacttgcatctgtggcagagtccctgcrgtgaaacccatgttggaatgtgactgttcagaatgatacacgttcttgtcagtgcatagttggcattatgatatgtttttcacaaaaatagttctataat

SEQ ID NO: 201285 - DNA, 201 bp, Homo sapiens
catgagatagctgcattgaagtgtcacgagcagaaacaaatacctggcttgggagtactttaaattagcagataactgtcacttgaaaggtaattaagaascttctgccaatggctctctttttatctctagacactgtccccaaaagcttttaagttacagtcttgttggtcacgacttataataggcctgccatgccga

SEQ ID NO: 201286 - DNA, 201 bp, Homo sapiens
atattgtgacagttgcaagttccttgggattgttcagtactgccggagttgaggtttgtcagatatatagcatttctttcgttcaatctgtttatcctgtgataagtacaccagaacctccaggagagcacctgctgcccctccattcatgaaagctgcacgaaggcactctgcatgtgtgctgcatgtagaatgttccac

SEQ ID NO: 201287 - DNA, 201 bp, Homo sapiens
catgtggtctacttgtattgggcttgtcacaattacatgactttcccctaagcaaagttatccagtaaattgctgtaattcccaaagacttcatgggaggmaggcagctgtaaagctcagtcgttggcaagccttgcagcgttagaaatttgaagctcactgtagtatttttgttttgtgtgatctttgtcctactgatcg

SEQ ID NO: 201288 - DNA, 201 bp, Homo sapiens; identical to SEQ ID NO: 35453

SEQ ID NO: 201289 - DNA, 201 bp, Homo sapiens; identical to SEQ ID NO: 35455

SEQ ID NO: 201290 - DNA, 201 bp, Homo sapiens
gcaccacctctgtctgtgagcaccacccccagctcatactggcactctccctttctctaacctttcaaccaatttaatgataattatattgagtgggaccsaggaatcaaaagttttgaagccaacaaacataaattccaactattgttttcccccttgatctaccaggtctgctgctctgtcacaaaagattagattagc

SEQ ID NO: 201291 - DNA, 201 bp, Homo sapiens
tcaccagtagctctcctaggaaccttctcctggtcaccagtcaagacttagtgatagatttggggtaggttctagtcagcataatctactgtgaaacaccmagtacaagaccatggaaaatgaatgcactatcatgcactttaacactagcatagaaattattcatgtgggctgtttgtatctgggtgagatgtaaaaact

SEQ ID NO: 201292 - DNA, 201 bp, Homo sapiens
atggtagtcagacaagataattggtagttaattaatagaccacttaacttaaaaggtttcacagttttaaaatactaattactgaattaagcatttatctrtatccaaatgtctaaagtctatttagttaaaatctatccaggaaaagtaaaagcccaccagctagatctgagtaatgtagcacttaaagacattagtgct

SEQ ID NO: 201293 - DNA, 201 bp, Homo sapiens
ctctgtggatgcagagggaaggatttgaagtcttttaggtttcttctttacaaactttgttctaatgggattgggtggcttgctagtgctaaaaatggatmcaaggtaaatagacatagagtcagtccacaaagtcccatggtcattcatactaggggctcttgcactaggggctcttggcattgatttgaaccaggcttt

SEQ ID NO: 201294 - DNA, 201 bp, Homo sapiens
gacaatctgagaaaatttaatagcctcacctgagagttagatgaattttaagtaggaaacccctttacatttaagttttgtcttgagttgagaaatattamtagcaaattcatctaaaatttctgctttagttctttcagaaactaaaattaagcctctttcaattatggtaagtagtctatttgcatgtgtctaatccag

SEQ ID NO: 201295 - DNA, 201 bp, Homo sapiens
gatggggacattgagagctgtgctgttggaacaggggctaagaagtctgccactgcagatggccggagcagtggctaagctcgcatgcatgtgtttatgcrtcatggaagtagttactggtcactagagcagaaccgaagcctctgccctttggaagatctgtctttattacaatttctgagaagcagtttgagtttgggg

SEQ ID NO: 201296 - DNA, 201 bp, Homo sapiens
aatggaattctatgtcaggtgtggtggcgcacacctgtagtcctagctacttgagaggctgaggtgggagaatcgtgcgagcccaggtgttcaagactgcrgtgagctatggtggcaccactgcacttcagcctgggagatagagcaagaccctgtctctaaaacaaaacaaagaaagggaatggacttctgcctcttctg

SEQ ID NO: 201297 - DNA, 201 bp, Homo sapiens
taggcttccaaattactgctcagccacattttggaaagtgccaaagattctgaaatcaacatttgtggtctgttgggagtgcccaggccaccctggcagtyacttcgcatctcctgaccatccactgggtccagggcatcttcctgttgcaggacgcttcgggactctctcgggttagacagtgcctcgcaaatatcaccc

SEQ ID NO: 201298 - DNA, 201 bp, Homo sapiens
agataagttaactctggcagctgcacaggcagaaggggtggaacagtagaggaaagttgcccaaccatgtgaagggtgccgtaagcatttccagtcagacsttctttgttcagtggagtcttgatggtgttcttttttattcaaagtttacatcatgctattatttggagattctgaaaatccttaagcatacgtgagaaa

SEQ ID NO: 201299 - DNA, 201 bp, Homo sapiens
atcacttgagcccaggagttcgaggctgcagtgagctatgattatgccattgcactccaacctgggcaacaccgcaaaaccctgtcccccacccccgcccmaaaaaaaaaaaccacaaacccatattaggtattcatgcaaaaactcagtgataccgtagccagcaaatcctctgagaagggaatgcagctcttccttaag

SEQ ID NO: 201300 - DNA, 201 bp, Homo sapiens
gcctttccttcaaatagtttagtactggaatttttgaatattaacatggtgcagcttcttagtgttagcctaaacaatagggctcaaaataacataagtgktacttatgtaaacacatgggtattttgaggacaagtgaaacttaaaattcaaagcctgaattttcccaccttaagttgtaattaacatactgccccctac

SEQ ID NO: 201301 - DNA, 201 bp, Homo sapiens
tcagatttgtcaggtaaccaagtagcaggttctgataggaatttgatattggatgtaatttcttaggatttaatattgagtccttatactttaacttttayacagaaagataactaagaccctttatgttaagtttattgctgtcttccaagactaggcaaattttcaaaacttaaaaatgatctctggttaacgtcaata

SEQ ID NO: 201302 - DNA, 201 bp, Homo sapiens
aaatgaggttttctcacaggcttaccatagtataaaagcctctatggttcacttgtccaaggtaaagttggaaagccagtgaggtaagtgccaaggctgayggagtctacagtccctgtcttgaaagctaagccttcaaagcctctgtggatgcagagggaaggatttgaagtcttttaggtttcttctttacaaactttg

SEQ ID NO: 201303 - DNA, 201 bp, Homo sapiens
cagcctcccaagtagttgagactacaggcacacaccactatgcccggctaattttttgtattttttgtagaggcagcgtttcacagtgtttcctagggtgstcttgaactcctgggctcaagtgatcctcccgccttaacctcccccaaagcttggggattacaagtgtgagccactgtgcccagctgttttctagtttag

SEQ ID NO: 201304 - DNA, 201 bp, Homo sapiens
tttagttacattccctgagcgtgattgaaagacgccttgcttcctaagagaaagctcttggaggatttaggcttcgttgtaaatttcttccatgtttttgrtcaccccagaaaatctgcatttctgaatacttattaactaacctgaatctgagttgtttttttttttaagccaaagcaaagtccataaccaaccataaat

SEQ ID NO: 201305 - DNA, 201 bp, Homo sapiens
gccagtttgaatgaagctcacaatgaatgtgtaacagccattcatatttaccaatgatcagtcctcaaaaagaggacccccttggcaattctttccttccstcttaaccatgtaccatttctgtaccctttggaagcctttcctcagcctggcataattctgtacagccttccagtctgctgtgacgcttcatcttccaat

SEQ ID NO: 201306 - DNA, 201 bp, Homo sapiens
agcatgtcacaaaactgaacaaactcctctttgctccttcttgcattccctggtcaccaggcttagaaacatcagcattatcttcacctctccagcctgcrtacattcatgggtccccaaatcctgactatttgcttgtgcccctgtgctttgattgatcgcccctttcctttcctacttcatcctgtgtgcctccatcac

SEQ ID NO: 201307 - DNA, 201 bp, Homo sapiens; identical to SEQ ID NO: 35452

SEQ ID NO: 201308 - DNA, 201 bp, Homo sapiens; identical to SEQ ID NO: 35454

SEQ ID NO: 201309 - DNA, 201 bp, Homo sapiens; identical to SEQ ID NO: 35456

SEQ ID NO: 201310 - DNA, 201 bp, Homo sapiens
actacaggcacatgctgccacacctggctaattttttgtattttagtagagatggggtttcatggtgttgcccaggctggttgcgaactcctgagctcagkcagtccacccacctcagcccccaaagtgctggcgtgagccaccgcacctggcctgtttatttattttgagatggaattttggtcttgttgcccaggctgg

SEQ ID NO: 201311 - DNA, 201 bp, Homo sapiens; identical to SEQ ID NO: 35457

SEQ ID NO: 201312 - DNA, 201 bp, Homo sapiens
ggtctgtgaaactttcaaagatcacacaaagatgtgtgaaagtggcagtggtgttagcattgtattttttggtttggaaaaaaccacaagtgtttcttacwtgctgcttgcataaaatgtgaatttcttgcctttccttcaaatagtttagtactggaatttttgaatattaacatggtgcagcttcttagtgttagccta

SEQ ID NO: 201313 - DNA, 201 bp, Homo sapiens
tttccttttgtagacagatacgattcaataaagaaggagtaaagaaataggattctactttttttttccataggcggattagccttctaatagaacacaasaaagaactgtttctcctaaataggtcacattaaacctcattaattttttagcaactgcttaaaaacttaatctggcattaaaagtacttattcaaatgtt

SEQ ID NO: 201314 - DNA, 201 bp, Homo sapiens
ggctggtgttggtatgccagtttgaatgaagctcacaatgaatgtgtaacagccattcatatttaccaatgatcagtcctcaaaaagaggacccccttggyaattctttccttccgtcttaaccatgtaccatttctgtaccctttggaagcctttcctcagcctggcataattctgtacagccttccagtctgctgtgac

SEQ ID NO: 201315 - DNA, 201 bp, Homo sapiens
aattctttccttccgtcttaaccatgtaccatttctgtaccctttggaagcctttcctcagcctggcataattctgtacagccttccagtctgctgtgacrcttcatcttccaatgttgttccatcaccagtagctctcctaggaaccttctcctggtcaccagtcaagacttagtgatagatttggggtaggttctagtc

SEQ ID NO: 201316 - DNA, 201 bp, Homo sapiens
tacatgctgcttgcataaaatgtgaatttcttgcctttccttcaaatagtttagtactggaatttttgaatattaacatggtgcagcttcttagtgttagmctaaacaatagggctcaaaataacataagtgttacttatgtaaacacatgggtattttgaggacaagtgaaacttaaaattcaaagcctgaattttccca

SEQ ID NO: 201317 - DNA, 201 bp, Homo sapiens
accttatttctggtatttctgcatagtgagctctaaaatgtaagggaacgttaatatctgagttgctgccttgaggtaaattcatcctatcctttaacagygggaagacaagttaatgaagcatttatttttgctgaataactaatggtgtcatcatcgaggtgttcatttgaaaagcctggctcttttattagcttcttg

SEQ ID NO: 201318 - DNA, 201 bp, Homo sapiens
ctgctgttgctttgaaaatattatttctgcactgaaccacatcaggtatctggtttgtgttttttttttgtttttgtttttgtttttgtttttgttttttkttttttgagacagagtctcactctgtcacccaggctggagtgcagtggtgtgatcttggctcactgcaacctccacctcccaggttcaagcaattctcct

SEQ ID NO: 201319 - DNA, 201 bp, Homo sapiens
ttcgaatttcagttctgtacatctgcctatattccttgtgatagtgctttgctttttcatagataagcttcctccttgcctttcgaagctgaaaaccaatwatcagttattcataatttttagctcaatcacaattagcaatgccaatcattaaaaagaaaactacaacatgtttcctttaaatcttttcttgccacagta

SEQ ID NO: 201320 - DNA, 201 bp, Homo sapiens
gtgatttgaatcactccaaagtcaggcttggagtcccaagtctgacctggaaaatggactctagctctgcctcttatcccacacatgtgtgtgtctgtgtraacatgtgtgtgtgttggtggtttgttttgttttgttttcctcttatgtacttgggaagcagttgctgagggtcttgcggagctctgtttcctccagtgt

SEQ ID NO: 201321 - DNA, 201 bp, Homo sapiens
tggagtgctctagcttacgaaaagtggctagccagggaccagtggggaccggacggccggaggaggatggccggggctctgctgactgccgagctcggcargcggaggccaggacaccccacgggagggggcgtgagctgcgaagggaggtgcgaggagggctgaggttgcggccacggccgtgtgagaggggctacccgg

SEQ ID NO: 201322 - DNA, 201 bp, Homo sapiens; identical to SEQ ID NO: 35458

SEQ ID NO: 201323 - DNA, 201 bp, Homo sapiens
ggtattctaaagtttagccatcttgcctactttgtctgcatgattattttgcttaattgtaaaattttaagtgtaatcaggtttttaagaaaccccatacmatctgcagttaaatacttaaaacaagaaaccagctccaggaagacatctgataaaatgaatgctaatttagtgtgtgtaaagcacagaaaattcatagcc

SEQ ID NO: 201324 - DNA, 201 bp, Homo sapiens
catcttcaatatgttctaatctgtgtctgtttttctcagttgtttaaaaaataactgctaaataaccaatgtcataatttctaacctaaatgaaaaaaacwgcaatgctcccctcattgccaaatccagtgtgcagcttcatctttctacagaatgtgaccctcttgaccgtctccttgaaactcaagtgctttagcttcc

SEQ ID NO: 201325 - DNA, 201 bp, Homo sapiens
tattatttggagattctgaaaatccttaagcatacgtgagaaaactgtgctgtgctggtggtgttgacctttctcccagcgttatatgatttatggtcctstttggaaatgaatgtctactctttcttggatttcaaataagagataaacatttcaaaacgattcttttaaaagatgccttttcttgatcataggacagtc

SEQ ID NO: 201326 - DNA, 201 bp, Homo sapiens
taatatctttatatgttaagatggcagtccctgtaaaatagtcatgaaattcttggctcaaggaatggccctttcttgtttgatcatggagtgagttgtgytatttatctcaattcctggaaggaagcaaagttggtatttgttcttttctgcctcattatttctacatcccaggctttatccattttctgcccaaataaa

SEQ ID NO: 201327 - DNA, 201 bp, Homo sapiens
tatggtcctgtttggaaatgaatgtctactctttcttggatttcaaataagagataaacatttcaaaacgattcttttaaaagatgccttttcttgatcayaggacagtcgtgtatgtgcacaaaaataataaggccttctcctacggtgagaaattaactttgcttttctctcagtgctcaggaacctagaattgcttac

SEQ ID NO: 201328 - DNA, 201 bp, Homo sapiens
gaaggcagctgtaaagctcagtcgttggcaagccttgcagcgttagaaatttgaagctcactgtagtatttttgttttgtgtgatctttgtcctactgatsgccatgtgactcactttctgcacttccttctcttttgcatgttttctcctcatctggacttctgaggacagctgggaatggtgaggaagaaattctgccc

SEQ ID NO: 201329 - DNA, 201 bp, Homo sapiens
cagaccttgccggataccacatttcttcacattgacttttgttccactttaggctaatttgtcctgacactgcagctgcaggctttgggctgcacagtctrtcattaagagtaccaagaatggtctggagagtcggagctgttggaagttaatttggcgtaaactttactttaaaagatttctcgagctatgacatgtcac

SEQ ID NO: 201330 - DNA, 201 bp, Homo sapiens
aagaaataggattctactttttttttccataggcggattagccttctaatagaacacaacaaagaactgtttctcctaaataggtcacattaaacctcatyaattttttagcaactgcttaaaaacttaatctggcattaaaagtacttattcaaatgttgcacctcaagcatcaaaccttttctctgctcttggaggaag

SEQ ID NO: 201331 - DNA, 201 bp, Homo sapiens
tcgtgcctgtggtagatggagacttcctcagtgacaccccagaggccctcatcaacgcgggagacttccacggcctgcaggtaactagtggctagctggcrtgaagctggctcctctgggtcccaacggtccctcccctccctgcagggacccaggcatgagggcttctccaggcccattcccagaagtcccagaagtcct

SEQ ID NO: 201332 - DNA, 201 bp, Homo sapiens; identical to SEQ ID NO: 35466

SEQ ID NO: 201333 - DNA, 201 bp, Homo sapiens
actgccctccgccggcggcggcgtgcacggcagcttcagacggatggggggctctcgagtcctgggggacgcgggctggcgagcctgtttgctggggctgsgctgggagcgtgcgcagctgatgggaacccgcgggcatcagcgctcggtgccagacattggatgagaaggggcagggttgggtggggagtggactaggca

SEQ ID NO: 201334 - DNA, 201 bp, Homo sapiens
gctgcctcaagaaagcgtcttccggttctccttcgtgcctgtggtagatggagacttcctcagtgacaccccagaggccctcatcaacgcgggagacttcmacggcctgcaggtaactagtggctagctggcgtgaagctggctcctctgggtcccaacggtccctcccctccctgcagggacccaggcatgagggcttct

SEQ ID NO: 201335 - DNA, 201 bp, Homo sapiens; identical to SEQ ID NO: 35469

SEQ ID NO: 201336 - DNA, 201 bp, Homo sapiens; identical to SEQ ID NO: 35468

SEQ ID NO: 201337 - DNA, 201 bp, Homo sapiens
ctggtagcctgccttcggacacgaccagcgcaggtcctggtgaaccacgaatggcacgtgctgcctcaagaaagcgtcttccggttctccttcgtgcctgwggtagatggagacttcctcagtgacaccccagaggccctcatcaacgcgggagacttccacggcctgcaggtaactagtggctagctggcgtgaagctgg

SEQ ID NO: 201338 - DNA, 201 bp, Homo sapiens
acaagtatggatgatacaggactgaggaacgggggacggctcaaaagaaatcaacatcgtctggggcatccaggtcccgatattccacaatggcccttggrtctccacgaaccatcctgtgaagtgagaggtacaggatgagagctgagggctcccaaaagggagtctgcaggcggcaacaaagcttgggcgtctgccctc

SEQ ID NO: 201339 - DNA, 201 bp, Homo sapiens
ccccgtcccctaggcctgctccagcccgtccttcttctttcttgctgggctccccaggctttcctgcctgctcctcctcctcctcctgctccaggatgcgragatcattctccgtgcctccttccatcttaatcacggctaccaacaaagggaacagaggtcatgaccccagggccctggctcctgtcaaccggcttctac

SEQ ID NO: 201340 - DNA, 201 bp, Homo sapiens
tccatctctattttttgggaaggggaggctcggcggaagccccgagttataattagcgccactcgggtttcctagttaatctccagcagcaccaccacccmccgctcagggcggcgggggctgggctaggagtgaccggcgggagaggggggagttcccacccggggaattttgatcctttggctggagatgccggaaccg

SEQ ID NO: 201341 - DNA, 201 bp, Homo sapiens
aaggctgatcgtacaaaaaattctcagagcttcataggacaaggtagtacaagtatggatgatacaggactgaggaacgggggacggctcaaaagaaatcwacatcgtctggggcatccaggtcccgatattccacaatggcccttgggtctccacgaaccatcctgtgaagtgagaggtacaggatgagagctgagggct

SEQ ID NO: 201342 - DNA, 201 bp, Homo sapiens
cgagcccccaggccccctccccaagttcccggctcctggctcggggcggggagcgccgaccttttctcggtctctactgccctccgccggcggcggcgtgyacggcagcttcagacggatggggggctctcgagtcctgggggacgcgggctggcgagcctgtttgctggggctgggctgggagcgtgcgcagctgatggg

SEQ ID NO: 201343 - DNA, 201 bp, Homo sapiens
ccattttacatctccattcccacaggtgtcctttcatccccaggagtgtcccacgtcaccttttctgcacccgtgccacctggacccctaaggggacggtmctctgccacactcccacatgcctctcctcccatgccacccgtctgtgtcgtggccggggatgcatgaccccttggccttgcgctaacttcaccagcctcg

SEQ ID NO: 201344 - DNA, 201 bp, Homo sapiens
accatgggtctattttctctttctctgcatccctcccctgatctcgtcctctctctgtccatggttccgggtctgtaactgttcatctctctggctctttstctgtccatctgtttctgtctacttgtctgtctgtgcctgtcgctccatcccacccccctctccctcacccccaggtgctggtgggtgtggtgaaggatg

SEQ ID NO: 201345 - DNA, 201 bp, Homo sapiens
gatcctttggctggagatgccggaaccgtagcagctgctgcccccaaaatagcgcccccgcccctgcagccggggatctccggagtcccgggaacgcaggmgtcccggctcgcccttcaggcggctctgcaaggccctcgagcccccaggccccctccccaagttcccggctcctggctcggggcggggagcgccgacctt

SEQ ID NO: 201346 - DNA, 201 bp, Homo sapiens
taggcaggatttgggggaccccgggacctgaggcttccacaccctgaatgcccagcccaccgccccccagggccccgggtctggccgacccaggagagcgrggctgcgccttcaggccgccgcaagctcccccagcggcgctgcccgtccgtgaggccgcgcccctgtcgggtggcctgttcgtggactgaggcttctggt

SEQ ID NO: 201347 - DNA, 201 bp, Homo sapiens
gcaggatttgggggaccccgggacctgaggcttccacaccctgaatgcccagcccaccgccccccagggccccgggtctggccgacccaggagagcggggmtgcgccttcaggccgccgcaagctcccccagcggcgctgcccgtccgtgaggccgcgcccctgtcgggtggcctgttcgtggactgaggcttctggtgcc

SEQ ID NO: 201348 - DNA, 201 bp, Homo sapiens
agtgaggaggagacgaggtagacatggagggggcggggcacagtggctcacccctgtaattccagccctttgggaggccaaggtgggaggatcccctgagrccaggagtttgagaccagactggacaacataacaagaccccgactcttaaaaagaaaaaaaatacaaaacttagccaggcacggtggctcgtgcctctag

SEQ ID NO: 201349 - DNA, 201 bp, Homo sapiens
aaggtgaggcaggaggattgcttgagcctgggaggttgaggctgcagtgagctatgatggcaccactgcactccagcctgagtggccctatctctggaaaaaaaaaaaaaaaaaaaaaagggagaccaagacaaaggagttggagctggattaagtcaaaccagtgatgattcactagcagtgacacattctctcacacac

SEQ ID NO: 201350 - DNA, 201 bp, Homo sapiens; identical to SEQ ID NO: 35471

SEQ ID NO: 201351 - DNA, 201 bp, Homo sapiens
aaaaaaaaaaaaaaagggagaccaagacaaaggagttggagctggattaagtcaaaccagtgatgattcactagcagtgacacattctctcacacacacaycagtttacctggatcgagaagaggacaatgaaatctagcattggatgggtgttgttaaaaaatgtgatgtttgtagacataggacccgtcctggttattt

SEQ ID NO: 201352 - DNA, 201 bp, Homo sapiens; identical to SEQ ID NO: 35472

SEQ ID NO: 201353 - DNA, 201 bp, Homo sapiens
ggcagggttgggtggggagtggactaggcaggatttgggggaccccgggacctgaggcttccacaccctgaatgcccagcccaccgccccccagggccccrggtctggccgacccaggagagcggggctgcgccttcaggccgccgcaagctcccccagcggcgctgcccgtccgtgaggccgcgcccctgtcgggtggcc

SEQ ID NO: 201354 - DNA, 201 bp, Homo sapiens
ggaggggagtgggagcccgccaggtgtaacccctctcttctccccctagcctcggaggctcccagcacctgcccaggcttcacccatggggaggctgctcsgaggcccggcctccccctgcccctcctcctcctccaccagcttctcctcctcttcctctcccacctccggcggctgtgaacacggcctcttcccctacgg

SEQ ID NO: 201355 - DNA, 201 bp, Homo sapiens
ggcctgttcgtggactgaggcttctggtgccctcactgcacgagctgggcccggcccagttccgggaagaggtgagggcagtggacccctgcggagcagaragggtgctcctctctgttccctgcatttgtctggatatgggtgtctgcctgatctctttcccctcctgcccgctggcctgtgtccttgtctctgcctgtc

SEQ ID NO: 201356 - DNA, 201 bp, Homo sapiens
cggtctctactgccctccgccggcggcggcgtgcacggcagcttcagacggatggggggctctcgagtcctgggggacgcgggctggcgagcctgtttgctggggctgggctgggagcgtgcgcagctgatgggaacccgcgggcatcagcgctcggtgccagacattggatgagaaggggcagggttgggtggggagtgg

SEQ ID NO: 201357 - DNA, 201 bp, Homo sapiens
tgccgggcggagctcgcgcctgcgtaatgaggcccgcaggcaggctagctggcacggcggaggggaggagaggggaggggaggggaggggaggggaggggmggggcggggcggggcgcggcggagcattgtgggagctcctcggtcggtgccggtcggtggctgcctattgcggcctgcggtgatcaacgaggcccgggga

SEQ ID NO: 201358 - DNA, 201 bp, Homo sapiens
cttgtgttcactgatacaagcaggcattaagggcttaacaagacgaacattggtagactcaaaacatactgttttgactcccgcgggccacagcctgacaygggcatgcccctaccccctggctcccacagccacctaccggaggcatggcacagggagggcctcgcctcactgtcacagcagcatggcacagcaagatca

SEQ ID NO: 201359 - DNA, 201 bp, Homo sapiens; identical to SEQ ID NO: 35497

SEQ ID NO: 201360 - DNA, 201 bp, Homo sapiens
gcctgggttctagaactgggaagacttttctccagagcgtcgcggggagcgccccgggctgggcccacggggactgcggaatacggggatgaacttggctyggggcagccagcaccccacggcagatgaacaatcgggagcagatctgtgggcgtgcggggaccttaggcggcgcgcgggggcggggggaggggctgagcc

SEQ ID NO: 201361 - DNA, 201 bp, Homo sapiens
cgcaccgctggtactctcgccacgccgccgcccggcactgcagcaccagggggaggaggcaggcggaggagaggaggaggaccgcagcgtgcaagccgggrgccactttcccgcccctcctctcgccgctgacacgctcagaggagtcaccactccgcgcgctgcaggcgagagtggcagacggaggcagcccggggaagc

SEQ ID NO: 201362 - DNA, 201 bp, Homo sapiens
ccgcgcgctgcaggcgagagtggcagacggaggcagcccggggaagcgagccggagcggcgcccgcactgaggcggctgcagtgctgacaccactcagggmaagggtctccgacggctggagcggtgagtgggggaggtgaagcgggcatccgcggggagactttcccccgctgctggatttctcttcccgactggtggcc

SEQ ID NO: 201363 - DNA, 201 bp, Homo sapiens
ccacatttactgaggcgagacattttctgagtgacaaaaactaccttatcctagatgtgcagataatataggaacaaacaacatagagagattcagttatkggcctataaagcaaactcagggtacggccctgaatggcctagagtttcctttagttcatctctctccttcttaacaagaatgttttccagacatcaaaat

SEQ ID NO: 201364 - DNA, 201 bp, Homo sapiens
ctgcaggcgagagtggcagacggaggcagcccggggaagcgagccggagcggcgcccgcactgaggcggctgcagtgctgacaccactcagggcaagggtstccgacggctggagcggtgagtgggggaggtgaagcgggcatccgcggggagactttcccccgctgctggatttctcttcccgactggtggccgggcgct

SEQ ID NO: 201365 - DNA, 201 bp, Homo sapiens
ggatgtgtgtcccacatataaacttgtcataagtctgaggcccttgtgttggtgatgcaagtggcccctgtgacgtgcaggcttggaaaattacacacagytacagtccaaacatatctttctctatgaaggtctctgggggaagttaaacaaacacagaacatgtttgccttagtctcgatagtagctgatggtttattt

SEQ ID NO: 201366 - DNA, 201 bp, Homo sapiens
aagtggagtgagagatgtattgagatgtgtgtgcctgtacatatgtgtgtgagtgtgcacatatgtgagcatgcatgtgcacacgtgtgtacacatgaatrtgtgaacatgggtgtgcatgtgtgggaatgtacatgagtgagcctgtgtgcctgcaaatgcatatgtgtgttatgtgtgtagatgtgttacatgtgtgag

SEQ ID NO: 201367 - DNA, 201 bp, Homo sapiens
aatgtatttctggattttaaaaaattctgttccattaacctatgtgtttatcttgacatcaaaaaccacacaccctggccctgtagttttataatgtatartctggaatcaggtcctgtgctttatccaagtttattgttctttttcaaagtgatttttggctattctaggtgctttgcttttccatgtgaattttagaat

SEQ ID NO: 201368 - DNA, 201 bp, Homo sapiens
agagggtgcccaggaggaagcgtggccaggaccagctgagagctcactgtggaagcaggaccaggcttgctgctggagttgggaagcctgtcaattttttstctttgttcctgaggctgactgggcatcaagccatgcagttaagtgaccgaaaccctggtcagcagtagcaggggtaacaaaggttgggcctggcatcag

SEQ ID NO: 201369 - DNA, 201 bp, Homo sapiens
tgtgtccaccccatggccaggggccaaggcagcgtgtgggtgctggtgtgagcatcttcacaccaactccatactccacagccctccgggaggtgaggcartcaaacatttaggaccaggctacctgggttcaaatcccatttgtggaatttgcaaactgtttcaccctgggaaaattgctcctcctaggtttcctcccct

SEQ ID NO: 201370 - DNA, 201 bp, Homo sapiens
agtgggtgtagctcatcccgggaatcagggtggggaggtgcctaatcctgtccatcttgaccatctgcagagggcggcagagctgacccgagggtcctgcygagggttgaaaaggaatgtctggggcaggatgtggactttttctgtcagggttgcaggctgaggtttgcatggctaggcctggagaacatcaggagcggg

SEQ ID NO: 201371 - DNA, 201 bp, Homo sapiens
tgtcaccctttacaaacctttcttttgtgtatattggagcctgatgtgttaacacataattaataatgtgggtcctatagagaggtgtttgtccagaatgycattattgatgagaacttgagttgaaagcagccccggagaccatctgaggctggaaattgaaggtttctgacctttgagcatgacccagagtaagtcagc

SEQ ID NO: 201372 - DNA, 201 bp, Homo sapiens
aggcaggcacgcacccttgtctacagatgggcagacaggtgggtgcctccaggccccccccaccccgacagccagccaggcactgtggcagccccaccacsccttgtcattggacctgattctcctggtggctgcgagctcacctgttggggacaggaatgtgtcctgtactgtcctgcctcacctcttcttgccagtgta

SEQ ID NO: 201373 - DNA, 201 bp, Homo sapiens
gagtggaaagtgggaaatactccagagttcagccctgtagagttgctgcctactcctggtactctgaggtcgggctaggttgcccagcagtcgcaggcctyctgagggtgccagtagtgttcctcagataggacgagttctcttctcactacatgtctgatgcagtacagcaagaggatcatgtcatccttgtcctccaag

SEQ ID NO: 201374 - DNA, 201 bp, Homo sapiens
tgtgggtggggttggggcacagagttttcagtgtctctggcctggagtaggtaagttattgtctggaagttttcttcttgtgaggttgcccagtcctgggsctttggctgaagagagctgcttttgttgtgttttcctttggtctgtgcctattggtattgctgacttgcccacttctcaagcactcagtctggcatatat

SEQ ID NO: 201375 - DNA, 201 bp, Homo sapiens
ctctgttctagcatctggagctgggtcccacacagcctctggcatggagtgcatggagccaccatggaagctcacatccagaccctggtgctaggtccctrcaagcaagccctgccccactgcctgcctgtctgggtgcttcctgggccaccctttctggctcagtgaacattgcctcctcctattgtccagggaacaggc

SEQ ID NO: 201376 - DNA, 201 bp, Homo sapiens
tgcatttagtagaaactattttctcatcctttatctttttcctaactttgtgaagcagaaattctttgagctagaatactggttgcgaacctgtcaagaartgtctctgttttctctggacagtttgcctgctgccctccgtatgctggtccctccctcccctgactcagggttgcagaggcagctatgccggggtcctgt

SEQ ID NO: 201377 - DNA, 201 bp, Homo sapiens
gtgtctgcggcttctcaacgagatcatcgccgactttgacgaggtgaggctgtgcgtcgccatcctgaccccgcctggttgtggtggtgcatcctgttgcrtgggcagagcgtgtctcacaatatgtcacattcttcgtagctggaatgagagaaagcaaatcccgggaagcacaggcattctgtctcctttgggatccag

SEQ ID NO: 201378 - DNA, 201 bp, Homo sapiens
gtgtgggtggggttggggcacagagttttcagtgtctctggcctggagtaggtaagttattgtctggaagttttcttcttgtgaggttgcccagtcctggscctttggctgaagagagctgcttttgttgtgttttcctttggtctgtgcctattggtattgctgacttgcccacttctcaagcactcagtctggcatata

SEQ ID NO: 201379 - DNA, 201 bp, Homo sapiens
cctcttcaacctcctgccggcccacgtcgcccagcacttcctcatgtccaaccctcggaacatggtgagcacccagcctgctcctggccagcactagccckacactgctctggccaccccacttggcgctcacctggctgacccttcctgacccatcctttgaacttccaggacctctactaccagtcctactcccaggtg

SEQ ID NO: 201380 - DNA, 201 bp, Homo sapiens
gtcttcctggcagtcctgagatgagcacctttgtctgtgaggggacaggacccacgttgggtcagcccaggccctttgcagtcctgctgtagactccctgyggctctagttctcttatgaggcaccttatttcagcccagttgctttgcagtttcttcctttgataaagaagtgctggctcctaggagaggctgaaggtgt

SEQ ID NO: 201381 - DNA, 201 bp, Homo sapiens
gggctttgcaaatgaaaacaacaataaaatatcactagatacctgttagaagggctgcaatccaaaacactgacaagacaaatgccggtgaggatgtggarcaacagaaactctccttcattgctggtgggaatgcaatctaggacacccactgtgggagagagtttggtggtttctcacaaagttagacataatgttacc

SEQ ID NO: 201382 - DNA, 201 bp, Homo sapiens
tgtccaccctggaaggagactccttttcgcagtactgccacaactttagaggccattattgtttgtttttttttccagtcctccttctggtttgtctcgayggtgattttaccttgtggagcaatggctggtagaggtgcagtcatgagtcctcattaataggtgtgtagtgaatgaatgcaattgagtgtgattggggaa

SEQ ID NO: 201383 - DNA, 201 bp, Homo sapiens
aaccacatggctgtttcctcctttcgtggccacagatctcctcagctaaaaaatgctcacacagatgttttaggcttacaaataactgagctaaaatgctycaaaggggtgtgaaggttcttttaacagagctttttctgtttctgaacaaaaatgtcaaaagttggttctttgaaatagaaaagcattaaagagactgat

SEQ ID NO: 201384 - DNA, 201 bp, Homo sapiens
aggtgtacggttgagtggcattaaatatatttacatggttgtgcagccatcaccaccatccacctccagaacttcgtgctgtatatatatatatatacacrtatgtatacacatatacacatatatacacacacatatatgtatatatacatatatgtgtgtatatacatatatgtgtgtatatatacgtgtgtgtatata

SEQ ID NO: 201385 - DNA, 201 bp, Homo sapiens
attggattttttccagatatacaaggctgttttagtattccaaaattaattcatgaaatttcatcaaatcaacaggataaagaagaaaaattatataatcrtatcaattgatgcagaaaaattatttaagtctaacacccattcctggttttttaaaaaaactctcagtgaactggcaatagaagacaacacctcagtttg

SEQ ID NO: 201386 - DNA, 201 bp, Homo sapiens
ctctcttctcctcccatcagccttgcactctccttttccacagtagaactatgaataaatacaaataattattctgaataggtctagatttattaaagaarttgaatcaataattaataatcttctgaaagagaaagcaccagattgagatacatacactggtgaattctaccaaatatttaaggaagaaattacaccagt

SEQ ID NO: 201387 - DNA, 201 bp, Homo sapiens
ctgactctggcttcagtcctgtggcagcctcgctgcttcctccagctccagattgcccccaggcctgtgtttagtgtttagggagcaacagcaggggacawccatgcccctggaaactgccccgtcccccccttcccccttcccccctcccccccatttttgtttttctcgtaggggtgggtggtcccctggtccatttcc

SEQ ID NO: 201388 - DNA, 201 bp, Homo sapiens
ttttccctttgaactcaagctgccttgggcttccaagccccctagccttgtcaaatctgggagacccctaggctccacaggcactgtctctacatgcggcytggaaactctcccagcagtatgctgggccattgcaggcctcatcacttattcccatcactcaaggatcactgtctttcattgcctcctgtccagtatttg

SEQ ID NO: 201389 - DNA, 201 bp, Homo sapiens
ggcaaaggagcagtagcaataccatggagaaaggatagtctcttcaacaaacagtgctgaaacaactggacatcacatgcaaaaaaaaaaaaaaaaaaaaragaatatagatgcagactttacacccctcacaaaaattaactcaaaattgataataagcctaaatgtaaaatgcaaaactacaaaacttttagaagataa

SEQ ID NO: 201390 - DNA, 201 bp, Homo sapiens
ttgctaatcagtactcaactagagacttgaagagaccagaacactgtgtcctctctggtattttccctttgaactcaagctgccttgggcttccaagcccyctagccttgtcaaatctgggagacccctaggctccacaggcactgtctctacatgcggcctggaaactctcccagcagtatgctgggccattgcaggcct

SEQ ID NO: 201391 - DNA, 201 bp, Homo sapiens
aagttttgttttgctaggttgcccctttttttttctttggctagaaacaacaggcttttttgtaggggctttaaaaaagttgatctgtatccagtggcatwttttggctgctggtttctcttgtttctagtctgggataaataaggcagaaagaaacctcaagggacaccacccacccgacactgttttcctttgagttgc

SEQ ID NO: 201392 - DNA, 201 bp, Homo sapiens
gtcttcccagaacacacttgcaccaggcctgccctgcatgccctgcctggcttcacacacacccccatcctcgtacctggccctcaaggctcggggcctcrtcatctctatccttagaaatctccacttctctgttttaactggtggaatcactgtgtgcagtctagtggcatattcgtggccagctcagctctgataata

SEQ ID NO: 201393 - DNA, 201 bp, Homo sapiens
gatagactggattaagaaaatgtggcacatatacaccatggaatactatgcagccataaaaaatgatgagttcatatcctttgtagggacatggatgaaaytggaaaccatcattctcagtaaactatcgcaagaacaaaaaaccaaacaccgcatattctcactcataggtgggaattgaacaatgagatcacatggaca

SEQ ID NO: 201394 - DNA, 201 bp, Homo sapiens
attcggctgtgaatccatctggtcctggactctttttggttggtaaactattgattattgccacaatttcagagcctgttattggtctattcagagattcracttcttcctggtttagtcttgggagagtgtatgtgtcaaggaatgtatccatttcttctagattttctagtttatttgtgtagaggtgtttgtagtatt

SEQ ID NO: 201395 - DNA, 201 bp, Homo sapiens
ctgtaccaacaggcaccagcatctgcttggcttctgggaagggctcagggagcttttactcatagcagaaggcaaaacatgaacatacatgtcacatggcragagcaggagcaagggggtggggggaaggtgccacacactttaaaacaactggatcttgcgagaactctgactatcgcgagaaaggatagcaccaagcca

SEQ ID NO: 201396 - DNA, 201 bp, Homo sapiens
atttaagacgaaaagaggtttaattgacttgtagttctacaggctgtacaggaggcatggctgggaggcctcaggagacttacaatcatggcggaaggcaraggggaggcaagcacgtcttctcatggcggcaggagagagagagcaaaggggaaagagctacacactttcaaacaaccagatctcgtgagaattcactca

SEQ ID NO: 201397 - DNA, 201 bp, Homo sapiens
agtttggatgattagaaggaagtgtgcggtgggaacaagtgaaggcagcgtgagtggatgggactaatggaggctcatgataccccaggcagaggaggagygagaggacatggagaaggtgaagctggacaacaggcgcatcctcttcaacctcctgccggcccacgtcgcccagcacttcctcatgtccaaccctcggaa

SEQ ID NO: 201398 - DNA, 201 bp, Homo sapiens
gagtctggccactgttggccatcaagtgagggtgcagtagtggaggtagagtgggtctccagggggctgtgcatgtatcacagcctgggctgagagcggarggcacactctaagggggtgagttcaggagcccttatgatgcttggactatttgaaagacaggggcaggcacagggcatctccaggctggtgtggcacttg

SEQ ID NO: 201399 - DNA, 201 bp, Homo sapiens
ctcgctactggcccctgctcccgctccccattggccaaacctggccggaagtaggaggcccaggaccctgttggtagagtccttggactggcctccctggkacagaaccggtggggaatggactgcagatacagcacatacctgccctggaagggagatctggccagatacagcacatacctgccctggaagggagatctg

SEQ ID NO: 201400 - DNA, 201 bp, Homo sapiens
taaaatggggtgagaaccctaatccaggtgtgcaagaaataactgaaattctattcctgatgtcgttggccacgggccttgtgcaaagtaggtgctcggtraggctgagcagccctttgtctggcagcctgttactctgtgatgagccatttttggggggatctctttctgggagggagggttagagtagggtgaagggta

SEQ ID NO: 201401 - DNA, 201 bp, Homo sapiens
cattgctgtaataatagcttttggctgggtgtagtggctcatacctgtaaccccagcactttgggaggctgaagcaggaggattatttgaggccagtagtycaagaccagcctgagcaatatagcaacactctatctacaaaaaaaaaaaaaaaaaaaattagccaggcatggcagcacttgcttgtagtagtcccagcta

SEQ ID NO: 201402 - DNA, 201 bp, Homo sapiens
agacctgaacttctttaccctgaagtacaaacatgtcgaacgggagcaaaaggtaagcaactctggttttcggcttccctggtgctgcttgcgaaggcgcygcctggctggaggaagccctcagccctgatggattgacttctctcttacacagtaccaccagcttcaggacgagtatttcaccagcgccgttgtcctcac

SEQ ID NO: 201403 - DNA, 201 bp, Homo sapiens
acatcagccgcctcttagaagcccgccagacagagctggagatggcagacctgaacttctttaccctgaagtacaaacatgtcgaacgggagcaaaaggtragcaactctggttttcggcttccctggtgctgcttgcgaaggcgctgcctggctggaggaagccctcagccctgatggattgacttctctcttacacagt

SEQ ID NO: 201404 - DNA, 201 bp, Homo sapiens
atgtggagttctgatgtcctgaaaagcaagctcggctttaggcatggtgtctgggcagagggcaggggcagagtgagccagctgggccctgggctctggtyggcagagctactgatgtgcctgaaaatcaatctgatggtgggtcggggaaattctgctcctcactttccaatgacaagaccagctggcaagcccagccct

SEQ ID NO: 201405 - DNA, 201 bp, Homo sapiens
tgtgcctcctcacagcctaataaagatcaaagtcgaggctccccacatggtctttgctggcctgggtggagctggggccacagattttttttttttttttktatggtctttggctacaatagggtggttattgtctaaaagttttgttttgctaggttgcccctttttttttctttggctagaaacaacaggcttttttgt

SEQ ID NO: 201406 - DNA, 201 bp, Homo sapiens
cttattttatgtctgattgttcaagggagatgttgacatctccaactataattgagaatttgtttatttctccttaaattctcttttcttttttttgagayggaatctctatcacccaggatggagtgcagtggtatgatctcagctcactgcaacctctgcctcctgggttcgagcaattctctgcctcaccctctcgag

SEQ ID NO: 201407 - DNA, 201 bp, Homo sapiens
tgccgctctgctacccgcacctccagactcagcccaggcctgccagcctcagcgtttgatggagcccagccttggagctggagttaggcgtcaggtgggaragtgcatgtgccgtctgtgaccttggtgcagctttgtgagcaaacgtgtccagagttcaggggaatgtcttacaaaggctcttggacagactgggaccac

SEQ ID NO: 201408 - DNA, 201 bp, Homo sapiens
cagagagattccagaggaaacaggagccttaggaaggtgtctgccccacctgggtgtgaggcattctaggacaggtgccctgcggggcacatcaggagctkcctgggggctggtggagcctgtggatgggcacatgcctgagaaagagttgctgtagcatctggtccctaaggggtggcggagggcagggcggaccctgga

SEQ ID NO: 201409 - DNA, 201 bp, Homo sapiens
caggctttggtatcaggatgatgctggcctcataaaatgagttagggaggattctctctttttctattgattggaatactttcagaaggaatggtagcagytcctccttgtacctctggtagaattcggttgtgaatccgtctagtcctggactttttttggttggtaagctattaattattgcctcaatttcagagcctg

SEQ ID NO: 201410 - DNA, 201 bp, Homo sapiens
tcactgtgtgcagtctagtggcatattcgtggccagctcagctctgataatatcagtactgccagaaagcagctgtgctctttaggcttaactaaggggcrtgctgtcccctcagcccttgttaagtacaaccctacaagtgttccctctaacagtgggtgtgttacacccattttacaataaggaaaccacggcacagtg

SEQ ID NO: 201411 - DNA, 201 bp, Homo sapiens
tcttcttttgagaagtgtctgttcatatccttcgcccactttttgttggggttgtttgattttttcttgtaaatttatttgagttctttgtagattctggwtattagccctttgtcagatgagtagattgcaaaaattttctcccattctgtaggttgcctgttcactctactggtagtttcttttgctgtgcagaagctc

SEQ ID NO: 201412 - DNA, 201 bp, Homo sapiens
tcctcgtacctggccctcaaggctcggggcctcgtcatctctatccttagaaatctccacttctctgttttaactggtggaatcactgtgtgcagtctagyggcatattcgtggccagctcagctctgataatatcagtactgccagaaagcagctgtgctctttaggcttaactaaggggcgtgctgtcccctcagccct

SEQ ID NO: 201413 - DNA, 201 bp, Homo sapiens
attattcagtgacacttgctcaaacatagtaagatgctctgtatgtgggaccatagctgtagcataggaaccacggcagtggaatggagtcgtgctgttgsggggagaggttagactcagctcctaacagaaggaggggagtgagggtcagtggatggaaaatttctaagaggaaacataggggtaaggggattgtggcca

SEQ ID NO: 201414 - DNA, 201 bp, Homo sapiens
tacatgggagggaaggagagtggaaagtgggaaatactccagagttcagccctgtagagttgctgcctactcctggtactctgaggtcgggctaggttgcscagcagtcgcaggcctcctgagggtgccagtagtgttcctcagataggacgagttctcttctcactacatgtctgatgcagtacagcaagaggatcatgt

SEQ ID NO: 201415 - DNA, 201 bp, Homo sapiens
aatatattaccagttggattttttgtggatactttttatcaagttgagcaagtttccttttatttctagtttgctgagtttttttttttttttgattcagraatggatgttgaattttgtctaattcttttgcatctattggaaggatcatatggtttttctttttagtctgctcatataatgaattaccttgattgatgg

SEQ ID NO: 201416 - DNA, 201 bp, Homo sapiens
gtacagctggcctctggagcacactgagggcagaaccaaggcctctggacaaaagatccagggagggagattttcattcaacgtatgttgtccagcggctkgagggtttgaggttgggtgaagctgacatgtatagtagtgagtcccccatctctgtgaggtgttcaaggaaacgcagataactgctcaaggagattaggt

SEQ ID NO: 201417 - DNA, 201 bp, Homo sapiens
gttggtaactccagactttctgatgaggaaatggagccttctgctttaaggcaccagaggccgtctgaaacagcagacccaccggacatcccctaggacayctttctgtcatggagtgtggctgctttgcatttttttctgtgtgtgtgcaatgaaaaatccagattttcggccgggcgccgtggctcacgcctgtaatcc

SEQ ID NO: 201418 - DNA, 201 bp, Homo sapiens
cacaacgggtgatgggagtggattgggggatgcactgaggttctgagaggggatatggggggatgtgacctgattctgtggggggatccagggagacacayctggtcctgggagaggatctgggtgtggacacaccccagtctgggagggcttctgggtggatggatgtaccctggtcctaagaggggatctgggggacac

SEQ ID NO: 201419 - DNA, 201 bp, Homo sapiens
atatcatttaaatgtaatacctcacccctgaggcttaaaggatgagtaggaattagccaaggaaagggcagagtgctaggtggggtaagtatgtctgtctygtgagatgcttgtttttattgttattttaaaaaatcagttcataatactgtattgtgtacttgaaatttggtaagatagcagattttaagtgtcctcacc

SEQ ID NO: 201420 - DNA, 201 bp, Homo sapiens
ataatattccactgtatggatggatcacattttgtttatctgttcacggctgatacatatttgggttgtttccactctggctataataagtaatgctactataaaaaatcatgcacaagtttttgtgtgaacacattttcatttcttttggataaatacctaggagtagaattgctaggtcttgtggtaactctatggtta

SEQ ID NO: 201421 - DNA, 201 bp, Homo sapiens
tctgagacagaatgaggacaggaccaccctcccttggctgttcccttgtagtaaacacgttgttgattccaggttctgtggttactggtcttgttatttaraagactctgtcagggtgactgtgggggtcactcatagcacatgtcggcacacagggagttgccaagttatgctgtttgttattttgttctcttttccaaa

SEQ ID NO: 201422 - DNA, 201 bp, Homo sapiens
tgtagtgagggctagtgggagggcaggcatgtccacatgggacttgggagctgtggaggcagggaccgggctaggactctaaagccttccttagggaaggsagtggggctgtctgccactcggctgtgcccctctctagtgcaggccagggcaggcacctggcggggggtggggggtggtgggggatggggtgggaggcct

SEQ ID NO: 201423 - DNA, 201 bp, Homo sapiens
gtctctcagggggttgtggaggagtttatgtcatataaagccgtggtcatcatgcttcttggaccctgaaatgttgtacgcttgttagtcgtcatcttgtyctctgttactggccataggtttcacatctggcctttgggtgagtacatcctcacaaacagcttttatggagggacagatggttccagatgtatcctagct

SEQ ID NO: 201424 - DNA, 201 bp, Homo sapiens
cgtcaggctggtctcgaactcctgacctcaggtgatccacctgccttggcctcccaaagtgttgacattacaggcatgagccactgtgccctgtttttttgttttgtttttttttttttttttcagacaaagtctctttctgtagccaaggctggagtgcagtggcattatcatggttcactgcagccttgaactcctggg

SEQ ID NO: 201425 - DNA, 201 bp, Homo sapiens
ggctggtctcgaactcctgacctcaggtgatccacctgccttggcctcccaaagtgttgacattacaggcatgagccactgtgccctgtttttttgttttktttttttttttttttttcagacaaagtctctttctgtagccaaggctggagtgcagtggcattatcatggttcactgcagccttgaactcctgggctcaa

SEQ ID NO: 201426 - DNA, 201 bp, Homo sapiens
acatctccatcatcagcaactccaaaccccagccacttcctgggagttcaggaactgtgtttagccataatgtcccttggggtttggtgaaaaacaacttsctttttatttgtgggaaaactgtattatattgccttatttatttttaatcatgtacaatattcatgtacaaatgttagagccattcgggtaggattctct

SEQ ID NO: 201427 - DNA, 201 bp, Homo sapiens
gggctgtgctcttgagggcacttgtgtgagtgctcctggaggagcctgcctgtcccagccgcacctgccaaccagactccctgtggtgggcgtcccacccmgcctggctgccagtctgtgctgggcccagctgagcctggcgcacatctacaaaaagctgtcattggaccagaaggccagagcagatgcgtgtggggacct

SEQ ID NO: 201428 - DNA, 201 bp, Homo sapiens
tgggctgtgctcttgagggcacttgtgtgagtgctcctggaggagcctgcctgtcccagccgcacctgccaaccagactccctgtggtgggcgtcccaccmagcctggctgccagtctgtgctgggcccagctgagcctggcgcacatctacaaaaagctgtcattggaccagaaggccagagcagatgcgtgtggggacc

SEQ ID NO: 201429 - DNA, 201 bp, Homo sapiens
cctgaaatggaaatgttttagagctgctgttttaatgttgtccctgaaataaacacaacagtcgtgatgataatcccagttgacactgattgatccaagtwagacaatacagggtcttagagttaactctctccaccttccatgtgccctgcgaggctggtgctgctgttcctattcataccactgtacagacgagcagat

SEQ ID NO: 201430 - DNA, 201 bp, Homo sapiens
gtcttttcggccgggcgcggtggctcacgcctgtaatcccagcactttgggaggccgaggcaggtggatcatgaggtcaggagatcgagaccatcctggcyaacaaggtgaaaccccgtctctactaaaaatacaaaaaattagccgggcgcggtggcgggcgcctgtagtcccagctactcgggaggctgaggcaggaga

SEQ ID NO: 201431 - DNA, 201 bp, Homo sapiens
ctatcatctgagaacttttgacctggcaccaccacgataccattatcatacccaaccaaactgatgaaagttacatcatctctaaaacccagtctgggctyggttcacccttgtgtctcaaaaatgtcttttcggccgggcgcggtggctcacgcctgtaatcccagcactttgggaggccgaggcaggtggatcatgagg

SEQ ID NO: 201432 - DNA, 201 bp, Homo sapiens
taaggagtcccacagcccggccccgggggaccagcacccaaggatctaaggaggcatccttagactgtgatgccaggggcagcacacagtcagaggagccrtgagatgctcaacctggcacagggatagacacatcactggacttgtgtcttagggtcagagagagaccaccatgtgctcaacccgtgggcaggggcggga

SEQ ID NO: 201433 - DNA, 201 bp, Homo sapiens
ttatctttattttctataggggaccaaacatcctttaacttttaactattgttaaagtaactttaacttccttggctattgttttaagctactgttatattcttgcttatcaggttgctcatttacctctcagggctagctgggagcctggaatttcccttgaaggaactcaggattttcctttatttccatgcttgtggg

SEQ ID NO: 201434 - DNA, 201 bp, Homo sapiens
tgttatctttattttctataggggaccaaacatcctttaacttttaactattgttaaagtaactttaacttccttggctattgttttaagctactgttatattcttgcttatcaggttgctcatttacctctcagggctagctgggagcctggaatttcccttgaaggaactcaggattttcctttatttccatgcttgtg

SEQ ID NO: 201435 - DNA, 201 bp, Homo sapiens
atctgagaattaagaaatgttttttcctgatgttgaagaatgaactggcagtgctgacctgacactggccagatgccctgtgtcacttgcaggagggaggyggggacatcacttctgagacagaatgaggacaggaccaccctcccttggctgttcccttgtagtaaacacgttgttgattccaggttctgtggttactgg

SEQ ID NO: 201436 - DNA, 201 bp, Homo sapiens
atcacttctgctcggtgccgctggccacatcccagtcacgtaacctccccaagaaggggaggcaggtctagtggagggcagatgggctttccctatgtggygtgaggggtcagcatgggggatggcgagctctgaatggcctcagcatttactcccccagtggccaagcctcggcgttctgtggcttttctgagcctcagt

SEQ ID NO: 201437 - DNA, 201 bp, Homo sapiens
aaatctccaacataattgtacattttttctttcagttctatttttacttcatgtattcttaaactgttattcaatttttaaatatttgtaatggttatgtsttcttgataaattgactattttattattaagaaatgaccttctttattctggtaatattttttgctttgtaatcccatttgtctgatattaatagagcca

SEQ ID NO: 201438 - DNA, 201 bp, Homo sapiens
tacctgatgcctggtgaattataaggttttttattcttgccagtggaggcaggaacaattctcagcattgcatgaactttgggggttgttccctacagtcmtttgcctaacctgtgctaatccctagatggttctttctctagcctttgctaatcagtactcaactagagacttgaagagaccagaacactgtgtcctctc

SEQ ID NO: 201439 - DNA, 201 bp, Homo sapiens
agactgggcaccttaaacaacagaaatggagaatctcacagtctggaggccagaagtccaatatcaagctgtgggcagggctgggctctcctgagacctcrttcctgggctacagacagccgccttccctctgtgccctcacagagtcttcccgctggctgtgtctgtgtcctcatctcccttcttataaggacaccaggc

SEQ ID NO: 201440 - DNA, 201 bp, Homo sapiens
actggtatagcaaaatacagttgacccttgaacatcacggatttgaactgtgtggatccacttatacatggatttttttcaataaatatattggaaaataytttggagatttgtgatagtttggaaaaactcacagatgaactgcgtagcctagaaatattgaaaacattaagaaaagtttgagtatgccatgaatacata

SEQ ID NO: 201441 - DNA, 201 bp, Homo sapiens
tcagcagccttgtcctgcacacctgtcccactccagggataggcttgttctggactcacagagatgaccaggaggccctggtaaccacgggaccctggaargatgctgggaacacagctcagagctgaggtgggggcagggacactagcagttgcccacaatccctgagtccactcacgcacatgagatgcagggatgatc

SEQ ID NO: 201442 - DNA, 201 bp, Homo sapiens
tctttgcatgaacatacacaaacacacatgctcatgcataaacacatgctcatacacacacataaacacacacacatacatgcacatacccacacaaaaaycctcccagatgcatacactcacactcattctccccccaaacatgcatgcacataatcacacagaaacacacactcataaaccagtgcatactcacacatc

SEQ ID NO: 201443 - DNA, 201 bp, Homo sapiens
  misc_feature (1)...(201): n = A,T,C or G
gggagccttgaagtgctgtgagttgccatgaggtctgtggcttggtgtgatagcactgggggtgggtcagagcaaaaccttgggagacctgcttgaagagngacacctgagcatgcttaggggctgcaggtcttcacctgccctttgctaagcccctgtgacccctcccttcccaggtgggctgcctgccttgggcctgga

SEQ ID NO: 201444 - DNA, 201 bp, Homo sapiens
acacgaccacaggctcctccctttaccctgaggggctgagcaaggtaataggaagagacctttcctgctctccatttgagcatatgagttatatccatccytcctctttgcatgaacatacacaaacacacatgctcatgcataaacacatgctcatacacacacataaacacacacacatacatgcacatacccacacaa

SEQ ID NO: 201445 - DNA, 201 bp, Homo sapiens
tccctgaacatccagccaaaccgttgtccacagcttatgaatcagtatatgactacatctcaccatttctccttggaaacaaagtacccacccaggggaamtgcccaaagttctgcccaatgggaggatttcccttcaccattgtccctcagggctgtgtcatttgggctgaagtgctgcagctgcccacaaggcctgagc

SEQ ID NO: 201446 - DNA, 201 bp, Homo sapiens
tgccacagacacccacacgccgtatggccctcggagggccctcctcagcagcatgcaagccaggcactgtccggggatggaggagacctatgctgggggtscagggagtgggagccatgcctcgtgagaggacagttcagaaggttgtgggatgcatgttgtggagacctgcctgatggtcagagcgtggctctttcacga

SEQ ID NO: 201447 - DNA, 201 bp, Homo sapiens
gatgcccagaaatgtccttggaccatttcctgactcagacggaagctggtgggcatgtgaggtgggtgactcttctggcatttcaggggctctagtgtatstgtgtgactttaggcttgggatgatccccatgcctcagtttctccctcaccaaagggaacagtagctcccttctgtggttttgtagaacagatacatcct

SEQ ID NO: 201448 - DNA, 201 bp, Homo sapiens
atttcattttatttctgaatttgttagtgtcttttcactcttatttttcaggcttgcagtgatttgccaacttgattgataattttcaaagaaccaacttytggtttcattgattttctctattttttttgttttctttttattgaattcttctctttattatttcctttctactgttagctttgagtctattttgcattt

SEQ ID NO: 201449 - DNA, 201 bp, Homo sapiens
cagggaggtcatcagagacgtcagtaacaggcatggggccccaaggagccagggaacaagagactttacttagcagaggaaaatgcaaattctccctggtraaaggagcctggcttcttcatacggtgcagaggacagaagcaggggtggaaaaacaggacagacagggcaggaggaacaggatggagctgggcagcagta

SEQ ID NO: 201450 - DNA, 201 bp, Homo sapiens
ttccaggcctgattctctcagatataaaaccggccaaaaggatgaagttcaagactgtctgctacctgctggtgcagctcatgcactgccggaaaatgttyaaggccgagatccccttctccaatgtcatgacctgcgaggacgatgacaaggtaggagcagccagggagcctgccatgctggagctgccagggactgatc

SEQ ID NO: 201451 - DNA, 201 bp, Homo sapiens
ctcaggccacatgcagcaaggacaagacccagtttccctggtgctcacagcctagcagtgcagaccaaggtggccccctgggaggatacaaggtgggcgcyagccccacgctctgtgtctgtgttgcagatctgtggctgaagccaccgaggtggatctgaacatgcgtgtgggtctgcacacgggcagggtcctctgtgg

SEQ ID NO: 201452 - DNA, 201 bp, Homo sapiens
gttcagccctgggtgctctgcatcctgcccagcccacagacactgaacacagcagcctgcctcatgggcctatttgggatttaagcgttttctaaaaatgyccttcccagacaaagcccagctagagaatagctcagcaaagtctgggaaactcttgtctttccatcatgaggaaaacggcttccagaaaagttctgtgat

SEQ ID NO: 201453 - DNA, 201 bp, Homo sapiens
cagaaatggagaatctcacagtctggaggccagaagtccaatatcaagctgtgggcagggctgggctctcctgagacctcgttcctgggctacagacagcygccttccctctgtgccctcacagagtcttcccgctggctgtgtctgtgtcctcatctcccttcttataaggacaccaggcagattggattagtgcccacc

SEQ ID NO: 201454 - DNA, 201 bp, Homo sapiens
attttagttccacagttccaaaggctctgttttgttttttttttttaagtctgttttcttttcattgttcagattggataatttctgtgactctgtcttcyaggtcaggaattctttactgtgtgcacttcagtctgcagttcagctcatccattaggttttaaattttgattattgtatttttcaggtctgtaattttta

SEQ ID NO: 201455 - DNA, 201 bp, Homo sapiens
gattggattagtgcccaccccgatggcctcattttaacttaattgcctctgtaaagaccctgttttcaattagtcacatcccgaggtcctgggggttaggrctttatgcattttgggggacacagtttggccttgacactaggcctggttactcctcatcccctgacatgctgtctcacagccgcccggacagggtgagga

SEQ ID NO: 201456 - DNA, 201 bp, Homo sapiens
tctgtcgattccctttgagcctacagggttgtatctcacaataactgtctgcctagatgggctggtaatcagcacccaggttcctcctggctacctgctgyctgatgtcagtgcagggagccttgtctctttgggatggcagaggggagcacttggggcccagtagggccctgccagctcttgggtctctcagctacacag

SEQ ID NO: 201457 - DNA, 201 bp, Homo sapiens
tttagtagagacggggtttcaccttgttagccaggatggtcttgatctcctgacctcatgatccacccgcctcggcctcccaaagtgctgggattacaggygtgagccaccgcgcccggccgtatgcttaactttttatgaaacagacacaatgttttcagagttattgtagcatttcacattcccatcagcagtgtgtga

SEQ ID NO: 201458 - DNA, 201 bp, Homo sapiens
agtctatgtatgggtattcagttctcttgggtaaatacctagaagtagaatggctaaaaaacatggtagatgtatgcttaactttttttttttttttttttgagacggagtctcgctctgtcgcccaggccggactgcggactgcagtggcgcaatctcggctcactgcaagctccgcttcccgggttcacgccattctcc

SEQ ID NO: 201459 - DNA, 201 bp, Homo sapiens
aggaagggattgttcccattttataggtgaggaaactaaaccttcaaagtgaaccaacttgctttagacactctgaggtttgcttgtttttttttttttttaaagattctgtttaaaagtatttattttattaaattgtggattccacttaaaaatacttttcatgcaagtatagtgtgcttagaatggtttgagtgttgc

SEQ ID NO: 201460 - DNA, 201 bp, Homo sapiens
gctggggatggagaggaggcggaagcatctcagtgctgggtgcccgcgtgactactgctaaggctccttggagggagggaatgctgctggcactgagcacracaggccgctgcggaggggcttggagccagagggcgcggtgggagggatggagcttcttcccctcttcagcctgtttccgcgcttgtcagtgggatgttc

SEQ ID NO: 201461 - DNA, 201 bp, Homo sapiens
aacagaggggtgaggccctcatggccacttcccagagatcatctgggattttgggatgtgggtagctattttcactgtggctgctcctatggctcctgaaygtgaaggtgtctgggcacctgtgctccttccgagaaagtcacacaggatggaggccgctcctgggtcagggatgtagcctgtgcaggagggactcccagg

SEQ ID NO: 201462 - DNA, 201 bp, Homo sapiens
gaggggcccagggctcctccagggtgctagtctagtgaccacgagtggtgtctagcatgagggatgctagtccagtgaccctccagtgtctgatgattttctcatggttagactggggtgttggttttcagcaggaggcctcagaggacatgccctcactgcattgtgtcagggcacttctgtcaacaggactcatcatgg

SEQ ID NO: 201463 - DNA, 201 bp, Homo sapiens
ctggaaatttttttaaaatataacttctaccatatctatctgaatttaatgaagataaaatttcaacttgtttggtccacactttttgaaactgattgccrtaatgttttacttaattctgttgcatttttttgatctacaatagtatgtttttcaaatggtgataattttgctttctccttttcatcctatgttaaatga

SEQ ID NO: 201464 - DNA, 201 bp, Homo sapiens
tacttttcccccagacccccttgtcattaattttccaaccatgtctttcccaactccctgaacatccagccaaaccgttgtccacagcttatgaatcagtrtatgactacatctcaccatttctccttggaaacaaagtacccacccaggggaactgcccaaagttctgcccaatgggaggatttcccttcaccattgtcc

SEQ ID NO: 201465 - DNA, 201 bp, Homo sapiens
cccttcgcaatccctgtctcctcccacttctcattttactctctccctgtgtccaggcaactactaatttgctttctatcactacaaataagttggaattktctagaaccttatatatatggaacaaagcaatatgtactctacattgtctggctttttttcactgagtgtaattgttttgagattcaaccaacttgttgc

SEQ ID NO: 201466 - DNA, 201 bp, Homo sapiens
taaaaaagttgatctgtatccagtggcattttttggctgctggtttctcttgtttctagtctgggataaataaggcagaaagaaacctcaagggacaccayccacccgacactgttttcctttgagttgcaaggtccctgcgatcaccctcttctttccacctttcacagtctgtgtgcttattttacatgtattgtcagt

SEQ ID NO: 201467 - DNA, 201 bp, Homo sapiens
gagattaaagacaaaataaagcaatatattcaacatttgtcctaagctgtctccactagtgccagcgtggtggaggtgggtgggaaagggatgccatgagrgcccaggagggttctcagctttgcatctcagaacagtttccagagactcatgtgtgatgctgagtgagctggatatgtgcacacatgtgtgtatggtatg

SEQ ID NO: 201468 - DNA, 201 bp, Homo sapiens
tgtgtgtgtgggagagtgaggagcagccagggagatagggaggaagagaggaagttccaagatcacacctccaacataacgcagagataccagtcatgtcytctgttcacaggactcattgcatttagtagaaactattttctcatcctttatctttttcctaactttgtgaagcagaaattctttgagctagaatactgg

SEQ ID NO: 201469 - DNA, 201 bp, Homo sapiens
aaatatttgaccagcctttcatccctagaattgtttattctatataattctaattatatattactgaattttatttgctaatattttgttagattttttttatatctacatccatgagggatattggcctgtagttttctgttttgtactatcttcgtctggtgttggtatcagggtaatactgactttgtaaagtgactt

SEQ ID NO: 201470 - DNA, 201 bp, Homo sapiens
gcctggcgtctcagtcagggctgggctccctccacactccccaggccagtacctgccctctgcagcagctgggaaggaggcttagtggagcccacgtgggsctctggggtgcacatggggtgggaatgctccgggggtgacacaggccacggtggctccagccaggaccagccagaccagcagagcagggagccacttgcc

SEQ ID NO: 201471 - DNA, 201 bp, Homo sapiens
aacatttatgtacctaaaacagatcatcaaaatacataaagtaaaaattgatagaactgcaagaaattcttctatctataattatagttggagtttccaayattcctttcgaaaagcgatagaatcgctggacagaaaatcagtgacagattataacacttaagaacactgtcttgcatcccagggatgaagcccacttga

SEQ ID NO: 201472 - DNA, 201 bp, Homo sapiens
tgctcacaggctgttaaaggaatcaaacacaagccacagaaaatttcagtacagtgaagggcgtgccatgtaaaatgtagacaggaccctgacccaggtargttggatgtgatatcatttaaatgtaatacctcacccctgaggcttaaaggatgagtaggaattagccaaggaaagggcagagtgctaggtggggtaagt

SEQ ID NO: 201473 - DNA, 201 bp, Homo sapiens
tgggacagaaccggtggggaatggactgcagatacagcacatacctgccctggaagggagatctggccagatacagcacatacctgccctggaagggagawctggccagctgcagtttgctaaagccacaccaggtaataggaaaagagcctctttatgatgggctgtgttgctgaacttggtcttagtttggctctggct

SEQ ID NO: 201474 - DNA, 201 bp, Homo sapiens
tctcctccctgtcattctgtggccagtgctgcaatattgctgaggaagatgccggagctggttgtcgccttggtctgtgggaggctctgcggcatgtcctsgggggctgtgaggaggtttgtgggtacccagttgtttgccatatctgttttttttttttgaggcagagtctcattctgtcaccccagcttgagtacagtg

SEQ ID NO: 201475 - DNA, 201 bp, Homo sapiens
cgtgctgtatatatatatatatacacatatgtatacacatatacacatatatacacacacatatatgtatatatacatatatgtgtgtatatacatatatrtgtgtatatatacgtgtgtgtatatacatatatgtgtatatatacagcatgaagtgtaaatatatatacttatacttttttacaatgtactttttaaaat

SEQ ID NO: 201476 - DNA, 201 bp, Homo sapiens
  misc_feature (1)...(201): n = A,T,C or G
ggaaggtggtggcccaggtgcagcatgtcttgccagcgctctgtggccaccagtgtctagaggtggtggagccagcagtggcgctcacagcctctgtagcnctgtctcttaccatgtgccttgcccttccctgaaggagaaccactgtcgccgcatcaagattctcggggactgctactactgcgtgtcgggcctcaccca

SEQ ID NO: 201477 - DNA, 201 bp, Homo sapiens
cttatcagatggcagcttgcttcctgtgggaaaggttttgtactttagtctgtggttattaacttgcattggcttagatgctgctgctaatccaatggacrgagctaatgctgagcccttggttagaaatgcagttgtccttaggaacgtcgtgtgacagtggcttacagaagtaacatagctctttttgtcttacgtata

SEQ ID NO: 201478 - DNA, 201 bp, Homo sapiens
aagggtgtggcctgggcgggaaggtggtggcccaggtgcagcatgtcttgccagcgctctgtggccaccagtgtctagaggtggtggagccagcagtggcrctcacagcctctgtagcgctgtctcttaccatgtgccttgcccttccctgaaggagaaccactgtcgccgcatcaagattctcggggactgctactactg

SEQ ID NO: 201479 - DNA, 201 bp, Homo sapiens
gcccttggttagaaatgcagttgtccttaggaacgtcgtgtgacagtggcttacagaagtaacatagctctttttgtcttacgtatacattccagggtagrcactttatggtggtgcggcagatgtgatccatgaaaccctcagctgtctccatctagctcgccacctgtgtccctagtgtgttgccttcatcctcctaaa

SEQ ID NO: 201480 - DNA, 201 bp, Homo sapiens
ggctgccaggctgagctgggaaagccacatcccagtgccagggttgggcagtcagggtggacagcaacagatgcaggatggagtgttttggtctcttcccrgaggagtccccctcattgccctgaagtaacactcacttctctccatcaacaggtgactgaggaagtccaccggctgctgagaaggtgcccctaccacttt

SEQ ID NO: 201481 - DNA, 201 bp, Homo sapiens
agacaaatttataatctttggttcaaccagaaaacatgtagaaaattcaagagaaggaggaaagtatattgcatttagccacaatttttatcctttctgtyatttgtctttgtgatgttccaacattccttcttttactattttcttttttgtttcaagaatttctttttgctcttctttaggttgattataaactctcaa

SEQ ID NO: 201482 - DNA, 201 bp, Homo sapiens
ttagtcacatcccgaggtcctgggggttaggactttatgcattttgggggacacagtttggccttgacactaggcctggttactcctcatcccctgacatrctgtctcacagccgcccggacagggtgaggacgagctcctgcccggctgactccctgtgtccctggccctgcgctgtgggtttggcccgggcggcgtggc

SEQ ID NO: 201483 - DNA, 201 bp, Homo sapiens
caattttttgtagtttatctagatatgtattatttttacataacattacagcctactgatgtcaacattttaacaagtttagtgtagaaactttacctctytttcagtccctttatccttccccatttataacataaatgtcataaatatttcctctatatatatcagacaaatttataatctttggttcaaccagaaaac

SEQ ID NO: 201484 - DNA, 201 bp, Homo sapiens
agccgctggtgagcaccatggagggactgagtggtgtccactgggggctcagtcagggagggggacagagggaccactccaccatccagacacctgggagrtggcaggctgatcgcagtctgggaatttaccaatgagaacatgcccagtgctgtgcagggagcagttgtgtggagtcagctcctttgctggcctgtggcc

SEQ ID NO: 201485 - DNA, 201 bp, Homo sapiens
attctccttccttggcctagcctcctgagtagttgggattgcaggcatgtaccaccacgcccggctaattttgtatttttagtagagatggggtttctccrtgttggtcaggctggtcttgaactcctgacctcaggtgatccacccacctcggcctcccaaagtgctgggattacagtgtgagccaccacacctggccca

SEQ ID NO: 201486 - DNA, 201 bp, Homo sapiens
gctcccctcgcgacccttgcatgcctttcatgcctgatgccgtagagtagaacacagccccggaatgcttccagttgcttgcaagggaccatgccggcccrggtggtccatgcctgcggggtgtctgtatcctgcaggaggacgcccctacagacccagcaacccaagttgccagcccgtgtttctcagactttaaagcca

SEQ ID NO: 201487 - DNA, 201 bp, Homo sapiens
  misc_feature (1)...(201): n = A,T,C or G
caggcactcagagtgccttcctctgaaagtgcagctgttgggcactgcaggttggtccctggccccctcttgccttgcactccccagatgtaatgaccccntctgtttacacctaggctaagaagtccatctcctcccacctgagcacgctggcggactttgccattgagatgtttgacgttctggatgaaatcaactacc

SEQ ID NO: 201488 - DNA, 201 bp, Homo sapiens
atttgtcacatacaacagaaccagcgtaggataatggattttccagcagaaaccttgcaggccagaagggagtgggatgatatgtttaaagtgctgaaagraaataactgctgagcaagaatactatgcctagcaaaagtctccataaaaacatgaaggaataaagaccttcccagacaattaaaagctgaggaagttcat

SEQ ID NO: 201489 - DNA, 201 bp, Homo sapiens
caaaaactaaagatatgagaacaattttgaaagcagcaagagaaaaacgagttatcatctacaagggatcttcaacaaggttatcagctgatttttcatcrgaaaccagggaggccagaaggcagtggaatggcatgttcaaaggttgaaataaaaatataattctgtatccggcaaaaatcacaagagcagcacctgctg

SEQ ID NO: 201490 - DNA, 201 bp, Homo sapiens
gaatggagtctttctgagggcagtgaggtttgttcaaatcctttttttttgagacggggttccactgtgtctcccaggctggagtgcagtggcatgcttcrgctcactgcaacctccacctcccaggctcaagtgatcctcccacctcagcctcccaagtagctgggactacaggtgcacgccaacacacctggctaattt

SEQ ID NO: 201491 - DNA, 201 bp, Homo sapiens
tcttgccagtgtagtcctagaacttgtctgcccaaagcaaagaagacatgttgctttcctgaatgtgtccatcggctctgctgttgctcctgggggctgayggctgcagcgacttttctcaaatgttatgtcatgtttaacagttttatgttttaaacaaagctcatggaaaaagacttttacaaggacatagagaagatc

SEQ ID NO: 201492 - DNA, 201 bp, Homo sapiens
gctcaggtgagggtgcagggctcaggtgagggtgcagggctcaggtgagggattcagggctcaggtgaggtgcagggcttaggtgagggttcagggcttargtgaggggttcagggctcaggtgaggtgttcagggctcgtgaggatgcagggctcaattgagggtgtagggctcaggtcaggggttcatggctcaggtga

SEQ ID NO: 201493 - DNA, 201 bp, Homo sapiens
tgatgcctctcctgtaggttcagatccatccctcactgagtggcctggatgtcctcctggggttttggtctcccaccctgcaacggggacgactgtgcacrtagcttcaggtcctgcccaacagccactgtcaccagtgctgcaaggatgagctcctgccatcagcccttatcccccagggcattcacgccagctctgttc

SEQ ID NO: 201494 - DNA, 201 bp, Homo sapiens
cccaggtgggcgtcatgtttgcctccatccccaacttcaatgacttctacatcgagctggacggcaacaacatgggggtggagtgtctgcggcttctcaaygagatcatcgccgactttgacgaggtgaggctgtgcgtcgccatcctgaccccgcctggttgtggtggtgcatcctgttgcatgggcagagcgtgtctca

SEQ ID NO: 201495 - DNA, 201 bp, Homo sapiens
tgtctgcctgagtgtgtgcagcctgttagggtagttacgctcatcgcccactgggcccaccaggtggggaacatgacattgcctgcctgagtcaccgtggracacgtctctattccagtttcctaatacctggcagcacagttgtctcctctaataggtacacccagaagcctcccaattcagtctctctctctttttatt

SEQ ID NO: 201496 - DNA, 201 bp, Homo sapiens
gggccaagtgcccatgagcacagccccagacagacacggtggggagcttggagccctccgctcacctagaggagccctgggacacgcactggaaagtattmtaggggcttcctgccttatccttctgtttgttcatacacttagtgaaagcagatcctgtactaggatgtgaggatatctgtcacctgcgtggtccattcc

SEQ ID NO: 201497 - DNA, 201 bp, Homo sapiens
gggctcaggtgagggtgcagggctcaggtgagggtgcagggctcaggtgagggattcagggctcaggtgaggtgcagggcttaggtgagggttcagggctyaggtgaggggttcagggctcaggtgaggtgttcagggctcgtgaggatgcagggctcaattgagggtgtagggctcaggtcaggggttcatggctcaggt

SEQ ID NO: 201498 - DNA, 201 bp, Homo sapiens
gtcactttcagggtccatgtgaggggtcaggctcaggtgagggtgcaggactcaggtgaggggttcaggctcaagtgaggtgttcaggggacaggtgaggkgttcagggctcaggtgaggggttcagggctcaggtgagggtgcagggctcaggtgagggtgcagggctcaggtgagggattcagggctcaggtgaggtgc

SEQ ID NO: 201499 - DNA, 201 bp, Homo sapiens
tcacattatgtcataaatgacattatatcacatcacatatcatatgctatttgtgtgtatatagataatatatcatatcagatctggttttgtgtgatctycttgggggaaaatgaggctctgtaggtggatgctttaaggagacagatgtcagtccatttgcttagtaaatatttgtgaagcccccactcggtgctgagc

SEQ ID NO: 201500 - DNA, 201 bp, Homo sapiens
  misc_feature (1)...(201): n = A,T,C or G
catgcaagccaggcactgtccggggatggaggagacctatgctgggggtccagggagtgggagccatgcctcgtgagaggacagttcagaaggttgtgggntgcatgttgtggagacctgcctgatggtcagagcgtggctctttcacgaggcagtgagtcccccttcactgaacagcatgtgcagtggtggtgcagaggg

SEQ ID NO: 201501 - DNA, 201 bp, Homo sapiens
tcatcctgtagggttggctcagtgaagcagacaggagggatggacccccgaaggggaaagaggccatgagcgaggtatggggaaagggagaaggagatcartgtgagcctggtcccagccctcaagactgtgctgaccacgcaagggtgtggcctgggcgggaaggtggtggcccaggtgcagcatgtcttgccagcgctc

SEQ ID NO: 201502 - DNA, 201 bp, Homo sapiens
ttctttaaacatttgctagaatttgtcagtgaaaccatctgggcatggagtttactttttcaggaatttttaaattataaagtcaatttctttagaaattrtaggatttttcaatttaccctttatgttggatgagttgtggtagttgtgtttcaaagaatagttcatttgatctaagttgtcaaatttatgtgtgtagag

SEQ ID NO: 201503 - DNA, 201 bp, Homo sapiens
ctcatacctgtaaccccagcactttgggaggctgaagcaggaggattatttgaggccagtagtccaagaccagcctgagcaatatagcaacactctatctmcaaaaaaaaaaaaaaaaaaaattagccaggcatggcagcacttgcttgtagtagtcccagctactcaggaagctgaggcaggaggatcccttgagctcag

SEQ ID NO: 201504 - DNA, 201 bp, Homo sapiens
aggttccaagggagaatttgtcccttaactcttacatcttctgttggctgttggaattccttggcttgtgggccagtctccctctgtcttcatattgctgygtgttcctcttcattcttctgttttctctcactctctgccttttccccctccctccctctctctttccctttttctgtatgtgtgtaaaatttcctcctg

SEQ ID NO: 201505 - DNA, 201 bp, Homo sapiens
gtttaccccgtggtgacatgggccacaattcccattggtacatgttggtatttgaggctgtggaggagatgccctgaggttttatagttagcaaatggacrggcaggctgagtttgctgcccatgggatagtgttgggatggggctgctttggggacagcatttgggcgcacggacttccggttgcagctggaataggtca

SEQ ID NO: 201506 - DNA, 201 bp, Homo sapiens
ccagtcagcctagaggggttggctgtggggctggggaggtggaagaagctggcttcctgagcctcagtttaccccgtggtgacatgggccacaattcccaktggtacatgttggtatttgaggctgtggaggagatgccctgaggttttatagttagcaaatggacaggcaggctgagtttgctgcccatgggatagtgtt

SEQ ID NO: 201507 - DNA, 201 bp, Homo sapiens
tgatgggtctgtctgaggctgcagagaatgatgccagcattaggaggatgctgggttcaggaaagcatgaaaggatgcttccgtgattccctgcctttacrtttcgtgtgtggctgtatttctttgtccacaggaatcctgcatattgtcaggtatgcatgagtcatacaaaaataaattagtctttagcttagccagata

SEQ ID NO: 201508 - DNA, 201 bp, Homo sapiens
tgggttggtgaaatacccaatggtatcttgggacttgggaaacctagaactggatcctagatccataacccaccagctgggtaagctgggacacactgccytgtccttgtccatagaagaagtgatgctggactgggtggatttgtgccacctttttctcaactgtagagcggagttagtaatgatctgacctcatgtggg

SEQ ID NO: 201509 - DNA, 201 bp, Homo sapiens
ttttggtctcttcccagaggagtccccctcattgccctgaagtaacactcacttctctccatcaacaggtgactgaggaagtccaccggctgctgagaagrtgcccctaccactttgtgtgccgaggcaaagtcagtgtcaagggcaaaggcgagatgttgacatactttctagaaggcaggactgatggaaacggctccc

SEQ ID NO: 201510 - DNA, 201 bp, Homo sapiens
ggaaaatgaggctctgtaggtggatgctttaaggagacagatgtcagtccatttgcttagtaaatatttgtgaagcccccactcggtgctgagcacagacmcaagcagagttgaatgatgtgggctgacctggctgaccaggtggctcgtggagctgaactggatggccttctgcccttgaaggttggtgaccctgactgt

SEQ ID NO: 201511 - DNA, 201 bp, Homo sapiens
ttgacattgtaggagcttcaccttcctgtccatccctgtggccttgggctgttcctggtacattttcagagatgtgtgtatcatctactcactgaaggacrgctaccttcctctcaatgtgttggccactctcgtggatgcccgtcacagcccaggactgtgatttatgactgtggaggacagtcagtaacccaggacaca

SEQ ID NO: 201512 - DNA, 201 bp, Homo sapiens
taacaggatggagtttgtagtgggagtaacaggatagaagtggggcaggagtaacaagatggagctggaggcaggagaaacaggaaggacagagctggggrcaggaggaacaggacggagctaggggcatgattaacaggacagagctgggggcaggaggaacaggacagagctgggtgcatgattaacaggacagagccg

SEQ ID NO: 201513 - DNA, 201 bp, Homo sapiens
tgctcaacccgtgggcaggggcgggagggaagaaggcaggagtacatggagaattgtcaaagagggcgtcggaggaagagaggaagagaggtagaggtgamgggcagaggcacaaaaggatggctaaaggctgaggaaaggggaaaggagccagaggacttcatgtcctggaggggaaggaggctcttccacagcctcctg

SEQ ID NO: 201514 - DNA, 201 bp, Homo sapiens
acagggatagacacatcactggacttgtgtcttagggtcagagagagaccaccatgtgctcaacccgtgggcaggggcgggagggaagaaggcaggagtayatggagaattgtcaaagagggcgtcggaggaagagaggaagagaggtagaggtgaagggcagaggcacaaaaggatggctaaaggctgaggaaaggggaa

SEQ ID NO: 201515 - DNA, 201 bp, Homo sapiens
ccggccgtatgcttaactttttatgaaacagacacaatgttttcagagttattgtagcatttcacattcccatcagcagtgtgtgagttccagttgctccrcatcctcatcagcacttgatgtggtcagtctttttaattttagtttttttctaataggcatgtggtgctattttattgtggttttaatttcctatttttt

SEQ ID NO: 201516 - DNA, 201 bp, Homo sapiens
ctttgggaggctgaagcaggaggattatttgaggccagtagtccaagaccagcctgagcaatatagcaacactctatctacaaaaaaaaaaaaaaaaaaaattagccaggcatggcagcacttgcttgtagtagtcccagctactcaggaagctgaggcaggaggatcccttgagctcaggagtctaagctgcagtgagct

SEQ ID NO: 201517 - DNA, 201 bp, Homo sapiens
taccttctaatattcccacagtgagtatttctatcaacgaggtgaggaactcaccaagaagtcccggtttctggggttcgtggttgtgtttctggggttcrtggttgtgtttctgttgtatgctcaagcttcgtctcccacagttattgtcccaatgtgcccaacatggctgacattagccagccatcatttcctcatttt

SEQ ID NO: 201518 - DNA, 201 bp, Homo sapiens
cctaagaaatgaagaactaccaagcatttcagcacagcaaaactttcagctcagaagctccttaggagtaaagacttcattgtcagaaacagagccagccwctgcattcaccaccgccggtcccagcatttctgtgggggttggatgttggatagtcctggtttatttgagctgatttgccctccagctcatgaactccaa

SEQ ID NO: 201519 - DNA, 201 bp, Homo sapiens
gcagagtgagacggtgtctcaaaaaaaaaaaagaaaaagaaaattattcagtgacacttgctcaaacatagtaagatgctctgtatgtgggaccatagctrtagcataggaaccacggcagtggaatggagtcgtgctgttggggggagaggttagactcagctcctaacagaaggaggggagtgagggtcagtggatgga

SEQ ID NO: 201520 - DNA, 201 bp, Homo sapiens
aacacaacagtcgtgatgataatcccagttgacactgattgatccaagtaagacaatacagggtcttagagttaactctctccaccttccatgtgccctgygaggctggtgctgctgttcctattcataccactgtacagacgagcagatggacattcagctttggccagtgccttctgcctcctgggagtgtgccctgtg

SEQ ID NO: 201521 - DNA, 201 bp, Homo sapiens
gtcactttcgggcaaaaactggattgattcaggcttttcatcctctccttctcccaggtatctgttttcttagaattgggatgcagtgtgcgagtccatgrcctctctggactctactgttttagagctggccctagagcggcctgggcatgtcagagctctggaattggcagtggatcttcctgagccactgactctctg

SEQ ID NO: 201522 - DNA, 201 bp, Homo sapiens
ctgagttgatgacaggaatcggcccctgtagatggggcagcacagggacaagctgaggctggagtcagaacctgcctgtgctgccctctggcccctttgcrgcctctcttcctggcctggcagtccctccctgtccctccttctcccaccccctgctcctctggggatcctggtggagccactgctgggaaaggcctcgtg

SEQ ID NO: 201523 - DNA, 201 bp, Homo sapiens
cgctcaggccacatgcagcaaggacaagacccagtttccctggtgctcacagcctagcagtgcagaccaaggtggccccctgggaggatacaaggtgggcsccagccccacgctctgtgtctgtgttgcagatctgtggctgaagccaccgaggtggatctgaacatgcgtgtgggtctgcacacgggcagggtcctctgt

SEQ ID NO: 201524 - DNA, 201 bp, Homo sapiens
tcggtcgaggccagaaagccccagttgcaggaggtggctgccagcaggctgtaacaggagagctgacagcatgcttggtccccctctgtcctgccgaggaygggccaggcgtcacagcctggtatgtgccctacttacagggaaggaagtccaggctcagagagggtgagtgctttgcagaaagttgcacaaggggtgact

SEQ ID NO: 201525 - DNA, 201 bp, Homo sapiens
gcagaaccgactgggaaagattgaagatggagagtattggtagaacatggtggcgtggatttggttggaggctggtcgaggtgccacttgctaggagcctraaggtttgctttggtgagctcgaggggatctggggatgaaggtgggcatgggtcccagaagtctccgtgccatttactgtttcatggcttcggaggcaca

SEQ ID NO: 201526 - DNA, 201 bp, Homo sapiens
cagaaggaggccttgacgggagccccactgtgcggactccagccgccctgtgtcttctccaggctccttccctcacctgtgtcgtgaggaggaaaaaccaytggatgccccagttcctttctagcttttataaaactatgatttgttgtttttttttttaatcataaattcactttttcttgagatgtagacagtttacca

SEQ ID NO: 201527 - DNA, 201 bp, Homo sapiens
tggattttcatcacatttgttaaaatatataacaatacaacttctgcttggttcgtgaaaataagtggcacagggaaagacagacgtttctcagtcaaatstcaacaaagacctttgcatttgtggatggattaagagatatatgatgatttgggaaggacagcagctctgatagcccattaatccaaatgtggaaataag

SEQ ID NO: 201528 - DNA, 201 bp, Homo sapiens
gaacactggctgcccctcagtgtgcccggggctcagcataaagcaggggcttcagtgagagctggtgttttcctctccccgttggctcccaaggccgggcyatgcagccgctgtcttcattgctgatggaatggatgaagcatcagctgaacacaggaatgcacagacacttgcctttctggagactgtggtgactggaag

SEQ ID NO: 201529 - DNA, 201 bp, Homo sapiens
cacagtcaacgtggccagtcggatggatagcacaggggtccagggcagaatccaggtcagttcaccaagaaacccctaaggcatgggtgcccattcttcakgtgaggaaactgaggcacagggggccagaattgaatccccagtctacagcccgtaagtggcagggcagaaagagctgcatatttcggtctgtctgctctg

SEQ ID NO: 201530 - DNA, 201 bp, Homo sapiens
cattcccattccttggactgggcttgaggctacctggatctaagtaatcctgtgggatatgctgagccaactgatggcctctgaaagtctgtgctgaccccaaacatggacacatcagtagacattctgatccatggggacccaacacagaggagtagttgagcaatgatttaatgagtgtttaagttaggatcgcttgca

SEQ ID NO: 201531 - DNA, 201 bp, Homo sapiens
tatactaccaagctatattaactaaaacagcatggtactggtataaaaacagacatatagaccaatagaacagaatagagaacccagaagtaaatccatgyaattttagccaactgatttttgacaaaggtgccaagaacatacattggggaaaagacaatctcttcaataaatggtgctgggaaaactggatatgcatat

SEQ ID NO: 201532 - DNA, 201 bp, Homo sapiens
ttttgttctggctttaataaatagggttttaccactaattgtgatgctttgggttagaagtaatagtatatggctaattatttcaagaaagtgatccattkgagttagcttttgaattttttcttttaataagcagatgttgaattttagaaaatactcttgagtaggtattaagatgcttagcctggtggttccccctct

SEQ ID NO: 201533 - DNA, 201 bp, Homo sapiens
gctggatggcctcccactgcaggagggagggagggatgtgactttaccactggcttgttggttgctggggactttatttctagaggttgatctcatgtctrctggtgtcatgaacatcttttttcacaaatgtcttagtaaatcttacgaggatagcctaggggtatttctttgtagtggaattgctgggttaaatggtgt

SEQ ID NO: 201534 - DNA, 201 bp, Homo sapiens
cagcaggtggagagggaaggcttggctcactctgggagtgggtgggttgattgggggccccttcacagcctggggtgggggtggaggtctggcctctctayttggcctttgctggtgtgggtggggttggggcacagagttttcagtgtctctggcctggagtaggtaagttattgtctggaagttttcttcttgtgaggt

SEQ ID NO: 201535 - DNA, 201 bp, Homo sapiens
cttcctctgaaagtgcagctgttgggcactgcaggttggtccctggccccctcttgccttgcactccccagatgtaatgaccccatctgtttacacctagrctaagaagtccatctcctcccacctgagcacgctggcggactttgccattgagatgtttgacgttctggatgaaatcaactaccagtcttacaacgactt

SEQ ID NO: 201536 - DNA, 201 bp, Homo sapiens
tgtagtcctagaacttgtctgcccaaagcaaagaagacatgttgctttcctgaatgtgtccatcggctctgctgttgctcctgggggctgacggctgcagygacttttctcaaatgttatgtcatgtttaacagttttatgttttaaacaaagctcatggaaaaagacttttacaaggacatagagaagatcaagaccatc

SEQ ID NO: 201537 - DNA, 201 bp, Homo sapiens
ccaccccttgtcattggacctgattctcctggtggctgcgagctcacctgttggggacaggaatgtgtcctgtactgtcctgcctcacctcttcttgccartgtagtcctagaacttgtctgcccaaagcaaagaagacatgttgctttcctgaatgtgtccatcggctctgctgttgctcctgggggctgacggctgcag

SEQ ID NO: 201538 - DNA, 201 bp, Homo sapiens
acagggcaggaggaacaggatggagctgggcagcagtaacaggatgaagctgggccaggaggaacaggatggagctggggcttggagtgaaaggatggaartgggtgggagtaacaggatggagtttgtagtgggagtaacaggatagaagtggggcaggagtaacaagatggagctggaggcaggagaaacaggaaggac

SEQ ID NO: 201539 - DNA, 201 bp, Homo sapiens
  misc_feature (1)...(201): n = A,T,C or G
acgattcagattcgcactgtcctgtgtattttcatagtggtcttaatctactcagtagcccaaggttgtgtggtgagcatctccagcttgtggcatgcgcnggggcgggagagggcatggcatggaggaccagcccagaagccaggacccagggctgcagagacagggaggtcatcagagacgtcagtaacaggcatgggg

SEQ ID NO: 201540 - DNA, 201 bp, Homo sapiens
accagggtgcagcacatgtgtgcaagaggaagacctggtctctgccagctctgagcttcctccctttgctactttactctgcacagccttgaaatacccastttttgaccagtgtgaatcaggatattgtatttttacctaatttttttctgaagtagtagggatccattgcagtgtgcaaattatatgctttcaatttcg

SEQ ID NO: 201541 - DNA, 201 bp, Homo sapiens
taatctaccatataacatatcacatattatatatcacacgtcatataactgtctttcgtatttcttaatggatcacatcatatcacattatgtcataaatracattatatcacatcacatatcatatgctatttgtgtgtatatagataatatatcatatcagatctggttttgtgtgatctccttgggggaaaatgaggc

SEQ ID NO: 201542 - DNA, 201 bp, Homo sapiens
cttctggatattggtctgggcagatgttttatggctaagacctcaaaagcacaggcaataagacaaaaactagagaaatgggattatatcaaactgaaaartttctgcacaacaaaggaaacaatcaacagagtgaatagacaacagaaggataggataaaacatttgtaaactattcatttgacaagggattaatatcca

SEQ ID NO: 201543 - DNA, 201 bp, Homo sapiens
cttattcttggcccctggtctccttacctggctgtgtatgctcctgtgctcagtaacaccccatcttttgcttgaggttctgggccttaaagggtgctgtycttccttctactgtttctgccctgcatgttgatgggttataagctgtttctgcagacgtgcctcttcctgaccgctgcccaggaagccctgcgtctacgc

SEQ ID NO: 201544 - DNA, 201 bp, Homo sapiens
aacttatcagtacacacatattgagagtcccacaggagaggagaaagaaaaaggggcagaaagaatatctgaagaaataatggccataaatgtcccaaagwttttggaaaacgttaacctacacatccaagaagctgagtgcactccaaggtgggtaaactcaaaaagacccacactgagacatgtcattatcaaactgtc

SEQ ID NO: 201545 - DNA, 201 bp, Homo sapiens
aggcagaggaggacactttatataatgtctttctcttcctcctaccttggagtggagtgttttatttgaaactttggaaatacaaagtttcaggtgaacargtgaagtggccagagctaacctttccccgcagggctccatgctgggcctcgcagctggcccactgattctgtttgctccccgccactcctcagtagcgag

SEQ ID NO: 201546 - DNA, 201 bp, Homo sapiens
tgcaggtgcaggcaagcatgcagccagagctgggtcttgatttctgaggctggagaaagtcttttccttgttgaacaagtgggaaagatcttgttttatcrctttgaagaatgtttattcctatgggaaaaacggatagacatattttccttttctgatctgtaaacctaggcctcccacgcctagcatctagtccttttt

SEQ ID NO: 201547 - DNA, 201 bp, Homo sapiens
ggatactcaggtttgagtccctctcccccactggggctttgctctgtgtgaggtctgtgctcacccaccttcttctgctcatacccctctcctctgacacrcaccaccagctctgctgctctcccagagttgccctgagtattaggtcaccctaggaagttgctcctagtcagccagttctggcctaccaaaatggcattt

SEQ ID NO: 201548 - DNA, 201 bp, Homo sapiens
tattgattcatcagctcccagaaagagggagccggtggccaatatggcaggattctatctgaagccacatggttctgtgtacccataggaatgtggatttktctgtccacttcatgggggaagccttgttcgtcacaggtgataggcaaaccgtgaatcagattttgaacaggaacctcattcttccacatgaccaccaag

SEQ ID NO: 201549 - DNA, 201 bp, Homo sapiens
cccatgtgggctcccctctcagggtctcgctttgtcctgatgggtctgtctgaggctgcagagaatgatgccagcattaggaggatgctgggttcaggaargcatgaaaggatgcttccgtgattccctgcctttacatttcgtgtgtggctgtatttctttgtccacaggaatcctgcatattgtcaggtatgcatgagt

SEQ ID NO: 201550 - DNA, 201 bp, Homo sapiens
ttctatctgaagccacatggttctgtgtacccataggaatgtggatttgtctgtccacttcatgggggaagccttgttcgtcacaggtgataggcaaaccrtgaatcagattttgaacaggaacctcattcttccacatgaccaccaagtatgcaagccaccatttttgctaaatagactcaatccagatgccttgctggc

SEQ ID NO: 201551 - DNA, 201 bp, Homo sapiens
ctcattcttccacatgaccaccaagtatgcaagccaccatttttgctaaatagactcaatccagatgccttgctggcagtgtgtatttttggtttactacrttgaattaaattagaagtaaatggcatgtgcttttcctccctgacccacttttgagctgctaagttcagcttgtgtgtgctgtggtcgtcagtagaactt

SEQ ID NO: 201552 - DNA, 201 bp, Homo sapiens
tcttcagaagttcaatttgaatcttttttccctttgttgaggtaactgcctgaaagttcaaaattggaatgacccagtttgctccttttttttttttttttgtattacttgtttggtttttctttgtgcattgttggtgttacgtatttttcaagtgtatgttttactctaatctgcctgagtcagtttttgaggagcaca

SEQ ID NO: 201553 - DNA, 201 bp, Homo sapiens
tgagagctccacgtgcccacgaggagcacagcagagagaaatgaagcagcagtccctgcagcagcagaaatagcatcacccccgataactacaactctggygtaaattggctgctcagtccccagcaacatttgagtttgagctgaagagaatattttctagtttctaggaacacattattgtaaatgggatccatttggg

SEQ ID NO: 201554 - DNA, 201 bp, Homo sapiens
attgaccagcaattgttttatagcactagagggccagaaggagatgctccaatgtgagcagatgcaggcacaaggggctggacctgtttcttctcttgacycctgccctcaaaatcagggtagaactttaagagccttagttgaaagtcttgagtttggctgcactatgcaacatgaggagacaaaggccaagttgttgac

SEQ ID NO: 201555 - DNA, 201 bp, Homo sapiens
gagcagaatgaggctcatgtggtaaaacaacatccccagagccacagccaggattggaagcggtgtcattatggctccgaagcctgtctccctagaagagwactcctactcatccttgaaagccccaaaggccatcttttctctaggtctctgcccactgggcctctgacctttcaccagccttctgtggaacgggtgcat

SEQ ID NO: 201556 - DNA, 201 bp, Homo sapiens
agattctcctgcctcaacctctctagtagctgggattacaggtgcacaccaccacacccagctaatttttatatttttagtagagaagggtgttcaccatrttggccaggctggtctcgaacttctgacctcagggaatccgcctgcctcagcctcccaaagtgctgggattacaggcatgagcctccatacccagcctgt

SEQ ID NO: 201557 - DNA, 201 bp, Homo sapiens
agattgcccccaggcctgtgtttagtgtttagggagcaacagcaggggacatccatgcccctggaaactgccccgtcccccccttcccccttcccccctcscccccatttttgtttttctcgtaggggtgggtggtcccctggtccatttcccttcacccccaggcttatccttcctcaagggcagttaactttaacataa

SEQ ID NO: 201558 - DNA, 201 bp, Homo sapiens
gcatgatggctctgaagagcaggggccacttcttaccctccccatagctgtaaacaggctccagaatccactcgtggggagatgcatctgcagagcaagcmcaagtctgactggctgtcaccaggtggtagtgagtgtcctgtggggttggagggaggataccaagctccccaagacccccggcgcccacttcgcatatgc

SEQ ID NO: 201559 - DNA, 201 bp, Homo sapiens
cctctgctggccctacctcccctgctggcccctcctctggctgggccttcctccccggctgggatcctcctcccccaccagcccctcccgctgctggtccytcccctggctgggccccaccttctgtggctggcccctactcccccacggacccctcctccacttcccctcccactggcccgcttatcctcgtggcctgca

SEQ ID NO: 201560 - DNA, 201 bp, Homo sapiens
catcattaaatatattaccagttggattttttgtggatactttttatcaagttgagcaagtttccttttatttctagtttgctgagtttttttttttttttgattcaggaatggatgttgaattttgtctaattcttttgcatctattggaaggatcatatggtttttctttttagtctgctcatataatgaattaccttg

SEQ ID NO: 201561 - DNA, 201 bp, Homo sapiens
cgctgctggtccttcccctggctgggccccaccttctgtggctggcccctactcccccacggacccctcctccacttcccctcccactggcccgcttatcytcgtggcctgcagcctggtcctgtcaccatggagtacccatctgctgtgcatccatctgccttggtggagccactgcctacagcgacagggctagggtta

SEQ ID NO: 201562 - DNA, 201 bp, Homo sapiens
tccctgtgccctcttcaggctgatctgggctcttctctcagtggagcatggggtgtcttctgcagtattttgctaagggggtcccatctgtcctcctaccycatgtgtgtttccctctgccgtgcagagatgccagccccaggaaggatgtatgaggtgtgggggaatccctgggggcagggcaaggagaataggagccca

SEQ ID NO: 201563 - DNA, 201 bp, Homo sapiens
tatgagaaagcactccctccagcaggccccccgacctgtgcctgcactcttgctctgctcaggagaggctggtttggaggactgtcctgcagtggttctcstgtccccatggatagtctgaatgccacccaggctgagagactgtgctggggcagcccgggtgatgtcatgttgaaaatgggagcaaattcaatagagagg

SEQ ID NO: 201564 - DNA, 201 bp, Homo sapiens
ttacaaataaagctgctatgaacattcatgtacaagtctatgtatgggtattcagttctcttgggtaaatacctagaagtagaatggctaaaaaacatggyagatgtatgcttaactttttttttttttttttttgagacggagtctcgctctgtcgcccaggccggactgcggactgcagtggcgcaatctcggctcact

SEQ ID NO: 201565 - DNA, 201 bp, Homo sapiens
accaggcagcaaccatgtgtccaggtcacttttgtggcctcttggctgtaccttccctgggacaggacacggtcctttctgtgagcactgactgtggttcsaggccatgtcattgctgcagtgacagtaaccatggtgccagccactgcacagagacccttgcccagatcatcactggtcctccaagcaggcatatcctga

SEQ ID NO: 201566 - DNA, 201 bp, Homo sapiens
tgcctggcgtctcagtcagggctgggctccctccacactccccaggccagtacctgccctctgcagcagctgggaaggaggcttagtggagcccacgtggscctctggggtgcacatggggtgggaatgctccgggggtgacacaggccacggtggctccagccaggaccagccagaccagcagagcagggagccacttgc

SEQ ID NO: 201567 - DNA, 201 bp, Homo sapiens
tacaaaaagagaagatactccctctcctcccttcagagcattctgcaccatcttgcttagttctggggcccatactctaaaatagccataaggtcacattstgagaaaaggtccggagctgctatttttctggaagagaggatgcacttggagacataccctgtaatcacagatattgaaaggccacacttctgagtggct

SEQ ID NO: 201568 - DNA, 201 bp, Homo sapiens
tggtctgcagctgtccggaggccagttggacactgagctacaaaaagagaagatactccctctcctcccttcagagcattctgcaccatcttgcttagttmtggggcccatactctaaaatagccataaggtcacattgtgagaaaaggtccggagctgctatttttctggaagagaggatgcacttggagacataccctg

SEQ ID NO: 201569 - DNA, 201 bp, Homo sapiens
ttgctttggtgagctcgaggggatctggggatgaaggtgggcatgggtcccagaagtctccgtgccatttactgtttcatggcttcggaggcacaaacacyaacagtgcacaaaaacgttattagtatgttatgttatttacattttcccgtactcatttccttttgtgaattttgaaaaataaattttttatttcagcgt

SEQ ID NO: 201570 - DNA, 201 bp, Homo sapiens
aatgtcgtgatttttcataaaatgttatttatgttaacatgcagtggattcattattattttaaatgcatttgtacatgaaaaaattcttattgttaaatrtcagtagctataacccacctacacaaaaagttttagtttttagtgagtccttagtgatttcaagacataaaggggtcctgaaatggaaatgttttagagc

SEQ ID NO: 201571 - DNA, 201 bp, Homo sapiens
tgggctcagtgaagtgggacctaccccttaccgtcacttacatacatagctgtatgtagctgatgacctactagttagtctgtgacttagtaaaactgaayagctgcagcgaggcgctggtcttgatcaaatgttgggagagactcccagaatgcaggtggcaggcatagtctgtttagcccaagtgttctctgacaactg

SEQ ID NO: 201572 - DNA, 201 bp, Homo sapiens
gagtgaccaagtgcagtggtgggagcactgagtcactgggtcctgctgctggtcccagcagcctggtggctctcattcactctgcacatcccaggactccrgactccaccagctgccataggaaggaagggctttcttgtgtgtttgaagggagggtgctgtgcatgtccacctcatctgaggaacttgtgggcagctgag

SEQ ID NO: 201573 - DNA, 201 bp, Homo sapiens
cctcttcagggcctctggcaggacatgccatggccctgcatggctcgtcagagttgcctgtgtccagacccagtggtctgcaagacgtagagacagatcaratgaggagaccggcagcaggcagtggggagtgggaagtgattgtggaggggaaccctgggtcaggctggccccaggtgcctgatgcctgggtctgagcct

SEQ ID NO: 201574 - DNA, 201 bp, Homo sapiens
agagggcggggcttcctgcccaccccacccatgtcactgcccaccagcgccatctcccacacagggcctggagaacagctggcgccagcaccgcgaggccrcggcgtatctgcatgggcgcctgcaggcactggggctgcagctcttcgtgaaggacccggtaaggaggcccctggcattgggcagccctgcacccatggg

SEQ ID NO: 201575 - DNA, 201 bp, Homo sapiens; identical to SEQ ID NO: 35508

SEQ ID NO: 201576 - DNA, 201 bp, Homo sapiens; identical to SEQ ID NO: 35509

SEQ ID NO: 201577 - DNA, 201 bp, Homo sapiens; identical to SEQ ID NO: 35510

SEQ ID NO: 201578 - DNA, 201 bp, Homo sapiens
ccctgcacccatggggaaggatgaggggctcttgcccagccccctcaagagggacactggctcctgagaaggagggggcggctgcccggtggtgtggcctyggtgccagggattagtctcggcaggagccacgaagtcacagctcccggcctctgatgcgggatctcaggacggcctgtgatctcccagtgggaaggtgcc

SEQ ID NO: 201579 - DNA, 201 bp, Homo sapiens
acactgtgccctggaggccgccctggtcaatgtgctggagcctggggactccttcctggttggggccaatggcatttgggggcagcgagccgtggacatcrgggagcgcataggtaagggagaggcccaggtggggatggccctggatccatccttcaaggcctccctctgtttgaagctggcagcccccgttcctgggtg

SEQ ID NO: 201580 - DNA, 201 bp, Homo sapiens
gtccctgcttcctcagggcctggcccagcacaagccagtgctgctgttcttaacccacggggagtcgtccaccggcgtgctgcagccccttgatggcttcrgggaactctgccacaggtgagcctggccccagggcggtggactggagcacagctcagagccaggctatggggaggggtgggcactggtccctctggtcct

SEQ ID NO: 201581 - DNA, 201 bp, Homo sapiens
cctcagggcctggcccagcacaagccagtgctgctgttcttaacccacggggagtcgtccaccggcgtgctgcagccccttgatggcttcggggaactctrccacaggtgagcctggccccagggcggtggactggagcacagctcagagccaggctatggggaggggtgggcactggtccctctggtccttctgcccctg

SEQ ID NO: 201582 - DNA, 201 bp, Homo sapiens; identical to SEQ ID NO: 35536

SEQ ID NO: 201583 - DNA, 201 bp, Homo sapiens
ccatccagcctggggccaggccctccagtggccccctgcctcacctgctgccctccattctgtcccccacctctccaggtacaagtgcctgctcctggtgrattcggtggcatccctgggcgggacccccctttacatggaccggcaaggtaagggtgggctctgagagccctacccagcccaagcagccttggggctccg

SEQ ID NO: 201584 - DNA, 201 bp, Homo sapiens; identical to SEQ ID NO: 35538

SEQ ID NO: 201585 - DNA, 201 bp, Homo sapiens
cccattagctaggcaggcatcccgctggactggcctgccctgaggtgggactcacccgtcccgagcaaaccacccatctacaggcatcgacatcctgtacycgggctcccagaaggccctgaacgcccctccagggacctcgctcatctccttcagtgacaaggccaagtgagtgacccacagatcctcacctctgtgcag

SEQ ID NO: 201586 - DNA, 201 bp, Homo sapiens
tcctgacaggcaggagaaggcaactggccaactcctggggtggaggtgggaggtgccctgccttccttgccagcctgaggctcagaaaccccatccagcckggggccaggccctccagtggccccctgcctcacctgctgccctccattctgtcccccacctctccaggtacaagtgcctgctcctggtggattcggtggc

SEQ ID NO: 201587 - DNA, 201 bp, Homo sapiens
cgtgaaacaggacagccagcgagactgccctggccttcagcccaaactgagaggctggtgctcagcctgcttctttctccccagaaagaagatgtactccygcaagacgaagcccttctccttctacctggacatcaagtggctggccaacttctggggctgtgacgaccagcccaggatgtgaggcctggcagggatggg

SEQ ID NO: 201588 - DNA, 201 bp, Homo sapiens
gtgaaacaggacagccagcgagactgccctggccttcagcccaaactgagaggctggtgctcagcctgcttctttctccccagaaagaagatgtactcccrcaagacgaagcccttctccttctacctggacatcaagtggctggccaacttctggggctgtgacgaccagcccaggatgtgaggcctggcagggatggga

SEQ ID NO: 201589 - DNA, 201 bp, Homo sapiens
ttcttcctcccgcaccacagagggcggggcttcctgcccaccccacccatgtcactgcccaccagcgccatctcccacacagggcctggagaacagctggygccagcaccgcgaggccgcggcgtatctgcatgggcgcctgcaggcactggggctgcagctcttcgtgaaggacccggtaaggaggcccctggcattggg

SEQ ID NO: 201590 - DNA, 201 bp, Homo sapiens
cttcagcccaaactgagaggctggtgctcagcctgcttctttctccccagaaagaagatgtactcccgcaagacgaagcccttctccttctacctggacaycaagtggctggccaacttctggggctgtgacgaccagcccaggatgtgaggcctggcagggatgggaaggtggagggcgctgggcatggctgagaggtgg

SEQ ID NO: 201591 - DNA, 201 bp, Homo sapiens
cggcttcccacagtcaccactgtggctgtacccgctggctatgactggagagacatcgtcagctacgtcatagaccacttcgacattgagatcatgggtgrccttgggccctccacggggaaggtgagagggagcgcctcgagggccttttgcagaaaccaaacccgccacccctccttgagcaggactgtgcaccaggtg

SEQ ID NO: 201592 - DNA, 201 bp, Homo sapiens
ggtaagggtgggctctgagagccctacccagcccaagcagccttggggctccgcgtgcaggaagccctgctggaagcgtgcgtccagcagccgatgctgcrgattcggccccatctccaccaggcccagggaaacactcactccttactgcggcaagagcggctccatgaactacccagcaccccagtgtttccactgagc

SEQ ID NO: 201593 - DNA, 201 bp, Homo sapiens
gttttataaactagcagcagtctcggtgactatcccatggacaagagatgaacgtgtcttcgtcattgtcaggtgtgagcttctacagatcctcaggtccrcctggatgacagcattgttcaagtcttctttgtatcactggggttttgttgttgttgtttgttttggtttggttttttgcctgctttttctatgaagtac

SEQ ID NO: 201594 - DNA, 201 bp, Homo sapiens
gaaggaaccatccctggtgcacagagaaaagggagcctgccagagagaggccctcagtgggggtgggggagagaggacagggccccgggtacactggctgygggcagggccagggggatacagccccagagacagatgcagcaatggggcaggtgtggatgctcccaacccttccattgctgtgtgaagcagtaagtgagg

SEQ ID NO: 201595 - DNA, 201 bp, Homo sapiens
gcctcggtgccagggattagtctcggcaggagccacgaagtcacagctcccggcctctgatgcgggatctcaggacggcctgtgatctcccagtgggaagktgcccatccaccgcctcctaaggggtggggtccctgctctctcccggccctttctcccccggctcctctggaacctgaagctggggcagatggtgcaggc

SEQ ID NO: 201596 - DNA, 201 bp, Homo sapiens
accaccactgccacccccaaacttaggaccccataacattcagctcatggtgggcagctcaggtcacacagttacttggtgtcccctggccaggggcccartgtcacaccaaatgctgcttttgaacagtgagtacttctctgctgcagacaatttgctctcgttccaggacttcacctcctcttttggggtttgccagag

SEQ ID NO: 201597 - DNA, 201 bp, Homo sapiens; identical to SEQ ID NO: 35551

SEQ ID NO: 201598 - DNA, 201 bp, Homo sapiens
cgtcaagctaaccacctgggggtggaaactttacaagccttaagagatcctctttttcaagggcctaacctagcctagccccaactctatgggacatttcycaatcctgcccaatttgctgtcaatcaaatccggagggtgcaatgaaccccctgccctcctccaacctattcaacgtagagggcctgtcccaggggcgta

SEQ ID NO: 201599 - DNA, 201 bp, Homo sapiens; identical to SEQ ID NO: 35516

SEQ ID NO: 201600 - DNA, 201 bp, Homo sapiens; identical to SEQ ID NO: 35517

SEQ ID NO: 201601 - DNA, 201 bp, Homo sapiens
cgtgtggctgcgggtgcagagggaggagagcctgccctggcctgggtgctcaagggccccctctgtgacctgcacagggctgtcaactcccctcatggacrctgggtgggtggtcctcactcaggtgagcccatcctggctctggccagctgtcggtcagggtcaggcaggtcccaggcgggaggctgacgtcagcccgcc

SEQ ID NO: 201602 - DNA, 201 bp, Homo sapiens
actgagccaggcccctcctgcaggcgctccggcttcccacagtcaccactgtggctgtacccgctggctatgactggagagacatcgtcagctacgtcatrgaccacttcgacattgagatcatgggtggccttgggccctccacggggaaggtgagagggagcgcctcgagggccttttgcagaaaccaaacccgccacc

SEQ ID NO: 201603 - DNA, 201 bp, Homo sapiens; identical to SEQ ID NO: 35519

SEQ ID NO: 201604 - DNA, 201 bp, Homo sapiens
ggtgaccccccccaaggccctgctcaagcccctctccatccccaaccagctcctgctggggcctggtccttccaacctgcctcctcgcatcatggcagccrgggggctgcagatgatcgggtccatgagcaaggatatgtaccaggtaggagtgggggtcactcggggggcctgggtctcacccatgttcccacccacaga

SEQ ID NO: 201605 - DNA, 201 bp, Homo sapiens
cagggtgcccctgtaagctaaatgccacccgcacccgcgggggaaggcgaggggtcaggcgctcacacagggaaaggctctagggtcgtaaaggtgggtgrggggtgtgagctgggcagagaaggaagagaacaggaccagacagcagggcacagtcaagggcagaggcacagggacctggcagagtgcagattgcagggg

SEQ ID NO: 201606 - DNA, 201 bp, Homo sapiens
cctgctgccctccattctgtcccccacctctccaggtacaagtgcctgctcctggtggattcggtggcatccctgggcgggacccccctttacatggaccrgcaaggtaagggtgggctctgagagccctacccagcccaagcagccttggggctccgcgtgcaggaagccctgctggaagcgtgcgtccagcagccgatg

SEQ ID NO: 201607 - DNA, 201 bp, Homo sapiens
ctcctggtggattcggtggcatccctgggcgggacccccctttacatggaccggcaaggtaagggtgggctctgagagccctacccagcccaagcagcctkggggctccgcgtgcaggaagccctgctggaagcgtgcgtccagcagccgatgctgcagattcggccccatctccaccaggcccagggaaacactcactcc

SEQ ID NO: 201608 - DNA, 201 bp, Homo sapiens
aggacagccagcgagactgccctggccttcagcccaaactgagaggctggtgctcagcctgcttctttctccccagaaagaagatgtactcccgcaagacraagcccttctccttctacctggacatcaagtggctggccaacttctggggctgtgacgaccagcccaggatgtgaggcctggcagggatgggaaggtgga

SEQ ID NO: 201609 - DNA, 201 bp, Homo sapiens
ctatagaccatccaggtgatgaaggcccattaggcctacattgtgacagagaagagagggttaacatcagtctgggccagacagtgaacttataatgttayctcttccaagtgaatgcaaaccgtgtctgagcctcccctctgatggggattggaaagaatgcctttctcccagtccagtgaccacatacaagttccagag

SEQ ID NO: 201610 - DNA, 201 bp, Homo sapiens; identical to SEQ ID NO: 35561

SEQ ID NO: 201611 - DNA, 201 bp, Homo sapiens; identical to SEQ ID NO: 35524

SEQ ID NO: 201612 - DNA, 201 bp, Homo sapiens
ctggtttacatcctatgccatgcactggcacccgcctgcttttaaacctcctccatcagtacataaacatagtctttcccccatatgagtcctcttaaaaytgtcaaaaggcccatttccttttttcccaacattttaattaaaataatcatcctgcccctcctgggctcttatggcttagcagccccgctaaaaactatt

SEQ ID NO: 201613 - DNA, 201 bp, Homo sapiens
tctgccttttatgtactttttcttgcttcattgcaacggtgtaggccacaaatacagtgctgaatctcagtgatgagcgtgcaccttcttgccttggagaygtgtttaatgtctcagcgtcaggctgacggcagcagtggggtttctgcagctgccctgctctcagaggcaggaagtccccacctgtcctagtttgcagag

SEQ ID NO: 201614 - DNA, 201 bp, Homo sapiens; identical to SEQ ID NO: 35506

SEQ ID NO: 201615 - DNA, 201 bp, Homo sapiens; identical to SEQ ID NO: 35507

SEQ ID NO: 201616 - DNA, 201 bp, Homo sapiens
gagctgctgctgcatgaattgcaggtcccctccaagagccaaaggtgtgagctgtggctcaggcactgaggggtcaatgcccctgagaggccaaagatggrgaataggaaatgtccaatgggcaggacccatgcaggtcatgggctgcaggcaggcagtgctgggctgatgagagaatgtgagttgtgggcacaaagaatg

SEQ ID NO: 201617 - DNA, 201 bp, Homo sapiens
acaggaagtcccacctactttcatctgggtcctgtgtcccacagggcccattgccagccaccagtccagagtccaggaaggatccccgggctgcagccagsttcccatgaggttgcaaggccgtgcctgccacgtttgtcctcctgggtccactcataaagccactgcctagggctgggttagtgccagggtgcccctgta

SEQ ID NO: 201618 - DNA, 201 bp, Homo sapiens
gtgaccccccccaaggccctgctcaagcccctctccatccccaaccagctcctgctggggcctggtccttccaacctgcctcctcgcatcatggcagccgkggggctgcagatgatcgggtccatgagcaaggatatgtaccaggtaggagtgggggtcactcggggggcctgggtctcacccatgttcccacccacagat

SEQ ID NO: 201619 - DNA, 201 bp, Homo sapiens
gaaagggcatttgagctgagctctgtcaagagtgccccaggagcgttggctccaacagcaggggggtcaagatggccctggctctacacacagagaggctytcattgggcagagtccaccctcctcttcaggcaggcagccagggtgccacggtgggtggggtccagccctcacagggccctgctcagcagggccacgggt

SEQ ID NO: 201620 - DNA, 201 bp, Homo sapiens
gcttcctgcccaccccacccatgtcactgcccaccagcgccatctcccacacagggcctggagaacagctggcgccagcaccgcgaggccgcggcgtatcygcatgggcgcctgcaggcactggggctgcagctcttcgtgaaggacccggtaaggaggcccctggcattgggcagccctgcacccatggggaaggatgag

SEQ ID NO: 201621 - DNA, 201 bp, Homo sapiens
ctggaaccaggccggaagccccacgcctgggcctggctgtgtctctgagtggcagtggggagggaccttcactgcaccaccctgtcctcccgtgtggctgygggtgcagagggaggagagcctgccctggcctgggtgctcaagggccccctctgtgacctgcacagggctgtcaactcccctcatggacgctgggtgggt

SEQ ID NO: 201622 - DNA, 201 bp, Homo sapiens; identical to SEQ ID NO: 35515

SEQ ID NO: 201623 - DNA, 201 bp, Homo sapiens
gtgggcgtggatgtaaagtgagggttggcagttcctgcaggcttgtccagctcctatggcagggcaagagctgagcatgagcacttgggtgtgaccagggkttgatttggccactgcaacatccacactctcaggacactgcaacatccacactctcaggacacaggcggctgagagtggcctcaggcccagcagctctgc

SEQ ID NO: 201624 - DNA, 201 bp, Homo sapiens
agggagcctgccagagagaggccctcagtgggggtgggggagagaggacagggccccgggtacactggctgtgggcagggccagggggatacagccccagrgacagatgcagcaatggggcaggtgtggatgctcccaacccttccattgctgtgtgaagcagtaagtgaggcccagtgagtgggtgggctgggagaaggg

SEQ ID NO: 201625 - DNA, 201 bp, Homo sapiens
tctgccacaggtgagcctggccccagggcggtggactggagcacagctcagagccaggctatggggaggggtgggcactggtccctctggtccttctgccyctggtccccaccccagcctctgtcacatggtatggggtgcaggcacctcccaggtcctctttgctctgggctgagtctaaagacaaccccaggtcccagg

SEQ ID NO: 201626 - DNA, 201 bp, Homo sapiens
ccctataccacccgcatgcagatcatggacgagatcaaggaaggcatccagtacgtgttccagaccaggaacccactcacactggtcatctctggctcggracactgtgccctggaggccgccctggtcaatgtgctggagcctggggactccttcctggttggggccaatggcatttgggggcagcgagccgtggacatc

SEQ ID NO: 201627 - DNA, 201 bp, Homo sapiens
catcagcctgtacagcctgagagagagcctggccctcattgcggaacaggtgcatgggctgcactccacaggaggagacagggccactggctggattgtcragggcgcggcctgcagagaaggaaccatccctggtgcacagagaaaagggagcctgccagagagaggccctcagtgggggtgggggagagaggacagggc

SEQ ID NO: 201628 - DNA, 201 bp, Homo sapiens
tgaacccggacaggactcctctgcggaggataccggcctgtggtcagagagcctgtgctgttggggctggggcagacagagctaatgccccatctgccccygaccctgcccatggtgctggaccaagccccctcgtgtcttccaggtaccatcacacaatccccgtcatcagcctgtacagcctgagagagagcctggccc

SEQ ID NO: 201629 - DNA, 201 bp, Homo sapiens
gcagggtgcagagtccactgctctggaagttcccagcttcacagcaaggagtgaccaggaaaggactgagggcctgaggcccagtgccctgaccggcctcygccctggctcagcttccaggggctgccccaagggacaacgtgggccacacacagtgccccctgcagtcccaatctcacctcccgctcctggtgtccagat

SEQ ID NO: 201630 - DNA, 201 bp, Homo sapiens
gcgtgtgcagggtgcagagtccactgctctggaagttcccagcttcacagcaaggagtgaccaggaaaggactgagggcctgaggcccagtgccctgaccrgcctccgccctggctcagcttccaggggctgccccaagggacaacgtgggccacacacagtgccccctgcagtcccaatctcacctcccgctcctggtgt

SEQ ID NO: 201631 - DNA, 201 bp, Homo sapiens; identical to SEQ ID NO: 35520

SEQ ID NO: 201632 - DNA, 201 bp, Homo sapiens
catcgacatcctgtactcgggctcccagaaggccctgaacgcccctccagggacctcgctcatctccttcagtgacaaggccaagtgagtgacccacagaycctcacctctgtgcagggctgggcttgcagggagctcaggtggcccgaggcgggaggggcgggagccaggcaggaagggctccccatgctcctccagcac

SEQ ID NO: 201633 - DNA, 201 bp, Homo sapiens
gaggtgggactcacccgtcccgagcaaaccacccatctacaggcatcgacatcctgtactcgggctcccagaaggccctgaacgcccctccagggacctcrctcatctccttcagtgacaaggccaagtgagtgacccacagatcctcacctctgtgcagggctgggcttgcagggagctcaggtggcccgaggcgggagg

SEQ ID NO: 201634 - DNA, 201 bp, Homo sapiens
ttgatggaatcccatcacgtgcctccgtgcacaagttttcatgaccctttattcccttcatgactgagagcaagaaagggaaaaacgtgacctacccccctgaactccctttcagcagcaagtagtcaggcgcactggacacccctcttcactgtgccgtttcccctttcttgagaccccaacaggaagcaggtggacatg

SEQ ID NO: 201635 - DNA, 201 bp, Homo sapiens
aaacactcactccttactgcggcaagagcggctccatgaactacccagcaccccagtgtttccactgagctttcagatccaggcgtggggactggcaggasggacagcttctggtgggggacatttgagatgccccagagctgtagcagaagcagtgggaagaggaagggccagggctccagtcaatcaggcgttggggac

SEQ ID NO: 201636 - DNA, 201 bp, Homo sapiens
gccttcgaattttatttttggtttacaagccttcccatcagctgcgccagggtcagcaaaccacagtccatgggcccaatctggcctgccacctgcttttwgtaaataaagttttataggaacacgcccacacctctggcagctgctttgcaagcacgcagcagggttgagttgttgcaacatagaccacagggcctgcca

SEQ ID NO: 201637 - DNA, 201 bp, Homo sapiens; identical to SEQ ID NO: 35521

SEQ ID NO: 201638 - DNA, 201 bp, Homo sapiens
gccctcctgggggccccaccccgtctcactcccgtgaaacaggacagccagcgagactgccctggccttcagcccaaactgagaggctggtgctcagcctrcttctttctccccagaaagaagatgtactcccgcaagacgaagcccttctccttctacctggacatcaagtggctggccaacttctggggctgtgacgac

SEQ ID NO: 201639 - DNA, 201 bp, Homo sapiens
gcagacgaagctgccttcccggtccaaagttctgaacccggacaggactcctctgcggaggataccggcctgtggtcagagagcctgtgctgttggggctrgggcagacagagctaatgccccatctgcccccgaccctgcccatggtgctggaccaagccccctcgtgtcttccaggtaccatcacacaatccccgtcat

SEQ ID NO: 201640 - DNA, 201 bp, Homo sapiens
gaacccggacaggactcctctgcggaggataccggcctgtggtcagagagcctgtgctgttggggctggggcagacagagctaatgccccatctgcccccraccctgcccatggtgctggaccaagccccctcgtgtcttccaggtaccatcacacaatccccgtcatcagcctgtacagcctgagagagagcctggccct

SEQ ID NO: 201641 - DNA, 201 bp, Homo sapiens
ggggtgttctggcccctgcccctctgagctccacccacagccgtccctgcttcctcagggcctggcccagcacaagccagtgctgctgttcttaacccacrgggagtcgtccaccggcgtgctgcagccccttgatggcttcggggaactctgccacaggtgagcctggccccagggcggtggactggagcacagctcaga

SEQ ID NO: 201642 - DNA, 201 bp, Homo sapiens
gtcaatgtgctggagcctggggactccttcctggttggggccaatggcatttgggggcagcgagccgtggacatcggggagcgcataggtaagggagaggyccaggtggggatggccctggatccatccttcaaggcctccctctgtttgaagctggcagcccccgttcctgggtgagcgcttacccaccttgtggccctg

SEQ ID NO: 201643 - DNA, 201 bp, Homo sapiens
ggcttcttgatggaatcccatcacgtgcctccgtgcacaagttttcatgaccctttattcccttcatgactgagagcaagaaagggaaaaacgtgacctayccccctgaactccctttcagcagcaagtagtcaggcgcactggacacccctcttcactgtgccgtttcccctttcttgagaccccaacaggaagcaggtg

SEQ ID NO: 201644 - DNA, 201 bp, Homo sapiens
atttccctgatgcctattgatgttgagcaacttctcataagctatcggccgtttgtagatcttctgaaaagtgtcagttcaaatattttgttcatatttgratttttatcttcttattgtcaatgtgtgatcattttaaaatatattctagatactatcagatacgtgtggcatgaatatttcctccctctctgtggctta

SEQ ID NO: 201645 - DNA, 201 bp, Homo sapiens
tatgactggagagacatcgtcagctacgtcatagaccacttcgacattgagatcatgggtggccttgggccctccacggggaaggtgagagggagcgcctygagggccttttgcagaaaccaaacccgccacccctccttgagcaggactgtgcaccaggtgcaggggaggccggggtcatccgaaagcccagattgcagg

SEQ ID NO: 201646 - DNA, 201 bp, Homo sapiens
  misc_feature (1)...(201): n = A,T,C or G
atagcctctcccacagctgttaactgcagggattctccccttgggtccacctttgccacataaagtctgtactgccgccagaactccagcctgcttacackttgagcccttggaagatctatgatttttgttttgcaaacaannnnnnnnnnnnnnnnnnnnnnnnnnnnnnnnnnnnnnnnnnnnnnnnnnnnnnnnnnn

SEQ ID NO: 201647 - DNA, 201 bp, Homo sapiens
cggcctctgatgcgggatctcaggacggcctgtgatctcccagtgggaaggtgcccatccaccgcctcctaaggggtggggtccctgctctctcccggccytttctcccccggctcctctggaacctgaagctggggcagatggtgcaggccaagagctgtcacaaaggcccgtacagggcctctcacccacgcactgagc

SEQ ID NO: 201648 - DNA, 201 bp, Homo sapiens
aagagggacactggctcctgagaaggagggggcggctgcccggtggtgtggcctcggtgccagggattagtctcggcaggagccacgaagtcacagctccyggcctctgatgcgggatctcaggacggcctgtgatctcccagtgggaaggtgcccatccaccgcctcctaaggggtggggtccctgctctctcccggccc

SEQ ID NO: 201649 - DNA, 201 bp, Homo sapiens
ctctgtttgaagctggcagcccccgttcctgggtgagcgcttacccaccttgtggccctgtgcgcacgaacctcctgccagcccactgcctcctccaggckgtgtcgggcactcatgaggcctgactctgatagggctgggagcagcacaggtgccccgatccccccagtctccttgagctgtttctggagcatgtgcagg

SEQ ID NO: 201650 - DNA, 201 bp, Homo sapiens
gaacatgtaggtggaggaggataagagttcgtgaacatgcaggaggagggtgagagttcgtgaacatgcaggaggaggagggtgagagttcgtgaacatgsaggaggagggtgagagtttgtgaacatgcaggcggaggagggtgagagttcgtgaacatgcaggtggaggagggtgagagttcgtgaacatgcaggagga

SEQ ID NO: 201651 - DNA, 201 bp, Homo sapiens
ggtaccatcacacaatccccgtcatcagcctgtacagcctgagagagagcctggccctcattgcggaacaggtgcatgggctgcactccacaggaggagamagggccactggctggattgtcaagggcgcggcctgcagagaaggaaccatccctggtgcacagagaaaagggagcctgccagagagaggccctcagtggg

SEQ ID NO: 201652 - DNA, 201 bp, Homo sapiens
accacagactgcccggctgaccctcttcagcaccactgccgggccctgcagctgggtctcaccagggccgtgatgctccctcactcccccagctccctctrctccaatgttcagggctgagaaaggaagagccacaggtcctgatggatcctgacaggcaggagaaggcaactggccaactcctggggtggaggtgggagg

SEQ ID NO: 201653 - DNA, 201 bp, Homo sapiens
tcttcctcccgcaccacagagggcggggcttcctgcccaccccacccatgtcactgcccaccagcgccatctcccacacagggcctggagaacagctggcrccagcaccgcgaggccgcggcgtatctgcatgggcgcctgcaggcactggggctgcagctcttcgtgaaggacccggtaaggaggcccctggcattgggc

SEQ ID NO: 201654 - DNA, 201 bp, Homo sapiens
cgtacagggcctctcacccacgcactgagccaggcccctcctgcaggcgctccggcttcccacagtcaccactgtggctgtacccgctggctatgactggwgagacatcgtcagctacgtcatagaccacttcgacattgagatcatgggtggccttgggccctccacggggaaggtgagagggagcgcctcgagggcctt

SEQ ID NO: 201655 - DNA, 201 bp, Homo sapiens
atatgtatatataaaatatatgtacatatatgtatatatatatcgagagagagagagagagagagacaaatcagcctatcatccgcaacccttctagcctktccagattatgcgttctgtcattaatcaggctgcagtgaaataatagagttagtctttcatctgtgaaggtgaaggaaaaattagaaggggatttcataa

SEQ ID NO: 201656 - DNA, 201 bp, Homo sapiens
tatatataagtatatacatatatgtatatacgtatatatgtatatataaaatatatgtacatatatgtatatatatatcgagagagagagagagagagagrcaaatcagcctatcatccgcaacccttctagcctttccagattatgcgttctgtcattaatcaggctgcagtgaaataatagagttagtctttcatctgt

SEQ ID NO: 201657 - DNA, 201 bp, Homo sapiens
attttaatctaatgtcacaaaagacttggcagttttataaaagagaagagattattaatcatttgcagttttaaattgtatatagtcattttgcatttcawgttttactaaatggttcatttgacattatccattaaaatctaatgctttatatcccagcacctttatgctcatttaatcatttcattttatcttaacagt

SEQ ID NO: 201658 - DNA, 201 bp, Homo sapiens
cataacatccatggtctttataatttggcatgtttttgcagtggctggtaccagttgttcctttccatgtttagtgcttccttcaggagctcttgtaaggmaagcctgatggtgacaaaatctctcagcatttgcttgtctgtaaagggttttatttctccttcatttatgaagcttaattcggctggatatgaaattctg

SEQ ID NO: 201659 - DNA, 201 bp, Homo sapiens
gtgttacagctcttaaaggtggtgcatctggagttggtttgttgctcctggtgggttcatggtctcgttgacttcaggagtgaagccacagaccttcacastgagtgttaacagctcataaaggtagtgcagacccaaaaagtgagcagcagcaagatttattgtgaagagcaaaagaacaaagcttccacagcatggaag

SEQ ID NO: 201660 - DNA, 201 bp, Homo sapiens
gtgagtgttacagttcttaaagatggtgtgtccagagtttgttccttcagatgttcagatgtgtctagagtttcttccttctggtgggttcatggtcttgyttgacttcaggagtgaagccacagaccttcacagtgagtgttacagctcttaaaggtggtgcatctggagttggtttgttgctcctggtgggttcatggt

SEQ ID NO: 201661 - DNA, 201 bp, Homo sapiens
aattagcattgttttcattaacagatataaatgaaattaccgtagtttttgttttattctatttttgtgatgtttatataatatatatatatatttcattraaataatctggaagtttttcttctttttatgctttgggatggtttaaacagcctagaaattttttttcctttaatattttatacaattcatcatgcctgg

SEQ ID NO: 201662 - DNA, 201 bp, Homo sapiens
acccggtatttagcccccgaattctaaggaaaaatatgacagaatagcaagtgaaaggggtctgatggtactcacagcttggtgatagtcccttcgtggtygccaaaatgtgtccggaattttttccttctggtgggttcttggtctcactgacttcaagaatgaagccgtggaccctcgtggtgagtgttacagttctta

SEQ ID NO: 201663 - DNA, 201 bp, Homo sapiens
gaaattaccgtagtttttgttttattctatttttgtgatgtttatataatatatatatatatttcattaaaataatctggaagtttttcttctttttatgmtttgggatggtttaaacagcctagaaattttttttcctttaatattttatacaattcatcatgcctggcattttgagggaaattgcaattatttgattat

SEQ ID NO: 201664 - DNA, 201 bp, Homo sapiens
cattaaaatctaatgctttatatcccagcacctttatgctcatttaatcatttcattttatcttaacagtatgtgctttatttgctttgcaataatgcctmaaaagaaaaagttcttggattatattttgtcagataatgggaactacttagtaataatttatttatagcaggaaaaagatgaataccagcaaattatttt

SEQ ID NO: 201665 - DNA, 201 bp, Homo sapiens
agataatgggaactacttagtaataatttatttatagcaggaaaaagatgaataccagcaaattattttttgcctccctttgctttcctatacccaacagrtggcaaactgtttgaaagtaatgactttcttctcaactttagattcttagtgtcaagcagtatctggcaaaaataggaattcaataagtattgttgaata

SEQ ID NO: 201666 - DNA, 201 bp, Homo sapiens
acctaaaaataacctgactggtttagcaagaagagtgatcctgaaggaattgttataagtgaagtcccccaaggctgtcctgatattgaaagctttgtgcragagggatccagtggagttgatgaaacaaaaaccaggcggctttctatacgttccgtttcacagagaacagaaaagcacggcagggatcttcacacactg

SEQ ID NO: 201667 - DNA, 201 bp, Homo sapiens
caaatttgatcattagagcaataaaattatactaatgataatgttgatcataatgaagatgacaactggtacacattgagtctacaaaaggtatgggcatrtaatattcaaaagagaagttataaagtttgtggaaacagaatggtcaaacaaaactaaggtaaataagacatgactagcttttacattcattataatatg

SEQ ID NO: 201668 - DNA, 201 bp, Homo sapiens
ttcatcctgtcataaattatctctcagaatccatcttgaccttcttcccaaatttggtctctcttctcccatacagcaaatttttaattgactcccagggwacatctatgactttataaaattttattttctccgaattttattcccatttctctcttaagataaagcaaaataaaaccaacaaaaagtaatcttagatgt

SEQ ID NO: 201669 - DNA, 201 bp, Homo sapiens
ccacatattctaatctttaggtaccttgttctttatacattaatttagttatgttaccttttgctactgtctttttttaacttagaattcctttatatctycttctctctttacttgctctttacatctagatgttctccatgaagcatttctggatctgtctgtcccgtctccatgtaaagttaattaccgcttctttta

SEQ ID NO: 201670 - DNA, 201 bp, Homo sapiens
cccctaaaactcatgtccttctcacacgcaaaatacattcattctatcccaatagcctccaaagtcttaatttattccagcatcaactcaatagttcaaartccagtgtctcatctgaatcagacatgggtgagactcaaggcacaattcatcatgatgcaaactcactctgactatgagcatatgaactcaaaacaagtt

SEQ ID NO: 201671 - DNA, 201 bp, Homo sapiens
cacgaatggtctcttgtgtcttgagagcatctttactatttataatttttttcacttaaaattattttattttttatttaaaataaattagtaatcattgstattaagtagggtttctaattaaacaacttttaattttattatatgaaagaaaattgagctttcaagaaagacaactttgctttttgtgatgtctactaa

SEQ ID NO: 201672 - DNA, 201 bp, Homo sapiens
ttataataataagatctttagtattttccaacaaatagacttttgtgaatgggatctgaaataggcttattattggccctctgtaattttttttctgcccygcccaggacttgtacacttagcactacagatatttccaaagaaactgtcacctctatcctaacattcactactcaaaacgttcactactcaaaaagtgtg

SEQ ID NO: 201673 - DNA, 201 bp, Homo sapiens
ttgaatacacgcaacagggcagacaggtaatggaattgggcttttggaaaaccacaaattgtgacaacaaatggcagcccacccagagaggtgatggagartagggagtggtggatattgtgaataactgcaaaatgcatgctgcatctaagggaggttagctgcttctccactttggccacctgtgtttcagttagaata

SEQ ID NO: 201674 - DNA, 201 bp, Homo sapiens
tagttgtgtgtttagctactggaaagttccagcactgaaaagttgaaggagatgacaaaggtaattacattgcttgtatacagtcctttcattttaaattyttcttgaacttagcgctactgaaatttttccattgagcaacctcttgtgactgtttacccccttagctgtcaagattatatcctaatataagggagaaat

SEQ ID NO: 201675 - DNA, 201 bp, Homo sapiens
aattgactccctcctctgttactcgaggactttcagtatgtgtctacttgagttcttatcacagcatacaataagtgtatgtttacaggtatttattgccrcctagactttagaagaatttaaagtctatgcagaccccacaaatttgaatacacgcaacagggcagacaggtaatggaattgggcttttggaaaaccaca

SEQ ID NO: 201676 - DNA, 201 bp, Homo sapiens
tttcatcctgtcataaattatctctcagaatccatcttgaccttcttcccaaatttggtctctcttctcccatacagcaaatttttaattgactcccaggraacatctatgactttataaaattttattttctccgaattttattcccatttctctcttaagataaagcaaaataaaaccaacaaaaagtaatcttagatg

SEQ ID NO: 201677 - DNA, 201 bp, Homo sapiens
ttttaaataaagggatcacttgatatctgatttattcagcactagttttctctcttctggagcttacaaattagtgaaaaacaaaaacaaagtaaaccaamaagctctaatgatatagttttcatcgtgtacacacatacgtgaacctagacattaagctgggatttcactctggtctatgagtagtcattagtcactgca

SEQ ID NO: 201678 - DNA, 201 bp, Homo sapiens
aatctggagatattgtgtcagattacatcttcctgtgtacttttctctatttacccagctagcttcattttgttaagcattccttaaaaaacccctctgtrtgttaaaaataaactaccacaaagaaactggttcaaatgtccacaatggcacgagagactactagggttattgtctgtacatttaaatacacacaaatgt

SEQ ID NO: 201679 - DNA, 201 bp, Homo sapiens
ccgaagagtcaggggttgttagccctttcctagaaagcctgacacccgtgtctttagtccggtggccatgctagtcgcttttaactggccaacagttaccyggtatttagcccccgaattctaaggaaaaatatgacagaatagcaagtgaaaggggtctgatggtactcacagcttggtgatagtcccttcgtggtcgcc

SEQ ID NO: 201680 - DNA, 201 bp, Homo sapiens
ctgagcagggatttttttttcctttcactttggtttgagccctgttgtttcaggtagtcaatatataccctatagctaacttcctgaagggaaaaatactscatcagcttttaaatgtgggctctctctgctagccatgtaagagcactacagagatggaaggatttaaattagttctgttcctcaaaattcattagcagc

SEQ ID NO: 201681 - DNA, 201 bp, Homo sapiens
ttctgatggtagttattttaaatagatgtgatagtagtgaagcatttttggaaagaaagaaaattgtgcagaaaaaaaattattttaatctaatgtcacaraagacttggcagttttataaaagagaagagattattaatcatttgcagttttaaattgtatatagtcattttgcatttcaagttttactaaatggttcat

SEQ ID NO: 201682 - DNA, 201 bp, Homo sapiens
cctaattctccttagtccttctagaacacaggtcaacagatgtttgtgactccagtccccctgatctgagtcgaggtcccagtggggatccatactggggwcggcttgctgaccggtagggaatttgttcctttcttttgctgtcattctatcatttacttgactaagataccaggtatctccaaactctagggcttcagc

SEQ ID NO: 201683 - DNA, 201 bp, Homo sapiens
tgcaagagggatccagtggagttgatgaaacaaaaaccaggcggctttctatacgttccgtttcacagagaacagaaaagcacggcagggatcttcacacrctgttggttctcctctcttgcttctgagcagggatttttttttcctttcactttggtttgagccctgttgtttcaggtagtcaatatataccctatagct

SEQ ID NO: 201684 - DNA, 201 bp, Homo sapiens
agactaagattcaggtggctgtctagttagtggggaggcagatataggtcgatgttccacatacaaagaatataccttggctgggtgggcagacctgattrtgtatgttaaaatggtgtgtgagtttgttgttttcattttcccatactcctagagtacttgccaaggtagctctggtgagtggctggaaaggggtgttgg

SEQ ID NO: 201685 - DNA, 201 bp, Homo sapiens
acaaagcttccacagcatggaaggggacccgagcgggttgccactgctggctcaggtggccagcttttattcccttatttggccgcactcacattctgctrattggtccattttagagagtgctgattgctccattttacagagtgctgattggtccatttttacagagtgctgattggtgcatttacaaacctttatcta

SEQ ID NO: 201686 - DNA, 201 bp, Homo sapiens
tgaatattggtgaacagcaaatgttgctgcctgatcgttcctctggaagtttcatctcagaggagtacccagccatgtgaggtgtcagtctgcccctactkggggggtgcctcccagttaggctacttgggggtcagggacccacttgaggaggcagtctgtccattctcagatctccagctgcgtgctaggagaaccact

SEQ ID NO: 201687 - DNA, 201 bp, Homo sapiens
cattttataacttagagagctgggggatgtagagaaattaaagaaataaaagtctgcactggagctagattttcacagaagttattaagatttaattggtsagaaaaatctcctgagtggagatgcataatcagatcaatcctaaggagtcacatttacaaggacattatccactatgacagcatctctagtgtaacaatg

SEQ ID NO: 201688 - DNA, 201 bp, Homo sapiens
acccatttaaggttaatattgttatgtgtgaatttgatcctgtcattatgatgttagctggttattttgctctttagttgatgcagtttcttcctagcctygatggtctttacattttggcatgtttttgcagtggctggtactggttattcctttccatgtttagtgcttccttcaggagctcttttagggcaggcctgg

SEQ ID NO: 201689 - DNA, 201 bp, Homo sapiens
tgactctttatccaatttgccagtctgtgtcttttaattggagcatttaacccatttaaggttaatattgttatgtgtgaatttgatcctgtcattatgaygttagctggttattttgctctttagttgatgcagtttcttcctagcctcgatggtctttacattttggcatgtttttgcagtggctggtactggttattc

SEQ ID NO: 201690 - DNA, 201 bp, Homo sapiens
gagactttgctgaagttgcctatcagcttaaggagattttgggctgagatgatggggttttctagatatacaatcatgtcatctgcaaacagggacaattwgactttctcttttcctaattgaataccctttatttccttctcctgcctgattgccctggccagaacttccaacactatgttgaataggagtggtgagaga

SEQ ID NO: 201691 - DNA, 201 bp, Homo sapiens
ttaaagtagttttttcccattctgtgaagaaagtcattggtagcttgatggggatggcattgaatctataaattaccttgggcactgtgtccattttcacratattgattcttcctacccacgagcatggaatgttcttccatttgtttgtgtcctcttttatttcattgagcagtgctttgtagttctccttgaagaggt

SEQ ID NO: 201692 - DNA, 201 bp, Homo sapiens
ctgggaatctaagagaggcattctggcagcagtggccttgctaagctgcagtgggctccacccagttcaaacttccaggtggctttgtttacactgagagrgtaaaactgcctactcaagcctcagcaatggtggatgcccctcctctaccaagctctagcatcccaggttgagctcagactgctgtactagcagcgagaa

SEQ ID NO: 201693 - DNA, 201 bp, Homo sapiens; identical to SEQ ID NO: 35563

SEQ ID NO: 201694 - DNA, 201 bp, Homo sapiens
caaaaccaaacttaagacaatcgtatcccccctttttagtgtaacatattttaacgtgtgtaactgtccatctaagtagcagttatctttgaccattttttccctcaccaccctttccaattcaccaacaaagtcaatttttccctactaatactaacctcttaattctagtcatttctttgtttctccaccgtaataacc

SEQ ID NO: 201695 - DNA, 201 bp, Homo sapiens
actcacagctctgcatggctggggaggcctcaggaaactcacaatcatgctgaaggggaagcagacaacttcttcacaaggcggcaggaaagacagaagartgaaggaggaacttgccaaacacttataaaaccatcagatcttgtgagaactcactatcgcaagaatagcatgggggaaaccgtccccataatccaatca

SEQ ID NO: 201696 - DNA, 201 bp, Homo sapiens
attggatttcgtggctcttactgacacattcttgaaaacctgttacagtcctaagcattctcctgttagtattgggaccttacccctgtcctataaaggtkttatgccccaaaaatgaagtggagggccataccctgagggagggaagggatctccagggctggaagagtgatgccttttgtcctcacttatatggatagg

SEQ ID NO: 201697 - DNA, 201 bp, Homo sapiens
ctcgaaaacctgcacccttgcctgtcttcctagaccacaaagaggactgagaaaaattggatttcgtggctcttactgacacattcttgaaaacctgttasagtcctaagcattctcctgttagtattgggaccttacccctgtcctataaaggtgttatgccccaaaaatgaagtggagggccataccctgagggaggga

SEQ ID NO: 201698 - DNA, 201 bp, Homo sapiens
gaggcgggtggatcgcttgaggtcaggagttcaagaccagcctggccaacatgacgaaacctcgtctgtacaaaatatacaaaaattagcaggcgaggtgkcgggcgcctgtaatcccagctactcgagcgactgaggcaggagaatcccttgaacccgggaagcggaggttgcagtgagctgacatcgcgcctctgcatt

SEQ ID NO: 201699 - DNA, 201 bp, Homo sapiens
ctgcaggatagtattgtaatttatacttccctcagatggccatttttccccatcagagagagaatattggggccaagctgtagtgcagaaaaaattgagcytcttctttttcaggatttgcgggtcaaattggtcccaatggcttaggatgcatttcaagggtgagcctgttgatgcctgagtgtttcccatttgaaagac

SEQ ID NO: 201700 - DNA, 201 bp, Homo sapiens
tctcccatctctaaagccaggctgaaggactgtcactcaagagcaatggggctggagaaatgggtaaaaatgtatcttctggccaggcatggtagctcacrcctgtaatcctagcactttgggaggctgaggcgggtggatcgcttgaggtcaggagttcaagaccagcctggccaacatgacgaaacctcgtctgtacaa

SEQ ID NO: 201701 - DNA, 201 bp, Homo sapiens
tttcatacaataccggggttttagtagaaaaatggcagctcctgggaatacatagatttgtatttatatagtatgtaatgtgtttcaggcactgttctaartgcattgcaaacaatgattcattttatctttctgatagcccaaaaaggaaagcattatcattatctccattttataacttagagagctgggggatgtaga

SEQ ID NO: 201702 - DNA, 201 bp, Homo sapiens
ctttgtcctctatggaattaaagagtgtttcatacaataccggggttttagtagaaaaatggcagctcctgggaatacatagatttgtatttatatagtakgtaatgtgtttcaggcactgttctaaatgcattgcaaacaatgattcattttatctttctgatagcccaaaaaggaaagcattatcattatctccatttt

SEQ ID NO: 201703 - DNA, 201 bp, Homo sapiens
aatttcgccccagtcctgtggtcctgtgatctcgccctgcctccatttgccttgtgatattctattaccttgtgaagtacttgacgtctgtgacccacacyctattcgtacactccctccccttttgaaactccctaataaaaacttgctggttttgcagcttgggggaaatcacggaacctaccgacatgtaatgtctcc

SEQ ID NO: 201704 - DNA, 201 bp, Homo sapiens
tccattgagcaacctcttgtgactgtttacccccttagctgtcaagattatatcctaatataagggagaaattttgtatcttaaaataaattttctctaaraataagcacagtgaaatgcagccatcaagttcactctgtcccgaggagtcctcaatgaatatgtatctccctgacatcctagcagagcaagggttgaggt

SEQ ID NO: 201705 - DNA, 201 bp, Homo sapiens
tgccatggcatttactgtcagttggagagacaattgcttgcagtctggacggtgtattcagaatttttgtctgttttatctctagctatgcataggtctcwgcgctgccagaatttaagtaagcttgcattccttcaataaggaccataagctttctatagctgtttattgtcaaggaaactgtatatattctgtacatag

SEQ ID NO: 201706 - DNA, 201 bp, Homo sapiens
aaatacagatgaagcaaaccagaaatatatcatagtatggttacagtattaatttatgaaaggtttgtactgagggttcagtgaaaacacatagcccttcrtgatattcctactcagatttcaaccttctttcatcttttagctctgcaccacctactggcctcttctaagtcccaggaggatcatctgctctgtctgcat

SEQ ID NO: 201707 - DNA, 201 bp, Homo sapiens
tacccttgggagacgcaaccaagaattgattggctatttttttcataattctattgagatataattcaccaatttaaagtatacatttcaatggttttccrtatgttcacaaaattgtgcaatcatcaccacaaactcattcttgtcactccaaaataatctactgatcttatgctaagtctctacaacctcagagagtct

SEQ ID NO: 201708 - DNA, 201 bp, Homo sapiens
tgacgtatgcctgtaatcccaactcctcgggaggctgaggcaggagaatcgcttgaaccctgaaaggcatagtttgcagtgagccgagattgcgccattgyactccagtccaggcaacaaaagaatgaaactctgtctcaaaaaaacaaaacaaaacaaaattcacatcaagagatttttctgtaagagagagtagctatc

SEQ ID NO: 201709 - DNA, 201 bp, Homo sapiens
gactcacagctctgcatggctggggaggcctcaggaaactcacaatcatgctgaaggggaagcagacaacttcttcacaaggcggcaggaaagacagaagagtgaaggaggaacttgccaaacacttataaaaccatcagatcttgtgagaactcactatcgcaagaatagcatgggggaaaccgtccccataatccaatc

SEQ ID NO: 201710 - DNA, 201 bp, Homo sapiens
tgaacccgggaagcggaggttgcagtgagctgacatcgcgcctctgcattccagcctgggtgacagagcgagactctgtctccaaaaaaaaaaaaaaaaaatcttcttttccaagatagtagtctgcctggttttttaataaggtggtttactaaataagtcagaagatccagcaccaaggattcctccacagtcctctcc

SEQ ID NO: 201711 - DNA, 201 bp, Homo sapiens
gccctggccagaacttccaacactatgttgaataggagtggtgagagagggcatccctgtcttgtgccagttttcaaagggaatgcttccagtttttgccyattcagtatgatattggctgtgggtttgtcatagatagctcttattattttgagatacgtcccatcaatacctaatttatggagagtttttagcatgaag

SEQ ID NO: 201712 - DNA, 201 bp, Homo sapiens
acaatggggttttctaggtatacaaccatgccatttgcagacagggacaattagacttcctcttttcctaattgaatcccctttatttccttctcctgccwaattgccctggccagaacttccaacactatgttgaataggagtggtgagagagggcatccctgtcttgtgccagttttcaaagggaatgcttccagtttt

SEQ ID NO: 201713 - DNA, 201 bp, Homo sapiens
ctgtgaagaaagtcattggtagcttgatggggatggcattgaatctataaattaccttgggcagtatggccattttcacgatattgattcttcctacccaygagcatggaatgttcttccatttctttgtatcctcttttatttcattgagcagtggtttgtagttctccttgaagaggtccttcacgttccttgtaagtt

SEQ ID NO: 201714 - DNA, 201 bp, Homo sapiens
tagggtttttatggttttaggtctaacgtttaagtctttagtccatcttgaattaatgtttgtataaggtgtaaggaagggatccagtttcagctttctaratatggctagccagttttcccagcaccatttattaaataggaaatcctttccccattgcttgtttttctcaggtttgtcaaagatcagatagttgtagat

SEQ ID NO: 201715 - DNA, 201 bp, Homo sapiens
ctttgtcagatgactaggttgcaaaaattttctcccattttgtaggttgcctgttcactctgatggtagtttcttttgctgtgcagaagctctttagtttmattagatcccatttgtcaattttggcttttgttgccattgcttttggtgttttagacatgaagtctttgcccatacctatgtcctgaatggtaatgccta

SEQ ID NO: 201716 - DNA, 201 bp, Homo sapiens
tgcaatagcctcctatcaccctaattttggactctttacactggaatttcttctccacaccactttcagaataaacacacacacacacacacacacacacmcacacacatatacacaatctgacttaggacacttgacacttgtctatttaaaactctttaatatagctcagtatctgcagaataaagtttagatttctaa

SEQ ID NO: 201717 - DNA, 201 bp, Homo sapiens
tcttcattcaatcattgtacttctaaactatttttctttatcatcccaaatctttatcctcatgaaaagcattttattttagagcttcaacattttaaaaatctgttgcaatagcctcctatcaccctaattttggactctttacactggaatttcttctccacaccactttcagaataaacacacacacacacacacaca

SEQ ID NO: 201718 - DNA, 201 bp, Homo sapiens
tttttagtagagacggagtttcaccatgttggccaggatggtctcaatctcttgacctcatgatctgcccccctcagcctcccaaagttctgggattacargtatgagccaccgcgcccagccagataattgttatagccagcaccacacttcttagtatcaattttcttagtcggttttctgttgctgtaacagaatact

SEQ ID NO: 201719 - DNA, 201 bp, Homo sapiens
catgaagtctttgcccatgtctgtgtcctgaatggtattgcctaggttttcttctaggatttttatggttttagttcttacatttaagtctttaatccatsttgagttaatttttgtataaggtgtaaggaagggatccagtgccagctttctgcatatgactagacaaaaccatttattaaatagggaatccttgcccca

SEQ ID NO: 201720 - DNA, 201 bp, Homo sapiens
ctcacgctgggagctgtagactggagctgttcctatttggccatcttggctccaccccccacccaaatatatttttatagattttagaaaccaagctttcrtagttcaatttccactgtactgtttatctcccattttgtatcttattttgtgtatttctattcctttatttttacataggttttcaaataatttctttta

SEQ ID NO: 201721 - DNA, 201 bp, Homo sapiens
tctgagccaggcgcaggatataatctcctggtgtgccgtttgctaagactgttggaaaagtgaagtattagggtgggagtgacccgattttccaggtgccrtctgtcacccctttctttgactaggaaagggaattccctgaccccttgcacttcccaggtgggaggatacctcatcctgcttcggctcatgcttggtgcg

SEQ ID NO: 201722 - DNA, 201 bp, Homo sapiens
gcagaaagctggtaaaattacaaggctcattttatttctcttattgtaggaatcacattcctgtgtatcgcttgttgtccaggcagttaaactacttcatrtattttgtctggttttctagttatttgaagtgtgtattagtttctgttcctgtgcagtaagttaccacaaagttagtagcttaaaacaacacatacttgt

SEQ ID NO: 201723 - DNA, 201 bp, Homo sapiens
attttttttacgtgttgtcatttctgttgggtaaatagctagagtagaactgccaacatttaagatcgatatatgctgaaatttgtaagaaactgcaggcrtgatggctcacgtttgtaatcccaacactttgggaggcttgaggccaggagtttgagatcagcctaggcaaaagagccagaccttatctctaaaagaata

SEQ ID NO: 201724 - DNA, 201 bp, Homo sapiens
ggcagtgaaggcgcagctgaagaacacggccaccgtcatggagaccgcagaagccgaccagggggcccgtaggagacgccggaagctctggttggtttccwttactaatttctctcctaattatggaatatattttcttgcttgtctacctggtgtttttttattggatgccagatattgttatttttacatggttaattg

SEQ ID NO: 201725 - DNA, 201 bp, Homo sapiens
ttgaagaacctaatatataagaagcagtaatttttccaagattgcctatattataatttggtcatgctctgataaataatcctaaaatgtagaaatatacrtatggtatacctagaaattttcatattaaacttttattctaatgtgtatcttcacataatttttctatgccagtatgattaattagtgagttaataacat

SEQ ID NO: 201726 - DNA, 201 bp, Homo sapiens
ctcctggattcgacaaattctcctccctcagcctcccaagcagctgggacagcagatgtgcgccaccatgcctggctaatttttgcatttttagtagagakagagtttcaccatgtttaccaggctggtcttgaactcctgacctcaaatgatacacctgcctcggcctcccaaagtgctgggattacagggcgtgagcca

SEQ ID NO: 201727 - DNA, 201 bp, Homo sapiens
ttttacatggttaattgttggattttgttgtatttcttaagatagttttgggttttgttttggtaggcatttaattaaaataggtaaaaacatttcgaggyttgctttaaatcttcagagggcaggtccagagcagccattattctaggggttaatttggccccactcctaacgtgatgccgggctgaagattctacccaa

SEQ ID NO: 201728 - DNA, 201 bp, Homo sapiens
tcagagacatatgatgtttagctttctgacttgggtgactggctgaataatggtgctatttcgtgcatggaaaaacacagtgggtggaggttcaggagaargaggaaacatgactggggaataaggaactaagaactatctatgaaatactgagtggagatatcaaaaaaaggcagtaagcatatatattcagagaaatgt

SEQ ID NO: 201729 - DNA, 201 bp, Homo sapiens
ccatgtccctgcaaaggacatgaactcatccttttttatagctacatagtattccatggtgtatgtgtgccacattttctttatccagtctatcattgatrggcatttgggttggttgcaagtctttgctgttgtgaacagtgccgcaataaacatacgtgtgcatgtgtctttatagtagaatgatttataatcctttga

SEQ ID NO: 201730 - DNA, 201 bp, Homo sapiens
gatggagaaaaggaagctgattgtaaagaggtggaaccaataggattcagtgattatgtgttggcagtaaatcagagacatatgatgtttagctttctgayttgggtgactggctgaataatggtgctatttcgtgcatggaaaaacacagtgggtggaggttcaggagaaagaggaaacatgactggggaataaggaact

SEQ ID NO: 201731 - DNA, 201 bp, Homo sapiens
atttggcaaaactatattatctctatcttgtaaaaaatgaaactgagcttcattaaattgccaaaataattattcaaggtcacaaagtaagagatgaaccrggatgccacatatgaattctgtttcccaatgcaatcatatgcagaaaaacaaaaaggggaaaatacataacaacgtaatctgtattttgccacctcctat

SEQ ID NO: 201732 - DNA, 201 bp, Homo sapiens
atatgtgtattatgtaagaaagaatattttgcatttgtaaacacttctactattatagtactcttctgtataaattaatttgatatgttttaaaagctttrtatttggcaaaactatattatctctatcttgtaaaaaatgaaactgagcttcattaaattgccaaaataattattcaaggtcacaaagtaagagatgaac

SEQ ID NO: 201733 - DNA, 201 bp, Homo sapiens
taggtaccttgttctttatacattaatttagttatgttaccttttgctactgtctttttttaacttagaattcctttatatcttcttctctctttacttgytctttacatctagatgttctccatgaagcatttctggatctgtctgtcccgtctccatgtaaagttaattaccgcttcttttacactttcataacacttg

SEQ ID NO: 201734 - DNA, 201 bp, Homo sapiens
attttgctaatggaaccattttgtaaggtggtattatattaattttgtaaatatcaataaccgtgaaataacatctgaatcagttgttcaataagcacccrctaacgttcacaaatgcttcatgtgacctttagagaaaaaagcagaggcaagctaattgcaaaatgatgaacactttcaatattcaacacacttcgaatg

SEQ ID NO: 201735 - DNA, 201 bp, Homo sapiens
gctgtcctttctctagccttctcctcaaagttcttgcagcctgcaccccttatctagttttaaagtcattttcatgttttcagataaaattttttttttttgagaaggagtcttgctccgtcaccaggctggagtgcagtggcgtaatcttggctcactgcaacctctgcctcccgggttcaagtgattctcctgcctcag

SEQ ID NO: 201736 - DNA, 201 bp, Homo sapiens
acaatggtgatacagatataggatagacattcctattccaaaaggaaaaaatgggtaacaataaaggggttacttttcccaagtaagtccaaaattcaacrgggtaaaaacagtaagtcttaaaatgctagaataacctcctttgactccatgtctcagatcctgggcacactggtgtgggggttggactcccaaggcctc

SEQ ID NO: 201737 - DNA, 201 bp, Homo sapiens
tatgctaatataatatataatatgtattatatatgcaaatatattaaatattaaatatataataaataaatatataaaaataatacatacttatatatatyataataatatatagctatatatatagcattggtgtatatacatatatgtataacaatgatttttcactatagttttctgaattgtcttattacagaaaac

SEQ ID NO: 201738 - DNA, 201 bp, Homo sapiens
ttccttttgcttggtaaatattcctccacccctttattttgagcctatgtgagtctttgcacatgaaatgggtctctgaattcagcacactggtaagtctygactctttatccaatttgccagtctgtgtcttttaattgtggcatttaacctgtttacatttaaggttaatattgttatgtgtgaatctgatcttttcat

SEQ ID NO: 201739 - DNA, 201 bp, Homo sapiens
taggaggggacaggaaaatatttttcctccctttcacccagtcatatataagcaatttgcattaaatatttgtcagttgctttaatttttttagtccttakaaatgatgaaaaatagaactcacagaagggtttgaaaagagtttagaactagtaagttttaaaaatttttcccagctaatttaaacaggtttttaactca

SEQ ID NO: 201740 - DNA, 201 bp, Homo sapiens; identical to SEQ ID NO: 35564

SEQ ID NO: 201741 - DNA, 201 bp, Homo sapiens
ttggctcactgaagccttgatctcctggggtcaagcgatcctcccacctcaaacccccaagtagctgggactacaggcatatgccaccatgcctggctaayttttatatttttgtgtagagacagggttttgccatgttgtccatgctggtctgaactgagctctggcaatccacctgccttgacctcccaaagtgttggg

SEQ ID NO: 201742 - DNA, 201 bp, Homo sapiens
gggcgtggtggcgggtgcctgtagtcccagctactcgggaggctgaggtaggagaatggcgtcaacccgggaggcggagcttgcagtgagccgagatcacrgcactgcaccccagtgtgggtgacagagcgagactccatctcaaaaaaaaaaaaaaaagttccatcataacttcatttttactagaagggtcaagattaa

SEQ ID NO: 201743 - DNA, 201 bp, Homo sapiens
ttctgtgagtctaatatggctgtagtgatttaatagaaacccttgtgttttgcttttctcccttcccctttctgtttcttagagttggaaaggctcctggrtaaatttggacaggatgcacaaagaatagaagattctgtgctgattggatgctctgagcagcaggaagcatggtttgctctggatctaggtctggatagc

SEQ ID NO: 201744 - DNA, 201 bp, Homo sapiens
ggttgtgccccatactccggaggaaggaaggctgcacagagaggccaaggagaacctgaacagacaggcattgctgggtttccggtcagtctattattatkaaatcataaccattttgtccaatcagatttctacatggttgtcaatcatgcctatgtaatgaagccaccataaaaacccaaaaggacagggttcagagag

SEQ ID NO: 201745 - DNA, 201 bp, Homo sapiens
gccccctgctctgagcacacccctagattccatgaatttttactacacttactttatcacaaagctgtccatctatccattaatctatcttattttttgaygcatagattgaagatattagtacacttcttcctatttcagcatgcgtaacatttgctagaattcagtatttatttacaggttggtttttttctctagtct

SEQ ID NO: 201746 - DNA, 201 bp, Homo sapiens
ctccctccttggcctcccaaagtgctaagattataggtatgagccaccacacctggcctatacattttgtatatttctttttttttttttttttgaggcaragtttcactcttgttgcccaggctggagtgcaatggcgcgatctcggctcgccacaaccttcgcctcccaggttcaagcgattctcctgcctcagcctcc

SEQ ID NO: 201747 - DNA, 201 bp, Homo sapiens
gtattatcttctaagattgcttagttctagaatcattttctgacctttggccatagtattctaaattttgtagctcctgaccttacatccttttcttcctwatgtctttcagatccaggtgaacttgagagaattagagacagctgcctggttcagtcatgatgaggtagccacagccctgaagagaaagggcccctatac

SEQ ID NO: 201748 - DNA, 201 bp, Homo sapiens
gtgtatatgtgtgtgtgtgtatatatatatattcatatatatatatattcatccatggtttctggctcataactcctatggcccttattacagtcttttgytataatgtggggcactttagacctcaggggcaggcctcaggaaacaaaatctcttttaccttctcctgtcctccttttacctgcccatggcaggactcta

SEQ ID NO: 201749 - DNA, 201 bp, Homo sapiens
tctctaggtattttgtggttgatgttttatcactgtacttgttttcctttcactccactgcatgtaaattcttgcctcacagtgtaatattggcagagtamcttgaagttcaattcagtaaatatttattacccttgaagttcaattcaataaatatttattgaatcgagccattcaatatgctaactacagagatacaga

SEQ ID NO: 201750 - DNA, 201 bp, Homo sapiens
ctaacctgaagatcccaggtattatcttctaagattgcttagttctagaatcattttctgacctttggccatagtattctaaattttgtagctcctgaccktacatccttttcttccttatgtctttcagatccaggtgaacttgagagaattagagacagctgcctggttcagtcatgatgaggtagccacagccctgaa

SEQ ID NO: 201751 - DNA, 201 bp, Homo sapiens
acagagtgatcccattctggcttaaagtataaccctcttggcaattcattactttaaatttcatattatgactttttttaaaactccttttttttttttttaaggacctgacaatgtccctgtattgtggaatagcttgcaggagaaaatttttttggtgctataggctgctgtcaacctatgttactaagacacggtgag

SEQ ID NO: 201752 - DNA, 201 bp, Homo sapiens
atacttgctgtccgttgtacttttttaatggtagccattaaagaaggtatgagttaatagtagccatcaaagaaggtatgaggttttcatttgcatttccctgatgattagtgatgttgagcaccttttcacatacctgttggccatttgaataccttctttggagaaatgtctattcagattctttgcccatttttaaat

SEQ ID NO: 201753 - DNA, 201 bp, Homo sapiens
ctagaaatgaacagaatcatattcaatatttatttaaaaagaaaaaagagaagctaaatgtgctggttaattttttgttggcttacttgttggtctgtgaycggtgttgtcaggcagctgcactcccatgctttgtaaaagattggaagcaggtcctgccagtccagcttgggagctataggattccaatatatttgaaac

SEQ ID NO: 201754 - DNA, 201 bp, Homo sapiens
ggtcctgccagtccagcttgggagctataggattccaatatatttgaaaccaggttcaggtctacatctactggtgccataacagattctcccgtaccagmatcttcctcatctgaattgttatcggtagtctgggatacaggttccttattcatagagggaaaagaaaattatgggctaatgtatcattaggttgcatgg

SEQ ID NO: 201755 - DNA, 201 bp, Homo sapiens
agaccagcctgaccaacatggagaaaccccatctctactaaaaaaaatacaaaattagctaggcgtggtggcgtatgcctgtaatcccaactactcgagargctgaggcaggagaatcgcttgaacccgggaggtggaggttgcggtgagccgagattgcgccattgcactccagcccgggcaacaagagcgaaactccgt

SEQ ID NO: 201756 - DNA, 201 bp, Homo sapiens; identical to SEQ ID NO: 35568

SEQ ID NO: 201757 - DNA, 201 bp, Homo sapiens
cagtaagtgtgggcaaatccatgtgtacacacaaggctagagtgacgtttgatttcttcttttgcagattatagtcctttctacaaacactggcaggacamtgtgctgtagggagattgcttattcttccttcttctgcccttgtttttggcagaaccactgtcaagatcattgtctcctaaagacatgcagatctatggc

SEQ ID NO: 201758 - DNA, 201 bp, Homo sapiens
aaataaaccaatagtgcaaccacagaagtatgggtgaggtacacagtaagacaaaggagggaatgaatgattatctatagccacctcaaaccctttttggrgcaaattaggttgtaaataaataaagggaaataaccatggtaagagagggatgcagcgacagcattctcaaagatgaatgctatacaggtaactaagggt

SEQ ID NO: 201759 - DNA, 201 bp, Homo sapiens
gcacctttctcaaatgggctgtctgtatcacccttctagcctacagggctgtcctgaattaatctgagtgcttgtaggtgaaagtgtggaagagaccatcygccgagaagttgcagaagaggtgggattggaggtggaaagcctgcagtactatgcatcccagcattggcccttccctagtggctcactcatgattgcttg

SEQ ID NO: 201760 - DNA, 201 bp, Homo sapiens
aaggtcgtggtcacagcattttaacattttagcttaatctcttcctttttgcagaaaccagggatataaccatagttttgcctcataactgtggagctacmtcagtaaccacagctcatcattttctgatacttttttggagagtcatttaaaaatggaacttgccaacctctcacattgtgccttaatttttattttttt

SEQ ID NO: 201761 - DNA, 201 bp, Homo sapiens
acattattcctaacgggtacttcccagtggtcttcagaatttgggatttcacataatggtaaaatttaaaggaaaatttggggaatacaaaaggttatcamctttctattttttaaaaaaggacattaaaaagtgtcatctgctatcatcatcatttaaatgacaataaaggacattttaatgccttctaagttaggtgat

SEQ ID NO: 201762 - DNA, 201 bp, Homo sapiens
ttgtgtagagacagggttttgccatgttgtccatgctggtctgaactgagctctggcaatccacctgccttgacctcccaaagtgttgggattacaggcgyaagtcaccaaacctggccgaaaaattttaaacaaactaaatatccaataatatctaaaatatctcacacacttgaatataagttctattaagatcagact

SEQ ID NO: 201763 - DNA, 201 bp, Homo sapiens
gcagtactatgcatcccagcattggcccttccctagtggctcactcatgattgcttgccatgcaactgtgaaaccagggcagacagaagtaagttctcatsttcccttatactgtgatatttcttttgcttcatccaacctgctcatcagcaagtacttattaagcacttgtctagtccagcatcatctagattacataaa

SEQ ID NO: 201764 - DNA, 201 bp, Homo sapiens
ctgagtgcttgtaggtgaaagtgtggaagagaccatccgccgagaagttgcagaagaggtgggattggaggtggaaagcctgcagtactatgcatcccagyattggcccttccctagtggctcactcatgattgcttgccatgcaactgtgaaaccagggcagacagaagtaagttctcatcttcccttatactgtgatat

SEQ ID NO: 201765 - DNA, 201 bp, Homo sapiens
tactagactcagaaagagaaagaggttaaaaacacacataccacttggttcctagtggtgaaacttttgctgatgcaggtgtgtgctagttcctggtccatctgggccatgtatgacttgagattatcaagtgttcctttcagggaagcctcttcgccaggttcgtgtgtttcaaagtccaagtcatcatcactatctaaa

SEQ ID NO: 201766 - DNA, 201 bp, Homo sapiens
aggctggtctcgaactcctgacctcaggtgatccgcctgcctcagcctcccaaagtgctgggattacaggcatgagccaccaagcccggtcacattttgtwtatttcagtatttcataagaaatgttaaaaaacttataacatcattctaatttcttttttgaatacaggtgaataaaaatgtttccatatagctctgggt

SEQ ID NO: 201767 - DNA, 201 bp, Homo sapiens
atcatttgaacctgggaggggaggttgcagtgagccaagatcacaccattgccctctagcctgggtaaaaagagcaaaactccatctcaaaaaaaaaaaaagtaatatttgtatgttcttttttaattgaaaaatttatacaatcaatagagacacaaggaaaaataggtattattcataatttattctcaatgttaacca

SEQ ID NO: 201768 - DNA, 201 bp, Homo sapiens
gcagctgcactcccatgctttgtaaaagattggaagcaggtcctgccagtccagcttgggagctataggattccaatatatttgaaaccaggttcaggtcwacatctactggtgccataacagattctcccgtaccagaatcttcctcatctgaattgttatcggtagtctgggatacaggttccttattcatagagggaa

SEQ ID NO: 201769 - DNA, 201 bp, Homo sapiens
tttctttctttttttttttttttctgagatggagtttcactcttacacccaggctggagtgaagtggtgtgatcttggctcactgcaacctccacaccccrggttcaagcgattctcctgccttggcctcctgagtagctgggattacaggtgcccaccaccatgcccagctaatttttgtatttttagtagagacggggt

SEQ ID NO: 201770 - DNA, 201 bp, Homo sapiens
cattcagagaaaaatctgccatggggcaaaaccacctcctcagctgctctgtgctcagcttggaaacaaattctcccttccccctgctgcagttcacaccrtcctcccagctctcagtccctgactggcatcaatttgctggactttctcaagggagctgtccctgcctgcagcctcggcaacgacaggcatgctgtggag

SEQ ID NO: 201771 - DNA, 201 bp, Homo sapiens
caatgtctagagtgcagtctggaggtgaaggtgtgagggcttagaaatgtgaataattcagtgtgccctatgaaagggagtatcattctattctgtttctrcagaggctgaaaaagtacctgctgctaatctagggtcaggtcaagttacttcctgcaagcaatgtcctgttgattcattctcccaaatatctctttcata

SEQ ID NO: 201772 - DNA, 201 bp, Homo sapiens; identical to SEQ ID NO: 35573

SEQ ID NO: 201773 - DNA, 201 bp, Homo sapiens
tgctgggagggaagaatggagtctgtcagtacaggtgccgatatggtgagtgtgcggtttctctttctgtaaaaactgttgctggtggacccatggacagmcccagagaggtcacgatctgtcttgcactttttcctgttatccacttagagctgccagatttagcagataaaaatgtaggacacccagtgaaatgtgaaa

SEQ ID NO: 201774 - DNA, 201 bp, Homo sapiens
ggctggacccttccaactcctgccatcctgctacaggtaatatggatgtgttggctgaaatgccatcttagaccatgagagccagggctacactccagggytggtagagcagaaagctagaagcagcctgggttccaggaaagtgcagatttactataccagaggcatgagtcttagctctggatttttatgagatattct

SEQ ID NO: 201775 - DNA, 201 bp, Homo sapiens
ggaagccagcagcaactggtgggggatgggaagagtaaatagaagagaaaggcaaataactcttctcactttgtgtaaaacaacctgctcaaagaggggcytgaaaaacacttagaaaaataggcggttatgcctccttaccttggaacccagtagagccaaaaacctggcggctgtgcccaaaagagtacaaaatacctt

SEQ ID NO: 201776 - DNA, 201 bp, Homo sapiens
tactgaagagaggggctggacccttccaactcctgccatcctgctacaggtaatatggatgtgttggctgaaatgccatcttagaccatgagagccagggytacactccagggctggtagagcagaaagctagaagcagcctgggttccaggaaagtgcagatttactataccagaggcatgagtcttagctctggatttt

SEQ ID NO: 201777 - DNA, 201 bp, Homo sapiens
agcagcctgagatactagaggaattcctggagaatgagtgtttgagagagtttccaaaaggatgagtattgtcacaaatgttaccaaaggaacaaatacartgagaattgaaaaatgtcattagatttagaagcacaatagggctgtgggtaagattagcaagagcaattttgagggagtgatataagtgactaaagctag

SEQ ID NO: 201778 - DNA, 201 bp, Homo sapiens
tcagaagtcacagatgttaattttgctgtattctgttacagcaattacaaaggtctgcccagcttcaaggagagggcacacagaccctaccactgcagacraatgtcagcgtcacataaaaagagcatgtaggatgggacatattgggatgtattatatttggaaaatgcaatctgccataatgtcataacctttgttaac

SEQ ID NO: 201779 - DNA, 201 bp, Homo sapiens
ttaattttgcaaagtgaaaaagaatattctgggcagagagaagagcatacgcactagccttaggcctagaggaaatacgttcttgaggaaatgttgctgckgtcctgagagggaggcagaatatagtgttggaggctgtaaattaggagaccaagaaaaagcagcctgagatactagaggaattcctggagaatgagtgtt

SEQ ID NO: 201780 - DNA, 201 bp, Homo sapiens
gctcatgttcagagataagagtatatttaacttttttgtactaagaatagtatttgagtaatgttataggtacatatgagaatttggccttcatctctgcmgagtcagttaaacacaagtttctctagatatttccattacaagaatcaaagctctttgatttttggaacttcagtaaaacccaagaatgaatagccgaga

SEQ ID NO: 201781 - DNA, 201 bp, Homo sapiens
gtatgggtctgaacttcctattgtaagtgacagaaatccaacttgaattagcttaagcaaaaaggaatttaaaggctttcttaggtgggctgggagattaytgtagtagcttacagattcaaagcaatagttgcaaagaatcagggccctgggggttgaaactgtttgtctctgtatgactttgtcctgtttatagatcct

SEQ ID NO: 201782 - DNA, 201 bp, Homo sapiens
gctttccttactcacatattagaagtgtagttttgcagtgtgagaatgttgctcccttactctgcgcattctagtggtattttacaaaatcatgaagtttwttttttttttttttaacagcggaaactcagtagaaaggaaaaaagcatagaaatgttactctaattgaatgcacagctttggcttcaggtcctgtcatta

SEQ ID NO: 201783 - DNA, 201 bp, Homo sapiens
ctcacgcctgtaatcccagcactttaggaggccgaggcaggcagatcacctgaggtcaggagtttgagaccagcctggccaatgtggcaaaaccccgtctytactaaaaatacaaaaattagctgggcgtgttggcaggtgcctataatcccagctacttgggaggctgaagcaggagaatcgcttgaacccgggaggcgg

SEQ ID NO: 201784 - DNA, 201 bp, Homo sapiens
caacagaactacaattaagatgacagtttgacagttattttttttttaacctacaatcaacattggttttaactgctaagcctcaaacccttcatcaagatttttttttttttttttgagacggagttttgctcttgttgcccagactcgagtgcaatggcgtgatctcggctcactgcaacctctgcctcctggttcaag

SEQ ID NO: 201785 - DNA, 201 bp, Homo sapiens
attttgaagtttagaattagtttgctcaatgtggacaatcaaactgaggctgcaaacagtaaaaatgagtaagtgatacaatacaatttgtagttggagcrttgaaatgttttagatactttaataacagatgtagaagactaaatctggactttattaaggaggtaaagggattatgcctcgccccccgccgcccctgcc

SEQ ID NO: 201786 - DNA, 201 bp, Homo sapiens
agactttatcacttacctttaataaaattcatagtcagttttggttttgggacattgtgccttaagtcctgccattgtttttgatagctgatgacaaatgkttcttagatttacatagactaactaggaaaaggactatttctgtctcttttaaatgggtagtgctgtttttattgacattttgaaatgagttttattttg

SEQ ID NO: 201787 - DNA, 201 bp, Homo sapiens
tactccaagggtacttaccagtgtttgtaagcagtgaagtaaacttattatgcacagggatcaggaagccttgaaaagaaaaatatggcaagtacttgtgmatacttctttactgtgagagggaaatgcctgtgattattttctgtactgtataacaccttgggaacttttttttttttttttggagacagggtctcactg

SEQ ID NO: 201788 - DNA, 201 bp, Homo sapiens
gccttgaaaagaaaaatatggcaagtacttgtgaatacttctttactgtgagagggaaatgcctgtgattattttctgtactgtataacaccttgggaacttttttttttttttttggagacagggtctcactgtctaactgttgcccaggctggagtacagtggcacaatggtggctcactgcagctttgaactcctggg

SEQ ID NO: 201789 - DNA, 201 bp, Homo sapiens
ccttgaaaagaaaaatatggcaagtacttgtgaatacttctttactgtgagagggaaatgcctgtgattattttctgtactgtataacaccttgggaacttttttttttttttttggagacagggtctcactgtctaactgttgcccaggctggagtacagtggcacaatggtggctcactgcagctttgaactcctgggc

SEQ ID NO: 201790 - DNA, 201 bp, Homo sapiens
tagctgtggagtagattgttaatatcttcagtggcaagagcttttggaatccttccattcttgttttccccacaatagggagttttagccagtgggagtcktcttggtggcaggtcttacatatcctacaagcagctgccatggtgctgcaatccaggtgcaagcgtttggagtggctatggggctaggatcctgggctca

SEQ ID NO: 201791 - DNA, 201 bp, Homo sapiens; identical to SEQ ID NO: 35586

SEQ ID NO: 201792 - DNA, 201 bp, Homo sapiens
aatggagaaattcactgaggcttatgcattacattgtttgtctcaaaacaaaacaaaaaaacagtctcactctgtcacccaggctggagtgcagtagcacratcttggctcactgcaacctctgcctcctgggttggagcaattctcctacctcagcctcccgagtagctgggatcacaggcatgcgccaccatgcccagc

SEQ ID NO: 201793 - DNA, 201 bp, Homo sapiens
gccccccttcccacctctgtccctagtgcgcctcggaccgctggggctgctgcagcctcagtccccgccctagggaccaggactttcttgaattttccttyccggggaggaatcactctgttgcttttttttttttccaagttcccctgcacctggtcctccctaacgaggctaaggggaacgcaagcgcggggcgtgggc

SEQ ID NO: 201794 - DNA, 201 bp, Homo sapiens
agagagtatatatattttaatttttcttagaattttgtttgtagcataagagatattatagccttctataaaacttataaaacttgcttgtaaaattccayatagagattgcaactgagagttggtcgtaaaactaaaaatattgttgggaacagagcaggtcaaaactcccatgattgatctaataatggaattatactg

SEQ ID NO: 201795 - DNA, 201 bp, Homo sapiens
aaatatttcatatattctgcgaagataatgtaatttttgtttcttattttggaactattatctgtgtcttaaaaacaaaagcccccatgtttgcttaataygattttaacattgtacaggattcagccaaacaagtgcctaatcataatacaaatttgaaatcagaattttgatgacagattttatttttaactattttta

SEQ ID NO: 201796 - DNA, 201 bp, Homo sapiens; identical to SEQ ID NO: 35575

SEQ ID NO: 201797 - DNA, 201 bp, Homo sapiens
ccccaaatcactgtaaggtagccaaaagagcagtgtatttccttactgtgtggttctggaagtaactggaagtttgcagcaaactcgagggaggagactarggagtacttccagtttttgtggtgatctgtttttattgagattcaagttagggggcagtggggttattttttagctcttgtagaacggggagctttcaat

SEQ ID NO: 201798 - DNA, 201 bp, Homo sapiens
ggagcattgaaatgttttagatactttaataacagatgtagaagactaaatctggactttattaaggaggtaaagggattatgcctcgccccccgccgccmctgccctgccccgccaagaaaagaagaagagagagacggaaaagagctgagctagttgtgtagataaaatactccaagggtacttaccagtgtttgtaag

SEQ ID NO: 201799 - DNA, 201 bp, Homo sapiens
aattttctgaaaactcatgatatagtttctaagacctaggtggttaggcatagatgtttgataatatctgtgctggagttttcatgacggactaataaacrtggttatggggcagttaataggggttttccaaagtaacattaacttacataatgtctgttgaggctccccaaactttgataagtgaaatgtgttctcata

SEQ ID NO: 201800 - DNA, 201 bp, Homo sapiens
acctggaaagaacgttgttttgtttggtatggttttttaaagaattttttgaagttctcaatgtaggtggctttcaatatagcctccttacattaatccamctgttttcatataagcattataataaatttgattagttttttccttcccaacctctaacagtagaatgtgacatttaaaaaaaattacaatatccattaa

SEQ ID NO: 201801 - DNA, 201 bp, Homo sapiens
ggtggttaggcatagatgtttgataatatctgtgctggagttttcatgacggactaataaacatggttatggggcagttaataggggttttccaaagtaayattaacttacataatgtctgttgaggctccccaaactttgataagtgaaatgtgttctcatattgaactaagagaagttcccaaattcccttcattaaac

SEQ ID NO: 201802 - DNA, 201 bp, Homo sapiens
attgaatttactgtgtttttattcacagaaagatgagccagatgctttcaaagagctggggacaggaaatagaattgctacatggctgttttatgtaagtygtcactaaaatttttagattaagttgggatttgatgacaagattcattttaatgttttaagtttgttctgtgtagctctgattcagcatcctagtttaac

SEQ ID NO: 201803 - DNA, 201 bp, Homo sapiens
ttaacatgtcacttaaagtttctgaatgaatgtggatgaatgagacatagtgctaaaacagattagagaaccattctctagagtaattagacattcagttrtacttttacataagataaattgaagtaaaatctattttaaatgcagaggtgatttcatagggttgtttgctgtatccagtggttctcagactgtgatccc

SEQ ID NO: 201804 - DNA, 201 bp, Homo sapiens
aagacaagtcttttcagggatgctatctgagattagtctttcttttaaaggagattgcatccattttgacccattaatttctttttcaagcttgtttgaakatttagaacaggaggcatttatattttataatttttgataaagtcataatgtcttttgggatacttgactcttaaatgttctataatgattctctttgca

SEQ ID NO: 201805 - DNA, 201 bp, Homo sapiens
acttatacctattattttggtataataatttttattagtgcctcctttcactcacaacagcaacctggtttggaagataaattataatgtctcctattttyatattactatattctgatgcttgaacaagcatgaacttacccatggacatgctttgtttctcttctaatagatcctgaacatcagagagctaatggtaac

SEQ ID NO: 201806 - DNA, 201 bp, Homo sapiens
atacagaagcagattattaccatacggaactgtggatggaacaagccctaaggcaactggatgaaggcgagatttctaccatagataaagtctctgttctrgattatttgagctatgcggtatatcagcagggagacctggataaggcacttttgctcacaaagaagcttcttgaactaggtatgttatctgggcctaatt

SEQ ID NO: 201807 - DNA, 201 bp, Homo sapiens
agttttattccagtgtaagtttatctttggatctttgactcttcttgggttttcttttctttcttcctcctattcctcctccctccctcctctttgtcttyttaaaaattaagacaagtcttttcagggatgctatctgagattagtctttcttttaaaggagattgcatccattttgacccattaatttctttttcaagc

SEQ ID NO: 201808 - DNA, 201 bp, Homo sapiens
atttcaaggctttatctctaacctaaccattcagagacagtactttcctaatgatgaagatcaggttggggcagccaaagctctgttacgtctccaggatwcctacaatttggatacagataccatctcaaagggtaatcttccaggtaagatcattcttccattctataaaatacctatcacctagcttctctgttgagt

SEQ ID NO: 201809 - DNA, 201 bp, Homo sapiens
tcccttttgttgccaaagggggaaataaagcagcagcctcctgaatctgggagtagtagtcttcacctatgcagttttctcatattcataaatgctgcggkgattcatatcctccttcatggtgattacgttggcatttgttcatacatcttgtaaaataacattgtcattatgtagtaatctgtattcctcctgtttgag

SEQ ID NO: 201810 - DNA, 201 bp, Homo sapiens
actgattagattaagggggaaaattaatatattacttttctctcacagtatccaataaatggctccatgaacgtggacaagaatttcgaagaccttgtacsttgtcagaattggaatgacaaacaggcttccctttttctcctattgttgtactcttatgtgtctgatatacacatttcctagtcttaactttcaggagtt

SEQ ID NO: 201811 - DNA, 201 bp, Homo sapiens
aactgtaagaaatgcacatagactggcaaatatacatgtgtatacatacatgtatgtacatacacgcacacaagtgtgtacacatatgtatataggtatakaaaatctgtgttttcagcatttagccaagtttttaagtagcatctgcctttatccggttttggtgttgaacttttatcccatgatgaaactttgttatag

SEQ ID NO: 201812 - DNA, 201 bp, Homo sapiens
ggtggatcacgtgaggtcaggagttcaagaccagcctggccaacatggtgaaaccccgtcttgactaaaaatacaaaaattagccagcatggtagcacacrcctgtaatcccagctacgtgggaggctgaggcaggagaatcgcttgaacctgggagatggagattgcagtgagctgagatcgtgtcactgcactctagcc

SEQ ID NO: 201813 - DNA, 201 bp, Homo sapiens
ttgtgtctcatttcaagcctcacattgaacattggaaactgtaagaaatgcacatagactggcaaatatacatgtgtatacatacatgtatgtacatacaygcacacaagtgtgtacacatatgtatataggtatataaaatctgtgttttcagcatttagccaagtttttaagtagcatctgcctttatccggttttggt

SEQ ID NO: 201814 - DNA, 201 bp, Homo sapiens
tccaacattaagatgtaatcctcataactgcaaagaaaatatgtatagaatatagacaaaaggaaaagggtatcaaaaatacgttactaaaaaaaaaaaarggggggtagggggagccagtaatgaggccaaaaaaaaaaaaaaaaaaaagctgccaggggcagcagcttacacctgatatcaacactttgggaagctgag

SEQ ID NO: 201815 - DNA, 201 bp, Homo sapiens
ctctcctcctgtacattcatctcttgcccagattgttggttagggatgagatagatatatctcatatggtggccgggcgcggtggcttatgcctgtaatcycagcaccttgggaggccaaggcgggtggatcacctgagatcaggagttcgagaccagcctgatcaactccatctctactaaaaatacaaaattagctggg

SEQ ID NO: 201816 - DNA, 201 bp, Homo sapiens
taacagctattagtctccatgtaatgaaacattatcaataaaactaatattcctcttattcttagtgcctggctctctggctatgaaaatcctgtggtgtstcgaattaatatgagaatacaagatctaacaggactagatgtttccacagcagaggaattacaggtaggtaatcacattatccttaagtcatttttacac

SEQ ID NO: 201817 - DNA, 201 bp, Homo sapiens
ccaacattaagatgtaatcctcataactgcaaagaaaatatgtatagaatatagacaaaaggaaaagggtatcaaaaatacgttactaaaaaaaaaaaaargggggtagggggagccagtaatgaggccaaaaaaaaaaaaaaaaaaaagctgccaggggcagcagcttacacctgatatcaacactttgggaagctgagg

SEQ ID NO: 201818 - DNA, 201 bp, Homo sapiens
ttatataaaagacttactaaaaattaaagccttggatttgactctaggtaaagtgcatggagaataaacatgaatcattatttgttttagtatactattastataataattgaaacagactactcatattcctgcttatgtgacatacttgtttttgttttgttttgtttttttgagacagcttcttgctctgtcacccag

SEQ ID NO: 201819 - DNA, 201 bp, Homo sapiens
tattagcctttgttaaccatcaagcacctagagaagaattattggaaattttgtcctctgtaactggcactttggggtgtgacttatcttttgcctttgtaaaaaaaaaaaaaaaaatatatatatatatatatatatatatatatatatatatatatatatagtggttttcgattagctaatcatagaatattcttatgt

SEQ ID NO: 201820 - DNA, 201 bp, Homo sapiens
aataaataaataaataaactgttaatttatcagaagaccaaaatgtattcttaaagacagttaattccctttttctaattaagttttaaaaatgtattttktgtgtgtgtgtgtgtgtgtgtgtgtgtgtgtgtgtgttttacagtgacacggtttgatgccatcctactccgtctttgtcagaacacgtggtcttttctt

SEQ ID NO: 201821 - DNA, 201 bp, Homo sapiens
attagcctttgttaaccatcaagcacctagagaagaattattggaaattttgtcctctgtaactggcactttggggtgtgacttatcttttgcctttgtaaaaaaaaaaaaaaaaatatatatatatatatatatatatatatatatatatatatatatatagtggttttcgattagctaatcatagaatattcttatgtg

SEQ ID NO: 201822 - DNA, 201 bp, Homo sapiens
ttagcctttgttaaccatcaagcacctagagaagaattattggaaattttgtcctctgtaactggcactttggggtgtgacttatcttttgcctttgtaaaaaaaaaaaaaaaaatatatatatatatatatatatatatatatatatatatatatatatagtggttttcgattagctaatcatagaatattcttatgtgt

SEQ ID NO: 201823 - DNA, 201 bp, Homo sapiens
taacctttaattggtatgttatttttagggaattaatatgctttttatctttcttcagatcaggtgtcaaatatccaggaagtggcctgatacttgttttmtttttcccttttgttgccaaagggggaaataaagcagcagcctcctgaatctgggagtagtagtcttcacctatgcagttttctcatattcataaatgct

SEQ ID NO: 201824 - DNA, 201 bp, Homo sapiens
catcaagcacctagagaagaattattggaaattttgtcctctgtaactggcactttggggtgtgacttatcttttgcctttgtaaaaaaaaaaaaaaaaatatatatatatatatatatatatatatatatatatatatatatatagtggttttcgattagctaatcatagaatattcttatgtgtgtgtcgggttagaag

SEQ ID NO: 201825 - DNA, 201 bp, Homo sapiens
tcaagcacctagagaagaattattggaaattttgtcctctgtaactggcactttggggtgtgacttatcttttgcctttgtaaaaaaaaaaaaaaaaatatatatatatatatatatatatatatatatatatatatatatatagtggttttcgattagctaatcatagaatattcttatgtgtgtgtcgggttagaagaa

SEQ ID NO: 201826 - DNA, 201 bp, Homo sapiens
ccaaagtcagggcctacttgagaagaaagttcagaggagcctgagtagttgggtcaaggagagattctttgtcaacatgttaattctgttattttaacatwaaaaattcatagcctatttggaatttatggaaatacggtgtggcagatattctgtgaaacctttttaccagttaaaaaaaaaaaaccaaacacctagata

SEQ ID NO: 201827 - DNA, 201 bp, Homo sapiens
tgctaaccagagacaattacactttggtgaatttcctctgcatatgttcttgcatagttatgactgtattatgatgttaatttttcttcgttttgaccagkgttaatttatttataactttgtgttggggtaatgaaaacataatcttagtcaatatagattccaccaaggttgtatgataatttttaaatcttgtttttt

SEQ ID NO: 201828 - DNA, 201 bp, Homo sapiens
cccttcgacaggaataattaaattggtgttaatttctttccttttttagcagggaaaaaatatgtaagaaaagatattttattaaagtggattgcgagttvagcatttggggctttggaaaacattttttgatttaagttccaaaggaaagtgtttagtgaaacaaaataatagaaatctcaaattttagcttatgtatta

SEQ ID NO: 201829 - DNA, 201 bp, Homo sapiens
attttatttctcctttatttagaaagcttagtttggctggatatgaaattctgggttgaaaattcttttttttaagaatgttgaatattggcccccactcycttcttgcttgtagggtttctgcagagagatccactgttagtctgatgggcctccctttgtgggtaacccgacctttctctctggctgcccttaagattt

SEQ ID NO: 201830 - DNA, 201 bp, Homo sapiens
taattgtgaattgttctccatagggaactgctgttttctggtataatctgtttgccagtggagaaggagattatagtacacggcatgcagcctgtccagtrctagttggcaacaaatggggtaaatatttcatatattctgcgaagataatgtaatttttgtttcttattttggaactattatctgtgtcttaaaaacaaa

SEQ ID NO: 201831 - DNA, 201 bp, Homo sapiens
tatttgagacgctgaggcaggagaatcacttcaacctgggaggtggaggttgcagtgagctgagatcgtgccattgcactccagcctgggcgatagagcargactctgtctcaaaaaaaaaaaaaaagtaataactaccgaaagcaattacctggcattgtatacttggggataattgtgaattgttctccatagggaact

SEQ ID NO: 201832 - DNA, 201 bp, Homo sapiens
acatgttagataccaggttctaatgtgaggctcgagtagcacctaatgtgcaaaatttaaagaggcactcactctcagtcagggacatgcaagtgcaggabcacatttttaaaaagtaaaaagaaacaggtaaaattagttttaatatctattaattagccccatgtatccatttcaatctgtgttactagccacatgttg

SEQ ID NO: 201833 - DNA, 201 bp, Homo sapiens
tgagaattcctgtcttttatttaatgagtagctaagtgttcagtttttcattttaagatacagtttctagaaactggatgtaaaaatttagtataagttgrtttaaatgaacatgtaattgaatttgggttgggctaatttgtagtttgtaataatcagttatttggccctgggacctaagtctaaaatttttagactttt

SEQ ID NO: 201834 - DNA, 201 bp, Homo sapiens
agggggtgggggtcagtaatagaaaatgtcatatgtacaaaattcaatttgcttcatgtggaagttgaatgttcacccttctggtcacttgcatcactgtcttggtaagttaataaggtaactatagcaaacagtagattctccagacatctctggagctcactcagctatcagtgtaccacactgcctcagaggtgggac

SEQ ID NO: 201835 - DNA, 201 bp, Homo sapiens; identical to SEQ ID NO: 35587

SEQ ID NO: 201836 - DNA, 201 bp, Homo sapiens; identical to SEQ ID NO: 35589

SEQ ID NO: 201837 - DNA, 201 bp, Homo sapiens; identical to SEQ ID NO: 35615

SEQ ID NO: 201838 - DNA, 201 bp, Homo sapiens; identical to SEQ ID NO: 35616

SEQ ID NO: 201839 - DNA, 201 bp, Homo sapiens; identical to SEQ ID NO: 35617

SEQ ID NO: 201840 - DNA, 201 bp, Homo sapiens; identical to SEQ ID NO: 35601

SEQ ID NO: 201841 - DNA, 201 bp, Homo sapiens; identical to SEQ ID NO: 35602

SEQ ID NO: 201842 - DNA, 201 bp, Homo sapiens; identical to SEQ ID NO: 35609

SEQ ID NO: 201843 - DNA, 201 bp, Homo sapiens; identical to SEQ ID NO: 35621

SEQ ID NO: 201844 - DNA, 201 bp, Homo sapiens
ggccccggcgttgtgctttcccacccttctagagtttctggagtccctggagccggacctgcccgccctgagagccatggggctccacctgtgggctgcasgcccaggaacccaccctgctggaattagcgatttgctggctgaagtgtccgctgaagtggatgggccagtgccaggatacctctcttccccccagagcat

SEQ ID NO: 201845 - DNA, 201 bp, Homo sapiens; identical to SEQ ID NO: 35603

SEQ ID NO: 201846 - DNA, 201 bp, Homo sapiens; identical to SEQ ID NO: 35611

SEQ ID NO: 201847 - DNA, 201 bp, Homo sapiens; identical to SEQ ID NO: 35622

SEQ ID NO: 201848 - DNA, 201 bp, Homo sapiens
cgggaggcacccctcgcccggagacccccgtggggcttggcaaaaaaaaaaaaacccatctcgggcgctgctgggggcggaaaggcgtcaggcgcatggasccaacatactccctggcagcctccgcccggcgggcccctgcagggcggtgcttcgcgcctacgtaaacccgacctcgctgcgcaagcgcaaatcggtgcc

SEQ ID NO: 201849 - DNA, 201 bp, Homo sapiens; identical to SEQ ID NO: 35605

SEQ ID NO: 201850 - DNA, 201 bp, Homo sapiens
gggataaaacaacctgtgcgtgctgtttaataagctcccagacatctgattgtttttccttccctgctctcccttttcttcctctagtttttagccagacsccaattctccaggcgctgcagcatgtccaagcgagctgtgacgaagcccacaagatgaagtgaggctcctgccactttgggccttggaaagtagtagggg

SEQ ID NO: 201851 - DNA, 201 bp, Homo sapiens
aactctcagcccccacccatcccctggggttgcggctggcaggccgggacttgcagaaccaaatgggccaggggccaagttcattcttttgggagagagcmatggtaccttcccttaacgggaaaacgagaaatattgaggggaagatggactgcgatccaaacgccctggctctcaggcctggactctagggcttagcca

SEQ ID NO: 201852 - DNA, 201 bp, Homo sapiens; identical to SEQ ID NO: 35623

SEQ ID NO: 201853 - DNA, 201 bp, Homo sapiens; identical to SEQ ID NO: 35606

SEQ ID NO: 201854 - DNA, 201 bp, Homo sapiens
tgttgttgttgttgttgttattattattattattattattattattatttgagatggagtctcgctctgtcatccaggctgtagcgcagtggcgcagtctyggctcactgcaagcttcgcctcccaggttcacgccattctcctgcctcagcctcccgagtagctgggactacaggcacccaccaccatgcccggctgatt

SEQ ID NO: 201855 - DNA, 201 bp, Homo sapiens
tataaatacattcagcatttctggaaacagatttattagatctttccatttacctttgggaaaaaaatatagaggactcaaggcaattattcactatattmtttctatcatgtattatttaatctcaagctaggagaggaactctgttttacatgatgccataatgtacattagtgagctcaacccacttaatcttaaaat

SEQ ID NO: 201856 - DNA, 201 bp, Homo sapiens
ctgtgcccagcgcggctcttgtcttgagtttatgatctagtgagaaaggcaggtattaaacaaatacatggccagttatgatggtctataatggacatcawcagttccttctctttgtgtatatgcatgctatttttcatgtctagaaatagagtctaattcccctctccttgaatctgggctggtcaatagaatgtggca

SEQ ID NO: 201857 - DNA, 201 bp, Homo sapiens
ctctttttgtcagacttcaggcccatataaatttccagcttgtttaaaacatttttgccttggctaccttgtacaatgggatctttttagcctctttcttrtgaaaacctcataccttggaatttctcttactattgatagaaaaattatgcacatggtagagaaaagctcaatctaacttgtcttcataggacttccata

SEQ ID NO: 201858 - DNA, 201 bp, Homo sapiens
acactcacaatgttgtgtaatcatcaccaccatccatctccaaaactttttcatcagcccaaatcagacttcatacccattaaacaataactttccatttyttccttcccccatcccctgccatcccctagtaacctctattctacttttcatgtctatgaattgcctatttttggtctaggtactgcatgtaagtgtaat

SEQ ID NO: 201859 - DNA, 201 bp, Homo sapiens
ccccgtgtctactaaaaatacaaaaattagccaggcgtgatggcaggtgcctgtaatctcagcttctagggaggctgaggcaggagaatcacttgaacctrggaggcagagattgcagtgagctgagatcacgccactgtactccagcctgggcaatacagtctcaatctcaaatagtaataataataatttttattttta

SEQ ID NO: 201860 - DNA, 201 bp, Homo sapiens
gtgatgaggattactaaaacaagagatggaaagaagaatgtagtaaaggagttgagcaagtaacaacagcaaaaaaagtgaaaagagaccaaagaaaaggwggcactgaagcatagcattgaatgaagtacatatgcaactaggagcaagcattataaaatatgagcagcagtgtgggttgtttacttagaagtaaagttg

SEQ ID NO: 201861 - DNA, 201 bp, Homo sapiens
aaaccactcttttcttatctatatgcaggaagaaatgagtagtctcctacagtaataaccactcattgtaaatgctgtcattgtaaatgctgtcaactacctccatagctgcagtcctcaccagagactttcagctattgcacactcaaaggtcatgttctctcatagtacaaaataatccctggtatccccaaaagccaa

SEQ ID NO: 201862 - DNA, 201 bp, Homo sapiens
tctttttacttttttctctaaacttctcttctggcttcatttcattcatttgatcttcagtcactgataccctttcttccacttgatcaaatcggctaccraagcttgtgcatgcatcacgtagttctcgtgccatggttttcagctccatcaggtcatttaagggcttctctacaatgtttattctagttagccgttcat

SEQ ID NO: 201863 - DNA, 201 bp, Homo sapiens
ggaggcggaggttgcagtgagtcgagatcgcgccactgcgctccaggctgggcgacagagcgagactccatctcaaaaaaaaaaaaaaaaaaaaaaaaaaattgctgggcgtagtggcttgtgcctgtagtcctagtacacaggaggctgaggcggaaggattgcttgagtccaggagtttgaggctgcagtgagccaaga

SEQ ID NO: 201864 - DNA, 201 bp, Homo sapiens
atgggtctcctgaatacagcacactgatgggtcttgactctttatccaatttggcagtctgtgtcttttaattggagcatttagcccatttacatttaagrttaatattgttatgtgtgaatttgatcctgtcattatgatattagctggttattttgctggttagttgatgcagtttcttcctcgcatcgatggtcttta

SEQ ID NO: 201865 - DNA, 201 bp, Homo sapiens
ttcaggatcaggttgttcagtttccatgtagttgagcggttttcagtgagtttcttaatcctgagttctagtttgattgcattgtggtctgagagacagtttgttataatttctcttcttttacatttgctgaggagtgctttacttccaactatgtggtcaattttggaataagtgtgatgtggtgctgagaacaatgta

SEQ ID NO: 201866 - DNA, 201 bp, Homo sapiens
attcaggatcaggttgttcagtttccatgtagttgagcggttttcagtgagtttcttaatcctgagttctagtttgattgcattgtggtctgagagacagtttgttataatttctcttcttttacatttgctgaggagtgctttacttccaactatgtggtcaattttggaataagtgtgatgtggtgctgagaacaatgt

SEQ ID NO: 201867 - DNA, 201 bp, Homo sapiens
agctactcgggaggctgaggtaggagaatcgcttgaaccagagaggcagaggttgcagggagctgagaatgcaccattgcactccagcctgggcgacaagrgtgaaactctgtctcaaaaaaaaaaaaaaaaattggccgggcacagtggctcacgcctgtaatcctagcactttgggaggccgaggcgggtggatcacga

SEQ ID NO: 201868 - DNA, 201 bp, Homo sapiens
tggggaggcctcaggaaatgtacaatcatggtggaaggcaaaggggagtaaggcttctggcgtggtgcaagtaagagagagggcaggagggaggtgctacrtgcttttaaaggacatgttggggccaggtgcagtggctcatacctgtaatcgcagcactttgggagacagaggtgggtggatcacctgatgtcaggagtt

SEQ ID NO: 201869 - DNA, 201 bp, Homo sapiens
cattcaggatcaggttgttcagtttccatgtagttgagcggttttcagtgagtttcttaatcctgagttctagtttgattgcattgtggtctgagagacagtttgttataatttctcttcttttacatttgctgaggagtgctttacttccaactatgtggtcaattttggaataagtgtgatgtggtgctgagaacaatg

SEQ ID NO: 201870 - DNA, 201 bp, Homo sapiens
ggttacagtgagccgagatcacgccactgcactccagcctgggagaaagagtgaaactctgtctcaaaaaaaaacaaaaaacaaacaacaaaaaaaaaaaaccttaactttgtatcaagttaaaagatacaaaaattcaagaaatcagttgtaacacaacttctcactaattatattaaattttatatctaccagtaaata

SEQ ID NO: 201871 - DNA, 201 bp, Homo sapiens; identical to SEQ ID NO: 35659

SEQ ID NO: 201872 - DNA, 201 bp, Homo sapiens
ggtcaaaaccactcttttcttatctatatgcaggaagaaatgagtagtctcctacagtaataaccactcattgtaaatgctgtcattgtaaatgctgtcaactacctccatagctgcagtcctcaccagagactttcagctattgcacactcaaaggtcatgttctctcatagtacaaaataatccctggtatccccaaaa

SEQ ID NO: 201873 - DNA, 201 bp, Homo sapiens
tcattcaggatcaggttgttcagtttccatgtagttgagcggttttcagtgagtttcttaatcctgagttctagtttgattgcattgtggtctgagagacagtttgttataatttctcttcttttacatttgctgaggagtgctttacttccaactatgtggtcaattttggaataagtgtgatgtggtgctgagaacaat

SEQ ID NO: 201874 - DNA, 201 bp, Homo sapiens
aaagatttaggtgaaaaggcaaagaccttatttatgattagatatgttttatatcaaaatatgacagtaatgaatataggagaatgaatcttatgcatctrtagttactctttgaaaataacattgctggctgctatctgaatcacctgttgttcagttattttttttcccttaggaaattgtgttttgtatatttttaaa

SEQ ID NO: 201875 - DNA, 201 bp, Homo sapiens
tgaacctgggaggcagaggttgcagtgagccgagatcatgtcactgcactccagcctggtgacagagcaagactccatctcaaaaaaaaaaaaaaaaaaaatgctggtcataggccgggcatggtggctcacacctgtaatcccagcactttgggaggccgaggcgggcagatcacctgaggtcaggagttcgagtccagc

SEQ ID NO: 201876 - DNA, 201 bp, Homo sapiens
cacaatggttgaactagtttacctcccaccaacagtgtaaaagtgttcctatttctccacatcctctccagcacctgttgtttcctgactttttaatgatygccattctaactggtgtgagatggtatctcattgtggttttgatttgcatttctctgatgaccagtgatgttgagcattttttcatgtgtcttttggctg

SEQ ID NO: 201877 - DNA, 201 bp, Homo sapiens
tcaagtgcaaccagaggttgcagtgagccaagatcaagccactgcactccagcctgggcaacagagcaagacttcgtatcaaaaaaaaaaaaaaaaaaaaagagagatggaaacagggagaatgactagaagagttgaagttgatagcctctgcagcttagagaagaatggggaagcgtctttcattataagtcttgtaat

SEQ ID NO: 201878 - DNA, 201 bp, Homo sapiens
tatataccctcaatatgctatgatgaaaaatggcactttatctctgtgatctttgtcacaaaagtctgtaacaccaatctaaccatgagaaaaacaaatamtttttttttttttttttgaggcggagtcttgctctgtctcccagactggagtgcagtgcagtggtgcaatcttgactcactgcagcctccacctcccagg

SEQ ID NO: 201879 - DNA, 201 bp, Homo sapiens
tatagctgaatgccattgtgttagcagtcttaactacaacataacagggaacctgaagcctaaactaatggcactatttggtgtcttatgtgatttgctastatttgtaaactaaaatttttacctggagaatatttattgttttggatttcagcataattagcatatggtcctgattttggtacccacgacatagttttt

SEQ ID NO: 201880 - DNA, 201 bp, Homo sapiens
gccattgcacaccagcctgggtgacagagtgggactccgtctcaacaacaaaagtttaagttataggaagtatcattttggtggttagtataactttattmtgataggcctgaatattttttaatgttttttccccaaatctttcatagtgtgacatcaaaggcttgatatagtttggatatttgtcctgtccgaatttca

SEQ ID NO: 201881 - DNA, 201 bp, Homo sapiens
gcaatgcatactgggtgggagctctcattgtctttatttaacaagtacaaaacttgaggcacacaacagaggtttaacagagaggttaaataagttgtctrtggtcacacaagtaacaagtagtagatttatatttaattcagaacatctttatctacaagcatattttaggactacatgttggcactgatgaaaataata

SEQ ID NO: 201882 - DNA, 201 bp, Homo sapiens
tataattatcaaaatcagaaaactgacattggtacaatactatttattaactaaactactgaccttatttggatttcaccaggtttttgtttgtttgtttkttttttgagatggagcctcgctctgttaccaggctggagtgcagtggtgtggtcttagctcactgcaccctcgcctcctgggaacaagcgattctccttc

SEQ ID NO: 201883 - DNA, 201 bp, Homo sapiens; identical to SEQ ID NO: 35653

SEQ ID NO: 201884 - DNA, 201 bp, Homo sapiens
ggaggaaggaagaaaggaagtcaggtagacttgaatctatagattgagagagtacatcatgagccagggaaaatgtacatagaacaattataataaggcamaacctagtcatgttattggactccaaaaattaaagaatgattccagaaaaaaagaaaaaaacatatgagagggagaaagatttggacttacttcagaatt

SEQ ID NO: 201885 - DNA, 201 bp, Homo sapiens
ggaaacaaagcaaatgaaaaaaataaagcagttaacaactccaggaaaaacaaaatacagtcaggcaccccacaacaacattttagtcaataacaggccayatatacaatggtagtcccataaaattgtaatagagctgccctgctctatatagatgtaccgtttttatgttataccatatttttactgtactttttctat

SEQ ID NO: 201886 - DNA, 201 bp, Homo sapiens; identical to SEQ ID NO: 35658

SEQ ID NO: 201887 - DNA, 201 bp, Homo sapiens
ttgcccaggctggtctcaaactcctgggctcaagtgatctacttgccttggcctcccaaaatgttaggattacaggcgtgagccactgtgcttggcctctrtggcactttaatttgacattgacctttatcttttaattaagtattatttacttttgtttttattctccagcatttatataaaatttttgaggcatatgga

SEQ ID NO: 201888 - DNA, 201 bp, Homo sapiens
atggagtgtcaccatgttggccagcctggtctcgaactcctgacctcaggtgatctgccgaactcggcctcccaaaatgttggtattatacgcatgagccmccgtgcccagccaaaatttatttcctttttaaggctgaataatattctgttgtatatatgtaccacattttgcttatccattcatcagtcagttgatacc

SEQ ID NO: 201889 - DNA, 201 bp, Homo sapiens
caaatgaaaattattacatactgttgcctgaagggagctcaggactcagtgcgagttcagtgcgtcacagatctcctaagtgagacagatctgagatttamacacttgagcagatgataaagcagcaaactgcttaatggttgatgtggaatcttatgattaggcttttgtcaagacaaagcacagggttggaagatcctc

SEQ ID NO: 201890 - DNA, 201 bp, Homo sapiens
gggacgaataaaagaatttttaatttttaaaaataattacagaagtagatacagacaaaaaataagactcctgccctgtgacttaaacattaactcttttyaaaatgggcttggagagatcagggtaatcatttaatccattttttgatagcatagttatgctacaagcaataatggggcttagaattaatgaaacaataa

SEQ ID NO: 201891 - DNA, 201 bp, Homo sapiens
tcttgaggcagtaataagtggtcaggttctggatatattttgagagaagaagcaataggacttgtttatgtggtgtacgtgaagggaagaatcaaggaagsataaattcaatgattttgactagagcaactggaagaatggaattgccccttactaagatggagaagagcaagcttaaagggaaaaatcaagagattggtt

SEQ ID NO: 201892 - DNA, 201 bp, Homo sapiens
tgttctgttccaaactaacagttgcagcagtcttttaattgaagcactaaaacaagatttttgggaacagtgtgactcagatcacatttatttttagaggyggaattcaaaaaataataatgatgataatcatatagtcaggtagaataggggatgggaactttagtaaattggtgaaggacactgaatcccatattggat

SEQ ID NO: 201893 - DNA, 201 bp, Homo sapiens
cttatataaccatagtataattatcaaaatcagaaaactgacattggtacaatactatttattaactaaactactgaccttatttggatttcaccaggttkttgtttgtttgtttgttttttgagatggagcctcgctctgttaccaggctggagtgcagtggtgtggtcttagctcactgcaccctcgcctcctgggaac

SEQ ID NO: 201894 - DNA, 201 bp, Homo sapiens
aagatctaaaccagctgcctggccaattgttcagagaggtgttggatctcaaaggttggttatttgggttttcatatcagccgttaatttagtgatgttayctgattcatctgggatatagacataagactcaatttttatgatagctcaggtttccccttgggctgcagtatgtctaaagccatatggttctgcaataca

SEQ ID NO: 201895 - DNA, 201 bp, Homo sapiens
aaaaaaaaaaaaataataataataataataattggccaggcaaggtggctcacgcctgtaaccccagcactttgggaggttgaggtgggcagatcacccgwggtcaggagttcgagaccagcttggccaacatggtgaaaccccgtgtctactaaaaatacaaaaattagccaggcgtgatggcaggtgcctgtaatctca

SEQ ID NO: 201896 - DNA, 201 bp, Homo sapiens
tgtatcagaatataaatatatatatatatatatatatattttttttttttttttttgagacagggtcttactctgtcagccaggttggagtgcagtggcgygatctcagctcaccgcaacctccacctcccaggcccgagtgatcctcccacctcagcctcctgagtagctgggcctatggcgcatgaccaccatgcctgg

SEQ ID NO: 201897 - DNA, 201 bp, Homo sapiens
tccttgtgtgcctgtcttatttcacatagcataatgttttcaaggttcatgcatgttgtagcatgtatcagaatataaatatatatatatatatatatatattttttttttttttttttgagacagggtcttactctgtcagccaggttggagtgcagtggcgcgatctcagctcaccgcaacctccacctcccaggcccg

SEQ ID NO: 201898 - DNA, 201 bp, Homo sapiens
ctgcatgtaagtgtaatcatataatatttgtccttgtgtgcctgtcttatttcacatagcataatgttttcaaggttcatgcatgttgtagcatgtatcakaatataaatatatatatatatatatatatattttttttttttttttttgagacagggtcttactctgtcagccaggttggagtgcagtggcgcgatctca

SEQ ID NO: 201899 - DNA, 201 bp, Homo sapiens
actgcatgtaagtgtaatcatataatatttgtccttgtgtgcctgtcttatttcacatagcataatgttttcaaggttcatgcatgttgtagcatgtatcagaatataaatatatatatatatatatatatattttttttttttttttttgagacagggtcttactctgtcagccaggttggagtgcagtggcgcgatctc

SEQ ID NO: 201900 - DNA, 201 bp, Homo sapiens
ccactatatggtcggttttctgttcttttcttttttttgagacagagccttactctctcacccaggctggagtacagtggcacaatcttggctctgtgcarcttccacctcccgggttcaagcgattctcctgcttcagcctcccgagtaggtgggattacaggcacgcgctactatgcctggaaaatttttgtatttttg

SEQ ID NO: 201901 - DNA, 201 bp, Homo sapiens
acaaacaaaagtttctttgtcagttttcaaatagtttatctcccctttttagactatcagtctcttgattagctattctattgtggtaaatagttgttagstagacaacagcaaatctgcactttcaaaggcatgattgttaggtgaaaatttacatccctaggcacagaatttagatctaaacagcattatttgctgaga

SEQ ID NO: 201902 - DNA, 201 bp, Homo sapiens
tactgcatgtaagtgtaatcatataatatttgtccttgtgtgcctgtcttatttcacatagcataatgttttcaaggttcatgcatgttgtagcatgtatmagaatataaatatatatatatatatatatatattttttttttttttttttgagacagggtcttactctgtcagccaggttggagtgcagtggcgcgatct

SEQ ID NO: 201903 - DNA, 201 bp, Homo sapiens
agctactttgtcaaatggatgcaataggatccatattgatctttgtgaaggaatatctttattaatataagcaaacacgcctctcacttatagtaatgtaraggtgtgggctttttcttttagtagtattgtttccccaacatatatcactttcctttgaaatgtgggctgagtcataaattaatgtcacaaatgagggag

SEQ ID NO: 201904 - DNA, 201 bp, Homo sapiens
attgtcagtgaaataatggacatattggaagtgcaaaaggagaatacacacttctggaaaacatagtaagggacatgggaagctagagaaaaaaatgagcraaatgaaatggaaattaaccaagtgtttaaaaggaatagagagccaatgtaagatgtagaacatggataaagtagaataattgtctctgaagaataaagc

SEQ ID NO: 201905 - DNA, 201 bp, Homo sapiens
aactcaggtgtgtctgactccaaagcttgttatcttgctgcctctgtacagtatactgattagagttaagatatagatgcaggctgggcgcggtggctcaygcctgtaatctcagcactttgggaggccaaggcaggggatcacaaggtcaagagatcaagaccatcctggccaatatggtgaaaccccgtctctactaaa

SEQ ID NO: 201906 - DNA, 201 bp, Homo sapiens
ggtattgcccttcccctaggtcagttaggctctgataaaccccatcacattagactctggttagctagtttcttctgaaagaagaccttattaagaagaasagggtgctctgccgcatttcaacatggttccttttcccctcctcttgccagattcatgaggggatttttttctgatactcactgtgatgacctggtagag

SEQ ID NO: 201907 - DNA, 201 bp, Homo sapiens
ggcatgagccacccggcctgttgttttaatttaatattttatgcttcagtttcctcttttttagcatataaattatgcttctttttatactttttttttttaaggcggggttttgctcttgttgcccaagcaggagtgcaatcgcatgatctcggctcactgcaaactctgtgtcctgggttcaagcaattctcctgcctc

SEQ ID NO: 201908 - DNA, 201 bp, Homo sapiens
taaaattccgtccaatgtgtttactgtaaactgctactccctacatattatgctttgttcatctaacaaatattttgaaagttttttcattcttttctcargcatataaacaatgtcacccaaagaattaagaatgttttggagttttttcacttccataaaaaacgtcattgttaccaaattcaacagatgtgattgaga

SEQ ID NO: 201909 - DNA, 201 bp, Homo sapiens
gtaaacttacgtccacacagaaacctgcaaaggaatgtttacagcagctttattcataactgcccccaaactggatgcaacagattgtcccttgataggcraatggataaccaaactattgtgatacattcatacaatggaatgttattaagcgatcaaaagaaaggagatattaaaccaggaaaagacatggagaaaata

SEQ ID NO: 201910 - DNA, 201 bp, Homo sapiens
ggaaaaaataatataattcaggaggccacgggatttgggaaagaaagcagactgtgacaagagcatctaactgtattacaaatatatgaaacaacctcacygaagggatggggagaaaagtgctaccctaactttgaaaatgactggagtctgtaaaactaaaggccaaaggaactgtacaagagtacttactcaagttga

SEQ ID NO: 201911 - DNA, 201 bp, Homo sapiens
aaggctaaaatgctaaagggcaagaattaggttgtaaacatgttctttatgcaatctaatatgttattacataaatatgagatgacaatcattaaattcasctatcactgattttgcaaaaggaatgatctcttaagttctgagatttgatttctggcaactctgaatatttattagttcaaagtggttcaaggcagctta

SEQ ID NO: 201912 - DNA, 201 bp, Homo sapiens
tttcaccgtgtcagtcaggatggtctccatctcctgcctcatgatctgcccgccttggcctcccaaagtgctgggattacaggcatgagccaccgcacccrgccgacttttaaactttttaactagcgatataatattttcagtcttttggccttctgcagctacctttccaaaaaaattgtggaatcttagttaagtgtt

SEQ ID NO: 201913 - DNA, 201 bp, Homo sapiens
ccaaggaataagactctgtaagaaggtgggatttattattgataatgcagctctggtgtcattaagagcttgtgtttggggccaggcgcagtggttcatgyctataatcccagcactttgggatgccaagatgggtcgactgcttgagttcaagagtttaagaccagcctgggcagcaaggcaaaaccctgtctctacaaa

SEQ ID NO: 201914 - DNA, 201 bp, Homo sapiens
cccagccataacttttattttttataaaaaatataataaaaactatggaagataggagagaaagtacagtaaccacgacccccccagtcttagggggatgygttccaagacccccagtggatgactgaactacagatagtaccagacccagttgctgattgtattaattgaaacacgtttcagttcatgttttccacccac

SEQ ID NO: 201915 - DNA, 201 bp, Homo sapiens; identical to SEQ ID NO: 35654

SEQ ID NO: 201916 - DNA, 201 bp, Homo sapiens; identical to SEQ ID NO: 35656

SEQ ID NO: 201917 - DNA, 201 bp, Homo sapiens
acagtaaaatcatttgaacatcatagaaatttacccaagttaccaaattatcagaaacaactgtctgtactgacaagctgcataactgagcattccccccmacacccgccccctgttgctgtcagtgtgcatcatttcctttccttcttttgagatggagtttcattctgtcacccaggccggagtgcagtgacgtgatct

SEQ ID NO: 201918 - DNA, 201 bp, Homo sapiens
attaataggcagaagactatagccttaattttatcagtaggttaggaagcattttcctatatttaatctctatattgctttcagtttttggctttcttgargataaccaaaatgtcaattactagggaattctacaatctgagagtgataatttgaaatctgttataatgacataaagatttattttttgatatttttata

SEQ ID NO: 201919 - DNA, 201 bp, Homo sapiens
attataggcacccgccaccacacccagctaatttttgtatttttagtagagacagggtttcaccatgttggccagatctcaatctcttggcctcatgatcygcccgccttggcctctcaaagtgctgggattacaggcatgagccattacgcccagccgaattttactactttttaagtgggtgtttaataattatgttgg

SEQ ID NO: 201920 - DNA, 201 bp, Homo sapiens
ctgaaaagaaaatcagtacatcttgaagataagttaaaaaaattaccttaactgaaacacaacagaaaaaaatgaagggaaaacaaaatcaacccagaacrtaatatacaaaagctgtgggacagtatctgtgtaaaatatgcacaactagaatcctagaaggagaagagaaagataatgggcagaagaaatattcgaaga

SEQ ID NO: 201921 - DNA, 201 bp, Homo sapiens
gtgttctatttatctggaatggacggtgttaaatattaatatttttatttaattcattagggaaaaatgggtgaactaatatatctgtaataccataaaayaggactctgccttttaacgcagaaaatttggaatttatcctttgcactattgtctcaaaagtgacaatcttcttggcaaccaaattgcattacatcttca

SEQ ID NO: 201922 - DNA, 201 bp, Homo sapiens
acctgcttcagcctctcataatgctgggattacaagcgtgagccactgtggccggcccgccatagccatatttctaattacgttttttgtttcttgaatayacaagaagtactataactgtattaatctatgcttgcattgctataaagaaatacctgagactgggtaatttataaacaaaagaggtttaattggcttacg

SEQ ID NO: 201923 - DNA, 201 bp, Homo sapiens
ttttaatcagactgagtttaaattctacctctacttgcttagttgactgatcttgggaaaaattatttaacctctctgtgcttcagtttctctatctgtamggttaatagggttactgagagaattaaatgaaaaaatatgtaacagcttttagtaaagtacatgccatatagtaaggatttttattatctatccaaatca

SEQ ID NO: 201924 - DNA, 201 bp, Homo sapiens
attacttgtttatatctgtacaattctgtatttacaaggtctcaacatctattttatccacatcgataagtagaatttaatacttctatataaactgtgtrtataccacttttattttattttgcgacagggtttcactctgttgcccaagctgaagtgcagcagcgcaatcttggctcactgcaacctctgtctcctggg

SEQ ID NO: 201925 - DNA, 201 bp, Homo sapiens
ttttgttttgctaataattctctggaaaatattaatcttgagttctgtattctaatgtttagtaatatgtgttcattttattttattttattttttgagayggagttttgctattgttgccgaggctgtaatgcaatggcgcgatctctgctcactgcagcccccacctcccggattcaagcgatctcctgcctcagcctc

SEQ ID NO: 201926 - DNA, 201 bp, Homo sapiens
attatctttatgatactcatttctagtttaattctgctgtgatctgaataagacattgtataatttttattcatttaaatttcttaatgcatgttttatggcccagaatgtggtctatctggatgaatgttccctatgagtttgagaagaatgtgtattctgctgttggatgaagtagtctgtagatgtaaattatattca

SEQ ID NO: 201927 - DNA, 201 bp, Homo sapiens
tccaattatctttatgatactcatttctagtttaattctgctgtgatctgaataagacattgtataatttttattcatttaaatttcttaatgcatgtttdatggcccagaatgtggtctatctggatgaatgttccctatgagtttgagaagaatgtgtattctgctgttggatgaagtagtctgtagatgtaaattata

SEQ ID NO: 201928 - DNA, 201 bp, Homo sapiens
tggtgttgtagttttaatttcacattccccacttattcattgctggtgaccaacatggagaaaccccatctctactaaaaatacaaaaaaaaaaaaaaaaatcagccggatgtggtggtgtatgcctgtaatcccagctacttggggaggctgaggcaggagaatcgcttgaacccagaaggcggaggttttggtgagccg

SEQ ID NO: 201929 - DNA, 201 bp, Homo sapiens
aggctgcagtgctgtatgatagtgatgtgaatagccactacactccagcctggacaacatgggctccgtggctaaaataagaacaaattttgataaatacrtatattgtttctctttataaatctttatcaaataagatgatgaaatccaaaattgtaactgttattatggtggttgatctctgccccccaattttccaca

SEQ ID NO: 201930 - DNA, 201 bp, Homo sapiens
cccaagtagctgggattacatgtaccaccacgcccagctaattttgtatttttagtaaagatggggtttctccatgtttgtcagggtggtctcaaaccccygacctcaggtgatctgcctgccttggcctcccaaagttttgggattacaggcatgagccactcgcacctggtgaaattaaataaattttaaatgaatgaa

SEQ ID NO: 201931 - DNA, 201 bp, Homo sapiens
agtgattctcctgcatcagcctcccaagtagctgggattacatgtaccaccacgcccagctaattttgtatttttagtaaagatggggtttctccatgttkgtcagggtggtctcaaacccctgacctcaggtgatctgcctgccttggcctcccaaagttttgggattacaggcatgagccactcgcacctggtgaaatt

SEQ ID NO: 201932 - DNA, 201 bp, Homo sapiens
aggaagatttgcaggctttgaaagggtatgaagtattagaccttgtgcccaggcataactcaaagaatactgtcctaaccatcctgggagtaaccatggcbatggattggtgtcacacagccaatatagtccatttggagctagccagtaaatacacaatgcccattcagtggcatgccagtcagttttttgtaatataat

SEQ ID NO: 201933 - DNA, 201 bp, Homo sapiens
cccaaatttgtgttataccatccccaattcaagttgtctcatttttcagttgacaacttgatttcagttggggcagtactagcattaaagctaacatactsgctttaggccgggtgcgctggctcatgcctgtaatcccagcactttgggaggccgaggcgggcagaccgcctgaggtcaggaattcgcgaccagtttgac

SEQ ID NO: 201934 - DNA, 201 bp, Homo sapiens
gggtatgaagtattagaccttgtgcccaggcataactcaaagaatactgtcctaaccatcctgggagtaaccatggccatggattggtgtcacacagccadtatagtccatttggagctagccagtaaatacacaatgcccattcagtggcatgccagtcagttttttgtaatataatggtgtgcatacagtattccttag

SEQ ID NO: 201935 - DNA, 201 bp, Homo sapiens
cctacccccaggttcaagcgattctcttgcatcagcctcccgagtagctgggattacaggtgaccaccaccacgcccagctacttttttctgtatttttartagagacagggtttcgacatgctggccaggctggtctcaaactcctgtcctcaggtgatccacctgcctcagcctcccaaagtgttgggattacaggtgt

SEQ ID NO: 201936 - DNA, 201 bp, Homo sapiens
caattaggtgcagtattttcagtccattaagtagatgggatggggtggggagaaagcagatggcttagctacacagatgaaagtctaaaatagaaaggtcmaggctttgcctttcatcccagttctggtttttataggcctgaaatagaaacggtttacaattgcgtttctcaatggaattgttccgaaataatgacagag

SEQ ID NO: 201937 - DNA, 201 bp, Homo sapiens
atccccaaatctcaaaggcttaacataatgttagtttatttcttgcttatatagagttccttcagtggagaaggaggagctgtgttctgtgaagtcattarggaacccaggctgatggagactctgtcctttttaacctgtggtttccaacgttgctctaggcatcaacatttatccagcaaatataagggagtagagaat

SEQ ID NO: 201938 - DNA, 201 bp, Homo sapiens
agttatcttaatgacacattttgttcataccagatattaaaaatattattttaccacgtaatgtacataattattagtaagatattttacagtctttttttgtaccaaatctttgaaatctgttgtgtattttacatttgcaacatttctcaattcaaagtagctacatttcaggtgcttagtagctacgtgtggatagca

SEQ ID NO: 201939 - DNA, 201 bp, Homo sapiens
cattatggtaagctttgcctgtgtctgaatgcccagccttaacagtgttgctaatcacttatgcgaaatgtgtgaccaagtctacatttgctggaaatttytgacattgtaaatatttgggtatattgttgtaatcatcattaattagtattttcaggaaggaaccaggggtaacatatagcaacctagcaagtggattta

SEQ ID NO: 201940 - DNA, 201 bp, Homo sapiens
atgtcttatgataattgttgaacttggatacatgagatttaatatgttattctctttacttttgtgcatatttgatactttccataataaaatgatttttkggattttttaaaaagaaaatgttttagtgaacatacttgattgctaatttctttctttattcctggaatatcagaactatatcttgtatattactattgt

SEQ ID NO: 201941 - DNA, 201 bp, Homo sapiens
caacctccacctcctgggttcaagcgattctcctgcctcagcctccagagtagctgggactacaggtgcgtgccaccacgccctgctgtgtttttttttttgtatttttagtagatacagggttttaccatattggccaggctggtcttgaactcctgacctcgtgatccacctgcctcagccccccaaaggctgggattc

SEQ ID NO: 201942 - DNA, 201 bp, Homo sapiens
ttcaggtgtaaaagctttattctacttttattaatgaatttaggttgctttagctgctaataatgctgttgtttgcttctttctgttgtttttttttttttgagacggagtctcgctcgtcgcccaggctggagtgcagtggcgtgatctcagctcactgcaagctccgtctcccgggttcacaccattctctggcctcag

SEQ ID NO: 201943 - DNA, 201 bp, Homo sapiens
tgccttggcctcccaaaatgttaggattacaggcgtgagccactgtgcttggcctctatggcactttaatttgacattgacctttatcttttaattaagtattatttacttttgtttttattctccagcatttatataaaatttttgaggcatatggaaaaattgtaggcattgaacagtgaacacccatatacccacaac

SEQ ID NO: 201944 - DNA, 201 bp, Homo sapiens
ttgccttggcctcccaaaatgttaggattacaggcgtgagccactgtgcttggcctctatggcactttaatttgacattgacctttatcttttaattaagtattatttacttttgtttttattctccagcatttatataaaatttttgaggcatatggaaaaattgtaggcattgaacagtgaacacccatatacccacaa

SEQ ID NO: 201945 - DNA, 201 bp, Homo sapiens
cttgccttggcctcccaaaatgttaggattacaggcgtgagccactgtgcttggcctctatggcactttaatttgacattgacctttatcttttaattaagtattatttacttttgtttttattctccagcatttatataaaatttttgaggcatatggaaaaattgtaggcattgaacagtgaacacccatatacccaca

SEQ ID NO: 201946 - DNA, 201 bp, Homo sapiens
gtgcagtggcgtgaacacacctcactgcagcctcaaacttctgggctcaaggggtcatcctgcctcagcctctcaagtagttggcagtacaggcatgtgcygtcatgcctggctagtttcttctcttttggtttgttttttttgtttttgaaacagagtctcgctctgtcacccgggctggagtgtagtggctcaatcatg

SEQ ID NO: 201947 - DNA, 201 bp, Homo sapiens
acttgccttggcctcccaaaatgttaggattacaggcgtgagccactgtgcttggcctctatggcactttaatttgacattgacctttatcttttaattaagtattatttacttttgtttttattctccagcatttatataaaatttttgaggcatatggaaaaattgtaggcattgaacagtgaacacccatatacccac

SEQ ID NO: 201948 - DNA, 201 bp, Homo sapiens; identical to SEQ ID NO: 35652

SEQ ID NO: 201949 - DNA, 201 bp, Homo sapiens
gaaaaccactaggggttagttacataattttgattttgaaaattctgaagtagagggtgttaaataaattggcccatttaacattacaatagcagctgatrcggacctctggctgtgggtcaggcaatgtgccaaatagttgtgtgcataatcatatttagttcttactcaaattctattagataaggaattcaaggctca

SEQ ID NO: 201950 - DNA, 201 bp, Homo sapiens
tgtgccgtcatgcctggctagtttcttctcttttggtttgttttttttgtttttgaaacagagtctcgctctgtcacccgggctggagtgtagtggctcartcatggctcattgcatccttgacttcccaagctcccaagtagctgggactacaagcacatgccaccatgctcggctaatttttatattttttgtagagat

SEQ ID NO: 201951 - DNA, 201 bp, Homo sapiens
ctaatgttcatctgcagtttatacataatttaataattagtcccttattttgaatatttaagtttaatatttattatttaaataacattgcaatcataatmtttgtgcataagctattagctttctattgcttaattttctttgacacatttctgaaaggatttcttctaaacatatattgaaaaccactaggggttagtt

SEQ ID NO: 201952 - DNA, 201 bp, Homo sapiens
gcttctagctccacttcacgcaacctttccctttcctgcctggaaaggtccttcctcccaggcttgagctccctcttcttcccagatcccttctttctcckggaggtttcctcccaccccagtctgtcttttcccgggctgagtgccttgttgtttggcggcagagacgcgactcctttctagactgagctgcgaggtgcc

SEQ ID NO: 201953 - DNA, 201 bp, Homo sapiens
gttgatctgatagccagcctggctgctaaattactaacagctggtagcatgcacagcatagatacactggacaaagggatgattcatgtcccaggcaggayggagtgggatgatgcaagatttcatcgggctgctacagaatggcgtgcagtttaaaacttatgaattgtttatttgtagaattttccattaaatattttt

SEQ ID NO: 201954 - DNA, 201 bp, Homo sapiens
aaatacacacaaggtattgcccacccaagaagttcacctaaactttagtgtgtctggagtttgtgttttgttttttaaagagatggggtctcactatattscctacgctggattcaaactcctggctcaaatgatcttcttacctcagcagagttttcattgagatttattgattgtttgcatggttgaactcagtttcca

SEQ ID NO: 201955 - DNA, 201 bp, Homo sapiens
gtggctcattcctgtaatcccaacactttgggaggctgaggcaggcagattgcttgagtcttggagttcgagaccagactgggcaacatggcaaggccccrtctctacaaaacttagttcagctactcaggaggctgagatgggaggactgcttgagcccaggaggttgaggttgcagtgaaccatgatcatgtcactgca

SEQ ID NO: 201956 - DNA, 201 bp, Homo sapiens
tagtataaactagtttagtcaactagcttttctaataactaactgagatatatcaaggtaatgagattttgaaaggcgatcaaggaaaaagcaaaatatcrttttaaagcataagttgttgatgaacacaaagctttaagtgggagctggcagcttcaggaaggaatctggcaggaagaagaccaagatagcccagagagt

SEQ ID NO: 201957 - DNA, 201 bp, Homo sapiens
atatgcacacaaagatatatactactacatataatacactaacatcacattttaaagtaattattaatgcctttgtaaaatatttattattattattattwttttttttgagatggagtcttgctctgtcacccaggctggagtgcagtggcgcgatctcggctcactgcaagctccgcctcccgagttcatgccattttc

SEQ ID NO: 201958 - DNA, 201 bp, Homo sapiens
catgtaggcctgtctcttttttttttttttttttgagatggagtctcactctgttgcccaggctggagtgcagtggtgccatctcggctcactgcaacctycacctccccagttcaagcgattctcctgcctcagcctccccagtagctgggattacaggtgcccgccaccacgcccatctaatttttgtatttttagtag

SEQ ID NO: 201959 - DNA, 201 bp, Homo sapiens
ttcaccatgttgcccaggctggtcttgaacttctgagctcaagtgatctgaccgccttgggctcctaaagtgctgaatgctgggactacaagcgtgagccmctgtgcctggctcatatcataattatataatttttcaactctttcctatgtaacatggctataaatacttggaacagtgattattttattttataagaat

SEQ ID NO: 201960 - DNA, 201 bp, Homo sapiens
ttagttacatatgtatacatgtgccatgctggtgtgctgcacccattaactcgtcatttagcattaggtatatctcctaatgctatctctcccccctcccsccaccccacaacagtcctcagagtgtgatgttccctgggaatgagatttctgttgtgaaccccaaacccagaactgcaggaactagtcctttggtagatt

SEQ ID NO: 201961 - DNA, 201 bp, Homo sapiens
ttcagttctgttaattgattgaagaaagctttttaaaaatcattttaggccaggtgcggtggctcacacctgtaatcccagcactttgggaggctgaggcrggcgaatcacgaggtcaggagttcaagaccagcttggccaacatggtgaaaccccatctctactaaaaatacaaaaaataactgggcgtggtggcacatg

SEQ ID NO: 201962 - DNA, 201 bp, Homo sapiens
tttctgctcaactctgcatttggtgagagcagatactgtcctatttttaactgtgtccccagcacgtggcatatatgctcaatatcttctgaagtaataaygaagaccttttattagtgtctcagagaagtccgtaactccaaaaaggttaagaattactttattaacagcaaaactttcctctttatccacttgtatagg

SEQ ID NO: 201963 - DNA, 201 bp, Homo sapiens
ttaagttttagggtacatgtgcacaatgtgcaggttagttacatatgtatacatgtgccatgctggtgtgctgcacccattaactcgtcatttagcattargtatatctcctaatgctatctctcccccctcccgccaccccacaacagtcctcagagtgtgatgttccctgggaatgagatttctgttgtgaaccccaaa

SEQ ID NO: 201964 - DNA, 201 bp, Homo sapiens
cctctgccagtgagggcaaagggccagtgtgacagcctttttgggttcctgcacccagtggtcctgaaatcttgtccaatgcccaagaggaatgaggtcayacagacttgaaggatggtgaatgcagagattttattgagcaatggaagtggctcttagtgtgctggggtgctggaaaggggatggagtgggaaagtggtc

SEQ ID NO: 201965 - DNA, 201 bp, Homo sapiens
attttatcaagaagcctaattttgtaggctttggttgtctcattctgccaccagaaagtaaatttcttgaaggcaggcactatagaattttcattctagcrcaatttttgacagtttttatgcatttttgaaatttttattgaataaataagttagttgagcaaatatttattgcatttattgagggcttactctgttcca

SEQ ID NO: 201966 - DNA, 201 bp, Homo sapiens
caggagaattgcttgaacccgggaggcagaggttgcagtgagccgagattgcaccactgcactccagcctgggcaacagagcgagactccatctcaaaaaraaaaaaaaaagaaaaaaaaagagtgtatgggtacagatgcacatattttagtatatatttagtatgatgagagcttacgtgagttataatttctattttt

SEQ ID NO: 201967 - DNA, 201 bp, Homo sapiens
ggggtggcttgctttcttagcgtgcagctctgagcccttcatgggagtgggagcatgcaggtgagcagttgcaggagccagggcaaacaaatgctggaacsagccggccacttctctccagtgggagcaggtcctgtgcaggccccacagcaggatccaagtgtgttacaatgctcttttagctctgccatctggagggag

SEQ ID NO: 201968 - DNA, 201 bp, Homo sapiens
gttcactgcaatcttgaactcccaggttcaattcttctgcctcagcctcccagagtagctagatgtaccacacctggctaatttatatatatatatatatwtatatatatatatatatatatatatatagtagaaccaggatctctttatgttgcccatgctggtcttgaactcctggcctctagtgattttcctgcctca

SEQ ID NO: 201969 - DNA, 201 bp, Homo sapiens; identical to SEQ ID NO: 35655

SEQ ID NO: 201970 - DNA, 201 bp, Homo sapiens
gctactcgggaggctgaggcaggagaattgcttgaacccgggaggcagaggttgcagtgagccgagattgcaccactgcactccagcctgggcaacagagygagactccatctcaaaaagaaaaaaaaaagaaaaaaaaagagtgtatgggtacagatgcacatattttagtatatatttagtatgatgagagcttacgtg

SEQ ID NO: 201971 - DNA, 201 bp, Homo sapiens
acttactgctaatgctgttgctcttctggatagaaatgcttctatcctatgagaaaatgtataattcattactagaatatacttgtatccttgtgatggtrgtagctgaataaaatataattgtcctaccttgaaggggctttcaggtagaggaaaatgaccttgattgctatgtaaaggtttccctggattatattttgg

SEQ ID NO: 201972 - DNA, 201 bp, Homo sapiens
tggaaaaacttgttctttccctcactgaattgtcctggcactcgaatttttagaagaataatataacttttatttatttatttatttatttatttatttawttattttgagacagagtctcactctgttgcccaggcaagagtgcagtggtataatcatagttcactgcaatcttgaactcccaggttcaattcttctgcc

SEQ ID NO: 201973 - DNA, 201 bp, Homo sapiens
tggcaaaggaattttaagagcctcagttaattttgccaatttagttttgattattctgtttgtgtgttccactaacccagattactggggagcaatatgcrtaatggaaatgttggaaaataggttagattttatatattgactggattatttgtctggtaagatgagtacccctgttgctatgaagttctagaggaactc

SEQ ID NO: 201974 - DNA, 201 bp, Homo sapiens
ttggaaaaacttgttctttccctcactgaattgtcctggcactcgaatttttagaagaataatataacttttatttatttatttatttatttatttatttatttattttgagacagagtctcactctgttgcccaggcaagagtgcagtggtataatcatagttcactgcaatcttgaactcccaggttcaattcttctgc

SEQ ID NO: 201975 - DNA, 201 bp, Homo sapiens
aaattataacaatgagtgttttttaaaaggcaagtgcaactaaaactactgtgacttcacttgcaacaatcttaactcaggtttttgttttttttttttttgagatggagtcttggtgtgtcacccaggatggagtgcagtggtgtgatcttggctcactgcaaagtctgcctcccaggttcaagtgattttcctgcctca

SEQ ID NO: 201976 - DNA, 201 bp, Homo sapiens
tctggtcttatactaggattaagtgtttactaaaaatagaacggggtaacattgccaaacgtgtagcccataggcatttgtaaacttgctctcttattaarataattcatgctttaaacactggttggccatgaattgaagatgtaaagatgaggatttaataggtagtttttttctggaatagatgatatgctttttttc

SEQ ID NO: 201977 - DNA, 201 bp, Homo sapiens
agaagagtcttaaaatcttccgccctgtagtttgttttatttggctattagaacagtgtcttctaaattgtaaaatatctttctctctcttttttttttttcctctgatcgtttctctcatcattctacctgatgccaagctgtgtggggattttagaacttgaagactgcctaaactgttcccatttcaactatgcttaa

SEQ ID NO: 201978 - DNA, 201 bp, Homo sapiens
aatgaacatttttctttctttctttttttttttttttttgagacagggtctcgctctgtcaccaagctggagtgcagtgacacgatctcggctcactgcawcttccaacttcctggttcaagtgattcttttgcctcagcctcccgagtagctgggattacaggcacgcatcaccatgcccagctaatttttgtgttttta

SEQ ID NO: 201979 - DNA, 201 bp, Homo sapiens
atgaacatttttctttctttctttttttttttttttttgagacagggtctcgctctgtcaccaagctggagtgcagtgacacgatctcggctcactgcaayttccaacttcctggttcaagtgattcttttgcctcagcctcccgagtagctgggattacaggcacgcatcaccatgcccagctaatttttgtgtttttag

SEQ ID NO: 201980 - DNA, 201 bp, Homo sapiens
gaacctccgaaatgatgtgtctttttgtatgataatgagacgaatgatggctggtggctcctagttagcctcaggatgggggtgctggttgccaggagaayggaccatgtgattaaaagattgaaactttcagtcatacttccttcaacccctacatccaggaaagggagaggagctgaaggttgagttggtaaccagtgg

SEQ ID NO: 201981 - DNA, 201 bp, Homo sapiens
atgtatattttcactgaatactctggtgtatagctctgagaaagactagttcattactacctagcgtagtttaagaaagaaaaagaaccaaaagaataatytcctggttagaagtatgaaagataatttttttcctggtgacttgattccataatgatttataagatcactatagaaacattaccattgttgtcttttatg

SEQ ID NO: 201982 - DNA, 201 bp, Homo sapiens
taattgaataccatcagactctgttataatcaggacagctcagaagaagagaactaaattagagagaaacccagaatggaaaataagggagagtttaatgmttagaataaagagttagaaaagaggaggtgggctataggaatctttaataagaagattatagggctgggtgcagtggctcatgactgtaatcccaacact

SEQ ID NO: 201983 - DNA, 201 bp, Homo sapiens
cagggcactcctattcttccttttctttggactgttttcattctttccattttaattttctacaatcctttttgaaatgtccaggctttttttttttttttgcagtcattgcaatgcaggagattgggtcagttttggagtttaaaaaggctttttaggggttttaattggttggacaattgttttaattgtaaactcata

SEQ ID NO: 201984 - DNA, 201 bp, Homo sapiens
tgctcctctgtaagtaaggtgttttatttttctggcttctttcaagatttcattctttatccttgattttctatagtttaaaatgatattcctaggtacarggtttttgtttttgttttttgacatttattcttcttggtgttctctgagatttctgggtctgtgatttggtgccaagacattaccttggggaaattctta

SEQ ID NO: 201985 - DNA, 201 bp, Homo sapiens
ttccaattatctttatgatactcatttctagtttaattctgctgtgatctgaataagacattgtataatttttattcatttaaatttcttaatgcatgttttatggcccagaatgtggtctatctggatgaatgttccctatgagtttgagaagaatgtgtattctgctgttggatgaagtagtctgtagatgtaaattat

SEQ ID NO: 201986 - DNA, 201 bp, Homo sapiens
caattatctttatgatactcatttctagtttaattctgctgtgatctgaataagacattgtataatttttattcatttaaatttcttaatgcatgttttawggcccagaatgtggtctatctggatgaatgttccctatgagtttgagaagaatgtgtattctgctgttggatgaagtagtctgtagatgtaaattatatt

SEQ ID NO: 201987 - DNA, 201 bp, Homo sapiens
gaatcgcttgaacccaggaggcgaaggctgcagtgagccaggatcgcgccaccgtactccagactgggagacacgatgagactccatctaaaaaaaaaaaagaaagaagtgaattgttttatctccacatatttggggattttccaattatctttatgatactcatttctagtttaattctgctgtgatctgaataagaca

SEQ ID NO: 201988 - DNA, 201 bp, Homo sapiens
agtctcatagaatgagttaagttagccactgcacccagcctatttcccttttttaatttttaatttttgtgggttaataggtgcactaattaattaatagrtgtattaatttttattaatagaatgagtaatggtagtctcagagaatgacttctatcttctgaaagagactgtagagaaatagtataatttatgccttaa

SEQ ID NO: 201989 - DNA, 201 bp, Homo sapiens
ttgatttctttcaacagagttttgtagttttccttatattagatctcatacatattttgttagatttatacctacatgtttcattttggggggtgctaatrtaaatggtgttgtagttttaatttcacattccccacttattcattgctggtgaccaacatggagaaaccccatctctactaaaaatacaaaaaaaaaaaa

SEQ ID NO: 201990 - DNA, 201 bp, Homo sapiens
agctgctctatttggaaaggaacatataatgaaccatataatcagtttttctattatgttttacatttttttctttttcttttttttttttttttttttttgagacagagtcttgctctgtcacccaggctggagggcagtggcgtgatctcagttcactgcaacctgcacctccccggttcaaatgattttcatgtctca

SEQ ID NO: 201991 - DNA, 201 bp, Homo sapiens
cctgtgaagagccactgcactccagcccgggcaacatagtgagaccccatttttaaattaaacaagtaaaatatattgattatcaaatataaaataaaagygttctctcagattgagaccttacaaatgaatagcaaaaattagtgcctcaatgttgttcaaaccagctaattaaacatcacaatggaaaaatctgttaag

SEQ ID NO: 201992 - DNA, 201 bp, Homo sapiens
tctcactattcagctcccagcttggatgttatcctatctcagaaacctttcccagctctcttaaatactcattgagtatgatctcatatccctgtgtacaygccttgtataatatttttcacattttgtgttaattctttaccaggattctttaaactgtgagctccataatggcaaggaccttttctcatttacctctgt

SEQ ID NO: 201993 - DNA, 201 bp, Homo sapiens
tgaacctgggaggcagagattgcaatgagccaagattgcaccactgcactccagtctaggcaacagagcaagagtctctctcaaaaaaaaaaaaaaaaaaaggttctatataaattttattccctctgcctggagtattctctcctaacttcccactacgacataactgagtctttttcatcctttaaggtatggcattcc

SEQ ID NO: 201994 - DNA, 201 bp, Homo sapiens
tgaacccgggaggcggagcttgcagtgagccgagatcccgccactgcactccagcctgggcgacagagcgagactccgtctcaaaaaaaaaaaaaaaaaaatttgttttggtaactagctattttgaggttaaacttaaaacaaaattcatgttgatccatgtagatctagttctttcattgtagctactgtatatcattc

SEQ ID NO: 201995 - DNA, 201 bp, Homo sapiens
ttctagcactctgtagaatagaagtagacaagcaggcaaccttgccttgttcctgatcttagaggaaaagcttttcgtcttttcatcattgaatatagtgstttttgtgggtttttcatatatgacttttattacagtgaggtagtttccttctattcttagtttttttagtgtttttatcattaaagtttttttgaattt

SEQ ID NO: 201996 - DNA, 201 bp, Homo sapiens
gtggatcacctgaggtcaggagttcaggaccagcctggccaacatagtgaaaccccatctctactaaaaatacaaaaattaaaaaaaaaaaaaaaaaaaaagaaagaaagaaagaaaaaagccgggcgcggtggctcacatctgtaatcccagcactttaggaggccaagacgggcggatcacctgaggtcgggagttcga

SEQ ID NO: 201997 - DNA, 201 bp, Homo sapiens
cataggataatcttctcgttcccagagggggaaaccaggaggcacatagagatcactgatctagagcaattctctttttatgttttctccctatatgcttrtcttagtctgctttgaattgctataaaggaatacctgaagctgggtaaattataatgaaaagaggtttatttggctcacagttctgcaggctatacaaga

SEQ ID NO: 201998 - DNA, 201 bp, Homo sapiens
ctctcccccgcacccgcgcctgccgccgctgaaagcgcccccgctgctcggacccgggcggtcggctgagagctgcccacgcccgcctcggcccccacgcstcggcccctcctacccggccttgaagccgctctcctgagccccggcgccctcccgccgggcccgggcccctcatcccctttcacctcggcccccagcttc

SEQ ID NO: 201999 - DNA, 201 bp, Homo sapiens
gaagaataaagctcaatagaaaataatatttaaagattttttaaaggaaactattcagaaacaaatgcagacttgaggccaggtgtggtggcttaagcctstaatcccagcactttgggaggctgaggtgggtggatcacctgaggtcaggagttcaggaccagcctggccaacatagtgaaaccccatctctactaaaaa

SEQ ID NO: 202000 - DNA, 201 bp, Homo sapiens
tggatatccaatttttccagcaccatttgaccattttgttaaacagaaagttattttcctttttcctgttttttttttttttttttttttttttagacagycttgctctgttgcccaggcttgagtgtgatctgcccacctcggtctcccaaagtgttgggattacaagtgtgagccacactcctggcctttttttttttt

SEQ ID NO: 202001 - DNA, 201 bp, Homo sapiens
agttcaagaccagcctgggcaacatgggaaaaccccacctctacaataaattaaatgtatatatacacacacacacacacacacacacacacacacacacmgacacacacacacatatacatacaaaaaattagctggatgtggttgcacacgcctgtagtcctagctactctggaggctgaggcaggaggatcacttgag

SEQ ID NO: 202002 - DNA, 201 bp, Homo sapiens
gcgcatcagcatggcacatgtatacatatgtaactaacctgcacattgtgcacatgtaccctaaaacttaaagtataataataaaaaaaaagaaaaaaaaagatttgagtatcttaaaaagatactcaattctgcctgatgcagtggctctctgtaatcccagttactcaggaggttgaggtgggaggatcccttgagccc

SEQ ID NO: 202003 - DNA, 201 bp, Homo sapiens
gcaaataaataaccaggaataaagtgattaagaaatatgaaggacttattaaaactctattgagcaacataaaaaggatttaaatttaaaaaacaatatarttttttcctggaaaagactcaatatgaaacgatatatattttttccaaatctataaatttaatgtgatcccaaacacaatagcaacaggtttttctgccc

SEQ ID NO: 202004 - DNA, 201 bp, Homo sapiens
ttacctgtctctaaagaatgtttcatttgctgtttcttgttttttaaattatagacagtaactctttgttttttattctagaagataaagatttaacaatyttatacaactcctgctaccacttactttcccccactaactcccagtataatcataccacaacttcaggcaaaataatgtttacattgtttgaattatgta

SEQ ID NO: 202005 - DNA, 201 bp, Homo sapiens
gcctgacctcaagtgatccacctgcttcagcctctcataatgctgggattacaagcgtgagccactgtggccggcccgccatagccatatttctaattacrttttttgtttcttgaatatacaagaagtactataactgtattaatctatgcttgcattgctataaagaaatacctgagactgggtaatttataaacaaaa

SEQ ID NO: 202006 - DNA, 201 bp, Homo sapiens
tttctctctcttcctctcttttctctttctatacattggaaccacaatggcaaaggaagcaactatttttaattctttttgtttgtttgtttgtttttttragatggagtttcactcttgtttcccaggctggagtgcaatgccgcgatctcgcctcaccacaacctctgcctcctaggttcaagtgattctcctgcctca

SEQ ID NO: 202007 - DNA, 201 bp, Homo sapiens
acttccatcctcttagggtcccagctgggtctgagaattaaattgacataagacattaacaggagaaaaacatacaaatgtatttaatacaaatttcacayggcatgggagccctcgtaaggaactgaagacccaaagaagcagttacagtcaatcactggtatactgaattggacaaaaaagtagctgtgaaaaagcagc

SEQ ID NO: 202008 - DNA, 201 bp, Homo sapiens
acccctggcaaccactgatctgttttccattaccatacttttgttactttgagactgttatgtaagtggaatcatctagtatgtgaccttttgaaacccartagtttttcaacagttacctcaccgcacccccacagaagtctttagtttctattgttgccgtttttatgtccatgagtaccccatgtttagctcccactt

SEQ ID NO: 202009 - DNA, 201 bp, Homo sapiens
ttcccctttttatcaagatcgtttgaagaaaccatcataggtgaactcaaatggttttggcttcttttattttcaggagctcagtcttccattgctaggarggcttattactagagagtcatgtcccatggcaaggagaatttgtcagactgtaaagcaaatagagtataggccacatttagaggaaggaggtgactttgt

SEQ ID NO: 202010 - DNA, 201 bp, Homo sapiens
tactacttctatatatagagagagagacctgaaacatacaatgattttgttttgtttttaattagatcaattggtgctcctttttaaaaataatctggagygtaggttgagaattaagatgttctgcataataacgtaacatgaaattttaaactttaattttgaaatatttttagagtcatgtagaagttgcaaaaatag

SEQ ID NO: 202011 - DNA, 201 bp, Homo sapiens
tgggtgacagagcaagatcctgtctaaaaaaaataaaaataaaactgtagaacaaggccgggcacagtggctcacacctgtaatcctagcactttgggagkccgaggcaagcggattgcttgcgcccaggaatttgagacaagcctgggcaacatggtgaaaccctgtgtctaaaatatatatgtatgcaaaaattagctg

SEQ ID NO: 202012 - DNA, 201 bp, Homo sapiens
caccttggcctcccaaagtactgggactacaggcatgggagccacagtgcccagcctgagaaaaacaaattctaatagagggccatcctgtagtatacctraccagaactctttaaactgtcaagatcctcaaaaagagaaagtctgagaaacaatcacagctaagagacacctaaggagacgcgacaagtaaacgtaata

SEQ ID NO: 202013 - DNA, 201 bp, Homo sapiens; identical to SEQ ID NO: 35651

SEQ ID NO: 202014 - DNA, 201 bp, Homo sapiens
gagttcaagaccagcctgggcaacatgggaaaaccccacctctacaataaattaaatgtatatatacacacacacacacacacacacacacacacacacacagacacacacacacatatacatacaaaaaattagctggatgtggttgcacacgcctgtagtcctagctactctggaggctgaggcaggaggatcacttga
